(19) United States
(12) Patent Application Publication
(10) Pub. No.: US 2009/0123928 A1
(43) Pub. Date: May 14, 2009

(54) Genomic Landscapes of Human Breast and Colorectal Cancers

(75) Inventors: Laura D. Wood, Baltimore, MD (US); Williams D. Parsons, Ellicott City, MD (US); Sian Jones, Baltimore, MD (US); Jimmy Lin, Baltimore, MD (US); Tobias Sjoblom, Uppsala (SE); Thomas Barber, Noblesville, IN (US); Giovanni Parmigiani, Baltimore, MD (US); Victor Velculescu, Dayton, MD (US); Kenneth W. Kinzler, Bel Air, MD (US); Bert Vogelstein, Baltimore, MD (US)

Correspondence Address: BANNER & WITCOFF, LTD., 1100 13th STREET, N.W., SUITE 1200, WASHINGTON, DC, 20005-4051, US

(73) Assignee: The Johns Hopkins University, Baltimore, MD (US)

(21) Appl. No.: 12/247,464

(22) Filed: Oct. 8, 2008

Related U.S. Application Data
(60) Provisional application No. 60/960,733, filed on Oct. 11, 2007.

(51) Int. Cl. C12Q 1/68; C12Q 1/02

(52) U.S. Cl. 435/6; 435/29

(57) ABSTRACT

Human cancer is caused by the accumulation of mutations in oncogenes and tumor suppressor genes. To catalogue the genetic changes that occur during tumorigenesis, we isolated DNA from 11 breast and 11 colorectal tumors and determined the sequences of the genes in the Reference Sequence database in these samples. Based on analysis of exons representing 20,857 transcripts from 18,191 genes, we conclude that the genomic landscapes of breast and colorectal cancers are composed of a handful of commonly mutated gene “mountains” and a much larger number of gene “hills” that are mutated at low frequency. We describe statistical and bioinformatic tools that may help identify mutations with a role in tumorigenesis. These results have implications for understanding the nature and heterogeneity of human cancers and for using personal genomics for tumor diagnosis and therapy.

[0001] This invention was made using grant funds from the U.S. government. Under the term of the grants, the U.S. government retains certain rights in the invention. Grants used include NIH grants CA 43460, CA 57345, CA 12113, and CA 62924.

[0002] A sequence listing is provided on a single compact disc. The compact disc contains a file named templst.txt. The file is 22695 kb and was created Oct. 3, 2008. The content of the compact disc is incorporated herein.

### TECHNICAL FIELD OF THE INVENTION

[0003] This invention is related to the area of cancer characterization. In particular, it relates to breast and colorectal cancers.

### BACKGROUND OF THE INVENTION

[0004] Discovery of the genes mutated in human cancer has provided key insights into the mechanisms underlying tumorigenesis and has proven useful for the design of a new generation of targeted approaches for clinical intervention (1). With the determination of the human genome sequence and improvements in sequencing and bioinformatic technologies, systematic analyses of genetic alterations in human cancers have become possible (2-4).

[0005] Using such large-scale approaches, we recently studied the genomes of breast and colorectal cancers by determining the sequence of the Consensus Coding Sequence (CCDS) genes, a collection of the best annotated protein coding genes (5). In the current study, we have extended these analyses to include examination of all of the Reference Sequence (RefSeq) genes. The RefSeq database is a comprehensive, non-redundant collection of annotated gene sequences that represents a consolidation of gene information from all major gene databases (6). The RefSeq database is believed to include the great majority of human gene sequences and represents the gold standard in the field.

[0006] There is a continuing need in the art to identify genes and patterns of gene mutations useful for identifying and stratifying individual patients' cancers.

### SUMMARY OF THE INVENTION

[0007] According to one embodiment of the invention a method is provided for diagnosing breast cancer in a human. A somatic mutation in a gene or its encoded cDNA or protein is determined in a test sample relative to a normal sample of the human. The gene is selected from the group consisting of those listed in FIG. 10 (Table S4B) The sample is identified as breast cancer when the somatic mutation is determined.

[0008] A method is provided for diagnosing colorectal cancer in a human. A somatic mutation in a gene or its encoded cDNA or protein is determined in a test sample relative to a normal sample of the human. The gene is selected from the group consisting of those listed in FIG. 9 (Table S4A). The sample is identified as colorectal cancer if the somatic mutation is determined.

[0009] A method is provided for stratifying breast cancers for testing candidate or known anti-cancer therapeutics. A CAN-gene mutational signature for a breast cancer is determined by determining at least one somatic mutation in a test sample relative to a normal sample of a human. The at least one somatic mutation is in one or more genes selected from the group consisting of FIG. 10 (Table S4B) A first group of breast cancers that have the CAN-gene mutational signature is formed. Efficacy of a candidate or known anti-cancer therapeutic on the first group is compared to efficacy on a second group of breast cancers that has a different CAN-gene mutational signature. A CAN gene mutational signature which correlates with increased or decreased efficacy of the candidate or known anti-cancer therapeutic relative to other groups is identified.

[0010] A method is provided for stratifying colorectal cancers for testing candidate or known anti-cancer therapeutics. A CAN-gene mutational signature for a colorectal cancer is determined by determining at least one somatic mutation in a test sample relative to a normal sample of the human. The at least one somatic mutation is in one or more genes selected from the group consisting of FIG. 9 (Table S4A). A first group of colorectal cancers that have the CAN-gene mutational signature is formed. Efficacy of a candidate or known anti-cancer therapeutic on the first group is compared to efficacy on a second group of colorectal cancers that has a different CAN-gene mutational signature. A CAN gene mutational signature is identified which correlates with increased or decreased efficacy of the candidate or known anti-cancer therapeutic relative to other groups.

[0011] A method is provided for characterizing a breast cancer in a human. A somatic mutation in a gene or its encoded cDNA or protein is determined in a test sample relative to a normal sample of the human. The gene is selected from the group consisting of those listed in FIG. 10 (Table S4B)

[0012] Another method provided is for characterizing a colorectal cancer in a human. A somatic mutation in a gene or its encoded cDNA or protein is determined in a test sample relative to a normal sample of the human. The gene is selected from the group consisting of those listed in FIG. 9 (Table S4A).

[0013] These and other embodiments which will be apparent to those of skill in the art upon reading the specification provide the art with additional methods and tools for better managing cancer treatment.

### BRIEF DESCRIPTION OF THE DRAWINGS

[0014] FIG. 1 Clustering of somatic mutations in protein structures. Individual somatic mutations were mapped onto structural homology models based on known crystal structure information. Homology models were built with MODPIPE (33) and graphics were created with UCSF Chimera software (34). Yellow spheres indicate mutated residues. (A) Two somatic mutations in the glycosylation enzyme GALNT5 occur in residues on different sides of the enzyme active site. Stick models indicate enzyme substrates. (B) Three somatic mutations in the transglutaminase TGM3 located at nearby surface regions of the protein (two mutations are present at the same residue on the right-hand side).

[0015] FIG. 2. PI3K pathway mutations in breast and colorectal cancers. The identities and relationships of genes that function in PI3K signaling are indicated. Circled genes have somatic mutations in colorectal (red) and breast (blue) cancers. The number of tumors with somatic mutations in each mutated protein is indicated by the number adjacent to the circle. Asterisks indicate proteins with mutated isoforms that may play similar roles in the cell. These include insulin receptor substrates IRS2 and IRS4; phosphatidylinositol 3-kinase regulatory subunits PIK3R1, PIK3R4, and PIK3R5; and nuclear factor kappa-B regulators NFKB1, NFKBIA, and NFKBIE.

[0016] FIG. 3. Cancer genome landscapes. Non-silent somatic mutations are plotted in two-dimensional space representing chromosomal positions of RefSeq genes. The telomere of the short arm of chromosome 1 is represented in the rear left corner of the green plane and ascending chromosomal positions continue in the direction of the arrow. Chromosomal positions that follow the front edge of the plane are continued at the back edge of the plane of the adjacent row and chromosomes are appended end to end. Peaks indicate the 60 highest-ranking CAN-genes for each tumor type, with peak heights reflecting CaMP scores (7). The dots represent genes that were somatically mutated in the individual colorectal (M×38) or breast tumor (B3C) displayed. The dots corresponding to mutated genes that coincided with hills or mountains are black with white rims; the remaining dots are white with red rims. The mountain on the right of both landscapes represents TP53 (chromosome 17), and the other mountain shared by both breast and colorectal cancers is PIK3CA (upper left, chromosome 3).

[0017] FIG. 4. (FIG. S1.) Schematic of the experimental and bioinformatic approaches used in the study

[0018] FIG. 5. Table 1. Summary of somatic mutations

[0019] FIG. 6. Table S1. Primers used for PCR amplification and sequencing

[0020] FIG. 7. Table S2. Distribution of somatic mutations in individual tumors

[0021] FIG. 8. Table S3. Somatic mutations discovered in RefSeq genes

[0022] FIG. 9 (Table S4A) Colorectal CAN-genes

[0023] FIG. 10 (Table S4B) Breast CAN-genes

[0024] FIG. 11. Table S5. Summary of mutation prevalence study

[0025] FIG. 12. Table S6A. Gene groups and pathways preferentially mutated in colorectal cancers

[0026] FIG. 13. Table S6B. Gene groups and pathways preferentially mutated in breast cancers

### DETAILED DESCRIPTION OF THE INVENTION

[0027] The inventors have developed methods for characterizing breast and colorectal cancers on the basis of gene signatures. These signatures comprise one or more genes which are mutated in a particular cancer. The signatures can be used as a means of diagnosis, prognosis, identification of metastasis, stratification for drug studies, and for assigning an appropriate treatment.

[0028] According to the present invention a mutation, typically a somatic mutation, can be determined by testing either a gene, its mRNA (or derived cDNA), or its encoded protein. Any method known in the art for determining a somatic mutation can be used. The method may involve sequence determination of all or part of a gene, cDNA, or protein. The method may involve mutation-specific reagents such as probes, primers, or antibodies. The method may be based on amplification, hybridization, antibody-antigen reactions, primer extension, etc. Any technique or method known in the art for determining a sequence-based feature may be used.

[0029] Samples for testing may be tissue samples from breast or colorectal tissue or body fluids or products that contain sloughed off cells or genes or mRNA or proteins. Such fluids or products include breast milk, stool, breast discharge, intestinal fluid. Preferably the same type of tissue or fluid is used for the test sample and the normal sample. The test sample is, however, suspected of possible neoplastic abnormality, while the normal sample is not suspect.

[0030] Somatic mutations are determined by finding a difference between a test sample and a normal sample of a human. This criterion eliminates the possibility of germ-line differences confounding the analysis. For breast cancer, the gene (or cDNA or protein) to be tested is any of those shown in FIG. 10. Table S4B. Any somatic mutation may be informative. Particular mutations which may be used are shown in FIG. 8 (Table S3). For colon cancer, the gene (or cDNA or protein) to be tested is any of those shown in FIG. 9. Table S4A. Any somatic mutation may be informative. Particular mutations which may be used are shown in FIG. 8 (Table S3).

[0031] The number of genes or mutations that may be useful in forming a signature of a breast or colorectal cancer may vary from one to twenty-five. At least two, three, four, five, six, seven, ten, fifteen, twenty, or more genes may be used. The mutations are typically somatic mutations and non-synonymous mutations. Those mutations described here are within coding regions. Other non-coding region mutations may also be found and may be informative.

[0032] In order to test candidate or already-identified therapeutic agents to determine which patients and tumors will be sensitive to the agents, stratification on the basis of signatures can be used. One or more groups with a similar mutation signature will be formed and the effect of the therapeutic agent on the group will be compared to the effect of patients whose tumors do not share the signature of the group formed. The group of patients who do not share the signature may share a different signature or they may be a mixed population of tumor-bearing patients whose tumors bear a variety of signatures.

[0033] Efficacy can be determined by any of the standard means known in the art. Any index of efficacy can be used. The index may be life span, disease free remission period, tumor shrinkage, tumor growth arrest, improvement of quality of life, decreased side effects, decreased pain, etc. Any useful measure of patient health and well-being can be used. In addition, in vitro testing may be done on tumor cells that have particular signatures. Tumor cells with particular signatures can also be tested in animal models.

[0034] Once a signature has been correlated with sensitivity or resistance to a particular therapeutic regimen, that signature can be used for prescribing a treatment to a patient. Thus determining a signature is useful for making therapeutic decisions. The signature can also be combined with other physical or biochemical findings regarding the patient to arrive at a therapeutic decision. A signature need not be the sole basis for making a therapeutic decision.

[0035] An anti-cancer agent associated with a signature may be, for example, docetaxel, paclitaxel, topotecan, adriamycin, etoposide, fluorouracil (5-FU), or cyclophosphamide. The agent may be an alkylating agent (e.g., nitrogen mustards), antimetabolites (e.g., pyrimidine analogs), radioactive isotopes (e.g., phosphorous and iodine), miscellaneous agents (e.g., substituted ureas) and natural products (e.g., vinca alkyloids and antibiotics). The therapeutic agent may be allopurinol sodium, dolasetron mesylate, pamidronate disodium, etidronate, fluconazole, epoetin alfa, levamisole HCL, amifostine, granisetron HCL, leucovorin calcium, sargramostim, dronabinol, mesna, filgrastim, pilocarpine HCL, octreotide acetate, dexrazoxane, ondansetron HCL, ondansetron, busulfan, carboplatin, cisplatin, thiotepa, melphalan HCL, melphalan, cyclophosphamide, ifosfamide, chlorambucil, mechlorethamine HCL, carmustine, lomustine, polifeprosan 20 with carmustine implant, streptozocin, doxorubicin HCL, bleomycin sulfate, daunirubicin HCL, dactinomycin, daunorucbicin citrate, idarubicin HCL, plimycin, mitomycin, pentostatin, mitoxantrone, valrubicin, cytarabine, fludarabine phosphate, floxuridine, cladribine, methotrexate, mercaptipurine, thioguanine, capecitabine, methyltestosterone, nilutamide, testolactone, bicalutamide, flutamide, anastrozole, toremifene citrate, estramustine phosphate sodium, ethinyl estradiol, estradiol, esterified estrogens, conjugated estrogens, leuprolide acetate, goserelin acetate, medroxyprogesterone acetate, megestrol acetate, levamisole HCL, aldesleukin, irinotecan HCL, dacarbazine, asparaginase, etoposide phosphate, gemcitabine HCL, altretamine, topotecan HCL, hydroxyurea, interferon alpha-2b, mitotane, procarbazine HCL, vinorelbine tartrate, E. coli L-asparaginase, Erwinia L-asparaginase, vincristine sulfate, denileukin diftitox, aldesleukin, rituximab, interferon alpha-2a, paclitaxel, docetaxel, BCG live (intravesical), vinblastine sulfate, etoposide, tretinoin, teniposide, porfimer sodium, fluorouracil, betamethasone sodium phosphate and betamethasone acetate, letrozole, etoposide citrororum factor, folinic acid, calcium leucouorin, 5-fluorouricil, adriamycin, cytoxan, or diamino-dichloro-platinum.

[0036] The signatures of CAN genes according to the present invention can be used to determine an appropriate therapy for an individual. For example, a sample of a tumor (e.g., a tissue obtained by a biopsy procedure, such as a needle biopsy) can be provided from the individual, such as before a primary therapy is administered. The gene expression profile of the tumor can be determined, such as by a nucleic acid array (or protein array) technology, and the expression profile can be compared to a database correlating signatures with treatment outcomes. Other information relating to the human (e.g., age, gender, family history, etc.) can factor into a treatment recommendation. A healthcare provider can make a decision to administer or prescribe a particular drug based on the comparison of the CAN gene signature of the tumor and information in the database. Exemplary healthcare providers include doctors, nurses, and nurse practitioners. Diagnostic laboratories can also provide a recommended therapy based on signatures and other information about the patient.

[0037] Following treatment with a primary cancer therapy, the patient can be monitored for an improvement or worsening of the cancer. A tumor tissue sample (such as a biopsy) can be taken at any stage of treatment. In particular, a tumor tissue sample can be taken upon tumor progression, which can be determined by tumor growth or metastasis. A CAN gene signature can be determined, and one or more secondary therapeutic agents can be administered to increase, or restore, the sensitivity of the tumor to the primary therapy.

[0038] Treatment predictions may be based on pre-treatment gene signatures. Secondary or subsequent therapeutics can be selected based on the subsequent assessments of the patient and the later signatures of the tumor. The patient will typically be monitored for the effect on tumor progression.

[0039] A medical intervention can be selected based on the identity of the CAN gene signature. For example, individuals can be sorted into subpopulations according to their genotype. Genotype-specific drug therapies can then be prescribed. Medical interventions include interventions that are widely practiced, as well as less conventional interventions. Thus, medical interventions include, but are not limited to, surgical procedures, administration of particular drugs or dosages of particular drugs (e.g., small molecules, bioengineered proteins, and gene-based drugs such as antisense oligonucleotides, ribozymes, gene replacements, and DNA- or RNA-based vaccines), including FDA-approved drugs, FDA-approved drugs used for off-label purposes, and experimental agents. Other medical interventions include nutritional therapy, holistic regimens, acupuncture, meditation, electrical or magnetic stimulation, osteopathic remedies, chiropractic treatments, naturopathic treatments, and exercise.

[0040] We report the sequences of an additional 5,168 genes in 22 tumors. These new data provide a much more complete picture of the cancer genome, allowing us to formulate landscapes of breast and colorectal tumors (FIG. 3). We predict that the key features of this landscape—a few gene mountains interspersed with many gene hills—will prove to be a general feature of most solid tumors. We also present data on non-coding and synonymous mutations in addition to non-synonymous mutations. As well as providing information useful for estimating the passenger rate, the data in table S2 shows that passenger rates vary considerably from tumor to tumor, undoubtedly determined by their intrinsic mutability and the number of generations and bottlenecks through which they have evolved. We also present more sophisticated methods for identifying and classifying genes with more mutations than predicted by the passenger rate FIGS. 9, 10, (table S4). Additionally, we present a variety of tools based on gene products' sequence and structure, as well as their inclusion in certain pathways, that can help identify mutated genes that are most deserving of further attention (FIGS. 1, 2, 8, 9, 10, 12, 13 (tables S3, S4, S6)). These tools can be used to prioritize the research that follows cancer genome sequencing efforts.

[0041] In terms of such research, it is important to note that sequence data can inform other, independent approaches to the study of cancer genes. For example, chromodomain helicase DNA binding domain 5 (CHD5) was recently proposed to be a tumor suppressor based on its functional properties and copy number alterations (22). We identified somatic mutations in this gene in breast tumors; the combined data strongly support a role for this gene in tumorigenesis. Similarly, the NF-κB pathway member IKBKE was recently suggested to be a breast cancer oncogene based on functional and expression studies (23). We found somatic mutations in several additional components of this signaling pathway (FIG. 2), reinforcing its importance in breast cancers. The transglutaminase (TGM) enzymes have recently been implicated in invasion and metastasis (24), and we identified multiple somatic mutations in TGM3 in colorectal cancers (FIG. 1). Additionally, a high-throughput retroviral insertional mutagenesis screen in MMTV-induced mammary tumors in mice identified 33 common insertion sites as potential oncogenes (25); we found seven of these 33 genes to be mutated in breast cancers. Given the entirely independent nature of these screens (insertional mutagenesis in mouse vs. mutational analysis of human genes), these results are remarkable.

[0042] Historically, the focus of cancer research has been on the gene mountains, in part because they were the only alterations identifiable with available technologies. The ability to analyze the sequence of virtually all protein-encoding genes in cancers has shown that the vast majority of mutations in cancers, including those that are most likely to be drivers, do not occur in such mountains and emphasize the heterogeneity and complexity of human neoplasia. This new view of cancer is consistent with the idea that a large number of mutations, each associated with a small fitness advantage, drive tumor progression (26). But is it possible to make sense out of this complexity? When all the mutations that occur in different tumors are summed, the number of potential driver genes is large. But this is likely to actually reflect changes in a much more limited number of pathways, numbering no more than 20 (1). This interpretation is consistent with virtually all screens in model organisms, which have generally shown that the same phenotype can arise from alterations in any of several genes. Other recent studies lend support to this interpretation. For example, sequencing studies of the kinome in large numbers of tumors have shown that specific kinases are sometimes mutated in a small fraction of tumors of a given type (4, 10, 27-29). We cannot be certain that the bulk of the low frequency mutations observed in our study are not passengers. However, in the kinome studies, the position of mutations within the activation loop and the demonstrated effects of the target residues on kinase function unambiguously implicate many of these rare mutations as drivers. Similarly, recent analyses of myelomas suggest that there are multiple genes, each mutated in a small proportion of tumors, that can alter the same signal transduction pathway (30, 31). And some of the low frequency mutations observed in our study, such as activating mutations in the guanine nucleotide binding protein GNAS and a homozygous nonsense mutation in BRCA1-associated protein (BAP1), are likely to be functional (table S3). These examples, in addition to those in table S6, bolster the argument that infrequent mutations can be drivers and that they function through pathways that are already known.

[0043] Regardless of whether this pathway-centric interpretation is correct, it is clear that the “easy” part of future cancer genome research will be the identification of genetic alterations. The vast majority of subtle mutations in individual patients' tumors can now be identified with existing technology (FIG. 3), making personal cancer genomics a reality. Though understanding the precise role of these genetic alterations in tumorigenesis will be more challenging, opportunities for exploiting such personal genomic data on cancers are already apparent. For example, many of the genes altered in breast cancers appear to affect the NF-κB pathway (FIGS. 12, 13; table S6), suggesting that drugs targeting this pathway could be efficacious in breast cancers with such mutations (30, 31). Furthermore, our data indicate that individual breast and colorectal cancers each contain an average of ˜90 amino acid-altering mutations that are absent in all normal cells, providing a wealth of opportunities for personalized immunotherapy. Finally, any mutation identified in an individual cancer, whether driver or passenger, can be used as an exquisitely specific biomarker to guide patient management (32).

[0044] The above disclosure generally describes the present invention. All references disclosed herein are expressly incorporated by reference. The disclosure of international application PCT/US07/017,866 filed Aug. 13, 2007, is expressly incorporated by reference. A more complete understanding can be obtained by reference to the following specific examples which are provided herein for purposes of illustration only, and are not intended to limit the scope of the invention.

### EXAMPLES

### Example 1

### Sequencing Strategy

[0045] The first step in our approach was the design of primers that would permit polymerase chain reaction (PCR)-based amplification and analysis of coding exons in the RefSeq database. Of the 20,857 transcripts in the RefSeq database (representing 18,191 distinct genes), 14,661 transcripts were included in the CCDS set. These CCDS genes were in general not evaluated again; the only exceptions were a small subset in which particular regions of interest had been difficult to amplify and for these, new PCR primers were designed. For the remaining 6,196 Refseq transcripts, 125,624 primers were designed and used to amplify the coding exons. The entire list of primers used to amplify the exons of the RefSeq genes (including the CCDS genes) is provided in table S1.

[0046] The primers were used to PCR-amplify and sequence the DNA from 11 breast and 11 colorectal cancers as well as DNA from matched normal tissues of two patients. The samples used for this analysis were the same as those used in the previous study of CCDS genes (5). The sequence data from this Discovery Screen were assembled and evaluated using stringent quality criteria (7), resulting in successful analysis of 93% of targeted amplicons. We used bioinformatic and experimental strategies to distinguish germline variants and artifacts of PCR or sequencing from true somatic mutations (FIG. S1). Genetic alterations found in the two normal samples and those present in SNP databases were removed and sequence traces of the remaining potential alterations were visually inspected to remove false positive calls in the automated analysis. After these steps, the amplicons of the remaining alterations were re-amplified from the tumor DNA (to ensure reproducibility) and from DNA of matched normal tissue (to remove unannotated germline variants). Finally, the putative somatic mutations were examined in silico to ensure that the alterations did not occur as a result of mistargeted amplification of related regions of the genome (7).

[0047] To further evaluate the genes with somatic mutations in the Discovery Screen, we determined their sequence in a Validation Screen of 24 additional samples of the same tumor type in which the mutation was originally identified. Similar methods to those noted above were used to exclude germline variants, PCR and sequencing artifacts, and alterations due to mistargeted amplification of related genomic regions. Amplicons with putative somatic mutations were re-amplified in DNA from the tumor and from matched normal tissues to determine whether the alterations were truly somatic.

### Example 2

### Somatic Mutations

[0048] Combining the data from the current analysis with those previously obtained in CCDS genes, we found that 1718 genes (9.4% of the 18,191 genes analyzed) had at least one non-silent mutation in either a breast or colorectal cancer (Table 1 and table S3). The great majority of alterations were single base substitutions (92.7%), with 81.9% resulting in missense changes, 6.5% resulting in stop codons, and 4.3% resulting in alterations of splice sites or untranslated regions immediately adjacent to the start and stop codons (Table 1). The remaining somatic mutations were insertions, deletions, or duplications (7.3%). The mutation spectrum of colorectal cancers differed from that of breast cancers, and these spectra were similar to those observed in the previous CCDS study and in other analyses (4, 5). In the current study we analyzed the nature of the non-synonymous mutations in more detail and found a very large excess of C to T transitions at 5′-CpG-3′ in colorectal cancers, representing 19-fold more than expected from the representation of 5′-CpG-3′ sites in the coding regions of the genome. Similarly, there was a marked excess of G to C transversions at 5′-GpA-3′ sites in breast cancers, representing 4.5 fold more than expected (7).

### Example 3

### Passenger Mutation Rates

[0049] The somatic mutations found in cancers are either “drivers” or “passengers” (4). Driver mutations are causally involved in the neoplastic process and are positively selected for during tumorigenesis. Passenger mutations provide no positive or negative selective advantage to the tumor but are retained by chance during repeated rounds of cell division and clonal expansion.

[0050] We used two independent methods to estimate the passenger mutation rates in the analyzed cancers. First, we evaluated 23.8 Mb of chromosome 8 in eleven colorectal cancer samples similar to those used in the Discovery Screen. This was performed with high density oligonucleotide microarrays containing every possible single base pair substitution. The tumors used for this analysis each had only one allele of chromosome 8 (i.e. they showed loss of heterozygosity), rendering the detection of sequence alterations sensitive and reliable. A total of 151 somatic mutations were identified in 262 Mb of tumor DNA, and all but one of these were located in non-coding regions. Thus, there were a total of 0.6 non-coding mutations per Mb analyzed (95% CI: 0.52 to 0.64 mutations/Mb). Because only one copy of chromosome 8 was analyzed in these studies, the non-coding mutation rate per diploid genome was inferred to be 1.2 mutations/Mb. We then performed detailed LOH analyses of the 11 tumors used in the Discovery Screen using 317,503 polymorphisms. An average of 16% of polymorphic alleles showed LOH. It is known from studies of human genetic variation that the frequency of nonsynonymous (amino acid changing) mutations is approximately half that of mutations in non-coding regions (8, 9). After correcting for loss of heterozygosity and the difference in mutation rates between non-coding and nonsynonymous mutations, these analyses result in an estimated passenger mutation rate of 0.55 nonsynonymous mutations per Mb tumor DNA in colorectal cancers (7). We consider this a minimum estimate because the ratio of mutations in non-coding regions to non-synonymous mutations in coding regions is likely to be higher in the germline than in tumors due to greater negative selection for mutations in coding regions in the germline. Although we have not directly measured mutation rates in non-coding sequences in breast cancers, Stephens et al. have estimated that the rate of non-synonymous mutations in breast cancers is 0.33 per Mb and we used this as our minimum estimate for this tumor type (10).

[0051] Estimates of the passenger mutation rates were also obtained through the quantification of synonymous (silent) missense mutations in the current study. As the majority of synonymous changes are expected to be biologically inert and thereby not selected for or against during tumorigenesis, such changes can be used as a tool to estimate passenger mutation rates (11). The analysis of synonymous mutations provided two estimates of the non-synonymous mutation rate (7). One estimate was based on the ratio of non-synonymous to synonymous mutations observed in the human germline (8, 9). The second estimate was derived by calculating the expected ratio of non-synonymous to synonymous changes after accounting for codon usage of RefSeq genes and the different mutation spectra observed in colorectal and breast cancers. We considered this estimate to be a maximum because it did not take into account the fact that nonsynonymous mutations that retard cell growth will be selected against during tumorigenesis.

### Example 4

### Evaluating Mutated Genes

[0052] The mutational data obtained can be used to identify candidate cancer genes (CAN-genes) that are most likely to be drivers and are therefore most worthy of further investigation. In the current study, we considered a gene to be a CAN-gene if it harbored at least one nonsynonymous mutation in both the Discovery and Validation Screens and if the total number of mutations per nucleotide sequenced exceeded a minimum threshold (7). Using these criteria, we identified a total of 280 CAN-genes, equally distributed between colorectal and breast cancers (tables S4A and B, respectively). The 280 CAN-genes listed in tables S4A and B included most of the 191 CAN-genes identified in Sjöblom et al. (5) but differed by virtue of the inclusion of 114 new CAN-genes identified in the additional 6,196 transcripts sequenced, the removal of data from a breast tumor with an abnormally high passenger mutation rate, the use of an experimental rather than statistical definition of CAN-genes, and additional evaluation of mutations in samples that had undergone whole genome amplification (7).

[0053] It is reasonable to assume that genes that are mutated more frequently than predicted by chance are more likely to be drivers. In the current study, we used a more sophisticated version of a metric, called the cancer mutation prevalence (CaMP) score, to rank genes by the number and nature of the mutations observed (tables S4A and B). To assess the likelihood that each of these genes is mutated at a frequency higher than the passenger mutation rate, we devised a new method based on Empirical Bayes' simulations (7). Though the likelihoods depend on the passenger rates (tables S4A and B), the rankings of the genes by CaMP scores are similar regardless of the assumed passenger mutation rates (rank correlations >0.9). CaMP scores thereby provide priorities for future studies that are independent of many of the assumptions required to calculate passenger probabilities.

[0054] To determine the mutation prevalence of a subset of CAN-genes with more precision, we analyzed 40 CAN-genes in a separate cohort of 96 patients with colorectal cancers (7). The genes chosen were in biologic pathways of interest to our groups and ranked 1st to 119th by CaMP scores. Colorectal cancers rather than breast tumors were chosen because more purified tumor tissues of this type were available. Twenty-five of the 40 genes (62%) were found to be mutated in at least one of the 96 cancers and, as predicted from our data and simulations, most were mutated in 5% or less of the cancers (table S5). The remaining 15 CAN-genes were not mutated in any of the additional 96 cancers studied, but this finding is still compatible with these genes being mutated in a low but significant fraction of tumors; the evaluation of more colorectal tumors than the 131 included in our study would be necessary to exclude this possibility.

### Example 5

### Additional Analyses of Mutated Genes

[0055] Mutation frequency is not the only type of information that can help determine whether a mutated gene is worthy of further evaluation. The analyses of the predicted effects on protein function can add independent evidence helpful for prioritization of specific genes and mutations for future research. For example, mutations producing stop codons, out-of-frame insertions or deletions, or splice site abnormalities are very likely to interfere with the normal function of the gene product (tables S3 and S4). To evaluate missense changes, two sequence-based methods for evaluating the probability that a specific alteration would have a deleterious effect on protein function were employed, Sorting Intolerant from Tolerant (SIFT) and LogR.E-values based on Pfam domains (7). These probabilities are listed for each evaluable mutation identified in our study in table S3. For each CAN-gene, the number of missense mutations that were predicted to disrupt function in a statistically significant manner is included in table S4.

[0056] Predictions about the functional effects of mutations can also be made at the structural level. We were able to generate structural models for 622 of the RefSeq gene mutations from X-ray crystallography or nuclear magnetic resonance (NMR) spectroscopy of their encoded proteins (12, 13). Some of the models were intriguing in that they showed clustering of mutations around active sites of proteins or near an interface residue (examples in FIG. 1). We also used LS-SNP software (14) to predict the likelihood that each mutation would destabilize the protein, interfere with the formation of a domain-domain interface, or have an effect on protein-ligand binding (table S3, summarized for CAN-genes in table S4).

[0057] Finally, we were able to identify a number of mutations that occurred at locations identical to those of genes involved in hereditary human diseases or that clustered at adjacent locations in the cancers analyzed. Such alterations are likely to have functional effects on these proteins. These included the R360W mutation in the RET tyrosine kinase, corresponding to an identical loss of function germline change in Hirschsprung disease (15). Likewise, the R1624W mutation in the PKHD1 gene in colorectal cancer is identical to that observed in polycystic kidney disease, a syndrome that has neoplastic features (16). The T745M mutation in the cell adhesion gene CRB1 gene is identical to one that has been shown to be a cause of retinitis pigmentosa (17). In addition to these examples, we identified 126 mutations in 39 proteins that occurred within a distance of 10 amino acids from one another. In particular, mutations in at least two independent tumors occurred in the DTNB, EDD1, GNAS, and TGM3 genes at exactly the same residue, implicating that region as vital to the protein's potential tumorigenic function.

### Example 6

### Analysis of Mutated Pathways

[0058] It is becoming increasingly clear that pathways rather than individual genes govern the course of tumorigenesis (1). Mutations in any of several genes of a single pathway can thereby cause equivalent increases in net cell proliferation. Accordingly, we devised a method to determine whether the genes within specific pathways were mutated more often than predicted by chance. The resultant “pathway CaMP” score incorporated the total number of mutations from all genes within each group, the number of different genes mutated, the combined sizes of the genes in each group, and the total number of tumors examined (table S6) (7).

[0059] Using this metric, we analyzed a highly curated database (Metacore, GeneGo, Inc), that includes human protein-protein interactions, signal transduction and metabolic pathways, and a variety of cellular functions and processes. By including the number of mutated genes in addition to the total number of mutations as parameters, we excluded pathways that simply contained one gene that was mutated at high frequency (e.g., pathways containing only TP53 mutations). There were 108 pathways that were found to be preferentially mutated in breast tumors. Many of the pathways involved PI3K signaling (FIG. 2 and table S6B). Mutations in PIK3CA are frequent in multiple tumor types, including breast cancers (18-21). In the current study, we identified mutations not only in PIK3CA but also previously unreported mutations in GAB1, IKBKB, IRS4, NFKB1, NFKBIA, NFKBIE, PIK3R1, PIK3R4, and RPS6KA3, implicating both the PI3K pathway in general and NF-κB signaling in particular in breast tumorigenesis. Within the 38 significant colorectal cancer pathways that appeared to be mutated in a statistically significant manner, there were also many that centered on PI3K (FIG. 12; table S6A). The pathway components mutated in colorectal cancers differed from those in breast, with mutations found in IRS2, IRS4, PIK3R5, PRKCZ, PTEN, RHEB, and RPS6 KB1 in addition to PIK3CA. Additional pathways altered in colorectal cancer were related to cell adhesion, the cytoskeleton, and the extracellular matrix (FIG. 12; table S6A), supporting the idea that interactions between the cancer cell and the extracellular environment are important steps in the neoplastic process.

[0060] Finally, there were nine examples of mutated genes whose protein products were predicted to interact with other mutated genes more often than predicted by chance. The average number of mutant gene products with which these nine mutant genes interacted was 25 (FIG. 12, FIG. 13; table S6A and 6B). These results illustrate the potential utility of pathway-based analyses and highlight a variety of different gene groups and pathways that can help focus further investigations on these tumor types.

### Example 7

### The Genomic Landscapes of Colorectal and Breast Cancers

[0061] The colorectal and breast cancers analyzed in the Discovery Screen contained an average of 77 and 101 non-silent mutations in RefSeq genes, respectively (table S2). The number of mutations per tumor was similar among colorectal tumors (ranging from 49 to 111) but was more variable in breast cancers (varying from 38 to 193). The number of mutated CAN-genes per tumor averaged 15 and 14 in colorectal and breast cancers, respectively.

[0062] The “landscapes” of typical colorectal and breast cancer genomes are depicted in FIG. 3. In these landscapes, every RefSeq gene is given a location on a 2-dimensional map corresponding to its chromosomal position, and all mutated genes in that tumor are indicated by a dot. The relief feature of the map is provided by the CAN-genes with the 60 highest CaMP scores (FIGS. 9, and 10; table S4). Just as topographical maps contain geological features of varying elevations, the cancer genome landscape consists of relief features (mutated genes) with heterogeneous heights (determined by CaMP scores). There are a few “mountains” representing individual CAN-genes mutated at high frequency. However, the landscapes contain a much larger number of “hills” representing the CAN-genes that are mutated at relatively low frequency. It is notable that this general genomic landscape (few gene mountains and many gene hills) is a common feature of both breast and colorectal tumors.

[0063] References for the foregoing examples and disclosure.

[0064] The disclosure of each reference cited is expressly incorporated herein.
[0065] 1. B. Vogelstein, K. W. Kinzler, Nat Med 10, 789 (2004).
[0066] 2. P. A. Futreal et al., Nat Rev Cancer 4, 177 (2004).
[0067] 3. A. Bardelli, V. E. Velculescu, Curr Opin Genet Dev 15, 5 (2005).
[0068] 4. C. Greenman et al., Nature 446, 153 (2007).
[0069] 5. T. Sjoblom et al., Science 314, 268 (2006).
[0070] 6. K. D. Pruitt, T. Tatusova, D. R. Maglott, Nucleic Acids Res 35, D61 (2007).
[0071] 7. See supporting material on Science Online.
[0072] 8. M. Cargill et al., Nat Genet. 22, 231 (1999).
[0073] 9. M. K. Halushka et al., Nat Genet. 22, 239 (1999).
[0074] 10. P. Stephens et al., Nat Genet. 37, 590 (2005).
[0075] 11. J. V. Chamary, J. L. Parmley, L. D. Hurst, Nat Rev Genet 7, 98 (2006).
[0076] 12. R. Karchin, Structural models of mutants identified in breast cancers. http://karchinlab.org/RefSeqMutants/breast.html.
[0077] 13. R. Karchin, Structural models of mutants identified in colorectal cancers. http://karchinlab.org/RefSeqMutants/colorectal.html.
[0078] 14. R. Karchin et al., Bioinformatics 21, 2814 (2005).
[0079] 15. S. Bolk et al., Proc Natl Acad Sci USA 97, 268 (2000).
[0080] 16. L. F. Onuchic et al., Am J Hum Genet. 70, 1305 (2002).
[0081] 17. A. I. den Hollander et al., Nat Genet. 23, 217 (1999).
[0082] 18. Y. Samuels et al., Science 304, 554 (2004).
[0083] 19. K. E. Bachman et al., Cancer Biol Ther 3, 772 (2004).
[0084] 20. D. K. Broderick et al., Cancer Res 64, 5048 (2004).
[0085] 21. J. W. Lee et al., Oncogene 24, 1477 (2005).
[0086] 22. A. Bagchi et al., Cell 128, 459 (2007).
[0087] 23. J. S. Boehm et al., Cell 129, 1065 (2007).
[0088] 24. M. Satpathy et al., Cancer Res 67, 7194 (2007).
[0089] 25. V. Theodorou et al., Nat Genet 39, 759 (2007).
[0090] 26. N. Beerenwinkel et al., PLoS Computational Biology, in press (2007).
[0091] 27. A. Bardelli et al., Science 300, 949 (2003).
[0092] 28. D. W. Parsons et al., Nature 436, 792 (2005).
[0093] 29. R. K. Thomas et al., Nat Genet 39, 347 (2007).
[0094] 30. C. M. Annunziata et al., Cancer Cell 12, 115 (2007).
[0095] 31. J. J. Keats et al., Cancer Cell 12, 131 (2007).
[0096] 32. F. Diehl, L. A. Diaz, Jr., Curr Opin Oncol 19, 36 (2007).
[0097] 33. R. Sanchez, A. Sali, Proc Natl Acad Sci USA 95, 13597 (1998).
[0098] 34. E. F. Pettersen et al., J Comput Chem 25, 1605 (2004).

### Example 8

### Supporting Online Material

### Materials and Methods

[0099] Gene selection. The Reference Sequence database (RefSeq) represents a curated sequence database of 20,857 transcripts from 18,191 unique genes (as of March 2006; http://www.ncbi.nlm.nih.gov/RefSeql). The Consensus Coding Sequence (CCDS) database represents a subset of the genes included in the RefSeq database (http://www.ncbi.nlm.nih.gov/CCDS/). All transcripts and genes in the CCDS database are contained within the RefSeq database; however, the RefSeq database contains an additional 6,196 transcripts (from 5,168 unique genes) that are not included in CCDS. We previously sequenced the transcripts included in the CCDS database (S1). In the current study we determined the sequence of the coding regions (exons plus four bases of adjacent introns or untranslated regions) of the remaining 6,196 transcripts. We excluded transcripts that were located at multiple locations in the genome as a result of gene duplication as well as those located on the Y chromosome. The combined dataset of all 18, 191 genes in RefSeq (including those genes in CCDS that were analyzed previously) was used for the analysis and conclusions described in the text.

[0100] Bioinformatic resources. RefSeq gene and transcript coordinates (release 16, March 2006), human genome sequences, and single nucleotide polymorphisms were obtained from the UCSC Santa Cruz Genome Bioinformatics Site (http://genome.ucsc.edu). Homology searches in the human and mouse genomes were performed using the BLAST-like alignment tool BLAT (S2) and In Silico PCR (http://genome.ucsc.edu/cgi-bin/hgPcr). All genomic positions correspond to UCSC Santa Cruz hg17 build 35.1 human genome sequence. The −3.4 million single nucleotide polymorphisms (SNPs) of db SNP (release 125) that were validated through the HapMap project (S3) were used for automated removal of known polymorphisms.

[0101] Primer design. Primers for PCR amplification and sequencing of each coding exon were designed as described previously (S1), with the exception that additional manual curation was performed to determine the correct reading frame of a subset of RefSeq genes. Briefly, primer pairs were generated using Primer3 (http://frodo.wi.mit.edu/cgibin/primer3/primer3_www.cgi). with forward and reverse PCR primers located no closer than 50 bp to target exon boundaries. Exons larger than 350 bp were divided into multiple overlapping amplicons. PCR products were designed to range in size from 300 to 600 bp and primer pairs were filtered using UCSC In Silico PCR to exclude pairs yielding more than a single product. A universal sequencing primer (M13 forward, 5′-GTAAAACGACGGCCAGT-3′; SEQ ID NO: 131,069) was appended to the 5′ end of the primer in the pair with the smallest number of mono- and dinucleotide repeats between itself and the target exon. For convenience, all forward and reverse primer sequences used in the previous and current study are listed in table S1 (SEQ ID NO: 1-131,068, respectively).

[0102] DNA samples, PCR amplification, and sequencing. DNA samples from ductal breast carcinoma cell lines, primary breast tumors, colorectal cancer cell lines and xenografts, and matched normal tissue or peripheral blood were obtained as described previously (S1). In brief, the samples used in the Colorectal Cancer Discovery Screen were cell lines (three) or xenografts (eight), each developed from a liver metastasis of a different patient. The eleven samples used in the Breast Cancer Discovery screen were cell lines obtained from ATCC with the following ATCC 10 numbers: B1 C=Hs 578T; B2C=HCC1008; B3C=HCC1954; B4C=HCC38; B5C=HCC1143; B6C=HCC1187; B7C=HCC1395; B8C=HCC1599; B9C=HCC1937; B10C=HCC2157; B11 C=HCC2218 (see table S2). We chose the tumors used in the Discovery Screen on the following bases. First, the colorectal I cancer samples were all late-stage tumors derived from liver metastases because such tumors contain all the mutations found in early stage tumors, but the converse is not true. We wished to gain a picture of the genomic landscapes of fully progressed neoplasms rather than of intermediate stages. The genes identified through this analysis can in the future be analyzed in early stage tumors to determine their timing with respect to the neoplastic process. Another reason to study metastatic cancers is that these are the only ones that are lethal. Similarly, most of the breast cancers represented the most aggressive type (estrogen receptor negative, progesterone receptor negative, and ERBB2 negative) (S1). These tumors are the most difficult to manage clinically as they are often refractory to therapy. Another reason underlying the choice of the breast cancers is that these are the only publicly available cell lines, to our knowledge, for which corresponding normal cells are also available (through ATCC). This availability provides positive controls for mutation analysis by other groups and will facilitate functional studies in the future. The samples used in the Colorectal Cancer Validation Screen were xenografts or cell lines derived from advanced cases (but not necessarily metastatic sites). The 96 samples used for further mutational analysis of 40 CAN-genes were xenografts derived from cancers of various stages. The samples used in the Breast Cancer Validation Screen were primary breast tumors microdissected using laser capture (S1). Whole genome amplification, performed as previously described (S1), was used to generate sufficient quantities of DNA for Validation Screen samples when required. PCR and sequencing reactions (including the monitoring of DNA sample identity) were performed as described previously (S1). All samples were obtained in accordance with the Health Insurance Portability and Accountability Act (HIPAA).

[0103] Mutation discovery screen. RefSeq exons were amplified and sequenced in 11 colorectal cancer samples, 11 breast cancer samples, and two matched normal DNA samples. Mutational analysis was performed as described previously (S1). In brief, mutational analysis was performed for all coding exonic sequences and the flanking four base pairs (bp) of intronic or UTR sequences using Mutation Surveyor (Softgenetics, State College, Pa.; http://www.softgenetics.com) coupled to a relational database (Microsoft SQL Server). Only amplicons meeting stringent quality criteria were analyzed: at least 75% of the tumor samples had to have Phred quality scores of :0:20 in :0:90% of the bases within the target region of each amplicon. In the amplicons that passed these quality criteria, three groups of mutations were removed: nonsynonymous changes in tumor samples identical to changes in the two normal DNA samples, known single-nucleotide polymorphisms (db SNP entries previously validated by the HapMap project), and false positive artifacts that could be eliminated by visual inspection of chromatograms. Somatic synonymous mutations were not removed from analysis in the current study, though they were removed in our previous study of CCDS genes. Following mutational analysis, each putative mutation was independently reamplified in both tumor DNA (to eliminate artifacts) and in DNA from normal tissue from the same patient (to eliminate germ line variants). To exclude the possibility that putative somatic mutations were caused by amplification of homologous but non-identical sequences, BLAT (S2) was used to search the human genome for related exons. For samples from xenografts, BLAT was used to similarly search the mouse genome to exclude the possibility that a putative mutation actually represented a homologous mouse sequence.

[0104] Mutation validation screen. Every gene in which a nonsynonymous mutation was found in the Discovery Screen was further analyzed by amplification and sequencing of 24 additional tumor samples of the same tissue type. All RefSeq transcript variants were investigated for each gene of interest. Mutation detection, confirmation of alterations, and determination of somatic status was performed as described above, with the exception that all germline variants previously observed in the normal DNA samples of the Discovery Screen were excluded as possible somatic mutations. All somatic mutations observed in the Discovery and Validation Screens (including synonymous changes) are reported in table S3.

[0105] Mutations in non-coding sequences. To determine the rate of mutations in noncoding sequences in colorectal cancers, we used variant detection oligonucleotide microarrays. We selected tumors that had lost heterozygosity for all or nearly all of chromosome 8p. This loss of heterozygosity enhances the sensitivity of mutational analysis in microarrays because the great majority of mutations in these tumors will be homozygous (i.e., without the “noise” emanating from the wild type allele (S4)). The publicly available chromosome 8p sequence was masked for repeats using RepeatMasker (http://www.repeatmasker.org/), and oligonucleotide probes were designed to query each nucleotide position in the 23.79 Mb of non-repetitive 8p sequence, as previously described (S4, S5). Chromosome 8p was amplified as 3840 minimally overlapping −10 kb regions from each of eleven tumor samples using long range PCR as described (S4). Labeled PCR products were hybridized and the arrays scanned as previously described (S4). The mutations identified were then validated by individual genotyping on arrays and confirmed by dideoxy sequencing.

[0106] Analysis of loss of heterozygosity. Loss of heterozygosity (LOH) was evaluated in the Discovery screen colorectal cancers using Illumina's HumanHap300 Genotyping BeadChip arrays. Genotype and intensity data were collected for over 317,000 polymorphic sites in each sample. The single nucleotide polymorphism (SNP) loci used in this assay were taken from the International HapMap Project and were selected for regions of the genome that are highly conserved or in close proximity to a gene. Using Illumina BeadStudio software, the normalized intensity values (log R ratio) and normalized genotype calls (B allele frequency) were plotted by genomic position across the entire genome. Regions that had undergone LOH were identified by an extended stretch of homozygous genotype calls (B allele frequencies of >0.9 or <0.1). For small regions of homozygous genotype calls <<5 Mb) we also looked for a corresponding decrease in intensity (decreased log R ratio). Base positions of LOH boundaries were identified as the genomic location of the first heterozygous SNP on either side of the LOH region. On average, 16% of the tumors' genomes were found to harbor LOH.

[0107] Estimation of passenger mutation rates. The combination of somatic mutation detection with microarrays and LOH analyses described above was used to derive one estimate of passenger mutation frequencies in colorectal cancers, termed the “External” rate. This was determined to be 0.55 nonsynonymous mutations/Mb (=1.2 mutations per Mb non-coding diploid DNA×0.5 nonsynonymous mutations per mutation in non-coding DNA×the fraction of diploid tumor DNA [1−0.16]+0.6 mutations per Mb non-coding haploid DNA×0.5 nonsynonymous mutations per mutation in non-coding DNA×the fraction of haploid tumor DNA [0.16], i.e., 0.55=[1.2×0.5×[1−0.16]+0.6×0.5×0.16]). As noted in the text, the External rate for breast cancers was assumed to be 0.33 nonsynonymous mutations/Mb.

[0108] To estimate the passenger mutation rates from the synonymous mutations discovered in the current study, we first determined the expected nonsynonymous to synonymous mutation ratios. These were estimated in two ways. First, we calculated this ratio based on coding SNPs identified in previous sequencing studies (S6) (S7). The ratio of nonsynonymous (NS) to synonymous (S) mutations in these studies was 1.02. This ratio may be an underestimate of the true passenger mutation rate because the selection against NS mutations may be more stringent in the germ line than during tumor development. We therefore also determined the NS:S ratio from the data described in the current study in a manner similar to that previously described (88). In brief, context-specific mutation rates were used to determine the expected frequency of mutations that would create NS vs. S mutations. Each nucleotide of each codon was mutated in silico to determine whether a particular change would result in a NS or S change, thereby accounting for all possible changes to all bases of each codon. The fraction of changes resulting in NS and S alterations were adjusted to account for the type of base that was mutated, the base change that resulted from the mutation, the immediate 5′ and 3′ neighbors to the mutated base, and codon usage. Through analysis of all RefSeq genes, we determined that the expected NS:S ratios were 2.41 and 2.65 in colorectal and breast cancers, respectively. As noted in the text, these theoretical estimates provide an upper bound to the true mutation rate because they do not take into account the fact that nonsynonymous mutations that retard cell growth will be selected against during tumorigenesis.

[0109] The products of these ratios and the observed synonymous mutation rates in each screen yielded two different estimates of the passenger mutation rates, termed “SNP-based” and “NS/S-based,” respectively. For example, the rate of synonymous mutations in the colorectal cancer Discovery Screen was 0.97 mutations/Mb. The SNP-based passenger rate was therefore estimated to be 0.99 NS mutations/Mb (=0.97×1.02) while the NS/S-based passenger rate was 2.35 NS mutations/Mb (=0.97×2.41). In the breast cancer Discovery screen, the rate of synonymous mutations was 1.37, leading to SNP- and NS/S-based passenger rates of 1.40 and 3.62 NS mutations/Mb, respectively. Different rates of synonymous mutations were observed in the various screens employed in our study, likely reflecting biologic differences in the samples analyzed. In the colorectal cancer Validation screen, the SNP- and NS/S-based passenger rates were estimated to be 1.44 and 3.41 NS mutations/Mb, respectively. In the breast cancer Validation screen, the SNP- and NS/S based passenger rates were estimated to be 0.74 and 1.91 NS mutations/Mb, respectively.

[0110] Computational analysis of mutations. Each missense mutation was analyzed by calculating a Sorting Intolerant From Tolerant (SIFT) probability (S9) and a 10gRE-value score (S10). SIFT was installed and run locally and only probabilities from variants with a median sequence information of <3.25 are listed in table S3. Alignment files were generated using the October 2006 UniProt database. Mutations with a SIFT score ˜0.05 are associated with a false positive rate of 20% (S9). Pfam-based LogRE-value scores were derived from expect values provided by the HMMER 2.3.2 software. The Is mode was used to search against the Pfam protein family database. LogRE-value scores were calculated as log 10 (EvariantlEcanonical) only for canonical domains with expect values less than 1. In cases where multiple Pfam domains were found to overlap a single variant, the domain with the largest (i.e., least significant) LogRE-value score was used.

[0111] Structural modeling of mutations. For each somatic missense mutant identified in a breast or colorectal tumor sample, we applied a protocol developed for the LS-SNP large scale SNP annotation web service (S11). The UCSC Genome Browser API library was used to extract all human UniProt protein sequences that aligned with the genomic address of each mutant. Protein structure homology models for each sequence were then built with MODPIPE and MODELLER (S12-15). The MODPIPE pipeline identifies x-ray crystal structures (“templates”) of proteins homologous to each protein sequence of interest by building a PSI-BLAST profile (using 10 iterations and E-value cutoff of 0.0001) and aligning the profile to a library of candidate template sequence profiles with IMPALA (S16, 17). Homology models are built with MODELLER for all sequence-template matches with statistically significant alignments (E-value <0.0001). Amino acid residues that are near binding surfaces (at the interface of the protein and its ligand or at the interface between two protein domains) are often functionally important. Therefore, each template protein structure was checked for positions that are within a short distance of small molecule ligands (<5.0 \acute{Å}) or adjacent protein domains (<6 \acute{Å}) using the LIGBASE and PIBASE databases (S18, 19). All missense mutants that aligned to one of these “ligand-binding” or “domain interface” amino acid residues in the template structure were identified using the sequence-template alignments constructed by MODPIPE. If a missense mutation aligned to a binding or interface residue in a template protein structure, it was annotated as a binding or interface residue.

[0112] The LS-SNP score was calculated by a soft margin support vector machine trained on disease and neutral mutations annotated in UniProt (S15) with predictive features described previously (S11). Negative LS-SNP scores predict a deleterious missense mutant while positive scores predict a neutral missense mutant. The absolute value of the score provides a confidence measure for the prediction. In a three-fold cross-validation test, the classifier yielded a false positive rate of 33%.

[0113] Differences in CAN-genes between Sjoblom et al. and the current study. Sjoblom et al. reported a total of 191 CAN-genes while 280 CAN-genes are reported in this study. This difference is due to the following factors:
[0114] 1. A major difference was that we discovered 114 new CAN-genes among the RefSeq genes analyzed in the current study. These genes were not included in the CCDS gene database and were not analyzed in the Sjoblom et al. study.
[0115] 2. One of the breast cancers used in the Validation cohort of both Sjoblom et al. and the current study (BB23) was found to have more than six times the average number of synonymous mutations and more than ten times the average number of total mutations identified in the other breast cancers, presumably due to a higher passenger mutation rate. Because of the greater difficulty in interpreting the significance of mutations in tumors with abnormally high passenger mutation rates, we excluded all mutations identified in this tumor. This was a conservative measure, as a subset of these could have contributed to tumorigenesis.
[0116] 3. CAN-genes were defined differently than in Sjoblom et al. In the current study, CAN-genes were simply defined as those in which at least one nonsynonymous mutation was discovered in both the Discovery and Validation Screens and whose length-dependent mutation rate exceeded a threshold (see section on Statistical Analyses of CAN-genes below). This definition emphasizes that CAN-genes are simply candidates that require further evaluation to implicate them as causal contributors to neoplasia. A new statistical method to determine the likelihood that each CAN-gene is mutated at greater frequency than expected by chance is presented in the current study (see below). However, the frequency of mutation among tumors is not the only criterion that can be used to help assess the relevance of mutations in cancers. Other bioinformatic methods to help prioritize CAN-genes for future research are described in the text and in tables S4 and S5.
[0117] 4. Whole genome amplification (WGA) with φ29 polymerase was used in both Sjoblom et al. and in the current study to obtain sufficient DNA for samples in the Validation Screen. However, we recently found that WGA can produce a small fraction of artifactual mutations, even when as many as five WGA reactions are pooled together and used as templates for PCR (as was always employed in our studies). Analogous problems with WGA have recently been independently observed by others (S20, S21). We therefore confirmed mutations present in WGA samples by analyzing non-amplified samples from the same tumors whenever possible and excluded those that could not be confirmed from tables S3 and S4.

[0118] Statistical Analyses of CAN-genes. The statistical analyses focused on quantifying the evidence that the mutations in a gene reflect an underlying mutation rate that is higher than the passenger rate (S22-25). The basis of this quantification was an Empirical Bayes analysis (S26) comparing the experimental results to a reference distribution representing a genome composed only of passenger genes. This was obtained by simulating mutations at the passenger rate in a way that precisely replicated the two-stage experimental design. Specifically, for the Discovery phase, we considered each gene in turn and simulated the number of mutations of each type from a binomial distribution with success probability equal to the context-specific passenger rate. The number of available nucleotides in each context was the number of successfully sequenced nucleotides for that particular context and gene in the samples studied in the Discovery Screen. When considering base pair substitution mutations, we considered only nucleotides-at-risk, i.e., those nucleotides that could result in a non-synonymous mutation when altered. For example, missense mutations at the third position of many codons would not result in a nonsynonymous mutation so were excluded from consideration. For all genes in which at least one mutation was generated in this simulation, the process was repeated, this time with the number of samples used in the Validation Screen. In the simulations employing the SNP- and NS/S-based passenger rates, different passenger mutation rates were used in the Validation and Discovery stages of the simulations for the reasons described above (“Estimation of passenger mutation rates” section). We finally applied to the simulated data the same threshold that was applied to the experimental data, that is, we included only genes whose mutation rates were >15 and >6 mutations per Mb of successfully sequenced nucleotides for genes whose coding exons were greater or less than 10 kb, respectively.

[0119] Using these simulated datasets, we evaluated the passenger probabilities for each of the CAN genes. In Sjoblom et al., we calculated a false discovery rate (FOR) for groups of genes that had CaMP scores above a threshold. The FOR estimates the proportion of true passenger genes among a group of genes which may contain both passengers and nonpassengers. In contrast, the passenger probabilities calculated here (tables S4A and S4B) represent statements about specific genes rather than about groups of genes. The passenger probability is therefore more informative, when considering individual genes, than the false discovery rate. It is obtained via a logic related to that of likelihood ratios: the likelihood of observing a particular score in a gene if that gene is a passenger is compared to the likelihood of observing it in the real data. The gene-specific score used in our analysis was based on the Likelihood Ratio Test (LRT) for the null hypothesis that, for the gene under consideration, the mutation rates are all the same as the passenger mutation rates. To obtain this score, we simply transformed the LRT to s=log₁₀ (LRT). Higher scores indicate evidence of mutation rates above the passenger rates. The approach for evaluating passenger probabilities is the same as that described in Efron and Tibshirani (S21). Specifically, for any given score s, F(s) represents the proportion of simulated genes with score higher than s in the experimental data, F₀ is the corresponding proportion in the simulated data, and p₀ is the estimated overall proportion of passenger genes (discussed below). The variation across simulations is small but nonetheless we generated and collated 1600 datasets to estimate F₀. We then numerically estimated the density functions f and f₀ corresponding to F and F₀ and calculated, for each score s, the ratio P₀f₀(s)/f(s), also known as “local false discovery rate” (S26). Density estimation was performed using the function “density” in the R statistical programming language (S27) with default settings. An open source R package for performing these calculations is available from the authors as well as from Science.

[0120] The passenger probability calculations depend on an estimate of p₀, the proportion of true passengers. Our implementation seeks to give an upper bound to p₀ and thus provide conservatively high estimates of the passenger probabilities. We start by constructing histograms of the observed and simulated values of 10g(LRT) for all genes in RefSeq, using bins of one unit. Consider the bin ranging from 0 to 1, which is composed mostly of genes with no mutations. Suppose that there are 1000 experimental genes and 1050 simulated genes in that bin. The 1000 genes include both passengers and non-passengers, while the 1050 genes should contain only passengers. Thus we can conclude that the number of passengers in the simulated set is too large and that p₀ is at most 1000/1050. Because this argument can be applied to all bins, we can estimate Po to be the reciprocal of the largest ratio between the simulated and observed bin counts. Estimates of p₀ were found to be stable over a wide range of bin sizes. This method is an adaptation of the approach proposed in Efron and Tibshirani (S26). In their approach, bin counts are modeled as a function of the scores using Poisson regression. In our case, a similar smoothing was achieved more simply by binning similar score values. We also constrained the passenger probabilities to change monotonically with the score by starting with the lowest values and recursively setting values that decrease to the next value to their right. A detailed mathematical account of the main analytic techniques used is provided in (S28).

[0121] The cancer mutation prevalence (CaMP) score was introduced in (S1) and described in additional detail in (S28). For each CAN-gene, we calculated the probability pg of observing its exact mutation profile given the assumed passenger mutation rate. The mutation profile of a gene refers to the numbers of each of the 25 context-specific types of mutations in that gene (e.g., C to T transition mutations at 5′-CpG-3′ sites are one type). The CaMP score is defined as the negative log of pg divided by the relative rank of pg among the CAN-genes. For visualization purposes in FIG. 3, all genes with CaMP scores <9, as determined with the SNP-based passenger rate, were represented as hills of the same dimension. The CaMP scores calculated for each colorectal and breast CAN-gene are provided in tables S4A and B, respectively. To compute CaMP scores in the SNP- and NS/S based passenger rate scenarios, we defined the pg as the product of two separate binomials for the two stages.

[0122] Analysis of mutation prevalence study. As described in the text, we experimentally tested 40 CAN-genes in a separate cohort of 96 cancers. Finding several additional mutations in these genes can provide strong evidence that they are mutated at rates higher than the passenger rate. Because the process of selection of these 40 genes for further study could not be easily represented in terms of mutation counts, it was difficult to generate reference distributions such as the ones used to compute passenger probabilities for the Discovery and Validation Screens. We therefore chose an analytic method that was insensitive to the selection process. In table S5, we report the a posteriori probability that the mutation rate for each gene studied was above the passenger rate. For this we used an Empirical Bayes estimate of the probability of the gene being a passenger to be the prior. This was constructed as for table S4A. For each of the 40 genes in the mutation prevalence study, we then computed a Bayes Factor, based on the results of the mutation prevalence study alone, for the hypothesis that the gene was mutated at the passenger mutation rate. Computation of the Bayes Factor requires specification of a prior distribution of mutation rates that corresponds to the alternative hypothesis. To construct this distribution, we assumed that, for each of non-passenger gene, the 25 non-passenger mutation rates followed Gamma distributions. These are further assumed to have the same shape parameter and scale parameters set so that the mean non-passenger rates are equal to the corresponding passenger mutation rates multiplied by a single scaling factor common to all contexts. The shape parameter and the scaling factor were estimated empirically from the set of CAN genes as follows. Drawing from the probabilities in table S4 we randomly assigned each gene to a true status of either passenger or non-passenger. We then fit, by maximum likelihood, a Poisson-gamma model in which mutations had a Poisson distribution and gene-specific mutation rates had a gamma distribution. Finally, Bayes' rule was used to combine the prior and Bayes Factor into the posterior probabilities reported in table S5. This method controlled for multiple testing via the prior distribution.

[0123] Analysis of mutated gene pathways and groups. Four types of data were obtained from the MetaCore database (GeneGo, Inc., St. Joseph, Mich.): pathway maps, Gene Ontology (GO) processes, GeneGo process networks, and protein-protein interactions. The memberships of each of the 20,857 transcripts in these categories were retrieved from the databases using RefSeq identifiers. In GeneGo pathway maps, 21,252 relations were identified, involving 5,175 transcripts and 362 pathways. For Gene Ontology processes, a total of 33,797 pairwise relations were identified, involving 11,473 transcripts and 2,809 GO groups. For GeneGo process networks, a total of 27,312 pairwise relationships, involving 8,157 transcripts and 115 processes, were identified. The predicted protein products of each mutated gene were also evaluated with respect to their physical interactions with proteins encoded by other mutated genes as inferred from the MetaCore database. For each group in each of these four categories (pathways, GO Processes, GeneGo process networks, and protein-protein interactions), transcripts were combined into genes and several statistics were then calculated. First, we calculated the total number of nucleotides within each group that were successfully sequenced in our study. The total number of NS mutations observed in the study in each category was then tallied. The number of NS mutations observed, the number of nucleotides successfully sequenced, and the passenger mutation rates were then used to evaluate the probability of observing as many mutations as observed in the group, or more, using a binomial distribution (group P-value). The passenger mutation rate used for these calculations was the average of the estimates for the Discovery Screen (1.56 nonsynonymous mutations/Mb for both colon and breast; see above section on “Estimation of passenger mutation rates”). The group P-values for observing the number of mutations were calculated in the R statistical environment and subsequently corrected for multiplicity employing the Benjamini-Hochberg algorithm (S29) with an alpha of 0.05.

[0124] We next determined whether any of the groups found to be significant in terms of the total number of mutations in the group were also significant with regards to the number of mutated genes. This second stage excluded groups in which one or a few genes in the group (such as TP53 or APC) accounted for most of the mutations in that group. For each group, we counted the number of genes sequenced and the number of genes mutated in the study. The significance of association between belonging to a group and being a CAN-gene was assessed with a chi-square test using an alpha of 0.05. Because this second stage considered only those groups that were found to be statistically significant in terms of the total number of mutations (as described in the paragraph above), no further penalties for multiple comparisons were applied. Groups that were statistically significant in both analyses (i.e., by total number of mutations and by total number of genes with mutations) are listed in table S6.

### SUPPLEMENTAL REFERENCES FOR EXAMPLE 8

[0125] S1. T. Sjoblom et al., Science 314, 268 (2006).
[0126] S2. W. J. Kent, Genome Res 12, 656 (2002).
[0127] S3. I. H. Consortium, Nature 437, 1299 (2005).
[0128] S4. N. Patil et al., Science 294, 1719 (2001).
[0129] S5. M. Chee et al., Science 274, 610 (1996).
[0130] S6. M. Cargill et al., Nat Genet. 22, 231 (1999).
[0131] S7. M. K. Halushka et al., Nat Genet. 22, 239 (1999).
[0132] S8. C. Greenman, R. Wooster, P. A. Futreal, M. R. Stratton, D. F. Easton, Genetics 173, 2187 (2006).
[0133] S9. P. C. Ng, S. Henikoff, Nucleic Acids Res 31, 3812 (2003).
[0134] S10. R. J. Clifford, M. N. Edmonson, C. Nguyen, K. H. Buetow, Bioinformatics 20, 1006 (2004).
[0135] S11. R. Karchin et al., Bioinformatics 21, 2814 (2005).
[0136] S12. R. Sanchez, A. Sali, Proc Natl Acad Sci USA 95, 13597 (1998).
[0137] S13. A. Sali, T. L. Blundell, Journal of Molecular Biology 234,779 (1993).
[0138] S14. R. M. Kuhn et al., Nucleic Acids Res 35, 0668 (2007).
[0139] S15. C. H. Wu et al., Nucleic Acids Res 34, 0187 (2006).
[0140] S16. S. F. Altschul et al., Nucleic Acids Research 25, 3389 (1997).
[0141] S17. A. A. Schaffer et al., Bioinformatics 15, 1000 (1999).
[0142] S18. A. C. Stuart, V. A. Ilyin, A. Sali, Bioinformatics 18, 200 (2002).
[0143] S19. F. P. Davis, A. Sali, Bioinformatics 21, 1901 (2005).
[0144] S20. J. G. Paez et al., Nucleic Acids Res 32, e71 (2004).
[0145] S21. J. J. Corneveaux et al., Biotechniques 42, 77 (2007).
[0146] S22. A. F. Rubin, P. Green, Science 317, 1500 (2007);
[0147] www. sciencemag.org/cgi/content/full/317/5844/1500c.
[0148] S23. G. Getz et al., Science 317, 1500 (2007);
[0149] www.sciencemag.org/cgi/content/full/317/5844/1500b.
[0150] S24. Forrest, G. Cavet, Science 317, 1500 (2007);
[0151] www. sciencemag.org/cgi/content/full/317/5844/1500a
[0152] S25. G. Parmigiani et al., Science 317, 1500 (2007);
[0153] www.sciencemag.org/cgi/content/full/317/5844/1500d.
[0154] S26. B. Efron, R. Tibshirani, Genet Epidemiol. 23, 70 (2002).
[0155] S27. R. Ihaka, R. Gentleman, Journal of Computational and Graphical Statistics 5, 299 (1996).
[0156] S28. G. Parmigiani et al., http://www.bepress.com/jhubiostatlpaper126/(2006).
[0157] S29. Y. Benjamini, Y. Hochberg, Journal of the Royal Statistical Society. Series B (Methodological) 57 289-300 (1995).

We claim:

1. A method of diagnosing breast cancer in a human, comprising the steps of:
determining in a test sample relative to a normal sample of the human, a somatic mutation in a gene or its encoded cDNA or protein, said gene selected from the group consisting of those listed in FIG. 10 (Table S4B).
identifying the sample as breast cancer when the somatic mutation is determined.

2. The method of claim 1 wherein the mutation is selected from those shown in FIG. 8 (Table S3).

3. The method of claim 1 wherein the test sample is a breast tissue sample or a suspected breast cancer metastasis.

4. The method of claim 1 wherein the normal sample is a breast tissue sample.

5. A method of diagnosing colorectal cancer in a human, comprising the steps of:
determining in a test sample relative to a normal sample of the human, a somatic mutation in a gene or its encoded cDNA or protein, said gene selected from the group consisting of those listed in FIG. 9 (Table S4A);
identifying the sample as colorectal cancer when the somatic mutation is determined.

6. The method of claim 5 wherein the mutation is selected from those shown in FIG. 8 (Table S3).

7. The method of claim 5 wherein the test sample is a colorectal tissue sample or a suspected colorectal cancer metastasis.

8. The method of claim 5 wherein the normal sample is a colorectal tissue sample.

9. A method to stratify breast cancers for testing candidate or known anti-cancer therapeutics, comprising the steps of:
determining a CAN-gene mutational signature for a breast cancer by determining at least one somatic mutation in a test sample relative to a normal sample of a human, wherein the at least one somatic mutation is in one or more genes selected from the group consisting of FIG. 10 (Table S4B);
forming a first group of breast cancers that have the CAN-gene mutational signature;
comparing efficacy of a candidate or known anti-cancer therapeutic on the first group to efficacy on a second group of breast cancers that has a different CAN-gene mutational signature;
identifying a CAN gene mutational signature which correlates with increased or decreased efficacy of the candidate or known anti-cancer therapeutic relative to other groups.

10. The method of claim 9 wherein the at least one mutation is selected from those shown in FIG. 8 (Table S3).

11. The method of claim 9 wherein the test sample is a breast tissue sample.

12. The method of claim 9 wherein the normal sample is a breast tissue sample.

13. The method of claim 9 wherein the CAN-gene mutational signature comprises at least 2 genes selected from FIG. 10. Table S4B.

14. The method of claim 9 wherein the CAN-gene mutational signature comprises at least 3 genes selected from FIG. 10. Table S4B.

15. The method of claim 9 wherein the CAN-gene mutational signature comprises at least 4 genes selected from FIG. 10. Table S4B.

16. The method of claim 9 wherein the CAN-gene mutational signature comprises at least 5 genes selected from FIG. 10. Table S4B.

17. The method of claim 9 wherein the CAN-gene mutational signature comprises at least 6 genes selected from FIG. 10. Table S4B.

18. The method of claim 9 wherein the CAN-gene mutational signature comprises at least 7 genes selected from FIG. 10. Table S4B.

19. A method to stratify colorectal cancers for testing candidate or known anti-cancer therapeutics, comprising the steps of:
determining a CAN-gene mutational signature for a colorectal cancer by determining at least one somatic mutation in a test sample relative to a normal sample of the human, wherein the at least one somatic mutation is in one or more genes selected from the group consisting of FIG. 9 (Table S4A);
forming a first group of colorectal cancers that have the CAN-gene mutational signature;
comparing efficacy of a candidate or known anti-cancer therapeutic on the first group to efficacy on a second group of colorectal cancers that has a different CAN-gene mutational signature;
identifying a CAN gene mutational signature which correlates with increased or decreased efficacy of the candidate or known anti-cancer therapeutic relative to other groups.

20. The method of claim 19 wherein the at least one mutation is selected from those shown in FIG. 8 (Table S3).

21. The method of claim 19 wherein the test sample is a colorectal tissue sample.

22. The method of claim 19 wherein the normal sample is a colorectal tissue sample.

23. The method of claim 19 wherein the CAN-gene mutational signature comprises at least 2 genes selected from FIG. 9 (Table S4A).

24. The method of claim 19 wherein the CAN-gene mutational signature comprises at least 3 genes selected from FIG. 9 (Table S4A).

25. The method of claim 19 wherein the CAN-gene mutational signature comprises at least 4 genes selected from FIG. 9 (Table S4A).

26. The method of claim 19 wherein the CAN-gene mutational signature comprises at least 5 genes selected from FIG. 9 (Table S4A).

27. The method of claim 19 wherein the CAN-gene mutational signature comprises at least 6 genes selected from FIG. 9 (Table S4A).

28. The method of claim 19 wherein the CAN-gene mutational signature comprises at least 7 genes selected from FIG. 9 (Table S4A).

29. A method of characterizing a breast cancer in a human, comprising the steps of:
determining in a test sample relative to a normal sample of the human, a somatic mutation in a gene or its encoded cDNA or protein, said gene selected from the group consisting of those listed in FIG. 10 (Table S4B).

30. The method of claim 29 wherein the mutation is selected from those shown in FIG. 8 (Table S3).

31. The method of claim 29 wherein the test sample is a breast tissue sample or a suspected breast cancer metastasis.

32. The method of claim 29 wherein the normal sample is a breast tissue sample.

33. A method of characterizing a colorectal cancer in a human, comprising the steps of:
determining in a test sample relative to a normal sample of the human, a somatic mutation in a gene or its encoded cDNA or protein, said gene selected from the group consisting of those listed in FIG. 9 (Table S4A).

34. The method of claim 33 wherein the mutation is selected from those shown in FIG. 8 (Table S3).

35. The method of claim 33 wherein the test sample is a colorectal tissue sample or a suspected colorectal cancer metastasis.

36. The method of claim 33 wherein the normal sample is a colorectal tissue sample.

The application's sequence listing, which the Patent Office published only in electronic form, follows.

SEQUENCE LISTING (131069 sequences)

SEQ ID NO: 1 - DNA, 38 bp, Artificial Sequence
  primer
gtaaaacgacggccagtctcagaagttcaccctttgcc

SEQ ID NO: 2 - DNA, 38 bp, Artificial Sequence
  primer
gtaaaacgacggccagtgaaggacaaacacgggaagag

SEQ ID NO: 3 - DNA, 20 bp, Artificial Sequence
  primer
gtgaggtctgggaatggtgg

SEQ ID NO: 4 - DNA, 38 bp, Artificial Sequence
  primer
gtaaaacgacggccagtctccatccctgtctccttcac

SEQ ID NO: 5 - DNA, 37 bp, Artificial Sequence
  primer
gtaaaacgacggccagtgaagggtgttcctgggattg

SEQ ID NO: 6 - DNA, 21 bp, Artificial Sequence
  primer
agactcagccaaggcaaagag

SEQ ID NO: 7 - DNA, 18 bp, Artificial Sequence
  primer
acagggaagatgaagccg

SEQ ID NO: 8 - DNA, 35 bp, Artificial Sequence
  primer
gtaaaacgacggccagtgatttccgcgaggaggag

SEQ ID NO: 9 - DNA, 38 bp, Artificial Sequence
  primer
gtaaaacgacggccagtatttggctcccagctttgtag

SEQ ID NO: 10 - DNA, 21 bp, Artificial Sequence
  primer
gatctgggaggaaggtttctg

SEQ ID NO: 11 - DNA, 18 bp, Artificial Sequence
  primer
cacccagtggacgctcag

SEQ ID NO: 12 - DNA, 39 bp, Artificial Sequence
  primer
gtaaaacgacggccagtaatggacgtgggaaacaattac

SEQ ID NO: 13 - DNA, 40 bp, Artificial Sequence
  primer
gtaaaacgacggccagtcatgttacagaactgaagccagg

SEQ ID NO: 14 - DNA, 40 bp, Artificial Sequence
  primer
gtaaaacgacggccagttttgttatgcacctactgccttt

SEQ ID NO: 15 - DNA, 21 bp, Artificial Sequence
  primer
cccaaacgacacctcctttac

SEQ ID NO: 16 - DNA, 21 bp, Artificial Sequence
  primer
tcatttctctgcatttctcgg

SEQ ID NO: 17 - DNA, 21 bp, Artificial Sequence
  primer
tcatcctctctggagtcccac

SEQ ID NO: 18 - DNA, 20 bp, Artificial Sequence
  primer
aaatgtttgtcgatgcccag

SEQ ID NO: 19 - DNA, 39 bp, Artificial Sequence
  primer
gtaaaacgacggccagtgatttgggtaacagctgctctg

SEQ ID NO: 20 - DNA, 40 bp, Artificial Sequence
  primer
gtaaaacgacggccagtaatttgcttctcactggaagatg

SEQ ID NO: 21 - DNA, 37 bp, Artificial Sequence
  primer
gtaaaacgacggccagtaatgacctgggatgggtagg

SEQ ID NO: 22 - DNA, 38 bp, Artificial Sequence
  primer
gtaaaacgacggccagtatcgaagcaattggcagagag

SEQ ID NO: 23 - DNA, 20 bp, Artificial Sequence
  primer
aatgacctgggatgggtagg

SEQ ID NO: 24 - DNA, 39 bp, Artificial Sequence
  primer
gtaaaacgacggccagttttgggaccagatggattgtag

SEQ ID NO: 25 - DNA, 21 bp, Artificial Sequence
  primer
ttcttatgcatggccttcaac

SEQ ID NO: 26 - DNA, 37 bp, Artificial Sequence
  primer
gtaaaacgacggccagttccagggaagagtgcaacag

SEQ ID NO: 27 - DNA, 39 bp, Artificial Sequence
  primer
gtaaaacgacggccagtcgaggacagtctggtctttgtc

SEQ ID NO: 28 - DNA, 24 bp, Artificial Sequence
  primer
catgcctgtatcaataaatggagt

SEQ ID NO: 29 - DNA, 38 bp, Artificial Sequence
  primer
gtaaaacgacggccagtgccttcaaactcccatagagc

SEQ ID NO: 30 - DNA, 40 bp, Artificial Sequence
  primer
gtaaaacgacggccagttgaaatcttcatttgagaggagg

SEQ ID NO: 31 - DNA, 39 bp, Artificial Sequence
  primer
gtaaaacgacggccagtagcagagggaagtacagacagg

SEQ ID NO: 32 - DNA, 38 bp, Artificial Sequence
  primer
gtaaaacgacggccagttcacaccggttatctgaccac

SEQ ID NO: 33 - DNA, 21 bp, Artificial Sequence
  primer
cccagatccaagaagaaggaa

SEQ ID NO: 34 - DNA, 36 bp, Artificial Sequence
  primer
gtaaaacgacggccagtgtcctcagtgcctggaacc

SEQ ID NO: 35 - DNA, 38 bp, Artificial Sequence
  primer
gtaaaacgacggccagtgcatgcctacatttgaagcag

SEQ ID NO: 36 - DNA, 21 bp, Artificial Sequence
  primer
tcttgaggtgaattattgccg

SEQ ID NO: 37 - DNA, 21 bp, Artificial Sequence
  primer
atgagaggagagagggctttg

SEQ ID NO: 38 - DNA, 38 bp, Artificial Sequence
  primer
gtaaaacgacggccagtctctgcaaatgcgagtgaatg

SEQ ID NO: 39 - DNA, 20 bp, Artificial Sequence
  primer
agagcgagactccgtctcaa

SEQ ID NO: 40 - DNA, 38 bp, Artificial Sequence
  primer
gtaaaacgacggccagttggattgcttgtcaaattcaa

SEQ ID NO: 41 - DNA, 21 bp, Artificial Sequence
  primer
agaagctttccttgatgaccc

SEQ ID NO: 42 - DNA, 22 bp, Artificial Sequence
  primer
ttcccatctcaatccttgatta

SEQ ID NO: 43 - DNA, 22 bp, Artificial Sequence
  primer
tgaggcaacctgaaatctaacc

SEQ ID NO: 44 - DNA, 37 bp, Artificial Sequence
  primer
gtaaaacgacggccagtttccgttcctgcttctgtgt

SEQ ID NO: 45 - DNA, 38 bp, Artificial Sequence
  primer
gtaaaacgacggccagttgcatcgaactacctcctacg

SEQ ID NO: 46 - DNA, 38 bp, Artificial Sequence
  primer
gtaaaacgacggccagtggcatagtcctagcttctggg

SEQ ID NO: 47 - DNA, 25 bp, Artificial Sequence
  primer
ttgctttcaatcatacttctatccc

SEQ ID NO: 48 - DNA, 41 bp, Artificial Sequence
  primer
gtaaaacgacggccagtaaggaaactatccactctccaacc

SEQ ID NO: 49 - DNA, 21 bp, Artificial Sequence
  primer
gaagcctgttgctgtgaagtg

SEQ ID NO: 50 - DNA, 22 bp, Artificial Sequence
  primer
gggatggatatgggtaaggatg

SEQ ID NO: 51 - DNA, 38 bp, Artificial Sequence
  primer
gtaaaacgacggccagttgtgatccgtgtatttgcctg

SEQ ID NO: 52 - DNA, 38 bp, Artificial Sequence
  primer
gtaaaacgacggccagtggcttgggtactttcaccttg

SEQ ID NO: 53 - DNA, 38 bp, Artificial Sequence
  primer
gtaaaacgacggccagtagtccctcacatgggtctttg

SEQ ID NO: 54 - DNA, 38 bp, Artificial Sequence
  primer
gtaaaacgacggccagttcagagaaagggttagggacg

SEQ ID NO: 55 - DNA, 38 bp, Artificial Sequence
  primer
gtaaaacgacggccagtgctgtggaatgcttaacatgg

SEQ ID NO: 56 - DNA, 25 bp, Artificial Sequence
  primer
aaagcatttgaagaattctaccctc

SEQ ID NO: 57 - DNA, 24 bp, Artificial Sequence
  primer
tctgcacaatttaattaaggaccc

SEQ ID NO: 58 - DNA, 21 bp, Artificial Sequence
  primer
cttccttggcctgtatcccac

SEQ ID NO: 59 - DNA, 24 bp, Artificial Sequence
  primer
gattgcttatgggtaatgatttgg

SEQ ID NO: 60 - DNA, 38 bp, Artificial Sequence
  primer
gtaaaacgacggccagtgtgtgtcgcagagagtggaag

SEQ ID NO: 61 - DNA, 20 bp, Artificial Sequence
  primer
atctactggcacgttgtggg

SEQ ID NO: 62 - DNA, 21 bp, Artificial Sequence
  primer
ataacctgccagcagagatcc

SEQ ID NO: 63 - DNA, 21 bp, Artificial Sequence
  primer
cattgttctcaagaacctgcg

SEQ ID NO: 64 - DNA, 21 bp, Artificial Sequence
  primer
acttcgtggaccactacaacg

SEQ ID NO: 65 - DNA, 21 bp, Artificial Sequence
  primer
tgatttaaaggagcaggctgg

SEQ ID NO: 66 - DNA, 38 bp, Artificial Sequence
  primer
gtaaaacgacggccagttgggaagctggcttctttaac

SEQ ID NO: 67 - DNA, 21 bp, Artificial Sequence
  primer
atcatctggaaatacggtggc

SEQ ID NO: 68 - DNA, 21 bp, Artificial Sequence
  primer
gaagacttccaggaggtgagc

SEQ ID NO: 69 - DNA, 21 bp, Artificial Sequence
  primer
cctctgcactttcttgctctg

SEQ ID NO: 70 - DNA, 38 bp, Artificial Sequence
  primer
gtaaaacgacggccagtttcttccctttgctttcacag

SEQ ID NO: 71 - DNA, 38 bp, Artificial Sequence
  primer
gtaaaacgacggccagttgtctaagccaatgtcgtgaa

SEQ ID NO: 72 - DNA, 22 bp, Artificial Sequence
  primer
tccaaagagcagaagtcctttc

SEQ ID NO: 73 - DNA, 38 bp, Artificial Sequence
  primer
gtaaaacgacggccagttgcctaccacatgctaaccac

SEQ ID NO: 74 - DNA, 21 bp, Artificial Sequence
  primer
ttcttctcttgggagctggag

SEQ ID NO: 75 - DNA, 39 bp, Artificial Sequence
  primer
gtaaaacgacggccagtgccctgaattatttcttggatg

SEQ ID NO: 76 - DNA, 40 bp, Artificial Sequence
  primer
gtaaaacgacggccagttctgacctaatcttcattgcagg

SEQ ID NO: 77 - DNA, 35 bp, Artificial Sequence
  primer
gtaaaacgacggccagtgtgtggtgcctactgccc

SEQ ID NO: 78 - DNA, 38 bp, Artificial Sequence
  primer
gtaaaacgacggccagtatacgaatctagcccgggaac

SEQ ID NO: 79 - DNA, 38 bp, Artificial Sequence
  primer
gtaaaacgacggccagtggagatggcacggaattaaag

SEQ ID NO: 80 - DNA, 38 bp, Artificial Sequence
  primer
gtaaaacgacggccagtatgaaaggacagcccgtagag

SEQ ID NO: 81 - DNA, 38 bp, Artificial Sequence
  primer
gtaaaacgacggccagtgagtgcctgtccttccttgtc

SEQ ID NO: 82 - DNA, 38 bp, Artificial Sequence
  primer
gtaaaacgacggccagtttcagagggtaggagtggtcc

SEQ ID NO: 83 - DNA, 39 bp, Artificial Sequence
  primer
gtaaaacgacggccagtggaaatgaatgtgagcttctgg

SEQ ID NO: 84 - DNA, 38 bp, Artificial Sequence
  primer
gtaaaacgacggccagtgctttccctccttaactgcac

SEQ ID NO: 85 - DNA, 38 bp, Artificial Sequence
  primer
gtaaaacgacggccagttttcacaacctggatttgagc

SEQ ID NO: 86 - DNA, 21 bp, Artificial Sequence
  primer
gtgcctcatgtttcacagtcc

SEQ ID NO: 87 - DNA, 38 bp, Artificial Sequence
  primer
gtaaaacgacggccagtactccttcagctgtctttcgg

SEQ ID NO: 88 - DNA, 38 bp, Artificial Sequence
  primer
gtaaaacgacggccagtacctggccacctctactttcc

SEQ ID NO: 89 - DNA, 21 bp, Artificial Sequence
  primer
agatttcgaggtgttgatgcc

SEQ ID NO: 90 - DNA, 38 bp, Artificial Sequence
  primer
gtaaaacgacggccagtcagacaccagatggtgaggag

SEQ ID NO: 91 - DNA, 38 bp, Artificial Sequence
  primer
gtaaaacgacggccagttggctgtgcttatgaaaggtg

SEQ ID NO: 92 - DNA, 38 bp, Artificial Sequence
  primer
gtaaaacgacggccagtagccttcctgcacaaacaaac

SEQ ID NO: 93 - DNA, 38 bp, Artificial Sequence
  primer
gtaaaacgacggccagtagttggatggagaagctgagg

SEQ ID NO: 94 - DNA, 36 bp, Artificial Sequence
  primer
gtaaaacgacggccagtgccgttcagtcccttgttc

SEQ ID NO: 95 - DNA, 21 bp, Artificial Sequence
  primer
atgctcaaggcttctgaggtg

SEQ ID NO: 96 - DNA, 20 bp, Artificial Sequence
  primer
caatgagtgagctggcttcc

SEQ ID NO: 97 - DNA, 38 bp, Artificial Sequence
  primer
gtaaaacgacggccagtttcattcagtgtctggcttgc

SEQ ID NO: 98 - DNA, 37 bp, Artificial Sequence
  primer
gtaaaacgacggccagtcccttcccactctgaccttg

SEQ ID NO: 99 - DNA, 38 bp, Artificial Sequence
  primer
gtaaaacgacggccagtactccaaccttgaactcctgg

SEQ ID NO: 100 - DNA, 21 bp, Artificial Sequence
  primer
gccaggagtcaatctgggtag

SEQ ID NO: 101 - DNA, 21 bp, Artificial Sequence
  primer
gtcccaggaagtttccaaatc

SEQ ID NO: 102 - DNA, 21 bp, Artificial Sequence
  primer
accctccaaagtctgcttctc

SEQ ID NO: 103 - DNA, 20 bp, Artificial Sequence
  primer
cagggacacaggaagctgag

SEQ ID NO: 104 - DNA, 21 bp, Artificial Sequence
  primer
gtgcacctgtgaggaagtcag

SEQ ID NO: 105 - DNA, 38 bp, Artificial Sequence
  primer
gtaaaacgacggccagttccatcctatttcctgcttgc

SEQ ID NO: 106 - DNA, 38 bp, Artificial Sequence
  primer
gtaaaacgacggccagtctcttggcaccttctcctttg

SEQ ID NO: 107 - DNA, 20 bp, Artificial Sequence
  primer
ctgctgtgacaggtgtgtgg

SEQ ID NO: 108 - DNA, 38 bp, Artificial Sequence
  primer
gtaaaacgacggccagtgacctacacccagcgtctgtc

SEQ ID NO: 109 - DNA, 20 bp, Artificial Sequence
  primer
gagaaagagccgggtggtag

SEQ ID NO: 110 - DNA, 20 bp, Artificial Sequence
  primer
gactgggagaacacaggcac

SEQ ID NO: 111 - DNA, 21 bp, Artificial Sequence
  primer
tcttagagccgagacccattc

SEQ ID NO: 112 - DNA, 37 bp, Artificial Sequence
  primer
gtaaaacgacggccagtgtggagctgaagcacactgc

SEQ ID NO: 113 - DNA, 38 bp, Artificial Sequence
  primer
gtaaaacgacggccagtccaccctaggcataacctttg

SEQ ID NO: 114 - DNA, 38 bp, Artificial Sequence
  primer
gtaaaacgacggccagttttgtgaaggaaacagccttg

SEQ ID NO: 115 - DNA, 22 bp, Artificial Sequence
  primer
cctccagcatgtattaggttgg

SEQ ID NO: 116 - DNA, 39 bp, Artificial Sequence
  primer
gtaaaacgacggccagtgtttgctgtggtggtatgtttc

SEQ ID NO: 117 - DNA, 21 bp, Artificial Sequence
  primer
agctccttgatgacccagatg

SEQ ID NO: 118 - DNA, 22 bp, Artificial Sequence
  primer
ccaaattatggcagttctgagc

SEQ ID NO: 119 - DNA, 38 bp, Artificial Sequence
  primer
gtaaaacgacggccagtcactttgcaaggacaccgtag

SEQ ID NO: 120 - DNA, 21 bp, Artificial Sequence
  primer
cagacactcagttggtgaggg

SEQ ID NO: 121 - DNA, 23 bp, Artificial Sequence
  primer
tcaggattaatttggtgcatttc

SEQ ID NO: 122 - DNA, 23 bp, Artificial Sequence
  primer
ggtaagtaggtttggtttggtgg

SEQ ID NO: 123 - DNA, 21 bp, Artificial Sequence
  primer
agcttgatagggtggtgatgg

SEQ ID NO: 124 - DNA, 38 bp, Artificial Sequence
  primer
gtaaaacgacggccagttcatggtgaagtattgggtgg

SEQ ID NO: 125 - DNA, 38 bp, Artificial Sequence
  primer
gtaaaacgacggccagtaggacttgacgaggctctttg

SEQ ID NO: 126 - DNA, 38 bp, Artificial Sequence
  primer
gtaaaacgacggccagtaatgcatgcttaactatccgc

SEQ ID NO: 127 - DNA, 23 bp, Artificial Sequence
  primer
caaagtgcttgataaagctgtca

SEQ ID NO: 128 - DNA, 38 bp, Artificial Sequence
  primer
gtaaaacgacggccagttgacccgcaaagtgtttactg

SEQ ID NO: 129 - DNA, 21 bp, Artificial Sequence
  primer
gtaacctcaaccctcaggagc

SEQ ID NO: 130 - DNA, 21 bp, Artificial Sequence
  primer
gagcctttaatgccttgttcc

SEQ ID NO: 131 - DNA, 41 bp, Artificial Sequence
  primer
gtaaaacgacggccagtgttatccaaatccatctcctgttc

SEQ ID NO: 132 - DNA, 38 bp, Artificial Sequence
  primer
gtaaaacgacggccagtcccaggtcacaattgtctgtc

SEQ ID NO: 133 - DNA, 26 bp, Artificial Sequence
  primer
aacagtgcctgctacataacaaatag

SEQ ID NO: 134 - DNA, 38 bp, Artificial Sequence
  primer
gtaaaacgacggccagttagcctggactctggagactg

SEQ ID NO: 135 - DNA, 42 bp, Artificial Sequence
  primer
gtaaaacgacggccagtttatgccatttaacaacacactttg

SEQ ID NO: 136 - DNA, 24 bp, Artificial Sequence
  primer
gcatttgccatattgattctgaac

SEQ ID NO: 137 - DNA, 21 bp, Artificial Sequence
  primer
tagaaattgatggcatcctgc

SEQ ID NO: 138 - DNA, 21 bp, Artificial Sequence
  primer
ctataggcatcctccctcagc

SEQ ID NO: 139 - DNA, 21 bp, Artificial Sequence
  primer
ttagcagtgacagtggcaacc

SEQ ID NO: 140 - DNA, 21 bp, Artificial Sequence
  primer
gtgctaatggaactgactggc

SEQ ID NO: 141 - DNA, 38 bp, Artificial Sequence
  primer
gtaaaacgacggccagtggacgccgttcattctcttag

SEQ ID NO: 142 - DNA, 21 bp, Artificial Sequence
  primer
atctcctgtgttccacttggg

SEQ ID NO: 143 - DNA, 20 bp, Artificial Sequence
  primer
cttctgcagattgctcccag

SEQ ID NO: 144 - DNA, 20 bp, Artificial Sequence
  primer
atgtggatggtgccagtttc

SEQ ID NO: 145 - DNA, 20 bp, Artificial Sequence
  primer
ccctctggtgcaaagcatag

SEQ ID NO: 146 - DNA, 38 bp, Artificial Sequence
  primer
gtaaaacgacggccagttttccatcagctctcagtccc

SEQ ID NO: 147 - DNA, 37 bp, Artificial Sequence
  primer
gtaaaacgacggccagtgaagcattgtgtcctctgcc

SEQ ID NO: 148 - DNA, 22 bp, Artificial Sequence
  primer
gaaagacagtgaggaggacacg

SEQ ID NO: 149 - DNA, 38 bp, Artificial Sequence
  primer
gtaaaacgacggccagtcctttggctttagcactggtc

SEQ ID NO: 150 - DNA, 21 bp, Artificial Sequence
  primer
agcacagattgtcaaagcctg

SEQ ID NO: 151 - DNA, 20 bp, Artificial Sequence
  primer
ctccaacgtgggtgaaagag

SEQ ID NO: 152 - DNA, 21 bp, Artificial Sequence
  primer
caaggacctttgaatgtgtcg

SEQ ID NO: 153 - DNA, 21 bp, Artificial Sequence
  primer
aaacgggccagattgagtatc

SEQ ID NO: 154 - DNA, 21 bp, Artificial Sequence
  primer
aatagtgaatgatccgctggc

SEQ ID NO: 155 - DNA, 21 bp, Artificial Sequence
  primer
ccaaccttcgtagctattggc

SEQ ID NO: 156 - DNA, 21 bp, Artificial Sequence
  primer
ctgactccaccttcccttctc

SEQ ID NO: 157 - DNA, 21 bp, Artificial Sequence
  primer
aagacacgctttgggtgaaag

SEQ ID NO: 158 - DNA, 21 bp, Artificial Sequence
  primer
ctagctggtcctttcagtggg

SEQ ID NO: 159 - DNA, 38 bp, Artificial Sequence
  primer
gtaaaacgacggccagtacctgctacctggaaagtccc

SEQ ID NO: 160 - DNA, 21 bp, Artificial Sequence
  primer
aactcacctgtgattcctggg

SEQ ID NO: 161 - DNA, 38 bp, Artificial Sequence
  primer
gtaaaacgacggccagttgttagcctgggcctttgtag

SEQ ID NO: 162 - DNA, 21 bp, Artificial Sequence
  primer
ccttcctgggtcttcactgtc

SEQ ID NO: 163 - DNA, 38 bp, Artificial Sequence
  primer
gtaaaacgacggccagtcagtgtgtgagtgaggatggg

SEQ ID NO: 164 - DNA, 21 bp, Artificial Sequence
  primer
tgtccctctttgagaattggg

SEQ ID NO: 165 - DNA, 38 bp, Artificial Sequence
  primer
gtaaaacgacggccagtagaactgagggtgtgctggag

SEQ ID NO: 166 - DNA, 38 bp, Artificial Sequence
  primer
gtaaaacgacggccagtcttgctgttctccaacaggtg

SEQ ID NO: 167 - DNA, 21 bp, Artificial Sequence
  primer
tagtctcctgtccttggaggc

SEQ ID NO: 168 - DNA, 18 bp, Artificial Sequence
  primer
acacctgctccctgcctg

SEQ ID NO: 169 - DNA, 21 bp, Artificial Sequence
  primer
ctgagtcgtgctttgacttgg

SEQ ID NO: 170 - DNA, 20 bp, Artificial Sequence
  primer
gtgtggtcgtctcttcctgc

SEQ ID NO: 171 - DNA, 22 bp, Artificial Sequence
  primer
tgtgttcctagcatctggtctc

SEQ ID NO: 172 - DNA, 35 bp, Artificial Sequence
  primer
gtaaaacgacggccagtcggtggttgcaagtctgg

SEQ ID NO: 173 - DNA, 38 bp, Artificial Sequence
  primer
gtaaaacgacggccagttaaccagcagggactggagag

SEQ ID NO: 174 - DNA, 38 bp, Artificial Sequence
  primer
gtaaaacgacggccagtgctaatgctcctcaatcctcc

SEQ ID NO: 175 - DNA, 38 bp, Artificial Sequence
  primer
gtaaaacgacggccagtatgcgaaagaagcaggcttag

SEQ ID NO: 176 - DNA, 20 bp, Artificial Sequence
  primer
cactgcacccagctaaggag

SEQ ID NO: 177 - DNA, 21 bp, Artificial Sequence
  primer
ttaattccttctgccagtccc

SEQ ID NO: 178 - DNA, 38 bp, Artificial Sequence
  primer
gtaaaacgacggccagtgcaagttccagtcctttggag

SEQ ID NO: 179 - DNA, 38 bp, Artificial Sequence
  primer
gtaaaacgacggccagtgcgaagccctttcatattgtc

SEQ ID NO: 180 - DNA, 23 bp, Artificial Sequence
  primer
cactgcacctggcctatttaatc

SEQ ID NO: 181 - DNA, 38 bp, Artificial Sequence
  primer
gtaaaacgacggccagtgggaagctgggaaatgtaacc

SEQ ID NO: 182 - DNA, 38 bp, Artificial Sequence
  primer
gtaaaacgacggccagttactgatgcccttgactttgc

SEQ ID NO: 183 - DNA, 21 bp, Artificial Sequence
  primer
gtcaacccattcctgcttctc

SEQ ID NO: 184 - DNA, 21 bp, Artificial Sequence
  primer
gtatgttgctgcaaggcctac

SEQ ID NO: 185 - DNA, 38 bp, Artificial Sequence
  primer
gtaaaacgacggccagtccaggacactagtcagggagg

SEQ ID NO: 186 - DNA, 38 bp, Artificial Sequence
  primer
gtaaaacgacggccagtgtgtttcctaggcaaaggctg

SEQ ID NO: 187 - DNA, 37 bp, Artificial Sequence
  primer
gtaaaacgacggccagtggattgagattgggaggagc

SEQ ID NO: 188 - DNA, 37 bp, Artificial Sequence
  primer
gtaaaacgacggccagtgatggctcctccatcctttc

SEQ ID NO: 189 - DNA, 37 bp, Artificial Sequence
  primer
gtaaaacgacggccagtctgagtcctcctaccgccag

SEQ ID NO: 190 - DNA, 21 bp, Artificial Sequence
  primer
cagccatccctatcctcactc

SEQ ID NO: 191 - DNA, 21 bp, Artificial Sequence
  primer
attctgggaacaagatggcag

SEQ ID NO: 192 - DNA, 20 bp, Artificial Sequence
  primer
agctgtgacttgagggaggg

SEQ ID NO: 193 - DNA, 21 bp, Artificial Sequence
  primer
tactccacttgggcatctgtc

SEQ ID NO: 194 - DNA, 38 bp, Artificial Sequence
  primer
gtaaaacgacggccagtctggatgtggttggctttagg

SEQ ID NO: 195 - DNA, 38 bp, Artificial Sequence
  primer
gtaaaacgacggccagtacacactggacctcgtccttc

SEQ ID NO: 196 - DNA, 37 bp, Artificial Sequence
  primer
gtaaaacgacggccagtcaaactgctcagcccttgac

SEQ ID NO: 197 - DNA, 21 bp, Artificial Sequence
  primer
ggattccagtgggagagaaag

SEQ ID NO: 198 - DNA, 21 bp, Artificial Sequence
  primer
ccagtatggagcgggtatttg

SEQ ID NO: 199 - DNA, 21 bp, Artificial Sequence
  primer
tattccagaagggctgcagag

SEQ ID NO: 200 - DNA, 37 bp, Artificial Sequence
  primer
gtaaaacgacggccagtatgtccaagatggttgctgc

SEQ ID NO: 201 - DNA, 39 bp, Artificial Sequence
  primer
gtaaaacgacggccagtgaggtgagtctccatcacaacc

SEQ ID NO: 202 - DNA, 38 bp, Artificial Sequence
  primer
gtaaaacgacggccagtggatcctccctaactgttccc

SEQ ID NO: 203 - DNA, 38 bp, Artificial Sequence
  primer
gtaaaacgacggccagtgaccgtgtttcaatgcatcag

SEQ ID NO: 204 - DNA, 38 bp, Artificial Sequence
  primer
gtaaaacgacggccagttctctggatgaggtgagttgg

SEQ ID NO: 205 - DNA, 38 bp, Artificial Sequence
  primer
gtaaaacgacggccagtctatgctgtgggacgtgagtc

SEQ ID NO: 206 - DNA, 38 bp, Artificial Sequence
  primer
gtaaaacgacggccagtttgattatttggtgctggtgc

SEQ ID NO: 207 - DNA, 38 bp, Artificial Sequence
  primer
gtaaaacgacggccagtgatatttgtctgcagggtggg

SEQ ID NO: 208 - DNA, 38 bp, Artificial Sequence
  primer
gtaaaacgacggccagtggaagtggtgagggaagtgag

SEQ ID NO: 209 - DNA, 37 bp, Artificial Sequence
  primer
gtaaaacgacggccagtcagtgagtgctagccaagcc

SEQ ID NO: 210 - DNA, 21 bp, Artificial Sequence
  primer
gagggtaccttgagtggatgc

SEQ ID NO: 211 - DNA, 35 bp, Artificial Sequence
  primer
gtaaaacgacggccagttttccctgtccctccacc

SEQ ID NO: 212 - DNA, 38 bp, Artificial Sequence
  primer
gtaaaacgacggccagtcaataaagtgctccggaaacc

SEQ ID NO: 213 - DNA, 21 bp, Artificial Sequence
  primer
cccaaggatactgagggatga

SEQ ID NO: 214 - DNA, 21 bp, Artificial Sequence
  primer
tctggccaacattcagaaact

SEQ ID NO: 215 - DNA, 38 bp, Artificial Sequence
  primer
gtaaaacgacggccagtcacagccttcatttccatgtg

SEQ ID NO: 216 - DNA, 43 bp, Artificial Sequence
  primer
gtaaaacgacggccagttttcctcttgtcagtctttgaattag

SEQ ID NO: 217 - DNA, 27 bp, Artificial Sequence
  primer
tctgcttatttactgaacttattgtgt

SEQ ID NO: 218 - DNA, 30 bp, Artificial Sequence
  primer
caagtaatagtaacagtagcaaagcaattt

SEQ ID NO: 219 - DNA, 21 bp, Artificial Sequence
  primer
actgagccactatgcctgacc

SEQ ID NO: 220 - DNA, 36 bp, Artificial Sequence
  primer
gtaaaacgacggccagtgtgagccactgtacccgac

SEQ ID NO: 221 - DNA, 21 bp, Artificial Sequence
  primer
attccttaaagtccatccggc

SEQ ID NO: 222 - DNA, 21 bp, Artificial Sequence
  primer
gccatcatgactttcacttgc

SEQ ID NO: 223 - DNA, 21 bp, Artificial Sequence
  primer
aaacctgcgatagggactcag

SEQ ID NO: 224 - DNA, 24 bp, Artificial Sequence
  primer
ggactgaatataaattgcatgctg

SEQ ID NO: 225 - DNA, 27 bp, Artificial Sequence
  primer
tctgggtagtgtcctttgtctttatac

SEQ ID NO: 226 - DNA, 44 bp, Artificial Sequence
  primer
gtaaaacgacggccagttctaaccctaggagatgtatgagtttg

SEQ ID NO: 227 - DNA, 39 bp, Artificial Sequence
  primer
gtaaaacgacggccagtgctttaagggagaaattggagc

SEQ ID NO: 228 - DNA, 35 bp, Artificial Sequence
  primer
gtaaaacgacggccagtaggaggtggctgagtcgg

SEQ ID NO: 229 - DNA, 20 bp, Artificial Sequence
  primer
gagagggaattgctaaggcg

SEQ ID NO: 230 - DNA, 21 bp, Artificial Sequence
  primer
aacttgctttgacttgccgag

SEQ ID NO: 231 - DNA, 22 bp, Artificial Sequence
  primer
tgccctaagatcatatggatgg

SEQ ID NO: 232 - DNA, 20 bp, Artificial Sequence
  primer
tatatgcacgcgtgtgagtg

SEQ ID NO: 233 - DNA, 44 bp, Artificial Sequence
  primer
gtaaaacgacggccagtaggaatcctatgttgtcatttaatact

SEQ ID NO: 234 - DNA, 36 bp, Artificial Sequence
  primer
gtaaaacgacggccagtcagaactgatctgccagcc

SEQ ID NO: 235 - DNA, 38 bp, Artificial Sequence
  primer
gtaaaacgacggccagtaaagatttgttgtgcctttgc

SEQ ID NO: 236 - DNA, 21 bp, Artificial Sequence
  primer
gcctaccattggtttgctacc

SEQ ID NO: 237 - DNA, 37 bp, Artificial Sequence
  primer
gtaaaacgacggccagtaccatgcagattggagaacg

SEQ ID NO: 238 - DNA, 21 bp, Artificial Sequence
  primer
ctttgggacatcacacacctt

SEQ ID NO: 239 - DNA, 38 bp, Artificial Sequence
  primer
gtaaaacgacggccagtgcagtcctggttgtagggaag

SEQ ID NO: 240 - DNA, 38 bp, Artificial Sequence
  primer
gtaaaacgacggccagttttcccaaactggaggtaagg

SEQ ID NO: 241 - DNA, 40 bp, Artificial Sequence
  primer
gtaaaacgacggccagtttctatactgaaatctgggtggc

SEQ ID NO: 242 - DNA, 41 bp, Artificial Sequence
  primer
gtaaaacgacggccagtaaatatttgggatccacattgaaa

SEQ ID NO: 243 - DNA, 38 bp, Artificial Sequence
  primer
gtaaaacgacggccagtgagatgggttgctgaagaagg

SEQ ID NO: 244 - DNA, 39 bp, Artificial Sequence
  primer
gtaaaacgacggccagtgggcagagttgattgcttgtag

SEQ ID NO: 245 - DNA, 21 bp, Artificial Sequence
  primer
cgacacagcctcttgaaagtc

SEQ ID NO: 246 - DNA, 23 bp, Artificial Sequence
  primer
gatttgtggaatgcaagattctg

SEQ ID NO: 247 - DNA, 39 bp, Artificial Sequence
  primer
gtaaaacgacggccagttttggttcttggatctggctac

SEQ ID NO: 248 - DNA, 44 bp, Artificial Sequence
  primer
gtaaaacgacggccagtccttaagatgcagctttaatacagttc

SEQ ID NO: 249 - DNA, 38 bp, Artificial Sequence
  primer
gtaaaacgacggccagttgcaagctacatcacaccagc

SEQ ID NO: 250 - DNA, 23 bp, Artificial Sequence
  primer
tcaaatggtacatgctttgaaga

SEQ ID NO: 251 - DNA, 24 bp, Artificial Sequence
  primer
tgttcgtataatgcagataagccc

SEQ ID NO: 252 - DNA, 24 bp, Artificial Sequence
  primer
gctaggcaaattctagaagagctg

SEQ ID NO: 253 - DNA, 24 bp, Artificial Sequence
  primer
tggtgaaatatcgtttggaatagc

SEQ ID NO: 254 - DNA, 39 bp, Artificial Sequence
  primer
gtaaaacgacggccagtttaccaccttgtaattctgccc

SEQ ID NO: 255 - DNA, 20 bp, Artificial Sequence
  primer
agggcaggaggagatgacag

SEQ ID NO: 256 - DNA, 40 bp, Artificial Sequence
  primer
gtaaaacgacggccagtcctccaagaattcattgactctg

SEQ ID NO: 257 - DNA, 37 bp, Artificial Sequence
  primer
gtaaaacgacggccagtgaatcggatcaaggcgagag

SEQ ID NO: 258 - DNA, 38 bp, Artificial Sequence
  primer
gtaaaacgacggccagtgagataaatgggtcgaccagg

SEQ ID NO: 259 - DNA, 38 bp, Artificial Sequence
  primer
gtaaaacgacggccagttttgttagggtaggacccgtg

SEQ ID NO: 260 - DNA, 21 bp, Artificial Sequence
  primer
ctgatgaggaagggtctggag

SEQ ID NO: 261 - DNA, 38 bp, Artificial Sequence
  primer
gtaaaacgacggccagtggtgtggtttcctgttcttcc

SEQ ID NO: 262 - DNA, 38 bp, Artificial Sequence
  primer
gtaaaacgacggccagtctgtgtgtatcctgtgcctcc

SEQ ID NO: 263 - DNA, 41 bp, Artificial Sequence
  primer
gtaaaacgacggccagttgaatggagacagaacaggtaagg

SEQ ID NO: 264 - DNA, 24 bp, Artificial Sequence
  primer
cagtcctttacagaaagtccctcc

SEQ ID NO: 265 - DNA, 24 bp, Artificial Sequence
  primer
gctgcattaatttcagtcgtagag

SEQ ID NO: 266 - DNA, 38 bp, Artificial Sequence
  primer
gtaaaacgacggccagtccactgggttgtcccttattg

SEQ ID NO: 267 - DNA, 39 bp, Artificial Sequence
  primer
gtaaaacgacggccagtaattgattagtcagtttggccc

SEQ ID NO: 268 - DNA, 38 bp, Artificial Sequence
  primer
gtaaaacgacggccagtcccaatgacagtggtaagtgc

SEQ ID NO: 269 - DNA, 21 bp, Artificial Sequence
  primer
aacactcattccctggagacg

SEQ ID NO: 270 - DNA, 38 bp, Artificial Sequence
  primer
gtaaaacgacggccagtgatgggatctttggctgagag

SEQ ID NO: 271 - DNA, 38 bp, Artificial Sequence
  primer
gtaaaacgacggccagtaaggtcctggcactacctctg

SEQ ID NO: 272 - DNA, 23 bp, Artificial Sequence
  primer
gcgtgtaatggaatagtttcctg

SEQ ID NO: 273 - DNA, 21 bp, Artificial Sequence
  primer
aaatacattgctggcacccac

SEQ ID NO: 274 - DNA, 21 bp, Artificial Sequence
  primer
gagtcagggatgttaggtggg

SEQ ID NO: 275 - DNA, 38 bp, Artificial Sequence
  primer
gtaaaacgacggccagtggaggctatttgaacacaggg

SEQ ID NO: 276 - DNA, 38 bp, Artificial Sequence
  primer
gtaaaacgacggccagtacagccctggttctgtctgtc

SEQ ID NO: 277 - DNA, 39 bp, Artificial Sequence
  primer
gtaaaacgacggccagtgcctcacgtttcagtacagacc

SEQ ID NO: 278 - DNA, 38 bp, Artificial Sequence
  primer
gtaaaacgacggccagtcctgagaaggattcctggttc

SEQ ID NO: 279 - DNA, 38 bp, Artificial Sequence
  primer
gtaaaacgacggccagtccttgcgctgaaatgtctatc

SEQ ID NO: 280 - DNA, 21 bp, Artificial Sequence
  primer
cccatccacacacatagcttc

SEQ ID NO: 281 - DNA, 21 bp, Artificial Sequence
  primer
cagttagctggctatggaggg

SEQ ID NO: 282 - DNA, 21 bp, Artificial Sequence
  primer
gaagaattcagcgagattggg

SEQ ID NO: 283 - DNA, 38 bp, Artificial Sequence
  primer
gtaaaacgacggccagttgacgaagcacagccattaag

SEQ ID NO: 284 - DNA, 20 bp, Artificial Sequence
  primer
gtgggtggtaggaaggaagc

SEQ ID NO: 285 - DNA, 21 bp, Artificial Sequence
  primer
agtcccgtagtcatggaaacc

SEQ ID NO: 286 - DNA, 20 bp, Artificial Sequence
  primer
tttcccatttggctgtgttt

SEQ ID NO: 287 - DNA, 21 bp, Artificial Sequence
  primer
caggccctttagaggtgatcc

SEQ ID NO: 288 - DNA, 22 bp, Artificial Sequence
  primer
tctttgcatatccatcggagac

SEQ ID NO: 289 - DNA, 40 bp, Artificial Sequence
  primer
gtaaaacgacggccagtcatagcatagttgcactcaaggg

SEQ ID NO: 290 - DNA, 39 bp, Artificial Sequence
  primer
gtaaaacgacggccagttctcttccatcctaagtggtgc

SEQ ID NO: 291 - DNA, 22 bp, Artificial Sequence
  primer
gagtgttgtgatccagacatgg

SEQ ID NO: 292 - DNA, 27 bp, Artificial Sequence
  primer
tcttctttctttaaactacatgttggg

SEQ ID NO: 293 - DNA, 24 bp, Artificial Sequence
  primer
tgaatgtatcatttgaattggtgg

SEQ ID NO: 294 - DNA, 38 bp, Artificial Sequence
  primer
gtaaaacgacggccagtcccattgcctttattcttcca

SEQ ID NO: 295 - DNA, 41 bp, Artificial Sequence
  primer
gtaaaacgacggccagttggaagtctgtacctactcgtctg

SEQ ID NO: 296 - DNA, 38 bp, Artificial Sequence
  primer
gtaaaacgacggccagttcccatgtatttccaaactgg

SEQ ID NO: 297 - DNA, 21 bp, Artificial Sequence
  primer
agctatagtgtccacccacgc

SEQ ID NO: 298 - DNA, 21 bp, Artificial Sequence
  primer
tcattcaacagatttcagccc

SEQ ID NO: 299 - DNA, 38 bp, Artificial Sequence
  primer
gtaaaacgacggccagtggtgttactcgagtggaggtg

SEQ ID NO: 300 - DNA, 38 bp, Artificial Sequence
  primer
gtaaaacgacggccagtctaaggccatttctggtaggc

SEQ ID NO: 301 - DNA, 38 bp, Artificial Sequence
  primer
gtaaaacgacggccagttaccagggtagcctcaaggtc

SEQ ID NO: 302 - DNA, 19 bp, Artificial Sequence
  primer
ggtgtccatggcacatacc

SEQ ID NO: 303 - DNA, 21 bp, Artificial Sequence
  primer
tttgtgcatgaaatctgcatt

SEQ ID NO: 304 - DNA, 41 bp, Artificial Sequence
  primer
gtaaaacgacggccagttgctttaagaagttgaagacctcc

SEQ ID NO: 305 - DNA, 21 bp, Artificial Sequence
  primer
cagtcagtcaccacccttgtc

SEQ ID NO: 306 - DNA, 21 bp, Artificial Sequence
  primer
gatctggaatgcattggtcac

SEQ ID NO: 307 - DNA, 38 bp, Artificial Sequence
  primer
gtaaaacgacggccagtcattggtgtatggctttgcag

SEQ ID NO: 308 - DNA, 38 bp, Artificial Sequence
  primer
gtaaaacgacggccagtgagagtggtgggagagactgg

SEQ ID NO: 309 - DNA, 37 bp, Artificial Sequence
  primer
gtaaaacgacggccagtggacagacttggcatgaagc

SEQ ID NO: 310 - DNA, 38 bp, Artificial Sequence
  primer
gtaaaacgacggccagtacatggtgatgaatggagctg

SEQ ID NO: 311 - DNA, 21 bp, Artificial Sequence
  primer
tttctccactgtcccattgtg

SEQ ID NO: 312 - DNA, 21 bp, Artificial Sequence
  primer
agacttcaaggacccagcttc

SEQ ID NO: 313 - DNA, 39 bp, Artificial Sequence
  primer
gtaaaacgacggccagtttggttaggagtcggtttcttg

SEQ ID NO: 314 - DNA, 37 bp, Artificial Sequence
  primer
gtaaaacgacggccagttcccaaggctttgagatgac

SEQ ID NO: 315 - DNA, 41 bp, Artificial Sequence
  primer
gtaaaacgacggccagtttcaactaagaactctctggctcc

SEQ ID NO: 316 - DNA, 38 bp, Artificial Sequence
  primer
gtaaaacgacggccagttacaagcaggcatttcttggg

SEQ ID NO: 317 - DNA, 40 bp, Artificial Sequence
  primer
gtaaaacgacggccagtagggacactgtcatttacctcag

SEQ ID NO: 318 - DNA, 38 bp, Artificial Sequence
  primer
gtaaaacgacggccagtagcccttgcctcctagtgtag

SEQ ID NO: 319 - DNA, 22 bp, Artificial Sequence
  primer
tgggcaataagagtgaaactcc

SEQ ID NO: 320 - DNA, 38 bp, Artificial Sequence
  primer
gtaaaacgacggccagtagatgtggtgctccctctagc

SEQ ID NO: 321 - DNA, 38 bp, Artificial Sequence
  primer
gtaaaacgacggccagtttacgcctctgcattgtctct

SEQ ID NO: 322 - DNA, 22 bp, Artificial Sequence
  primer
ttctgcaccttatgattgatcc

SEQ ID NO: 323 - DNA, 38 bp, Artificial Sequence
  primer
gtaaaacgacggccagtgtcaaggaggaaatggacctg

SEQ ID NO: 324 - DNA, 21 bp, Artificial Sequence
  primer
tctgaaagttcaagcgcagtg

SEQ ID NO: 325 - DNA, 38 bp, Artificial Sequence
  primer
gtaaaacgacggccagttgctttgtgtgggtctggtag

SEQ ID NO: 326 - DNA, 38 bp, Artificial Sequence
  primer
gtaaaacgacggccagttgtggttgctcactgttgttc

SEQ ID NO: 327 - DNA, 38 bp, Artificial Sequence
  primer
gtaaaacgacggccagtacagaaacttgtccctggctg

SEQ ID NO: 328 - DNA, 21 bp, Artificial Sequence
  primer
cttccaggtctcttccagtgc

SEQ ID NO: 329 - DNA, 20 bp, Artificial Sequence
  primer
agacagggtcctctgaagcc

SEQ ID NO: 330 - DNA, 38 bp, Artificial Sequence
  primer
gtaaaacgacggccagtaacaggtgtggtgtatgagcg

SEQ ID NO: 331 - DNA, 22 bp, Artificial Sequence
  primer
cactgaggaaatgttctctggc

SEQ ID NO: 332 - DNA, 38 bp, Artificial Sequence
  primer
gtaaaacgacggccagttgtaggtttgttgcagatggg

SEQ ID NO: 333 - DNA, 21 bp, Artificial Sequence
  primer
acaccagaagaaggagcatgg

SEQ ID NO: 334 - DNA, 38 bp, Artificial Sequence
  primer
gtaaaacgacggccagtacagtcataggccctgcattc

SEQ ID NO: 335 - DNA, 22 bp, Artificial Sequence
  primer
cctgtcacagagaaatgcttcc

SEQ ID NO: 336 - DNA, 38 bp, Artificial Sequence
  primer
gtaaaacgacggccagttgcatgtttgtggttgttacg

SEQ ID NO: 337 - DNA, 38 bp, Artificial Sequence
  primer
gtaaaacgacggccagtcctgtagtcaggtttccggtc

SEQ ID NO: 338 - DNA, 38 bp, Artificial Sequence
  primer
gtaaaacgacggccagtacaaggccagctgattctagg

SEQ ID NO: 339 - DNA, 39 bp, Artificial Sequence
  primer
gtaaaacgacggccagtccttgtacacactcgcactgag

SEQ ID NO: 340 - DNA, 38 bp, Artificial Sequence
  primer
gtaaaacgacggccagtttgtccacaggttccagattg

SEQ ID NO: 341 - DNA, 37 bp, Artificial Sequence
  primer
gtaaaacgacggccagtgtttatgggcatggttggtg

SEQ ID NO: 342 - DNA, 18 bp, Artificial Sequence
  primer
ttccttgggctgtgcctc

SEQ ID NO: 343 - DNA, 21 bp, Artificial Sequence
  primer
gacaccttggcttgactgttg

SEQ ID NO: 344 - DNA, 38 bp, Artificial Sequence
  primer
gtaaaacgacggccagtagtggataaggcatttggtgc

SEQ ID NO: 345 - DNA, 22 bp, Artificial Sequence
  primer
gataaaccatgaatgacacccg

SEQ ID NO: 346 - DNA, 38 bp, Artificial Sequence
  primer
gtaaaacgacggccagtataggcccaaatttgaggaag

SEQ ID NO: 347 - DNA, 37 bp, Artificial Sequence
  primer
gtaaaacgacggccagtatcctggagactgtggcaag

SEQ ID NO: 348 - DNA, 21 bp, Artificial Sequence
  primer
tagtcctgccttccacagttg

SEQ ID NO: 349 - DNA, 39 bp, Artificial Sequence
  primer
gtaaaacgacggccagtcacacattaactttggcctcaa

SEQ ID NO: 350 - DNA, 38 bp, Artificial Sequence
  primer
gtaaaacgacggccagtcaggaacattaggccagattg

SEQ ID NO: 351 - DNA, 37 bp, Artificial Sequence
  primer
gtaaaacgacggccagtctttggctcctcaccagttg

SEQ ID NO: 352 - DNA, 22 bp, Artificial Sequence
  primer
gctgtttcaaagatgcttctgc

SEQ ID NO: 353 - DNA, 21 bp, Artificial Sequence
  primer
atgctggaagtcatggtgatg

SEQ ID NO: 354 - DNA, 21 bp, Artificial Sequence
  primer
ggttcccagggttcagtattc

SEQ ID NO: 355 - DNA, 18 bp, Artificial Sequence
  primer
gtgagccaaggtctcgcc

SEQ ID NO: 356 - DNA, 37 bp, Artificial Sequence
  primer
gtaaaacgacggccagttgtgtgctggaggaatggac

SEQ ID NO: 357 - DNA, 42 bp, Artificial Sequence
  primer
gtaaaacgacggccagtctaagaggcagctatccagaaataa

SEQ ID NO: 358 - DNA, 18 bp, Artificial Sequence
  primer
ctcaaatgatccacccgc

SEQ ID NO: 359 - DNA, 41 bp, Artificial Sequence
  primer
gtaaaacgacggccagttgcatgacagaccttcagtaattt

SEQ ID NO: 360 - DNA, 38 bp, Artificial Sequence
  primer
gtaaaacgacggccagtccatttcgcacattacctctc

SEQ ID NO: 361 - DNA, 41 bp, Artificial Sequence
  primer
gtaaaacgacggccagttgacaatgtgagaaatcgatgaat

SEQ ID NO: 362 - DNA, 35 bp, Artificial Sequence
  primer
gtaaaacgacggccagtgtgccattgcactcctgc

SEQ ID NO: 363 - DNA, 39 bp, Artificial Sequence
  primer
gtaaaacgacggccagtccctttactgtgaagttcaggc

SEQ ID NO: 364 - DNA, 23 bp, Artificial Sequence
  primer
accaatgaaatgaaatgctgaga

SEQ ID NO: 365 - DNA, 27 bp, Artificial Sequence
  primer
tctattccactattatttgacattcca

SEQ ID NO: 366 - DNA, 23 bp, Artificial Sequence
  primer
ggaagtggaacaagaggtacagg

SEQ ID NO: 367 - DNA, 38 bp, Artificial Sequence
  primer
gtaaaacgacggccagtttgttagggatctggtggagg

SEQ ID NO: 368 - DNA, 21 bp, Artificial Sequence
  primer
agaaatgatactgcacccagg

SEQ ID NO: 369 - DNA, 44 bp, Artificial Sequence
  primer
gtaaaacgacggccagtttgcaggaaccaattactagagttaag

SEQ ID NO: 370 - DNA, 22 bp, Artificial Sequence
  primer
ttccttggattattgtgattgc

SEQ ID NO: 371 - DNA, 22 bp, Artificial Sequence
  primer
ggaagccttaatcatcctcaaa

SEQ ID NO: 372 - DNA, 39 bp, Artificial Sequence
  primer
gtaaaacgacggccagtcaccacatatgcatgtggactt

SEQ ID NO: 373 - DNA, 23 bp, Artificial Sequence
  primer
ggagtccgtcacattgaagatag

SEQ ID NO: 374 - DNA, 39 bp, Artificial Sequence
  primer
gtaaaacgacggccagttcaaagaaggcagaagtgtcaa

SEQ ID NO: 375 - DNA, 39 bp, Artificial Sequence
  primer
gtaaaacgacggccagttgtttgcttgtctctttgcttc

SEQ ID NO: 376 - DNA, 27 bp, Artificial Sequence
  primer
ttgaaccaataactacacatttccatt

SEQ ID NO: 377 - DNA, 42 bp, Artificial Sequence
  primer
gtaaaacgacggccagtgcagctttatgacctgattatctcc

SEQ ID NO: 378 - DNA, 20 bp, Artificial Sequence
  primer
aaatggcagtatctcccagg

SEQ ID NO: 379 - DNA, 40 bp, Artificial Sequence
  primer
gtaaaacgacggccagtaaggaaagatgtcaggtcatcag

SEQ ID NO: 380 - DNA, 38 bp, Artificial Sequence
  primer
gtaaaacgacggccagtagtgggagggtgagtttgaat

SEQ ID NO: 381 - DNA, 38 bp, Artificial Sequence
  primer
gtaaaacgacggccagtaagaacgaagtgacagagcca

SEQ ID NO: 382 - DNA, 41 bp, Artificial Sequence
  primer
gtaaaacgacggccagtttgggtttatagactagggaatgg

SEQ ID NO: 383 - DNA, 38 bp, Artificial Sequence
  primer
gtaaaacgacggccagtatgttatgcaaccaaccaagc

SEQ ID NO: 384 - DNA, 20 bp, Artificial Sequence
  primer
ataactgggtgcacaaagcc

SEQ ID NO: 385 - DNA, 23 bp, Artificial Sequence
  primer
tcacaatttgtagcaggaggaag

SEQ ID NO: 386 - DNA, 38 bp, Artificial Sequence
  primer
gtaaaacgacggccagtgctccaggaacaacttaaggc

SEQ ID NO: 387 - DNA, 37 bp, Artificial Sequence
  primer
gtaaaacgacggccagtttgcacaggtttcttgcatc

SEQ ID NO: 388 - DNA, 21 bp, Artificial Sequence
  primer
agctgatgctctacagctccc

SEQ ID NO: 389 - DNA, 42 bp, Artificial Sequence
  primer
gtaaaacgacggccagttttactttgcctattaattcctccc

SEQ ID NO: 390 - DNA, 21 bp, Artificial Sequence
  primer
tgaatatgttcatgcatggct

SEQ ID NO: 391 - DNA, 21 bp, Artificial Sequence
  primer
gtgagcaccatccagatgacc

SEQ ID NO: 392 - DNA, 21 bp, Artificial Sequence
  primer
aatgcatatgcttgaccatcg

SEQ ID NO: 393 - DNA, 38 bp, Artificial Sequence
  primer
gtaaaacgacggccagtagtcaaccaatgccaaacaag

SEQ ID NO: 394 - DNA, 39 bp, Artificial Sequence
  primer
gtaaaacgacggccagtggtgtctttcaaactggtttcc

SEQ ID NO: 395 - DNA, 23 bp, Artificial Sequence
  primer
gccaactaaccacatacataggc

SEQ ID NO: 396 - DNA, 21 bp, Artificial Sequence
  primer
ccgaaatagcagccagcttac

SEQ ID NO: 397 - DNA, 38 bp, Artificial Sequence
  primer
gtaaaacgacggccagtccctgagaaggcacgtatgtc

SEQ ID NO: 398 - DNA, 40 bp, Artificial Sequence
  primer
gtaaaacgacggccagtttgtttgattcttgaggaccttt

SEQ ID NO: 399 - DNA, 39 bp, Artificial Sequence
  primer
gtaaaacgacggccagtcaaccttaccaacaatgcatga

SEQ ID NO: 400 - DNA, 46 bp, Artificial Sequence
  primer
gtaaaacgacggccagtaagtattatcaggttctctttctctgttg

SEQ ID NO: 401 - DNA, 37 bp, Artificial Sequence
  primer
gtaaaacgacggccagttttgacaccagatgcctcac

SEQ ID NO: 402 - DNA, 40 bp, Artificial Sequence
  primer
gtaaaacgacggccagttgaacttgaccctatgaaagctg

SEQ ID NO: 403 - DNA, 39 bp, Artificial Sequence
  primer
gtaaaacgacggccagttggttactgcacttcactgtgg

SEQ ID NO: 404 - DNA, 24 bp, Artificial Sequence
  primer
caatgaatatttgcataacgaccc

SEQ ID NO: 405 - DNA, 39 bp, Artificial Sequence
  primer
gtaaaacgacggccagtaactcaattgactgtttggctg

SEQ ID NO: 406 - DNA, 23 bp, Artificial Sequence
  primer
gcttcatgcttcgtaaataatgg

SEQ ID NO: 407 - DNA, 27 bp, Artificial Sequence
  primer
aaatgcctagttccatatacagagaga

SEQ ID NO: 408 - DNA, 38 bp, Artificial Sequence
  primer
gtaaaacgacggccagtatggttggtaagggactgctg

SEQ ID NO: 409 - DNA, 38 bp, Artificial Sequence
  primer
gtaaaacgacggccagtacgatacgaagaacagggcat

SEQ ID NO: 410 - DNA, 42 bp, Artificial Sequence
  primer
gtaaaacgacggccagtctttactatggaaactgagaccacc

SEQ ID NO: 411 - DNA, 38 bp, Artificial Sequence
  primer
gtaaaacgacggccagttcattctgcaaccaagtgagg

SEQ ID NO: 412 - DNA, 23 bp, Artificial Sequence
  primer
ttcatagtttgcccttgactgag

SEQ ID NO: 413 - DNA, 27 bp, Artificial Sequence
  primer
tcaattagggttattgtatgtttccag

SEQ ID NO: 414 - DNA, 38 bp, Artificial Sequence
  primer
gtaaaacgacggccagtctctggccaactctgtgtgtc

SEQ ID NO: 415 - DNA, 38 bp, Artificial Sequence
  primer
gtaaaacgacggccagtagagctcatcacctcaccctc

SEQ ID NO: 416 - DNA, 38 bp, Artificial Sequence
  primer
gtaaaacgacggccagtattcacttgaagtcagacggg

SEQ ID NO: 417 - DNA, 22 bp, Artificial Sequence
  primer
tgctgaacctcaaatccaaatc

SEQ ID NO: 418 - DNA, 38 bp, Artificial Sequence
  primer
gtaaaacgacggccagtaacacggcaagactctgtctc

SEQ ID NO: 419 - DNA, 38 bp, Artificial Sequence
  primer
gtaaaacgacggccagtatcatttggaaatggtggagc

SEQ ID NO: 420 - DNA, 40 bp, Artificial Sequence
  primer
gtaaaacgacggccagtgagactgaagctccttgacattg

SEQ ID NO: 421 - DNA, 23 bp, Artificial Sequence
  primer
gatgggtcagttaagttggagaa

SEQ ID NO: 422 - DNA, 39 bp, Artificial Sequence
  primer
gtaaaacgacggccagttccacagaacaactctcttccc

SEQ ID NO: 423 - DNA, 21 bp, Artificial Sequence
  primer
atggcattaatgggattaggg

SEQ ID NO: 424 - DNA, 21 bp, Artificial Sequence
  primer
ttgcaggatgccttatttgtg

SEQ ID NO: 425 - DNA, 23 bp, Artificial Sequence
  primer
ggcttaacctcatattgcaggag

SEQ ID NO: 426 - DNA, 37 bp, Artificial Sequence
  primer
gtaaaacgacggccagtctgggctcaagtgatccacc

SEQ ID NO: 427 - DNA, 40 bp, Artificial Sequence
  primer
gtaaaacgacggccagtgcaaattcagcctatatgggaaa

SEQ ID NO: 428 - DNA, 27 bp, Artificial Sequence
  primer
aatatagtgaatacagtgaggagggtc

SEQ ID NO: 429 - DNA, 36 bp, Artificial Sequence
  primer
gtaaaacgacggccagtacccagggagaagagggag

SEQ ID NO: 430 - DNA, 21 bp, Artificial Sequence
  primer
gagctaccttcccagcatttg

SEQ ID NO: 431 - DNA, 18 bp, Artificial Sequence
  primer
gggagggaatcccatctg

SEQ ID NO: 432 - DNA, 40 bp, Artificial Sequence
  primer
gtaaaacgacggccagttgttctagggaagtgaaatgcag

SEQ ID NO: 433 - DNA, 21 bp, Artificial Sequence
  primer
taagccatgttcaagccactg

SEQ ID NO: 434 - DNA, 38 bp, Artificial Sequence
  primer
gtaaaacgacggccagttccagtttgcaacatgtcctg

SEQ ID NO: 435 - DNA, 43 bp, Artificial Sequence
  primer
gtaaaacgacggccagttttcctgaactcttggtaaagttatg

SEQ ID NO: 436 - DNA, 22 bp, Artificial Sequence
  primer
tgaaaggactcctagtgcaagc

SEQ ID NO: 437 - DNA, 38 bp, Artificial Sequence
  primer
gtaaaacgacggccagtgacatacagcaagttggacgg

SEQ ID NO: 438 - DNA, 41 bp, Artificial Sequence
  primer
gtaaaacgacggccagtagttggtcaaatattcagcttgtg

SEQ ID NO: 439 - DNA, 38 bp, Artificial Sequence
  primer
gtaaaacgacggccagtcggagagtggtaatccaggag

SEQ ID NO: 440 - DNA, 38 bp, Artificial Sequence
  primer
gtaaaacgacggccagtctcagacagccctggaatctg

SEQ ID NO: 441 - DNA, 21 bp, Artificial Sequence
  primer
tgagcacatccttgctgtagg

SEQ ID NO: 442 - DNA, 21 bp, Artificial Sequence
  primer
tcgctctacaagtttcatggg

SEQ ID NO: 443 - DNA, 39 bp, Artificial Sequence
  primer
gtaaaacgacggccagtggcttcaaactgagtgaaggtc

SEQ ID NO: 444 - DNA, 40 bp, Artificial Sequence
  primer
gtaaaacgacggccagtgctccattactttaaggctggtg

SEQ ID NO: 445 - DNA, 22 bp, Artificial Sequence
  primer
tcattaatttgacctgggatgg

SEQ ID NO: 446 - DNA, 21 bp, Artificial Sequence
  primer
actgaccctggaagaaaggtg

SEQ ID NO: 447 - DNA, 37 bp, Artificial Sequence
  primer
gtaaaacgacggccagtcaggtgaaatgggctctcag

SEQ ID NO: 448 - DNA, 37 bp, Artificial Sequence
  primer
gtaaaacgacggccagtgccagggctcttggatactc

SEQ ID NO: 449 - DNA, 39 bp, Artificial Sequence
  primer
gtaaaacgacggccagtgcacctttgtagcatctgtctg

SEQ ID NO: 450 - DNA, 37 bp, Artificial Sequence
  primer
gtaaaacgacggccagtcccagtccatgggatgtaag

SEQ ID NO: 451 - DNA, 21 bp, Artificial Sequence
  primer
tggtgtttggtcttcatttgc

SEQ ID NO: 452 - DNA, 38 bp, Artificial Sequence
  primer
gtaaaacgacggccagttactgtggcaagatcgtggtg

SEQ ID NO: 453 - DNA, 42 bp, Artificial Sequence
  primer
gtaaaacgacggccagtgctgtctgtcatctagagtggtatg

SEQ ID NO: 454 - DNA, 21 bp, Artificial Sequence
  primer
tgcaatttgtcaagaacctgg

SEQ ID NO: 455 - DNA, 40 bp, Artificial Sequence
  primer
gtaaaacgacggccagtggatccagtttattgattcatgg

SEQ ID NO: 456 - DNA, 21 bp, Artificial Sequence
  primer
gggagctgaaacaggtaaagc

SEQ ID NO: 457 - DNA, 38 bp, Artificial Sequence
  primer
gtaaaacgacggccagttcaaggctgcgtctcaaatac

SEQ ID NO: 458 - DNA, 22 bp, Artificial Sequence
  primer
ttacataagtggactgccatgc

SEQ ID NO: 459 - DNA, 23 bp, Artificial Sequence
  primer
gactggtacctcatcttgtctgg

SEQ ID NO: 460 - DNA, 25 bp, Artificial Sequence
  primer
gctttaaatttcacaaagcaccttc

SEQ ID NO: 461 - DNA, 21 bp, Artificial Sequence
  primer
tttgactcctccattgttccc

SEQ ID NO: 462 - DNA, 38 bp, Artificial Sequence
  primer
gtaaaacgacggccagtaaagagagacccatctgccac

SEQ ID NO: 463 - DNA, 38 bp, Artificial Sequence
  primer
gtaaaacgacggccagttttcccagttgttccattcag

SEQ ID NO: 464 - DNA, 21 bp, Artificial Sequence
  primer
gaggctcttcgttgactttcc

SEQ ID NO: 465 - DNA, 21 bp, Artificial Sequence
  primer
ggcccaatccttcatgtctac

SEQ ID NO: 466 - DNA, 38 bp, Artificial Sequence
  primer
gtaaaacgacggccagtttcatggcttcaaatgtggac

SEQ ID NO: 467 - DNA, 20 bp, Artificial Sequence
  primer
gccctgcatcagttgaagac

SEQ ID NO: 468 - DNA, 39 bp, Artificial Sequence
  primer
gtaaaacgacggccagtttgaagacatttccattcaacg

SEQ ID NO: 469 - DNA, 21 bp, Artificial Sequence
  primer
gcagtctgaaaggatgcattg

SEQ ID NO: 470 - DNA, 39 bp, Artificial Sequence
  primer
gtaaaacgacggccagtacctctttgttcatcaaatggc

SEQ ID NO: 471 - DNA, 26 bp, Artificial Sequence
  primer
ccacaaagcaagtaaggatgagtatc

SEQ ID NO: 472 - DNA, 24 bp, Artificial Sequence
  primer
tttggcttcatttaataacactgg

SEQ ID NO: 473 - DNA, 40 bp, Artificial Sequence
  primer
gtaaaacgacggccagtttaaacatatttgccaccagtcc

SEQ ID NO: 474 - DNA, 40 bp, Artificial Sequence
  primer
gtaaaacgacggccagttgtgttcaactccttaatgcctg

SEQ ID NO: 475 - DNA, 22 bp, Artificial Sequence
  primer
gggaactggcaatttagtggtc

SEQ ID NO: 476 - DNA, 38 bp, Artificial Sequence
  primer
gtaaaacgacggccagtcagcttcacactccttcatgg

SEQ ID NO: 477 - DNA, 21 bp, Artificial Sequence
  primer
ccatgggctcatgtcttcttc

SEQ ID NO: 478 - DNA, 38 bp, Artificial Sequence
  primer
gtaaaacgacggccagtgctccagaatgcaaatgtcac

SEQ ID NO: 479 - DNA, 27 bp, Artificial Sequence
  primer
tgaggattactccagaatgatagaaac

SEQ ID NO: 480 - DNA, 38 bp, Artificial Sequence
  primer
gtaaaacgacggccagtttgcctttcttacccatctgc

SEQ ID NO: 481 - DNA, 41 bp, Artificial Sequence
  primer
gtaaaacgacggccagtctcagtattatcttcccatgatgc

SEQ ID NO: 482 - DNA, 43 bp, Artificial Sequence
  primer
gtaaaacgacggccagtggatcaatttcttaccctgatgatac

SEQ ID NO: 483 - DNA, 21 bp, Artificial Sequence
  primer
taatgcccttctcagggaaac

SEQ ID NO: 484 - DNA, 38 bp, Artificial Sequence
  primer
gtaaaacgacggccagtgaaagtcacgtcctgaaaccc

SEQ ID NO: 485 - DNA, 21 bp, Artificial Sequence
  primer
agctggtcaagaaagtttcgg

SEQ ID NO: 486 - DNA, 39 bp, Artificial Sequence
  primer
gtaaaacgacggccagtgaagatatgaggagtcttgcgg

SEQ ID NO: 487 - DNA, 38 bp, Artificial Sequence
  primer
gtaaaacgacggccagtaatttccactcatagtggccc

SEQ ID NO: 488 - DNA, 22 bp, Artificial Sequence
  primer
gctctctggaggaaaggacttc

SEQ ID NO: 489 - DNA, 21 bp, Artificial Sequence
  primer
gggagggaggatggttcttac

SEQ ID NO: 490 - DNA, 21 bp, Artificial Sequence
  primer
aggcacagctttaccctcatc

SEQ ID NO: 491 - DNA, 38 bp, Artificial Sequence
  primer
gtaaaacgacggccagtcaatgcacagaagcaactgac

SEQ ID NO: 492 - DNA, 38 bp, Artificial Sequence
  primer
gtaaaacgacggccagtgtccatctcttgggagctgag

SEQ ID NO: 493 - DNA, 38 bp, Artificial Sequence
  primer
gtaaaacgacggccagtatgggttgaatggtgtgaaag

SEQ ID NO: 494 - DNA, 36 bp, Artificial Sequence
  primer
gtaaaacgacggccagtgaagctccggtctgaggtg

SEQ ID NO: 495 - DNA, 38 bp, Artificial Sequence
  primer
gtaaaacgacggccagtatagtaccgcaaaggcgtctc

SEQ ID NO: 496 - DNA, 41 bp, Artificial Sequence
  primer
gtaaaacgacggccagttggaggaaggaactagactttcag

SEQ ID NO: 497 - DNA, 22 bp, Artificial Sequence
  primer
actcccaaagttcagagtggtg

SEQ ID NO: 498 - DNA, 38 bp, Artificial Sequence
  primer
gtaaaacgacggccagtaggcagatctttgctctggtg

SEQ ID NO: 499 - DNA, 39 bp, Artificial Sequence
  primer
gtaaaacgacggccagttgtgccttgttcctttgtaatg

SEQ ID NO: 500 - DNA, 21 bp, Artificial Sequence
  primer
atccatttgcacaatctccac

SEQ ID NO: 501 - DNA, 35 bp, Artificial Sequence
  primer
gtaaaacgacggccagtcccagtgtaggcgtggtt

SEQ ID NO: 502 - DNA, 22 bp, Artificial Sequence
  primer
ggcatgtagaaatgaccaaagg

SEQ ID NO: 503 - DNA, 38 bp, Artificial Sequence
  primer
gtaaaacgacggccagtactggtccaccttctttctcc

SEQ ID NO: 504 - DNA, 38 bp, Artificial Sequence
  primer
gtaaaacgacggccagttttaaatgactgcctgaagcg

SEQ ID NO: 505 - DNA, 38 bp, Artificial Sequence
  primer
gtaaaacgacggccagttggccagtgatattgaccttc

SEQ ID NO: 506 - DNA, 38 bp, Artificial Sequence
  primer
gtaaaacgacggccagtaagggagagttagggctccac

SEQ ID NO: 507 - DNA, 20 bp, Artificial Sequence
  primer
tgtgtgcttcacagagctgg

SEQ ID NO: 508 - DNA, 38 bp, Artificial Sequence
  primer
gtaaaacgacggccagtggagctgactggattgctgac

SEQ ID NO: 509 - DNA, 21 bp, Artificial Sequence
  primer
tgtgtagcatccacacctctg

SEQ ID NO: 510 - DNA, 38 bp, Artificial Sequence
  primer
gtaaaacgacggccagtctgaggaaaggagggaaggtc

SEQ ID NO: 511 - DNA, 23 bp, Artificial Sequence
  primer
tgtcattgagatgcctattgctt

SEQ ID NO: 512 - DNA, 21 bp, Artificial Sequence
  primer
caaccggattaggcaattgag

SEQ ID NO: 513 - DNA, 18 bp, Artificial Sequence
  primer
agggcaaacgaggcaaag

SEQ ID NO: 514 - DNA, 38 bp, Artificial Sequence
  primer
gtaaaacgacggccagttggttctccattctctgttgg

SEQ ID NO: 515 - DNA, 21 bp, Artificial Sequence
  primer
gtaagagctctgccttctcgg

SEQ ID NO: 516 - DNA, 24 bp, Artificial Sequence
  primer
aattgactgcataagtcacagtgg

SEQ ID NO: 517 - DNA, 38 bp, Artificial Sequence
  primer
gtaaaacgacggccagttgtcacagaccacagatgctc

SEQ ID NO: 518 - DNA, 22 bp, Artificial Sequence
  primer
caggtgccttggaagttaattg

SEQ ID NO: 519 - DNA, 38 bp, Artificial Sequence
  primer
gtaaaacgacggccagtagcaggatacattgtgatggc

SEQ ID NO: 520 - DNA, 38 bp, Artificial Sequence
  primer
gtaaaacgacggccagtcaacatgcctggctgattatg

SEQ ID NO: 521 - DNA, 21 bp, Artificial Sequence
  primer
attccacggctacagaactcc

SEQ ID NO: 522 - DNA, 41 bp, Artificial Sequence
  primer
gtaaaacgacggccagtccaaggtcttagaatgtatctgcc

SEQ ID NO: 523 - DNA, 21 bp, Artificial Sequence
  primer
cctggaacacagagctaacca

SEQ ID NO: 524 - DNA, 19 bp, Artificial Sequence
  primer
actgcccagaagtccgaag

SEQ ID NO: 525 - DNA, 40 bp, Artificial Sequence
  primer
gtaaaacgacggccagtaaaccagcaaagtcaactcaaag

SEQ ID NO: 526 - DNA, 21 bp, Artificial Sequence
  primer
gtcctctggttctcagttgcc

SEQ ID NO: 527 - DNA, 22 bp, Artificial Sequence
  primer
ggaggtagaagcaggaatgagg

SEQ ID NO: 528 - DNA, 38 bp, Artificial Sequence
  primer
gtaaaacgacggccagtcaacaaagccaattggagagg

SEQ ID NO: 529 - DNA, 43 bp, Artificial Sequence
  primer
gtaaaacgacggccagtaagtaatttgccctaatggtatcttg

SEQ ID NO: 530 - DNA, 38 bp, Artificial Sequence
  primer
gtaaaacgacggccagtttgactgggtgttgattctgg

SEQ ID NO: 531 - DNA, 22 bp, Artificial Sequence
  primer
ccactcagttgaacgttgtttg

SEQ ID NO: 532 - DNA, 21 bp, Artificial Sequence
  primer
caagttggccagtgttctgag

SEQ ID NO: 533 - DNA, 38 bp, Artificial Sequence
  primer
gtaaaacgacggccagtggctcagaccttcagtggttc

SEQ ID NO: 534 - DNA, 21 bp, Artificial Sequence
  primer
gacctctgacctgctggagtc

SEQ ID NO: 535 - DNA, 37 bp, Artificial Sequence
  primer
gtaaaacgacggccagtgagacgagttcggcttcctg

SEQ ID NO: 536 - DNA, 20 bp, Artificial Sequence
  primer
aaagctctgctgtcactggg

SEQ ID NO: 537 - DNA, 18 bp, Artificial Sequence
  primer
accatctaagccacgccc

SEQ ID NO: 538 - DNA, 36 bp, Artificial Sequence
  primer
gtaaaacgacggccagtggtagaggcatgtcgtggg

SEQ ID NO: 539 - DNA, 38 bp, Artificial Sequence
  primer
gtaaaacgacggccagttccactcctgacctatcaccc

SEQ ID NO: 540 - DNA, 21 bp, Artificial Sequence
  primer
cagaaggttctgcaggatgtg

SEQ ID NO: 541 - DNA, 38 bp, Artificial Sequence
  primer
gtaaaacgacggccagtcctgaatctaggctctggctc

SEQ ID NO: 542 - DNA, 37 bp, Artificial Sequence
  primer
gtaaaacgacggccagtgggttagttgttggcaatgg

SEQ ID NO: 543 - DNA, 20 bp, Artificial Sequence
  primer
actatgcccaggtctggctc

SEQ ID NO: 544 - DNA, 38 bp, Artificial Sequence
  primer
gtaaaacgacggccagtgccctgagacaggacaacttc

SEQ ID NO: 545 - DNA, 19 bp, Artificial Sequence
  primer
gtcccacctttccctggac

SEQ ID NO: 546 - DNA, 21 bp, Artificial Sequence
  primer
ccgcttctacttcctctacgg

SEQ ID NO: 547 - DNA, 20 bp, Artificial Sequence
  primer
acccacagacatgatggagc

SEQ ID NO: 548 - DNA, 36 bp, Artificial Sequence
  primer
gtaaaacgacggccagttcctgggtctactccgtgg

SEQ ID NO: 549 - DNA, 38 bp, Artificial Sequence
  primer
gtaaaacgacggccagtcaccatcatgttctggtgagc

SEQ ID NO: 550 - DNA, 38 bp, Artificial Sequence
  primer
gtaaaacgacggccagtgataagatcacggccttcgag

SEQ ID NO: 551 - DNA, 37 bp, Artificial Sequence
  primer
gtaaaacgacggccagtctgtgtccactcctggatgc

SEQ ID NO: 552 - DNA, 37 bp, Artificial Sequence
  primer
gtaaaacgacggccagtgcctcagtgtcatggaggag

SEQ ID NO: 553 - DNA, 38 bp, Artificial Sequence
  primer
gtaaaacgacggccagtgagcaggagtcctagtcaggg

SEQ ID NO: 554 - DNA, 38 bp, Artificial Sequence
  primer
gtaaaacgacggccagtgagatccgcagagagatggac

SEQ ID NO: 555 - DNA, 38 bp, Artificial Sequence
  primer
gtaaaacgacggccagtagtacaagccaggtgagtggg

SEQ ID NO: 556 - DNA, 38 bp, Artificial Sequence
  primer
gtaaaacgacggccagtaatgcccatatcttgacccag

SEQ ID NO: 557 - DNA, 21 bp, Artificial Sequence
  primer
gtctcagacacaagcacggag

SEQ ID NO: 558 - DNA, 38 bp, Artificial Sequence
  primer
gtaaaacgacggccagtcaggtgtatgagcctgggaac

SEQ ID NO: 559 - DNA, 38 bp, Artificial Sequence
  primer
gtaaaacgacggccagtgataacccacaggacccagac

SEQ ID NO: 560 - DNA, 37 bp, Artificial Sequence
  primer
gtaaaacgacggccagtgttcatccgggagtcctgtc

SEQ ID NO: 561 - DNA, 35 bp, Artificial Sequence
  primer
gtaaaacgacggccagtccctacgccaacgaggag

SEQ ID NO: 562 - DNA, 19 bp, Artificial Sequence
  primer
gccaggtagtggttcaggg

SEQ ID NO: 563 - DNA, 38 bp, Artificial Sequence
  primer
gtaaaacgacggccagtagtacctgctcttcacctccg

SEQ ID NO: 564 - DNA, 21 bp, Artificial Sequence
  primer
gaaacgtcctgaagtccatcc

SEQ ID NO: 565 - DNA, 36 bp, Artificial Sequence
  primer
gtaaaacgacggccagttcaacagcctcaacaacgc

SEQ ID NO: 566 - DNA, 37 bp, Artificial Sequence
  primer
gtaaaacgacggccagtctgtaagtgtggccagtggg

SEQ ID NO: 567 - DNA, 21 bp, Artificial Sequence
  primer
aactacgtgtgggacatggtg

SEQ ID NO: 568 - DNA, 21 bp, Artificial Sequence
  primer
ttcctgctctatgggtaagcg

SEQ ID NO: 569 - DNA, 38 bp, Artificial Sequence
  primer
gtaaaacgacggccagtctgctacagctcttcgagcac

SEQ ID NO: 570 - DNA, 39 bp, Artificial Sequence
  primer
gtaaaacgacggccagtcatcaacgagtactacgccaag

SEQ ID NO: 571 - DNA, 38 bp, Artificial Sequence
  primer
gtaaaacgacggccagtcttcttacatgccacagccag

SEQ ID NO: 572 - DNA, 35 bp, Artificial Sequence
  primer
gtaaaacgacggccagtagcagtggaggtggagcc

SEQ ID NO: 573 - DNA, 20 bp, Artificial Sequence
  primer
caccttcaagatgctgaccg

SEQ ID NO: 574 - DNA, 37 bp, Artificial Sequence
  primer
gtaaaacgacggccagtgatctcctggaaggacgagg

SEQ ID NO: 575 - DNA, 19 bp, Artificial Sequence
  primer
ctgcctggcctttgacttc

SEQ ID NO: 576 - DNA, 37 bp, Artificial Sequence
  primer
gtaaaacgacggccagttggtgctgacatcacacagg

SEQ ID NO: 577 - DNA, 35 bp, Artificial Sequence
  primer
gtaaaacgacggccagtgctgtgggaggctatggg

SEQ ID NO: 578 - DNA, 21 bp, Artificial Sequence
  primer
cagagtgtgaaggacgtggtg

SEQ ID NO: 579 - DNA, 37 bp, Artificial Sequence
  primer
gtaaaacgacggccagtcacactggacaatgtgagcg

SEQ ID NO: 580 - DNA, 39 bp, Artificial Sequence
  primer
gtaaaacgacggccagtgcatggtccagacttgctagag

SEQ ID NO: 581 - DNA, 38 bp, Artificial Sequence
  primer
gtaaaacgacggccagttcctctgtcgctctctacagg

SEQ ID NO: 582 - DNA, 21 bp, Artificial Sequence
  primer
actctgcgtgtttctattgcg

SEQ ID NO: 583 - DNA, 37 bp, Artificial Sequence
  primer
gtaaaacgacggccagtcttgagggaagggctgtctg

SEQ ID NO: 584 - DNA, 21 bp, Artificial Sequence
  primer
gaggatttgccgtctttcatc

SEQ ID NO: 585 - DNA, 20 bp, Artificial Sequence
  primer
ccactccaccctgttgtttg

SEQ ID NO: 586 - DNA, 39 bp, Artificial Sequence
  primer
gtaaaacgacggccagttgagctgaagtcactctgttgc

SEQ ID NO: 587 - DNA, 21 bp, Artificial Sequence
  primer
ggccgacatagtaagaccctg

SEQ ID NO: 588 - DNA, 38 bp, Artificial Sequence
  primer
gtaaaacgacggccagtgtcaatgtcccactcctctcg

SEQ ID NO: 589 - DNA, 21 bp, Artificial Sequence
  primer
gtagatggcaagtgccaggag

SEQ ID NO: 590 - DNA, 21 bp, Artificial Sequence
  primer
ttccaggcttgaagaaagctg

SEQ ID NO: 591 - DNA, 38 bp, Artificial Sequence
  primer
gtaaaacgacggccagtagtgtgtctgctggttgttgc

SEQ ID NO: 592 - DNA, 38 bp, Artificial Sequence
  primer
gtaaaacgacggccagtcctctgcacactgatggtgac

SEQ ID NO: 593 - DNA, 20 bp, Artificial Sequence
  primer
gtttctcctccctgaccagc

SEQ ID NO: 594 - DNA, 20 bp, Artificial Sequence
  primer
ctctcaccagaacctcgctg

SEQ ID NO: 595 - DNA, 20 bp, Artificial Sequence
  primer
cagacaaggccatcaccatc

SEQ ID NO: 596 - DNA, 37 bp, Artificial Sequence
  primer
gtaaaacgacggccagtggtgtgagccctagagaccc

SEQ ID NO: 597 - DNA, 21 bp, Artificial Sequence
  primer
gggtgatgctttaggaacaaa

SEQ ID NO: 598 - DNA, 22 bp, Artificial Sequence
  primer
tctaaccatagtccctccctcc

SEQ ID NO: 599 - DNA, 36 bp, Artificial Sequence
  primer
gtaaaacgacggccagtacacagaacagcacctgcc

SEQ ID NO: 600 - DNA, 21 bp, Artificial Sequence
  primer
ctgattagccatgctcaggtg

SEQ ID NO: 601 - DNA, 37 bp, Artificial Sequence
  primer
gtaaaacgacggccagtctttagtggttgggctgctg

SEQ ID NO: 602 - DNA, 38 bp, Artificial Sequence
  primer
gtaaaacgacggccagtacctccaaatgctcctctcac

SEQ ID NO: 603 - DNA, 38 bp, Artificial Sequence
  primer
gtaaaacgacggccagtactccacacagcacggataag

SEQ ID NO: 604 - DNA, 38 bp, Artificial Sequence
  primer
gtaaaacgacggccagttgacctactggccttcacatc

SEQ ID NO: 605 - DNA, 38 bp, Artificial Sequence
  primer
gtaaaacgacggccagtcttgaaggccttagtcccacc

SEQ ID NO: 606 - DNA, 38 bp, Artificial Sequence
  primer
gtaaaacgacggccagtcagctgactacctggctgtcc

SEQ ID NO: 607 - DNA, 38 bp, Artificial Sequence
  primer
gtaaaacgacggccagtgtacacacactggcaggaacc

SEQ ID NO: 608 - DNA, 38 bp, Artificial Sequence
  primer
gtaaaacgacggccagttcttcactagggctgttctgc

SEQ ID NO: 609 - DNA, 37 bp, Artificial Sequence
  primer
gtaaaacgacggccagtagagccaatgccttcctgtc

SEQ ID NO: 610 - DNA, 38 bp, Artificial Sequence
  primer
gtaaaacgacggccagttacctaggcctctcccatctg

SEQ ID NO: 611 - DNA, 38 bp, Artificial Sequence
  primer
gtaaaacgacggccagtctattgccagaggactcccag

SEQ ID NO: 612 - DNA, 37 bp, Artificial Sequence
  primer
gtaaaacgacggccagtgagccagaggcgctcttaac

SEQ ID NO: 613 - DNA, 21 bp, Artificial Sequence
  primer
atctgaggagggctgtgtctg

SEQ ID NO: 614 - DNA, 38 bp, Artificial Sequence
  primer
gtaaaacgacggccagtccaactcctaggtctgcatcc

SEQ ID NO: 615 - DNA, 20 bp, Artificial Sequence
  primer
tgggtgacagagcgagataa

SEQ ID NO: 616 - DNA, 38 bp, Artificial Sequence
  primer
gtaaaacgacggccagtgtgtttccaatcgactctggc

SEQ ID NO: 617 - DNA, 39 bp, Artificial Sequence
  primer
gtaaaacgacggccagtccatctgcgatcttaattcctg

SEQ ID NO: 618 - DNA, 21 bp, Artificial Sequence
  primer
ctgcgatcagaaagaaggagg

SEQ ID NO: 619 - DNA, 38 bp, Artificial Sequence
  primer
gtaaaacgacggccagtagtcaaaccaaacgttggagc

SEQ ID NO: 620 - DNA, 38 bp, Artificial Sequence
  primer
gtaaaacgacggccagttccagcatggagttgaatgag

SEQ ID NO: 621 - DNA, 21 bp, Artificial Sequence
  primer
ttgggagatggtgaattgttc

SEQ ID NO: 622 - DNA, 38 bp, Artificial Sequence
  primer
gtaaaacgacggccagttcttcagggagccttagcatc

SEQ ID NO: 623 - DNA, 21 bp, Artificial Sequence
  primer
gacagcagcccttatcctgtg

SEQ ID NO: 624 - DNA, 38 bp, Artificial Sequence
  primer
gtaaaacgacggccagtaatgagttccgagtcaccctg

SEQ ID NO: 625 - DNA, 21 bp, Artificial Sequence
  primer
catctgggctttgttctcaac

SEQ ID NO: 626 - DNA, 38 bp, Artificial Sequence
  primer
gtaaaacgacggccagtagccctttagggcagaatgag

SEQ ID NO: 627 - DNA, 36 bp, Artificial Sequence
  primer
gtaaaacgacggccagtctacctcgagggcatctgg

SEQ ID NO: 628 - DNA, 39 bp, Artificial Sequence
  primer
gtaaaacgacggccagtgtagtctttctgggagcctgag

SEQ ID NO: 629 - DNA, 38 bp, Artificial Sequence
  primer
gtaaaacgacggccagttcctctggcaaagattgtgtg

SEQ ID NO: 630 - DNA, 20 bp, Artificial Sequence
  primer
acaagggcctggagacagag

SEQ ID NO: 631 - DNA, 38 bp, Artificial Sequence
  primer
gtaaaacgacggccagttttgagtttgactgacagccc

SEQ ID NO: 632 - DNA, 38 bp, Artificial Sequence
  primer
gtaaaacgacggccagtaccaccacagtgagcatcttg

SEQ ID NO: 633 - DNA, 38 bp, Artificial Sequence
  primer
gtaaaacgacggccagttctaagaggcagcaccaaacc

SEQ ID NO: 634 - DNA, 21 bp, Artificial Sequence
  primer
atatgctggaatttgctgctg

SEQ ID NO: 635 - DNA, 38 bp, Artificial Sequence
  primer
gtaaaacgacggccagtagaaataaataaagcgggcgg

SEQ ID NO: 636 - DNA, 21 bp, Artificial Sequence
  primer
tctgaaagagtcactgccgag

SEQ ID NO: 637 - DNA, 22 bp, Artificial Sequence
  primer
ttcccattatgaagcaataccc

SEQ ID NO: 638 - DNA, 22 bp, Artificial Sequence
  primer
agcctggtatttcattgctgac

SEQ ID NO: 639 - DNA, 22 bp, Artificial Sequence
  primer
tgcacatcttacctttgcacac

SEQ ID NO: 640 - DNA, 39 bp, Artificial Sequence
  primer
gtaaaacgacggccagttccagtaaaggctctgagttgc

SEQ ID NO: 641 - DNA, 37 bp, Artificial Sequence
  primer
gtaaaacgacggccagtaaagggttgggcacaatttc

SEQ ID NO: 642 - DNA, 36 bp, Artificial Sequence
  primer
gtaaaacgacggccagtttggagtgacgccattctg

SEQ ID NO: 643 - DNA, 38 bp, Artificial Sequence
  primer
gtaaaacgacggccagttgcatgtgtattcaggcaatg

SEQ ID NO: 644 - DNA, 38 bp, Artificial Sequence
  primer
gtaaaacgacggccagtgctggtttgtaaagtggagcc

SEQ ID NO: 645 - DNA, 21 bp, Artificial Sequence
  primer
gaatttccattggaggaaagc

SEQ ID NO: 646 - DNA, 38 bp, Artificial Sequence
  primer
gtaaaacgacggccagttgtcttccagctaccaaaccc

SEQ ID NO: 647 - DNA, 37 bp, Artificial Sequence
  primer
gtaaaacgacggccagtgtgtaaggccttcccaaagc

SEQ ID NO: 648 - DNA, 38 bp, Artificial Sequence
  primer
gtaaaacgacggccagtgtcgaatcagaatcccagacc

SEQ ID NO: 649 - DNA, 38 bp, Artificial Sequence
  primer
gtaaaacgacggccagttctggccagttcacacacatc

SEQ ID NO: 650 - DNA, 38 bp, Artificial Sequence
  primer
gtaaaacgacggccagtagtctggctgcaaggactctc

SEQ ID NO: 651 - DNA, 38 bp, Artificial Sequence
  primer
gtaaaacgacggccagtcataaggcctggtctagtggg

SEQ ID NO: 652 - DNA, 37 bp, Artificial Sequence
  primer
gtaaaacgacggccagtaggtcccatggaaaggacag

SEQ ID NO: 653 - DNA, 38 bp, Artificial Sequence
  primer
gtaaaacgacggccagtcatcctttgctctttgttccc

SEQ ID NO: 654 - DNA, 21 bp, Artificial Sequence
  primer
cccgtgtcaactgggacttag

SEQ ID NO: 655 - DNA, 20 bp, Artificial Sequence
  primer
gaagcttctccagccctagc

SEQ ID NO: 656 - DNA, 38 bp, Artificial Sequence
  primer
gtaaaacgacggccagtatttcattctggaggcgtgag

SEQ ID NO: 657 - DNA, 21 bp, Artificial Sequence
  primer
ctgtcagctcatcctccacag

SEQ ID NO: 658 - DNA, 21 bp, Artificial Sequence
  primer
catcccacaggcaagagattc

SEQ ID NO: 659 - DNA, 22 bp, Artificial Sequence
  primer
aagtgatcctcccacctctacc

SEQ ID NO: 660 - DNA, 21 bp, Artificial Sequence
  primer
ataccagcagggctgtatgtg

SEQ ID NO: 661 - DNA, 38 bp, Artificial Sequence
  primer
gtaaaacgacggccagttgacagaatcacagtgccctc

SEQ ID NO: 662 - DNA, 39 bp, Artificial Sequence
  primer
gtaaaacgacggccagttcttacctgggactgaaacagc

SEQ ID NO: 663 - DNA, 39 bp, Artificial Sequence
  primer
gtaaaacgacggccagtgaaaggacaaccaaatttcctg

SEQ ID NO: 664 - DNA, 36 bp, Artificial Sequence
  primer
gtaaaacgacggccagtagccactgtgcttggactg

SEQ ID NO: 665 - DNA, 25 bp, Artificial Sequence
  primer
tctttggtcctgtaaagattgattg

SEQ ID NO: 666 - DNA, 21 bp, Artificial Sequence
  primer
agggatatagctgtcccgttt

SEQ ID NO: 667 - DNA, 25 bp, Artificial Sequence
  primer
aagcatacacagaaatgaacagtga

SEQ ID NO: 668 - DNA, 23 bp, Artificial Sequence
  primer
gcttgttctttcagaagcaaact

SEQ ID NO: 669 - DNA, 40 bp, Artificial Sequence
  primer
gtaaaacgacggccagtggcccagttggttactatcactc

SEQ ID NO: 670 - DNA, 22 bp, Artificial Sequence
  primer
tgttgcggaatggtacctaaac

SEQ ID NO: 671 - DNA, 21 bp, Artificial Sequence
  primer
tcaactatgtgtggcagttgg

SEQ ID NO: 672 - DNA, 42 bp, Artificial Sequence
  primer
gtaaaacgacggccagtagatatagtgccttgaagattgctc

SEQ ID NO: 673 - DNA, 21 bp, Artificial Sequence
  primer
aagggtgtgttgtgccttgta

SEQ ID NO: 674 - DNA, 21 bp, Artificial Sequence
  primer
caaaggcagttccatgctaaa

SEQ ID NO: 675 - DNA, 22 bp, Artificial Sequence
  primer
tttagtgtccacatgcctgttt

SEQ ID NO: 676 - DNA, 22 bp, Artificial Sequence
  primer
ctccttgagtagagttcctggc

SEQ ID NO: 677 - DNA, 38 bp, Artificial Sequence
  primer
gtaaaacgacggccagttggaggcttgctgttatatgc

SEQ ID NO: 678 - DNA, 41 bp, Artificial Sequence
  primer
gtaaaacgacggccagtgctaagactacaggcttgcatcag

SEQ ID NO: 679 - DNA, 38 bp, Artificial Sequence
  primer
gtaaaacgacggccagttaactgccagaccaatgcttc

SEQ ID NO: 680 - DNA, 20 bp, Artificial Sequence
  primer
ggtgacagaaccagaccctg

SEQ ID NO: 681 - DNA, 41 bp, Artificial Sequence
  primer
gtaaaacgacggccagtgccaatgtacttacttgcgtattc

SEQ ID NO: 682 - DNA, 42 bp, Artificial Sequence
  primer
gtaaaacgacggccagttgtatgagaattagctttgttggtg

SEQ ID NO: 683 - DNA, 22 bp, Artificial Sequence
  primer
tttcatgtagactatgcctggg

SEQ ID NO: 684 - DNA, 24 bp, Artificial Sequence
  primer
tggaatttgtatttagtgtgaggg

SEQ ID NO: 685 - DNA, 27 bp, Artificial Sequence
  primer
agtagctaatatttgagagagagaacg

SEQ ID NO: 686 - DNA, 21 bp, Artificial Sequence
  primer
gtattcttgttgcttgctggc

SEQ ID NO: 687 - DNA, 24 bp, Artificial Sequence
  primer
ttgttatgaattcttggtttggaa

SEQ ID NO: 688 - DNA, 40 bp, Artificial Sequence
  primer
gtaaaacgacggccagtagtcttagttctgttggcaaagg

SEQ ID NO: 689 - DNA, 23 bp, Artificial Sequence
  primer
cgcttataattccacctttcaga

SEQ ID NO: 690 - DNA, 38 bp, Artificial Sequence
  primer
gtaaaacgacggccagtatgaggtatgtgcagcctgtc

SEQ ID NO: 691 - DNA, 22 bp, Artificial Sequence
  primer
atggtcagcaatttgcataaag

SEQ ID NO: 692 - DNA, 38 bp, Artificial Sequence
  primer
gtaaaacgacggccagtcatggtggcacatgtttgtag

SEQ ID NO: 693 - DNA, 20 bp, Artificial Sequence
  primer
tcagggatcacacccagttg

SEQ ID NO: 694 - DNA, 39 bp, Artificial Sequence
  primer
gtaaaacgacggccagtaactacctgcaggaatcaaacg

SEQ ID NO: 695 - DNA, 20 bp, Artificial Sequence
  primer
tgggcaggatgtaatagcca

SEQ ID NO: 696 - DNA, 21 bp, Artificial Sequence
  primer
gggaaactgaaaccggataaa

SEQ ID NO: 697 - DNA, 38 bp, Artificial Sequence
  primer
gtaaaacgacggccagtaatgaagtctgatggctggtg

SEQ ID NO: 698 - DNA, 26 bp, Artificial Sequence
  primer
ggctatagaggaattataggtgtggg

SEQ ID NO: 699 - DNA, 22 bp, Artificial Sequence
  primer
tgagtcatgatggtggtgtttc

SEQ ID NO: 700 - DNA, 35 bp, Artificial Sequence
  primer
gtaaaacgacggccagttcccaccatcacccactc

SEQ ID NO: 701 - DNA, 37 bp, Artificial Sequence
  primer
gtaaaacgacggccagtctctgaggcttggagagcag

SEQ ID NO: 702 - DNA, 27 bp, Artificial Sequence
  primer
tgtagaatctaaaccattaaatttccc

SEQ ID NO: 703 - DNA, 37 bp, Artificial Sequence
  primer
gtaaaacgacggccagtaacgaaacaccaccaccaaa

SEQ ID NO: 704 - DNA, 38 bp, Artificial Sequence
  primer
gtaaaacgacggccagtcatccagttgcctttactggg

SEQ ID NO: 705 - DNA, 38 bp, Artificial Sequence
  primer
gtaaaacgacggccagttggttggtgcctataccagtg

SEQ ID NO: 706 - DNA, 19 bp, Artificial Sequence
  primer
attgggctgccaatgattc

SEQ ID NO: 707 - DNA, 21 bp, Artificial Sequence
  primer
aaggcattctgcattgttgtt

SEQ ID NO: 708 - DNA, 38 bp, Artificial Sequence
  primer
gtaaaacgacggccagttcacataaagtggttggctgc

SEQ ID NO: 709 - DNA, 21 bp, Artificial Sequence
  primer
ttgttctatgttgggaccagg

SEQ ID NO: 710 - DNA, 26 bp, Artificial Sequence
  primer
cagggtagatgtgcagttctataagc

SEQ ID NO: 711 - DNA, 21 bp, Artificial Sequence
  primer
tctctgatggccagtgatgat

SEQ ID NO: 712 - DNA, 21 bp, Artificial Sequence
  primer
aggaagcaggtcgaatgtctg

SEQ ID NO: 713 - DNA, 37 bp, Artificial Sequence
  primer
gtaaaacgacggccagttttgcacttctgagccttgg

SEQ ID NO: 714 - DNA, 40 bp, Artificial Sequence
  primer
gtaaaacgacggccagtcaagtaaagttgtgctcaacagc

SEQ ID NO: 715 - DNA, 24 bp, Artificial Sequence
  primer
tcatttcagagaaggagagcattc

SEQ ID NO: 716 - DNA, 38 bp, Artificial Sequence
  primer
gtaaaacgacggccagttggtcttgaaatcctgacctc

SEQ ID NO: 717 - DNA, 38 bp, Artificial Sequence
  primer
gtaaaacgacggccagtggcttggcactcaacaaatac

SEQ ID NO: 718 - DNA, 25 bp, Artificial Sequence
  primer
aattcattgtggtataagatttgct

SEQ ID NO: 719 - DNA, 39 bp, Artificial Sequence
  primer
gtaaaacgacggccagttgctgactctgtgctagagctt

SEQ ID NO: 720 - DNA, 21 bp, Artificial Sequence
  primer
cagagtcactttccctcccac

SEQ ID NO: 721 - DNA, 39 bp, Artificial Sequence
  primer
gtaaaacgacggccagtttcttccaatgtgtttgtgttt

SEQ ID NO: 722 - DNA, 42 bp, Artificial Sequence
  primer
gtaaaacgacggccagtggagaaactatcattgtcaaatggg

SEQ ID NO: 723 - DNA, 27 bp, Artificial Sequence
  primer
agacagtaagagttgagtaggaggttc

SEQ ID NO: 724 - DNA, 38 bp, Artificial Sequence
  primer
gtaaaacgacggccagtaaactgaatatgggtggcgag

SEQ ID NO: 725 - DNA, 21 bp, Artificial Sequence
  primer
tcatcacatcatcacctgcac

SEQ ID NO: 726 - DNA, 21 bp, Artificial Sequence
  primer
tgatggttccatgaggttagc

SEQ ID NO: 727 - DNA, 39 bp, Artificial Sequence
  primer
gtaaaacgacggccagttggtactaactgaagggtgcag

SEQ ID NO: 728 - DNA, 27 bp, Artificial Sequence
  primer
gacgcttatatatgtcagtttctggag

SEQ ID NO: 729 - DNA, 40 bp, Artificial Sequence
  primer
gtaaaacgacggccagtctgttactgttctgtgtgcttgg

SEQ ID NO: 730 - DNA, 37 bp, Artificial Sequence
  primer
gtaaaacgacggccagtagaaaggtacgtgcggtgtg

SEQ ID NO: 731 - DNA, 21 bp, Artificial Sequence
  primer
tctccacccacttcctttctc

SEQ ID NO: 732 - DNA, 19 bp, Artificial Sequence
  primer
cttccgtttggcttccttg

SEQ ID NO: 733 - DNA, 38 bp, Artificial Sequence
  primer
gtaaaacgacggccagttgtctgcaacagccagatacc

SEQ ID NO: 734 - DNA, 38 bp, Artificial Sequence
  primer
gtaaaacgacggccagttccttacatcaagcattggct

SEQ ID NO: 735 - DNA, 40 bp, Artificial Sequence
  primer
gtaaaacgacggccagtcagtgcacactggagaaggtaag

SEQ ID NO: 736 - DNA, 21 bp, Artificial Sequence
  primer
gggtagcggagcctctttatc

SEQ ID NO: 737 - DNA, 39 bp, Artificial Sequence
  primer
gtaaaacgacggccagttggaagaatttcatgtatcgcc

SEQ ID NO: 738 - DNA, 36 bp, Artificial Sequence
  primer
gtaaaacgacggccagtgggagtgagctctccatcg

SEQ ID NO: 739 - DNA, 21 bp, Artificial Sequence
  primer
caacttcaacgactccctgtg

SEQ ID NO: 740 - DNA, 21 bp, Artificial Sequence
  primer
gagctctgagcctcaacttgc

SEQ ID NO: 741 - DNA, 38 bp, Artificial Sequence
  primer
gtaaaacgacggccagttgatagtatggtctgcctggg

SEQ ID NO: 742 - DNA, 21 bp, Artificial Sequence
  primer
gaggattagacagcgagaggg

SEQ ID NO: 743 - DNA, 21 bp, Artificial Sequence
  primer
gagtgactgacctcggtttcc

SEQ ID NO: 744 - DNA, 39 bp, Artificial Sequence
  primer
gtaaaacgacggccagtggagggtcacggaaactatttg

SEQ ID NO: 745 - DNA, 18 bp, Artificial Sequence
  primer
tcctgcttcagcctcaca

SEQ ID NO: 746 - DNA, 37 bp, Artificial Sequence
  primer
gtaaaacgacggccagtggccctagtaagagcctggg

SEQ ID NO: 747 - DNA, 38 bp, Artificial Sequence
  primer
gtaaaacgacggccagtggctgcagtgagctatgattg

SEQ ID NO: 748 - DNA, 38 bp, Artificial Sequence
  primer
gtaaaacgacggccagtggaacagggaggcaaatcttc

SEQ ID NO: 749 - DNA, 36 bp, Artificial Sequence
  primer
gtaaaacgacggccagttggagggtgacagacaggg

SEQ ID NO: 750 - DNA, 20 bp, Artificial Sequence
  primer
ctccctctacctgccctacg

SEQ ID NO: 751 - DNA, 21 bp, Artificial Sequence
  primer
gcaggagaatgacgtgaactg

SEQ ID NO: 752 - DNA, 20 bp, Artificial Sequence
  primer
cagctctgagggacttgcag

SEQ ID NO: 753 - DNA, 19 bp, Artificial Sequence
  primer
gaggtggagcttgcagtga

SEQ ID NO: 754 - DNA, 38 bp, Artificial Sequence
  primer
gtaaaacgacggccagtgctgtttgacatgtgcgtctc

SEQ ID NO: 755 - DNA, 19 bp, Artificial Sequence
  primer
aagccgggtactgaggtcc

SEQ ID NO: 756 - DNA, 37 bp, Artificial Sequence
  primer
gtaaaacgacggccagtcagacaactcctggcagagg

SEQ ID NO: 757 - DNA, 21 bp, Artificial Sequence
  primer
actacctgacgctggtgaagg

SEQ ID NO: 758 - DNA, 21 bp, Artificial Sequence
  primer
acaggtcaccaatgcctcttc

SEQ ID NO: 759 - DNA, 21 bp, Artificial Sequence
  primer
agcgtgtttatgagcagcaag

SEQ ID NO: 760 - DNA, 38 bp, Artificial Sequence
  primer
gtaaaacgacggccagtggacacagatatggagggtgc

SEQ ID NO: 761 - DNA, 21 bp, Artificial Sequence
  primer
aggtaagtccttcccagtggc

SEQ ID NO: 762 - DNA, 38 bp, Artificial Sequence
  primer
gtaaaacgacggccagtttgtagagcaggagcagggac

SEQ ID NO: 763 - DNA, 21 bp, Artificial Sequence
  primer
tcaggtgtccttcttcaggtg

SEQ ID NO: 764 - DNA, 35 bp, Artificial Sequence
  primer
gtaaaacgacggccagtgagctgggagcctctgtg

SEQ ID NO: 765 - DNA, 21 bp, Artificial Sequence
  primer
aagtgggtgaatgaggtcagg

SEQ ID NO: 766 - DNA, 21 bp, Artificial Sequence
  primer
gctcaggacagtctcaaggtg

SEQ ID NO: 767 - DNA, 38 bp, Artificial Sequence
  primer
gtaaaacgacggccagtcccatagacctttgtcccatc

SEQ ID NO: 768 - DNA, 38 bp, Artificial Sequence
  primer
gtaaaacgacggccagtgattgtgggagactttgtgcc

SEQ ID NO: 769 - DNA, 38 bp, Artificial Sequence
  primer
gtaaaacgacggccagtgcagagaagatgggaatggag

SEQ ID NO: 770 - DNA, 38 bp, Artificial Sequence
  primer
gtaaaacgacggccagtcctctttattggcatcaatgg

SEQ ID NO: 771 - DNA, 38 bp, Artificial Sequence
  primer
gtaaaacgacggccagtaatccagagtgacatggatgg

SEQ ID NO: 772 - DNA, 38 bp, Artificial Sequence
  primer
gtaaaacgacggccagtcctgccacagttagtgaggtc

SEQ ID NO: 773 - DNA, 21 bp, Artificial Sequence
  primer
gatgtgttggtgctgaggaac

SEQ ID NO: 774 - DNA, 20 bp, Artificial Sequence
  primer
agtccagcctgggaaacaag

SEQ ID NO: 775 - DNA, 35 bp, Artificial Sequence
  primer
gtaaaacgacggccagtcttatcagcgtggccctg

SEQ ID NO: 776 - DNA, 37 bp, Artificial Sequence
  primer
gtaaaacgacggccagtctgctccacactcaatgctg

SEQ ID NO: 777 - DNA, 36 bp, Artificial Sequence
  primer
gtaaaacgacggccagtgtggtgtttctggtgcgtg

SEQ ID NO: 778 - DNA, 38 bp, Artificial Sequence
  primer
gtaaaacgacggccagtaaggacacacagaggtgggac

SEQ ID NO: 779 - DNA, 21 bp, Artificial Sequence
  primer
gaggaccacttgatcgctagg

SEQ ID NO: 780 - DNA, 36 bp, Artificial Sequence
  primer
gtaaaacgacggccagtgacgatgctggaggaggtg

SEQ ID NO: 781 - DNA, 22 bp, Artificial Sequence
  primer
tgggaacactcagactctttgc

SEQ ID NO: 782 - DNA, 25 bp, Artificial Sequence
  primer
ttgactttcagcagactttaaacag

SEQ ID NO: 783 - DNA, 38 bp, Artificial Sequence
  primer
gtaaaacgacggccagtgaaatttctctcccacccaac

SEQ ID NO: 784 - DNA, 23 bp, Artificial Sequence
  primer
tcattgtaaagtccactgtttgc

SEQ ID NO: 785 - DNA, 38 bp, Artificial Sequence
  primer
gtaaaacgacggccagtggccaatcatacatccacaag

SEQ ID NO: 786 - DNA, 44 bp, Artificial Sequence
  primer
gtaaaacgacggccagtttatcttagaatccatttcaggtcttc

SEQ ID NO: 787 - DNA, 25 bp, Artificial Sequence
  primer
caggtacaatttgatttgaggtgtt

SEQ ID NO: 788 - DNA, 38 bp, Artificial Sequence
  primer
gtaaaacgacggccagtgccttccaaggcatagatttg

SEQ ID NO: 789 - DNA, 21 bp, Artificial Sequence
  primer
tgtgttgccgtgctacattac

SEQ ID NO: 790 - DNA, 39 bp, Artificial Sequence
  primer
gtaaaacgacggccagtccaatcctgtctaccaaactgg

SEQ ID NO: 791 - DNA, 21 bp, Artificial Sequence
  primer
tatgcaggcaatgtcaatcaa

SEQ ID NO: 792 - DNA, 44 bp, Artificial Sequence
  primer
gtaaaacgacggccagtaagtagaagtttctaatgcctgaattg

SEQ ID NO: 793 - DNA, 22 bp, Artificial Sequence
  primer
tgagtcacattgaatttgcagg

SEQ ID NO: 794 - DNA, 35 bp, Artificial Sequence
  primer
gtaaaacgacggccagtcctgatgggatggattgc

SEQ ID NO: 795 - DNA, 23 bp, Artificial Sequence
  primer
tttgtctgacctatttctggcat

SEQ ID NO: 796 - DNA, 26 bp, Artificial Sequence
  primer
tgtttgacaaagtaatatttgggttg

SEQ ID NO: 797 - DNA, 38 bp, Artificial Sequence
  primer
gtaaaacgacggccagtatgagatgcttagcagagcca

SEQ ID NO: 798 - DNA, 28 bp, Artificial Sequence
  primer
ttctttatcccattacattataaactgc

SEQ ID NO: 799 - DNA, 41 bp, Artificial Sequence
  primer
gtaaaacgacggccagtcctgacagtccatattactgcttc

SEQ ID NO: 800 - DNA, 41 bp, Artificial Sequence
  primer
gtaaaacgacggccagtgacatccggtgtcctaaatatcag

SEQ ID NO: 801 - DNA, 23 bp, Artificial Sequence
  primer
gaaggataatgaaggaatctggg

SEQ ID NO: 802 - DNA, 43 bp, Artificial Sequence
  primer
gtaaaacgacggccagtttgtaactatccacatcccttagtcc

SEQ ID NO: 803 - DNA, 23 bp, Artificial Sequence
  primer
tttcaaacttcgaagacatgcta

SEQ ID NO: 804 - DNA, 38 bp, Artificial Sequence
  primer
gtaaaacgacggccagttggtttgcaagattggagttg

SEQ ID NO: 805 - DNA, 21 bp, Artificial Sequence
  primer
atggtcaaatgttagcagggc

SEQ ID NO: 806 - DNA, 21 bp, Artificial Sequence
  primer
atgaccaggtaatgtgcctcc

SEQ ID NO: 807 - DNA, 40 bp, Artificial Sequence
  primer
gtaaaacgacggccagttgaagggagattatgatggtttg

SEQ ID NO: 808 - DNA, 21 bp, Artificial Sequence
  primer
gtcttctttgatgcatggctg

SEQ ID NO: 809 - DNA, 38 bp, Artificial Sequence
  primer
gtaaaacgacggccagtcaacttctcagggtggttgtg

SEQ ID NO: 810 - DNA, 39 bp, Artificial Sequence
  primer
gtaaaacgacggccagtcgtgaagagaatgatgtcatgg

SEQ ID NO: 811 - DNA, 38 bp, Artificial Sequence
  primer
gtaaaacgacggccagtcccgaccacatgtatttccag

SEQ ID NO: 812 - DNA, 38 bp, Artificial Sequence
  primer
gtaaaacgacggccagtaaagagaaaggtacgggcagg

SEQ ID NO: 813 - DNA, 38 bp, Artificial Sequence
  primer
gtaaaacgacggccagtgtccttcctcatcctacctgc

SEQ ID NO: 814 - DNA, 21 bp, Artificial Sequence
  primer
tgcccaggtctaacaataggg

SEQ ID NO: 815 - DNA, 21 bp, Artificial Sequence
  primer
ctgggaaagaccttctgttgg

SEQ ID NO: 816 - DNA, 24 bp, Artificial Sequence
  primer
caacatacaagcataattcaagcg

SEQ ID NO: 817 - DNA, 38 bp, Artificial Sequence
  primer
gtaaaacgacggccagtgcctctcacagtctaccctgg

SEQ ID NO: 818 - DNA, 38 bp, Artificial Sequence
  primer
gtaaaacgacggccagtaggaatgcaactggaaacagc

SEQ ID NO: 819 - DNA, 21 bp, Artificial Sequence
  primer
ggaatgcaagccaaataacag

SEQ ID NO: 820 - DNA, 40 bp, Artificial Sequence
  primer
gtaaaacgacggccagtgcactgcctttaggaaggaatag

SEQ ID NO: 821 - DNA, 21 bp, Artificial Sequence
  primer
tgtgctctgcaactctcaact

SEQ ID NO: 822 - DNA, 35 bp, Artificial Sequence
  primer
gtaaaacgacggccagtgggccagatcatgaaggg

SEQ ID NO: 823 - DNA, 21 bp, Artificial Sequence
  primer
acctctcccagtgacatccat

SEQ ID NO: 824 - DNA, 22 bp, Artificial Sequence
  primer
ttgcatgaaacagtgtctaggg

SEQ ID NO: 825 - DNA, 38 bp, Artificial Sequence
  primer
gtaaaacgacggccagtttgcaaacccagttgtagcag

SEQ ID NO: 826 - DNA, 38 bp, Artificial Sequence
  primer
gtaaaacgacggccagtgctgcactgatatgctgatgg

SEQ ID NO: 827 - DNA, 21 bp, Artificial Sequence
  primer
ctaattagttgccctgggtgc

SEQ ID NO: 828 - DNA, 22 bp, Artificial Sequence
  primer
gctcaatctattcatgctgcaa

SEQ ID NO: 829 - DNA, 27 bp, Artificial Sequence
  primer
ccagctagatcagatgttattgtgaac

SEQ ID NO: 830 - DNA, 26 bp, Artificial Sequence
  primer
cataattcctcatctaaatttcaggc

SEQ ID NO: 831 - DNA, 43 bp, Artificial Sequence
  primer
gtaaaacgacggccagtaaattactggtgaaatcagattgaag

SEQ ID NO: 832 - DNA, 21 bp, Artificial Sequence
  primer
tcattcgagctgttggatgac

SEQ ID NO: 833 - DNA, 24 bp, Artificial Sequence
  primer
tgttgcatagatttaatggtttgg

SEQ ID NO: 834 - DNA, 45 bp, Artificial Sequence
  primer
gtaaaacgacggccagtgtttctgattagtacatttggcctatta

SEQ ID NO: 835 - DNA, 38 bp, Artificial Sequence
  primer
gtaaaacgacggccagtgcccaagagggtaactttgac

SEQ ID NO: 836 - DNA, 42 bp, Artificial Sequence
  primer
gtaaaacgacggccagtgcaaagtatgattcaaatgtttggt

SEQ ID NO: 837 - DNA, 41 bp, Artificial Sequence
  primer
gtaaaacgacggccagtttgtgtgatatgctttgtgtgatg

SEQ ID NO: 838 - DNA, 21 bp, Artificial Sequence
  primer
atcacattcagtgcttgggac

SEQ ID NO: 839 - DNA, 38 bp, Artificial Sequence
  primer
gtaaaacgacggccagtggctacgtgttcagaaggtcc

SEQ ID NO: 840 - DNA, 20 bp, Artificial Sequence
  primer
gtgtggcgagtggtggtatc

SEQ ID NO: 841 - DNA, 41 bp, Artificial Sequence
  primer
gtaaaacgacggccagtcaaagaacttcaaattacctgtgc

SEQ ID NO: 842 - DNA, 40 bp, Artificial Sequence
  primer
gtaaaacgacggccagtcgtttataaatgaattcccaccc

SEQ ID NO: 843 - DNA, 38 bp, Artificial Sequence
  primer
gtaaaacgacggccagtcaggtcgaatggttgtaaggc

SEQ ID NO: 844 - DNA, 38 bp, Artificial Sequence
  primer
gtaaaacgacggccagtacaggttgtctttcagccttg

SEQ ID NO: 845 - DNA, 38 bp, Artificial Sequence
  primer
gtaaaacgacggccagtaactagggtgtttgaaaggcg

SEQ ID NO: 846 - DNA, 37 bp, Artificial Sequence
  primer
gtaaaacgacggccagttatggtgcaaatgccctttc

SEQ ID NO: 847 - DNA, 38 bp, Artificial Sequence
  primer
gtaaaacgacggccagtatagcacttgacacacagccc

SEQ ID NO: 848 - DNA, 38 bp, Artificial Sequence
  primer
gtaaaacgacggccagtaagggcatctctgaagtacgg

SEQ ID NO: 849 - DNA, 39 bp, Artificial Sequence
  primer
gtaaaacgacggccagttgaccactcataaacacctccc

SEQ ID NO: 850 - DNA, 38 bp, Artificial Sequence
  primer
gtaaaacgacggccagtaataaagcgaaaggtacgggc

SEQ ID NO: 851 - DNA, 38 bp, Artificial Sequence
  primer
gtaaaacgacggccagttctgaattcgctgcatgtttc

SEQ ID NO: 852 - DNA, 38 bp, Artificial Sequence
  primer
gtaaaacgacggccagttctatgtggccttactctggc

SEQ ID NO: 853 - DNA, 38 bp, Artificial Sequence
  primer
gtaaaacgacggccagtcaccatgcctagccttgtttc

SEQ ID NO: 854 - DNA, 21 bp, Artificial Sequence
  primer
ctatatcgcgtttgctttccc

SEQ ID NO: 855 - DNA, 21 bp, Artificial Sequence
  primer
gcctctcacagtctaccctgg

SEQ ID NO: 856 - DNA, 38 bp, Artificial Sequence; identical to SEQ ID NO: 851
  primer

SEQ ID NO: 857 - DNA, 21 bp, Artificial Sequence
  primer
tccctcttactgctctctggc

SEQ ID NO: 858 - DNA, 21 bp, Artificial Sequence
  primer
cagcactcagtgataaccacg

SEQ ID NO: 859 - DNA, 21 bp, Artificial Sequence
  primer
gggtgtcttggactaggttgg

SEQ ID NO: 860 - DNA, 21 bp, Artificial Sequence
  primer
gttgcacacagtcagcagaga

SEQ ID NO: 861 - DNA, 21 bp, Artificial Sequence
  primer
taaggatggcgagatacccag

SEQ ID NO: 862 - DNA, 37 bp, Artificial Sequence
  primer
gtaaaacgacggccagtgccatgtgggctatggattt

SEQ ID NO: 863 - DNA, 22 bp, Artificial Sequence
  primer
gggagaggtttacttcagtggc

SEQ ID NO: 864 - DNA, 39 bp, Artificial Sequence
  primer
gtaaaacgacggccagtggactgaacacatcctagccac

SEQ ID NO: 865 - DNA, 25 bp, Artificial Sequence
  primer
cctagtatttatatgttgcctcgcc

SEQ ID NO: 866 - DNA, 39 bp, Artificial Sequence
  primer
gtaaaacgacggccagtaatgcaagaggagcagcttatg

SEQ ID NO: 867 - DNA, 20 bp, Artificial Sequence
  primer
ttcgaagagtgggcacaaac

SEQ ID NO: 868 - DNA, 38 bp, Artificial Sequence
  primer
gtaaaacgacggccagtgatgacccatgcgagctagac

SEQ ID NO: 869 - DNA, 21 bp, Artificial Sequence
  primer
acttgtgagacttgggctgtg

SEQ ID NO: 870 - DNA, 19 bp, Artificial Sequence
  primer
atgcccacagcattggttc

SEQ ID NO: 871 - DNA, 24 bp, Artificial Sequence
  primer
ttccttgatagctgacattcagtg

SEQ ID NO: 872 - DNA, 24 bp, Artificial Sequence
  primer
ctcttgtcaggttctgagtaccaa

SEQ ID NO: 873 - DNA, 38 bp, Artificial Sequence
  primer
gtaaaacgacggccagtagatgggaaatgggtcaggtc

SEQ ID NO: 874 - DNA, 38 bp, Artificial Sequence
  primer
gtaaaacgacggccagtcccttgaaatcaggctttctg

SEQ ID NO: 875 - DNA, 38 bp, Artificial Sequence
  primer
gtaaaacgacggccagttgcgtaggagaaagtaggcac

SEQ ID NO: 876 - DNA, 38 bp, Artificial Sequence
  primer
gtaaaacgacggccagttcagcattctgaagtcatgga

SEQ ID NO: 877 - DNA, 38 bp, Artificial Sequence
  primer
gtaaaacgacggccagtgctgtgtggctttaagcaatg

SEQ ID NO: 878 - DNA, 21 bp, Artificial Sequence
  primer
gtgccctactgccaacctatc

SEQ ID NO: 879 - DNA, 19 bp, Artificial Sequence
  primer
tgggcaacacaggaagacc

SEQ ID NO: 880 - DNA, 40 bp, Artificial Sequence
  primer
gtaaaacgacggccagtttctgacacctggtaatcgagag

SEQ ID NO: 881 - DNA, 39 bp, Artificial Sequence
  primer
gtaaaacgacggccagttgaccttgttgggttaaccttc

SEQ ID NO: 882 - DNA, 24 bp, Artificial Sequence
  primer
ttcatgaaccattcttagcttctg

SEQ ID NO: 883 - DNA, 38 bp, Artificial Sequence
  primer
gtaaaacgacggccagtatctgaccttgtgatctgccc

SEQ ID NO: 884 - DNA, 35 bp, Artificial Sequence
  primer
gtaaaacgacggccagtgcaaggtccgggtagctg

SEQ ID NO: 885 - DNA, 19 bp, Artificial Sequence
  primer
ggtccctatcgccgttcac

SEQ ID NO: 886 - DNA, 18 bp, Artificial Sequence
  primer
cctatcgccgttcactgg

SEQ ID NO: 887 - DNA, 39 bp, Artificial Sequence
  primer
gtaaaacgacggccagtgacaacagcttatttggcaagg

SEQ ID NO: 888 - DNA, 38 bp, Artificial Sequence
  primer
gtaaaacgacggccagtcaggagggttacaactccagg

SEQ ID NO: 889 - DNA, 21 bp, Artificial Sequence
  primer
ggacagtaccttcaagcctgc

SEQ ID NO: 890 - DNA, 38 bp, Artificial Sequence
  primer
gtaaaacgacggccagtatcaagagtggctttccattg

SEQ ID NO: 891 - DNA, 37 bp, Artificial Sequence
  primer
gtaaaacgacggccagtattacaggccgtgttcatgc

SEQ ID NO: 892 - DNA, 21 bp, Artificial Sequence
  primer
tgaaactggaggaggagaagc

SEQ ID NO: 893 - DNA, 21 bp, Artificial Sequence
  primer
acccatccatagccagatgag

SEQ ID NO: 894 - DNA, 38 bp, Artificial Sequence
  primer
gtaaaacgacggccagtcggatcctttctgtgttggtc

SEQ ID NO: 895 - DNA, 39 bp, Artificial Sequence
  primer
gtaaaacgacggccagtcttgcagcatggtgagaactac

SEQ ID NO: 896 - DNA, 38 bp, Artificial Sequence
  primer
gtaaaacgacggccagtagaagcttgccttcaaattgc

SEQ ID NO: 897 - DNA, 37 bp, Artificial Sequence
  primer
gtaaaacgacggccagttccaaggctcatccacattg

SEQ ID NO: 898 - DNA, 38 bp, Artificial Sequence
  primer
gtaaaacgacggccagtgctgctgtgtgtatcaggaag

SEQ ID NO: 899 - DNA, 38 bp, Artificial Sequence
  primer
gtaaaacgacggccagtcaaattgttctttcgtttggc

SEQ ID NO: 900 - DNA, 21 bp, Artificial Sequence
  primer
cagcactcctggaccctaaac

SEQ ID NO: 901 - DNA, 39 bp, Artificial Sequence
  primer
gtaaaacgacggccagtctgtgaatcgctagtgaacctg

SEQ ID NO: 902 - DNA, 38 bp, Artificial Sequence
  primer
gtaaaacgacggccagtggtgattcccatgaaatttgg

SEQ ID NO: 903 - DNA, 24 bp, Artificial Sequence
  primer
aggtctgtttagaaatttggttgg

SEQ ID NO: 904 - DNA, 38 bp, Artificial Sequence
  primer
gtaaaacgacggccagtgcagcagatgacagagctcac

SEQ ID NO: 905 - DNA, 21 bp, Artificial Sequence
  primer
tgctatccaagggtgataggg

SEQ ID NO: 906 - DNA, 38 bp, Artificial Sequence
  primer
gtaaaacgacggccagtaccagacaaccctggatgaag

SEQ ID NO: 907 - DNA, 38 bp, Artificial Sequence
  primer
gtaaaacgacggccagtctgaagctgctctgtgtttgc

SEQ ID NO: 908 - DNA, 21 bp, Artificial Sequence
  primer
ctgcgttaacatggaagaccc

SEQ ID NO: 909 - DNA, 38 bp, Artificial Sequence
  primer
gtaaaacgacggccagtcattgcagagatacgccaaag

SEQ ID NO: 910 - DNA, 38 bp, Artificial Sequence
  primer
gtaaaacgacggccagtcaaagcatctgcacctgtagc

SEQ ID NO: 911 - DNA, 25 bp, Artificial Sequence
  primer
tttcaagaggaattgtttccattag

SEQ ID NO: 912 - DNA, 38 bp, Artificial Sequence
  primer
gtaaaacgacggccagttctttcagtggaagtcggagc

SEQ ID NO: 913 - DNA, 22 bp, Artificial Sequence
  primer
tggattctgaaatgatgcaaag

SEQ ID NO: 914 - DNA, 18 bp, Artificial Sequence
  primer
tgcaggacaagtcccgag

SEQ ID NO: 915 - DNA, 38 bp, Artificial Sequence
  primer
gtaaaacgacggccagtccctttcctggttaccatgtg

SEQ ID NO: 916 - DNA, 21 bp, Artificial Sequence
  primer
ctgtgaatgccaaaggatctg

SEQ ID NO: 917 - DNA, 21 bp, Artificial Sequence
  primer
caccctacacgcataacctcc

SEQ ID NO: 918 - DNA, 22 bp, Artificial Sequence
  primer
ttgtagcaatgggctgtgtatc

SEQ ID NO: 919 - DNA, 21 bp, Artificial Sequence
  primer
ttgtgaaatgccactgaattg

SEQ ID NO: 920 - DNA, 38 bp, Artificial Sequence
  primer
gtaaaacgacggccagttgccatttgcaccatctaatc

SEQ ID NO: 921 - DNA, 21 bp, Artificial Sequence
  primer
ccaaacttctgccttcaggtc

SEQ ID NO: 922 - DNA, 22 bp, Artificial Sequence
  primer
tttgaaggtatctcaagcaggg

SEQ ID NO: 923 - DNA, 38 bp, Artificial Sequence
  primer
gtaaaacgacggccagtccaaatgtcctgcataacacc

SEQ ID NO: 924 - DNA, 22 bp, Artificial Sequence
  primer
aggaggactcactcactgttcc

SEQ ID NO: 925 - DNA, 38 bp, Artificial Sequence
  primer
gtaaaacgacggccagtgggtttgccgtcaagtatagg

SEQ ID NO: 926 - DNA, 38 bp, Artificial Sequence
  primer
gtaaaacgacggccagtaggttcgaggtgagagaggtc

SEQ ID NO: 927 - DNA, 20 bp, Artificial Sequence
  primer
gcaggcgaccatttcttatg

SEQ ID NO: 928 - DNA, 21 bp, Artificial Sequence
  primer
aatgatttgaaggcctccttt

SEQ ID NO: 929 - DNA, 38 bp, Artificial Sequence
  primer
gtaaaacgacggccagtcccttgggctctttacttgag

SEQ ID NO: 930 - DNA, 21 bp, Artificial Sequence
  primer
cctgggtgacagagtgagact

SEQ ID NO: 931 - DNA, 38 bp, Artificial Sequence
  primer
gtaaaacgacggccagtgaaagaggcttgcagtcagtg

SEQ ID NO: 932 - DNA, 38 bp, Artificial Sequence
  primer
gtaaaacgacggccagttgttaaaggagagggtttggg

SEQ ID NO: 933 - DNA, 21 bp, Artificial Sequence
  primer
caattcccaaagatctgggtc

SEQ ID NO: 934 - DNA, 21 bp, Artificial Sequence
  primer
tagccttgcaaatgttgctct

SEQ ID NO: 935 - DNA, 43 bp, Artificial Sequence
  primer
gtaaaacgacggccagtcatatacacacaatcttcatcttggg

SEQ ID NO: 936 - DNA, 22 bp, Artificial Sequence
  primer
gggaatttggagttcaatgatg

SEQ ID NO: 937 - DNA, 21 bp, Artificial Sequence
  primer
atggcaaataatccttccacg

SEQ ID NO: 938 - DNA, 24 bp, Artificial Sequence
  primer
acaaagctccatgttgtctttatg

SEQ ID NO: 939 - DNA, 38 bp, Artificial Sequence
  primer
gtaaaacgacggccagttttgccataatcacgcagaga

SEQ ID NO: 940 - DNA, 21 bp, Artificial Sequence
  primer
tccatttggagacacacacac

SEQ ID NO: 941 - DNA, 38 bp, Artificial Sequence
  primer
gtaaaacgacggccagtacctagtttgcgagtcccttg

SEQ ID NO: 942 - DNA, 39 bp, Artificial Sequence
  primer
gtaaaacgacggccagtaaacatgtgacactcaagccac

SEQ ID NO: 943 - DNA, 38 bp, Artificial Sequence
  primer
gtaaaacgacggccagttgaacatgattggtctggtgc

SEQ ID NO: 944 - DNA, 38 bp, Artificial Sequence
  primer
gtaaaacgacggccagtaaatttcctcagcattggagc

SEQ ID NO: 945 - DNA, 21 bp, Artificial Sequence
  primer
ttctgaccaagaggctaaggc

SEQ ID NO: 946 - DNA, 39 bp, Artificial Sequence
  primer
gtaaaacgacggccagtttagcacagccagaagtaccag

SEQ ID NO: 947 - DNA, 38 bp, Artificial Sequence
  primer
gtaaaacgacggccagtccagacttagaagccgtgctc

SEQ ID NO: 948 - DNA, 21 bp, Artificial Sequence
  primer
accctcaggaagtggatcttg

SEQ ID NO: 949 - DNA, 39 bp, Artificial Sequence
  primer
gtaaaacgacggccagttctctcaccttcatttcacacc

SEQ ID NO: 950 - DNA, 20 bp, Artificial Sequence
  primer
accctcatgcaacgatcctc

SEQ ID NO: 951 - DNA, 46 bp, Artificial Sequence
  primer
gtaaaacgacggccagtttgtagaataccattgagaattaaagtca

SEQ ID NO: 952 - DNA, 39 bp, Artificial Sequence
  primer
gtaaaacgacggccagtcatgggaacccatttgtgttat

SEQ ID NO: 953 - DNA, 20 bp, Artificial Sequence
  primer
accctcatgcaacgatcctc

SEQ ID NO: 954 - DNA, 20 bp, Artificial Sequence
  primer
tgttggtgcccatctaccag

SEQ ID NO: 955 - DNA, 38 bp, Artificial Sequence
  primer
gtaaaacgacggccagttgggattgtcatttcctgttc

SEQ ID NO: 956 - DNA, 37 bp, Artificial Sequence
  primer
gtaaaacgacggccagtgccgggtcaacaaagatttc

SEQ ID NO: 957 - DNA, 22 bp, Artificial Sequence
  primer
caatagcaaaggcgataacagc

SEQ ID NO: 958 - DNA, 23 bp, Artificial Sequence
  primer
cctgctgtctgttatgtttgatg

SEQ ID NO: 959 - DNA, 21 bp, Artificial Sequence
  primer
ttgcattgagccaagactgag

SEQ ID NO: 960 - DNA, 38 bp, Artificial Sequence
  primer
gtaaaacgacggccagtccacattaaagcatgatgcag

SEQ ID NO: 961 - DNA, 38 bp, Artificial Sequence
  primer
gtaaaacgacggccagttacctgtgagtgaggaggcag

SEQ ID NO: 962 - DNA, 28 bp, Artificial Sequence
  primer
tttaatctcaaagtataaattcaaggca

SEQ ID NO: 963 - DNA, 39 bp, Artificial Sequence
  primer
gtaaaacgacggccagttctgggaggaaaggaagctaag

SEQ ID NO: 964 - DNA, 23 bp, Artificial Sequence
  primer
tgcctttccaccaaattataaca

SEQ ID NO: 965 - DNA, 37 bp, Artificial Sequence
  primer
gtaaaacgacggccagttggtgggtcttcagcgttag

SEQ ID NO: 966 - DNA, 39 bp, Artificial Sequence
  primer
gtaaaacgacggccagtttggccagtatgctacagtgtg

SEQ ID NO: 967 - DNA, 22 bp, Artificial Sequence
  primer
tgatttatgagccttccttggg

SEQ ID NO: 968 - DNA, 21 bp, Artificial Sequence
  primer
atttagatggttctcgcccac

SEQ ID NO: 969 - DNA, 21 bp, Artificial Sequence
  primer
caagtagggcagttcctttgg

SEQ ID NO: 970 - DNA, 35 bp, Artificial Sequence
  primer
gtaaaacgacggccagtgtccacgtgcgtcccttc

SEQ ID NO: 971 - DNA, 38 bp, Artificial Sequence
  primer
gtaaaacgacggccagtgtgactgtgggcaactactgc

SEQ ID NO: 972 - DNA, 38 bp, Artificial Sequence
  primer
gtaaaacgacggccagtagtccctgcttcttcttcacg

SEQ ID NO: 973 - DNA, 39 bp, Artificial Sequence
  primer
gtaaaacgacggccagtaagcctgtaagtgctgaatgtg

SEQ ID NO: 974 - DNA, 38 bp, Artificial Sequence
  primer
gtaaaacgacggccagtttgtgggtctgagatacctgg

SEQ ID NO: 975 - DNA, 38 bp, Artificial Sequence
  primer
gtaaaacgacggccagtggtccttacctagggaggtgg

SEQ ID NO: 976 - DNA, 38 bp, Artificial Sequence
  primer
gtaaaacgacggccagtcagacctttcacatcctggtg

SEQ ID NO: 977 - DNA, 38 bp, Artificial Sequence
  primer
gtaaaacgacggccagtctggttccagtctgttgcttg

SEQ ID NO: 978 - DNA, 38 bp, Artificial Sequence
  primer
gtaaaacgacggccagttgtgtacatggcaggtagtgg

SEQ ID NO: 979 - DNA, 21 bp, Artificial Sequence
  primer
agtgtaaccaggaccactggg

SEQ ID NO: 980 - DNA, 39 bp, Artificial Sequence
  primer
gtaaaacgacggccagtcgagaggccatcatcaaatatc

SEQ ID NO: 981 - DNA, 20 bp, Artificial Sequence
  primer
gctcttcggtaggaagtggg

SEQ ID NO: 982 - DNA, 38 bp, Artificial Sequence
  primer
gtaaaacgacggccagttggtttggcacctactacagg

SEQ ID NO: 983 - DNA, 21 bp, Artificial Sequence
  primer
ggaggagctgtgtggtgtttc

SEQ ID NO: 984 - DNA, 38 bp, Artificial Sequence
  primer
gtaaaacgacggccagttctcagtgctctgaatccctg

SEQ ID NO: 985 - DNA, 37 bp, Artificial Sequence
  primer
gtaaaacgacggccagttgggtgacggagtgagattc

SEQ ID NO: 986 - DNA, 20 bp, Artificial Sequence
  primer
ctcttatcccacgtgcttcc

SEQ ID NO: 987 - DNA, 38 bp, Artificial Sequence
  primer
gtaaaacgacggccagttggtgttgtcctgctaatccc

SEQ ID NO: 988 - DNA, 21 bp, Artificial Sequence
  primer
agttctcaagcccaaacaagg

SEQ ID NO: 989 - DNA, 38 bp, Artificial Sequence
  primer
gtaaaacgacggccagtagtggcacacaggtacaggac

SEQ ID NO: 990 - DNA, 21 bp, Artificial Sequence
  primer
ggacaggtcttctgaattggg

SEQ ID NO: 991 - DNA, 38 bp, Artificial Sequence
  primer
gtaaaacgacggccagtacagaatccatttccggtctg

SEQ ID NO: 992 - DNA, 20 bp, Artificial Sequence
  primer
atctccagacctcgtgatcc

SEQ ID NO: 993 - DNA, 44 bp, Artificial Sequence
  primer
gtaaaacgacggccagtaaacaggttaaatcctttaaacgtgag

SEQ ID NO: 994 - DNA, 23 bp, Artificial Sequence
  primer
agtacatgtcccttcatgaccac

SEQ ID NO: 995 - DNA, 38 bp, Artificial Sequence
  primer
gtaaaacgacggccagtatgacagctctcccaatgtca

SEQ ID NO: 996 - DNA, 21 bp, Artificial Sequence
  primer
tttctgagcccttgtcatttc

SEQ ID NO: 997 - DNA, 38 bp, Artificial Sequence
  primer
gtaaaacgacggccagttttgaccgagatttgctgttg

SEQ ID NO: 998 - DNA, 36 bp, Artificial Sequence
  primer
gtaaaacgacggccagtagttgcagtcacacggtgg

SEQ ID NO: 999 - DNA, 21 bp, Artificial Sequence
  primer
cgggttgcaattagataagca

SEQ ID NO: 1000 - DNA, 27 bp, Artificial Sequence
  primer
ttgttccgtcgtaatagactataaacc

SEQ ID NO: 1001 - DNA, 21 bp, Artificial Sequence
  primer
taaatgcatgcttggaagtgg

SEQ ID NO: 1002 - DNA, 38 bp, Artificial Sequence
  primer
gtaaaacgacggccagtgaaagtggccattgtaggagg

SEQ ID NO: 1003 - DNA, 24 bp, Artificial Sequence
  primer
ccctttatgcctttgtctctttac

SEQ ID NO: 1004 - DNA, 23 bp, Artificial Sequence
  primer
tggtggttgtaatcaatggaaac

SEQ ID NO: 1005 - DNA, 23 bp, Artificial Sequence
  primer
cttggagaaatgttgcctaagaa

SEQ ID NO: 1006 - DNA, 47 bp, Artificial Sequence
  primer
gtaaaacgacggccagtttcaaactccttagttagaaagtatttggt

SEQ ID NO: 1007 - DNA, 37 bp, Artificial Sequence
  primer
gtaaaacgacggccagtagccaacatagagccctcag

SEQ ID NO: 1008 - DNA, 18 bp, Artificial Sequence
  primer
tccagagggctcagccag

SEQ ID NO: 1009 - DNA, 38 bp, Artificial Sequence
  primer
gtaaaacgacggccagtgacaagcgcagtgctcagtag

SEQ ID NO: 1010 - DNA, 38 bp, Artificial Sequence
  primer
gtaaaacgacggccagtctcagcacccacctgcttatc

SEQ ID NO: 1011 - DNA, 36 bp, Artificial Sequence
  primer
gtaaaacgacggccagtgtgactgatggcctgaggg

SEQ ID NO: 1012 - DNA, 39 bp, Artificial Sequence
  primer
gtaaaacgacggccagtgggagtgcagagctacagtcag

SEQ ID NO: 1013 - DNA, 38 bp, Artificial Sequence
  primer
gtaaaacgacggccagtaaattgtctcgccagtgtcag

SEQ ID NO: 1014 - DNA, 21 bp, Artificial Sequence
  primer
caacgggaagaggagtgagtc

SEQ ID NO: 1015 - DNA, 38 bp, Artificial Sequence
  primer
gtaaaacgacggccagtgactctcccagtcagcagtgg

SEQ ID NO: 1016 - DNA, 21 bp, Artificial Sequence
  primer
caggagcagtctctgcatttg

SEQ ID NO: 1017 - DNA, 38 bp, Artificial Sequence
  primer
gtaaaacgacggccagtgagctgcctattgactgggtg

SEQ ID NO: 1018 - DNA, 21 bp, Artificial Sequence
  primer
tacagggagacttcaggaggg

SEQ ID NO: 1019 - DNA, 35 bp, Artificial Sequence
  primer
gtaaaacgacggccagttcctccactgccacaagg

SEQ ID NO: 1020 - DNA, 38 bp, Artificial Sequence
  primer
gtaaaacgacggccagtctgtcccattgtgtatggtgg

SEQ ID NO: 1021 - DNA, 21 bp, Artificial Sequence
  primer
cttagaggatcttgatgggcg

SEQ ID NO: 1022 - DNA, 20 bp, Artificial Sequence
  primer
tcctttcagattgggcattg

SEQ ID NO: 1023 - DNA, 21 bp, Artificial Sequence
  primer
tacccgggaagttgatattgc

SEQ ID NO: 1024 - DNA, 38 bp, Artificial Sequence
  primer
gtaaaacgacggccagtaccacggccatctatgtcttc

SEQ ID NO: 1025 - DNA, 21 bp, Artificial Sequence
  primer
atctatgccatggtgaagctg

SEQ ID NO: 1026 - DNA, 20 bp, Artificial Sequence
  primer
ggtgtgtggacttctggagc

SEQ ID NO: 1027 - DNA, 21 bp, Artificial Sequence
  primer
catttgggtctcttgtcccac

SEQ ID NO: 1028 - DNA, 21 bp, Artificial Sequence
  primer
cagtgtctgtctcagaggccc

SEQ ID NO: 1029 - DNA, 21 bp, Artificial Sequence
  primer
cctcttgcatatagctggtgc

SEQ ID NO: 1030 - DNA, 38 bp, Artificial Sequence
  primer
gtaaaacgacggccagtgctttccctatacctgcctcc

SEQ ID NO: 1031 - DNA, 20 bp, Artificial Sequence
  primer
cacctgtgtccaaggtcagg

SEQ ID NO: 1032 - DNA, 21 bp, Artificial Sequence
  primer
cagagcagcaaatgtagcagg

SEQ ID NO: 1033 - DNA, 38 bp, Artificial Sequence
  primer
gtaaaacgacggccagtctttcaagttgtgggttccag

SEQ ID NO: 1034 - DNA, 39 bp, Artificial Sequence
  primer
gtaaaacgacggccagtgaggttaagcatcagcccatag

SEQ ID NO: 1035 - DNA, 38 bp, Artificial Sequence
  primer
gtaaaacgacggccagtatttcagtttgtggctgggtc

SEQ ID NO: 1036 - DNA, 38 bp, Artificial Sequence
  primer
gtaaaacgacggccagttttgcgtgttcatcctgaaag

SEQ ID NO: 1037 - DNA, 38 bp, Artificial Sequence
  primer
gtaaaacgacggccagtaggctggctggttctcctatc

SEQ ID NO: 1038 - DNA, 21 bp, Artificial Sequence
  primer
gcaagtgagctgagattgcac

SEQ ID NO: 1039 - DNA, 37 bp, Artificial Sequence
  primer
gtaaaacgacggccagtcctcaggtgttctgcctgtc

SEQ ID NO: 1040 - DNA, 38 bp, Artificial Sequence
  primer
gtaaaacgacggccagtcctctggaaggaagagtgagc

SEQ ID NO: 1041 - DNA, 37 bp, Artificial Sequence
  primer
gtaaaacgacggccagtaggcgtgtggagtgagtgag

SEQ ID NO: 1042 - DNA, 21 bp, Artificial Sequence
  primer
cttccctgaagggtgacattc

SEQ ID NO: 1043 - DNA, 21 bp, Artificial Sequence
  primer
gctcaggagaaagttgcagtg

SEQ ID NO: 1044 - DNA, 38 bp, Artificial Sequence
  primer
gtaaaacgacggccagttgagagtctccttcctctccg

SEQ ID NO: 1045 - DNA, 21 bp, Artificial Sequence
  primer
aggacctggagagatgctcag

SEQ ID NO: 1046 - DNA, 19 bp, Artificial Sequence
  primer
cccagcacaggagtttgag

SEQ ID NO: 1047 - DNA, 37 bp, Artificial Sequence
  primer
gtaaaacgacggccagtacctgccatgtgccagatac

SEQ ID NO: 1048 - DNA, 38 bp, Artificial Sequence
  primer
gtaaaacgacggccagtgaaataagggagggtgtgtgc

SEQ ID NO: 1049 - DNA, 38 bp, Artificial Sequence
  primer
gtaaaacgacggccagtaagctgcttgcagtttccttc

SEQ ID NO: 1050 - DNA, 21 bp, Artificial Sequence
  primer
aaatggaaggaatgttgaggc

SEQ ID NO: 1051 - DNA, 20 bp, Artificial Sequence
  primer
cacactcggcctgcttctac

SEQ ID NO: 1052 - DNA, 21 bp, Artificial Sequence
  primer
cggctcattcctcctttagtc

SEQ ID NO: 1053 - DNA, 38 bp, Artificial Sequence
  primer
gtaaaacgacggccagttactttctgatcatcctggcg

SEQ ID NO: 1054 - DNA, 38 bp, Artificial Sequence
  primer
gtaaaacgacggccagttgtgtgcatgtggaaacactc

SEQ ID NO: 1055 - DNA, 39 bp, Artificial Sequence
  primer
gtaaaacgacggccagtttctacgtaggagcaaaggcag

SEQ ID NO: 1056 - DNA, 18 bp, Artificial Sequence
  primer
tccacatggccactcctc

SEQ ID NO: 1057 - DNA, 38 bp, Artificial Sequence
  primer
gtaaaacgacggccagtctcctggaggtatcggttacg

SEQ ID NO: 1058 - DNA, 21 bp, Artificial Sequence
  primer
tttaatccatgggtttgccag

SEQ ID NO: 1059 - DNA, 20 bp, Artificial Sequence
  primer
gcctcagcctcccataattc

SEQ ID NO: 1060 - DNA, 21 bp, Artificial Sequence
  primer
taacattccaggaagggcaac

SEQ ID NO: 1061 - DNA, 36 bp, Artificial Sequence
  primer
gtaaaacgacggccagtggagagggctgtcgagttg

SEQ ID NO: 1062 - DNA, 21 bp, Artificial Sequence
  primer
agaagtccttaggtcgcctcc

SEQ ID NO: 1063 - DNA, 21 bp, Artificial Sequence
  primer
gtctcctttcgcttctcccag

SEQ ID NO: 1064 - DNA, 38 bp, Artificial Sequence
  primer
gtaaaacgacggccagtgacttgcccaggtcagttgtc

SEQ ID NO: 1065 - DNA, 21 bp, Artificial Sequence
  primer
atgacttgtgaagtgaggccc

SEQ ID NO: 1066 - DNA, 39 bp, Artificial Sequence
  primer
gtaaaacgacggccagtgaccctgggttctgaggtaaag

SEQ ID NO: 1067 - DNA, 38 bp, Artificial Sequence
  primer
gtaaaacgacggccagtacgatgtgcctccttgtcttc

SEQ ID NO: 1068 - DNA, 38 bp, Artificial Sequence
  primer
gtaaaacgacggccagtaccttcttccagttgctttgc

SEQ ID NO: 1069 - DNA, 19 bp, Artificial Sequence
  primer
ctgcccgaggatcaagaac

SEQ ID NO: 1070 - DNA, 38 bp, Artificial Sequence
  primer
gtaaaacgacggccagtacctacctggctcgtgtcttc

SEQ ID NO: 1071 - DNA, 21 bp, Artificial Sequence
  primer
ctgttgctctccctactggtg

SEQ ID NO: 1072 - DNA, 38 bp, Artificial Sequence
  primer
gtaaaacgacggccagtgcagtgcagagtatctgggag

SEQ ID NO: 1073 - DNA, 38 bp, Artificial Sequence
  primer
gtaaaacgacggccagtgttcttccctccgtagacctg

SEQ ID NO: 1074 - DNA, 38 bp, Artificial Sequence
  primer
gtaaaacgacggccagtgggcttagagagagcggaatc

SEQ ID NO: 1075 - DNA, 20 bp, Artificial Sequence
  primer
cagcccagagtgtcaagagg

SEQ ID NO: 1076 - DNA, 21 bp, Artificial Sequence
  primer
aggcttctaggagtcaagggc

SEQ ID NO: 1077 - DNA, 38 bp, Artificial Sequence
  primer
gtaaaacgacggccagtctgcaaagggataggaagtgg

SEQ ID NO: 1078 - DNA, 38 bp, Artificial Sequence
  primer
gtaaaacgacggccagtatgtccaccctcaggtctcac

SEQ ID NO: 1079 - DNA, 37 bp, Artificial Sequence
  primer
gtaaaacgacggccagtaggcctgagaggatgagagg

SEQ ID NO: 1080 - DNA, 37 bp, Artificial Sequence
  primer
gtaaaacgacggccagtcccgctcctctgaaatactg

SEQ ID NO: 1081 - DNA, 38 bp, Artificial Sequence
  primer
gtaaaacgacggccagtgcccacactagggaggatatg

SEQ ID NO: 1082 - DNA, 21 bp, Artificial Sequence
  primer
cggtattccagatgctgtgac

SEQ ID NO: 1083 - DNA, 39 bp, Artificial Sequence
  primer
gtaaaacgacggccagtccctattctctatcttgggcct

SEQ ID NO: 1084 - DNA, 38 bp, Artificial Sequence
  primer
gtaaaacgacggccagtgaaagagcacactggcatctg

SEQ ID NO: 1085 - DNA, 21 bp, Artificial Sequence
  primer
ttaaatgccagcagtccacag

SEQ ID NO: 1086 - DNA, 19 bp, Artificial Sequence
  primer
ctcctcaccatcgctcctc

SEQ ID NO: 1087 - DNA, 38 bp, Artificial Sequence
  primer
gtaaaacgacggccagtcatacccaggctttcatggag

SEQ ID NO: 1088 - DNA, 38 bp, Artificial Sequence
  primer
gtaaaacgacggccagtagtgctggaccctgaccttag

SEQ ID NO: 1089 - DNA, 38 bp, Artificial Sequence
  primer
gtaaaacgacggccagtgagacattagagagggccagg

SEQ ID NO: 1090 - DNA, 38 bp, Artificial Sequence
  primer
gtaaaacgacggccagtagggaaagcaggtcagtgttc

SEQ ID NO: 1091 - DNA, 38 bp, Artificial Sequence
  primer
gtaaaacgacggccagtagggatcaagcacaggctaag

SEQ ID NO: 1092 - DNA, 38 bp, Artificial Sequence
  primer
gtaaaacgacggccagtccctgcttattctcggtatgg

SEQ ID NO: 1093 - DNA, 21 bp, Artificial Sequence
  primer
gatctgggtaacctcgttgtg

SEQ ID NO: 1094 - DNA, 37 bp, Artificial Sequence
  primer
gtaaaacgacggccagtttctgcaacaaagctcctgg

SEQ ID NO: 1095 - DNA, 37 bp, Artificial Sequence
  primer
gtaaaacgacggccagtccaacccttcttccagcaac

SEQ ID NO: 1096 - DNA, 37 bp, Artificial Sequence
  primer
gtaaaacgacggccagtttccacccttcctttcaagc

SEQ ID NO: 1097 - DNA, 21 bp, Artificial Sequence
  primer
ttatgccaggctgaactctcc

SEQ ID NO: 1098 - DNA, 21 bp, Artificial Sequence
  primer
gactttctgctccaaacctgg

SEQ ID NO: 1099 - DNA, 38 bp, Artificial Sequence
  primer
gtaaaacgacggccagtgatgaagcaactgcttgttgg

SEQ ID NO: 1100 - DNA, 21 bp, Artificial Sequence
  primer
aaactgggaacacattcctgc

SEQ ID NO: 1101 - DNA, 21 bp, Artificial Sequence
  primer
aggagtcttgggctctgtgtg

SEQ ID NO: 1102 - DNA, 37 bp, Artificial Sequence
  primer
gtaaaacgacggccagtccagctgcttccacatgttc

SEQ ID NO: 1103 - DNA, 38 bp, Artificial Sequence
  primer
gtaaaacgacggccagtattcctctcgacactgggaag

SEQ ID NO: 1104 - DNA, 22 bp, Artificial Sequence
  primer
tgtctgctacatctgcctaccc

SEQ ID NO: 1105 - DNA, 38 bp, Artificial Sequence
  primer
gtaaaacgacggccagtttgcctcagatcatcaccaac

SEQ ID NO: 1106 - DNA, 20 bp, Artificial Sequence
  primer
aagatgcacaaggaagccac

SEQ ID NO: 1107 - DNA, 37 bp, Artificial Sequence
  primer
gtaaaacgacggccagtggcactgaagctggaaagtg

SEQ ID NO: 1108 - DNA, 38 bp, Artificial Sequence
  primer
gtaaaacgacggccagtactcaaagacagagatggccg

SEQ ID NO: 1109 - DNA, 38 bp, Artificial Sequence
  primer
gtaaaacgacggccagttaccagccacagattctcacg

SEQ ID NO: 1110 - DNA, 21 bp, Artificial Sequence
  primer
tcaagggtaacaggcatcttc

SEQ ID NO: 1111 - DNA, 21 bp, Artificial Sequence
  primer
ccgtcctgttgattgtcagtg

SEQ ID NO: 1112 - DNA, 37 bp, Artificial Sequence
  primer
gtaaaacgacggccagtagcagccggtatctaccctg

SEQ ID NO: 1113 - DNA, 38 bp, Artificial Sequence
  primer
gtaaaacgacggccagttggttatcaggagcgttgaag

SEQ ID NO: 1114 - DNA, 18 bp, Artificial Sequence
  primer
acgggcgatgttcctctg

SEQ ID NO: 1115 - DNA, 21 bp, Artificial Sequence
  primer
tcagggctcacagtgatgaag

SEQ ID NO: 1116 - DNA, 38 bp, Artificial Sequence
  primer
gtaaaacgacggccagtattcttggtcattcactgggc

SEQ ID NO: 1117 - DNA, 38 bp, Artificial Sequence
  primer
gtaaaacgacggccagtgattgacaaggtcaggttggg

SEQ ID NO: 1118 - DNA, 38 bp, Artificial Sequence
  primer
gtaaaacgacggccagtatggagacctggagaggaagg

SEQ ID NO: 1119 - DNA, 38 bp, Artificial Sequence
  primer
gtaaaacgacggccagtccactgtgctgaactgtgacc

SEQ ID NO: 1120 - DNA, 38 bp, Artificial Sequence
  primer
gtaaaacgacggccagtaagcaaaggaactgatctggg

SEQ ID NO: 1121 - DNA, 21 bp, Artificial Sequence
  primer
cagctgtggttgttgctgtag

SEQ ID NO: 1122 - DNA, 21 bp, Artificial Sequence
  primer
caggaagagcagaaagctgag

SEQ ID NO: 1123 - DNA, 39 bp, Artificial Sequence
  primer
gtaaaacgacggccagtttgcctcttaaagtcagcttgc

SEQ ID NO: 1124 - DNA, 39 bp, Artificial Sequence
  primer
gtaaaacgacggccagtttctcctttctccctagatccc

SEQ ID NO: 1125 - DNA, 21 bp, Artificial Sequence
  primer
tggcacttacactcccatttc

SEQ ID NO: 1126 - DNA, 21 bp, Artificial Sequence
  primer
tgagtacctgctgggtttgtg

SEQ ID NO: 1127 - DNA, 38 bp, Artificial Sequence
  primer
gtaaaacgacggccagttgccaccatttctcatctcag

SEQ ID NO: 1128 - DNA, 21 bp, Artificial Sequence
  primer
tgtggtgggttagaatagcca

SEQ ID NO: 1129 - DNA, 38 bp, Artificial Sequence
  primer
gtaaaacgacggccagtgatttctagaagccctgtggg

SEQ ID NO: 1130 - DNA, 38 bp, Artificial Sequence
  primer
gtaaaacgacggccagtgacaagatgtcctgtcaacgc

SEQ ID NO: 1131 - DNA, 38 bp, Artificial Sequence
  primer
gtaaaacgacggccagtgctacccttgggtcattgaag

SEQ ID NO: 1132 - DNA, 21 bp, Artificial Sequence
  primer
gcgaggatcagtgtgtacgtc

SEQ ID NO: 1133 - DNA, 38 bp, Artificial Sequence
  primer
gtaaaacgacggccagtaaggttggagaggagtttggc

SEQ ID NO: 1134 - DNA, 38 bp, Artificial Sequence
  primer
gtaaaacgacggccagtaactgattcacaacctgcgag

SEQ ID NO: 1135 - DNA, 22 bp, Artificial Sequence
  primer
cctgctgagagagaggaagatg

SEQ ID NO: 1136 - DNA, 21 bp, Artificial Sequence
  primer
ttagccgtgttgtggagtctg

SEQ ID NO: 1137 - DNA, 21 bp, Artificial Sequence
  primer
gtctagcaggtggtttccagg

SEQ ID NO: 1138 - DNA, 41 bp, Artificial Sequence
  primer
gtaaaacgacggccagtttgtatccacctgactcattcaaa

SEQ ID NO: 1139 - DNA, 38 bp, Artificial Sequence
  primer
gtaaaacgacggccagttgtgctcacaatttcacctcc

SEQ ID NO: 1140 - DNA, 38 bp, Artificial Sequence
  primer
gtaaaacgacggccagtttggctctgtatgtgtgaggg

SEQ ID NO: 1141 - DNA, 20 bp, Artificial Sequence
  primer
agcacaacctgatctcctgc

SEQ ID NO: 1142 - DNA, 39 bp, Artificial Sequence
  primer
gtaaaacgacggccagttcactaggactgcctcctgaac

SEQ ID NO: 1143 - DNA, 40 bp, Artificial Sequence
  primer
gtaaaacgacggccagtacctgaaactgtgtgaatcaatg

SEQ ID NO: 1144 - DNA, 39 bp, Artificial Sequence
  primer
gtaaaacgacggccagttcatccttacggagacatttgc

SEQ ID NO: 1145 - DNA, 37 bp, Artificial Sequence
  primer
gtaaaacgacggccagttcttggagcacgaggtcatc

SEQ ID NO: 1146 - DNA, 21 bp, Artificial Sequence
  primer
aagcaagctgatgaatgcaag

SEQ ID NO: 1147 - DNA, 21 bp, Artificial Sequence
  primer
gttcctttggaaagatggagg

SEQ ID NO: 1148 - DNA, 21 bp, Artificial Sequence
  primer
cacagttctcaactgcgatca

SEQ ID NO: 1149 - DNA, 21 bp, Artificial Sequence
  primer
caggaagagcagaaagctgag

SEQ ID NO: 1150 - DNA, 20 bp, Artificial Sequence
  primer
gatctgaggcctcctatgcc

SEQ ID NO: 1151 - DNA, 38 bp, Artificial Sequence; identical to SEQ ID NO: 1134
  primer

SEQ ID NO: 1152 - DNA, 38 bp, Artificial Sequence
  primer
gtaaaacgacggccagtcttggcctcatttctccagtc

SEQ ID NO: 1153 - DNA, 38 bp, Artificial Sequence
  primer
gtaaaacgacggccagtaggcagggactaaggtgacag

SEQ ID NO: 1154 - DNA, 21 bp, Artificial Sequence
  primer
ttactgctacatgcaccatcg

SEQ ID NO: 1155 - DNA, 41 bp, Artificial Sequence
  primer
gtaaaacgacggccagtttattgcacattattgacctccag

SEQ ID NO: 1156 - DNA, 39 bp, Artificial Sequence
  primer
gtaaaacgacggccagtaacaccacctaccatctcaatg

SEQ ID NO: 1157 - DNA, 21 bp, Artificial Sequence
  primer
cagtggaagggattcctgatt

SEQ ID NO: 1158 - DNA, 21 bp, Artificial Sequence
  primer
ttgtttggaaacccaaatgtt

SEQ ID NO: 1159 - DNA, 38 bp, Artificial Sequence
  primer
gtaaaacgacggccagttctggttgtcatgtttccctg

SEQ ID NO: 1160 - DNA, 38 bp, Artificial Sequence
  primer
gtaaaacgacggccagtaaatggttgggatgaaaggtc

SEQ ID NO: 1161 - DNA, 38 bp, Artificial Sequence
  primer
gtaaaacgacggccagtgtgtgaaagcagtgggatgtg

SEQ ID NO: 1162 - DNA, 38 bp, Artificial Sequence
  primer
gtaaaacgacggccagttcaccggaaaccattctgttc

SEQ ID NO: 1163 - DNA, 39 bp, Artificial Sequence
  primer
gtaaaacgacggccagtcccatgttctctgacatccttc

SEQ ID NO: 1164 - DNA, 20 bp, Artificial Sequence
  primer
gcatcaagttgagctccagg

SEQ ID NO: 1165 - DNA, 42 bp, Artificial Sequence
  primer
gtaaaacgacggccagtttctactagtggctttagggtctcc

SEQ ID NO: 1166 - DNA, 38 bp, Artificial Sequence
  primer
gtaaaacgacggccagtcctctatcccagaacctggag

SEQ ID NO: 1167 - DNA, 21 bp, Artificial Sequence
  primer
acctgtacagagaaggccacg

SEQ ID NO: 1168 - DNA, 21 bp, Artificial Sequence
  primer
gtctagctggctgtgcatgag

SEQ ID NO: 1169 - DNA, 40 bp, Artificial Sequence
  primer
gtaaaacgacggccagttcctgagcttcctcttctactcc

SEQ ID NO: 1170 - DNA, 21 bp, Artificial Sequence
  primer
gatgtctgcagcaaacctgag

SEQ ID NO: 1171 - DNA, 21 bp, Artificial Sequence
  primer
cctttagtcccaggcaaactg

SEQ ID NO: 1172 - DNA, 38 bp, Artificial Sequence
  primer
gtaaaacgacggccagttaggatccaggagacctgagc

SEQ ID NO: 1173 - DNA, 37 bp, Artificial Sequence
  primer
gtaaaacgacggccagtatgccagctgtggcaaatag

SEQ ID NO: 1174 - DNA, 21 bp, Artificial Sequence
  primer
tcctgttagcgtaggagccag

SEQ ID NO: 1175 - DNA, 38 bp, Artificial Sequence
  primer
gtaaaacgacggccagtagggctcattagggctcattc

SEQ ID NO: 1176 - DNA, 38 bp, Artificial Sequence
  primer
gtaaaacgacggccagtaagctccatttgtttcttccc

SEQ ID NO: 1177 - DNA, 37 bp, Artificial Sequence
  primer
gtaaaacgacggccagtgtcacagggtgacaagcaac

SEQ ID NO: 1178 - DNA, 38 bp, Artificial Sequence
  primer
gtaaaacgacggccagtcctgttgaaaggcaaggtgag

SEQ ID NO: 1179 - DNA, 39 bp, Artificial Sequence
  primer
gtaaaacgacggccagtggaggcttctctctccttgttc

SEQ ID NO: 1180 - DNA, 22 bp, Artificial Sequence
  primer
agtgactgtgacatctgcttgc

SEQ ID NO: 1181 - DNA, 38 bp, Artificial Sequence
  primer
gtaaaacgacggccagtggactccacttctccttgtgg

SEQ ID NO: 1182 - DNA, 38 bp, Artificial Sequence
  primer
gtaaaacgacggccagtaatgcatttgccattatgtcc

SEQ ID NO: 1183 - DNA, 39 bp, Artificial Sequence
  primer
gtaaaacgacggccagtcagaatccaacagattccttgc

SEQ ID NO: 1184 - DNA, 37 bp, Artificial Sequence
  primer
gtaaaacgacggccagtgccagaaaggaggaagatgg

SEQ ID NO: 1185 - DNA, 21 bp, Artificial Sequence
  primer
gaatgttctgtgaacgccaag

SEQ ID NO: 1186 - DNA, 21 bp, Artificial Sequence
  primer
tccttgtggtttgagtggttg

SEQ ID NO: 1187 - DNA, 38 bp, Artificial Sequence
  primer
gtaaaacgacggccagtgccattaggtagctgggacac

SEQ ID NO: 1188 - DNA, 38 bp, Artificial Sequence
  primer
gtaaaacgacggccagttgaatgcccaggctaaataac

SEQ ID NO: 1189 - DNA, 38 bp, Artificial Sequence
  primer
gtaaaacgacggccagtcagtcctatccaccatctccc

SEQ ID NO: 1190 - DNA, 21 bp, Artificial Sequence
  primer
gttgaagaggcccaaacattc

SEQ ID NO: 1191 - DNA, 38 bp, Artificial Sequence
  primer
gtaaaacgacggccagttgatgtgtgtagctgtggctc

SEQ ID NO: 1192 - DNA, 39 bp, Artificial Sequence
  primer
gtaaaacgacggccagttgagttcagagacaggcaggac

SEQ ID NO: 1193 - DNA, 37 bp, Artificial Sequence
  primer
gtaaaacgacggccagtcagcaggctctctggtgttc

SEQ ID NO: 1194 - DNA, 39 bp, Artificial Sequence
  primer
gtaaaacgacggccagtggagtcattcgtgattacagcc

SEQ ID NO: 1195 - DNA, 37 bp, Artificial Sequence
  primer
gtaaaacgacggccagtgggagagagaccgaaaggtg

SEQ ID NO: 1196 - DNA, 37 bp, Artificial Sequence
  primer
gtaaaacgacggccagtaggagagtcctggagatgcg

SEQ ID NO: 1197 - DNA, 38 bp, Artificial Sequence
  primer
gtaaaacgacggccagtctctcttcttccctggacctg

SEQ ID NO: 1198 - DNA, 38 bp, Artificial Sequence
  primer
gtaaaacgacggccagtgaggagtgaaacaggtctggg

SEQ ID NO: 1199 - DNA, 21 bp, Artificial Sequence
  primer
ccagaaactgcttcacttgcc

SEQ ID NO: 1200 - DNA, 35 bp, Artificial Sequence
  primer
gtaaaacgacggccagtcccaaagtccctcccagg

SEQ ID NO: 1201 - DNA, 38 bp, Artificial Sequence
  primer
gtaaaacgacggccagtctaagccatcttcctcaaggc

SEQ ID NO: 1202 - DNA, 21 bp, Artificial Sequence
  primer
tggcttcaggtacaaagaccc

SEQ ID NO: 1203 - DNA, 20 bp, Artificial Sequence
  primer
agagggctggacatattggg

SEQ ID NO: 1204 - DNA, 38 bp, Artificial Sequence
  primer
gtaaaacgacggccagtcccttgtgatccttcctcatc

SEQ ID NO: 1205 - DNA, 21 bp, Artificial Sequence
  primer
tccagttcctttcaaagtggg

SEQ ID NO: 1206 - DNA, 21 bp, Artificial Sequence
  primer
agaccctcctttctggagacc

SEQ ID NO: 1207 - DNA, 37 bp, Artificial Sequence
  primer
gtaaaacgacggccagtctcctcactcctagccagcc

SEQ ID NO: 1208 - DNA, 21 bp, Artificial Sequence
  primer
tcttgaggcagtactgggttg

SEQ ID NO: 1209 - DNA, 39 bp, Artificial Sequence
  primer
gtaaaacgacggccagttctacaggaaggtcagctggag

SEQ ID NO: 1210 - DNA, 21 bp, Artificial Sequence
  primer
gttaacaggcctctgtttgcc

SEQ ID NO: 1211 - DNA, 38 bp, Artificial Sequence
  primer
gtaaaacgacggccagtaatggatggaaggtaggaccc

SEQ ID NO: 1212 - DNA, 37 bp, Artificial Sequence
  primer
gtaaaacgacggccagtaccacaaccaccttcacctg

SEQ ID NO: 1213 - DNA, 38 bp, Artificial Sequence
  primer
gtaaaacgacggccagtgactttctctttgggcagtgg

SEQ ID NO: 1214 - DNA, 20 bp, Artificial Sequence
  primer
cccacatccctttcttcctc

SEQ ID NO: 1215 - DNA, 38 bp, Artificial Sequence
  primer
gtaaaacgacggccagtcagatcaatagcagcaccctg

SEQ ID NO: 1216 - DNA, 21 bp, Artificial Sequence
  primer
gaaggcaaagtgcacatgaag

SEQ ID NO: 1217 - DNA, 38 bp, Artificial Sequence
  primer
gtaaaacgacggccagtcccaaataacagtggacaggc

SEQ ID NO: 1218 - DNA, 37 bp, Artificial Sequence
  primer
gtaaaacgacggccagtacactcactctgtggctccg

SEQ ID NO: 1219 - DNA, 21 bp, Artificial Sequence
  primer
ttcatgcttgtccattgaacc

SEQ ID NO: 1220 - DNA, 21 bp, Artificial Sequence
  primer
caggtttctccctgacactcc

SEQ ID NO: 1221 - DNA, 38 bp, Artificial Sequence
  primer
gtaaaacgacggccagtagaaggtgcaggtgacagagg

SEQ ID NO: 1222 - DNA, 21 bp, Artificial Sequence
  primer
caacccgtgtctctgattctg

SEQ ID NO: 1223 - DNA, 39 bp, Artificial Sequence; identical to SEQ ID NO: 1192
  primer

SEQ ID NO: 1224 - DNA, 21 bp, Artificial Sequence
  primer
cacctttcatggtcacagtgc

SEQ ID NO: 1225 - DNA, 38 bp, Artificial Sequence; identical to SEQ ID NO: 1211
  primer

SEQ ID NO: 1226 - DNA, 35 bp, Artificial Sequence
  primer
gtaaaacgacggccagtcttgaggtccaggagcgg

SEQ ID NO: 1227 - DNA, 38 bp, Artificial Sequence
  primer
gtaaaacgacggccagtaaacccatggaggtaggagtc

SEQ ID NO: 1228 - DNA, 39 bp, Artificial Sequence
  primer
gtaaaacgacggccagttgccctgtcttaaatgcatacc

SEQ ID NO: 1229 - DNA, 22 bp, Artificial Sequence
  primer
gggtgacagagcaagcaatatc

SEQ ID NO: 1230 - DNA, 21 bp, Artificial Sequence
  primer
tcttcctacctctcgctttgc

SEQ ID NO: 1231 - DNA, 38 bp, Artificial Sequence
  primer
gtaaaacgacggccagtgtgcttggctttctgctttag

SEQ ID NO: 1232 - DNA, 38 bp, Artificial Sequence
  primer
gtaaaacgacggccagtgtagggaaccatgtgatgcag

SEQ ID NO: 1233 - DNA, 35 bp, Artificial Sequence
  primer
gtaaaacgacggccagtccacctcagctcccaaag

SEQ ID NO: 1234 - DNA, 41 bp, Artificial Sequence
  primer
gtaaaacgacggccagtaatatcatatgctgatgtgaaccg

SEQ ID NO: 1235 - DNA, 21 bp, Artificial Sequence
  primer
ttgtggaagtctggagctgtg

SEQ ID NO: 1236 - DNA, 43 bp, Artificial Sequence
  primer
gtaaaacgacggccagttttatgtggaccattatgttatttcc

SEQ ID NO: 1237 - DNA, 21 bp, Artificial Sequence
  primer
cgtgccctgactgtgtatttg

SEQ ID NO: 1238 - DNA, 38 bp, Artificial Sequence
  primer
gtaaaacgacggccagtgcatttgaatgaacatcccag

SEQ ID NO: 1239 - DNA, 38 bp, Artificial Sequence
  primer
gtaaaacgacggccagtaggacctagccggctttattg

SEQ ID NO: 1240 - DNA, 21 bp, Artificial Sequence
  primer
tgtcaactaggattccggacc

SEQ ID NO: 1241 - DNA, 22 bp, Artificial Sequence
  primer
cagagtgcattgtcatctttgg

SEQ ID NO: 1242 - DNA, 38 bp, Artificial Sequence
  primer
gtaaaacgacggccagtctcctggccttaagttgatcc

SEQ ID NO: 1243 - DNA, 21 bp, Artificial Sequence
  primer
tttcgggaactgaaagttgtg

SEQ ID NO: 1244 - DNA, 42 bp, Artificial Sequence
  primer
gtaaaacgacggccagtcatctttataaactacctggcttgc

SEQ ID NO: 1245 - DNA, 38 bp, Artificial Sequence
  primer
gtaaaacgacggccagtttctttaccactgacatcggc

SEQ ID NO: 1246 - DNA, 25 bp, Artificial Sequence
  primer
gcagtccctggtactacaataagtc

SEQ ID NO: 1247 - DNA, 21 bp, Artificial Sequence
  primer
cgtgtgctgtttggtggatac

SEQ ID NO: 1248 - DNA, 21 bp, Artificial Sequence
  primer
aactttggtgccctactccac

SEQ ID NO: 1249 - DNA, 38 bp, Artificial Sequence
  primer
gtaaaacgacggccagtgtaagtggcagaaggagccag

SEQ ID NO: 1250 - DNA, 39 bp, Artificial Sequence
  primer
gtaaaacgacggccagttctcctgcttctctccttaacc

SEQ ID NO: 1251 - DNA, 25 bp, Artificial Sequence
  primer
tgaggttgggaaactcttagactac

SEQ ID NO: 1252 - DNA, 22 bp, Artificial Sequence
  primer
tgtaaacaggcatttgtaacgc

SEQ ID NO: 1253 - DNA, 23 bp, Artificial Sequence
  primer
gaggtaattcagcctcatgtgtg

SEQ ID NO: 1254 - DNA, 21 bp, Artificial Sequence
  primer
agctttaagcaatttggaggg

SEQ ID NO: 1255 - DNA, 38 bp, Artificial Sequence
  primer
gtaaaacgacggccagtcacccaaacagattctctccc

SEQ ID NO: 1256 - DNA, 21 bp, Artificial Sequence
  primer
cagaagtgcattgtttcaggg

SEQ ID NO: 1257 - DNA, 21 bp, Artificial Sequence
  primer
ggtgaatgctaactctgctcg

SEQ ID NO: 1258 - DNA, 45 bp, Artificial Sequence
  primer
gtaaaacgacggccagttgagcttatggttaagtactgtttagga

SEQ ID NO: 1259 - DNA, 38 bp, Artificial Sequence
  primer
gtaaaacgacggccagttgtttcatcagttccgtttgc

SEQ ID NO: 1260 - DNA, 22 bp, Artificial Sequence
  primer
aacagtgtccattaaacacggg

SEQ ID NO: 1261 - DNA, 21 bp, Artificial Sequence
  primer
gagacttgtgtgagtggtggc

SEQ ID NO: 1262 - DNA, 22 bp, Artificial Sequence
  primer
gagtggagctgcctactctttc

SEQ ID NO: 1263 - DNA, 38 bp, Artificial Sequence
  primer
gtaaaacgacggccagtggccctgccttatcctttatc

SEQ ID NO: 1264 - DNA, 38 bp, Artificial Sequence
  primer
gtaaaacgacggccagttaacatttggcccatcctagc

SEQ ID NO: 1265 - DNA, 38 bp, Artificial Sequence
  primer
gtaaaacgacggccagtcttgtttggaggtggaggaac

SEQ ID NO: 1266 - DNA, 38 bp, Artificial Sequence
  primer
gtaaaacgacggccagttgaagttgcagccttcctagc

SEQ ID NO: 1267 - DNA, 21 bp, Artificial Sequence
  primer
tttgctacgtgagtgtacgcc

SEQ ID NO: 1268 - DNA, 21 bp, Artificial Sequence
  primer
aaacaggtaagtggcctgctg

SEQ ID NO: 1269 - DNA, 21 bp, Artificial Sequence
  primer
agattccattgtggaaggtgg

SEQ ID NO: 1270 - DNA, 38 bp, Artificial Sequence
  primer
gtaaaacgacggccagtaatgtttggcttctgtcatgc

SEQ ID NO: 1271 - DNA, 38 bp, Artificial Sequence
  primer
gtaaaacgacggccagtggaattgacagaaggagctgg

SEQ ID NO: 1272 - DNA, 38 bp, Artificial Sequence
  primer
gtaaaacgacggccagtgggagcttaactcgtctcctg

SEQ ID NO: 1273 - DNA, 20 bp, Artificial Sequence
  primer
gggagagcaaatgtcagtgg

SEQ ID NO: 1274 - DNA, 38 bp, Artificial Sequence
  primer
gtaaaacgacggccagtgattctgttgctctgcaggtg

SEQ ID NO: 1275 - DNA, 37 bp, Artificial Sequence
  primer
gtaaaacgacggccagtctgcccttgagctgagaatg

SEQ ID NO: 1276 - DNA, 37 bp, Artificial Sequence
  primer
gtaaaacgacggccagtctttgggagtggatgtgctg

SEQ ID NO: 1277 - DNA, 27 bp, Artificial Sequence
  primer
ttgatcagactgtttaaagacaacatc

SEQ ID NO: 1278 - DNA, 21 bp, Artificial Sequence
  primer
tcagtcctgcacattgtctcc

SEQ ID NO: 1279 - DNA, 20 bp, Artificial Sequence
  primer
tgccctccatcatctgattc

SEQ ID NO: 1280 - DNA, 38 bp, Artificial Sequence
  primer
gtaaaacgacggccagtaaggaagttctccagcattgg

SEQ ID NO: 1281 - DNA, 38 bp, Artificial Sequence
  primer
gtaaaacgacggccagttttctctgtgacaaagcctgc

SEQ ID NO: 1282 - DNA, 21 bp, Artificial Sequence
  primer
gaggctaaaccagcattgtcc

SEQ ID NO: 1283 - DNA, 21 bp, Artificial Sequence
  primer
ccatcagggtttggagtcttc

SEQ ID NO: 1284 - DNA, 39 bp, Artificial Sequence
  primer
gtaaaacgacggccagtccttcattccagatgagacagg

SEQ ID NO: 1285 - DNA, 21 bp, Artificial Sequence
  primer
acagagcaagactccgtctca

SEQ ID NO: 1286 - DNA, 38 bp, Artificial Sequence
  primer
gtaaaacgacggccagtgcagggctagttgaattgtcc

SEQ ID NO: 1287 - DNA, 35 bp, Artificial Sequence
  primer
gtaaaacgacggccagttcttctccggcaggatcg

SEQ ID NO: 1288 - DNA, 38 bp, Artificial Sequence
  primer
gtaaaacgacggccagttcaccacgatggtaatgatgc

SEQ ID NO: 1289 - DNA, 39 bp, Artificial Sequence
  primer
gtaaaacgacggccagtcactgacccaagatcagaaacc

SEQ ID NO: 1290 - DNA, 21 bp, Artificial Sequence
  primer
aacagagcgaaaccctgtctc

SEQ ID NO: 1291 - DNA, 21 bp, Artificial Sequence
  primer
aaatgccctgcagacattagg

SEQ ID NO: 1292 - DNA, 21 bp, Artificial Sequence
  primer
aaacaaccctttaatgcctgg

SEQ ID NO: 1293 - DNA, 38 bp, Artificial Sequence
  primer
gtaaaacgacggccagtgatcctccacatctggactgg

SEQ ID NO: 1294 - DNA, 21 bp, Artificial Sequence
  primer
gactttactcacccacctcgc

SEQ ID NO: 1295 - DNA, 38 bp, Artificial Sequence
  primer
gtaaaacgacggccagttaccctaaccgtctgggaatg

SEQ ID NO: 1296 - DNA, 38 bp, Artificial Sequence
  primer
gtaaaacgacggccagttgagatgaatgggatttgctg

SEQ ID NO: 1297 - DNA, 20 bp, Artificial Sequence
  primer
actgggagtgggatctacgg

SEQ ID NO: 1298 - DNA, 38 bp, Artificial Sequence
  primer
gtaaaacgacggccagttggtagacaggaagctgttgc

SEQ ID NO: 1299 - DNA, 21 bp, Artificial Sequence
  primer
gagagatttcttcctgcagcc

SEQ ID NO: 1300 - DNA, 38 bp, Artificial Sequence
  primer
gtaaaacgacggccagtagagcaggaaagctcagctcc

SEQ ID NO: 1301 - DNA, 21 bp, Artificial Sequence
  primer
cattctctccacctctcaccc

SEQ ID NO: 1302 - DNA, 21 bp, Artificial Sequence
  primer
agctgtacctcaccctgatgg

SEQ ID NO: 1303 - DNA, 20 bp, Artificial Sequence
  primer
agtgatccacatgctttggc

SEQ ID NO: 1304 - DNA, 38 bp, Artificial Sequence
  primer
gtaaaacgacggccagtagagcggttaaggccacatag

SEQ ID NO: 1305 - DNA, 21 bp, Artificial Sequence
  primer
ggtaccatatgggaagaaggg

SEQ ID NO: 1306 - DNA, 20 bp, Artificial Sequence
  primer
gagaaccagtgaggtctgcg

SEQ ID NO: 1307 - DNA, 36 bp, Artificial Sequence
  primer
gtaaaacgacggccagtgggtagcgggagagacctg

SEQ ID NO: 1308 - DNA, 19 bp, Artificial Sequence
  primer
gggctctctgtgcttctgg

SEQ ID NO: 1309 - DNA, 21 bp, Artificial Sequence
  primer
ttcctctactccctgagcctg

SEQ ID NO: 1310 - DNA, 38 bp, Artificial Sequence
  primer
gtaaaacgacggccagtctcagactgtcccattcctgc

SEQ ID NO: 1311 - DNA, 38 bp, Artificial Sequence
  primer
gtaaaacgacggccagtctgaagctgatagaggtgggc

SEQ ID NO: 1312 - DNA, 38 bp, Artificial Sequence
  primer
gtaaaacgacggccagtgacagatctcgggtacagcag

SEQ ID NO: 1313 - DNA, 18 bp, Artificial Sequence
  primer
cgctccaggatcagcatc

SEQ ID NO: 1314 - DNA, 21 bp, Artificial Sequence
  primer
actgcttcagggacctgtttc

SEQ ID NO: 1315 - DNA, 20 bp, Artificial Sequence
  primer
aaacctcagcgcagacacac

SEQ ID NO: 1316 - DNA, 36 bp, Artificial Sequence
  primer
gtaaaacgacggccagtgagctgcaagggacagagg

SEQ ID NO: 1317 - DNA, 20 bp, Artificial Sequence
  primer
gtgtcaccctcaccatggac

SEQ ID NO: 1318 - DNA, 21 bp, Artificial Sequence
  primer
gggctcagcacatagtaaggc

SEQ ID NO: 1319 - DNA, 22 bp, Artificial Sequence
  primer
tctctgccacatacttgcacac

SEQ ID NO: 1320 - DNA, 39 bp, Artificial Sequence
  primer
gtaaaacgacggccagtcaagtgtggaatatcacaaccc

SEQ ID NO: 1321 - DNA, 21 bp, Artificial Sequence
  primer
aggatgtgaccactgggtttc

SEQ ID NO: 1322 - DNA, 38 bp, Artificial Sequence
  primer
gtaaaacgacggccagttaataatgatggccgtggtcc

SEQ ID NO: 1323 - DNA, 38 bp, Artificial Sequence
  primer
gtaaaacgacggccagttaacaggtggcatctggtgtg

SEQ ID NO: 1324 - DNA, 38 bp, Artificial Sequence
  primer
gtaaaacgacggccagtcaaggcttgtcccactctagg

SEQ ID NO: 1325 - DNA, 38 bp, Artificial Sequence
  primer
gtaaaacgacggccagtattgacactcaggccttcctc

SEQ ID NO: 1326 - DNA, 38 bp, Artificial Sequence
  primer
gtaaaacgacggccagtagtgccacagggctagagttc

SEQ ID NO: 1327 - DNA, 38 bp, Artificial Sequence
  primer
gtaaaacgacggccagtcatttcccttccagtgctgag

SEQ ID NO: 1328 - DNA, 21 bp, Artificial Sequence
  primer
ggtaacaccaattacctgccc

SEQ ID NO: 1329 - DNA, 20 bp, Artificial Sequence
  primer
tcccagcatggtcctctaag

SEQ ID NO: 1330 - DNA, 37 bp, Artificial Sequence
  primer
gtaaaacgacggccagtagaaggccagtctcccactc

SEQ ID NO: 1331 - DNA, 37 bp, Artificial Sequence
  primer
gtaaaacgacggccagttgggtgcatctgtctgtctg

SEQ ID NO: 1332 - DNA, 37 bp, Artificial Sequence
  primer
gtaaaacgacggccagttgtgggagggacagagattg

SEQ ID NO: 1333 - DNA, 38 bp, Artificial Sequence
  primer
gtaaaacgacggccagtgtaaaggcatgctcatgttgg

SEQ ID NO: 1334 - DNA, 21 bp, Artificial Sequence
  primer
tttctaccaactgcacctccc

SEQ ID NO: 1335 - DNA, 38 bp, Artificial Sequence
  primer
gtaaaacgacggccagttgggcatagctacccagagac

SEQ ID NO: 1336 - DNA, 38 bp, Artificial Sequence
  primer
gtaaaacgacggccagtggcaaagaagtggatagagcc

SEQ ID NO: 1337 - DNA, 21 bp, Artificial Sequence
  primer
gagaggttgggtgagttgtcc

SEQ ID NO: 1338 - DNA, 38 bp, Artificial Sequence
  primer
gtaaaacgacggccagttccacaattgagggatgtgac

SEQ ID NO: 1339 - DNA, 21 bp, Artificial Sequence
  primer
tgaatgtgtgtctgtctgccc

SEQ ID NO: 1340 - DNA, 21 bp, Artificial Sequence
  primer
gcctttgattaaatggcttcc

SEQ ID NO: 1341 - DNA, 36 bp, Artificial Sequence
  primer
gtaaaacgacggccagtctcagccaggtgtgactgg

SEQ ID NO: 1342 - DNA, 38 bp, Artificial Sequence
  primer
gtaaaacgacggccagtcagacccatgaatgactccag

SEQ ID NO: 1343 - DNA, 21 bp, Artificial Sequence
  primer
aagtctgggcaacagtgagac

SEQ ID NO: 1344 - DNA, 21 bp, Artificial Sequence
  primer
tgaggcctagagaggtaaggc

SEQ ID NO: 1345 - DNA, 37 bp, Artificial Sequence
  primer
gtaaaacgacggccagtccctctgcaggtagggagac

SEQ ID NO: 1346 - DNA, 20 bp, Artificial Sequence
  primer
ggtgacgtgtgcatgagttg

SEQ ID NO: 1347 - DNA, 39 bp, Artificial Sequence
  primer
gtaaaacgacggccagtgccttaagaagagccattctgg

SEQ ID NO: 1348 - DNA, 37 bp, Artificial Sequence
  primer
gtaaaacgacggccagtcaaggaggagtgtgtctggg

SEQ ID NO: 1349 - DNA, 20 bp, Artificial Sequence
  primer
aggaaacaagcccaaacctg

SEQ ID NO: 1350 - DNA, 39 bp, Artificial Sequence
  primer
gtaaaacgacggccagtcgttcgaaggtgagttgtaagg

SEQ ID NO: 1351 - DNA, 38 bp, Artificial Sequence
  primer
gtaaaacgacggccagtcaactcagtctgctctcgctc

SEQ ID NO: 1352 - DNA, 21 bp, Artificial Sequence
  primer
gacacacacccacctatttgc

SEQ ID NO: 1353 - DNA, 38 bp, Artificial Sequence
  primer
gtaaaacgacggccagtgaacctgttcagtcctgtggg

SEQ ID NO: 1354 - DNA, 38 bp, Artificial Sequence
  primer
gtaaaacgacggccagtcacagtgacaggacattctgg

SEQ ID NO: 1355 - DNA, 21 bp, Artificial Sequence
  primer
tttgcaagtggattcttgctc

SEQ ID NO: 1356 - DNA, 38 bp, Artificial Sequence
  primer
gtaaaacgacggccagtaaagcttcaagttgctttggc

SEQ ID NO: 1357 - DNA, 24 bp, Artificial Sequence
  primer
tgccacaaatgttaatgtgttagc

SEQ ID NO: 1358 - DNA, 25 bp, Artificial Sequence
  primer
cgatgtctttcaatatattcttccc

SEQ ID NO: 1359 - DNA, 21 bp, Artificial Sequence
  primer
cctcccatctatcatgtacgg

SEQ ID NO: 1360 - DNA, 38 bp, Artificial Sequence
  primer
gtaaaacgacggccagtttcagaaagggatggaaggag

SEQ ID NO: 1361 - DNA, 29 bp, Artificial Sequence
  primer
gaatttccatacatgagattagttactgc

SEQ ID NO: 1362 - DNA, 26 bp, Artificial Sequence
  primer
tttatggatttacctggtttgtattg

SEQ ID NO: 1363 - DNA, 26 bp, Artificial Sequence
  primer
actgtagtggctgatttaagaagatg

SEQ ID NO: 1364 - DNA, 23 bp, Artificial Sequence
  primer
gaaccctaataccgttgacttcc

SEQ ID NO: 1365 - DNA, 38 bp, Artificial Sequence
  primer
gtaaaacgacggccagttgtccattacatggttctgcc

SEQ ID NO: 1366 - DNA, 43 bp, Artificial Sequence
  primer
gtaaaacgacggccagttgacatttaatactctttgtccttcc

SEQ ID NO: 1367 - DNA, 39 bp, Artificial Sequence
  primer
gtaaaacgacggccagtacaatggacatactggcatagc

SEQ ID NO: 1368 - DNA, 21 bp, Artificial Sequence
  primer
ctgaattcccagttggtcttg

SEQ ID NO: 1369 - DNA, 20 bp, Artificial Sequence
  primer
caagaggcatgtgaatgagg

SEQ ID NO: 1370 - DNA, 20 bp, Artificial Sequence
  primer
tcctgaccttgtgatccacc

SEQ ID NO: 1371 - DNA, 25 bp, Artificial Sequence
  primer
gctgtttagaataccttactgctgg

SEQ ID NO: 1372 - DNA, 38 bp, Artificial Sequence
  primer
gtaaaacgacggccagtaaccatttgggaaatgtgctc

SEQ ID NO: 1373 - DNA, 24 bp, Artificial Sequence
  primer
ctaatccctttaatttaggtggca

SEQ ID NO: 1374 - DNA, 18 bp, Artificial Sequence
  primer
cccaggtggcagaggttg

SEQ ID NO: 1375 - DNA, 39 bp, Artificial Sequence
  primer
gtaaaacgacggccagttgttggccagtagacagtttcc

SEQ ID NO: 1376 - DNA, 41 bp, Artificial Sequence
  primer
gtaaaacgacggccagtggatgatttgcccttagttatttg

SEQ ID NO: 1377 - DNA, 37 bp, Artificial Sequence
  primer
gtaaaacgacggccagtatctgacgcatgctgactgg

SEQ ID NO: 1378 - DNA, 38 bp, Artificial Sequence
  primer
gtaaaacgacggccagtgagcgcttgagattggtaaag

SEQ ID NO: 1379 - DNA, 25 bp, Artificial Sequence
  primer
cagaaagaaataaggtttgccctac

SEQ ID NO: 1380 - DNA, 38 bp, Artificial Sequence
  primer
gtaaaacgacggccagtttccttcaaccgtctaaatgc

SEQ ID NO: 1381 - DNA, 23 bp, Artificial Sequence
  primer
atgacactaagatgcccattagc

SEQ ID NO: 1382 - DNA, 43 bp, Artificial Sequence
  primer
gtaaaacgacggccagttgcttaggatgaacatgcttatacac

SEQ ID NO: 1383 - DNA, 25 bp, Artificial Sequence
  primer
caacacattatgttcagcctctacc

SEQ ID NO: 1384 - DNA, 21 bp, Artificial Sequence
  primer
catgccatcagtttgtcactg

SEQ ID NO: 1385 - DNA, 21 bp, Artificial Sequence
  primer
ggactcactctccattccagc

SEQ ID NO: 1386 - DNA, 21 bp, Artificial Sequence
  primer
atcgcatgacattctccttgg

SEQ ID NO: 1387 - DNA, 23 bp, Artificial Sequence
  primer
aactgccacatagtttggttcag

SEQ ID NO: 1388 - DNA, 36 bp, Artificial Sequence
  primer
gtaaaacgacggccagtcaggtgtgagccattgtgc

SEQ ID NO: 1389 - DNA, 21 bp, Artificial Sequence
  primer
tgggtctcctgaatttcaacc

SEQ ID NO: 1390 - DNA, 37 bp, Artificial Sequence
  primer
gtaaaacgacggccagtcactgctctgggcactgttc

SEQ ID NO: 1391 - DNA, 39 bp, Artificial Sequence
  primer
gtaaaacgacggccagtaagtccttgcaccagcactaag

SEQ ID NO: 1392 - DNA, 21 bp, Artificial Sequence
  primer
atgctcacaagggattcagtg

SEQ ID NO: 1393 - DNA, 23 bp, Artificial Sequence
  primer
tcaccaagataaacaaatgtccc

SEQ ID NO: 1394 - DNA, 38 bp, Artificial Sequence
  primer
gtaaaacgacggccagtggtcagagcaacaatccttcc

SEQ ID NO: 1395 - DNA, 38 bp, Artificial Sequence
  primer
gtaaaacgacggccagtatggagcccacaaagtctacc

SEQ ID NO: 1396 - DNA, 38 bp, Artificial Sequence
  primer
gtaaaacgacggccagttgctaccttcgtcaacagtgc

SEQ ID NO: 1397 - DNA, 21 bp, Artificial Sequence
  primer
ctctgtggcccacctctactc

SEQ ID NO: 1398 - DNA, 20 bp, Artificial Sequence
  primer
actgggagaccctgaccatc

SEQ ID NO: 1399 - DNA, 38 bp, Artificial Sequence
  primer
gtaaaacgacggccagtgaagagcctcgcctttctctc

SEQ ID NO: 1400 - DNA, 20 bp, Artificial Sequence
  primer
gaagccttcactattgcccg

SEQ ID NO: 1401 - DNA, 38 bp, Artificial Sequence
  primer
gtaaaacgacggccagtgggaagagttcagcttgttgg

SEQ ID NO: 1402 - DNA, 38 bp, Artificial Sequence
  primer
gtaaaacgacggccagtaagagatcaagaatggcctgc

SEQ ID NO: 1403 - DNA, 36 bp, Artificial Sequence
  primer
gtaaaacgacggccagtgatgtgagcgtgtggatgc

SEQ ID NO: 1404 - DNA, 21 bp, Artificial Sequence
  primer
ctccaccgtatctcttctggg

SEQ ID NO: 1405 - DNA, 36 bp, Artificial Sequence
  primer
gtaaaacgacggccagtgggaagtagcagctgtggg

SEQ ID NO: 1406 - DNA, 20 bp, Artificial Sequence
  primer
ctgtggtaggtgccctgtct

SEQ ID NO: 1407 - DNA, 38 bp, Artificial Sequence
  primer
gtaaaacgacggccagtaatcattcccggtagatgcag

SEQ ID NO: 1408 - DNA, 21 bp, Artificial Sequence
  primer
aagcgtttaaagcaatctggc

SEQ ID NO: 1409 - DNA, 21 bp, Artificial Sequence
  primer
aagcctcggactttcatcatc

SEQ ID NO: 1410 - DNA, 21 bp, Artificial Sequence
  primer
atcaatatggatgggaggctg

SEQ ID NO: 1411 - DNA, 25 bp, Artificial Sequence
  primer
tgcatttattggttaagatgcatag

SEQ ID NO: 1412 - DNA, 18 bp, Artificial Sequence
  primer
cacccagcccaaacactg

SEQ ID NO: 1413 - DNA, 23 bp, Artificial Sequence
  primer
tcagaaatttgactgaaagatcc

SEQ ID NO: 1414 - DNA, 41 bp, Artificial Sequence
  primer
gtaaaacgacggccagtcattaaactttgcttcaggtctgg

SEQ ID NO: 1415 - DNA, 21 bp, Artificial Sequence
  primer
agccaaacttgttctcaaccc

SEQ ID NO: 1416 - DNA, 39 bp, Artificial Sequence
  primer
gtaaaacgacggccagtcgccaggtaacaaatatcatcc

SEQ ID NO: 1417 - DNA, 40 bp, Artificial Sequence
  primer
gtaaaacgacggccagttgtcaggaatcacttgtctaggg

SEQ ID NO: 1418 - DNA, 39 bp, Artificial Sequence
  primer
gtaaaacgacggccagtagcaatgcaactcatattgtcc

SEQ ID NO: 1419 - DNA, 27 bp, Artificial Sequence
  primer
gggtatcaatttgaatgataaacctac

SEQ ID NO: 1420 - DNA, 37 bp, Artificial Sequence
  primer
gtaaaacgacggccagtctgcgtgcagtaaggtagcc

SEQ ID NO: 1421 - DNA, 23 bp, Artificial Sequence
  primer
tgcctagtaagagtcaggtggac

SEQ ID NO: 1422 - DNA, 22 bp, Artificial Sequence
  primer
tgtggttccagaactcacttcc

SEQ ID NO: 1423 - DNA, 21 bp, Artificial Sequence
  primer
cctttgacctgcctaggattc

SEQ ID NO: 1424 - DNA, 21 bp, Artificial Sequence
  primer
atttgcaggatgaggttccag

SEQ ID NO: 1425 - DNA, 21 bp, Artificial Sequence
  primer
ttgtaggatttgggacacagg

SEQ ID NO: 1426 - DNA, 43 bp, Artificial Sequence
  primer
gtaaaacgacggccagttttctatgtatttgagctaggtggtg

SEQ ID NO: 1427 - DNA, 26 bp, Artificial Sequence
  primer
tcagtagacattgtgtaagctgttcc

SEQ ID NO: 1428 - DNA, 21 bp, Artificial Sequence
  primer
cccagtagggcaatttctttc

SEQ ID NO: 1429 - DNA, 38 bp, Artificial Sequence
  primer
gtaaaacgacggccagtagactgtggcttgagatgcac

SEQ ID NO: 1430 - DNA, 21 bp, Artificial Sequence
  primer
aaacagaaatcacgggcactc

SEQ ID NO: 1431 - DNA, 38 bp, Artificial Sequence
  primer
gtaaaacgacggccagttctgccaggtggaacacctac

SEQ ID NO: 1432 - DNA, 39 bp, Artificial Sequence
  primer
gtaaaacgacggccagtcagtcgccctttcttagatttg

SEQ ID NO: 1433 - DNA, 21 bp, Artificial Sequence
  primer
tggaaacctcttccttcatcc

SEQ ID NO: 1434 - DNA, 39 bp, Artificial Sequence
  primer
gtaaaacgacggccagtacaatggtctcacaacaggaaa

SEQ ID NO: 1435 - DNA, 21 bp, Artificial Sequence
  primer
tgccaacacttaccgtttgtc

SEQ ID NO: 1436 - DNA, 24 bp, Artificial Sequence
  primer
aaggtcccttcacaatacctcttc

SEQ ID NO: 1437 - DNA, 19 bp, Artificial Sequence
  primer
ggctgcggaaagagttcac

SEQ ID NO: 1438 - DNA, 24 bp, Artificial Sequence
  primer
ttggaggacgtctaactaaacctg

SEQ ID NO: 1439 - DNA, 37 bp, Artificial Sequence
  primer
gtaaaacgacggccagtggctaccttgtgccacattc

SEQ ID NO: 1440 - DNA, 21 bp, Artificial Sequence
  primer
ccctttgttcaggatgacagc

SEQ ID NO: 1441 - DNA, 20 bp, Artificial Sequence
  primer
tggccagtactttccattgc

SEQ ID NO: 1442 - DNA, 41 bp, Artificial Sequence
  primer
gtaaaacgacggccagtttctgatttgtgggatgcttatag

SEQ ID NO: 1443 - DNA, 37 bp, Artificial Sequence
  primer
gtaaaacgacggccagtcccgcaccttcctctctatc

SEQ ID NO: 1444 - DNA, 38 bp, Artificial Sequence
  primer
gtaaaacgacggccagtgtctgttcccagcctaccatc

SEQ ID NO: 1445 - DNA, 38 bp, Artificial Sequence
  primer
gtaaaacgacggccagtaggcagggactcaggaagaag

SEQ ID NO: 1446 - DNA, 38 bp, Artificial Sequence
  primer
gtaaaacgacggccagtatcagagtcagagtgggctgg

SEQ ID NO: 1447 - DNA, 21 bp, Artificial Sequence
  primer
gttccctcttcccatagggtc

SEQ ID NO: 1448 - DNA, 21 bp, Artificial Sequence
  primer
tgagagggaacaggagtcagg

SEQ ID NO: 1449 - DNA, 38 bp, Artificial Sequence
  primer
gtaaaacgacggccagtgaaagggtcagactgaggcag

SEQ ID NO: 1450 - DNA, 21 bp, Artificial Sequence
  primer
catttgaatggccttggtttc

SEQ ID NO: 1451 - DNA, 38 bp, Artificial Sequence
  primer
gtaaaacgacggccagtgctccctgtcttagggttgtg

SEQ ID NO: 1452 - DNA, 38 bp, Artificial Sequence
  primer
gtaaaacgacggccagtacatgctgtccctctctgtcc

SEQ ID NO: 1453 - DNA, 38 bp, Artificial Sequence
  primer
gtaaaacgacggccagtccatgtactcgtgggtgtgag

SEQ ID NO: 1454 - DNA, 21 bp, Artificial Sequence
  primer
ataatccacaggtggtggctc

SEQ ID NO: 1455 - DNA, 20 bp, Artificial Sequence
  primer
gggacggtgtggtagaatcc

SEQ ID NO: 1456 - DNA, 20 bp, Artificial Sequence
  primer
gttcccacctctcctccttg

SEQ ID NO: 1457 - DNA, 38 bp, Artificial Sequence
  primer
gtaaaacgacggccagttctccatctcctgaccttgtg

SEQ ID NO: 1458 - DNA, 21 bp, Artificial Sequence
  primer
gaatattcctctctgcctggg

SEQ ID NO: 1459 - DNA, 21 bp, Artificial Sequence
  primer
tcacctctgtgcagagaaacc

SEQ ID NO: 1460 - DNA, 38 bp, Artificial Sequence
  primer
gtaaaacgacggccagtagtatgggtgggaggagaagc

SEQ ID NO: 1461 - DNA, 21 bp, Artificial Sequence
  primer
gcctgaggaggagaaagaacc

SEQ ID NO: 1462 - DNA, 21 bp, Artificial Sequence
  primer
tctggttccctcttcccatag

SEQ ID NO: 1463 - DNA, 41 bp, Artificial Sequence
  primer
gtaaaacgacggccagttttcatgtatgcaaattagttccc

SEQ ID NO: 1464 - DNA, 39 bp, Artificial Sequence
  primer
gtaaaacgacggccagtttgcctaaataacagtgttcgg

SEQ ID NO: 1465 - DNA, 37 bp, Artificial Sequence
  primer
gtaaaacgacggccagttttggtgtactcggcagtcc

SEQ ID NO: 1466 - DNA, 38 bp, Artificial Sequence
  primer
gtaaaacgacggccagtgatggttgtgaagtgcaggtg

SEQ ID NO: 1467 - DNA, 25 bp, Artificial Sequence
  primer
tctatttcctgtagcattcatcctc

SEQ ID NO: 1468 - DNA, 38 bp, Artificial Sequence
  primer
gtaaaacgacggccagtagaccagattcctaaggctgc

SEQ ID NO: 1469 - DNA, 40 bp, Artificial Sequence
  primer
gtaaaacgacggccagtgccctgaacttaagtgatgaaag

SEQ ID NO: 1470 - DNA, 21 bp, Artificial Sequence
  primer
cctggtagaccctcaccagac

SEQ ID NO: 1471 - DNA, 27 bp, Artificial Sequence
  primer
aatatgagcattgataatgagccttac

SEQ ID NO: 1472 - DNA, 38 bp, Artificial Sequence
  primer
gtaaaacgacggccagtagattgctcccaagagagctt

SEQ ID NO: 1473 - DNA, 22 bp, Artificial Sequence
  primer
cagaggtgagccatgaaagact

SEQ ID NO: 1474 - DNA, 38 bp, Artificial Sequence
  primer
gtaaaacgacggccagttcagaatgcttgctggaagac

SEQ ID NO: 1475 - DNA, 39 bp, Artificial Sequence
  primer
gtaaaacgacggccagtcacattgatatctgttggtggc

SEQ ID NO: 1476 - DNA, 38 bp, Artificial Sequence
  primer
gtaaaacgacggccagtctgagcaaagactgatggcag

SEQ ID NO: 1477 - DNA, 23 bp, Artificial Sequence
  primer
tccaagcaaagctatttctgaac

SEQ ID NO: 1478 - DNA, 39 bp, Artificial Sequence
  primer
gtaaaacgacggccagttccagaaacagatggtatgtgc

SEQ ID NO: 1479 - DNA, 37 bp, Artificial Sequence
  primer
gtaaaacgacggccagtctcctgaccttgggatctgc

SEQ ID NO: 1480 - DNA, 37 bp, Artificial Sequence
  primer
gtaaaacgacggccagtgtttacgcgactggagcaag

SEQ ID NO: 1481 - DNA, 39 bp, Artificial Sequence
  primer
gtaaaacgacggccagtttctgcaggagttgtgagacag

SEQ ID NO: 1482 - DNA, 38 bp, Artificial Sequence
  primer
gtaaaacgacggccagtaggtaaggtgagggtggagtg

SEQ ID NO: 1483 - DNA, 21 bp, Artificial Sequence
  primer
agcaacagcaggtacaagtgc

SEQ ID NO: 1484 - DNA, 21 bp, Artificial Sequence
  primer
aagaagctctcagtgccaacc

SEQ ID NO: 1485 - DNA, 20 bp, Artificial Sequence
  primer
ctgtcatttcagtacccgcc

SEQ ID NO: 1486 - DNA, 21 bp, Artificial Sequence
  primer
tcgtaaatggaggagcatgtg

SEQ ID NO: 1487 - DNA, 22 bp, Artificial Sequence
  primer
gaccatcctggtaacacggtaa

SEQ ID NO: 1488 - DNA, 22 bp, Artificial Sequence
  primer
tcccgaatagctgagactatgg

SEQ ID NO: 1489 - DNA, 38 bp, Artificial Sequence
  primer
gtaaaacgacggccagtttccacaccttaggttctgcc

SEQ ID NO: 1490 - DNA, 21 bp, Artificial Sequence
  primer
gagctgttcgtcaatgcagac

SEQ ID NO: 1491 - DNA, 38 bp, Artificial Sequence
  primer
gtaaaacgacggccagtggagggtcaatgaggaacttg

SEQ ID NO: 1492 - DNA, 20 bp, Artificial Sequence
  primer
tcagggacagctggaacaag

SEQ ID NO: 1493 - DNA, 21 bp, Artificial Sequence
  primer
cttgggaaggagtgttcatgg

SEQ ID NO: 1494 - DNA, 21 bp, Artificial Sequence
  primer
tcctttagcccttctccactg

SEQ ID NO: 1495 - DNA, 38 bp, Artificial Sequence
  primer
gtaaaacgacggccagtttccagacagtgatgcctacc

SEQ ID NO: 1496 - DNA, 20 bp, Artificial Sequence
  primer
ggcagtggaggaagaaggag

SEQ ID NO: 1497 - DNA, 37 bp, Artificial Sequence
  primer
gtaaaacgacggccagtctctgctgctccacaggaag

SEQ ID NO: 1498 - DNA, 38 bp, Artificial Sequence
  primer
gtaaaacgacggccagttcaggtgtgacattcggctac

SEQ ID NO: 1499 - DNA, 19 bp, Artificial Sequence
  primer
tggcaggcacctgtattcc

SEQ ID NO: 1500 - DNA, 21 bp, Artificial Sequence
  primer
aagttggcattgggatttagg

SEQ ID NO: 1501 - DNA, 39 bp, Artificial Sequence
  primer
gtaaaacgacggccagtggtgcccttcaccttatcattc

SEQ ID NO: 1502 - DNA, 38 bp, Artificial Sequence
  primer
gtaaaacgacggccagtgagttgtgtttgctgagctgg

SEQ ID NO: 1503 - DNA, 39 bp, Artificial Sequence
  primer
gtaaaacgacggccagtgggcctaggactcccttatttc

SEQ ID NO: 1504 - DNA, 38 bp, Artificial Sequence
  primer
gtaaaacgacggccagtgtttgggataccctgaccaag

SEQ ID NO: 1505 - DNA, 38 bp, Artificial Sequence
  primer
gtaaaacgacggccagtctggtccttcaggacgttgac

SEQ ID NO: 1506 - DNA, 21 bp, Artificial Sequence
  primer
tggatgaggtcccagtttgac

SEQ ID NO: 1507 - DNA, 38 bp, Artificial Sequence
  primer
gtaaaacgacggccagtctcatgaggatggtagggctc

SEQ ID NO: 1508 - DNA, 38 bp, Artificial Sequence
  primer
gtaaaacgacggccagtactcaagccaggagcctactc

SEQ ID NO: 1509 - DNA, 38 bp, Artificial Sequence
  primer
gtaaaacgacggccagtattgtcgagtcgtggcttagg

SEQ ID NO: 1510 - DNA, 38 bp, Artificial Sequence
  primer
gtaaaacgacggccagtttagagccagggccaagttag

SEQ ID NO: 1511 - DNA, 21 bp, Artificial Sequence
  primer
gagaagcggtagtgatggagg

SEQ ID NO: 1512 - DNA, 38 bp, Artificial Sequence
  primer
gtaaaacgacggccagtgagagggtcgtgagcgataag

SEQ ID NO: 1513 - DNA, 21 bp, Artificial Sequence
  primer
ccttcctcctctcttggtgac

SEQ ID NO: 1514 - DNA, 21 bp, Artificial Sequence
  primer
gaatagcagtgtgcgagttgg

SEQ ID NO: 1515 - DNA, 21 bp, Artificial Sequence
  primer
taggtggctcctacctgcttc

SEQ ID NO: 1516 - DNA, 21 bp, Artificial Sequence
  primer
atgctaatggaggagtcaggg

SEQ ID NO: 1517 - DNA, 21 bp, Artificial Sequence
  primer
acctgatgatggtacccttgg

SEQ ID NO: 1518 - DNA, 20 bp, Artificial Sequence
  primer
gcttgcagtgtaggcaggac

SEQ ID NO: 1519 - DNA, 21 bp, Artificial Sequence
  primer
acccttgggttagaacatccc

SEQ ID NO: 1520 - DNA, 21 bp, Artificial Sequence
  primer
catgtggctaatctttcagcg

SEQ ID NO: 1521 - DNA, 21 bp, Artificial Sequence
  primer
aaagtctaagcgagcgtcgtg

SEQ ID NO: 1522 - DNA, 38 bp, Artificial Sequence
  primer
gtaaaacgacggccagtctctgcgtctgtatgtgccag

SEQ ID NO: 1523 - DNA, 38 bp, Artificial Sequence
  primer
gtaaaacgacggccagtatctgtgtctgtgcctggttc

SEQ ID NO: 1524 - DNA, 22 bp, Artificial Sequence
  primer
tcctgagcctttgagtctgttc

SEQ ID NO: 1525 - DNA, 21 bp, Artificial Sequence
  primer
agaccagcaaccctctgtgag

SEQ ID NO: 1526 - DNA, 37 bp, Artificial Sequence
  primer
gtaaaacgacggccagtatttggagaggtgaaacggg

SEQ ID NO: 1527 - DNA, 38 bp, Artificial Sequence
  primer
gtaaaacgacggccagtcctttccaacggtatagggtg

SEQ ID NO: 1528 - DNA, 38 bp, Artificial Sequence
  primer
gtaaaacgacggccagtgcttaggccaattgctgtttc

SEQ ID NO: 1529 - DNA, 38 bp, Artificial Sequence
  primer
gtaaaacgacggccagtttcccttctgtggactgttcc

SEQ ID NO: 1530 - DNA, 38 bp, Artificial Sequence
  primer
gtaaaacgacggccagtcacccacccataatgtgactc

SEQ ID NO: 1531 - DNA, 21 bp, Artificial Sequence
  primer
cataggccagatcttctgctg

SEQ ID NO: 1532 - DNA, 22 bp, Artificial Sequence
  primer
catcctgtggctggagaattac

SEQ ID NO: 1533 - DNA, 38 bp, Artificial Sequence
  primer
gtaaaacgacggccagtaaccagcagcgtgaatatgag

SEQ ID NO: 1534 - DNA, 21 bp, Artificial Sequence
  primer
tttgcgacgtggaaacatatc

SEQ ID NO: 1535 - DNA, 39 bp, Artificial Sequence
  primer
gtaaaacgacggccagtcgtaatgaagtaagtgctgggc

SEQ ID NO: 1536 - DNA, 20 bp, Artificial Sequence
  primer
cctgcagtgctgtagaaccc

SEQ ID NO: 1537 - DNA, 38 bp, Artificial Sequence
  primer
gtaaaacgacggccagtcatcagacacgctcacaggtc

SEQ ID NO: 1538 - DNA, 38 bp, Artificial Sequence
  primer
gtaaaacgacggccagtagcctagatggaaggacatgg

SEQ ID NO: 1539 - DNA, 21 bp, Artificial Sequence
  primer
tcagatgactatgccctggtg

SEQ ID NO: 1540 - DNA, 37 bp, Artificial Sequence
  primer
gtaaaacgacggccagtgagtgtgccttcaccctgac

SEQ ID NO: 1541 - DNA, 18 bp, Artificial Sequence
  primer
ctcccggaacctgcactt

SEQ ID NO: 1542 - DNA, 21 bp, Artificial Sequence
  primer
ataacgactttcgcatttggg

SEQ ID NO: 1543 - DNA, 18 bp, Artificial Sequence
  primer
gaacgccaggcaaggtct

SEQ ID NO: 1544 - DNA, 21 bp, Artificial Sequence
  primer
catgttgtaggaaggacctgg

SEQ ID NO: 1545 - DNA, 21 bp, Artificial Sequence
  primer
aataaccaatgaccctgagcc

SEQ ID NO: 1546 - DNA, 38 bp, Artificial Sequence
  primer
gtaaaacgacggccagtatgatgcatgtcaaaggttgc

SEQ ID NO: 1547 - DNA, 37 bp, Artificial Sequence
  primer
gtaaaacgacggccagtgtggttcagctgggaagatg

SEQ ID NO: 1548 - DNA, 37 bp, Artificial Sequence
  primer
gtaaaacgacggccagtgtagctgcaccgtggctagt

SEQ ID NO: 1549 - DNA, 19 bp, Artificial Sequence
  primer
catcaggacggctgatgtg

SEQ ID NO: 1550 - DNA, 36 bp, Artificial Sequence
  primer
gtaaaacgacggccagtacaggaactccctggaccc

SEQ ID NO: 1551 - DNA, 38 bp, Artificial Sequence
  primer
gtaaaacgacggccagtgattgattgattgagggctcc

SEQ ID NO: 1552 - DNA, 38 bp, Artificial Sequence
  primer
gtaaaacgacggccagtataacgactttcgcatttggg

SEQ ID NO: 1553 - DNA, 21 bp, Artificial Sequence
  primer
aaggtaatgcaaatcccgaag

SEQ ID NO: 1554 - DNA, 21 bp, Artificial Sequence
  primer
gtgctgtcacagagttcaggg

SEQ ID NO: 1555 - DNA, 21 bp, Artificial Sequence
  primer
ttgttcaatctctcagtgccc

SEQ ID NO: 1556 - DNA, 21 bp, Artificial Sequence
  primer
atcgagtaagaggacctgcca

SEQ ID NO: 1557 - DNA, 21 bp, Artificial Sequence
  primer
aagcatcatcattaccctgcc

SEQ ID NO: 1558 - DNA, 38 bp, Artificial Sequence
  primer
gtaaaacgacggccagtgaacgacattgaccttcagcc

SEQ ID NO: 1559 - DNA, 38 bp, Artificial Sequence
  primer
gtaaaacgacggccagttcattggaaatgaagctgctc

SEQ ID NO: 1560 - DNA, 38 bp, Artificial Sequence
  primer
gtaaaacgacggccagtcagtgtctccctatgttgccc

SEQ ID NO: 1561 - DNA, 23 bp, Artificial Sequence
  primer
tttggattcaaagtagccatgag

SEQ ID NO: 1562 - DNA, 38 bp, Artificial Sequence
  primer
gtaaaacgacggccagtatagcaggctttgcagacatc

SEQ ID NO: 1563 - DNA, 21 bp, Artificial Sequence
  primer
ctcttacaggactggcacacg

SEQ ID NO: 1564 - DNA, 40 bp, Artificial Sequence
  primer
gtaaaacgacggccagtagagcaaacaatctaaaggcaag

SEQ ID NO: 1565 - DNA, 38 bp, Artificial Sequence
  primer
gtaaaacgacggccagtacctccctcaccctctgaaag

SEQ ID NO: 1566 - DNA, 21 bp, Artificial Sequence
  primer
agcatccaagaaagggttcac

SEQ ID NO: 1567 - DNA, 22 bp, Artificial Sequence
  primer
gccaagccattgagtgtttatc

SEQ ID NO: 1568 - DNA, 21 bp, Artificial Sequence
  primer
ttccaaccagaacagtttccc

SEQ ID NO: 1569 - DNA, 38 bp, Artificial Sequence
  primer
gtaaaacgacggccagtagacaagtctagcctgccctg

SEQ ID NO: 1570 - DNA, 37 bp, Artificial Sequence
  primer
gtaaaacgacggccagtggtggttggagagtggatga

SEQ ID NO: 1571 - DNA, 21 bp, Artificial Sequence
  primer
gtggtagggacttgaagaggg

SEQ ID NO: 1572 - DNA, 38 bp, Artificial Sequence
  primer
gtaaaacgacggccagtaactcagagggcatgattgtg

SEQ ID NO: 1573 - DNA, 43 bp, Artificial Sequence
  primer
gtaaaacgacggccagtttaggtccatgttgtttgttagtgtc

SEQ ID NO: 1574 - DNA, 35 bp, Artificial Sequence
  primer
gtaaaacgacggccagtacgccagggagctttgag

SEQ ID NO: 1575 - DNA, 38 bp, Artificial Sequence
  primer
gtaaaacgacggccagtcctccatcctaacccaatcac

SEQ ID NO: 1576 - DNA, 39 bp, Artificial Sequence
  primer
gtaaaacgacggccagttggcaggatacaggtaaggaag

SEQ ID NO: 1577 - DNA, 21 bp, Artificial Sequence
  primer
gatggtgagggctggatagtc

SEQ ID NO: 1578 - DNA, 39 bp, Artificial Sequence
  primer
gtaaaacgacggccagtcgagacaatgcacttaagggag

SEQ ID NO: 1579 - DNA, 21 bp, Artificial Sequence
  primer
ttctgggtatccctccaagtg

SEQ ID NO: 1580 - DNA, 38 bp, Artificial Sequence
  primer
gtaaaacgacggccagtacaaggtgagtgtctccaggc

SEQ ID NO: 1581 - DNA, 21 bp, Artificial Sequence
  primer
ccctatctaaagggactcggc

SEQ ID NO: 1582 - DNA, 38 bp, Artificial Sequence
  primer
gtaaaacgacggccagtctctgtagacctggaggaccc

SEQ ID NO: 1583 - DNA, 38 bp, Artificial Sequence
  primer
gtaaaacgacggccagtgcagctccgagttcctactcc

SEQ ID NO: 1584 - DNA, 37 bp, Artificial Sequence
  primer
gtaaaacgacggccagtatgctgttcctcatgttcgc

SEQ ID NO: 1585 - DNA, 21 bp, Artificial Sequence
  primer
aggtattctagaggcccagcc

SEQ ID NO: 1586 - DNA, 38 bp, Artificial Sequence
  primer
gtaaaacgacggccagtagggtggagctctaggaaacc

SEQ ID NO: 1587 - DNA, 19 bp, Artificial Sequence
  primer
gttgtgccaagtctgctgc

SEQ ID NO: 1588 - DNA, 37 bp, Artificial Sequence
  primer
gtaaaacgacggccagtcaagtcccagtcctgctgtc

SEQ ID NO: 1589 - DNA, 38 bp, Artificial Sequence
  primer
gtaaaacgacggccagtcattcagagcaactccagcac

SEQ ID NO: 1590 - DNA, 38 bp, Artificial Sequence
  primer
gtaaaacgacggccagtacacctagaacagggtccgtc

SEQ ID NO: 1591 - DNA, 21 bp, Artificial Sequence
  primer
cagttccaggactgcttctcc

SEQ ID NO: 1592 - DNA, 37 bp, Artificial Sequence
  primer
gtaaaacgacggccagttgtgctgcctctttcatgtc

SEQ ID NO: 1593 - DNA, 38 bp, Artificial Sequence
  primer
gtaaaacgacggccagtccttccacatcaggtcctttc

SEQ ID NO: 1594 - DNA, 20 bp, Artificial Sequence
  primer
aatacctgaccttggccctg

SEQ ID NO: 1595 - DNA, 22 bp, Artificial Sequence
  primer
tgatgggatgaggtattatggc

SEQ ID NO: 1596 - DNA, 22 bp, Artificial Sequence
  primer
tgcctgttagaggtctttagcc

SEQ ID NO: 1597 - DNA, 38 bp, Artificial Sequence
  primer
gtaaaacgacggccagtcagacctcacattcagcttgg

SEQ ID NO: 1598 - DNA, 21 bp, Artificial Sequence
  primer
aaacttctcccacccactcac

SEQ ID NO: 1599 - DNA, 27 bp, Artificial Sequence
  primer
tctaggcaacggtatttctttatattg

SEQ ID NO: 1600 - DNA, 21 bp, Artificial Sequence
  primer
tctgggcttgctaaagtgtcc

SEQ ID NO: 1601 - DNA, 21 bp, Artificial Sequence
  primer
acacacacgtttgtaggtggg

SEQ ID NO: 1602 - DNA, 21 bp, Artificial Sequence
  primer
gagatttaaccacgtcggctc

SEQ ID NO: 1603 - DNA, 21 bp, Artificial Sequence
  primer
gcttccgtgtttggtagaacc

SEQ ID NO: 1604 - DNA, 38 bp, Artificial Sequence
  primer
gtaaaacgacggccagttctgcacggacagagtagtcc

SEQ ID NO: 1605 - DNA, 38 bp, Artificial Sequence
  primer
gtaaaacgacggccagttcccttcactttcaaacccag

SEQ ID NO: 1606 - DNA, 19 bp, Artificial Sequence
  primer
ctgtggaacccaggtgagg

SEQ ID NO: 1607 - DNA, 38 bp, Artificial Sequence
  primer
gtaaaacgacggccagtgtgatcagcattgtgagctgg

SEQ ID NO: 1608 - DNA, 38 bp, Artificial Sequence
  primer
gtaaaacgacggccagtgaggacacctgtgtggaaagg

SEQ ID NO: 1609 - DNA, 41 bp, Artificial Sequence
  primer
gtaaaacgacggccagtgagtacctactgtgggacagatgc

SEQ ID NO: 1610 - DNA, 23 bp, Artificial Sequence
  primer
aattaggatggctttactgtgcc

SEQ ID NO: 1611 - DNA, 38 bp, Artificial Sequence
  primer
gtaaaacgacggccagtgagggaaggttgctatctggg

SEQ ID NO: 1612 - DNA, 38 bp, Artificial Sequence
  primer
gtaaaacgacggccagtgggagatcatgcaaatatggg

SEQ ID NO: 1613 - DNA, 22 bp, Artificial Sequence
  primer
gcctcgggttctaaattattgg

SEQ ID NO: 1614 - DNA, 36 bp, Artificial Sequence
  primer
gtaaaacgacggccagtgtgggaccgcgagttacag

SEQ ID NO: 1615 - DNA, 21 bp, Artificial Sequence
  primer
ctcacatgcagacaaagcagg

SEQ ID NO: 1616 - DNA, 22 bp, Artificial Sequence
  primer
gatgctgacgggaagtgataag

SEQ ID NO: 1617 - DNA, 21 bp, Artificial Sequence
  primer
atggctaccagtaaggatggg

SEQ ID NO: 1618 - DNA, 38 bp, Artificial Sequence
  primer
gtaaaacgacggccagtgggctcacctcctacctatcc

SEQ ID NO: 1619 - DNA, 20 bp, Artificial Sequence
  primer
ggagggtaaagattgcctgg

SEQ ID NO: 1620 - DNA, 21 bp, Artificial Sequence
  primer
cactccaggctctcctagtgc

SEQ ID NO: 1621 - DNA, 39 bp, Artificial Sequence
  primer
gtaaaacgacggccagttgcagaaacagaaaggtgattg

SEQ ID NO: 1622 - DNA, 38 bp, Artificial Sequence
  primer
gtaaaacgacggccagttctgattcaggacactttggc

SEQ ID NO: 1623 - DNA, 38 bp, Artificial Sequence
  primer
gtaaaacgacggccagtgatccaggtgtcaagccaaac

SEQ ID NO: 1624 - DNA, 21 bp, Artificial Sequence
  primer
tctttagcaagttccgccttc

SEQ ID NO: 1625 - DNA, 28 bp, Artificial Sequence
  primer
tcattgagataagaaagttaagatcgaa

SEQ ID NO: 1626 - DNA, 21 bp, Artificial Sequence
  primer
ggtagcagtggaggaggtgag

SEQ ID NO: 1627 - DNA, 36 bp, Artificial Sequence
  primer
gtaaaacgacggccagtacccggcctaagctgtttc

SEQ ID NO: 1628 - DNA, 23 bp, Artificial Sequence
  primer
ccatcacagtaccttgcatgtag

SEQ ID NO: 1629 - DNA, 38 bp, Artificial Sequence
  primer
gtaaaacgacggccagtggatacgtaaggaaacgggac

SEQ ID NO: 1630 - DNA, 36 bp, Artificial Sequence
  primer
gtaaaacgacggccagtaggccatcctctgtcctcc

SEQ ID NO: 1631 - DNA, 38 bp, Artificial Sequence
  primer
gtaaaacgacggccagtcctttgacctgctgtccctac

SEQ ID NO: 1632 - DNA, 21 bp, Artificial Sequence
  primer
tcgttggatgaccaagttcag

SEQ ID NO: 1633 - DNA, 38 bp, Artificial Sequence
  primer
gtaaaacgacggccagtcaggacctgtcaagggaagag

SEQ ID NO: 1634 - DNA, 20 bp, Artificial Sequence
  primer
cgtgcagtaagctagcctgg

SEQ ID NO: 1635 - DNA, 41 bp, Artificial Sequence
  primer
gtaaaacgacggccagttgtggatggactgtacctattacc

SEQ ID NO: 1636 - DNA, 38 bp, Artificial Sequence
  primer
gtaaaacgacggccagtaagtcctggatgctgtggaac

SEQ ID NO: 1637 - DNA, 38 bp, Artificial Sequence
  primer
gtaaaacgacggccagttaggtcacaggttgccaaatg

SEQ ID NO: 1638 - DNA, 21 bp, Artificial Sequence
  primer
cataccacatatggccagcac

SEQ ID NO: 1639 - DNA, 38 bp, Artificial Sequence
  primer
gtaaaacgacggccagttaagatgctggtggtgtctgc

SEQ ID NO: 1640 - DNA, 38 bp, Artificial Sequence
  primer
gtaaaacgacggccagttttgtgtgcagaatttccctg

SEQ ID NO: 1641 - DNA, 39 bp, Artificial Sequence
  primer
gtaaaacgacggccagtgatgtatgttgaattccctccc

SEQ ID NO: 1642 - DNA, 21 bp, Artificial Sequence
  primer
agccaaagagcagtgtctgtc

SEQ ID NO: 1643 - DNA, 38 bp, Artificial Sequence
  primer
gtaaaacgacggccagttttctccacaggtgtttgagc

SEQ ID NO: 1644 - DNA, 38 bp, Artificial Sequence
  primer
gtaaaacgacggccagttaactgaccacgttggctctc

SEQ ID NO: 1645 - DNA, 21 bp, Artificial Sequence
  primer
ctcagcattcaggcctagctc

SEQ ID NO: 1646 - DNA, 38 bp, Artificial Sequence
  primer
gtaaaacgacggccagtagctgagctgtgaccctcttc

SEQ ID NO: 1647 - DNA, 21 bp, Artificial Sequence
  primer
gtgagtagaggttggatgccc

SEQ ID NO: 1648 - DNA, 38 bp, Artificial Sequence
  primer
gtaaaacgacggccagtgacactgtggtcgggagtagg

SEQ ID NO: 1649 - DNA, 38 bp, Artificial Sequence
  primer
gtaaaacgacggccagtacaagtctttgccggtttctg

SEQ ID NO: 1650 - DNA, 42 bp, Artificial Sequence
  primer
gtaaaacgacggccagtttgatgagcaaataatgtcatgtgt

SEQ ID NO: 1651 - DNA, 41 bp, Artificial Sequence
  primer
gtaaaacgacggccagtcacatgtggaatttagagaactgg

SEQ ID NO: 1652 - DNA, 40 bp, Artificial Sequence
  primer
gtaaaacgacggccagtcttgctcctgtttacatttctgc

SEQ ID NO: 1653 - DNA, 21 bp, Artificial Sequence
  primer
tgatttgtcccatttaccaca

SEQ ID NO: 1654 - DNA, 38 bp, Artificial Sequence
  primer
gtaaaacgacggccagtgccctgtggtaggctgtttag

SEQ ID NO: 1655 - DNA, 35 bp, Artificial Sequence
  primer
gtaaaacgacggccagttttgttccaggcaccgac

SEQ ID NO: 1656 - DNA, 27 bp, Artificial Sequence
  primer
aggtagactcattccatttaactatgc

SEQ ID NO: 1657 - DNA, 39 bp, Artificial Sequence
  primer
gtaaaacgacggccagtccactagctgaaaccaagttgc

SEQ ID NO: 1658 - DNA, 38 bp, Artificial Sequence
  primer
gtaaaacgacggccagttctcaaggctaggaaacaccc

SEQ ID NO: 1659 - DNA, 20 bp, Artificial Sequence
  primer
aaggagctgagggaagttgg

SEQ ID NO: 1660 - DNA, 38 bp, Artificial Sequence
  primer
gtaaaacgacggccagtctcattcccaggcgatttaag

SEQ ID NO: 1661 - DNA, 38 bp, Artificial Sequence
  primer
gtaaaacgacggccagtttgaagtcacctggaccttcc

SEQ ID NO: 1662 - DNA, 39 bp, Artificial Sequence
  primer
gtaaaacgacggccagtggctttgacaggaatacaaagg

SEQ ID NO: 1663 - DNA, 21 bp, Artificial Sequence
  primer
aagatccaagcgagaaaggtg

SEQ ID NO: 1664 - DNA, 38 bp, Artificial Sequence
  primer
gtaaaacgacggccagtagaactagtgcatgctggctg

SEQ ID NO: 1665 - DNA, 22 bp, Artificial Sequence
  primer
caccatgctttgtgcatgttag

SEQ ID NO: 1666 - DNA, 23 bp, Artificial Sequence
  primer
ttgaggtttgtctgaggtaggtc

SEQ ID NO: 1667 - DNA, 23 bp, Artificial Sequence
  primer
cattaggtgtgccttgcacatac

SEQ ID NO: 1668 - DNA, 27 bp, Artificial Sequence
  primer
tctttctaccatacacctcttagatcc

SEQ ID NO: 1669 - DNA, 39 bp, Artificial Sequence
  primer
gtaaaacgacggccagtggccctaaagtacatctgcaag

SEQ ID NO: 1670 - DNA, 42 bp, Artificial Sequence
  primer
gtaaaacgacggccagtcaacagccttgcttatctaacagtg

SEQ ID NO: 1671 - DNA, 21 bp, Artificial Sequence
  primer
cacaaggcagcacactctcac

SEQ ID NO: 1672 - DNA, 39 bp, Artificial Sequence
  primer
gtaaaacgacggccagttgttctttaccctcactctggg

SEQ ID NO: 1673 - DNA, 38 bp, Artificial Sequence
  primer
gtaaaacgacggccagttagagaggacctgtgcccatc

SEQ ID NO: 1674 - DNA, 21 bp, Artificial Sequence
  primer
agtggccaagacccatacatc

SEQ ID NO: 1675 - DNA, 35 bp, Artificial Sequence
  primer
gtaaaacgacggccagtcatgccacagggctcatc

SEQ ID NO: 1676 - DNA, 20 bp, Artificial Sequence
  primer
tgagcaaggatggcagtacc

SEQ ID NO: 1677 - DNA, 38 bp, Artificial Sequence
  primer
gtaaaacgacggccagttgcaataaattgctggacctc

SEQ ID NO: 1678 - DNA, 21 bp, Artificial Sequence
  primer
gcctggatctggtgactatcc

SEQ ID NO: 1679 - DNA, 37 bp, Artificial Sequence
  primer
gtaaaacgacggccagtaaattcacatcctcctgccc

SEQ ID NO: 1680 - DNA, 20 bp, Artificial Sequence
  primer
aagacagccaagctctgcac

SEQ ID NO: 1681 - DNA, 22 bp, Artificial Sequence
  primer
aaggcaactgagtgtcatgaag

SEQ ID NO: 1682 - DNA, 20 bp, Artificial Sequence
  primer
gcagtgagctgtgattgcac

SEQ ID NO: 1683 - DNA, 24 bp, Artificial Sequence
  primer
ccactgaattcaatatctgcacaa

SEQ ID NO: 1684 - DNA, 29 bp, Artificial Sequence
  primer
caagatataagagcatagaaattgttcca

SEQ ID NO: 1685 - DNA, 21 bp, Artificial Sequence
  primer
ttgtcaccacacaatgaccac

SEQ ID NO: 1686 - DNA, 38 bp, Artificial Sequence
  primer
gtaaaacgacggccagtgaggcaagattgctcacttca

SEQ ID NO: 1687 - DNA, 21 bp, Artificial Sequence
  primer
aacagttctcccaaggctcag

SEQ ID NO: 1688 - DNA, 20 bp, Artificial Sequence
  primer
ctcgagccgacctcctacac

SEQ ID NO: 1689 - DNA, 21 bp, Artificial Sequence
  primer
tgtgagaagcgcatcactagc

SEQ ID NO: 1690 - DNA, 35 bp, Artificial Sequence
  primer
gtaaaacgacggccagtccaagatggagccactgc

SEQ ID NO: 1691 - DNA, 38 bp, Artificial Sequence
  primer
gtaaaacgacggccagtgactgtaccgctgggactagg

SEQ ID NO: 1692 - DNA, 21 bp, Artificial Sequence
  primer
gagagatgcagggtagatggg

SEQ ID NO: 1693 - DNA, 18 bp, Artificial Sequence
  primer
gagccctgacaccgcttc

SEQ ID NO: 1694 - DNA, 20 bp, Artificial Sequence
  primer
gaacctcaaggtgatcgcac

SEQ ID NO: 1695 - DNA, 38 bp, Artificial Sequence
  primer
gtaaaacgacggccagttagagcaggaaggagggtttg

SEQ ID NO: 1696 - DNA, 38 bp, Artificial Sequence
  primer
gtaaaacgacggccagtccttgctggaacctacttccc

SEQ ID NO: 1697 - DNA, 21 bp, Artificial Sequence
  primer
agtaccttcacagacccaggc

SEQ ID NO: 1698 - DNA, 38 bp, Artificial Sequence
  primer
gtaaaacgacggccagtaggtacagagggtgcaggttg

SEQ ID NO: 1699 - DNA, 38 bp, Artificial Sequence
  primer
gtaaaacgacggccagtcttcaggtgagaccagttgcc

SEQ ID NO: 1700 - DNA, 37 bp, Artificial Sequence
  primer
gtaaaacgacggccagtgtttgtatccgggctgtgag

SEQ ID NO: 1701 - DNA, 20 bp, Artificial Sequence
  primer
tggcacatagggatttctgc

SEQ ID NO: 1702 - DNA, 20 bp, Artificial Sequence
  primer
tacagccctgtggtctgtcc

SEQ ID NO: 1703 - DNA, 24 bp, Artificial Sequence
  primer
acatgaaacacatgagtatttccc

SEQ ID NO: 1704 - DNA, 22 bp, Artificial Sequence
  primer
caagtgcaagtggttccttgac

SEQ ID NO: 1705 - DNA, 39 bp, Artificial Sequence
  primer
gtaaaacgacggccagttggtatacatggtcacaaaggg

SEQ ID NO: 1706 - DNA, 21 bp, Artificial Sequence
  primer
agtggccttgggtgattacag

SEQ ID NO: 1707 - DNA, 22 bp, Artificial Sequence
  primer
ggcaggtataaactcggtagcc

SEQ ID NO: 1708 - DNA, 36 bp, Artificial Sequence
  primer
gtaaaacgacggccagtccctcctgctttgttctgc

SEQ ID NO: 1709 - DNA, 21 bp, Artificial Sequence
  primer
tgcttgtgggaaatgtactcc

SEQ ID NO: 1710 - DNA, 43 bp, Artificial Sequence
  primer
gtaaaacgacggccagtgtagcataaactttaacacaccaagc

SEQ ID NO: 1711 - DNA, 41 bp, Artificial Sequence
  primer
gtaaaacgacggccagtttggccactgacctacttatattg

SEQ ID NO: 1712 - DNA, 38 bp, Artificial Sequence
  primer
gtaaaacgacggccagtttctcgctccttccgagttac

SEQ ID NO: 1713 - DNA, 21 bp, Artificial Sequence
  primer
cagcagaatcgttgtgatgag

SEQ ID NO: 1714 - DNA, 21 bp, Artificial Sequence
  primer
ttaccagcccttgctttaacc

SEQ ID NO: 1715 - DNA, 39 bp, Artificial Sequence
  primer
gtaaaacgacggccagttggcctaatggcaaataaagtc

SEQ ID NO: 1716 - DNA, 40 bp, Artificial Sequence
  primer
gtaaaacgacggccagtcaaattgtatctcaactgctggc

SEQ ID NO: 1717 - DNA, 21 bp, Artificial Sequence
  primer
aacctgtcactgacttggagc

SEQ ID NO: 1718 - DNA, 38 bp, Artificial Sequence
  primer
gtaaaacgacggccagtgcgaacaataactcaccttgc

SEQ ID NO: 1719 - DNA, 25 bp, Artificial Sequence
  primer
tgtttgtgaatagtagtttccctcc

SEQ ID NO: 1720 - DNA, 38 bp, Artificial Sequence
  primer
gtaaaacgacggccagtcatgaacccagaagcttggat

SEQ ID NO: 1721 - DNA, 38 bp, Artificial Sequence
  primer
gtaaaacgacggccagtttgagtgctacaggatttggg

SEQ ID NO: 1722 - DNA, 38 bp, Artificial Sequence
  primer
gtaaaacgacggccagtaataagagggagggaaggcag

SEQ ID NO: 1723 - DNA, 21 bp, Artificial Sequence
  primer
ccctatatcctctcccatccc

SEQ ID NO: 1724 - DNA, 21 bp, Artificial Sequence
  primer
attgctatgtagcctggtggg

SEQ ID NO: 1725 - DNA, 37 bp, Artificial Sequence
  primer
gtaaaacgacggccagtctcctccatttcctcttggg

SEQ ID NO: 1726 - DNA, 37 bp, Artificial Sequence
  primer
gtaaaacgacggccagtcgaccctgaaactctcctcc

SEQ ID NO: 1727 - DNA, 38 bp, Artificial Sequence
  primer
gtaaaacgacggccagtcagttactcctgggtcacacg

SEQ ID NO: 1728 - DNA, 38 bp, Artificial Sequence
  primer
gtaaaacgacggccagtttgagcagttccctgacacac

SEQ ID NO: 1729 - DNA, 21 bp, Artificial Sequence
  primer
gtacttgagaccgtgcatccc

SEQ ID NO: 1730 - DNA, 36 bp, Artificial Sequence
  primer
gtaaaacgacggccagtctgtgagtaagcccacggc

SEQ ID NO: 1731 - DNA, 38 bp, Artificial Sequence
  primer
gtaaaacgacggccagtacttgctgggaagttgggtag

SEQ ID NO: 1732 - DNA, 38 bp, Artificial Sequence
  primer
gtaaaacgacggccagtgaatgctgaatcagggtaggg

SEQ ID NO: 1733 - DNA, 40 bp, Artificial Sequence
  primer
gtaaaacgacggccagttcttgccaagtcatctttaatgc

SEQ ID NO: 1734 - DNA, 38 bp, Artificial Sequence
  primer
gtaaaacgacggccagttcccaagttggttgaaatctg

SEQ ID NO: 1735 - DNA, 39 bp, Artificial Sequence
  primer
gtaaaacgacggccagtttgagctttcttccagtcatcc

SEQ ID NO: 1736 - DNA, 38 bp, Artificial Sequence
  primer
gtaaaacgacggccagtagggctacttccagttctccg

SEQ ID NO: 1737 - DNA, 37 bp, Artificial Sequence
  primer
gtaaaacgacggccagttttccagtgcagatggcttc

SEQ ID NO: 1738 - DNA, 22 bp, Artificial Sequence
  primer
ttcaccacacatcttaagcagc

SEQ ID NO: 1739 - DNA, 38 bp, Artificial Sequence
  primer
gtaaaacgacggccagtttgattatgcattgagggagg

SEQ ID NO: 1740 - DNA, 38 bp, Artificial Sequence
  primer
gtaaaacgacggccagtaaggcaacaggatgtgtctcc

SEQ ID NO: 1741 - DNA, 22 bp, Artificial Sequence
  primer
ccagcaacctatttctgtctcg

SEQ ID NO: 1742 - DNA, 21 bp, Artificial Sequence
  primer
gcgagtttcggtgcttagatg

SEQ ID NO: 1743 - DNA, 44 bp, Artificial Sequence
  primer
gtaaaacgacggccagtggtgagttcagttagcaattatgaaac

SEQ ID NO: 1744 - DNA, 39 bp, Artificial Sequence
  primer
gtaaaacgacggccagtaatcatgtactcgtggcatgtg

SEQ ID NO: 1745 - DNA, 38 bp, Artificial Sequence
  primer
gtaaaacgacggccagttgcaaatttacaggcacaacc

SEQ ID NO: 1746 - DNA, 19 bp, Artificial Sequence
  primer
tcatgcttgaccaactggg

SEQ ID NO: 1747 - DNA, 46 bp, Artificial Sequence
  primer
gtaaaacgacggccagtaaattaactacttctctgtgaatggatca

SEQ ID NO: 1748 - DNA, 40 bp, Artificial Sequence
  primer
gtaaaacgacggccagtctcagtaaacatccctgagcttc

SEQ ID NO: 1749 - DNA, 22 bp, Artificial Sequence
  primer
tcagtgttcaggctacaccttg

SEQ ID NO: 1750 - DNA, 38 bp, Artificial Sequence
  primer
gtaaaacgacggccagttgcttcattcatgctttctgg

SEQ ID NO: 1751 - DNA, 43 bp, Artificial Sequence
  primer
gtaaaacgacggccagttgcacacttaactttcttctttcctt

SEQ ID NO: 1752 - DNA, 45 bp, Artificial Sequence
  primer
gtaaaacgacggccagttgagtgtatttctaaatgcaacttatcc

SEQ ID NO: 1753 - DNA, 38 bp, Artificial Sequence
  primer
gtaaaacgacggccagtagttgttggtccctaggatgc

SEQ ID NO: 1754 - DNA, 37 bp, Artificial Sequence
  primer
gtaaaacgacggccagtacaccaatgctcctgctctg

SEQ ID NO: 1755 - DNA, 21 bp, Artificial Sequence
  primer
actacagtgcgttgttgtccc

SEQ ID NO: 1756 - DNA, 36 bp, Artificial Sequence
  primer
gtaaaacgacggccagtcaagccacatggtcagtgc

SEQ ID NO: 1757 - DNA, 21 bp, Artificial Sequence
  primer
cagcaggacacaactaatggc

SEQ ID NO: 1758 - DNA, 21 bp, Artificial Sequence
  primer
atccacatcatggctttcaac

SEQ ID NO: 1759 - DNA, 20 bp, Artificial Sequence
  primer
tctggagccttcatctgctg

SEQ ID NO: 1760 - DNA, 21 bp, Artificial Sequence
  primer
tcctcaacctgcttctggaac

SEQ ID NO: 1761 - DNA, 38 bp, Artificial Sequence
  primer
gtaaaacgacggccagtctggaacagcgacaaatgttc

SEQ ID NO: 1762 - DNA, 21 bp, Artificial Sequence
  primer
ggctccagtatttagcatggg

SEQ ID NO: 1763 - DNA, 39 bp, Artificial Sequence
  primer
gtaaaacgacggccagtgggaggaagaatacaggtaggc

SEQ ID NO: 1764 - DNA, 23 bp, Artificial Sequence
  primer
tcagctagtcaacgacatccttc

SEQ ID NO: 1765 - DNA, 19 bp, Artificial Sequence
  primer
gggccctttgttaacaggc

SEQ ID NO: 1766 - DNA, 38 bp, Artificial Sequence
  primer
gtaaaacgacggccagtatatgccatttccctctacgc

SEQ ID NO: 1767 - DNA, 23 bp, Artificial Sequence
  primer
gggaacaataattaccaccttgg

SEQ ID NO: 1768 - DNA, 39 bp, Artificial Sequence
  primer
gtaaaacgacggccagtcaggaagcttcaaatgtaaacg

SEQ ID NO: 1769 - DNA, 38 bp, Artificial Sequence
  primer
gtaaaacgacggccagtattaaggctcagccaaactgg

SEQ ID NO: 1770 - DNA, 21 bp, Artificial Sequence
  primer
tcagctgtcatggaacctgtc

SEQ ID NO: 1771 - DNA, 38 bp, Artificial Sequence
  primer
gtaaaacgacggccagtcacagtctcaggatgcaggtg

SEQ ID NO: 1772 - DNA, 38 bp, Artificial Sequence
  primer
gtaaaacgacggccagtctcagcagtggtggatttgtg

SEQ ID NO: 1773 - DNA, 38 bp, Artificial Sequence
  primer
gtaaaacgacggccagtggtctgctgcaaaggtaactg

SEQ ID NO: 1774 - DNA, 38 bp, Artificial Sequence
  primer
gtaaaacgacggccagtttccttgagaactgctagccc

SEQ ID NO: 1775 - DNA, 38 bp, Artificial Sequence
  primer
gtaaaacgacggccagtgcagccctgcagagttctaag

SEQ ID NO: 1776 - DNA, 38 bp, Artificial Sequence
  primer
gtaaaacgacggccagtctggagttgtcagctcttccc

SEQ ID NO: 1777 - DNA, 38 bp, Artificial Sequence
  primer
gtaaaacgacggccagtccacctgtggaagaagtccag

SEQ ID NO: 1778 - DNA, 38 bp, Artificial Sequence
  primer
gtaaaacgacggccagtgacacggagtggaggtcagtc

SEQ ID NO: 1779 - DNA, 38 bp, Artificial Sequence
  primer
gtaaaacgacggccagtgagtccagagtgaggaggcac

SEQ ID NO: 1780 - DNA, 21 bp, Artificial Sequence
  primer
cgccttcatccctctcatatc

SEQ ID NO: 1781 - DNA, 38 bp, Artificial Sequence
  primer
gtaaaacgacggccagtcactttgggaattgtgaatgc

SEQ ID NO: 1782 - DNA, 38 bp, Artificial Sequence
  primer
gtaaaacgacggccagtaagcagaatctgtgagtcgcc

SEQ ID NO: 1783 - DNA, 21 bp, Artificial Sequence
  primer
gaggcgaagctggagaagtag

SEQ ID NO: 1784 - DNA, 25 bp, Artificial Sequence
  primer
cacagtgcctatttgctaattcttc

SEQ ID NO: 1785 - DNA, 41 bp, Artificial Sequence
  primer
gtaaaacgacggccagttttgacagtacactgcttcagttg

SEQ ID NO: 1786 - DNA, 21 bp, Artificial Sequence
  primer
gggtgacagaacaagactcca

SEQ ID NO: 1787 - DNA, 42 bp, Artificial Sequence
  primer
gtaaaacgacggccagtgctgaagctttatgattgtgagatg

SEQ ID NO: 1788 - DNA, 21 bp, Artificial Sequence
  primer
agaacgtggtggtaagaaggg

SEQ ID NO: 1789 - DNA, 36 bp, Artificial Sequence
  primer
gtaaaacgacggccagtaaagcctgctttattccgc

SEQ ID NO: 1790 - DNA, 26 bp, Artificial Sequence
  primer
tttagaaggacaaatcatgctgtaag

SEQ ID NO: 1791 - DNA, 23 bp, Artificial Sequence
  primer
tgttgctatcattgtgaacatgc

SEQ ID NO: 1792 - DNA, 22 bp, Artificial Sequence
  primer
tgccagttctttctcagttgtg

SEQ ID NO: 1793 - DNA, 21 bp, Artificial Sequence
  primer
aaactcataatgcagcctcgg

SEQ ID NO: 1794 - DNA, 21 bp, Artificial Sequence
  primer
tccgagaaatggagaatcagc

SEQ ID NO: 1795 - DNA, 38 bp, Artificial Sequence
  primer
gtaaaacgacggccagtacatcttccatgtcctcaggg

SEQ ID NO: 1796 - DNA, 38 bp, Artificial Sequence
  primer
gtaaaacgacggccagtctggagttccagaggatggag

SEQ ID NO: 1797 - DNA, 38 bp, Artificial Sequence
  primer
gtaaaacgacggccagtaagagccaactgccctaactg

SEQ ID NO: 1798 - DNA, 21 bp, Artificial Sequence
  primer
tgctggaatgtgctgacctac

SEQ ID NO: 1799 - DNA, 38 bp, Artificial Sequence
  primer
gtaaaacgacggccagtgggaacagagagaattgtggg

SEQ ID NO: 1800 - DNA, 21 bp, Artificial Sequence
  primer
tgtcgaatcaatctctgtggc

SEQ ID NO: 1801 - DNA, 21 bp, Artificial Sequence
  primer
tattgcatagctcccaaaggg

SEQ ID NO: 1802 - DNA, 21 bp, Artificial Sequence
  primer
tccaagaaataaatgggcacc

SEQ ID NO: 1803 - DNA, 21 bp, Artificial Sequence
  primer
agaaactgacccgagatggtg

SEQ ID NO: 1804 - DNA, 37 bp, Artificial Sequence
  primer
gtaaaacgacggccagtaaggccttggagaaatgtgg

SEQ ID NO: 1805 - DNA, 21 bp, Artificial Sequence
  primer
tgaagttggctttagcttccg

SEQ ID NO: 1806 - DNA, 37 bp, Artificial Sequence
  primer
gtaaaacgacggccagtgggaaagagggataggagcc

SEQ ID NO: 1807 - DNA, 38 bp, Artificial Sequence
  primer
gtaaaacgacggccagtagtaaagcttaagggcccagg

SEQ ID NO: 1808 - DNA, 39 bp, Artificial Sequence
  primer
gtaaaacgacggccagtgaaatgcgccaactacagtttc

SEQ ID NO: 1809 - DNA, 21 bp, Artificial Sequence
  primer
accatcctgactaacgcagtg

SEQ ID NO: 1810 - DNA, 38 bp, Artificial Sequence
  primer
gtaaaacgacggccagttccttggcagtgtttgtgaag

SEQ ID NO: 1811 - DNA, 21 bp, Artificial Sequence
  primer
ctgcttctaacccagctccac

SEQ ID NO: 1812 - DNA, 22 bp, Artificial Sequence
  primer
agatcttcagtttgatttgccc

SEQ ID NO: 1813 - DNA, 42 bp, Artificial Sequence
  primer
gtaaaacgacggccagtaaacagaactttctggaactgaaac

SEQ ID NO: 1814 - DNA, 38 bp, Artificial Sequence
  primer
gtaaaacgacggccagttaaagaccgttgctgaccttg

SEQ ID NO: 1815 - DNA, 21 bp, Artificial Sequence
  primer
cctcttcaggaactaccaggc

SEQ ID NO: 1816 - DNA, 21 bp, Artificial Sequence
  primer
cgtggacttgactttcccttc

SEQ ID NO: 1817 - DNA, 18 bp, Artificial Sequence
  primer
gagcctgctgagtggtgg

SEQ ID NO: 1818 - DNA, 38 bp, Artificial Sequence
  primer
gtaaaacgacggccagtaacatgtgcagagtctgggag

SEQ ID NO: 1819 - DNA, 38 bp, Artificial Sequence
  primer
gtaaaacgacggccagtcatcaagccaagatctctccc

SEQ ID NO: 1820 - DNA, 38 bp, Artificial Sequence
  primer
gtaaaacgacggccagtcgtttaggtggattctgcttg

SEQ ID NO: 1821 - DNA, 21 bp, Artificial Sequence
  primer
caagcattaaagatgggctcc

SEQ ID NO: 1822 - DNA, 19 bp, Artificial Sequence
  primer
cgaggtgcctacacttccc

SEQ ID NO: 1823 - DNA, 20 bp, Artificial Sequence
  primer
aggagacaacagaccgaccc

SEQ ID NO: 1824 - DNA, 37 bp, Artificial Sequence
  primer
gtaaaacgacggccagtgtgtcaggtggtggtgtgtg

SEQ ID NO: 1825 - DNA, 21 bp, Artificial Sequence
  primer
gtacctttgcaagatcctggg

SEQ ID NO: 1826 - DNA, 37 bp, Artificial Sequence
  primer
gtaaaacgacggccagtcttcacggagtgtggagagc

SEQ ID NO: 1827 - DNA, 38 bp, Artificial Sequence
  primer
gtaaaacgacggccagtccactttgagggcagactctc

SEQ ID NO: 1828 - DNA, 35 bp, Artificial Sequence
  primer
gtaaaacgacggccagttggcccttccagtatccc

SEQ ID NO: 1829 - DNA, 21 bp, Artificial Sequence
  primer
cagcacagagaggatgctcag

SEQ ID NO: 1830 - DNA, 38 bp, Artificial Sequence
  primer
gtaaaacgacggccagtagtggaactcctgacagtcgc

SEQ ID NO: 1831 - DNA, 35 bp, Artificial Sequence
  primer
gtaaaacgacggccagtactgccctctggctttgg

SEQ ID NO: 1832 - DNA, 21 bp, Artificial Sequence
  primer
tctggaaccctgacttgtgtc

SEQ ID NO: 1833 - DNA, 38 bp, Artificial Sequence
  primer
gtaaaacgacggccagtgtcatccacttgggtcaggag

SEQ ID NO: 1834 - DNA, 21 bp, Artificial Sequence
  primer
ccagcttaccttgttccttgc

SEQ ID NO: 1835 - DNA, 21 bp, Artificial Sequence
  primer
agggtccagtgagatgttccc

SEQ ID NO: 1836 - DNA, 39 bp, Artificial Sequence
  primer
gtaaaacgacggccagtgaccttctgctcagttctttgg

SEQ ID NO: 1837 - DNA, 38 bp, Artificial Sequence
  primer
gtaaaacgacggccagttctttcactgcagagagggtg

SEQ ID NO: 1838 - DNA, 21 bp, Artificial Sequence
  primer
tacagagctggcactggactg

SEQ ID NO: 1839 - DNA, 38 bp, Artificial Sequence
  primer
gtaaaacgacggccagtctcataccactcagtgctgcc

SEQ ID NO: 1840 - DNA, 38 bp, Artificial Sequence
  primer
gtaaaacgacggccagtcagcgaggaccttctgcttac

SEQ ID NO: 1841 - DNA, 21 bp, Artificial Sequence
  primer
ttgcgtggtgctctagaagtc

SEQ ID NO: 1842 - DNA, 38 bp, Artificial Sequence
  primer
gtaaaacgacggccagttatgggaacactggcattcag

SEQ ID NO: 1843 - DNA, 38 bp, Artificial Sequence
  primer
gtaaaacgacggccagtggctcagtcaacataggctgc

SEQ ID NO: 1844 - DNA, 21 bp, Artificial Sequence
  primer
agatggttgtggactcccttg

SEQ ID NO: 1845 - DNA, 38 bp, Artificial Sequence
  primer
gtaaaacgacggccagttctggcagatgtgtaagggac

SEQ ID NO: 1846 - DNA, 26 bp, Artificial Sequence
  primer
gccagagagtactttaatggtattgc

SEQ ID NO: 1847 - DNA, 38 bp, Artificial Sequence
  primer
gtaaaacgacggccagttctgtttgtggtggaaactgg

SEQ ID NO: 1848 - DNA, 38 bp, Artificial Sequence
  primer
gtaaaacgacggccagtcgaggctgttatctggagagg

SEQ ID NO: 1849 - DNA, 38 bp, Artificial Sequence
  primer
gtaaaacgacggccagttgtattcacacctcaaacccg

SEQ ID NO: 1850 - DNA, 38 bp, Artificial Sequence
  primer
gtaaaacgacggccagttgtcatcacctcaccacttcc

SEQ ID NO: 1851 - DNA, 21 bp, Artificial Sequence
  primer
ttggaagaggaagtcaccagg

SEQ ID NO: 1852 - DNA, 39 bp, Artificial Sequence
  primer
gtaaaacgacggccagtgctggagcctggtaaagatagg

SEQ ID NO: 1853 - DNA, 21 bp, Artificial Sequence
  primer
aaggcagcagagaccactttc

SEQ ID NO: 1854 - DNA, 38 bp, Artificial Sequence
  primer
gtaaaacgacggccagtaggatgtgatcctcagccttg

SEQ ID NO: 1855 - DNA, 21 bp, Artificial Sequence
  primer
gaagccacatctctttgtccc

SEQ ID NO: 1856 - DNA, 37 bp, Artificial Sequence
  primer
gtaaaacgacggccagtgcatcaggaagagttggtgg

SEQ ID NO: 1857 - DNA, 37 bp, Artificial Sequence
  primer
gtaaaacgacggccagtaaggccctatgtcccacaag

SEQ ID NO: 1858 - DNA, 21 bp, Artificial Sequence
  primer
gcctgtgtagtgatgcaaagc

SEQ ID NO: 1859 - DNA, 39 bp, Artificial Sequence
  primer
gtaaaacgacggccagttggccatttctggatagaacag

SEQ ID NO: 1860 - DNA, 38 bp, Artificial Sequence
  primer
gtaaaacgacggccagtagccaaatcagctccagagtc

SEQ ID NO: 1861 - DNA, 21 bp, Artificial Sequence
  primer
agatctggactgggtttggag

SEQ ID NO: 1862 - DNA, 38 bp, Artificial Sequence
  primer
gtaaaacgacggccagtgctgagaacttgccctacctg

SEQ ID NO: 1863 - DNA, 38 bp, Artificial Sequence
  primer
gtaaaacgacggccagttctgtgactgtttctggtggc

SEQ ID NO: 1864 - DNA, 37 bp, Artificial Sequence
  primer
gtaaaacgacggccagtaatgcccagtcatggttcag

SEQ ID NO: 1865 - DNA, 21 bp, Artificial Sequence
  primer
aagctgagtggagtttccagg

SEQ ID NO: 1866 - DNA, 38 bp, Artificial Sequence
  primer
gtaaaacgacggccagttggtgcatctgctgctctaag

SEQ ID NO: 1867 - DNA, 21 bp, Artificial Sequence
  primer
gagatcctgactccgctgttc

SEQ ID NO: 1868 - DNA, 37 bp, Artificial Sequence
  primer
gtaaaacgacggccagtaattccatggccctaacctg

SEQ ID NO: 1869 - DNA, 38 bp, Artificial Sequence
  primer
gtaaaacgacggccagtagtgcacagcttcctctggtc

SEQ ID NO: 1870 - DNA, 38 bp, Artificial Sequence
  primer
gtaaaacgacggccagtgcttctcattccaagactgcc

SEQ ID NO: 1871 - DNA, 20 bp, Artificial Sequence
  primer
ccctcttctcctcccacaag

SEQ ID NO: 1872 - DNA, 38 bp, Artificial Sequence
  primer
gtaaaacgacggccagtgtatggaggacacacacctgc

SEQ ID NO: 1873 - DNA, 37 bp, Artificial Sequence
  primer
gtaaaacgacggccagtgttggatgtggtggaggatg

SEQ ID NO: 1874 - DNA, 21 bp, Artificial Sequence
  primer
cctctattctgaccctgaggc

SEQ ID NO: 1875 - DNA, 37 bp, Artificial Sequence
  primer
gtaaaacgacggccagtcaaaggctagagtggcctcc

SEQ ID NO: 1876 - DNA, 19 bp, Artificial Sequence
  primer
gactaggtccgggatgcag

SEQ ID NO: 1877 - DNA, 35 bp, Artificial Sequence
  primer
gtaaaacgacggccagtgagggttcgggagggttt

SEQ ID NO: 1878 - DNA, 37 bp, Artificial Sequence
  primer
gtaaaacgacggccagtcccactacgctaccagtccc

SEQ ID NO: 1879 - DNA, 36 bp, Artificial Sequence
  primer
gtaaaacgacggccagtgaagggcagggaagcagac

SEQ ID NO: 1880 - DNA, 38 bp, Artificial Sequence
  primer
gtaaaacgacggccagtggctccttgatacaaagctcg

SEQ ID NO: 1881 - DNA, 20 bp, Artificial Sequence
  primer
caagttcccaacgagctgag

SEQ ID NO: 1882 - DNA, 36 bp, Artificial Sequence
  primer
gtaaaacgacggccagtcttcttgccaggctcacag

SEQ ID NO: 1883 - DNA, 21 bp, Artificial Sequence
  primer
gtgtgtcacctgtgtctgctg

SEQ ID NO: 1884 - DNA, 38 bp, Artificial Sequence
  primer
gtaaaacgacggccagtaattaggcaggtccctgagtg

SEQ ID NO: 1885 - DNA, 38 bp, Artificial Sequence
  primer
gtaaaacgacggccagttgaaccacctttggttaaggg

SEQ ID NO: 1886 - DNA, 38 bp, Artificial Sequence
  primer
gtaaaacgacggccagttcagtggttctgtggttctgg

SEQ ID NO: 1887 - DNA, 38 bp, Artificial Sequence
  primer
gtaaaacgacggccagtcagtttctcacccagctaccc

SEQ ID NO: 1888 - DNA, 18 bp, Artificial Sequence
  primer
ggagattggcgtgaaccc

SEQ ID NO: 1889 - DNA, 21 bp, Artificial Sequence
  primer
agggattaagccgtcttcctg

SEQ ID NO: 1890 - DNA, 21 bp, Artificial Sequence
  primer
gatgttggaccaagactcagc

SEQ ID NO: 1891 - DNA, 38 bp, Artificial Sequence
  primer
gtaaaacgacggccagtgacgttggaaaggacagatgc

SEQ ID NO: 1892 - DNA, 38 bp, Artificial Sequence
  primer
gtaaaacgacggccagtgtgcttactccctcctccttg

SEQ ID NO: 1893 - DNA, 21 bp, Artificial Sequence
  primer
cttcctgactgtgtagctggc

SEQ ID NO: 1894 - DNA, 38 bp, Artificial Sequence
  primer
gtaaaacgacggccagtgtgtgagctagccctcatttg

SEQ ID NO: 1895 - DNA, 21 bp, Artificial Sequence
  primer
tccatcccaaatgctagaagc

SEQ ID NO: 1896 - DNA, 38 bp, Artificial Sequence
  primer
gtaaaacgacggccagtaccagaaccagagctggagtg

SEQ ID NO: 1897 - DNA, 38 bp, Artificial Sequence
  primer
gtaaaacgacggccagtctgagttaccagtcgtggtgg

SEQ ID NO: 1898 - DNA, 35 bp, Artificial Sequence
  primer
gtaaaacgacggccagtaggccaagggtcctggag

SEQ ID NO: 1899 - DNA, 20 bp, Artificial Sequence
  primer
gcaacacaggctggagtcag

SEQ ID NO: 1900 - DNA, 38 bp, Artificial Sequence
  primer
gtaaaacgacggccagttttgtcatcaccaccttggac

SEQ ID NO: 1901 - DNA, 21 bp, Artificial Sequence
  primer
ccactggcagatgtgaagaac

SEQ ID NO: 1902 - DNA, 38 bp, Artificial Sequence
  primer
gtaaaacgacggccagtcccttccgttatgatctttgg

SEQ ID NO: 1903 - DNA, 21 bp, Artificial Sequence
  primer
cagtacttgcaccgtttcacc

SEQ ID NO: 1904 - DNA, 37 bp, Artificial Sequence
  primer
gtaaaacgacggccagtggctgagcgtgtttacatcc

SEQ ID NO: 1905 - DNA, 38 bp, Artificial Sequence
  primer
gtaaaacgacggccagtcccagcactgatagcacacag

SEQ ID NO: 1906 - DNA, 20 bp, Artificial Sequence
  primer
agacgtggaggtgaatgtgc

SEQ ID NO: 1907 - DNA, 38 bp, Artificial Sequence
  primer
gtaaaacgacggccagtgaggagggacagggagattag

SEQ ID NO: 1908 - DNA, 38 bp, Artificial Sequence
  primer
gtaaaacgacggccagtctatgacgacttcttgcagcg

SEQ ID NO: 1909 - DNA, 38 bp, Artificial Sequence
  primer
gtaaaacgacggccagtagagtgtcgtggttctcaggc

SEQ ID NO: 1910 - DNA, 38 bp, Artificial Sequence
  primer
gtaaaacgacggccagtgagtcctagtcctgcagccag

SEQ ID NO: 1911 - DNA, 21 bp, Artificial Sequence
  primer
gcgagaaggtgtctgagtttg

SEQ ID NO: 1912 - DNA, 38 bp, Artificial Sequence
  primer
gtaaaacgacggccagttcaattccttgtgtggtcctg

SEQ ID NO: 1913 - DNA, 36 bp, Artificial Sequence
  primer
gtaaaacgacggccagtagcttcctctgccacaagg

SEQ ID NO: 1914 - DNA, 21 bp, Artificial Sequence
  primer
agggagctcctactcccactg

SEQ ID NO: 1915 - DNA, 38 bp, Artificial Sequence
  primer
gtaaaacgacggccagttacatggccaaggtcattgag

SEQ ID NO: 1916 - DNA, 18 bp, Artificial Sequence
  primer
gctttgaggtgcagagcg

SEQ ID NO: 1917 - DNA, 21 bp, Artificial Sequence
  primer
tagcaccgtccacagtcaaag

SEQ ID NO: 1918 - DNA, 21 bp, Artificial Sequence
  primer
tatgcactaaggcaagggagc

SEQ ID NO: 1919 - DNA, 21 bp, Artificial Sequence
  primer
caccctaggactgaccctctc

SEQ ID NO: 1920 - DNA, 21 bp, Artificial Sequence
  primer
tcataactccctggtgcttcc

SEQ ID NO: 1921 - DNA, 36 bp, Artificial Sequence
  primer
gtaaaacgacggccagtccgatctgtggtttctggg

SEQ ID NO: 1922 - DNA, 38 bp, Artificial Sequence
  primer
gtaaaacgacggccagtttgagccttgtccactttgtg

SEQ ID NO: 1923 - DNA, 38 bp, Artificial Sequence
  primer
gtaaaacgacggccagtactgtgtcttggtcacatgcc

SEQ ID NO: 1924 - DNA, 38 bp, Artificial Sequence
  primer
gtaaaacgacggccagttcttcctctcccttcacttcg

SEQ ID NO: 1925 - DNA, 37 bp, Artificial Sequence
  primer
gtaaaacgacggccagtagaccatgaaactccgagcc

SEQ ID NO: 1926 - DNA, 21 bp, Artificial Sequence
  primer
tcattctatggccatcctgag

SEQ ID NO: 1927 - DNA, 21 bp, Artificial Sequence
  primer
agatagcggctgcactactcc

SEQ ID NO: 1928 - DNA, 37 bp, Artificial Sequence
  primer
gtaaaacgacggccagttcctcacctctgtgtcccac

SEQ ID NO: 1929 - DNA, 37 bp, Artificial Sequence
  primer
gtaaaacgacggccagtgtcaggtgacagatggtgcc

SEQ ID NO: 1930 - DNA, 21 bp, Artificial Sequence
  primer
gagagagggtcttggagttgg

SEQ ID NO: 1931 - DNA, 37 bp, Artificial Sequence
  primer
gtaaaacgacggccagtggcccaggagtatcagaagg

SEQ ID NO: 1932 - DNA, 20 bp, Artificial Sequence
  primer
ctgtggccatgggtaggtag

SEQ ID NO: 1933 - DNA, 38 bp, Artificial Sequence
  primer
gtaaaacgacggccagtggaggctgagatgtggttctg

SEQ ID NO: 1934 - DNA, 21 bp, Artificial Sequence
  primer
gtccggttcgtatgtttggtt

SEQ ID NO: 1935 - DNA, 38 bp, Artificial Sequence
  primer
gtaaaacgacggccagtaccctgatgttccagagttgc

SEQ ID NO: 1936 - DNA, 39 bp, Artificial Sequence
  primer
gtaaaacgacggccagtgcataggactgctttccatgag

SEQ ID NO: 1937 - DNA, 38 bp, Artificial Sequence
  primer
gtaaaacgacggccagtgtcttccatttctgaggctgg

SEQ ID NO: 1938 - DNA, 38 bp, Artificial Sequence
  primer
gtaaaacgacggccagtctagggctccctggctatttc

SEQ ID NO: 1939 - DNA, 38 bp, Artificial Sequence
  primer
gtaaaacgacggccagtaacccaaagttccaagcacag

SEQ ID NO: 1940 - DNA, 38 bp, Artificial Sequence
  primer
gtaaaacgacggccagtagcctgagcttgtgtctaccc

SEQ ID NO: 1941 - DNA, 38 bp, Artificial Sequence
  primer
gtaaaacgacggccagttgcaaagtagaagtgggaggg

SEQ ID NO: 1942 - DNA, 21 bp, Artificial Sequence
  primer
ccatacttcaagcccttcctg

SEQ ID NO: 1943 - DNA, 21 bp, Artificial Sequence
  primer
cccttgtttctcaatgttgcc

SEQ ID NO: 1944 - DNA, 38 bp, Artificial Sequence
  primer
gtaaaacgacggccagtcttgtccatgacgtccttctg

SEQ ID NO: 1945 - DNA, 38 bp, Artificial Sequence
  primer
gtaaaacgacggccagtgaagtaggtgaaagggcaggg

SEQ ID NO: 1946 - DNA, 41 bp, Artificial Sequence
  primer
gtaaaacgacggccagttttcacagtgagattattcgaagc

SEQ ID NO: 1947 - DNA, 22 bp, Artificial Sequence
  primer
gccaacatttccatgtatttcg

SEQ ID NO: 1948 - DNA, 38 bp, Artificial Sequence
  primer
gtaaaacgacggccagtcaggcaaacatgattgaaacc

SEQ ID NO: 1949 - DNA, 44 bp, Artificial Sequence
  primer
gtaaaacgacggccagttttgtttattggaagtgttgattattt

SEQ ID NO: 1950 - DNA, 20 bp, Artificial Sequence
  primer
aggcgacaatgtgagactcc

SEQ ID NO: 1951 - DNA, 38 bp, Artificial Sequence
  primer
gtaaaacgacggccagttatctcacactgtgcactggc

SEQ ID NO: 1952 - DNA, 21 bp, Artificial Sequence
  primer
aactgccgcattatttcttcc

SEQ ID NO: 1953 - DNA, 38 bp, Artificial Sequence
  primer
gtaaaacgacggccagtagaattgcctctaagggatgc

SEQ ID NO: 1954 - DNA, 21 bp, Artificial Sequence
  primer
agctttccaaagtctgttgcc

SEQ ID NO: 1955 - DNA, 21 bp, Artificial Sequence
  primer
tgtgtggaggagagaagatgc

SEQ ID NO: 1956 - DNA, 38 bp, Artificial Sequence
  primer
gtaaaacgacggccagttgcttccacgtctcagctatg

SEQ ID NO: 1957 - DNA, 20 bp, Artificial Sequence
  primer
aaagtacgtgacctgccagc

SEQ ID NO: 1958 - DNA, 21 bp, Artificial Sequence
  primer
aaagatactgcttggccttgg

SEQ ID NO: 1959 - DNA, 21 bp, Artificial Sequence
  primer
gcctcgaactaaatggtcctg

SEQ ID NO: 1960 - DNA, 39 bp, Artificial Sequence
  primer
gtaaaacgacggccagtccagcctggatagagactcttg

SEQ ID NO: 1961 - DNA, 38 bp, Artificial Sequence
  primer
gtaaaacgacggccagtcaaggcaactacatgtgccag

SEQ ID NO: 1962 - DNA, 39 bp, Artificial Sequence
  primer
gtaaaacgacggccagtagcatttcaaagaatgcagagc

SEQ ID NO: 1963 - DNA, 25 bp, Artificial Sequence
  primer
actaaatgactgcattcttaaaggg

SEQ ID NO: 1964 - DNA, 38 bp, Artificial Sequence
  primer
gtaaaacgacggccagttgctgattaacatggttcctg

SEQ ID NO: 1965 - DNA, 39 bp, Artificial Sequence
  primer
gtaaaacgacggccagtcagttgagtcagtgagaggctg

SEQ ID NO: 1966 - DNA, 38 bp, Artificial Sequence
  primer
gtaaaacgacggccagtctgttgcattaggaatgtggg

SEQ ID NO: 1967 - DNA, 23 bp, Artificial Sequence
  primer
tgtgtgtcttctctgcttctgtg

SEQ ID NO: 1968 - DNA, 19 bp, Artificial Sequence
  primer
gtgatccgccttgtcttgg

SEQ ID NO: 1969 - DNA, 38 bp, Artificial Sequence
  primer
gtaaaacgacggccagtcatttctcttcaagtggtgcc

SEQ ID NO: 1970 - DNA, 24 bp, Artificial Sequence
  primer
gatgtgatcaattccttacaaacg

SEQ ID NO: 1971 - DNA, 21 bp, Artificial Sequence
  primer
ctaaggttgccctctttgctt

SEQ ID NO: 1972 - DNA, 24 bp, Artificial Sequence
  primer
ggttgacattctctaccattctcc

SEQ ID NO: 1973 - DNA, 22 bp, Artificial Sequence
  primer
ttggtcaaattaggtgtggtcc

SEQ ID NO: 1974 - DNA, 22 bp, Artificial Sequence
  primer
ggtagctgggtatgatgtctcg

SEQ ID NO: 1975 - DNA, 38 bp, Artificial Sequence
  primer
gtaaaacgacggccagttccgtagggctcaagtatgtg

SEQ ID NO: 1976 - DNA, 21 bp, Artificial Sequence
  primer
tgctgccaacatgtgagatag

SEQ ID NO: 1977 - DNA, 38 bp, Artificial Sequence
  primer
gtaaaacgacggccagttggaggtaaatttggcctttg

SEQ ID NO: 1978 - DNA, 39 bp, Artificial Sequence
  primer
gtaaaacgacggccagttgatgtttcttctcactgctcg

SEQ ID NO: 1979 - DNA, 38 bp, Artificial Sequence
  primer
gtaaaacgacggccagtttagccaaacttcctctggga

SEQ ID NO: 1980 - DNA, 22 bp, Artificial Sequence
  primer
ggcactggctttatgttacagg

SEQ ID NO: 1981 - DNA, 40 bp, Artificial Sequence
  primer
gtaaaacgacggccagtggcacagagagattatggcattc

SEQ ID NO: 1982 - DNA, 39 bp, Artificial Sequence
  primer
gtaaaacgacggccagtgcctcagatacctcgtttcaag

SEQ ID NO: 1983 - DNA, 38 bp, Artificial Sequence
  primer
gtaaaacgacggccagtgggttgaagggtaatgagcac

SEQ ID NO: 1984 - DNA, 38 bp, Artificial Sequence
  primer
gtaaaacgacggccagttgcaacctgaccctacttcag

SEQ ID NO: 1985 - DNA, 21 bp, Artificial Sequence
  primer
ttgagcccaggctaagataga

SEQ ID NO: 1986 - DNA, 37 bp, Artificial Sequence
  primer
gtaaaacgacggccagttgctcattcctactgctggg

SEQ ID NO: 1987 - DNA, 36 bp, Artificial Sequence
  primer
gtaaaacgacggccagtccttacaagggccgaatgg

SEQ ID NO: 1988 - DNA, 21 bp, Artificial Sequence
  primer
gccttactttcctggttgcac

SEQ ID NO: 1989 - DNA, 38 bp, Artificial Sequence
  primer
gtaaaacgacggccagtaaagtgatggttatgcggagg

SEQ ID NO: 1990 - DNA, 23 bp, Artificial Sequence
  primer
agcattagccttgaatgtagctc

SEQ ID NO: 1991 - DNA, 37 bp, Artificial Sequence
  primer
gtaaaacgacggccagtctgctccctgtggttactgg

SEQ ID NO: 1992 - DNA, 21 bp, Artificial Sequence
  primer
gcatctccacaaaccaacctc

SEQ ID NO: 1993 - DNA, 21 bp, Artificial Sequence
  primer
tctgtggagaggtgagagcac

SEQ ID NO: 1994 - DNA, 38 bp, Artificial Sequence
  primer
gtaaaacgacggccagtaactgagaatgggagctggag

SEQ ID NO: 1995 - DNA, 21 bp, Artificial Sequence
  primer
cagggagtttggctctttagc

SEQ ID NO: 1996 - DNA, 40 bp, Artificial Sequence
  primer
gtaaaacgacggccagtttaaagctagctgtggaacaagc

SEQ ID NO: 1997 - DNA, 37 bp, Artificial Sequence
  primer
gtaaaacgacggccagtggaagcacataaagccctgg

SEQ ID NO: 1998 - DNA, 40 bp, Artificial Sequence
  primer
gtaaaacgacggccagttttgaccatgaaatttgtgtgtg

SEQ ID NO: 1999 - DNA, 38 bp, Artificial Sequence
  primer
gtaaaacgacggccagtgaacaaccaacccatggagac

SEQ ID NO: 2000 - DNA, 38 bp, Artificial Sequence
  primer
gtaaaacgacggccagttattgggtgcaattccatacg

SEQ ID NO: 2001 - DNA, 37 bp, Artificial Sequence
  primer
gtaaaacgacggccagttcgtcagttccagcacattg

SEQ ID NO: 2002 - DNA, 39 bp, Artificial Sequence
  primer
gtaaaacgacggccagtccaatgtcttgatttgggattg

SEQ ID NO: 2003 - DNA, 21 bp, Artificial Sequence
  primer
tgacaaggtcaaagatcgagg

SEQ ID NO: 2004 - DNA, 38 bp, Artificial Sequence
  primer
gtaaaacgacggccagttctatagggtggccaaacagg

SEQ ID NO: 2005 - DNA, 21 bp, Artificial Sequence
  primer
tctggtgcctactgttctccc

SEQ ID NO: 2006 - DNA, 38 bp, Artificial Sequence
  primer
gtaaaacgacggccagtatgttgagcttcccgtgattg

SEQ ID NO: 2007 - DNA, 38 bp, Artificial Sequence
  primer
gtaaaacgacggccagtagtttacagccagctcttggg

SEQ ID NO: 2008 - DNA, 38 bp, Artificial Sequence
  primer
gtaaaacgacggccagttggagtaagcaagcactccag

SEQ ID NO: 2009 - DNA, 38 bp, Artificial Sequence
  primer
gtaaaacgacggccagtggtgcacacatgtttattggg

SEQ ID NO: 2010 - DNA, 21 bp, Artificial Sequence
  primer
tttcaggaatacacagcaccc

SEQ ID NO: 2011 - DNA, 21 bp, Artificial Sequence
  primer
agaaactccctaccaccctcc

SEQ ID NO: 2012 - DNA, 38 bp, Artificial Sequence
  primer
gtaaaacgacggccagtcctctgctccactggctttac

SEQ ID NO: 2013 - DNA, 21 bp, Artificial Sequence
  primer
atggcagactttgagctcctg

SEQ ID NO: 2014 - DNA, 38 bp, Artificial Sequence
  primer
gtaaaacgacggccagtatctgcatggttctgctttcc

SEQ ID NO: 2015 - DNA, 38 bp, Artificial Sequence
  primer
gtaaaacgacggccagtgtgagttactgcacctggctg

SEQ ID NO: 2016 - DNA, 37 bp, Artificial Sequence
  primer
gtaaaacgacggccagtagctccttgagagctgggac

SEQ ID NO: 2017 - DNA, 21 bp, Artificial Sequence
  primer
cactatgtcagcagggagagg

SEQ ID NO: 2018 - DNA, 38 bp, Artificial Sequence
  primer
gtaaaacgacggccagtcttggaggtaaatgcagagcc

SEQ ID NO: 2019 - DNA, 38 bp, Artificial Sequence
  primer
gtaaaacgacggccagtagatcagcagagtcctggatg

SEQ ID NO: 2020 - DNA, 38 bp, Artificial Sequence
  primer
gtaaaacgacggccagttcagtctgcatttggtgaagg

SEQ ID NO: 2021 - DNA, 38 bp, Artificial Sequence
  primer
gtaaaacgacggccagtcatctaccactgtgcctggtg

SEQ ID NO: 2022 - DNA, 38 bp, Artificial Sequence
  primer
gtaaaacgacggccagttcccaggactgaattctgatg

SEQ ID NO: 2023 - DNA, 39 bp, Artificial Sequence
  primer
gtaaaacgacggccagtaatcacatcattgcagcaactc

SEQ ID NO: 2024 - DNA, 38 bp, Artificial Sequence
  primer
gtaaaacgacggccagtaagtgcaggtagggagtgagc

SEQ ID NO: 2025 - DNA, 37 bp, Artificial Sequence
  primer
gtaaaacgacggccagtttaaatgcaagggatggctg

SEQ ID NO: 2026 - DNA, 38 bp, Artificial Sequence
  primer
gtaaaacgacggccagtctcttgtttgttgttagcggg

SEQ ID NO: 2027 - DNA, 21 bp, Artificial Sequence
  primer
aaatggtattgaaagccggac

SEQ ID NO: 2028 - DNA, 38 bp, Artificial Sequence
  primer
gtaaaacgacggccagtgcatcactagttctgggtggc

SEQ ID NO: 2029 - DNA, 21 bp, Artificial Sequence
  primer
cctcacttgattacggaagcc

SEQ ID NO: 2030 - DNA, 37 bp, Artificial Sequence
  primer
gtaaaacgacggccagtggatgggttgagctgtgttg

SEQ ID NO: 2031 - DNA, 21 bp, Artificial Sequence
  primer
ctcgtttgggtactggtttgg

SEQ ID NO: 2032 - DNA, 19 bp, Artificial Sequence
  primer
gcccagccaatcctttctc

SEQ ID NO: 2033 - DNA, 20 bp, Artificial Sequence
  primer
caaggcaagagatgctgatg

SEQ ID NO: 2034 - DNA, 37 bp, Artificial Sequence
  primer
gtaaaacgacggccagtgcctgtttggagagtggagc

SEQ ID NO: 2035 - DNA, 37 bp, Artificial Sequence
  primer
gtaaaacgacggccagtctcaccatgcacagtcccac

SEQ ID NO: 2036 - DNA, 37 bp, Artificial Sequence
  primer
gtaaaacgacggccagttgctcaagaggttgaggtgg

SEQ ID NO: 2037 - DNA, 21 bp, Artificial Sequence
  primer
tcctgggttcgagtgacctac

SEQ ID NO: 2038 - DNA, 36 bp, Artificial Sequence
  primer
gtaaaacgacggccagtcccagccattgtctcatcc

SEQ ID NO: 2039 - DNA, 21 bp, Artificial Sequence
  primer
aagatcaaagggtgttggctg

SEQ ID NO: 2040 - DNA, 38 bp, Artificial Sequence
  primer
gtaaaacgacggccagtaggatgactgcaaggtaagcg

SEQ ID NO: 2041 - DNA, 38 bp, Artificial Sequence
  primer
gtaaaacgacggccagtcatccgtgtggtaacatgcag

SEQ ID NO: 2042 - DNA, 22 bp, Artificial Sequence
  primer
tgagtctttcccattctccaag

SEQ ID NO: 2043 - DNA, 21 bp, Artificial Sequence
  primer
agagtagggtgtggaccaagc

SEQ ID NO: 2044 - DNA, 38 bp, Artificial Sequence
  primer
gtaaaacgacggccagtctcctgtctctgcctctttgg

SEQ ID NO: 2045 - DNA, 39 bp, Artificial Sequence
  primer
gtaaaacgacggccagtggatacacactatgtcccaggc

SEQ ID NO: 2046 - DNA, 21 bp, Artificial Sequence
  primer
gttgtcccttcttgttctggc

SEQ ID NO: 2047 - DNA, 22 bp, Artificial Sequence
  primer
tgacagatcatctctgtctggg

SEQ ID NO: 2048 - DNA, 21 bp, Artificial Sequence
  primer
gcaacagagcaagaccctgta

SEQ ID NO: 2049 - DNA, 22 bp, Artificial Sequence
  primer
catccatccctacgatgttcac

SEQ ID NO: 2050 - DNA, 38 bp, Artificial Sequence
  primer
gtaaaacgacggccagttcagtcccttcttgggaaatg

SEQ ID NO: 2051 - DNA, 20 bp, Artificial Sequence
  primer
ctggactcttccctgctgtg

SEQ ID NO: 2052 - DNA, 21 bp, Artificial Sequence
  primer
ggatttgtgaaatctcctggg

SEQ ID NO: 2053 - DNA, 21 bp, Artificial Sequence
  primer
aatcagagcagtggcttcagg

SEQ ID NO: 2054 - DNA, 38 bp, Artificial Sequence
  primer
gtaaaacgacggccagtgggctatgaggttaaagccag

SEQ ID NO: 2055 - DNA, 21 bp, Artificial Sequence
  primer
ggcaccaataggtctgctacc

SEQ ID NO: 2056 - DNA, 37 bp, Artificial Sequence
  primer
gtaaaacgacggccagtctcggagcctgtaaaggagg

SEQ ID NO: 2057 - DNA, 38 bp, Artificial Sequence
  primer
gtaaaacgacggccagtacaactagggcagtgggtttc

SEQ ID NO: 2058 - DNA, 38 bp, Artificial Sequence
  primer
gtaaaacgacggccagtaagagctgaggactgacaccc

SEQ ID NO: 2059 - DNA, 21 bp, Artificial Sequence
  primer
tcagacctctcacaaggcaag

SEQ ID NO: 2060 - DNA, 38 bp, Artificial Sequence
  primer
gtaaaacgacggccagttctgggaatgatctcagagcc

SEQ ID NO: 2061 - DNA, 21 bp, Artificial Sequence
  primer
gtgcatatccagtccatgctg

SEQ ID NO: 2062 - DNA, 20 bp, Artificial Sequence
  primer
cacacaaggactctgccacc

SEQ ID NO: 2063 - DNA, 21 bp, Artificial Sequence
  primer
gggttagagatgtctggctgg

SEQ ID NO: 2064 - DNA, 39 bp, Artificial Sequence
  primer
gtaaaacgacggccagtcgagtccgtaggaactggtatg

SEQ ID NO: 2065 - DNA, 21 bp, Artificial Sequence
  primer
cagaaggacgccaggaataag

SEQ ID NO: 2066 - DNA, 23 bp, Artificial Sequence
  primer
ccacgttgtaacccagtattgtc

SEQ ID NO: 2067 - DNA, 21 bp, Artificial Sequence
  primer
aacatcctgtgaaaggaaggg

SEQ ID NO: 2068 - DNA, 37 bp, Artificial Sequence
  primer
gtaaaacgacggccagtgttggcggagtgtagacctg

SEQ ID NO: 2069 - DNA, 20 bp, Artificial Sequence
  primer
ttagctggttgtggtggtgc

SEQ ID NO: 2070 - DNA, 38 bp, Artificial Sequence
  primer
gtaaaacgacggccagttcttcaccagctctcaacctg

SEQ ID NO: 2071 - DNA, 21 bp, Artificial Sequence
  primer
tgacaaagggtttcactgcac

SEQ ID NO: 2072 - DNA, 38 bp, Artificial Sequence
  primer
gtaaaacgacggccagtcctaaagggcaaacagaccac

SEQ ID NO: 2073 - DNA, 39 bp, Artificial Sequence
  primer
gtaaaacgacggccagttcgtgaaactaatttgcaaggg

SEQ ID NO: 2074 - DNA, 21 bp, Artificial Sequence
  primer
gcaggcagacctaagttggac

SEQ ID NO: 2075 - DNA, 21 bp, Artificial Sequence
  primer
ggatttcgcagtcaaagaagg

SEQ ID NO: 2076 - DNA, 38 bp, Artificial Sequence
  primer
gtaaaacgacggccagtttcctccaatccctttcattg

SEQ ID NO: 2077 - DNA, 37 bp, Artificial Sequence
  primer
gtaaaacgacggccagtgaagtcgaggctgcagtgag

SEQ ID NO: 2078 - DNA, 38 bp, Artificial Sequence
  primer
gtaaaacgacggccagttatgtaactgctctgcgcctg

SEQ ID NO: 2079 - DNA, 21 bp, Artificial Sequence
  primer
ccttactgtgcctttcttggg

SEQ ID NO: 2080 - DNA, 38 bp, Artificial Sequence
  primer
gtaaaacgacggccagtgacattgccagcagataaccc

SEQ ID NO: 2081 - DNA, 38 bp, Artificial Sequence
  primer
gtaaaacgacggccagtgtcctggtttcactctcctcc

SEQ ID NO: 2082 - DNA, 21 bp, Artificial Sequence
  primer
acaagcacatgctaccacacc

SEQ ID NO: 2083 - DNA, 38 bp, Artificial Sequence
  primer
gtaaaacgacggccagtagagcaggctatcattcctgg

SEQ ID NO: 2084 - DNA, 20 bp, Artificial Sequence
  primer
ctcgtgggaggactacaacc

SEQ ID NO: 2085 - DNA, 38 bp, Artificial Sequence
  primer
gtaaaacgacggccagtttcacaacttcgtggtgcttc

SEQ ID NO: 2086 - DNA, 21 bp, Artificial Sequence
  primer
ctaatccctcactgtgccctc

SEQ ID NO: 2087 - DNA, 21 bp, Artificial Sequence
  primer
cttcccaattgtgactctccc

SEQ ID NO: 2088 - DNA, 21 bp, Artificial Sequence
  primer
gagagttcctttggccacttg

SEQ ID NO: 2089 - DNA, 38 bp, Artificial Sequence
  primer
gtaaaacgacggccagttattgtcaggaggacccagtg

SEQ ID NO: 2090 - DNA, 38 bp, Artificial Sequence
  primer
gtaaaacgacggccagtaaacccatacctcacaggctc

SEQ ID NO: 2091 - DNA, 38 bp, Artificial Sequence
  primer
gtaaaacgacggccagtgaagactgtgctgtccctgtg

SEQ ID NO: 2092 - DNA, 36 bp, Artificial Sequence
  primer
gtaaaacgacggccagtcttaccgaggctcctgcac

SEQ ID NO: 2093 - DNA, 37 bp, Artificial Sequence
  primer
gtaaaacgacggccagttctttcatgggtttatggcg

SEQ ID NO: 2094 - DNA, 40 bp, Artificial Sequence
  primer
gtaaaacgacggccagtgctactctgaactaggcctggag

SEQ ID NO: 2095 - DNA, 38 bp, Artificial Sequence
  primer
gtaaaacgacggccagttcatcagacgtgtgtgtgtcc

SEQ ID NO: 2096 - DNA, 21 bp, Artificial Sequence
  primer
tccttcagtacgtcatgtccc

SEQ ID NO: 2097 - DNA, 21 bp, Artificial Sequence
  primer
aaattgaacacaggccaaatg

SEQ ID NO: 2098 - DNA, 18 bp, Artificial Sequence
  primer
aggtgtgagccaccatgc

SEQ ID NO: 2099 - DNA, 38 bp, Artificial Sequence
  primer
gtaaaacgacggccagtgcttgctctgagttcttgctg

SEQ ID NO: 2100 - DNA, 38 bp, Artificial Sequence
  primer
gtaaaacgacggccagtgacatcctgcagcttggaaag

SEQ ID NO: 2101 - DNA, 38 bp, Artificial Sequence
  primer
gtaaaacgacggccagttggagcttgatggacaaagac

SEQ ID NO: 2102 - DNA, 39 bp, Artificial Sequence
  primer
gtaaaacgacggccagtcctaccaaacattggatggatg

SEQ ID NO: 2103 - DNA, 38 bp, Artificial Sequence
  primer
gtaaaacgacggccagttaggatggtgctttctcccag

SEQ ID NO: 2104 - DNA, 37 bp, Artificial Sequence
  primer
gtaaaacgacggccagtggaagggtaaggatgatggc

SEQ ID NO: 2105 - DNA, 21 bp, Artificial Sequence
  primer
ttatttgacacgggtcactgg

SEQ ID NO: 2106 - DNA, 21 bp, Artificial Sequence
  primer
gaaggcaaaggacttgaccac

SEQ ID NO: 2107 - DNA, 36 bp, Artificial Sequence
  primer
gtaaaacgacggccagtccagcacacgtggcactac

SEQ ID NO: 2108 - DNA, 36 bp, Artificial Sequence
  primer
gtaaaacgacggccagtgttcaggctgtagccaggg

SEQ ID NO: 2109 - DNA, 38 bp, Artificial Sequence
  primer
gtaaaacgacggccagtaccagctagtccatgacaccc

SEQ ID NO: 2110 - DNA, 35 bp, Artificial Sequence
  primer
gtaaaacgacggccagtaagatgcagcccagggag

SEQ ID NO: 2111 - DNA, 38 bp, Artificial Sequence
  primer
gtaaaacgacggccagtgttgagtcacttgctgttggg

SEQ ID NO: 2112 - DNA, 22 bp, Artificial Sequence
  primer
gatgagcaggatgagtcctttg

SEQ ID NO: 2113 - DNA, 36 bp, Artificial Sequence
  primer
gtaaaacgacggccagtcagctgatcgtcctccctc

SEQ ID NO: 2114 - DNA, 22 bp, Artificial Sequence
  primer
tgttcagtggcactaatttgga

SEQ ID NO: 2115 - DNA, 40 bp, Artificial Sequence
  primer
gtaaaacgacggccagtggcaaatagaagcatatggctaa

SEQ ID NO: 2116 - DNA, 22 bp, Artificial Sequence
  primer
ccactgttattgtgttggaacc

SEQ ID NO: 2117 - DNA, 21 bp, Artificial Sequence
  primer
ggtctcgaatgttagttgggc

SEQ ID NO: 2118 - DNA, 40 bp, Artificial Sequence
  primer
gtaaaacgacggccagttttctcccaatcataacttgcac

SEQ ID NO: 2119 - DNA, 25 bp, Artificial Sequence
  primer
cattaactactccaacttggcttcc

SEQ ID NO: 2120 - DNA, 29 bp, Artificial Sequence
  primer
ggatttgctttagaaagtgattagagata

SEQ ID NO: 2121 - DNA, 43 bp, Artificial Sequence
  primer
gtaaaacgacggccagtttctgatatgttaagtgggttgaagt

SEQ ID NO: 2122 - DNA, 42 bp, Artificial Sequence
  primer
gtaaaacgacggccagtttagctaatatgccgttctaattgc

SEQ ID NO: 2123 - DNA, 21 bp, Artificial Sequence
  primer
tccaatttaggatgaatgcca

SEQ ID NO: 2124 - DNA, 38 bp, Artificial Sequence
  primer
gtaaaacgacggccagtaggactatcagagattgcccg

SEQ ID NO: 2125 - DNA, 40 bp, Artificial Sequence
  primer
gtaaaacgacggccagtgagtatggtcaaaccagttgctg

SEQ ID NO: 2126 - DNA, 44 bp, Artificial Sequence
  primer
gtaaaacgacggccagtgtctgagtttctgataatcaaggattt

SEQ ID NO: 2127 - DNA, 22 bp, Artificial Sequence
  primer
gagttcaccgaacagcagaaag

SEQ ID NO: 2128 - DNA, 39 bp, Artificial Sequence
  primer
gtaaaacgacggccagtaatttcttattgtgccagccag

SEQ ID NO: 2129 - DNA, 38 bp, Artificial Sequence
  primer
gtaaaacgacggccagtggccagttctttggacttacc

SEQ ID NO: 2130 - DNA, 21 bp, Artificial Sequence
  primer
aagactgcattgagcctctgc

SEQ ID NO: 2131 - DNA, 43 bp, Artificial Sequence
  primer
gtaaaacgacggccagtgagaattaactgagagagcaatcacc

SEQ ID NO: 2132 - DNA, 40 bp, Artificial Sequence
  primer
gtaaaacgacggccagtgcagactacagtttgttgatccc

SEQ ID NO: 2133 - DNA, 21 bp, Artificial Sequence
  primer
tacgtgcctattccctgttcc

SEQ ID NO: 2134 - DNA, 36 bp, Artificial Sequence
  primer
gtaaaacgacggccagtgggcaacatagcaagaccc

SEQ ID NO: 2135 - DNA, 42 bp, Artificial Sequence
  primer
gtaaaacgacggccagtccctatatatggtttgattcggttt

SEQ ID NO: 2136 - DNA, 20 bp, Artificial Sequence
  primer
gattaacgaatgtgggcacg

SEQ ID NO: 2137 - DNA, 21 bp, Artificial Sequence
  primer
tccctggtgagttagtgggtc

SEQ ID NO: 2138 - DNA, 38 bp, Artificial Sequence
  primer
gtaaaacgacggccagtgtcacatggcctgagtttctg

SEQ ID NO: 2139 - DNA, 20 bp, Artificial Sequence
  primer
cacaggccttggtcctactg

SEQ ID NO: 2140 - DNA, 38 bp, Artificial Sequence
  primer
gtaaaacgacggccagttctttggagcccgagtcatag

SEQ ID NO: 2141 - DNA, 37 bp, Artificial Sequence
  primer
gtaaaacgacggccagtcctgagcttctgagggaggt

SEQ ID NO: 2142 - DNA, 38 bp, Artificial Sequence
  primer
gtaaaacgacggccagtctcatctttgaggactgtcgc

SEQ ID NO: 2143 - DNA, 38 bp, Artificial Sequence
  primer
gtaaaacgacggccagtggtaatggtggcagctttagg

SEQ ID NO: 2144 - DNA, 39 bp, Artificial Sequence
  primer
gtaaaacgacggccagtcaagaagcctttcatcaaggtg

SEQ ID NO: 2145 - DNA, 36 bp, Artificial Sequence
  primer
gtaaaacgacggccagtcccatgtttaggaggcagc

SEQ ID NO: 2146 - DNA, 21 bp, Artificial Sequence
  primer
gttgtgtctccgactcccttc

SEQ ID NO: 2147 - DNA, 24 bp, Artificial Sequence
  primer
cagctcatagctggataaagaagg

SEQ ID NO: 2148 - DNA, 24 bp, Artificial Sequence
  primer
gggatatgggaaactacacctttc

SEQ ID NO: 2149 - DNA, 18 bp, Artificial Sequence
  primer
cctgggagacggagcaag

SEQ ID NO: 2150 - DNA, 27 bp, Artificial Sequence
  primer
agctaaagatttgatttacaaatgtcc

SEQ ID NO: 2151 - DNA, 38 bp, Artificial Sequence
  primer
gtaaaacgacggccagtgtttcataatgcccatgttgc

SEQ ID NO: 2152 - DNA, 21 bp, Artificial Sequence
  primer
gcaatcatgaacagcatggac

SEQ ID NO: 2153 - DNA, 21 bp, Artificial Sequence
  primer
tcagttctacaaatgcggtgg

SEQ ID NO: 2154 - DNA, 38 bp, Artificial Sequence
  primer
gtaaaacgacggccagtaggcaggactttgaggttgag

SEQ ID NO: 2155 - DNA, 40 bp, Artificial Sequence
  primer
gtaaaacgacggccagtccagtgccactaacagtaaatcc

SEQ ID NO: 2156 - DNA, 23 bp, Artificial Sequence
  primer
cgcagaggtgatgtttatagagc

SEQ ID NO: 2157 - DNA, 38 bp, Artificial Sequence
  primer
gtaaaacgacggccagtgacgatgagtcagggttaggg

SEQ ID NO: 2158 - DNA, 21 bp, Artificial Sequence
  primer
gacgatgagtcagggttaggg

SEQ ID NO: 2159 - DNA, 37 bp, Artificial Sequence
  primer
gtaaaacgacggccagttgctcagtcgccgaaagtag

SEQ ID NO: 2160 - DNA, 21 bp, Artificial Sequence
  primer
cttccctgaacttgctaaccg

SEQ ID NO: 2161 - DNA, 38 bp, Artificial Sequence
  primer
gtaaaacgacggccagttcaccacagatcaggtgttcc

SEQ ID NO: 2162 - DNA, 38 bp, Artificial Sequence
  primer
gtaaaacgacggccagttcgaggtaaggaatgactcgg

SEQ ID NO: 2163 - DNA, 37 bp, Artificial Sequence
  primer
gtaaaacgacggccagtctgttgcccacactctcctg

SEQ ID NO: 2164 - DNA, 22 bp, Artificial Sequence
  primer
ggatactcccaggtgttaaggg

SEQ ID NO: 2165 - DNA, 37 bp, Artificial Sequence
  primer
gtaaaacgacggccagtcaagctttggatcaggcaac

SEQ ID NO: 2166 - DNA, 20 bp, Artificial Sequence
  primer
ctggtgcataaggagcgaag

SEQ ID NO: 2167 - DNA, 21 bp, Artificial Sequence
  primer
aggtctccatccagcgtagac

SEQ ID NO: 2168 - DNA, 38 bp, Artificial Sequence
  primer
gtaaaacgacggccagtctggaagcacctgatgaactg

SEQ ID NO: 2169 - DNA, 38 bp, Artificial Sequence
  primer
gtaaaacgacggccagtcagtccatggcttacatggtg

SEQ ID NO: 2170 - DNA, 21 bp, Artificial Sequence
  primer
atgaatgcatccaaatcatgg

SEQ ID NO: 2171 - DNA, 21 bp, Artificial Sequence
  primer
tctgcagggctgtatggtaag

SEQ ID NO: 2172 - DNA, 37 bp, Artificial Sequence
  primer
gtaaaacgacggccagtagctgaggcggtaggcttag

SEQ ID NO: 2173 - DNA, 37 bp, Artificial Sequence
  primer
gtaaaacgacggccagttctccctcttcctctcaggc

SEQ ID NO: 2174 - DNA, 37 bp, Artificial Sequence
  primer
gtaaaacgacggccagtagtttgccactgtggtggag

SEQ ID NO: 2175 - DNA, 37 bp, Artificial Sequence
  primer
gtaaaacgacggccagtgtggtggttctctcgaggtg

SEQ ID NO: 2176 - DNA, 38 bp, Artificial Sequence
  primer
gtaaaacgacggccagtcacctggtgtatcgaggtgag

SEQ ID NO: 2177 - DNA, 37 bp, Artificial Sequence
  primer
gtaaaacgacggccagtgcctctagttcggcctgttt

SEQ ID NO: 2178 - DNA, 36 bp, Artificial Sequence
  primer
gtaaaacgacggccagtgggtcctagggcaaggaag

SEQ ID NO: 2179 - DNA, 38 bp, Artificial Sequence
  primer
gtaaaacgacggccagtgtgatggcaagattgatggtg

SEQ ID NO: 2180 - DNA, 38 bp, Artificial Sequence
  primer
gtaaaacgacggccagtagagaacaggtcagctgggag

SEQ ID NO: 2181 - DNA, 38 bp, Artificial Sequence
  primer
gtaaaacgacggccagtaggaccctggcttagagatcc

SEQ ID NO: 2182 - DNA, 38 bp, Artificial Sequence
  primer
gtaaaacgacggccagtgaccctctgtcagctcgaatc

SEQ ID NO: 2183 - DNA, 38 bp, Artificial Sequence
  primer
gtaaaacgacggccagtctaaatggacatgggtgggtc

SEQ ID NO: 2184 - DNA, 37 bp, Artificial Sequence
  primer
gtaaaacgacggccagtctgtcccacctcattccctc

SEQ ID NO: 2185 - DNA, 21 bp, Artificial Sequence
  primer
gagatggaagggagatggatg

SEQ ID NO: 2186 - DNA, 38 bp, Artificial Sequence
  primer
gtaaaacgacggccagttgaacctgagggaatggtagg

SEQ ID NO: 2187 - DNA, 21 bp, Artificial Sequence
  primer
ttccattgtcccaactctctg

SEQ ID NO: 2188 - DNA, 38 bp, Artificial Sequence
  primer
gtaaaacgacggccagtgtgaagggtacagaaggctgg

SEQ ID NO: 2189 - DNA, 38 bp, Artificial Sequence
  primer
gtaaaacgacggccagtctaggcagggatggtgtcttg

SEQ ID NO: 2190 - DNA, 38 bp, Artificial Sequence
  primer
gtaaaacgacggccagtatcctctgtctccaaagcctg

SEQ ID NO: 2191 - DNA, 38 bp, Artificial Sequence
  primer
gtaaaacgacggccagttacagtgggcaagagtggaag

SEQ ID NO: 2192 - DNA, 21 bp, Artificial Sequence
  primer
atgggtacagatggagcatgg

SEQ ID NO: 2193 - DNA, 38 bp, Artificial Sequence
  primer
gtaaaacgacggccagtaacctgaggctgtctctgtgg

SEQ ID NO: 2194 - DNA, 38 bp, Artificial Sequence
  primer
gtaaaacgacggccagtccgctcaggtatgttcagagg

SEQ ID NO: 2195 - DNA, 37 bp, Artificial Sequence
  primer
gtaaaacgacggccagtggcttccatttctgttgcag

SEQ ID NO: 2196 - DNA, 35 bp, Artificial Sequence
  primer
gtaaaacgacggccagttggaggaatggatggtgg

SEQ ID NO: 2197 - DNA, 38 bp, Artificial Sequence
  primer
gtaaaacgacggccagtgagccacagcaaactagaccc

SEQ ID NO: 2198 - DNA, 38 bp, Artificial Sequence
  primer
gtaaaacgacggccagtatttgcagtattgctccaccc

SEQ ID NO: 2199 - DNA, 38 bp, Artificial Sequence
  primer
gtaaaacgacggccagttaggcctggatgtcctatgtg

SEQ ID NO: 2200 - DNA, 20 bp, Artificial Sequence
  primer
ctgtgtgtggagtcctgctg

SEQ ID NO: 2201 - DNA, 39 bp, Artificial Sequence
  primer
gtaaaacgacggccagttgcctatttcctagtgacctgg

SEQ ID NO: 2202 - DNA, 38 bp, Artificial Sequence
  primer
gtaaaacgacggccagtcagcactcaggaagtcttggc

SEQ ID NO: 2203 - DNA, 20 bp, Artificial Sequence
  primer
gcaatgagccaagatcatcc

SEQ ID NO: 2204 - DNA, 38 bp, Artificial Sequence
  primer
gtaaaacgacggccagtaccacccactctggatacacg

SEQ ID NO: 2205 - DNA, 21 bp, Artificial Sequence
  primer
gctatggacagctcccttgag

SEQ ID NO: 2206 - DNA, 38 bp, Artificial Sequence
  primer
gtaaaacgacggccagttgcagagcttcacgcttactg

SEQ ID NO: 2207 - DNA, 38 bp, Artificial Sequence
  primer
gtaaaacgacggccagtctcctacacctccatgatgcc

SEQ ID NO: 2208 - DNA, 37 bp, Artificial Sequence
  primer
gtaaaacgacggccagtggatttctggcagtctgtgc

SEQ ID NO: 2209 - DNA, 38 bp, Artificial Sequence
  primer
gtaaaacgacggccagttgatcttaatgcagtccacgc

SEQ ID NO: 2210 - DNA, 38 bp, Artificial Sequence
  primer
gtaaaacgacggccagtctgagaggcgactattggagg

SEQ ID NO: 2211 - DNA, 21 bp, Artificial Sequence
  primer
aggatgcaggaagaaaccact

SEQ ID NO: 2212 - DNA, 25 bp, Artificial Sequence
  primer
gcattgaactgattatcttgacagc

SEQ ID NO: 2213 - DNA, 21 bp, Artificial Sequence
  primer
tgcctacatttctgctttccc

SEQ ID NO: 2214 - DNA, 41 bp, Artificial Sequence
  primer
gtaaaacgacggccagtttggcagaagaaatgttgtagttt

SEQ ID NO: 2215 - DNA, 39 bp, Artificial Sequence
  primer
gtaaaacgacggccagtgctgtataaagggtgtcatggg

SEQ ID NO: 2216 - DNA, 18 bp, Artificial Sequence
  primer
cctcatgatctgcctgcc

SEQ ID NO: 2217 - DNA, 40 bp, Artificial Sequence
  primer
gtaaaacgacggccagtggaggcacagactactaggcatc

SEQ ID NO: 2218 - DNA, 36 bp, Artificial Sequence
  primer
gtaaaacgacggccagttagcagcccaggcaatagg

SEQ ID NO: 2219 - DNA, 21 bp, Artificial Sequence
  primer
tctaggtggtgccaatgttcc

SEQ ID NO: 2220 - DNA, 22 bp, Artificial Sequence
  primer
ccttccatctgaaaccaagaac

SEQ ID NO: 2221 - DNA, 38 bp, Artificial Sequence
  primer
gtaaaacgacggccagttgtgacccttcctgaaacaag

SEQ ID NO: 2222 - DNA, 35 bp, Artificial Sequence
  primer
gtaaaacgacggccagtctacctcaggtcccgccc

SEQ ID NO: 2223 - DNA, 38 bp, Artificial Sequence
  primer
gtaaaacgacggccagtaggtgtaggaacgtgtgggag

SEQ ID NO: 2224 - DNA, 20 bp, Artificial Sequence
  primer
aggctttcagaagtggcagg

SEQ ID NO: 2225 - DNA, 38 bp, Artificial Sequence
  primer
gtaaaacgacggccagtcagaatgggtaggtttgaggg

SEQ ID NO: 2226 - DNA, 21 bp, Artificial Sequence
  primer
atgtggtcagtcagtgcttgg

SEQ ID NO: 2227 - DNA, 38 bp, Artificial Sequence
  primer
gtaaaacgacggccagttttaatggcagagaacccacc

SEQ ID NO: 2228 - DNA, 38 bp, Artificial Sequence
  primer
gtaaaacgacggccagtcaggtggtaaagaagccacag

SEQ ID NO: 2229 - DNA, 21 bp, Artificial Sequence
  primer
tggaatggatgtcactaaggc

SEQ ID NO: 2230 - DNA, 43 bp, Artificial Sequence
  primer
gtaaaacgacggccagtaaagggtagcatgctgatacattaag

SEQ ID NO: 2231 - DNA, 38 bp, Artificial Sequence
  primer
gtaaaacgacggccagttaagcggaggtcagaggtcag

SEQ ID NO: 2232 - DNA, 22 bp, Artificial Sequence
  primer
ttacaggcagtttgtgacatgc

SEQ ID NO: 2233 - DNA, 38 bp, Artificial Sequence
  primer
gtaaaacgacggccagtttgtttggattgtatgtggcg

SEQ ID NO: 2234 - DNA, 39 bp, Artificial Sequence
  primer
gtaaaacgacggccagtgatggacacatttctgttgctg

SEQ ID NO: 2235 - DNA, 22 bp, Artificial Sequence
  primer
gcttatcttccatcccgaattt

SEQ ID NO: 2236 - DNA, 39 bp, Artificial Sequence
  primer
gtaaaacgacggccagtgatgtactccagggcagatgtc

SEQ ID NO: 2237 - DNA, 40 bp, Artificial Sequence
  primer
gtaaaacgacggccagtccatattgtacttggtgcctgag

SEQ ID NO: 2238 - DNA, 18 bp, Artificial Sequence
  primer
cttgcacccaggaggtgg

SEQ ID NO: 2239 - DNA, 21 bp, Artificial Sequence
  primer
cacaacttctgacctcccagg

SEQ ID NO: 2240 - DNA, 20 bp, Artificial Sequence
  primer
ctttccaagcagggttctcc

SEQ ID NO: 2241 - DNA, 39 bp, Artificial Sequence
  primer
gtaaaacgacggccagtcagttactacaagcaggccacc

SEQ ID NO: 2242 - DNA, 37 bp, Artificial Sequence
  primer
gtaaaacgacggccagtagggtggaggtgtgtgacag

SEQ ID NO: 2243 - DNA, 38 bp, Artificial Sequence
  primer
gtaaaacgacggccagttgctgagtgaaccgtcttagg

SEQ ID NO: 2244 - DNA, 38 bp, Artificial Sequence
  primer
gtaaaacgacggccagttcctaaacaggtgcttctgcc

SEQ ID NO: 2245 - DNA, 21 bp, Artificial Sequence
  primer
ctccacagagtcccattcacc

SEQ ID NO: 2246 - DNA, 38 bp, Artificial Sequence
  primer
gtaaaacgacggccagtccactcctacactttcctggg

SEQ ID NO: 2247 - DNA, 37 bp, Artificial Sequence
  primer
gtaaaacgacggccagttccactgaattggaagcagg

SEQ ID NO: 2248 - DNA, 38 bp, Artificial Sequence
  primer
gtaaaacgacggccagtccatgttccagtttcatgcag

SEQ ID NO: 2249 - DNA, 41 bp, Artificial Sequence
  primer
gtaaaacgacggccagtaagaagcaagcaactaacagaacc

SEQ ID NO: 2250 - DNA, 42 bp, Artificial Sequence
  primer
gtaaaacgacggccagtacatttaagacaatcctgttatggc

SEQ ID NO: 2251 - DNA, 35 bp, Artificial Sequence
  primer
gtaaaacgacggccagtgagccaccacttagcccg

SEQ ID NO: 2252 - DNA, 26 bp, Artificial Sequence
  primer
ggtgataattgaaggaatttgtcttg

SEQ ID NO: 2253 - DNA, 41 bp, Artificial Sequence
  primer
gtaaaacgacggccagtgtggtaggttagggaaataacagc

SEQ ID NO: 2254 - DNA, 22 bp, Artificial Sequence
  primer
cacttgaacccgagaggtagaa

SEQ ID NO: 2255 - DNA, 38 bp, Artificial Sequence
  primer
gtaaaacgacggccagtctgcaggtaggaagcagcata

SEQ ID NO: 2256 - DNA, 36 bp, Artificial Sequence
  primer
gtaaaacgacggccagtagctcctggccacactttg

SEQ ID NO: 2257 - DNA, 24 bp, Artificial Sequence
  primer
ttagggaacttgtcctttggtaag

SEQ ID NO: 2258 - DNA, 40 bp, Artificial Sequence
  primer
gtaaaacgacggccagttttcttctttcagcaggagtgag

SEQ ID NO: 2259 - DNA, 21 bp, Artificial Sequence
  primer
acgacagagcaagactttgcc

SEQ ID NO: 2260 - DNA, 35 bp, Artificial Sequence
  primer
gtaaaacgacggccagtactggagctcaggctcgc

SEQ ID NO: 2261 - DNA, 38 bp, Artificial Sequence
  primer
gtaaaacgacggccagtttcgaagtgcaaccgtttatc

SEQ ID NO: 2262 - DNA, 23 bp, Artificial Sequence
  primer
tgcttaggtagggcaataaggtc

SEQ ID NO: 2263 - DNA, 38 bp, Artificial Sequence
  primer
gtaaaacgacggccagtttccactcctgtgatgacctg

SEQ ID NO: 2264 - DNA, 24 bp, Artificial Sequence
  primer
tccattaacatctatgtcagcagc

SEQ ID NO: 2265 - DNA, 21 bp, Artificial Sequence
  primer
tcaaagtgctgggattacagg

SEQ ID NO: 2266 - DNA, 40 bp, Artificial Sequence
  primer
gtaaaacgacggccagtgctgctacagtgcacaagttatc

SEQ ID NO: 2267 - DNA, 38 bp, Artificial Sequence
  primer
gtaaaacgacggccagtgctcagcactttcctttcctg

SEQ ID NO: 2268 - DNA, 21 bp, Artificial Sequence
  primer
ctgtcttcgcctttccatttg

SEQ ID NO: 2269 - DNA, 38 bp, Artificial Sequence
  primer
gtaaaacgacggccagtccttcctcttcctgctctttg

SEQ ID NO: 2270 - DNA, 21 bp, Artificial Sequence
  primer
ggaagctgaaagcaagaccag

SEQ ID NO: 2271 - DNA, 20 bp, Artificial Sequence
  primer
acctgcaaatgcatgtctcc

SEQ ID NO: 2272 - DNA, 18 bp, Artificial Sequence
  primer
ctgcttccactgctgctg

SEQ ID NO: 2273 - DNA, 35 bp, Artificial Sequence
  primer
gtaaaacgacggccagtctgagccgcgctaaactg

SEQ ID NO: 2274 - DNA, 21 bp, Artificial Sequence
  primer
ggtgctggccttctgtacatc

SEQ ID NO: 2275 - DNA, 21 bp, Artificial Sequence
  primer
acctgctgtcagatttctggg

SEQ ID NO: 2276 - DNA, 23 bp, Artificial Sequence
  primer
tgattacattgggtcctacttgc

SEQ ID NO: 2277 - DNA, 20 bp, Artificial Sequence
  primer
ggagccagatgttgaaggtc

SEQ ID NO: 2278 - DNA, 38 bp, Artificial Sequence
  primer
gtaaaacgacggccagtaaagcagaggaggtgttgctg

SEQ ID NO: 2279 - DNA, 38 bp, Artificial Sequence
  primer
gtaaaacgacggccagttctcagctgctacaatccagc

SEQ ID NO: 2280 - DNA, 21 bp, Artificial Sequence
  primer
ccagctctaactttgggcaag

SEQ ID NO: 2281 - DNA, 19 bp, Artificial Sequence
  primer
ctctcagagctgtgccgtg

SEQ ID NO: 2282 - DNA, 38 bp, Artificial Sequence
  primer
gtaaaacgacggccagttgtgctacggtatgttcagcc

SEQ ID NO: 2283 - DNA, 38 bp, Artificial Sequence
  primer
gtaaaacgacggccagttggtaaggattccattcagcc

SEQ ID NO: 2284 - DNA, 39 bp, Artificial Sequence
  primer
gtaaaacgacggccagtccatgtgtactttcatcccagg

SEQ ID NO: 2285 - DNA, 21 bp, Artificial Sequence
  primer
tcctcctgtcatttcagaccc

SEQ ID NO: 2286 - DNA, 38 bp, Artificial Sequence
  primer
gtaaaacgacggccagtgttgagattccaacagctggg

SEQ ID NO: 2287 - DNA, 21 bp, Artificial Sequence
  primer
tttccaggagaggtaggatgc

SEQ ID NO: 2288 - DNA, 38 bp, Artificial Sequence
  primer
gtaaaacgacggccagtctctgagacctttggaggctg

SEQ ID NO: 2289 - DNA, 38 bp, Artificial Sequence
  primer
gtaaaacgacggccagtcccagcttacaccttctaggc

SEQ ID NO: 2290 - DNA, 21 bp, Artificial Sequence
  primer
agagctaggatgtgcatgtgg

SEQ ID NO: 2291 - DNA, 37 bp, Artificial Sequence
  primer
gtaaaacgacggccagttgccaaggtcacctggttag

SEQ ID NO: 2292 - DNA, 21 bp, Artificial Sequence
  primer
atccttctgtgcgaaggctac

SEQ ID NO: 2293 - DNA, 38 bp, Artificial Sequence
  primer
gtaaaacgacggccagttgctggagctctttgactacg

SEQ ID NO: 2294 - DNA, 36 bp, Artificial Sequence
  primer
gtaaaacgacggccagtcctctgccaccaccttctc

SEQ ID NO: 2295 - DNA, 38 bp, Artificial Sequence
  primer
gtaaaacgacggccagtctcgtcctcacacagcttcag

SEQ ID NO: 2296 - DNA, 21 bp, Artificial Sequence
  primer
ctgaagcctagaccaccatcc

SEQ ID NO: 2297 - DNA, 38 bp, Artificial Sequence; identical to SEQ ID NO: 2295
  primer

SEQ ID NO: 2298 - DNA, 38 bp, Artificial Sequence
  primer
gtaaaacgacggccagttgtctcccaccctctcttctc

SEQ ID NO: 2299 - DNA, 21 bp, Artificial Sequence
  primer
gctgagagggtgcgctactac

SEQ ID NO: 2300 - DNA, 38 bp, Artificial Sequence
  primer
gtaaaacgacggccagtgagatgcgggcttcagtattc

SEQ ID NO: 2301 - DNA, 21 bp, Artificial Sequence
  primer
agaggaggtgtcagggtgttc

SEQ ID NO: 2302 - DNA, 21 bp, Artificial Sequence
  primer
agaccctaaaccctcagctcc

SEQ ID NO: 2303 - DNA, 39 bp, Artificial Sequence
  primer
gtaaaacgacggccagtcagccctccctatacccttatg

SEQ ID NO: 2304 - DNA, 37 bp, Artificial Sequence
  primer
gtaaaacgacggccagtataggtaagggcgagcctcc

SEQ ID NO: 2305 - DNA, 38 bp, Artificial Sequence
  primer
gtaaaacgacggccagtagaacccacagctgcttcttg

SEQ ID NO: 2306 - DNA, 21 bp, Artificial Sequence
  primer
agatgtcagagctgcttggtg

SEQ ID NO: 2307 - DNA, 38 bp, Artificial Sequence
  primer
gtaaaacgacggccagtgtctccacaggtgacattggg

SEQ ID NO: 2308 - DNA, 21 bp, Artificial Sequence
  primer
ctctcgtcctcacacagcttc

SEQ ID NO: 2309 - DNA, 38 bp, Artificial Sequence
  primer
gtaaaacgacggccagtcccagtcttgggatctctgtc

SEQ ID NO: 2310 - DNA, 21 bp, Artificial Sequence
  primer
cgcttgccctgagtttagaag

SEQ ID NO: 2311 - DNA, 37 bp, Artificial Sequence
  primer
gtaaaacgacggccagtagatgccgatcgagattgtg

SEQ ID NO: 2312 - DNA, 21 bp, Artificial Sequence
  primer
tcaccctctgcaatatcaacc

SEQ ID NO: 2313 - DNA, 21 bp, Artificial Sequence
  primer
cttgctaggatacgggactgg

SEQ ID NO: 2314 - DNA, 37 bp, Artificial Sequence
  primer
gtaaaacgacggccagtagggagacaagtacgcaggc

SEQ ID NO: 2315 - DNA, 21 bp, Artificial Sequence
  primer
cagctgtgttgactttgctgg

SEQ ID NO: 2316 - DNA, 36 bp, Artificial Sequence
  primer
gtaaaacgacggccagtggccagtaaaggccctcag

SEQ ID NO: 2317 - DNA, 21 bp, Artificial Sequence
  primer
aagctaacacacatccgggac

SEQ ID NO: 2318 - DNA, 21 bp, Artificial Sequence
  primer
acagggagaacttcctggtcc

SEQ ID NO: 2319 - DNA, 21 bp, Artificial Sequence
  primer
gggtgtcctactgggagtttg

SEQ ID NO: 2320 - DNA, 21 bp, Artificial Sequence
  primer
ttgtttctgaaccagcctgtg

SEQ ID NO: 2321 - DNA, 38 bp, Artificial Sequence
  primer
gtaaaacgacggccagtcccatacctggttctgtcaac

SEQ ID NO: 2322 - DNA, 21 bp, Artificial Sequence
  primer
cccatgtagccaacacttaca

SEQ ID NO: 2323 - DNA, 21 bp, Artificial Sequence
  primer
gcaaataagggagagtgtggg

SEQ ID NO: 2324 - DNA, 21 bp, Artificial Sequence
  primer
tcacatgcaaattgacgaatg

SEQ ID NO: 2325 - DNA, 41 bp, Artificial Sequence
  primer
gtaaaacgacggccagtcaccgattcaaccactaaagtatg

SEQ ID NO: 2326 - DNA, 40 bp, Artificial Sequence
  primer
gtaaaacgacggccagtaatgtgtaccagcttcttgatgg

SEQ ID NO: 2327 - DNA, 39 bp, Artificial Sequence
  primer
gtaaaacgacggccagtgcattattcttcctcccaacac

SEQ ID NO: 2328 - DNA, 39 bp, Artificial Sequence
  primer
gtaaaacgacggccagtggaacttccaggccttatattg

SEQ ID NO: 2329 - DNA, 24 bp, Artificial Sequence
  primer
tgaatattacctttattcgacggg

SEQ ID NO: 2330 - DNA, 26 bp, Artificial Sequence
  primer
tgatgatttgtatgaataccactttg

SEQ ID NO: 2331 - DNA, 21 bp, Artificial Sequence
  primer
cctaccggtaccacaggaatc

SEQ ID NO: 2332 - DNA, 38 bp, Artificial Sequence
  primer
gtaaaacgacggccagtggtcagagacaccctccagtc

SEQ ID NO: 2333 - DNA, 37 bp, Artificial Sequence
  primer
gtaaaacgacggccagtctgcttgtgtctgacgggac

SEQ ID NO: 2334 - DNA, 21 bp, Artificial Sequence
  primer
gtgagtggtgagactgccttg

SEQ ID NO: 2335 - DNA, 38 bp, Artificial Sequence
  primer
gtaaaacgacggccagtcccgcagagttctatctccag

SEQ ID NO: 2336 - DNA, 21 bp, Artificial Sequence
  primer
tggttggtaagtgatgcctcc

SEQ ID NO: 2337 - DNA, 21 bp, Artificial Sequence
  primer
tgaccagtgatcctaacacgc

SEQ ID NO: 2338 - DNA, 38 bp, Artificial Sequence
  primer
gtaaaacgacggccagtgagttgggcaagggtcatatc

SEQ ID NO: 2339 - DNA, 21 bp, Artificial Sequence
  primer
aggacatgagagtaaacgggc

SEQ ID NO: 2340 - DNA, 39 bp, Artificial Sequence
  primer
gtaaaacgacggccagttctgcaggacctatctctgacc

SEQ ID NO: 2341 - DNA, 21 bp, Artificial Sequence
  primer
aaagtggtaccagcatcagcc

SEQ ID NO: 2342 - DNA, 38 bp, Artificial Sequence
  primer
gtaaaacgacggccagtcaaggaaggcctgaggtagag

SEQ ID NO: 2343 - DNA, 37 bp, Artificial Sequence
  primer
gtaaaacgacggccagtggtccaagctgtcaggtgag

SEQ ID NO: 2344 - DNA, 35 bp, Artificial Sequence
  primer
gtaaaacgacggccagtactctggagcggaggagg

SEQ ID NO: 2345 - DNA, 37 bp, Artificial Sequence
  primer
gtaaaacgacggccagtaggcagattccctccagaag

SEQ ID NO: 2346 - DNA, 38 bp, Artificial Sequence
  primer
gtaaaacgacggccagtcctgaccctgactttcaggac

SEQ ID NO: 2347 - DNA, 38 bp, Artificial Sequence
  primer
gtaaaacgacggccagtagtaaggactggtgcaggctc

SEQ ID NO: 2348 - DNA, 38 bp, Artificial Sequence
  primer
gtaaaacgacggccagtccagtggaagagccgacttac

SEQ ID NO: 2349 - DNA, 38 bp, Artificial Sequence
  primer
gtaaaacgacggccagtaatgacagtggcagcatcttg

SEQ ID NO: 2350 - DNA, 38 bp, Artificial Sequence
  primer
gtaaaacgacggccagttttcatgcacagggagttgac

SEQ ID NO: 2351 - DNA, 21 bp, Artificial Sequence
  primer
cctgtctttcaggtgccaatc

SEQ ID NO: 2352 - DNA, 37 bp, Artificial Sequence
  primer
gtaaaacgacggccagtatctccctggcctcactttc

SEQ ID NO: 2353 - DNA, 37 bp, Artificial Sequence
  primer
gtaaaacgacggccagtctttcctgcctgaaactccc

SEQ ID NO: 2354 - DNA, 38 bp, Artificial Sequence
  primer
gtaaaacgacggccagtatgctcctccagacctcaaag

SEQ ID NO: 2355 - DNA, 21 bp, Artificial Sequence
  primer
attgccacagtttctgcagtc

SEQ ID NO: 2356 - DNA, 38 bp, Artificial Sequence
  primer
gtaaaacgacggccagtgagggataatggcttctggtg

SEQ ID NO: 2357 - DNA, 38 bp, Artificial Sequence
  primer
gtaaaacgacggccagttgcaacttaattccactgccc

SEQ ID NO: 2358 - DNA, 22 bp, Artificial Sequence
  primer
cgttgtatcaagtcatggcatc

SEQ ID NO: 2359 - DNA, 38 bp, Artificial Sequence
  primer
gtaaaacgacggccagtgactctgtaagccactgctgg

SEQ ID NO: 2360 - DNA, 38 bp, Artificial Sequence
  primer
gtaaaacgacggccagttttcctcaaagaggtgctgtg

SEQ ID NO: 2361 - DNA, 21 bp, Artificial Sequence
  primer
acaccaaagatgatgtgtgcc

SEQ ID NO: 2362 - DNA, 38 bp, Artificial Sequence
  primer
gtaaaacgacggccagtgttccctccagtttagccctc

SEQ ID NO: 2363 - DNA, 38 bp, Artificial Sequence
  primer
gtaaaacgacggccagttatagcaaggcccactgttcc

SEQ ID NO: 2364 - DNA, 35 bp, Artificial Sequence
  primer
gtaaaacgacggccagtatcacaggcacaccaggg

SEQ ID NO: 2365 - DNA, 19 bp, Artificial Sequence
  primer
ggtgattgtgcacagaggc

SEQ ID NO: 2366 - DNA, 21 bp, Artificial Sequence
  primer
tgatagctgtgggcagagttg

SEQ ID NO: 2367 - DNA, 38 bp, Artificial Sequence
  primer
gtaaaacgacggccagtatggagagtggatgtcaggtg

SEQ ID NO: 2368 - DNA, 38 bp, Artificial Sequence
  primer
gtaaaacgacggccagtcctccagccttgggtcttaac

SEQ ID NO: 2369 - DNA, 37 bp, Artificial Sequence
  primer
gtaaaacgacggccagtcaacccaagttcaaaggctg

SEQ ID NO: 2370 - DNA, 38 bp, Artificial Sequence
  primer
gtaaaacgacggccagtcctaaaccttgaccttcagcg

SEQ ID NO: 2371 - DNA, 41 bp, Artificial Sequence
  primer
gtaaaacgacggccagttccacatacagaaagatacatggc

SEQ ID NO: 2372 - DNA, 38 bp, Artificial Sequence
  primer
gtaaaacgacggccagtatgacctgatgtctgccaacc

SEQ ID NO: 2373 - DNA, 21 bp, Artificial Sequence
  primer
ttgcatccctttgagttgatg

SEQ ID NO: 2374 - DNA, 27 bp, Artificial Sequence
  primer
tcatcaagttctaggaagaaggaatac

SEQ ID NO: 2375 - DNA, 30 bp, Artificial Sequence
  primer
caacactaggaattactaacagcttaattt

SEQ ID NO: 2376 - DNA, 21 bp, Artificial Sequence
  primer
ccatagcctctgtaaccacca

SEQ ID NO: 2377 - DNA, 41 bp, Artificial Sequence
  primer
gtaaaacgacggccagttgtctctaggacataagaggtggg

SEQ ID NO: 2378 - DNA, 23 bp, Artificial Sequence
  primer
caacctactccaaatcccttagc

SEQ ID NO: 2379 - DNA, 22 bp, Artificial Sequence
  primer
aactgcactagttatgcccacc

SEQ ID NO: 2380 - DNA, 21 bp, Artificial Sequence
  primer
ctctttggttacttgggctcc

SEQ ID NO: 2381 - DNA, 21 bp, Artificial Sequence
  primer
tggaaggaaagagcggtttag

SEQ ID NO: 2382 - DNA, 38 bp, Artificial Sequence
  primer
gtaaaacgacggccagttgtgcttgaattccaaacctc

SEQ ID NO: 2383 - DNA, 37 bp, Artificial Sequence
  primer
gtaaaacgacggccagtgcttcctgaatcagacgctc

SEQ ID NO: 2384 - DNA, 21 bp, Artificial Sequence
  primer
gttgatttcatgtgctttggg

SEQ ID NO: 2385 - DNA, 19 bp, Artificial Sequence
  primer
actacagacatgcgccacc

SEQ ID NO: 2386 - DNA, 38 bp, Artificial Sequence
  primer
gtaaaacgacggccagtgcctccttaacacagattccc

SEQ ID NO: 2387 - DNA, 23 bp, Artificial Sequence
  primer
aagagcacatttacacagccttg

SEQ ID NO: 2388 - DNA, 38 bp, Artificial Sequence
  primer
gtaaaacgacggccagtaagctgctgaagcacagagtg

SEQ ID NO: 2389 - DNA, 21 bp, Artificial Sequence
  primer
ggcaaacttcagaaagcattg

SEQ ID NO: 2390 - DNA, 36 bp, Artificial Sequence
  primer
gtaaaacgacggccagtatttggcccacagccatac

SEQ ID NO: 2391 - DNA, 38 bp, Artificial Sequence
  primer
gtaaaacgacggccagtcattcaagacctcaagggtca

SEQ ID NO: 2392 - DNA, 21 bp, Artificial Sequence
  primer
ttcccacccttagacaccttg

SEQ ID NO: 2393 - DNA, 22 bp, Artificial Sequence
  primer
tgttattagggctcagccacac

SEQ ID NO: 2394 - DNA, 39 bp, Artificial Sequence
  primer
gtaaaacgacggccagtaatcaacgtgaattgggctaac

SEQ ID NO: 2395 - DNA, 22 bp, Artificial Sequence
  primer
tgagtcattaaatcatgtggca

SEQ ID NO: 2396 - DNA, 38 bp, Artificial Sequence
  primer
gtaaaacgacggccagttgtcccaggaatgtcatcaac

SEQ ID NO: 2397 - DNA, 38 bp, Artificial Sequence
  primer
gtaaaacgacggccagttgattctgacacaggtggttg

SEQ ID NO: 2398 - DNA, 39 bp, Artificial Sequence; identical to SEQ ID NO: 2394
  primer

SEQ ID NO: 2399 - DNA, 38 bp, Artificial Sequence
  primer
gtaaaacgacggccagtaaagctccaaacggattaagg

SEQ ID NO: 2400 - DNA, 38 bp, Artificial Sequence
  primer
gtaaaacgacggccagtcgacagtgccctaatctcctc

SEQ ID NO: 2401 - DNA, 20 bp, Artificial Sequence
  primer
cctgtctctgctttcctggg

SEQ ID NO: 2402 - DNA, 39 bp, Artificial Sequence
  primer
gtaaaacgacggccagttgctaccaatatgtggacaccc

SEQ ID NO: 2403 - DNA, 38 bp, Artificial Sequence
  primer
gtaaaacgacggccagtcttcttggtacaggccgagag

SEQ ID NO: 2404 - DNA, 21 bp, Artificial Sequence
  primer
gacatcagtgacgctgtttgg

SEQ ID NO: 2405 - DNA, 21 bp, Artificial Sequence
  primer
tctctttctctgcatccctcc

SEQ ID NO: 2406 - DNA, 22 bp, Artificial Sequence
  primer
tgtggtcctgcattacacagac

SEQ ID NO: 2407 - DNA, 38 bp, Artificial Sequence
  primer
gtaaaacgacggccagttctccgctgagctgaagagtc

SEQ ID NO: 2408 - DNA, 21 bp, Artificial Sequence
  primer
tcatcctccctctcgtctttc

SEQ ID NO: 2409 - DNA, 21 bp, Artificial Sequence
  primer
gtacgttagtctggacctgcg

SEQ ID NO: 2410 - DNA, 36 bp, Artificial Sequence
  primer
gtaaaacgacggccagtaaaccgagcctgaaagcag

SEQ ID NO: 2411 - DNA, 21 bp, Artificial Sequence
  primer
ccatggctacctttatgggtc

SEQ ID NO: 2412 - DNA, 38 bp, Artificial Sequence
  primer
gtaaaacgacggccagtttcttgggcgcaactataagg

SEQ ID NO: 2413 - DNA, 38 bp, Artificial Sequence
  primer
gtaaaacgacggccagtactttgcctgacctccttcac

SEQ ID NO: 2414 - DNA, 40 bp, Artificial Sequence
  primer
gtaaaacgacggccagtagacttgcacaccaagaattacc

SEQ ID NO: 2415 - DNA, 39 bp, Artificial Sequence
  primer
gtaaaacgacggccagtctcctgtttctgttgctgaaag

SEQ ID NO: 2416 - DNA, 21 bp, Artificial Sequence
  primer
gctaaactgtctgagggcagc

SEQ ID NO: 2417 - DNA, 38 bp, Artificial Sequence
  primer
gtaaaacgacggccagtaaacaagatcccaggaacagg

SEQ ID NO: 2418 - DNA, 38 bp, Artificial Sequence
  primer
gtaaaacgacggccagtatacagatgctgacaccaggg

SEQ ID NO: 2419 - DNA, 21 bp, Artificial Sequence
  primer
agagtgtcctgcctctggttc

SEQ ID NO: 2420 - DNA, 21 bp, Artificial Sequence
  primer
aatttggtccatggaaactgg

SEQ ID NO: 2421 - DNA, 39 bp, Artificial Sequence
  primer
gtaaaacgacggccagtctggtactgtgtatgtcctgcc

SEQ ID NO: 2422 - DNA, 22 bp, Artificial Sequence
  primer
gagggtttcctgacccagtaac

SEQ ID NO: 2423 - DNA, 21 bp, Artificial Sequence
  primer
acttgcattgattctgcttcg

SEQ ID NO: 2424 - DNA, 36 bp, Artificial Sequence
  primer
gtaaaacgacggccagtagccaccacactcagcctc

SEQ ID NO: 2425 - DNA, 20 bp, Artificial Sequence
  primer
ggaagggaggatgagacctg

SEQ ID NO: 2426 - DNA, 38 bp, Artificial Sequence
  primer
gtaaaacgacggccagtttgaggcactaacaatcccag

SEQ ID NO: 2427 - DNA, 39 bp, Artificial Sequence
  primer
gtaaaacgacggccagtgggaaccgtgagagttacattg

SEQ ID NO: 2428 - DNA, 38 bp, Artificial Sequence
  primer
gtaaaacgacggccagtagcagctcgggaaatctaaag

SEQ ID NO: 2429 - DNA, 38 bp, Artificial Sequence
  primer
gtaaaacgacggccagtaccagtgtgggcaggtttaag

SEQ ID NO: 2430 - DNA, 19 bp, Artificial Sequence
  primer
atcctggctccttgagtgg

SEQ ID NO: 2431 - DNA, 21 bp, Artificial Sequence
  primer
ccactagtaggtgggaaaggg

SEQ ID NO: 2432 - DNA, 19 bp, Artificial Sequence
  primer
gagctaggaggcagggtcc

SEQ ID NO: 2433 - DNA, 21 bp, Artificial Sequence
  primer
gggaagatagtgcctccacac

SEQ ID NO: 2434 - DNA, 38 bp, Artificial Sequence
  primer
gtaaaacgacggccagtaagtcaatccctgctgtcctc

SEQ ID NO: 2435 - DNA, 21 bp, Artificial Sequence
  primer
gagcttagggatctgtgaccc

SEQ ID NO: 2436 - DNA, 37 bp, Artificial Sequence
  primer
gtaaaacgacggccagtggattggtttcctctcccag

SEQ ID NO: 2437 - DNA, 21 bp, Artificial Sequence
  primer
tttagggaaatggagctgtcg

SEQ ID NO: 2438 - DNA, 38 bp, Artificial Sequence
  primer
gtaaaacgacggccagtagagttctgaggcctgaatgg

SEQ ID NO: 2439 - DNA, 38 bp, Artificial Sequence
  primer
gtaaaacgacggccagtaagtgtcttcaaggcatgtgg

SEQ ID NO: 2440 - DNA, 38 bp, Artificial Sequence
  primer
gtaaaacgacggccagtggttccacaggctaactccag

SEQ ID NO: 2441 - DNA, 22 bp, Artificial Sequence
  primer
tctggtggcataggtaatggag

SEQ ID NO: 2442 - DNA, 38 bp, Artificial Sequence
  primer
gtaaaacgacggccagtctgaggagcagcacttgtcac

SEQ ID NO: 2443 - DNA, 20 bp, Artificial Sequence
  primer
actgaatgcgccaaacactg

SEQ ID NO: 2444 - DNA, 38 bp, Artificial Sequence
  primer
gtaaaacgacggccagttagccagtaccttgtccaccc

SEQ ID NO: 2445 - DNA, 38 bp, Artificial Sequence
  primer
gtaaaacgacggccagtgagggatgatgagggctttag

SEQ ID NO: 2446 - DNA, 21 bp, Artificial Sequence
  primer
cctttacggttgtgatgaggc

SEQ ID NO: 2447 - DNA, 38 bp, Artificial Sequence
  primer
gtaaaacgacggccagtgaggcagtcagtattcctggg

SEQ ID NO: 2448 - DNA, 38 bp, Artificial Sequence
  primer
gtaaaacgacggccagtcccttaaacggtgctgtcttg

SEQ ID NO: 2449 - DNA, 21 bp, Artificial Sequence
  primer
ccagtgggcaagtgtgatttc

SEQ ID NO: 2450 - DNA, 38 bp, Artificial Sequence
  primer
gtaaaacgacggccagtggcatctctggacccttactg

SEQ ID NO: 2451 - DNA, 38 bp, Artificial Sequence
  primer
gtaaaacgacggccagtaaatcttccttgtgtccaggc

SEQ ID NO: 2452 - DNA, 39 bp, Artificial Sequence
  primer
gtaaaacgacggccagtgagcttgcttgaggcttaaatg

SEQ ID NO: 2453 - DNA, 22 bp, Artificial Sequence
  primer
gggacatgaggtagtagggagc

SEQ ID NO: 2454 - DNA, 22 bp, Artificial Sequence
  primer
gccagagtttacgacattcctg

SEQ ID NO: 2455 - DNA, 21 bp, Artificial Sequence
  primer
tgacttgtttagggagatggg

SEQ ID NO: 2456 - DNA, 36 bp, Artificial Sequence
  primer
gtaaaacgacggccagtagcagggccctagaaggag

SEQ ID NO: 2457 - DNA, 21 bp, Artificial Sequence
  primer
gtgccacatggaatggtacac

SEQ ID NO: 2458 - DNA, 21 bp, Artificial Sequence
  primer
tgctgggaattgaactgagtc

SEQ ID NO: 2459 - DNA, 21 bp, Artificial Sequence
  primer
cctgtaatgctaccacccaga

SEQ ID NO: 2460 - DNA, 22 bp, Artificial Sequence
  primer
aaacttcccactgctttgtgtc

SEQ ID NO: 2461 - DNA, 21 bp, Artificial Sequence
  primer
aggcagcccagagaaacataa

SEQ ID NO: 2462 - DNA, 39 bp, Artificial Sequence
  primer
gtaaaacgacggccagtttctgatgtggtaaagccactg

SEQ ID NO: 2463 - DNA, 23 bp, Artificial Sequence
  primer
cctttgttaattccaagtgtccc

SEQ ID NO: 2464 - DNA, 38 bp, Artificial Sequence
  primer
gtaaaacgacggccagtttctttgcactgacaattccc

SEQ ID NO: 2465 - DNA, 22 bp, Artificial Sequence
  primer
catctcccagcattcagaacac

SEQ ID NO: 2466 - DNA, 26 bp, Artificial Sequence
  primer
caaagagacctaatagtgacacctgc

SEQ ID NO: 2467 - DNA, 27 bp, Artificial Sequence
  primer
tggtaagagattcactgtataacctgc

SEQ ID NO: 2468 - DNA, 38 bp, Artificial Sequence
  primer
gtaaaacgacggccagtatacgcaagttcgcagaagtg

SEQ ID NO: 2469 - DNA, 39 bp, Artificial Sequence
  primer
gtaaaacgacggccagtgcttctgcatttactgatgagg

SEQ ID NO: 2470 - DNA, 21 bp, Artificial Sequence
  primer
actaagccttcctcccagtcc

SEQ ID NO: 2471 - DNA, 40 bp, Artificial Sequence
  primer
gtaaaacgacggccagtcactttaccctctttccttgtgg

SEQ ID NO: 2472 - DNA, 38 bp, Artificial Sequence
  primer
gtaaaacgacggccagtctgatgaggtagggccttgtc

SEQ ID NO: 2473 - DNA, 21 bp, Artificial Sequence
  primer
cactcagcaagcaaggagatg

SEQ ID NO: 2474 - DNA, 38 bp, Artificial Sequence
  primer
gtaaaacgacggccagtgtacgagggagagatgccaag

SEQ ID NO: 2475 - DNA, 21 bp, Artificial Sequence
  primer
ctcttctttgcatgtggcatc

SEQ ID NO: 2476 - DNA, 38 bp, Artificial Sequence
  primer
gtaaaacgacggccagtgtgatcacaaatgtgttgggc

SEQ ID NO: 2477 - DNA, 21 bp, Artificial Sequence
  primer
tgacagagctgttggtgtgtg

SEQ ID NO: 2478 - DNA, 38 bp, Artificial Sequence
  primer
gtaaaacgacggccagttctttctgagaggtggcaagg

SEQ ID NO: 2479 - DNA, 25 bp, Artificial Sequence
  primer
ccaaagtattccttcttctcaagtg

SEQ ID NO: 2480 - DNA, 36 bp, Artificial Sequence
  primer
gtaaaacgacggccagtatgaagggagcgtggtcag

SEQ ID NO: 2481 - DNA, 23 bp, Artificial Sequence
  primer
tgaacagtggtctctggaaactg

SEQ ID NO: 2482 - DNA, 38 bp, Artificial Sequence
  primer
gtaaaacgacggccagtgaaactcttgccaatggtctg

SEQ ID NO: 2483 - DNA, 21 bp, Artificial Sequence
  primer
agtggcagtgattccgtatcc

SEQ ID NO: 2484 - DNA, 37 bp, Artificial Sequence
  primer
gtaaaacgacggccagtatgtgagctaccatgcccag

SEQ ID NO: 2485 - DNA, 37 bp, Artificial Sequence
  primer
gtaaaacgacggccagtggccaccatcgtagagactg

SEQ ID NO: 2486 - DNA, 38 bp, Artificial Sequence
  primer
gtaaaacgacggccagtgccatggagaacaatgcttag

SEQ ID NO: 2487 - DNA, 36 bp, Artificial Sequence
  primer
gtaaaacgacggccagtatctgcaaacccatccagc

SEQ ID NO: 2488 - DNA, 37 bp, Artificial Sequence
  primer
gtaaaacgacggccagtcatcatgccagctctctcac

SEQ ID NO: 2489 - DNA, 38 bp, Artificial Sequence
  primer
gtaaaacgacggccagtcatgtgctgctggtgttactg

SEQ ID NO: 2490 - DNA, 37 bp, Artificial Sequence
  primer
gtaaaacgacggccagtattgcgttcacagggttctg

SEQ ID NO: 2491 - DNA, 20 bp, Artificial Sequence
  primer
ctgctttgtcatccctgtcc

SEQ ID NO: 2492 - DNA, 37 bp, Artificial Sequence
  primer
gtaaaacgacggccagtaggttgccacatggactgag

SEQ ID NO: 2493 - DNA, 38 bp, Artificial Sequence
  primer
gtaaaacgacggccagttttcagagtcagaagggaggc

SEQ ID NO: 2494 - DNA, 21 bp, Artificial Sequence
  primer
gctgctcctaccagttccatc

SEQ ID NO: 2495 - DNA, 21 bp, Artificial Sequence
  primer
ataagcagcaatgtgaatggc

SEQ ID NO: 2496 - DNA, 19 bp, Artificial Sequence
  primer
ggaggagaagcaatgcagc

SEQ ID NO: 2497 - DNA, 38 bp, Artificial Sequence
  primer
gtaaaacgacggccagtagagacagcagccttggtttc

SEQ ID NO: 2498 - DNA, 21 bp, Artificial Sequence
  primer
caagagaaagtcgttggcctc

SEQ ID NO: 2499 - DNA, 20 bp, Artificial Sequence
  primer
ggttgcttgcaactggtctc

SEQ ID NO: 2500 - DNA, 21 bp, Artificial Sequence
  primer
cagtacagcacttcgtcctgc

SEQ ID NO: 2501 - DNA, 38 bp, Artificial Sequence
  primer
gtaaaacgacggccagtaacccagcttatctgtcctcg

SEQ ID NO: 2502 - DNA, 37 bp, Artificial Sequence
  primer
gtaaaacgacggccagtagctctggcctctgaggaac

SEQ ID NO: 2503 - DNA, 38 bp, Artificial Sequence
  primer
gtaaaacgacggccagtttgccttctgagagtctgtcc

SEQ ID NO: 2504 - DNA, 21 bp, Artificial Sequence
  primer
gtctgaagacttgcctgcctc

SEQ ID NO: 2505 - DNA, 37 bp, Artificial Sequence
  primer
gtaaaacgacggccagtcaggcttcacttgcccttag

SEQ ID NO: 2506 - DNA, 38 bp, Artificial Sequence
  primer
gtaaaacgacggccagtcctagtgaaagggagcagacc

SEQ ID NO: 2507 - DNA, 21 bp, Artificial Sequence
  primer
tttgcctgctgacctcttagg

SEQ ID NO: 2508 - DNA, 43 bp, Artificial Sequence
  primer
gtaaaacgacggccagtatgtttaacttggtaagaaaccatcc

SEQ ID NO: 2509 - DNA, 38 bp, Artificial Sequence
  primer
gtaaaacgacggccagttcaactaacttccagggtggg

SEQ ID NO: 2510 - DNA, 38 bp, Artificial Sequence
  primer
gtaaaacgacggccagtcttacgctacaagggcgagac

SEQ ID NO: 2511 - DNA, 38 bp, Artificial Sequence
  primer
gtaaaacgacggccagtcctttgtgaatacagggccag

SEQ ID NO: 2512 - DNA, 21 bp, Artificial Sequence
  primer
ccaaaggaggtgacctgtgtc

SEQ ID NO: 2513 - DNA, 21 bp, Artificial Sequence
  primer
gacacttggagcaatccactg

SEQ ID NO: 2514 - DNA, 21 bp, Artificial Sequence
  primer
tttatcgcctcagtttccctc

SEQ ID NO: 2515 - DNA, 38 bp, Artificial Sequence
  primer
gtaaaacgacggccagtactctgggaggagggtaggtc

SEQ ID NO: 2516 - DNA, 38 bp, Artificial Sequence
  primer
gtaaaacgacggccagtgagcagaggcttgatcctgtc

SEQ ID NO: 2517 - DNA, 38 bp, Artificial Sequence
  primer
gtaaaacgacggccagtagaaggtgaaagtaggcccag

SEQ ID NO: 2518 - DNA, 21 bp, Artificial Sequence
  primer
acacaccatacaattcgcctg

SEQ ID NO: 2519 - DNA, 37 bp, Artificial Sequence
  primer
gtaaaacgacggccagttttcatggatctcagggagg

SEQ ID NO: 2520 - DNA, 23 bp, Artificial Sequence
  primer
cacatgtagatttcttctgcgtg

SEQ ID NO: 2521 - DNA, 40 bp, Artificial Sequence
  primer
gtaaaacgacggccagtcataccgtctgttagaatcgtgg

SEQ ID NO: 2522 - DNA, 38 bp, Artificial Sequence
  primer
gtaaaacgacggccagtggcaagcagtaagcactaccc

SEQ ID NO: 2523 - DNA, 38 bp, Artificial Sequence
  primer
gtaaaacgacggccagttccatgtggaaccaaagactc

SEQ ID NO: 2524 - DNA, 38 bp, Artificial Sequence
  primer
gtaaaacgacggccagtctaaaccttggccttctccag

SEQ ID NO: 2525 - DNA, 21 bp, Artificial Sequence
  primer
gtttggaaatttgccaccctc

SEQ ID NO: 2526 - DNA, 38 bp, Artificial Sequence
  primer
gtaaaacgacggccagtctcacgatggcgtctcttacc

SEQ ID NO: 2527 - DNA, 21 bp, Artificial Sequence
  primer
aggttggctcattgctctttc

SEQ ID NO: 2528 - DNA, 37 bp, Artificial Sequence
  primer
gtaaaacgacggccagttctgtcccagtgttcccaag

SEQ ID NO: 2529 - DNA, 43 bp, Artificial Sequence
  primer
gtaaaacgacggccagttcagttagttattgaaggactgagga

SEQ ID NO: 2530 - DNA, 36 bp, Artificial Sequence
  primer
gtaaaacgacggccagtgctggagctgcggatttag

SEQ ID NO: 2531 - DNA, 38 bp, Artificial Sequence
  primer
gtaaaacgacggccagtcctattgtgattcagggaggg

SEQ ID NO: 2532 - DNA, 23 bp, Artificial Sequence
  primer
tgctcccatctatgattaagtgc

SEQ ID NO: 2533 - DNA, 23 bp, Artificial Sequence
  primer
agtgtgggaaattcagtgtcttg

SEQ ID NO: 2534 - DNA, 24 bp, Artificial Sequence
  primer
ggctttctggacacatactattgg

SEQ ID NO: 2535 - DNA, 38 bp, Artificial Sequence
  primer
gtaaaacgacggccagtgcctttgccaggtaagaactg

SEQ ID NO: 2536 - DNA, 40 bp, Artificial Sequence
  primer
gtaaaacgacggccagtccacactttgagaaccactgaac

SEQ ID NO: 2537 - DNA, 23 bp, Artificial Sequence
  primer
ttaacctctcagtttcccatttg

SEQ ID NO: 2538 - DNA, 38 bp, Artificial Sequence
  primer
gtaaaacgacggccagttggccaagatgttagaggagg

SEQ ID NO: 2539 - DNA, 20 bp, Artificial Sequence
  primer
ctccatccagcctaggcaac

SEQ ID NO: 2540 - DNA, 37 bp, Artificial Sequence
  primer
gtaaaacgacggccagtcctgacagatggcaagaagg

SEQ ID NO: 2541 - DNA, 21 bp, Artificial Sequence
  primer
ttcgagcaagtgaggtcagtg

SEQ ID NO: 2542 - DNA, 22 bp, Artificial Sequence
  primer
gggcaacaagagtgaaactcag

SEQ ID NO: 2543 - DNA, 22 bp, Artificial Sequence
  primer
gctgtagtgagccaagattgtg

SEQ ID NO: 2544 - DNA, 38 bp, Artificial Sequence
  primer
gtaaaacgacggccagtcaaagctgtttggcaagaagg

SEQ ID NO: 2545 - DNA, 21 bp, Artificial Sequence
  primer
actgaccaatgctgagagcag

SEQ ID NO: 2546 - DNA, 38 bp, Artificial Sequence
  primer
gtaaaacgacggccagttccagatccatgaagcaagtg

SEQ ID NO: 2547 - DNA, 21 bp, Artificial Sequence
  primer
acaaagggaagacttgttggg

SEQ ID NO: 2548 - DNA, 37 bp, Artificial Sequence
  primer
gtaaaacgacggccagtcctgcaagtacagctgggag

SEQ ID NO: 2549 - DNA, 21 bp, Artificial Sequence
  primer
gctgctaggtttgcttggttc

SEQ ID NO: 2550 - DNA, 21 bp, Artificial Sequence
  primer
tctgacctcagcttgttcacc

SEQ ID NO: 2551 - DNA, 20 bp, Artificial Sequence
  primer
ccaggagaggcactgtgaag

SEQ ID NO: 2552 - DNA, 38 bp, Artificial Sequence
  primer
gtaaaacgacggccagttcaatggcctcatgtcagttc

SEQ ID NO: 2553 - DNA, 21 bp, Artificial Sequence
  primer
ctcagtaagtggtgcacaggg

SEQ ID NO: 2554 - DNA, 21 bp, Artificial Sequence
  primer
tagcatgagcttgcctgtctc

SEQ ID NO: 2555 - DNA, 19 bp, Artificial Sequence
  primer
ggaccacaggaagcccatc

SEQ ID NO: 2556 - DNA, 38 bp, Artificial Sequence
  primer
gtaaaacgacggccagtgtttattccagccatcttgcc

SEQ ID NO: 2557 - DNA, 39 bp, Artificial Sequence
  primer
gtaaaacgacggccagtaagcgaataatcatgcaacctc

SEQ ID NO: 2558 - DNA, 36 bp, Artificial Sequence
  primer
gtaaaacgacggccagtaaggaaggatgccctttgg

SEQ ID NO: 2559 - DNA, 38 bp, Artificial Sequence
  primer
gtaaaacgacggccagtctgatttgtaaggtgttgcgg

SEQ ID NO: 2560 - DNA, 21 bp, Artificial Sequence
  primer
tcagactgtgtcccatgaagc

SEQ ID NO: 2561 - DNA, 38 bp, Artificial Sequence
  primer
gtaaaacgacggccagtgttgagtgccgttgtctgttg

SEQ ID NO: 2562 - DNA, 38 bp, Artificial Sequence
  primer
gtaaaacgacggccagtttgggtagatggaaatttggg

SEQ ID NO: 2563 - DNA, 39 bp, Artificial Sequence
  primer
gtaaaacgacggccagtgcgattagtttcaactcttgcc

SEQ ID NO: 2564 - DNA, 21 bp, Artificial Sequence
  primer
ggaggatggtttaacccacag

SEQ ID NO: 2565 - DNA, 38 bp, Artificial Sequence
  primer
gtaaaacgacggccagttccaaagagttgggattctgg

SEQ ID NO: 2566 - DNA, 38 bp, Artificial Sequence
  primer
gtaaaacgacggccagtctttggatgaacaaacgaggg

SEQ ID NO: 2567 - DNA, 21 bp, Artificial Sequence
  primer
gtcaagggctatgggtgaaag

SEQ ID NO: 2568 - DNA, 22 bp, Artificial Sequence
  primer
ttgttgtgaaatggtatgagcg

SEQ ID NO: 2569 - DNA, 20 bp, Artificial Sequence
  primer
ggtcttgaacacctggcttc

SEQ ID NO: 2570 - DNA, 38 bp, Artificial Sequence
  primer
gtaaaacgacggccagttggacactctctgtgctttgg

SEQ ID NO: 2571 - DNA, 22 bp, Artificial Sequence
  primer
cccatacacttggttgtcaatg

SEQ ID NO: 2572 - DNA, 38 bp, Artificial Sequence
  primer
gtaaaacgacggccagtgtttcctgagaacttcctccc

SEQ ID NO: 2573 - DNA, 38 bp, Artificial Sequence
  primer
gtaaaacgacggccagtactcagggcatgttggtattg

SEQ ID NO: 2574 - DNA, 21 bp, Artificial Sequence
  primer
cttgttgggaagaaacaagcc

SEQ ID NO: 2575 - DNA, 35 bp, Artificial Sequence
  primer
gtaaaacgacggccagtccagccgaatttcctgtg

SEQ ID NO: 2576 - DNA, 38 bp, Artificial Sequence
  primer
gtaaaacgacggccagttgatctcgatgccttccttag

SEQ ID NO: 2577 - DNA, 38 bp, Artificial Sequence
  primer
gtaaaacgacggccagtaaacaggcacagctcatcaag

SEQ ID NO: 2578 - DNA, 21 bp, Artificial Sequence
  primer
ctcagcatctcttggagaggg

SEQ ID NO: 2579 - DNA, 39 bp, Artificial Sequence
  primer
gtaaaacgacggccagttttgaagcattagctgtagggc

SEQ ID NO: 2580 - DNA, 38 bp, Artificial Sequence
  primer
gtaaaacgacggccagtttaggctgtcttgccctaacc

SEQ ID NO: 2581 - DNA, 24 bp, Artificial Sequence
  primer
ttcacagataatgctccttcacac

SEQ ID NO: 2582 - DNA, 24 bp, Artificial Sequence
  primer
gagtcctatgtagtgatgggatcg

SEQ ID NO: 2583 - DNA, 22 bp, Artificial Sequence
  primer
ttgattccttccaaggagtttg

SEQ ID NO: 2584 - DNA, 25 bp, Artificial Sequence
  primer
tcatctctataccacaaggacaacc

SEQ ID NO: 2585 - DNA, 21 bp, Artificial Sequence
  primer
acagaggccagcctacagaag

SEQ ID NO: 2586 - DNA, 38 bp, Artificial Sequence
  primer
gtaaaacgacggccagtgatgggaatggccttgtactc

SEQ ID NO: 2587 - DNA, 22 bp, Artificial Sequence
  primer
tgggagttcgttatgctatttg

SEQ ID NO: 2588 - DNA, 38 bp, Artificial Sequence
  primer
gtaaaacgacggccagtggtgaggccagtattcaccac

SEQ ID NO: 2589 - DNA, 21 bp, Artificial Sequence
  primer
tactaccgtcataggaccgcc

SEQ ID NO: 2590 - DNA, 38 bp, Artificial Sequence
  primer
gtaaaacgacggccagttttcctgagggatagcacagc

SEQ ID NO: 2591 - DNA, 20 bp, Artificial Sequence
  primer
atttgtcgatcacccattgc

SEQ ID NO: 2592 - DNA, 24 bp, Artificial Sequence
  primer
gagtaacaggctcaaatacagcag

SEQ ID NO: 2593 - DNA, 39 bp, Artificial Sequence
  primer
gtaaaacgacggccagtgctgagtgttccgtttcatttc

SEQ ID NO: 2594 - DNA, 38 bp, Artificial Sequence
  primer
gtaaaacgacggccagtccaacacatttgtatcctgcc

SEQ ID NO: 2595 - DNA, 38 bp, Artificial Sequence
  primer
gtaaaacgacggccagttccgggtatgagatagggaac

SEQ ID NO: 2596 - DNA, 21 bp, Artificial Sequence
  primer
cttccatccaacctaaccctg

SEQ ID NO: 2597 - DNA, 38 bp, Artificial Sequence; identical to SEQ ID NO: 2595
  primer

SEQ ID NO: 2598 - DNA, 38 bp, Artificial Sequence
  primer
gtaaaacgacggccagtctaagtaagatggcggcgaac

SEQ ID NO: 2599 - DNA, 21 bp, Artificial Sequence
  primer
gacttccttccctaacatggg

SEQ ID NO: 2600 - DNA, 38 bp, Artificial Sequence
  primer
gtaaaacgacggccagtgtgaacctggaaagcaacagg

SEQ ID NO: 2601 - DNA, 21 bp, Artificial Sequence
  primer
caggaacaggttctcctctgg

SEQ ID NO: 2602 - DNA, 38 bp, Artificial Sequence
  primer
gtaaaacgacggccagtacatctcgtggcagcctattc

SEQ ID NO: 2603 - DNA, 38 bp, Artificial Sequence
  primer
gtaaaacgacggccagtcggcagacaccagagtatcag

SEQ ID NO: 2604 - DNA, 21 bp, Artificial Sequence
  primer
tcccactagggaagagagctg

SEQ ID NO: 2605 - DNA, 37 bp, Artificial Sequence
  primer
gtaaaacgacggccagtctccgtgtaggtgatgaggc

SEQ ID NO: 2606 - DNA, 38 bp, Artificial Sequence
  primer
gtaaaacgacggccagtggcaaggagctggatttcttc

SEQ ID NO: 2607 - DNA, 21 bp, Artificial Sequence
  primer
ggagctagcagtgtcctctgg

SEQ ID NO: 2608 - DNA, 38 bp, Artificial Sequence
  primer
gtaaaacgacggccagtttggccacctctgtgtatctc

SEQ ID NO: 2609 - DNA, 21 bp, Artificial Sequence
  primer
ctccctctatctcagggcagg

SEQ ID NO: 2610 - DNA, 38 bp, Artificial Sequence
  primer
gtaaaacgacggccagtagtgaccttcctttggtgagg

SEQ ID NO: 2611 - DNA, 37 bp, Artificial Sequence
  primer
gtaaaacgacggccagtctgtggcttgagctgaccct

SEQ ID NO: 2612 - DNA, 38 bp, Artificial Sequence
  primer
gtaaaacgacggccagtagatcgagccctggaccttag

SEQ ID NO: 2613 - DNA, 18 bp, Artificial Sequence
  primer
gatgtacgcatccgcagg

SEQ ID NO: 2614 - DNA, 21 bp, Artificial Sequence
  primer
gttgcaggcctagtgtcagtg

SEQ ID NO: 2615 - DNA, 20 bp, Artificial Sequence
  primer
agcaatgcttccttgctctg

SEQ ID NO: 2616 - DNA, 38 bp, Artificial Sequence
  primer
gtaaaacgacggccagtttgcacttcgagtctctcagg

SEQ ID NO: 2617 - DNA, 38 bp, Artificial Sequence
  primer
gtaaaacgacggccagtccttgatgatctgcctctcag

SEQ ID NO: 2618 - DNA, 38 bp, Artificial Sequence
  primer
gtaaaacgacggccagttcccaaatgataacccaagtg

SEQ ID NO: 2619 - DNA, 21 bp, Artificial Sequence
  primer
ttgagcctgtcttctcttccc

SEQ ID NO: 2620 - DNA, 38 bp, Artificial Sequence
  primer
gtaaaacgacggccagttggcccttatgcattacttgc

SEQ ID NO: 2621 - DNA, 38 bp, Artificial Sequence
  primer
gtaaaacgacggccagttcttacgtaaaggaggcaggc

SEQ ID NO: 2622 - DNA, 37 bp, Artificial Sequence
  primer
gtaaaacgacggccagtatgagcctgttggttctccc

SEQ ID NO: 2623 - DNA, 38 bp, Artificial Sequence
  primer
gtaaaacgacggccagtattctcgcttgggcttatttg

SEQ ID NO: 2624 - DNA, 38 bp, Artificial Sequence
  primer
gtaaaacgacggccagttcctcaaagtgaaatccagcc

SEQ ID NO: 2625 - DNA, 20 bp, Artificial Sequence
  primer
actgtggtggctctgcaaac

SEQ ID NO: 2626 - DNA, 21 bp, Artificial Sequence
  primer
agccggtacctgttactgtgg

SEQ ID NO: 2627 - DNA, 37 bp, Artificial Sequence
  primer
gtaaaacgacggccagtaagaggctcccttcacaagc

SEQ ID NO: 2628 - DNA, 20 bp, Artificial Sequence
  primer
acacaaactcctgcccaatg

SEQ ID NO: 2629 - DNA, 38 bp, Artificial Sequence
  primer
gtaaaacgacggccagtaaacagccagctggagaagac

SEQ ID NO: 2630 - DNA, 21 bp, Artificial Sequence
  primer
tctgccacaatgtcagctttc

SEQ ID NO: 2631 - DNA, 38 bp, Artificial Sequence
  primer
gtaaaacgacggccagtctcctccttccctttcaatcc

SEQ ID NO: 2632 - DNA, 21 bp, Artificial Sequence
  primer
aggttgaaagccagtcctcag

SEQ ID NO: 2633 - DNA, 23 bp, Artificial Sequence
  primer
ccacaccattgttcattctacac

SEQ ID NO: 2634 - DNA, 21 bp, Artificial Sequence
  primer
ctgtgggtgtcctttcctttc

SEQ ID NO: 2635 - DNA, 21 bp, Artificial Sequence
  primer
cacgtggaagatcgagaagtg

SEQ ID NO: 2636 - DNA, 35 bp, Artificial Sequence
  primer
gtaaaacgacggccagtgggcagaggccaggatac

SEQ ID NO: 2637 - DNA, 38 bp, Artificial Sequence
  primer
gtaaaacgacggccagtatggcaggacaagaaagtctg

SEQ ID NO: 2638 - DNA, 21 bp, Artificial Sequence
  primer
agctttccttacctggctgtg

SEQ ID NO: 2639 - DNA, 38 bp, Artificial Sequence
  primer
gtaaaacgacggccagttaagtcattgtgggcgtatgg

SEQ ID NO: 2640 - DNA, 21 bp, Artificial Sequence
  primer
tccattagtccctcaactggc

SEQ ID NO: 2641 - DNA, 38 bp, Artificial Sequence
  primer
gtaaaacgacggccagttttctcaggccagttagggaa

SEQ ID NO: 2642 - DNA, 37 bp, Artificial Sequence
  primer
gtaaaacgacggccagtgtgttcgtggctctggtgag

SEQ ID NO: 2643 - DNA, 36 bp, Artificial Sequence
  primer
gtaaaacgacggccagtgacccacacaaggaggtgg

SEQ ID NO: 2644 - DNA, 38 bp, Artificial Sequence
  primer
gtaaaacgacggccagtacttcgaaggccacatgattc

SEQ ID NO: 2645 - DNA, 38 bp, Artificial Sequence
  primer
gtaaaacgacggccagttcctggatctgggagaaactg

SEQ ID NO: 2646 - DNA, 19 bp, Artificial Sequence
  primer
gtaccaggaggccctggag

SEQ ID NO: 2647 - DNA, 20 bp, Artificial Sequence
  primer
atgatttcccagccagatcc

SEQ ID NO: 2648 - DNA, 21 bp, Artificial Sequence
  primer
gatctcggctttggatattgg

SEQ ID NO: 2649 - DNA, 21 bp, Artificial Sequence
  primer
tgggaggaaggagtagctttg

SEQ ID NO: 2650 - DNA, 21 bp, Artificial Sequence
  primer
gacatgggtgggacagaactc

SEQ ID NO: 2651 - DNA, 21 bp, Artificial Sequence
  primer
tcaccgtctccctcttctacc

SEQ ID NO: 2652 - DNA, 37 bp, Artificial Sequence
  primer
gtaaaacgacggccagtcttacctggcctgactgctg

SEQ ID NO: 2653 - DNA, 35 bp, Artificial Sequence
  primer
gtaaaacgacggccagttttcccagaacccggaag

SEQ ID NO: 2654 - DNA, 38 bp, Artificial Sequence
  primer
gtaaaacgacggccagtctggtccagacctttgctagg

SEQ ID NO: 2655 - DNA, 38 bp, Artificial Sequence
  primer
gtaaaacgacggccagtactggagcatcacagaggatg

SEQ ID NO: 2656 - DNA, 38 bp, Artificial Sequence
  primer
gtaaaacgacggccagtcaggagaccatgtcactgtgg

SEQ ID NO: 2657 - DNA, 38 bp, Artificial Sequence
  primer
gtaaaacgacggccagtgtgcaaagacagcaaggaaag

SEQ ID NO: 2658 - DNA, 38 bp, Artificial Sequence
  primer
gtaaaacgacggccagttctcccaccctatctctgctc

SEQ ID NO: 2659 - DNA, 21 bp, Artificial Sequence
  primer
ctaccatctggatgggctctg

SEQ ID NO: 2660 - DNA, 21 bp, Artificial Sequence
  primer
gggtctgtctgtcctggtctc

SEQ ID NO: 2661 - DNA, 38 bp, Artificial Sequence
  primer
gtaaaacgacggccagtcaccatgagctcgtactctcc

SEQ ID NO: 2662 - DNA, 21 bp, Artificial Sequence
  primer
gaccatgtccctttatccctg

SEQ ID NO: 2663 - DNA, 21 bp, Artificial Sequence
  primer
tgcataccaccagccttacag

SEQ ID NO: 2664 - DNA, 21 bp, Artificial Sequence
  primer
tacaatcctccttgtccctgg

SEQ ID NO: 2665 - DNA, 39 bp, Artificial Sequence
  primer
gtaaaacgacggccagtaagcatgctgaatgtgtgtgac

SEQ ID NO: 2666 - DNA, 39 bp, Artificial Sequence
  primer
gtaaaacgacggccagtttggaagaggctaaatgcaaag

SEQ ID NO: 2667 - DNA, 37 bp, Artificial Sequence
  primer
gtaaaacgacggccagtagtgggaaaggcagaactgg

SEQ ID NO: 2668 - DNA, 21 bp, Artificial Sequence
  primer
agcagatattccctggagtgc

SEQ ID NO: 2669 - DNA, 38 bp, Artificial Sequence
  primer
gtaaaacgacggccagttttcctccttccctctactgc

SEQ ID NO: 2670 - DNA, 22 bp, Artificial Sequence
  primer
tctcatgacattgtgatctgcc

SEQ ID NO: 2671 - DNA, 21 bp, Artificial Sequence
  primer
cagagcccatttcactctcag

SEQ ID NO: 2672 - DNA, 38 bp, Artificial Sequence
  primer
gtaaaacgacggccagttttccatttgttggtgtctcc

SEQ ID NO: 2673 - DNA, 21 bp, Artificial Sequence
  primer
aagctcctgacgacaacagtg

SEQ ID NO: 2674 - DNA, 37 bp, Artificial Sequence
  primer
gtaaaacgacggccagtattcggatgttcccgaagac

SEQ ID NO: 2675 - DNA, 21 bp, Artificial Sequence
  primer
aagaagagctggttgaggctg

SEQ ID NO: 2676 - DNA, 21 bp, Artificial Sequence
  primer
aaggcagcagtatgccacttc

SEQ ID NO: 2677 - DNA, 21 bp, Artificial Sequence
  primer
ttgacgagacgcttaggtgtg

SEQ ID NO: 2678 - DNA, 20 bp, Artificial Sequence
  primer
agtttgcaccattgcactcc

SEQ ID NO: 2679 - DNA, 21 bp, Artificial Sequence
  primer
gggcgacaaagcaagactatc

SEQ ID NO: 2680 - DNA, 19 bp, Artificial Sequence
  primer
cgggtctctgacaacccag

SEQ ID NO: 2681 - DNA, 38 bp, Artificial Sequence
  primer
gtaaaacgacggccagtacaagaacctcagagcccaac

SEQ ID NO: 2682 - DNA, 39 bp, Artificial Sequence
  primer
gtaaaacgacggccagtccaatctaggcccataggaaac

SEQ ID NO: 2683 - DNA, 21 bp, Artificial Sequence
  primer
agtgagcatggttccagtgag

SEQ ID NO: 2684 - DNA, 38 bp, Artificial Sequence
  primer
gtaaaacgacggccagtgaatttcctctggcacaggtc

SEQ ID NO: 2685 - DNA, 37 bp, Artificial Sequence
  primer
gtaaaacgacggccagtaccatcctgcatggagacac

SEQ ID NO: 2686 - DNA, 22 bp, Artificial Sequence
  primer
ccaatctaggcccataggaaac

SEQ ID NO: 2687 - DNA, 37 bp, Artificial Sequence
  primer
gtaaaacgacggccagtagcatggttcaagcaagcac

SEQ ID NO: 2688 - DNA, 39 bp, Artificial Sequence
  primer
gtaaaacgacggccagttggagaacatgctgagagtgag

SEQ ID NO: 2689 - DNA, 21 bp, Artificial Sequence
  primer
ctacccaattagatggctggc

SEQ ID NO: 2690 - DNA, 22 bp, Artificial Sequence
  primer
gcttgatttagccattccacag

SEQ ID NO: 2691 - DNA, 21 bp, Artificial Sequence
  primer
ccaatctgaagccaccatttc

SEQ ID NO: 2692 - DNA, 37 bp, Artificial Sequence
  primer
gtaaaacgacggccagttccctctccgtttctgtgtg

SEQ ID NO: 2693 - DNA, 38 bp, Artificial Sequence
  primer
gtaaaacgacggccagtatcccttatagcacctggcac

SEQ ID NO: 2694 - DNA, 22 bp, Artificial Sequence
  primer
ccttgtgctggatatgacagag

SEQ ID NO: 2695 - DNA, 37 bp, Artificial Sequence
  primer
gtaaaacgacggccagttttcgagccaggtgtgaatg

SEQ ID NO: 2696 - DNA, 21 bp, Artificial Sequence
  primer
gtaagcacaccgtgtcagacc

SEQ ID NO: 2697 - DNA, 38 bp, Artificial Sequence
  primer
gtaaaacgacggccagttatgtgaggtttctgggcctc

SEQ ID NO: 2698 - DNA, 35 bp, Artificial Sequence
  primer
gtaaaacgacggccagtacaaccgtccctggtgtg

SEQ ID NO: 2699 - DNA, 20 bp, Artificial Sequence
  primer
ctggaaactggcctgaaatg

SEQ ID NO: 2700 - DNA, 21 bp, Artificial Sequence
  primer
gtgtggaattgctgtcctgtg

SEQ ID NO: 2701 - DNA, 38 bp, Artificial Sequence
  primer
gtaaaacgacggccagtgtctgcagctatgggttaggg

SEQ ID NO: 2702 - DNA, 38 bp, Artificial Sequence
  primer
gtaaaacgacggccagttcattgcttgtgcacttccag

SEQ ID NO: 2703 - DNA, 38 bp, Artificial Sequence
  primer
gtaaaacgacggccagtatcagaagtttatcccagccg

SEQ ID NO: 2704 - DNA, 21 bp, Artificial Sequence
  primer
gtaactccctctgcatcctgg

SEQ ID NO: 2705 - DNA, 21 bp, Artificial Sequence
  primer
agccttggacaagttcctcag

SEQ ID NO: 2706 - DNA, 21 bp, Artificial Sequence
  primer
gccaggagttcttaatctggg

SEQ ID NO: 2707 - DNA, 38 bp, Artificial Sequence
  primer
gtaaaacgacggccagttgaagggtccagtctgtcctc

SEQ ID NO: 2708 - DNA, 38 bp, Artificial Sequence
  primer
gtaaaacgacggccagtatggctggagagtgttgatcc

SEQ ID NO: 2709 - DNA, 39 bp, Artificial Sequence
  primer
gtaaaacgacggccagttcttcctcctagattctcgctg

SEQ ID NO: 2710 - DNA, 23 bp, Artificial Sequence
  primer
catttggacgatattctggtttc

SEQ ID NO: 2711 - DNA, 41 bp, Artificial Sequence
  primer
gtaaaacgacggccagttgattcatctccacattcagagac

SEQ ID NO: 2712 - DNA, 21 bp, Artificial Sequence
  primer
aaggccaagggtacacacagt

SEQ ID NO: 2713 - DNA, 21 bp, Artificial Sequence
  primer
atatctcccatacgtgcaggg

SEQ ID NO: 2714 - DNA, 37 bp, Artificial Sequence
  primer
gtaaaacgacggccagtatgtgccttcaagcttgctc

SEQ ID NO: 2715 - DNA, 38 bp, Artificial Sequence
  primer
gtaaaacgacggccagtagtatattgcgagagcgatgg

SEQ ID NO: 2716 - DNA, 39 bp, Artificial Sequence
  primer
gtaaaacgacggccagttcttgctgaatcacatccacag

SEQ ID NO: 2717 - DNA, 38 bp, Artificial Sequence
  primer
gtaaaacgacggccagttctccaaattggctgtgtgac

SEQ ID NO: 2718 - DNA, 21 bp, Artificial Sequence
  primer
tacgactctacaggcctcacg

SEQ ID NO: 2719 - DNA, 40 bp, Artificial Sequence
  primer
gtaaaacgacggccagttttgttcattcatagtgtctgcc

SEQ ID NO: 2720 - DNA, 18 bp, Artificial Sequence
  primer
cagtccgcagtccagcct

SEQ ID NO: 2721 - DNA, 20 bp, Artificial Sequence
  primer
atggatatgccagtgccaag

SEQ ID NO: 2722 - DNA, 21 bp, Artificial Sequence
  primer
tggttcacttgttggttgtgc

SEQ ID NO: 2723 - DNA, 19 bp, Artificial Sequence
  primer
tttgctgcctgtccacttg

SEQ ID NO: 2724 - DNA, 38 bp, Artificial Sequence
  primer
gtaaaacgacggccagtgcttggttcattgtcatcacc

SEQ ID NO: 2725 - DNA, 21 bp, Artificial Sequence
  primer
acctggaagtccatatcgctc

SEQ ID NO: 2726 - DNA, 38 bp, Artificial Sequence
  primer
gtaaaacgacggccagtagaagccgctcatagcttctg

SEQ ID NO: 2727 - DNA, 39 bp, Artificial Sequence
  primer
gtaaaacgacggccagtgagtttgaagcaaggttgaagg

SEQ ID NO: 2728 - DNA, 36 bp, Artificial Sequence
  primer
gtaaaacgacggccagttcatggttgcgttgtctgg

SEQ ID NO: 2729 - DNA, 37 bp, Artificial Sequence
  primer
gtaaaacgacggccagtggctcaagtgatcctcccac

SEQ ID NO: 2730 - DNA, 39 bp, Artificial Sequence
  primer
gtaaaacgacggccagtggccagtgtgaaagaatacctg

SEQ ID NO: 2731 - DNA, 23 bp, Artificial Sequence
  primer
ggaaggtgaaatgtgctagaagc

SEQ ID NO: 2732 - DNA, 41 bp, Artificial Sequence
  primer
gtaaaacgacggccagttttacccaagatgttgcaagtaag

SEQ ID NO: 2733 - DNA, 22 bp, Artificial Sequence
  primer
aaccagttgaggaatctttccc

SEQ ID NO: 2734 - DNA, 39 bp, Artificial Sequence
  primer
gtaaaacgacggccagttgatcacactttgcactccttc

SEQ ID NO: 2735 - DNA, 41 bp, Artificial Sequence
  primer
gtaaaacgacggccagtaaatcacagtcacccagtatcctc

SEQ ID NO: 2736 - DNA, 41 bp, Artificial Sequence
  primer
gtaaaacgacggccagtcgattaaggcaatgatattcaaag

SEQ ID NO: 2737 - DNA, 24 bp, Artificial Sequence
  primer
ccttctttatgctggtactatggg

SEQ ID NO: 2738 - DNA, 21 bp, Artificial Sequence
  primer
tgattcaacacccgaatcatc

SEQ ID NO: 2739 - DNA, 21 bp, Artificial Sequence
  primer
cctcctggtcagaacacttcc

SEQ ID NO: 2740 - DNA, 21 bp, Artificial Sequence
  primer
tgtgtttgagggtttgaaggc

SEQ ID NO: 2741 - DNA, 38 bp, Artificial Sequence
  primer
gtaaaacgacggccagtgaagagaacattcccgtgacc

SEQ ID NO: 2742 - DNA, 38 bp, Artificial Sequence
  primer
gtaaaacgacggccagtcttaccctttgtgtcttgccc

SEQ ID NO: 2743 - DNA, 21 bp, Artificial Sequence
  primer
accaaaccagccctacagatg

SEQ ID NO: 2744 - DNA, 38 bp, Artificial Sequence
  primer
gtaaaacgacggccagtacagcatttgttggctgaatg

SEQ ID NO: 2745 - DNA, 21 bp, Artificial Sequence
  primer
cttccttcttgcaaggcaatc

SEQ ID NO: 2746 - DNA, 38 bp, Artificial Sequence
  primer
gtaaaacgacggccagtggagagggccacatttatcac

SEQ ID NO: 2747 - DNA, 38 bp, Artificial Sequence; identical to SEQ ID NO: 2746
  primer

SEQ ID NO: 2748 - DNA, 38 bp, Artificial Sequence
  primer
gtaaaacgacggccagtgtgacaggaaatgctcttggc

SEQ ID NO: 2749 - DNA, 38 bp, Artificial Sequence
  primer
gtaaaacgacggccagtgctgtctgtggtagtcctggg

SEQ ID NO: 2750 - DNA, 21 bp, Artificial Sequence
  primer
agcatggccataattctctgg

SEQ ID NO: 2751 - DNA, 40 bp, Artificial Sequence
  primer
gtaaaacgacggccagtcaacgctgcacaggctattatac

SEQ ID NO: 2752 - DNA, 38 bp, Artificial Sequence
  primer
gtaaaacgacggccagttcctcgtgtcttgaccatagc

SEQ ID NO: 2753 - DNA, 38 bp, Artificial Sequence
  primer
gtaaaacgacggccagtcttggctagtctgcattggtg

SEQ ID NO: 2754 - DNA, 38 bp, Artificial Sequence
  primer
gtaaaacgacggccagtgtgtttcataaactgcccacg

SEQ ID NO: 2755 - DNA, 38 bp, Artificial Sequence
  primer
gtaaaacgacggccagtctgtgacttcaccactctccc

SEQ ID NO: 2756 - DNA, 21 bp, Artificial Sequence
  primer
tgggattacagttccatggtg

SEQ ID NO: 2757 - DNA, 38 bp, Artificial Sequence
  primer
gtaaaacgacggccagtgagttggttcatgcttagccc

SEQ ID NO: 2758 - DNA, 21 bp, Artificial Sequence
  primer
taccctttcactgcatcaacc

SEQ ID NO: 2759 - DNA, 21 bp, Artificial Sequence
  primer
tgtgtttgagggtttgaaggc

SEQ ID NO: 2760 - DNA, 19 bp, Artificial Sequence
  primer
gggagtaaggctcggttgc

SEQ ID NO: 2761 - DNA, 38 bp, Artificial Sequence
  primer
gtaaaacgacggccagttgccctacagtgtttcagacc

SEQ ID NO: 2762 - DNA, 37 bp, Artificial Sequence
  primer
gtaaaacgacggccagtacagatgccacggtgctaac

SEQ ID NO: 2763 - DNA, 20 bp, Artificial Sequence
  primer
ggcccatggacacactacag

SEQ ID NO: 2764 - DNA, 18 bp, Artificial Sequence
  primer
actcgggaggctgacagg

SEQ ID NO: 2765 - DNA, 38 bp, Artificial Sequence
  primer
gtaaaacgacggccagttagagcagggacgctggttac

SEQ ID NO: 2766 - DNA, 38 bp, Artificial Sequence
  primer
gtaaaacgacggccagtacacagaccatggaagtgctg

SEQ ID NO: 2767 - DNA, 22 bp, Artificial Sequence
  primer
tgtgcgtgtgtgagagaaagag

SEQ ID NO: 2768 - DNA, 20 bp, Artificial Sequence
  primer
catctgcccacctttctgag

SEQ ID NO: 2769 - DNA, 39 bp, Artificial Sequence
  primer
gtaaaacgacggccagttgcctgtaagtctaaaggtggc

SEQ ID NO: 2770 - DNA, 37 bp, Artificial Sequence
  primer
gtaaaacgacggccagtcctgtttaccctccaggacc

SEQ ID NO: 2771 - DNA, 38 bp, Artificial Sequence
  primer
gtaaaacgacggccagtttggacagctttggactatcg

SEQ ID NO: 2772 - DNA, 21 bp, Artificial Sequence
  primer
aatggaacatggcttctctgc

SEQ ID NO: 2773 - DNA, 38 bp, Artificial Sequence
  primer
gtaaaacgacggccagtaccttggatgaaacccagatg

SEQ ID NO: 2774 - DNA, 38 bp, Artificial Sequence
  primer
gtaaaacgacggccagtagtgggaggttagctgtctgg

SEQ ID NO: 2775 - DNA, 38 bp, Artificial Sequence
  primer
gtaaaacgacggccagtcacttgcagtaacaaatgccc

SEQ ID NO: 2776 - DNA, 38 bp, Artificial Sequence
  primer
gtaaaacgacggccagtgggtagtgcaccttatctccg

SEQ ID NO: 2777 - DNA, 20 bp, Artificial Sequence
  primer
cagggagttacggcactgag

SEQ ID NO: 2778 - DNA, 20 bp, Artificial Sequence
  primer
ggcatgagaatcaaaggtgc

SEQ ID NO: 2779 - DNA, 38 bp, Artificial Sequence
  primer
gtaaaacgacggccagtgggagtatcagcctcagttgc

SEQ ID NO: 2780 - DNA, 39 bp, Artificial Sequence
  primer
gtaaaacgacggccagtctactctcatgtgcctgtttgc

SEQ ID NO: 2781 - DNA, 21 bp, Artificial Sequence
  primer
acgatgtgctcatctccttcc

SEQ ID NO: 2782 - DNA, 21 bp, Artificial Sequence
  primer
ggagatgtccctaggttcctg

SEQ ID NO: 2783 - DNA, 18 bp, Artificial Sequence
  primer
gacaccaggtcaggctgc

SEQ ID NO: 2784 - DNA, 21 bp, Artificial Sequence
  primer
tgtttgagaccttcaacgtgc

SEQ ID NO: 2785 - DNA, 38 bp, Artificial Sequence
  primer
gtaaaacgacggccagtactgagcgtggctactccttc

SEQ ID NO: 2786 - DNA, 38 bp, Artificial Sequence
  primer
gtaaaacgacggccagtaagagctacgagctgccagac

SEQ ID NO: 2787 - DNA, 38 bp, Artificial Sequence
  primer
gtaaaacgacggccagtaggaaggacctgtatgccaac

SEQ ID NO: 2788 - DNA, 21 bp, Artificial Sequence
  primer
tcaggtaagtgccacaaatgc

SEQ ID NO: 2789 - DNA, 38 bp, Artificial Sequence
  primer
gtaaaacgacggccagttttgtggcttggctgtaattg

SEQ ID NO: 2790 - DNA, 38 bp, Artificial Sequence
  primer
gtaaaacgacggccagtgcccttaactgccataccatc

SEQ ID NO: 2791 - DNA, 38 bp, Artificial Sequence
  primer
gtaaaacgacggccagttcctctttaacgtgaccaggg

SEQ ID NO: 2792 - DNA, 38 bp, Artificial Sequence
  primer
gtaaaacgacggccagtcccaaggcttccctctacttg

SEQ ID NO: 2793 - DNA, 38 bp, Artificial Sequence
  primer
gtaaaacgacggccagtgtagggcaggtgaatctttgc

SEQ ID NO: 2794 - DNA, 40 bp, Artificial Sequence
  primer
gtaaaacgacggccagtcatccagatgttcaagtctggtc

SEQ ID NO: 2795 - DNA, 38 bp, Artificial Sequence
  primer
gtaaaacgacggccagtacatccaggctctgtcctacc

SEQ ID NO: 2796 - DNA, 18 bp, Artificial Sequence
  primer
ctccgaccagtgtttgcc

SEQ ID NO: 2797 - DNA, 35 bp, Artificial Sequence
  primer
gtaaaacgacggccagtcaagggcgctttctctgc

SEQ ID NO: 2798 - DNA, 38 bp, Artificial Sequence
  primer
gtaaaacgacggccagtacttagccgtgttctttgcac

SEQ ID NO: 2799 - DNA, 21 bp, Artificial Sequence
  primer
gccatgtacgttgctatccag

SEQ ID NO: 2800 - DNA, 38 bp, Artificial Sequence
  primer
gtaaaacgacggccagttctgcctgacatgagggttac

SEQ ID NO: 2801 - DNA, 21 bp, Artificial Sequence
  primer
gatcaaggtgggtgtctttcc

SEQ ID NO: 2802 - DNA, 38 bp, Artificial Sequence
  primer
gtaaaacgacggccagtctctgtcctgtcctctgggtg

SEQ ID NO: 2803 - DNA, 27 bp, Artificial Sequence
  primer
gggcagttagatataaatggacaagac

SEQ ID NO: 2804 - DNA, 38 bp, Artificial Sequence
  primer
gtaaaacgacggccagttcttagccaagattggaagcg

SEQ ID NO: 2805 - DNA, 38 bp, Artificial Sequence
  primer
gtaaaacgacggccagtctcactgaatccgcctacctc

SEQ ID NO: 2806 - DNA, 21 bp, Artificial Sequence
  primer
tgacctgaatgcactgtgatg

SEQ ID NO: 2807 - DNA, 38 bp, Artificial Sequence
  primer
gtaaaacgacggccagttttctgtgaatcctcccaatg

SEQ ID NO: 2808 - DNA, 36 bp, Artificial Sequence
  primer
gtaaaacgacggccagtagggcattaggtggctgtg

SEQ ID NO: 2809 - DNA, 38 bp, Artificial Sequence
  primer
gtaaaacgacggccagtagacaccaggtgagtggatgg

SEQ ID NO: 2810 - DNA, 38 bp, Artificial Sequence
  primer
gtaaaacgacggccagttctctgtccctgactaagccg

SEQ ID NO: 2811 - DNA, 38 bp, Artificial Sequence
  primer
gtaaaacgacggccagtccttcctgggtaggtgttgtg

SEQ ID NO: 2812 - DNA, 21 bp, Artificial Sequence
  primer
aagatcaaggtgagtcgaggg

SEQ ID NO: 2813 - DNA, 20 bp, Artificial Sequence
  primer
tgattgcaggtagggtcagg

SEQ ID NO: 2814 - DNA, 21 bp, Artificial Sequence
  primer
tcctgctatcctgtttctggg

SEQ ID NO: 2815 - DNA, 38 bp, Artificial Sequence
  primer
gtaaaacgacggccagttaacatggtgccacactctcc

SEQ ID NO: 2816 - DNA, 38 bp, Artificial Sequence
  primer
gtaaaacgacggccagttcaaactggcatagttcctgc

SEQ ID NO: 2817 - DNA, 39 bp, Artificial Sequence
  primer
gtaaaacgacggccagtgattgatgattcttgtgatggg

SEQ ID NO: 2818 - DNA, 28 bp, Artificial Sequence
  primer
gaataaagtagatgtgagaaggaggttt

SEQ ID NO: 2819 - DNA, 38 bp, Artificial Sequence
  primer
gtaaaacgacggccagtgaagggtcatttgaggagctg

SEQ ID NO: 2820 - DNA, 21 bp, Artificial Sequence
  primer
ggaaggaataagggaagaggg

SEQ ID NO: 2821 - DNA, 38 bp, Artificial Sequence
  primer
gtaaaacgacggccagttggaagttaagggagtcaggg

SEQ ID NO: 2822 - DNA, 38 bp, Artificial Sequence
  primer
gtaaaacgacggccagtgcttgagcctaggaggttgag

SEQ ID NO: 2823 - DNA, 38 bp, Artificial Sequence
  primer
gtaaaacgacggccagtgagctggttatgctggtgagg

SEQ ID NO: 2824 - DNA, 43 bp, Artificial Sequence
  primer
gtaaaacgacggccagtaatgtggtatgaagttgatctgtaaa

SEQ ID NO: 2825 - DNA, 27 bp, Artificial Sequence
  primer
atgagatattatgaaagatgatttccc

SEQ ID NO: 2826 - DNA, 39 bp, Artificial Sequence
  primer
gtaaaacgacggccagtgaaacattataagagcctgccc

SEQ ID NO: 2827 - DNA, 21 bp, Artificial Sequence
  primer
ttagatgccatgaggatgcac

SEQ ID NO: 2828 - DNA, 40 bp, Artificial Sequence
  primer
gtaaaacgacggccagttcatctgtttcataggcattgtg

SEQ ID NO: 2829 - DNA, 40 bp, Artificial Sequence
  primer
gtaaaacgacggccagtaaacatggtccaatttcattcag

SEQ ID NO: 2830 - DNA, 25 bp, Artificial Sequence
  primer
cggtacttcaagtgtcagattcaac

SEQ ID NO: 2831 - DNA, 22 bp, Artificial Sequence
  primer
ggattatttgacccttccaatg

SEQ ID NO: 2832 - DNA, 21 bp, Artificial Sequence
  primer
ttgaatgtacagccaggatgg

SEQ ID NO: 2833 - DNA, 21 bp, Artificial Sequence
  primer
agtgcaaatgtgaagaccagc

SEQ ID NO: 2834 - DNA, 21 bp, Artificial Sequence
  primer
ggctgacagagcaagaccttc

SEQ ID NO: 2835 - DNA, 36 bp, Artificial Sequence
  primer
gtaaaacgacggccagtcaattggccgctgagagtc

SEQ ID NO: 2836 - DNA, 21 bp, Artificial Sequence
  primer
gtgttgaaagtggcgagactg

SEQ ID NO: 2837 - DNA, 21 bp, Artificial Sequence
  primer
gcgggaatatgggaataaacc

SEQ ID NO: 2838 - DNA, 38 bp, Artificial Sequence
  primer
gtaaaacgacggccagtgactcactgaccctcctttgg

SEQ ID NO: 2839 - DNA, 21 bp, Artificial Sequence
  primer
tgcaagtgtttggatgtgtgt

SEQ ID NO: 2840 - DNA, 38 bp, Artificial Sequence
  primer
gtaaaacgacggccagtccggtagagcagagagtgacc

SEQ ID NO: 2841 - DNA, 21 bp, Artificial Sequence
  primer
ttccagtacatgacggctacg

SEQ ID NO: 2842 - DNA, 21 bp, Artificial Sequence
  primer
catcagggaagggtgagaaac

SEQ ID NO: 2843 - DNA, 39 bp, Artificial Sequence
  primer
gtaaaacgacggccagtcatgtgtaatgtgagcctctgg

SEQ ID NO: 2844 - DNA, 38 bp, Artificial Sequence
  primer
gtaaaacgacggccagtgaacagtgagtgtggctcagg

SEQ ID NO: 2845 - DNA, 20 bp, Artificial Sequence
  primer
aacgtcaaggtttggctgtg

SEQ ID NO: 2846 - DNA, 21 bp, Artificial Sequence
  primer
gtgtgacattgatattcgccc

SEQ ID NO: 2847 - DNA, 39 bp, Artificial Sequence
  primer
gtaaaacgacggccagtcatgtccttccttctgttctgg

SEQ ID NO: 2848 - DNA, 37 bp, Artificial Sequence
  primer
gtaaaacgacggccagtggcttcagagggatgtgaac

SEQ ID NO: 2849 - DNA, 21 bp, Artificial Sequence
  primer
actttctaagagtggtgcggc

SEQ ID NO: 2850 - DNA, 21 bp, Artificial Sequence
  primer
actgtaaatgtggctttgccg

SEQ ID NO: 2851 - DNA, 38 bp, Artificial Sequence
  primer
gtaaaacgacggccagttcatcgtggactgggatacag

SEQ ID NO: 2852 - DNA, 38 bp, Artificial Sequence
  primer
gtaaaacgacggccagtgctctgacctgacagcctacc

SEQ ID NO: 2853 - DNA, 21 bp, Artificial Sequence
  primer
atgctcagtggcttccctaac

SEQ ID NO: 2854 - DNA, 37 bp, Artificial Sequence
  primer
gtaaaacgacggccagtccgagtgacatcacaatccc

SEQ ID NO: 2855 - DNA, 38 bp, Artificial Sequence
  primer
gtaaaacgacggccagtactcagctcaagatgaagccc

SEQ ID NO: 2856 - DNA, 21 bp, Artificial Sequence
  primer
atctgggagtacatcttccgc

SEQ ID NO: 2857 - DNA, 39 bp, Artificial Sequence
  primer
gtaaaacgacggccagtgacctcaccaactacctgatgc

SEQ ID NO: 2858 - DNA, 37 bp, Artificial Sequence
  primer
gtaaaacgacggccagtgcttccgttgctctgagatg

SEQ ID NO: 2859 - DNA, 19 bp, Artificial Sequence
  primer
cagtagcagccttcgccag

SEQ ID NO: 2860 - DNA, 38 bp, Artificial Sequence
  primer
gtaaaacgacggccagtctgtgttgagaggctctgctg

SEQ ID NO: 2861 - DNA, 38 bp, Artificial Sequence
  primer
gtaaaacgacggccagttaagctgtgctttggatgagg

SEQ ID NO: 2862 - DNA, 20 bp, Artificial Sequence
  primer
cgctagcttgggtgacagag

SEQ ID NO: 2863 - DNA, 38 bp, Artificial Sequence
  primer
gtaaaacgacggccagtgaatagacttgatggccaggg

SEQ ID NO: 2864 - DNA, 21 bp, Artificial Sequence
  primer
aagaaatgtcccttcccatcc

SEQ ID NO: 2865 - DNA, 37 bp, Artificial Sequence
  primer
gtaaaacgacggccagtccaattgggagtagccagtg

SEQ ID NO: 2866 - DNA, 38 bp, Artificial Sequence
  primer
gtaaaacgacggccagtcaagaagacttggtggtgctg

SEQ ID NO: 2867 - DNA, 21 bp, Artificial Sequence
  primer
tcagcacaggtgtgtaccagg

SEQ ID NO: 2868 - DNA, 36 bp, Artificial Sequence
  primer
gtaaaacgacggccagtagggctgttgggaggaaag

SEQ ID NO: 2869 - DNA, 38 bp, Artificial Sequence
  primer
gtaaaacgacggccagtaataccagtgggagatgggag

SEQ ID NO: 2870 - DNA, 20 bp, Artificial Sequence
  primer
cacctccttgagaagcaccc

SEQ ID NO: 2871 - DNA, 38 bp, Artificial Sequence
  primer
gtaaaacgacggccagtgacagcctcagagagagggag

SEQ ID NO: 2872 - DNA, 22 bp, Artificial Sequence
  primer
tcaccaggaggatcttgatagg

SEQ ID NO: 2873 - DNA, 38 bp, Artificial Sequence
  primer
gtaaaacgacggccagtctggtgtggaactcaacctcc

SEQ ID NO: 2874 - DNA, 38 bp, Artificial Sequence
  primer
gtaaaacgacggccagtctccatttcctcatctggcac

SEQ ID NO: 2875 - DNA, 39 bp, Artificial Sequence
  primer
gtaaaacgacggccagtgaactgagaatcatttgagggc

SEQ ID NO: 2876 - DNA, 38 bp, Artificial Sequence
  primer
gtaaaacgacggccagtgacactcagccacacagaagg

SEQ ID NO: 2877 - DNA, 21 bp, Artificial Sequence
  primer
gcctcgttggtgtgtctaacc

SEQ ID NO: 2878 - DNA, 38 bp, Artificial Sequence
  primer
gtaaaacgacggccagtgacaacccaggttaggtcagg

SEQ ID NO: 2879 - DNA, 18 bp, Artificial Sequence
  primer
ggcacatgctgccttcac

SEQ ID NO: 2880 - DNA, 35 bp, Artificial Sequence
  primer
gtaaaacgacggccagtgtccgtttgccagtcagc

SEQ ID NO: 2881 - DNA, 38 bp, Artificial Sequence
  primer
gtaaaacgacggccagtagtgtcgtctgtgaggaaggg

SEQ ID NO: 2882 - DNA, 38 bp, Artificial Sequence
  primer
gtaaaacgacggccagtgagagaccaggcacacatcag

SEQ ID NO: 2883 - DNA, 20 bp, Artificial Sequence
  primer
aaccagacatactgcggtgc

SEQ ID NO: 2884 - DNA, 37 bp, Artificial Sequence
  primer
gtaaaacgacggccagtaagatcagggttctggctcc

SEQ ID NO: 2885 - DNA, 21 bp, Artificial Sequence
  primer
ctgactgagtgcagatgctgg

SEQ ID NO: 2886 - DNA, 21 bp, Artificial Sequence
  primer
ttatgattgtgtgtgggtggg

SEQ ID NO: 2887 - DNA, 21 bp, Artificial Sequence
  primer
ggcccatgaaacacagaaatc

SEQ ID NO: 2888 - DNA, 37 bp, Artificial Sequence
  primer
gtaaaacgacggccagtacctcgttccatgctgtgtg

SEQ ID NO: 2889 - DNA, 23 bp, Artificial Sequence
  primer
tcctttacaaattattggatgcc

SEQ ID NO: 2890 - DNA, 38 bp, Artificial Sequence
  primer
gtaaaacgacggccagtttgaatggttattgaggtggg

SEQ ID NO: 2891 - DNA, 38 bp, Artificial Sequence
  primer
gtaaaacgacggccagtagcctgaattccatcacaacc

SEQ ID NO: 2892 - DNA, 21 bp, Artificial Sequence
  primer
agcctccactgtctatcagcc

SEQ ID NO: 2893 - DNA, 38 bp, Artificial Sequence
  primer
gtaaaacgacggccagtttgtttgagcatcgggtaatc

SEQ ID NO: 2894 - DNA, 38 bp, Artificial Sequence
  primer
gtaaaacgacggccagttgcggaaaggaatatcaaagc

SEQ ID NO: 2895 - DNA, 38 bp, Artificial Sequence
  primer
gtaaaacgacggccagtggactattcccgcattctgtg

SEQ ID NO: 2896 - DNA, 18 bp, Artificial Sequence
  primer
cgtgccgagctcccttag

SEQ ID NO: 2897 - DNA, 38 bp, Artificial Sequence
  primer
gtaaaacgacggccagttagtaagccctttgagtcggc

SEQ ID NO: 2898 - DNA, 38 bp, Artificial Sequence
  primer
gtaaaacgacggccagtcatccttctcgcaagtcagtg

SEQ ID NO: 2899 - DNA, 37 bp, Artificial Sequence
  primer
gtaaaacgacggccagtaggaattggcatgtcaccag

SEQ ID NO: 2900 - DNA, 41 bp, Artificial Sequence
  primer
gtaaaacgacggccagtttggttgtctggtactactatgcc

SEQ ID NO: 2901 - DNA, 36 bp, Artificial Sequence
  primer
gtaaaacgacggccagtggctgggccctacttaatg

SEQ ID NO: 2902 - DNA, 38 bp, Artificial Sequence
  primer
gtaaaacgacggccagtggctctgagacctaccctgac

SEQ ID NO: 2903 - DNA, 38 bp, Artificial Sequence
  primer
gtaaaacgacggccagtaggacccaggaacatctggac

SEQ ID NO: 2904 - DNA, 38 bp, Artificial Sequence
  primer
gtaaaacgacggccagtagccctgaaatgggagacaag

SEQ ID NO: 2905 - DNA, 22 bp, Artificial Sequence
  primer
tccagttggatgacatagcaag

SEQ ID NO: 2906 - DNA, 20 bp, Artificial Sequence
  primer
cagatctggtcatgaagggc

SEQ ID NO: 2907 - DNA, 38 bp, Artificial Sequence
  primer
gtaaaacgacggccagtgccaaactgcgaaaggtagag

SEQ ID NO: 2908 - DNA, 21 bp, Artificial Sequence
  primer
aagagaagacactgggcttgg

SEQ ID NO: 2909 - DNA, 22 bp, Artificial Sequence
  primer
cgtgttagctaggatggtttcg

SEQ ID NO: 2910 - DNA, 38 bp, Artificial Sequence
  primer
gtaaaacgacggccagtcccatcctgctttcgtagttg

SEQ ID NO: 2911 - DNA, 38 bp, Artificial Sequence
  primer
gtaaaacgacggccagtgtgaccttgaggtccgtatcc

SEQ ID NO: 2912 - DNA, 38 bp, Artificial Sequence
  primer
gtaaaacgacggccagtcagatgaggcttcatggtcac

SEQ ID NO: 2913 - DNA, 37 bp, Artificial Sequence
  primer
gtaaaacgacggccagtgaaagcacccagctttaccc

SEQ ID NO: 2914 - DNA, 21 bp, Artificial Sequence
  primer
ctcccagtgagctggactacc

SEQ ID NO: 2915 - DNA, 36 bp, Artificial Sequence
  primer
gtaaaacgacggccagtgagtgctgggctggaagac

SEQ ID NO: 2916 - DNA, 38 bp, Artificial Sequence
  primer
gtaaaacgacggccagtcaagttggctcaaagcaacag

SEQ ID NO: 2917 - DNA, 37 bp, Artificial Sequence
  primer
gtaaaacgacggccagtgatagtgggtccaacctggg

SEQ ID NO: 2918 - DNA, 38 bp, Artificial Sequence
  primer
gtaaaacgacggccagttcagtgaactggatgtggagc

SEQ ID NO: 2919 - DNA, 38 bp, Artificial Sequence
  primer
gtaaaacgacggccagttggagaaccaggtactgaccc

SEQ ID NO: 2920 - DNA, 38 bp, Artificial Sequence
  primer
gtaaaacgacggccagtgggaactcccttgttactggg

SEQ ID NO: 2921 - DNA, 37 bp, Artificial Sequence
  primer
gtaaaacgacggccagttcttggcaggagacaaggtg

SEQ ID NO: 2922 - DNA, 35 bp, Artificial Sequence
  primer
gtaaaacgacggccagtgctgaagcagctgaagcg

SEQ ID NO: 2923 - DNA, 20 bp, Artificial Sequence
  primer
tctcctgaggtcagagctgc

SEQ ID NO: 2924 - DNA, 21 bp, Artificial Sequence
  primer
ctaaagcctctctccctctcg

SEQ ID NO: 2925 - DNA, 20 bp, Artificial Sequence
  primer
ggtggtttggagcctttctc

SEQ ID NO: 2926 - DNA, 21 bp, Artificial Sequence
  primer
ctgctatcactgctgctgttg

SEQ ID NO: 2927 - DNA, 38 bp, Artificial Sequence
  primer
gtaaaacgacggccagtggaattagtcactgctgtggg

SEQ ID NO: 2928 - DNA, 21 bp, Artificial Sequence
  primer
acatcacacgtggctgagaac

SEQ ID NO: 2929 - DNA, 21 bp, Artificial Sequence
  primer
acagccttgtcctttccagac

SEQ ID NO: 2930 - DNA, 21 bp, Artificial Sequence
  primer
actggagctgtgcttcctctc

SEQ ID NO: 2931 - DNA, 20 bp, Artificial Sequence
  primer
gctcccagagttccaggttg

SEQ ID NO: 2932 - DNA, 38 bp, Artificial Sequence
  primer
gtaaaacgacggccagtagcatgacacagacatgaccc

SEQ ID NO: 2933 - DNA, 20 bp, Artificial Sequence
  primer
actgtcattggcatggaagg

SEQ ID NO: 2934 - DNA, 38 bp, Artificial Sequence
  primer
gtaaaacgacggccagttatcctggaatgttgactgcc

SEQ ID NO: 2935 - DNA, 37 bp, Artificial Sequence
  primer
gtaaaacgacggccagtctcccacggagaggatgttc

SEQ ID NO: 2936 - DNA, 21 bp, Artificial Sequence
  primer
ccatcgaggagattgaggttc

SEQ ID NO: 2937 - DNA, 38 bp, Artificial Sequence
  primer
gtaaaacgacggccagtaactccaagtgggagaaggtg

SEQ ID NO: 2938 - DNA, 35 bp, Artificial Sequence
  primer
gtaaaacgacggccagttgtgagcagtgggccttc

SEQ ID NO: 2939 - DNA, 38 bp, Artificial Sequence
  primer
gtaaaacgacggccagtgacagttcacagtcctccacg

SEQ ID NO: 2940 - DNA, 39 bp, Artificial Sequence
  primer
gtaaaacgacggccagttctaactctgtgtttccctccc

SEQ ID NO: 2941 - DNA, 38 bp, Artificial Sequence
  primer
gtaaaacgacggccagtctactctctcggctgtttccc

SEQ ID NO: 2942 - DNA, 21 bp, Artificial Sequence
  primer
aagccttcatcgacttcatgt

SEQ ID NO: 2943 - DNA, 18 bp, Artificial Sequence
  primer
gaatgaggcacagcctgg

SEQ ID NO: 2944 - DNA, 39 bp, Artificial Sequence
  primer
gtaaaacgacggccagttcaaatgttattgtggccattg

SEQ ID NO: 2945 - DNA, 22 bp, Artificial Sequence
  primer
gccatcttagacattccgattc

SEQ ID NO: 2946 - DNA, 38 bp, Artificial Sequence
  primer
gtaaaacgacggccagtatttcctagcacactgcacgg

SEQ ID NO: 2947 - DNA, 21 bp, Artificial Sequence
  primer
tttggaatgaaacagttgagc

SEQ ID NO: 2948 - DNA, 21 bp, Artificial Sequence
  primer
gaattgtgtgtggtcatgtgc

SEQ ID NO: 2949 - DNA, 20 bp, Artificial Sequence
  primer
gttgcagtgaactgggattg

SEQ ID NO: 2950 - DNA, 38 bp, Artificial Sequence
  primer
gtaaaacgacggccagtggtttgtcttggctttgaatg

SEQ ID NO: 2951 - DNA, 42 bp, Artificial Sequence
  primer
gtaaaacgacggccagtaaatccaaaggaatagatgatgagc

SEQ ID NO: 2952 - DNA, 22 bp, Artificial Sequence
  primer
gcgcgtacttgctttgtaagtg

SEQ ID NO: 2953 - DNA, 38 bp, Artificial Sequence
  primer
gtaaaacgacggccagtgaggcaggcattgttatcctc

SEQ ID NO: 2954 - DNA, 38 bp, Artificial Sequence
  primer
gtaaaacgacggccagttttgcgatacaaacgatcacc

SEQ ID NO: 2955 - DNA, 22 bp, Artificial Sequence
  primer
catggagttatggcttaccctg

SEQ ID NO: 2956 - DNA, 22 bp, Artificial Sequence
  primer
ttgtagttcttcagaggcgagg

SEQ ID NO: 2957 - DNA, 20 bp, Artificial Sequence
  primer
ccaacatgcccagctaattg

SEQ ID NO: 2958 - DNA, 47 bp, Artificial Sequence
  primer
gtaaaacgacggccagtccttgaagataatctcagtagaatttgagt

SEQ ID NO: 2959 - DNA, 38 bp, Artificial Sequence
  primer
gtaaaacgacggccagtcttctttgcaagggattcagc

SEQ ID NO: 2960 - DNA, 38 bp, Artificial Sequence
  primer
gtaaaacgacggccagtacttgggcagggatagttgac

SEQ ID NO: 2961 - DNA, 21 bp, Artificial Sequence
  primer
cccagtccattctacagaccc

SEQ ID NO: 2962 - DNA, 38 bp, Artificial Sequence
  primer
gtaaaacgacggccagttatgctaaatgccacccagtg

SEQ ID NO: 2963 - DNA, 38 bp, Artificial Sequence
  primer
gtaaaacgacggccagtcaggaggcctatctttgttcc

SEQ ID NO: 2964 - DNA, 38 bp, Artificial Sequence
  primer
gtaaaacgacggccagttcaggaggctctaccctgttc

SEQ ID NO: 2965 - DNA, 20 bp, Artificial Sequence
  primer
aatagtcccagcttccctgg

SEQ ID NO: 2966 - DNA, 21 bp, Artificial Sequence
  primer
cagaacaggaagtgatggcac

SEQ ID NO: 2967 - DNA, 35 bp, Artificial Sequence
  primer
gtaaaacgacggccagtaggtgggagcgatgattg

SEQ ID NO: 2968 - DNA, 21 bp, Artificial Sequence
  primer
cccaatcttgaaccataggtg

SEQ ID NO: 2969 - DNA, 37 bp, Artificial Sequence
  primer
gtaaaacgacggccagtcgactatggttggatttcgg

SEQ ID NO: 2970 - DNA, 37 bp, Artificial Sequence
  primer
gtaaaacgacggccagtaggtgagggtcagcttccag

SEQ ID NO: 2971 - DNA, 38 bp, Artificial Sequence
  primer
gtaaaacgacggccagtctgccagcagataaagggatg

SEQ ID NO: 2972 - DNA, 37 bp, Artificial Sequence
  primer
gtaaaacgacggccagtataatgcagatgtgccaggg

SEQ ID NO: 2973 - DNA, 38 bp, Artificial Sequence
  primer
gtaaaacgacggccagtccggacaatcaaagaggtgac

SEQ ID NO: 2974 - DNA, 38 bp, Artificial Sequence
  primer
gtaaaacgacggccagtcagcacgcttgatgtaagtgg

SEQ ID NO: 2975 - DNA, 38 bp, Artificial Sequence
  primer
gtaaaacgacggccagtcctgggaagagctgctgatag

SEQ ID NO: 2976 - DNA, 38 bp, Artificial Sequence
  primer
gtaaaacgacggccagttagtcctgttcttcccaaggc

SEQ ID NO: 2977 - DNA, 38 bp, Artificial Sequence
  primer
gtaaaacgacggccagtgaaatgcaactctgagcaccc

SEQ ID NO: 2978 - DNA, 37 bp, Artificial Sequence
  primer
gtaaaacgacggccagtattcagctaaatgacgggcg

SEQ ID NO: 2979 - DNA, 21 bp, Artificial Sequence
  primer
tacttcgggtggactgaaagc

SEQ ID NO: 2980 - DNA, 40 bp, Artificial Sequence
  primer
gtaaaacgacggccagttttggaaacatttgtgttaaagg

SEQ ID NO: 2981 - DNA, 27 bp, Artificial Sequence
  primer
ttcaataagaaataagaggagctgatg

SEQ ID NO: 2982 - DNA, 37 bp, Artificial Sequence
  primer
gtaaaacgacggccagttgtatttggaactcgctggc

SEQ ID NO: 2983 - DNA, 38 bp, Artificial Sequence
  primer
gtaaaacgacggccagtatccactgcccattctgtttg

SEQ ID NO: 2984 - DNA, 21 bp, Artificial Sequence
  primer
attacagacgtgagccaccac

SEQ ID NO: 2985 - DNA, 38 bp, Artificial Sequence
  primer
gtaaaacgacggccagtagccctgtgatttacatgtgg

SEQ ID NO: 2986 - DNA, 38 bp, Artificial Sequence
  primer
gtaaaacgacggccagtgttgcaagtttgagggagagc

SEQ ID NO: 2987 - DNA, 21 bp, Artificial Sequence
  primer
agcctgctgctttcttgctac

SEQ ID NO: 2988 - DNA, 43 bp, Artificial Sequence
  primer
gtaaaacgacggccagtcctacgatggaatctcacttcataac

SEQ ID NO: 2989 - DNA, 39 bp, Artificial Sequence
  primer
gtaaaacgacggccagttgaggtttcgttgtgtgaaatg

SEQ ID NO: 2990 - DNA, 19 bp, Artificial Sequence
  primer
ccatccatctgacaatgcg

SEQ ID NO: 2991 - DNA, 40 bp, Artificial Sequence
  primer
gtaaaacgacggccagttggtatgatataggcattcaggg

SEQ ID NO: 2992 - DNA, 25 bp, Artificial Sequence
  primer
aaattgaataaagtactccagggaa

SEQ ID NO: 2993 - DNA, 21 bp, Artificial Sequence
  primer
tctaagttgctggccattctt

SEQ ID NO: 2994 - DNA, 42 bp, Artificial Sequence
  primer
gtaaaacgacggccagttttcagtgtcttcaatctgaatctg

SEQ ID NO: 2995 - DNA, 23 bp, Artificial Sequence
  primer
tcctattgatgtcagacgtcctc

SEQ ID NO: 2996 - DNA, 21 bp, Artificial Sequence
  primer
tgtctcttccacagtgttccc

SEQ ID NO: 2997 - DNA, 21 bp, Artificial Sequence
  primer
gtgtgtgagacaaggattggg

SEQ ID NO: 2998 - DNA, 38 bp, Artificial Sequence
  primer
gtaaaacgacggccagtgggcatcgaggtacttaaagg

SEQ ID NO: 2999 - DNA, 24 bp, Artificial Sequence
  primer
tggatgggaccttgacttaataac

SEQ ID NO: 3000 - DNA, 38 bp, Artificial Sequence
  primer
gtaaaacgacggccagtttgtttctcccaagatgctcc

SEQ ID NO: 3001 - DNA, 35 bp, Artificial Sequence
  primer
gtaaaacgacggccagtcgcccagctggtattgac

SEQ ID NO: 3002 - DNA, 21 bp, Artificial Sequence
  primer
cctagagacagagaggtgggc

SEQ ID NO: 3003 - DNA, 37 bp, Artificial Sequence
  primer
gtaaaacgacggccagtattgggcaagatcccagttc

SEQ ID NO: 3004 - DNA, 38 bp, Artificial Sequence
  primer
gtaaaacgacggccagttagcaggtcaagagagttggg

SEQ ID NO: 3005 - DNA, 40 bp, Artificial Sequence
  primer
gtaaaacgacggccagttgagagcttacatttctgcatcc

SEQ ID NO: 3006 - DNA, 38 bp, Artificial Sequence
  primer
gtaaaacgacggccagtactgtcttggagtgcactggg

SEQ ID NO: 3007 - DNA, 38 bp, Artificial Sequence
  primer
gtaaaacgacggccagttgcttagcatctccgacttcc

SEQ ID NO: 3008 - DNA, 38 bp, Artificial Sequence
  primer
gtaaaacgacggccagtaatcatcctgctcccaaagtg

SEQ ID NO: 3009 - DNA, 24 bp, Artificial Sequence
  primer
cagcattacactggaaatggtaac

SEQ ID NO: 3010 - DNA, 23 bp, Artificial Sequence
  primer
actccctggattcaaatcttacc

SEQ ID NO: 3011 - DNA, 23 bp, Artificial Sequence
  primer
ggtgcttgtctttgtttcctacc

SEQ ID NO: 3012 - DNA, 21 bp, Artificial Sequence
  primer
atttccgagataatccttccg

SEQ ID NO: 3013 - DNA, 27 bp, Artificial Sequence
  primer
tggaaattaatggaagtgacagtattc

SEQ ID NO: 3014 - DNA, 39 bp, Artificial Sequence
  primer
gtaaaacgacggccagtaggcagctacatgttatggatg

SEQ ID NO: 3015 - DNA, 21 bp, Artificial Sequence
  primer
aaaggcagccacacattcttc

SEQ ID NO: 3016 - DNA, 21 bp, Artificial Sequence
  primer
ccctcatccacatctttccag

SEQ ID NO: 3017 - DNA, 21 bp, Artificial Sequence
  primer
ttctgttgggttgggtagagc

SEQ ID NO: 3018 - DNA, 36 bp, Artificial Sequence
  primer
gtaaaacgacggccagtcatcttgactgtgggcagc

SEQ ID NO: 3019 - DNA, 44 bp, Artificial Sequence
  primer
gtaaaacgacggccagttttgagtcagcttcttagtttagcttg

SEQ ID NO: 3020 - DNA, 21 bp, Artificial Sequence
  primer
tgttgatgaaggagcatttcc

SEQ ID NO: 3021 - DNA, 21 bp, Artificial Sequence
  primer
tgaattcagctttaagcagcg

SEQ ID NO: 3022 - DNA, 21 bp, Artificial Sequence
  primer
ccagatagtcacaccgactcc

SEQ ID NO: 3023 - DNA, 38 bp, Artificial Sequence
  primer
gtaaaacgacggccagtctgggtgtgtaaccgtagctg

SEQ ID NO: 3024 - DNA, 21 bp, Artificial Sequence
  primer
gatcagtgttcctcagatgcc

SEQ ID NO: 3025 - DNA, 35 bp, Artificial Sequence
  primer
gtaaaacgacggccagtaggaaccaccatgcccag

SEQ ID NO: 3026 - DNA, 39 bp, Artificial Sequence
  primer
gtaaaacgacggccagttggtacaaagctgtaggttggc

SEQ ID NO: 3027 - DNA, 38 bp, Artificial Sequence
  primer
gtaaaacgacggccagtgaaataatgccactcccgaaa

SEQ ID NO: 3028 - DNA, 21 bp, Artificial Sequence
  primer
tgctgggcagttgttgtattg

SEQ ID NO: 3029 - DNA, 21 bp, Artificial Sequence
  primer
ctcaagcaagaggtgttggtg

SEQ ID NO: 3030 - DNA, 39 bp, Artificial Sequence
  primer
gtaaaacgacggccagtttaatacagggtgaaagcctgg

SEQ ID NO: 3031 - DNA, 38 bp, Artificial Sequence
  primer
gtaaaacgacggccagtctgaggacaattgttgccttg

SEQ ID NO: 3032 - DNA, 39 bp, Artificial Sequence
  primer
gtaaaacgacggccagtcatgcattagatgttcctgctg

SEQ ID NO: 3033 - DNA, 21 bp, Artificial Sequence
  primer
ccctgtacaagtatgaggccc

SEQ ID NO: 3034 - DNA, 21 bp, Artificial Sequence
  primer
accaaactctgtatggcaggg

SEQ ID NO: 3035 - DNA, 21 bp, Artificial Sequence
  primer
aggtcctgggagcatacagac

SEQ ID NO: 3036 - DNA, 38 bp, Artificial Sequence
  primer
gtaaaacgacggccagtttgaatggcagtttgaaggtg

SEQ ID NO: 3037 - DNA, 22 bp, Artificial Sequence
  primer
tccctcaatgaaggtgaaactc

SEQ ID NO: 3038 - DNA, 21 bp, Artificial Sequence
  primer
gactgtgtggtcaggatcagg

SEQ ID NO: 3039 - DNA, 41 bp, Artificial Sequence
  primer
gtaaaacgacggccagtcaatgtcatgcatgctaatactcc

SEQ ID NO: 3040 - DNA, 39 bp, Artificial Sequence
  primer
gtaaaacgacggccagtttattcttaatgatgggctggc

SEQ ID NO: 3041 - DNA, 27 bp, Artificial Sequence
  primer
gacatttactgtgtaggtcgctatttc

SEQ ID NO: 3042 - DNA, 37 bp, Artificial Sequence
  primer
gtaaaacgacggccagtgaccctggatccacaagagg

SEQ ID NO: 3043 - DNA, 21 bp, Artificial Sequence
  primer
gtgacacccatcaatgaaacc

SEQ ID NO: 3044 - DNA, 21 bp, Artificial Sequence
  primer
caagacctgcgagttcttcag

SEQ ID NO: 3045 - DNA, 20 bp, Artificial Sequence
  primer
ccctttaacagggacactcc

SEQ ID NO: 3046 - DNA, 39 bp, Artificial Sequence
  primer
gtaaaacgacggccagtaaacaggtgaagttgtgctcag

SEQ ID NO: 3047 - DNA, 21 bp, Artificial Sequence
  primer
tgaacacatcgacagggaaag

SEQ ID NO: 3048 - DNA, 38 bp, Artificial Sequence
  primer
gtaaaacgacggccagttgccaattagtgtgggagttg

SEQ ID NO: 3049 - DNA, 39 bp, Artificial Sequence
  primer
gtaaaacgacggccagttcatccttaccaaccttcactg

SEQ ID NO: 3050 - DNA, 21 bp, Artificial Sequence
  primer
ggtcactggattagcaggagg

SEQ ID NO: 3051 - DNA, 37 bp, Artificial Sequence
  primer
gtaaaacgacggccagtcccaagggactttatcaggg

SEQ ID NO: 3052 - DNA, 36 bp, Artificial Sequence
  primer
gtaaaacgacggccagttttgtcaccggcttctgag

SEQ ID NO: 3053 - DNA, 38 bp, Artificial Sequence
  primer
gtaaaacgacggccagtgatctgccagactgcactgag

SEQ ID NO: 3054 - DNA, 37 bp, Artificial Sequence
  primer
gtaaaacgacggccagtcactgactagagccaaccgc

SEQ ID NO: 3055 - DNA, 23 bp, Artificial Sequence
  primer
agggagtaattgcttagcatgtg

SEQ ID NO: 3056 - DNA, 42 bp, Artificial Sequence
  primer
gtaaaacgacggccagttgtgtagctgaatattctggatgtg

SEQ ID NO: 3057 - DNA, 42 bp, Artificial Sequence
  primer
gtaaaacgacggccagttttcagcatgctttgacattaaata

SEQ ID NO: 3058 - DNA, 42 bp, Artificial Sequence
  primer
gtaaaacgacggccagtaagcattaccactgaagcaattaac

SEQ ID NO: 3059 - DNA, 40 bp, Artificial Sequence
  primer
gtaaaacgacggccagttttgggagagacagatgattcag

SEQ ID NO: 3060 - DNA, 38 bp, Artificial Sequence
  primer
gtaaaacgacggccagtaacacacttgatggttgagcc

SEQ ID NO: 3061 - DNA, 40 bp, Artificial Sequence
  primer
gtaaaacgacggccagtaaacttgactttccagttccctg

SEQ ID NO: 3062 - DNA, 22 bp, Artificial Sequence
  primer
aaagcttagcatcaattcctgg

SEQ ID NO: 3063 - DNA, 38 bp, Artificial Sequence
  primer
gtaaaacgacggccagtgtttgtctccgaggaagaccc

SEQ ID NO: 3064 - DNA, 39 bp, Artificial Sequence
  primer
gtaaaacgacggccagtggaagacggtgaattactgaca

SEQ ID NO: 3065 - DNA, 29 bp, Artificial Sequence
  primer
gcaatagtctctagtagtcagtgtgattg

SEQ ID NO: 3066 - DNA, 21 bp, Artificial Sequence
  primer
tgttgatggaataatttgccc

SEQ ID NO: 3067 - DNA, 19 bp, Artificial Sequence
  primer
attcaggttgcctgccttg

SEQ ID NO: 3068 - DNA, 20 bp, Artificial Sequence
  primer
cagcatttccgatcaccttc

SEQ ID NO: 3069 - DNA, 22 bp, Artificial Sequence
  primer
tgaaagggaaactcacaacctc

SEQ ID NO: 3070 - DNA, 21 bp, Artificial Sequence
  primer
gggctctgagctttgtttgtc

SEQ ID NO: 3071 - DNA, 38 bp, Artificial Sequence
  primer
gtaaaacgacggccagtctcccagctgacaattggttc

SEQ ID NO: 3072 - DNA, 41 bp, Artificial Sequence
  primer
gtaaaacgacggccagtaacagttgggaataggtgacagag

SEQ ID NO: 3073 - DNA, 39 bp, Artificial Sequence
  primer
gtaaaacgacggccagttgacagaaacttctttgaccca

SEQ ID NO: 3074 - DNA, 37 bp, Artificial Sequence
  primer
gtaaaacgacggccagtaacgagaccgaaggaaggag

SEQ ID NO: 3075 - DNA, 37 bp, Artificial Sequence
  primer
gtaaaacgacggccagtcacccaggactgggagtagg

SEQ ID NO: 3076 - DNA, 21 bp, Artificial Sequence
  primer
ttggctttgggtctcctgtag

SEQ ID NO: 3077 - DNA, 20 bp, Artificial Sequence
  primer
ggccctgtagtctggctctg

SEQ ID NO: 3078 - DNA, 38 bp, Artificial Sequence
  primer
gtaaaacgacggccagttggacatccatgaggtgagac

SEQ ID NO: 3079 - DNA, 21 bp, Artificial Sequence
  primer
gttctgctgtagggcaatgtg

SEQ ID NO: 3080 - DNA, 21 bp, Artificial Sequence
  primer
cactgagacttctctgccagg

SEQ ID NO: 3081 - DNA, 38 bp, Artificial Sequence
  primer
gtaaaacgacggccagtagggattctcacacccatgtc

SEQ ID NO: 3082 - DNA, 21 bp, Artificial Sequence
  primer
ctggtgcacagaggctgtaac

SEQ ID NO: 3083 - DNA, 21 bp, Artificial Sequence
  primer
aggctgcagacggtaagtagg

SEQ ID NO: 3084 - DNA, 38 bp, Artificial Sequence
  primer
gtaaaacgacggccagttgcctgatccttgggaatatc

SEQ ID NO: 3085 - DNA, 21 bp, Artificial Sequence
  primer
actctgtgatttcctctgggc

SEQ ID NO: 3086 - DNA, 21 bp, Artificial Sequence
  primer
ttcaaggtgtttgtctgaggg

SEQ ID NO: 3087 - DNA, 21 bp, Artificial Sequence
  primer
ctaactggcagagtggtctgg

SEQ ID NO: 3088 - DNA, 38 bp, Artificial Sequence
  primer
gtaaaacgacggccagtgagtgaggagcttgcagtgac

SEQ ID NO: 3089 - DNA, 21 bp, Artificial Sequence
  primer
tgggtttgggtctggattaag

SEQ ID NO: 3090 - DNA, 37 bp, Artificial Sequence
  primer
gtaaaacgacggccagtgacccagtccattccctctc

SEQ ID NO: 3091 - DNA, 38 bp, Artificial Sequence
  primer
gtaaaacgacggccagtcccactgtttctctcagtccc

SEQ ID NO: 3092 - DNA, 38 bp, Artificial Sequence
  primer
gtaaaacgacggccagttggcccttggatagagggtag

SEQ ID NO: 3093 - DNA, 21 bp, Artificial Sequence
  primer
ccatcttctctgacccacctc

SEQ ID NO: 3094 - DNA, 37 bp, Artificial Sequence
  primer
gtaaaacgacggccagtgtgcaggagctcaccatttc

SEQ ID NO: 3095 - DNA, 38 bp, Artificial Sequence
  primer
gtaaaacgacggccagttctgggtatgctccactctcc

SEQ ID NO: 3096 - DNA, 38 bp, Artificial Sequence
  primer
gtaaaacgacggccagtgctttctttgaggagacagcc

SEQ ID NO: 3097 - DNA, 38 bp, Artificial Sequence
  primer
gtaaaacgacggccagtcactccacctgtcactccaac

SEQ ID NO: 3098 - DNA, 21 bp, Artificial Sequence
  primer
tgcatggatagggagattcag

SEQ ID NO: 3099 - DNA, 38 bp, Artificial Sequence
  primer
gtaaaacgacggccagtgacctttgtgcctggtaggag

SEQ ID NO: 3100 - DNA, 38 bp, Artificial Sequence; identical to SEQ ID NO: 3099
  primer

SEQ ID NO: 3101 - DNA, 38 bp, Artificial Sequence
  primer
gtaaaacgacggccagtaaaccagctgtatgctacggg

SEQ ID NO: 3102 - DNA, 38 bp, Artificial Sequence
  primer
gtaaaacgacggccagtcagcagagaagctggtacgtg

SEQ ID NO: 3103 - DNA, 38 bp, Artificial Sequence
  primer
gtaaaacgacggccagtaggcggtaccacagaggatag

SEQ ID NO: 3104 - DNA, 38 bp, Artificial Sequence
  primer
gtaaaacgacggccagtgatcctgggtcctcagtcttg

SEQ ID NO: 3105 - DNA, 38 bp, Artificial Sequence
  primer
gtaaaacgacggccagtgcccactctatgggaaatagg

SEQ ID NO: 3106 - DNA, 38 bp, Artificial Sequence
  primer
gtaaaacgacggccagttgatgactcaaacccttggtg

SEQ ID NO: 3107 - DNA, 38 bp, Artificial Sequence
  primer
gtaaaacgacggccagtcggtgagccacttgcatatag

SEQ ID NO: 3108 - DNA, 38 bp, Artificial Sequence
  primer
gtaaaacgacggccagtgcataactcaaaggccagagc

SEQ ID NO: 3109 - DNA, 21 bp, Artificial Sequence
  primer
tccgagctggagctactgaag

SEQ ID NO: 3110 - DNA, 20 bp, Artificial Sequence
  primer
gttgatgcccattgcgtaag

SEQ ID NO: 3111 - DNA, 41 bp, Artificial Sequence
  primer
gtaaaacgacggccagtagttgggtaattctgactacctgg

SEQ ID NO: 3112 - DNA, 38 bp, Artificial Sequence
  primer
gtaaaacgacggccagttgattggtgtattggtggagc

SEQ ID NO: 3113 - DNA, 21 bp, Artificial Sequence
  primer
agagcttggtgacattgtggg

SEQ ID NO: 3114 - DNA, 38 bp, Artificial Sequence
  primer
gtaaaacgacggccagtcaagaagctcacttctctgcg

SEQ ID NO: 3115 - DNA, 21 bp, Artificial Sequence
  primer
gctgctggtaagtgttgttgg

SEQ ID NO: 3116 - DNA, 36 bp, Artificial Sequence
  primer
gtaaaacgacggccagtagcccagatcccttgcatc

SEQ ID NO: 3117 - DNA, 36 bp, Artificial Sequence
  primer
gtaaaacgacggccagtagctgctcagagtggctcc

SEQ ID NO: 3118 - DNA, 20 bp, Artificial Sequence
  primer
ctgccagagggtagagggag

SEQ ID NO: 3119 - DNA, 39 bp, Artificial Sequence
  primer
gtaaaacgacggccagtagctacaacctggactctgtgg

SEQ ID NO: 3120 - DNA, 37 bp, Artificial Sequence
  primer
gtaaaacgacggccagtggactttcgggaaacaggtc

SEQ ID NO: 3121 - DNA, 21 bp, Artificial Sequence
  primer
taaggaagtgaagcatgggtg

SEQ ID NO: 3122 - DNA, 38 bp, Artificial Sequence
  primer
gtaaaacgacggccagtgagaggtcgcaatggttaagg

SEQ ID NO: 3123 - DNA, 21 bp, Artificial Sequence
  primer
ctaggccaagattctggcaac

SEQ ID NO: 3124 - DNA, 20 bp, Artificial Sequence
  primer
ggaagagaggcctaggatgc

SEQ ID NO: 3125 - DNA, 38 bp, Artificial Sequence
  primer
gtaaaacgacggccagtataattcatgggtgggacagc

SEQ ID NO: 3126 - DNA, 27 bp, Artificial Sequence
  primer
gaaataattctcactctcagcgtagtt

SEQ ID NO: 3127 - DNA, 23 bp, Artificial Sequence
  primer
tcccattaatacctactgtgggc

SEQ ID NO: 3128 - DNA, 22 bp, Artificial Sequence
  primer
tttctaaactgagcagcaggtg

SEQ ID NO: 3129 - DNA, 21 bp, Artificial Sequence
  primer
gaggtgggaggattgattgag

SEQ ID NO: 3130 - DNA, 38 bp, Artificial Sequence
  primer
gtaaaacgacggccagtcaaattcttagaagcgggtgg

SEQ ID NO: 3131 - DNA, 21 bp, Artificial Sequence
  primer
tgcacagggtctagctcaaag

SEQ ID NO: 3132 - DNA, 38 bp, Artificial Sequence
  primer
gtaaaacgacggccagtttgactacctgagggtgaggc

SEQ ID NO: 3133 - DNA, 38 bp, Artificial Sequence
  primer
gtaaaacgacggccagtacttggcaaatgctgtgtgag

SEQ ID NO: 3134 - DNA, 36 bp, Artificial Sequence
  primer
gtaaaacgacggccagtacgtctggcgagagctagg

SEQ ID NO: 3135 - DNA, 38 bp, Artificial Sequence
  primer
gtaaaacgacggccagtcatgtggtatggtgcattgtg

SEQ ID NO: 3136 - DNA, 21 bp, Artificial Sequence
  primer
aattatccttcaggagggcag

SEQ ID NO: 3137 - DNA, 21 bp, Artificial Sequence
  primer
cagagtgtgggctaaatgtcg

SEQ ID NO: 3138 - DNA, 21 bp, Artificial Sequence
  primer
aggaatacggttcccagaagc

SEQ ID NO: 3139 - DNA, 38 bp, Artificial Sequence
  primer
gtaaaacgacggccagttttcctactgatgggctttgc

SEQ ID NO: 3140 - DNA, 38 bp, Artificial Sequence
  primer
gtaaaacgacggccagtaccctgctcaccttctcactc

SEQ ID NO: 3141 - DNA, 21 bp, Artificial Sequence
  primer
gtaggacccggaaatcacatc

SEQ ID NO: 3142 - DNA, 36 bp, Artificial Sequence
  primer
gtaaaacgacggccagtgttaagaagagcgtggccg

SEQ ID NO: 3143 - DNA, 21 bp, Artificial Sequence
  primer
cgagataacagctgaacccac

SEQ ID NO: 3144 - DNA, 37 bp, Artificial Sequence
  primer
gtaaaacgacggccagtctgagtctgctccatcctgg

SEQ ID NO: 3145 - DNA, 38 bp, Artificial Sequence
  primer
gtaaaacgacggccagtggtttaatctgccaagggttg

SEQ ID NO: 3146 - DNA, 21 bp, Artificial Sequence
  primer
cctcttcctcctctgtcccag

SEQ ID NO: 3147 - DNA, 21 bp, Artificial Sequence
  primer
ggatttgaagacactgagccc

SEQ ID NO: 3148 - DNA, 38 bp, Artificial Sequence
  primer
gtaaaacgacggccagtggatggttcaatctccacagc

SEQ ID NO: 3149 - DNA, 37 bp, Artificial Sequence
  primer
gtaaaacgacggccagtattcaccgtactgtccacgc

SEQ ID NO: 3150 - DNA, 21 bp, Artificial Sequence
  primer
atagagaggcagaaagcaggg

SEQ ID NO: 3151 - DNA, 21 bp, Artificial Sequence
  primer
cagatctgtttgaggctgctg

SEQ ID NO: 3152 - DNA, 38 bp, Artificial Sequence
  primer
gtaaaacgacggccagttaagcgtatctgcccatgttg

SEQ ID NO: 3153 - DNA, 37 bp, Artificial Sequence
  primer
gtaaaacgacggccagtcttggcaaggcatcttcttg

SEQ ID NO: 3154 - DNA, 23 bp, Artificial Sequence
  primer
tgaagctgaacccagatctacac

SEQ ID NO: 3155 - DNA, 40 bp, Artificial Sequence
  primer
gtaaaacgacggccagttttgcctattgcaaactaccaac

SEQ ID NO: 3156 - DNA, 21 bp, Artificial Sequence
  primer
gtcaggtgtgggttggagaag

SEQ ID NO: 3157 - DNA, 38 bp, Artificial Sequence
  primer
gtaaaacgacggccagttagcacttggcacattcattg

SEQ ID NO: 3158 - DNA, 38 bp, Artificial Sequence
  primer
gtaaaacgacggccagttaggattgctgaaggtgaggg

SEQ ID NO: 3159 - DNA, 38 bp, Artificial Sequence
  primer
gtaaaacgacggccagtaggaattcatgtctcagtccg

SEQ ID NO: 3160 - DNA, 21 bp, Artificial Sequence
  primer
gtattcagtgaagtggctcgc

SEQ ID NO: 3161 - DNA, 20 bp, Artificial Sequence
  primer
aggcaaagagctaggaaggc

SEQ ID NO: 3162 - DNA, 35 bp, Artificial Sequence
  primer
gtaaaacgacggccagtgcttcgccgtttctcctg

SEQ ID NO: 3163 - DNA, 21 bp, Artificial Sequence
  primer
agtgctgggattagggagaag

SEQ ID NO: 3164 - DNA, 40 bp, Artificial Sequence
  primer
gtaaaacgacggccagtaaatcttggtcagcgtatttcac

SEQ ID NO: 3165 - DNA, 23 bp, Artificial Sequence
  primer
gttcacatctcacattctgcttg

SEQ ID NO: 3166 - DNA, 38 bp, Artificial Sequence
  primer
gtaaaacgacggccagtagggagagcttaggaacctgc

SEQ ID NO: 3167 - DNA, 21 bp, Artificial Sequence
  primer
tggcagcagaaatacctatgg

SEQ ID NO: 3168 - DNA, 38 bp, Artificial Sequence
  primer
gtaaaacgacggccagtgtagaatctcccttcccagcg

SEQ ID NO: 3169 - DNA, 38 bp, Artificial Sequence
  primer
gtaaaacgacggccagttacgcagaagaaggtgagcag

SEQ ID NO: 3170 - DNA, 26 bp, Artificial Sequence
  primer
acttcttagtcttggaccaaagaaac

SEQ ID NO: 3171 - DNA, 39 bp, Artificial Sequence
  primer
gtaaaacgacggccagtaaaggagagtccacaagcttcc

SEQ ID NO: 3172 - DNA, 25 bp, Artificial Sequence
  primer
tcgtaatttccagattcctagtttg

SEQ ID NO: 3173 - DNA, 20 bp, Artificial Sequence
  primer
tttactcaggagggcggtgt

SEQ ID NO: 3174 - DNA, 20 bp, Artificial Sequence
  primer
tggaagctcatacttgcctg

SEQ ID NO: 3175 - DNA, 38 bp, Artificial Sequence
  primer
gtaaaacgacggccagttttgcacaactggaaatctga

SEQ ID NO: 3176 - DNA, 21 bp, Artificial Sequence
  primer
atcagattgagcggtttcctc

SEQ ID NO: 3177 - DNA, 38 bp, Artificial Sequence
  primer
gtaaaacgacggccagtgcccatattattggacagcac

SEQ ID NO: 3178 - DNA, 20 bp, Artificial Sequence
  primer
gctgctcagctcttaacccg

SEQ ID NO: 3179 - DNA, 18 bp, Artificial Sequence
  primer
cagccagatcctcccacc

SEQ ID NO: 3180 - DNA, 21 bp, Artificial Sequence
  primer
agcttggacaaagcatcttgc

SEQ ID NO: 3181 - DNA, 20 bp, Artificial Sequence
  primer
aaccagtgagtgtggccttg

SEQ ID NO: 3182 - DNA, 38 bp, Artificial Sequence
  primer
gtaaaacgacggccagtaccagccatctagaaacaggc

SEQ ID NO: 3183 - DNA, 19 bp, Artificial Sequence
  primer
gggctgcagtgagtatggg

SEQ ID NO: 3184 - DNA, 36 bp, Artificial Sequence
  primer
gtaaaacgacggccagtctgtggccagttctgggtc

SEQ ID NO: 3185 - DNA, 20 bp, Artificial Sequence
  primer
cagggaaccaggtaagggag

SEQ ID NO: 3186 - DNA, 21 bp, Artificial Sequence
  primer
aagctgaggaaggacaggacc

SEQ ID NO: 3187 - DNA, 38 bp, Artificial Sequence
  primer
gtaaaacgacggccagtgaagggactgattccaagtgc

SEQ ID NO: 3188 - DNA, 37 bp, Artificial Sequence
  primer
gtaaaacgacggccagtagagaacagacaggccctcc

SEQ ID NO: 3189 - DNA, 38 bp, Artificial Sequence
  primer
gtaaaacgacggccagtaccaaggctgatgtaaagggc

SEQ ID NO: 3190 - DNA, 38 bp, Artificial Sequence
  primer
gtaaaacgacggccagtgtgtgaacgaggtgagcagtg

SEQ ID NO: 3191 - DNA, 38 bp, Artificial Sequence
  primer
gtaaaacgacggccagtggcatgatgtggaacaaacac

SEQ ID NO: 3192 - DNA, 37 bp, Artificial Sequence
  primer
gtaaaacgacggccagtgggaggattctggtgcaatc

SEQ ID NO: 3193 - DNA, 21 bp, Artificial Sequence
  primer
acaaccagtttctgcaggagg

SEQ ID NO: 3194 - DNA, 20 bp, Artificial Sequence
  primer
cagactcccgacctgtcctc

SEQ ID NO: 3195 - DNA, 21 bp, Artificial Sequence
  primer
ataagaacaggcctgaaacgg

SEQ ID NO: 3196 - DNA, 21 bp, Artificial Sequence
  primer
ggtccagaaccagacagatcg

SEQ ID NO: 3197 - DNA, 38 bp, Artificial Sequence
  primer
gtaaaacgacggccagtgaccatgagcaggtatgatgg

SEQ ID NO: 3198 - DNA, 20 bp, Artificial Sequence
  primer
catggtgagtctggctaggg

SEQ ID NO: 3199 - DNA, 21 bp, Artificial Sequence
  primer
agtactgaggctcccagaggg

SEQ ID NO: 3200 - DNA, 38 bp, Artificial Sequence
  primer
gtaaaacgacggccagtccaggaccaagactagggagg

SEQ ID NO: 3201 - DNA, 38 bp, Artificial Sequence
  primer
gtaaaacgacggccagtcctaacatgttgtgcctggac

SEQ ID NO: 3202 - DNA, 38 bp, Artificial Sequence
  primer
gtaaaacgacggccagtataaaggtgaggctggagctg

SEQ ID NO: 3203 - DNA, 21 bp, Artificial Sequence
  primer
tctccctggcccttacattag

SEQ ID NO: 3204 - DNA, 21 bp, Artificial Sequence
  primer
atcaccactgtctgacctccc

SEQ ID NO: 3205 - DNA, 37 bp, Artificial Sequence
  primer
gtaaaacgacggccagtaggctagaagagctcagcgg

SEQ ID NO: 3206 - DNA, 39 bp, Artificial Sequence
  primer
gtaaaacgacggccagttccctgggcttatttaacttcc

SEQ ID NO: 3207 - DNA, 38 bp, Artificial Sequence
  primer
gtaaaacgacggccagtgctctttcttaggttgaccgc

SEQ ID NO: 3208 - DNA, 21 bp, Artificial Sequence
  primer
taaactgggaaggccctaatg

SEQ ID NO: 3209 - DNA, 21 bp, Artificial Sequence
  primer
tattcccgacatagaccctgg

SEQ ID NO: 3210 - DNA, 22 bp, Artificial Sequence
  primer
cacagaaacgtcctttccaatc

SEQ ID NO: 3211 - DNA, 21 bp, Artificial Sequence
  primer
tagatggaatggaggtgtggg

SEQ ID NO: 3212 - DNA, 38 bp, Artificial Sequence
  primer
gtaaaacgacggccagtggaaagttagtcggcaggatg

SEQ ID NO: 3213 - DNA, 38 bp, Artificial Sequence
  primer
gtaaaacgacggccagttcacctgtgtcagtgaccctc

SEQ ID NO: 3214 - DNA, 38 bp, Artificial Sequence
  primer
gtaaaacgacggccagtatgacagaaccatgacgcaac

SEQ ID NO: 3215 - DNA, 39 bp, Artificial Sequence
  primer
gtaaaacgacggccagtcccaaactggcttaatgaaatg

SEQ ID NO: 3216 - DNA, 38 bp, Artificial Sequence
  primer
gtaaaacgacggccagtatgtgcctcacttgacactgc

SEQ ID NO: 3217 - DNA, 38 bp, Artificial Sequence
  primer
gtaaaacgacggccagttttgcagccatttaaggtgtg

SEQ ID NO: 3218 - DNA, 38 bp, Artificial Sequence
  primer
gtaaaacgacggccagtacttatggccttgtccactcc

SEQ ID NO: 3219 - DNA, 21 bp, Artificial Sequence
  primer
acactgggtgtgattgctttg

SEQ ID NO: 3220 - DNA, 38 bp, Artificial Sequence
  primer
gtaaaacgacggccagttgaccttcccacattgcatag

SEQ ID NO: 3221 - DNA, 38 bp, Artificial Sequence
  primer
gtaaaacgacggccagtgggtcttctccaagctttctt

SEQ ID NO: 3222 - DNA, 21 bp, Artificial Sequence
  primer
gtctggctgtgtcagtgttgg

SEQ ID NO: 3223 - DNA, 38 bp, Artificial Sequence
  primer
gtaaaacgacggccagttgcttcagagttcactttgcc

SEQ ID NO: 3224 - DNA, 22 bp, Artificial Sequence
  primer
cctttgcatgtttagcacactg

SEQ ID NO: 3225 - DNA, 44 bp, Artificial Sequence
  primer
gtaaaacgacggccagtcttcagctataacagatgagttagcac

SEQ ID NO: 3226 - DNA, 38 bp, Artificial Sequence
  primer
gtaaaacgacggccagtatgatattcaggaagcagggc

SEQ ID NO: 3227 - DNA, 21 bp, Artificial Sequence
  primer
gggcagtggtatctgacacag

SEQ ID NO: 3228 - DNA, 38 bp, Artificial Sequence
  primer
gtaaaacgacggccagtagaaatggtttactggtgcgg

SEQ ID NO: 3229 - DNA, 35 bp, Artificial Sequence
  primer
gtaaaacgacggccagtctgctgggttctccgagg

SEQ ID NO: 3230 - DNA, 38 bp, Artificial Sequence
  primer
gtaaaacgacggccagtaagtctcagcatgcaatgtgg

SEQ ID NO: 3231 - DNA, 23 bp, Artificial Sequence
  primer
cagtgatctaattgctggtgctc

SEQ ID NO: 3232 - DNA, 38 bp, Artificial Sequence
  primer
gtaaaacgacggccagtaccttcaagcctctgcttgtc

SEQ ID NO: 3233 - DNA, 38 bp, Artificial Sequence
  primer
gtaaaacgacggccagttaccgtcaagctaggctcctc

SEQ ID NO: 3234 - DNA, 38 bp, Artificial Sequence
  primer
gtaaaacgacggccagtactgggcggatttaatgacag

SEQ ID NO: 3235 - DNA, 38 bp, Artificial Sequence
  primer
gtaaaacgacggccagttcaccctcctatttgacccac

SEQ ID NO: 3236 - DNA, 21 bp, Artificial Sequence
  primer
gtagaggcgggatgtggtaac

SEQ ID NO: 3237 - DNA, 38 bp, Artificial Sequence
  primer
gtaaaacgacggccagtacacagtgagtgctggacagg

SEQ ID NO: 3238 - DNA, 37 bp, Artificial Sequence
  primer
gtaaaacgacggccagtcttcagcaccctacctcagc

SEQ ID NO: 3239 - DNA, 38 bp, Artificial Sequence
  primer
gtaaaacgacggccagtagaagcaattcaggagggaag

SEQ ID NO: 3240 - DNA, 38 bp, Artificial Sequence
  primer
gtaaaacgacggccagttagctgcaggatggagagagg

SEQ ID NO: 3241 - DNA, 38 bp, Artificial Sequence
  primer
gtaaaacgacggccagtctgtgggaggaggagagattg

SEQ ID NO: 3242 - DNA, 38 bp, Artificial Sequence
  primer
gtaaaacgacggccagtaaggtggaaagggtcattctg

SEQ ID NO: 3243 - DNA, 21 bp, Artificial Sequence
  primer
ctcctcctttgggtttctgag

SEQ ID NO: 3244 - DNA, 37 bp, Artificial Sequence
  primer
gtaaaacgacggccagtgcctcaaccttattggcctc

SEQ ID NO: 3245 - DNA, 38 bp, Artificial Sequence
  primer
gtaaaacgacggccagtacacacatacccagcacaacc

SEQ ID NO: 3246 - DNA, 38 bp, Artificial Sequence
  primer
gtaaaacgacggccagttcacttgacttcactccctgc

SEQ ID NO: 3247 - DNA, 21 bp, Artificial Sequence
  primer
ccctgtgctggataagtaggg

SEQ ID NO: 3248 - DNA, 21 bp, Artificial Sequence
  primer
tggtgacaggtttgtttgcag

SEQ ID NO: 3249 - DNA, 21 bp, Artificial Sequence
  primer
taccctccaggtaggaggagc

SEQ ID NO: 3250 - DNA, 21 bp, Artificial Sequence
  primer
tggtgacaggtttgtttgcag

SEQ ID NO: 3251 - DNA, 20 bp, Artificial Sequence
  primer
ctctgcttggatgatgggag

SEQ ID NO: 3252 - DNA, 38 bp, Artificial Sequence
  primer
gtaaaacgacggccagttttgcatgttgacttgaaccc

SEQ ID NO: 3253 - DNA, 20 bp, Artificial Sequence
  primer
tggcggtagaatcttcccag

SEQ ID NO: 3254 - DNA, 38 bp, Artificial Sequence
  primer
gtaaaacgacggccagttgtgcttggcacttcctaatg

SEQ ID NO: 3255 - DNA, 23 bp, Artificial Sequence
  primer
attaatgtcaatgcttctggctt

SEQ ID NO: 3256 - DNA, 38 bp, Artificial Sequence
  primer
gtaaaacgacggccagttaggcaaattccaccctgaag

SEQ ID NO: 3257 - DNA, 28 bp, Artificial Sequence
  primer
tgttatctaagaacaagcaaagaatgtt

SEQ ID NO: 3258 - DNA, 39 bp, Artificial Sequence
  primer
gtaaaacgacggccagtttaaagaggcacttgtccttgg

SEQ ID NO: 3259 - DNA, 21 bp, Artificial Sequence
  primer
tttgcaatggcctctaaactg

SEQ ID NO: 3260 - DNA, 26 bp, Artificial Sequence
  primer
ataccatatgcttctctgtttgtttc

SEQ ID NO: 3261 - DNA, 21 bp, Artificial Sequence
  primer
agctgcatgccatcatagttc

SEQ ID NO: 3262 - DNA, 38 bp, Artificial Sequence
  primer
gtaaaacgacggccagtttgtgtgaatatgctgctggg

SEQ ID NO: 3263 - DNA, 37 bp, Artificial Sequence
  primer
gtaaaacgacggccagtataggcccaactggcagaag

SEQ ID NO: 3264 - DNA, 38 bp, Artificial Sequence
  primer
gtaaaacgacggccagtcataactccagggtggctctg

SEQ ID NO: 3265 - DNA, 38 bp, Artificial Sequence
  primer
gtaaaacgacggccagtatgatgtaggagtgggtgacg

SEQ ID NO: 3266 - DNA, 38 bp, Artificial Sequence
  primer
gtaaaacgacggccagtgtgagatgcaggctcttgtcc

SEQ ID NO: 3267 - DNA, 21 bp, Artificial Sequence
  primer
cttacctctttgggagcatgg

SEQ ID NO: 3268 - DNA, 21 bp, Artificial Sequence
  primer
attgccttgtgtcaaagatgg

SEQ ID NO: 3269 - DNA, 38 bp, Artificial Sequence
  primer
gtaaaacgacggccagtagcacagacattctgctctcg

SEQ ID NO: 3270 - DNA, 38 bp, Artificial Sequence
  primer
gtaaaacgacggccagttggattgtcatctgttgagcc

SEQ ID NO: 3271 - DNA, 38 bp, Artificial Sequence
  primer
gtaaaacgacggccagtgtttgatgggtaagggtggag

SEQ ID NO: 3272 - DNA, 38 bp, Artificial Sequence
  primer
gtaaaacgacggccagttatgcttgcatctggcatttc

SEQ ID NO: 3273 - DNA, 38 bp, Artificial Sequence
  primer
gtaaaacgacggccagtaagaacccgtgcttgactgag

SEQ ID NO: 3274 - DNA, 42 bp, Artificial Sequence
  primer
gtaaaacgacggccagtcacattaaattggtcacattgttcc

SEQ ID NO: 3275 - DNA, 21 bp, Artificial Sequence
  primer
gaatcccagagtctgtcccag

SEQ ID NO: 3276 - DNA, 21 bp, Artificial Sequence
  primer
ctgcaagcgaatactcacagg

SEQ ID NO: 3277 - DNA, 22 bp, Artificial Sequence
  primer
aagccagatatggtggctctta

SEQ ID NO: 3278 - DNA, 40 bp, Artificial Sequence
  primer
gtaaaacgacggccagtgacccttacattactctggcagg

SEQ ID NO: 3279 - DNA, 21 bp, Artificial Sequence
  primer
caggacaaccatattcaaggc

SEQ ID NO: 3280 - DNA, 44 bp, Artificial Sequence
  primer
gtaaaacgacggccagtatcttggccaatgaataacttaaatac

SEQ ID NO: 3281 - DNA, 27 bp, Artificial Sequence
  primer
acctagtttgaagctttatatatttgc

SEQ ID NO: 3282 - DNA, 25 bp, Artificial Sequence
  primer
tgcttcttaatcaataaattacggc

SEQ ID NO: 3283 - DNA, 38 bp, Artificial Sequence
  primer
gtaaaacgacggccagtggtggccatcttgtgatttac

SEQ ID NO: 3284 - DNA, 21 bp, Artificial Sequence
  primer
gggtgacagagtgaaatcctg

SEQ ID NO: 3285 - DNA, 38 bp, Artificial Sequence
  primer
gtaaaacgacggccagtaactcacggacttgggaactc

SEQ ID NO: 3286 - DNA, 38 bp, Artificial Sequence
  primer
gtaaaacgacggccagtacttgcattgacagggtatgc

SEQ ID NO: 3287 - DNA, 42 bp, Artificial Sequence
  primer
gtaaaacgacggccagtttatgcagtactcacttggaacttg

SEQ ID NO: 3288 - DNA, 21 bp, Artificial Sequence
  primer
ttaaccatgtcagggcaaatg

SEQ ID NO: 3289 - DNA, 21 bp, Artificial Sequence
  primer
ccatttggccattatgttgtc

SEQ ID NO: 3290 - DNA, 24 bp, Artificial Sequence
  primer
gcactgtagtttgcatttatgttc

SEQ ID NO: 3291 - DNA, 26 bp, Artificial Sequence
  primer
tggtaaattataaatcaatgctaagg

SEQ ID NO: 3292 - DNA, 35 bp, Artificial Sequence
  primer
gtaaaacgacggccagtagtctcgccagctcctcc

SEQ ID NO: 3293 - DNA, 38 bp, Artificial Sequence
  primer
gtaaaacgacggccagttcacagaaagtgcatgtgtgg

SEQ ID NO: 3294 - DNA, 38 bp, Artificial Sequence
  primer
gtaaaacgacggccagttcctgtggatcaatgttggag

SEQ ID NO: 3295 - DNA, 20 bp, Artificial Sequence
  primer
ccttgtggctgcctagtttc

SEQ ID NO: 3296 - DNA, 22 bp, Artificial Sequence
  primer
gctctttgcaggttgtaaggtg

SEQ ID NO: 3297 - DNA, 21 bp, Artificial Sequence
  primer
tgcatcagagtctcacgaagg

SEQ ID NO: 3298 - DNA, 21 bp, Artificial Sequence
  primer
caccacagccaagaacatctc

SEQ ID NO: 3299 - DNA, 38 bp, Artificial Sequence
  primer
gtaaaacgacggccagtcaaagctcttactgtggtggg

SEQ ID NO: 3300 - DNA, 21 bp, Artificial Sequence
  primer
tccaccagaatgaaaggaagg

SEQ ID NO: 3301 - DNA, 38 bp, Artificial Sequence
  primer
gtaaaacgacggccagtgtgatggccacttactcccag

SEQ ID NO: 3302 - DNA, 38 bp, Artificial Sequence
  primer
gtaaaacgacggccagtcttggctaaggataaggcagg

SEQ ID NO: 3303 - DNA, 36 bp, Artificial Sequence
  primer
gtaaaacgacggccagtcacgagtgacacctgcctg

SEQ ID NO: 3304 - DNA, 21 bp, Artificial Sequence
  primer
tgacccgagatattgcatcac

SEQ ID NO: 3305 - DNA, 38 bp, Artificial Sequence
  primer
gtaaaacgacggccagtgtgatccttatgagcccttgg

SEQ ID NO: 3306 - DNA, 39 bp, Artificial Sequence
  primer
gtaaaacgacggccagtggaacaggaagaagaggctgag

SEQ ID NO: 3307 - DNA, 21 bp, Artificial Sequence
  primer
agactgaagctctctggtgcc

SEQ ID NO: 3308 - DNA, 38 bp, Artificial Sequence
  primer
gtaaaacgacggccagttgggtcctcatatgttccaag

SEQ ID NO: 3309 - DNA, 38 bp, Artificial Sequence
  primer
gtaaaacgacggccagtgggttctggcttctctgtgtc

SEQ ID NO: 3310 - DNA, 38 bp, Artificial Sequence
  primer
gtaaaacgacggccagtaatgcctgaagaagaagcacg

SEQ ID NO: 3311 - DNA, 38 bp, Artificial Sequence
  primer
gtaaaacgacggccagtcttgggtcaaagggaactcag

SEQ ID NO: 3312 - DNA, 21 bp, Artificial Sequence
  primer
aggttgcatctgacttctggg

SEQ ID NO: 3313 - DNA, 21 bp, Artificial Sequence
  primer
gatactgccagcttgctctcc

SEQ ID NO: 3314 - DNA, 21 bp, Artificial Sequence
  primer
agcctttgttctcagtgggtg

SEQ ID NO: 3315 - DNA, 37 bp, Artificial Sequence
  primer
gtaaaacgacggccagtctgcaagagacagggctcag

SEQ ID NO: 3316 - DNA, 20 bp, Artificial Sequence
  primer
gggcgacagagtgagacttc

SEQ ID NO: 3317 - DNA, 25 bp, Artificial Sequence
  primer
cagaattcaataaagttgcaggtca

SEQ ID NO: 3318 - DNA, 38 bp, Artificial Sequence
  primer
gtaaaacgacggccagtcaagcttgcctgttgtgtttg

SEQ ID NO: 3319 - DNA, 23 bp, Artificial Sequence
  primer
tttgaaacatgagtgtttgatgc

SEQ ID NO: 3320 - DNA, 22 bp, Artificial Sequence
  primer
gcggtgtcactcagtaagtttg

SEQ ID NO: 3321 - DNA, 23 bp, Artificial Sequence
  primer
gatagagggaagttgtttcccaa

SEQ ID NO: 3322 - DNA, 27 bp, Artificial Sequence
  primer
tgtatgcacataatttggctactgtaa

SEQ ID NO: 3323 - DNA, 44 bp, Artificial Sequence
  primer
gtaaaacgacggccagtaaagaagcagaaagatttagtcacatc

SEQ ID NO: 3324 - DNA, 20 bp, Artificial Sequence
  primer
tttctttgtctgaggccacc

SEQ ID NO: 3325 - DNA, 39 bp, Artificial Sequence
  primer
gtaaaacgacggccagtaatttggtctgttgtggaatgc

SEQ ID NO: 3326 - DNA, 23 bp, Artificial Sequence
  primer
tgccaacatgtaagttaagcacc

SEQ ID NO: 3327 - DNA, 35 bp, Artificial Sequence
  primer
gtaaaacgacggccagtctgaaggaccatgctgcg

SEQ ID NO: 3328 - DNA, 25 bp, Artificial Sequence
  primer
ggctaactctggagtatgtctagga

SEQ ID NO: 3329 - DNA, 21 bp, Artificial Sequence
  primer
tattggcaatttaggcaaggc

SEQ ID NO: 3330 - DNA, 22 bp, Artificial Sequence
  primer
ccagtctaagcagggaagaagc

SEQ ID NO: 3331 - DNA, 22 bp, Artificial Sequence
  primer
ggaaactgcattgctacacaca

SEQ ID NO: 3332 - DNA, 21 bp, Artificial Sequence
  primer
caagagtcactttgggcattt

SEQ ID NO: 3333 - DNA, 38 bp, Artificial Sequence
  primer
gtaaaacgacggccagttgggtgaacccagttcttagg

SEQ ID NO: 3334 - DNA, 38 bp, Artificial Sequence
  primer
gtaaaacgacggccagtaaatgcaggaatcactttgcc

SEQ ID NO: 3335 - DNA, 38 bp, Artificial Sequence
  primer
gtaaaacgacggccagttatttctggccactctcaggc

SEQ ID NO: 3336 - DNA, 39 bp, Artificial Sequence
  primer
gtaaaacgacggccagtcaagccaattagtgtttctgcc

SEQ ID NO: 3337 - DNA, 21 bp, Artificial Sequence
  primer
gttgagctggtagtggtcgtg

SEQ ID NO: 3338 - DNA, 37 bp, Artificial Sequence
  primer
gtaaaacgacggccagtaggcatgaagcttggtgttg

SEQ ID NO: 3339 - DNA, 21 bp, Artificial Sequence
  primer
ggtatgcaacatgacacccag

SEQ ID NO: 3340 - DNA, 20 bp, Artificial Sequence
  primer
actgtggaaccatacggcag

SEQ ID NO: 3341 - DNA, 38 bp, Artificial Sequence
  primer
gtaaaacgacggccagtgatgcaaggagtgcatctcag

SEQ ID NO: 3342 - DNA, 21 bp, Artificial Sequence
  primer
acttggcctagcctatgttgc

SEQ ID NO: 3343 - DNA, 38 bp, Artificial Sequence
  primer
gtaaaacgacggccagtggtgcaatggaacatctcatc

SEQ ID NO: 3344 - DNA, 21 bp, Artificial Sequence
  primer
aatcaattctcagggaaaccg

SEQ ID NO: 3345 - DNA, 21 bp, Artificial Sequence
  primer
cttgtcacatgtctgccttcc

SEQ ID NO: 3346 - DNA, 21 bp, Artificial Sequence
  primer
cacttagctacagccaaccgc

SEQ ID NO: 3347 - DNA, 21 bp, Artificial Sequence
  primer
agacgtaggactgcaggatgg

SEQ ID NO: 3348 - DNA, 38 bp, Artificial Sequence
  primer
gtaaaacgacggccagtattggtgaatgcttggcttct

SEQ ID NO: 3349 - DNA, 27 bp, Artificial Sequence
  primer
agagagacctataaagtgttgatttgg

SEQ ID NO: 3350 - DNA, 38 bp, Artificial Sequence
  primer
gtaaaacgacggccagtgatgtggaggtgcattgtgag

SEQ ID NO: 3351 - DNA, 37 bp, Artificial Sequence
  primer
gtaaaacgacggccagtggtgtgtctggaggtgatgg

SEQ ID NO: 3352 - DNA, 38 bp, Artificial Sequence
  primer
gtaaaacgacggccagtagggtctccagctatgtttgc

SEQ ID NO: 3353 - DNA, 39 bp, Artificial Sequence
  primer
gtaaaacgacggccagtggtttgtgtgatcgttaagtgc

SEQ ID NO: 3354 - DNA, 24 bp, Artificial Sequence
  primer
gggaaggactaggaactgagtagg

SEQ ID NO: 3355 - DNA, 22 bp, Artificial Sequence
  primer
ttagggatctttcaattgcacc

SEQ ID NO: 3356 - DNA, 39 bp, Artificial Sequence
  primer
gtaaaacgacggccagttgctctgttctttgggtattgg

SEQ ID NO: 3357 - DNA, 22 bp, Artificial Sequence
  primer
tggcagaaataccagagaagtg

SEQ ID NO: 3358 - DNA, 38 bp, Artificial Sequence
  primer
gtaaaacgacggccagtctggctacagtgtgttcagcc

SEQ ID NO: 3359 - DNA, 25 bp, Artificial Sequence
  primer
ccattggtatttgattgtctttcat

SEQ ID NO: 3360 - DNA, 47 bp, Artificial Sequence
  primer
gtaaaacgacggccagttgtcatacataagtagactttattccctca

SEQ ID NO: 3361 - DNA, 39 bp, Artificial Sequence
  primer
gtaaaacgacggccagtcaagttctgagctcatgctttc

SEQ ID NO: 3362 - DNA, 38 bp, Artificial Sequence
  primer
gtaaaacgacggccagtccaggtccacacactgagatg

SEQ ID NO: 3363 - DNA, 22 bp, Artificial Sequence
  primer
tggcctgtcttgtggaatttag

SEQ ID NO: 3364 - DNA, 38 bp, Artificial Sequence
  primer
gtaaaacgacggccagtatccacttgctcttgacctcc

SEQ ID NO: 3365 - DNA, 22 bp, Artificial Sequence
  primer
tcacatgtaccagcatgaaagg

SEQ ID NO: 3366 - DNA, 21 bp, Artificial Sequence
  primer
tgtgaaccgttcgttggtaac

SEQ ID NO: 3367 - DNA, 21 bp, Artificial Sequence
  primer
gagcaggtggcacactaattt

SEQ ID NO: 3368 - DNA, 40 bp, Artificial Sequence
  primer
gtaaaacgacggccagtattgaactggcttatgctactgg

SEQ ID NO: 3369 - DNA, 24 bp, Artificial Sequence
  primer
tttggaattaccacattctaagca

SEQ ID NO: 3370 - DNA, 25 bp, Artificial Sequence
  primer
gatatggattgctgaattatggttg

SEQ ID NO: 3371 - DNA, 38 bp, Artificial Sequence
  primer
gtaaaacgacggccagttttgtgtgtgcattcccattt

SEQ ID NO: 3372 - DNA, 23 bp, Artificial Sequence
  primer
ggatgttgtgtaattctgccttc

SEQ ID NO: 3373 - DNA, 38 bp, Artificial Sequence
  primer
gtaaaacgacggccagttacagtgtgacaaacccggtg

SEQ ID NO: 3374 - DNA, 42 bp, Artificial Sequence
  primer
gtaaaacgacggccagttgaaagttagaagtcagagggtttg

SEQ ID NO: 3375 - DNA, 21 bp, Artificial Sequence
  primer
actttgcaagagtgtgcatcc

SEQ ID NO: 3376 - DNA, 38 bp, Artificial Sequence; identical to SEQ ID NO: 3373
  primer

SEQ ID NO: 3377 - DNA, 38 bp, Artificial Sequence
  primer
gtaaaacgacggccagtccttgctaagcttgtgctgtg

SEQ ID NO: 3378 - DNA, 27 bp, Artificial Sequence
  primer
tgattcatgtagatcattatccctacc

SEQ ID NO: 3379 - DNA, 35 bp, Artificial Sequence
  primer
gtaaaacgacggccagtagtggctgcgaggctagg

SEQ ID NO: 3380 - DNA, 24 bp, Artificial Sequence
  primer
tttattaacttctccaggccattt

SEQ ID NO: 3381 - DNA, 42 bp, Artificial Sequence
  primer
gtaaaacgacggccagtttgtcttattagctctttgctaccc

SEQ ID NO: 3382 - DNA, 40 bp, Artificial Sequence
  primer
gtaaaacgacggccagttcctggatactgtgtgaaactcg

SEQ ID NO: 3383 - DNA, 38 bp, Artificial Sequence
  primer
gtaaaacgacggccagtgctttatggaagcacccaaag

SEQ ID NO: 3384 - DNA, 24 bp, Artificial Sequence
  primer
gacacaataatgaagctcacttgc

SEQ ID NO: 3385 - DNA, 43 bp, Artificial Sequence
  primer
gtaaaacgacggccagtggacattagagaaagttccaacactg

SEQ ID NO: 3386 - DNA, 26 bp, Artificial Sequence
  primer
ttacatttgaactatctttgtggtca

SEQ ID NO: 3387 - DNA, 24 bp, Artificial Sequence
  primer
aaagtaggcagcagagagttgttc

SEQ ID NO: 3388 - DNA, 21 bp, Artificial Sequence
  primer
tacagttgtgagccatgctgc

SEQ ID NO: 3389 - DNA, 38 bp, Artificial Sequence
  primer
gtaaaacgacggccagtttcctgtccttccactgactc

SEQ ID NO: 3390 - DNA, 38 bp, Artificial Sequence
  primer
gtaaaacgacggccagtttcttggaggaggatggtttg

SEQ ID NO: 3391 - DNA, 21 bp, Artificial Sequence
  primer
cttgggcccagttgtaaagag

SEQ ID NO: 3392 - DNA, 23 bp, Artificial Sequence
  primer
gcacaatattacttcttgccagc

SEQ ID NO: 3393 - DNA, 37 bp, Artificial Sequence
  primer
gtaaaacgacggccagtccatctctgcaaactccacc

SEQ ID NO: 3394 - DNA, 38 bp, Artificial Sequence
  primer
gtaaaacgacggccagttgccacaacaacagatcaaag

SEQ ID NO: 3395 - DNA, 38 bp, Artificial Sequence
  primer
gtaaaacgacggccagtcatttggaatatgcatgccac

SEQ ID NO: 3396 - DNA, 38 bp, Artificial Sequence
  primer
gtaaaacgacggccagtggcattgtcggtgagtctaag

SEQ ID NO: 3397 - DNA, 20 bp, Artificial Sequence
  primer
atgcactgtgtggcccttac

SEQ ID NO: 3398 - DNA, 39 bp, Artificial Sequence
  primer
gtaaaacgacggccagttccaagtgaaccagaaggagac

SEQ ID NO: 3399 - DNA, 37 bp, Artificial Sequence
  primer
gtaaaacgacggccagtttccttgctctggagaatcg

SEQ ID NO: 3400 - DNA, 38 bp, Artificial Sequence
  primer
gtaaaacgacggccagttgaatcaatgtggaccgaatc

SEQ ID NO: 3401 - DNA, 37 bp, Artificial Sequence
  primer
gtaaaacgacggccagtatccacatccactgacagcc

SEQ ID NO: 3402 - DNA, 37 bp, Artificial Sequence
  primer
gtaaaacgacggccagttttaaagcttcctccctgcc

SEQ ID NO: 3403 - DNA, 39 bp, Artificial Sequence
  primer
gtaaaacgacggccagtaaactgcttaactgcctttccc

SEQ ID NO: 3404 - DNA, 40 bp, Artificial Sequence
  primer
gtaaaacgacggccagtttggtcttcaccaaaggacatac

SEQ ID NO: 3405 - DNA, 38 bp, Artificial Sequence
  primer
gtaaaacgacggccagtgtctcactggagaggaggcag

SEQ ID NO: 3406 - DNA, 38 bp, Artificial Sequence
  primer
gtaaaacgacggccagtttgggaatgcagtaaggatgg

SEQ ID NO: 3407 - DNA, 39 bp, Artificial Sequence
  primer
gtaaaacgacggccagttgccagagttgtttgatctgtc

SEQ ID NO: 3408 - DNA, 38 bp, Artificial Sequence
  primer
gtaaaacgacggccagttggactaatcagcgtttgctc

SEQ ID NO: 3409 - DNA, 37 bp, Artificial Sequence
  primer
gtaaaacgacggccagtttcaagatttcagatgcggc

SEQ ID NO: 3410 - DNA, 21 bp, Artificial Sequence
  primer
ctgcagcagtcacttctcctt

SEQ ID NO: 3411 - DNA, 38 bp, Artificial Sequence
  primer
gtaaaacgacggccagtatcctgtcggttgaattggtg

SEQ ID NO: 3412 - DNA, 42 bp, Artificial Sequence
  primer
gtaaaacgacggccagttcactcccaaagtgctttaatgtag

SEQ ID NO: 3413 - DNA, 25 bp, Artificial Sequence
  primer
tcacaaatatgcttggaaataaggt

SEQ ID NO: 3414 - DNA, 39 bp, Artificial Sequence
  primer
gtaaaacgacggccagtcagtgatggttcacagtgagtt

SEQ ID NO: 3415 - DNA, 21 bp, Artificial Sequence
  primer
ctcaaagaggaaagggcagac

SEQ ID NO: 3416 - DNA, 20 bp, Artificial Sequence
  primer
atctggcagttggtcagtgg

SEQ ID NO: 3417 - DNA, 21 bp, Artificial Sequence
  primer
caacaaaccatcagttgctcc

SEQ ID NO: 3418 - DNA, 39 bp, Artificial Sequence
  primer
gtaaaacgacggccagtgcttcagtgaaatgacacctcc

SEQ ID NO: 3419 - DNA, 39 bp, Artificial Sequence
  primer
gtaaaacgacggccagtggagtggtcaatggaattatgc

SEQ ID NO: 3420 - DNA, 40 bp, Artificial Sequence
  primer
gtaaaacgacggccagtaactaagagtctcggctacaggg

SEQ ID NO: 3421 - DNA, 39 bp, Artificial Sequence
  primer
gtaaaacgacggccagtgcctcttcacacagacctcaac

SEQ ID NO: 3422 - DNA, 21 bp, Artificial Sequence
  primer
tagatggaagcctggagactg

SEQ ID NO: 3423 - DNA, 23 bp, Artificial Sequence
  primer
gggtagctggaatatgtgctaag

SEQ ID NO: 3424 - DNA, 20 bp, Artificial Sequence
  primer
aaacccaggcaataggcaag

SEQ ID NO: 3425 - DNA, 38 bp, Artificial Sequence
  primer
gtaaaacgacggccagtttctatggaatacgccagcag

SEQ ID NO: 3426 - DNA, 38 bp, Artificial Sequence
  primer
gtaaaacgacggccagtaactggaccttgaaagttggg

SEQ ID NO: 3427 - DNA, 27 bp, Artificial Sequence
  primer
ctccatattatgctaattaccggatag

SEQ ID NO: 3428 - DNA, 38 bp, Artificial Sequence
  primer
gtaaaacgacggccagtcctccaactactatgcccaaa

SEQ ID NO: 3429 - DNA, 38 bp, Artificial Sequence
  primer
gtaaaacgacggccagttctgctctggaccagtgtttc

SEQ ID NO: 3430 - DNA, 21 bp, Artificial Sequence
  primer
tgtgaggataactggcaccac

SEQ ID NO: 3431 - DNA, 21 bp, Artificial Sequence
  primer
gaccagggtgctatccttgag

SEQ ID NO: 3432 - DNA, 21 bp, Artificial Sequence
  primer
taacatgccgaatggaatttg

SEQ ID NO: 3433 - DNA, 38 bp, Artificial Sequence
  primer
gtaaaacgacggccagtggaagtcggagaacattacgc

SEQ ID NO: 3434 - DNA, 21 bp, Artificial Sequence
  primer
ctttaatgtgaagcgctgtgg

SEQ ID NO: 3435 - DNA, 21 bp, Artificial Sequence
  primer
gttgcaaagactgcaagttcc

SEQ ID NO: 3436 - DNA, 38 bp, Artificial Sequence
  primer
gtaaaacgacggccagttactactgtgcattgggctcg

SEQ ID NO: 3437 - DNA, 38 bp, Artificial Sequence
  primer
gtaaaacgacggccagtaggtagtgttgacagtggccc

SEQ ID NO: 3438 - DNA, 37 bp, Artificial Sequence
  primer
gtaaaacgacggccagttccctcctttcttccacctg

SEQ ID NO: 3439 - DNA, 38 bp, Artificial Sequence
  primer
gtaaaacgacggccagtcagatcttcctctcccaatgc

SEQ ID NO: 3440 - DNA, 21 bp, Artificial Sequence
  primer
gctccgtgaaagagtctctgg

SEQ ID NO: 3441 - DNA, 38 bp, Artificial Sequence
  primer
gtaaaacgacggccagtagaataaggcgaggctaaggg

SEQ ID NO: 3442 - DNA, 38 bp, Artificial Sequence
  primer
gtaaaacgacggccagttaaatgctcgcctgtcatcag

SEQ ID NO: 3443 - DNA, 39 bp, Artificial Sequence
  primer
gtaaaacgacggccagtatcccaggactaggttatgtgc

SEQ ID NO: 3444 - DNA, 21 bp, Artificial Sequence
  primer
tttcgtccatctggatacgtg

SEQ ID NO: 3445 - DNA, 21 bp, Artificial Sequence
  primer
gcaaattcaatatgtggcagg

SEQ ID NO: 3446 - DNA, 21 bp, Artificial Sequence
  primer
taaatgatggcacctcctgtg

SEQ ID NO: 3447 - DNA, 20 bp, Artificial Sequence
  primer
gagaacgctgtcccatgaac

SEQ ID NO: 3448 - DNA, 22 bp, Artificial Sequence
  primer
cacccatacctgcacaagtaaa

SEQ ID NO: 3449 - DNA, 42 bp, Artificial Sequence
  primer
gtaaaacgacggccagttccttagactgggtttatttgtgtg

SEQ ID NO: 3450 - DNA, 38 bp, Artificial Sequence
  primer
gtaaaacgacggccagttatgtgggtgaatgggtatgg

SEQ ID NO: 3451 - DNA, 23 bp, Artificial Sequence
  primer
actgatataaatcacggagcctg

SEQ ID NO: 3452 - DNA, 25 bp, Artificial Sequence
  primer
caattgattaagtgacttctgctgc

SEQ ID NO: 3453 - DNA, 22 bp, Artificial Sequence
  primer
gcaaacacctctgcatatcttg

SEQ ID NO: 3454 - DNA, 38 bp, Artificial Sequence
  primer
gtaaaacgacggccagtaaacccaaagcagccttacac

SEQ ID NO: 3455 - DNA, 39 bp, Artificial Sequence
  primer
gtaaaacgacggccagtttcctggataattaacccaccc

SEQ ID NO: 3456 - DNA, 44 bp, Artificial Sequence
  primer
gtaaaacgacggccagtgaactgcagacttaaattattagcagg

SEQ ID NO: 3457 - DNA, 39 bp, Artificial Sequence
  primer
gtaaaacgacggccagtaagagcttcagcttctcacctg

SEQ ID NO: 3458 - DNA, 44 bp, Artificial Sequence
  primer
gtaaaacgacggccagttttggcctctaagcacttattataaac

SEQ ID NO: 3459 - DNA, 42 bp, Artificial Sequence
  primer
gtaaaacgacggccagtaaacctgtaactatcagcagcattc

SEQ ID NO: 3460 - DNA, 42 bp, Artificial Sequence
  primer
gtaaaacgacggccagtcattaatggatagactaaagcgaaa

SEQ ID NO: 3461 - DNA, 19 bp, Artificial Sequence
  primer
agtgggcattgcctttcac

SEQ ID NO: 3462 - DNA, 25 bp, Artificial Sequence
  primer
ttgaaagttaagctaggatcaatgg

SEQ ID NO: 3463 - DNA, 42 bp, Artificial Sequence
  primer
gtaaaacgacggccagttttgtatcattgaatggctatgctt

SEQ ID NO: 3464 - DNA, 25 bp, Artificial Sequence
  primer
tgtgagactgtcgctctaaataaac

SEQ ID NO: 3465 - DNA, 22 bp, Artificial Sequence
  primer
gctgtagctgctgtgagacttg

SEQ ID NO: 3466 - DNA, 38 bp, Artificial Sequence
  primer
gtaaaacgacggccagttgcatctgtgttcattgacct

SEQ ID NO: 3467 - DNA, 21 bp, Artificial Sequence
  primer
ttgaaatgtgcccttcttgtg

SEQ ID NO: 3468 - DNA, 43 bp, Artificial Sequence
  primer
gtaaaacgacggccagttggtagagaagaattaacacaggttg

SEQ ID NO: 3469 - DNA, 21 bp, Artificial Sequence
  primer
tcatcgtattagccaggatgg

SEQ ID NO: 3470 - DNA, 21 bp, Artificial Sequence
  primer
gtggcaaagtgaaactccatc

SEQ ID NO: 3471 - DNA, 38 bp, Artificial Sequence
  primer
gtaaaacgacggccagtcagctgcttgtacagtgggag

SEQ ID NO: 3472 - DNA, 18 bp, Artificial Sequence
  primer
gcacggattccctcctcc

SEQ ID NO: 3473 - DNA, 21 bp, Artificial Sequence
  primer
gcgtgttgaaggtgaagtctg

SEQ ID NO: 3474 - DNA, 21 bp, Artificial Sequence
  primer
tatgttctcacctcctccacg

SEQ ID NO: 3475 - DNA, 38 bp, Artificial Sequence
  primer
gtaaaacgacggccagtagcatttagggaggaaggctg

SEQ ID NO: 3476 - DNA, 37 bp, Artificial Sequence
  primer
gtaaaacgacggccagtcctccttgcattcctaaggg

SEQ ID NO: 3477 - DNA, 37 bp, Artificial Sequence
  primer
gtaaaacgacggccagtctgctctgggatgaggtgag

SEQ ID NO: 3478 - DNA, 38 bp, Artificial Sequence
  primer
gtaaaacgacggccagtgaagagacgggaattcacagg

SEQ ID NO: 3479 - DNA, 36 bp, Artificial Sequence
  primer
gtaaaacgacggccagtagcagcttccactcagggt

SEQ ID NO: 3480 - DNA, 37 bp, Artificial Sequence
  primer
gtaaaacgacggccagtaagtcgccaactacgtggac

SEQ ID NO: 3481 - DNA, 35 bp, Artificial Sequence
  primer
gtaaaacgacggccagtctcacgtgggtgcctctg

SEQ ID NO: 3482 - DNA, 35 bp, Artificial Sequence
  primer
gtaaaacgacggccagtacgtgggtgcctctgacc

SEQ ID NO: 3483 - DNA, 20 bp, Artificial Sequence
  primer
gactttgcgcgggttacttc

SEQ ID NO: 3484 - DNA, 35 bp, Artificial Sequence
  primer
gtaaaacgacggccagtgaggagtgtgactgcggc

SEQ ID NO: 3485 - DNA, 21 bp, Artificial Sequence
  primer
ggccttagttaattggtgccc

SEQ ID NO: 3486 - DNA, 37 bp, Artificial Sequence
  primer
gtaaaacgacggccagttggtgagaggacacgagcac

SEQ ID NO: 3487 - DNA, 21 bp, Artificial Sequence
  primer
gagcagaagctatggagtggg

SEQ ID NO: 3488 - DNA, 38 bp, Artificial Sequence
  primer
gtaaaacgacggccagtctagaatggtgagctctgccc

SEQ ID NO: 3489 - DNA, 38 bp, Artificial Sequence
  primer
gtaaaacgacggccagtaggaagaatgccttccaggag

SEQ ID NO: 3490 - DNA, 37 bp, Artificial Sequence
  primer
gtaaaacgacggccagtgctgaaagtatgccagtggg

SEQ ID NO: 3491 - DNA, 21 bp, Artificial Sequence
  primer
agctgagagggtgacttggag

SEQ ID NO: 3492 - DNA, 38 bp, Artificial Sequence
  primer
gtaaaacgacggccagtagcacccagtcaccttgagtc

SEQ ID NO: 3493 - DNA, 21 bp, Artificial Sequence
  primer
actgagtgaggatgggctctc

SEQ ID NO: 3494 - DNA, 37 bp, Artificial Sequence
  primer
gtaaaacgacggccagtctgcagtggaagtgaggagg

SEQ ID NO: 3495 - DNA, 21 bp, Artificial Sequence
  primer
tttggctcctttccaagtttc

SEQ ID NO: 3496 - DNA, 21 bp, Artificial Sequence
  primer
acccaaagcactacttgctcc

SEQ ID NO: 3497 - DNA, 38 bp, Artificial Sequence
  primer
gtaaaacgacggccagttggaagcaaactggacacttc

SEQ ID NO: 3498 - DNA, 39 bp, Artificial Sequence
  primer
gtaaaacgacggccagttgcagaacaaatatcaatgcaa

SEQ ID NO: 3499 - DNA, 38 bp, Artificial Sequence
  primer
gtaaaacgacggccagtgttcatgaagcactggctttg

SEQ ID NO: 3500 - DNA, 28 bp, Artificial Sequence
  primer
cccatgtttaatcgtatagatctcattt

SEQ ID NO: 3501 - DNA, 23 bp, Artificial Sequence
  primer
cctaagaatgtctttaggagggc

SEQ ID NO: 3502 - DNA, 38 bp, Artificial Sequence
  primer
gtaaaacgacggccagtctgtttgcaacatgaggcttg

SEQ ID NO: 3503 - DNA, 40 bp, Artificial Sequence
  primer
gtaaaacgacggccagtggttcactgcaatttgatctttg

SEQ ID NO: 3504 - DNA, 38 bp, Artificial Sequence
  primer
gtaaaacgacggccagtgaagccaggtctttcaaccac

SEQ ID NO: 3505 - DNA, 38 bp, Artificial Sequence
  primer
gtaaaacgacggccagtaatgctcacagccactgtacc

SEQ ID NO: 3506 - DNA, 38 bp, Artificial Sequence
  primer
gtaaaacgacggccagtaccaaacagcacgagagaagg

SEQ ID NO: 3507 - DNA, 39 bp, Artificial Sequence
  primer
gtaaaacgacggccagtggatgaatgggtcaactttctg

SEQ ID NO: 3508 - DNA, 42 bp, Artificial Sequence
  primer
gtaaaacgacggccagtagcatttctctggatattacctgtc

SEQ ID NO: 3509 - DNA, 38 bp, Artificial Sequence
  primer
gtaaaacgacggccagtttctctgcccattacagcctc

SEQ ID NO: 3510 - DNA, 39 bp, Artificial Sequence
  primer
gtaaaacgacggccagtttgtgcacttcacatgcattac

SEQ ID NO: 3511 - DNA, 35 bp, Artificial Sequence
  primer
gtaaaacgacggccagtagttcgcgcttgtgcttg

SEQ ID NO: 3512 - DNA, 36 bp, Artificial Sequence
  primer
gtaaaacgacggccagttgggtggagtgtcagttgc

SEQ ID NO: 3513 - DNA, 38 bp, Artificial Sequence
  primer
gtaaaacgacggccagttcccacatcaagaatcaggtg

SEQ ID NO: 3514 - DNA, 37 bp, Artificial Sequence
  primer
gtaaaacgacggccagtcatgtctgtgtgtggatgcc

SEQ ID NO: 3515 - DNA, 38 bp, Artificial Sequence
  primer
gtaaaacgacggccagtctccttagtgccagcaaactg

SEQ ID NO: 3516 - DNA, 19 bp, Artificial Sequence
  primer
gggaggatgctggattgtg

SEQ ID NO: 3517 - DNA, 21 bp, Artificial Sequence
  primer
taggcacagaaccctcacttg

SEQ ID NO: 3518 - DNA, 19 bp, Artificial Sequence
  primer
tccaggatggagccttgac

SEQ ID NO: 3519 - DNA, 21 bp, Artificial Sequence
  primer
agaacaggtgagtgggtctcg

SEQ ID NO: 3520 - DNA, 38 bp, Artificial Sequence
  primer
gtaaaacgacggccagtagacctatacggctgccaatg

SEQ ID NO: 3521 - DNA, 38 bp, Artificial Sequence
  primer
gtaaaacgacggccagtaacaaactggagcctctggtc

SEQ ID NO: 3522 - DNA, 37 bp, Artificial Sequence
  primer
gtaaaacgacggccagtctgtgagtcctcctggctcc

SEQ ID NO: 3523 - DNA, 38 bp, Artificial Sequence
  primer
gtaaaacgacggccagtgacaatgcagaggtgtgttgg

SEQ ID NO: 3524 - DNA, 37 bp, Artificial Sequence
  primer
gtaaaacgacggccagtgttcattccacctgctccag

SEQ ID NO: 3525 - DNA, 38 bp, Artificial Sequence
  primer
gtaaaacgacggccagtacctgcatgacaacgtacagc

SEQ ID NO: 3526 - DNA, 36 bp, Artificial Sequence
  primer
gtaaaacgacggccagttttaaggtggtgttggcgg

SEQ ID NO: 3527 - DNA, 38 bp, Artificial Sequence
  primer
gtaaaacgacggccagtagggtatgctggaggtacgag

SEQ ID NO: 3528 - DNA, 38 bp, Artificial Sequence
  primer
gtaaaacgacggccagtccacaacctctgtcccttcag

SEQ ID NO: 3529 - DNA, 19 bp, Artificial Sequence
  primer
gccaggagtgcaaggtgag

SEQ ID NO: 3530 - DNA, 38 bp, Artificial Sequence
  primer
gtaaaacgacggccagtccaagaaggacatgtgtgacc

SEQ ID NO: 3531 - DNA, 36 bp, Artificial Sequence
  primer
gtaaaacgacggccagtctcccatgagggtctgctc

SEQ ID NO: 3532 - DNA, 36 bp, Artificial Sequence
  primer
gtaaaacgacggccagtatgcagtttcaagggacgc

SEQ ID NO: 3533 - DNA, 35 bp, Artificial Sequence
  primer
gtaaaacgacggccagtgaacctgcatggtcaccg

SEQ ID NO: 3534 - DNA, 21 bp, Artificial Sequence
  primer
gagaaagaccgtgtctctggg

SEQ ID NO: 3535 - DNA, 19 bp, Artificial Sequence
  primer
gtgtccctgcctcttcagg

SEQ ID NO: 3536 - DNA, 38 bp, Artificial Sequence
  primer
gtaaaacgacggccagtcacacaagaggcaggaacctc

SEQ ID NO: 3537 - DNA, 38 bp, Artificial Sequence
  primer
gtaaaacgacggccagttttctgtagcgagctcagtgg

SEQ ID NO: 3538 - DNA, 21 bp, Artificial Sequence
  primer
tggtggatgaaccaagaatcc

SEQ ID NO: 3539 - DNA, 19 bp, Artificial Sequence
  primer
ctacgtcagcgcagctagg

SEQ ID NO: 3540 - DNA, 41 bp, Artificial Sequence
  primer
gtaaaacgacggccagtattgtaatatgggaatgtcaggtg

SEQ ID NO: 3541 - DNA, 21 bp, Artificial Sequence
  primer
ggaaggaagggatgatcagag

SEQ ID NO: 3542 - DNA, 20 bp, Artificial Sequence
  primer
acaagtgtgagccactgcac

SEQ ID NO: 3543 - DNA, 40 bp, Artificial Sequence
  primer
gtaaaacgacggccagtgatggtctaaagaatgccatgtg

SEQ ID NO: 3544 - DNA, 45 bp, Artificial Sequence
  primer
gtaaaacgacggccagttgcctacttacacatttaagaattagga

SEQ ID NO: 3545 - DNA, 43 bp, Artificial Sequence
  primer
gtaaaacgacggccagttcacttaaagtcattagcagaactgg

SEQ ID NO: 3546 - DNA, 36 bp, Artificial Sequence
  primer
gtaaaacgacggccagtgtactgcacccggccttac

SEQ ID NO: 3547 - DNA, 39 bp, Artificial Sequence
  primer
gtaaaacgacggccagtgtagccgtgttacttcatgtgg

SEQ ID NO: 3548 - DNA, 21 bp, Artificial Sequence
  primer
ggttctcccaatccagttgag

SEQ ID NO: 3549 - DNA, 23 bp, Artificial Sequence
  primer
cgtaggctgtcaacagtgtagtg

SEQ ID NO: 3550 - DNA, 41 bp, Artificial Sequence
  primer
gtaaaacgacggccagttgaattctcatttctgtccacttt

SEQ ID NO: 3551 - DNA, 38 bp, Artificial Sequence
  primer
gtaaaacgacggccagttaagcaactgtttctggaggg

SEQ ID NO: 3552 - DNA, 42 bp, Artificial Sequence
  primer
gtaaaacgacggccagttgctttatagatgtaaatgctgtgg

SEQ ID NO: 3553 - DNA, 41 bp, Artificial Sequence
  primer
gtaaaacgacggccagtccaggtgtttagactgttgtaggg

SEQ ID NO: 3554 - DNA, 21 bp, Artificial Sequence
  primer
agattccctccatagcagcaa

SEQ ID NO: 3555 - DNA, 24 bp, Artificial Sequence
  primer
aatatgggaattaatggttccttg

SEQ ID NO: 3556 - DNA, 39 bp, Artificial Sequence
  primer
gtaaaacgacggccagttcctttctcttggtttccattc

SEQ ID NO: 3557 - DNA, 38 bp, Artificial Sequence
  primer
gtaaaacgacggccagtcggacaggaatgaactttgtg

SEQ ID NO: 3558 - DNA, 21 bp, Artificial Sequence
  primer
gggaacattggcctaattgac

SEQ ID NO: 3559 - DNA, 21 bp, Artificial Sequence
  primer
tgtttagacttgggtcccgtc

SEQ ID NO: 3560 - DNA, 39 bp, Artificial Sequence
  primer
gtaaaacgacggccagtttgtcagagatgttgaggatgg

SEQ ID NO: 3561 - DNA, 40 bp, Artificial Sequence
  primer
gtaaaacgacggccagtctcaatgagctataaccacagcc

SEQ ID NO: 3562 - DNA, 22 bp, Artificial Sequence
  primer
ttgtcatcaaagctgaagaacg

SEQ ID NO: 3563 - DNA, 19 bp, Artificial Sequence
  primer
ttgattccctggctgatcc

SEQ ID NO: 3564 - DNA, 22 bp, Artificial Sequence
  primer
ttcctccctcggatttaatagg

SEQ ID NO: 3565 - DNA, 21 bp, Artificial Sequence
  primer
tggtctggccacagtcactac

SEQ ID NO: 3566 - DNA, 22 bp, Artificial Sequence
  primer
acatcaatccattcttggaagc

SEQ ID NO: 3567 - DNA, 38 bp, Artificial Sequence
  primer
gtaaaacgacggccagtagagcactgacgggaaacaag

SEQ ID NO: 3568 - DNA, 39 bp, Artificial Sequence
  primer
gtaaaacgacggccagttgaaatcttgtatgccatcagc

SEQ ID NO: 3569 - DNA, 21 bp, Artificial Sequence
  primer
atcacatgcatggcaacaaag

SEQ ID NO: 3570 - DNA, 35 bp, Artificial Sequence
  primer
gtaaaacgacggccagtaaaggctagggcagcgag

SEQ ID NO: 3571 - DNA, 39 bp, Artificial Sequence
  primer
gtaaaacgacggccagtgggaaaggagctaacaattcac

SEQ ID NO: 3572 - DNA, 37 bp, Artificial Sequence
  primer
gtaaaacgacggccagtggaatttccattgagctcgg

SEQ ID NO: 3573 - DNA, 21 bp, Artificial Sequence
  primer
actttcattgccatcttgtgc

SEQ ID NO: 3574 - DNA, 21 bp, Artificial Sequence
  primer
attggaggtggactcaggaaa

SEQ ID NO: 3575 - DNA, 38 bp, Artificial Sequence
  primer
gtaaaacgacggccagtcgcccttccaacgaataatag

SEQ ID NO: 3576 - DNA, 18 bp, Artificial Sequence
  primer
ccaatgcagcgagctgtg

SEQ ID NO: 3577 - DNA, 21 bp, Artificial Sequence
  primer
gaggacgaggagctagtggtg

SEQ ID NO: 3578 - DNA, 20 bp, Artificial Sequence
  primer
acctggcgcactgcttctac

SEQ ID NO: 3579 - DNA, 22 bp, Artificial Sequence
  primer
ctttgactggttaggctttcct

SEQ ID NO: 3580 - DNA, 21 bp, Artificial Sequence
  primer
catatgtgaaggcacaccctg

SEQ ID NO: 3581 - DNA, 35 bp, Artificial Sequence
  primer
gtaaaacgacggccagtaggtgcatgccaccacac

SEQ ID NO: 3582 - DNA, 38 bp, Artificial Sequence
  primer
gtaaaacgacggccagttttctgaaatgggatctaccc

SEQ ID NO: 3583 - DNA, 39 bp, Artificial Sequence
  primer
gtaaaacgacggccagtcccatgtggctttctttgatac

SEQ ID NO: 3584 - DNA, 21 bp, Artificial Sequence
  primer
caataatggtgaggagcaacg

SEQ ID NO: 3585 - DNA, 25 bp, Artificial Sequence
  primer
agggtactgtgtttaattagcatgg

SEQ ID NO: 3586 - DNA, 21 bp, Artificial Sequence
  primer
tctgtgtgcaaggacagtgtg

SEQ ID NO: 3587 - DNA, 38 bp, Artificial Sequence
  primer
gtaaaacgacggccagtccaacatcgaagtgaaacagc

SEQ ID NO: 3588 - DNA, 21 bp, Artificial Sequence
  primer
ctcaaagagcccttgaccatc

SEQ ID NO: 3589 - DNA, 19 bp, Artificial Sequence
  primer
cttggcattggttgtgctg

SEQ ID NO: 3590 - DNA, 38 bp, Artificial Sequence
  primer
gtaaaacgacggccagtagcctaacagccaggacacag

SEQ ID NO: 3591 - DNA, 39 bp, Artificial Sequence
  primer
gtaaaacgacggccagtaagacagagagaaggtcccagg

SEQ ID NO: 3592 - DNA, 38 bp, Artificial Sequence
  primer
gtaaaacgacggccagtacaagacagttgtcaggcagc

SEQ ID NO: 3593 - DNA, 21 bp, Artificial Sequence
  primer
taggtgcctgatgaaagcaag

SEQ ID NO: 3594 - DNA, 38 bp, Artificial Sequence
  primer
gtaaaacgacggccagtgtttcttggaggtcaggttgc

SEQ ID NO: 3595 - DNA, 37 bp, Artificial Sequence
  primer
gtaaaacgacggccagtctccaaggcaggactcaacc

SEQ ID NO: 3596 - DNA, 37 bp, Artificial Sequence
  primer
gtaaaacgacggccagttacaagaacaaaccctgcgg

SEQ ID NO: 3597 - DNA, 19 bp, Artificial Sequence
  primer
aatgaggacattggcctgg

SEQ ID NO: 3598 - DNA, 38 bp, Artificial Sequence
  primer
gtaaaacgacggccagtcgggagacgatagaaatcagg

SEQ ID NO: 3599 - DNA, 18 bp, Artificial Sequence
  primer
gagccaggaagggagcac

SEQ ID NO: 3600 - DNA, 38 bp, Artificial Sequence
  primer
gtaaaacgacggccagtctcccagaccactctcctacg

SEQ ID NO: 3601 - DNA, 37 bp, Artificial Sequence
  primer
gtaaaacgacggccagtctcttctagccgtcactgcg

SEQ ID NO: 3602 - DNA, 21 bp, Artificial Sequence
  primer
tagtctcacgcagaccaccac

SEQ ID NO: 3603 - DNA, 19 bp, Artificial Sequence
  primer
ctgtccctcttggcctcac

SEQ ID NO: 3604 - DNA, 38 bp, Artificial Sequence
  primer
gtaaaacgacggccagtcaacttctacacggagagggc

SEQ ID NO: 3605 - DNA, 36 bp, Artificial Sequence
  primer
gtaaaacgacggccagtctgttatcctcatgggccg

SEQ ID NO: 3606 - DNA, 38 bp, Artificial Sequence
  primer
gtaaaacgacggccagtctcagtcacttgggtgagcag

SEQ ID NO: 3607 - DNA, 38 bp, Artificial Sequence
  primer
gtaaaacgacggccagtatgcatctctcatcgtcatgg

SEQ ID NO: 3608 - DNA, 37 bp, Artificial Sequence
  primer
gtaaaacgacggccagtgaaggcacaagatacctggg

SEQ ID NO: 3609 - DNA, 38 bp, Artificial Sequence
  primer
gtaaaacgacggccagtgtttccatatgaggctgggtg

SEQ ID NO: 3610 - DNA, 38 bp, Artificial Sequence
  primer
gtaaaacgacggccagtggtctccaggttagctgtccc

SEQ ID NO: 3611 - DNA, 19 bp, Artificial Sequence
  primer
ctttgcaagagcgcagacc

SEQ ID NO: 3612 - DNA, 38 bp, Artificial Sequence
  primer
gtaaaacgacggccagtcaaggcacagaaagtcactgg

SEQ ID NO: 3613 - DNA, 20 bp, Artificial Sequence
  primer
acaggcgagcgctttatttc

SEQ ID NO: 3614 - DNA, 38 bp, Artificial Sequence
  primer
gtaaaacgacggccagtcgaaagtggctttggctttac

SEQ ID NO: 3615 - DNA, 38 bp, Artificial Sequence
  primer
gtaaaacgacggccagtcgaacagcagactctgaaagc

SEQ ID NO: 3616 - DNA, 41 bp, Artificial Sequence
  primer
gtaaaacgacggccagtaaattaaacttatggccttgcatc

SEQ ID NO: 3617 - DNA, 38 bp, Artificial Sequence
  primer
gtaaaacgacggccagttgagctgtgggcatatttcac

SEQ ID NO: 3618 - DNA, 38 bp, Artificial Sequence
  primer
gtaaaacgacggccagtcacccaccctgaattcatctc

SEQ ID NO: 3619 - DNA, 20 bp, Artificial Sequence
  primer
tttcccacattctgtgttgg

SEQ ID NO: 3620 - DNA, 38 bp, Artificial Sequence
  primer
gtaaaacgacggccagtccttctgtacaaacgtggctg

SEQ ID NO: 3621 - DNA, 40 bp, Artificial Sequence
  primer
gtaaaacgacggccagtaaaccagagggaagtttctgttg

SEQ ID NO: 3622 - DNA, 20 bp, Artificial Sequence
  primer
ggctggatattgtgccaaac

SEQ ID NO: 3623 - DNA, 37 bp, Artificial Sequence
  primer
gtaaaacgacggccagtcttgcttgcagagaattggg

SEQ ID NO: 3624 - DNA, 39 bp, Artificial Sequence
  primer
gtaaaacgacggccagttcatttgtcaaggccagatacc

SEQ ID NO: 3625 - DNA, 22 bp, Artificial Sequence
  primer
cctaagtacggaggaatcctgg

SEQ ID NO: 3626 - DNA, 38 bp, Artificial Sequence
  primer
gtaaaacgacggccagtggatattcctcttgctgccac

SEQ ID NO: 3627 - DNA, 21 bp, Artificial Sequence
  primer
tgggtcacaaacagattgcat

SEQ ID NO: 3628 - DNA, 38 bp, Artificial Sequence
  primer
gtaaaacgacggccagttttattccaatgcatgctccc

SEQ ID NO: 3629 - DNA, 38 bp, Artificial Sequence
  primer
gtaaaacgacggccagtggtacctcacctgaccatgag

SEQ ID NO: 3630 - DNA, 20 bp, Artificial Sequence
  primer
ccctgctttctcagtggttg

SEQ ID NO: 3631 - DNA, 38 bp, Artificial Sequence
  primer
gtaaaacgacggccagtcttctctcgccaggctaacag

SEQ ID NO: 3632 - DNA, 21 bp, Artificial Sequence
  primer
gggaaacagtggcaagatagc

SEQ ID NO: 3633 - DNA, 21 bp, Artificial Sequence
  primer
tggagattcacagtggctcag

SEQ ID NO: 3634 - DNA, 38 bp, Artificial Sequence
  primer
gtaaaacgacggccagttacttccgaaactgggacacc

SEQ ID NO: 3635 - DNA, 38 bp, Artificial Sequence
  primer
gtaaaacgacggccagtcaaacgggactgagaactgac

SEQ ID NO: 3636 - DNA, 38 bp, Artificial Sequence
  primer
gtaaaacgacggccagtcagggttcaccggaactagac

SEQ ID NO: 3637 - DNA, 38 bp, Artificial Sequence
  primer
gtaaaacgacggccagtaaggaatttgcaggaatgcta

SEQ ID NO: 3638 - DNA, 20 bp, Artificial Sequence
  primer
cagtgggattggaggtgttc

SEQ ID NO: 3639 - DNA, 38 bp, Artificial Sequence
  primer
gtaaaacgacggccagtttgttatggctcctttcttgg

SEQ ID NO: 3640 - DNA, 20 bp, Artificial Sequence
  primer
aggcctgtcccattccatac

SEQ ID NO: 3641 - DNA, 38 bp, Artificial Sequence
  primer
gtaaaacgacggccagtggactcaagtgatcctcccac

SEQ ID NO: 3642 - DNA, 20 bp, Artificial Sequence
  primer
gaaggccatccttccaagac

SEQ ID NO: 3643 - DNA, 20 bp, Artificial Sequence
  primer
ctgagccatgagctgaggag

SEQ ID NO: 3644 - DNA, 38 bp, Artificial Sequence
  primer
gtaaaacgacggccagttaactgggaaacaaaccgacc

SEQ ID NO: 3645 - DNA, 22 bp, Artificial Sequence
  primer
cactaggtagccgagctttctg

SEQ ID NO: 3646 - DNA, 35 bp, Artificial Sequence
  primer
gtaaaacgacggccagtgcgcccagttagcagatg

SEQ ID NO: 3647 - DNA, 21 bp, Artificial Sequence
  primer
aggagccttagtcttggtccc

SEQ ID NO: 3648 - DNA, 21 bp, Artificial Sequence
  primer
tgggagggacagttaaggttg

SEQ ID NO: 3649 - DNA, 38 bp, Artificial Sequence
  primer
gtaaaacgacggccagtgggactctctgtgtgtgttgg

SEQ ID NO: 3650 - DNA, 19 bp, Artificial Sequence
  primer
catagcagcagtgcatggg

SEQ ID NO: 3651 - DNA, 38 bp, Artificial Sequence
  primer
gtaaaacgacggccagttagggtgccatgtagtctccc

SEQ ID NO: 3652 - DNA, 38 bp, Artificial Sequence
  primer
gtaaaacgacggccagtcagatgcaaaggatgaagctg

SEQ ID NO: 3653 - DNA, 38 bp, Artificial Sequence
  primer
gtaaaacgacggccagttgcttcctgtgtagatggtgg

SEQ ID NO: 3654 - DNA, 38 bp, Artificial Sequence
  primer
gtaaaacgacggccagtcgaccagctaagatcagctcc

SEQ ID NO: 3655 - DNA, 38 bp, Artificial Sequence
  primer
gtaaaacgacggccagtgatgcctgtggctccttagag

SEQ ID NO: 3656 - DNA, 39 bp, Artificial Sequence
  primer
gtaaaacgacggccagtgatgcaagaagaagttggaagg

SEQ ID NO: 3657 - DNA, 38 bp, Artificial Sequence
  primer
gtaaaacgacggccagtcaccttcacctacttccagcc

SEQ ID NO: 3658 - DNA, 38 bp, Artificial Sequence
  primer
gtaaaacgacggccagtgagtacatcagcacctgccac

SEQ ID NO: 3659 - DNA, 22 bp, Artificial Sequence
  primer
gaccctgagcttcacttctctg

SEQ ID NO: 3660 - DNA, 38 bp, Artificial Sequence
  primer
gtaaaacgacggccagtctgcctgagaagatcgagacg

SEQ ID NO: 3661 - DNA, 38 bp, Artificial Sequence
  primer
gtaaaacgacggccagtgggccttatgtgctagaggtg

SEQ ID NO: 3662 - DNA, 38 bp, Artificial Sequence
  primer
gtaaaacgacggccagttccagaaagagaacctctccg

SEQ ID NO: 3663 - DNA, 21 bp, Artificial Sequence
  primer
gagtacacgtgggtggagagg

SEQ ID NO: 3664 - DNA, 20 bp, Artificial Sequence
  primer
cactcctggcctgtggttac

SEQ ID NO: 3665 - DNA, 38 bp, Artificial Sequence
  primer
gtaaaacgacggccagtccctacctcctggtctccttc

SEQ ID NO: 3666 - DNA, 38 bp, Artificial Sequence
  primer
gtaaaacgacggccagtcagtctaccctggagccactc

SEQ ID NO: 3667 - DNA, 37 bp, Artificial Sequence
  primer
gtaaaacgacggccagtctccctggctgtgagttgtc

SEQ ID NO: 3668 - DNA, 20 bp, Artificial Sequence
  primer
gaatctgtgagcccttgcac

SEQ ID NO: 3669 - DNA, 21 bp, Artificial Sequence
  primer
aggagccttagtcttggtccc

SEQ ID NO: 3670 - DNA, 21 bp, Artificial Sequence
  primer
tcactcctggcctgtggttac

SEQ ID NO: 3671 - DNA, 38 bp, Artificial Sequence
  primer
gtaaaacgacggccagtgtacatgtatccctgcgtccc

SEQ ID NO: 3672 - DNA, 35 bp, Artificial Sequence
  primer
gtaaaacgacggccagtgagggaagcagctaggcg

SEQ ID NO: 3673 - DNA, 38 bp, Artificial Sequence
  primer
gtaaaacgacggccagtcccttacctctgaaccgactg

SEQ ID NO: 3674 - DNA, 21 bp, Artificial Sequence
  primer
taccacgacactccagtcacc

SEQ ID NO: 3675 - DNA, 21 bp, Artificial Sequence
  primer
agggcctcatagaacatcctg

SEQ ID NO: 3676 - DNA, 36 bp, Artificial Sequence
  primer
gtaaaacgacggccagtgtggtgggcaatgtcacag

SEQ ID NO: 3677 - DNA, 38 bp, Artificial Sequence
  primer
gtaaaacgacggccagtgcttgctagcagtgtgtcctc

SEQ ID NO: 3678 - DNA, 38 bp, Artificial Sequence
  primer
gtaaaacgacggccagtcccatctgtaagtgggaggag

SEQ ID NO: 3679 - DNA, 21 bp, Artificial Sequence
  primer
acagacctcagtgtgtcctgc

SEQ ID NO: 3680 - DNA, 38 bp, Artificial Sequence
  primer
gtaaaacgacggccagtggagagaagattggtcctccc

SEQ ID NO: 3681 - DNA, 38 bp, Artificial Sequence
  primer
gtaaaacgacggccagtaatagcgggtgcaaattcttg

SEQ ID NO: 3682 - DNA, 21 bp, Artificial Sequence
  primer
ctgccggtacttggagttgag

SEQ ID NO: 3683 - DNA, 38 bp, Artificial Sequence
  primer
gtaaaacgacggccagtcaggctcatgctcttgctatc

SEQ ID NO: 3684 - DNA, 37 bp, Artificial Sequence
  primer
gtaaaacgacggccagttatgtcagtggaggcccttg

SEQ ID NO: 3685 - DNA, 38 bp, Artificial Sequence
  primer
gtaaaacgacggccagtggtcagagcatttacccaagg

SEQ ID NO: 3686 - DNA, 37 bp, Artificial Sequence
  primer
gtaaaacgacggccagtaggccagaggtcttctcctg

SEQ ID NO: 3687 - DNA, 21 bp, Artificial Sequence
  primer
aaatgagatgttcctgggtgc

SEQ ID NO: 3688 - DNA, 21 bp, Artificial Sequence
  primer
gaatttcatattcatggcccg

SEQ ID NO: 3689 - DNA, 21 bp, Artificial Sequence
  primer
gaccctaaggccttctcttcg

SEQ ID NO: 3690 - DNA, 21 bp, Artificial Sequence
  primer
gtccctcagaaagtgacgtgg

SEQ ID NO: 3691 - DNA, 37 bp, Artificial Sequence
  primer
gtaaaacgacggccagtaacccactctctggctcctg

SEQ ID NO: 3692 - DNA, 21 bp, Artificial Sequence
  primer
cctttgtaccctttctgtccc

SEQ ID NO: 3693 - DNA, 38 bp, Artificial Sequence
  primer
gtaaaacgacggccagtttctctccacctaccctgacc

SEQ ID NO: 3694 - DNA, 37 bp, Artificial Sequence
  primer
gtaaaacgacggccagtgcagtcagtgggtaagtggg

SEQ ID NO: 3695 - DNA, 38 bp, Artificial Sequence
  primer
gtaaaacgacggccagttgtgtgtcctgcatcaagaag

SEQ ID NO: 3696 - DNA, 38 bp, Artificial Sequence; identical to SEQ ID NO: 3678
  primer

SEQ ID NO: 3697 - DNA, 38 bp, Artificial Sequence
  primer
gtaaaacgacggccagtcttcgtccttgcacttgacag

SEQ ID NO: 3698 - DNA, 37 bp, Artificial Sequence
  primer
gtaaaacgacggccagtagagcgggaggtagtcgttc

SEQ ID NO: 3699 - DNA, 38 bp, Artificial Sequence
  primer
gtaaaacgacggccagtaggcgccgagtatgtcattag

SEQ ID NO: 3700 - DNA, 21 bp, Artificial Sequence
  primer
tggaacattatctgctgacgc

SEQ ID NO: 3701 - DNA, 37 bp, Artificial Sequence
  primer
gtaaaacgacggccagtcctttcttcccttcaggtcc

SEQ ID NO: 3702 - DNA, 38 bp, Artificial Sequence
  primer
gtaaaacgacggccagtgacatgggctttctagttccc

SEQ ID NO: 3703 - DNA, 22 bp, Artificial Sequence
  primer
cccttaccattcagattctggg

SEQ ID NO: 3704 - DNA, 38 bp, Artificial Sequence
  primer
gtaaaacgacggccagtaatttcattccaggaaggtgg

SEQ ID NO: 3705 - DNA, 37 bp, Artificial Sequence
  primer
gtaaaacgacggccagtagggtgggaagggctaagag

SEQ ID NO: 3706 - DNA, 38 bp, Artificial Sequence
  primer
gtaaaacgacggccagttacttctatgtgctggcaccc

SEQ ID NO: 3707 - DNA, 21 bp, Artificial Sequence
  primer
tgcaattcagtgaggtgtgtg

SEQ ID NO: 3708 - DNA, 38 bp, Artificial Sequence
  primer
gtaaaacgacggccagtgggatgacaactacctggctc

SEQ ID NO: 3709 - DNA, 38 bp, Artificial Sequence
  primer
gtaaaacgacggccagtacaagtcctctcatcccaagg

SEQ ID NO: 3710 - DNA, 22 bp, Artificial Sequence
  primer
gcacggagcttcagtaataacc

SEQ ID NO: 3711 - DNA, 35 bp, Artificial Sequence
  primer
gtaaaacgacggccagtgctgtggatgctgttggc

SEQ ID NO: 3712 - DNA, 37 bp, Artificial Sequence
  primer
gtaaaacgacggccagtctgggtggaaaggtcatgtg

SEQ ID NO: 3713 - DNA, 38 bp, Artificial Sequence
  primer
gtaaaacgacggccagtaaatgcaatgcttggagaatc

SEQ ID NO: 3714 - DNA, 38 bp, Artificial Sequence
  primer
gtaaaacgacggccagtctctatgacgagttacggccc

SEQ ID NO: 3715 - DNA, 39 bp, Artificial Sequence
  primer
gtaaaacgacggccagtggattctaggcccgctagtaag

SEQ ID NO: 3716 - DNA, 38 bp, Artificial Sequence
  primer
gtaaaacgacggccagttatatgccatccagatccagc

SEQ ID NO: 3717 - DNA, 35 bp, Artificial Sequence
  primer
gtaaaacgacggccagtgagtccttgggctccctg

SEQ ID NO: 3718 - DNA, 21 bp, Artificial Sequence
  primer
ttgcctgcctagcatataggg

SEQ ID NO: 3719 - DNA, 22 bp, Artificial Sequence
  primer
tctccctggaacaggtacaatg

SEQ ID NO: 3720 - DNA, 21 bp, Artificial Sequence
  primer
tgctaagtaggcattcgcttg

SEQ ID NO: 3721 - DNA, 38 bp, Artificial Sequence
  primer
gtaaaacgacggccagtcccactgctcagccttatagc

SEQ ID NO: 3722 - DNA, 39 bp, Artificial Sequence
  primer
gtaaaacgacggccagtagcttcatctctccaataagcc

SEQ ID NO: 3723 - DNA, 25 bp, Artificial Sequence
  primer
aaatcaaaggtcttaaaggacactg

SEQ ID NO: 3724 - DNA, 22 bp, Artificial Sequence
  primer
gaggtttcttgcatgagattgg

SEQ ID NO: 3725 - DNA, 38 bp, Artificial Sequence
  primer
gtaaaacgacggccagttcaccagaacacgtcttcacc

SEQ ID NO: 3726 - DNA, 21 bp, Artificial Sequence
  primer
gcttgaatctagatgggaggg

SEQ ID NO: 3727 - DNA, 21 bp, Artificial Sequence
  primer
tggccagttggtcattaacac

SEQ ID NO: 3728 - DNA, 38 bp, Artificial Sequence
  primer
gtaaaacgacggccagtaaataacggcacacacacgac

SEQ ID NO: 3729 - DNA, 36 bp, Artificial Sequence
  primer
gtaaaacgacggccagtcctgggcagaggtaaccag

SEQ ID NO: 3730 - DNA, 20 bp, Artificial Sequence
  primer
ttaccacgttgggtttgtcc

SEQ ID NO: 3731 - DNA, 35 bp, Artificial Sequence
  primer
gtaaaacgacggccagtgagggaagggaaggcagc

SEQ ID NO: 3732 - DNA, 20 bp, Artificial Sequence
  primer
ctgacgcgtctcctctctcc

SEQ ID NO: 3733 - DNA, 21 bp, Artificial Sequence
  primer
aatcacagcaaggtggtcttg

SEQ ID NO: 3734 - DNA, 38 bp, Artificial Sequence
  primer
gtaaaacgacggccagttgacagaaggcctgttcactg

SEQ ID NO: 3735 - DNA, 37 bp, Artificial Sequence
  primer
gtaaaacgacggccagtctgtgtcccaagttcccatc

SEQ ID NO: 3736 - DNA, 21 bp, Artificial Sequence
  primer
tctcagtgagtgactgcctcc

SEQ ID NO: 3737 - DNA, 21 bp, Artificial Sequence
  primer
tttgttatcattcgctgtggc

SEQ ID NO: 3738 - DNA, 21 bp, Artificial Sequence
  primer
atagtcaccattgttgccgtg

SEQ ID NO: 3739 - DNA, 21 bp, Artificial Sequence
  primer
cttagcatggtccgctagcac

SEQ ID NO: 3740 - DNA, 21 bp, Artificial Sequence
  primer
tccataaggaacgtggaggtg

SEQ ID NO: 3741 - DNA, 38 bp, Artificial Sequence
  primer
gtaaaacgacggccagtaatttgaaacagtggttgggc

SEQ ID NO: 3742 - DNA, 38 bp, Artificial Sequence
  primer
gtaaaacgacggccagtaattagcaaacgtgcaaaccc

SEQ ID NO: 3743 - DNA, 20 bp, Artificial Sequence
  primer
ctggcaagagagacggaaac

SEQ ID NO: 3744 - DNA, 21 bp, Artificial Sequence
  primer
tgcacctttactgacctgtgc

SEQ ID NO: 3745 - DNA, 36 bp, Artificial Sequence
  primer
gtaaaacgacggccagtcccatgtatgctgcacctc

SEQ ID NO: 3746 - DNA, 38 bp, Artificial Sequence
  primer
gtaaaacgacggccagtttccgtttaaagacaggctgg

SEQ ID NO: 3747 - DNA, 21 bp, Artificial Sequence
  primer
cataaagaaacagccgcagtg

SEQ ID NO: 3748 - DNA, 20 bp, Artificial Sequence
  primer
acccaaacatgctttcatgg

SEQ ID NO: 3749 - DNA, 21 bp, Artificial Sequence
  primer
ctgagtctgcctccctctctc

SEQ ID NO: 3750 - DNA, 37 bp, Artificial Sequence
  primer
gtaaaacgacggccagtgtgcgtaagaccctgcagac

SEQ ID NO: 3751 - DNA, 37 bp, Artificial Sequence
  primer
gtaaaacgacggccagtacattgtgaggccatcatcc

SEQ ID NO: 3752 - DNA, 21 bp, Artificial Sequence
  primer
atggcctaatcagtgcaaagg

SEQ ID NO: 3753 - DNA, 38 bp, Artificial Sequence
  primer
gtaaaacgacggccagtagacaccgacagtctcccaac

SEQ ID NO: 3754 - DNA, 35 bp, Artificial Sequence
  primer
gtaaaacgacggccagtacctgaccatggagtgcg

SEQ ID NO: 3755 - DNA, 21 bp, Artificial Sequence
  primer
gagctttgtgttgctctttgc

SEQ ID NO: 3756 - DNA, 21 bp, Artificial Sequence
  primer
ttagctcctgtgcccacatac

SEQ ID NO: 3757 - DNA, 21 bp, Artificial Sequence
  primer
aggcccttcttgaccacatac

SEQ ID NO: 3758 - DNA, 23 bp, Artificial Sequence
  primer
gcctgcgtacttcagtcaatatg

SEQ ID NO: 3759 - DNA, 38 bp, Artificial Sequence
  primer
gtaaaacgacggccagttgtgtttgcctgtacaaatgg

SEQ ID NO: 3760 - DNA, 27 bp, Artificial Sequence
  primer
aacactgaatgcattgatctattaaac

SEQ ID NO: 3761 - DNA, 23 bp, Artificial Sequence
  primer
gaccattctttgattctgtggtc

SEQ ID NO: 3762 - DNA, 21 bp, Artificial Sequence
  primer
cctggctgtgtacattccatc

SEQ ID NO: 3763 - DNA, 38 bp, Artificial Sequence
  primer
gtaaaacgacggccagttcacttccaagccaagtgttc

SEQ ID NO: 3764 - DNA, 21 bp, Artificial Sequence
  primer
aaatggatgtggtcaatgcag

SEQ ID NO: 3765 - DNA, 21 bp, Artificial Sequence
  primer
cctttgcatacactgtggcag

SEQ ID NO: 3766 - DNA, 21 bp, Artificial Sequence
  primer
ttacatgggactcatgcttcg

SEQ ID NO: 3767 - DNA, 38 bp, Artificial Sequence
  primer
gtaaaacgacggccagttgagtccaacttgaggctgtg

SEQ ID NO: 3768 - DNA, 38 bp, Artificial Sequence
  primer
gtaaaacgacggccagtcatgtcgggccatttctagtc

SEQ ID NO: 3769 - DNA, 38 bp, Artificial Sequence
  primer
gtaaaacgacggccagtgcttatggcaaatgtcaatcg

SEQ ID NO: 3770 - DNA, 41 bp, Artificial Sequence
  primer
gtaaaacgacggccagtcaatgctggtaaatcagaagctaa

SEQ ID NO: 3771 - DNA, 23 bp, Artificial Sequence
  primer
ttggttctgaaattgattcatgg

SEQ ID NO: 3772 - DNA, 26 bp, Artificial Sequence
  primer
cccacctttcacaggaatatatttag

SEQ ID NO: 3773 - DNA, 38 bp, Artificial Sequence
  primer
gtaaaacgacggccagttggatggtgcaaccttatgtc

SEQ ID NO: 3774 - DNA, 21 bp, Artificial Sequence
  primer
atgaagcatgggaattccttc

SEQ ID NO: 3775 - DNA, 21 bp, Artificial Sequence
  primer
ggagatcacaccacaccactg

SEQ ID NO: 3776 - DNA, 18 bp, Artificial Sequence
  primer
ctcccggagtcacacagc

SEQ ID NO: 3777 - DNA, 21 bp, Artificial Sequence
  primer
agggtctagacgggtggtctc

SEQ ID NO: 3778 - DNA, 18 bp, Artificial Sequence
  primer
ctcgagtcgcaggagctg

SEQ ID NO: 3779 - DNA, 43 bp, Artificial Sequence
  primer
gtaaaacgacggccagtaaacagaatgtatgaatggaagaatc

SEQ ID NO: 3780 - DNA, 38 bp, Artificial Sequence
  primer
gtaaaacgacggccagttgtgtcgggaacttatttggg

SEQ ID NO: 3781 - DNA, 37 bp, Artificial Sequence
  primer
gtaaaacgacggccagtctccatgtatgggccttgag

SEQ ID NO: 3782 - DNA, 25 bp, Artificial Sequence
  primer
ggtcagcagtttgctttagtaattc

SEQ ID NO: 3783 - DNA, 23 bp, Artificial Sequence
  primer
tgggaactgtctaatgtctgagg

SEQ ID NO: 3784 - DNA, 25 bp, Artificial Sequence
  primer
tgcctggcctatacatatacacttg

SEQ ID NO: 3785 - DNA, 42 bp, Artificial Sequence
  primer
gtaaaacgacggccagttctgtaggtcatttccgtataaagg

SEQ ID NO: 3786 - DNA, 43 bp, Artificial Sequence
  primer
gtaaaacgacggccagttgagtattcaatggaagagcttagag

SEQ ID NO: 3787 - DNA, 22 bp, Artificial Sequence
  primer
tcccatcactataaatgagccc

SEQ ID NO: 3788 - DNA, 38 bp, Artificial Sequence
  primer
gtaaaacgacggccagtcagtgacattataggccagcg

SEQ ID NO: 3789 - DNA, 27 bp, Artificial Sequence
  primer
tgctactactatcatttaatgtgtcca

SEQ ID NO: 3790 - DNA, 39 bp, Artificial Sequence
  primer
gtaaaacgacggccagtttcattaaacatctccaggcac

SEQ ID NO: 3791 - DNA, 22 bp, Artificial Sequence
  primer
ggcttgtgtattagcttgcacc

SEQ ID NO: 3792 - DNA, 21 bp, Artificial Sequence
  primer
gtcctccgtagtgctgtaggc

SEQ ID NO: 3793 - DNA, 40 bp, Artificial Sequence
  primer
gtaaaacgacggccagttttacatcagggaatgttgatcc

SEQ ID NO: 3794 - DNA, 38 bp, Artificial Sequence
  primer
gtaaaacgacggccagtgaagggtatgtccacaacagc

SEQ ID NO: 3795 - DNA, 41 bp, Artificial Sequence
  primer
gtaaaacgacggccagtagcttatgaacacctcctaaatcc

SEQ ID NO: 3796 - DNA, 38 bp, Artificial Sequence
  primer
gtaaaacgacggccagtagccacatggaactgtgtcaa

SEQ ID NO: 3797 - DNA, 39 bp, Artificial Sequence
  primer
gtaaaacgacggccagttggtgcttagcctgttgttacc

SEQ ID NO: 3798 - DNA, 39 bp, Artificial Sequence
  primer
gtaaaacgacggccagttttagagaatgttcccacaccc

SEQ ID NO: 3799 - DNA, 41 bp, Artificial Sequence
  primer
gtaaaacgacggccagtccacttaaacgcttgaagttggtt

SEQ ID NO: 3800 - DNA, 35 bp, Artificial Sequence
  primer
gtaaaacgacggccagtgctcgctccttccctctc

SEQ ID NO: 3801 - DNA, 20 bp, Artificial Sequence
  primer
gtggtctccgccgatctaac

SEQ ID NO: 3802 - DNA, 38 bp, Artificial Sequence
  primer
gtaaaacgacggccagtaggtgggaggtactccctgag

SEQ ID NO: 3803 - DNA, 38 bp, Artificial Sequence
  primer
gtaaaacgacggccagttaataccctcggttcagggtg

SEQ ID NO: 3804 - DNA, 38 bp, Artificial Sequence
  primer
gtaaaacgacggccagtaaggtggctcctagttgatgg

SEQ ID NO: 3805 - DNA, 21 bp, Artificial Sequence
  primer
gtcaacactacagcctgctcg

SEQ ID NO: 3806 - DNA, 38 bp, Artificial Sequence
  primer
gtaaaacgacggccagtagttgcctgtggtagagaggg

SEQ ID NO: 3807 - DNA, 38 bp, Artificial Sequence
  primer
gtaaaacgacggccagtcaaattgcagcaggtagatgg

SEQ ID NO: 3808 - DNA, 38 bp, Artificial Sequence
  primer
gtaaaacgacggccagttctgtccttgaatggcaagtg

SEQ ID NO: 3809 - DNA, 38 bp, Artificial Sequence
  primer
gtaaaacgacggccagtagaatcacaacacccaccagc

SEQ ID NO: 3810 - DNA, 37 bp, Artificial Sequence
  primer
gtaaaacgacggccagtcaatgaggcctgtcttctgg

SEQ ID NO: 3811 - DNA, 20 bp, Artificial Sequence
  primer
cctgacaggctggacaactg

SEQ ID NO: 3812 - DNA, 21 bp, Artificial Sequence
  primer
ggaaatttctcctgcttggtg

SEQ ID NO: 3813 - DNA, 36 bp, Artificial Sequence
  primer
gtaaaacgacggccagtccaggtgttcgagactggg

SEQ ID NO: 3814 - DNA, 21 bp, Artificial Sequence
  primer
gccagagaaataccagggtcc

SEQ ID NO: 3815 - DNA, 20 bp, Artificial Sequence
  primer
tgtcgtggcacagaggaaac

SEQ ID NO: 3816 - DNA, 38 bp, Artificial Sequence
  primer
gtaaaacgacggccagttgccatgaatgatgagactcc

SEQ ID NO: 3817 - DNA, 21 bp, Artificial Sequence
  primer
attgtcatcacaagggtgagc

SEQ ID NO: 3818 - DNA, 21 bp, Artificial Sequence
  primer
gcatgtgggtcccttctttag

SEQ ID NO: 3819 - DNA, 20 bp, Artificial Sequence
  primer
agagggacgggatagctgag

SEQ ID NO: 3820 - DNA, 21 bp, Artificial Sequence
  primer
tgctcacagcttgtgtgtcag

SEQ ID NO: 3821 - DNA, 21 bp, Artificial Sequence
  primer
agtcttgtcccgctattgctc

SEQ ID NO: 3822 - DNA, 39 bp, Artificial Sequence
  primer
gtaaaacgacggccagtcattccctctaatgtgaggtgg

SEQ ID NO: 3823 - DNA, 20 bp, Artificial Sequence
  primer
agggtgtttgtgtccaggag

SEQ ID NO: 3824 - DNA, 41 bp, Artificial Sequence
  primer
gtaaaacgacggccagtatcaaaggaattatgtgtggattg

SEQ ID NO: 3825 - DNA, 38 bp, Artificial Sequence
  primer
gtaaaacgacggccagttgtaatggctccattggctac

SEQ ID NO: 3826 - DNA, 21 bp, Artificial Sequence
  primer
gttggagtcaggactgtgtgc

SEQ ID NO: 3827 - DNA, 22 bp, Artificial Sequence
  primer
gcctggatctgagtttctttcc

SEQ ID NO: 3828 - DNA, 39 bp, Artificial Sequence
  primer
gtaaaacgacggccagttgtgctccagaaatacctggtc

SEQ ID NO: 3829 - DNA, 38 bp, Artificial Sequence
  primer
gtaaaacgacggccagtccaaacatggtttgtccagtg

SEQ ID NO: 3830 - DNA, 22 bp, Artificial Sequence
  primer
cacctgcaaagaaattcaagtg

SEQ ID NO: 3831 - DNA, 25 bp, Artificial Sequence
  primer
aatcaaagctagaagaatgcagttg

SEQ ID NO: 3832 - DNA, 37 bp, Artificial Sequence
  primer
gtaaaacgacggccagtcagaattgtggcatttgtgc

SEQ ID NO: 3833 - DNA, 22 bp, Artificial Sequence
  primer
agagtcctagagttgggcagag

SEQ ID NO: 3834 - DNA, 39 bp, Artificial Sequence
  primer
gtaaaacgacggccagtctttaactttcccatgtccacc

SEQ ID NO: 3835 - DNA, 37 bp, Artificial Sequence
  primer
gtaaaacgacggccagtctgttccctaggctgctgag

SEQ ID NO: 3836 - DNA, 21 bp, Artificial Sequence
  primer
actgggacctgggacctttag

SEQ ID NO: 3837 - DNA, 41 bp, Artificial Sequence
  primer
gtaaaacgacggccagtttctgtctgctcatttaacctgtg

SEQ ID NO: 3838 - DNA, 24 bp, Artificial Sequence
  primer
ttcatgttgggaacagatatgtaa

SEQ ID NO: 3839 - DNA, 21 bp, Artificial Sequence
  primer
ccaagattcctacgtgcagtg

SEQ ID NO: 3840 - DNA, 38 bp, Artificial Sequence
  primer
gtaaaacgacggccagtgctgtcactccttcattcacc

SEQ ID NO: 3841 - DNA, 21 bp, Artificial Sequence
  primer
tgtggacaaatggtgcattac

SEQ ID NO: 3842 - DNA, 39 bp, Artificial Sequence
  primer
gtaaaacgacggccagtttgcaaagatgatttcaactgc

SEQ ID NO: 3843 - DNA, 40 bp, Artificial Sequence
  primer
gtaaaacgacggccagtggccttatggatagatggagttc

SEQ ID NO: 3844 - DNA, 23 bp, Artificial Sequence
  primer
tgaggtcatccttatgtgtacga

SEQ ID NO: 3845 - DNA, 27 bp, Artificial Sequence
  primer
tcagcttataccatggaactaggtaac

SEQ ID NO: 3846 - DNA, 24 bp, Artificial Sequence
  primer
ttcttctgttgatctttatgctgc

SEQ ID NO: 3847 - DNA, 41 bp, Artificial Sequence
  primer
gtaaaacgacggccagtaaagtgttagtgggacttcactgg

SEQ ID NO: 3848 - DNA, 39 bp, Artificial Sequence; identical to SEQ ID NO: 3822
  primer

SEQ ID NO: 3849 - DNA, 20 bp, Artificial Sequence
  primer
agggtgtttgtgtccaggag

SEQ ID NO: 3850 - DNA, 42 bp, Artificial Sequence
  primer
gtaaaacgacggccagttcatccattcagcagtaataacctc

SEQ ID NO: 3851 - DNA, 20 bp, Artificial Sequence
  primer
agcctgggagatacagcaag

SEQ ID NO: 3852 - DNA, 24 bp, Artificial Sequence
  primer
tgcaggtaaattctcagtcatcag

SEQ ID NO: 3853 - DNA, 23 bp, Artificial Sequence
  primer
aagcaaactttcagtcattcagg

SEQ ID NO: 3854 - DNA, 41 bp, Artificial Sequence
  primer
gtaaaacgacggccagtaaactgaatgcatgagtgtctctg

SEQ ID NO: 3855 - DNA, 24 bp, Artificial Sequence
  primer
tcttcacaagatggcattattcag

SEQ ID NO: 3856 - DNA, 38 bp, Artificial Sequence
  primer
gtaaaacgacggccagtacttgggcagcagaagttagg

SEQ ID NO: 3857 - DNA, 43 bp, Artificial Sequence
  primer
gtaaaacgacggccagtttgttgtacagtttggttaacttcaa

SEQ ID NO: 3858 - DNA, 40 bp, Artificial Sequence
  primer
gtaaaacgacggccagtggaacggttcttgagacatacag

SEQ ID NO: 3859 - DNA, 40 bp, Artificial Sequence
  primer
gtaaaacgacggccagttttgactcagaagtgatgtcagg

SEQ ID NO: 3860 - DNA, 21 bp, Artificial Sequence
  primer
gggattggtcacccgtaagta

SEQ ID NO: 3861 - DNA, 26 bp, Artificial Sequence
  primer
tgaaggagattctaatgtagggtttg

SEQ ID NO: 3862 - DNA, 23 bp, Artificial Sequence
  primer
aaagtcgtggaattgaaactttg

SEQ ID NO: 3863 - DNA, 38 bp, Artificial Sequence
  primer
gtaaaacgacggccagttaggtcaagctctggttcagg

SEQ ID NO: 3864 - DNA, 21 bp, Artificial Sequence
  primer
tttcattgaagcaaagcacag

SEQ ID NO: 3865 - DNA, 38 bp, Artificial Sequence
  primer
gtaaaacgacggccagtctttaggcaccaatcccagtc

SEQ ID NO: 3866 - DNA, 38 bp, Artificial Sequence
  primer
gtaaaacgacggccagtgtatggtcttgtgaggtgggc

SEQ ID NO: 3867 - DNA, 22 bp, Artificial Sequence
  primer
gtgactccagtcagcacaaatc

SEQ ID NO: 3868 - DNA, 21 bp, Artificial Sequence
  primer
aagttatggccaaatgtggaa

SEQ ID NO: 3869 - DNA, 22 bp, Artificial Sequence
  primer
ttgtagcaggtctgtctgatcg

SEQ ID NO: 3870 - DNA, 24 bp, Artificial Sequence
  primer
catatccacacattgtaccaaagc

SEQ ID NO: 3871 - DNA, 21 bp, Artificial Sequence
  primer
tcccaaattcagcttcagagg

SEQ ID NO: 3872 - DNA, 38 bp, Artificial Sequence
  primer
gtaaaacgacggccagtaacattacctgtggctttccc

SEQ ID NO: 3873 - DNA, 38 bp, Artificial Sequence
  primer
gtaaaacgacggccagttcagattgctgtcaatttccg

SEQ ID NO: 3874 - DNA, 22 bp, Artificial Sequence
  primer
caaatttgctgtatgatctggg

SEQ ID NO: 3875 - DNA, 25 bp, Artificial Sequence
  primer
ccaagaaacaggacagaagaaactg

SEQ ID NO: 3876 - DNA, 40 bp, Artificial Sequence
  primer
gtaaaacgacggccagtaaagcccttcaactagatggttc

SEQ ID NO: 3877 - DNA, 38 bp, Artificial Sequence
  primer
gtaaaacgacggccagtcccagaaactttggctttgtg

SEQ ID NO: 3878 - DNA, 39 bp, Artificial Sequence
  primer
gtaaaacgacggccagtttcaggaaatcacagtgaaacc

SEQ ID NO: 3879 - DNA, 20 bp, Artificial Sequence
  primer
actgtgggccatgactgaac

SEQ ID NO: 3880 - DNA, 41 bp, Artificial Sequence
  primer
gtaaaacgacggccagtcacgcagaagcagtaagaatgtag

SEQ ID NO: 3881 - DNA, 39 bp, Artificial Sequence
  primer
gtaaaacgacggccagtcttgctgtgaatcttcagcact

SEQ ID NO: 3882 - DNA, 37 bp, Artificial Sequence
  primer
gtaaaacgacggccagtagggcacatttgcactatgg

SEQ ID NO: 3883 - DNA, 37 bp, Artificial Sequence
  primer
gtaaaacgacggccagtaagtgccggtttgtatgcac

SEQ ID NO: 3884 - DNA, 37 bp, Artificial Sequence
  primer
gtaaaacgacggccagttgcccactaggttgcaagtc

SEQ ID NO: 3885 - DNA, 21 bp, Artificial Sequence
  primer
cccactccagatctctgtgtc

SEQ ID NO: 3886 - DNA, 38 bp, Artificial Sequence
  primer
gtaaaacgacggccagtaaagctcgtgtggatcactcc

SEQ ID NO: 3887 - DNA, 21 bp, Artificial Sequence
  primer
tggcacgatactgctccatac

SEQ ID NO: 3888 - DNA, 21 bp, Artificial Sequence
  primer
ctcccaagcccaaggactaag

SEQ ID NO: 3889 - DNA, 21 bp, Artificial Sequence
  primer
aggaggagatcgtgtttccag

SEQ ID NO: 3890 - DNA, 38 bp, Artificial Sequence
  primer
gtaaaacgacggccagtgtgagggattggagaatcgac

SEQ ID NO: 3891 - DNA, 20 bp, Artificial Sequence
  primer
gtggctacctaggccctgac

SEQ ID NO: 3892 - DNA, 38 bp, Artificial Sequence
  primer
gtaaaacgacggccagtgtgaggtgggtaatggatctg

SEQ ID NO: 3893 - DNA, 22 bp, Artificial Sequence
  primer
gagcaagactctgtctcaggaa

SEQ ID NO: 3894 - DNA, 21 bp, Artificial Sequence
  primer
cagctccaggacttcaatgtg

SEQ ID NO: 3895 - DNA, 38 bp, Artificial Sequence
  primer
gtaaaacgacggccagtaacctctgggaattgtccttg

SEQ ID NO: 3896 - DNA, 38 bp, Artificial Sequence
  primer
gtaaaacgacggccagtgacaacattgcttccctgatg

SEQ ID NO: 3897 - DNA, 38 bp, Artificial Sequence
  primer
gtaaaacgacggccagtcagctcacataggattgggtg

SEQ ID NO: 3898 - DNA, 21 bp, Artificial Sequence
  primer
actccttccacacaggtacgg

SEQ ID NO: 3899 - DNA, 38 bp, Artificial Sequence
  primer
gtaaaacgacggccagttacccataaagtcccagtcgc

SEQ ID NO: 3900 - DNA, 18 bp, Artificial Sequence
  primer
ggctggtgcagaacatcg

SEQ ID NO: 3901 - DNA, 38 bp, Artificial Sequence
  primer
gtaaaacgacggccagtgctacaccctaaagccactgc

SEQ ID NO: 3902 - DNA, 18 bp, Artificial Sequence
  primer
tggagctgcttctggtgg

SEQ ID NO: 3903 - DNA, 21 bp, Artificial Sequence
  primer
agtctctgccttgagtttgcc

SEQ ID NO: 3904 - DNA, 39 bp, Artificial Sequence
  primer
gtaaaacgacggccagtagccctagcataattgtcatgg

SEQ ID NO: 3905 - DNA, 38 bp, Artificial Sequence
  primer
gtaaaacgacggccagtctacagattcatgggtgcctc

SEQ ID NO: 3906 - DNA, 23 bp, Artificial Sequence
  primer
gtcattaaatgcaggtgatttcc

SEQ ID NO: 3907 - DNA, 37 bp, Artificial Sequence
  primer
gtaaaacgacggccagtaaacacgtttgcatcttccc

SEQ ID NO: 3908 - DNA, 27 bp, Artificial Sequence
  primer
tgtctcttaacacattcagaggtaagg

SEQ ID NO: 3909 - DNA, 44 bp, Artificial Sequence
  primer
gtaaaacgacggccagtcattaaaactgtgtgttaagagaagac

SEQ ID NO: 3910 - DNA, 21 bp, Artificial Sequence
  primer
ggttacactgacgtggtgagg

SEQ ID NO: 3911 - DNA, 21 bp, Artificial Sequence
  primer
ttcgacagttcaaagccaaag

SEQ ID NO: 3912 - DNA, 37 bp, Artificial Sequence
  primer
gtaaaacgacggccagttgcagaaggtgatcagcaag

SEQ ID NO: 3913 - DNA, 38 bp, Artificial Sequence
  primer
gtaaaacgacggccagtgatccagtgaggtcaattccc

SEQ ID NO: 3914 - DNA, 39 bp, Artificial Sequence
  primer
gtaaaacgacggccagtgctctttcatttgccatttgtc

SEQ ID NO: 3915 - DNA, 23 bp, Artificial Sequence
  primer
cgttgtatctgagagactttgcc

SEQ ID NO: 3916 - DNA, 21 bp, Artificial Sequence
  primer
ccaacatagcaagacgctgtg

SEQ ID NO: 3917 - DNA, 38 bp, Artificial Sequence
  primer
gtaaaacgacggccagtactgtaccaggcagggtatgc

SEQ ID NO: 3918 - DNA, 18 bp, Artificial Sequence
  primer
ctgcagcctttgttgccc

SEQ ID NO: 3919 - DNA, 21 bp, Artificial Sequence
  primer
ggcacggaaagatgaaatagc

SEQ ID NO: 3920 - DNA, 21 bp, Artificial Sequence
  primer
gcgggaggaaagtacagtgtg

SEQ ID NO: 3921 - DNA, 21 bp, Artificial Sequence
  primer
cagcacagatctgggacagag

SEQ ID NO: 3922 - DNA, 21 bp, Artificial Sequence
  primer
ctgtgtgcaccagtgtgagag

SEQ ID NO: 3923 - DNA, 21 bp, Artificial Sequence
  primer
tctgtctcctgccttcgtatg

SEQ ID NO: 3924 - DNA, 21 bp, Artificial Sequence
  primer
cagaacggtgggagagacatc

SEQ ID NO: 3925 - DNA, 38 bp, Artificial Sequence
  primer
gtaaaacgacggccagtgaactaggactgcgcaccttg

SEQ ID NO: 3926 - DNA, 20 bp, Artificial Sequence
  primer
ctcccacctctcctcctgtc

SEQ ID NO: 3927 - DNA, 38 bp, Artificial Sequence
  primer
gtaaaacgacggccagtacacaagaaggaacctctggg

SEQ ID NO: 3928 - DNA, 21 bp, Artificial Sequence
  primer
tgattgtgatgattgtgaggg

SEQ ID NO: 3929 - DNA, 37 bp, Artificial Sequence
  primer
gtaaaacgacggccagtaggaagttgcttgctctggg

SEQ ID NO: 3930 - DNA, 37 bp, Artificial Sequence
  primer
gtaaaacgacggccagtcatggatgtgtgtcacggag

SEQ ID NO: 3931 - DNA, 22 bp, Artificial Sequence
  primer
tttcttctcctgactctggctg

SEQ ID NO: 3932 - DNA, 38 bp, Artificial Sequence
  primer
gtaaaacgacggccagtcatgacagatccgagcaattt

SEQ ID NO: 3933 - DNA, 38 bp, Artificial Sequence
  primer
gtaaaacgacggccagtaatggcccaatcttgtagctg

SEQ ID NO: 3934 - DNA, 38 bp, Artificial Sequence
  primer
gtaaaacgacggccagtcagagagggtgtctttgggtc

SEQ ID NO: 3935 - DNA, 21 bp, Artificial Sequence
  primer
agtcccagctctacccaaatg

SEQ ID NO: 3936 - DNA, 38 bp, Artificial Sequence
  primer
gtaaaacgacggccagtgtctctgccactctgacatcg

SEQ ID NO: 3937 - DNA, 21 bp, Artificial Sequence
  primer
aatttccacgaggatctgtcc

SEQ ID NO: 3938 - DNA, 38 bp, Artificial Sequence
  primer
gtaaaacgacggccagtaatttcctgcctgaggaagac

SEQ ID NO: 3939 - DNA, 38 bp, Artificial Sequence
  primer
gtaaaacgacggccagtttcaaggatgatgaggaaccc

SEQ ID NO: 3940 - DNA, 21 bp, Artificial Sequence
  primer
ccagagatgaaggtcagggac

SEQ ID NO: 3941 - DNA, 38 bp, Artificial Sequence
  primer
gtaaaacgacggccagtgtgggtagtttcctggctgtg

SEQ ID NO: 3942 - DNA, 21 bp, Artificial Sequence
  primer
ccctttctctgtctgtcccag

SEQ ID NO: 3943 - DNA, 21 bp, Artificial Sequence
  primer
ggtacacatcttcctggaggg

SEQ ID NO: 3944 - DNA, 21 bp, Artificial Sequence
  primer
ctctaggaatgggaccaggtg

SEQ ID NO: 3945 - DNA, 21 bp, Artificial Sequence
  primer
tccttaaggtggttggcgtag

SEQ ID NO: 3946 - DNA, 36 bp, Artificial Sequence
  primer
gtaaaacgacggccagtgggcttcttccctctcctg

SEQ ID NO: 3947 - DNA, 19 bp, Artificial Sequence
  primer
ccgacgacagcttcctagc

SEQ ID NO: 3948 - DNA, 21 bp, Artificial Sequence
  primer
caggagagaggagaccaccag

SEQ ID NO: 3949 - DNA, 38 bp, Artificial Sequence
  primer
gtaaaacgacggccagtcccataacaagaggtgatggc

SEQ ID NO: 3950 - DNA, 21 bp, Artificial Sequence
  primer
cagcaaacatgttatgggacg

SEQ ID NO: 3951 - DNA, 21 bp, Artificial Sequence
  primer
agctccatctctgtccctagc

SEQ ID NO: 3952 - DNA, 38 bp, Artificial Sequence
  primer
gtaaaacgacggccagtcttcagtgccatccatcacag

SEQ ID NO: 3953 - DNA, 38 bp, Artificial Sequence
  primer
gtaaaacgacggccagtgccacccagtgacacagatac

SEQ ID NO: 3954 - DNA, 37 bp, Artificial Sequence
  primer
gtaaaacgacggccagtaaattcgggatttctccacc

SEQ ID NO: 3955 - DNA, 21 bp, Artificial Sequence
  primer
ggactcagatccagagatggg

SEQ ID NO: 3956 - DNA, 21 bp, Artificial Sequence
  primer
gttgccagatgaagcaaacac

SEQ ID NO: 3957 - DNA, 21 bp, Artificial Sequence
  primer
agaacgatgggaactacctgg

SEQ ID NO: 3958 - DNA, 18 bp, Artificial Sequence
  primer
cagcgagacctcagcgac

SEQ ID NO: 3959 - DNA, 38 bp, Artificial Sequence
  primer
gtaaaacgacggccagtccactgattaagggtgaaggg

SEQ ID NO: 3960 - DNA, 21 bp, Artificial Sequence
  primer
tacgaaatcgtgtctcccatc

SEQ ID NO: 3961 - DNA, 21 bp, Artificial Sequence
  primer
tcagttgaaacaaccctcctg

SEQ ID NO: 3962 - DNA, 39 bp, Artificial Sequence
  primer
gtaaaacgacggccagttgtagagtccatggaggacttg

SEQ ID NO: 3963 - DNA, 38 bp, Artificial Sequence
  primer
gtaaaacgacggccagtaggtggagcccaacgtaagac

SEQ ID NO: 3964 - DNA, 21 bp, Artificial Sequence
  primer
cggttgcaggtagcctctatc

SEQ ID NO: 3965 - DNA, 37 bp, Artificial Sequence
  primer
gtaaaacgacggccagttgtgaatgcctagacgaccc

SEQ ID NO: 3966 - DNA, 22 bp, Artificial Sequence
  primer
ccttaggtgagttctctgtgcg

SEQ ID NO: 3967 - DNA, 21 bp, Artificial Sequence
  primer
ccagggttcaggttcttatcc

SEQ ID NO: 3968 - DNA, 21 bp, Artificial Sequence
  primer
tggcctttactgttacctggg

SEQ ID NO: 3969 - DNA, 38 bp, Artificial Sequence
  primer
gtaaaacgacggccagtagcaagctttgctttgtttga

SEQ ID NO: 3970 - DNA, 21 bp, Artificial Sequence
  primer
tgaacctgcagcatttcaaac

SEQ ID NO: 3971 - DNA, 21 bp, Artificial Sequence
  primer
cattcctctgtcatttgccac

SEQ ID NO: 3972 - DNA, 21 bp, Artificial Sequence
  primer
gtgtatctgttcaccgttggc

SEQ ID NO: 3973 - DNA, 21 bp, Artificial Sequence
  primer
ttcctgaccacatcaaaggtg

SEQ ID NO: 3974 - DNA, 38 bp, Artificial Sequence
  primer
gtaaaacgacggccagtatccatcgactagaaggcacc

SEQ ID NO: 3975 - DNA, 40 bp, Artificial Sequence
  primer
gtaaaacgacggccagttgcacagcgactctctacctatc

SEQ ID NO: 3976 - DNA, 21 bp, Artificial Sequence
  primer
cagatcgcattgagcaagaac

SEQ ID NO: 3977 - DNA, 22 bp, Artificial Sequence
  primer
tcagggttgaatagtgcaacag

SEQ ID NO: 3978 - DNA, 20 bp, Artificial Sequence
  primer
tgggcttcatggtattcgag

SEQ ID NO: 3979 - DNA, 39 bp, Artificial Sequence
  primer
gtaaaacgacggccagtcaacatagccaggatcttcagc

SEQ ID NO: 3980 - DNA, 21 bp, Artificial Sequence
  primer
ttgctatgggagagtgattgc

SEQ ID NO: 3981 - DNA, 21 bp, Artificial Sequence
  primer
tagtttatttgagcgccagcc

SEQ ID NO: 3982 - DNA, 21 bp, Artificial Sequence
  primer
tccaccatgaccattaccttg

SEQ ID NO: 3983 - DNA, 39 bp, Artificial Sequence
  primer
gtaaaacgacggccagtgacatggctatagaaagtgggc

SEQ ID NO: 3984 - DNA, 38 bp, Artificial Sequence
  primer
gtaaaacgacggccagtaaagtggtgggccatttacag

SEQ ID NO: 3985 - DNA, 38 bp, Artificial Sequence
  primer
gtaaaacgacggccagttttcaaccagctgcttctgtg

SEQ ID NO: 3986 - DNA, 39 bp, Artificial Sequence
  primer
gtaaaacgacggccagtcccaatgccataattgagtttg

SEQ ID NO: 3987 - DNA, 22 bp, Artificial Sequence
  primer
gatattatccaaactggcgctg

SEQ ID NO: 3988 - DNA, 21 bp, Artificial Sequence
  primer
ctcctctgtgaccctcgacac

SEQ ID NO: 3989 - DNA, 20 bp, Artificial Sequence
  primer
agttctctggcaatccctgc

SEQ ID NO: 3990 - DNA, 38 bp, Artificial Sequence
  primer
gtaaaacgacggccagtgcagcatagtcacacggtcag

SEQ ID NO: 3991 - DNA, 38 bp, Artificial Sequence
  primer
gtaaaacgacggccagttttgtattcagcgacacaggg

SEQ ID NO: 3992 - DNA, 21 bp, Artificial Sequence
  primer
gaaggaaatcattcgctttgc

SEQ ID NO: 3993 - DNA, 21 bp, Artificial Sequence
  primer
cacatctcggatcatcacacc

SEQ ID NO: 3994 - DNA, 38 bp, Artificial Sequence
  primer
gtaaaacgacggccagtatttctccgaggtttatgggc

SEQ ID NO: 3995 - DNA, 38 bp, Artificial Sequence
  primer
gtaaaacgacggccagttgcttctttctctcccattcc

SEQ ID NO: 3996 - DNA, 21 bp, Artificial Sequence
  primer
atgatgcatgaagaatggctg

SEQ ID NO: 3997 - DNA, 38 bp, Artificial Sequence
  primer
gtaaaacgacggccagtgaccatggtgagtatgttggg

SEQ ID NO: 3998 - DNA, 38 bp, Artificial Sequence
  primer
gtaaaacgacggccagtatcagaggcagcaatttaccc

SEQ ID NO: 3999 - DNA, 38 bp, Artificial Sequence
  primer
gtaaaacgacggccagtgtactggatgtgacagcaggc

SEQ ID NO: 4000 - DNA, 38 bp, Artificial Sequence
  primer
gtaaaacgacggccagtaagccaccatgtacacacacg

SEQ ID NO: 4001 - DNA, 30 bp, Artificial Sequence
  primer
aaacaagataaatacttagtttcaaccctt

SEQ ID NO: 4002 - DNA, 25 bp, Artificial Sequence
  primer
tttgctttctaagacctaagcagac

SEQ ID NO: 4003 - DNA, 38 bp, Artificial Sequence
  primer
gtaaaacgacggccagtagggagggttatttcatggtg

SEQ ID NO: 4004 - DNA, 27 bp, Artificial Sequence
  primer
ggtatggaagtcagtgcctttatttag

SEQ ID NO: 4005 - DNA, 38 bp, Artificial Sequence
  primer
gtaaaacgacggccagtttgttgcatgaaatgtgcttg

SEQ ID NO: 4006 - DNA, 21 bp, Artificial Sequence
  primer
acatgatactgccattgccac

SEQ ID NO: 4007 - DNA, 21 bp, Artificial Sequence
  primer
atttccattgatgtgagctgg

SEQ ID NO: 4008 - DNA, 38 bp, Artificial Sequence
  primer
gtaaaacgacggccagtggtgccctttcaaagaacttg

SEQ ID NO: 4009 - DNA, 21 bp, Artificial Sequence
  primer
ggaccttagcctctcagaacc

SEQ ID NO: 4010 - DNA, 38 bp, Artificial Sequence
  primer
gtaaaacgacggccagttttcgatgggaagtgaagaaa

SEQ ID NO: 4011 - DNA, 38 bp, Artificial Sequence; identical to SEQ ID NO: 3998
  primer

SEQ ID NO: 4012 - DNA, 36 bp, Artificial Sequence
  primer
gtaaaacgacggccagtacagctctgggcactggag

SEQ ID NO: 4013 - DNA, 21 bp, Artificial Sequence
  primer
gcagtcctgggctttaaactg

SEQ ID NO: 4014 - DNA, 20 bp, Artificial Sequence
  primer
cactgctttggagaagcacc

SEQ ID NO: 4015 - DNA, 20 bp, Artificial Sequence
  primer
tggtggaccagtcactgagg

SEQ ID NO: 4016 - DNA, 38 bp, Artificial Sequence
  primer
gtaaaacgacggccagtaccacgaccaactagtcccag

SEQ ID NO: 4017 - DNA, 21 bp, Artificial Sequence
  primer
aggagatctgaacccaagctg

SEQ ID NO: 4018 - DNA, 37 bp, Artificial Sequence
  primer
gtaaaacgacggccagtacgggtatcgggagattctg

SEQ ID NO: 4019 - DNA, 38 bp, Artificial Sequence
  primer
gtaaaacgacggccagtcacttcctgcttagcctggac

SEQ ID NO: 4020 - DNA, 38 bp, Artificial Sequence
  primer
gtaaaacgacggccagtctatgcaatgggagctgtctc

SEQ ID NO: 4021 - DNA, 36 bp, Artificial Sequence
  primer
gtaaaacgacggccagtagtaccgccggtctcactg

SEQ ID NO: 4022 - DNA, 37 bp, Artificial Sequence
  primer
gtaaaacgacggccagtcttagacagccaccgctcac

SEQ ID NO: 4023 - DNA, 38 bp, Artificial Sequence
  primer
gtaaaacgacggccagtttccctgagttggtgacactg

SEQ ID NO: 4024 - DNA, 39 bp, Artificial Sequence
  primer
gtaaaacgacggccagtccagagctggttggtaatgaac

SEQ ID NO: 4025 - DNA, 38 bp, Artificial Sequence
  primer
gtaaaacgacggccagtatggtggattctcctggaatg

SEQ ID NO: 4026 - DNA, 21 bp, Artificial Sequence
  primer
attgcactcctgggcaataag

SEQ ID NO: 4027 - DNA, 21 bp, Artificial Sequence
  primer
gaaccaatgccttgtatttgc

SEQ ID NO: 4028 - DNA, 21 bp, Artificial Sequence
  primer
agaggcaagtgaggtgtggtc

SEQ ID NO: 4029 - DNA, 42 bp, Artificial Sequence
  primer
gtaaaacgacggccagtcaactaagcttcctgaaatgaagag

SEQ ID NO: 4030 - DNA, 37 bp, Artificial Sequence
  primer
gtaaaacgacggccagtcaagtgatctgcctgccttg

SEQ ID NO: 4031 - DNA, 20 bp, Artificial Sequence
  primer
gaactatttgggcctgccac

SEQ ID NO: 4032 - DNA, 22 bp, Artificial Sequence
  primer
ttctaatggatgggtggttgtc

SEQ ID NO: 4033 - DNA, 21 bp, Artificial Sequence
  primer
attggaccatgaaggaacctg

SEQ ID NO: 4034 - DNA, 38 bp, Artificial Sequence
  primer
gtaaaacgacggccagtggaagagctctgtctcttggg

SEQ ID NO: 4035 - DNA, 40 bp, Artificial Sequence
  primer
gtaaaacgacggccagttcagctgaaccacaattgatacc

SEQ ID NO: 4036 - DNA, 38 bp, Artificial Sequence
  primer
gtaaaacgacggccagtagttcaatggctctcctttgc

SEQ ID NO: 4037 - DNA, 40 bp, Artificial Sequence
  primer
gtaaaacgacggccagttcagccaatatgatcacctatcc

SEQ ID NO: 4038 - DNA, 38 bp, Artificial Sequence
  primer
gtaaaacgacggccagttttgccttcgttgaatgtgtc

SEQ ID NO: 4039 - DNA, 38 bp, Artificial Sequence
  primer
gtaaaacgacggccagttgcaaagttgtttgttcccag

SEQ ID NO: 4040 - DNA, 38 bp, Artificial Sequence
  primer
gtaaaacgacggccagtagcttcacgttgttcatgctc

SEQ ID NO: 4041 - DNA, 38 bp, Artificial Sequence
  primer
gtaaaacgacggccagtttatgactgtgagaggccctg

SEQ ID NO: 4042 - DNA, 21 bp, Artificial Sequence
  primer
cccttggagactttgctgttg

SEQ ID NO: 4043 - DNA, 21 bp, Artificial Sequence
  primer
atgcacctcattcacacttgc

SEQ ID NO: 4044 - DNA, 21 bp, Artificial Sequence
  primer
ctctgatccagtgggagaagg

SEQ ID NO: 4045 - DNA, 21 bp, Artificial Sequence
  primer
gttaggccactgcagcaattc

SEQ ID NO: 4046 - DNA, 21 bp, Artificial Sequence
  primer
tggatacagcccagtttgatg

SEQ ID NO: 4047 - DNA, 39 bp, Artificial Sequence
  primer
gtaaaacgacggccagttctctgcaactcactgtagccc

SEQ ID NO: 4048 - DNA, 21 bp, Artificial Sequence
  primer
cgtatgtccactgagcacctc

SEQ ID NO: 4049 - DNA, 21 bp, Artificial Sequence
  primer
cccatatgctgacttacggtc

SEQ ID NO: 4050 - DNA, 21 bp, Artificial Sequence
  primer
taagaacacccaagctggacc

SEQ ID NO: 4051 - DNA, 37 bp, Artificial Sequence
  primer
gtaaaacgacggccagttttggccatgtcttctccag

SEQ ID NO: 4052 - DNA, 36 bp, Artificial Sequence
  primer
gtaaaacgacggccagtttcctttgatgagacgccc

SEQ ID NO: 4053 - DNA, 40 bp, Artificial Sequence
  primer
gtaaaacgacggccagtaataggtcttcagctatcctgcc

SEQ ID NO: 4054 - DNA, 21 bp, Artificial Sequence
  primer
tggagaatgttgtcactgtcg

SEQ ID NO: 4055 - DNA, 21 bp, Artificial Sequence
  primer
acccaaagctggtttcttcac

SEQ ID NO: 4056 - DNA, 37 bp, Artificial Sequence
  primer
gtaaaacgacggccagtcacttccagtgcggagtagc

SEQ ID NO: 4057 - DNA, 38 bp, Artificial Sequence
  primer
gtaaaacgacggccagtgcaagtcaccctagccaagtc

SEQ ID NO: 4058 - DNA, 21 bp, Artificial Sequence
  primer
tccctcagcggatactacacc

SEQ ID NO: 4059 - DNA, 38 bp, Artificial Sequence
  primer
gtaaaacgacggccagtcacagagaggtgttgattgcc

SEQ ID NO: 4060 - DNA, 21 bp, Artificial Sequence
  primer
gtctcagctcaggcttggaac

SEQ ID NO: 4061 - DNA, 21 bp, Artificial Sequence
  primer
ctgccttggaagatcctcttg

SEQ ID NO: 4062 - DNA, 38 bp, Artificial Sequence
  primer
gtaaaacgacggccagtgactcctctgccctgaatttg

SEQ ID NO: 4063 - DNA, 21 bp, Artificial Sequence
  primer
agaaacgcagagttcctcacc

SEQ ID NO: 4064 - DNA, 21 bp, Artificial Sequence
  primer
ccaggttgaaggtctctttgg

SEQ ID NO: 4065 - DNA, 22 bp, Artificial Sequence
  primer
ttgacaggtggtgggaataaag

SEQ ID NO: 4066 - DNA, 38 bp, Artificial Sequence
  primer
gtaaaacgacggccagtaccagtagtggaggatggcag

SEQ ID NO: 4067 - DNA, 38 bp, Artificial Sequence
  primer
gtaaaacgacggccagtaagattgccagtgactccctc

SEQ ID NO: 4068 - DNA, 38 bp, Artificial Sequence
  primer
gtaaaacgacggccagttttgacgggtccatatgtttg

SEQ ID NO: 4069 - DNA, 38 bp, Artificial Sequence
  primer
gtaaaacgacggccagtgtagagcttgatctccctgcc

SEQ ID NO: 4070 - DNA, 21 bp, Artificial Sequence
  primer
gaaactgaggctgtttctgcc

SEQ ID NO: 4071 - DNA, 37 bp, Artificial Sequence
  primer
gtaaaacgacggccagtccctggagaatttccacctg

SEQ ID NO: 4072 - DNA, 38 bp, Artificial Sequence
  primer
gtaaaacgacggccagtcatgtactgctgtccacctcc

SEQ ID NO: 4073 - DNA, 21 bp, Artificial Sequence
  primer
aaggaggatagaaaccacgcc

SEQ ID NO: 4074 - DNA, 39 bp, Artificial Sequence
  primer
gtaaaacgacggccagtttcctaacaaggcagctgtttc

SEQ ID NO: 4075 - DNA, 22 bp, Artificial Sequence
  primer
cctatgagtcttgagtccctgc

SEQ ID NO: 4076 - DNA, 38 bp, Artificial Sequence
  primer
gtaaaacgacggccagtcaagggtgcatcatacctctg

SEQ ID NO: 4077 - DNA, 21 bp, Artificial Sequence
  primer
cgtggcttagtgttcagggtc

SEQ ID NO: 4078 - DNA, 20 bp, Artificial Sequence
  primer
ctggactggaatgtgccaag

SEQ ID NO: 4079 - DNA, 20 bp, Artificial Sequence
  primer
ctggactggaatgtgccaag

SEQ ID NO: 4080 - DNA, 21 bp, Artificial Sequence
  primer
ctgcaacgaaggcattgtaag

SEQ ID NO: 4081 - DNA, 38 bp, Artificial Sequence
  primer
gtaaaacgacggccagtcaagcctggtttgcagtacac

SEQ ID NO: 4082 - DNA, 21 bp, Artificial Sequence
  primer
tccctgtcttaccaccattcc

SEQ ID NO: 4083 - DNA, 21 bp, Artificial Sequence
  primer
ctccataagggagagtgcgtg

SEQ ID NO: 4084 - DNA, 25 bp, Artificial Sequence
  primer
aagaatatgcatgaagatgagcttg

SEQ ID NO: 4085 - DNA, 24 bp, Artificial Sequence
  primer
ttccagttcaaacttatctttccc

SEQ ID NO: 4086 - DNA, 21 bp, Artificial Sequence
  primer
acccaagtatccatcacccag

SEQ ID NO: 4087 - DNA, 21 bp, Artificial Sequence
  primer
catacccagcctctcagcttc

SEQ ID NO: 4088 - DNA, 38 bp, Artificial Sequence
  primer
gtaaaacgacggccagtgttgcactccttcgtcagttg

SEQ ID NO: 4089 - DNA, 38 bp, Artificial Sequence
  primer
gtaaaacgacggccagtacttctgtggccatgtctgag

SEQ ID NO: 4090 - DNA, 21 bp, Artificial Sequence
  primer
aagccaatgcagttctgaagg

SEQ ID NO: 4091 - DNA, 21 bp, Artificial Sequence
  primer
gcaccttgttctgtgtgaagc

SEQ ID NO: 4092 - DNA, 21 bp, Artificial Sequence
  primer
ctcacaaggcatggatttctg

SEQ ID NO: 4093 - DNA, 38 bp, Artificial Sequence
  primer
gtaaaacgacggccagtcgagagacagagagacggagc

SEQ ID NO: 4094 - DNA, 21 bp, Artificial Sequence
  primer
ggctgaaaccaaagtgacctc

SEQ ID NO: 4095 - DNA, 21 bp, Artificial Sequence
  primer
aagacgacagctcctagccac

SEQ ID NO: 4096 - DNA, 37 bp, Artificial Sequence
  primer
gtaaaacgacggccagttctggaagaagctgtcgtgg

SEQ ID NO: 4097 - DNA, 20 bp, Artificial Sequence
  primer
tcaggtccttcgtgcagttc

SEQ ID NO: 4098 - DNA, 20 bp, Artificial Sequence
  primer
ggtgacaaggctgtgaggag

SEQ ID NO: 4099 - DNA, 37 bp, Artificial Sequence
  primer
gtaaaacgacggccagtggaaaccgctgttgtgagac

SEQ ID NO: 4100 - DNA, 38 bp, Artificial Sequence
  primer
gtaaaacgacggccagtaacaggactcaagcgttcacc

SEQ ID NO: 4101 - DNA, 38 bp, Artificial Sequence
  primer
gtaaaacgacggccagtagtccttcctcttctcccacc

SEQ ID NO: 4102 - DNA, 21 bp, Artificial Sequence
  primer
gatgggaagactgacaggtcc

SEQ ID NO: 4103 - DNA, 21 bp, Artificial Sequence
  primer
cacatacaggctccatttccc

SEQ ID NO: 4104 - DNA, 38 bp, Artificial Sequence
  primer
gtaaaacgacggccagtaaagaaaggcagaaggccaag

SEQ ID NO: 4105 - DNA, 37 bp, Artificial Sequence
  primer
gtaaaacgacggccagtcgtgcactggttctcctttc

SEQ ID NO: 4106 - DNA, 21 bp, Artificial Sequence
  primer
gtgcttgtcctctgctaggtg

SEQ ID NO: 4107 - DNA, 37 bp, Artificial Sequence
  primer
gtaaaacgacggccagtggtgggactgctgtgttctg

SEQ ID NO: 4108 - DNA, 40 bp, Artificial Sequence
  primer
gtaaaacgacggccagtccacactttgagaatcactggtc

SEQ ID NO: 4109 - DNA, 21 bp, Artificial Sequence
  primer
actgtgggtcccaagagtttg

SEQ ID NO: 4110 - DNA, 38 bp, Artificial Sequence
  primer
gtaaaacgacggccagtgagggactggctactgtcacc

SEQ ID NO: 4111 - DNA, 37 bp, Artificial Sequence
  primer
gtaaaacgacggccagtcacacctgctaaggctcagg

SEQ ID NO: 4112 - DNA, 38 bp, Artificial Sequence
  primer
gtaaaacgacggccagtccagctctcatgggtctgtag

SEQ ID NO: 4113 - DNA, 38 bp, Artificial Sequence
  primer
gtaaaacgacggccagtaagcctggcatctttgatagg

SEQ ID NO: 4114 - DNA, 38 bp, Artificial Sequence
  primer
gtaaaacgacggccagtcaagtctgtccagttgcttgc

SEQ ID NO: 4115 - DNA, 40 bp, Artificial Sequence
  primer
gtaaaacgacggccagtgctgggatttgaacttcagtttg

SEQ ID NO: 4116 - DNA, 38 bp, Artificial Sequence
  primer
gtaaaacgacggccagtacctgtactgcaaggtttggg

SEQ ID NO: 4117 - DNA, 38 bp, Artificial Sequence
  primer
gtaaaacgacggccagtgaaggtgaagggaacaaggtg

SEQ ID NO: 4118 - DNA, 20 bp, Artificial Sequence
  primer
catcttcctggctccctctc

SEQ ID NO: 4119 - DNA, 37 bp, Artificial Sequence
  primer
gtaaaacgacggccagtgaaccaggcaggaaggtagg

SEQ ID NO: 4120 - DNA, 37 bp, Artificial Sequence
  primer
gtaaaacgacggccagtgtgccacattgtcatccttg

SEQ ID NO: 4121 - DNA, 21 bp, Artificial Sequence
  primer
tcaaacaatcactcccaccac

SEQ ID NO: 4122 - DNA, 36 bp, Artificial Sequence
  primer
gtaaaacgacggccagtttgcaatggttggcatcag

SEQ ID NO: 4123 - DNA, 36 bp, Artificial Sequence
  primer
gtaaaacgacggccagtcttctttgcagccctctgg

SEQ ID NO: 4124 - DNA, 22 bp, Artificial Sequence
  primer
tcccgattgggtagtggtatag

SEQ ID NO: 4125 - DNA, 38 bp, Artificial Sequence
  primer
gtaaaacgacggccagtctcagacagggactcagcctc

SEQ ID NO: 4126 - DNA, 20 bp, Artificial Sequence
  primer
cacctgcttctgaaagccac

SEQ ID NO: 4127 - DNA, 21 bp, Artificial Sequence
  primer
cccaggtgtacaaagcatacg

SEQ ID NO: 4128 - DNA, 36 bp, Artificial Sequence
  primer
gtaaaacgacggccagtgctcttgcttggatggtgg

SEQ ID NO: 4129 - DNA, 38 bp, Artificial Sequence
  primer
gtaaaacgacggccagtatgacttgctagctccttggc

SEQ ID NO: 4130 - DNA, 21 bp, Artificial Sequence
  primer
acatggctgaatgacagatgg

SEQ ID NO: 4131 - DNA, 39 bp, Artificial Sequence
  primer
gtaaaacgacggccagttcacctggcaactttctttctc

SEQ ID NO: 4132 - DNA, 21 bp, Artificial Sequence
  primer
gagatgagaaagacgcttggg

SEQ ID NO: 4133 - DNA, 21 bp, Artificial Sequence
  primer
caaaggcttgtcttccaaagg

SEQ ID NO: 4134 - DNA, 38 bp, Artificial Sequence
  primer
gtaaaacgacggccagttggacagcaaggtgattatcc

SEQ ID NO: 4135 - DNA, 22 bp, Artificial Sequence
  primer
gaatgagagagggtggacacag

SEQ ID NO: 4136 - DNA, 38 bp, Artificial Sequence
  primer
gtaaaacgacggccagtgctgggtaagaggctagggag

SEQ ID NO: 4137 - DNA, 20 bp, Artificial Sequence
  primer
gaccatgtggaggttcttgg

SEQ ID NO: 4138 - DNA, 39 bp, Artificial Sequence
  primer
gtaaaacgacggccagtgagaaaggagagtgggttaggc

SEQ ID NO: 4139 - DNA, 21 bp, Artificial Sequence
  primer
tcagactcctgtgttcatccc

SEQ ID NO: 4140 - DNA, 21 bp, Artificial Sequence
  primer
gtacagcatgaccctcgactc

SEQ ID NO: 4141 - DNA, 38 bp, Artificial Sequence
  primer
gtaaaacgacggccagtcaacacgtaaagcactcagcc

SEQ ID NO: 4142 - DNA, 35 bp, Artificial Sequence
  primer
gtaaaacgacggccagtaggtggccgtgaagatcc

SEQ ID NO: 4143 - DNA, 21 bp, Artificial Sequence
  primer
agagggacagatgtgggtcac

SEQ ID NO: 4144 - DNA, 38 bp, Artificial Sequence
  primer
gtaaaacgacggccagtcacaaggaggaggtctcaagc

SEQ ID NO: 4145 - DNA, 38 bp, Artificial Sequence
  primer
gtaaaacgacggccagtaggctcatggtctctctccag

SEQ ID NO: 4146 - DNA, 35 bp, Artificial Sequence
  primer
gtaaaacgacggccagtgtcggttggaaacgggag

SEQ ID NO: 4147 - DNA, 38 bp, Artificial Sequence
  primer
gtaaaacgacggccagtcttccagctcctcttctccag

SEQ ID NO: 4148 - DNA, 20 bp, Artificial Sequence
  primer
tttctgggttatgcagaggg

SEQ ID NO: 4149 - DNA, 36 bp, Artificial Sequence
  primer
gtaaaacgacggccagtactggaaccctccgctctc

SEQ ID NO: 4150 - DNA, 21 bp, Artificial Sequence
  primer
agtgctggtactggttgaggg

SEQ ID NO: 4151 - DNA, 21 bp, Artificial Sequence
  primer
acacaggagtgagacgtggtg

SEQ ID NO: 4152 - DNA, 37 bp, Artificial Sequence
  primer
gtaaaacgacggccagtctcacccttgggacatgaag

SEQ ID NO: 4153 - DNA, 21 bp, Artificial Sequence
  primer
tggaagaggtttgtcctggtg

SEQ ID NO: 4154 - DNA, 37 bp, Artificial Sequence
  primer
gtaaaacgacggccagtgcttccaggaggtgagtgtg

SEQ ID NO: 4155 - DNA, 36 bp, Artificial Sequence
  primer
gtaaaacgacggccagtacaggtgcacagagccaag

SEQ ID NO: 4156 - DNA, 38 bp, Artificial Sequence
  primer
gtaaaacgacggccagtggagcaaacacgtaggcagag

SEQ ID NO: 4157 - DNA, 37 bp, Artificial Sequence
  primer
gtaaaacgacggccagtactgggacaagtccagcaag

SEQ ID NO: 4158 - DNA, 20 bp, Artificial Sequence
  primer
gtgctcactgccgacttctg

SEQ ID NO: 4159 - DNA, 38 bp, Artificial Sequence
  primer
gtaaaacgacggccagttggcaacggtaggaatttacc

SEQ ID NO: 4160 - DNA, 38 bp, Artificial Sequence
  primer
gtaaaacgacggccagtgtatccctagttctggtgcgg

SEQ ID NO: 4161 - DNA, 36 bp, Artificial Sequence
  primer
gtaaaacgacggccagtcaccacagaagggagtcgg

SEQ ID NO: 4162 - DNA, 21 bp, Artificial Sequence
  primer
ggaccgctacttccttatggc

SEQ ID NO: 4163 - DNA, 38 bp, Artificial Sequence
  primer
gtaaaacgacggccagtgatgctcaagtttgaagtggc

SEQ ID NO: 4164 - DNA, 18 bp, Artificial Sequence
  primer
ctgcatggcgctgagatg

SEQ ID NO: 4165 - DNA, 18 bp, Artificial Sequence
  primer
cgacgaggagttcgcttg

SEQ ID NO: 4166 - DNA, 19 bp, Artificial Sequence
  primer
gtgcactgcgtcctcttcc

SEQ ID NO: 4167 - DNA, 21 bp, Artificial Sequence
  primer
tttggagagctcttgctatgc

SEQ ID NO: 4168 - DNA, 38 bp, Artificial Sequence
  primer
gtaaaacgacggccagtgagttgcttgttcagtggcag

SEQ ID NO: 4169 - DNA, 38 bp, Artificial Sequence
  primer
gtaaaacgacggccagtaagccttcatttctggtctgc

SEQ ID NO: 4170 - DNA, 37 bp, Artificial Sequence
  primer
gtaaaacgacggccagttggccaccagtgtctagagg

SEQ ID NO: 4171 - DNA, 38 bp, Artificial Sequence
  primer
gtaaaacgacggccagtgcaaggacaagacccagtttc

SEQ ID NO: 4172 - DNA, 38 bp, Artificial Sequence
  primer
gtaaaacgacggccagtcttgcatgggagcatgaatac

SEQ ID NO: 4173 - DNA, 20 bp, Artificial Sequence
  primer
tggctgtgtttgtcaggatg

SEQ ID NO: 4174 - DNA, 38 bp, Artificial Sequence
  primer
gtaaaacgacggccagtgctggagggagagtacaggtg

SEQ ID NO: 4175 - DNA, 21 bp, Artificial Sequence
  primer
tacaaacatgtcgaacgggag

SEQ ID NO: 4176 - DNA, 38 bp, Artificial Sequence
  primer
gtaaaacgacggccagtagttcccagagacctgagtgg

SEQ ID NO: 4177 - DNA, 38 bp, Artificial Sequence
  primer
gtaaaacgacggccagtcctagcagcttgcaggtcatc

SEQ ID NO: 4178 - DNA, 38 bp, Artificial Sequence
  primer
gtaaaacgacggccagtgacctgcttgaagagggacac

SEQ ID NO: 4179 - DNA, 38 bp, Artificial Sequence
  primer
gtaaaacgacggccagtaacagttcttgggtttggtgg

SEQ ID NO: 4180 - DNA, 38 bp, Artificial Sequence
  primer
gtaaaacgacggccagttgattagaaggaagtgtgcgg

SEQ ID NO: 4181 - DNA, 38 bp, Artificial Sequence
  primer
gtaaaacgacggccagtctagccctacactgctctggc

SEQ ID NO: 4182 - DNA, 38 bp, Artificial Sequence
  primer
gtaaaacgacggccagtctttcctgaatgtgtccatcg

SEQ ID NO: 4183 - DNA, 38 bp, Artificial Sequence
  primer
gtaaaacgacggccagtctctgaaagtgcagctgttgg

SEQ ID NO: 4184 - DNA, 38 bp, Artificial Sequence
  primer
gtaaaacgacggccagtgaaacaaagccctgaaaggag

SEQ ID NO: 4185 - DNA, 20 bp, Artificial Sequence
  primer
gcaacagatgcaggatggag

SEQ ID NO: 4186 - DNA, 21 bp, Artificial Sequence
  primer
tgacattgacaagcgttgatg

SEQ ID NO: 4187 - DNA, 38 bp, Artificial Sequence
  primer
gtaaaacgacggccagtagcctttagtggcatggaaac

SEQ ID NO: 4188 - DNA, 21 bp, Artificial Sequence
  primer
aagggcagaactcttctggag

SEQ ID NO: 4189 - DNA, 21 bp, Artificial Sequence
  primer
agaattcccaaactggccttc

SEQ ID NO: 4190 - DNA, 24 bp, Artificial Sequence
  primer
tttccagtttcttctttgactcag

SEQ ID NO: 4191 - DNA, 37 bp, Artificial Sequence
  primer
gtaaaacgacggccagtaatggtgtgagcagagctgg

SEQ ID NO: 4192 - DNA, 38 bp, Artificial Sequence
  primer
gtaaaacgacggccagtatggtcatttccgacagtttg

SEQ ID NO: 4193 - DNA, 38 bp, Artificial Sequence
  primer
gtaaaacgacggccagtattgcggtcagtgctcctaag

SEQ ID NO: 4194 - DNA, 21 bp, Artificial Sequence
  primer
gaccctagtccaatgaggtcg

SEQ ID NO: 4195 - DNA, 38 bp, Artificial Sequence
  primer
gtaaaacgacggccagttccagacaacaatcctcatgc

SEQ ID NO: 4196 - DNA, 25 bp, Artificial Sequence
  primer
aagataatggattccctaaataccc

SEQ ID NO: 4197 - DNA, 40 bp, Artificial Sequence
  primer
gtaaaacgacggccagtaaatgctgttcggaatgatacac

SEQ ID NO: 4198 - DNA, 22 bp, Artificial Sequence
  primer
catgctctgggtacaactaggc

SEQ ID NO: 4199 - DNA, 21 bp, Artificial Sequence
  primer
agttaattggccatcgctgtg

SEQ ID NO: 4200 - DNA, 21 bp, Artificial Sequence
  primer
caatgttggtgcttcttgtgg

SEQ ID NO: 4201 - DNA, 22 bp, Artificial Sequence
  primer
cataaagttagcacccacctgc

SEQ ID NO: 4202 - DNA, 40 bp, Artificial Sequence
  primer
gtaaaacgacggccagtggatcaaagatgagaaacaagcc

SEQ ID NO: 4203 - DNA, 37 bp, Artificial Sequence
  primer
gtaaaacgacggccagttgggtttggaaggagatttg

SEQ ID NO: 4204 - DNA, 21 bp, Artificial Sequence
  primer
tgactgaaggacatttcaggg

SEQ ID NO: 4205 - DNA, 38 bp, Artificial Sequence
  primer
gtaaaacgacggccagtcacttgcctgtggagtgtttc

SEQ ID NO: 4206 - DNA, 38 bp, Artificial Sequence
  primer
gtaaaacgacggccagtacgcagtggttgaaacaagtc

SEQ ID NO: 4207 - DNA, 38 bp, Artificial Sequence
  primer
gtaaaacgacggccagtaagctcaggtttgggacaaag

SEQ ID NO: 4208 - DNA, 21 bp, Artificial Sequence
  primer
gtggtggtgtgttcctgtagc

SEQ ID NO: 4209 - DNA, 38 bp, Artificial Sequence
  primer
gtaaaacgacggccagtctgcatccttgagtcagatgg

SEQ ID NO: 4210 - DNA, 38 bp, Artificial Sequence
  primer
gtaaaacgacggccagtcagtccagagctctttcctcc

SEQ ID NO: 4211 - DNA, 21 bp, Artificial Sequence
  primer
gtgtgctgtggtcttctccag

SEQ ID NO: 4212 - DNA, 21 bp, Artificial Sequence
  primer
cattgggcaacttgaggtttg

SEQ ID NO: 4213 - DNA, 37 bp, Artificial Sequence
  primer
gtaaaacgacggccagtcgaggcagatctgtgaggtc

SEQ ID NO: 4214 - DNA, 38 bp, Artificial Sequence
  primer
gtaaaacgacggccagtaagggtcagggtctcactgtc

SEQ ID NO: 4215 - DNA, 38 bp, Artificial Sequence
  primer
gtaaaacgacggccagttttctcccactgtccttcctc

SEQ ID NO: 4216 - DNA, 21 bp, Artificial Sequence
  primer
gaggcccacaatgaatttctc

SEQ ID NO: 4217 - DNA, 20 bp, Artificial Sequence
  primer
ctagttagcggcccacacag

SEQ ID NO: 4218 - DNA, 21 bp, Artificial Sequence
  primer
gcaatccacaagcaagttctg

SEQ ID NO: 4219 - DNA, 38 bp, Artificial Sequence
  primer
gtaaaacgacggccagtctccacctctgtctttcccag

SEQ ID NO: 4220 - DNA, 38 bp, Artificial Sequence
  primer
gtaaaacgacggccagtattcaggaaactgagcatccc

SEQ ID NO: 4221 - DNA, 18 bp, Artificial Sequence
  primer
cccgtcccttcctctcct

SEQ ID NO: 4222 - DNA, 38 bp, Artificial Sequence
  primer
gtaaaacgacggccagtcagcctgagttgctgtcagtc

SEQ ID NO: 4223 - DNA, 20 bp, Artificial Sequence
  primer
cactaccatgcacagccctc

SEQ ID NO: 4224 - DNA, 38 bp, Artificial Sequence
  primer
gtaaaacgacggccagttcactgtttggctaggacctg

SEQ ID NO: 4225 - DNA, 21 bp, Artificial Sequence
  primer
gagcccgacttgatgtgaaag

SEQ ID NO: 4226 - DNA, 35 bp, Artificial Sequence
  primer
gtaaaacgacggccagtttacaggcatgaaccgcc

SEQ ID NO: 4227 - DNA, 21 bp, Artificial Sequence
  primer
gaaacacagcaagacccactc

SEQ ID NO: 4228 - DNA, 38 bp, Artificial Sequence
  primer
gtaaaacgacggccagttacatctgtcactgggttggg

SEQ ID NO: 4229 - DNA, 21 bp, Artificial Sequence
  primer
ctaggtgtagggaatccaccc

SEQ ID NO: 4230 - DNA, 38 bp, Artificial Sequence
  primer
gtaaaacgacggccagtgagaggagatggcttctgagg

SEQ ID NO: 4231 - DNA, 20 bp, Artificial Sequence
  primer
ggagtgtcccgtactgcttg

SEQ ID NO: 4232 - DNA, 18 bp, Artificial Sequence
  primer
aggagacgggattgccac

SEQ ID NO: 4233 - DNA, 21 bp, Artificial Sequence
  primer
acctttcagaactgggctgag

SEQ ID NO: 4234 - DNA, 35 bp, Artificial Sequence
  primer
gtaaaacgacggccagtcacgccttcctgttcacc

SEQ ID NO: 4235 - DNA, 38 bp, Artificial Sequence
  primer
gtaaaacgacggccagtccctcactgtaaagcccagtc

SEQ ID NO: 4236 - DNA, 37 bp, Artificial Sequence
  primer
gtaaaacgacggccagtgtgggctcctgagtgatttg

SEQ ID NO: 4237 - DNA, 39 bp, Artificial Sequence
  primer
gtaaaacgacggccagtcaggtatgaggaagaatggctg

SEQ ID NO: 4238 - DNA, 37 bp, Artificial Sequence
  primer
gtaaaacgacggccagttttcccaactccctcctacc

SEQ ID NO: 4239 - DNA, 21 bp, Artificial Sequence
  primer
agcaggcagctgacagaagtc

SEQ ID NO: 4240 - DNA, 38 bp, Artificial Sequence
  primer
gtaaaacgacggccagtgaagtcagacatccaggaacg

SEQ ID NO: 4241 - DNA, 38 bp, Artificial Sequence
  primer
gtaaaacgacggccagttgagttcctgggtcctagtgg

SEQ ID NO: 4242 - DNA, 38 bp, Artificial Sequence
  primer
gtaaaacgacggccagtatagagcatgcagtgtggctc

SEQ ID NO: 4243 - DNA, 38 bp, Artificial Sequence
  primer
gtaaaacgacggccagtgagaagaccctggcttccttc

SEQ ID NO: 4244 - DNA, 38 bp, Artificial Sequence
  primer
gtaaaacgacggccagtccctgaggtcatatggtggag

SEQ ID NO: 4245 - DNA, 21 bp, Artificial Sequence
  primer
acatggaactgaactggagcc

SEQ ID NO: 4246 - DNA, 21 bp, Artificial Sequence
  primer
tgcaatgtcttctatcagccg

SEQ ID NO: 4247 - DNA, 21 bp, Artificial Sequence
  primer
ctcagaggacctgatggtgag

SEQ ID NO: 4248 - DNA, 38 bp, Artificial Sequence
  primer
gtaaaacgacggccagtcagaaatagcaggatccaccc

SEQ ID NO: 4249 - DNA, 22 bp, Artificial Sequence
  primer
aacgctccattctgtggattag

SEQ ID NO: 4250 - DNA, 36 bp, Artificial Sequence
  primer
gtaaaacgacggccagtaatcacccacagggcaaag

SEQ ID NO: 4251 - DNA, 36 bp, Artificial Sequence
  primer
gtaaaacgacggccagtgggctgaacactcaggagc

SEQ ID NO: 4252 - DNA, 21 bp, Artificial Sequence
  primer
ctccctccttcccaattcttc

SEQ ID NO: 4253 - DNA, 21 bp, Artificial Sequence
  primer
ccacagtactccctcacctcc

SEQ ID NO: 4254 - DNA, 38 bp, Artificial Sequence
  primer
gtaaaacgacggccagttacctaccatcctcctctggg

SEQ ID NO: 4255 - DNA, 38 bp, Artificial Sequence
  primer
gtaaaacgacggccagtccttccttccagttccttgtg

SEQ ID NO: 4256 - DNA, 21 bp, Artificial Sequence
  primer
ggaaccacattggaggcatag

SEQ ID NO: 4257 - DNA, 37 bp, Artificial Sequence
  primer
gtaaaacgacggccagtgtgtgaccctagcctggtcc

SEQ ID NO: 4258 - DNA, 36 bp, Artificial Sequence
  primer
gtaaaacgacggccagtaggaaggagacgacgaggc

SEQ ID NO: 4259 - DNA, 18 bp, Artificial Sequence
  primer
ggcttcggcttcagcttc

SEQ ID NO: 4260 - DNA, 19 bp, Artificial Sequence
  primer
gaggtgggtctggaggagc

SEQ ID NO: 4261 - DNA, 21 bp, Artificial Sequence
  primer
tattccgctccaagaagttcc

SEQ ID NO: 4262 - DNA, 37 bp, Artificial Sequence
  primer
gtaaaacgacggccagtctgaaccagagcagcctcac

SEQ ID NO: 4263 - DNA, 20 bp, Artificial Sequence
  primer
tagcgccaggtgtgagtttg

SEQ ID NO: 4264 - DNA, 38 bp, Artificial Sequence
  primer
gtaaaacgacggccagtcactgttaacccaggagtccc

SEQ ID NO: 4265 - DNA, 21 bp, Artificial Sequence
  primer
tgggcaatagagcaagacctc

SEQ ID NO: 4266 - DNA, 38 bp, Artificial Sequence
  primer
gtaaaacgacggccagtaaggcaagttattccaggcac

SEQ ID NO: 4267 - DNA, 21 bp, Artificial Sequence
  primer
cttggactctagggctggatg

SEQ ID NO: 4268 - DNA, 38 bp, Artificial Sequence
  primer
gtaaaacgacggccagtggtttgaattgtggtgaaccc

SEQ ID NO: 4269 - DNA, 20 bp, Artificial Sequence
  primer
ctggccaggtacgatgtttg

SEQ ID NO: 4270 - DNA, 21 bp, Artificial Sequence
  primer
aaggaaaggagctgctgaatg

SEQ ID NO: 4271 - DNA, 21 bp, Artificial Sequence
  primer
ctggtctcagtctcagctccc

SEQ ID NO: 4272 - DNA, 21 bp, Artificial Sequence
  primer
gagtcttccctgttgtgggag

SEQ ID NO: 4273 - DNA, 21 bp, Artificial Sequence
  primer
ctctgaagctgtgaggatggg

SEQ ID NO: 4274 - DNA, 38 bp, Artificial Sequence
  primer
gtaaaacgacggccagtggaccatttgtggagtccttg

SEQ ID NO: 4275 - DNA, 21 bp, Artificial Sequence
  primer
gcccgttcctcagactctttc

SEQ ID NO: 4276 - DNA, 37 bp, Artificial Sequence
  primer
gtaaaacgacggccagtccagctcagactggaggatg

SEQ ID NO: 4277 - DNA, 21 bp, Artificial Sequence
  primer
aggtaagagctgggtggtttg

SEQ ID NO: 4278 - DNA, 38 bp, Artificial Sequence
  primer
gtaaaacgacggccagtcaggagaggagtaatggctgc

SEQ ID NO: 4279 - DNA, 20 bp, Artificial Sequence
  primer
agttggcatttgcgtgactg

SEQ ID NO: 4280 - DNA, 38 bp, Artificial Sequence
  primer
gtaaaacgacggccagtcttccctggacatcctctgtc

SEQ ID NO: 4281 - DNA, 38 bp, Artificial Sequence
  primer
gtaaaacgacggccagtcaggttgggagtcagaaggac

SEQ ID NO: 4282 - DNA, 21 bp, Artificial Sequence
  primer
cagtcagaggtggctctaccc

SEQ ID NO: 4283 - DNA, 21 bp, Artificial Sequence
  primer
taagccatcctcctatctcgg

SEQ ID NO: 4284 - DNA, 20 bp, Artificial Sequence
  primer
gtttagtggcctcctggtcc

SEQ ID NO: 4285 - DNA, 38 bp, Artificial Sequence
  primer
gtaaaacgacggccagtggataccgaggtgacaacgac

SEQ ID NO: 4286 - DNA, 21 bp, Artificial Sequence
  primer
tgtgtaaccggcatagcttcc

SEQ ID NO: 4287 - DNA, 21 bp, Artificial Sequence
  primer
ggcttccttcctcagagaacc

SEQ ID NO: 4288 - DNA, 38 bp, Artificial Sequence
  primer
gtaaaacgacggccagtgggaaggtcaggtcttcagag

SEQ ID NO: 4289 - DNA, 21 bp, Artificial Sequence
  primer
caatgtcaggtagggtgaggg

SEQ ID NO: 4290 - DNA, 21 bp, Artificial Sequence
  primer
gggcagatagagtatgcgtgg

SEQ ID NO: 4291 - DNA, 38 bp, Artificial Sequence
  primer
gtaaaacgacggccagtttctgctcatgtccaaccaag

SEQ ID NO: 4292 - DNA, 20 bp, Artificial Sequence
  primer
gtccaatgatgtgaccctgg

SEQ ID NO: 4293 - DNA, 38 bp, Artificial Sequence
  primer
gtaaaacgacggccagtagcaagaagagggacaaatgg

SEQ ID NO: 4294 - DNA, 38 bp, Artificial Sequence
  primer
gtaaaacgacggccagtcctcaataccctgtccctgac

SEQ ID NO: 4295 - DNA, 38 bp, Artificial Sequence
  primer
gtaaaacgacggccagtcaggtgctgtccatacctttc

SEQ ID NO: 4296 - DNA, 38 bp, Artificial Sequence
  primer
gtaaaacgacggccagtacagagcagggtgaggatttc

SEQ ID NO: 4297 - DNA, 37 bp, Artificial Sequence
  primer
gtaaaacgacggccagtcatccctgcttgttccagag

SEQ ID NO: 4298 - DNA, 38 bp, Artificial Sequence
  primer
gtaaaacgacggccagtactccagacagggaggaggtc

SEQ ID NO: 4299 - DNA, 38 bp, Artificial Sequence
  primer
gtaaaacgacggccagtagcccaggttagggtacatgg

SEQ ID NO: 4300 - DNA, 38 bp, Artificial Sequence
  primer
gtaaaacgacggccagtgtggtgggaaggttaggtcag

SEQ ID NO: 4301 - DNA, 37 bp, Artificial Sequence
  primer
gtaaaacgacggccagtgcccaatgcctgacttacag

SEQ ID NO: 4302 - DNA, 38 bp, Artificial Sequence
  primer
gtaaaacgacggccagtcagggcttcttccaatgagac

SEQ ID NO: 4303 - DNA, 38 bp, Artificial Sequence
  primer
gtaaaacgacggccagtatgtgattccctcttatccgc

SEQ ID NO: 4304 - DNA, 38 bp, Artificial Sequence
  primer
gtaaaacgacggccagtgtggcaagaaatgagtgttgg

SEQ ID NO: 4305 - DNA, 20 bp, Artificial Sequence
  primer
tctaccagtgccaggaggtg

SEQ ID NO: 4306 - DNA, 38 bp, Artificial Sequence
  primer
gtaaaacgacggccagttccacaggtgtctctgcagtc

SEQ ID NO: 4307 - DNA, 37 bp, Artificial Sequence
  primer
gtaaaacgacggccagtagggtgttggcagacagatg

SEQ ID NO: 4308 - DNA, 21 bp, Artificial Sequence
  primer
ggaagctgtaagtgaggcagc

SEQ ID NO: 4309 - DNA, 38 bp, Artificial Sequence
  primer
gtaaaacgacggccagttcagcacaggaaaccatgaac

SEQ ID NO: 4310 - DNA, 21 bp, Artificial Sequence
  primer
aaggtcagggaatgggaagag

SEQ ID NO: 4311 - DNA, 37 bp, Artificial Sequence
  primer
gtaaaacgacggccagtctgatgctaccctgcctgtc

SEQ ID NO: 4312 - DNA, 37 bp, Artificial Sequence
  primer
gtaaaacgacggccagtcatccctatggaggctgagg

SEQ ID NO: 4313 - DNA, 21 bp, Artificial Sequence
  primer
agaagtggctcctggtgactg

SEQ ID NO: 4314 - DNA, 38 bp, Artificial Sequence
  primer
gtaaaacgacggccagtctgagaacattctctcccgtg

SEQ ID NO: 4315 - DNA, 36 bp, Artificial Sequence
  primer
gtaaaacgacggccagtgggtcaggtgtggagggag

SEQ ID NO: 4316 - DNA, 21 bp, Artificial Sequence
  primer
ggttgagcaacttctttgctg

SEQ ID NO: 4317 - DNA, 38 bp, Artificial Sequence
  primer
gtaaaacgacggccagttttggagaatactccgggatg

SEQ ID NO: 4318 - DNA, 38 bp, Artificial Sequence
  primer
gtaaaacgacggccagtgtctacgtccacaccctcctc

SEQ ID NO: 4319 - DNA, 38 bp, Artificial Sequence
  primer
gtaaaacgacggccagtgtctgagacctctgtccaccc

SEQ ID NO: 4320 - DNA, 38 bp, Artificial Sequence
  primer
gtaaaacgacggccagtaagctgattcactggaggcag

SEQ ID NO: 4321 - DNA, 37 bp, Artificial Sequence
  primer
gtaaaacgacggccagtctgtgagccagaggattggt

SEQ ID NO: 4322 - DNA, 36 bp, Artificial Sequence
  primer
gtaaaacgacggccagtagtgccctggaggcttctc

SEQ ID NO: 4323 - DNA, 38 bp, Artificial Sequence
  primer
gtaaaacgacggccagtgtgctcagagctgatcccaac

SEQ ID NO: 4324 - DNA, 37 bp, Artificial Sequence
  primer
gtaaaacgacggccagtggctctgtggtatgtgctgg

SEQ ID NO: 4325 - DNA, 38 bp, Artificial Sequence
  primer
gtaaaacgacggccagtggtgagatcagaggtcttccc

SEQ ID NO: 4326 - DNA, 38 bp, Artificial Sequence
  primer
gtaaaacgacggccagtgctcaggtggagtagcagaaa

SEQ ID NO: 4327 - DNA, 21 bp, Artificial Sequence
  primer
accagatgaaactcatgcagc

SEQ ID NO: 4328 - DNA, 38 bp, Artificial Sequence
  primer
gtaaaacgacggccagtcacacccttcctgagaagcag

SEQ ID NO: 4329 - DNA, 21 bp, Artificial Sequence
  primer
tacttgtagggctcagccagg

SEQ ID NO: 4330 - DNA, 38 bp, Artificial Sequence
  primer
gtaaaacgacggccagtgggtatggattctctggcctc

SEQ ID NO: 4331 - DNA, 21 bp, Artificial Sequence
  primer
catgcctgggcagtctctatc

SEQ ID NO: 4332 - DNA, 36 bp, Artificial Sequence
  primer
gtaaaacgacggccagtgagagcagcacgcaaggac

SEQ ID NO: 4333 - DNA, 21 bp, Artificial Sequence
  primer
aggccgcctttgagtctttag

SEQ ID NO: 4334 - DNA, 18 bp, Artificial Sequence
  primer
agtcttcccggaacgcag

SEQ ID NO: 4335 - DNA, 21 bp, Artificial Sequence
  primer
gatttggaacgcctctaccag

SEQ ID NO: 4336 - DNA, 38 bp, Artificial Sequence
  primer
gtaaaacgacggccagtagggatgacatttgcctcaag

SEQ ID NO: 4337 - DNA, 38 bp, Artificial Sequence
  primer
gtaaaacgacggccagtcaatcccaaagggagttcatc

SEQ ID NO: 4338 - DNA, 22 bp, Artificial Sequence
  primer
ggatggtgttgatgtgtatccc

SEQ ID NO: 4339 - DNA, 37 bp, Artificial Sequence
  primer
gtaaaacgacggccagtacctctgggtccttcaaacc

SEQ ID NO: 4340 - DNA, 21 bp, Artificial Sequence
  primer
aaagaaagtgcagagccaacg

SEQ ID NO: 4341 - DNA, 21 bp, Artificial Sequence
  primer
cttgtgtaaccctggtgttgg

SEQ ID NO: 4342 - DNA, 40 bp, Artificial Sequence
  primer
gtaaaacgacggccagttttcactgaatacaactgcatgg

SEQ ID NO: 4343 - DNA, 21 bp, Artificial Sequence
  primer
tgatgtttccctcaacctcaa

SEQ ID NO: 4344 - DNA, 21 bp, Artificial Sequence
  primer
gggcaggagcaataaatcaag

SEQ ID NO: 4345 - DNA, 21 bp, Artificial Sequence
  primer
ccatttccagcactcacactg

SEQ ID NO: 4346 - DNA, 21 bp, Artificial Sequence
  primer
gttgaatttcaggaggccttg

SEQ ID NO: 4347 - DNA, 21 bp, Artificial Sequence
  primer
aattagccaatgtgcaaaccc

SEQ ID NO: 4348 - DNA, 20 bp, Artificial Sequence
  primer
agttgtctgtgcctgaagcc

SEQ ID NO: 4349 - DNA, 40 bp, Artificial Sequence
  primer
gtaaaacgacggccagttgacataacgatatccaagcctc

SEQ ID NO: 4350 - DNA, 21 bp, Artificial Sequence
  primer
tctccactcctgacccttagc

SEQ ID NO: 4351 - DNA, 21 bp, Artificial Sequence
  primer
gtgcaggtagggttgggttag

SEQ ID NO: 4352 - DNA, 21 bp, Artificial Sequence
  primer
ctcccgttcatccacagagac

SEQ ID NO: 4353 - DNA, 21 bp, Artificial Sequence
  primer
ttatcggcgctaagaaaccac

SEQ ID NO: 4354 - DNA, 38 bp, Artificial Sequence
  primer
gtaaaacgacggccagtcttaggacaggagcaggtccc

SEQ ID NO: 4355 - DNA, 20 bp, Artificial Sequence
  primer
gactcgacaacatggcttcc

SEQ ID NO: 4356 - DNA, 37 bp, Artificial Sequence
  primer
gtaaaacgacggccagtaagcagctgtcctccaacag

SEQ ID NO: 4357 - DNA, 20 bp, Artificial Sequence
  primer
actcggtgaacctggaggag

SEQ ID NO: 4358 - DNA, 38 bp, Artificial Sequence
  primer
gtaaaacgacggccagtgtgtgtgtgggcttctttctg

SEQ ID NO: 4359 - DNA, 39 bp, Artificial Sequence
  primer
gtaaaacgacggccagtgagacctttggctaccatttcc

SEQ ID NO: 4360 - DNA, 21 bp, Artificial Sequence
  primer
aaagctcctatagccttccgc

SEQ ID NO: 4361 - DNA, 21 bp, Artificial Sequence
  primer
gactgttactactgcgtggcg

SEQ ID NO: 4362 - DNA, 37 bp, Artificial Sequence
  primer
gtaaaacgacggccagtcagagagcaagacggagctg

SEQ ID NO: 4363 - DNA, 20 bp, Artificial Sequence
  primer
gttggctttcagctcatccc

SEQ ID NO: 4364 - DNA, 21 bp, Artificial Sequence
  primer
ttcctcgcaggtcagaaagtc

SEQ ID NO: 4365 - DNA, 20 bp, Artificial Sequence
  primer
ctgagtggcgtctgttccac

SEQ ID NO: 4366 - DNA, 21 bp, Artificial Sequence
  primer
tgtttctccatctgaactgcg

SEQ ID NO: 4367 - DNA, 37 bp, Artificial Sequence
  primer
gtaaaacgacggccagtcaacacgggagagagcagag

SEQ ID NO: 4368 - DNA, 39 bp, Artificial Sequence
  primer
gtaaaacgacggccagtaaacatggattagtggcgaatg

SEQ ID NO: 4369 - DNA, 21 bp, Artificial Sequence
  primer
gatgcgggatggtaaacaaag

SEQ ID NO: 4370 - DNA, 38 bp, Artificial Sequence
  primer
gtaaaacgacggccagtgaaggcctggactcaacaaag

SEQ ID NO: 4371 - DNA, 37 bp, Artificial Sequence
  primer
gtaaaacgacggccagtcagctgaaggtgtcccagac

SEQ ID NO: 4372 - DNA, 21 bp, Artificial Sequence
  primer
tgtggttcaacttcaagctcc

SEQ ID NO: 4373 - DNA, 22 bp, Artificial Sequence
  primer
gacatctctgggttctgacagc

SEQ ID NO: 4374 - DNA, 20 bp, Artificial Sequence
  primer
cgccaagtgctgttcaactc

SEQ ID NO: 4375 - DNA, 38 bp, Artificial Sequence
  primer
gtaaaacgacggccagtgtgtcgttgcctcctccttac

SEQ ID NO: 4376 - DNA, 38 bp, Artificial Sequence
  primer
gtaaaacgacggccagtggagttattggcgagttctgg

SEQ ID NO: 4377 - DNA, 18 bp, Artificial Sequence
  primer
agggtttggtgccaggag

SEQ ID NO: 4378 - DNA, 38 bp, Artificial Sequence
  primer
gtaaaacgacggccagttaaggaagggaggtggtcttg

SEQ ID NO: 4379 - DNA, 21 bp, Artificial Sequence
  primer
tgtcaccctcctctctgcttc

SEQ ID NO: 4380 - DNA, 20 bp, Artificial Sequence
  primer
gctgtgtgtggtgtctgtgg

SEQ ID NO: 4381 - DNA, 21 bp, Artificial Sequence
  primer
tcaaatgcctctgcttgtttc

SEQ ID NO: 4382 - DNA, 21 bp, Artificial Sequence
  primer
actgagtcctggaccatcctg

SEQ ID NO: 4383 - DNA, 38 bp, Artificial Sequence
  primer
gtaaaacgacggccagttgcttcccagttggtcatagg

SEQ ID NO: 4384 - DNA, 38 bp, Artificial Sequence
  primer
gtaaaacgacggccagtgagaggaaggaggagctaggc

SEQ ID NO: 4385 - DNA, 38 bp, Artificial Sequence
  primer
gtaaaacgacggccagtcctgctgagataaagccacag

SEQ ID NO: 4386 - DNA, 38 bp, Artificial Sequence
  primer
gtaaaacgacggccagtgatccttgggatgtttgaacc

SEQ ID NO: 4387 - DNA, 21 bp, Artificial Sequence
  primer
gagacaagacagcccttggtc

SEQ ID NO: 4388 - DNA, 21 bp, Artificial Sequence
  primer
gagagctcttgttccagccag

SEQ ID NO: 4389 - DNA, 21 bp, Artificial Sequence
  primer
accgccatcttggattagaag

SEQ ID NO: 4390 - DNA, 38 bp, Artificial Sequence
  primer
gtaaaacgacggccagtagcttggagggagaataaggg

SEQ ID NO: 4391 - DNA, 38 bp, Artificial Sequence
  primer
gtaaaacgacggccagtggtgtgcccatcttggtagag

SEQ ID NO: 4392 - DNA, 38 bp, Artificial Sequence
  primer
gtaaaacgacggccagtcagaggcttccttgcctacag

SEQ ID NO: 4393 - DNA, 38 bp, Artificial Sequence
  primer
gtaaaacgacggccagtagcctcacaggtcatggtttc

SEQ ID NO: 4394 - DNA, 38 bp, Artificial Sequence
  primer
gtaaaacgacggccagtaatatccgtttgcctttccag

SEQ ID NO: 4395 - DNA, 38 bp, Artificial Sequence
  primer
gtaaaacgacggccagttcatggcttcaagtgatcctc

SEQ ID NO: 4396 - DNA, 36 bp, Artificial Sequence
  primer
gtaaaacgacggccagtacgcttccctgcatagctc

SEQ ID NO: 4397 - DNA, 20 bp, Artificial Sequence
  primer
ttgtttgaacctgggaggtg

SEQ ID NO: 4398 - DNA, 38 bp, Artificial Sequence
  primer
gtaaaacgacggccagtgcactggaaaccaagtttgtc

SEQ ID NO: 4399 - DNA, 38 bp, Artificial Sequence
  primer
gtaaaacgacggccagtgcattctggttgatgaagagg

SEQ ID NO: 4400 - DNA, 27 bp, Artificial Sequence
  primer
tgatcagtctgtcactatccattctac

SEQ ID NO: 4401 - DNA, 22 bp, Artificial Sequence
  primer
ttgtggatgtttccacatgatt

SEQ ID NO: 4402 - DNA, 38 bp, Artificial Sequence
  primer
gtaaaacgacggccagtcagtgcatgaccagatgtgag

SEQ ID NO: 4403 - DNA, 38 bp, Artificial Sequence
  primer
gtaaaacgacggccagtatgtagcttccatgtggctgg

SEQ ID NO: 4404 - DNA, 37 bp, Artificial Sequence
  primer
gtaaaacgacggccagtgggtctctgctcctggaaag

SEQ ID NO: 4405 - DNA, 21 bp, Artificial Sequence
  primer
cagtcaacacccaggtcacag

SEQ ID NO: 4406 - DNA, 21 bp, Artificial Sequence
  primer
ctttgagatctgggcaggaac

SEQ ID NO: 4407 - DNA, 39 bp, Artificial Sequence
  primer
gtaaaacgacggccagttcgtacatccatgtctctcgtg

SEQ ID NO: 4408 - DNA, 21 bp, Artificial Sequence
  primer
gatattagctccatccagccg

SEQ ID NO: 4409 - DNA, 39 bp, Artificial Sequence
  primer
gtaaaacgacggccagtccactgagaatccaactgaacc

SEQ ID NO: 4410 - DNA, 21 bp, Artificial Sequence
  primer
ctggaatctggattactgccc

SEQ ID NO: 4411 - DNA, 21 bp, Artificial Sequence
  primer
tttggagaacactggagcaag

SEQ ID NO: 4412 - DNA, 37 bp, Artificial Sequence
  primer
gtaaaacgacggccagttgggtgcagtagattcaggg

SEQ ID NO: 4413 - DNA, 38 bp, Artificial Sequence
  primer
gtaaaacgacggccagtgaatgtgtgaagacaggtggg

SEQ ID NO: 4414 - DNA, 20 bp, Artificial Sequence
  primer
agctggactgtgctgctctg

SEQ ID NO: 4415 - DNA, 37 bp, Artificial Sequence
  primer
gtaaaacgacggccagtgggattggttgtggaagttg

SEQ ID NO: 4416 - DNA, 21 bp, Artificial Sequence
  primer
ggtggctctttctcagtttgg

SEQ ID NO: 4417 - DNA, 21 bp, Artificial Sequence
  primer
ttaagcagacggaaggaaagg

SEQ ID NO: 4418 - DNA, 38 bp, Artificial Sequence
  primer
gtaaaacgacggccagtgagtaggcttgctgaccttcc

SEQ ID NO: 4419 - DNA, 21 bp, Artificial Sequence
  primer
cacaccgctagaggacctttc

SEQ ID NO: 4420 - DNA, 20 bp, Artificial Sequence
  primer
cacgctgtccctagcaagac

SEQ ID NO: 4421 - DNA, 20 bp, Artificial Sequence
  primer
aaggctttatttccctgccc

SEQ ID NO: 4422 - DNA, 40 bp, Artificial Sequence
  primer
gtaaaacgacggccagtcctagaaatggttctgttagccc

SEQ ID NO: 4423 - DNA, 38 bp, Artificial Sequence
  primer
gtaaaacgacggccagtggttgtgggtccacctcttac

SEQ ID NO: 4424 - DNA, 20 bp, Artificial Sequence
  primer
aaggctttatttccctgccc

SEQ ID NO: 4425 - DNA, 21 bp, Artificial Sequence
  primer
gcacctgttaactctgagggc

SEQ ID NO: 4426 - DNA, 37 bp, Artificial Sequence
  primer
gtaaaacgacggccagtctgcttcttgcagtgctttg

SEQ ID NO: 4427 - DNA, 20 bp, Artificial Sequence
  primer
gcaggctacttcctggcaac

SEQ ID NO: 4428 - DNA, 24 bp, Artificial Sequence
  primer
tgaccctaaataaccttagagccc

SEQ ID NO: 4429 - DNA, 23 bp, Artificial Sequence
  primer
ccctggtttagcttgtgaaacac

SEQ ID NO: 4430 - DNA, 38 bp, Artificial Sequence
  primer
gtaaaacgacggccagttgagctgaccaaacaatcagg

SEQ ID NO: 4431 - DNA, 38 bp, Artificial Sequence
  primer
gtaaaacgacggccagtttctgggaccaagttgtaagg

SEQ ID NO: 4432 - DNA, 38 bp, Artificial Sequence
  primer
gtaaaacgacggccagtatacttcagctgtctgctggc

SEQ ID NO: 4433 - DNA, 22 bp, Artificial Sequence
  primer
ttatgtggtgtttggaaggatg

SEQ ID NO: 4434 - DNA, 27 bp, Artificial Sequence
  primer
ttgacacaaggagaaagtttaattagc

SEQ ID NO: 4435 - DNA, 38 bp, Artificial Sequence
  primer
gtaaaacgacggccagtggaggtgggaattgaagagac

SEQ ID NO: 4436 - DNA, 23 bp, Artificial Sequence
  primer
ggattgttgtgaaataaggcttc

SEQ ID NO: 4437 - DNA, 40 bp, Artificial Sequence
  primer
gtaaaacgacggccagttttgatgtatgcactaacctccc

SEQ ID NO: 4438 - DNA, 39 bp, Artificial Sequence
  primer
gtaaaacgacggccagttcattggaatcaaagtaatgcc

SEQ ID NO: 4439 - DNA, 38 bp, Artificial Sequence
  primer
gtaaaacgacggccagttgtaatcagcatttgcttggg

SEQ ID NO: 4440 - DNA, 19 bp, Artificial Sequence
  primer
catccgttgcagttgatcc

SEQ ID NO: 4441 - DNA, 20 bp, Artificial Sequence
  primer
gactacaggcgcacaccatc

SEQ ID NO: 4442 - DNA, 39 bp, Artificial Sequence
  primer
gtaaaacgacggccagttttaactcttcagctgtgctgc

SEQ ID NO: 4443 - DNA, 22 bp, Artificial Sequence
  primer
aagacccaggttagagtccagg

SEQ ID NO: 4444 - DNA, 25 bp, Artificial Sequence
  primer
ggcagtaaagagctactactgcttg

SEQ ID NO: 4445 - DNA, 22 bp, Artificial Sequence
  primer
ggtggacacataaccagcctac

SEQ ID NO: 4446 - DNA, 38 bp, Artificial Sequence
  primer
gtaaaacgacggccagttgctttatgcacttgagcagg

SEQ ID NO: 4447 - DNA, 23 bp, Artificial Sequence
  primer
ccagacatgggattagatgttgt

SEQ ID NO: 4448 - DNA, 38 bp, Artificial Sequence
  primer
gtaaaacgacggccagtaggtagaggagggtttcagcc

SEQ ID NO: 4449 - DNA, 38 bp, Artificial Sequence
  primer
gtaaaacgacggccagtcaaactggaaacaaggctgtg

SEQ ID NO: 4450 - DNA, 20 bp, Artificial Sequence
  primer
ctgcgcagacattgagtttg

SEQ ID NO: 4451 - DNA, 40 bp, Artificial Sequence
  primer
gtaaaacgacggccagtttgaacagaagagtttgagcagc

SEQ ID NO: 4452 - DNA, 40 bp, Artificial Sequence
  primer
gtaaaacgacggccagtccctctacacactcacaatccag

SEQ ID NO: 4453 - DNA, 38 bp, Artificial Sequence
  primer
gtaaaacgacggccagtacctcagtcgttgcagtctgg

SEQ ID NO: 4454 - DNA, 39 bp, Artificial Sequence
  primer
gtaaaacgacggccagttgggattagagtggctgagaac

SEQ ID NO: 4455 - DNA, 38 bp, Artificial Sequence
  primer
gtaaaacgacggccagtagatcacgtgtggaattggaa

SEQ ID NO: 4456 - DNA, 21 bp, Artificial Sequence
  primer
taccagacatgggacgcaata

SEQ ID NO: 4457 - DNA, 21 bp, Artificial Sequence
  primer
gaagggaaggtagagaagggc

SEQ ID NO: 4458 - DNA, 37 bp, Artificial Sequence
  primer
gtaaaacgacggccagtggcaggcattgaaagatgac

SEQ ID NO: 4459 - DNA, 22 bp, Artificial Sequence
  primer
tttgcacagactttgagtttgc

SEQ ID NO: 4460 - DNA, 40 bp, Artificial Sequence
  primer
gtaaaacgacggccagtcatggcactttatgaagcttagg

SEQ ID NO: 4461 - DNA, 40 bp, Artificial Sequence; identical to SEQ ID NO: 4452
  primer

SEQ ID NO: 4462 - DNA, 36 bp, Artificial Sequence
  primer
gtaaaacgacggccagtgcagtctggaatggagcac

SEQ ID NO: 4463 - DNA, 38 bp, Artificial Sequence
  primer
gtaaaacgacggccagtcacctcagatgctccttggac

SEQ ID NO: 4464 - DNA, 39 bp, Artificial Sequence
  primer
gtaaaacgacggccagttcacgtgtgtagttggaattgg

SEQ ID NO: 4465 - DNA, 38 bp, Artificial Sequence
  primer
gtaaaacgacggccagtagacatgggactcaatgttgc

SEQ ID NO: 4466 - DNA, 25 bp, Artificial Sequence
  primer
tttgggaatagtagggattatcagc

SEQ ID NO: 4467 - DNA, 37 bp, Artificial Sequence
  primer
gtaaaacgacggccagtggcaggcaatgacaaatgac

SEQ ID NO: 4468 - DNA, 22 bp, Artificial Sequence
  primer
tttgcacagactttgagtttgc

SEQ ID NO: 4469 - DNA, 39 bp, Artificial Sequence
  primer
gtaaaacgacggccagttgataacacacaagacatggca

SEQ ID NO: 4470 - DNA, 42 bp, Artificial Sequence
  primer
gtaaaacgacggccagtctcacaatccagctaagcctattac

SEQ ID NO: 4471 - DNA, 40 bp, Artificial Sequence
  primer
gtaaaacgacggccagttccttaactttgggcataacatc

SEQ ID NO: 4472 - DNA, 21 bp, Artificial Sequence
  primer
tcccttcacttgacttgaccc

SEQ ID NO: 4473 - DNA, 38 bp, Artificial Sequence
  primer
gtaaaacgacggccagtaaatgatgtggtaagaggccg

SEQ ID NO: 4474 - DNA, 24 bp, Artificial Sequence
  primer
tctcatgatctcctctctcctacc

SEQ ID NO: 4475 - DNA, 25 bp, Artificial Sequence
  primer
caataattgccaatcctatctcttt

SEQ ID NO: 4476 - DNA, 21 bp, Artificial Sequence
  primer
tagatttgttgctggactgcc

SEQ ID NO: 4477 - DNA, 21 bp, Artificial Sequence
  primer
ctccagcctgagtgacgaaat

SEQ ID NO: 4478 - DNA, 26 bp, Artificial Sequence
  primer
cctccattggctatatcatagagttt

SEQ ID NO: 4479 - DNA, 38 bp, Artificial Sequence
  primer
gtaaaacgacggccagtcattgtacattgccacactgg

SEQ ID NO: 4480 - DNA, 38 bp, Artificial Sequence
  primer
gtaaaacgacggccagttgaagcaaaccaaatctgacc

SEQ ID NO: 4481 - DNA, 21 bp, Artificial Sequence
  primer
ctcctcaacagcaccactgag

SEQ ID NO: 4482 - DNA, 21 bp, Artificial Sequence
  primer
accctggaacgcacaacttag

SEQ ID NO: 4483 - DNA, 43 bp, Artificial Sequence
  primer
gtaaaacgacggccagtgcatatgtttctttgtgaatctgtga

SEQ ID NO: 4484 - DNA, 24 bp, Artificial Sequence
  primer
gccaattctaattgttaagatgcc

SEQ ID NO: 4485 - DNA, 38 bp, Artificial Sequence
  primer
gtaaaacgacggccagtgttgacaggaatttgcaaggg

SEQ ID NO: 4486 - DNA, 21 bp, Artificial Sequence
  primer
ataaggcattgctgcaaggtg

SEQ ID NO: 4487 - DNA, 38 bp, Artificial Sequence
  primer
gtaaaacgacggccagttggccaatctgtatgaaaccc

SEQ ID NO: 4488 - DNA, 38 bp, Artificial Sequence
  primer
gtaaaacgacggccagttagaagtttcgccagcagttg

SEQ ID NO: 4489 - DNA, 23 bp, Artificial Sequence
  primer
tgttggtcaaattcttcatctcc

SEQ ID NO: 4490 - DNA, 21 bp, Artificial Sequence
  primer
gtcccaaagttggtgtctgaa

SEQ ID NO: 4491 - DNA, 39 bp, Artificial Sequence
  primer
gtaaaacgacggccagtttaggaacttccatcaagcagc

SEQ ID NO: 4492 - DNA, 36 bp, Artificial Sequence
  primer
gtaaaacgacggccagttctgcagtgcggaaagttg

SEQ ID NO: 4493 - DNA, 26 bp, Artificial Sequence
  primer
aagaaatgaatgcagtgtataaatgg

SEQ ID NO: 4494 - DNA, 35 bp, Artificial Sequence
  primer
gtaaaacgacggccagtttcttgggtgccttgctg

SEQ ID NO: 4495 - DNA, 20 bp, Artificial Sequence
  primer
tcttgcctgaattctgaggg

SEQ ID NO: 4496 - DNA, 38 bp, Artificial Sequence
  primer
gtaaaacgacggccagtgccttcccaactgagtaaagg

SEQ ID NO: 4497 - DNA, 44 bp, Artificial Sequence
  primer
gtaaaacgacggccagtgttaagctgaaattaagatgtaggctc

SEQ ID NO: 4498 - DNA, 38 bp, Artificial Sequence
  primer
gtaaaacgacggccagttctcctgatgattgaggcaag

SEQ ID NO: 4499 - DNA, 21 bp, Artificial Sequence
  primer
gacggctgtgagtcatattgc

SEQ ID NO: 4500 - DNA, 21 bp, Artificial Sequence
  primer
atgccttaagcaaaggcacac

SEQ ID NO: 4501 - DNA, 39 bp, Artificial Sequence
  primer
gtaaaacgacggccagtgagggatcttgtctgatggttg

SEQ ID NO: 4502 - DNA, 22 bp, Artificial Sequence
  primer
cctttagaaggcaaaccttacg

SEQ ID NO: 4503 - DNA, 38 bp, Artificial Sequence
  primer
gtaaaacgacggccagtaacctttgcattaggagcgag

SEQ ID NO: 4504 - DNA, 38 bp, Artificial Sequence
  primer
gtaaaacgacggccagtgaggtccttcacatcccttgt

SEQ ID NO: 4505 - DNA, 21 bp, Artificial Sequence
  primer
cactgaccacattgattgctg

SEQ ID NO: 4506 - DNA, 21 bp, Artificial Sequence
  primer
cagggaaagtcatagtgcagg

SEQ ID NO: 4507 - DNA, 38 bp, Artificial Sequence
  primer
gtaaaacgacggccagtgcccagaggatttccaataac

SEQ ID NO: 4508 - DNA, 38 bp, Artificial Sequence
  primer
gtaaaacgacggccagtggcaacaagaaaccatttcag

SEQ ID NO: 4509 - DNA, 22 bp, Artificial Sequence
  primer
aaatgtacaacgtgagtttgcc

SEQ ID NO: 4510 - DNA, 22 bp, Artificial Sequence
  primer
cgcttgaacccaagagacatag

SEQ ID NO: 4511 - DNA, 38 bp, Artificial Sequence
  primer
gtaaaacgacggccagtagggtcagcaaagtttccttc

SEQ ID NO: 4512 - DNA, 38 bp, Artificial Sequence
  primer
gtaaaacgacggccagttttccattgctccttactgcc

SEQ ID NO: 4513 - DNA, 38 bp, Artificial Sequence
  primer
gtaaaacgacggccagtacagctccaagacaggttgtg

SEQ ID NO: 4514 - DNA, 39 bp, Artificial Sequence
  primer
gtaaaacgacggccagtccatatctttccctaaggcagc

SEQ ID NO: 4515 - DNA, 37 bp, Artificial Sequence
  primer
gtaaaacgacggccagttgtctagaggccgtgacagg

SEQ ID NO: 4516 - DNA, 38 bp, Artificial Sequence
  primer
gtaaaacgacggccagtatatttgccaattctcgcctg

SEQ ID NO: 4517 - DNA, 21 bp, Artificial Sequence
  primer
tcttgtgactgaactccaccc

SEQ ID NO: 4518 - DNA, 37 bp, Artificial Sequence
  primer
gtaaaacgacggccagtagattggtttcggcagaagg

SEQ ID NO: 4519 - DNA, 21 bp, Artificial Sequence
  primer
tttgtaggtcccaactgggtg

SEQ ID NO: 4520 - DNA, 21 bp, Artificial Sequence
  primer
aagaaggttgtgagtgggagc

SEQ ID NO: 4521 - DNA, 21 bp, Artificial Sequence
  primer
aattccactgcaacattcctg

SEQ ID NO: 4522 - DNA, 41 bp, Artificial Sequence
  primer
gtaaaacgacggccagtgggacaggatatgagttgattagc

SEQ ID NO: 4523 - DNA, 21 bp, Artificial Sequence
  primer
ttctgggtctctctgctctgg

SEQ ID NO: 4524 - DNA, 38 bp, Artificial Sequence
  primer
gtaaaacgacggccagtgttctccatcactgcttgtcc

SEQ ID NO: 4525 - DNA, 23 bp, Artificial Sequence
  primer
tgattagtgatgttgcctgtagc

SEQ ID NO: 4526 - DNA, 38 bp, Artificial Sequence
  primer
gtaaaacgacggccagtgttaaatctgggagcaggtgg

SEQ ID NO: 4527 - DNA, 38 bp, Artificial Sequence
  primer
gtaaaacgacggccagtcagcttcttcccattcaggac

SEQ ID NO: 4528 - DNA, 41 bp, Artificial Sequence
  primer
gtaaaacgacggccagtgaagcaaatgctttctcctacttg

SEQ ID NO: 4529 - DNA, 38 bp, Artificial Sequence
  primer
gtaaaacgacggccagtctgaaggtccattctcccaag

SEQ ID NO: 4530 - DNA, 40 bp, Artificial Sequence
  primer
gtaaaacgacggccagtccacaagggaaatgtattgattg

SEQ ID NO: 4531 - DNA, 21 bp, Artificial Sequence
  primer
ttaaagccttagccaccatgc

SEQ ID NO: 4532 - DNA, 41 bp, Artificial Sequence
  primer
gtaaaacgacggccagttttggataggcttcagttatttgg

SEQ ID NO: 4533 - DNA, 21 bp, Artificial Sequence
  primer
caacccagtttggctcttagg

SEQ ID NO: 4534 - DNA, 38 bp, Artificial Sequence
  primer
gtaaaacgacggccagttgtcccagagtttgaagaacc

SEQ ID NO: 4535 - DNA, 21 bp, Artificial Sequence
  primer
agctctgtcacatccattccc

SEQ ID NO: 4536 - DNA, 18 bp, Artificial Sequence
  primer
gccttccctccaatcagc

SEQ ID NO: 4537 - DNA, 21 bp, Artificial Sequence
  primer
ccaatgattgtggatgacagc

SEQ ID NO: 4538 - DNA, 19 bp, Artificial Sequence
  primer
acaagagcgaaactccgtg

SEQ ID NO: 4539 - DNA, 24 bp, Artificial Sequence
  primer
cctataacagtgttggagtgcttg

SEQ ID NO: 4540 - DNA, 22 bp, Artificial Sequence
  primer
aatggccaattatggacagtct

SEQ ID NO: 4541 - DNA, 24 bp, Artificial Sequence
  primer
gctacagtttctcacaaagcattc

SEQ ID NO: 4542 - DNA, 40 bp, Artificial Sequence
  primer
gtaaaacgacggccagtaaggcaacttaaatgccaatttc

SEQ ID NO: 4543 - DNA, 38 bp, Artificial Sequence
  primer
gtaaaacgacggccagtatccttccagtcaaatgttgc

SEQ ID NO: 4544 - DNA, 23 bp, Artificial Sequence
  primer
gaagtgtgttgacattaggctgc

SEQ ID NO: 4545 - DNA, 40 bp, Artificial Sequence
  primer
gtaaaacgacggccagtaaggagcttcagatgttactggg

SEQ ID NO: 4546 - DNA, 22 bp, Artificial Sequence
  primer
caaggctgaagaatgagacagg

SEQ ID NO: 4547 - DNA, 21 bp, Artificial Sequence
  primer
gagataagcgtctgagccagg

SEQ ID NO: 4548 - DNA, 37 bp, Artificial Sequence
  primer
gtaaaacgacggccagtaagtgaatgggagcagggac

SEQ ID NO: 4549 - DNA, 38 bp, Artificial Sequence
  primer
gtaaaacgacggccagtctctagaatggctcccgttcc

SEQ ID NO: 4550 - DNA, 38 bp, Artificial Sequence
  primer
gtaaaacgacggccagtgctacgtattcagccctggag

SEQ ID NO: 4551 - DNA, 37 bp, Artificial Sequence
  primer
gtaaaacgacggccagtcaggcctgtgtagaggcaaa

SEQ ID NO: 4552 - DNA, 37 bp, Artificial Sequence
  primer
gtaaaacgacggccagtgagatacagaaccgggagcc

SEQ ID NO: 4553 - DNA, 21 bp, Artificial Sequence
  primer
gagaggagatcgctgggtatg

SEQ ID NO: 4554 - DNA, 38 bp, Artificial Sequence
  primer
gtaaaacgacggccagtagtgggcacacacaagttctc

SEQ ID NO: 4555 - DNA, 21 bp, Artificial Sequence
  primer
gtttcacacgttcagaggcac

SEQ ID NO: 4556 - DNA, 38 bp, Artificial Sequence
  primer
gtaaaacgacggccagtccttgaggacacaaggctctc

SEQ ID NO: 4557 - DNA, 21 bp, Artificial Sequence
  primer
aacctcctggtgatatgcgtc

SEQ ID NO: 4558 - DNA, 38 bp, Artificial Sequence
  primer
gtaaaacgacggccagtcagcatcttcttcctggtgtg

SEQ ID NO: 4559 - DNA, 38 bp, Artificial Sequence
  primer
gtaaaacgacggccagtcccttccctctcatcacagtc

SEQ ID NO: 4560 - DNA, 21 bp, Artificial Sequence
  primer
tcattgactgcttctccatgc

SEQ ID NO: 4561 - DNA, 21 bp, Artificial Sequence
  primer
ccatatgcacatgaaagcagg

SEQ ID NO: 4562 - DNA, 38 bp, Artificial Sequence
  primer
gtaaaacgacggccagtagactgcaacttccatatgcc

SEQ ID NO: 4563 - DNA, 41 bp, Artificial Sequence
  primer
gtaaaacgacggccagtggatctggaatctgttaaactgcc

SEQ ID NO: 4564 - DNA, 22 bp, Artificial Sequence
  primer
ccgcaatgtccatagtgaagac

SEQ ID NO: 4565 - DNA, 38 bp, Artificial Sequence
  primer
gtaaaacgacggccagtaaatatttcatgctccgaacg

SEQ ID NO: 4566 - DNA, 38 bp, Artificial Sequence
  primer
gtaaaacgacggccagttgtggcagcaccttacatagc

SEQ ID NO: 4567 - DNA, 21 bp, Artificial Sequence
  primer
gatgctaattgctcccaaacc

SEQ ID NO: 4568 - DNA, 38 bp, Artificial Sequence
  primer
gtaaaacgacggccagtgccagggttacagtgttggtc

SEQ ID NO: 4569 - DNA, 21 bp, Artificial Sequence
  primer
atgcctcttctctctcatcgg

SEQ ID NO: 4570 - DNA, 38 bp, Artificial Sequence
  primer
gtaaaacgacggccagttctgtcttgtccatattgccg

SEQ ID NO: 4571 - DNA, 38 bp, Artificial Sequence
  primer
gtaaaacgacggccagttttgacattgcagcagggtag

SEQ ID NO: 4572 - DNA, 38 bp, Artificial Sequence
  primer
gtaaaacgacggccagtcagacggttcatccagttgag

SEQ ID NO: 4573 - DNA, 20 bp, Artificial Sequence
  primer
gaagcctgaagagcctgttg

SEQ ID NO: 4574 - DNA, 21 bp, Artificial Sequence
  primer
ttcaacaaacagccctatccc

SEQ ID NO: 4575 - DNA, 24 bp, Artificial Sequence
  primer
aacccagaggaacatgtactgaag

SEQ ID NO: 4576 - DNA, 21 bp, Artificial Sequence
  primer
tgttgttgagtggaaagacgg

SEQ ID NO: 4577 - DNA, 36 bp, Artificial Sequence
  primer
gtaaaacgacggccagtcctgaccacacaggtgctt

SEQ ID NO: 4578 - DNA, 37 bp, Artificial Sequence
  primer
gtaaaacgacggccagtataagccaatgcatggcaag

SEQ ID NO: 4579 - DNA, 20 bp, Artificial Sequence
  primer
acaatctgagtgcggtggag

SEQ ID NO: 4580 - DNA, 37 bp, Artificial Sequence
  primer
gtaaaacgacggccagtacttggctcctgtgaggaag

SEQ ID NO: 4581 - DNA, 38 bp, Artificial Sequence
  primer
gtaaaacgacggccagtcatctgggcatttgtacatgg

SEQ ID NO: 4582 - DNA, 20 bp, Artificial Sequence
  primer
gctaggttggaacaactgcg

SEQ ID NO: 4583 - DNA, 41 bp, Artificial Sequence
  primer
gtaaaacgacggccagtcatcaactgcttcactttcttctg

SEQ ID NO: 4584 - DNA, 21 bp, Artificial Sequence
  primer
gtgaatcccttcatctacgcc

SEQ ID NO: 4585 - DNA, 18 bp, Artificial Sequence
  primer
gaggctcagaagcggcag

SEQ ID NO: 4586 - DNA, 38 bp, Artificial Sequence
  primer
gtaaaacgacggccagttcttggattgtggttgcagag

SEQ ID NO: 4587 - DNA, 38 bp, Artificial Sequence
  primer
gtaaaacgacggccagtagacagtgccaccaacaactg

SEQ ID NO: 4588 - DNA, 21 bp, Artificial Sequence
  primer
aagtcactggccatgattgtg

SEQ ID NO: 4589 - DNA, 38 bp, Artificial Sequence
  primer
gtaaaacgacggccagttccaatcgttgtctgctcatc

SEQ ID NO: 4590 - DNA, 38 bp, Artificial Sequence
  primer
gtaaaacgacggccagtatgtcaccttcctttcatgcc

SEQ ID NO: 4591 - DNA, 35 bp, Artificial Sequence
  primer
gtaaaacgacggccagtcttgtgtcgacatcggcg

SEQ ID NO: 4592 - DNA, 21 bp, Artificial Sequence
  primer
ttcccaattcaggtttcagac

SEQ ID NO: 4593 - DNA, 22 bp, Artificial Sequence
  primer
tgttgcattcacttcatctgtg

SEQ ID NO: 4594 - DNA, 38 bp, Artificial Sequence
  primer
gtaaaacgacggccagtacctccagaccaacagctttc

SEQ ID NO: 4595 - DNA, 37 bp, Artificial Sequence
  primer
gtaaaacgacggccagtgggtctcctcagccagaaac

SEQ ID NO: 4596 - DNA, 38 bp, Artificial Sequence
  primer
gtaaaacgacggccagtaagaaggccattaccaggagg

SEQ ID NO: 4597 - DNA, 21 bp, Artificial Sequence
  primer
gccagggagtcctgtatcaag

SEQ ID NO: 4598 - DNA, 21 bp, Artificial Sequence
  primer
atttctcacccagtcagcctc

SEQ ID NO: 4599 - DNA, 36 bp, Artificial Sequence
  primer
gtaaaacgacggccagtgcagggtagagagcgcttg

SEQ ID NO: 4600 - DNA, 37 bp, Artificial Sequence
  primer
gtaaaacgacggccagtcttgctgtctggtttctggc

SEQ ID NO: 4601 - DNA, 20 bp, Artificial Sequence
  primer
tttcaagtttgttgccctgc

SEQ ID NO: 4602 - DNA, 38 bp, Artificial Sequence
  primer
gtaaaacgacggccagtttgtggctctgagaagctctg

SEQ ID NO: 4603 - DNA, 21 bp, Artificial Sequence
  primer
agcttgcatgattctttggtg

SEQ ID NO: 4604 - DNA, 38 bp, Artificial Sequence
  primer
gtaaaacgacggccagtctgcagtttggtagatgggtg

SEQ ID NO: 4605 - DNA, 38 bp, Artificial Sequence
  primer
gtaaaacgacggccagtgtgagtgcctctgaccctttg

SEQ ID NO: 4606 - DNA, 38 bp, Artificial Sequence
  primer
gtaaaacgacggccagttcagattggaggtgatgttgg

SEQ ID NO: 4607 - DNA, 37 bp, Artificial Sequence
  primer
gtaaaacgacggccagtgggtccaccgtagctcagac

SEQ ID NO: 4608 - DNA, 39 bp, Artificial Sequence
  primer
gtaaaacgacggccagtttgctcctcatcctatttcctt

SEQ ID NO: 4609 - DNA, 21 bp, Artificial Sequence
  primer
aaagaaaggcacattgttggg

SEQ ID NO: 4610 - DNA, 21 bp, Artificial Sequence
  primer
atcccttatccgactcttccc

SEQ ID NO: 4611 - DNA, 38 bp, Artificial Sequence
  primer
gtaaaacgacggccagtcattactctcgaccctcccag

SEQ ID NO: 4612 - DNA, 21 bp, Artificial Sequence
  primer
cctacttccaaaccaaatggg

SEQ ID NO: 4613 - DNA, 38 bp, Artificial Sequence
  primer
gtaaaacgacggccagtgtgccacctgcagagatagac

SEQ ID NO: 4614 - DNA, 38 bp, Artificial Sequence
  primer
gtaaaacgacggccagtgtgtctgccctccctttcttc

SEQ ID NO: 4615 - DNA, 38 bp, Artificial Sequence
  primer
gtaaaacgacggccagtctttctgctgcaggacttgag

SEQ ID NO: 4616 - DNA, 21 bp, Artificial Sequence
  primer
gcacctgaacatgggaaagac

SEQ ID NO: 4617 - DNA, 21 bp, Artificial Sequence
  primer
tttactccaggacaggtgctc

SEQ ID NO: 4618 - DNA, 22 bp, Artificial Sequence
  primer
gaaatggcagttcactaggagg

SEQ ID NO: 4619 - DNA, 35 bp, Artificial Sequence
  primer
gtaaaacgacggccagtgggtttggcccaccttag

SEQ ID NO: 4620 - DNA, 38 bp, Artificial Sequence
  primer
gtaaaacgacggccagtcacagctggctctgatgtctg

SEQ ID NO: 4621 - DNA, 20 bp, Artificial Sequence
  primer
ggcggagtggaaactctagg

SEQ ID NO: 4622 - DNA, 21 bp, Artificial Sequence
  primer
gactgcagtgagccatgattg

SEQ ID NO: 4623 - DNA, 38 bp, Artificial Sequence
  primer
gtaaaacgacggccagtagcctcgatttcttctctccc

SEQ ID NO: 4624 - DNA, 38 bp, Artificial Sequence
  primer
gtaaaacgacggccagtagtgtccaggatgtgcagaag

SEQ ID NO: 4625 - DNA, 38 bp, Artificial Sequence
  primer
gtaaaacgacggccagtagagaacgaaacgacctgctc

SEQ ID NO: 4626 - DNA, 37 bp, Artificial Sequence
  primer
gtaaaacgacggccagtttgaagccgagagtgctgac

SEQ ID NO: 4627 - DNA, 38 bp, Artificial Sequence
  primer
gtaaaacgacggccagtgtcactgagagccagtgcaac

SEQ ID NO: 4628 - DNA, 22 bp, Artificial Sequence
  primer
gatttcaagccctctgaaacag

SEQ ID NO: 4629 - DNA, 20 bp, Artificial Sequence
  primer
ccttcatgtggccttctgag

SEQ ID NO: 4630 - DNA, 37 bp, Artificial Sequence
  primer
gtaaaacgacggccagtactacatcgtcaacctggcg

SEQ ID NO: 4631 - DNA, 21 bp, Artificial Sequence
  primer
gtcatgtactgccgcgtctac

SEQ ID NO: 4632 - DNA, 38 bp, Artificial Sequence; identical to SEQ ID NO: 4627
  primer

SEQ ID NO: 4633 - DNA, 21 bp, Artificial Sequence
  primer
cttccaggtctttcttccctg

SEQ ID NO: 4634 - DNA, 22 bp, Artificial Sequence
  primer
ggaaatgagagggatcctcaac

SEQ ID NO: 4635 - DNA, 21 bp, Artificial Sequence
  primer
aaatgcagttgctgacaggac

SEQ ID NO: 4636 - DNA, 38 bp, Artificial Sequence
  primer
gtaaaacgacggccagtgcctgacgtggaccattaaac

SEQ ID NO: 4637 - DNA, 20 bp, Artificial Sequence
  primer
ggagggcggactctaagatg

SEQ ID NO: 4638 - DNA, 39 bp, Artificial Sequence
  primer
gtaaaacgacggccagtgcccaccaactacttcattgtc

SEQ ID NO: 4639 - DNA, 38 bp, Artificial Sequence
  primer
gtaaaacgacggccagtctgctcagtgtctgggtcttg

SEQ ID NO: 4640 - DNA, 38 bp, Artificial Sequence
  primer
gtaaaacgacggccagtcaaaggcgaagttattgaggc

SEQ ID NO: 4641 - DNA, 21 bp, Artificial Sequence
  primer
ttctggctgggctacttcaac

SEQ ID NO: 4642 - DNA, 21 bp, Artificial Sequence
  primer
ttcaccttcaagctcctgacc

SEQ ID NO: 4643 - DNA, 37 bp, Artificial Sequence
  primer
gtaaaacgacggccagtaatgactttccgcgatctcc

SEQ ID NO: 4644 - DNA, 38 bp, Artificial Sequence
  primer
gtaaaacgacggccagtctggcagccttcatccttatg

SEQ ID NO: 4645 - DNA, 21 bp, Artificial Sequence
  primer
ctggcagccttcatccttatg

SEQ ID NO: 4646 - DNA, 21 bp, Artificial Sequence
  primer
ccactcactcaagtacccagc

SEQ ID NO: 4647 - DNA, 20 bp, Artificial Sequence
  primer
cgtgtgctccttctacctgc

SEQ ID NO: 4648 - DNA, 38 bp, Artificial Sequence
  primer
gtaaaacgacggccagtctcagccaaggctactgaagg

SEQ ID NO: 4649 - DNA, 20 bp, Artificial Sequence
  primer
caaggtcatcttctggctcg

SEQ ID NO: 4650 - DNA, 20 bp, Artificial Sequence
  primer
gccaaagtctccagcctgtc

SEQ ID NO: 4651 - DNA, 21 bp, Artificial Sequence
  primer
ttaggagctcggagcaagaag

SEQ ID NO: 4652 - DNA, 18 bp, Artificial Sequence
  primer
ctcaccgtgttcggcaac

SEQ ID NO: 4653 - DNA, 38 bp, Artificial Sequence
  primer
gtaaaacgacggccagtctactggtacttcggcaaggc

SEQ ID NO: 4654 - DNA, 38 bp, Artificial Sequence
  primer
gtaaaacgacggccagttcatgatcctggtctacgtgc

SEQ ID NO: 4655 - DNA, 20 bp, Artificial Sequence
  primer
aggagagctcgtcttccgac

SEQ ID NO: 4656 - DNA, 20 bp, Artificial Sequence
  primer
atcggagtgttcgtggtgtg

SEQ ID NO: 4657 - DNA, 38 bp, Artificial Sequence
  primer
gtaaaacgacggccagtgtggaggaggatgtaggaggg

SEQ ID NO: 4658 - DNA, 18 bp, Artificial Sequence
  primer
ctactccgtgcaggccac

SEQ ID NO: 4659 - DNA, 21 bp, Artificial Sequence
  primer
tgctgggctactggtacttcc

SEQ ID NO: 4660 - DNA, 38 bp, Artificial Sequence
  primer
gtaaaacgacggccagtccagcatcggatctttctttg

SEQ ID NO: 4661 - DNA, 38 bp, Artificial Sequence
  primer
gtaaaacgacggccagtcatctccagaggatgaagctg

SEQ ID NO: 4662 - DNA, 21 bp, Artificial Sequence
  primer
ctcctgctctgcacttacacg

SEQ ID NO: 4663 - DNA, 35 bp, Artificial Sequence
  primer
gtaaaacgacggccagtgtcttcaccgtggtgggc

SEQ ID NO: 4664 - DNA, 21 bp, Artificial Sequence
  primer
catggcctactggtacttcgg

SEQ ID NO: 4665 - DNA, 21 bp, Artificial Sequence
  primer
gtacaacctgaagcgcacacc

SEQ ID NO: 4666 - DNA, 38 bp, Artificial Sequence
  primer
gtaaaacgacggccagtacgacgagacctggtacatcc

SEQ ID NO: 4667 - DNA, 21 bp, Artificial Sequence
  primer
ctccgtcgagttcttcctgtc

SEQ ID NO: 4668 - DNA, 38 bp, Artificial Sequence
  primer
gtaaaacgacggccagttcagaaacatgctgaagtccc

SEQ ID NO: 4669 - DNA, 19 bp, Artificial Sequence
  primer
agcccggtaacctgtcgtc

SEQ ID NO: 4670 - DNA, 36 bp, Artificial Sequence
  primer
gtaaaacgacggccagtaatgtgctggtgatcgtgg

SEQ ID NO: 4671 - DNA, 38 bp, Artificial Sequence
  primer
gtaaaacgacggccagtgagtacggctccttcttctgc

SEQ ID NO: 4672 - DNA, 21 bp, Artificial Sequence
  primer
cgtagtctccttctacgtgcc

SEQ ID NO: 4673 - DNA, 37 bp, Artificial Sequence
  primer
gtaaaacgacggccagtcatcatggccttcgtgtacc

SEQ ID NO: 4674 - DNA, 21 bp, Artificial Sequence
  primer
cgcctcttcgtcttcttcaac

SEQ ID NO: 4675 - DNA, 37 bp, Artificial Sequence
  primer
gtaaaacgacggccagtgtgcacataacgggcagaac

SEQ ID NO: 4676 - DNA, 21 bp, Artificial Sequence
  primer
atgggcatcgtcatgtctctc

SEQ ID NO: 4677 - DNA, 38 bp, Artificial Sequence
  primer
gtaaaacgacggccagtacttccattgatgtgctgtgc

SEQ ID NO: 4678 - DNA, 38 bp, Artificial Sequence
  primer
gtaaaacgacggccagtctggtgatcatggtcttcgtc

SEQ ID NO: 4679 - DNA, 20 bp, Artificial Sequence
  primer
cttatctactgccggagccc

SEQ ID NO: 4680 - DNA, 38 bp, Artificial Sequence
  primer
gtaaaacgacggccagtcagctagagaagatggcccag

SEQ ID NO: 4681 - DNA, 37 bp, Artificial Sequence
  primer
gtaaaacgacggccagtactccagaccatgaccaacg

SEQ ID NO: 4682 - DNA, 20 bp, Artificial Sequence
  primer
gtggacgtgctgtgtgtgac

SEQ ID NO: 4683 - DNA, 21 bp, Artificial Sequence
  primer
cttctcgtgatgctcttcgtc

SEQ ID NO: 4684 - DNA, 18 bp, Artificial Sequence
  primer
ctgcctctccgggaacac

SEQ ID NO: 4685 - DNA, 21 bp, Artificial Sequence
  primer
atcatgggcaccttcactctc

SEQ ID NO: 4686 - DNA, 38 bp, Artificial Sequence
  primer
gtaaaacgacggccagtcgttccagggtctctgatctc

SEQ ID NO: 4687 - DNA, 21 bp, Artificial Sequence
  primer
gacctgtggctgggataagtg

SEQ ID NO: 4688 - DNA, 20 bp, Artificial Sequence
  primer
acctttgccacctccatagc

SEQ ID NO: 4689 - DNA, 38 bp, Artificial Sequence
  primer
gtaaaacgacggccagtcttcagggtacctgctcttcc

SEQ ID NO: 4690 - DNA, 37 bp, Artificial Sequence
  primer
gtaaaacgacggccagtcatcatgaaggagctgctgg

SEQ ID NO: 4691 - DNA, 20 bp, Artificial Sequence
  primer
ctcttccaggtgtgtgcctc

SEQ ID NO: 4692 - DNA, 38 bp, Artificial Sequence
  primer
gtaaaacgacggccagtcctggaagaggacattaacgc

SEQ ID NO: 4693 - DNA, 38 bp, Artificial Sequence
  primer
gtaaaacgacggccagttaaatatgtggcaaggatggc

SEQ ID NO: 4694 - DNA, 38 bp, Artificial Sequence
  primer
gtaaaacgacggccagttctgatttgtgtcacacgctg

SEQ ID NO: 4695 - DNA, 37 bp, Artificial Sequence
  primer
gtaaaacgacggccagtagcgcatcaagatgaagcag

SEQ ID NO: 4696 - DNA, 37 bp, Artificial Sequence
  primer
gtaaaacgacggccagtacctcatgaacggtgagtgc

SEQ ID NO: 4697 - DNA, 38 bp, Artificial Sequence
  primer
gtaaaacgacggccagtctctccagtgaagcagtgacc

SEQ ID NO: 4698 - DNA, 20 bp, Artificial Sequence
  primer
cagccaacatccttctggac

SEQ ID NO: 4699 - DNA, 38 bp, Artificial Sequence
  primer
gtaaaacgacggccagtgggctaagagaagttcctccc

SEQ ID NO: 4700 - DNA, 21 bp, Artificial Sequence
  primer
cctctgagacagacctcctgc

SEQ ID NO: 4701 - DNA, 38 bp, Artificial Sequence
  primer
gtaaaacgacggccagtgagccagaaagtggctcaatc

SEQ ID NO: 4702 - DNA, 21 bp, Artificial Sequence
  primer
cagaaggtaacagtctgcggc

SEQ ID NO: 4703 - DNA, 21 bp, Artificial Sequence
  primer
cagcttgtaggcctcagttcc

SEQ ID NO: 4704 - DNA, 19 bp, Artificial Sequence
  primer
tgggcaacagagtggagac

SEQ ID NO: 4705 - DNA, 38 bp, Artificial Sequence
  primer
gtaaaacgacggccagtatgcatggctacatgtccaag

SEQ ID NO: 4706 - DNA, 35 bp, Artificial Sequence
  primer
gtaaaacgacggccagtcgcggtgggaaacagttc

SEQ ID NO: 4707 - DNA, 38 bp, Artificial Sequence
  primer
gtaaaacgacggccagtttaggctggtctgcatttcac

SEQ ID NO: 4708 - DNA, 22 bp, Artificial Sequence
  primer
ttctgcctggagtatttccttc

SEQ ID NO: 4709 - DNA, 21 bp, Artificial Sequence
  primer
gctgtttcctgtggaatagcc

SEQ ID NO: 4710 - DNA, 21 bp, Artificial Sequence
  primer
taagaactggatgcccagagg

SEQ ID NO: 4711 - DNA, 39 bp, Artificial Sequence
  primer
gtaaaacgacggccagtgagtgcataattgggaacttcg

SEQ ID NO: 4712 - DNA, 38 bp, Artificial Sequence
  primer
gtaaaacgacggccagttgaatacgggtgaatgctctg

SEQ ID NO: 4713 - DNA, 21 bp, Artificial Sequence
  primer
tcgtttatcctggaggtggag

SEQ ID NO: 4714 - DNA, 21 bp, Artificial Sequence
  primer
tggcgcttgggtattactctg

SEQ ID NO: 4715 - DNA, 39 bp, Artificial Sequence
  primer
gtaaaacgacggccagtaccaagcagaagcatagtttcc

SEQ ID NO: 4716 - DNA, 39 bp, Artificial Sequence
  primer
gtaaaacgacggccagttgcactcaaagttctcaaagcc

SEQ ID NO: 4717 - DNA, 38 bp, Artificial Sequence
  primer
gtaaaacgacggccagttctaatgaaggacacccggac

SEQ ID NO: 4718 - DNA, 45 bp, Artificial Sequence
  primer
gtaaaacgacggccagtccagtaatagtctttaagtctggttgag

SEQ ID NO: 4719 - DNA, 38 bp, Artificial Sequence
  primer
gtaaaacgacggccagtatcgtagcattcctcctgttg

SEQ ID NO: 4720 - DNA, 38 bp, Artificial Sequence
  primer
gtaaaacgacggccagttcgcactgtgctgtctttgta

SEQ ID NO: 4721 - DNA, 21 bp, Artificial Sequence
  primer
gcctcgaaatgattactgctg

SEQ ID NO: 4722 - DNA, 22 bp, Artificial Sequence
  primer
aaatcgtgacttctgtaatgcg

SEQ ID NO: 4723 - DNA, 25 bp, Artificial Sequence
  primer
tgtttgtgttcctttatagccattt

SEQ ID NO: 4724 - DNA, 18 bp, Artificial Sequence
  primer
gccttaggcagctctggg

SEQ ID NO: 4725 - DNA, 21 bp, Artificial Sequence
  primer
cttctctgccttgtggagacc

SEQ ID NO: 4726 - DNA, 36 bp, Artificial Sequence
  primer
gtaaaacgacggccagtctggaagccaggtcagagg

SEQ ID NO: 4727 - DNA, 38 bp, Artificial Sequence
  primer
gtaaaacgacggccagttcagcacaggttgtttggaag

SEQ ID NO: 4728 - DNA, 37 bp, Artificial Sequence
  primer
gtaaaacgacggccagtgttgggaattcctgctcctc

SEQ ID NO: 4729 - DNA, 19 bp, Artificial Sequence
  primer
aggtgccacggtgttaagg

SEQ ID NO: 4730 - DNA, 37 bp, Artificial Sequence
  primer
gtaaaacgacggccagtctcaccttccaaggcatctg

SEQ ID NO: 4731 - DNA, 37 bp, Artificial Sequence
  primer
gtaaaacgacggccagtagtgcttcatgtgcctgacc

SEQ ID NO: 4732 - DNA, 36 bp, Artificial Sequence
  primer
gtaaaacgacggccagtttctgcccttgatcccatc

SEQ ID NO: 4733 - DNA, 37 bp, Artificial Sequence
  primer
gtaaaacgacggccagtgagaccgcgtgaaggaagtc

SEQ ID NO: 4734 - DNA, 38 bp, Artificial Sequence
  primer
gtaaaacgacggccagttgggagatagggtagtgctgc

SEQ ID NO: 4735 - DNA, 36 bp, Artificial Sequence
  primer
gtaaaacgacggccagtgtagctgagcaacccagcc

SEQ ID NO: 4736 - DNA, 38 bp, Artificial Sequence
  primer
gtaaaacgacggccagtaagatggaaggatatggctgc

SEQ ID NO: 4737 - DNA, 26 bp, Artificial Sequence
  primer
ccctctcttacttaaattgttctccc

SEQ ID NO: 4738 - DNA, 38 bp, Artificial Sequence
  primer
gtaaaacgacggccagtggtaggatgacaggttgaggc

SEQ ID NO: 4739 - DNA, 37 bp, Artificial Sequence
  primer
gtaaaacgacggccagtgcttaggctggccttaacct

SEQ ID NO: 4740 - DNA, 38 bp, Artificial Sequence
  primer
gtaaaacgacggccagtagctcatctccttcatcagcc

SEQ ID NO: 4741 - DNA, 21 bp, Artificial Sequence
  primer
tcattcagcatgcttgcctac

SEQ ID NO: 4742 - DNA, 20 bp, Artificial Sequence
  primer
agggtcgtgaggttattggg

SEQ ID NO: 4743 - DNA, 38 bp, Artificial Sequence
  primer
gtaaaacgacggccagttttgtttgacatcctgctgtg

SEQ ID NO: 4744 - DNA, 38 bp, Artificial Sequence
  primer
gtaaaacgacggccagttgcatggatgggaagtatctg

SEQ ID NO: 4745 - DNA, 38 bp, Artificial Sequence
  primer
gtaaaacgacggccagtaggcagaaattcctgataggc

SEQ ID NO: 4746 - DNA, 38 bp, Artificial Sequence
  primer
gtaaaacgacggccagtctctggctccttcttcctctg

SEQ ID NO: 4747 - DNA, 39 bp, Artificial Sequence
  primer
gtaaaacgacggccagttttggcaggaggtcattaattc

SEQ ID NO: 4748 - DNA, 38 bp, Artificial Sequence
  primer
gtaaaacgacggccagtctgtgaccatgttccatttgc

SEQ ID NO: 4749 - DNA, 19 bp, Artificial Sequence
  primer
gggtgcctgtagtcccaac

SEQ ID NO: 4750 - DNA, 38 bp, Artificial Sequence
  primer
gtaaaacgacggccagtcagtaatttgaaatgcggtgg

SEQ ID NO: 4751 - DNA, 38 bp, Artificial Sequence
  primer
gtaaaacgacggccagtctgcaatgatctgaccaggag

SEQ ID NO: 4752 - DNA, 21 bp, Artificial Sequence
  primer
accatctgcagaaaccatttg

SEQ ID NO: 4753 - DNA, 18 bp, Artificial Sequence
  primer
caccgtcaccagcccttt

SEQ ID NO: 4754 - DNA, 39 bp, Artificial Sequence
  primer
gtaaaacgacggccagtctcaaatgcagaattgtaacgg

SEQ ID NO: 4755 - DNA, 21 bp, Artificial Sequence
  primer
tccaaataatgcctccctcag

SEQ ID NO: 4756 - DNA, 38 bp, Artificial Sequence
  primer
gtaaaacgacggccagttagcgtcttatgtgtggcacg

SEQ ID NO: 4757 - DNA, 38 bp, Artificial Sequence
  primer
gtaaaacgacggccagtcagatggtatttgcgctgttt

SEQ ID NO: 4758 - DNA, 39 bp, Artificial Sequence
  primer
gtaaaacgacggccagtgaaatcggcacagtctgctaac

SEQ ID NO: 4759 - DNA, 35 bp, Artificial Sequence
  primer
gtaaaacgacggccagtactcaactgggcttcccg

SEQ ID NO: 4760 - DNA, 37 bp, Artificial Sequence
  primer
gtaaaacgacggccagtatgtgggtcagtccatgtcc

SEQ ID NO: 4761 - DNA, 20 bp, Artificial Sequence
  primer
ccacccatttcatgctgttc

SEQ ID NO: 4762 - DNA, 20 bp, Artificial Sequence
  primer
atgccttacctggatgggag

SEQ ID NO: 4763 - DNA, 21 bp, Artificial Sequence
  primer
cagacactcatggtcacaccc

SEQ ID NO: 4764 - DNA, 36 bp, Artificial Sequence
  primer
gtaaaacgacggccagtaatggtgggcactggagtc

SEQ ID NO: 4765 - DNA, 38 bp, Artificial Sequence
  primer
gtaaaacgacggccagtcctactcttccaaagctgccc

SEQ ID NO: 4766 - DNA, 37 bp, Artificial Sequence
  primer
gtaaaacgacggccagtgtcctacctggtgctcgttg

SEQ ID NO: 4767 - DNA, 21 bp, Artificial Sequence
  primer
ttactgagaaggcctcttggg

SEQ ID NO: 4768 - DNA, 21 bp, Artificial Sequence
  primer
gggagctggatgtaaggactg

SEQ ID NO: 4769 - DNA, 37 bp, Artificial Sequence
  primer
gtaaaacgacggccagtgtactggtccacagcccagg

SEQ ID NO: 4770 - DNA, 21 bp, Artificial Sequence
  primer
tgtcaccaaatatccgcttcc

SEQ ID NO: 4771 - DNA, 21 bp, Artificial Sequence
  primer
atttccaaggaagaagggagg

SEQ ID NO: 4772 - DNA, 21 bp, Artificial Sequence
  primer
ccacctttcaacctgctcttc

SEQ ID NO: 4773 - DNA, 40 bp, Artificial Sequence
  primer
gtaaaacgacggccagtcatccctcagtcctgattaaacc

SEQ ID NO: 4774 - DNA, 21 bp, Artificial Sequence
  primer
ggaggatcagctgccagtaag

SEQ ID NO: 4775 - DNA, 39 bp, Artificial Sequence
  primer
gtaaaacgacggccagtggaggtctccttgaggacattg

SEQ ID NO: 4776 - DNA, 37 bp, Artificial Sequence
  primer
gtaaaacgacggccagtagctgaacagtgaccatgcc

SEQ ID NO: 4777 - DNA, 38 bp, Artificial Sequence
  primer
gtaaaacgacggccagtgtcgaaaccagctagcactcc

SEQ ID NO: 4778 - DNA, 38 bp, Artificial Sequence
  primer
gtaaaacgacggccagtgcagggaatatggcattatgg

SEQ ID NO: 4779 - DNA, 21 bp, Artificial Sequence
  primer
atgcctttggtttctgtgagc

SEQ ID NO: 4780 - DNA, 21 bp, Artificial Sequence
  primer
cctaggacagagcacactggg

SEQ ID NO: 4781 - DNA, 20 bp, Artificial Sequence
  primer
ctacctggccctggtctgtc

SEQ ID NO: 4782 - DNA, 21 bp, Artificial Sequence
  primer
tctttgaattgatgggagcaa

SEQ ID NO: 4783 - DNA, 21 bp, Artificial Sequence
  primer
cccaactgagggcaataattt

SEQ ID NO: 4784 - DNA, 21 bp, Artificial Sequence
  primer
gccctgttctatcccaacata

SEQ ID NO: 4785 - DNA, 19 bp, Artificial Sequence
  primer
ccctttcccagagacccag

SEQ ID NO: 4786 - DNA, 36 bp, Artificial Sequence
  primer
gtaaaacgacggccagtgacaagagtccctgtgccc

SEQ ID NO: 4787 - DNA, 37 bp, Artificial Sequence
  primer
gtaaaacgacggccagtctctgtgtgggctctatggg

SEQ ID NO: 4788 - DNA, 38 bp, Artificial Sequence
  primer
gtaaaacgacggccagtgcagaatccaggagaggagac

SEQ ID NO: 4789 - DNA, 38 bp, Artificial Sequence
  primer
gtaaaacgacggccagtgactgtgagtagggtcctgcc

SEQ ID NO: 4790 - DNA, 38 bp, Artificial Sequence
  primer
gtaaaacgacggccagtggagaggattggtaggatggg

SEQ ID NO: 4791 - DNA, 38 bp, Artificial Sequence
  primer
gtaaaacgacggccagtcaagaccctctcccaactcag

SEQ ID NO: 4792 - DNA, 38 bp, Artificial Sequence
  primer
gtaaaacgacggccagtgtgagtgggaccaaggacttc

SEQ ID NO: 4793 - DNA, 21 bp, Artificial Sequence
  primer
cctaccttgcaccttccagag

SEQ ID NO: 4794 - DNA, 20 bp, Artificial Sequence
  primer
ctccttggttctgggtttgg

SEQ ID NO: 4795 - DNA, 37 bp, Artificial Sequence
  primer
gtaaaacgacggccagttgaggacaaccagatccgag

SEQ ID NO: 4796 - DNA, 38 bp, Artificial Sequence
  primer
gtaaaacgacggccagtcataggacccaggctcaacac

SEQ ID NO: 4797 - DNA, 21 bp, Artificial Sequence
  primer
tgtacaccaacggctatgagg

SEQ ID NO: 4798 - DNA, 38 bp, Artificial Sequence
  primer
gtaaaacgacggccagttctacccactcacctggaatg

SEQ ID NO: 4799 - DNA, 38 bp, Artificial Sequence
  primer
gtaaaacgacggccagtgctgtccctcaccttaggaag

SEQ ID NO: 4800 - DNA, 37 bp, Artificial Sequence
  primer
gtaaaacgacggccagtagaccctcgggtatgaggtg

SEQ ID NO: 4801 - DNA, 37 bp, Artificial Sequence
  primer
gtaaaacgacggccagttgaaccctgatggctacgag

SEQ ID NO: 4802 - DNA, 20 bp, Artificial Sequence
  primer
ctgaactccagacgctgagg

SEQ ID NO: 4803 - DNA, 36 bp, Artificial Sequence
  primer
gtaaaacgacggccagtctgccaagcccaggactac

SEQ ID NO: 4804 - DNA, 38 bp, Artificial Sequence
  primer
gtaaaacgacggccagtagtgggagaacaacaaggagg

SEQ ID NO: 4805 - DNA, 38 bp, Artificial Sequence
  primer
gtaaaacgacggccagtaggaactcagcgagcaggtag

SEQ ID NO: 4806 - DNA, 21 bp, Artificial Sequence
  primer
gcctatcccacacatagaccc

SEQ ID NO: 4807 - DNA, 38 bp, Artificial Sequence
  primer
gtaaaacgacggccagttagcagcagcgtagtctccag

SEQ ID NO: 4808 - DNA, 38 bp, Artificial Sequence
  primer
gtaaaacgacggccagtatggagcagaatgtcaagtgg

SEQ ID NO: 4809 - DNA, 39 bp, Artificial Sequence
  primer
gtaaaacgacggccagttggacagtagcattaagggtgg

SEQ ID NO: 4810 - DNA, 21 bp, Artificial Sequence
  primer
tcccttatgcttcctttctgg

SEQ ID NO: 4811 - DNA, 39 bp, Artificial Sequence
  primer
gtaaaacgacggccagttcaccaagggtcagaattaacc

SEQ ID NO: 4812 - DNA, 38 bp, Artificial Sequence
  primer
gtaaaacgacggccagttcctgaccttatgatccaccc

SEQ ID NO: 4813 - DNA, 37 bp, Artificial Sequence
  primer
gtaaaacgacggccagtatgccagaatgtgaaggcac

SEQ ID NO: 4814 - DNA, 40 bp, Artificial Sequence
  primer
gtaaaacgacggccagtttcttagaaatgcactagcaggc

SEQ ID NO: 4815 - DNA, 20 bp, Artificial Sequence
  primer
accttgtgtctgagggagcc

SEQ ID NO: 4816 - DNA, 38 bp, Artificial Sequence
  primer
gtaaaacgacggccagtgaatagtcctaggcaggctgg

SEQ ID NO: 4817 - DNA, 21 bp, Artificial Sequence
  primer
gtgcaacttcgtgtgtgactg

SEQ ID NO: 4818 - DNA, 21 bp, Artificial Sequence
  primer
gtacctcaggctacagctggc

SEQ ID NO: 4819 - DNA, 19 bp, Artificial Sequence
  primer
agggaaagaggcatccacc

SEQ ID NO: 4820 - DNA, 37 bp, Artificial Sequence
  primer
gtaaaacgacggccagtgtgacttccgagtgagctgg

SEQ ID NO: 4821 - DNA, 21 bp, Artificial Sequence
  primer
agttctgggactgtggtctgc

SEQ ID NO: 4822 - DNA, 20 bp, Artificial Sequence
  primer
ccttggatccttggatggtc

SEQ ID NO: 4823 - DNA, 38 bp, Artificial Sequence
  primer
gtaaaacgacggccagttagccaccgactttgagacag

SEQ ID NO: 4824 - DNA, 20 bp, Artificial Sequence
  primer
tccaactgctcggtgagatg

SEQ ID NO: 4825 - DNA, 21 bp, Artificial Sequence
  primer
caggtagggaacagcaagagg

SEQ ID NO: 4826 - DNA, 38 bp, Artificial Sequence
  primer
gtaaaacgacggccagtctcatcctgtctgaccactgc

SEQ ID NO: 4827 - DNA, 38 bp, Artificial Sequence
  primer
gtaaaacgacggccagtccggaacaactgtgtgacttc

SEQ ID NO: 4828 - DNA, 38 bp, Artificial Sequence
  primer
gtaaaacgacggccagtacagagggtctctggactggg

SEQ ID NO: 4829 - DNA, 20 bp, Artificial Sequence
  primer
gagcttccaccttctcaggg

SEQ ID NO: 4830 - DNA, 37 bp, Artificial Sequence
  primer
gtaaaacgacggccagtcacaccacaggccaaggtag

SEQ ID NO: 4831 - DNA, 21 bp, Artificial Sequence
  primer
ggtgagtggacctggaaacag

SEQ ID NO: 4832 - DNA, 37 bp, Artificial Sequence
  primer
gtaaaacgacggccagtcatgcccagtaccaggtgag

SEQ ID NO: 4833 - DNA, 39 bp, Artificial Sequence
  primer
gtaaaacgacggccagtcccaacagaccataccactgag

SEQ ID NO: 4834 - DNA, 36 bp, Artificial Sequence
  primer
gtaaaacgacggccagtgagcctgggagctcagacc

SEQ ID NO: 4835 - DNA, 35 bp, Artificial Sequence
  primer
gtaaaacgacggccagtagcctggagggtgagtgc

SEQ ID NO: 4836 - DNA, 38 bp, Artificial Sequence
  primer
gtaaaacgacggccagttacgtggctctggatgatctg

SEQ ID NO: 4837 - DNA, 37 bp, Artificial Sequence
  primer
gtaaaacgacggccagtcacccacagagtacatgccc

SEQ ID NO: 4838 - DNA, 37 bp, Artificial Sequence
  primer
gtaaaacgacggccagtcacttctgtgagtccggctg

SEQ ID NO: 4839 - DNA, 21 bp, Artificial Sequence
  primer
gtagccagtgccaaggagttc

SEQ ID NO: 4840 - DNA, 38 bp, Artificial Sequence
  primer
gtaaaacgacggccagtaaccaataccctctgcctttg

SEQ ID NO: 4841 - DNA, 21 bp, Artificial Sequence
  primer
ctccatcctggttgacaagag

SEQ ID NO: 4842 - DNA, 24 bp, Artificial Sequence
  primer
ttatacttagcccttgaccctttg

SEQ ID NO: 4843 - DNA, 38 bp, Artificial Sequence
  primer
gtaaaacgacggccagtttgagcgtctaggtaaagccc

SEQ ID NO: 4844 - DNA, 21 bp, Artificial Sequence
  primer
cattggcttcagtttcaggtg

SEQ ID NO: 4845 - DNA, 38 bp, Artificial Sequence
  primer
gtaaaacgacggccagttgtgtctagcaagtccggatg

SEQ ID NO: 4846 - DNA, 21 bp, Artificial Sequence
  primer
gcaaagttgggttgtggatac

SEQ ID NO: 4847 - DNA, 38 bp, Artificial Sequence
  primer
gtaaaacgacggccagtcctgacctcgtgatctgactg

SEQ ID NO: 4848 - DNA, 38 bp, Artificial Sequence
  primer
gtaaaacgacggccagtacccaggcagtccataaattg

SEQ ID NO: 4849 - DNA, 39 bp, Artificial Sequence
  primer
gtaaaacgacggccagtgagagtggtgaaggaatcaagc

SEQ ID NO: 4850 - DNA, 21 bp, Artificial Sequence
  primer
gagtcgtgtgttcacaggtgg

SEQ ID NO: 4851 - DNA, 20 bp, Artificial Sequence
  primer
tagagcgcacttgaaattgg

SEQ ID NO: 4852 - DNA, 21 bp, Artificial Sequence
  primer
ttgcaaggacatatttgggag

SEQ ID NO: 4853 - DNA, 41 bp, Artificial Sequence
  primer
gtaaaacgacggccagttgtgactgagaccttagagtcagc

SEQ ID NO: 4854 - DNA, 20 bp, Artificial Sequence
  primer
cgccattagacaatagcggt

SEQ ID NO: 4855 - DNA, 20 bp, Artificial Sequence
  primer
ctgccaggaattcagcttgt

SEQ ID NO: 4856 - DNA, 35 bp, Artificial Sequence
  primer
gtaaaacgacggccagtgtaaacacgggcccagga

SEQ ID NO: 4857 - DNA, 21 bp, Artificial Sequence
  primer
gcttgaccctctgagaattgg

SEQ ID NO: 4858 - DNA, 21 bp, Artificial Sequence
  primer
tttgtctgtctctgccactcc

SEQ ID NO: 4859 - DNA, 21 bp, Artificial Sequence
  primer
gcctcatcctgcacttacctc

SEQ ID NO: 4860 - DNA, 37 bp, Artificial Sequence
  primer
gtaaaacgacggccagtcatgatggcccacttggtag

SEQ ID NO: 4861 - DNA, 38 bp, Artificial Sequence
  primer
gtaaaacgacggccagtgctcccgagctgaactctatc

SEQ ID NO: 4862 - DNA, 40 bp, Artificial Sequence
  primer
gtaaaacgacggccagtggagtatctaagcaaggaaaggc

SEQ ID NO: 4863 - DNA, 40 bp, Artificial Sequence
  primer
gtaaaacgacggccagtaaagggaatctgtgattgaagtg

SEQ ID NO: 4864 - DNA, 38 bp, Artificial Sequence
  primer
gtaaaacgacggccagtatgaggtaaagcctccctttg

SEQ ID NO: 4865 - DNA, 21 bp, Artificial Sequence
  primer
tcccaagcctacagtaccacc

SEQ ID NO: 4866 - DNA, 38 bp, Artificial Sequence
  primer
gtaaaacgacggccagtcagcatggatcagaacactcc

SEQ ID NO: 4867 - DNA, 43 bp, Artificial Sequence
  primer
gtaaaacgacggccagtccagtgtactgatttagagtagtggg

SEQ ID NO: 4868 - DNA, 38 bp, Artificial Sequence
  primer
gtaaaacgacggccagtgaggagctgtcatgaaaccag

SEQ ID NO: 4869 - DNA, 38 bp, Artificial Sequence
  primer
gtaaaacgacggccagttgactacaatggatgctgctg

SEQ ID NO: 4870 - DNA, 39 bp, Artificial Sequence
  primer
gtaaaacgacggccagtggtgttaccagtttggtggttg

SEQ ID NO: 4871 - DNA, 27 bp, Artificial Sequence
  primer
tttgaaccaaaccagatagaataagac

SEQ ID NO: 4872 - DNA, 43 bp, Artificial Sequence
  primer
gtaaaacgacggccagttgttgcatacattagagaatccagtt

SEQ ID NO: 4873 - DNA, 38 bp, Artificial Sequence
  primer
gtaaaacgacggccagtagttggttgtcgatttggatg

SEQ ID NO: 4874 - DNA, 38 bp, Artificial Sequence
  primer
gtaaaacgacggccagtgccctttgctttggttcatag

SEQ ID NO: 4875 - DNA, 38 bp, Artificial Sequence
  primer
gtaaaacgacggccagtacataaagtgtcacccgcctc

SEQ ID NO: 4876 - DNA, 20 bp, Artificial Sequence
  primer
acacaaagcagccaccaaag

SEQ ID NO: 4877 - DNA, 21 bp, Artificial Sequence
  primer
tcccagaaatcaagggaaatc

SEQ ID NO: 4878 - DNA, 38 bp, Artificial Sequence
  primer
gtaaaacgacggccagttttgtgggtagctagtgctgg

SEQ ID NO: 4879 - DNA, 22 bp, Artificial Sequence
  primer
gagaagatgcctaccttcatgg

SEQ ID NO: 4880 - DNA, 22 bp, Artificial Sequence
  primer
accagtggctgaagaaatgcta

SEQ ID NO: 4881 - DNA, 38 bp, Artificial Sequence
  primer
gtaaaacgacggccagttaggtttgccatgagttggtc

SEQ ID NO: 4882 - DNA, 25 bp, Artificial Sequence
  primer
cagcagaccattatttacaagaagc

SEQ ID NO: 4883 - DNA, 37 bp, Artificial Sequence
  primer
gtaaaacgacggccagtctggtccatcaaggaagagg

SEQ ID NO: 4884 - DNA, 38 bp, Artificial Sequence
  primer
gtaaaacgacggccagtcggttaatgttgtggcctatg

SEQ ID NO: 4885 - DNA, 36 bp, Artificial Sequence
  primer
gtaaaacgacggccagtctcacgatgagctcttgcc

SEQ ID NO: 4886 - DNA, 43 bp, Artificial Sequence
  primer
gtaaaacgacggccagttttaaatgctttcatgtagaaagagc

SEQ ID NO: 4887 - DNA, 25 bp, Artificial Sequence
  primer
tgagagactatggaatgatttgctc

SEQ ID NO: 4888 - DNA, 38 bp, Artificial Sequence
  primer
gtaaaacgacggccagtgtggacctgctttcagcaaac

SEQ ID NO: 4889 - DNA, 38 bp, Artificial Sequence
  primer
gtaaaacgacggccagtcaacacagggttcaggaactg

SEQ ID NO: 4890 - DNA, 21 bp, Artificial Sequence
  primer
tggagatttggtgtgaactgg

SEQ ID NO: 4891 - DNA, 38 bp, Artificial Sequence
  primer
gtaaaacgacggccagtgcagaggtccctttctcattc

SEQ ID NO: 4892 - DNA, 38 bp, Artificial Sequence
  primer
gtaaaacgacggccagttcagactttcagatgccttgc

SEQ ID NO: 4893 - DNA, 37 bp, Artificial Sequence
  primer
gtaaaacgacggccagtatgaatttccctaccacgcc

SEQ ID NO: 4894 - DNA, 38 bp, Artificial Sequence
  primer
gtaaaacgacggccagtttgctatgaatttggcctgtg

SEQ ID NO: 4895 - DNA, 21 bp, Artificial Sequence
  primer
gccaagggaaagaagaaatgg

SEQ ID NO: 4896 - DNA, 39 bp, Artificial Sequence
  primer
gtaaaacgacggccagttgtgaccctagacgtcttcacc

SEQ ID NO: 4897 - DNA, 38 bp, Artificial Sequence
  primer
gtaaaacgacggccagtatcatgtttcatcgcctttcc

SEQ ID NO: 4898 - DNA, 38 bp, Artificial Sequence
  primer
gtaaaacgacggccagtgacctctgacatagccttggg

SEQ ID NO: 4899 - DNA, 22 bp, Artificial Sequence
  primer
ttcctccatctatgccagtttc

SEQ ID NO: 4900 - DNA, 20 bp, Artificial Sequence
  primer
tttgtggagaagggatcgtc

SEQ ID NO: 4901 - DNA, 38 bp, Artificial Sequence
  primer
gtaaaacgacggccagtgaccaggtgccttctctgttg

SEQ ID NO: 4902 - DNA, 21 bp, Artificial Sequence
  primer
cagtccttgctgctactgctg

SEQ ID NO: 4903 - DNA, 38 bp, Artificial Sequence
  primer
gtaaaacgacggccagtggtgtgtggtatctgctggag

SEQ ID NO: 4904 - DNA, 38 bp, Artificial Sequence
  primer
gtaaaacgacggccagtaaattgctaccaaggccaatc

SEQ ID NO: 4905 - DNA, 38 bp, Artificial Sequence
  primer
gtaaaacgacggccagttctacatgcacctgaccacag

SEQ ID NO: 4906 - DNA, 38 bp, Artificial Sequence
  primer
gtaaaacgacggccagtatgactagagaggacacccgc

SEQ ID NO: 4907 - DNA, 38 bp, Artificial Sequence
  primer
gtaaaacgacggccagtgagatcccaaatctcagcagg

SEQ ID NO: 4908 - DNA, 20 bp, Artificial Sequence
  primer
cgggatcttggattctttcc

SEQ ID NO: 4909 - DNA, 21 bp, Artificial Sequence
  primer
catcaccatttgtccacgaac

SEQ ID NO: 4910 - DNA, 38 bp, Artificial Sequence
  primer
gtaaaacgacggccagtgggcacctgttgattatctcc

SEQ ID NO: 4911 - DNA, 21 bp, Artificial Sequence
  primer
agtaagcacaggcacaggttg

SEQ ID NO: 4912 - DNA, 21 bp, Artificial Sequence
  primer
ttagggaaaggagcctgtctg

SEQ ID NO: 4913 - DNA, 37 bp, Artificial Sequence
  primer
gtaaaacgacggccagttgaaggcccacttgtacagc

SEQ ID NO: 4914 - DNA, 38 bp, Artificial Sequence
  primer
gtaaaacgacggccagtgcaatgaatcggttctgaatg

SEQ ID NO: 4915 - DNA, 20 bp, Artificial Sequence
  primer
tgcaaatccggttctcagac

SEQ ID NO: 4916 - DNA, 21 bp, Artificial Sequence
  primer
tctgaaagctgcccgtcttag

SEQ ID NO: 4917 - DNA, 21 bp, Artificial Sequence
  primer
cctagttgcaggtgtgcattg

SEQ ID NO: 4918 - DNA, 38 bp, Artificial Sequence
  primer
gtaaaacgacggccagttttagggtgcatgacagcttg

SEQ ID NO: 4919 - DNA, 38 bp, Artificial Sequence
  primer
gtaaaacgacggccagttgctgcaaggacatttagtgc

SEQ ID NO: 4920 - DNA, 38 bp, Artificial Sequence
  primer
gtaaaacgacggccagtgaaccggcatcctctaacaag

SEQ ID NO: 4921 - DNA, 21 bp, Artificial Sequence
  primer
aagagcacttgcaaggaggag

SEQ ID NO: 4922 - DNA, 18 bp, Artificial Sequence
  primer
tccgtgacctgcgagaag

SEQ ID NO: 4923 - DNA, 21 bp, Artificial Sequence
  primer
ggagtaccctctgtccaaagc

SEQ ID NO: 4924 - DNA, 39 bp, Artificial Sequence
  primer
gtaaaacgacggccagttgacagatttcatccttgcttg

SEQ ID NO: 4925 - DNA, 21 bp, Artificial Sequence
  primer
tctcctaccaacaggtcccag

SEQ ID NO: 4926 - DNA, 38 bp, Artificial Sequence
  primer
gtaaaacgacggccagttgtatgtatgtgatgggctgc

SEQ ID NO: 4927 - DNA, 21 bp, Artificial Sequence
  primer
caggcagtagtttggaaaggc

SEQ ID NO: 4928 - DNA, 21 bp, Artificial Sequence
  primer
ccaagccagtagcagtttgag

SEQ ID NO: 4929 - DNA, 21 bp, Artificial Sequence
  primer
caggcagggagaactaccatc

SEQ ID NO: 4930 - DNA, 40 bp, Artificial Sequence
  primer
gtaaaacgacggccagtccctcacagacattatatgcacg

SEQ ID NO: 4931 - DNA, 37 bp, Artificial Sequence
  primer
gtaaaacgacggccagtgcagtgtctgcctttgcttc

SEQ ID NO: 4932 - DNA, 37 bp, Artificial Sequence
  primer
gtaaaacgacggccagtatgccgtaagccagacaatg

SEQ ID NO: 4933 - DNA, 21 bp, Artificial Sequence
  primer
acatgatggaacggagaatcc

SEQ ID NO: 4934 - DNA, 21 bp, Artificial Sequence
  primer
tttatttccagaaggcactgg

SEQ ID NO: 4935 - DNA, 21 bp, Artificial Sequence
  primer
tacattgtgtacggtcggtgg

SEQ ID NO: 4936 - DNA, 37 bp, Artificial Sequence
  primer
gtaaaacgacggccagttagctgtgggctggtctgag

SEQ ID NO: 4937 - DNA, 21 bp, Artificial Sequence
  primer
tagccatccctaatgggattc

SEQ ID NO: 4938 - DNA, 21 bp, Artificial Sequence
  primer
ctcagcctttctcctcccttc

SEQ ID NO: 4939 - DNA, 38 bp, Artificial Sequence
  primer
gtaaaacgacggccagttctgtggtatggttgtgggtg

SEQ ID NO: 4940 - DNA, 20 bp, Artificial Sequence
  primer
gtcctgtcttctgcactggc

SEQ ID NO: 4941 - DNA, 23 bp, Artificial Sequence
  primer
aaccacctgtggaagagagagac

SEQ ID NO: 4942 - DNA, 35 bp, Artificial Sequence
  primer
gtaaaacgacggccagttgatctgcccacctcagc

SEQ ID NO: 4943 - DNA, 21 bp, Artificial Sequence
  primer
ggagcctccctgattggtaag

SEQ ID NO: 4944 - DNA, 21 bp, Artificial Sequence
  primer
ctcactggtggtccaggtttc

SEQ ID NO: 4945 - DNA, 38 bp, Artificial Sequence
  primer
gtaaaacgacggccagttccttgtgtggctgaaacatc

SEQ ID NO: 4946 - DNA, 21 bp, Artificial Sequence
  primer
gcttatttgccaagaattgcc

SEQ ID NO: 4947 - DNA, 21 bp, Artificial Sequence
  primer
cttgcaagttaccctcctttg

SEQ ID NO: 4948 - DNA, 22 bp, Artificial Sequence
  primer
cctagcccaagtcaccctttac

SEQ ID NO: 4949 - DNA, 38 bp, Artificial Sequence
  primer
gtaaaacgacggccagtcggccgatttatttcatttct

SEQ ID NO: 4950 - DNA, 39 bp, Artificial Sequence
  primer
gtaaaacgacggccagtgctcatatgttcctgatggtgc

SEQ ID NO: 4951 - DNA, 38 bp, Artificial Sequence
  primer
gtaaaacgacggccagttggtgagatgatgtttgctgg

SEQ ID NO: 4952 - DNA, 21 bp, Artificial Sequence
  primer
agggccagaattataccaggc

SEQ ID NO: 4953 - DNA, 21 bp, Artificial Sequence
  primer
acctcaagtgattggaccacc

SEQ ID NO: 4954 - DNA, 38 bp, Artificial Sequence
  primer
gtaaaacgacggccagtctaaggctgatgaactgtgcg

SEQ ID NO: 4955 - DNA, 38 bp, Artificial Sequence
  primer
gtaaaacgacggccagttggctacacagagcacctttg

SEQ ID NO: 4956 - DNA, 21 bp, Artificial Sequence
  primer
tcccttacagatggacattgg

SEQ ID NO: 4957 - DNA, 20 bp, Artificial Sequence
  primer
tttccagcgaaacacaaagg

SEQ ID NO: 4958 - DNA, 44 bp, Artificial Sequence
  primer
gtaaaacgacggccagttcaatggcaaatttaaagtctagtcag

SEQ ID NO: 4959 - DNA, 38 bp, Artificial Sequence
  primer
gtaaaacgacggccagtttcctgaggctagtcaggatg

SEQ ID NO: 4960 - DNA, 38 bp, Artificial Sequence
  primer
gtaaaacgacggccagtagctctgttggtaatggtggg

SEQ ID NO: 4961 - DNA, 21 bp, Artificial Sequence
  primer
ttcccatcttaccctcccttc

SEQ ID NO: 4962 - DNA, 21 bp, Artificial Sequence
  primer
gtcctacctttgtgatgtgcc

SEQ ID NO: 4963 - DNA, 38 bp, Artificial Sequence
  primer
gtaaaacgacggccagtcaacagcaatggtggcaatac

SEQ ID NO: 4964 - DNA, 38 bp, Artificial Sequence
  primer
gtaaaacgacggccagttgaagtgattccagatgctgc

SEQ ID NO: 4965 - DNA, 42 bp, Artificial Sequence
  primer
gtaaaacgacggccagtaattactctgtgaccaagacagagg

SEQ ID NO: 4966 - DNA, 23 bp, Artificial Sequence
  primer
ttgtaatttggaaggctctgaaa

SEQ ID NO: 4967 - DNA, 38 bp, Artificial Sequence
  primer
gtaaaacgacggccagttctgggcttcagcagtaattc

SEQ ID NO: 4968 - DNA, 40 bp, Artificial Sequence
  primer
gtaaaacgacggccagtgggatatgtcatgagtgcatgtg

SEQ ID NO: 4969 - DNA, 37 bp, Artificial Sequence
  primer
gtaaaacgacggccagtttacccacacccaagctgag

SEQ ID NO: 4970 - DNA, 37 bp, Artificial Sequence
  primer
gtaaaacgacggccagtccctgtacaacgtgggaatg

SEQ ID NO: 4971 - DNA, 35 bp, Artificial Sequence
  primer
gtaaaacgacggccagtgatggacgtggctgatcg

SEQ ID NO: 4972 - DNA, 38 bp, Artificial Sequence
  primer
gtaaaacgacggccagtggcttctaaggcagagaggag

SEQ ID NO: 4973 - DNA, 18 bp, Artificial Sequence
  primer
gcgtgcacctgtagtccc

SEQ ID NO: 4974 - DNA, 38 bp, Artificial Sequence
  primer
gtaaaacgacggccagtcatttctgagacagccaccac

SEQ ID NO: 4975 - DNA, 21 bp, Artificial Sequence
  primer
acatctggcaagtggtgtgtc

SEQ ID NO: 4976 - DNA, 21 bp, Artificial Sequence
  primer
gagtggccgtggtaatagtgg

SEQ ID NO: 4977 - DNA, 21 bp, Artificial Sequence
  primer
tatccaagcaacaagtgggtg

SEQ ID NO: 4978 - DNA, 36 bp, Artificial Sequence
  primer
gtaaaacgacggccagttctctgcctcctctgtgcc

SEQ ID NO: 4979 - DNA, 21 bp, Artificial Sequence
  primer
tgtgagttacttggccaccac

SEQ ID NO: 4980 - DNA, 38 bp, Artificial Sequence
  primer
gtaaaacgacggccagtctgagtgaaccctgacctgtg

SEQ ID NO: 4981 - DNA, 38 bp, Artificial Sequence
  primer
gtaaaacgacggccagtcaagtgatcttcccacctcag

SEQ ID NO: 4982 - DNA, 41 bp, Artificial Sequence
  primer
gtaaaacgacggccagtgctgttaattattggcaaatgtcc

SEQ ID NO: 4983 - DNA, 44 bp, Artificial Sequence
  primer
gtaaaacgacggccagtgcttgttaacttcattccttagtttcc

SEQ ID NO: 4984 - DNA, 39 bp, Artificial Sequence
  primer
gtaaaacgacggccagtttctcagatgacctggaagcta

SEQ ID NO: 4985 - DNA, 40 bp, Artificial Sequence
  primer
gtaaaacgacggccagtccataaggcagcaaagaaatcta

SEQ ID NO: 4986 - DNA, 38 bp, Artificial Sequence
  primer
gtaaaacgacggccagtatcccagtgtccagttccaag

SEQ ID NO: 4987 - DNA, 38 bp, Artificial Sequence
  primer
gtaaaacgacggccagtaaatttgtctggcacagatgc

SEQ ID NO: 4988 - DNA, 24 bp, Artificial Sequence
  primer
caacaagggaatttcagtcatttc

SEQ ID NO: 4989 - DNA, 36 bp, Artificial Sequence
  primer
gtaaaacgacggccagttgttcccttctccctccct

SEQ ID NO: 4990 - DNA, 38 bp, Artificial Sequence
  primer
gtaaaacgacggccagtaactggagaagtgatggctcc

SEQ ID NO: 4991 - DNA, 25 bp, Artificial Sequence
  primer
ggcaagaatttggtacagaaagaac

SEQ ID NO: 4992 - DNA, 20 bp, Artificial Sequence
  primer
ctgtgagaagaagcaaggcg

SEQ ID NO: 4993 - DNA, 22 bp, Artificial Sequence
  primer
gggcattagaaattattgcagc

SEQ ID NO: 4994 - DNA, 40 bp, Artificial Sequence
  primer
gtaaaacgacggccagttgatggagtaagggtttaggctc

SEQ ID NO: 4995 - DNA, 37 bp, Artificial Sequence
  primer
gtaaaacgacggccagttatcccaggttgttggcatc

SEQ ID NO: 4996 - DNA, 37 bp, Artificial Sequence
  primer
gtaaaacgacggccagtaaacatcatgcaggacatgg

SEQ ID NO: 4997 - DNA, 21 bp, Artificial Sequence
  primer
tgaacaatggagccagacatc

SEQ ID NO: 4998 - DNA, 21 bp, Artificial Sequence
  primer
ctcgtcccaaggaagagtttg

SEQ ID NO: 4999 - DNA, 38 bp, Artificial Sequence
  primer
gtaaaacgacggccagtgcagttagagagctgcaatgg

SEQ ID NO: 5000 - DNA, 38 bp, Artificial Sequence
  primer
gtaaaacgacggccagtgagaagcactaaccattcggg

SEQ ID NO: 5001 - DNA, 21 bp, Artificial Sequence
  primer
tgctcacctatgcatggattc

SEQ ID NO: 5002 - DNA, 20 bp, Artificial Sequence
  primer
tttggtgactttggctctgc

SEQ ID NO: 5003 - DNA, 21 bp, Artificial Sequence
  primer
ggcaagaaggtgagattggac

SEQ ID NO: 5004 - DNA, 21 bp, Artificial Sequence
  primer
acagtagtggacagggtgtgc

SEQ ID NO: 5005 - DNA, 23 bp, Artificial Sequence
  primer
ggaatgtgtgttatgtcacagcc

SEQ ID NO: 5006 - DNA, 41 bp, Artificial Sequence
  primer
gtaaaacgacggccagtcacatctcaagcatatttggaaac

SEQ ID NO: 5007 - DNA, 21 bp, Artificial Sequence
  primer
tgggcaactagtgagaccttg

SEQ ID NO: 5008 - DNA, 21 bp, Artificial Sequence
  primer
tttgttgcctaatggtcttgc

SEQ ID NO: 5009 - DNA, 38 bp, Artificial Sequence
  primer
gtaaaacgacggccagtgcatcttggattgtggctaac

SEQ ID NO: 5010 - DNA, 39 bp, Artificial Sequence
  primer
gtaaaacgacggccagtttgagagtggattgtctcccat

SEQ ID NO: 5011 - DNA, 20 bp, Artificial Sequence
  primer
agagttgagggacgcctgag

SEQ ID NO: 5012 - DNA, 19 bp, Artificial Sequence
  primer
ttggtttgttgcatttggc

SEQ ID NO: 5013 - DNA, 38 bp, Artificial Sequence
  primer
gtaaaacgacggccagtatgaacttcgtggatgtgctg

SEQ ID NO: 5014 - DNA, 38 bp, Artificial Sequence
  primer
gtaaaacgacggccagtcacttaagatgctgctgaccc

SEQ ID NO: 5015 - DNA, 41 bp, Artificial Sequence
  primer
gtaaaacgacggccagtttggtttcttgctagtgtttagcg

SEQ ID NO: 5016 - DNA, 21 bp, Artificial Sequence
  primer
ggatgttgacatgaatttggg

SEQ ID NO: 5017 - DNA, 39 bp, Artificial Sequence
  primer
gtaaaacgacggccagtcagctgttgtacactccacgtc

SEQ ID NO: 5018 - DNA, 40 bp, Artificial Sequence
  primer
gtaaaacgacggccagttctgaaattcatgggtggattag

SEQ ID NO: 5019 - DNA, 44 bp, Artificial Sequence
  primer
gtaaaacgacggccagtcagtagccagtgtctagtcaaataagc

SEQ ID NO: 5020 - DNA, 40 bp, Artificial Sequence
  primer
gtaaaacgacggccagtttgcttgatttgtcttattgtgg

SEQ ID NO: 5021 - DNA, 21 bp, Artificial Sequence
  primer
tgcattgagaccagtagctga

SEQ ID NO: 5022 - DNA, 27 bp, Artificial Sequence
  primer
catttataatgatacccacacattgaa

SEQ ID NO: 5023 - DNA, 22 bp, Artificial Sequence
  primer
gggctcaggagaaagagaattg

SEQ ID NO: 5024 - DNA, 23 bp, Artificial Sequence
  primer
tccaaactctgtgcagaataacc

SEQ ID NO: 5025 - DNA, 21 bp, Artificial Sequence
  primer
actgtacgccctgacctcttc

SEQ ID NO: 5026 - DNA, 38 bp, Artificial Sequence
  primer
gtaaaacgacggccagttatgcgcccactgttctattc

SEQ ID NO: 5027 - DNA, 21 bp, Artificial Sequence
  primer
gctgtgattctgactgcaagg

SEQ ID NO: 5028 - DNA, 20 bp, Artificial Sequence
  primer
ctgcctcagtctcccaaagc

SEQ ID NO: 5029 - DNA, 26 bp, Artificial Sequence
  primer
gactttgcataaccactttatcattt

SEQ ID NO: 5030 - DNA, 21 bp, Artificial Sequence
  primer
ggaacaagggaaagcaatgag

SEQ ID NO: 5031 - DNA, 37 bp, Artificial Sequence
  primer
gtaaaacgacggccagtatgggcctatgcagtgtttg

SEQ ID NO: 5032 - DNA, 21 bp, Artificial Sequence
  primer
tcagccattctgtgtcctttg

SEQ ID NO: 5033 - DNA, 39 bp, Artificial Sequence
  primer
gtaaaacgacggccagtaccagtttgcttactgctaccc

SEQ ID NO: 5034 - DNA, 21 bp, Artificial Sequence
  primer
accacctacgcttccaaagac

SEQ ID NO: 5035 - DNA, 19 bp, Artificial Sequence
  primer
aaacatccagcccattccc

SEQ ID NO: 5036 - DNA, 38 bp, Artificial Sequence
  primer
gtaaaacgacggccagtacacccacagtggccaataac

SEQ ID NO: 5037 - DNA, 39 bp, Artificial Sequence
  primer
gtaaaacgacggccagtctcacagggttgttgatgacac

SEQ ID NO: 5038 - DNA, 21 bp, Artificial Sequence
  primer
agggtcagcttgatgtgtgtg

SEQ ID NO: 5039 - DNA, 38 bp, Artificial Sequence
  primer
gtaaaacgacggccagtagctgagacccagaggtgttg

SEQ ID NO: 5040 - DNA, 38 bp, Artificial Sequence
  primer
gtaaaacgacggccagttatctcacaaaccacgtgcag

SEQ ID NO: 5041 - DNA, 21 bp, Artificial Sequence
  primer
aggaacactgctctggaaagg

SEQ ID NO: 5042 - DNA, 21 bp, Artificial Sequence
  primer
acacagaccatgacaactcgc

SEQ ID NO: 5043 - DNA, 38 bp, Artificial Sequence
  primer
gtaaaacgacggccagttattgccataattctgcgagg

SEQ ID NO: 5044 - DNA, 36 bp, Artificial Sequence
  primer
gtaaaacgacggccagtgggaggaggattcaaaggc

SEQ ID NO: 5045 - DNA, 22 bp, Artificial Sequence
  primer
tttgggaagttaaaggactccc

SEQ ID NO: 5046 - DNA, 38 bp, Artificial Sequence
  primer
gtaaaacgacggccagtttgcaatcttgaaactgtggg

SEQ ID NO: 5047 - DNA, 21 bp, Artificial Sequence
  primer
ctgcctcgaaacatcactgag

SEQ ID NO: 5048 - DNA, 21 bp, Artificial Sequence
  primer
caatatgtcaggcagcaggag

SEQ ID NO: 5049 - DNA, 39 bp, Artificial Sequence
  primer
gtaaaacgacggccagttgaagacatctccaagtccctg

SEQ ID NO: 5050 - DNA, 19 bp, Artificial Sequence
  primer
gaactctgtcctgggtggg

SEQ ID NO: 5051 - DNA, 38 bp, Artificial Sequence
  primer
gtaaaacgacggccagtgccatctgctgaactaggagg

SEQ ID NO: 5052 - DNA, 20 bp, Artificial Sequence
  primer
aaagcatttggacacgttgc

SEQ ID NO: 5053 - DNA, 21 bp, Artificial Sequence
  primer
ctctgcctcagaggaaccatc

SEQ ID NO: 5054 - DNA, 21 bp, Artificial Sequence
  primer
agatgagatcagtgggcttcc

SEQ ID NO: 5055 - DNA, 38 bp, Artificial Sequence
  primer
gtaaaacgacggccagtgatttctgcctctggatttgg

SEQ ID NO: 5056 - DNA, 38 bp, Artificial Sequence
  primer
gtaaaacgacggccagtctctggcctgcctgactttag

SEQ ID NO: 5057 - DNA, 38 bp, Artificial Sequence
  primer
gtaaaacgacggccagtgtggactcccttcaggaactg

SEQ ID NO: 5058 - DNA, 21 bp, Artificial Sequence
  primer
tggacaccagtttggttgaag

SEQ ID NO: 5059 - DNA, 21 bp, Artificial Sequence
  primer
gtggcatagctgaggtcagtg

SEQ ID NO: 5060 - DNA, 38 bp, Artificial Sequence
  primer
gtaaaacgacggccagtccagcaccaccaatgtaagtg

SEQ ID NO: 5061 - DNA, 21 bp, Artificial Sequence
  primer
tctgagtgaaaccacctctgc

SEQ ID NO: 5062 - DNA, 37 bp, Artificial Sequence
  primer
gtaaaacgacggccagtgccataagactggcagcatc

SEQ ID NO: 5063 - DNA, 38 bp, Artificial Sequence
  primer
gtaaaacgacggccagtccgtgagctcaagtttctcag

SEQ ID NO: 5064 - DNA, 38 bp, Artificial Sequence
  primer
gtaaaacgacggccagtagatgatgaagaggctccacg

SEQ ID NO: 5065 - DNA, 21 bp, Artificial Sequence
  primer
caggaaagccgataaagcctc

SEQ ID NO: 5066 - DNA, 38 bp, Artificial Sequence
  primer
gtaaaacgacggccagtccaactttgaggtcttggagg

SEQ ID NO: 5067 - DNA, 38 bp, Artificial Sequence
  primer
gtaaaacgacggccagtagggctcactgtcagatgttg

SEQ ID NO: 5068 - DNA, 21 bp, Artificial Sequence
  primer
gaaggactcttgtcccaaagg

SEQ ID NO: 5069 - DNA, 39 bp, Artificial Sequence
  primer
gtaaaacgacggccagttccctgcagaaagcactttaac

SEQ ID NO: 5070 - DNA, 38 bp, Artificial Sequence
  primer
gtaaaacgacggccagtagggagaccagcaatgatttg

SEQ ID NO: 5071 - DNA, 38 bp, Artificial Sequence
  primer
gtaaaacgacggccagtgacttccactggcctcatttc

SEQ ID NO: 5072 - DNA, 21 bp, Artificial Sequence
  primer
tcctccttcagagattcctgg

SEQ ID NO: 5073 - DNA, 38 bp, Artificial Sequence
  primer
gtaaaacgacggccagtaagggtgagtcctaaggtgcc

SEQ ID NO: 5074 - DNA, 38 bp, Artificial Sequence
  primer
gtaaaacgacggccagtctgacccttagggaaagaggg

SEQ ID NO: 5075 - DNA, 21 bp, Artificial Sequence
  primer
tgaaggatgtgagtgacctgg

SEQ ID NO: 5076 - DNA, 21 bp, Artificial Sequence
  primer
ggaggcatagattgcgatgag

SEQ ID NO: 5077 - DNA, 38 bp, Artificial Sequence
  primer
gtaaaacgacggccagtctttgtcttccagaaccaggc

SEQ ID NO: 5078 - DNA, 38 bp, Artificial Sequence
  primer
gtaaaacgacggccagtggtgagtggagaaagccagac

SEQ ID NO: 5079 - DNA, 38 bp, Artificial Sequence
  primer
gtaaaacgacggccagtaaaggccttgcactgtttagg

SEQ ID NO: 5080 - DNA, 38 bp, Artificial Sequence; identical to SEQ ID NO: 5074
  primer

SEQ ID NO: 5081 - DNA, 38 bp, Artificial Sequence; identical to SEQ ID NO: 5078
  primer

SEQ ID NO: 5082 - DNA, 37 bp, Artificial Sequence
  primer
gtaaaacgacggccagtctccagtggtctctgggtcc

SEQ ID NO: 5083 - DNA, 21 bp, Artificial Sequence
  primer
aagggaaacttgctgctcttg

SEQ ID NO: 5084 - DNA, 22 bp, Artificial Sequence
  primer
cagctagggtcttgaaggagac

SEQ ID NO: 5085 - DNA, 38 bp, Artificial Sequence
  primer
gtaaaacgacggccagttctcaggtcttgagttcagcc

SEQ ID NO: 5086 - DNA, 22 bp, Artificial Sequence
  primer
ccacatttgaatgtatttggca

SEQ ID NO: 5087 - DNA, 21 bp, Artificial Sequence
  primer
cgaattcgttgaaacttgatg

SEQ ID NO: 5088 - DNA, 38 bp, Artificial Sequence
  primer
gtaaaacgacggccagttggatgcctcctagttatccc

SEQ ID NO: 5089 - DNA, 22 bp, Artificial Sequence
  primer
tgtctacccaaaggaagcacag

SEQ ID NO: 5090 - DNA, 44 bp, Artificial Sequence
  primer
gtaaaacgacggccagtttcttctatagcctctgtttctaccag

SEQ ID NO: 5091 - DNA, 21 bp, Artificial Sequence
  primer
ggatagggagactggtgggtt

SEQ ID NO: 5092 - DNA, 21 bp, Artificial Sequence
  primer
gaaaggacatcatcacaaccc

SEQ ID NO: 5093 - DNA, 42 bp, Artificial Sequence
  primer
gtaaaacgacggccagtgccacattgaatcatattcgttaag

SEQ ID NO: 5094 - DNA, 38 bp, Artificial Sequence
  primer
gtaaaacgacggccagttttgttaggtaatgccaagcg

SEQ ID NO: 5095 - DNA, 46 bp, Artificial Sequence
  primer
gtaaaacgacggccagtaaatgaatgtaagttccatgtataaaggt

SEQ ID NO: 5096 - DNA, 39 bp, Artificial Sequence
  primer
gtaaaacgacggccagttcagctctggagagtttaaggc

SEQ ID NO: 5097 - DNA, 38 bp, Artificial Sequence
  primer
gtaaaacgacggccagtaacagcattaggtttgcggag

SEQ ID NO: 5098 - DNA, 21 bp, Artificial Sequence
  primer
gcgtgcccttgttattactga

SEQ ID NO: 5099 - DNA, 38 bp, Artificial Sequence
  primer
gtaaaacgacggccagtgcatgcttgccttgctattta

SEQ ID NO: 5100 - DNA, 42 bp, Artificial Sequence
  primer
gtaaaacgacggccagttttcctgtaacagtatcatcgtaaa

SEQ ID NO: 5101 - DNA, 23 bp, Artificial Sequence
  primer
aaagggaatacctgctttgattg

SEQ ID NO: 5102 - DNA, 39 bp, Artificial Sequence
  primer
gtaaaacgacggccagtggaggaggtaggaggatacctg

SEQ ID NO: 5103 - DNA, 43 bp, Artificial Sequence
  primer
gtaaaacgacggccagtcccgatgaatatatttaaggtttctg

SEQ ID NO: 5104 - DNA, 39 bp, Artificial Sequence
  primer
gtaaaacgacggccagtttcagagaagcatcgactcatt

SEQ ID NO: 5105 - DNA, 25 bp, Artificial Sequence
  primer
tgctgtcatgttaactccctatttc

SEQ ID NO: 5106 - DNA, 22 bp, Artificial Sequence
  primer
ttatggcagaaatgatcaaagc

SEQ ID NO: 5107 - DNA, 40 bp, Artificial Sequence
  primer
gtaaaacgacggccagttttctatgtcaaatcatgcctcc

SEQ ID NO: 5108 - DNA, 24 bp, Artificial Sequence
  primer
ccatttctccagttaagttatggg

SEQ ID NO: 5109 - DNA, 40 bp, Artificial Sequence
  primer
gtaaaacgacggccagtgacacttggtcacaatcataccc

SEQ ID NO: 5110 - DNA, 21 bp, Artificial Sequence
  primer
tacatggccaacaactttggg

SEQ ID NO: 5111 - DNA, 38 bp, Artificial Sequence
  primer
gtaaaacgacggccagtacttcatcaggagcttggagc

SEQ ID NO: 5112 - DNA, 39 bp, Artificial Sequence
  primer
gtaaaacgacggccagttttgaaaccactttagccttcc

SEQ ID NO: 5113 - DNA, 24 bp, Artificial Sequence
  primer
tcaatggaacaccagatatcacag

SEQ ID NO: 5114 - DNA, 44 bp, Artificial Sequence
  primer
gtaaaacgacggccagttctccaggaagtgttattatattcagg

SEQ ID NO: 5115 - DNA, 20 bp, Artificial Sequence
  primer
tggtttgggagtaatgtcgc

SEQ ID NO: 5116 - DNA, 44 bp, Artificial Sequence
  primer
gtaaaacgacggccagtagcagaatagggactagaggatatagg

SEQ ID NO: 5117 - DNA, 22 bp, Artificial Sequence
  primer
tttcacgatcaggaactattgc

SEQ ID NO: 5118 - DNA, 40 bp, Artificial Sequence
  primer
gtaaaacgacggccagttcatttgaaggaaagaaaccaag

SEQ ID NO: 5119 - DNA, 19 bp, Artificial Sequence
  primer
caggtgcctgccttgtacc

SEQ ID NO: 5120 - DNA, 40 bp, Artificial Sequence
  primer
gtaaaacgacggccagtaaagaaatagggcaagagagaaa

SEQ ID NO: 5121 - DNA, 19 bp, Artificial Sequence
  primer
cttcttccctggcctcacc

SEQ ID NO: 5122 - DNA, 24 bp, Artificial Sequence
  primer
ccaaactgagctttagagtggttg

SEQ ID NO: 5123 - DNA, 21 bp, Artificial Sequence
  primer
acaattgtttaccgaatgccc

SEQ ID NO: 5124 - DNA, 38 bp, Artificial Sequence
  primer
gtaaaacgacggccagtcaattcagactggccacattt

SEQ ID NO: 5125 - DNA, 42 bp, Artificial Sequence
  primer
gtaaaacgacggccagtcaagcttatgaatagtttctgtggg

SEQ ID NO: 5126 - DNA, 41 bp, Artificial Sequence
  primer
gtaaaacgacggccagttgtactaatgccgagcttattctg

SEQ ID NO: 5127 - DNA, 23 bp, Artificial Sequence
  primer
ggtttcaattatcaccaaggacc

SEQ ID NO: 5128 - DNA, 39 bp, Artificial Sequence
  primer
gtaaaacgacggccagtttccaaagatggaatgtcaaag

SEQ ID NO: 5129 - DNA, 38 bp, Artificial Sequence; identical to SEQ ID NO: 5097
  primer

SEQ ID NO: 5130 - DNA, 38 bp, Artificial Sequence
  primer
gtaaaacgacggccagtaactcctggactcaagcaacc

SEQ ID NO: 5131 - DNA, 18 bp, Artificial Sequence
  primer
ccgccttgatcctagggc

SEQ ID NO: 5132 - DNA, 38 bp, Artificial Sequence
  primer
gtaaaacgacggccagtcttggaggaagggtgctactg

SEQ ID NO: 5133 - DNA, 18 bp, Artificial Sequence
  primer
gccgagattgtgccattg

SEQ ID NO: 5134 - DNA, 38 bp, Artificial Sequence
  primer
gtaaaacgacggccagttggctgtgaattgtcaccaag

SEQ ID NO: 5135 - DNA, 21 bp, Artificial Sequence
  primer
ggagatggagggtcaagtgtc

SEQ ID NO: 5136 - DNA, 38 bp, Artificial Sequence
  primer
gtaaaacgacggccagtaagccaattccaagtcaaagg

SEQ ID NO: 5137 - DNA, 37 bp, Artificial Sequence
  primer
gtaaaacgacggccagtgatgcttgatggaggcagag

SEQ ID NO: 5138 - DNA, 38 bp, Artificial Sequence
  primer
gtaaaacgacggccagtctcaggcccttgtcctcatag

SEQ ID NO: 5139 - DNA, 38 bp, Artificial Sequence
  primer
gtaaaacgacggccagtgagaggactgcaaaggtggtc

SEQ ID NO: 5140 - DNA, 21 bp, Artificial Sequence
  primer
tccctaccagagggtgatgag

SEQ ID NO: 5141 - DNA, 38 bp, Artificial Sequence
  primer
gtaaaacgacggccagtcagtgtcatgtctgaggtcgc

SEQ ID NO: 5142 - DNA, 37 bp, Artificial Sequence
  primer
gtaaaacgacggccagtaccattccctcatctctggg

SEQ ID NO: 5143 - DNA, 38 bp, Artificial Sequence
  primer
gtaaaacgacggccagtgagtatcactcggaagctggg

SEQ ID NO: 5144 - DNA, 18 bp, Artificial Sequence
  primer
cacctagcccttccctgc

SEQ ID NO: 5145 - DNA, 36 bp, Artificial Sequence
  primer
gtaaaacgacggccagttgtgtctcccggtctcctg

SEQ ID NO: 5146 - DNA, 20 bp, Artificial Sequence
  primer
gtgctcagcagctgtcttcc

SEQ ID NO: 5147 - DNA, 38 bp, Artificial Sequence
  primer
gtaaaacgacggccagtcttatggaactctgggccaac

SEQ ID NO: 5148 - DNA, 20 bp, Artificial Sequence
  primer
aataacccaccacggctagg

SEQ ID NO: 5149 - DNA, 38 bp, Artificial Sequence
  primer
gtaaaacgacggccagttgtataagcgtgaggcatgtg

SEQ ID NO: 5150 - DNA, 38 bp, Artificial Sequence
  primer
gtaaaacgacggccagtactgtaggtgtctcctgtggg

SEQ ID NO: 5151 - DNA, 38 bp, Artificial Sequence
  primer
gtaaaacgacggccagttcctagagcgacaccacacag

SEQ ID NO: 5152 - DNA, 38 bp, Artificial Sequence
  primer
gtaaaacgacggccagtaacctttgctgcctgtcagag

SEQ ID NO: 5153 - DNA, 20 bp, Artificial Sequence
  primer
agccactaaatgccctcacc

SEQ ID NO: 5154 - DNA, 38 bp, Artificial Sequence
  primer
gtaaaacgacggccagtagatgtgacagaaggagtggg

SEQ ID NO: 5155 - DNA, 21 bp, Artificial Sequence
  primer
tcattgccaacaatcttctcc

SEQ ID NO: 5156 - DNA, 22 bp, Artificial Sequence
  primer
cctactcactgacagcagaggc

SEQ ID NO: 5157 - DNA, 38 bp, Artificial Sequence
  primer
gtaaaacgacggccagttttagacgccttcctgagtcc

SEQ ID NO: 5158 - DNA, 38 bp, Artificial Sequence
  primer
gtaaaacgacggccagtgcccgtagaagttgctttctc

SEQ ID NO: 5159 - DNA, 38 bp, Artificial Sequence
  primer
gtaaaacgacggccagtgacctctagctgaaaggtggg

SEQ ID NO: 5160 - DNA, 21 bp, Artificial Sequence
  primer
gtgtgacctcagggctgtatg

SEQ ID NO: 5161 - DNA, 25 bp, Artificial Sequence
  primer
catttgattattgtcttccaatgtg

SEQ ID NO: 5162 - DNA, 21 bp, Artificial Sequence
  primer
tctccagtgtggatgtggaac

SEQ ID NO: 5163 - DNA, 21 bp, Artificial Sequence
  primer
gtatctctgcgattcccttgg

SEQ ID NO: 5164 - DNA, 38 bp, Artificial Sequence
  primer
gtaaaacgacggccagttcaaggatgattgtaaagccg

SEQ ID NO: 5165 - DNA, 18 bp, Artificial Sequence
  primer
gggttcccttgctttgcc

SEQ ID NO: 5166 - DNA, 23 bp, Artificial Sequence
  primer
tcacaacatcattcgtcagtttc

SEQ ID NO: 5167 - DNA, 35 bp, Artificial Sequence
  primer
gtaaaacgacggccagtccgtgttagccaggatgg

SEQ ID NO: 5168 - DNA, 38 bp, Artificial Sequence
  primer
gtaaaacgacggccagttttgcaagagaagttgccttt

SEQ ID NO: 5169 - DNA, 23 bp, Artificial Sequence
  primer
tgacctaccaatgaatgtagcac

SEQ ID NO: 5170 - DNA, 26 bp, Artificial Sequence
  primer
tgaggttgtggaattaatagattctg

SEQ ID NO: 5171 - DNA, 23 bp, Artificial Sequence
  primer
tcttctacttcagcttgaaaccc

SEQ ID NO: 5172 - DNA, 21 bp, Artificial Sequence
  primer
tccagggacctgcataacttt

SEQ ID NO: 5173 - DNA, 38 bp, Artificial Sequence
  primer
gtaaaacgacggccagtttgtggaagaaggatgctgtg

SEQ ID NO: 5174 - DNA, 37 bp, Artificial Sequence
  primer
gtaaaacgacggccagtccctactttcccggtgtctg

SEQ ID NO: 5175 - DNA, 35 bp, Artificial Sequence
  primer
gtaaaacgacggccagttgaggaagtggaggctgc

SEQ ID NO: 5176 - DNA, 38 bp, Artificial Sequence
  primer
gtaaaacgacggccagtaagaggcttccctttcctctc

SEQ ID NO: 5177 - DNA, 38 bp, Artificial Sequence
  primer
gtaaaacgacggccagtactgtcccagactgccatacc

SEQ ID NO: 5178 - DNA, 37 bp, Artificial Sequence
  primer
gtaaaacgacggccagtgtgaccagaggtgggatcag

SEQ ID NO: 5179 - DNA, 21 bp, Artificial Sequence
  primer
catatccatgcagctctgctc

SEQ ID NO: 5180 - DNA, 21 bp, Artificial Sequence
  primer
tcagactcctgaaaccttggg

SEQ ID NO: 5181 - DNA, 38 bp, Artificial Sequence
  primer
gtaaaacgacggccagtcctgatctactccagtcagcg

SEQ ID NO: 5182 - DNA, 20 bp, Artificial Sequence
  primer
ctgaagtcctgctgatggtg

SEQ ID NO: 5183 - DNA, 38 bp, Artificial Sequence
  primer
gtaaaacgacggccagttgctgagaagagggaggagtc

SEQ ID NO: 5184 - DNA, 21 bp, Artificial Sequence
  primer
ctgggcacaagaagaaggaag

SEQ ID NO: 5185 - DNA, 21 bp, Artificial Sequence
  primer
ggacctgaacctggatttgag

SEQ ID NO: 5186 - DNA, 35 bp, Artificial Sequence
  primer
gtaaaacgacggccagtaagctccagacgcatggc

SEQ ID NO: 5187 - DNA, 26 bp, Artificial Sequence
  primer
cttatacaatatttgtgggcataagg

SEQ ID NO: 5188 - DNA, 38 bp, Artificial Sequence
  primer
gtaaaacgacggccagtctgcttgaccatcactggaag

SEQ ID NO: 5189 - DNA, 39 bp, Artificial Sequence
  primer
gtaaaacgacggccagttgcttcagccttactttgaatg

SEQ ID NO: 5190 - DNA, 24 bp, Artificial Sequence
  primer
tgatcgagtatttagagctcatgg

SEQ ID NO: 5191 - DNA, 22 bp, Artificial Sequence
  primer
tttcgtaggttcttatttgcca

SEQ ID NO: 5192 - DNA, 38 bp, Artificial Sequence
  primer
gtaaaacgacggccagtgaaccatagcccattgctttc

SEQ ID NO: 5193 - DNA, 37 bp, Artificial Sequence
  primer
gtaaaacgacggccagtttccagtgtgggtggttgag

SEQ ID NO: 5194 - DNA, 39 bp, Artificial Sequence
  primer
gtaaaacgacggccagttgggaggagttaatgtgttgag

SEQ ID NO: 5195 - DNA, 25 bp, Artificial Sequence
  primer
gcatcacaatttattacttaaccca

SEQ ID NO: 5196 - DNA, 40 bp, Artificial Sequence
  primer
gtaaaacgacggccagttgacttgagtagccattattccc

SEQ ID NO: 5197 - DNA, 21 bp, Artificial Sequence
  primer
tctttgccagacattaggcag

SEQ ID NO: 5198 - DNA, 25 bp, Artificial Sequence
  primer
ttgtttgtgacatttgaaagaagat

SEQ ID NO: 5199 - DNA, 23 bp, Artificial Sequence
  primer
gaaatcagtgtatttgagcccag

SEQ ID NO: 5200 - DNA, 29 bp, Artificial Sequence
  primer
tgagaatatgggtagaagtagttgagttt

SEQ ID NO: 5201 - DNA, 37 bp, Artificial Sequence
  primer
gtaaaacgacggccagtctgcatctcactccagggac

SEQ ID NO: 5202 - DNA, 39 bp, Artificial Sequence
  primer
gtaaaacgacggccagtaatgatgccagattaaccaacg

SEQ ID NO: 5203 - DNA, 21 bp, Artificial Sequence
  primer
ttgggtcgtcttgactttcag

SEQ ID NO: 5204 - DNA, 38 bp, Artificial Sequence
  primer
gtaaaacgacggccagtatgtgccttctttgggagttg

SEQ ID NO: 5205 - DNA, 39 bp, Artificial Sequence
  primer
gtaaaacgacggccagttcatggtcacaagattgattgg

SEQ ID NO: 5206 - DNA, 38 bp, Artificial Sequence
  primer
gtaaaacgacggccagtggtatattccaccgttgtggg

SEQ ID NO: 5207 - DNA, 38 bp, Artificial Sequence
  primer
gtaaaacgacggccagttctcttggtgcttaaacctgg

SEQ ID NO: 5208 - DNA, 40 bp, Artificial Sequence
  primer
gtaaaacgacggccagtcaagagcaccacctagtgacatc

SEQ ID NO: 5209 - DNA, 39 bp, Artificial Sequence
  primer
gtaaaacgacggccagttggcagccattcaataaatatg

SEQ ID NO: 5210 - DNA, 40 bp, Artificial Sequence
  primer
gtaaaacgacggccagtgctctttatcacatccattcagc

SEQ ID NO: 5211 - DNA, 38 bp, Artificial Sequence
  primer
gtaaaacgacggccagtagtgcagacacactccattcc

SEQ ID NO: 5212 - DNA, 20 bp, Artificial Sequence
  primer
agtggagattgcaccactgc

SEQ ID NO: 5213 - DNA, 35 bp, Artificial Sequence
  primer
gtaaaacgacggccagtcgtcccgtcctgtccagt

SEQ ID NO: 5214 - DNA, 38 bp, Artificial Sequence
  primer
gtaaaacgacggccagtttgccctaaacacctaaagcc

SEQ ID NO: 5215 - DNA, 21 bp, Artificial Sequence
  primer
ggtcaggccatgactatttgg

SEQ ID NO: 5216 - DNA, 38 bp, Artificial Sequence
  primer
gtaaaacgacggccagtcaaggtctctcaggcttgtgg

SEQ ID NO: 5217 - DNA, 38 bp, Artificial Sequence
  primer
gtaaaacgacggccagtctatgagatggagcgaggctg

SEQ ID NO: 5218 - DNA, 21 bp, Artificial Sequence
  primer
gtcttcaagaagttcgacggc

SEQ ID NO: 5219 - DNA, 36 bp, Artificial Sequence
  primer
gtaaaacgacggccagtaaacgactgtgtcatgggc

SEQ ID NO: 5220 - DNA, 38 bp, Artificial Sequence
  primer
gtaaaacgacggccagtttctctcttcctccaccatcc

SEQ ID NO: 5221 - DNA, 19 bp, Artificial Sequence
  primer
aggaccctgtggtcagtgg

SEQ ID NO: 5222 - DNA, 19 bp, Artificial Sequence
  primer
accctgtggtgagtgaggc

SEQ ID NO: 5223 - DNA, 38 bp, Artificial Sequence
  primer
gtaaaacgacggccagtcagcagacacagatcgaggag

SEQ ID NO: 5224 - DNA, 38 bp, Artificial Sequence
  primer
gtaaaacgacggccagtgtgtctgtgacttcagctgcc

SEQ ID NO: 5225 - DNA, 38 bp, Artificial Sequence
  primer
gtaaaacgacggccagttgttcttgcgtaagatgtggg

SEQ ID NO: 5226 - DNA, 38 bp, Artificial Sequence
  primer
gtaaaacgacggccagtctgctgccaggacaatatcac

SEQ ID NO: 5227 - DNA, 38 bp, Artificial Sequence
  primer
gtaaaacgacggccagtactgtgcttctcctcacctgc

SEQ ID NO: 5228 - DNA, 38 bp, Artificial Sequence
  primer
gtaaaacgacggccagtctgtgaagctggtgagtgagg

SEQ ID NO: 5229 - DNA, 37 bp, Artificial Sequence
  primer
gtaaaacgacggccagtcgatgctcacctgtccagag

SEQ ID NO: 5230 - DNA, 19 bp, Artificial Sequence
  primer
ctgacgctgccctaaatcc

SEQ ID NO: 5231 - DNA, 37 bp, Artificial Sequence
  primer
gtaaaacgacggccagtggtgagcagggatcaaggac

SEQ ID NO: 5232 - DNA, 38 bp, Artificial Sequence
  primer
gtaaaacgacggccagtctaacatccaccttcccttgc

SEQ ID NO: 5233 - DNA, 21 bp, Artificial Sequence
  primer
agatacccagagcagcaccag

SEQ ID NO: 5234 - DNA, 38 bp, Artificial Sequence
  primer
gtaaaacgacggccagtcaagtccttgcctactccctg

SEQ ID NO: 5235 - DNA, 20 bp, Artificial Sequence
  primer
agcacgtgcgatttatggac

SEQ ID NO: 5236 - DNA, 36 bp, Artificial Sequence
  primer
gtaaaacgacggccagtgggcggtttcagggataaa

SEQ ID NO: 5237 - DNA, 19 bp, Artificial Sequence
  primer
cattggcgctgctagatgg

SEQ ID NO: 5238 - DNA, 38 bp, Artificial Sequence
  primer
gtaaaacgacggccagtgacacagacctctttgtgggc

SEQ ID NO: 5239 - DNA, 36 bp, Artificial Sequence
  primer
gtaaaacgacggccagtaaggttccattgccagtgc

SEQ ID NO: 5240 - DNA, 38 bp, Artificial Sequence
  primer
gtaaaacgacggccagttgagttaggatccacacacgg

SEQ ID NO: 5241 - DNA, 20 bp, Artificial Sequence
  primer
acttcaacggcttctcccac

SEQ ID NO: 5242 - DNA, 35 bp, Artificial Sequence
  primer
gtaaaacgacggccagtcaccagcaggtcgctcag

SEQ ID NO: 5243 - DNA, 36 bp, Artificial Sequence
  primer
gtaaaacgacggccagtctagataggcaatgggcgg

SEQ ID NO: 5244 - DNA, 37 bp, Artificial Sequence
  primer
gtaaaacgacggccagtgtcctcaacctgaaggagcc

SEQ ID NO: 5245 - DNA, 38 bp, Artificial Sequence
  primer
gtaaaacgacggccagtctgcctatgtgtgcctgtgtc

SEQ ID NO: 5246 - DNA, 36 bp, Artificial Sequence
  primer
gtaaaacgacggccagtctcccactgtcggtgtctg

SEQ ID NO: 5247 - DNA, 38 bp, Artificial Sequence
  primer
gtaaaacgacggccagtgcagggcttatggtctagagg

SEQ ID NO: 5248 - DNA, 37 bp, Artificial Sequence
  primer
gtaaaacgacggccagttctcttctcccgctgtagcc

SEQ ID NO: 5249 - DNA, 38 bp, Artificial Sequence
  primer
gtaaaacgacggccagtcagggactcctcctctctgtg

SEQ ID NO: 5250 - DNA, 38 bp, Artificial Sequence
  primer
gtaaaacgacggccagtctctttctcccttcccaaacc

SEQ ID NO: 5251 - DNA, 37 bp, Artificial Sequence
  primer
gtaaaacgacggccagtgggcattgggtattagctcc

SEQ ID NO: 5252 - DNA, 21 bp, Artificial Sequence
  primer
taaccacctttcaccctttgc

SEQ ID NO: 5253 - DNA, 21 bp, Artificial Sequence
  primer
gacaccgaagacaagttgagg

SEQ ID NO: 5254 - DNA, 21 bp, Artificial Sequence
  primer
tggcctctctctatctgggag

SEQ ID NO: 5255 - DNA, 36 bp, Artificial Sequence
  primer
gtaaaacgacggccagttgtctgccagccctcattc

SEQ ID NO: 5256 - DNA, 38 bp, Artificial Sequence
  primer
gtaaaacgacggccagtgttgggtgcaaggagcataag

SEQ ID NO: 5257 - DNA, 21 bp, Artificial Sequence
  primer
cacagacacacccttgcctac

SEQ ID NO: 5258 - DNA, 22 bp, Artificial Sequence
  primer
ttgtttccggtgttatcttgtg

SEQ ID NO: 5259 - DNA, 38 bp, Artificial Sequence
  primer
gtaaaacgacggccagtgcgacgtgtaaatgctttctg

SEQ ID NO: 5260 - DNA, 38 bp, Artificial Sequence
  primer
gtaaaacgacggccagtagggaagaacgtctgtgaacc

SEQ ID NO: 5261 - DNA, 38 bp, Artificial Sequence
  primer
gtaaaacgacggccagtaaaggcagaaggaaacagacg

SEQ ID NO: 5262 - DNA, 21 bp, Artificial Sequence
  primer
gcccagccttatttgtttgat

SEQ ID NO: 5263 - DNA, 21 bp, Artificial Sequence
  primer
attaacccagtgtggtggtgg

SEQ ID NO: 5264 - DNA, 21 bp, Artificial Sequence
  primer
cagaatttccctgcactttcc

SEQ ID NO: 5265 - DNA, 39 bp, Artificial Sequence
  primer
gtaaaacgacggccagtgcatacggagaaataccatgtg

SEQ ID NO: 5266 - DNA, 21 bp, Artificial Sequence
  primer
cgtgaaacattacacaggcag

SEQ ID NO: 5267 - DNA, 21 bp, Artificial Sequence
  primer
tgtctggcagtcaggactctg

SEQ ID NO: 5268 - DNA, 39 bp, Artificial Sequence
  primer
gtaaaacgacggccagtcacattctaccattggctatgc

SEQ ID NO: 5269 - DNA, 38 bp, Artificial Sequence
  primer
gtaaaacgacggccagtccaacaataacacaacaaccc

SEQ ID NO: 5270 - DNA, 21 bp, Artificial Sequence
  primer
aatctccaaagaaccaaagcc

SEQ ID NO: 5271 - DNA, 38 bp, Artificial Sequence
  primer
gtaaaacgacggccagttattgtaaaggccttggaccg

SEQ ID NO: 5272 - DNA, 21 bp, Artificial Sequence
  primer
tgtggctggctgtattctacg

SEQ ID NO: 5273 - DNA, 38 bp, Artificial Sequence
  primer
gtaaaacgacggccagtatgacatgcattcagtgaggc

SEQ ID NO: 5274 - DNA, 38 bp, Artificial Sequence
  primer
gtaaaacgacggccagtatttgagtctgggaatctgcg

SEQ ID NO: 5275 - DNA, 21 bp, Artificial Sequence
  primer
tgctttcctgaatgtttggtg

SEQ ID NO: 5276 - DNA, 21 bp, Artificial Sequence
  primer
tttaggctacatctggccctg

SEQ ID NO: 5277 - DNA, 38 bp, Artificial Sequence
  primer
gtaaaacgacggccagtgtaggatgcaccattgggttc

SEQ ID NO: 5278 - DNA, 24 bp, Artificial Sequence
  primer
tgaaatgcttagtggaatagaagc

SEQ ID NO: 5279 - DNA, 24 bp, Artificial Sequence
  primer
cagacctacatgtttattggcttg

SEQ ID NO: 5280 - DNA, 38 bp, Artificial Sequence
  primer
gtaaaacgacggccagtcatccacatggctttgctcta

SEQ ID NO: 5281 - DNA, 42 bp, Artificial Sequence
  primer
gtaaaacgacggccagtcctagttccatacaaagtaccagcc

SEQ ID NO: 5282 - DNA, 26 bp, Artificial Sequence
  primer
ggaatcaaagttagtccagtatggtg

SEQ ID NO: 5283 - DNA, 21 bp, Artificial Sequence
  primer
gtgtttgcaacaaattcgacc

SEQ ID NO: 5284 - DNA, 21 bp, Artificial Sequence
  primer
cacagctatggaataccgctg

SEQ ID NO: 5285 - DNA, 21 bp, Artificial Sequence
  primer
tttgccagctataatccatcg

SEQ ID NO: 5286 - DNA, 20 bp, Artificial Sequence
  primer
tgcagatattgtggacacgg

SEQ ID NO: 5287 - DNA, 21 bp, Artificial Sequence
  primer
aatatgaagggcaactccacc

SEQ ID NO: 5288 - DNA, 21 bp, Artificial Sequence
  primer
gactggctctttggacctgtg

SEQ ID NO: 5289 - DNA, 38 bp, Artificial Sequence
  primer
gtaaaacgacggccagtcttgcattatggctttcccac

SEQ ID NO: 5290 - DNA, 38 bp, Artificial Sequence
  primer
gtaaaacgacggccagtagaaactccaactttcgccag

SEQ ID NO: 5291 - DNA, 38 bp, Artificial Sequence
  primer
gtaaaacgacggccagtcaacagacattactgaggccc

SEQ ID NO: 5292 - DNA, 38 bp, Artificial Sequence
  primer
gtaaaacgacggccagtactatggcatgttctgggagg

SEQ ID NO: 5293 - DNA, 35 bp, Artificial Sequence
  primer
gtaaaacgacggccagtcttcccatccggtgtgtg

SEQ ID NO: 5294 - DNA, 38 bp, Artificial Sequence
  primer
gtaaaacgacggccagttgtctctgtgcatggtgtcag

SEQ ID NO: 5295 - DNA, 21 bp, Artificial Sequence
  primer
acgagtcaaggaggagacagg

SEQ ID NO: 5296 - DNA, 37 bp, Artificial Sequence
  primer
gtaaaacgacggccagtcatgttggtcttcctcctgg

SEQ ID NO: 5297 - DNA, 21 bp, Artificial Sequence
  primer
gtgggctacctacacgtaccg

SEQ ID NO: 5298 - DNA, 36 bp, Artificial Sequence
  primer
gtaaaacgacggccagtgctttgtggtgcccttcac

SEQ ID NO: 5299 - DNA, 38 bp, Artificial Sequence
  primer
gtaaaacgacggccagtcctgttacttcttcatcgccc

SEQ ID NO: 5300 - DNA, 21 bp, Artificial Sequence
  primer
tgggaaatattccaggctttg

SEQ ID NO: 5301 - DNA, 37 bp, Artificial Sequence
  primer
gtaaaacgacggccagtggtctcacccatgttcccac

SEQ ID NO: 5302 - DNA, 21 bp, Artificial Sequence
  primer
tggctctacacacagagaggc

SEQ ID NO: 5303 - DNA, 21 bp, Artificial Sequence
  primer
catctctgcaccaaagtcctg

SEQ ID NO: 5304 - DNA, 38 bp, Artificial Sequence
  primer
gtaaaacgacggccagtaatgttcagggctgagaaagg

SEQ ID NO: 5305 - DNA, 38 bp, Artificial Sequence
  primer
gtaaaacgacggccagtcgtagcctaccagcccattag

SEQ ID NO: 5306 - DNA, 38 bp, Artificial Sequence
  primer
gtaaaacgacggccagtgtctcactcccgtgaaacagg

SEQ ID NO: 5307 - DNA, 38 bp, Artificial Sequence
  primer
gtaaaacgacggccagtgtcagagagcctgtgctgttg

SEQ ID NO: 5308 - DNA, 21 bp, Artificial Sequence
  primer
cctgcagagtcaggttcttcc

SEQ ID NO: 5309 - DNA, 20 bp, Artificial Sequence
  primer
tcctctggaacctgaagctg

SEQ ID NO: 5310 - DNA, 37 bp, Artificial Sequence
  primer
gtaaaacgacggccagtggtcctcactcaggtgagcc

SEQ ID NO: 5311 - DNA, 38 bp, Artificial Sequence
  primer
gtaaaacgacggccagtgtccagcaggatagtgagcag

SEQ ID NO: 5312 - DNA, 21 bp, Artificial Sequence
  primer
gtttgtgagggactgccgtag

SEQ ID NO: 5313 - DNA, 22 bp, Artificial Sequence
  primer
gcctgggctctgttactcatag

SEQ ID NO: 5314 - DNA, 37 bp, Artificial Sequence
  primer
gtaaaacgacggccagtatttgggtccaatgaccagg

SEQ ID NO: 5315 - DNA, 39 bp, Artificial Sequence
  primer
gtaaaacgacggccagtggttaaatgatggaactgctgg

SEQ ID NO: 5316 - DNA, 22 bp, Artificial Sequence
  primer
ttcatcttcatagccttcctgg

SEQ ID NO: 5317 - DNA, 38 bp, Artificial Sequence
  primer
gtaaaacgacggccagttgtagagggcccacatagctg

SEQ ID NO: 5318 - DNA, 24 bp, Artificial Sequence
  primer
tccctgattaacttaccctgtctg

SEQ ID NO: 5319 - DNA, 25 bp, Artificial Sequence
  primer
ccacagtggaaactgttctacagac

SEQ ID NO: 5320 - DNA, 37 bp, Artificial Sequence
  primer
gtaaaacgacggccagttcctgacctcatgatccacc

SEQ ID NO: 5321 - DNA, 38 bp, Artificial Sequence
  primer
gtaaaacgacggccagtttggatgccatttacaacacg

SEQ ID NO: 5322 - DNA, 39 bp, Artificial Sequence
  primer
gtaaaacgacggccagtcatgtcaaatgacttctccacg

SEQ ID NO: 5323 - DNA, 21 bp, Artificial Sequence
  primer
tctggttcagcaattagcagc

SEQ ID NO: 5324 - DNA, 21 bp, Artificial Sequence
  primer
gatggaggaggaaccaaactg

SEQ ID NO: 5325 - DNA, 20 bp, Artificial Sequence
  primer
ctagctagttgacgccaccg

SEQ ID NO: 5326 - DNA, 26 bp, Artificial Sequence
  primer
gcctctaataaattgtcaaatcatgg

SEQ ID NO: 5327 - DNA, 38 bp, Artificial Sequence
  primer
gtaaaacgacggccagtgtttgcttgcttgcttgcttc

SEQ ID NO: 5328 - DNA, 21 bp, Artificial Sequence
  primer
agagacgggttgcctaatctg

SEQ ID NO: 5329 - DNA, 21 bp, Artificial Sequence
  primer
ctggcaccagtgttgagattc

SEQ ID NO: 5330 - DNA, 22 bp, Artificial Sequence
  primer
tctggaagcaaatccaaacttc

SEQ ID NO: 5331 - DNA, 22 bp, Artificial Sequence
  primer
aatttgccacttgctacaggtc

SEQ ID NO: 5332 - DNA, 38 bp, Artificial Sequence
  primer
gtaaaacgacggccagtaatttgcatctttgtgggtgg

SEQ ID NO: 5333 - DNA, 23 bp, Artificial Sequence
  primer
tgtatgagccaaatttctcatgg

SEQ ID NO: 5334 - DNA, 42 bp, Artificial Sequence
  primer
gtaaaacgacggccagtgaaactaaatagcatgaaagggttg

SEQ ID NO: 5335 - DNA, 38 bp, Artificial Sequence
  primer
gtaaaacgacggccagtcttgcttgacttcctcccatc

SEQ ID NO: 5336 - DNA, 42 bp, Artificial Sequence
  primer
gtaaaacgacggccagtcacataacatttccttccattcttc

SEQ ID NO: 5337 - DNA, 24 bp, Artificial Sequence
  primer
ggacttgttaagtcagtcctgtgg

SEQ ID NO: 5338 - DNA, 39 bp, Artificial Sequence
  primer
gtaaaacgacggccagtggaagatatttaaaggcgtcgg

SEQ ID NO: 5339 - DNA, 21 bp, Artificial Sequence
  primer
atgcggtgacagagtgctaag

SEQ ID NO: 5340 - DNA, 38 bp, Artificial Sequence
  primer
gtaaaacgacggccagttgatcctagagcttgctgtgc

SEQ ID NO: 5341 - DNA, 37 bp, Artificial Sequence
  primer
gtaaaacgacggccagttctgccagagttgttccctg

SEQ ID NO: 5342 - DNA, 38 bp, Artificial Sequence
  primer
gtaaaacgacggccagttgggatcagtcacagagatgg

SEQ ID NO: 5343 - DNA, 38 bp, Artificial Sequence
  primer
gtaaaacgacggccagtagagagaagctctttgagccg

SEQ ID NO: 5344 - DNA, 38 bp, Artificial Sequence
  primer
gtaaaacgacggccagttcatcatcaccgagattgacc

SEQ ID NO: 5345 - DNA, 21 bp, Artificial Sequence
  primer
catctttgtcaccaccacagg

SEQ ID NO: 5346 - DNA, 37 bp, Artificial Sequence
  primer
gtaaaacgacggccagtactgttggaggcagagaggc

SEQ ID NO: 5347 - DNA, 38 bp, Artificial Sequence
  primer
gtaaaacgacggccagtgtaccacacatggcagaaacc

SEQ ID NO: 5348 - DNA, 19 bp, Artificial Sequence
  primer
ggccacagcacctcagaag

SEQ ID NO: 5349 - DNA, 21 bp, Artificial Sequence
  primer
gtgggaaagttgctggcttag

SEQ ID NO: 5350 - DNA, 21 bp, Artificial Sequence
  primer
gctccaattaagggtgttccc

SEQ ID NO: 5351 - DNA, 38 bp, Artificial Sequence
  primer
gtaaaacgacggccagtattactgtgccgttgaagctg

SEQ ID NO: 5352 - DNA, 37 bp, Artificial Sequence
  primer
gtaaaacgacggccagtcttgatgaggcttgctctcc

SEQ ID NO: 5353 - DNA, 39 bp, Artificial Sequence
  primer
gtaaaacgacggccagttggatctcagaaagtgatttgg

SEQ ID NO: 5354 - DNA, 38 bp, Artificial Sequence
  primer
gtaaaacgacggccagtgaaagtgggttcaaagttccc

SEQ ID NO: 5355 - DNA, 38 bp, Artificial Sequence
  primer
gtaaaacgacggccagtttgggcaataaatgagactgg

SEQ ID NO: 5356 - DNA, 21 bp, Artificial Sequence
  primer
tttggatgggtaggttgaatg

SEQ ID NO: 5357 - DNA, 38 bp, Artificial Sequence
  primer
gtaaaacgacggccagttctgtttctgttctgcttggg

SEQ ID NO: 5358 - DNA, 38 bp, Artificial Sequence
  primer
gtaaaacgacggccagttcactcaccattcctgtgagg

SEQ ID NO: 5359 - DNA, 38 bp, Artificial Sequence
  primer
gtaaaacgacggccagtgttctttaatgccagcaagcc

SEQ ID NO: 5360 - DNA, 38 bp, Artificial Sequence
  primer
gtaaaacgacggccagtgtatgcaatatgggccactcc

SEQ ID NO: 5361 - DNA, 21 bp, Artificial Sequence
  primer
gctttggcttgacttgtatgc

SEQ ID NO: 5362 - DNA, 38 bp, Artificial Sequence
  primer
gtaaaacgacggccagtaggatgtgtgctgccctttag

SEQ ID NO: 5363 - DNA, 21 bp, Artificial Sequence
  primer
tgtgctgagagaagcatcctg

SEQ ID NO: 5364 - DNA, 38 bp, Artificial Sequence
  primer
gtaaaacgacggccagtgaataagggagactggtgccc

SEQ ID NO: 5365 - DNA, 39 bp, Artificial Sequence
  primer
gtaaaacgacggccagttcatcaaggatatgggaagctg

SEQ ID NO: 5366 - DNA, 20 bp, Artificial Sequence
  primer
aggtcaggatgcgtgtgaag

SEQ ID NO: 5367 - DNA, 18 bp, Artificial Sequence
  primer
ctccacccacgccttctc

SEQ ID NO: 5368 - DNA, 38 bp, Artificial Sequence
  primer
gtaaaacgacggccagtgtggtgcagctgattgacatc

SEQ ID NO: 5369 - DNA, 19 bp, Artificial Sequence
  primer
catccgtagccctgaggag

SEQ ID NO: 5370 - DNA, 36 bp, Artificial Sequence
  primer
gtaaaacgacggccagtagaacttgctgacgccgac

SEQ ID NO: 5371 - DNA, 21 bp, Artificial Sequence
  primer
aacctcttgctgatcctctgg

SEQ ID NO: 5372 - DNA, 21 bp, Artificial Sequence
  primer
gcactgataggccaaagatcc

SEQ ID NO: 5373 - DNA, 39 bp, Artificial Sequence
  primer
gtaaaacgacggccagtcaaagtgtcttccttgagcagc

SEQ ID NO: 5374 - DNA, 21 bp, Artificial Sequence
  primer
gaacgtggtagtggtcttccc

SEQ ID NO: 5375 - DNA, 35 bp, Artificial Sequence
  primer
gtaaaacgacggccagtgctgctggacacccagtg

SEQ ID NO: 5376 - DNA, 38 bp, Artificial Sequence
  primer
gtaaaacgacggccagtgtgacttctttgagggcatcg

SEQ ID NO: 5377 - DNA, 21 bp, Artificial Sequence
  primer
cggaagaatgggactctgttc

SEQ ID NO: 5378 - DNA, 21 bp, Artificial Sequence
  primer
cctccgatctcttggactttg

SEQ ID NO: 5379 - DNA, 38 bp, Artificial Sequence
  primer
gtaaaacgacggccagtagcagcaagctatgggctaac

SEQ ID NO: 5380 - DNA, 19 bp, Artificial Sequence
  primer
agcttcgcctatggcagtg

SEQ ID NO: 5381 - DNA, 21 bp, Artificial Sequence
  primer
gtggctacatggtacccaagg

SEQ ID NO: 5382 - DNA, 21 bp, Artificial Sequence
  primer
tccaactacacaccgcagaag

SEQ ID NO: 5383 - DNA, 38 bp, Artificial Sequence
  primer
gtaaaacgacggccagtaagaaggtggacctgttcgag

SEQ ID NO: 5384 - DNA, 21 bp, Artificial Sequence
  primer
gtcaacccactgttccaggac

SEQ ID NO: 5385 - DNA, 20 bp, Artificial Sequence
  primer
ggcctgcagaaggcatactc

SEQ ID NO: 5386 - DNA, 21 bp, Artificial Sequence
  primer
cagcctattggtaccctccag

SEQ ID NO: 5387 - DNA, 22 bp, Artificial Sequence
  primer
ttgcataagattgggttaaggg

SEQ ID NO: 5388 - DNA, 24 bp, Artificial Sequence
  primer
gctagagaactcatgccgatattt

SEQ ID NO: 5389 - DNA, 41 bp, Artificial Sequence
  primer
gtaaaacgacggccagttttcccaataattccacatagttg

SEQ ID NO: 5390 - DNA, 43 bp, Artificial Sequence
  primer
gtaaaacgacggccagtctaaataatcctcccaataattccac

SEQ ID NO: 5391 - DNA, 38 bp, Artificial Sequence
  primer
gtaaaacgacggccagtaacacatacaaagccacagcc

SEQ ID NO: 5392 - DNA, 43 bp, Artificial Sequence
  primer
gtaaaacgacggccagtctcctatttactgttcactctgttgc

SEQ ID NO: 5393 - DNA, 41 bp, Artificial Sequence
  primer
gtaaaacgacggccagttgaagttcctttgaacacagtgag

SEQ ID NO: 5394 - DNA, 38 bp, Artificial Sequence
  primer
gtaaaacgacggccagtttctggttgcctcaccttgta

SEQ ID NO: 5395 - DNA, 24 bp, Artificial Sequence
  primer
gaggtgattaacactttgctttgg

SEQ ID NO: 5396 - DNA, 38 bp, Artificial Sequence
  primer
gtaaaacgacggccagtctaagaaatttcagcatgcca

SEQ ID NO: 5397 - DNA, 22 bp, Artificial Sequence
  primer
ttcatgtgacctttgtggtcat

SEQ ID NO: 5398 - DNA, 40 bp, Artificial Sequence
  primer
gtaaaacgacggccagtttcaccattctgcgtacttgttt

SEQ ID NO: 5399 - DNA, 21 bp, Artificial Sequence
  primer
ctgtgctgcaaatgtctttgg

SEQ ID NO: 5400 - DNA, 38 bp, Artificial Sequence
  primer
gtaaaacgacggccagtgttcattggctgtgttggttc

SEQ ID NO: 5401 - DNA, 24 bp, Artificial Sequence
  primer
aatagcccttcaattctttgactg

SEQ ID NO: 5402 - DNA, 24 bp, Artificial Sequence
  primer
ttcagccctaaactgacgttactc

SEQ ID NO: 5403 - DNA, 38 bp, Artificial Sequence
  primer
gtaaaacgacggccagttcccatatggcagattctcaa

SEQ ID NO: 5404 - DNA, 21 bp, Artificial Sequence
  primer
tagaaggaggagggtcagtgg

SEQ ID NO: 5405 - DNA, 42 bp, Artificial Sequence
  primer
gtaaaacgacggccagtcagtttctgattatttgttgaatgc

SEQ ID NO: 5406 - DNA, 38 bp, Artificial Sequence
  primer
gtaaaacgacggccagtccatttgtttgggcaagttag

SEQ ID NO: 5407 - DNA, 22 bp, Artificial Sequence
  primer
tttgacctatcatgtgtcctgg

SEQ ID NO: 5408 - DNA, 39 bp, Artificial Sequence
  primer
gtaaaacgacggccagttcttggaagctgtgtgagtcat

SEQ ID NO: 5409 - DNA, 21 bp, Artificial Sequence
  primer
gcaagaggaagtgaatgttgg

SEQ ID NO: 5410 - DNA, 41 bp, Artificial Sequence
  primer
gtaaaacgacggccagtggtacaccaaggaattgaatatcg

SEQ ID NO: 5411 - DNA, 37 bp, Artificial Sequence
  primer
gtaaaacgacggccagtccattcaggaagttggtggg

SEQ ID NO: 5412 - DNA, 36 bp, Artificial Sequence
  primer
gtaaaacgacggccagtcacggccctagatcaaagc

SEQ ID NO: 5413 - DNA, 39 bp, Artificial Sequence
  primer
gtaaaacgacggccagtttattacctgtgctgttgcctg

SEQ ID NO: 5414 - DNA, 38 bp, Artificial Sequence
  primer
gtaaaacgacggccagtagattgctagctttcccatgc

SEQ ID NO: 5415 - DNA, 21 bp, Artificial Sequence
  primer
gttcaagtcagttcagtgccc

SEQ ID NO: 5416 - DNA, 38 bp, Artificial Sequence
  primer
gtaaaacgacggccagtggtggtagtggtaaacgtggg

SEQ ID NO: 5417 - DNA, 21 bp, Artificial Sequence
  primer
catttgtttggatgccctagc

SEQ ID NO: 5418 - DNA, 37 bp, Artificial Sequence
  primer
gtaaaacgacggccagtcagtggtcccagcctacacc

SEQ ID NO: 5419 - DNA, 29 bp, Artificial Sequence
  primer
tgtgttagagaaatatttgaggagatgtt

SEQ ID NO: 5420 - DNA, 23 bp, Artificial Sequence
  primer
ggatgccagtatttcaaattgtc

SEQ ID NO: 5421 - DNA, 42 bp, Artificial Sequence
  primer
gtaaaacgacggccagtttctgattgagcattaaatttagcc

SEQ ID NO: 5422 - DNA, 20 bp, Artificial Sequence
  primer
atcaccactagcaagcaccc

SEQ ID NO: 5423 - DNA, 42 bp, Artificial Sequence
  primer
gtaaaacgacggccagtttcagaacacagactccagtttaga

SEQ ID NO: 5424 - DNA, 38 bp, Artificial Sequence
  primer
gtaaaacgacggccagtatcaagaaccctagaggcagc

SEQ ID NO: 5425 - DNA, 25 bp, Artificial Sequence
  primer
aagcaaagaagatcagtttacatgg

SEQ ID NO: 5426 - DNA, 25 bp, Artificial Sequence
  primer
ttgtttggtacataatcttcccttt

SEQ ID NO: 5427 - DNA, 20 bp, Artificial Sequence
  primer
tttgcagggtgtcaggtagg

SEQ ID NO: 5428 - DNA, 39 bp, Artificial Sequence
  primer
gtaaaacgacggccagtaggaaggaacagagcatttacg

SEQ ID NO: 5429 - DNA, 38 bp, Artificial Sequence
  primer
gtaaaacgacggccagtccacatccactctaagcaagg

SEQ ID NO: 5430 - DNA, 38 bp, Artificial Sequence
  primer
gtaaaacgacggccagttgaatgaatgcagaaattggc

SEQ ID NO: 5431 - DNA, 38 bp, Artificial Sequence
  primer
gtaaaacgacggccagtatcaacagcaacagtccttgg

SEQ ID NO: 5432 - DNA, 22 bp, Artificial Sequence
  primer
cattccaaatgtacagagctgg

SEQ ID NO: 5433 - DNA, 24 bp, Artificial Sequence
  primer
gcatcactcatctgtaccatgttc

SEQ ID NO: 5434 - DNA, 35 bp, Artificial Sequence
  primer
gtaaaacgacggccagtgtcccacgaggaggagca

SEQ ID NO: 5435 - DNA, 38 bp, Artificial Sequence
  primer
gtaaaacgacggccagttgagctttagtcctcttcccg

SEQ ID NO: 5436 - DNA, 37 bp, Artificial Sequence
  primer
gtaaaacgacggccagtatgtcaggtgagaaccgtgg

SEQ ID NO: 5437 - DNA, 21 bp, Artificial Sequence
  primer
gttgcctgttaacttggagcc

SEQ ID NO: 5438 - DNA, 38 bp, Artificial Sequence
  primer
gtaaaacgacggccagtgtggctgtgacttgctttgac

SEQ ID NO: 5439 - DNA, 20 bp, Artificial Sequence
  primer
agggtttacatgacctggcg

SEQ ID NO: 5440 - DNA, 21 bp, Artificial Sequence
  primer
atccactcctgcgaattcttg

SEQ ID NO: 5441 - DNA, 21 bp, Artificial Sequence
  primer
gttctgtgtcctgtgaccacc

SEQ ID NO: 5442 - DNA, 37 bp, Artificial Sequence
  primer
gtaaaacgacggccagtattagcccttcattggcctg

SEQ ID NO: 5443 - DNA, 21 bp, Artificial Sequence
  primer
gagaacaagcaaccgtcttcc

SEQ ID NO: 5444 - DNA, 21 bp, Artificial Sequence
  primer
cgtagcctcccttagagaccc

SEQ ID NO: 5445 - DNA, 38 bp, Artificial Sequence
  primer
gtaaaacgacggccagtgagactccaggacccacaaag

SEQ ID NO: 5446 - DNA, 20 bp, Artificial Sequence
  primer
agctgcaaggtgtaccgatg

SEQ ID NO: 5447 - DNA, 20 bp, Artificial Sequence
  primer
cagactctcggcaacaggtg

SEQ ID NO: 5448 - DNA, 38 bp, Artificial Sequence
  primer
gtaaaacgacggccagtgaggagccggaagttaaggag

SEQ ID NO: 5449 - DNA, 38 bp, Artificial Sequence
  primer
gtaaaacgacggccagttgtcaggcctcctttaacctc

SEQ ID NO: 5450 - DNA, 38 bp, Artificial Sequence
  primer
gtaaaacgacggccagtgcagcagaagtgaggtagcag

SEQ ID NO: 5451 - DNA, 38 bp, Artificial Sequence
  primer
gtaaaacgacggccagtggaaatgtcagcagtcacctg

SEQ ID NO: 5452 - DNA, 38 bp, Artificial Sequence
  primer
gtaaaacgacggccagtatggctgtgtttgtcaagctg

SEQ ID NO: 5453 - DNA, 39 bp, Artificial Sequence
  primer
gtaaaacgacggccagttggtacaactgtctctgaagcc

SEQ ID NO: 5454 - DNA, 21 bp, Artificial Sequence
  primer
ggtggaaatgagagttgaggc

SEQ ID NO: 5455 - DNA, 39 bp, Artificial Sequence
  primer
gtaaaacgacggccagtgccctagactcaggttattgcc

SEQ ID NO: 5456 - DNA, 35 bp, Artificial Sequence
  primer
gtaaaacgacggccagtcacctcagcctgccaaag

SEQ ID NO: 5457 - DNA, 39 bp, Artificial Sequence
  primer
gtaaaacgacggccagtttgctgtggaactcacattgtt

SEQ ID NO: 5458 - DNA, 21 bp, Artificial Sequence
  primer
aggcagtatggaatttgggac

SEQ ID NO: 5459 - DNA, 38 bp, Artificial Sequence
  primer
gtaaaacgacggccagttggaagaaggaccgtatgttg

SEQ ID NO: 5460 - DNA, 39 bp, Artificial Sequence
  primer
gtaaaacgacggccagtgcccttcatattaaaggtccca

SEQ ID NO: 5461 - DNA, 38 bp, Artificial Sequence
  primer
gtaaaacgacggccagtctccatgggtctacctttccc

SEQ ID NO: 5462 - DNA, 37 bp, Artificial Sequence
  primer
gtaaaacgacggccagtgtgctctcaagcccaatgag

SEQ ID NO: 5463 - DNA, 38 bp, Artificial Sequence
  primer
gtaaaacgacggccagtcagtattacccagcaaaggcg

SEQ ID NO: 5464 - DNA, 20 bp, Artificial Sequence
  primer
cttagcccttgctaacgcag

SEQ ID NO: 5465 - DNA, 37 bp, Artificial Sequence
  primer
gtaaaacgacggccagtgctacttcccgctctccttc

SEQ ID NO: 5466 - DNA, 21 bp, Artificial Sequence
  primer
accaccagaaagggattatgg

SEQ ID NO: 5467 - DNA, 38 bp, Artificial Sequence
  primer
gtaaaacgacggccagttaatgtgaggaaattgggtgc

SEQ ID NO: 5468 - DNA, 39 bp, Artificial Sequence
  primer
gtaaaacgacggccagtgccaatgcactgtcagactaag

SEQ ID NO: 5469 - DNA, 21 bp, Artificial Sequence
  primer
agccagcagaggaagtcagag

SEQ ID NO: 5470 - DNA, 21 bp, Artificial Sequence
  primer
ccaaagatcattgcaggagac

SEQ ID NO: 5471 - DNA, 19 bp, Artificial Sequence
  primer
ccagggttgcttctttccc

SEQ ID NO: 5472 - DNA, 38 bp, Artificial Sequence
  primer
gtaaaacgacggccagtgtttagaagactctccggccc

SEQ ID NO: 5473 - DNA, 38 bp, Artificial Sequence
  primer
gtaaaacgacggccagtagaaggagagcctgcagacag

SEQ ID NO: 5474 - DNA, 21 bp, Artificial Sequence
  primer
gatcggaggaatgagatggac

SEQ ID NO: 5475 - DNA, 21 bp, Artificial Sequence
  primer
aaagctttcggactgctgaag

SEQ ID NO: 5476 - DNA, 21 bp, Artificial Sequence
  primer
acgttgtctcctccacctagc

SEQ ID NO: 5477 - DNA, 21 bp, Artificial Sequence
  primer
taccacagtgggaggaaggag

SEQ ID NO: 5478 - DNA, 38 bp, Artificial Sequence
  primer
gtaaaacgacggccagtttctagcctttcctagcaccc

SEQ ID NO: 5479 - DNA, 21 bp, Artificial Sequence
  primer
acgttgtctcctccacctagc

SEQ ID NO: 5480 - DNA, 35 bp, Artificial Sequence
  primer
gtaaaacgacggccagtccggccagtacaggtcac

SEQ ID NO: 5481 - DNA, 38 bp, Artificial Sequence
  primer
gtaaaacgacggccagttgtacaccagcagctcatttg

SEQ ID NO: 5482 - DNA, 22 bp, Artificial Sequence
  primer
gaacaccattcggagatcagag

SEQ ID NO: 5483 - DNA, 21 bp, Artificial Sequence
  primer
ctttggcgagccatagacttc

SEQ ID NO: 5484 - DNA, 42 bp, Artificial Sequence
  primer
gtaaaacgacggccagtagggagtgtatatttgcatcatagc

SEQ ID NO: 5485 - DNA, 21 bp, Artificial Sequence
  primer
tgcatggctttccttcttagc

SEQ ID NO: 5486 - DNA, 38 bp, Artificial Sequence
  primer
gtaaaacgacggccagtccaccctgctaaggtgctaac

SEQ ID NO: 5487 - DNA, 18 bp, Artificial Sequence
  primer
gagcccagagtccaagcc

SEQ ID NO: 5488 - DNA, 39 bp, Artificial Sequence
  primer
gtaaaacgacggccagtcacacacaccacactccaaatg

SEQ ID NO: 5489 - DNA, 38 bp, Artificial Sequence
  primer
gtaaaacgacggccagtacaatccatttagccagccag

SEQ ID NO: 5490 - DNA, 21 bp, Artificial Sequence
  primer
gtacaaacagatgctggctgc

SEQ ID NO: 5491 - DNA, 38 bp, Artificial Sequence
  primer
gtaaaacgacggccagttctctttcactgtctgcaccc

SEQ ID NO: 5492 - DNA, 21 bp, Artificial Sequence
  primer
atgaacctgaagtggtttccg

SEQ ID NO: 5493 - DNA, 21 bp, Artificial Sequence
  primer
cggaaatcacttagccactcc

SEQ ID NO: 5494 - DNA, 38 bp, Artificial Sequence
  primer
gtaaaacgacggccagttcaccggctttacatttgatg

SEQ ID NO: 5495 - DNA, 38 bp, Artificial Sequence
  primer
gtaaaacgacggccagtcagtcttcagtgtcacagccc

SEQ ID NO: 5496 - DNA, 40 bp, Artificial Sequence
  primer
gtaaaacgacggccagtgcatccattagagtggaggtttc

SEQ ID NO: 5497 - DNA, 23 bp, Artificial Sequence
  primer
tttgttcatctgattgcagacac

SEQ ID NO: 5498 - DNA, 26 bp, Artificial Sequence
  primer
ggtaactccaaagttctctaagatcc

SEQ ID NO: 5499 - DNA, 38 bp, Artificial Sequence
  primer
gtaaaacgacggccagtctaaagcaagtgtgtctgccc

SEQ ID NO: 5500 - DNA, 38 bp, Artificial Sequence
  primer
gtaaaacgacggccagtggtccgtatcctctcctgttc

SEQ ID NO: 5501 - DNA, 41 bp, Artificial Sequence
  primer
gtaaaacgacggccagtttcctcgtgtcttcatctgtattg

SEQ ID NO: 5502 - DNA, 37 bp, Artificial Sequence
  primer
gtaaaacgacggccagtatccacctacctcagcctcg

SEQ ID NO: 5503 - DNA, 42 bp, Artificial Sequence
  primer
gtaaaacgacggccagtaataaagcagaaggtcatgtctagc

SEQ ID NO: 5504 - DNA, 21 bp, Artificial Sequence
  primer
atacagggactggaaagcctg

SEQ ID NO: 5505 - DNA, 39 bp, Artificial Sequence
  primer
gtaaaacgacggccagtcaaacccatctgcttctaaagg

SEQ ID NO: 5506 - DNA, 40 bp, Artificial Sequence
  primer
gtaaaacgacggccagttggatttccttaatgtgtgttcc

SEQ ID NO: 5507 - DNA, 37 bp, Artificial Sequence
  primer
gtaaaacgacggccagtaatagtcacgaatggcgcag

SEQ ID NO: 5508 - DNA, 21 bp, Artificial Sequence
  primer
ctctgtttgccagaagcattg

SEQ ID NO: 5509 - DNA, 21 bp, Artificial Sequence
  primer
tggaaaggccaaatctagcag

SEQ ID NO: 5510 - DNA, 41 bp, Artificial Sequence
  primer
gtaaaacgacggccagtcaatatttcactgctttacggagg

SEQ ID NO: 5511 - DNA, 38 bp, Artificial Sequence
  primer
gtaaaacgacggccagttcaaacgcagttatccacagg

SEQ ID NO: 5512 - DNA, 38 bp, Artificial Sequence
  primer
gtaaaacgacggccagtggctaagagctgaactgcctc

SEQ ID NO: 5513 - DNA, 38 bp, Artificial Sequence
  primer
gtaaaacgacggccagtggcatgcagttctacaccttg

SEQ ID NO: 5514 - DNA, 38 bp, Artificial Sequence
  primer
gtaaaacgacggccagttaggaagccactctcaccacc

SEQ ID NO: 5515 - DNA, 38 bp, Artificial Sequence
  primer
gtaaaacgacggccagtccacccaggaagagatcaaac

SEQ ID NO: 5516 - DNA, 37 bp, Artificial Sequence
  primer
gtaaaacgacggccagtgagctatggccaggactgag

SEQ ID NO: 5517 - DNA, 38 bp, Artificial Sequence
  primer
gtaaaacgacggccagtggatgagcagctctgtgactg

SEQ ID NO: 5518 - DNA, 21 bp, Artificial Sequence
  primer
agcttaaagacagctctgccc

SEQ ID NO: 5519 - DNA, 30 bp, Artificial Sequence
  primer
ttcttacctatgtcctactcaaatctcttt

SEQ ID NO: 5520 - DNA, 21 bp, Artificial Sequence
  primer
gtgccaggtccagtttctttc

SEQ ID NO: 5521 - DNA, 21 bp, Artificial Sequence
  primer
ggtttcagggatcctacctcc

SEQ ID NO: 5522 - DNA, 38 bp, Artificial Sequence
  primer
gtaaaacgacggccagtcagagaagggtttcagaagcg

SEQ ID NO: 5523 - DNA, 36 bp, Artificial Sequence
  primer
gtaaaacgacggccagtttggtcttgccatcttggg

SEQ ID NO: 5524 - DNA, 21 bp, Artificial Sequence
  primer
tgtgaccttgctaagtgggag

SEQ ID NO: 5525 - DNA, 38 bp, Artificial Sequence
  primer
gtaaaacgacggccagtgaaccaatcaccatccgtttc

SEQ ID NO: 5526 - DNA, 37 bp, Artificial Sequence
  primer
gtaaaacgacggccagtggactggacttctccttggg

SEQ ID NO: 5527 - DNA, 38 bp, Artificial Sequence
  primer
gtaaaacgacggccagttttgttctcagatggtggtgg

SEQ ID NO: 5528 - DNA, 37 bp, Artificial Sequence
  primer
gtaaaacgacggccagtgatgtgggtcaggtctgctg

SEQ ID NO: 5529 - DNA, 21 bp, Artificial Sequence
  primer
gtactacgatgccattgcctg

SEQ ID NO: 5530 - DNA, 22 bp, Artificial Sequence
  primer
tgaagcatgaatggtgtattgg

SEQ ID NO: 5531 - DNA, 21 bp, Artificial Sequence
  primer
tcctcattctctcaccaccag

SEQ ID NO: 5532 - DNA, 41 bp, Artificial Sequence
  primer
gtaaaacgacggccagttcattgtggcagtaaatgtttgag

SEQ ID NO: 5533 - DNA, 39 bp, Artificial Sequence
  primer
gtaaaacgacggccagttgcaggatgtacaaacaagtgg

SEQ ID NO: 5534 - DNA, 20 bp, Artificial Sequence
  primer
caacgcaacagaaggaacaa

SEQ ID NO: 5535 - DNA, 38 bp, Artificial Sequence
  primer
gtaaaacgacggccagtttccctggtacagcattctcc

SEQ ID NO: 5536 - DNA, 21 bp, Artificial Sequence
  primer
atagctgctttgaggacaggg

SEQ ID NO: 5537 - DNA, 37 bp, Artificial Sequence
  primer
gtaaaacgacggccagtgcagaccatttctgcaatcc

SEQ ID NO: 5538 - DNA, 20 bp, Artificial Sequence
  primer
tgtgttgtacacaggccagc

SEQ ID NO: 5539 - DNA, 37 bp, Artificial Sequence
  primer
gtaaaacgacggccagtggctggctttctcttgtctg

SEQ ID NO: 5540 - DNA, 38 bp, Artificial Sequence
  primer
gtaaaacgacggccagtgctggcagtcctgttgtaacc

SEQ ID NO: 5541 - DNA, 21 bp, Artificial Sequence
  primer
ggtcagagtgtcaacctggtg

SEQ ID NO: 5542 - DNA, 37 bp, Artificial Sequence
  primer
gtaaaacgacggccagttgccttctctgtgccttagc

SEQ ID NO: 5543 - DNA, 24 bp, Artificial Sequence
  primer
tctttcaaggaatttatgccaaag

SEQ ID NO: 5544 - DNA, 22 bp, Artificial Sequence
  primer
aaagcagggtaaatttgtccac

SEQ ID NO: 5545 - DNA, 39 bp, Artificial Sequence
  primer
gtaaaacgacggccagttggtttccattgaccctaacag

SEQ ID NO: 5546 - DNA, 20 bp, Artificial Sequence
  primer
gtacttcagcttgggcaacg

SEQ ID NO: 5547 - DNA, 21 bp, Artificial Sequence
  primer
tcaaatgctctgcaaatctgg

SEQ ID NO: 5548 - DNA, 39 bp, Artificial Sequence
  primer
gtaaaacgacggccagtacatttcattgtttcctttggg

SEQ ID NO: 5549 - DNA, 37 bp, Artificial Sequence
  primer
gtaaaacgacggccagtccatcagcagaggcaaagtc

SEQ ID NO: 5550 - DNA, 38 bp, Artificial Sequence
  primer
gtaaaacgacggccagtaggagtggtttgtgtgagctg

SEQ ID NO: 5551 - DNA, 39 bp, Artificial Sequence
  primer
gtaaaacgacggccagtcacagagactagccacagaagc

SEQ ID NO: 5552 - DNA, 40 bp, Artificial Sequence
  primer
gtaaaacgacggccagtgctctcaggtcatctagacatgc

SEQ ID NO: 5553 - DNA, 35 bp, Artificial Sequence
  primer
gtaaaacgacggccagtctctcggcagtgagggtg

SEQ ID NO: 5554 - DNA, 38 bp, Artificial Sequence
  primer
gtaaaacgacggccagtcaacttgggatatcaaacggg

SEQ ID NO: 5555 - DNA, 38 bp, Artificial Sequence
  primer
gtaaaacgacggccagtggaaaccaaaggagctttcag

SEQ ID NO: 5556 - DNA, 38 bp, Artificial Sequence
  primer
gtaaaacgacggccagtagtctcagccgcctaagtgtc

SEQ ID NO: 5557 - DNA, 35 bp, Artificial Sequence
  primer
gtaaaacgacggccagtgtgggtccctcctccctg

SEQ ID NO: 5558 - DNA, 18 bp, Artificial Sequence
  primer
agcaggattcctcccagg

SEQ ID NO: 5559 - DNA, 38 bp, Artificial Sequence
  primer
gtaaaacgacggccagtgcatgacttcagggagatgtg

SEQ ID NO: 5560 - DNA, 21 bp, Artificial Sequence
  primer
ccatcatctgcctaaggaacc

SEQ ID NO: 5561 - DNA, 21 bp, Artificial Sequence
  primer
gaagggagctgtagctggatg

SEQ ID NO: 5562 - DNA, 20 bp, Artificial Sequence
  primer
cctccatcacagggaagtgt

SEQ ID NO: 5563 - DNA, 37 bp, Artificial Sequence
  primer
gtaaaacgacggccagtgggagctccaccctctagtc

SEQ ID NO: 5564 - DNA, 37 bp, Artificial Sequence
  primer
gtaaaacgacggccagtacctgtctggccaaggtgtc

SEQ ID NO: 5565 - DNA, 21 bp, Artificial Sequence
  primer
agggactacccagcactggac

SEQ ID NO: 5566 - DNA, 21 bp, Artificial Sequence
  primer
acttacctgtgggctgtctgc

SEQ ID NO: 5567 - DNA, 38 bp, Artificial Sequence
  primer
gtaaaacgacggccagtccacctgtctctgctagaccc

SEQ ID NO: 5568 - DNA, 19 bp, Artificial Sequence
  primer
gcagtgggaagaacaaggc

SEQ ID NO: 5569 - DNA, 19 bp, Artificial Sequence
  primer
aaggaggtggctctcagga

SEQ ID NO: 5570 - DNA, 21 bp, Artificial Sequence
  primer
tctcccttcctgtgtctctgc

SEQ ID NO: 5571 - DNA, 36 bp, Artificial Sequence
  primer
gtaaaacgacggccagtcactcagtgtggacgcctt

SEQ ID NO: 5572 - DNA, 18 bp, Artificial Sequence
  primer
gactggtcccgctgtcct

SEQ ID NO: 5573 - DNA, 20 bp, Artificial Sequence
  primer
accctacacccaacccaaac

SEQ ID NO: 5574 - DNA, 37 bp, Artificial Sequence
  primer
gtaaaacgacggccagtccagtggagctgggtgtaag

SEQ ID NO: 5575 - DNA, 38 bp, Artificial Sequence
  primer
gtaaaacgacggccagtggaaggttggatggtgacttc

SEQ ID NO: 5576 - DNA, 38 bp, Artificial Sequence
  primer
gtaaaacgacggccagtgaagtggtacctgggagaccc

SEQ ID NO: 5577 - DNA, 20 bp, Artificial Sequence
  primer
aagggttcatgtggttggtg

SEQ ID NO: 5578 - DNA, 20 bp, Artificial Sequence
  primer
aggaagtgccacagcctttc

SEQ ID NO: 5579 - DNA, 38 bp, Artificial Sequence
  primer
gtaaaacgacggccagtcgggagaggaggtaagaggtc

SEQ ID NO: 5580 - DNA, 20 bp, Artificial Sequence
  primer
acctcaccacactccacagc

SEQ ID NO: 5581 - DNA, 21 bp, Artificial Sequence
  primer
ttccaaggtcactttcccaag

SEQ ID NO: 5582 - DNA, 38 bp, Artificial Sequence
  primer
gtaaaacgacggccagtctcacatccctgctgactctg

SEQ ID NO: 5583 - DNA, 38 bp, Artificial Sequence
  primer
gtaaaacgacggccagtatctttgtggtgggtgagttg

SEQ ID NO: 5584 - DNA, 38 bp, Artificial Sequence
  primer
gtaaaacgacggccagtgaggcttgtttgggacatttg

SEQ ID NO: 5585 - DNA, 38 bp, Artificial Sequence
  primer
gtaaaacgacggccagtaagggattgaaggtctgaggg

SEQ ID NO: 5586 - DNA, 38 bp, Artificial Sequence
  primer
gtaaaacgacggccagtgctgtcaattaggttgggctc

SEQ ID NO: 5587 - DNA, 38 bp, Artificial Sequence
  primer
gtaaaacgacggccagtcatctcaaatctgcatctggc

SEQ ID NO: 5588 - DNA, 21 bp, Artificial Sequence
  primer
ggtaaggtgaagagtccgtcg

SEQ ID NO: 5589 - DNA, 21 bp, Artificial Sequence
  primer
caggttcacacctaggcagtc

SEQ ID NO: 5590 - DNA, 20 bp, Artificial Sequence
  primer
atggagccatttcacgtttg

SEQ ID NO: 5591 - DNA, 22 bp, Artificial Sequence
  primer
gcatgaaaccaaattcttgtcc

SEQ ID NO: 5592 - DNA, 38 bp, Artificial Sequence
  primer
gtaaaacgacggccagtgcgtccctatctctgcttgtc

SEQ ID NO: 5593 - DNA, 38 bp, Artificial Sequence; identical to SEQ ID NO: 5587
  primer

SEQ ID NO: 5594 - DNA, 23 bp, Artificial Sequence
  primer
tttaattccagagttcctcagcc

SEQ ID NO: 5595 - DNA, 19 bp, Artificial Sequence
  primer
ccgagaaacaaagttcccg

SEQ ID NO: 5596 - DNA, 21 bp, Artificial Sequence
  primer
ggaatttcttcccacatcagg

SEQ ID NO: 5597 - DNA, 40 bp, Artificial Sequence
  primer
gtaaaacgacggccagttcacccagatagtgtaaagctcc

SEQ ID NO: 5598 - DNA, 39 bp, Artificial Sequence
  primer
gtaaaacgacggccagtcactgtcaccaaggcctaattc

SEQ ID NO: 5599 - DNA, 38 bp, Artificial Sequence
  primer
gtaaaacgacggccagtgtacacccagtggaggtgttg

SEQ ID NO: 5600 - DNA, 19 bp, Artificial Sequence
  primer
agtagccgcctgctagtgg

SEQ ID NO: 5601 - DNA, 21 bp, Artificial Sequence
  primer
aggtatgaaccactgttcccg

SEQ ID NO: 5602 - DNA, 21 bp, Artificial Sequence
  primer
gtaaccatcacagttgcaccg

SEQ ID NO: 5603 - DNA, 38 bp, Artificial Sequence
  primer
gtaaaacgacggccagtcttggcacttgcacagagatg

SEQ ID NO: 5604 - DNA, 20 bp, Artificial Sequence
  primer
agccaagtgcctttctctcc

SEQ ID NO: 5605 - DNA, 18 bp, Artificial Sequence
  primer
cctgggcagcagagtgag

SEQ ID NO: 5606 - DNA, 19 bp, Artificial Sequence
  primer
agtgcgcgtgagaaagagg

SEQ ID NO: 5607 - DNA, 18 bp, Artificial Sequence
  primer
cctgggcagcagagtgag

SEQ ID NO: 5608 - DNA, 38 bp, Artificial Sequence
  primer
gtaaaacgacggccagtaaagcctgctgaccacttagg

SEQ ID NO: 5609 - DNA, 38 bp, Artificial Sequence
  primer
gtaaaacgacggccagtgacacagaatttgcatcccag

SEQ ID NO: 5610 - DNA, 21 bp, Artificial Sequence
  primer
ttacaactggagaattggccc

SEQ ID NO: 5611 - DNA, 19 bp, Artificial Sequence
  primer
gcagcctccacagaacaaa

SEQ ID NO: 5612 - DNA, 21 bp, Artificial Sequence
  primer
ctgttcgataggaggtctggg

SEQ ID NO: 5613 - DNA, 42 bp, Artificial Sequence
  primer
gtaaaacgacggccagttggaaacctagtgagagactgtttg

SEQ ID NO: 5614 - DNA, 38 bp, Artificial Sequence
  primer
gtaaaacgacggccagtggtgcctccctcttacagttg

SEQ ID NO: 5615 - DNA, 21 bp, Artificial Sequence
  primer
gagcaacagggtgagaccatc

SEQ ID NO: 5616 - DNA, 21 bp, Artificial Sequence
  primer
tgactggaacactgaggcttg

SEQ ID NO: 5617 - DNA, 38 bp, Artificial Sequence
  primer
gtaaaacgacggccagtccttacctgaaccttcctccc

SEQ ID NO: 5618 - DNA, 38 bp, Artificial Sequence
  primer
gtaaaacgacggccagtgcaccatagtgtaatgctggg

SEQ ID NO: 5619 - DNA, 22 bp, Artificial Sequence
  primer
tgcagagcaaattatgagcaag

SEQ ID NO: 5620 - DNA, 35 bp, Artificial Sequence
  primer
gtaaaacgacggccagtcccagagagaacctgccc

SEQ ID NO: 5621 - DNA, 38 bp, Artificial Sequence
  primer
gtaaaacgacggccagtagaatcatcattcactggccc

SEQ ID NO: 5622 - DNA, 38 bp, Artificial Sequence
  primer
gtaaaacgacggccagtctcctgcaagtgtttcctgtg

SEQ ID NO: 5623 - DNA, 38 bp, Artificial Sequence
  primer
gtaaaacgacggccagtcaccctggtgttaagtggctc

SEQ ID NO: 5624 - DNA, 21 bp, Artificial Sequence
  primer
attgcttgagcccaagagttc

SEQ ID NO: 5625 - DNA, 21 bp, Artificial Sequence
  primer
gtaacctgcaagagttgacgg

SEQ ID NO: 5626 - DNA, 22 bp, Artificial Sequence
  primer
ttctcttggcagaatttgatcc

SEQ ID NO: 5627 - DNA, 38 bp, Artificial Sequence
  primer
gtaaaacgacggccagtgataaccatcccaaccctgac

SEQ ID NO: 5628 - DNA, 38 bp, Artificial Sequence
  primer
gtaaaacgacggccagttcaaactcctgattacgggtg

SEQ ID NO: 5629 - DNA, 23 bp, Artificial Sequence
  primer
ttgacttccacgtttagtgaatg

SEQ ID NO: 5630 - DNA, 21 bp, Artificial Sequence
  primer
ccgagcaacagagtgagagac

SEQ ID NO: 5631 - DNA, 36 bp, Artificial Sequence
  primer
gtaaaacgacggccagtacctgccagctgatttgtg

SEQ ID NO: 5632 - DNA, 21 bp, Artificial Sequence
  primer
gagctatgaccacaccactgc

SEQ ID NO: 5633 - DNA, 19 bp, Artificial Sequence
  primer
atgcccagccatttccttc

SEQ ID NO: 5634 - DNA, 38 bp, Artificial Sequence
  primer
gtaaaacgacggccagttatttgtggcaacaggaggtc

SEQ ID NO: 5635 - DNA, 21 bp, Artificial Sequence
  primer
ggtctgatatttgcccgtgag

SEQ ID NO: 5636 - DNA, 38 bp, Artificial Sequence
  primer
gtaaaacgacggccagttgcactgtagggtgaactgtg

SEQ ID NO: 5637 - DNA, 35 bp, Artificial Sequence
  primer
gtaaaacgacggccagtcaggcatgagccaccaag

SEQ ID NO: 5638 - DNA, 38 bp, Artificial Sequence
  primer
gtaaaacgacggccagtaggagatggctccagctctac

SEQ ID NO: 5639 - DNA, 38 bp, Artificial Sequence
  primer
gtaaaacgacggccagtaaaggaactgtccaccgtgag

SEQ ID NO: 5640 - DNA, 21 bp, Artificial Sequence
  primer
aggaacacgcagagatgacag

SEQ ID NO: 5641 - DNA, 38 bp, Artificial Sequence
  primer
gtaaaacgacggccagtttggaattggagaacagcaag

SEQ ID NO: 5642 - DNA, 38 bp, Artificial Sequence
  primer
gtaaaacgacggccagtaagtaggttcatcgagtcggc

SEQ ID NO: 5643 - DNA, 39 bp, Artificial Sequence
  primer
gtaaaacgacggccagtgcagaaggaagagagctgtgtc

SEQ ID NO: 5644 - DNA, 21 bp, Artificial Sequence
  primer
ctgaagagccttctgtccagc

SEQ ID NO: 5645 - DNA, 21 bp, Artificial Sequence
  primer
ctcctgggaatgtgagtttgg

SEQ ID NO: 5646 - DNA, 38 bp, Artificial Sequence
  primer
gtaaaacgacggccagttagcctctctgggcttgtttc

SEQ ID NO: 5647 - DNA, 38 bp, Artificial Sequence
  primer
gtaaaacgacggccagtgcatggatcataatggcagag

SEQ ID NO: 5648 - DNA, 38 bp, Artificial Sequence
  primer
gtaaaacgacggccagtagagacttgcccttgggtctc

SEQ ID NO: 5649 - DNA, 37 bp, Artificial Sequence
  primer
gtaaaacgacggccagtctctgagaggtaacgcaggg

SEQ ID NO: 5650 - DNA, 38 bp, Artificial Sequence
  primer
gtaaaacgacggccagttgcaaagtacgaaccctctgc

SEQ ID NO: 5651 - DNA, 38 bp, Artificial Sequence
  primer
gtaaaacgacggccagttctctgacctgggtggatctc

SEQ ID NO: 5652 - DNA, 22 bp, Artificial Sequence
  primer
ggcaggcaagagacagtatgtg

SEQ ID NO: 5653 - DNA, 39 bp, Artificial Sequence
  primer
gtaaaacgacggccagtagaactcatgttggctagggag

SEQ ID NO: 5654 - DNA, 38 bp, Artificial Sequence
  primer
gtaaaacgacggccagtcagggtaagtgcccaaagaac

SEQ ID NO: 5655 - DNA, 21 bp, Artificial Sequence
  primer
ttgttgataatatggcggctg

SEQ ID NO: 5656 - DNA, 38 bp, Artificial Sequence
  primer
gtaaaacgacggccagtctccaaggctgtccattgttc

SEQ ID NO: 5657 - DNA, 21 bp, Artificial Sequence
  primer
gagcaagactctgtctgggaa

SEQ ID NO: 5658 - DNA, 22 bp, Artificial Sequence
  primer
tggtaccagttgttgctaaaag

SEQ ID NO: 5659 - DNA, 23 bp, Artificial Sequence
  primer
caagagaccaaatcaagcctttc

SEQ ID NO: 5660 - DNA, 38 bp, Artificial Sequence
  primer
gtaaaacgacggccagtgagattggaggattctggctc

SEQ ID NO: 5661 - DNA, 21 bp, Artificial Sequence
  primer
tttccatagctttgaacaccc

SEQ ID NO: 5662 - DNA, 21 bp, Artificial Sequence
  primer
atgcctgtgctgttaactccc

SEQ ID NO: 5663 - DNA, 21 bp, Artificial Sequence
  primer
ggcatgtgttaaatgtcaggg

SEQ ID NO: 5664 - DNA, 22 bp, Artificial Sequence
  primer
ttgcatccagctgtgtaggtag

SEQ ID NO: 5665 - DNA, 20 bp, Artificial Sequence
  primer
tctggaggaggtgctgaaag

SEQ ID NO: 5666 - DNA, 37 bp, Artificial Sequence
  primer
gtaaaacgacggccagtgtgtaagccactgcacccag

SEQ ID NO: 5667 - DNA, 43 bp, Artificial Sequence
  primer
gtaaaacgacggccagtgaggttacatttcagagtcattgttg

SEQ ID NO: 5668 - DNA, 42 bp, Artificial Sequence
  primer
gtaaaacgacggccagtgctataaattgtgtttctggctttc

SEQ ID NO: 5669 - DNA, 39 bp, Artificial Sequence
  primer
gtaaaacgacggccagtgggattataggcacctgctacc

SEQ ID NO: 5670 - DNA, 38 bp, Artificial Sequence
  primer
gtaaaacgacggccagttattcatagccagagggtggc

SEQ ID NO: 5671 - DNA, 21 bp, Artificial Sequence
  primer
aagtctggatgccagtccttg

SEQ ID NO: 5672 - DNA, 40 bp, Artificial Sequence
  primer
gtaaaacgacggccagtaaatgcttgcctgaattgttaag

SEQ ID NO: 5673 - DNA, 40 bp, Artificial Sequence
  primer
gtaaaacgacggccagtcatctccaggatctcttaccctt

SEQ ID NO: 5674 - DNA, 19 bp, Artificial Sequence
  primer
tggagcccaatctttggtg

SEQ ID NO: 5675 - DNA, 42 bp, Artificial Sequence
  primer
gtaaaacgacggccagttggatagggtccacattataggaac

SEQ ID NO: 5676 - DNA, 22 bp, Artificial Sequence
  primer
ggatgcatgaatttcttgtttg

SEQ ID NO: 5677 - DNA, 41 bp, Artificial Sequence
  primer
gtaaaacgacggccagttttcaaatgttacttgggtgaatc

SEQ ID NO: 5678 - DNA, 38 bp, Artificial Sequence
  primer
gtaaaacgacggccagtcttcccagacggttactggtc

SEQ ID NO: 5679 - DNA, 38 bp, Artificial Sequence
  primer
gtaaaacgacggccagttcaatttcagagccttggacc

SEQ ID NO: 5680 - DNA, 21 bp, Artificial Sequence
  primer
atagggaagtcatcgcagagg

SEQ ID NO: 5681 - DNA, 41 bp, Artificial Sequence
  primer
gtaaaacgacggccagtatttagtcctattcgatcctctgc

SEQ ID NO: 5682 - DNA, 21 bp, Artificial Sequence
  primer
gctcagttcttcgtacccacc

SEQ ID NO: 5683 - DNA, 38 bp, Artificial Sequence
  primer
gtaaaacgacggccagtttgcagatggcatttgatgag

SEQ ID NO: 5684 - DNA, 38 bp, Artificial Sequence
  primer
gtaaaacgacggccagtcacagttgctaggtttgctgc

SEQ ID NO: 5685 - DNA, 21 bp, Artificial Sequence
  primer
aggaatacacagtgcagcagg

SEQ ID NO: 5686 - DNA, 38 bp, Artificial Sequence
  primer
gtaaaacgacggccagttctactgcatgtcaggccaag

SEQ ID NO: 5687 - DNA, 19 bp, Artificial Sequence
  primer
tttcccactgtgatcaggc

SEQ ID NO: 5688 - DNA, 21 bp, Artificial Sequence
  primer
aaagcttgcctgtttctggag

SEQ ID NO: 5689 - DNA, 21 bp, Artificial Sequence
  primer
cagctgcaaaggattgtgttc

SEQ ID NO: 5690 - DNA, 43 bp, Artificial Sequence
  primer
gtaaaacgacggccagtcacaactcatctgttggtagtttgtc

SEQ ID NO: 5691 - DNA, 21 bp, Artificial Sequence
  primer
ttctcttgcaactgaaatggc

SEQ ID NO: 5692 - DNA, 21 bp, Artificial Sequence
  primer
ggtgatctggcagcagaagtc

SEQ ID NO: 5693 - DNA, 41 bp, Artificial Sequence
  primer
gtaaaacgacggccagttccgtttattctttcattaccacc

SEQ ID NO: 5694 - DNA, 38 bp, Artificial Sequence
  primer
gtaaaacgacggccagtcaaagtgcagtgcaactcaag

SEQ ID NO: 5695 - DNA, 38 bp, Artificial Sequence
  primer
gtaaaacgacggccagtaaacttgtgaaaggaccctgg

SEQ ID NO: 5696 - DNA, 40 bp, Artificial Sequence
  primer
gtaaaacgacggccagtggatctacagtgttccgagtgtc

SEQ ID NO: 5697 - DNA, 22 bp, Artificial Sequence
  primer
cagccgctatcagaaatctagg

SEQ ID NO: 5698 - DNA, 22 bp, Artificial Sequence
  primer
cactggtctgattccgaatacc

SEQ ID NO: 5699 - DNA, 38 bp, Artificial Sequence
  primer
gtaaaacgacggccagtctgtggcagcttcagaacatc

SEQ ID NO: 5700 - DNA, 25 bp, Artificial Sequence
  primer
tttgataactttagggatcatttgc

SEQ ID NO: 5701 - DNA, 26 bp, Artificial Sequence
  primer
tttagttgaggttatggtgtggttag

SEQ ID NO: 5702 - DNA, 38 bp, Artificial Sequence
  primer
gtaaaacgacggccagtagcgatcccaaagtgtcattc

SEQ ID NO: 5703 - DNA, 18 bp, Artificial Sequence
  primer
ccttcattcgcaggctgg

SEQ ID NO: 5704 - DNA, 39 bp, Artificial Sequence
  primer
gtaaaacgacggccagtaaggccctatctgcttgtaagg

SEQ ID NO: 5705 - DNA, 35 bp, Artificial Sequence
  primer
gtaaaacgacggccagtcgagaccacaccactgcc

SEQ ID NO: 5706 - DNA, 38 bp, Artificial Sequence
  primer
gtaaaacgacggccagtctaagtcagcggttgttcacg

SEQ ID NO: 5707 - DNA, 21 bp, Artificial Sequence
  primer
agaaagcgaacccaaacaatc

SEQ ID NO: 5708 - DNA, 38 bp, Artificial Sequence
  primer
gtaaaacgacggccagtgaagaagacggaaaggcagag

SEQ ID NO: 5709 - DNA, 38 bp, Artificial Sequence
  primer
gtaaaacgacggccagttggttgaaatggatgcagaac

SEQ ID NO: 5710 - DNA, 38 bp, Artificial Sequence
  primer
gtaaaacgacggccagtaggaggaggagacgaggaatc

SEQ ID NO: 5711 - DNA, 38 bp, Artificial Sequence
  primer
gtaaaacgacggccagtgaagaaatgaaagggagcgtg

SEQ ID NO: 5712 - DNA, 38 bp, Artificial Sequence
  primer
gtaaaacgacggccagtaagcgaagactccatagctgg

SEQ ID NO: 5713 - DNA, 21 bp, Artificial Sequence
  primer
tcaggttcatatgatggcagc

SEQ ID NO: 5714 - DNA, 38 bp, Artificial Sequence
  primer
gtaaaacgacggccagtgcagtctcccagttaaccgac

SEQ ID NO: 5715 - DNA, 38 bp, Artificial Sequence
  primer
gtaaaacgacggccagtgtcaagccgaaaccttagctg

SEQ ID NO: 5716 - DNA, 42 bp, Artificial Sequence
  primer
gtaaaacgacggccagtggaaactgtatccattctgtcaaag

SEQ ID NO: 5717 - DNA, 39 bp, Artificial Sequence
  primer
gtaaaacgacggccagttgaactgcagagtcacgctaag

SEQ ID NO: 5718 - DNA, 38 bp, Artificial Sequence
  primer
gtaaaacgacggccagttcctccagacagtgaatgtgc

SEQ ID NO: 5719 - DNA, 21 bp, Artificial Sequence
  primer
taagttccgacctggaaggag

SEQ ID NO: 5720 - DNA, 38 bp, Artificial Sequence
  primer
gtaaaacgacggccagtagaaggagaggaacctcaggc

SEQ ID NO: 5721 - DNA, 37 bp, Artificial Sequence
  primer
gtaaaacgacggccagtcaggagactaggcgtctgcc

SEQ ID NO: 5722 - DNA, 38 bp, Artificial Sequence
  primer
gtaaaacgacggccagtttgatcgcataaatccgtctg

SEQ ID NO: 5723 - DNA, 21 bp, Artificial Sequence
  primer
gcacgggattgtactcacaga

SEQ ID NO: 5724 - DNA, 38 bp, Artificial Sequence
  primer
gtaaaacgacggccagtaatgcctagatgattgcctgg

SEQ ID NO: 5725 - DNA, 40 bp, Artificial Sequence
  primer
gtaaaacgacggccagtggaggagaaatttgtatgtcgtg

SEQ ID NO: 5726 - DNA, 21 bp, Artificial Sequence
  primer
tacctggccacaataaagctg

SEQ ID NO: 5727 - DNA, 40 bp, Artificial Sequence
  primer
gtaaaacgacggccagtttgaacctcaaagaacaatcagg

SEQ ID NO: 5728 - DNA, 41 bp, Artificial Sequence
  primer
gtaaaacgacggccagtgattcgcttatcatgtgaccttag

SEQ ID NO: 5729 - DNA, 38 bp, Artificial Sequence
  primer
gtaaaacgacggccagtgacagatggccagtttcttcc

SEQ ID NO: 5730 - DNA, 20 bp, Artificial Sequence
  primer
tgagcagtggagatgctgtg

SEQ ID NO: 5731 - DNA, 38 bp, Artificial Sequence
  primer
gtaaaacgacggccagtgaagaatgtgcttcagggagg

SEQ ID NO: 5732 - DNA, 38 bp, Artificial Sequence
  primer
gtaaaacgacggccagttggatggtaacaaacctgctg

SEQ ID NO: 5733 - DNA, 21 bp, Artificial Sequence
  primer
ataggtgaggcaatgtcaccc

SEQ ID NO: 5734 - DNA, 21 bp, Artificial Sequence
  primer
gatgcctcccactgtgaagac

SEQ ID NO: 5735 - DNA, 38 bp, Artificial Sequence
  primer
gtaaaacgacggccagttgtaagggatacccaggaacg

SEQ ID NO: 5736 - DNA, 38 bp, Artificial Sequence
  primer
gtaaaacgacggccagtgatacgcggccactagaagac

SEQ ID NO: 5737 - DNA, 38 bp, Artificial Sequence
  primer
gtaaaacgacggccagtagagcagagaacaccacctcc

SEQ ID NO: 5738 - DNA, 38 bp, Artificial Sequence
  primer
gtaaaacgacggccagtctcactgctgactcaaggtgg

SEQ ID NO: 5739 - DNA, 21 bp, Artificial Sequence
  primer
caaacgtcttgttgagccaag

SEQ ID NO: 5740 - DNA, 21 bp, Artificial Sequence
  primer
ggcagacttgatagaggaggc

SEQ ID NO: 5741 - DNA, 21 bp, Artificial Sequence
  primer
catgaaacctggagcatgttg

SEQ ID NO: 5742 - DNA, 39 bp, Artificial Sequence
  primer
gtaaaacgacggccagttgacataagtttgctcaccctg

SEQ ID NO: 5743 - DNA, 26 bp, Artificial Sequence
  primer
gcagagctactaatttgactgtgtcc

SEQ ID NO: 5744 - DNA, 21 bp, Artificial Sequence
  primer
ggtgagctaagatggagccac

SEQ ID NO: 5745 - DNA, 21 bp, Artificial Sequence
  primer
ccaaacaggtcaagagatcgg

SEQ ID NO: 5746 - DNA, 21 bp, Artificial Sequence
  primer
ctgtgccatttctctttgagc

SEQ ID NO: 5747 - DNA, 37 bp, Artificial Sequence
  primer
gtaaaacgacggccagtgtattctttgtgccatgccc

SEQ ID NO: 5748 - DNA, 35 bp, Artificial Sequence
  primer
gtaaaacgacggccagtacccgcttcttcactgcc

SEQ ID NO: 5749 - DNA, 20 bp, Artificial Sequence
  primer
gtgctgactttcacacgctg

SEQ ID NO: 5750 - DNA, 22 bp, Artificial Sequence
  primer
cattcagcagccttcatctacc

SEQ ID NO: 5751 - DNA, 36 bp, Artificial Sequence
  primer
gtaaaacgacggccagtatctgggtgcccaggtaag

SEQ ID NO: 5752 - DNA, 40 bp, Artificial Sequence
  primer
gtaaaacgacggccagttcctagaagaggactgcagtgtg

SEQ ID NO: 5753 - DNA, 38 bp, Artificial Sequence
  primer
gtaaaacgacggccagtgtgggaaaggaagctgaactg

SEQ ID NO: 5754 - DNA, 38 bp, Artificial Sequence
  primer
gtaaaacgacggccagtactttgttaccaggccatgtg

SEQ ID NO: 5755 - DNA, 22 bp, Artificial Sequence
  primer
ttgaggaaagtccaacataggc

SEQ ID NO: 5756 - DNA, 20 bp, Artificial Sequence
  primer
ctttgggactgcagcagatg

SEQ ID NO: 5757 - DNA, 38 bp, Artificial Sequence
  primer
gtaaaacgacggccagtgggagaatttatgaggaagcg

SEQ ID NO: 5758 - DNA, 38 bp, Artificial Sequence
  primer
gtaaaacgacggccagtattgttgagagccatgtgtcc

SEQ ID NO: 5759 - DNA, 37 bp, Artificial Sequence
  primer
gtaaaacgacggccagttcaggattcccttgcttctg

SEQ ID NO: 5760 - DNA, 38 bp, Artificial Sequence
  primer
gtaaaacgacggccagttctcagatcatagtttgcccg

SEQ ID NO: 5761 - DNA, 21 bp, Artificial Sequence
  primer
cctggaaagattcatcgtgtg

SEQ ID NO: 5762 - DNA, 21 bp, Artificial Sequence
  primer
tgtaagttaaccaccaggccc

SEQ ID NO: 5763 - DNA, 38 bp, Artificial Sequence
  primer
gtaaaacgacggccagtggtggtgctcgtgtcttagtc

SEQ ID NO: 5764 - DNA, 21 bp, Artificial Sequence
  primer
tggaactttcaagtcgtgctc

SEQ ID NO: 5765 - DNA, 21 bp, Artificial Sequence
  primer
atcacttagctgccaccaagc

SEQ ID NO: 5766 - DNA, 38 bp, Artificial Sequence
  primer
gtaaaacgacggccagttttgtttcaggtgctccaaac

SEQ ID NO: 5767 - DNA, 38 bp, Artificial Sequence
  primer
gtaaaacgacggccagtggtcactgtggtcttcgtttg

SEQ ID NO: 5768 - DNA, 36 bp, Artificial Sequence
  primer
gtaaaacgacggccagtgggagggatccagaagctc

SEQ ID NO: 5769 - DNA, 22 bp, Artificial Sequence
  primer
ggacagctacattgaggaccag

SEQ ID NO: 5770 - DNA, 38 bp, Artificial Sequence
  primer
gtaaaacgacggccagtccaggatttattgagttggca

SEQ ID NO: 5771 - DNA, 21 bp, Artificial Sequence
  primer
agggagcattaggcagtgaag

SEQ ID NO: 5772 - DNA, 22 bp, Artificial Sequence
  primer
cattcagcagccttcatctacc

SEQ ID NO: 5773 - DNA, 22 bp, Artificial Sequence
  primer
gaggcaataactgcttcctgtc

SEQ ID NO: 5774 - DNA, 21 bp, Artificial Sequence
  primer
tgatcctgtttgtttggatgc

SEQ ID NO: 5775 - DNA, 20 bp, Artificial Sequence
  primer
ccagccatgctgcatttatc

SEQ ID NO: 5776 - DNA, 21 bp, Artificial Sequence
  primer
cactgcacttacacctgggag

SEQ ID NO: 5777 - DNA, 38 bp, Artificial Sequence
  primer
gtaaaacgacggccagtaaatcctttcattgactgggc

SEQ ID NO: 5778 - DNA, 21 bp, Artificial Sequence
  primer
gagaaggtgtgggtagatggg

SEQ ID NO: 5779 - DNA, 21 bp, Artificial Sequence
  primer
gtggttctgaagtggctgttg

SEQ ID NO: 5780 - DNA, 38 bp, Artificial Sequence
  primer
gtaaaacgacggccagttattgccaagatggagcaagc

SEQ ID NO: 5781 - DNA, 37 bp, Artificial Sequence
  primer
gtaaaacgacggccagtaaacccggagaatcatttgg

SEQ ID NO: 5782 - DNA, 38 bp, Artificial Sequence
  primer
gtaaaacgacggccagttccttctatgctaaccgcctc

SEQ ID NO: 5783 - DNA, 38 bp, Artificial Sequence
  primer
gtaaaacgacggccagtgcaccaaagaaagacagggtc

SEQ ID NO: 5784 - DNA, 21 bp, Artificial Sequence
  primer
gtctcggatctcatcgactcc

SEQ ID NO: 5785 - DNA, 21 bp, Artificial Sequence
  primer
tttgccaagaaagtccctgag

SEQ ID NO: 5786 - DNA, 38 bp, Artificial Sequence
  primer
gtaaaacgacggccagtaagcctgcatcagacatttcc

SEQ ID NO: 5787 - DNA, 38 bp, Artificial Sequence
  primer
gtaaaacgacggccagtactttcctgccaatgaacctc

SEQ ID NO: 5788 - DNA, 37 bp, Artificial Sequence
  primer
gtaaaacgacggccagtaagaccgttggcgtcttctc

SEQ ID NO: 5789 - DNA, 21 bp, Artificial Sequence
  primer
aagtcctgtgatgcttcgttg

SEQ ID NO: 5790 - DNA, 36 bp, Artificial Sequence
  primer
gtaaaacgacggccagtctctctgctccagccttgg

SEQ ID NO: 5791 - DNA, 21 bp, Artificial Sequence
  primer
gtaggagggcatggagagttg

SEQ ID NO: 5792 - DNA, 23 bp, Artificial Sequence
  primer
agattcttatccaaattgacccg

SEQ ID NO: 5793 - DNA, 38 bp, Artificial Sequence
  primer
gtaaaacgacggccagttgtacctcaggcctcactctg

SEQ ID NO: 5794 - DNA, 21 bp, Artificial Sequence
  primer
atttgtggagggaacttcgtc

SEQ ID NO: 5795 - DNA, 37 bp, Artificial Sequence
  primer
gtaaaacgacggccagtgttgctgccacttctgcttg

SEQ ID NO: 5796 - DNA, 38 bp, Artificial Sequence
  primer
gtaaaacgacggccagtcaaacaagctccctctgatcc

SEQ ID NO: 5797 - DNA, 21 bp, Artificial Sequence
  primer
ggcgaatatcacagagcatcc

SEQ ID NO: 5798 - DNA, 38 bp, Artificial Sequence
  primer
gtaaaacgacggccagttcaaagtccttcagctcctcc

SEQ ID NO: 5799 - DNA, 39 bp, Artificial Sequence
  primer
gtaaaacgacggccagtagtggagacaaacagatgtccc

SEQ ID NO: 5800 - DNA, 21 bp, Artificial Sequence
  primer
ttatgcaaatcaggtggcatc

SEQ ID NO: 5801 - DNA, 38 bp, Artificial Sequence
  primer
gtaaaacgacggccagttgctacagacatcatggaggc

SEQ ID NO: 5802 - DNA, 38 bp, Artificial Sequence
  primer
gtaaaacgacggccagtcaaagagggcctaaccatctg

SEQ ID NO: 5803 - DNA, 38 bp, Artificial Sequence
  primer
gtaaaacgacggccagtggagaaccaacacctggactc

SEQ ID NO: 5804 - DNA, 21 bp, Artificial Sequence
  primer
aaagcagcttccatgtccaac

SEQ ID NO: 5805 - DNA, 38 bp, Artificial Sequence
  primer
gtaaaacgacggccagttggtagaacttcgtccagcag

SEQ ID NO: 5806 - DNA, 38 bp, Artificial Sequence
  primer
gtaaaacgacggccagtcaagccatagagaaactgggc

SEQ ID NO: 5807 - DNA, 21 bp, Artificial Sequence
  primer
ctgatgtggcaaggaagtgtc

SEQ ID NO: 5808 - DNA, 21 bp, Artificial Sequence
  primer
caaaggctaagtcaacccagg

SEQ ID NO: 5809 - DNA, 22 bp, Artificial Sequence
  primer
gcccacttgaaacttcagaaac

SEQ ID NO: 5810 - DNA, 38 bp, Artificial Sequence
  primer
gtaaaacgacggccagtcaacaaattgtggaagaagcc

SEQ ID NO: 5811 - DNA, 24 bp, Artificial Sequence
  primer
caatcttgactgactcttgctttc

SEQ ID NO: 5812 - DNA, 38 bp, Artificial Sequence
  primer
gtaaaacgacggccagtatccaatgtgctactgttggc

SEQ ID NO: 5813 - DNA, 38 bp, Artificial Sequence
  primer
gtaaaacgacggccagtgtcaaaccacaagcaataggg

SEQ ID NO: 5814 - DNA, 38 bp, Artificial Sequence
  primer
gtaaaacgacggccagtgccggcttgattctctaacag

SEQ ID NO: 5815 - DNA, 21 bp, Artificial Sequence
  primer
cgaagagcaaccaggcttaac

SEQ ID NO: 5816 - DNA, 38 bp, Artificial Sequence
  primer
gtaaaacgacggccagtaagcctgagatgagcagaagc

SEQ ID NO: 5817 - DNA, 21 bp, Artificial Sequence
  primer
tacaaagagctcagcagtgcc

SEQ ID NO: 5818 - DNA, 21 bp, Artificial Sequence
  primer
agcagtgaatcctctgttggc

SEQ ID NO: 5819 - DNA, 21 bp, Artificial Sequence
  primer
aacccagaggagaaaccatcc

SEQ ID NO: 5820 - DNA, 20 bp, Artificial Sequence
  primer
tgggatcgatttgatcatgg

SEQ ID NO: 5821 - DNA, 37 bp, Artificial Sequence
  primer
gtaaaacgacggccagtattgggctgtgtggttcttg

SEQ ID NO: 5822 - DNA, 38 bp, Artificial Sequence
  primer
gtaaaacgacggccagttatggcaggtgatggtaatgg

SEQ ID NO: 5823 - DNA, 39 bp, Artificial Sequence
  primer
gtaaaacgacggccagttgatcccattaaatccaactcg

SEQ ID NO: 5824 - DNA, 37 bp, Artificial Sequence
  primer
gtaaaacgacggccagtctaagaggtggctgtgtcgc

SEQ ID NO: 5825 - DNA, 24 bp, Artificial Sequence
  primer
gcatcacaaattctgtgttcaatg

SEQ ID NO: 5826 - DNA, 20 bp, Artificial Sequence
  primer
ttccaggtggctctcgttac

SEQ ID NO: 5827 - DNA, 41 bp, Artificial Sequence
  primer
gtaaaacgacggccagtgagctcttcttgtcctattgttgg

SEQ ID NO: 5828 - DNA, 39 bp, Artificial Sequence
  primer
gtaaaacgacggccagtaattaggccgtctttcaagtcc

SEQ ID NO: 5829 - DNA, 37 bp, Artificial Sequence
  primer
gtaaaacgacggccagtttgatcctggcttgatggac

SEQ ID NO: 5830 - DNA, 21 bp, Artificial Sequence
  primer
tatcccttccttgaagcttgg

SEQ ID NO: 5831 - DNA, 38 bp, Artificial Sequence
  primer
gtaaaacgacggccagtcaggcagtgagagtggaattg

SEQ ID NO: 5832 - DNA, 38 bp, Artificial Sequence
  primer
gtaaaacgacggccagtctcagtcgtccatttcaccag

SEQ ID NO: 5833 - DNA, 38 bp, Artificial Sequence
  primer
gtaaaacgacggccagtggtgatttatttggattgggc

SEQ ID NO: 5834 - DNA, 20 bp, Artificial Sequence
  primer
aatcgaatgcatcgttcagg

SEQ ID NO: 5835 - DNA, 38 bp, Artificial Sequence
  primer
gtaaaacgacggccagtagctgtgcatcaaagatgagg

SEQ ID NO: 5836 - DNA, 23 bp, Artificial Sequence
  primer
tggcaatattgaaggtattccag

SEQ ID NO: 5837 - DNA, 42 bp, Artificial Sequence
  primer
gtaaaacgacggccagttttagatgattcaaatactgctggc

SEQ ID NO: 5838 - DNA, 21 bp, Artificial Sequence
  primer
aagcactgcctctactcccac

SEQ ID NO: 5839 - DNA, 38 bp, Artificial Sequence
  primer
gtaaaacgacggccagtgaaatcattgacatggcttcg

SEQ ID NO: 5840 - DNA, 38 bp, Artificial Sequence
  primer
gtaaaacgacggccagttccattgccactagacaccac

SEQ ID NO: 5841 - DNA, 40 bp, Artificial Sequence
  primer
gtaaaacgacggccagttgctcgcagactgtgctataaac

SEQ ID NO: 5842 - DNA, 44 bp, Artificial Sequence
  primer
gtaaaacgacggccagtaatttatattgaaatcagtgagctgag

SEQ ID NO: 5843 - DNA, 24 bp, Artificial Sequence
  primer
gaggtcctttacagaaatgtttgc

SEQ ID NO: 5844 - DNA, 23 bp, Artificial Sequence
  primer
aagctgtcccagtcaactatctg

SEQ ID NO: 5845 - DNA, 44 bp, Artificial Sequence
  primer
gtaaaacgacggccagtactggtactttgtatcttatttggttt

SEQ ID NO: 5846 - DNA, 21 bp, Artificial Sequence
  primer
ccacaggtgtgaaatcactgg

SEQ ID NO: 5847 - DNA, 26 bp, Artificial Sequence
  primer
tcaggttcaaagaaagtgatgtagtt

SEQ ID NO: 5848 - DNA, 21 bp, Artificial Sequence
  primer
aaagccaacccactgttcttg

SEQ ID NO: 5849 - DNA, 38 bp, Artificial Sequence
  primer
gtaaaacgacggccagtgttcctccttgaaggtagccc

SEQ ID NO: 5850 - DNA, 38 bp, Artificial Sequence
  primer
gtaaaacgacggccagttggtcttccagtagtcgatgg

SEQ ID NO: 5851 - DNA, 38 bp, Artificial Sequence
  primer
gtaaaacgacggccagttctaaggctggcactgaactg

SEQ ID NO: 5852 - DNA, 40 bp, Artificial Sequence
  primer
gtaaaacgacggccagttgctctgtaggagttgagtgagc

SEQ ID NO: 5853 - DNA, 38 bp, Artificial Sequence
  primer
gtaaaacgacggccagtagtgcagtgtgaagtgatgcc

SEQ ID NO: 5854 - DNA, 38 bp, Artificial Sequence
  primer
gtaaaacgacggccagtgcgtcgaggttatactgaggg

SEQ ID NO: 5855 - DNA, 21 bp, Artificial Sequence
  primer
ccctggaacgagctgaactac

SEQ ID NO: 5856 - DNA, 40 bp, Artificial Sequence
  primer
gtaaaacgacggccagttgtctgatcctacaacctccttg

SEQ ID NO: 5857 - DNA, 38 bp, Artificial Sequence
  primer
gtaaaacgacggccagtgacagatgtaggatgggtcgg

SEQ ID NO: 5858 - DNA, 21 bp, Artificial Sequence
  primer
gcaacctaggtcttgggtgag

SEQ ID NO: 5859 - DNA, 21 bp, Artificial Sequence
  primer
gggagtttggtgactactccg

SEQ ID NO: 5860 - DNA, 36 bp, Artificial Sequence
  primer
gtaaaacgacggccagtcagaggtgagctgatgccc

SEQ ID NO: 5861 - DNA, 36 bp, Artificial Sequence
  primer
gtaaaacgacggccagtcctagccctggcagttgag

SEQ ID NO: 5862 - DNA, 38 bp, Artificial Sequence
  primer
gtaaaacgacggccagtgatgtgctgacccatactccc

SEQ ID NO: 5863 - DNA, 38 bp, Artificial Sequence
  primer
gtaaaacgacggccagtgattcgcttctctgcataggg

SEQ ID NO: 5864 - DNA, 21 bp, Artificial Sequence
  primer
agtgtttcccttgtggactgc

SEQ ID NO: 5865 - DNA, 21 bp, Artificial Sequence
  primer
ctgaccggtgtttcctctttg

SEQ ID NO: 5866 - DNA, 21 bp, Artificial Sequence
  primer
cagcggttccttccaatagac

SEQ ID NO: 5867 - DNA, 37 bp, Artificial Sequence
  primer
gtaaaacgacggccagtgcctgctggcaatcctatac

SEQ ID NO: 5868 - DNA, 38 bp, Artificial Sequence
  primer
gtaaaacgacggccagttcctgggaataattgtctgcg

SEQ ID NO: 5869 - DNA, 21 bp, Artificial Sequence
  primer
gcttcagtggctagggtcttc

SEQ ID NO: 5870 - DNA, 21 bp, Artificial Sequence
  primer
cactggactagagcctccacc

SEQ ID NO: 5871 - DNA, 21 bp, Artificial Sequence
  primer
cggtcaggctatgactacagc

SEQ ID NO: 5872 - DNA, 20 bp, Artificial Sequence
  primer
ctggaagacctggaccacag

SEQ ID NO: 5873 - DNA, 21 bp, Artificial Sequence
  primer
gagcccactaggtggtactgg

SEQ ID NO: 5874 - DNA, 21 bp, Artificial Sequence
  primer
tctgtctatggagcaagcagc

SEQ ID NO: 5875 - DNA, 38 bp, Artificial Sequence
  primer
gtaaaacgacggccagtttgcttggacagctattctcg

SEQ ID NO: 5876 - DNA, 21 bp, Artificial Sequence
  primer
ctgtttcagggcttgtgtctg

SEQ ID NO: 5877 - DNA, 38 bp, Artificial Sequence
  primer
gtaaaacgacggccagtagtacgtaggcaccaagctcc

SEQ ID NO: 5878 - DNA, 20 bp, Artificial Sequence
  primer
gagttgaggaggagctggtg

SEQ ID NO: 5879 - DNA, 37 bp, Artificial Sequence
  primer
gtaaaacgacggccagtgttccatgcttgtggagtgg

SEQ ID NO: 5880 - DNA, 38 bp, Artificial Sequence
  primer
gtaaaacgacggccagtctacctgaaggtgaggcactg

SEQ ID NO: 5881 - DNA, 38 bp, Artificial Sequence
  primer
gtaaaacgacggccagttccaaatcgacctttcctttc

SEQ ID NO: 5882 - DNA, 21 bp, Artificial Sequence
  primer
aagagagactcccaaagctgc

SEQ ID NO: 5883 - DNA, 25 bp, Artificial Sequence
  primer
gaccctgtatgaaagtacctcttga

SEQ ID NO: 5884 - DNA, 38 bp, Artificial Sequence
  primer
gtaaaacgacggccagtgatttgtgaggaatgattggc

SEQ ID NO: 5885 - DNA, 39 bp, Artificial Sequence
  primer
gtaaaacgacggccagttggaccttgctatggatttcag

SEQ ID NO: 5886 - DNA, 43 bp, Artificial Sequence
  primer
gtaaaacgacggccagtaagtgtaagaattatgccaatgtgtt

SEQ ID NO: 5887 - DNA, 36 bp, Artificial Sequence
  primer
gtaaaacgacggccagtcccaaaggtgtctgttccc

SEQ ID NO: 5888 - DNA, 38 bp, Artificial Sequence
  primer
gtaaaacgacggccagtagttagaacaactccgggcag

SEQ ID NO: 5889 - DNA, 43 bp, Artificial Sequence
  primer
gtaaaacgacggccagtgagagctagacagacaatagctgaac

SEQ ID NO: 5890 - DNA, 22 bp, Artificial Sequence
  primer
gacagaatggctgaatcacaag

SEQ ID NO: 5891 - DNA, 43 bp, Artificial Sequence
  primer
gtaaaacgacggccagtagatggtttacagaatgaaatgagtc

SEQ ID NO: 5892 - DNA, 24 bp, Artificial Sequence
  primer
cctgttagccaagaagaaagattg

SEQ ID NO: 5893 - DNA, 40 bp, Artificial Sequence
  primer
gtaaaacgacggccagtggagtatgcttgccttctcaaag

SEQ ID NO: 5894 - DNA, 21 bp, Artificial Sequence
  primer
aaacattggaaatgggtgagg

SEQ ID NO: 5895 - DNA, 21 bp, Artificial Sequence
  primer
gttgtgaccatgacaagcagg

SEQ ID NO: 5896 - DNA, 21 bp, Artificial Sequence
  primer
gtagatcaatgcaacagcacg

SEQ ID NO: 5897 - DNA, 40 bp, Artificial Sequence
  primer
gtaaaacgacggccagtggagcttccagttgaaacataag

SEQ ID NO: 5898 - DNA, 40 bp, Artificial Sequence
  primer
gtaaaacgacggccagtgccttgcatctaggagaattatg

SEQ ID NO: 5899 - DNA, 41 bp, Artificial Sequence
  primer
gtaaaacgacggccagtttatctttgtagcaggcatttcac

SEQ ID NO: 5900 - DNA, 42 bp, Artificial Sequence
  primer
gtaaaacgacggccagtgagaacagggaataacttagaaggg

SEQ ID NO: 5901 - DNA, 44 bp, Artificial Sequence
  primer
gtaaaacgacggccagtttctgtacacagtgattgtgctatttc

SEQ ID NO: 5902 - DNA, 43 bp, Artificial Sequence
  primer
gtaaaacgacggccagtttgcaatacctataaccctagactca

SEQ ID NO: 5903 - DNA, 38 bp, Artificial Sequence
  primer
gtaaaacgacggccagttttgcatctttaagttcacgg

SEQ ID NO: 5904 - DNA, 36 bp, Artificial Sequence
  primer
gtaaaacgacggccagttagaaccgtgaggccatgc

SEQ ID NO: 5905 - DNA, 27 bp, Artificial Sequence
  primer
caaactgaactgtctagaatatctggg

SEQ ID NO: 5906 - DNA, 46 bp, Artificial Sequence
  primer
gtaaaacgacggccagttcgtatttgtttacaatattaatgctgac

SEQ ID NO: 5907 - DNA, 21 bp, Artificial Sequence
  primer
agtagaaccagggcctgttgg

SEQ ID NO: 5908 - DNA, 21 bp, Artificial Sequence
  primer
agcatggataatttgaaccca

SEQ ID NO: 5909 - DNA, 42 bp, Artificial Sequence
  primer
gtaaaacgacggccagtgcactttattgtagatgctattggg

SEQ ID NO: 5910 - DNA, 25 bp, Artificial Sequence
  primer
ccatgatttccagtttagtttgatg

SEQ ID NO: 5911 - DNA, 42 bp, Artificial Sequence
  primer
gtaaaacgacggccagtttccagctttaatagggaatgaaac

SEQ ID NO: 5912 - DNA, 21 bp, Artificial Sequence
  primer
tgagcagcaaattcattcaag

SEQ ID NO: 5913 - DNA, 39 bp, Artificial Sequence
  primer
gtaaaacgacggccagtctcagcctttcatgaacgtaaa

SEQ ID NO: 5914 - DNA, 22 bp, Artificial Sequence
  primer
ttccatgatcatcagtcctttg

SEQ ID NO: 5915 - DNA, 22 bp, Artificial Sequence
  primer
ccagcctgggtaacataatgag

SEQ ID NO: 5916 - DNA, 20 bp, Artificial Sequence
  primer
tggagaaacaggattgctgc

SEQ ID NO: 5917 - DNA, 47 bp, Artificial Sequence
  primer
gtaaaacgacggccagtcatgcatactttgtaaagctaatatagcac

SEQ ID NO: 5918 - DNA, 44 bp, Artificial Sequence
  primer
gtaaaacgacggccagtcatttgtacgttataggctctgatttc

SEQ ID NO: 5919 - DNA, 39 bp, Artificial Sequence
  primer
gtaaaacgacggccagtgagccttgtttgatatgatggg

SEQ ID NO: 5920 - DNA, 42 bp, Artificial Sequence
  primer
gtaaaacgacggccagttgagtgatcaagaatgtgtgaagag

SEQ ID NO: 5921 - DNA, 21 bp, Artificial Sequence
  primer
tgaatgctcattccctctcag

SEQ ID NO: 5922 - DNA, 40 bp, Artificial Sequence
  primer
gtaaaacgacggccagttgagagcactgttagtgcaaagg

SEQ ID NO: 5923 - DNA, 39 bp, Artificial Sequence
  primer
gtaaaacgacggccagtcaaatccaacttgaggcagttc

SEQ ID NO: 5924 - DNA, 21 bp, Artificial Sequence
  primer
ctgtaggcagtcattccttgg

SEQ ID NO: 5925 - DNA, 39 bp, Artificial Sequence
  primer
gtaaaacgacggccagttgaattacattcctcccacacc

SEQ ID NO: 5926 - DNA, 37 bp, Artificial Sequence
  primer
gtaaaacgacggccagttgattacagcacgggaaacc

SEQ ID NO: 5927 - DNA, 21 bp, Artificial Sequence
  primer
gattacagcacgggaaaccag

SEQ ID NO: 5928 - DNA, 38 bp, Artificial Sequence
  primer
gtaaaacgacggccagtgcattcagtaatgttgggctg

SEQ ID NO: 5929 - DNA, 42 bp, Artificial Sequence
  primer
gtaaaacgacggccagtaaagaagtacacatgctcctaggct

SEQ ID NO: 5930 - DNA, 26 bp, Artificial Sequence
  primer
tgtgtgttccattcattcttctttag

SEQ ID NO: 5931 - DNA, 43 bp, Artificial Sequence
  primer
gtaaaacgacggccagtttcatgtttcctttgaagtaatctcc

SEQ ID NO: 5932 - DNA, 29 bp, Artificial Sequence
  primer
tttcctcttagctagtttattatatgcct

SEQ ID NO: 5933 - DNA, 23 bp, Artificial Sequence
  primer
tcagaaacaaaggaatcttcagc

SEQ ID NO: 5934 - DNA, 22 bp, Artificial Sequence
  primer
cccagttgtcagaagaacaagg

SEQ ID NO: 5935 - DNA, 44 bp, Artificial Sequence
  primer
gtaaaacgacggccagtaattgtgttcccttaagatagactgtg

SEQ ID NO: 5936 - DNA, 38 bp, Artificial Sequence
  primer
gtaaaacgacggccagtgaagtagaacgtcgcctgctc

SEQ ID NO: 5937 - DNA, 38 bp, Artificial Sequence
  primer
gtaaaacgacggccagtgaattctgttgttctcggtgc

SEQ ID NO: 5938 - DNA, 38 bp, Artificial Sequence
  primer
gtaaaacgacggccagtttggctttgaactttgtctgg

SEQ ID NO: 5939 - DNA, 37 bp, Artificial Sequence
  primer
gtaaaacgacggccagtacagtgataggaacctgccg

SEQ ID NO: 5940 - DNA, 21 bp, Artificial Sequence
  primer
gtccctattcttccgttccag

SEQ ID NO: 5941 - DNA, 27 bp, Artificial Sequence
  primer
tctcatctacttagagctaaggtcttt

SEQ ID NO: 5942 - DNA, 38 bp, Artificial Sequence
  primer
gtaaaacgacggccagtgagtggaggcaggttggtaac

SEQ ID NO: 5943 - DNA, 22 bp, Artificial Sequence
  primer
ggcaacagagtaacactccacc

SEQ ID NO: 5944 - DNA, 37 bp, Artificial Sequence
  primer
gtaaaacgacggccagtaggaaccagcggtgactctg

SEQ ID NO: 5945 - DNA, 38 bp, Artificial Sequence
  primer
gtaaaacgacggccagtaagttacaagggtgggtgcag

SEQ ID NO: 5946 - DNA, 21 bp, Artificial Sequence
  primer
ctcggaagtctggaggttgag

SEQ ID NO: 5947 - DNA, 21 bp, Artificial Sequence
  primer
gaactggaggcagtgttgctc

SEQ ID NO: 5948 - DNA, 21 bp, Artificial Sequence
  primer
attccaggactcctcagctcc

SEQ ID NO: 5949 - DNA, 23 bp, Artificial Sequence
  primer
aactacccactccctgatttctc

SEQ ID NO: 5950 - DNA, 21 bp, Artificial Sequence
  primer
ctatcagggtctcccagcaag

SEQ ID NO: 5951 - DNA, 38 bp, Artificial Sequence
  primer
gtaaaacgacggccagtgctcctgaatgaagatgaggc

SEQ ID NO: 5952 - DNA, 38 bp, Artificial Sequence
  primer
gtaaaacgacggccagtgacgttcagcctcagtccttc

SEQ ID NO: 5953 - DNA, 38 bp, Artificial Sequence
  primer
gtaaaacgacggccagtttaccaaggcatagatgtggc

SEQ ID NO: 5954 - DNA, 38 bp, Artificial Sequence
  primer
gtaaaacgacggccagtgcctgtatcttgcatgaaccc

SEQ ID NO: 5955 - DNA, 38 bp, Artificial Sequence
  primer
gtaaaacgacggccagtttcccaatggaaccttctttc

SEQ ID NO: 5956 - DNA, 38 bp, Artificial Sequence
  primer
gtaaaacgacggccagtcacacagcccagtctccatag

SEQ ID NO: 5957 - DNA, 22 bp, Artificial Sequence
  primer
gctgcagatggagcaagtttac

SEQ ID NO: 5958 - DNA, 37 bp, Artificial Sequence
  primer
gtaaaacgacggccagtctgactccagagcttgtgcc

SEQ ID NO: 5959 - DNA, 38 bp, Artificial Sequence
  primer
gtaaaacgacggccagtgctggtagccagattcttgtg

SEQ ID NO: 5960 - DNA, 38 bp, Artificial Sequence
  primer
gtaaaacgacggccagtgcttattgggttagcatgtgg

SEQ ID NO: 5961 - DNA, 21 bp, Artificial Sequence
  primer
acctgcacaagtgtgagcttg

SEQ ID NO: 5962 - DNA, 36 bp, Artificial Sequence
  primer
gtaaaacgacggccagtatcctggcatactcgggtg

SEQ ID NO: 5963 - DNA, 23 bp, Artificial Sequence
  primer
ttccatcgtgttagaagcatttc

SEQ ID NO: 5964 - DNA, 38 bp, Artificial Sequence
  primer
gtaaaacgacggccagtaactcatggcatacccactcc

SEQ ID NO: 5965 - DNA, 21 bp, Artificial Sequence
  primer
acacaaagatgttcggtgacg

SEQ ID NO: 5966 - DNA, 38 bp, Artificial Sequence
  primer
gtaaaacgacggccagtatgtcatcacccagatggagg

SEQ ID NO: 5967 - DNA, 20 bp, Artificial Sequence
  primer
gtagggcctgtccagctctc

SEQ ID NO: 5968 - DNA, 20 bp, Artificial Sequence
  primer
ccagctgggatttagaaggg

SEQ ID NO: 5969 - DNA, 38 bp, Artificial Sequence
  primer
gtaaaacgacggccagtgcgctttgcagtattcttgac

SEQ ID NO: 5970 - DNA, 22 bp, Artificial Sequence
  primer
tgcctgttatatttctgagccc

SEQ ID NO: 5971 - DNA, 38 bp, Artificial Sequence
  primer
gtaaaacgacggccagtccagttcctctcccagagttg

SEQ ID NO: 5972 - DNA, 21 bp, Artificial Sequence
  primer
gggacatagagtggctggatg

SEQ ID NO: 5973 - DNA, 38 bp, Artificial Sequence
  primer
gtaaaacgacggccagtagagaatgaaattgccgatgg

SEQ ID NO: 5974 - DNA, 38 bp, Artificial Sequence
  primer
gtaaaacgacggccagtatatttcccatttcagcaggg

SEQ ID NO: 5975 - DNA, 38 bp, Artificial Sequence
  primer
gtaaaacgacggccagttttcttggccctgactctacc

SEQ ID NO: 5976 - DNA, 21 bp, Artificial Sequence
  primer
gggtttggtgctagaatggtg

SEQ ID NO: 5977 - DNA, 38 bp, Artificial Sequence
  primer
gtaaaacgacggccagtactaggaccaggcggaagaag

SEQ ID NO: 5978 - DNA, 37 bp, Artificial Sequence
  primer
gtaaaacgacggccagtcaggctggtcagcaggtatc

SEQ ID NO: 5979 - DNA, 38 bp, Artificial Sequence
  primer
gtaaaacgacggccagtgactgctctgtctttccagcc

SEQ ID NO: 5980 - DNA, 21 bp, Artificial Sequence
  primer
tagccagctgtggtggtttag

SEQ ID NO: 5981 - DNA, 21 bp, Artificial Sequence
  primer
actgaagagtgagggcaggac

SEQ ID NO: 5982 - DNA, 40 bp, Artificial Sequence
  primer
gtaaaacgacggccagtgggagggactttagcataggaag

SEQ ID NO: 5983 - DNA, 21 bp, Artificial Sequence
  primer
tgaggtcgatgggaggattag

SEQ ID NO: 5984 - DNA, 21 bp, Artificial Sequence
  primer
cctctctgatcacctgtggag

SEQ ID NO: 5985 - DNA, 21 bp, Artificial Sequence
  primer
caaagccatggaagacatctg

SEQ ID NO: 5986 - DNA, 38 bp, Artificial Sequence
  primer
gtaaaacgacggccagtagcttgttgcctctgaggttc

SEQ ID NO: 5987 - DNA, 20 bp, Artificial Sequence
  primer
ccttggcaacagtgcaagac

SEQ ID NO: 5988 - DNA, 20 bp, Artificial Sequence
  primer
ttgaacctgggagtgtgagg

SEQ ID NO: 5989 - DNA, 38 bp, Artificial Sequence
  primer
gtaaaacgacggccagtgcttgtggtgggttagatgag

SEQ ID NO: 5990 - DNA, 40 bp, Artificial Sequence
  primer
gtaaaacgacggccagtgcagcaaatcttaaagtcaagcc

SEQ ID NO: 5991 - DNA, 38 bp, Artificial Sequence
  primer
gtaaaacgacggccagttgcttcggctaaccctgttac

SEQ ID NO: 5992 - DNA, 21 bp, Artificial Sequence
  primer
tctcacgggtgatttagcaag

SEQ ID NO: 5993 - DNA, 38 bp, Artificial Sequence
  primer
gtaaaacgacggccagtatatttccagttcagccaccc

SEQ ID NO: 5994 - DNA, 37 bp, Artificial Sequence
  primer
gtaaaacgacggccagtgcgattgtacctgaagccac

SEQ ID NO: 5995 - DNA, 38 bp, Artificial Sequence
  primer
gtaaaacgacggccagtttgtatcccgtggacagaatg

SEQ ID NO: 5996 - DNA, 21 bp, Artificial Sequence
  primer
gcaccctccttatgttcttgc

SEQ ID NO: 5997 - DNA, 38 bp, Artificial Sequence
  primer
gtaaaacgacggccagtgggatgggctcatgattctac

SEQ ID NO: 5998 - DNA, 44 bp, Artificial Sequence
  primer
gtaaaacgacggccagtaatgtctaaatattaggtggagcaaac

SEQ ID NO: 5999 - DNA, 38 bp, Artificial Sequence
  primer
gtaaaacgacggccagtctggagcactgcatcacctac

SEQ ID NO: 6000 - DNA, 38 bp, Artificial Sequence
  primer
gtaaaacgacggccagtaatctctccagtttcccaagg

SEQ ID NO: 6001 - DNA, 38 bp, Artificial Sequence
  primer
gtaaaacgacggccagtcgtgtctcgttctagtggtcg

SEQ ID NO: 6002 - DNA, 21 bp, Artificial Sequence
  primer
gggaagaatttgcatttctga

SEQ ID NO: 6003 - DNA, 21 bp, Artificial Sequence
  primer
atgtgttaagttccaggcagg

SEQ ID NO: 6004 - DNA, 37 bp, Artificial Sequence
  primer
gtaaaacgacggccagttttgtgaacgttgctgcttg

SEQ ID NO: 6005 - DNA, 44 bp, Artificial Sequence; identical to SEQ ID NO: 5998
  primer

SEQ ID NO: 6006 - DNA, 38 bp, Artificial Sequence
  primer
gtaaaacgacggccagtcctcatggaggattagtgtcc

SEQ ID NO: 6007 - DNA, 40 bp, Artificial Sequence
  primer
gtaaaacgacggccagttgtcacgtctagacagttgttgc

SEQ ID NO: 6008 - DNA, 38 bp, Artificial Sequence
  primer
gtaaaacgacggccagtaattggccgtgtctccttcta

SEQ ID NO: 6009 - DNA, 21 bp, Artificial Sequence
  primer
gatcccatcgagaagaaccat

SEQ ID NO: 6010 - DNA, 21 bp, Artificial Sequence
  primer
tgacagatgtgggatctgttg

SEQ ID NO: 6011 - DNA, 21 bp, Artificial Sequence
  primer
acctcctcctacatgccattg

SEQ ID NO: 6012 - DNA, 38 bp, Artificial Sequence
  primer
gtaaaacgacggccagtagtcaatgcttgtgcctgaac

SEQ ID NO: 6013 - DNA, 39 bp, Artificial Sequence
  primer
gtaaaacgacggccagtgagccaaaggaatcatgagaag

SEQ ID NO: 6014 - DNA, 38 bp, Artificial Sequence
  primer
gtaaaacgacggccagttggagcattgtaccacctgtc

SEQ ID NO: 6015 - DNA, 39 bp, Artificial Sequence
  primer
gtaaaacgacggccagtcagttctgtcttgcatttaccg

SEQ ID NO: 6016 - DNA, 23 bp, Artificial Sequence
  primer
ggaagccaggatctgattcatag

SEQ ID NO: 6017 - DNA, 21 bp, Artificial Sequence
  primer
tgcagagtggatgccttagtc

SEQ ID NO: 6018 - DNA, 21 bp, Artificial Sequence
  primer
tcgtgagctattcattgaccc

SEQ ID NO: 6019 - DNA, 42 bp, Artificial Sequence
  primer
gtaaaacgacggccagtccatgttcataaaggtaagaaaggc

SEQ ID NO: 6020 - DNA, 38 bp, Artificial Sequence
  primer
gtaaaacgacggccagtacttgcttcctcctacatgcc

SEQ ID NO: 6021 - DNA, 38 bp, Artificial Sequence
  primer
gtaaaacgacggccagtaacgggtcatagtcccacaac

SEQ ID NO: 6022 - DNA, 38 bp, Artificial Sequence
  primer
gtaaaacgacggccagtttgccagaggtcatctgtttg

SEQ ID NO: 6023 - DNA, 37 bp, Artificial Sequence
  primer
gtaaaacgacggccagtgtacgtgaaacacttggccc

SEQ ID NO: 6024 - DNA, 21 bp, Artificial Sequence
  primer
gaagacagatattcctcccgc

SEQ ID NO: 6025 - DNA, 22 bp, Artificial Sequence
  primer
tggctctggttcatagagttgc

SEQ ID NO: 6026 - DNA, 38 bp, Artificial Sequence
  primer
gtaaaacgacggccagtgctctggtgcagaatgaacac

SEQ ID NO: 6027 - DNA, 23 bp, Artificial Sequence
  primer
cataaggtcaacttcgttccatc

SEQ ID NO: 6028 - DNA, 21 bp, Artificial Sequence
  primer
gtgataaattccaggcaaggg

SEQ ID NO: 6029 - DNA, 38 bp, Artificial Sequence
  primer
gtaaaacgacggccagtcaaataaagaacgcaggagcc

SEQ ID NO: 6030 - DNA, 38 bp, Artificial Sequence
  primer
gtaaaacgacggccagtgtcactgaaacccgtgtcatc

SEQ ID NO: 6031 - DNA, 23 bp, Artificial Sequence
  primer
ggaaatctcagtatcccagcaag

SEQ ID NO: 6032 - DNA, 38 bp, Artificial Sequence
  primer
gtaaaacgacggccagtactttctttcgggcagaattg

SEQ ID NO: 6033 - DNA, 38 bp, Artificial Sequence
  primer
gtaaaacgacggccagtctggccttcctttctttgatg

SEQ ID NO: 6034 - DNA, 38 bp, Artificial Sequence
  primer
gtaaaacgacggccagtaacagcaaggaattgggaatg

SEQ ID NO: 6035 - DNA, 22 bp, Artificial Sequence
  primer
gcttgagcccaggagttaaaga

SEQ ID NO: 6036 - DNA, 21 bp, Artificial Sequence
  primer
catgggcaggtgtcttaatcc

SEQ ID NO: 6037 - DNA, 42 bp, Artificial Sequence
  primer
gtaaaacgacggccagtttcgcaagatgcttattaacatacc

SEQ ID NO: 6038 - DNA, 22 bp, Artificial Sequence
  primer
gaagggacagactaggacacga

SEQ ID NO: 6039 - DNA, 38 bp, Artificial Sequence
  primer
gtaaaacgacggccagtactgggtgaatgggaagacag

SEQ ID NO: 6040 - DNA, 21 bp, Artificial Sequence
  primer
ttgtggtttcagagcatttgg

SEQ ID NO: 6041 - DNA, 37 bp, Artificial Sequence
  primer
gtaaaacgacggccagtgaggctgtccagagcttcag

SEQ ID NO: 6042 - DNA, 23 bp, Artificial Sequence
  primer
cagatcatacaattgaggccaag

SEQ ID NO: 6043 - DNA, 38 bp, Artificial Sequence
  primer
gtaaaacgacggccagtactcatgagagcagaggcacc

SEQ ID NO: 6044 - DNA, 38 bp, Artificial Sequence
  primer
gtaaaacgacggccagttttgaaagtggaaggcaacag

SEQ ID NO: 6045 - DNA, 38 bp, Artificial Sequence
  primer
gtaaaacgacggccagtgcccagaatttatgaagcagg

SEQ ID NO: 6046 - DNA, 21 bp, Artificial Sequence
  primer
ccagcaaagtgggagacctat

SEQ ID NO: 6047 - DNA, 38 bp, Artificial Sequence
  primer
gtaaaacgacggccagtggcaccttaagtcctttctgg

SEQ ID NO: 6048 - DNA, 35 bp, Artificial Sequence
  primer
gtaaaacgacggccagtctccgagcctggtgcttc

SEQ ID NO: 6049 - DNA, 36 bp, Artificial Sequence
  primer
gtaaaacgacggccagttgatttgcctgcctcagtc

SEQ ID NO: 6050 - DNA, 38 bp, Artificial Sequence
  primer
gtaaaacgacggccagtctgctgctctccttatcctga

SEQ ID NO: 6051 - DNA, 38 bp, Artificial Sequence
  primer
gtaaaacgacggccagttgggcataagcttctttcacc

SEQ ID NO: 6052 - DNA, 38 bp, Artificial Sequence
  primer
gtaaaacgacggccagtggtcaaagacgtaaaggctgc

SEQ ID NO: 6053 - DNA, 21 bp, Artificial Sequence
  primer
tggctagagagaacacctgcc

SEQ ID NO: 6054 - DNA, 38 bp, Artificial Sequence; identical to SEQ ID NO: 4907
  primer

SEQ ID NO: 6055 - DNA, 38 bp, Artificial Sequence
  primer
gtaaaacgacggccagtgagagcttagagggatggcag

SEQ ID NO: 6056 - DNA, 39 bp, Artificial Sequence
  primer
gtaaaacgacggccagtcctaagaaacagctcccgtacc

SEQ ID NO: 6057 - DNA, 38 bp, Artificial Sequence
  primer
gtaaaacgacggccagtttggagagaggaagagatggg

SEQ ID NO: 6058 - DNA, 37 bp, Artificial Sequence
  primer
gtaaaacgacggccagtcagaccaggtcaagtggtgg

SEQ ID NO: 6059 - DNA, 38 bp, Artificial Sequence
  primer
gtaaaacgacggccagtagtaggccaccaggtgtgaag

SEQ ID NO: 6060 - DNA, 21 bp, Artificial Sequence
  primer
aaggtgatcctggtgaaggag

SEQ ID NO: 6061 - DNA, 38 bp, Artificial Sequence
  primer
gtaaaacgacggccagtggtatcaagcagcgtggtgtc

SEQ ID NO: 6062 - DNA, 38 bp, Artificial Sequence
  primer
gtaaaacgacggccagtttcctgctgagttagggcttc

SEQ ID NO: 6063 - DNA, 21 bp, Artificial Sequence
  primer
ggagaagaacgtggtgtaccg

SEQ ID NO: 6064 - DNA, 38 bp, Artificial Sequence
  primer
gtaaaacgacggccagtaatgctgtgtcctctctgtgc

SEQ ID NO: 6065 - DNA, 38 bp, Artificial Sequence
  primer
gtaaaacgacggccagtgccctacatcacaggaggaag

SEQ ID NO: 6066 - DNA, 38 bp, Artificial Sequence
  primer
gtaaaacgacggccagtgatccaggtgctttgaaggtc

SEQ ID NO: 6067 - DNA, 21 bp, Artificial Sequence
  primer
tgctttaagaggttggcttcc

SEQ ID NO: 6068 - DNA, 19 bp, Artificial Sequence
  primer
gagggtggtgagtgccatc

SEQ ID NO: 6069 - DNA, 38 bp, Artificial Sequence
  primer
gtaaaacgacggccagtggtgaaggaaatgggtctcag

SEQ ID NO: 6070 - DNA, 20 bp, Artificial Sequence
  primer
gtgagtgtcccaggctgttc

SEQ ID NO: 6071 - DNA, 21 bp, Artificial Sequence
  primer
gtgctagaagtgggcttggag

SEQ ID NO: 6072 - DNA, 38 bp, Artificial Sequence
  primer
gtaaaacgacggccagttcttgtcttgcagactgtgcc

SEQ ID NO: 6073 - DNA, 21 bp, Artificial Sequence
  primer
ttgtgagtcaccgtcacactg

SEQ ID NO: 6074 - DNA, 21 bp, Artificial Sequence
  primer
ggcttctctccttccacacac

SEQ ID NO: 6075 - DNA, 21 bp, Artificial Sequence
  primer
cccttcagctctctctggttc

SEQ ID NO: 6076 - DNA, 21 bp, Artificial Sequence
  primer
gttggtgaagacctggctacc

SEQ ID NO: 6077 - DNA, 21 bp, Artificial Sequence
  primer
atggaattgcatttcacaagg

SEQ ID NO: 6078 - DNA, 21 bp, Artificial Sequence
  primer
catgtaaccctttcctaccgc

SEQ ID NO: 6079 - DNA, 38 bp, Artificial Sequence
  primer
gtaaaacgacggccagtccctctagctgtcacttgctg

SEQ ID NO: 6080 - DNA, 21 bp, Artificial Sequence
  primer
gttggatctggcctctctctg

SEQ ID NO: 6081 - DNA, 21 bp, Artificial Sequence
  primer
gtaggaacgtgtgaggccaag

SEQ ID NO: 6082 - DNA, 21 bp, Artificial Sequence
  primer
atcattaagggccatacaggg

SEQ ID NO: 6083 - DNA, 38 bp, Artificial Sequence
  primer
gtaaaacgacggccagtgtggtccagaagaaggtgagc

SEQ ID NO: 6084 - DNA, 38 bp, Artificial Sequence
  primer
gtaaaacgacggccagtacaggaaactcccagaggagg

SEQ ID NO: 6085 - DNA, 39 bp, Artificial Sequence
  primer
gtaaaacgacggccagtcaatacttccttccaggctgag

SEQ ID NO: 6086 - DNA, 24 bp, Artificial Sequence
  primer
aatggtgcaaatgaattatcaaag

SEQ ID NO: 6087 - DNA, 37 bp, Artificial Sequence
  primer
gtaaaacgacggccagtaagctgtgagttcgcactgg

SEQ ID NO: 6088 - DNA, 25 bp, Artificial Sequence
  primer
tggtgagagtgtatgcttatctgtg

SEQ ID NO: 6089 - DNA, 20 bp, Artificial Sequence
  primer
agccaatgccagtctgattc

SEQ ID NO: 6090 - DNA, 21 bp, Artificial Sequence
  primer
tttggtggagagaatgctgag

SEQ ID NO: 6091 - DNA, 21 bp, Artificial Sequence
  primer
cagcttcaaatcaatggcaaa

SEQ ID NO: 6092 - DNA, 41 bp, Artificial Sequence
  primer
gtaaaacgacggccagtcacaatatggtgatgagaggtgtt

SEQ ID NO: 6093 - DNA, 38 bp, Artificial Sequence
  primer
gtaaaacgacggccagtcacgtgaagcaacagagtttg

SEQ ID NO: 6094 - DNA, 43 bp, Artificial Sequence
  primer
gtaaaacgacggccagttcaagatctcagactacctaggcttt

SEQ ID NO: 6095 - DNA, 44 bp, Artificial Sequence
  primer
gtaaaacgacggccagttttagagctatttatcccaagaactgt

SEQ ID NO: 6096 - DNA, 21 bp, Artificial Sequence
  primer
atcatgtctcccttacccagc

SEQ ID NO: 6097 - DNA, 23 bp, Artificial Sequence
  primer
gatgaacacaagtttatgggagc

SEQ ID NO: 6098 - DNA, 38 bp, Artificial Sequence
  primer
gtaaaacgacggccagtggtgcgttgtggcatattaag

SEQ ID NO: 6099 - DNA, 20 bp, Artificial Sequence
  primer
agggaccatgtctcatgtgc

SEQ ID NO: 6100 - DNA, 38 bp, Artificial Sequence
  primer
gtaaaacgacggccagtacactggatcccatcctcctc

SEQ ID NO: 6101 - DNA, 22 bp, Artificial Sequence
  primer
ttccctcctatttagtggatgc

SEQ ID NO: 6102 - DNA, 20 bp, Artificial Sequence
  primer
agggctatgctctgtgatgg

SEQ ID NO: 6103 - DNA, 38 bp, Artificial Sequence
  primer
gtaaaacgacggccagtctacacctcccatggtcactg

SEQ ID NO: 6104 - DNA, 21 bp, Artificial Sequence
  primer
gtcatctgtcctgaagggctc

SEQ ID NO: 6105 - DNA, 21 bp, Artificial Sequence
  primer
ccatttaaacctctgggcctc

SEQ ID NO: 6106 - DNA, 37 bp, Artificial Sequence
  primer
gtaaaacgacggccagtgcttcctgtttctatggccc

SEQ ID NO: 6107 - DNA, 38 bp, Artificial Sequence
  primer
gtaaaacgacggccagtagggatgcagctaagtcaagc

SEQ ID NO: 6108 - DNA, 38 bp, Artificial Sequence
  primer
gtaaaacgacggccagtgatggtcacagattgagcagg

SEQ ID NO: 6109 - DNA, 21 bp, Artificial Sequence
  primer
gctgtgcttcttcatggtagc

SEQ ID NO: 6110 - DNA, 38 bp, Artificial Sequence
  primer
gtaaaacgacggccagtgagcttgcagtgatatttgcc

SEQ ID NO: 6111 - DNA, 38 bp, Artificial Sequence
  primer
gtaaaacgacggccagtacacttgtgtctggatggtgg

SEQ ID NO: 6112 - DNA, 39 bp, Artificial Sequence
  primer
gtaaaacgacggccagttttgtgaactaggccataagcc

SEQ ID NO: 6113 - DNA, 38 bp, Artificial Sequence
  primer
gtaaaacgacggccagtttgccaagctgagacttgttg

SEQ ID NO: 6114 - DNA, 39 bp, Artificial Sequence
  primer
gtaaaacgacggccagttcaacatgtttcagtctcctgg

SEQ ID NO: 6115 - DNA, 38 bp, Artificial Sequence
  primer
gtaaaacgacggccagtttcaaagcatcatttccaagg

SEQ ID NO: 6116 - DNA, 23 bp, Artificial Sequence
  primer
gctgtgtagtattgcattctgcc

SEQ ID NO: 6117 - DNA, 21 bp, Artificial Sequence
  primer
aagtcagtgctttgaggctcc

SEQ ID NO: 6118 - DNA, 38 bp, Artificial Sequence
  primer
gtaaaacgacggccagtagtctggtcttgagcctgagc

SEQ ID NO: 6119 - DNA, 23 bp, Artificial Sequence
  primer
tgtttatccgtctattggtggac

SEQ ID NO: 6120 - DNA, 38 bp, Artificial Sequence
  primer
gtaaaacgacggccagtaagacgaggatcaaaggcttg

SEQ ID NO: 6121 - DNA, 38 bp, Artificial Sequence
  primer
gtaaaacgacggccagtgcctgagatagggctttaggg

SEQ ID NO: 6122 - DNA, 38 bp, Artificial Sequence
  primer
gtaaaacgacggccagtcgctgtagaagctgcccttac

SEQ ID NO: 6123 - DNA, 42 bp, Artificial Sequence
  primer
gtaaaacgacggccagtaaaggatggctgaatgaagtagtag

SEQ ID NO: 6124 - DNA, 38 bp, Artificial Sequence
  primer
gtaaaacgacggccagtcaacattgactcccatcaagg

SEQ ID NO: 6125 - DNA, 38 bp, Artificial Sequence
  primer
gtaaaacgacggccagtagcaaggtcttcaaagggaag

SEQ ID NO: 6126 - DNA, 39 bp, Artificial Sequence
  primer
gtaaaacgacggccagtaacccaaagtaggcatgtatgg

SEQ ID NO: 6127 - DNA, 19 bp, Artificial Sequence
  primer
ctgggaagacagcctggag

SEQ ID NO: 6128 - DNA, 38 bp, Artificial Sequence
  primer
gtaaaacgacggccagtttccctccatctgcttaatgg

SEQ ID NO: 6129 - DNA, 38 bp, Artificial Sequence
  primer
gtaaaacgacggccagttaggctacttctggccctgag

SEQ ID NO: 6130 - DNA, 38 bp, Artificial Sequence
  primer
gtaaaacgacggccagtggcagccaatgaaatacaaag

SEQ ID NO: 6131 - DNA, 25 bp, Artificial Sequence
  primer
caaatgcataatctaagtcaaatgg

SEQ ID NO: 6132 - DNA, 39 bp, Artificial Sequence
  primer
gtaaaacgacggccagtggctttctggataatggtgaag

SEQ ID NO: 6133 - DNA, 39 bp, Artificial Sequence
  primer
gtaaaacgacggccagttcctttgtactgttctttggct

SEQ ID NO: 6134 - DNA, 38 bp, Artificial Sequence
  primer
gtaaaacgacggccagttttggaatttggaggttctgg

SEQ ID NO: 6135 - DNA, 39 bp, Artificial Sequence
  primer
gtaaaacgacggccagttctcatctgagcttatggaggg

SEQ ID NO: 6136 - DNA, 21 bp, Artificial Sequence
  primer
ctgatgcttctcagcctgttg

SEQ ID NO: 6137 - DNA, 39 bp, Artificial Sequence
  primer
gtaaaacgacggccagtctccaggtttaggagcaaacag

SEQ ID NO: 6138 - DNA, 38 bp, Artificial Sequence
  primer
gtaaaacgacggccagtgagctaggaattgagccttgg

SEQ ID NO: 6139 - DNA, 38 bp, Artificial Sequence
  primer
gtaaaacgacggccagtgacagagcggcattgatattc

SEQ ID NO: 6140 - DNA, 38 bp, Artificial Sequence
  primer
gtaaaacgacggccagttcttagttgattccggccaag

SEQ ID NO: 6141 - DNA, 21 bp, Artificial Sequence
  primer
tagctgggactacaggtgcat

SEQ ID NO: 6142 - DNA, 21 bp, Artificial Sequence
  primer
tactcagagttgcctggctcc

SEQ ID NO: 6143 - DNA, 38 bp, Artificial Sequence
  primer
gtaaaacgacggccagtgggacaactatgtccgtgagc

SEQ ID NO: 6144 - DNA, 20 bp, Artificial Sequence
  primer
gtgtctgggagaagacgctg

SEQ ID NO: 6145 - DNA, 21 bp, Artificial Sequence
  primer
tgacaaccttcatcgacatgc

SEQ ID NO: 6146 - DNA, 41 bp, Artificial Sequence
  primer
gtaaaacgacggccagtgatattggtagaatatggccaagg

SEQ ID NO: 6147 - DNA, 43 bp, Artificial Sequence
  primer
gtaaaacgacggccagtcctgtttcactatcaaatccatattc

SEQ ID NO: 6148 - DNA, 38 bp, Artificial Sequence
  primer
gtaaaacgacggccagtgcctgagtttctggagtttcc

SEQ ID NO: 6149 - DNA, 38 bp, Artificial Sequence
  primer
gtaaaacgacggccagttcaaaggtgtggtgctgtttc

SEQ ID NO: 6150 - DNA, 41 bp, Artificial Sequence
  primer
gtaaaacgacggccagtggtttctttgtagttggccctaag

SEQ ID NO: 6151 - DNA, 39 bp, Artificial Sequence
  primer
gtaaaacgacggccagtgtgatcaatgaaacacattccc

SEQ ID NO: 6152 - DNA, 44 bp, Artificial Sequence
  primer
gtaaaacgacggccagtctcttgtctaaactagtctcaaggctg

SEQ ID NO: 6153 - DNA, 44 bp, Artificial Sequence
  primer
gtaaaacgacggccagtagtttgcatttatattattcccagaag

SEQ ID NO: 6154 - DNA, 38 bp, Artificial Sequence
  primer
gtaaaacgacggccagtctctgcaggaggttgaaggac

SEQ ID NO: 6155 - DNA, 21 bp, Artificial Sequence
  primer
tatagagcaccacgcctatcc

SEQ ID NO: 6156 - DNA, 22 bp, Artificial Sequence
  primer
tttgcagttgtagctcctctcc

SEQ ID NO: 6157 - DNA, 38 bp, Artificial Sequence
  primer
gtaaaacgacggccagttatgctgccgactcttcttcc

SEQ ID NO: 6158 - DNA, 38 bp, Artificial Sequence
  primer
gtaaaacgacggccagttgctccattatcagtcaaggc

SEQ ID NO: 6159 - DNA, 21 bp, Artificial Sequence
  primer
atgctcctaaatacgcttccc

SEQ ID NO: 6160 - DNA, 22 bp, Artificial Sequence
  primer
acagaatgccactaaactgctg

SEQ ID NO: 6161 - DNA, 21 bp, Artificial Sequence
  primer
accagctttacactcttgggc

SEQ ID NO: 6162 - DNA, 38 bp, Artificial Sequence
  primer
gtaaaacgacggccagttataggagcagcccaggactc

SEQ ID NO: 6163 - DNA, 20 bp, Artificial Sequence
  primer
gactacaggcatgcaccacc

SEQ ID NO: 6164 - DNA, 38 bp, Artificial Sequence
  primer
gtaaaacgacggccagtgtccagattcctgggtctgag

SEQ ID NO: 6165 - DNA, 19 bp, Artificial Sequence
  primer
aggtaccttcgggacaggg

SEQ ID NO: 6166 - DNA, 22 bp, Artificial Sequence
  primer
ccagcctctgtcttcactcttc

SEQ ID NO: 6167 - DNA, 18 bp, Artificial Sequence
  primer
ggtcctgcagtcctcggt

SEQ ID NO: 6168 - DNA, 36 bp, Artificial Sequence
  primer
gtaaaacgacggccagttgctgcctgctctaggctc

SEQ ID NO: 6169 - DNA, 37 bp, Artificial Sequence
  primer
gtaaaacgacggccagtagctgggctatgggtcagtc

SEQ ID NO: 6170 - DNA, 21 bp, Artificial Sequence
  primer
caaggagagtgggtgttcctg

SEQ ID NO: 6171 - DNA, 20 bp, Artificial Sequence
  primer
cagtgcggtagagcataggg

SEQ ID NO: 6172 - DNA, 36 bp, Artificial Sequence
  primer
gtaaaacgacggccagtcaattggtggactgggagg

SEQ ID NO: 6173 - DNA, 21 bp, Artificial Sequence
  primer
tgattcactttgaccagcgtc

SEQ ID NO: 6174 - DNA, 21 bp, Artificial Sequence
  primer
cacccaaaccttcactccttg

SEQ ID NO: 6175 - DNA, 38 bp, Artificial Sequence
  primer
gtaaaacgacggccagtcagtaacagtcttcatcgcgg

SEQ ID NO: 6176 - DNA, 41 bp, Artificial Sequence
  primer
gtaaaacgacggccagttccctaatacagaggagtttggag

SEQ ID NO: 6177 - DNA, 21 bp, Artificial Sequence
  primer
gagtgtgcctatgacctgcat

SEQ ID NO: 6178 - DNA, 21 bp, Artificial Sequence
  primer
acctccatcccttgtgaagag

SEQ ID NO: 6179 - DNA, 21 bp, Artificial Sequence
  primer
gctgaaagaaatggtgagtgc

SEQ ID NO: 6180 - DNA, 20 bp, Artificial Sequence
  primer
agcgacagaatgagaccctg

SEQ ID NO: 6181 - DNA, 38 bp, Artificial Sequence
  primer
gtaaaacgacggccagtctgagcttggctgtgttcttc

SEQ ID NO: 6182 - DNA, 21 bp, Artificial Sequence
  primer
gcagtggaattcatttggatg

SEQ ID NO: 6183 - DNA, 21 bp, Artificial Sequence
  primer
ggttgagctggaaagtgtgtg

SEQ ID NO: 6184 - DNA, 21 bp, Artificial Sequence
  primer
ttgtgcatgtgctggtagttc

SEQ ID NO: 6185 - DNA, 20 bp, Artificial Sequence
  primer
actggtgatgaccgtggatg

SEQ ID NO: 6186 - DNA, 38 bp, Artificial Sequence
  primer
gtaaaacgacggccagtaaagacacatcggttggtagc

SEQ ID NO: 6187 - DNA, 38 bp, Artificial Sequence
  primer
gtaaaacgacggccagtagaaggagtgcttgtgaatgc

SEQ ID NO: 6188 - DNA, 22 bp, Artificial Sequence
  primer
tgataagcatttgctggacaac

SEQ ID NO: 6189 - DNA, 39 bp, Artificial Sequence
  primer
gtaaaacgacggccagtggtcttctctttcacaacggag

SEQ ID NO: 6190 - DNA, 36 bp, Artificial Sequence
  primer
gtaaaacgacggccagttacaggagccactttgggc

SEQ ID NO: 6191 - DNA, 38 bp, Artificial Sequence
  primer
gtaaaacgacggccagtgatctgtcaccagtcaatggc

SEQ ID NO: 6192 - DNA, 38 bp, Artificial Sequence
  primer
gtaaaacgacggccagtgcaggaagagagggtaccaag

SEQ ID NO: 6193 - DNA, 40 bp, Artificial Sequence
  primer
gtaaaacgacggccagtggaacaaataaagccaagtgctc

SEQ ID NO: 6194 - DNA, 38 bp, Artificial Sequence
  primer
gtaaaacgacggccagtatgtgcatcatttaggcatgg

SEQ ID NO: 6195 - DNA, 38 bp, Artificial Sequence
  primer
gtaaaacgacggccagttgcctgcttatgaggcactac

SEQ ID NO: 6196 - DNA, 21 bp, Artificial Sequence
  primer
gtgcccagatcttgctatttg

SEQ ID NO: 6197 - DNA, 26 bp, Artificial Sequence
  primer
ttgtctacacctttctctcacatcac

SEQ ID NO: 6198 - DNA, 44 bp, Artificial Sequence
  primer
gtaaaacgacggccagtgggtgtataatatggaagttggattag

SEQ ID NO: 6199 - DNA, 22 bp, Artificial Sequence
  primer
aaagaatagagccagttgggtg

SEQ ID NO: 6200 - DNA, 37 bp, Artificial Sequence
  primer
gtaaaacgacggccagtagccatttggtgtttctccc

SEQ ID NO: 6201 - DNA, 23 bp, Artificial Sequence
  primer
gagcccatgtctgactacacaac

SEQ ID NO: 6202 - DNA, 37 bp, Artificial Sequence
  primer
gtaaaacgacggccagtttaacaggcccagcaatgtg

SEQ ID NO: 6203 - DNA, 42 bp, Artificial Sequence
  primer
gtaaaacgacggccagttcaatttaggatagcgtgtaggaaa

SEQ ID NO: 6204 - DNA, 22 bp, Artificial Sequence
  primer
tggagtttgtaaggagctttcc

SEQ ID NO: 6205 - DNA, 39 bp, Artificial Sequence
  primer
gtaaaacgacggccagtcccacaagggaatctgtgtaag

SEQ ID NO: 6206 - DNA, 21 bp, Artificial Sequence
  primer
gcgtcctaggtaggatggacc

SEQ ID NO: 6207 - DNA, 38 bp, Artificial Sequence
  primer
gtaaaacgacggccagtttggcgttgagtctagaaggg

SEQ ID NO: 6208 - DNA, 22 bp, Artificial Sequence
  primer
caccactacatgctcatgcttc

SEQ ID NO: 6209 - DNA, 21 bp, Artificial Sequence
  primer
gttgaccaggtatgcaactcc

SEQ ID NO: 6210 - DNA, 21 bp, Artificial Sequence
  primer
ctgcatttgggtgtctgagag

SEQ ID NO: 6211 - DNA, 23 bp, Artificial Sequence
  primer
tggacaagatttatgtcgaggac

SEQ ID NO: 6212 - DNA, 38 bp, Artificial Sequence
  primer
gtaaaacgacggccagtcttcgggagtgcttctgactc

SEQ ID NO: 6213 - DNA, 36 bp, Artificial Sequence
  primer
gtaaaacgacggccagtatcccattgatgccctgag

SEQ ID NO: 6214 - DNA, 21 bp, Artificial Sequence
  primer
tacctagggctttggagaggg

SEQ ID NO: 6215 - DNA, 27 bp, Artificial Sequence
  primer
gatctgactgggtgtagttaaactttg

SEQ ID NO: 6216 - DNA, 38 bp, Artificial Sequence
  primer
gtaaaacgacggccagtttgcattgaaatgtggaaagc

SEQ ID NO: 6217 - DNA, 38 bp, Artificial Sequence
  primer
gtaaaacgacggccagtaaagcaaccaaagttcaccag

SEQ ID NO: 6218 - DNA, 38 bp, Artificial Sequence
  primer
gtaaaacgacggccagtacatgaacatcccaggacttg

SEQ ID NO: 6219 - DNA, 39 bp, Artificial Sequence
  primer
gtaaaacgacggccagtggtggacaagatggataagacg

SEQ ID NO: 6220 - DNA, 20 bp, Artificial Sequence
  primer
acccaaactgcagtcacgtc

SEQ ID NO: 6221 - DNA, 38 bp, Artificial Sequence
  primer
gtaaaacgacggccagtgaggtgcatctgactgtgagg

SEQ ID NO: 6222 - DNA, 21 bp, Artificial Sequence
  primer
tccctctccaaatggtactgc

SEQ ID NO: 6223 - DNA, 38 bp, Artificial Sequence
  primer
gtaaaacgacggccagtagtgtcctccacaaaggcatc

SEQ ID NO: 6224 - DNA, 18 bp, Artificial Sequence
  primer
ctgggtaaatccagcccg

SEQ ID NO: 6225 - DNA, 38 bp, Artificial Sequence
  primer
gtaaaacgacggccagtttcactgatgtttacgcctgg

SEQ ID NO: 6226 - DNA, 38 bp, Artificial Sequence
  primer
gtaaaacgacggccagtgaattgcagctgtcaccagtc

SEQ ID NO: 6227 - DNA, 38 bp, Artificial Sequence
  primer
gtaaaacgacggccagtttgacaagaacatgcagaggg

SEQ ID NO: 6228 - DNA, 38 bp, Artificial Sequence
  primer
gtaaaacgacggccagtcagctgaagcaatgtttggac

SEQ ID NO: 6229 - DNA, 37 bp, Artificial Sequence
  primer
gtaaaacgacggccagttagacaatgccctgcactgg

SEQ ID NO: 6230 - DNA, 39 bp, Artificial Sequence
  primer
gtaaaacgacggccagttggctattattccatgaggtcg

SEQ ID NO: 6231 - DNA, 20 bp, Artificial Sequence
  primer
cacctgttcaccctggtttc

SEQ ID NO: 6232 - DNA, 21 bp, Artificial Sequence
  primer
acaatgaatggcaagatgcag

SEQ ID NO: 6233 - DNA, 21 bp, Artificial Sequence
  primer
gcctttccaagagtcttacgc

SEQ ID NO: 6234 - DNA, 38 bp, Artificial Sequence
  primer
gtaaaacgacggccagtcactgtggttatgaaggtggc

SEQ ID NO: 6235 - DNA, 38 bp, Artificial Sequence
  primer
gtaaaacgacggccagtagaaccgtggagaaagcaaag

SEQ ID NO: 6236 - DNA, 38 bp, Artificial Sequence
  primer
gtaaaacgacggccagtaggtggacaaggagcagtttg

SEQ ID NO: 6237 - DNA, 38 bp, Artificial Sequence
  primer
gtaaaacgacggccagtaactgccctgtcttgaaccag

SEQ ID NO: 6238 - DNA, 38 bp, Artificial Sequence
  primer
gtaaaacgacggccagtgtcctatgagctgctctgctg

SEQ ID NO: 6239 - DNA, 20 bp, Artificial Sequence
  primer
gagccggtgtcagtcctacc

SEQ ID NO: 6240 - DNA, 38 bp, Artificial Sequence
  primer
gtaaaacgacggccagtgttaggttcacgctgactccc

SEQ ID NO: 6241 - DNA, 21 bp, Artificial Sequence
  primer
ttggtccactgtccagatgtc

SEQ ID NO: 6242 - DNA, 37 bp, Artificial Sequence
  primer
gtaaaacgacggccagtctcccaggtctcagctaccc

SEQ ID NO: 6243 - DNA, 19 bp, Artificial Sequence
  primer
tattcaggagggctgaggc

SEQ ID NO: 6244 - DNA, 38 bp, Artificial Sequence
  primer
gtaaaacgacggccagtggtacatagagaagcccagcc

SEQ ID NO: 6245 - DNA, 19 bp, Artificial Sequence
  primer
ctgggatggagcctctctg

SEQ ID NO: 6246 - DNA, 21 bp, Artificial Sequence
  primer
ctacatgcagctctgaagccc

SEQ ID NO: 6247 - DNA, 37 bp, Artificial Sequence
  primer
gtaaaacgacggccagtcttctcctccacacctgctc

SEQ ID NO: 6248 - DNA, 38 bp, Artificial Sequence
  primer
gtaaaacgacggccagtcttgaagaagggccttgtgag

SEQ ID NO: 6249 - DNA, 21 bp, Artificial Sequence
  primer
cagagtggagcaaacaccttg

SEQ ID NO: 6250 - DNA, 38 bp, Artificial Sequence
  primer
gtaaaacgacggccagtgctttgagagtggatgtcagg

SEQ ID NO: 6251 - DNA, 37 bp, Artificial Sequence
  primer
gtaaaacgacggccagtcttcctggtgccacaatctg

SEQ ID NO: 6252 - DNA, 20 bp, Artificial Sequence
  primer
gaacctgtgcagtcctggag

SEQ ID NO: 6253 - DNA, 21 bp, Artificial Sequence
  primer
gtacaggccagaaaggaaagg

SEQ ID NO: 6254 - DNA, 21 bp, Artificial Sequence
  primer
cctaattagaagaggcggctg

SEQ ID NO: 6255 - DNA, 38 bp, Artificial Sequence
  primer
gtaaaacgacggccagtgtcagccatgagagctgagtc

SEQ ID NO: 6256 - DNA, 38 bp, Artificial Sequence
  primer
gtaaaacgacggccagtccacatcaaagaacaagccag

SEQ ID NO: 6257 - DNA, 21 bp, Artificial Sequence
  primer
tcctcggaaggtcttatgcag

SEQ ID NO: 6258 - DNA, 39 bp, Artificial Sequence
  primer
gtaaaacgacggccagtcgtggttgctgaggaataagac

SEQ ID NO: 6259 - DNA, 21 bp, Artificial Sequence
  primer
cagagtggagcaaacaccttg

SEQ ID NO: 6260 - DNA, 37 bp, Artificial Sequence
  primer
gtaaaacgacggccagtggactagcagaggccgagag

SEQ ID NO: 6261 - DNA, 21 bp, Artificial Sequence
  primer
ggccaagggtaggtttcttac

SEQ ID NO: 6262 - DNA, 40 bp, Artificial Sequence
  primer
gtaaaacgacggccagtgtgtgatccaattacaacaggtg

SEQ ID NO: 6263 - DNA, 38 bp, Artificial Sequence
  primer
gtaaaacgacggccagttttatgagccctgacgtctcc

SEQ ID NO: 6264 - DNA, 38 bp, Artificial Sequence
  primer
gtaaaacgacggccagtgctaccacactgcttgtcagg

SEQ ID NO: 6265 - DNA, 38 bp, Artificial Sequence
  primer
gtaaaacgacggccagtaacagcccgctctacttcatc

SEQ ID NO: 6266 - DNA, 38 bp, Artificial Sequence
  primer
gtaaaacgacggccagtacagtttctcccattgtggtg

SEQ ID NO: 6267 - DNA, 38 bp, Artificial Sequence
  primer
gtaaaacgacggccagttataggactcctcccaccagc

SEQ ID NO: 6268 - DNA, 38 bp, Artificial Sequence
  primer
gtaaaacgacggccagtatctaacttggagaggcgctg

SEQ ID NO: 6269 - DNA, 42 bp, Artificial Sequence
  primer
gtaaaacgacggccagtgacaagtgcaaataacacaatcttc

SEQ ID NO: 6270 - DNA, 38 bp, Artificial Sequence
  primer
gtaaaacgacggccagtccctctgcattcgtgaatatg

SEQ ID NO: 6271 - DNA, 45 bp, Artificial Sequence
  primer
gtaaaacgacggccagtttcctaaatgtgttcttccataaagtag

SEQ ID NO: 6272 - DNA, 22 bp, Artificial Sequence
  primer
tgtctttcttgcctactggacc

SEQ ID NO: 6273 - DNA, 21 bp, Artificial Sequence
  primer
caggcagttcacattctctgc

SEQ ID NO: 6274 - DNA, 39 bp, Artificial Sequence
  primer
gtaaaacgacggccagtgccactcgggtaagataaggag

SEQ ID NO: 6275 - DNA, 41 bp, Artificial Sequence
  primer
gtaaaacgacggccagtgagatctagtgcagctatcaaggg

SEQ ID NO: 6276 - DNA, 38 bp, Artificial Sequence
  primer
gtaaaacgacggccagtcctgaccttgtgatctgcttg

SEQ ID NO: 6277 - DNA, 21 bp, Artificial Sequence
  primer
ctgtgcctggccttgaataag

SEQ ID NO: 6278 - DNA, 38 bp, Artificial Sequence
  primer
gtaaaacgacggccagtaacaaggccaagaggattgtc

SEQ ID NO: 6279 - DNA, 39 bp, Artificial Sequence
  primer
gtaaaacgacggccagtcctccggtgctattgtaaagac

SEQ ID NO: 6280 - DNA, 20 bp, Artificial Sequence
  primer
ttactgggccagagggaaag

SEQ ID NO: 6281 - DNA, 41 bp, Artificial Sequence
  primer
gtaaaacgacggccagttttcctgtttctagcatagatggg

SEQ ID NO: 6282 - DNA, 38 bp, Artificial Sequence
  primer
gtaaaacgacggccagtcaaagtgtgagaagcactggc

SEQ ID NO: 6283 - DNA, 20 bp, Artificial Sequence
  primer
atcccgaggaatggtagagg

SEQ ID NO: 6284 - DNA, 21 bp, Artificial Sequence
  primer
ctggcctagattgtctgcaag

SEQ ID NO: 6285 - DNA, 38 bp, Artificial Sequence
  primer
gtaaaacgacggccagttgtgtttgtattcggacctgg

SEQ ID NO: 6286 - DNA, 39 bp, Artificial Sequence
  primer
gtaaaacgacggccagtagaccatggcaatagtccagag

SEQ ID NO: 6287 - DNA, 38 bp, Artificial Sequence
  primer
gtaaaacgacggccagtttctctttctgccagggtttg

SEQ ID NO: 6288 - DNA, 37 bp, Artificial Sequence
  primer
gtaaaacgacggccagtagaactcggtgctgcttctg

SEQ ID NO: 6289 - DNA, 21 bp, Artificial Sequence
  primer
cgaacagactccttctccgtc

SEQ ID NO: 6290 - DNA, 38 bp, Artificial Sequence
  primer
gtaaaacgacggccagttggtccagttgctcactcaag

SEQ ID NO: 6291 - DNA, 38 bp, Artificial Sequence
  primer
gtaaaacgacggccagtatcaacccttacagtggtggg

SEQ ID NO: 6292 - DNA, 38 bp, Artificial Sequence
  primer
gtaaaacgacggccagtttggtccatttcccagttgtc

SEQ ID NO: 6293 - DNA, 21 bp, Artificial Sequence
  primer
aactgttagagcatggctggg

SEQ ID NO: 6294 - DNA, 22 bp, Artificial Sequence
  primer
cgtgctggtagtccagctactc

SEQ ID NO: 6295 - DNA, 21 bp, Artificial Sequence
  primer
tatggtgcatgcctgtagtcc

SEQ ID NO: 6296 - DNA, 21 bp, Artificial Sequence
  primer
atagaattcaggcagggtggg

SEQ ID NO: 6297 - DNA, 38 bp, Artificial Sequence
  primer
gtaaaacgacggccagtctaatcctggctctgcttccc

SEQ ID NO: 6298 - DNA, 20 bp, Artificial Sequence
  primer
ccgtgacatgtgcttgtttg

SEQ ID NO: 6299 - DNA, 21 bp, Artificial Sequence
  primer
actgcaactcacccacacttg

SEQ ID NO: 6300 - DNA, 35 bp, Artificial Sequence
  primer
gtaaaacgacggccagtccgatggcttctgctgac

SEQ ID NO: 6301 - DNA, 38 bp, Artificial Sequence
  primer
gtaaaacgacggccagtagaatcccaccacccaaagac

SEQ ID NO: 6302 - DNA, 39 bp, Artificial Sequence
  primer
gtaaaacgacggccagtggtctaggtgcttgcactttcc

SEQ ID NO: 6303 - DNA, 38 bp, Artificial Sequence
  primer
gtaaaacgacggccagtccttgtggctccaggctatac

SEQ ID NO: 6304 - DNA, 38 bp, Artificial Sequence
  primer
gtaaaacgacggccagtcaacaaggtggagagggaaac

SEQ ID NO: 6305 - DNA, 38 bp, Artificial Sequence
  primer
gtaaaacgacggccagtaggcctgaaggtcagataccc

SEQ ID NO: 6306 - DNA, 20 bp, Artificial Sequence
  primer
aattgtggctgtgggttgac

SEQ ID NO: 6307 - DNA, 39 bp, Artificial Sequence
  primer
gtaaaacgacggccagtgtgagtgttctgacattcaggg

SEQ ID NO: 6308 - DNA, 38 bp, Artificial Sequence
  primer
gtaaaacgacggccagtcctagcctgttcttcccactg

SEQ ID NO: 6309 - DNA, 38 bp, Artificial Sequence
  primer
gtaaaacgacggccagtgtccttggtcagttccctctc

SEQ ID NO: 6310 - DNA, 21 bp, Artificial Sequence
  primer
agtactgtttgccgtgagctg

SEQ ID NO: 6311 - DNA, 39 bp, Artificial Sequence
  primer
gtaaaacgacggccagttgacagatctctgtgtgtgtgc

SEQ ID NO: 6312 - DNA, 38 bp, Artificial Sequence
  primer
gtaaaacgacggccagtagggaaaggcatggataagtg

SEQ ID NO: 6313 - DNA, 21 bp, Artificial Sequence
  primer
ccagaatgtgcatgctttgag

SEQ ID NO: 6314 - DNA, 21 bp, Artificial Sequence
  primer
ctttcccggtcgttgttagac

SEQ ID NO: 6315 - DNA, 21 bp, Artificial Sequence
  primer
gacaggaggtgtctgagtccc

SEQ ID NO: 6316 - DNA, 38 bp, Artificial Sequence
  primer
gtaaaacgacggccagtgcactgaacatggagtgagtg

SEQ ID NO: 6317 - DNA, 38 bp, Artificial Sequence
  primer
gtaaaacgacggccagtaggtagaggtgtctgcaagcc

SEQ ID NO: 6318 - DNA, 37 bp, Artificial Sequence
  primer
gtaaaacgacggccagtgggatatttgctcccacagg

SEQ ID NO: 6319 - DNA, 21 bp, Artificial Sequence
  primer
atctgaaagtgggtgaggctg

SEQ ID NO: 6320 - DNA, 36 bp, Artificial Sequence
  primer
gtaaaacgacggccagtacccaaccctcctagagcc

SEQ ID NO: 6321 - DNA, 38 bp, Artificial Sequence
  primer
gtaaaacgacggccagtggcagtgaggaacaaggaaag

SEQ ID NO: 6322 - DNA, 21 bp, Artificial Sequence
  primer
cgtgtgggcaagattgttatg

SEQ ID NO: 6323 - DNA, 37 bp, Artificial Sequence
  primer
gtaaaacgacggccagtcttgggatcctggcctagag

SEQ ID NO: 6324 - DNA, 21 bp, Artificial Sequence
  primer
ctgtaccatcacaggcccttc

SEQ ID NO: 6325 - DNA, 38 bp, Artificial Sequence
  primer
gtaaaacgacggccagtacacagtgcctcatgatcagc

SEQ ID NO: 6326 - DNA, 38 bp, Artificial Sequence
  primer
gtaaaacgacggccagtactctgaattccacctccacc

SEQ ID NO: 6327 - DNA, 21 bp, Artificial Sequence
  primer
cctggatgaaggatgaaccac

SEQ ID NO: 6328 - DNA, 38 bp, Artificial Sequence
  primer
gtaaaacgacggccagttcttgctctgaggtaccctgg

SEQ ID NO: 6329 - DNA, 38 bp, Artificial Sequence
  primer
gtaaaacgacggccagtacagagaaggtcctggctgag

SEQ ID NO: 6330 - DNA, 20 bp, Artificial Sequence
  primer
gtcaaggccagttgaggatg

SEQ ID NO: 6331 - DNA, 21 bp, Artificial Sequence
  primer
ccctaaacactccaaagcctg

SEQ ID NO: 6332 - DNA, 38 bp, Artificial Sequence
  primer
gtaaaacgacggccagtttagagcggagattattgccc

SEQ ID NO: 6333 - DNA, 21 bp, Artificial Sequence
  primer
tgttcaaccttgatccacacc

SEQ ID NO: 6334 - DNA, 38 bp, Artificial Sequence
  primer
gtaaaacgacggccagttagtgggactttggctgatcc

SEQ ID NO: 6335 - DNA, 21 bp, Artificial Sequence
  primer
gttgcattggatttcaggctc

SEQ ID NO: 6336 - DNA, 39 bp, Artificial Sequence
  primer
gtaaaacgacggccagttctcatttctgtattgcctggg

SEQ ID NO: 6337 - DNA, 21 bp, Artificial Sequence
  primer
gggtacaccagcacccttaac

SEQ ID NO: 6338 - DNA, 20 bp, Artificial Sequence
  primer
gatggaagagagtggcctcc

SEQ ID NO: 6339 - DNA, 37 bp, Artificial Sequence
  primer
gtaaaacgacggccagtagccctccaaatgtttcctg

SEQ ID NO: 6340 - DNA, 38 bp, Artificial Sequence
  primer
gtaaaacgacggccagtctcatcgacttcttccggttc

SEQ ID NO: 6341 - DNA, 38 bp, Artificial Sequence
  primer
gtaaaacgacggccagttgagggacaaccatgctgtag

SEQ ID NO: 6342 - DNA, 21 bp, Artificial Sequence
  primer
gtcttggaatgcagcctgttc

SEQ ID NO: 6343 - DNA, 35 bp, Artificial Sequence
  primer
gtaaaacgacggccagtcatggatggcgtaggtgg

SEQ ID NO: 6344 - DNA, 38 bp, Artificial Sequence
  primer
gtaaaacgacggccagtaggagcacagtcggatcaaag

SEQ ID NO: 6345 - DNA, 37 bp, Artificial Sequence
  primer
gtaaaacgacggccagtccttcaggtgcaggtgtttc

SEQ ID NO: 6346 - DNA, 21 bp, Artificial Sequence
  primer
tgacccttcttgcagacactg

SEQ ID NO: 6347 - DNA, 38 bp, Artificial Sequence
  primer
gtaaaacgacggccagtcctcctgttgaacctggaaag

SEQ ID NO: 6348 - DNA, 38 bp, Artificial Sequence
  primer
gtaaaacgacggccagtttgattccatcatctcctccc

SEQ ID NO: 6349 - DNA, 19 bp, Artificial Sequence
  primer
gcttgcctgtttcctgtcg

SEQ ID NO: 6350 - DNA, 40 bp, Artificial Sequence
  primer
gtaaaacgacggccagtccaaggagaatgagaccatacag

SEQ ID NO: 6351 - DNA, 39 bp, Artificial Sequence
  primer
gtaaaacgacggccagtttgagaatgcaatgacttgtgg

SEQ ID NO: 6352 - DNA, 38 bp, Artificial Sequence
  primer
gtaaaacgacggccagtctgacttcccaacatgccttc

SEQ ID NO: 6353 - DNA, 20 bp, Artificial Sequence
  primer
ccaccatgtccggtagaaat

SEQ ID NO: 6354 - DNA, 38 bp, Artificial Sequence
  primer
gtaaaacgacggccagtatcccatgtacaccactgtgc

SEQ ID NO: 6355 - DNA, 37 bp, Artificial Sequence
  primer
gtaaaacgacggccagtggtagcagccacacgttcac

SEQ ID NO: 6356 - DNA, 22 bp, Artificial Sequence
  primer
tgcttctgaatctctgcaaatg

SEQ ID NO: 6357 - DNA, 21 bp, Artificial Sequence
  primer
tcttctgcaatctgctcttgg

SEQ ID NO: 6358 - DNA, 38 bp, Artificial Sequence
  primer
gtaaaacgacggccagtaaagtcatcaatggtgccctc

SEQ ID NO: 6359 - DNA, 20 bp, Artificial Sequence
  primer
gcacccattgtttcctggag

SEQ ID NO: 6360 - DNA, 38 bp, Artificial Sequence
  primer
gtaaaacgacggccagtctacctccgcctacgtcattg

SEQ ID NO: 6361 - DNA, 39 bp, Artificial Sequence
  primer
gtaaaacgacggccagtggcctttgagagaaacataccc

SEQ ID NO: 6362 - DNA, 20 bp, Artificial Sequence
  primer
gggacaagagcgaaactctg

SEQ ID NO: 6363 - DNA, 38 bp, Artificial Sequence
  primer
gtaaaacgacggccagtaattctagggacatgatgggc

SEQ ID NO: 6364 - DNA, 21 bp, Artificial Sequence
  primer
gggcatgtttgtcactctcac

SEQ ID NO: 6365 - DNA, 21 bp, Artificial Sequence
  primer
cctgaaccacttcctgtcctc

SEQ ID NO: 6366 - DNA, 38 bp, Artificial Sequence
  primer
gtaaaacgacggccagtcttcaaatccatagcagtggg

SEQ ID NO: 6367 - DNA, 21 bp, Artificial Sequence
  primer
tctcacctcagccttccaaag

SEQ ID NO: 6368 - DNA, 37 bp, Artificial Sequence
  primer
gtaaaacgacggccagtactcctgggctcaagcagtc

SEQ ID NO: 6369 - DNA, 41 bp, Artificial Sequence
  primer
gtaaaacgacggccagttgaaagttgtccacgtaaatgatg

SEQ ID NO: 6370 - DNA, 38 bp, Artificial Sequence
  primer
gtaaaacgacggccagttcaggaatgaaagttcatggg

SEQ ID NO: 6371 - DNA, 25 bp, Artificial Sequence
  primer
tgatggctaaggtttgattgtttac

SEQ ID NO: 6372 - DNA, 20 bp, Artificial Sequence
  primer
agtcccgggctcagtatgtg

SEQ ID NO: 6373 - DNA, 43 bp, Artificial Sequence
  primer
gtaaaacgacggccagttcagaaatgaaagacaacctctgtag

SEQ ID NO: 6374 - DNA, 38 bp, Artificial Sequence
  primer
gtaaaacgacggccagttgccttacatgttcccagatg

SEQ ID NO: 6375 - DNA, 37 bp, Artificial Sequence
  primer
gtaaaacgacggccagtagtgcctggccatatcacag

SEQ ID NO: 6376 - DNA, 37 bp, Artificial Sequence
  primer
gtaaaacgacggccagtcactgtgcccggttgtactt

SEQ ID NO: 6377 - DNA, 39 bp, Artificial Sequence
  primer
gtaaaacgacggccagttctggaatcttctccagtctgc

SEQ ID NO: 6378 - DNA, 21 bp, Artificial Sequence
  primer
tgattcagaattgcttggtgc

SEQ ID NO: 6379 - DNA, 21 bp, Artificial Sequence
  primer
gagggatgggagagaaagttg

SEQ ID NO: 6380 - DNA, 21 bp, Artificial Sequence
  primer
gcctcttctgcctaatggttc

SEQ ID NO: 6381 - DNA, 24 bp, Artificial Sequence
  primer
gggatagggtgtaatcaggatagg

SEQ ID NO: 6382 - DNA, 21 bp, Artificial Sequence
  primer
catgcttgtaatcccaactgc

SEQ ID NO: 6383 - DNA, 21 bp, Artificial Sequence
  primer
cctgggtgacagagtgagact

SEQ ID NO: 6384 - DNA, 22 bp, Artificial Sequence
  primer
gaagggattggtctgttcattg

SEQ ID NO: 6385 - DNA, 39 bp, Artificial Sequence
  primer
gtaaaacgacggccagttgtaggcaaagattgcatcctc

SEQ ID NO: 6386 - DNA, 40 bp, Artificial Sequence
  primer
gtaaaacgacggccagtgcttgaatgaaaggaagaatgtg

SEQ ID NO: 6387 - DNA, 21 bp, Artificial Sequence
  primer
ttgaaagcctttgagctttgg

SEQ ID NO: 6388 - DNA, 24 bp, Artificial Sequence
  primer
aataatcaggttgttctggtgtcc

SEQ ID NO: 6389 - DNA, 21 bp, Artificial Sequence
  primer
acttggagatcttgccttgtt

SEQ ID NO: 6390 - DNA, 37 bp, Artificial Sequence
  primer
gtaaaacgacggccagtaggagtccagacagtggtgg

SEQ ID NO: 6391 - DNA, 21 bp, Artificial Sequence
  primer
gtggagacctgaggattctgg

SEQ ID NO: 6392 - DNA, 38 bp, Artificial Sequence
  primer
gtaaaacgacggccagtgctgtttcagtgtgagttggg

SEQ ID NO: 6393 - DNA, 39 bp, Artificial Sequence
  primer
gtaaaacgacggccagtgcaaagcttgggaagaagttag

SEQ ID NO: 6394 - DNA, 38 bp, Artificial Sequence
  primer
gtaaaacgacggccagtcatccctacccactcccattc

SEQ ID NO: 6395 - DNA, 40 bp, Artificial Sequence
  primer
gtaaaacgacggccagttcccacaagactatgtgttccac

SEQ ID NO: 6396 - DNA, 21 bp, Artificial Sequence
  primer
gaccttatccctccttccgag

SEQ ID NO: 6397 - DNA, 21 bp, Artificial Sequence
  primer
tggataagttgagcctccctg

SEQ ID NO: 6398 - DNA, 37 bp, Artificial Sequence
  primer
gtaaaacgacggccagtgtccgccactcatgtttctc

SEQ ID NO: 6399 - DNA, 21 bp, Artificial Sequence
  primer
tagtggcgtgcactggtagtc

SEQ ID NO: 6400 - DNA, 22 bp, Artificial Sequence
  primer
cagggctgctgttcagctataa

SEQ ID NO: 6401 - DNA, 38 bp, Artificial Sequence
  primer
gtaaaacgacggccagtagcctggtgtattgggagaag

SEQ ID NO: 6402 - DNA, 39 bp, Artificial Sequence
  primer
gtaaaacgacggccagttttgatgtaggatttggttggg

SEQ ID NO: 6403 - DNA, 39 bp, Artificial Sequence
  primer
gtaaaacgacggccagtttgtaggttcagggcctagttg

SEQ ID NO: 6404 - DNA, 22 bp, Artificial Sequence
  primer
tccacaattacgtgtgtgatcc

SEQ ID NO: 6405 - DNA, 21 bp, Artificial Sequence
  primer
ttgtacctgcactgggaagac

SEQ ID NO: 6406 - DNA, 20 bp, Artificial Sequence
  primer
gagcccaggtgtttgagacc

SEQ ID NO: 6407 - DNA, 24 bp, Artificial Sequence
  primer
gaaccctagaactggcagtgtaac

SEQ ID NO: 6408 - DNA, 39 bp, Artificial Sequence
  primer
gtaaaacgacggccagtttcttccctagccctgattagc

SEQ ID NO: 6409 - DNA, 21 bp, Artificial Sequence
  primer
aggcctagcaaagggaagttg

SEQ ID NO: 6410 - DNA, 38 bp, Artificial Sequence
  primer
gtaaaacgacggccagtaccaatatccagcactgaccc

SEQ ID NO: 6411 - DNA, 38 bp, Artificial Sequence
  primer
gtaaaacgacggccagttcagtgagctgagattccacc

SEQ ID NO: 6412 - DNA, 38 bp, Artificial Sequence
  primer
gtaaaacgacggccagttgtttgattctctgccctacg

SEQ ID NO: 6413 - DNA, 21 bp, Artificial Sequence
  primer
tggcatcatcaagatacggtc

SEQ ID NO: 6414 - DNA, 38 bp, Artificial Sequence
  primer
gtaaaacgacggccagtgtgaccgagaaggtaaatggc

SEQ ID NO: 6415 - DNA, 38 bp, Artificial Sequence
  primer
gtaaaacgacggccagtagataagctccacccacaacc

SEQ ID NO: 6416 - DNA, 38 bp, Artificial Sequence
  primer
gtaaaacgacggccagtagccctggtaaggataggcag

SEQ ID NO: 6417 - DNA, 38 bp, Artificial Sequence
  primer
gtaaaacgacggccagtaactgtcttggtcatgcatcc

SEQ ID NO: 6418 - DNA, 38 bp, Artificial Sequence
  primer
gtaaaacgacggccagtgtcttgctttccactgtggtg

SEQ ID NO: 6419 - DNA, 38 bp, Artificial Sequence
  primer
gtaaaacgacggccagtctgggtccctcgcactaatac

SEQ ID NO: 6420 - DNA, 22 bp, Artificial Sequence
  primer
tccttccctttattagaagccc

SEQ ID NO: 6421 - DNA, 38 bp, Artificial Sequence
  primer
gtaaaacgacggccagttgcaactgttgaatctcctcc

SEQ ID NO: 6422 - DNA, 38 bp, Artificial Sequence
  primer
gtaaaacgacggccagtctccctgcagtgtaaatgtgc

SEQ ID NO: 6423 - DNA, 21 bp, Artificial Sequence
  primer
ttcaacatttcactgccttcc

SEQ ID NO: 6424 - DNA, 20 bp, Artificial Sequence
  primer
catgagaggcagacagggtc

SEQ ID NO: 6425 - DNA, 20 bp, Artificial Sequence
  primer
actcatgccaaggactgctg

SEQ ID NO: 6426 - DNA, 20 bp, Artificial Sequence
  primer
gctgcggatgagtctgtagg

SEQ ID NO: 6427 - DNA, 38 bp, Artificial Sequence
  primer
gtaaaacgacggccagtgtccgaaccatccaggataag

SEQ ID NO: 6428 - DNA, 38 bp, Artificial Sequence
  primer
gtaaaacgacggccagttcaaggtataggatgggtggg

SEQ ID NO: 6429 - DNA, 20 bp, Artificial Sequence
  primer
gtacaccctctgcacttgcc

SEQ ID NO: 6430 - DNA, 38 bp, Artificial Sequence
  primer
gtaaaacgacggccagtacagtctgtgcccatctaccc

SEQ ID NO: 6431 - DNA, 21 bp, Artificial Sequence
  primer
acctgctcctatccctaaggc

SEQ ID NO: 6432 - DNA, 38 bp, Artificial Sequence
  primer
gtaaaacgacggccagttgaggttgggagctacaggtg

SEQ ID NO: 6433 - DNA, 21 bp, Artificial Sequence
  primer
cccacagataaccctaggcag

SEQ ID NO: 6434 - DNA, 37 bp, Artificial Sequence
  primer
gtaaaacgacggccagtgaggacctgggagtgagagc

SEQ ID NO: 6435 - DNA, 38 bp, Artificial Sequence
  primer
gtaaaacgacggccagtacttgcccttcacacagttcc

SEQ ID NO: 6436 - DNA, 38 bp, Artificial Sequence
  primer
gtaaaacgacggccagtcagacagtggacttcgtcagg

SEQ ID NO: 6437 - DNA, 37 bp, Artificial Sequence
  primer
gtaaaacgacggccagtcagaatgcagcagcctgtag

SEQ ID NO: 6438 - DNA, 20 bp, Artificial Sequence
  primer
cagtcatcggcaacatcttc

SEQ ID NO: 6439 - DNA, 38 bp, Artificial Sequence
  primer
gtaaaacgacggccagtggatcctcgatacaggtgctc

SEQ ID NO: 6440 - DNA, 21 bp, Artificial Sequence
  primer
cctggtatctcactgcagcac

SEQ ID NO: 6441 - DNA, 36 bp, Artificial Sequence
  primer
gtaaaacgacggccagttgctggtgacaccctctcc

SEQ ID NO: 6442 - DNA, 21 bp, Artificial Sequence
  primer
gcaggctttctacatgatccg

SEQ ID NO: 6443 - DNA, 36 bp, Artificial Sequence
  primer
gtaaaacgacggccagtacttcggaggctcggtctg

SEQ ID NO: 6444 - DNA, 38 bp, Artificial Sequence
  primer
gtaaaacgacggccagttctggctagtgaggagcagag

SEQ ID NO: 6445 - DNA, 38 bp, Artificial Sequence
  primer
gtaaaacgacggccagtgatgccgtcaactccagaatc

SEQ ID NO: 6446 - DNA, 22 bp, Artificial Sequence
  primer
tcatcaccatgtgtgttgtgac

SEQ ID NO: 6447 - DNA, 21 bp, Artificial Sequence
  primer
tgttgagggatgtcgagtcac

SEQ ID NO: 6448 - DNA, 38 bp, Artificial Sequence
  primer
gtaaaacgacggccagttcctaggacgtctctctgtgc

SEQ ID NO: 6449 - DNA, 20 bp, Artificial Sequence
  primer
ttagagaaagcaagcccagg

SEQ ID NO: 6450 - DNA, 36 bp, Artificial Sequence
  primer
gtaaaacgacggccagtctcaatgagaacgggaggg

SEQ ID NO: 6451 - DNA, 21 bp, Artificial Sequence
  primer
tagctaggtatggtggtgggc

SEQ ID NO: 6452 - DNA, 21 bp, Artificial Sequence
  primer
aggtgaaaggctatgcgtcag

SEQ ID NO: 6453 - DNA, 21 bp, Artificial Sequence
  primer
cctgggtgacagaatgagact

SEQ ID NO: 6454 - DNA, 21 bp, Artificial Sequence
  primer
aaatctaagaaccagctcccg

SEQ ID NO: 6455 - DNA, 21 bp, Artificial Sequence
  primer
gtgagggagttagggacttgg

SEQ ID NO: 6456 - DNA, 38 bp, Artificial Sequence
  primer
gtaaaacgacggccagtaaggctgcctcaagtatccag

SEQ ID NO: 6457 - DNA, 38 bp, Artificial Sequence
  primer
gtaaaacgacggccagtttgcttctgacttggccctac

SEQ ID NO: 6458 - DNA, 25 bp, Artificial Sequence
  primer
tagctgactcattgaaatcaaagtc

SEQ ID NO: 6459 - DNA, 37 bp, Artificial Sequence
  primer
gtaaaacgacggccagtaagtttccagctcgggtttc

SEQ ID NO: 6460 - DNA, 39 bp, Artificial Sequence
  primer
gtaaaacgacggccagtgggcttgacatatttgtgtctg

SEQ ID NO: 6461 - DNA, 38 bp, Artificial Sequence
  primer
gtaaaacgacggccagtctttggcatacacacggtctc

SEQ ID NO: 6462 - DNA, 27 bp, Artificial Sequence
  primer
aagacagacttccacctattaaaggac

SEQ ID NO: 6463 - DNA, 23 bp, Artificial Sequence
  primer
gctgactcattgaaatcaaagcc

SEQ ID NO: 6464 - DNA, 38 bp, Artificial Sequence
  primer
gtaaaacgacggccagtcgaacactagtctacgcctcg

SEQ ID NO: 6465 - DNA, 40 bp, Artificial Sequence
  primer
gtaaaacgacggccagttcaatgttggatatttagcagca

SEQ ID NO: 6466 - DNA, 21 bp, Artificial Sequence
  primer
ctcggctctcagtctctcagg

SEQ ID NO: 6467 - DNA, 21 bp, Artificial Sequence
  primer
gcgatgttaatgtcaacggtc

SEQ ID NO: 6468 - DNA, 38 bp, Artificial Sequence
  primer
gtaaaacgacggccagtgcaccgacatgctctctgtag

SEQ ID NO: 6469 - DNA, 38 bp, Artificial Sequence
  primer
gtaaaacgacggccagttggacttgttggttcttgcag

SEQ ID NO: 6470 - DNA, 26 bp, Artificial Sequence
  primer
ttgaagatttctattcatcctcattc

SEQ ID NO: 6471 - DNA, 37 bp, Artificial Sequence
  primer
gtaaaacgacggccagtgtggagtggcagtgctaacg

SEQ ID NO: 6472 - DNA, 38 bp, Artificial Sequence
  primer
gtaaaacgacggccagtatgacctgctctaccactggc

SEQ ID NO: 6473 - DNA, 39 bp, Artificial Sequence
  primer
gtaaaacgacggccagtgatctgtgtagaaggacccacg

SEQ ID NO: 6474 - DNA, 38 bp, Artificial Sequence
  primer
gtaaaacgacggccagtaggaatcacccttcacttccc

SEQ ID NO: 6475 - DNA, 38 bp, Artificial Sequence
  primer
gtaaaacgacggccagtccttgaactcctaggctccag

SEQ ID NO: 6476 - DNA, 38 bp, Artificial Sequence
  primer
gtaaaacgacggccagtgtcttctccaccttgaccctg

SEQ ID NO: 6477 - DNA, 38 bp, Artificial Sequence
  primer
gtaaaacgacggccagtttgaacagcaggttatgctcc

SEQ ID NO: 6478 - DNA, 38 bp, Artificial Sequence
  primer
gtaaaacgacggccagtcatttcaactacccaggtggc

SEQ ID NO: 6479 - DNA, 21 bp, Artificial Sequence
  primer
gaggtaggatccacacacagc

SEQ ID NO: 6480 - DNA, 20 bp, Artificial Sequence
  primer
ctgatgtggcctaactgacg

SEQ ID NO: 6481 - DNA, 38 bp, Artificial Sequence
  primer
gtaaaacgacggccagttgggttgaagttgagttgacc

SEQ ID NO: 6482 - DNA, 38 bp, Artificial Sequence
  primer
gtaaaacgacggccagtgcatggcagactgcatcttag

SEQ ID NO: 6483 - DNA, 20 bp, Artificial Sequence
  primer
aaatctccctcctccacagc

SEQ ID NO: 6484 - DNA, 21 bp, Artificial Sequence
  primer
atgtacatgcagtgcccagtc

SEQ ID NO: 6485 - DNA, 20 bp, Artificial Sequence
  primer
actgtccttgtgttcggagc

SEQ ID NO: 6486 - DNA, 21 bp, Artificial Sequence
  primer
gaagactggctactcggatcg

SEQ ID NO: 6487 - DNA, 20 bp, Artificial Sequence
  primer
aacctagcgctcctctccac

SEQ ID NO: 6488 - DNA, 40 bp, Artificial Sequence
  primer
gtaaaacgacggccagtttggagtcacctctagaccattg

SEQ ID NO: 6489 - DNA, 21 bp, Artificial Sequence
  primer
tgaccattgggaaagtaccag

SEQ ID NO: 6490 - DNA, 21 bp, Artificial Sequence
  primer
gaacagcaaggtgacatggag

SEQ ID NO: 6491 - DNA, 21 bp, Artificial Sequence
  primer
acagctcctccaggtcatcag

SEQ ID NO: 6492 - DNA, 38 bp, Artificial Sequence
  primer
gtaaaacgacggccagtcagtgaactctggcctccttc

SEQ ID NO: 6493 - DNA, 44 bp, Artificial Sequence
  primer
gtaaaacgacggccagttgtcctcttagtatgattaggcttctc

SEQ ID NO: 6494 - DNA, 38 bp, Artificial Sequence
  primer
gtaaaacgacggccagtgaagctcatggaacagtggtg

SEQ ID NO: 6495 - DNA, 19 bp, Artificial Sequence
  primer
ttcttggaacccatgaggc

SEQ ID NO: 6496 - DNA, 40 bp, Artificial Sequence
  primer
gtaaaacgacggccagtgctcacaacgatcatgtagactg

SEQ ID NO: 6497 - DNA, 41 bp, Artificial Sequence
  primer
gtaaaacgacggccagttcaaactcctaattgcgaagaatc

SEQ ID NO: 6498 - DNA, 21 bp, Artificial Sequence
  primer
tgtgccagcagtgctagattc

SEQ ID NO: 6499 - DNA, 22 bp, Artificial Sequence
  primer
tgacagtaaatcccagtttgcc

SEQ ID NO: 6500 - DNA, 24 bp, Artificial Sequence
  primer
aaacttaagcattgactctgttgc

SEQ ID NO: 6501 - DNA, 38 bp, Artificial Sequence
  primer
gtaaaacgacggccagtaggaagggaggcagttaatgg

SEQ ID NO: 6502 - DNA, 39 bp, Artificial Sequence
  primer
gtaaaacgacggccagtgaaagtgtgacacctctggaaa

SEQ ID NO: 6503 - DNA, 38 bp, Artificial Sequence
  primer
gtaaaacgacggccagtatgctatgagcttgcatttcc

SEQ ID NO: 6504 - DNA, 21 bp, Artificial Sequence
  primer
gtgcacgtcttagctgttgtg

SEQ ID NO: 6505 - DNA, 38 bp, Artificial Sequence
  primer
gtaaaacgacggccagtttatgggctgtacttcatggg

SEQ ID NO: 6506 - DNA, 29 bp, Artificial Sequence
  primer
tcatgtttggtctatattatgtaatcgtg

SEQ ID NO: 6507 - DNA, 27 bp, Artificial Sequence
  primer
tgatgaacttagatggttaaataaagc

SEQ ID NO: 6508 - DNA, 21 bp, Artificial Sequence
  primer
ccatatgaagaccttcctggc

SEQ ID NO: 6509 - DNA, 25 bp, Artificial Sequence
  primer
cttgtgtcaacatttaggtaagtca

SEQ ID NO: 6510 - DNA, 23 bp, Artificial Sequence
  primer
agctacaagtcaatgtttccagc

SEQ ID NO: 6511 - DNA, 21 bp, Artificial Sequence
  primer
tctttcaacgcaagcatgaac

SEQ ID NO: 6512 - DNA, 40 bp, Artificial Sequence
  primer
gtaaaacgacggccagtccctttaggtagttctgagaccc

SEQ ID NO: 6513 - DNA, 36 bp, Artificial Sequence
  primer
gtaaaacgacggccagtcacgcccagccttattgtg

SEQ ID NO: 6514 - DNA, 22 bp, Artificial Sequence
  primer
ggcatgtagtttgtcaggaatg

SEQ ID NO: 6515 - DNA, 20 bp, Artificial Sequence
  primer
agactgtgccattgcactcc

SEQ ID NO: 6516 - DNA, 38 bp, Artificial Sequence
  primer
gtaaaacgacggccagttgatgcatttgaatttcaccc

SEQ ID NO: 6517 - DNA, 38 bp, Artificial Sequence
  primer
gtaaaacgacggccagtagctgctaatcctgtaagccc

SEQ ID NO: 6518 - DNA, 21 bp, Artificial Sequence
  primer
cactggacagtggacaaagtg

SEQ ID NO: 6519 - DNA, 21 bp, Artificial Sequence
  primer
agctgcacaaattccctgttc

SEQ ID NO: 6520 - DNA, 39 bp, Artificial Sequence
  primer
gtaaaacgacggccagtggctgtctttcagagatgatgc

SEQ ID NO: 6521 - DNA, 39 bp, Artificial Sequence
  primer
gtaaaacgacggccagttcttctatgcctcagccagttc

SEQ ID NO: 6522 - DNA, 40 bp, Artificial Sequence
  primer
gtaaaacgacggccagttccaatttcctgtaattctcagc

SEQ ID NO: 6523 - DNA, 21 bp, Artificial Sequence
  primer
acagcaagacagtgcagatgg

SEQ ID NO: 6524 - DNA, 21 bp, Artificial Sequence
  primer
ggacagccctgatgaagaaac

SEQ ID NO: 6525 - DNA, 20 bp, Artificial Sequence
  primer
agtgctttgatgtcccttgc

SEQ ID NO: 6526 - DNA, 39 bp, Artificial Sequence
  primer
gtaaaacgacggccagtttaactactgggctcaagcagc

SEQ ID NO: 6527 - DNA, 22 bp, Artificial Sequence
  primer
ccaccagctggagtgatagaag

SEQ ID NO: 6528 - DNA, 21 bp, Artificial Sequence
  primer
tgggtttcttatgcacagtga

SEQ ID NO: 6529 - DNA, 20 bp, Artificial Sequence
  primer
ccagcctggtgatagagcaa

SEQ ID NO: 6530 - DNA, 37 bp, Artificial Sequence
  primer
gtaaaacgacggccagtcaggtcctgtgacgacatcc

SEQ ID NO: 6531 - DNA, 22 bp, Artificial Sequence
  primer
gagtttctttcattggtcgctg

SEQ ID NO: 6532 - DNA, 38 bp, Artificial Sequence
  primer
gtaaaacgacggccagttgaccaatcccattctcttcc

SEQ ID NO: 6533 - DNA, 40 bp, Artificial Sequence
  primer
gtaaaacgacggccagttttatggcattggagaaagtgtg

SEQ ID NO: 6534 - DNA, 38 bp, Artificial Sequence
  primer
gtaaaacgacggccagtttggcttcgctcttgatgtta

SEQ ID NO: 6535 - DNA, 37 bp, Artificial Sequence
  primer
gtaaaacgacggccagtcctgtggcttacagtgcgac

SEQ ID NO: 6536 - DNA, 38 bp, Artificial Sequence
  primer
gtaaaacgacggccagttcctggcttgtttgtttcaag

SEQ ID NO: 6537 - DNA, 38 bp, Artificial Sequence
  primer
gtaaaacgacggccagttgcaattgctgttctctaccc

SEQ ID NO: 6538 - DNA, 22 bp, Artificial Sequence
  primer
tttaggtgacaaggtactcggc

SEQ ID NO: 6539 - DNA, 38 bp, Artificial Sequence
  primer
gtaaaacgacggccagttcatttagactcctgctcgcc

SEQ ID NO: 6540 - DNA, 37 bp, Artificial Sequence
  primer
gtaaaacgacggccagtcagtgtaaacggcctcctcc

SEQ ID NO: 6541 - DNA, 37 bp, Artificial Sequence
  primer
gtaaaacgacggccagtctgcagaggaagagtctggc

SEQ ID NO: 6542 - DNA, 21 bp, Artificial Sequence
  primer
gctgctccagttcaatctcag

SEQ ID NO: 6543 - DNA, 21 bp, Artificial Sequence
  primer
ctcatcttcccgatggatgtc

SEQ ID NO: 6544 - DNA, 21 bp, Artificial Sequence
  primer
atgaaggccaacctcctagtg

SEQ ID NO: 6545 - DNA, 38 bp, Artificial Sequence
  primer
gtaaaacgacggccagttgcagagaaggagataatggc

SEQ ID NO: 6546 - DNA, 39 bp, Artificial Sequence
  primer
gtaaaacgacggccagtaatgtgagtcctgaagtccctg

SEQ ID NO: 6547 - DNA, 20 bp, Artificial Sequence
  primer
gcaggataatgctgtccctg

SEQ ID NO: 6548 - DNA, 21 bp, Artificial Sequence
  primer
ctaattcgacttggcattggc

SEQ ID NO: 6549 - DNA, 21 bp, Artificial Sequence
  primer
acagtccattaaccctgcacc

SEQ ID NO: 6550 - DNA, 38 bp, Artificial Sequence
  primer
gtaaaacgacggccagttcttctcaccaggctgaactc

SEQ ID NO: 6551 - DNA, 21 bp, Artificial Sequence
  primer
tgctggatgctgaatcctaag

SEQ ID NO: 6552 - DNA, 21 bp, Artificial Sequence
  primer
aagcctgactgtctctcccac

SEQ ID NO: 6553 - DNA, 38 bp, Artificial Sequence
  primer
gtaaaacgacggccagtcagatatctcagaggccaccc

SEQ ID NO: 6554 - DNA, 21 bp, Artificial Sequence
  primer
atgtgcttagcccactggaag

SEQ ID NO: 6555 - DNA, 21 bp, Artificial Sequence
  primer
gtggtccttccctaacactgc

SEQ ID NO: 6556 - DNA, 38 bp, Artificial Sequence
  primer
gtaaaacgacggccagtccactgagaggtcaccaggtc

SEQ ID NO: 6557 - DNA, 38 bp, Artificial Sequence
  primer
gtaaaacgacggccagtgtcctgcatcctgcttctctg

SEQ ID NO: 6558 - DNA, 21 bp, Artificial Sequence
  primer
cacacccagcatctactgagc

SEQ ID NO: 6559 - DNA, 38 bp, Artificial Sequence
  primer
gtaaaacgacggccagttaggaacagggaccaccagag

SEQ ID NO: 6560 - DNA, 21 bp, Artificial Sequence
  primer
agtctggtcctgctcatggtc

SEQ ID NO: 6561 - DNA, 37 bp, Artificial Sequence
  primer
gtaaaacgacggccagtcctgtaggaagtggcctgtg

SEQ ID NO: 6562 - DNA, 21 bp, Artificial Sequence
  primer
gcatagcaaagccatgttgag

SEQ ID NO: 6563 - DNA, 38 bp, Artificial Sequence
  primer
gtaaaacgacggccagtggtgtatgaaggccaggtgtc

SEQ ID NO: 6564 - DNA, 38 bp, Artificial Sequence
  primer
gtaaaacgacggccagtgctgcccatgtttacagaatg

SEQ ID NO: 6565 - DNA, 38 bp, Artificial Sequence
  primer
gtaaaacgacggccagtctccttgtgagcactggaagc

SEQ ID NO: 6566 - DNA, 41 bp, Artificial Sequence
  primer
gtaaaacgacggccagtggaaatatagggaagggaaggaac

SEQ ID NO: 6567 - DNA, 39 bp, Artificial Sequence
  primer
gtaaaacgacggccagtactttctcaactttcccagcag

SEQ ID NO: 6568 - DNA, 23 bp, Artificial Sequence
  primer
ttgaaattgtatgtctgtgtgcc

SEQ ID NO: 6569 - DNA, 20 bp, Artificial Sequence
  primer
acgtattcgttgcaaccctg

SEQ ID NO: 6570 - DNA, 40 bp, Artificial Sequence
  primer
gtaaaacgacggccagttttgaggataaggatgacttccc

SEQ ID NO: 6571 - DNA, 21 bp, Artificial Sequence
  primer
atgtaatcaacaccgctttgc

SEQ ID NO: 6572 - DNA, 21 bp, Artificial Sequence
  primer
gtccacggatccagaaacaag

SEQ ID NO: 6573 - DNA, 38 bp, Artificial Sequence
  primer
gtaaaacgacggccagtactaaagcaccttctcgagcc

SEQ ID NO: 6574 - DNA, 37 bp, Artificial Sequence
  primer
gtaaaacgacggccagtcgcctgagcaatagagcaag

SEQ ID NO: 6575 - DNA, 38 bp, Artificial Sequence
  primer
gtaaaacgacggccagttactgagtcttggctaacggc

SEQ ID NO: 6576 - DNA, 38 bp, Artificial Sequence
  primer
gtaaaacgacggccagtcagaaagccagacacatttgc

SEQ ID NO: 6577 - DNA, 38 bp, Artificial Sequence; identical to SEQ ID NO: 6575
  primer

SEQ ID NO: 6578 - DNA, 21 bp, Artificial Sequence
  primer
aacagattgaggccctgtctt

SEQ ID NO: 6579 - DNA, 22 bp, Artificial Sequence
  primer
cagttggcagtaactttcccag

SEQ ID NO: 6580 - DNA, 38 bp, Artificial Sequence
  primer
gtaaaacgacggccagtaggaatgttgctgtgagaccc

SEQ ID NO: 6581 - DNA, 21 bp, Artificial Sequence
  primer
ggatttctggtgatggcagtg

SEQ ID NO: 6582 - DNA, 37 bp, Artificial Sequence
  primer
gtaaaacgacggccagtgcaggtacagccatgcagag

SEQ ID NO: 6583 - DNA, 36 bp, Artificial Sequence
  primer
gtaaaacgacggccagtgtggaggaggaagaagccc

SEQ ID NO: 6584 - DNA, 18 bp, Artificial Sequence
  primer
agcggctacacggacctg

SEQ ID NO: 6585 - DNA, 21 bp, Artificial Sequence
  primer
gcaagtatcaggaggactcgg

SEQ ID NO: 6586 - DNA, 21 bp, Artificial Sequence
  primer
ttcggcgaaggctacacttac

SEQ ID NO: 6587 - DNA, 38 bp, Artificial Sequence
  primer
gtaaaacgacggccagtgacctaggccatgttcctgtc

SEQ ID NO: 6588 - DNA, 38 bp, Artificial Sequence
  primer
gtaaaacgacggccagttacagagcagagactgctggc

SEQ ID NO: 6589 - DNA, 21 bp, Artificial Sequence
  primer
ccaggactacccttcgttgag

SEQ ID NO: 6590 - DNA, 20 bp, Artificial Sequence
  primer
actggcgcaagtcatacgag

SEQ ID NO: 6591 - DNA, 38 bp, Artificial Sequence
  primer
gtaaaacgacggccagtcaaatcttagcgtcaggagcc

SEQ ID NO: 6592 - DNA, 21 bp, Artificial Sequence
  primer
actgcagattctgtcgcttcc

SEQ ID NO: 6593 - DNA, 38 bp, Artificial Sequence
  primer
gtaaaacgacggccagtagaagtggacttgctggaagc

SEQ ID NO: 6594 - DNA, 20 bp, Artificial Sequence
  primer
ttctgtgatggacggaatgg

SEQ ID NO: 6595 - DNA, 23 bp, Artificial Sequence
  primer
gcgagaattaccatacaaaccac

SEQ ID NO: 6596 - DNA, 38 bp, Artificial Sequence
  primer
gtaaaacgacggccagtccacagaggcaataggatgac

SEQ ID NO: 6597 - DNA, 38 bp, Artificial Sequence
  primer
gtaaaacgacggccagtacactggagaagacaggaggg

SEQ ID NO: 6598 - DNA, 43 bp, Artificial Sequence
  primer
gtaaaacgacggccagtgcctttatgacatgaaataagtcaac

SEQ ID NO: 6599 - DNA, 38 bp, Artificial Sequence
  primer
gtaaaacgacggccagtatcaggccacaggaaacactc

SEQ ID NO: 6600 - DNA, 21 bp, Artificial Sequence
  primer
ctcaggaagagcagggacttg

SEQ ID NO: 6601 - DNA, 39 bp, Artificial Sequence
  primer
gtaaaacgacggccagtcatggaaagcccaattatcatc

SEQ ID NO: 6602 - DNA, 43 bp, Artificial Sequence; identical to SEQ ID NO: 6598
  primer

SEQ ID NO: 6603 - DNA, 35 bp, Artificial Sequence
  primer
gtaaaacgacggccagtctaagctgggccacaacc

SEQ ID NO: 6604 - DNA, 41 bp, Artificial Sequence
  primer
gtaaaacgacggccagtggctttataaactgggaagtatgg

SEQ ID NO: 6605 - DNA, 26 bp, Artificial Sequence
  primer
aagatgtgtagtaatgggaagaggtc

SEQ ID NO: 6606 - DNA, 21 bp, Artificial Sequence
  primer
taagcacctggaccttgtcag

SEQ ID NO: 6607 - DNA, 20 bp, Artificial Sequence
  primer
aatggtcttctcgaccatcg

SEQ ID NO: 6608 - DNA, 21 bp, Artificial Sequence
  primer
ccaagagacattgctgaaagc

SEQ ID NO: 6609 - DNA, 39 bp, Artificial Sequence
  primer
gtaaaacgacggccagttcttcatttcttcgtaggtggg

SEQ ID NO: 6610 - DNA, 37 bp, Artificial Sequence
  primer
gtaaaacgacggccagtctcctttgatggctgtttcc

SEQ ID NO: 6611 - DNA, 38 bp, Artificial Sequence
  primer
gtaaaacgacggccagttccaacttgaagtcaggcatc

SEQ ID NO: 6612 - DNA, 21 bp, Artificial Sequence
  primer
tgaccagaagactgcaacacc

SEQ ID NO: 6613 - DNA, 22 bp, Artificial Sequence
  primer
tcccactcacatgtagaggacc

SEQ ID NO: 6614 - DNA, 21 bp, Artificial Sequence
  primer
agaagactgggacagcaacag

SEQ ID NO: 6615 - DNA, 38 bp, Artificial Sequence
  primer
gtaaaacgacggccagtaagtttcagccactcctggac

SEQ ID NO: 6616 - DNA, 21 bp, Artificial Sequence
  primer
agcccagtgctttctatcagc

SEQ ID NO: 6617 - DNA, 21 bp, Artificial Sequence
  primer
agactgggataccctcagcac

SEQ ID NO: 6618 - DNA, 20 bp, Artificial Sequence
  primer
agtttcagccttccctggac

SEQ ID NO: 6619 - DNA, 38 bp, Artificial Sequence
  primer
gtaaaacgacggccagtcagaccagaagactggcacac

SEQ ID NO: 6620 - DNA, 21 bp, Artificial Sequence
  primer
gaagactgggacaccaactcc

SEQ ID NO: 6621 - DNA, 21 bp, Artificial Sequence
  primer
ccagctgaccagaagactgtg

SEQ ID NO: 6622 - DNA, 38 bp, Artificial Sequence
  primer
gtaaaacgacggccagtggctttggaagtttcagttgc

SEQ ID NO: 6623 - DNA, 21 bp, Artificial Sequence
  primer
cagacaactggcataccaacc

SEQ ID NO: 6624 - DNA, 38 bp, Artificial Sequence
  primer
gtaaaacgacggccagtcattactttctaccggcaggc

SEQ ID NO: 6625 - DNA, 38 bp, Artificial Sequence
  primer
gtaaaacgacggccagtgaaagttccacctgttcctgg

SEQ ID NO: 6626 - DNA, 21 bp, Artificial Sequence
  primer
aagcccattgtttcctaccag

SEQ ID NO: 6627 - DNA, 38 bp, Artificial Sequence
  primer
gtaaaacgacggccagttggaataaacatcctgccctc

SEQ ID NO: 6628 - DNA, 38 bp, Artificial Sequence
  primer
gtaaaacgacggccagttgccagacagtcatctcacag

SEQ ID NO: 6629 - DNA, 21 bp, Artificial Sequence
  primer
ctgagtttccagcagctaccc

SEQ ID NO: 6630 - DNA, 38 bp, Artificial Sequence
  primer
gtaaaacgacggccagtccagaagactccatcccagac

SEQ ID NO: 6631 - DNA, 21 bp, Artificial Sequence
  primer
accggattacaaacagttccc

SEQ ID NO: 6632 - DNA, 22 bp, Artificial Sequence
  primer
tctcaggctgatgacagagttg

SEQ ID NO: 6633 - DNA, 38 bp, Artificial Sequence
  primer
gtaaaacgacggccagtaatatggcactgaaacgatgc

SEQ ID NO: 6634 - DNA, 38 bp, Artificial Sequence
  primer
gtaaaacgacggccagttgcttcaaagaaccctcttcc

SEQ ID NO: 6635 - DNA, 39 bp, Artificial Sequence
  primer
gtaaaacgacggccagtcaagtagtgatgccagtgatgg

SEQ ID NO: 6636 - DNA, 23 bp, Artificial Sequence
  primer
cattgcagtgggtattaaattgc

SEQ ID NO: 6637 - DNA, 39 bp, Artificial Sequence
  primer
gtaaaacgacggccagttcatggtctaatcttagcgtgg

SEQ ID NO: 6638 - DNA, 38 bp, Artificial Sequence
  primer
gtaaaacgacggccagtagggtttacagagtccacggg

SEQ ID NO: 6639 - DNA, 38 bp, Artificial Sequence
  primer
gtaaaacgacggccagtaccctcagaaatgaccagagg

SEQ ID NO: 6640 - DNA, 20 bp, Artificial Sequence
  primer
cttcatcacaaatgccgtcc

SEQ ID NO: 6641 - DNA, 38 bp, Artificial Sequence
  primer
gtaaaacgacggccagtgcagaaggtagaaggcaaagc

SEQ ID NO: 6642 - DNA, 38 bp, Artificial Sequence
  primer
gtaaaacgacggccagtgtgaggaaacaccattctccc

SEQ ID NO: 6643 - DNA, 38 bp, Artificial Sequence
  primer
gtaaaacgacggccagttactgtggtctcccagtcagc

SEQ ID NO: 6644 - DNA, 28 bp, Artificial Sequence
  primer
gctacttaaatattccttgaaaccactt

SEQ ID NO: 6645 - DNA, 44 bp, Artificial Sequence
  primer
gtaaaacgacggccagttttcctcctctagaattctcattcttc

SEQ ID NO: 6646 - DNA, 42 bp, Artificial Sequence
  primer
gtaaaacgacggccagttcatagaattggtctaagaggcaaa

SEQ ID NO: 6647 - DNA, 41 bp, Artificial Sequence
  primer
gtaaaacgacggccagttcctaatatgtaaatgggtttggg

SEQ ID NO: 6648 - DNA, 44 bp, Artificial Sequence
  primer
gtaaaacgacggccagtcagtaacaaagcctttcacataatacg

SEQ ID NO: 6649 - DNA, 38 bp, Artificial Sequence
  primer
gtaaaacgacggccagtaactgaagtgccttcctccag

SEQ ID NO: 6650 - DNA, 39 bp, Artificial Sequence
  primer
gtaaaacgacggccagtttcatcatcccgtacacctacc

SEQ ID NO: 6651 - DNA, 42 bp, Artificial Sequence
  primer
gtaaaacgacggccagtcacatgtgtcttcctcttccttatc

SEQ ID NO: 6652 - DNA, 38 bp, Artificial Sequence
  primer
gtaaaacgacggccagtaaagggatcagaaggtcaccc

SEQ ID NO: 6653 - DNA, 39 bp, Artificial Sequence
  primer
gtaaaacgacggccagtgaagtgtgaaggaatggagtgg

SEQ ID NO: 6654 - DNA, 38 bp, Artificial Sequence
  primer
gtaaaacgacggccagtaacacttcttcggattgtcgg

SEQ ID NO: 6655 - DNA, 38 bp, Artificial Sequence
  primer
gtaaaacgacggccagtcctccaaatgcatctcaacag

SEQ ID NO: 6656 - DNA, 20 bp, Artificial Sequence
  primer
catcccacacaaagggattg

SEQ ID NO: 6657 - DNA, 20 bp, Artificial Sequence
  primer
aaaccagactcaagggcacc

SEQ ID NO: 6658 - DNA, 19 bp, Artificial Sequence
  primer
aggtggtgtgtctccaggc

SEQ ID NO: 6659 - DNA, 36 bp, Artificial Sequence
  primer
gtaaaacgacggccagtctccctctcccagctcttg

SEQ ID NO: 6660 - DNA, 38 bp, Artificial Sequence
  primer
gtaaaacgacggccagtagggagggatgatgagaggag

SEQ ID NO: 6661 - DNA, 21 bp, Artificial Sequence
  primer
ggaccacactgattctccttg

SEQ ID NO: 6662 - DNA, 36 bp, Artificial Sequence
  primer
gtaaaacgacggccagtctcgcaggtttgggctagt

SEQ ID NO: 6663 - DNA, 38 bp, Artificial Sequence
  primer
gtaaaacgacggccagtcctgagaaactgaggttgcac

SEQ ID NO: 6664 - DNA, 38 bp, Artificial Sequence
  primer
gtaaaacgacggccagtaatcaaatgaggcaaagccag

SEQ ID NO: 6665 - DNA, 38 bp, Artificial Sequence
  primer
gtaaaacgacggccagtatctactggtgaccacccacc

SEQ ID NO: 6666 - DNA, 38 bp, Artificial Sequence
  primer
gtaaaacgacggccagtttgaatggacactgaaggcag

SEQ ID NO: 6667 - DNA, 20 bp, Artificial Sequence
  primer
cagaagctgggttcagggag

SEQ ID NO: 6668 - DNA, 37 bp, Artificial Sequence
  primer
gtaaaacgacggccagtccaccacatccacacacaag

SEQ ID NO: 6669 - DNA, 37 bp, Artificial Sequence
  primer
gtaaaacgacggccagtagggttcacagtcctcctgc

SEQ ID NO: 6670 - DNA, 38 bp, Artificial Sequence
  primer
gtaaaacgacggccagttcagaacagcaggagatcagc

SEQ ID NO: 6671 - DNA, 39 bp, Artificial Sequence
  primer
gtaaaacgacggccagtcctcccaaagtgctgtataccc

SEQ ID NO: 6672 - DNA, 38 bp, Artificial Sequence
  primer
gtaaaacgacggccagtgatactgtggaagcattgggc

SEQ ID NO: 6673 - DNA, 38 bp, Artificial Sequence
  primer
gtaaaacgacggccagtgccaggacttaaacgcatgtc

SEQ ID NO: 6674 - DNA, 21 bp, Artificial Sequence
  primer
ctgaaggcaaggtgacctgag

SEQ ID NO: 6675 - DNA, 38 bp, Artificial Sequence
  primer
gtaaaacgacggccagtgggaaatgacagttggaaagg

SEQ ID NO: 6676 - DNA, 36 bp, Artificial Sequence
  primer
gtaaaacgacggccagtcttctcttgcctgccttgg

SEQ ID NO: 6677 - DNA, 38 bp, Artificial Sequence
  primer
gtaaaacgacggccagttcaatatcctgtccctccgtc

SEQ ID NO: 6678 - DNA, 21 bp, Artificial Sequence
  primer
actctcccaaggtgagccttc

SEQ ID NO: 6679 - DNA, 21 bp, Artificial Sequence
  primer
gccaagcaggacttctaccag

SEQ ID NO: 6680 - DNA, 38 bp, Artificial Sequence
  primer
gtaaaacgacggccagtgagtaaggacccgaagctgtg

SEQ ID NO: 6681 - DNA, 38 bp, Artificial Sequence
  primer
gtaaaacgacggccagtccagagacctaagtggatggg

SEQ ID NO: 6682 - DNA, 21 bp, Artificial Sequence
  primer
ttcttctgtcccatgcctctc

SEQ ID NO: 6683 - DNA, 35 bp, Artificial Sequence
  primer
gtaaaacgacggccagtgacatggtggctccgttc

SEQ ID NO: 6684 - DNA, 19 bp, Artificial Sequence
  primer
ctcccttctgcctccttcc

SEQ ID NO: 6685 - DNA, 20 bp, Artificial Sequence
  primer
ggcatagggacttcccagag

SEQ ID NO: 6686 - DNA, 38 bp, Artificial Sequence
  primer
gtaaaacgacggccagtagagcaggattgttcctggag

SEQ ID NO: 6687 - DNA, 36 bp, Artificial Sequence
  primer
gtaaaacgacggccagtcttgccaagccatcctctc

SEQ ID NO: 6688 - DNA, 38 bp, Artificial Sequence
  primer
gtaaaacgacggccagtagccttatgatctgggtgagg

SEQ ID NO: 6689 - DNA, 38 bp, Artificial Sequence
  primer
gtaaaacgacggccagtagtctaaccaacccagcccag

SEQ ID NO: 6690 - DNA, 37 bp, Artificial Sequence
  primer
gtaaaacgacggccagtctgaaaccaaagggtggagg

SEQ ID NO: 6691 - DNA, 38 bp, Artificial Sequence
  primer
gtaaaacgacggccagtagttgattggagacctgccac

SEQ ID NO: 6692 - DNA, 38 bp, Artificial Sequence
  primer
gtaaaacgacggccagtcgatacgtctcctcctctcag

SEQ ID NO: 6693 - DNA, 20 bp, Artificial Sequence
  primer
ctctgggctgtgtgagaagc

SEQ ID NO: 6694 - DNA, 21 bp, Artificial Sequence
  primer
cagaaacaccgggaagaagag

SEQ ID NO: 6695 - DNA, 21 bp, Artificial Sequence
  primer
ggatgagcgatttctggaaga

SEQ ID NO: 6696 - DNA, 36 bp, Artificial Sequence
  primer
gtaaaacgacggccagtggagtcaaggaggcatggt

SEQ ID NO: 6697 - DNA, 38 bp, Artificial Sequence
  primer
gtaaaacgacggccagtagcacatgatccattacctgg

SEQ ID NO: 6698 - DNA, 38 bp, Artificial Sequence
  primer
gtaaaacgacggccagtgggtgaggttaacatgcaagg

SEQ ID NO: 6699 - DNA, 38 bp, Artificial Sequence
  primer
gtaaaacgacggccagtggccactgaactttacgtctg

SEQ ID NO: 6700 - DNA, 21 bp, Artificial Sequence
  primer
gaaagggagattctgggtctg

SEQ ID NO: 6701 - DNA, 38 bp, Artificial Sequence
  primer
gtaaaacgacggccagttgtaggagagcaggaggtctg

SEQ ID NO: 6702 - DNA, 38 bp, Artificial Sequence
  primer
gtaaaacgacggccagtttctcctctcttggcctcttc

SEQ ID NO: 6703 - DNA, 22 bp, Artificial Sequence
  primer
ccaggtacttaccagagatggg

SEQ ID NO: 6704 - DNA, 38 bp, Artificial Sequence
  primer
gtaaaacgacggccagtctaaggaaggaggcagctgtg

SEQ ID NO: 6705 - DNA, 21 bp, Artificial Sequence
  primer
agtcagtggcaataaccaggg

SEQ ID NO: 6706 - DNA, 38 bp, Artificial Sequence
  primer
gtaaaacgacggccagtatctcggcaaggagttcactg

SEQ ID NO: 6707 - DNA, 21 bp, Artificial Sequence
  primer
gcagcctggtgtaggagaaac

SEQ ID NO: 6708 - DNA, 21 bp, Artificial Sequence
  primer
cctccttgggtagaatggaag

SEQ ID NO: 6709 - DNA, 38 bp, Artificial Sequence
  primer
gtaaaacgacggccagtcccactaccaatcccacagag

SEQ ID NO: 6710 - DNA, 21 bp, Artificial Sequence
  primer
ggcagtgactgaagacaaggg

SEQ ID NO: 6711 - DNA, 38 bp, Artificial Sequence
  primer
gtaaaacgacggccagtctcccttctacaactgcaccc

SEQ ID NO: 6712 - DNA, 21 bp, Artificial Sequence
  primer
gcagcgtgaagaagagtcagg

SEQ ID NO: 6713 - DNA, 21 bp, Artificial Sequence
  primer
tgttgcctctttccaagtgac

SEQ ID NO: 6714 - DNA, 21 bp, Artificial Sequence
  primer
tgtgacgaatttgaggtcctg

SEQ ID NO: 6715 - DNA, 38 bp, Artificial Sequence
  primer
gtaaaacgacggccagttgatgctaagcagaggcattc

SEQ ID NO: 6716 - DNA, 37 bp, Artificial Sequence
  primer
gtaaaacgacggccagtgtacagggacctcagccctc

SEQ ID NO: 6717 - DNA, 38 bp, Artificial Sequence
  primer
gtaaaacgacggccagtgaagccctggtgcagtatgtc

SEQ ID NO: 6718 - DNA, 37 bp, Artificial Sequence
  primer
gtaaaacgacggccagtgcagctgctcagatagtggg

SEQ ID NO: 6719 - DNA, 35 bp, Artificial Sequence
  primer
gtaaaacgacggccagtgcgctagatgcggacacc

SEQ ID NO: 6720 - DNA, 38 bp, Artificial Sequence
  primer
gtaaaacgacggccagtattcaacgtagtccctgtgcc

SEQ ID NO: 6721 - DNA, 37 bp, Artificial Sequence
  primer
gtaaaacgacggccagtacataaagcactcggcatgg

SEQ ID NO: 6722 - DNA, 38 bp, Artificial Sequence
  primer
gtaaaacgacggccagtgggtcagcctatgatgtgttg

SEQ ID NO: 6723 - DNA, 21 bp, Artificial Sequence
  primer
aagccagtcacctacctctgc

SEQ ID NO: 6724 - DNA, 39 bp, Artificial Sequence
  primer
gtaaaacgacggccagtgggactctgctcttaggtgagg

SEQ ID NO: 6725 - DNA, 21 bp, Artificial Sequence
  primer
ttccatgtgaatcaatcagcc

SEQ ID NO: 6726 - DNA, 21 bp, Artificial Sequence
  primer
gaggcgaagttctccaacaac

SEQ ID NO: 6727 - DNA, 38 bp, Artificial Sequence
  primer
gtaaaacgacggccagtagcatcatcctatagggcagg

SEQ ID NO: 6728 - DNA, 38 bp, Artificial Sequence
  primer
gtaaaacgacggccagtacatttcctcagggatgggtc

SEQ ID NO: 6729 - DNA, 35 bp, Artificial Sequence
  primer
gtaaaacgacggccagtagtcccagcgtccgtgag

SEQ ID NO: 6730 - DNA, 36 bp, Artificial Sequence
  primer
gtaaaacgacggccagtgccgcaagtcctcaggtag

SEQ ID NO: 6731 - DNA, 20 bp, Artificial Sequence
  primer
aaagaggatggacggactgc

SEQ ID NO: 6732 - DNA, 20 bp, Artificial Sequence
  primer
ccctccttcatctcccaaac

SEQ ID NO: 6733 - DNA, 21 bp, Artificial Sequence
  primer
gtgggacacactgaaccacag

SEQ ID NO: 6734 - DNA, 38 bp, Artificial Sequence
  primer
gtaaaacgacggccagtttgcttggaggtcaagtcaag

SEQ ID NO: 6735 - DNA, 38 bp, Artificial Sequence
  primer
gtaaaacgacggccagttacgcatcaccgtaggaacag

SEQ ID NO: 6736 - DNA, 38 bp, Artificial Sequence
  primer
gtaaaacgacggccagttcctgaagtgcgtgtgtcttc

SEQ ID NO: 6737 - DNA, 21 bp, Artificial Sequence
  primer
agcattgttgagtccagggag

SEQ ID NO: 6738 - DNA, 21 bp, Artificial Sequence
  primer
gaacatcccagagagagctgg

SEQ ID NO: 6739 - DNA, 39 bp, Artificial Sequence
  primer
gtaaaacgacggccagtgcccgaataggcttaggtgtag

SEQ ID NO: 6740 - DNA, 21 bp, Artificial Sequence
  primer
ggtgaagctgtcttgaatccc

SEQ ID NO: 6741 - DNA, 38 bp, Artificial Sequence
  primer
gtaaaacgacggccagttaccctatgtgaagccagtgc

SEQ ID NO: 6742 - DNA, 21 bp, Artificial Sequence
  primer
ttagctcaggagcagagaggg

SEQ ID NO: 6743 - DNA, 21 bp, Artificial Sequence
  primer
ctcccatgtggattgttaggc

SEQ ID NO: 6744 - DNA, 38 bp, Artificial Sequence
  primer
gtaaaacgacggccagtataagcaaaggacttggcagg

SEQ ID NO: 6745 - DNA, 21 bp, Artificial Sequence
  primer
gccattaattcaggcaccaag

SEQ ID NO: 6746 - DNA, 36 bp, Artificial Sequence
  primer
gtaaaacgacggccagtactgtgcctgctgtggctc

SEQ ID NO: 6747 - DNA, 38 bp, Artificial Sequence
  primer
gtaaaacgacggccagtaacaacacgcactttctgtgc

SEQ ID NO: 6748 - DNA, 37 bp, Artificial Sequence
  primer
gtaaaacgacggccagttgcttggtgaaccgaagaag

SEQ ID NO: 6749 - DNA, 39 bp, Artificial Sequence
  primer
gtaaaacgacggccagtcatggctatctgtctctctgcc

SEQ ID NO: 6750 - DNA, 20 bp, Artificial Sequence
  primer
acagtcatggctcggtgttc

SEQ ID NO: 6751 - DNA, 21 bp, Artificial Sequence
  primer
gtggaatcagggatggtgaag

SEQ ID NO: 6752 - DNA, 38 bp, Artificial Sequence
  primer
gtaaaacgacggccagtaagccaccttgactggatttg

SEQ ID NO: 6753 - DNA, 37 bp, Artificial Sequence
  primer
gtaaaacgacggccagtgacgtggagcatttacagcc

SEQ ID NO: 6754 - DNA, 21 bp, Artificial Sequence
  primer
ctgaggctacagctctccctg

SEQ ID NO: 6755 - DNA, 20 bp, Artificial Sequence
  primer
agaaggtcgccaagaacctc

SEQ ID NO: 6756 - DNA, 38 bp, Artificial Sequence
  primer
gtaaaacgacggccagttaggagctgggagcagttagg

SEQ ID NO: 6757 - DNA, 21 bp, Artificial Sequence
  primer
ccgctttaaccagtgcaacac

SEQ ID NO: 6758 - DNA, 38 bp, Artificial Sequence
  primer
gtaaaacgacggccagtagaatgtgcaatacaggctgg

SEQ ID NO: 6759 - DNA, 21 bp, Artificial Sequence
  primer
gaagaacctggtgcaggaatg

SEQ ID NO: 6760 - DNA, 37 bp, Artificial Sequence
  primer
gtaaaacgacggccagtctggcattcctcagacaacc

SEQ ID NO: 6761 - DNA, 21 bp, Artificial Sequence
  primer
ctacctctttgtggagggtgc

SEQ ID NO: 6762 - DNA, 38 bp, Artificial Sequence
  primer
gtaaaacgacggccagtatagggatcttgtgaggaccg

SEQ ID NO: 6763 - DNA, 19 bp, Artificial Sequence
  primer
cggtgagtgaggctgaatg

SEQ ID NO: 6764 - DNA, 37 bp, Artificial Sequence
  primer
gtaaaacgacggccagttgttcaccaggtacttcggc

SEQ ID NO: 6765 - DNA, 20 bp, Artificial Sequence
  primer
ttagaccagccagcaagagg

SEQ ID NO: 6766 - DNA, 35 bp, Artificial Sequence
  primer
gtaaaacgacggccagtacgctaagcctggccctc

SEQ ID NO: 6767 - DNA, 21 bp, Artificial Sequence
  primer
tgtccaacttcccaccttacc

SEQ ID NO: 6768 - DNA, 38 bp, Artificial Sequence
  primer
gtaaaacgacggccagtcagacaggagtcagttcctgc

SEQ ID NO: 6769 - DNA, 26 bp, Artificial Sequence
  primer
tcctaacagaatctaatgagtcttgg

SEQ ID NO: 6770 - DNA, 38 bp, Artificial Sequence
  primer
gtaaaacgacggccagtagcctttaggccatggatgag

SEQ ID NO: 6771 - DNA, 22 bp, Artificial Sequence
  primer
ggaaagtcaacaccttgtggtc

SEQ ID NO: 6772 - DNA, 41 bp, Artificial Sequence
  primer
gtaaaacgacggccagttccttagaatgtatgtggcatgtg

SEQ ID NO: 6773 - DNA, 37 bp, Artificial Sequence
  primer
gtaaaacgacggccagtctgtgtgaagccaaagaggc

SEQ ID NO: 6774 - DNA, 22 bp, Artificial Sequence
  primer
acaatttcagcacttcctccag

SEQ ID NO: 6775 - DNA, 38 bp, Artificial Sequence
  primer
gtaaaacgacggccagtattcacagcaccatacttcgg

SEQ ID NO: 6776 - DNA, 40 bp, Artificial Sequence
  primer
gtaaaacgacggccagtggaatatcttcctccctaatggg

SEQ ID NO: 6777 - DNA, 38 bp, Artificial Sequence
  primer
gtaaaacgacggccagtgcttggagcaacttatcaggg

SEQ ID NO: 6778 - DNA, 21 bp, Artificial Sequence
  primer
agagaatgacagggaaggcag

SEQ ID NO: 6779 - DNA, 38 bp, Artificial Sequence
  primer
gtaaaacgacggccagtaactgcgatgtcaaagacagg

SEQ ID NO: 6780 - DNA, 21 bp, Artificial Sequence
  primer
catttccatgctgccatgtag

SEQ ID NO: 6781 - DNA, 21 bp, Artificial Sequence
  primer
cagtgggagttcttgggtttc

SEQ ID NO: 6782 - DNA, 21 bp, Artificial Sequence
  primer
gcgtaggacctgtgtcacatc

SEQ ID NO: 6783 - DNA, 22 bp, Artificial Sequence
  primer
tgggtcagctagaatgagtgtg

SEQ ID NO: 6784 - DNA, 40 bp, Artificial Sequence
  primer
gtaaaacgacggccagtccaagatttacccaagtccaaag

SEQ ID NO: 6785 - DNA, 21 bp, Artificial Sequence
  primer
ataaaccacaggatggccaag

SEQ ID NO: 6786 - DNA, 21 bp, Artificial Sequence
  primer
ctgccatcgtctttctttgac

SEQ ID NO: 6787 - DNA, 21 bp, Artificial Sequence
  primer
ccattcactctccctccagtc

SEQ ID NO: 6788 - DNA, 38 bp, Artificial Sequence
  primer
gtaaaacgacggccagtctgcacacatttacccaggtg

SEQ ID NO: 6789 - DNA, 38 bp, Artificial Sequence
  primer
gtaaaacgacggccagtacgaagagatggaattcggtg

SEQ ID NO: 6790 - DNA, 21 bp, Artificial Sequence
  primer
caggatggaacgtcttcagtg

SEQ ID NO: 6791 - DNA, 21 bp, Artificial Sequence
  primer
tctgccaaagaatctgctgag

SEQ ID NO: 6792 - DNA, 37 bp, Artificial Sequence
  primer
gtaaaacgacggccagtagttatgccctattgtgggc

SEQ ID NO: 6793 - DNA, 38 bp, Artificial Sequence
  primer
gtaaaacgacggccagtagttatgccctatttgtgggc

SEQ ID NO: 6794 - DNA, 38 bp, Artificial Sequence
  primer
gtaaaacgacggccagtagatgccagctttctcagagc

SEQ ID NO: 6795 - DNA, 38 bp, Artificial Sequence
  primer
gtaaaacgacggccagtgggacagagaagcagtgtgtg

SEQ ID NO: 6796 - DNA, 38 bp, Artificial Sequence
  primer
gtaaaacgacggccagtcagctagtgaaggtgccacag

SEQ ID NO: 6797 - DNA, 38 bp, Artificial Sequence
  primer
gtaaaacgacggccagttcaactgttaccattgccacc

SEQ ID NO: 6798 - DNA, 21 bp, Artificial Sequence
  primer
tgcacctgatttccaacaaag

SEQ ID NO: 6799 - DNA, 21 bp, Artificial Sequence
  primer
ctctagaggcttccgcttctg

SEQ ID NO: 6800 - DNA, 21 bp, Artificial Sequence
  primer
taaaggcagatgctgttgtgc

SEQ ID NO: 6801 - DNA, 21 bp, Artificial Sequence
  primer
ctcaagatggatcacactgcc

SEQ ID NO: 6802 - DNA, 21 bp, Artificial Sequence
  primer
aagcagtgatgggagcttagg

SEQ ID NO: 6803 - DNA, 21 bp, Artificial Sequence
  primer
gaaacctttgccctcttctcc

SEQ ID NO: 6804 - DNA, 21 bp, Artificial Sequence
  primer
ccagggagagagagaagtccc

SEQ ID NO: 6805 - DNA, 38 bp, Artificial Sequence
  primer
gtaaaacgacggccagtcgactatttaggcaagccacc

SEQ ID NO: 6806 - DNA, 38 bp, Artificial Sequence
  primer
gtaaaacgacggccagtctgcttattggagtgagcgtg

SEQ ID NO: 6807 - DNA, 38 bp, Artificial Sequence
  primer
gtaaaacgacggccagtctgcatcaagaacagctacgg

SEQ ID NO: 6808 - DNA, 37 bp, Artificial Sequence
  primer
gtaaaacgacggccagtcccatgtggagttagccaag

SEQ ID NO: 6809 - DNA, 38 bp, Artificial Sequence
  primer
gtaaaacgacggccagtgatgggcttgtcagttcattg

SEQ ID NO: 6810 - DNA, 21 bp, Artificial Sequence
  primer
caaattctatgctccgtgctg

SEQ ID NO: 6811 - DNA, 37 bp, Artificial Sequence
  primer
gtaaaacgacggccagtatggtccctgcctaaagctg

SEQ ID NO: 6812 - DNA, 38 bp, Artificial Sequence
  primer
gtaaaacgacggccagtgtgtctatcctgcagccattc

SEQ ID NO: 6813 - DNA, 37 bp, Artificial Sequence
  primer
gtaaaacgacggccagtacaggagagagatcccacgg

SEQ ID NO: 6814 - DNA, 36 bp, Artificial Sequence
  primer
gtaaaacgacggccagtgacagcagcaggtgacgac

SEQ ID NO: 6815 - DNA, 21 bp, Artificial Sequence
  primer
ggccgattaatagtttgcgac

SEQ ID NO: 6816 - DNA, 21 bp, Artificial Sequence
  primer
gctgccttgaagaaagacttg

SEQ ID NO: 6817 - DNA, 35 bp, Artificial Sequence
  primer
gtaaaacgacggccagttgcctcagcctctcaagc

SEQ ID NO: 6818 - DNA, 21 bp, Artificial Sequence
  primer
ggacagtatggccttggtcag

SEQ ID NO: 6819 - DNA, 21 bp, Artificial Sequence
  primer
gagatcgagcagagctggaag

SEQ ID NO: 6820 - DNA, 37 bp, Artificial Sequence
  primer
gtaaaacgacggccagtccctcaaagaggagagtggg

SEQ ID NO: 6821 - DNA, 21 bp, Artificial Sequence
  primer
gatagtaccaggaagccagcc

SEQ ID NO: 6822 - DNA, 21 bp, Artificial Sequence
  primer
cagagattagggtgagtgggc

SEQ ID NO: 6823 - DNA, 21 bp, Artificial Sequence
  primer
acaagtggatggaaggaccag

SEQ ID NO: 6824 - DNA, 38 bp, Artificial Sequence
  primer
gtaaaacgacggccagttggaaggtcagtctgagcaag

SEQ ID NO: 6825 - DNA, 18 bp, Artificial Sequence
  primer
acctcatgctcccagcac

SEQ ID NO: 6826 - DNA, 21 bp, Artificial Sequence
  primer
gtatggatcagggtggctgtc

SEQ ID NO: 6827 - DNA, 37 bp, Artificial Sequence
  primer
gtaaaacgacggccagtcaggtaccagatgtggaggg

SEQ ID NO: 6828 - DNA, 38 bp, Artificial Sequence
  primer
gtaaaacgacggccagtgaagctgtccagcacagagac

SEQ ID NO: 6829 - DNA, 38 bp, Artificial Sequence
  primer
gtaaaacgacggccagttgagggtgaaggagaggtttc

SEQ ID NO: 6830 - DNA, 38 bp, Artificial Sequence
  primer
gtaaaacgacggccagtagctacacctgaggaactggc

SEQ ID NO: 6831 - DNA, 38 bp, Artificial Sequence
  primer
gtaaaacgacggccagtgggctgtgagtggtaggtctg

SEQ ID NO: 6832 - DNA, 36 bp, Artificial Sequence
  primer
gtaaaacgacggccagttccaaggacgcttaggacc

SEQ ID NO: 6833 - DNA, 21 bp, Artificial Sequence
  primer
gtagactgcggtgtgtatcgg

SEQ ID NO: 6834 - DNA, 35 bp, Artificial Sequence
  primer
gtaaaacgacggccagtttccttccctgtgagccc

SEQ ID NO: 6835 - DNA, 37 bp, Artificial Sequence
  primer
gtaaaacgacggccagtggaatcctcctctcagtccc

SEQ ID NO: 6836 - DNA, 21 bp, Artificial Sequence
  primer
aatacagaattgggtgggagg

SEQ ID NO: 6837 - DNA, 21 bp, Artificial Sequence
  primer
tgacccatgagaagatgcttg

SEQ ID NO: 6838 - DNA, 21 bp, Artificial Sequence
  primer
atgtaccctgagcacgacatc

SEQ ID NO: 6839 - DNA, 21 bp, Artificial Sequence
  primer
aggatctctagagctgtgccc

SEQ ID NO: 6840 - DNA, 21 bp, Artificial Sequence
  primer
cacctccaagttcaggcattc

SEQ ID NO: 6841 - DNA, 21 bp, Artificial Sequence
  primer
gacatttacagagccatgccc

SEQ ID NO: 6842 - DNA, 20 bp, Artificial Sequence
  primer
cccatggtgtgagtgtaggc

SEQ ID NO: 6843 - DNA, 38 bp, Artificial Sequence
  primer
gtaaaacgacggccagtcaatcctcagaactgaagcgg

SEQ ID NO: 6844 - DNA, 20 bp, Artificial Sequence
  primer
cagagatgactgaggcctgg

SEQ ID NO: 6845 - DNA, 38 bp, Artificial Sequence
  primer
gtaaaacgacggccagtcagactctgatagctgctggg

SEQ ID NO: 6846 - DNA, 38 bp, Artificial Sequence
  primer
gtaaaacgacggccagttcccagccaccatactctacc

SEQ ID NO: 6847 - DNA, 38 bp, Artificial Sequence
  primer
gtaaaacgacggccagtcaaaggttaatccagcagcag

SEQ ID NO: 6848 - DNA, 38 bp, Artificial Sequence
  primer
gtaaaacgacggccagtcccttcaaagaagatcccagg

SEQ ID NO: 6849 - DNA, 38 bp, Artificial Sequence
  primer
gtaaaacgacggccagtgtgaaatgggagcattcaagc

SEQ ID NO: 6850 - DNA, 38 bp, Artificial Sequence
  primer
gtaaaacgacggccagtgggacacagttctccctgatt

SEQ ID NO: 6851 - DNA, 21 bp, Artificial Sequence
  primer
ctgaggctacagctctccctg

SEQ ID NO: 6852 - DNA, 38 bp, Artificial Sequence
  primer
gtaaaacgacggccagtgaacctcatcatcttcctggg

SEQ ID NO: 6853 - DNA, 38 bp, Artificial Sequence
  primer
gtaaaacgacggccagtagttggaatcccagaggacag

SEQ ID NO: 6854 - DNA, 37 bp, Artificial Sequence
  primer
gtaaaacgacggccagtcaagaaagcaggtgagctgg

SEQ ID NO: 6855 - DNA, 36 bp, Artificial Sequence
  primer
gtaaaacgacggccagtgtagaaggtgcagcccagg

SEQ ID NO: 6856 - DNA, 21 bp, Artificial Sequence
  primer
ccgaaagtacatgtttcgcat

SEQ ID NO: 6857 - DNA, 37 bp, Artificial Sequence
  primer
gtaaaacgacggccagtactgagctcatgcaggcttc

SEQ ID NO: 6858 - DNA, 21 bp, Artificial Sequence
  primer
tccctgatggagatgacagag

SEQ ID NO: 6859 - DNA, 21 bp, Artificial Sequence
  primer
aaatgggagtaatgctggcac

SEQ ID NO: 6860 - DNA, 18 bp, Artificial Sequence
  primer
accagggtgccaaggatg

SEQ ID NO: 6861 - DNA, 38 bp, Artificial Sequence
  primer
gtaaaacgacggccagtgtgtggcttcaggtcaagagg

SEQ ID NO: 6862 - DNA, 21 bp, Artificial Sequence
  primer
ctgaggctacagctctccctg

SEQ ID NO: 6863 - DNA, 38 bp, Artificial Sequence; identical to SEQ ID NO: 6852
  primer

SEQ ID NO: 6864 - DNA, 38 bp, Artificial Sequence
  primer
gtaaaacgacggccagtttggaatcccagaggacagag

SEQ ID NO: 6865 - DNA, 38 bp, Artificial Sequence
  primer
gtaaaacgacggccagtagacaagcatgtgccagacag

SEQ ID NO: 6866 - DNA, 35 bp, Artificial Sequence
  primer
gtaaaacgacggccagtgtagaaggcgcagcccag

SEQ ID NO: 6867 - DNA, 21 bp, Artificial Sequence
  primer
aggccgaaagtacatgtttcc

SEQ ID NO: 6868 - DNA, 36 bp, Artificial Sequence
  primer
gtaaaacgacggccagtactgagctcctgcaggctt

SEQ ID NO: 6869 - DNA, 21 bp, Artificial Sequence
  primer
tgatggagatgacagaggctg

SEQ ID NO: 6870 - DNA, 21 bp, Artificial Sequence
  primer
tagggtctcctgcggactaag

SEQ ID NO: 6871 - DNA, 18 bp, Artificial Sequence
  primer
accagggtgccaaggatg

SEQ ID NO: 6872 - DNA, 20 bp, Artificial Sequence
  primer
gtttgactttggcaggcaag

SEQ ID NO: 6873 - DNA, 38 bp, Artificial Sequence
  primer
gtaaaacgacggccagtacctagtcatccatgtgctgg

SEQ ID NO: 6874 - DNA, 21 bp, Artificial Sequence
  primer
aggaaaggattagcctcctgc

SEQ ID NO: 6875 - DNA, 20 bp, Artificial Sequence
  primer
cttccctggagaagtggacc

SEQ ID NO: 6876 - DNA, 21 bp, Artificial Sequence
  primer
gtaccggttgtcagttgggtc

SEQ ID NO: 6877 - DNA, 38 bp, Artificial Sequence
  primer
gtaaaacgacggccagtatcagacagtcattgttgccc

SEQ ID NO: 6878 - DNA, 39 bp, Artificial Sequence
  primer
gtaaaacgacggccagttcttacatgcaaatagcgatgg

SEQ ID NO: 6879 - DNA, 38 bp, Artificial Sequence
  primer
gtaaaacgacggccagtaaataccattggtggcgtatg

SEQ ID NO: 6880 - DNA, 27 bp, Artificial Sequence
  primer
gcactttataatttgagaaaggctacg

SEQ ID NO: 6881 - DNA, 22 bp, Artificial Sequence
  primer
tctatttgcgcattatctctgg

SEQ ID NO: 6882 - DNA, 22 bp, Artificial Sequence
  primer
cctaacgtttcagttcctgtgg

SEQ ID NO: 6883 - DNA, 40 bp, Artificial Sequence
  primer
gtaaaacgacggccagtcagctgatataagccagcttcag

SEQ ID NO: 6884 - DNA, 38 bp, Artificial Sequence
  primer
gtaaaacgacggccagtagcacatggcaacaggttaag

SEQ ID NO: 6885 - DNA, 38 bp, Artificial Sequence
  primer
gtaaaacgacggccagtctgcccttcacaaatgttgac

SEQ ID NO: 6886 - DNA, 22 bp, Artificial Sequence
  primer
cgtttgtattgctaccatttgc

SEQ ID NO: 6887 - DNA, 21 bp, Artificial Sequence
  primer
tctgtcacctgagttatgccc

SEQ ID NO: 6888 - DNA, 21 bp, Artificial Sequence
  primer
tacgaccagcaaattccctta

SEQ ID NO: 6889 - DNA, 39 bp, Artificial Sequence
  primer
gtaaaacgacggccagttttgggttagctgtgttatggg

SEQ ID NO: 6890 - DNA, 37 bp, Artificial Sequence
  primer
gtaaaacgacggccagtcatcgttcagcacagagcag

SEQ ID NO: 6891 - DNA, 26 bp, Artificial Sequence
  primer
cagagaaatacaagagccagtcaata

SEQ ID NO: 6892 - DNA, 38 bp, Artificial Sequence
  primer
gtaaaacgacggccagttgttgaagatttatgcctggg

SEQ ID NO: 6893 - DNA, 22 bp, Artificial Sequence
  primer
ttcaccttaaaccaagatgctg

SEQ ID NO: 6894 - DNA, 47 bp, Artificial Sequence
  primer
gtaaaacgacggccagtcaaataattatagctaccagtgagactgag

SEQ ID NO: 6895 - DNA, 22 bp, Artificial Sequence
  primer
gggatctcccatgtgataattg

SEQ ID NO: 6896 - DNA, 39 bp, Artificial Sequence
  primer
gtaaaacgacggccagttgatggtgagtggaatatttgc

SEQ ID NO: 6897 - DNA, 19 bp, Artificial Sequence
  primer
actttaacccaggaagcgg

SEQ ID NO: 6898 - DNA, 23 bp, Artificial Sequence
  primer
agaattaccatcagtcttggcag

SEQ ID NO: 6899 - DNA, 39 bp, Artificial Sequence
  primer
gtaaaacgacggccagttgatttctgagttcgttgggtt

SEQ ID NO: 6900 - DNA, 25 bp, Artificial Sequence
  primer
aaagtatttgaatattcctggtccc

SEQ ID NO: 6901 - DNA, 26 bp, Artificial Sequence
  primer
ttgctctcataactaatggaaatgtg

SEQ ID NO: 6902 - DNA, 44 bp, Artificial Sequence
  primer
gtaaaacgacggccagtcatatcaactccatatgtaaagagcag

SEQ ID NO: 6903 - DNA, 43 bp, Artificial Sequence
  primer
gtaaaacgacggccagtaaacttaacctattgtggagcagttc

SEQ ID NO: 6904 - DNA, 21 bp, Artificial Sequence
  primer
ccaagcttgtgtttgcatctg

SEQ ID NO: 6905 - DNA, 21 bp, Artificial Sequence
  primer
tgcctaagtgtccgggttaag

SEQ ID NO: 6906 - DNA, 21 bp, Artificial Sequence
  primer
agcaggagtacgctcttccac

SEQ ID NO: 6907 - DNA, 38 bp, Artificial Sequence
  primer
gtaaaacgacggccagtgggaactagaagggaacaggg

SEQ ID NO: 6908 - DNA, 37 bp, Artificial Sequence
  primer
gtaaaacgacggccagtgtcatggaccttgcttctgg

SEQ ID NO: 6909 - DNA, 21 bp, Artificial Sequence
  primer
gggttcaccaattctgtcctg

SEQ ID NO: 6910 - DNA, 21 bp, Artificial Sequence
  primer
agaattgtcttgttggcccag

SEQ ID NO: 6911 - DNA, 21 bp, Artificial Sequence
  primer
tcttaaacctgtgagggcaac

SEQ ID NO: 6912 - DNA, 38 bp, Artificial Sequence
  primer
gtaaaacgacggccagtaccagcagaagaggagctgtc

SEQ ID NO: 6913 - DNA, 38 bp, Artificial Sequence
  primer
gtaaaacgacggccagttctgcctatctctgacccagg

SEQ ID NO: 6914 - DNA, 21 bp, Artificial Sequence
  primer
aaaggacatggaggagctgtc

SEQ ID NO: 6915 - DNA, 38 bp, Artificial Sequence
  primer
gtaaaacgacggccagttttgatctgaagctggtgtgg

SEQ ID NO: 6916 - DNA, 38 bp, Artificial Sequence
  primer
gtaaaacgacggccagtactgcagaggaggatctcagg

SEQ ID NO: 6917 - DNA, 38 bp, Artificial Sequence
  primer
gtaaaacgacggccagtctttctgcaaggaatgttcgg

SEQ ID NO: 6918 - DNA, 38 bp, Artificial Sequence
  primer
gtaaaacgacggccagtgccctttgaaggataggaagg

SEQ ID NO: 6919 - DNA, 22 bp, Artificial Sequence
  primer
ggcatctgtgagtaagtgaccc

SEQ ID NO: 6920 - DNA, 38 bp, Artificial Sequence
  primer
gtaaaacgacggccagttggcactgtgtctgttgagtg

SEQ ID NO: 6921 - DNA, 38 bp, Artificial Sequence
  primer
gtaaaacgacggccagtcttctttggccatctctctcc

SEQ ID NO: 6922 - DNA, 38 bp, Artificial Sequence
  primer
gtaaaacgacggccagtctctgacactgatggacaggc

SEQ ID NO: 6923 - DNA, 37 bp, Artificial Sequence
  primer
gtaaaacgacggccagtcatggttcaatccatccacc

SEQ ID NO: 6924 - DNA, 20 bp, Artificial Sequence
  primer
agcatgcacaggttagggtg

SEQ ID NO: 6925 - DNA, 21 bp, Artificial Sequence
  primer
ttcatagcagggtgctgactg

SEQ ID NO: 6926 - DNA, 21 bp, Artificial Sequence
  primer
gtttgagaggatgaaccctgc

SEQ ID NO: 6927 - DNA, 38 bp, Artificial Sequence
  primer
gtaaaacgacggccagtccaggacactgtttgttgtgg

SEQ ID NO: 6928 - DNA, 38 bp, Artificial Sequence
  primer
gtaaaacgacggccagtccatgacctaggctgatctcc

SEQ ID NO: 6929 - DNA, 21 bp, Artificial Sequence
  primer
tatggttgcacaaactgaggc

SEQ ID NO: 6930 - DNA, 38 bp, Artificial Sequence
  primer
gtaaaacgacggccagtcaagtgtttcctgtcagccac

SEQ ID NO: 6931 - DNA, 23 bp, Artificial Sequence
  primer
tttatggatgcagcttctctctg

SEQ ID NO: 6932 - DNA, 21 bp, Artificial Sequence
  primer
tgggtgcacacagctattgag

SEQ ID NO: 6933 - DNA, 20 bp, Artificial Sequence
  primer
atgggagaagtgttgggagg

SEQ ID NO: 6934 - DNA, 19 bp, Artificial Sequence
  primer
aatgtgagaaaggctgcgg

SEQ ID NO: 6935 - DNA, 38 bp, Artificial Sequence
  primer
gtaaaacgacggccagtccaataccgaggagacctgac

SEQ ID NO: 6936 - DNA, 38 bp, Artificial Sequence
  primer
gtaaaacgacggccagttttctgctttccgatgatttc

SEQ ID NO: 6937 - DNA, 44 bp, Artificial Sequence
  primer
gtaaaacgacggccagttttaatgctacatgattgattcttagg

SEQ ID NO: 6938 - DNA, 46 bp, Artificial Sequence
  primer
gtaaaacgacggccagtgtatatatgtgactgtgaggttgaaagtt

SEQ ID NO: 6939 - DNA, 19 bp, Artificial Sequence
  primer
gcttgcccaccactcattt

SEQ ID NO: 6940 - DNA, 22 bp, Artificial Sequence
  primer
cagcatctcagtgtaatcccag

SEQ ID NO: 6941 - DNA, 21 bp, Artificial Sequence
  primer
ggcctatttcatagtcctggg

SEQ ID NO: 6942 - DNA, 36 bp, Artificial Sequence
  primer
gtaaaacgacggccagtccaaggtggctaggtgagc

SEQ ID NO: 6943 - DNA, 38 bp, Artificial Sequence
  primer
gtaaaacgacggccagttcattccctgtcctttgactg

SEQ ID NO: 6944 - DNA, 20 bp, Artificial Sequence
  primer
aatttgggtgtggaggaagg

SEQ ID NO: 6945 - DNA, 21 bp, Artificial Sequence
  primer
tcccagagattcatcagcttg

SEQ ID NO: 6946 - DNA, 44 bp, Artificial Sequence
  primer
gtaaaacgacggccagtttgttatgctaaaggataagggtacaa

SEQ ID NO: 6947 - DNA, 21 bp, Artificial Sequence
  primer
ttctgcttgaagttgctgtgc

SEQ ID NO: 6948 - DNA, 39 bp, Artificial Sequence
  primer
gtaaaacgacggccagtgaccatccatgtcagaagtcct

SEQ ID NO: 6949 - DNA, 38 bp, Artificial Sequence
  primer
gtaaaacgacggccagtctgggttcttcccaattcttc

SEQ ID NO: 6950 - DNA, 20 bp, Artificial Sequence
  primer
acagtgaacaagtgccaggg

SEQ ID NO: 6951 - DNA, 38 bp, Artificial Sequence
  primer
gtaaaacgacggccagtctcagggttcagctcctaagc

SEQ ID NO: 6952 - DNA, 21 bp, Artificial Sequence
  primer
gagctataatgggtgaagggc

SEQ ID NO: 6953 - DNA, 38 bp, Artificial Sequence
  primer
gtaaaacgacggccagtcagagtcagtcatgctcaggg

SEQ ID NO: 6954 - DNA, 38 bp, Artificial Sequence
  primer
gtaaaacgacggccagtctgcagagcacagtggaagag

SEQ ID NO: 6955 - DNA, 38 bp, Artificial Sequence
  primer
gtaaaacgacggccagtgagaacctcacttcctgtggg

SEQ ID NO: 6956 - DNA, 38 bp, Artificial Sequence
  primer
gtaaaacgacggccagttgatttccaaggcacacaaag

SEQ ID NO: 6957 - DNA, 38 bp, Artificial Sequence
  primer
gtaaaacgacggccagtaggagtcctccctgagttgag

SEQ ID NO: 6958 - DNA, 21 bp, Artificial Sequence
  primer
gctgcaatgaccttgagtctg

SEQ ID NO: 6959 - DNA, 41 bp, Artificial Sequence
  primer
gtaaaacgacggccagtcctagtctggctttcttaactccc

SEQ ID NO: 6960 - DNA, 37 bp, Artificial Sequence
  primer
gtaaaacgacggccagtactgacagggtgtgagtggc

SEQ ID NO: 6961 - DNA, 38 bp, Artificial Sequence
  primer
gtaaaacgacggccagtctctgccatatagctctgccc

SEQ ID NO: 6962 - DNA, 38 bp, Artificial Sequence
  primer
gtaaaacgacggccagtgaaggaacgaaggcacatttc

SEQ ID NO: 6963 - DNA, 38 bp, Artificial Sequence
  primer
gtaaaacgacggccagtacacgacagccttcttcaagc

SEQ ID NO: 6964 - DNA, 23 bp, Artificial Sequence
  primer
gttaagtaactggtgccaggaga

SEQ ID NO: 6965 - DNA, 41 bp, Artificial Sequence
  primer
gtaaaacgacggccagttggttcttattaagcaaggatgtg

SEQ ID NO: 6966 - DNA, 37 bp, Artificial Sequence
  primer
gtaaaacgacggccagtgttggaattacgcttcagcc

SEQ ID NO: 6967 - DNA, 21 bp, Artificial Sequence
  primer
ttgacattgggttcattgctg

SEQ ID NO: 6968 - DNA, 38 bp, Artificial Sequence
  primer
gtaaaacgacggccagtatggtgggctagtccaagaac

SEQ ID NO: 6969 - DNA, 21 bp, Artificial Sequence
  primer
tcctttatgtttgaaggtggg

SEQ ID NO: 6970 - DNA, 40 bp, Artificial Sequence
  primer
gtaaaacgacggccagtaactgaagcatgtcatagccaag

SEQ ID NO: 6971 - DNA, 35 bp, Artificial Sequence
  primer
gtaaaacgacggccagtctcatgaccgcgtgatcc

SEQ ID NO: 6972 - DNA, 40 bp, Artificial Sequence; identical to SEQ ID NO: 6970
  primer

SEQ ID NO: 6973 - DNA, 21 bp, Artificial Sequence
  primer
agagtctctggaaatggagcc

SEQ ID NO: 6974 - DNA, 43 bp, Artificial Sequence
  primer
gtaaaacgacggccagtgagttggctatatgatccttatttgc

SEQ ID NO: 6975 - DNA, 24 bp, Artificial Sequence
  primer
tcttctggaaagaatctcctacaa

SEQ ID NO: 6976 - DNA, 38 bp, Artificial Sequence
  primer
gtaaaacgacggccagttttgcagtgctttatggttcc

SEQ ID NO: 6977 - DNA, 44 bp, Artificial Sequence
  primer
gtaaaacgacggccagtttcagaacttcctatttcatatggttc

SEQ ID NO: 6978 - DNA, 38 bp, Artificial Sequence
  primer
gtaaaacgacggccagtatgatgcctggtgctttgtag

SEQ ID NO: 6979 - DNA, 20 bp, Artificial Sequence
  primer
ggaacaggctttggaatgtg

SEQ ID NO: 6980 - DNA, 27 bp, Artificial Sequence
  primer
caaatttgattcatcctatggtcttac

SEQ ID NO: 6981 - DNA, 40 bp, Artificial Sequence
  primer
gtaaaacgacggccagtcccagatacaaagactggaggac

SEQ ID NO: 6982 - DNA, 21 bp, Artificial Sequence
  primer
tcctagtgttctcggaggctg

SEQ ID NO: 6983 - DNA, 21 bp, Artificial Sequence
  primer
agaggtccagtcatcctgtcc

SEQ ID NO: 6984 - DNA, 38 bp, Artificial Sequence
  primer
gtaaaacgacggccagtgcgcacgtaaccacatagaag

SEQ ID NO: 6985 - DNA, 35 bp, Artificial Sequence
  primer
gtaaaacgacggccagtgcacctgggaggtaaccc

SEQ ID NO: 6986 - DNA, 21 bp, Artificial Sequence
  primer
gcattgcaatttaccttccag

SEQ ID NO: 6987 - DNA, 39 bp, Artificial Sequence
  primer
gtaaaacgacggccagtcgttcagctagatagtgtccgt

SEQ ID NO: 6988 - DNA, 22 bp, Artificial Sequence
  primer
gtgcattgcctaacagtttctg

SEQ ID NO: 6989 - DNA, 40 bp, Artificial Sequence
  primer
gtaaaacgacggccagttgtatatatccagcgtaaagcgg

SEQ ID NO: 6990 - DNA, 24 bp, Artificial Sequence
  primer
ggtagtcatttccatttgttcctc

SEQ ID NO: 6991 - DNA, 42 bp, Artificial Sequence
  primer
gtaaaacgacggccagttgtatttctgaatagttgcaagtgg

SEQ ID NO: 6992 - DNA, 38 bp, Artificial Sequence
  primer
gtaaaacgacggccagtttagccactgtgctgctcttg

SEQ ID NO: 6993 - DNA, 38 bp, Artificial Sequence
  primer
gtaaaacgacggccagtaatctccaagtgtgctcctcc

SEQ ID NO: 6994 - DNA, 43 bp, Artificial Sequence
  primer
gtaaaacgacggccagtgcatttgaaacacaaataactgaagc

SEQ ID NO: 6995 - DNA, 21 bp, Artificial Sequence
  primer
tcaagtatgggagcccatttg

SEQ ID NO: 6996 - DNA, 25 bp, Artificial Sequence
  primer
tctaaattattgcagctcaggactc

SEQ ID NO: 6997 - DNA, 38 bp, Artificial Sequence
  primer
gtaaaacgacggccagtgcgatcattctttcactttgc

SEQ ID NO: 6998 - DNA, 38 bp, Artificial Sequence
  primer
gtaaaacgacggccagtactgaaaccaaaccaggcatc

SEQ ID NO: 6999 - DNA, 20 bp, Artificial Sequence
  primer
gagctgcgcagagtgatgag

SEQ ID NO: 7000 - DNA, 22 bp, Artificial Sequence
  primer
aaatgtggaagaaacaacccag

SEQ ID NO: 7001 - DNA, 21 bp, Artificial Sequence
  primer
aactcccacccacttaacacc

SEQ ID NO: 7002 - DNA, 38 bp, Artificial Sequence; identical to SEQ ID NO: 6984
  primer

SEQ ID NO: 7003 - DNA, 43 bp, Artificial Sequence
  primer
gtaaaacgacggccagttgagctcatcccataaatatcttagc

SEQ ID NO: 7004 - DNA, 21 bp, Artificial Sequence
  primer
tttctgcatgctgtgatcttg

SEQ ID NO: 7005 - DNA, 21 bp, Artificial Sequence
  primer
ttggaactaaaggtaggcacg

SEQ ID NO: 7006 - DNA, 21 bp, Artificial Sequence
  primer
aggcagtaacagcatttgtgc

SEQ ID NO: 7007 - DNA, 21 bp, Artificial Sequence
  primer
aggctctcaccttcttgttgc

SEQ ID NO: 7008 - DNA, 21 bp, Artificial Sequence
  primer
gcagatctccggtatcctcag

SEQ ID NO: 7009 - DNA, 21 bp, Artificial Sequence
  primer
tgggtttaaggcaactggttc

SEQ ID NO: 7010 - DNA, 38 bp, Artificial Sequence
  primer
gtaaaacgacggccagttgtggatcctggcttcaattc

SEQ ID NO: 7011 - DNA, 40 bp, Artificial Sequence
  primer
gtaaaacgacggccagtcctaatgagcacctctgtgtttg

SEQ ID NO: 7012 - DNA, 21 bp, Artificial Sequence
  primer
tgtggattgcctgtttaatcc

SEQ ID NO: 7013 - DNA, 21 bp, Artificial Sequence
  primer
tgagtattagctgccacgacc

SEQ ID NO: 7014 - DNA, 38 bp, Artificial Sequence
  primer
gtaaaacgacggccagtgtgtgggaaagtgttgtttgg

SEQ ID NO: 7015 - DNA, 22 bp, Artificial Sequence
  primer
cctattccctgaacatttcctg

SEQ ID NO: 7016 - DNA, 21 bp, Artificial Sequence
  primer
tcttgatttgtcgcttatggg

SEQ ID NO: 7017 - DNA, 40 bp, Artificial Sequence
  primer
gtaaaacgacggccagttttccaggacatgcatagaactc

SEQ ID NO: 7018 - DNA, 23 bp, Artificial Sequence
  primer
gctaagaattgggcttctgacat

SEQ ID NO: 7019 - DNA, 21 bp, Artificial Sequence
  primer
cagatgaccagaatcaaaggc

SEQ ID NO: 7020 - DNA, 38 bp, Artificial Sequence
  primer
gtaaaacgacggccagtcgttgctacggatgtcatttg

SEQ ID NO: 7021 - DNA, 44 bp, Artificial Sequence
  primer
gtaaaacgacggccagttcagtggagaaatgatcttgtctagta

SEQ ID NO: 7022 - DNA, 27 bp, Artificial Sequence
  primer
tggtatacacttcgtttgtaatgattg

SEQ ID NO: 7023 - DNA, 21 bp, Artificial Sequence
  primer
tgccagaccctgtgtttattc

SEQ ID NO: 7024 - DNA, 44 bp, Artificial Sequence
  primer
gtaaaacgacggccagtaaagctgtactgttgaattaatgctct

SEQ ID NO: 7025 - DNA, 21 bp, Artificial Sequence
  primer
gggatgagccaggtagagatg

SEQ ID NO: 7026 - DNA, 20 bp, Artificial Sequence
  primer
tcacgacagtccagtgcttg

SEQ ID NO: 7027 - DNA, 21 bp, Artificial Sequence
  primer
attgactcatgcccattgtcc

SEQ ID NO: 7028 - DNA, 21 bp, Artificial Sequence
  primer
aaagttagctagccctctggg

SEQ ID NO: 7029 - DNA, 42 bp, Artificial Sequence
  primer
gtaaaacgacggccagtctgaatgttagccttgactatttcc

SEQ ID NO: 7030 - DNA, 21 bp, Artificial Sequence
  primer
tcctcagggtggctttatttc

SEQ ID NO: 7031 - DNA, 41 bp, Artificial Sequence
  primer
gtaaaacgacggccagtccattatagaaaggagaggtctgg

SEQ ID NO: 7032 - DNA, 40 bp, Artificial Sequence
  primer
gtaaaacgacggccagtcctttgacatcttgtcatcttcc

SEQ ID NO: 7033 - DNA, 21 bp, Artificial Sequence
  primer
atttggctgaatcatttggat

SEQ ID NO: 7034 - DNA, 21 bp, Artificial Sequence
  primer
ctttaaatgccagcttggagc

SEQ ID NO: 7035 - DNA, 38 bp, Artificial Sequence
  primer
gtaaaacgacggccagtccgacgagattccactacaac

SEQ ID NO: 7036 - DNA, 21 bp, Artificial Sequence
  primer
gaccagctgagacattcctcc

SEQ ID NO: 7037 - DNA, 19 bp, Artificial Sequence
  primer
aaaccacgggaaagctgtg

SEQ ID NO: 7038 - DNA, 20 bp, Artificial Sequence
  primer
aggagatggaagctgcagtg

SEQ ID NO: 7039 - DNA, 38 bp, Artificial Sequence
  primer
gtaaaacgacggccagttcaatttcttgccttcttccc

SEQ ID NO: 7040 - DNA, 21 bp, Artificial Sequence
  primer
aggaggaaggaaagatttggg

SEQ ID NO: 7041 - DNA, 21 bp, Artificial Sequence
  primer
acagcctgggtattgggttac

SEQ ID NO: 7042 - DNA, 21 bp, Artificial Sequence
  primer
tcttaactccaagtccagggc

SEQ ID NO: 7043 - DNA, 18 bp, Artificial Sequence
  primer
gcggcttcctgagtatgg

SEQ ID NO: 7044 - DNA, 25 bp, Artificial Sequence
  primer
tcctattggaattgagtgatctacc

SEQ ID NO: 7045 - DNA, 38 bp, Artificial Sequence
  primer
gtaaaacgacggccagtccaaaggaatgttgtccaaag

SEQ ID NO: 7046 - DNA, 39 bp, Artificial Sequence
  primer
gtaaaacgacggccagtaaggatgtctggcctattgaaa

SEQ ID NO: 7047 - DNA, 43 bp, Artificial Sequence
  primer
gtaaaacgacggccagtttgttatttctctaggagaggactgc

SEQ ID NO: 7048 - DNA, 42 bp, Artificial Sequence
  primer
gtaaaacgacggccagtcaagaaatcttacttgagggctttc

SEQ ID NO: 7049 - DNA, 27 bp, Artificial Sequence
  primer
ggtgaagaaagaatgtagtatttcagg

SEQ ID NO: 7050 - DNA, 21 bp, Artificial Sequence
  primer
ggcaatgctgtctaatttccc

SEQ ID NO: 7051 - DNA, 25 bp, Artificial Sequence
  primer
ttaagccatctttggtataaattgc

SEQ ID NO: 7052 - DNA, 22 bp, Artificial Sequence
  primer
caataagttgcaatgatttgcc

SEQ ID NO: 7053 - DNA, 22 bp, Artificial Sequence
  primer
tgtgtttgaccttaacagtggg

SEQ ID NO: 7054 - DNA, 21 bp, Artificial Sequence
  primer
gccagaatccctttgtttagg

SEQ ID NO: 7055 - DNA, 21 bp, Artificial Sequence
  primer
taactgctgctcgtggtgttc

SEQ ID NO: 7056 - DNA, 21 bp, Artificial Sequence
  primer
ccacaaacgttggaaacactc

SEQ ID NO: 7057 - DNA, 21 bp, Artificial Sequence
  primer
aaattcagcaggagatgaggc

SEQ ID NO: 7058 - DNA, 38 bp, Artificial Sequence
  primer
gtaaaacgacggccagtccagttgccatcaactttagc

SEQ ID NO: 7059 - DNA, 22 bp, Artificial Sequence
  primer
gcacttgccaactattggattc

SEQ ID NO: 7060 - DNA, 22 bp, Artificial Sequence
  primer
ccctgcattgaatgtattctgg

SEQ ID NO: 7061 - DNA, 26 bp, Artificial Sequence
  primer
tttctgtgtatagcaatttgtgtgaa

SEQ ID NO: 7062 - DNA, 21 bp, Artificial Sequence
  primer
ggattagggtcaaattgcctg

SEQ ID NO: 7063 - DNA, 41 bp, Artificial Sequence
  primer
gtaaaacgacggccagttcctggctgttcaatataaattct

SEQ ID NO: 7064 - DNA, 23 bp, Artificial Sequence
  primer
aactaatgcacccatcagatcaa

SEQ ID NO: 7065 - DNA, 39 bp, Artificial Sequence
  primer
gtaaaacgacggccagttttggacaaccatctcattaca

SEQ ID NO: 7066 - DNA, 36 bp, Artificial Sequence
  primer
gtaaaacgacggccagttgacattgccaccaccaag

SEQ ID NO: 7067 - DNA, 44 bp, Artificial Sequence
  primer
gtaaaacgacggccagtgcttaaatgcttaaagtagacttctgg

SEQ ID NO: 7068 - DNA, 44 bp, Artificial Sequence
  primer
gtaaaacgacggccagtaatcctttcctttatgagtattaacct

SEQ ID NO: 7069 - DNA, 43 bp, Artificial Sequence
  primer
gtaaaacgacggccagttctgcaataattctatgttgtatgga

SEQ ID NO: 7070 - DNA, 20 bp, Artificial Sequence
  primer
catgacccactgtacccagc

SEQ ID NO: 7071 - DNA, 38 bp, Artificial Sequence
  primer
gtaaaacgacggccagtggacccttgggctagatgact

SEQ ID NO: 7072 - DNA, 21 bp, Artificial Sequence
  primer
gggtttgcagttacaaccaag

SEQ ID NO: 7073 - DNA, 38 bp, Artificial Sequence
  primer
gtaaaacgacggccagtatgaattgttctggattgggc

SEQ ID NO: 7074 - DNA, 21 bp, Artificial Sequence
  primer
tcagtgattgataagccagcc

SEQ ID NO: 7075 - DNA, 42 bp, Artificial Sequence
  primer
gtaaaacgacggccagttttctaggtcgtcacattcagtgta

SEQ ID NO: 7076 - DNA, 22 bp, Artificial Sequence
  primer
tttacagaatagcccaaggagc

SEQ ID NO: 7077 - DNA, 39 bp, Artificial Sequence
  primer
gtaaaacgacggccagttcaaataaggtccacacattgc

SEQ ID NO: 7078 - DNA, 37 bp, Artificial Sequence
  primer
gtaaaacgacggccagttgcttcatcttcctgccttg

SEQ ID NO: 7079 - DNA, 38 bp, Artificial Sequence
  primer
gtaaaacgacggccagtagttgggttgctactcaccag

SEQ ID NO: 7080 - DNA, 22 bp, Artificial Sequence
  primer
gatccgacatatacggaacagc

SEQ ID NO: 7081 - DNA, 39 bp, Artificial Sequence
  primer
gtaaaacgacggccagtgacttgggtgttgaaccttgtc

SEQ ID NO: 7082 - DNA, 21 bp, Artificial Sequence
  primer
tgggtgtggcttacatagcac

SEQ ID NO: 7083 - DNA, 38 bp, Artificial Sequence
  primer
gtaaaacgacggccagtatgtgccaagcttcctaccac

SEQ ID NO: 7084 - DNA, 22 bp, Artificial Sequence
  primer
aaagaaggttatcagcttgggc

SEQ ID NO: 7085 - DNA, 42 bp, Artificial Sequence
  primer
gtaaaacgacggccagtaaggatgtgaaactagaggaccatc

SEQ ID NO: 7086 - DNA, 21 bp, Artificial Sequence
  primer
caagaaatggtccagaaaggg

SEQ ID NO: 7087 - DNA, 41 bp, Artificial Sequence
  primer
gtaaaacgacggccagtggtacagaaagatgaaatctgtgc

SEQ ID NO: 7088 - DNA, 23 bp, Artificial Sequence
  primer
tttagaccctagtggtgttctgg

SEQ ID NO: 7089 - DNA, 23 bp, Artificial Sequence
  primer
cagaaatgaccaatgcttcagag

SEQ ID NO: 7090 - DNA, 38 bp, Artificial Sequence
  primer
gtaaaacgacggccagtacttgacaagagaacaggccc

SEQ ID NO: 7091 - DNA, 37 bp, Artificial Sequence
  primer
gtaaaacgacggccagtgttcccatccgattcacctc

SEQ ID NO: 7092 - DNA, 21 bp, Artificial Sequence
  primer
acatccagagcagcacgtttc

SEQ ID NO: 7093 - DNA, 43 bp, Artificial Sequence
  primer
gtaaaacgacggccagttgtttggctcctatagccaatactac

SEQ ID NO: 7094 - DNA, 21 bp, Artificial Sequence
  primer
aaccaatggctgaagatcctg

SEQ ID NO: 7095 - DNA, 22 bp, Artificial Sequence
  primer
cgtaaggcatatgagttgtccc

SEQ ID NO: 7096 - DNA, 38 bp, Artificial Sequence
  primer
gtaaaacgacggccagtgagcagggtcacatacagcac

SEQ ID NO: 7097 - DNA, 21 bp, Artificial Sequence
  primer
agaaggagagcctgactccag

SEQ ID NO: 7098 - DNA, 37 bp, Artificial Sequence
  primer
gtaaaacgacggccagtaaccagggtgaatactgccc

SEQ ID NO: 7099 - DNA, 39 bp, Artificial Sequence
  primer
gtaaaacgacggccagtttgtattaacctgccgtgaatc

SEQ ID NO: 7100 - DNA, 44 bp, Artificial Sequence
  primer
gtaaaacgacggccagtaagtatatgcagagtcctttagtgctg

SEQ ID NO: 7101 - DNA, 38 bp, Artificial Sequence
  primer
gtaaaacgacggccagtgggttcaggaagcagtccata

SEQ ID NO: 7102 - DNA, 22 bp, Artificial Sequence
  primer
tgcattgaaagaaatttggaca

SEQ ID NO: 7103 - DNA, 18 bp, Artificial Sequence
  primer
tgcctggcttggattgag

SEQ ID NO: 7104 - DNA, 38 bp, Artificial Sequence
  primer
gtaaaacgacggccagttggtgtagtccctggtgtctg

SEQ ID NO: 7105 - DNA, 23 bp, Artificial Sequence
  primer
ggcactaaaggtaatttgaagcc

SEQ ID NO: 7106 - DNA, 39 bp, Artificial Sequence
  primer
gtaaaacgacggccagtgcagcagcatacagagtgtgtc

SEQ ID NO: 7107 - DNA, 39 bp, Artificial Sequence
  primer
gtaaaacgacggccagtttcctagatttgagggtttccc

SEQ ID NO: 7108 - DNA, 22 bp, Artificial Sequence
  primer
tggtgcaggagaagtgtgatac

SEQ ID NO: 7109 - DNA, 38 bp, Artificial Sequence
  primer
gtaaaacgacggccagttatgctacctgaacgttgcca

SEQ ID NO: 7110 - DNA, 21 bp, Artificial Sequence
  primer
atagacacctctcccagcacc

SEQ ID NO: 7111 - DNA, 21 bp, Artificial Sequence
  primer
agatgaagcctatctgcctgc

SEQ ID NO: 7112 - DNA, 18 bp, Artificial Sequence
  primer
gggcacctgtagtcccag

SEQ ID NO: 7113 - DNA, 38 bp, Artificial Sequence
  primer
gtaaaacgacggccagtgtccacctttgtctcacatgg

SEQ ID NO: 7114 - DNA, 38 bp, Artificial Sequence
  primer
gtaaaacgacggccagttatgcttcccaaagcagtgtc

SEQ ID NO: 7115 - DNA, 21 bp, Artificial Sequence
  primer
ctgaaactcaagcctgtgctg

SEQ ID NO: 7116 - DNA, 21 bp, Artificial Sequence
  primer
atgaccaacttcaggacccac

SEQ ID NO: 7117 - DNA, 21 bp, Artificial Sequence
  primer
ttccagcattaagtcagaggc

SEQ ID NO: 7118 - DNA, 35 bp, Artificial Sequence
  primer
gtaaaacgacggccagtccctccattccaacccac

SEQ ID NO: 7119 - DNA, 38 bp, Artificial Sequence
  primer
gtaaaacgacggccagtcaaccatcagctctccctagc

SEQ ID NO: 7120 - DNA, 21 bp, Artificial Sequence
  primer
tctgagccaagtggaggtttc

SEQ ID NO: 7121 - DNA, 21 bp, Artificial Sequence
  primer
atgaatgctgagacttgcgtc

SEQ ID NO: 7122 - DNA, 21 bp, Artificial Sequence
  primer
tcgcatccaatgagctctaag

SEQ ID NO: 7123 - DNA, 38 bp, Artificial Sequence
  primer
gtaaaacgacggccagtacagtttgcactgcctgaaag

SEQ ID NO: 7124 - DNA, 21 bp, Artificial Sequence
  primer
atgggaaggatggacagtgag

SEQ ID NO: 7125 - DNA, 40 bp, Artificial Sequence
  primer
gtaaaacgacggccagtaagaagcagagttggactcagtg

SEQ ID NO: 7126 - DNA, 38 bp, Artificial Sequence
  primer
gtaaaacgacggccagtccctatttcaaccagcctgac

SEQ ID NO: 7127 - DNA, 37 bp, Artificial Sequence
  primer
gtaaaacgacggccagtcgtcctcactctctgccttg

SEQ ID NO: 7128 - DNA, 38 bp, Artificial Sequence
  primer
gtaaaacgacggccagttctcagtggctacgactggtg

SEQ ID NO: 7129 - DNA, 21 bp, Artificial Sequence
  primer
aacagtggccttcctatctgg

SEQ ID NO: 7130 - DNA, 38 bp, Artificial Sequence
  primer
gtaaaacgacggccagtataggcgtgctaccacctcag

SEQ ID NO: 7131 - DNA, 38 bp, Artificial Sequence
  primer
gtaaaacgacggccagtccctacttcaacctgcctgac

SEQ ID NO: 7132 - DNA, 38 bp, Artificial Sequence
  primer
gtaaaacgacggccagtgcctacagtgcagttcaggtg

SEQ ID NO: 7133 - DNA, 21 bp, Artificial Sequence
  primer
aatcatcattctgggacctgg

SEQ ID NO: 7134 - DNA, 21 bp, Artificial Sequence
  primer
aacagtggccttcctatctgg

SEQ ID NO: 7135 - DNA, 38 bp, Artificial Sequence
  primer
gtaaaacgacggccagtaaaggctgagttggcatcttg

SEQ ID NO: 7136 - DNA, 38 bp, Artificial Sequence
  primer
gtaaaacgacggccagtgatgcaagaatcatcactccc

SEQ ID NO: 7137 - DNA, 38 bp, Artificial Sequence
  primer
gtaaaacgacggccagtgctgtttgtgccttcactctg

SEQ ID NO: 7138 - DNA, 38 bp, Artificial Sequence
  primer
gtaaaacgacggccagttgtttgttgagtggatgggag

SEQ ID NO: 7139 - DNA, 21 bp, Artificial Sequence
  primer
acggaagagctcatcgatttc

SEQ ID NO: 7140 - DNA, 38 bp, Artificial Sequence
  primer
gtaaaacgacggccagttaaatctgtgctgccatccac

SEQ ID NO: 7141 - DNA, 21 bp, Artificial Sequence
  primer
cacccagagatatgccctgac

SEQ ID NO: 7142 - DNA, 39 bp, Artificial Sequence
  primer
gtaaaacgacggccagttgcattggaatcttctatcagc

SEQ ID NO: 7143 - DNA, 21 bp, Artificial Sequence
  primer
actgctagagcaggaagccag

SEQ ID NO: 7144 - DNA, 21 bp, Artificial Sequence
  primer
ctaactctgtgacgagcacgg

SEQ ID NO: 7145 - DNA, 20 bp, Artificial Sequence
  primer
ccacatacagcagggagctg

SEQ ID NO: 7146 - DNA, 38 bp, Artificial Sequence
  primer
gtaaaacgacggccagtctgaccttggtcctacccaac

SEQ ID NO: 7147 - DNA, 21 bp, Artificial Sequence
  primer
tccagtttgaggtgaaccctg

SEQ ID NO: 7148 - DNA, 35 bp, Artificial Sequence
  primer
gtaaaacgacggccagtgcttcttgcaggctgctg

SEQ ID NO: 7149 - DNA, 38 bp, Artificial Sequence
  primer
gtaaaacgacggccagtgctgtaaacatgccattagcc

SEQ ID NO: 7150 - DNA, 38 bp, Artificial Sequence
  primer
gtaaaacgacggccagtttgagggaaagcctgtttatg

SEQ ID NO: 7151 - DNA, 41 bp, Artificial Sequence
  primer
gtaaaacgacggccagttttaacttgaatgggaggaattat

SEQ ID NO: 7152 - DNA, 38 bp, Artificial Sequence
  primer
gtaaaacgacggccagtctacctctgccctctctagcc

SEQ ID NO: 7153 - DNA, 38 bp, Artificial Sequence
  primer
gtaaaacgacggccagtatttgcagagaagacgaaggc

SEQ ID NO: 7154 - DNA, 21 bp, Artificial Sequence
  primer
ctacctctgccctctctagcc

SEQ ID NO: 7155 - DNA, 38 bp, Artificial Sequence
  primer
gtaaaacgacggccagttcactttgattggtggattgg

SEQ ID NO: 7156 - DNA, 38 bp, Artificial Sequence
  primer
gtaaaacgacggccagtttctaacctttatcccggtgg

SEQ ID NO: 7157 - DNA, 38 bp, Artificial Sequence
  primer
gtaaaacgacggccagtgcccaagcactcaagtcattt

SEQ ID NO: 7158 - DNA, 22 bp, Artificial Sequence
  primer
tccacctttcagtgatgatttg

SEQ ID NO: 7159 - DNA, 19 bp, Artificial Sequence
  primer
gtggtgcgtgcctgtagac

SEQ ID NO: 7160 - DNA, 36 bp, Artificial Sequence
  primer
gtaaaacgacggccagtttccagatagaaagcgccc

SEQ ID NO: 7161 - DNA, 38 bp, Artificial Sequence
  primer
gtaaaacgacggccagtaccattgcaaactcttgggtc

SEQ ID NO: 7162 - DNA, 20 bp, Artificial Sequence
  primer
tttgctgatccacaaggtcc

SEQ ID NO: 7163 - DNA, 20 bp, Artificial Sequence
  primer
cctgatccacaaggtccatc

SEQ ID NO: 7164 - DNA, 44 bp, Artificial Sequence
  primer
gtaaaacgacggccagtccatgaatatgaagtataatgggttcc

SEQ ID NO: 7165 - DNA, 21 bp, Artificial Sequence
  primer
ttgatttctcacggaccaatg

SEQ ID NO: 7166 - DNA, 21 bp, Artificial Sequence
  primer
atcttggccagacacacacac

SEQ ID NO: 7167 - DNA, 38 bp, Artificial Sequence
  primer
gtaaaacgacggccagttgaccaggtatagctgcatgg

SEQ ID NO: 7168 - DNA, 21 bp, Artificial Sequence
  primer
tcagggaagatgaagggactc

SEQ ID NO: 7169 - DNA, 38 bp, Artificial Sequence
  primer
gtaaaacgacggccagtggtcaactacaagccacaggc

SEQ ID NO: 7170 - DNA, 37 bp, Artificial Sequence
  primer
gtaaaacgacggccagtgagcagatgtcagccaggtc

SEQ ID NO: 7171 - DNA, 21 bp, Artificial Sequence
  primer
gggtctctcagggctagtgtg

SEQ ID NO: 7172 - DNA, 21 bp, Artificial Sequence
  primer
atggagatatggaaggcatgg

SEQ ID NO: 7173 - DNA, 37 bp, Artificial Sequence
  primer
gtaaaacgacggccagtaaatcatttcaggcccttcc

SEQ ID NO: 7174 - DNA, 38 bp, Artificial Sequence
  primer
gtaaaacgacggccagtcaccaaagatacaaatccggg

SEQ ID NO: 7175 - DNA, 21 bp, Artificial Sequence
  primer
taccctgattcccaaagcaag

SEQ ID NO: 7176 - DNA, 20 bp, Artificial Sequence
  primer
atgacatggagtggaatggg

SEQ ID NO: 7177 - DNA, 21 bp, Artificial Sequence
  primer
catctgtcaacgagggatgag

SEQ ID NO: 7178 - DNA, 23 bp, Artificial Sequence
  primer
tggagataaatgattcagcaagc

SEQ ID NO: 7179 - DNA, 21 bp, Artificial Sequence
  primer
taacacagctggaacaatccg

SEQ ID NO: 7180 - DNA, 24 bp, Artificial Sequence
  primer
aatggtttaccttggtttatggac

SEQ ID NO: 7181 - DNA, 40 bp, Artificial Sequence
  primer
gtaaaacgacggccagttgttacttgcttccttgagatcc

SEQ ID NO: 7182 - DNA, 39 bp, Artificial Sequence
  primer
gtaaaacgacggccagtctacaggcatatgctaccatgc

SEQ ID NO: 7183 - DNA, 39 bp, Artificial Sequence
  primer
gtaaaacgacggccagtcatgagctactatgcccagtcc

SEQ ID NO: 7184 - DNA, 21 bp, Artificial Sequence
  primer
tggagcagcatattgtatggg

SEQ ID NO: 7185 - DNA, 24 bp, Artificial Sequence
  primer
ttcagggtaacaagtgctagtttg

SEQ ID NO: 7186 - DNA, 21 bp, Artificial Sequence
  primer
tgatgccacaatgttcaatcc

SEQ ID NO: 7187 - DNA, 38 bp, Artificial Sequence
  primer
gtaaaacgacggccagtaggaaccataagatgccctgg

SEQ ID NO: 7188 - DNA, 20 bp, Artificial Sequence
  primer
cacaaacaatggctccatcc

SEQ ID NO: 7189 - DNA, 22 bp, Artificial Sequence
  primer
cccaggaacagtcatttagctg

SEQ ID NO: 7190 - DNA, 37 bp, Artificial Sequence
  primer
gtaaaacgacggccagtctgtcacacaggaagcaccc

SEQ ID NO: 7191 - DNA, 21 bp, Artificial Sequence
  primer
ccaatggtaaacctgcctctc

SEQ ID NO: 7192 - DNA, 38 bp, Artificial Sequence
  primer
gtaaaacgacggccagtaagtgtcctgaaggtggaagc

SEQ ID NO: 7193 - DNA, 22 bp, Artificial Sequence
  primer
tgaagaatgtgtgtgatggatg

SEQ ID NO: 7194 - DNA, 34 bp, Artificial Sequence
  primer
gtaaaacgacggccagtggatgatgctgggtgcc

SEQ ID NO: 7195 - DNA, 38 bp, Artificial Sequence
  primer
gtaaaacgacggccagtcactggaaatgatggctgaat

SEQ ID NO: 7196 - DNA, 22 bp, Artificial Sequence
  primer
tctgggtgtcttacctccattc

SEQ ID NO: 7197 - DNA, 21 bp, Artificial Sequence
  primer
gcagagaagccaagattgacc

SEQ ID NO: 7198 - DNA, 39 bp, Artificial Sequence
  primer
gtaaaacgacggccagttgggtaaacttgaacaatctgc

SEQ ID NO: 7199 - DNA, 21 bp, Artificial Sequence
  primer
tttacggtgagtgaaattggg

SEQ ID NO: 7200 - DNA, 20 bp, Artificial Sequence
  primer
gcatactgcgccttcatcac

SEQ ID NO: 7201 - DNA, 38 bp, Artificial Sequence
  primer
gtaaaacgacggccagtacaggcgcagtctatcaagtg

SEQ ID NO: 7202 - DNA, 25 bp, Artificial Sequence
  primer
aaagtccataaatgcttctcaacac

SEQ ID NO: 7203 - DNA, 21 bp, Artificial Sequence
  primer
ccatacaagaagccctcagtg

SEQ ID NO: 7204 - DNA, 37 bp, Artificial Sequence
  primer
gtaaaacgacggccagtcatgatgccacattcactgc

SEQ ID NO: 7205 - DNA, 21 bp, Artificial Sequence
  primer
tgggtaccatagctccctctg

SEQ ID NO: 7206 - DNA, 38 bp, Artificial Sequence
  primer
gtaaaacgacggccagtccttctctttgcgtccagaac

SEQ ID NO: 7207 - DNA, 20 bp, Artificial Sequence
  primer
caaccttctggctgtgttcc

SEQ ID NO: 7208 - DNA, 21 bp, Artificial Sequence
  primer
acgtgaaacacttggcatgag

SEQ ID NO: 7209 - DNA, 37 bp, Artificial Sequence
  primer
gtaaaacgacggccagtccactcggctcacttaaggc

SEQ ID NO: 7210 - DNA, 21 bp, Artificial Sequence
  primer
ggacagatcccaaagattccc

SEQ ID NO: 7211 - DNA, 38 bp, Artificial Sequence
  primer
gtaaaacgacggccagtgaacagcgtagaaccagtggc

SEQ ID NO: 7212 - DNA, 37 bp, Artificial Sequence
  primer
gtaaaacgacggccagtaacagcgtagaaccagtggc

SEQ ID NO: 7213 - DNA, 35 bp, Artificial Sequence
  primer
gtaaaacgacggccagtctggacaccgtgcccttc

SEQ ID NO: 7214 - DNA, 36 bp, Artificial Sequence
  primer
gtaaaacgacggccagtccttcctggagacgctcac

SEQ ID NO: 7215 - DNA, 18 bp, Artificial Sequence
  primer
cgcgagctcagcgtagac

SEQ ID NO: 7216 - DNA, 38 bp, Artificial Sequence
  primer
gtaaaacgacggccagtctgaagaaagatttggccagg

SEQ ID NO: 7217 - DNA, 21 bp, Artificial Sequence
  primer
taccatactgacgctgggatg

SEQ ID NO: 7218 - DNA, 21 bp, Artificial Sequence
  primer
ttaccctctgtttccacaccc

SEQ ID NO: 7219 - DNA, 21 bp, Artificial Sequence
  primer
ctggtgactgggagataaggg

SEQ ID NO: 7220 - DNA, 38 bp, Artificial Sequence
  primer
gtaaaacgacggccagttctatagcctgattcccggac

SEQ ID NO: 7221 - DNA, 37 bp, Artificial Sequence
  primer
gtaaaacgacggccagtcactcctggaggttgtgctg

SEQ ID NO: 7222 - DNA, 21 bp, Artificial Sequence
  primer
tcaattgatctctgctccctg

SEQ ID NO: 7223 - DNA, 20 bp, Artificial Sequence
  primer
gtggcatgtgcctgtagtcc

SEQ ID NO: 7224 - DNA, 38 bp, Artificial Sequence
  primer
gtaaaacgacggccagtatattgcatggaccattgctg

SEQ ID NO: 7225 - DNA, 38 bp, Artificial Sequence
  primer
gtaaaacgacggccagtagaaagctctgctcttccctg

SEQ ID NO: 7226 - DNA, 21 bp, Artificial Sequence
  primer
tgatggacactgaagatggct

SEQ ID NO: 7227 - DNA, 37 bp, Artificial Sequence
  primer
gtaaaacgacggccagtaaagctgtgctctgtggtgg

SEQ ID NO: 7228 - DNA, 36 bp, Artificial Sequence
  primer
gtaaaacgacggccagtggatcatccagggagaggg

SEQ ID NO: 7229 - DNA, 38 bp, Artificial Sequence
  primer
gtaaaacgacggccagtacagagtctttgggatccagg

SEQ ID NO: 7230 - DNA, 38 bp, Artificial Sequence
  primer
gtaaaacgacggccagtacagtgtttggtggtgacagc

SEQ ID NO: 7231 - DNA, 38 bp, Artificial Sequence
  primer
gtaaaacgacggccagtagtcctgagatcttccctccc

SEQ ID NO: 7232 - DNA, 38 bp, Artificial Sequence
  primer
gtaaaacgacggccagttggtgctacttggtatagggc

SEQ ID NO: 7233 - DNA, 21 bp, Artificial Sequence
  primer
ctccagaacggcttcttgttc

SEQ ID NO: 7234 - DNA, 38 bp, Artificial Sequence
  primer
gtaaaacgacggccagtggtcgatgcctagcaaatagg

SEQ ID NO: 7235 - DNA, 38 bp, Artificial Sequence
  primer
gtaaaacgacggccagtatgaaattcagtactgggccg

SEQ ID NO: 7236 - DNA, 36 bp, Artificial Sequence
  primer
gtaaaacgacggccagttctcactgtgggtcctccc

SEQ ID NO: 7237 - DNA, 36 bp, Artificial Sequence
  primer
gtaaaacgacggccagtcatacctaatggcccgacg

SEQ ID NO: 7238 - DNA, 21 bp, Artificial Sequence
  primer
gttctagtgccatcctttggg

SEQ ID NO: 7239 - DNA, 38 bp, Artificial Sequence
  primer
gtaaaacgacggccagtaatgtggaaagggttctctgc

SEQ ID NO: 7240 - DNA, 38 bp, Artificial Sequence
  primer
gtaaaacgacggccagtaggtatgagtggaggtggacg

SEQ ID NO: 7241 - DNA, 36 bp, Artificial Sequence
  primer
gtaaaacgacggccagtatggtgggaagacagggtg

SEQ ID NO: 7242 - DNA, 37 bp, Artificial Sequence
  primer
gtaaaacgacggccagtctagagctcgccctctcctc

SEQ ID NO: 7243 - DNA, 38 bp, Artificial Sequence
  primer
gtaaaacgacggccagttaaagcgatttcacatttccg

SEQ ID NO: 7244 - DNA, 38 bp, Artificial Sequence
  primer
gtaaaacgacggccagtagtccttggtgaccacaaacc

SEQ ID NO: 7245 - DNA, 38 bp, Artificial Sequence
  primer
gtaaaacgacggccagtctccagtgacactatgcaccc

SEQ ID NO: 7246 - DNA, 21 bp, Artificial Sequence
  primer
caagtactggaggtgctgctg

SEQ ID NO: 7247 - DNA, 21 bp, Artificial Sequence
  primer
tgcatgaactccaagaagctg

SEQ ID NO: 7248 - DNA, 20 bp, Artificial Sequence
  primer
atttcaccttgcacggacac

SEQ ID NO: 7249 - DNA, 21 bp, Artificial Sequence
  primer
gcctataccaccctagtgggc

SEQ ID NO: 7250 - DNA, 38 bp, Artificial Sequence
  primer
gtaaaacgacggccagtaattgtttgccaggttcactg

SEQ ID NO: 7251 - DNA, 38 bp, Artificial Sequence
  primer
gtaaaacgacggccagtcagaattgggcttctggattc

SEQ ID NO: 7252 - DNA, 38 bp, Artificial Sequence
  primer
gtaaaacgacggccagtttctcacacagtttccgatgg

SEQ ID NO: 7253 - DNA, 21 bp, Artificial Sequence
  primer
agaacgattacacctgtcgcc

SEQ ID NO: 7254 - DNA, 38 bp, Artificial Sequence
  primer
gtaaaacgacggccagtatggtccactgtgacagcaag

SEQ ID NO: 7255 - DNA, 21 bp, Artificial Sequence
  primer
aatgcccattcatcgattctc

SEQ ID NO: 7256 - DNA, 38 bp, Artificial Sequence
  primer
gtaaaacgacggccagtagagcagaagagggtgagtcc

SEQ ID NO: 7257 - DNA, 20 bp, Artificial Sequence
  primer
gacctgctaagctgcactgg

SEQ ID NO: 7258 - DNA, 38 bp, Artificial Sequence
  primer
gtaaaacgacggccagttatcatctaacacgttgcggg

SEQ ID NO: 7259 - DNA, 21 bp, Artificial Sequence
  primer
ttcctcaagaacggcctctac

SEQ ID NO: 7260 - DNA, 37 bp, Artificial Sequence
  primer
gtaaaacgacggccagtgtcggtccctgaggctttac

SEQ ID NO: 7261 - DNA, 21 bp, Artificial Sequence
  primer
aacacaggcttcaccacactg

SEQ ID NO: 7262 - DNA, 38 bp, Artificial Sequence
  primer
gtaaaacgacggccagtggcacctaacctagcagacag

SEQ ID NO: 7263 - DNA, 41 bp, Artificial Sequence
  primer
gtaaaacgacggccagtaagcttgttggtacctttgacatc

SEQ ID NO: 7264 - DNA, 38 bp, Artificial Sequence
  primer
gtaaaacgacggccagtcaaagggaaaggaagaactgc

SEQ ID NO: 7265 - DNA, 38 bp, Artificial Sequence
  primer
gtaaaacgacggccagtgatttgatggcatttggtgac

SEQ ID NO: 7266 - DNA, 38 bp, Artificial Sequence
  primer
gtaaaacgacggccagtcttcctagcagtgacaatggc

SEQ ID NO: 7267 - DNA, 38 bp, Artificial Sequence
  primer
gtaaaacgacggccagtgaacctaaggtgttcaggccc

SEQ ID NO: 7268 - DNA, 37 bp, Artificial Sequence
  primer
gtaaaacgacggccagtgaccttccgcacttctctgg

SEQ ID NO: 7269 - DNA, 37 bp, Artificial Sequence
  primer
gtaaaacgacggccagtcggtctccaaactctgggtc

SEQ ID NO: 7270 - DNA, 36 bp, Artificial Sequence
  primer
gtaaaacgacggccagtcacagggtctcggcttctc

SEQ ID NO: 7271 - DNA, 36 bp, Artificial Sequence
  primer
gtaaaacgacggccagtcttgggaggtcgtgctcag

SEQ ID NO: 7272 - DNA, 37 bp, Artificial Sequence
  primer
gtaaaacgacggccagtgtctgcacacgttgggtctg

SEQ ID NO: 7273 - DNA, 19 bp, Artificial Sequence
  primer
gacgaggacctggctgttt

SEQ ID NO: 7274 - DNA, 38 bp, Artificial Sequence
  primer
gtaaaacgacggccagtctgtgacctctgtggtaagcg

SEQ ID NO: 7275 - DNA, 21 bp, Artificial Sequence
  primer
cacttgcccactatctgcctc

SEQ ID NO: 7276 - DNA, 35 bp, Artificial Sequence
  primer
gtaaaacgacggccagtagaatgggcccgagacag

SEQ ID NO: 7277 - DNA, 35 bp, Artificial Sequence
  primer
gtaaaacgacggccagtctgctggtcctgctggtg

SEQ ID NO: 7278 - DNA, 18 bp, Artificial Sequence
  primer
ctccgaggagctggtgag

SEQ ID NO: 7279 - DNA, 38 bp, Artificial Sequence
  primer
gtaaaacgacggccagttcattaccgtctctcccaacc

SEQ ID NO: 7280 - DNA, 21 bp, Artificial Sequence
  primer
gaagctgtcagcgaggatttg

SEQ ID NO: 7281 - DNA, 39 bp, Artificial Sequence
  primer
gtaaaacgacggccagttcatgttagtcacccattcctg

SEQ ID NO: 7282 - DNA, 41 bp, Artificial Sequence
  primer
gtaaaacgacggccagttccagatcttgggtatactggttc

SEQ ID NO: 7283 - DNA, 38 bp, Artificial Sequence
  primer
gtaaaacgacggccagtaacacaaggctggatttaggg

SEQ ID NO: 7284 - DNA, 38 bp, Artificial Sequence
  primer
gtaaaacgacggccagttgggcagtaatcctctccaag

SEQ ID NO: 7285 - DNA, 38 bp, Artificial Sequence
  primer
gtaaaacgacggccagtggctcttacgggttagttccc

SEQ ID NO: 7286 - DNA, 38 bp, Artificial Sequence
  primer
gtaaaacgacggccagtaactcctgactttgcaatccg

SEQ ID NO: 7287 - DNA, 38 bp, Artificial Sequence
  primer
gtaaaacgacggccagtgcctcacacactgatttctgg

SEQ ID NO: 7288 - DNA, 38 bp, Artificial Sequence
  primer
gtaaaacgacggccagtgaatatgtcccttccacaccc

SEQ ID NO: 7289 - DNA, 38 bp, Artificial Sequence
  primer
gtaaaacgacggccagttctctgttcctgctccagttg

SEQ ID NO: 7290 - DNA, 20 bp, Artificial Sequence
  primer
gctcagactcaggcaccaac

SEQ ID NO: 7291 - DNA, 21 bp, Artificial Sequence
  primer
gcaagtctcactttgccattg

SEQ ID NO: 7292 - DNA, 21 bp, Artificial Sequence
  primer
cgagaagctctaggacccagc

SEQ ID NO: 7293 - DNA, 38 bp, Artificial Sequence
  primer
gtaaaacgacggccagtccctctgccaagttgaaacac

SEQ ID NO: 7294 - DNA, 38 bp, Artificial Sequence
  primer
gtaaaacgacggccagtattgccaggtaaatggaggtg

SEQ ID NO: 7295 - DNA, 38 bp, Artificial Sequence
  primer
gtaaaacgacggccagtcaaccgagaacatgaacttgc

SEQ ID NO: 7296 - DNA, 38 bp, Artificial Sequence
  primer
gtaaaacgacggccagtcagcagaacaacgaggaactg

SEQ ID NO: 7297 - DNA, 21 bp, Artificial Sequence
  primer
agagaatcatgcagctgtccc

SEQ ID NO: 7298 - DNA, 38 bp, Artificial Sequence
  primer
gtaaaacgacggccagtaacagtgccagtattgttggg

SEQ ID NO: 7299 - DNA, 39 bp, Artificial Sequence
  primer
gtaaaacgacggccagtaagatacagccttcacactggc

SEQ ID NO: 7300 - DNA, 38 bp, Artificial Sequence
  primer
gtaaaacgacggccagtctcctgcctgagcatctcttc

SEQ ID NO: 7301 - DNA, 38 bp, Artificial Sequence
  primer
gtaaaacgacggccagttttaatccttgccagatgtcg

SEQ ID NO: 7302 - DNA, 38 bp, Artificial Sequence
  primer
gtaaaacgacggccagtgggaggtacgtgcacctgtag

SEQ ID NO: 7303 - DNA, 21 bp, Artificial Sequence
  primer
tgttctgtatgggcagttgtg

SEQ ID NO: 7304 - DNA, 38 bp, Artificial Sequence
  primer
gtaaaacgacggccagtaacaccagcctctccattctg

SEQ ID NO: 7305 - DNA, 38 bp, Artificial Sequence
  primer
gtaaaacgacggccagtaagtctttgggacagcctgag

SEQ ID NO: 7306 - DNA, 23 bp, Artificial Sequence
  primer
gcaatcatcaatcaacaaggaac

SEQ ID NO: 7307 - DNA, 37 bp, Artificial Sequence
  primer
gtaaaacgacggccagtggtgtgcagtggtatcggac

SEQ ID NO: 7308 - DNA, 38 bp, Artificial Sequence
  primer
gtaaaacgacggccagtcactggtacttgaacccaggc

SEQ ID NO: 7309 - DNA, 38 bp, Artificial Sequence
  primer
gtaaaacgacggccagtaagccaaagaagcatgaggac

SEQ ID NO: 7310 - DNA, 21 bp, Artificial Sequence
  primer
gaacaccctctaccggctatg

SEQ ID NO: 7311 - DNA, 38 bp, Artificial Sequence
  primer
gtaaaacgacggccagtaaccatcttcccagtatgcct

SEQ ID NO: 7312 - DNA, 38 bp, Artificial Sequence
  primer
gtaaaacgacggccagtgtagtgggtcagcctcgaatc

SEQ ID NO: 7313 - DNA, 21 bp, Artificial Sequence
  primer
ccaatatggaggatacagccc

SEQ ID NO: 7314 - DNA, 18 bp, Artificial Sequence
  primer
cagcactgagcccaggag

SEQ ID NO: 7315 - DNA, 38 bp, Artificial Sequence
  primer
gtaaaacgacggccagtcaagtgacagtcgtgtggagg

SEQ ID NO: 7316 - DNA, 38 bp, Artificial Sequence
  primer
gtaaaacgacggccagtactcctatgaggcaggaaggg

SEQ ID NO: 7317 - DNA, 37 bp, Artificial Sequence
  primer
gtaaaacgacggccagtagcccactccaccttgaatc

SEQ ID NO: 7318 - DNA, 38 bp, Artificial Sequence
  primer
gtaaaacgacggccagtttgtctttcaaatgtgccagg

SEQ ID NO: 7319 - DNA, 39 bp, Artificial Sequence
  primer
gtaaaacgacggccagttccaaagctcatctctctccac

SEQ ID NO: 7320 - DNA, 39 bp, Artificial Sequence
  primer
gtaaaacgacggccagttggaaggctgagctgaaataac

SEQ ID NO: 7321 - DNA, 38 bp, Artificial Sequence
  primer
gtaaaacgacggccagtcccatgccttacacatagcag

SEQ ID NO: 7322 - DNA, 20 bp, Artificial Sequence
  primer
cccactatgcttggatcctg

SEQ ID NO: 7323 - DNA, 21 bp, Artificial Sequence
  primer
atacacaggagagctgggagg

SEQ ID NO: 7324 - DNA, 23 bp, Artificial Sequence
  primer
aagtaccggattccaagctaatg

SEQ ID NO: 7325 - DNA, 38 bp, Artificial Sequence
  primer
gtaaaacgacggccagtaagattaagcctttggagccc

SEQ ID NO: 7326 - DNA, 21 bp, Artificial Sequence
  primer
ttattcactttgtcccaacgc

SEQ ID NO: 7327 - DNA, 19 bp, Artificial Sequence
  primer
cattcttggagcccaatgc

SEQ ID NO: 7328 - DNA, 22 bp, Artificial Sequence
  primer
ggaatctcctctccctagaacc

SEQ ID NO: 7329 - DNA, 21 bp, Artificial Sequence
  primer
acattcgattctctggttccc

SEQ ID NO: 7330 - DNA, 38 bp, Artificial Sequence
  primer
gtaaaacgacggccagtgcctttggacctgaaagtttg

SEQ ID NO: 7331 - DNA, 38 bp, Artificial Sequence
  primer
gtaaaacgacggccagttcctttggatggcttacttcc

SEQ ID NO: 7332 - DNA, 21 bp, Artificial Sequence
  primer
agctgaagcttaaggcagacc

SEQ ID NO: 7333 - DNA, 20 bp, Artificial Sequence
  primer
ttgctggactgttgtttccc

SEQ ID NO: 7334 - DNA, 38 bp, Artificial Sequence
  primer
gtaaaacgacggccagtcactgaggcactagatgggtg

SEQ ID NO: 7335 - DNA, 35 bp, Artificial Sequence
  primer
gtaaaacgacggccagttcctgggactgaggaggc

SEQ ID NO: 7336 - DNA, 40 bp, Artificial Sequence
  primer
gtaaaacgacggccagtttgaaagactgccttactttccc

SEQ ID NO: 7337 - DNA, 21 bp, Artificial Sequence
  primer
cagctactgaggagggactgc

SEQ ID NO: 7338 - DNA, 38 bp, Artificial Sequence
  primer
gtaaaacgacggccagtcttggctgtctcctgatcctc

SEQ ID NO: 7339 - DNA, 37 bp, Artificial Sequence
  primer
gtaaaacgacggccagtgttctgcagctctgcctttg

SEQ ID NO: 7340 - DNA, 38 bp, Artificial Sequence
  primer
gtaaaacgacggccagtgacctacagtgaggagggcag

SEQ ID NO: 7341 - DNA, 38 bp, Artificial Sequence
  primer
gtaaaacgacggccagtggtgatctgagtgttcctggg

SEQ ID NO: 7342 - DNA, 38 bp, Artificial Sequence
  primer
gtaaaacgacggccagtgggtcttcaacatctcttgcc

SEQ ID NO: 7343 - DNA, 21 bp, Artificial Sequence
  primer
gaacccgacgagcagtaagag

SEQ ID NO: 7344 - DNA, 38 bp, Artificial Sequence
  primer
gtaaaacgacggccagtccgcagtctacttccctcttg

SEQ ID NO: 7345 - DNA, 38 bp, Artificial Sequence
  primer
gtaaaacgacggccagtcagtacagagggtcctttccc

SEQ ID NO: 7346 - DNA, 38 bp, Artificial Sequence
  primer
gtaaaacgacggccagtgcctacgacctgagtgtggac

SEQ ID NO: 7347 - DNA, 38 bp, Artificial Sequence
  primer
gtaaaacgacggccagtctcaaggagggtaggcagatg

SEQ ID NO: 7348 - DNA, 38 bp, Artificial Sequence
  primer
gtaaaacgacggccagtcacctgggtatccttgctttc

SEQ ID NO: 7349 - DNA, 38 bp, Artificial Sequence
  primer
gtaaaacgacggccagtttcttagagcacgtgagcagg

SEQ ID NO: 7350 - DNA, 38 bp, Artificial Sequence
  primer
gtaaaacgacggccagtccaggcctgcatagttattgg

SEQ ID NO: 7351 - DNA, 38 bp, Artificial Sequence
  primer
gtaaaacgacggccagtattcaccctttgcacatcagg

SEQ ID NO: 7352 - DNA, 38 bp, Artificial Sequence
  primer
gtaaaacgacggccagtgagagtgagtgaggaggctgg

SEQ ID NO: 7353 - DNA, 38 bp, Artificial Sequence
  primer
gtaaaacgacggccagtctcgcacaaggtactacagcg

SEQ ID NO: 7354 - DNA, 35 bp, Artificial Sequence
  primer
gtaaaacgacggccagtcttcctccctgctgaggc

SEQ ID NO: 7355 - DNA, 39 bp, Artificial Sequence
  primer
gtaaaacgacggccagttcacttcagtgccttctcttcc

SEQ ID NO: 7356 - DNA, 21 bp, Artificial Sequence
  primer
tcttaatggtagggccagcac

SEQ ID NO: 7357 - DNA, 37 bp, Artificial Sequence
  primer
gtaaaacgacggccagtgcaagcacatctttccaagg

SEQ ID NO: 7358 - DNA, 21 bp, Artificial Sequence
  primer
acatggtggtaagtgctgacg

SEQ ID NO: 7359 - DNA, 21 bp, Artificial Sequence
  primer
aagccagaacctcctcattcc

SEQ ID NO: 7360 - DNA, 21 bp, Artificial Sequence
  primer
ttctgtgcacattgagggttg

SEQ ID NO: 7361 - DNA, 38 bp, Artificial Sequence
  primer
gtaaaacgacggccagtgaagatgtctttcggtgtggc

SEQ ID NO: 7362 - DNA, 38 bp, Artificial Sequence
  primer
gtaaaacgacggccagttggtgacggagagtgagagtc

SEQ ID NO: 7363 - DNA, 38 bp, Artificial Sequence
  primer
gtaaaacgacggccagttattgcagacattgctgggag

SEQ ID NO: 7364 - DNA, 38 bp, Artificial Sequence
  primer
gtaaaacgacggccagtctctggcagctatgagctctg

SEQ ID NO: 7365 - DNA, 20 bp, Artificial Sequence
  primer
ctgaccatgggtggtcattc

SEQ ID NO: 7366 - DNA, 21 bp, Artificial Sequence
  primer
tccactggtgaatgcttcttc

SEQ ID NO: 7367 - DNA, 21 bp, Artificial Sequence
  primer
ttaaacccgcagtgtctgatg

SEQ ID NO: 7368 - DNA, 20 bp, Artificial Sequence
  primer
gactgatgtcaaagctgccc

SEQ ID NO: 7369 - DNA, 38 bp, Artificial Sequence
  primer
gtaaaacgacggccagttctgtcgctttaagctggtcc

SEQ ID NO: 7370 - DNA, 38 bp, Artificial Sequence
  primer
gtaaaacgacggccagtaagccaagatgcttccagaac

SEQ ID NO: 7371 - DNA, 23 bp, Artificial Sequence
  primer
gactgatggacattattgccttg

SEQ ID NO: 7372 - DNA, 22 bp, Artificial Sequence
  primer
caacagcagatacaagcagcag

SEQ ID NO: 7373 - DNA, 24 bp, Artificial Sequence
  primer
cctagcatctcatatctgggaaag

SEQ ID NO: 7374 - DNA, 36 bp, Artificial Sequence
  primer
gtaaaacgacggccagtcagctctggccaaggaaag

SEQ ID NO: 7375 - DNA, 38 bp, Artificial Sequence
  primer
gtaaaacgacggccagtgcaaccattgtaatcaatccg

SEQ ID NO: 7376 - DNA, 21 bp, Artificial Sequence
  primer
gatgaggaaatgttgggcttg

SEQ ID NO: 7377 - DNA, 39 bp, Artificial Sequence
  primer
gtaaaacgacggccagtactcgtgtttcgtttgtttcag

SEQ ID NO: 7378 - DNA, 38 bp, Artificial Sequence
  primer
gtaaaacgacggccagtcctgttaggcttctgggtttc

SEQ ID NO: 7379 - DNA, 38 bp, Artificial Sequence
  primer
gtaaaacgacggccagtggcttatcagggctcagagag

SEQ ID NO: 7380 - DNA, 21 bp, Artificial Sequence
  primer
ctagagcctgggacacattcc

SEQ ID NO: 7381 - DNA, 22 bp, Artificial Sequence
  primer
gctatccaaagctaagtgccat

SEQ ID NO: 7382 - DNA, 22 bp, Artificial Sequence
  primer
gccttcagcagaatgttgactc

SEQ ID NO: 7383 - DNA, 38 bp, Artificial Sequence
  primer
gtaaaacgacggccagtatcatacagtgtggcctttgc

SEQ ID NO: 7384 - DNA, 22 bp, Artificial Sequence
  primer
ggaacagaggagaccctttctc

SEQ ID NO: 7385 - DNA, 38 bp, Artificial Sequence
  primer
gtaaaacgacggccagtaaagcctatgatggcaaatgg

SEQ ID NO: 7386 - DNA, 39 bp, Artificial Sequence
  primer
gtaaaacgacggccagttccaaatctgaatagcctccac

SEQ ID NO: 7387 - DNA, 37 bp, Artificial Sequence
  primer
gtaaaacgacggccagtaggttgtgcaggacaaggag

SEQ ID NO: 7388 - DNA, 38 bp, Artificial Sequence
  primer
gtaaaacgacggccagttcatccaggttggagagtgac

SEQ ID NO: 7389 - DNA, 38 bp, Artificial Sequence
  primer
gtaaaacgacggccagtgatcacggcacagcactttac

SEQ ID NO: 7390 - DNA, 21 bp, Artificial Sequence
  primer
tcctgtttgtctgaggcagag

SEQ ID NO: 7391 - DNA, 40 bp, Artificial Sequence
  primer
gtaaaacgacggccagtccctgaaacctaaagtgagatcc

SEQ ID NO: 7392 - DNA, 38 bp, Artificial Sequence
  primer
gtaaaacgacggccagtaggcagatggcaagactgaag

SEQ ID NO: 7393 - DNA, 26 bp, Artificial Sequence
  primer
ttggttactcatgactttatttgcag

SEQ ID NO: 7394 - DNA, 21 bp, Artificial Sequence
  primer
tcactgttccatgagtgtccc

SEQ ID NO: 7395 - DNA, 40 bp, Artificial Sequence
  primer
gtaaaacgacggccagtaactgcaactgtttgccaataac

SEQ ID NO: 7396 - DNA, 38 bp, Artificial Sequence
  primer
gtaaaacgacggccagtggtccctgtacctggacacac

SEQ ID NO: 7397 - DNA, 22 bp, Artificial Sequence
  primer
tggcataaagggaaggattatg

SEQ ID NO: 7398 - DNA, 40 bp, Artificial Sequence
  primer
gtaaaacgacggccagttgctgttcaaataaagcatctgg

SEQ ID NO: 7399 - DNA, 26 bp, Artificial Sequence
  primer
aatgtgattgtatttgttctgattgg

SEQ ID NO: 7400 - DNA, 38 bp, Artificial Sequence
  primer
gtaaaacgacggccagtagcagaggcctggactacatc

SEQ ID NO: 7401 - DNA, 38 bp, Artificial Sequence
  primer
gtaaaacgacggccagtggccttgtgtcgtccacttag

SEQ ID NO: 7402 - DNA, 38 bp, Artificial Sequence
  primer
gtaaaacgacggccagtaatcagaaggtggtcctttgc

SEQ ID NO: 7403 - DNA, 38 bp, Artificial Sequence
  primer
gtaaaacgacggccagtctaagtgggtccagggttgtg

SEQ ID NO: 7404 - DNA, 21 bp, Artificial Sequence
  primer
tgggcttgggtcatctctatc

SEQ ID NO: 7405 - DNA, 38 bp, Artificial Sequence
  primer
gtaaaacgacggccagtgttctggtccctgaataaggc

SEQ ID NO: 7406 - DNA, 21 bp, Artificial Sequence
  primer
tgtgtcaagaagtggtgtggg

SEQ ID NO: 7407 - DNA, 21 bp, Artificial Sequence
  primer
agggaggaatagagcctggag

SEQ ID NO: 7408 - DNA, 21 bp, Artificial Sequence
  primer
aaacccttgtctcttcccagg

SEQ ID NO: 7409 - DNA, 40 bp, Artificial Sequence
  primer
gtaaaacgacggccagttgccctcaagtatttattcatgc

SEQ ID NO: 7410 - DNA, 38 bp, Artificial Sequence
  primer
gtaaaacgacggccagtatctttcttcaccaagagccc

SEQ ID NO: 7411 - DNA, 43 bp, Artificial Sequence
  primer
gtaaaacgacggccagttgtctagaaggcatgtaggtgtttag

SEQ ID NO: 7412 - DNA, 18 bp, Artificial Sequence
  primer
gtgcccaatgcaaggaag

SEQ ID NO: 7413 - DNA, 21 bp, Artificial Sequence
  primer
tcctggacgacatagcaagac

SEQ ID NO: 7414 - DNA, 40 bp, Artificial Sequence; identical to SEQ ID NO: 7409
  primer

SEQ ID NO: 7415 - DNA, 43 bp, Artificial Sequence
  primer
gtaaaacgacggccagtgatagctgcatataccaagattcaag

SEQ ID NO: 7416 - DNA, 41 bp, Artificial Sequence
  primer
gtaaaacgacggccagtccaagtgtctagaaggcatgtagg

SEQ ID NO: 7417 - DNA, 36 bp, Artificial Sequence
  primer
gtaaaacgacggccagtcccaatgcaaggaagtcac

SEQ ID NO: 7418 - DNA, 23 bp, Artificial Sequence
  primer
aacctcctcttcacatacagcat

SEQ ID NO: 7419 - DNA, 23 bp, Artificial Sequence
  primer
cgtgtgtgtatatggtgtgtgtg

SEQ ID NO: 7420 - DNA, 38 bp, Artificial Sequence
  primer
gtaaaacgacggccagtggctggaggagcctctattct

SEQ ID NO: 7421 - DNA, 21 bp, Artificial Sequence
  primer
caaagaagcctttgcagttcc

SEQ ID NO: 7422 - DNA, 21 bp, Artificial Sequence
  primer
ctacttgtggcaatgactggg

SEQ ID NO: 7423 - DNA, 40 bp, Artificial Sequence
  primer
gtaaaacgacggccagttgctgtttagttgtgttagcctg

SEQ ID NO: 7424 - DNA, 36 bp, Artificial Sequence
  primer
gtaaaacgacggccagtagcccgagggaagattctg

SEQ ID NO: 7425 - DNA, 38 bp, Artificial Sequence
  primer
gtaaaacgacggccagttgtcagggtaggtccacattg

SEQ ID NO: 7426 - DNA, 38 bp, Artificial Sequence
  primer
gtaaaacgacggccagtatcatgcagtactgtgtgccc

SEQ ID NO: 7427 - DNA, 21 bp, Artificial Sequence
  primer
agagcatgaggtgggtttgac

SEQ ID NO: 7428 - DNA, 20 bp, Artificial Sequence
  primer
ccaccctgactcacctttcc

SEQ ID NO: 7429 - DNA, 38 bp, Artificial Sequence
  primer
gtaaaacgacggccagtggtgggtacctctgactctgg

SEQ ID NO: 7430 - DNA, 21 bp, Artificial Sequence
  primer
tgtgctgtgagagtgactcgg

SEQ ID NO: 7431 - DNA, 20 bp, Artificial Sequence
  primer
aggaagggctgagctacctg

SEQ ID NO: 7432 - DNA, 21 bp, Artificial Sequence
  primer
ttgacctcatggcagtgtagc

SEQ ID NO: 7433 - DNA, 38 bp, Artificial Sequence
  primer
gtaaaacgacggccagtgaaggctatgtccaaactggg

SEQ ID NO: 7434 - DNA, 38 bp, Artificial Sequence
  primer
gtaaaacgacggccagttgcatatatccacatcctccg

SEQ ID NO: 7435 - DNA, 42 bp, Artificial Sequence
  primer
gtaaaacgacggccagtggaggcaaagttattacgtagatgc

SEQ ID NO: 7436 - DNA, 38 bp, Artificial Sequence
  primer
gtaaaacgacggccagttaggcattgtggtgtgacttc

SEQ ID NO: 7437 - DNA, 40 bp, Artificial Sequence
  primer
gtaaaacgacggccagtgcaggaatttcacattgaacaac

SEQ ID NO: 7438 - DNA, 37 bp, Artificial Sequence
  primer
gtaaaacgacggccagttgatttccctctgttcgtgc

SEQ ID NO: 7439 - DNA, 39 bp, Artificial Sequence
  primer
gtaaaacgacggccagtctctctttggcttggttgttct

SEQ ID NO: 7440 - DNA, 38 bp, Artificial Sequence
  primer
gtaaaacgacggccagtcctggcctcatttgagaaata

SEQ ID NO: 7441 - DNA, 38 bp, Artificial Sequence
  primer
gtaaaacgacggccagttcaccgtgttagccaggatag

SEQ ID NO: 7442 - DNA, 22 bp, Artificial Sequence
  primer
gcaccagtggaggtaatgtagg

SEQ ID NO: 7443 - DNA, 21 bp, Artificial Sequence
  primer
gagctgagatcatgccactgt

SEQ ID NO: 7444 - DNA, 40 bp, Artificial Sequence
  primer
gtaaaacgacggccagtcggaagtgttcatttctgtttga

SEQ ID NO: 7445 - DNA, 20 bp, Artificial Sequence
  primer
agagcgagacaccctctcaa

SEQ ID NO: 7446 - DNA, 41 bp, Artificial Sequence
  primer
gtaaaacgacggccagtctgatttctgaatccttgaagttg

SEQ ID NO: 7447 - DNA, 23 bp, Artificial Sequence
  primer
ttgccttaacgtttataactggc

SEQ ID NO: 7448 - DNA, 21 bp, Artificial Sequence
  primer
gagattgggttccatttgtca

SEQ ID NO: 7449 - DNA, 35 bp, Artificial Sequence
  primer
gtaaaacgacggccagtgtgagccactgcacccag

SEQ ID NO: 7450 - DNA, 21 bp, Artificial Sequence
  primer
aataataagctgggcatggtg

SEQ ID NO: 7451 - DNA, 19 bp, Artificial Sequence
  primer
atgcacggatttgggtacg

SEQ ID NO: 7452 - DNA, 42 bp, Artificial Sequence
  primer
gtaaaacgacggccagtcagaagttgcaagtagaacaagagg

SEQ ID NO: 7453 - DNA, 27 bp, Artificial Sequence
  primer
tgctagtatagtcaagacacatcagcc

SEQ ID NO: 7454 - DNA, 21 bp, Artificial Sequence
  primer
ctagagagagtcggctgggtt

SEQ ID NO: 7455 - DNA, 38 bp, Artificial Sequence
  primer
gtaaaacgacggccagtggaagctgggaagttaattgg

SEQ ID NO: 7456 - DNA, 38 bp, Artificial Sequence
  primer
gtaaaacgacggccagttgtagagctgtagtggagcgg

SEQ ID NO: 7457 - DNA, 38 bp, Artificial Sequence
  primer
gtaaaacgacggccagtaaactcctgggcttcagtgat

SEQ ID NO: 7458 - DNA, 23 bp, Artificial Sequence
  primer
tgagtgaaatggtttggtaaagc

SEQ ID NO: 7459 - DNA, 37 bp, Artificial Sequence
  primer
gtaaaacgacggccagtctgctgactgagggcacttc

SEQ ID NO: 7460 - DNA, 36 bp, Artificial Sequence
  primer
gtaaaacgacggccagtgagcctgcttgtctctggg

SEQ ID NO: 7461 - DNA, 21 bp, Artificial Sequence
  primer
ttagcttataggcaacggcag

SEQ ID NO: 7462 - DNA, 38 bp, Artificial Sequence
  primer
gtaaaacgacggccagtggtctctgtatgaactgcggg

SEQ ID NO: 7463 - DNA, 39 bp, Artificial Sequence
  primer
gtaaaacgacggccagtaaagcctcagctttcttcatgt

SEQ ID NO: 7464 - DNA, 21 bp, Artificial Sequence
  primer
ttcgaagctcgtaattgagcc

SEQ ID NO: 7465 - DNA, 42 bp, Artificial Sequence
  primer
gtaaaacgacggccagtggccatagtagtgctatacaattcg

SEQ ID NO: 7466 - DNA, 19 bp, Artificial Sequence
  primer
agtgacggctcctctgtgg

SEQ ID NO: 7467 - DNA, 22 bp, Artificial Sequence
  primer
tgcacctttatagcactcctca

SEQ ID NO: 7468 - DNA, 40 bp, Artificial Sequence
  primer
gtaaaacgacggccagtaacacctctcttcagaagcattt

SEQ ID NO: 7469 - DNA, 21 bp, Artificial Sequence
  primer
attacaggtgtgagccaccat

SEQ ID NO: 7470 - DNA, 39 bp, Artificial Sequence
  primer
gtaaaacgacggccagtcacagcaagaccctgtctacaa

SEQ ID NO: 7471 - DNA, 42 bp, Artificial Sequence
  primer
gtaaaacgacggccagtaaatcagaagataagatgcattgga

SEQ ID NO: 7472 - DNA, 22 bp, Artificial Sequence
  primer
tgtcattctttcgttgagcaaa

SEQ ID NO: 7473 - DNA, 38 bp, Artificial Sequence
  primer
gtaaaacgacggccagtctctgaaacatgagaggctgc

SEQ ID NO: 7474 - DNA, 20 bp, Artificial Sequence
  primer
gtctgtcagctgggctatgc

SEQ ID NO: 7475 - DNA, 21 bp, Artificial Sequence
  primer
gcccatcattccctactgaag

SEQ ID NO: 7476 - DNA, 21 bp, Artificial Sequence
  primer
cgttgttgtagttctgcagcg

SEQ ID NO: 7477 - DNA, 21 bp, Artificial Sequence
  primer
atacggctctgtccatcatcc

SEQ ID NO: 7478 - DNA, 18 bp, Artificial Sequence
  primer
gcgagaactctgcggatg

SEQ ID NO: 7479 - DNA, 21 bp, Artificial Sequence
  primer
agctgctggagaaatggactc

SEQ ID NO: 7480 - DNA, 21 bp, Artificial Sequence
  primer
cactctacaggcagggcagtc

SEQ ID NO: 7481 - DNA, 20 bp, Artificial Sequence
  primer
ggatgtctggtgcctagcag

SEQ ID NO: 7482 - DNA, 38 bp, Artificial Sequence
  primer
gtaaaacgacggccagtcagctgtctactcgggtgttg

SEQ ID NO: 7483 - DNA, 22 bp, Artificial Sequence
  primer
cactgagtgtagaggcagggtc

SEQ ID NO: 7484 - DNA, 36 bp, Artificial Sequence
  primer
gtaaaacgacggccagtccttcaggaagagccatgc

SEQ ID NO: 7485 - DNA, 19 bp, Artificial Sequence
  primer
acacaggctccctgctctg

SEQ ID NO: 7486 - DNA, 38 bp, Artificial Sequence
  primer
gtaaaacgacggccagtgtgaagtcatgctgaaggtgg

SEQ ID NO: 7487 - DNA, 36 bp, Artificial Sequence
  primer
gtaaaacgacggccagtcagtcctgtgctctcgctg

SEQ ID NO: 7488 - DNA, 35 bp, Artificial Sequence
  primer
gtaaaacgacggccagtacccttccctttcccacg

SEQ ID NO: 7489 - DNA, 20 bp, Artificial Sequence
  primer
accagaaggaggaggagctg

SEQ ID NO: 7490 - DNA, 37 bp, Artificial Sequence
  primer
gtaaaacgacggccagtgactcttgcaggtacaggcg

SEQ ID NO: 7491 - DNA, 40 bp, Artificial Sequence
  primer
gtaaaacgacggccagtaccttgtgttcattcagacactg

SEQ ID NO: 7492 - DNA, 21 bp, Artificial Sequence
  primer
ctgggcaataagggaaatacc

SEQ ID NO: 7493 - DNA, 21 bp, Artificial Sequence
  primer
aatgtaacgtgtgcaggctga

SEQ ID NO: 7494 - DNA, 27 bp, Artificial Sequence
  primer
tctcttacctaaactacctacactgcc

SEQ ID NO: 7495 - DNA, 27 bp, Artificial Sequence
  primer
tctcttacctaaactacctacactgcc

SEQ ID NO: 7496 - DNA, 38 bp, Artificial Sequence
  primer
gtaaaacgacggccagttgatgtctcacttccctctgc

SEQ ID NO: 7497 - DNA, 38 bp, Artificial Sequence
  primer
gtaaaacgacggccagtctggagctgggaatttgtttc

SEQ ID NO: 7498 - DNA, 37 bp, Artificial Sequence
  primer
gtaaaacgacggccagtgctcaaagagggcacaattc

SEQ ID NO: 7499 - DNA, 18 bp, Artificial Sequence
  primer
ccaagatggcgtcactgc

SEQ ID NO: 7500 - DNA, 22 bp, Artificial Sequence
  primer
ggaagtctaaggcaaggaaagg

SEQ ID NO: 7501 - DNA, 40 bp, Artificial Sequence
  primer
gtaaaacgacggccagtgggtatatgtgatgttacatgcg

SEQ ID NO: 7502 - DNA, 24 bp, Artificial Sequence
  primer
attcaaatggctatgaacacattc

SEQ ID NO: 7503 - DNA, 38 bp, Artificial Sequence
  primer
gtaaaacgacggccagtattgaccagatggttctgctg

SEQ ID NO: 7504 - DNA, 21 bp, Artificial Sequence
  primer
tagatgctgcaggaatcgaag

SEQ ID NO: 7505 - DNA, 39 bp, Artificial Sequence
  primer
gtaaaacgacggccagtgcaaggctcttgtaaccagttg

SEQ ID NO: 7506 - DNA, 22 bp, Artificial Sequence
  primer
tcaaatttaagttctggcaccc

SEQ ID NO: 7507 - DNA, 41 bp, Artificial Sequence
  primer
gtaaaacgacggccagttgtttaattacattctcggaaccc

SEQ ID NO: 7508 - DNA, 20 bp, Artificial Sequence
  primer
tgccactcacagctctcttg

SEQ ID NO: 7509 - DNA, 20 bp, Artificial Sequence
  primer
gcactttcagaggacttggc

SEQ ID NO: 7510 - DNA, 41 bp, Artificial Sequence
  primer
gtaaaacgacggccagttgtgcagactggctctaacagtag

SEQ ID NO: 7511 - DNA, 38 bp, Artificial Sequence
  primer
gtaaaacgacggccagtccacattcgaacagtgatggt

SEQ ID NO: 7512 - DNA, 42 bp, Artificial Sequence
  primer
gtaaaacgacggccagtaattctgtttacctattggatggtg

SEQ ID NO: 7513 - DNA, 22 bp, Artificial Sequence
  primer
cctattggatggtgtaattccg

SEQ ID NO: 7514 - DNA, 22 bp, Artificial Sequence
  primer
ccaaatgtctttggtgactgtg

SEQ ID NO: 7515 - DNA, 39 bp, Artificial Sequence
  primer
gtaaaacgacggccagtgcttgctgccagtataacatgc

SEQ ID NO: 7516 - DNA, 41 bp, Artificial Sequence
  primer
gtaaaacgacggccagtaccataattgaccctaataccacc

SEQ ID NO: 7517 - DNA, 38 bp, Artificial Sequence
  primer
gtaaaacgacggccagtctcacgaaattgccactgttg

SEQ ID NO: 7518 - DNA, 21 bp, Artificial Sequence
  primer
tagacccggtagtgttgtgcc

SEQ ID NO: 7519 - DNA, 40 bp, Artificial Sequence
  primer
gtaaaacgacggccagttccttatttgcatgtttggagtg

SEQ ID NO: 7520 - DNA, 42 bp, Artificial Sequence
  primer
gtaaaacgacggccagttttcagaaatacgggagtaacattt

SEQ ID NO: 7521 - DNA, 21 bp, Artificial Sequence
  primer
gtcattgccattgtggagttg

SEQ ID NO: 7522 - DNA, 21 bp, Artificial Sequence
  primer
gcttctttatgggctctgtgc

SEQ ID NO: 7523 - DNA, 38 bp, Artificial Sequence
  primer
gtaaaacgacggccagtgggtccaccttcagtgttacc

SEQ ID NO: 7524 - DNA, 25 bp, Artificial Sequence
  primer
gaccatcttattagaagggtatggg

SEQ ID NO: 7525 - DNA, 38 bp, Artificial Sequence
  primer
gtaaaacgacggccagtcaacccagagacctgcatttg

SEQ ID NO: 7526 - DNA, 22 bp, Artificial Sequence
  primer
tgactcatttatttcagcctgg

SEQ ID NO: 7527 - DNA, 38 bp, Artificial Sequence
  primer
gtaaaacgacggccagttgctgaaatgtgaaatccacc

SEQ ID NO: 7528 - DNA, 38 bp, Artificial Sequence
  primer
gtaaaacgacggccagttccactcaagatagctgacgg

SEQ ID NO: 7529 - DNA, 21 bp, Artificial Sequence
  primer
aagaacgggaacaggtgaatc

SEQ ID NO: 7530 - DNA, 22 bp, Artificial Sequence
  primer
tgacaaagttgatgattggcac

SEQ ID NO: 7531 - DNA, 37 bp, Artificial Sequence
  primer
gtaaaacgacggccagtcccttgggaggtttatagcg

SEQ ID NO: 7532 - DNA, 38 bp, Artificial Sequence
  primer
gtaaaacgacggccagttcagaaccaaatgtcagaggc

SEQ ID NO: 7533 - DNA, 38 bp, Artificial Sequence
  primer
gtaaaacgacggccagtcagaaatgaaacgcttcctgg

SEQ ID NO: 7534 - DNA, 18 bp, Artificial Sequence
  primer
caggcatgagccacttcg

SEQ ID NO: 7535 - DNA, 35 bp, Artificial Sequence
  primer
gtaaaacgacggccagtgtgtggacccgatggacc

SEQ ID NO: 7536 - DNA, 38 bp, Artificial Sequence
  primer
gtaaaacgacggccagtgtgccatgtgcctgtaatctc

SEQ ID NO: 7537 - DNA, 23 bp, Artificial Sequence
  primer
gcagtaaatcatgtttgcaccac

SEQ ID NO: 7538 - DNA, 38 bp, Artificial Sequence
  primer
gtaaaacgacggccagtgcctttatttgcacagggttg

SEQ ID NO: 7539 - DNA, 21 bp, Artificial Sequence
  primer
tagccaagggaagatgtagcc

SEQ ID NO: 7540 - DNA, 38 bp, Artificial Sequence
  primer
gtaaaacgacggccagtgaccaatcatccagattcagc

SEQ ID NO: 7541 - DNA, 39 bp, Artificial Sequence
  primer
gtaaaacgacggccagttgctactcctgtatgtgggacc

SEQ ID NO: 7542 - DNA, 23 bp, Artificial Sequence
  primer
ggaataaggattatgttcagggc

SEQ ID NO: 7543 - DNA, 38 bp, Artificial Sequence
  primer
gtaaaacgacggccagttgccctttgtctgaaactttg

SEQ ID NO: 7544 - DNA, 40 bp, Artificial Sequence
  primer
gtaaaacgacggccagtgatgtctgcaaagagatggtcag

SEQ ID NO: 7545 - DNA, 38 bp, Artificial Sequence
  primer
gtaaaacgacggccagtttgggactgtgtggtcatttc

SEQ ID NO: 7546 - DNA, 38 bp, Artificial Sequence
  primer
gtaaaacgacggccagttgttcttgggtctaccacacc

SEQ ID NO: 7547 - DNA, 21 bp, Artificial Sequence
  primer
ctggctcaggataactccagg

SEQ ID NO: 7548 - DNA, 37 bp, Artificial Sequence
  primer
gtaaaacgacggccagttcaaacgctttctttgaggg

SEQ ID NO: 7549 - DNA, 38 bp, Artificial Sequence
  primer
gtaaaacgacggccagtccatttctccaactcccagag

SEQ ID NO: 7550 - DNA, 37 bp, Artificial Sequence
  primer
gtaaaacgacggccagttcttgacctcgtgatccacc

SEQ ID NO: 7551 - DNA, 24 bp, Artificial Sequence
  primer
caggaaccaattgaattataaggg

SEQ ID NO: 7552 - DNA, 21 bp, Artificial Sequence
  primer
gtggaggaaatgaagacatgc

SEQ ID NO: 7553 - DNA, 21 bp, Artificial Sequence
  primer
cagacctgttcgccttattcc

SEQ ID NO: 7554 - DNA, 40 bp, Artificial Sequence
  primer
gtaaaacgacggccagttgaaatgtcaatcactggagaaa

SEQ ID NO: 7555 - DNA, 21 bp, Artificial Sequence
  primer
ttcaacaagctggtcttctgg

SEQ ID NO: 7556 - DNA, 22 bp, Artificial Sequence
  primer
aacaagaacaagcaagtttccc

SEQ ID NO: 7557 - DNA, 35 bp, Artificial Sequence
  primer
gtaaaacgacggccagtagctcgggactctggacg

SEQ ID NO: 7558 - DNA, 40 bp, Artificial Sequence
  primer
gtaaaacgacggccagtggaggagacgacaaacatttagg

SEQ ID NO: 7559 - DNA, 20 bp, Artificial Sequence
  primer
caatggagcgagattccatc

SEQ ID NO: 7560 - DNA, 47 bp, Artificial Sequence
  primer
gtaaaacgacggccagtcactacaatatcttaacagagtaccttgga

SEQ ID NO: 7561 - DNA, 38 bp, Artificial Sequence
  primer
gtaaaacgacggccagttcaccaaatgattggctcttg

SEQ ID NO: 7562 - DNA, 21 bp, Artificial Sequence
  primer
tccgtgccttatatcccagag

SEQ ID NO: 7563 - DNA, 38 bp, Artificial Sequence
  primer
gtaaaacgacggccagttgggaaggaccctaaattgtc

SEQ ID NO: 7564 - DNA, 21 bp, Artificial Sequence
  primer
ccctctttgctgaaggatttg

SEQ ID NO: 7565 - DNA, 39 bp, Artificial Sequence
  primer
gtaaaacgacggccagttcctgccttagctgagtattgc

SEQ ID NO: 7566 - DNA, 38 bp, Artificial Sequence
  primer
gtaaaacgacggccagtggccagacagaggtttgtagc

SEQ ID NO: 7567 - DNA, 21 bp, Artificial Sequence
  primer
agtccaggcaagacgtaatgg

SEQ ID NO: 7568 - DNA, 38 bp, Artificial Sequence
  primer
gtaaaacgacggccagtcagggcctgtgagtgagtaac

SEQ ID NO: 7569 - DNA, 38 bp, Artificial Sequence
  primer
gtaaaacgacggccagtccctcctcaatctgtgcctac

SEQ ID NO: 7570 - DNA, 21 bp, Artificial Sequence
  primer
tctgactcatctccctgtccc

SEQ ID NO: 7571 - DNA, 38 bp, Artificial Sequence
  primer
gtaaaacgacggccagtaagcctggatctttctgatgc

SEQ ID NO: 7572 - DNA, 38 bp, Artificial Sequence
  primer
gtaaaacgacggccagtcctactcccagtcctgcctac

SEQ ID NO: 7573 - DNA, 38 bp, Artificial Sequence
  primer
gtaaaacgacggccagtgaagttcttgctcgacacagc

SEQ ID NO: 7574 - DNA, 38 bp, Artificial Sequence
  primer
gtaaaacgacggccagtagcagagggtctgttgtccac

SEQ ID NO: 7575 - DNA, 21 bp, Artificial Sequence
  primer
tggaccctaggtgtgctattc

SEQ ID NO: 7576 - DNA, 37 bp, Artificial Sequence
  primer
gtaaaacgacggccagtactggacattgcagaggtgg

SEQ ID NO: 7577 - DNA, 38 bp, Artificial Sequence
  primer
gtaaaacgacggccagtgacatgatcaccaggatggac

SEQ ID NO: 7578 - DNA, 22 bp, Artificial Sequence
  primer
ccagatagaactggagtcaccc

SEQ ID NO: 7579 - DNA, 41 bp, Artificial Sequence
  primer
gtaaaacgacggccagttcgaatgtttaacactgctctgta

SEQ ID NO: 7580 - DNA, 26 bp, Artificial Sequence
  primer
aaggtaactgggattagtaagggaag

SEQ ID NO: 7581 - DNA, 38 bp, Artificial Sequence
  primer
gtaaaacgacggccagtctcctcttgcttccagaatgg

SEQ ID NO: 7582 - DNA, 18 bp, Artificial Sequence
  primer
gttgcaggccaggaggac

SEQ ID NO: 7583 - DNA, 38 bp, Artificial Sequence
  primer
gtaaaacgacggccagtaaccgagtgcataagcaggag

SEQ ID NO: 7584 - DNA, 21 bp, Artificial Sequence
  primer
gcaagtacaaggacctggagc

SEQ ID NO: 7585 - DNA, 38 bp, Artificial Sequence
  primer
gtaaaacgacggccagtgagcctcaacagaggttgtgc

SEQ ID NO: 7586 - DNA, 37 bp, Artificial Sequence
  primer
gtaaaacgacggccagtgagtgtctgacagccaagcc

SEQ ID NO: 7587 - DNA, 21 bp, Artificial Sequence
  primer
aaagccctgagcactatggac

SEQ ID NO: 7588 - DNA, 21 bp, Artificial Sequence
  primer
gttccacgttgcttgaaattg

SEQ ID NO: 7589 - DNA, 20 bp, Artificial Sequence
  primer
tttagccaatggcctccttc

SEQ ID NO: 7590 - DNA, 39 bp, Artificial Sequence
  primer
gtaaaacgacggccagtgggaaggaattgccaatattca

SEQ ID NO: 7591 - DNA, 27 bp, Artificial Sequence
  primer
gaaagacaaactgtacttctgacatcc

SEQ ID NO: 7592 - DNA, 23 bp, Artificial Sequence
  primer
cattcttaaataacacgccatct

SEQ ID NO: 7593 - DNA, 27 bp, Artificial Sequence
  primer
ttcattaattgcctttcacttaacttt

SEQ ID NO: 7594 - DNA, 26 bp, Artificial Sequence
  primer
tcaagggattcaagactaaacaactc

SEQ ID NO: 7595 - DNA, 27 bp, Artificial Sequence
  primer
aaagtgttcattctagttcaatcaggt

SEQ ID NO: 7596 - DNA, 36 bp, Artificial Sequence
  primer
gtaaaacgacggccagtagtcctcgcacctggaacc

SEQ ID NO: 7597 - DNA, 38 bp, Artificial Sequence
  primer
gtaaaacgacggccagtgatggagatttggaaggatgg

SEQ ID NO: 7598 - DNA, 38 bp, Artificial Sequence
  primer
gtaaaacgacggccagtagcaggatccagcaactcttc

SEQ ID NO: 7599 - DNA, 21 bp, Artificial Sequence
  primer
ggttaggcagatggcagagag

SEQ ID NO: 7600 - DNA, 38 bp, Artificial Sequence
  primer
gtaaaacgacggccagtagtgagggagctgctgtcttc

SEQ ID NO: 7601 - DNA, 39 bp, Artificial Sequence
  primer
gtaaaacgacggccagtcacggtaggtgtttctagtggg

SEQ ID NO: 7602 - DNA, 38 bp, Artificial Sequence
  primer
gtaaaacgacggccagtatccctatctcctttcagccc

SEQ ID NO: 7603 - DNA, 38 bp, Artificial Sequence
  primer
gtaaaacgacggccagtagggtgttgtttcaaaccagg

SEQ ID NO: 7604 - DNA, 24 bp, Artificial Sequence
  primer
tctaatgatcagccttgtctttcc

SEQ ID NO: 7605 - DNA, 42 bp, Artificial Sequence
  primer
gtaaaacgacggccagtaagtattgagacaatcatttctggg

SEQ ID NO: 7606 - DNA, 38 bp, Artificial Sequence
  primer
gtaaaacgacggccagtgggcaccattacgtatttcag

SEQ ID NO: 7607 - DNA, 38 bp, Artificial Sequence
  primer
gtaaaacgacggccagtagtgaaggcttattgcagcat

SEQ ID NO: 7608 - DNA, 39 bp, Artificial Sequence
  primer
gtaaaacgacggccagtgcctaaggatgaagcatgagtg

SEQ ID NO: 7609 - DNA, 27 bp, Artificial Sequence
  primer
tccagtgcctttaattacttatctgag

SEQ ID NO: 7610 - DNA, 22 bp, Artificial Sequence
  primer
ttgcctaatatgctggtaatga

SEQ ID NO: 7611 - DNA, 37 bp, Artificial Sequence
  primer
gtaaaacgacggccagtccaagagctcggtgttgaag

SEQ ID NO: 7612 - DNA, 20 bp, Artificial Sequence
  primer
ctgcacctacaccttcgtgc

SEQ ID NO: 7613 - DNA, 38 bp, Artificial Sequence
  primer
gtaaaacgacggccagtgatgtccaggtcatttgggag

SEQ ID NO: 7614 - DNA, 21 bp, Artificial Sequence
  primer
tctggtgaggaaatgggagag

SEQ ID NO: 7615 - DNA, 21 bp, Artificial Sequence
  primer
ctataaggtgggcacaggtgg

SEQ ID NO: 7616 - DNA, 20 bp, Artificial Sequence
  primer
aagccttgcactgtgaggtg

SEQ ID NO: 7617 - DNA, 38 bp, Artificial Sequence
  primer
gtaaaacgacggccagtaagcgtaaggttcagtcagcc

SEQ ID NO: 7618 - DNA, 20 bp, Artificial Sequence
  primer
tctctcagctgtgacctggc

SEQ ID NO: 7619 - DNA, 38 bp, Artificial Sequence
  primer
gtaaaacgacggccagtctctcccaaatgcagacactg

SEQ ID NO: 7620 - DNA, 37 bp, Artificial Sequence
  primer
gtaaaacgacggccagtacaggaacaggttgggaagc

SEQ ID NO: 7621 - DNA, 38 bp, Artificial Sequence
  primer
gtaaaacgacggccagttgggactgtcaggagagaagg

SEQ ID NO: 7622 - DNA, 38 bp, Artificial Sequence
  primer
gtaaaacgacggccagttctgaccctggctctaactcc

SEQ ID NO: 7623 - DNA, 37 bp, Artificial Sequence
  primer
gtaaaacgacggccagtaacctccatccaccaggttc

SEQ ID NO: 7624 - DNA, 21 bp, Artificial Sequence
  primer
tccagtctctcttctccctgg

SEQ ID NO: 7625 - DNA, 38 bp, Artificial Sequence
  primer
gtaaaacgacggccagtaggtgctcttgtaatctgcgg

SEQ ID NO: 7626 - DNA, 36 bp, Artificial Sequence
  primer
gtaaaacgacggccagtcacctggtgtcactgtggg

SEQ ID NO: 7627 - DNA, 39 bp, Artificial Sequence
  primer
gtaaaacgacggccagtcccttccaacctctagacacac

SEQ ID NO: 7628 - DNA, 37 bp, Artificial Sequence
  primer
gtaaaacgacggccagttccacagacctttgctggtc

SEQ ID NO: 7629 - DNA, 21 bp, Artificial Sequence
  primer
gtaataatcccaggacgccag

SEQ ID NO: 7630 - DNA, 20 bp, Artificial Sequence
  primer
ggtggaggtaggtccctcag

SEQ ID NO: 7631 - DNA, 38 bp, Artificial Sequence
  primer
gtaaaacgacggccagttgtgccataaagcctctcttg

SEQ ID NO: 7632 - DNA, 20 bp, Artificial Sequence
  primer
agagcgagactccgtctcaa

SEQ ID NO: 7633 - DNA, 21 bp, Artificial Sequence
  primer
ttgaggaaacgtcagcacttg

SEQ ID NO: 7634 - DNA, 38 bp, Artificial Sequence
  primer
gtaaaacgacggccagtttggaatcgtcctgaatctcc

SEQ ID NO: 7635 - DNA, 21 bp, Artificial Sequence
  primer
tgattggtctatgggcatctg

SEQ ID NO: 7636 - DNA, 21 bp, Artificial Sequence
  primer
caagttgtaagagtgggcacg

SEQ ID NO: 7637 - DNA, 21 bp, Artificial Sequence
  primer
tacatgctcatgcacacatgc

SEQ ID NO: 7638 - DNA, 21 bp, Artificial Sequence
  primer
accttgagaaggtcacttgcc

SEQ ID NO: 7639 - DNA, 37 bp, Artificial Sequence
  primer
gtaaaacgacggccagtcttgccagaggagtgtggac

SEQ ID NO: 7640 - DNA, 38 bp, Artificial Sequence
  primer
gtaaaacgacggccagttaggtgctcccatgcctaaag

SEQ ID NO: 7641 - DNA, 39 bp, Artificial Sequence
  primer
gtaaaacgacggccagtccctgcttgtgtgttgatattg

SEQ ID NO: 7642 - DNA, 38 bp, Artificial Sequence
  primer
gtaaaacgacggccagtgttagcttcagctcccagacc

SEQ ID NO: 7643 - DNA, 38 bp, Artificial Sequence
  primer
gtaaaacgacggccagttctttgaatcagctgctttgg

SEQ ID NO: 7644 - DNA, 37 bp, Artificial Sequence
  primer
gtaaaacgacggccagttttgaccatggaccctgaag

SEQ ID NO: 7645 - DNA, 38 bp, Artificial Sequence
  primer
gtaaaacgacggccagtatctgtgtctagggagccagc

SEQ ID NO: 7646 - DNA, 19 bp, Artificial Sequence
  primer
acaggcatgaccagggaac

SEQ ID NO: 7647 - DNA, 38 bp, Artificial Sequence
  primer
gtaaaacgacggccagtaagacattgctcccagtctcc

SEQ ID NO: 7648 - DNA, 38 bp, Artificial Sequence
  primer
gtaaaacgacggccagtgtcaggctctggagtggaaag

SEQ ID NO: 7649 - DNA, 20 bp, Artificial Sequence
  primer
ggtttctagcggcaaggttc

SEQ ID NO: 7650 - DNA, 37 bp, Artificial Sequence
  primer
gtaaaacgacggccagtggtgcatacagggtgagtgg

SEQ ID NO: 7651 - DNA, 38 bp, Artificial Sequence
  primer
gtaaaacgacggccagtgaagtgccttatccatctggg

SEQ ID NO: 7652 - DNA, 19 bp, Artificial Sequence
  primer
tgtgtgcactgggtcttgg

SEQ ID NO: 7653 - DNA, 36 bp, Artificial Sequence
  primer
gtaaaacgacggccagtactgacggccactctcacc

SEQ ID NO: 7654 - DNA, 38 bp, Artificial Sequence
  primer
gtaaaacgacggccagtgctgcagacaaagtgagcttc

SEQ ID NO: 7655 - DNA, 19 bp, Artificial Sequence
  primer
ctcccgtctggatggaaag

SEQ ID NO: 7656 - DNA, 21 bp, Artificial Sequence
  primer
gtggatttctcagcacacacc

SEQ ID NO: 7657 - DNA, 38 bp, Artificial Sequence
  primer
gtaaaacgacggccagtggaggcagaattccctaaacc

SEQ ID NO: 7658 - DNA, 37 bp, Artificial Sequence
  primer
gtaaaacgacggccagtcctgcagcataggagctcag

SEQ ID NO: 7659 - DNA, 20 bp, Artificial Sequence
  primer
agagctgactcgggtcttcc

SEQ ID NO: 7660 - DNA, 37 bp, Artificial Sequence
  primer
gtaaaacgacggccagtctcagagctccctgtgctcc

SEQ ID NO: 7661 - DNA, 21 bp, Artificial Sequence
  primer
tttctccatcttcatcctggc

SEQ ID NO: 7662 - DNA, 38 bp, Artificial Sequence
  primer
gtaaaacgacggccagtgaatgtgcatgcatctctgtg

SEQ ID NO: 7663 - DNA, 21 bp, Artificial Sequence
  primer
gtgcactttcctctccgctac

SEQ ID NO: 7664 - DNA, 22 bp, Artificial Sequence
  primer
aggaatgagactgatgggtgac

SEQ ID NO: 7665 - DNA, 38 bp, Artificial Sequence
  primer
gtaaaacgacggccagttgtttcatttcctcgtcctcc

SEQ ID NO: 7666 - DNA, 36 bp, Artificial Sequence
  primer
gtaaaacgacggccagtgatctgcacgtcagcctcc

SEQ ID NO: 7667 - DNA, 21 bp, Artificial Sequence
  primer
cctctgcatagggagcaagag

SEQ ID NO: 7668 - DNA, 21 bp, Artificial Sequence
  primer
ggagtcccagtggagaatgag

SEQ ID NO: 7669 - DNA, 38 bp, Artificial Sequence
  primer
gtaaaacgacggccagtcctccagtaagtgcatacccg

SEQ ID NO: 7670 - DNA, 25 bp, Artificial Sequence
  primer
tggctgaagatttagaataaagcag

SEQ ID NO: 7671 - DNA, 40 bp, Artificial Sequence
  primer
gtaaaacgacggccagttcagagtctgtctgttctctggg

SEQ ID NO: 7672 - DNA, 41 bp, Artificial Sequence
  primer
gtaaaacgacggccagtttcgtaagtgggctactatcttga

SEQ ID NO: 7673 - DNA, 23 bp, Artificial Sequence
  primer
ccctatgtcgaaggtttacttcc

SEQ ID NO: 7674 - DNA, 42 bp, Artificial Sequence
  primer
gtaaaacgacggccagtcattaaagattagaggcatcattgc

SEQ ID NO: 7675 - DNA, 38 bp, Artificial Sequence
  primer
gtaaaacgacggccagtttgtattgtgtggtgcttggg

SEQ ID NO: 7676 - DNA, 41 bp, Artificial Sequence
  primer
gtaaaacgacggccagtccttcttcactaatacaatggctg

SEQ ID NO: 7677 - DNA, 40 bp, Artificial Sequence
  primer
gtaaaacgacggccagtaaactgtggatcaaattaccacg

SEQ ID NO: 7678 - DNA, 22 bp, Artificial Sequence
  primer
tgctttctccctgtctctgttt

SEQ ID NO: 7679 - DNA, 25 bp, Artificial Sequence
  primer
aagaatcaactttgctgtactttgg

SEQ ID NO: 7680 - DNA, 20 bp, Artificial Sequence
  primer
attattgcctgcaatgtgcc

SEQ ID NO: 7681 - DNA, 38 bp, Artificial Sequence
  primer
gtaaaacgacggccagttcaaagtcatggaactgctgg

SEQ ID NO: 7682 - DNA, 20 bp, Artificial Sequence
  primer
agatgttgccattgcactcc

SEQ ID NO: 7683 - DNA, 37 bp, Artificial Sequence
  primer
gtaaaacgacggccagtgtgaccaacagggtcactgc

SEQ ID NO: 7684 - DNA, 22 bp, Artificial Sequence
  primer
tgtccttgttcatggctaacag

SEQ ID NO: 7685 - DNA, 39 bp, Artificial Sequence
  primer
gtaaaacgacggccagtcaatatcagtttccaggcatcc

SEQ ID NO: 7686 - DNA, 39 bp, Artificial Sequence
  primer
gtaaaacgacggccagttgttgaatggaaacgtgatgag

SEQ ID NO: 7687 - DNA, 21 bp, Artificial Sequence
  primer
ttgcctgatgtgttgattgac

SEQ ID NO: 7688 - DNA, 38 bp, Artificial Sequence
  primer
gtaaaacgacggccagttacccagtccttctcctctgg

SEQ ID NO: 7689 - DNA, 38 bp, Artificial Sequence
  primer
gtaaaacgacggccagtgggctccaaataaagcatctg

SEQ ID NO: 7690 - DNA, 20 bp, Artificial Sequence
  primer
gaaggaaatgctggctgatg

SEQ ID NO: 7691 - DNA, 38 bp, Artificial Sequence
  primer
gtaaaacgacggccagtggaaagatcccgtagtcatgg

SEQ ID NO: 7692 - DNA, 39 bp, Artificial Sequence
  primer
gtaaaacgacggccagtgatgcatttcacaatcatgacc

SEQ ID NO: 7693 - DNA, 21 bp, Artificial Sequence
  primer
ccctggaagttgtgctgttag

SEQ ID NO: 7694 - DNA, 21 bp, Artificial Sequence
  primer
tttggtggattgggtataggg

SEQ ID NO: 7695 - DNA, 27 bp, Artificial Sequence
  primer
aacagaattaaaggcattggtataaag

SEQ ID NO: 7696 - DNA, 38 bp, Artificial Sequence
  primer
gtaaaacgacggccagtaagttcaccctgtggatcagc

SEQ ID NO: 7697 - DNA, 38 bp, Artificial Sequence
  primer
gtaaaacgacggccagtcactttgcaacagagtcgagg

SEQ ID NO: 7698 - DNA, 37 bp, Artificial Sequence
  primer
gtaaaacgacggccagttaaccgagcgaatgagttgg

SEQ ID NO: 7699 - DNA, 21 bp, Artificial Sequence
  primer
catatttgaagcccaccaaac

SEQ ID NO: 7700 - DNA, 38 bp, Artificial Sequence
  primer
gtaaaacgacggccagtggcttgtgaacacagaaccac

SEQ ID NO: 7701 - DNA, 38 bp, Artificial Sequence
  primer
gtaaaacgacggccagttttccaagaagcatttgttga

SEQ ID NO: 7702 - DNA, 43 bp, Artificial Sequence
  primer
gtaaaacgacggccagttgtgtcacagatagacagaatgtcag

SEQ ID NO: 7703 - DNA, 41 bp, Artificial Sequence
  primer
gtaaaacgacggccagtaaaggctttccaaatggtaatagg

SEQ ID NO: 7704 - DNA, 21 bp, Artificial Sequence
  primer
tgactgtatgcttgcctgttg

SEQ ID NO: 7705 - DNA, 41 bp, Artificial Sequence
  primer
gtaaaacgacggccagtcctatagctatggtgtcacccaac

SEQ ID NO: 7706 - DNA, 38 bp, Artificial Sequence
  primer
gtaaaacgacggccagtctcttgtaccctgaggccttg

SEQ ID NO: 7707 - DNA, 38 bp, Artificial Sequence
  primer
gtaaaacgacggccagtgtccggacttgctctctgaag

SEQ ID NO: 7708 - DNA, 43 bp, Artificial Sequence
  primer
gtaaaacgacggccagtccttactgatgatctgaatacctgtg

SEQ ID NO: 7709 - DNA, 21 bp, Artificial Sequence
  primer
cagaaacagcacaaaccaagc

SEQ ID NO: 7710 - DNA, 39 bp, Artificial Sequence
  primer
gtaaaacgacggccagttctgaagtcagagagacatgcg

SEQ ID NO: 7711 - DNA, 38 bp, Artificial Sequence
  primer
gtaaaacgacggccagttgaaaggcaccctccagtatc

SEQ ID NO: 7712 - DNA, 19 bp, Artificial Sequence
  primer
ctccggaagaacggacaag

SEQ ID NO: 7713 - DNA, 21 bp, Artificial Sequence
  primer
tgaggaaaccatgtctgttcg

SEQ ID NO: 7714 - DNA, 40 bp, Artificial Sequence
  primer
gtaaaacgacggccagtgaaaggagaaagttctcagccac

SEQ ID NO: 7715 - DNA, 21 bp, Artificial Sequence
  primer
acaaataccaacaattccgcc

SEQ ID NO: 7716 - DNA, 38 bp, Artificial Sequence
  primer
gtaaaacgacggccagtccaagacagaaaccaccacag

SEQ ID NO: 7717 - DNA, 38 bp, Artificial Sequence
  primer
gtaaaacgacggccagtcagaaagaggccactctaggc

SEQ ID NO: 7718 - DNA, 38 bp, Artificial Sequence
  primer
gtaaaacgacggccagtagccgagatagcgaagtcctc

SEQ ID NO: 7719 - DNA, 38 bp, Artificial Sequence
  primer
gtaaaacgacggccagtagccctgttgaaccaaagatg

SEQ ID NO: 7720 - DNA, 22 bp, Artificial Sequence
  primer
gaggttcacacctgaagaggag

SEQ ID NO: 7721 - DNA, 21 bp, Artificial Sequence
  primer
aggatgaaagtggtgtccctg

SEQ ID NO: 7722 - DNA, 20 bp, Artificial Sequence
  primer
caggaagagccaggcaaatc

SEQ ID NO: 7723 - DNA, 38 bp, Artificial Sequence
  primer
gtaaaacgacggccagtagctgctcctgtctcttcagg

SEQ ID NO: 7724 - DNA, 38 bp, Artificial Sequence
  primer
gtaaaacgacggccagtcctctttgcctcattgtttgg

SEQ ID NO: 7725 - DNA, 21 bp, Artificial Sequence
  primer
tgatccacaaatcactagccc

SEQ ID NO: 7726 - DNA, 21 bp, Artificial Sequence
  primer
gaagacgttgtagtggcaagc

SEQ ID NO: 7727 - DNA, 21 bp, Artificial Sequence
  primer
gtgggaaatgcaatcagacag

SEQ ID NO: 7728 - DNA, 21 bp, Artificial Sequence
  primer
tgtttgaaatgacccgaagtg

SEQ ID NO: 7729 - DNA, 21 bp, Artificial Sequence
  primer
ttccagatgacgtgagtgagg

SEQ ID NO: 7730 - DNA, 21 bp, Artificial Sequence
  primer
atcgagattcctactgcaccc

SEQ ID NO: 7731 - DNA, 20 bp, Artificial Sequence
  primer
gacaggacatggcaagcatc

SEQ ID NO: 7732 - DNA, 38 bp, Artificial Sequence
  primer
gtaaaacgacggccagtacatcccgattgccagttaag

SEQ ID NO: 7733 - DNA, 22 bp, Artificial Sequence
  primer
gcttccaaattagtggataggc

SEQ ID NO: 7734 - DNA, 42 bp, Artificial Sequence
  primer
gtaaaacgacggccagtgacttcctttctttgaatgaatcag

SEQ ID NO: 7735 - DNA, 22 bp, Artificial Sequence
  primer
tcttatcattgctgcctcacac

SEQ ID NO: 7736 - DNA, 38 bp, Artificial Sequence
  primer
gtaaaacgacggccagtattcaggtatggtgggtgtcc

SEQ ID NO: 7737 - DNA, 21 bp, Artificial Sequence
  primer
tcatctttgtaatccatgggc

SEQ ID NO: 7738 - DNA, 38 bp, Artificial Sequence
  primer
gtaaaacgacggccagtatgtcctttcttggccaaatg

SEQ ID NO: 7739 - DNA, 38 bp, Artificial Sequence
  primer
gtaaaacgacggccagtcagcaatgcttctcaacatcg

SEQ ID NO: 7740 - DNA, 21 bp, Artificial Sequence
  primer
attgatgagcatggacacacc

SEQ ID NO: 7741 - DNA, 22 bp, Artificial Sequence
  primer
ggtcaccttcattcctaacagc

SEQ ID NO: 7742 - DNA, 37 bp, Artificial Sequence
  primer
gtaaaacgacggccagtatgctgagaggaattcagcg

SEQ ID NO: 7743 - DNA, 21 bp, Artificial Sequence
  primer
ttggagtttgcactaggcttt

SEQ ID NO: 7744 - DNA, 21 bp, Artificial Sequence
  primer
attggaatgctgctgtaagcc

SEQ ID NO: 7745 - DNA, 41 bp, Artificial Sequence
  primer
gtaaaacgacggccagtgggataacattgtacccttgaaac

SEQ ID NO: 7746 - DNA, 38 bp, Artificial Sequence
  primer
gtaaaacgacggccagtatctcaggagttcttggtcgg

SEQ ID NO: 7747 - DNA, 22 bp, Artificial Sequence
  primer
tgaggattcagccctcagtaag

SEQ ID NO: 7748 - DNA, 23 bp, Artificial Sequence
  primer
ggaatttagcttaagccatggtg

SEQ ID NO: 7749 - DNA, 36 bp, Artificial Sequence
  primer
gtaaaacgacggccagttgcttggtcacttggttgc

SEQ ID NO: 7750 - DNA, 38 bp, Artificial Sequence
  primer
gtaaaacgacggccagtggcagggttatgatatttgcc

SEQ ID NO: 7751 - DNA, 39 bp, Artificial Sequence
  primer
gtaaaacgacggccagtcctgcctcacagattcccttac

SEQ ID NO: 7752 - DNA, 37 bp, Artificial Sequence
  primer
gtaaaacgacggccagttgagcaaatgtttgaagccc

SEQ ID NO: 7753 - DNA, 21 bp, Artificial Sequence
  primer
tttgcactttgtgttctgcac

SEQ ID NO: 7754 - DNA, 21 bp, Artificial Sequence
  primer
ctacatgctgcttaaccctgg

SEQ ID NO: 7755 - DNA, 39 bp, Artificial Sequence
  primer
gtaaaacgacggccagttttagatgggtggatggatgac

SEQ ID NO: 7756 - DNA, 38 bp, Artificial Sequence
  primer
gtaaaacgacggccagtgcacagtgggtgacaagactc

SEQ ID NO: 7757 - DNA, 42 bp, Artificial Sequence
  primer
gtaaaacgacggccagtgattgtacctcttacatcaagcagc

SEQ ID NO: 7758 - DNA, 21 bp, Artificial Sequence
  primer
ttgtttgttgtttggtttggg

SEQ ID NO: 7759 - DNA, 38 bp, Artificial Sequence
  primer
gtaaaacgacggccagtaggtaagaggtcaccagccac

SEQ ID NO: 7760 - DNA, 40 bp, Artificial Sequence
  primer
gtaaaacgacggccagtccacttggtttaccagtatttgc

SEQ ID NO: 7761 - DNA, 21 bp, Artificial Sequence
  primer
ttgtagagatgggaccttgcc

SEQ ID NO: 7762 - DNA, 23 bp, Artificial Sequence
  primer
ttatgctgagaattatcaagggc

SEQ ID NO: 7763 - DNA, 22 bp, Artificial Sequence
  primer
ttaatttcctgctccagcattc

SEQ ID NO: 7764 - DNA, 21 bp, Artificial Sequence
  primer
tatgacagtgggatgggtctg

SEQ ID NO: 7765 - DNA, 26 bp, Artificial Sequence
  primer
tggtactttgccactagaattctttc

SEQ ID NO: 7766 - DNA, 39 bp, Artificial Sequence
  primer
gtaaaacgacggccagttttcctgaagaaagtccattgc

SEQ ID NO: 7767 - DNA, 21 bp, Artificial Sequence
  primer
accaggagttgtttccgctac

SEQ ID NO: 7768 - DNA, 40 bp, Artificial Sequence
  primer
gtaaaacgacggccagttttagccatcttgcctgttctta

SEQ ID NO: 7769 - DNA, 46 bp, Artificial Sequence
  primer
gtaaaacgacggccagttgaatgtaagtctatctggaattagagga

SEQ ID NO: 7770 - DNA, 44 bp, Artificial Sequence
  primer
gtaaaacgacggccagtacttaaacatttaatttccaaacttgc

SEQ ID NO: 7771 - DNA, 21 bp, Artificial Sequence
  primer
atcattcccaaccttagtggc

SEQ ID NO: 7772 - DNA, 23 bp, Artificial Sequence
  primer
tgggtaacaagagtgaaactcca

SEQ ID NO: 7773 - DNA, 23 bp, Artificial Sequence
  primer
ggtttcgtttattcatgctttcc

SEQ ID NO: 7774 - DNA, 37 bp, Artificial Sequence
  primer
gtaaaacgacggccagtgccagtttgtggctatgcag

SEQ ID NO: 7775 - DNA, 43 bp, Artificial Sequence
  primer
gtaaaacgacggccagttgggttagttcctttacatattctga

SEQ ID NO: 7776 - DNA, 38 bp, Artificial Sequence
  primer
gtaaaacgacggccagtttgttgcaaatagcaccacag

SEQ ID NO: 7777 - DNA, 21 bp, Artificial Sequence
  primer
cctttcctgcctctcataggg

SEQ ID NO: 7778 - DNA, 38 bp, Artificial Sequence
  primer
gtaaaacgacggccagtgcttgcatttgtgctccctac

SEQ ID NO: 7779 - DNA, 21 bp, Artificial Sequence
  primer
gtctgctgtgttggtgctctt

SEQ ID NO: 7780 - DNA, 38 bp, Artificial Sequence
  primer
gtaaaacgacggccagtattgtttgcctctttggttgc

SEQ ID NO: 7781 - DNA, 38 bp, Artificial Sequence
  primer
gtaaaacgacggccagtacaggagcaacaagatccctc

SEQ ID NO: 7782 - DNA, 21 bp, Artificial Sequence
  primer
gcgcgtcaactacatcttcag

SEQ ID NO: 7783 - DNA, 21 bp, Artificial Sequence
  primer
tttcctctcgaacctctccag

SEQ ID NO: 7784 - DNA, 38 bp, Artificial Sequence
  primer
gtaaaacgacggccagtttaatggatgcaaagccactg

SEQ ID NO: 7785 - DNA, 20 bp, Artificial Sequence
  primer
cctcagcctcacttcagtcg

SEQ ID NO: 7786 - DNA, 38 bp, Artificial Sequence
  primer
gtaaaacgacggccagtaccctctgcccttaagttgtc

SEQ ID NO: 7787 - DNA, 43 bp, Artificial Sequence
  primer
gtaaaacgacggccagtggagaatagatgatgaagaacctttc

SEQ ID NO: 7788 - DNA, 39 bp, Artificial Sequence
  primer
gtaaaacgacggccagtataaaggatcacccaaatcacc

SEQ ID NO: 7789 - DNA, 37 bp, Artificial Sequence
  primer
gtaaaacgacggccagtcgagccagtctccatctctg

SEQ ID NO: 7790 - DNA, 38 bp, Artificial Sequence
  primer
gtaaaacgacggccagtgcaaagaaggatggtgaggag

SEQ ID NO: 7791 - DNA, 38 bp, Artificial Sequence
  primer
gtaaaacgacggccagtccttgtctgacagtggctttg

SEQ ID NO: 7792 - DNA, 21 bp, Artificial Sequence
  primer
cacaagtctgctgctgaaacc

SEQ ID NO: 7793 - DNA, 21 bp, Artificial Sequence
  primer
aggaacagggtcagcaagaag

SEQ ID NO: 7794 - DNA, 21 bp, Artificial Sequence
  primer
atgtggatgcgctttactgag

SEQ ID NO: 7795 - DNA, 38 bp, Artificial Sequence
  primer
gtaaaacgacggccagttcaaagccctaccagtagcag

SEQ ID NO: 7796 - DNA, 22 bp, Artificial Sequence
  primer
ccagagaagatggttctctccc

SEQ ID NO: 7797 - DNA, 38 bp, Artificial Sequence
  primer
gtaaaacgacggccagtaatttgaacaaggcacacacg

SEQ ID NO: 7798 - DNA, 19 bp, Artificial Sequence
  primer
gcccaaagcaacgaaattg

SEQ ID NO: 7799 - DNA, 22 bp, Artificial Sequence
  primer
ttcgggagccactaacaataag

SEQ ID NO: 7800 - DNA, 21 bp, Artificial Sequence
  primer
agaatcacattggtcaccctg

SEQ ID NO: 7801 - DNA, 37 bp, Artificial Sequence
  primer
gtaaaacgacggccagtcttgatcagccttccaggag

SEQ ID NO: 7802 - DNA, 38 bp, Artificial Sequence
  primer
gtaaaacgacggccagtagtgtcacacattcccgtcag

SEQ ID NO: 7803 - DNA, 38 bp, Artificial Sequence
  primer
gtaaaacgacggccagttcagcaaagtttccaaacacc

SEQ ID NO: 7804 - DNA, 21 bp, Artificial Sequence
  primer
taggtttatgcccacctctcg

SEQ ID NO: 7805 - DNA, 21 bp, Artificial Sequence
  primer
cagaaacacccagttcagagg

SEQ ID NO: 7806 - DNA, 21 bp, Artificial Sequence
  primer
ttgagcgtgaaatgcctaatg

SEQ ID NO: 7807 - DNA, 21 bp, Artificial Sequence
  primer
gcagacgtcagtgattcaagc

SEQ ID NO: 7808 - DNA, 38 bp, Artificial Sequence
  primer
gtaaaacgacggccagtgagatcgactctctggatggc

SEQ ID NO: 7809 - DNA, 22 bp, Artificial Sequence
  primer
ttgacccttggtctaataaccg

SEQ ID NO: 7810 - DNA, 38 bp, Artificial Sequence
  primer
gtaaaacgacggccagtgaaactaagccatttgggctg

SEQ ID NO: 7811 - DNA, 40 bp, Artificial Sequence
  primer
gtaaaacgacggccagtggacaccactgtagaaaccaatc

SEQ ID NO: 7812 - DNA, 21 bp, Artificial Sequence
  primer
aatgggaatttctgcatccac

SEQ ID NO: 7813 - DNA, 21 bp, Artificial Sequence
  primer
ctgacagaacattctgcaccc

SEQ ID NO: 7814 - DNA, 21 bp, Artificial Sequence
  primer
ttcccataaaggccacttcac

SEQ ID NO: 7815 - DNA, 21 bp, Artificial Sequence
  primer
tccacctgtgtcactaccacc

SEQ ID NO: 7816 - DNA, 38 bp, Artificial Sequence
  primer
gtaaaacgacggccagtacaagtgagccatgtgcaaag

SEQ ID NO: 7817 - DNA, 38 bp, Artificial Sequence
  primer
gtaaaacgacggccagtttcctgaggctgtacttgagc

SEQ ID NO: 7818 - DNA, 23 bp, Artificial Sequence
  primer
gcagagatggagtaagaaggagc

SEQ ID NO: 7819 - DNA, 39 bp, Artificial Sequence
  primer
gtaaaacgacggccagtcctgatgaggagatgatggaag

SEQ ID NO: 7820 - DNA, 18 bp, Artificial Sequence
  primer
ggtgatctcccgcctcag

SEQ ID NO: 7821 - DNA, 21 bp, Artificial Sequence
  primer
tgcaccctgaccagtgtagag

SEQ ID NO: 7822 - DNA, 38 bp, Artificial Sequence
  primer
gtaaaacgacggccagtcctccaaggatcagaatggac

SEQ ID NO: 7823 - DNA, 20 bp, Artificial Sequence
  primer
ctcctcttgaccctgcactg

SEQ ID NO: 7824 - DNA, 38 bp, Artificial Sequence
  primer
gtaaaacgacggccagtcagtggcttcaaacgtgactc

SEQ ID NO: 7825 - DNA, 21 bp, Artificial Sequence
  primer
gccaagctgtttacttctccc

SEQ ID NO: 7826 - DNA, 24 bp, Artificial Sequence
  primer
gggtctgataatctctaaggtccc

SEQ ID NO: 7827 - DNA, 20 bp, Artificial Sequence
  primer
ggacatgcagtccctgaaac

SEQ ID NO: 7828 - DNA, 24 bp, Artificial Sequence
  primer
cttgataacaaacacagatcccac

SEQ ID NO: 7829 - DNA, 39 bp, Artificial Sequence
  primer
gtaaaacgacggccagtagggtatcctttgaagagggag

SEQ ID NO: 7830 - DNA, 22 bp, Artificial Sequence
  primer
ggagggtgcacttaactctttc

SEQ ID NO: 7831 - DNA, 37 bp, Artificial Sequence
  primer
gtaaaacgacggccagttgggcaacagagttccaaag

SEQ ID NO: 7832 - DNA, 21 bp, Artificial Sequence
  primer
aacaatggcagcttccaaatc

SEQ ID NO: 7833 - DNA, 43 bp, Artificial Sequence
  primer
gtaaaacgacggccagtaacctgaggataagtgacactaaagg

SEQ ID NO: 7834 - DNA, 26 bp, Artificial Sequence
  primer
tttggttctgagtagaaacttggtag

SEQ ID NO: 7835 - DNA, 38 bp, Artificial Sequence
  primer
gtaaaacgacggccagtctttgctttgatgccacaacc

SEQ ID NO: 7836 - DNA, 40 bp, Artificial Sequence
  primer
gtaaaacgacggccagtaaagagagcaaacagcttctcag

SEQ ID NO: 7837 - DNA, 21 bp, Artificial Sequence
  primer
ttcattcatgacaagccttcc

SEQ ID NO: 7838 - DNA, 38 bp, Artificial Sequence
  primer
gtaaaacgacggccagtaccaagcattggttatccagg

SEQ ID NO: 7839 - DNA, 22 bp, Artificial Sequence
  primer
gcattattaaatgggctgaacc

SEQ ID NO: 7840 - DNA, 38 bp, Artificial Sequence
  primer
gtaaaacgacggccagtgctttcattcacccactttcc

SEQ ID NO: 7841 - DNA, 38 bp, Artificial Sequence
  primer
gtaaaacgacggccagtttcctgtctatgggatgaggg

SEQ ID NO: 7842 - DNA, 21 bp, Artificial Sequence
  primer
atgtatttgaaagcagcgcat

SEQ ID NO: 7843 - DNA, 20 bp, Artificial Sequence
  primer
tcctgacttcgtgatctgcc

SEQ ID NO: 7844 - DNA, 22 bp, Artificial Sequence
  primer
caaagatgatcgctttggtttg

SEQ ID NO: 7845 - DNA, 38 bp, Artificial Sequence
  primer
gtaaaacgacggccagtaggcttgctaaatggtggttg

SEQ ID NO: 7846 - DNA, 38 bp, Artificial Sequence
  primer
gtaaaacgacggccagtatttaagggtcaaggtgggag

SEQ ID NO: 7847 - DNA, 40 bp, Artificial Sequence
  primer
gtaaaacgacggccagtccatgatctcaatgagtttccac

SEQ ID NO: 7848 - DNA, 36 bp, Artificial Sequence
  primer
gtaaaacgacggccagtattctggttgcgtcttgcc

SEQ ID NO: 7849 - DNA, 18 bp, Artificial Sequence
  primer
agaaggcggttgtgaggg

SEQ ID NO: 7850 - DNA, 37 bp, Artificial Sequence
  primer
gtaaaacgacggccagtaagagcagggtgttgtgcag

SEQ ID NO: 7851 - DNA, 36 bp, Artificial Sequence
  primer
gtaaaacgacggccagtcacttaggctgccacgctc

SEQ ID NO: 7852 - DNA, 22 bp, Artificial Sequence
  primer
tcagatttctgggctttgagtc

SEQ ID NO: 7853 - DNA, 37 bp, Artificial Sequence
  primer
gtaaaacgacggccagtctgagagggtctggctgttg

SEQ ID NO: 7854 - DNA, 37 bp, Artificial Sequence
  primer
gtaaaacgacggccagtactctggaatgcccagaagg

SEQ ID NO: 7855 - DNA, 37 bp, Artificial Sequence
  primer
gtaaaacgacggccagtgtgcacgaacttgcacacag

SEQ ID NO: 7856 - DNA, 38 bp, Artificial Sequence
  primer
gtaaaacgacggccagttggatgaggctcctgctttac

SEQ ID NO: 7857 - DNA, 39 bp, Artificial Sequence
  primer
gtaaaacgacggccagttgagtcaaacacagggtggtag

SEQ ID NO: 7858 - DNA, 38 bp, Artificial Sequence
  primer
gtaaaacgacggccagttccagtggtcagttcagcttg

SEQ ID NO: 7859 - DNA, 21 bp, Artificial Sequence
  primer
agcctctgtgggtgtcagaag

SEQ ID NO: 7860 - DNA, 21 bp, Artificial Sequence
  primer
gaggtctgtgagggtgaggag

SEQ ID NO: 7861 - DNA, 38 bp, Artificial Sequence
  primer
gtaaaacgacggccagttccaccatcacagagttcaga

SEQ ID NO: 7862 - DNA, 38 bp, Artificial Sequence
  primer
gtaaaacgacggccagttttgtgaacagatttcctgcc

SEQ ID NO: 7863 - DNA, 38 bp, Artificial Sequence
  primer
gtaaaacgacggccagttcacttacgggtctgtgttcc

SEQ ID NO: 7864 - DNA, 38 bp, Artificial Sequence
  primer
gtaaaacgacggccagtacatgaattgtggtaaccggg

SEQ ID NO: 7865 - DNA, 40 bp, Artificial Sequence
  primer
gtaaaacgacggccagtaagggtaaagagaaagaaccagg

SEQ ID NO: 7866 - DNA, 20 bp, Artificial Sequence
  primer
cagggatggacttgagcttg

SEQ ID NO: 7867 - DNA, 44 bp, Artificial Sequence
  primer
gtaaaacgacggccagtgaatttcatcttagaggtatgattccc

SEQ ID NO: 7868 - DNA, 37 bp, Artificial Sequence
  primer
gtaaaacgacggccagtattggctgtgacccactctg

SEQ ID NO: 7869 - DNA, 38 bp, Artificial Sequence
  primer
gtaaaacgacggccagtaactctaacatggagccagcc

SEQ ID NO: 7870 - DNA, 21 bp, Artificial Sequence
  primer
tctgtctcaggttcaagagcg

SEQ ID NO: 7871 - DNA, 40 bp, Artificial Sequence
  primer
gtaaaacgacggccagtggcttgtgattaacatacgaagg

SEQ ID NO: 7872 - DNA, 38 bp, Artificial Sequence
  primer
gtaaaacgacggccagttgtttgtcacccagtgtagcg

SEQ ID NO: 7873 - DNA, 38 bp, Artificial Sequence
  primer
gtaaaacgacggccagtggcaaactgtcacttgaaacc

SEQ ID NO: 7874 - DNA, 38 bp, Artificial Sequence
  primer
gtaaaacgacggccagtcggttgtccctctttcgtaac

SEQ ID NO: 7875 - DNA, 37 bp, Artificial Sequence
  primer
gtaaaacgacggccagtaaccctggcaggaagatgag

SEQ ID NO: 7876 - DNA, 37 bp, Artificial Sequence
  primer
gtaaaacgacggccagtccttacgaagccagcagatg

SEQ ID NO: 7877 - DNA, 38 bp, Artificial Sequence
  primer
gtaaaacgacggccagtcaaccaaactgcaaggaacac

SEQ ID NO: 7878 - DNA, 38 bp, Artificial Sequence
  primer
gtaaaacgacggccagtgaccatttcgatctggattgc

SEQ ID NO: 7879 - DNA, 18 bp, Artificial Sequence
  primer
gacccgaggagcaggaag

SEQ ID NO: 7880 - DNA, 38 bp, Artificial Sequence
  primer
gtaaaacgacggccagttatgtgttcagctggttgctg

SEQ ID NO: 7881 - DNA, 38 bp, Artificial Sequence
  primer
gtaaaacgacggccagtactctaccctggaacaggcag

SEQ ID NO: 7882 - DNA, 37 bp, Artificial Sequence
  primer
gtaaaacgacggccagtgaggactctggctggagagg

SEQ ID NO: 7883 - DNA, 38 bp, Artificial Sequence
  primer
gtaaaacgacggccagtagagacttggctgctcaacac

SEQ ID NO: 7884 - DNA, 38 bp, Artificial Sequence
  primer
gtaaaacgacggccagttgggagacaggaatgttaggg

SEQ ID NO: 7885 - DNA, 21 bp, Artificial Sequence
  primer
ggcaaaggataaaggtttccc

SEQ ID NO: 7886 - DNA, 38 bp, Artificial Sequence
  primer
gtaaaacgacggccagttgaaatcaggatttgcactcg

SEQ ID NO: 7887 - DNA, 38 bp, Artificial Sequence
  primer
gtaaaacgacggccagttcaggaaactacctgaagcgg

SEQ ID NO: 7888 - DNA, 39 bp, Artificial Sequence
  primer
gtaaaacgacggccagtctggctgcacagaataactttg

SEQ ID NO: 7889 - DNA, 21 bp, Artificial Sequence
  primer
gttagcctggtcaagctgctg

SEQ ID NO: 7890 - DNA, 21 bp, Artificial Sequence
  primer
tcttggagctgtgaactggac

SEQ ID NO: 7891 - DNA, 18 bp, Artificial Sequence
  primer
caacaaggtgggctggac

SEQ ID NO: 7892 - DNA, 39 bp, Artificial Sequence
  primer
gtaaaacgacggccagtgaaggaagaggaggaagctgag

SEQ ID NO: 7893 - DNA, 20 bp, Artificial Sequence
  primer
gagtgccctccttcctgttc

SEQ ID NO: 7894 - DNA, 37 bp, Artificial Sequence
  primer
gtaaaacgacggccagtctatacaaagcggaccagcg

SEQ ID NO: 7895 - DNA, 37 bp, Artificial Sequence
  primer
gtaaaacgacggccagtcacaagagggagaggcattg

SEQ ID NO: 7896 - DNA, 37 bp, Artificial Sequence
  primer
gtaaaacgacggccagtgtttcgcagggtgagactcc

SEQ ID NO: 7897 - DNA, 21 bp, Artificial Sequence
  primer
ttgtgtcaggcaaggtaatgg

SEQ ID NO: 7898 - DNA, 21 bp, Artificial Sequence
  primer
gtttacccatggttccgacag

SEQ ID NO: 7899 - DNA, 38 bp, Artificial Sequence
  primer
gtaaaacgacggccagtgaaatgagatgctgggttgtg

SEQ ID NO: 7900 - DNA, 36 bp, Artificial Sequence
  primer
gtaaaacgacggccagtcccattcattgccaaccag

SEQ ID NO: 7901 - DNA, 37 bp, Artificial Sequence
  primer
gtaaaacgacggccagtaggacacccagtgacccttc

SEQ ID NO: 7902 - DNA, 39 bp, Artificial Sequence
  primer
gtaaaacgacggccagttccttcacttctaagcacctgg

SEQ ID NO: 7903 - DNA, 21 bp, Artificial Sequence
  primer
cccagttgttccaatcctttc

SEQ ID NO: 7904 - DNA, 38 bp, Artificial Sequence
  primer
gtaaaacgacggccagtgcacacacatactccctacgc

SEQ ID NO: 7905 - DNA, 38 bp, Artificial Sequence
  primer
gtaaaacgacggccagtccttggagtctcagccatttc

SEQ ID NO: 7906 - DNA, 37 bp, Artificial Sequence
  primer
gtaaaacgacggccagtttagttctggagtggcccag

SEQ ID NO: 7907 - DNA, 38 bp, Artificial Sequence
  primer
gtaaaacgacggccagtctccttgtccttgaggtcagc

SEQ ID NO: 7908 - DNA, 37 bp, Artificial Sequence
  primer
gtaaaacgacggccagtctcgatcaccgagagtcacc

SEQ ID NO: 7909 - DNA, 21 bp, Artificial Sequence
  primer
tatggagccatcaaaggcttg

SEQ ID NO: 7910 - DNA, 37 bp, Artificial Sequence
  primer
gtaaaacgacggccagtggaatagcccaggagctcag

SEQ ID NO: 7911 - DNA, 37 bp, Artificial Sequence
  primer
gtaaaacgacggccagtagtcacggcagatagccctc

SEQ ID NO: 7912 - DNA, 38 bp, Artificial Sequence
  primer
gtaaaacgacggccagtgtgtcttggtctcaagttgcc

SEQ ID NO: 7913 - DNA, 41 bp, Artificial Sequence
  primer
gtaaaacgacggccagttggatgtttcatttcttagcaacc

SEQ ID NO: 7914 - DNA, 39 bp, Artificial Sequence
  primer
gtaaaacgacggccagttggaagatcaaagtgtggaagc

SEQ ID NO: 7915 - DNA, 38 bp, Artificial Sequence
  primer
gtaaaacgacggccagtttccatactgcctttgcattg

SEQ ID NO: 7916 - DNA, 27 bp, Artificial Sequence
  primer
tttgtaatccacataatcttcgtatgt

SEQ ID NO: 7917 - DNA, 40 bp, Artificial Sequence
  primer
gtaaaacgacggccagtaacttcatgatcctaaggaaggc

SEQ ID NO: 7918 - DNA, 21 bp, Artificial Sequence
  primer
atttgaactgagcccgtcatc

SEQ ID NO: 7919 - DNA, 21 bp, Artificial Sequence
  primer
cgtgggctgatacctctgtag

SEQ ID NO: 7920 - DNA, 42 bp, Artificial Sequence
  primer
gtaaaacgacggccagtggacaacatccaaactatatcaacc

SEQ ID NO: 7921 - DNA, 20 bp, Artificial Sequence
  primer
ttgcagcaagctaccaaacc

SEQ ID NO: 7922 - DNA, 39 bp, Artificial Sequence
  primer
gtaaaacgacggccagtccaagaacacactggatactgc

SEQ ID NO: 7923 - DNA, 41 bp, Artificial Sequence
  primer
gtaaaacgacggccagtttatgcaaacaaggaagtatggac

SEQ ID NO: 7924 - DNA, 38 bp, Artificial Sequence
  primer
gtaaaacgacggccagtacaaacatgaaccatgggatg

SEQ ID NO: 7925 - DNA, 40 bp, Artificial Sequence
  primer
gtaaaacgacggccagtggacaccaacataaagtcagcac

SEQ ID NO: 7926 - DNA, 37 bp, Artificial Sequence
  primer
gtaaaacgacggccagtgaaggcatccaggcaatctc

SEQ ID NO: 7927 - DNA, 37 bp, Artificial Sequence
  primer
gtaaaacgacggccagtgcagtgagctgtgattgcac

SEQ ID NO: 7928 - DNA, 22 bp, Artificial Sequence
  primer
ttgaagtgtcttccctccaatc

SEQ ID NO: 7929 - DNA, 38 bp, Artificial Sequence
  primer
gtaaaacgacggccagtattgccctcaggctatgtatg

SEQ ID NO: 7930 - DNA, 21 bp, Artificial Sequence
  primer
cctcttcagcttcccagacac

SEQ ID NO: 7931 - DNA, 37 bp, Artificial Sequence
  primer
gtaaaacgacggccagtgagaaggaccaagagcctcc

SEQ ID NO: 7932 - DNA, 38 bp, Artificial Sequence
  primer
gtaaaacgacggccagtttggtcaagggctgattctac

SEQ ID NO: 7933 - DNA, 22 bp, Artificial Sequence
  primer
gcaaatatctgtggagggtttg

SEQ ID NO: 7934 - DNA, 20 bp, Artificial Sequence
  primer
cctttgagcccttggaaatg

SEQ ID NO: 7935 - DNA, 39 bp, Artificial Sequence
  primer
gtaaaacgacggccagttggtaagaaccttcgactccag

SEQ ID NO: 7936 - DNA, 38 bp, Artificial Sequence
  primer
gtaaaacgacggccagtaccctagtgaccacttctccc

SEQ ID NO: 7937 - DNA, 38 bp, Artificial Sequence
  primer
gtaaaacgacggccagtatcttatcgcctgtgaggcag

SEQ ID NO: 7938 - DNA, 21 bp, Artificial Sequence
  primer
aactgcagatcactcctggtg

SEQ ID NO: 7939 - DNA, 38 bp, Artificial Sequence
  primer
gtaaaacgacggccagtcgctagtctcgttcctttgtg

SEQ ID NO: 7940 - DNA, 19 bp, Artificial Sequence
  primer
gcatggcattgggaaagag

SEQ ID NO: 7941 - DNA, 22 bp, Artificial Sequence
  primer
tgtgttctgcttcagatcttgc

SEQ ID NO: 7942 - DNA, 39 bp, Artificial Sequence
  primer
gtaaaacgacggccagtctagtcagttcagcaggagcag

SEQ ID NO: 7943 - DNA, 25 bp, Artificial Sequence
  primer
tgtgattgtttaaagtgttcagtgc

SEQ ID NO: 7944 - DNA, 38 bp, Artificial Sequence
  primer
gtaaaacgacggccagtcttcctccctcattggttctg

SEQ ID NO: 7945 - DNA, 20 bp, Artificial Sequence
  primer
ctcagtgggatggaaagcag

SEQ ID NO: 7946 - DNA, 22 bp, Artificial Sequence
  primer
ttactgagtctgttgagtgcgg

SEQ ID NO: 7947 - DNA, 38 bp, Artificial Sequence
  primer
gtaaaacgacggccagtggtgttcattgcccaaataag

SEQ ID NO: 7948 - DNA, 22 bp, Artificial Sequence
  primer
ggtaaggacctagctttggagg

SEQ ID NO: 7949 - DNA, 38 bp, Artificial Sequence
  primer
gtaaaacgacggccagtctgggctcttgaagattggac

SEQ ID NO: 7950 - DNA, 38 bp, Artificial Sequence
  primer
gtaaaacgacggccagtactgtagcacatcctcagggc

SEQ ID NO: 7951 - DNA, 37 bp, Artificial Sequence
  primer
gtaaaacgacggccagtcgtgttatgcggaacggtag

SEQ ID NO: 7952 - DNA, 21 bp, Artificial Sequence
  primer
ccatgagtcgagcaaagtgtc

SEQ ID NO: 7953 - DNA, 38 bp, Artificial Sequence
  primer
gtaaaacgacggccagtctcgcttcctacctccaacag

SEQ ID NO: 7954 - DNA, 38 bp, Artificial Sequence
  primer
gtaaaacgacggccagtaagaaagcgtcccatcgtatc

SEQ ID NO: 7955 - DNA, 36 bp, Artificial Sequence
  primer
gtaaaacgacggccagttcagctccctctctgcctc

SEQ ID NO: 7956 - DNA, 38 bp, Artificial Sequence
  primer
gtaaaacgacggccagtggcttggtcagaggtcagttc

SEQ ID NO: 7957 - DNA, 21 bp, Artificial Sequence
  primer
cgagaagagaaagaccgttcg

SEQ ID NO: 7958 - DNA, 18 bp, Artificial Sequence
  primer
aggacagctgggactcgc

SEQ ID NO: 7959 - DNA, 21 bp, Artificial Sequence
  primer
ctacagagagcccttcttccg

SEQ ID NO: 7960 - DNA, 27 bp, Artificial Sequence
  primer
agatacaaagagaaatccagtgacaag

SEQ ID NO: 7961 - DNA, 38 bp, Artificial Sequence
  primer
gtaaaacgacggccagtctcgaccaagggaaagagaag

SEQ ID NO: 7962 - DNA, 38 bp, Artificial Sequence
  primer
gtaaaacgacggccagtagctggtacatcgcagacatc

SEQ ID NO: 7963 - DNA, 38 bp, Artificial Sequence
  primer
gtaaaacgacggccagtaaggacagagcctcagtggac

SEQ ID NO: 7964 - DNA, 38 bp, Artificial Sequence
  primer
gtaaaacgacggccagtctggaggtctctttcacggag

SEQ ID NO: 7965 - DNA, 23 bp, Artificial Sequence
  primer
gagagaaacacagggagaaatgg

SEQ ID NO: 7966 - DNA, 38 bp, Artificial Sequence
  primer
gtaaaacgacggccagtcgtgctcaaagacaagtccag

SEQ ID NO: 7967 - DNA, 38 bp, Artificial Sequence
  primer
gtaaaacgacggccagtaacgggaatgataaggtagcg

SEQ ID NO: 7968 - DNA, 21 bp, Artificial Sequence
  primer
gtcgactcctattccacctgc

SEQ ID NO: 7969 - DNA, 38 bp, Artificial Sequence
  primer
gtaaaacgacggccagtctctccacaaacctttaccgc

SEQ ID NO: 7970 - DNA, 20 bp, Artificial Sequence
  primer
cagctacgactctcccatgc

SEQ ID NO: 7971 - DNA, 36 bp, Artificial Sequence
  primer
gtaaaacgacggccagtcagactatggcctcccgtc

SEQ ID NO: 7972 - DNA, 18 bp, Artificial Sequence
  primer
acacctccgaggaccagc

SEQ ID NO: 7973 - DNA, 21 bp, Artificial Sequence
  primer
acctcctgctgaagtctccac

SEQ ID NO: 7974 - DNA, 20 bp, Artificial Sequence
  primer
aatagcttcctggacggcag

SEQ ID NO: 7975 - DNA, 21 bp, Artificial Sequence
  primer
aacccgtggaagaaagtcttg

SEQ ID NO: 7976 - DNA, 38 bp, Artificial Sequence
  primer
gtaaaacgacggccagtgtttccaccgtagtggctgag

SEQ ID NO: 7977 - DNA, 35 bp, Artificial Sequence
  primer
gtaaaacgacggccagtgatccggactccagcgtg

SEQ ID NO: 7978 - DNA, 18 bp, Artificial Sequence
  primer
tgtggcacaagctcaggc

SEQ ID NO: 7979 - DNA, 35 bp, Artificial Sequence
  primer
gtaaaacgacggccagtgcgaaccagagcaagcag

SEQ ID NO: 7980 - DNA, 19 bp, Artificial Sequence
  primer
agcagcagctgaacacgtc

SEQ ID NO: 7981 - DNA, 38 bp, Artificial Sequence
  primer
gtaaaacgacggccagtagcttcctggtgtgtctgttg

SEQ ID NO: 7982 - DNA, 21 bp, Artificial Sequence
  primer
ctgcgtctacagcacagcatc

SEQ ID NO: 7983 - DNA, 37 bp, Artificial Sequence
  primer
gtaaaacgacggccagtagaacggtcactgcagcatc

SEQ ID NO: 7984 - DNA, 21 bp, Artificial Sequence
  primer
cccataccagggtaggttcac

SEQ ID NO: 7985 - DNA, 22 bp, Artificial Sequence
  primer
aaattggactaattgtggtgcg

SEQ ID NO: 7986 - DNA, 38 bp, Artificial Sequence
  primer
gtaaaacgacggccagtacttgttgaagctgggtcttg

SEQ ID NO: 7987 - DNA, 20 bp, Artificial Sequence
  primer
gcatggttgaatttcccaac

SEQ ID NO: 7988 - DNA, 22 bp, Artificial Sequence
  primer
tttcaaagcagtcaggaagaaa

SEQ ID NO: 7989 - DNA, 38 bp, Artificial Sequence
  primer
gtaaaacgacggccagtgcattccttgtgtttcaggag

SEQ ID NO: 7990 - DNA, 23 bp, Artificial Sequence
  primer
ccttgttcaagggtcaactgtaa

SEQ ID NO: 7991 - DNA, 37 bp, Artificial Sequence
  primer
gtaaaacgacggccagtatggtgaggaatggatgcag

SEQ ID NO: 7992 - DNA, 21 bp, Artificial Sequence
  primer
ttttctggcagttgtgttttg

SEQ ID NO: 7993 - DNA, 38 bp, Artificial Sequence
  primer
gtaaaacgacggccagtattccgaagaggctcaatctg

SEQ ID NO: 7994 - DNA, 38 bp, Artificial Sequence
  primer
gtaaaacgacggccagtatgttccgtcatccctgaaac

SEQ ID NO: 7995 - DNA, 37 bp, Artificial Sequence
  primer
gtaaaacgacggccagttgttccgtcatccctgaaac

SEQ ID NO: 7996 - DNA, 38 bp, Artificial Sequence
  primer
gtaaaacgacggccagtttacagcctgatcttgttcgg

SEQ ID NO: 7997 - DNA, 38 bp, Artificial Sequence
  primer
gtaaaacgacggccagtagtgccaaagaactgcagagg

SEQ ID NO: 7998 - DNA, 43 bp, Artificial Sequence
  primer
gtaaaacgacggccagtaaacatacccacagataaagactcag

SEQ ID NO: 7999 - DNA, 38 bp, Artificial Sequence
  primer
gtaaaacgacggccagtggcatctagcagaaagcaaag

SEQ ID NO: 8000 - DNA, 23 bp, Artificial Sequence
  primer
tctgaagcagataagcctaaacc

SEQ ID NO: 8001 - DNA, 22 bp, Artificial Sequence
  primer
cgaatgctaagccttaaagacc

SEQ ID NO: 8002 - DNA, 42 bp, Artificial Sequence
  primer
gtaaaacgacggccagtgaagtgactgatgcatataccaagg

SEQ ID NO: 8003 - DNA, 40 bp, Artificial Sequence
  primer
gtaaaacgacggccagtcctgccatactacagtgacaacc

SEQ ID NO: 8004 - DNA, 21 bp, Artificial Sequence
  primer
gcatgccttctgtcatttgtg

SEQ ID NO: 8005 - DNA, 38 bp, Artificial Sequence
  primer
gtaaaacgacggccagttccagtgcatttagagccatc

SEQ ID NO: 8006 - DNA, 38 bp, Artificial Sequence
  primer
gtaaaacgacggccagtactgccaggaaactcttgtgc

SEQ ID NO: 8007 - DNA, 21 bp, Artificial Sequence
  primer
aaacagatgcctttgtcccag

SEQ ID NO: 8008 - DNA, 23 bp, Artificial Sequence
  primer
tttgctttccatagaagatgagg

SEQ ID NO: 8009 - DNA, 20 bp, Artificial Sequence
  primer
tggaaaaccattcacagcag

SEQ ID NO: 8010 - DNA, 24 bp, Artificial Sequence
  primer
caaatcaaagcaaacagattcttg

SEQ ID NO: 8011 - DNA, 38 bp, Artificial Sequence
  primer
gtaaaacgacggccagtcgatcctcaaattcaccatcc

SEQ ID NO: 8012 - DNA, 22 bp, Artificial Sequence
  primer
aaactgtgctcaatgtttccaa

SEQ ID NO: 8013 - DNA, 20 bp, Artificial Sequence
  primer
gaggtcaaggctgcagtgag

SEQ ID NO: 8014 - DNA, 43 bp, Artificial Sequence
  primer
gtaaaacgacggccagttcgttactaagaaagcagcatatacc

SEQ ID NO: 8015 - DNA, 45 bp, Artificial Sequence
  primer
gtaaaacgacggccagttttagttcctaaagaaactggatgagat

SEQ ID NO: 8016 - DNA, 36 bp, Artificial Sequence
  primer
gtaaaacgacggccagtcgtaacacgccctacgctc

SEQ ID NO: 8017 - DNA, 38 bp, Artificial Sequence
  primer
gtaaaacgacggccagttaactgtgcccaaatgcaaac

SEQ ID NO: 8018 - DNA, 38 bp, Artificial Sequence
  primer
gtaaaacgacggccagtatcctggtaaggttggactgc

SEQ ID NO: 8019 - DNA, 19 bp, Artificial Sequence
  primer
aagtgatcacccgcctcag

SEQ ID NO: 8020 - DNA, 21 bp, Artificial Sequence
  primer
agccaagaagtccgttgtttg

SEQ ID NO: 8021 - DNA, 38 bp, Artificial Sequence
  primer
gtaaaacgacggccagtatagcacctgggaggacacac

SEQ ID NO: 8022 - DNA, 21 bp, Artificial Sequence
  primer
agggtgcataagccatctgtc

SEQ ID NO: 8023 - DNA, 38 bp, Artificial Sequence
  primer
gtaaaacgacggccagtatgggaggtaactgctgatgc

SEQ ID NO: 8024 - DNA, 23 bp, Artificial Sequence
  primer
ccagactcttcccattattctgc

SEQ ID NO: 8025 - DNA, 38 bp, Artificial Sequence
  primer
gtaaaacgacggccagttggttaacacgtccacctcag

SEQ ID NO: 8026 - DNA, 21 bp, Artificial Sequence
  primer
tgggcagagtgtggagtaaag

SEQ ID NO: 8027 - DNA, 37 bp, Artificial Sequence
  primer
gtaaaacgacggccagtgggaagggttgttatgaggc

SEQ ID NO: 8028 - DNA, 24 bp, Artificial Sequence
  primer
tttatgactgtgttcgttgtttcc

SEQ ID NO: 8029 - DNA, 21 bp, Artificial Sequence
  primer
ttgaggtaacccaagtccctg

SEQ ID NO: 8030 - DNA, 37 bp, Artificial Sequence
  primer
gtaaaacgacggccagtgcccttggtaagcggttaag

SEQ ID NO: 8031 - DNA, 21 bp, Artificial Sequence
  primer
gggaaacctggagtctgtgag

SEQ ID NO: 8032 - DNA, 21 bp, Artificial Sequence
  primer
aggtggaagaatcacctgagc

SEQ ID NO: 8033 - DNA, 38 bp, Artificial Sequence
  primer
gtaaaacgacggccagtatgaagtgggagttcaccagc

SEQ ID NO: 8034 - DNA, 38 bp, Artificial Sequence
  primer
gtaaaacgacggccagtggtacatgatcgccctctctg

SEQ ID NO: 8035 - DNA, 38 bp, Artificial Sequence
  primer
gtaaaacgacggccagtgggtcctccatgtttcatagc

SEQ ID NO: 8036 - DNA, 37 bp, Artificial Sequence
  primer
gtaaaacgacggccagtgtctctgggacaggaggacc

SEQ ID NO: 8037 - DNA, 38 bp, Artificial Sequence
  primer
gtaaaacgacggccagtgagcaaaggtaaacccaggtg

SEQ ID NO: 8038 - DNA, 21 bp, Artificial Sequence
  primer
gggaagactccattccagtcc

SEQ ID NO: 8039 - DNA, 37 bp, Artificial Sequence
  primer
gtaaaacgacggccagtagaaggtgggtaaaggcagc

SEQ ID NO: 8040 - DNA, 20 bp, Artificial Sequence
  primer
catcagcaacgctcactttg

SEQ ID NO: 8041 - DNA, 38 bp, Artificial Sequence
  primer
gtaaaacgacggccagtaacctgtgtggctgtgatgag

SEQ ID NO: 8042 - DNA, 36 bp, Artificial Sequence
  primer
gtaaaacgacggccagtagttcgccatccagcagag

SEQ ID NO: 8043 - DNA, 38 bp, Artificial Sequence
  primer
gtaaaacgacggccagtcctgtctttgcctttgtcctc

SEQ ID NO: 8044 - DNA, 20 bp, Artificial Sequence
  primer
ctcaccacaactcccaaagc

SEQ ID NO: 8045 - DNA, 39 bp, Artificial Sequence
  primer
gtaaaacgacggccagtgcaccagcttcagaatggatac

SEQ ID NO: 8046 - DNA, 21 bp, Artificial Sequence
  primer
atgtctgtggtgtgaggaagc

SEQ ID NO: 8047 - DNA, 21 bp, Artificial Sequence
  primer
gagctcagggagaatggagag

SEQ ID NO: 8048 - DNA, 21 bp, Artificial Sequence
  primer
agctgcaacagcagaccatag

SEQ ID NO: 8049 - DNA, 38 bp, Artificial Sequence
  primer
gtaaaacgacggccagtgtgagtgtggaagtcagcgtc

SEQ ID NO: 8050 - DNA, 21 bp, Artificial Sequence
  primer
cgtgtcaaggacatcaactcc

SEQ ID NO: 8051 - DNA, 21 bp, Artificial Sequence
  primer
tccacttggaatgatgactgg

SEQ ID NO: 8052 - DNA, 22 bp, Artificial Sequence
  primer
tttggtggctgggataatagtc

SEQ ID NO: 8053 - DNA, 21 bp, Artificial Sequence
  primer
ctttgcatgcacacactttcc

SEQ ID NO: 8054 - DNA, 40 bp, Artificial Sequence
  primer
gtaaaacgacggccagtggagtcaattagcaaatcccttc

SEQ ID NO: 8055 - DNA, 20 bp, Artificial Sequence
  primer
ggattgcttgaatccaggag

SEQ ID NO: 8056 - DNA, 21 bp, Artificial Sequence
  primer
agcttctcttagggctgttgg

SEQ ID NO: 8057 - DNA, 21 bp, Artificial Sequence
  primer
acctggtaccatttcactggg

SEQ ID NO: 8058 - DNA, 38 bp, Artificial Sequence
  primer
gtaaaacgacggccagtttctgtcaccacactcttccc

SEQ ID NO: 8059 - DNA, 38 bp, Artificial Sequence
  primer
gtaaaacgacggccagtcagaagaccgaacgagtaggg

SEQ ID NO: 8060 - DNA, 21 bp, Artificial Sequence
  primer
gtggacacctgttccctgttc

SEQ ID NO: 8061 - DNA, 36 bp, Artificial Sequence
  primer
gtaaaacgacggccagtgaaagtcccactcgccctc

SEQ ID NO: 8062 - DNA, 37 bp, Artificial Sequence
  primer
gtaaaacgacggccagtctgtgccaaggatgtgtgtg

SEQ ID NO: 8063 - DNA, 37 bp, Artificial Sequence
  primer
gtaaaacgacggccagtcagagagcaaagccaggagg

SEQ ID NO: 8064 - DNA, 21 bp, Artificial Sequence
  primer
aaggcttagtgctcagttcgg

SEQ ID NO: 8065 - DNA, 22 bp, Artificial Sequence
  primer
gcagatgcccagatctaagttg

SEQ ID NO: 8066 - DNA, 41 bp, Artificial Sequence
  primer
gtaaaacgacggccagtcagacctgtctctcaggtatgtcc

SEQ ID NO: 8067 - DNA, 39 bp, Artificial Sequence
  primer
gtaaaacgacggccagtttgtgaagatggattacggaag

SEQ ID NO: 8068 - DNA, 22 bp, Artificial Sequence
  primer
gcagatgcccagatctaagttg

SEQ ID NO: 8069 - DNA, 41 bp, Artificial Sequence; identical to SEQ ID NO: 8066
  primer

SEQ ID NO: 8070 - DNA, 39 bp, Artificial Sequence; identical to SEQ ID NO: 8067
  primer

SEQ ID NO: 8071 - DNA, 21 bp, Artificial Sequence
  primer
gaagtcgcggtagaagcgtag

SEQ ID NO: 8072 - DNA, 23 bp, Artificial Sequence
  primer
tttagggttgcactgtgtttacc

SEQ ID NO: 8073 - DNA, 21 bp, Artificial Sequence
  primer
ccagagggtcacaggatcaag

SEQ ID NO: 8074 - DNA, 38 bp, Artificial Sequence
  primer
gtaaaacgacggccagtgctgattgcatcactgtaccc

SEQ ID NO: 8075 - DNA, 25 bp, Artificial Sequence
  primer
tccttccaaccattaggattatttc

SEQ ID NO: 8076 - DNA, 41 bp, Artificial Sequence
  primer
gtaaaacgacggccagttggttgtagtcttctgtttccatt

SEQ ID NO: 8077 - DNA, 39 bp, Artificial Sequence
  primer
gtaaaacgacggccagtttgagggtggcttctagttgac

SEQ ID NO: 8078 - DNA, 27 bp, Artificial Sequence
  primer
ttgagtggagatagataaacttcattg

SEQ ID NO: 8079 - DNA, 40 bp, Artificial Sequence
  primer
gtaaaacgacggccagtgccttaggagttaggagagaggc

SEQ ID NO: 8080 - DNA, 42 bp, Artificial Sequence
  primer
gtaaaacgacggccagttgcctacaatattctctgtttctgg

SEQ ID NO: 8081 - DNA, 20 bp, Artificial Sequence
  primer
tttccagtgctcactttggc

SEQ ID NO: 8082 - DNA, 38 bp, Artificial Sequence
  primer
gtaaaacgacggccagtagctcggtaatgggtatgtgg

SEQ ID NO: 8083 - DNA, 38 bp, Artificial Sequence
  primer
gtaaaacgacggccagtctgggacctgttggctttatc

SEQ ID NO: 8084 - DNA, 38 bp, Artificial Sequence
  primer
gtaaaacgacggccagttcgtggtaaacaatttggtgc

SEQ ID NO: 8085 - DNA, 38 bp, Artificial Sequence
  primer
gtaaaacgacggccagtactgttggcactaaacctccc

SEQ ID NO: 8086 - DNA, 20 bp, Artificial Sequence
  primer
acagctgcagtccttggaac

SEQ ID NO: 8087 - DNA, 21 bp, Artificial Sequence
  primer
agcagcaacagtcttgccaac

SEQ ID NO: 8088 - DNA, 42 bp, Artificial Sequence
  primer
gtaaaacgacggccagttgtcatcagtgaataataaccagga

SEQ ID NO: 8089 - DNA, 36 bp, Artificial Sequence
  primer
gtaaaacgacggccagtgcccgtccataaaccttgc

SEQ ID NO: 8090 - DNA, 21 bp, Artificial Sequence
  primer
accgagacaagaaaggtaggg

SEQ ID NO: 8091 - DNA, 21 bp, Artificial Sequence
  primer
gcatgaaggaagaactttccc

SEQ ID NO: 8092 - DNA, 24 bp, Artificial Sequence
  primer
aaacatttctaatggagtcttggt

SEQ ID NO: 8093 - DNA, 44 bp, Artificial Sequence
  primer
gtaaaacgacggccagtttggtaacagctgtatcatattccttc

SEQ ID NO: 8094 - DNA, 20 bp, Artificial Sequence
  primer
ccatgatctcaccactgcac

SEQ ID NO: 8095 - DNA, 38 bp, Artificial Sequence
  primer
gtaaaacgacggccagtactcactggaaccaaagcctg

SEQ ID NO: 8096 - DNA, 42 bp, Artificial Sequence
  primer
gtaaaacgacggccagtctttcatggatctttattgcttagg

SEQ ID NO: 8097 - DNA, 27 bp, Artificial Sequence
  primer
aacaatgaattgaactagatgactttg

SEQ ID NO: 8098 - DNA, 21 bp, Artificial Sequence
  primer
ccttctctaaggagcaggtgg

SEQ ID NO: 8099 - DNA, 20 bp, Artificial Sequence
  primer
gaacctccaagtgccacaac

SEQ ID NO: 8100 - DNA, 20 bp, Artificial Sequence
  primer
agcagcagtaccagcgagag

SEQ ID NO: 8101 - DNA, 21 bp, Artificial Sequence
  primer
tgggtaacagagcaagacctg

SEQ ID NO: 8102 - DNA, 21 bp, Artificial Sequence
  primer
tctgtctgttgctcctgattg

SEQ ID NO: 8103 - DNA, 21 bp, Artificial Sequence
  primer
gggtggcactgaatcaacaag

SEQ ID NO: 8104 - DNA, 38 bp, Artificial Sequence
  primer
gtaaaacgacggccagtaaactgccacagcactcactg

SEQ ID NO: 8105 - DNA, 21 bp, Artificial Sequence
  primer
tcaggtgaattcagcaggttc

SEQ ID NO: 8106 - DNA, 21 bp, Artificial Sequence
  primer
tggattgtggatcagcatctc

SEQ ID NO: 8107 - DNA, 21 bp, Artificial Sequence
  primer
cccagtgacttaccctatgcc

SEQ ID NO: 8108 - DNA, 21 bp, Artificial Sequence
  primer
gcaaataagcctattgctccc

SEQ ID NO: 8109 - DNA, 21 bp, Artificial Sequence
  primer
cataagcagtcctcccacctt

SEQ ID NO: 8110 - DNA, 39 bp, Artificial Sequence
  primer
gtaaaacgacggccagttgaagtcatggaactttagcca

SEQ ID NO: 8111 - DNA, 24 bp, Artificial Sequence
  primer
ttacaaaccatggaaatattgctg

SEQ ID NO: 8112 - DNA, 21 bp, Artificial Sequence
  primer
cattcccaggatgaggtgaac

SEQ ID NO: 8113 - DNA, 42 bp, Artificial Sequence
  primer
gtaaaacgacggccagttgcaaattgaagagtacctccttag

SEQ ID NO: 8114 - DNA, 21 bp, Artificial Sequence
  primer
gtttggtggtggatcttggat

SEQ ID NO: 8115 - DNA, 21 bp, Artificial Sequence
  primer
caccaagctcattctgtccaa

SEQ ID NO: 8116 - DNA, 44 bp, Artificial Sequence
  primer
gtaaaacgacggccagtaatataactagttggtgaaacctgtgg

SEQ ID NO: 8117 - DNA, 38 bp, Artificial Sequence
  primer
gtaaaacgacggccagtagtgtgtgggaaagcacagag

SEQ ID NO: 8118 - DNA, 38 bp, Artificial Sequence
  primer
gtaaaacgacggccagtcctgacaggcaagatacgaaa

SEQ ID NO: 8119 - DNA, 41 bp, Artificial Sequence
  primer
gtaaaacgacggccagtttctcggtttatgagtactccctg

SEQ ID NO: 8120 - DNA, 38 bp, Artificial Sequence
  primer
gtaaaacgacggccagttctaataggccaggagttggg

SEQ ID NO: 8121 - DNA, 38 bp, Artificial Sequence
  primer
gtaaaacgacggccagtacccaggaggatgtctctgtg

SEQ ID NO: 8122 - DNA, 21 bp, Artificial Sequence
  primer
cttaagagggtcttcctgccc

SEQ ID NO: 8123 - DNA, 38 bp, Artificial Sequence
  primer
gtaaaacgacggccagtaggagatcgtaagggtcctgg

SEQ ID NO: 8124 - DNA, 21 bp, Artificial Sequence
  primer
accacctgtagagaggcatgg

SEQ ID NO: 8125 - DNA, 38 bp, Artificial Sequence
  primer
gtaaaacgacggccagtgagtctggcttggaccagatg

SEQ ID NO: 8126 - DNA, 38 bp, Artificial Sequence
  primer
gtaaaacgacggccagtttggaagagggattaagctgg

SEQ ID NO: 8127 - DNA, 38 bp, Artificial Sequence
  primer
gtaaaacgacggccagttacaggtggtgtccttcctcc

SEQ ID NO: 8128 - DNA, 38 bp, Artificial Sequence
  primer
gtaaaacgacggccagtctgtgaaagccttcaggacag

SEQ ID NO: 8129 - DNA, 36 bp, Artificial Sequence
  primer
gtaaaacgacggccagttggctgggattgacctttc

SEQ ID NO: 8130 - DNA, 21 bp, Artificial Sequence
  primer
acttctggagaccacgacgac

SEQ ID NO: 8131 - DNA, 38 bp, Artificial Sequence
  primer
gtaaaacgacggccagtattccagcccaagttgaatgt

SEQ ID NO: 8132 - DNA, 21 bp, Artificial Sequence
  primer
gcgtgagatgggtttgatttc

SEQ ID NO: 8133 - DNA, 41 bp, Artificial Sequence
  primer
gtaaaacgacggccagtccataagcttccagttcagttgag

SEQ ID NO: 8134 - DNA, 38 bp, Artificial Sequence
  primer
gtaaaacgacggccagtgtttgattctgcatggacagg

SEQ ID NO: 8135 - DNA, 21 bp, Artificial Sequence
  primer
aatgcatgctgatttactggg

SEQ ID NO: 8136 - DNA, 21 bp, Artificial Sequence
  primer
gaatcacatcaggtgtctccc

SEQ ID NO: 8137 - DNA, 38 bp, Artificial Sequence
  primer
gtaaaacgacggccagttctccctttgtctgaggtgaa

SEQ ID NO: 8138 - DNA, 23 bp, Artificial Sequence
  primer
cagcaatcaagcaaactttacaa

SEQ ID NO: 8139 - DNA, 37 bp, Artificial Sequence
  primer
gtaaaacgacggccagtatctgatggtgccatcttgc

SEQ ID NO: 8140 - DNA, 42 bp, Artificial Sequence
  primer
gtaaaacgacggccagttttccagttaaatatccactatggg

SEQ ID NO: 8141 - DNA, 38 bp, Artificial Sequence
  primer
gtaaaacgacggccagtagggactttcctctcagccag

SEQ ID NO: 8142 - DNA, 25 bp, Artificial Sequence
  primer
cttaaagctaggcataactgagacc

SEQ ID NO: 8143 - DNA, 21 bp, Artificial Sequence
  primer
ggaaagccgcattcagtaatc

SEQ ID NO: 8144 - DNA, 38 bp, Artificial Sequence
  primer
gtaaaacgacggccagtaccacagtctgagaacctggc

SEQ ID NO: 8145 - DNA, 37 bp, Artificial Sequence
  primer
gtaaaacgacggccagtaaggatttgccaatgaagcc

SEQ ID NO: 8146 - DNA, 21 bp, Artificial Sequence
  primer
cccttgccaacacagagagtc

SEQ ID NO: 8147 - DNA, 21 bp, Artificial Sequence
  primer
tggtgtgacagagtcccagag

SEQ ID NO: 8148 - DNA, 38 bp, Artificial Sequence
  primer
gtaaaacgacggccagtgacagctccctgctactccac

SEQ ID NO: 8149 - DNA, 36 bp, Artificial Sequence
  primer
gtaaaacgacggccagtagcctgagcagctggtgtc

SEQ ID NO: 8150 - DNA, 38 bp, Artificial Sequence
  primer
gtaaaacgacggccagttgcattagtacgagccagcag

SEQ ID NO: 8151 - DNA, 39 bp, Artificial Sequence
  primer
gtaaaacgacggccagtctgccttcagtgtgttcaagtc

SEQ ID NO: 8152 - DNA, 20 bp, Artificial Sequence
  primer
agctggtgaacaagctgctg

SEQ ID NO: 8153 - DNA, 22 bp, Artificial Sequence
  primer
tggagaagagagcacgtagtcc

SEQ ID NO: 8154 - DNA, 38 bp, Artificial Sequence
  primer
gtaaaacgacggccagtcacctgaacgcacaggataag

SEQ ID NO: 8155 - DNA, 37 bp, Artificial Sequence
  primer
gtaaaacgacggccagtagccatgaagctactgctgc

SEQ ID NO: 8156 - DNA, 38 bp, Artificial Sequence
  primer
gtaaaacgacggccagttacagactcctaactcccggc

SEQ ID NO: 8157 - DNA, 38 bp, Artificial Sequence
  primer
gtaaaacgacggccagtgggatttgagaggcgacatag

SEQ ID NO: 8158 - DNA, 21 bp, Artificial Sequence
  primer
ctggacctggacttcctcaag

SEQ ID NO: 8159 - DNA, 38 bp, Artificial Sequence
  primer
gtaaaacgacggccagtcgccactcagcctattcctac

SEQ ID NO: 8160 - DNA, 20 bp, Artificial Sequence
  primer
aggtgaagctgatccctgtg

SEQ ID NO: 8161 - DNA, 18 bp, Artificial Sequence
  primer
gtagaagggccacgggag

SEQ ID NO: 8162 - DNA, 38 bp, Artificial Sequence
  primer
gtaaaacgacggccagtaatcagccctgttacagctcc

SEQ ID NO: 8163 - DNA, 38 bp, Artificial Sequence
  primer
gtaaaacgacggccagtccgaggtagcctcccttacac

SEQ ID NO: 8164 - DNA, 38 bp, Artificial Sequence
  primer
gtaaaacgacggccagtccacagaggtcagatcaccag

SEQ ID NO: 8165 - DNA, 38 bp, Artificial Sequence
  primer
gtaaaacgacggccagtggtgaaggagggtctgagatg

SEQ ID NO: 8166 - DNA, 38 bp, Artificial Sequence
  primer
gtaaaacgacggccagtactccaagggtcttattggga

SEQ ID NO: 8167 - DNA, 38 bp, Artificial Sequence
  primer
gtaaaacgacggccagttgatggacgagacgtggtatc

SEQ ID NO: 8168 - DNA, 38 bp, Artificial Sequence
  primer
gtaaaacgacggccagtacagcaggttctagaccaggg

SEQ ID NO: 8169 - DNA, 37 bp, Artificial Sequence
  primer
gtaaaacgacggccagtagatcgcgtgagtctccaac

SEQ ID NO: 8170 - DNA, 21 bp, Artificial Sequence
  primer
catatctaccaggccagccac

SEQ ID NO: 8171 - DNA, 20 bp, Artificial Sequence
  primer
acttgttatgttgggctccg

SEQ ID NO: 8172 - DNA, 38 bp, Artificial Sequence
  primer
gtaaaacgacggccagttacaatttgggatttggttgg

SEQ ID NO: 8173 - DNA, 38 bp, Artificial Sequence
  primer
gtaaaacgacggccagtattggtgaaacctgtggagtg

SEQ ID NO: 8174 - DNA, 38 bp, Artificial Sequence
  primer
gtaaaacgacggccagttgtttccaagggaagcaagtg

SEQ ID NO: 8175 - DNA, 43 bp, Artificial Sequence
  primer
gtaaaacgacggccagtctctgataatggctgaaatactcaag

SEQ ID NO: 8176 - DNA, 38 bp, Artificial Sequence
  primer
gtaaaacgacggccagtctccagatatggtcccagagg

SEQ ID NO: 8177 - DNA, 38 bp, Artificial Sequence
  primer
gtaaaacgacggccagtgacagttgacctttcaccagg

SEQ ID NO: 8178 - DNA, 22 bp, Artificial Sequence
  primer
tgtagcaaagggcagaactgag

SEQ ID NO: 8179 - DNA, 40 bp, Artificial Sequence
  primer
gtaaaacgacggccagtaaagctaatgactgcttctcagc

SEQ ID NO: 8180 - DNA, 26 bp, Artificial Sequence
  primer
ggtagtgcaagtacggactaatacag

SEQ ID NO: 8181 - DNA, 21 bp, Artificial Sequence
  primer
tttcctgagactgcatcaacc

SEQ ID NO: 8182 - DNA, 40 bp, Artificial Sequence
  primer
gtaaaacgacggccagtggtttgcagagtcaatagccatc

SEQ ID NO: 8183 - DNA, 26 bp, Artificial Sequence
  primer
tttaatttgaatatagaagcattggc

SEQ ID NO: 8184 - DNA, 21 bp, Artificial Sequence
  primer
tcaaaccaagcgtgatgattc

SEQ ID NO: 8185 - DNA, 38 bp, Artificial Sequence
  primer
gtaaaacgacggccagtaaaccaagcgtgatgattctg

SEQ ID NO: 8186 - DNA, 38 bp, Artificial Sequence
  primer
gtaaaacgacggccagtagctagggcgacagagtaagg

SEQ ID NO: 8187 - DNA, 29 bp, Artificial Sequence
  primer
accatagttaaactgagtcaaatgataaa

SEQ ID NO: 8188 - DNA, 25 bp, Artificial Sequence
  primer
tccttaactctctttctgcatgttg

SEQ ID NO: 8189 - DNA, 26 bp, Artificial Sequence
  primer
caggaagcttgatctaaatttgtttg

SEQ ID NO: 8190 - DNA, 21 bp, Artificial Sequence
  primer
gatagagcgagacccgatgtc

SEQ ID NO: 8191 - DNA, 22 bp, Artificial Sequence
  primer
ggccctcaatatgtaattggtc

SEQ ID NO: 8192 - DNA, 38 bp, Artificial Sequence
  primer
gtaaaacgacggccagtaaagcggcatatcacacaatg

SEQ ID NO: 8193 - DNA, 44 bp, Artificial Sequence
  primer
gtaaaacgacggccagttcttgagtaataaaggttcttgcattt

SEQ ID NO: 8194 - DNA, 22 bp, Artificial Sequence
  primer
ggcctttccaattctgtgattc

SEQ ID NO: 8195 - DNA, 38 bp, Artificial Sequence
  primer
gtaaaacgacggccagtgcatgttgcaggaagaaattg

SEQ ID NO: 8196 - DNA, 21 bp, Artificial Sequence
  primer
tggacggcttagtgttctgac

SEQ ID NO: 8197 - DNA, 42 bp, Artificial Sequence
  primer
gtaaaacgacggccagtcaagaaggtgaatcaatgtatgtgg

SEQ ID NO: 8198 - DNA, 40 bp, Artificial Sequence
  primer
gtaaaacgacggccagttcagctctacagtcacagcacaa

SEQ ID NO: 8199 - DNA, 39 bp, Artificial Sequence
  primer
gtaaaacgacggccagtaattatgccttcaggtgtttgc

SEQ ID NO: 8200 - DNA, 22 bp, Artificial Sequence
  primer
tttcaaatccgttcttattgcc

SEQ ID NO: 8201 - DNA, 44 bp, Artificial Sequence
  primer
gtaaaacgacggccagttcaaactatgtcagattgaaataaacg

SEQ ID NO: 8202 - DNA, 39 bp, Artificial Sequence
  primer
gtaaaacgacggccagtaagggtccacatttgaagaatc

SEQ ID NO: 8203 - DNA, 21 bp, Artificial Sequence
  primer
aaacagcccttagacaccgag

SEQ ID NO: 8204 - DNA, 42 bp, Artificial Sequence
  primer
gtaaaacgacggccagttgggaaatttcatttactcctatgg

SEQ ID NO: 8205 - DNA, 44 bp, Artificial Sequence
  primer
gtaaaacgacggccagttctttaagagtattacaggccacattt

SEQ ID NO: 8206 - DNA, 38 bp, Artificial Sequence
  primer
gtaaaacgacggccagtgtgcaaccatgggcaaattat

SEQ ID NO: 8207 - DNA, 18 bp, Artificial Sequence
  primer
aaattcgcgggtgtggtg

SEQ ID NO: 8208 - DNA, 21 bp, Artificial Sequence
  primer
tgaggctgattccatcacaac

SEQ ID NO: 8209 - DNA, 38 bp, Artificial Sequence
  primer
gtaaaacgacggccagtgccgtagggtctggttaagtg

SEQ ID NO: 8210 - DNA, 38 bp, Artificial Sequence
  primer
gtaaaacgacggccagtgcctaggccctgtaggatagg

SEQ ID NO: 8211 - DNA, 21 bp, Artificial Sequence
  primer
gcaacaaagtgagaccctgtc

SEQ ID NO: 8212 - DNA, 38 bp, Artificial Sequence
  primer
gtaaaacgacggccagtagcttctgagggactctcacc

SEQ ID NO: 8213 - DNA, 38 bp, Artificial Sequence
  primer
gtaaaacgacggccagtcaaatccaagccctttcactg

SEQ ID NO: 8214 - DNA, 38 bp, Artificial Sequence
  primer
gtaaaacgacggccagtcatggaggcaagtgaggtagg

SEQ ID NO: 8215 - DNA, 38 bp, Artificial Sequence
  primer
gtaaaacgacggccagtatgggattgaaggctcttctg

SEQ ID NO: 8216 - DNA, 21 bp, Artificial Sequence
  primer
aggacgctgtaaaggagcttg

SEQ ID NO: 8217 - DNA, 21 bp, Artificial Sequence
  primer
gatggtggtcgtagcttcctg

SEQ ID NO: 8218 - DNA, 21 bp, Artificial Sequence
  primer
gcagccgatactgctctgaag

SEQ ID NO: 8219 - DNA, 21 bp, Artificial Sequence
  primer
tggtggcagatgcctctaatc

SEQ ID NO: 8220 - DNA, 39 bp, Artificial Sequence
  primer
gtaaaacgacggccagttggtacctgcctatctacctgg

SEQ ID NO: 8221 - DNA, 38 bp, Artificial Sequence
  primer
gtaaaacgacggccagtgagggtgcaatagtgttgtgg

SEQ ID NO: 8222 - DNA, 36 bp, Artificial Sequence
  primer
gtaaaacgacggccagtctgctaagactggaggccg

SEQ ID NO: 8223 - DNA, 21 bp, Artificial Sequence
  primer
catttgcttggtgaggaggtc

SEQ ID NO: 8224 - DNA, 38 bp, Artificial Sequence
  primer
gtaaaacgacggccagtctgacattccgaggagctagg

SEQ ID NO: 8225 - DNA, 21 bp, Artificial Sequence
  primer
gcaggtcaggttaccttggag

SEQ ID NO: 8226 - DNA, 38 bp, Artificial Sequence
  primer
gtaaaacgacggccagtaaagtccacaaatcaagccaa

SEQ ID NO: 8227 - DNA, 21 bp, Artificial Sequence
  primer
tgtgaagtggaaggactgagg

SEQ ID NO: 8228 - DNA, 37 bp, Artificial Sequence
  primer
gtaaaacgacggccagtcacatggtgccaatcactcc

SEQ ID NO: 8229 - DNA, 40 bp, Artificial Sequence
  primer
gtaaaacgacggccagtcaaacttgagcatttctctccag

SEQ ID NO: 8230 - DNA, 21 bp, Artificial Sequence
  primer
aggataaatgctgcagcgaac

SEQ ID NO: 8231 - DNA, 20 bp, Artificial Sequence
  primer
gctttatggcctccaagctc

SEQ ID NO: 8232 - DNA, 37 bp, Artificial Sequence
  primer
gtaaaacgacggccagtcaagtgatatgcccacctcg

SEQ ID NO: 8233 - DNA, 38 bp, Artificial Sequence
  primer
gtaaaacgacggccagtggttatggacaaatctgcacc

SEQ ID NO: 8234 - DNA, 38 bp, Artificial Sequence
  primer
gtaaaacgacggccagtctgtcactgtcatggttgtgg

SEQ ID NO: 8235 - DNA, 35 bp, Artificial Sequence
  primer
gtaaaacgacggccagtaaggaaggaagagggcgg

SEQ ID NO: 8236 - DNA, 26 bp, Artificial Sequence
  primer
ggaatcctgtactttgacatgatttg

SEQ ID NO: 8237 - DNA, 23 bp, Artificial Sequence
  primer
gggacttgcagactaggctagag

SEQ ID NO: 8238 - DNA, 24 bp, Artificial Sequence
  primer
ggatatgctctgtataaaggtggc

SEQ ID NO: 8239 - DNA, 22 bp, Artificial Sequence
  primer
tttctttccttgggtaaattcc

SEQ ID NO: 8240 - DNA, 38 bp, Artificial Sequence
  primer
gtaaaacgacggccagtgctccttctgttcagcaactg

SEQ ID NO: 8241 - DNA, 19 bp, Artificial Sequence
  primer
atgagccattatgcccacc

SEQ ID NO: 8242 - DNA, 22 bp, Artificial Sequence
  primer
tcttgtctccgtttctcacttt

SEQ ID NO: 8243 - DNA, 38 bp, Artificial Sequence
  primer
gtaaaacgacggccagtcatccttactgtcccactccc

SEQ ID NO: 8244 - DNA, 21 bp, Artificial Sequence
  primer
tggcccaataaatgagctatg

SEQ ID NO: 8245 - DNA, 38 bp, Artificial Sequence
  primer
gtaaaacgacggccagtgcccaccatcaaactttaacc

SEQ ID NO: 8246 - DNA, 36 bp, Artificial Sequence
  primer
gtaaaacgacggccagttttgtttgggattggaggg

SEQ ID NO: 8247 - DNA, 25 bp, Artificial Sequence
  primer
gctttcatgcttctttaaacctacc

SEQ ID NO: 8248 - DNA, 38 bp, Artificial Sequence
  primer
gtaaaacgacggccagtagctttatgtccagtcctccg

SEQ ID NO: 8249 - DNA, 24 bp, Artificial Sequence
  primer
gattctcatgaatgtttcatttgc

SEQ ID NO: 8250 - DNA, 19 bp, Artificial Sequence
  primer
aggaagcacgggtttaggg

SEQ ID NO: 8251 - DNA, 38 bp, Artificial Sequence
  primer
gtaaaacgacggccagtaaggtggatttgaactgggtg

SEQ ID NO: 8252 - DNA, 44 bp, Artificial Sequence
  primer
gtaaaacgacggccagttctcgatgtagaagtttggattatctc

SEQ ID NO: 8253 - DNA, 38 bp, Artificial Sequence
  primer
gtaaaacgacggccagtcagtcaaaggccgtagaaacc

SEQ ID NO: 8254 - DNA, 38 bp, Artificial Sequence
  primer
gtaaaacgacggccagtatcacagaagggcgtatttcg

SEQ ID NO: 8255 - DNA, 41 bp, Artificial Sequence
  primer
gtaaaacgacggccagttggaaggatatggagagtatggtc

SEQ ID NO: 8256 - DNA, 21 bp, Artificial Sequence
  primer
gagatgggatgagggagagac

SEQ ID NO: 8257 - DNA, 38 bp, Artificial Sequence
  primer
gtaaaacgacggccagtttgtgccgtgtaagtaaagcc

SEQ ID NO: 8258 - DNA, 23 bp, Artificial Sequence
  primer
gctccattgagcctatttgtttg

SEQ ID NO: 8259 - DNA, 23 bp, Artificial Sequence
  primer
ttgccattgttagagtgtgtgac

SEQ ID NO: 8260 - DNA, 38 bp, Artificial Sequence
  primer
gtaaaacgacggccagtcctaccctcactcccaagatg

SEQ ID NO: 8261 - DNA, 38 bp, Artificial Sequence
  primer
gtaaaacgacggccagttgacagccaggtgtgtatgtg

SEQ ID NO: 8262 - DNA, 38 bp, Artificial Sequence
  primer
gtaaaacgacggccagtagaaacttgcgaatcatgctg

SEQ ID NO: 8263 - DNA, 35 bp, Artificial Sequence
  primer
gtaaaacgacggccagtgtgtggcaggtcctggag

SEQ ID NO: 8264 - DNA, 38 bp, Artificial Sequence
  primer
gtaaaacgacggccagtgtggctcaggtgtctggaatc

SEQ ID NO: 8265 - DNA, 37 bp, Artificial Sequence
  primer
gtaaaacgacggccagtttgcccttggatgtgttctg

SEQ ID NO: 8266 - DNA, 20 bp, Artificial Sequence
  primer
ttgaggagccaccattcatc

SEQ ID NO: 8267 - DNA, 39 bp, Artificial Sequence
  primer
gtaaaacgacggccagtgtatgtgaggaacatctgctgg

SEQ ID NO: 8268 - DNA, 20 bp, Artificial Sequence
  primer
ttcacctacctaggcctccc

SEQ ID NO: 8269 - DNA, 38 bp, Artificial Sequence
  primer
gtaaaacgacggccagtttaaagacgttctgtgagcgg

SEQ ID NO: 8270 - DNA, 39 bp, Artificial Sequence
  primer
gtaaaacgacggccagtcagttcccaactgactgctttc

SEQ ID NO: 8271 - DNA, 22 bp, Artificial Sequence
  primer
gcaagataaggaaggttacggg

SEQ ID NO: 8272 - DNA, 38 bp, Artificial Sequence
  primer
gtaaaacgacggccagtagaaagagtgggtcaaatgcc

SEQ ID NO: 8273 - DNA, 38 bp, Artificial Sequence
  primer
gtaaaacgacggccagtgcaacgactcctacatcgtcc

SEQ ID NO: 8274 - DNA, 35 bp, Artificial Sequence
  primer
gtaaaacgacggccagtggcagagaaagagcgtgg

SEQ ID NO: 8275 - DNA, 19 bp, Artificial Sequence
  primer
ggcgaacacaggacacctc

SEQ ID NO: 8276 - DNA, 38 bp, Artificial Sequence
  primer
gtaaaacgacggccagtaagggagaaagaagggactgc

SEQ ID NO: 8277 - DNA, 42 bp, Artificial Sequence
  primer
gtaaaacgacggccagttggttaattctacaatgacaggcac

SEQ ID NO: 8278 - DNA, 44 bp, Artificial Sequence
  primer
gtaaaacgacggccagtttctgatattgtctgaaatgctctaag

SEQ ID NO: 8279 - DNA, 38 bp, Artificial Sequence
  primer
gtaaaacgacggccagttcgcttgaggtaggagaattg

SEQ ID NO: 8280 - DNA, 21 bp, Artificial Sequence
  primer
tgtgtgtttggcagaaggaac

SEQ ID NO: 8281 - DNA, 38 bp, Artificial Sequence
  primer
gtaaaacgacggccagttcaatgtttggagaaagcgac

SEQ ID NO: 8282 - DNA, 21 bp, Artificial Sequence
  primer
ttcacgggagaagaggatagg

SEQ ID NO: 8283 - DNA, 40 bp, Artificial Sequence
  primer
gtaaaacgacggccagttgcctttgaagtcagaaattgag

SEQ ID NO: 8284 - DNA, 40 bp, Artificial Sequence
  primer
gtaaaacgacggccagttcagtgtattcctgtcgtgtgtg

SEQ ID NO: 8285 - DNA, 37 bp, Artificial Sequence
  primer
gtaaaacgacggccagtcctcctaagaagccatctgc

SEQ ID NO: 8286 - DNA, 38 bp, Artificial Sequence
  primer
gtaaaacgacggccagtagaatatacgggccacagagg

SEQ ID NO: 8287 - DNA, 23 bp, Artificial Sequence
  primer
tcagcttgatgtagagagggttg

SEQ ID NO: 8288 - DNA, 22 bp, Artificial Sequence
  primer
tcaatgttgaaatcctcacagc

SEQ ID NO: 8289 - DNA, 37 bp, Artificial Sequence
  primer
gtaaaacgacggccagtgtaggctttgtcaggcttgc

SEQ ID NO: 8290 - DNA, 41 bp, Artificial Sequence
  primer
gtaaaacgacggccagtcagtgtattcttgtcgtgtgtgtg

SEQ ID NO: 8291 - DNA, 38 bp, Artificial Sequence
  primer
gtaaaacgacggccagtattcatttgtggttggcttgt

SEQ ID NO: 8292 - DNA, 39 bp, Artificial Sequence
  primer
gtaaaacgacggccagtaaagaacatatgggccacagag

SEQ ID NO: 8293 - DNA, 38 bp, Artificial Sequence
  primer
gtaaaacgacggccagttttgcaaaggaggaaattgtg

SEQ ID NO: 8294 - DNA, 21 bp, Artificial Sequence
  primer
ttctgtcacgttggcatgata

SEQ ID NO: 8295 - DNA, 38 bp, Artificial Sequence
  primer
gtaaaacgacggccagtagaggaggaaccacagattcg

SEQ ID NO: 8296 - DNA, 24 bp, Artificial Sequence
  primer
cgtgtctgctcttaagttgaattg

SEQ ID NO: 8297 - DNA, 20 bp, Artificial Sequence
  primer
ccacgtggtaggcaatcaat

SEQ ID NO: 8298 - DNA, 26 bp, Artificial Sequence
  primer
tggactaataacccaatataggaaga

SEQ ID NO: 8299 - DNA, 39 bp, Artificial Sequence
  primer
gtaaaacgacggccagttttcagaggaaccatgatatgc

SEQ ID NO: 8300 - DNA, 22 bp, Artificial Sequence
  primer
gaggcagaaattgaatcacacc

SEQ ID NO: 8301 - DNA, 22 bp, Artificial Sequence
  primer
cagtgtcaaatgaaggaagctg

SEQ ID NO: 8302 - DNA, 21 bp, Artificial Sequence
  primer
gttaaagcacggcttaatggg

SEQ ID NO: 8303 - DNA, 21 bp, Artificial Sequence
  primer
tgttcaagagcttggcgatac

SEQ ID NO: 8304 - DNA, 38 bp, Artificial Sequence
  primer
gtaaaacgacggccagtgccactctttcattaatgcgg

SEQ ID NO: 8305 - DNA, 21 bp, Artificial Sequence
  primer
gggaggacacctctgatgaag

SEQ ID NO: 8306 - DNA, 39 bp, Artificial Sequence
  primer
gtaaaacgacggccagtaaaggagaaagaagggactgct

SEQ ID NO: 8307 - DNA, 37 bp, Artificial Sequence
  primer
gtaaaacgacggccagttttggtggtgatttgcaagg

SEQ ID NO: 8308 - DNA, 39 bp, Artificial Sequence
  primer
gtaaaacgacggccagttgccctcaattcatgagtattt

SEQ ID NO: 8309 - DNA, 38 bp, Artificial Sequence
  primer
gtaaaacgacggccagtagtttgccaggtgaagtcagg

SEQ ID NO: 8310 - DNA, 37 bp, Artificial Sequence
  primer
gtaaaacgacggccagtcatcgtgccctcttacgttg

SEQ ID NO: 8311 - DNA, 42 bp, Artificial Sequence
  primer
gtaaaacgacggccagtaatatacagaggactggtctttccc

SEQ ID NO: 8312 - DNA, 21 bp, Artificial Sequence
  primer
ggagacagaggtggcagtagg

SEQ ID NO: 8313 - DNA, 38 bp, Artificial Sequence
  primer
gtaaaacgacggccagttgtgtttcatgggagaagagg

SEQ ID NO: 8314 - DNA, 39 bp, Artificial Sequence
  primer
gtaaaacgacggccagtgcctatcctcaaatcaaattgc

SEQ ID NO: 8315 - DNA, 40 bp, Artificial Sequence
  primer
gtaaaacgacggccagttgaattcctgtcatgtgtgtgtc

SEQ ID NO: 8316 - DNA, 37 bp, Artificial Sequence
  primer
gtaaaacgacggccagtcttcctgagaagccatctgc

SEQ ID NO: 8317 - DNA, 43 bp, Artificial Sequence
  primer
gtaaaacgacggccagtgattcgtgaatgaaagtagacttgtg

SEQ ID NO: 8318 - DNA, 26 bp, Artificial Sequence
  primer
gtgtactcttaagtcgaattgtttgc

SEQ ID NO: 8319 - DNA, 20 bp, Artificial Sequence
  primer
gtaggctttgtcaggcttgc

SEQ ID NO: 8320 - DNA, 26 bp, Artificial Sequence
  primer
gggagagaattagttagctagggttc

SEQ ID NO: 8321 - DNA, 44 bp, Artificial Sequence
  primer
gtaaaacgacggccagtgctctcatttgacagaataaacttcac

SEQ ID NO: 8322 - DNA, 39 bp, Artificial Sequence
  primer
gtaaaacgacggccagtcaaccatagtgatgcaaccaag

SEQ ID NO: 8323 - DNA, 23 bp, Artificial Sequence
  primer
tctgccaaatatggtttaactgg

SEQ ID NO: 8324 - DNA, 41 bp, Artificial Sequence
  primer
gtaaaacgacggccagtctagttcatgccctttgattattt

SEQ ID NO: 8325 - DNA, 41 bp, Artificial Sequence
  primer
gtaaaacgacggccagtgaagcacctagaaagtcacactga

SEQ ID NO: 8326 - DNA, 21 bp, Artificial Sequence
  primer
ttgcaaagaaagcactggatg

SEQ ID NO: 8327 - DNA, 38 bp, Artificial Sequence
  primer
gtaaaacgacggccagtaattgcccttggattatgtgg

SEQ ID NO: 8328 - DNA, 36 bp, Artificial Sequence
  primer
gtaaaacgacggccagttcctgagacgtgaccaccc

SEQ ID NO: 8329 - DNA, 37 bp, Artificial Sequence
  primer
gtaaaacgacggccagtcagcgcttgtcctttctcag

SEQ ID NO: 8330 - DNA, 38 bp, Artificial Sequence
  primer
gtaaaacgacggccagtcaggctctgggacagatatgg

SEQ ID NO: 8331 - DNA, 38 bp, Artificial Sequence
  primer
gtaaaacgacggccagtccttgttgcacggtgttctac

SEQ ID NO: 8332 - DNA, 38 bp, Artificial Sequence
  primer
gtaaaacgacggccagtatggcttcgaatgtaacccac

SEQ ID NO: 8333 - DNA, 38 bp, Artificial Sequence
  primer
gtaaaacgacggccagtcttagccagcactacaagccc

SEQ ID NO: 8334 - DNA, 21 bp, Artificial Sequence
  primer
gctacaacccagggatagcac

SEQ ID NO: 8335 - DNA, 38 bp, Artificial Sequence
  primer
gtaaaacgacggccagtgtatgccgtgaaggtctcctc

SEQ ID NO: 8336 - DNA, 38 bp, Artificial Sequence
  primer
gtaaaacgacggccagtgtcagggtaagctacgcttgg

SEQ ID NO: 8337 - DNA, 38 bp, Artificial Sequence
  primer
gtaaaacgacggccagtcatcatcaccaccgatacctc

SEQ ID NO: 8338 - DNA, 21 bp, Artificial Sequence
  primer
gaattccctcttcctaagccc

SEQ ID NO: 8339 - DNA, 20 bp, Artificial Sequence
  primer
gtcctctctctcgccgaaac

SEQ ID NO: 8340 - DNA, 36 bp, Artificial Sequence
  primer
gtaaaacgacggccagtacacctttgccctgactcg

SEQ ID NO: 8341 - DNA, 19 bp, Artificial Sequence
  primer
gctcctggaccacatctcg

SEQ ID NO: 8342 - DNA, 38 bp, Artificial Sequence
  primer
gtaaaacgacggccagtgggttcttgcctctgattgag

SEQ ID NO: 8343 - DNA, 21 bp, Artificial Sequence
  primer
tttggcatcctaaccatttgc

SEQ ID NO: 8344 - DNA, 38 bp, Artificial Sequence
  primer
gtaaaacgacggccagtagcatcctttgtgattggagg

SEQ ID NO: 8345 - DNA, 21 bp, Artificial Sequence
  primer
ccttcatcacaggtaccaggc

SEQ ID NO: 8346 - DNA, 38 bp, Artificial Sequence
  primer
gtaaaacgacggccagttaccatggaaattggtgaccc

SEQ ID NO: 8347 - DNA, 38 bp, Artificial Sequence
  primer
gtaaaacgacggccagtgagactacagggtgggaaagg

SEQ ID NO: 8348 - DNA, 38 bp, Artificial Sequence
  primer
gtaaaacgacggccagttgtgttagcaccacccttctc

SEQ ID NO: 8349 - DNA, 38 bp, Artificial Sequence
  primer
gtaaaacgacggccagtaccctgtgagtggaatgtctg

SEQ ID NO: 8350 - DNA, 20 bp, Artificial Sequence
  primer
cttctggcaccaggaagatg

SEQ ID NO: 8351 - DNA, 38 bp, Artificial Sequence
  primer
gtaaaacgacggccagtgaagaaaggcactcctagggc

SEQ ID NO: 8352 - DNA, 38 bp, Artificial Sequence
  primer
gtaaaacgacggccagtcaggcaggttctcctcctaag

SEQ ID NO: 8353 - DNA, 21 bp, Artificial Sequence
  primer
atggagcagggttgtcctaag

SEQ ID NO: 8354 - DNA, 21 bp, Artificial Sequence
  primer
tgcttcaactaagggaggagc

SEQ ID NO: 8355 - DNA, 21 bp, Artificial Sequence
  primer
ggcaggactacaggtgaaacc

SEQ ID NO: 8356 - DNA, 21 bp, Artificial Sequence
  primer
aggttgcagagggagctacag

SEQ ID NO: 8357 - DNA, 21 bp, Artificial Sequence
  primer
gctacagcagttgcgacagag

SEQ ID NO: 8358 - DNA, 18 bp, Artificial Sequence
  primer
cacgatgagcgggaagag

SEQ ID NO: 8359 - DNA, 21 bp, Artificial Sequence
  primer
ctgctctaccaagccacagag

SEQ ID NO: 8360 - DNA, 38 bp, Artificial Sequence
  primer
gtaaaacgacggccagtaaaggaagctgaccttgaccc

SEQ ID NO: 8361 - DNA, 38 bp, Artificial Sequence
  primer
gtaaaacgacggccagtggagaagaaggtcagcagtgg

SEQ ID NO: 8362 - DNA, 21 bp, Artificial Sequence
  primer
accacagaacctctccctcac

SEQ ID NO: 8363 - DNA, 38 bp, Artificial Sequence
  primer
gtaaaacgacggccagtagactgctttgctcgttgttg

SEQ ID NO: 8364 - DNA, 40 bp, Artificial Sequence
  primer
gtaaaacgacggccagtttgaagacagagaaatgacatgc

SEQ ID NO: 8365 - DNA, 21 bp, Artificial Sequence
  primer
tgaggcagaggaggttgtttc

SEQ ID NO: 8366 - DNA, 38 bp, Artificial Sequence
  primer
gtaaaacgacggccagtcacccacagtaggacaagagg

SEQ ID NO: 8367 - DNA, 38 bp, Artificial Sequence
  primer
gtaaaacgacggccagtttcatgaagcctgtgttggtg

SEQ ID NO: 8368 - DNA, 21 bp, Artificial Sequence
  primer
ctcagaaacaaccagccttga

SEQ ID NO: 8369 - DNA, 38 bp, Artificial Sequence
  primer
gtaaaacgacggccagtattggaagtgtttgttgcgtg

SEQ ID NO: 8370 - DNA, 38 bp, Artificial Sequence
  primer
gtaaaacgacggccagtgtcttctcagaaacaaccggc

SEQ ID NO: 8371 - DNA, 37 bp, Artificial Sequence
  primer
gtaaaacgacggccagtaagctggtctgaaatgcctg

SEQ ID NO: 8372 - DNA, 38 bp, Artificial Sequence
  primer
gtaaaacgacggccagtataggttgggagaagtggcag

SEQ ID NO: 8373 - DNA, 38 bp, Artificial Sequence
  primer
gtaaaacgacggccagtcaccaatcataaccatcaccc

SEQ ID NO: 8374 - DNA, 38 bp, Artificial Sequence
  primer
gtaaaacgacggccagttggtctcaaactccttggctt

SEQ ID NO: 8375 - DNA, 40 bp, Artificial Sequence
  primer
gtaaaacgacggccagtggacctgcatgtatagactgacg

SEQ ID NO: 8376 - DNA, 39 bp, Artificial Sequence
  primer
gtaaaacgacggccagttggcagacttgaggtttgaatc

SEQ ID NO: 8377 - DNA, 39 bp, Artificial Sequence
  primer
gtaaaacgacggccagtcacacccggttcttatttcttg

SEQ ID NO: 8378 - DNA, 38 bp, Artificial Sequence
  primer
gtaaaacgacggccagtaacaatttcaagggcaagcac

SEQ ID NO: 8379 - DNA, 21 bp, Artificial Sequence
  primer
tctgagcgacctcctttatcc

SEQ ID NO: 8380 - DNA, 40 bp, Artificial Sequence
  primer
gtaaaacgacggccagttgtctgccaactgataatggttc

SEQ ID NO: 8381 - DNA, 39 bp, Artificial Sequence
  primer
gtaaaacgacggccagttccacatgcattaaccacagag

SEQ ID NO: 8382 - DNA, 38 bp, Artificial Sequence
  primer
gtaaaacgacggccagtagcatttgatttaacgtcggc

SEQ ID NO: 8383 - DNA, 38 bp, Artificial Sequence
  primer
gtaaaacgacggccagtctccatagttccagggtttgg

SEQ ID NO: 8384 - DNA, 38 bp, Artificial Sequence
  primer
gtaaaacgacggccagtcatgacacatgtcctgctctg

SEQ ID NO: 8385 - DNA, 38 bp, Artificial Sequence
  primer
gtaaaacgacggccagtaatactggtggcgatgaaagc

SEQ ID NO: 8386 - DNA, 38 bp, Artificial Sequence
  primer
gtaaaacgacggccagttctctagccacagccgttatg

SEQ ID NO: 8387 - DNA, 21 bp, Artificial Sequence
  primer
aaatcctagctcactgcagcc

SEQ ID NO: 8388 - DNA, 23 bp, Artificial Sequence
  primer
caaagatgcacaactggaatagg

SEQ ID NO: 8389 - DNA, 38 bp, Artificial Sequence
  primer
gtaaaacgacggccagtgccaagactccctacacaagg

SEQ ID NO: 8390 - DNA, 38 bp, Artificial Sequence
  primer
gtaaaacgacggccagtacaattgcttgcattctggtt

SEQ ID NO: 8391 - DNA, 38 bp, Artificial Sequence
  primer
gtaaaacgacggccagtagcggaatttagaccaggagc

SEQ ID NO: 8392 - DNA, 38 bp, Artificial Sequence
  primer
gtaaaacgacggccagttactgctgccagtgctagtgc

SEQ ID NO: 8393 - DNA, 21 bp, Artificial Sequence
  primer
ctggatggctttggagagaac

SEQ ID NO: 8394 - DNA, 43 bp, Artificial Sequence
  primer
gtaaaacgacggccagtgaacgttcgtaataggaggatttaca

SEQ ID NO: 8395 - DNA, 38 bp, Artificial Sequence
  primer
gtaaaacgacggccagtttctggattcaagtgctgagg

SEQ ID NO: 8396 - DNA, 38 bp, Artificial Sequence
  primer
gtaaaacgacggccagtagtggtctctatccatggccc

SEQ ID NO: 8397 - DNA, 19 bp, Artificial Sequence
  primer
caatgagatgacatcgccc

SEQ ID NO: 8398 - DNA, 21 bp, Artificial Sequence
  primer
gcagaggcagatagcttgttc

SEQ ID NO: 8399 - DNA, 21 bp, Artificial Sequence
  primer
tcacttagccaactgctttgc

SEQ ID NO: 8400 - DNA, 39 bp, Artificial Sequence
  primer
gtaaaacgacggccagttcatggagaatgaatgttcagc

SEQ ID NO: 8401 - DNA, 38 bp, Artificial Sequence
  primer
gtaaaacgacggccagtacatggtgccttgcataagtg

SEQ ID NO: 8402 - DNA, 38 bp, Artificial Sequence
  primer
gtaaaacgacggccagtcaccttgtgcatgtttcttgg

SEQ ID NO: 8403 - DNA, 22 bp, Artificial Sequence
  primer
tgcctattaaccttggatttgg

SEQ ID NO: 8404 - DNA, 22 bp, Artificial Sequence
  primer
gagcccatttgttgttgagaag

SEQ ID NO: 8405 - DNA, 26 bp, Artificial Sequence
  primer
aaacaatctctgttcttaaggaagtt

SEQ ID NO: 8406 - DNA, 28 bp, Artificial Sequence
  primer
tttctaacgatgtcaggaattaagattt

SEQ ID NO: 8407 - DNA, 40 bp, Artificial Sequence
  primer
gtaaaacgacggccagtggatactgacccattgtacttgc

SEQ ID NO: 8408 - DNA, 38 bp, Artificial Sequence
  primer
gtaaaacgacggccagtttgtactggatagtgccggtc

SEQ ID NO: 8409 - DNA, 38 bp, Artificial Sequence
  primer
gtaaaacgacggccagttcaccaaagtgatgctcacag

SEQ ID NO: 8410 - DNA, 21 bp, Artificial Sequence
  primer
atacgccgagcagagagaatc

SEQ ID NO: 8411 - DNA, 20 bp, Artificial Sequence
  primer
gcctttgcggttttagacag

SEQ ID NO: 8412 - DNA, 20 bp, Artificial Sequence
  primer
tgatggtgttggaggaaagg

SEQ ID NO: 8413 - DNA, 41 bp, Artificial Sequence
  primer
gtaaaacgacggccagtggcacaaagtttacaatttagcaa

SEQ ID NO: 8414 - DNA, 38 bp, Artificial Sequence
  primer
gtaaaacgacggccagtaggcttagagctgatgtgctg

SEQ ID NO: 8415 - DNA, 22 bp, Artificial Sequence
  primer
aggtttctttctggcttcagag

SEQ ID NO: 8416 - DNA, 18 bp, Artificial Sequence
  primer
tgatgctcgtgcaaccac

SEQ ID NO: 8417 - DNA, 38 bp, Artificial Sequence
  primer
gtaaaacgacggccagttggaaaggacctgtgttgatg

SEQ ID NO: 8418 - DNA, 38 bp, Artificial Sequence
  primer
gtaaaacgacggccagtccagtttactgcaagggaagc

SEQ ID NO: 8419 - DNA, 24 bp, Artificial Sequence
  primer
tggaaatacaaactatttgggacc

SEQ ID NO: 8420 - DNA, 38 bp, Artificial Sequence
  primer
gtaaaacgacggccagtaatggagttgagagaggcacc

SEQ ID NO: 8421 - DNA, 22 bp, Artificial Sequence
  primer
tcggaaggcatatatcgtcaag

SEQ ID NO: 8422 - DNA, 40 bp, Artificial Sequence
  primer
gtaaaacgacggccagtaagcagtggatgctttctttacc

SEQ ID NO: 8423 - DNA, 38 bp, Artificial Sequence
  primer
gtaaaacgacggccagtttgaatgtgattcttgcagcc

SEQ ID NO: 8424 - DNA, 21 bp, Artificial Sequence
  primer
tggcttctggatgtgaaacac

SEQ ID NO: 8425 - DNA, 38 bp, Artificial Sequence
  primer
gtaaaacgacggccagttcatgcatagttcgacaagcc

SEQ ID NO: 8426 - DNA, 21 bp, Artificial Sequence
  primer
tgatagccgaacagctttgag

SEQ ID NO: 8427 - DNA, 38 bp, Artificial Sequence
  primer
gtaaaacgacggccagtttgtgtgcctgcaagtaaagg

SEQ ID NO: 8428 - DNA, 38 bp, Artificial Sequence
  primer
gtaaaacgacggccagttcttagcagcagcgtctatgg

SEQ ID NO: 8429 - DNA, 38 bp, Artificial Sequence
  primer
gtaaaacgacggccagtttgacaatgatggacgaatcc

SEQ ID NO: 8430 - DNA, 21 bp, Artificial Sequence
  primer
atatggaaatggtgcaggtcc

SEQ ID NO: 8431 - DNA, 21 bp, Artificial Sequence
  primer
agcttctgattgagcatggtg

SEQ ID NO: 8432 - DNA, 38 bp, Artificial Sequence
  primer
gtaaaacgacggccagtgggatatgcagccttcgttac

SEQ ID NO: 8433 - DNA, 38 bp, Artificial Sequence
  primer
gtaaaacgacggccagtctacagcaacggctcaaacag

SEQ ID NO: 8434 - DNA, 21 bp, Artificial Sequence
  primer
ctatagccaaatccgggactg

SEQ ID NO: 8435 - DNA, 38 bp, Artificial Sequence
  primer
gtaaaacgacggccagtacatctttacctctgggtgcc

SEQ ID NO: 8436 - DNA, 38 bp, Artificial Sequence
  primer
gtaaaacgacggccagtgaatctcctgccaatccaaag

SEQ ID NO: 8437 - DNA, 38 bp, Artificial Sequence
  primer
gtaaaacgacggccagtgggtccttgtgtccaagtgtc

SEQ ID NO: 8438 - DNA, 20 bp, Artificial Sequence
  primer
caattgagaaaggccgtctg

SEQ ID NO: 8439 - DNA, 20 bp, Artificial Sequence
  primer
cagagaatgtgagcgttgcc

SEQ ID NO: 8440 - DNA, 21 bp, Artificial Sequence
  primer
agcagtgattctgtgaccacg

SEQ ID NO: 8441 - DNA, 38 bp, Artificial Sequence
  primer
gtaaaacgacggccagtttgactttgaagagccacacc

SEQ ID NO: 8442 - DNA, 37 bp, Artificial Sequence
  primer
gtaaaacgacggccagtacgtaggtgctgggtgtgac

SEQ ID NO: 8443 - DNA, 21 bp, Artificial Sequence
  primer
cagaggtgcttgcttgatgtg

SEQ ID NO: 8444 - DNA, 38 bp, Artificial Sequence
  primer
gtaaaacgacggccagttatttgcaaaggttctcgtgg

SEQ ID NO: 8445 - DNA, 21 bp, Artificial Sequence
  primer
ccatgaggtgaaacaaagtgg

SEQ ID NO: 8446 - DNA, 23 bp, Artificial Sequence
  primer
ccaaagttatgacaaggatgagc

SEQ ID NO: 8447 - DNA, 37 bp, Artificial Sequence
  primer
gtaaaacgacggccagtctctgcaggagctgagaagc

SEQ ID NO: 8448 - DNA, 21 bp, Artificial Sequence
  primer
tatccaaaccatagcagtggg

SEQ ID NO: 8449 - DNA, 38 bp, Artificial Sequence
  primer
gtaaaacgacggccagtaatgggaccagtgtggctaac

SEQ ID NO: 8450 - DNA, 38 bp, Artificial Sequence
  primer
gtaaaacgacggccagtttccttctgaaaccaggtgtg

SEQ ID NO: 8451 - DNA, 21 bp, Artificial Sequence
  primer
aaagagaaggccctcaactcc

SEQ ID NO: 8452 - DNA, 39 bp, Artificial Sequence
  primer
gtaaaacgacggccagtttggaatgtgtttgagttctcc

SEQ ID NO: 8453 - DNA, 37 bp, Artificial Sequence
  primer
gtaaaacgacggccagttctggctcaaccctgatttg

SEQ ID NO: 8454 - DNA, 41 bp, Artificial Sequence
  primer
gtaaaacgacggccagttttctgatagaggccctacatttg

SEQ ID NO: 8455 - DNA, 38 bp, Artificial Sequence
  primer
gtaaaacgacggccagtcagcattggctggtacctaag

SEQ ID NO: 8456 - DNA, 38 bp, Artificial Sequence
  primer
gtaaaacgacggccagtgcaagtcagtttcaaggaggg

SEQ ID NO: 8457 - DNA, 38 bp, Artificial Sequence
  primer
gtaaaacgacggccagtaagtcgtcgttcgccttctac

SEQ ID NO: 8458 - DNA, 37 bp, Artificial Sequence
  primer
gtaaaacgacggccagtcctctgaggcgctgctctac

SEQ ID NO: 8459 - DNA, 36 bp, Artificial Sequence
  primer
gtaaaacgacggccagtgagtgcctcttcctgctgc

SEQ ID NO: 8460 - DNA, 37 bp, Artificial Sequence
  primer
gtaaaacgacggccagtggagacggaaagtttgggag

SEQ ID NO: 8461 - DNA, 21 bp, Artificial Sequence
  primer
actggtctggttgaacaccac

SEQ ID NO: 8462 - DNA, 38 bp, Artificial Sequence
  primer
gtaaaacgacggccagtgggctttgtgccatataggtg

SEQ ID NO: 8463 - DNA, 21 bp, Artificial Sequence
  primer
ttacgagtggttgtcccagtc

SEQ ID NO: 8464 - DNA, 39 bp, Artificial Sequence
  primer
gtaaaacgacggccagttggaaagataatgacagagggc

SEQ ID NO: 8465 - DNA, 38 bp, Artificial Sequence
  primer
gtaaaacgacggccagttgctgctgacagccttaaatg

SEQ ID NO: 8466 - DNA, 21 bp, Artificial Sequence
  primer
ggacacacgaattgaaccaag

SEQ ID NO: 8467 - DNA, 21 bp, Artificial Sequence
  primer
cgggtgactaaagaggctttg

SEQ ID NO: 8468 - DNA, 20 bp, Artificial Sequence
  primer
ggctaagatgagggcaaacc

SEQ ID NO: 8469 - DNA, 21 bp, Artificial Sequence
  primer
ctcgaatttgttccagactgc

SEQ ID NO: 8470 - DNA, 21 bp, Artificial Sequence
  primer
atatgcttgctgcattggaac

SEQ ID NO: 8471 - DNA, 21 bp, Artificial Sequence
  primer
agagcaagagagtgggctacc

SEQ ID NO: 8472 - DNA, 38 bp, Artificial Sequence
  primer
gtaaaacgacggccagtgagtcctgataccttgcaggc

SEQ ID NO: 8473 - DNA, 21 bp, Artificial Sequence
  primer
acagaagaggagctgcgtgtc

SEQ ID NO: 8474 - DNA, 38 bp, Artificial Sequence
  primer
gtaaaacgacggccagtaccctgtgcatattctggagc

SEQ ID NO: 8475 - DNA, 21 bp, Artificial Sequence
  primer
ccagcaagtgataggaaaggc

SEQ ID NO: 8476 - DNA, 38 bp, Artificial Sequence
  primer
gtaaaacgacggccagtctccagaagtctgagcttccc

SEQ ID NO: 8477 - DNA, 37 bp, Artificial Sequence
  primer
gtaaaacgacggccagtgggctggctgatacctgtag

SEQ ID NO: 8478 - DNA, 21 bp, Artificial Sequence
  primer
actggcatcttcacccttgag

SEQ ID NO: 8479 - DNA, 39 bp, Artificial Sequence
  primer
gtaaaacgacggccagtctagggagttgaatggagggtc

SEQ ID NO: 8480 - DNA, 21 bp, Artificial Sequence
  primer
gatcaaagatctgcgagggac

SEQ ID NO: 8481 - DNA, 38 bp, Artificial Sequence
  primer
gtaaaacgacggccagtgtgacaatggtaacaggctgg

SEQ ID NO: 8482 - DNA, 38 bp, Artificial Sequence
  primer
gtaaaacgacggccagtgctcccgggtagacttagagg

SEQ ID NO: 8483 - DNA, 38 bp, Artificial Sequence
  primer
gtaaaacgacggccagttctttggccgaggagaataag

SEQ ID NO: 8484 - DNA, 21 bp, Artificial Sequence
  primer
cctgctctgtgtttcctttcc

SEQ ID NO: 8485 - DNA, 21 bp, Artificial Sequence
  primer
gaggaggagagagtcgtgctc

SEQ ID NO: 8486 - DNA, 38 bp, Artificial Sequence
  primer
gtaaaacgacggccagttacaacctgctgctgactgtg

SEQ ID NO: 8487 - DNA, 38 bp, Artificial Sequence
  primer
gtaaaacgacggccagttctaaattcccacccagcatc

SEQ ID NO: 8488 - DNA, 38 bp, Artificial Sequence
  primer
gtaaaacgacggccagtcatttcaaagcattgcaggtt

SEQ ID NO: 8489 - DNA, 26 bp, Artificial Sequence
  primer
tttctgttagggagagctgagattac

SEQ ID NO: 8490 - DNA, 21 bp, Artificial Sequence
  primer
aaatagctcatcatggcgttc

SEQ ID NO: 8491 - DNA, 41 bp, Artificial Sequence
  primer
gtaaaacgacggccagttcagcagaatagtgtctgactgct

SEQ ID NO: 8492 - DNA, 21 bp, Artificial Sequence
  primer
gctgacttgtttgccgagata

SEQ ID NO: 8493 - DNA, 39 bp, Artificial Sequence
  primer
gtaaaacgacggccagtcatcagctgtcaatcactttgg

SEQ ID NO: 8494 - DNA, 38 bp, Artificial Sequence
  primer
gtaaaacgacggccagttctcagaacaacattccaggg

SEQ ID NO: 8495 - DNA, 25 bp, Artificial Sequence
  primer
gcctaacctatcacatcaactatgc

SEQ ID NO: 8496 - DNA, 38 bp, Artificial Sequence
  primer
gtaaaacgacggccagtatatcggtggctttcagaacc

SEQ ID NO: 8497 - DNA, 21 bp, Artificial Sequence
  primer
agtcctttgcctttcaagcag

SEQ ID NO: 8498 - DNA, 38 bp, Artificial Sequence
  primer
gtaaaacgacggccagttccgaaagatgtttgctttcc

SEQ ID NO: 8499 - DNA, 38 bp, Artificial Sequence
  primer
gtaaaacgacggccagtcattaatctgtcaagctggcg

SEQ ID NO: 8500 - DNA, 38 bp, Artificial Sequence
  primer
gtaaaacgacggccagttaacaaggtgaccgactctgc

SEQ ID NO: 8501 - DNA, 38 bp, Artificial Sequence
  primer
gtaaaacgacggccagttttccttgtttccgtctccag

SEQ ID NO: 8502 - DNA, 20 bp, Artificial Sequence
  primer
caccacatctcatggtgcag

SEQ ID NO: 8503 - DNA, 38 bp, Artificial Sequence
  primer
gtaaaacgacggccagttcattcattccttggctgttg

SEQ ID NO: 8504 - DNA, 39 bp, Artificial Sequence
  primer
gtaaaacgacggccagtttcacagcacctgtgtgtaagg

SEQ ID NO: 8505 - DNA, 22 bp, Artificial Sequence
  primer
tatgcaacaacttacagccagg

SEQ ID NO: 8506 - DNA, 21 bp, Artificial Sequence
  primer
agactgtgcggtgcagtaaac

SEQ ID NO: 8507 - DNA, 21 bp, Artificial Sequence
  primer
taagcccaagagaggagaggc

SEQ ID NO: 8508 - DNA, 39 bp, Artificial Sequence
  primer
gtaaaacgacggccagtcaactgcttcctgggttacttg

SEQ ID NO: 8509 - DNA, 38 bp, Artificial Sequence
  primer
gtaaaacgacggccagtacctccctcagtgttcctcag

SEQ ID NO: 8510 - DNA, 24 bp, Artificial Sequence
  primer
cccttaactgcagtagagcaagac

SEQ ID NO: 8511 - DNA, 21 bp, Artificial Sequence
  primer
agtcatactccacagcctgcc

SEQ ID NO: 8512 - DNA, 24 bp, Artificial Sequence
  primer
tcaattattaaaccttgagcaccc

SEQ ID NO: 8513 - DNA, 21 bp, Artificial Sequence
  primer
gcggtaaatgtgtgtccaaag

SEQ ID NO: 8514 - DNA, 21 bp, Artificial Sequence
  primer
tctataggaaggttgctccgc

SEQ ID NO: 8515 - DNA, 38 bp, Artificial Sequence
  primer
gtaaaacgacggccagtacacacggtagagatgggctc

SEQ ID NO: 8516 - DNA, 21 bp, Artificial Sequence
  primer
attcctggtcaactttggtgc

SEQ ID NO: 8517 - DNA, 21 bp, Artificial Sequence
  primer
ggaatccgggactctctcttc

SEQ ID NO: 8518 - DNA, 38 bp, Artificial Sequence
  primer
gtaaaacgacggccagtccatgaatccattctcaatcg

SEQ ID NO: 8519 - DNA, 38 bp, Artificial Sequence
  primer
gtaaaacgacggccagttgttcttgctgtctcagcacc

SEQ ID NO: 8520 - DNA, 18 bp, Artificial Sequence
  primer
gctcccggcacacagtag

SEQ ID NO: 8521 - DNA, 21 bp, Artificial Sequence
  primer
ccgagtgctgtgtgttcagtg

SEQ ID NO: 8522 - DNA, 20 bp, Artificial Sequence
  primer
gcgtctactgatggagtggg

SEQ ID NO: 8523 - DNA, 38 bp, Artificial Sequence
  primer
gtaaaacgacggccagtgaagagctgctggatttgtcc

SEQ ID NO: 8524 - DNA, 38 bp, Artificial Sequence
  primer
gtaaaacgacggccagtgggccagcaagtgtttgttac

SEQ ID NO: 8525 - DNA, 22 bp, Artificial Sequence
  primer
gagaatgtgagactgtttgccc

SEQ ID NO: 8526 - DNA, 38 bp, Artificial Sequence
  primer
gtaaaacgacggccagtaagatcagatggagaggcagg

SEQ ID NO: 8527 - DNA, 38 bp, Artificial Sequence
  primer
gtaaaacgacggccagttagtcactgtctctgggctgg

SEQ ID NO: 8528 - DNA, 21 bp, Artificial Sequence
  primer
tctgactcagtacggcagtgg

SEQ ID NO: 8529 - DNA, 38 bp, Artificial Sequence
  primer
gtaaaacgacggccagttgtagatgccacatagctccc

SEQ ID NO: 8530 - DNA, 38 bp, Artificial Sequence
  primer
gtaaaacgacggccagttaatgggcaagttgtcagcac

SEQ ID NO: 8531 - DNA, 38 bp, Artificial Sequence
  primer
gtaaaacgacggccagtatcatcacacgacagtccacc

SEQ ID NO: 8532 - DNA, 38 bp, Artificial Sequence
  primer
gtaaaacgacggccagtatgttccctgttgtgggtgtc

SEQ ID NO: 8533 - DNA, 20 bp, Artificial Sequence
  primer
cagcctcatctgcaggagtc

SEQ ID NO: 8534 - DNA, 21 bp, Artificial Sequence
  primer
ccacccagatgactatcccag

SEQ ID NO: 8535 - DNA, 36 bp, Artificial Sequence
  primer
gtaaaacgacggccagtctgcgatggtgggtactgg

SEQ ID NO: 8536 - DNA, 38 bp, Artificial Sequence
  primer
gtaaaacgacggccagtaggagaaaccaagtcaggcag

SEQ ID NO: 8537 - DNA, 18 bp, Artificial Sequence
  primer
tacaagcgtgagccgctg

SEQ ID NO: 8538 - DNA, 38 bp, Artificial Sequence
  primer
gtaaaacgacggccagttgaggcagttggtgttacctg

SEQ ID NO: 8539 - DNA, 38 bp, Artificial Sequence
  primer
gtaaaacgacggccagtccacaggtgatgagtggtagg

SEQ ID NO: 8540 - DNA, 38 bp, Artificial Sequence
  primer
gtaaaacgacggccagtcacttcatcttgactgcctcg

SEQ ID NO: 8541 - DNA, 38 bp, Artificial Sequence
  primer
gtaaaacgacggccagttatttcaagggtgagagggtg

SEQ ID NO: 8542 - DNA, 24 bp, Artificial Sequence
  primer
tccgtgttatcctctactttccac

SEQ ID NO: 8543 - DNA, 37 bp, Artificial Sequence
  primer
gtaaaacgacggccagtgacagctggttgtgggagag

SEQ ID NO: 8544 - DNA, 38 bp, Artificial Sequence
  primer
gtaaaacgacggccagtcatcctgtatggcaattggtg

SEQ ID NO: 8545 - DNA, 26 bp, Artificial Sequence
  primer
tttgttgagtatctaccctcaagttt

SEQ ID NO: 8546 - DNA, 21 bp, Artificial Sequence
  primer
ttctcaccaatgccatcagag

SEQ ID NO: 8547 - DNA, 46 bp, Artificial Sequence
  primer
gtaaaacgacggccagtggctatcaagtaaataggacttgaattgt

SEQ ID NO: 8548 - DNA, 21 bp, Artificial Sequence
  primer
tgccctctcctcattctacct

SEQ ID NO: 8549 - DNA, 37 bp, Artificial Sequence
  primer
gtaaaacgacggccagtggtggtatggccgtagacag

SEQ ID NO: 8550 - DNA, 38 bp, Artificial Sequence
  primer
gtaaaacgacggccagtaggctgggcctattcacatac

SEQ ID NO: 8551 - DNA, 21 bp, Artificial Sequence
  primer
tgggttaagagaggacaggtg

SEQ ID NO: 8552 - DNA, 21 bp, Artificial Sequence
  primer
ctcccaaagtgctgggattac

SEQ ID NO: 8553 - DNA, 21 bp, Artificial Sequence
  primer
ttgaataactgcagctctggg

SEQ ID NO: 8554 - DNA, 24 bp, Artificial Sequence
  primer
tctgttgtgaaatgttctgctgac

SEQ ID NO: 8555 - DNA, 39 bp, Artificial Sequence
  primer
gtaaaacgacggccagttggtgcatagtcgagaaacttg

SEQ ID NO: 8556 - DNA, 38 bp, Artificial Sequence
  primer
gtaaaacgacggccagtgatttcgtcttcgctgttacg

SEQ ID NO: 8557 - DNA, 21 bp, Artificial Sequence
  primer
agggagagaccttgatgatgc

SEQ ID NO: 8558 - DNA, 47 bp, Artificial Sequence
  primer
gtaaaacgacggccagtcatagtggattcctttacttagagtcttgt

SEQ ID NO: 8559 - DNA, 39 bp, Artificial Sequence
  primer
gtaaaacgacggccagtcaggcaagatgtatccaatgac

SEQ ID NO: 8560 - DNA, 22 bp, Artificial Sequence
  primer
aatctcttgacctcatgatccg

SEQ ID NO: 8561 - DNA, 21 bp, Artificial Sequence
  primer
tctgaaccttgagcactgtgg

SEQ ID NO: 8562 - DNA, 23 bp, Artificial Sequence
  primer
ccatcccaattattaaggagtgc

SEQ ID NO: 8563 - DNA, 38 bp, Artificial Sequence
  primer
gtaaaacgacggccagttgttggtaaggaaccaatggc

SEQ ID NO: 8564 - DNA, 30 bp, Artificial Sequence
  primer
agtaggtagaggtatttaatttagggttga

SEQ ID NO: 8565 - DNA, 43 bp, Artificial Sequence
  primer
gtaaaacgacggccagtcaacttaaatgctgcttaatgcttac

SEQ ID NO: 8566 - DNA, 39 bp, Artificial Sequence
  primer
gtaaaacgacggccagtttccctagcaagagtacatggg

SEQ ID NO: 8567 - DNA, 38 bp, Artificial Sequence
  primer
gtaaaacgacggccagtctggttgagccttcaaagtcc

SEQ ID NO: 8568 - DNA, 38 bp, Artificial Sequence
  primer
gtaaaacgacggccagtggagtcctctaacaccctccc

SEQ ID NO: 8569 - DNA, 38 bp, Artificial Sequence
  primer
gtaaaacgacggccagtgagactgctttcccttcttgc

SEQ ID NO: 8570 - DNA, 38 bp, Artificial Sequence
  primer
gtaaaacgacggccagttgtttgctagggctgttcctc

SEQ ID NO: 8571 - DNA, 20 bp, Artificial Sequence
  primer
acttaggtgggtgtgggagg

SEQ ID NO: 8572 - DNA, 21 bp, Artificial Sequence
  primer
ctctgctttacattcctcccg

SEQ ID NO: 8573 - DNA, 38 bp, Artificial Sequence
  primer
gtaaaacgacggccagtcagatgtcttgcctcggtttc

SEQ ID NO: 8574 - DNA, 36 bp, Artificial Sequence
  primer
gtaaaacgacggccagtctagcaaacccttccgacg

SEQ ID NO: 8575 - DNA, 21 bp, Artificial Sequence
  primer
ggctgcctgtatatatgggtg

SEQ ID NO: 8576 - DNA, 25 bp, Artificial Sequence
  primer
catgccctaatagaaatagggatca

SEQ ID NO: 8577 - DNA, 22 bp, Artificial Sequence
  primer
gctgagtgggtagtggaaattg

SEQ ID NO: 8578 - DNA, 38 bp, Artificial Sequence
  primer
gtaaaacgacggccagtgtggccttacagcatttgttc

SEQ ID NO: 8579 - DNA, 40 bp, Artificial Sequence
  primer
gtaaaacgacggccagttcctgcttgattgatattgttgc

SEQ ID NO: 8580 - DNA, 38 bp, Artificial Sequence
  primer
gtaaaacgacggccagtttgcctccattggcaataatc

SEQ ID NO: 8581 - DNA, 38 bp, Artificial Sequence
  primer
gtaaaacgacggccagtcgtgggttcgaggtttatttg

SEQ ID NO: 8582 - DNA, 38 bp, Artificial Sequence
  primer
gtaaaacgacggccagtcgaatgaaggcaaactcgaag

SEQ ID NO: 8583 - DNA, 21 bp, Artificial Sequence
  primer
aaccaacctgaacgactacgg

SEQ ID NO: 8584 - DNA, 38 bp, Artificial Sequence
  primer
gtaaaacgacggccagtagcagagctggttgagctttc

SEQ ID NO: 8585 - DNA, 38 bp, Artificial Sequence
  primer
gtaaaacgacggccagtcaactcttggactccatttgc

SEQ ID NO: 8586 - DNA, 21 bp, Artificial Sequence
  primer
ttccagagtgtcaagacccag

SEQ ID NO: 8587 - DNA, 18 bp, Artificial Sequence
  primer
ggtggtgggcacctgtaa

SEQ ID NO: 8588 - DNA, 21 bp, Artificial Sequence
  primer
gaattccagctggcaacagag

SEQ ID NO: 8589 - DNA, 36 bp, Artificial Sequence
  primer
gtaaaacgacggccagttgaagtgattgggcaaggg

SEQ ID NO: 8590 - DNA, 42 bp, Artificial Sequence
  primer
gtaaaacgacggccagtctttataagaatggcagaggttgtc

SEQ ID NO: 8591 - DNA, 37 bp, Artificial Sequence
  primer
gtaaaacgacggccagttgctaggccttgccattaac

SEQ ID NO: 8592 - DNA, 38 bp, Artificial Sequence
  primer
gtaaaacgacggccagtcagacactgtttgcttccagc

SEQ ID NO: 8593 - DNA, 21 bp, Artificial Sequence
  primer
aagaacaagaacgccaacagc

SEQ ID NO: 8594 - DNA, 36 bp, Artificial Sequence
  primer
gtaaaacgacggccagtctgcatgcctggtagcatc

SEQ ID NO: 8595 - DNA, 21 bp, Artificial Sequence
  primer
tcaacatcacgcttatccacc

SEQ ID NO: 8596 - DNA, 21 bp, Artificial Sequence
  primer
ttctctaggacccacagcctc

SEQ ID NO: 8597 - DNA, 38 bp, Artificial Sequence
  primer
gtaaaacgacggccagtatgacacaccctacccactcc

SEQ ID NO: 8598 - DNA, 38 bp, Artificial Sequence
  primer
gtaaaacgacggccagtggtcacgatggtgttgaaatc

SEQ ID NO: 8599 - DNA, 21 bp, Artificial Sequence
  primer
gcctcctacgtggagtacctg

SEQ ID NO: 8600 - DNA, 38 bp, Artificial Sequence
  primer
gtaaaacgacggccagtgatcagtgagctgtttgacgc

SEQ ID NO: 8601 - DNA, 20 bp, Artificial Sequence
  primer
cgaggacgtattcaagcagg

SEQ ID NO: 8602 - DNA, 21 bp, Artificial Sequence
  primer
gaagttctccagctcgtccag

SEQ ID NO: 8603 - DNA, 21 bp, Artificial Sequence
  primer
ccactgtagacagaccctccc

SEQ ID NO: 8604 - DNA, 38 bp, Artificial Sequence
  primer
gtaaaacgacggccagtcagttcctcatcccttccttc

SEQ ID NO: 8605 - DNA, 37 bp, Artificial Sequence
  primer
gtaaaacgacggccagtagctgcagagagaccactcg

SEQ ID NO: 8606 - DNA, 20 bp, Artificial Sequence
  primer
gtgtggagcatctttgaggg

SEQ ID NO: 8607 - DNA, 19 bp, Artificial Sequence
  primer
ctctgacgtctctgccagc

SEQ ID NO: 8608 - DNA, 20 bp, Artificial Sequence
  primer
acagagccttaggcagggtg

SEQ ID NO: 8609 - DNA, 38 bp, Artificial Sequence
  primer
gtaaaacgacggccagtctctgccagtcttcatctgcc

SEQ ID NO: 8610 - DNA, 38 bp, Artificial Sequence
  primer
gtaaaacgacggccagtcgtgggacagtccaagttctc

SEQ ID NO: 8611 - DNA, 21 bp, Artificial Sequence
  primer
tgtgttcaagctgtgactccc

SEQ ID NO: 8612 - DNA, 37 bp, Artificial Sequence
  primer
gtaaaacgacggccagtgaaagccagaggcctgagag

SEQ ID NO: 8613 - DNA, 38 bp, Artificial Sequence
  primer
gtaaaacgacggccagtctcctccagacaattgcttcc

SEQ ID NO: 8614 - DNA, 40 bp, Artificial Sequence
  primer
gtaaaacgacggccagttgagtccagttattggagaggtc

SEQ ID NO: 8615 - DNA, 38 bp, Artificial Sequence
  primer
gtaaaacgacggccagtcactgctggctaatcaacacc

SEQ ID NO: 8616 - DNA, 21 bp, Artificial Sequence
  primer
tcctgcagaagagtctttccc

SEQ ID NO: 8617 - DNA, 39 bp, Artificial Sequence
  primer
gtaaaacgacggccagtttggctgcatattcaacaacag

SEQ ID NO: 8618 - DNA, 38 bp, Artificial Sequence
  primer
gtaaaacgacggccagttccttcttcatgctggagttg

SEQ ID NO: 8619 - DNA, 38 bp, Artificial Sequence
  primer
gtaaaacgacggccagtctgaagtctgagcttcctggg

SEQ ID NO: 8620 - DNA, 38 bp, Artificial Sequence
  primer
gtaaaacgacggccagtcccagtgaaggcctcatattc

SEQ ID NO: 8621 - DNA, 38 bp, Artificial Sequence
  primer
gtaaaacgacggccagtgatgttagactcctcgcaccc

SEQ ID NO: 8622 - DNA, 38 bp, Artificial Sequence
  primer
gtaaaacgacggccagttgctctaaatcagggcagatg

SEQ ID NO: 8623 - DNA, 38 bp, Artificial Sequence
  primer
gtaaaacgacggccagtttggtatctccctggacttgg

SEQ ID NO: 8624 - DNA, 38 bp, Artificial Sequence
  primer
gtaaaacgacggccagtaaggagtcctgtgtgtctggc

SEQ ID NO: 8625 - DNA, 37 bp, Artificial Sequence
  primer
gtaaaacgacggccagtactgtgctgctctctgagcc

SEQ ID NO: 8626 - DNA, 38 bp, Artificial Sequence
  primer
gtaaaacgacggccagttggtaattatggcagcaccac

SEQ ID NO: 8627 - DNA, 21 bp, Artificial Sequence
  primer
acagtagcactgggattgcac

SEQ ID NO: 8628 - DNA, 38 bp, Artificial Sequence
  primer
gtaaaacgacggccagtgttgggtagcattcacattgc

SEQ ID NO: 8629 - DNA, 37 bp, Artificial Sequence
  primer
gtaaaacgacggccagtgcacggaaagttctgtgagc

SEQ ID NO: 8630 - DNA, 35 bp, Artificial Sequence
  primer
gtaaaacgacggccagtcccaccacagcaccacag

SEQ ID NO: 8631 - DNA, 21 bp, Artificial Sequence
  primer
tcctctcaggacctccctctc

SEQ ID NO: 8632 - DNA, 38 bp, Artificial Sequence
  primer
gtaaaacgacggccagtcctatgttcgtggcattgaag

SEQ ID NO: 8633 - DNA, 38 bp, Artificial Sequence
  primer
gtaaaacgacggccagtaaagaagcctggaccattcag

SEQ ID NO: 8634 - DNA, 22 bp, Artificial Sequence
  primer
aagttatctgccttcaaagccc

SEQ ID NO: 8635 - DNA, 37 bp, Artificial Sequence
  primer
gtaaaacgacggccagtagcttgatggaacatgctgg

SEQ ID NO: 8636 - DNA, 22 bp, Artificial Sequence
  primer
gtgccatcatatgcagagaaag

SEQ ID NO: 8637 - DNA, 38 bp, Artificial Sequence
  primer
gtaaaacgacggccagtgaccttgaacacagatcacgc

SEQ ID NO: 8638 - DNA, 27 bp, Artificial Sequence
  primer
gagatctattgaagtatggagaagacc

SEQ ID NO: 8639 - DNA, 19 bp, Artificial Sequence
  primer
gggaaagccagcacagttg

SEQ ID NO: 8640 - DNA, 42 bp, Artificial Sequence
  primer
gtaaaacgacggccagttcaatggagcatataatctctttcc

SEQ ID NO: 8641 - DNA, 18 bp, Artificial Sequence
  primer
ccgaggtgggtggatcat

SEQ ID NO: 8642 - DNA, 26 bp, Artificial Sequence
  primer
tttgtttattatttcctgtcacaaca

SEQ ID NO: 8643 - DNA, 40 bp, Artificial Sequence
  primer
gtaaaacgacggccagtcgaaagctagttacaggcaatcc

SEQ ID NO: 8644 - DNA, 40 bp, Artificial Sequence
  primer
gtaaaacgacggccagttttaaatatgagccagttccgac

SEQ ID NO: 8645 - DNA, 40 bp, Artificial Sequence
  primer
gtaaaacgacggccagtgcctctgaagaggagaaattagg

SEQ ID NO: 8646 - DNA, 43 bp, Artificial Sequence
  primer
gtaaaacgacggccagtagtttaccttatgaaagaaatgaggg

SEQ ID NO: 8647 - DNA, 21 bp, Artificial Sequence
  primer
tgaaccatcatgctttaaccc

SEQ ID NO: 8648 - DNA, 25 bp, Artificial Sequence
  primer
ggacaaatacaactttcagataggc

SEQ ID NO: 8649 - DNA, 22 bp, Artificial Sequence
  primer
ccagagagttattgcaacatgc

SEQ ID NO: 8650 - DNA, 43 bp, Artificial Sequence
  primer
gtaaaacgacggccagtttatggcttatgagaatttgtttcac

SEQ ID NO: 8651 - DNA, 38 bp, Artificial Sequence
  primer
gtaaaacgacggccagttgcacaggactgttgttcaaa

SEQ ID NO: 8652 - DNA, 21 bp, Artificial Sequence
  primer
cctctttgggaatgatatggc

SEQ ID NO: 8653 - DNA, 38 bp, Artificial Sequence
  primer
gtaaaacgacggccagtaacctcacccacctgtagctc

SEQ ID NO: 8654 - DNA, 21 bp, Artificial Sequence
  primer
gagttgggaaatgaccaggag

SEQ ID NO: 8655 - DNA, 22 bp, Artificial Sequence
  primer
gcagaaggaaatgctgatgaac

SEQ ID NO: 8656 - DNA, 38 bp, Artificial Sequence
  primer
gtaaaacgacggccagttgtcacctcttcgctgttctg

SEQ ID NO: 8657 - DNA, 21 bp, Artificial Sequence
  primer
gaactctggaactgggctgtc

SEQ ID NO: 8658 - DNA, 37 bp, Artificial Sequence
  primer
gtaaaacgacggccagtacccggcaaattctaccctc

SEQ ID NO: 8659 - DNA, 38 bp, Artificial Sequence
  primer
gtaaaacgacggccagtgttccactgcaacttgacctg

SEQ ID NO: 8660 - DNA, 22 bp, Artificial Sequence
  primer
cctgaagtcaagctcctgtctc

SEQ ID NO: 8661 - DNA, 38 bp, Artificial Sequence
  primer
gtaaaacgacggccagttgaggaaggagaggttgtgtg

SEQ ID NO: 8662 - DNA, 20 bp, Artificial Sequence
  primer
tcagaattcctcaagcaggc

SEQ ID NO: 8663 - DNA, 22 bp, Artificial Sequence
  primer
tcccaagtgcttccttgatatg

SEQ ID NO: 8664 - DNA, 21 bp, Artificial Sequence
  primer
atggttgggtttagggatgag

SEQ ID NO: 8665 - DNA, 21 bp, Artificial Sequence
  primer
ggcactaacaccttccatgtc

SEQ ID NO: 8666 - DNA, 27 bp, Artificial Sequence
  primer
aatcacagtattatctaaattgctccc

SEQ ID NO: 8667 - DNA, 38 bp, Artificial Sequence
  primer
gtaaaacgacggccagtcccaaatacctccctctaggc

SEQ ID NO: 8668 - DNA, 39 bp, Artificial Sequence
  primer
gtaaaacgacggccagttctgattgtattgggcacaaag

SEQ ID NO: 8669 - DNA, 41 bp, Artificial Sequence
  primer
gtaaaacgacggccagtaaattctttgagtcagttgccttg

SEQ ID NO: 8670 - DNA, 39 bp, Artificial Sequence
  primer
gtaaaacgacggccagttgagggatagaacactgttggc

SEQ ID NO: 8671 - DNA, 21 bp, Artificial Sequence
  primer
agagaccggatggtgagagat

SEQ ID NO: 8672 - DNA, 26 bp, Artificial Sequence
  primer
tgtaatctcagtcttgaaggctattg

SEQ ID NO: 8673 - DNA, 38 bp, Artificial Sequence
  primer
gtaaaacgacggccagtgcctgagtctgaggtgaacag

SEQ ID NO: 8674 - DNA, 37 bp, Artificial Sequence
  primer
gtaaaacgacggccagtaggtatgagccactgtgccc

SEQ ID NO: 8675 - DNA, 38 bp, Artificial Sequence
  primer
gtaaaacgacggccagtagggataatgcgtgcatactg

SEQ ID NO: 8676 - DNA, 25 bp, Artificial Sequence
  primer
catgtgaatcagacttgttatgctg

SEQ ID NO: 8677 - DNA, 38 bp, Artificial Sequence
  primer
gtaaaacgacggccagttaaaccacttcctttccctgc

SEQ ID NO: 8678 - DNA, 41 bp, Artificial Sequence
  primer
gtaaaacgacggccagttcctggactttgtactcacaactg

SEQ ID NO: 8679 - DNA, 22 bp, Artificial Sequence
  primer
tttcaaacattaccagtgctgc

SEQ ID NO: 8680 - DNA, 38 bp, Artificial Sequence
  primer
gtaaaacgacggccagttgctcaggatgcaatggtaac

SEQ ID NO: 8681 - DNA, 37 bp, Artificial Sequence
  primer
gtaaaacgacggccagtactggaggtggcatttgttc

SEQ ID NO: 8682 - DNA, 28 bp, Artificial Sequence
  primer
ctgtggcttatagtgttaccattattct

SEQ ID NO: 8683 - DNA, 38 bp, Artificial Sequence
  primer
gtaaaacgacggccagttgatgccagtgttggaagaac

SEQ ID NO: 8684 - DNA, 21 bp, Artificial Sequence
  primer
tgcagtccagaggaattatgc

SEQ ID NO: 8685 - DNA, 38 bp, Artificial Sequence
  primer
gtaaaacgacggccagtgagacagtgaactggtctgcg

SEQ ID NO: 8686 - DNA, 38 bp, Artificial Sequence
  primer
gtaaaacgacggccagtagctctcatctctgcctttcc

SEQ ID NO: 8687 - DNA, 38 bp, Artificial Sequence
  primer
gtaaaacgacggccagtatgctgtgaggactgacttgg

SEQ ID NO: 8688 - DNA, 38 bp, Artificial Sequence
  primer
gtaaaacgacggccagttagagaaagggctgttcccag

SEQ ID NO: 8689 - DNA, 38 bp, Artificial Sequence
  primer
gtaaaacgacggccagtcccagtggtgatagaaggtgg

SEQ ID NO: 8690 - DNA, 38 bp, Artificial Sequence
  primer
gtaaaacgacggccagttcctcaaatctgggatatggc

SEQ ID NO: 8691 - DNA, 38 bp, Artificial Sequence
  primer
gtaaaacgacggccagtcctctgttgctgggattaagg

SEQ ID NO: 8692 - DNA, 38 bp, Artificial Sequence
  primer
gtaaaacgacggccagtggccatatgggctatttgttc

SEQ ID NO: 8693 - DNA, 21 bp, Artificial Sequence
  primer
ttccttgcttctccctttcag

SEQ ID NO: 8694 - DNA, 21 bp, Artificial Sequence
  primer
gaggcctagcaggcactttag

SEQ ID NO: 8695 - DNA, 37 bp, Artificial Sequence
  primer
gtaaaacgacggccagtgaagtcctgggagttgggac

SEQ ID NO: 8696 - DNA, 21 bp, Artificial Sequence
  primer
tgcagtgatgggtttgacatc

SEQ ID NO: 8697 - DNA, 21 bp, Artificial Sequence
  primer
taacttccatgtgcaggttgc

SEQ ID NO: 8698 - DNA, 37 bp, Artificial Sequence
  primer
gtaaaacgacggccagtttaaggtctgtgacgcctgc

SEQ ID NO: 8699 - DNA, 41 bp, Artificial Sequence
  primer
gtaaaacgacggccagtaacacaagagatattatgtccggg

SEQ ID NO: 8700 - DNA, 21 bp, Artificial Sequence
  primer
accctgcattcacagcttagg

SEQ ID NO: 8701 - DNA, 38 bp, Artificial Sequence
  primer
gtaaaacgacggccagtatttccgcatgtaccagtgtg

SEQ ID NO: 8702 - DNA, 38 bp, Artificial Sequence
  primer
gtaaaacgacggccagtttgggttccatagacacctcc

SEQ ID NO: 8703 - DNA, 38 bp, Artificial Sequence
  primer
gtaaaacgacggccagtgcaatagtgcaagcagacacc

SEQ ID NO: 8704 - DNA, 21 bp, Artificial Sequence
  primer
ttgaaggcactttgtgtccag

SEQ ID NO: 8705 - DNA, 38 bp, Artificial Sequence
  primer
gtaaaacgacggccagtttaaagaggcctaccaaaggc

SEQ ID NO: 8706 - DNA, 38 bp, Artificial Sequence
  primer
gtaaaacgacggccagtcaaagagcaggtgtttcctcc

SEQ ID NO: 8707 - DNA, 40 bp, Artificial Sequence
  primer
gtaaaacgacggccagtgctgaaagtgcttagtccatttg

SEQ ID NO: 8708 - DNA, 38 bp, Artificial Sequence
  primer
gtaaaacgacggccagtatagcagttccctgaagccac

SEQ ID NO: 8709 - DNA, 38 bp, Artificial Sequence
  primer
gtaaaacgacggccagtcacctctgtctcaccatccag

SEQ ID NO: 8710 - DNA, 20 bp, Artificial Sequence
  primer
ggaattgacctctgccttcc

SEQ ID NO: 8711 - DNA, 38 bp, Artificial Sequence
  primer
gtaaaacgacggccagtatgaatcgctgtgcttcagag

SEQ ID NO: 8712 - DNA, 21 bp, Artificial Sequence
  primer
aggtctccagctttgcattgt

SEQ ID NO: 8713 - DNA, 21 bp, Artificial Sequence
  primer
gaacaaatcttggtgtctggg

SEQ ID NO: 8714 - DNA, 40 bp, Artificial Sequence
  primer
gtaaaacgacggccagtcaaagactcacaacctgcttcac

SEQ ID NO: 8715 - DNA, 21 bp, Artificial Sequence
  primer
ggatgctaacagacccaatcc

SEQ ID NO: 8716 - DNA, 38 bp, Artificial Sequence
  primer
gtaaaacgacggccagttgaatccttcctctgtttggg

SEQ ID NO: 8717 - DNA, 37 bp, Artificial Sequence
  primer
gtaaaacgacggccagttaatggcgtacatggactgg

SEQ ID NO: 8718 - DNA, 21 bp, Artificial Sequence
  primer
aatcatctttcctcgtttggc

SEQ ID NO: 8719 - DNA, 21 bp, Artificial Sequence
  primer
tatggctgttccacgacaaac

SEQ ID NO: 8720 - DNA, 37 bp, Artificial Sequence
  primer
gtaaaacgacggccagtcagggcatcctctctcattg

SEQ ID NO: 8721 - DNA, 36 bp, Artificial Sequence
  primer
gtaaaacgacggccagtcattgtggcatcatgtcgg

SEQ ID NO: 8722 - DNA, 21 bp, Artificial Sequence
  primer
tttgtatcagggcaggtctcc

SEQ ID NO: 8723 - DNA, 40 bp, Artificial Sequence
  primer
gtaaaacgacggccagtctggattcaagattaagggttgg

SEQ ID NO: 8724 - DNA, 38 bp, Artificial Sequence
  primer
gtaaaacgacggccagttgggtttgtcatatgcctctc

SEQ ID NO: 8725 - DNA, 39 bp, Artificial Sequence
  primer
gtaaaacgacggccagttgccttactctctgcatttgtc

SEQ ID NO: 8726 - DNA, 22 bp, Artificial Sequence
  primer
tgtttattccctgtggatggac

SEQ ID NO: 8727 - DNA, 41 bp, Artificial Sequence
  primer
gtaaaacgacggccagtaaacgagagcaatagagaaccttg

SEQ ID NO: 8728 - DNA, 40 bp, Artificial Sequence
  primer
gtaaaacgacggccagttgaaataaaccaagatttgctcc

SEQ ID NO: 8729 - DNA, 36 bp, Artificial Sequence
  primer
gtaaaacgacggccagttctgtgcaacctgtcctgc

SEQ ID NO: 8730 - DNA, 38 bp, Artificial Sequence
  primer
gtaaaacgacggccagtagatgatggcactgacctctg

SEQ ID NO: 8731 - DNA, 22 bp, Artificial Sequence
  primer
tgcttactgcttgagagaaggg

SEQ ID NO: 8732 - DNA, 21 bp, Artificial Sequence
  primer
gggtaagcagcctttctttca

SEQ ID NO: 8733 - DNA, 38 bp, Artificial Sequence
  primer
gtaaaacgacggccagtctctgctttgcagcatttagc

SEQ ID NO: 8734 - DNA, 38 bp, Artificial Sequence
  primer
gtaaaacgacggccagtaatgaatgatggaattgcagg

SEQ ID NO: 8735 - DNA, 38 bp, Artificial Sequence
  primer
gtaaaacgacggccagtgcttagcttcatgcaaactgc

SEQ ID NO: 8736 - DNA, 21 bp, Artificial Sequence
  primer
tctgcctcccatgagctagag

SEQ ID NO: 8737 - DNA, 21 bp, Artificial Sequence
  primer
caatgtccacagaggaacctg

SEQ ID NO: 8738 - DNA, 37 bp, Artificial Sequence
  primer
gtaaaacgacggccagtcccttgaaagggtcttggag

SEQ ID NO: 8739 - DNA, 38 bp, Artificial Sequence
  primer
gtaaaacgacggccagtttgttacggcaaacactttgg

SEQ ID NO: 8740 - DNA, 38 bp, Artificial Sequence
  primer
gtaaaacgacggccagtattgctctggagtgtgacagg

SEQ ID NO: 8741 - DNA, 20 bp, Artificial Sequence
  primer
cagccctctaggcacacatc

SEQ ID NO: 8742 - DNA, 21 bp, Artificial Sequence
  primer
ccactcaccactaccatttcc

SEQ ID NO: 8743 - DNA, 19 bp, Artificial Sequence
  primer
ggctgcttgcccacattac

SEQ ID NO: 8744 - DNA, 21 bp, Artificial Sequence
  primer
tgttcatgaaacattgcttgg

SEQ ID NO: 8745 - DNA, 37 bp, Artificial Sequence
  primer
gtaaaacgacggccagtgagcaaaggacatcgtcagc

SEQ ID NO: 8746 - DNA, 22 bp, Artificial Sequence
  primer
ctggaaggacattcacacatca

SEQ ID NO: 8747 - DNA, 37 bp, Artificial Sequence
  primer
gtaaaacgacggccagtgagagctgtcccggtagctg

SEQ ID NO: 8748 - DNA, 21 bp, Artificial Sequence
  primer
tgtaaatggttcccttcccag

SEQ ID NO: 8749 - DNA, 39 bp, Artificial Sequence
  primer
gtaaaacgacggccagtggaaataaggtgactgggaagc

SEQ ID NO: 8750 - DNA, 40 bp, Artificial Sequence
  primer
gtaaaacgacggccagttcttgacgtataagtgggtttgc

SEQ ID NO: 8751 - DNA, 43 bp, Artificial Sequence
  primer
gtaaaacgacggccagttataactatgcaatttgggtaacatc

SEQ ID NO: 8752 - DNA, 39 bp, Artificial Sequence
  primer
gtaaaacgacggccagttcgctttcatttgattaatggg

SEQ ID NO: 8753 - DNA, 37 bp, Artificial Sequence
  primer
gtaaaacgacggccagttgctgggtgatgataacgtg

SEQ ID NO: 8754 - DNA, 38 bp, Artificial Sequence
  primer
gtaaaacgacggccagtctccaaaggtgctccaaactc

SEQ ID NO: 8755 - DNA, 21 bp, Artificial Sequence
  primer
gcacaaggttctgtcagcaag

SEQ ID NO: 8756 - DNA, 38 bp, Artificial Sequence
  primer
gtaaaacgacggccagtgctataagcaggaagcagcac

SEQ ID NO: 8757 - DNA, 21 bp, Artificial Sequence
  primer
accttattgattcacccgcac

SEQ ID NO: 8758 - DNA, 39 bp, Artificial Sequence
  primer
gtaaaacgacggccagtggaaactccctgcataacattc

SEQ ID NO: 8759 - DNA, 38 bp, Artificial Sequence
  primer
gtaaaacgacggccagtctcttgggacctctcccactc

SEQ ID NO: 8760 - DNA, 20 bp, Artificial Sequence
  primer
atgtgattggccttgagctg

SEQ ID NO: 8761 - DNA, 21 bp, Artificial Sequence
  primer
ggtggtatgggaaagtcatcc

SEQ ID NO: 8762 - DNA, 38 bp, Artificial Sequence
  primer
gtaaaacgacggccagtctgtgtccagggaaggaagtg

SEQ ID NO: 8763 - DNA, 37 bp, Artificial Sequence
  primer
gtaaaacgacggccagtccagcacctgccagagtaag

SEQ ID NO: 8764 - DNA, 38 bp, Artificial Sequence
  primer
gtaaaacgacggccagtaatcagtgcctaagagctggg

SEQ ID NO: 8765 - DNA, 38 bp, Artificial Sequence
  primer
gtaaaacgacggccagtcttgccatgatggacgtgtag

SEQ ID NO: 8766 - DNA, 39 bp, Artificial Sequence
  primer
gtaaaacgacggccagttggtcttcatgcaatagcagtc

SEQ ID NO: 8767 - DNA, 21 bp, Artificial Sequence
  primer
tgcaaaggtcttcaggctacc

SEQ ID NO: 8768 - DNA, 21 bp, Artificial Sequence
  primer
tagcttcatggtggacagtcg

SEQ ID NO: 8769 - DNA, 21 bp, Artificial Sequence
  primer
gaaacaaagagggagtcaggc

SEQ ID NO: 8770 - DNA, 39 bp, Artificial Sequence
  primer
gtaaaacgacggccagtgcatagagagagcttcaatggg

SEQ ID NO: 8771 - DNA, 38 bp, Artificial Sequence
  primer
gtaaaacgacggccagtgccagggctgctatgaataag

SEQ ID NO: 8772 - DNA, 21 bp, Artificial Sequence
  primer
aggcataggctggagagaaag

SEQ ID NO: 8773 - DNA, 21 bp, Artificial Sequence
  primer
gcttcacctctgcctctttcc

SEQ ID NO: 8774 - DNA, 38 bp, Artificial Sequence
  primer
gtaaaacgacggccagtcctgacaaagatcgatgaggg

SEQ ID NO: 8775 - DNA, 21 bp, Artificial Sequence
  primer
gacacaagcttccatgatccc

SEQ ID NO: 8776 - DNA, 38 bp, Artificial Sequence
  primer
gtaaaacgacggccagtaatgcttggcctgagctttag

SEQ ID NO: 8777 - DNA, 38 bp, Artificial Sequence
  primer
gtaaaacgacggccagttcaagcctgagtttcctggac

SEQ ID NO: 8778 - DNA, 21 bp, Artificial Sequence
  primer
ttcgtccctgtgtagctgatg

SEQ ID NO: 8779 - DNA, 38 bp, Artificial Sequence
  primer
gtaaaacgacggccagttagaagccattgtgcttgagg

SEQ ID NO: 8780 - DNA, 38 bp, Artificial Sequence
  primer
gtaaaacgacggccagtcagccttgatgtcagagcttc

SEQ ID NO: 8781 - DNA, 38 bp, Artificial Sequence
  primer
gtaaaacgacggccagtcagacccatgcagggatagac

SEQ ID NO: 8782 - DNA, 38 bp, Artificial Sequence
  primer
gtaaaacgacggccagtccactgtttcttgcctgactg

SEQ ID NO: 8783 - DNA, 21 bp, Artificial Sequence
  primer
gagcttgcatatcttcctggg

SEQ ID NO: 8784 - DNA, 20 bp, Artificial Sequence
  primer
tccaacctggtgacagagtg

SEQ ID NO: 8785 - DNA, 41 bp, Artificial Sequence
  primer
gtaaaacgacggccagtcaaacaagtgtccttacaaactgg

SEQ ID NO: 8786 - DNA, 21 bp, Artificial Sequence
  primer
cagcctaggcaacagagtgag

SEQ ID NO: 8787 - DNA, 21 bp, Artificial Sequence
  primer
ttctgacaaccattccaggtg

SEQ ID NO: 8788 - DNA, 38 bp, Artificial Sequence
  primer
gtaaaacgacggccagtcccaaacattggccttcttac

SEQ ID NO: 8789 - DNA, 21 bp, Artificial Sequence
  primer
atggtgatgcatgcctgtaat

SEQ ID NO: 8790 - DNA, 19 bp, Artificial Sequence
  primer
gcgcctggcctttatttac

SEQ ID NO: 8791 - DNA, 20 bp, Artificial Sequence
  primer
cttacggaaagcaatgcagg

SEQ ID NO: 8792 - DNA, 22 bp, Artificial Sequence
  primer
gcctaggaggttgatactgcac

SEQ ID NO: 8793 - DNA, 38 bp, Artificial Sequence
  primer
gtaaaacgacggccagtccatggaggcttattctaggg

SEQ ID NO: 8794 - DNA, 40 bp, Artificial Sequence
  primer
gtaaaacgacggccagtaagtgataaatgaagctggaggg

SEQ ID NO: 8795 - DNA, 37 bp, Artificial Sequence
  primer
gtaaaacgacggccagtcattggtatgagtgccagcc

SEQ ID NO: 8796 - DNA, 38 bp, Artificial Sequence
  primer
gtaaaacgacggccagtacacctatgaatttgggtggc

SEQ ID NO: 8797 - DNA, 20 bp, Artificial Sequence
  primer
gtccttcgtgcagacctcat

SEQ ID NO: 8798 - DNA, 38 bp, Artificial Sequence
  primer
gtaaaacgacggccagtgctccctatcagagatgacca

SEQ ID NO: 8799 - DNA, 21 bp, Artificial Sequence
  primer
agagttagggagagagccagg

SEQ ID NO: 8800 - DNA, 38 bp, Artificial Sequence
  primer
gtaaaacgacggccagtgccttgcacaacactgactct

SEQ ID NO: 8801 - DNA, 21 bp, Artificial Sequence
  primer
gcaaggaaaggaacaggtgac

SEQ ID NO: 8802 - DNA, 38 bp, Artificial Sequence
  primer
gtaaaacgacggccagtaggacaggccctgaggttatg

SEQ ID NO: 8803 - DNA, 38 bp, Artificial Sequence
  primer
gtaaaacgacggccagtcttggtctgggtcagatttgc

SEQ ID NO: 8804 - DNA, 38 bp, Artificial Sequence
  primer
gtaaaacgacggccagtgactcgagagacagcaacagc

SEQ ID NO: 8805 - DNA, 38 bp, Artificial Sequence
  primer
gtaaaacgacggccagtttagaaggagaagcagccagc

SEQ ID NO: 8806 - DNA, 38 bp, Artificial Sequence
  primer
gtaaaacgacggccagtgtatagcgggtcaggcatttg

SEQ ID NO: 8807 - DNA, 21 bp, Artificial Sequence
  primer
aaggaagggagtcacgttcac

SEQ ID NO: 8808 - DNA, 38 bp, Artificial Sequence
  primer
gtaaaacgacggccagtaccctcaatcccatttccatc

SEQ ID NO: 8809 - DNA, 21 bp, Artificial Sequence
  primer
acacacaagccttcttgtccc

SEQ ID NO: 8810 - DNA, 37 bp, Artificial Sequence
  primer
gtaaaacgacggccagtaagagctggaggaggctgtc

SEQ ID NO: 8811 - DNA, 21 bp, Artificial Sequence
  primer
tatcccttgactcccaccttg

SEQ ID NO: 8812 - DNA, 21 bp, Artificial Sequence
  primer
ctcccagatgaactgtgatgg

SEQ ID NO: 8813 - DNA, 21 bp, Artificial Sequence
  primer
gtgtgtatgtgagagggtggg

SEQ ID NO: 8814 - DNA, 38 bp, Artificial Sequence
  primer
gtaaaacgacggccagtacgcatcctttctttctcctg

SEQ ID NO: 8815 - DNA, 23 bp, Artificial Sequence
  primer
gctgaaacatttccttcaaatcc

SEQ ID NO: 8816 - DNA, 38 bp, Artificial Sequence
  primer
gtaaaacgacggccagtccactctgcaaggagttgagg

SEQ ID NO: 8817 - DNA, 38 bp, Artificial Sequence
  primer
gtaaaacgacggccagttgcatctgacacaaagcaaag

SEQ ID NO: 8818 - DNA, 21 bp, Artificial Sequence
  primer
tgggctggattctagaggaag

SEQ ID NO: 8819 - DNA, 21 bp, Artificial Sequence
  primer
gtttagaatggccctctgtgg

SEQ ID NO: 8820 - DNA, 22 bp, Artificial Sequence
  primer
cactcacgcagcatgtcttatc

SEQ ID NO: 8821 - DNA, 21 bp, Artificial Sequence
  primer
tctccatggcacttcgtgtag

SEQ ID NO: 8822 - DNA, 22 bp, Artificial Sequence
  primer
ggcgttgctatgttgaattagg

SEQ ID NO: 8823 - DNA, 37 bp, Artificial Sequence
  primer
gtaaaacgacggccagttcagctccgaaatgctatgc

SEQ ID NO: 8824 - DNA, 22 bp, Artificial Sequence
  primer
gcccttaaagcgagagattgag

SEQ ID NO: 8825 - DNA, 23 bp, Artificial Sequence
  primer
cgacacccatacaactcaatttc

SEQ ID NO: 8826 - DNA, 37 bp, Artificial Sequence
  primer
gtaaaacgacggccagtcgaacagtaatgccgctttc

SEQ ID NO: 8827 - DNA, 36 bp, Artificial Sequence
  primer
gtaaaacgacggccagtagatgggaatggtggttgg

SEQ ID NO: 8828 - DNA, 21 bp, Artificial Sequence
  primer
ttgcaaatagctccaatgacc

SEQ ID NO: 8829 - DNA, 21 bp, Artificial Sequence
  primer
aggaaagcacaggcattcttc

SEQ ID NO: 8830 - DNA, 38 bp, Artificial Sequence
  primer
gtaaaacgacggccagtactcactggcttgcttcaagg

SEQ ID NO: 8831 - DNA, 23 bp, Artificial Sequence
  primer
aagatcgatttctttgttctgcc

SEQ ID NO: 8832 - DNA, 21 bp, Artificial Sequence
  primer
cgtccttgtccttggatattg

SEQ ID NO: 8833 - DNA, 21 bp, Artificial Sequence
  primer
gaaagcacgtgggaaatcttg

SEQ ID NO: 8834 - DNA, 38 bp, Artificial Sequence
  primer
gtaaaacgacggccagtgtcagaaatttcctgcccaac

SEQ ID NO: 8835 - DNA, 38 bp, Artificial Sequence
  primer
gtaaaacgacggccagtaagatagtcctggcgttcctg

SEQ ID NO: 8836 - DNA, 38 bp, Artificial Sequence
  primer
gtaaaacgacggccagtcaacccaatgtgagtgagctg

SEQ ID NO: 8837 - DNA, 21 bp, Artificial Sequence
  primer
gctactactggaccacagggc

SEQ ID NO: 8838 - DNA, 21 bp, Artificial Sequence
  primer
acgatgctgactcgctatttg

SEQ ID NO: 8839 - DNA, 21 bp, Artificial Sequence
  primer
ccttgtggtcaggtctgtgtc

SEQ ID NO: 8840 - DNA, 37 bp, Artificial Sequence
  primer
gtaaaacgacggccagtcagtgcagtggacatcatgg

SEQ ID NO: 8841 - DNA, 21 bp, Artificial Sequence
  primer
gatacacggtgggaaatggtc

SEQ ID NO: 8842 - DNA, 38 bp, Artificial Sequence
  primer
gtaaaacgacggccagtaggctgggattgtgactgaag

SEQ ID NO: 8843 - DNA, 38 bp, Artificial Sequence
  primer
gtaaaacgacggccagtctgtgtccttcccacccttag

SEQ ID NO: 8844 - DNA, 38 bp, Artificial Sequence
  primer
gtaaaacgacggccagtagaagacaatcctcgtgctcc

SEQ ID NO: 8845 - DNA, 21 bp, Artificial Sequence
  primer
gtcatcaccatctttgccttg

SEQ ID NO: 8846 - DNA, 21 bp, Artificial Sequence
  primer
gaacctggtgacaatgaccac

SEQ ID NO: 8847 - DNA, 38 bp, Artificial Sequence
  primer
gtaaaacgacggccagtgcttggagctgctagtgaacc

SEQ ID NO: 8848 - DNA, 38 bp, Artificial Sequence
  primer
gtaaaacgacggccagtaggatctttgacgttcgcttc

SEQ ID NO: 8849 - DNA, 21 bp, Artificial Sequence
  primer
acctacgtggactggcacttc

SEQ ID NO: 8850 - DNA, 37 bp, Artificial Sequence
  primer
gtaaaacgacggccagtcagttctgggctgctctttg

SEQ ID NO: 8851 - DNA, 38 bp, Artificial Sequence
  primer
gtaaaacgacggccagtgccgagtcagttgtgtgactg

SEQ ID NO: 8852 - DNA, 38 bp, Artificial Sequence
  primer
gtaaaacgacggccagtgtgagctgaatccctaccagg

SEQ ID NO: 8853 - DNA, 38 bp, Artificial Sequence
  primer
gtaaaacgacggccagttacttggagctgaggtgggag

SEQ ID NO: 8854 - DNA, 39 bp, Artificial Sequence
  primer
gtaaaacgacggccagtttgtcatccctaacctactgcc

SEQ ID NO: 8855 - DNA, 21 bp, Artificial Sequence
  primer
tgggttcatagatggtgcttg

SEQ ID NO: 8856 - DNA, 24 bp, Artificial Sequence
  primer
cgtaagatttactaacctgcctcc

SEQ ID NO: 8857 - DNA, 40 bp, Artificial Sequence
  primer
gtaaaacgacggccagtggattgctaacaggttggagaag

SEQ ID NO: 8858 - DNA, 35 bp, Artificial Sequence
  primer
gtaaaacgacggccagtgtgagccacagagccagg

SEQ ID NO: 8859 - DNA, 21 bp, Artificial Sequence
  primer
agggaggactgtacctgttgg

SEQ ID NO: 8860 - DNA, 38 bp, Artificial Sequence
  primer
gtaaaacgacggccagtacgaatttgctctgcagttcc

SEQ ID NO: 8861 - DNA, 21 bp, Artificial Sequence
  primer
gcttctcttcacactgcctgc

SEQ ID NO: 8862 - DNA, 21 bp, Artificial Sequence
  primer
acctggagctcctcatattgg

SEQ ID NO: 8863 - DNA, 24 bp, Artificial Sequence
  primer
aaattctaactccctcagttcagc

SEQ ID NO: 8864 - DNA, 39 bp, Artificial Sequence
  primer
gtaaaacgacggccagtaacagcatgggttgttgatacc

SEQ ID NO: 8865 - DNA, 38 bp, Artificial Sequence
  primer
gtaaaacgacggccagtaatggaaagagcggtatttgg

SEQ ID NO: 8866 - DNA, 37 bp, Artificial Sequence
  primer
gtaaaacgacggccagtccaagattgcaccattgcac

SEQ ID NO: 8867 - DNA, 38 bp, Artificial Sequence
  primer
gtaaaacgacggccagtaaagtgctgggatgggactac

SEQ ID NO: 8868 - DNA, 38 bp, Artificial Sequence
  primer
gtaaaacgacggccagttccagtgttacgatgggtgag

SEQ ID NO: 8869 - DNA, 21 bp, Artificial Sequence
  primer
acgctctaggcaagctacacg

SEQ ID NO: 8870 - DNA, 21 bp, Artificial Sequence
  primer
cccgagatgttatctgggaag

SEQ ID NO: 8871 - DNA, 24 bp, Artificial Sequence
  primer
ttccttgttgtatgcttacttccc

SEQ ID NO: 8872 - DNA, 38 bp, Artificial Sequence
  primer
gtaaaacgacggccagttttaagcgtcatcactacccg

SEQ ID NO: 8873 - DNA, 38 bp, Artificial Sequence
  primer
gtaaaacgacggccagtaagtgatccttccacctcagc

SEQ ID NO: 8874 - DNA, 38 bp, Artificial Sequence
  primer
gtaaaacgacggccagtcgtgcccagccttagaattac

SEQ ID NO: 8875 - DNA, 23 bp, Artificial Sequence
  primer
aaatgttcgacactgaatttgaa

SEQ ID NO: 8876 - DNA, 39 bp, Artificial Sequence
  primer
gtaaaacgacggccagttgcccatagtactgttgattgc

SEQ ID NO: 8877 - DNA, 23 bp, Artificial Sequence
  primer
tttgccttcatgtttgtcttaca

SEQ ID NO: 8878 - DNA, 38 bp, Artificial Sequence
  primer
gtaaaacgacggccagttcattgtgctcaaaggtttcc

SEQ ID NO: 8879 - DNA, 21 bp, Artificial Sequence
  primer
aagtttcagtgggccttgatg

SEQ ID NO: 8880 - DNA, 37 bp, Artificial Sequence
  primer
gtaaaacgacggccagtgaccttgcattgtagccctg

SEQ ID NO: 8881 - DNA, 42 bp, Artificial Sequence
  primer
gtaaaacgacggccagtgatctgaagaggaaatatgatccag

SEQ ID NO: 8882 - DNA, 38 bp, Artificial Sequence
  primer
gtaaaacgacggccagtccctggcttaggttctgacac

SEQ ID NO: 8883 - DNA, 23 bp, Artificial Sequence
  primer
tcactacccgaagatttagggac

SEQ ID NO: 8884 - DNA, 40 bp, Artificial Sequence
  primer
gtaaaacgacggccagttggcacttattacgtgtgtagcc

SEQ ID NO: 8885 - DNA, 41 bp, Artificial Sequence
  primer
gtaaaacgacggccagtcctaaataataaggattgctgggc

SEQ ID NO: 8886 - DNA, 38 bp, Artificial Sequence
  primer
gtaaaacgacggccagtagagcaccaggaataaggtgg

SEQ ID NO: 8887 - DNA, 38 bp, Artificial Sequence
  primer
gtaaaacgacggccagtctcttcacttgcatctccacc

SEQ ID NO: 8888 - DNA, 22 bp, Artificial Sequence
  primer
tcaattctgggaaagtgcctac

SEQ ID NO: 8889 - DNA, 38 bp, Artificial Sequence
  primer
gtaaaacgacggccagttggactttaggctccagcaag

SEQ ID NO: 8890 - DNA, 40 bp, Artificial Sequence
  primer
gtaaaacgacggccagttttccctcaaattagtgtgatcc

SEQ ID NO: 8891 - DNA, 39 bp, Artificial Sequence
  primer
gtaaaacgacggccagtttactgtctcctagtggcaggg

SEQ ID NO: 8892 - DNA, 38 bp, Artificial Sequence
  primer
gtaaaacgacggccagtccacagtggagaagctcagtg

SEQ ID NO: 8893 - DNA, 38 bp, Artificial Sequence
  primer
gtaaaacgacggccagtggcctctgctgcaatcttaac

SEQ ID NO: 8894 - DNA, 38 bp, Artificial Sequence
  primer
gtaaaacgacggccagtgggtcctcatttccatcacac

SEQ ID NO: 8895 - DNA, 22 bp, Artificial Sequence
  primer
tcagcattatgtttcaactggc

SEQ ID NO: 8896 - DNA, 38 bp, Artificial Sequence
  primer
gtaaaacgacggccagtgtgttagagcccttggtttgg

SEQ ID NO: 8897 - DNA, 40 bp, Artificial Sequence
  primer
gtaaaacgacggccagttgctaatgattgagtggaaacag

SEQ ID NO: 8898 - DNA, 23 bp, Artificial Sequence
  primer
ggttgacaattccagagtcttcc

SEQ ID NO: 8899 - DNA, 39 bp, Artificial Sequence
  primer
gtaaaacgacggccagtaataagcagggcagcatgtatc

SEQ ID NO: 8900 - DNA, 20 bp, Artificial Sequence
  primer
ttgggtgactctccctgatg

SEQ ID NO: 8901 - DNA, 38 bp, Artificial Sequence
  primer
gtaaaacgacggccagtaccggtttcctcaggtatttg

SEQ ID NO: 8902 - DNA, 38 bp, Artificial Sequence
  primer
gtaaaacgacggccagtctcaagacacacagactgccc

SEQ ID NO: 8903 - DNA, 36 bp, Artificial Sequence
  primer
gtaaaacgacggccagtccaggctagccaccttgag

SEQ ID NO: 8904 - DNA, 38 bp, Artificial Sequence
  primer
gtaaaacgacggccagtggagctgcttgtatttctggg

SEQ ID NO: 8905 - DNA, 19 bp, Artificial Sequence
  primer
actgtgcccagcccaatag

SEQ ID NO: 8906 - DNA, 21 bp, Artificial Sequence
  primer
tgcagaccagaggtgaaacag

SEQ ID NO: 8907 - DNA, 21 bp, Artificial Sequence
  primer
gccctagccctactgtaatcg

SEQ ID NO: 8908 - DNA, 38 bp, Artificial Sequence
  primer
gtaaaacgacggccagtctgctcagaggatgtgcagtg

SEQ ID NO: 8909 - DNA, 39 bp, Artificial Sequence
  primer
gtaaaacgacggccagttgcataacgggataatacctgg

SEQ ID NO: 8910 - DNA, 21 bp, Artificial Sequence
  primer
ctgtcacagtccatttcaggg

SEQ ID NO: 8911 - DNA, 22 bp, Artificial Sequence
  primer
ggataggcatgcgaaatagttg

SEQ ID NO: 8912 - DNA, 21 bp, Artificial Sequence
  primer
ccgagaaatcactgccaaatc

SEQ ID NO: 8913 - DNA, 38 bp, Artificial Sequence
  primer
gtaaaacgacggccagtttggtctgaggtcgtaggatg

SEQ ID NO: 8914 - DNA, 21 bp, Artificial Sequence
  primer
aatttgaccaggaggatggtg

SEQ ID NO: 8915 - DNA, 36 bp, Artificial Sequence
  primer
gtaaaacgacggccagtaaatgttgctccaccctgg

SEQ ID NO: 8916 - DNA, 21 bp, Artificial Sequence
  primer
gtccctgtcatgggtatgagg

SEQ ID NO: 8917 - DNA, 38 bp, Artificial Sequence
  primer
gtaaaacgacggccagtcaccttcatacagggttggtg

SEQ ID NO: 8918 - DNA, 21 bp, Artificial Sequence
  primer
tacaagccgtgaaccacagag

SEQ ID NO: 8919 - DNA, 38 bp, Artificial Sequence
  primer
gtaaaacgacggccagtttcctgtggcttgcataaatc

SEQ ID NO: 8920 - DNA, 21 bp, Artificial Sequence
  primer
tcgaaatgacatggctgaaag

SEQ ID NO: 8921 - DNA, 22 bp, Artificial Sequence
  primer
aaacagcatgaagttgaaatgc

SEQ ID NO: 8922 - DNA, 21 bp, Artificial Sequence
  primer
acactccagtgtcatgcttgg

SEQ ID NO: 8923 - DNA, 21 bp, Artificial Sequence
  primer
acttcacaggctgttgttccc

SEQ ID NO: 8924 - DNA, 38 bp, Artificial Sequence
  primer
gtaaaacgacggccagtgttctggatccttctcctccc

SEQ ID NO: 8925 - DNA, 21 bp, Artificial Sequence
  primer
cggcctacaagtttccatctt

SEQ ID NO: 8926 - DNA, 38 bp, Artificial Sequence
  primer
gtaaaacgacggccagtctacccactgtcctctcaccc

SEQ ID NO: 8927 - DNA, 21 bp, Artificial Sequence
  primer
caggccagggagaatatgaag

SEQ ID NO: 8928 - DNA, 37 bp, Artificial Sequence
  primer
gtaaaacgacggccagtgcatcattaatgcactgccc

SEQ ID NO: 8929 - DNA, 19 bp, Artificial Sequence
  primer
cgtgaactatcacgcctgg

SEQ ID NO: 8930 - DNA, 21 bp, Artificial Sequence
  primer
gcagtgactctgccttcacag

SEQ ID NO: 8931 - DNA, 40 bp, Artificial Sequence
  primer
gtaaaacgacggccagttgtgtatattcactgcccaggag

SEQ ID NO: 8932 - DNA, 21 bp, Artificial Sequence
  primer
agaagtgatttgcagcccttg

SEQ ID NO: 8933 - DNA, 37 bp, Artificial Sequence
  primer
gtaaaacgacggccagtggtcttaggaggcaggtccc

SEQ ID NO: 8934 - DNA, 38 bp, Artificial Sequence
  primer
gtaaaacgacggccagtgcttccagggactttgaacac

SEQ ID NO: 8935 - DNA, 38 bp, Artificial Sequence
  primer
gtaaaacgacggccagttggccctgtaggtggtatagg

SEQ ID NO: 8936 - DNA, 37 bp, Artificial Sequence
  primer
gtaaaacgacggccagtagactcagtgcctgtcctgg

SEQ ID NO: 8937 - DNA, 21 bp, Artificial Sequence
  primer
ttctctgtcttccttcctggc

SEQ ID NO: 8938 - DNA, 38 bp, Artificial Sequence
  primer
gtaaaacgacggccagtggtggctctactcattcccag

SEQ ID NO: 8939 - DNA, 22 bp, Artificial Sequence
  primer
ccagtacacacctgttcatccc

SEQ ID NO: 8940 - DNA, 20 bp, Artificial Sequence
  primer
agggtccagaacatgggaag

SEQ ID NO: 8941 - DNA, 21 bp, Artificial Sequence
  primer
tctgcggagtcatgctcttag

SEQ ID NO: 8942 - DNA, 38 bp, Artificial Sequence
  primer
gtaaaacgacggccagtacccatttcctgctgagctac

SEQ ID NO: 8943 - DNA, 37 bp, Artificial Sequence
  primer
gtaaaacgacggccagtttccagatcagagactgccc

SEQ ID NO: 8944 - DNA, 38 bp, Artificial Sequence
  primer
gtaaaacgacggccagtgtggtggtaacttccgtctcc

SEQ ID NO: 8945 - DNA, 21 bp, Artificial Sequence
  primer
ttacctcacatctgtgccagg

SEQ ID NO: 8946 - DNA, 40 bp, Artificial Sequence
  primer
gtaaaacgacggccagtgggaagttgtgtgaatagctttg

SEQ ID NO: 8947 - DNA, 27 bp, Artificial Sequence
  primer
acacatttgtactttactttagccagc

SEQ ID NO: 8948 - DNA, 43 bp, Artificial Sequence
  primer
gtaaaacgacggccagtcatcctgaactagtttgaaattgtga

SEQ ID NO: 8949 - DNA, 21 bp, Artificial Sequence
  primer
gtgggctatcactgtgtcgag

SEQ ID NO: 8950 - DNA, 39 bp, Artificial Sequence
  primer
gtaaaacgacggccagttttggaattgaccttcaggaac

SEQ ID NO: 8951 - DNA, 38 bp, Artificial Sequence
  primer
gtaaaacgacggccagtggaatgcaattcactttgcac

SEQ ID NO: 8952 - DNA, 21 bp, Artificial Sequence
  primer
cttggactgggacccttacac

SEQ ID NO: 8953 - DNA, 39 bp, Artificial Sequence
  primer
gtaaaacgacggccagttggagtactgaagtgtgggttg

SEQ ID NO: 8954 - DNA, 40 bp, Artificial Sequence
  primer
gtaaaacgacggccagttcgctgggagtagaatgattatg

SEQ ID NO: 8955 - DNA, 38 bp, Artificial Sequence
  primer
gtaaaacgacggccagtcagtctgtgaagcaccagagg

SEQ ID NO: 8956 - DNA, 37 bp, Artificial Sequence
  primer
gtaaaacgacggccagtaaatccaaagcacctcctgg

SEQ ID NO: 8957 - DNA, 38 bp, Artificial Sequence
  primer
gtaaaacgacggccagtttcacagagtgcatacctggg

SEQ ID NO: 8958 - DNA, 20 bp, Artificial Sequence
  primer
atggagtttcaccgtgttgc

SEQ ID NO: 8959 - DNA, 35 bp, Artificial Sequence
  primer
gtaaaacgacggccagtatcgcgctatcgcactcc

SEQ ID NO: 8960 - DNA, 21 bp, Artificial Sequence
  primer
agcgcctgtacaaagcaattc

SEQ ID NO: 8961 - DNA, 38 bp, Artificial Sequence
  primer
gtaaaacgacggccagtcggtaggattgtctttctggc

SEQ ID NO: 8962 - DNA, 21 bp, Artificial Sequence
  primer
accatcattgttgctgaatgg

SEQ ID NO: 8963 - DNA, 21 bp, Artificial Sequence
  primer
gatagatctccatgcttgggc

SEQ ID NO: 8964 - DNA, 38 bp, Artificial Sequence
  primer
gtaaaacgacggccagtcctttaatgttcctgggttgg

SEQ ID NO: 8965 - DNA, 40 bp, Artificial Sequence
  primer
gtaaaacgacggccagtaatctttccttaacctgagaccg

SEQ ID NO: 8966 - DNA, 38 bp, Artificial Sequence
  primer
gtaaaacgacggccagtccatcattacatggagcactg

SEQ ID NO: 8967 - DNA, 21 bp, Artificial Sequence
  primer
tctgttgcttgacccatcatc

SEQ ID NO: 8968 - DNA, 38 bp, Artificial Sequence
  primer
gtaaaacgacggccagtatttgtggaccggacagattc

SEQ ID NO: 8969 - DNA, 21 bp, Artificial Sequence
  primer
cttggactgggacccttacac

SEQ ID NO: 8970 - DNA, 38 bp, Artificial Sequence
  primer
gtaaaacgacggccagtttagggtcttgacacaggacg

SEQ ID NO: 8971 - DNA, 38 bp, Artificial Sequence
  primer
gtaaaacgacggccagtgaggaagatggaacagggatg

SEQ ID NO: 8972 - DNA, 38 bp, Artificial Sequence
  primer
gtaaaacgacggccagtggagatgggagagtagggacc

SEQ ID NO: 8973 - DNA, 38 bp, Artificial Sequence
  primer
gtaaaacgacggccagtgaggtggagaaactgctcctg

SEQ ID NO: 8974 - DNA, 21 bp, Artificial Sequence
  primer
agggtagtgcacacacacagg

SEQ ID NO: 8975 - DNA, 38 bp, Artificial Sequence
  primer
gtaaaacgacggccagtacaggcacacacgcaatagac

SEQ ID NO: 8976 - DNA, 37 bp, Artificial Sequence
  primer
gtaaaacgacggccagtaagggacctgtggaggtgag

SEQ ID NO: 8977 - DNA, 21 bp, Artificial Sequence
  primer
tgttggcatgtgcctgtagtc

SEQ ID NO: 8978 - DNA, 21 bp, Artificial Sequence
  primer
ccttatgcctctcccactacg

SEQ ID NO: 8979 - DNA, 38 bp, Artificial Sequence
  primer
gtaaaacgacggccagtcagagcctcctgatccatttc

SEQ ID NO: 8980 - DNA, 38 bp, Artificial Sequence
  primer
gtaaaacgacggccagtgccagtttagagcagctggag

SEQ ID NO: 8981 - DNA, 37 bp, Artificial Sequence
  primer
gtaaaacgacggccagtctttctggagtcctgccctc

SEQ ID NO: 8982 - DNA, 20 bp, Artificial Sequence
  primer
ccaaacgctggcacatagac

SEQ ID NO: 8983 - DNA, 21 bp, Artificial Sequence
  primer
attgccaggtctggaagtgag

SEQ ID NO: 8984 - DNA, 38 bp, Artificial Sequence
  primer
gtaaaacgacggccagtatgtagcaaccactggtgcag

SEQ ID NO: 8985 - DNA, 38 bp, Artificial Sequence
  primer
gtaaaacgacggccagtcaaatctgggtatttccctgc

SEQ ID NO: 8986 - DNA, 22 bp, Artificial Sequence
  primer
ccagggctccatattcctagtc

SEQ ID NO: 8987 - DNA, 38 bp, Artificial Sequence
  primer
gtaaaacgacggccagtagcaaaggaaagcaaagaagc

SEQ ID NO: 8988 - DNA, 21 bp, Artificial Sequence
  primer
gcagggccagtaggtgtttac

SEQ ID NO: 8989 - DNA, 38 bp, Artificial Sequence
  primer
gtaaaacgacggccagtatctggagatcagcacttggg

SEQ ID NO: 8990 - DNA, 21 bp, Artificial Sequence
  primer
gtgggaacacagttccagctc

SEQ ID NO: 8991 - DNA, 22 bp, Artificial Sequence
  primer
gcccgagagctagaattgaatc

SEQ ID NO: 8992 - DNA, 38 bp, Artificial Sequence
  primer
gtaaaacgacggccagtgtgcagaacaaacaccaggtc

SEQ ID NO: 8993 - DNA, 38 bp, Artificial Sequence
  primer
gtaaaacgacggccagttacactctgcttcctgccaag

SEQ ID NO: 8994 - DNA, 43 bp, Artificial Sequence
  primer
gtaaaacgacggccagttttatttatttgcatctttgcatctt

SEQ ID NO: 8995 - DNA, 21 bp, Artificial Sequence
  primer
aagcttgtttcctcctcttgc

SEQ ID NO: 8996 - DNA, 23 bp, Artificial Sequence
  primer
tcatttaccaatgtcttgctgac

SEQ ID NO: 8997 - DNA, 38 bp, Artificial Sequence
  primer
gtaaaacgacggccagtgggtggagatggatggttaaa

SEQ ID NO: 8998 - DNA, 38 bp, Artificial Sequence
  primer
gtaaaacgacggccagttagtgtctccagccagtgctc

SEQ ID NO: 8999 - DNA, 21 bp, Artificial Sequence
  primer
tgacatggcttcggttctatt

SEQ ID NO: 9000 - DNA, 37 bp, Artificial Sequence
  primer
gtaaaacgacggccagttttacctttcggtctctgcc

SEQ ID NO: 9001 - DNA, 38 bp, Artificial Sequence
  primer
gtaaaacgacggccagtgattcctgccgtaagcacttg

SEQ ID NO: 9002 - DNA, 23 bp, Artificial Sequence
  primer
ttaaagcagagagccatgagttt

SEQ ID NO: 9003 - DNA, 38 bp, Artificial Sequence
  primer
gtaaaacgacggccagtaatctgcctcacttcctggag

SEQ ID NO: 9004 - DNA, 38 bp, Artificial Sequence
  primer
gtaaaacgacggccagttcagttcagcattcccatttg

SEQ ID NO: 9005 - DNA, 38 bp, Artificial Sequence
  primer
gtaaaacgacggccagtatctgcaggaactgatgatgg

SEQ ID NO: 9006 - DNA, 21 bp, Artificial Sequence
  primer
acagtcaacaggttctgctgc

SEQ ID NO: 9007 - DNA, 22 bp, Artificial Sequence
  primer
aagccggatgacaaatatgatg

SEQ ID NO: 9008 - DNA, 38 bp, Artificial Sequence
  primer
gtaaaacgacggccagtgccaactcaaggctaatgtgg

SEQ ID NO: 9009 - DNA, 21 bp, Artificial Sequence
  primer
gacagggatgatgcaactcag

SEQ ID NO: 9010 - DNA, 37 bp, Artificial Sequence
  primer
gtaaaacgacggccagtgtcctctcagcaggaagtgg

SEQ ID NO: 9011 - DNA, 38 bp, Artificial Sequence
  primer
gtaaaacgacggccagtgaagagggttgtggtagcgag

SEQ ID NO: 9012 - DNA, 22 bp, Artificial Sequence
  primer
cctccaagcactttgaattgac

SEQ ID NO: 9013 - DNA, 38 bp, Artificial Sequence
  primer
gtaaaacgacggccagttggaggattgtttcttcaagg

SEQ ID NO: 9014 - DNA, 21 bp, Artificial Sequence
  primer
cagcattgagaagtggattgg

SEQ ID NO: 9015 - DNA, 39 bp, Artificial Sequence
  primer
gtaaaacgacggccagttggatgtgtgggaggttaattc

SEQ ID NO: 9016 - DNA, 38 bp, Artificial Sequence
  primer
gtaaaacgacggccagtggtaggagcagacacattccc

SEQ ID NO: 9017 - DNA, 38 bp, Artificial Sequence
  primer
gtaaaacgacggccagtcagcctctgtgacctggagag

SEQ ID NO: 9018 - DNA, 21 bp, Artificial Sequence
  primer
cttacttccgggatgcttctg

SEQ ID NO: 9019 - DNA, 36 bp, Artificial Sequence
  primer
gtaaaacgacggccagtatagtggccatgaccggag

SEQ ID NO: 9020 - DNA, 38 bp, Artificial Sequence
  primer
gtaaaacgacggccagtttggaccaggagctttgtagc

SEQ ID NO: 9021 - DNA, 38 bp, Artificial Sequence
  primer
gtaaaacgacggccagtaatgtgtgcaagcgttcattc

SEQ ID NO: 9022 - DNA, 38 bp, Artificial Sequence
  primer
gtaaaacgacggccagtaaatgtcaaggccagaagctg

SEQ ID NO: 9023 - DNA, 38 bp, Artificial Sequence
  primer
gtaaaacgacggccagtttagccacagctgggactctc

SEQ ID NO: 9024 - DNA, 19 bp, Artificial Sequence
  primer
gtgggttgcaggtggtagg

SEQ ID NO: 9025 - DNA, 36 bp, Artificial Sequence
  primer
gtaaaacgacggccagtcacacctgggcagatggtc

SEQ ID NO: 9026 - DNA, 38 bp, Artificial Sequence
  primer
gtaaaacgacggccagttgggtagtgcctggagaagtg

SEQ ID NO: 9027 - DNA, 38 bp, Artificial Sequence
  primer
gtaaaacgacggccagtgggtgagtggtcagtctctgc

SEQ ID NO: 9028 - DNA, 38 bp, Artificial Sequence
  primer
gtaaaacgacggccagtcccagcaggaaagattaaggg

SEQ ID NO: 9029 - DNA, 38 bp, Artificial Sequence
  primer
gtaaaacgacggccagttgcgctacctgaagatcattg

SEQ ID NO: 9030 - DNA, 21 bp, Artificial Sequence
  primer
tgaagtcgcagtacctctccc

SEQ ID NO: 9031 - DNA, 37 bp, Artificial Sequence
  primer
gtaaaacgacggccagtgaagtagggtcagaaccggg

SEQ ID NO: 9032 - DNA, 38 bp, Artificial Sequence
  primer
gtaaaacgacggccagtcatctctgtggcttaggctgg

SEQ ID NO: 9033 - DNA, 21 bp, Artificial Sequence
  primer
accttaagtgatcctcgtgcc

SEQ ID NO: 9034 - DNA, 38 bp, Artificial Sequence
  primer
gtaaaacgacggccagtgtgggtgtaaggaactggagg

SEQ ID NO: 9035 - DNA, 36 bp, Artificial Sequence
  primer
gtaaaacgacggccagtgtcaacctgctggtgagcc

SEQ ID NO: 9036 - DNA, 21 bp, Artificial Sequence
  primer
aaataggtgacagtggtcggc

SEQ ID NO: 9037 - DNA, 21 bp, Artificial Sequence
  primer
ctttagtccaggaggtgcagg

SEQ ID NO: 9038 - DNA, 19 bp, Artificial Sequence
  primer
gagcttacagccagccgag

SEQ ID NO: 9039 - DNA, 38 bp, Artificial Sequence
  primer
gtaaaacgacggccagtgtctgtgaaatgggctgtgag

SEQ ID NO: 9040 - DNA, 38 bp, Artificial Sequence
  primer
gtaaaacgacggccagtaccggcttgttcacttctgtc

SEQ ID NO: 9041 - DNA, 37 bp, Artificial Sequence
  primer
gtaaaacgacggccagtaggtgtgcaccatcataccc

SEQ ID NO: 9042 - DNA, 38 bp, Artificial Sequence
  primer
gtaaaacgacggccagtccaatgactaaggcttggagg

SEQ ID NO: 9043 - DNA, 38 bp, Artificial Sequence
  primer
gtaaaacgacggccagtgactcttcctcgtgactgctg

SEQ ID NO: 9044 - DNA, 18 bp, Artificial Sequence
  primer
atggtttccgcttctccg

SEQ ID NO: 9045 - DNA, 21 bp, Artificial Sequence
  primer
ttgaacccagctgacagactc

SEQ ID NO: 9046 - DNA, 38 bp, Artificial Sequence
  primer
gtaaaacgacggccagtaagacagcacaaagaggcagg

SEQ ID NO: 9047 - DNA, 38 bp, Artificial Sequence; identical to SEQ ID NO: 9042
  primer

SEQ ID NO: 9048 - DNA, 38 bp, Artificial Sequence
  primer
gtaaaacgacggccagtgaggagatgggtttggcatag

SEQ ID NO: 9049 - DNA, 42 bp, Artificial Sequence
  primer
gtaaaacgacggccagtttggcatagaaatattgatggctac

SEQ ID NO: 9050 - DNA, 20 bp, Artificial Sequence
  primer
aacctgaaaggaagaagggc

SEQ ID NO: 9051 - DNA, 22 bp, Artificial Sequence
  primer
gcagagcccagtcttatttagc

SEQ ID NO: 9052 - DNA, 39 bp, Artificial Sequence
  primer
gtaaaacgacggccagtccctaaataaccaatggctgtc

SEQ ID NO: 9053 - DNA, 37 bp, Artificial Sequence
  primer
gtaaaacgacggccagtaagcagccatggtctaagcc

SEQ ID NO: 9054 - DNA, 26 bp, Artificial Sequence
  primer
tctttctgtgtaaatccatcattgaa

SEQ ID NO: 9055 - DNA, 38 bp, Artificial Sequence
  primer
gtaaaacgacggccagtgaggtgactgcatattcgtgg

SEQ ID NO: 9056 - DNA, 21 bp, Artificial Sequence
  primer
ttcagggatttcaggttgttg

SEQ ID NO: 9057 - DNA, 36 bp, Artificial Sequence
  primer
gtaaaacgacggccagtgcaggagctcaagccagtg

SEQ ID NO: 9058 - DNA, 21 bp, Artificial Sequence
  primer
ctctttgaaactcccagccag

SEQ ID NO: 9059 - DNA, 38 bp, Artificial Sequence
  primer
gtaaaacgacggccagtcaagttcaaaggtaggctggg

SEQ ID NO: 9060 - DNA, 38 bp, Artificial Sequence
  primer
gtaaaacgacggccagttcctgggtctgaggttgaatc

SEQ ID NO: 9061 - DNA, 20 bp, Artificial Sequence
  primer
atcttcccgactgcacacac

SEQ ID NO: 9062 - DNA, 38 bp, Artificial Sequence
  primer
gtaaaacgacggccagtttaacactgacagcactgccc

SEQ ID NO: 9063 - DNA, 21 bp, Artificial Sequence
  primer
tcctttggaagacaggagctg

SEQ ID NO: 9064 - DNA, 38 bp, Artificial Sequence
  primer
gtaaaacgacggccagtgttaagacctggatccttggg

SEQ ID NO: 9065 - DNA, 21 bp, Artificial Sequence
  primer
gaaagaccagaggctcagagg

SEQ ID NO: 9066 - DNA, 19 bp, Artificial Sequence
  primer
gagcccagatccaggtgag

SEQ ID NO: 9067 - DNA, 38 bp, Artificial Sequence
  primer
gtaaaacgacggccagtgcagcagagctttcagtgttc

SEQ ID NO: 9068 - DNA, 21 bp, Artificial Sequence
  primer
ggatcgtggacagagtgtgac

SEQ ID NO: 9069 - DNA, 21 bp, Artificial Sequence
  primer
gtggagtacctcaccctcagc

SEQ ID NO: 9070 - DNA, 36 bp, Artificial Sequence
  primer
gtaaaacgacggccagtagcagcaacgacatcaacg

SEQ ID NO: 9071 - DNA, 21 bp, Artificial Sequence
  primer
cctttcctgtcaccgtttctc

SEQ ID NO: 9072 - DNA, 37 bp, Artificial Sequence
  primer
gtaaaacgacggccagtgttctcgcactcaatcgctc

SEQ ID NO: 9073 - DNA, 21 bp, Artificial Sequence
  primer
aagtgagtcctgggagtggtg

SEQ ID NO: 9074 - DNA, 21 bp, Artificial Sequence
  primer
tgcagatcggagtcaagtcag

SEQ ID NO: 9075 - DNA, 38 bp, Artificial Sequence
  primer
gtaaaacgacggccagtggattgagtccaggattgcac

SEQ ID NO: 9076 - DNA, 20 bp, Artificial Sequence
  primer
ctcaatatcgagtgcctgcg

SEQ ID NO: 9077 - DNA, 38 bp, Artificial Sequence
  primer
gtaaaacgacggccagtatcaacaagttcttccagccc

SEQ ID NO: 9078 - DNA, 21 bp, Artificial Sequence
  primer
cctatggctgctttgcttctc

SEQ ID NO: 9079 - DNA, 38 bp, Artificial Sequence
  primer
gtaaaacgacggccagtccttctatctcccttgggtcc

SEQ ID NO: 9080 - DNA, 21 bp, Artificial Sequence
  primer
tcatcccattcgtgagttctg

SEQ ID NO: 9081 - DNA, 19 bp, Artificial Sequence
  primer
ctgtactgctgcactgccc

SEQ ID NO: 9082 - DNA, 38 bp, Artificial Sequence
  primer
gtaaaacgacggccagttgtgtcactgattgttgggtg

SEQ ID NO: 9083 - DNA, 19 bp, Artificial Sequence
  primer
tgagaacactgctgctgcc

SEQ ID NO: 9084 - DNA, 21 bp, Artificial Sequence
  primer
tgtgctgctggttggtttaag

SEQ ID NO: 9085 - DNA, 38 bp, Artificial Sequence
  primer
gtaaaacgacggccagttgacccgaggagtgagtatgg

SEQ ID NO: 9086 - DNA, 38 bp, Artificial Sequence
  primer
gtaaaacgacggccagttgctctcatgatgtatgggtg

SEQ ID NO: 9087 - DNA, 19 bp, Artificial Sequence
  primer
gggaacgcagactctgtcc

SEQ ID NO: 9088 - DNA, 38 bp, Artificial Sequence
  primer
gtaaaacgacggccagtgagggaaactcagagtgggtg

SEQ ID NO: 9089 - DNA, 39 bp, Artificial Sequence
  primer
gtaaaacgacggccagttcactttgactttggacgacag

SEQ ID NO: 9090 - DNA, 38 bp, Artificial Sequence
  primer
gtaaaacgacggccagttgctgacacaggtactgaggg

SEQ ID NO: 9091 - DNA, 21 bp, Artificial Sequence
  primer
atctggagctggaagagggtc

SEQ ID NO: 9092 - DNA, 37 bp, Artificial Sequence
  primer
gtaaaacgacggccagtagcgtgctgtggagtacctg

SEQ ID NO: 9093 - DNA, 21 bp, Artificial Sequence
  primer
agtggctgttagccctcactc

SEQ ID NO: 9094 - DNA, 21 bp, Artificial Sequence
  primer
ttcttcccttgtgtgccatag

SEQ ID NO: 9095 - DNA, 21 bp, Artificial Sequence
  primer
tctgactggaggagatacccg

SEQ ID NO: 9096 - DNA, 38 bp, Artificial Sequence
  primer
gtaaaacgacggccagttggtggtcctagagtgtggtg

SEQ ID NO: 9097 - DNA, 38 bp, Artificial Sequence
  primer
gtaaaacgacggccagtttctcactccaggctctttcc

SEQ ID NO: 9098 - DNA, 38 bp, Artificial Sequence
  primer
gtaaaacgacggccagttcaacgttggaagcagttgag

SEQ ID NO: 9099 - DNA, 38 bp, Artificial Sequence
  primer
gtaaaacgacggccagtaagccaaggtaacacgtctgg

SEQ ID NO: 9100 - DNA, 38 bp, Artificial Sequence
  primer
gtaaaacgacggccagtctgacagtgtgtgtggtgctc

SEQ ID NO: 9101 - DNA, 38 bp, Artificial Sequence
  primer
gtaaaacgacggccagtcatcaacggtggtgataaagg

SEQ ID NO: 9102 - DNA, 38 bp, Artificial Sequence
  primer
gtaaaacgacggccagtttagttgctgccctgctatcc

SEQ ID NO: 9103 - DNA, 21 bp, Artificial Sequence
  primer
gtgcccagccagtttctttag

SEQ ID NO: 9104 - DNA, 41 bp, Artificial Sequence
  primer
gtaaaacgacggccagtttgcagcttacataaactggactg

SEQ ID NO: 9105 - DNA, 38 bp, Artificial Sequence
  primer
gtaaaacgacggccagtgagatccgtgaaatgacccag

SEQ ID NO: 9106 - DNA, 42 bp, Artificial Sequence
  primer
gtaaaacgacggccagtggccattagactctgacatattacc

SEQ ID NO: 9107 - DNA, 38 bp, Artificial Sequence
  primer
gtaaaacgacggccagtgaggagagcagagaggcacag

SEQ ID NO: 9108 - DNA, 38 bp, Artificial Sequence
  primer
gtaaaacgacggccagttggcctttaaagaagctaggc

SEQ ID NO: 9109 - DNA, 23 bp, Artificial Sequence
  primer
aagtgcctgatcatttagtttgg

SEQ ID NO: 9110 - DNA, 21 bp, Artificial Sequence
  primer
tttagggtcccttgtttgtgg

SEQ ID NO: 9111 - DNA, 42 bp, Artificial Sequence
  primer
gtaaaacgacggccagtggctccatagtaattcatagttggg

SEQ ID NO: 9112 - DNA, 21 bp, Artificial Sequence
  primer
aatccagcagtttgggtttct

SEQ ID NO: 9113 - DNA, 38 bp, Artificial Sequence
  primer
gtaaaacgacggccagttgtttcactgttgttgcgatg

SEQ ID NO: 9114 - DNA, 21 bp, Artificial Sequence
  primer
tgaatggcatgtatttccagc

SEQ ID NO: 9115 - DNA, 27 bp, Artificial Sequence
  primer
cttgataaagcttctaaagaatgtgtg

SEQ ID NO: 9116 - DNA, 20 bp, Artificial Sequence
  primer
aggtagagcagaagccaggg

SEQ ID NO: 9117 - DNA, 20 bp, Artificial Sequence
  primer
gtgattcacccacctcagcc

SEQ ID NO: 9118 - DNA, 21 bp, Artificial Sequence
  primer
tgtgctttgcagtatatgggc

SEQ ID NO: 9119 - DNA, 38 bp, Artificial Sequence
  primer
gtaaaacgacggccagtagcctgctgctagctgtattg

SEQ ID NO: 9120 - DNA, 21 bp, Artificial Sequence
  primer
ggaactgaacacacatggctc

SEQ ID NO: 9121 - DNA, 21 bp, Artificial Sequence
  primer
acccacatggaatggaggtag

SEQ ID NO: 9122 - DNA, 37 bp, Artificial Sequence
  primer
gtaaaacgacggccagtatgttggcagcgattctgag

SEQ ID NO: 9123 - DNA, 38 bp, Artificial Sequence
  primer
gtaaaacgacggccagttggctttctttggagtgtgtg

SEQ ID NO: 9124 - DNA, 39 bp, Artificial Sequence
  primer
gtaaaacgacggccagtcagatgtgtaggcccaagtagg

SEQ ID NO: 9125 - DNA, 38 bp, Artificial Sequence
  primer
gtaaaacgacggccagtgcagctttgctttgtttctcc

SEQ ID NO: 9126 - DNA, 38 bp, Artificial Sequence
  primer
gtaaaacgacggccagtgaggtccctctcacgacaaag

SEQ ID NO: 9127 - DNA, 20 bp, Artificial Sequence
  primer
catagtctctggtgccagcc

SEQ ID NO: 9128 - DNA, 38 bp, Artificial Sequence
  primer
gtaaaacgacggccagtaacgcagcatcagctttatcc

SEQ ID NO: 9129 - DNA, 21 bp, Artificial Sequence
  primer
gaagatcgaggtgaggacagg

SEQ ID NO: 9130 - DNA, 21 bp, Artificial Sequence
  primer
acttctccttgttctggcacc

SEQ ID NO: 9131 - DNA, 38 bp, Artificial Sequence
  primer
gtaaaacgacggccagtgtagcgatgaagtagggcagg

SEQ ID NO: 9132 - DNA, 38 bp, Artificial Sequence; identical to SEQ ID NO: 9125
  primer

SEQ ID NO: 9133 - DNA, 37 bp, Artificial Sequence
  primer
gtaaaacgacggccagtctacaactgcaccctgagcc

SEQ ID NO: 9134 - DNA, 21 bp, Artificial Sequence
  primer
gaagggaagtcactccacagg

SEQ ID NO: 9135 - DNA, 38 bp, Artificial Sequence
  primer
gtaaaacgacggccagtaccttgttcccatctctgtgc

SEQ ID NO: 9136 - DNA, 21 bp, Artificial Sequence
  primer
caaggtaggctcctggtgaag

SEQ ID NO: 9137 - DNA, 21 bp, Artificial Sequence
  primer
agctacctctaaagcccggag

SEQ ID NO: 9138 - DNA, 40 bp, Artificial Sequence
  primer
gtaaaacgacggccagtgctgcagttatttaacattgccc

SEQ ID NO: 9139 - DNA, 26 bp, Artificial Sequence
  primer
cagcggttaattacgtagcttatttg

SEQ ID NO: 9140 - DNA, 21 bp, Artificial Sequence
  primer
cccttcaagaggaagggacac

SEQ ID NO: 9141 - DNA, 42 bp, Artificial Sequence
  primer
gtaaaacgacggccagtacaccctttaagcacctattaactg

SEQ ID NO: 9142 - DNA, 39 bp, Artificial Sequence
  primer
gtaaaacgacggccagtcaacatccttgaattggtgagc

SEQ ID NO: 9143 - DNA, 42 bp, Artificial Sequence
  primer
gtaaaacgacggccagttgacgaatagtcaccataaagtttg

SEQ ID NO: 9144 - DNA, 44 bp, Artificial Sequence
  primer
gtaaaacgacggccagtagaagcacatcatctatagcacagtaa

SEQ ID NO: 9145 - DNA, 42 bp, Artificial Sequence
  primer
gtaaaacgacggccagtcgtcacaggaatttgtaggacttag

SEQ ID NO: 9146 - DNA, 24 bp, Artificial Sequence
  primer
gatgtgttcaaagcaggtacaatg

SEQ ID NO: 9147 - DNA, 42 bp, Artificial Sequence
  primer
gtaaaacgacggccagttgcttactcaaagatgtttcattgg

SEQ ID NO: 9148 - DNA, 35 bp, Artificial Sequence
  primer
gtaaaacgacggccagtaggcatgagccactgtgc

SEQ ID NO: 9149 - DNA, 23 bp, Artificial Sequence
  primer
tcacttggtcctcatattgtgct

SEQ ID NO: 9150 - DNA, 37 bp, Artificial Sequence
  primer
gtaaaacgacggccagttcaaatttggaagcgcactc

SEQ ID NO: 9151 - DNA, 22 bp, Artificial Sequence
  primer
tggcttctagaatttgttcgtc

SEQ ID NO: 9152 - DNA, 37 bp, Artificial Sequence
  primer
gtaaaacgacggccagtaggacatgtgctttggcttc

SEQ ID NO: 9153 - DNA, 38 bp, Artificial Sequence
  primer
gtaaaacgacggccagttgccaattaccttgagctctg

SEQ ID NO: 9154 - DNA, 38 bp, Artificial Sequence
  primer
gtaaaacgacggccagttaacagttgcattccctgtgg

SEQ ID NO: 9155 - DNA, 39 bp, Artificial Sequence
  primer
gtaaaacgacggccagtttgacagttacaggtgtccgtg

SEQ ID NO: 9156 - DNA, 24 bp, Artificial Sequence
  primer
tgcatttgaaatttgtatgacagg

SEQ ID NO: 9157 - DNA, 24 bp, Artificial Sequence
  primer
aattgagacaaatgttgattcagg

SEQ ID NO: 9158 - DNA, 42 bp, Artificial Sequence
  primer
gtaaaacgacggccagttgccatgacttgataataagttgac

SEQ ID NO: 9159 - DNA, 22 bp, Artificial Sequence
  primer
gggaaccaagaattaaatgtca

SEQ ID NO: 9160 - DNA, 39 bp, Artificial Sequence
  primer
gtaaaacgacggccagtcatttcacagtttcaaccaagc

SEQ ID NO: 9161 - DNA, 40 bp, Artificial Sequence
  primer
gtaaaacgacggccagtggctttcattgcattgatttaac

SEQ ID NO: 9162 - DNA, 19 bp, Artificial Sequence
  primer
tttggcaatagggagcctg

SEQ ID NO: 9163 - DNA, 37 bp, Artificial Sequence
  primer
gtaaaacgacggccagtcactgcagcctctgctgaac

SEQ ID NO: 9164 - DNA, 37 bp, Artificial Sequence
  primer
gtaaaacgacggccagtatgtcccttctttgtgcctg

SEQ ID NO: 9165 - DNA, 38 bp, Artificial Sequence
  primer
gtaaaacgacggccagtgaagaggattgtggcggtaag

SEQ ID NO: 9166 - DNA, 21 bp, Artificial Sequence
  primer
aaaggacccggatacactcag

SEQ ID NO: 9167 - DNA, 21 bp, Artificial Sequence
  primer
agtgacttccaaaggtgtggc

SEQ ID NO: 9168 - DNA, 38 bp, Artificial Sequence
  primer
gtaaaacgacggccagtttctcagagggtttgaggagg

SEQ ID NO: 9169 - DNA, 38 bp, Artificial Sequence
  primer
gtaaaacgacggccagtaagaccacggtgcgtgtatag

SEQ ID NO: 9170 - DNA, 20 bp, Artificial Sequence
  primer
cacccagaacgtaagtgggc

SEQ ID NO: 9171 - DNA, 38 bp, Artificial Sequence
  primer
gtaaaacgacggccagttccacactgaccgtagtcctg

SEQ ID NO: 9172 - DNA, 21 bp, Artificial Sequence
  primer
ctgagatggacgagggaagac

SEQ ID NO: 9173 - DNA, 37 bp, Artificial Sequence
  primer
gtaaaacgacggccagtagtgtgaggatgatgcaggg

SEQ ID NO: 9174 - DNA, 38 bp, Artificial Sequence
  primer
gtaaaacgacggccagtttagtcaccggcatgataagc

SEQ ID NO: 9175 - DNA, 21 bp, Artificial Sequence
  primer
actgcaggtgtgtctgtccac

SEQ ID NO: 9176 - DNA, 38 bp, Artificial Sequence
  primer
gtaaaacgacggccagttttccctggaagtccacaatc

SEQ ID NO: 9177 - DNA, 20 bp, Artificial Sequence
  primer
gttctgcctgaaagtgtcgg

SEQ ID NO: 9178 - DNA, 37 bp, Artificial Sequence
  primer
gtaaaacgacggccagttagggcacacatccatctcc

SEQ ID NO: 9179 - DNA, 38 bp, Artificial Sequence
  primer
gtaaaacgacggccagtggtggaataaagggtaagggc

SEQ ID NO: 9180 - DNA, 38 bp, Artificial Sequence
  primer
gtaaaacgacggccagtgaatgtgaaggtggaacccag

SEQ ID NO: 9181 - DNA, 21 bp, Artificial Sequence
  primer
aagctggcttcaagctctcac

SEQ ID NO: 9182 - DNA, 38 bp, Artificial Sequence
  primer
gtaaaacgacggccagtcagttagaacctgcctcctgg

SEQ ID NO: 9183 - DNA, 38 bp, Artificial Sequence
  primer
gtaaaacgacggccagtgggttgaggtctaggaatggg

SEQ ID NO: 9184 - DNA, 22 bp, Artificial Sequence
  primer
ggatgtgatagctttgagtccc

SEQ ID NO: 9185 - DNA, 38 bp, Artificial Sequence
  primer
gtaaaacgacggccagtgccaagaaagccaagattctg

SEQ ID NO: 9186 - DNA, 38 bp, Artificial Sequence
  primer
gtaaaacgacggccagtccctcattcctgacctcactc

SEQ ID NO: 9187 - DNA, 38 bp, Artificial Sequence
  primer
gtaaaacgacggccagtgacctgccctttgcatgatac

SEQ ID NO: 9188 - DNA, 36 bp, Artificial Sequence
  primer
gtaaaacgacggccagtacctgggtcgtgttccttg

SEQ ID NO: 9189 - DNA, 36 bp, Artificial Sequence
  primer
gtaaaacgacggccagtccatcttgtccgccatttg

SEQ ID NO: 9190 - DNA, 35 bp, Artificial Sequence
  primer
gtaaaacgacggccagttcgtgatctgcctgcctc

SEQ ID NO: 9191 - DNA, 20 bp, Artificial Sequence
  primer
atgagtctgttccagcaccg

SEQ ID NO: 9192 - DNA, 21 bp, Artificial Sequence
  primer
aaactgggaatttcctcatgg

SEQ ID NO: 9193 - DNA, 21 bp, Artificial Sequence
  primer
aagaggatatgccgagtcctg

SEQ ID NO: 9194 - DNA, 21 bp, Artificial Sequence
  primer
atccaagatgctggtctgtgg

SEQ ID NO: 9195 - DNA, 37 bp, Artificial Sequence
  primer
gtaaaacgacggccagtatgttcagtgggagctgctg

SEQ ID NO: 9196 - DNA, 21 bp, Artificial Sequence
  primer
aagatgagacgatgaccagcc

SEQ ID NO: 9197 - DNA, 38 bp, Artificial Sequence
  primer
gtaaaacgacggccagtccaaactcagtggcatttctg

SEQ ID NO: 9198 - DNA, 21 bp, Artificial Sequence
  primer
gaatctggagggtacctgtgg

SEQ ID NO: 9199 - DNA, 21 bp, Artificial Sequence
  primer
gggatacttgctctgtccacc

SEQ ID NO: 9200 - DNA, 39 bp, Artificial Sequence
  primer
gtaaaacgacggccagtgattctgtctcaggagcaggtg

SEQ ID NO: 9201 - DNA, 38 bp, Artificial Sequence
  primer
gtaaaacgacggccagtatcattgacatctgcagccag

SEQ ID NO: 9202 - DNA, 37 bp, Artificial Sequence
  primer
gtaaaacgacggccagtaggcctcctaggtcctcacc

SEQ ID NO: 9203 - DNA, 38 bp, Artificial Sequence
  primer
gtaaaacgacggccagtctctctgtggctatgtggctg

SEQ ID NO: 9204 - DNA, 19 bp, Artificial Sequence
  primer
agtcttcctgggtccctgc

SEQ ID NO: 9205 - DNA, 21 bp, Artificial Sequence
  primer
gccttggtttccctgttagtg

SEQ ID NO: 9206 - DNA, 38 bp, Artificial Sequence
  primer
gtaaaacgacggccagttcttaaagagtcgggtcctcg

SEQ ID NO: 9207 - DNA, 37 bp, Artificial Sequence
  primer
gtaaaacgacggccagtatttgtcacatgggctgtgg

SEQ ID NO: 9208 - DNA, 20 bp, Artificial Sequence
  primer
tcccagatagatggcgttcc

SEQ ID NO: 9209 - DNA, 21 bp, Artificial Sequence
  primer
ttggacacggcatgtactgag

SEQ ID NO: 9210 - DNA, 22 bp, Artificial Sequence
  primer
ctgtgatcctgacctcacactg

SEQ ID NO: 9211 - DNA, 38 bp, Artificial Sequence
  primer
gtaaaacgacggccagtttgggccatactggagtcttc

SEQ ID NO: 9212 - DNA, 38 bp, Artificial Sequence
  primer
gtaaaacgacggccagtttaagagacaggtggctgtgc

SEQ ID NO: 9213 - DNA, 38 bp, Artificial Sequence
  primer
gtaaaacgacggccagtaggacttgggactgaggacag

SEQ ID NO: 9214 - DNA, 36 bp, Artificial Sequence
  primer
gtaaaacgacggccagtagtgggtgtccaggtgtcc

SEQ ID NO: 9215 - DNA, 19 bp, Artificial Sequence
  primer
atgagccacaccttccagg

SEQ ID NO: 9216 - DNA, 36 bp, Artificial Sequence
  primer
gtaaaacgacggccagtacaccctgctcctacaggc

SEQ ID NO: 9217 - DNA, 21 bp, Artificial Sequence
  primer
tatcctgacctggtgatctgc

SEQ ID NO: 9218 - DNA, 38 bp, Artificial Sequence
  primer
gtaaaacgacggccagttcccacttggtcaaggtgtat

SEQ ID NO: 9219 - DNA, 21 bp, Artificial Sequence
  primer
atgcccggactatagagggtt

SEQ ID NO: 9220 - DNA, 21 bp, Artificial Sequence
  primer
gggccacatggcctatatttc

SEQ ID NO: 9221 - DNA, 21 bp, Artificial Sequence
  primer
aggctagggcaggaggattac

SEQ ID NO: 9222 - DNA, 40 bp, Artificial Sequence
  primer
gtaaaacgacggccagtttcagggaacatatttgtcaagg

SEQ ID NO: 9223 - DNA, 38 bp, Artificial Sequence
  primer
gtaaaacgacggccagttggagttaaaggcagggtagg

SEQ ID NO: 9224 - DNA, 25 bp, Artificial Sequence
  primer
gaggtaaactcactgtagatgccag

SEQ ID NO: 9225 - DNA, 38 bp, Artificial Sequence
  primer
gtaaaacgacggccagttggaagggacactggttaatg

SEQ ID NO: 9226 - DNA, 39 bp, Artificial Sequence
  primer
gtaaaacgacggccagtgaatggaactgaatatcgctgc

SEQ ID NO: 9227 - DNA, 38 bp, Artificial Sequence
  primer
gtaaaacgacggccagtggacaggccagatccttattc

SEQ ID NO: 9228 - DNA, 38 bp, Artificial Sequence
  primer
gtaaaacgacggccagtgagtgcatgaatagtgggagc

SEQ ID NO: 9229 - DNA, 21 bp, Artificial Sequence
  primer
tgtctcatgcttgatgtgcag

SEQ ID NO: 9230 - DNA, 20 bp, Artificial Sequence
  primer
agccacgaagcttgtctcag

SEQ ID NO: 9231 - DNA, 38 bp, Artificial Sequence
  primer
gtaaaacgacggccagtggagaagaagctacccacagg

SEQ ID NO: 9232 - DNA, 21 bp, Artificial Sequence
  primer
gatctcagccacctcaaatgc

SEQ ID NO: 9233 - DNA, 38 bp, Artificial Sequence
  primer
gtaaaacgacggccagtccatctgctctgcataagtgg

SEQ ID NO: 9234 - DNA, 21 bp, Artificial Sequence
  primer
tcggacctagaaatgtttccg

SEQ ID NO: 9235 - DNA, 23 bp, Artificial Sequence
  primer
tggatttcccagacagatattgc

SEQ ID NO: 9236 - DNA, 40 bp, Artificial Sequence
  primer
gtaaaacgacggccagtcattgaatgtcacctttcatttg

SEQ ID NO: 9237 - DNA, 27 bp, Artificial Sequence
  primer
tttgtaagaaatggtgctaagactttc

SEQ ID NO: 9238 - DNA, 22 bp, Artificial Sequence
  primer
gatgaaagtggattatgagccc

SEQ ID NO: 9239 - DNA, 39 bp, Artificial Sequence
  primer
gtaaaacgacggccagtattcaaactaccatctggtccc

SEQ ID NO: 9240 - DNA, 20 bp, Artificial Sequence
  primer
aaccggaagtgatcgtgttg

SEQ ID NO: 9241 - DNA, 38 bp, Artificial Sequence
  primer
gtaaaacgacggccagtcacttcttcccttgtccatcc

SEQ ID NO: 9242 - DNA, 37 bp, Artificial Sequence
  primer
gtaaaacgacggccagtgcttctagcgtttggccttc

SEQ ID NO: 9243 - DNA, 38 bp, Artificial Sequence
  primer
gtaaaacgacggccagtagggtgatcagctaatgctgg

SEQ ID NO: 9244 - DNA, 38 bp, Artificial Sequence
  primer
gtaaaacgacggccagttatctgaccactctgctgctg

SEQ ID NO: 9245 - DNA, 20 bp, Artificial Sequence
  primer
acacccatcctgcttgtttg

SEQ ID NO: 9246 - DNA, 37 bp, Artificial Sequence
  primer
gtaaaacgacggccagttcccacatcaggacgagaag

SEQ ID NO: 9247 - DNA, 38 bp, Artificial Sequence
  primer
gtaaaacgacggccagtgtaatcctggctgctaccctc

SEQ ID NO: 9248 - DNA, 38 bp, Artificial Sequence
  primer
gtaaaacgacggccagtccatctgttaggtgaacaggg

SEQ ID NO: 9249 - DNA, 24 bp, Artificial Sequence
  primer
tctacctggagctattactctggc

SEQ ID NO: 9250 - DNA, 38 bp, Artificial Sequence
  primer
gtaaaacgacggccagtggaacctggacccagtgtatg

SEQ ID NO: 9251 - DNA, 21 bp, Artificial Sequence
  primer
ggccaggctgaagtattgaac

SEQ ID NO: 9252 - DNA, 38 bp, Artificial Sequence
  primer
gtaaaacgacggccagtacaaactgatgtccttgtgcg

SEQ ID NO: 9253 - DNA, 21 bp, Artificial Sequence
  primer
tctggctgccatgtaaatacc

SEQ ID NO: 9254 - DNA, 42 bp, Artificial Sequence
  primer
gtaaaacgacggccagtttcttagataaccattgaccacacc

SEQ ID NO: 9255 - DNA, 42 bp, Artificial Sequence
  primer
gtaaaacgacggccagtaaaccagtggctgtctattatctcc

SEQ ID NO: 9256 - DNA, 40 bp, Artificial Sequence
  primer
gtaaaacgacggccagttctcctattatggttggcacaag

SEQ ID NO: 9257 - DNA, 38 bp, Artificial Sequence
  primer
gtaaaacgacggccagttgcctgaatttgaagcatttg

SEQ ID NO: 9258 - DNA, 20 bp, Artificial Sequence
  primer
atcagcaagtgttgccttgg

SEQ ID NO: 9259 - DNA, 20 bp, Artificial Sequence
  primer
gaacttgttcaggtgggacg

SEQ ID NO: 9260 - DNA, 40 bp, Artificial Sequence
  primer
gtaaaacgacggccagtgaggtttggagaaatgcctttag

SEQ ID NO: 9261 - DNA, 39 bp, Artificial Sequence
  primer
gtaaaacgacggccagtgcaccaggattaaaggattctc

SEQ ID NO: 9262 - DNA, 41 bp, Artificial Sequence
  primer
gtaaaacgacggccagttcagggtgaagaatagctgaaatc

SEQ ID NO: 9263 - DNA, 41 bp, Artificial Sequence
  primer
gtaaaacgacggccagtggaccattacagtgttgaatttgc

SEQ ID NO: 9264 - DNA, 44 bp, Artificial Sequence
  primer
gtaaaacgacggccagttctttgtaaattaaggtaatgagccag

SEQ ID NO: 9265 - DNA, 21 bp, Artificial Sequence
  primer
ctttgggttggttagccagag

SEQ ID NO: 9266 - DNA, 38 bp, Artificial Sequence
  primer
gtaaaacgacggccagtggcacagtgaggaaagagttg

SEQ ID NO: 9267 - DNA, 23 bp, Artificial Sequence
  primer
aagcctgaaagtagtagcgtttg

SEQ ID NO: 9268 - DNA, 42 bp, Artificial Sequence
  primer
gtaaaacgacggccagtcctaaatcggaattacttgagaagg

SEQ ID NO: 9269 - DNA, 43 bp, Artificial Sequence
  primer
gtaaaacgacggccagtaatcaactgtatggtcaacctttatg

SEQ ID NO: 9270 - DNA, 22 bp, Artificial Sequence
  primer
tgccatactaggatgaattggg

SEQ ID NO: 9271 - DNA, 39 bp, Artificial Sequence
  primer
gtaaaacgacggccagtgagactactagcggaaggttgg

SEQ ID NO: 9272 - DNA, 47 bp, Artificial Sequence
  primer
gtaaaacgacggccagttttaaattcactctagcagtaggtactttg

SEQ ID NO: 9273 - DNA, 36 bp, Artificial Sequence
  primer
gtaaaacgacggccagtccatgcctggctgtggtag

SEQ ID NO: 9274 - DNA, 23 bp, Artificial Sequence
  primer
agttccaggcttgaattattgtg

SEQ ID NO: 9275 - DNA, 37 bp, Artificial Sequence
  primer
gtaaaacgacggccagtaggccatgggcattgatatg

SEQ ID NO: 9276 - DNA, 23 bp, Artificial Sequence
  primer
tttggaccttatttcttcttcgg

SEQ ID NO: 9277 - DNA, 24 bp, Artificial Sequence
  primer
attcgaatactttgcacgatacag

SEQ ID NO: 9278 - DNA, 38 bp, Artificial Sequence
  primer
gtaaaacgacggccagttcactcacagaactgcccttg

SEQ ID NO: 9279 - DNA, 41 bp, Artificial Sequence
  primer
gtaaaacgacggccagttcccatattagtatgatttgtgcc

SEQ ID NO: 9280 - DNA, 21 bp, Artificial Sequence
  primer
tttcatcaggttggaggatga

SEQ ID NO: 9281 - DNA, 38 bp, Artificial Sequence
  primer
gtaaaacgacggccagttggtttcaatttgcagtctcc

SEQ ID NO: 9282 - DNA, 39 bp, Artificial Sequence
  primer
gtaaaacgacggccagtggaggagaatcgctcttaaagg

SEQ ID NO: 9283 - DNA, 38 bp, Artificial Sequence
  primer
gtaaaacgacggccagtcttcattctgtcctccaaggg

SEQ ID NO: 9284 - DNA, 20 bp, Artificial Sequence
  primer
agctcaggtctcctgggttc

SEQ ID NO: 9285 - DNA, 39 bp, Artificial Sequence
  primer
gtaaaacgacggccagttcctagaactgctctccaggtg

SEQ ID NO: 9286 - DNA, 36 bp, Artificial Sequence
  primer
gtaaaacgacggccagtccttccaaagcgctgagag

SEQ ID NO: 9287 - DNA, 39 bp, Artificial Sequence
  primer
gtaaaacgacggccagtggcttggtcagtagagggaaag

SEQ ID NO: 9288 - DNA, 20 bp, Artificial Sequence
  primer
cttccatcacccatgtcctc

SEQ ID NO: 9289 - DNA, 21 bp, Artificial Sequence
  primer
atggtggcaggcatctgtaac

SEQ ID NO: 9290 - DNA, 36 bp, Artificial Sequence
  primer
gtaaaacgacggccagtatctgcaggcaggaccaag

SEQ ID NO: 9291 - DNA, 21 bp, Artificial Sequence
  primer
tcattgccagagttcatggag

SEQ ID NO: 9292 - DNA, 21 bp, Artificial Sequence
  primer
ggacgaatttgagtctcatcg

SEQ ID NO: 9293 - DNA, 21 bp, Artificial Sequence
  primer
tttccctcttgggagtacagc

SEQ ID NO: 9294 - DNA, 38 bp, Artificial Sequence
  primer
gtaaaacgacggccagtctctatgggacggaagacagg

SEQ ID NO: 9295 - DNA, 20 bp, Artificial Sequence
  primer
ctgtagccaagccctcaatg

SEQ ID NO: 9296 - DNA, 21 bp, Artificial Sequence
  primer
ctctcctcccacattcacttg

SEQ ID NO: 9297 - DNA, 38 bp, Artificial Sequence
  primer
gtaaaacgacggccagtaggttccagttacagccatcc

SEQ ID NO: 9298 - DNA, 38 bp, Artificial Sequence
  primer
gtaaaacgacggccagttttctaggaatgtttgtcggg

SEQ ID NO: 9299 - DNA, 38 bp, Artificial Sequence
  primer
gtaaaacgacggccagtacctggacactgactgggaag

SEQ ID NO: 9300 - DNA, 21 bp, Artificial Sequence
  primer
aaacttagggccttggcagag

SEQ ID NO: 9301 - DNA, 21 bp, Artificial Sequence
  primer
aggcctgaagatttgtgaagc

SEQ ID NO: 9302 - DNA, 21 bp, Artificial Sequence
  primer
tcatacctttccaagcactgg

SEQ ID NO: 9303 - DNA, 38 bp, Artificial Sequence
  primer
gtaaaacgacggccagttctgaagcagtccacacttcc

SEQ ID NO: 9304 - DNA, 38 bp, Artificial Sequence
  primer
gtaaaacgacggccagtgctaagcctcagctttgctct

SEQ ID NO: 9305 - DNA, 42 bp, Artificial Sequence
  primer
gtaaaacgacggccagtgaagatgtgatgggattgtaaattg

SEQ ID NO: 9306 - DNA, 21 bp, Artificial Sequence
  primer
gggtttgaggagaaggcagtc

SEQ ID NO: 9307 - DNA, 42 bp, Artificial Sequence
  primer
gtaaaacgacggccagtttcagtaatgggtaaggattattcg

SEQ ID NO: 9308 - DNA, 24 bp, Artificial Sequence
  primer
tgataacatgcagcagaaattgtt

SEQ ID NO: 9309 - DNA, 25 bp, Artificial Sequence
  primer
tcttactcagggctttaagataccg

SEQ ID NO: 9310 - DNA, 40 bp, Artificial Sequence
  primer
gtaaaacgacggccagtggaagctgaagttactgtgatgc

SEQ ID NO: 9311 - DNA, 42 bp, Artificial Sequence
  primer
gtaaaacgacggccagttcttagcagtgtgaggttaatgatg

SEQ ID NO: 9312 - DNA, 38 bp, Artificial Sequence
  primer
gtaaaacgacggccagtgtggcaagatcacagaaatgg

SEQ ID NO: 9313 - DNA, 21 bp, Artificial Sequence
  primer
gtgatctgtgctgtcatttgc

SEQ ID NO: 9314 - DNA, 38 bp, Artificial Sequence
  primer
gtaaaacgacggccagtctttgccaaggttcctttctg

SEQ ID NO: 9315 - DNA, 38 bp, Artificial Sequence
  primer
gtaaaacgacggccagtagcatttgcaaagcaatggac

SEQ ID NO: 9316 - DNA, 20 bp, Artificial Sequence
  primer
tgctgatctaaaggctgccc

SEQ ID NO: 9317 - DNA, 44 bp, Artificial Sequence
  primer
gtaaaacgacggccagtcaagtgaagtgaataagtttatgtggc

SEQ ID NO: 9318 - DNA, 42 bp, Artificial Sequence
  primer
gtaaaacgacggccagtcaggacttatatttgaaatgggagg

SEQ ID NO: 9319 - DNA, 21 bp, Artificial Sequence
  primer
gtattgctggctcattcttgc

SEQ ID NO: 9320 - DNA, 43 bp, Artificial Sequence
  primer
gtaaaacgacggccagtcatagtttgtctctcgctttaagatg

SEQ ID NO: 9321 - DNA, 21 bp, Artificial Sequence
  primer
aggatatggcttgttgttccc

SEQ ID NO: 9322 - DNA, 39 bp, Artificial Sequence
  primer
gtaaaacgacggccagtgaagcaccagatggaaattctg

SEQ ID NO: 9323 - DNA, 24 bp, Artificial Sequence
  primer
cctagtcaatttacataaccgcag

SEQ ID NO: 9324 - DNA, 21 bp, Artificial Sequence
  primer
tgcagtcacctacatctgctg

SEQ ID NO: 9325 - DNA, 38 bp, Artificial Sequence
  primer
gtaaaacgacggccagtgctgaatagcaatcaaggcag

SEQ ID NO: 9326 - DNA, 21 bp, Artificial Sequence
  primer
atgccactggaaataaatggc

SEQ ID NO: 9327 - DNA, 38 bp, Artificial Sequence
  primer
gtaaaacgacggccagttagggtaaaggatctgctggc

SEQ ID NO: 9328 - DNA, 38 bp, Artificial Sequence; identical to SEQ ID NO: 9327
  primer

SEQ ID NO: 9329 - DNA, 38 bp, Artificial Sequence
  primer
gtaaaacgacggccagttgatgcgtgctatgtatgtgc

SEQ ID NO: 9330 - DNA, 21 bp, Artificial Sequence
  primer
agcttctctcctagccgttcc

SEQ ID NO: 9331 - DNA, 19 bp, Artificial Sequence
  primer
gacgagagcgcctatgctg

SEQ ID NO: 9332 - DNA, 37 bp, Artificial Sequence
  primer
gtaaaacgacggccagtcgcctatgctgtgcagtacc

SEQ ID NO: 9333 - DNA, 39 bp, Artificial Sequence
  primer
gtaaaacgacggccagtagcacgtgtacgaggagatagg

SEQ ID NO: 9334 - DNA, 21 bp, Artificial Sequence
  primer
gacagctacgagcaggaggag

SEQ ID NO: 9335 - DNA, 21 bp, Artificial Sequence
  primer
tctgctttgcttctctctccc

SEQ ID NO: 9336 - DNA, 41 bp, Artificial Sequence
  primer
gtaaaacgacggccagttgatcaataattggtaactgccac

SEQ ID NO: 9337 - DNA, 38 bp, Artificial Sequence
  primer
gtaaaacgacggccagtcacagagagatgcctcagacc

SEQ ID NO: 9338 - DNA, 38 bp, Artificial Sequence
  primer
gtaaaacgacggccagtcacagaaacgctttatgccac

SEQ ID NO: 9339 - DNA, 21 bp, Artificial Sequence
  primer
tcagctttggcagtttaaccc

SEQ ID NO: 9340 - DNA, 37 bp, Artificial Sequence
  primer
gtaaaacgacggccagtactggctgtaaggtggcagg

SEQ ID NO: 9341 - DNA, 21 bp, Artificial Sequence
  primer
agggtttcctcagactccagg

SEQ ID NO: 9342 - DNA, 38 bp, Artificial Sequence
  primer
gtaaaacgacggccagttttaggcaagacaggaatggg

SEQ ID NO: 9343 - DNA, 38 bp, Artificial Sequence
  primer
gtaaaacgacggccagtcttcggaagactcagtgcagc

SEQ ID NO: 9344 - DNA, 21 bp, Artificial Sequence
  primer
ctacagtctctgtgcaagccg

SEQ ID NO: 9345 - DNA, 38 bp, Artificial Sequence
  primer
gtaaaacgacggccagttatcttcaaagccctctgtgg

SEQ ID NO: 9346 - DNA, 21 bp, Artificial Sequence
  primer
ctgtccttcccaatgttcctc

SEQ ID NO: 9347 - DNA, 38 bp, Artificial Sequence
  primer
gtaaaacgacggccagtgttggaccatagggtgagacc

SEQ ID NO: 9348 - DNA, 38 bp, Artificial Sequence
  primer
gtaaaacgacggccagtgggactccagctctgactacg

SEQ ID NO: 9349 - DNA, 21 bp, Artificial Sequence
  primer
gaccaggaggaggacattgac

SEQ ID NO: 9350 - DNA, 21 bp, Artificial Sequence
  primer
cagatcgtggcagagatcaag

SEQ ID NO: 9351 - DNA, 40 bp, Artificial Sequence
  primer
gtaaaacgacggccagtgacgtctgcacacacacctatac

SEQ ID NO: 9352 - DNA, 22 bp, Artificial Sequence
  primer
tggtttcctgtatggagctgac

SEQ ID NO: 9353 - DNA, 37 bp, Artificial Sequence
  primer
gtaaaacgacggccagtggttgggcccttctagtttg

SEQ ID NO: 9354 - DNA, 38 bp, Artificial Sequence
  primer
gtaaaacgacggccagtagtgtgtgtgcttgaagtggg

SEQ ID NO: 9355 - DNA, 20 bp, Artificial Sequence
  primer
ccacgccagtgcttcttatc

SEQ ID NO: 9356 - DNA, 35 bp, Artificial Sequence
  primer
gtaaaacgacggccagtaggcttgagccaccatgc

SEQ ID NO: 9357 - DNA, 37 bp, Artificial Sequence
  primer
gtaaaacgacggccagtccttgaaggcttatgggtgc

SEQ ID NO: 9358 - DNA, 37 bp, Artificial Sequence
  primer
gtaaaacgacggccagtgtcagcctcatcctcctgtg

SEQ ID NO: 9359 - DNA, 37 bp, Artificial Sequence
  primer
gtaaaacgacggccagtgcctctcccattgtgtgttc

SEQ ID NO: 9360 - DNA, 37 bp, Artificial Sequence
  primer
gtaaaacgacggccagtcacgtattcatcatgtggcg

SEQ ID NO: 9361 - DNA, 38 bp, Artificial Sequence
  primer
gtaaaacgacggccagtcctctgtcctttgctttcacc

SEQ ID NO: 9362 - DNA, 37 bp, Artificial Sequence
  primer
gtaaaacgacggccagtcctctagccacaccgagtcc

SEQ ID NO: 9363 - DNA, 21 bp, Artificial Sequence
  primer
aggagaagtgagcagaggtgg

SEQ ID NO: 9364 - DNA, 38 bp, Artificial Sequence
  primer
gtaaaacgacggccagttcagatgctatgaggcctttg

SEQ ID NO: 9365 - DNA, 39 bp, Artificial Sequence
  primer
gtaaaacgacggccagtccacaggagcaacttaatctgg

SEQ ID NO: 9366 - DNA, 38 bp, Artificial Sequence
  primer
gtaaaacgacggccagtcaggatataaggcctgcttgg

SEQ ID NO: 9367 - DNA, 39 bp, Artificial Sequence
  primer
gtaaaacgacggccagtccatcaggtctcagtaccctcc

SEQ ID NO: 9368 - DNA, 37 bp, Artificial Sequence
  primer
gtaaaacgacggccagtgtcccaggaggcttgtcttc

SEQ ID NO: 9369 - DNA, 21 bp, Artificial Sequence
  primer
cctcacttcattctgagcacc

SEQ ID NO: 9370 - DNA, 20 bp, Artificial Sequence
  primer
ggaggaccctcctggtatcc

SEQ ID NO: 9371 - DNA, 38 bp, Artificial Sequence
  primer
gtaaaacgacggccagtaaacagctgagaacctcctgg

SEQ ID NO: 9372 - DNA, 21 bp, Artificial Sequence
  primer
agagccattgtctgcagtgag

SEQ ID NO: 9373 - DNA, 38 bp, Artificial Sequence
  primer
gtaaaacgacggccagtctccagaggcagtgtgagaag

SEQ ID NO: 9374 - DNA, 38 bp, Artificial Sequence
  primer
gtaaaacgacggccagttcaccactgtgttcttcccag

SEQ ID NO: 9375 - DNA, 21 bp, Artificial Sequence
  primer
cctcacttcattctgagcacc

SEQ ID NO: 9376 - DNA, 38 bp, Artificial Sequence
  primer
gtaaaacgacggccagtgaactcctgggttcagtcagc

SEQ ID NO: 9377 - DNA, 21 bp, Artificial Sequence
  primer
tcagtcggatggaacttgatg

SEQ ID NO: 9378 - DNA, 38 bp, Artificial Sequence
  primer
gtaaaacgacggccagtctggagacggtgcctctagtc

SEQ ID NO: 9379 - DNA, 38 bp, Artificial Sequence
  primer
gtaaaacgacggccagtgagtccttgagggatggacag

SEQ ID NO: 9380 - DNA, 38 bp, Artificial Sequence
  primer
gtaaaacgacggccagtctggacggtgtcatatttggg

SEQ ID NO: 9381 - DNA, 21 bp, Artificial Sequence
  primer
atcaaggtcttgacagcggac

SEQ ID NO: 9382 - DNA, 37 bp, Artificial Sequence
  primer
gtaaaacgacggccagtgtgtcctgggactctcaccc

SEQ ID NO: 9383 - DNA, 21 bp, Artificial Sequence
  primer
tctccaacagtgacaactgcc

SEQ ID NO: 9384 - DNA, 37 bp, Artificial Sequence
  primer
gtaaaacgacggccagtgagagggtaaactgaggccc

SEQ ID NO: 9385 - DNA, 20 bp, Artificial Sequence
  primer
cagacgtcggtgacactcag

SEQ ID NO: 9386 - DNA, 19 bp, Artificial Sequence
  primer
gcatcatcgagctgctcac

SEQ ID NO: 9387 - DNA, 38 bp, Artificial Sequence
  primer
gtaaaacgacggccagtcccagagctgtggctaacatc

SEQ ID NO: 9388 - DNA, 21 bp, Artificial Sequence
  primer
tatgctccaccattaccctcc

SEQ ID NO: 9389 - DNA, 38 bp, Artificial Sequence
  primer
gtaaaacgacggccagtgaagcagtgatgctgctgttc

SEQ ID NO: 9390 - DNA, 20 bp, Artificial Sequence
  primer
accagaatcgcaatgtgacc

SEQ ID NO: 9391 - DNA, 24 bp, Artificial Sequence
  primer
tgaagaggaggaggaggacttatc

SEQ ID NO: 9392 - DNA, 38 bp, Artificial Sequence
  primer
gtaaaacgacggccagtgcagaagcaggaactgtgttg

SEQ ID NO: 9393 - DNA, 21 bp, Artificial Sequence
  primer
attactggcacatcccaacag

SEQ ID NO: 9394 - DNA, 38 bp, Artificial Sequence
  primer
gtaaaacgacggccagtctcctcctagctcacctggac

SEQ ID NO: 9395 - DNA, 36 bp, Artificial Sequence
  primer
gtaaaacgacggccagtatgcagtgagctggcagtg

SEQ ID NO: 9396 - DNA, 38 bp, Artificial Sequence
  primer
gtaaaacgacggccagtgcctcctgccacactctgtag

SEQ ID NO: 9397 - DNA, 38 bp, Artificial Sequence; identical to SEQ ID NO: 9387
  primer

SEQ ID NO: 9398 - DNA, 21 bp, Artificial Sequence
  primer
tatgctccaccattaccctcc

SEQ ID NO: 9399 - DNA, 21 bp, Artificial Sequence
  primer
tgagatctgctctaaggcacg

SEQ ID NO: 9400 - DNA, 38 bp, Artificial Sequence
  primer
gtaaaacgacggccagtctccaatacgtggagggactc

SEQ ID NO: 9401 - DNA, 38 bp, Artificial Sequence
  primer
gtaaaacgacggccagtccagggaagggatacttggac

SEQ ID NO: 9402 - DNA, 38 bp, Artificial Sequence
  primer
gtaaaacgacggccagtgagctgctaagatggatgtgg

SEQ ID NO: 9403 - DNA, 37 bp, Artificial Sequence
  primer
gtaaaacgacggccagtttctgctgccacatgttctg

SEQ ID NO: 9404 - DNA, 38 bp, Artificial Sequence
  primer
gtaaaacgacggccagtggaaagagagggatgcaaaga

SEQ ID NO: 9405 - DNA, 21 bp, Artificial Sequence
  primer
gctctcaattgacgtggtctg

SEQ ID NO: 9406 - DNA, 38 bp, Artificial Sequence
  primer
gtaaaacgacggccagtggaattcctacgcttgtgcta

SEQ ID NO: 9407 - DNA, 42 bp, Artificial Sequence
  primer
gtaaaacgacggccagttgagacactagcaatgacagaagtg

SEQ ID NO: 9408 - DNA, 38 bp, Artificial Sequence
  primer
gtaaaacgacggccagtagtgcttggcatgcaagttag

SEQ ID NO: 9409 - DNA, 39 bp, Artificial Sequence
  primer
gtaaaacgacggccagtcacctgatgaaagtcatgaagc

SEQ ID NO: 9410 - DNA, 38 bp, Artificial Sequence
  primer
gtaaaacgacggccagttccagcaagactgtgagttcc

SEQ ID NO: 9411 - DNA, 39 bp, Artificial Sequence
  primer
gtaaaacgacggccagtttcctctcttctggcaaatagc

SEQ ID NO: 9412 - DNA, 40 bp, Artificial Sequence
  primer
gtaaaacgacggccagttgtgctatgaaggacaactctgg

SEQ ID NO: 9413 - DNA, 38 bp, Artificial Sequence
  primer
gtaaaacgacggccagttttcctgacaggtgctttgac

SEQ ID NO: 9414 - DNA, 21 bp, Artificial Sequence
  primer
gtgaacagagtagccgtggag

SEQ ID NO: 9415 - DNA, 21 bp, Artificial Sequence
  primer
gcctgtgagttgctctctttg

SEQ ID NO: 9416 - DNA, 38 bp, Artificial Sequence
  primer
gtaaaacgacggccagtcacatatctatggcatggccc

SEQ ID NO: 9417 - DNA, 38 bp, Artificial Sequence
  primer
gtaaaacgacggccagtaatgaatgctactgccactcg

SEQ ID NO: 9418 - DNA, 19 bp, Artificial Sequence
  primer
cccaagaggcaagagaacc

SEQ ID NO: 9419 - DNA, 27 bp, Artificial Sequence
  primer
caaagtaggaattcaagtttcaatcaa

SEQ ID NO: 9420 - DNA, 21 bp, Artificial Sequence
  primer
ttggttatccacgttaagccc

SEQ ID NO: 9421 - DNA, 38 bp, Artificial Sequence
  primer
gtaaaacgacggccagtaacacccttaacctccgatcc

SEQ ID NO: 9422 - DNA, 21 bp, Artificial Sequence
  primer
agatctggaaacctcagccag

SEQ ID NO: 9423 - DNA, 21 bp, Artificial Sequence
  primer
gggttcacctgacgaatagtg

SEQ ID NO: 9424 - DNA, 38 bp, Artificial Sequence
  primer
gtaaaacgacggccagtacactctctgcctcttgctgg

SEQ ID NO: 9425 - DNA, 38 bp, Artificial Sequence
  primer
gtaaaacgacggccagtgacctgctgtcaatgtatggc

SEQ ID NO: 9426 - DNA, 21 bp, Artificial Sequence
  primer
cgcacctggccttctagtaac

SEQ ID NO: 9427 - DNA, 38 bp, Artificial Sequence
  primer
gtaaaacgacggccagtgatggccacacacacgattag

SEQ ID NO: 9428 - DNA, 38 bp, Artificial Sequence
  primer
gtaaaacgacggccagttgtttaccattgacacgctgg

SEQ ID NO: 9429 - DNA, 39 bp, Artificial Sequence
  primer
gtaaaacgacggccagtgaagtccattccaagcaatcag

SEQ ID NO: 9430 - DNA, 21 bp, Artificial Sequence
  primer
aaacatagggcgttatggcac

SEQ ID NO: 9431 - DNA, 37 bp, Artificial Sequence
  primer
gtaaaacgacggccagtctgggcgtagctgttattgg

SEQ ID NO: 9432 - DNA, 38 bp, Artificial Sequence
  primer
gtaaaacgacggccagtctgaattcggcctggctatac

SEQ ID NO: 9433 - DNA, 38 bp, Artificial Sequence
  primer
gtaaaacgacggccagtggtcgttaacctttgggagtc

SEQ ID NO: 9434 - DNA, 19 bp, Artificial Sequence
  primer
gatccagacgcccgtttac

SEQ ID NO: 9435 - DNA, 39 bp, Artificial Sequence
  primer
gtaaaacgacggccagttcttcagcctaagaactgaccc

SEQ ID NO: 9436 - DNA, 21 bp, Artificial Sequence
  primer
gtgtgaggaggaggtctgagc

SEQ ID NO: 9437 - DNA, 38 bp, Artificial Sequence
  primer
gtaaaacgacggccagtgctatattctgggtcttgccc

SEQ ID NO: 9438 - DNA, 21 bp, Artificial Sequence
  primer
atcaagggtgaagacagggag

SEQ ID NO: 9439 - DNA, 38 bp, Artificial Sequence
  primer
gtaaaacgacggccagtggtagctgtccctgaatttcc

SEQ ID NO: 9440 - DNA, 38 bp, Artificial Sequence
  primer
gtaaaacgacggccagtaagagctacttctccctcccg

SEQ ID NO: 9441 - DNA, 38 bp, Artificial Sequence
  primer
gtaaaacgacggccagtcatccctgatgtccctactcc

SEQ ID NO: 9442 - DNA, 38 bp, Artificial Sequence
  primer
gtaaaacgacggccagtgaagcttccaaggtagttggg

SEQ ID NO: 9443 - DNA, 38 bp, Artificial Sequence
  primer
gtaaaacgacggccagtgccactagttggaggagcatc

SEQ ID NO: 9444 - DNA, 38 bp, Artificial Sequence
  primer
gtaaaacgacggccagtctaccagccttcccaaatcag

SEQ ID NO: 9445 - DNA, 38 bp, Artificial Sequence
  primer
gtaaaacgacggccagtctctctcatgactgcacaccc

SEQ ID NO: 9446 - DNA, 38 bp, Artificial Sequence
  primer
gtaaaacgacggccagtgacagaagctttggccagttc

SEQ ID NO: 9447 - DNA, 37 bp, Artificial Sequence
  primer
gtaaaacgacggccagtcctagcctgactttccagcc

SEQ ID NO: 9448 - DNA, 38 bp, Artificial Sequence; identical to SEQ ID NO: 9440
  primer

SEQ ID NO: 9449 - DNA, 24 bp, Artificial Sequence
  primer
ccactgtttcatcctcttagatgc

SEQ ID NO: 9450 - DNA, 21 bp, Artificial Sequence
  primer
ataaggtgcgtgctttgagag

SEQ ID NO: 9451 - DNA, 38 bp, Artificial Sequence
  primer
gtaaaacgacggccagttttaccctgacccaagtggac

SEQ ID NO: 9452 - DNA, 25 bp, Artificial Sequence
  primer
gagaagtttgcaataacaactgatg

SEQ ID NO: 9453 - DNA, 20 bp, Artificial Sequence
  primer
ctcatgcaccatgactgacg

SEQ ID NO: 9454 - DNA, 40 bp, Artificial Sequence
  primer
gtaaaacgacggccagttgatttgacataaccctgagctt

SEQ ID NO: 9455 - DNA, 21 bp, Artificial Sequence
  primer
ccttaccgagatagtcgaccg

SEQ ID NO: 9456 - DNA, 23 bp, Artificial Sequence
  primer
gtctttggttaagtccattctgc

SEQ ID NO: 9457 - DNA, 43 bp, Artificial Sequence
  primer
gtaaaacgacggccagtaacactgattacttcatcctggaaag

SEQ ID NO: 9458 - DNA, 21 bp, Artificial Sequence
  primer
ttcattgttgtcaatgcttgg

SEQ ID NO: 9459 - DNA, 22 bp, Artificial Sequence
  primer
caagggcagatgagtggtaaac

SEQ ID NO: 9460 - DNA, 29 bp, Artificial Sequence
  primer
gcaaatttaaaccatatattctcattgat

SEQ ID NO: 9461 - DNA, 40 bp, Artificial Sequence
  primer
gtaaaacgacggccagtcctgttgcttatcatttctcacc

SEQ ID NO: 9462 - DNA, 37 bp, Artificial Sequence
  primer
gtaaaacgacggccagtaccacggctagccagaattt

SEQ ID NO: 9463 - DNA, 38 bp, Artificial Sequence
  primer
gtaaaacgacggccagtggacgggcaataggatagatt

SEQ ID NO: 9464 - DNA, 21 bp, Artificial Sequence
  primer
aatgcatgtggaactttgtgg

SEQ ID NO: 9465 - DNA, 38 bp, Artificial Sequence
  primer
gtaaaacgacggccagtaggaagcattatgggacatgg

SEQ ID NO: 9466 - DNA, 38 bp, Artificial Sequence
  primer
gtaaaacgacggccagttggcaacatgactgtcctttc

SEQ ID NO: 9467 - DNA, 21 bp, Artificial Sequence
  primer
gcaactaccatccagcaacag

SEQ ID NO: 9468 - DNA, 39 bp, Artificial Sequence
  primer
gtaaaacgacggccagtccctcgattgaatcctattctg

SEQ ID NO: 9469 - DNA, 21 bp, Artificial Sequence
  primer
ggaaggcaaagtccttcacag

SEQ ID NO: 9470 - DNA, 40 bp, Artificial Sequence
  primer
gtaaaacgacggccagttaatgaagagaaacgtcatgtgg

SEQ ID NO: 9471 - DNA, 38 bp, Artificial Sequence
  primer
gtaaaacgacggccagtaatgccaagaggcagaatcag

SEQ ID NO: 9472 - DNA, 38 bp, Artificial Sequence
  primer
gtaaaacgacggccagtagatcctgtgagcgaagttcc

SEQ ID NO: 9473 - DNA, 21 bp, Artificial Sequence
  primer
tccagatagccctggacaaac

SEQ ID NO: 9474 - DNA, 38 bp, Artificial Sequence
  primer
gtaaaacgacggccagtcagttcagagggtccaggttc

SEQ ID NO: 9475 - DNA, 39 bp, Artificial Sequence
  primer
gtaaaacgacggccagtcagctgcctgtgtacaaacttc

SEQ ID NO: 9476 - DNA, 38 bp, Artificial Sequence
  primer
gtaaaacgacggccagtatatgccacgggtgtattgtg

SEQ ID NO: 9477 - DNA, 21 bp, Artificial Sequence
  primer
catctgcgtcttcttctgcac

SEQ ID NO: 9478 - DNA, 38 bp, Artificial Sequence
  primer
gtaaaacgacggccagtttcacctcatcattacacgcc

SEQ ID NO: 9479 - DNA, 41 bp, Artificial Sequence
  primer
gtaaaacgacggccagtcatccaaagacataccagacagag

SEQ ID NO: 9480 - DNA, 21 bp, Artificial Sequence
  primer
tgactcacagggagaaccaag

SEQ ID NO: 9481 - DNA, 21 bp, Artificial Sequence
  primer
agccttcaagactcaagggtg

SEQ ID NO: 9482 - DNA, 21 bp, Artificial Sequence
  primer
tcagattccatcctttccctg

SEQ ID NO: 9483 - DNA, 38 bp, Artificial Sequence
  primer
gtaaaacgacggccagtcaagcaaacatgccttcaatc

SEQ ID NO: 9484 - DNA, 38 bp, Artificial Sequence
  primer
gtaaaacgacggccagtgacatcccaaataggtgggtc

SEQ ID NO: 9485 - DNA, 38 bp, Artificial Sequence
  primer
gtaaaacgacggccagtaagtgagtctgcctccaaagg

SEQ ID NO: 9486 - DNA, 21 bp, Artificial Sequence
  primer
tccaagcccaaccttaagaag

SEQ ID NO: 9487 - DNA, 22 bp, Artificial Sequence
  primer
ttcctcgagtaagcacttggag

SEQ ID NO: 9488 - DNA, 38 bp, Artificial Sequence
  primer
gtaaaacgacggccagtgaccgtttcctcaggtgctac

SEQ ID NO: 9489 - DNA, 21 bp, Artificial Sequence
  primer
tttatcaaatggcacctgctg

SEQ ID NO: 9490 - DNA, 21 bp, Artificial Sequence
  primer
acctagtgggactgttgctgc

SEQ ID NO: 9491 - DNA, 38 bp, Artificial Sequence
  primer
gtaaaacgacggccagtcagtgactcctgcctgagacc

SEQ ID NO: 9492 - DNA, 36 bp, Artificial Sequence
  primer
gtaaaacgacggccagtgaggaggtgggctagggtc

SEQ ID NO: 9493 - DNA, 19 bp, Artificial Sequence
  primer
ctggagcagctgaagggtg

SEQ ID NO: 9494 - DNA, 21 bp, Artificial Sequence
  primer
catgttgcctgttaaccttgg

SEQ ID NO: 9495 - DNA, 21 bp, Artificial Sequence
  primer
gaggagaaggagaagctctgg

SEQ ID NO: 9496 - DNA, 38 bp, Artificial Sequence
  primer
gtaaaacgacggccagtaaatgggaagtgggaggagtc

SEQ ID NO: 9497 - DNA, 36 bp, Artificial Sequence
  primer
gtaaaacgacggccagtcacatcatcacgggtgagc

SEQ ID NO: 9498 - DNA, 38 bp, Artificial Sequence
  primer
gtaaaacgacggccagtaccctaggaatgccaggtgag

SEQ ID NO: 9499 - DNA, 21 bp, Artificial Sequence
  primer
gaggtggtcttctggctgttg

SEQ ID NO: 9500 - DNA, 38 bp, Artificial Sequence
  primer
gtaaaacgacggccagtccatcttagagaggctgggaa

SEQ ID NO: 9501 - DNA, 36 bp, Artificial Sequence
  primer
gtaaaacgacggccagtctctgggcaagggagtgag

SEQ ID NO: 9502 - DNA, 20 bp, Artificial Sequence
  primer
cggtagtggtcaggatcagc

SEQ ID NO: 9503 - DNA, 20 bp, Artificial Sequence
  primer
gcagactcacatttgctggg

SEQ ID NO: 9504 - DNA, 38 bp, Artificial Sequence
  primer
gtaaaacgacggccagtcaacttcactgaatgtgagcg

SEQ ID NO: 9505 - DNA, 38 bp, Artificial Sequence
  primer
gtaaaacgacggccagtctctgtcatgcaatctttggg

SEQ ID NO: 9506 - DNA, 36 bp, Artificial Sequence
  primer
gtaaaacgacggccagtctgtgcctacaggcaggtg

SEQ ID NO: 9507 - DNA, 21 bp, Artificial Sequence
  primer
actccaagcacaagatgatcg

SEQ ID NO: 9508 - DNA, 36 bp, Artificial Sequence
  primer
gtaaaacgacggccagtctggagcacctggagaagc

SEQ ID NO: 9509 - DNA, 37 bp, Artificial Sequence
  primer
gtaaaacgacggccagtcagagaaggacaccagtggg

SEQ ID NO: 9510 - DNA, 38 bp, Artificial Sequence
  primer
gtaaaacgacggccagtctctccaacgacagcctcaac

SEQ ID NO: 9511 - DNA, 38 bp, Artificial Sequence
  primer
gtaaaacgacggccagtagctgtcgcctacctatcagc

SEQ ID NO: 9512 - DNA, 38 bp, Artificial Sequence
  primer
gtaaaacgacggccagtatgacagtgactcctccctgg

SEQ ID NO: 9513 - DNA, 35 bp, Artificial Sequence
  primer
gtaaaacgacggccagtcagcttcgagagcccgtc

SEQ ID NO: 9514 - DNA, 37 bp, Artificial Sequence
  primer
gtaaaacgacggccagtttaccgtggagaagccagac

SEQ ID NO: 9515 - DNA, 19 bp, Artificial Sequence
  primer
gtctacatgttggtgcccg

SEQ ID NO: 9516 - DNA, 38 bp, Artificial Sequence
  primer
gtaaaacgacggccagtgaggacgactcctgcactgac

SEQ ID NO: 9517 - DNA, 36 bp, Artificial Sequence
  primer
gtaaaacgacggccagtgaacagagcagggctggag

SEQ ID NO: 9518 - DNA, 20 bp, Artificial Sequence
  primer
agcctcattgctgacgagac

SEQ ID NO: 9519 - DNA, 35 bp, Artificial Sequence
  primer
gtaaaacgacggccagtggaggagcttctgcagcg

SEQ ID NO: 9520 - DNA, 20 bp, Artificial Sequence
  primer
gacctggatagcgtggagtg

SEQ ID NO: 9521 - DNA, 36 bp, Artificial Sequence
  primer
gtaaaacgacggccagtgtatccgggctgtcagtgg

SEQ ID NO: 9522 - DNA, 37 bp, Artificial Sequence
  primer
gtaaaacgacggccagtccacgtggcacacagaagac

SEQ ID NO: 9523 - DNA, 34 bp, Artificial Sequence
  primer
gtaaaacgacggccagtctccagccaaagtcccg

SEQ ID NO: 9524 - DNA, 37 bp, Artificial Sequence
  primer
gtaaaacgacggccagtagcacaagacgcagagatcg

SEQ ID NO: 9525 - DNA, 34 bp, Artificial Sequence
  primer
gtaaaacgacggccagtcctcagccctctccagc

SEQ ID NO: 9526 - DNA, 37 bp, Artificial Sequence
  primer
gtaaaacgacggccagtggagactgtcaagcgctacg

SEQ ID NO: 9527 - DNA, 37 bp, Artificial Sequence
  primer
gtaaaacgacggccagtaagaccaactccagcacgtc

SEQ ID NO: 9528 - DNA, 18 bp, Artificial Sequence
  primer
atctccgcacccttcgtg

SEQ ID NO: 9529 - DNA, 20 bp, Artificial Sequence
  primer
cgcgctggaaatatgaagag

SEQ ID NO: 9530 - DNA, 37 bp, Artificial Sequence
  primer
gtaaaacgacggccagtgtggttgtttggcctgattc

SEQ ID NO: 9531 - DNA, 38 bp, Artificial Sequence
  primer
gtaaaacgacggccagtctctttcccataccttcaggc

SEQ ID NO: 9532 - DNA, 20 bp, Artificial Sequence
  primer
aggacgtggcctatgacctc

SEQ ID NO: 9533 - DNA, 21 bp, Artificial Sequence
  primer
ttccagttggttcttggtgtc

SEQ ID NO: 9534 - DNA, 38 bp, Artificial Sequence
  primer
gtaaaacgacggccagtacaggttgaactcttctccgc

SEQ ID NO: 9535 - DNA, 21 bp, Artificial Sequence
  primer
aacgtcttcaacgggaatgag

SEQ ID NO: 9536 - DNA, 38 bp, Artificial Sequence
  primer
gtaaaacgacggccagtggacagccactgtgttgtctg

SEQ ID NO: 9537 - DNA, 38 bp, Artificial Sequence
  primer
gtaaaacgacggccagtgccactgtgttgtctgctacc

SEQ ID NO: 9538 - DNA, 38 bp, Artificial Sequence
  primer
gtaaaacgacggccagttaaacttgatcacaccgctgg

SEQ ID NO: 9539 - DNA, 21 bp, Artificial Sequence
  primer
ggcaagtttgataggagccag

SEQ ID NO: 9540 - DNA, 37 bp, Artificial Sequence
  primer
gtaaaacgacggccagtaacggtcctcacccattagc

SEQ ID NO: 9541 - DNA, 38 bp, Artificial Sequence
  primer
gtaaaacgacggccagtctatggaacgtcaggtgaggg

SEQ ID NO: 9542 - DNA, 38 bp, Artificial Sequence
  primer
gtaaaacgacggccagttcaaagaggctgtcagctcag

SEQ ID NO: 9543 - DNA, 38 bp, Artificial Sequence
  primer
gtaaaacgacggccagtaactcagcctggactagagcc

SEQ ID NO: 9544 - DNA, 21 bp, Artificial Sequence
  primer
agcagttcctggaggtgagtc

SEQ ID NO: 9545 - DNA, 21 bp, Artificial Sequence
  primer
ggcctgtttatgaggatggtg

SEQ ID NO: 9546 - DNA, 38 bp, Artificial Sequence
  primer
gtaaaacgacggccagtagatagccaggctgaagaagc

SEQ ID NO: 9547 - DNA, 21 bp, Artificial Sequence
  primer
agagtggcaacatctctgtgc

SEQ ID NO: 9548 - DNA, 38 bp, Artificial Sequence
  primer
gtaaaacgacggccagtacccttcttgagctaccaccc

SEQ ID NO: 9549 - DNA, 38 bp, Artificial Sequence
  primer
gtaaaacgacggccagtagtgtggtaagtggctgatgc

SEQ ID NO: 9550 - DNA, 38 bp, Artificial Sequence
  primer
gtaaaacgacggccagtatcaggcttattccagttccc

SEQ ID NO: 9551 - DNA, 37 bp, Artificial Sequence
  primer
gtaaaacgacggccagtccatgtgtgctacaagctgc

SEQ ID NO: 9552 - DNA, 38 bp, Artificial Sequence
  primer
gtaaaacgacggccagtgggctctccaagagggtagag

SEQ ID NO: 9553 - DNA, 38 bp, Artificial Sequence
  primer
gtaaaacgacggccagtagttgggtgtttgtgaaaggc

SEQ ID NO: 9554 - DNA, 38 bp, Artificial Sequence
  primer
gtaaaacgacggccagtagagctgcctatttcccactg

SEQ ID NO: 9555 - DNA, 38 bp, Artificial Sequence
  primer
gtaaaacgacggccagtactaccttggccaggtctctg

SEQ ID NO: 9556 - DNA, 21 bp, Artificial Sequence
  primer
taggcatctggcgttaagagc

SEQ ID NO: 9557 - DNA, 21 bp, Artificial Sequence
  primer
agtctgtggtatagctggccc

SEQ ID NO: 9558 - DNA, 38 bp, Artificial Sequence
  primer
gtaaaacgacggccagtcaccaggatgtgaaggatgtc

SEQ ID NO: 9559 - DNA, 38 bp, Artificial Sequence
  primer
gtaaaacgacggccagtctggtaggcatacaccacagg

SEQ ID NO: 9560 - DNA, 21 bp, Artificial Sequence
  primer
aatcgcccatcagatacatcc

SEQ ID NO: 9561 - DNA, 38 bp, Artificial Sequence
  primer
gtaaaacgacggccagtatggagtattaccgtgccctc

SEQ ID NO: 9562 - DNA, 38 bp, Artificial Sequence
  primer
gtaaaacgacggccagttggtttcatgatttctttgcg

SEQ ID NO: 9563 - DNA, 21 bp, Artificial Sequence
  primer
aagaagtcgcaggaaccgtag

SEQ ID NO: 9564 - DNA, 38 bp, Artificial Sequence
  primer
gtaaaacgacggccagtagagactgtttaacccgtgcg

SEQ ID NO: 9565 - DNA, 21 bp, Artificial Sequence
  primer
gacaaggaagggtacagtggc

SEQ ID NO: 9566 - DNA, 38 bp, Artificial Sequence
  primer
gtaaaacgacggccagtatgtacctaatgcaggccgag

SEQ ID NO: 9567 - DNA, 37 bp, Artificial Sequence
  primer
gtaaaacgacggccagtctggccaacttctgaacagg

SEQ ID NO: 9568 - DNA, 21 bp, Artificial Sequence
  primer
gatatttcattcccgtcaccc

SEQ ID NO: 9569 - DNA, 37 bp, Artificial Sequence
  primer
gtaaaacgacggccagtgacaattggagtgggacagg

SEQ ID NO: 9570 - DNA, 38 bp, Artificial Sequence
  primer
gtaaaacgacggccagtaatggaagccatgtggtatgg

SEQ ID NO: 9571 - DNA, 37 bp, Artificial Sequence
  primer
gtaaaacgacggccagtgaaaggcagcaagtttgtgg

SEQ ID NO: 9572 - DNA, 38 bp, Artificial Sequence
  primer
gtaaaacgacggccagtccaatgcaagacaaatgcaag

SEQ ID NO: 9573 - DNA, 38 bp, Artificial Sequence
  primer
gtaaaacgacggccagtaagtggatggacagcttgctc

SEQ ID NO: 9574 - DNA, 38 bp, Artificial Sequence
  primer
gtaaaacgacggccagtaacaatcaaacccgggtacag

SEQ ID NO: 9575 - DNA, 38 bp, Artificial Sequence
  primer
gtaaaacgacggccagtcttgaggccattctacatccc

SEQ ID NO: 9576 - DNA, 24 bp, Artificial Sequence
  primer
gatcagtttggaacttatgggaag

SEQ ID NO: 9577 - DNA, 43 bp, Artificial Sequence
  primer
gtaaaacgacggccagttttactatttacccaggactcaaatg

SEQ ID NO: 9578 - DNA, 22 bp, Artificial Sequence
  primer
ttcctagaggcaatgaatgagc

SEQ ID NO: 9579 - DNA, 43 bp, Artificial Sequence
  primer
gtaaaacgacggccagtcaataacttggaatttgagacaaacc

SEQ ID NO: 9580 - DNA, 38 bp, Artificial Sequence
  primer
gtaaaacgacggccagtcagaaatgctgagattccagg

SEQ ID NO: 9581 - DNA, 38 bp, Artificial Sequence
  primer
gtaaaacgacggccagtctctcccgaggtctgtagtcg

SEQ ID NO: 9582 - DNA, 46 bp, Artificial Sequence
  primer
gtaaaacgacggccagttcttcagtatcataaatacgtaagatgga

SEQ ID NO: 9583 - DNA, 41 bp, Artificial Sequence
  primer
gtaaaacgacggccagttcagagaagctttcttcaattgtg

SEQ ID NO: 9584 - DNA, 22 bp, Artificial Sequence
  primer
tgatagaaacaggcatcctttg

SEQ ID NO: 9585 - DNA, 21 bp, Artificial Sequence
  primer
tgcctaattggaaaggtttgg

SEQ ID NO: 9586 - DNA, 38 bp, Artificial Sequence
  primer
gtaaaacgacggccagtgccacccactgtgtagtttcc

SEQ ID NO: 9587 - DNA, 38 bp, Artificial Sequence
  primer
gtaaaacgacggccagtgttaagcactcagccaggtcc

SEQ ID NO: 9588 - DNA, 38 bp, Artificial Sequence
  primer
gtaaaacgacggccagtgcttctagagagcccaaaccc

SEQ ID NO: 9589 - DNA, 38 bp, Artificial Sequence
  primer
gtaaaacgacggccagttaacgcattgctgtcatagcc

SEQ ID NO: 9590 - DNA, 39 bp, Artificial Sequence
  primer
gtaaaacgacggccagtcaggctatcaacagaggcagtc

SEQ ID NO: 9591 - DNA, 38 bp, Artificial Sequence
  primer
gtaaaacgacggccagtccatgaattaggcatttggag

SEQ ID NO: 9592 - DNA, 22 bp, Artificial Sequence
  primer
ggcttccattgtatttcagtgc

SEQ ID NO: 9593 - DNA, 37 bp, Artificial Sequence
  primer
gtaaaacgacggccagtcgagttgaagcacactcacg

SEQ ID NO: 9594 - DNA, 38 bp, Artificial Sequence
  primer
gtaaaacgacggccagtggatgctgtggatactttgcc

SEQ ID NO: 9595 - DNA, 38 bp, Artificial Sequence
  primer
gtaaaacgacggccagtagtcagtggttagagggtggc

SEQ ID NO: 9596 - DNA, 21 bp, Artificial Sequence
  primer
tgcatgctagttgaattgcag

SEQ ID NO: 9597 - DNA, 38 bp, Artificial Sequence
  primer
gtaaaacgacggccagttccgaacaaatgctatcaagc

SEQ ID NO: 9598 - DNA, 38 bp, Artificial Sequence
  primer
gtaaaacgacggccagttgatgccactgttcattagcc

SEQ ID NO: 9599 - DNA, 20 bp, Artificial Sequence
  primer
ggactccctgaatgcacaag

SEQ ID NO: 9600 - DNA, 38 bp, Artificial Sequence
  primer
gtaaaacgacggccagtgcagtttggtactgtgttggg

SEQ ID NO: 9601 - DNA, 21 bp, Artificial Sequence
  primer
tctcacctcaggtctcccttc

SEQ ID NO: 9602 - DNA, 22 bp, Artificial Sequence
  primer
tgtgctctattgcctagaaggg

SEQ ID NO: 9603 - DNA, 21 bp, Artificial Sequence
  primer
gaggctggtagagcagctttg

SEQ ID NO: 9604 - DNA, 40 bp, Artificial Sequence
  primer
gtaaaacgacggccagtcttaatggagtccttcccaaatc

SEQ ID NO: 9605 - DNA, 44 bp, Artificial Sequence
  primer
gtaaaacgacggccagttgaaatattcacttagtactttggtgg

SEQ ID NO: 9606 - DNA, 37 bp, Artificial Sequence
  primer
gtaaaacgacggccagtaatttgaggaggtgccattg

SEQ ID NO: 9607 - DNA, 21 bp, Artificial Sequence
  primer
ttgtggacaagaactgccttg

SEQ ID NO: 9608 - DNA, 21 bp, Artificial Sequence
  primer
gccttaaacatgctggctttc

SEQ ID NO: 9609 - DNA, 24 bp, Artificial Sequence
  primer
cgtagctttgagttccaagttcat

SEQ ID NO: 9610 - DNA, 36 bp, Artificial Sequence
  primer
gtaaaacgacggccagtcccacctcagtctcccaca

SEQ ID NO: 9611 - DNA, 20 bp, Artificial Sequence
  primer
ttgtgtttcggaagtggagg

SEQ ID NO: 9612 - DNA, 40 bp, Artificial Sequence
  primer
gtaaaacgacggccagtaaatggataattacaacatgggc

SEQ ID NO: 9613 - DNA, 21 bp, Artificial Sequence
  primer
gccgttagagcttcaccaatc

SEQ ID NO: 9614 - DNA, 38 bp, Artificial Sequence
  primer
gtaaaacgacggccagtttcaagctgctgacctttcac

SEQ ID NO: 9615 - DNA, 40 bp, Artificial Sequence
  primer
gtaaaacgacggccagtcccataataatggaattgactgg

SEQ ID NO: 9616 - DNA, 39 bp, Artificial Sequence
  primer
gtaaaacgacggccagttgtgtgagtcccaaatatgctg

SEQ ID NO: 9617 - DNA, 21 bp, Artificial Sequence
  primer
acccactgagtccttgaaagc

SEQ ID NO: 9618 - DNA, 21 bp, Artificial Sequence
  primer
ctgttccttctcttcccttgc

SEQ ID NO: 9619 - DNA, 39 bp, Artificial Sequence
  primer
gtaaaacgacggccagttggtgactttaggaacactggg

SEQ ID NO: 9620 - DNA, 21 bp, Artificial Sequence
  primer
cagaggagagggccttctagg

SEQ ID NO: 9621 - DNA, 21 bp, Artificial Sequence
  primer
gggcataaaccaaatcaatcc

SEQ ID NO: 9622 - DNA, 38 bp, Artificial Sequence
  primer
gtaaaacgacggccagtagagaaccagagtgcctcctc

SEQ ID NO: 9623 - DNA, 38 bp, Artificial Sequence
  primer
gtaaaacgacggccagtgtcacatccacagagactggc

SEQ ID NO: 9624 - DNA, 38 bp, Artificial Sequence
  primer
gtaaaacgacggccagtaccagcagaccactgtctcag

SEQ ID NO: 9625 - DNA, 22 bp, Artificial Sequence
  primer
catcaccgtcgttaggtttatg

SEQ ID NO: 9626 - DNA, 21 bp, Artificial Sequence
  primer
cagaggagagggccttctagg

SEQ ID NO: 9627 - DNA, 38 bp, Artificial Sequence
  primer
gtaaaacgacggccagtttcaggaaagggcaatttgag

SEQ ID NO: 9628 - DNA, 23 bp, Artificial Sequence
  primer
aacaggtattgctccatgtaacc

SEQ ID NO: 9629 - DNA, 23 bp, Artificial Sequence
  primer
gcataaattgcctttatttccag

SEQ ID NO: 9630 - DNA, 26 bp, Artificial Sequence
  primer
aaaggattggaaagattgtgacatac

SEQ ID NO: 9631 - DNA, 38 bp, Artificial Sequence
  primer
gtaaaacgacggccagtaacccaaatgaccttaaatgc

SEQ ID NO: 9632 - DNA, 44 bp, Artificial Sequence
  primer
gtaaaacgacggccagttctgatgtctgataccattcagataat

SEQ ID NO: 9633 - DNA, 37 bp, Artificial Sequence
  primer
gtaaaacgacggccagtgggtggaggataaatttggg

SEQ ID NO: 9634 - DNA, 21 bp, Artificial Sequence
  primer
aagtggatttcagaacctggg

SEQ ID NO: 9635 - DNA, 24 bp, Artificial Sequence
  primer
tgcaaacctatgtttcagtcaatg

SEQ ID NO: 9636 - DNA, 20 bp, Artificial Sequence
  primer
gagaggaccatctgcgtagg

SEQ ID NO: 9637 - DNA, 38 bp, Artificial Sequence
  primer
gtaaaacgacggccagtgctaacaggagaggttcaggg

SEQ ID NO: 9638 - DNA, 19 bp, Artificial Sequence
  primer
gctaagatggcgatggctg

SEQ ID NO: 9639 - DNA, 39 bp, Artificial Sequence
  primer
gtaaaacgacggccagtgataggaactaggatcgtgccc

SEQ ID NO: 9640 - DNA, 36 bp, Artificial Sequence
  primer
gtaaaacgacggccagttccagcatccacctctgtg

SEQ ID NO: 9641 - DNA, 19 bp, Artificial Sequence
  primer
cggtgcatgtgtagatggg

SEQ ID NO: 9642 - DNA, 37 bp, Artificial Sequence
  primer
gtaaaacgacggccagtatcgctagtggcacacatcc

SEQ ID NO: 9643 - DNA, 38 bp, Artificial Sequence
  primer
gtaaaacgacggccagtctctgagaaattgcacggttg

SEQ ID NO: 9644 - DNA, 38 bp, Artificial Sequence
  primer
gtaaaacgacggccagtacagaggaggtgtttgccaag

SEQ ID NO: 9645 - DNA, 37 bp, Artificial Sequence
  primer
gtaaaacgacggccagtaagcgtttgttgagtggctg

SEQ ID NO: 9646 - DNA, 21 bp, Artificial Sequence
  primer
acttcctgctgtacctggacc

SEQ ID NO: 9647 - DNA, 38 bp, Artificial Sequence
  primer
gtaaaacgacggccagtggagaggtggtcctgagaagc

SEQ ID NO: 9648 - DNA, 39 bp, Artificial Sequence
  primer
gtaaaacgacggccagtcgttgcaaggatctgactaatg

SEQ ID NO: 9649 - DNA, 22 bp, Artificial Sequence
  primer
aataatgcaaagaacacggctg

SEQ ID NO: 9650 - DNA, 38 bp, Artificial Sequence
  primer
gtaaaacgacggccagtcacctgatgcctggaaagtag

SEQ ID NO: 9651 - DNA, 23 bp, Artificial Sequence
  primer
tcagattattaccctttgatgcc

SEQ ID NO: 9652 - DNA, 21 bp, Artificial Sequence
  primer
tggctgtgcgaatatctaggg

SEQ ID NO: 9653 - DNA, 23 bp, Artificial Sequence
  primer
aggcacctaatgccaacataaag

SEQ ID NO: 9654 - DNA, 21 bp, Artificial Sequence
  primer
tctccatgtccacatttcctg

SEQ ID NO: 9655 - DNA, 24 bp, Artificial Sequence
  primer
ttacaaatgttctttctcaccagg

SEQ ID NO: 9656 - DNA, 22 bp, Artificial Sequence
  primer
aagagctctgtcacattctgcc

SEQ ID NO: 9657 - DNA, 40 bp, Artificial Sequence
  primer
gtaaaacgacggccagtcagtggtggttgacttgtctctc

SEQ ID NO: 9658 - DNA, 38 bp, Artificial Sequence
  primer
gtaaaacgacggccagtcagctccacacttcacctgag

SEQ ID NO: 9659 - DNA, 24 bp, Artificial Sequence
  primer
tttgctatcttaattggccttgag

SEQ ID NO: 9660 - DNA, 42 bp, Artificial Sequence
  primer
gtaaaacgacggccagtgctaagtggtattatttggaggcac

SEQ ID NO: 9661 - DNA, 38 bp, Artificial Sequence
  primer
gtaaaacgacggccagttcctgtggctttcttctcctc

SEQ ID NO: 9662 - DNA, 21 bp, Artificial Sequence
  primer
ttctctccaactggtttgctg

SEQ ID NO: 9663 - DNA, 38 bp, Artificial Sequence
  primer
gtaaaacgacggccagtcccagtagttgggaaagatgg

SEQ ID NO: 9664 - DNA, 38 bp, Artificial Sequence
  primer
gtaaaacgacggccagtgttgcagaggactccaacagc

SEQ ID NO: 9665 - DNA, 21 bp, Artificial Sequence
  primer
tttgaggttcccaagcttctc

SEQ ID NO: 9666 - DNA, 38 bp, Artificial Sequence
  primer
gtaaaacgacggccagtaagtaagtgcaggcagctgtg

SEQ ID NO: 9667 - DNA, 23 bp, Artificial Sequence
  primer
gcaaatatggaattagccacagc

SEQ ID NO: 9668 - DNA, 38 bp, Artificial Sequence
  primer
gtaaaacgacggccagttctttgccaacaatgagcatc

SEQ ID NO: 9669 - DNA, 38 bp, Artificial Sequence
  primer
gtaaaacgacggccagtaacttacactgcccagcaagg

SEQ ID NO: 9670 - DNA, 21 bp, Artificial Sequence
  primer
tgctcataatctctttccggg

SEQ ID NO: 9671 - DNA, 23 bp, Artificial Sequence
  primer
tttggccactagattgcattatt

SEQ ID NO: 9672 - DNA, 21 bp, Artificial Sequence
  primer
gaaacaagggagtggttctgc

SEQ ID NO: 9673 - DNA, 20 bp, Artificial Sequence
  primer
ggcttccgtagaggaagtgg

SEQ ID NO: 9674 - DNA, 38 bp, Artificial Sequence
  primer
gtaaaacgacggccagtatccggaaggctaacttccac

SEQ ID NO: 9675 - DNA, 38 bp, Artificial Sequence
  primer
gtaaaacgacggccagtgaagatggagtggtctggagg

SEQ ID NO: 9676 - DNA, 39 bp, Artificial Sequence
  primer
gtaaaacgacggccagtcgtcacttccaaagaaagttgg

SEQ ID NO: 9677 - DNA, 38 bp, Artificial Sequence
  primer
gtaaaacgacggccagttctttggctcaacatctcagg

SEQ ID NO: 9678 - DNA, 21 bp, Artificial Sequence
  primer
tgctctgaagggaaagactgg

SEQ ID NO: 9679 - DNA, 19 bp, Artificial Sequence
  primer
ccaggccctagcgtttacc

SEQ ID NO: 9680 - DNA, 21 bp, Artificial Sequence
  primer
cttggacacgtttgtctcacc

SEQ ID NO: 9681 - DNA, 23 bp, Artificial Sequence
  primer
gatgcaaagcctcagtgagtatc

SEQ ID NO: 9682 - DNA, 22 bp, Artificial Sequence
  primer
aagaacataagcaccctttccc

SEQ ID NO: 9683 - DNA, 38 bp, Artificial Sequence
  primer
gtaaaacgacggccagtctctcttgctgaggtgtggtg

SEQ ID NO: 9684 - DNA, 38 bp, Artificial Sequence
  primer
gtaaaacgacggccagttggtgaaacacacccaagttc

SEQ ID NO: 9685 - DNA, 37 bp, Artificial Sequence
  primer
gtaaaacgacggccagtgggtttggagaagttccgag

SEQ ID NO: 9686 - DNA, 39 bp, Artificial Sequence
  primer
gtaaaacgacggccagtcagtttgagcagtaaacctccc

SEQ ID NO: 9687 - DNA, 21 bp, Artificial Sequence
  primer
gggcaacagagcaataccttg

SEQ ID NO: 9688 - DNA, 38 bp, Artificial Sequence
  primer
gtaaaacgacggccagttcgggttctcaacttacaagg

SEQ ID NO: 9689 - DNA, 41 bp, Artificial Sequence
  primer
gtaaaacgacggccagtaatgaggatgatatttgggaagtt

SEQ ID NO: 9690 - DNA, 38 bp, Artificial Sequence
  primer
gtaaaacgacggccagtatgcgtggtttacactgaagc

SEQ ID NO: 9691 - DNA, 38 bp, Artificial Sequence
  primer
gtaaaacgacggccagttgtagcgctcagcatttattg

SEQ ID NO: 9692 - DNA, 22 bp, Artificial Sequence
  primer
tgggctgcatctatctctaagg

SEQ ID NO: 9693 - DNA, 22 bp, Artificial Sequence
  primer
aaacatgcactgtaattccctg

SEQ ID NO: 9694 - DNA, 38 bp, Artificial Sequence
  primer
gtaaaacgacggccagtgcttgagccatgtgttacctg

SEQ ID NO: 9695 - DNA, 42 bp, Artificial Sequence
  primer
gtaaaacgacggccagttcaagcaataggaatacgcattatc

SEQ ID NO: 9696 - DNA, 38 bp, Artificial Sequence
  primer
gtaaaacgacggccagtttcctaccctcaccaccactc

SEQ ID NO: 9697 - DNA, 41 bp, Artificial Sequence
  primer
gtaaaacgacggccagtccttctgacattgtctgcataacc

SEQ ID NO: 9698 - DNA, 21 bp, Artificial Sequence
  primer
accttgccttacgtgcttcag

SEQ ID NO: 9699 - DNA, 21 bp, Artificial Sequence
  primer
tgtcagcacatgtaacggatg

SEQ ID NO: 9700 - DNA, 38 bp, Artificial Sequence
  primer
gtaaaacgacggccagttttgggaagggattcttcatc

SEQ ID NO: 9701 - DNA, 24 bp, Artificial Sequence
  primer
catgttgctttaaagggaaagaga

SEQ ID NO: 9702 - DNA, 37 bp, Artificial Sequence
  primer
gtaaaacgacggccagtgcgagatgtcaagccagttc

SEQ ID NO: 9703 - DNA, 41 bp, Artificial Sequence
  primer
gtaaaacgacggccagttttgttacatctcaatcctgttgc

SEQ ID NO: 9704 - DNA, 24 bp, Artificial Sequence
  primer
gctcccagaagagaaggtagagtc

SEQ ID NO: 9705 - DNA, 22 bp, Artificial Sequence
  primer
ggttgtggagggtttagtttcg

SEQ ID NO: 9706 - DNA, 37 bp, Artificial Sequence
  primer
gtaaaacgacggccagttatttgcagccttacccgtg

SEQ ID NO: 9707 - DNA, 37 bp, Artificial Sequence
  primer
gtaaaacgacggccagtagccagccgctaagaaagag

SEQ ID NO: 9708 - DNA, 37 bp, Artificial Sequence
  primer
gtaaaacgacggccagtagaagtgccaccacatggac

SEQ ID NO: 9709 - DNA, 39 bp, Artificial Sequence
  primer
gtaaaacgacggccagtgctattgtcctgaccaggaagg

SEQ ID NO: 9710 - DNA, 38 bp, Artificial Sequence
  primer
gtaaaacgacggccagtggtcctagggagcaaagaacc

SEQ ID NO: 9711 - DNA, 38 bp, Artificial Sequence
  primer
gtaaaacgacggccagtggacctgactactggagaggg

SEQ ID NO: 9712 - DNA, 38 bp, Artificial Sequence
  primer
gtaaaacgacggccagttgggtgcttgtgtcctaagtg

SEQ ID NO: 9713 - DNA, 38 bp, Artificial Sequence
  primer
gtaaaacgacggccagttctagaagcaggaatccaggc

SEQ ID NO: 9714 - DNA, 38 bp, Artificial Sequence
  primer
gtaaaacgacggccagtatctcaaggttcctgaggcag

SEQ ID NO: 9715 - DNA, 38 bp, Artificial Sequence
  primer
gtaaaacgacggccagttaaactgggtgcatgatggtc

SEQ ID NO: 9716 - DNA, 37 bp, Artificial Sequence
  primer
gtaaaacgacggccagttcctgaccttgtgatccacc

SEQ ID NO: 9717 - DNA, 21 bp, Artificial Sequence
  primer
tccataacctttggttctgcc

SEQ ID NO: 9718 - DNA, 21 bp, Artificial Sequence
  primer
gtcatcgcccttatcaacgac

SEQ ID NO: 9719 - DNA, 39 bp, Artificial Sequence
  primer
gtaaaacgacggccagtcccagttcctaacccttgtacc

SEQ ID NO: 9720 - DNA, 38 bp, Artificial Sequence
  primer
gtaaaacgacggccagtgtctgcatgatctcccacttg

SEQ ID NO: 9721 - DNA, 21 bp, Artificial Sequence
  primer
ccagattccaaggatggtgag

SEQ ID NO: 9722 - DNA, 21 bp, Artificial Sequence
  primer
cgtagaaggatcactggagcc

SEQ ID NO: 9723 - DNA, 21 bp, Artificial Sequence
  primer
gcttggattccttgtcctgag

SEQ ID NO: 9724 - DNA, 38 bp, Artificial Sequence
  primer
gtaaaacgacggccagtgctggtaagaggaggaacagc

SEQ ID NO: 9725 - DNA, 21 bp, Artificial Sequence
  primer
ggtgtgggaagagttcctgag

SEQ ID NO: 9726 - DNA, 21 bp, Artificial Sequence
  primer
ccagattccaaggatggtgag

SEQ ID NO: 9727 - DNA, 21 bp, Artificial Sequence
  primer
ctggctttagatgcttctggg

SEQ ID NO: 9728 - DNA, 23 bp, Artificial Sequence
  primer
catagacctgaatgactgttgcc

SEQ ID NO: 9729 - DNA, 21 bp, Artificial Sequence
  primer
gtaggataagggtggaggctg

SEQ ID NO: 9730 - DNA, 38 bp, Artificial Sequence
  primer
gtaaaacgacggccagtagactgctcctggctgtgtag

SEQ ID NO: 9731 - DNA, 21 bp, Artificial Sequence
  primer
ttggaccagatcatgtttccc

SEQ ID NO: 9732 - DNA, 21 bp, Artificial Sequence
  primer
gagaagggacccattgttgtg

SEQ ID NO: 9733 - DNA, 38 bp, Artificial Sequence
  primer
gtaaaacgacggccagtagcaacttgtcctcagcaagg

SEQ ID NO: 9734 - DNA, 39 bp, Artificial Sequence
  primer
gtaaaacgacggccagtaaacaaattgagtccatcctgc

SEQ ID NO: 9735 - DNA, 22 bp, Artificial Sequence
  primer
ccttctgaggcagtaacaatgc

SEQ ID NO: 9736 - DNA, 21 bp, Artificial Sequence
  primer
gtctcagggtgcttgcttagg

SEQ ID NO: 9737 - DNA, 23 bp, Artificial Sequence
  primer
tcttgtgcctagctgagctttac

SEQ ID NO: 9738 - DNA, 37 bp, Artificial Sequence
  primer
gtaaaacgacggccagtatgttccagctgcaagttcc

SEQ ID NO: 9739 - DNA, 38 bp, Artificial Sequence
  primer
gtaaaacgacggccagtctctagagcatcctgtgcctg

SEQ ID NO: 9740 - DNA, 21 bp, Artificial Sequence
  primer
tatgggatatttcaggcaggg

SEQ ID NO: 9741 - DNA, 21 bp, Artificial Sequence
  primer
ccctcagacttgtgaacatgg

SEQ ID NO: 9742 - DNA, 38 bp, Artificial Sequence
  primer
gtaaaacgacggccagtagcaggtagcagaggaaggag

SEQ ID NO: 9743 - DNA, 21 bp, Artificial Sequence
  primer
gccctcagtgagttacttgcc

SEQ ID NO: 9744 - DNA, 37 bp, Artificial Sequence
  primer
gtaaaacgacggccagtcagcaaatggctcaggtctc

SEQ ID NO: 9745 - DNA, 21 bp, Artificial Sequence
  primer
gaatcccaagtggaagggaag

SEQ ID NO: 9746 - DNA, 37 bp, Artificial Sequence
  primer
gtaaaacgacggccagtgagcacggtggtgaagtacc

SEQ ID NO: 9747 - DNA, 20 bp, Artificial Sequence
  primer
aactctcgacctttgggagc

SEQ ID NO: 9748 - DNA, 38 bp, Artificial Sequence
  primer
gtaaaacgacggccagtaggagatggtctggtctgtgc

SEQ ID NO: 9749 - DNA, 38 bp, Artificial Sequence
  primer
gtaaaacgacggccagttgtgcctctgagaatggtctg

SEQ ID NO: 9750 - DNA, 37 bp, Artificial Sequence
  primer
gtaaaacgacggccagtccactcctctgggactaggg

SEQ ID NO: 9751 - DNA, 20 bp, Artificial Sequence
  primer
agagggagagagccaggttg

SEQ ID NO: 9752 - DNA, 21 bp, Artificial Sequence
  primer
ccaaagatctggctggatacc

SEQ ID NO: 9753 - DNA, 38 bp, Artificial Sequence
  primer
gtaaaacgacggccagtagaggaacagcaagaactggg

SEQ ID NO: 9754 - DNA, 39 bp, Artificial Sequence
  primer
gtaaaacgacggccagtaaagtctttgccgtgtaaatgc

SEQ ID NO: 9755 - DNA, 38 bp, Artificial Sequence
  primer
gtaaaacgacggccagtgctccctgctatgtgactgag

SEQ ID NO: 9756 - DNA, 38 bp, Artificial Sequence
  primer
gtaaaacgacggccagtgtctccgaccctgacttcaac

SEQ ID NO: 9757 - DNA, 38 bp, Artificial Sequence
  primer
gtaaaacgacggccagtgacaaaggaggatgatggagg

SEQ ID NO: 9758 - DNA, 35 bp, Artificial Sequence
  primer
gtaaaacgacggccagttctgagtgggagcgaggc

SEQ ID NO: 9759 - DNA, 38 bp, Artificial Sequence
  primer
gtaaaacgacggccagtaactgaagccctacacgatgg

SEQ ID NO: 9760 - DNA, 38 bp, Artificial Sequence
  primer
gtaaaacgacggccagtagagctcttccacccatacgc

SEQ ID NO: 9761 - DNA, 19 bp, Artificial Sequence
  primer
cagcgacttcaggctttcc

SEQ ID NO: 9762 - DNA, 35 bp, Artificial Sequence
  primer
gtaaaacgacggccagtgggctgagtgcccttctc

SEQ ID NO: 9763 - DNA, 38 bp, Artificial Sequence
  primer
gtaaaacgacggccagtcctcctgaaaggtgaaacctg

SEQ ID NO: 9764 - DNA, 36 bp, Artificial Sequence
  primer
gtaaaacgacggccagtcctctctgcccagaattgg

SEQ ID NO: 9765 - DNA, 38 bp, Artificial Sequence
  primer
gtaaaacgacggccagtcccaggaggcatgttgataag

SEQ ID NO: 9766 - DNA, 21 bp, Artificial Sequence
  primer
cagtgccacccagcttacttc

SEQ ID NO: 9767 - DNA, 39 bp, Artificial Sequence
  primer
gtaaaacgacggccagtcctcccaaagctagattccttc

SEQ ID NO: 9768 - DNA, 21 bp, Artificial Sequence
  primer
ggactcctgctcccttctacc

SEQ ID NO: 9769 - DNA, 38 bp, Artificial Sequence
  primer
gtaaaacgacggccagtgctggatttacccatgctttg

SEQ ID NO: 9770 - DNA, 38 bp, Artificial Sequence
  primer
gtaaaacgacggccagtactccacaatttccagcttcc

SEQ ID NO: 9771 - DNA, 38 bp, Artificial Sequence
  primer
gtaaaacgacggccagtctctcctggcagaggacacac

SEQ ID NO: 9772 - DNA, 22 bp, Artificial Sequence
  primer
ttgcttcagctattcaggctct

SEQ ID NO: 9773 - DNA, 38 bp, Artificial Sequence
  primer
gtaaaacgacggccagtacacctatttgattctgcggg

SEQ ID NO: 9774 - DNA, 37 bp, Artificial Sequence
  primer
gtaaaacgacggccagtacaatgccagtgtttgccag

SEQ ID NO: 9775 - DNA, 23 bp, Artificial Sequence
  primer
ttggaaatccatatttacttggg

SEQ ID NO: 9776 - DNA, 37 bp, Artificial Sequence
  primer
gtaaaacgacggccagtgctcctggcctgtggtattc

SEQ ID NO: 9777 - DNA, 38 bp, Artificial Sequence
  primer
gtaaaacgacggccagtcatcagacaggtcccacattg

SEQ ID NO: 9778 - DNA, 38 bp, Artificial Sequence
  primer
gtaaaacgacggccagttctccaatgtatgggaggttg

SEQ ID NO: 9779 - DNA, 38 bp, Artificial Sequence
  primer
gtaaaacgacggccagtttatccaggaaatctttgccc

SEQ ID NO: 9780 - DNA, 38 bp, Artificial Sequence
  primer
gtaaaacgacggccagtaggtgtggactgagggaagac

SEQ ID NO: 9781 - DNA, 20 bp, Artificial Sequence
  primer
ttgccttgggttcttgtagg

SEQ ID NO: 9782 - DNA, 20 bp, Artificial Sequence
  primer
gactacaggcacccaccaac

SEQ ID NO: 9783 - DNA, 40 bp, Artificial Sequence
  primer
gtaaaacgacggccagtgatcaccacaaatggaacttctg

SEQ ID NO: 9784 - DNA, 22 bp, Artificial Sequence
  primer
ttccaaagtaatgcaggtgttg

SEQ ID NO: 9785 - DNA, 38 bp, Artificial Sequence
  primer
gtaaaacgacggccagtactttcagtgcattgtccagc

SEQ ID NO: 9786 - DNA, 21 bp, Artificial Sequence
  primer
tgactgatgtctgactgtggg

SEQ ID NO: 9787 - DNA, 38 bp, Artificial Sequence
  primer
gtaaaacgacggccagtagtctattgcacaattggccc

SEQ ID NO: 9788 - DNA, 23 bp, Artificial Sequence
  primer
gatgtctgcttcagttcatttgg

SEQ ID NO: 9789 - DNA, 38 bp, Artificial Sequence
  primer
gtaaaacgacggccagtaactcctcctacctccaaggc

SEQ ID NO: 9790 - DNA, 21 bp, Artificial Sequence
  primer
ggttcttcagcctgctttctg

SEQ ID NO: 9791 - DNA, 38 bp, Artificial Sequence
  primer
gtaaaacgacggccagttctaccagtgcaacgaccaac

SEQ ID NO: 9792 - DNA, 21 bp, Artificial Sequence
  primer
actgggaagtgcttatcaggc

SEQ ID NO: 9793 - DNA, 38 bp, Artificial Sequence
  primer
gtaaaacgacggccagttctggatctcaccaacaatgg

SEQ ID NO: 9794 - DNA, 39 bp, Artificial Sequence
  primer
gtaaaacgacggccagtttcagactcactgcatttcagc

SEQ ID NO: 9795 - DNA, 21 bp, Artificial Sequence
  primer
gctccacaagtcatcatctcg

SEQ ID NO: 9796 - DNA, 24 bp, Artificial Sequence
  primer
tcttgatgagcactatcatatccg

SEQ ID NO: 9797 - DNA, 43 bp, Artificial Sequence
  primer
gtaaaacgacggccagtcagaatatagacatccagcacctagc

SEQ ID NO: 9798 - DNA, 21 bp, Artificial Sequence
  primer
aatgccttcagagccaaagtc

SEQ ID NO: 9799 - DNA, 42 bp, Artificial Sequence
  primer
gtaaaacgacggccagttcatttgattaccaccagtttgtag

SEQ ID NO: 9800 - DNA, 21 bp, Artificial Sequence
  primer
ctggaaagcctacaggacacc

SEQ ID NO: 9801 - DNA, 21 bp, Artificial Sequence
  primer
cattcagcaggaacttcaacg

SEQ ID NO: 9802 - DNA, 38 bp, Artificial Sequence
  primer
gtaaaacgacggccagtgcattggtagagcaagggttc

SEQ ID NO: 9803 - DNA, 21 bp, Artificial Sequence
  primer
cttccgtttaccagaaatcgc

SEQ ID NO: 9804 - DNA, 20 bp, Artificial Sequence
  primer
aaccacctcagcaaacgaag

SEQ ID NO: 9805 - DNA, 21 bp, Artificial Sequence
  primer
gtacctgagaacggagcatgg

SEQ ID NO: 9806 - DNA, 41 bp, Artificial Sequence
  primer
gtaaaacgacggccagtcaaactggacttctctagtcaggc

SEQ ID NO: 9807 - DNA, 38 bp, Artificial Sequence
  primer
gtaaaacgacggccagttgttgaaagctggccacatag

SEQ ID NO: 9808 - DNA, 38 bp, Artificial Sequence
  primer
gtaaaacgacggccagttgggccacagtgttctaactg

SEQ ID NO: 9809 - DNA, 22 bp, Artificial Sequence
  primer
caattcctgaaatgcgtctacc

SEQ ID NO: 9810 - DNA, 21 bp, Artificial Sequence
  primer
aaatcctttggctgtgctttg

SEQ ID NO: 9811 - DNA, 19 bp, Artificial Sequence
  primer
aatctcacgacgagctccc

SEQ ID NO: 9812 - DNA, 38 bp, Artificial Sequence
  primer
gtaaaacgacggccagtgcatgcctagtttctccatcc

SEQ ID NO: 9813 - DNA, 27 bp, Artificial Sequence
  primer
gatttctcctttaaatcaagtgtcatc

SEQ ID NO: 9814 - DNA, 38 bp, Artificial Sequence
  primer
gtaaaacgacggccagtgggattgaagttagccacagc

SEQ ID NO: 9815 - DNA, 38 bp, Artificial Sequence
  primer
gtaaaacgacggccagtcttgaattccaagagcacacg

SEQ ID NO: 9816 - DNA, 38 bp, Artificial Sequence
  primer
gtaaaacgacggccagtttgttcaggtccatgcaagtc

SEQ ID NO: 9817 - DNA, 21 bp, Artificial Sequence
  primer
aaccaccagcattggtaggag

SEQ ID NO: 9818 - DNA, 38 bp, Artificial Sequence
  primer
gtaaaacgacggccagtccatcgtgcaaacttgacttc

SEQ ID NO: 9819 - DNA, 25 bp, Artificial Sequence
  primer
tctagtgtcattcaagacaaacagc

SEQ ID NO: 9820 - DNA, 38 bp, Artificial Sequence
  primer
gtaaaacgacggccagtaccgtgacttcagtgcagaat

SEQ ID NO: 9821 - DNA, 39 bp, Artificial Sequence
  primer
gtaaaacgacggccagttgtaaatgacaaacagcaagcg

SEQ ID NO: 9822 - DNA, 20 bp, Artificial Sequence
  primer
aagaagaggcagcttctggc

SEQ ID NO: 9823 - DNA, 38 bp, Artificial Sequence
  primer
gtaaaacgacggccagttctgcagaacaatgctgagtg

SEQ ID NO: 9824 - DNA, 21 bp, Artificial Sequence
  primer
caagaccacagaggtgctacg

SEQ ID NO: 9825 - DNA, 38 bp, Artificial Sequence
  primer
gtaaaacgacggccagttcaatacattatggcccttcg

SEQ ID NO: 9826 - DNA, 21 bp, Artificial Sequence
  primer
gaagaggaagtgcctttggtc

SEQ ID NO: 9827 - DNA, 38 bp, Artificial Sequence
  primer
gtaaaacgacggccagtcttccttaacctgggctcctc

SEQ ID NO: 9828 - DNA, 38 bp, Artificial Sequence
  primer
gtaaaacgacggccagtctttgtctcctacctcctggg

SEQ ID NO: 9829 - DNA, 38 bp, Artificial Sequence
  primer
gtaaaacgacggccagtccagaaagaaatccaaggcag

SEQ ID NO: 9830 - DNA, 23 bp, Artificial Sequence
  primer
aaggagaagaggtggtagtggtg

SEQ ID NO: 9831 - DNA, 21 bp, Artificial Sequence
  primer
aggaagccaggacaatctcag

SEQ ID NO: 9832 - DNA, 21 bp, Artificial Sequence
  primer
tgggcactgaaagaacagaag

SEQ ID NO: 9833 - DNA, 38 bp, Artificial Sequence
  primer
gtaaaacgacggccagtggatggaagagctggtacagg

SEQ ID NO: 9834 - DNA, 21 bp, Artificial Sequence
  primer
gactagctgtggcctactggg

SEQ ID NO: 9835 - DNA, 20 bp, Artificial Sequence
  primer
aggctgaaggagaccgagag

SEQ ID NO: 9836 - DNA, 21 bp, Artificial Sequence
  primer
agggagaggcatctgtctcag

SEQ ID NO: 9837 - DNA, 38 bp, Artificial Sequence
  primer
gtaaaacgacggccagtagcagaggaagaggtgactgg

SEQ ID NO: 9838 - DNA, 21 bp, Artificial Sequence
  primer
agtggacgctgttggaagaag

SEQ ID NO: 9839 - DNA, 19 bp, Artificial Sequence
  primer
gaggtgagggctcttggtg

SEQ ID NO: 9840 - DNA, 37 bp, Artificial Sequence
  primer
gtaaaacgacggccagtgtaggcacagggcaactcag

SEQ ID NO: 9841 - DNA, 38 bp, Artificial Sequence
  primer
gtaaaacgacggccagtataatgtccctctcagtcggc

SEQ ID NO: 9842 - DNA, 38 bp, Artificial Sequence
  primer
gtaaaacgacggccagttgagatgatttggaggtttgg

SEQ ID NO: 9843 - DNA, 38 bp, Artificial Sequence
  primer
gtaaaacgacggccagttgtggtgagctgagattgcac

SEQ ID NO: 9844 - DNA, 20 bp, Artificial Sequence
  primer
gaagatctggcgaagctcag

SEQ ID NO: 9845 - DNA, 38 bp, Artificial Sequence
  primer
gtaaaacgacggccagttatacgggaagctaggttggg

SEQ ID NO: 9846 - DNA, 21 bp, Artificial Sequence
  primer
agtccagaaccagaccctgtc

SEQ ID NO: 9847 - DNA, 21 bp, Artificial Sequence
  primer
tgtggtgagctgagattgcac

SEQ ID NO: 9848 - DNA, 21 bp, Artificial Sequence
  primer
cagccagatttagctgctgac

SEQ ID NO: 9849 - DNA, 21 bp, Artificial Sequence
  primer
tggaagagtgatggtggagac

SEQ ID NO: 9850 - DNA, 21 bp, Artificial Sequence
  primer
tacagttccgggaggaacaag

SEQ ID NO: 9851 - DNA, 21 bp, Artificial Sequence
  primer
gactcttcatgtgggaggagc

SEQ ID NO: 9852 - DNA, 38 bp, Artificial Sequence
  primer
gtaaaacgacggccagtctggtggttcagtggtcagag

SEQ ID NO: 9853 - DNA, 21 bp, Artificial Sequence
  primer
ggtttggaagtgtgctaaggg

SEQ ID NO: 9854 - DNA, 38 bp, Artificial Sequence
  primer
gtaaaacgacggccagtcctctaatttcgtgctggagg

SEQ ID NO: 9855 - DNA, 38 bp, Artificial Sequence
  primer
gtaaaacgacggccagtgaaaccaggatgtgggaagtc

SEQ ID NO: 9856 - DNA, 20 bp, Artificial Sequence
  primer
ctcagagcctcctctgggtt

SEQ ID NO: 9857 - DNA, 21 bp, Artificial Sequence
  primer
tgggaggtcactttaaggagg

SEQ ID NO: 9858 - DNA, 21 bp, Artificial Sequence
  primer
tgtgttcagtggacatgagcc

SEQ ID NO: 9859 - DNA, 21 bp, Artificial Sequence
  primer
aacactgaacgtgagctttgg

SEQ ID NO: 9860 - DNA, 38 bp, Artificial Sequence
  primer
gtaaaacgacggccagtaactgacagccaggagaccag

SEQ ID NO: 9861 - DNA, 19 bp, Artificial Sequence
  primer
ccacaaagggagtggaagc

SEQ ID NO: 9862 - DNA, 38 bp, Artificial Sequence; identical to SEQ ID NO: 9854
  primer

SEQ ID NO: 9863 - DNA, 38 bp, Artificial Sequence
  primer
gtaaaacgacggccagtcagattccaatgggaaggaag

SEQ ID NO: 9864 - DNA, 19 bp, Artificial Sequence
  primer
agagcctcctctgggttcc

SEQ ID NO: 9865 - DNA, 38 bp, Artificial Sequence
  primer
gtaaaacgacggccagtccagagaaacatgaagcaccc

SEQ ID NO: 9866 - DNA, 21 bp, Artificial Sequence
  primer
aagcagcagacattctcaggg

SEQ ID NO: 9867 - DNA, 38 bp, Artificial Sequence
  primer
gtaaaacgacggccagtgagtaaataaggaaacggccc

SEQ ID NO: 9868 - DNA, 21 bp, Artificial Sequence
  primer
agatggttctccaatgctgtg

SEQ ID NO: 9869 - DNA, 21 bp, Artificial Sequence
  primer
ttaaggagggctgtccaactg

SEQ ID NO: 9870 - DNA, 37 bp, Artificial Sequence
  primer
gtaaaacgacggccagtgtgttcagtggacatgagcc

SEQ ID NO: 9871 - DNA, 38 bp, Artificial Sequence
  primer
gtaaaacgacggccagtcagcttggagcagacaatcac

SEQ ID NO: 9872 - DNA, 37 bp, Artificial Sequence
  primer
gtaaaacgacggccagtaccacgcagaaatgtgcttc

SEQ ID NO: 9873 - DNA, 38 bp, Artificial Sequence
  primer
gtaaaacgacggccagtgaggaacagcctcagagatgg

SEQ ID NO: 9874 - DNA, 22 bp, Artificial Sequence
  primer
gggcaacaagagtgaaactacg

SEQ ID NO: 9875 - DNA, 21 bp, Artificial Sequence
  primer
tgtttagtggacatcagccct

SEQ ID NO: 9876 - DNA, 21 bp, Artificial Sequence
  primer
gatggaggaaaggagcttcaa

SEQ ID NO: 9877 - DNA, 38 bp, Artificial Sequence; identical to SEQ ID NO: 9860
  primer

SEQ ID NO: 9878 - DNA, 21 bp, Artificial Sequence
  primer
cagtgagtggtgttcagtggg

SEQ ID NO: 9879 - DNA, 39 bp, Artificial Sequence
  primer
gtaaaacgacggccagtaataaataaggaaacgccctgg

SEQ ID NO: 9880 - DNA, 20 bp, Artificial Sequence
  primer
agtcaggagacctgggcttg

SEQ ID NO: 9881 - DNA, 38 bp, Artificial Sequence
  primer
gtaaaacgacggccagtgaggaagataaagcgtcccag

SEQ ID NO: 9882 - DNA, 20 bp, Artificial Sequence
  primer
gtttagtggacatcagcccg

SEQ ID NO: 9883 - DNA, 38 bp, Artificial Sequence
  primer
gtaaaacgacggccagtatgagctttggagcagacaaa

SEQ ID NO: 9884 - DNA, 21 bp, Artificial Sequence
  primer
atgggtccttcccacacatac

SEQ ID NO: 9885 - DNA, 38 bp, Artificial Sequence
  primer
gtaaaacgacggccagtccttctgacaggtgctaaggg

SEQ ID NO: 9886 - DNA, 21 bp, Artificial Sequence
  primer
aaattagcctggtgtggtggt

SEQ ID NO: 9887 - DNA, 38 bp, Artificial Sequence; identical to SEQ ID NO: 9855
  primer

SEQ ID NO: 9888 - DNA, 38 bp, Artificial Sequence
  primer
gtaaaacgacggccagtttctcacagcctccctttctc

SEQ ID NO: 9889 - DNA, 38 bp, Artificial Sequence
  primer
gtaaaacgacggccagtgattcaggttggtgctgagtg

SEQ ID NO: 9890 - DNA, 19 bp, Artificial Sequence
  primer
cagtaggccgagatcatgc

SEQ ID NO: 9891 - DNA, 38 bp, Artificial Sequence
  primer
gtaaaacgacggccagtaagaggtgggagtcaggtagc

SEQ ID NO: 9892 - DNA, 21 bp, Artificial Sequence
  primer
aaacttgactgggacaccgag

SEQ ID NO: 9893 - DNA, 21 bp, Artificial Sequence
  primer
cttcttacctctgcctctgcc

SEQ ID NO: 9894 - DNA, 37 bp, Artificial Sequence
  primer
gtaaaacgacggccagtatccaggacccagaagttca

SEQ ID NO: 9895 - DNA, 38 bp, Artificial Sequence
  primer
gtaaaacgacggccagtttctgagagcccgtattagca

SEQ ID NO: 9896 - DNA, 21 bp, Artificial Sequence
  primer
actgtgtgggagggtgagaag

SEQ ID NO: 9897 - DNA, 20 bp, Artificial Sequence
  primer
acacaggatgagcatggagg

SEQ ID NO: 9898 - DNA, 21 bp, Artificial Sequence
  primer
cagagaggagcggataaatgg

SEQ ID NO: 9899 - DNA, 21 bp, Artificial Sequence
  primer
tgggcacagcactcttacttc

SEQ ID NO: 9900 - DNA, 38 bp, Artificial Sequence
  primer
gtaaaacgacggccagtattgcaatcaatctcttgccc

SEQ ID NO: 9901 - DNA, 21 bp, Artificial Sequence
  primer
taccagaaatcacggtgttgg

SEQ ID NO: 9902 - DNA, 37 bp, Artificial Sequence
  primer
gtaaaacgacggccagtgccagccttcttgtgttgtc

SEQ ID NO: 9903 - DNA, 38 bp, Artificial Sequence
  primer
gtaaaacgacggccagtttgcagataatgcaacaaggc

SEQ ID NO: 9904 - DNA, 21 bp, Artificial Sequence
  primer
atggctccaaagaagcatttg

SEQ ID NO: 9905 - DNA, 38 bp, Artificial Sequence
  primer
gtaaaacgacggccagtgttccttctctccctcttggg

SEQ ID NO: 9906 - DNA, 38 bp, Artificial Sequence
  primer
gtaaaacgacggccagtgaccatgaaggagttgaaggc

SEQ ID NO: 9907 - DNA, 35 bp, Artificial Sequence
  primer
gtaaaacgacggccagtctgcgtaagcggctcctc

SEQ ID NO: 9908 - DNA, 19 bp, Artificial Sequence
  primer
gacgaggtgaaggagcagg

SEQ ID NO: 9909 - DNA, 38 bp, Artificial Sequence
  primer
gtaaaacgacggccagtgaatgtggcagggacatacag

SEQ ID NO: 9910 - DNA, 38 bp, Artificial Sequence
  primer
gtaaaacgacggccagtattcaaggcagcagtgatttg

SEQ ID NO: 9911 - DNA, 21 bp, Artificial Sequence
  primer
ccagttgagctgctactttgc

SEQ ID NO: 9912 - DNA, 21 bp, Artificial Sequence
  primer
ccaagttcttggtaagcctgg

SEQ ID NO: 9913 - DNA, 38 bp, Artificial Sequence
  primer
gtaaaacgacggccagttgggaaccttctacaacctgg

SEQ ID NO: 9914 - DNA, 38 bp, Artificial Sequence
  primer
gtaaaacgacggccagttgaagacagaaaccatctccc

SEQ ID NO: 9915 - DNA, 21 bp, Artificial Sequence
  primer
ggtatttggcatgcaacttgg

SEQ ID NO: 9916 - DNA, 26 bp, Artificial Sequence
  primer
cagtaaagttattgaaccaaaggatg

SEQ ID NO: 9917 - DNA, 38 bp, Artificial Sequence
  primer
gtaaaacgacggccagtattcacctgcatcattggttg

SEQ ID NO: 9918 - DNA, 21 bp, Artificial Sequence
  primer
ttctagtgatctgcccacctc

SEQ ID NO: 9919 - DNA, 40 bp, Artificial Sequence
  primer
gtaaaacgacggccagtttcagtggtgtgacagagacaag

SEQ ID NO: 9920 - DNA, 25 bp, Artificial Sequence
  primer
aatggttctattgacagagaactgc

SEQ ID NO: 9921 - DNA, 42 bp, Artificial Sequence
  primer
gtaaaacgacggccagtcctcacactaaatggtttcattcac

SEQ ID NO: 9922 - DNA, 38 bp, Artificial Sequence
  primer
gtaaaacgacggccagtggtgatggagaagaaacaggc

SEQ ID NO: 9923 - DNA, 18 bp, Artificial Sequence
  primer
agcgagcctagatcgccc

SEQ ID NO: 9924 - DNA, 21 bp, Artificial Sequence
  primer
tcgcagacatgcaatacacac

SEQ ID NO: 9925 - DNA, 21 bp, Artificial Sequence
  primer
ggtcttggtgtttgcttccac

SEQ ID NO: 9926 - DNA, 21 bp, Artificial Sequence
  primer
tcatctcttatgcaatggctg

SEQ ID NO: 9927 - DNA, 37 bp, Artificial Sequence; identical to SEQ ID NO: 9716
  primer

SEQ ID NO: 9928 - DNA, 38 bp, Artificial Sequence
  primer
gtaaaacgacggccagtgggttcagaaggtccacaaag

SEQ ID NO: 9929 - DNA, 21 bp, Artificial Sequence
  primer
ggaggcagccttgtactcttg

SEQ ID NO: 9930 - DNA, 38 bp, Artificial Sequence
  primer
gtaaaacgacggccagtagccagagccaatcttcagtc

SEQ ID NO: 9931 - DNA, 18 bp, Artificial Sequence
  primer
agcgagcctagatcgccc

SEQ ID NO: 9932 - DNA, 38 bp, Artificial Sequence
  primer
gtaaaacgacggccagtggacatttgctgctaccacag

SEQ ID NO: 9933 - DNA, 21 bp, Artificial Sequence
  primer
tgactccatcaaacatgtccc

SEQ ID NO: 9934 - DNA, 38 bp, Artificial Sequence
  primer
gtaaaacgacggccagtcacaggatagagatcgcatgg

SEQ ID NO: 9935 - DNA, 21 bp, Artificial Sequence
  primer
actacctctggcatcctgacc

SEQ ID NO: 9936 - DNA, 38 bp, Artificial Sequence
  primer
gtaaaacgacggccagtgatgaaggagtttgtgggtgg

SEQ ID NO: 9937 - DNA, 21 bp, Artificial Sequence
  primer
gttgagagggttgttgaaggc

SEQ ID NO: 9938 - DNA, 21 bp, Artificial Sequence
  primer
gaacccttccagtcaggtcag

SEQ ID NO: 9939 - DNA, 38 bp, Artificial Sequence
  primer
gtaaaacgacggccagtctaagtatgggaggcaggtgg

SEQ ID NO: 9940 - DNA, 22 bp, Artificial Sequence
  primer
cgaaccaccttattctcaatgc

SEQ ID NO: 9941 - DNA, 21 bp, Artificial Sequence
  primer
gacctctcttgcttgaggagc

SEQ ID NO: 9942 - DNA, 21 bp, Artificial Sequence
  primer
tggtacaggatgaggcagatg

SEQ ID NO: 9943 - DNA, 21 bp, Artificial Sequence
  primer
accatttacagcagggacgag

SEQ ID NO: 9944 - DNA, 20 bp, Artificial Sequence
  primer
agtgaaatccgtgccatcag

SEQ ID NO: 9945 - DNA, 38 bp, Artificial Sequence
  primer
gtaaaacgacggccagtattggtacagggatgaggcag

SEQ ID NO: 9946 - DNA, 21 bp, Artificial Sequence
  primer
accatttacagcagggacgag

SEQ ID NO: 9947 - DNA, 20 bp, Artificial Sequence
  primer
agtgaaatccgtgccatcag

SEQ ID NO: 9948 - DNA, 38 bp, Artificial Sequence
  primer
gtaaaacgacggccagtctggtagactcgcctagaggg

SEQ ID NO: 9949 - DNA, 38 bp, Artificial Sequence
  primer
gtaaaacgacggccagtcttgagcccagcagatctagg

SEQ ID NO: 9950 - DNA, 38 bp, Artificial Sequence
  primer
gtaaaacgacggccagtttccttggtgtgagagtgagg

SEQ ID NO: 9951 - DNA, 38 bp, Artificial Sequence
  primer
gtaaaacgacggccagtggttcaggaggattaacaccg

SEQ ID NO: 9952 - DNA, 21 bp, Artificial Sequence
  primer
accttgtgatccacccatctc

SEQ ID NO: 9953 - DNA, 21 bp, Artificial Sequence
  primer
ggagtccatagaaaggcttcg

SEQ ID NO: 9954 - DNA, 21 bp, Artificial Sequence
  primer
ctgtcattggcgttatgttgg

SEQ ID NO: 9955 - DNA, 22 bp, Artificial Sequence
  primer
agtgactgagactgcaccactg

SEQ ID NO: 9956 - DNA, 20 bp, Artificial Sequence
  primer
gcattcccatggtttgtttg

SEQ ID NO: 9957 - DNA, 21 bp, Artificial Sequence
  primer
tggtttcgacattgtacctcg

SEQ ID NO: 9958 - DNA, 38 bp, Artificial Sequence
  primer
gtaaaacgacggccagtagttgcttaccaagaccagcc

SEQ ID NO: 9959 - DNA, 38 bp, Artificial Sequence
  primer
gtaaaacgacggccagtaaagctatccagggcatcaag

SEQ ID NO: 9960 - DNA, 36 bp, Artificial Sequence
  primer
gtaaaacgacggccagtcaagtttgggacccactgc

SEQ ID NO: 9961 - DNA, 22 bp, Artificial Sequence
  primer
aaatccctccacacctgaattt

SEQ ID NO: 9962 - DNA, 39 bp, Artificial Sequence
  primer
gtaaaacgacggccagtttcagcgaaggctgaactactc

SEQ ID NO: 9963 - DNA, 21 bp, Artificial Sequence
  primer
ctcctcagggatgaggatgac

SEQ ID NO: 9964 - DNA, 21 bp, Artificial Sequence
  primer
agcatcgtgagtggtacgttg

SEQ ID NO: 9965 - DNA, 21 bp, Artificial Sequence
  primer
acttggccactctctcaaagg

SEQ ID NO: 9966 - DNA, 21 bp, Artificial Sequence
  primer
tagcaggtgaaagggtcaagg

SEQ ID NO: 9967 - DNA, 21 bp, Artificial Sequence
  primer
gaaggcagccaacacctctac

SEQ ID NO: 9968 - DNA, 18 bp, Artificial Sequence
  primer
tcacgaggttgaggcagg

SEQ ID NO: 9969 - DNA, 38 bp, Artificial Sequence
  primer
gtaaaacgacggccagtcggaaatggatctaccacctg

SEQ ID NO: 9970 - DNA, 21 bp, Artificial Sequence
  primer
tctgggtcctatgacaccctc

SEQ ID NO: 9971 - DNA, 21 bp, Artificial Sequence
  primer
cacagggaatgaaagaacacg

SEQ ID NO: 9972 - DNA, 35 bp, Artificial Sequence
  primer
gtaaaacgacggccagtatcagctgactcgcctgg

SEQ ID NO: 9973 - DNA, 38 bp, Artificial Sequence
  primer
gtaaaacgacggccagtatccctgttcttcctccaagc

SEQ ID NO: 9974 - DNA, 38 bp, Artificial Sequence
  primer
gtaaaacgacggccagtgattccagatgctcaaccagt

SEQ ID NO: 9975 - DNA, 38 bp, Artificial Sequence
  primer
gtaaaacgacggccagtctttccttgatgtcttctgcg

SEQ ID NO: 9976 - DNA, 23 bp, Artificial Sequence
  primer
gagtaccaaagtgtaacccatgc

SEQ ID NO: 9977 - DNA, 40 bp, Artificial Sequence
  primer
gtaaaacgacggccagtggtgtgtttcttctcaaattgcc

SEQ ID NO: 9978 - DNA, 38 bp, Artificial Sequence
  primer
gtaaaacgacggccagtaataaaccagtccaggttgcc

SEQ ID NO: 9979 - DNA, 21 bp, Artificial Sequence
  primer
gtcagtggactcgtgcatttc

SEQ ID NO: 9980 - DNA, 39 bp, Artificial Sequence
  primer
gtaaaacgacggccagtcggctttctattaaacgagtgg

SEQ ID NO: 9981 - DNA, 23 bp, Artificial Sequence
  primer
gtgggaggtcaaatattcttcag

SEQ ID NO: 9982 - DNA, 23 bp, Artificial Sequence
  primer
ttggagagtgcaagaaagtgaag

SEQ ID NO: 9983 - DNA, 37 bp, Artificial Sequence
  primer
gtaaaacgacggccagtatgaccggatgcattagtgg

SEQ ID NO: 9984 - DNA, 22 bp, Artificial Sequence
  primer
tgtatctacctgcagtgcttgg

SEQ ID NO: 9985 - DNA, 38 bp, Artificial Sequence
  primer
gtaaaacgacggccagtaagtaaatggtggctgctgct

SEQ ID NO: 9986 - DNA, 38 bp, Artificial Sequence
  primer
gtaaaacgacggccagttgtttgggagccacgacttac

SEQ ID NO: 9987 - DNA, 39 bp, Artificial Sequence
  primer
gtaaaacgacggccagtttcaggtttcccttaccctttc

SEQ ID NO: 9988 - DNA, 36 bp, Artificial Sequence
  primer
gtaaaacgacggccagtaccaaccagttgggcagag

SEQ ID NO: 9989 - DNA, 21 bp, Artificial Sequence
  primer
atgggtgttctgcaatcttgg

SEQ ID NO: 9990 - DNA, 21 bp, Artificial Sequence
  primer
attactgcatggacagagggc

SEQ ID NO: 9991 - DNA, 38 bp, Artificial Sequence
  primer
gtaaaacgacggccagttcaaggcatcaacctgagttc

SEQ ID NO: 9992 - DNA, 38 bp, Artificial Sequence
  primer
gtaaaacgacggccagttgggcaagaggctttagaatc

SEQ ID NO: 9993 - DNA, 21 bp, Artificial Sequence
  primer
tccaggaaggccattacagtc

SEQ ID NO: 9994 - DNA, 21 bp, Artificial Sequence
  primer
atgctacaaactgggcaacag

SEQ ID NO: 9995 - DNA, 21 bp, Artificial Sequence
  primer
ttgaattggaattgttgcctc

SEQ ID NO: 9996 - DNA, 19 bp, Artificial Sequence
  primer
agcctgtggaaatgcttgc

SEQ ID NO: 9997 - DNA, 21 bp, Artificial Sequence
  primer
cagcctgggtaatacagcaag

SEQ ID NO: 9998 - DNA, 43 bp, Artificial Sequence
  primer
gtaaaacgacggccagtcctttcttacttaggattggtgtctg

SEQ ID NO: 9999 - DNA, 22 bp, Artificial Sequence
  primer
tcaagtgagcctctgatttcac

SEQ ID NO: 10000 - DNA, 21 bp, Artificial Sequence
  primer
aagttaagaagccacgccttg

SEQ ID NO: 10001 - DNA, 39 bp, Artificial Sequence
  primer
gtaaaacgacggccagtcggagaggtctttcttccattc

SEQ ID NO: 10002 - DNA, 22 bp, Artificial Sequence
  primer
tcctttgttagatcccaagcag

SEQ ID NO: 10003 - DNA, 21 bp, Artificial Sequence
  primer
ggtgctgttgatagcatttcc

SEQ ID NO: 10004 - DNA, 38 bp, Artificial Sequence
  primer
gtaaaacgacggccagtgaaagccttcccatctcacag

SEQ ID NO: 10005 - DNA, 21 bp, Artificial Sequence
  primer
aggccatcaccttacttgctt

SEQ ID NO: 10006 - DNA, 25 bp, Artificial Sequence
  primer
ttcagtagagattgtgtgactccag

SEQ ID NO: 10007 - DNA, 43 bp, Artificial Sequence
  primer
gtaaaacgacggccagtaattattaagcactatgtgccagatg

SEQ ID NO: 10008 - DNA, 38 bp, Artificial Sequence
  primer
gtaaaacgacggccagttggcttccttcaggaatatgg

SEQ ID NO: 10009 - DNA, 42 bp, Artificial Sequence
  primer
gtaaaacgacggccagttttggtcaaccacactactgtttag

SEQ ID NO: 10010 - DNA, 18 bp, Artificial Sequence
  primer
gttcgctacggagggagg

SEQ ID NO: 10011 - DNA, 40 bp, Artificial Sequence
  primer
gtaaaacgacggccagttgtagtacttgccatgttccagg

SEQ ID NO: 10012 - DNA, 41 bp, Artificial Sequence
  primer
gtaaaacgacggccagtaagttagcttcatccttccttgtc

SEQ ID NO: 10013 - DNA, 21 bp, Artificial Sequence
  primer
ccttaaccctccttcccgtag

SEQ ID NO: 10014 - DNA, 40 bp, Artificial Sequence
  primer
gtaaaacgacggccagttcattcaggtgattggtaagagg

SEQ ID NO: 10015 - DNA, 21 bp, Artificial Sequence
  primer
gcttctgggcaagagagaaca

SEQ ID NO: 10016 - DNA, 25 bp, Artificial Sequence
  primer
aacctttgtatttatgtttggaggg

SEQ ID NO: 10017 - DNA, 38 bp, Artificial Sequence
  primer
gtaaaacgacggccagtcagtgtatttggcacggtagg

SEQ ID NO: 10018 - DNA, 21 bp, Artificial Sequence
  primer
atacagcaggactttctgggc

SEQ ID NO: 10019 - DNA, 38 bp, Artificial Sequence
  primer
gtaaaacgacggccagtgaaatgggagtctctgttggg

SEQ ID NO: 10020 - DNA, 39 bp, Artificial Sequence
  primer
gtaaaacgacggccagttcatcttgaccagttccaaacc

SEQ ID NO: 10021 - DNA, 44 bp, Artificial Sequence
  primer
gtaaaacgacggccagtcattcataagatgtctttggcatttag

SEQ ID NO: 10022 - DNA, 23 bp, Artificial Sequence
  primer
aagccaccctgtttaaagaattg

SEQ ID NO: 10023 - DNA, 35 bp, Artificial Sequence
  primer
gtaaaacgacggccagtgcctggagaaggctgtgc

SEQ ID NO: 10024 - DNA, 23 bp, Artificial Sequence
  primer
cctctgctttgttgaagtgaaac

SEQ ID NO: 10025 - DNA, 23 bp, Artificial Sequence
  primer
cctttccagtgatttaatgaagg

SEQ ID NO: 10026 - DNA, 22 bp, Artificial Sequence
  primer
tttgaacttccagtacagtggg

SEQ ID NO: 10027 - DNA, 22 bp, Artificial Sequence
  primer
ccaaatccaaggtcattctgtg

SEQ ID NO: 10028 - DNA, 47 bp, Artificial Sequence
  primer
gtaaaacgacggccagtctgttgctaatgatagtaaatgtttcatag

SEQ ID NO: 10029 - DNA, 21 bp, Artificial Sequence
  primer
gtgcacatgtgaagaccattg

SEQ ID NO: 10030 - DNA, 40 bp, Artificial Sequence
  primer
gtaaaacgacggccagtcttctccacagctcctactgaag

SEQ ID NO: 10031 - DNA, 21 bp, Artificial Sequence
  primer
cttccttaatggctccctgtg

SEQ ID NO: 10032 - DNA, 38 bp, Artificial Sequence
  primer
gtaaaacgacggccagttacccgaaacaaatatgcagg

SEQ ID NO: 10033 - DNA, 37 bp, Artificial Sequence
  primer
gtaaaacgacggccagtcttcgcaagccagttcattg

SEQ ID NO: 10034 - DNA, 21 bp, Artificial Sequence
  primer
tgcatcctgatacctctggtg

SEQ ID NO: 10035 - DNA, 43 bp, Artificial Sequence
  primer
gtaaaacgacggccagtgaaacatctgttgcagttgagtattg

SEQ ID NO: 10036 - DNA, 25 bp, Artificial Sequence
  primer
tcagaagcattctaacaattcagag

SEQ ID NO: 10037 - DNA, 24 bp, Artificial Sequence
  primer
atctgtgatctgggattatgtttg

SEQ ID NO: 10038 - DNA, 20 bp, Artificial Sequence
  primer
ggcagaggccttcatcatag

SEQ ID NO: 10039 - DNA, 21 bp, Artificial Sequence
  primer
tgaaatgtctcccttaggctg

SEQ ID NO: 10040 - DNA, 38 bp, Artificial Sequence
  primer
gtaaaacgacggccagtgggccatccataacatctttc

SEQ ID NO: 10041 - DNA, 27 bp, Artificial Sequence
  primer
tgcttgttaattcaaaccaaatatgac

SEQ ID NO: 10042 - DNA, 38 bp, Artificial Sequence
  primer
gtaaaacgacggccagtgaaggtgagagtcagcagtgg

SEQ ID NO: 10043 - DNA, 27 bp, Artificial Sequence
  primer
ttgaatataaactgttgatgtgctttc

SEQ ID NO: 10044 - DNA, 43 bp, Artificial Sequence
  primer
gtaaaacgacggccagttggctctcaagaatgtatcttaactg

SEQ ID NO: 10045 - DNA, 21 bp, Artificial Sequence
  primer
acacatgacccatctgtgacc

SEQ ID NO: 10046 - DNA, 23 bp, Artificial Sequence
  primer
accattaatttagcccatgtctg

SEQ ID NO: 10047 - DNA, 38 bp, Artificial Sequence
  primer
gtaaaacgacggccagtatgtttgtgcaaggccctaag

SEQ ID NO: 10048 - DNA, 39 bp, Artificial Sequence
  primer
gtaaaacgacggccagttttaggaatggacacatgaccc

SEQ ID NO: 10049 - DNA, 38 bp, Artificial Sequence
  primer
gtaaaacgacggccagtttgccactgaggaaatgaaag

SEQ ID NO: 10050 - DNA, 27 bp, Artificial Sequence
  primer
aagttaaccttagcaattaacatgacc

SEQ ID NO: 10051 - DNA, 41 bp, Artificial Sequence
  primer
gtaaaacgacggccagtcatgagtgctgaataaactcttgg

SEQ ID NO: 10052 - DNA, 22 bp, Artificial Sequence
  primer
gggctagaggatacaaagagcc

SEQ ID NO: 10053 - DNA, 38 bp, Artificial Sequence
  primer
gtaaaacgacggccagttgtatgatgtgggagagaggg

SEQ ID NO: 10054 - DNA, 22 bp, Artificial Sequence
  primer
gatccagtaggccagttagtcc

SEQ ID NO: 10055 - DNA, 24 bp, Artificial Sequence
  primer
tcatgtagcctatattggtttccc

SEQ ID NO: 10056 - DNA, 38 bp, Artificial Sequence
  primer
gtaaaacgacggccagtattatggcaaagaatgggcag

SEQ ID NO: 10057 - DNA, 42 bp, Artificial Sequence
  primer
gtaaaacgacggccagtgagtttccagagcattcagacatac

SEQ ID NO: 10058 - DNA, 39 bp, Artificial Sequence
  primer
gtaaaacgacggccagttttcaagggtatcatgcagtgt

SEQ ID NO: 10059 - DNA, 30 bp, Artificial Sequence
  primer
catggtagaaatatttatgtgatagttgtg

SEQ ID NO: 10060 - DNA, 21 bp, Artificial Sequence
  primer
atttccacttagagcggcagg

SEQ ID NO: 10061 - DNA, 41 bp, Artificial Sequence
  primer
gtaaaacgacggccagtcctgtgaatttcatctcatctctg

SEQ ID NO: 10062 - DNA, 20 bp, Artificial Sequence
  primer
ggtctgcagcatttagtggg

SEQ ID NO: 10063 - DNA, 21 bp, Artificial Sequence
  primer
tatgtcccttcacaatgctcc

SEQ ID NO: 10064 - DNA, 40 bp, Artificial Sequence
  primer
gtaaaacgacggccagtcagtttgtttattccagcgtcag

SEQ ID NO: 10065 - DNA, 22 bp, Artificial Sequence
  primer
tcaaatttgtatttggttcgga

SEQ ID NO: 10066 - DNA, 24 bp, Artificial Sequence
  primer
tcttcctacagaggaacatttctg

SEQ ID NO: 10067 - DNA, 21 bp, Artificial Sequence
  primer
aggcctttggaagtgagtttg

SEQ ID NO: 10068 - DNA, 38 bp, Artificial Sequence
  primer
gtaaaacgacggccagtgtttgaacctgatgccttctg

SEQ ID NO: 10069 - DNA, 22 bp, Artificial Sequence
  primer
tgtacataggcgctagtgaagg

SEQ ID NO: 10070 - DNA, 28 bp, Artificial Sequence
  primer
cagcaaagaacaaactagtctttagtca

SEQ ID NO: 10071 - DNA, 21 bp, Artificial Sequence
  primer
gggtttcccacaatgacctaa

SEQ ID NO: 10072 - DNA, 38 bp, Artificial Sequence
  primer
gtaaaacgacggccagtctcttgtgagcagtgaagcaa

SEQ ID NO: 10073 - DNA, 21 bp, Artificial Sequence
  primer
gtgaactgttgggatgcagaa

SEQ ID NO: 10074 - DNA, 21 bp, Artificial Sequence
  primer
ttccctgctggtttgtaactg

SEQ ID NO: 10075 - DNA, 25 bp, Artificial Sequence
  primer
tgctattcagactggattcatgttc

SEQ ID NO: 10076 - DNA, 38 bp, Artificial Sequence
  primer
gtaaaacgacggccagtaactgctgtttgctttgttgg

SEQ ID NO: 10077 - DNA, 28 bp, Artificial Sequence
  primer
ttctccagataactaagaaattcaactg

SEQ ID NO: 10078 - DNA, 38 bp, Artificial Sequence
  primer
gtaaaacgacggccagttgagcttcattgcttgttgag

SEQ ID NO: 10079 - DNA, 21 bp, Artificial Sequence
  primer
attggagaagcctagaggcag

SEQ ID NO: 10080 - DNA, 21 bp, Artificial Sequence
  primer
acctaaaggcagtcagcgaag

SEQ ID NO: 10081 - DNA, 38 bp, Artificial Sequence
  primer
gtaaaacgacggccagtggagagcacagcagaggtaag

SEQ ID NO: 10082 - DNA, 41 bp, Artificial Sequence
  primer
gtaaaacgacggccagtcgtgaaacatttcttctaacgagg

SEQ ID NO: 10083 - DNA, 38 bp, Artificial Sequence
  primer
gtaaaacgacggccagtttcagggaaaggaaagcaaag

SEQ ID NO: 10084 - DNA, 38 bp, Artificial Sequence
  primer
gtaaaacgacggccagtttactgttgtccagagggtgc

SEQ ID NO: 10085 - DNA, 21 bp, Artificial Sequence
  primer
gaaatacggtacaggcttccg

SEQ ID NO: 10086 - DNA, 35 bp, Artificial Sequence
  primer
gtaaaacgacggccagtgaaccctcgtctttcgcc

SEQ ID NO: 10087 - DNA, 38 bp, Artificial Sequence
  primer
gtaaaacgacggccagtttaaatggtgcatgtcactgg

SEQ ID NO: 10088 - DNA, 21 bp, Artificial Sequence
  primer
gaggttgagacataggctggg

SEQ ID NO: 10089 - DNA, 21 bp, Artificial Sequence
  primer
ttactgttgtccagagggtgc

SEQ ID NO: 10090 - DNA, 38 bp, Artificial Sequence
  primer
gtaaaacgacggccagttcacaggcctgaaagtcactg

SEQ ID NO: 10091 - DNA, 20 bp, Artificial Sequence
  primer
acaagttctgccgtttcctg

SEQ ID NO: 10092 - DNA, 20 bp, Artificial Sequence
  primer
gacacctctgcactcaaggc

SEQ ID NO: 10093 - DNA, 38 bp, Artificial Sequence
  primer
gtaaaacgacggccagtgtggctgtggcagtctatttg

SEQ ID NO: 10094 - DNA, 21 bp, Artificial Sequence
  primer
agccactctgaccctatgtcc

SEQ ID NO: 10095 - DNA, 40 bp, Artificial Sequence
  primer
gtaaaacgacggccagtcaagacgtcacctctcttctcac

SEQ ID NO: 10096 - DNA, 38 bp, Artificial Sequence
  primer
gtaaaacgacggccagtagccttggtccttccatcaac

SEQ ID NO: 10097 - DNA, 37 bp, Artificial Sequence
  primer
gtaaaacgacggccagtctgcaactcggaaacctgag

SEQ ID NO: 10098 - DNA, 21 bp, Artificial Sequence
  primer
acttccaggatcctcagttgg

SEQ ID NO: 10099 - DNA, 37 bp, Artificial Sequence
  primer
gtaaaacgacggccagtgtagatcacatgcgtggtgg

SEQ ID NO: 10100 - DNA, 38 bp, Artificial Sequence
  primer
gtaaaacgacggccagtggcctttaaggaaacaccacc

SEQ ID NO: 10101 - DNA, 20 bp, Artificial Sequence
  primer
acataaggcaaggtgcttgg

SEQ ID NO: 10102 - DNA, 21 bp, Artificial Sequence
  primer
aggcaatggagtgaagcagag

SEQ ID NO: 10103 - DNA, 21 bp, Artificial Sequence
  primer
cggagctgtagaatacctggc

SEQ ID NO: 10104 - DNA, 21 bp, Artificial Sequence
  primer
aggcaatggagtgaagcagag

SEQ ID NO: 10105 - DNA, 40 bp, Artificial Sequence
  primer
gtaaaacgacggccagttgcacaagactgtgggaattaag

SEQ ID NO: 10106 - DNA, 21 bp, Artificial Sequence
  primer
tgctaaagtctcagtgcctgg

SEQ ID NO: 10107 - DNA, 21 bp, Artificial Sequence
  primer
aatacctggcctggcatactg

SEQ ID NO: 10108 - DNA, 37 bp, Artificial Sequence
  primer
gtaaaacgacggccagtaagttacggcgcaagttctg

SEQ ID NO: 10109 - DNA, 38 bp, Artificial Sequence
  primer
gtaaaacgacggccagtgtgtgaggtatgtctgctgcg

SEQ ID NO: 10110 - DNA, 19 bp, Artificial Sequence
  primer
ctgcactgtttggcacgag

SEQ ID NO: 10111 - DNA, 38 bp, Artificial Sequence
  primer
gtaaaacgacggccagtccgtgggaaattactgtttgg

SEQ ID NO: 10112 - DNA, 19 bp, Artificial Sequence
  primer
caacagcagcatcgaccac

SEQ ID NO: 10113 - DNA, 21 bp, Artificial Sequence
  primer
cactcctgaccacaccttgtc

SEQ ID NO: 10114 - DNA, 36 bp, Artificial Sequence
  primer
gtaaaacgacggccagtacagcactttacggccctg

SEQ ID NO: 10115 - DNA, 38 bp, Artificial Sequence
  primer
gtaaaacgacggccagtgatggagcttccagtaggctg

SEQ ID NO: 10116 - DNA, 38 bp, Artificial Sequence
  primer
gtaaaacgacggccagtctcagcagctgtgaccagaag

SEQ ID NO: 10117 - DNA, 38 bp, Artificial Sequence
  primer
gtaaaacgacggccagtcttctgacacagcccttggag

SEQ ID NO: 10118 - DNA, 35 bp, Artificial Sequence
  primer
gtaaaacgacggccagtcatcacgtgggcagatgg

SEQ ID NO: 10119 - DNA, 21 bp, Artificial Sequence
  primer
cagatgcatagagccaagctg

SEQ ID NO: 10120 - DNA, 38 bp, Artificial Sequence
  primer
gtaaaacgacggccagtccaccctcatctacaagtggc

SEQ ID NO: 10121 - DNA, 21 bp, Artificial Sequence
  primer
gagaaggcagggacttcagac

SEQ ID NO: 10122 - DNA, 37 bp, Artificial Sequence
  primer
gtaaaacgacggccagtacccacaaatgagggctttc

SEQ ID NO: 10123 - DNA, 21 bp, Artificial Sequence
  primer
tgaatgcttcatgttcccttg

SEQ ID NO: 10124 - DNA, 38 bp, Artificial Sequence
  primer
gtaaaacgacggccagtacccacccacattctctgaac

SEQ ID NO: 10125 - DNA, 20 bp, Artificial Sequence
  primer
ctcgaggacaagactcgtgg

SEQ ID NO: 10126 - DNA, 22 bp, Artificial Sequence
  primer
cggtttgagcatagaaaggatg

SEQ ID NO: 10127 - DNA, 22 bp, Artificial Sequence
  primer
aagaccagatcaagacgctgag

SEQ ID NO: 10128 - DNA, 38 bp, Artificial Sequence
  primer
gtaaaacgacggccagtgttgatttgtcacaacccagg

SEQ ID NO: 10129 - DNA, 38 bp, Artificial Sequence
  primer
gtaaaacgacggccagttcagctgcacctttcacgtag

SEQ ID NO: 10130 - DNA, 20 bp, Artificial Sequence
  primer
gttgccagtgtcttcaaggg

SEQ ID NO: 10131 - DNA, 38 bp, Artificial Sequence
  primer
gtaaaacgacggccagtcctctgatcccaaggtgactc

SEQ ID NO: 10132 - DNA, 37 bp, Artificial Sequence
  primer
gtaaaacgacggccagtccagcctcagcactcatctg

SEQ ID NO: 10133 - DNA, 21 bp, Artificial Sequence
  primer
gactcggcctacagctctttc

SEQ ID NO: 10134 - DNA, 18 bp, Artificial Sequence
  primer
gggagacgtcgttccagc

SEQ ID NO: 10135 - DNA, 21 bp, Artificial Sequence
  primer
tgcttctcagagccaggaaag

SEQ ID NO: 10136 - DNA, 38 bp, Artificial Sequence
  primer
gtaaaacgacggccagtcccattgtccaggtatggaag

SEQ ID NO: 10137 - DNA, 38 bp, Artificial Sequence
  primer
gtaaaacgacggccagttgaaagggcttcctacctacc

SEQ ID NO: 10138 - DNA, 21 bp, Artificial Sequence
  primer
cccttcctgatgaagtgttcc

SEQ ID NO: 10139 - DNA, 38 bp, Artificial Sequence
  primer
gtaaaacgacggccagtagccgtatggaactggcttag

SEQ ID NO: 10140 - DNA, 20 bp, Artificial Sequence
  primer
gtatttccaggcccacaagc

SEQ ID NO: 10141 - DNA, 37 bp, Artificial Sequence
  primer
gtaaaacgacggccagttttgagccagggtgagtgag

SEQ ID NO: 10142 - DNA, 36 bp, Artificial Sequence
  primer
gtaaaacgacggccagtggtgggtaggagcccagag

SEQ ID NO: 10143 - DNA, 35 bp, Artificial Sequence
  primer
gtaaaacgacggccagtctggaaccattccgggag

SEQ ID NO: 10144 - DNA, 21 bp, Artificial Sequence
  primer
ctataaataggcccagcccag

SEQ ID NO: 10145 - DNA, 21 bp, Artificial Sequence
  primer
actacctgccgtgtaggcttg

SEQ ID NO: 10146 - DNA, 21 bp, Artificial Sequence
  primer
ctttccctgggtctcattgtc

SEQ ID NO: 10147 - DNA, 21 bp, Artificial Sequence
  primer
aggatttggctctcctacctg

SEQ ID NO: 10148 - DNA, 38 bp, Artificial Sequence
  primer
gtaaaacgacggccagtcttatctttgctggaggcagg

SEQ ID NO: 10149 - DNA, 21 bp, Artificial Sequence
  primer
tttccctttcttcttcctcca

SEQ ID NO: 10150 - DNA, 21 bp, Artificial Sequence
  primer
tggagcctcaatttcctaagc

SEQ ID NO: 10151 - DNA, 38 bp, Artificial Sequence
  primer
gtaaaacgacggccagtgttgctgtctgctttctgtgc

SEQ ID NO: 10152 - DNA, 21 bp, Artificial Sequence
  primer
tgttgcacaaagccagatgac

SEQ ID NO: 10153 - DNA, 21 bp, Artificial Sequence
  primer
ctgggaacaactttagggcac

SEQ ID NO: 10154 - DNA, 21 bp, Artificial Sequence
  primer
acttcttaagtgtgccgctcg

SEQ ID NO: 10155 - DNA, 21 bp, Artificial Sequence
  primer
acgctgacgctcgtctacttc

SEQ ID NO: 10156 - DNA, 38 bp, Artificial Sequence
  primer
gtaaaacgacggccagtaaatatgccaggtgattctgc

SEQ ID NO: 10157 - DNA, 23 bp, Artificial Sequence
  primer
caattctttaagcatggctttcc

SEQ ID NO: 10158 - DNA, 18 bp, Artificial Sequence
  primer
ctgggttgtgggaaccag

SEQ ID NO: 10159 - DNA, 38 bp, Artificial Sequence
  primer
gtaaaacgacggccagtgcaggtcttaacgtgtccctc

SEQ ID NO: 10160 - DNA, 21 bp, Artificial Sequence
  primer
actgtgtccctgcaggagttc

SEQ ID NO: 10161 - DNA, 37 bp, Artificial Sequence
  primer
gtaaaacgacggccagtctgggagtgggtgtcctgtc

SEQ ID NO: 10162 - DNA, 38 bp, Artificial Sequence
  primer
gtaaaacgacggccagtggaaggaccctataaatgccc

SEQ ID NO: 10163 - DNA, 38 bp, Artificial Sequence
  primer
gtaaaacgacggccagtatcagtcgttgcagctaaggc

SEQ ID NO: 10164 - DNA, 21 bp, Artificial Sequence
  primer
tccctttaggctgaggtcaag

SEQ ID NO: 10165 - DNA, 35 bp, Artificial Sequence
  primer
gtaaaacgacggccagtcagctggcgttgtcgttg

SEQ ID NO: 10166 - DNA, 38 bp, Artificial Sequence
  primer
gtaaaacgacggccagtgctcctataaagggagccacc

SEQ ID NO: 10167 - DNA, 38 bp, Artificial Sequence
  primer
gtaaaacgacggccagtcttctaggatcccagtcgcag

SEQ ID NO: 10168 - DNA, 21 bp, Artificial Sequence
  primer
tacatagaccaaccgccatcc

SEQ ID NO: 10169 - DNA, 20 bp, Artificial Sequence
  primer
ataactcatgggagggtggg

SEQ ID NO: 10170 - DNA, 21 bp, Artificial Sequence
  primer
aagagctagagggaagacggg

SEQ ID NO: 10171 - DNA, 20 bp, Artificial Sequence
  primer
acctccatgggcttcaactc

SEQ ID NO: 10172 - DNA, 38 bp, Artificial Sequence
  primer
gtaaaacgacggccagtaagtggccgtaatctgactcc

SEQ ID NO: 10173 - DNA, 20 bp, Artificial Sequence
  primer
acagtacccgaagatggcag

SEQ ID NO: 10174 - DNA, 40 bp, Artificial Sequence
  primer
gtaaaacgacggccagtgggtgagagaaggaaattctcag

SEQ ID NO: 10175 - DNA, 42 bp, Artificial Sequence
  primer
gtaaaacgacggccagtttgaggttcctctaagtgacaaatg

SEQ ID NO: 10176 - DNA, 25 bp, Artificial Sequence
  primer
gctagattctacattcatgagctgc

SEQ ID NO: 10177 - DNA, 21 bp, Artificial Sequence
  primer
atgaagaaggaggtgtgctcc

SEQ ID NO: 10178 - DNA, 38 bp, Artificial Sequence
  primer
gtaaaacgacggccagtgccaaggtgctctaagtgtcc

SEQ ID NO: 10179 - DNA, 20 bp, Artificial Sequence
  primer
gttgccagcctgagtttgag

SEQ ID NO: 10180 - DNA, 21 bp, Artificial Sequence
  primer
ccctgaaggtctggaagtctg

SEQ ID NO: 10181 - DNA, 38 bp, Artificial Sequence
  primer
gtaaaacgacggccagtggtcagccagagacaggacac

SEQ ID NO: 10182 - DNA, 21 bp, Artificial Sequence
  primer
gtgctacagattgccatcacc

SEQ ID NO: 10183 - DNA, 38 bp, Artificial Sequence
  primer
gtaaaacgacggccagtcaggcgtttaagggtagatgc

SEQ ID NO: 10184 - DNA, 21 bp, Artificial Sequence
  primer
ttaagggagtggcactagcag

SEQ ID NO: 10185 - DNA, 38 bp, Artificial Sequence
  primer
gtaaaacgacggccagtctcagctgggagttgaagagc

SEQ ID NO: 10186 - DNA, 21 bp, Artificial Sequence
  primer
tgaggtgcttggatgtttgtc

SEQ ID NO: 10187 - DNA, 38 bp, Artificial Sequence
  primer
gtaaaacgacggccagtcactagccatcgttgttctca

SEQ ID NO: 10188 - DNA, 21 bp, Artificial Sequence
  primer
ggctgccaccatctacagtct

SEQ ID NO: 10189 - DNA, 38 bp, Artificial Sequence
  primer
gtaaaacgacggccagttggagactgtaccgagacgtg

SEQ ID NO: 10190 - DNA, 37 bp, Artificial Sequence
  primer
gtaaaacgacggccagttctgctcaacctgtcttggc

SEQ ID NO: 10191 - DNA, 38 bp, Artificial Sequence
  primer
gtaaaacgacggccagttttctctgcaccagcattgag

SEQ ID NO: 10192 - DNA, 20 bp, Artificial Sequence
  primer
tctgtcggcatcttcctctc

SEQ ID NO: 10193 - DNA, 38 bp, Artificial Sequence
  primer
gtaaaacgacggccagtactgactcttgccctgagagg

SEQ ID NO: 10194 - DNA, 21 bp, Artificial Sequence
  primer
tggacataacccttcactggc

SEQ ID NO: 10195 - DNA, 38 bp, Artificial Sequence
  primer
gtaaaacgacggccagttctgggtggtgtgtgactagg

SEQ ID NO: 10196 - DNA, 38 bp, Artificial Sequence
  primer
gtaaaacgacggccagttggagacttctgagcctggag

SEQ ID NO: 10197 - DNA, 38 bp, Artificial Sequence
  primer
gtaaaacgacggccagtcatctggctgtgaaagtgagg

SEQ ID NO: 10198 - DNA, 38 bp, Artificial Sequence
  primer
gtaaaacgacggccagtcaacccaatccatgactttgc

SEQ ID NO: 10199 - DNA, 20 bp, Artificial Sequence
  primer
attcctccttctctccctgc

SEQ ID NO: 10200 - DNA, 38 bp, Artificial Sequence
  primer
gtaaaacgacggccagtgtttagcacaaggcttggcac

SEQ ID NO: 10201 - DNA, 39 bp, Artificial Sequence
  primer
gtaaaacgacggccagtttattcacccagtacatgccag

SEQ ID NO: 10202 - DNA, 40 bp, Artificial Sequence
  primer
gtaaaacgacggccagttcttgctgagttaagagggaacc

SEQ ID NO: 10203 - DNA, 37 bp, Artificial Sequence
  primer
gtaaaacgacggccagttccctacgggactctgaagg

SEQ ID NO: 10204 - DNA, 38 bp, Artificial Sequence
  primer
gtaaaacgacggccagttagggccttgttaagaaaccg

SEQ ID NO: 10205 - DNA, 26 bp, Artificial Sequence
  primer
tttcatatttcgaggaatataatggg

SEQ ID NO: 10206 - DNA, 39 bp, Artificial Sequence
  primer
gtaaaacgacggccagtggaaggcatgactctagcaaag

SEQ ID NO: 10207 - DNA, 36 bp, Artificial Sequence
  primer
gtaaaacgacggccagtcacacccagccaaggattc

SEQ ID NO: 10208 - DNA, 23 bp, Artificial Sequence
  primer
cagaaacctgtatttgacttgcc

SEQ ID NO: 10209 - DNA, 22 bp, Artificial Sequence
  primer
atctggatgactgtgaaagcac

SEQ ID NO: 10210 - DNA, 23 bp, Artificial Sequence
  primer
tttcagggtttgtcatgttattt

SEQ ID NO: 10211 - DNA, 38 bp, Artificial Sequence
  primer
gtaaaacgacggccagtaacaatattggaaagccgtgg

SEQ ID NO: 10212 - DNA, 44 bp, Artificial Sequence
  primer
gtaaaacgacggccagttctaaatcatagtccaattctgatgaa

SEQ ID NO: 10213 - DNA, 21 bp, Artificial Sequence
  primer
atttacagcatgaacgggacc

SEQ ID NO: 10214 - DNA, 41 bp, Artificial Sequence
  primer
gtaaaacgacggccagtcctctgagaaactgtatgaacctg

SEQ ID NO: 10215 - DNA, 41 bp, Artificial Sequence
  primer
gtaaaacgacggccagtaagcatataagagacagaaatgcg

SEQ ID NO: 10216 - DNA, 38 bp, Artificial Sequence
  primer
gtaaaacgacggccagttgggtacaatgagaggtttgc

SEQ ID NO: 10217 - DNA, 43 bp, Artificial Sequence
  primer
gtaaaacgacggccagtgctacaataactgataggcatgaaac

SEQ ID NO: 10218 - DNA, 22 bp, Artificial Sequence
  primer
tgtgcaggtgacagagtgagac

SEQ ID NO: 10219 - DNA, 25 bp, Artificial Sequence
  primer
tcatatccctgtttcatgctatctt

SEQ ID NO: 10220 - DNA, 39 bp, Artificial Sequence
  primer
gtaaaacgacggccagttcattggtcactcaacggtatc

SEQ ID NO: 10221 - DNA, 38 bp, Artificial Sequence
  primer
gtaaaacgacggccagtgcctgaaccatttactcacca

SEQ ID NO: 10222 - DNA, 21 bp, Artificial Sequence
  primer
ttcttgctctgaaacactcgg

SEQ ID NO: 10223 - DNA, 38 bp, Artificial Sequence
  primer
gtaaaacgacggccagtcacgttagggcttgtaactcg

SEQ ID NO: 10224 - DNA, 22 bp, Artificial Sequence
  primer
ggtgaagggagtcattcagaag

SEQ ID NO: 10225 - DNA, 38 bp, Artificial Sequence
  primer
gtaaaacgacggccagttgggcccatctactgaatttg

SEQ ID NO: 10226 - DNA, 39 bp, Artificial Sequence
  primer
gtaaaacgacggccagtggctgatttccttctgtgtttc

SEQ ID NO: 10227 - DNA, 20 bp, Artificial Sequence
  primer
aaccaccgtgacccacctac

SEQ ID NO: 10228 - DNA, 42 bp, Artificial Sequence
  primer
gtaaaacgacggccagtgcaatctgtcagttacaggaatgaa

SEQ ID NO: 10229 - DNA, 47 bp, Artificial Sequence
  primer
gtaaaacgacggccagtttatttaaactcaattagtaccgaaatcat

SEQ ID NO: 10230 - DNA, 20 bp, Artificial Sequence
  primer
tgaattggaaatgcagaggc

SEQ ID NO: 10231 - DNA, 38 bp, Artificial Sequence
  primer
gtaaaacgacggccagttgtggagctggtaaagtttgg

SEQ ID NO: 10232 - DNA, 39 bp, Artificial Sequence
  primer
gtaaaacgacggccagtgggaagctaaggttgaaagagc

SEQ ID NO: 10233 - DNA, 38 bp, Artificial Sequence
  primer
gtaaaacgacggccagtgcagtgtgcaaagtgaacaag

SEQ ID NO: 10234 - DNA, 43 bp, Artificial Sequence
  primer
gtaaaacgacggccagtgggattgattaaggataagatgtttg

SEQ ID NO: 10235 - DNA, 21 bp, Artificial Sequence
  primer
ttattgccagggcttaacagg

SEQ ID NO: 10236 - DNA, 22 bp, Artificial Sequence
  primer
ggtcttccagaccctaattgtg

SEQ ID NO: 10237 - DNA, 25 bp, Artificial Sequence
  primer
tggagaactctagaatggtaatgtg

SEQ ID NO: 10238 - DNA, 38 bp, Artificial Sequence
  primer
gtaaaacgacggccagtgcaagtttccttctctggagc

SEQ ID NO: 10239 - DNA, 38 bp, Artificial Sequence
  primer
gtaaaacgacggccagtcagaatctgttccagagcgtg

SEQ ID NO: 10240 - DNA, 21 bp, Artificial Sequence
  primer
ggatgaggaacagcaaccttc

SEQ ID NO: 10241 - DNA, 38 bp, Artificial Sequence
  primer
gtaaaacgacggccagtcttcgaccatttctgacaacg

SEQ ID NO: 10242 - DNA, 21 bp, Artificial Sequence
  primer
gttctctgctagacgacagcg

SEQ ID NO: 10243 - DNA, 21 bp, Artificial Sequence
  primer
acaactttccactggctctgg

SEQ ID NO: 10244 - DNA, 21 bp, Artificial Sequence
  primer
tcatcctggcacactctcttc

SEQ ID NO: 10245 - DNA, 38 bp, Artificial Sequence
  primer
gtaaaacgacggccagttgcaggttaatgctgaagacc

SEQ ID NO: 10246 - DNA, 38 bp, Artificial Sequence
  primer
gtaaaacgacggccagtgtttggtgccatactctgtcc

SEQ ID NO: 10247 - DNA, 23 bp, Artificial Sequence
  primer
gtttagagtctgtgaccagggag

SEQ ID NO: 10248 - DNA, 38 bp, Artificial Sequence
  primer
gtaaaacgacggccagtaataccagagcatctctgccc

SEQ ID NO: 10249 - DNA, 38 bp, Artificial Sequence
  primer
gtaaaacgacggccagtatcagagacattccctctggg

SEQ ID NO: 10250 - DNA, 38 bp, Artificial Sequence
  primer
gtaaaacgacggccagtagccaagtagatggttccctg

SEQ ID NO: 10251 - DNA, 20 bp, Artificial Sequence
  primer
gaggaccaaggaagtacggg

SEQ ID NO: 10252 - DNA, 21 bp, Artificial Sequence
  primer
tgagcaggatctcttggactg

SEQ ID NO: 10253 - DNA, 19 bp, Artificial Sequence
  primer
gtcatggaagcgaaatggc

SEQ ID NO: 10254 - DNA, 38 bp, Artificial Sequence
  primer
gtaaaacgacggccagttatccctctgagcctgtttcc

SEQ ID NO: 10255 - DNA, 38 bp, Artificial Sequence
  primer
gtaaaacgacggccagttacccaacctcccactcattc

SEQ ID NO: 10256 - DNA, 20 bp, Artificial Sequence
  primer
agtaccaaccgccaacagtg

SEQ ID NO: 10257 - DNA, 21 bp, Artificial Sequence
  primer
caaatgcatgtttatggctgg

SEQ ID NO: 10258 - DNA, 38 bp, Artificial Sequence
  primer
gtaaaacgacggccagtcaacgtccatatggtcagcac

SEQ ID NO: 10259 - DNA, 21 bp, Artificial Sequence
  primer
ccagagtttcagcactgatgg

SEQ ID NO: 10260 - DNA, 38 bp, Artificial Sequence
  primer
gtaaaacgacggccagtagaaagtggtatgctcgaggg

SEQ ID NO: 10261 - DNA, 38 bp, Artificial Sequence
  primer
gtaaaacgacggccagtagaacagtgccactcctgatg

SEQ ID NO: 10262 - DNA, 21 bp, Artificial Sequence
  primer
ggatttgccatcatcacacag

SEQ ID NO: 10263 - DNA, 38 bp, Artificial Sequence
  primer
gtaaaacgacggccagtcaaggttgtggatagtttgcg

SEQ ID NO: 10264 - DNA, 20 bp, Artificial Sequence
  primer
gtgtgggtggctctgagttg

SEQ ID NO: 10265 - DNA, 38 bp, Artificial Sequence
  primer
gtaaaacgacggccagtagcagagaatcctcccaagtc

SEQ ID NO: 10266 - DNA, 21 bp, Artificial Sequence
  primer
gtgtgtgtttcaccatgaggc

SEQ ID NO: 10267 - DNA, 37 bp, Artificial Sequence
  primer
gtaaaacgacggccagtctcgctggctgcataaagag

SEQ ID NO: 10268 - DNA, 20 bp, Artificial Sequence
  primer
atcctgcagatcgggaagtg

SEQ ID NO: 10269 - DNA, 21 bp, Artificial Sequence
  primer
ctggaagaagtccatcaaggc

SEQ ID NO: 10270 - DNA, 21 bp, Artificial Sequence
  primer
ctacgactacaccgtcagccc

SEQ ID NO: 10271 - DNA, 20 bp, Artificial Sequence
  primer
accctcgagagttcctgagc

SEQ ID NO: 10272 - DNA, 21 bp, Artificial Sequence
  primer
gacgaggaggagatcatccag

SEQ ID NO: 10273 - DNA, 38 bp, Artificial Sequence
  primer
gtaaaacgacggccagtctccgagaaaggagtgtggtc

SEQ ID NO: 10274 - DNA, 19 bp, Artificial Sequence
  primer
aaggtgtggatggactggc

SEQ ID NO: 10275 - DNA, 40 bp, Artificial Sequence
  primer
gtaaaacgacggccagttttgactttgcctgctatcaaat

SEQ ID NO: 10276 - DNA, 38 bp, Artificial Sequence
  primer
gtaaaacgacggccagtagatactgggacagtggagcc

SEQ ID NO: 10277 - DNA, 20 bp, Artificial Sequence
  primer
gctcagcaggttgagacagg

SEQ ID NO: 10278 - DNA, 39 bp, Artificial Sequence
  primer
gtaaaacgacggccagtaaacttaacagctccctgaccc

SEQ ID NO: 10279 - DNA, 24 bp, Artificial Sequence
  primer
actttctgctgattgttgctagag

SEQ ID NO: 10280 - DNA, 19 bp, Artificial Sequence
  primer
cttccggttgaagacgtgg

SEQ ID NO: 10281 - DNA, 40 bp, Artificial Sequence
  primer
gtaaaacgacggccagtgaacatttcctgagatgctgaga

SEQ ID NO: 10282 - DNA, 28 bp, Artificial Sequence
  primer
gctaataaagggatttaggttattgaaa

SEQ ID NO: 10283 - DNA, 20 bp, Artificial Sequence
  primer
aggaagttgaggctgcagtg

SEQ ID NO: 10284 - DNA, 38 bp, Artificial Sequence
  primer
gtaaaacgacggccagtaggtgtatttctctggacggg

SEQ ID NO: 10285 - DNA, 37 bp, Artificial Sequence
  primer
gtaaaacgacggccagtgactacaggcatgcaccacc

SEQ ID NO: 10286 - DNA, 22 bp, Artificial Sequence
  primer
ggccatataagcctagtgaggg

SEQ ID NO: 10287 - DNA, 38 bp, Artificial Sequence
  primer
gtaaaacgacggccagtctcgatcctaccaccttggtc

SEQ ID NO: 10288 - DNA, 22 bp, Artificial Sequence
  primer
ggtgctaggacttcatcgtttg

SEQ ID NO: 10289 - DNA, 38 bp, Artificial Sequence
  primer
gtaaaacgacggccagtcatctcgtcccaacagttgtc

SEQ ID NO: 10290 - DNA, 37 bp, Artificial Sequence
  primer
gtaaaacgacggccagtcgttgtgcaaagtcagatcg

SEQ ID NO: 10291 - DNA, 37 bp, Artificial Sequence
  primer
gtaaaacgacggccagtcatcacacaactcgccactc

SEQ ID NO: 10292 - DNA, 38 bp, Artificial Sequence
  primer
gtaaaacgacggccagtgtccactctacaaatggcagg

SEQ ID NO: 10293 - DNA, 38 bp, Artificial Sequence
  primer
gtaaaacgacggccagtgtatgtaaggtccacccaggc

SEQ ID NO: 10294 - DNA, 37 bp, Artificial Sequence
  primer
gtaaaacgacggccagtgcaagacctggacgtgctac

SEQ ID NO: 10295 - DNA, 21 bp, Artificial Sequence
  primer
ttgctccagtagccacgatac

SEQ ID NO: 10296 - DNA, 35 bp, Artificial Sequence
  primer
gtaaaacgacggccagtctcctcagccagcgacag

SEQ ID NO: 10297 - DNA, 36 bp, Artificial Sequence
  primer
gtaaaacgacggccagtcggtctccactcgctcttc

SEQ ID NO: 10298 - DNA, 38 bp, Artificial Sequence
  primer
gtaaaacgacggccagtgacagctgaatttgcttgctg

SEQ ID NO: 10299 - DNA, 21 bp, Artificial Sequence
  primer
gtgttaggtaatgaggcacgc

SEQ ID NO: 10300 - DNA, 44 bp, Artificial Sequence
  primer
gtaaaacgacggccagtgaattaaatggttctttatgatctgga

SEQ ID NO: 10301 - DNA, 40 bp, Artificial Sequence
  primer
gtaaaacgacggccagttcactactcatgaagtggaaccc

SEQ ID NO: 10302 - DNA, 21 bp, Artificial Sequence
  primer
agcacagaaccagacatggag

SEQ ID NO: 10303 - DNA, 38 bp, Artificial Sequence
  primer
gtaaaacgacggccagtgggaagaccacgatcctctac

SEQ ID NO: 10304 - DNA, 21 bp, Artificial Sequence
  primer
acacacaaggtaagtggctgg

SEQ ID NO: 10305 - DNA, 37 bp, Artificial Sequence
  primer
gtaaaacgacggccagtgttcgccaacaagcaggtag

SEQ ID NO: 10306 - DNA, 38 bp, Artificial Sequence
  primer
gtaaaacgacggccagtgtcttccataccagggaccag

SEQ ID NO: 10307 - DNA, 21 bp, Artificial Sequence
  primer
accaaactcattgtggtggtg

SEQ ID NO: 10308 - DNA, 21 bp, Artificial Sequence
  primer
aatatttggagggtgtcaggc

SEQ ID NO: 10309 - DNA, 23 bp, Artificial Sequence
  primer
cacatttctttggtagatgggtg

SEQ ID NO: 10310 - DNA, 38 bp, Artificial Sequence
  primer
gtaaaacgacggccagtctcgtttagtttgcctgggag

SEQ ID NO: 10311 - DNA, 38 bp, Artificial Sequence
  primer
gtaaaacgacggccagtgaagtgttgcctttgggaatc

SEQ ID NO: 10312 - DNA, 21 bp, Artificial Sequence
  primer
gaggccttgtctctgttgatg

SEQ ID NO: 10313 - DNA, 38 bp, Artificial Sequence
  primer
gtaaaacgacggccagttttgctgcctacactgtttca

SEQ ID NO: 10314 - DNA, 26 bp, Artificial Sequence
  primer
ctttgtgtcgagaaattaggttaatg

SEQ ID NO: 10315 - DNA, 21 bp, Artificial Sequence
  primer
tcaagtgatcctcccatctcc

SEQ ID NO: 10316 - DNA, 38 bp, Artificial Sequence
  primer
gtaaaacgacggccagtaggatgggagggtgatttagg

SEQ ID NO: 10317 - DNA, 21 bp, Artificial Sequence
  primer
gcttcaacaccgagaagatcc

SEQ ID NO: 10318 - DNA, 35 bp, Artificial Sequence
  primer
gtaaaacgacggccagtcaactcgcggagcttcag

SEQ ID NO: 10319 - DNA, 38 bp, Artificial Sequence
  primer
gtaaaacgacggccagtaaggtagataacgacgcgcac

SEQ ID NO: 10320 - DNA, 20 bp, Artificial Sequence
  primer
agggtggatgtgacctagcc

SEQ ID NO: 10321 - DNA, 39 bp, Artificial Sequence
  primer
gtaaaacgacggccagtgccatgactcctgtagagcttc

SEQ ID NO: 10322 - DNA, 21 bp, Artificial Sequence
  primer
caacggcagactgcacaatac

SEQ ID NO: 10323 - DNA, 37 bp, Artificial Sequence
  primer
gtaaaacgacggccagtgggctacagcacttacgcag

SEQ ID NO: 10324 - DNA, 38 bp, Artificial Sequence
  primer
gtaaaacgacggccagtctggagaaatcaagttgtgcg

SEQ ID NO: 10325 - DNA, 21 bp, Artificial Sequence
  primer
atcttcgggaacaaggaaatg

SEQ ID NO: 10326 - DNA, 38 bp, Artificial Sequence
  primer
gtaaaacgacggccagtccttcagtaagtggtccctgc

SEQ ID NO: 10327 - DNA, 38 bp, Artificial Sequence
  primer
gtaaaacgacggccagtattacacggaggctctttccc

SEQ ID NO: 10328 - DNA, 39 bp, Artificial Sequence
  primer
gtaaaacgacggccagttgctgcttgctgtgtctaattc

SEQ ID NO: 10329 - DNA, 20 bp, Artificial Sequence
  primer
cctgtgttggaagttggagc

SEQ ID NO: 10330 - DNA, 37 bp, Artificial Sequence
  primer
gtaaaacgacggccagtacgtaggccacatggttctg

SEQ ID NO: 10331 - DNA, 38 bp, Artificial Sequence
  primer
gtaaaacgacggccagtgaaagcacatctctctgctgc

SEQ ID NO: 10332 - DNA, 37 bp, Artificial Sequence
  primer
gtaaaacgacggccagtgtccagttgcactcctccag

SEQ ID NO: 10333 - DNA, 21 bp, Artificial Sequence
  primer
tgctaatccagtctctgctgc

SEQ ID NO: 10334 - DNA, 37 bp, Artificial Sequence
  primer
gtaaaacgacggccagtgcttgtatcctgctgccttc

SEQ ID NO: 10335 - DNA, 36 bp, Artificial Sequence
  primer
gtaaaacgacggccagtcactgtccaggtgcagagc

SEQ ID NO: 10336 - DNA, 21 bp, Artificial Sequence
  primer
tctgaaggtggtggtcagttc

SEQ ID NO: 10337 - DNA, 20 bp, Artificial Sequence
  primer
gtctgtacgtgtgtgcgagg

SEQ ID NO: 10338 - DNA, 35 bp, Artificial Sequence
  primer
gtaaaacgacggccagtgcggagcctgaccgttac

SEQ ID NO: 10339 - DNA, 37 bp, Artificial Sequence
  primer
gtaaaacgacggccagtctgggtgacagagcgaaact

SEQ ID NO: 10340 - DNA, 21 bp, Artificial Sequence
  primer
tgggtccttgttgacacaaac

SEQ ID NO: 10341 - DNA, 38 bp, Artificial Sequence
  primer
gtaaaacgacggccagtatggtactgatctcccgacct

SEQ ID NO: 10342 - DNA, 38 bp, Artificial Sequence
  primer
gtaaaacgacggccagttggaaagcaccaatctttagg

SEQ ID NO: 10343 - DNA, 21 bp, Artificial Sequence
  primer
ccttcctttccattaacaggg

SEQ ID NO: 10344 - DNA, 41 bp, Artificial Sequence
  primer
gtaaaacgacggccagtggataagatgtagcactgagcaag

SEQ ID NO: 10345 - DNA, 41 bp, Artificial Sequence
  primer
gtaaaacgacggccagttgcttatcaacttgagtcttctgg

SEQ ID NO: 10346 - DNA, 37 bp, Artificial Sequence
  primer
gtaaaacgacggccagtgtgcttgtcacagtgcctgg

SEQ ID NO: 10347 - DNA, 41 bp, Artificial Sequence
  primer
gtaaaacgacggccagtcaccaacttgccttcataattgtt

SEQ ID NO: 10348 - DNA, 22 bp, Artificial Sequence
  primer
gcatttggtgtagacacagtcc

SEQ ID NO: 10349 - DNA, 38 bp, Artificial Sequence
  primer
gtaaaacgacggccagttccatgtagcttgggaagaga

SEQ ID NO: 10350 - DNA, 26 bp, Artificial Sequence
  primer
gaactgaaatgtgaaataacagaccc

SEQ ID NO: 10351 - DNA, 21 bp, Artificial Sequence
  primer
tgttggaaagaaagagcctgg

SEQ ID NO: 10352 - DNA, 19 bp, Artificial Sequence
  primer
cacttcagcccgagtctcc

SEQ ID NO: 10353 - DNA, 21 bp, Artificial Sequence
  primer
tgtgaatcctgttgggttctg

SEQ ID NO: 10354 - DNA, 37 bp, Artificial Sequence
  primer
gtaaaacgacggccagtctcgaggtacggcttcttgg

SEQ ID NO: 10355 - DNA, 21 bp, Artificial Sequence
  primer
aaggaaatgcgttgggaatta

SEQ ID NO: 10356 - DNA, 38 bp, Artificial Sequence
  primer
gtaaaacgacggccagtgcttgggtttcctctcgaaat

SEQ ID NO: 10357 - DNA, 43 bp, Artificial Sequence
  primer
gtaaaacgacggccagtgctttggctttgataatacctttatg

SEQ ID NO: 10358 - DNA, 22 bp, Artificial Sequence
  primer
ttcaaggctgcagtgaactatg

SEQ ID NO: 10359 - DNA, 40 bp, Artificial Sequence
  primer
gtaaaacgacggccagtagaaaggattgttggaggtaaca

SEQ ID NO: 10360 - DNA, 27 bp, Artificial Sequence
  primer
tttgaaggtttagcatataattgcttc

SEQ ID NO: 10361 - DNA, 21 bp, Artificial Sequence
  primer
acttcacattgctttcctgcc

SEQ ID NO: 10362 - DNA, 40 bp, Artificial Sequence
  primer
gtaaaacgacggccagtaaatacagtagaaggctgaagcg

SEQ ID NO: 10363 - DNA, 24 bp, Artificial Sequence
  primer
cacctgttgttagtgcctaagttg

SEQ ID NO: 10364 - DNA, 38 bp, Artificial Sequence
  primer
gtaaaacgacggccagtagcctgggtcctaatacctgc

SEQ ID NO: 10365 - DNA, 38 bp, Artificial Sequence
  primer
gtaaaacgacggccagtgacactgacgaggatttgtgc

SEQ ID NO: 10366 - DNA, 22 bp, Artificial Sequence
  primer
gggcagtcaagaacttggtatg

SEQ ID NO: 10367 - DNA, 21 bp, Artificial Sequence
  primer
tctaagcaacattgaaacgcc

SEQ ID NO: 10368 - DNA, 41 bp, Artificial Sequence
  primer
gtaaaacgacggccagtggccttccatatgagacttatttc

SEQ ID NO: 10369 - DNA, 21 bp, Artificial Sequence
  primer
agtagcaggcgcctttaatcc

SEQ ID NO: 10370 - DNA, 21 bp, Artificial Sequence
  primer
tgctatgggatttgaggtgac

SEQ ID NO: 10371 - DNA, 21 bp, Artificial Sequence
  primer
ttcaacttccctcctttctgg

SEQ ID NO: 10372 - DNA, 39 bp, Artificial Sequence
  primer
gtaaaacgacggccagttgaaactccaaactcatcaagc

SEQ ID NO: 10373 - DNA, 18 bp, Artificial Sequence
  primer
tattcaagcccaggcagc

SEQ ID NO: 10374 - DNA, 24 bp, Artificial Sequence
  primer
aagtaaacagagtttgttggtggg

SEQ ID NO: 10375 - DNA, 23 bp, Artificial Sequence
  primer
agtctgtgtttaagtcctggctg

SEQ ID NO: 10376 - DNA, 23 bp, Artificial Sequence
  primer
aggaaagcagttgatttcagaag

SEQ ID NO: 10377 - DNA, 39 bp, Artificial Sequence
  primer
gtaaaacgacggccagtggttcacatggagtagaggtgg

SEQ ID NO: 10378 - DNA, 21 bp, Artificial Sequence
  primer
ttctacttcggaactggcttg

SEQ ID NO: 10379 - DNA, 21 bp, Artificial Sequence
  primer
tgattgctctgggctttaaga

SEQ ID NO: 10380 - DNA, 44 bp, Artificial Sequence
  primer
gtaaaacgacggccagtaaacggaacaggtactatatttgttga

SEQ ID NO: 10381 - DNA, 21 bp, Artificial Sequence
  primer
tattctcaccactcagggcag

SEQ ID NO: 10382 - DNA, 21 bp, Artificial Sequence
  primer
tgcctatttcagtggcacata

SEQ ID NO: 10383 - DNA, 25 bp, Artificial Sequence
  primer
aaacccagtgtcatgtgttaatttc

SEQ ID NO: 10384 - DNA, 27 bp, Artificial Sequence
  primer
gttgaggtgaatataacgttctagagg

SEQ ID NO: 10385 - DNA, 21 bp, Artificial Sequence
  primer
gtgtgcagcaaggtaggtctg

SEQ ID NO: 10386 - DNA, 38 bp, Artificial Sequence
  primer
gtaaaacgacggccagtgcagtggtcaaagatggactg

SEQ ID NO: 10387 - DNA, 38 bp, Artificial Sequence
  primer
gtaaaacgacggccagtcccagtgagggtcagaaagtc

SEQ ID NO: 10388 - DNA, 19 bp, Artificial Sequence
  primer
tgtcctgggccacatacag

SEQ ID NO: 10389 - DNA, 21 bp, Artificial Sequence
  primer
actaatgggaggtggtgcttg

SEQ ID NO: 10390 - DNA, 37 bp, Artificial Sequence
  primer
gtaaaacgacggccagtctccatacgggctgtttcac

SEQ ID NO: 10391 - DNA, 41 bp, Artificial Sequence
  primer
gtaaaacgacggccagtcagatgggatctaacatgttcttg

SEQ ID NO: 10392 - DNA, 20 bp, Artificial Sequence
  primer
ctttcctggctcctgtgatg

SEQ ID NO: 10393 - DNA, 36 bp, Artificial Sequence
  primer
gtaaaacgacggccagtcgaggtgtcgcttcctgac

SEQ ID NO: 10394 - DNA, 21 bp, Artificial Sequence
  primer
taatgcctagccagtcactcc

SEQ ID NO: 10395 - DNA, 38 bp, Artificial Sequence
  primer
gtaaaacgacggccagtcccaggatatagtttgcaggc

SEQ ID NO: 10396 - DNA, 21 bp, Artificial Sequence
  primer
taggaactggaagtgcctgtc

SEQ ID NO: 10397 - DNA, 21 bp, Artificial Sequence
  primer
aacagccataggagttggctc

SEQ ID NO: 10398 - DNA, 21 bp, Artificial Sequence
  primer
ttcaagaattcctgctgcctc

SEQ ID NO: 10399 - DNA, 21 bp, Artificial Sequence
  primer
ttatttgcaccctttgccttc

SEQ ID NO: 10400 - DNA, 20 bp, Artificial Sequence
  primer
aagcaacagctgggaggttc

SEQ ID NO: 10401 - DNA, 38 bp, Artificial Sequence
  primer
gtaaaacgacggccagtcttactgcagccttgacctcc

SEQ ID NO: 10402 - DNA, 38 bp, Artificial Sequence
  primer
gtaaaacgacggccagttcattggtaaaggagcaaggc

SEQ ID NO: 10403 - DNA, 38 bp, Artificial Sequence
  primer
gtaaaacgacggccagttgcccagggtgctttacttac

SEQ ID NO: 10404 - DNA, 38 bp, Artificial Sequence
  primer
gtaaaacgacggccagtccaccggagtctgtagttcac

SEQ ID NO: 10405 - DNA, 20 bp, Artificial Sequence
  primer
ggtcccagaaagcctcgtag

SEQ ID NO: 10406 - DNA, 38 bp, Artificial Sequence
  primer
gtaaaacgacggccagtttacaggtttgggaaagggag

SEQ ID NO: 10407 - DNA, 38 bp, Artificial Sequence
  primer
gtaaaacgacggccagtagctgggtcagaaattgaagg

SEQ ID NO: 10408 - DNA, 21 bp, Artificial Sequence
  primer
caggctattctgactccaccc

SEQ ID NO: 10409 - DNA, 37 bp, Artificial Sequence
  primer
gtaaaacgacggccagttgcctcatttggaatcaagg

SEQ ID NO: 10410 - DNA, 22 bp, Artificial Sequence
  primer
agtgctgacactgcttatgtcc

SEQ ID NO: 10411 - DNA, 39 bp, Artificial Sequence
  primer
gtaaaacgacggccagtgatggttgggaggatttaggag

SEQ ID NO: 10412 - DNA, 38 bp, Artificial Sequence
  primer
gtaaaacgacggccagttggctaagcctgattctgaag

SEQ ID NO: 10413 - DNA, 20 bp, Artificial Sequence
  primer
gccctgcagatgtgagaatg

SEQ ID NO: 10414 - DNA, 22 bp, Artificial Sequence
  primer
ggcataactccattgaaccaac

SEQ ID NO: 10415 - DNA, 39 bp, Artificial Sequence
  primer
gtaaaacgacggccagtgagtcattcccatttatgtccc

SEQ ID NO: 10416 - DNA, 35 bp, Artificial Sequence
  primer
gtaaaacgacggccagttgatacaccctcctcggc

SEQ ID NO: 10417 - DNA, 36 bp, Artificial Sequence
  primer
gtaaaacgacggccagtaactgcagaagcctcacgc

SEQ ID NO: 10418 - DNA, 21 bp, Artificial Sequence
  primer
aggtaggctgtccatctttgc

SEQ ID NO: 10419 - DNA, 21 bp, Artificial Sequence
  primer
aatggaagtgagaggaaacgg

SEQ ID NO: 10420 - DNA, 21 bp, Artificial Sequence
  primer
tgtacccagtgcattcattcc

SEQ ID NO: 10421 - DNA, 38 bp, Artificial Sequence
  primer
gtaaaacgacggccagttgccctttgggacagataatg

SEQ ID NO: 10422 - DNA, 23 bp, Artificial Sequence
  primer
tgaaatgaacctcagtcacttgc

SEQ ID NO: 10423 - DNA, 38 bp, Artificial Sequence
  primer
gtaaaacgacggccagttccacttctggcttccacttt

SEQ ID NO: 10424 - DNA, 39 bp, Artificial Sequence
  primer
gtaaaacgacggccagtaaactcaccagttgctgtctcc

SEQ ID NO: 10425 - DNA, 38 bp, Artificial Sequence
  primer
gtaaaacgacggccagtgaagtctgggatgaaacctgc

SEQ ID NO: 10426 - DNA, 38 bp, Artificial Sequence
  primer
gtaaaacgacggccagtgagaaatgtcctctgggttgg

SEQ ID NO: 10427 - DNA, 21 bp, Artificial Sequence
  primer
tgaaaccaggagttcaggacc

SEQ ID NO: 10428 - DNA, 37 bp, Artificial Sequence
  primer
gtaaaacgacggccagtgtcatgactgccgttgtctg

SEQ ID NO: 10429 - DNA, 38 bp, Artificial Sequence
  primer
gtaaaacgacggccagtgaggatcattgagcccagaaa

SEQ ID NO: 10430 - DNA, 21 bp, Artificial Sequence
  primer
tgaaccttgatcacaccactg

SEQ ID NO: 10431 - DNA, 23 bp, Artificial Sequence
  primer
ccagggtgagattaacacttctg

SEQ ID NO: 10432 - DNA, 22 bp, Artificial Sequence
  primer
gtgaagttaaagcagccagatg

SEQ ID NO: 10433 - DNA, 21 bp, Artificial Sequence
  primer
taagggaataccgcatagcag

SEQ ID NO: 10434 - DNA, 41 bp, Artificial Sequence
  primer
gtaaaacgacggccagtgttctttactttgtgggaaccttt

SEQ ID NO: 10435 - DNA, 24 bp, Artificial Sequence
  primer
cagtttgttacgctagcttgtttg

SEQ ID NO: 10436 - DNA, 38 bp, Artificial Sequence
  primer
gtaaaacgacggccagtttcccattagtgacgtgcttg

SEQ ID NO: 10437 - DNA, 44 bp, Artificial Sequence
  primer
gtaaaacgacggccagtagactgaatattacgtatttccaaccc

SEQ ID NO: 10438 - DNA, 27 bp, Artificial Sequence
  primer
tgtgaaatacttggtcattattaagcc

SEQ ID NO: 10439 - DNA, 38 bp, Artificial Sequence
  primer
gtaaaacgacggccagtgacactcaaaccctgggacag

SEQ ID NO: 10440 - DNA, 38 bp, Artificial Sequence
  primer
gtaaaacgacggccagttctgtgcagacttcccttgtg

SEQ ID NO: 10441 - DNA, 21 bp, Artificial Sequence
  primer
tcgaagagaagtatgggtggg

SEQ ID NO: 10442 - DNA, 21 bp, Artificial Sequence
  primer
ccatctgtggctgagagtagg

SEQ ID NO: 10443 - DNA, 37 bp, Artificial Sequence
  primer
gtaaaacgacggccagtgcagtccttggttgttccag

SEQ ID NO: 10444 - DNA, 38 bp, Artificial Sequence
  primer
gtaaaacgacggccagtctggtatgggtggaaatttgg

SEQ ID NO: 10445 - DNA, 36 bp, Artificial Sequence
  primer
gtaaaacgacggccagtcctgggctcaggctcatag

SEQ ID NO: 10446 - DNA, 38 bp, Artificial Sequence
  primer
gtaaaacgacggccagtggctgacctgggagaagttac

SEQ ID NO: 10447 - DNA, 21 bp, Artificial Sequence
  primer
aggatagtcaccaccagcctc

SEQ ID NO: 10448 - DNA, 21 bp, Artificial Sequence
  primer
ccgtgatattcacagtccagc

SEQ ID NO: 10449 - DNA, 37 bp, Artificial Sequence
  primer
gtaaaacgacggccagtcagaagggtcttgcagttgg

SEQ ID NO: 10450 - DNA, 21 bp, Artificial Sequence
  primer
agaagtgctcctgcctagtgg

SEQ ID NO: 10451 - DNA, 38 bp, Artificial Sequence
  primer
gtaaaacgacggccagttggtctctgtgggagacactg

SEQ ID NO: 10452 - DNA, 20 bp, Artificial Sequence
  primer
gacatcaagacggccttcag

SEQ ID NO: 10453 - DNA, 21 bp, Artificial Sequence
  primer
ctttggtttagtgggtggagc

SEQ ID NO: 10454 - DNA, 37 bp, Artificial Sequence
  primer
gtaaaacgacggccagtaaagggttcctgctgtgagc

SEQ ID NO: 10455 - DNA, 41 bp, Artificial Sequence
  primer
gtaaaacgacggccagttcccaagatttacagacctttcag

SEQ ID NO: 10456 - DNA, 21 bp, Artificial Sequence
  primer
aaaccaagtgggagcattgag

SEQ ID NO: 10457 - DNA, 37 bp, Artificial Sequence
  primer
gtaaaacgacggccagtgggaggcacacatcctcttc

SEQ ID NO: 10458 - DNA, 42 bp, Artificial Sequence
  primer
gtaaaacgacggccagtcaattaaatctcaattgacttgctg

SEQ ID NO: 10459 - DNA, 22 bp, Artificial Sequence
  primer
ggtgatggaagaaacactcagc

SEQ ID NO: 10460 - DNA, 38 bp, Artificial Sequence
  primer
gtaaaacgacggccagttgaaaccaagtcccagctgac

SEQ ID NO: 10461 - DNA, 19 bp, Artificial Sequence
  primer
cgcgggtaggtaagagcag

SEQ ID NO: 10462 - DNA, 21 bp, Artificial Sequence
  primer
tggaaggacagtcattgatgg

SEQ ID NO: 10463 - DNA, 38 bp, Artificial Sequence
  primer
gtaaaacgacggccagtcgtattatcattgtggcccag

SEQ ID NO: 10464 - DNA, 21 bp, Artificial Sequence
  primer
actacaggtcttgcctcaccc

SEQ ID NO: 10465 - DNA, 37 bp, Artificial Sequence
  primer
gtaaaacgacggccagtaagcagattgcatacccacg

SEQ ID NO: 10466 - DNA, 38 bp, Artificial Sequence
  primer
gtaaaacgacggccagtggcctgtcctagccaattatg

SEQ ID NO: 10467 - DNA, 38 bp, Artificial Sequence
  primer
gtaaaacgacggccagtttccaagaataggaagcctgg

SEQ ID NO: 10468 - DNA, 38 bp, Artificial Sequence
  primer
gtaaaacgacggccagtcttgttctccctgtcccagtg

SEQ ID NO: 10469 - DNA, 38 bp, Artificial Sequence
  primer
gtaaaacgacggccagtattccgtctgtgttccttgtg

SEQ ID NO: 10470 - DNA, 43 bp, Artificial Sequence
  primer
gtaaaacgacggccagtggtgcttagccatatatcagaacttg

SEQ ID NO: 10471 - DNA, 42 bp, Artificial Sequence
  primer
gtaaaacgacggccagttcttatctttaagaggtggcatttc

SEQ ID NO: 10472 - DNA, 39 bp, Artificial Sequence
  primer
gtaaaacgacggccagtggcagtttactgctatcggttg

SEQ ID NO: 10473 - DNA, 21 bp, Artificial Sequence
  primer
tcccttgtcttctcctccaag

SEQ ID NO: 10474 - DNA, 38 bp, Artificial Sequence
  primer
gtaaaacgacggccagtaggagatggttaaatgctgcc

SEQ ID NO: 10475 - DNA, 21 bp, Artificial Sequence
  primer
gcacaggacaagcttcatttg

SEQ ID NO: 10476 - DNA, 39 bp, Artificial Sequence
  primer
gtaaaacgacggccagtcaacggacatttcaaatacagg

SEQ ID NO: 10477 - DNA, 21 bp, Artificial Sequence
  primer
gaagaacaagcaagttgtgcc

SEQ ID NO: 10478 - DNA, 41 bp, Artificial Sequence
  primer
gtaaaacgacggccagtccagagtgaatcagctaacctttg

SEQ ID NO: 10479 - DNA, 23 bp, Artificial Sequence
  primer
tgccttatctcagtagcctgttg

SEQ ID NO: 10480 - DNA, 38 bp, Artificial Sequence
  primer
gtaaaacgacggccagtccaggatgagaagctgaaatg

SEQ ID NO: 10481 - DNA, 38 bp, Artificial Sequence
  primer
gtaaaacgacggccagtcagaggttcaaaccatggacc

SEQ ID NO: 10482 - DNA, 38 bp, Artificial Sequence
  primer
gtaaaacgacggccagtgtttgtcaggagtgcgttctg

SEQ ID NO: 10483 - DNA, 38 bp, Artificial Sequence
  primer
gtaaaacgacggccagttacagccattagccactacgc

SEQ ID NO: 10484 - DNA, 38 bp, Artificial Sequence
  primer
gtaaaacgacggccagttagtagcggctggtttcattg

SEQ ID NO: 10485 - DNA, 22 bp, Artificial Sequence
  primer
gggcagagggtcagtttcttag

SEQ ID NO: 10486 - DNA, 21 bp, Artificial Sequence
  primer
atttaactcgatgcctttgcg

SEQ ID NO: 10487 - DNA, 39 bp, Artificial Sequence
  primer
gtaaaacgacggccagtaagggacagtgatggcaatatg

SEQ ID NO: 10488 - DNA, 21 bp, Artificial Sequence
  primer
tgctgaaactgtcatgaagcc

SEQ ID NO: 10489 - DNA, 21 bp, Artificial Sequence
  primer
aagcaatgatcaccactgcac

SEQ ID NO: 10490 - DNA, 25 bp, Artificial Sequence
  primer
aatttctatgcaatcattggctatt

SEQ ID NO: 10491 - DNA, 21 bp, Artificial Sequence
  primer
attaggaacccagggactcac

SEQ ID NO: 10492 - DNA, 37 bp, Artificial Sequence
  primer
gtaaaacgacggccagttcgcatgatctctctttggg

SEQ ID NO: 10493 - DNA, 38 bp, Artificial Sequence
  primer
gtaaaacgacggccagtttgtcactagcacgttccacc

SEQ ID NO: 10494 - DNA, 39 bp, Artificial Sequence
  primer
gtaaaacgacggccagtgaagctccatgtgtgaacaatc

SEQ ID NO: 10495 - DNA, 38 bp, Artificial Sequence
  primer
gtaaaacgacggccagtctcttctaccacgctgctctg

SEQ ID NO: 10496 - DNA, 21 bp, Artificial Sequence
  primer
cctaaacgacgactgcgatag

SEQ ID NO: 10497 - DNA, 21 bp, Artificial Sequence
  primer
tgacatgctgtctcccgtaac

SEQ ID NO: 10498 - DNA, 38 bp, Artificial Sequence
  primer
gtaaaacgacggccagtttccttcacatcctccgaaag

SEQ ID NO: 10499 - DNA, 21 bp, Artificial Sequence
  primer
gtttgaggctctggactctgc

SEQ ID NO: 10500 - DNA, 39 bp, Artificial Sequence
  primer
gtaaaacgacggccagttgttcgataacggtgtctctcc

SEQ ID NO: 10501 - DNA, 21 bp, Artificial Sequence
  primer
gatgcctaggatgcaaacctc

SEQ ID NO: 10502 - DNA, 38 bp, Artificial Sequence
  primer
gtaaaacgacggccagtaatgcagatctagcgagggtg

SEQ ID NO: 10503 - DNA, 38 bp, Artificial Sequence
  primer
gtaaaacgacggccagtctccctttctctcttggatgg

SEQ ID NO: 10504 - DNA, 37 bp, Artificial Sequence
  primer
gtaaaacgacggccagtaaacctgcccaaatggaaac

SEQ ID NO: 10505 - DNA, 40 bp, Artificial Sequence
  primer
gtaaaacgacggccagtaccatgccattatccaaattatc

SEQ ID NO: 10506 - DNA, 38 bp, Artificial Sequence
  primer
gtaaaacgacggccagttgcttaccaggcttgtaccac

SEQ ID NO: 10507 - DNA, 20 bp, Artificial Sequence
  primer
gcctatgggcttcatgtgag

SEQ ID NO: 10508 - DNA, 39 bp, Artificial Sequence
  primer
gtaaaacgacggccagttccagctgaggtagaggaattg

SEQ ID NO: 10509 - DNA, 21 bp, Artificial Sequence
  primer
tgcctgaccttgtgatctagc

SEQ ID NO: 10510 - DNA, 21 bp, Artificial Sequence
  primer
tctggatcctaagcctggttg

SEQ ID NO: 10511 - DNA, 38 bp, Artificial Sequence
  primer
gtaaaacgacggccagtaggagaatcctccaatgcctc

SEQ ID NO: 10512 - DNA, 21 bp, Artificial Sequence
  primer
atactcagtgggagaggctgg

SEQ ID NO: 10513 - DNA, 21 bp, Artificial Sequence
  primer
tgttgaggaatagggacaggg

SEQ ID NO: 10514 - DNA, 20 bp, Artificial Sequence
  primer
cggatgaaatgcctgacttc

SEQ ID NO: 10515 - DNA, 38 bp, Artificial Sequence
  primer
gtaaaacgacggccagtccagctcagtagccctgaaag

SEQ ID NO: 10516 - DNA, 20 bp, Artificial Sequence
  primer
ggctgctttctgtcttcgtg

SEQ ID NO: 10517 - DNA, 38 bp, Artificial Sequence
  primer
gtaaaacgacggccagtagtatgcactgggaccctagc

SEQ ID NO: 10518 - DNA, 37 bp, Artificial Sequence
  primer
gtaaaacgacggccagtggaactctgaagctgggagg

SEQ ID NO: 10519 - DNA, 38 bp, Artificial Sequence
  primer
gtaaaacgacggccagttcaatgcttgattgaattggc

SEQ ID NO: 10520 - DNA, 37 bp, Artificial Sequence
  primer
gtaaaacgacggccagtagtatgaaaggtggctgggc

SEQ ID NO: 10521 - DNA, 38 bp, Artificial Sequence
  primer
gtaaaacgacggccagtgttgcctacttacaggcccac

SEQ ID NO: 10522 - DNA, 20 bp, Artificial Sequence
  primer
ggcttatgcagtgtccaggg

SEQ ID NO: 10523 - DNA, 38 bp, Artificial Sequence
  primer
gtaaaacgacggccagttcatcctcaagaccttcctcc

SEQ ID NO: 10524 - DNA, 21 bp, Artificial Sequence
  primer
agaccttggacttggcctctg

SEQ ID NO: 10525 - DNA, 19 bp, Artificial Sequence
  primer
cctctgtgctccctgaacg

SEQ ID NO: 10526 - DNA, 38 bp, Artificial Sequence
  primer
gtaaaacgacggccagtgccttctcatagattgagcgg

SEQ ID NO: 10527 - DNA, 38 bp, Artificial Sequence
  primer
gtaaaacgacggccagtttctaggtctgtcagtggccc

SEQ ID NO: 10528 - DNA, 20 bp, Artificial Sequence
  primer
tgttgcattggcagagtgag

SEQ ID NO: 10529 - DNA, 22 bp, Artificial Sequence
  primer
tcacattcagagtggtgctttg

SEQ ID NO: 10530 - DNA, 21 bp, Artificial Sequence
  primer
atggaccacagtgtgatgacc

SEQ ID NO: 10531 - DNA, 21 bp, Artificial Sequence
  primer
tggaataacagtgagatggcg

SEQ ID NO: 10532 - DNA, 21 bp, Artificial Sequence
  primer
ttgcacatgaatctcaggagg

SEQ ID NO: 10533 - DNA, 21 bp, Artificial Sequence
  primer
ttcagctgtattcgttgctgc

SEQ ID NO: 10534 - DNA, 38 bp, Artificial Sequence
  primer
gtaaaacgacggccagtaagatcttgaaccttgctccc

SEQ ID NO: 10535 - DNA, 21 bp, Artificial Sequence
  primer
taatggatggtggtgatggtt

SEQ ID NO: 10536 - DNA, 26 bp, Artificial Sequence
  primer
ttctatcacattaaccagaatcaagc

SEQ ID NO: 10537 - DNA, 38 bp, Artificial Sequence
  primer
gtaaaacgacggccagtgtgtgagccaatgtgcctatc

SEQ ID NO: 10538 - DNA, 38 bp, Artificial Sequence
  primer
gtaaaacgacggccagttgaatgcaactgtttgatggc

SEQ ID NO: 10539 - DNA, 21 bp, Artificial Sequence
  primer
aaactgcaggattgtggtttg

SEQ ID NO: 10540 - DNA, 22 bp, Artificial Sequence
  primer
gctccctaggctttgatagtgc

SEQ ID NO: 10541 - DNA, 22 bp, Artificial Sequence
  primer
ggagctgttgtcattgtcttgg

SEQ ID NO: 10542 - DNA, 39 bp, Artificial Sequence
  primer
gtaaaacgacggccagtcagaggtagatgttgagggtgg

SEQ ID NO: 10543 - DNA, 21 bp, Artificial Sequence
  primer
ccaaatcaaatgttgtggtgc

SEQ ID NO: 10544 - DNA, 21 bp, Artificial Sequence
  primer
gacacccagatactgtcaggc

SEQ ID NO: 10545 - DNA, 38 bp, Artificial Sequence
  primer
gtaaaacgacggccagtacctagtcatctgggattggg

SEQ ID NO: 10546 - DNA, 21 bp, Artificial Sequence
  primer
ctgaggaaaggcttgaattgg

SEQ ID NO: 10547 - DNA, 38 bp, Artificial Sequence
  primer
gtaaaacgacggccagtgtgcagactttgtgacccaac

SEQ ID NO: 10548 - DNA, 38 bp, Artificial Sequence
  primer
gtaaaacgacggccagtgaaattggaagacttggtggc

SEQ ID NO: 10549 - DNA, 21 bp, Artificial Sequence
  primer
cccagcactcagcatactgtc

SEQ ID NO: 10550 - DNA, 38 bp, Artificial Sequence
  primer
gtaaaacgacggccagtaaggtacgtagtgcttggcct

SEQ ID NO: 10551 - DNA, 39 bp, Artificial Sequence
  primer
gtaaaacgacggccagtcatgttgaaagaagactgcaaa

SEQ ID NO: 10552 - DNA, 40 bp, Artificial Sequence
  primer
gtaaaacgacggccagtaaggctttgaatctaattgctgc

SEQ ID NO: 10553 - DNA, 38 bp, Artificial Sequence
  primer
gtaaaacgacggccagtgcaaatgcagtgtgttcatgt

SEQ ID NO: 10554 - DNA, 22 bp, Artificial Sequence
  primer
caggcaagaatgtttgtcattg

SEQ ID NO: 10555 - DNA, 39 bp, Artificial Sequence
  primer
gtaaaacgacggccagttgacttatttgccatgtgcttg

SEQ ID NO: 10556 - DNA, 39 bp, Artificial Sequence
  primer
gtaaaacgacggccagtttggaacaaattaccggatgtc

SEQ ID NO: 10557 - DNA, 22 bp, Artificial Sequence
  primer
aatgaagcttcttcaatggtgg

SEQ ID NO: 10558 - DNA, 39 bp, Artificial Sequence
  primer
gtaaaacgacggccagttggaagtaatcttcacgcattg

SEQ ID NO: 10559 - DNA, 38 bp, Artificial Sequence
  primer
gtaaaacgacggccagtgcattgatgaatcagaggcag

SEQ ID NO: 10560 - DNA, 23 bp, Artificial Sequence
  primer
ggctagatcctctttctcacagc

SEQ ID NO: 10561 - DNA, 43 bp, Artificial Sequence
  primer
gtaaaacgacggccagttgatcacatacagtggtttaacaagc

SEQ ID NO: 10562 - DNA, 39 bp, Artificial Sequence
  primer
gtaaaacgacggccagtcaacctacagggcataagttgg

SEQ ID NO: 10563 - DNA, 37 bp, Artificial Sequence
  primer
gtaaaacgacggccagtcaagcatggagttaccctcg

SEQ ID NO: 10564 - DNA, 21 bp, Artificial Sequence
  primer
atccaacaagccaataaagcc

SEQ ID NO: 10565 - DNA, 21 bp, Artificial Sequence
  primer
gatgactggtggcaagtcaag

SEQ ID NO: 10566 - DNA, 23 bp, Artificial Sequence
  primer
aggtcagactgtcaacctaagcc

SEQ ID NO: 10567 - DNA, 44 bp, Artificial Sequence
  primer
gtaaaacgacggccagtattgtttataaatctcctgtttcattt

SEQ ID NO: 10568 - DNA, 39 bp, Artificial Sequence
  primer
gtaaaacgacggccagtttctagggctgcactaatgtga

SEQ ID NO: 10569 - DNA, 20 bp, Artificial Sequence
  primer
ttgaactgcttgaacctggg

SEQ ID NO: 10570 - DNA, 22 bp, Artificial Sequence
  primer
ggagccaagatgtttagattcc

SEQ ID NO: 10571 - DNA, 22 bp, Artificial Sequence
  primer
gcttggagctgaatatagaacg

SEQ ID NO: 10572 - DNA, 27 bp, Artificial Sequence
  primer
tgagcttctattaaatttcattggttt

SEQ ID NO: 10573 - DNA, 38 bp, Artificial Sequence
  primer
gtaaaacgacggccagtcgagaccatgttggttcagtc

SEQ ID NO: 10574 - DNA, 23 bp, Artificial Sequence
  primer
tcacgtgaacataattacatgcg

SEQ ID NO: 10575 - DNA, 19 bp, Artificial Sequence
  primer
tcccactctggtgggtaaa

SEQ ID NO: 10576 - DNA, 38 bp, Artificial Sequence
  primer
gtaaaacgacggccagttatggcagctactcttggtgg

SEQ ID NO: 10577 - DNA, 40 bp, Artificial Sequence
  primer
gtaaaacgacggccagttgtgagaattatgccattccaac

SEQ ID NO: 10578 - DNA, 42 bp, Artificial Sequence
  primer
gtaaaacgacggccagttcttcacatcttgtccttaaaccac

SEQ ID NO: 10579 - DNA, 38 bp, Artificial Sequence
  primer
gtaaaacgacggccagttggttacgctggatgtttctg

SEQ ID NO: 10580 - DNA, 21 bp, Artificial Sequence
  primer
aggctaatgcaaatgagtggg

SEQ ID NO: 10581 - DNA, 38 bp, Artificial Sequence
  primer
gtaaaacgacggccagtaaggtttgcagtcaatcatgg

SEQ ID NO: 10582 - DNA, 20 bp, Artificial Sequence
  primer
ttgcacagattaagccaccc

SEQ ID NO: 10583 - DNA, 24 bp, Artificial Sequence
  primer
aagaaagcttcacatggcatttag

SEQ ID NO: 10584 - DNA, 44 bp, Artificial Sequence
  primer
gtaaaacgacggccagttcagagaggtgaagactcttgtttatc

SEQ ID NO: 10585 - DNA, 21 bp, Artificial Sequence
  primer
ttgggtttgagatatgcttgc

SEQ ID NO: 10586 - DNA, 20 bp, Artificial Sequence
  primer
ttgcaggcacttcccataag

SEQ ID NO: 10587 - DNA, 25 bp, Artificial Sequence
  primer
tctctactcattccaaatgttgctc

SEQ ID NO: 10588 - DNA, 46 bp, Artificial Sequence
  primer
gtaaaacgacggccagttgctaactcaataaactcctatttctctg

SEQ ID NO: 10589 - DNA, 19 bp, Artificial Sequence
  primer
aaatgctcccagttcccag

SEQ ID NO: 10590 - DNA, 25 bp, Artificial Sequence
  primer
tgcatgaatagtgcttagcatttag

SEQ ID NO: 10591 - DNA, 23 bp, Artificial Sequence
  primer
gttgtagacagaagagcctgagc

SEQ ID NO: 10592 - DNA, 22 bp, Artificial Sequence
  primer
ttgtggtcttcatatgtctgcc

SEQ ID NO: 10593 - DNA, 27 bp, Artificial Sequence
  primer
ttgaagattgcataatttagaacacac

SEQ ID NO: 10594 - DNA, 38 bp, Artificial Sequence
  primer
gtaaaacgacggccagtgcagaaggctgttaacggttg

SEQ ID NO: 10595 - DNA, 22 bp, Artificial Sequence
  primer
ttgagtccacctattccctttg

SEQ ID NO: 10596 - DNA, 22 bp, Artificial Sequence
  primer
agttggacaaggcaatgtatcc

SEQ ID NO: 10597 - DNA, 37 bp, Artificial Sequence
  primer
gtaaaacgacggccagtctgcccttggtgattctgtg

SEQ ID NO: 10598 - DNA, 38 bp, Artificial Sequence
  primer
gtaaaacgacggccagtaggtgtagccaagatcatccc

SEQ ID NO: 10599 - DNA, 21 bp, Artificial Sequence
  primer
acaggctgtctcctacctgtg

SEQ ID NO: 10600 - DNA, 38 bp, Artificial Sequence
  primer
gtaaaacgacggccagtctgttgtatggcaagcagcac

SEQ ID NO: 10601 - DNA, 20 bp, Artificial Sequence
  primer
gaagagccgagagtggtgtg

SEQ ID NO: 10602 - DNA, 38 bp, Artificial Sequence
  primer
gtaaaacgacggccagttgtaccaggcagttgatggac

SEQ ID NO: 10603 - DNA, 21 bp, Artificial Sequence
  primer
tacggtaagcaccttcccttg

SEQ ID NO: 10604 - DNA, 37 bp, Artificial Sequence
  primer
gtaaaacgacggccagtaaagcccattgggtagttgg

SEQ ID NO: 10605 - DNA, 20 bp, Artificial Sequence
  primer
aggaggtgagcggaagtcag

SEQ ID NO: 10606 - DNA, 23 bp, Artificial Sequence
  primer
caccttggaagatcgttattgag

SEQ ID NO: 10607 - DNA, 21 bp, Artificial Sequence
  primer
tgcacatccagagattgaagg

SEQ ID NO: 10608 - DNA, 36 bp, Artificial Sequence
  primer
gtaaaacgacggccagtaaactgggattgtgcaccc

SEQ ID NO: 10609 - DNA, 37 bp, Artificial Sequence
  primer
gtaaaacgacggccagtaattgccctgacacaaccag

SEQ ID NO: 10610 - DNA, 38 bp, Artificial Sequence
  primer
gtaaaacgacggccagtgagggctgtggactgaagaac

SEQ ID NO: 10611 - DNA, 21 bp, Artificial Sequence
  primer
ttaacacatgtggaccgatgg

SEQ ID NO: 10612 - DNA, 39 bp, Artificial Sequence
  primer
gtaaaacgacggccagtgctttataagcccagtgtgagc

SEQ ID NO: 10613 - DNA, 21 bp, Artificial Sequence
  primer
atgttaaatttgggctcctgg

SEQ ID NO: 10614 - DNA, 21 bp, Artificial Sequence
  primer
gcttgtctccaatccaagctc

SEQ ID NO: 10615 - DNA, 38 bp, Artificial Sequence
  primer
gtaaaacgacggccagtcctgaaacttcccagcctctc

SEQ ID NO: 10616 - DNA, 21 bp, Artificial Sequence
  primer
aaaccatgctgtgagttgcag

SEQ ID NO: 10617 - DNA, 38 bp, Artificial Sequence
  primer
gtaaaacgacggccagtattctccagcttgttgctgtg

SEQ ID NO: 10618 - DNA, 40 bp, Artificial Sequence
  primer
gtaaaacgacggccagttgattcttagcactgtggtttgg

SEQ ID NO: 10619 - DNA, 38 bp, Artificial Sequence
  primer
gtaaaacgacggccagtttcccactgggcctactattg

SEQ ID NO: 10620 - DNA, 38 bp, Artificial Sequence
  primer
gtaaaacgacggccagtcttcccatgcaccattgatag

SEQ ID NO: 10621 - DNA, 41 bp, Artificial Sequence
  primer
gtaaaacgacggccagtaggatcactcttcattctgactgg

SEQ ID NO: 10622 - DNA, 23 bp, Artificial Sequence
  primer
aatgttgagatgctgtcattcac

SEQ ID NO: 10623 - DNA, 39 bp, Artificial Sequence
  primer
gtaaaacgacggccagttgaaacagatgttaaattcgga

SEQ ID NO: 10624 - DNA, 26 bp, Artificial Sequence
  primer
acatttggattagaggagaggagtag

SEQ ID NO: 10625 - DNA, 21 bp, Artificial Sequence
  primer
gctgatctcccacaaacacac

SEQ ID NO: 10626 - DNA, 21 bp, Artificial Sequence
  primer
ggcctgctggatgtgattagt

SEQ ID NO: 10627 - DNA, 22 bp, Artificial Sequence
  primer
gatgccctgtacacctggtaag

SEQ ID NO: 10628 - DNA, 39 bp, Artificial Sequence
  primer
gtaaaacgacggccagtgcacaggcattataaagttccc

SEQ ID NO: 10629 - DNA, 38 bp, Artificial Sequence
  primer
gtaaaacgacggccagtgattggcagcggaaatgttac

SEQ ID NO: 10630 - DNA, 38 bp, Artificial Sequence
  primer
gtaaaacgacggccagtgatctcaaccaatctgcccac

SEQ ID NO: 10631 - DNA, 39 bp, Artificial Sequence
  primer
gtaaaacgacggccagtagacttgcgagtagagggtttg

SEQ ID NO: 10632 - DNA, 21 bp, Artificial Sequence
  primer
ttctttgatgggagttgaggg

SEQ ID NO: 10633 - DNA, 38 bp, Artificial Sequence
  primer
gtaaaacgacggccagtggatttcctcgtcacttcagg

SEQ ID NO: 10634 - DNA, 38 bp, Artificial Sequence
  primer
gtaaaacgacggccagttttgagaaccactgtccttgc

SEQ ID NO: 10635 - DNA, 27 bp, Artificial Sequence
  primer
cctgagtataggagtataccatgtccc

SEQ ID NO: 10636 - DNA, 41 bp, Artificial Sequence
  primer
gtaaaacgacggccagttttgacctcctaatccatctatgc

SEQ ID NO: 10637 - DNA, 38 bp, Artificial Sequence
  primer
gtaaaacgacggccagtatggcctgagagggtccatac

SEQ ID NO: 10638 - DNA, 38 bp, Artificial Sequence
  primer
gtaaaacgacggccagtgcctacttcattaagccagca

SEQ ID NO: 10639 - DNA, 21 bp, Artificial Sequence
  primer
gctgttacggccattaagatg

SEQ ID NO: 10640 - DNA, 35 bp, Artificial Sequence
  primer
gtaaaacgacggccagtcaggcggaggtacatggc

SEQ ID NO: 10641 - DNA, 23 bp, Artificial Sequence
  primer
ctccttgacagacaaagataggc

SEQ ID NO: 10642 - DNA, 28 bp, Artificial Sequence
  primer
tgaaatattaaagactactgtgtggtga

SEQ ID NO: 10643 - DNA, 21 bp, Artificial Sequence
  primer
tgatgccttccagagaagctc

SEQ ID NO: 10644 - DNA, 38 bp, Artificial Sequence
  primer
gtaaaacgacggccagtacaattatgccaaggttgcag

SEQ ID NO: 10645 - DNA, 21 bp, Artificial Sequence
  primer
aggtgccctaacctgattgtg

SEQ ID NO: 10646 - DNA, 26 bp, Artificial Sequence
  primer
tcaaaggtttgtgttctacctaaatc

SEQ ID NO: 10647 - DNA, 20 bp, Artificial Sequence
  primer
gtgaaggcctgattccactg

SEQ ID NO: 10648 - DNA, 40 bp, Artificial Sequence
  primer
gtaaaacgacggccagtcaaacaaagggattctttatgcc

SEQ ID NO: 10649 - DNA, 40 bp, Artificial Sequence
  primer
gtaaaacgacggccagtcccaaacatttgattcttccttc

SEQ ID NO: 10650 - DNA, 19 bp, Artificial Sequence
  primer
catccaaagagggcaagtg

SEQ ID NO: 10651 - DNA, 21 bp, Artificial Sequence
  primer
ccaagtcaatggagagttggc

SEQ ID NO: 10652 - DNA, 39 bp, Artificial Sequence
  primer
gtaaaacgacggccagttgttcttgatttccctcttccc

SEQ ID NO: 10653 - DNA, 23 bp, Artificial Sequence
  primer
ccactgattacatttctatgccc

SEQ ID NO: 10654 - DNA, 38 bp, Artificial Sequence
  primer
gtaaaacgacggccagttaaggaaagcccattcgtcag

SEQ ID NO: 10655 - DNA, 22 bp, Artificial Sequence
  primer
gactcctcctatgacagcttgg

SEQ ID NO: 10656 - DNA, 21 bp, Artificial Sequence
  primer
aatgaaacggcctcttgaatc

SEQ ID NO: 10657 - DNA, 21 bp, Artificial Sequence
  primer
agtccagctgtgatgcaattc

SEQ ID NO: 10658 - DNA, 38 bp, Artificial Sequence
  primer
gtaaaacgacggccagtagaaccgcaagctgacctatc

SEQ ID NO: 10659 - DNA, 38 bp, Artificial Sequence
  primer
gtaaaacgacggccagtaacgggaagacctttctcctg

SEQ ID NO: 10660 - DNA, 21 bp, Artificial Sequence
  primer
gcagtcagcccaaaggtgtag

SEQ ID NO: 10661 - DNA, 20 bp, Artificial Sequence
  primer
ttattccctggcacgttgtc

SEQ ID NO: 10662 - DNA, 39 bp, Artificial Sequence
  primer
gtaaaacgacggccagtaatagttcatatcggcgctcag

SEQ ID NO: 10663 - DNA, 23 bp, Artificial Sequence
  primer
ttgaattaaattgagccttgctg

SEQ ID NO: 10664 - DNA, 39 bp, Artificial Sequence
  primer
gtaaaacgacggccagtggaaagcattacagtgttgtgg

SEQ ID NO: 10665 - DNA, 26 bp, Artificial Sequence
  primer
acttagaacatggctagtttcacaaa

SEQ ID NO: 10666 - DNA, 21 bp, Artificial Sequence
  primer
gaatagcacaaacatggcagg

SEQ ID NO: 10667 - DNA, 38 bp, Artificial Sequence
  primer
gtaaaacgacggccagttgcttcactgccctttacctc

SEQ ID NO: 10668 - DNA, 22 bp, Artificial Sequence
  primer
tgaatttccagtgacaccttcc

SEQ ID NO: 10669 - DNA, 38 bp, Artificial Sequence
  primer
gtaaaacgacggccagtcctcctgactcatcattgagc

SEQ ID NO: 10670 - DNA, 38 bp, Artificial Sequence
  primer
gtaaaacgacggccagtgtgaggtatggcgtgagtgag

SEQ ID NO: 10671 - DNA, 38 bp, Artificial Sequence
  primer
gtaaaacgacggccagtcagcatctcaaagcacgacag

SEQ ID NO: 10672 - DNA, 21 bp, Artificial Sequence
  primer
agaggagtgggatctgtgtcg

SEQ ID NO: 10673 - DNA, 21 bp, Artificial Sequence
  primer
gcaagtggagactgggaaatc

SEQ ID NO: 10674 - DNA, 21 bp, Artificial Sequence
  primer
atgtgctttggtggtgaagtg

SEQ ID NO: 10675 - DNA, 38 bp, Artificial Sequence
  primer
gtaaaacgacggccagtgaccacggtacgtctaaaggg

SEQ ID NO: 10676 - DNA, 21 bp, Artificial Sequence
  primer
tcccacacttcaagcagaaac

SEQ ID NO: 10677 - DNA, 38 bp, Artificial Sequence
  primer
gtaaaacgacggccagttttccacaaagcagtttccat

SEQ ID NO: 10678 - DNA, 38 bp, Artificial Sequence
  primer
gtaaaacgacggccagtagggtgttgcttaatgtgctt

SEQ ID NO: 10679 - DNA, 39 bp, Artificial Sequence
  primer
gtaaaacgacggccagtgctttgaaacagctccactgag

SEQ ID NO: 10680 - DNA, 36 bp, Artificial Sequence
  primer
gtaaaacgacggccagtatggctcaccacgggtaac

SEQ ID NO: 10681 - DNA, 29 bp, Artificial Sequence
  primer
tgaagtctcactataaagatgacacactg

SEQ ID NO: 10682 - DNA, 38 bp, Artificial Sequence
  primer
gtaaaacgacggccagtgggtccctctctttctttcag

SEQ ID NO: 10683 - DNA, 22 bp, Artificial Sequence
  primer
aacaagggaatggctgatattg

SEQ ID NO: 10684 - DNA, 42 bp, Artificial Sequence
  primer
gtaaaacgacggccagtggctgtgtaaatataggatggttcc

SEQ ID NO: 10685 - DNA, 40 bp, Artificial Sequence
  primer
gtaaaacgacggccagtgaagccaatcgtaaagaagatcc

SEQ ID NO: 10686 - DNA, 20 bp, Artificial Sequence
  primer
ggtgaacgtgagaccctgtc

SEQ ID NO: 10687 - DNA, 38 bp, Artificial Sequence
  primer
gtaaaacgacggccagtttgtagaaacgctcatccagc

SEQ ID NO: 10688 - DNA, 38 bp, Artificial Sequence
  primer
gtaaaacgacggccagtcggaagcaggtctctagctca

SEQ ID NO: 10689 - DNA, 38 bp, Artificial Sequence
  primer
gtaaaacgacggccagtattcacagcatcctttcatgg

SEQ ID NO: 10690 - DNA, 21 bp, Artificial Sequence
  primer
acgaggcaagaaattggactc

SEQ ID NO: 10691 - DNA, 21 bp, Artificial Sequence
  primer
tagcagggaactgcttgtgtc

SEQ ID NO: 10692 - DNA, 38 bp, Artificial Sequence
  primer
gtaaaacgacggccagtttctgaagaaccctcaccacc

SEQ ID NO: 10693 - DNA, 20 bp, Artificial Sequence
  primer
gaactcatcagtgaagggcg

SEQ ID NO: 10694 - DNA, 38 bp, Artificial Sequence
  primer
gtaaaacgacggccagtgggagtttactgacacccacc

SEQ ID NO: 10695 - DNA, 38 bp, Artificial Sequence
  primer
gtaaaacgacggccagtgcgcagacatacactaggagg

SEQ ID NO: 10696 - DNA, 38 bp, Artificial Sequence
  primer
gtaaaacgacggccagttctcttcattgcaacacaggc

SEQ ID NO: 10697 - DNA, 39 bp, Artificial Sequence
  primer
gtaaaacgacggccagtgaggtttatgtagtccaaggcg

SEQ ID NO: 10698 - DNA, 19 bp, Artificial Sequence
  primer
gctcccatgcctcagtcac

SEQ ID NO: 10699 - DNA, 21 bp, Artificial Sequence
  primer
ccctaggagaggaggtgtgtg

SEQ ID NO: 10700 - DNA, 38 bp, Artificial Sequence
  primer
gtaaaacgacggccagtcccacagggagtaatgctgac

SEQ ID NO: 10701 - DNA, 19 bp, Artificial Sequence
  primer
tgccctccattgtcctgag

SEQ ID NO: 10702 - DNA, 21 bp, Artificial Sequence
  primer
caagaatgcacctgagaccag

SEQ ID NO: 10703 - DNA, 38 bp, Artificial Sequence
  primer
gtaaaacgacggccagttagcttcccaggaggtcacag

SEQ ID NO: 10704 - DNA, 21 bp, Artificial Sequence
  primer
ctttcacacaaatagcggtgg

SEQ ID NO: 10705 - DNA, 21 bp, Artificial Sequence
  primer
gtgtgtggtcctttcctctgg

SEQ ID NO: 10706 - DNA, 38 bp, Artificial Sequence
  primer
gtaaaacgacggccagtcaaacacagccagctcttcac

SEQ ID NO: 10707 - DNA, 35 bp, Artificial Sequence
  primer
gtaaaacgacggccagtcagccgaggtccctatcg

SEQ ID NO: 10708 - DNA, 22 bp, Artificial Sequence
  primer
gcagagactctccacctacgac

SEQ ID NO: 10709 - DNA, 20 bp, Artificial Sequence
  primer
aacccacagtgagcacaagc

SEQ ID NO: 10710 - DNA, 21 bp, Artificial Sequence
  primer
taaacaagcatgaggagtggc

SEQ ID NO: 10711 - DNA, 21 bp, Artificial Sequence
  primer
gtgcttgctagcattccaatc

SEQ ID NO: 10712 - DNA, 38 bp, Artificial Sequence
  primer
gtaaaacgacggccagtgggttgattcattcaattgcc

SEQ ID NO: 10713 - DNA, 38 bp, Artificial Sequence
  primer
gtaaaacgacggccagttatatggccatttcgacttgc

SEQ ID NO: 10714 - DNA, 38 bp, Artificial Sequence
  primer
gtaaaacgacggccagtcattgtccctgtgtttgagtg

SEQ ID NO: 10715 - DNA, 21 bp, Artificial Sequence
  primer
gcttgacacagttcatggcac

SEQ ID NO: 10716 - DNA, 21 bp, Artificial Sequence
  primer
ctagtaggcagtgctcctggg

SEQ ID NO: 10717 - DNA, 21 bp, Artificial Sequence
  primer
tgaccctgagggataacaagc

SEQ ID NO: 10718 - DNA, 23 bp, Artificial Sequence
  primer
gaaagggctttattccaatttcc

SEQ ID NO: 10719 - DNA, 37 bp, Artificial Sequence
  primer
gtaaaacgacggccagtgttggcaaatcagcctcaag

SEQ ID NO: 10720 - DNA, 21 bp, Artificial Sequence
  primer
cctgaactggacctggttgtc

SEQ ID NO: 10721 - DNA, 38 bp, Artificial Sequence
  primer
gtaaaacgacggccagttagcttcccatgtccctatcc

SEQ ID NO: 10722 - DNA, 38 bp, Artificial Sequence
  primer
gtaaaacgacggccagtgtctggttcccttctcttccc

SEQ ID NO: 10723 - DNA, 19 bp, Artificial Sequence
  primer
gcctcaaatttacaggccc

SEQ ID NO: 10724 - DNA, 21 bp, Artificial Sequence
  primer
gttccagaagggcgaattaac

SEQ ID NO: 10725 - DNA, 39 bp, Artificial Sequence
  primer
gtaaaacgacggccagtcccacagaactacaggaacagg

SEQ ID NO: 10726 - DNA, 38 bp, Artificial Sequence
  primer
gtaaaacgacggccagtgagtctgggaggaaagcattg

SEQ ID NO: 10727 - DNA, 38 bp, Artificial Sequence
  primer
gtaaaacgacggccagtgaaccgagtttggagacatcc

SEQ ID NO: 10728 - DNA, 38 bp, Artificial Sequence
  primer
gtaaaacgacggccagttaccttgggagcatgacacac

SEQ ID NO: 10729 - DNA, 20 bp, Artificial Sequence
  primer
caagacttgcgccaactttc

SEQ ID NO: 10730 - DNA, 38 bp, Artificial Sequence
  primer
gtaaaacgacggccagtgggacatcttcatgtgggaag

SEQ ID NO: 10731 - DNA, 21 bp, Artificial Sequence
  primer
cctgaactggacctggttgtc

SEQ ID NO: 10732 - DNA, 18 bp, Artificial Sequence
  primer
tcggttcgggagtcttgc

SEQ ID NO: 10733 - DNA, 38 bp, Artificial Sequence
  primer
gtaaaacgacggccagtgaccaataagggcagcaaatc

SEQ ID NO: 10734 - DNA, 38 bp, Artificial Sequence
  primer
gtaaaacgacggccagtaacctgcatttctgggtcatc

SEQ ID NO: 10735 - DNA, 38 bp, Artificial Sequence
  primer
gtaaaacgacggccagtatgctggagctgctgtaattc

SEQ ID NO: 10736 - DNA, 21 bp, Artificial Sequence
  primer
ggagctgagtcgtcatctgtg

SEQ ID NO: 10737 - DNA, 38 bp, Artificial Sequence
  primer
gtaaaacgacggccagttttctgacctgctttcggaat

SEQ ID NO: 10738 - DNA, 38 bp, Artificial Sequence
  primer
gtaaaacgacggccagtgactttcaagccagtgttggg

SEQ ID NO: 10739 - DNA, 38 bp, Artificial Sequence
  primer
gtaaaacgacggccagtttcctggaaggttgaatgtcc

SEQ ID NO: 10740 - DNA, 40 bp, Artificial Sequence
  primer
gtaaaacgacggccagtgcattatgaattatgggttgtgg

SEQ ID NO: 10741 - DNA, 21 bp, Artificial Sequence
  primer
tgtcatgtatgtcctgggagg

SEQ ID NO: 10742 - DNA, 21 bp, Artificial Sequence
  primer
gctgactgagaggaatttggg

SEQ ID NO: 10743 - DNA, 38 bp, Artificial Sequence
  primer
gtaaaacgacggccagtttaccttccacttcatggtgc

SEQ ID NO: 10744 - DNA, 38 bp, Artificial Sequence
  primer
gtaaaacgacggccagtcgattgattcatcctggtttg

SEQ ID NO: 10745 - DNA, 37 bp, Artificial Sequence
  primer
gtaaaacgacggccagtaagtgcatttggctggattg

SEQ ID NO: 10746 - DNA, 38 bp, Artificial Sequence
  primer
gtaaaacgacggccagtgcaagattggatgcctttatg

SEQ ID NO: 10747 - DNA, 21 bp, Artificial Sequence
  primer
tccctgtgatctttgtcttcg

SEQ ID NO: 10748 - DNA, 38 bp, Artificial Sequence
  primer
gtaaaacgacggccagtctttgagaaatccttgggctg

SEQ ID NO: 10749 - DNA, 38 bp, Artificial Sequence
  primer
gtaaaacgacggccagtaggaaggatacagggtggttg

SEQ ID NO: 10750 - DNA, 38 bp, Artificial Sequence
  primer
gtaaaacgacggccagttttccgttgtactgcttcagg

SEQ ID NO: 10751 - DNA, 21 bp, Artificial Sequence
  primer
cttaagcttccctgggatcag

SEQ ID NO: 10752 - DNA, 19 bp, Artificial Sequence
  primer
ccatgacctcctgtgctcc

SEQ ID NO: 10753 - DNA, 39 bp, Artificial Sequence
  primer
gtaaaacgacggccagtgcttacagggaaagggaagaag

SEQ ID NO: 10754 - DNA, 22 bp, Artificial Sequence
  primer
actcattgtccaagcttccttc

SEQ ID NO: 10755 - DNA, 38 bp, Artificial Sequence
  primer
gtaaaacgacggccagtcgcagggtgttcttctacaac

SEQ ID NO: 10756 - DNA, 37 bp, Artificial Sequence
  primer
gtaaaacgacggccagtctcagggaccagaaggcaag

SEQ ID NO: 10757 - DNA, 38 bp, Artificial Sequence
  primer
gtaaaacgacggccagtgagcctaaaccagccaaacac

SEQ ID NO: 10758 - DNA, 21 bp, Artificial Sequence
  primer
ctctcataagctgggctggag

SEQ ID NO: 10759 - DNA, 21 bp, Artificial Sequence
  primer
ataaatccagccaggatggtg

SEQ ID NO: 10760 - DNA, 21 bp, Artificial Sequence
  primer
aggaagtctctcctgccacag

SEQ ID NO: 10761 - DNA, 38 bp, Artificial Sequence
  primer
gtaaaacgacggccagtaagctctgacttgttcctggg

SEQ ID NO: 10762 - DNA, 21 bp, Artificial Sequence
  primer
aagaagcatcagggtctctgg

SEQ ID NO: 10763 - DNA, 21 bp, Artificial Sequence
  primer
attaagctctgagtgcctggg

SEQ ID NO: 10764 - DNA, 21 bp, Artificial Sequence
  primer
agagaggactcttcgctgagg

SEQ ID NO: 10765 - DNA, 38 bp, Artificial Sequence
  primer
gtaaaacgacggccagtagagcagcagagtggacttcg

SEQ ID NO: 10766 - DNA, 21 bp, Artificial Sequence
  primer
tacatcaaaggtacccgaggc

SEQ ID NO: 10767 - DNA, 38 bp, Artificial Sequence
  primer
gtaaaacgacggccagtagtgggagtcatagcagggac

SEQ ID NO: 10768 - DNA, 38 bp, Artificial Sequence
  primer
gtaaaacgacggccagttataaggtggaccacggtgag

SEQ ID NO: 10769 - DNA, 38 bp, Artificial Sequence
  primer
gtaaaacgacggccagtagccctgaagctcttctttcg

SEQ ID NO: 10770 - DNA, 19 bp, Artificial Sequence
  primer
gctcttccagcacctctgc

SEQ ID NO: 10771 - DNA, 37 bp, Artificial Sequence
  primer
gtaaaacgacggccagtagaatggctgcaagatgtgg

SEQ ID NO: 10772 - DNA, 21 bp, Artificial Sequence
  primer
agtgctgttatcaatgcccag

SEQ ID NO: 10773 - DNA, 19 bp, Artificial Sequence
  primer
caattgtccatgcacaggc

SEQ ID NO: 10774 - DNA, 38 bp, Artificial Sequence
  primer
gtaaaacgacggccagtgtcaggctgaaatgtgaggtg

SEQ ID NO: 10775 - DNA, 39 bp, Artificial Sequence
  primer
gtaaaacgacggccagtaaacactgtaacgtgcttgtgg

SEQ ID NO: 10776 - DNA, 38 bp, Artificial Sequence
  primer
gtaaaacgacggccagttagagtgtccaggtggcattt

SEQ ID NO: 10777 - DNA, 22 bp, Artificial Sequence
  primer
tgcttctggctttaacactttg

SEQ ID NO: 10778 - DNA, 43 bp, Artificial Sequence
  primer
gtaaaacgacggccagttcttggtagacattaccttaccagtc

SEQ ID NO: 10779 - DNA, 38 bp, Artificial Sequence
  primer
gtaaaacgacggccagtcaaatttacattgctgggcac

SEQ ID NO: 10780 - DNA, 22 bp, Artificial Sequence
  primer
gcagcagagtgaatgggaatag

SEQ ID NO: 10781 - DNA, 36 bp, Artificial Sequence
  primer
gtaaaacgacggccagtctggctccaggataccgag

SEQ ID NO: 10782 - DNA, 39 bp, Artificial Sequence
  primer
gtaaaacgacggccagttgtgtgtcagcaaacaaacatc

SEQ ID NO: 10783 - DNA, 21 bp, Artificial Sequence
  primer
tagcaagacctgaccatgtgc

SEQ ID NO: 10784 - DNA, 22 bp, Artificial Sequence
  primer
gcagaatgaattgtttgttgcc

SEQ ID NO: 10785 - DNA, 21 bp, Artificial Sequence
  primer
ggaacaatttgcctgtgatgg

SEQ ID NO: 10786 - DNA, 21 bp, Artificial Sequence
  primer
ggaggaaggcatagtgaccag

SEQ ID NO: 10787 - DNA, 18 bp, Artificial Sequence
  primer
ctaggtgcaggcccaatg

SEQ ID NO: 10788 - DNA, 21 bp, Artificial Sequence
  primer
ctcttagctcttgccctcagc

SEQ ID NO: 10789 - DNA, 38 bp, Artificial Sequence
  primer
gtaaaacgacggccagtaagcttccggtaggtgatgtg

SEQ ID NO: 10790 - DNA, 37 bp, Artificial Sequence
  primer
gtaaaacgacggccagtcttgatctgggcagagcttc

SEQ ID NO: 10791 - DNA, 38 bp, Artificial Sequence
  primer
gtaaaacgacggccagtcagctctgaggtccaagttcc

SEQ ID NO: 10792 - DNA, 21 bp, Artificial Sequence
  primer
tagttgtccacagtgggaggg

SEQ ID NO: 10793 - DNA, 38 bp, Artificial Sequence
  primer
gtaaaacgacggccagtgctagtgtcaacgctgctgtc

SEQ ID NO: 10794 - DNA, 38 bp, Artificial Sequence
  primer
gtaaaacgacggccagtattcttcagctgagcgtctgg

SEQ ID NO: 10795 - DNA, 21 bp, Artificial Sequence
  primer
tacagcctgctgttggaagtg

SEQ ID NO: 10796 - DNA, 38 bp, Artificial Sequence
  primer
gtaaaacgacggccagtaccgaaaccttctacctcacg

SEQ ID NO: 10797 - DNA, 20 bp, Artificial Sequence
  primer
caggaccctgtctagcccac

SEQ ID NO: 10798 - DNA, 21 bp, Artificial Sequence
  primer
cgcactggattgtggaataac

SEQ ID NO: 10799 - DNA, 21 bp, Artificial Sequence
  primer
gggtgacagagtgagaccttg

SEQ ID NO: 10800 - DNA, 38 bp, Artificial Sequence
  primer
gtaaaacgacggccagtacctcaatggtaagcaggacc

SEQ ID NO: 10801 - DNA, 37 bp, Artificial Sequence
  primer
gtaaaacgacggccagtgatgccttcgagagaggtgg

SEQ ID NO: 10802 - DNA, 21 bp, Artificial Sequence
  primer
gggtgctgaagctctacttcc

SEQ ID NO: 10803 - DNA, 38 bp, Artificial Sequence
  primer
gtaaaacgacggccagtttcctcaaccagtgagtgctg

SEQ ID NO: 10804 - DNA, 20 bp, Artificial Sequence
  primer
cagacgctcatagtgcagcc

SEQ ID NO: 10805 - DNA, 19 bp, Artificial Sequence
  primer
cacaggaggatggtgaggg

SEQ ID NO: 10806 - DNA, 21 bp, Artificial Sequence
  primer
cacaagtatatcacgctgccc

SEQ ID NO: 10807 - DNA, 38 bp, Artificial Sequence
  primer
gtaaaacgacggccagtgaggctctagaggagcttggg

SEQ ID NO: 10808 - DNA, 38 bp, Artificial Sequence
  primer
gtaaaacgacggccagtaggaactcaggtgggtcttgg

SEQ ID NO: 10809 - DNA, 39 bp, Artificial Sequence
  primer
gtaaaacgacggccagtccgaaccgtgtatttacattgc

SEQ ID NO: 10810 - DNA, 41 bp, Artificial Sequence
  primer
gtaaaacgacggccagttttcagaatgagaagcatatctgg

SEQ ID NO: 10811 - DNA, 21 bp, Artificial Sequence
  primer
gcttagcaccattgactttgg

SEQ ID NO: 10812 - DNA, 38 bp, Artificial Sequence
  primer
gtaaaacgacggccagtctcatcggagtacgaatttgc

SEQ ID NO: 10813 - DNA, 38 bp, Artificial Sequence
  primer
gtaaaacgacggccagtctgcactggtacaaatgttgg

SEQ ID NO: 10814 - DNA, 21 bp, Artificial Sequence
  primer
ctccttgggatgaaactgacc

SEQ ID NO: 10815 - DNA, 38 bp, Artificial Sequence
  primer
gtaaaacgacggccagtagaggagggtggaaatgaagg

SEQ ID NO: 10816 - DNA, 37 bp, Artificial Sequence
  primer
gtaaaacgacggccagtttacagttggatcatggccg

SEQ ID NO: 10817 - DNA, 21 bp, Artificial Sequence
  primer
gttgatgccaaatcgccttac

SEQ ID NO: 10818 - DNA, 38 bp, Artificial Sequence
  primer
gtaaaacgacggccagttaccaattctcaggcaccaag

SEQ ID NO: 10819 - DNA, 21 bp, Artificial Sequence
  primer
ggcagttactgacagccaagc

SEQ ID NO: 10820 - DNA, 21 bp, Artificial Sequence
  primer
tcggcaaactgaggtctttac

SEQ ID NO: 10821 - DNA, 39 bp, Artificial Sequence; identical to SEQ ID NO: 10809
  primer

SEQ ID NO: 10822 - DNA, 19 bp, Artificial Sequence
  primer
agcagttctcccaccttgg

SEQ ID NO: 10823 - DNA, 20 bp, Artificial Sequence
  primer
ttgtgccactgtattccagc

SEQ ID NO: 10824 - DNA, 35 bp, Artificial Sequence
  primer
gtaaaacgacggccagtcccacccatctgtggaaa

SEQ ID NO: 10825 - DNA, 29 bp, Artificial Sequence
  primer
aaggtaacattaaatctgagatcatttct

SEQ ID NO: 10826 - DNA, 38 bp, Artificial Sequence
  primer
gtaaaacgacggccagttcgttgaaaccctttcacgtc

SEQ ID NO: 10827 - DNA, 21 bp, Artificial Sequence
  primer
ttgtctcattgtgccagaagc

SEQ ID NO: 10828 - DNA, 21 bp, Artificial Sequence
  primer
ttggaacacaaaggtggtttg

SEQ ID NO: 10829 - DNA, 38 bp, Artificial Sequence
  primer
gtaaaacgacggccagtacctttgcctgagtccctttc

SEQ ID NO: 10830 - DNA, 20 bp, Artificial Sequence
  primer
gtcttctcctgttcctcgcc

SEQ ID NO: 10831 - DNA, 20 bp, Artificial Sequence
  primer
cctcctggacctctttgctc

SEQ ID NO: 10832 - DNA, 21 bp, Artificial Sequence
  primer
ttggaacacaaaggtggtttg

SEQ ID NO: 10833 - DNA, 42 bp, Artificial Sequence
  primer
gtaaaacgacggccagtggtaatatgtggtatccaagtcagg

SEQ ID NO: 10834 - DNA, 21 bp, Artificial Sequence
  primer
ttgggccattctgattaacac

SEQ ID NO: 10835 - DNA, 21 bp, Artificial Sequence
  primer
tgccattagcttgaggaaatc

SEQ ID NO: 10836 - DNA, 39 bp, Artificial Sequence
  primer
gtaaaacgacggccagttgctctacatgttacggcactg

SEQ ID NO: 10837 - DNA, 38 bp, Artificial Sequence
  primer
gtaaaacgacggccagtgtcacagcacttctcctgctg

SEQ ID NO: 10838 - DNA, 38 bp, Artificial Sequence
  primer
gtaaaacgacggccagttgggaattgccttgataatcc

SEQ ID NO: 10839 - DNA, 39 bp, Artificial Sequence
  primer
gtaaaacgacggccagtcattgattgttgaatcacccag

SEQ ID NO: 10840 - DNA, 38 bp, Artificial Sequence
  primer
gtaaaacgacggccagtgaattaaagcagctgcatggg

SEQ ID NO: 10841 - DNA, 37 bp, Artificial Sequence
  primer
gtaaaacgacggccagtccacgcatactcctccagtc

SEQ ID NO: 10842 - DNA, 22 bp, Artificial Sequence
  primer
gctgaaaggtggatctgaattg

SEQ ID NO: 10843 - DNA, 38 bp, Artificial Sequence
  primer
gtaaaacgacggccagtgacgtcgtagaagtgggaagg

SEQ ID NO: 10844 - DNA, 38 bp, Artificial Sequence
  primer
gtaaaacgacggccagtttctctctggcttccaggttc

SEQ ID NO: 10845 - DNA, 38 bp, Artificial Sequence
  primer
gtaaaacgacggccagtagcagtacttgaccctgagcg

SEQ ID NO: 10846 - DNA, 18 bp, Artificial Sequence
  primer
ctcggcttcctgctctcg

SEQ ID NO: 10847 - DNA, 18 bp, Artificial Sequence
  primer
ctcggcttcctgctctcg

SEQ ID NO: 10848 - DNA, 21 bp, Artificial Sequence
  primer
tggctatcctgcccttctagg

SEQ ID NO: 10849 - DNA, 37 bp, Artificial Sequence
  primer
gtaaaacgacggccagtgtgggacctgtccactaccc

SEQ ID NO: 10850 - DNA, 38 bp, Artificial Sequence
  primer
gtaaaacgacggccagtctttaagccttggctgctcac

SEQ ID NO: 10851 - DNA, 38 bp, Artificial Sequence
  primer
gtaaaacgacggccagtcagggccatagaacagctgag

SEQ ID NO: 10852 - DNA, 38 bp, Artificial Sequence
  primer
gtaaaacgacggccagtactgccagaggaaactgaagg

SEQ ID NO: 10853 - DNA, 38 bp, Artificial Sequence
  primer
gtaaaacgacggccagtatatggttgagagcctggagc

SEQ ID NO: 10854 - DNA, 21 bp, Artificial Sequence
  primer
agagactggaacctgagctgg

SEQ ID NO: 10855 - DNA, 21 bp, Artificial Sequence
  primer
ctccaagagctacaacacgcc

SEQ ID NO: 10856 - DNA, 38 bp, Artificial Sequence
  primer
gtaaaacgacggccagtagagctgtccttcctacaccc

SEQ ID NO: 10857 - DNA, 18 bp, Artificial Sequence
  primer
ggagggagttccaggtgc

SEQ ID NO: 10858 - DNA, 37 bp, Artificial Sequence
  primer
gtaaaacgacggccagtgagacagccaggcctattcc

SEQ ID NO: 10859 - DNA, 38 bp, Artificial Sequence
  primer
gtaaaacgacggccagtttgtcttccctgtgagttccc

SEQ ID NO: 10860 - DNA, 37 bp, Artificial Sequence
  primer
gtaaaacgacggccagtgaaggccaagagaagcatgg

SEQ ID NO: 10861 - DNA, 21 bp, Artificial Sequence
  primer
acctcctgcttctccactgtc

SEQ ID NO: 10862 - DNA, 37 bp, Artificial Sequence
  primer
gtaaaacgacggccagtacctctcacccgtatcccac

SEQ ID NO: 10863 - DNA, 38 bp, Artificial Sequence
  primer
gtaaaacgacggccagtgaatatcctcctacccagccc

SEQ ID NO: 10864 - DNA, 21 bp, Artificial Sequence
  primer
agaatacagctagggcctggg

SEQ ID NO: 10865 - DNA, 38 bp, Artificial Sequence
  primer
gtaaaacgacggccagtgcggtgcagaggaaagtaaag

SEQ ID NO: 10866 - DNA, 19 bp, Artificial Sequence
  primer
ctcccgctaggtctccctg

SEQ ID NO: 10867 - DNA, 20 bp, Artificial Sequence
  primer
gggtcagagtccagctaggg

SEQ ID NO: 10868 - DNA, 38 bp, Artificial Sequence
  primer
gtaaaacgacggccagtgacgaagaagaggagtcggag

SEQ ID NO: 10869 - DNA, 38 bp, Artificial Sequence
  primer
gtaaaacgacggccagtggagtgtatttccttgcccag

SEQ ID NO: 10870 - DNA, 21 bp, Artificial Sequence
  primer
tcctcttccaacaggctaagg

SEQ ID NO: 10871 - DNA, 21 bp, Artificial Sequence
  primer
ggacagaggtgagaaggcttg

SEQ ID NO: 10872 - DNA, 21 bp, Artificial Sequence
  primer
ctgcagaccctctaggcattc

SEQ ID NO: 10873 - DNA, 21 bp, Artificial Sequence
  primer
atgatgtcttccatgcctgtg

SEQ ID NO: 10874 - DNA, 21 bp, Artificial Sequence
  primer
cctgctcagaactttgaaggg

SEQ ID NO: 10875 - DNA, 36 bp, Artificial Sequence
  primer
gtaaaacgacggccagtactcctgctcagaagtgcg

SEQ ID NO: 10876 - DNA, 21 bp, Artificial Sequence
  primer
agaacgaggaggatgagcact

SEQ ID NO: 10877 - DNA, 18 bp, Artificial Sequence
  primer
aacgtcgtggtgactggc

SEQ ID NO: 10878 - DNA, 21 bp, Artificial Sequence
  primer
gggtgtggagtaccggataaa

SEQ ID NO: 10879 - DNA, 37 bp, Artificial Sequence
  primer
gtaaaacgacggccagtccatgagggtaaggaggctg

SEQ ID NO: 10880 - DNA, 21 bp, Artificial Sequence
  primer
ggccatcaagaccaagcatag

SEQ ID NO: 10881 - DNA, 20 bp, Artificial Sequence
  primer
ctgtgaaccatgttgccctc

SEQ ID NO: 10882 - DNA, 21 bp, Artificial Sequence
  primer
gcaggatcagcatgaaagatg

SEQ ID NO: 10883 - DNA, 38 bp, Artificial Sequence
  primer
gtaaaacgacggccagttttaggcttggaaaccattgc

SEQ ID NO: 10884 - DNA, 36 bp, Artificial Sequence
  primer
gtaaaacgacggccagtggatgagctcaccgcagtc

SEQ ID NO: 10885 - DNA, 38 bp, Artificial Sequence
  primer
gtaaaacgacggccagtatagtgggaggtacagctggc

SEQ ID NO: 10886 - DNA, 21 bp, Artificial Sequence
  primer
aggagcctggccaagtacaag

SEQ ID NO: 10887 - DNA, 37 bp, Artificial Sequence
  primer
gtaaaacgacggccagtcatgggtaccacaccctacg

SEQ ID NO: 10888 - DNA, 38 bp, Artificial Sequence
  primer
gtaaaacgacggccagtggtgtttgtcctgaaggaagg

SEQ ID NO: 10889 - DNA, 21 bp, Artificial Sequence
  primer
agtgtctgcaccacacctacc

SEQ ID NO: 10890 - DNA, 38 bp, Artificial Sequence
  primer
gtaaaacgacggccagtttactcaccttcacacctggg

SEQ ID NO: 10891 - DNA, 37 bp, Artificial Sequence
  primer
gtaaaacgacggccagtggaggagtagagtcgtcggg

SEQ ID NO: 10892 - DNA, 38 bp, Artificial Sequence; identical to SEQ ID NO: 10890
  primer

SEQ ID NO: 10893 - DNA, 38 bp, Artificial Sequence; identical to SEQ ID NO: 10890
  primer

SEQ ID NO: 10894 - DNA, 38 bp, Artificial Sequence
  primer
gtaaaacgacggccagttttggacactgtcaccactcc

SEQ ID NO: 10895 - DNA, 21 bp, Artificial Sequence
  primer
cagttgagtcccacagccata

SEQ ID NO: 10896 - DNA, 21 bp, Artificial Sequence
  primer
agaagacagcggtgagagacc

SEQ ID NO: 10897 - DNA, 20 bp, Artificial Sequence
  primer
gacgtgtggctgttggagtc

SEQ ID NO: 10898 - DNA, 21 bp, Artificial Sequence
  primer
cttgtccatgatctggcactt

SEQ ID NO: 10899 - DNA, 22 bp, Artificial Sequence
  primer
tctcacaggaagtagttgtggg

SEQ ID NO: 10900 - DNA, 39 bp, Artificial Sequence
  primer
gtaaaacgacggccagtcctagcgtcaaattctgctttg

SEQ ID NO: 10901 - DNA, 20 bp, Artificial Sequence
  primer
gcttagcctggtcttcctcc

SEQ ID NO: 10902 - DNA, 36 bp, Artificial Sequence
  primer
gtaaaacgacggccagtagcacagcctcttgcatcc

SEQ ID NO: 10903 - DNA, 21 bp, Artificial Sequence
  primer
ccaggcactgggtagctttag

SEQ ID NO: 10904 - DNA, 38 bp, Artificial Sequence
  primer
gtaaaacgacggccagtctgtggtcacagaccttggag

SEQ ID NO: 10905 - DNA, 38 bp, Artificial Sequence
  primer
gtaaaacgacggccagtctaggaagctttcctccctgc

SEQ ID NO: 10906 - DNA, 38 bp, Artificial Sequence
  primer
gtaaaacgacggccagtccgaggatcagacacagacac

SEQ ID NO: 10907 - DNA, 39 bp, Artificial Sequence
  primer
gtaaaacgacggccagtgctagacacatggaattcaggc

SEQ ID NO: 10908 - DNA, 38 bp, Artificial Sequence
  primer
gtaaaacgacggccagttagagcagctcaaagccaagc

SEQ ID NO: 10909 - DNA, 21 bp, Artificial Sequence
  primer
cctggtctcaagctatcctcc

SEQ ID NO: 10910 - DNA, 38 bp, Artificial Sequence
  primer
gtaaaacgacggccagtctctcagggtcattggaggtc

SEQ ID NO: 10911 - DNA, 38 bp, Artificial Sequence
  primer
gtaaaacgacggccagtcccatcccataatacacccag

SEQ ID NO: 10912 - DNA, 21 bp, Artificial Sequence
  primer
gactaaggacaaggcagtggg

SEQ ID NO: 10913 - DNA, 38 bp, Artificial Sequence
  primer
gtaaaacgacggccagtactgtgggtgacttctccagc

SEQ ID NO: 10914 - DNA, 38 bp, Artificial Sequence
  primer
gtaaaacgacggccagtctgagttctgagtgtgggtgg

SEQ ID NO: 10915 - DNA, 38 bp, Artificial Sequence
  primer
gtaaaacgacggccagtcattgtctgggcctctctgtc

SEQ ID NO: 10916 - DNA, 21 bp, Artificial Sequence
  primer
gatggtgagaccagagggatg

SEQ ID NO: 10917 - DNA, 38 bp, Artificial Sequence
  primer
gtaaaacgacggccagtcacttcttcacctccctttgg

SEQ ID NO: 10918 - DNA, 21 bp, Artificial Sequence
  primer
gagaacctgctcagcttggag

SEQ ID NO: 10919 - DNA, 21 bp, Artificial Sequence
  primer
cggtgacaagcagtgtctctc

SEQ ID NO: 10920 - DNA, 38 bp, Artificial Sequence
  primer
gtaaaacgacggccagtcaagcgcagtacagcacagag

SEQ ID NO: 10921 - DNA, 37 bp, Artificial Sequence
  primer
gtaaaacgacggccagtgctgtttcacaagccctcag

SEQ ID NO: 10922 - DNA, 36 bp, Artificial Sequence
  primer
gtaaaacgacggccagtacactctgcagggcagttg

SEQ ID NO: 10923 - DNA, 38 bp, Artificial Sequence
  primer
gtaaaacgacggccagtataatcatgacatcatcggcg

SEQ ID NO: 10924 - DNA, 38 bp, Artificial Sequence
  primer
gtaaaacgacggccagtgattcagatttccttccaccc

SEQ ID NO: 10925 - DNA, 37 bp, Artificial Sequence
  primer
gtaaaacgacggccagtctgccagcatcctctcaatg

SEQ ID NO: 10926 - DNA, 37 bp, Artificial Sequence
  primer
gtaaaacgacggccagtgtgacacatgcgctcacaag

SEQ ID NO: 10927 - DNA, 21 bp, Artificial Sequence
  primer
ctgggtgtcaagtaagcatgg

SEQ ID NO: 10928 - DNA, 21 bp, Artificial Sequence
  primer
cagcaagcctcagcatagaag

SEQ ID NO: 10929 - DNA, 37 bp, Artificial Sequence
  primer
gtaaaacgacggccagtaggagtttgaggctgcagtg

SEQ ID NO: 10930 - DNA, 38 bp, Artificial Sequence
  primer
gtaaaacgacggccagtgggcgagtttcaaatcttctg

SEQ ID NO: 10931 - DNA, 38 bp, Artificial Sequence
  primer
gtaaaacgacggccagttagctgaagacaaggtgcagg

SEQ ID NO: 10932 - DNA, 38 bp, Artificial Sequence
  primer
gtaaaacgacggccagtcatcccttcccaagaactgac

SEQ ID NO: 10933 - DNA, 38 bp, Artificial Sequence
  primer
gtaaaacgacggccagtggaacataggaacgatttccg

SEQ ID NO: 10934 - DNA, 39 bp, Artificial Sequence
  primer
gtaaaacgacggccagttcacttgaacatctgagggatg

SEQ ID NO: 10935 - DNA, 21 bp, Artificial Sequence
  primer
cattcaggaggcagctctttg

SEQ ID NO: 10936 - DNA, 38 bp, Artificial Sequence
  primer
gtaaaacgacggccagtccacagtgtgatctgactccc

SEQ ID NO: 10937 - DNA, 20 bp, Artificial Sequence
  primer
gaaatcagagctgcggactg

SEQ ID NO: 10938 - DNA, 21 bp, Artificial Sequence
  primer
acagaatgccagaaacttccc

SEQ ID NO: 10939 - DNA, 35 bp, Artificial Sequence
  primer
gtaaaacgacggccagttgccggatttcagtgtgc

SEQ ID NO: 10940 - DNA, 38 bp, Artificial Sequence
  primer
gtaaaacgacggccagtctttaagggtcaggttccagc

SEQ ID NO: 10941 - DNA, 21 bp, Artificial Sequence
  primer
ttatgttaacaggcaccctcg

SEQ ID NO: 10942 - DNA, 38 bp, Artificial Sequence
  primer
gtaaaacgacggccagtcattacaggtgatccttcggg

SEQ ID NO: 10943 - DNA, 38 bp, Artificial Sequence
  primer
gtaaaacgacggccagtgcaaagcctgctactgtgttg

SEQ ID NO: 10944 - DNA, 35 bp, Artificial Sequence
  primer
gtaaaacgacggccagtttggtggtggcacgacag

SEQ ID NO: 10945 - DNA, 39 bp, Artificial Sequence
  primer
gtaaaacgacggccagtgacagctgttgaactgtttccc

SEQ ID NO: 10946 - DNA, 21 bp, Artificial Sequence
  primer
ggagctggttcatctctgagc

SEQ ID NO: 10947 - DNA, 38 bp, Artificial Sequence
  primer
gtaaaacgacggccagtttaccagggtcctgagagctg

SEQ ID NO: 10948 - DNA, 21 bp, Artificial Sequence
  primer
taccagattgggttacagggc

SEQ ID NO: 10949 - DNA, 21 bp, Artificial Sequence
  primer
ttgaagaagaaaggcactggg

SEQ ID NO: 10950 - DNA, 38 bp, Artificial Sequence
  primer
gtaaaacgacggccagtaaaggaagagcaggagatggg

SEQ ID NO: 10951 - DNA, 18 bp, Artificial Sequence
  primer
cccaggaggtggagcttg

SEQ ID NO: 10952 - DNA, 21 bp, Artificial Sequence
  primer
gcagggattagagaatgggtg

SEQ ID NO: 10953 - DNA, 38 bp, Artificial Sequence
  primer
gtaaaacgacggccagtttctcatagctgtccttgccc

SEQ ID NO: 10954 - DNA, 38 bp, Artificial Sequence
  primer
gtaaaacgacggccagtagctccctttccaccattagg

SEQ ID NO: 10955 - DNA, 21 bp, Artificial Sequence
  primer
tccgagtctagaggtcatggg

SEQ ID NO: 10956 - DNA, 38 bp, Artificial Sequence
  primer
gtaaaacgacggccagtaccaacaccaaatgagctgag

SEQ ID NO: 10957 - DNA, 38 bp, Artificial Sequence
  primer
gtaaaacgacggccagtcagaagcagttgacttcctgc

SEQ ID NO: 10958 - DNA, 38 bp, Artificial Sequence
  primer
gtaaaacgacggccagtgggaatcacatgggagctaag

SEQ ID NO: 10959 - DNA, 21 bp, Artificial Sequence
  primer
ggaaatatggctgcatcactg

SEQ ID NO: 10960 - DNA, 21 bp, Artificial Sequence
  primer
ttcaggtgtgcagttggagag

SEQ ID NO: 10961 - DNA, 36 bp, Artificial Sequence
  primer
gtaaaacgacggccagtagcccttcctcccagtgtc

SEQ ID NO: 10962 - DNA, 37 bp, Artificial Sequence
  primer
gtaaaacgacggccagtgagctgacctcccacctctc

SEQ ID NO: 10963 - DNA, 22 bp, Artificial Sequence
  primer
ccaaatacttgtgcatcagacg

SEQ ID NO: 10964 - DNA, 21 bp, Artificial Sequence
  primer
ggtgaagagattgtttggcac

SEQ ID NO: 10965 - DNA, 38 bp, Artificial Sequence
  primer
gtaaaacgacggccagtctccagttacttgctgagggc

SEQ ID NO: 10966 - DNA, 21 bp, Artificial Sequence
  primer
ctccctttctgaaattgctgc

SEQ ID NO: 10967 - DNA, 38 bp, Artificial Sequence
  primer
gtaaaacgacggccagtgctcattgctctgtcttctgg

SEQ ID NO: 10968 - DNA, 21 bp, Artificial Sequence
  primer
tgagatggagccacaggtaag

SEQ ID NO: 10969 - DNA, 37 bp, Artificial Sequence
  primer
gtaaaacgacggccagtctacctccagcctctccacc

SEQ ID NO: 10970 - DNA, 20 bp, Artificial Sequence
  primer
gtggctgtctcctcttctgg

SEQ ID NO: 10971 - DNA, 38 bp, Artificial Sequence
  primer
gtaaaacgacggccagtttctggcccttggagtaagag

SEQ ID NO: 10972 - DNA, 22 bp, Artificial Sequence
  primer
cctgagtaggtaacctcccacc

SEQ ID NO: 10973 - DNA, 38 bp, Artificial Sequence
  primer
gtaaaacgacggccagttctcattacccaaggccagag

SEQ ID NO: 10974 - DNA, 38 bp, Artificial Sequence
  primer
gtaaaacgacggccagttcatgttcacacccatcttgg

SEQ ID NO: 10975 - DNA, 36 bp, Artificial Sequence
  primer
gtaaaacgacggccagtaggcagataacagctggcg

SEQ ID NO: 10976 - DNA, 38 bp, Artificial Sequence
  primer
gtaaaacgacggccagtcaattcccagcaccttaacac

SEQ ID NO: 10977 - DNA, 37 bp, Artificial Sequence
  primer
gtaaaacgacggccagttcctagagcctccaagagcc

SEQ ID NO: 10978 - DNA, 21 bp, Artificial Sequence
  primer
atccacatctgtctcgtgctg

SEQ ID NO: 10979 - DNA, 38 bp, Artificial Sequence
  primer
gtaaaacgacggccagtggaggactgtacagggaggtg

SEQ ID NO: 10980 - DNA, 38 bp, Artificial Sequence
  primer
gtaaaacgacggccagttctcggatcctactccattgc

SEQ ID NO: 10981 - DNA, 20 bp, Artificial Sequence
  primer
aaagctgcccataggctctc

SEQ ID NO: 10982 - DNA, 38 bp, Artificial Sequence
  primer
gtaaaacgacggccagtagtacaacgatccttctgggc

SEQ ID NO: 10983 - DNA, 21 bp, Artificial Sequence
  primer
gaagacatcaccctgtttccc

SEQ ID NO: 10984 - DNA, 21 bp, Artificial Sequence
  primer
tgtgttcaccttgttcttccc

SEQ ID NO: 10985 - DNA, 37 bp, Artificial Sequence
  primer
gtaaaacgacggccagtccacaggaacgggaggatag

SEQ ID NO: 10986 - DNA, 21 bp, Artificial Sequence
  primer
cacccttaaatcacaccctcc

SEQ ID NO: 10987 - DNA, 38 bp, Artificial Sequence
  primer
gtaaaacgacggccagttcaagccctacgagaaactgg

SEQ ID NO: 10988 - DNA, 21 bp, Artificial Sequence
  primer
tgcatctacttggaggcagag

SEQ ID NO: 10989 - DNA, 23 bp, Artificial Sequence
  primer
cggatggtctagatgactgaatg

SEQ ID NO: 10990 - DNA, 21 bp, Artificial Sequence
  primer
cagctgatggtaaatgcactg

SEQ ID NO: 10991 - DNA, 23 bp, Artificial Sequence
  primer
ttagagaggcttatggtgctgtg

SEQ ID NO: 10992 - DNA, 23 bp, Artificial Sequence
  primer
tcattacctgtgctgtttgtgac

SEQ ID NO: 10993 - DNA, 27 bp, Artificial Sequence
  primer
ttctccagatggaacacagtttattac

SEQ ID NO: 10994 - DNA, 35 bp, Artificial Sequence
  primer
gtaaaacgacggccagtgtgccaccacacccagtg

SEQ ID NO: 10995 - DNA, 38 bp, Artificial Sequence
  primer
gtaaaacgacggccagttttgttgctgaatatgccctg

SEQ ID NO: 10996 - DNA, 40 bp, Artificial Sequence
  primer
gtaaaacgacggccagtgcagatgatgggactgtcttaca

SEQ ID NO: 10997 - DNA, 38 bp, Artificial Sequence
  primer
gtaaaacgacggccagtgaaagcctgtccacataaccc

SEQ ID NO: 10998 - DNA, 23 bp, Artificial Sequence
  primer
gcatggttgagttggtgtttatc

SEQ ID NO: 10999 - DNA, 39 bp, Artificial Sequence
  primer
gtaaaacgacggccagttcacttgccctgtctttaaggt

SEQ ID NO: 11000 - DNA, 21 bp, Artificial Sequence
  primer
tgacttgccaaagtaaggaaa

SEQ ID NO: 11001 - DNA, 37 bp, Artificial Sequence
  primer
gtaaaacgacggccagtctgccagagtggtacatggc

SEQ ID NO: 11002 - DNA, 21 bp, Artificial Sequence
  primer
cctaaatttccgttctcccac

SEQ ID NO: 11003 - DNA, 21 bp, Artificial Sequence
  primer
acgagtgggcagacttctttc

SEQ ID NO: 11004 - DNA, 42 bp, Artificial Sequence
  primer
gtaaaacgacggccagttgattgtgcttgtagagtgggtatc

SEQ ID NO: 11005 - DNA, 38 bp, Artificial Sequence
  primer
gtaaaacgacggccagtaactgccctgaagaacttccc

SEQ ID NO: 11006 - DNA, 38 bp, Artificial Sequence
  primer
gtaaaacgacggccagtaagactgtgatgaagcgtccc

SEQ ID NO: 11007 - DNA, 19 bp, Artificial Sequence
  primer
gagaatcacttgcgcccag

SEQ ID NO: 11008 - DNA, 37 bp, Artificial Sequence
  primer
gtaaaacgacggccagtggtctctctctggtggcttg

SEQ ID NO: 11009 - DNA, 24 bp, Artificial Sequence
  primer
tccaaagctgtcagtgataaagag

SEQ ID NO: 11010 - DNA, 35 bp, Artificial Sequence
  primer
gtaaaacgacggccagtcatgattcgcccaccttg

SEQ ID NO: 11011 - DNA, 21 bp, Artificial Sequence
  primer
ttaggctgaagctgttctggg

SEQ ID NO: 11012 - DNA, 40 bp, Artificial Sequence
  primer
gtaaaacgacggccagttgctggagtttaacctagctttg

SEQ ID NO: 11013 - DNA, 24 bp, Artificial Sequence
  primer
tttcagtgctaagtcagattcagg

SEQ ID NO: 11014 - DNA, 40 bp, Artificial Sequence
  primer
gtaaaacgacggccagtttcatttgctacttcactccagc

SEQ ID NO: 11015 - DNA, 22 bp, Artificial Sequence
  primer
aaccaccgtgtatgtaatgtgc

SEQ ID NO: 11016 - DNA, 38 bp, Artificial Sequence
  primer
gtaaaacgacggccagttctgtcactttgtctggcttg

SEQ ID NO: 11017 - DNA, 38 bp, Artificial Sequence
  primer
gtaaaacgacggccagtaccctcacggtgaatacatgg

SEQ ID NO: 11018 - DNA, 22 bp, Artificial Sequence
  primer
tctgacagaggctttaagctgg

SEQ ID NO: 11019 - DNA, 37 bp, Artificial Sequence
  primer
gtaaaacgacggccagttaacctcgtgatccacctgc

SEQ ID NO: 11020 - DNA, 27 bp, Artificial Sequence
  primer
agatagtactcctgaatgttcttctgc

SEQ ID NO: 11021 - DNA, 20 bp, Artificial Sequence
  primer
ggactataggcgcacagcac

SEQ ID NO: 11022 - DNA, 38 bp, Artificial Sequence
  primer
gtaaaacgacggccagtgggcagactatttcaagaccc

SEQ ID NO: 11023 - DNA, 38 bp, Artificial Sequence
  primer
gtaaaacgacggccagttgttgttgttggttgatttgg

SEQ ID NO: 11024 - DNA, 21 bp, Artificial Sequence
  primer
ttaccacagtcaacacctggc

SEQ ID NO: 11025 - DNA, 21 bp, Artificial Sequence
  primer
actttgcctttgagccttctg

SEQ ID NO: 11026 - DNA, 40 bp, Artificial Sequence
  primer
gtaaaacgacggccagttgcagcctgaggttatagttgtg

SEQ ID NO: 11027 - DNA, 39 bp, Artificial Sequence
  primer
gtaaaacgacggccagtcgtttagtgggtttgttgaagc

SEQ ID NO: 11028 - DNA, 42 bp, Artificial Sequence
  primer
gtaaaacgacggccagttgaagttgtcagcacactatgctat

SEQ ID NO: 11029 - DNA, 21 bp, Artificial Sequence
  primer
gtgggagaattgcatctatgg

SEQ ID NO: 11030 - DNA, 38 bp, Artificial Sequence
  primer
gtaaaacgacggccagtgtggaggatttggccttattg

SEQ ID NO: 11031 - DNA, 37 bp, Artificial Sequence
  primer
gtaaaacgacggccagtccagtttaccctccctgtgg

SEQ ID NO: 11032 - DNA, 38 bp, Artificial Sequence
  primer
gtaaaacgacggccagtacaatggctcctctccacaag

SEQ ID NO: 11033 - DNA, 37 bp, Artificial Sequence
  primer
gtaaaacgacggccagtaagatggagatggtctgggc

SEQ ID NO: 11034 - DNA, 21 bp, Artificial Sequence
  primer
gggaactaaagcccagcaaac

SEQ ID NO: 11035 - DNA, 38 bp, Artificial Sequence
  primer
gtaaaacgacggccagtctgtccagcatgagaacaagc

SEQ ID NO: 11036 - DNA, 38 bp, Artificial Sequence
  primer
gtaaaacgacggccagtctgaaggagcagaattgggag

SEQ ID NO: 11037 - DNA, 37 bp, Artificial Sequence
  primer
gtaaaacgacggccagtcttctggataccctcagccc

SEQ ID NO: 11038 - DNA, 22 bp, Artificial Sequence
  primer
cccaaaccttctctcaagaacc

SEQ ID NO: 11039 - DNA, 38 bp, Artificial Sequence
  primer
gtaaaacgacggccagtggaaccagcagtatcaggagg

SEQ ID NO: 11040 - DNA, 38 bp, Artificial Sequence
  primer
gtaaaacgacggccagtaacagacagggtcctctgagc

SEQ ID NO: 11041 - DNA, 21 bp, Artificial Sequence
  primer
atatcctgcgccagacagaag

SEQ ID NO: 11042 - DNA, 21 bp, Artificial Sequence
  primer
aagtcaaggtacatcgctgcc

SEQ ID NO: 11043 - DNA, 38 bp, Artificial Sequence
  primer
gtaaaacgacggccagttctttgcctgctgctctttag

SEQ ID NO: 11044 - DNA, 21 bp, Artificial Sequence
  primer
actccaagcttcttccctgtg

SEQ ID NO: 11045 - DNA, 39 bp, Artificial Sequence
  primer
gtaaaacgacggccagtcccagacaccatctatgaggac

SEQ ID NO: 11046 - DNA, 38 bp, Artificial Sequence
  primer
gtaaaacgacggccagtttcccacacctacaatgaccc

SEQ ID NO: 11047 - DNA, 38 bp, Artificial Sequence
  primer
gtaaaacgacggccagtctcctgttccaagcattggtc

SEQ ID NO: 11048 - DNA, 38 bp, Artificial Sequence
  primer
gtaaaacgacggccagtatgcagatgcatgtctgtgtg

SEQ ID NO: 11049 - DNA, 21 bp, Artificial Sequence
  primer
gtctcccaaagcacattcctg

SEQ ID NO: 11050 - DNA, 37 bp, Artificial Sequence
  primer
gtaaaacgacggccagttcctgttcccactcaacctg

SEQ ID NO: 11051 - DNA, 38 bp, Artificial Sequence
  primer
gtaaaacgacggccagttctcacacagttgatgagccc

SEQ ID NO: 11052 - DNA, 21 bp, Artificial Sequence
  primer
gtccagaggcaggagtcagtc

SEQ ID NO: 11053 - DNA, 36 bp, Artificial Sequence
  primer
gtaaaacgacggccagtgaactcttggagcccgtcc

SEQ ID NO: 11054 - DNA, 21 bp, Artificial Sequence
  primer
ggtggctgtcagaagtcaagg

SEQ ID NO: 11055 - DNA, 38 bp, Artificial Sequence
  primer
gtaaaacgacggccagtactgtagcccaagtgagcctg

SEQ ID NO: 11056 - DNA, 37 bp, Artificial Sequence
  primer
gtaaaacgacggccagtcaggcatagcagctcagagg

SEQ ID NO: 11057 - DNA, 36 bp, Artificial Sequence
  primer
gtaaaacgacggccagtctcttcccacactcccgtg

SEQ ID NO: 11058 - DNA, 36 bp, Artificial Sequence
  primer
gtaaaacgacggccagtagctttaccgcagcgtctc

SEQ ID NO: 11059 - DNA, 35 bp, Artificial Sequence
  primer
gtaaaacgacggccagtgtcggttcgccagctctc

SEQ ID NO: 11060 - DNA, 18 bp, Artificial Sequence
  primer
gtcaccgagatgcgcaag

SEQ ID NO: 11061 - DNA, 21 bp, Artificial Sequence
  primer
gcggatggtttacattcttgg

SEQ ID NO: 11062 - DNA, 38 bp, Artificial Sequence
  primer
gtaaaacgacggccagttccctattggatcaggactgc

SEQ ID NO: 11063 - DNA, 38 bp, Artificial Sequence
  primer
gtaaaacgacggccagtcggcctatgtctgactctgtg

SEQ ID NO: 11064 - DNA, 38 bp, Artificial Sequence
  primer
gtaaaacgacggccagtaaagagtcgacagcggaagtc

SEQ ID NO: 11065 - DNA, 38 bp, Artificial Sequence
  primer
gtaaaacgacggccagtattcacctgctctgagaagcc

SEQ ID NO: 11066 - DNA, 21 bp, Artificial Sequence
  primer
aacaagatgatggaagcgatg

SEQ ID NO: 11067 - DNA, 21 bp, Artificial Sequence
  primer
caaagtcccaccttcaggttc

SEQ ID NO: 11068 - DNA, 38 bp, Artificial Sequence
  primer
gtaaaacgacggccagtagcctactgggttctctgtgg

SEQ ID NO: 11069 - DNA, 20 bp, Artificial Sequence
  primer
agcccatccttgtagagcag

SEQ ID NO: 11070 - DNA, 38 bp, Artificial Sequence
  primer
gtaaaacgacggccagtaccgaaactttcaccttgacc

SEQ ID NO: 11071 - DNA, 21 bp, Artificial Sequence
  primer
gaacccataggcttccctacc

SEQ ID NO: 11072 - DNA, 21 bp, Artificial Sequence
  primer
gccacgtgtttgaggtgtaag

SEQ ID NO: 11073 - DNA, 20 bp, Artificial Sequence
  primer
atgagggagatgtggaaggc

SEQ ID NO: 11074 - DNA, 38 bp, Artificial Sequence
  primer
gtaaaacgacggccagtcgaccacacttagagccacag

SEQ ID NO: 11075 - DNA, 38 bp, Artificial Sequence
  primer
gtaaaacgacggccagtaggtactgtgggctagggcag

SEQ ID NO: 11076 - DNA, 38 bp, Artificial Sequence
  primer
gtaaaacgacggccagttacccatagtccctcctgctc

SEQ ID NO: 11077 - DNA, 38 bp, Artificial Sequence
  primer
gtaaaacgacggccagtcacgtctgtctctgaccttgg

SEQ ID NO: 11078 - DNA, 21 bp, Artificial Sequence
  primer
ctctccctgggtctcagtgtc

SEQ ID NO: 11079 - DNA, 21 bp, Artificial Sequence
  primer
tctgaagcgaaagtcaggctc

SEQ ID NO: 11080 - DNA, 21 bp, Artificial Sequence
  primer
gctttcggtttgtcaggtctc

SEQ ID NO: 11081 - DNA, 37 bp, Artificial Sequence
  primer
gtaaaacgacggccagtccacacattaagggcaggtg

SEQ ID NO: 11082 - DNA, 38 bp, Artificial Sequence
  primer
gtaaaacgacggccagtttctaatgtggctgggatcag

SEQ ID NO: 11083 - DNA, 39 bp, Artificial Sequence
  primer
gtaaaacgacggccagttgtatagggcatccacacacac

SEQ ID NO: 11084 - DNA, 35 bp, Artificial Sequence
  primer
gtaaaacgacggccagtcagcacactctcaggccg

SEQ ID NO: 11085 - DNA, 38 bp, Artificial Sequence
  primer
gtaaaacgacggccagtagggatgcatggcctagaaag

SEQ ID NO: 11086 - DNA, 38 bp, Artificial Sequence
  primer
gtaaaacgacggccagttgtcagtgggtctgacaatcc

SEQ ID NO: 11087 - DNA, 38 bp, Artificial Sequence
  primer
gtaaaacgacggccagtgggagccatacccattctatc

SEQ ID NO: 11088 - DNA, 37 bp, Artificial Sequence
  primer
gtaaaacgacggccagtctcctggagatgtggctttg

SEQ ID NO: 11089 - DNA, 21 bp, Artificial Sequence
  primer
tgagttgtgagggatggacac

SEQ ID NO: 11090 - DNA, 21 bp, Artificial Sequence
  primer
actaccacagcaccctccttg

SEQ ID NO: 11091 - DNA, 35 bp, Artificial Sequence
  primer
gtaaaacgacggccagtgggtgtgggaattcaggc

SEQ ID NO: 11092 - DNA, 38 bp, Artificial Sequence
  primer
gtaaaacgacggccagtctacccgacccactttctcag

SEQ ID NO: 11093 - DNA, 39 bp, Artificial Sequence
  primer
gtaaaacgacggccagtcagagagtatcgaatcggatgg

SEQ ID NO: 11094 - DNA, 38 bp, Artificial Sequence
  primer
gtaaaacgacggccagtgtgtcagcatgtctacgggag

SEQ ID NO: 11095 - DNA, 38 bp, Artificial Sequence
  primer
gtaaaacgacggccagtcccaaaggcacaaggtcttag

SEQ ID NO: 11096 - DNA, 21 bp, Artificial Sequence
  primer
tctttagcctgagccacagag

SEQ ID NO: 11097 - DNA, 21 bp, Artificial Sequence
  primer
atagatcccacacgcccatac

SEQ ID NO: 11098 - DNA, 38 bp, Artificial Sequence
  primer
gtaaaacgacggccagtatgctgcttacaccttcctgg

SEQ ID NO: 11099 - DNA, 37 bp, Artificial Sequence
  primer
gtaaaacgacggccagtagaaatgaggagcgtgaccc

SEQ ID NO: 11100 - DNA, 38 bp, Artificial Sequence
  primer
gtaaaacgacggccagttcactcccaaagtcagagacg

SEQ ID NO: 11101 - DNA, 37 bp, Artificial Sequence
  primer
gtaaaacgacggccagtctcatccttaggccagtccc

SEQ ID NO: 11102 - DNA, 36 bp, Artificial Sequence
  primer
gtaaaacgacggccagtagtgagtccctccgtccac

SEQ ID NO: 11103 - DNA, 21 bp, Artificial Sequence
  primer
ttctggaaccttctgaaaccc

SEQ ID NO: 11104 - DNA, 21 bp, Artificial Sequence
  primer
agagcagaattccgtctcaaa

SEQ ID NO: 11105 - DNA, 21 bp, Artificial Sequence
  primer
ctctggtttgacggtgtcctc

SEQ ID NO: 11106 - DNA, 18 bp, Artificial Sequence
  primer
caggtgcggctctcactc

SEQ ID NO: 11107 - DNA, 21 bp, Artificial Sequence
  primer
gacagctatgtggagacgcag

SEQ ID NO: 11108 - DNA, 38 bp, Artificial Sequence
  primer
gtaaaacgacggccagttccagaacaggagaggtcgag

SEQ ID NO: 11109 - DNA, 21 bp, Artificial Sequence
  primer
tagggcctgtgctatttccac

SEQ ID NO: 11110 - DNA, 19 bp, Artificial Sequence
  primer
ctgacatgagcccagtccc

SEQ ID NO: 11111 - DNA, 38 bp, Artificial Sequence
  primer
gtaaaacgacggccagttatcattcaggcaatgccaag

SEQ ID NO: 11112 - DNA, 20 bp, Artificial Sequence
  primer
aagaggaatggactgtgggc

SEQ ID NO: 11113 - DNA, 38 bp, Artificial Sequence
  primer
gtaaaacgacggccagtccagatgctagcagaaacaca

SEQ ID NO: 11114 - DNA, 20 bp, Artificial Sequence
  primer
gcactcatctctgggtcagg

SEQ ID NO: 11115 - DNA, 20 bp, Artificial Sequence
  primer
agggaaagcatctggaatgg

SEQ ID NO: 11116 - DNA, 37 bp, Artificial Sequence
  primer
gtaaaacgacggccagtcaaaggttaagtgacgcggg

SEQ ID NO: 11117 - DNA, 20 bp, Artificial Sequence
  primer
gatcgaggacaggaaaggct

SEQ ID NO: 11118 - DNA, 38 bp, Artificial Sequence
  primer
gtaaaacgacggccagtcagcgagaggtgaagaagtgg

SEQ ID NO: 11119 - DNA, 21 bp, Artificial Sequence
  primer
taaggatgtgctgagaagccc

SEQ ID NO: 11120 - DNA, 37 bp, Artificial Sequence
  primer
gtaaaacgacggccagtagggagatacacctgtgggc

SEQ ID NO: 11121 - DNA, 38 bp, Artificial Sequence
  primer
gtaaaacgacggccagtcagctgtcagagtctccggtc

SEQ ID NO: 11122 - DNA, 38 bp, Artificial Sequence
  primer
gtaaaacgacggccagtcacaccctcccatctaccatc

SEQ ID NO: 11123 - DNA, 38 bp, Artificial Sequence
  primer
gtaaaacgacggccagtcagtcagaacccacctgatcc

SEQ ID NO: 11124 - DNA, 38 bp, Artificial Sequence
  primer
gtaaaacgacggccagttgttatgctcagagctgggtg

SEQ ID NO: 11125 - DNA, 21 bp, Artificial Sequence
  primer
agagggtatgcctgcttgaac

SEQ ID NO: 11126 - DNA, 38 bp, Artificial Sequence
  primer
gtaaaacgacggccagtctgagatgatgtcaccttggc

SEQ ID NO: 11127 - DNA, 38 bp, Artificial Sequence
  primer
gtaaaacgacggccagtccagcctgtctctctggactc

SEQ ID NO: 11128 - DNA, 21 bp, Artificial Sequence
  primer
tgtggtaatggcccagaagtc

SEQ ID NO: 11129 - DNA, 20 bp, Artificial Sequence
  primer
acctagctcctgtcccatgc

SEQ ID NO: 11130 - DNA, 38 bp, Artificial Sequence
  primer
gtaaaacgacggccagtaggatgcctcattcctcattg

SEQ ID NO: 11131 - DNA, 38 bp, Artificial Sequence
  primer
gtaaaacgacggccagtatcctggctttggttccctac

SEQ ID NO: 11132 - DNA, 38 bp, Artificial Sequence
  primer
gtaaaacgacggccagtgggaagggatctagagaaggg

SEQ ID NO: 11133 - DNA, 39 bp, Artificial Sequence
  primer
gtaaaacgacggccagttgtgaggtccttatcctagggc

SEQ ID NO: 11134 - DNA, 21 bp, Artificial Sequence
  primer
gcatttcttgggtccaaattc

SEQ ID NO: 11135 - DNA, 38 bp, Artificial Sequence
  primer
gtaaaacgacggccagtaggcaagcatgaggtaaatgg

SEQ ID NO: 11136 - DNA, 38 bp, Artificial Sequence
  primer
gtaaaacgacggccagtaggtggaatcaagacacgatg

SEQ ID NO: 11137 - DNA, 37 bp, Artificial Sequence
  primer
gtaaaacgacggccagtcttgggaaagagggaagcag

SEQ ID NO: 11138 - DNA, 38 bp, Artificial Sequence
  primer
gtaaaacgacggccagtcagtcctttcagtcctcgtcc

SEQ ID NO: 11139 - DNA, 38 bp, Artificial Sequence
  primer
gtaaaacgacggccagtaagctagggtgtgaggctgag

SEQ ID NO: 11140 - DNA, 21 bp, Artificial Sequence
  primer
ctagggctgtcctctactggc

SEQ ID NO: 11141 - DNA, 38 bp, Artificial Sequence
  primer
gtaaaacgacggccagtgtggttgtgtgagtgaaaccc

SEQ ID NO: 11142 - DNA, 38 bp, Artificial Sequence
  primer
gtaaaacgacggccagtgtggagggtctgaaagacctg

SEQ ID NO: 11143 - DNA, 21 bp, Artificial Sequence
  primer
tcaagaggttctgggacttgg

SEQ ID NO: 11144 - DNA, 38 bp, Artificial Sequence
  primer
gtaaaacgacggccagttgtctccggatcctactgtcc

SEQ ID NO: 11145 - DNA, 21 bp, Artificial Sequence
  primer
ctgataaacccttctgcctgc

SEQ ID NO: 11146 - DNA, 21 bp, Artificial Sequence
  primer
agccaagcagaacctccaatc

SEQ ID NO: 11147 - DNA, 38 bp, Artificial Sequence
  primer
gtaaaacgacggccagtaaccctgtcatcccttcacag

SEQ ID NO: 11148 - DNA, 19 bp, Artificial Sequence
  primer
agtcctgcccggctagaag

SEQ ID NO: 11149 - DNA, 22 bp, Artificial Sequence
  primer
ccagtaccttgtggagtggaac

SEQ ID NO: 11150 - DNA, 38 bp, Artificial Sequence
  primer
gtaaaacgacggccagtttatgttccgtcaacgacagg

SEQ ID NO: 11151 - DNA, 37 bp, Artificial Sequence
  primer
gtaaaacgacggccagtggtggagccagcactatttg

SEQ ID NO: 11152 - DNA, 21 bp, Artificial Sequence
  primer
taaggcagtgctggtttctcc

SEQ ID NO: 11153 - DNA, 22 bp, Artificial Sequence
  primer
ggatgagtcgtgacttgtagcc

SEQ ID NO: 11154 - DNA, 38 bp, Artificial Sequence
  primer
gtaaaacgacggccagtataaatgatgccaccgtagcc

SEQ ID NO: 11155 - DNA, 38 bp, Artificial Sequence
  primer
gtaaaacgacggccagttgtcctggtgtccttctaggc

SEQ ID NO: 11156 - DNA, 21 bp, Artificial Sequence
  primer
acatgcccaactttggttctc

SEQ ID NO: 11157 - DNA, 38 bp, Artificial Sequence
  primer
gtaaaacgacggccagtcaatacctgccatggattctg

SEQ ID NO: 11158 - DNA, 36 bp, Artificial Sequence
  primer
gtaaaacgacggccagtaaggacagcgtgttcccag

SEQ ID NO: 11159 - DNA, 38 bp, Artificial Sequence
  primer
gtaaaacgacggccagtttagaaagactgcagggtggc

SEQ ID NO: 11160 - DNA, 21 bp, Artificial Sequence
  primer
tggtttgagaacctagccctg

SEQ ID NO: 11161 - DNA, 21 bp, Artificial Sequence
  primer
gagtggagacagagagcaggg

SEQ ID NO: 11162 - DNA, 37 bp, Artificial Sequence
  primer
gtaaaacgacggccagtattcctcggtccaggacttg

SEQ ID NO: 11163 - DNA, 38 bp, Artificial Sequence
  primer
gtaaaacgacggccagtgagcgggactacatcaagcac

SEQ ID NO: 11164 - DNA, 21 bp, Artificial Sequence
  primer
gaaatgtagaggctcttgccc

SEQ ID NO: 11165 - DNA, 21 bp, Artificial Sequence
  primer
ctgtgcttgccatttatggag

SEQ ID NO: 11166 - DNA, 37 bp, Artificial Sequence
  primer
gtaaaacgacggccagttttgcaaggacagccaactc

SEQ ID NO: 11167 - DNA, 38 bp, Artificial Sequence
  primer
gtaaaacgacggccagtcaggatctcactgtctgctgg

SEQ ID NO: 11168 - DNA, 38 bp, Artificial Sequence
  primer
gtaaaacgacggccagtggagtgaaggtgagagatggg

SEQ ID NO: 11169 - DNA, 20 bp, Artificial Sequence
  primer
agctctccaggagcaagtcc

SEQ ID NO: 11170 - DNA, 38 bp, Artificial Sequence
  primer
gtaaaacgacggccagtcaggtgtccacatcctgtctc

SEQ ID NO: 11171 - DNA, 21 bp, Artificial Sequence
  primer
tcaggaatgttctgccaagtc

SEQ ID NO: 11172 - DNA, 38 bp, Artificial Sequence
  primer
gtaaaacgacggccagttgtggaagagatgcttgttca

SEQ ID NO: 11173 - DNA, 21 bp, Artificial Sequence
  primer
ttgcaggctgtagatgtaggg

SEQ ID NO: 11174 - DNA, 42 bp, Artificial Sequence
  primer
gtaaaacgacggccagttcatggaactagataagtccttccc

SEQ ID NO: 11175 - DNA, 21 bp, Artificial Sequence
  primer
ctatctcaagtcctcccacgc

SEQ ID NO: 11176 - DNA, 38 bp, Artificial Sequence
  primer
gtaaaacgacggccagtaggaaggtgatccagagaagc

SEQ ID NO: 11177 - DNA, 38 bp, Artificial Sequence
  primer
gtaaaacgacggccagtagacaacagcagatgcaatcg

SEQ ID NO: 11178 - DNA, 38 bp, Artificial Sequence
  primer
gtaaaacgacggccagtcttcctggattgacagcagtg

SEQ ID NO: 11179 - DNA, 21 bp, Artificial Sequence
  primer
tgctctcatttctcccaaagg

SEQ ID NO: 11180 - DNA, 38 bp, Artificial Sequence
  primer
gtaaaacgacggccagtcagccaggatgcctctgatag

SEQ ID NO: 11181 - DNA, 43 bp, Artificial Sequence
  primer
gtaaaacgacggccagttgcctatatccatatcatttctaccc

SEQ ID NO: 11182 - DNA, 21 bp, Artificial Sequence
  primer
ttgatccttccactgggaatc

SEQ ID NO: 11183 - DNA, 20 bp, Artificial Sequence
  primer
gcttgcaatggtagcctgag

SEQ ID NO: 11184 - DNA, 21 bp, Artificial Sequence
  primer
cccttacgaccactccatttc

SEQ ID NO: 11185 - DNA, 39 bp, Artificial Sequence
  primer
gtaaaacgacggccagtgcaagaatttgagtttcatggg

SEQ ID NO: 11186 - DNA, 21 bp, Artificial Sequence
  primer
tgagtgtctggctcaccaaag

SEQ ID NO: 11187 - DNA, 40 bp, Artificial Sequence
  primer
gtaaaacgacggccagttctttgtggccatactctctttc

SEQ ID NO: 11188 - DNA, 39 bp, Artificial Sequence
  primer
gtaaaacgacggccagtccaaagagtcagaagccacatc

SEQ ID NO: 11189 - DNA, 21 bp, Artificial Sequence
  primer
atacatggaaagcaagcatgg

SEQ ID NO: 11190 - DNA, 36 bp, Artificial Sequence
  primer
gtaaaacgacggccagtgccttgctgagagggtcag

SEQ ID NO: 11191 - DNA, 24 bp, Artificial Sequence
  primer
acacacccaagtcctagttgtatg

SEQ ID NO: 11192 - DNA, 22 bp, Artificial Sequence
  primer
tccctttctatggctgtctttg

SEQ ID NO: 11193 - DNA, 38 bp, Artificial Sequence
  primer
gtaaaacgacggccagtacagaactgtattcctcgggc

SEQ ID NO: 11194 - DNA, 22 bp, Artificial Sequence
  primer
ggagaatctgccacatcttcag

SEQ ID NO: 11195 - DNA, 21 bp, Artificial Sequence
  primer
gctctttctcctgcctttcac

SEQ ID NO: 11196 - DNA, 38 bp, Artificial Sequence
  primer
gtaaaacgacggccagtatgatgggtgactgtcctctg

SEQ ID NO: 11197 - DNA, 38 bp, Artificial Sequence
  primer
gtaaaacgacggccagtggtggtggttgttcttccatc

SEQ ID NO: 11198 - DNA, 21 bp, Artificial Sequence
  primer
agtcagtgatgaaagctgccc

SEQ ID NO: 11199 - DNA, 38 bp, Artificial Sequence
  primer
gtaaaacgacggccagttgggcaattatgctacctttg

SEQ ID NO: 11200 - DNA, 38 bp, Artificial Sequence
  primer
gtaaaacgacggccagttgagtatccttggcctgtgtg

SEQ ID NO: 11201 - DNA, 38 bp, Artificial Sequence
  primer
gtaaaacgacggccagtgtgaattgaacaatggcgatg

SEQ ID NO: 11202 - DNA, 38 bp, Artificial Sequence
  primer
gtaaaacgacggccagttcaataggacattgggatggc

SEQ ID NO: 11203 - DNA, 19 bp, Artificial Sequence
  primer
tcacagatgggtgcagagg

SEQ ID NO: 11204 - DNA, 19 bp, Artificial Sequence
  primer
agctggagccttccagatg

SEQ ID NO: 11205 - DNA, 40 bp, Artificial Sequence
  primer
gtaaaacgacggccagtgactgacactttaatgctgaggg

SEQ ID NO: 11206 - DNA, 36 bp, Artificial Sequence
  primer
gtaaaacgacggccagtatacaaagcaatgtggccg

SEQ ID NO: 11207 - DNA, 25 bp, Artificial Sequence
  primer
ttgaagaatttggaagtccttctct

SEQ ID NO: 11208 - DNA, 21 bp, Artificial Sequence
  primer
cacaaacacagttcctccacc

SEQ ID NO: 11209 - DNA, 21 bp, Artificial Sequence
  primer
tgcgtatttcagaaggtggtg

SEQ ID NO: 11210 - DNA, 39 bp, Artificial Sequence
  primer
gtaaaacgacggccagtgaaggaagtgcgtgataagtgc

SEQ ID NO: 11211 - DNA, 39 bp, Artificial Sequence
  primer
gtaaaacgacggccagtcagcctttctgatatgccagtg

SEQ ID NO: 11212 - DNA, 37 bp, Artificial Sequence
  primer
gtaaaacgacggccagttgatgtctgcattgcattcg

SEQ ID NO: 11213 - DNA, 21 bp, Artificial Sequence
  primer
ctcctctagcttgcctggatg

SEQ ID NO: 11214 - DNA, 22 bp, Artificial Sequence
  primer
cagtacatgggtaaggcagagc

SEQ ID NO: 11215 - DNA, 21 bp, Artificial Sequence
  primer
ttcatgaatcgaggccttagc

SEQ ID NO: 11216 - DNA, 21 bp, Artificial Sequence
  primer
gctttgatttcatcccgagag

SEQ ID NO: 11217 - DNA, 19 bp, Artificial Sequence
  primer
tttgttccagtgccatccc

SEQ ID NO: 11218 - DNA, 38 bp, Artificial Sequence
  primer
gtaaaacgacggccagttgcacaggtctctggttgaag

SEQ ID NO: 11219 - DNA, 38 bp, Artificial Sequence
  primer
gtaaaacgacggccagttccatgcctacttcttgggac

SEQ ID NO: 11220 - DNA, 26 bp, Artificial Sequence
  primer
tgcctaagaatatgatctgtctttcc

SEQ ID NO: 11221 - DNA, 39 bp, Artificial Sequence
  primer
gtaaaacgacggccagtagtggatgttaagattggcacc

SEQ ID NO: 11222 - DNA, 38 bp, Artificial Sequence
  primer
gtaaaacgacggccagtctatcccagtctatgcccagc

SEQ ID NO: 11223 - DNA, 39 bp, Artificial Sequence
  primer
gtaaaacgacggccagtcggtgacagtgttagcattctg

SEQ ID NO: 11224 - DNA, 24 bp, Artificial Sequence
  primer
tctccattaacagactcttagccc

SEQ ID NO: 11225 - DNA, 40 bp, Artificial Sequence
  primer
gtaaaacgacggccagtgagtggtcactgggtaatttgag

SEQ ID NO: 11226 - DNA, 18 bp, Artificial Sequence
  primer
aagacgaagacagggccg

SEQ ID NO: 11227 - DNA, 18 bp, Artificial Sequence
  primer
aaagccgagcagcagcag

SEQ ID NO: 11228 - DNA, 35 bp, Artificial Sequence
  primer
gtaaaacgacggccagtaaaggagctgcaggacgg

SEQ ID NO: 11229 - DNA, 38 bp, Artificial Sequence
  primer
gtaaaacgacggccagtgaacaataacctcacggagcc

SEQ ID NO: 11230 - DNA, 19 bp, Artificial Sequence
  primer
ctcctcgtcgtcttcgtcc

SEQ ID NO: 11231 - DNA, 20 bp, Artificial Sequence
  primer
accctcaaccaactgctcac

SEQ ID NO: 11232 - DNA, 22 bp, Artificial Sequence
  primer
aggttggtctcattgctctttc

SEQ ID NO: 11233 - DNA, 21 bp, Artificial Sequence
  primer
tccttcctggctcagtttagg

SEQ ID NO: 11234 - DNA, 21 bp, Artificial Sequence
  primer
acaaccagcaaagtcctcacc

SEQ ID NO: 11235 - DNA, 39 bp, Artificial Sequence
  primer
gtaaaacgacggccagtcagtcccataaccctttcacag

SEQ ID NO: 11236 - DNA, 24 bp, Artificial Sequence
  primer
aaagaacgtgtgtgatgtatttgc

SEQ ID NO: 11237 - DNA, 38 bp, Artificial Sequence
  primer
gtaaaacgacggccagtttggctggatctctttgtgtg

SEQ ID NO: 11238 - DNA, 38 bp, Artificial Sequence
  primer
gtaaaacgacggccagttcccaggataaggatggagag

SEQ ID NO: 11239 - DNA, 40 bp, Artificial Sequence
  primer
gtaaaacgacggccagtttgaatgacattgtttggtgttc

SEQ ID NO: 11240 - DNA, 21 bp, Artificial Sequence
  primer
cacagcactatttggctccag

SEQ ID NO: 11241 - DNA, 21 bp, Artificial Sequence
  primer
gccaacaattctgcaggtaag

SEQ ID NO: 11242 - DNA, 41 bp, Artificial Sequence
  primer
gtaaaacgacggccagtcaagagacttctgagacccttagc

SEQ ID NO: 11243 - DNA, 22 bp, Artificial Sequence
  primer
gaataccttacagcctgatggg

SEQ ID NO: 11244 - DNA, 21 bp, Artificial Sequence
  primer
ggccttaggaagaactttccc

SEQ ID NO: 11245 - DNA, 38 bp, Artificial Sequence
  primer
gtaaaacgacggccagtggctgaagataagtgcatggg

SEQ ID NO: 11246 - DNA, 37 bp, Artificial Sequence
  primer
gtaaaacgacggccagtgaactctgaagagggcctgg

SEQ ID NO: 11247 - DNA, 39 bp, Artificial Sequence
  primer
gtaaaacgacggccagtcagagtgaggtaagcatgaccc

SEQ ID NO: 11248 - DNA, 38 bp, Artificial Sequence
  primer
gtaaaacgacggccagtgtgagtaaagcctggtctcgg

SEQ ID NO: 11249 - DNA, 38 bp, Artificial Sequence
  primer
gtaaaacgacggccagtggaagaaagagtggtggttgc

SEQ ID NO: 11250 - DNA, 21 bp, Artificial Sequence
  primer
atgtacagcgtgccatacagc

SEQ ID NO: 11251 - DNA, 19 bp, Artificial Sequence
  primer
gcctatcatggcgtgaacc

SEQ ID NO: 11252 - DNA, 21 bp, Artificial Sequence
  primer
cctccatctaactaccagccc

SEQ ID NO: 11253 - DNA, 21 bp, Artificial Sequence
  primer
agacagaaactgccttccacc

SEQ ID NO: 11254 - DNA, 21 bp, Artificial Sequence
  primer
ggagaacctttgggaaaggag

SEQ ID NO: 11255 - DNA, 38 bp, Artificial Sequence
  primer
gtaaaacgacggccagtaaggacaagccagcttcagag

SEQ ID NO: 11256 - DNA, 38 bp, Artificial Sequence
  primer
gtaaaacgacggccagtagggtacaccagggacaacag

SEQ ID NO: 11257 - DNA, 21 bp, Artificial Sequence
  primer
ttgagatgtccaaacacccag

SEQ ID NO: 11258 - DNA, 21 bp, Artificial Sequence
  primer
gtcctggacggactcctacac

SEQ ID NO: 11259 - DNA, 21 bp, Artificial Sequence
  primer
gcagtgcagaagggcagtatc

SEQ ID NO: 11260 - DNA, 38 bp, Artificial Sequence
  primer
gtaaaacgacggccagtatctcccagacagaaactgcc

SEQ ID NO: 11261 - DNA, 38 bp, Artificial Sequence
  primer
gtaaaacgacggccagtaactcaacatggcccataacg

SEQ ID NO: 11262 - DNA, 37 bp, Artificial Sequence
  primer
gtaaaacgacggccagtaccaccaccacgcactacag

SEQ ID NO: 11263 - DNA, 22 bp, Artificial Sequence
  primer
gcactacagcagcagctaaacc

SEQ ID NO: 11264 - DNA, 18 bp, Artificial Sequence
  primer
ccagaaccagcacccgtc

SEQ ID NO: 11265 - DNA, 41 bp, Artificial Sequence
  primer
gtaaaacgacggccagttctttaatgtcttgctggatgttt

SEQ ID NO: 11266 - DNA, 21 bp, Artificial Sequence
  primer
agaaagcagcgtgtcgatttg

SEQ ID NO: 11267 - DNA, 20 bp, Artificial Sequence
  primer
cttgatctcccgaagtgctg

SEQ ID NO: 11268 - DNA, 40 bp, Artificial Sequence
  primer
gtaaaacgacggccagtgaggcaagatcttattggttcaa

SEQ ID NO: 11269 - DNA, 40 bp, Artificial Sequence
  primer
gtaaaacgacggccagtaattaaatgtggctgtgtcttgg

SEQ ID NO: 11270 - DNA, 20 bp, Artificial Sequence
  primer
ctgccacatcagtccatgtc

SEQ ID NO: 11271 - DNA, 38 bp, Artificial Sequence
  primer
gtaaaacgacggccagtagtgagccaagatcacaccac

SEQ ID NO: 11272 - DNA, 36 bp, Artificial Sequence
  primer
gtaaaacgacggccagtctctggtaggaagcgctgg

SEQ ID NO: 11273 - DNA, 37 bp, Artificial Sequence
  primer
gtaaaacgacggccagttaccgatcgatccgaaacac

SEQ ID NO: 11274 - DNA, 21 bp, Artificial Sequence
  primer
ttgcattgagtttatctgcgg

SEQ ID NO: 11275 - DNA, 39 bp, Artificial Sequence
  primer
gtaaaacgacggccagtgctgtgttctgtattcaaggga

SEQ ID NO: 11276 - DNA, 30 bp, Artificial Sequence
  primer
tggagtaactcttaagtactcttcacttct

SEQ ID NO: 11277 - DNA, 38 bp, Artificial Sequence
  primer
gtaaaacgacggccagtagccaccatacctagcctgtg

SEQ ID NO: 11278 - DNA, 40 bp, Artificial Sequence
  primer
gtaaaacgacggccagttctgacagaaacaagtctcatgg

SEQ ID NO: 11279 - DNA, 39 bp, Artificial Sequence
  primer
gtaaaacgacggccagtaacgttatgcaacattgtcctg

SEQ ID NO: 11280 - DNA, 44 bp, Artificial Sequence
  primer
gtaaaacgacggccagttcatctgatgtttcatactgttacaaa

SEQ ID NO: 11281 - DNA, 20 bp, Artificial Sequence
  primer
atgtgttcaccagtgatggc

SEQ ID NO: 11282 - DNA, 21 bp, Artificial Sequence
  primer
gcctggtatgatatgtgctcc

SEQ ID NO: 11283 - DNA, 38 bp, Artificial Sequence
  primer
gtaaaacgacggccagtattgcctccacatggctttag

SEQ ID NO: 11284 - DNA, 42 bp, Artificial Sequence
  primer
gtaaaacgacggccagtgtaaacatactgctgttgttcatgt

SEQ ID NO: 11285 - DNA, 21 bp, Artificial Sequence
  primer
tttcagaggactcctgttgcc

SEQ ID NO: 11286 - DNA, 21 bp, Artificial Sequence
  primer
tgtggcacaaactgtttcaag

SEQ ID NO: 11287 - DNA, 21 bp, Artificial Sequence
  primer
tattgctgttggaggaggacc

SEQ ID NO: 11288 - DNA, 21 bp, Artificial Sequence
  primer
cagctggtagccagtcacaag

SEQ ID NO: 11289 - DNA, 21 bp, Artificial Sequence
  primer
tgttcttgctaatccagcagc

SEQ ID NO: 11290 - DNA, 38 bp, Artificial Sequence
  primer
gtaaaacgacggccagtgaaacgtggtccttcaacacc

SEQ ID NO: 11291 - DNA, 38 bp, Artificial Sequence
  primer
gtaaaacgacggccagtattgccaggtccactgatctc

SEQ ID NO: 11292 - DNA, 38 bp, Artificial Sequence
  primer
gtaaaacgacggccagtaggaagcaaaggaagcaacag

SEQ ID NO: 11293 - DNA, 21 bp, Artificial Sequence
  primer
aggtgagaatggagcatctgg

SEQ ID NO: 11294 - DNA, 39 bp, Artificial Sequence
  primer
gtaaaacgacggccagtgcccaagtgtagttgtctcacc

SEQ ID NO: 11295 - DNA, 21 bp, Artificial Sequence
  primer
ttcggtctacaaatggcacag

SEQ ID NO: 11296 - DNA, 39 bp, Artificial Sequence
  primer
gtaaaacgacggccagtcaatgtggtattaccttcgtgg

SEQ ID NO: 11297 - DNA, 25 bp, Artificial Sequence
  primer
tgattccacttggaaatataagcag

SEQ ID NO: 11298 - DNA, 38 bp, Artificial Sequence
  primer
gtaaaacgacggccagtatgcagcaactgaacatggag

SEQ ID NO: 11299 - DNA, 21 bp, Artificial Sequence
  primer
ggcagggtggtcatagttgtc

SEQ ID NO: 11300 - DNA, 21 bp, Artificial Sequence
  primer
gcatgccttgaaacccttatc

SEQ ID NO: 11301 - DNA, 20 bp, Artificial Sequence
  primer
atgcttccctctcttcctgc

SEQ ID NO: 11302 - DNA, 38 bp, Artificial Sequence
  primer
gtaaaacgacggccagtgtttctgcaaatgcgtgaatg

SEQ ID NO: 11303 - DNA, 20 bp, Artificial Sequence
  primer
gcagggccatgaaactacag

SEQ ID NO: 11304 - DNA, 36 bp, Artificial Sequence
  primer
gtaaaacgacggccagtagtgggtctttccttgggc

SEQ ID NO: 11305 - DNA, 38 bp, Artificial Sequence
  primer
gtaaaacgacggccagtcatttctgtcttgcagccttg

SEQ ID NO: 11306 - DNA, 37 bp, Artificial Sequence
  primer
gtaaaacgacggccagtagtgctcctggcatggagag

SEQ ID NO: 11307 - DNA, 38 bp, Artificial Sequence
  primer
gtaaaacgacggccagtaagtccaagggaagaaccagg

SEQ ID NO: 11308 - DNA, 37 bp, Artificial Sequence
  primer
gtaaaacgacggccagtgcatgttcctgccttgagtg

SEQ ID NO: 11309 - DNA, 18 bp, Artificial Sequence
  primer
gaacccaggaggcagagc

SEQ ID NO: 11310 - DNA, 38 bp, Artificial Sequence
  primer
gtaaaacgacggccagtctgagctgggaggatcacttg

SEQ ID NO: 11311 - DNA, 21 bp, Artificial Sequence
  primer
tcagagtcatgccactctgtg

SEQ ID NO: 11312 - DNA, 20 bp, Artificial Sequence
  primer
aggaagaggacggaggtttg

SEQ ID NO: 11313 - DNA, 38 bp, Artificial Sequence
  primer
gtaaaacgacggccagtaagatgtccctgtaagggtgg

SEQ ID NO: 11314 - DNA, 21 bp, Artificial Sequence
  primer
ggcttgttacagctgattccc

SEQ ID NO: 11315 - DNA, 21 bp, Artificial Sequence
  primer
tgggcatacacggaatctttc

SEQ ID NO: 11316 - DNA, 38 bp, Artificial Sequence
  primer
gtaaaacgacggccagtcagagacccaccaacctcaac

SEQ ID NO: 11317 - DNA, 37 bp, Artificial Sequence
  primer
gtaaaacgacggccagtgccagttccctgtgttcaag

SEQ ID NO: 11318 - DNA, 38 bp, Artificial Sequence
  primer
gtaaaacgacggccagtggcagcatcagagaggacaac

SEQ ID NO: 11319 - DNA, 38 bp, Artificial Sequence
  primer
gtaaaacgacggccagtacagcatttggatcttctccc

SEQ ID NO: 11320 - DNA, 37 bp, Artificial Sequence
  primer
gtaaaacgacggccagtagcacccataattccctccc

SEQ ID NO: 11321 - DNA, 38 bp, Artificial Sequence
  primer
gtaaaacgacggccagtcagggtacaacctgaattggg

SEQ ID NO: 11322 - DNA, 37 bp, Artificial Sequence
  primer
gtaaaacgacggccagtcgtcctgtatcagtccctgg

SEQ ID NO: 11323 - DNA, 35 bp, Artificial Sequence
  primer
gtaaaacgacggccagtgtccggctgtgggacttg

SEQ ID NO: 11324 - DNA, 39 bp, Artificial Sequence
  primer
gtaaaacgacggccagtcgaatgaaggatgagagattgg

SEQ ID NO: 11325 - DNA, 21 bp, Artificial Sequence
  primer
gggactgtacactgagggagg

SEQ ID NO: 11326 - DNA, 38 bp, Artificial Sequence
  primer
gtaaaacgacggccagtgcttgtcctcattggtttgtg

SEQ ID NO: 11327 - DNA, 37 bp, Artificial Sequence
  primer
gtaaaacgacggccagttgtctgtgcctgtctttccc

SEQ ID NO: 11328 - DNA, 44 bp, Artificial Sequence
  primer
gtaaaacgacggccagtaatattcttaatgcttcaaacacaacc

SEQ ID NO: 11329 - DNA, 22 bp, Artificial Sequence
  primer
tcaccacatggtgctaagaaag

SEQ ID NO: 11330 - DNA, 21 bp, Artificial Sequence
  primer
taagagactgggctgtcatgc

SEQ ID NO: 11331 - DNA, 38 bp, Artificial Sequence
  primer
gtaaaacgacggccagttacttaagcagtcgtgggcag

SEQ ID NO: 11332 - DNA, 38 bp, Artificial Sequence
  primer
gtaaaacgacggccagtgatggacgatttggattgaac

SEQ ID NO: 11333 - DNA, 37 bp, Artificial Sequence
  primer
gtaaaacgacggccagtggaaggacccatgtcttcag

SEQ ID NO: 11334 - DNA, 43 bp, Artificial Sequence
  primer
gtaaaacgacggccagtaggagctatttataatgaagctgttt

SEQ ID NO: 11335 - DNA, 39 bp, Artificial Sequence
  primer
gtaaaacgacggccagtgcccgtatttcctcttcttacc

SEQ ID NO: 11336 - DNA, 39 bp, Artificial Sequence
  primer
gtaaaacgacggccagtcagatctttgattctgaatgcc

SEQ ID NO: 11337 - DNA, 22 bp, Artificial Sequence
  primer
gagtggtaaatggagtgaaggg

SEQ ID NO: 11338 - DNA, 38 bp, Artificial Sequence
  primer
gtaaaacgacggccagtgggaaattagaaattgaccgc

SEQ ID NO: 11339 - DNA, 20 bp, Artificial Sequence
  primer
ggaggatcacttgagcccag

SEQ ID NO: 11340 - DNA, 21 bp, Artificial Sequence
  primer
cgtttcaagccagagacattg

SEQ ID NO: 11341 - DNA, 44 bp, Artificial Sequence
  primer
gtaaaacgacggccagtctcctcctccactgatatgttattaag

SEQ ID NO: 11342 - DNA, 21 bp, Artificial Sequence
  primer
cctgtgcccttcatattcttg

SEQ ID NO: 11343 - DNA, 43 bp, Artificial Sequence
  primer
gtaaaacgacggccagttctgtaagcacagactaggaagtgac

SEQ ID NO: 11344 - DNA, 39 bp, Artificial Sequence
  primer
gtaaaacgacggccagtcctcaaattcttggcacaaatg

SEQ ID NO: 11345 - DNA, 21 bp, Artificial Sequence
  primer
aaatgcagcctttagaaaccc

SEQ ID NO: 11346 - DNA, 21 bp, Artificial Sequence
  primer
aaagggaagacgaagcaagac

SEQ ID NO: 11347 - DNA, 38 bp, Artificial Sequence
  primer
gtaaaacgacggccagtcaaaccaatgcatccaacaac

SEQ ID NO: 11348 - DNA, 21 bp, Artificial Sequence
  primer
ccagcattgaggatgtagcag

SEQ ID NO: 11349 - DNA, 27 bp, Artificial Sequence
  primer
gaaagaaatgtcagtgtagtctgttga

SEQ ID NO: 11350 - DNA, 26 bp, Artificial Sequence
  primer
accaagaaatgtaattgttaggtctg

SEQ ID NO: 11351 - DNA, 26 bp, Artificial Sequence
  primer
gacgtttgatagaattgtcatcattt

SEQ ID NO: 11352 - DNA, 40 bp, Artificial Sequence
  primer
gtaaaacgacggccagttttctaatttgctgttagctggg

SEQ ID NO: 11353 - DNA, 42 bp, Artificial Sequence
  primer
gtaaaacgacggccagttcaatatatgtggtttggaactgaa

SEQ ID NO: 11354 - DNA, 38 bp, Artificial Sequence
  primer
gtaaaacgacggccagtctgtggtgttgactgggtgtc

SEQ ID NO: 11355 - DNA, 26 bp, Artificial Sequence
  primer
tcatggaccatatgtatttaatggaa

SEQ ID NO: 11356 - DNA, 40 bp, Artificial Sequence
  primer
gtaaaacgacggccagtaacagatacggtctgagcagttg

SEQ ID NO: 11357 - DNA, 41 bp, Artificial Sequence
  primer
gtaaaacgacggccagttttattcttcaccatcatgcactc

SEQ ID NO: 11358 - DNA, 47 bp, Artificial Sequence
  primer
gtaaaacgacggccagttgtagtcttaaatagtagatctgtttgcac

SEQ ID NO: 11359 - DNA, 25 bp, Artificial Sequence
  primer
ttcttagatgcctatcaaccttcac

SEQ ID NO: 11360 - DNA, 25 bp, Artificial Sequence
  primer
gggaatacctatattcatcattggc

SEQ ID NO: 11361 - DNA, 38 bp, Artificial Sequence
  primer
gtaaaacgacggccagttgtgtgtgcctgtttaccctc

SEQ ID NO: 11362 - DNA, 24 bp, Artificial Sequence
  primer
tttattgtaaacgtcaacattccc

SEQ ID NO: 11363 - DNA, 42 bp, Artificial Sequence
  primer
gtaaaacgacggccagtcatagcaaacaataaatgtcagtgg

SEQ ID NO: 11364 - DNA, 39 bp, Artificial Sequence
  primer
gtaaaacgacggccagtcacgaacagtcttgctagtccc

SEQ ID NO: 11365 - DNA, 21 bp, Artificial Sequence
  primer
ggccatgggcttatttatgtg

SEQ ID NO: 11366 - DNA, 23 bp, Artificial Sequence
  primer
gcctaggcaatagaataagatcc

SEQ ID NO: 11367 - DNA, 42 bp, Artificial Sequence
  primer
gtaaaacgacggccagtggctcaatatctgagagtttagaca

SEQ ID NO: 11368 - DNA, 24 bp, Artificial Sequence
  primer
cctcctgttgctaagagataaacc

SEQ ID NO: 11369 - DNA, 38 bp, Artificial Sequence
  primer
gtaaaacgacggccagttttccaaggtcctttcccttc

SEQ ID NO: 11370 - DNA, 21 bp, Artificial Sequence
  primer
tgattgctaatttgattcccg

SEQ ID NO: 11371 - DNA, 38 bp, Artificial Sequence
  primer
gtaaaacgacggccagtatttccatcattggaagagcc

SEQ ID NO: 11372 - DNA, 23 bp, Artificial Sequence
  primer
catggataataatggcaaagagg

SEQ ID NO: 11373 - DNA, 40 bp, Artificial Sequence
  primer
gtaaaacgacggccagtggaacagaacagttcatctttgc

SEQ ID NO: 11374 - DNA, 23 bp, Artificial Sequence
  primer
gaacaaagaatcactttgcatgg

SEQ ID NO: 11375 - DNA, 23 bp, Artificial Sequence
  primer
tctggtcaagtattcagggacag

SEQ ID NO: 11376 - DNA, 37 bp, Artificial Sequence
  primer
gtaaaacgacggccagtaccacctccagtcaatgtcg

SEQ ID NO: 11377 - DNA, 39 bp, Artificial Sequence
  primer
gtaaaacgacggccagtggatgtgcatactttgtttgcc

SEQ ID NO: 11378 - DNA, 43 bp, Artificial Sequence
  primer
gtaaaacgacggccagttttctgtaggactaaattcaaatggc

SEQ ID NO: 11379 - DNA, 38 bp, Artificial Sequence
  primer
gtaaaacgacggccagtcctcaaccttattcagcagcc

SEQ ID NO: 11380 - DNA, 40 bp, Artificial Sequence
  primer
gtaaaacgacggccagttctgtagttgggcactgtctagc

SEQ ID NO: 11381 - DNA, 38 bp, Artificial Sequence
  primer
gtaaaacgacggccagtcaaactgcagtccttcgagtc

SEQ ID NO: 11382 - DNA, 18 bp, Artificial Sequence
  primer
tatctcagagagcgcggg

SEQ ID NO: 11383 - DNA, 21 bp, Artificial Sequence
  primer
tagggagagtgctcctgttcc

SEQ ID NO: 11384 - DNA, 38 bp, Artificial Sequence
  primer
gtaaaacgacggccagttaccttattcctcctgcagcc

SEQ ID NO: 11385 - DNA, 21 bp, Artificial Sequence
  primer
ggttgcagatagaaaggaggc

SEQ ID NO: 11386 - DNA, 21 bp, Artificial Sequence
  primer
ctaggagagagaatcggctgg

SEQ ID NO: 11387 - DNA, 37 bp, Artificial Sequence
  primer
gtaaaacgacggccagtgggctcagaggaggctacag

SEQ ID NO: 11388 - DNA, 38 bp, Artificial Sequence
  primer
gtaaaacgacggccagtacctcttgctcctcaggtcag

SEQ ID NO: 11389 - DNA, 20 bp, Artificial Sequence
  primer
aacagcacagaacagcaggg

SEQ ID NO: 11390 - DNA, 21 bp, Artificial Sequence
  primer
ttcaagggctgcttctacacc

SEQ ID NO: 11391 - DNA, 38 bp, Artificial Sequence
  primer
gtaaaacgacggccagtataaaggtggctccagaaagg

SEQ ID NO: 11392 - DNA, 20 bp, Artificial Sequence
  primer
tttcttaaggaggcggatgc

SEQ ID NO: 11393 - DNA, 38 bp, Artificial Sequence
  primer
gtaaaacgacggccagtaggacctgatgcaatccattc

SEQ ID NO: 11394 - DNA, 23 bp, Artificial Sequence
  primer
gtctgtgtgtaaatgtgtctggg

SEQ ID NO: 11395 - DNA, 37 bp, Artificial Sequence
  primer
gtaaaacgacggccagtatttcagatgggccttgtgg

SEQ ID NO: 11396 - DNA, 40 bp, Artificial Sequence
  primer
gtaaaacgacggccagttcccaaaccagaagtgattattg

SEQ ID NO: 11397 - DNA, 38 bp, Artificial Sequence
  primer
gtaaaacgacggccagtgtaataatgagggctgcctgc

SEQ ID NO: 11398 - DNA, 38 bp, Artificial Sequence
  primer
gtaaaacgacggccagtaagtgttgctggctctgtcac

SEQ ID NO: 11399 - DNA, 20 bp, Artificial Sequence
  primer
ccctttgggcaaattgtttc

SEQ ID NO: 11400 - DNA, 40 bp, Artificial Sequence
  primer
gtaaaacgacggccagtgttgcatatgtattgaagcctgg

SEQ ID NO: 11401 - DNA, 43 bp, Artificial Sequence
  primer
gtaaaacgacggccagtgaagtatagcactgtcactggagatg

SEQ ID NO: 11402 - DNA, 38 bp, Artificial Sequence
  primer
gtaaaacgacggccagtttgtttagagccatgattggg

SEQ ID NO: 11403 - DNA, 44 bp, Artificial Sequence
  primer
gtaaaacgacggccagtgaaatatgttaccaggtttcatcagag

SEQ ID NO: 11404 - DNA, 38 bp, Artificial Sequence
  primer
gtaaaacgacggccagtaacgaaacagaccaaggttcc

SEQ ID NO: 11405 - DNA, 21 bp, Artificial Sequence
  primer
aaaggtccttgtggtccagtc

SEQ ID NO: 11406 - DNA, 38 bp, Artificial Sequence
  primer
gtaaaacgacggccagtcagcagctacccttatggctc

SEQ ID NO: 11407 - DNA, 38 bp, Artificial Sequence
  primer
gtaaaacgacggccagtctccaagcatcaccttaaccc

SEQ ID NO: 11408 - DNA, 38 bp, Artificial Sequence
  primer
gtaaaacgacggccagtgcctacagatctgagccttcc

SEQ ID NO: 11409 - DNA, 21 bp, Artificial Sequence
  primer
ctggaggatttggaccttgtg

SEQ ID NO: 11410 - DNA, 20 bp, Artificial Sequence
  primer
actcggacgagggctacaac

SEQ ID NO: 11411 - DNA, 21 bp, Artificial Sequence
  primer
tcggacgagggctacaactac

SEQ ID NO: 11412 - DNA, 22 bp, Artificial Sequence
  primer
aaatttgggtggagtattgtgg

SEQ ID NO: 11413 - DNA, 44 bp, Artificial Sequence
  primer
gtaaaacgacggccagtgcacatgtatacacacacctttatttg

SEQ ID NO: 11414 - DNA, 38 bp, Artificial Sequence
  primer
gtaaaacgacggccagtcagagccctgttgagtcactg

SEQ ID NO: 11415 - DNA, 39 bp, Artificial Sequence
  primer
gtaaaacgacggccagtaaggagaaagggaaggattgag

SEQ ID NO: 11416 - DNA, 39 bp, Artificial Sequence
  primer
gtaaaacgacggccagtggcataaacatgtagccgtagc

SEQ ID NO: 11417 - DNA, 38 bp, Artificial Sequence
  primer
gtaaaacgacggccagtttgacctcaaacagtcctccc

SEQ ID NO: 11418 - DNA, 39 bp, Artificial Sequence
  primer
gtaaaacgacggccagtgggttctctccttgtatttgcc

SEQ ID NO: 11419 - DNA, 38 bp, Artificial Sequence
  primer
gtaaaacgacggccagtggatttccctggcttaagagg

SEQ ID NO: 11420 - DNA, 41 bp, Artificial Sequence
  primer
gtaaaacgacggccagtgccagtggtaataatggtaacagc

SEQ ID NO: 11421 - DNA, 44 bp, Artificial Sequence
  primer
gtaaaacgacggccagttggtgttagataatctgtaaatccagg

SEQ ID NO: 11422 - DNA, 40 bp, Artificial Sequence
  primer
gtaaaacgacggccagtccattctaacaggtgtgaagtga

SEQ ID NO: 11423 - DNA, 41 bp, Artificial Sequence
  primer
gtaaaacgacggccagtgctttacaggtgcagttaaaccac

SEQ ID NO: 11424 - DNA, 22 bp, Artificial Sequence
  primer
aataggtgcttggttccgagtc

SEQ ID NO: 11425 - DNA, 39 bp, Artificial Sequence
  primer
gtaaaacgacggccagtaatgcatttgagaaagcggtag

SEQ ID NO: 11426 - DNA, 21 bp, Artificial Sequence
  primer
gaggaatttggtaatccagcc

SEQ ID NO: 11427 - DNA, 23 bp, Artificial Sequence
  primer
aaatgtagcatgatttattgggc

SEQ ID NO: 11428 - DNA, 21 bp, Artificial Sequence
  primer
tgaggatcactttccatgcac

SEQ ID NO: 11429 - DNA, 35 bp, Artificial Sequence
  primer
gtaaaacgacggccagtggtgatctgcctgccttg

SEQ ID NO: 11430 - DNA, 21 bp, Artificial Sequence
  primer
cagctgggagaacagaaagtg

SEQ ID NO: 11431 - DNA, 39 bp, Artificial Sequence
  primer
gtaaaacgacggccagtaattcatgatttgttggcttgg

SEQ ID NO: 11432 - DNA, 39 bp, Artificial Sequence
  primer
gtaaaacgacggccagtgccaggagctttgtgtaatttg

SEQ ID NO: 11433 - DNA, 38 bp, Artificial Sequence
  primer
gtaaaacgacggccagtaagaatggaggctgcaatcac

SEQ ID NO: 11434 - DNA, 38 bp, Artificial Sequence
  primer
gtaaaacgacggccagttcactcctctgcctatggagg

SEQ ID NO: 11435 - DNA, 38 bp, Artificial Sequence
  primer
gtaaaacgacggccagtagacctgctcttgcactttgg

SEQ ID NO: 11436 - DNA, 22 bp, Artificial Sequence
  primer
cccaattcatcctctatttggc

SEQ ID NO: 11437 - DNA, 38 bp, Artificial Sequence
  primer
gtaaaacgacggccagtagttcctgtgagcctgaggtg

SEQ ID NO: 11438 - DNA, 21 bp, Artificial Sequence
  primer
tttgactccttggaggtcctg

SEQ ID NO: 11439 - DNA, 38 bp, Artificial Sequence
  primer
gtaaaacgacggccagttatctacatccagtgagcggg

SEQ ID NO: 11440 - DNA, 21 bp, Artificial Sequence
  primer
aatatgcacctacgcatccag

SEQ ID NO: 11441 - DNA, 23 bp, Artificial Sequence
  primer
cctgaagatggtattgatcttgc

SEQ ID NO: 11442 - DNA, 38 bp, Artificial Sequence
  primer
gtaaaacgacggccagtacatgtgtgggacagaattgg

SEQ ID NO: 11443 - DNA, 24 bp, Artificial Sequence
  primer
cagtgatcatatttgggaggtagg

SEQ ID NO: 11444 - DNA, 39 bp, Artificial Sequence
  primer
gtaaaacgacggccagtggaatccacctccaatacaaag

SEQ ID NO: 11445 - DNA, 36 bp, Artificial Sequence
  primer
gtaaaacgacggccagtcttgtagtgcgggactggg

SEQ ID NO: 11446 - DNA, 38 bp, Artificial Sequence
  primer
gtaaaacgacggccagtgttcgtcccactcatccagac

SEQ ID NO: 11447 - DNA, 38 bp, Artificial Sequence
  primer
gtaaaacgacggccagtggctggtggaagctcactaag

SEQ ID NO: 11448 - DNA, 38 bp, Artificial Sequence
  primer
gtaaaacgacggccagtcatgaacgacaagggtgtcag

SEQ ID NO: 11449 - DNA, 38 bp, Artificial Sequence
  primer
gtaaaacgacggccagtaggtgtaggcgggacacatag

SEQ ID NO: 11450 - DNA, 38 bp, Artificial Sequence
  primer
gtaaaacgacggccagttctaaggtagacggagagcgg

SEQ ID NO: 11451 - DNA, 38 bp, Artificial Sequence
  primer
gtaaaacgacggccagttccttctcttccttgcaccac

SEQ ID NO: 11452 - DNA, 21 bp, Artificial Sequence
  primer
acgagctccacaacctactgg

SEQ ID NO: 11453 - DNA, 21 bp, Artificial Sequence
  primer
ggagcattggatgagaaggag

SEQ ID NO: 11454 - DNA, 21 bp, Artificial Sequence
  primer
atcctctcacctgagcttccc

SEQ ID NO: 11455 - DNA, 35 bp, Artificial Sequence
  primer
gtaaaacgacggccagtaccaaggagccgttggag

SEQ ID NO: 11456 - DNA, 40 bp, Artificial Sequence
  primer
gtaaaacgacggccagttgcatctcttcaagaattatggc

SEQ ID NO: 11457 - DNA, 39 bp, Artificial Sequence
  primer
gtaaaacgacggccagttcaggagcactttgcctctaac

SEQ ID NO: 11458 - DNA, 23 bp, Artificial Sequence
  primer
aaagtattaaagggtgctgagcc

SEQ ID NO: 11459 - DNA, 40 bp, Artificial Sequence
  primer
gtaaaacgacggccagtacaaataggccttaacattgtgg

SEQ ID NO: 11460 - DNA, 41 bp, Artificial Sequence
  primer
gtaaaacgacggccagtggattgctacgatgatttcttcag

SEQ ID NO: 11461 - DNA, 22 bp, Artificial Sequence
  primer
tctcttgaagttcgggtaatgg

SEQ ID NO: 11462 - DNA, 38 bp, Artificial Sequence
  primer
gtaaaacgacggccagtttgtttgaaactcctgggctc

SEQ ID NO: 11463 - DNA, 21 bp, Artificial Sequence
  primer
ccagctggaaggactatctgg

SEQ ID NO: 11464 - DNA, 40 bp, Artificial Sequence
  primer
gtaaaacgacggccagtcaatcccaggctttctgtttatc

SEQ ID NO: 11465 - DNA, 21 bp, Artificial Sequence
  primer
accttctactgctttggctgg

SEQ ID NO: 11466 - DNA, 38 bp, Artificial Sequence
  primer
gtaaaacgacggccagttcggaaccgactctactcctg

SEQ ID NO: 11467 - DNA, 21 bp, Artificial Sequence
  primer
ggaagtgagaaatgagccctg

SEQ ID NO: 11468 - DNA, 38 bp, Artificial Sequence
  primer
gtaaaacgacggccagtatgagagtgactggttctgcg

SEQ ID NO: 11469 - DNA, 38 bp, Artificial Sequence
  primer
gtaaaacgacggccagtctgttgtcactttcattgccc

SEQ ID NO: 11470 - DNA, 39 bp, Artificial Sequence
  primer
gtaaaacgacggccagtccagaactatcaggactacccg

SEQ ID NO: 11471 - DNA, 20 bp, Artificial Sequence
  primer
caatgagcacgcttctttcc

SEQ ID NO: 11472 - DNA, 20 bp, Artificial Sequence
  primer
ctgccatagcaggaagggag

SEQ ID NO: 11473 - DNA, 39 bp, Artificial Sequence
  primer
gtaaaacgacggccagtcccagccacaacaactatgttt

SEQ ID NO: 11474 - DNA, 21 bp, Artificial Sequence
  primer
tcccatccactgtgatttctg

SEQ ID NO: 11475 - DNA, 21 bp, Artificial Sequence
  primer
gttcgtataaattccgcctcg

SEQ ID NO: 11476 - DNA, 38 bp, Artificial Sequence
  primer
gtaaaacgacggccagttttcctgggagccatttctaa

SEQ ID NO: 11477 - DNA, 21 bp, Artificial Sequence
  primer
gccagcacattctgtttgaag

SEQ ID NO: 11478 - DNA, 21 bp, Artificial Sequence
  primer
aatcattgcaatcttgttggg

SEQ ID NO: 11479 - DNA, 36 bp, Artificial Sequence
  primer
gtaaaacgacggccagtcgagcgtgatagccaacag

SEQ ID NO: 11480 - DNA, 38 bp, Artificial Sequence
  primer
gtaaaacgacggccagttttattgtgggccgattatgg

SEQ ID NO: 11481 - DNA, 38 bp, Artificial Sequence
  primer
gtaaaacgacggccagtaacatcaagaccctggagcac

SEQ ID NO: 11482 - DNA, 37 bp, Artificial Sequence
  primer
gtaaaacgacggccagtctctgggccattagaggagg

SEQ ID NO: 11483 - DNA, 38 bp, Artificial Sequence
  primer
gtaaaacgacggccagtgggtctgacaaactctccctg

SEQ ID NO: 11484 - DNA, 18 bp, Artificial Sequence
  primer
gacctggcagtgagctgg

SEQ ID NO: 11485 - DNA, 21 bp, Artificial Sequence
  primer
atcgttgaagatgggtgatgg

SEQ ID NO: 11486 - DNA, 38 bp, Artificial Sequence
  primer
gtaaaacgacggccagttcagggtcccatttaataccc

SEQ ID NO: 11487 - DNA, 38 bp, Artificial Sequence
  primer
gtaaaacgacggccagtaatgtttagaaagggctgggc

SEQ ID NO: 11488 - DNA, 21 bp, Artificial Sequence
  primer
cccagcagttcaaggctacag

SEQ ID NO: 11489 - DNA, 39 bp, Artificial Sequence
  primer
gtaaaacgacggccagtccaataacctgtgttcccttcc

SEQ ID NO: 11490 - DNA, 38 bp, Artificial Sequence
  primer
gtaaaacgacggccagtcccgacttatccactttaggg

SEQ ID NO: 11491 - DNA, 21 bp, Artificial Sequence
  primer
tggtggcacacaactgtagtc

SEQ ID NO: 11492 - DNA, 21 bp, Artificial Sequence
  primer
taagtggcactgtcaccctct

SEQ ID NO: 11493 - DNA, 38 bp, Artificial Sequence
  primer
gtaaaacgacggccagtaggaagcagcctcttacctgc

SEQ ID NO: 11494 - DNA, 25 bp, Artificial Sequence
  primer
cagtgtccttgaagttacagaatcc

SEQ ID NO: 11495 - DNA, 44 bp, Artificial Sequence
  primer
gtaaaacgacggccagttcttagtaaatgcaagtacacatttgg

SEQ ID NO: 11496 - DNA, 21 bp, Artificial Sequence
  primer
gggtttctggctttccatact

SEQ ID NO: 11497 - DNA, 21 bp, Artificial Sequence
  primer
caacaggatggaatgttggtg

SEQ ID NO: 11498 - DNA, 40 bp, Artificial Sequence
  primer
gtaaaacgacggccagtttgtactccctagcatccaacag

SEQ ID NO: 11499 - DNA, 23 bp, Artificial Sequence
  primer
tgctaaatatttcacttgggtgc

SEQ ID NO: 11500 - DNA, 37 bp, Artificial Sequence
  primer
gtaaaacgacggccagtctttctccactccctggtcc

SEQ ID NO: 11501 - DNA, 21 bp, Artificial Sequence
  primer
cgaaacttggaaagaggaagc

SEQ ID NO: 11502 - DNA, 21 bp, Artificial Sequence
  primer
aacactgactccacaacctgg

SEQ ID NO: 11503 - DNA, 40 bp, Artificial Sequence
  primer
gtaaaacgacggccagtttggccttcataaatgagatgag

SEQ ID NO: 11504 - DNA, 18 bp, Artificial Sequence
  primer
gaacctgggaagcgaagg

SEQ ID NO: 11505 - DNA, 21 bp, Artificial Sequence
  primer
agcaaactccctaaagctggc

SEQ ID NO: 11506 - DNA, 21 bp, Artificial Sequence
  primer
tccatcgtttgtcttggactg

SEQ ID NO: 11507 - DNA, 18 bp, Artificial Sequence
  primer
agcgcgtctctctcctcc

SEQ ID NO: 11508 - DNA, 20 bp, Artificial Sequence
  primer
gccatgcactgaattatgcc

SEQ ID NO: 11509 - DNA, 21 bp, Artificial Sequence
  primer
aaaggaggtcatgctgatttg

SEQ ID NO: 11510 - DNA, 27 bp, Artificial Sequence
  primer
agatataggtccattagcattcaagat

SEQ ID NO: 11511 - DNA, 21 bp, Artificial Sequence
  primer
atcagcctaggcactgagatg

SEQ ID NO: 11512 - DNA, 41 bp, Artificial Sequence
  primer
gtaaaacgacggccagttgtatgagaatatggcttcactgc

SEQ ID NO: 11513 - DNA, 22 bp, Artificial Sequence
  primer
cgtgtcagttaaggctcctttc

SEQ ID NO: 11514 - DNA, 19 bp, Artificial Sequence
  primer
atgccacaagccacaaatg

SEQ ID NO: 11515 - DNA, 42 bp, Artificial Sequence
  primer
gtaaaacgacggccagtttgcatatgaagggtaatttctttg

SEQ ID NO: 11516 - DNA, 44 bp, Artificial Sequence
  primer
gtaaaacgacggccagtagataatacttaggttaggaaatgccc

SEQ ID NO: 11517 - DNA, 43 bp, Artificial Sequence
  primer
gtaaaacgacggccagtcatgggtttcagtactaaagatttgc

SEQ ID NO: 11518 - DNA, 42 bp, Artificial Sequence
  primer
gtaaaacgacggccagttgtcagtgtaagaactaatcctggg

SEQ ID NO: 11519 - DNA, 22 bp, Artificial Sequence
  primer
ggccacatagcaagatcctatc

SEQ ID NO: 11520 - DNA, 38 bp, Artificial Sequence
  primer
gtaaaacgacggccagtaagctcggtctgtccaatgag

SEQ ID NO: 11521 - DNA, 41 bp, Artificial Sequence
  primer
gtaaaacgacggccagttggcaatttggttaagaggttatt

SEQ ID NO: 11522 - DNA, 21 bp, Artificial Sequence
  primer
gcaaatatctctgagaggcgg

SEQ ID NO: 11523 - DNA, 40 bp, Artificial Sequence
  primer
gtaaaacgacggccagtgctcttaaattgaacagggtgtc

SEQ ID NO: 11524 - DNA, 23 bp, Artificial Sequence
  primer
ccgaactttgaaacacattcttc

SEQ ID NO: 11525 - DNA, 18 bp, Artificial Sequence
  primer
gcggtgagccaagattgc

SEQ ID NO: 11526 - DNA, 38 bp, Artificial Sequence
  primer
gtaaaacgacggccagtgtccaaccagaaacttggagc

SEQ ID NO: 11527 - DNA, 38 bp, Artificial Sequence
  primer
gtaaaacgacggccagtgggagtgagaaatccaaagga

SEQ ID NO: 11528 - DNA, 38 bp, Artificial Sequence
  primer
gtaaaacgacggccagtgtctttccgggtttagcttcc

SEQ ID NO: 11529 - DNA, 38 bp, Artificial Sequence
  primer
gtaaaacgacggccagtaccctgtattctttcttgggc

SEQ ID NO: 11530 - DNA, 22 bp, Artificial Sequence
  primer
tttaccaccactgcttcttcct

SEQ ID NO: 11531 - DNA, 37 bp, Artificial Sequence
  primer
gtaaaacgacggccagtggagctttggtgtggaacag

SEQ ID NO: 11532 - DNA, 21 bp, Artificial Sequence
  primer
gattgcttggtatagggcctg

SEQ ID NO: 11533 - DNA, 21 bp, Artificial Sequence
  primer
tagtgtgcatgcgagtctgtg

SEQ ID NO: 11534 - DNA, 21 bp, Artificial Sequence
  primer
gatatggcatgttggatgagc

SEQ ID NO: 11535 - DNA, 43 bp, Artificial Sequence
  primer
gtaaaacgacggccagttgagaatagggttaactttgttggaa

SEQ ID NO: 11536 - DNA, 39 bp, Artificial Sequence
  primer
gtaaaacgacggccagtcctttataccaacgttcccttg

SEQ ID NO: 11537 - DNA, 21 bp, Artificial Sequence
  primer
ggacaagccttacattgcacc

SEQ ID NO: 11538 - DNA, 37 bp, Artificial Sequence
  primer
gtaaaacgacggccagtaggagtcccaggaaggtgag

SEQ ID NO: 11539 - DNA, 38 bp, Artificial Sequence
  primer
gtaaaacgacggccagttttgcgacctctgagtcactg

SEQ ID NO: 11540 - DNA, 20 bp, Artificial Sequence
  primer
ctcgcagtcgtatggagagg

SEQ ID NO: 11541 - DNA, 35 bp, Artificial Sequence
  primer
gtaaaacgacggccagtacggtgacgggtactggg

SEQ ID NO: 11542 - DNA, 19 bp, Artificial Sequence
  primer
accctgtagccggtctgtg

SEQ ID NO: 11543 - DNA, 37 bp, Artificial Sequence
  primer
gtaaaacgacggccagtgctgaagaagaagggcaagg

SEQ ID NO: 11544 - DNA, 37 bp, Artificial Sequence
  primer
gtaaaacgacggccagtgtctgtccactcaaggctgc

SEQ ID NO: 11545 - DNA, 37 bp, Artificial Sequence; identical to SEQ ID NO: 11544
  primer

SEQ ID NO: 11546 - DNA, 21 bp, Artificial Sequence
  primer
gagatcaacaaggtgggtgtg

SEQ ID NO: 11547 - DNA, 36 bp, Artificial Sequence
  primer
gtaaaacgacggccagttagagccacccttggagcc

SEQ ID NO: 11548 - DNA, 19 bp, Artificial Sequence
  primer
accctgtagccggtctgtg

SEQ ID NO: 11549 - DNA, 38 bp, Artificial Sequence
  primer
gtaaaacgacggccagtcactcccaatttcctttgctc

SEQ ID NO: 11550 - DNA, 41 bp, Artificial Sequence
  primer
gtaaaacgacggccagttctaacctctgtgccttagcttct

SEQ ID NO: 11551 - DNA, 21 bp, Artificial Sequence
  primer
cgagaagcagactggactgtg

SEQ ID NO: 11552 - DNA, 38 bp, Artificial Sequence
  primer
gtaaaacgacggccagtagggagtggatactcgacagc

SEQ ID NO: 11553 - DNA, 20 bp, Artificial Sequence
  primer
gccatgtcgtttgctgagag

SEQ ID NO: 11554 - DNA, 39 bp, Artificial Sequence
  primer
gtaaaacgacggccagtgccttcacagcccttgagttac

SEQ ID NO: 11555 - DNA, 45 bp, Artificial Sequence
  primer
gtaaaacgacggccagtttcaatgatatgacttctagttgtgctt

SEQ ID NO: 11556 - DNA, 22 bp, Artificial Sequence
  primer
ttgggaaatacactccaaggtc

SEQ ID NO: 11557 - DNA, 21 bp, Artificial Sequence
  primer
tcctctaacatctcggccttc

SEQ ID NO: 11558 - DNA, 38 bp, Artificial Sequence
  primer
gtaaaacgacggccagtgtgctctaccggctcaagttc

SEQ ID NO: 11559 - DNA, 38 bp, Artificial Sequence
  primer
gtaaaacgacggccagtgaggctgtggtaggtaggtgg

SEQ ID NO: 11560 - DNA, 38 bp, Artificial Sequence
  primer
gtaaaacgacggccagttgtttcctgcctacccatctc

SEQ ID NO: 11561 - DNA, 38 bp, Artificial Sequence
  primer
gtaaaacgacggccagttcaccatcattggtgcagaag

SEQ ID NO: 11562 - DNA, 43 bp, Artificial Sequence
  primer
gtaaaacgacggccagttcatagtattatgtattcgggcatca

SEQ ID NO: 11563 - DNA, 41 bp, Artificial Sequence
  primer
gtaaaacgacggccagtgcccgattatgttaaagtagaagc

SEQ ID NO: 11564 - DNA, 38 bp, Artificial Sequence
  primer
gtaaaacgacggccagtgaagcaatttcccacaaactg

SEQ ID NO: 11565 - DNA, 38 bp, Artificial Sequence
  primer
gtaaaacgacggccagtttcaaacagagtccagcacag

SEQ ID NO: 11566 - DNA, 21 bp, Artificial Sequence
  primer
aatctagatgtgccctccctg

SEQ ID NO: 11567 - DNA, 39 bp, Artificial Sequence
  primer
gtaaaacgacggccagttttattcaaacaacctctgggc

SEQ ID NO: 11568 - DNA, 43 bp, Artificial Sequence
  primer
gtaaaacgacggccagtaagtgctataatatacctcagcagcc

SEQ ID NO: 11569 - DNA, 39 bp, Artificial Sequence
  primer
gtaaaacgacggccagtgctcaaaggatcatttcttccc

SEQ ID NO: 11570 - DNA, 27 bp, Artificial Sequence
  primer
tgattattctaggattcactgctattg

SEQ ID NO: 11571 - DNA, 22 bp, Artificial Sequence
  primer
tctgtgccctgaaataagatgg

SEQ ID NO: 11572 - DNA, 38 bp, Artificial Sequence
  primer
gtaaaacgacggccagtgctgttcaaaggtgtgtggtg

SEQ ID NO: 11573 - DNA, 39 bp, Artificial Sequence
  primer
gtaaaacgacggccagttttaccctgagaataaccacgg

SEQ ID NO: 11574 - DNA, 38 bp, Artificial Sequence
  primer
gtaaaacgacggccagtatgtatttgcagggtgtggtg

SEQ ID NO: 11575 - DNA, 22 bp, Artificial Sequence
  primer
tttcctcatggtttatgcattg

SEQ ID NO: 11576 - DNA, 20 bp, Artificial Sequence
  primer
ggccagctctgaggtaagtg

SEQ ID NO: 11577 - DNA, 38 bp, Artificial Sequence
  primer
gtaaaacgacggccagttatgctcagaaaggctttggc

SEQ ID NO: 11578 - DNA, 21 bp, Artificial Sequence
  primer
cagcaccactgttctctagcc

SEQ ID NO: 11579 - DNA, 37 bp, Artificial Sequence
  primer
gtaaaacgacggccagtgtcaggcttggagagcaaag

SEQ ID NO: 11580 - DNA, 39 bp, Artificial Sequence
  primer
gtaaaacgacggccagttgtctgtgtttgacacacttgg

SEQ ID NO: 11581 - DNA, 41 bp, Artificial Sequence
  primer
gtaaaacgacggccagtcaattggcaaatatgtggtctaaa

SEQ ID NO: 11582 - DNA, 27 bp, Artificial Sequence
  primer
tttatgttcacacacaagtgctttaat

SEQ ID NO: 11583 - DNA, 21 bp, Artificial Sequence
  primer
catagcgggagctttgcttag

SEQ ID NO: 11584 - DNA, 39 bp, Artificial Sequence
  primer
gtaaaacgacggccagtgcagcttctctgaactgatgtg

SEQ ID NO: 11585 - DNA, 20 bp, Artificial Sequence
  primer
gaagccagacgtgttccatt

SEQ ID NO: 11586 - DNA, 37 bp, Artificial Sequence
  primer
gtaaaacgacggccagtctctccagggcctttgtagg

SEQ ID NO: 11587 - DNA, 42 bp, Artificial Sequence
  primer
gtaaaacgacggccagttcttgctaaagtcccttacagtttg

SEQ ID NO: 11588 - DNA, 38 bp, Artificial Sequence
  primer
gtaaaacgacggccagttgctgtgtgatggataaagcc

SEQ ID NO: 11589 - DNA, 19 bp, Artificial Sequence
  primer
tgcagtgagtggaggttgc

SEQ ID NO: 11590 - DNA, 37 bp, Artificial Sequence
  primer
gtaaaacgacggccagtgacgacccagggtgagttta

SEQ ID NO: 11591 - DNA, 38 bp, Artificial Sequence
  primer
gtaaaacgacggccagtattgcagagtttgaaattggg

SEQ ID NO: 11592 - DNA, 40 bp, Artificial Sequence
  primer
gtaaaacgacggccagttccaatgctgacaattgtttctc

SEQ ID NO: 11593 - DNA, 21 bp, Artificial Sequence
  primer
gtaatgtgaaaggcaaatggc

SEQ ID NO: 11594 - DNA, 38 bp, Artificial Sequence
  primer
gtaaaacgacggccagtatacaagccaccatacctggc

SEQ ID NO: 11595 - DNA, 38 bp, Artificial Sequence
  primer
gtaaaacgacggccagtatttgtggagctttggtttcc

SEQ ID NO: 11596 - DNA, 22 bp, Artificial Sequence
  primer
tttggaagggaatctggaataa

SEQ ID NO: 11597 - DNA, 41 bp, Artificial Sequence
  primer
gtaaaacgacggccagtttgataagcagaactcctattccc

SEQ ID NO: 11598 - DNA, 22 bp, Artificial Sequence
  primer
ccttggccgtagtattgatctc

SEQ ID NO: 11599 - DNA, 21 bp, Artificial Sequence
  primer
gcaatgtgtgagaattcaggc

SEQ ID NO: 11600 - DNA, 43 bp, Artificial Sequence
  primer
gtaaaacgacggccagttttaaatcactagcactcaattctgg

SEQ ID NO: 11601 - DNA, 21 bp, Artificial Sequence
  primer
aaccgggcttctctgtgtaag

SEQ ID NO: 11602 - DNA, 44 bp, Artificial Sequence
  primer
gtaaaacgacggccagtggatctgaagtcggtatataagtggag

SEQ ID NO: 11603 - DNA, 21 bp, Artificial Sequence
  primer
catccacaagcttcaggttcc

SEQ ID NO: 11604 - DNA, 21 bp, Artificial Sequence
  primer
gggcgatagagtgagatcctg

SEQ ID NO: 11605 - DNA, 21 bp, Artificial Sequence
  primer
tgtctgtgtgggtttcgtttc

SEQ ID NO: 11606 - DNA, 38 bp, Artificial Sequence
  primer
gtaaaacgacggccagttgttgctcaagggttcactgt

SEQ ID NO: 11607 - DNA, 42 bp, Artificial Sequence
  primer
gtaaaacgacggccagtcagtaagcatgctatgctacagtaa

SEQ ID NO: 11608 - DNA, 40 bp, Artificial Sequence
  primer
gtaaaacgacggccagtttgcaagacttgtgtatttcacc

SEQ ID NO: 11609 - DNA, 38 bp, Artificial Sequence
  primer
gtaaaacgacggccagtaaaggtggacgctgttgtctc

SEQ ID NO: 11610 - DNA, 21 bp, Artificial Sequence
  primer
ttgagtgtggaagaaagtggg

SEQ ID NO: 11611 - DNA, 21 bp, Artificial Sequence
  primer
cgtctgaatggactttgaagg

SEQ ID NO: 11612 - DNA, 43 bp, Artificial Sequence
  primer
gtaaaacgacggccagtttctcctgatacaatgaaatgtgttc

SEQ ID NO: 11613 - DNA, 41 bp, Artificial Sequence
  primer
gtaaaacgacggccagtcggtgaagaaggatatagaactgc

SEQ ID NO: 11614 - DNA, 38 bp, Artificial Sequence
  primer
gtaaaacgacggccagtacgtgtggctagcttgtgatg

SEQ ID NO: 11615 - DNA, 21 bp, Artificial Sequence
  primer
tttcctgaatttaccactggc

SEQ ID NO: 11616 - DNA, 21 bp, Artificial Sequence
  primer
gtcaggaacacgcatcatttg

SEQ ID NO: 11617 - DNA, 21 bp, Artificial Sequence
  primer
agtaatcctcccacctcagcc

SEQ ID NO: 11618 - DNA, 38 bp, Artificial Sequence
  primer
gtaaaacgacggccagttgcttcggctctacctgattc

SEQ ID NO: 11619 - DNA, 21 bp, Artificial Sequence
  primer
gtgtgtaacctctgggaatgg

SEQ ID NO: 11620 - DNA, 38 bp, Artificial Sequence
  primer
gtaaaacgacggccagtgacggaggtgagcttggtaag

SEQ ID NO: 11621 - DNA, 42 bp, Artificial Sequence
  primer
gtaaaacgacggccagttgatgtagggatatgttaagcttgg

SEQ ID NO: 11622 - DNA, 21 bp, Artificial Sequence
  primer
tttacttggaggcatctttcg

SEQ ID NO: 11623 - DNA, 39 bp, Artificial Sequence
  primer
gtaaaacgacggccagtccaagcttcagattaaccatcc

SEQ ID NO: 11624 - DNA, 21 bp, Artificial Sequence
  primer
agagggctgacaattcaacag

SEQ ID NO: 11625 - DNA, 21 bp, Artificial Sequence
  primer
gccaaagatgtacctcacagc

SEQ ID NO: 11626 - DNA, 37 bp, Artificial Sequence
  primer
gtaaaacgacggccagtggtagtcagccagctagccc

SEQ ID NO: 11627 - DNA, 24 bp, Artificial Sequence
  primer
cagaaaggtaagaagtgcatgagg

SEQ ID NO: 11628 - DNA, 38 bp, Artificial Sequence
  primer
gtaaaacgacggccagtgacgatttccctgtcttccag

SEQ ID NO: 11629 - DNA, 19 bp, Artificial Sequence
  primer
ggactcgctctcgttctgc

SEQ ID NO: 11630 - DNA, 21 bp, Artificial Sequence
  primer
ctctcaggccacattctccag

SEQ ID NO: 11631 - DNA, 21 bp, Artificial Sequence
  primer
ggaacttagccatggaacctg

SEQ ID NO: 11632 - DNA, 38 bp, Artificial Sequence
  primer
gtaaaacgacggccagtctgagcagctaagtctgggtg

SEQ ID NO: 11633 - DNA, 21 bp, Artificial Sequence
  primer
cctaatggagctagcccaacc

SEQ ID NO: 11634 - DNA, 38 bp, Artificial Sequence
  primer
gtaaaacgacggccagtgagctaggatcccacaactgc

SEQ ID NO: 11635 - DNA, 19 bp, Artificial Sequence
  primer
caggtcgtggctgatctcc

SEQ ID NO: 11636 - DNA, 37 bp, Artificial Sequence
  primer
gtaaaacgacggccagtattctgtcacgcctcacctg

SEQ ID NO: 11637 - DNA, 39 bp, Artificial Sequence
  primer
gtaaaacgacggccagtttgaggtagctctctctttgcc

SEQ ID NO: 11638 - DNA, 38 bp, Artificial Sequence
  primer
gtaaaacgacggccagtgcagaaacacccaataccctc

SEQ ID NO: 11639 - DNA, 21 bp, Artificial Sequence
  primer
cagggacactgagttgtctgg

SEQ ID NO: 11640 - DNA, 21 bp, Artificial Sequence
  primer
aggtgtcagcatacctcaccc

SEQ ID NO: 11641 - DNA, 37 bp, Artificial Sequence
  primer
gtaaaacgacggccagtttccagtggagcaggatctc

SEQ ID NO: 11642 - DNA, 38 bp, Artificial Sequence
  primer
gtaaaacgacggccagtcgttagtcacaccctgcagtc

SEQ ID NO: 11643 - DNA, 21 bp, Artificial Sequence
  primer
agatctgaccaggcctattgc

SEQ ID NO: 11644 - DNA, 21 bp, Artificial Sequence
  primer
tggatgtcagctgtggttatg

SEQ ID NO: 11645 - DNA, 38 bp, Artificial Sequence
  primer
gtaaaacgacggccagttctcccatatcccatttccag

SEQ ID NO: 11646 - DNA, 38 bp, Artificial Sequence
  primer
gtaaaacgacggccagtgaattccaggagacccaaagc

SEQ ID NO: 11647 - DNA, 38 bp, Artificial Sequence
  primer
gtaaaacgacggccagttgagagggaaagggatttgtg

SEQ ID NO: 11648 - DNA, 21 bp, Artificial Sequence
  primer
agcatccagactcttccttgc

SEQ ID NO: 11649 - DNA, 38 bp, Artificial Sequence
  primer
gtaaaacgacggccagtaaccaggaccaggaatgaaag

SEQ ID NO: 11650 - DNA, 22 bp, Artificial Sequence
  primer
cacttgatattgtgggtgatgc

SEQ ID NO: 11651 - DNA, 43 bp, Artificial Sequence
  primer
gtaaaacgacggccagttgcacctatctctatcccttcattag

SEQ ID NO: 11652 - DNA, 24 bp, Artificial Sequence
  primer
ggattcatataaactcagccaacc

SEQ ID NO: 11653 - DNA, 38 bp, Artificial Sequence
  primer
gtaaaacgacggccagtcctgccttattgcaaggtatg

SEQ ID NO: 11654 - DNA, 40 bp, Artificial Sequence
  primer
gtaaaacgacggccagttgtgccttaaggagacttgattg

SEQ ID NO: 11655 - DNA, 38 bp, Artificial Sequence
  primer
gtaaaacgacggccagtgccctttgcaggactaaacac

SEQ ID NO: 11656 - DNA, 25 bp, Artificial Sequence
  primer
ttattgttatttctttgaggcctgt

SEQ ID NO: 11657 - DNA, 38 bp, Artificial Sequence
  primer
gtaaaacgacggccagtggagctttcagtggcacctac

SEQ ID NO: 11658 - DNA, 42 bp, Artificial Sequence
  primer
gtaaaacgacggccagtgactattaaattgactgaacctccg

SEQ ID NO: 11659 - DNA, 25 bp, Artificial Sequence
  primer
cgtacgaatagagtttaatgtgcca

SEQ ID NO: 11660 - DNA, 22 bp, Artificial Sequence
  primer
tgcaaagtctcagtgctatgtg

SEQ ID NO: 11661 - DNA, 38 bp, Artificial Sequence
  primer
gtaaaacgacggccagtttattcctaggtcgagctgcc

SEQ ID NO: 11662 - DNA, 38 bp, Artificial Sequence
  primer
gtaaaacgacggccagtagggtgattcagaggtcaagc

SEQ ID NO: 11663 - DNA, 21 bp, Artificial Sequence
  primer
aaggaacaggcaagtgcaaag

SEQ ID NO: 11664 - DNA, 21 bp, Artificial Sequence
  primer
agtagccttggtcactctggg

SEQ ID NO: 11665 - DNA, 20 bp, Artificial Sequence
  primer
ggtctgtcgcttggactcag

SEQ ID NO: 11666 - DNA, 36 bp, Artificial Sequence
  primer
gtaaaacgacggccagtgccatgacaagagagctgg

SEQ ID NO: 11667 - DNA, 38 bp, Artificial Sequence
  primer
gtaaaacgacggccagttaaactgaagagcctcacccg

SEQ ID NO: 11668 - DNA, 38 bp, Artificial Sequence
  primer
gtaaaacgacggccagtaccttgggtcaggattcagtc

SEQ ID NO: 11669 - DNA, 21 bp, Artificial Sequence
  primer
aatggcttctgcaatagcacc

SEQ ID NO: 11670 - DNA, 18 bp, Artificial Sequence
  primer
gcagctgaggctcctgtg

SEQ ID NO: 11671 - DNA, 21 bp, Artificial Sequence
  primer
ggctataccgaaagccacatc

SEQ ID NO: 11672 - DNA, 38 bp, Artificial Sequence
  primer
gtaaaacgacggccagtcagaggtccctgattctgagg

SEQ ID NO: 11673 - DNA, 38 bp, Artificial Sequence
  primer
gtaaaacgacggccagtttgatgagattctgggtgtcc

SEQ ID NO: 11674 - DNA, 44 bp, Artificial Sequence
  primer
gtaaaacgacggccagttgactattactaatgactaccagcacc

SEQ ID NO: 11675 - DNA, 21 bp, Artificial Sequence
  primer
ccaagtgccagcatcatttag

SEQ ID NO: 11676 - DNA, 38 bp, Artificial Sequence
  primer
gtaaaacgacggccagtagctcttgtggccttgaagtg

SEQ ID NO: 11677 - DNA, 39 bp, Artificial Sequence
  primer
gtaaaacgacggccagttgatgacagcaatgagagcaag

SEQ ID NO: 11678 - DNA, 39 bp, Artificial Sequence
  primer
gtaaaacgacggccagtggttctttgcttggttgagatg

SEQ ID NO: 11679 - DNA, 39 bp, Artificial Sequence
  primer
gtaaaacgacggccagttgatgacacaatcacttctcgc

SEQ ID NO: 11680 - DNA, 38 bp, Artificial Sequence
  primer
gtaaaacgacggccagtagggatcaggttgcttgtctg

SEQ ID NO: 11681 - DNA, 21 bp, Artificial Sequence
  primer
cagtgaccagtctggaggatg

SEQ ID NO: 11682 - DNA, 38 bp, Artificial Sequence
  primer
gtaaaacgacggccagtatcctctcttccaccaagcac

SEQ ID NO: 11683 - DNA, 38 bp, Artificial Sequence
  primer
gtaaaacgacggccagtaatttaccaagggaagagccc

SEQ ID NO: 11684 - DNA, 21 bp, Artificial Sequence
  primer
ggcagagccagagactcaatc

SEQ ID NO: 11685 - DNA, 37 bp, Artificial Sequence
  primer
gtaaaacgacggccagtagctgaagaaagccacctcc

SEQ ID NO: 11686 - DNA, 21 bp, Artificial Sequence
  primer
cactggcagagcctgtagttg

SEQ ID NO: 11687 - DNA, 38 bp, Artificial Sequence
  primer
gtaaaacgacggccagttgacctacagggaggctatgg

SEQ ID NO: 11688 - DNA, 39 bp, Artificial Sequence
  primer
gtaaaacgacggccagttggactggagaagagcctagtg

SEQ ID NO: 11689 - DNA, 21 bp, Artificial Sequence
  primer
aaactggaccctggttgagac

SEQ ID NO: 11690 - DNA, 22 bp, Artificial Sequence
  primer
tttgataaacttgttgccctcc

SEQ ID NO: 11691 - DNA, 39 bp, Artificial Sequence
  primer
gtaaaacgacggccagtcccaatgttaaagaacaccctg

SEQ ID NO: 11692 - DNA, 41 bp, Artificial Sequence
  primer
gtaaaacgacggccagtgctggactgaaattactagggcac

SEQ ID NO: 11693 - DNA, 23 bp, Artificial Sequence
  primer
aagagaattgatcagtgccaaag

SEQ ID NO: 11694 - DNA, 21 bp, Artificial Sequence
  primer
cctccatccttactcaccctg

SEQ ID NO: 11695 - DNA, 21 bp, Artificial Sequence
  primer
gaagaggagtgggacgatgac

SEQ ID NO: 11696 - DNA, 38 bp, Artificial Sequence
  primer
gtaaaacgacggccagttgttctggacctctccaagtg

SEQ ID NO: 11697 - DNA, 20 bp, Artificial Sequence
  primer
agacaccaccagccaatgag

SEQ ID NO: 11698 - DNA, 21 bp, Artificial Sequence
  primer
taggtcattgggtgatgcttg

SEQ ID NO: 11699 - DNA, 39 bp, Artificial Sequence
  primer
gtaaaacgacggccagtaaggccctacagagagatgatg

SEQ ID NO: 11700 - DNA, 21 bp, Artificial Sequence
  primer
cagggagtgacatactctggg

SEQ ID NO: 11701 - DNA, 38 bp, Artificial Sequence
  primer
gtaaaacgacggccagttggcagattctttccaacctc

SEQ ID NO: 11702 - DNA, 36 bp, Artificial Sequence
  primer
gtaaaacgacggccagtaccttgtgatctgcccacc

SEQ ID NO: 11703 - DNA, 38 bp, Artificial Sequence
  primer
gtaaaacgacggccagtaaatgatctgccctcctcaac

SEQ ID NO: 11704 - DNA, 22 bp, Artificial Sequence
  primer
ggatcatagggtagtcagcacc

SEQ ID NO: 11705 - DNA, 20 bp, Artificial Sequence
  primer
cgtgtgttgactccgcctac

SEQ ID NO: 11706 - DNA, 39 bp, Artificial Sequence
  primer
gtaaaacgacggccagtaatctggatatgagcatttggg

SEQ ID NO: 11707 - DNA, 38 bp, Artificial Sequence
  primer
gtaaaacgacggccagtgtgttccggtagcttgtgttg

SEQ ID NO: 11708 - DNA, 41 bp, Artificial Sequence
  primer
gtaaaacgacggccagttggtaagggtaatggaaataccag

SEQ ID NO: 11709 - DNA, 21 bp, Artificial Sequence
  primer
ttccatttccctcctctcttc

SEQ ID NO: 11710 - DNA, 40 bp, Artificial Sequence
  primer
gtaaaacgacggccagtggtatccatatcactctccctgc

SEQ ID NO: 11711 - DNA, 38 bp, Artificial Sequence
  primer
gtaaaacgacggccagtcttacggagagatgcatgtgg

SEQ ID NO: 11712 - DNA, 23 bp, Artificial Sequence
  primer
aagggcatgaataggatgcttac

SEQ ID NO: 11713 - DNA, 36 bp, Artificial Sequence
  primer
gtaaaacgacggccagtgcaacagactttctggccc

SEQ ID NO: 11714 - DNA, 21 bp, Artificial Sequence
  primer
agtactaaggcagcattgccc

SEQ ID NO: 11715 - DNA, 37 bp, Artificial Sequence
  primer
gtaaaacgacggccagtggtgcctggcccataaatag

SEQ ID NO: 11716 - DNA, 43 bp, Artificial Sequence
  primer
gtaaaacgacggccagtaaagaccatgaggagataggaaatac

SEQ ID NO: 11717 - DNA, 19 bp, Artificial Sequence
  primer
tgggcaacaagagcgaaac

SEQ ID NO: 11718 - DNA, 38 bp, Artificial Sequence
  primer
gtaaaacgacggccagttgcctcaaggacaatgacaag

SEQ ID NO: 11719 - DNA, 38 bp, Artificial Sequence
  primer
gtaaaacgacggccagttgtttgctgaaactgacaccc

SEQ ID NO: 11720 - DNA, 19 bp, Artificial Sequence
  primer
gcccggcctgtttaatttg

SEQ ID NO: 11721 - DNA, 38 bp, Artificial Sequence
  primer
gtaaaacgacggccagtttcgttgaagagggtagggag

SEQ ID NO: 11722 - DNA, 38 bp, Artificial Sequence
  primer
gtaaaacgacggccagtgccactgcccagtcagtaatc

SEQ ID NO: 11723 - DNA, 38 bp, Artificial Sequence
  primer
gtaaaacgacggccagttaacctgcaggaagtcaaggg

SEQ ID NO: 11724 - DNA, 22 bp, Artificial Sequence
  primer
tgcagtgattgacagtgttgac

SEQ ID NO: 11725 - DNA, 38 bp, Artificial Sequence
  primer
gtaaaacgacggccagtaaggcattgattggcagagag

SEQ ID NO: 11726 - DNA, 22 bp, Artificial Sequence
  primer
ggaatggtggagtagaacttgg

SEQ ID NO: 11727 - DNA, 38 bp, Artificial Sequence
  primer
gtaaaacgacggccagtggaggaggaggagagaaaggc

SEQ ID NO: 11728 - DNA, 21 bp, Artificial Sequence
  primer
catagctgatgatggcagagc

SEQ ID NO: 11729 - DNA, 38 bp, Artificial Sequence
  primer
gtaaaacgacggccagttgggatcaatggatagcagtc

SEQ ID NO: 11730 - DNA, 22 bp, Artificial Sequence
  primer
cctagttcctggtcatttggtg

SEQ ID NO: 11731 - DNA, 38 bp, Artificial Sequence
  primer
gtaaaacgacggccagtgaaggctgctttcccaataag

SEQ ID NO: 11732 - DNA, 21 bp, Artificial Sequence
  primer
agcatttggagaaagcactcc

SEQ ID NO: 11733 - DNA, 21 bp, Artificial Sequence
  primer
attggctataggcgtcacctg

SEQ ID NO: 11734 - DNA, 21 bp, Artificial Sequence
  primer
aaaccacaaaggcagacaagg

SEQ ID NO: 11735 - DNA, 38 bp, Artificial Sequence
  primer
gtaaaacgacggccagtctggttaattcattggctggc

SEQ ID NO: 11736 - DNA, 38 bp, Artificial Sequence
  primer
gtaaaacgacggccagttttgaagtgaaatgcacatgg

SEQ ID NO: 11737 - DNA, 38 bp, Artificial Sequence
  primer
gtaaaacgacggccagttgggacaggctaaaggagatg

SEQ ID NO: 11738 - DNA, 21 bp, Artificial Sequence
  primer
aaggtagacggaggagttccc

SEQ ID NO: 11739 - DNA, 38 bp, Artificial Sequence
  primer
gtaaaacgacggccagtggatatcacccactctgcctc

SEQ ID NO: 11740 - DNA, 38 bp, Artificial Sequence
  primer
gtaaaacgacggccagttctgatgaaggagagctggtg

SEQ ID NO: 11741 - DNA, 38 bp, Artificial Sequence
  primer
gtaaaacgacggccagtctgacttgtgtcctcccgttc

SEQ ID NO: 11742 - DNA, 20 bp, Artificial Sequence
  primer
ctgcatggagagagagccag

SEQ ID NO: 11743 - DNA, 38 bp, Artificial Sequence
  primer
gtaaaacgacggccagtggagtcactgtcaacccagag

SEQ ID NO: 11744 - DNA, 38 bp, Artificial Sequence
  primer
gtaaaacgacggccagtatggaacgtgcctttcagaag

SEQ ID NO: 11745 - DNA, 38 bp, Artificial Sequence
  primer
gtaaaacgacggccagttcagacatttgaggacccttg

SEQ ID NO: 11746 - DNA, 37 bp, Artificial Sequence
  primer
gtaaaacgacggccagtacctgcgtggaatcttaccc

SEQ ID NO: 11747 - DNA, 22 bp, Artificial Sequence
  primer
tgataacctgagaagctggtcc

SEQ ID NO: 11748 - DNA, 38 bp, Artificial Sequence
  primer
gtaaaacgacggccagtgatgacaggatcaggcagaag

SEQ ID NO: 11749 - DNA, 38 bp, Artificial Sequence
  primer
gtaaaacgacggccagttactgacctggcagtgagacc

SEQ ID NO: 11750 - DNA, 38 bp, Artificial Sequence
  primer
gtaaaacgacggccagtttacagaaggtttgaggcagc

SEQ ID NO: 11751 - DNA, 39 bp, Artificial Sequence
  primer
gtaaaacgacggccagttggatgcttagaaagcacatcc

SEQ ID NO: 11752 - DNA, 38 bp, Artificial Sequence
  primer
gtaaaacgacggccagtaaacacaaaggcaacatgcag

SEQ ID NO: 11753 - DNA, 38 bp, Artificial Sequence
  primer
gtaaaacgacggccagtaaaggctttgctcaaggtcac

SEQ ID NO: 11754 - DNA, 38 bp, Artificial Sequence
  primer
gtaaaacgacggccagtctacctacatcccatcccacc

SEQ ID NO: 11755 - DNA, 39 bp, Artificial Sequence
  primer
gtaaaacgacggccagttgtagcagggtttatccattgc

SEQ ID NO: 11756 - DNA, 21 bp, Artificial Sequence
  primer
taaagagcgatgtcgttggag

SEQ ID NO: 11757 - DNA, 36 bp, Artificial Sequence
  primer
gtaaaacgacggccagtagagtggacaccggacacc

SEQ ID NO: 11758 - DNA, 38 bp, Artificial Sequence
  primer
gtaaaacgacggccagttgaactgcaaatggatcatgg

SEQ ID NO: 11759 - DNA, 21 bp, Artificial Sequence
  primer
aaagcttgccaaaccctaatc

SEQ ID NO: 11760 - DNA, 38 bp, Artificial Sequence
  primer
gtaaaacgacggccagtgaagccatttgaagcttctcc

SEQ ID NO: 11761 - DNA, 38 bp, Artificial Sequence
  primer
gtaaaacgacggccagtaaagcagcatctcaccctacc

SEQ ID NO: 11762 - DNA, 21 bp, Artificial Sequence
  primer
ctatcacatgcctgttctggg

SEQ ID NO: 11763 - DNA, 36 bp, Artificial Sequence
  primer
gtaaaacgacggccagtccagtccgcatgctcagta

SEQ ID NO: 11764 - DNA, 18 bp, Artificial Sequence
  primer
cacccgcctcagccttac

SEQ ID NO: 11765 - DNA, 38 bp, Artificial Sequence
  primer
gtaaaacgacggccagtgggtagctggacacagtaggc

SEQ ID NO: 11766 - DNA, 20 bp, Artificial Sequence
  primer
ttgcctgtcagcgttaggag

SEQ ID NO: 11767 - DNA, 21 bp, Artificial Sequence
  primer
ctcagcatctgctccagtgag

SEQ ID NO: 11768 - DNA, 39 bp, Artificial Sequence
  primer
gtaaaacgacggccagtaaagagcaaataccagcagcag

SEQ ID NO: 11769 - DNA, 24 bp, Artificial Sequence
  primer
tgccacagtaatttcctcagaatc

SEQ ID NO: 11770 - DNA, 39 bp, Artificial Sequence
  primer
gtaaaacgacggccagttgtcgtggacatatctttgagc

SEQ ID NO: 11771 - DNA, 39 bp, Artificial Sequence
  primer
gtaaaacgacggccagttgtacaatcatgccattgcttt

SEQ ID NO: 11772 - DNA, 39 bp, Artificial Sequence
  primer
gtaaaacgacggccagtaaatagagcaacctgttcgttt

SEQ ID NO: 11773 - DNA, 37 bp, Artificial Sequence
  primer
gtaaaacgacggccagtcccagtgatatgcatgggtc

SEQ ID NO: 11774 - DNA, 38 bp, Artificial Sequence
  primer
gtaaaacgacggccagtactgacaagcacaaagcaggt

SEQ ID NO: 11775 - DNA, 39 bp, Artificial Sequence
  primer
gtaaaacgacggccagtcataaatgggccacaaattgac

SEQ ID NO: 11776 - DNA, 40 bp, Artificial Sequence
  primer
gtaaaacgacggccagttggatgcagctagtctgtttctt

SEQ ID NO: 11777 - DNA, 44 bp, Artificial Sequence
  primer
gtaaaacgacggccagtgatactcagtttcaagttcctcactgt

SEQ ID NO: 11778 - DNA, 37 bp, Artificial Sequence
  primer
gtaaaacgacggccagtcaatgaaccgagatcatgcc

SEQ ID NO: 11779 - DNA, 21 bp, Artificial Sequence
  primer
ttctagccttgctttgccatt

SEQ ID NO: 11780 - DNA, 35 bp, Artificial Sequence
  primer
gtaaaacgacggccagtaagtggcttgagcctggg

SEQ ID NO: 11781 - DNA, 20 bp, Artificial Sequence
  primer
aaagttcaccggacagaccc

SEQ ID NO: 11782 - DNA, 21 bp, Artificial Sequence
  primer
gacagagcaatgtccagggag

SEQ ID NO: 11783 - DNA, 21 bp, Artificial Sequence
  primer
aagatgctcttgtcacctccg

SEQ ID NO: 11784 - DNA, 20 bp, Artificial Sequence
  primer
cgctgccagcactaaagatg

SEQ ID NO: 11785 - DNA, 21 bp, Artificial Sequence
  primer
ttgtggaaatgagtggaggag

SEQ ID NO: 11786 - DNA, 39 bp, Artificial Sequence
  primer
gtaaaacgacggccagtgggaattgtataatgtcctcgc

SEQ ID NO: 11787 - DNA, 37 bp, Artificial Sequence
  primer
gtaaaacgacggccagtcttgtgagtccaggctgctc

SEQ ID NO: 11788 - DNA, 38 bp, Artificial Sequence
  primer
gtaaaacgacggccagtcctggttatttgtctgagggc

SEQ ID NO: 11789 - DNA, 21 bp, Artificial Sequence
  primer
tcacatgggattcatttgaca

SEQ ID NO: 11790 - DNA, 38 bp, Artificial Sequence
  primer
gtaaaacgacggccagtggacctgtgggagttctgttg

SEQ ID NO: 11791 - DNA, 38 bp, Artificial Sequence
  primer
gtaaaacgacggccagtgtgctcgtgccataagaggag

SEQ ID NO: 11792 - DNA, 36 bp, Artificial Sequence
  primer
gtaaaacgacggccagtaaatcttgcagcagcggtc

SEQ ID NO: 11793 - DNA, 39 bp, Artificial Sequence
  primer
gtaaaacgacggccagtcctcaggcaacttaaacattgg

SEQ ID NO: 11794 - DNA, 38 bp, Artificial Sequence
  primer
gtaaaacgacggccagtttcagaggtgaatttgggaac

SEQ ID NO: 11795 - DNA, 37 bp, Artificial Sequence
  primer
gtaaaacgacggccagtgaggaaggtcccaagaccac

SEQ ID NO: 11796 - DNA, 21 bp, Artificial Sequence
  primer
cgacagaagaacgttgaatgc

SEQ ID NO: 11797 - DNA, 21 bp, Artificial Sequence
  primer
ttctgagattccttgtggcag

SEQ ID NO: 11798 - DNA, 38 bp, Artificial Sequence
  primer
gtaaaacgacggccagtgaaccagtttgtcgtcagtgg

SEQ ID NO: 11799 - DNA, 38 bp, Artificial Sequence
  primer
gtaaaacgacggccagtctgtcgtggtgaacactctgc

SEQ ID NO: 11800 - DNA, 38 bp, Artificial Sequence
  primer
gtaaaacgacggccagtaacataatgagacccgcatcc

SEQ ID NO: 11801 - DNA, 38 bp, Artificial Sequence
  primer
gtaaaacgacggccagttgaggaagagggagtggtgtc

SEQ ID NO: 11802 - DNA, 21 bp, Artificial Sequence
  primer
cctggtatgggtgaagtcagg

SEQ ID NO: 11803 - DNA, 38 bp, Artificial Sequence
  primer
gtaaaacgacggccagttgaaaggtgaggtgttgttgc

SEQ ID NO: 11804 - DNA, 21 bp, Artificial Sequence
  primer
ggcagatacagcttccacctg

SEQ ID NO: 11805 - DNA, 21 bp, Artificial Sequence
  primer
ggatagagggcacagagttcc

SEQ ID NO: 11806 - DNA, 38 bp, Artificial Sequence
  primer
gtaaaacgacggccagtagcacagtagcgcaatcacag

SEQ ID NO: 11807 - DNA, 38 bp, Artificial Sequence
  primer
gtaaaacgacggccagtaagaagatggcgtgagtcgag

SEQ ID NO: 11808 - DNA, 36 bp, Artificial Sequence
  primer
gtaaaacgacggccagtctgtggcccgtctgtatcc

SEQ ID NO: 11809 - DNA, 38 bp, Artificial Sequence
  primer
gtaaaacgacggccagtaggacttgagtgtcctgtccc

SEQ ID NO: 11810 - DNA, 38 bp, Artificial Sequence
  primer
gtaaaacgacggccagtactcctgcagagatggcactg

SEQ ID NO: 11811 - DNA, 38 bp, Artificial Sequence
  primer
gtaaaacgacggccagtgttcgtcttacccttccctcc

SEQ ID NO: 11812 - DNA, 21 bp, Artificial Sequence
  primer
gagcaccaaccaaagcagtag

SEQ ID NO: 11813 - DNA, 21 bp, Artificial Sequence
  primer
tgctcagcaattctatcccag

SEQ ID NO: 11814 - DNA, 38 bp, Artificial Sequence
  primer
gtaaaacgacggccagtttcccatccaccaaatgaaag

SEQ ID NO: 11815 - DNA, 25 bp, Artificial Sequence
  primer
ttgcctctagtctctgtttacttgg

SEQ ID NO: 11816 - DNA, 39 bp, Artificial Sequence
  primer
gtaaaacgacggccagtttgtgcactgactttgttgacc

SEQ ID NO: 11817 - DNA, 38 bp, Artificial Sequence
  primer
gtaaaacgacggccagtgagggctacaaaggtcacacc

SEQ ID NO: 11818 - DNA, 39 bp, Artificial Sequence
  primer
gtaaaacgacggccagttcactaggctgttgttcttccc

SEQ ID NO: 11819 - DNA, 21 bp, Artificial Sequence
  primer
aatcccagggtgtatgttccc

SEQ ID NO: 11820 - DNA, 22 bp, Artificial Sequence
  primer
gaaaccattctgtgaaagccag

SEQ ID NO: 11821 - DNA, 38 bp, Artificial Sequence
  primer
gtaaaacgacggccagtcctcaagacccatctccattc

SEQ ID NO: 11822 - DNA, 21 bp, Artificial Sequence
  primer
cctcaatgctgctatcccttc

SEQ ID NO: 11823 - DNA, 41 bp, Artificial Sequence
  primer
gtaaaacgacggccagttccctttatggctttgatagttgt

SEQ ID NO: 11824 - DNA, 20 bp, Artificial Sequence
  primer
gtgcatttggagaatgggag

SEQ ID NO: 11825 - DNA, 21 bp, Artificial Sequence
  primer
ctcaagggttcttaacctggg

SEQ ID NO: 11826 - DNA, 21 bp, Artificial Sequence
  primer
tcacaaacgattcttggcaac

SEQ ID NO: 11827 - DNA, 19 bp, Artificial Sequence
  primer
cactgcactccagcactcc

SEQ ID NO: 11828 - DNA, 21 bp, Artificial Sequence
  primer
tccttccgagtaccaaacctc

SEQ ID NO: 11829 - DNA, 37 bp, Artificial Sequence
  primer
gtaaaacgacggccagtagaccgtagctgcgcttctc

SEQ ID NO: 11830 - DNA, 38 bp, Artificial Sequence
  primer
gtaaaacgacggccagttcttaagagccttgcaccctc

SEQ ID NO: 11831 - DNA, 38 bp, Artificial Sequence
  primer
gtaaaacgacggccagtgaagaacacactcactggccc

SEQ ID NO: 11832 - DNA, 21 bp, Artificial Sequence
  primer
tccttccgagtaccaaacctc

SEQ ID NO: 11833 - DNA, 21 bp, Artificial Sequence
  primer
gacatgaccagctcagttccc

SEQ ID NO: 11834 - DNA, 38 bp, Artificial Sequence
  primer
gtaaaacgacggccagtatatgagcacagtggcagctc

SEQ ID NO: 11835 - DNA, 38 bp, Artificial Sequence
  primer
gtaaaacgacggccagtcggaagagggaagtgaatcag

SEQ ID NO: 11836 - DNA, 38 bp, Artificial Sequence
  primer
gtaaaacgacggccagtatcctggaaaccaacacattg

SEQ ID NO: 11837 - DNA, 39 bp, Artificial Sequence
  primer
gtaaaacgacggccagtttcacgtccttcaggtccttac

SEQ ID NO: 11838 - DNA, 40 bp, Artificial Sequence
  primer
gtaaaacgacggccagtcagtacctggtgcataattggtg

SEQ ID NO: 11839 - DNA, 37 bp, Artificial Sequence
  primer
gtaaaacgacggccagtgtggaagggacactgaggtg

SEQ ID NO: 11840 - DNA, 38 bp, Artificial Sequence
  primer
gtaaaacgacggccagttcccatctgactctgttcctg

SEQ ID NO: 11841 - DNA, 38 bp, Artificial Sequence
  primer
gtaaaacgacggccagttgatctgtgtccttgctttgg

SEQ ID NO: 11842 - DNA, 38 bp, Artificial Sequence
  primer
gtaaaacgacggccagtgggctccttccctagaatgtg

SEQ ID NO: 11843 - DNA, 35 bp, Artificial Sequence
  primer
gtaaaacgacggccagtaggactctggcctcaccc

SEQ ID NO: 11844 - DNA, 21 bp, Artificial Sequence
  primer
ttgcccataaagggatattgg

SEQ ID NO: 11845 - DNA, 38 bp, Artificial Sequence
  primer
gtaaaacgacggccagtgcccatctttgagggttactg

SEQ ID NO: 11846 - DNA, 20 bp, Artificial Sequence
  primer
ccaatattatccttgccggg

SEQ ID NO: 11847 - DNA, 37 bp, Artificial Sequence
  primer
gtaaaacgacggccagtcctattgcatcacaaagcgg

SEQ ID NO: 11848 - DNA, 37 bp, Artificial Sequence
  primer
gtaaaacgacggccagtgaaattccaggctccctcag

SEQ ID NO: 11849 - DNA, 37 bp, Artificial Sequence
  primer
gtaaaacgacggccagttttgagggttactccctgcc

SEQ ID NO: 11850 - DNA, 21 bp, Artificial Sequence
  primer
tcctgagggagtacaagctgc

SEQ ID NO: 11851 - DNA, 35 bp, Artificial Sequence
  primer
gtaaaacgacggccagtcgtgtcgtcataaggcgg

SEQ ID NO: 11852 - DNA, 38 bp, Artificial Sequence
  primer
gtaaaacgacggccagttcagatgctgtggtacttggc

SEQ ID NO: 11853 - DNA, 22 bp, Artificial Sequence
  primer
ggctgttgacttatgctggaac

SEQ ID NO: 11854 - DNA, 42 bp, Artificial Sequence
  primer
gtaaaacgacggccagtaattgctcatttggatttgaatatg

SEQ ID NO: 11855 - DNA, 22 bp, Artificial Sequence
  primer
aatggttgtgatgttctgttgc

SEQ ID NO: 11856 - DNA, 42 bp, Artificial Sequence
  primer
gtaaaacgacggccagtcaatgtagacagtactgattggcag

SEQ ID NO: 11857 - DNA, 21 bp, Artificial Sequence
  primer
acctcccattgactcctgaag

SEQ ID NO: 11858 - DNA, 41 bp, Artificial Sequence
  primer
gtaaaacgacggccagtcatttggatctttccatattcagg

SEQ ID NO: 11859 - DNA, 43 bp, Artificial Sequence
  primer
gtaaaacgacggccagtcagcatattccaaagaagagttaggt

SEQ ID NO: 11860 - DNA, 21 bp, Artificial Sequence
  primer
tgatgccagaaatgcaatagg

SEQ ID NO: 11861 - DNA, 21 bp, Artificial Sequence
  primer
gccatgatgagcagcatgtag

SEQ ID NO: 11862 - DNA, 21 bp, Artificial Sequence
  primer
catggtacatgcacccaacac

SEQ ID NO: 11863 - DNA, 40 bp, Artificial Sequence
  primer
gtaaaacgacggccagtcctatgctgcatgagaattgttt

SEQ ID NO: 11864 - DNA, 39 bp, Artificial Sequence
  primer
gtaaaacgacggccagttgtatgggattgatttgtgctg

SEQ ID NO: 11865 - DNA, 38 bp, Artificial Sequence
  primer
gtaaaacgacggccagtttgctctgtgcctaccaacac

SEQ ID NO: 11866 - DNA, 22 bp, Artificial Sequence
  primer
gcatttagactcagattggtgc

SEQ ID NO: 11867 - DNA, 21 bp, Artificial Sequence
  primer
cttagatttccactgccctgc

SEQ ID NO: 11868 - DNA, 21 bp, Artificial Sequence
  primer
aatgtgtcctgtgtctgcctc

SEQ ID NO: 11869 - DNA, 38 bp, Artificial Sequence
  primer
gtaaaacgacggccagttggccatcttcacaacctacc

SEQ ID NO: 11870 - DNA, 39 bp, Artificial Sequence
  primer
gtaaaacgacggccagtggagactgagatgtctgaaggc

SEQ ID NO: 11871 - DNA, 38 bp, Artificial Sequence
  primer
gtaaaacgacggccagtgcagagctggaattgatgacc

SEQ ID NO: 11872 - DNA, 21 bp, Artificial Sequence
  primer
tggcagaagggagaataggag

SEQ ID NO: 11873 - DNA, 39 bp, Artificial Sequence
  primer
gtaaaacgacggccagtcctggagcctcttctcctaatc

SEQ ID NO: 11874 - DNA, 38 bp, Artificial Sequence
  primer
gtaaaacgacggccagtacatccttcaaggtctcaggg

SEQ ID NO: 11875 - DNA, 21 bp, Artificial Sequence
  primer
gaaagtccaggaaagaccgtg

SEQ ID NO: 11876 - DNA, 22 bp, Artificial Sequence
  primer
agccagccttcgatcatattac

SEQ ID NO: 11877 - DNA, 38 bp, Artificial Sequence
  primer
gtaaaacgacggccagtgctcaagaaggacaacaaggg

SEQ ID NO: 11878 - DNA, 21 bp, Artificial Sequence
  primer
ggaagaggaacagtgggacag

SEQ ID NO: 11879 - DNA, 40 bp, Artificial Sequence
  primer
gtaaaacgacggccagtttaagcaacaattggactatggg

SEQ ID NO: 11880 - DNA, 38 bp, Artificial Sequence
  primer
gtaaaacgacggccagtctgatttcctacttgggcagg

SEQ ID NO: 11881 - DNA, 38 bp, Artificial Sequence
  primer
gtaaaacgacggccagttttccctctaacatgggcttg

SEQ ID NO: 11882 - DNA, 39 bp, Artificial Sequence
  primer
gtaaaacgacggccagtcccaccagaactaatttctccc

SEQ ID NO: 11883 - DNA, 38 bp, Artificial Sequence
  primer
gtaaaacgacggccagtcgggtaggaaaggttagagcc

SEQ ID NO: 11884 - DNA, 38 bp, Artificial Sequence
  primer
gtaaaacgacggccagtgcaagtcactttcccttccag

SEQ ID NO: 11885 - DNA, 38 bp, Artificial Sequence
  primer
gtaaaacgacggccagtactaagggagggaggttcagg

SEQ ID NO: 11886 - DNA, 21 bp, Artificial Sequence
  primer
gcaataggtaggctgggtgtc

SEQ ID NO: 11887 - DNA, 38 bp, Artificial Sequence
  primer
gtaaaacgacggccagtgggaatgaaaggaaacaagcc

SEQ ID NO: 11888 - DNA, 21 bp, Artificial Sequence
  primer
ggacagcagaagtggtgaatg

SEQ ID NO: 11889 - DNA, 18 bp, Artificial Sequence
  primer
agacgcgcacacacacac

SEQ ID NO: 11890 - DNA, 21 bp, Artificial Sequence
  primer
gtaagagcggattacatgggc

SEQ ID NO: 11891 - DNA, 38 bp, Artificial Sequence
  primer
gtaaaacgacggccagttgcgaatcttggtattagggc

SEQ ID NO: 11892 - DNA, 38 bp, Artificial Sequence
  primer
gtaaaacgacggccagttgaacagatggttggatctgg

SEQ ID NO: 11893 - DNA, 20 bp, Artificial Sequence
  primer
gtggagacagtgcagccatc

SEQ ID NO: 11894 - DNA, 38 bp, Artificial Sequence
  primer
gtaaaacgacggccagtctgggctgcaatacatgagac

SEQ ID NO: 11895 - DNA, 38 bp, Artificial Sequence
  primer
gtaaaacgacggccagtgtcccatgtcagatggaggag

SEQ ID NO: 11896 - DNA, 38 bp, Artificial Sequence
  primer
gtaaaacgacggccagtagcaggagaatgatgtgaggc

SEQ ID NO: 11897 - DNA, 21 bp, Artificial Sequence
  primer
atgaacctgagggatgtgatg

SEQ ID NO: 11898 - DNA, 38 bp, Artificial Sequence
  primer
gtaaaacgacggccagtccctttggatgtaagacaggg

SEQ ID NO: 11899 - DNA, 21 bp, Artificial Sequence
  primer
aggttgggagagggagacttg

SEQ ID NO: 11900 - DNA, 21 bp, Artificial Sequence
  primer
actgggctctattggacatgg

SEQ ID NO: 11901 - DNA, 38 bp, Artificial Sequence
  primer
gtaaaacgacggccagtagggcatcgacatcaagtctc

SEQ ID NO: 11902 - DNA, 38 bp, Artificial Sequence
  primer
gtaaaacgacggccagttgttagtctggttgtcccagg

SEQ ID NO: 11903 - DNA, 21 bp, Artificial Sequence
  primer
agacctcagagagggtggttc

SEQ ID NO: 11904 - DNA, 19 bp, Artificial Sequence
  primer
ctaccaggctgggaaggag

SEQ ID NO: 11905 - DNA, 21 bp, Artificial Sequence
  primer
tgccaccacgttagaaatagg

SEQ ID NO: 11906 - DNA, 38 bp, Artificial Sequence
  primer
gtaaaacgacggccagtcactattgggaggaaacctgg

SEQ ID NO: 11907 - DNA, 38 bp, Artificial Sequence
  primer
gtaaaacgacggccagttggacaaagtggaccctgtag

SEQ ID NO: 11908 - DNA, 38 bp, Artificial Sequence
  primer
gtaaaacgacggccagtgtcttatgctgctgagggagg

SEQ ID NO: 11909 - DNA, 37 bp, Artificial Sequence
  primer
gtaaaacgacggccagtagcgtctccagcctcttagg

SEQ ID NO: 11910 - DNA, 38 bp, Artificial Sequence
  primer
gtaaaacgacggccagtaccacaatgaggcaagagtcc

SEQ ID NO: 11911 - DNA, 21 bp, Artificial Sequence
  primer
agggaagtgacctcctctgtg

SEQ ID NO: 11912 - DNA, 21 bp, Artificial Sequence
  primer
ttgtaaaggaggttgccttgg

SEQ ID NO: 11913 - DNA, 19 bp, Artificial Sequence
  primer
tggtgtgatctcagcccag

SEQ ID NO: 11914 - DNA, 38 bp, Artificial Sequence
  primer
gtaaaacgacggccagtgtgacctgtgcccaaagaaac

SEQ ID NO: 11915 - DNA, 37 bp, Artificial Sequence
  primer
gtaaaacgacggccagtaaggctgttagcggagaagg

SEQ ID NO: 11916 - DNA, 21 bp, Artificial Sequence
  primer
gtgataggccctggtctgact

SEQ ID NO: 11917 - DNA, 21 bp, Artificial Sequence
  primer
gtcctcttcacgatgcctctc

SEQ ID NO: 11918 - DNA, 37 bp, Artificial Sequence
  primer
gtaaaacgacggccagtctctggtcccactgctgttc

SEQ ID NO: 11919 - DNA, 18 bp, Artificial Sequence
  primer
ggcgaggaggctgtcaga

SEQ ID NO: 11920 - DNA, 37 bp, Artificial Sequence
  primer
gtaaaacgacggccagtcaggtcgaattcctgtgctg

SEQ ID NO: 11921 - DNA, 21 bp, Artificial Sequence
  primer
ggtgactgagacagggagacc

SEQ ID NO: 11922 - DNA, 21 bp, Artificial Sequence
  primer
cagttcctgcttcctggtgag

SEQ ID NO: 11923 - DNA, 21 bp, Artificial Sequence
  primer
gagctgactgctgatgtccag

SEQ ID NO: 11924 - DNA, 38 bp, Artificial Sequence
  primer
gtaaaacgacggccagtgagaaccagtcaggcaaggac

SEQ ID NO: 11925 - DNA, 21 bp, Artificial Sequence
  primer
cttacaggtttggtgctgctg

SEQ ID NO: 11926 - DNA, 21 bp, Artificial Sequence
  primer
atattgctgtgaaccatgccc

SEQ ID NO: 11927 - DNA, 20 bp, Artificial Sequence
  primer
cctactttgcagagggctcc

SEQ ID NO: 11928 - DNA, 35 bp, Artificial Sequence
  primer
gtaaaacgacggccagttttgcgttctgaggctgc

SEQ ID NO: 11929 - DNA, 21 bp, Artificial Sequence
  primer
ggcttacacgcagagctacag

SEQ ID NO: 11930 - DNA, 39 bp, Artificial Sequence
  primer
gtaaaacgacggccagttgtctgtgtctccttctccctg

SEQ ID NO: 11931 - DNA, 38 bp, Artificial Sequence
  primer
gtaaaacgacggccagttaagatgggttgtgttcctgg

SEQ ID NO: 11932 - DNA, 38 bp, Artificial Sequence
  primer
gtaaaacgacggccagtctagtctccctttcggccaag

SEQ ID NO: 11933 - DNA, 21 bp, Artificial Sequence
  primer
ggacagtgcctacattcaccc

SEQ ID NO: 11934 - DNA, 21 bp, Artificial Sequence
  primer
accaaaggacatacagcctgg

SEQ ID NO: 11935 - DNA, 38 bp, Artificial Sequence
  primer
gtaaaacgacggccagtagttgggagatggctagatgg

SEQ ID NO: 11936 - DNA, 22 bp, Artificial Sequence
  primer
tgtagagaatcactgatccggc

SEQ ID NO: 11937 - DNA, 37 bp, Artificial Sequence
  primer
gtaaaacgacggccagttaaagttatgccaccctgcg

SEQ ID NO: 11938 - DNA, 27 bp, Artificial Sequence
  primer
tgtttgatacctcattggaacataaac

SEQ ID NO: 11939 - DNA, 24 bp, Artificial Sequence
  primer
ggataggctgtaaaccctttacct

SEQ ID NO: 11940 - DNA, 21 bp, Artificial Sequence
  primer
tgcagttcctgggacatcttt

SEQ ID NO: 11941 - DNA, 24 bp, Artificial Sequence
  primer
tgtcttacatccaggatttgattt

SEQ ID NO: 11942 - DNA, 41 bp, Artificial Sequence
  primer
gtaaaacgacggccagtttcctaaagaaagtagatgtgccc

SEQ ID NO: 11943 - DNA, 21 bp, Artificial Sequence
  primer
gtaccaacaccctttcctccc

SEQ ID NO: 11944 - DNA, 38 bp, Artificial Sequence
  primer
gtaaaacgacggccagtcaactgggtttgttaaagcga

SEQ ID NO: 11945 - DNA, 20 bp, Artificial Sequence
  primer
ttcaaggccgtagcactctg

SEQ ID NO: 11946 - DNA, 25 bp, Artificial Sequence
  primer
ggtctcttctgattctcaagtatgc

SEQ ID NO: 11947 - DNA, 41 bp, Artificial Sequence
  primer
gtaaaacgacggccagttttccttacaaccattctgtgaag

SEQ ID NO: 11948 - DNA, 37 bp, Artificial Sequence
  primer
gtaaaacgacggccagtggccctaatccattgtggtg

SEQ ID NO: 11949 - DNA, 24 bp, Artificial Sequence
  primer
gaaattaattgggctacctactgg

SEQ ID NO: 11950 - DNA, 26 bp, Artificial Sequence
  primer
cagtcaaatgtatggtgtgttatgtc

SEQ ID NO: 11951 - DNA, 21 bp, Artificial Sequence
  primer
tgaccagcttggcatataacc

SEQ ID NO: 11952 - DNA, 38 bp, Artificial Sequence
  primer
gtaaaacgacggccagtgttctcaggcctaggatggtg

SEQ ID NO: 11953 - DNA, 21 bp, Artificial Sequence
  primer
ctcctggcctcaagtgttctc

SEQ ID NO: 11954 - DNA, 21 bp, Artificial Sequence
  primer
ggagaccatgctgtgtgtacc

SEQ ID NO: 11955 - DNA, 35 bp, Artificial Sequence
  primer
gtaaaacgacggccagtgggtgatgtccatggtgg

SEQ ID NO: 11956 - DNA, 21 bp, Artificial Sequence
  primer
ggatatgccctgtctttcctg

SEQ ID NO: 11957 - DNA, 35 bp, Artificial Sequence
  primer
gtaaaacgacggccagtaggtgtgcggatttggag

SEQ ID NO: 11958 - DNA, 20 bp, Artificial Sequence
  primer
gagccctgggtctcctagtg

SEQ ID NO: 11959 - DNA, 20 bp, Artificial Sequence
  primer
aagaagtcggagggtgatgg

SEQ ID NO: 11960 - DNA, 20 bp, Artificial Sequence
  primer
gtgagaggttggcgacattg

SEQ ID NO: 11961 - DNA, 38 bp, Artificial Sequence
  primer
gtaaaacgacggccagtctttcaggtgctggtgttctg

SEQ ID NO: 11962 - DNA, 38 bp, Artificial Sequence
  primer
gtaaaacgacggccagtgagtaactcggtgcgttggag

SEQ ID NO: 11963 - DNA, 38 bp, Artificial Sequence
  primer
gtaaaacgacggccagtggaagggtcttagagctgctg

SEQ ID NO: 11964 - DNA, 38 bp, Artificial Sequence
  primer
gtaaaacgacggccagtcatttatgtccggtgaactcc

SEQ ID NO: 11965 - DNA, 38 bp, Artificial Sequence
  primer
gtaaaacgacggccagtgagcctcctaaggaagggaac

SEQ ID NO: 11966 - DNA, 36 bp, Artificial Sequence
  primer
gtaaaacgacggccagtaggtgagctccaggttccc

SEQ ID NO: 11967 - DNA, 21 bp, Artificial Sequence
  primer
gggaactgcttactgcactgg

SEQ ID NO: 11968 - DNA, 38 bp, Artificial Sequence
  primer
gtaaaacgacggccagtcaggccatagccctagaagtc

SEQ ID NO: 11969 - DNA, 38 bp, Artificial Sequence
  primer
gtaaaacgacggccagtagtgtgtggctttgggagaag

SEQ ID NO: 11970 - DNA, 37 bp, Artificial Sequence
  primer
gtaaaacgacggccagtgaaacctcgcaacaggtgag

SEQ ID NO: 11971 - DNA, 21 bp, Artificial Sequence
  primer
ctcctggcctcaagtgttctc

SEQ ID NO: 11972 - DNA, 20 bp, Artificial Sequence
  primer
gtgagaggttggcgacattg

SEQ ID NO: 11973 - DNA, 37 bp, Artificial Sequence
  primer
gtaaaacgacggccagtgtatcggaaagagcctgctg

SEQ ID NO: 11974 - DNA, 18 bp, Artificial Sequence
  primer
ctcccaatggattgcagg

SEQ ID NO: 11975 - DNA, 38 bp, Artificial Sequence
  primer
gtaaaacgacggccagtgtactcccacgaccaggtagg

SEQ ID NO: 11976 - DNA, 21 bp, Artificial Sequence
  primer
gtaagtgatcttggcccaacc

SEQ ID NO: 11977 - DNA, 21 bp, Artificial Sequence
  primer
tgcttgccaagaacatagtgg

SEQ ID NO: 11978 - DNA, 37 bp, Artificial Sequence
  primer
gtaaaacgacggccagtcttctggccaggtcatatcg

SEQ ID NO: 11979 - DNA, 38 bp, Artificial Sequence
  primer
gtaaaacgacggccagtgtgcctgagagtctgtgcctc

SEQ ID NO: 11980 - DNA, 18 bp, Artificial Sequence
  primer
ccggagccctagatccct

SEQ ID NO: 11981 - DNA, 22 bp, Artificial Sequence
  primer
ccagttcctcattctatcagcg

SEQ ID NO: 11982 - DNA, 40 bp, Artificial Sequence
  primer
gtaaaacgacggccagtgcctttcagaaatatcctcaagc

SEQ ID NO: 11983 - DNA, 38 bp, Artificial Sequence
  primer
gtaaaacgacggccagtttagcctcgtcacgggtaatc

SEQ ID NO: 11984 - DNA, 44 bp, Artificial Sequence
  primer
gtaaaacgacggccagtgcataaatctgaactgtcttatccttc

SEQ ID NO: 11985 - DNA, 26 bp, Artificial Sequence
  primer
atgtctgaataatgaaaggctatgtc

SEQ ID NO: 11986 - DNA, 21 bp, Artificial Sequence
  primer
gactgcttgaagatgcaccag

SEQ ID NO: 11987 - DNA, 38 bp, Artificial Sequence
  primer
gtaaaacgacggccagtcacatttgcactccagtgttg

SEQ ID NO: 11988 - DNA, 37 bp, Artificial Sequence
  primer
gtaaaacgacggccagtcttggcctcagactccttcc

SEQ ID NO: 11989 - DNA, 19 bp, Artificial Sequence
  primer
ccgagagccaggagatgac

SEQ ID NO: 11990 - DNA, 38 bp, Artificial Sequence
  primer
gtaaaacgacggccagtcctcccataaagctgaacgtc

SEQ ID NO: 11991 - DNA, 38 bp, Artificial Sequence
  primer
gtaaaacgacggccagtgcagctattcctgtgcctttc

SEQ ID NO: 11992 - DNA, 38 bp, Artificial Sequence
  primer
gtaaaacgacggccagtgacaccaaatccctctggttg

SEQ ID NO: 11993 - DNA, 38 bp, Artificial Sequence
  primer
gtaaaacgacggccagtcttcaaagcgggtctctgttg

SEQ ID NO: 11994 - DNA, 38 bp, Artificial Sequence
  primer
gtaaaacgacggccagtagtgctggagtgaacgtatgg

SEQ ID NO: 11995 - DNA, 38 bp, Artificial Sequence
  primer
gtaaaacgacggccagtgaggtgtctcctgcagaaagg

SEQ ID NO: 11996 - DNA, 37 bp, Artificial Sequence
  primer
gtaaaacgacggccagtcagtgtgcatgtgtgcatcc

SEQ ID NO: 11997 - DNA, 37 bp, Artificial Sequence
  primer
gtaaaacgacggccagtatctctgctccatttgctgg

SEQ ID NO: 11998 - DNA, 21 bp, Artificial Sequence
  primer
aggctgtgattgtgtggactg

SEQ ID NO: 11999 - DNA, 38 bp, Artificial Sequence
  primer
gtaaaacgacggccagtggcagaacacactcccatatc

SEQ ID NO: 12000 - DNA, 44 bp, Artificial Sequence
  primer
gtaaaacgacggccagttttataatcaggtcaatttctgctgtc

SEQ ID NO: 12001 - DNA, 38 bp, Artificial Sequence
  primer
gtaaaacgacggccagttcaaggccaaataaagccatc

SEQ ID NO: 12002 - DNA, 38 bp, Artificial Sequence
  primer
gtaaaacgacggccagtaacatcttgaagcactcagcg

SEQ ID NO: 12003 - DNA, 22 bp, Artificial Sequence
  primer
aaatgcaatccactaggcaaag

SEQ ID NO: 12004 - DNA, 38 bp, Artificial Sequence
  primer
gtaaaacgacggccagtcgacatggtccagttatgctc

SEQ ID NO: 12005 - DNA, 23 bp, Artificial Sequence
  primer
ttggtgagcagagttgagaagac

SEQ ID NO: 12006 - DNA, 40 bp, Artificial Sequence
  primer
gtaaaacgacggccagtccgaatgctaaagcatacacttc

SEQ ID NO: 12007 - DNA, 42 bp, Artificial Sequence
  primer
gtaaaacgacggccagtgaaacttcaaacaagtgaaacaagc

SEQ ID NO: 12008 - DNA, 38 bp, Artificial Sequence
  primer
gtaaaacgacggccagttaagcgtgctaatgcacacac

SEQ ID NO: 12009 - DNA, 38 bp, Artificial Sequence
  primer
gtaaaacgacggccagtagccctatgaagatgccattc

SEQ ID NO: 12010 - DNA, 21 bp, Artificial Sequence
  primer
atttgtgcagtagtggccttg

SEQ ID NO: 12011 - DNA, 22 bp, Artificial Sequence
  primer
gatccacgtgatctccaaagac

SEQ ID NO: 12012 - DNA, 21 bp, Artificial Sequence
  primer
ctctttccacctgtgcctttc

SEQ ID NO: 12013 - DNA, 22 bp, Artificial Sequence
  primer
gccctacctcctaaccattacc

SEQ ID NO: 12014 - DNA, 39 bp, Artificial Sequence
  primer
gtaaaacgacggccagtcaatgtgctggcatatgttgac

SEQ ID NO: 12015 - DNA, 38 bp, Artificial Sequence
  primer
gtaaaacgacggccagttggagaagaaggaagcaggtc

SEQ ID NO: 12016 - DNA, 38 bp, Artificial Sequence
  primer
gtaaaacgacggccagtgctcatgcccatttgacttag

SEQ ID NO: 12017 - DNA, 24 bp, Artificial Sequence
  primer
tctgtagacgtgcactacttaccc

SEQ ID NO: 12018 - DNA, 38 bp, Artificial Sequence
  primer
gtaaaacgacggccagtacccttcaggtagcttgggac

SEQ ID NO: 12019 - DNA, 22 bp, Artificial Sequence
  primer
ggacttcttcctttgatctggc

SEQ ID NO: 12020 - DNA, 41 bp, Artificial Sequence
  primer
gtaaaacgacggccagtcaacacaggtacgttgtacagtga

SEQ ID NO: 12021 - DNA, 41 bp, Artificial Sequence
  primer
gtaaaacgacggccagttgtttccatttgcttctaaccatc

SEQ ID NO: 12022 - DNA, 38 bp, Artificial Sequence
  primer
gtaaaacgacggccagtgaggactttaagcatgtcggg

SEQ ID NO: 12023 - DNA, 21 bp, Artificial Sequence
  primer
gtagggagaaggctgttggtg

SEQ ID NO: 12024 - DNA, 21 bp, Artificial Sequence
  primer
ctggctcaggatcaaactgtg

SEQ ID NO: 12025 - DNA, 21 bp, Artificial Sequence
  primer
acctccgccagctattatgag

SEQ ID NO: 12026 - DNA, 39 bp, Artificial Sequence
  primer
gtaaaacgacggccagtgtgcagaataacattgaaacgc

SEQ ID NO: 12027 - DNA, 37 bp, Artificial Sequence
  primer
gtaaaacgacggccagtaccatgcccagctaatggtt

SEQ ID NO: 12028 - DNA, 21 bp, Artificial Sequence
  primer
tctttcgcctccttctcttcc

SEQ ID NO: 12029 - DNA, 21 bp, Artificial Sequence
  primer
tgttgctgtgtaatgctgtgc

SEQ ID NO: 12030 - DNA, 18 bp, Artificial Sequence
  primer
aactccctcgcagcatcc

SEQ ID NO: 12031 - DNA, 21 bp, Artificial Sequence
  primer
ggcttagccattctgagcttc

SEQ ID NO: 12032 - DNA, 38 bp, Artificial Sequence
  primer
gtaaaacgacggccagtcaggtaccagatccacacagg

SEQ ID NO: 12033 - DNA, 21 bp, Artificial Sequence
  primer
tcttcctctatgtggccttcc

SEQ ID NO: 12034 - DNA, 38 bp, Artificial Sequence
  primer
gtaaaacgacggccagtgatgggctagatggctacgac

SEQ ID NO: 12035 - DNA, 21 bp, Artificial Sequence
  primer
gtagctggtggaacctggaac

SEQ ID NO: 12036 - DNA, 21 bp, Artificial Sequence
  primer
aggagaggaggatttcttgcc

SEQ ID NO: 12037 - DNA, 22 bp, Artificial Sequence
  primer
gagcagaaatgctgaattggtc

SEQ ID NO: 12038 - DNA, 21 bp, Artificial Sequence
  primer
gtgacagtcctgggatgtgtg

SEQ ID NO: 12039 - DNA, 21 bp, Artificial Sequence
  primer
agatatgctgccatgctttcc

SEQ ID NO: 12040 - DNA, 38 bp, Artificial Sequence
  primer
gtaaaacgacggccagttttgtgcatagcccacttctg

SEQ ID NO: 12041 - DNA, 18 bp, Artificial Sequence
  primer
ctggctacagcgactggg

SEQ ID NO: 12042 - DNA, 38 bp, Artificial Sequence
  primer
gtaaaacgacggccagtttctgagcctccatgtctgtc

SEQ ID NO: 12043 - DNA, 21 bp, Artificial Sequence
  primer
gctccagatgctagtcttggg

SEQ ID NO: 12044 - DNA, 21 bp, Artificial Sequence
  primer
gtggccagagtggagtctcag

SEQ ID NO: 12045 - DNA, 21 bp, Artificial Sequence
  primer
tgcacaaggagttcaatgcag

SEQ ID NO: 12046 - DNA, 38 bp, Artificial Sequence
  primer
gtaaaacgacggccagtactaccagggctctgaggtcc

SEQ ID NO: 12047 - DNA, 21 bp, Artificial Sequence
  primer
aacccattaccattggaccag

SEQ ID NO: 12048 - DNA, 38 bp, Artificial Sequence
  primer
gtaaaacgacggccagttcctgaccatcatgctatcca

SEQ ID NO: 12049 - DNA, 21 bp, Artificial Sequence
  primer
ttgctctgtgccataatgtcc

SEQ ID NO: 12050 - DNA, 21 bp, Artificial Sequence
  primer
ttgaaggtgaaggctgaagtg

SEQ ID NO: 12051 - DNA, 21 bp, Artificial Sequence
  primer
aaccatggaatagccctgatg

SEQ ID NO: 12052 - DNA, 40 bp, Artificial Sequence
  primer
gtaaaacgacggccagttgagtctgataaaccaggagctg

SEQ ID NO: 12053 - DNA, 46 bp, Artificial Sequence
  primer
gtaaaacgacggccagtttcttaaatataagccaacacaatcttta

SEQ ID NO: 12054 - DNA, 38 bp, Artificial Sequence
  primer
gtaaaacgacggccagttgttccagctcattagccaag

SEQ ID NO: 12055 - DNA, 41 bp, Artificial Sequence
  primer
gtaaaacgacggccagttttgctgtagctgtagtaactgcc

SEQ ID NO: 12056 - DNA, 23 bp, Artificial Sequence
  primer
ggaagcttgaagaccatggtaag

SEQ ID NO: 12057 - DNA, 21 bp, Artificial Sequence
  primer
tccaggctaaggagtttggac

SEQ ID NO: 12058 - DNA, 38 bp, Artificial Sequence
  primer
gtaaaacgacggccagtcctcagacccactcacagaga

SEQ ID NO: 12059 - DNA, 24 bp, Artificial Sequence
  primer
ttggctggaagtatttcaggtaag

SEQ ID NO: 12060 - DNA, 36 bp, Artificial Sequence
  primer
gtaaaacgacggccagtgtccagatctgcctccagc

SEQ ID NO: 12061 - DNA, 38 bp, Artificial Sequence
  primer
gtaaaacgacggccagtctgtgtttctggatgggtttg

SEQ ID NO: 12062 - DNA, 22 bp, Artificial Sequence
  primer
ttcaaagcccagaatggaatag

SEQ ID NO: 12063 - DNA, 21 bp, Artificial Sequence
  primer
ccctgcatttctacctgatcc

SEQ ID NO: 12064 - DNA, 38 bp, Artificial Sequence
  primer
gtaaaacgacggccagtatggaaaggcaatctggaaag

SEQ ID NO: 12065 - DNA, 21 bp, Artificial Sequence
  primer
ggtgcagctagggtcacaatc

SEQ ID NO: 12066 - DNA, 36 bp, Artificial Sequence
  primer
gtaaaacgacggccagtgatctcagcccgaggacag

SEQ ID NO: 12067 - DNA, 38 bp, Artificial Sequence
  primer
gtaaaacgacggccagtttcctcacctggagaaactgg

SEQ ID NO: 12068 - DNA, 37 bp, Artificial Sequence
  primer
gtaaaacgacggccagtctccttgaggtccttcctcc

SEQ ID NO: 12069 - DNA, 36 bp, Artificial Sequence
  primer
gtaaaacgacggccagtgtaggtgagagggcgaggg

SEQ ID NO: 12070 - DNA, 21 bp, Artificial Sequence
  primer
gtgactgggtctcattccagg

SEQ ID NO: 12071 - DNA, 21 bp, Artificial Sequence
  primer
ctgtgaatgctgggtggatac

SEQ ID NO: 12072 - DNA, 38 bp, Artificial Sequence
  primer
gtaaaacgacggccagttgtgtccactccttcatggtg

SEQ ID NO: 12073 - DNA, 21 bp, Artificial Sequence
  primer
taatcctcccacctcaacctc

SEQ ID NO: 12074 - DNA, 38 bp, Artificial Sequence
  primer
gtaaaacgacggccagtctcctgagctcaagcattctg

SEQ ID NO: 12075 - DNA, 22 bp, Artificial Sequence
  primer
aatattggcaaccatatcccac

SEQ ID NO: 12076 - DNA, 41 bp, Artificial Sequence
  primer
gtaaaacgacggccagtccattctgaagattagtgtttggg

SEQ ID NO: 12077 - DNA, 21 bp, Artificial Sequence
  primer
ttgtttctccaaagcattcgt

SEQ ID NO: 12078 - DNA, 22 bp, Artificial Sequence
  primer
tgtgaagtatggacttcttgcc

SEQ ID NO: 12079 - DNA, 36 bp, Artificial Sequence
  primer
gtaaaacgacggccagtcagtgttcctgcagttgcg

SEQ ID NO: 12080 - DNA, 38 bp, Artificial Sequence
  primer
gtaaaacgacggccagtggacctgtgggatagtatggc

SEQ ID NO: 12081 - DNA, 21 bp, Artificial Sequence
  primer
tagcggctgtttgagcataag

SEQ ID NO: 12082 - DNA, 38 bp, Artificial Sequence
  primer
gtaaaacgacggccagttgacactccctacaaagctgg

SEQ ID NO: 12083 - DNA, 40 bp, Artificial Sequence
  primer
gtaaaacgacggccagtttctctaatttccttgcccaatc

SEQ ID NO: 12084 - DNA, 38 bp, Artificial Sequence
  primer
gtaaaacgacggccagtcccggccgtagttatctattt

SEQ ID NO: 12085 - DNA, 39 bp, Artificial Sequence
  primer
gtaaaacgacggccagtagtcgcaattcatcctgacttt

SEQ ID NO: 12086 - DNA, 24 bp, Artificial Sequence
  primer
tttatatttccaggcatgcttctc

SEQ ID NO: 12087 - DNA, 21 bp, Artificial Sequence
  primer
gtgggtttatcaggattgtgg

SEQ ID NO: 12088 - DNA, 38 bp, Artificial Sequence
  primer
gtaaaacgacggccagtttccatgaacacatttgcttg

SEQ ID NO: 12089 - DNA, 38 bp, Artificial Sequence
  primer
gtaaaacgacggccagttattcagacagctgggactgc

SEQ ID NO: 12090 - DNA, 21 bp, Artificial Sequence
  primer
ggactttcttcattgtgggtg

SEQ ID NO: 12091 - DNA, 39 bp, Artificial Sequence
  primer
gtaaaacgacggccagtgactacgaatcccaataagccc

SEQ ID NO: 12092 - DNA, 39 bp, Artificial Sequence
  primer
gtaaaacgacggccagtgccatattgctatctgtgtcca

SEQ ID NO: 12093 - DNA, 38 bp, Artificial Sequence
  primer
gtaaaacgacggccagttgggatgccacaaatactctg

SEQ ID NO: 12094 - DNA, 27 bp, Artificial Sequence
  primer
tgagaaagtatttcttatgaagtcagc

SEQ ID NO: 12095 - DNA, 38 bp, Artificial Sequence
  primer
gtaaaacgacggccagtcgcttgatatgaggagaaggg

SEQ ID NO: 12096 - DNA, 39 bp, Artificial Sequence
  primer
gtaaaacgacggccagtggtctgggagtgagttgtatgg

SEQ ID NO: 12097 - DNA, 37 bp, Artificial Sequence
  primer
gtaaaacgacggccagtctgctgtgtgtggagacctg

SEQ ID NO: 12098 - DNA, 38 bp, Artificial Sequence
  primer
gtaaaacgacggccagtagcaagtttctaggcctctcg

SEQ ID NO: 12099 - DNA, 21 bp, Artificial Sequence
  primer
ctctctcgagcctacctcagc

SEQ ID NO: 12100 - DNA, 38 bp, Artificial Sequence
  primer
gtaaaacgacggccagtggccaagatacaggtgctctc

SEQ ID NO: 12101 - DNA, 37 bp, Artificial Sequence
  primer
gtaaaacgacggccagtaggacacagcagatgatggc

SEQ ID NO: 12102 - DNA, 38 bp, Artificial Sequence
  primer
gtaaaacgacggccagtgagagtgggacaggtcctgag

SEQ ID NO: 12103 - DNA, 38 bp, Artificial Sequence
  primer
gtaaaacgacggccagtttcccattagtgctaggaggg

SEQ ID NO: 12104 - DNA, 38 bp, Artificial Sequence
  primer
gtaaaacgacggccagtctgtggccagtctttcctgag

SEQ ID NO: 12105 - DNA, 22 bp, Artificial Sequence
  primer
cagaagtgatgggatgaggttc

SEQ ID NO: 12106 - DNA, 21 bp, Artificial Sequence
  primer
cctaggctaaactgtctgccc

SEQ ID NO: 12107 - DNA, 38 bp, Artificial Sequence
  primer
gtaaaacgacggccagtttacgtgactcatccacaccc

SEQ ID NO: 12108 - DNA, 36 bp, Artificial Sequence
  primer
gtaaaacgacggccagtagctggagagagcggtcag

SEQ ID NO: 12109 - DNA, 35 bp, Artificial Sequence
  primer
gtaaaacgacggccagtcacacaggcggtctccag

SEQ ID NO: 12110 - DNA, 21 bp, Artificial Sequence
  primer
gtgtccgacagcctggataac

SEQ ID NO: 12111 - DNA, 21 bp, Artificial Sequence
  primer
accttgcagaaagatggttgg

SEQ ID NO: 12112 - DNA, 21 bp, Artificial Sequence
  primer
agagcctctagggctacctgg

SEQ ID NO: 12113 - DNA, 38 bp, Artificial Sequence
  primer
gtaaaacgacggccagtgtacagggcagctagagaggg

SEQ ID NO: 12114 - DNA, 19 bp, Artificial Sequence
  primer
ccaacccttacatcgccag

SEQ ID NO: 12115 - DNA, 23 bp, Artificial Sequence
  primer
tttaaaggctcctttccagtctt

SEQ ID NO: 12116 - DNA, 20 bp, Artificial Sequence
  primer
ccaacacacacccatccatc

SEQ ID NO: 12117 - DNA, 38 bp, Artificial Sequence
  primer
gtaaaacgacggccagtcccagagaaagggagaaggag

SEQ ID NO: 12118 - DNA, 38 bp, Artificial Sequence
  primer
gtaaaacgacggccagtctggctgatagctctcccttg

SEQ ID NO: 12119 - DNA, 37 bp, Artificial Sequence
  primer
gtaaaacgacggccagtacacgctcaagatcagccag

SEQ ID NO: 12120 - DNA, 21 bp, Artificial Sequence
  primer
gaggaagaggaactgctggag

SEQ ID NO: 12121 - DNA, 38 bp, Artificial Sequence
  primer
gtaaaacgacggccagtcaaatagttggcactccaggg

SEQ ID NO: 12122 - DNA, 19 bp, Artificial Sequence
  primer
caagggaagggacgggtag

SEQ ID NO: 12123 - DNA, 35 bp, Artificial Sequence
  primer
gtaaaacgacggccagtaggaaagccctctctgcg

SEQ ID NO: 12124 - DNA, 21 bp, Artificial Sequence
  primer
tcctggttggaaagcctgtag

SEQ ID NO: 12125 - DNA, 37 bp, Artificial Sequence
  primer
gtaaaacgacggccagtctcgagacctttgtcctccc

SEQ ID NO: 12126 - DNA, 21 bp, Artificial Sequence
  primer
gacctttccagggaactgagg

SEQ ID NO: 12127 - DNA, 21 bp, Artificial Sequence
  primer
tgatgcaagaaagaaggaagg

SEQ ID NO: 12128 - DNA, 21 bp, Artificial Sequence
  primer
tcctacgtgtccacaggaatc

SEQ ID NO: 12129 - DNA, 37 bp, Artificial Sequence
  primer
gtaaaacgacggccagttgggaaccacctttagggtc

SEQ ID NO: 12130 - DNA, 39 bp, Artificial Sequence
  primer
gtaaaacgacggccagtaaagggtcagcttaaacattgc

SEQ ID NO: 12131 - DNA, 21 bp, Artificial Sequence
  primer
accaatccaccagtgagtgtc

SEQ ID NO: 12132 - DNA, 38 bp, Artificial Sequence
  primer
gtaaaacgacggccagtgtgtttgctccttgtctgctg

SEQ ID NO: 12133 - DNA, 41 bp, Artificial Sequence
  primer
gtaaaacgacggccagtccaacagtgtgtaaggattagtgc

SEQ ID NO: 12134 - DNA, 38 bp, Artificial Sequence
  primer
gtaaaacgacggccagtaggatttcctgctggactttg

SEQ ID NO: 12135 - DNA, 42 bp, Artificial Sequence
  primer
gtaaaacgacggccagtagagccaaattataacacctagcac

SEQ ID NO: 12136 - DNA, 40 bp, Artificial Sequence
  primer
gtaaaacgacggccagtcactgctgttaagactttgcctc

SEQ ID NO: 12137 - DNA, 23 bp, Artificial Sequence
  primer
tgatgcacacttgtaatctcagc

SEQ ID NO: 12138 - DNA, 25 bp, Artificial Sequence
  primer
gggcccaatattcagtattacatag

SEQ ID NO: 12139 - DNA, 23 bp, Artificial Sequence
  primer
ccttggtgacttgtttcatcttg

SEQ ID NO: 12140 - DNA, 37 bp, Artificial Sequence
  primer
gtaaaacgacggccagtatcccaactacgtggaaggc

SEQ ID NO: 12141 - DNA, 37 bp, Artificial Sequence
  primer
gtaaaacgacggccagtcctagtgtaatgcctggccc

SEQ ID NO: 12142 - DNA, 38 bp, Artificial Sequence
  primer
gtaaaacgacggccagtaagtacagtgagcgacagggc

SEQ ID NO: 12143 - DNA, 38 bp, Artificial Sequence
  primer
gtaaaacgacggccagtggttcccgactggttacaaag

SEQ ID NO: 12144 - DNA, 22 bp, Artificial Sequence
  primer
ggcttgaaacttagatgatggg

SEQ ID NO: 12145 - DNA, 21 bp, Artificial Sequence
  primer
gcctactttatcctgggaggc

SEQ ID NO: 12146 - DNA, 38 bp, Artificial Sequence
  primer
gtaaaacgacggccagtaatgtcttggtttctggtggc

SEQ ID NO: 12147 - DNA, 22 bp, Artificial Sequence
  primer
tgatcctgttgaagttgtttgc

SEQ ID NO: 12148 - DNA, 38 bp, Artificial Sequence
  primer
gtaaaacgacggccagttagcctggaaggctctctctc

SEQ ID NO: 12149 - DNA, 38 bp, Artificial Sequence
  primer
gtaaaacgacggccagttcggttggcttaaagcatttg

SEQ ID NO: 12150 - DNA, 21 bp, Artificial Sequence
  primer
caggttcttgagctgttcctg

SEQ ID NO: 12151 - DNA, 38 bp, Artificial Sequence
  primer
gtaaaacgacggccagtatcctctcactcagagccacc

SEQ ID NO: 12152 - DNA, 26 bp, Artificial Sequence
  primer
aagacattcactcttctaattccagg

SEQ ID NO: 12153 - DNA, 21 bp, Artificial Sequence
  primer
ccaattctaagcaaccagcaa

SEQ ID NO: 12154 - DNA, 38 bp, Artificial Sequence
  primer
gtaaaacgacggccagtgcttaggagctagcaccgtct

SEQ ID NO: 12155 - DNA, 38 bp, Artificial Sequence
  primer
gtaaaacgacggccagtttgatagtgccttgctcattg

SEQ ID NO: 12156 - DNA, 38 bp, Artificial Sequence
  primer
gtaaaacgacggccagtcttatgctcagggctgctgtc

SEQ ID NO: 12157 - DNA, 21 bp, Artificial Sequence
  primer
actggctggtgactgagtgtc

SEQ ID NO: 12158 - DNA, 21 bp, Artificial Sequence
  primer
gttcaggtctgtgacagtcgg

SEQ ID NO: 12159 - DNA, 37 bp, Artificial Sequence
  primer
gtaaaacgacggccagtccacgggatctccaagtgac

SEQ ID NO: 12160 - DNA, 38 bp, Artificial Sequence
  primer
gtaaaacgacggccagtaaggaggaatttcccatcagc

SEQ ID NO: 12161 - DNA, 37 bp, Artificial Sequence
  primer
gtaaaacgacggccagtctggatggatggtcaagagc

SEQ ID NO: 12162 - DNA, 37 bp, Artificial Sequence
  primer
gtaaaacgacggccagttctgcgaacgagtaacctcc

SEQ ID NO: 12163 - DNA, 38 bp, Artificial Sequence
  primer
gtaaaacgacggccagttcccagtttgcaaggacatac

SEQ ID NO: 12164 - DNA, 21 bp, Artificial Sequence
  primer
tgggtggtgtgagtttctttc

SEQ ID NO: 12165 - DNA, 39 bp, Artificial Sequence
  primer
gtaaaacgacggccagtgcaatgcctgtaccttgctaac

SEQ ID NO: 12166 - DNA, 21 bp, Artificial Sequence
  primer
tgtggagtgactgtgtgttgg

SEQ ID NO: 12167 - DNA, 38 bp, Artificial Sequence
  primer
gtaaaacgacggccagtaaggagcaggctaaactcagg

SEQ ID NO: 12168 - DNA, 35 bp, Artificial Sequence
  primer
gtaaaacgacggccagtcctcctccacggcttacc

SEQ ID NO: 12169 - DNA, 38 bp, Artificial Sequence
  primer
gtaaaacgacggccagtctcacgccctaaggatgtagc

SEQ ID NO: 12170 - DNA, 22 bp, Artificial Sequence
  primer
tccatgtgtgctaagggtaaag

SEQ ID NO: 12171 - DNA, 21 bp, Artificial Sequence
  primer
tcccatccaaggtcacaaatc

SEQ ID NO: 12172 - DNA, 38 bp, Artificial Sequence
  primer
gtaaaacgacggccagttttcttccatcttaggagccc

SEQ ID NO: 12173 - DNA, 21 bp, Artificial Sequence
  primer
aagtgttccacgaagcggtag

SEQ ID NO: 12174 - DNA, 21 bp, Artificial Sequence
  primer
gagccagtgtgagaccaggac

SEQ ID NO: 12175 - DNA, 38 bp, Artificial Sequence
  primer
gtaaaacgacggccagtccctttcctcttcttcacacc

SEQ ID NO: 12176 - DNA, 39 bp, Artificial Sequence
  primer
gtaaaacgacggccagtgctggagaagcaactcaatagg

SEQ ID NO: 12177 - DNA, 41 bp, Artificial Sequence
  primer
gtaaaacgacggccagtcaaatagcattacggaatctcagc

SEQ ID NO: 12178 - DNA, 21 bp, Artificial Sequence
  primer
gggcaacaagagtgaaactcc

SEQ ID NO: 12179 - DNA, 21 bp, Artificial Sequence
  primer
atctgaggttcacagcttcgg

SEQ ID NO: 12180 - DNA, 18 bp, Artificial Sequence
  primer
cctgctagacagcgaggc

SEQ ID NO: 12181 - DNA, 39 bp, Artificial Sequence
  primer
gtaaaacgacggccagttgcccagcttgtgatttatttc

SEQ ID NO: 12182 - DNA, 21 bp, Artificial Sequence
  primer
ggtggaggcgttattaaccag

SEQ ID NO: 12183 - DNA, 38 bp, Artificial Sequence
  primer
gtaaaacgacggccagtttgttggatctgtgggatctg

SEQ ID NO: 12184 - DNA, 21 bp, Artificial Sequence
  primer
gttggtagtgagcattggtgc

SEQ ID NO: 12185 - DNA, 23 bp, Artificial Sequence
  primer
tgtctgtctgtatttccctcctg

SEQ ID NO: 12186 - DNA, 37 bp, Artificial Sequence
  primer
gtaaaacgacggccagtgctctcagtgggagagaggg

SEQ ID NO: 12187 - DNA, 38 bp, Artificial Sequence
  primer
gtaaaacgacggccagtgagacagaaccaagagccacc

SEQ ID NO: 12188 - DNA, 37 bp, Artificial Sequence
  primer
gtaaaacgacggccagtgtttggagcgagagtggatg

SEQ ID NO: 12189 - DNA, 38 bp, Artificial Sequence
  primer
gtaaaacgacggccagttaggttccttccggtagatgc

SEQ ID NO: 12190 - DNA, 21 bp, Artificial Sequence
  primer
ctcggtaacaggagcactgag

SEQ ID NO: 12191 - DNA, 38 bp, Artificial Sequence
  primer
gtaaaacgacggccagtctgatgcgtgatacctgcttc

SEQ ID NO: 12192 - DNA, 21 bp, Artificial Sequence
  primer
aggaagatcacttgaggccag

SEQ ID NO: 12193 - DNA, 20 bp, Artificial Sequence
  primer
cacttattcaccagcgtggg

SEQ ID NO: 12194 - DNA, 24 bp, Artificial Sequence
  primer
ttctaaagcccatttcagataagc

SEQ ID NO: 12195 - DNA, 39 bp, Artificial Sequence
  primer
gtaaaacgacggccagtcattgctgaggttctaggcttg

SEQ ID NO: 12196 - DNA, 21 bp, Artificial Sequence
  primer
aatttccgcctcttccagttc

SEQ ID NO: 12197 - DNA, 21 bp, Artificial Sequence
  primer
ggcctgaaataagacagtggg

SEQ ID NO: 12198 - DNA, 38 bp, Artificial Sequence
  primer
gtaaaacgacggccagtacgtttcatcaacagcaggag

SEQ ID NO: 12199 - DNA, 38 bp, Artificial Sequence
  primer
gtaaaacgacggccagtgtgatggtgctgttgctatcc

SEQ ID NO: 12200 - DNA, 38 bp, Artificial Sequence
  primer
gtaaaacgacggccagttggagagtggatgtaggcttg

SEQ ID NO: 12201 - DNA, 20 bp, Artificial Sequence
  primer
ggaactacaactcccggctc

SEQ ID NO: 12202 - DNA, 38 bp, Artificial Sequence
  primer
gtaaaacgacggccagtaccctggagtcttacgtgtgc

SEQ ID NO: 12203 - DNA, 38 bp, Artificial Sequence
  primer
gtaaaacgacggccagtttcagtgtcgttgcctagcac

SEQ ID NO: 12204 - DNA, 37 bp, Artificial Sequence
  primer
gtaaaacgacggccagtacgaaacggacctgattgtc

SEQ ID NO: 12205 - DNA, 38 bp, Artificial Sequence
  primer
gtaaaacgacggccagtttccgattccctctgagtttg

SEQ ID NO: 12206 - DNA, 21 bp, Artificial Sequence
  primer
gctgtttaaccaggcatcctc

SEQ ID NO: 12207 - DNA, 21 bp, Artificial Sequence
  primer
ttccagttacggatcttgctg

SEQ ID NO: 12208 - DNA, 38 bp, Artificial Sequence
  primer
gtaaaacgacggccagtggctttcatcacaccacatct

SEQ ID NO: 12209 - DNA, 23 bp, Artificial Sequence
  primer
actgtttccctattgactttgcc

SEQ ID NO: 12210 - DNA, 38 bp, Artificial Sequence
  primer
gtaaaacgacggccagtcaaagggcaggtcattaaagg

SEQ ID NO: 12211 - DNA, 43 bp, Artificial Sequence
  primer
gtaaaacgacggccagtaaatcaattatatgcatctcctttgg

SEQ ID NO: 12212 - DNA, 40 bp, Artificial Sequence
  primer
gtaaaacgacggccagtctatctacagtgggatggactgg

SEQ ID NO: 12213 - DNA, 39 bp, Artificial Sequence
  primer
gtaaaacgacggccagttcaattgactttgttcaatccg

SEQ ID NO: 12214 - DNA, 20 bp, Artificial Sequence
  primer
agggcacacagcatcctatc

SEQ ID NO: 12215 - DNA, 20 bp, Artificial Sequence
  primer
gtcagcaatgcatgaagcag

SEQ ID NO: 12216 - DNA, 21 bp, Artificial Sequence
  primer
tcctcagagcaagggaggtag

SEQ ID NO: 12217 - DNA, 37 bp, Artificial Sequence
  primer
gtaaaacgacggccagtctggcagtgtttgtgctcag

SEQ ID NO: 12218 - DNA, 35 bp, Artificial Sequence
  primer
gtaaaacgacggccagtggtggaaaggcaagggag

SEQ ID NO: 12219 - DNA, 38 bp, Artificial Sequence
  primer
gtaaaacgacggccagtcatgtggctctgtacctggag

SEQ ID NO: 12220 - DNA, 21 bp, Artificial Sequence
  primer
ggagagagagtccaagggagg

SEQ ID NO: 12221 - DNA, 39 bp, Artificial Sequence
  primer
gtaaaacgacggccagtggcctctatggttctgaatctg

SEQ ID NO: 12222 - DNA, 22 bp, Artificial Sequence
  primer
ggaggaatctccacctattgtg

SEQ ID NO: 12223 - DNA, 24 bp, Artificial Sequence
  primer
ggatatcactgttacgaaccaagg

SEQ ID NO: 12224 - DNA, 44 bp, Artificial Sequence
  primer
gtaaaacgacggccagtttcccattactagcaagataaagtgtt

SEQ ID NO: 12225 - DNA, 40 bp, Artificial Sequence
  primer
gtaaaacgacggccagttttgaagtttatccctgtggaaa

SEQ ID NO: 12226 - DNA, 38 bp, Artificial Sequence
  primer
gtaaaacgacggccagtaaatataccaccatcgagccc

SEQ ID NO: 12227 - DNA, 38 bp, Artificial Sequence
  primer
gtaaaacgacggccagttctttccgccttaaggaacac

SEQ ID NO: 12228 - DNA, 21 bp, Artificial Sequence
  primer
acacagctagggagagcatcc

SEQ ID NO: 12229 - DNA, 21 bp, Artificial Sequence
  primer
gccatctgctttggttcagag

SEQ ID NO: 12230 - DNA, 21 bp, Artificial Sequence
  primer
gaggaccgagtgactccactg

SEQ ID NO: 12231 - DNA, 38 bp, Artificial Sequence
  primer
gtaaaacgacggccagtttgttcttgaaattgggaggc

SEQ ID NO: 12232 - DNA, 38 bp, Artificial Sequence
  primer
gtaaaacgacggccagtaatgaatgcagtctctgctgg

SEQ ID NO: 12233 - DNA, 38 bp, Artificial Sequence
  primer
gtaaaacgacggccagtactcctccttcctaagggtcg

SEQ ID NO: 12234 - DNA, 36 bp, Artificial Sequence
  primer
gtaaaacgacggccagtggtgagaatggttgacccg

SEQ ID NO: 12235 - DNA, 18 bp, Artificial Sequence
  primer
aaccacgacgaggtgctg

SEQ ID NO: 12236 - DNA, 21 bp, Artificial Sequence
  primer
gtcaacaacaacgtgtacgcc

SEQ ID NO: 12237 - DNA, 37 bp, Artificial Sequence
  primer
gtaaaacgacggccagtctgggtgtgcacagtgtctg

SEQ ID NO: 12238 - DNA, 38 bp, Artificial Sequence
  primer
gtaaaacgacggccagttctttagttggcagggactgg

SEQ ID NO: 12239 - DNA, 40 bp, Artificial Sequence
  primer
gtaaaacgacggccagttgctgacctctaggagtgaagtg

SEQ ID NO: 12240 - DNA, 41 bp, Artificial Sequence
  primer
gtaaaacgacggccagtttaaattcctcttggaatctttgc

SEQ ID NO: 12241 - DNA, 38 bp, Artificial Sequence
  primer
gtaaaacgacggccagtgcattgtggttctgaggtgag

SEQ ID NO: 12242 - DNA, 26 bp, Artificial Sequence
  primer
ccttcaagttatcctttagtgagagg

SEQ ID NO: 12243 - DNA, 21 bp, Artificial Sequence
  primer
agcttaccgtgctacgaaacc

SEQ ID NO: 12244 - DNA, 43 bp, Artificial Sequence
  primer
gtaaaacgacggccagtaattgtgctatagaaatgttgcctac

SEQ ID NO: 12245 - DNA, 25 bp, Artificial Sequence
  primer
ccatccactatttaatctgccatac

SEQ ID NO: 12246 - DNA, 40 bp, Artificial Sequence
  primer
gtaaaacgacggccagttgtggtgtttgtttcaagtacga

SEQ ID NO: 12247 - DNA, 21 bp, Artificial Sequence
  primer
ggagccagttgaaggctgtag

SEQ ID NO: 12248 - DNA, 41 bp, Artificial Sequence; identical to SEQ ID NO: 12240
  primer

SEQ ID NO: 12249 - DNA, 38 bp, Artificial Sequence
  primer
gtaaaacgacggccagtccgacagtttgtggactctcc

SEQ ID NO: 12250 - DNA, 20 bp, Artificial Sequence
  primer
aacgcttgcagacccattag

SEQ ID NO: 12251 - DNA, 38 bp, Artificial Sequence
  primer
gtaaaacgacggccagtaggagatggcactgttgcttc

SEQ ID NO: 12252 - DNA, 38 bp, Artificial Sequence
  primer
gtaaaacgacggccagtgcgaatgtgaacatgaagacc

SEQ ID NO: 12253 - DNA, 37 bp, Artificial Sequence
  primer
gtaaaacgacggccagtcttgggctcaagcaatcctc

SEQ ID NO: 12254 - DNA, 21 bp, Artificial Sequence
  primer
tttgcctcaccaatagagacc

SEQ ID NO: 12255 - DNA, 38 bp, Artificial Sequence; identical to SEQ ID NO: 12251
  primer

SEQ ID NO: 12256 - DNA, 21 bp, Artificial Sequence
  primer
gcgaatgtgaacatgaagacc

SEQ ID NO: 12257 - DNA, 21 bp, Artificial Sequence
  primer
tctcatggatatcaacggctg

SEQ ID NO: 12258 - DNA, 37 bp, Artificial Sequence
  primer
gtaaaacgacggccagtcaggaccagctgttcaggag

SEQ ID NO: 12259 - DNA, 24 bp, Artificial Sequence
  primer
ttgattgtgtctactgggattcac

SEQ ID NO: 12260 - DNA, 21 bp, Artificial Sequence
  primer
tcgtttgcctgagattctttg

SEQ ID NO: 12261 - DNA, 44 bp, Artificial Sequence
  primer
gtaaaacgacggccagtttatctgccatatcatatttctgtctg

SEQ ID NO: 12262 - DNA, 38 bp, Artificial Sequence
  primer
gtaaaacgacggccagttgaatgacaccacaagggaag

SEQ ID NO: 12263 - DNA, 44 bp, Artificial Sequence
  primer
gtaaaacgacggccagtactcataacaaatagagttgaagtccc

SEQ ID NO: 12264 - DNA, 26 bp, Artificial Sequence
  primer
tccctagtatagtggtcatgctatcc

SEQ ID NO: 12265 - DNA, 36 bp, Artificial Sequence
  primer
gtaaaacgacggccagtcttggactgaggagcggac

SEQ ID NO: 12266 - DNA, 37 bp, Artificial Sequence
  primer
gtaaaacgacggccagtactaaagcccaccaacccac

SEQ ID NO: 12267 - DNA, 38 bp, Artificial Sequence
  primer
gtaaaacgacggccagtcactttaggtgggagtttggg

SEQ ID NO: 12268 - DNA, 37 bp, Artificial Sequence
  primer
gtaaaacgacggccagtcttgctttgaagcagggttg

SEQ ID NO: 12269 - DNA, 37 bp, Artificial Sequence
  primer
gtaaaacgacggccagtcagaagcctgtcaccctcag

SEQ ID NO: 12270 - DNA, 38 bp, Artificial Sequence
  primer
gtaaaacgacggccagtagtgtctggatttctgccacc

SEQ ID NO: 12271 - DNA, 38 bp, Artificial Sequence
  primer
gtaaaacgacggccagtcttctagggcagacgtcaagg

SEQ ID NO: 12272 - DNA, 38 bp, Artificial Sequence
  primer
gtaaaacgacggccagtaaactgcacttccctctcctg

SEQ ID NO: 12273 - DNA, 20 bp, Artificial Sequence
  primer
ctaggcctcgtcctctcacc

SEQ ID NO: 12274 - DNA, 38 bp, Artificial Sequence
  primer
gtaaaacgacggccagtgctgtgccatggtaatgtttg

SEQ ID NO: 12275 - DNA, 21 bp, Artificial Sequence
  primer
aaatcctcctggaccacaatg

SEQ ID NO: 12276 - DNA, 21 bp, Artificial Sequence
  primer
caccaccacacccagctagta

SEQ ID NO: 12277 - DNA, 38 bp, Artificial Sequence; identical to SEQ ID NO: 12274
  primer

SEQ ID NO: 12278 - DNA, 21 bp, Artificial Sequence
  primer
aaatcctcctggaccacaatg

SEQ ID NO: 12279 - DNA, 38 bp, Artificial Sequence
  primer
gtaaaacgacggccagtcggtcctttgcatgtcaagtc

SEQ ID NO: 12280 - DNA, 23 bp, Artificial Sequence
  primer
cctaaccctaaagacaggtgtgc

SEQ ID NO: 12281 - DNA, 21 bp, Artificial Sequence
  primer
tcctttggtttggacattgac

SEQ ID NO: 12282 - DNA, 21 bp, Artificial Sequence
  primer
cagagcactgcatagcaaagg

SEQ ID NO: 12283 - DNA, 21 bp, Artificial Sequence
  primer
gccatgaagggaaatcttgag

SEQ ID NO: 12284 - DNA, 21 bp, Artificial Sequence
  primer
accatttgaccagaacgtgtg

SEQ ID NO: 12285 - DNA, 37 bp, Artificial Sequence
  primer
gtaaaacgacggccagtgatgggcaaggataagcctc

SEQ ID NO: 12286 - DNA, 38 bp, Artificial Sequence
  primer
gtaaaacgacggccagtctttgagccaggtcagctttg

SEQ ID NO: 12287 - DNA, 38 bp, Artificial Sequence
  primer
gtaaaacgacggccagtcatcttcagagtggtggaccc

SEQ ID NO: 12288 - DNA, 35 bp, Artificial Sequence
  primer
gtaaaacgacggccagtcctggataagctgctgcc

SEQ ID NO: 12289 - DNA, 37 bp, Artificial Sequence
  primer
gtaaaacgacggccagttttccaggattgctgtgctc

SEQ ID NO: 12290 - DNA, 40 bp, Artificial Sequence
  primer
gtaaaacgacggccagtcagacctgcataatggttcagac

SEQ ID NO: 12291 - DNA, 21 bp, Artificial Sequence
  primer
gtgtccggctgttctttatgc

SEQ ID NO: 12292 - DNA, 22 bp, Artificial Sequence
  primer
tctttgccaatgactttactgc

SEQ ID NO: 12293 - DNA, 40 bp, Artificial Sequence
  primer
gtaaaacgacggccagtagctcctcagaggtgacagtatc

SEQ ID NO: 12294 - DNA, 21 bp, Artificial Sequence
  primer
cacttggctgtaggtgtgtgg

SEQ ID NO: 12295 - DNA, 42 bp, Artificial Sequence
  primer
gtaaaacgacggccagtgaagggcaattagataatgttagga

SEQ ID NO: 12296 - DNA, 38 bp, Artificial Sequence
  primer
gtaaaacgacggccagtgcacatgctccataaacattg

SEQ ID NO: 12297 - DNA, 39 bp, Artificial Sequence
  primer
gtaaaacgacggccagtgccaggtctcttgattcatagc

SEQ ID NO: 12298 - DNA, 38 bp, Artificial Sequence
  primer
gtaaaacgacggccagttgttgggattgttgtggtttg

SEQ ID NO: 12299 - DNA, 21 bp, Artificial Sequence
  primer
tcctaaggcgagaggttgaag

SEQ ID NO: 12300 - DNA, 38 bp, Artificial Sequence
  primer
gtaaaacgacggccagtaagtgttgtcattgctgtggg

SEQ ID NO: 12301 - DNA, 38 bp, Artificial Sequence
  primer
gtaaaacgacggccagtgagtgtttggaatagggcagg

SEQ ID NO: 12302 - DNA, 21 bp, Artificial Sequence
  primer
aaggcatcattaaccagtccc

SEQ ID NO: 12303 - DNA, 38 bp, Artificial Sequence
  primer
gtaaaacgacggccagtcatactgagcaaggtccctcc

SEQ ID NO: 12304 - DNA, 20 bp, Artificial Sequence
  primer
ttcagatcacctgaccctgg

SEQ ID NO: 12305 - DNA, 21 bp, Artificial Sequence
  primer
tgtaacatcctgcctgtttgg

SEQ ID NO: 12306 - DNA, 21 bp, Artificial Sequence
  primer
tgagctcagggaagaaccaag

SEQ ID NO: 12307 - DNA, 21 bp, Artificial Sequence
  primer
tcaggtgtaaaccactgcacc

SEQ ID NO: 12308 - DNA, 21 bp, Artificial Sequence
  primer
aaatgcctcattcctccactg

SEQ ID NO: 12309 - DNA, 38 bp, Artificial Sequence
  primer
gtaaaacgacggccagtagatcttcagctccttgctgc

SEQ ID NO: 12310 - DNA, 38 bp, Artificial Sequence
  primer
gtaaaacgacggccagtgaggccagagtggctgtagtc

SEQ ID NO: 12311 - DNA, 38 bp, Artificial Sequence
  primer
gtaaaacgacggccagttgcctagtccagtgctgtctg

SEQ ID NO: 12312 - DNA, 38 bp, Artificial Sequence
  primer
gtaaaacgacggccagtctaggagtgcctgttgaaggg

SEQ ID NO: 12313 - DNA, 37 bp, Artificial Sequence
  primer
gtaaaacgacggccagtgtctctggaccctccgtacc

SEQ ID NO: 12314 - DNA, 20 bp, Artificial Sequence
  primer
agtacagcgtggtggtggag

SEQ ID NO: 12315 - DNA, 21 bp, Artificial Sequence
  primer
agagctgtcccgactgaagag

SEQ ID NO: 12316 - DNA, 38 bp, Artificial Sequence
  primer
gtaaaacgacggccagtcctctcccagtgaacaccaag

SEQ ID NO: 12317 - DNA, 37 bp, Artificial Sequence
  primer
gtaaaacgacggccagtctctgccacctcttccgaac

SEQ ID NO: 12318 - DNA, 42 bp, Artificial Sequence
  primer
gtaaaacgacggccagtagatacaactttgaattcttgtggg

SEQ ID NO: 12319 - DNA, 21 bp, Artificial Sequence
  primer
agtgatcttcctgccttgacc

SEQ ID NO: 12320 - DNA, 37 bp, Artificial Sequence
  primer
gtaaaacgacggccagtccttcatcatctgccactgc

SEQ ID NO: 12321 - DNA, 40 bp, Artificial Sequence
  primer
gtaaaacgacggccagtagtttggctttacacctctgttg

SEQ ID NO: 12322 - DNA, 19 bp, Artificial Sequence
  primer
gggtggaggaaagaaatgg

SEQ ID NO: 12323 - DNA, 39 bp, Artificial Sequence
  primer
gtaaaacgacggccagttggaaggctagctcccaatatc

SEQ ID NO: 12324 - DNA, 27 bp, Artificial Sequence
  primer
gctaagtttatttaccagtgctttgtt

SEQ ID NO: 12325 - DNA, 22 bp, Artificial Sequence
  primer
ttctcaactgcatatacctccg

SEQ ID NO: 12326 - DNA, 44 bp, Artificial Sequence
  primer
gtaaaacgacggccagtcaataaattgtgacttgtattggctac

SEQ ID NO: 12327 - DNA, 40 bp, Artificial Sequence
  primer
gtaaaacgacggccagttgatttatgtagaggtggccaaa

SEQ ID NO: 12328 - DNA, 24 bp, Artificial Sequence
  primer
gaccctcaattgacctctacactc

SEQ ID NO: 12329 - DNA, 24 bp, Artificial Sequence
  primer
ctctgcattctagatagcctgaaa

SEQ ID NO: 12330 - DNA, 27 bp, Artificial Sequence
  primer
tggaatgatatccaggctactattaag

SEQ ID NO: 12331 - DNA, 23 bp, Artificial Sequence
  primer
tggatgaaagagacacttgcttt

SEQ ID NO: 12332 - DNA, 23 bp, Artificial Sequence
  primer
ttgccatatttgcctaatttcag

SEQ ID NO: 12333 - DNA, 42 bp, Artificial Sequence
  primer
gtaaaacgacggccagtaaacttcacctctgacagaatggac

SEQ ID NO: 12334 - DNA, 24 bp, Artificial Sequence
  primer
aagcttcctttatttaatggcata

SEQ ID NO: 12335 - DNA, 43 bp, Artificial Sequence
  primer
gtaaaacgacggccagtcattataactgcactgtctagggctc

SEQ ID NO: 12336 - DNA, 24 bp, Artificial Sequence
  primer
ttgtatcagcctcaagatcatttc

SEQ ID NO: 12337 - DNA, 38 bp, Artificial Sequence
  primer
gtaaaacgacggccagtttcaaggatgcagcttgactt

SEQ ID NO: 12338 - DNA, 21 bp, Artificial Sequence
  primer
acatgccaggtcaagaatgtc

SEQ ID NO: 12339 - DNA, 44 bp, Artificial Sequence
  primer
gtaaaacgacggccagtataaagcttctagagtgagaagattgg

SEQ ID NO: 12340 - DNA, 38 bp, Artificial Sequence
  primer
gtaaaacgacggccagtgtatcctcagaagggcaccat

SEQ ID NO: 12341 - DNA, 22 bp, Artificial Sequence
  primer
gaaatgccagatctgtaatggg

SEQ ID NO: 12342 - DNA, 43 bp, Artificial Sequence
  primer
gtaaaacgacggccagttgtcagtgattggaatttatatgacc

SEQ ID NO: 12343 - DNA, 21 bp, Artificial Sequence
  primer
atgcactgggagtaggattgc

SEQ ID NO: 12344 - DNA, 21 bp, Artificial Sequence
  primer
agctaatgccagagaccttgc

SEQ ID NO: 12345 - DNA, 39 bp, Artificial Sequence
  primer
gtaaaacgacggccagtgcaataatgccacatttcatgc

SEQ ID NO: 12346 - DNA, 27 bp, Artificial Sequence
  primer
ggttgttactcattaaagaacatatca

SEQ ID NO: 12347 - DNA, 20 bp, Artificial Sequence
  primer
tcaagctgacccttgctttc

SEQ ID NO: 12348 - DNA, 22 bp, Artificial Sequence
  primer
gaagcatgccataatcagtaaa

SEQ ID NO: 12349 - DNA, 23 bp, Artificial Sequence
  primer
aagtatgttggaaccaaattccc

SEQ ID NO: 12350 - DNA, 24 bp, Artificial Sequence
  primer
gggaacaataattgactgaattgc

SEQ ID NO: 12351 - DNA, 21 bp, Artificial Sequence
  primer
cccatctgattgagaagtccc

SEQ ID NO: 12352 - DNA, 26 bp, Artificial Sequence
  primer
ttctaagggatatggttattgtatga

SEQ ID NO: 12353 - DNA, 38 bp, Artificial Sequence
  primer
gtaaaacgacggccagtatttgttccctgcaatccaac

SEQ ID NO: 12354 - DNA, 21 bp, Artificial Sequence
  primer
tactgccttgggctgttatcc

SEQ ID NO: 12355 - DNA, 38 bp, Artificial Sequence
  primer
gtaaaacgacggccagtgggtaaatggtccacagaatg

SEQ ID NO: 12356 - DNA, 39 bp, Artificial Sequence
  primer
gtaaaacgacggccagtcaacgtagccttaaccacaacc

SEQ ID NO: 12357 - DNA, 38 bp, Artificial Sequence
  primer
gtaaaacgacggccagtcccagcctcctactaccaaag

SEQ ID NO: 12358 - DNA, 36 bp, Artificial Sequence
  primer
gtaaaacgacggccagtagtgcgtctttcctgcgtc

SEQ ID NO: 12359 - DNA, 21 bp, Artificial Sequence
  primer
cgcttctgcacagcgttatac

SEQ ID NO: 12360 - DNA, 37 bp, Artificial Sequence
  primer
gtaaaacgacggccagtttcttgccatgaagctgagg

SEQ ID NO: 12361 - DNA, 38 bp, Artificial Sequence
  primer
gtaaaacgacggccagtgccacatacacctggttgaag

SEQ ID NO: 12362 - DNA, 38 bp, Artificial Sequence
  primer
gtaaaacgacggccagtagcagcataggtggctctctc

SEQ ID NO: 12363 - DNA, 38 bp, Artificial Sequence
  primer
gtaaaacgacggccagtcttgagggagaggttctgtgg

SEQ ID NO: 12364 - DNA, 38 bp, Artificial Sequence
  primer
gtaaaacgacggccagtgtagaacttggttgcagggtg

SEQ ID NO: 12365 - DNA, 38 bp, Artificial Sequence
  primer
gtaaaacgacggccagtggcagctcagtcgtttctatg

SEQ ID NO: 12366 - DNA, 20 bp, Artificial Sequence
  primer
gggtcttcctgcagagtgag

SEQ ID NO: 12367 - DNA, 21 bp, Artificial Sequence
  primer
cgtgtatttgtggcatccttg

SEQ ID NO: 12368 - DNA, 38 bp, Artificial Sequence
  primer
gtaaaacgacggccagttttatttcccaggccttgatg

SEQ ID NO: 12369 - DNA, 38 bp, Artificial Sequence
  primer
gtaaaacgacggccagttatgcaaagagattgccaggg

SEQ ID NO: 12370 - DNA, 22 bp, Artificial Sequence
  primer
aataagcccatggaagttaggg

SEQ ID NO: 12371 - DNA, 38 bp, Artificial Sequence
  primer
gtaaaacgacggccagtacctgatgggttgatacctgc

SEQ ID NO: 12372 - DNA, 38 bp, Artificial Sequence
  primer
gtaaaacgacggccagttattgtctccatcctttgggc

SEQ ID NO: 12373 - DNA, 40 bp, Artificial Sequence
  primer
gtaaaacgacggccagttgtggtgtgaatcataaaggagg

SEQ ID NO: 12374 - DNA, 38 bp, Artificial Sequence
  primer
gtaaaacgacggccagttgatggtgcaacttctgcttc

SEQ ID NO: 12375 - DNA, 38 bp, Artificial Sequence
  primer
gtaaaacgacggccagtcccatgggttaaggttgattg

SEQ ID NO: 12376 - DNA, 38 bp, Artificial Sequence
  primer
gtaaaacgacggccagtgagagaagctctgaggccaac

SEQ ID NO: 12377 - DNA, 38 bp, Artificial Sequence
  primer
gtaaaacgacggccagtagggatcagtatccttgcctg

SEQ ID NO: 12378 - DNA, 39 bp, Artificial Sequence
  primer
gtaaaacgacggccagttttctaagcaattcatgggagc

SEQ ID NO: 12379 - DNA, 21 bp, Artificial Sequence
  primer
tgctgtgacttcatccagttg

SEQ ID NO: 12380 - DNA, 38 bp, Artificial Sequence
  primer
gtaaaacgacggccagttcacagtgagagaggtgagcc

SEQ ID NO: 12381 - DNA, 38 bp, Artificial Sequence
  primer
gtaaaacgacggccagtctgtagcaaatctcacctggc

SEQ ID NO: 12382 - DNA, 38 bp, Artificial Sequence
  primer
gtaaaacgacggccagtgagctggaggtaatgaaaccg

SEQ ID NO: 12383 - DNA, 38 bp, Artificial Sequence
  primer
gtaaaacgacggccagtcacattgagaagagggaaggc

SEQ ID NO: 12384 - DNA, 38 bp, Artificial Sequence
  primer
gtaaaacgacggccagtctgaccataaagggaagaccc

SEQ ID NO: 12385 - DNA, 37 bp, Artificial Sequence
  primer
gtaaaacgacggccagtctcagtctacgttgctgggc

SEQ ID NO: 12386 - DNA, 21 bp, Artificial Sequence
  primer
gtttccagtgttcatggaggg

SEQ ID NO: 12387 - DNA, 38 bp, Artificial Sequence
  primer
gtaaaacgacggccagtaattgatccatgtcccagtcc

SEQ ID NO: 12388 - DNA, 38 bp, Artificial Sequence
  primer
gtaaaacgacggccagttgagatctgcaggtcaacagg

SEQ ID NO: 12389 - DNA, 38 bp, Artificial Sequence
  primer
gtaaaacgacggccagtctgttgggctgttcacaaagg

SEQ ID NO: 12390 - DNA, 38 bp, Artificial Sequence
  primer
gtaaaacgacggccagttaggacccactctcctcatcc

SEQ ID NO: 12391 - DNA, 37 bp, Artificial Sequence
  primer
gtaaaacgacggccagtgggttagcccatgttgcttg

SEQ ID NO: 12392 - DNA, 37 bp, Artificial Sequence
  primer
gtaaaacgacggccagtccatgaggcagtgagcctac

SEQ ID NO: 12393 - DNA, 37 bp, Artificial Sequence
  primer
gtaaaacgacggccagtcgtgatttgtccgtgtctcc

SEQ ID NO: 12394 - DNA, 37 bp, Artificial Sequence
  primer
gtaaaacgacggccagtgaccatgccctgttgatttg

SEQ ID NO: 12395 - DNA, 38 bp, Artificial Sequence
  primer
gtaaaacgacggccagtcgtgatcctttggtggttctc

SEQ ID NO: 12396 - DNA, 36 bp, Artificial Sequence
  primer
gtaaaacgacggccagtcccactgggatgagaggtg

SEQ ID NO: 12397 - DNA, 21 bp, Artificial Sequence
  primer
catacctccctcaaacccatc

SEQ ID NO: 12398 - DNA, 37 bp, Artificial Sequence
  primer
gtaaaacgacggccagtcctgcaggctcacttgtctc

SEQ ID NO: 12399 - DNA, 21 bp, Artificial Sequence
  primer
tagctctttgctgcctgtgtc

SEQ ID NO: 12400 - DNA, 37 bp, Artificial Sequence
  primer
gtaaaacgacggccagttgacagccagattgcagatg

SEQ ID NO: 12401 - DNA, 21 bp, Artificial Sequence
  primer
acaaggaaatgagccagaacc

SEQ ID NO: 12402 - DNA, 38 bp, Artificial Sequence
  primer
gtaaaacgacggccagtctagcatttgttctggcatgg

SEQ ID NO: 12403 - DNA, 38 bp, Artificial Sequence
  primer
gtaaaacgacggccagtggcatctccctggaatgtaaa

SEQ ID NO: 12404 - DNA, 39 bp, Artificial Sequence
  primer
gtaaaacgacggccagttttgggtgtatgatggtttctg

SEQ ID NO: 12405 - DNA, 38 bp, Artificial Sequence
  primer
gtaaaacgacggccagtttgtctgggttgaacatgacc

SEQ ID NO: 12406 - DNA, 38 bp, Artificial Sequence
  primer
gtaaaacgacggccagtattgaacaaccaaccaatccc

SEQ ID NO: 12407 - DNA, 21 bp, Artificial Sequence
  primer
catgcctgtctttgtgcctac

SEQ ID NO: 12408 - DNA, 24 bp, Artificial Sequence
  primer
tcttgttctcaaactgatttgtcg

SEQ ID NO: 12409 - DNA, 21 bp, Artificial Sequence
  primer
tggacacctgtttccagtcag

SEQ ID NO: 12410 - DNA, 21 bp, Artificial Sequence
  primer
acaaatcctggacctgacacc

SEQ ID NO: 12411 - DNA, 38 bp, Artificial Sequence
  primer
gtaaaacgacggccagtagcttgttcttcaccagcaac

SEQ ID NO: 12412 - DNA, 21 bp, Artificial Sequence
  primer
tgcacccaagttctctctgtg

SEQ ID NO: 12413 - DNA, 20 bp, Artificial Sequence
  primer
acttcagcggctttggctac

SEQ ID NO: 12414 - DNA, 38 bp, Artificial Sequence
  primer
gtaaaacgacggccagtcaccactaggcctcctatccc

SEQ ID NO: 12415 - DNA, 20 bp, Artificial Sequence
  primer
gtgaagctggtgaacttggg

SEQ ID NO: 12416 - DNA, 21 bp, Artificial Sequence
  primer
ctatcttccctgattctgccc

SEQ ID NO: 12417 - DNA, 38 bp, Artificial Sequence
  primer
gtaaaacgacggccagtcaggtccttctatctggagcc

SEQ ID NO: 12418 - DNA, 38 bp, Artificial Sequence
  primer
gtaaaacgacggccagttgcaaagacagacccactgag

SEQ ID NO: 12419 - DNA, 21 bp, Artificial Sequence
  primer
gctgccatcgactacatcaag

SEQ ID NO: 12420 - DNA, 38 bp, Artificial Sequence
  primer
gtaaaacgacggccagttccagcaatacagcgaatcag

SEQ ID NO: 12421 - DNA, 21 bp, Artificial Sequence
  primer
gaggttaagaccaatggaccg

SEQ ID NO: 12422 - DNA, 38 bp, Artificial Sequence
  primer
gtaaaacgacggccagtaaaccttccctctcctgttcc

SEQ ID NO: 12423 - DNA, 20 bp, Artificial Sequence
  primer
caccgctatcgagtcctcag

SEQ ID NO: 12424 - DNA, 37 bp, Artificial Sequence
  primer
gtaaaacgacggccagtactcaggaggcagtgaatgg

SEQ ID NO: 12425 - DNA, 38 bp, Artificial Sequence
  primer
gtaaaacgacggccagtaccaagaagaggaagaagccc

SEQ ID NO: 12426 - DNA, 21 bp, Artificial Sequence
  primer
cagttgagtctcagccacagg

SEQ ID NO: 12427 - DNA, 18 bp, Artificial Sequence
  primer
ctgccggatgaccttgag

SEQ ID NO: 12428 - DNA, 22 bp, Artificial Sequence
  primer
gccagtaagtggctaagtggac

SEQ ID NO: 12429 - DNA, 20 bp, Artificial Sequence
  primer
aaactccagtcttgcctgcc

SEQ ID NO: 12430 - DNA, 22 bp, Artificial Sequence
  primer
ttctttgctacagccctagtcg

SEQ ID NO: 12431 - DNA, 38 bp, Artificial Sequence
  primer
gtaaaacgacggccagtcagttctcggagagaagaggc

SEQ ID NO: 12432 - DNA, 39 bp, Artificial Sequence
  primer
gtaaaacgacggccagtaatacaagagcctatccctgcc

SEQ ID NO: 12433 - DNA, 39 bp, Artificial Sequence
  primer
gtaaaacgacggccagtaaactgagggcagagagcatac

SEQ ID NO: 12434 - DNA, 37 bp, Artificial Sequence
  primer
gtaaaacgacggccagtctcttgctgggcttgagatg

SEQ ID NO: 12435 - DNA, 38 bp, Artificial Sequence
  primer
gtaaaacgacggccagtccctcattcccactctagtcc

SEQ ID NO: 12436 - DNA, 39 bp, Artificial Sequence
  primer
gtaaaacgacggccagttcctcctagactactagggccg

SEQ ID NO: 12437 - DNA, 20 bp, Artificial Sequence
  primer
ctgctgcttgtggttgtctg

SEQ ID NO: 12438 - DNA, 38 bp, Artificial Sequence
  primer
gtaaaacgacggccagtcctgagagagacgttcagcaa

SEQ ID NO: 12439 - DNA, 38 bp, Artificial Sequence
  primer
gtaaaacgacggccagtatgtagggctgacctcgtttc

SEQ ID NO: 12440 - DNA, 21 bp, Artificial Sequence
  primer
acgtgaagcagttcgtgtctg

SEQ ID NO: 12441 - DNA, 21 bp, Artificial Sequence
  primer
agctgctactggttctctcgc

SEQ ID NO: 12442 - DNA, 21 bp, Artificial Sequence
  primer
ctacgagacgggcttcaagtg

SEQ ID NO: 12443 - DNA, 38 bp, Artificial Sequence
  primer
gtaaaacgacggccagtctgccaacctcagatcctacc

SEQ ID NO: 12444 - DNA, 36 bp, Artificial Sequence
  primer
gtaaaacgacggccagttcggtgccctgtctttacc

SEQ ID NO: 12445 - DNA, 38 bp, Artificial Sequence
  primer
gtaaaacgacggccagttagggaaagagacatgggcag

SEQ ID NO: 12446 - DNA, 38 bp, Artificial Sequence
  primer
gtaaaacgacggccagtgacccattgaagggactgaag

SEQ ID NO: 12447 - DNA, 38 bp, Artificial Sequence
  primer
gtaaaacgacggccagtggtatggtgtgtggtgtggtc

SEQ ID NO: 12448 - DNA, 20 bp, Artificial Sequence
  primer
ctcctccacagcaacggtag

SEQ ID NO: 12449 - DNA, 21 bp, Artificial Sequence
  primer
ctaggaagcagtcttgtcggg

SEQ ID NO: 12450 - DNA, 38 bp, Artificial Sequence
  primer
gtaaaacgacggccagtaggaaacatctttctctgcgg

SEQ ID NO: 12451 - DNA, 22 bp, Artificial Sequence
  primer
tgggtagttgttgacctccttg

SEQ ID NO: 12452 - DNA, 38 bp, Artificial Sequence
  primer
gtaaaacgacggccagtacatacgcttgtgatggaccc

SEQ ID NO: 12453 - DNA, 21 bp, Artificial Sequence
  primer
tcatccgtcttcattcacagg

SEQ ID NO: 12454 - DNA, 21 bp, Artificial Sequence
  primer
ggatttgatcaggaaagcagg

SEQ ID NO: 12455 - DNA, 21 bp, Artificial Sequence
  primer
taggacttggcactgtggttg

SEQ ID NO: 12456 - DNA, 21 bp, Artificial Sequence
  primer
aaccttaaagccgaagcactg

SEQ ID NO: 12457 - DNA, 21 bp, Artificial Sequence
  primer
cgttggtcataggtcagttgg

SEQ ID NO: 12458 - DNA, 38 bp, Artificial Sequence
  primer
gtaaaacgacggccagtaacctcggtggactaaagtgg

SEQ ID NO: 12459 - DNA, 20 bp, Artificial Sequence
  primer
agatgcctcaactggaaggg

SEQ ID NO: 12460 - DNA, 21 bp, Artificial Sequence
  primer
caggcctaagaggcaaatgag

SEQ ID NO: 12461 - DNA, 21 bp, Artificial Sequence
  primer
agagcgaggatcaacttcagg

SEQ ID NO: 12462 - DNA, 21 bp, Artificial Sequence
  primer
ttgagcaaacagctcaacagg

SEQ ID NO: 12463 - DNA, 21 bp, Artificial Sequence
  primer
tggaggtcagagccctgtaag

SEQ ID NO: 12464 - DNA, 38 bp, Artificial Sequence
  primer
gtaaaacgacggccagttaacagcacatcagacagggc

SEQ ID NO: 12465 - DNA, 21 bp, Artificial Sequence
  primer
cccagcttcgaaatagacagg

SEQ ID NO: 12466 - DNA, 38 bp, Artificial Sequence
  primer
gtaaaacgacggccagtcccttacagctgctcccatag

SEQ ID NO: 12467 - DNA, 38 bp, Artificial Sequence
  primer
gtaaaacgacggccagtctatggacactggctcttccc

SEQ ID NO: 12468 - DNA, 40 bp, Artificial Sequence
  primer
gtaaaacgacggccagtgatgacagtggcagcaactaaac

SEQ ID NO: 12469 - DNA, 40 bp, Artificial Sequence
  primer
gtaaaacgacggccagtttcagtaaacggagttccctctc

SEQ ID NO: 12470 - DNA, 21 bp, Artificial Sequence
  primer
ctgtgattgcaactgcctctg

SEQ ID NO: 12471 - DNA, 21 bp, Artificial Sequence
  primer
ctttgtgaaacgtaggccagg

SEQ ID NO: 12472 - DNA, 20 bp, Artificial Sequence
  primer
tggccagataaggaagtccc

SEQ ID NO: 12473 - DNA, 21 bp, Artificial Sequence
  primer
cagtccttccacctcagcttc

SEQ ID NO: 12474 - DNA, 23 bp, Artificial Sequence
  primer
tcgtgtggagtatagtgggaaag

SEQ ID NO: 12475 - DNA, 38 bp, Artificial Sequence
  primer
gtaaaacgacggccagtttagtgattgatgctgccgtc

SEQ ID NO: 12476 - DNA, 21 bp, Artificial Sequence
  primer
ttagtgattgatgctgccgtc

SEQ ID NO: 12477 - DNA, 20 bp, Artificial Sequence
  primer
agcccgacttggaaattctg

SEQ ID NO: 12478 - DNA, 38 bp, Artificial Sequence
  primer
gtaaaacgacggccagttgaacaggagttcaggtacgg

SEQ ID NO: 12479 - DNA, 19 bp, Artificial Sequence
  primer
caggcgtggtggcttacac

SEQ ID NO: 12480 - DNA, 20 bp, Artificial Sequence
  primer
ggttgagactgcagtgagcc

SEQ ID NO: 12481 - DNA, 21 bp, Artificial Sequence
  primer
aagggaattaccagagggtgg

SEQ ID NO: 12482 - DNA, 41 bp, Artificial Sequence
  primer
gtaaaacgacggccagtcgtatatcgtctaacaatggcttc

SEQ ID NO: 12483 - DNA, 38 bp, Artificial Sequence
  primer
gtaaaacgacggccagtcaggaatccattgggaaagag

SEQ ID NO: 12484 - DNA, 18 bp, Artificial Sequence
  primer
atgccattgcacaccagc

SEQ ID NO: 12485 - DNA, 20 bp, Artificial Sequence
  primer
cttgcctcccttgtatggtg

SEQ ID NO: 12486 - DNA, 25 bp, Artificial Sequence
  primer
aaagaaagtcatgctaccttgctac

SEQ ID NO: 12487 - DNA, 23 bp, Artificial Sequence
  primer
tcacccagttatcccttagttcc

SEQ ID NO: 12488 - DNA, 24 bp, Artificial Sequence
  primer
tccaggtttaacagctctagttgc

SEQ ID NO: 12489 - DNA, 20 bp, Artificial Sequence
  primer
tcaagaaatggaatgcctcc

SEQ ID NO: 12490 - DNA, 38 bp, Artificial Sequence
  primer
gtaaaacgacggccagtgtacgtgctgaggtcctgtcc

SEQ ID NO: 12491 - DNA, 38 bp, Artificial Sequence
  primer
gtaaaacgacggccagtctctcccattggtgtgtatgg

SEQ ID NO: 12492 - DNA, 38 bp, Artificial Sequence
  primer
gtaaaacgacggccagtgctgataatcattgtggcctg

SEQ ID NO: 12493 - DNA, 38 bp, Artificial Sequence
  primer
gtaaaacgacggccagttcttgaggcctcctacccttc

SEQ ID NO: 12494 - DNA, 38 bp, Artificial Sequence
  primer
gtaaaacgacggccagtcattgagttcgtgtgctctcc

SEQ ID NO: 12495 - DNA, 22 bp, Artificial Sequence
  primer
gaagactacagcgtcacacagc

SEQ ID NO: 12496 - DNA, 38 bp, Artificial Sequence
  primer
gtaaaacgacggccagtgctgcaggagtatgaagttcg

SEQ ID NO: 12497 - DNA, 21 bp, Artificial Sequence
  primer
tcaggatcacttgagaccagc

SEQ ID NO: 12498 - DNA, 21 bp, Artificial Sequence
  primer
gcagtgagctatgattgcacc

SEQ ID NO: 12499 - DNA, 38 bp, Artificial Sequence
  primer
gtaaaacgacggccagtcaattgcccatttcaggtcac

SEQ ID NO: 12500 - DNA, 43 bp, Artificial Sequence
  primer
gtaaaacgacggccagtaatctgtgtattgtgtgtatgcaatg

SEQ ID NO: 12501 - DNA, 38 bp, Artificial Sequence
  primer
gtaaaacgacggccagtggacactgcacctaggaattg

SEQ ID NO: 12502 - DNA, 21 bp, Artificial Sequence
  primer
tactcgggagggtaaaccaag

SEQ ID NO: 12503 - DNA, 38 bp, Artificial Sequence
  primer
gtaaaacgacggccagtgaaggaaatcctcctgtggtg

SEQ ID NO: 12504 - DNA, 23 bp, Artificial Sequence
  primer
aaccagaggcctttcttacacag

SEQ ID NO: 12505 - DNA, 41 bp, Artificial Sequence
  primer
gtaaaacgacggccagtcaaacacctgacctgatatttgtg

SEQ ID NO: 12506 - DNA, 38 bp, Artificial Sequence
  primer
gtaaaacgacggccagtttgagctggtttgctattccc

SEQ ID NO: 12507 - DNA, 21 bp, Artificial Sequence
  primer
acactatttgtgtgcggatgc

SEQ ID NO: 12508 - DNA, 21 bp, Artificial Sequence
  primer
tctggcagcagcacttctaac

SEQ ID NO: 12509 - DNA, 21 bp, Artificial Sequence
  primer
acagagcaaattgggatcctg

SEQ ID NO: 12510 - DNA, 38 bp, Artificial Sequence
  primer
gtaaaacgacggccagttacaaatggctgcatgtgtcc

SEQ ID NO: 12511 - DNA, 38 bp, Artificial Sequence
  primer
gtaaaacgacggccagtaaagcaggaaggcctcttacc

SEQ ID NO: 12512 - DNA, 21 bp, Artificial Sequence
  primer
actcatccagcacgcttcttc

SEQ ID NO: 12513 - DNA, 21 bp, Artificial Sequence
  primer
atggaggtgagggaatctgac

SEQ ID NO: 12514 - DNA, 20 bp, Artificial Sequence
  primer
tactgcgtagaggccgtagc

SEQ ID NO: 12515 - DNA, 27 bp, Artificial Sequence
  primer
tgctaataacttaaactggtagggttg

SEQ ID NO: 12516 - DNA, 38 bp, Artificial Sequence; identical to SEQ ID NO: 747
  primer

SEQ ID NO: 12517 - DNA, 37 bp, Artificial Sequence
  primer
gtaaaacgacggccagtaaaccaaagaggtcacccaa

SEQ ID NO: 12518 - DNA, 26 bp, Artificial Sequence
  primer
gggtctgttacaaataactgccttag

SEQ ID NO: 12519 - DNA, 38 bp, Artificial Sequence
  primer
gtaaaacgacggccagtcccattaatccatgaattccc

SEQ ID NO: 12520 - DNA, 25 bp, Artificial Sequence
  primer
aatgcaaggtacttgctgagtgtat

SEQ ID NO: 12521 - DNA, 23 bp, Artificial Sequence
  primer
tggaaatgaggtgataatggaag

SEQ ID NO: 12522 - DNA, 26 bp, Artificial Sequence
  primer
tttgaaggaaagcctaaataatttgt

SEQ ID NO: 12523 - DNA, 39 bp, Artificial Sequence
  primer
gtaaaacgacggccagttgcaaattatgcagattgtgtg

SEQ ID NO: 12524 - DNA, 29 bp, Artificial Sequence
  primer
gggtattatctttggagtagttattggaa

SEQ ID NO: 12525 - DNA, 38 bp, Artificial Sequence
  primer
gtaaaacgacggccagtattggttatctgggagggagg

SEQ ID NO: 12526 - DNA, 38 bp, Artificial Sequence
  primer
gtaaaacgacggccagtcctgtttctgcaagtgtcctg

SEQ ID NO: 12527 - DNA, 21 bp, Artificial Sequence
  primer
tttccagcaaaggatctcaag

SEQ ID NO: 12528 - DNA, 39 bp, Artificial Sequence
  primer
gtaaaacgacggccagtaaggctccattccatactcctc

SEQ ID NO: 12529 - DNA, 25 bp, Artificial Sequence
  primer
gaatttgtagttcaccggtacagtc

SEQ ID NO: 12530 - DNA, 36 bp, Artificial Sequence
  primer
gtaaaacgacggccagtgccaaggaggtcgtcagtc

SEQ ID NO: 12531 - DNA, 21 bp, Artificial Sequence
  primer
cctccttgtctgcccagttag

SEQ ID NO: 12532 - DNA, 21 bp, Artificial Sequence
  primer
ctcatgggtaaaggtgtgctg

SEQ ID NO: 12533 - DNA, 37 bp, Artificial Sequence
  primer
gtaaaacgacggccagtgggtatggaggtaggttggc

SEQ ID NO: 12534 - DNA, 38 bp, Artificial Sequence
  primer
gtaaaacgacggccagtggcagttagagttctgcagcg

SEQ ID NO: 12535 - DNA, 38 bp, Artificial Sequence
  primer
gtaaaacgacggccagtatccctcattcaggtggagtg

SEQ ID NO: 12536 - DNA, 38 bp, Artificial Sequence
  primer
gtaaaacgacggccagtgaacgtgatgttctcttcccg

SEQ ID NO: 12537 - DNA, 21 bp, Artificial Sequence
  primer
tctgtacccaaggagactggg

SEQ ID NO: 12538 - DNA, 21 bp, Artificial Sequence
  primer
agggatgcctggtactgagag

SEQ ID NO: 12539 - DNA, 19 bp, Artificial Sequence
  primer
agcttgggcgacatagcac

SEQ ID NO: 12540 - DNA, 38 bp, Artificial Sequence
  primer
gtaaaacgacggccagtcagatgcctacaggtaagccc

SEQ ID NO: 12541 - DNA, 18 bp, Artificial Sequence
  primer
cccgacagtttggagctg

SEQ ID NO: 12542 - DNA, 21 bp, Artificial Sequence
  primer
ctctctgcccttcctttgttg

SEQ ID NO: 12543 - DNA, 38 bp, Artificial Sequence
  primer
gtaaaacgacggccagtgttgagagtgagacagagccg

SEQ ID NO: 12544 - DNA, 21 bp, Artificial Sequence
  primer
attgattgaactgggaggtgg

SEQ ID NO: 12545 - DNA, 38 bp, Artificial Sequence
  primer
gtaaaacgacggccagtctcctaggaagtgagcctggg

SEQ ID NO: 12546 - DNA, 38 bp, Artificial Sequence
  primer
gtaaaacgacggccagttctgtccctgatttaggatgc

SEQ ID NO: 12547 - DNA, 38 bp, Artificial Sequence
  primer
gtaaaacgacggccagtggttgacaaagtgaaccctgg

SEQ ID NO: 12548 - DNA, 38 bp, Artificial Sequence
  primer
gtaaaacgacggccagtctccagggaacctaccactcc

SEQ ID NO: 12549 - DNA, 38 bp, Artificial Sequence
  primer
gtaaaacgacggccagtgacctaatgaaatgcctgtgg

SEQ ID NO: 12550 - DNA, 38 bp, Artificial Sequence
  primer
gtaaaacgacggccagtgcaagaagatgatgcaggagg

SEQ ID NO: 12551 - DNA, 21 bp, Artificial Sequence
  primer
accactgggaggtatcaggag

SEQ ID NO: 12552 - DNA, 21 bp, Artificial Sequence
  primer
gttcaaggaccctgtgagtgg

SEQ ID NO: 12553 - DNA, 39 bp, Artificial Sequence
  primer
gtaaaacgacggccagtcctgccctatattctctccctg

SEQ ID NO: 12554 - DNA, 21 bp, Artificial Sequence
  primer
caacctaatgggaaatcgcta

SEQ ID NO: 12555 - DNA, 40 bp, Artificial Sequence
  primer
gtaaaacgacggccagtcagaaatactgaagcatctttgc

SEQ ID NO: 12556 - DNA, 21 bp, Artificial Sequence
  primer
tttggcagtatatccctgtgc

SEQ ID NO: 12557 - DNA, 38 bp, Artificial Sequence
  primer
gtaaaacgacggccagttaagatttggcacactccacc

SEQ ID NO: 12558 - DNA, 44 bp, Artificial Sequence
  primer
gtaaaacgacggccagtttatcaggaatatacatcttctgtccc

SEQ ID NO: 12559 - DNA, 36 bp, Artificial Sequence
  primer
gtaaaacgacggccagtgcttgtatgtggtgggctg

SEQ ID NO: 12560 - DNA, 29 bp, Artificial Sequence
  primer
caaggtcattattgtggaaactactttat

SEQ ID NO: 12561 - DNA, 38 bp, Artificial Sequence
  primer
gtaaaacgacggccagtcacctttaggattggagaggg

SEQ ID NO: 12562 - DNA, 39 bp, Artificial Sequence
  primer
gtaaaacgacggccagttctggttgaattgatgggaaac

SEQ ID NO: 12563 - DNA, 42 bp, Artificial Sequence
  primer
gtaaaacgacggccagtcaaaggtaggtaaatcaactcaagg

SEQ ID NO: 12564 - DNA, 38 bp, Artificial Sequence
  primer
gtaaaacgacggccagtagtgatgggtgattcaaaggg

SEQ ID NO: 12565 - DNA, 38 bp, Artificial Sequence
  primer
gtaaaacgacggccagtttgccctttgggtaaagtctc

SEQ ID NO: 12566 - DNA, 22 bp, Artificial Sequence
  primer
ttaaagatttggcgactggttc

SEQ ID NO: 12567 - DNA, 27 bp, Artificial Sequence
  primer
aagctgtcttaccaatcttagttgatg

SEQ ID NO: 12568 - DNA, 24 bp, Artificial Sequence
  primer
tttccatgatgctacatggtttac

SEQ ID NO: 12569 - DNA, 38 bp, Artificial Sequence
  primer
gtaaaacgacggccagtttggagtgcaatggcttactg

SEQ ID NO: 12570 - DNA, 21 bp, Artificial Sequence
  primer
tcaatgcctcgctcaagtatc

SEQ ID NO: 12571 - DNA, 37 bp, Artificial Sequence
  primer
gtaaaacgacggccagtgggtgaagtcttcccaggtg

SEQ ID NO: 12572 - DNA, 44 bp, Artificial Sequence
  primer
gtaaaacgacggccagtttggagaaataattgtgagaataagtg

SEQ ID NO: 12573 - DNA, 38 bp, Artificial Sequence
  primer
gtaaaacgacggccagtatttgacactgctttgcagga

SEQ ID NO: 12574 - DNA, 22 bp, Artificial Sequence
  primer
caaggctcatgtgaagttgaag

SEQ ID NO: 12575 - DNA, 38 bp, Artificial Sequence
  primer
gtaaaacgacggccagtaaggcatgcagagttgcttag

SEQ ID NO: 12576 - DNA, 35 bp, Artificial Sequence
  primer
gtaaaacgacggccagttgtgtggcagcccttcac

SEQ ID NO: 12577 - DNA, 23 bp, Artificial Sequence
  primer
tggactgagaaggagaatgtgtg

SEQ ID NO: 12578 - DNA, 21 bp, Artificial Sequence
  primer
tgcggtttgagtgtaaaccag

SEQ ID NO: 12579 - DNA, 21 bp, Artificial Sequence
  primer
taggcatcaaattgtggaacg

SEQ ID NO: 12580 - DNA, 39 bp, Artificial Sequence
  primer
gtaaaacgacggccagtaattcctctgtgccaatttgag

SEQ ID NO: 12581 - DNA, 21 bp, Artificial Sequence
  primer
ctctgcccttaaagcatgttg

SEQ ID NO: 12582 - DNA, 38 bp, Artificial Sequence
  primer
gtaaaacgacggccagtctgaatgaaggcgagtgaatg

SEQ ID NO: 12583 - DNA, 40 bp, Artificial Sequence
  primer
gtaaaacgacggccagttcattacttaaatctggcaacgc

SEQ ID NO: 12584 - DNA, 21 bp, Artificial Sequence
  primer
ctggtgcctagtcagtgcttg

SEQ ID NO: 12585 - DNA, 37 bp, Artificial Sequence
  primer
gtaaaacgacggccagtagaccagcatcaggtttccc

SEQ ID NO: 12586 - DNA, 41 bp, Artificial Sequence
  primer
gtaaaacgacggccagtcaggatggaatctaggaaactctg

SEQ ID NO: 12587 - DNA, 43 bp, Artificial Sequence
  primer
gtaaaacgacggccagtaaggctaacgtgtcttacatttcttt

SEQ ID NO: 12588 - DNA, 21 bp, Artificial Sequence
  primer
ggttctcaggctctggtgaat

SEQ ID NO: 12589 - DNA, 38 bp, Artificial Sequence
  primer
gtaaaacgacggccagtgagttgagaggaaatggagcc

SEQ ID NO: 12590 - DNA, 40 bp, Artificial Sequence
  primer
gtaaaacgacggccagtgaccagtaacctcattcccaaag

SEQ ID NO: 12591 - DNA, 21 bp, Artificial Sequence
  primer
agagagactgcagcctaaggg

SEQ ID NO: 12592 - DNA, 25 bp, Artificial Sequence
  primer
ggcaaagaattagttcctttctgag

SEQ ID NO: 12593 - DNA, 38 bp, Artificial Sequence
  primer
gtaaaacgacggccagtcattcctgcagtgaggatgac

SEQ ID NO: 12594 - DNA, 27 bp, Artificial Sequence
  primer
aaatcttacaaaggctctaatccaaac

SEQ ID NO: 12595 - DNA, 37 bp, Artificial Sequence
  primer
gtaaaacgacggccagtagttctcgcacatggacagg

SEQ ID NO: 12596 - DNA, 18 bp, Artificial Sequence
  primer
agctttgcaagccatccc

SEQ ID NO: 12597 - DNA, 23 bp, Artificial Sequence
  primer
tggtgagcagagtttgtagtcag

SEQ ID NO: 12598 - DNA, 26 bp, Artificial Sequence
  primer
ttaaagatctaagccaaattgtgaag

SEQ ID NO: 12599 - DNA, 21 bp, Artificial Sequence
  primer
gcatttcctgtgtgtggagag

SEQ ID NO: 12600 - DNA, 38 bp, Artificial Sequence
  primer
gtaaaacgacggccagtttgacagaccaactgagggag

SEQ ID NO: 12601 - DNA, 37 bp, Artificial Sequence
  primer
gtaaaacgacggccagtgaagcggtcagcgtaagtcc

SEQ ID NO: 12602 - DNA, 25 bp, Artificial Sequence
  primer
aattaagcagatagggtaggagaaa

SEQ ID NO: 12603 - DNA, 38 bp, Artificial Sequence
  primer
gtaaaacgacggccagtctggacaccactcaaagaagg

SEQ ID NO: 12604 - DNA, 21 bp, Artificial Sequence
  primer
ttgacagagttaggagcccac

SEQ ID NO: 12605 - DNA, 40 bp, Artificial Sequence
  primer
gtaaaacgacggccagtaaatgttaatggccaaagaggag

SEQ ID NO: 12606 - DNA, 21 bp, Artificial Sequence
  primer
acagcctgtgcatttggaatc

SEQ ID NO: 12607 - DNA, 38 bp, Artificial Sequence
  primer
gtaaaacgacggccagtctcaagtcccacagtctcctg

SEQ ID NO: 12608 - DNA, 40 bp, Artificial Sequence
  primer
gtaaaacgacggccagtggtttatggtctgtgacttctgg

SEQ ID NO: 12609 - DNA, 25 bp, Artificial Sequence
  primer
tttgctctgattacatttcttaccc

SEQ ID NO: 12610 - DNA, 38 bp, Artificial Sequence
  primer
gtaaaacgacggccagtttggagtgggtgaggaataga

SEQ ID NO: 12611 - DNA, 37 bp, Artificial Sequence
  primer
gtaaaacgacggccagtcatgctttagctttgctgcc

SEQ ID NO: 12612 - DNA, 38 bp, Artificial Sequence
  primer
gtaaaacgacggccagtggttatggtctgccattcctc

SEQ ID NO: 12613 - DNA, 42 bp, Artificial Sequence
  primer
gtaaaacgacggccagttttatttgtgcttgctaccctacac

SEQ ID NO: 12614 - DNA, 42 bp, Artificial Sequence
  primer
gtaaaacgacggccagttgtacagaatgatttggaggatttg

SEQ ID NO: 12615 - DNA, 21 bp, Artificial Sequence
  primer
taaagccctgtaactgttggg

SEQ ID NO: 12616 - DNA, 38 bp, Artificial Sequence
  primer
gtaaaacgacggccagttcaggattccggcaataagtc

SEQ ID NO: 12617 - DNA, 23 bp, Artificial Sequence
  primer
ttcagtgtagatggtgtttgcct

SEQ ID NO: 12618 - DNA, 39 bp, Artificial Sequence
  primer
gtaaaacgacggccagtaaacttgccattacttgccttg

SEQ ID NO: 12619 - DNA, 38 bp, Artificial Sequence
  primer
gtaaaacgacggccagtgtacgcaaactggttcagtgg

SEQ ID NO: 12620 - DNA, 21 bp, Artificial Sequence
  primer
agaccttggtggaatacctgc

SEQ ID NO: 12621 - DNA, 25 bp, Artificial Sequence
  primer
tccaaagatgaacacaagaagtgta

SEQ ID NO: 12622 - DNA, 38 bp, Artificial Sequence
  primer
gtaaaacgacggccagttgcagccattcaattacaagc

SEQ ID NO: 12623 - DNA, 38 bp, Artificial Sequence
  primer
gtaaaacgacggccagttatagagggatgcaagccagg

SEQ ID NO: 12624 - DNA, 42 bp, Artificial Sequence
  primer
gtaaaacgacggccagtcaactgttaagatgaaacaaacacg

SEQ ID NO: 12625 - DNA, 38 bp, Artificial Sequence
  primer
gtaaaacgacggccagtttcagaatgagaaaggctcgg

SEQ ID NO: 12626 - DNA, 20 bp, Artificial Sequence
  primer
tccagtctgcttatcgtggc

SEQ ID NO: 12627 - DNA, 38 bp, Artificial Sequence
  primer
gtaaaacgacggccagtgcaggaaggaagcaatgtatg

SEQ ID NO: 12628 - DNA, 21 bp, Artificial Sequence
  primer
cagcaaagatactgggcaatg

SEQ ID NO: 12629 - DNA, 38 bp, Artificial Sequence
  primer
gtaaaacgacggccagttgatgcatatagccgcaactc

SEQ ID NO: 12630 - DNA, 38 bp, Artificial Sequence
  primer
gtaaaacgacggccagtctgcagaggcagcattatctc

SEQ ID NO: 12631 - DNA, 37 bp, Artificial Sequence
  primer
gtaaaacgacggccagtggctgcagttctcattcagg

SEQ ID NO: 12632 - DNA, 38 bp, Artificial Sequence
  primer
gtaaaacgacggccagttaactgcagtgcgtacccaag

SEQ ID NO: 12633 - DNA, 21 bp, Artificial Sequence
  primer
taaagcttctggccttgcttg

SEQ ID NO: 12634 - DNA, 21 bp, Artificial Sequence
  primer
tcagatggctgtgtatcggag

SEQ ID NO: 12635 - DNA, 21 bp, Artificial Sequence
  primer
cagccagccataaggtatgtg

SEQ ID NO: 12636 - DNA, 40 bp, Artificial Sequence
  primer
gtaaaacgacggccagttgtgcgtgtgtaaattctgattg

SEQ ID NO: 12637 - DNA, 46 bp, Artificial Sequence
  primer
gtaaaacgacggccagttcttggctatagacctatgtgagtttaga

SEQ ID NO: 12638 - DNA, 22 bp, Artificial Sequence
  primer
cccttctctaatagggcagtct

SEQ ID NO: 12639 - DNA, 22 bp, Artificial Sequence
  primer
aagtaatgcctctgtggaaagc

SEQ ID NO: 12640 - DNA, 38 bp, Artificial Sequence
  primer
gtaaaacgacggccagttttggtcgataaatgctgtcc

SEQ ID NO: 12641 - DNA, 22 bp, Artificial Sequence
  primer
tgcacttgcacttcattacctt

SEQ ID NO: 12642 - DNA, 18 bp, Artificial Sequence
  primer
acttgctgcaggtggtcc

SEQ ID NO: 12643 - DNA, 21 bp, Artificial Sequence
  primer
cgacagagcaagagagaccat

SEQ ID NO: 12644 - DNA, 21 bp, Artificial Sequence
  primer
gggaaatgatgtgttcaggag

SEQ ID NO: 12645 - DNA, 38 bp, Artificial Sequence
  primer
gtaaaacgacggccagtgcactcttgccagaactgaga

SEQ ID NO: 12646 - DNA, 28 bp, Artificial Sequence
  primer
tgacaactataccaatctagacaccttg

SEQ ID NO: 12647 - DNA, 44 bp, Artificial Sequence
  primer
gtaaaacgacggccagtcattggctaatcactgtagaatactgg

SEQ ID NO: 12648 - DNA, 21 bp, Artificial Sequence
  primer
gcctaaaggatgaagctcacg

SEQ ID NO: 12649 - DNA, 21 bp, Artificial Sequence
  primer
cgaagaactgcttgaacccag

SEQ ID NO: 12650 - DNA, 21 bp, Artificial Sequence
  primer
ccgttattaccacctctgctg

SEQ ID NO: 12651 - DNA, 39 bp, Artificial Sequence
  primer
gtaaaacgacggccagtggcgactacagagtatcttccg

SEQ ID NO: 12652 - DNA, 38 bp, Artificial Sequence
  primer
gtaaaacgacggccagtagagtggacaggatttgcagg

SEQ ID NO: 12653 - DNA, 35 bp, Artificial Sequence
  primer
gtaaaacgacggccagtcttctgcttgcaggaggc

SEQ ID NO: 12654 - DNA, 21 bp, Artificial Sequence
  primer
ataggagggtagccttctccg

SEQ ID NO: 12655 - DNA, 38 bp, Artificial Sequence
  primer
gtaaaacgacggccagtctttgctttccgagtctcctg

SEQ ID NO: 12656 - DNA, 36 bp, Artificial Sequence
  primer
gtaaaacgacggccagtcttgtggagggtgtggacc

SEQ ID NO: 12657 - DNA, 38 bp, Artificial Sequence
  primer
gtaaaacgacggccagtagtaggtgtacccaggccctc

SEQ ID NO: 12658 - DNA, 21 bp, Artificial Sequence
  primer
ctccacttcccttggaatctg

SEQ ID NO: 12659 - DNA, 38 bp, Artificial Sequence
  primer
gtaaaacgacggccagtcaagtctgtgtgaccacctcg

SEQ ID NO: 12660 - DNA, 38 bp, Artificial Sequence
  primer
gtaaaacgacggccagtctgcccttaacaggacctcag

SEQ ID NO: 12661 - DNA, 21 bp, Artificial Sequence
  primer
acatttgaacccaggtcagtg

SEQ ID NO: 12662 - DNA, 36 bp, Artificial Sequence
  primer
gtaaaacgacggccagtgagcacctggagtgctgtg

SEQ ID NO: 12663 - DNA, 21 bp, Artificial Sequence
  primer
gagggtgtctaggtggcaaag

SEQ ID NO: 12664 - DNA, 21 bp, Artificial Sequence
  primer
gtagggctggtgtcagacagg

SEQ ID NO: 12665 - DNA, 20 bp, Artificial Sequence
  primer
gagagaggactgggacagcc

SEQ ID NO: 12666 - DNA, 36 bp, Artificial Sequence
  primer
gtaaaacgacggccagtgtaagtgccggtgggtctg

SEQ ID NO: 12667 - DNA, 18 bp, Artificial Sequence
  primer
caagtggctgaagctgcc

SEQ ID NO: 12668 - DNA, 21 bp, Artificial Sequence
  primer
gtctcccgaggaccttgtacc

SEQ ID NO: 12669 - DNA, 20 bp, Artificial Sequence
  primer
ggctcctcacttcccagtag

SEQ ID NO: 12670 - DNA, 21 bp, Artificial Sequence
  primer
tcctttgcacccagagagaag

SEQ ID NO: 12671 - DNA, 21 bp, Artificial Sequence
  primer
tgttggaattaaatgggtgcc

SEQ ID NO: 12672 - DNA, 38 bp, Artificial Sequence
  primer
gtaaaacgacggccagttttcatgtagcgtccgacttc

SEQ ID NO: 12673 - DNA, 21 bp, Artificial Sequence
  primer
gcattcaggcgttcatttacc

SEQ ID NO: 12674 - DNA, 21 bp, Artificial Sequence
  primer
caggagacaaggctgtccaag

SEQ ID NO: 12675 - DNA, 22 bp, Artificial Sequence
  primer
tcacctcctggaagaatctcac

SEQ ID NO: 12676 - DNA, 38 bp, Artificial Sequence
  primer
gtaaaacgacggccagtgaagaagcaccaggtacagcg

SEQ ID NO: 12677 - DNA, 38 bp, Artificial Sequence
  primer
gtaaaacgacggccagtcacgacctacactgcatgacc

SEQ ID NO: 12678 - DNA, 37 bp, Artificial Sequence
  primer
gtaaaacgacggccagtccagctctgcagcttacagg

SEQ ID NO: 12679 - DNA, 21 bp, Artificial Sequence
  primer
aggtagccagggtcttgtctg

SEQ ID NO: 12680 - DNA, 21 bp, Artificial Sequence
  primer
agaatgtttcaggcaggttgg

SEQ ID NO: 12681 - DNA, 20 bp, Artificial Sequence
  primer
ttgtctgatttctccagccc

SEQ ID NO: 12682 - DNA, 21 bp, Artificial Sequence
  primer
acatccatttaaggcgtttcg

SEQ ID NO: 12683 - DNA, 38 bp, Artificial Sequence
  primer
gtaaaacgacggccagtcctgaaatgctgcctaatgtg

SEQ ID NO: 12684 - DNA, 21 bp, Artificial Sequence
  primer
gtcatttgctgacagtttggg

SEQ ID NO: 12685 - DNA, 38 bp, Artificial Sequence
  primer
gtaaaacgacggccagtggctatgaaagcatggtcctc

SEQ ID NO: 12686 - DNA, 21 bp, Artificial Sequence
  primer
gaaattcaatggaaagccgac

SEQ ID NO: 12687 - DNA, 21 bp, Artificial Sequence
  primer
ttgccagttaaacgctttgtc

SEQ ID NO: 12688 - DNA, 36 bp, Artificial Sequence
  primer
gtaaaacgacggccagtctgcaggtggagatggttg

SEQ ID NO: 12689 - DNA, 38 bp, Artificial Sequence
  primer
gtaaaacgacggccagttgtgctggagcctactcttcc

SEQ ID NO: 12690 - DNA, 38 bp, Artificial Sequence
  primer
gtaaaacgacggccagtcggagagccgatgacctatac

SEQ ID NO: 12691 - DNA, 21 bp, Artificial Sequence
  primer
tgtcccatctctaatggtccc

SEQ ID NO: 12692 - DNA, 38 bp, Artificial Sequence
  primer
gtaaaacgacggccagtccactaagctgccctttcttg

SEQ ID NO: 12693 - DNA, 21 bp, Artificial Sequence
  primer
ctggagaatggtgaacctgag

SEQ ID NO: 12694 - DNA, 21 bp, Artificial Sequence
  primer
agaagactctcccagccattg

SEQ ID NO: 12695 - DNA, 21 bp, Artificial Sequence
  primer
tcctctgtgatgcactatggg

SEQ ID NO: 12696 - DNA, 38 bp, Artificial Sequence
  primer
gtaaaacgacggccagtggccaacatgtcatcctacag

SEQ ID NO: 12697 - DNA, 35 bp, Artificial Sequence
  primer
gtaaaacgacggccagtgcaagcggcatctcattc

SEQ ID NO: 12698 - DNA, 21 bp, Artificial Sequence
  primer
taattggtacaagtggcgagg

SEQ ID NO: 12699 - DNA, 39 bp, Artificial Sequence
  primer
gtaaaacgacggccagtaaggagcagtgactctttgtgg

SEQ ID NO: 12700 - DNA, 38 bp, Artificial Sequence
  primer
gtaaaacgacggccagtttcttgcagccagtctctcag

SEQ ID NO: 12701 - DNA, 38 bp, Artificial Sequence
  primer
gtaaaacgacggccagttatccgtgtatgaggaagccc

SEQ ID NO: 12702 - DNA, 38 bp, Artificial Sequence
  primer
gtaaaacgacggccagttcatgcagccagagacagttc

SEQ ID NO: 12703 - DNA, 38 bp, Artificial Sequence
  primer
gtaaaacgacggccagttcaggttgggatttccttgtc

SEQ ID NO: 12704 - DNA, 40 bp, Artificial Sequence
  primer
gtaaaacgacggccagtcatttatgtgagtggtggagagg

SEQ ID NO: 12705 - DNA, 38 bp, Artificial Sequence
  primer
gtaaaacgacggccagtcctagcactgtgcctgatacg

SEQ ID NO: 12706 - DNA, 38 bp, Artificial Sequence
  primer
gtaaaacgacggccagtagggtgagaagaaagcactgg

SEQ ID NO: 12707 - DNA, 22 bp, Artificial Sequence
  primer
tggaatgtaatgccacttgttg

SEQ ID NO: 12708 - DNA, 40 bp, Artificial Sequence
  primer
gtaaaacgacggccagtcagtggttacactcagttcccag

SEQ ID NO: 12709 - DNA, 38 bp, Artificial Sequence
  primer
gtaaaacgacggccagtggcatttcctcccaatatacg

SEQ ID NO: 12710 - DNA, 21 bp, Artificial Sequence
  primer
gggcaacaagagtgaaactcc

SEQ ID NO: 12711 - DNA, 38 bp, Artificial Sequence
  primer
gtaaaacgacggccagtacttcgcctcatagaggtggg

SEQ ID NO: 12712 - DNA, 38 bp, Artificial Sequence
  primer
gtaaaacgacggccagttccatgtttgggactgaattg

SEQ ID NO: 12713 - DNA, 21 bp, Artificial Sequence
  primer
tctgatcccaaagattggacc

SEQ ID NO: 12714 - DNA, 38 bp, Artificial Sequence
  primer
gtaaaacgacggccagtccatgcagatccttgacactc

SEQ ID NO: 12715 - DNA, 21 bp, Artificial Sequence
  primer
caattgaggtagtcagtgccc

SEQ ID NO: 12716 - DNA, 38 bp, Artificial Sequence
  primer
gtaaaacgacggccagtttgactccatctcctcattgc

SEQ ID NO: 12717 - DNA, 38 bp, Artificial Sequence
  primer
gtaaaacgacggccagtgtatctgggtccatagccacc

SEQ ID NO: 12718 - DNA, 21 bp, Artificial Sequence
  primer
ttgggttcaatgctctttctg

SEQ ID NO: 12719 - DNA, 21 bp, Artificial Sequence
  primer
tcactgttccaagtgccaaag

SEQ ID NO: 12720 - DNA, 35 bp, Artificial Sequence
  primer
gtaaaacgacggccagtctccttagctcgggcgtc

SEQ ID NO: 12721 - DNA, 18 bp, Artificial Sequence
  primer
cgaggctctgcttccacc

SEQ ID NO: 12722 - DNA, 38 bp, Artificial Sequence
  primer
gtaaaacgacggccagttgagctcctgattatgtgggc

SEQ ID NO: 12723 - DNA, 21 bp, Artificial Sequence
  primer
tcctggcagagtgtagtggac

SEQ ID NO: 12724 - DNA, 38 bp, Artificial Sequence
  primer
gtaaaacgacggccagtctctgggatggttgaggaatc

SEQ ID NO: 12725 - DNA, 37 bp, Artificial Sequence
  primer
gtaaaacgacggccagttcccaaacttgatgccaatc

SEQ ID NO: 12726 - DNA, 21 bp, Artificial Sequence
  primer
atctcccatgtttgatttgcc

SEQ ID NO: 12727 - DNA, 21 bp, Artificial Sequence
  primer
attaccctctttccatgtgcc

SEQ ID NO: 12728 - DNA, 25 bp, Artificial Sequence
  primer
tttatgaaagtgctgaatccttctg

SEQ ID NO: 12729 - DNA, 21 bp, Artificial Sequence
  primer
aaattgccctagaagggatgg

SEQ ID NO: 12730 - DNA, 21 bp, Artificial Sequence
  primer
aagcaccgtgtcatatgatgg

SEQ ID NO: 12731 - DNA, 21 bp, Artificial Sequence
  primer
cacatgtctcttccaggaggg

SEQ ID NO: 12732 - DNA, 35 bp, Artificial Sequence
  primer
gtaaaacgacggccagttttgcagggaaaggaggc

SEQ ID NO: 12733 - DNA, 38 bp, Artificial Sequence
  primer
gtaaaacgacggccagtttctgactacagcatcctgcc

SEQ ID NO: 12734 - DNA, 21 bp, Artificial Sequence
  primer
gaggtgtctgtttcccagagc

SEQ ID NO: 12735 - DNA, 21 bp, Artificial Sequence
  primer
acaggttgggaagaactcctg

SEQ ID NO: 12736 - DNA, 38 bp, Artificial Sequence
  primer
gtaaaacgacggccagtagtctggcagtctttccaagg

SEQ ID NO: 12737 - DNA, 40 bp, Artificial Sequence
  primer
gtaaaacgacggccagtggaaatggttgggagaagttacc

SEQ ID NO: 12738 - DNA, 38 bp, Artificial Sequence
  primer
gtaaaacgacggccagtgtgggctcaagccctaacttc

SEQ ID NO: 12739 - DNA, 38 bp, Artificial Sequence; identical to SEQ ID NO: 12736
  primer

SEQ ID NO: 12740 - DNA, 22 bp, Artificial Sequence
  primer
ggccatcagcacatttactctc

SEQ ID NO: 12741 - DNA, 38 bp, Artificial Sequence
  primer
gtaaaacgacggccagtcatcttgacacatgcggattc

SEQ ID NO: 12742 - DNA, 42 bp, Artificial Sequence
  primer
gtaaaacgacggccagtgacatttgataggtttggatgacag

SEQ ID NO: 12743 - DNA, 38 bp, Artificial Sequence
  primer
gtaaaacgacggccagttctgttcttccctgcaactcc

SEQ ID NO: 12744 - DNA, 21 bp, Artificial Sequence
  primer
tttctcaccactgtgcctttc

SEQ ID NO: 12745 - DNA, 40 bp, Artificial Sequence; identical to SEQ ID NO: 12737
  primer

SEQ ID NO: 12746 - DNA, 21 bp, Artificial Sequence
  primer
ggagaagatggtgtcaatggc

SEQ ID NO: 12747 - DNA, 35 bp, Artificial Sequence
  primer
gtaaaacgacggccagtgccgcattccttagcgat

SEQ ID NO: 12748 - DNA, 39 bp, Artificial Sequence
  primer
gtaaaacgacggccagtgcccatgatatatggatggatg

SEQ ID NO: 12749 - DNA, 39 bp, Artificial Sequence
  primer
gtaaaacgacggccagtgggagggaagattgagattgtc

SEQ ID NO: 12750 - DNA, 40 bp, Artificial Sequence
  primer
gtaaaacgacggccagtgaatgagttggagggattaggtc

SEQ ID NO: 12751 - DNA, 39 bp, Artificial Sequence
  primer
gtaaaacgacggccagtcatttaggaatgactgccttgc

SEQ ID NO: 12752 - DNA, 21 bp, Artificial Sequence
  primer
agctgtgggtctaatgaagcc

SEQ ID NO: 12753 - DNA, 21 bp, Artificial Sequence
  primer
agtgaccagcacgtagctcag

SEQ ID NO: 12754 - DNA, 38 bp, Artificial Sequence
  primer
gtaaaacgacggccagtgctgggagaaatgagcttgtc

SEQ ID NO: 12755 - DNA, 37 bp, Artificial Sequence
  primer
gtaaaacgacggccagtggtagcttgggtgctgtcac

SEQ ID NO: 12756 - DNA, 21 bp, Artificial Sequence
  primer
taccatcacacttccagcagc

SEQ ID NO: 12757 - DNA, 39 bp, Artificial Sequence
  primer
gtaaaacgacggccagtgggagattcagctgtccataag

SEQ ID NO: 12758 - DNA, 21 bp, Artificial Sequence
  primer
gagattgcagtgacacttggg

SEQ ID NO: 12759 - DNA, 39 bp, Artificial Sequence
  primer
gtaaaacgacggccagtaacaggagtcagaacaagcagg

SEQ ID NO: 12760 - DNA, 21 bp, Artificial Sequence
  primer
ggcatataacagcccttgagc

SEQ ID NO: 12761 - DNA, 21 bp, Artificial Sequence
  primer
gaccctcgcagacattaaagc

SEQ ID NO: 12762 - DNA, 38 bp, Artificial Sequence
  primer
gtaaaacgacggccagtctaggagatgcctcccaactc

SEQ ID NO: 12763 - DNA, 38 bp, Artificial Sequence
  primer
gtaaaacgacggccagttgaatcctcaccgactgattg

SEQ ID NO: 12764 - DNA, 21 bp, Artificial Sequence
  primer
tcaacggagactctgaagcac

SEQ ID NO: 12765 - DNA, 21 bp, Artificial Sequence
  primer
tgcgtctggttacaaggacag

SEQ ID NO: 12766 - DNA, 38 bp, Artificial Sequence
  primer
gtaaaacgacggccagtaacccacttgtgatgcagttg

SEQ ID NO: 12767 - DNA, 21 bp, Artificial Sequence
  primer
ccctccatccagtgacaaatc

SEQ ID NO: 12768 - DNA, 21 bp, Artificial Sequence
  primer
cagactccaagggaagactgg

SEQ ID NO: 12769 - DNA, 23 bp, Artificial Sequence
  primer
tgggaagctttctaaactccaac

SEQ ID NO: 12770 - DNA, 20 bp, Artificial Sequence
  primer
aaagcaaactttggtgcgag

SEQ ID NO: 12771 - DNA, 21 bp, Artificial Sequence
  primer
taagaacccaatatggcagcg

SEQ ID NO: 12772 - DNA, 21 bp, Artificial Sequence
  primer
gtgcttgcagtaggtcacagg

SEQ ID NO: 12773 - DNA, 41 bp, Artificial Sequence
  primer
gtaaaacgacggccagtagatactggatcagcattaaggaa

SEQ ID NO: 12774 - DNA, 38 bp, Artificial Sequence
  primer
gtaaaacgacggccagtttgcctcaaagagatgacagg

SEQ ID NO: 12775 - DNA, 22 bp, Artificial Sequence
  primer
caggtagcagcatatgattggg

SEQ ID NO: 12776 - DNA, 19 bp, Artificial Sequence
  primer
cgatcagcatgcttcttgc

SEQ ID NO: 12777 - DNA, 21 bp, Artificial Sequence
  primer
attagggagggtcacattgcc

SEQ ID NO: 12778 - DNA, 27 bp, Artificial Sequence
  primer
ttaagtgttaccttcttcgtagtgtga

SEQ ID NO: 12779 - DNA, 39 bp, Artificial Sequence
  primer
gtaaaacgacggccagtaaggaaggtcaaatacgacgtg

SEQ ID NO: 12780 - DNA, 38 bp, Artificial Sequence
  primer
gtaaaacgacggccagtattccaattcctgcgtgagtc

SEQ ID NO: 12781 - DNA, 21 bp, Artificial Sequence
  primer
tgaatacctgctgtgtcaggg

SEQ ID NO: 12782 - DNA, 21 bp, Artificial Sequence
  primer
agcattgcaaatgtcatcacc

SEQ ID NO: 12783 - DNA, 21 bp, Artificial Sequence
  primer
accaatagtgaagcccacagc

SEQ ID NO: 12784 - DNA, 21 bp, Artificial Sequence
  primer
tggcattaggagggagttgag

SEQ ID NO: 12785 - DNA, 38 bp, Artificial Sequence
  primer
gtaaaacgacggccagtcaactggtcaaagcacagagg

SEQ ID NO: 12786 - DNA, 21 bp, Artificial Sequence
  primer
caggcacagcctcatagtgtc

SEQ ID NO: 12787 - DNA, 21 bp, Artificial Sequence
  primer
gaaagcaccttctccaacagg

SEQ ID NO: 12788 - DNA, 21 bp, Artificial Sequence
  primer
gtgtgccagtggctgtaactc

SEQ ID NO: 12789 - DNA, 21 bp, Artificial Sequence
  primer
cttcaaggcaaagatgttccc

SEQ ID NO: 12790 - DNA, 21 bp, Artificial Sequence
  primer
actccagcattgacacacacc

SEQ ID NO: 12791 - DNA, 38 bp, Artificial Sequence
  primer
gtaaaacgacggccagtatctccacaagccagaggttc

SEQ ID NO: 12792 - DNA, 21 bp, Artificial Sequence
  primer
caagggtgacacaagttcagg

SEQ ID NO: 12793 - DNA, 39 bp, Artificial Sequence
  primer
gtaaaacgacggccagtctgacatggaccataactctgc

SEQ ID NO: 12794 - DNA, 21 bp, Artificial Sequence
  primer
gaagcctcaaggttagggagg

SEQ ID NO: 12795 - DNA, 22 bp, Artificial Sequence
  primer
cgtaactcctcagttgggtttg

SEQ ID NO: 12796 - DNA, 23 bp, Artificial Sequence
  primer
aaacttcccatggtggaataaag

SEQ ID NO: 12797 - DNA, 41 bp, Artificial Sequence
  primer
gtaaaacgacggccagtgagtgagagatttgggaagaggtt

SEQ ID NO: 12798 - DNA, 41 bp, Artificial Sequence
  primer
gtaaaacgacggccagtttcaaagcagtactggtggtattg

SEQ ID NO: 12799 - DNA, 21 bp, Artificial Sequence
  primer
tgagctttgcagtcagctttg

SEQ ID NO: 12800 - DNA, 39 bp, Artificial Sequence
  primer
gtaaaacgacggccagtcataggtctggtgtgcagattg

SEQ ID NO: 12801 - DNA, 42 bp, Artificial Sequence
  primer
gtaaaacgacggccagtcttatgaacatttgcctacttctcc

SEQ ID NO: 12802 - DNA, 28 bp, Artificial Sequence
  primer
ttctaatgctgtaactaacatcaatcac

SEQ ID NO: 12803 - DNA, 38 bp, Artificial Sequence
  primer
gtaaaacgacggccagtttaagatcctcgggattggag

SEQ ID NO: 12804 - DNA, 37 bp, Artificial Sequence
  primer
gtaaaacgacggccagtgcatttggcaagctcatttg

SEQ ID NO: 12805 - DNA, 38 bp, Artificial Sequence
  primer
gtaaaacgacggccagtttccatgggaatcttgagttg

SEQ ID NO: 12806 - DNA, 27 bp, Artificial Sequence
  primer
caagaggagctttaaatgtatttgttt

SEQ ID NO: 12807 - DNA, 38 bp, Artificial Sequence
  primer
gtaaaacgacggccagtggagaaggctaagatcaaggg

SEQ ID NO: 12808 - DNA, 41 bp, Artificial Sequence
  primer
gtaaaacgacggccagtgcagtttatttcattactgcttgg

SEQ ID NO: 12809 - DNA, 41 bp, Artificial Sequence
  primer
gtaaaacgacggccagtgcagaattgaatattgggaaagtt

SEQ ID NO: 12810 - DNA, 37 bp, Artificial Sequence
  primer
gtaaaacgacggccagtcaatgtgctgtaattgcgcc

SEQ ID NO: 12811 - DNA, 43 bp, Artificial Sequence
  primer
gtaaaacgacggccagtttctagaaagacatgaagtgaaatgc

SEQ ID NO: 12812 - DNA, 25 bp, Artificial Sequence
  primer
cctcttcaaagtttctgtcatctcc

SEQ ID NO: 12813 - DNA, 21 bp, Artificial Sequence
  primer
attgtttctcctcccatgcag

SEQ ID NO: 12814 - DNA, 21 bp, Artificial Sequence
  primer
tgaagctgttcattgtggttg

SEQ ID NO: 12815 - DNA, 21 bp, Artificial Sequence
  primer
agagtttcgagcctgctgttc

SEQ ID NO: 12816 - DNA, 39 bp, Artificial Sequence
  primer
gtaaaacgacggccagtagctgcttcatagacattgctg

SEQ ID NO: 12817 - DNA, 20 bp, Artificial Sequence
  primer
cttgagcccagcagtttgag

SEQ ID NO: 12818 - DNA, 38 bp, Artificial Sequence
  primer
gtaaaacgacggccagttaggtgggctcaatcttatgg

SEQ ID NO: 12819 - DNA, 21 bp, Artificial Sequence
  primer
gatttcaaccagcccaaacat

SEQ ID NO: 12820 - DNA, 24 bp, Artificial Sequence
  primer
tggaaatgtaagagtttatggctg

SEQ ID NO: 12821 - DNA, 38 bp, Artificial Sequence
  primer
gtaaaacgacggccagtggtggatctttctctcccaac

SEQ ID NO: 12822 - DNA, 23 bp, Artificial Sequence
  primer
aaggcgataagcacctttgtaag

SEQ ID NO: 12823 - DNA, 40 bp, Artificial Sequence
  primer
gtaaaacgacggccagtgcgaacaaagtttatgtcagtgg

SEQ ID NO: 12824 - DNA, 23 bp, Artificial Sequence
  primer
agattgctccggttgaaatttag

SEQ ID NO: 12825 - DNA, 40 bp, Artificial Sequence
  primer
gtaaaacgacggccagtttcattgactgtgtatggtgtgg

SEQ ID NO: 12826 - DNA, 38 bp, Artificial Sequence
  primer
gtaaaacgacggccagttttgtggtgcgaaactgtacc

SEQ ID NO: 12827 - DNA, 20 bp, Artificial Sequence
  primer
agcctgggtgacagtgagac

SEQ ID NO: 12828 - DNA, 21 bp, Artificial Sequence
  primer
attggaaatagtgaggtgccc

SEQ ID NO: 12829 - DNA, 20 bp, Artificial Sequence
  primer
gcacccggccagtattaagt

SEQ ID NO: 12830 - DNA, 42 bp, Artificial Sequence
  primer
gtaaaacgacggccagtaaccatggtcatgctaatagagttt

SEQ ID NO: 12831 - DNA, 43 bp, Artificial Sequence
  primer
gtaaaacgacggccagtctgacttggtaactgaagcaataaag

SEQ ID NO: 12832 - DNA, 38 bp, Artificial Sequence
  primer
gtaaaacgacggccagtatgattggttggccttattgg

SEQ ID NO: 12833 - DNA, 22 bp, Artificial Sequence
  primer
actcctgggaggttaaacattg

SEQ ID NO: 12834 - DNA, 24 bp, Artificial Sequence
  primer
gaatacatgtcactttcatgctgc

SEQ ID NO: 12835 - DNA, 40 bp, Artificial Sequence
  primer
gtaaaacgacggccagtggaagataatccctcaaatcctg

SEQ ID NO: 12836 - DNA, 38 bp, Artificial Sequence
  primer
gtaaaacgacggccagttggcatcgaaacttgactcac

SEQ ID NO: 12837 - DNA, 42 bp, Artificial Sequence
  primer
gtaaaacgacggccagtcagaaacagaataggacaattccag

SEQ ID NO: 12838 - DNA, 22 bp, Artificial Sequence
  primer
gactttgagcagctctgtgaag

SEQ ID NO: 12839 - DNA, 37 bp, Artificial Sequence
  primer
gtaaaacgacggccagtctgggccttacccacttctc

SEQ ID NO: 12840 - DNA, 21 bp, Artificial Sequence
  primer
ggaagatttcacaggcaaagg

SEQ ID NO: 12841 - DNA, 21 bp, Artificial Sequence
  primer
acatgccctgtttaatctgcc

SEQ ID NO: 12842 - DNA, 21 bp, Artificial Sequence
  primer
tcaggcttgtaataattgccc

SEQ ID NO: 12843 - DNA, 24 bp, Artificial Sequence
  primer
cccagactcatttcaaagttattt

SEQ ID NO: 12844 - DNA, 21 bp, Artificial Sequence
  primer
gtgtcccttacgcgcttctat

SEQ ID NO: 12845 - DNA, 38 bp, Artificial Sequence
  primer
gtaaaacgacggccagtctgactaggaaggaggatggg

SEQ ID NO: 12846 - DNA, 21 bp, Artificial Sequence
  primer
ataagcatgagctctgccctc

SEQ ID NO: 12847 - DNA, 21 bp, Artificial Sequence
  primer
cttgcacaaacgcctaagacc

SEQ ID NO: 12848 - DNA, 20 bp, Artificial Sequence
  primer
cacactcgggcacagtcatc

SEQ ID NO: 12849 - DNA, 21 bp, Artificial Sequence
  primer
cttagcctgtcagcagtgtgg

SEQ ID NO: 12850 - DNA, 37 bp, Artificial Sequence
  primer
gtaaaacgacggccagtcgtaggctgactccttggtg

SEQ ID NO: 12851 - DNA, 18 bp, Artificial Sequence
  primer
gaattcgcgttcctgtgg

SEQ ID NO: 12852 - DNA, 21 bp, Artificial Sequence
  primer
agctccgtttctgcgtgttac

SEQ ID NO: 12853 - DNA, 36 bp, Artificial Sequence
  primer
gtaaaacgacggccagtagtctgcacccaggcattc

SEQ ID NO: 12854 - DNA, 36 bp, Artificial Sequence
  primer
gtaaaacgacggccagtgtggagtgtgcaggctttg

SEQ ID NO: 12855 - DNA, 36 bp, Artificial Sequence
  primer
gtaaaacgacggccagtccaggacttagggctgctg

SEQ ID NO: 12856 - DNA, 20 bp, Artificial Sequence
  primer
atgaaagtgtcgccatgtcc

SEQ ID NO: 12857 - DNA, 38 bp, Artificial Sequence
  primer
gtaaaacgacggccagtactttaggttctccctgtggg

SEQ ID NO: 12858 - DNA, 37 bp, Artificial Sequence
  primer
gtaaaacgacggccagtcaaagaggatgtttggcgtg

SEQ ID NO: 12859 - DNA, 20 bp, Artificial Sequence
  primer
gaagcctgtgtttcacgctc

SEQ ID NO: 12860 - DNA, 19 bp, Artificial Sequence
  primer
tggtgtctgacctccctcc

SEQ ID NO: 12861 - DNA, 20 bp, Artificial Sequence
  primer
gtttgtgtgaggctgatggc

SEQ ID NO: 12862 - DNA, 19 bp, Artificial Sequence
  primer
gtccatggccttagcctgt

SEQ ID NO: 12863 - DNA, 19 bp, Artificial Sequence
  primer
ccctgtgcttctccctcag

SEQ ID NO: 12864 - DNA, 21 bp, Artificial Sequence
  primer
caggacttagggctcctgatg

SEQ ID NO: 12865 - DNA, 21 bp, Artificial Sequence
  primer
ggctggtctcaaactccctac

SEQ ID NO: 12866 - DNA, 21 bp, Artificial Sequence
  primer
gaagtaccacacagggcaaga

SEQ ID NO: 12867 - DNA, 38 bp, Artificial Sequence
  primer
gtaaaacgacggccagttctgtgttgtggacagaagcc

SEQ ID NO: 12868 - DNA, 21 bp, Artificial Sequence
  primer
tacatggaaggctgtgactcg

SEQ ID NO: 12869 - DNA, 38 bp, Artificial Sequence
  primer
gtaaaacgacggccagttacattgtggagagcctgagc

SEQ ID NO: 12870 - DNA, 21 bp, Artificial Sequence
  primer
cgcagatcatcaacactttcc

SEQ ID NO: 12871 - DNA, 21 bp, Artificial Sequence
  primer
aaagctcctgcgtatccaaag

SEQ ID NO: 12872 - DNA, 21 bp, Artificial Sequence
  primer
cacagctaacctcataggccc

SEQ ID NO: 12873 - DNA, 38 bp, Artificial Sequence
  primer
gtaaaacgacggccagtaaatcctcagagggcaaggac

SEQ ID NO: 12874 - DNA, 38 bp, Artificial Sequence
  primer
gtaaaacgacggccagtccttaatgcctaacgtgctcc

SEQ ID NO: 12875 - DNA, 21 bp, Artificial Sequence
  primer
caaatgaaagcacagagggtg

SEQ ID NO: 12876 - DNA, 38 bp, Artificial Sequence
  primer
gtaaaacgacggccagtcgtgtggttacaagcctttcc

SEQ ID NO: 12877 - DNA, 38 bp, Artificial Sequence
  primer
gtaaaacgacggccagttgattatgagaccaacgtggc

SEQ ID NO: 12878 - DNA, 21 bp, Artificial Sequence
  primer
gtccgcaggaaagattgaaac

SEQ ID NO: 12879 - DNA, 21 bp, Artificial Sequence
  primer
ctggtgtcagaggagctgatg

SEQ ID NO: 12880 - DNA, 37 bp, Artificial Sequence
  primer
gtaaaacgacggccagtctctggctgtgaccaggatg

SEQ ID NO: 12881 - DNA, 38 bp, Artificial Sequence
  primer
gtaaaacgacggccagttccttagcaccgtcagtctcc

SEQ ID NO: 12882 - DNA, 38 bp, Artificial Sequence
  primer
gtaaaacgacggccagttttcacccaacacaaaccctc

SEQ ID NO: 12883 - DNA, 19 bp, Artificial Sequence
  primer
ctggaagggactctgctgg

SEQ ID NO: 12884 - DNA, 42 bp, Artificial Sequence
  primer
gtaaaacgacggccagttgagacacctctagctttacactgg

SEQ ID NO: 12885 - DNA, 21 bp, Artificial Sequence
  primer
attctgtcattcaggttgggc

SEQ ID NO: 12886 - DNA, 21 bp, Artificial Sequence
  primer
cttcatctgctggaagaaggg

SEQ ID NO: 12887 - DNA, 21 bp, Artificial Sequence
  primer
aggctctgaagaagcaccttg

SEQ ID NO: 12888 - DNA, 21 bp, Artificial Sequence
  primer
agttcctagacccttctcgcc

SEQ ID NO: 12889 - DNA, 18 bp, Artificial Sequence
  primer
aagtggcagcagcaatgg

SEQ ID NO: 12890 - DNA, 21 bp, Artificial Sequence
  primer
gagcaccagtggcagtaacac

SEQ ID NO: 12891 - DNA, 19 bp, Artificial Sequence
  primer
cagcagcacctcctcttcc

SEQ ID NO: 12892 - DNA, 38 bp, Artificial Sequence
  primer
gtaaaacgacggccagtctgaaggctcaggttcaggtc

SEQ ID NO: 12893 - DNA, 21 bp, Artificial Sequence
  primer
gaagaaagagttggcaccagg

SEQ ID NO: 12894 - DNA, 39 bp, Artificial Sequence
  primer
gtaaaacgacggccagttgccaaacagtacagagaccac

SEQ ID NO: 12895 - DNA, 21 bp, Artificial Sequence
  primer
cacctcacctacaattgcacc

SEQ ID NO: 12896 - DNA, 21 bp, Artificial Sequence
  primer
ctaccagcatcagctcaatcc

SEQ ID NO: 12897 - DNA, 21 bp, Artificial Sequence
  primer
gtgatcaagcactggttcagg

SEQ ID NO: 12898 - DNA, 38 bp, Artificial Sequence
  primer
gtaaaacgacggccagtaccagctgagggtcttacagg

SEQ ID NO: 12899 - DNA, 38 bp, Artificial Sequence
  primer
gtaaaacgacggccagtcaagcaccagaagaagctgtg

SEQ ID NO: 12900 - DNA, 18 bp, Artificial Sequence
  primer
ctgccttcgttgccacag

SEQ ID NO: 12901 - DNA, 21 bp, Artificial Sequence
  primer
aacagctcgcaaacctacctc

SEQ ID NO: 12902 - DNA, 38 bp, Artificial Sequence
  primer
gtaaaacgacggccagtacctcagattccagcaagctc

SEQ ID NO: 12903 - DNA, 38 bp, Artificial Sequence
  primer
gtaaaacgacggccagtgctcttcaaagccaagactgc

SEQ ID NO: 12904 - DNA, 38 bp, Artificial Sequence
  primer
gtaaaacgacggccagtgctggacaacgatgactgttc

SEQ ID NO: 12905 - DNA, 38 bp, Artificial Sequence
  primer
gtaaaacgacggccagtgcagctgaaggtcctcaagtc

SEQ ID NO: 12906 - DNA, 21 bp, Artificial Sequence
  primer
ctagaatgtgaggtcctgggc

SEQ ID NO: 12907 - DNA, 38 bp, Artificial Sequence
  primer
gtaaaacgacggccagtgtcttgagcttcaggccctac

SEQ ID NO: 12908 - DNA, 38 bp, Artificial Sequence
  primer
gtaaaacgacggccagtcgcaaggacaaagacagtgag

SEQ ID NO: 12909 - DNA, 21 bp, Artificial Sequence
  primer
agtatgcggtagaccctgcac

SEQ ID NO: 12910 - DNA, 21 bp, Artificial Sequence
  primer
agagtctgcaggaggcaattc

SEQ ID NO: 12911 - DNA, 38 bp, Artificial Sequence
  primer
gtaaaacgacggccagtttcattgttccaaaggtgcag

SEQ ID NO: 12912 - DNA, 21 bp, Artificial Sequence
  primer
gggaggaagctctgagtcaac

SEQ ID NO: 12913 - DNA, 21 bp, Artificial Sequence
  primer
ctcaagttcatgcagcacctc

SEQ ID NO: 12914 - DNA, 35 bp, Artificial Sequence
  primer
gtaaaacgacggccagtaaacccattcctctgcgg

SEQ ID NO: 12915 - DNA, 37 bp, Artificial Sequence
  primer
gtaaaacgacggccagtttcttgtctgactcgcctgg

SEQ ID NO: 12916 - DNA, 38 bp, Artificial Sequence
  primer
gtaaaacgacggccagtctgcatgatgaaacagcttcc

SEQ ID NO: 12917 - DNA, 37 bp, Artificial Sequence
  primer
gtaaaacgacggccagtaagcgaaggacttgtgggtc

SEQ ID NO: 12918 - DNA, 38 bp, Artificial Sequence
  primer
gtaaaacgacggccagtgaaggcagagactggctaagg

SEQ ID NO: 12919 - DNA, 38 bp, Artificial Sequence
  primer
gtaaaacgacggccagtacagcagacaacacctggacc

SEQ ID NO: 12920 - DNA, 38 bp, Artificial Sequence
  primer
gtaaaacgacggccagtgagcagagtgacgaatgcttg

SEQ ID NO: 12921 - DNA, 19 bp, Artificial Sequence
  primer
agggaggtgtcgtcgtctg

SEQ ID NO: 12922 - DNA, 21 bp, Artificial Sequence
  primer
tagcaggtgcctgtaagtccc

SEQ ID NO: 12923 - DNA, 21 bp, Artificial Sequence
  primer
ccagctttgagggaaacagag

SEQ ID NO: 12924 - DNA, 20 bp, Artificial Sequence
  primer
cccagccaagaccctgtatc

SEQ ID NO: 12925 - DNA, 38 bp, Artificial Sequence
  primer
gtaaaacgacggccagtacttagaaagtgggtggcagg

SEQ ID NO: 12926 - DNA, 21 bp, Artificial Sequence
  primer
acttggtttcttggatgggag

SEQ ID NO: 12927 - DNA, 18 bp, Artificial Sequence
  primer
ggcgtcagctccaagagg

SEQ ID NO: 12928 - DNA, 18 bp, Artificial Sequence
  primer
gtgcccggacacacactc

SEQ ID NO: 12929 - DNA, 38 bp, Artificial Sequence
  primer
gtaaaacgacggccagttaatgctcctgtgctaggctg

SEQ ID NO: 12930 - DNA, 38 bp, Artificial Sequence
  primer
gtaaaacgacggccagttcttagtgtgatgtgggctgg

SEQ ID NO: 12931 - DNA, 38 bp, Artificial Sequence
  primer
gtaaaacgacggccagtggaggatgagaatggatttgg

SEQ ID NO: 12932 - DNA, 40 bp, Artificial Sequence
  primer
gtaaaacgacggccagtgcctaaccattgaaactctttgg

SEQ ID NO: 12933 - DNA, 37 bp, Artificial Sequence
  primer
gtaaaacgacggccagtacccgtctgcctcgtctaag

SEQ ID NO: 12934 - DNA, 23 bp, Artificial Sequence
  primer
ggctgaacctttctattctctgg

SEQ ID NO: 12935 - DNA, 21 bp, Artificial Sequence
  primer
agggatgatgatggaaacaaa

SEQ ID NO: 12936 - DNA, 42 bp, Artificial Sequence
  primer
gtaaaacgacggccagtgctgcttgaagtttagatcagctac

SEQ ID NO: 12937 - DNA, 38 bp, Artificial Sequence
  primer
gtaaaacgacggccagtcctttcctagagccctcatcc

SEQ ID NO: 12938 - DNA, 21 bp, Artificial Sequence
  primer
tgttgcagtgaggtgagacag

SEQ ID NO: 12939 - DNA, 44 bp, Artificial Sequence
  primer
gtaaaacgacggccagttctctataccattgctaccagttcttt

SEQ ID NO: 12940 - DNA, 21 bp, Artificial Sequence
  primer
aatgaattggagtggcaggag

SEQ ID NO: 12941 - DNA, 22 bp, Artificial Sequence
  primer
cttctggtctcagctacttggg

SEQ ID NO: 12942 - DNA, 29 bp, Artificial Sequence
  primer
cctaaagtaaagtagtctgcagttaccaa

SEQ ID NO: 12943 - DNA, 39 bp, Artificial Sequence
  primer
gtaaaacgacggccagtgcaatcaggtggtcgtacaaag

SEQ ID NO: 12944 - DNA, 26 bp, Artificial Sequence
  primer
gggttatacaggtatacacaattgcc

SEQ ID NO: 12945 - DNA, 45 bp, Artificial Sequence
  primer
gtaaaacgacggccagtctgtttcaagaagtgtttcagaactatt

SEQ ID NO: 12946 - DNA, 37 bp, Artificial Sequence
  primer
gtaaaacgacggccagtgtttgcctgacagagcagtg

SEQ ID NO: 12947 - DNA, 42 bp, Artificial Sequence
  primer
gtaaaacgacggccagttgctatttcactgttaatggtggtt

SEQ ID NO: 12948 - DNA, 38 bp, Artificial Sequence
  primer
gtaaaacgacggccagtaactgactgaaccagtcctgc

SEQ ID NO: 12949 - DNA, 21 bp, Artificial Sequence
  primer
tttaatgagttggcgagtcca

SEQ ID NO: 12950 - DNA, 25 bp, Artificial Sequence
  primer
aacattgcatttgaatctttacagc

SEQ ID NO: 12951 - DNA, 38 bp, Artificial Sequence
  primer
gtaaaacgacggccagtttgctatttgctttgctgtgg

SEQ ID NO: 12952 - DNA, 23 bp, Artificial Sequence
  primer
gaaagcacacgtctcagaaattg

SEQ ID NO: 12953 - DNA, 38 bp, Artificial Sequence
  primer
gtaaaacgacggccagtcccaaggtgctattgtttgtc

SEQ ID NO: 12954 - DNA, 38 bp, Artificial Sequence
  primer
gtaaaacgacggccagtcctttgacaccctttactgcc

SEQ ID NO: 12955 - DNA, 21 bp, Artificial Sequence
  primer
tctgccagtgatgtccaattt

SEQ ID NO: 12956 - DNA, 21 bp, Artificial Sequence
  primer
catatgcatggttgtgccttc

SEQ ID NO: 12957 - DNA, 37 bp, Artificial Sequence
  primer
gtaaaacgacggccagtagaaacccaagggcttatgg

SEQ ID NO: 12958 - DNA, 37 bp, Artificial Sequence
  primer
gtaaaacgacggccagtgctagcattgcccttgtctg

SEQ ID NO: 12959 - DNA, 20 bp, Artificial Sequence
  primer
cttcctctcgcagcttgatg

SEQ ID NO: 12960 - DNA, 38 bp, Artificial Sequence
  primer
gtaaaacgacggccagtatgggagttggcttctgattc

SEQ ID NO: 12961 - DNA, 38 bp, Artificial Sequence
  primer
gtaaaacgacggccagtttctccagcgacaaggctaag

SEQ ID NO: 12962 - DNA, 38 bp, Artificial Sequence
  primer
gtaaaacgacggccagtaaaccatgccagatgaccttc

SEQ ID NO: 12963 - DNA, 21 bp, Artificial Sequence
  primer
cttacgttgccatgatccctc

SEQ ID NO: 12964 - DNA, 38 bp, Artificial Sequence
  primer
gtaaaacgacggccagttgtaggtcttccactttcgcc

SEQ ID NO: 12965 - DNA, 38 bp, Artificial Sequence
  primer
gtaaaacgacggccagttacgcagaagaccagcaactc

SEQ ID NO: 12966 - DNA, 21 bp, Artificial Sequence
  primer
agaaggagctggaacagatgg

SEQ ID NO: 12967 - DNA, 21 bp, Artificial Sequence
  primer
ggatactctggacttgctggc

SEQ ID NO: 12968 - DNA, 38 bp, Artificial Sequence
  primer
gtaaaacgacggccagtctttactaggccaccgtctcg

SEQ ID NO: 12969 - DNA, 22 bp, Artificial Sequence
  primer
ggacacagtgcttgtttctttg

SEQ ID NO: 12970 - DNA, 39 bp, Artificial Sequence
  primer
gtaaaacgacggccagttgtgccaaattgtgtctcacag

SEQ ID NO: 12971 - DNA, 41 bp, Artificial Sequence
  primer
gtaaaacgacggccagttttggtgaccttagcttccatatc

SEQ ID NO: 12972 - DNA, 41 bp, Artificial Sequence
  primer
gtaaaacgacggccagtctttcctttgaagttaccctgaag

SEQ ID NO: 12973 - DNA, 28 bp, Artificial Sequence
  primer
tgtgtagagaaaggtgtgtgatagaatc

SEQ ID NO: 12974 - DNA, 38 bp, Artificial Sequence
  primer
gtaaaacgacggccagtgtccaatcccttggtgttgat

SEQ ID NO: 12975 - DNA, 27 bp, Artificial Sequence
  primer
ttgaaacaactagtaacctatgctttg

SEQ ID NO: 12976 - DNA, 21 bp, Artificial Sequence
  primer
ggaacctggaagtctctgctc

SEQ ID NO: 12977 - DNA, 20 bp, Artificial Sequence
  primer
tgttacgtgcatggatctgc

SEQ ID NO: 12978 - DNA, 43 bp, Artificial Sequence
  primer
gtaaaacgacggccagttgtgaattaccatcctgtctctgtag

SEQ ID NO: 12979 - DNA, 38 bp, Artificial Sequence
  primer
gtaaaacgacggccagtagattcatttccacccacagg

SEQ ID NO: 12980 - DNA, 23 bp, Artificial Sequence
  primer
tctccataagacacttctcccag

SEQ ID NO: 12981 - DNA, 23 bp, Artificial Sequence
  primer
gctttgcaatgtacttgaccatc

SEQ ID NO: 12982 - DNA, 38 bp, Artificial Sequence
  primer
gtaaaacgacggccagtcttagaagccctgaatttggc

SEQ ID NO: 12983 - DNA, 38 bp, Artificial Sequence
  primer
gtaaaacgacggccagttgactgagagtccctctgcac

SEQ ID NO: 12984 - DNA, 21 bp, Artificial Sequence
  primer
tagatggcattcgtggaacac

SEQ ID NO: 12985 - DNA, 21 bp, Artificial Sequence
  primer
ctcttctccctgcgttctagc

SEQ ID NO: 12986 - DNA, 21 bp, Artificial Sequence
  primer
cacaacacagacaccctctgg

SEQ ID NO: 12987 - DNA, 38 bp, Artificial Sequence
  primer
gtaaaacgacggccagtgcccacatttatttgacatgc

SEQ ID NO: 12988 - DNA, 38 bp, Artificial Sequence
  primer
gtaaaacgacggccagtgtccctgatcctgatggaatc

SEQ ID NO: 12989 - DNA, 38 bp, Artificial Sequence
  primer
gtaaaacgacggccagtaccatgctgccctataccttc

SEQ ID NO: 12990 - DNA, 21 bp, Artificial Sequence
  primer
ggagaaaggtatttcccaggc

SEQ ID NO: 12991 - DNA, 21 bp, Artificial Sequence
  primer
aactgtgcccaggatgatagc

SEQ ID NO: 12992 - DNA, 25 bp, Artificial Sequence
  primer
tctacctaacatcaggtgtgatttg

SEQ ID NO: 12993 - DNA, 38 bp, Artificial Sequence
  primer
gtaaaacgacggccagtctgtccttcctttgggaacag

SEQ ID NO: 12994 - DNA, 38 bp, Artificial Sequence
  primer
gtaaaacgacggccagtaggtagtcctgcctctttccc

SEQ ID NO: 12995 - DNA, 38 bp, Artificial Sequence
  primer
gtaaaacgacggccagtatgtgctgcttgcatctcttc

SEQ ID NO: 12996 - DNA, 38 bp, Artificial Sequence
  primer
gtaaaacgacggccagtagcagaatggaaggaaacacc

SEQ ID NO: 12997 - DNA, 21 bp, Artificial Sequence
  primer
ctctagtgatcccatcccagg

SEQ ID NO: 12998 - DNA, 37 bp, Artificial Sequence
  primer
gtaaaacgacggccagtatctggccactggtgaactg

SEQ ID NO: 12999 - DNA, 38 bp, Artificial Sequence
  primer
gtaaaacgacggccagttttgttcagatcgacctcctg

SEQ ID NO: 13000 - DNA, 38 bp, Artificial Sequence
  primer
gtaaaacgacggccagtcattcgatcagttcctgctcc

SEQ ID NO: 13001 - DNA, 44 bp, Artificial Sequence
  primer
gtaaaacgacggccagtaaatagttggttgagaaggctattatg

SEQ ID NO: 13002 - DNA, 39 bp, Artificial Sequence
  primer
gtaaaacgacggccagtcagagcgagactctgtctcaaa

SEQ ID NO: 13003 - DNA, 25 bp, Artificial Sequence
  primer
gaatgtactggtaagtgagcaacac

SEQ ID NO: 13004 - DNA, 21 bp, Artificial Sequence
  primer
tgtctcagctggcaatgtttc

SEQ ID NO: 13005 - DNA, 38 bp, Artificial Sequence
  primer
gtaaaacgacggccagttgaaacccaagtctagccacc

SEQ ID NO: 13006 - DNA, 22 bp, Artificial Sequence
  primer
caaccaatcttgtcactcctcc

SEQ ID NO: 13007 - DNA, 38 bp, Artificial Sequence
  primer
gtaaaacgacggccagtccagtatccttgccatccttg

SEQ ID NO: 13008 - DNA, 39 bp, Artificial Sequence
  primer
gtaaaacgacggccagtagcagtggtctgtgaatttgag

SEQ ID NO: 13009 - DNA, 38 bp, Artificial Sequence
  primer
gtaaaacgacggccagtggtacagccatttaagggtcc

SEQ ID NO: 13010 - DNA, 26 bp, Artificial Sequence
  primer
aaatttgtccatagaggaaagacttg

SEQ ID NO: 13011 - DNA, 38 bp, Artificial Sequence
  primer
gtaaaacgacggccagttggatgtggtggagatgttct

SEQ ID NO: 13012 - DNA, 21 bp, Artificial Sequence
  primer
ttggctgaatacgaacaggac

SEQ ID NO: 13013 - DNA, 20 bp, Artificial Sequence
  primer
aatgatgttccgtcagcagg

SEQ ID NO: 13014 - DNA, 20 bp, Artificial Sequence
  primer
acctgtttcttcaggagccc

SEQ ID NO: 13015 - DNA, 39 bp, Artificial Sequence
  primer
gtaaaacgacggccagtccaggatatgaaagatggcaag

SEQ ID NO: 13016 - DNA, 21 bp, Artificial Sequence
  primer
aaagtccagttgctgtccacc

SEQ ID NO: 13017 - DNA, 21 bp, Artificial Sequence
  primer
taagccaccctccctccttag

SEQ ID NO: 13018 - DNA, 42 bp, Artificial Sequence
  primer
gtaaaacgacggccagttggaattcaagtggaactataggaa

SEQ ID NO: 13019 - DNA, 21 bp, Artificial Sequence
  primer
agaggttgcagtgagtcgaga

SEQ ID NO: 13020 - DNA, 38 bp, Artificial Sequence
  primer
gtaaaacgacggccagtggtcatcagccatcgaaatac

SEQ ID NO: 13021 - DNA, 42 bp, Artificial Sequence
  primer
gtaaaacgacggccagtgaggactcctaaccactaattgcat

SEQ ID NO: 13022 - DNA, 21 bp, Artificial Sequence
  primer
aagtgtgtgcatttccaggtg

SEQ ID NO: 13023 - DNA, 22 bp, Artificial Sequence
  primer
tccatctctagtttccgaatgg

SEQ ID NO: 13024 - DNA, 26 bp, Artificial Sequence
  primer
cctatctagttgccagttacacaatg

SEQ ID NO: 13025 - DNA, 38 bp, Artificial Sequence
  primer
gtaaaacgacggccagtctggaacctaacccattctgg

SEQ ID NO: 13026 - DNA, 20 bp, Artificial Sequence
  primer
acctctcccagaaccaccag

SEQ ID NO: 13027 - DNA, 21 bp, Artificial Sequence
  primer
ttaggtgaacatttcggacgg

SEQ ID NO: 13028 - DNA, 38 bp, Artificial Sequence
  primer
gtaaaacgacggccagtgagataaattgcatgccaggg

SEQ ID NO: 13029 - DNA, 38 bp, Artificial Sequence
  primer
gtaaaacgacggccagttttcctttactggcttgctgg

SEQ ID NO: 13030 - DNA, 38 bp, Artificial Sequence
  primer
gtaaaacgacggccagtcttccactgctccacaaacag

SEQ ID NO: 13031 - DNA, 36 bp, Artificial Sequence
  primer
gtaaaacgacggccagtccgaggcatattcccactg

SEQ ID NO: 13032 - DNA, 18 bp, Artificial Sequence
  primer
cctcctgaggaaaggccc

SEQ ID NO: 13033 - DNA, 21 bp, Artificial Sequence
  primer
tgtcttcagcgtatcctgtgc

SEQ ID NO: 13034 - DNA, 38 bp, Artificial Sequence
  primer
gtaaaacgacggccagtctctggcaaagtgtggagatg

SEQ ID NO: 13035 - DNA, 38 bp, Artificial Sequence
  primer
gtaaaacgacggccagttctgcttcctatggttgatgc

SEQ ID NO: 13036 - DNA, 38 bp, Artificial Sequence
  primer
gtaaaacgacggccagtagagtagcatagcacggaggc

SEQ ID NO: 13037 - DNA, 21 bp, Artificial Sequence
  primer
agacccagcgattctgtcttc

SEQ ID NO: 13038 - DNA, 39 bp, Artificial Sequence
  primer
gtaaaacgacggccagtttacacagatcctcctccttgg

SEQ ID NO: 13039 - DNA, 37 bp, Artificial Sequence
  primer
gtaaaacgacggccagtgaggcacagtccaaggtgag

SEQ ID NO: 13040 - DNA, 21 bp, Artificial Sequence
  primer
cggaagacctgggttctagtc

SEQ ID NO: 13041 - DNA, 38 bp, Artificial Sequence
  primer
gtaaaacgacggccagtttggttagctaggaaggctgc

SEQ ID NO: 13042 - DNA, 38 bp, Artificial Sequence
  primer
gtaaaacgacggccagttcgacaaagaggaagctctgg

SEQ ID NO: 13043 - DNA, 21 bp, Artificial Sequence
  primer
tgagagcatatgcctgtgtcc

SEQ ID NO: 13044 - DNA, 21 bp, Artificial Sequence
  primer
agagagggcctcaaactaccc

SEQ ID NO: 13045 - DNA, 38 bp, Artificial Sequence
  primer
gtaaaacgacggccagtaagcccaagggtactttctcc

SEQ ID NO: 13046 - DNA, 38 bp, Artificial Sequence
  primer
gtaaaacgacggccagtagccatagggagagttgatgg

SEQ ID NO: 13047 - DNA, 23 bp, Artificial Sequence
  primer
tcctaatgtaccaccatggacag

SEQ ID NO: 13048 - DNA, 21 bp, Artificial Sequence
  primer
ttctgccacctccagactctc

SEQ ID NO: 13049 - DNA, 38 bp, Artificial Sequence
  primer
gtaaaacgacggccagtaggtaagggctgcaagtcaag

SEQ ID NO: 13050 - DNA, 38 bp, Artificial Sequence
  primer
gtaaaacgacggccagtggaggtgtgggtgtattcctg

SEQ ID NO: 13051 - DNA, 38 bp, Artificial Sequence
  primer
gtaaaacgacggccagtgacatctaccaccgcatcctc

SEQ ID NO: 13052 - DNA, 21 bp, Artificial Sequence
  primer
ttcagctatgctgaggtgctg

SEQ ID NO: 13053 - DNA, 38 bp, Artificial Sequence
  primer
gtaaaacgacggccagtatgacgaagatgtgttggctg

SEQ ID NO: 13054 - DNA, 38 bp, Artificial Sequence
  primer
gtaaaacgacggccagttagagactggctggtagctcg

SEQ ID NO: 13055 - DNA, 38 bp, Artificial Sequence
  primer
gtaaaacgacggccagtcactaacaggaaaggtgcagg

SEQ ID NO: 13056 - DNA, 38 bp, Artificial Sequence
  primer
gtaaaacgacggccagttcttcagtatgtgccactggg

SEQ ID NO: 13057 - DNA, 38 bp, Artificial Sequence
  primer
gtaaaacgacggccagtaggctctgggtgagtaaatcg

SEQ ID NO: 13058 - DNA, 21 bp, Artificial Sequence
  primer
gactgataccaggttggaggg

SEQ ID NO: 13059 - DNA, 21 bp, Artificial Sequence
  primer
agaacaggcccaaagactcac

SEQ ID NO: 13060 - DNA, 24 bp, Artificial Sequence
  primer
cacacagagatactgtaccctccc

SEQ ID NO: 13061 - DNA, 38 bp, Artificial Sequence
  primer
gtaaaacgacggccagtaaagcaacaacagctcccatc

SEQ ID NO: 13062 - DNA, 20 bp, Artificial Sequence
  primer
ccttgctcagtgctacaggg

SEQ ID NO: 13063 - DNA, 38 bp, Artificial Sequence
  primer
gtaaaacgacggccagtgctccagtacttatcccaggc

SEQ ID NO: 13064 - DNA, 20 bp, Artificial Sequence
  primer
atgggaaggtcctcttggag

SEQ ID NO: 13065 - DNA, 20 bp, Artificial Sequence
  primer
gataaccatgggctgctctg

SEQ ID NO: 13066 - DNA, 38 bp, Artificial Sequence
  primer
gtaaaacgacggccagttttcctcactcccgaagtctg

SEQ ID NO: 13067 - DNA, 21 bp, Artificial Sequence
  primer
gcagaaagagaaaggtgggag

SEQ ID NO: 13068 - DNA, 19 bp, Artificial Sequence
  primer
cctgacggagctggacatc

SEQ ID NO: 13069 - DNA, 19 bp, Artificial Sequence
  primer
ggtcccttctcgctcttcc

SEQ ID NO: 13070 - DNA, 21 bp, Artificial Sequence
  primer
cctctagccctacatcccacc

SEQ ID NO: 13071 - DNA, 38 bp, Artificial Sequence
  primer
gtaaaacgacggccagtgactgcttggtcctgataacg

SEQ ID NO: 13072 - DNA, 37 bp, Artificial Sequence
  primer
gtaaaacgacggccagtttccttcacgtggaagatgg

SEQ ID NO: 13073 - DNA, 38 bp, Artificial Sequence
  primer
gtaaaacgacggccagtgcttcctccctactccgtttc

SEQ ID NO: 13074 - DNA, 21 bp, Artificial Sequence
  primer
tgggctgatcctgtaggagtg

SEQ ID NO: 13075 - DNA, 38 bp, Artificial Sequence
  primer
gtaaaacgacggccagtgtctagcagagtggcaggagg

SEQ ID NO: 13076 - DNA, 37 bp, Artificial Sequence
  primer
gtaaaacgacggccagtgtcaagtgacggtgaggagg

SEQ ID NO: 13077 - DNA, 38 bp, Artificial Sequence
  primer
gtaaaacgacggccagttacctgtatggccacaccctc

SEQ ID NO: 13078 - DNA, 37 bp, Artificial Sequence
  primer
gtaaaacgacggccagtcgaggaggaacccagaagac

SEQ ID NO: 13079 - DNA, 20 bp, Artificial Sequence
  primer
ccttctagcagtagcacccg

SEQ ID NO: 13080 - DNA, 38 bp, Artificial Sequence
  primer
gtaaaacgacggccagttaccataccacccaggtgagg

SEQ ID NO: 13081 - DNA, 20 bp, Artificial Sequence
  primer
tgcagtcgtgttgagtggag

SEQ ID NO: 13082 - DNA, 37 bp, Artificial Sequence
  primer
gtaaaacgacggccagtcctggtccagaacaggtcag

SEQ ID NO: 13083 - DNA, 38 bp, Artificial Sequence
  primer
gtaaaacgacggccagtagttcgatgggtatgagcctg

SEQ ID NO: 13084 - DNA, 21 bp, Artificial Sequence
  primer
gagatttacgaggctgtgacg

SEQ ID NO: 13085 - DNA, 35 bp, Artificial Sequence
  primer
gtaaaacgacggccagtcagcctcagagcaggcac

SEQ ID NO: 13086 - DNA, 21 bp, Artificial Sequence
  primer
gggttcaggtaagtgcagagg

SEQ ID NO: 13087 - DNA, 19 bp, Artificial Sequence
  primer
ttgccaggtagaacagccc

SEQ ID NO: 13088 - DNA, 38 bp, Artificial Sequence
  primer
gtaaaacgacggccagtcggatcttgcatctgaaactg

SEQ ID NO: 13089 - DNA, 20 bp, Artificial Sequence
  primer
cgattcgagaatctcctccc

SEQ ID NO: 13090 - DNA, 38 bp, Artificial Sequence
  primer
gtaaaacgacggccagttttcacgttgaattcaggctc

SEQ ID NO: 13091 - DNA, 21 bp, Artificial Sequence
  primer
gggcgatagagtgagaccatc

SEQ ID NO: 13092 - DNA, 37 bp, Artificial Sequence
  primer
gtaaaacgacggccagtcagcaggacaccctgacttt

SEQ ID NO: 13093 - DNA, 24 bp, Artificial Sequence
  primer
aaatggaagtacatgcacaatgac

SEQ ID NO: 13094 - DNA, 38 bp, Artificial Sequence
  primer
gtaaaacgacggccagtagatgttgtttgctgtggacg

SEQ ID NO: 13095 - DNA, 41 bp, Artificial Sequence
  primer
gtaaaacgacggccagttgtttgtgtgtatctgtttggctc

SEQ ID NO: 13096 - DNA, 39 bp, Artificial Sequence
  primer
gtaaaacgacggccagttgcgtagactgggtgttaagaa

SEQ ID NO: 13097 - DNA, 21 bp, Artificial Sequence
  primer
acagcagtggtcagcaacttc

SEQ ID NO: 13098 - DNA, 37 bp, Artificial Sequence
  primer
gtaaaacgacggccagtttgttggaggcagaaaccag

SEQ ID NO: 13099 - DNA, 21 bp, Artificial Sequence
  primer
aaatattagcgcctggctgtt

SEQ ID NO: 13100 - DNA, 20 bp, Artificial Sequence
  primer
agattgtcccattgtgcctg

SEQ ID NO: 13101 - DNA, 38 bp, Artificial Sequence
  primer
gtaaaacgacggccagttggcctgatatgttcttccac

SEQ ID NO: 13102 - DNA, 21 bp, Artificial Sequence
  primer
ctttctggcatggtgatttgc

SEQ ID NO: 13103 - DNA, 37 bp, Artificial Sequence
  primer
gtaaaacgacggccagttggatggagaacccaaatcc

SEQ ID NO: 13104 - DNA, 19 bp, Artificial Sequence
  primer
cctttgaccagaatgtgcc

SEQ ID NO: 13105 - DNA, 37 bp, Artificial Sequence
  primer
gtaaaacgacggccagtgatctgcttatctgctgccg

SEQ ID NO: 13106 - DNA, 38 bp, Artificial Sequence
  primer
gtaaaacgacggccagtgctctttgtgatggcatgaac

SEQ ID NO: 13107 - DNA, 41 bp, Artificial Sequence
  primer
gtaaaacgacggccagtgccataatttgccaatttcttctc

SEQ ID NO: 13108 - DNA, 28 bp, Artificial Sequence
  primer
ttctgtatgggattatggaatatttaag

SEQ ID NO: 13109 - DNA, 26 bp, Artificial Sequence
  primer
ttcagcataccacttcataactgttc

SEQ ID NO: 13110 - DNA, 37 bp, Artificial Sequence
  primer
gtaaaacgacggccagttaacgctgatgcagcttgac

SEQ ID NO: 13111 - DNA, 21 bp, Artificial Sequence
  primer
tacgagatcgtgctgttccac

SEQ ID NO: 13112 - DNA, 23 bp, Artificial Sequence
  primer
ggaaacttaacagcttacccagc

SEQ ID NO: 13113 - DNA, 21 bp, Artificial Sequence
  primer
ccttacggaagttgcattgtg

SEQ ID NO: 13114 - DNA, 41 bp, Artificial Sequence
  primer
gtaaaacgacggccagtccttaactaaatgtatgtgccagg

SEQ ID NO: 13115 - DNA, 40 bp, Artificial Sequence
  primer
gtaaaacgacggccagttggttgtcctccttaaattgtcc

SEQ ID NO: 13116 - DNA, 41 bp, Artificial Sequence
  primer
gtaaaacgacggccagtaaagtccgaagaagagaagcattt

SEQ ID NO: 13117 - DNA, 21 bp, Artificial Sequence
  primer
gcttggccatcaggagatact

SEQ ID NO: 13118 - DNA, 26 bp, Artificial Sequence
  primer
gcatgaaactctttcttatctcttgg

SEQ ID NO: 13119 - DNA, 39 bp, Artificial Sequence
  primer
gtaaaacgacggccagtgaagcagcatatatattggccc

SEQ ID NO: 13120 - DNA, 38 bp, Artificial Sequence
  primer
gtaaaacgacggccagttgcccagcctgattaggtaaa

SEQ ID NO: 13121 - DNA, 27 bp, Artificial Sequence
  primer
gaagaggaggaaatttgagttaatatg

SEQ ID NO: 13122 - DNA, 35 bp, Artificial Sequence
  primer
gtaaaacgacggccagtgtgtgagccactgcaccc

SEQ ID NO: 13123 - DNA, 25 bp, Artificial Sequence
  primer
tcttgaacttctgaaaccactatcg

SEQ ID NO: 13124 - DNA, 38 bp, Artificial Sequence
  primer
gtaaaacgacggccagtttggcaaggtgagtatgttgg

SEQ ID NO: 13125 - DNA, 23 bp, Artificial Sequence
  primer
tgatttcaggcatctaacaaagg

SEQ ID NO: 13126 - DNA, 38 bp, Artificial Sequence
  primer
gtaaaacgacggccagttgctttggaaagtagggtttg

SEQ ID NO: 13127 - DNA, 23 bp, Artificial Sequence
  primer
tgatttagcaaaggtattggtcc

SEQ ID NO: 13128 - DNA, 23 bp, Artificial Sequence
  primer
tgctatgtgtcagatactgtgcc

SEQ ID NO: 13129 - DNA, 21 bp, Artificial Sequence
  primer
tggtggtggtatgttctaagc

SEQ ID NO: 13130 - DNA, 24 bp, Artificial Sequence
  primer
ttagtctacaggttggctgcatag

SEQ ID NO: 13131 - DNA, 24 bp, Artificial Sequence
  primer
ttagtctacaggttggctgcatag

SEQ ID NO: 13132 - DNA, 41 bp, Artificial Sequence
  primer
gtaaaacgacggccagtctggactgtgatatgtcatttgtg

SEQ ID NO: 13133 - DNA, 46 bp, Artificial Sequence
  primer
gtaaaacgacggccagtgatatcaaacccaaatctaaattctgtta

SEQ ID NO: 13134 - DNA, 43 bp, Artificial Sequence
  primer
gtaaaacgacggccagtggcatataagaattagagatgctgaa

SEQ ID NO: 13135 - DNA, 45 bp, Artificial Sequence
  primer
gtaaaacgacggccagtgctgggtatcttagacgtaattagaaca

SEQ ID NO: 13136 - DNA, 21 bp, Artificial Sequence
  primer
gggtttgcagtggaagaaatc

SEQ ID NO: 13137 - DNA, 24 bp, Artificial Sequence
  primer
ttaaggaagttcagattcattccc

SEQ ID NO: 13138 - DNA, 45 bp, Artificial Sequence
  primer
gtaaaacgacggccagtgccttaaggttaattcttgaagtacaga

SEQ ID NO: 13139 - DNA, 23 bp, Artificial Sequence
  primer
ggaattgcagttgcagtgattag

SEQ ID NO: 13140 - DNA, 41 bp, Artificial Sequence
  primer
gtaaaacgacggccagtggtaaacattgcctccagatttag

SEQ ID NO: 13141 - DNA, 39 bp, Artificial Sequence
  primer
gtaaaacgacggccagtgcagtatgttgagtttatggca

SEQ ID NO: 13142 - DNA, 21 bp, Artificial Sequence
  primer
tgcccaccagaaccttatagc

SEQ ID NO: 13143 - DNA, 42 bp, Artificial Sequence
  primer
gtaaaacgacggccagttttctgttaagcagtcactaccatt

SEQ ID NO: 13144 - DNA, 40 bp, Artificial Sequence
  primer
gtaaaacgacggccagtttgtttgccaccttcattagttt

SEQ ID NO: 13145 - DNA, 40 bp, Artificial Sequence
  primer
gtaaaacgacggccagttcaaactcgtgttgtttgaactg

SEQ ID NO: 13146 - DNA, 21 bp, Artificial Sequence
  primer
ggagggaagatgttacaaccc

SEQ ID NO: 13147 - DNA, 38 bp, Artificial Sequence
  primer
gtaaaacgacggccagtgctgagattacaggcatgagc

SEQ ID NO: 13148 - DNA, 25 bp, Artificial Sequence
  primer
tttagaaccaggcagagtatctgag

SEQ ID NO: 13149 - DNA, 43 bp, Artificial Sequence
  primer
gtaaaacgacggccagtttagatcagtagcaaagcctatgatg

SEQ ID NO: 13150 - DNA, 21 bp, Artificial Sequence
  primer
tcttaagagctctgaccgcat

SEQ ID NO: 13151 - DNA, 39 bp, Artificial Sequence
  primer
gtaaaacgacggccagtctcaatgaatggtagttgctgc

SEQ ID NO: 13152 - DNA, 37 bp, Artificial Sequence
  primer
gtaaaacgacggccagtcgtacatgaagggcagttgg

SEQ ID NO: 13153 - DNA, 24 bp, Artificial Sequence
  primer
ttggacaagtttgcaatagttcat

SEQ ID NO: 13154 - DNA, 23 bp, Artificial Sequence
  primer
tgcttaggaaggtgtgtgaattg

SEQ ID NO: 13155 - DNA, 41 bp, Artificial Sequence
  primer
gtaaaacgacggccagtaaccacttgtgctaatagaggagc

SEQ ID NO: 13156 - DNA, 21 bp, Artificial Sequence
  primer
catacacgctctacccactgc

SEQ ID NO: 13157 - DNA, 40 bp, Artificial Sequence
  primer
gtaaaacgacggccagttttgaaaggcacctaagtcattg

SEQ ID NO: 13158 - DNA, 38 bp, Artificial Sequence
  primer
gtaaaacgacggccagtctcaatcagagcctgaaccac

SEQ ID NO: 13159 - DNA, 21 bp, Artificial Sequence
  primer
cccggcctaaagttgtagttc

SEQ ID NO: 13160 - DNA, 38 bp, Artificial Sequence
  primer
gtaaaacgacggccagttgctcagattggtttgagtgc

SEQ ID NO: 13161 - DNA, 41 bp, Artificial Sequence
  primer
gtaaaacgacggccagtaatgctttgcactgactctgatag

SEQ ID NO: 13162 - DNA, 24 bp, Artificial Sequence
  primer
tgtatcctgttcatctttattgcc

SEQ ID NO: 13163 - DNA, 19 bp, Artificial Sequence
  primer
aacatggccggttatgcac

SEQ ID NO: 13164 - DNA, 38 bp, Artificial Sequence
  primer
gtaaaacgacggccagtgacaaagatgaggaaggcagc

SEQ ID NO: 13165 - DNA, 38 bp, Artificial Sequence
  primer
gtaaaacgacggccagtctaatgaaagcccactctgcc

SEQ ID NO: 13166 - DNA, 21 bp, Artificial Sequence
  primer
gtgtgcatgatgtttgttccc

SEQ ID NO: 13167 - DNA, 42 bp, Artificial Sequence
  primer
gtaaaacgacggccagttttaagaaggtcctgttgtcagttt

SEQ ID NO: 13168 - DNA, 38 bp, Artificial Sequence
  primer
gtaaaacgacggccagtctggaaacttggagatcctgc

SEQ ID NO: 13169 - DNA, 37 bp, Artificial Sequence
  primer
gtaaaacgacggccagtgcaggcaagctaggaggaag

SEQ ID NO: 13170 - DNA, 21 bp, Artificial Sequence
  primer
gaacttcctgtttggcagagg

SEQ ID NO: 13171 - DNA, 38 bp, Artificial Sequence
  primer
gtaaaacgacggccagttttacaggcgggaaacaagac

SEQ ID NO: 13172 - DNA, 21 bp, Artificial Sequence
  primer
agcgaccctagggatatcgac

SEQ ID NO: 13173 - DNA, 38 bp, Artificial Sequence
  primer
gtaaaacgacggccagtacccactggatatcatgctcc

SEQ ID NO: 13174 - DNA, 21 bp, Artificial Sequence
  primer
gtggtgggaacctaccttctg

SEQ ID NO: 13175 - DNA, 38 bp, Artificial Sequence
  primer
gtaaaacgacggccagtccaacaagcctctctgtctcc

SEQ ID NO: 13176 - DNA, 20 bp, Artificial Sequence
  primer
ccttacgccatgtctccctc

SEQ ID NO: 13177 - DNA, 21 bp, Artificial Sequence
  primer
tcaagggtcctacccatgttc

SEQ ID NO: 13178 - DNA, 38 bp, Artificial Sequence
  primer
gtaaaacgacggccagtctaccctttccacggtcattg

SEQ ID NO: 13179 - DNA, 35 bp, Artificial Sequence
  primer
gtaaaacgacggccagtctacaagcactcgccggg

SEQ ID NO: 13180 - DNA, 38 bp, Artificial Sequence
  primer
gtaaaacgacggccagtttaagttccaggtgggcagag

SEQ ID NO: 13181 - DNA, 37 bp, Artificial Sequence
  primer
gtaaaacgacggccagtgtcctgacactccagccttg

SEQ ID NO: 13182 - DNA, 21 bp, Artificial Sequence
  primer
ccctgtacagcagtgatccag

SEQ ID NO: 13183 - DNA, 38 bp, Artificial Sequence
  primer
gtaaaacgacggccagtctttggacctccttgtgtttg

SEQ ID NO: 13184 - DNA, 38 bp, Artificial Sequence
  primer
gtaaaacgacggccagttgtaaaggagctggctatccc

SEQ ID NO: 13185 - DNA, 38 bp, Artificial Sequence
  primer
gtaaaacgacggccagtcctgcccaggaggactactac

SEQ ID NO: 13186 - DNA, 37 bp, Artificial Sequence
  primer
gtaaaacgacggccagtgtgtgtgatctccgagtggg

SEQ ID NO: 13187 - DNA, 38 bp, Artificial Sequence
  primer
gtaaaacgacggccagtgtgaaggagttgggagaccac

SEQ ID NO: 13188 - DNA, 37 bp, Artificial Sequence
  primer
gtaaaacgacggccagtagctggtaaggaggagcagc

SEQ ID NO: 13189 - DNA, 39 bp, Artificial Sequence
  primer
gtaaaacgacggccagtgatggcccaaatctacatcaac

SEQ ID NO: 13190 - DNA, 38 bp, Artificial Sequence
  primer
gtaaaacgacggccagtgattgcacgtgagttgctttg

SEQ ID NO: 13191 - DNA, 21 bp, Artificial Sequence
  primer
agtacgagaccctgcagatgg

SEQ ID NO: 13192 - DNA, 37 bp, Artificial Sequence
  primer
gtaaaacgacggccagtaggcagcgacttcagatgac

SEQ ID NO: 13193 - DNA, 21 bp, Artificial Sequence
  primer
taagaagctcaagcggaaagg

SEQ ID NO: 13194 - DNA, 18 bp, Artificial Sequence
  primer
agaggcacagcctttccg

SEQ ID NO: 13195 - DNA, 38 bp, Artificial Sequence
  primer
gtaaaacgacggccagttaaacagcaggtgcgtagagc

SEQ ID NO: 13196 - DNA, 38 bp, Artificial Sequence
  primer
gtaaaacgacggccagtatgcagcactaaggaacaggg

SEQ ID NO: 13197 - DNA, 21 bp, Artificial Sequence
  primer
ctctcacctcctctctccgtc

SEQ ID NO: 13198 - DNA, 37 bp, Artificial Sequence
  primer
gtaaaacgacggccagtctgtcttgaccctgagtggg

SEQ ID NO: 13199 - DNA, 38 bp, Artificial Sequence
  primer
gtaaaacgacggccagtggcaagggtggttgtgagtag

SEQ ID NO: 13200 - DNA, 35 bp, Artificial Sequence
  primer
gtaaaacgacggccagttgcccatcacccagatcc

SEQ ID NO: 13201 - DNA, 38 bp, Artificial Sequence
  primer
gtaaaacgacggccagtatacagtggagaaggcgttgc

SEQ ID NO: 13202 - DNA, 38 bp, Artificial Sequence
  primer
gtaaaacgacggccagtcaagctttcattgtgtcaggg

SEQ ID NO: 13203 - DNA, 37 bp, Artificial Sequence
  primer
gtaaaacgacggccagtctaagcaccactgaatggca

SEQ ID NO: 13204 - DNA, 38 bp, Artificial Sequence
  primer
gtaaaacgacggccagtaaccaaatgtgcttgcatcag

SEQ ID NO: 13205 - DNA, 40 bp, Artificial Sequence
  primer
gtaaaacgacggccagtcctactttcttgcggttgtagtc

SEQ ID NO: 13206 - DNA, 20 bp, Artificial Sequence
  primer
caagggtggtgaatcctgtg

SEQ ID NO: 13207 - DNA, 22 bp, Artificial Sequence
  primer
agactagagggcaatgctgaag

SEQ ID NO: 13208 - DNA, 21 bp, Artificial Sequence
  primer
gtcattgttcctccaagtgcc

SEQ ID NO: 13209 - DNA, 21 bp, Artificial Sequence
  primer
acaagtccagccacaagttgg

SEQ ID NO: 13210 - DNA, 21 bp, Artificial Sequence
  primer
gcaagtaacgaacagacgtgg

SEQ ID NO: 13211 - DNA, 37 bp, Artificial Sequence
  primer
gtaaaacgacggccagtatcgccaagagagtgagtgg

SEQ ID NO: 13212 - DNA, 20 bp, Artificial Sequence
  primer
ctgtaccagtgcctgccttc

SEQ ID NO: 13213 - DNA, 19 bp, Artificial Sequence
  primer
cagaggtgttgagccaggg

SEQ ID NO: 13214 - DNA, 37 bp, Artificial Sequence
  primer
gtaaaacgacggccagtttccgaaacatctcctggtg

SEQ ID NO: 13215 - DNA, 37 bp, Artificial Sequence
  primer
gtaaaacgacggccagtgagacgacagcgatggagac

SEQ ID NO: 13216 - DNA, 38 bp, Artificial Sequence
  primer
gtaaaacgacggccagttgactgtgaaactctgcaggc

SEQ ID NO: 13217 - DNA, 38 bp, Artificial Sequence
  primer
gtaaaacgacggccagtagctctactcctcagggtggg

SEQ ID NO: 13218 - DNA, 37 bp, Artificial Sequence
  primer
gtaaaacgacggccagttctggtttaacatggccgac

SEQ ID NO: 13219 - DNA, 37 bp, Artificial Sequence
  primer
gtaaaacgacggccagttgctcattgatgactggcac

SEQ ID NO: 13220 - DNA, 21 bp, Artificial Sequence
  primer
atgcaagccttactgggtgac

SEQ ID NO: 13221 - DNA, 18 bp, Artificial Sequence
  primer
cttggcacacacagcagc

SEQ ID NO: 13222 - DNA, 21 bp, Artificial Sequence
  primer
cttcagcctgcctaccttcag

SEQ ID NO: 13223 - DNA, 38 bp, Artificial Sequence
  primer
gtaaaacgacggccagtcagaagctcatggaagtgtgg

SEQ ID NO: 13224 - DNA, 21 bp, Artificial Sequence
  primer
caagccagatgtctagcaggg

SEQ ID NO: 13225 - DNA, 18 bp, Artificial Sequence
  primer
aggcgtgagccaacttgc

SEQ ID NO: 13226 - DNA, 39 bp, Artificial Sequence
  primer
gtaaaacgacggccagtgcctctactttccttcctttgg

SEQ ID NO: 13227 - DNA, 38 bp, Artificial Sequence
  primer
gtaaaacgacggccagtaccaaagtaaatgggccagag

SEQ ID NO: 13228 - DNA, 21 bp, Artificial Sequence
  primer
tgcaatctgttgaagcagaaa

SEQ ID NO: 13229 - DNA, 44 bp, Artificial Sequence
  primer
gtaaaacgacggccagttgaatactctcattccttctcctttag

SEQ ID NO: 13230 - DNA, 22 bp, Artificial Sequence
  primer
tgctgcttatccagctatgttc

SEQ ID NO: 13231 - DNA, 39 bp, Artificial Sequence
  primer
gtaaaacgacggccagtgggaggagatggtgtgaaatag

SEQ ID NO: 13232 - DNA, 20 bp, Artificial Sequence
  primer
ttctcacttcccatgacacg

SEQ ID NO: 13233 - DNA, 38 bp, Artificial Sequence
  primer
gtaaaacgacggccagtatgggctgctagccatttaag

SEQ ID NO: 13234 - DNA, 38 bp, Artificial Sequence
  primer
gtaaaacgacggccagtcttcacctgtggaggaagagg

SEQ ID NO: 13235 - DNA, 21 bp, Artificial Sequence
  primer
ttgtactttcctctgcccaag

SEQ ID NO: 13236 - DNA, 21 bp, Artificial Sequence
  primer
tatggatctgacatggctgtg

SEQ ID NO: 13237 - DNA, 39 bp, Artificial Sequence
  primer
gtaaaacgacggccagttgtagtgtagggttgagttggc

SEQ ID NO: 13238 - DNA, 23 bp, Artificial Sequence
  primer
cagaactctctgtggaagactcg

SEQ ID NO: 13239 - DNA, 21 bp, Artificial Sequence
  primer
gaacgggatgaactttgaagg

SEQ ID NO: 13240 - DNA, 21 bp, Artificial Sequence
  primer
atatgaggcctagggtttccc

SEQ ID NO: 13241 - DNA, 38 bp, Artificial Sequence
  primer
gtaaaacgacggccagtggcagcatttggaatgtgtaa

SEQ ID NO: 13242 - DNA, 22 bp, Artificial Sequence
  primer
cttgtgaacccatcacattcag

SEQ ID NO: 13243 - DNA, 21 bp, Artificial Sequence
  primer
attcaagccttggttgagctg

SEQ ID NO: 13244 - DNA, 40 bp, Artificial Sequence
  primer
gtaaaacgacggccagttcatccagtgcttagatgtgttg

SEQ ID NO: 13245 - DNA, 21 bp, Artificial Sequence
  primer
ccctttatttcaggagccaag

SEQ ID NO: 13246 - DNA, 20 bp, Artificial Sequence
  primer
atttccttccgtcttccgac

SEQ ID NO: 13247 - DNA, 18 bp, Artificial Sequence
  primer
ggagagagaaggcgccag

SEQ ID NO: 13248 - DNA, 38 bp, Artificial Sequence
  primer
gtaaaacgacggccagtagcaggtacaggtctccgttc

SEQ ID NO: 13249 - DNA, 42 bp, Artificial Sequence
  primer
gtaaaacgacggccagtaaatccagtgctacttactatgccc

SEQ ID NO: 13250 - DNA, 21 bp, Artificial Sequence
  primer
ggcaaactaacctgcctgaag

SEQ ID NO: 13251 - DNA, 21 bp, Artificial Sequence
  primer
aagccttctgtctctccctcc

SEQ ID NO: 13252 - DNA, 37 bp, Artificial Sequence
  primer
gtaaaacgacggccagtctgaaaccgtgtccacatcc

SEQ ID NO: 13253 - DNA, 38 bp, Artificial Sequence
  primer
gtaaaacgacggccagtggtcagccaggctttgtaatc

SEQ ID NO: 13254 - DNA, 20 bp, Artificial Sequence
  primer
caggtgaagacgtgtggctc

SEQ ID NO: 13255 - DNA, 37 bp, Artificial Sequence
  primer
gtaaaacgacggccagtgtttcacgtctgcctcttgc

SEQ ID NO: 13256 - DNA, 22 bp, Artificial Sequence
  primer
ttcctatgcatgaagaagggtc

SEQ ID NO: 13257 - DNA, 38 bp, Artificial Sequence
  primer
gtaaaacgacggccagtgaacacatcactgtgcccttc

SEQ ID NO: 13258 - DNA, 38 bp, Artificial Sequence
  primer
gtaaaacgacggccagtcgcccatagtccttgtctttg

SEQ ID NO: 13259 - DNA, 37 bp, Artificial Sequence
  primer
gtaaaacgacggccagtgctgctgtgtgtctgagtcg

SEQ ID NO: 13260 - DNA, 38 bp, Artificial Sequence
  primer
gtaaaacgacggccagtttatctctctgcgcctgtttc

SEQ ID NO: 13261 - DNA, 21 bp, Artificial Sequence
  primer
gacaagaatgtgcctcactgc

SEQ ID NO: 13262 - DNA, 39 bp, Artificial Sequence
  primer
gtaaaacgacggccagttggagagctccacagttaccag

SEQ ID NO: 13263 - DNA, 21 bp, Artificial Sequence
  primer
agctttccacactgctatccc

SEQ ID NO: 13264 - DNA, 22 bp, Artificial Sequence
  primer
gagagaagggatactgggaagg

SEQ ID NO: 13265 - DNA, 38 bp, Artificial Sequence
  primer
gtaaaacgacggccagttttgcaagtttctgcagttcc

SEQ ID NO: 13266 - DNA, 38 bp, Artificial Sequence
  primer
gtaaaacgacggccagtcccatggatttgtagcatctg

SEQ ID NO: 13267 - DNA, 21 bp, Artificial Sequence
  primer
gccaaagtttgtctaccagcc

SEQ ID NO: 13268 - DNA, 21 bp, Artificial Sequence
  primer
tggtttcatccgttcttctcc

SEQ ID NO: 13269 - DNA, 38 bp, Artificial Sequence
  primer
gtaaaacgacggccagttcacatgtgcatttcagttgc

SEQ ID NO: 13270 - DNA, 38 bp, Artificial Sequence
  primer
gtaaaacgacggccagtccagctgtgactttcatcctg

SEQ ID NO: 13271 - DNA, 22 bp, Artificial Sequence
  primer
ttatcccatgaagacaacgtcc

SEQ ID NO: 13272 - DNA, 21 bp, Artificial Sequence
  primer
cagcaagttgcagataggcag

SEQ ID NO: 13273 - DNA, 21 bp, Artificial Sequence
  primer
gagtcgtcattgctgggtctt

SEQ ID NO: 13274 - DNA, 38 bp, Artificial Sequence
  primer
gtaaaacgacggccagtcttgccaagcaactctcactg

SEQ ID NO: 13275 - DNA, 20 bp, Artificial Sequence
  primer
atcccagagtggctcaggtc

SEQ ID NO: 13276 - DNA, 36 bp, Artificial Sequence
  primer
gtaaaacgacggccagtctcccgcctctgtcttgtc

SEQ ID NO: 13277 - DNA, 42 bp, Artificial Sequence
  primer
gtaaaacgacggccagttctgaccagctaaataaagctaaca

SEQ ID NO: 13278 - DNA, 21 bp, Artificial Sequence
  primer
agccagatggtttctgtagca

SEQ ID NO: 13279 - DNA, 41 bp, Artificial Sequence
  primer
gtaaaacgacggccagtcaacaaagtgaagttgtgaaatcg

SEQ ID NO: 13280 - DNA, 22 bp, Artificial Sequence
  primer
tctggaatgtagtgttccaggg

SEQ ID NO: 13281 - DNA, 41 bp, Artificial Sequence
  primer
gtaaaacgacggccagttgcatctggtaaataatggaaatc

SEQ ID NO: 13282 - DNA, 23 bp, Artificial Sequence
  primer
aatgatagtagcttcctttgccc

SEQ ID NO: 13283 - DNA, 19 bp, Artificial Sequence
  primer
atggcatgaacccaggaag

SEQ ID NO: 13284 - DNA, 22 bp, Artificial Sequence
  primer
ggcagctttatagtagctggga

SEQ ID NO: 13285 - DNA, 38 bp, Artificial Sequence
  primer
gtaaaacgacggccagtctcaggaacaggactccatgc

SEQ ID NO: 13286 - DNA, 38 bp, Artificial Sequence
  primer
gtaaaacgacggccagtacctgtgtgcactggttcttt

SEQ ID NO: 13287 - DNA, 24 bp, Artificial Sequence
  primer
tgatggtctatgtaggcatgaaac

SEQ ID NO: 13288 - DNA, 38 bp, Artificial Sequence
  primer
gtaaaacgacggccagtactggacttcaggagagcgag

SEQ ID NO: 13289 - DNA, 38 bp, Artificial Sequence
  primer
gtaaaacgacggccagtggcaatcaaggttgtagcact

SEQ ID NO: 13290 - DNA, 36 bp, Artificial Sequence
  primer
gtaaaacgacggccagtaccactcctggcaccaaag

SEQ ID NO: 13291 - DNA, 27 bp, Artificial Sequence
  primer
tggtaattactcaatgtcagtctcttc

SEQ ID NO: 13292 - DNA, 22 bp, Artificial Sequence
  primer
tgagtgtaattgttcaggcacc

SEQ ID NO: 13293 - DNA, 44 bp, Artificial Sequence
  primer
gtaaaacgacggccagtccataactcagatcagtagagctttgt

SEQ ID NO: 13294 - DNA, 42 bp, Artificial Sequence
  primer
gtaaaacgacggccagtaacattcctaggtcaagtcaaagag

SEQ ID NO: 13295 - DNA, 38 bp, Artificial Sequence
  primer
gtaaaacgacggccagttgtaacagtaagggctgtggg

SEQ ID NO: 13296 - DNA, 26 bp, Artificial Sequence
  primer
aaatgaacctgcatattattgtctaa

SEQ ID NO: 13297 - DNA, 42 bp, Artificial Sequence
  primer
gtaaaacgacggccagtaatgttcctaagtgcatgttcaact

SEQ ID NO: 13298 - DNA, 27 bp, Artificial Sequence
  primer
tggacaagtccttatcctttacttacc

SEQ ID NO: 13299 - DNA, 42 bp, Artificial Sequence
  primer
gtaaaacgacggccagtccagttctcacaaagaatatcaacc

SEQ ID NO: 13300 - DNA, 38 bp, Artificial Sequence
  primer
gtaaaacgacggccagtatcgcacccagtcttcctatt

SEQ ID NO: 13301 - DNA, 41 bp, Artificial Sequence
  primer
gtaaaacgacggccagttcaccagtttcaaatgtacctgac

SEQ ID NO: 13302 - DNA, 22 bp, Artificial Sequence
  primer
tttgaatgctgtttcctcaaag

SEQ ID NO: 13303 - DNA, 38 bp, Artificial Sequence
  primer
gtaaaacgacggccagtttatctggtcaactgcttgcc

SEQ ID NO: 13304 - DNA, 41 bp, Artificial Sequence
  primer
gtaaaacgacggccagtcctttgatttgaaagtgcttgttg

SEQ ID NO: 13305 - DNA, 20 bp, Artificial Sequence
  primer
cagtgattgcatttgggtcc

SEQ ID NO: 13306 - DNA, 21 bp, Artificial Sequence
  primer
attggctcacttcccaagttc

SEQ ID NO: 13307 - DNA, 38 bp, Artificial Sequence
  primer
gtaaaacgacggccagtggacaagaattatgggcttgg

SEQ ID NO: 13308 - DNA, 42 bp, Artificial Sequence
  primer
gtaaaacgacggccagttgagatttcagtttcaaagtgttgg

SEQ ID NO: 13309 - DNA, 38 bp, Artificial Sequence
  primer
gtaaaacgacggccagtatggtgctcagcaaataggtg

SEQ ID NO: 13310 - DNA, 38 bp, Artificial Sequence
  primer
gtaaaacgacggccagtatttggtgttgactcatggga

SEQ ID NO: 13311 - DNA, 39 bp, Artificial Sequence
  primer
gtaaaacgacggccagttgctgagatactctcaaagccc

SEQ ID NO: 13312 - DNA, 22 bp, Artificial Sequence
  primer
ttgtttattctgccaaagcctc

SEQ ID NO: 13313 - DNA, 39 bp, Artificial Sequence
  primer
gtaaaacgacggccagttgagaacctttgtttctgctcc

SEQ ID NO: 13314 - DNA, 38 bp, Artificial Sequence
  primer
gtaaaacgacggccagtaggacctttcagcttgtcctg

SEQ ID NO: 13315 - DNA, 38 bp, Artificial Sequence
  primer
gtaaaacgacggccagttggaagagggcctagatttcc

SEQ ID NO: 13316 - DNA, 37 bp, Artificial Sequence
  primer
gtaaaacgacggccagttgtgctgtagttacgcgtcg

SEQ ID NO: 13317 - DNA, 41 bp, Artificial Sequence
  primer
gtaaaacgacggccagttccatctttatagcaagagcagtg

SEQ ID NO: 13318 - DNA, 41 bp, Artificial Sequence
  primer
gtaaaacgacggccagtaattccctgacatttgacaagaag

SEQ ID NO: 13319 - DNA, 41 bp, Artificial Sequence
  primer
gtaaaacgacggccagttttctccgttcactgcctagttac

SEQ ID NO: 13320 - DNA, 20 bp, Artificial Sequence
  primer
ttgaaactgggaggtgaagg

SEQ ID NO: 13321 - DNA, 38 bp, Artificial Sequence
  primer
gtaaaacgacggccagtgtgcacacaaccagtgctatc

SEQ ID NO: 13322 - DNA, 39 bp, Artificial Sequence
  primer
gtaaaacgacggccagtcaacacttgggtgagagagacc

SEQ ID NO: 13323 - DNA, 39 bp, Artificial Sequence
  primer
gtaaaacgacggccagtttgtccatatggctaaagcaag

SEQ ID NO: 13324 - DNA, 38 bp, Artificial Sequence
  primer
gtaaaacgacggccagtcaaccgtgataaggtgtcagg

SEQ ID NO: 13325 - DNA, 21 bp, Artificial Sequence
  primer
ggaaccagattgatgactccc

SEQ ID NO: 13326 - DNA, 21 bp, Artificial Sequence
  primer
gtgtgaatgaggcataaaccc

SEQ ID NO: 13327 - DNA, 44 bp, Artificial Sequence
  primer
gtaaaacgacggccagtactgtattacgaatagggagttaccag

SEQ ID NO: 13328 - DNA, 26 bp, Artificial Sequence
  primer
gcattctgacattagaaggatttagg

SEQ ID NO: 13329 - DNA, 41 bp, Artificial Sequence
  primer
gtaaaacgacggccagttttacagattcctttgccactacc

SEQ ID NO: 13330 - DNA, 21 bp, Artificial Sequence
  primer
tgtcaggccattaagggtagc

SEQ ID NO: 13331 - DNA, 21 bp, Artificial Sequence
  primer
acacacaggattcaacttggc

SEQ ID NO: 13332 - DNA, 38 bp, Artificial Sequence
  primer
gtaaaacgacggccagtagctcagctttctcacccttg

SEQ ID NO: 13333 - DNA, 21 bp, Artificial Sequence
  primer
ttgattgcctgattgtcttca

SEQ ID NO: 13334 - DNA, 23 bp, Artificial Sequence
  primer
tcgagttggagactttcttaggc

SEQ ID NO: 13335 - DNA, 36 bp, Artificial Sequence
  primer
gtaaaacgacggccagtacacctcagccactgccac

SEQ ID NO: 13336 - DNA, 38 bp, Artificial Sequence
  primer
gtaaaacgacggccagtgagactccactgtccgactcc

SEQ ID NO: 13337 - DNA, 38 bp, Artificial Sequence
  primer
gtaaaacgacggccagtaacagcaagtgcaggattgtg

SEQ ID NO: 13338 - DNA, 21 bp, Artificial Sequence
  primer
cttctttggccacgttaatgc

SEQ ID NO: 13339 - DNA, 20 bp, Artificial Sequence
  primer
agttgcgcacttaacatggg

SEQ ID NO: 13340 - DNA, 21 bp, Artificial Sequence
  primer
gctgcataacagcatggactc

SEQ ID NO: 13341 - DNA, 20 bp, Artificial Sequence
  primer
accatgttccaaacctgctg

SEQ ID NO: 13342 - DNA, 20 bp, Artificial Sequence
  primer
gtgcctatcgattgtgccag

SEQ ID NO: 13343 - DNA, 20 bp, Artificial Sequence
  primer
gctgacaaccacacctctcc

SEQ ID NO: 13344 - DNA, 38 bp, Artificial Sequence
  primer
gtaaaacgacggccagtaaagctgtggactccatcctg

SEQ ID NO: 13345 - DNA, 21 bp, Artificial Sequence
  primer
ctccagctaggtggtaatggg

SEQ ID NO: 13346 - DNA, 36 bp, Artificial Sequence
  primer
gtaaaacgacggccagtatgccattgtgcctcttcc

SEQ ID NO: 13347 - DNA, 21 bp, Artificial Sequence
  primer
aaacagcagaggaccaaggtg

SEQ ID NO: 13348 - DNA, 38 bp, Artificial Sequence
  primer
gtaaaacgacggccagttccagagctgccactgtaatc

SEQ ID NO: 13349 - DNA, 21 bp, Artificial Sequence
  primer
cactgggttccaggtcaagtc

SEQ ID NO: 13350 - DNA, 38 bp, Artificial Sequence
  primer
gtaaaacgacggccagtggaagtcttgttgctcttgcc

SEQ ID NO: 13351 - DNA, 21 bp, Artificial Sequence
  primer
atagcaggttctgatgcagcc

SEQ ID NO: 13352 - DNA, 21 bp, Artificial Sequence
  primer
cagacaacacgccctctactg

SEQ ID NO: 13353 - DNA, 20 bp, Artificial Sequence
  primer
gcacattggtacgatgaggg

SEQ ID NO: 13354 - DNA, 38 bp, Artificial Sequence
  primer
gtaaaacgacggccagtggtgtggaaagaacatgaagc

SEQ ID NO: 13355 - DNA, 21 bp, Artificial Sequence
  primer
cttccagcagggtctcttcag

SEQ ID NO: 13356 - DNA, 38 bp, Artificial Sequence
  primer
gtaaaacgacggccagtagacaaatgaacgagaagccc

SEQ ID NO: 13357 - DNA, 38 bp, Artificial Sequence
  primer
gtaaaacgacggccagtgctcttcatcaggctctaccc

SEQ ID NO: 13358 - DNA, 38 bp, Artificial Sequence
  primer
gtaaaacgacggccagtgagctcaacgtggtagctttg

SEQ ID NO: 13359 - DNA, 21 bp, Artificial Sequence
  primer
tgacagacgagggagtgacag

SEQ ID NO: 13360 - DNA, 21 bp, Artificial Sequence
  primer
ggcttgagtaggattcccagg

SEQ ID NO: 13361 - DNA, 38 bp, Artificial Sequence
  primer
gtaaaacgacggccagtctcttggtttcttgagagcgg

SEQ ID NO: 13362 - DNA, 21 bp, Artificial Sequence
  primer
ctcacatatcagatccggtgg

SEQ ID NO: 13363 - DNA, 21 bp, Artificial Sequence
  primer
tttacgctatccatgctggtg

SEQ ID NO: 13364 - DNA, 36 bp, Artificial Sequence
  primer
gtaaaacgacggccagtgttccgctcagtcccagtg

SEQ ID NO: 13365 - DNA, 38 bp, Artificial Sequence
  primer
gtaaaacgacggccagttgtccaggaactcagatggag

SEQ ID NO: 13366 - DNA, 19 bp, Artificial Sequence
  primer
gggtatctgggcttccacc

SEQ ID NO: 13367 - DNA, 37 bp, Artificial Sequence
  primer
gtaaaacgacggccagtaggtatcagccctttccgac

SEQ ID NO: 13368 - DNA, 38 bp, Artificial Sequence
  primer
gtaaaacgacggccagttatggattgaaggtaagcgcc

SEQ ID NO: 13369 - DNA, 38 bp, Artificial Sequence
  primer
gtaaaacgacggccagtgccaagctctgtgagtgtgtc

SEQ ID NO: 13370 - DNA, 20 bp, Artificial Sequence
  primer
gacaagcacggaatgaatgg

SEQ ID NO: 13371 - DNA, 37 bp, Artificial Sequence
  primer
gtaaaacgacggccagtaccaacacctgctctagccc

SEQ ID NO: 13372 - DNA, 38 bp, Artificial Sequence
  primer
gtaaaacgacggccagtgtatgagaagctgggctccac

SEQ ID NO: 13373 - DNA, 37 bp, Artificial Sequence
  primer
gtaaaacgacggccagtgaacagggccttccattgtc

SEQ ID NO: 13374 - DNA, 38 bp, Artificial Sequence
  primer
gtaaaacgacggccagttcccactgtggcctaccttag

SEQ ID NO: 13375 - DNA, 38 bp, Artificial Sequence
  primer
gtaaaacgacggccagtgctccagagaggagagactgg

SEQ ID NO: 13376 - DNA, 38 bp, Artificial Sequence
  primer
gtaaaacgacggccagtctcccaagcagaaggtatgtg

SEQ ID NO: 13377 - DNA, 20 bp, Artificial Sequence
  primer
caggaccagtggctctgaag

SEQ ID NO: 13378 - DNA, 37 bp, Artificial Sequence
  primer
gtaaaacgacggccagtagagggtgagtcccaagagg

SEQ ID NO: 13379 - DNA, 21 bp, Artificial Sequence
  primer
caagctctcatccatccagtg

SEQ ID NO: 13380 - DNA, 21 bp, Artificial Sequence
  primer
gtggtggctgtacacaaggtc

SEQ ID NO: 13381 - DNA, 21 bp, Artificial Sequence
  primer
gactccacagacttcagcagg

SEQ ID NO: 13382 - DNA, 38 bp, Artificial Sequence
  primer
gtaaaacgacggccagtacagcaccgtctacatcatgg

SEQ ID NO: 13383 - DNA, 38 bp, Artificial Sequence
  primer
gtaaaacgacggccagtcttgatgggtccctcctatgg

SEQ ID NO: 13384 - DNA, 36 bp, Artificial Sequence
  primer
gtaaaacgacggccagtgactacaagtcccggcagc

SEQ ID NO: 13385 - DNA, 37 bp, Artificial Sequence
  primer
gtaaaacgacggccagtgcccaggctgatgtttattg

SEQ ID NO: 13386 - DNA, 21 bp, Artificial Sequence
  primer
gtttcatccgtggtaagtggg

SEQ ID NO: 13387 - DNA, 39 bp, Artificial Sequence
  primer
gtaaaacgacggccagtggctctccatagccttgatttc

SEQ ID NO: 13388 - DNA, 38 bp, Artificial Sequence
  primer
gtaaaacgacggccagtccatcctagggagggaagatg

SEQ ID NO: 13389 - DNA, 21 bp, Artificial Sequence
  primer
ttacactttcaggcctctccc

SEQ ID NO: 13390 - DNA, 38 bp, Artificial Sequence
  primer
gtaaaacgacggccagtttggaacccagtgagaggaac

SEQ ID NO: 13391 - DNA, 37 bp, Artificial Sequence
  primer
gtaaaacgacggccagtcagtcacctgccttctctgg

SEQ ID NO: 13392 - DNA, 38 bp, Artificial Sequence
  primer
gtaaaacgacggccagtttagagcggagaaactgaggg

SEQ ID NO: 13393 - DNA, 38 bp, Artificial Sequence
  primer
gtaaaacgacggccagttactactggtacgccctgtgc

SEQ ID NO: 13394 - DNA, 36 bp, Artificial Sequence
  primer
gtaaaacgacggccagtggaggtgaggagctagggc

SEQ ID NO: 13395 - DNA, 38 bp, Artificial Sequence
  primer
gtaaaacgacggccagttatctccgtcctctctgagcc

SEQ ID NO: 13396 - DNA, 39 bp, Artificial Sequence
  primer
gtaaaacgacggccagtttaggactccacactgctgatg

SEQ ID NO: 13397 - DNA, 21 bp, Artificial Sequence
  primer
atgtcttgcaactccagaggc

SEQ ID NO: 13398 - DNA, 38 bp, Artificial Sequence
  primer
gtaaaacgacggccagtcttcatcctctaccgaaaccg

SEQ ID NO: 13399 - DNA, 38 bp, Artificial Sequence
  primer
gtaaaacgacggccagtaatcacatgtgccaaggacag

SEQ ID NO: 13400 - DNA, 38 bp, Artificial Sequence
  primer
gtaaaacgacggccagtccaaagcccacattcttaacc

SEQ ID NO: 13401 - DNA, 20 bp, Artificial Sequence
  primer
tcttggcagtgatgagaccc

SEQ ID NO: 13402 - DNA, 35 bp, Artificial Sequence
  primer
gtaaaacgacggccagtgcattggcacagaatggg

SEQ ID NO: 13403 - DNA, 38 bp, Artificial Sequence
  primer
gtaaaacgacggccagtccacccactctgaggactagg

SEQ ID NO: 13404 - DNA, 38 bp, Artificial Sequence
  primer
gtaaaacgacggccagtgttggtaacctgcctcagctc

SEQ ID NO: 13405 - DNA, 38 bp, Artificial Sequence
  primer
gtaaaacgacggccagtagttccagctgtacctcaccc

SEQ ID NO: 13406 - DNA, 37 bp, Artificial Sequence
  primer
gtaaaacgacggccagtctctgtctccttcctcacgg

SEQ ID NO: 13407 - DNA, 21 bp, Artificial Sequence
  primer
tgtcatcatattctgccagcc

SEQ ID NO: 13408 - DNA, 38 bp, Artificial Sequence
  primer
gtaaaacgacggccagtagaagcctcagtggtctcacc

SEQ ID NO: 13409 - DNA, 38 bp, Artificial Sequence
  primer
gtaaaacgacggccagtttacccatcagattccttcgg

SEQ ID NO: 13410 - DNA, 36 bp, Artificial Sequence
  primer
gtaaaacgacggccagtgccatggtgagtagggagc

SEQ ID NO: 13411 - DNA, 20 bp, Artificial Sequence
  primer
aggcagatgggagagaggtg

SEQ ID NO: 13412 - DNA, 21 bp, Artificial Sequence
  primer
ggtctggtcaccctcaacttc

SEQ ID NO: 13413 - DNA, 38 bp, Artificial Sequence
  primer
gtaaaacgacggccagtaggtgtgtgctcaaggaggag

SEQ ID NO: 13414 - DNA, 38 bp, Artificial Sequence
  primer
gtaaaacgacggccagtctcaactccttcactctgccc

SEQ ID NO: 13415 - DNA, 40 bp, Artificial Sequence
  primer
gtaaaacgacggccagtcatcatctttcagagacaaaccg

SEQ ID NO: 13416 - DNA, 38 bp, Artificial Sequence
  primer
gtaaaacgacggccagtgcttctttagccactgggttg

SEQ ID NO: 13417 - DNA, 43 bp, Artificial Sequence
  primer
gtaaaacgacggccagtggaactacttagaaggacagttccag

SEQ ID NO: 13418 - DNA, 38 bp, Artificial Sequence
  primer
gtaaaacgacggccagtggaaccctcacctcccattat

SEQ ID NO: 13419 - DNA, 22 bp, Artificial Sequence
  primer
aagttgcttagagcggtgtctg

SEQ ID NO: 13420 - DNA, 39 bp, Artificial Sequence
  primer
gtaaaacgacggccagtgctgggtgaagagcactagaag

SEQ ID NO: 13421 - DNA, 24 bp, Artificial Sequence
  primer
tgaatcaatgttgaggaatgttct

SEQ ID NO: 13422 - DNA, 38 bp, Artificial Sequence
  primer
gtaaaacgacggccagtttgtatgatgagtgggtgcag

SEQ ID NO: 13423 - DNA, 38 bp, Artificial Sequence
  primer
gtaaaacgacggccagtaaaggcagtgttgaggtttgg

SEQ ID NO: 13424 - DNA, 18 bp, Artificial Sequence
  primer
ctgggcgacaagagcaaa

SEQ ID NO: 13425 - DNA, 21 bp, Artificial Sequence
  primer
ctacggagtcttcgctatggg

SEQ ID NO: 13426 - DNA, 21 bp, Artificial Sequence
  primer
ttgttcacctccaagatgctc

SEQ ID NO: 13427 - DNA, 38 bp, Artificial Sequence
  primer
gtaaaacgacggccagtggagggttcaagcatagcatc

SEQ ID NO: 13428 - DNA, 38 bp, Artificial Sequence
  primer
gtaaaacgacggccagtcggaaggagtggttaattccc

SEQ ID NO: 13429 - DNA, 21 bp, Artificial Sequence
  primer
catctgaagaggtcaaccctg

SEQ ID NO: 13430 - DNA, 21 bp, Artificial Sequence
  primer
tgacttgaaccactgtcctcc

SEQ ID NO: 13431 - DNA, 38 bp, Artificial Sequence
  primer
gtaaaacgacggccagtaggactgaactccctgctctg

SEQ ID NO: 13432 - DNA, 22 bp, Artificial Sequence
  primer
tgtgatgtgcaaagattgatcc

SEQ ID NO: 13433 - DNA, 21 bp, Artificial Sequence
  primer
aaaggaaggctcattggaaac

SEQ ID NO: 13434 - DNA, 38 bp, Artificial Sequence
  primer
gtaaaacgacggccagtattccaagttcacagaagccc

SEQ ID NO: 13435 - DNA, 39 bp, Artificial Sequence
  primer
gtaaaacgacggccagtccagccaacattctttcatctc

SEQ ID NO: 13436 - DNA, 21 bp, Artificial Sequence
  primer
taaagctgatgcgcttgtttg

SEQ ID NO: 13437 - DNA, 37 bp, Artificial Sequence
  primer
gtaaaacgacggccagtatctgcatcctgcattggac

SEQ ID NO: 13438 - DNA, 38 bp, Artificial Sequence
  primer
gtaaaacgacggccagtgaagcggtttcagaaagttgg

SEQ ID NO: 13439 - DNA, 42 bp, Artificial Sequence
  primer
gtaaaacgacggccagttctgtttagtttggcctgtagtcac

SEQ ID NO: 13440 - DNA, 21 bp, Artificial Sequence
  primer
aagaatgatcaacttgtgggc

SEQ ID NO: 13441 - DNA, 38 bp, Artificial Sequence
  primer
gtaaaacgacggccagttgcccagagtcactttagctg

SEQ ID NO: 13442 - DNA, 38 bp, Artificial Sequence
  primer
gtaaaacgacggccagtttggccaacaggttgataagg

SEQ ID NO: 13443 - DNA, 38 bp, Artificial Sequence
  primer
gtaaaacgacggccagtgaccggattagttgtggtttg

SEQ ID NO: 13444 - DNA, 35 bp, Artificial Sequence
  primer
gtaaaacgacggccagtcattgctcagcctgtggc

SEQ ID NO: 13445 - DNA, 38 bp, Artificial Sequence
  primer
gtaaaacgacggccagtgctcattcctttggcactagg

SEQ ID NO: 13446 - DNA, 21 bp, Artificial Sequence
  primer
aacaacagcaacggtcatagc

SEQ ID NO: 13447 - DNA, 21 bp, Artificial Sequence
  primer
gcatgaacgttaggtgtttgg

SEQ ID NO: 13448 - DNA, 42 bp, Artificial Sequence
  primer
gtaaaacgacggccagttcgatacaacagaaatttgacaatg

SEQ ID NO: 13449 - DNA, 38 bp, Artificial Sequence
  primer
gtaaaacgacggccagttgggctcattgcacagtaaag

SEQ ID NO: 13450 - DNA, 38 bp, Artificial Sequence
  primer
gtaaaacgacggccagttacaatggctgtgtcctggag

SEQ ID NO: 13451 - DNA, 38 bp, Artificial Sequence
  primer
gtaaaacgacggccagttgaggtggtgtggagacagac

SEQ ID NO: 13452 - DNA, 37 bp, Artificial Sequence
  primer
gtaaaacgacggccagtaggcagaaagcggtaaatgc

SEQ ID NO: 13453 - DNA, 39 bp, Artificial Sequence
  primer
gtaaaacgacggccagtgctgaccttcacactgttaggc

SEQ ID NO: 13454 - DNA, 21 bp, Artificial Sequence
  primer
tctccttatttcccttcctgg

SEQ ID NO: 13455 - DNA, 22 bp, Artificial Sequence
  primer
ccctctgggaatatgtctctcc

SEQ ID NO: 13456 - DNA, 38 bp, Artificial Sequence
  primer
gtaaaacgacggccagtgcatgcatgtacacacaccac

SEQ ID NO: 13457 - DNA, 43 bp, Artificial Sequence
  primer
gtaaaacgacggccagtgattaagtgaatgtatgtcaacaggc

SEQ ID NO: 13458 - DNA, 21 bp, Artificial Sequence
  primer
gtcgtctggcctcattctaca

SEQ ID NO: 13459 - DNA, 21 bp, Artificial Sequence
  primer
gagcatggaagagacaaaggc

SEQ ID NO: 13460 - DNA, 21 bp, Artificial Sequence
  primer
taaacggagtgccagacaaag

SEQ ID NO: 13461 - DNA, 21 bp, Artificial Sequence
  primer
agtgatagtgcaccagggcag

SEQ ID NO: 13462 - DNA, 21 bp, Artificial Sequence
  primer
aagggacaaagtaatgcccac

SEQ ID NO: 13463 - DNA, 38 bp, Artificial Sequence
  primer
gtaaaacgacggccagtagatgcaacagcaatgagcac

SEQ ID NO: 13464 - DNA, 36 bp, Artificial Sequence
  primer
gtaaaacgacggccagtccctagctccctccacttg

SEQ ID NO: 13465 - DNA, 19 bp, Artificial Sequence
  primer
gccattctgaagcctaccg

SEQ ID NO: 13466 - DNA, 21 bp, Artificial Sequence
  primer
taactgtgtggttgcaaagcc

SEQ ID NO: 13467 - DNA, 39 bp, Artificial Sequence
  primer
gtaaaacgacggccagtttaccttggctctctagcttgg

SEQ ID NO: 13468 - DNA, 37 bp, Artificial Sequence
  primer
gtaaaacgacggccagtttctgacccttcctgtgtgg

SEQ ID NO: 13469 - DNA, 21 bp, Artificial Sequence
  primer
ctcttaaactggcgagcaagc

SEQ ID NO: 13470 - DNA, 38 bp, Artificial Sequence
  primer
gtaaaacgacggccagtatatctgcaaatggctgcaag

SEQ ID NO: 13471 - DNA, 21 bp, Artificial Sequence
  primer
catgtacagccaaagagctgg

SEQ ID NO: 13472 - DNA, 40 bp, Artificial Sequence
  primer
gtaaaacgacggccagtcaaacttcagaagaaggttggag

SEQ ID NO: 13473 - DNA, 40 bp, Artificial Sequence
  primer
gtaaaacgacggccagttgtgattggtttcattaattggg

SEQ ID NO: 13474 - DNA, 21 bp, Artificial Sequence
  primer
cttaacaccgctgcttccttc

SEQ ID NO: 13475 - DNA, 38 bp, Artificial Sequence
  primer
gtaaaacgacggccagttcagaaagaagggatcttggg

SEQ ID NO: 13476 - DNA, 38 bp, Artificial Sequence
  primer
gtaaaacgacggccagtcactccagagaaaggtaggcg

SEQ ID NO: 13477 - DNA, 41 bp, Artificial Sequence
  primer
gtaaaacgacggccagtttgatagtctaagccgaatcatcc

SEQ ID NO: 13478 - DNA, 23 bp, Artificial Sequence
  primer
ggaaaggaagaatacagacaggc

SEQ ID NO: 13479 - DNA, 37 bp, Artificial Sequence
  primer
gtaaaacgacggccagttgtgacggttctcaggcttc

SEQ ID NO: 13480 - DNA, 21 bp, Artificial Sequence
  primer
ctgcccattagcatccatttc

SEQ ID NO: 13481 - DNA, 38 bp, Artificial Sequence
  primer
gtaaaacgacggccagttaccactcttcaaggcagcag

SEQ ID NO: 13482 - DNA, 21 bp, Artificial Sequence
  primer
ctcctccatatgtgctctccc

SEQ ID NO: 13483 - DNA, 21 bp, Artificial Sequence
  primer
agtgtcagagctcctcaagcc

SEQ ID NO: 13484 - DNA, 40 bp, Artificial Sequence
  primer
gtaaaacgacggccagtgcaaatttaggaagcaagaaatg

SEQ ID NO: 13485 - DNA, 38 bp, Artificial Sequence
  primer
gtaaaacgacggccagttcattgtcactggtgatgtgc

SEQ ID NO: 13486 - DNA, 38 bp, Artificial Sequence
  primer
gtaaaacgacggccagtacagttgaggtcccatgtttg

SEQ ID NO: 13487 - DNA, 39 bp, Artificial Sequence
  primer
gtaaaacgacggccagtgagtcctcagggatcctgtttc

SEQ ID NO: 13488 - DNA, 21 bp, Artificial Sequence
  primer
cagaagcccaagcattaaacc

SEQ ID NO: 13489 - DNA, 38 bp, Artificial Sequence
  primer
gtaaaacgacggccagtctcagagaaactccgtgtccc

SEQ ID NO: 13490 - DNA, 38 bp, Artificial Sequence
  primer
gtaaaacgacggccagtaaccaggtgggactttccttc

SEQ ID NO: 13491 - DNA, 21 bp, Artificial Sequence
  primer
aaggtctgggctgtcatcttg

SEQ ID NO: 13492 - DNA, 37 bp, Artificial Sequence
  primer
gtaaaacgacggccagttctccttctgcttgacggtg

SEQ ID NO: 13493 - DNA, 21 bp, Artificial Sequence
  primer
gagtgtggttggaggtggttc

SEQ ID NO: 13494 - DNA, 38 bp, Artificial Sequence
  primer
gtaaaacgacggccagtcaggaaataggatgggactgc

SEQ ID NO: 13495 - DNA, 21 bp, Artificial Sequence
  primer
gctaagtcccacccattcaag

SEQ ID NO: 13496 - DNA, 38 bp, Artificial Sequence
  primer
gtaaaacgacggccagttgacaccaccgaagatcagtc

SEQ ID NO: 13497 - DNA, 37 bp, Artificial Sequence
  primer
gtaaaacgacggccagtgtctccaaagcctcttgctg

SEQ ID NO: 13498 - DNA, 21 bp, Artificial Sequence
  primer
ttaccagctgctgctctatgc

SEQ ID NO: 13499 - DNA, 18 bp, Artificial Sequence
  primer
ggattcccaagcctctgc

SEQ ID NO: 13500 - DNA, 38 bp, Artificial Sequence
  primer
gtaaaacgacggccagtcttatttcggttgggatctgc

SEQ ID NO: 13501 - DNA, 21 bp, Artificial Sequence
  primer
aggagaactgaagcaacaggg

SEQ ID NO: 13502 - DNA, 38 bp, Artificial Sequence
  primer
gtaaaacgacggccagtccaagacaagcatggagtgag

SEQ ID NO: 13503 - DNA, 20 bp, Artificial Sequence
  primer
gcccactttagcttcccttg

SEQ ID NO: 13504 - DNA, 21 bp, Artificial Sequence
  primer
gtgtcaacgatcgtcactgtc

SEQ ID NO: 13505 - DNA, 37 bp, Artificial Sequence
  primer
gtaaaacgacggccagtacagaggccagctacccaag

SEQ ID NO: 13506 - DNA, 38 bp, Artificial Sequence
  primer
gtaaaacgacggccagtgtggatcaggagaaaccatgc

SEQ ID NO: 13507 - DNA, 21 bp, Artificial Sequence
  primer
tgttggaagaagacatgcgac

SEQ ID NO: 13508 - DNA, 38 bp, Artificial Sequence
  primer
gtaaaacgacggccagtaagtgagtgtctctttcgggc

SEQ ID NO: 13509 - DNA, 37 bp, Artificial Sequence
  primer
gtaaaacgacggccagtttctccttccacctggcttc

SEQ ID NO: 13510 - DNA, 35 bp, Artificial Sequence
  primer
gtaaaacgacggccagtccaagcctgagcctgagc

SEQ ID NO: 13511 - DNA, 21 bp, Artificial Sequence
  primer
aggcagaagggaggtgaagtc

SEQ ID NO: 13512 - DNA, 37 bp, Artificial Sequence
  primer
gtaaaacgacggccagtggaggtggctatggtaagcc

SEQ ID NO: 13513 - DNA, 22 bp, Artificial Sequence
  primer
tggctggtgtcttaagttctgg

SEQ ID NO: 13514 - DNA, 38 bp, Artificial Sequence
  primer
gtaaaacgacggccagtactgacacaaagctcccttcc

SEQ ID NO: 13515 - DNA, 38 bp, Artificial Sequence
  primer
gtaaaacgacggccagtgggtgttagtgtatgggctgg

SEQ ID NO: 13516 - DNA, 22 bp, Artificial Sequence
  primer
caagccctgtacacaaataccc

SEQ ID NO: 13517 - DNA, 38 bp, Artificial Sequence
  primer
gtaaaacgacggccagtgggtgcagagaagacacacag

SEQ ID NO: 13518 - DNA, 38 bp, Artificial Sequence
  primer
gtaaaacgacggccagttgccctgtttctattggtctg

SEQ ID NO: 13519 - DNA, 21 bp, Artificial Sequence
  primer
tttgacaaccagatccacgag

SEQ ID NO: 13520 - DNA, 38 bp, Artificial Sequence
  primer
gtaaaacgacggccagtttcagctactggcctcacctc

SEQ ID NO: 13521 - DNA, 39 bp, Artificial Sequence
  primer
gtaaaacgacggccagtggtctctgtgagagagtgtggg

SEQ ID NO: 13522 - DNA, 38 bp, Artificial Sequence
  primer
gtaaaacgacggccagtaggaaatgaatgctgactggc

SEQ ID NO: 13523 - DNA, 38 bp, Artificial Sequence
  primer
gtaaaacgacggccagtaacttcaccacggacaacctc

SEQ ID NO: 13524 - DNA, 22 bp, Artificial Sequence
  primer
tgtctttcagggatcactttgc

SEQ ID NO: 13525 - DNA, 20 bp, Artificial Sequence
  primer
gaaggtctggaggcctgaac

SEQ ID NO: 13526 - DNA, 36 bp, Artificial Sequence
  primer
gtaaaacgacggccagtacgttggatgagggcagag

SEQ ID NO: 13527 - DNA, 38 bp, Artificial Sequence
  primer
gtaaaacgacggccagtacaccctgaccagcaatatcc

SEQ ID NO: 13528 - DNA, 22 bp, Artificial Sequence
  primer
tgggaaccaatgtccagataac

SEQ ID NO: 13529 - DNA, 36 bp, Artificial Sequence
  primer
gtaaaacgacggccagtagacacacctgaggccctg

SEQ ID NO: 13530 - DNA, 22 bp, Artificial Sequence
  primer
catcgctctgcctctatctttg

SEQ ID NO: 13531 - DNA, 38 bp, Artificial Sequence
  primer
gtaaaacgacggccagtaccacggattactccgaagac

SEQ ID NO: 13532 - DNA, 21 bp, Artificial Sequence
  primer
tctcacgggtctctgtctgtg

SEQ ID NO: 13533 - DNA, 21 bp, Artificial Sequence
  primer
ttctgctccctcattctctcc

SEQ ID NO: 13534 - DNA, 38 bp, Artificial Sequence
  primer
gtaaaacgacggccagttggagcagtctcagtttggac

SEQ ID NO: 13535 - DNA, 20 bp, Artificial Sequence
  primer
gggctccaaatgtcaggttc

SEQ ID NO: 13536 - DNA, 38 bp, Artificial Sequence
  primer
gtaaaacgacggccagttggtcccacctcagattcttc

SEQ ID NO: 13537 - DNA, 21 bp, Artificial Sequence
  primer
gggagtaaggaggagggagac

SEQ ID NO: 13538 - DNA, 21 bp, Artificial Sequence
  primer
tagacacctgggccgttagag

SEQ ID NO: 13539 - DNA, 39 bp, Artificial Sequence
  primer
gtaaaacgacggccagtaagctctatgtcaggaagtggg

SEQ ID NO: 13540 - DNA, 38 bp, Artificial Sequence
  primer
gtaaaacgacggccagtaccacagccagaaatgaaatg

SEQ ID NO: 13541 - DNA, 38 bp, Artificial Sequence
  primer
gtaaaacgacggccagtagtatctgggtgccaaagagg

SEQ ID NO: 13542 - DNA, 38 bp, Artificial Sequence
  primer
gtaaaacgacggccagtcctggagctcagtaatttccc

SEQ ID NO: 13543 - DNA, 18 bp, Artificial Sequence
  primer
gggcgagatgtgactggg

SEQ ID NO: 13544 - DNA, 21 bp, Artificial Sequence
  primer
tgagaaatcaaggatgttggg

SEQ ID NO: 13545 - DNA, 21 bp, Artificial Sequence
  primer
aagttcttgggaatgagcgac

SEQ ID NO: 13546 - DNA, 38 bp, Artificial Sequence
  primer
gtaaaacgacggccagttagggctagggacaagtgagg

SEQ ID NO: 13547 - DNA, 21 bp, Artificial Sequence
  primer
ggaaacaagggatgcagaaag

SEQ ID NO: 13548 - DNA, 38 bp, Artificial Sequence
  primer
gtaaaacgacggccagtgaccctttcctggactgtgac

SEQ ID NO: 13549 - DNA, 38 bp, Artificial Sequence
  primer
gtaaaacgacggccagttcctaagctccctgctttctg

SEQ ID NO: 13550 - DNA, 38 bp, Artificial Sequence
  primer
gtaaaacgacggccagtctcttcagacacacaccagcc

SEQ ID NO: 13551 - DNA, 21 bp, Artificial Sequence
  primer
aaggtgggagaggaaagaagc

SEQ ID NO: 13552 - DNA, 21 bp, Artificial Sequence
  primer
gcggatctcatcatctccaag

SEQ ID NO: 13553 - DNA, 21 bp, Artificial Sequence
  primer
atgaaacgtgcaattcctgtg

SEQ ID NO: 13554 - DNA, 21 bp, Artificial Sequence
  primer
gacccaccactgactttctcc

SEQ ID NO: 13555 - DNA, 18 bp, Artificial Sequence
  primer
ctgcctgcagagagccag

SEQ ID NO: 13556 - DNA, 38 bp, Artificial Sequence
  primer
gtaaaacgacggccagtaaggaagcttgttcatccgtg

SEQ ID NO: 13557 - DNA, 38 bp, Artificial Sequence
  primer
gtaaaacgacggccagttttaacaagggaggcaagacc

SEQ ID NO: 13558 - DNA, 41 bp, Artificial Sequence
  primer
gtaaaacgacggccagtgatcttgcttaattcagatcatgc

SEQ ID NO: 13559 - DNA, 41 bp, Artificial Sequence
  primer
gtaaaacgacggccagttgaccagtgtgtacttgtttggac

SEQ ID NO: 13560 - DNA, 38 bp, Artificial Sequence
  primer
gtaaaacgacggccagttcaaggctgcaatggaataga

SEQ ID NO: 13561 - DNA, 20 bp, Artificial Sequence
  primer
agcagctgcatatctgaggg

SEQ ID NO: 13562 - DNA, 21 bp, Artificial Sequence
  primer
ctctgtgatcagtcccagtgc

SEQ ID NO: 13563 - DNA, 21 bp, Artificial Sequence
  primer
cactctggtgttccctgtgtc

SEQ ID NO: 13564 - DNA, 21 bp, Artificial Sequence
  primer
gtgtcagttcaagacttcggg

SEQ ID NO: 13565 - DNA, 38 bp, Artificial Sequence
  primer
gtaaaacgacggccagtattaagctatcctcccgcctc

SEQ ID NO: 13566 - DNA, 21 bp, Artificial Sequence
  primer
catctacacacgcacatgcag

SEQ ID NO: 13567 - DNA, 40 bp, Artificial Sequence
  primer
gtaaaacgacggccagtcaacatcgacctcatgtacttcc

SEQ ID NO: 13568 - DNA, 21 bp, Artificial Sequence
  primer
ccgtaacgaggaggtgttctc

SEQ ID NO: 13569 - DNA, 21 bp, Artificial Sequence
  primer
acccttgcaagaacagttggt

SEQ ID NO: 13570 - DNA, 24 bp, Artificial Sequence
  primer
tgggaagttcttgatagtttcagc

SEQ ID NO: 13571 - DNA, 22 bp, Artificial Sequence
  primer
ggcaaacttaacattctttccc

SEQ ID NO: 13572 - DNA, 37 bp, Artificial Sequence
  primer
gtaaaacgacggccagtgttcccagcaacagagggag

SEQ ID NO: 13573 - DNA, 38 bp, Artificial Sequence
  primer
gtaaaacgacggccagtttgcaatcaagatgagcaagc

SEQ ID NO: 13574 - DNA, 21 bp, Artificial Sequence
  primer
tcaatgagccataattgcacc

SEQ ID NO: 13575 - DNA, 37 bp, Artificial Sequence
  primer
gtaaaacgacggccagtgattcagggaaggagccaac

SEQ ID NO: 13576 - DNA, 21 bp, Artificial Sequence
  primer
gggaaagtggaaatttgaagc

SEQ ID NO: 13577 - DNA, 38 bp, Artificial Sequence
  primer
gtaaaacgacggccagtatttcgtggttgggtttgttc

SEQ ID NO: 13578 - DNA, 21 bp, Artificial Sequence
  primer
ggaaatggtttcatgggaatc

SEQ ID NO: 13579 - DNA, 21 bp, Artificial Sequence
  primer
agggaggactactgaacgcac

SEQ ID NO: 13580 - DNA, 21 bp, Artificial Sequence
  primer
gcattgacttgctgacgtttc

SEQ ID NO: 13581 - DNA, 22 bp, Artificial Sequence
  primer
cattctgctttcatggtcttcc

SEQ ID NO: 13582 - DNA, 38 bp, Artificial Sequence
  primer
gtaaaacgacggccagtttggcatcatgggatttactc

SEQ ID NO: 13583 - DNA, 21 bp, Artificial Sequence
  primer
cagacaggcagttggacacac

SEQ ID NO: 13584 - DNA, 38 bp, Artificial Sequence
  primer
gtaaaacgacggccagtaaacagagtcccgagatccag

SEQ ID NO: 13585 - DNA, 38 bp, Artificial Sequence
  primer
gtaaaacgacggccagtgactccaggcgagcttcttag

SEQ ID NO: 13586 - DNA, 38 bp, Artificial Sequence
  primer
gtaaaacgacggccagtactctcctgcacagttctccc

SEQ ID NO: 13587 - DNA, 23 bp, Artificial Sequence
  primer
cacctgtaggtgacagtttcctc

SEQ ID NO: 13588 - DNA, 20 bp, Artificial Sequence
  primer
agcctccctgagacctgaag

SEQ ID NO: 13589 - DNA, 21 bp, Artificial Sequence
  primer
cttcctagctgccttcagtgg

SEQ ID NO: 13590 - DNA, 39 bp, Artificial Sequence
  primer
gtaaaacgacggccagtggattataggtgtgcaccaacg

SEQ ID NO: 13591 - DNA, 21 bp, Artificial Sequence
  primer
atggtgggaaggtaggtgttg

SEQ ID NO: 13592 - DNA, 21 bp, Artificial Sequence
  primer
ctgtccttccttaccctctgc

SEQ ID NO: 13593 - DNA, 38 bp, Artificial Sequence
  primer
gtaaaacgacggccagtgcagtggtttgcttccttctt

SEQ ID NO: 13594 - DNA, 38 bp, Artificial Sequence
  primer
gtaaaacgacggccagttctgctctgacctccagattc

SEQ ID NO: 13595 - DNA, 38 bp, Artificial Sequence
  primer
gtaaaacgacggccagtagaaatcggaatgtgcctcag

SEQ ID NO: 13596 - DNA, 18 bp, Artificial Sequence
  primer
cccaccagcttcctccag

SEQ ID NO: 13597 - DNA, 21 bp, Artificial Sequence
  primer
attgcttgagcccaggagttc

SEQ ID NO: 13598 - DNA, 38 bp, Artificial Sequence
  primer
gtaaaacgacggccagttacctcatttcctccaacgtg

SEQ ID NO: 13599 - DNA, 21 bp, Artificial Sequence
  primer
gtgctgagagggtcttcttcc

SEQ ID NO: 13600 - DNA, 38 bp, Artificial Sequence
  primer
gtaaaacgacggccagttgggcctcatgtcaactacag

SEQ ID NO: 13601 - DNA, 35 bp, Artificial Sequence
  primer
gtaaaacgacggccagtacatcctccactgtgccg

SEQ ID NO: 13602 - DNA, 39 bp, Artificial Sequence
  primer
gtaaaacgacggccagttcctcatcctctatgttgaccc

SEQ ID NO: 13603 - DNA, 38 bp, Artificial Sequence
  primer
gtaaaacgacggccagtgcagggtggtaagcttctgag

SEQ ID NO: 13604 - DNA, 18 bp, Artificial Sequence
  primer
gggagggtgggtcaggag

SEQ ID NO: 13605 - DNA, 22 bp, Artificial Sequence
  primer
aaagagtgcatgcttccttgag

SEQ ID NO: 13606 - DNA, 38 bp, Artificial Sequence
  primer
gtaaaacgacggccagtcagagttaccggctgaagaag

SEQ ID NO: 13607 - DNA, 18 bp, Artificial Sequence
  primer
aggtgatcgcctgccttg

SEQ ID NO: 13608 - DNA, 38 bp, Artificial Sequence
  primer
gtaaaacgacggccagtgttactggtgggcttcctttc

SEQ ID NO: 13609 - DNA, 21 bp, Artificial Sequence
  primer
agcttgaaggcctgtctgaag

SEQ ID NO: 13610 - DNA, 21 bp, Artificial Sequence
  primer
acctcctttgaatgaattggg

SEQ ID NO: 13611 - DNA, 38 bp, Artificial Sequence
  primer
gtaaaacgacggccagtgcactgcttgaagatggtctg

SEQ ID NO: 13612 - DNA, 21 bp, Artificial Sequence
  primer
agctatgggagtggtggtagc

SEQ ID NO: 13613 - DNA, 22 bp, Artificial Sequence
  primer
tgaaagaggttgtttgcctttg

SEQ ID NO: 13614 - DNA, 21 bp, Artificial Sequence
  primer
ctctggcatcaaattgtttgg

SEQ ID NO: 13615 - DNA, 21 bp, Artificial Sequence
  primer
ggtcacctgtttcagaggagg

SEQ ID NO: 13616 - DNA, 23 bp, Artificial Sequence
  primer
aggtgtgcttactgcttgttagg

SEQ ID NO: 13617 - DNA, 38 bp, Artificial Sequence
  primer
gtaaaacgacggccagtttcttgccagggttaagatcc

SEQ ID NO: 13618 - DNA, 39 bp, Artificial Sequence
  primer
gtaaaacgacggccagttgcagaaacctgtctcaatgtt

SEQ ID NO: 13619 - DNA, 38 bp, Artificial Sequence
  primer
gtaaaacgacggccagttctttgccaagagacctacgg

SEQ ID NO: 13620 - DNA, 35 bp, Artificial Sequence
  primer
gtaaaacgacggccagtgagggcgggttgatgatg

SEQ ID NO: 13621 - DNA, 37 bp, Artificial Sequence
  primer
gtaaaacgacggccagtttgatcttcgtccttgtggg

SEQ ID NO: 13622 - DNA, 38 bp, Artificial Sequence
  primer
gtaaaacgacggccagttctgtgctaggcttggtatgg

SEQ ID NO: 13623 - DNA, 38 bp, Artificial Sequence
  primer
gtaaaacgacggccagtgtccaacagggtcttactgcc

SEQ ID NO: 13624 - DNA, 38 bp, Artificial Sequence
  primer
gtaaaacgacggccagttcctctatgtcgaacccttgc

SEQ ID NO: 13625 - DNA, 21 bp, Artificial Sequence
  primer
tctgtagccagacgacacgag

SEQ ID NO: 13626 - DNA, 37 bp, Artificial Sequence
  primer
gtaaaacgacggccagtcttgccagtaagtggttggg

SEQ ID NO: 13627 - DNA, 21 bp, Artificial Sequence
  primer
ccacactgcctcactgtcttc

SEQ ID NO: 13628 - DNA, 21 bp, Artificial Sequence
  primer
cagctctgggtctgccttaac

SEQ ID NO: 13629 - DNA, 37 bp, Artificial Sequence
  primer
gtaaaacgacggccagtagaagtggaggatggaaggg

SEQ ID NO: 13630 - DNA, 35 bp, Artificial Sequence
  primer
gtaaaacgacggccagtggtaaggtcccagcacgg

SEQ ID NO: 13631 - DNA, 20 bp, Artificial Sequence
  primer
atacatccagtccgtggtgg

SEQ ID NO: 13632 - DNA, 21 bp, Artificial Sequence
  primer
ctgggttctccctcttctgag

SEQ ID NO: 13633 - DNA, 36 bp, Artificial Sequence
  primer
gtaaaacgacggccagtgaagcaagcaggagatccg

SEQ ID NO: 13634 - DNA, 38 bp, Artificial Sequence
  primer
gtaaaacgacggccagtactaggagtgccctccacctg

SEQ ID NO: 13635 - DNA, 37 bp, Artificial Sequence
  primer
gtaaaacgacggccagtggtcaccagagcgatcacag

SEQ ID NO: 13636 - DNA, 21 bp, Artificial Sequence
  primer
agtggaccagtccatcctgac

SEQ ID NO: 13637 - DNA, 21 bp, Artificial Sequence
  primer
ctggaagcactagcaacatgg

SEQ ID NO: 13638 - DNA, 38 bp, Artificial Sequence
  primer
gtaaaacgacggccagtccaatatcacatcgggcaaag

SEQ ID NO: 13639 - DNA, 38 bp, Artificial Sequence
  primer
gtaaaacgacggccagtctggaccctgcgttctatttc

SEQ ID NO: 13640 - DNA, 35 bp, Artificial Sequence
  primer
gtaaaacgacggccagtagggcgaagtgtgagtgc

SEQ ID NO: 13641 - DNA, 21 bp, Artificial Sequence
  primer
ggaggttacacggaactccag

SEQ ID NO: 13642 - DNA, 38 bp, Artificial Sequence
  primer
gtaaaacgacggccagttcatcccacacagagcaagag

SEQ ID NO: 13643 - DNA, 38 bp, Artificial Sequence
  primer
gtaaaacgacggccagtgcctttgcccgtatcttagtc

SEQ ID NO: 13644 - DNA, 36 bp, Artificial Sequence
  primer
gtaaaacgacggccagtaggagccaagtctccctgc

SEQ ID NO: 13645 - DNA, 37 bp, Artificial Sequence
  primer
gtaaaacgacggccagtgggtgggctgagttgagaag

SEQ ID NO: 13646 - DNA, 36 bp, Artificial Sequence
  primer
gtaaaacgacggccagtccttgggtctgagcaggag

SEQ ID NO: 13647 - DNA, 20 bp, Artificial Sequence
  primer
tcacctgctcatctccaagc

SEQ ID NO: 13648 - DNA, 38 bp, Artificial Sequence
  primer
gtaaaacgacggccagtaccgctagagaagtggtgagg

SEQ ID NO: 13649 - DNA, 38 bp, Artificial Sequence
  primer
gtaaaacgacggccagtatcagagcccaggtggataag

SEQ ID NO: 13650 - DNA, 21 bp, Artificial Sequence
  primer
ccacactgcctcactgtcttc

SEQ ID NO: 13651 - DNA, 37 bp, Artificial Sequence; identical to SEQ ID NO: 13629
  primer

SEQ ID NO: 13652 - DNA, 38 bp, Artificial Sequence
  primer
gtaaaacgacggccagtttgctgctgatgctgctttac

SEQ ID NO: 13653 - DNA, 43 bp, Artificial Sequence
  primer
gtaaaacgacggccagttttggtagggtctagagtgatgagtt

SEQ ID NO: 13654 - DNA, 21 bp, Artificial Sequence
  primer
gcagggaacttgaaagtgaca

SEQ ID NO: 13655 - DNA, 42 bp, Artificial Sequence
  primer
gtaaaacgacggccagtcctgtagctgacattactgttggag

SEQ ID NO: 13656 - DNA, 21 bp, Artificial Sequence
  primer
gtgacagaccaagaccctgac

SEQ ID NO: 13657 - DNA, 21 bp, Artificial Sequence
  primer
ttagggagtgattgacccagc

SEQ ID NO: 13658 - DNA, 21 bp, Artificial Sequence
  primer
gaccctgtatgcctcatcctc

SEQ ID NO: 13659 - DNA, 42 bp, Artificial Sequence
  primer
gtaaaacgacggccagtgtgtttaatttatatctggcaaggg

SEQ ID NO: 13660 - DNA, 27 bp, Artificial Sequence
  primer
cattgtatttatagaaagctgggagtt

SEQ ID NO: 13661 - DNA, 38 bp, Artificial Sequence
  primer
gtaaaacgacggccagtcccaggctcctttctacctta

SEQ ID NO: 13662 - DNA, 38 bp, Artificial Sequence
  primer
gtaaaacgacggccagttgatttctaggcctgccagtt

SEQ ID NO: 13663 - DNA, 20 bp, Artificial Sequence
  primer
ctggcagtggaattggaaag

SEQ ID NO: 13664 - DNA, 21 bp, Artificial Sequence
  primer
atgcccaagaattcacgtttc

SEQ ID NO: 13665 - DNA, 40 bp, Artificial Sequence
  primer
gtaaaacgacggccagtaaaccgacgtcaggatattcttc

SEQ ID NO: 13666 - DNA, 22 bp, Artificial Sequence
  primer
tgctaaaccagaatgtctttcc

SEQ ID NO: 13667 - DNA, 40 bp, Artificial Sequence
  primer
gtaaaacgacggccagtcctaaaggtttcctgagaattgc

SEQ ID NO: 13668 - DNA, 20 bp, Artificial Sequence
  primer
ctagctccttccatgctgcc

SEQ ID NO: 13669 - DNA, 41 bp, Artificial Sequence
  primer
gtaaaacgacggccagttcagaatagtggttgttcaccttg

SEQ ID NO: 13670 - DNA, 40 bp, Artificial Sequence
  primer
gtaaaacgacggccagtaacaggatcccattacttcattg

SEQ ID NO: 13671 - DNA, 40 bp, Artificial Sequence
  primer
gtaaaacgacggccagtgctgtttgtggattcaaactcat

SEQ ID NO: 13672 - DNA, 37 bp, Artificial Sequence
  primer
gtaaaacgacggccagtagctgaccagtgagggtgtg

SEQ ID NO: 13673 - DNA, 21 bp, Artificial Sequence
  primer
gcatgaagagatgttgggctc

SEQ ID NO: 13674 - DNA, 21 bp, Artificial Sequence
  primer
agctgagctgtaaatccaggc

SEQ ID NO: 13675 - DNA, 38 bp, Artificial Sequence
  primer
gtaaaacgacggccagtattctgtccctgatggcaaac

SEQ ID NO: 13676 - DNA, 38 bp, Artificial Sequence
  primer
gtaaaacgacggccagtccaggagctgactgagaccac

SEQ ID NO: 13677 - DNA, 20 bp, Artificial Sequence
  primer
tccaggcagtcagcacctac

SEQ ID NO: 13678 - DNA, 21 bp, Artificial Sequence
  primer
agccaaagatttggtccacac

SEQ ID NO: 13679 - DNA, 38 bp, Artificial Sequence
  primer
gtaaaacgacggccagtatgtttacccagtgcctccag

SEQ ID NO: 13680 - DNA, 18 bp, Artificial Sequence
  primer
cagagcctcagtggcagc

SEQ ID NO: 13681 - DNA, 38 bp, Artificial Sequence
  primer
gtaaaacgacggccagtctagatgggcactggatgacc

SEQ ID NO: 13682 - DNA, 37 bp, Artificial Sequence
  primer
gtaaaacgacggccagttctggaatccatgaaggcag

SEQ ID NO: 13683 - DNA, 38 bp, Artificial Sequence
  primer
gtaaaacgacggccagtaggtagggtgctgcatgattg

SEQ ID NO: 13684 - DNA, 20 bp, Artificial Sequence
  primer
ctggacagggaccagagagg

SEQ ID NO: 13685 - DNA, 38 bp, Artificial Sequence
  primer
gtaaaacgacggccagtgaagtggagggagtgaggatg

SEQ ID NO: 13686 - DNA, 38 bp, Artificial Sequence
  primer
gtaaaacgacggccagtctgcggacactacaccatgag

SEQ ID NO: 13687 - DNA, 38 bp, Artificial Sequence
  primer
gtaaaacgacggccagtgtccaagcatgccttgatgtc

SEQ ID NO: 13688 - DNA, 20 bp, Artificial Sequence
  primer
ttgccatccaggtagtgagg

SEQ ID NO: 13689 - DNA, 20 bp, Artificial Sequence
  primer
attgatcacatgcctgggtg

SEQ ID NO: 13690 - DNA, 20 bp, Artificial Sequence
  primer
ctgctttgccctaacccttc

SEQ ID NO: 13691 - DNA, 37 bp, Artificial Sequence
  primer
gtaaaacgacggccagtcaggtgtccacgcttagcag

SEQ ID NO: 13692 - DNA, 37 bp, Artificial Sequence
  primer
gtaaaacgacggccagtataggaggcctgggacacac

SEQ ID NO: 13693 - DNA, 21 bp, Artificial Sequence
  primer
aggagagtgaaggtaaggccc

SEQ ID NO: 13694 - DNA, 38 bp, Artificial Sequence
  primer
gtaaaacgacggccagtaggatgcaaatgtcctcgttc

SEQ ID NO: 13695 - DNA, 37 bp, Artificial Sequence
  primer
gtaaaacgacggccagtagaccctgggagacaggttg

SEQ ID NO: 13696 - DNA, 37 bp, Artificial Sequence
  primer
gtaaaacgacggccagtgctcaggaatgccagtgttc

SEQ ID NO: 13697 - DNA, 21 bp, Artificial Sequence
  primer
cactgaatcccgtctcctctc

SEQ ID NO: 13698 - DNA, 37 bp, Artificial Sequence
  primer
gtaaaacgacggccagtttcttccctcttcctgtccc

SEQ ID NO: 13699 - DNA, 21 bp, Artificial Sequence
  primer
aacagagtcacgcgatgtttg

SEQ ID NO: 13700 - DNA, 37 bp, Artificial Sequence
  primer
gtaaaacgacggccagtgcccacaccctaacaatgtg

SEQ ID NO: 13701 - DNA, 18 bp, Artificial Sequence
  primer
tgtcacacgcccttctcc

SEQ ID NO: 13702 - DNA, 38 bp, Artificial Sequence
  primer
gtaaaacgacggccagtacgtgaatcggatggctttac

SEQ ID NO: 13703 - DNA, 21 bp, Artificial Sequence
  primer
ctgtgcctagaagggaaggag

SEQ ID NO: 13704 - DNA, 38 bp, Artificial Sequence
  primer
gtaaaacgacggccagtgggagcacagataattgggac

SEQ ID NO: 13705 - DNA, 22 bp, Artificial Sequence
  primer
gggtgggatgttattcagaagg

SEQ ID NO: 13706 - DNA, 21 bp, Artificial Sequence
  primer
aggagctactgggtttccacc

SEQ ID NO: 13707 - DNA, 38 bp, Artificial Sequence
  primer
gtaaaacgacggccagtctacacaccgaagtctcgctc

SEQ ID NO: 13708 - DNA, 20 bp, Artificial Sequence
  primer
tggagtcagtaggtgcctgg

SEQ ID NO: 13709 - DNA, 38 bp, Artificial Sequence
  primer
gtaaaacgacggccagtcatcctttggaagaaggaggc

SEQ ID NO: 13710 - DNA, 38 bp, Artificial Sequence
  primer
gtaaaacgacggccagtgctttgctgtcaccctatgtg

SEQ ID NO: 13711 - DNA, 38 bp, Artificial Sequence
  primer
gtaaaacgacggccagtcttccttccacgtttcctttc

SEQ ID NO: 13712 - DNA, 37 bp, Artificial Sequence
  primer
gtaaaacgacggccagtgagacagggaggcaggagac

SEQ ID NO: 13713 - DNA, 21 bp, Artificial Sequence
  primer
acagacgtgagataccatgcc

SEQ ID NO: 13714 - DNA, 21 bp, Artificial Sequence
  primer
gggtgattgtggaagcactac

SEQ ID NO: 13715 - DNA, 38 bp, Artificial Sequence
  primer
gtaaaacgacggccagttagggttgaaggagttggagg

SEQ ID NO: 13716 - DNA, 22 bp, Artificial Sequence
  primer
tccttactcccaatttgtctgg

SEQ ID NO: 13717 - DNA, 21 bp, Artificial Sequence
  primer
ccaaacactttgctgttgtcc

SEQ ID NO: 13718 - DNA, 21 bp, Artificial Sequence
  primer
ccaaggtatattccgggaaag

SEQ ID NO: 13719 - DNA, 39 bp, Artificial Sequence
  primer
gtaaaacgacggccagttgccaatctatctctggctagg

SEQ ID NO: 13720 - DNA, 21 bp, Artificial Sequence
  primer
tttgtgtgggactggaagatg

SEQ ID NO: 13721 - DNA, 44 bp, Artificial Sequence
  primer
gtaaaacgacggccagttttgtaaatgagttctttctccctaag

SEQ ID NO: 13722 - DNA, 37 bp, Artificial Sequence
  primer
gtaaaacgacggccagtatgtttggccacacttggag

SEQ ID NO: 13723 - DNA, 38 bp, Artificial Sequence
  primer
gtaaaacgacggccagtaagggacagacaaacagggac

SEQ ID NO: 13724 - DNA, 38 bp, Artificial Sequence
  primer
gtaaaacgacggccagtctacccttggagactggttgg

SEQ ID NO: 13725 - DNA, 38 bp, Artificial Sequence
  primer
gtaaaacgacggccagtttactgcccttaggtggttcc

SEQ ID NO: 13726 - DNA, 37 bp, Artificial Sequence
  primer
gtaaaacgacggccagtttcctggaggtcaggaaatg

SEQ ID NO: 13727 - DNA, 38 bp, Artificial Sequence
  primer
gtaaaacgacggccagtattccaagtctaggtgggtcg

SEQ ID NO: 13728 - DNA, 38 bp, Artificial Sequence
  primer
gtaaaacgacggccagtgaatggacaccagccataagc

SEQ ID NO: 13729 - DNA, 37 bp, Artificial Sequence
  primer
gtaaaacgacggccagtagtgggatgatgtggctttg

SEQ ID NO: 13730 - DNA, 38 bp, Artificial Sequence
  primer
gtaaaacgacggccagttagggcaaagagtaacctgcc

SEQ ID NO: 13731 - DNA, 20 bp, Artificial Sequence
  primer
ccaccatctccttgttctgc

SEQ ID NO: 13732 - DNA, 19 bp, Artificial Sequence
  primer
ccgtttccagctcttcagc

SEQ ID NO: 13733 - DNA, 22 bp, Artificial Sequence
  primer
cattagccaggtatgatggcac

SEQ ID NO: 13734 - DNA, 19 bp, Artificial Sequence
  primer
cccgtttccagctcttcag

SEQ ID NO: 13735 - DNA, 22 bp, Artificial Sequence
  primer
cattagccaggtatgatggcac

SEQ ID NO: 13736 - DNA, 38 bp, Artificial Sequence
  primer
gtaaaacgacggccagtcctctctattcccagtgtggc

SEQ ID NO: 13737 - DNA, 26 bp, Artificial Sequence
  primer
tttcttgagaagtagcatgtggttag

SEQ ID NO: 13738 - DNA, 37 bp, Artificial Sequence
  primer
gtaaaacgacggccagtgtcccaggcaaccactgata

SEQ ID NO: 13739 - DNA, 23 bp, Artificial Sequence
  primer
tttccagtcatgctcttatggtt

SEQ ID NO: 13740 - DNA, 38 bp, Artificial Sequence
  primer
gtaaaacgacggccagtagagaagctgccctggtaatg

SEQ ID NO: 13741 - DNA, 26 bp, Artificial Sequence
  primer
tttctgggtaagaatataagcacaag

SEQ ID NO: 13742 - DNA, 23 bp, Artificial Sequence
  primer
cctcagacaagcctactggaaat

SEQ ID NO: 13743 - DNA, 40 bp, Artificial Sequence
  primer
gtaaaacgacggccagtaagggatgtttgaggaagaagtg

SEQ ID NO: 13744 - DNA, 40 bp, Artificial Sequence
  primer
gtaaaacgacggccagtttgaaagttgttggatgtgtgtg

SEQ ID NO: 13745 - DNA, 38 bp, Artificial Sequence
  primer
gtaaaacgacggccagtttgtcaagcacttagcaagcc

SEQ ID NO: 13746 - DNA, 22 bp, Artificial Sequence
  primer
gatggtaggagcagtgtcaacc

SEQ ID NO: 13747 - DNA, 21 bp, Artificial Sequence
  primer
ctgtgcttaacctggcagcta

SEQ ID NO: 13748 - DNA, 23 bp, Artificial Sequence
  primer
tgctgaaacaagcataatgagag

SEQ ID NO: 13749 - DNA, 21 bp, Artificial Sequence
  primer
gggaagtgattgttgatggtg

SEQ ID NO: 13750 - DNA, 39 bp, Artificial Sequence
  primer
gtaaaacgacggccagtaagtggtgacccttgttctttg

SEQ ID NO: 13751 - DNA, 38 bp, Artificial Sequence
  primer
gtaaaacgacggccagttcttcagagttcaggtggcag

SEQ ID NO: 13752 - DNA, 28 bp, Artificial Sequence
  primer
tctccaatttctatcaactaaattctga

SEQ ID NO: 13753 - DNA, 23 bp, Artificial Sequence
  primer
tgagcattacgttgactagcctg

SEQ ID NO: 13754 - DNA, 41 bp, Artificial Sequence
  primer
gtaaaacgacggccagtcatcattagttatgaatgcatggg

SEQ ID NO: 13755 - DNA, 39 bp, Artificial Sequence
  primer
gtaaaacgacggccagtggaggatttgtttatcgctttg

SEQ ID NO: 13756 - DNA, 18 bp, Artificial Sequence
  primer
agtttcggcctcccagtg

SEQ ID NO: 13757 - DNA, 42 bp, Artificial Sequence
  primer
gtaaaacgacggccagtaaatgtccacgtgactgaagaatag

SEQ ID NO: 13758 - DNA, 40 bp, Artificial Sequence
  primer
gtaaaacgacggccagtttgccgaataattgaggttagtg

SEQ ID NO: 13759 - DNA, 27 bp, Artificial Sequence
  primer
aggctaaagttatttcttcctaatgga

SEQ ID NO: 13760 - DNA, 42 bp, Artificial Sequence
  primer
gtaaaacgacggccagtttcagtgataaagtgacactgcttg

SEQ ID NO: 13761 - DNA, 22 bp, Artificial Sequence
  primer
cattagccaggtatgatggcac

SEQ ID NO: 13762 - DNA, 39 bp, Artificial Sequence
  primer
gtaaaacgacggccagtgagcctgtaatcagctgtggtc

SEQ ID NO: 13763 - DNA, 39 bp, Artificial Sequence; identical to SEQ ID NO: 13762
  primer

SEQ ID NO: 13764 - DNA, 36 bp, Artificial Sequence
  primer
gtaaaacgacggccagttactcggtggagctgggtc

SEQ ID NO: 13765 - DNA, 21 bp, Artificial Sequence
  primer
caagctggagaagggaaactg

SEQ ID NO: 13766 - DNA, 38 bp, Artificial Sequence
  primer
gtaaaacgacggccagtgctaaaggctacagggaatgg

SEQ ID NO: 13767 - DNA, 21 bp, Artificial Sequence
  primer
atcccagagactccaaactgc

SEQ ID NO: 13768 - DNA, 21 bp, Artificial Sequence
  primer
cagtgactggctgtccttcag

SEQ ID NO: 13769 - DNA, 37 bp, Artificial Sequence
  primer
gtaaaacgacggccagtgtgtttgcagaagcacgttg

SEQ ID NO: 13770 - DNA, 37 bp, Artificial Sequence
  primer
gtaaaacgacggccagtccgcgatatgagcctaggag

SEQ ID NO: 13771 - DNA, 35 bp, Artificial Sequence
  primer
gtaaaacgacggccagtaggatgcagtgcctgtgc

SEQ ID NO: 13772 - DNA, 21 bp, Artificial Sequence
  primer
catcttccaccttcacccttc

SEQ ID NO: 13773 - DNA, 38 bp, Artificial Sequence
  primer
gtaaaacgacggccagttccataggtgtttggtgcaag

SEQ ID NO: 13774 - DNA, 38 bp, Artificial Sequence
  primer
gtaaaacgacggccagttatcagcagatgtctcccagg

SEQ ID NO: 13775 - DNA, 21 bp, Artificial Sequence
  primer
cccgtagaccaggttaatcgc

SEQ ID NO: 13776 - DNA, 37 bp, Artificial Sequence
  primer
gtaaaacgacggccagtagcagaagctggtgatcgtg

SEQ ID NO: 13777 - DNA, 38 bp, Artificial Sequence
  primer
gtaaaacgacggccagtgacaactttgcctccattgtg

SEQ ID NO: 13778 - DNA, 38 bp, Artificial Sequence
  primer
gtaaaacgacggccagtacctcagtcctgttcctgctc

SEQ ID NO: 13779 - DNA, 38 bp, Artificial Sequence
  primer
gtaaaacgacggccagtctccatgtccctctcttcctg

SEQ ID NO: 13780 - DNA, 39 bp, Artificial Sequence
  primer
gtaaaacgacggccagtcaaggcagagagagcatttagg

SEQ ID NO: 13781 - DNA, 38 bp, Artificial Sequence
  primer
gtaaaacgacggccagtgtgtagaacacctccctgctg

SEQ ID NO: 13782 - DNA, 21 bp, Artificial Sequence
  primer
tcttcaacttcatgcccattc

SEQ ID NO: 13783 - DNA, 21 bp, Artificial Sequence
  primer
ggagtgagtgtggagactggg

SEQ ID NO: 13784 - DNA, 39 bp, Artificial Sequence
  primer
gtaaaacgacggccagtggcagaggaaactataaagccc

SEQ ID NO: 13785 - DNA, 36 bp, Artificial Sequence
  primer
gtaaaacgacggccagtgatggtcacgccacatcac

SEQ ID NO: 13786 - DNA, 38 bp, Artificial Sequence
  primer
gtaaaacgacggccagttgctgcagacagtttactccg

SEQ ID NO: 13787 - DNA, 20 bp, Artificial Sequence
  primer
tgagaaactcgcactcaggg

SEQ ID NO: 13788 - DNA, 37 bp, Artificial Sequence
  primer
gtaaaacgacggccagtgttcgagggctaagaccacc

SEQ ID NO: 13789 - DNA, 21 bp, Artificial Sequence
  primer
tatgcaagcacctacacagcg

SEQ ID NO: 13790 - DNA, 21 bp, Artificial Sequence
  primer
tgcaccaacctgactgttgac

SEQ ID NO: 13791 - DNA, 38 bp, Artificial Sequence
  primer
gtaaaacgacggccagtggctgtcttgaccttctttgc

SEQ ID NO: 13792 - DNA, 39 bp, Artificial Sequence
  primer
gtaaaacgacggccagtgatcacactaagctggcatttg

SEQ ID NO: 13793 - DNA, 20 bp, Artificial Sequence
  primer
gcccttaggtgatctgcctg

SEQ ID NO: 13794 - DNA, 24 bp, Artificial Sequence
  primer
cagagagggttgtttgttagttgg

SEQ ID NO: 13795 - DNA, 21 bp, Artificial Sequence
  primer
agttgatgcccttggtaatgc

SEQ ID NO: 13796 - DNA, 24 bp, Artificial Sequence
  primer
tccgttaaaccttaagtcaacaca

SEQ ID NO: 13797 - DNA, 18 bp, Artificial Sequence
  primer
gcgcctggcctgattaac

SEQ ID NO: 13798 - DNA, 39 bp, Artificial Sequence
  primer
gtaaaacgacggccagtggcaaacatgctttgatcatct

SEQ ID NO: 13799 - DNA, 38 bp, Artificial Sequence
  primer
gtaaaacgacggccagtgggtactgatgctttgcattg

SEQ ID NO: 13800 - DNA, 21 bp, Artificial Sequence
  primer
tgcatcactttggcagtaagg

SEQ ID NO: 13801 - DNA, 38 bp, Artificial Sequence
  primer
gtaaaacgacggccagtcagggacatgttaggaattgg

SEQ ID NO: 13802 - DNA, 21 bp, Artificial Sequence
  primer
atgaatgcaattgttggcatc

SEQ ID NO: 13803 - DNA, 38 bp, Artificial Sequence
  primer
gtaaaacgacggccagtcacagagaatgatgagcagcc

SEQ ID NO: 13804 - DNA, 38 bp, Artificial Sequence
  primer
gtaaaacgacggccagtgttaagtcctggcttccgatg

SEQ ID NO: 13805 - DNA, 38 bp, Artificial Sequence
  primer
gtaaaacgacggccagttttgctgaagccacatttagg

SEQ ID NO: 13806 - DNA, 21 bp, Artificial Sequence
  primer
ggttcctcaggtaaagggatg

SEQ ID NO: 13807 - DNA, 22 bp, Artificial Sequence
  primer
aaggaataggatggaaggaagc

SEQ ID NO: 13808 - DNA, 38 bp, Artificial Sequence
  primer
gtaaaacgacggccagtaggatctgtggtcgtttctcc

SEQ ID NO: 13809 - DNA, 21 bp, Artificial Sequence
  primer
gagaggacctggttcatctgg

SEQ ID NO: 13810 - DNA, 21 bp, Artificial Sequence
  primer
ggcacctgtagtcctagccac

SEQ ID NO: 13811 - DNA, 21 bp, Artificial Sequence
  primer
taacaccaccaccttctctgc

SEQ ID NO: 13812 - DNA, 21 bp, Artificial Sequence
  primer
tggcccatgtgttcttaattc

SEQ ID NO: 13813 - DNA, 21 bp, Artificial Sequence
  primer
tgaagaagagagcaaggtggg

SEQ ID NO: 13814 - DNA, 21 bp, Artificial Sequence
  primer
ggatttgcgccactactaagg

SEQ ID NO: 13815 - DNA, 42 bp, Artificial Sequence
  primer
gtaaaacgacggccagttttatctaagcgctcattattctgc

SEQ ID NO: 13816 - DNA, 38 bp, Artificial Sequence
  primer
gtaaaacgacggccagtcactaggcagttgccagctaa

SEQ ID NO: 13817 - DNA, 38 bp, Artificial Sequence
  primer
gtaaaacgacggccagtggaaatcaccaccacccatac

SEQ ID NO: 13818 - DNA, 37 bp, Artificial Sequence
  primer
gtaaaacgacggccagttggagatgcgtcagtcattg

SEQ ID NO: 13819 - DNA, 44 bp, Artificial Sequence
  primer
gtaaaacgacggccagtatgctatcatctgtagtgtggaaatag

SEQ ID NO: 13820 - DNA, 38 bp, Artificial Sequence
  primer
gtaaaacgacggccagtgccgagagtagcatcaacaac

SEQ ID NO: 13821 - DNA, 18 bp, Artificial Sequence
  primer
ggatcatgtggcctctgg

SEQ ID NO: 13822 - DNA, 36 bp, Artificial Sequence
  primer
gtaaaacgacggccagtctgccgggagtcgtagttc

SEQ ID NO: 13823 - DNA, 38 bp, Artificial Sequence
  primer
gtaaaacgacggccagttacttagcaggacaggccgag

SEQ ID NO: 13824 - DNA, 20 bp, Artificial Sequence
  primer
gtggagctcctggttcacag

SEQ ID NO: 13825 - DNA, 37 bp, Artificial Sequence
  primer
gtaaaacgacggccagtctcagcaggttggagctgtc

SEQ ID NO: 13826 - DNA, 38 bp, Artificial Sequence
  primer
gtaaaacgacggccagttctgtggtctgatcttcctgc

SEQ ID NO: 13827 - DNA, 27 bp, Artificial Sequence
  primer
aatccaattctacaataaggtacaacc

SEQ ID NO: 13828 - DNA, 38 bp, Artificial Sequence
  primer
gtaaaacgacggccagtgtcctgccctgacagattctc

SEQ ID NO: 13829 - DNA, 21 bp, Artificial Sequence
  primer
cttagtgatagagcctggcgg

SEQ ID NO: 13830 - DNA, 38 bp, Artificial Sequence
  primer
gtaaaacgacggccagtttcccagtccattctctttcc

SEQ ID NO: 13831 - DNA, 37 bp, Artificial Sequence
  primer
gtaaaacgacggccagttgcttcccaatccagtgttt

SEQ ID NO: 13832 - DNA, 40 bp, Artificial Sequence
  primer
gtaaaacgacggccagtcaactttgaagaagcatgaaatg

SEQ ID NO: 13833 - DNA, 40 bp, Artificial Sequence
  primer
gtaaaacgacggccagtggaggctgaaggagacttatttc

SEQ ID NO: 13834 - DNA, 38 bp, Artificial Sequence
  primer
gtaaaacgacggccagtcatcttgaggttctggtctgg

SEQ ID NO: 13835 - DNA, 21 bp, Artificial Sequence
  primer
caaggaagagcgtggtctagg

SEQ ID NO: 13836 - DNA, 20 bp, Artificial Sequence
  primer
aatggtgaaggttgccactg

SEQ ID NO: 13837 - DNA, 21 bp, Artificial Sequence
  primer
ggtagagtcagccacctgtcc

SEQ ID NO: 13838 - DNA, 38 bp, Artificial Sequence
  primer
gtaaaacgacggccagttctcccaggagtaacagtccc

SEQ ID NO: 13839 - DNA, 38 bp, Artificial Sequence
  primer
gtaaaacgacggccagtaaggaaatcttgggagctgtg

SEQ ID NO: 13840 - DNA, 39 bp, Artificial Sequence
  primer
gtaaaacgacggccagtcaacgtggcatagttctgaaac

SEQ ID NO: 13841 - DNA, 20 bp, Artificial Sequence
  primer
ggatttggcagcttaaaggg

SEQ ID NO: 13842 - DNA, 38 bp, Artificial Sequence
  primer
gtaaaacgacggccagtttctccctgagcccatcttag

SEQ ID NO: 13843 - DNA, 38 bp, Artificial Sequence
  primer
gtaaaacgacggccagtccagtagggacccattcattg

SEQ ID NO: 13844 - DNA, 23 bp, Artificial Sequence
  primer
accaaacagcaaagagtcaattc

SEQ ID NO: 13845 - DNA, 26 bp, Artificial Sequence
  primer
tcttgatttgtctctttacactcagc

SEQ ID NO: 13846 - DNA, 41 bp, Artificial Sequence
  primer
gtaaaacgacggccagttctaggcaaatactcttccagcag

SEQ ID NO: 13847 - DNA, 23 bp, Artificial Sequence
  primer
gggttcaagtgattcttgtgaag

SEQ ID NO: 13848 - DNA, 38 bp, Artificial Sequence
  primer
gtaaaacgacggccagtgagaggaaagtgtggtgaccc

SEQ ID NO: 13849 - DNA, 38 bp, Artificial Sequence
  primer
gtaaaacgacggccagttttgagctcctgggtgtattg

SEQ ID NO: 13850 - DNA, 38 bp, Artificial Sequence
  primer
gtaaaacgacggccagtttccatatgggcttctctgtg

SEQ ID NO: 13851 - DNA, 38 bp, Artificial Sequence
  primer
gtaaaacgacggccagtgaccacacatctttcacctgg

SEQ ID NO: 13852 - DNA, 36 bp, Artificial Sequence
  primer
gtaaaacgacggccagtaaggctttgctggcttgtg

SEQ ID NO: 13853 - DNA, 21 bp, Artificial Sequence
  primer
gtctctccgctcatcaaggtg

SEQ ID NO: 13854 - DNA, 38 bp, Artificial Sequence
  primer
gtaaaacgacggccagttcgcattaacataaagagcgg

SEQ ID NO: 13855 - DNA, 38 bp, Artificial Sequence
  primer
gtaaaacgacggccagtaactgggaagctgaagtggtc

SEQ ID NO: 13856 - DNA, 39 bp, Artificial Sequence
  primer
gtaaaacgacggccagtggcctgagtttctaactgttcc

SEQ ID NO: 13857 - DNA, 21 bp, Artificial Sequence
  primer
atctgttggaatgtggtggtg

SEQ ID NO: 13858 - DNA, 39 bp, Artificial Sequence
  primer
gtaaaacgacggccagtggaatgcatggctcatagaaag

SEQ ID NO: 13859 - DNA, 22 bp, Artificial Sequence
  primer
cctctctctaactgcaggaccc

SEQ ID NO: 13860 - DNA, 38 bp, Artificial Sequence
  primer
gtaaaacgacggccagtttgcatagttgaagcagtggc

SEQ ID NO: 13861 - DNA, 21 bp, Artificial Sequence
  primer
gcaggactaggtccctgaatg

SEQ ID NO: 13862 - DNA, 38 bp, Artificial Sequence
  primer
gtaaaacgacggccagtgaagggaattctcaggaaggc

SEQ ID NO: 13863 - DNA, 37 bp, Artificial Sequence
  primer
gtaaaacgacggccagtcctgaccttggaagtgggac

SEQ ID NO: 13864 - DNA, 38 bp, Artificial Sequence
  primer
gtaaaacgacggccagtgcccacacatctgcttctttc

SEQ ID NO: 13865 - DNA, 22 bp, Artificial Sequence
  primer
caagggttctcagcagttgaag

SEQ ID NO: 13866 - DNA, 21 bp, Artificial Sequence
  primer
ccagagaacctagcggttacg

SEQ ID NO: 13867 - DNA, 21 bp, Artificial Sequence
  primer
ctcggtccattcctagcaaac

SEQ ID NO: 13868 - DNA, 21 bp, Artificial Sequence
  primer
gcaaattgccatttaggacag

SEQ ID NO: 13869 - DNA, 21 bp, Artificial Sequence
  primer
gaaagaaagtgtgtgcatggc

SEQ ID NO: 13870 - DNA, 20 bp, Artificial Sequence
  primer
tgcacctcagcctccagtag

SEQ ID NO: 13871 - DNA, 20 bp, Artificial Sequence
  primer
ccaggtagcaaagggaggag

SEQ ID NO: 13872 - DNA, 22 bp, Artificial Sequence
  primer
tgtgcaacacatttagcctttc

SEQ ID NO: 13873 - DNA, 37 bp, Artificial Sequence
  primer
gtaaaacgacggccagtcaagtcagtcgtgggcaaac

SEQ ID NO: 13874 - DNA, 40 bp, Artificial Sequence
  primer
gtaaaacgacggccagtcaaagtctgtgttacttcctggc

SEQ ID NO: 13875 - DNA, 38 bp, Artificial Sequence
  primer
gtaaaacgacggccagtgtaccggaagaaccagacagc

SEQ ID NO: 13876 - DNA, 21 bp, Artificial Sequence
  primer
agtggcaagtgagtcatcagc

SEQ ID NO: 13877 - DNA, 26 bp, Artificial Sequence
  primer
tctcactaatttatcttcctcgtcag

SEQ ID NO: 13878 - DNA, 25 bp, Artificial Sequence
  primer
tgaatttcatctctaaggctactgc

SEQ ID NO: 13879 - DNA, 23 bp, Artificial Sequence
  primer
ctcgtcagtcacttgaaatgaaa

SEQ ID NO: 13880 - DNA, 38 bp, Artificial Sequence
  primer
gtaaaacgacggccagttgcacttggtccaattacctg

SEQ ID NO: 13881 - DNA, 38 bp, Artificial Sequence
  primer
gtaaaacgacggccagtgaggtggactgttccttgctc

SEQ ID NO: 13882 - DNA, 22 bp, Artificial Sequence
  primer
gctccaccatactgaacctgac

SEQ ID NO: 13883 - DNA, 21 bp, Artificial Sequence
  primer
gtgagcctttatgggtatggc

SEQ ID NO: 13884 - DNA, 38 bp, Artificial Sequence
  primer
gtaaaacgacggccagttaagagtgtgcaggcttggtg

SEQ ID NO: 13885 - DNA, 21 bp, Artificial Sequence
  primer
gaagccacagttgtctctggg

SEQ ID NO: 13886 - DNA, 37 bp, Artificial Sequence
  primer
gtaaaacgacggccagtgcacgacaattgggttcaag

SEQ ID NO: 13887 - DNA, 38 bp, Artificial Sequence
  primer
gtaaaacgacggccagtcaggttacgtcccttccgtag

SEQ ID NO: 13888 - DNA, 38 bp, Artificial Sequence
  primer
gtaaaacgacggccagtcgctaagtcagtggtgaatgg

SEQ ID NO: 13889 - DNA, 40 bp, Artificial Sequence
  primer
gtaaaacgacggccagttttccttgtcagtgtcatctcag

SEQ ID NO: 13890 - DNA, 38 bp, Artificial Sequence
  primer
gtaaaacgacggccagtgaggcatgatgggagatacag

SEQ ID NO: 13891 - DNA, 40 bp, Artificial Sequence
  primer
gtaaaacgacggccagtaacaatgttgtcatacctctggg

SEQ ID NO: 13892 - DNA, 21 bp, Artificial Sequence
  primer
ctgtgccttgcttggtaaatg

SEQ ID NO: 13893 - DNA, 27 bp, Artificial Sequence
  primer
tggtacactggtatggtttagtttagc

SEQ ID NO: 13894 - DNA, 39 bp, Artificial Sequence
  primer
gtaaaacgacggccagtcaatgtggacttaagccattcc

SEQ ID NO: 13895 - DNA, 43 bp, Artificial Sequence
  primer
gtaaaacgacggccagtgccacttatgaagaaatgtttgttag

SEQ ID NO: 13896 - DNA, 38 bp, Artificial Sequence
  primer
gtaaaacgacggccagtggtgtcatttgctcttagccc

SEQ ID NO: 13897 - DNA, 37 bp, Artificial Sequence
  primer
gtaaaacgacggccagttcgctttgcagaatgtgttg

SEQ ID NO: 13898 - DNA, 20 bp, Artificial Sequence
  primer
ggatgaccaccctttggagt

SEQ ID NO: 13899 - DNA, 38 bp, Artificial Sequence
  primer
gtaaaacgacggccagttctttgaactatcggcttggc

SEQ ID NO: 13900 - DNA, 36 bp, Artificial Sequence
  primer
gtaaaacgacggccagtttgcctgcatgccactaac

SEQ ID NO: 13901 - DNA, 21 bp, Artificial Sequence
  primer
gaacacttggacacaggaagg

SEQ ID NO: 13902 - DNA, 38 bp, Artificial Sequence
  primer
gtaaaacgacggccagtgatgcctgttgttcttgcatc

SEQ ID NO: 13903 - DNA, 38 bp, Artificial Sequence
  primer
gtaaaacgacggccagtcatcggtctgacctaatcctg

SEQ ID NO: 13904 - DNA, 37 bp, Artificial Sequence
  primer
gtaaaacgacggccagtgcctctttgccattcatacc

SEQ ID NO: 13905 - DNA, 42 bp, Artificial Sequence
  primer
gtaaaacgacggccagttgatgagtttcaagaaatgtacacc

SEQ ID NO: 13906 - DNA, 21 bp, Artificial Sequence
  primer
agacattgctggctgacagag

SEQ ID NO: 13907 - DNA, 21 bp, Artificial Sequence
  primer
agctctctgaatcaggatggg

SEQ ID NO: 13908 - DNA, 37 bp, Artificial Sequence
  primer
gtaaaacgacggccagtggtcagtttctggacccttg

SEQ ID NO: 13909 - DNA, 18 bp, Artificial Sequence
  primer
acccggaaggcagagctt

SEQ ID NO: 13910 - DNA, 21 bp, Artificial Sequence
  primer
tggttgctgctgcttaaagtg

SEQ ID NO: 13911 - DNA, 21 bp, Artificial Sequence
  primer
tgggacaattctagggctttg

SEQ ID NO: 13912 - DNA, 39 bp, Artificial Sequence
  primer
gtaaaacgacggccagttttgtgttactaaccatcgccc

SEQ ID NO: 13913 - DNA, 38 bp, Artificial Sequence
  primer
gtaaaacgacggccagtcaggttcaaagcgccaagtag

SEQ ID NO: 13914 - DNA, 37 bp, Artificial Sequence
  primer
gtaaaacgacggccagtgtggtcccactaaggcagtg

SEQ ID NO: 13915 - DNA, 38 bp, Artificial Sequence
  primer
gtaaaacgacggccagtatctctgcactctgggctttc

SEQ ID NO: 13916 - DNA, 35 bp, Artificial Sequence
  primer
gtaaaacgacggccagtgccaggccacaggaagag

SEQ ID NO: 13917 - DNA, 41 bp, Artificial Sequence
  primer
gtaaaacgacggccagtaacagttgacaaattgctctcaag

SEQ ID NO: 13918 - DNA, 38 bp, Artificial Sequence
  primer
gtaaaacgacggccagttagatggcttgggaaacattg

SEQ ID NO: 13919 - DNA, 20 bp, Artificial Sequence
  primer
ggtgatgcgcacctgtagtc

SEQ ID NO: 13920 - DNA, 21 bp, Artificial Sequence
  primer
acctcagaagtctttgcaccc

SEQ ID NO: 13921 - DNA, 21 bp, Artificial Sequence
  primer
gggctctcaggatgtcttcac

SEQ ID NO: 13922 - DNA, 38 bp, Artificial Sequence
  primer
gtaaaacgacggccagttgaacgctttgacagtgtttg

SEQ ID NO: 13923 - DNA, 37 bp, Artificial Sequence
  primer
gtaaaacgacggccagtatctgtatgcacagcccgac

SEQ ID NO: 13924 - DNA, 38 bp, Artificial Sequence
  primer
gtaaaacgacggccagtagtcctctaagggaagtcggg

SEQ ID NO: 13925 - DNA, 22 bp, Artificial Sequence
  primer
aagcagtaacccagattcgttg

SEQ ID NO: 13926 - DNA, 21 bp, Artificial Sequence
  primer
aatacccgtatttccaatggc

SEQ ID NO: 13927 - DNA, 21 bp, Artificial Sequence
  primer
agaagtgagtggtgagggtcg

SEQ ID NO: 13928 - DNA, 38 bp, Artificial Sequence
  primer
gtaaaacgacggccagtgtcccatagctggtgatgctc

SEQ ID NO: 13929 - DNA, 38 bp, Artificial Sequence
  primer
gtaaaacgacggccagttggccctggtttaaggaaatc

SEQ ID NO: 13930 - DNA, 20 bp, Artificial Sequence
  primer
cgacctcacgtctcttcctc

SEQ ID NO: 13931 - DNA, 21 bp, Artificial Sequence
  primer
tttcctgatttcatcgtgtgc

SEQ ID NO: 13932 - DNA, 44 bp, Artificial Sequence
  primer
gtaaaacgacggccagttcaaagagctgaatcattaagagaaac

SEQ ID NO: 13933 - DNA, 22 bp, Artificial Sequence
  primer
gaacccacttggcatgtagaag

SEQ ID NO: 13934 - DNA, 38 bp, Artificial Sequence
  primer
gtaaaacgacggccagtgggaaactcagtccaggtagc

SEQ ID NO: 13935 - DNA, 21 bp, Artificial Sequence
  primer
atgaagcaatttcagcacagg

SEQ ID NO: 13936 - DNA, 20 bp, Artificial Sequence
  primer
cccaggcaacagagtgagac

SEQ ID NO: 13937 - DNA, 18 bp, Artificial Sequence
  primer
tcaggagcttgaggccag

SEQ ID NO: 13938 - DNA, 39 bp, Artificial Sequence
  primer
gtaaaacgacggccagtgtagctgagctgagtgaaaggc

SEQ ID NO: 13939 - DNA, 22 bp, Artificial Sequence
  primer
gggtctgcaatcatgttatgtg

SEQ ID NO: 13940 - DNA, 38 bp, Artificial Sequence
  primer
gtaaaacgacggccagtaaatggctcaggcagaaagag

SEQ ID NO: 13941 - DNA, 38 bp, Artificial Sequence
  primer
gtaaaacgacggccagtgtgtcttcacgtcctacaggg

SEQ ID NO: 13942 - DNA, 21 bp, Artificial Sequence
  primer
aacagggagcctgtcacctta

SEQ ID NO: 13943 - DNA, 38 bp, Artificial Sequence
  primer
gtaaaacgacggccagttggccaaagacgcagttattc

SEQ ID NO: 13944 - DNA, 21 bp, Artificial Sequence
  primer
gacagccacaggtcaaaggag

SEQ ID NO: 13945 - DNA, 21 bp, Artificial Sequence
  primer
tgtgacctttgtgctgacacc

SEQ ID NO: 13946 - DNA, 21 bp, Artificial Sequence
  primer
agaaaggcttaaggaaacccg

SEQ ID NO: 13947 - DNA, 21 bp, Artificial Sequence
  primer
ctgtagaacgcttccctctgg

SEQ ID NO: 13948 - DNA, 38 bp, Artificial Sequence
  primer
gtaaaacgacggccagtccaaccaaagtgatgaattgc

SEQ ID NO: 13949 - DNA, 21 bp, Artificial Sequence
  primer
cggtttgcttagggaaagttg

SEQ ID NO: 13950 - DNA, 37 bp, Artificial Sequence
  primer
gtaaaacgacggccagtgtgccgttgtttgccagtag

SEQ ID NO: 13951 - DNA, 38 bp, Artificial Sequence
  primer
gtaaaacgacggccagtaaagtgctagtgaagtggccc

SEQ ID NO: 13952 - DNA, 20 bp, Artificial Sequence
  primer
cactacaagctgtgcctccc

SEQ ID NO: 13953 - DNA, 39 bp, Artificial Sequence
  primer
gtaaaacgacggccagtcagcaaagcccatgtcttattc

SEQ ID NO: 13954 - DNA, 21 bp, Artificial Sequence
  primer
ggagaccatcctaggcaacag

SEQ ID NO: 13955 - DNA, 38 bp, Artificial Sequence
  primer
gtaaaacgacggccagtccaccttccagcctctaactg

SEQ ID NO: 13956 - DNA, 36 bp, Artificial Sequence
  primer
gtaaaacgacggccagtgtcgccttgctctagacgg

SEQ ID NO: 13957 - DNA, 21 bp, Artificial Sequence
  primer
cagctcggcagctactttagg

SEQ ID NO: 13958 - DNA, 38 bp, Artificial Sequence
  primer
gtaaaacgacggccagtttgcctgtagaactggtggtg

SEQ ID NO: 13959 - DNA, 38 bp, Artificial Sequence
  primer
gtaaaacgacggccagttggcctagctatctccctgtc

SEQ ID NO: 13960 - DNA, 38 bp, Artificial Sequence
  primer
gtaaaacgacggccagtgcaggaaggacggtttctttc

SEQ ID NO: 13961 - DNA, 38 bp, Artificial Sequence
  primer
gtaaaacgacggccagtacatggctgaggtatggaagg

SEQ ID NO: 13962 - DNA, 20 bp, Artificial Sequence
  primer
tttctgctttgcagagtggg

SEQ ID NO: 13963 - DNA, 21 bp, Artificial Sequence
  primer
acttctctccgtctgtcccac

SEQ ID NO: 13964 - DNA, 38 bp, Artificial Sequence
  primer
gtaaaacgacggccagtttctgcggtgctggtatttag

SEQ ID NO: 13965 - DNA, 38 bp, Artificial Sequence
  primer
gtaaaacgacggccagtgctgtgccaaagctacacctc

SEQ ID NO: 13966 - DNA, 20 bp, Artificial Sequence
  primer
gttcacctgtgggtggtgac

SEQ ID NO: 13967 - DNA, 38 bp, Artificial Sequence
  primer
gtaaaacgacggccagtgtcacctgacgcacttgacag

SEQ ID NO: 13968 - DNA, 38 bp, Artificial Sequence
  primer
gtaaaacgacggccagtagggtagtagcgggacacaac

SEQ ID NO: 13969 - DNA, 38 bp, Artificial Sequence
  primer
gtaaaacgacggccagtggagacactggtgcttatccg

SEQ ID NO: 13970 - DNA, 37 bp, Artificial Sequence
  primer
gtaaaacgacggccagtggtcagtgtacatggcccag

SEQ ID NO: 13971 - DNA, 21 bp, Artificial Sequence
  primer
agtgtttcattggctttgctg

SEQ ID NO: 13972 - DNA, 37 bp, Artificial Sequence
  primer
gtaaaacgacggccagtgaggctctgccaactgactg

SEQ ID NO: 13973 - DNA, 21 bp, Artificial Sequence
  primer
agaacgtggccgattactacc

SEQ ID NO: 13974 - DNA, 38 bp, Artificial Sequence
  primer
gtaaaacgacggccagtctggaggaccgattctttgag

SEQ ID NO: 13975 - DNA, 38 bp, Artificial Sequence
  primer
gtaaaacgacggccagtcccaggctagtgcaaatcttc

SEQ ID NO: 13976 - DNA, 18 bp, Artificial Sequence
  primer
ctgcctgggctacagagg

SEQ ID NO: 13977 - DNA, 44 bp, Artificial Sequence
  primer
gtaaaacgacggccagtcagtgtgtacctaaagagtgtgtgttt

SEQ ID NO: 13978 - DNA, 20 bp, Artificial Sequence
  primer
gagcagagggtggtgtgttc

SEQ ID NO: 13979 - DNA, 37 bp, Artificial Sequence
  primer
gtaaaacgacggccagtacatgctgcaatgtgaaagc

SEQ ID NO: 13980 - DNA, 21 bp, Artificial Sequence
  primer
atccagaaaggaaagcgaatc

SEQ ID NO: 13981 - DNA, 21 bp, Artificial Sequence
  primer
tagccctgaacaagccaatag

SEQ ID NO: 13982 - DNA, 21 bp, Artificial Sequence
  primer
gcacaagttcaagccagtcag

SEQ ID NO: 13983 - DNA, 38 bp, Artificial Sequence
  primer
gtaaaacgacggccagtgcggtcagctattgacacttc

SEQ ID NO: 13984 - DNA, 23 bp, Artificial Sequence
  primer
ccagtttgataatctggaaaggg

SEQ ID NO: 13985 - DNA, 20 bp, Artificial Sequence
  primer
caagatgaaggcaggctacg

SEQ ID NO: 13986 - DNA, 37 bp, Artificial Sequence
  primer
gtaaaacgacggccagtaggcaggtcctgagtgacag

SEQ ID NO: 13987 - DNA, 38 bp, Artificial Sequence
  primer
gtaaaacgacggccagtcaccaggagctcttcttgctc

SEQ ID NO: 13988 - DNA, 38 bp, Artificial Sequence
  primer
gtaaaacgacggccagtaccgaacatcaaatgaaacca

SEQ ID NO: 13989 - DNA, 22 bp, Artificial Sequence
  primer
tgactgtaccaccacactccag

SEQ ID NO: 13990 - DNA, 39 bp, Artificial Sequence
  primer
gtaaaacgacggccagtggcacaatactgggtttattgg

SEQ ID NO: 13991 - DNA, 24 bp, Artificial Sequence
  primer
gcatttccttgttaaactgtggta

SEQ ID NO: 13992 - DNA, 39 bp, Artificial Sequence
  primer
gtaaaacgacggccagtcgggtatgtctgtgtaaccaag

SEQ ID NO: 13993 - DNA, 38 bp, Artificial Sequence
  primer
gtaaaacgacggccagtccaaggagaatcgggttactt

SEQ ID NO: 13994 - DNA, 18 bp, Artificial Sequence
  primer
gatgatccacccgcttcg

SEQ ID NO: 13995 - DNA, 21 bp, Artificial Sequence
  primer
ggagcagagaagagaggttgg

SEQ ID NO: 13996 - DNA, 21 bp, Artificial Sequence
  primer
gggagccactagcagtctacg

SEQ ID NO: 13997 - DNA, 38 bp, Artificial Sequence
  primer
gtaaaacgacggccagtatgcctgcaggtaagtctgtg

SEQ ID NO: 13998 - DNA, 27 bp, Artificial Sequence
  primer
tctcatgtctcataatagaaggtgttc

SEQ ID NO: 13999 - DNA, 18 bp, Artificial Sequence
  primer
gggacaaacatgcttcgg

SEQ ID NO: 14000 - DNA, 41 bp, Artificial Sequence
  primer
gtaaaacgacggccagtttaacaataggtgatggtggaaac

SEQ ID NO: 14001 - DNA, 43 bp, Artificial Sequence
  primer
gtaaaacgacggccagttcttctatcccatatcctgagacatc

SEQ ID NO: 14002 - DNA, 20 bp, Artificial Sequence
  primer
tcacttgaagccaggaggtg

SEQ ID NO: 14003 - DNA, 21 bp, Artificial Sequence
  primer
cccaggcttccttgtttactg

SEQ ID NO: 14004 - DNA, 20 bp, Artificial Sequence
  primer
cttacagcaatggtggctgg

SEQ ID NO: 14005 - DNA, 21 bp, Artificial Sequence
  primer
tcaaactttcacttcccagcc

SEQ ID NO: 14006 - DNA, 39 bp, Artificial Sequence
  primer
gtaaaacgacggccagttggtctatttccctgagagcac

SEQ ID NO: 14007 - DNA, 38 bp, Artificial Sequence
  primer
gtaaaacgacggccagtgtggtggtgtggagggtagac

SEQ ID NO: 14008 - DNA, 38 bp, Artificial Sequence
  primer
gtaaaacgacggccagtagaaagttccgtcaaacaggg

SEQ ID NO: 14009 - DNA, 36 bp, Artificial Sequence
  primer
gtaaaacgacggccagtctcacctctctgggcttgg

SEQ ID NO: 14010 - DNA, 38 bp, Artificial Sequence
  primer
gtaaaacgacggccagttggtagctggtcagtccacag

SEQ ID NO: 14011 - DNA, 38 bp, Artificial Sequence
  primer
gtaaaacgacggccagtctatgcacaacaccagcttcc

SEQ ID NO: 14012 - DNA, 20 bp, Artificial Sequence
  primer
cccactccatttctcacagg

SEQ ID NO: 14013 - DNA, 38 bp, Artificial Sequence
  primer
gtaaaacgacggccagtccacacatccctatcactccc

SEQ ID NO: 14014 - DNA, 22 bp, Artificial Sequence
  primer
gcttctcctgagaacaatttgg

SEQ ID NO: 14015 - DNA, 38 bp, Artificial Sequence
  primer
gtaaaacgacggccagtcagctggtaaggagaagaggg

SEQ ID NO: 14016 - DNA, 21 bp, Artificial Sequence
  primer
gagccagtaacctcttcaccc

SEQ ID NO: 14017 - DNA, 18 bp, Artificial Sequence
  primer
cttgctcgcaagcaggtc

SEQ ID NO: 14018 - DNA, 22 bp, Artificial Sequence
  primer
ttgtatgctgggtgcttacaac

SEQ ID NO: 14019 - DNA, 21 bp, Artificial Sequence
  primer
atgggagagacagagcatgtg

SEQ ID NO: 14020 - DNA, 38 bp, Artificial Sequence
  primer
gtaaaacgacggccagtatttggcctgtaggcatgaac

SEQ ID NO: 14021 - DNA, 39 bp, Artificial Sequence
  primer
gtaaaacgacggccagtttctaagccgagatctgtttcc

SEQ ID NO: 14022 - DNA, 39 bp, Artificial Sequence
  primer
gtaaaacgacggccagttgtagttctggtcttctggtgc

SEQ ID NO: 14023 - DNA, 40 bp, Artificial Sequence
  primer
gtaaaacgacggccagtttgcttacccttgcatatctttg

SEQ ID NO: 14024 - DNA, 39 bp, Artificial Sequence
  primer
gtaaaacgacggccagttctgtagcttggctttcatcag

SEQ ID NO: 14025 - DNA, 43 bp, Artificial Sequence
  primer
gtaaaacgacggccagtaaataacaactgctttactctcctca

SEQ ID NO: 14026 - DNA, 41 bp, Artificial Sequence
  primer
gtaaaacgacggccagttgttgaaacaaacatgttgtaagc

SEQ ID NO: 14027 - DNA, 38 bp, Artificial Sequence
  primer
gtaaaacgacggccagtgggtttggttctgagagatgg

SEQ ID NO: 14028 - DNA, 20 bp, Artificial Sequence
  primer
ctaggagacaaatgcagcgg

SEQ ID NO: 14029 - DNA, 23 bp, Artificial Sequence
  primer
ttgtatgcctgaagactcctttc

SEQ ID NO: 14030 - DNA, 20 bp, Artificial Sequence
  primer
gcctcttccctcttctctgg

SEQ ID NO: 14031 - DNA, 21 bp, Artificial Sequence
  primer
tgcttgagatcctatgccaac

SEQ ID NO: 14032 - DNA, 22 bp, Artificial Sequence
  primer
aagcacagacctgtctttgagg

SEQ ID NO: 14033 - DNA, 40 bp, Artificial Sequence
  primer
gtaaaacgacggccagttgcatgtaacaaagtcttggtcc

SEQ ID NO: 14034 - DNA, 21 bp, Artificial Sequence
  primer
gctgatttcctcaatgccaat

SEQ ID NO: 14035 - DNA, 22 bp, Artificial Sequence
  primer
aaatgacctcctaaagtcgtgc

SEQ ID NO: 14036 - DNA, 21 bp, Artificial Sequence
  primer
atatttcgttggttgcaaggg

SEQ ID NO: 14037 - DNA, 21 bp, Artificial Sequence
  primer
tggaggtagggtggtgatctg

SEQ ID NO: 14038 - DNA, 21 bp, Artificial Sequence
  primer
gcattgaggtgatttgggaag

SEQ ID NO: 14039 - DNA, 38 bp, Artificial Sequence
  primer
gtaaaacgacggccagttgacttcagacacaaagccag

SEQ ID NO: 14040 - DNA, 22 bp, Artificial Sequence
  primer
gatctctctgtagtggcgaacc

SEQ ID NO: 14041 - DNA, 21 bp, Artificial Sequence
  primer
caaaggtttgcgtttctgttt

SEQ ID NO: 14042 - DNA, 38 bp, Artificial Sequence
  primer
gtaaaacgacggccagtatgcttgaacctggctttacc

SEQ ID NO: 14043 - DNA, 21 bp, Artificial Sequence
  primer
tgaattggagggtagggagtg

SEQ ID NO: 14044 - DNA, 22 bp, Artificial Sequence
  primer
gaccaagggtgacaaattcaag

SEQ ID NO: 14045 - DNA, 21 bp, Artificial Sequence
  primer
ccaaagggtgtcaccagctac

SEQ ID NO: 14046 - DNA, 36 bp, Artificial Sequence
  primer
gtaaaacgacggccagtgtgtccacgctgatgcttg

SEQ ID NO: 14047 - DNA, 38 bp, Artificial Sequence
  primer
gtaaaacgacggccagtgtaaacagaagccatcccagc

SEQ ID NO: 14048 - DNA, 21 bp, Artificial Sequence
  primer
tcattgctgagaattgctgtg

SEQ ID NO: 14049 - DNA, 21 bp, Artificial Sequence
  primer
acttctgtgggtaccctgtgg

SEQ ID NO: 14050 - DNA, 38 bp, Artificial Sequence
  primer
gtaaaacgacggccagtaatctcagggagtgtccttgg

SEQ ID NO: 14051 - DNA, 21 bp, Artificial Sequence
  primer
agccaacagatgcttctctcc

SEQ ID NO: 14052 - DNA, 38 bp, Artificial Sequence
  primer
gtaaaacgacggccagtctcctgggcacttcttctcag

SEQ ID NO: 14053 - DNA, 38 bp, Artificial Sequence
  primer
gtaaaacgacggccagttttcaccctcggaatgtactg

SEQ ID NO: 14054 - DNA, 37 bp, Artificial Sequence
  primer
gtaaaacgacggccagtcagcaaggagagggttggag

SEQ ID NO: 14055 - DNA, 38 bp, Artificial Sequence
  primer
gtaaaacgacggccagtgtgacacaaccagctgactcc

SEQ ID NO: 14056 - DNA, 41 bp, Artificial Sequence
  primer
gtaaaacgacggccagtgggacatattcaaaccatagcatc

SEQ ID NO: 14057 - DNA, 40 bp, Artificial Sequence
  primer
gtaaaacgacggccagtcaatatttacatgcacagccagc

SEQ ID NO: 14058 - DNA, 37 bp, Artificial Sequence
  primer
gtaaaacgacggccagtttcagaggccctcctctagc

SEQ ID NO: 14059 - DNA, 18 bp, Artificial Sequence
  primer
cattgcattccagcctcg

SEQ ID NO: 14060 - DNA, 39 bp, Artificial Sequence
  primer
gtaaaacgacggccagtgcatgctcctatagtgtttggg

SEQ ID NO: 14061 - DNA, 21 bp, Artificial Sequence
  primer
aggcaaggtctcattgtgttg

SEQ ID NO: 14062 - DNA, 21 bp, Artificial Sequence
  primer
gggagaggaagagcttctttg

SEQ ID NO: 14063 - DNA, 24 bp, Artificial Sequence
  primer
ggcttctgtctcaggttaaatcag

SEQ ID NO: 14064 - DNA, 21 bp, Artificial Sequence
  primer
gacgtagaaggacccgaggac

SEQ ID NO: 14065 - DNA, 21 bp, Artificial Sequence
  primer
taaagcaatcctccctccttg

SEQ ID NO: 14066 - DNA, 40 bp, Artificial Sequence
  primer
gtaaaacgacggccagtcataagcaagtaacgcaggtcac

SEQ ID NO: 14067 - DNA, 38 bp, Artificial Sequence
  primer
gtaaaacgacggccagtctcacgcttgtaatcctggtg

SEQ ID NO: 14068 - DNA, 38 bp, Artificial Sequence
  primer
gtaaaacgacggccagttcagcctcacagtgggttatg

SEQ ID NO: 14069 - DNA, 21 bp, Artificial Sequence
  primer
aggcacataccatcattccag

SEQ ID NO: 14070 - DNA, 38 bp, Artificial Sequence
  primer
gtaaaacgacggccagtttgacagaaaccattcgcatc

SEQ ID NO: 14071 - DNA, 22 bp, Artificial Sequence
  primer
ttaggttgcgcagtctacacac

SEQ ID NO: 14072 - DNA, 21 bp, Artificial Sequence
  primer
gcaagcacctgtagtcccatc

SEQ ID NO: 14073 - DNA, 38 bp, Artificial Sequence
  primer
gtaaaacgacggccagttgtcctaagtcaaagggagcc

SEQ ID NO: 14074 - DNA, 38 bp, Artificial Sequence
  primer
gtaaaacgacggccagtaggacccagaggtctaccagg

SEQ ID NO: 14075 - DNA, 37 bp, Artificial Sequence
  primer
gtaaaacgacggccagtgtattcacatggaggccgtg

SEQ ID NO: 14076 - DNA, 20 bp, Artificial Sequence
  primer
cctctgggtcatgctcattc

SEQ ID NO: 14077 - DNA, 38 bp, Artificial Sequence
  primer
gtaaaacgacggccagtgtcagctgatgctacgctgtg

SEQ ID NO: 14078 - DNA, 21 bp, Artificial Sequence
  primer
gctctgaattccctctttccc

SEQ ID NO: 14079 - DNA, 38 bp, Artificial Sequence
  primer
gtaaaacgacggccagtactgataggtgagcctgggtt

SEQ ID NO: 14080 - DNA, 38 bp, Artificial Sequence
  primer
gtaaaacgacggccagtaggaggagaagtaagcggtgg

SEQ ID NO: 14081 - DNA, 21 bp, Artificial Sequence
  primer
tctggaagggactgactcctg

SEQ ID NO: 14082 - DNA, 20 bp, Artificial Sequence
  primer
ctcatatgcctggacccttg

SEQ ID NO: 14083 - DNA, 21 bp, Artificial Sequence
  primer
tctggaagggactgactcctg

SEQ ID NO: 14084 - DNA, 38 bp, Artificial Sequence
  primer
gtaaaacgacggccagttgaaacagctgcatttggaac

SEQ ID NO: 14085 - DNA, 25 bp, Artificial Sequence
  primer
tcatttacgtgtcctaaagaatcca

SEQ ID NO: 14086 - DNA, 38 bp, Artificial Sequence
  primer
gtaaaacgacggccagttggcattgatgatcttgttgg

SEQ ID NO: 14087 - DNA, 25 bp, Artificial Sequence
  primer
atgaccaagaggttgtaagaatcag

SEQ ID NO: 14088 - DNA, 25 bp, Artificial Sequence
  primer
tcatttacgtgtcctaaagaatcca

SEQ ID NO: 14089 - DNA, 21 bp, Artificial Sequence
  primer
tatttgagttgaatgcctggg

SEQ ID NO: 14090 - DNA, 38 bp, Artificial Sequence
  primer
gtaaaacgacggccagtaatccaggtctgtctgatgcc

SEQ ID NO: 14091 - DNA, 25 bp, Artificial Sequence
  primer
gctgatacaagccatagtaaggtcc

SEQ ID NO: 14092 - DNA, 38 bp, Artificial Sequence
  primer
gtaaaacgacggccagtacacagactgatgggaggttg

SEQ ID NO: 14093 - DNA, 21 bp, Artificial Sequence
  primer
ttgggttcactttgatggaaa

SEQ ID NO: 14094 - DNA, 21 bp, Artificial Sequence
  primer
cccatgaaatttacctggagc

SEQ ID NO: 14095 - DNA, 40 bp, Artificial Sequence
  primer
gtaaaacgacggccagttttagaaatgtgtgtctgatcgc

SEQ ID NO: 14096 - DNA, 21 bp, Artificial Sequence
  primer
tagctgcttgttattgctggc

SEQ ID NO: 14097 - DNA, 39 bp, Artificial Sequence
  primer
gtaaaacgacggccagtaggagcgaagtaaggatttgag

SEQ ID NO: 14098 - DNA, 41 bp, Artificial Sequence
  primer
gtaaaacgacggccagtaactgtttaaagttcgtttggtgg

SEQ ID NO: 14099 - DNA, 23 bp, Artificial Sequence
  primer
gcatggtgtacattgtgaatctg

SEQ ID NO: 14100 - DNA, 38 bp, Artificial Sequence
  primer
gtaaaacgacggccagtgagctgcctgcttacaaactg

SEQ ID NO: 14101 - DNA, 24 bp, Artificial Sequence
  primer
tttccttgtaatcacctgtttgtg

SEQ ID NO: 14102 - DNA, 38 bp, Artificial Sequence
  primer
gtaaaacgacggccagtaaagcaactttcacctaggca

SEQ ID NO: 14103 - DNA, 37 bp, Artificial Sequence
  primer
gtaaaacgacggccagtcttcagctgggattacaggc

SEQ ID NO: 14104 - DNA, 38 bp, Artificial Sequence
  primer
gtaaaacgacggccagtaggaagaacttgcttcatggg

SEQ ID NO: 14105 - DNA, 21 bp, Artificial Sequence
  primer
ctctcccgggactttaacacc

SEQ ID NO: 14106 - DNA, 21 bp, Artificial Sequence
  primer
ttctcagtgccagagaagctg

SEQ ID NO: 14107 - DNA, 38 bp, Artificial Sequence
  primer
gtaaaacgacggccagtcaatgttggctatgaaggtgg

SEQ ID NO: 14108 - DNA, 38 bp, Artificial Sequence
  primer
gtaaaacgacggccagttccggaaactgcaaggagtag

SEQ ID NO: 14109 - DNA, 21 bp, Artificial Sequence
  primer
atgacccttcttgtaccagcc

SEQ ID NO: 14110 - DNA, 38 bp, Artificial Sequence
  primer
gtaaaacgacggccagtgagccctgaaacctcttgttc

SEQ ID NO: 14111 - DNA, 21 bp, Artificial Sequence
  primer
gattgtcgaaggctttccaag

SEQ ID NO: 14112 - DNA, 38 bp, Artificial Sequence
  primer
gtaaaacgacggccagtagactccctggactggctttc

SEQ ID NO: 14113 - DNA, 21 bp, Artificial Sequence
  primer
cagggtttgtagggctattgg

SEQ ID NO: 14114 - DNA, 38 bp, Artificial Sequence
  primer
gtaaaacgacggccagtgtcccagacatgtgacaaagg

SEQ ID NO: 14115 - DNA, 38 bp, Artificial Sequence
  primer
gtaaaacgacggccagtaaagctagaggctttgccatc

SEQ ID NO: 14116 - DNA, 38 bp, Artificial Sequence
  primer
gtaaaacgacggccagtaacaccacgcttgtgactctc

SEQ ID NO: 14117 - DNA, 39 bp, Artificial Sequence
  primer
gtaaaacgacggccagtttgtaacagctggcctagaacc

SEQ ID NO: 14118 - DNA, 38 bp, Artificial Sequence
  primer
gtaaaacgacggccagtgatggcttgtttcatgttccc

SEQ ID NO: 14119 - DNA, 39 bp, Artificial Sequence
  primer
gtaaaacgacggccagtcaatctttatccatgcttgtgg

SEQ ID NO: 14120 - DNA, 38 bp, Artificial Sequence
  primer
gtaaaacgacggccagtagttcgtcacgttgtgtccag

SEQ ID NO: 14121 - DNA, 38 bp, Artificial Sequence
  primer
gtaaaacgacggccagtgcctcaggagtgtgactatgg

SEQ ID NO: 14122 - DNA, 37 bp, Artificial Sequence
  primer
gtaaaacgacggccagtcttcaccctgtgtccctgtc

SEQ ID NO: 14123 - DNA, 39 bp, Artificial Sequence
  primer
gtaaaacgacggccagttgctgtcacaagaggtgcttac

SEQ ID NO: 14124 - DNA, 39 bp, Artificial Sequence
  primer
gtaaaacgacggccagtcattgcaagtgtggtatcttgg

SEQ ID NO: 14125 - DNA, 39 bp, Artificial Sequence
  primer
gtaaaacgacggccagtgggtaacttgaggtttctgctg

SEQ ID NO: 14126 - DNA, 36 bp, Artificial Sequence
  primer
gtaaaacgacggccagtagccgacgtcgtccttatc

SEQ ID NO: 14127 - DNA, 38 bp, Artificial Sequence
  primer
gtaaaacgacggccagttctaggaagcctcactttggg

SEQ ID NO: 14128 - DNA, 21 bp, Artificial Sequence
  primer
agaggccttcaccaggcttag

SEQ ID NO: 14129 - DNA, 37 bp, Artificial Sequence
  primer
gtaaaacgacggccagtctttctcctcctcctgtcgg

SEQ ID NO: 14130 - DNA, 21 bp, Artificial Sequence
  primer
catgactgttaaatgctgccc

SEQ ID NO: 14131 - DNA, 38 bp, Artificial Sequence
  primer
gtaaaacgacggccagtagccggcaaatgttccttatc

SEQ ID NO: 14132 - DNA, 21 bp, Artificial Sequence
  primer
acctcactcagcattagtcgg

SEQ ID NO: 14133 - DNA, 38 bp, Artificial Sequence
  primer
gtaaaacgacggccagtaattcttcccatcaccactcc

SEQ ID NO: 14134 - DNA, 39 bp, Artificial Sequence
  primer
gtaaaacgacggccagtctgttagtgatgttgtgggagc

SEQ ID NO: 14135 - DNA, 21 bp, Artificial Sequence
  primer
atgccttcagacctgatcaaa

SEQ ID NO: 14136 - DNA, 37 bp, Artificial Sequence
  primer
gtaaaacgacggccagtttctgcctcacagcatcttg

SEQ ID NO: 14137 - DNA, 38 bp, Artificial Sequence
  primer
gtaaaacgacggccagtctcaagtcagggaggaaggtg

SEQ ID NO: 14138 - DNA, 24 bp, Artificial Sequence
  primer
tgcagtccataccagatagtgaag

SEQ ID NO: 14139 - DNA, 41 bp, Artificial Sequence
  primer
gtaaaacgacggccagtctgagttgtgactttgtcatcctc

SEQ ID NO: 14140 - DNA, 39 bp, Artificial Sequence
  primer
gtaaaacgacggccagtttatcagcaaagtgttcctccc

SEQ ID NO: 14141 - DNA, 39 bp, Artificial Sequence
  primer
gtaaaacgacggccagttgcatgattcatagacaggctc

SEQ ID NO: 14142 - DNA, 42 bp, Artificial Sequence
  primer
gtaaaacgacggccagtttccttagtaatattcattgtgccc

SEQ ID NO: 14143 - DNA, 38 bp, Artificial Sequence
  primer
gtaaaacgacggccagtcctgctgagctaccatgaatc

SEQ ID NO: 14144 - DNA, 43 bp, Artificial Sequence
  primer
gtaaaacgacggccagtgagggtttggagacataacactttac

SEQ ID NO: 14145 - DNA, 38 bp, Artificial Sequence
  primer
gtaaaacgacggccagtccatgtctggccaacaactat

SEQ ID NO: 14146 - DNA, 25 bp, Artificial Sequence
  primer
tctgagttctgtatgtgtctccaac

SEQ ID NO: 14147 - DNA, 22 bp, Artificial Sequence
  primer
aagctcccttccatatttcagc

SEQ ID NO: 14148 - DNA, 40 bp, Artificial Sequence
  primer
gtaaaacgacggccagttgtgaggcatgacaaacacatac

SEQ ID NO: 14149 - DNA, 38 bp, Artificial Sequence
  primer
gtaaaacgacggccagtgcagcatgtggaaggtaagtg

SEQ ID NO: 14150 - DNA, 26 bp, Artificial Sequence
  primer
tggacttcatcatattgtttgtatgg

SEQ ID NO: 14151 - DNA, 23 bp, Artificial Sequence
  primer
aatgcctaaagactgcatgaaag

SEQ ID NO: 14152 - DNA, 38 bp, Artificial Sequence
  primer
gtaaaacgacggccagtaacaactggttgccctcagtc

SEQ ID NO: 14153 - DNA, 43 bp, Artificial Sequence
  primer
gtaaaacgacggccagtgaaagtatgtgaaagcaatttgaaac

SEQ ID NO: 14154 - DNA, 38 bp, Artificial Sequence
  primer
gtaaaacgacggccagttttatccttcaacacgatggc

SEQ ID NO: 14155 - DNA, 21 bp, Artificial Sequence
  primer
caggtaaagcgtcatttctgc

SEQ ID NO: 14156 - DNA, 21 bp, Artificial Sequence
  primer
gcaagcaggaccaattctgac

SEQ ID NO: 14157 - DNA, 23 bp, Artificial Sequence
  primer
tcctgtttcattgaatacttggg

SEQ ID NO: 14158 - DNA, 36 bp, Artificial Sequence
  primer
gtaaaacgacggccagtggcccgacagaaacacatt

SEQ ID NO: 14159 - DNA, 38 bp, Artificial Sequence
  primer
gtaaaacgacggccagtttgatttcccttccttcgttc

SEQ ID NO: 14160 - DNA, 21 bp, Artificial Sequence
  primer
acctatcacagtcccgtcagc

SEQ ID NO: 14161 - DNA, 23 bp, Artificial Sequence
  primer
aattccagtaccacaaacattgc

SEQ ID NO: 14162 - DNA, 22 bp, Artificial Sequence
  primer
atcaaccgcgtgataataagcc

SEQ ID NO: 14163 - DNA, 20 bp, Artificial Sequence
  primer
tctctttggtggtcctgtgg

SEQ ID NO: 14164 - DNA, 39 bp, Artificial Sequence
  primer
gtaaaacgacggccagtgcaacctaagatcatcccactc

SEQ ID NO: 14165 - DNA, 37 bp, Artificial Sequence
  primer
gtaaaacgacggccagttgtcgtattctctgcctgcg

SEQ ID NO: 14166 - DNA, 22 bp, Artificial Sequence
  primer
gaaggtgggtagatgtctctgc

SEQ ID NO: 14167 - DNA, 39 bp, Artificial Sequence
  primer
gtaaaacgacggccagtgcagtgactgaaagaggcattg

SEQ ID NO: 14168 - DNA, 25 bp, Artificial Sequence
  primer
gaggagaccacttctaaacttaggg

SEQ ID NO: 14169 - DNA, 42 bp, Artificial Sequence
  primer
gtaaaacgacggccagtccatcatggctaaagatagggtatg

SEQ ID NO: 14170 - DNA, 21 bp, Artificial Sequence
  primer
taccagtgtctgcatggaagc

SEQ ID NO: 14171 - DNA, 21 bp, Artificial Sequence
  primer
tcatctgggcaaatgactctc

SEQ ID NO: 14172 - DNA, 38 bp, Artificial Sequence
  primer
gtaaaacgacggccagtaaccatagggatgctgaatgg

SEQ ID NO: 14173 - DNA, 40 bp, Artificial Sequence
  primer
gtaaaacgacggccagtgggaacatttgatttattgtggg

SEQ ID NO: 14174 - DNA, 21 bp, Artificial Sequence
  primer
gctattgattcaggagcatgg

SEQ ID NO: 14175 - DNA, 37 bp, Artificial Sequence
  primer
gtaaaacgacggccagtactcacggttcctgacatgc

SEQ ID NO: 14176 - DNA, 18 bp, Artificial Sequence
  primer
gtgatctggccacttcgg

SEQ ID NO: 14177 - DNA, 22 bp, Artificial Sequence
  primer
ccctctgcatatttcggtacac

SEQ ID NO: 14178 - DNA, 19 bp, Artificial Sequence
  primer
cagtgagccggaattgctc

SEQ ID NO: 14179 - DNA, 38 bp, Artificial Sequence
  primer
gtaaaacgacggccagtgcagattctttccaggtttgg

SEQ ID NO: 14180 - DNA, 21 bp, Artificial Sequence
  primer
agggagcaataggatgactgg

SEQ ID NO: 14181 - DNA, 38 bp, Artificial Sequence
  primer
gtaaaacgacggccagtagataacaccaggcctccttc

SEQ ID NO: 14182 - DNA, 24 bp, Artificial Sequence
  primer
ttagaatgggtgtgttctcatttc

SEQ ID NO: 14183 - DNA, 40 bp, Artificial Sequence
  primer
gtaaaacgacggccagtttggagatcgtccagtaactgtc

SEQ ID NO: 14184 - DNA, 38 bp, Artificial Sequence
  primer
gtaaaacgacggccagtgcggaatctggtttcctctac

SEQ ID NO: 14185 - DNA, 38 bp, Artificial Sequence
  primer
gtaaaacgacggccagtccacattcccgctacttcttc

SEQ ID NO: 14186 - DNA, 39 bp, Artificial Sequence
  primer
gtaaaacgacggccagtggtttggacttgactggaagtg

SEQ ID NO: 14187 - DNA, 38 bp, Artificial Sequence
  primer
gtaaaacgacggccagtcacaatgtggcgtttgttgag

SEQ ID NO: 14188 - DNA, 37 bp, Artificial Sequence
  primer
gtaaaacgacggccagttggttggttggaagcttgac

SEQ ID NO: 14189 - DNA, 38 bp, Artificial Sequence
  primer
gtaaaacgacggccagtgttctggagtggagagatggg

SEQ ID NO: 14190 - DNA, 38 bp, Artificial Sequence
  primer
gtaaaacgacggccagtagcttggatgcaaggattctg

SEQ ID NO: 14191 - DNA, 38 bp, Artificial Sequence
  primer
gtaaaacgacggccagtctctcattgcatttagtgcgg

SEQ ID NO: 14192 - DNA, 38 bp, Artificial Sequence
  primer
gtaaaacgacggccagtctgtgaaagctccaccacttc

SEQ ID NO: 14193 - DNA, 39 bp, Artificial Sequence
  primer
gtaaaacgacggccagtccttctgtctgtctccttgtgc

SEQ ID NO: 14194 - DNA, 21 bp, Artificial Sequence
  primer
ggccacaggtttcttcatctc

SEQ ID NO: 14195 - DNA, 38 bp, Artificial Sequence
  primer
gtaaaacgacggccagtagcatgcaggcagtattcaac

SEQ ID NO: 14196 - DNA, 21 bp, Artificial Sequence
  primer
tcgcatcgtcttccatctatc

SEQ ID NO: 14197 - DNA, 22 bp, Artificial Sequence
  primer
tcactgtaagctgtgggacttg

SEQ ID NO: 14198 - DNA, 21 bp, Artificial Sequence
  primer
gatgacggtgatgagacttgg

SEQ ID NO: 14199 - DNA, 38 bp, Artificial Sequence
  primer
gtaaaacgacggccagtggacgatgtggtgaggatttc

SEQ ID NO: 14200 - DNA, 20 bp, Artificial Sequence
  primer
gggtggcaagtatttccctg

SEQ ID NO: 14201 - DNA, 20 bp, Artificial Sequence
  primer
caagttggagacgtcattcg

SEQ ID NO: 14202 - DNA, 23 bp, Artificial Sequence
  primer
ttcatgtccaggtatggctaatg

SEQ ID NO: 14203 - DNA, 43 bp, Artificial Sequence
  primer
gtaaaacgacggccagttgtaccaaacatgtcttactttgctt

SEQ ID NO: 14204 - DNA, 35 bp, Artificial Sequence
  primer
gtaaaacgacggccagtaggcgtaagccaccatgc

SEQ ID NO: 14205 - DNA, 41 bp, Artificial Sequence
  primer
gtaaaacgacggccagtgcaatcaaatagactttcaaagcg

SEQ ID NO: 14206 - DNA, 21 bp, Artificial Sequence
  primer
taagcagcttgctctcgtctg

SEQ ID NO: 14207 - DNA, 38 bp, Artificial Sequence
  primer
gtaaaacgacggccagtaagcaaagccaggtaaggagg

SEQ ID NO: 14208 - DNA, 38 bp, Artificial Sequence
  primer
gtaaaacgacggccagtttgcataattgaaaccttgcc

SEQ ID NO: 14209 - DNA, 21 bp, Artificial Sequence
  primer
ttggcataacccttccaagtc

SEQ ID NO: 14210 - DNA, 21 bp, Artificial Sequence
  primer
ggacaacagagcaagaccctg

SEQ ID NO: 14211 - DNA, 21 bp, Artificial Sequence
  primer
cctggatgataaagccagacc

SEQ ID NO: 14212 - DNA, 24 bp, Artificial Sequence
  primer
gcaaccaggatgtataattagccc

SEQ ID NO: 14213 - DNA, 21 bp, Artificial Sequence
  primer
cagtgggagtgagatgctgtc

SEQ ID NO: 14214 - DNA, 20 bp, Artificial Sequence
  primer
gggtgacagagtgagaccct

SEQ ID NO: 14215 - DNA, 42 bp, Artificial Sequence
  primer
gtaaaacgacggccagtcacataatttaaatcttgggaatgg

SEQ ID NO: 14216 - DNA, 27 bp, Artificial Sequence
  primer
caagagcttctgtattattgttccatc

SEQ ID NO: 14217 - DNA, 37 bp, Artificial Sequence
  primer
gtaaaacgacggccagtagatcgcttaaggccaggag

SEQ ID NO: 14218 - DNA, 38 bp, Artificial Sequence
  primer
gtaaaacgacggccagttgcacaccacaaatattgcag

SEQ ID NO: 14219 - DNA, 38 bp, Artificial Sequence
  primer
gtaaaacgacggccagttcaagccacatcatgcctaac

SEQ ID NO: 14220 - DNA, 22 bp, Artificial Sequence
  primer
ccacacctggcgaaatattaac

SEQ ID NO: 14221 - DNA, 38 bp, Artificial Sequence
  primer
gtaaaacgacggccagttcatttctgtcaaccgtctgg

SEQ ID NO: 14222 - DNA, 38 bp, Artificial Sequence
  primer
gtaaaacgacggccagtggtgtttcctggctcatgttc

SEQ ID NO: 14223 - DNA, 38 bp, Artificial Sequence
  primer
gtaaaacgacggccagtacccatcatggcagtaagagg

SEQ ID NO: 14224 - DNA, 21 bp, Artificial Sequence
  primer
aatgtaacctggagagccgtg

SEQ ID NO: 14225 - DNA, 38 bp, Artificial Sequence
  primer
gtaaaacgacggccagtccttgagactcccttctctcc

SEQ ID NO: 14226 - DNA, 21 bp, Artificial Sequence
  primer
cattctgcaggtaggtgaccc

SEQ ID NO: 14227 - DNA, 21 bp, Artificial Sequence
  primer
cagggagtgaactggtttgtg

SEQ ID NO: 14228 - DNA, 38 bp, Artificial Sequence
  primer
gtaaaacgacggccagtatggaatgtgagtgcctgttg

SEQ ID NO: 14229 - DNA, 21 bp, Artificial Sequence
  primer
gcacctggaactaagcaaacc

SEQ ID NO: 14230 - DNA, 21 bp, Artificial Sequence
  primer
gagctatgattgtgcgactgc

SEQ ID NO: 14231 - DNA, 38 bp, Artificial Sequence
  primer
gtaaaacgacggccagtttcctgaagagttgcatcagc

SEQ ID NO: 14232 - DNA, 38 bp, Artificial Sequence
  primer
gtaaaacgacggccagtctctattccaccctggtgtcc

SEQ ID NO: 14233 - DNA, 38 bp, Artificial Sequence
  primer
gtaaaacgacggccagtagagaccatgggttggacaag

SEQ ID NO: 14234 - DNA, 21 bp, Artificial Sequence
  primer
tttctgtgcccaggtgtcttc

SEQ ID NO: 14235 - DNA, 20 bp, Artificial Sequence
  primer
ctgctcagcgattagggttg

SEQ ID NO: 14236 - DNA, 38 bp, Artificial Sequence
  primer
gtaaaacgacggccagttactgagagttgggagggcag

SEQ ID NO: 14237 - DNA, 37 bp, Artificial Sequence
  primer
gtaaaacgacggccagtctcctgacctgactctgccc

SEQ ID NO: 14238 - DNA, 37 bp, Artificial Sequence
  primer
gtaaaacgacggccagtcctggaatgggtgaagtgtg

SEQ ID NO: 14239 - DNA, 38 bp, Artificial Sequence
  primer
gtaaaacgacggccagtggattattcattgtcgccctc

SEQ ID NO: 14240 - DNA, 38 bp, Artificial Sequence
  primer
gtaaaacgacggccagtggctggctagcatctatgagg

SEQ ID NO: 14241 - DNA, 21 bp, Artificial Sequence
  primer
ctgacagtagccctgttggac

SEQ ID NO: 14242 - DNA, 38 bp, Artificial Sequence
  primer
gtaaaacgacggccagtactggccatactgtcctggag

SEQ ID NO: 14243 - DNA, 21 bp, Artificial Sequence
  primer
cagtgagcacttctgtccagg

SEQ ID NO: 14244 - DNA, 20 bp, Artificial Sequence
  primer
gactgcagaagaatgacggg

SEQ ID NO: 14245 - DNA, 38 bp, Artificial Sequence
  primer
gtaaaacgacggccagtacatcagctgtcttcctgtgc

SEQ ID NO: 14246 - DNA, 21 bp, Artificial Sequence
  primer
agtcagagtctgcccttggtc

SEQ ID NO: 14247 - DNA, 38 bp, Artificial Sequence
  primer
gtaaaacgacggccagtctggaaggagtgagccttctg

SEQ ID NO: 14248 - DNA, 38 bp, Artificial Sequence
  primer
gtaaaacgacggccagtgaagccagaggtgacttaggc

SEQ ID NO: 14249 - DNA, 20 bp, Artificial Sequence
  primer
ctgtgggtcccttctccttg

SEQ ID NO: 14250 - DNA, 37 bp, Artificial Sequence
  primer
gtaaaacgacggccagtttctggccatttgagcattc

SEQ ID NO: 14251 - DNA, 21 bp, Artificial Sequence
  primer
gagctccttgaagaccgagtg

SEQ ID NO: 14252 - DNA, 20 bp, Artificial Sequence
  primer
ttacgggctctgacatctcg

SEQ ID NO: 14253 - DNA, 38 bp, Artificial Sequence
  primer
gtaaaacgacggccagtgaatggtgtgtgtcccatagc

SEQ ID NO: 14254 - DNA, 37 bp, Artificial Sequence
  primer
gtaaaacgacggccagtgtgtcacgtggtgtcgagtg

SEQ ID NO: 14255 - DNA, 20 bp, Artificial Sequence
  primer
gccaatagcagtgggtccag

SEQ ID NO: 14256 - DNA, 21 bp, Artificial Sequence
  primer
aaagtctgaagaggacgtggg

SEQ ID NO: 14257 - DNA, 20 bp, Artificial Sequence
  primer
aacatcgtcccagtgagctg

SEQ ID NO: 14258 - DNA, 37 bp, Artificial Sequence
  primer
gtaaaacgacggccagtcaaggccttctccctctctg

SEQ ID NO: 14259 - DNA, 36 bp, Artificial Sequence
  primer
gtaaaacgacggccagtgtggccggaatgttctcac

SEQ ID NO: 14260 - DNA, 37 bp, Artificial Sequence
  primer
gtaaaacgacggccagtgtgagtgatgggtgggtagg

SEQ ID NO: 14261 - DNA, 18 bp, Artificial Sequence
  primer
aggcatgagccactgtgc

SEQ ID NO: 14262 - DNA, 21 bp, Artificial Sequence
  primer
tgttcatcctgtgagtctccg

SEQ ID NO: 14263 - DNA, 20 bp, Artificial Sequence
  primer
aactgaggtcagctttcgcc

SEQ ID NO: 14264 - DNA, 38 bp, Artificial Sequence
  primer
gtaaaacgacggccagtagcaggaagctgtgtctttcc

SEQ ID NO: 14265 - DNA, 37 bp, Artificial Sequence
  primer
gtaaaacgacggccagtataaaggtgtagcccaggcg

SEQ ID NO: 14266 - DNA, 38 bp, Artificial Sequence
  primer
gtaaaacgacggccagtgtcctggccataatggacttc

SEQ ID NO: 14267 - DNA, 38 bp, Artificial Sequence
  primer
gtaaaacgacggccagttttctgaatcccttctggctg

SEQ ID NO: 14268 - DNA, 38 bp, Artificial Sequence
  primer
gtaaaacgacggccagttgtacaacgagatggagcagg

SEQ ID NO: 14269 - DNA, 38 bp, Artificial Sequence
  primer
gtaaaacgacggccagttgggttacaagcccttctctg

SEQ ID NO: 14270 - DNA, 35 bp, Artificial Sequence
  primer
gtaaaacgacggccagtgggagtgggcagtggaag

SEQ ID NO: 14271 - DNA, 38 bp, Artificial Sequence
  primer
gtaaaacgacggccagtgccttggtcattaacggagac

SEQ ID NO: 14272 - DNA, 19 bp, Artificial Sequence
  primer
gggacctgaagcagatggg

SEQ ID NO: 14273 - DNA, 37 bp, Artificial Sequence
  primer
gtaaaacgacggccagttacctcacccagaaccctcc

SEQ ID NO: 14274 - DNA, 18 bp, Artificial Sequence
  primer
agtggccaccctactggc

SEQ ID NO: 14275 - DNA, 37 bp, Artificial Sequence
  primer
gtaaaacgacggccagtcttggacatggcctatggag

SEQ ID NO: 14276 - DNA, 21 bp, Artificial Sequence
  primer
tttatggaccaggcacaaagg

SEQ ID NO: 14277 - DNA, 38 bp, Artificial Sequence
  primer
gtaaaacgacggccagtatcctgcctctcctacttggg

SEQ ID NO: 14278 - DNA, 40 bp, Artificial Sequence
  primer
gtaaaacgacggccagttctttcctgtgtcagtgacttcc

SEQ ID NO: 14279 - DNA, 21 bp, Artificial Sequence
  primer
ttgctttatggttggcatcag

SEQ ID NO: 14280 - DNA, 21 bp, Artificial Sequence
  primer
actctggctcaggcttgtagg

SEQ ID NO: 14281 - DNA, 25 bp, Artificial Sequence
  primer
ttgaaattaaatgacacagtttgga

SEQ ID NO: 14282 - DNA, 38 bp, Artificial Sequence
  primer
gtaaaacgacggccagtattgccagtgtgcttatttgg

SEQ ID NO: 14283 - DNA, 37 bp, Artificial Sequence
  primer
gtaaaacgacggccagtggaaagtcttgcctgcttcc

SEQ ID NO: 14284 - DNA, 39 bp, Artificial Sequence
  primer
gtaaaacgacggccagttgaggctctgttgcctctttag

SEQ ID NO: 14285 - DNA, 38 bp, Artificial Sequence
  primer
gtaaaacgacggccagtgtttggctttgcatgtgctac

SEQ ID NO: 14286 - DNA, 20 bp, Artificial Sequence
  primer
aacagtgctgtgggcttctg

SEQ ID NO: 14287 - DNA, 22 bp, Artificial Sequence
  primer
tgtacaacttaatggcccttgc

SEQ ID NO: 14288 - DNA, 42 bp, Artificial Sequence
  primer
gtaaaacgacggccagttgactatttcttggagttagatgcg

SEQ ID NO: 14289 - DNA, 38 bp, Artificial Sequence
  primer
gtaaaacgacggccagtctggagactttggcagacttc

SEQ ID NO: 14290 - DNA, 38 bp, Artificial Sequence
  primer
gtaaaacgacggccagtcaaacacgaatgtctcactgc

SEQ ID NO: 14291 - DNA, 36 bp, Artificial Sequence
  primer
gtaaaacgacggccagttgccagacatttgaggctg

SEQ ID NO: 14292 - DNA, 38 bp, Artificial Sequence
  primer
gtaaaacgacggccagtagacctgatgcttgagttggg

SEQ ID NO: 14293 - DNA, 36 bp, Artificial Sequence
  primer
gtaaaacgacggccagtcccatttccaaattgccag

SEQ ID NO: 14294 - DNA, 41 bp, Artificial Sequence
  primer
gtaaaacgacggccagtagttgagagtaaggatagccaagc

SEQ ID NO: 14295 - DNA, 21 bp, Artificial Sequence
  primer
tttgggaacttccttctggag

SEQ ID NO: 14296 - DNA, 21 bp, Artificial Sequence
  primer
acccaggtctttgaatttccc

SEQ ID NO: 14297 - DNA, 40 bp, Artificial Sequence
  primer
gtaaaacgacggccagttgggtcttatgccatattctctc

SEQ ID NO: 14298 - DNA, 40 bp, Artificial Sequence
  primer
gtaaaacgacggccagttggagtgaatgaaatggtttagc

SEQ ID NO: 14299 - DNA, 40 bp, Artificial Sequence
  primer
gtaaaacgacggccagtaaagaggaatgacaagtttccaa

SEQ ID NO: 14300 - DNA, 37 bp, Artificial Sequence
  primer
gtaaaacgacggccagtaaagtcaactcccacccacc

SEQ ID NO: 14301 - DNA, 22 bp, Artificial Sequence
  primer
caggcatttgctatttctgaag

SEQ ID NO: 14302 - DNA, 37 bp, Artificial Sequence
  primer
gtaaaacgacggccagtagttctcgcgaaacatcacg

SEQ ID NO: 14303 - DNA, 18 bp, Artificial Sequence
  primer
gcaccactgcattccacc

SEQ ID NO: 14304 - DNA, 38 bp, Artificial Sequence
  primer
gtaaaacgacggccagttcaaatatggctgtggtcctg

SEQ ID NO: 14305 - DNA, 38 bp, Artificial Sequence
  primer
gtaaaacgacggccagtatttcccaccaaatgttccag

SEQ ID NO: 14306 - DNA, 37 bp, Artificial Sequence
  primer
gtaaaacgacggccagtaagtgacctctcgcctttcc

SEQ ID NO: 14307 - DNA, 38 bp, Artificial Sequence
  primer
gtaaaacgacggccagttattgtgtgtttgcaggctgg

SEQ ID NO: 14308 - DNA, 41 bp, Artificial Sequence
  primer
gtaaaacgacggccagtaaagagtctgtgagtttcagtccc

SEQ ID NO: 14309 - DNA, 35 bp, Artificial Sequence
  primer
gtaaaacgacggccagttctcttgtggtcgctggc

SEQ ID NO: 14310 - DNA, 39 bp, Artificial Sequence
  primer
gtaaaacgacggccagtgaaacatagtggatgcctcctg

SEQ ID NO: 14311 - DNA, 21 bp, Artificial Sequence
  primer
tctttctatctccagcggacc

SEQ ID NO: 14312 - DNA, 21 bp, Artificial Sequence
  primer
actccagactccagcatgagc

SEQ ID NO: 14313 - DNA, 38 bp, Artificial Sequence
  primer
gtaaaacgacggccagtgcaggctgagttagtgcagtg

SEQ ID NO: 14314 - DNA, 38 bp, Artificial Sequence
  primer
gtaaaacgacggccagtctggctcttgctgagtctgtg

SEQ ID NO: 14315 - DNA, 38 bp, Artificial Sequence
  primer
gtaaaacgacggccagtaaactctccaaagatggcagc

SEQ ID NO: 14316 - DNA, 38 bp, Artificial Sequence
  primer
gtaaaacgacggccagtatagctgcacggctgttcttc

SEQ ID NO: 14317 - DNA, 39 bp, Artificial Sequence
  primer
gtaaaacgacggccagtggcagtgactactgtgattccc

SEQ ID NO: 14318 - DNA, 21 bp, Artificial Sequence
  primer
acactgtctgtcatgggaagc

SEQ ID NO: 14319 - DNA, 21 bp, Artificial Sequence
  primer
tagttgaagacgacctgtggg

SEQ ID NO: 14320 - DNA, 21 bp, Artificial Sequence
  primer
aagctggaagcctatgtcacc

SEQ ID NO: 14321 - DNA, 38 bp, Artificial Sequence
  primer
gtaaaacgacggccagtgctccatgttgttggaaactc

SEQ ID NO: 14322 - DNA, 37 bp, Artificial Sequence
  primer
gtaaaacgacggccagtctcctggaagccactgtttg

SEQ ID NO: 14323 - DNA, 37 bp, Artificial Sequence
  primer
gtaaaacgacggccagtactccctggaggtgagcttg

SEQ ID NO: 14324 - DNA, 21 bp, Artificial Sequence
  primer
tctgacactcagccactctgc

SEQ ID NO: 14325 - DNA, 40 bp, Artificial Sequence
  primer
gtaaaacgacggccagtccaactgcatatagcttgaaacc

SEQ ID NO: 14326 - DNA, 39 bp, Artificial Sequence
  primer
gtaaaacgacggccagtgcgcgggtgttatgtaagtatc

SEQ ID NO: 14327 - DNA, 38 bp, Artificial Sequence
  primer
gtaaaacgacggccagttttgttagaggcatggttggg

SEQ ID NO: 14328 - DNA, 21 bp, Artificial Sequence
  primer
gttgccttatctcgttagcgg

SEQ ID NO: 14329 - DNA, 37 bp, Artificial Sequence
  primer
gtaaaacgacggccagtggaaaggagccaggtgtagg

SEQ ID NO: 14330 - DNA, 38 bp, Artificial Sequence
  primer
gtaaaacgacggccagtccctttgatagttgtgacgcc

SEQ ID NO: 14331 - DNA, 35 bp, Artificial Sequence
  primer
gtaaaacgacggccagtcgctcgttacgtcatcgg

SEQ ID NO: 14332 - DNA, 40 bp, Artificial Sequence
  primer
gtaaaacgacggccagtttgtccctaaatgaaacacactg

SEQ ID NO: 14333 - DNA, 25 bp, Artificial Sequence
  primer
ttaggtgtgctattagtgtgtggtg

SEQ ID NO: 14334 - DNA, 22 bp, Artificial Sequence
  primer
tcactgtttgatggaaatgtgg

SEQ ID NO: 14335 - DNA, 26 bp, Artificial Sequence
  primer
gcttgaagtatctattaggaggtgaa

SEQ ID NO: 14336 - DNA, 25 bp, Artificial Sequence
  primer
tttgtgtttggcagtttactaagag

SEQ ID NO: 14337 - DNA, 41 bp, Artificial Sequence
  primer
gtaaaacgacggccagttttcttatttggaatggaattgtg

SEQ ID NO: 14338 - DNA, 38 bp, Artificial Sequence
  primer
gtaaaacgacggccagtttctttgatggcacctgtagc

SEQ ID NO: 14339 - DNA, 21 bp, Artificial Sequence
  primer
ctccacctctaccattggagc

SEQ ID NO: 14340 - DNA, 21 bp, Artificial Sequence
  primer
tcacttggattgagcttgtgg

SEQ ID NO: 14341 - DNA, 42 bp, Artificial Sequence
  primer
gtaaaacgacggccagttgtgggtacatttgtattgcttaac

SEQ ID NO: 14342 - DNA, 40 bp, Artificial Sequence
  primer
gtaaaacgacggccagttgtcatcactaccatgcattctg

SEQ ID NO: 14343 - DNA, 21 bp, Artificial Sequence
  primer
tgggtctggatcacactaacc

SEQ ID NO: 14344 - DNA, 37 bp, Artificial Sequence
  primer
gtaaaacgacggccagtctgcatggtaggaaagctgg

SEQ ID NO: 14345 - DNA, 27 bp, Artificial Sequence
  primer
caggctacttatttctagctactttgc

SEQ ID NO: 14346 - DNA, 37 bp, Artificial Sequence
  primer
gtaaaacgacggccagtggcaagctttctgagcactg

SEQ ID NO: 14347 - DNA, 20 bp, Artificial Sequence
  primer
cgcgtagaaacacgtgtgag

SEQ ID NO: 14348 - DNA, 21 bp, Artificial Sequence
  primer
agcaatcagagtgtggcactg

SEQ ID NO: 14349 - DNA, 21 bp, Artificial Sequence
  primer
atgcagtccagctctgtggag

SEQ ID NO: 14350 - DNA, 42 bp, Artificial Sequence
  primer
gtaaaacgacggccagtgctgttgtgaattatgtgagacatc

SEQ ID NO: 14351 - DNA, 38 bp, Artificial Sequence
  primer
gtaaaacgacggccagtcccagaacattccactgtgac

SEQ ID NO: 14352 - DNA, 38 bp, Artificial Sequence
  primer
gtaaaacgacggccagtgattgagaactgtggcgtctg

SEQ ID NO: 14353 - DNA, 38 bp, Artificial Sequence
  primer
gtaaaacgacggccagtgggcaaagtttgttccatctc

SEQ ID NO: 14354 - DNA, 22 bp, Artificial Sequence
  primer
gcagagagaatttcggtctttg

SEQ ID NO: 14355 - DNA, 38 bp, Artificial Sequence
  primer
gtaaaacgacggccagtggctgtgcttaggagttagcg

SEQ ID NO: 14356 - DNA, 21 bp, Artificial Sequence
  primer
ctccgcaatcatcttacttgg

SEQ ID NO: 14357 - DNA, 38 bp, Artificial Sequence
  primer
gtaaaacgacggccagtcttcttcaggattcgggtgtc

SEQ ID NO: 14358 - DNA, 38 bp, Artificial Sequence
  primer
gtaaaacgacggccagtcttgagtgacgttgctggttc

SEQ ID NO: 14359 - DNA, 38 bp, Artificial Sequence
  primer
gtaaaacgacggccagtatggtatcaggcagggaaatg

SEQ ID NO: 14360 - DNA, 38 bp, Artificial Sequence
  primer
gtaaaacgacggccagtcaagcttagaccgtctggtgg

SEQ ID NO: 14361 - DNA, 18 bp, Artificial Sequence
  primer
atacacagggcggcgaga

SEQ ID NO: 14362 - DNA, 38 bp, Artificial Sequence
  primer
gtaaaacgacggccagtcaacctctctgaatggcagtg

SEQ ID NO: 14363 - DNA, 23 bp, Artificial Sequence
  primer
tgagattgggtacttcacctagc

SEQ ID NO: 14364 - DNA, 21 bp, Artificial Sequence
  primer
gtcctgacatgtttgccacag

SEQ ID NO: 14365 - DNA, 21 bp, Artificial Sequence
  primer
actgtcaccatttcttggcac

SEQ ID NO: 14366 - DNA, 38 bp, Artificial Sequence
  primer
gtaaaacgacggccagttaaagttccctggagcattgg

SEQ ID NO: 14367 - DNA, 22 bp, Artificial Sequence
  primer
gacaacagagcgagaacctgtc

SEQ ID NO: 14368 - DNA, 39 bp, Artificial Sequence
  primer
gtaaaacgacggccagtgcctgaccttaccaccacatac

SEQ ID NO: 14369 - DNA, 20 bp, Artificial Sequence
  primer
ctggaagtggtgactcctgg

SEQ ID NO: 14370 - DNA, 38 bp, Artificial Sequence
  primer
gtaaaacgacggccagtttgagaggtttccgtacagcc

SEQ ID NO: 14371 - DNA, 38 bp, Artificial Sequence
  primer
gtaaaacgacggccagtagtagggcagaccttgaatgg

SEQ ID NO: 14372 - DNA, 38 bp, Artificial Sequence
  primer
gtaaaacgacggccagtcagagttggctttgtctgcac

SEQ ID NO: 14373 - DNA, 38 bp, Artificial Sequence
  primer
gtaaaacgacggccagttgtggtgctgtctgctatgtg

SEQ ID NO: 14374 - DNA, 21 bp, Artificial Sequence
  primer
ttgagaaccactgctttaggg

SEQ ID NO: 14375 - DNA, 21 bp, Artificial Sequence
  primer
agcacagtttcttggtcctcc

SEQ ID NO: 14376 - DNA, 38 bp, Artificial Sequence
  primer
gtaaaacgacggccagtgctctttgcaccactcactcc

SEQ ID NO: 14377 - DNA, 38 bp, Artificial Sequence
  primer
gtaaaacgacggccagtacctattggaatggaacgtgg

SEQ ID NO: 14378 - DNA, 21 bp, Artificial Sequence
  primer
gctactcctgtgttcatccgc

SEQ ID NO: 14379 - DNA, 21 bp, Artificial Sequence
  primer
taacgagagactgcttgctgc

SEQ ID NO: 14380 - DNA, 39 bp, Artificial Sequence
  primer
gtaaaacgacggccagtttggaactcctattccttgctt

SEQ ID NO: 14381 - DNA, 19 bp, Artificial Sequence
  primer
agttccctgggttgttccc

SEQ ID NO: 14382 - DNA, 37 bp, Artificial Sequence
  primer
gtaaaacgacggccagtgctgagaaagaagcctgacg

SEQ ID NO: 14383 - DNA, 24 bp, Artificial Sequence
  primer
cattgacactgaacacatttgatg

SEQ ID NO: 14384 - DNA, 37 bp, Artificial Sequence
  primer
gtaaaacgacggccagtggtcttgagttcctgggctc

SEQ ID NO: 14385 - DNA, 38 bp, Artificial Sequence
  primer
gtaaaacgacggccagttggcactgatacacttgcttg

SEQ ID NO: 14386 - DNA, 21 bp, Artificial Sequence
  primer
taacgagacttctgcggattg

SEQ ID NO: 14387 - DNA, 39 bp, Artificial Sequence
  primer
gtaaaacgacggccagttttacaatcagctcctttgcag

SEQ ID NO: 14388 - DNA, 22 bp, Artificial Sequence
  primer
tctgtgtcatgtttgaagacgg

SEQ ID NO: 14389 - DNA, 26 bp, Artificial Sequence
  primer
catctaatacattcttgctgcctatg

SEQ ID NO: 14390 - DNA, 21 bp, Artificial Sequence
  primer
gcctgggagacagagtgagac

SEQ ID NO: 14391 - DNA, 38 bp, Artificial Sequence
  primer
gtaaaacgacggccagtgctcccaaagtcatttggttc

SEQ ID NO: 14392 - DNA, 38 bp, Artificial Sequence
  primer
gtaaaacgacggccagtttcacagacctcagaccatcg

SEQ ID NO: 14393 - DNA, 21 bp, Artificial Sequence
  primer
tttcaatttgcatttccttga

SEQ ID NO: 14394 - DNA, 40 bp, Artificial Sequence
  primer
gtaaaacgacggccagttttgtcccaaattaagcaagact

SEQ ID NO: 14395 - DNA, 44 bp, Artificial Sequence
  primer
gtaaaacgacggccagtgaacttaggattcttcatggcatatta

SEQ ID NO: 14396 - DNA, 39 bp, Artificial Sequence
  primer
gtaaaacgacggccagtgcacatattggaatccttggac

SEQ ID NO: 14397 - DNA, 21 bp, Artificial Sequence
  primer
agatttccgtttgtttctggg

SEQ ID NO: 14398 - DNA, 23 bp, Artificial Sequence
  primer
tcatctgtgaaaggcagattatg

SEQ ID NO: 14399 - DNA, 37 bp, Artificial Sequence
  primer
gtaaaacgacggccagttccgttggcaattcaaagtc

SEQ ID NO: 14400 - DNA, 21 bp, Artificial Sequence
  primer
tgggctagagctcctgatgta

SEQ ID NO: 14401 - DNA, 25 bp, Artificial Sequence
  primer
tttcgtggtgactataaatcattcc

SEQ ID NO: 14402 - DNA, 39 bp, Artificial Sequence
  primer
gtaaaacgacggccagtcttgtccttagggctcatctgc

SEQ ID NO: 14403 - DNA, 25 bp, Artificial Sequence
  primer
tgacttcacataatttggacatcac

SEQ ID NO: 14404 - DNA, 22 bp, Artificial Sequence
  primer
tgctgagaagcatggtttattg

SEQ ID NO: 14405 - DNA, 22 bp, Artificial Sequence
  primer
tgctgtacaaaggaaggaatgg

SEQ ID NO: 14406 - DNA, 43 bp, Artificial Sequence
  primer
gtaaaacgacggccagttggattaatgatcaaagactttcaga

SEQ ID NO: 14407 - DNA, 25 bp, Artificial Sequence
  primer
cagttaagttaaattcaccatggaa

SEQ ID NO: 14408 - DNA, 40 bp, Artificial Sequence
  primer
gtaaaacgacggccagtaaacagcatccatgaagcataaa

SEQ ID NO: 14409 - DNA, 38 bp, Artificial Sequence
  primer
gtaaaacgacggccagtggcaaggcagtactgaggtag

SEQ ID NO: 14410 - DNA, 25 bp, Artificial Sequence
  primer
gagttcaacagtgttagcaaatcaa

SEQ ID NO: 14411 - DNA, 42 bp, Artificial Sequence
  primer
gtaaaacgacggccagttttgccttagaatggttagctttag

SEQ ID NO: 14412 - DNA, 39 bp, Artificial Sequence
  primer
gtaaaacgacggccagttggagcaagactctctgaacaa

SEQ ID NO: 14413 - DNA, 21 bp, Artificial Sequence
  primer
actttgccatgaaacaaatgc

SEQ ID NO: 14414 - DNA, 20 bp, Artificial Sequence
  primer
caacatggcaagaccctgtc

SEQ ID NO: 14415 - DNA, 24 bp, Artificial Sequence
  primer
tggcacactttaatttgttgaaga

SEQ ID NO: 14416 - DNA, 38 bp, Artificial Sequence
  primer
gtaaaacgacggccagtaggaatgaagccacctgtttg

SEQ ID NO: 14417 - DNA, 25 bp, Artificial Sequence
  primer
cagcataaattggtgtttacattca

SEQ ID NO: 14418 - DNA, 43 bp, Artificial Sequence
  primer
gtaaaacgacggccagtcattggaactacttgcaaagtttatg

SEQ ID NO: 14419 - DNA, 21 bp, Artificial Sequence
  primer
aacctgtggctacagagagcc

SEQ ID NO: 14420 - DNA, 44 bp, Artificial Sequence
  primer
gtaaaacgacggccagttctgcctagataaaggtcacatacttt

SEQ ID NO: 14421 - DNA, 27 bp, Artificial Sequence
  primer
ttggtacagggaatgtagaactaagtg

SEQ ID NO: 14422 - DNA, 20 bp, Artificial Sequence
  primer
accttgggcatgggaataac

SEQ ID NO: 14423 - DNA, 21 bp, Artificial Sequence
  primer
atggctcttgatagcattgcc

SEQ ID NO: 14424 - DNA, 21 bp, Artificial Sequence
  primer
ccacagactgctgaacctttg

SEQ ID NO: 14425 - DNA, 27 bp, Artificial Sequence
  primer
tgtttctgttcatagacagtcattctt

SEQ ID NO: 14426 - DNA, 42 bp, Artificial Sequence
  primer
gtaaaacgacggccagtccttcaatgacattctttggttatg

SEQ ID NO: 14427 - DNA, 24 bp, Artificial Sequence
  primer
ttcaagggtcatctgtattaaggg

SEQ ID NO: 14428 - DNA, 39 bp, Artificial Sequence
  primer
gtaaaacgacggccagtttctgagaacattccctgatcc

SEQ ID NO: 14429 - DNA, 38 bp, Artificial Sequence
  primer
gtaaaacgacggccagtcagagctacatggctccttca

SEQ ID NO: 14430 - DNA, 42 bp, Artificial Sequence
  primer
gtaaaacgacggccagtttaccattagcttctcatccttcac

SEQ ID NO: 14431 - DNA, 38 bp, Artificial Sequence
  primer
gtaaaacgacggccagttgttgaatcaatcttgcgagc

SEQ ID NO: 14432 - DNA, 19 bp, Artificial Sequence
  primer
cgtgcggtgtgtgtgtatg

SEQ ID NO: 14433 - DNA, 18 bp, Artificial Sequence
  primer
gcaactgaggcaaggctg

SEQ ID NO: 14434 - DNA, 21 bp, Artificial Sequence
  primer
tttgttcattcctgttggttt

SEQ ID NO: 14435 - DNA, 21 bp, Artificial Sequence
  primer
tggactgtaaggcccagaatc

SEQ ID NO: 14436 - DNA, 21 bp, Artificial Sequence
  primer
aggaatttgcctgtcttcctg

SEQ ID NO: 14437 - DNA, 38 bp, Artificial Sequence
  primer
gtaaaacgacggccagtttgtgtgggaggaagttatgc

SEQ ID NO: 14438 - DNA, 38 bp, Artificial Sequence
  primer
gtaaaacgacggccagtacccttggtcaataccctgaa

SEQ ID NO: 14439 - DNA, 40 bp, Artificial Sequence
  primer
gtaaaacgacggccagtgcatctccaaactggattatgtc

SEQ ID NO: 14440 - DNA, 38 bp, Artificial Sequence
  primer
gtaaaacgacggccagtcccagtatcgaaattgttgga

SEQ ID NO: 14441 - DNA, 20 bp, Artificial Sequence
  primer
tgaaatccattctcatgccc

SEQ ID NO: 14442 - DNA, 21 bp, Artificial Sequence
  primer
agtggttgtgcttgcattagc

SEQ ID NO: 14443 - DNA, 21 bp, Artificial Sequence
  primer
gtatgatcccgcctttcttcc

SEQ ID NO: 14444 - DNA, 20 bp, Artificial Sequence
  primer
tgggcaacagagtaagaccc

SEQ ID NO: 14445 - DNA, 26 bp, Artificial Sequence
  primer
cactttctgtgtacttctttctttgg

SEQ ID NO: 14446 - DNA, 38 bp, Artificial Sequence
  primer
gtaaaacgacggccagtatttgcagtttgcttcctcaa

SEQ ID NO: 14447 - DNA, 38 bp, Artificial Sequence
  primer
gtaaaacgacggccagtaaaggccatttcggtattcag

SEQ ID NO: 14448 - DNA, 21 bp, Artificial Sequence
  primer
acatggcaagactccatctcc

SEQ ID NO: 14449 - DNA, 18 bp, Artificial Sequence
  primer
ccgaaattgtgccactgc

SEQ ID NO: 14450 - DNA, 24 bp, Artificial Sequence
  primer
gactcaagccagttgaatagtctg

SEQ ID NO: 14451 - DNA, 39 bp, Artificial Sequence
  primer
gtaaaacgacggccagtggctttcaccttgctgtgatac

SEQ ID NO: 14452 - DNA, 21 bp, Artificial Sequence
  primer
gggtaccagcattcactttcc

SEQ ID NO: 14453 - DNA, 21 bp, Artificial Sequence
  primer
tgcctgagctgagttatggtg

SEQ ID NO: 14454 - DNA, 21 bp, Artificial Sequence
  primer
aggaacctgggtacagctgag

SEQ ID NO: 14455 - DNA, 23 bp, Artificial Sequence
  primer
caaatcactgtgctctgataggg

SEQ ID NO: 14456 - DNA, 22 bp, Artificial Sequence
  primer
tgtgaacctcaatttcccagtc

SEQ ID NO: 14457 - DNA, 38 bp, Artificial Sequence
  primer
gtaaaacgacggccagttgaaatgagaagcgtgaatcc

SEQ ID NO: 14458 - DNA, 38 bp, Artificial Sequence
  primer
gtaaaacgacggccagttgacaaagcatcagaagggag

SEQ ID NO: 14459 - DNA, 38 bp, Artificial Sequence
  primer
gtaaaacgacggccagttttgaatcagggaggatgagg

SEQ ID NO: 14460 - DNA, 21 bp, Artificial Sequence
  primer
cctcagtggaaggtagcaagc

SEQ ID NO: 14461 - DNA, 20 bp, Artificial Sequence
  primer
ggtcagggtggaaggaagac

SEQ ID NO: 14462 - DNA, 38 bp, Artificial Sequence
  primer
gtaaaacgacggccagttacaggaacacttcaccacgc

SEQ ID NO: 14463 - DNA, 36 bp, Artificial Sequence
  primer
gtaaaacgacggccagtccggaattcccttcaacag

SEQ ID NO: 14464 - DNA, 21 bp, Artificial Sequence
  primer
tcgcttcgtaaattgaaatgg

SEQ ID NO: 14465 - DNA, 38 bp, Artificial Sequence
  primer
gtaaaacgacggccagttggcttatcaatctttcaccc

SEQ ID NO: 14466 - DNA, 41 bp, Artificial Sequence
  primer
gtaaaacgacggccagtgacgtacaagcattactgatcctg

SEQ ID NO: 14467 - DNA, 28 bp, Artificial Sequence
  primer
caatttcataagagtaagagggtacaga

SEQ ID NO: 14468 - DNA, 23 bp, Artificial Sequence
  primer
tttcgcctctaagcattacattt

SEQ ID NO: 14469 - DNA, 26 bp, Artificial Sequence
  primer
tgaatacttggacacaagtgaataaa

SEQ ID NO: 14470 - DNA, 21 bp, Artificial Sequence
  primer
tgccttatgcatgttgtgaac

SEQ ID NO: 14471 - DNA, 21 bp, Artificial Sequence
  primer
agcacctaacctggcacatac

SEQ ID NO: 14472 - DNA, 21 bp, Artificial Sequence
  primer
ccacaattccagggaaacctc

SEQ ID NO: 14473 - DNA, 39 bp, Artificial Sequence
  primer
gtaaaacgacggccagttttaattcggccaatgatgttt

SEQ ID NO: 14474 - DNA, 41 bp, Artificial Sequence
  primer
gtaaaacgacggccagtgaaattgaaggtcatttctttggt

SEQ ID NO: 14475 - DNA, 43 bp, Artificial Sequence
  primer
gtaaaacgacggccagttctgattcagttgaattgtatttgga

SEQ ID NO: 14476 - DNA, 39 bp, Artificial Sequence
  primer
gtaaaacgacggccagtaagttgggatgttctgctttca

SEQ ID NO: 14477 - DNA, 24 bp, Artificial Sequence
  primer
aaactcattagaaaggcagcttta

SEQ ID NO: 14478 - DNA, 37 bp, Artificial Sequence
  primer
gtaaaacgacggccagtacatgccctgaacagcaaag

SEQ ID NO: 14479 - DNA, 27 bp, Artificial Sequence
  primer
tttgcattaactatagatgacctttca

SEQ ID NO: 14480 - DNA, 21 bp, Artificial Sequence
  primer
acttggaagatgctctttggg

SEQ ID NO: 14481 - DNA, 22 bp, Artificial Sequence
  primer
ttggatggcaagaggaagttac

SEQ ID NO: 14482 - DNA, 25 bp, Artificial Sequence
  primer
aattcaaatttcaaacacatctttc

SEQ ID NO: 14483 - DNA, 40 bp, Artificial Sequence
  primer
gtaaaacgacggccagttttgttgattgaggacaaagatt

SEQ ID NO: 14484 - DNA, 25 bp, Artificial Sequence
  primer
tgaggaacttgatatctacctttga

SEQ ID NO: 14485 - DNA, 42 bp, Artificial Sequence
  primer
gtaaaacgacggccagttttccattatatttatggcaaactt

SEQ ID NO: 14486 - DNA, 21 bp, Artificial Sequence
  primer
tgaaactcttagcgtgcatcc

SEQ ID NO: 14487 - DNA, 24 bp, Artificial Sequence
  primer
ttctgttgcttcataagaccaatg

SEQ ID NO: 14488 - DNA, 38 bp, Artificial Sequence
  primer
gtaaaacgacggccagttctgtggacatacagccaagg

SEQ ID NO: 14489 - DNA, 39 bp, Artificial Sequence
  primer
gtaaaacgacggccagttggtgtgtcctgaacaactagg

SEQ ID NO: 14490 - DNA, 38 bp, Artificial Sequence
  primer
gtaaaacgacggccagtttccattaacagccaaacgtg

SEQ ID NO: 14491 - DNA, 21 bp, Artificial Sequence
  primer
ggttatgcagcatcaaattgc

SEQ ID NO: 14492 - DNA, 21 bp, Artificial Sequence
  primer
gattataggtgtgagccaccg

SEQ ID NO: 14493 - DNA, 38 bp, Artificial Sequence
  primer
gtaaaacgacggccagtgattcctcatgaagagcctgg

SEQ ID NO: 14494 - DNA, 21 bp, Artificial Sequence
  primer
ggagcttggtttacaacaggg

SEQ ID NO: 14495 - DNA, 21 bp, Artificial Sequence
  primer
gaacctatgccagcttcatcc

SEQ ID NO: 14496 - DNA, 21 bp, Artificial Sequence
  primer
cagcagaaccagtacgtccac

SEQ ID NO: 14497 - DNA, 38 bp, Artificial Sequence
  primer
gtaaaacgacggccagtgaggtcctgaacggtgagatg

SEQ ID NO: 14498 - DNA, 38 bp, Artificial Sequence
  primer
gtaaaacgacggccagttacagcagtcgtgatccttcg

SEQ ID NO: 14499 - DNA, 21 bp, Artificial Sequence
  primer
cttctacgcagggactcaacc

SEQ ID NO: 14500 - DNA, 21 bp, Artificial Sequence
  primer
agcgagaacttcaaccctgag

SEQ ID NO: 14501 - DNA, 38 bp, Artificial Sequence
  primer
gtaaaacgacggccagttttcactggcttctgcctatg

SEQ ID NO: 14502 - DNA, 38 bp, Artificial Sequence
  primer
gtaaaacgacggccagtgatttgccgtgttccaaactc

SEQ ID NO: 14503 - DNA, 36 bp, Artificial Sequence
  primer
gtaaaacgacggccagtggttagggctgtgtagggc

SEQ ID NO: 14504 - DNA, 23 bp, Artificial Sequence
  primer
cagataaacgtagcgtacctccc

SEQ ID NO: 14505 - DNA, 22 bp, Artificial Sequence
  primer
tgtcagatttctcagctctccc

SEQ ID NO: 14506 - DNA, 22 bp, Artificial Sequence
  primer
cccaaagtgaacttgtggagac

SEQ ID NO: 14507 - DNA, 23 bp, Artificial Sequence
  primer
gcatgtagtgaatttgacaatgg

SEQ ID NO: 14508 - DNA, 42 bp, Artificial Sequence
  primer
gtaaaacgacggccagttggtgcctataaagtagataagggc

SEQ ID NO: 14509 - DNA, 20 bp, Artificial Sequence
  primer
ttctgtggccaagacacatc

SEQ ID NO: 14510 - DNA, 39 bp, Artificial Sequence
  primer
gtaaaacgacggccagttggcagatgtctgctgttagtg

SEQ ID NO: 14511 - DNA, 42 bp, Artificial Sequence
  primer
gtaaaacgacggccagtaagctttctgtgctctacctttagc

SEQ ID NO: 14512 - DNA, 23 bp, Artificial Sequence
  primer
ggagtttatcctggtgaacaatg

SEQ ID NO: 14513 - DNA, 21 bp, Artificial Sequence
  primer
tggatgttccgtgtttctgtg

SEQ ID NO: 14514 - DNA, 21 bp, Artificial Sequence
  primer
accactgaccaaagttctggg

SEQ ID NO: 14515 - DNA, 38 bp, Artificial Sequence
  primer
gtaaaacgacggccagttccgacttccggtaaagagtc

SEQ ID NO: 14516 - DNA, 35 bp, Artificial Sequence
  primer
gtaaaacgacggccagtttggtagcaacggcaacg

SEQ ID NO: 14517 - DNA, 19 bp, Artificial Sequence
  primer
cctcaccatgtcgctgaag

SEQ ID NO: 14518 - DNA, 38 bp, Artificial Sequence
  primer
gtaaaacgacggccagttacctgttgtgggtctccagg

SEQ ID NO: 14519 - DNA, 25 bp, Artificial Sequence
  primer
caaatgtaaatacaggctgagcatc

SEQ ID NO: 14520 - DNA, 40 bp, Artificial Sequence
  primer
gtaaaacgacggccagtgggtcagaaatgtttgacttcag

SEQ ID NO: 14521 - DNA, 42 bp, Artificial Sequence
  primer
gtaaaacgacggccagtgaactggtaccttgatgagctaaag

SEQ ID NO: 14522 - DNA, 23 bp, Artificial Sequence
  primer
ttggtaattcacgtgtgtgagtg

SEQ ID NO: 14523 - DNA, 38 bp, Artificial Sequence
  primer
gtaaaacgacggccagtgagaaccctgatctgaaggct

SEQ ID NO: 14524 - DNA, 21 bp, Artificial Sequence
  primer
gggcagagattatggtgaaca

SEQ ID NO: 14525 - DNA, 21 bp, Artificial Sequence
  primer
atctgggagtgaggcagtttg

SEQ ID NO: 14526 - DNA, 21 bp, Artificial Sequence
  primer
caaatgactgtcctcaaaggg

SEQ ID NO: 14527 - DNA, 38 bp, Artificial Sequence
  primer
gtaaaacgacggccagtgtgtgtgcatgtgtgtgtgaa

SEQ ID NO: 14528 - DNA, 37 bp, Artificial Sequence
  primer
gtaaaacgacggccagtcttcagagaagcctgaagcc

SEQ ID NO: 14529 - DNA, 24 bp, Artificial Sequence
  primer
cattcctgggtgtcaaatacctac

SEQ ID NO: 14530 - DNA, 40 bp, Artificial Sequence
  primer
gtaaaacgacggccagttgtctaatttcatgcccatacag

SEQ ID NO: 14531 - DNA, 38 bp, Artificial Sequence
  primer
gtaaaacgacggccagtttacgtagcttgtgctcatgg

SEQ ID NO: 14532 - DNA, 22 bp, Artificial Sequence
  primer
tttaagggattaaggaatgggc

SEQ ID NO: 14533 - DNA, 43 bp, Artificial Sequence
  primer
gtaaaacgacggccagtaaagggacatagttaaagcaagtaaa

SEQ ID NO: 14534 - DNA, 21 bp, Artificial Sequence
  primer
atcaggaaaccttctcatgcc

SEQ ID NO: 14535 - DNA, 38 bp, Artificial Sequence
  primer
gtaaaacgacggccagtcatcagagacgcagattcagg

SEQ ID NO: 14536 - DNA, 38 bp, Artificial Sequence
  primer
gtaaaacgacggccagtggaaatctggaaaccatggag

SEQ ID NO: 14537 - DNA, 38 bp, Artificial Sequence
  primer
gtaaaacgacggccagttcagcatgacaacttgacacc

SEQ ID NO: 14538 - DNA, 38 bp, Artificial Sequence
  primer
gtaaaacgacggccagttggtagtggcgtgagttatgc

SEQ ID NO: 14539 - DNA, 38 bp, Artificial Sequence
  primer
gtaaaacgacggccagtccagtgaccctcatcataggc

SEQ ID NO: 14540 - DNA, 37 bp, Artificial Sequence
  primer
gtaaaacgacggccagtgcccagtgaaaggaacacag

SEQ ID NO: 14541 - DNA, 38 bp, Artificial Sequence
  primer
gtaaaacgacggccagttgctgcagagacactaggctg

SEQ ID NO: 14542 - DNA, 20 bp, Artificial Sequence
  primer
ccgacttgattctctcccac

SEQ ID NO: 14543 - DNA, 21 bp, Artificial Sequence
  primer
tgctccctaactctggctctc

SEQ ID NO: 14544 - DNA, 21 bp, Artificial Sequence
  primer
tgctccctaactctggctctc

SEQ ID NO: 14545 - DNA, 38 bp, Artificial Sequence
  primer
gtaaaacgacggccagtatttggcatggaagagctgag

SEQ ID NO: 14546 - DNA, 21 bp, Artificial Sequence
  primer
ttggaggttgaggctacagtg

SEQ ID NO: 14547 - DNA, 21 bp, Artificial Sequence
  primer
atgtactcaggagggctgtgg

SEQ ID NO: 14548 - DNA, 39 bp, Artificial Sequence
  primer
gtaaaacgacggccagtaaggcgtctacaacaattccag

SEQ ID NO: 14549 - DNA, 39 bp, Artificial Sequence
  primer
gtaaaacgacggccagtgggaagggtaagagaaatccag

SEQ ID NO: 14550 - DNA, 37 bp, Artificial Sequence
  primer
gtaaaacgacggccagtatcctaacacacgggcacac

SEQ ID NO: 14551 - DNA, 38 bp, Artificial Sequence
  primer
gtaaaacgacggccagttacaggtttcagccactgtgc

SEQ ID NO: 14552 - DNA, 21 bp, Artificial Sequence
  primer
cgttacccagatgttgaaggg

SEQ ID NO: 14553 - DNA, 20 bp, Artificial Sequence
  primer
cttcaagtgggatggtgctg

SEQ ID NO: 14554 - DNA, 21 bp, Artificial Sequence
  primer
gcatcggtgggaatgtaatag

SEQ ID NO: 14555 - DNA, 21 bp, Artificial Sequence
  primer
ctgcttgtgttacctgccttg

SEQ ID NO: 14556 - DNA, 38 bp, Artificial Sequence
  primer
gtaaaacgacggccagtccagcttctccaaagatctcc

SEQ ID NO: 14557 - DNA, 38 bp, Artificial Sequence
  primer
gtaaaacgacggccagttgttggaattcagaggcaaac

SEQ ID NO: 14558 - DNA, 21 bp, Artificial Sequence
  primer
ggttcgtagatgaggcaaagg

SEQ ID NO: 14559 - DNA, 21 bp, Artificial Sequence
  primer
ggcctcatcaagggagaagac

SEQ ID NO: 14560 - DNA, 38 bp, Artificial Sequence
  primer
gtaaaacgacggccagttttggtatgcagcatttcacg

SEQ ID NO: 14561 - DNA, 38 bp, Artificial Sequence
  primer
gtaaaacgacggccagtgctgtgcaggtatgcagagag

SEQ ID NO: 14562 - DNA, 38 bp, Artificial Sequence
  primer
gtaaaacgacggccagttgtatccaattcagtgcctgg

SEQ ID NO: 14563 - DNA, 21 bp, Artificial Sequence
  primer
atagggtgattgtgaggaggc

SEQ ID NO: 14564 - DNA, 38 bp, Artificial Sequence
  primer
gtaaaacgacggccagtccaagccctttatggtgagtc

SEQ ID NO: 14565 - DNA, 21 bp, Artificial Sequence
  primer
atttctgagtggcgaggactg

SEQ ID NO: 14566 - DNA, 21 bp, Artificial Sequence
  primer
tgctccctaactctggctctc

SEQ ID NO: 14567 - DNA, 38 bp, Artificial Sequence
  primer
gtaaaacgacggccagtagtgagggctctggcttactg

SEQ ID NO: 14568 - DNA, 37 bp, Artificial Sequence
  primer
gtaaaacgacggccagtatcctcacgggtgattggtc

SEQ ID NO: 14569 - DNA, 38 bp, Artificial Sequence
  primer
gtaaaacgacggccagttgggtgaaagagtgagactcc

SEQ ID NO: 14570 - DNA, 38 bp, Artificial Sequence
  primer
gtaaaacgacggccagtttatgatccacctgtcttggc

SEQ ID NO: 14571 - DNA, 18 bp, Artificial Sequence
  primer
tggtggcgtgtgcttgta

SEQ ID NO: 14572 - DNA, 38 bp, Artificial Sequence
  primer
gtaaaacgacggccagtttgtggcacagcatcactaag

SEQ ID NO: 14573 - DNA, 26 bp, Artificial Sequence
  primer
gctttgatgggttgtatctattctta

SEQ ID NO: 14574 - DNA, 21 bp, Artificial Sequence
  primer
aatgagacggctcttccagtc

SEQ ID NO: 14575 - DNA, 41 bp, Artificial Sequence
  primer
gtaaaacgacggccagtttagttggattcaaattgcaacac

SEQ ID NO: 14576 - DNA, 35 bp, Artificial Sequence
  primer
gtaaaacgacggccagtatgtgtgagccaccacgc

SEQ ID NO: 14577 - DNA, 24 bp, Artificial Sequence
  primer
atcagactaactgctcttgcattc

SEQ ID NO: 14578 - DNA, 22 bp, Artificial Sequence
  primer
ggcaatggaatggttgtgtatc

SEQ ID NO: 14579 - DNA, 21 bp, Artificial Sequence
  primer
atgctatcgtttgctgggttg

SEQ ID NO: 14580 - DNA, 39 bp, Artificial Sequence
  primer
gtaaaacgacggccagtcacatcagttcatttgtcctgg

SEQ ID NO: 14581 - DNA, 24 bp, Artificial Sequence
  primer
aacataccttcacttaacgacacg

SEQ ID NO: 14582 - DNA, 38 bp, Artificial Sequence
  primer
gtaaaacgacggccagtctatcctcatccctctggctc

SEQ ID NO: 14583 - DNA, 21 bp, Artificial Sequence
  primer
gatgttgctgctttgttgcag

SEQ ID NO: 14584 - DNA, 23 bp, Artificial Sequence
  primer
ttgcttatttattgggagtggtg

SEQ ID NO: 14585 - DNA, 38 bp, Artificial Sequence
  primer
gtaaaacgacggccagtaggttcctttactcccaagcc

SEQ ID NO: 14586 - DNA, 38 bp, Artificial Sequence
  primer
gtaaaacgacggccagttccggtactcagaggcagttc

SEQ ID NO: 14587 - DNA, 38 bp, Artificial Sequence
  primer
gtaaaacgacggccagtggagagaggtgacaggattgg

SEQ ID NO: 14588 - DNA, 38 bp, Artificial Sequence
  primer
gtaaaacgacggccagttaccagctcatggaaccacac

SEQ ID NO: 14589 - DNA, 20 bp, Artificial Sequence
  primer
ctcactctgggcctccctac

SEQ ID NO: 14590 - DNA, 21 bp, Artificial Sequence
  primer
tccaatgaactgcctgtcaac

SEQ ID NO: 14591 - DNA, 21 bp, Artificial Sequence
  primer
tttagtagcgtgcagcctttg

SEQ ID NO: 14592 - DNA, 19 bp, Artificial Sequence
  primer
aaagactgcgctggaaagg

SEQ ID NO: 14593 - DNA, 38 bp, Artificial Sequence
  primer
gtaaaacgacggccagttctctggtaaggagaggctgg

SEQ ID NO: 14594 - DNA, 38 bp, Artificial Sequence
  primer
gtaaaacgacggccagtggagcttgttatatcagcggg

SEQ ID NO: 14595 - DNA, 21 bp, Artificial Sequence
  primer
atgggaaggaggcatgtttac

SEQ ID NO: 14596 - DNA, 21 bp, Artificial Sequence
  primer
gagaagatgtccagtctcccg

SEQ ID NO: 14597 - DNA, 38 bp, Artificial Sequence
  primer
gtaaaacgacggccagttgggatagggatggttctcac

SEQ ID NO: 14598 - DNA, 21 bp, Artificial Sequence
  primer
ctgcaaatatgcccacctctc

SEQ ID NO: 14599 - DNA, 38 bp, Artificial Sequence
  primer
gtaaaacgacggccagttcccttccctctgtcctcttc

SEQ ID NO: 14600 - DNA, 38 bp, Artificial Sequence
  primer
gtaaaacgacggccagtcggtaaggacctggaataggg

SEQ ID NO: 14601 - DNA, 38 bp, Artificial Sequence
  primer
gtaaaacgacggccagtctgctgaccatttctaggtgg

SEQ ID NO: 14602 - DNA, 35 bp, Artificial Sequence
  primer
gtaaaacgacggccagtctcctccgctccctctcc

SEQ ID NO: 14603 - DNA, 39 bp, Artificial Sequence
  primer
gtaaaacgacggccagtgcaaataaacactctccctccc

SEQ ID NO: 14604 - DNA, 21 bp, Artificial Sequence
  primer
ttattgcctttctgcgtgttg

SEQ ID NO: 14605 - DNA, 38 bp, Artificial Sequence
  primer
gtaaaacgacggccagtgacgcatttaagcaaccagtg

SEQ ID NO: 14606 - DNA, 20 bp, Artificial Sequence
  primer
atccaatctcgcttggagaa

SEQ ID NO: 14607 - DNA, 38 bp, Artificial Sequence
  primer
gtaaaacgacggccagtagatcgattgaagggaacgtg

SEQ ID NO: 14608 - DNA, 22 bp, Artificial Sequence
  primer
ttgtggtgcttggaataaacag

SEQ ID NO: 14609 - DNA, 38 bp, Artificial Sequence
  primer
gtaaaacgacggccagtttgaacatggtcattgggaag

SEQ ID NO: 14610 - DNA, 24 bp, Artificial Sequence
  primer
cccatttaaagcataaattcacag

SEQ ID NO: 14611 - DNA, 22 bp, Artificial Sequence
  primer
tggagttacagtcctggtcttg

SEQ ID NO: 14612 - DNA, 23 bp, Artificial Sequence
  primer
aacatataaacttctggccctgg

SEQ ID NO: 14613 - DNA, 38 bp, Artificial Sequence
  primer
gtaaaacgacggccagtatgtggttgttgcagttgctc

SEQ ID NO: 14614 - DNA, 38 bp, Artificial Sequence
  primer
gtaaaacgacggccagtcaggaagcctggttctgtgtc

SEQ ID NO: 14615 - DNA, 40 bp, Artificial Sequence
  primer
gtaaaacgacggccagtgaggaccacttggagtaagaagg

SEQ ID NO: 14616 - DNA, 18 bp, Artificial Sequence
  primer
acgcgagttgtgagacgg

SEQ ID NO: 14617 - DNA, 38 bp, Artificial Sequence
  primer
gtaaaacgacggccagtagcagttatggagcttccctc

SEQ ID NO: 14618 - DNA, 19 bp, Artificial Sequence
  primer
gttctgcctcctcgtcctg

SEQ ID NO: 14619 - DNA, 22 bp, Artificial Sequence
  primer
tggaggatactgagccttaccc

SEQ ID NO: 14620 - DNA, 38 bp, Artificial Sequence
  primer
gtaaaacgacggccagtactttcttcggcccttagacc

SEQ ID NO: 14621 - DNA, 38 bp, Artificial Sequence
  primer
gtaaaacgacggccagtgttgaacagggaatctctggg

SEQ ID NO: 14622 - DNA, 38 bp, Artificial Sequence
  primer
gtaaaacgacggccagtgcaaagaggtaccaaagtggg

SEQ ID NO: 14623 - DNA, 38 bp, Artificial Sequence
  primer
gtaaaacgacggccagtctccgtgtacaacaggtggtc

SEQ ID NO: 14624 - DNA, 21 bp, Artificial Sequence
  primer
acaaagcagagcacatgaagc

SEQ ID NO: 14625 - DNA, 38 bp, Artificial Sequence
  primer
gtaaaacgacggccagttccagagagacctgggtatgg

SEQ ID NO: 14626 - DNA, 21 bp, Artificial Sequence
  primer
ttcatgcctgaagacatcacc

SEQ ID NO: 14627 - DNA, 21 bp, Artificial Sequence
  primer
gtagatcagagggtccgttgg

SEQ ID NO: 14628 - DNA, 38 bp, Artificial Sequence
  primer
gtaaaacgacggccagtatactgcttgcagcacattcc

SEQ ID NO: 14629 - DNA, 21 bp, Artificial Sequence
  primer
aatgtccagcccacaggtaac

SEQ ID NO: 14630 - DNA, 20 bp, Artificial Sequence
  primer
acaggatgggatgaggaagc

SEQ ID NO: 14631 - DNA, 38 bp, Artificial Sequence
  primer
gtaaaacgacggccagtgaaatctgcctccagtttccc

SEQ ID NO: 14632 - DNA, 35 bp, Artificial Sequence
  primer
gtaaaacgacggccagtgaggctgagggtgtgctg

SEQ ID NO: 14633 - DNA, 36 bp, Artificial Sequence
  primer
gtaaaacgacggccagtcctggtacatcccgtggtc

SEQ ID NO: 14634 - DNA, 38 bp, Artificial Sequence
  primer
gtaaaacgacggccagttgcatggccctaagtaactcc

SEQ ID NO: 14635 - DNA, 20 bp, Artificial Sequence
  primer
aggacgagcaggattggaag

SEQ ID NO: 14636 - DNA, 38 bp, Artificial Sequence
  primer
gtaaaacgacggccagtctctgtctccttccttctcgg

SEQ ID NO: 14637 - DNA, 37 bp, Artificial Sequence
  primer
gtaaaacgacggccagtcacctctcgctccctattcc

SEQ ID NO: 14638 - DNA, 37 bp, Artificial Sequence; identical to SEQ ID NO: 14637
  primer

SEQ ID NO: 14639 - DNA, 21 bp, Artificial Sequence
  primer
cggcagaggaaggatacaatg

SEQ ID NO: 14640 - DNA, 21 bp, Artificial Sequence
  primer
cctcacttgctcccagatagg

SEQ ID NO: 14641 - DNA, 41 bp, Artificial Sequence
  primer
gtaaaacgacggccagtaattcatggtaagtgttccacctc

SEQ ID NO: 14642 - DNA, 38 bp, Artificial Sequence
  primer
gtaaaacgacggccagtcacatctcaatgaaagctggg

SEQ ID NO: 14643 - DNA, 38 bp, Artificial Sequence
  primer
gtaaaacgacggccagtggctcaaagaagagggaggac

SEQ ID NO: 14644 - DNA, 36 bp, Artificial Sequence
  primer
gtaaaacgacggccagtgagggctcggtgtcaattt

SEQ ID NO: 14645 - DNA, 38 bp, Artificial Sequence
  primer
gtaaaacgacggccagttgatggcattaaggattcagg

SEQ ID NO: 14646 - DNA, 37 bp, Artificial Sequence
  primer
gtaaaacgacggccagtcctacctctgcctccgaaag

SEQ ID NO: 14647 - DNA, 38 bp, Artificial Sequence
  primer
gtaaaacgacggccagtaagggctggtaatgagctgtg

SEQ ID NO: 14648 - DNA, 38 bp, Artificial Sequence
  primer
gtaaaacgacggccagtgagccacagagtacaggcatc

SEQ ID NO: 14649 - DNA, 19 bp, Artificial Sequence
  primer
cttccctgctaggctttcg

SEQ ID NO: 14650 - DNA, 21 bp, Artificial Sequence
  primer
tcctgttgctggagttgtgtg

SEQ ID NO: 14651 - DNA, 21 bp, Artificial Sequence
  primer
aagagccaatctttgagcctg

SEQ ID NO: 14652 - DNA, 22 bp, Artificial Sequence
  primer
gagactgtggtgagggtttagg

SEQ ID NO: 14653 - DNA, 19 bp, Artificial Sequence
  primer
cctccacaggaaggcagtc

SEQ ID NO: 14654 - DNA, 38 bp, Artificial Sequence
  primer
gtaaaacgacggccagttgacagggaagctttgtaggg

SEQ ID NO: 14655 - DNA, 38 bp, Artificial Sequence
  primer
gtaaaacgacggccagtctgagattacgtggcttgctc

SEQ ID NO: 14656 - DNA, 37 bp, Artificial Sequence
  primer
gtaaaacgacggccagtaagagcatgtgtggtccctg

SEQ ID NO: 14657 - DNA, 38 bp, Artificial Sequence
  primer
gtaaaacgacggccagttcagcgtagatgtaccaaggc

SEQ ID NO: 14658 - DNA, 38 bp, Artificial Sequence
  primer
gtaaaacgacggccagtactgatggaaggcacttggag

SEQ ID NO: 14659 - DNA, 38 bp, Artificial Sequence
  primer
gtaaaacgacggccagtagtctccagctccagctcttc

SEQ ID NO: 14660 - DNA, 38 bp, Artificial Sequence
  primer
gtaaaacgacggccagtgtggacttcagccatgacctc

SEQ ID NO: 14661 - DNA, 38 bp, Artificial Sequence
  primer
gtaaaacgacggccagtaacccagtgcctaaatccaag

SEQ ID NO: 14662 - DNA, 27 bp, Artificial Sequence
  primer
tctaatgaatttgttaatctcctttcc

SEQ ID NO: 14663 - DNA, 38 bp, Artificial Sequence
  primer
gtaaaacgacggccagttcttcacaccaccatttcacc

SEQ ID NO: 14664 - DNA, 21 bp, Artificial Sequence
  primer
gagagggagagagaccactcg

SEQ ID NO: 14665 - DNA, 36 bp, Artificial Sequence
  primer
gtaaaacgacggccagtctcccaactcctcgtccag

SEQ ID NO: 14666 - DNA, 21 bp, Artificial Sequence
  primer
gggatccttaccgagaacttg

SEQ ID NO: 14667 - DNA, 21 bp, Artificial Sequence
  primer
gcttgcacatgctcagagaag

SEQ ID NO: 14668 - DNA, 18 bp, Artificial Sequence
  primer
caccacttccagctccca

SEQ ID NO: 14669 - DNA, 39 bp, Artificial Sequence
  primer
gtaaaacgacggccagtttcagacagcttggtctattgc

SEQ ID NO: 14670 - DNA, 21 bp, Artificial Sequence
  primer
ttatccttgcctctccctttg

SEQ ID NO: 14671 - DNA, 21 bp, Artificial Sequence
  primer
ttgctctgacagtgtgagctg

SEQ ID NO: 14672 - DNA, 21 bp, Artificial Sequence
  primer
aagcccaatatggcaagactc

SEQ ID NO: 14673 - DNA, 22 bp, Artificial Sequence
  primer
aagagcaaatcctctacccagc

SEQ ID NO: 14674 - DNA, 38 bp, Artificial Sequence
  primer
gtaaaacgacggccagtatcattgtgaaatggtgcagg

SEQ ID NO: 14675 - DNA, 21 bp, Artificial Sequence
  primer
agagctcacagaagccagagg

SEQ ID NO: 14676 - DNA, 20 bp, Artificial Sequence
  primer
cacatgtgctgcattctccc

SEQ ID NO: 14677 - DNA, 38 bp, Artificial Sequence
  primer
gtaaaacgacggccagtacatgagtgaggctgcatctg

SEQ ID NO: 14678 - DNA, 38 bp, Artificial Sequence
  primer
gtaaaacgacggccagttagtcctgcacactctctgcc

SEQ ID NO: 14679 - DNA, 38 bp, Artificial Sequence
  primer
gtaaaacgacggccagttcctgtgtctgggatctaggc

SEQ ID NO: 14680 - DNA, 38 bp, Artificial Sequence
  primer
gtaaaacgacggccagttctgcacattcctgtcctcac

SEQ ID NO: 14681 - DNA, 38 bp, Artificial Sequence
  primer
gtaaaacgacggccagtgtttgggtggacttagcttgg

SEQ ID NO: 14682 - DNA, 38 bp, Artificial Sequence
  primer
gtaaaacgacggccagtttgactctgactcccagaggg

SEQ ID NO: 14683 - DNA, 21 bp, Artificial Sequence
  primer
caagcagctgttccagaagtg

SEQ ID NO: 14684 - DNA, 21 bp, Artificial Sequence
  primer
gtaaacgtcagcacctttccc

SEQ ID NO: 14685 - DNA, 38 bp, Artificial Sequence
  primer
gtaaaacgacggccagtgctttggatcctgatgtgtcc

SEQ ID NO: 14686 - DNA, 21 bp, Artificial Sequence
  primer
tcccacaacagctcctctagc

SEQ ID NO: 14687 - DNA, 38 bp, Artificial Sequence
  primer
gtaaaacgacggccagtgtagctgatcctggcacactg

SEQ ID NO: 14688 - DNA, 38 bp, Artificial Sequence
  primer
gtaaaacgacggccagtaaggtatgggaacacagcctc

SEQ ID NO: 14689 - DNA, 38 bp, Artificial Sequence
  primer
gtaaaacgacggccagtttctgaggctgtgaattgctc

SEQ ID NO: 14690 - DNA, 23 bp, Artificial Sequence
  primer
cacagaccagacctaagatgtcc

SEQ ID NO: 14691 - DNA, 38 bp, Artificial Sequence
  primer
gtaaaacgacggccagtcagagggtgaagtggcataag

SEQ ID NO: 14692 - DNA, 21 bp, Artificial Sequence
  primer
ccacctagaactccctcttgc

SEQ ID NO: 14693 - DNA, 21 bp, Artificial Sequence
  primer
cacctgcggacataaataggc

SEQ ID NO: 14694 - DNA, 19 bp, Artificial Sequence
  primer
aagaaaccaaggtgccgag

SEQ ID NO: 14695 - DNA, 38 bp, Artificial Sequence
  primer
gtaaaacgacggccagtaggaggagaactacctgccgt

SEQ ID NO: 14696 - DNA, 37 bp, Artificial Sequence
  primer
gtaaaacgacggccagtcctaggattagccaggaccc

SEQ ID NO: 14697 - DNA, 38 bp, Artificial Sequence
  primer
gtaaaacgacggccagtctgatctggtccaaccctttc

SEQ ID NO: 14698 - DNA, 38 bp, Artificial Sequence
  primer
gtaaaacgacggccagtacttgagttgggaacccagtg

SEQ ID NO: 14699 - DNA, 21 bp, Artificial Sequence
  primer
taggagctgcatggacagatg

SEQ ID NO: 14700 - DNA, 36 bp, Artificial Sequence
  primer
gtaaaacgacggccagtcaggtgttcggcatgtttg

SEQ ID NO: 14701 - DNA, 38 bp, Artificial Sequence
  primer
gtaaaacgacggccagtccatgatcgaggtgaacaatg

SEQ ID NO: 14702 - DNA, 22 bp, Artificial Sequence
  primer
cccatttccctgattgataaac

SEQ ID NO: 14703 - DNA, 21 bp, Artificial Sequence
  primer
aacctctccacttgcatccac

SEQ ID NO: 14704 - DNA, 21 bp, Artificial Sequence
  primer
acctgttcgtgctgcacttag

SEQ ID NO: 14705 - DNA, 38 bp, Artificial Sequence
  primer
gtaaaacgacggccagtagcatgtttgcctccacctac

SEQ ID NO: 14706 - DNA, 21 bp, Artificial Sequence
  primer
accctggctatcttcgttctg

SEQ ID NO: 14707 - DNA, 38 bp, Artificial Sequence
  primer
gtaaaacgacggccagtcatctgttcctcatctgtggg

SEQ ID NO: 14708 - DNA, 21 bp, Artificial Sequence
  primer
catccctctcaatcttccctg

SEQ ID NO: 14709 - DNA, 38 bp, Artificial Sequence
  primer
gtaaaacgacggccagttccctcataacatggctttcc

SEQ ID NO: 14710 - DNA, 38 bp, Artificial Sequence
  primer
gtaaaacgacggccagtcatagtctttgtggctgtggc

SEQ ID NO: 14711 - DNA, 20 bp, Artificial Sequence
  primer
cttctcgctccttctcagcc

SEQ ID NO: 14712 - DNA, 21 bp, Artificial Sequence
  primer
acctatgtcacctggattgcc

SEQ ID NO: 14713 - DNA, 38 bp, Artificial Sequence
  primer
gtaaaacgacggccagttgtggtcgtctatgtgctgtg

SEQ ID NO: 14714 - DNA, 38 bp, Artificial Sequence
  primer
gtaaaacgacggccagtttcttgctttgagtttgagcg

SEQ ID NO: 14715 - DNA, 21 bp, Artificial Sequence
  primer
agcaagtttcaccgaagatgc

SEQ ID NO: 14716 - DNA, 21 bp, Artificial Sequence
  primer
gaggagaagaggctgaagctg

SEQ ID NO: 14717 - DNA, 21 bp, Artificial Sequence
  primer
gaaatccaggccactatggag

SEQ ID NO: 14718 - DNA, 38 bp, Artificial Sequence
  primer
gtaaaacgacggccagtgaggacaggtggagatgttgg

SEQ ID NO: 14719 - DNA, 21 bp, Artificial Sequence
  primer
cacaggtgtcctcatcattgc

SEQ ID NO: 14720 - DNA, 38 bp, Artificial Sequence
  primer
gtaaaacgacggccagtagatagcacacgctctttccc

SEQ ID NO: 14721 - DNA, 38 bp, Artificial Sequence
  primer
gtaaaacgacggccagttctccgctccttctgtctatg

SEQ ID NO: 14722 - DNA, 20 bp, Artificial Sequence
  primer
cacacgaggagaaccctgag

SEQ ID NO: 14723 - DNA, 38 bp, Artificial Sequence
  primer
gtaaaacgacggccagtgagccttacagatgccaggag

SEQ ID NO: 14724 - DNA, 39 bp, Artificial Sequence
  primer
gtaaaacgacggccagtccttgtgagatgagtgtagccc

SEQ ID NO: 14725 - DNA, 38 bp, Artificial Sequence
  primer
gtaaaacgacggccagttgtctaccctgcaaactggag

SEQ ID NO: 14726 - DNA, 38 bp, Artificial Sequence
  primer
gtaaaacgacggccagtatcccagattgagatgctgtg

SEQ ID NO: 14727 - DNA, 36 bp, Artificial Sequence
  primer
gtaaaacgacggccagtcaactcctgagaggctggg

SEQ ID NO: 14728 - DNA, 39 bp, Artificial Sequence
  primer
gtaaaacgacggccagtgagagagacagagagaccacgc

SEQ ID NO: 14729 - DNA, 21 bp, Artificial Sequence
  primer
catgcctgtctcttccaacac

SEQ ID NO: 14730 - DNA, 21 bp, Artificial Sequence
  primer
gcatcaagaagcagcagattg

SEQ ID NO: 14731 - DNA, 38 bp, Artificial Sequence
  primer
gtaaaacgacggccagtgattgtgggatagtgtgctgg

SEQ ID NO: 14732 - DNA, 38 bp, Artificial Sequence
  primer
gtaaaacgacggccagtactcctatggaagcatgtggc

SEQ ID NO: 14733 - DNA, 38 bp, Artificial Sequence
  primer
gtaaaacgacggccagtccatccactctacacccgaac

SEQ ID NO: 14734 - DNA, 38 bp, Artificial Sequence
  primer
gtaaaacgacggccagtcatatgcgtgtggatatgtgc

SEQ ID NO: 14735 - DNA, 38 bp, Artificial Sequence
  primer
gtaaaacgacggccagtctccgagctcacactcaattc

SEQ ID NO: 14736 - DNA, 37 bp, Artificial Sequence
  primer
gtaaaacgacggccagtccgacttgctgaattgtctg

SEQ ID NO: 14737 - DNA, 37 bp, Artificial Sequence
  primer
gtaaaacgacggccagttggactgagcagaccacaaa

SEQ ID NO: 14738 - DNA, 38 bp, Artificial Sequence
  primer
gtaaaacgacggccagtaagtcgggttcgtgtctcttc

SEQ ID NO: 14739 - DNA, 21 bp, Artificial Sequence
  primer
caattgcagccctagtgtttg

SEQ ID NO: 14740 - DNA, 21 bp, Artificial Sequence
  primer
cagtcctccatgttggtatgc

SEQ ID NO: 14741 - DNA, 37 bp, Artificial Sequence
  primer
gtaaaacgacggccagtgagaaagggttgcccaagtc

SEQ ID NO: 14742 - DNA, 37 bp, Artificial Sequence
  primer
gtaaaacgacggccagtaggacagggtggaactgagg

SEQ ID NO: 14743 - DNA, 21 bp, Artificial Sequence
  primer
cagactggacaccctctttcc

SEQ ID NO: 14744 - DNA, 38 bp, Artificial Sequence
  primer
gtaaaacgacggccagtcatcctagtggtgagtcaggc

SEQ ID NO: 14745 - DNA, 21 bp, Artificial Sequence
  primer
actcattgccctcaactctgc

SEQ ID NO: 14746 - DNA, 21 bp, Artificial Sequence
  primer
cacaggtgacagagttgggag

SEQ ID NO: 14747 - DNA, 20 bp, Artificial Sequence
  primer
accactgggagctgtgtgac

SEQ ID NO: 14748 - DNA, 21 bp, Artificial Sequence
  primer
cttcccatccaatctctgacc

SEQ ID NO: 14749 - DNA, 20 bp, Artificial Sequence
  primer
cattgagcccgagagtgaag

SEQ ID NO: 14750 - DNA, 21 bp, Artificial Sequence
  primer
cctgcacttgtatcacatcca

SEQ ID NO: 14751 - DNA, 21 bp, Artificial Sequence
  primer
ctgagatggtgcttgctcaac

SEQ ID NO: 14752 - DNA, 38 bp, Artificial Sequence
  primer
gtaaaacgacggccagtatccctactggtgggtgaatg

SEQ ID NO: 14753 - DNA, 21 bp, Artificial Sequence
  primer
tgagatcctgcacttccacac

SEQ ID NO: 14754 - DNA, 20 bp, Artificial Sequence
  primer
tgatgatgatggagtggagg

SEQ ID NO: 14755 - DNA, 22 bp, Artificial Sequence
  primer
ttggatgggtagtgagaaggag

SEQ ID NO: 14756 - DNA, 38 bp, Artificial Sequence
  primer
gtaaaacgacggccagtagagctaggcttgcacagagg

SEQ ID NO: 14757 - DNA, 21 bp, Artificial Sequence
  primer
ggtgcagatgtgtctgagagc

SEQ ID NO: 14758 - DNA, 38 bp, Artificial Sequence
  primer
gtaaaacgacggccagtccatgaacctgggtattggtg

SEQ ID NO: 14759 - DNA, 21 bp, Artificial Sequence
  primer
ctgagtccctgctcaatctcc

SEQ ID NO: 14760 - DNA, 21 bp, Artificial Sequence
  primer
cttcactcccttactcgtgcc

SEQ ID NO: 14761 - DNA, 38 bp, Artificial Sequence
  primer
gtaaaacgacggccagtgatgatgatcctggctggaag

SEQ ID NO: 14762 - DNA, 39 bp, Artificial Sequence
  primer
gtaaaacgacggccagtccacacaggctcctaaattcac

SEQ ID NO: 14763 - DNA, 40 bp, Artificial Sequence
  primer
gtaaaacgacggccagtgcagattaagcacgagtagtggg

SEQ ID NO: 14764 - DNA, 38 bp, Artificial Sequence
  primer
gtaaaacgacggccagtgataggatctgcgaccctgag

SEQ ID NO: 14765 - DNA, 21 bp, Artificial Sequence
  primer
ggccgtgtggaatttaatcag

SEQ ID NO: 14766 - DNA, 38 bp, Artificial Sequence
  primer
gtaaaacgacggccagtagtgactctgacttcggtggg

SEQ ID NO: 14767 - DNA, 21 bp, Artificial Sequence
  primer
tccatccagctgacatctttg

SEQ ID NO: 14768 - DNA, 37 bp, Artificial Sequence
  primer
gtaaaacgacggccagtaggcttcctgagaggtcctg

SEQ ID NO: 14769 - DNA, 35 bp, Artificial Sequence
  primer
gtaaaacgacggccagtcttctcatcgcctgggct

SEQ ID NO: 14770 - DNA, 38 bp, Artificial Sequence
  primer
gtaaaacgacggccagtaaagggatagggttgaaaggg

SEQ ID NO: 14771 - DNA, 38 bp, Artificial Sequence
  primer
gtaaaacgacggccagtttctgaacagctgggtccttc

SEQ ID NO: 14772 - DNA, 38 bp, Artificial Sequence
  primer
gtaaaacgacggccagtctcccattggcctgtagattc

SEQ ID NO: 14773 - DNA, 37 bp, Artificial Sequence
  primer
gtaaaacgacggccagtatggcaggagaaagagctgg

SEQ ID NO: 14774 - DNA, 21 bp, Artificial Sequence
  primer
tgcccaatgtgcaagactaag

SEQ ID NO: 14775 - DNA, 37 bp, Artificial Sequence
  primer
gtaaaacgacggccagtctctgctgatcgctgacatc

SEQ ID NO: 14776 - DNA, 38 bp, Artificial Sequence
  primer
gtaaaacgacggccagtcactgacattgggctcagaac

SEQ ID NO: 14777 - DNA, 38 bp, Artificial Sequence
  primer
gtaaaacgacggccagttctgactgcgtttctccaaag

SEQ ID NO: 14778 - DNA, 21 bp, Artificial Sequence
  primer
cagagttgctgctagtgcctc

SEQ ID NO: 14779 - DNA, 38 bp, Artificial Sequence
  primer
gtaaaacgacggccagttgtatgggaagttggtggctc

SEQ ID NO: 14780 - DNA, 20 bp, Artificial Sequence
  primer
acgtagcaagcactgaaggc

SEQ ID NO: 14781 - DNA, 38 bp, Artificial Sequence
  primer
gtaaaacgacggccagtcagtgagtgggaccttgtcag

SEQ ID NO: 14782 - DNA, 20 bp, Artificial Sequence
  primer
gtgggtaggcgtttcctctc

SEQ ID NO: 14783 - DNA, 38 bp, Artificial Sequence
  primer
gtaaaacgacggccagtgaaacctctggtctgggtctg

SEQ ID NO: 14784 - DNA, 37 bp, Artificial Sequence
  primer
gtaaaacgacggccagtacacttagcctcagggcagc

SEQ ID NO: 14785 - DNA, 38 bp, Artificial Sequence
  primer
gtaaaacgacggccagtactcatcctccacagctccac

SEQ ID NO: 14786 - DNA, 35 bp, Artificial Sequence
  primer
gtaaaacgacggccagtggtgggaaggtctgagcc

SEQ ID NO: 14787 - DNA, 38 bp, Artificial Sequence
  primer
gtaaaacgacggccagtaggctcctcctggctttagtc

SEQ ID NO: 14788 - DNA, 19 bp, Artificial Sequence
  primer
gcatcgtgtcaggtccttg

SEQ ID NO: 14789 - DNA, 37 bp, Artificial Sequence
  primer
gtaaaacgacggccagtccctgctagcctcctacctg

SEQ ID NO: 14790 - DNA, 38 bp, Artificial Sequence
  primer
gtaaaacgacggccagttccatccacaaacctaggagg

SEQ ID NO: 14791 - DNA, 36 bp, Artificial Sequence
  primer
gtaaaacgacggccagtgtgctggtggacctggaag

SEQ ID NO: 14792 - DNA, 37 bp, Artificial Sequence
  primer
gtaaaacgacggccagtcctgagacaggctggtcttg

SEQ ID NO: 14793 - DNA, 35 bp, Artificial Sequence
  primer
gtaaaacgacggccagtcgctgacctctcccatcc

SEQ ID NO: 14794 - DNA, 21 bp, Artificial Sequence
  primer
tgagggctgagtttgagaagg

SEQ ID NO: 14795 - DNA, 21 bp, Artificial Sequence
  primer
gatctctggtacgcctatgcc

SEQ ID NO: 14796 - DNA, 20 bp, Artificial Sequence
  primer
attgagctggtcattcaccg

SEQ ID NO: 14797 - DNA, 35 bp, Artificial Sequence
  primer
gtaaaacgacggccagtgtgtcaggtgggcagtgg

SEQ ID NO: 14798 - DNA, 37 bp, Artificial Sequence
  primer
gtaaaacgacggccagtacaggagtcgtggtcagcag

SEQ ID NO: 14799 - DNA, 38 bp, Artificial Sequence
  primer
gtaaaacgacggccagtacaacatgaggtgagtccctg

SEQ ID NO: 14800 - DNA, 36 bp, Artificial Sequence
  primer
gtaaaacgacggccagtctgtgagtcaggcctgtgg

SEQ ID NO: 14801 - DNA, 26 bp, Artificial Sequence
  primer
tggtagagtttagaatacaacccagg

SEQ ID NO: 14802 - DNA, 40 bp, Artificial Sequence
  primer
gtaaaacgacggccagtcgattgaagtaagatatggagcc

SEQ ID NO: 14803 - DNA, 22 bp, Artificial Sequence
  primer
aagccagtgaataatgatgtcc

SEQ ID NO: 14804 - DNA, 42 bp, Artificial Sequence
  primer
gtaaaacgacggccagttgctagatttctcattctccttagc

SEQ ID NO: 14805 - DNA, 25 bp, Artificial Sequence
  primer
tgtctctggtaagaaagagctgaga

SEQ ID NO: 14806 - DNA, 40 bp, Artificial Sequence
  primer
gtaaaacgacggccagtaattggagcagaaacttgatctg

SEQ ID NO: 14807 - DNA, 22 bp, Artificial Sequence
  primer
cacagtgcctcaatgatcacac

SEQ ID NO: 14808 - DNA, 38 bp, Artificial Sequence
  primer
gtaaaacgacggccagtaggatgcagtgaagaccttgg

SEQ ID NO: 14809 - DNA, 38 bp, Artificial Sequence
  primer
gtaaaacgacggccagtactggttcctgacaccctcac

SEQ ID NO: 14810 - DNA, 38 bp, Artificial Sequence
  primer
gtaaaacgacggccagtactgggtggatagagctgagg

SEQ ID NO: 14811 - DNA, 21 bp, Artificial Sequence
  primer
aaagtctcggctctgcttctg

SEQ ID NO: 14812 - DNA, 38 bp, Artificial Sequence
  primer
gtaaaacgacggccagtatgtcgctgacacttctgctc

SEQ ID NO: 14813 - DNA, 38 bp, Artificial Sequence
  primer
gtaaaacgacggccagtggctggatcaggacttgtagg

SEQ ID NO: 14814 - DNA, 39 bp, Artificial Sequence
  primer
gtaaaacgacggccagtgattaatgcttccagccatttg

SEQ ID NO: 14815 - DNA, 24 bp, Artificial Sequence
  primer
gcctttgtgtataaagcaagactg

SEQ ID NO: 14816 - DNA, 39 bp, Artificial Sequence
  primer
gtaaaacgacggccagttcacagtggctgtggttatgag

SEQ ID NO: 14817 - DNA, 22 bp, Artificial Sequence
  primer
tgctttgccattataatttccc

SEQ ID NO: 14818 - DNA, 38 bp, Artificial Sequence
  primer
gtaaaacgacggccagtcacaccgaatgctgcttaatg

SEQ ID NO: 14819 - DNA, 40 bp, Artificial Sequence
  primer
gtaaaacgacggccagttttcccaacactgaataatggac

SEQ ID NO: 14820 - DNA, 46 bp, Artificial Sequence
  primer
gtaaaacgacggccagtgaaagagattagcccatctttatatttct

SEQ ID NO: 14821 - DNA, 42 bp, Artificial Sequence
  primer
gtaaaacgacggccagtccaggtgttagaattagtttgtgct

SEQ ID NO: 14822 - DNA, 38 bp, Artificial Sequence
  primer
gtaaaacgacggccagttggtgtgttgatgctgaattg

SEQ ID NO: 14823 - DNA, 22 bp, Artificial Sequence
  primer
tcctaatgctggtcagtcaatg

SEQ ID NO: 14824 - DNA, 21 bp, Artificial Sequence
  primer
gactttctggacgaaggcatc

SEQ ID NO: 14825 - DNA, 39 bp, Artificial Sequence
  primer
gtaaaacgacggccagttctttgcatgtacatattgcca

SEQ ID NO: 14826 - DNA, 21 bp, Artificial Sequence
  primer
aggcaacaagcaaaccaagat

SEQ ID NO: 14827 - DNA, 21 bp, Artificial Sequence
  primer
tcatcttgcacgtgttctgtc

SEQ ID NO: 14828 - DNA, 21 bp, Artificial Sequence
  primer
tgttaagtggttgatgcaggg

SEQ ID NO: 14829 - DNA, 23 bp, Artificial Sequence
  primer
ttccatttgatctgttccactgt

SEQ ID NO: 14830 - DNA, 41 bp, Artificial Sequence
  primer
gtaaaacgacggccagtttgtggaagacaaagttcatcaag

SEQ ID NO: 14831 - DNA, 38 bp, Artificial Sequence
  primer
gtaaaacgacggccagtttcacaggttcccaacacttg

SEQ ID NO: 14832 - DNA, 21 bp, Artificial Sequence
  primer
ggccactcctgaagattgttg

SEQ ID NO: 14833 - DNA, 21 bp, Artificial Sequence
  primer
gcctggtaagagactggatgg

SEQ ID NO: 14834 - DNA, 38 bp, Artificial Sequence
  primer
gtaaaacgacggccagttccctctctctaacctggcac

SEQ ID NO: 14835 - DNA, 38 bp, Artificial Sequence
  primer
gtaaaacgacggccagtagcttgacaccaagttagccc

SEQ ID NO: 14836 - DNA, 21 bp, Artificial Sequence
  primer
gaggctagtaggaagggcttg

SEQ ID NO: 14837 - DNA, 36 bp, Artificial Sequence
  primer
gtaaaacgacggccagtccctcagtctccgcacttg

SEQ ID NO: 14838 - DNA, 39 bp, Artificial Sequence
  primer
gtaaaacgacggccagttggttgtctctggatagtgggt

SEQ ID NO: 14839 - DNA, 21 bp, Artificial Sequence
  primer
aagctctgaaatgggcatgag

SEQ ID NO: 14840 - DNA, 37 bp, Artificial Sequence
  primer
gtaaaacgacggccagttggcattaagcccacttcac

SEQ ID NO: 14841 - DNA, 21 bp, Artificial Sequence
  primer
tagggccattgtggatttagc

SEQ ID NO: 14842 - DNA, 38 bp, Artificial Sequence
  primer
gtaaaacgacggccagtcacaccaaacgctaacagtgg

SEQ ID NO: 14843 - DNA, 38 bp, Artificial Sequence
  primer
gtaaaacgacggccagtgcatttatctgctgcaagtgg

SEQ ID NO: 14844 - DNA, 38 bp, Artificial Sequence
  primer
gtaaaacgacggccagtgtgggagcatccacttaatcc

SEQ ID NO: 14845 - DNA, 40 bp, Artificial Sequence
  primer
gtaaaacgacggccagttgaatgaaagtgttagtgacgcc

SEQ ID NO: 14846 - DNA, 18 bp, Artificial Sequence
  primer
gtcatgatggtgtgcgcc

SEQ ID NO: 14847 - DNA, 38 bp, Artificial Sequence
  primer
gtaaaacgacggccagtggtggtttatgatgggagtgg

SEQ ID NO: 14848 - DNA, 21 bp, Artificial Sequence
  primer
cccaaacctcaccagttgttc

SEQ ID NO: 14849 - DNA, 21 bp, Artificial Sequence
  primer
acaaactagtgccaaggaggc

SEQ ID NO: 14850 - DNA, 38 bp, Artificial Sequence
  primer
gtaaaacgacggccagttagtgccaaggaggcgtattc

SEQ ID NO: 14851 - DNA, 38 bp, Artificial Sequence
  primer
gtaaaacgacggccagttggcaacataagaactcgacc

SEQ ID NO: 14852 - DNA, 21 bp, Artificial Sequence
  primer
tcaagatagccaccctgttcc

SEQ ID NO: 14853 - DNA, 21 bp, Artificial Sequence
  primer
agacctcactccacacaaggc

SEQ ID NO: 14854 - DNA, 38 bp, Artificial Sequence
  primer
gtaaaacgacggccagtgtgatgttatgttgccaaggg

SEQ ID NO: 14855 - DNA, 21 bp, Artificial Sequence
  primer
ttgcaaagatgacctggaatg

SEQ ID NO: 14856 - DNA, 21 bp, Artificial Sequence
  primer
cagacctgtcaccacaaggag

SEQ ID NO: 14857 - DNA, 38 bp, Artificial Sequence
  primer
gtaaaacgacggccagtctgggttgcaacatactgtcc

SEQ ID NO: 14858 - DNA, 38 bp, Artificial Sequence
  primer
gtaaaacgacggccagtaactcttccagaaccttcggc

SEQ ID NO: 14859 - DNA, 39 bp, Artificial Sequence
  primer
gtaaaacgacggccagtaatccatttctggtcattctgg

SEQ ID NO: 14860 - DNA, 37 bp, Artificial Sequence
  primer
gtaaaacgacggccagtcctttcaaggtgttccctcc

SEQ ID NO: 14861 - DNA, 21 bp, Artificial Sequence
  primer
aaggtgttccctccatactgc

SEQ ID NO: 14862 - DNA, 38 bp, Artificial Sequence
  primer
gtaaaacgacggccagtgctgagcctctcactagcctc

SEQ ID NO: 14863 - DNA, 21 bp, Artificial Sequence
  primer
aactgggctgagaaacactgc

SEQ ID NO: 14864 - DNA, 21 bp, Artificial Sequence
  primer
gtgcctcttctgtacttgggc

SEQ ID NO: 14865 - DNA, 21 bp, Artificial Sequence
  primer
gtgcagctcattctcaaggtg

SEQ ID NO: 14866 - DNA, 38 bp, Artificial Sequence
  primer
gtaaaacgacggccagtctgtttaaccacacagcaccc

SEQ ID NO: 14867 - DNA, 38 bp, Artificial Sequence
  primer
gtaaaacgacggccagttatttgccttctggttctggg

SEQ ID NO: 14868 - DNA, 38 bp, Artificial Sequence
  primer
gtaaaacgacggccagtgaaagagaggatggtgaaggg

SEQ ID NO: 14869 - DNA, 20 bp, Artificial Sequence
  primer
tgatgggcatagaatgggtc

SEQ ID NO: 14870 - DNA, 21 bp, Artificial Sequence
  primer
gtctccaagagcgtcccatac

SEQ ID NO: 14871 - DNA, 18 bp, Artificial Sequence
  primer
ttcctggcagtgctggtg

SEQ ID NO: 14872 - DNA, 19 bp, Artificial Sequence
  primer
ttcgagttcgtgctcaagg

SEQ ID NO: 14873 - DNA, 21 bp, Artificial Sequence
  primer
cgactactacctgccctacgc

SEQ ID NO: 14874 - DNA, 21 bp, Artificial Sequence
  primer
gattgtgaagctgtctgcctg

SEQ ID NO: 14875 - DNA, 21 bp, Artificial Sequence
  primer
ttactggaaccagcagcagtg

SEQ ID NO: 14876 - DNA, 21 bp, Artificial Sequence
  primer
tacagtgacctgctgctctgg

SEQ ID NO: 14877 - DNA, 20 bp, Artificial Sequence
  primer
ggtgaggtctttacccaggc

SEQ ID NO: 14878 - DNA, 38 bp, Artificial Sequence
  primer
gtaaaacgacggccagttgggttgtgagtgctggtaag

SEQ ID NO: 14879 - DNA, 21 bp, Artificial Sequence
  primer
atgcaatcttggaatatgggc

SEQ ID NO: 14880 - DNA, 38 bp, Artificial Sequence
  primer
gtaaaacgacggccagtgggagtactgcacgtctgacc

SEQ ID NO: 14881 - DNA, 21 bp, Artificial Sequence
  primer
ctcaactacacgcacctgcac

SEQ ID NO: 14882 - DNA, 18 bp, Artificial Sequence
  primer
aggatgtcgcctcccttg

SEQ ID NO: 14883 - DNA, 20 bp, Artificial Sequence
  primer
tacacagtgtgggagggagc

SEQ ID NO: 14884 - DNA, 37 bp, Artificial Sequence
  primer
gtaaaacgacggccagtaccactccctaagtgctggc

SEQ ID NO: 14885 - DNA, 21 bp, Artificial Sequence
  primer
ctgccctggatcctaattgtc

SEQ ID NO: 14886 - DNA, 20 bp, Artificial Sequence
  primer
cccaccatctatgccatcac

SEQ ID NO: 14887 - DNA, 38 bp, Artificial Sequence
  primer
gtaaaacgacggccagttgaccgagtagagatcatggc

SEQ ID NO: 14888 - DNA, 22 bp, Artificial Sequence
  primer
ccaagacctgacacacagtagg

SEQ ID NO: 14889 - DNA, 38 bp, Artificial Sequence
  primer
gtaaaacgacggccagtttcattacacttgtgctgccc

SEQ ID NO: 14890 - DNA, 38 bp, Artificial Sequence
  primer
gtaaaacgacggccagtaaatcaagtctacaaggcggg

SEQ ID NO: 14891 - DNA, 38 bp, Artificial Sequence
  primer
gtaaaacgacggccagtttaatgagacgattacggccc

SEQ ID NO: 14892 - DNA, 38 bp, Artificial Sequence
  primer
gtaaaacgacggccagtatagtctcccacagcctgagc

SEQ ID NO: 14893 - DNA, 21 bp, Artificial Sequence
  primer
cagctggtacagaaggcagag

SEQ ID NO: 14894 - DNA, 21 bp, Artificial Sequence
  primer
accttggttagcagtgttgcc

SEQ ID NO: 14895 - DNA, 39 bp, Artificial Sequence
  primer
gtaaaacgacggccagtgggttagagaatccattccagg

SEQ ID NO: 14896 - DNA, 21 bp, Artificial Sequence
  primer
gacagggactatcccacttgc

SEQ ID NO: 14897 - DNA, 21 bp, Artificial Sequence
  primer
aaccgagagcaagagaagctg

SEQ ID NO: 14898 - DNA, 21 bp, Artificial Sequence
  primer
gaaacctttcttgttgctggc

SEQ ID NO: 14899 - DNA, 38 bp, Artificial Sequence
  primer
gtaaaacgacggccagtgtgaacacccatcacatcctg

SEQ ID NO: 14900 - DNA, 38 bp, Artificial Sequence
  primer
gtaaaacgacggccagtgttggagtgctttgaaatggg

SEQ ID NO: 14901 - DNA, 21 bp, Artificial Sequence
  primer
tgccaacacctctatggtcac

SEQ ID NO: 14902 - DNA, 38 bp, Artificial Sequence
  primer
gtaaaacgacggccagttagagacccaaggccaatttc

SEQ ID NO: 14903 - DNA, 20 bp, Artificial Sequence
  primer
ctacctgcaggaccatgacc

SEQ ID NO: 14904 - DNA, 38 bp, Artificial Sequence
  primer
gtaaaacgacggccagtcacacctgagactcatctcgc

SEQ ID NO: 14905 - DNA, 21 bp, Artificial Sequence
  primer
tgggaacgtttatggtgtcag

SEQ ID NO: 14906 - DNA, 20 bp, Artificial Sequence
  primer
gctggtctcgtacagcttgg

SEQ ID NO: 14907 - DNA, 21 bp, Artificial Sequence
  primer
tcaggctgttccaaggatacc

SEQ ID NO: 14908 - DNA, 21 bp, Artificial Sequence
  primer
atgacgatgtctttgtccacg

SEQ ID NO: 14909 - DNA, 38 bp, Artificial Sequence
  primer
gtaaaacgacggccagttctatggtctcgaagaagccc

SEQ ID NO: 14910 - DNA, 21 bp, Artificial Sequence
  primer
gtcaagctcaagacgtcctcc

SEQ ID NO: 14911 - DNA, 21 bp, Artificial Sequence
  primer
actggcttgggaagatcaaag

SEQ ID NO: 14912 - DNA, 38 bp, Artificial Sequence
  primer
gtaaaacgacggccagttttggattggtcgtgttcatc

SEQ ID NO: 14913 - DNA, 21 bp, Artificial Sequence
  primer
gatctccaggacctttggaag

SEQ ID NO: 14914 - DNA, 18 bp, Artificial Sequence
  primer
gctggccgtagtctgtgg

SEQ ID NO: 14915 - DNA, 19 bp, Artificial Sequence
  primer
catgcagatgtcctacgcc

SEQ ID NO: 14916 - DNA, 35 bp, Artificial Sequence
  primer
gtaaaacgacggccagtgtggaccaggtcaaggcg

SEQ ID NO: 14917 - DNA, 18 bp, Artificial Sequence
  primer
aacctgctgcacctgtcg

SEQ ID NO: 14918 - DNA, 18 bp, Artificial Sequence
  primer
gttacgaggcagccgtgc

SEQ ID NO: 14919 - DNA, 21 bp, Artificial Sequence
  primer
gattaattatgcgctgggcac

SEQ ID NO: 14920 - DNA, 38 bp, Artificial Sequence
  primer
gtaaaacgacggccagttggactgtggctttagggaag

SEQ ID NO: 14921 - DNA, 21 bp, Artificial Sequence
  primer
ggagtgtgggagaccagagac

SEQ ID NO: 14922 - DNA, 37 bp, Artificial Sequence
  primer
gtaaaacgacggccagtccctgactgccaagactctg

SEQ ID NO: 14923 - DNA, 36 bp, Artificial Sequence
  primer
gtaaaacgacggccagtctgagcactacgagcgacg

SEQ ID NO: 14924 - DNA, 37 bp, Artificial Sequence
  primer
gtaaaacgacggccagttcctcaacctcacgctcaag

SEQ ID NO: 14925 - DNA, 19 bp, Artificial Sequence
  primer
agcaagtacttcgtgccgc

SEQ ID NO: 14926 - DNA, 35 bp, Artificial Sequence
  primer
gtaaaacgacggccagtcgggaagaggaaagtcgc

SEQ ID NO: 14927 - DNA, 38 bp, Artificial Sequence
  primer
gtaaaacgacggccagtctgattccacagtgctccttg

SEQ ID NO: 14928 - DNA, 38 bp, Artificial Sequence
  primer
gtaaaacgacggccagtgtctaccggagtctgtgcctg

SEQ ID NO: 14929 - DNA, 21 bp, Artificial Sequence
  primer
cgtgaccaccactaactgctc

SEQ ID NO: 14930 - DNA, 38 bp, Artificial Sequence
  primer
gtaaaacgacggccagtctgaccctcaaggagatccac

SEQ ID NO: 14931 - DNA, 21 bp, Artificial Sequence
  primer
ttcaagactttcggcatctcc

SEQ ID NO: 14932 - DNA, 36 bp, Artificial Sequence
  primer
gtaaaacgacggccagtaccaatcggagattgcctg

SEQ ID NO: 14933 - DNA, 38 bp, Artificial Sequence
  primer
gtaaaacgacggccagtggcagttcagggaaagctaag

SEQ ID NO: 14934 - DNA, 39 bp, Artificial Sequence
  primer
gtaaaacgacggccagttcaatgatgccagtaaggtttg

SEQ ID NO: 14935 - DNA, 20 bp, Artificial Sequence
  primer
gggcaacaagagggaaactc

SEQ ID NO: 14936 - DNA, 38 bp, Artificial Sequence
  primer
gtaaaacgacggccagttatgattgtgccgttgcactc

SEQ ID NO: 14937 - DNA, 21 bp, Artificial Sequence
  primer
ttcctgtctggacatctctgc

SEQ ID NO: 14938 - DNA, 38 bp, Artificial Sequence
  primer
gtaaaacgacggccagtgaagtctcttgaggccctgac

SEQ ID NO: 14939 - DNA, 38 bp, Artificial Sequence
  primer
gtaaaacgacggccagttccctgttgagcctctagacc

SEQ ID NO: 14940 - DNA, 37 bp, Artificial Sequence
  primer
gtaaaacgacggccagtctgagcacacatcatgtccc

SEQ ID NO: 14941 - DNA, 37 bp, Artificial Sequence
  primer
gtaaaacgacggccagtgctgtaccgcagcttgactg

SEQ ID NO: 14942 - DNA, 21 bp, Artificial Sequence
  primer
ctgtgaccctggcacgttatc

SEQ ID NO: 14943 - DNA, 38 bp, Artificial Sequence
  primer
gtaaaacgacggccagtacttgacaggtggacacaggc

SEQ ID NO: 14944 - DNA, 35 bp, Artificial Sequence
  primer
gtaaaacgacggccagtggcagagaagggtcagcc

SEQ ID NO: 14945 - DNA, 20 bp, Artificial Sequence
  primer
gtgttggcttcgtgttgatg

SEQ ID NO: 14946 - DNA, 38 bp, Artificial Sequence
  primer
gtaaaacgacggccagtggtcccttaggtttcggtctc

SEQ ID NO: 14947 - DNA, 21 bp, Artificial Sequence
  primer
actgcctgaaggtttgctttg

SEQ ID NO: 14948 - DNA, 22 bp, Artificial Sequence
  primer
tgtagaggttgcatggattcag

SEQ ID NO: 14949 - DNA, 42 bp, Artificial Sequence
  primer
gtaaaacgacggccagttgtacccttcattcacttcctactg

SEQ ID NO: 14950 - DNA, 43 bp, Artificial Sequence
  primer
gtaaaacgacggccagttctgtgctaataactctttatcaccc

SEQ ID NO: 14951 - DNA, 22 bp, Artificial Sequence
  primer
tttcacagtcctttccctcaag

SEQ ID NO: 14952 - DNA, 42 bp, Artificial Sequence
  primer
gtaaaacgacggccagtcagcctactctctatggaagatgtg

SEQ ID NO: 14953 - DNA, 21 bp, Artificial Sequence
  primer
gcgtgtgagatctagtgtggg

SEQ ID NO: 14954 - DNA, 38 bp, Artificial Sequence
  primer
gtaaaacgacggccagtgcaagcaactcttggaacacc

SEQ ID NO: 14955 - DNA, 21 bp, Artificial Sequence
  primer
ttcccactggttcaatgtgtc

SEQ ID NO: 14956 - DNA, 21 bp, Artificial Sequence
  primer
aaatcaggcagccgtattatg

SEQ ID NO: 14957 - DNA, 38 bp, Artificial Sequence
  primer
gtaaaacgacggccagtggagtaaagtcctgtttcccg

SEQ ID NO: 14958 - DNA, 22 bp, Artificial Sequence
  primer
gcaaagcacctggagttagaag

SEQ ID NO: 14959 - DNA, 18 bp, Artificial Sequence
  primer
tcccggagagacctgctg

SEQ ID NO: 14960 - DNA, 21 bp, Artificial Sequence
  primer
agacggttccctccattaacc

SEQ ID NO: 14961 - DNA, 37 bp, Artificial Sequence
  primer
gtaaaacgacggccagtgtgtgaatgacagacggcag

SEQ ID NO: 14962 - DNA, 36 bp, Artificial Sequence
  primer
gtaaaacgacggccagtctcctggagctgaggctct

SEQ ID NO: 14963 - DNA, 38 bp, Artificial Sequence
  primer
gtaaaacgacggccagttggtccctcctgtcatagtcc

SEQ ID NO: 14964 - DNA, 38 bp, Artificial Sequence
  primer
gtaaaacgacggccagtcacagcatcaagcactgaagg

SEQ ID NO: 14965 - DNA, 21 bp, Artificial Sequence
  primer
acctctctcaccttcattccg

SEQ ID NO: 14966 - DNA, 38 bp, Artificial Sequence
  primer
gtaaaacgacggccagtggagtgtaaggtgctggaagg

SEQ ID NO: 14967 - DNA, 21 bp, Artificial Sequence
  primer
cagttcctggcactcatctcc

SEQ ID NO: 14968 - DNA, 20 bp, Artificial Sequence
  primer
cttctgcgtctcttccctcc

SEQ ID NO: 14969 - DNA, 37 bp, Artificial Sequence
  primer
gtaaaacgacggccagtcgcttgcgaatacagaaagg

SEQ ID NO: 14970 - DNA, 38 bp, Artificial Sequence
  primer
gtaaaacgacggccagtgctcagagcaacccttctctc

SEQ ID NO: 14971 - DNA, 21 bp, Artificial Sequence
  primer
tttgctcttgctcttcctgag

SEQ ID NO: 14972 - DNA, 38 bp, Artificial Sequence
  primer
gtaaaacgacggccagtgtcttgtttggaaagggttgg

SEQ ID NO: 14973 - DNA, 21 bp, Artificial Sequence
  primer
gcttgagggaagacagacacc

SEQ ID NO: 14974 - DNA, 22 bp, Artificial Sequence
  primer
gaaccaggtggagtcgtacatc

SEQ ID NO: 14975 - DNA, 38 bp, Artificial Sequence
  primer
gtaaaacgacggccagtctttgcaggcttctcacacac

SEQ ID NO: 14976 - DNA, 37 bp, Artificial Sequence
  primer
gtaaaacgacggccagtctgtgctgcactgctaatgg

SEQ ID NO: 14977 - DNA, 38 bp, Artificial Sequence
  primer
gtaaaacgacggccagtcttctatgcctgccaacttcc

SEQ ID NO: 14978 - DNA, 38 bp, Artificial Sequence
  primer
gtaaaacgacggccagtttcagcactgtggaactctgc

SEQ ID NO: 14979 - DNA, 37 bp, Artificial Sequence
  primer
gtaaaacgacggccagtctaggcacacagcctggaag

SEQ ID NO: 14980 - DNA, 21 bp, Artificial Sequence
  primer
gaaagaaggcgtgacataccc

SEQ ID NO: 14981 - DNA, 21 bp, Artificial Sequence
  primer
ggaggagtctcagctctcagc

SEQ ID NO: 14982 - DNA, 21 bp, Artificial Sequence
  primer
ccctcgtttactacctggctg

SEQ ID NO: 14983 - DNA, 37 bp, Artificial Sequence
  primer
gtaaaacgacggccagtatctgatgcagcctgtggag

SEQ ID NO: 14984 - DNA, 38 bp, Artificial Sequence
  primer
gtaaaacgacggccagtcaagtcaccagtccctgtgag

SEQ ID NO: 14985 - DNA, 18 bp, Artificial Sequence
  primer
gcctggcaacagagcaag

SEQ ID NO: 14986 - DNA, 38 bp, Artificial Sequence
  primer
gtaaaacgacggccagtgtgagaacagcaagggtgatg

SEQ ID NO: 14987 - DNA, 21 bp, Artificial Sequence
  primer
gagggaaattgaggtggtcag

SEQ ID NO: 14988 - DNA, 21 bp, Artificial Sequence
  primer
ctgacctgctggatctgtttc

SEQ ID NO: 14989 - DNA, 39 bp, Artificial Sequence
  primer
gtaaaacgacggccagtttgtaagagggctattcttggg

SEQ ID NO: 14990 - DNA, 35 bp, Artificial Sequence
  primer
gtaaaacgacggccagtatcccggtcgagaagctg

SEQ ID NO: 14991 - DNA, 38 bp, Artificial Sequence
  primer
gtaaaacgacggccagtgacctggtctctggtccttcc

SEQ ID NO: 14992 - DNA, 22 bp, Artificial Sequence
  primer
catcttcaaccggtgagtaagc

SEQ ID NO: 14993 - DNA, 21 bp, Artificial Sequence
  primer
ttcccatcatagctggaaacc

SEQ ID NO: 14994 - DNA, 21 bp, Artificial Sequence
  primer
actgacctctctgctggcttg

SEQ ID NO: 14995 - DNA, 38 bp, Artificial Sequence
  primer
gtaaaacgacggccagtgccagtgtcagaggtattccc

SEQ ID NO: 14996 - DNA, 38 bp, Artificial Sequence
  primer
gtaaaacgacggccagttctcctgaccttgtgatctgc

SEQ ID NO: 14997 - DNA, 21 bp, Artificial Sequence
  primer
tggaagggtactgggaaacag

SEQ ID NO: 14998 - DNA, 22 bp, Artificial Sequence
  primer
ttcagccatttccttctttctg

SEQ ID NO: 14999 - DNA, 38 bp, Artificial Sequence
  primer
gtaaaacgacggccagtggactgcctgggaattgttac

SEQ ID NO: 15000 - DNA, 38 bp, Artificial Sequence
  primer
gtaaaacgacggccagtcagttgtcatcaagttcgcaa

SEQ ID NO: 15001 - DNA, 39 bp, Artificial Sequence
  primer
gtaaaacgacggccagtgctgggcagtgttctttctatg

SEQ ID NO: 15002 - DNA, 42 bp, Artificial Sequence
  primer
gtaaaacgacggccagtcctgaatcctaactaagaggcaaac

SEQ ID NO: 15003 - DNA, 21 bp, Artificial Sequence
  primer
ggaagtacatggtctcccagg

SEQ ID NO: 15004 - DNA, 22 bp, Artificial Sequence
  primer
gctgtttgtgacactgtgtgtg

SEQ ID NO: 15005 - DNA, 38 bp, Artificial Sequence
  primer
gtaaaacgacggccagttatgtttgccacatttcaggg

SEQ ID NO: 15006 - DNA, 35 bp, Artificial Sequence
  primer
gtaaaacgacggccagtattactccatgcgggctg

SEQ ID NO: 15007 - DNA, 21 bp, Artificial Sequence
  primer
tggtgtcctgaaaggtatgga

SEQ ID NO: 15008 - DNA, 38 bp, Artificial Sequence
  primer
gtaaaacgacggccagtaagcggtagtccagagtcctg

SEQ ID NO: 15009 - DNA, 37 bp, Artificial Sequence
  primer
gtaaaacgacggccagttggaaagcagaggaagggac

SEQ ID NO: 15010 - DNA, 38 bp, Artificial Sequence
  primer
gtaaaacgacggccagtggttggtcagcaattcatcag

SEQ ID NO: 15011 - DNA, 38 bp, Artificial Sequence
  primer
gtaaaacgacggccagttggtgttggacctggttacac

SEQ ID NO: 15012 - DNA, 38 bp, Artificial Sequence
  primer
gtaaaacgacggccagttatggttcaggtcaggagcac

SEQ ID NO: 15013 - DNA, 21 bp, Artificial Sequence
  primer
tgagtcagttaagcgggtgag

SEQ ID NO: 15014 - DNA, 38 bp, Artificial Sequence
  primer
gtaaaacgacggccagttttctgaccacagcactcagc

SEQ ID NO: 15015 - DNA, 38 bp, Artificial Sequence
  primer
gtaaaacgacggccagtaagtttagggcctggacagtg

SEQ ID NO: 15016 - DNA, 21 bp, Artificial Sequence
  primer
tttggacgtgctgattgagtc

SEQ ID NO: 15017 - DNA, 21 bp, Artificial Sequence
  primer
tcatgctgagaggtctgttcc

SEQ ID NO: 15018 - DNA, 38 bp, Artificial Sequence
  primer
gtaaaacgacggccagttaagatatgccatcaccctgc

SEQ ID NO: 15019 - DNA, 39 bp, Artificial Sequence
  primer
gtaaaacgacggccagtaaattcataaggacgtggcttt

SEQ ID NO: 15020 - DNA, 19 bp, Artificial Sequence
  primer
gaggtgggtggatcacgag

SEQ ID NO: 15021 - DNA, 21 bp, Artificial Sequence
  primer
ggctgaaaccttcatttcaca

SEQ ID NO: 15022 - DNA, 39 bp, Artificial Sequence
  primer
gtaaaacgacggccagtgccatggacctatactggtttg

SEQ ID NO: 15023 - DNA, 24 bp, Artificial Sequence
  primer
ccagaaattgtaaagggcattaag

SEQ ID NO: 15024 - DNA, 19 bp, Artificial Sequence
  primer
caagcagaaccttggaggc

SEQ ID NO: 15025 - DNA, 21 bp, Artificial Sequence
  primer
gaactgggagtggttcagagg

SEQ ID NO: 15026 - DNA, 21 bp, Artificial Sequence
  primer
aagtgttccgtcttccacctg

SEQ ID NO: 15027 - DNA, 38 bp, Artificial Sequence
  primer
gtaaaacgacggccagtctgagtgaagtcagtgctggg

SEQ ID NO: 15028 - DNA, 19 bp, Artificial Sequence
  primer
cttattcagaggcgctggg

SEQ ID NO: 15029 - DNA, 37 bp, Artificial Sequence
  primer
gtaaaacgacggccagtatctagccagttccttgccc

SEQ ID NO: 15030 - DNA, 21 bp, Artificial Sequence
  primer
ctgggttcttcctctccagtg

SEQ ID NO: 15031 - DNA, 38 bp, Artificial Sequence
  primer
gtaaaacgacggccagtcacgtgtcaatgacgatgaag

SEQ ID NO: 15032 - DNA, 38 bp, Artificial Sequence
  primer
gtaaaacgacggccagtgttccctgaggaagtgagagc

SEQ ID NO: 15033 - DNA, 38 bp, Artificial Sequence
  primer
gtaaaacgacggccagtagccatctccatattgccttc

SEQ ID NO: 15034 - DNA, 21 bp, Artificial Sequence
  primer
atctaccctgctttgcgaatg

SEQ ID NO: 15035 - DNA, 38 bp, Artificial Sequence
  primer
gtaaaacgacggccagttcctccctctctacctcttgg

SEQ ID NO: 15036 - DNA, 37 bp, Artificial Sequence
  primer
gtaaaacgacggccagtctggatctcctgacctcgtg

SEQ ID NO: 15037 - DNA, 38 bp, Artificial Sequence
  primer
gtaaaacgacggccagtggccagtcctcacagtgtttc

SEQ ID NO: 15038 - DNA, 38 bp, Artificial Sequence
  primer
gtaaaacgacggccagtatgaggcaagagatggtctgg

SEQ ID NO: 15039 - DNA, 19 bp, Artificial Sequence
  primer
agggagcgggactagggag

SEQ ID NO: 15040 - DNA, 36 bp, Artificial Sequence
  primer
gtaaaacgacggccagtctctgctgcaccactgctc

SEQ ID NO: 15041 - DNA, 38 bp, Artificial Sequence
  primer
gtaaaacgacggccagttagtgttagggcccagtgagg

SEQ ID NO: 15042 - DNA, 38 bp, Artificial Sequence
  primer
gtaaaacgacggccagtaccagcttcctgcactctcag

SEQ ID NO: 15043 - DNA, 38 bp, Artificial Sequence
  primer
gtaaaacgacggccagtaagtggtcccactctgctgac

SEQ ID NO: 15044 - DNA, 21 bp, Artificial Sequence
  primer
cccacttgaagtctgaccagg

SEQ ID NO: 15045 - DNA, 38 bp, Artificial Sequence
  primer
gtaaaacgacggccagttttaaggccaatacacgggag

SEQ ID NO: 15046 - DNA, 21 bp, Artificial Sequence
  primer
agtcagaggcaagggtcactc

SEQ ID NO: 15047 - DNA, 38 bp, Artificial Sequence
  primer
gtaaaacgacggccagtctttcagcaatgaagggtttg

SEQ ID NO: 15048 - DNA, 38 bp, Artificial Sequence
  primer
gtaaaacgacggccagttaaggcctagcgcttcaaagg

SEQ ID NO: 15049 - DNA, 22 bp, Artificial Sequence
  primer
ttaagccagttacggagaggtg

SEQ ID NO: 15050 - DNA, 37 bp, Artificial Sequence
  primer
gtaaaacgacggccagtatggctttgaagagcaatgg

SEQ ID NO: 15051 - DNA, 21 bp, Artificial Sequence
  primer
tgattagcctttgaccttggg

SEQ ID NO: 15052 - DNA, 38 bp, Artificial Sequence
  primer
gtaaaacgacggccagtcagtgcccaagtaccgtatcc

SEQ ID NO: 15053 - DNA, 44 bp, Artificial Sequence
  primer
gtaaaacgacggccagtggttatcaatacattcactggaaactt

SEQ ID NO: 15054 - DNA, 38 bp, Artificial Sequence
  primer
gtaaaacgacggccagtccaacacccttccttctgtct

SEQ ID NO: 15055 - DNA, 38 bp, Artificial Sequence
  primer
gtaaaacgacggccagtggataaagggtggatgagtcg

SEQ ID NO: 15056 - DNA, 18 bp, Artificial Sequence
  primer
gaggcggagaggagggac

SEQ ID NO: 15057 - DNA, 21 bp, Artificial Sequence
  primer
aaagggtagctctgcatggtg

SEQ ID NO: 15058 - DNA, 38 bp, Artificial Sequence
  primer
gtaaaacgacggccagtagtcctcaaaccctctttggg

SEQ ID NO: 15059 - DNA, 21 bp, Artificial Sequence
  primer
ttcctgaagaatcatcccagg

SEQ ID NO: 15060 - DNA, 39 bp, Artificial Sequence
  primer
gtaaaacgacggccagttgttgatgagccagtgcatatc

SEQ ID NO: 15061 - DNA, 39 bp, Artificial Sequence
  primer
gtaaaacgacggccagtaaggctgaaagtgttggaattg

SEQ ID NO: 15062 - DNA, 38 bp, Artificial Sequence
  primer
gtaaaacgacggccagtccatttcttactttccctgcg

SEQ ID NO: 15063 - DNA, 21 bp, Artificial Sequence
  primer
ctaaagcaagtcacagccacg

SEQ ID NO: 15064 - DNA, 36 bp, Artificial Sequence
  primer
gtaaaacgacggccagtcctgagaagccaccagcac

SEQ ID NO: 15065 - DNA, 37 bp, Artificial Sequence
  primer
gtaaaacgacggccagtcgtggagcttcactctggac

SEQ ID NO: 15066 - DNA, 38 bp, Artificial Sequence
  primer
gtaaaacgacggccagttgagataaggtggtgtttggg

SEQ ID NO: 15067 - DNA, 37 bp, Artificial Sequence
  primer
gtaaaacgacggccagtggtctttcccaaggagcatc

SEQ ID NO: 15068 - DNA, 21 bp, Artificial Sequence
  primer
tcttattgcttggtccttggg

SEQ ID NO: 15069 - DNA, 22 bp, Artificial Sequence
  primer
ccaagcaggtacacttaggagg

SEQ ID NO: 15070 - DNA, 39 bp, Artificial Sequence
  primer
gtaaaacgacggccagttgaagggcccagttaatgtatc

SEQ ID NO: 15071 - DNA, 38 bp, Artificial Sequence
  primer
gtaaaacgacggccagtagggcatagatgcctacaagg

SEQ ID NO: 15072 - DNA, 38 bp, Artificial Sequence
  primer
gtaaaacgacggccagttctgcatgggctaatttcaag

SEQ ID NO: 15073 - DNA, 17 bp, Artificial Sequence
  primer
ctccgccttctcccctc

SEQ ID NO: 15074 - DNA, 18 bp, Artificial Sequence
  primer
ccacgaaccgcgtagttg

SEQ ID NO: 15075 - DNA, 21 bp, Artificial Sequence
  primer
tctgagacaggaccatttccc

SEQ ID NO: 15076 - DNA, 21 bp, Artificial Sequence
  primer
gatgtgtgcctgtattcccag

SEQ ID NO: 15077 - DNA, 37 bp, Artificial Sequence
  primer
gtaaaacgacggccagtacaccaggaatgtctgtggc

SEQ ID NO: 15078 - DNA, 21 bp, Artificial Sequence
  primer
cgaagtagaagccctgattgc

SEQ ID NO: 15079 - DNA, 22 bp, Artificial Sequence
  primer
tgcctggatttgtgtgtaacag

SEQ ID NO: 15080 - DNA, 37 bp, Artificial Sequence
  primer
gtaaaacgacggccagttttatccctgtgggcatctg

SEQ ID NO: 15081 - DNA, 20 bp, Artificial Sequence
  primer
cttctctcctcctggatggc

SEQ ID NO: 15082 - DNA, 39 bp, Artificial Sequence
  primer
gtaaaacgacggccagtggttctgtctgtgtccaatgtg

SEQ ID NO: 15083 - DNA, 38 bp, Artificial Sequence
  primer
gtaaaacgacggccagtagctgtctaagccactgggac

SEQ ID NO: 15084 - DNA, 36 bp, Artificial Sequence
  primer
gtaaaacgacggccagtggccacagggaagttcttg

SEQ ID NO: 15085 - DNA, 36 bp, Artificial Sequence
  primer
gtaaaacgacggccagtcgagctctctgcagccttg

SEQ ID NO: 15086 - DNA, 19 bp, Artificial Sequence
  primer
gcattgtgaggaaggaggc

SEQ ID NO: 15087 - DNA, 36 bp, Artificial Sequence
  primer
gtaaaacgacggccagtacagaaacgccagtgtccc

SEQ ID NO: 15088 - DNA, 38 bp, Artificial Sequence
  primer
gtaaaacgacggccagtagcctggtgctttctatcagg

SEQ ID NO: 15089 - DNA, 21 bp, Artificial Sequence
  primer
tccttggattgtcactgttgc

SEQ ID NO: 15090 - DNA, 20 bp, Artificial Sequence
  primer
aaggcaaagaccgtttccag

SEQ ID NO: 15091 - DNA, 38 bp, Artificial Sequence
  primer
gtaaaacgacggccagttggtgtgtttcaggtactggg

SEQ ID NO: 15092 - DNA, 38 bp, Artificial Sequence
  primer
gtaaaacgacggccagtacacaaggctataagggcctg

SEQ ID NO: 15093 - DNA, 21 bp, Artificial Sequence
  primer
caccaactgtagcctgtttgg

SEQ ID NO: 15094 - DNA, 39 bp, Artificial Sequence
  primer
gtaaaacgacggccagttgtaacttgtttccagggtgtg

SEQ ID NO: 15095 - DNA, 36 bp, Artificial Sequence; identical to SEQ ID NO: 15087
  primer

SEQ ID NO: 15096 - DNA, 21 bp, Artificial Sequence
  primer
gtggtactcagcatgcaccag

SEQ ID NO: 15097 - DNA, 38 bp, Artificial Sequence
  primer
gtaaaacgacggccagtgtccaaagggcacagtattgg

SEQ ID NO: 15098 - DNA, 21 bp, Artificial Sequence
  primer
ggtttctggtagacgctctgg

SEQ ID NO: 15099 - DNA, 39 bp, Artificial Sequence
  primer
gtaaaacgacggccagtaatcttgcatgtgtgtttgcag

SEQ ID NO: 15100 - DNA, 24 bp, Artificial Sequence
  primer
gacagctttcaaatgatgtgtttg

SEQ ID NO: 15101 - DNA, 20 bp, Artificial Sequence
  primer
ctccactgcagaccagcaag

SEQ ID NO: 15102 - DNA, 22 bp, Artificial Sequence
  primer
tgccagtcagacatatgagtcc

SEQ ID NO: 15103 - DNA, 20 bp, Artificial Sequence
  primer
atgaatgcctgggaggagtc

SEQ ID NO: 15104 - DNA, 39 bp, Artificial Sequence
  primer
gtaaaacgacggccagtaagcctttgtcaggtacagacg

SEQ ID NO: 15105 - DNA, 21 bp, Artificial Sequence
  primer
ttctggagtgacatttgcagc

SEQ ID NO: 15106 - DNA, 41 bp, Artificial Sequence
  primer
gtaaaacgacggccagtaaattgggatagaggcctatgttt

SEQ ID NO: 15107 - DNA, 38 bp, Artificial Sequence
  primer
gtaaaacgacggccagttatttgatcgccttggaaatg

SEQ ID NO: 15108 - DNA, 21 bp, Artificial Sequence
  primer
ctgatggtgaactggcgttac

SEQ ID NO: 15109 - DNA, 39 bp, Artificial Sequence
  primer
gtaaaacgacggccagttctcacctcctctctctgatcc

SEQ ID NO: 15110 - DNA, 21 bp, Artificial Sequence
  primer
aagcagaatcattgctgaccc

SEQ ID NO: 15111 - DNA, 38 bp, Artificial Sequence
  primer
gtaaaacgacggccagtgaggactcctgcttcagcttc

SEQ ID NO: 15112 - DNA, 21 bp, Artificial Sequence
  primer
atgaagaggaggagacgatgg

SEQ ID NO: 15113 - DNA, 38 bp, Artificial Sequence
  primer
gtaaaacgacggccagtctctgcctgtctggagatgag

SEQ ID NO: 15114 - DNA, 21 bp, Artificial Sequence
  primer
ccctttcacagggaattatgg

SEQ ID NO: 15115 - DNA, 38 bp, Artificial Sequence
  primer
gtaaaacgacggccagtgacaaagacctctctgagccg

SEQ ID NO: 15116 - DNA, 41 bp, Artificial Sequence
  primer
gtaaaacgacggccagtcactgcttgctttcagtagtttcc

SEQ ID NO: 15117 - DNA, 38 bp, Artificial Sequence
  primer
gtaaaacgacggccagtagggatgaagagatgtcctgg

SEQ ID NO: 15118 - DNA, 21 bp, Artificial Sequence
  primer
gtattgccctgtcctcagacc

SEQ ID NO: 15119 - DNA, 20 bp, Artificial Sequence
  primer
tacctgcctctgccttccag

SEQ ID NO: 15120 - DNA, 37 bp, Artificial Sequence
  primer
gtaaaacgacggccagtctgagaggtgggctgtgatg

SEQ ID NO: 15121 - DNA, 38 bp, Artificial Sequence
  primer
gtaaaacgacggccagtttagaggaaggctcacggaag

SEQ ID NO: 15122 - DNA, 20 bp, Artificial Sequence
  primer
aaaggacttggtgctctcgg

SEQ ID NO: 15123 - DNA, 20 bp, Artificial Sequence
  primer
ctgagtgaggaagcgacctg

SEQ ID NO: 15124 - DNA, 38 bp, Artificial Sequence
  primer
gtaaaacgacggccagtgtaggtggcatatgagctggg

SEQ ID NO: 15125 - DNA, 22 bp, Artificial Sequence
  primer
ccctgattcctgaatatttggc

SEQ ID NO: 15126 - DNA, 38 bp, Artificial Sequence
  primer
gtaaaacgacggccagtctcaaatgatctgcccatctc

SEQ ID NO: 15127 - DNA, 37 bp, Artificial Sequence
  primer
gtaaaacgacggccagtgctatggtgggctcagtgtg

SEQ ID NO: 15128 - DNA, 38 bp, Artificial Sequence
  primer
gtaaaacgacggccagtgatacagacccagggaaaggg

SEQ ID NO: 15129 - DNA, 21 bp, Artificial Sequence
  primer
agaatgctggtcctatgctcc

SEQ ID NO: 15130 - DNA, 36 bp, Artificial Sequence
  primer
gtaaaacgacggccagtccttctttggctacgctgc

SEQ ID NO: 15131 - DNA, 21 bp, Artificial Sequence
  primer
gattgccttatgagctgggag

SEQ ID NO: 15132 - DNA, 40 bp, Artificial Sequence
  primer
gtaaaacgacggccagttcccatatatgcagattgtcagg

SEQ ID NO: 15133 - DNA, 37 bp, Artificial Sequence
  primer
gtaaaacgacggccagtacagtgtttcctctgccagg

SEQ ID NO: 15134 - DNA, 22 bp, Artificial Sequence
  primer
cagagctctcagtcttaaccgc

SEQ ID NO: 15135 - DNA, 20 bp, Artificial Sequence
  primer
gtcatgccctctaccctgtg

SEQ ID NO: 15136 - DNA, 38 bp, Artificial Sequence
  primer
gtaaaacgacggccagtggtgatcaatggaagcctgac

SEQ ID NO: 15137 - DNA, 21 bp, Artificial Sequence
  primer
cagttggaccagaactccctc

SEQ ID NO: 15138 - DNA, 38 bp, Artificial Sequence
  primer
gtaaaacgacggccagtcatccaggagtgctgaaagtg

SEQ ID NO: 15139 - DNA, 35 bp, Artificial Sequence
  primer
gtaaaacgacggccagtttcgctgctctccattcg

SEQ ID NO: 15140 - DNA, 21 bp, Artificial Sequence
  primer
tagtgggacaagaagcgtgtg

SEQ ID NO: 15141 - DNA, 23 bp, Artificial Sequence
  primer
aagtttaggcattaagtcagggc

SEQ ID NO: 15142 - DNA, 39 bp, Artificial Sequence
  primer
gtaaaacgacggccagtgcatctcagaatctgcctgtag

SEQ ID NO: 15143 - DNA, 38 bp, Artificial Sequence
  primer
gtaaaacgacggccagttggtcaagtgaaagatgtggg

SEQ ID NO: 15144 - DNA, 21 bp, Artificial Sequence
  primer
atcagatcaaagcatgaaccg

SEQ ID NO: 15145 - DNA, 39 bp, Artificial Sequence
  primer
gtaaaacgacggccagtggtgtacgactgtagacccagc

SEQ ID NO: 15146 - DNA, 21 bp, Artificial Sequence
  primer
tatcggcttcagtggtctgtc

SEQ ID NO: 15147 - DNA, 38 bp, Artificial Sequence
  primer
gtaaaacgacggccagtagttggagcagaatgcaaacc

SEQ ID NO: 15148 - DNA, 20 bp, Artificial Sequence
  primer
gggtcctgattgcacttctg

SEQ ID NO: 15149 - DNA, 21 bp, Artificial Sequence
  primer
tctggatttggaagaggaagc

SEQ ID NO: 15150 - DNA, 38 bp, Artificial Sequence
  primer
gtaaaacgacggccagtggagaagagcagtgatcgagg

SEQ ID NO: 15151 - DNA, 38 bp, Artificial Sequence
  primer
gtaaaacgacggccagttagggtctctggtatctcccg

SEQ ID NO: 15152 - DNA, 37 bp, Artificial Sequence
  primer
gtaaaacgacggccagtaggccagcttggtctaggag

SEQ ID NO: 15153 - DNA, 21 bp, Artificial Sequence
  primer
aggatgagttggtagcacacg

SEQ ID NO: 15154 - DNA, 38 bp, Artificial Sequence
  primer
gtaaaacgacggccagtgactggctgggtctgagtttc

SEQ ID NO: 15155 - DNA, 38 bp, Artificial Sequence; identical to SEQ ID NO: 15151
  primer

SEQ ID NO: 15156 - DNA, 38 bp, Artificial Sequence; identical to SEQ ID NO: 15154
  primer

SEQ ID NO: 15157 - DNA, 21 bp, Artificial Sequence
  primer
agctgctggtagcttgattcc

SEQ ID NO: 15158 - DNA, 20 bp, Artificial Sequence
  primer
cgcaagaattacccacttcg

SEQ ID NO: 15159 - DNA, 39 bp, Artificial Sequence
  primer
gtaaaacgacggccagtgctgaagctctcaataacctgc

SEQ ID NO: 15160 - DNA, 37 bp, Artificial Sequence
  primer
gtaaaacgacggccagtgaccttggaggaggaagtcg

SEQ ID NO: 15161 - DNA, 36 bp, Artificial Sequence
  primer
gtaaaacgacggccagtctctggagagccctttggg

SEQ ID NO: 15162 - DNA, 21 bp, Artificial Sequence
  primer
gaactgcatcagccctctttc

SEQ ID NO: 15163 - DNA, 38 bp, Artificial Sequence
  primer
gtaaaacgacggccagttctgaaagcagatgggtgatg

SEQ ID NO: 15164 - DNA, 21 bp, Artificial Sequence
  primer
gaggaaatcgtggaaaggatg

SEQ ID NO: 15165 - DNA, 38 bp, Artificial Sequence
  primer
gtaaaacgacggccagtacctcacctgtcagtgccttc

SEQ ID NO: 15166 - DNA, 38 bp, Artificial Sequence
  primer
gtaaaacgacggccagtgagtcatctcaggtcagcagg

SEQ ID NO: 15167 - DNA, 20 bp, Artificial Sequence
  primer
ctctgggtcgggtagggtag

SEQ ID NO: 15168 - DNA, 38 bp, Artificial Sequence
  primer
gtaaaacgacggccagtcctggactttagaagccgttg

SEQ ID NO: 15169 - DNA, 38 bp, Artificial Sequence
  primer
gtaaaacgacggccagtctggtgcagggaaagttcttc

SEQ ID NO: 15170 - DNA, 20 bp, Artificial Sequence
  primer
gtggagtacctggtggtggg

SEQ ID NO: 15171 - DNA, 36 bp, Artificial Sequence
  primer
gtaaaacgacggccagtccatgacttacccgtccag

SEQ ID NO: 15172 - DNA, 19 bp, Artificial Sequence
  primer
gtgaccagatgagggctgg

SEQ ID NO: 15173 - DNA, 38 bp, Artificial Sequence
  primer
gtaaaacgacggccagtcagttcttgagatcagcctgg

SEQ ID NO: 15174 - DNA, 21 bp, Artificial Sequence
  primer
gtgtcctcctcctacagcacg

SEQ ID NO: 15175 - DNA, 37 bp, Artificial Sequence
  primer
gtaaaacgacggccagtgctcacacccacattccaag

SEQ ID NO: 15176 - DNA, 38 bp, Artificial Sequence
  primer
gtaaaacgacggccagtgtccctgtctttgtgtcctcc

SEQ ID NO: 15177 - DNA, 35 bp, Artificial Sequence
  primer
gtaaaacgacggccagttgcaccttccagagccag

SEQ ID NO: 15178 - DNA, 38 bp, Artificial Sequence
  primer
gtaaaacgacggccagttgtgttgatgaagggaacgag

SEQ ID NO: 15179 - DNA, 21 bp, Artificial Sequence
  primer
acatccagatgatggtgaggg

SEQ ID NO: 15180 - DNA, 21 bp, Artificial Sequence
  primer
tggttacacactgaaccctgg

SEQ ID NO: 15181 - DNA, 36 bp, Artificial Sequence
  primer
gtaaaacgacggccagtggacagggaagggaaggag

SEQ ID NO: 15182 - DNA, 20 bp, Artificial Sequence
  primer
cttgctgtctctgctcctgg

SEQ ID NO: 15183 - DNA, 35 bp, Artificial Sequence
  primer
gtaaaacgacggccagtagatgccagtgacagcgg

SEQ ID NO: 15184 - DNA, 38 bp, Artificial Sequence
  primer
gtaaaacgacggccagtcctggaggagtgtggatgatg

SEQ ID NO: 15185 - DNA, 21 bp, Artificial Sequence
  primer
ctccaccctggactcagtttc

SEQ ID NO: 15186 - DNA, 38 bp, Artificial Sequence
  primer
gtaaaacgacggccagtaaagacttatctggcatcggg

SEQ ID NO: 15187 - DNA, 35 bp, Artificial Sequence
  primer
gtaaaacgacggccagttcttggtgccacaggacc

SEQ ID NO: 15188 - DNA, 21 bp, Artificial Sequence
  primer
accaggtgatctctggattgc

SEQ ID NO: 15189 - DNA, 20 bp, Artificial Sequence
  primer
cttgccttgttcacctcctg

SEQ ID NO: 15190 - DNA, 22 bp, Artificial Sequence
  primer
gctaaagagtgggtgtgacctg

SEQ ID NO: 15191 - DNA, 20 bp, Artificial Sequence
  primer
ggttcctgtgatggaggcac

SEQ ID NO: 15192 - DNA, 37 bp, Artificial Sequence
  primer
gtaaaacgacggccagtcagagaggaagggctgcttg

SEQ ID NO: 15193 - DNA, 36 bp, Artificial Sequence
  primer
gtaaaacgacggccagtctcatctgatctggcgctg

SEQ ID NO: 15194 - DNA, 22 bp, Artificial Sequence
  primer
aacacagggacacaaattcacc

SEQ ID NO: 15195 - DNA, 21 bp, Artificial Sequence
  primer
acagccatttgtcttcttggg

SEQ ID NO: 15196 - DNA, 37 bp, Artificial Sequence
  primer
gtaaaacgacggccagtcaccaatttcaacagcctgc

SEQ ID NO: 15197 - DNA, 20 bp, Artificial Sequence
  primer
cacgagctacgtgatcctgc

SEQ ID NO: 15198 - DNA, 37 bp, Artificial Sequence
  primer
gtaaaacgacggccagttcagtctgaggcagggagag

SEQ ID NO: 15199 - DNA, 38 bp, Artificial Sequence
  primer
gtaaaacgacggccagtccagacacttagggccagatg

SEQ ID NO: 15200 - DNA, 21 bp, Artificial Sequence
  primer
tcctcactgattcgtgtctgc

SEQ ID NO: 15201 - DNA, 38 bp, Artificial Sequence
  primer
gtaaaacgacggccagtggaaacttgtgcgataggtcc

SEQ ID NO: 15202 - DNA, 21 bp, Artificial Sequence
  primer
tgtctgtgattctgtccctgc

SEQ ID NO: 15203 - DNA, 38 bp, Artificial Sequence
  primer
gtaaaacgacggccagttactccctctacctgcgcttc

SEQ ID NO: 15204 - DNA, 21 bp, Artificial Sequence
  primer
cctttaccttcctgcacttcg

SEQ ID NO: 15205 - DNA, 38 bp, Artificial Sequence
  primer
gtaaaacgacggccagtagggcagaatgtgatcctgag

SEQ ID NO: 15206 - DNA, 21 bp, Artificial Sequence
  primer
gtaggaggagccctctgatgc

SEQ ID NO: 15207 - DNA, 38 bp, Artificial Sequence
  primer
gtaaaacgacggccagtgaagcctgtgtcttgcacatc

SEQ ID NO: 15208 - DNA, 21 bp, Artificial Sequence
  primer
ctgggtcttcctgtggttctc

SEQ ID NO: 15209 - DNA, 36 bp, Artificial Sequence
  primer
gtaaaacgacggccagtagtgcttggcacagtggtg

SEQ ID NO: 15210 - DNA, 22 bp, Artificial Sequence
  primer
gaggaggtgaagccttgtagtg

SEQ ID NO: 15211 - DNA, 38 bp, Artificial Sequence
  primer
gtaaaacgacggccagtagcctctctgagatacggagg

SEQ ID NO: 15212 - DNA, 36 bp, Artificial Sequence
  primer
gtaaaacgacggccagtagcagtgggtggactggag

SEQ ID NO: 15213 - DNA, 20 bp, Artificial Sequence
  primer
ggagaaggcccaaactgaag

SEQ ID NO: 15214 - DNA, 38 bp, Artificial Sequence
  primer
gtaaaacgacggccagtacaaggagaagtgggacgatg

SEQ ID NO: 15215 - DNA, 38 bp, Artificial Sequence
  primer
gtaaaacgacggccagtctttcctggtacgtgtttccc

SEQ ID NO: 15216 - DNA, 21 bp, Artificial Sequence
  primer
agacctcacctgaagtcctgg

SEQ ID NO: 15217 - DNA, 37 bp, Artificial Sequence
  primer
gtaaaacgacggccagtctgaaccctggacctgtgtg

SEQ ID NO: 15218 - DNA, 21 bp, Artificial Sequence
  primer
gtggatttagcctgtccttgg

SEQ ID NO: 15219 - DNA, 38 bp, Artificial Sequence
  primer
gtaaaacgacggccagttgtgggtatgccagtctatgg

SEQ ID NO: 15220 - DNA, 21 bp, Artificial Sequence
  primer
ggaggtaggtctgacacctgg

SEQ ID NO: 15221 - DNA, 21 bp, Artificial Sequence
  primer
gtgctgtgtgtgtgtcaccag

SEQ ID NO: 15222 - DNA, 38 bp, Artificial Sequence
  primer
gtaaaacgacggccagtatgggagtctgggagaacaag

SEQ ID NO: 15223 - DNA, 38 bp, Artificial Sequence
  primer
gtaaaacgacggccagtactgagggatggtgtttgagg

SEQ ID NO: 15224 - DNA, 38 bp, Artificial Sequence
  primer
gtaaaacgacggccagtccgtcattgtcctggtatgtg

SEQ ID NO: 15225 - DNA, 38 bp, Artificial Sequence
  primer
gtaaaacgacggccagtaacccagctctctctctctcg

SEQ ID NO: 15226 - DNA, 37 bp, Artificial Sequence
  primer
gtaaaacgacggccagtggacattactgaggccctgg

SEQ ID NO: 15227 - DNA, 38 bp, Artificial Sequence
  primer
gtaaaacgacggccagtttccttctacacttgcctggg

SEQ ID NO: 15228 - DNA, 38 bp, Artificial Sequence
  primer
gtaaaacgacggccagtaggctcagccactaacacctg

SEQ ID NO: 15229 - DNA, 38 bp, Artificial Sequence
  primer
gtaaaacgacggccagttctgggaggttccttctcctc

SEQ ID NO: 15230 - DNA, 38 bp, Artificial Sequence
  primer
gtaaaacgacggccagtaaccctgtttacatgtgtggg

SEQ ID NO: 15231 - DNA, 38 bp, Artificial Sequence
  primer
gtaaaacgacggccagtggcttcctgtctctaaagccc

SEQ ID NO: 15232 - DNA, 22 bp, Artificial Sequence
  primer
aactaggtcttgtcccagaggg

SEQ ID NO: 15233 - DNA, 38 bp, Artificial Sequence
  primer
gtaaaacgacggccagtgaagttccacactttcgaccg

SEQ ID NO: 15234 - DNA, 38 bp, Artificial Sequence
  primer
gtaaaacgacggccagttgggactcctcagtttgatcg

SEQ ID NO: 15235 - DNA, 37 bp, Artificial Sequence
  primer
gtaaaacgacggccagtcgctgttcacacagcaacag

SEQ ID NO: 15236 - DNA, 21 bp, Artificial Sequence
  primer
caggccaaatgacataggatg

SEQ ID NO: 15237 - DNA, 41 bp, Artificial Sequence
  primer
gtaaaacgacggccagttcgagtatttccaactaatttccc

SEQ ID NO: 15238 - DNA, 21 bp, Artificial Sequence
  primer
tgggagaacagaatcatgtgg

SEQ ID NO: 15239 - DNA, 44 bp, Artificial Sequence
  primer
gtaaaacgacggccagttgtataggaacatattgcatgagacag

SEQ ID NO: 15240 - DNA, 38 bp, Artificial Sequence
  primer
gtaaaacgacggccagtaaacttggtgtttgcatcagc

SEQ ID NO: 15241 - DNA, 22 bp, Artificial Sequence
  primer
gcatttccattaaacacaagga

SEQ ID NO: 15242 - DNA, 37 bp, Artificial Sequence
  primer
gtaaaacgacggccagtgggttcatcttcaagggtgg

SEQ ID NO: 15243 - DNA, 40 bp, Artificial Sequence
  primer
gtaaaacgacggccagtcgcaatgctctatatttgacctg

SEQ ID NO: 15244 - DNA, 21 bp, Artificial Sequence
  primer
gctctgcagttagagaggtgc

SEQ ID NO: 15245 - DNA, 21 bp, Artificial Sequence
  primer
agcctgattcccagctaagtg

SEQ ID NO: 15246 - DNA, 22 bp, Artificial Sequence
  primer
tcttgcatgctggatgtttatc

SEQ ID NO: 15247 - DNA, 39 bp, Artificial Sequence
  primer
gtaaaacgacggccagtgtcaacccaaatgggtgttatt

SEQ ID NO: 15248 - DNA, 23 bp, Artificial Sequence
  primer
cagctattggcagctgtagattt

SEQ ID NO: 15249 - DNA, 24 bp, Artificial Sequence
  primer
tgcaagatttaccttgatcaacac

SEQ ID NO: 15250 - DNA, 39 bp, Artificial Sequence
  primer
gtaaaacgacggccagttttaccaggctttatctttgcc

SEQ ID NO: 15251 - DNA, 41 bp, Artificial Sequence
  primer
gtaaaacgacggccagttcagtgctgttgctttctcatatt

SEQ ID NO: 15252 - DNA, 23 bp, Artificial Sequence
  primer
tggacttatggtgtatgagagcc

SEQ ID NO: 15253 - DNA, 21 bp, Artificial Sequence
  primer
cgctttgcattactggagatg

SEQ ID NO: 15254 - DNA, 21 bp, Artificial Sequence
  primer
agaacagagtggattcatggg

SEQ ID NO: 15255 - DNA, 21 bp, Artificial Sequence
  primer
atgaatgccatcagtttgcac

SEQ ID NO: 15256 - DNA, 42 bp, Artificial Sequence
  primer
gtaaaacgacggccagtgcaatgaatcagagattaacaatcc

SEQ ID NO: 15257 - DNA, 21 bp, Artificial Sequence
  primer
tggtggtaacctagcaacacc

SEQ ID NO: 15258 - DNA, 42 bp, Artificial Sequence
  primer
gtaaaacgacggccagtgttgtttgtatcacacgttagtggt

SEQ ID NO: 15259 - DNA, 38 bp, Artificial Sequence
  primer
gtaaaacgacggccagtaattgttccgtatgcctctgc

SEQ ID NO: 15260 - DNA, 38 bp, Artificial Sequence
  primer
gtaaaacgacggccagtacacaagggccacttatggtg

SEQ ID NO: 15261 - DNA, 39 bp, Artificial Sequence
  primer
gtaaaacgacggccagtccaagttaatggtcttggaacc

SEQ ID NO: 15262 - DNA, 20 bp, Artificial Sequence
  primer
cctcagagctgattgccaag

SEQ ID NO: 15263 - DNA, 41 bp, Artificial Sequence
  primer
gtaaaacgacggccagtaaattgtgtgctatgtttcctttg

SEQ ID NO: 15264 - DNA, 39 bp, Artificial Sequence
  primer
gtaaaacgacggccagttgctttagctatgggctacctg

SEQ ID NO: 15265 - DNA, 37 bp, Artificial Sequence
  primer
gtaaaacgacggccagtggatattggtccttgccgag

SEQ ID NO: 15266 - DNA, 39 bp, Artificial Sequence
  primer
gtaaaacgacggccagtcacatgcccatgagtatgaatg

SEQ ID NO: 15267 - DNA, 21 bp, Artificial Sequence
  primer
tcctgccaaacttgattaccc

SEQ ID NO: 15268 - DNA, 24 bp, Artificial Sequence
  primer
aagattacaaacacgctctcttcc

SEQ ID NO: 15269 - DNA, 20 bp, Artificial Sequence
  primer
gtttctcccatgaacaagcg

SEQ ID NO: 15270 - DNA, 38 bp, Artificial Sequence
  primer
gtaaaacgacggccagtctgtggctttcttgcaatcag

SEQ ID NO: 15271 - DNA, 38 bp, Artificial Sequence
  primer
gtaaaacgacggccagtagcagagtcttaggtacgccc

SEQ ID NO: 15272 - DNA, 24 bp, Artificial Sequence
  primer
gcctagagatttggatgtgaagtc

SEQ ID NO: 15273 - DNA, 21 bp, Artificial Sequence
  primer
atggccaggaattaggaaagg

SEQ ID NO: 15274 - DNA, 21 bp, Artificial Sequence
  primer
ctggtttggatttgctgttgg

SEQ ID NO: 15275 - DNA, 21 bp, Artificial Sequence
  primer
gatttcctttcttggtgctgg

SEQ ID NO: 15276 - DNA, 26 bp, Artificial Sequence
  primer
accagtagataaagaaatgctgttca

SEQ ID NO: 15277 - DNA, 38 bp, Artificial Sequence
  primer
gtaaaacgacggccagtgctcagtttgattccagggac

SEQ ID NO: 15278 - DNA, 38 bp, Artificial Sequence
  primer
gtaaaacgacggccagtatctgcccttggtttattgcc

SEQ ID NO: 15279 - DNA, 38 bp, Artificial Sequence
  primer
gtaaaacgacggccagtaaaggctctagggcataagcg

SEQ ID NO: 15280 - DNA, 38 bp, Artificial Sequence
  primer
gtaaaacgacggccagtacccacatgcagtttcagttc

SEQ ID NO: 15281 - DNA, 20 bp, Artificial Sequence
  primer
tctgccgaggttatccattg

SEQ ID NO: 15282 - DNA, 21 bp, Artificial Sequence
  primer
cttcctccatagccactcagc

SEQ ID NO: 15283 - DNA, 21 bp, Artificial Sequence
  primer
tagatctcctgcctctcgctc

SEQ ID NO: 15284 - DNA, 38 bp, Artificial Sequence
  primer
gtaaaacgacggccagtagacaagctggtggaaagcac

SEQ ID NO: 15285 - DNA, 39 bp, Artificial Sequence
  primer
gtaaaacgacggccagtaacagccatgacctttattgtg

SEQ ID NO: 15286 - DNA, 38 bp, Artificial Sequence
  primer
gtaaaacgacggccagttgcaactgtgttcatcttggg

SEQ ID NO: 15287 - DNA, 21 bp, Artificial Sequence
  primer
ttgttcccagagatgtgaagg

SEQ ID NO: 15288 - DNA, 21 bp, Artificial Sequence
  primer
ctagcaggagttgctggaagg

SEQ ID NO: 15289 - DNA, 37 bp, Artificial Sequence
  primer
gtaaaacgacggccagtcggtgcagagctctccttta

SEQ ID NO: 15290 - DNA, 38 bp, Artificial Sequence
  primer
gtaaaacgacggccagttcagatacagggcttctgcac

SEQ ID NO: 15291 - DNA, 38 bp, Artificial Sequence
  primer
gtaaaacgacggccagtggtcagacatgactggtttcc

SEQ ID NO: 15292 - DNA, 41 bp, Artificial Sequence
  primer
gtaaaacgacggccagttttgccaagaatgtttaggaagag

SEQ ID NO: 15293 - DNA, 38 bp, Artificial Sequence
  primer
gtaaaacgacggccagtagcaatagatgttctgccacg

SEQ ID NO: 15294 - DNA, 21 bp, Artificial Sequence
  primer
ttctaggtctcctggcagctc

SEQ ID NO: 15295 - DNA, 36 bp, Artificial Sequence
  primer
gtaaaacgacggccagtgggagggtagctgaggctg

SEQ ID NO: 15296 - DNA, 35 bp, Artificial Sequence
  primer
gtaaaacgacggccagtcggctataaaggtggccg

SEQ ID NO: 15297 - DNA, 38 bp, Artificial Sequence
  primer
gtaaaacgacggccagttttctcctctgtgttcggacc

SEQ ID NO: 15298 - DNA, 38 bp, Artificial Sequence
  primer
gtaaaacgacggccagtgcgagtcgagtattctcccag

SEQ ID NO: 15299 - DNA, 38 bp, Artificial Sequence
  primer
gtaaaacgacggccagtctgtgcatttgaggtctggag

SEQ ID NO: 15300 - DNA, 21 bp, Artificial Sequence
  primer
agattgtccgacgttccagac

SEQ ID NO: 15301 - DNA, 35 bp, Artificial Sequence
  primer
gtaaaacgacggccagtcaggaagggagtggcagg

SEQ ID NO: 15302 - DNA, 38 bp, Artificial Sequence
  primer
gtaaaacgacggccagttgtcctttgactgagtccgtg

SEQ ID NO: 15303 - DNA, 36 bp, Artificial Sequence
  primer
gtaaaacgacggccagtggtgaagagcagcctccag

SEQ ID NO: 15304 - DNA, 19 bp, Artificial Sequence
  primer
ctctggaaagcttcacggg

SEQ ID NO: 15305 - DNA, 38 bp, Artificial Sequence
  primer
gtaaaacgacggccagtctctcagcacctcaaccagac

SEQ ID NO: 15306 - DNA, 21 bp, Artificial Sequence
  primer
gctagagggacttgtgcatgg

SEQ ID NO: 15307 - DNA, 18 bp, Artificial Sequence
  primer
agtccagggagccacagg

SEQ ID NO: 15308 - DNA, 37 bp, Artificial Sequence
  primer
gtaaaacgacggccagtaggatcaccatttgtgggtg

SEQ ID NO: 15309 - DNA, 38 bp, Artificial Sequence
  primer
gtaaaacgacggccagtcgcaaagcagcgtatattgtc

SEQ ID NO: 15310 - DNA, 37 bp, Artificial Sequence
  primer
gtaaaacgacggccagtcttgagggtacacgcctctg

SEQ ID NO: 15311 - DNA, 20 bp, Artificial Sequence
  primer
cctctgctcctcgaagaagg

SEQ ID NO: 15312 - DNA, 38 bp, Artificial Sequence
  primer
gtaaaacgacggccagtagccctgttccatcaggtaag

SEQ ID NO: 15313 - DNA, 22 bp, Artificial Sequence
  primer
tcttacctcctgagagccacac

SEQ ID NO: 15314 - DNA, 35 bp, Artificial Sequence
  primer
gtaaaacgacggccagtgtgcctttgcactccagc

SEQ ID NO: 15315 - DNA, 38 bp, Artificial Sequence
  primer
gtaaaacgacggccagtgcttcccgctaacatatctgg

SEQ ID NO: 15316 - DNA, 20 bp, Artificial Sequence
  primer
gtgaagtgagggtgtcaggg

SEQ ID NO: 15317 - DNA, 21 bp, Artificial Sequence
  primer
ggcagaagataaacgtcaggc

SEQ ID NO: 15318 - DNA, 38 bp, Artificial Sequence
  primer
gtaaaacgacggccagtaggtgcttaaagtgctcaccg

SEQ ID NO: 15319 - DNA, 21 bp, Artificial Sequence
  primer
aaacagccttgggaatctgtg

SEQ ID NO: 15320 - DNA, 37 bp, Artificial Sequence
  primer
gtaaaacgacggccagtagaacaggtggattcctggg

SEQ ID NO: 15321 - DNA, 38 bp, Artificial Sequence
  primer
gtaaaacgacggccagttttcatttcctccacacatgg

SEQ ID NO: 15322 - DNA, 21 bp, Artificial Sequence
  primer
agggacacagaggatgtttgg

SEQ ID NO: 15323 - DNA, 38 bp, Artificial Sequence
  primer
gtaaaacgacggccagtatctccaatacaggccagtcg

SEQ ID NO: 15324 - DNA, 38 bp, Artificial Sequence
  primer
gtaaaacgacggccagtccagtctcacagggcaagaac

SEQ ID NO: 15325 - DNA, 37 bp, Artificial Sequence
  primer
gtaaaacgacggccagttccatctccaggtccctctc

SEQ ID NO: 15326 - DNA, 21 bp, Artificial Sequence
  primer
ttctgggtgagcctaggtttg

SEQ ID NO: 15327 - DNA, 21 bp, Artificial Sequence
  primer
aactggtcacaccctcctcag

SEQ ID NO: 15328 - DNA, 20 bp, Artificial Sequence
  primer
gaagttcccggactttggtc

SEQ ID NO: 15329 - DNA, 21 bp, Artificial Sequence
  primer
ttaaccatttcgtcctccctc

SEQ ID NO: 15330 - DNA, 21 bp, Artificial Sequence
  primer
ccaagtctccaaacttccagg

SEQ ID NO: 15331 - DNA, 20 bp, Artificial Sequence
  primer
aggctcaggagctaggatgg

SEQ ID NO: 15332 - DNA, 38 bp, Artificial Sequence
  primer
gtaaaacgacggccagtctcaggtcgagggtgtcattt

SEQ ID NO: 15333 - DNA, 18 bp, Artificial Sequence
  primer
ctggacatggtgaggccc

SEQ ID NO: 15334 - DNA, 35 bp, Artificial Sequence
  primer
gtaaaacgacggccagtcagcaggagggatcgagg

SEQ ID NO: 15335 - DNA, 39 bp, Artificial Sequence
  primer
gtaaaacgacggccagtttcgaggtgaagtagcttccag

SEQ ID NO: 15336 - DNA, 37 bp, Artificial Sequence
  primer
gtaaaacgacggccagtcagctactggcaggacaagg

SEQ ID NO: 15337 - DNA, 39 bp, Artificial Sequence
  primer
gtaaaacgacggccagtgacttaggtcctacccactccg

SEQ ID NO: 15338 - DNA, 38 bp, Artificial Sequence
  primer
gtaaaacgacggccagtggtttctcacttctgcaaccc

SEQ ID NO: 15339 - DNA, 20 bp, Artificial Sequence
  primer
gcaaggagtggatggagacc

SEQ ID NO: 15340 - DNA, 35 bp, Artificial Sequence
  primer
gtaaaacgacggccagtgcagagggaggagggagc

SEQ ID NO: 15341 - DNA, 21 bp, Artificial Sequence
  primer
gcctttgacagcatttgctac

SEQ ID NO: 15342 - DNA, 38 bp, Artificial Sequence
  primer
gtaaaacgacggccagtcacactgtggatgtcacatgg

SEQ ID NO: 15343 - DNA, 20 bp, Artificial Sequence
  primer
gtctggtgatggcagagagc

SEQ ID NO: 15344 - DNA, 38 bp, Artificial Sequence
  primer
gtaaaacgacggccagtaggactgaggttgggtgtctg

SEQ ID NO: 15345 - DNA, 38 bp, Artificial Sequence
  primer
gtaaaacgacggccagtaagaaccttctggccaaggac

SEQ ID NO: 15346 - DNA, 36 bp, Artificial Sequence
  primer
gtaaaacgacggccagtgtccctgctgcttctggac

SEQ ID NO: 15347 - DNA, 39 bp, Artificial Sequence
  primer
gtaaaacgacggccagttctccttgtagcgagattgagg

SEQ ID NO: 15348 - DNA, 38 bp, Artificial Sequence
  primer
gtaaaacgacggccagtactgctgggacctttctaccc

SEQ ID NO: 15349 - DNA, 38 bp, Artificial Sequence
  primer
gtaaaacgacggccagtggtctctccagggtctcacag

SEQ ID NO: 15350 - DNA, 38 bp, Artificial Sequence; identical to SEQ ID NO: 15349
  primer

SEQ ID NO: 15351 - DNA, 38 bp, Artificial Sequence
  primer
gtaaaacgacggccagtctcagcagaggaggtagtggg

SEQ ID NO: 15352 - DNA, 38 bp, Artificial Sequence
  primer
gtaaaacgacggccagtctaattggagggcagggaaag

SEQ ID NO: 15353 - DNA, 38 bp, Artificial Sequence
  primer
gtaaaacgacggccagtaaggcagggaggatgtttctc

SEQ ID NO: 15354 - DNA, 38 bp, Artificial Sequence
  primer
gtaaaacgacggccagtgactacttccctgccaccaac

SEQ ID NO: 15355 - DNA, 21 bp, Artificial Sequence
  primer
gagtcggagctgaacatggac

SEQ ID NO: 15356 - DNA, 38 bp, Artificial Sequence
  primer
gtaaaacgacggccagtcaaccgtgagtggtacgacag

SEQ ID NO: 15357 - DNA, 21 bp, Artificial Sequence
  primer
tacagtgtgtacgccagcctc

SEQ ID NO: 15358 - DNA, 38 bp, Artificial Sequence
  primer
gtaaaacgacggccagtgacgtcttcaccctgaccttc

SEQ ID NO: 15359 - DNA, 38 bp, Artificial Sequence
  primer
gtaaaacgacggccagtctcttgcagacagactttggg

SEQ ID NO: 15360 - DNA, 18 bp, Artificial Sequence
  primer
cccagcctcctcagcaac

SEQ ID NO: 15361 - DNA, 19 bp, Artificial Sequence
  primer
atccaggagttgtgggtgc

SEQ ID NO: 15362 - DNA, 21 bp, Artificial Sequence
  primer
gaagaaggtggacactcagcc

SEQ ID NO: 15363 - DNA, 38 bp, Artificial Sequence
  primer
gtaaaacgacggccagtacagcgcacctgacctctaag

SEQ ID NO: 15364 - DNA, 38 bp, Artificial Sequence
  primer
gtaaaacgacggccagtcatccagaacgatgaggtgag

SEQ ID NO: 15365 - DNA, 38 bp, Artificial Sequence
  primer
gtaaaacgacggccagtccgctcatgaagtacctggat

SEQ ID NO: 15366 - DNA, 21 bp, Artificial Sequence
  primer
ctactcctccaggccattctg

SEQ ID NO: 15367 - DNA, 21 bp, Artificial Sequence
  primer
agggtgtgagaaagggctctg

SEQ ID NO: 15368 - DNA, 38 bp, Artificial Sequence
  primer
gtaaaacgacggccagtactgagttcaaactgcagccc

SEQ ID NO: 15369 - DNA, 38 bp, Artificial Sequence
  primer
gtaaaacgacggccagtagctcaaacaggtagggaggc

SEQ ID NO: 15370 - DNA, 35 bp, Artificial Sequence
  primer
gtaaaacgacggccagtgccaacggtgagttgcag

SEQ ID NO: 15371 - DNA, 21 bp, Artificial Sequence
  primer
tgcaccctgtatacgacgaac

SEQ ID NO: 15372 - DNA, 20 bp, Artificial Sequence
  primer
gagtgagcatctgggtggag

SEQ ID NO: 15373 - DNA, 18 bp, Artificial Sequence
  primer
tccctagagtcgagcggg

SEQ ID NO: 15374 - DNA, 39 bp, Artificial Sequence
  primer
gtaaaacgacggccagtgcctttgaatttgggatttagc

SEQ ID NO: 15375 - DNA, 40 bp, Artificial Sequence
  primer
gtaaaacgacggccagtaatgcgtttgtaagcttcttcag

SEQ ID NO: 15376 - DNA, 39 bp, Artificial Sequence
  primer
gtaaaacgacggccagtagcagaaaccttatcaccaagg

SEQ ID NO: 15377 - DNA, 20 bp, Artificial Sequence
  primer
ttatgttggccctgaggatg

SEQ ID NO: 15378 - DNA, 21 bp, Artificial Sequence
  primer
gtgggcccttagaagttccag

SEQ ID NO: 15379 - DNA, 38 bp, Artificial Sequence
  primer
gtaaaacgacggccagtacaggaatggctgtcttgctc

SEQ ID NO: 15380 - DNA, 38 bp, Artificial Sequence
  primer
gtaaaacgacggccagtagcagtttcacttcctctggg

SEQ ID NO: 15381 - DNA, 22 bp, Artificial Sequence
  primer
tgaagaagatgctgaggaatgg

SEQ ID NO: 15382 - DNA, 19 bp, Artificial Sequence
  primer
gatgctgaggaatgggctc

SEQ ID NO: 15383 - DNA, 38 bp, Artificial Sequence
  primer
gtaaaacgacggccagttaaactcagttcggtttcccg

SEQ ID NO: 15384 - DNA, 21 bp, Artificial Sequence
  primer
tgaggaagacgcaagaagaaa

SEQ ID NO: 15385 - DNA, 44 bp, Artificial Sequence
  primer
gtaaaacgacggccagtgggacaaataatttagtgctttacttt

SEQ ID NO: 15386 - DNA, 42 bp, Artificial Sequence
  primer
gtaaaacgacggccagtaaagattagccattgtttactccag

SEQ ID NO: 15387 - DNA, 38 bp, Artificial Sequence
  primer
gtaaaacgacggccagtgtctgctgtgctttatgggaa

SEQ ID NO: 15388 - DNA, 38 bp, Artificial Sequence
  primer
gtaaaacgacggccagtcttatttgcacaggcatccag

SEQ ID NO: 15389 - DNA, 41 bp, Artificial Sequence
  primer
gtaaaacgacggccagtaacccagaaataaatgactgttca

SEQ ID NO: 15390 - DNA, 38 bp, Artificial Sequence
  primer
gtaaaacgacggccagttgactaagccaccttgggaag

SEQ ID NO: 15391 - DNA, 23 bp, Artificial Sequence
  primer
gaggcattgcatcagcattatac

SEQ ID NO: 15392 - DNA, 24 bp, Artificial Sequence
  primer
gaagctactccaatggcttatttg

SEQ ID NO: 15393 - DNA, 38 bp, Artificial Sequence
  primer
gtaaaacgacggccagtcgtggaaagtatcaaggatgg

SEQ ID NO: 15394 - DNA, 22 bp, Artificial Sequence
  primer
gctggaggtagagaaatttggg

SEQ ID NO: 15395 - DNA, 38 bp, Artificial Sequence
  primer
gtaaaacgacggccagtaattaacagcacatgccaagg

SEQ ID NO: 15396 - DNA, 36 bp, Artificial Sequence
  primer
gtaaaacgacggccagtcatggctgtgaaaggcaac

SEQ ID NO: 15397 - DNA, 38 bp, Artificial Sequence
  primer
gtaaaacgacggccagtaatttcacgtgtagcgatggt

SEQ ID NO: 15398 - DNA, 22 bp, Artificial Sequence
  primer
ttctgctgtttctccttcaacc

SEQ ID NO: 15399 - DNA, 21 bp, Artificial Sequence
  primer
catagctcacgggctatttcc

SEQ ID NO: 15400 - DNA, 19 bp, Artificial Sequence
  primer
aggaaagcgctgaccttcg

SEQ ID NO: 15401 - DNA, 37 bp, Artificial Sequence
  primer
gtaaaacgacggccagtgagcatctttcccgactgtg

SEQ ID NO: 15402 - DNA, 35 bp, Artificial Sequence
  primer
gtaaaacgacggccagtgggtgaggcctcttcagc

SEQ ID NO: 15403 - DNA, 21 bp, Artificial Sequence
  primer
agatgcagtgagtcgaggaaa

SEQ ID NO: 15404 - DNA, 39 bp, Artificial Sequence
  primer
gtaaaacgacggccagttccggaagatgtttcttgtttc

SEQ ID NO: 15405 - DNA, 21 bp, Artificial Sequence
  primer
agtggcctgtgatgtgtcttg

SEQ ID NO: 15406 - DNA, 21 bp, Artificial Sequence
  primer
ctggatctgatgcgacttgag

SEQ ID NO: 15407 - DNA, 38 bp, Artificial Sequence
  primer
gtaaaacgacggccagttgtgcgtgtttctcattctgc

SEQ ID NO: 15408 - DNA, 37 bp, Artificial Sequence
  primer
gtaaaacgacggccagttctgtgtgtgggactgaggg

SEQ ID NO: 15409 - DNA, 38 bp, Artificial Sequence
  primer
gtaaaacgacggccagtagatgaataagggctggctgg

SEQ ID NO: 15410 - DNA, 39 bp, Artificial Sequence
  primer
gtaaaacgacggccagtgctcgtggaagatttcggtaag

SEQ ID NO: 15411 - DNA, 38 bp, Artificial Sequence
  primer
gtaaaacgacggccagtgcagtgcaaaggattaatggg

SEQ ID NO: 15412 - DNA, 39 bp, Artificial Sequence
  primer
gtaaaacgacggccagtcccattcttgatgtatatgggc

SEQ ID NO: 15413 - DNA, 38 bp, Artificial Sequence
  primer
gtaaaacgacggccagtagttcgtctgtgttccttccg

SEQ ID NO: 15414 - DNA, 21 bp, Artificial Sequence
  primer
gagcaaaggatatgcgattgg

SEQ ID NO: 15415 - DNA, 38 bp, Artificial Sequence
  primer
gtaaaacgacggccagtgtatgtggtacccagtggcag

SEQ ID NO: 15416 - DNA, 37 bp, Artificial Sequence
  primer
gtaaaacgacggccagtgtatggctagtcgctgcctg

SEQ ID NO: 15417 - DNA, 38 bp, Artificial Sequence
  primer
gtaaaacgacggccagtattcctttaggtcctcagccc

SEQ ID NO: 15418 - DNA, 38 bp, Artificial Sequence
  primer
gtaaaacgacggccagttttcccatctcattctttgcc

SEQ ID NO: 15419 - DNA, 38 bp, Artificial Sequence
  primer
gtaaaacgacggccagtccatgttggctttctctctgg

SEQ ID NO: 15420 - DNA, 38 bp, Artificial Sequence
  primer
gtaaaacgacggccagtaagccattctgggtactgctg

SEQ ID NO: 15421 - DNA, 21 bp, Artificial Sequence
  primer
aacgtcttggctgagaagctc

SEQ ID NO: 15422 - DNA, 21 bp, Artificial Sequence
  primer
tgatctgggtcctgtcatcag

SEQ ID NO: 15423 - DNA, 21 bp, Artificial Sequence
  primer
cagaagactttctgggttggg

SEQ ID NO: 15424 - DNA, 21 bp, Artificial Sequence
  primer
caaggtgggtgatttctccag

SEQ ID NO: 15425 - DNA, 38 bp, Artificial Sequence
  primer
gtaaaacgacggccagtgatgcgctgctgtcttaactg

SEQ ID NO: 15426 - DNA, 19 bp, Artificial Sequence
  primer
ctgatcctgggacggagtg

SEQ ID NO: 15427 - DNA, 38 bp, Artificial Sequence
  primer
gtaaaacgacggccagtaccttgacgtccttctccatc

SEQ ID NO: 15428 - DNA, 21 bp, Artificial Sequence
  primer
gatcaaagtgtatttccgccc

SEQ ID NO: 15429 - DNA, 21 bp, Artificial Sequence
  primer
aaatctggttccagaaccgtc

SEQ ID NO: 15430 - DNA, 35 bp, Artificial Sequence
  primer
gtaaaacgacggccagtcttggccggtttcgagtc

SEQ ID NO: 15431 - DNA, 38 bp, Artificial Sequence
  primer
gtaaaacgacggccagttatggtagtgttgggccttgg

SEQ ID NO: 15432 - DNA, 42 bp, Artificial Sequence
  primer
gtaaaacgacggccagtaacctctgctccatttatttctgtt

SEQ ID NO: 15433 - DNA, 35 bp, Artificial Sequence
  primer
gtaaaacgacggccagtggagctccatgttgggag

SEQ ID NO: 15434 - DNA, 38 bp, Artificial Sequence
  primer
gtaaaacgacggccagtgatgcaagtgctcagcaagac

SEQ ID NO: 15435 - DNA, 38 bp, Artificial Sequence
  primer
gtaaaacgacggccagttagcaagtggctccttgacag

SEQ ID NO: 15436 - DNA, 21 bp, Artificial Sequence
  primer
gttggtggtacatcagggagg

SEQ ID NO: 15437 - DNA, 35 bp, Artificial Sequence
  primer
gtaaaacgacggccagtcacccaccttggcctctc

SEQ ID NO: 15438 - DNA, 19 bp, Artificial Sequence
  primer
ttgacccaaggctcaaatg

SEQ ID NO: 15439 - DNA, 39 bp, Artificial Sequence
  primer
gtaaaacgacggccagttttctcctttgagttcagcagc

SEQ ID NO: 15440 - DNA, 38 bp, Artificial Sequence
  primer
gtaaaacgacggccagtgatgccctgggtatagagagc

SEQ ID NO: 15441 - DNA, 26 bp, Artificial Sequence
  primer
tgcagtgtaatgtcataatcccttag

SEQ ID NO: 15442 - DNA, 22 bp, Artificial Sequence
  primer
tggcttaatcctccaaagaaag

SEQ ID NO: 15443 - DNA, 39 bp, Artificial Sequence
  primer
gtaaaacgacggccagtttctcctccaaatgtttcaggt

SEQ ID NO: 15444 - DNA, 37 bp, Artificial Sequence
  primer
gtaaaacgacggccagtctaatgcgcagaggaggttg

SEQ ID NO: 15445 - DNA, 21 bp, Artificial Sequence
  primer
tttgggatcgactccattctc

SEQ ID NO: 15446 - DNA, 21 bp, Artificial Sequence
  primer
ggaagccgaggttacacaaac

SEQ ID NO: 15447 - DNA, 35 bp, Artificial Sequence
  primer
gtaaaacgacggccagttctctgggccaagcagtg

SEQ ID NO: 15448 - DNA, 38 bp, Artificial Sequence
  primer
gtaaaacgacggccagtgattgccacttcccaattacc

SEQ ID NO: 15449 - DNA, 38 bp, Artificial Sequence
  primer
gtaaaacgacggccagtgtagcaatgacaatggaaggg

SEQ ID NO: 15450 - DNA, 21 bp, Artificial Sequence
  primer
ccctgttcggagattgatacc

SEQ ID NO: 15451 - DNA, 38 bp, Artificial Sequence
  primer
gtaaaacgacggccagttgtggaagtgtatgccaggag

SEQ ID NO: 15452 - DNA, 37 bp, Artificial Sequence
  primer
gtaaaacgacggccagtagaatgaaggaggaggcagg

SEQ ID NO: 15453 - DNA, 38 bp, Artificial Sequence
  primer
gtaaaacgacggccagtgttgaggagggtctccatctg

SEQ ID NO: 15454 - DNA, 38 bp, Artificial Sequence
  primer
gtaaaacgacggccagtagcagaagtacctttccacgc

SEQ ID NO: 15455 - DNA, 21 bp, Artificial Sequence
  primer
tggaccctgcactccttagtc

SEQ ID NO: 15456 - DNA, 19 bp, Artificial Sequence
  primer
aaaggctcagcgaagatgc

SEQ ID NO: 15457 - DNA, 36 bp, Artificial Sequence
  primer
gtaaaacgacggccagtagacagacctcagccagcg

SEQ ID NO: 15458 - DNA, 21 bp, Artificial Sequence
  primer
tctcagcttcccagagtttcc

SEQ ID NO: 15459 - DNA, 38 bp, Artificial Sequence
  primer
gtaaaacgacggccagttggtttagatgcaacgtgagg

SEQ ID NO: 15460 - DNA, 38 bp, Artificial Sequence
  primer
gtaaaacgacggccagttgggaagaccctctgagaaag

SEQ ID NO: 15461 - DNA, 38 bp, Artificial Sequence
  primer
gtaaaacgacggccagtcggaggtcaaggttgtatctg

SEQ ID NO: 15462 - DNA, 38 bp, Artificial Sequence
  primer
gtaaaacgacggccagtagcttcttctctgcaagggac

SEQ ID NO: 15463 - DNA, 38 bp, Artificial Sequence
  primer
gtaaaacgacggccagtcccattctccaggactgaatg

SEQ ID NO: 15464 - DNA, 38 bp, Artificial Sequence
  primer
gtaaaacgacggccagtgacttgaagaagttcacgggc

SEQ ID NO: 15465 - DNA, 38 bp, Artificial Sequence
  primer
gtaaaacgacggccagtagagatctcaccacggcattc

SEQ ID NO: 15466 - DNA, 38 bp, Artificial Sequence
  primer
gtaaaacgacggccagtggctacaatgtgaacgacgag

SEQ ID NO: 15467 - DNA, 18 bp, Artificial Sequence
  primer
gagcccgagaagacggag

SEQ ID NO: 15468 - DNA, 20 bp, Artificial Sequence
  primer
cctagttccacacccaaggc

SEQ ID NO: 15469 - DNA, 38 bp, Artificial Sequence
  primer
gtaaaacgacggccagttcctttgctgttcctcaatcc

SEQ ID NO: 15470 - DNA, 21 bp, Artificial Sequence
  primer
agtggtaagaaatgggcttgg

SEQ ID NO: 15471 - DNA, 38 bp, Artificial Sequence
  primer
gtaaaacgacggccagtcatttattatcggcccaggtg

SEQ ID NO: 15472 - DNA, 21 bp, Artificial Sequence
  primer
agctcaaacagagtgggaacc

SEQ ID NO: 15473 - DNA, 21 bp, Artificial Sequence
  primer
tccattgctctttccattgtg

SEQ ID NO: 15474 - DNA, 21 bp, Artificial Sequence
  primer
tggagatcaacttcctccacc

SEQ ID NO: 15475 - DNA, 21 bp, Artificial Sequence
  primer
ccctctcccacgtaatgtctc

SEQ ID NO: 15476 - DNA, 38 bp, Artificial Sequence
  primer
gtaaaacgacggccagtgcccagctactagtggagcag

SEQ ID NO: 15477 - DNA, 38 bp, Artificial Sequence
  primer
gtaaaacgacggccagttacctgcatcgggtaaacctc

SEQ ID NO: 15478 - DNA, 38 bp, Artificial Sequence
  primer
gtaaaacgacggccagtacaccagtgtctgcatgtgtg

SEQ ID NO: 15479 - DNA, 38 bp, Artificial Sequence
  primer
gtaaaacgacggccagtctgagacacttgctgtctggc

SEQ ID NO: 15480 - DNA, 21 bp, Artificial Sequence
  primer
aatgtgtcccaggataggagg

SEQ ID NO: 15481 - DNA, 38 bp, Artificial Sequence
  primer
gtaaaacgacggccagttagcaatgggcatgatttcag

SEQ ID NO: 15482 - DNA, 38 bp, Artificial Sequence
  primer
gtaaaacgacggccagtggtacctggagaactggaggg

SEQ ID NO: 15483 - DNA, 19 bp, Artificial Sequence
  primer
cccagccagagtcttccac

SEQ ID NO: 15484 - DNA, 20 bp, Artificial Sequence
  primer
ggcttattcaccttcctccc

SEQ ID NO: 15485 - DNA, 38 bp, Artificial Sequence
  primer
gtaaaacgacggccagtttggtgtcttgtcttggaacg

SEQ ID NO: 15486 - DNA, 38 bp, Artificial Sequence
  primer
gtaaaacgacggccagtagccaggaggctcagtctagg

SEQ ID NO: 15487 - DNA, 38 bp, Artificial Sequence
  primer
gtaaaacgacggccagttggcattggtagtccatcttg

SEQ ID NO: 15488 - DNA, 38 bp, Artificial Sequence
  primer
gtaaaacgacggccagtccagtgagttagggccatcag

SEQ ID NO: 15489 - DNA, 21 bp, Artificial Sequence
  primer
tgagtttgtcaccacccagag

SEQ ID NO: 15490 - DNA, 21 bp, Artificial Sequence
  primer
gacgaaagcagtcgtcatctg

SEQ ID NO: 15491 - DNA, 21 bp, Artificial Sequence
  primer
atgagacgtgagattcctggg

SEQ ID NO: 15492 - DNA, 19 bp, Artificial Sequence
  primer
attgtcacgccaatttccc

SEQ ID NO: 15493 - DNA, 38 bp, Artificial Sequence
  primer
gtaaaacgacggccagtatataagagcaggcaaggccc

SEQ ID NO: 15494 - DNA, 38 bp, Artificial Sequence
  primer
gtaaaacgacggccagttggtagggatagggatgaacg

SEQ ID NO: 15495 - DNA, 21 bp, Artificial Sequence
  primer
gagcgagactcctccagtacc

SEQ ID NO: 15496 - DNA, 38 bp, Artificial Sequence
  primer
gtaaaacgacggccagtggctgggcctataaagaaacc

SEQ ID NO: 15497 - DNA, 21 bp, Artificial Sequence
  primer
gaattccgcagttaccgagag

SEQ ID NO: 15498 - DNA, 21 bp, Artificial Sequence
  primer
atctggctccttcagacaagg

SEQ ID NO: 15499 - DNA, 21 bp, Artificial Sequence
  primer
cctttgccaccaagtaaggag

SEQ ID NO: 15500 - DNA, 21 bp, Artificial Sequence
  primer
tgccaagtctcctgatctgtc

SEQ ID NO: 15501 - DNA, 21 bp, Artificial Sequence
  primer
ccagtactgctgacacccaag

SEQ ID NO: 15502 - DNA, 39 bp, Artificial Sequence
  primer
gtaaaacgacggccagtgttgggaaacataacttgtggg

SEQ ID NO: 15503 - DNA, 38 bp, Artificial Sequence
  primer
gtaaaacgacggccagtttgggaggtggagtagagagg

SEQ ID NO: 15504 - DNA, 38 bp, Artificial Sequence
  primer
gtaaaacgacggccagtatgtgtctcccttgttgtccc

SEQ ID NO: 15505 - DNA, 38 bp, Artificial Sequence
  primer
gtaaaacgacggccagtccagagatacaggcacagagg

SEQ ID NO: 15506 - DNA, 38 bp, Artificial Sequence
  primer
gtaaaacgacggccagttggagctgttctctcacttgg

SEQ ID NO: 15507 - DNA, 37 bp, Artificial Sequence
  primer
gtaaaacgacggccagttctctgcgtgtgtgttctgg

SEQ ID NO: 15508 - DNA, 38 bp, Artificial Sequence
  primer
gtaaaacgacggccagtgggaaggactaaaggtgggac

SEQ ID NO: 15509 - DNA, 37 bp, Artificial Sequence
  primer
gtaaaacgacggccagtggaaaggcccaagatttctg

SEQ ID NO: 15510 - DNA, 21 bp, Artificial Sequence
  primer
tcaagcctttctacgttgcag

SEQ ID NO: 15511 - DNA, 37 bp, Artificial Sequence
  primer
gtaaaacgacggccagtacttggagatgtgtttcggg

SEQ ID NO: 15512 - DNA, 21 bp, Artificial Sequence
  primer
tcgttgcttcaggtaagaggg

SEQ ID NO: 15513 - DNA, 39 bp, Artificial Sequence
  primer
gtaaaacgacggccagttgatttctctgtccagttgctg

SEQ ID NO: 15514 - DNA, 21 bp, Artificial Sequence
  primer
gcgagcagaggtaaggtacag

SEQ ID NO: 15515 - DNA, 38 bp, Artificial Sequence
  primer
gtaaaacgacggccagtgacctggatcatcacggactc

SEQ ID NO: 15516 - DNA, 37 bp, Artificial Sequence
  primer
gtaaaacgacggccagttcgagttgccacctgatttc

SEQ ID NO: 15517 - DNA, 23 bp, Artificial Sequence
  primer
atgtttcacaagtgcatgatagc

SEQ ID NO: 15518 - DNA, 38 bp, Artificial Sequence
  primer
gtaaaacgacggccagtctgaaatgtgttgcaggtgtg

SEQ ID NO: 15519 - DNA, 25 bp, Artificial Sequence
  primer
tcattgggttattcaaaggtagaga

SEQ ID NO: 15520 - DNA, 20 bp, Artificial Sequence
  primer
agctctatcctgggagggtg

SEQ ID NO: 15521 - DNA, 21 bp, Artificial Sequence
  primer
tttcctgctctttcactctgc

SEQ ID NO: 15522 - DNA, 21 bp, Artificial Sequence
  primer
ggaaatgggttgctattgagg

SEQ ID NO: 15523 - DNA, 43 bp, Artificial Sequence
  primer
gtaaaacgacggccagtcatgcagaacatattaggtatcttgg

SEQ ID NO: 15524 - DNA, 38 bp, Artificial Sequence
  primer
gtaaaacgacggccagttgctgaagctgatgaaggttg

SEQ ID NO: 15525 - DNA, 21 bp, Artificial Sequence
  primer
ggtcacacacccatctcattc

SEQ ID NO: 15526 - DNA, 38 bp, Artificial Sequence
  primer
gtaaaacgacggccagtaggtatttagcaggctgaggc

SEQ ID NO: 15527 - DNA, 39 bp, Artificial Sequence
  primer
gtaaaacgacggccagtgatgaagcatttggatctctgc

SEQ ID NO: 15528 - DNA, 40 bp, Artificial Sequence
  primer
gtaaaacgacggccagttttgtcttgccaactcttaactg

SEQ ID NO: 15529 - DNA, 25 bp, Artificial Sequence
  primer
gaacaacccttacataatttccacc

SEQ ID NO: 15530 - DNA, 38 bp, Artificial Sequence
  primer
gtaaaacgacggccagtcttacgcatgggaaagattgc

SEQ ID NO: 15531 - DNA, 38 bp, Artificial Sequence
  primer
gtaaaacgacggccagtcataggtctgaagctgcgttg

SEQ ID NO: 15532 - DNA, 38 bp, Artificial Sequence
  primer
gtaaaacgacggccagttgtagaaagtcagccttcccg

SEQ ID NO: 15533 - DNA, 20 bp, Artificial Sequence
  primer
aacgggaacagaggaaggag

SEQ ID NO: 15534 - DNA, 38 bp, Artificial Sequence
  primer
gtaaaacgacggccagtagttccaccaccaattcaacc

SEQ ID NO: 15535 - DNA, 38 bp, Artificial Sequence
  primer
gtaaaacgacggccagtcaaggatacagaggtcgaggc

SEQ ID NO: 15536 - DNA, 21 bp, Artificial Sequence
  primer
agcatataccctcagggcctc

SEQ ID NO: 15537 - DNA, 38 bp, Artificial Sequence
  primer
gtaaaacgacggccagtcatcacgcccttccactttac

SEQ ID NO: 15538 - DNA, 21 bp, Artificial Sequence
  primer
tttccgggaataagacaccag

SEQ ID NO: 15539 - DNA, 24 bp, Artificial Sequence
  primer
tttctatcccaacagtgtttcatc

SEQ ID NO: 15540 - DNA, 23 bp, Artificial Sequence
  primer
ttataggaactaggcctttggct

SEQ ID NO: 15541 - DNA, 39 bp, Artificial Sequence
  primer
gtaaaacgacggccagtaaaggagccaagttagtgggag

SEQ ID NO: 15542 - DNA, 21 bp, Artificial Sequence
  primer
aactccagttccagcctcaac

SEQ ID NO: 15543 - DNA, 37 bp, Artificial Sequence
  primer
gtaaaacgacggccagtaactgcctcagtcccacttg

SEQ ID NO: 15544 - DNA, 25 bp, Artificial Sequence
  primer
acacagtaggagattaaggaaaggg

SEQ ID NO: 15545 - DNA, 45 bp, Artificial Sequence
  primer
gtaaaacgacggccagtttgtgctagtttcatcttatcagttgtt

SEQ ID NO: 15546 - DNA, 24 bp, Artificial Sequence
  primer
aatgaatatctttgatcatggtgc

SEQ ID NO: 15547 - DNA, 20 bp, Artificial Sequence
  primer
agcctgcatgatagcgagac

SEQ ID NO: 15548 - DNA, 41 bp, Artificial Sequence
  primer
gtaaaacgacggccagtcccttagaacaccttagcattgtc

SEQ ID NO: 15549 - DNA, 22 bp, Artificial Sequence
  primer
ggcaaatggaaagtctgaaatc

SEQ ID NO: 15550 - DNA, 44 bp, Artificial Sequence
  primer
gtaaaacgacggccagttgaagcagtatataagtacgtgatggg

SEQ ID NO: 15551 - DNA, 39 bp, Artificial Sequence
  primer
gtaaaacgacggccagttcagagggtgcacttaatttgg

SEQ ID NO: 15552 - DNA, 23 bp, Artificial Sequence
  primer
gggttgaaagggaaatttagatg

SEQ ID NO: 15553 - DNA, 38 bp, Artificial Sequence
  primer
gtaaaacgacggccagtggtcatttgggatttgcattc

SEQ ID NO: 15554 - DNA, 21 bp, Artificial Sequence
  primer
ggactagagcaatgcaccctc

SEQ ID NO: 15555 - DNA, 37 bp, Artificial Sequence
  primer
gtaaaacgacggccagtgccgatgtgttctgtttgaa

SEQ ID NO: 15556 - DNA, 40 bp, Artificial Sequence
  primer
gtaaaacgacggccagttctttgccctttcctagattacg

SEQ ID NO: 15557 - DNA, 22 bp, Artificial Sequence
  primer
cctttcttacctctgctcctcc

SEQ ID NO: 15558 - DNA, 38 bp, Artificial Sequence
  primer
gtaaaacgacggccagttttcgggtacactctggtctg

SEQ ID NO: 15559 - DNA, 38 bp, Artificial Sequence
  primer
gtaaaacgacggccagtacggtcaagacaaacgggtag

SEQ ID NO: 15560 - DNA, 21 bp, Artificial Sequence
  primer
gtctggagggatgaactgagg

SEQ ID NO: 15561 - DNA, 38 bp, Artificial Sequence
  primer
gtaaaacgacggccagtttgtgggtagctttggttgtg

SEQ ID NO: 15562 - DNA, 38 bp, Artificial Sequence
  primer
gtaaaacgacggccagtgatggctgggacctgatttag

SEQ ID NO: 15563 - DNA, 35 bp, Artificial Sequence
  primer
gtaaaacgacggccagtagagccatgccttcaggg

SEQ ID NO: 15564 - DNA, 38 bp, Artificial Sequence
  primer
gtaaaacgacggccagtgtggtggcaggcaacttaatc

SEQ ID NO: 15565 - DNA, 40 bp, Artificial Sequence
  primer
gtaaaacgacggccagttttggaggacatggtattctcag

SEQ ID NO: 15566 - DNA, 21 bp, Artificial Sequence
  primer
gaaacatggtgatgaaggctg

SEQ ID NO: 15567 - DNA, 21 bp, Artificial Sequence
  primer
tttagatggagggaaaggcag

SEQ ID NO: 15568 - DNA, 21 bp, Artificial Sequence
  primer
ttcaaggttacatcagacccg

SEQ ID NO: 15569 - DNA, 21 bp, Artificial Sequence
  primer
gtctctgggacactggtgagc

SEQ ID NO: 15570 - DNA, 20 bp, Artificial Sequence
  primer
ggctcaagcagttctcatgc

SEQ ID NO: 15571 - DNA, 38 bp, Artificial Sequence
  primer
gtaaaacgacggccagttgatgccgtattatttccgtg

SEQ ID NO: 15572 - DNA, 38 bp, Artificial Sequence
  primer
gtaaaacgacggccagtgaggaatgtagatggccttgg

SEQ ID NO: 15573 - DNA, 21 bp, Artificial Sequence
  primer
ttctctgccaggtaaagctcc

SEQ ID NO: 15574 - DNA, 21 bp, Artificial Sequence
  primer
attcctttcctctcctgggtc

SEQ ID NO: 15575 - DNA, 38 bp, Artificial Sequence
  primer
gtaaaacgacggccagtcggacaaacctggaatttctc

SEQ ID NO: 15576 - DNA, 38 bp, Artificial Sequence
  primer
gtaaaacgacggccagtcctgaggtttccattctctgc

SEQ ID NO: 15577 - DNA, 21 bp, Artificial Sequence
  primer
tgccattctcagatacgttcg

SEQ ID NO: 15578 - DNA, 38 bp, Artificial Sequence
  primer
gtaaaacgacggccagtataatgtggagtggagggctg

SEQ ID NO: 15579 - DNA, 38 bp, Artificial Sequence
  primer
gtaaaacgacggccagttcagctgagacagaaccttgg

SEQ ID NO: 15580 - DNA, 21 bp, Artificial Sequence
  primer
ggttgactcatggaaagggtg

SEQ ID NO: 15581 - DNA, 38 bp, Artificial Sequence
  primer
gtaaaacgacggccagttgttagcttctgagggatggc

SEQ ID NO: 15582 - DNA, 38 bp, Artificial Sequence
  primer
gtaaaacgacggccagtctgtggttgctacagggtcac

SEQ ID NO: 15583 - DNA, 37 bp, Artificial Sequence
  primer
gtaaaacgacggccagtcttgctcatcaccttcaccc

SEQ ID NO: 15584 - DNA, 21 bp, Artificial Sequence
  primer
cttaggagactgctggaaccg

SEQ ID NO: 15585 - DNA, 21 bp, Artificial Sequence
  primer
agctgtgagctatctcctggg

SEQ ID NO: 15586 - DNA, 38 bp, Artificial Sequence
  primer
gtaaaacgacggccagtgctggcaatttgttccttagc

SEQ ID NO: 15587 - DNA, 21 bp, Artificial Sequence
  primer
gacacccacttccaagattcc

SEQ ID NO: 15588 - DNA, 37 bp, Artificial Sequence
  primer
gtaaaacgacggccagtaagggcacacaacacctcag

SEQ ID NO: 15589 - DNA, 21 bp, Artificial Sequence
  primer
aaatccagctccctgtgtttg

SEQ ID NO: 15590 - DNA, 21 bp, Artificial Sequence
  primer
cccagcctccattacattgac

SEQ ID NO: 15591 - DNA, 38 bp, Artificial Sequence
  primer
gtaaaacgacggccagtctgttccaaacagggagtgtg

SEQ ID NO: 15592 - DNA, 38 bp, Artificial Sequence
  primer
gtaaaacgacggccagtggctcacatctatttctccgc

SEQ ID NO: 15593 - DNA, 38 bp, Artificial Sequence
  primer
gtaaaacgacggccagtgtgttgttgagggtgggtagg

SEQ ID NO: 15594 - DNA, 39 bp, Artificial Sequence
  primer
gtaaaacgacggccagtgccattatgtcgttcctagacc

SEQ ID NO: 15595 - DNA, 38 bp, Artificial Sequence
  primer
gtaaaacgacggccagtagtctgtgagtgctagggctg

SEQ ID NO: 15596 - DNA, 37 bp, Artificial Sequence
  primer
gtaaaacgacggccagtgtggaagaggtgaggcttcc

SEQ ID NO: 15597 - DNA, 21 bp, Artificial Sequence
  primer
ctcctcttatggaccctgtgg

SEQ ID NO: 15598 - DNA, 21 bp, Artificial Sequence
  primer
ggaaggcttggagttatttgc

SEQ ID NO: 15599 - DNA, 21 bp, Artificial Sequence
  primer
accatcccttccttctacacc

SEQ ID NO: 15600 - DNA, 38 bp, Artificial Sequence
  primer
gtaaaacgacggccagtgttggcctatagggtcagtgg

SEQ ID NO: 15601 - DNA, 38 bp, Artificial Sequence
  primer
gtaaaacgacggccagtcaggaggactcctttgtctgg

SEQ ID NO: 15602 - DNA, 38 bp, Artificial Sequence
  primer
gtaaaacgacggccagtaagaatgctaccagtgcaggg

SEQ ID NO: 15603 - DNA, 38 bp, Artificial Sequence
  primer
gtaaaacgacggccagtagggtcctgtactgctgatcc

SEQ ID NO: 15604 - DNA, 38 bp, Artificial Sequence
  primer
gtaaaacgacggccagtgataccagcacagggaaggag

SEQ ID NO: 15605 - DNA, 20 bp, Artificial Sequence
  primer
cacagctggaggaaggtgag

SEQ ID NO: 15606 - DNA, 20 bp, Artificial Sequence
  primer
ctcctaccaggcagaacacg

SEQ ID NO: 15607 - DNA, 38 bp, Artificial Sequence
  primer
gtaaaacgacggccagtttgtagagtgggtggtggatg

SEQ ID NO: 15608 - DNA, 38 bp, Artificial Sequence
  primer
gtaaaacgacggccagtcagcttaggacagtcacagcc

SEQ ID NO: 15609 - DNA, 21 bp, Artificial Sequence
  primer
ccggagcctactctctcttcc

SEQ ID NO: 15610 - DNA, 36 bp, Artificial Sequence
  primer
gtaaaacgacggccagtagccaccgagagaggtgag

SEQ ID NO: 15611 - DNA, 19 bp, Artificial Sequence
  primer
tgggtgagaggctgggtag

SEQ ID NO: 15612 - DNA, 37 bp, Artificial Sequence
  primer
gtaaaacgacggccagtacatggcatttggaggtgtg

SEQ ID NO: 15613 - DNA, 21 bp, Artificial Sequence
  primer
atgtccactcactgggaaagg

SEQ ID NO: 15614 - DNA, 37 bp, Artificial Sequence
  primer
gtaaaacgacggccagtctctgagggagggtcagagg

SEQ ID NO: 15615 - DNA, 22 bp, Artificial Sequence
  primer
cctctctttatgtggccctttg

SEQ ID NO: 15616 - DNA, 38 bp, Artificial Sequence
  primer
gtaaaacgacggccagtggaggctgatatctccagagg

SEQ ID NO: 15617 - DNA, 20 bp, Artificial Sequence
  primer
atgtccacctgcatgtaccc

SEQ ID NO: 15618 - DNA, 38 bp, Artificial Sequence
  primer
gtaaaacgacggccagttagggagggagtgagaggacc

SEQ ID NO: 15619 - DNA, 20 bp, Artificial Sequence
  primer
aagtgcatggccactgagag

SEQ ID NO: 15620 - DNA, 18 bp, Artificial Sequence
  primer
cggtgagtgaccagtggg

SEQ ID NO: 15621 - DNA, 37 bp, Artificial Sequence
  primer
gtaaaacgacggccagtcagacacttctcagcccagg

SEQ ID NO: 15622 - DNA, 37 bp, Artificial Sequence
  primer
gtaaaacgacggccagtcctggtcatccaggagtcag

SEQ ID NO: 15623 - DNA, 37 bp, Artificial Sequence
  primer
gtaaaacgacggccagtctgaaagaagtgccacctgc

SEQ ID NO: 15624 - DNA, 38 bp, Artificial Sequence
  primer
gtaaaacgacggccagtagcttgcttaccacttgtccc

SEQ ID NO: 15625 - DNA, 39 bp, Artificial Sequence
  primer
gtaaaacgacggccagttgtgtctatagcaaggtgtgcg

SEQ ID NO: 15626 - DNA, 21 bp, Artificial Sequence
  primer
cacagcttgtgaatggtggag

SEQ ID NO: 15627 - DNA, 38 bp, Artificial Sequence
  primer
gtaaaacgacggccagtgtcaccctcactgacaacgtg

SEQ ID NO: 15628 - DNA, 20 bp, Artificial Sequence
  primer
cgggagagctaccatgactg

SEQ ID NO: 15629 - DNA, 21 bp, Artificial Sequence
  primer
ttacctggcaaccttactccc

SEQ ID NO: 15630 - DNA, 21 bp, Artificial Sequence
  primer
attacccgtcaccctaggacc

SEQ ID NO: 15631 - DNA, 21 bp, Artificial Sequence
  primer
ctatgcaaaccagggatgatg

SEQ ID NO: 15632 - DNA, 22 bp, Artificial Sequence
  primer
tcgtacagagtggcatcaagtg

SEQ ID NO: 15633 - DNA, 20 bp, Artificial Sequence
  primer
ctctgtcaaggctggaatgc

SEQ ID NO: 15634 - DNA, 21 bp, Artificial Sequence
  primer
ggaagtcagcaaatggaaacc

SEQ ID NO: 15635 - DNA, 38 bp, Artificial Sequence
  primer
gtaaaacgacggccagtagcaggatccacagggtcttc

SEQ ID NO: 15636 - DNA, 37 bp, Artificial Sequence
  primer
gtaaaacgacggccagtgtcagaggtggctacagggc

SEQ ID NO: 15637 - DNA, 20 bp, Artificial Sequence
  primer
cagagacgaaggcatggaag

SEQ ID NO: 15638 - DNA, 38 bp, Artificial Sequence
  primer
gtaaaacgacggccagtttctccatggctgtgctagtg

SEQ ID NO: 15639 - DNA, 38 bp, Artificial Sequence
  primer
gtaaaacgacggccagtaattgacaaaggaggtttggg

SEQ ID NO: 15640 - DNA, 21 bp, Artificial Sequence
  primer
cttatcgggagatgctcattg

SEQ ID NO: 15641 - DNA, 38 bp, Artificial Sequence
  primer
gtaaaacgacggccagtctagggtcccagaagtccagg

SEQ ID NO: 15642 - DNA, 21 bp, Artificial Sequence
  primer
ccttcctttctcctctagggc

SEQ ID NO: 15643 - DNA, 21 bp, Artificial Sequence
  primer
atctttagtgtgcggtggatg

SEQ ID NO: 15644 - DNA, 38 bp, Artificial Sequence; identical to SEQ ID NO: 15639
  primer

SEQ ID NO: 15645 - DNA, 38 bp, Artificial Sequence
  primer
gtaaaacgacggccagttaatgcccgttcatctcagtc

SEQ ID NO: 15646 - DNA, 21 bp, Artificial Sequence
  primer
ccttcctttctcctctagggc

SEQ ID NO: 15647 - DNA, 19 bp, Artificial Sequence
  primer
gagccacagaaggctcagg

SEQ ID NO: 15648 - DNA, 39 bp, Artificial Sequence
  primer
gtaaaacgacggccagtgcattactccgtattggtcagg

SEQ ID NO: 15649 - DNA, 38 bp, Artificial Sequence
  primer
gtaaaacgacggccagtcaccttaccggctttcctttc

SEQ ID NO: 15650 - DNA, 21 bp, Artificial Sequence
  primer
tgaccagttaccaaacccttg

SEQ ID NO: 15651 - DNA, 38 bp, Artificial Sequence
  primer
gtaaaacgacggccagtcgattgctctgacatgtttgg

SEQ ID NO: 15652 - DNA, 19 bp, Artificial Sequence
  primer
ctgcaccattgcattccag

SEQ ID NO: 15653 - DNA, 40 bp, Artificial Sequence
  primer
gtaaaacgacggccagttcctttgattcctaggctttctg

SEQ ID NO: 15654 - DNA, 38 bp, Artificial Sequence
  primer
gtaaaacgacggccagttggccatatgacatgttaggg

SEQ ID NO: 15655 - DNA, 19 bp, Artificial Sequence
  primer
acttgagcccaggaggcag

SEQ ID NO: 15656 - DNA, 21 bp, Artificial Sequence
  primer
taatctgctggctccctgtag

SEQ ID NO: 15657 - DNA, 21 bp, Artificial Sequence
  primer
gcttgctagaacaccagttgc

SEQ ID NO: 15658 - DNA, 39 bp, Artificial Sequence
  primer
gtaaaacgacggccagtttgtgataaacagcaagggttg

SEQ ID NO: 15659 - DNA, 25 bp, Artificial Sequence
  primer
ttacatgtttattccagtggagttg

SEQ ID NO: 15660 - DNA, 38 bp, Artificial Sequence
  primer
gtaaaacgacggccagttgttaaggcgtttgctgtttc

SEQ ID NO: 15661 - DNA, 39 bp, Artificial Sequence
  primer
gtaaaacgacggccagtaaaggcacatttacattgctga

SEQ ID NO: 15662 - DNA, 19 bp, Artificial Sequence
  primer
cctggcccataattgcttt

SEQ ID NO: 15663 - DNA, 20 bp, Artificial Sequence
  primer
cctgggcagaagagtgaaac

SEQ ID NO: 15664 - DNA, 26 bp, Artificial Sequence
  primer
cctaagcctataatgcctggtacttc

SEQ ID NO: 15665 - DNA, 42 bp, Artificial Sequence
  primer
gtaaaacgacggccagtcaccttcatgaccttaattacctcc

SEQ ID NO: 15666 - DNA, 26 bp, Artificial Sequence
  primer
aaatggatttaaagaatttacaaggc

SEQ ID NO: 15667 - DNA, 21 bp, Artificial Sequence
  primer
aatccaaagtgccatagcctg

SEQ ID NO: 15668 - DNA, 21 bp, Artificial Sequence
  primer
caatatctttcccttgggtcg

SEQ ID NO: 15669 - DNA, 36 bp, Artificial Sequence
  primer
gtaaaacgacggccagtctcctgggctcaagcaatc

SEQ ID NO: 15670 - DNA, 41 bp, Artificial Sequence
  primer
gtaaaacgacggccagtgaagaatatgaattccagtttggc

SEQ ID NO: 15671 - DNA, 40 bp, Artificial Sequence
  primer
gtaaaacgacggccagtcatttgaaccaatgaatggactc

SEQ ID NO: 15672 - DNA, 36 bp, Artificial Sequence
  primer
gtaaaacgacggccagtagatgcggctcagcaaata

SEQ ID NO: 15673 - DNA, 21 bp, Artificial Sequence
  primer
tgtgttcgaccaaagctcaag

SEQ ID NO: 15674 - DNA, 41 bp, Artificial Sequence
  primer
gtaaaacgacggccagttcattggctaaatacaacaaggag

SEQ ID NO: 15675 - DNA, 21 bp, Artificial Sequence
  primer
tacccaaacgaggaagaccac

SEQ ID NO: 15676 - DNA, 43 bp, Artificial Sequence
  primer
gtaaaacgacggccagtggtatttatatatccagtttggcgtg

SEQ ID NO: 15677 - DNA, 40 bp, Artificial Sequence
  primer
gtaaaacgacggccagtgagaggagagagtcatgagcaag

SEQ ID NO: 15678 - DNA, 38 bp, Artificial Sequence
  primer
gtaaaacgacggccagtccatgcctagccagagtcttc

SEQ ID NO: 15679 - DNA, 35 bp, Artificial Sequence
  primer
gtaaaacgacggccagtgtgagggagccggagttc

SEQ ID NO: 15680 - DNA, 20 bp, Artificial Sequence
  primer
ctggtctcgatctgacctcg

SEQ ID NO: 15681 - DNA, 38 bp, Artificial Sequence
  primer
gtaaaacgacggccagtgagctatgattgtgccactgc

SEQ ID NO: 15682 - DNA, 40 bp, Artificial Sequence
  primer
gtaaaacgacggccagttgaggaggcatgtatattggatg

SEQ ID NO: 15683 - DNA, 21 bp, Artificial Sequence
  primer
gtgcctagtgaagagcagacg

SEQ ID NO: 15684 - DNA, 42 bp, Artificial Sequence
  primer
gtaaaacgacggccagtttctggagagaacgtatattgcttg

SEQ ID NO: 15685 - DNA, 44 bp, Artificial Sequence
  primer
gtaaaacgacggccagtaatatgtagctttacctgaatagctgg

SEQ ID NO: 15686 - DNA, 22 bp, Artificial Sequence
  primer
ccctcaaagaaatccaagacag

SEQ ID NO: 15687 - DNA, 38 bp, Artificial Sequence
  primer
gtaaaacgacggccagtagaagtcattgagtggctcgc

SEQ ID NO: 15688 - DNA, 38 bp, Artificial Sequence
  primer
gtaaaacgacggccagtaagcacagtgacaagcctttg

SEQ ID NO: 15689 - DNA, 21 bp, Artificial Sequence
  primer
aaagacagggaggacaagagg

SEQ ID NO: 15690 - DNA, 21 bp, Artificial Sequence
  primer
aacagaagcggtatgaggacc

SEQ ID NO: 15691 - DNA, 38 bp, Artificial Sequence
  primer
gtaaaacgacggccagtcgcagatctgatgttcaggag

SEQ ID NO: 15692 - DNA, 21 bp, Artificial Sequence
  primer
ggcttgctgtgttgaaggaag

SEQ ID NO: 15693 - DNA, 41 bp, Artificial Sequence
  primer
gtaaaacgacggccagtgaggactagatgttgctgccttac

SEQ ID NO: 15694 - DNA, 39 bp, Artificial Sequence
  primer
gtaaaacgacggccagttctccagtttcaacatttctcg

SEQ ID NO: 15695 - DNA, 24 bp, Artificial Sequence
  primer
ggcactgtgtactgcttagatttg

SEQ ID NO: 15696 - DNA, 21 bp, Artificial Sequence
  primer
ccaccaccaactctagatccc

SEQ ID NO: 15697 - DNA, 38 bp, Artificial Sequence
  primer
gtaaaacgacggccagtcaccagggagaggtgaaagag

SEQ ID NO: 15698 - DNA, 23 bp, Artificial Sequence
  primer
gaatttgaggttggattcctttc

SEQ ID NO: 15699 - DNA, 23 bp, Artificial Sequence
  primer
gaagttctaggaggcaagtgtcc

SEQ ID NO: 15700 - DNA, 21 bp, Artificial Sequence
  primer
tgtagggtgattgcctcttcc

SEQ ID NO: 15701 - DNA, 21 bp, Artificial Sequence
  primer
ctgatccctgtgggatttgag

SEQ ID NO: 15702 - DNA, 20 bp, Artificial Sequence
  primer
ccactgctttccttgtccag

SEQ ID NO: 15703 - DNA, 20 bp, Artificial Sequence
  primer
ctgcgccaaggaaatagttg

SEQ ID NO: 15704 - DNA, 21 bp, Artificial Sequence
  primer
gctgtgcagattctccatttg

SEQ ID NO: 15705 - DNA, 38 bp, Artificial Sequence
  primer
gtaaaacgacggccagtcctacagcagttcaggctgtg

SEQ ID NO: 15706 - DNA, 23 bp, Artificial Sequence
  primer
tggaagattccaggtgacataac

SEQ ID NO: 15707 - DNA, 39 bp, Artificial Sequence
  primer
gtaaaacgacggccagtgctaaacctacatccaggagcc

SEQ ID NO: 15708 - DNA, 21 bp, Artificial Sequence
  primer
acagtacccatctgccaatcc

SEQ ID NO: 15709 - DNA, 38 bp, Artificial Sequence
  primer
gtaaaacgacggccagttaacactaaccttcgggctgg

SEQ ID NO: 15710 - DNA, 21 bp, Artificial Sequence
  primer
atcttgatgtgatcggttccc

SEQ ID NO: 15711 - DNA, 24 bp, Artificial Sequence
  primer
tgaccagtgtttcttaaatcttgc

SEQ ID NO: 15712 - DNA, 21 bp, Artificial Sequence
  primer
atcctcatgattggttgggag

SEQ ID NO: 15713 - DNA, 21 bp, Artificial Sequence
  primer
atggtagtgacgctgaacagg

SEQ ID NO: 15714 - DNA, 38 bp, Artificial Sequence
  primer
gtaaaacgacggccagtaaagcctctcccgtaacttcc

SEQ ID NO: 15715 - DNA, 21 bp, Artificial Sequence
  primer
aagtcagccttctagccaagc

SEQ ID NO: 15716 - DNA, 37 bp, Artificial Sequence
  primer
gtaaaacgacggccagtctgggcctgttctgcttatg

SEQ ID NO: 15717 - DNA, 36 bp, Artificial Sequence
  primer
gtaaaacgacggccagtcattgaatggttccgaggg

SEQ ID NO: 15718 - DNA, 19 bp, Artificial Sequence
  primer
cccatagcaggtgcctctc

SEQ ID NO: 15719 - DNA, 21 bp, Artificial Sequence
  primer
gaattaatccattgccaaccc

SEQ ID NO: 15720 - DNA, 37 bp, Artificial Sequence
  primer
gtaaaacgacggccagtctgtgaggttgggaggactg

SEQ ID NO: 15721 - DNA, 21 bp, Artificial Sequence
  primer
agcttgggtgacagagtgaga

SEQ ID NO: 15722 - DNA, 20 bp, Artificial Sequence
  primer
ttcctcttgcacattcaccc

SEQ ID NO: 15723 - DNA, 37 bp, Artificial Sequence
  primer
gtaaaacgacggccagtacccaatctgggttctaggc

SEQ ID NO: 15724 - DNA, 35 bp, Artificial Sequence
  primer
gtaaaacgacggccagtgtgatccgcctgtcttgg

SEQ ID NO: 15725 - DNA, 38 bp, Artificial Sequence
  primer
gtaaaacgacggccagtaggtactggcccaagatcaag

SEQ ID NO: 15726 - DNA, 38 bp, Artificial Sequence
  primer
gtaaaacgacggccagtgagagccattgcctttctctg

SEQ ID NO: 15727 - DNA, 37 bp, Artificial Sequence
  primer
gtaaaacgacggccagtgctgctgctgattacttggg

SEQ ID NO: 15728 - DNA, 21 bp, Artificial Sequence
  primer
aaactaagcccgggtctatgc

SEQ ID NO: 15729 - DNA, 21 bp, Artificial Sequence
  primer
ctcacacctgatagcagtccg

SEQ ID NO: 15730 - DNA, 38 bp, Artificial Sequence
  primer
gtaaaacgacggccagttgcacttgatttcatcttgcc

SEQ ID NO: 15731 - DNA, 21 bp, Artificial Sequence
  primer
gcgttacctaacccagctgac

SEQ ID NO: 15732 - DNA, 38 bp, Artificial Sequence
  primer
gtaaaacgacggccagtgagcccaggataagcattgag

SEQ ID NO: 15733 - DNA, 20 bp, Artificial Sequence
  primer
accctgggtccctacttcac

SEQ ID NO: 15734 - DNA, 38 bp, Artificial Sequence
  primer
gtaaaacgacggccagtcctccattcttggtcttggag

SEQ ID NO: 15735 - DNA, 38 bp, Artificial Sequence
  primer
gtaaaacgacggccagttaagaggctgagagagcctgg

SEQ ID NO: 15736 - DNA, 40 bp, Artificial Sequence
  primer
gtaaaacgacggccagtggttatgtgaataaaccaatgcc

SEQ ID NO: 15737 - DNA, 38 bp, Artificial Sequence
  primer
gtaaaacgacggccagtacagttggctctacctctgcc

SEQ ID NO: 15738 - DNA, 38 bp, Artificial Sequence
  primer
gtaaaacgacggccagtgggagggtaagtagatgtggg

SEQ ID NO: 15739 - DNA, 41 bp, Artificial Sequence
  primer
gtaaaacgacggccagtaggtgtaaatgggtcaataaatgg

SEQ ID NO: 15740 - DNA, 43 bp, Artificial Sequence
  primer
gtaaaacgacggccagttcaatattctacatgacagagcttgc

SEQ ID NO: 15741 - DNA, 21 bp, Artificial Sequence
  primer
agcagatggacagaaagcaac

SEQ ID NO: 15742 - DNA, 21 bp, Artificial Sequence
  primer
tacctcttgcgtctgaatccc

SEQ ID NO: 15743 - DNA, 43 bp, Artificial Sequence
  primer
gtaaaacgacggccagtaaatgtagcaaccaactagtcatagc

SEQ ID NO: 15744 - DNA, 39 bp, Artificial Sequence
  primer
gtaaaacgacggccagtggcattcccatcacagttaaag

SEQ ID NO: 15745 - DNA, 38 bp, Artificial Sequence
  primer
gtaaaacgacggccagtaacaaccacccaaatccattc

SEQ ID NO: 15746 - DNA, 22 bp, Artificial Sequence
  primer
tggttcctgagctagtccattt

SEQ ID NO: 15747 - DNA, 21 bp, Artificial Sequence
  primer
atcctgtcattcagacccaaa

SEQ ID NO: 15748 - DNA, 24 bp, Artificial Sequence
  primer
aatgtatttgggttgtttgaggag

SEQ ID NO: 15749 - DNA, 26 bp, Artificial Sequence
  primer
gtcctgaagctagctatacatcaaag

SEQ ID NO: 15750 - DNA, 24 bp, Artificial Sequence
  primer
gaatattaaagctatgccaaaggc

SEQ ID NO: 15751 - DNA, 21 bp, Artificial Sequence
  primer
gcaacagagcgagacttcatc

SEQ ID NO: 15752 - DNA, 20 bp, Artificial Sequence
  primer
aggctcgggttgctaaagaa

SEQ ID NO: 15753 - DNA, 35 bp, Artificial Sequence
  primer
gtaaaacgacggccagtcctgaccttgtgatccgc

SEQ ID NO: 15754 - DNA, 42 bp, Artificial Sequence
  primer
gtaaaacgacggccagtcatactgtttcgtaccttgtgagac

SEQ ID NO: 15755 - DNA, 22 bp, Artificial Sequence
  primer
gtgcagttaggtcagtcattcg

SEQ ID NO: 15756 - DNA, 44 bp, Artificial Sequence
  primer
gtaaaacgacggccagtgattgttgtatttgctttctaaacctg

SEQ ID NO: 15757 - DNA, 24 bp, Artificial Sequence
  primer
gatatgtagttgcccatgttcatt

SEQ ID NO: 15758 - DNA, 42 bp, Artificial Sequence
  primer
gtaaaacgacggccagtactttagaagatacgaaatcatggc

SEQ ID NO: 15759 - DNA, 21 bp, Artificial Sequence
  primer
tgacttggaaccaaggatttg

SEQ ID NO: 15760 - DNA, 24 bp, Artificial Sequence
  primer
ggcaattgatgcatagtttctttc

SEQ ID NO: 15761 - DNA, 24 bp, Artificial Sequence
  primer
gtgaatgcatcctgtaatttatgg

SEQ ID NO: 15762 - DNA, 38 bp, Artificial Sequence
  primer
gtaaaacgacggccagttaatacctttccgcagtgcct

SEQ ID NO: 15763 - DNA, 25 bp, Artificial Sequence
  primer
tttcccagtagtgaaatttatgtgc

SEQ ID NO: 15764 - DNA, 20 bp, Artificial Sequence
  primer
gagctgaattcacgccattg

SEQ ID NO: 15765 - DNA, 41 bp, Artificial Sequence
  primer
gtaaaacgacggccagtgaagaaatgtttgagacttctggg

SEQ ID NO: 15766 - DNA, 21 bp, Artificial Sequence
  primer
tggtccagggaagttctacag

SEQ ID NO: 15767 - DNA, 40 bp, Artificial Sequence
  primer
gtaaaacgacggccagtttgggaaacaaataagaacatgg

SEQ ID NO: 15768 - DNA, 24 bp, Artificial Sequence
  primer
ggtacattgagatggtttacagcc

SEQ ID NO: 15769 - DNA, 42 bp, Artificial Sequence
  primer
gtaaaacgacggccagttttgtgtttcttagcgtgtttctac

SEQ ID NO: 15770 - DNA, 22 bp, Artificial Sequence
  primer
gagatctgccagtatccaatgc

SEQ ID NO: 15771 - DNA, 38 bp, Artificial Sequence
  primer
gtaaaacgacggccagttgatgattgtttcacattccg

SEQ ID NO: 15772 - DNA, 38 bp, Artificial Sequence
  primer
gtaaaacgacggccagtcaatagaactgctcacccgtc

SEQ ID NO: 15773 - DNA, 24 bp, Artificial Sequence
  primer
cttatttgtcctgtcagactttca

SEQ ID NO: 15774 - DNA, 19 bp, Artificial Sequence
  primer
agatggtgccactgtgctc

SEQ ID NO: 15775 - DNA, 43 bp, Artificial Sequence
  primer
gtaaaacgacggccagtcctgttctttaaatccagtatgttcc

SEQ ID NO: 15776 - DNA, 21 bp, Artificial Sequence
  primer
cacacacctccactcttctcc

SEQ ID NO: 15777 - DNA, 36 bp, Artificial Sequence
  primer
gtaaaacgacggccagtgagcagtggctgggaaaga

SEQ ID NO: 15778 - DNA, 21 bp, Artificial Sequence
  primer
agacatggacattagcccagg

SEQ ID NO: 15779 - DNA, 38 bp, Artificial Sequence
  primer
gtaaaacgacggccagtatagcagaggccagagtccac

SEQ ID NO: 15780 - DNA, 38 bp, Artificial Sequence
  primer
gtaaaacgacggccagtgcaaagcataattggattccc

SEQ ID NO: 15781 - DNA, 38 bp, Artificial Sequence
  primer
gtaaaacgacggccagtgcctagtgacttgggcatttc

SEQ ID NO: 15782 - DNA, 38 bp, Artificial Sequence
  primer
gtaaaacgacggccagtggcagagaaaggtcagattcc

SEQ ID NO: 15783 - DNA, 22 bp, Artificial Sequence
  primer
ggctttggttcattcatagctt

SEQ ID NO: 15784 - DNA, 21 bp, Artificial Sequence
  primer
tacattgcaccacaggtagcc

SEQ ID NO: 15785 - DNA, 25 bp, Artificial Sequence
  primer
aagaaataagcgatgattcttgatg

SEQ ID NO: 15786 - DNA, 38 bp, Artificial Sequence
  primer
gtaaaacgacggccagtcagattcctcaacccaggaag

SEQ ID NO: 15787 - DNA, 21 bp, Artificial Sequence
  primer
gaaaccgaggcctaagatgtg

SEQ ID NO: 15788 - DNA, 38 bp, Artificial Sequence
  primer
gtaaaacgacggccagtcaattcgaagtggttggatgc

SEQ ID NO: 15789 - DNA, 38 bp, Artificial Sequence
  primer
gtaaaacgacggccagtaatgaatgaatgtgcaccagc

SEQ ID NO: 15790 - DNA, 38 bp, Artificial Sequence
  primer
gtaaaacgacggccagttggtgctcagtgcagaggtag

SEQ ID NO: 15791 - DNA, 21 bp, Artificial Sequence
  primer
gtagacattgggtttcctgcc

SEQ ID NO: 15792 - DNA, 36 bp, Artificial Sequence
  primer
gtaaaacgacggccagtaggctccagggagaggaag

SEQ ID NO: 15793 - DNA, 20 bp, Artificial Sequence
  primer
tcctttgccctctttcttcc

SEQ ID NO: 15794 - DNA, 38 bp, Artificial Sequence
  primer
gtaaaacgacggccagtaggagttactgacagggcagg

SEQ ID NO: 15795 - DNA, 38 bp, Artificial Sequence
  primer
gtaaaacgacggccagtttagacagaggagggtcagcc

SEQ ID NO: 15796 - DNA, 38 bp, Artificial Sequence
  primer
gtaaaacgacggccagtaagagagtcctctggcttccc

SEQ ID NO: 15797 - DNA, 38 bp, Artificial Sequence
  primer
gtaaaacgacggccagtgagggccagtgatatttggtc

SEQ ID NO: 15798 - DNA, 38 bp, Artificial Sequence
  primer
gtaaaacgacggccagtataggaggcagattgtttggg

SEQ ID NO: 15799 - DNA, 21 bp, Artificial Sequence
  primer
agagagtgagaagaggcaggg

SEQ ID NO: 15800 - DNA, 38 bp, Artificial Sequence
  primer
gtaaaacgacggccagtctgggaggcagattgagtagg

SEQ ID NO: 15801 - DNA, 38 bp, Artificial Sequence
  primer
gtaaaacgacggccagttttcatcactcaccatgaggc

SEQ ID NO: 15802 - DNA, 38 bp, Artificial Sequence
  primer
gtaaaacgacggccagtagggtgagtgccaacaaagac

SEQ ID NO: 15803 - DNA, 38 bp, Artificial Sequence
  primer
gtaaaacgacggccagtcaggtagtgtccctgcacttc

SEQ ID NO: 15804 - DNA, 24 bp, Artificial Sequence
  primer
tgacctcttgttaatgtggatgtg

SEQ ID NO: 15805 - DNA, 38 bp, Artificial Sequence
  primer
gtaaaacgacggccagtgtgggccagttaatgtgtgag

SEQ ID NO: 15806 - DNA, 38 bp, Artificial Sequence
  primer
gtaaaacgacggccagtgtgctctgcaaggtttcaatc

SEQ ID NO: 15807 - DNA, 21 bp, Artificial Sequence
  primer
tgaggttgtcaatcttgggtg

SEQ ID NO: 15808 - DNA, 20 bp, Artificial Sequence
  primer
ccactaatggattggaagcg

SEQ ID NO: 15809 - DNA, 39 bp, Artificial Sequence
  primer
gtaaaacgacggccagttggcacagttggagtttatgac

SEQ ID NO: 15810 - DNA, 38 bp, Artificial Sequence
  primer
gtaaaacgacggccagttggttgaggctctttagggtc

SEQ ID NO: 15811 - DNA, 22 bp, Artificial Sequence
  primer
cagttaatctgctgctcagtgg

SEQ ID NO: 15812 - DNA, 43 bp, Artificial Sequence
  primer
gtaaaacgacggccagtaataataatatgctggaggctctgtc

SEQ ID NO: 15813 - DNA, 35 bp, Artificial Sequence
  primer
gtaaaacgacggccagttcgtgatctgcccacctc

SEQ ID NO: 15814 - DNA, 22 bp, Artificial Sequence
  primer
tgctgtctttaaatcccaaacc

SEQ ID NO: 15815 - DNA, 21 bp, Artificial Sequence
  primer
tccctcaagaatggctgtacc

SEQ ID NO: 15816 - DNA, 28 bp, Artificial Sequence
  primer
tgtaatttctttgagagctaaactttcc

SEQ ID NO: 15817 - DNA, 40 bp, Artificial Sequence
  primer
gtaaaacgacggccagttgagacagagatgaaataacggg

SEQ ID NO: 15818 - DNA, 38 bp, Artificial Sequence
  primer
gtaaaacgacggccagtgtaaccaaggaaggccacttg

SEQ ID NO: 15819 - DNA, 24 bp, Artificial Sequence
  primer
tgttggtttctaggtttgagacag

SEQ ID NO: 15820 - DNA, 38 bp, Artificial Sequence
  primer
gtaaaacgacggccagtgtcactcggcgatttacttcc

SEQ ID NO: 15821 - DNA, 41 bp, Artificial Sequence
  primer
gtaaaacgacggccagtggattaattgcataattggtgagc

SEQ ID NO: 15822 - DNA, 24 bp, Artificial Sequence
  primer
ttgagaagagacgaaggatgattt

SEQ ID NO: 15823 - DNA, 38 bp, Artificial Sequence
  primer
gtaaaacgacggccagtcctgacctcataatctgcctg

SEQ ID NO: 15824 - DNA, 21 bp, Artificial Sequence
  primer
cagcctgtccaaagccatatc

SEQ ID NO: 15825 - DNA, 22 bp, Artificial Sequence
  primer
ggcttctagaattctctgctgg

SEQ ID NO: 15826 - DNA, 38 bp, Artificial Sequence
  primer
gtaaaacgacggccagtttgccgagcaataacaatctc

SEQ ID NO: 15827 - DNA, 37 bp, Artificial Sequence
  primer
gtaaaacgacggccagtgggctgtttgctgaaatgtg

SEQ ID NO: 15828 - DNA, 38 bp, Artificial Sequence
  primer
gtaaaacgacggccagtttgcacgagggcatattactg

SEQ ID NO: 15829 - DNA, 20 bp, Artificial Sequence
  primer
gatccacccaccttagcctc

SEQ ID NO: 15830 - DNA, 21 bp, Artificial Sequence
  primer
gccacagtgtagagtgcaagg

SEQ ID NO: 15831 - DNA, 38 bp, Artificial Sequence
  primer
gtaaaacgacggccagtagaaatatgtggcggtgagtg

SEQ ID NO: 15832 - DNA, 38 bp, Artificial Sequence
  primer
gtaaaacgacggccagtaacctggcaactgattgactg

SEQ ID NO: 15833 - DNA, 39 bp, Artificial Sequence
  primer
gtaaaacgacggccagttgcttgttaggccattaactcc

SEQ ID NO: 15834 - DNA, 38 bp, Artificial Sequence
  primer
gtaaaacgacggccagtctcgaagaccaaagaagtggg

SEQ ID NO: 15835 - DNA, 36 bp, Artificial Sequence
  primer
gtaaaacgacggccagtggtcagtcccactggttcc

SEQ ID NO: 15836 - DNA, 36 bp, Artificial Sequence
  primer
gtaaaacgacggccagtccttggagccagagagacg

SEQ ID NO: 15837 - DNA, 39 bp, Artificial Sequence
  primer
gtaaaacgacggccagtcccactgatcttcaggttcttg

SEQ ID NO: 15838 - DNA, 38 bp, Artificial Sequence
  primer
gtaaaacgacggccagtctgggccagaagttccatatc

SEQ ID NO: 15839 - DNA, 22 bp, Artificial Sequence
  primer
caaggagacagaattgaccctc

SEQ ID NO: 15840 - DNA, 27 bp, Artificial Sequence
  primer
ttgaatattacaacaaggactgctaac

SEQ ID NO: 15841 - DNA, 38 bp, Artificial Sequence
  primer
gtaaaacgacggccagtgcttgggcaaggtattgagac

SEQ ID NO: 15842 - DNA, 21 bp, Artificial Sequence
  primer
gactccaaagtccaggctgtc

SEQ ID NO: 15843 - DNA, 39 bp, Artificial Sequence
  primer
gtaaaacgacggccagtgcagtttaatgaaggaaggagg

SEQ ID NO: 15844 - DNA, 21 bp, Artificial Sequence
  primer
cttcttgaagctggatgatgg

SEQ ID NO: 15845 - DNA, 26 bp, Artificial Sequence
  primer
tgaaagaaatgtgaaagtcaagtcag

SEQ ID NO: 15846 - DNA, 41 bp, Artificial Sequence
  primer
gtaaaacgacggccagttgctaccagcattgtagagatagg

SEQ ID NO: 15847 - DNA, 22 bp, Artificial Sequence
  primer
tgctgatggcaataaggtaagg

SEQ ID NO: 15848 - DNA, 36 bp, Artificial Sequence
  primer
gtaaaacgacggccagtctcgcagcagcgtactgac

SEQ ID NO: 15849 - DNA, 41 bp, Artificial Sequence
  primer
gtaaaacgacggccagttttagtaaagcatcttgccagtca

SEQ ID NO: 15850 - DNA, 21 bp, Artificial Sequence
  primer
tgtggactcccagaacctaca

SEQ ID NO: 15851 - DNA, 21 bp, Artificial Sequence
  primer
aaacctgaagacctgctgaag

SEQ ID NO: 15852 - DNA, 43 bp, Artificial Sequence
  primer
gtaaaacgacggccagttgcaagttgtattcgtaacctaattt

SEQ ID NO: 15853 - DNA, 21 bp, Artificial Sequence
  primer
tctcacctcagtctcccaaag

SEQ ID NO: 15854 - DNA, 21 bp, Artificial Sequence
  primer
tttgctcaccattctgagtcg

SEQ ID NO: 15855 - DNA, 37 bp, Artificial Sequence
  primer
gtaaaacgacggccagtaatgtctggagccagggaaa

SEQ ID NO: 15856 - DNA, 38 bp, Artificial Sequence
  primer
gtaaaacgacggccagtgggcatgtacattggagtttc

SEQ ID NO: 15857 - DNA, 41 bp, Artificial Sequence
  primer
gtaaaacgacggccagtaatgtggaatcatttagtcagtca

SEQ ID NO: 15858 - DNA, 24 bp, Artificial Sequence
  primer
aaataagtgggatgattggacttt

SEQ ID NO: 15859 - DNA, 21 bp, Artificial Sequence
  primer
caagatggaaagagcatgagc

SEQ ID NO: 15860 - DNA, 38 bp, Artificial Sequence
  primer
gtaaaacgacggccagttgggacaggagaaagaagctg

SEQ ID NO: 15861 - DNA, 21 bp, Artificial Sequence
  primer
agcacaggtgcaggtataggt

SEQ ID NO: 15862 - DNA, 27 bp, Artificial Sequence
  primer
tcacatctttaggaggcatatatcttg

SEQ ID NO: 15863 - DNA, 27 bp, Artificial Sequence
  primer
tctgacaacatttctactatctccatc

SEQ ID NO: 15864 - DNA, 38 bp, Artificial Sequence
  primer
gtaaaacgacggccagttacatgtgtcgtcgtggactg

SEQ ID NO: 15865 - DNA, 23 bp, Artificial Sequence
  primer
aaatcatggaattacaggtgctt

SEQ ID NO: 15866 - DNA, 25 bp, Artificial Sequence
  primer
tgatttatctcggtgtctctctttc

SEQ ID NO: 15867 - DNA, 41 bp, Artificial Sequence
  primer
gtaaaacgacggccagtcaatttgcaaaccaagactaactg

SEQ ID NO: 15868 - DNA, 38 bp, Artificial Sequence
  primer
gtaaaacgacggccagtggagagccacagaagtcactg

SEQ ID NO: 15869 - DNA, 41 bp, Artificial Sequence
  primer
gtaaaacgacggccagtgccaggttactgttgcataaagag

SEQ ID NO: 15870 - DNA, 40 bp, Artificial Sequence
  primer
gtaaaacgacggccagtttgactaccaaagcagttgtcac

SEQ ID NO: 15871 - DNA, 22 bp, Artificial Sequence
  primer
gctcttctaaagggattgaggg

SEQ ID NO: 15872 - DNA, 38 bp, Artificial Sequence
  primer
gtaaaacgacggccagtacttggtacatgggagcaatg

SEQ ID NO: 15873 - DNA, 21 bp, Artificial Sequence
  primer
tgtataacagtgcccacagcc

SEQ ID NO: 15874 - DNA, 25 bp, Artificial Sequence
  primer
gcattgcaaatagatgacataatgg

SEQ ID NO: 15875 - DNA, 38 bp, Artificial Sequence
  primer
gtaaaacgacggccagtgatcccgcagcattaaacaag

SEQ ID NO: 15876 - DNA, 21 bp, Artificial Sequence
  primer
atggaagatgcactaccaccc

SEQ ID NO: 15877 - DNA, 38 bp, Artificial Sequence
  primer
gtaaaacgacggccagtatgcaagcagtcaagaggttg

SEQ ID NO: 15878 - DNA, 25 bp, Artificial Sequence
  primer
ttacttacctaattcccagagaccc

SEQ ID NO: 15879 - DNA, 43 bp, Artificial Sequence
  primer
gtaaaacgacggccagtaaattcagctttatttgtgtgatgtt

SEQ ID NO: 15880 - DNA, 39 bp, Artificial Sequence
  primer
gtaaaacgacggccagtgtaaattctccattcagacggg

SEQ ID NO: 15881 - DNA, 20 bp, Artificial Sequence
  primer
ttcatgttgactggcacagc

SEQ ID NO: 15882 - DNA, 20 bp, Artificial Sequence
  primer
cagaatgggaaggaggaagg

SEQ ID NO: 15883 - DNA, 37 bp, Artificial Sequence
  primer
gtaaaacgacggccagtcatgctctgacctaggctgg

SEQ ID NO: 15884 - DNA, 20 bp, Artificial Sequence
  primer
caagtgggacctgtgaccag

SEQ ID NO: 15885 - DNA, 21 bp, Artificial Sequence
  primer
atttccagtggtgagtgacgg

SEQ ID NO: 15886 - DNA, 36 bp, Artificial Sequence
  primer
gtaaaacgacggccagtgctgttccgcctcatgttc

SEQ ID NO: 15887 - DNA, 38 bp, Artificial Sequence
  primer
gtaaaacgacggccagtccttgtagcagagggatgcac

SEQ ID NO: 15888 - DNA, 39 bp, Artificial Sequence
  primer
gtaaaacgacggccagtcacaggactcccactctagctg

SEQ ID NO: 15889 - DNA, 21 bp, Artificial Sequence
  primer
tactttggcctggaggttgac

SEQ ID NO: 15890 - DNA, 20 bp, Artificial Sequence
  primer
ggctgaagacactgacgctg

SEQ ID NO: 15891 - DNA, 21 bp, Artificial Sequence
  primer
ctgattagcctggtgggtagc

SEQ ID NO: 15892 - DNA, 35 bp, Artificial Sequence
  primer
gtaaaacgacggccagtccaccactggacggtgag

SEQ ID NO: 15893 - DNA, 35 bp, Artificial Sequence
  primer
gtaaaacgacggccagtgggtaaggctgggcactg

SEQ ID NO: 15894 - DNA, 38 bp, Artificial Sequence
  primer
gtaaaacgacggccagttcaggcagtttggactacagg

SEQ ID NO: 15895 - DNA, 38 bp, Artificial Sequence
  primer
gtaaaacgacggccagtgtgaccctgttctgcttcttg

SEQ ID NO: 15896 - DNA, 38 bp, Artificial Sequence
  primer
gtaaaacgacggccagtgggagggacaaccaactaatg

SEQ ID NO: 15897 - DNA, 37 bp, Artificial Sequence
  primer
gtaaaacgacggccagtcatgaagggtgtcaccaagg

SEQ ID NO: 15898 - DNA, 23 bp, Artificial Sequence
  primer
ccagaagatcatgatggagtttg

SEQ ID NO: 15899 - DNA, 20 bp, Artificial Sequence
  primer
cctccctttccctgcattac

SEQ ID NO: 15900 - DNA, 26 bp, Artificial Sequence
  primer
ggtgtccgtttgtattgaataatttg

SEQ ID NO: 15901 - DNA, 38 bp, Artificial Sequence
  primer
gtaaaacgacggccagtccacaccaaattattggaccc

SEQ ID NO: 15902 - DNA, 38 bp, Artificial Sequence
  primer
gtaaaacgacggccagtgaaagctgtccagagccagag

SEQ ID NO: 15903 - DNA, 38 bp, Artificial Sequence
  primer
gtaaaacgacggccagtccgaatcccaagaaccatatc

SEQ ID NO: 15904 - DNA, 18 bp, Artificial Sequence
  primer
gtacctggcgtcccactg

SEQ ID NO: 15905 - DNA, 37 bp, Artificial Sequence
  primer
gtaaaacgacggccagtaccgctcgtccctgatagag

SEQ ID NO: 15906 - DNA, 35 bp, Artificial Sequence
  primer
gtaaaacgacggccagtggagaagccctaccgctg

SEQ ID NO: 15907 - DNA, 21 bp, Artificial Sequence
  primer
gccacgtgtcctcgcttatag

SEQ ID NO: 15908 - DNA, 37 bp, Artificial Sequence
  primer
gtaaaacgacggccagtcacatgggtgtggtagggag

SEQ ID NO: 15909 - DNA, 21 bp, Artificial Sequence
  primer
agggtcgacagcgttaagttc

SEQ ID NO: 15910 - DNA, 38 bp, Artificial Sequence
  primer
gtaaaacgacggccagtcaggtggaggacattctaccc

SEQ ID NO: 15911 - DNA, 38 bp, Artificial Sequence
  primer
gtaaaacgacggccagttgtcagcaagtgtctgcactg

SEQ ID NO: 15912 - DNA, 35 bp, Artificial Sequence
  primer
gtaaaacgacggccagtccctgccacagatgaggg

SEQ ID NO: 15913 - DNA, 38 bp, Artificial Sequence
  primer
gtaaaacgacggccagtagagaattccatggtgcaagc

SEQ ID NO: 15914 - DNA, 38 bp, Artificial Sequence
  primer
gtaaaacgacggccagtgacaaatgaccatgttctccg

SEQ ID NO: 15915 - DNA, 37 bp, Artificial Sequence
  primer
gtaaaacgacggccagtgtggaggatgaggctctgtg

SEQ ID NO: 15916 - DNA, 21 bp, Artificial Sequence
  primer
catcaccacttcctgatggag

SEQ ID NO: 15917 - DNA, 38 bp, Artificial Sequence
  primer
gtaaaacgacggccagtttccaggacagagagaccagg

SEQ ID NO: 15918 - DNA, 38 bp, Artificial Sequence
  primer
gtaaaacgacggccagtctgctcgttaggatggagacc

SEQ ID NO: 15919 - DNA, 37 bp, Artificial Sequence
  primer
gtaaaacgacggccagtgaagggtttccaaggcagtc

SEQ ID NO: 15920 - DNA, 21 bp, Artificial Sequence
  primer
cgttgtgtcctctttcttccc

SEQ ID NO: 15921 - DNA, 21 bp, Artificial Sequence
  primer
caagttacgtgggtccactcg

SEQ ID NO: 15922 - DNA, 20 bp, Artificial Sequence
  primer
caagaacatcagagggcagg

SEQ ID NO: 15923 - DNA, 38 bp, Artificial Sequence; identical to SEQ ID NO: 15914
  primer

SEQ ID NO: 15924 - DNA, 20 bp, Artificial Sequence
  primer
gtggaggatgaggctctgtg

SEQ ID NO: 15925 - DNA, 21 bp, Artificial Sequence
  primer
catcaccacttcctgatggag

SEQ ID NO: 15926 - DNA, 38 bp, Artificial Sequence
  primer
gtaaaacgacggccagtccacctactgagactctgccc

SEQ ID NO: 15927 - DNA, 39 bp, Artificial Sequence
  primer
gtaaaacgacggccagttgtgacatgcactttatgcacc

SEQ ID NO: 15928 - DNA, 26 bp, Artificial Sequence
  primer
aaatgaacttaccaagagtgttcttt

SEQ ID NO: 15929 - DNA, 21 bp, Artificial Sequence
  primer
cctggaacctggaaatgttct

SEQ ID NO: 15930 - DNA, 19 bp, Artificial Sequence
  primer
gtggaacactgtccatccc

SEQ ID NO: 15931 - DNA, 24 bp, Artificial Sequence
  primer
aatatttaagccaccagacagagg

SEQ ID NO: 15932 - DNA, 38 bp, Artificial Sequence
  primer
gtaaaacgacggccagtacggaatgacataaaggtcgc

SEQ ID NO: 15933 - DNA, 21 bp, Artificial Sequence
  primer
cattatctgccaccaccacac

SEQ ID NO: 15934 - DNA, 27 bp, Artificial Sequence
  primer
cacagcaactagaaattcttatgttca

SEQ ID NO: 15935 - DNA, 20 bp, Artificial Sequence
  primer
acgatgcctgcaccttattc

SEQ ID NO: 15936 - DNA, 38 bp, Artificial Sequence
  primer
gtaaaacgacggccagtccttagctgctgctacattgg

SEQ ID NO: 15937 - DNA, 25 bp, Artificial Sequence
  primer
tttcctaatgtaacctgtgaaacaa

SEQ ID NO: 15938 - DNA, 38 bp, Artificial Sequence
  primer
gtaaaacgacggccagttgaactggatgttcttggctg

SEQ ID NO: 15939 - DNA, 21 bp, Artificial Sequence
  primer
ctgactttgcatgggctattc

SEQ ID NO: 15940 - DNA, 38 bp, Artificial Sequence
  primer
gtaaaacgacggccagtcggatttgagggaagtgagtc

SEQ ID NO: 15941 - DNA, 38 bp, Artificial Sequence
  primer
gtaaaacgacggccagtgagctaggtgtggagtgggag

SEQ ID NO: 15942 - DNA, 35 bp, Artificial Sequence
  primer
gtaaaacgacggccagtcaagtggtggctcggttc

SEQ ID NO: 15943 - DNA, 21 bp, Artificial Sequence
  primer
tctggtgtctgtagcagtcgg

SEQ ID NO: 15944 - DNA, 20 bp, Artificial Sequence
  primer
gttaggtccagggctttccc

SEQ ID NO: 15945 - DNA, 20 bp, Artificial Sequence
  primer
cggcttatttgcatggagag

SEQ ID NO: 15946 - DNA, 21 bp, Artificial Sequence
  primer
cacaatgatctcgccaaactc

SEQ ID NO: 15947 - DNA, 38 bp, Artificial Sequence
  primer
gtaaaacgacggccagttcacacctgtgtcctctctcc

SEQ ID NO: 15948 - DNA, 21 bp, Artificial Sequence
  primer
cagcaaggcctctaccaagtc

SEQ ID NO: 15949 - DNA, 20 bp, Artificial Sequence
  primer
ggtgagaactggcatccttg

SEQ ID NO: 15950 - DNA, 37 bp, Artificial Sequence
  primer
gtaaaacgacggccagtaagtctgtgcctctgcttgg

SEQ ID NO: 15951 - DNA, 21 bp, Artificial Sequence
  primer
ctgcatttgtatgtgtgcctg

SEQ ID NO: 15952 - DNA, 18 bp, Artificial Sequence
  primer
ccactggtactggctgcg

SEQ ID NO: 15953 - DNA, 36 bp, Artificial Sequence
  primer
gtaaaacgacggccagtagtggtgtgtatgcggtgc

SEQ ID NO: 15954 - DNA, 21 bp, Artificial Sequence
  primer
cagctgcagaagatggaggac

SEQ ID NO: 15955 - DNA, 20 bp, Artificial Sequence
  primer
gctagtgtgtgtgtgcgtcc

SEQ ID NO: 15956 - DNA, 38 bp, Artificial Sequence
  primer
gtaaaacgacggccagtcaggtctcggcctgtagtttc

SEQ ID NO: 15957 - DNA, 38 bp, Artificial Sequence
  primer
gtaaaacgacggccagtacgactggaacaggaggtgtc

SEQ ID NO: 15958 - DNA, 45 bp, Artificial Sequence
  primer
gtaaaacgacggccagttttgtaagtaggaagtcagttcttgtga

SEQ ID NO: 15959 - DNA, 21 bp, Artificial Sequence
  primer
gaggtcatggtggtatctccc

SEQ ID NO: 15960 - DNA, 38 bp, Artificial Sequence
  primer
gtaaaacgacggccagtggttggattagtgaagcaggc

SEQ ID NO: 15961 - DNA, 38 bp, Artificial Sequence
  primer
gtaaaacgacggccagtcataaggtgggctcttgtgtg

SEQ ID NO: 15962 - DNA, 37 bp, Artificial Sequence
  primer
gtaaaacgacggccagtaaaccttgtgcagcgagatg

SEQ ID NO: 15963 - DNA, 21 bp, Artificial Sequence
  primer
aagaacctcgctcagcacttc

SEQ ID NO: 15964 - DNA, 21 bp, Artificial Sequence
  primer
gggtatgctgtagcactctcg

SEQ ID NO: 15965 - DNA, 21 bp, Artificial Sequence
  primer
ggatttctatttgcacccagg

SEQ ID NO: 15966 - DNA, 38 bp, Artificial Sequence
  primer
gtaaaacgacggccagtcagtcaactgtgccctaagcc

SEQ ID NO: 15967 - DNA, 21 bp, Artificial Sequence
  primer
cacacagaactgctcacagcc

SEQ ID NO: 15968 - DNA, 38 bp, Artificial Sequence
  primer
gtaaaacgacggccagttcataaagtgtccacgccatc

SEQ ID NO: 15969 - DNA, 36 bp, Artificial Sequence
  primer
gtaaaacgacggccagtctgctcttggctgatttgg

SEQ ID NO: 15970 - DNA, 35 bp, Artificial Sequence
  primer
gtaaaacgacggccagtgtgagctaccacgcccag

SEQ ID NO: 15971 - DNA, 38 bp, Artificial Sequence
  primer
gtaaaacgacggccagtggctgcagttgctgtaacaag

SEQ ID NO: 15972 - DNA, 38 bp, Artificial Sequence
  primer
gtaaaacgacggccagtctgatcttgtgatccacccac

SEQ ID NO: 15973 - DNA, 38 bp, Artificial Sequence
  primer
gtaaaacgacggccagtaggcctctgcaccttagtagc

SEQ ID NO: 15974 - DNA, 38 bp, Artificial Sequence
  primer
gtaaaacgacggccagttggttctccaaggcatgatag

SEQ ID NO: 15975 - DNA, 38 bp, Artificial Sequence
  primer
gtaaaacgacggccagtgcagggtccaaggagatgtag

SEQ ID NO: 15976 - DNA, 38 bp, Artificial Sequence
  primer
gtaaaacgacggccagttgtcaagacggataatgtggc

SEQ ID NO: 15977 - DNA, 21 bp, Artificial Sequence
  primer
aaagctccagcgaacaaagac

SEQ ID NO: 15978 - DNA, 21 bp, Artificial Sequence
  primer
tctcatgattgttctgcacgc

SEQ ID NO: 15979 - DNA, 39 bp, Artificial Sequence
  primer
gtaaaacgacggccagtttgaatgtggtcaaactcttgg

SEQ ID NO: 15980 - DNA, 24 bp, Artificial Sequence
  primer
tttaacacaagtccacattcacag

SEQ ID NO: 15981 - DNA, 38 bp, Artificial Sequence
  primer
gtaaaacgacggccagtgtgagcccaactaaccctttg

SEQ ID NO: 15982 - DNA, 21 bp, Artificial Sequence
  primer
cttctccaagatgtgcctgtg

SEQ ID NO: 15983 - DNA, 37 bp, Artificial Sequence
  primer
gtaaaacgacggccagtttggccttccatttgtcttg

SEQ ID NO: 15984 - DNA, 42 bp, Artificial Sequence
  primer
gtaaaacgacggccagttgtagataccacccaacatttgaac

SEQ ID NO: 15985 - DNA, 38 bp, Artificial Sequence
  primer
gtaaaacgacggccagtttagcccaacacctagcacag

SEQ ID NO: 15986 - DNA, 38 bp, Artificial Sequence
  primer
gtaaaacgacggccagttgattacatcagtgtcaggcg

SEQ ID NO: 15987 - DNA, 38 bp, Artificial Sequence
  primer
gtaaaacgacggccagttagctggctcggtactgaaag

SEQ ID NO: 15988 - DNA, 23 bp, Artificial Sequence
  primer
cctgaatgtgaagtgagtgagtg

SEQ ID NO: 15989 - DNA, 41 bp, Artificial Sequence
  primer
gtaaaacgacggccagtggagactcatgggacattctactg

SEQ ID NO: 15990 - DNA, 38 bp, Artificial Sequence
  primer
gtaaaacgacggccagtttccagcatgagtgacagtcc

SEQ ID NO: 15991 - DNA, 27 bp, Artificial Sequence
  primer
ttgttctcatgggattaagatattctc

SEQ ID NO: 15992 - DNA, 19 bp, Artificial Sequence
  primer
aggttgcgccattgttctc

SEQ ID NO: 15993 - DNA, 24 bp, Artificial Sequence
  primer
aatcataaatcttcctccctaccc

SEQ ID NO: 15994 - DNA, 21 bp, Artificial Sequence
  primer
gggtgacagagtgaaaccttg

SEQ ID NO: 15995 - DNA, 40 bp, Artificial Sequence
  primer
gtaaaacgacggccagtaagatgtagggttggtgaagttg

SEQ ID NO: 15996 - DNA, 39 bp, Artificial Sequence
  primer
gtaaaacgacggccagtgaggatggttgctagacaggtg

SEQ ID NO: 15997 - DNA, 22 bp, Artificial Sequence
  primer
gaccaatgataaatgggtgtgg

SEQ ID NO: 15998 - DNA, 18 bp, Artificial Sequence
  primer
cagtgagctgcgatcgtg

SEQ ID NO: 15999 - DNA, 21 bp, Artificial Sequence
  primer
gtgtgagtaactgcaccagcc

SEQ ID NO: 16000 - DNA, 23 bp, Artificial Sequence
  primer
tgcatttctgattccacttacag

SEQ ID NO: 16001 - DNA, 22 bp, Artificial Sequence
  primer
tgctgaaagtgatgaccagttc

SEQ ID NO: 16002 - DNA, 21 bp, Artificial Sequence
  primer
cacccatcaccatcactgttc

SEQ ID NO: 16003 - DNA, 38 bp, Artificial Sequence
  primer
gtaaaacgacggccagtactgatgccattccctcaaac

SEQ ID NO: 16004 - DNA, 39 bp, Artificial Sequence
  primer
gtaaaacgacggccagtttatatgactgatgtgcgtggg

SEQ ID NO: 16005 - DNA, 27 bp, Artificial Sequence
  primer
gatatactgatgtgtcattaagcttgg

SEQ ID NO: 16006 - DNA, 21 bp, Artificial Sequence
  primer
catttggtaatgaggcaatca

SEQ ID NO: 16007 - DNA, 39 bp, Artificial Sequence
  primer
gtaaaacgacggccagtcctatcggagatagagaacggg

SEQ ID NO: 16008 - DNA, 23 bp, Artificial Sequence
  primer
gcatgttcatactggaggatttg

SEQ ID NO: 16009 - DNA, 37 bp, Artificial Sequence
  primer
gtaaaacgacggccagtgcagcctcaggagcagacta

SEQ ID NO: 16010 - DNA, 39 bp, Artificial Sequence
  primer
gtaaaacgacggccagtgccttgtgtttcaggtttcatc

SEQ ID NO: 16011 - DNA, 35 bp, Artificial Sequence
  primer
gtaaaacgacggccagtaatggttgtgcccacgtc

SEQ ID NO: 16012 - DNA, 22 bp, Artificial Sequence
  primer
gggtgttaagaggaagaatggg

SEQ ID NO: 16013 - DNA, 39 bp, Artificial Sequence
  primer
gtaaaacgacggccagtgattgtgctactccagcattcc

SEQ ID NO: 16014 - DNA, 20 bp, Artificial Sequence
  primer
aatggaccctgggtatggag

SEQ ID NO: 16015 - DNA, 38 bp, Artificial Sequence
  primer
gtaaaacgacggccagtacacaagtgaacccagaatgg

SEQ ID NO: 16016 - DNA, 20 bp, Artificial Sequence
  primer
aggtgactgccatctgcaag

SEQ ID NO: 16017 - DNA, 21 bp, Artificial Sequence
  primer
ctctttcaaaggaggcagtgg

SEQ ID NO: 16018 - DNA, 37 bp, Artificial Sequence
  primer
gtaaaacgacggccagtgggtctgtgtagaccctggc

SEQ ID NO: 16019 - DNA, 38 bp, Artificial Sequence
  primer
gtaaaacgacggccagtagtgatgaaaggcctggagtc

SEQ ID NO: 16020 - DNA, 38 bp, Artificial Sequence
  primer
gtaaaacgacggccagtaggatgaacttgtagaccggg

SEQ ID NO: 16021 - DNA, 38 bp, Artificial Sequence
  primer
gtaaaacgacggccagtgtcttcctgctgatgcaatcc

SEQ ID NO: 16022 - DNA, 37 bp, Artificial Sequence
  primer
gtaaaacgacggccagtccaagacacgcttgttggag

SEQ ID NO: 16023 - DNA, 21 bp, Artificial Sequence
  primer
atgcaggcatgatttgttcag

SEQ ID NO: 16024 - DNA, 21 bp, Artificial Sequence
  primer
acgcccataggaaagtcagtc

SEQ ID NO: 16025 - DNA, 41 bp, Artificial Sequence
  primer
gtaaaacgacggccagtgtttaaatgcttcagtgaggatca

SEQ ID NO: 16026 - DNA, 42 bp, Artificial Sequence
  primer
gtaaaacgacggccagttggtaatagctcctgtaattcgatg

SEQ ID NO: 16027 - DNA, 38 bp, Artificial Sequence
  primer
gtaaaacgacggccagtgagcttgaggctatcagaggg

SEQ ID NO: 16028 - DNA, 21 bp, Artificial Sequence
  primer
ttgggaaatttgatcatgcag

SEQ ID NO: 16029 - DNA, 23 bp, Artificial Sequence
  primer
tcccttaaaggatgattgtgacc

SEQ ID NO: 16030 - DNA, 42 bp, Artificial Sequence
  primer
gtaaaacgacggccagtcttaacttcagtggaattgccttag

SEQ ID NO: 16031 - DNA, 21 bp, Artificial Sequence
  primer
tgttcaaagcagaagcgaacc

SEQ ID NO: 16032 - DNA, 38 bp, Artificial Sequence
  primer
gtaaaacgacggccagtcgtatttcaagtcctgccctc

SEQ ID NO: 16033 - DNA, 21 bp, Artificial Sequence
  primer
aaactgggacagaacaggcag

SEQ ID NO: 16034 - DNA, 38 bp, Artificial Sequence
  primer
gtaaaacgacggccagtcagggtgacaggtccttcttc

SEQ ID NO: 16035 - DNA, 21 bp, Artificial Sequence
  primer
ggcctccatctttcagttgtc

SEQ ID NO: 16036 - DNA, 37 bp, Artificial Sequence
  primer
gtaaaacgacggccagtcgttcaaaggcaaagaccag

SEQ ID NO: 16037 - DNA, 19 bp, Artificial Sequence
  primer
ctcattgggaacgaggtgg

SEQ ID NO: 16038 - DNA, 38 bp, Artificial Sequence
  primer
gtaaaacgacggccagtagggagacgggagagagtagg

SEQ ID NO: 16039 - DNA, 38 bp, Artificial Sequence
  primer
gtaaaacgacggccagtctactggacccacgaagatgg

SEQ ID NO: 16040 - DNA, 38 bp, Artificial Sequence
  primer
gtaaaacgacggccagttcactatcctcagggagggag

SEQ ID NO: 16041 - DNA, 38 bp, Artificial Sequence
  primer
gtaaaacgacggccagtacgatcaccatgaagcagttg

SEQ ID NO: 16042 - DNA, 38 bp, Artificial Sequence
  primer
gtaaaacgacggccagtgaactacatctcccggaagcc

SEQ ID NO: 16043 - DNA, 39 bp, Artificial Sequence
  primer
gtaaaacgacggccagtgcttcttcgtagttcctcaccc

SEQ ID NO: 16044 - DNA, 37 bp, Artificial Sequence
  primer
gtaaaacgacggccagtagatggcaatcttggcaatg

SEQ ID NO: 16045 - DNA, 21 bp, Artificial Sequence
  primer
agcttctttgactctcctggg

SEQ ID NO: 16046 - DNA, 21 bp, Artificial Sequence
  primer
aaatgaggcctacatcccaag

SEQ ID NO: 16047 - DNA, 38 bp, Artificial Sequence
  primer
gtaaaacgacggccagtagacgttaaggctatggcagg

SEQ ID NO: 16048 - DNA, 21 bp, Artificial Sequence
  primer
tcacagcagaacccactgaag

SEQ ID NO: 16049 - DNA, 21 bp, Artificial Sequence
  primer
gactgttagtggcatggctcc

SEQ ID NO: 16050 - DNA, 39 bp, Artificial Sequence
  primer
gtaaaacgacggccagttcacctgatagtgccatgtttc

SEQ ID NO: 16051 - DNA, 38 bp, Artificial Sequence
  primer
gtaaaacgacggccagtctttgccgtagatcaaatggg

SEQ ID NO: 16052 - DNA, 18 bp, Artificial Sequence
  primer
gcatggctcctgtcttgg

SEQ ID NO: 16053 - DNA, 38 bp, Artificial Sequence
  primer
gtaaaacgacggccagtgacagtccaggcagttctgtg

SEQ ID NO: 16054 - DNA, 21 bp, Artificial Sequence
  primer
tattgtctgtgggaaacaggc

SEQ ID NO: 16055 - DNA, 38 bp, Artificial Sequence
  primer
gtaaaacgacggccagttaatcaggttgtgctgggaac

SEQ ID NO: 16056 - DNA, 38 bp, Artificial Sequence
  primer
gtaaaacgacggccagtcctttgagtgtgtgcttagcg

SEQ ID NO: 16057 - DNA, 41 bp, Artificial Sequence
  primer
gtaaaacgacggccagtcagaggcaagaaattagggcttac

SEQ ID NO: 16058 - DNA, 22 bp, Artificial Sequence
  primer
cattggttgatcactttggatg

SEQ ID NO: 16059 - DNA, 38 bp, Artificial Sequence
  primer
gtaaaacgacggccagtcccataactggcacatttcag

SEQ ID NO: 16060 - DNA, 23 bp, Artificial Sequence
  primer
atcaaatagacccagttcattgc

SEQ ID NO: 16061 - DNA, 37 bp, Artificial Sequence
  primer
gtaaaacgacggccagtatgccaatgatgttgactgg

SEQ ID NO: 16062 - DNA, 38 bp, Artificial Sequence
  primer
gtaaaacgacggccagttagaacctcagttcccaagcc

SEQ ID NO: 16063 - DNA, 23 bp, Artificial Sequence
  primer
cacatccaaactacatcacagcc

SEQ ID NO: 16064 - DNA, 21 bp, Artificial Sequence
  primer
cctgaccaacatggtctctcc

SEQ ID NO: 16065 - DNA, 39 bp, Artificial Sequence
  primer
gtaaaacgacggccagttgtaggcctttacagaagcagg

SEQ ID NO: 16066 - DNA, 21 bp, Artificial Sequence
  primer
cacggtaacagcctttcttgg

SEQ ID NO: 16067 - DNA, 21 bp, Artificial Sequence
  primer
atgaactatagggtgggtgcc

SEQ ID NO: 16068 - DNA, 38 bp, Artificial Sequence
  primer
gtaaaacgacggccagttggaagccattcattgttcac

SEQ ID NO: 16069 - DNA, 38 bp, Artificial Sequence
  primer
gtaaaacgacggccagtgtctatggtgctcctggcttc

SEQ ID NO: 16070 - DNA, 21 bp, Artificial Sequence
  primer
tccaggagtgagtgagtttgg

SEQ ID NO: 16071 - DNA, 22 bp, Artificial Sequence
  primer
caaaccactaagcccagttcac

SEQ ID NO: 16072 - DNA, 39 bp, Artificial Sequence
  primer
gtaaaacgacggccagttcaggcaaagcgagctaataac

SEQ ID NO: 16073 - DNA, 38 bp, Artificial Sequence
  primer
gtaaaacgacggccagttttcttgtcagatggtgctgg

SEQ ID NO: 16074 - DNA, 21 bp, Artificial Sequence
  primer
ggctcagaccctgtgagtcag

SEQ ID NO: 16075 - DNA, 20 bp, Artificial Sequence
  primer
agttggaattcatccagccc

SEQ ID NO: 16076 - DNA, 38 bp, Artificial Sequence
  primer
gtaaaacgacggccagtggatttggatggctctctgtc

SEQ ID NO: 16077 - DNA, 38 bp, Artificial Sequence
  primer
gtaaaacgacggccagtacaagcctgagctttcctgtc

SEQ ID NO: 16078 - DNA, 38 bp, Artificial Sequence
  primer
gtaaaacgacggccagtatcaggagctgaggtgtttcc

SEQ ID NO: 16079 - DNA, 38 bp, Artificial Sequence
  primer
gtaaaacgacggccagtactcagccttgctctctgtcc

SEQ ID NO: 16080 - DNA, 38 bp, Artificial Sequence
  primer
gtaaaacgacggccagtgcctttattccgtttccactc

SEQ ID NO: 16081 - DNA, 38 bp, Artificial Sequence
  primer
gtaaaacgacggccagttggagtggttaattccttgcc

SEQ ID NO: 16082 - DNA, 38 bp, Artificial Sequence
  primer
gtaaaacgacggccagtattggtctgtttcatgggacc

SEQ ID NO: 16083 - DNA, 22 bp, Artificial Sequence
  primer
agcttctccaggtctgtattgc

SEQ ID NO: 16084 - DNA, 38 bp, Artificial Sequence
  primer
gtaaaacgacggccagttggtaactgtcatccagtggg

SEQ ID NO: 16085 - DNA, 21 bp, Artificial Sequence
  primer
taatcctcttgccttggcctc

SEQ ID NO: 16086 - DNA, 37 bp, Artificial Sequence
  primer
gtaaaacgacggccagtgggaggaagaacggaaggag

SEQ ID NO: 16087 - DNA, 36 bp, Artificial Sequence
  primer
gtaaaacgacggccagtagcccttcttagcagcgag

SEQ ID NO: 16088 - DNA, 23 bp, Artificial Sequence
  primer
aaagctttgctacagtgagcttc

SEQ ID NO: 16089 - DNA, 38 bp, Artificial Sequence
  primer
gtaaaacgacggccagtccatgcagatcagttcctgag

SEQ ID NO: 16090 - DNA, 21 bp, Artificial Sequence
  primer
cctgtcgaaagcgagttgtaa

SEQ ID NO: 16091 - DNA, 21 bp, Artificial Sequence
  primer
atgcgaacatgctgttacctg

SEQ ID NO: 16092 - DNA, 36 bp, Artificial Sequence
  primer
gtaaaacgacggccagtctggtccctgaagtcggag

SEQ ID NO: 16093 - DNA, 20 bp, Artificial Sequence
  primer
tttacaaccagtcggccatc

SEQ ID NO: 16094 - DNA, 38 bp, Artificial Sequence
  primer
gtaaaacgacggccagtcttctggtaagattcacgccc

SEQ ID NO: 16095 - DNA, 21 bp, Artificial Sequence
  primer
ctaaaggtgtcagggccacac

SEQ ID NO: 16096 - DNA, 38 bp, Artificial Sequence
  primer
gtaaaacgacggccagtgccttccagaagctgacagac

SEQ ID NO: 16097 - DNA, 38 bp, Artificial Sequence
  primer
gtaaaacgacggccagtgagagccggaagcacatagag

SEQ ID NO: 16098 - DNA, 21 bp, Artificial Sequence
  primer
gagacagaggagactgggctg

SEQ ID NO: 16099 - DNA, 21 bp, Artificial Sequence
  primer
gggcagaattgtttccagttg

SEQ ID NO: 16100 - DNA, 37 bp, Artificial Sequence
  primer
gtaaaacgacggccagtgccactggactacatcctgc

SEQ ID NO: 16101 - DNA, 38 bp, Artificial Sequence
  primer
gtaaaacgacggccagtgactttgcactgtctgcttgg

SEQ ID NO: 16102 - DNA, 21 bp, Artificial Sequence
  primer
cgggtcatggactaccacttc

SEQ ID NO: 16103 - DNA, 37 bp, Artificial Sequence
  primer
gtaaaacgacggccagtgagtccctctgttcccgaag

SEQ ID NO: 16104 - DNA, 21 bp, Artificial Sequence
  primer
cacaccagctaagactgccaa

SEQ ID NO: 16105 - DNA, 22 bp, Artificial Sequence
  primer
tgtcgtttaacttccacgagac

SEQ ID NO: 16106 - DNA, 37 bp, Artificial Sequence
  primer
gtaaaacgacggccagtcagatggagccacgaacaac

SEQ ID NO: 16107 - DNA, 38 bp, Artificial Sequence
  primer
gtaaaacgacggccagtttctttctaacccggctctcc

SEQ ID NO: 16108 - DNA, 20 bp, Artificial Sequence
  primer
ggttgagatgtgcttctccc

SEQ ID NO: 16109 - DNA, 38 bp, Artificial Sequence
  primer
gtaaaacgacggccagttgcaaggctgttgtaatgatg

SEQ ID NO: 16110 - DNA, 38 bp, Artificial Sequence
  primer
gtaaaacgacggccagttagggaccttcatcctcaagc

SEQ ID NO: 16111 - DNA, 21 bp, Artificial Sequence
  primer
ctcttgcaacacgcacagaac

SEQ ID NO: 16112 - DNA, 21 bp, Artificial Sequence
  primer
agacttagagagctggcaggg

SEQ ID NO: 16113 - DNA, 18 bp, Artificial Sequence
  primer
caggccagcaagctgaag

SEQ ID NO: 16114 - DNA, 20 bp, Artificial Sequence
  primer
gtggtggccaagttcaagag

SEQ ID NO: 16115 - DNA, 38 bp, Artificial Sequence
  primer
gtaaaacgacggccagtagaggaggaggaggagctgac

SEQ ID NO: 16116 - DNA, 21 bp, Artificial Sequence
  primer
ccttctctaagcgcatcaagc

SEQ ID NO: 16117 - DNA, 21 bp, Artificial Sequence
  primer
tcgacctgtggttggtttaag

SEQ ID NO: 16118 - DNA, 38 bp, Artificial Sequence; identical to SEQ ID NO: 16110
  primer

SEQ ID NO: 16119 - DNA, 38 bp, Artificial Sequence
  primer
gtaaaacgacggccagtctcttgcaacacgcacagaac

SEQ ID NO: 16120 - DNA, 38 bp, Artificial Sequence
  primer
gtaaaacgacggccagtagacttagagagctggcaggg

SEQ ID NO: 16121 - DNA, 18 bp, Artificial Sequence
  primer
caggccagcaagctgaag

SEQ ID NO: 16122 - DNA, 20 bp, Artificial Sequence
  primer
gtggtggccaagttcaagag

SEQ ID NO: 16123 - DNA, 36 bp, Artificial Sequence
  primer
gtaaaacgacggccagtacttgcgacgaagactcgg

SEQ ID NO: 16124 - DNA, 21 bp, Artificial Sequence
  primer
ccttctctaagcgcatcaagc

SEQ ID NO: 16125 - DNA, 22 bp, Artificial Sequence
  primer
gcgacacttgtgagtactgtgg

SEQ ID NO: 16126 - DNA, 38 bp, Artificial Sequence
  primer
gtaaaacgacggccagtagggaaagagaggaagggaaa

SEQ ID NO: 16127 - DNA, 38 bp, Artificial Sequence
  primer
gtaaaacgacggccagtcgcctaaagcccatctctatc

SEQ ID NO: 16128 - DNA, 36 bp, Artificial Sequence
  primer
gtaaaacgacggccagtccagccaggaggagacaag

SEQ ID NO: 16129 - DNA, 38 bp, Artificial Sequence
  primer
gtaaaacgacggccagtgagccttccagctacatttgc

SEQ ID NO: 16130 - DNA, 37 bp, Artificial Sequence
  primer
gtaaaacgacggccagtatgaatttcctgggcgacag

SEQ ID NO: 16131 - DNA, 20 bp, Artificial Sequence
  primer
agcaagtcgtgcgagttctg

SEQ ID NO: 16132 - DNA, 38 bp, Artificial Sequence
  primer
gtaaaacgacggccagtatgaagacgcacatgcacaag

SEQ ID NO: 16133 - DNA, 38 bp, Artificial Sequence
  primer
gtaaaacgacggccagtgaggaggagctgctactggag

SEQ ID NO: 16134 - DNA, 38 bp, Artificial Sequence
  primer
gtaaaacgacggccagtatcaaggtggagaaggacctg

SEQ ID NO: 16135 - DNA, 21 bp, Artificial Sequence
  primer
aagaactgcagcaacttgacg

SEQ ID NO: 16136 - DNA, 36 bp, Artificial Sequence
  primer
gtaaaacgacggccagtctgtgtcccgattgccttc

SEQ ID NO: 16137 - DNA, 20 bp, Artificial Sequence
  primer
ctcgtccaagaatgcaaagc

SEQ ID NO: 16138 - DNA, 21 bp, Artificial Sequence
  primer
gaacagggtacgataaccggg

SEQ ID NO: 16139 - DNA, 20 bp, Artificial Sequence
  primer
tggaggagctcttcagggac

SEQ ID NO: 16140 - DNA, 21 bp, Artificial Sequence
  primer
aggatgcctctttctctgtgg

SEQ ID NO: 16141 - DNA, 38 bp, Artificial Sequence
  primer
gtaaaacgacggccagtcacattgcctcaaacagcttc

SEQ ID NO: 16142 - DNA, 21 bp, Artificial Sequence
  primer
aggctggctcaggactatctg

SEQ ID NO: 16143 - DNA, 43 bp, Artificial Sequence
  primer
gtaaaacgacggccagtcagacgtaggtcacactgtatttctg

SEQ ID NO: 16144 - DNA, 21 bp, Artificial Sequence
  primer
ttggacaatggactggttgag

SEQ ID NO: 16145 - DNA, 21 bp, Artificial Sequence
  primer
agagtgggcacagatggctac

SEQ ID NO: 16146 - DNA, 21 bp, Artificial Sequence
  primer
cactggtgctttcgatttgac

SEQ ID NO: 16147 - DNA, 38 bp, Artificial Sequence
  primer
gtaaaacgacggccagtttggacaatggactggttgag

SEQ ID NO: 16148 - DNA, 21 bp, Artificial Sequence
  primer
gaagggactgaatcggagatg

SEQ ID NO: 16149 - DNA, 38 bp, Artificial Sequence
  primer
gtaaaacgacggccagtttcccatcaaaggctcttctc

SEQ ID NO: 16150 - DNA, 20 bp, Artificial Sequence
  primer
caggttacggcagattcacc

SEQ ID NO: 16151 - DNA, 21 bp, Artificial Sequence
  primer
ggctcctcattactggatgtg

SEQ ID NO: 16152 - DNA, 38 bp, Artificial Sequence
  primer
gtaaaacgacggccagtatgtgtgtgtgcaccagttcc

SEQ ID NO: 16153 - DNA, 21 bp, Artificial Sequence
  primer
aaatggcaaagcaaccttctg

SEQ ID NO: 16154 - DNA, 38 bp, Artificial Sequence
  primer
gtaaaacgacggccagtagagtgtgtgagatgggcttg

SEQ ID NO: 16155 - DNA, 38 bp, Artificial Sequence
  primer
gtaaaacgacggccagtcttaaatatgggctcccaccc

SEQ ID NO: 16156 - DNA, 22 bp, Artificial Sequence
  primer
cgcaagctgttgacattgttac

SEQ ID NO: 16157 - DNA, 38 bp, Artificial Sequence
  primer
gtaaaacgacggccagtcctccctacagacagagccac

SEQ ID NO: 16158 - DNA, 38 bp, Artificial Sequence
  primer
gtaaaacgacggccagtcactgtgctgctttaggatgg

SEQ ID NO: 16159 - DNA, 20 bp, Artificial Sequence
  primer
cacagctggaactcagggag

SEQ ID NO: 16160 - DNA, 20 bp, Artificial Sequence
  primer
ccatagaggctgtgccattt

SEQ ID NO: 16161 - DNA, 38 bp, Artificial Sequence
  primer
gtaaaacgacggccagtggtccaagagcagctgaaatc

SEQ ID NO: 16162 - DNA, 21 bp, Artificial Sequence
  primer
ctccgggtagctctcaaactc

SEQ ID NO: 16163 - DNA, 21 bp, Artificial Sequence
  primer
cagacccacactctccaaagg

SEQ ID NO: 16164 - DNA, 21 bp, Artificial Sequence
  primer
tgctcctggtctcagtctgtc

SEQ ID NO: 16165 - DNA, 20 bp, Artificial Sequence
  primer
aattgcgagactccgtttcc

SEQ ID NO: 16166 - DNA, 38 bp, Artificial Sequence; identical to SEQ ID NO: 16161
  primer

SEQ ID NO: 16167 - DNA, 39 bp, Artificial Sequence
  primer
gtaaaacgacggccagtcatctagaacgatcctgaaccg

SEQ ID NO: 16168 - DNA, 20 bp, Artificial Sequence
  primer
atctcacagggctgatgtgg

SEQ ID NO: 16169 - DNA, 39 bp, Artificial Sequence
  primer
gtaaaacgacggccagtgcgacaagagcaagactctacc

SEQ ID NO: 16170 - DNA, 19 bp, Artificial Sequence
  primer
cccagtgacagtgcgagac

SEQ ID NO: 16171 - DNA, 38 bp, Artificial Sequence
  primer
gtaaaacgacggccagtgacggagtttccctcttgttg

SEQ ID NO: 16172 - DNA, 22 bp, Artificial Sequence
  primer
aggcatgcatcacagcttatag

SEQ ID NO: 16173 - DNA, 38 bp, Artificial Sequence
  primer
gtaaaacgacggccagtacatacatgcacacacatgcc

SEQ ID NO: 16174 - DNA, 39 bp, Artificial Sequence
  primer
gtaaaacgacggccagtgcattggcctacaaatacatgc

SEQ ID NO: 16175 - DNA, 21 bp, Artificial Sequence
  primer
cgcttgtccttcgtttctagg

SEQ ID NO: 16176 - DNA, 38 bp, Artificial Sequence
  primer
gtaaaacgacggccagttccaactgtgaccacttcctg

SEQ ID NO: 16177 - DNA, 21 bp, Artificial Sequence
  primer
gctcccttgcttccacatatc

SEQ ID NO: 16178 - DNA, 38 bp, Artificial Sequence
  primer
gtaaaacgacggccagttgcccattataagtgctcagg

SEQ ID NO: 16179 - DNA, 38 bp, Artificial Sequence
  primer
gtaaaacgacggccagttttccacaggatggtttgatg

SEQ ID NO: 16180 - DNA, 21 bp, Artificial Sequence
  primer
gatccagcctgttagctctgg

SEQ ID NO: 16181 - DNA, 38 bp, Artificial Sequence
  primer
gtaaaacgacggccagtggcacagtgtggactttgttg

SEQ ID NO: 16182 - DNA, 38 bp, Artificial Sequence
  primer
gtaaaacgacggccagttttccttctattctggcctgg

SEQ ID NO: 16183 - DNA, 21 bp, Artificial Sequence
  primer
ctacagcttgggcaacaagag

SEQ ID NO: 16184 - DNA, 38 bp, Artificial Sequence
  primer
gtaaaacgacggccagttttccatcaggcaaaccaatc

SEQ ID NO: 16185 - DNA, 20 bp, Artificial Sequence
  primer
gcaagtaagtgcccaatgtg

SEQ ID NO: 16186 - DNA, 38 bp, Artificial Sequence
  primer
gtaaaacgacggccagtcatgccagtctttcatccttg

SEQ ID NO: 16187 - DNA, 20 bp, Artificial Sequence
  primer
aagagctttggccagagagg

SEQ ID NO: 16188 - DNA, 37 bp, Artificial Sequence
  primer
gtaaaacgacggccagtaagtcccttcagttcagccg

SEQ ID NO: 16189 - DNA, 19 bp, Artificial Sequence
  primer
aaagggcaggtgacaccac

SEQ ID NO: 16190 - DNA, 40 bp, Artificial Sequence
  primer
gtaaaacgacggccagtgggagaagtgtttgaatactggg

SEQ ID NO: 16191 - DNA, 21 bp, Artificial Sequence
  primer
ctgcaggatgaggaataaggg

SEQ ID NO: 16192 - DNA, 37 bp, Artificial Sequence
  primer
gtaaaacgacggccagtccgcaattatgacggtaagc

SEQ ID NO: 16193 - DNA, 37 bp, Artificial Sequence
  primer
gtaaaacgacggccagtagacccaagagagaggctgg

SEQ ID NO: 16194 - DNA, 21 bp, Artificial Sequence
  primer
tcgctcctaccttcctgtgac

SEQ ID NO: 16195 - DNA, 21 bp, Artificial Sequence
  primer
tggatccagtgagctaggagg

SEQ ID NO: 16196 - DNA, 37 bp, Artificial Sequence
  primer
gtaaaacgacggccagtccagatgcctctttcctcag

SEQ ID NO: 16197 - DNA, 21 bp, Artificial Sequence
  primer
tgctctgatacctgtggcaag

SEQ ID NO: 16198 - DNA, 39 bp, Artificial Sequence
  primer
gtaaaacgacggccagtccgtagaagttctggaggtagg

SEQ ID NO: 16199 - DNA, 38 bp, Artificial Sequence
  primer
gtaaaacgacggccagtcagagccacgtcacctatgtc

SEQ ID NO: 16200 - DNA, 21 bp, Artificial Sequence
  primer
attccatgtacagccacctcc

SEQ ID NO: 16201 - DNA, 21 bp, Artificial Sequence
  primer
gccagtccctggtgagtacag

SEQ ID NO: 16202 - DNA, 38 bp, Artificial Sequence
  primer
gtaaaacgacggccagtaagaagagagaccctcctcgg

SEQ ID NO: 16203 - DNA, 23 bp, Artificial Sequence
  primer
aagcctgcaactggaagaaatac

SEQ ID NO: 16204 - DNA, 38 bp, Artificial Sequence
  primer
gtaaaacgacggccagtctacacacagggaggagaggg

SEQ ID NO: 16205 - DNA, 37 bp, Artificial Sequence
  primer
gtaaaacgacggccagtacagaggagagcggccttag

SEQ ID NO: 16206 - DNA, 38 bp, Artificial Sequence
  primer
gtaaaacgacggccagtcttagaaatccaggagccacg

SEQ ID NO: 16207 - DNA, 37 bp, Artificial Sequence
  primer
gtaaaacgacggccagtggagaaaggcccactcactg

SEQ ID NO: 16208 - DNA, 38 bp, Artificial Sequence
  primer
gtaaaacgacggccagtttcctctctgggtctttgagc

SEQ ID NO: 16209 - DNA, 38 bp, Artificial Sequence
  primer
gtaaaacgacggccagtagaggagggaaggcgtcttag

SEQ ID NO: 16210 - DNA, 21 bp, Artificial Sequence
  primer
agtctttcagaagcaggaggc

SEQ ID NO: 16211 - DNA, 37 bp, Artificial Sequence
  primer
gtaaaacgacggccagtgggcaaaggcagagtttagg

SEQ ID NO: 16212 - DNA, 21 bp, Artificial Sequence
  primer
tatgaacctctgggcatctcc

SEQ ID NO: 16213 - DNA, 21 bp, Artificial Sequence
  primer
caacaatattggctcaccctg

SEQ ID NO: 16214 - DNA, 38 bp, Artificial Sequence
  primer
gtaaaacgacggccagtagcctgctactgtgtggtttg

SEQ ID NO: 16215 - DNA, 21 bp, Artificial Sequence
  primer
tcatcgtacagtgcacacagg

SEQ ID NO: 16216 - DNA, 37 bp, Artificial Sequence
  primer
gtaaaacgacggccagtaagtggcttccaaggcaaac

SEQ ID NO: 16217 - DNA, 38 bp, Artificial Sequence
  primer
gtaaaacgacggccagtatcttccgctggatagttccc

SEQ ID NO: 16218 - DNA, 38 bp, Artificial Sequence
  primer
gtaaaacgacggccagttctgtgtgatctggagcttgc

SEQ ID NO: 16219 - DNA, 21 bp, Artificial Sequence
  primer
ctctctgattccacagtgggc

SEQ ID NO: 16220 - DNA, 38 bp, Artificial Sequence
  primer
gtaaaacgacggccagtatgctgagccctctgacctac

SEQ ID NO: 16221 - DNA, 38 bp, Artificial Sequence
  primer
gtaaaacgacggccagttagccttcaaagaccactggc

SEQ ID NO: 16222 - DNA, 38 bp, Artificial Sequence
  primer
gtaaaacgacggccagtctgctggtctgaaccacaaag

SEQ ID NO: 16223 - DNA, 39 bp, Artificial Sequence
  primer
gtaaaacgacggccagtccagattgaaggaatgatctgc

SEQ ID NO: 16224 - DNA, 21 bp, Artificial Sequence
  primer
cttgggtccttggattctcac

SEQ ID NO: 16225 - DNA, 38 bp, Artificial Sequence
  primer
gtaaaacgacggccagtccttggctgcctaaagtgatg

SEQ ID NO: 16226 - DNA, 38 bp, Artificial Sequence
  primer
gtaaaacgacggccagtttccagatatctccagcccag

SEQ ID NO: 16227 - DNA, 38 bp, Artificial Sequence
  primer
gtaaaacgacggccagtcattataattcgggtgggtgg

SEQ ID NO: 16228 - DNA, 35 bp, Artificial Sequence
  primer
gtaaaacgacggccagtgttggggacgagagaggg

SEQ ID NO: 16229 - DNA, 21 bp, Artificial Sequence
  primer
ctgttgctatcctcctgtgcc

SEQ ID NO: 16230 - DNA, 38 bp, Artificial Sequence
  primer
gtaaaacgacggccagtgggaaccatcattagcagctc

SEQ ID NO: 16231 - DNA, 38 bp, Artificial Sequence
  primer
gtaaaacgacggccagttaggtagggatcctgaaacgc

SEQ ID NO: 16232 - DNA, 37 bp, Artificial Sequence
  primer
gtaaaacgacggccagtagccaggttcctgctctctc

SEQ ID NO: 16233 - DNA, 38 bp, Artificial Sequence
  primer
gtaaaacgacggccagtatcaggttcgttcctccacac

SEQ ID NO: 16234 - DNA, 36 bp, Artificial Sequence
  primer
gtaaaacgacggccagtaaggcatacaggcagcgag

SEQ ID NO: 16235 - DNA, 39 bp, Artificial Sequence
  primer
gtaaaacgacggccagtcccaatagaaactgcctctctc

SEQ ID NO: 16236 - DNA, 21 bp, Artificial Sequence
  primer
tctcaaggtgggtttgtgttg

SEQ ID NO: 16237 - DNA, 23 bp, Artificial Sequence
  primer
ttcttcttcaacatttctggtgg

SEQ ID NO: 16238 - DNA, 39 bp, Artificial Sequence
  primer
gtaaaacgacggccagtaatcttcagcaagggaaagagg

SEQ ID NO: 16239 - DNA, 38 bp, Artificial Sequence
  primer
gtaaaacgacggccagtatccgaaacctctcccacaac

SEQ ID NO: 16240 - DNA, 38 bp, Artificial Sequence
  primer
gtaaaacgacggccagttgtaggaagtcctgccagctc

SEQ ID NO: 16241 - DNA, 21 bp, Artificial Sequence
  primer
aagcctaggtaagggacctgg

SEQ ID NO: 16242 - DNA, 21 bp, Artificial Sequence
  primer
acaagtggttgtccagcagtg

SEQ ID NO: 16243 - DNA, 20 bp, Artificial Sequence
  primer
aacatgccacattctctgcc

SEQ ID NO: 16244 - DNA, 37 bp, Artificial Sequence
  primer
gtaaaacgacggccagtagcagctggcagagaaacag

SEQ ID NO: 16245 - DNA, 21 bp, Artificial Sequence
  primer
ctggtcgggaacttgagtttg

SEQ ID NO: 16246 - DNA, 38 bp, Artificial Sequence
  primer
gtaaaacgacggccagtcagaccattccttcccatgtc

SEQ ID NO: 16247 - DNA, 21 bp, Artificial Sequence
  primer
caccaagtccagtcaccaatg

SEQ ID NO: 16248 - DNA, 21 bp, Artificial Sequence
  primer
taatcatagggcccaataccc

SEQ ID NO: 16249 - DNA, 21 bp, Artificial Sequence
  primer
aaggcgaaactcatttgtgtg

SEQ ID NO: 16250 - DNA, 21 bp, Artificial Sequence
  primer
acccaacatacctcctcatgg

SEQ ID NO: 16251 - DNA, 38 bp, Artificial Sequence
  primer
gtaaaacgacggccagtccaccggaatacctgagtttg

SEQ ID NO: 16252 - DNA, 21 bp, Artificial Sequence
  primer
actagcattacctggcatggg

SEQ ID NO: 16253 - DNA, 37 bp, Artificial Sequence
  primer
gtaaaacgacggccagtctgttgggtcctcccttctc

SEQ ID NO: 16254 - DNA, 22 bp, Artificial Sequence
  primer
ggtaattaagttgcaggcatgg

SEQ ID NO: 16255 - DNA, 21 bp, Artificial Sequence
  primer
gagaatggatctgggagggac

SEQ ID NO: 16256 - DNA, 38 bp, Artificial Sequence
  primer
gtaaaacgacggccagttaaggctgtgagcatcagtgg

SEQ ID NO: 16257 - DNA, 38 bp, Artificial Sequence
  primer
gtaaaacgacggccagtctctctctctctgcccagcac

SEQ ID NO: 16258 - DNA, 20 bp, Artificial Sequence
  primer
cctaccaccagcagaacgtg

SEQ ID NO: 16259 - DNA, 21 bp, Artificial Sequence
  primer
ctgaggacagcagtcaggacc

SEQ ID NO: 16260 - DNA, 37 bp, Artificial Sequence
  primer
gtaaaacgacggccagtagacgctgcgagacattgag

SEQ ID NO: 16261 - DNA, 38 bp, Artificial Sequence
  primer
gtaaaacgacggccagtgagactgagcccttcctcaag

SEQ ID NO: 16262 - DNA, 38 bp, Artificial Sequence
  primer
gtaaaacgacggccagtaaagaggaacagattgggctg

SEQ ID NO: 16263 - DNA, 38 bp, Artificial Sequence
  primer
gtaaaacgacggccagtgtttcccaggcaaccagatac

SEQ ID NO: 16264 - DNA, 19 bp, Artificial Sequence
  primer
aacaccatgccctacccag

SEQ ID NO: 16265 - DNA, 38 bp, Artificial Sequence
  primer
gtaaaacgacggccagtagatggatcctgccatgtttc

SEQ ID NO: 16266 - DNA, 39 bp, Artificial Sequence
  primer
gtaaaacgacggccagtcatgaacatgaacctgaacgtg

SEQ ID NO: 16267 - DNA, 38 bp, Artificial Sequence
  primer
gtaaaacgacggccagtatgccttcacagtttcccaac

SEQ ID NO: 16268 - DNA, 21 bp, Artificial Sequence
  primer
attaatcagatgggctcaccg

SEQ ID NO: 16269 - DNA, 38 bp, Artificial Sequence
  primer
gtaaaacgacggccagtcccatatccacagccaaactc

SEQ ID NO: 16270 - DNA, 21 bp, Artificial Sequence
  primer
agtggtctttccaacacctgg

SEQ ID NO: 16271 - DNA, 37 bp, Artificial Sequence
  primer
gtaaaacgacggccagtagatgcacctgaactcagcc

SEQ ID NO: 16272 - DNA, 18 bp, Artificial Sequence
  primer
cacctgatgggcaaagcc

SEQ ID NO: 16273 - DNA, 38 bp, Artificial Sequence
  primer
gtaaaacgacggccagtagcagcaccctccagtacttc

SEQ ID NO: 16274 - DNA, 19 bp, Artificial Sequence
  primer
acagatgtccttgctgggc

SEQ ID NO: 16275 - DNA, 24 bp, Artificial Sequence
  primer
ggatggtgaataatagcctttgag

SEQ ID NO: 16276 - DNA, 43 bp, Artificial Sequence
  primer
gtaaaacgacggccagtcagagtatttagaatgggtagcatgg

SEQ ID NO: 16277 - DNA, 41 bp, Artificial Sequence
  primer
gtaaaacgacggccagtgaggaggtagatatcatcgaggtg

SEQ ID NO: 16278 - DNA, 21 bp, Artificial Sequence
  primer
tagacgaggtcgttcacgttc

SEQ ID NO: 16279 - DNA, 21 bp, Artificial Sequence
  primer
ataagtcatcagccacatccg

SEQ ID NO: 16280 - DNA, 21 bp, Artificial Sequence
  primer
tgaaaggtctgggtctggttc

SEQ ID NO: 16281 - DNA, 36 bp, Artificial Sequence
  primer
gtaaaacgacggccagtctcttgctggtcctgaggg

SEQ ID NO: 16282 - DNA, 38 bp, Artificial Sequence
  primer
gtaaaacgacggccagtaaggatcagagaaagggaggg

SEQ ID NO: 16283 - DNA, 38 bp, Artificial Sequence
  primer
gtaaaacgacggccagtagtcagtcctcgcagatcagg

SEQ ID NO: 16284 - DNA, 21 bp, Artificial Sequence
  primer
tgtgggcagtcagtattccag

SEQ ID NO: 16285 - DNA, 38 bp, Artificial Sequence
  primer
gtaaaacgacggccagtacatgcccttctgtcacaaac

SEQ ID NO: 16286 - DNA, 41 bp, Artificial Sequence
  primer
gtaaaacgacggccagtggtgtgctaaattagttgattggg

SEQ ID NO: 16287 - DNA, 21 bp, Artificial Sequence
  primer
ccagtcccactgcactttgta

SEQ ID NO: 16288 - DNA, 42 bp, Artificial Sequence
  primer
gtaaaacgacggccagtacatattgaaggagaatggaaacag

SEQ ID NO: 16289 - DNA, 24 bp, Artificial Sequence
  primer
tcaatggccatgagatttagatag

SEQ ID NO: 16290 - DNA, 42 bp, Artificial Sequence
  primer
gtaaaacgacggccagtctgtgatttatgattggagaaatga

SEQ ID NO: 16291 - DNA, 22 bp, Artificial Sequence
  primer
tgatataggtttggtgggtgaa

SEQ ID NO: 16292 - DNA, 38 bp, Artificial Sequence
  primer
gtaaaacgacggccagtggagaccaaggctcaaagaag

SEQ ID NO: 16293 - DNA, 38 bp, Artificial Sequence
  primer
gtaaaacgacggccagttcaggctggactatgaggagg

SEQ ID NO: 16294 - DNA, 38 bp, Artificial Sequence
  primer
gtaaaacgacggccagtgtaaggctgaccctcagggag

SEQ ID NO: 16295 - DNA, 36 bp, Artificial Sequence
  primer
gtaaaacgacggccagtgggaagggctcttggaatc

SEQ ID NO: 16296 - DNA, 37 bp, Artificial Sequence
  primer
gtaaaacgacggccagtctcacctccttccatttccc

SEQ ID NO: 16297 - DNA, 37 bp, Artificial Sequence
  primer
gtaaaacgacggccagtaggagcaggagagcaggaag

SEQ ID NO: 16298 - DNA, 21 bp, Artificial Sequence
  primer
tccatgaccatttcttccagc

SEQ ID NO: 16299 - DNA, 40 bp, Artificial Sequence
  primer
gtaaaacgacggccagtgccctgtgtactaaaggagcttg

SEQ ID NO: 16300 - DNA, 37 bp, Artificial Sequence
  primer
gtaaaacgacggccagtctgacctcgtgatccacctg

SEQ ID NO: 16301 - DNA, 24 bp, Artificial Sequence
  primer
ttcataggacttcaacctttctcc

SEQ ID NO: 16302 - DNA, 20 bp, Artificial Sequence
  primer
gtgatggtggtgtggtcttg

SEQ ID NO: 16303 - DNA, 39 bp, Artificial Sequence
  primer
gtaaaacgacggccagtgggacatagtcctgagcctagc

SEQ ID NO: 16304 - DNA, 21 bp, Artificial Sequence
  primer
taacaacaggaaacgagctgc

SEQ ID NO: 16305 - DNA, 38 bp, Artificial Sequence
  primer
gtaaaacgacggccagtatctgacaggaagggtggatg

SEQ ID NO: 16306 - DNA, 38 bp, Artificial Sequence
  primer
gtaaaacgacggccagtatgggcttcatctcctctgtg

SEQ ID NO: 16307 - DNA, 22 bp, Artificial Sequence
  primer
gacatgctgagaaattcatccc

SEQ ID NO: 16308 - DNA, 42 bp, Artificial Sequence
  primer
gtaaaacgacggccagttcacagtattggtccaactcttagc

SEQ ID NO: 16309 - DNA, 38 bp, Artificial Sequence
  primer
gtaaaacgacggccagtccaacagcttgatggcttagt

SEQ ID NO: 16310 - DNA, 36 bp, Artificial Sequence
  primer
gtaaaacgacggccagttcctgatttgggaacggag

SEQ ID NO: 16311 - DNA, 38 bp, Artificial Sequence
  primer
gtaaaacgacggccagtgagggacaaagtggcaatagg

SEQ ID NO: 16312 - DNA, 27 bp, Artificial Sequence
  primer
ttggttaatacagaaagttgtatggaa

SEQ ID NO: 16313 - DNA, 20 bp, Artificial Sequence
  primer
agcccaaacttcagcatcac

SEQ ID NO: 16314 - DNA, 37 bp, Artificial Sequence
  primer
gtaaaacgacggccagtaatgggccaatttcaggttc

SEQ ID NO: 16315 - DNA, 38 bp, Artificial Sequence
  primer
gtaaaacgacggccagtgcaggagatgggaattgaaac

SEQ ID NO: 16316 - DNA, 38 bp, Artificial Sequence
  primer
gtaaaacgacggccagtgcctctacagaaaccactggc

SEQ ID NO: 16317 - DNA, 39 bp, Artificial Sequence
  primer
gtaaaacgacggccagtggaagctcaggatgactacagg

SEQ ID NO: 16318 - DNA, 39 bp, Artificial Sequence
  primer
gtaaaacgacggccagtccttcctgcctaggactctctc

SEQ ID NO: 16319 - DNA, 39 bp, Artificial Sequence
  primer
gtaaaacgacggccagtgctcatctgaaatcttcccttg

SEQ ID NO: 16320 - DNA, 38 bp, Artificial Sequence
  primer
gtaaaacgacggccagtactgctgtatgcatttcaggg

SEQ ID NO: 16321 - DNA, 38 bp, Artificial Sequence
  primer
gtaaaacgacggccagttccagagatgggtgagacttg

SEQ ID NO: 16322 - DNA, 35 bp, Artificial Sequence
  primer
gtaaaacgacggccagttctaccggcagcaccaag

SEQ ID NO: 16323 - DNA, 21 bp, Artificial Sequence
  primer
cctaaaccctctcccgatctc

SEQ ID NO: 16324 - DNA, 38 bp, Artificial Sequence
  primer
gtaaaacgacggccagttacaatgggtagaagagggcg

SEQ ID NO: 16325 - DNA, 39 bp, Artificial Sequence
  primer
gtaaaacgacggccagttcctttggtgaattggtaatgg

SEQ ID NO: 16326 - DNA, 37 bp, Artificial Sequence
  primer
gtaaaacgacggccagtcaggttggatgctgagaagg

SEQ ID NO: 16327 - DNA, 21 bp, Artificial Sequence
  primer
cagaggctggagagagtcagg

SEQ ID NO: 16328 - DNA, 38 bp, Artificial Sequence
  primer
gtaaaacgacggccagtgggcagaagcctgtgttgtag

SEQ ID NO: 16329 - DNA, 21 bp, Artificial Sequence
  primer
gggatcggttagcaatgtctg

SEQ ID NO: 16330 - DNA, 24 bp, Artificial Sequence
  primer
aacgctttgtgatacaggttacag

SEQ ID NO: 16331 - DNA, 21 bp, Artificial Sequence
  primer
ggctcccagaccactgtagac

SEQ ID NO: 16332 - DNA, 38 bp, Artificial Sequence
  primer
gtaaaacgacggccagtttcaatatgggccattgacag

SEQ ID NO: 16333 - DNA, 38 bp, Artificial Sequence
  primer
gtaaaacgacggccagtgttaaggctgatggcatgttg

SEQ ID NO: 16334 - DNA, 21 bp, Artificial Sequence
  primer
cggaaagaaatccagagatgc

SEQ ID NO: 16335 - DNA, 21 bp, Artificial Sequence
  primer
ctcagcagtcctacagcttgg

SEQ ID NO: 16336 - DNA, 38 bp, Artificial Sequence
  primer
gtaaaacgacggccagtatccagaacagtaagcagccc

SEQ ID NO: 16337 - DNA, 21 bp, Artificial Sequence
  primer
ctatgccaggatctccacctc

SEQ ID NO: 16338 - DNA, 38 bp, Artificial Sequence
  primer
gtaaaacgacggccagtgaagtggcttagtgctctccg

SEQ ID NO: 16339 - DNA, 38 bp, Artificial Sequence
  primer
gtaaaacgacggccagtctgtagaaaccacaccatccg

SEQ ID NO: 16340 - DNA, 38 bp, Artificial Sequence
  primer
gtaaaacgacggccagtatggcaaaggacctgtctacc

SEQ ID NO: 16341 - DNA, 38 bp, Artificial Sequence
  primer
gtaaaacgacggccagtttggaaactagcagcaccaag

SEQ ID NO: 16342 - DNA, 21 bp, Artificial Sequence
  primer
gatttcatcgccctgagagag

SEQ ID NO: 16343 - DNA, 20 bp, Artificial Sequence
  primer
catgtctgtgggattcatgc

SEQ ID NO: 16344 - DNA, 22 bp, Artificial Sequence
  primer
acatctcataagctgtggttgg

SEQ ID NO: 16345 - DNA, 40 bp, Artificial Sequence
  primer
gtaaaacgacggccagttgtcaatagcagattaccttggg

SEQ ID NO: 16346 - DNA, 37 bp, Artificial Sequence
  primer
gtaaaacgacggccagtactggcctgagagggaaatg

SEQ ID NO: 16347 - DNA, 38 bp, Artificial Sequence
  primer
gtaaaacgacggccagtggctacaactgtgtaacgccc

SEQ ID NO: 16348 - DNA, 38 bp, Artificial Sequence
  primer
gtaaaacgacggccagtataaagtgcctctctccacgc

SEQ ID NO: 16349 - DNA, 21 bp, Artificial Sequence
  primer
gaggttctcaggttctcaggc

SEQ ID NO: 16350 - DNA, 21 bp, Artificial Sequence
  primer
taggaggctcagtacccaagg

SEQ ID NO: 16351 - DNA, 21 bp, Artificial Sequence
  primer
gaaatgaccttccagcctgtc

SEQ ID NO: 16352 - DNA, 21 bp, Artificial Sequence
  primer
tctggtatgggtgagggaaag

SEQ ID NO: 16353 - DNA, 38 bp, Artificial Sequence
  primer
gtaaaacgacggccagtggtccacttgggttggtagtt

SEQ ID NO: 16354 - DNA, 38 bp, Artificial Sequence; identical to SEQ ID NO: 16333
  primer

SEQ ID NO: 16355 - DNA, 38 bp, Artificial Sequence
  primer
gtaaaacgacggccagtcggaaagaaatccagagatgc

SEQ ID NO: 16356 - DNA, 38 bp, Artificial Sequence
  primer
gtaaaacgacggccagtctcagcagtcctacagcttgg

SEQ ID NO: 16357 - DNA, 38 bp, Artificial Sequence; identical to SEQ ID NO: 16336
  primer

SEQ ID NO: 16358 - DNA, 21 bp, Artificial Sequence
  primer
ctatgccaggatctccacctc

SEQ ID NO: 16359 - DNA, 38 bp, Artificial Sequence; identical to SEQ ID NO: 16338
  primer

SEQ ID NO: 16360 - DNA, 21 bp, Artificial Sequence
  primer
ctgtagaaaccacaccatccg

SEQ ID NO: 16361 - DNA, 38 bp, Artificial Sequence; identical to SEQ ID NO: 16340
  primer

SEQ ID NO: 16362 - DNA, 38 bp, Artificial Sequence; identical to SEQ ID NO: 16341
  primer

SEQ ID NO: 16363 - DNA, 21 bp, Artificial Sequence
  primer
gatttcatcgccctgagagag

SEQ ID NO: 16364 - DNA, 38 bp, Artificial Sequence
  primer
gtaaaacgacggccagtaggctggctgctttaacattc

SEQ ID NO: 16365 - DNA, 38 bp, Artificial Sequence
  primer
gtaaaacgacggccagttccgctttgtaaccaagaacc

SEQ ID NO: 16366 - DNA, 21 bp, Artificial Sequence
  primer
gaagaccagcagttgcctctc

SEQ ID NO: 16367 - DNA, 21 bp, Artificial Sequence
  primer
gactgctcctggactccactc

SEQ ID NO: 16368 - DNA, 18 bp, Artificial Sequence
  primer
tagcacctgtcccggctc

SEQ ID NO: 16369 - DNA, 38 bp, Artificial Sequence
  primer
gtaaaacgacggccagtgctttcagtcccagtttcagc

SEQ ID NO: 16370 - DNA, 37 bp, Artificial Sequence
  primer
gtaaaacgacggccagtagtgtgctttcctgcagctc

SEQ ID NO: 16371 - DNA, 21 bp, Artificial Sequence
  primer
tttcctccactcttacgctcc

SEQ ID NO: 16372 - DNA, 38 bp, Artificial Sequence
  primer
gtaaaacgacggccagtctcctcttaagtcaccgccac

SEQ ID NO: 16373 - DNA, 18 bp, Artificial Sequence
  primer
caacccagtgcctgcatc

SEQ ID NO: 16374 - DNA, 21 bp, Artificial Sequence
  primer
gaaacgatatactccagcccg

SEQ ID NO: 16375 - DNA, 21 bp, Artificial Sequence
  primer
gtgccaaaccaaggaactctc

SEQ ID NO: 16376 - DNA, 38 bp, Artificial Sequence
  primer
gtaaaacgacggccagttcaatcctgtcctcttgaccc

SEQ ID NO: 16377 - DNA, 21 bp, Artificial Sequence
  primer
gcaggagacacgaagcctaag

SEQ ID NO: 16378 - DNA, 21 bp, Artificial Sequence
  primer
atgcctctaggtcagaaacgg

SEQ ID NO: 16379 - DNA, 38 bp, Artificial Sequence
  primer
gtaaaacgacggccagtaccacctggaaacactcattg

SEQ ID NO: 16380 - DNA, 21 bp, Artificial Sequence
  primer
ctcctagtccagggcattcac

SEQ ID NO: 16381 - DNA, 38 bp, Artificial Sequence
  primer
gtaaaacgacggccagttcatcttagaggaaggcgttg

SEQ ID NO: 16382 - DNA, 19 bp, Artificial Sequence
  primer
cctgctataaagggcaggc

SEQ ID NO: 16383 - DNA, 21 bp, Artificial Sequence
  primer
gctacaggtggttcccttgtc

SEQ ID NO: 16384 - DNA, 38 bp, Artificial Sequence
  primer
gtaaaacgacggccagtctcttgtggtccttccttccc

SEQ ID NO: 16385 - DNA, 38 bp, Artificial Sequence
  primer
gtaaaacgacggccagtcctgtggccttgtcatttacc

SEQ ID NO: 16386 - DNA, 37 bp, Artificial Sequence
  primer
gtaaaacgacggccagtgctttgcagagtgttctggg

SEQ ID NO: 16387 - DNA, 35 bp, Artificial Sequence
  primer
gtaaaacgacggccagtacctgccaccagggagtg

SEQ ID NO: 16388 - DNA, 20 bp, Artificial Sequence
  primer
cttccgcatgatctacctgc

SEQ ID NO: 16389 - DNA, 19 bp, Artificial Sequence
  primer
gagggttctccgggtaagg

SEQ ID NO: 16390 - DNA, 38 bp, Artificial Sequence
  primer
gtaaaacgacggccagttggtgaaggtcaacgacaaag

SEQ ID NO: 16391 - DNA, 20 bp, Artificial Sequence
  primer
ccctggagtaccagccctac

SEQ ID NO: 16392 - DNA, 21 bp, Artificial Sequence
  primer
tgaccagtcagttgtgaaggg

SEQ ID NO: 16393 - DNA, 21 bp, Artificial Sequence
  primer
tgtggcttagtatgtgcggag

SEQ ID NO: 16394 - DNA, 21 bp, Artificial Sequence
  primer
gtctgctgtccctggagtttc

SEQ ID NO: 16395 - DNA, 38 bp, Artificial Sequence
  primer
gtaaaacgacggccagtagggaaagctgaaattgttgc

SEQ ID NO: 16396 - DNA, 20 bp, Artificial Sequence
  primer
tgttgggtgctctagccttg

SEQ ID NO: 16397 - DNA, 21 bp, Artificial Sequence
  primer
actgtggtgacactgagggag

SEQ ID NO: 16398 - DNA, 21 bp, Artificial Sequence
  primer
cagggagagaatgtctctggg

SEQ ID NO: 16399 - DNA, 38 bp, Artificial Sequence
  primer
gtaaaacgacggccagtaaaccatgtatggccgagaac

SEQ ID NO: 16400 - DNA, 38 bp, Artificial Sequence
  primer
gtaaaacgacggccagtagagatgggattcttgccctc

SEQ ID NO: 16401 - DNA, 21 bp, Artificial Sequence
  primer
tagttcgggtgagagatggtg

SEQ ID NO: 16402 - DNA, 38 bp, Artificial Sequence
  primer
gtaaaacgacggccagtgaccagcactgcacttgagag

SEQ ID NO: 16403 - DNA, 21 bp, Artificial Sequence
  primer
tgacactggcttaccttgtgc

SEQ ID NO: 16404 - DNA, 21 bp, Artificial Sequence
  primer
ttcacgccagaccacaattag

SEQ ID NO: 16405 - DNA, 38 bp, Artificial Sequence
  primer
gtaaaacgacggccagtgtcccaggactaagggaggag

SEQ ID NO: 16406 - DNA, 38 bp, Artificial Sequence
  primer
gtaaaacgacggccagttctacctctgttggcctctgg

SEQ ID NO: 16407 - DNA, 37 bp, Artificial Sequence
  primer
gtaaaacgacggccagtgctccacctcatgctgagac

SEQ ID NO: 16408 - DNA, 21 bp, Artificial Sequence
  primer
atggagcaggtctcctgtgtt

SEQ ID NO: 16409 - DNA, 38 bp, Artificial Sequence
  primer
gtaaaacgacggccagtatggcagggacagtgctttag

SEQ ID NO: 16410 - DNA, 38 bp, Artificial Sequence
  primer
gtaaaacgacggccagtgactgaggatgatgacgagcc

SEQ ID NO: 16411 - DNA, 21 bp, Artificial Sequence
  primer
ccttcctgagaactccagcac

SEQ ID NO: 16412 - DNA, 37 bp, Artificial Sequence
  primer
gtaaaacgacggccagtagatggacttggaggcttgg

SEQ ID NO: 16413 - DNA, 37 bp, Artificial Sequence
  primer
gtaaaacgacggccagtgtcccatctccactgttccc

SEQ ID NO: 16414 - DNA, 20 bp, Artificial Sequence
  primer
gagctagggagggctgtgag

SEQ ID NO: 16415 - DNA, 37 bp, Artificial Sequence
  primer
gtaaaacgacggccagtggcacagctccacctaattg

SEQ ID NO: 16416 - DNA, 38 bp, Artificial Sequence
  primer
gtaaaacgacggccagttccgtaccaaggttatcaggc

SEQ ID NO: 16417 - DNA, 20 bp, Artificial Sequence
  primer
ggtgaggagagtagctgggc

SEQ ID NO: 16418 - DNA, 38 bp, Artificial Sequence
  primer
gtaaaacgacggccagtgtgggtaactgtggaacaggg

SEQ ID NO: 16419 - DNA, 37 bp, Artificial Sequence
  primer
gtaaaacgacggccagtcttgggaggaacaggaggtc

SEQ ID NO: 16420 - DNA, 38 bp, Artificial Sequence
  primer
gtaaaacgacggccagtatgcagcccagtttgactttc

SEQ ID NO: 16421 - DNA, 21 bp, Artificial Sequence
  primer
ctttctatcagccagcaaccc

SEQ ID NO: 16422 - DNA, 38 bp, Artificial Sequence
  primer
gtaaaacgacggccagttaccatggtgcttctccagac

SEQ ID NO: 16423 - DNA, 21 bp, Artificial Sequence
  primer
gacaggagtcctcagggtctg

SEQ ID NO: 16424 - DNA, 39 bp, Artificial Sequence
  primer
gtaaaacgacggccagttcacaggaaagaagcagagagg

SEQ ID NO: 16425 - DNA, 37 bp, Artificial Sequence
  primer
gtaaaacgacggccagtagttgcgtgttgcccattac

SEQ ID NO: 16426 - DNA, 21 bp, Artificial Sequence
  primer
gtactgcatcaccaagttcgg

SEQ ID NO: 16427 - DNA, 38 bp, Artificial Sequence
  primer
gtaaaacgacggccagttctgttacaagcgctcgactc

SEQ ID NO: 16428 - DNA, 38 bp, Artificial Sequence
  primer
gtaaaacgacggccagtatctccatctgtttcttcggc

SEQ ID NO: 16429 - DNA, 21 bp, Artificial Sequence
  primer
aaggccaatttgttcatcagc

SEQ ID NO: 16430 - DNA, 20 bp, Artificial Sequence
  primer
cgcaaggatagcaagaccac

SEQ ID NO: 16431 - DNA, 22 bp, Artificial Sequence
  primer
ttaccacttctttgccttcctg

SEQ ID NO: 16432 - DNA, 21 bp, Artificial Sequence
  primer
gcacttcacaaacgtccattg

SEQ ID NO: 16433 - DNA, 38 bp, Artificial Sequence
  primer
gtaaaacgacggccagtagtgctgttggtggatactgg

SEQ ID NO: 16434 - DNA, 20 bp, Artificial Sequence
  primer
ctcttaacgggacctttgcc

SEQ ID NO: 16435 - DNA, 38 bp, Artificial Sequence
  primer
gtaaaacgacggccagttcaccatctccaacaacttcg

SEQ ID NO: 16436 - DNA, 38 bp, Artificial Sequence
  primer
gtaaaacgacggccagtgtcatcagctacccatccctc

SEQ ID NO: 16437 - DNA, 21 bp, Artificial Sequence
  primer
ctggttgtgctgctgctattc

SEQ ID NO: 16438 - DNA, 38 bp, Artificial Sequence
  primer
gtaaaacgacggccagttcttctgtagtcgccaaggtg

SEQ ID NO: 16439 - DNA, 38 bp, Artificial Sequence
  primer
gtaaaacgacggccagtggtggaaagaaagccctaacc

SEQ ID NO: 16440 - DNA, 21 bp, Artificial Sequence
  primer
aagaggcttgacatcattggc

SEQ ID NO: 16441 - DNA, 21 bp, Artificial Sequence
  primer
ttagtgagtgggtaacggcag

SEQ ID NO: 16442 - DNA, 38 bp, Artificial Sequence
  primer
gtaaaacgacggccagtggaaacactgcatgtctctgg

SEQ ID NO: 16443 - DNA, 38 bp, Artificial Sequence
  primer
gtaaaacgacggccagtgaaagaagcaaacatccgagg

SEQ ID NO: 16444 - DNA, 21 bp, Artificial Sequence
  primer
ttagtgagtgggtaacggcag

SEQ ID NO: 16445 - DNA, 38 bp, Artificial Sequence
  primer
gtaaaacgacggccagtgggagggcgtagttcctaatc

SEQ ID NO: 16446 - DNA, 40 bp, Artificial Sequence
  primer
gtaaaacgacggccagtcgcaacagtggactgtatatttg

SEQ ID NO: 16447 - DNA, 40 bp, Artificial Sequence
  primer
gtaaaacgacggccagtactgtcattaacgaaatgctgtg

SEQ ID NO: 16448 - DNA, 42 bp, Artificial Sequence
  primer
gtaaaacgacggccagtgggaaagttggaaatagctagaagg

SEQ ID NO: 16449 - DNA, 38 bp, Artificial Sequence
  primer
gtaaaacgacggccagtatgattgccatgctaaacctc

SEQ ID NO: 16450 - DNA, 20 bp, Artificial Sequence
  primer
ataggtgtgagccaccatgc

SEQ ID NO: 16451 - DNA, 21 bp, Artificial Sequence
  primer
taaatccagcttccattgctg

SEQ ID NO: 16452 - DNA, 23 bp, Artificial Sequence
  primer
aagaccaacctattctgttgctg

SEQ ID NO: 16453 - DNA, 24 bp, Artificial Sequence
  primer
gacatctttgagtctctttcccac

SEQ ID NO: 16454 - DNA, 23 bp, Artificial Sequence
  primer
tgcaaatagggacttgaatgttg

SEQ ID NO: 16455 - DNA, 18 bp, Artificial Sequence
  primer
ggctgctgctttctctgg

SEQ ID NO: 16456 - DNA, 44 bp, Artificial Sequence
  primer
gtaaaacgacggccagtagctcttaaaggagttcttcctaattc

SEQ ID NO: 16457 - DNA, 36 bp, Artificial Sequence
  primer
gtaaaacgacggccagtggactacaggcacacgctg

SEQ ID NO: 16458 - DNA, 21 bp, Artificial Sequence
  primer
ttattcatgccagggagaagg

SEQ ID NO: 16459 - DNA, 40 bp, Artificial Sequence
  primer
gtaaaacgacggccagttttctaacagatgaaaccaaggc

SEQ ID NO: 16460 - DNA, 38 bp, Artificial Sequence
  primer
gtaaaacgacggccagtcatcatctcttcagcaggcag

SEQ ID NO: 16461 - DNA, 21 bp, Artificial Sequence
  primer
acacctcaccaaaggagatgg

SEQ ID NO: 16462 - DNA, 38 bp, Artificial Sequence
  primer
gtaaaacgacggccagtgtctaagggagaagacgccag

SEQ ID NO: 16463 - DNA, 21 bp, Artificial Sequence
  primer
gacagatttgaacgcaactgg

SEQ ID NO: 16464 - DNA, 21 bp, Artificial Sequence
  primer
cagaggtgattgatgccattg

SEQ ID NO: 16465 - DNA, 38 bp, Artificial Sequence
  primer
gtaaaacgacggccagttggaagagagggttcctcaag

SEQ ID NO: 16466 - DNA, 22 bp, Artificial Sequence
  primer
tggaggcagatttgaaagaaac

SEQ ID NO: 16467 - DNA, 21 bp, Artificial Sequence
  primer
aaagggtttcctgaattccaa

SEQ ID NO: 16468 - DNA, 39 bp, Artificial Sequence
  primer
gtaaaacgacggccagtttaccgccagtctctaaggttg

SEQ ID NO: 16469 - DNA, 22 bp, Artificial Sequence
  primer
tggaattgctgggaatttagaa

SEQ ID NO: 16470 - DNA, 26 bp, Artificial Sequence
  primer
tgtttataatcagaaagcaatttccc

SEQ ID NO: 16471 - DNA, 39 bp, Artificial Sequence
  primer
gtaaaacgacggccagtcgtttgagcctaggactttgag

SEQ ID NO: 16472 - DNA, 43 bp, Artificial Sequence
  primer
gtaaaacgacggccagtagtcctttgaacatagaattgatttg

SEQ ID NO: 16473 - DNA, 40 bp, Artificial Sequence
  primer
gtaaaacgacggccagtaggtttaggccaaactaccaaac

SEQ ID NO: 16474 - DNA, 21 bp, Artificial Sequence
  primer
tccacaaccgttaaacgaaac

SEQ ID NO: 16475 - DNA, 21 bp, Artificial Sequence
  primer
caaatgtcaccagaggtcgtg

SEQ ID NO: 16476 - DNA, 22 bp, Artificial Sequence
  primer
aaatgaaatgccaggcactaag

SEQ ID NO: 16477 - DNA, 39 bp, Artificial Sequence
  primer
gtaaaacgacggccagttgtagtgcatgctgagaaacag

SEQ ID NO: 16478 - DNA, 22 bp, Artificial Sequence
  primer
tggctcagaggatattggaatc

SEQ ID NO: 16479 - DNA, 21 bp, Artificial Sequence
  primer
attgctgccacacaaatgaag

SEQ ID NO: 16480 - DNA, 21 bp, Artificial Sequence
  primer
gtgtggcacctaacaggtcat

SEQ ID NO: 16481 - DNA, 23 bp, Artificial Sequence
  primer
gccatgtgtataagcctgatttg

SEQ ID NO: 16482 - DNA, 20 bp, Artificial Sequence
  primer
ctgggcgacagagtgagact

SEQ ID NO: 16483 - DNA, 38 bp, Artificial Sequence
  primer
gtaaaacgacggccagtccctttaccatcgtcaccaag

SEQ ID NO: 16484 - DNA, 37 bp, Artificial Sequence
  primer
gtaaaacgacggccagtaattggaggtgagggtggtg

SEQ ID NO: 16485 - DNA, 38 bp, Artificial Sequence
  primer
gtaaaacgacggccagtagttctgaggctgtttgggag

SEQ ID NO: 16486 - DNA, 21 bp, Artificial Sequence
  primer
ctcagctggtgcttgagagtc

SEQ ID NO: 16487 - DNA, 37 bp, Artificial Sequence
  primer
gtaaaacgacggccagtcgaagactgaaggcaagtcg

SEQ ID NO: 16488 - DNA, 38 bp, Artificial Sequence
  primer
gtaaaacgacggccagtccttacccaagagccgtactc

SEQ ID NO: 16489 - DNA, 21 bp, Artificial Sequence
  primer
acatttctgttccttccaggc

SEQ ID NO: 16490 - DNA, 21 bp, Artificial Sequence
  primer
ggagcattcaaggataccacc

SEQ ID NO: 16491 - DNA, 40 bp, Artificial Sequence
  primer
gtaaaacgacggccagttgaagagtgaaatcattgggttg

SEQ ID NO: 16492 - DNA, 24 bp, Artificial Sequence
  primer
tgagagattgataggattgggaac

SEQ ID NO: 16493 - DNA, 38 bp, Artificial Sequence
  primer
gtaaaacgacggccagtaatggtcccatgatcaagtcc

SEQ ID NO: 16494 - DNA, 36 bp, Artificial Sequence
  primer
gtaaaacgacggccagtgagtggaaggacctgctcg

SEQ ID NO: 16495 - DNA, 38 bp, Artificial Sequence
  primer
gtaaaacgacggccagtttcctcttggttccctcctaa

SEQ ID NO: 16496 - DNA, 21 bp, Artificial Sequence
  primer
cagagccaaaccaaatcacac

SEQ ID NO: 16497 - DNA, 39 bp, Artificial Sequence
  primer
gtaaaacgacggccagttttccagaagagggagttgttg

SEQ ID NO: 16498 - DNA, 21 bp, Artificial Sequence
  primer
aagaagttggtgtttcgctgg

SEQ ID NO: 16499 - DNA, 39 bp, Artificial Sequence
  primer
gtaaaacgacggccagtgagacatatgtggtttgcaagg

SEQ ID NO: 16500 - DNA, 23 bp, Artificial Sequence
  primer
gaaatgtccataattgggaggag

SEQ ID NO: 16501 - DNA, 38 bp, Artificial Sequence
  primer
gtaaaacgacggccagtccaaggttatcaacaggctcc

SEQ ID NO: 16502 - DNA, 35 bp, Artificial Sequence
  primer
gtaaaacgacggccagtgactgcgccacgtctgag

SEQ ID NO: 16503 - DNA, 21 bp, Artificial Sequence
  primer
acctgctggaaccttggttag

SEQ ID NO: 16504 - DNA, 21 bp, Artificial Sequence
  primer
tggcagggtttatctggtctg

SEQ ID NO: 16505 - DNA, 35 bp, Artificial Sequence
  primer
gtaaaacgacggccagtgacaaaggaccatgcggg

SEQ ID NO: 16506 - DNA, 19 bp, Artificial Sequence
  primer
agagacaccacagcctgcc

SEQ ID NO: 16507 - DNA, 21 bp, Artificial Sequence
  primer
ggctgtgtggatacatgttgg

SEQ ID NO: 16508 - DNA, 20 bp, Artificial Sequence
  primer
gtcgggacctagacatgctg

SEQ ID NO: 16509 - DNA, 21 bp, Artificial Sequence
  primer
acgtgtttgaggactggtgtg

SEQ ID NO: 16510 - DNA, 20 bp, Artificial Sequence
  primer
caccaccgtgaagaagttgg

SEQ ID NO: 16511 - DNA, 20 bp, Artificial Sequence
  primer
agcctcttgggaatgaggac

SEQ ID NO: 16512 - DNA, 38 bp, Artificial Sequence
  primer
gtaaaacgacggccagtccttatcctgtgcacacttgc

SEQ ID NO: 16513 - DNA, 38 bp, Artificial Sequence
  primer
gtaaaacgacggccagtccagggtagaccctttcttcc

SEQ ID NO: 16514 - DNA, 38 bp, Artificial Sequence
  primer
gtaaaacgacggccagtctgaagttcgaggtcatcagc

SEQ ID NO: 16515 - DNA, 37 bp, Artificial Sequence
  primer
gtaaaacgacggccagtcagccttgaagatggaccac

SEQ ID NO: 16516 - DNA, 20 bp, Artificial Sequence
  primer
acttcccgatcgccagatac

SEQ ID NO: 16517 - DNA, 21 bp, Artificial Sequence
  primer
aacaagtgcttctaccgcgag

SEQ ID NO: 16518 - DNA, 21 bp, Artificial Sequence
  primer
aacaagtgcttctaccgcgag

SEQ ID NO: 16519 - DNA, 37 bp, Artificial Sequence
  primer
gtaaaacgacggccagtgagcttctaacccgcgtttc

SEQ ID NO: 16520 - DNA, 38 bp, Artificial Sequence
  primer
gtaaaacgacggccagtcccaaaggtgtacgtgaccag

SEQ ID NO: 16521 - DNA, 21 bp, Artificial Sequence
  primer
ctcaaacttgtcctccgaagc

SEQ ID NO: 16522 - DNA, 37 bp, Artificial Sequence
  primer
gtaaaacgacggccagtagtcggctgagtttctgtgg

SEQ ID NO: 16523 - DNA, 21 bp, Artificial Sequence
  primer
ggatgaagttcttcggagctg

SEQ ID NO: 16524 - DNA, 21 bp, Artificial Sequence
  primer
atttcgagagcgaggatatgg

SEQ ID NO: 16525 - DNA, 38 bp, Artificial Sequence
  primer
gtaaaacgacggccagtaccagtacctgagacgaaccg

SEQ ID NO: 16526 - DNA, 37 bp, Artificial Sequence
  primer
gtaaaacgacggccagtgtcatgacccagtaccaccg

SEQ ID NO: 16527 - DNA, 21 bp, Artificial Sequence
  primer
aaatgagtagccgtgcctctg

SEQ ID NO: 16528 - DNA, 37 bp, Artificial Sequence
  primer
gtaaaacgacggccagtgtagtcgggcctctgtcctc

SEQ ID NO: 16529 - DNA, 21 bp, Artificial Sequence
  primer
caagcagacaagcaaagcaag

SEQ ID NO: 16530 - DNA, 21 bp, Artificial Sequence
  primer
gagggtaaccttcccttcctg

SEQ ID NO: 16531 - DNA, 21 bp, Artificial Sequence
  primer
ctccgagaccaggagggatac

SEQ ID NO: 16532 - DNA, 38 bp, Artificial Sequence
  primer
gtaaaacgacggccagttccggacactgtaactcttgc

SEQ ID NO: 16533 - DNA, 38 bp, Artificial Sequence
  primer
gtaaaacgacggccagtccctgctctttcctcactttg

SEQ ID NO: 16534 - DNA, 38 bp, Artificial Sequence
  primer
gtaaaacgacggccagtaaggagtcgatgctgaggatg

SEQ ID NO: 16535 - DNA, 37 bp, Artificial Sequence
  primer
gtaaaacgacggccagtccagcaaagtcgctgaaatc

SEQ ID NO: 16536 - DNA, 38 bp, Artificial Sequence
  primer
gtaaaacgacggccagtcagttgcagattggtctctgg

SEQ ID NO: 16537 - DNA, 39 bp, Artificial Sequence
  primer
gtaaaacgacggccagtccatgtgtatccctgcctttag

SEQ ID NO: 16538 - DNA, 38 bp, Artificial Sequence
  primer
gtaaaacgacggccagtcaagggaggattatctgggtg

SEQ ID NO: 16539 - DNA, 38 bp, Artificial Sequence
  primer
gtaaaacgacggccagtacacgaggaaacaaatacccg

SEQ ID NO: 16540 - DNA, 21 bp, Artificial Sequence
  primer
gaggtcaaggtgaaatgggag

SEQ ID NO: 16541 - DNA, 38 bp, Artificial Sequence
  primer
gtaaaacgacggccagttgaagttaggaatgacacggg

SEQ ID NO: 16542 - DNA, 36 bp, Artificial Sequence
  primer
gtaaaacgacggccagtgaggaaaggctgggaaagg

SEQ ID NO: 16543 - DNA, 38 bp, Artificial Sequence
  primer
gtaaaacgacggccagtatgagagggaggtgcaatagg

SEQ ID NO: 16544 - DNA, 21 bp, Artificial Sequence
  primer
ctaaggaggcactctaggccc

SEQ ID NO: 16545 - DNA, 21 bp, Artificial Sequence
  primer
tggaggagtgagtccctatgc

SEQ ID NO: 16546 - DNA, 38 bp, Artificial Sequence
  primer
gtaaaacgacggccagttgtgtcaagaacgaggctgag

SEQ ID NO: 16547 - DNA, 21 bp, Artificial Sequence
  primer
gccagagagcaagactgtgtc

SEQ ID NO: 16548 - DNA, 23 bp, Artificial Sequence
  primer
tttcttgtcagttctcctagggt

SEQ ID NO: 16549 - DNA, 37 bp, Artificial Sequence
  primer
gtaaaacgacggccagtctgtgagctcagcctcttcc

SEQ ID NO: 16550 - DNA, 38 bp, Artificial Sequence
  primer
gtaaaacgacggccagttgtctcaccatacctcaagcc

SEQ ID NO: 16551 - DNA, 37 bp, Artificial Sequence
  primer
gtaaaacgacggccagtaagcgagagatgggaaggag

SEQ ID NO: 16552 - DNA, 21 bp, Artificial Sequence
  primer
gtgcctagcctgatcatcaca

SEQ ID NO: 16553 - DNA, 38 bp, Artificial Sequence
  primer
gtaaaacgacggccagtaagacaaggacattcagcacg

SEQ ID NO: 16554 - DNA, 19 bp, Artificial Sequence
  primer
caactgctgatcggctctg

SEQ ID NO: 16555 - DNA, 20 bp, Artificial Sequence
  primer
agctacgtcttccagacccg

SEQ ID NO: 16556 - DNA, 38 bp, Artificial Sequence
  primer
gtaaaacgacggccagttggtaccactttctgattggg

SEQ ID NO: 16557 - DNA, 38 bp, Artificial Sequence
  primer
gtaaaacgacggccagtagtaagctcccaggtggtctg

SEQ ID NO: 16558 - DNA, 21 bp, Artificial Sequence
  primer
ctgtcctgtctgtgatgaggg

SEQ ID NO: 16559 - DNA, 21 bp, Artificial Sequence
  primer
gacacggatattccgtccata

SEQ ID NO: 16560 - DNA, 38 bp, Artificial Sequence
  primer
gtaaaacgacggccagtacattcaccgagtccaggttc

SEQ ID NO: 16561 - DNA, 42 bp, Artificial Sequence
  primer
gtaaaacgacggccagtgatatctaattcgtgagcaatttgg

SEQ ID NO: 16562 - DNA, 21 bp, Artificial Sequence
  primer
cctttcttccattgcttctgc

SEQ ID NO: 16563 - DNA, 20 bp, Artificial Sequence
  primer
ggagggcagataagcaaagg

SEQ ID NO: 16564 - DNA, 21 bp, Artificial Sequence
  primer
ctttagagaatgggcaggtgg

SEQ ID NO: 16565 - DNA, 21 bp, Artificial Sequence
  primer
agtgcccatttctctttcagc

SEQ ID NO: 16566 - DNA, 21 bp, Artificial Sequence
  primer
gagaggcgagtggtagtggac

SEQ ID NO: 16567 - DNA, 21 bp, Artificial Sequence
  primer
gcctaacacaagtcatggtgg

SEQ ID NO: 16568 - DNA, 39 bp, Artificial Sequence
  primer
gtaaaacgacggccagtgcactaacagtgccctcaaatc

SEQ ID NO: 16569 - DNA, 21 bp, Artificial Sequence
  primer
gtctggcagttgtggaatgag

SEQ ID NO: 16570 - DNA, 38 bp, Artificial Sequence
  primer
gtaaaacgacggccagtgtggtgattagaaaggctggg

SEQ ID NO: 16571 - DNA, 38 bp, Artificial Sequence
  primer
gtaaaacgacggccagtatagtccaggctaccaccagc

SEQ ID NO: 16572 - DNA, 21 bp, Artificial Sequence
  primer
gccaagacaacctcatgatcc

SEQ ID NO: 16573 - DNA, 38 bp, Artificial Sequence
  primer
gtaaaacgacggccagtagaggaaatgagcctctttgg

SEQ ID NO: 16574 - DNA, 38 bp, Artificial Sequence
  primer
gtaaaacgacggccagtcatttgcaggagacagaggtg

SEQ ID NO: 16575 - DNA, 36 bp, Artificial Sequence
  primer
gtaaaacgacggccagtcattgtcagcaccagacgg

SEQ ID NO: 16576 - DNA, 38 bp, Artificial Sequence
  primer
gtaaaacgacggccagtcagtgagggctgttgagtgac

SEQ ID NO: 16577 - DNA, 19 bp, Artificial Sequence
  primer
gaggtgctcaggtgccttg

SEQ ID NO: 16578 - DNA, 21 bp, Artificial Sequence
  primer
gaaactatgggtgaagggtgg

SEQ ID NO: 16579 - DNA, 38 bp, Artificial Sequence
  primer
gtaaaacgacggccagtgtgtacacggtatgggcagtg

SEQ ID NO: 16580 - DNA, 35 bp, Artificial Sequence
  primer
gtaaaacgacggccagtcagagcctgcagaatcgc

SEQ ID NO: 16581 - DNA, 21 bp, Artificial Sequence
  primer
aggaaacagtatgtgccaccc

SEQ ID NO: 16582 - DNA, 21 bp, Artificial Sequence
  primer
tggaacagacaactggaatgg

SEQ ID NO: 16583 - DNA, 36 bp, Artificial Sequence
  primer
gtaaaacgacggccagtaagaccgagcagttgggac

SEQ ID NO: 16584 - DNA, 38 bp, Artificial Sequence
  primer
gtaaaacgacggccagtcaggtgtgagttgctttggag

SEQ ID NO: 16585 - DNA, 38 bp, Artificial Sequence
  primer
gtaaaacgacggccagttcacatgattcacacccttgc

SEQ ID NO: 16586 - DNA, 21 bp, Artificial Sequence
  primer
gagcgatcactgtcttggagg

SEQ ID NO: 16587 - DNA, 37 bp, Artificial Sequence
  primer
gtaaaacgacggccagtaaatagccctggcagattcc

SEQ ID NO: 16588 - DNA, 37 bp, Artificial Sequence
  primer
gtaaaacgacggccagtgaggagggaagagcaagctg

SEQ ID NO: 16589 - DNA, 38 bp, Artificial Sequence
  primer
gtaaaacgacggccagtctggtccctcagtctcattcc

SEQ ID NO: 16590 - DNA, 21 bp, Artificial Sequence
  primer
cgctacctgtatcaatggctg

SEQ ID NO: 16591 - DNA, 18 bp, Artificial Sequence
  primer
accacacacgcggaacac

SEQ ID NO: 16592 - DNA, 38 bp, Artificial Sequence
  primer
gtaaaacgacggccagtccctaggtctcgagttcatgc

SEQ ID NO: 16593 - DNA, 20 bp, Artificial Sequence
  primer
aggaaactgaggcttggagc

SEQ ID NO: 16594 - DNA, 21 bp, Artificial Sequence
  primer
cagaactgctttcaggagacg

SEQ ID NO: 16595 - DNA, 38 bp, Artificial Sequence
  primer
gtaaaacgacggccagtcccgatctactcagggaaagg

SEQ ID NO: 16596 - DNA, 37 bp, Artificial Sequence
  primer
gtaaaacgacggccagtgatgccagagtccctcagtg

SEQ ID NO: 16597 - DNA, 21 bp, Artificial Sequence
  primer
ccttgaagtagggtgcagagg

SEQ ID NO: 16598 - DNA, 38 bp, Artificial Sequence
  primer
gtaaaacgacggccagtcatgaccagtggatggaagag

SEQ ID NO: 16599 - DNA, 23 bp, Artificial Sequence
  primer
ggattaattcaactctcagcacc

SEQ ID NO: 16600 - DNA, 38 bp, Artificial Sequence
  primer
gtaaaacgacggccagtgcctccatgtgactacctttg

SEQ ID NO: 16601 - DNA, 21 bp, Artificial Sequence
  primer
gaacttgcctgcaaacctttc

SEQ ID NO: 16602 - DNA, 40 bp, Artificial Sequence
  primer
gtaaaacgacggccagtaagaggctagagttgctggagag

SEQ ID NO: 16603 - DNA, 37 bp, Artificial Sequence
  primer
gtaaaacgacggccagtataggacgaggtctggctgg

SEQ ID NO: 16604 - DNA, 37 bp, Artificial Sequence; identical to SEQ ID NO: 10929
  primer

SEQ ID NO: 16605 - DNA, 38 bp, Artificial Sequence
  primer
gtaaaacgacggccagtggtggatcaggagagatggac

SEQ ID NO: 16606 - DNA, 38 bp, Artificial Sequence
  primer
gtaaaacgacggccagtggagggtagttggtgaggagg

SEQ ID NO: 16607 - DNA, 38 bp, Artificial Sequence
  primer
gtaaaacgacggccagtcacctaggctgaagatccagg

SEQ ID NO: 16608 - DNA, 19 bp, Artificial Sequence
  primer
aggctggtctcaaactggg

SEQ ID NO: 16609 - DNA, 38 bp, Artificial Sequence
  primer
gtaaaacgacggccagtggttcaagacccacttcttgg

SEQ ID NO: 16610 - DNA, 21 bp, Artificial Sequence
  primer
tcaccacagctgaaggatcac

SEQ ID NO: 16611 - DNA, 21 bp, Artificial Sequence
  primer
catctcaaagccgaagattcc

SEQ ID NO: 16612 - DNA, 38 bp, Artificial Sequence
  primer
gtaaaacgacggccagtatgttatgcgccactctcaac

SEQ ID NO: 16613 - DNA, 38 bp, Artificial Sequence
  primer
gtaaaacgacggccagtcgatggttctgggtgctactc

SEQ ID NO: 16614 - DNA, 21 bp, Artificial Sequence
  primer
aaatgcctccaaagacaggtg

SEQ ID NO: 16615 - DNA, 38 bp, Artificial Sequence
  primer
gtaaaacgacggccagtgggaggtgcttcagtatctgg

SEQ ID NO: 16616 - DNA, 21 bp, Artificial Sequence
  primer
aagcaagagtccgaagaaccc

SEQ ID NO: 16617 - DNA, 21 bp, Artificial Sequence
  primer
actgcactgaagagggagagc

SEQ ID NO: 16618 - DNA, 38 bp, Artificial Sequence
  primer
gtaaaacgacggccagtagaaagtggtatggagctggc

SEQ ID NO: 16619 - DNA, 21 bp, Artificial Sequence
  primer
gcattgcagaacagtccagag

SEQ ID NO: 16620 - DNA, 21 bp, Artificial Sequence
  primer
gtttcccgcaaactggagtag

SEQ ID NO: 16621 - DNA, 38 bp, Artificial Sequence
  primer
gtaaaacgacggccagttgggtatgtttccttcttgcc

SEQ ID NO: 16622 - DNA, 19 bp, Artificial Sequence
  primer
tccctctgagcaaaggcac

SEQ ID NO: 16623 - DNA, 21 bp, Artificial Sequence
  primer
gagaagtatctgtacccggcg

SEQ ID NO: 16624 - DNA, 35 bp, Artificial Sequence
  primer
gtaaaacgacggccagtagagccgggagcctcatc

SEQ ID NO: 16625 - DNA, 19 bp, Artificial Sequence
  primer
ccgagctcaagtcgctgtc

SEQ ID NO: 16626 - DNA, 18 bp, Artificial Sequence
  primer
gaggacgacgccttcgag

SEQ ID NO: 16627 - DNA, 20 bp, Artificial Sequence
  primer
gcatgcacgacctaaacgac

SEQ ID NO: 16628 - DNA, 20 bp, Artificial Sequence
  primer
aggacgacctcttcctgcac

SEQ ID NO: 16629 - DNA, 38 bp, Artificial Sequence
  primer
gtaaaacgacggccagtcttcctgcacaagagcctgag

SEQ ID NO: 16630 - DNA, 37 bp, Artificial Sequence
  primer
gtaaaacgacggccagtgctgctagtaggttcagccg

SEQ ID NO: 16631 - DNA, 20 bp, Artificial Sequence
  primer
tagcagcagcggtagcagtg

SEQ ID NO: 16632 - DNA, 20 bp, Artificial Sequence
  primer
taacatcaatgcccgagagc

SEQ ID NO: 16633 - DNA, 21 bp, Artificial Sequence
  primer
gctttggattgttggaagacc

SEQ ID NO: 16634 - DNA, 21 bp, Artificial Sequence
  primer
aacaaggttgttgctgagacg

SEQ ID NO: 16635 - DNA, 21 bp, Artificial Sequence
  primer
tggtactgatgcctggttctg

SEQ ID NO: 16636 - DNA, 38 bp, Artificial Sequence
  primer
gtaaaacgacggccagtaggatttagatcccaggcacc

SEQ ID NO: 16637 - DNA, 21 bp, Artificial Sequence
  primer
gtcaaatcaggatcagggagg

SEQ ID NO: 16638 - DNA, 44 bp, Artificial Sequence
  primer
gtaaaacgacggccagtgactgtaattactctgaatcctccttc

SEQ ID NO: 16639 - DNA, 21 bp, Artificial Sequence
  primer
tttgctgtcctcaggaaattg

SEQ ID NO: 16640 - DNA, 38 bp, Artificial Sequence
  primer
gtaaaacgacggccagtcaactgcgggtataaagaggc

SEQ ID NO: 16641 - DNA, 21 bp, Artificial Sequence
  primer
ccacccacagcacatacaaag

SEQ ID NO: 16642 - DNA, 21 bp, Artificial Sequence
  primer
caagcaaccagaaattcaagc

SEQ ID NO: 16643 - DNA, 38 bp, Artificial Sequence
  primer
gtaaaacgacggccagtatggcaaactgttcaacttgg

SEQ ID NO: 16644 - DNA, 18 bp, Artificial Sequence
  primer
gggaggcaaatgttgcag

SEQ ID NO: 16645 - DNA, 36 bp, Artificial Sequence
  primer
gtaaaacgacggccagtaagagaggagagctggccc

SEQ ID NO: 16646 - DNA, 21 bp, Artificial Sequence
  primer
ggctggataccacagcatgta

SEQ ID NO: 16647 - DNA, 27 bp, Artificial Sequence
  primer
tttaaatggttccatgatataaagacc

SEQ ID NO: 16648 - DNA, 19 bp, Artificial Sequence
  primer
gggacggagcatgactagg

SEQ ID NO: 16649 - DNA, 21 bp, Artificial Sequence
  primer
cggccaagaaatatggtatgc

SEQ ID NO: 16650 - DNA, 39 bp, Artificial Sequence
  primer
gtaaaacgacggccagtaaagagatgggagtcagtgagc

SEQ ID NO: 16651 - DNA, 21 bp, Artificial Sequence
  primer
ttgtacccaactctgctggtc

SEQ ID NO: 16652 - DNA, 26 bp, Artificial Sequence
  primer
agtctgatagacacacattccttagc

SEQ ID NO: 16653 - DNA, 21 bp, Artificial Sequence
  primer
ctgtaaattgtgggaggtgga

SEQ ID NO: 16654 - DNA, 23 bp, Artificial Sequence
  primer
ggctataataaattgtggcccag

SEQ ID NO: 16655 - DNA, 22 bp, Artificial Sequence
  primer
tgctttagcctgattatccacc

SEQ ID NO: 16656 - DNA, 38 bp, Artificial Sequence
  primer
gtaaaacgacggccagtatcccttcccatttccttctc

SEQ ID NO: 16657 - DNA, 42 bp, Artificial Sequence
  primer
gtaaaacgacggccagtgagctgctagactgttatatttcgg

SEQ ID NO: 16658 - DNA, 23 bp, Artificial Sequence
  primer
agataccactaaattgccattcg

SEQ ID NO: 16659 - DNA, 22 bp, Artificial Sequence
  primer
gattcaggttgaatacgaaggc

SEQ ID NO: 16660 - DNA, 21 bp, Artificial Sequence
  primer
ttgaggaggagacggtactgc

SEQ ID NO: 16661 - DNA, 21 bp, Artificial Sequence
  primer
atacatgcccgactgtgaatg

SEQ ID NO: 16662 - DNA, 21 bp, Artificial Sequence
  primer
ttgaatgcaaatacagggtgg

SEQ ID NO: 16663 - DNA, 38 bp, Artificial Sequence
  primer
gtaaaacgacggccagtggcccaggatgagttagtgac

SEQ ID NO: 16664 - DNA, 21 bp, Artificial Sequence
  primer
ttggatacaagtgacatccgc

SEQ ID NO: 16665 - DNA, 38 bp, Artificial Sequence
  primer
gtaaaacgacggccagttaggcacagcatgaagcaatc

SEQ ID NO: 16666 - DNA, 42 bp, Artificial Sequence
  primer
gtaaaacgacggccagtttgctagacctttaaaccagtcttc

SEQ ID NO: 16667 - DNA, 36 bp, Artificial Sequence
  primer
gtaaaacgacggccagttgttgtcactggtgaggcg

SEQ ID NO: 16668 - DNA, 38 bp, Artificial Sequence
  primer
gtaaaacgacggccagttcaggcagctgctttagtcac

SEQ ID NO: 16669 - DNA, 38 bp, Artificial Sequence
  primer
gtaaaacgacggccagtatcttggcatgctttagatgg

SEQ ID NO: 16670 - DNA, 19 bp, Artificial Sequence
  primer
gcatgatggaccttgtggt

SEQ ID NO: 16671 - DNA, 22 bp, Artificial Sequence
  primer
cctgtgagctgggtctctatcc

SEQ ID NO: 16672 - DNA, 38 bp, Artificial Sequence
  primer
gtaaaacgacggccagttgagttctggctgtatggctg

SEQ ID NO: 16673 - DNA, 21 bp, Artificial Sequence
  primer
cattgatgcaagagcgttgac

SEQ ID NO: 16674 - DNA, 38 bp, Artificial Sequence
  primer
gtaaaacgacggccagtatgtcactaggccatcttggg

SEQ ID NO: 16675 - DNA, 38 bp, Artificial Sequence
  primer
gtaaaacgacggccagtagatcttggcctgcaagtacc

SEQ ID NO: 16676 - DNA, 38 bp, Artificial Sequence
  primer
gtaaaacgacggccagtatgctggactactaccgcgag

SEQ ID NO: 16677 - DNA, 38 bp, Artificial Sequence
  primer
gtaaaacgacggccagtcagaatcagcaggtgggactc

SEQ ID NO: 16678 - DNA, 38 bp, Artificial Sequence
  primer
gtaaaacgacggccagttggtatagggctgtcagaggg

SEQ ID NO: 16679 - DNA, 21 bp, Artificial Sequence
  primer
aagcctggcacatagcttctc

SEQ ID NO: 16680 - DNA, 37 bp, Artificial Sequence
  primer
gtaaaacgacggccagttctgtgtgtccctttccagg

SEQ ID NO: 16681 - DNA, 38 bp, Artificial Sequence
  primer
gtaaaacgacggccagttagagcactggcaatgatgtg

SEQ ID NO: 16682 - DNA, 20 bp, Artificial Sequence
  primer
aaagaaactcaggatgcggg

SEQ ID NO: 16683 - DNA, 37 bp, Artificial Sequence
  primer
gtaaaacgacggccagtcaactggagctctttgcagg

SEQ ID NO: 16684 - DNA, 18 bp, Artificial Sequence
  primer
ctggtggagtggagcacg

SEQ ID NO: 16685 - DNA, 21 bp, Artificial Sequence
  primer
ctgtttctcattctttccgcc

SEQ ID NO: 16686 - DNA, 38 bp, Artificial Sequence
  primer
gtaaaacgacggccagtgccttggagatgtgaataccc

SEQ ID NO: 16687 - DNA, 38 bp, Artificial Sequence
  primer
gtaaaacgacggccagtgtgggagagggtatcagggac

SEQ ID NO: 16688 - DNA, 21 bp, Artificial Sequence
  primer
gtagcaggattcatgcctgtg

SEQ ID NO: 16689 - DNA, 20 bp, Artificial Sequence
  primer
cttatcctctgggccactcc

SEQ ID NO: 16690 - DNA, 21 bp, Artificial Sequence
  primer
ccacaaacagtccataccacg

SEQ ID NO: 16691 - DNA, 39 bp, Artificial Sequence
  primer
gtaaaacgacggccagtcctctcctgaactccttccttc

SEQ ID NO: 16692 - DNA, 19 bp, Artificial Sequence
  primer
gtcagttggctccgctgtc

SEQ ID NO: 16693 - DNA, 21 bp, Artificial Sequence
  primer
ctattgtcgagccctgggtag

SEQ ID NO: 16694 - DNA, 38 bp, Artificial Sequence
  primer
gtaaaacgacggccagtagagcagcctggttcattcac

SEQ ID NO: 16695 - DNA, 37 bp, Artificial Sequence
  primer
gtaaaacgacggccagtgtcaaaggtaggaggcaggc

SEQ ID NO: 16696 - DNA, 38 bp, Artificial Sequence
  primer
gtaaaacgacggccagtctctgagaagccactgagctg

SEQ ID NO: 16697 - DNA, 37 bp, Artificial Sequence
  primer
gtaaaacgacggccagtcaacaagggctcaagggttc

SEQ ID NO: 16698 - DNA, 38 bp, Artificial Sequence
  primer
gtaaaacgacggccagttccagttcagcctctgtcttg

SEQ ID NO: 16699 - DNA, 38 bp, Artificial Sequence
  primer
gtaaaacgacggccagttcgtgggtgggtatttctgag

SEQ ID NO: 16700 - DNA, 21 bp, Artificial Sequence
  primer
gaaagaggagcttgttcctgg

SEQ ID NO: 16701 - DNA, 38 bp, Artificial Sequence
  primer
gtaaaacgacggccagtaggccctgttagcatcacctc

SEQ ID NO: 16702 - DNA, 21 bp, Artificial Sequence
  primer
cagacgtcaatacatttgccc

SEQ ID NO: 16703 - DNA, 37 bp, Artificial Sequence
  primer
gtaaaacgacggccagttgtggcctgtttcctgtgtc

SEQ ID NO: 16704 - DNA, 20 bp, Artificial Sequence
  primer
tcctgttgaggaagctggag

SEQ ID NO: 16705 - DNA, 37 bp, Artificial Sequence
  primer
gtaaaacgacggccagtggtctccatactgccacctg

SEQ ID NO: 16706 - DNA, 38 bp, Artificial Sequence
  primer
gtaaaacgacggccagtgaggaggtgttctcaaggtgg

SEQ ID NO: 16707 - DNA, 21 bp, Artificial Sequence
  primer
ctctgcagttggagttcaccc

SEQ ID NO: 16708 - DNA, 21 bp, Artificial Sequence
  primer
cctgaggtgtgactaaccgtg

SEQ ID NO: 16709 - DNA, 21 bp, Artificial Sequence
  primer
tgtgtgaggtggatgagttgg

SEQ ID NO: 16710 - DNA, 38 bp, Artificial Sequence
  primer
gtaaaacgacggccagtacacttcctggcaactttgtg

SEQ ID NO: 16711 - DNA, 21 bp, Artificial Sequence
  primer
taggagagaggatgtgggagg

SEQ ID NO: 16712 - DNA, 36 bp, Artificial Sequence
  primer
gtaaaacgacggccagtctgacagtggtgggctgag

SEQ ID NO: 16713 - DNA, 20 bp, Artificial Sequence
  primer
cagggtcatatgaggccaac

SEQ ID NO: 16714 - DNA, 38 bp, Artificial Sequence
  primer
gtaaaacgacggccagttttgactttgacctctggagc

SEQ ID NO: 16715 - DNA, 23 bp, Artificial Sequence
  primer
tgaattggaaccactgatttgtc

SEQ ID NO: 16716 - DNA, 38 bp, Artificial Sequence
  primer
gtaaaacgacggccagttttgggtatttccctggtagg

SEQ ID NO: 16717 - DNA, 21 bp, Artificial Sequence
  primer
ggtgcacatgcctataattcc

SEQ ID NO: 16718 - DNA, 36 bp, Artificial Sequence
  primer
gtaaaacgacggccagttgcagaggatgaaggaggc

SEQ ID NO: 16719 - DNA, 38 bp, Artificial Sequence
  primer
gtaaaacgacggccagtttcatttaggagccttggtgg

SEQ ID NO: 16720 - DNA, 38 bp, Artificial Sequence
  primer
gtaaaacgacggccagtacagagagacagggaagaggg

SEQ ID NO: 16721 - DNA, 21 bp, Artificial Sequence
  primer
atcacccattaatctttgccc

SEQ ID NO: 16722 - DNA, 21 bp, Artificial Sequence
  primer
cagcaactgaagatctggcac

SEQ ID NO: 16723 - DNA, 38 bp, Artificial Sequence
  primer
gtaaaacgacggccagttaccactgaaagggccaagtc

SEQ ID NO: 16724 - DNA, 21 bp, Artificial Sequence
  primer
ggagctaatatggaccaaggg

SEQ ID NO: 16725 - DNA, 38 bp, Artificial Sequence
  primer
gtaaaacgacggccagtcaaagacctggtttcctgtcc

SEQ ID NO: 16726 - DNA, 21 bp, Artificial Sequence
  primer
tgcaataatcccaacaaccag

SEQ ID NO: 16727 - DNA, 38 bp, Artificial Sequence
  primer
gtaaaacgacggccagtgactggttgaatccggaagtg

SEQ ID NO: 16728 - DNA, 21 bp, Artificial Sequence
  primer
ccagatgccaatggttgtatg

SEQ ID NO: 16729 - DNA, 21 bp, Artificial Sequence
  primer
gcagggtgtggagagagtttc

SEQ ID NO: 16730 - DNA, 37 bp, Artificial Sequence
  primer
gtaaaacgacggccagtccgtggagaagatccctttc

SEQ ID NO: 16731 - DNA, 21 bp, Artificial Sequence
  primer
ctgtgggaagaggtcttcagg

SEQ ID NO: 16732 - DNA, 38 bp, Artificial Sequence
  primer
gtaaaacgacggccagtgccctttagacttcctagccc

SEQ ID NO: 16733 - DNA, 38 bp, Artificial Sequence
  primer
gtaaaacgacggccagtctccaagagcagacccatctc

SEQ ID NO: 16734 - DNA, 21 bp, Artificial Sequence
  primer
tcacctgtggtaagtccctcc

SEQ ID NO: 16735 - DNA, 38 bp, Artificial Sequence
  primer
gtaaaacgacggccagtagagaagtgtgagcctctggc

SEQ ID NO: 16736 - DNA, 21 bp, Artificial Sequence
  primer
gatgggtgtctgtcttgttgg

SEQ ID NO: 16737 - DNA, 21 bp, Artificial Sequence
  primer
acgagaggatctcccagtttg

SEQ ID NO: 16738 - DNA, 22 bp, Artificial Sequence
  primer
aatctgaagagcaggctgagag

SEQ ID NO: 16739 - DNA, 38 bp, Artificial Sequence
  primer
gtaaaacgacggccagtatggagactcaggccaatgag

SEQ ID NO: 16740 - DNA, 38 bp, Artificial Sequence
  primer
gtaaaacgacggccagtggcaacatagtgagaccctgt

SEQ ID NO: 16741 - DNA, 43 bp, Artificial Sequence
  primer
gtaaaacgacggccagtttggtaattcagagagatactcatcc

SEQ ID NO: 16742 - DNA, 20 bp, Artificial Sequence
  primer
tttcccaggtccctcgtatc

SEQ ID NO: 16743 - DNA, 21 bp, Artificial Sequence
  primer
gtcaaatgcttctgttgtggc

SEQ ID NO: 16744 - DNA, 21 bp, Artificial Sequence
  primer
tgtggtgggaagctcagtaac

SEQ ID NO: 16745 - DNA, 21 bp, Artificial Sequence
  primer
tggccatctagtgttccagtt

SEQ ID NO: 16746 - DNA, 25 bp, Artificial Sequence
  primer
gagtacaatgaaagatttgaaagcc

SEQ ID NO: 16747 - DNA, 41 bp, Artificial Sequence
  primer
gtaaaacgacggccagtaaagcaaagcaaaggtcataaatc

SEQ ID NO: 16748 - DNA, 26 bp, Artificial Sequence
  primer
ggtaatcgatgcatatagctcatctc

SEQ ID NO: 16749 - DNA, 23 bp, Artificial Sequence
  primer
tgcctaaattgtttgtagggttg

SEQ ID NO: 16750 - DNA, 37 bp, Artificial Sequence
  primer
gtaaaacgacggccagttggttaaaggaaatgctgcg

SEQ ID NO: 16751 - DNA, 22 bp, Artificial Sequence
  primer
ttccaacagaagatgtttcagg

SEQ ID NO: 16752 - DNA, 22 bp, Artificial Sequence
  primer
tccctagagaaaggctagtccc

SEQ ID NO: 16753 - DNA, 21 bp, Artificial Sequence
  primer
agtcttgctcgtgctggtttc

SEQ ID NO: 16754 - DNA, 38 bp, Artificial Sequence
  primer
gtaaaacgacggccagtcttggaagctacctctcagcc

SEQ ID NO: 16755 - DNA, 22 bp, Artificial Sequence
  primer
ttctgccttgatgagaagttcc

SEQ ID NO: 16756 - DNA, 24 bp, Artificial Sequence
  primer
tgggtaagaaactgaatctgctaa

SEQ ID NO: 16757 - DNA, 38 bp, Artificial Sequence
  primer
gtaaaacgacggccagttgtgatttgaggcaaacaacc

SEQ ID NO: 16758 - DNA, 21 bp, Artificial Sequence
  primer
tgccagtaagcaagtggtttg

SEQ ID NO: 16759 - DNA, 24 bp, Artificial Sequence
  primer
aacatcaatgccttactgattacg

SEQ ID NO: 16760 - DNA, 20 bp, Artificial Sequence
  primer
ccagcttgggtgacagactc

SEQ ID NO: 16761 - DNA, 38 bp, Artificial Sequence
  primer
gtaaaacgacggccagtcccacagaagatgtttcaggt

SEQ ID NO: 16762 - DNA, 38 bp, Artificial Sequence
  primer
gtaaaacgacggccagtgaatgtttcttagcggtcgtg

SEQ ID NO: 16763 - DNA, 23 bp, Artificial Sequence
  primer
acctgcagacatcaataaggaag

SEQ ID NO: 16764 - DNA, 22 bp, Artificial Sequence
  primer
catgcagctgtagatagatggc

SEQ ID NO: 16765 - DNA, 38 bp, Artificial Sequence
  primer
gtaaaacgacggccagttgccacgcagtctacaaattc

SEQ ID NO: 16766 - DNA, 30 bp, Artificial Sequence
  primer
tctgttacttagatgtgaatttgaatgtct

SEQ ID NO: 16767 - DNA, 38 bp, Artificial Sequence
  primer
gtaaaacgacggccagtgacagtgggatagggaattgg

SEQ ID NO: 16768 - DNA, 21 bp, Artificial Sequence
  primer
ttccttctagctccatcaggc

SEQ ID NO: 16769 - DNA, 20 bp, Artificial Sequence
  primer
agctttgctttgctggtttg

SEQ ID NO: 16770 - DNA, 38 bp, Artificial Sequence
  primer
gtaaaacgacggccagtctcatatctcccggcacttgt

SEQ ID NO: 16771 - DNA, 20 bp, Artificial Sequence
  primer
gactacaactcccggcacac

SEQ ID NO: 16772 - DNA, 37 bp, Artificial Sequence
  primer
gtaaaacgacggccagttagcgaggccactgtgactg

SEQ ID NO: 16773 - DNA, 39 bp, Artificial Sequence
  primer
gtaaaacgacggccagttgccatcaacttcagacttgac

SEQ ID NO: 16774 - DNA, 21 bp, Artificial Sequence
  primer
aatcaggatgtttgtcccagg

SEQ ID NO: 16775 - DNA, 36 bp, Artificial Sequence
  primer
gtaaaacgacggccagtgtgactggtggtggtgctg

SEQ ID NO: 16776 - DNA, 41 bp, Artificial Sequence
  primer
gtaaaacgacggccagtttccagtttaagatccaattcagg

SEQ ID NO: 16777 - DNA, 27 bp, Artificial Sequence
  primer
cactgaatacattgctttatctcattt

SEQ ID NO: 16778 - DNA, 44 bp, Artificial Sequence
  primer
gtaaaacgacggccagttgatgagtgttctttatttgataatgg

SEQ ID NO: 16779 - DNA, 39 bp, Artificial Sequence
  primer
gtaaaacgacggccagtttgttcatcagaccatttgcag

SEQ ID NO: 16780 - DNA, 40 bp, Artificial Sequence
  primer
gtaaaacgacggccagttggaggtttcagtgtattgttgg

SEQ ID NO: 16781 - DNA, 24 bp, Artificial Sequence
  primer
aaagatgatgatcctggagttctg

SEQ ID NO: 16782 - DNA, 39 bp, Artificial Sequence
  primer
gtaaaacgacggccagtgatctgcatatgggatgtttcc

SEQ ID NO: 16783 - DNA, 21 bp, Artificial Sequence
  primer
ggatgacagactgagaccctg

SEQ ID NO: 16784 - DNA, 38 bp, Artificial Sequence
  primer
gtaaaacgacggccagtacctgggattcagaggttgtg

SEQ ID NO: 16785 - DNA, 38 bp, Artificial Sequence
  primer
gtaaaacgacggccagtagtgggagattgttgcaaatg

SEQ ID NO: 16786 - DNA, 38 bp, Artificial Sequence
  primer
gtaaaacgacggccagtttctcacaggtcactggatgg

SEQ ID NO: 16787 - DNA, 38 bp, Artificial Sequence
  primer
gtaaaacgacggccagtagatgcagcagccaaccttac

SEQ ID NO: 16788 - DNA, 21 bp, Artificial Sequence
  primer
ctgacggaattcatttgttgg

SEQ ID NO: 16789 - DNA, 40 bp, Artificial Sequence
  primer
gtaaaacgacggccagttgaagtgacattcagttgtttcc

SEQ ID NO: 16790 - DNA, 38 bp, Artificial Sequence
  primer
gtaaaacgacggccagtttggcaagtgttgcaatagaa

SEQ ID NO: 16791 - DNA, 22 bp, Artificial Sequence
  primer
ttgtttaaccttctccattggg

SEQ ID NO: 16792 - DNA, 22 bp, Artificial Sequence
  primer
gccagcagattgtttctttagg

SEQ ID NO: 16793 - DNA, 39 bp, Artificial Sequence
  primer
gtaaaacgacggccagttgggaatggaaagcaacataac

SEQ ID NO: 16794 - DNA, 44 bp, Artificial Sequence
  primer
gtaaaacgacggccagttcaaacagtataatttgaaagttctgg

SEQ ID NO: 16795 - DNA, 44 bp, Artificial Sequence
  primer
gtaaaacgacggccagttcatttactgaatatgagggtacaagc

SEQ ID NO: 16796 - DNA, 21 bp, Artificial Sequence
  primer
tttccagccaggttgtgatag

SEQ ID NO: 16797 - DNA, 38 bp, Artificial Sequence
  primer
gtaaaacgacggccagttgcttaccactgttgattgcc

SEQ ID NO: 16798 - DNA, 38 bp, Artificial Sequence
  primer
gtaaaacgacggccagtaccacaccaggtttagggttg

SEQ ID NO: 16799 - DNA, 43 bp, Artificial Sequence
  primer
gtaaaacgacggccagtaattgcctataagattgtctttccag

SEQ ID NO: 16800 - DNA, 20 bp, Artificial Sequence
  primer
ccctctgcgctgttagtcag

SEQ ID NO: 16801 - DNA, 40 bp, Artificial Sequence
  primer
gtaaaacgacggccagtccatgattcaagcactgtgtaag

SEQ ID NO: 16802 - DNA, 20 bp, Artificial Sequence
  primer
gtgacggagtgagaccctgt

SEQ ID NO: 16803 - DNA, 39 bp, Artificial Sequence
  primer
gtaaaacgacggccagtaattccaacaagtccagaatgg

SEQ ID NO: 16804 - DNA, 37 bp, Artificial Sequence
  primer
gtaaaacgacggccagttgaatcaattgacaaggcca

SEQ ID NO: 16805 - DNA, 26 bp, Artificial Sequence
  primer
gatacgctttctatgtttctgacaag

SEQ ID NO: 16806 - DNA, 46 bp, Artificial Sequence
  primer
gtaaaacgacggccagttttctacatacaaggagtaaatacattgc

SEQ ID NO: 16807 - DNA, 24 bp, Artificial Sequence
  primer
tttcccagtctgaaatatggtatg

SEQ ID NO: 16808 - DNA, 27 bp, Artificial Sequence
  primer
tgaagtctttgtctttcattagatttg

SEQ ID NO: 16809 - DNA, 21 bp, Artificial Sequence
  primer
tgaaagattggagacagaggg

SEQ ID NO: 16810 - DNA, 27 bp, Artificial Sequence
  primer
ttccattagtttgatgtatgaattctg

SEQ ID NO: 16811 - DNA, 28 bp, Artificial Sequence
  primer
ctccaaataggaagtaaggtatattggt

SEQ ID NO: 16812 - DNA, 26 bp, Artificial Sequence
  primer
cagactcatacatcattgttgaaacc

SEQ ID NO: 16813 - DNA, 21 bp, Artificial Sequence
  primer
gtgggaactcatttgcctcag

SEQ ID NO: 16814 - DNA, 22 bp, Artificial Sequence
  primer
tcgtgtattatggagcgaaatg

SEQ ID NO: 16815 - DNA, 21 bp, Artificial Sequence
  primer
tttgggaaatttaaagggtgg

SEQ ID NO: 16816 - DNA, 21 bp, Artificial Sequence
  primer
gcatgttaggtggctgttctg

SEQ ID NO: 16817 - DNA, 23 bp, Artificial Sequence
  primer
tttgggaacttctctctttggtc

SEQ ID NO: 16818 - DNA, 43 bp, Artificial Sequence
  primer
gtaaaacgacggccagtctcgtgacaagaatttaaacataaga

SEQ ID NO: 16819 - DNA, 38 bp, Artificial Sequence
  primer
gtaaaacgacggccagtaagacactggttaaggagcgg

SEQ ID NO: 16820 - DNA, 40 bp, Artificial Sequence
  primer
gtaaaacgacggccagtgagagggaagtcctgcttagtca

SEQ ID NO: 16821 - DNA, 27 bp, Artificial Sequence
  primer
ttcatttcctgctatcattgttaatac

SEQ ID NO: 16822 - DNA, 22 bp, Artificial Sequence
  primer
tttgtatttggaagggaggttg

SEQ ID NO: 16823 - DNA, 36 bp, Artificial Sequence
  primer
gtaaaacgacggccagtgctttccagacaggccaag

SEQ ID NO: 16824 - DNA, 39 bp, Artificial Sequence
  primer
gtaaaacgacggccagtggcgaaatgacaagagatcaac

SEQ ID NO: 16825 - DNA, 21 bp, Artificial Sequence
  primer
ttgagattacaggcatgagcc

SEQ ID NO: 16826 - DNA, 22 bp, Artificial Sequence
  primer
ttctctgagttcagggagatgg

SEQ ID NO: 16827 - DNA, 41 bp, Artificial Sequence
  primer
gtaaaacgacggccagtttggatactagtgatgccttgaaa

SEQ ID NO: 16828 - DNA, 42 bp, Artificial Sequence
  primer
gtaaaacgacggccagtggatactaagtgcattaccagcatc

SEQ ID NO: 16829 - DNA, 39 bp, Artificial Sequence
  primer
gtaaaacgacggccagttgaatacaactgtgaaagctgc

SEQ ID NO: 16830 - DNA, 40 bp, Artificial Sequence
  primer
gtaaaacgacggccagtgctgtttatgaaacacaacatgc

SEQ ID NO: 16831 - DNA, 39 bp, Artificial Sequence
  primer
gtaaaacgacggccagtgttgttggaatttatggaagcc

SEQ ID NO: 16832 - DNA, 39 bp, Artificial Sequence
  primer
gtaaaacgacggccagttcaccatgcagagatggtattt

SEQ ID NO: 16833 - DNA, 21 bp, Artificial Sequence
  primer
aattggtccatgtctcttccc

SEQ ID NO: 16834 - DNA, 21 bp, Artificial Sequence
  primer
ctagctcagaaagcattgccc

SEQ ID NO: 16835 - DNA, 21 bp, Artificial Sequence
  primer
ccctggacacgtttcttacac

SEQ ID NO: 16836 - DNA, 38 bp, Artificial Sequence
  primer
gtaaaacgacggccagttgaccaacaaatcatggcaac

SEQ ID NO: 16837 - DNA, 38 bp, Artificial Sequence
  primer
gtaaaacgacggccagtgcctttacctcatgccatttc

SEQ ID NO: 16838 - DNA, 23 bp, Artificial Sequence
  primer
tttatttgttgtcatgaaggacg

SEQ ID NO: 16839 - DNA, 40 bp, Artificial Sequence
  primer
gtaaaacgacggccagtggtttcagaatcaaactcttgcc

SEQ ID NO: 16840 - DNA, 43 bp, Artificial Sequence
  primer
gtaaaacgacggccagtcattgtaccgtctagccataatacag

SEQ ID NO: 16841 - DNA, 43 bp, Artificial Sequence
  primer
gtaaaacgacggccagtaaagcaagcagctttattaatcctta

SEQ ID NO: 16842 - DNA, 42 bp, Artificial Sequence
  primer
gtaaaacgacggccagtctgttgtatttgtggtatttggttt

SEQ ID NO: 16843 - DNA, 35 bp, Artificial Sequence
  primer
gtaaaacgacggccagttgagcagccaccaaactg

SEQ ID NO: 16844 - DNA, 46 bp, Artificial Sequence
  primer
gtaaaacgacggccagtttcagattgaatttctaacctacaataaa

SEQ ID NO: 16845 - DNA, 36 bp, Artificial Sequence
  primer
gtaaaacgacggccagtgggtcagctgtggaccttg

SEQ ID NO: 16846 - DNA, 23 bp, Artificial Sequence
  primer
gacaaatgaaatgcacacactca

SEQ ID NO: 16847 - DNA, 26 bp, Artificial Sequence
  primer
tcagagcggttgtaataagataattg

SEQ ID NO: 16848 - DNA, 21 bp, Artificial Sequence
  primer
ctccagttgagtgggagaagg

SEQ ID NO: 16849 - DNA, 21 bp, Artificial Sequence
  primer
cgtgtgttcccagctattcag

SEQ ID NO: 16850 - DNA, 40 bp, Artificial Sequence
  primer
gtaaaacgacggccagtaatgcctcacaaatttgaatcac

SEQ ID NO: 16851 - DNA, 41 bp, Artificial Sequence
  primer
gtaaaacgacggccagtaagagtctttgtggataaagcagg

SEQ ID NO: 16852 - DNA, 35 bp, Artificial Sequence
  primer
gtaaaacgacggccagttcacgccattctcttgcc

SEQ ID NO: 16853 - DNA, 38 bp, Artificial Sequence
  primer
gtaaaacgacggccagttgttgaaattcagttcctgcc

SEQ ID NO: 16854 - DNA, 38 bp, Artificial Sequence
  primer
gtaaaacgacggccagttgggcatattctgagattggc

SEQ ID NO: 16855 - DNA, 21 bp, Artificial Sequence
  primer
ccagctgaagctctcatagcc

SEQ ID NO: 16856 - DNA, 37 bp, Artificial Sequence
  primer
gtaaaacgacggccagtcatgggactaccctgaagcc

SEQ ID NO: 16857 - DNA, 37 bp, Artificial Sequence
  primer
gtaaaacgacggccagtcagctgtcagttcctgctcc

SEQ ID NO: 16858 - DNA, 38 bp, Artificial Sequence
  primer
gtaaaacgacggccagtatcctgttatgctgtgggagg

SEQ ID NO: 16859 - DNA, 36 bp, Artificial Sequence
  primer
gtaaaacgacggccagtatttcgcaggcctgtcctc

SEQ ID NO: 16860 - DNA, 21 bp, Artificial Sequence
  primer
acacaggcactgatgaccaag

SEQ ID NO: 16861 - DNA, 21 bp, Artificial Sequence
  primer
aggaagatccttgggaacagc

SEQ ID NO: 16862 - DNA, 39 bp, Artificial Sequence
  primer
gtaaaacgacggccagtcatttaacccgttcacttgagg

SEQ ID NO: 16863 - DNA, 38 bp, Artificial Sequence
  primer
gtaaaacgacggccagtgaaacagggtgcaggcataag

SEQ ID NO: 16864 - DNA, 21 bp, Artificial Sequence
  primer
cctttcctttaaatgccctcc

SEQ ID NO: 16865 - DNA, 21 bp, Artificial Sequence
  primer
ctgaaatgctcaaacaatggg

SEQ ID NO: 16866 - DNA, 21 bp, Artificial Sequence
  primer
ggctctttgtgtatctggtgg

SEQ ID NO: 16867 - DNA, 21 bp, Artificial Sequence
  primer
cggactatgcctttctcaacc

SEQ ID NO: 16868 - DNA, 41 bp, Artificial Sequence
  primer
gtaaaacgacggccagtttctcagcagaattattaaggcag

SEQ ID NO: 16869 - DNA, 41 bp, Artificial Sequence
  primer
gtaaaacgacggccagtaacacctttaattgccatgagttt

SEQ ID NO: 16870 - DNA, 38 bp, Artificial Sequence
  primer
gtaaaacgacggccagtgccacagagtgagaacctgtc

SEQ ID NO: 16871 - DNA, 37 bp, Artificial Sequence
  primer
gtaaaacgacggccagttaggtttggtcctttcacgg

SEQ ID NO: 16872 - DNA, 21 bp, Artificial Sequence
  primer
aaccggtcctttgtgtaaagc

SEQ ID NO: 16873 - DNA, 21 bp, Artificial Sequence
  primer
tcttgatgaatgaatgccagg

SEQ ID NO: 16874 - DNA, 38 bp, Artificial Sequence
  primer
gtaaaacgacggccagtagcatgcaggatgtcatctaa

SEQ ID NO: 16875 - DNA, 38 bp, Artificial Sequence
  primer
gtaaaacgacggccagtattctgaggccggtgaagtaa

SEQ ID NO: 16876 - DNA, 38 bp, Artificial Sequence
  primer
gtaaaacgacggccagtgcctcctatctgtcctcctcc

SEQ ID NO: 16877 - DNA, 38 bp, Artificial Sequence
  primer
gtaaaacgacggccagtatcctctccaagttcacaggc

SEQ ID NO: 16878 - DNA, 21 bp, Artificial Sequence
  primer
aaatcacttcttggaggtgcc

SEQ ID NO: 16879 - DNA, 22 bp, Artificial Sequence
  primer
gaagcgtctggaagatgtcaag

SEQ ID NO: 16880 - DNA, 38 bp, Artificial Sequence
  primer
gtaaaacgacggccagtccagtcagacccactctaccc

SEQ ID NO: 16881 - DNA, 21 bp, Artificial Sequence
  primer
taaacatccagcctaaagccc

SEQ ID NO: 16882 - DNA, 19 bp, Artificial Sequence
  primer
cacctcctccctccctctt

SEQ ID NO: 16883 - DNA, 21 bp, Artificial Sequence
  primer
tccatccctctgttccaattc

SEQ ID NO: 16884 - DNA, 37 bp, Artificial Sequence
  primer
gtaaaacgacggccagtgagggttgaagaaagcggag

SEQ ID NO: 16885 - DNA, 38 bp, Artificial Sequence
  primer
gtaaaacgacggccagtgcagatctacgggacaggaac

SEQ ID NO: 16886 - DNA, 20 bp, Artificial Sequence
  primer
ctggctagtgtttgatgccc

SEQ ID NO: 16887 - DNA, 21 bp, Artificial Sequence
  primer
agtgtatgggcagggctacag

SEQ ID NO: 16888 - DNA, 21 bp, Artificial Sequence
  primer
acacccatttagctcacccac

SEQ ID NO: 16889 - DNA, 21 bp, Artificial Sequence
  primer
taggtccctggagataccctg

SEQ ID NO: 16890 - DNA, 37 bp, Artificial Sequence
  primer
gtaaaacgacggccagtaacatcatttccatcgtggg

SEQ ID NO: 16891 - DNA, 38 bp, Artificial Sequence
  primer
gtaaaacgacggccagtctgcctgccgtactctctacc

SEQ ID NO: 16892 - DNA, 38 bp, Artificial Sequence
  primer
gtaaaacgacggccagtagggaggctgtgtgggaatac

SEQ ID NO: 16893 - DNA, 21 bp, Artificial Sequence
  primer
gatgcagggaaaggaaacttg

SEQ ID NO: 16894 - DNA, 38 bp, Artificial Sequence
  primer
gtaaaacgacggccagtggaatgatacagctcccaagg

SEQ ID NO: 16895 - DNA, 36 bp, Artificial Sequence
  primer
gtaaaacgacggccagtgtggcacctgggcacttac

SEQ ID NO: 16896 - DNA, 21 bp, Artificial Sequence
  primer
tgatgcaccgagagatctgag

SEQ ID NO: 16897 - DNA, 38 bp, Artificial Sequence
  primer
gtaaaacgacggccagtctccatccaagaaacagctcc

SEQ ID NO: 16898 - DNA, 37 bp, Artificial Sequence
  primer
gtaaaacgacggccagtgcttgatggaaggacagcag

SEQ ID NO: 16899 - DNA, 21 bp, Artificial Sequence
  primer
agaagtggtctgggactgtgg

SEQ ID NO: 16900 - DNA, 38 bp, Artificial Sequence
  primer
gtaaaacgacggccagtttgaatcaagtccttcctccc

SEQ ID NO: 16901 - DNA, 38 bp, Artificial Sequence
  primer
gtaaaacgacggccagttctgaatgggaaggaccagag

SEQ ID NO: 16902 - DNA, 23 bp, Artificial Sequence
  primer
tttccttcagtgaacctctaccc

SEQ ID NO: 16903 - DNA, 38 bp, Artificial Sequence
  primer
gtaaaacgacggccagtcagcaaagggtcaaggacttc

SEQ ID NO: 16904 - DNA, 21 bp, Artificial Sequence
  primer
aaagactgatttgcctccacc

SEQ ID NO: 16905 - DNA, 37 bp, Artificial Sequence
  primer
gtaaaacgacggccagttaatcgctcatgccctgttc

SEQ ID NO: 16906 - DNA, 22 bp, Artificial Sequence
  primer
tttctggacaactttgaggacc

SEQ ID NO: 16907 - DNA, 21 bp, Artificial Sequence
  primer
ttaagcaatcctcctgccttg

SEQ ID NO: 16908 - DNA, 40 bp, Artificial Sequence
  primer
gtaaaacgacggccagttcaaaccactcctttaacattcg

SEQ ID NO: 16909 - DNA, 38 bp, Artificial Sequence
  primer
gtaaaacgacggccagtagtgatgccagtcttcttggc

SEQ ID NO: 16910 - DNA, 22 bp, Artificial Sequence
  primer
cctttgtaagtagcaactgggc

SEQ ID NO: 16911 - DNA, 38 bp, Artificial Sequence
  primer
gtaaaacgacggccagtagggcaagggaaatgctaaag

SEQ ID NO: 16912 - DNA, 38 bp, Artificial Sequence
  primer
gtaaaacgacggccagtcagggacaatatgccttggtg

SEQ ID NO: 16913 - DNA, 36 bp, Artificial Sequence
  primer
gtaaaacgacggccagtgccctgcctgagttatgct

SEQ ID NO: 16914 - DNA, 35 bp, Artificial Sequence
  primer
gtaaaacgacggccagtgctggtcacaaactcccg

SEQ ID NO: 16915 - DNA, 25 bp, Artificial Sequence
  primer
tccggaaataccgataaatacatac

SEQ ID NO: 16916 - DNA, 21 bp, Artificial Sequence
  primer
acctaattatctcccggaggc

SEQ ID NO: 16917 - DNA, 22 bp, Artificial Sequence
  primer
ttattcacgtgtgtggtcttcc

SEQ ID NO: 16918 - DNA, 23 bp, Artificial Sequence
  primer
gagcttctctttaccttcttggg

SEQ ID NO: 16919 - DNA, 38 bp, Artificial Sequence
  primer
gtaaaacgacggccagtaatgccatgttgacaatgctg

SEQ ID NO: 16920 - DNA, 38 bp, Artificial Sequence
  primer
gtaaaacgacggccagtttggtctggaaatgggttatg

SEQ ID NO: 16921 - DNA, 38 bp, Artificial Sequence
  primer
gtaaaacgacggccagtttccatctgtccaaacctgtc

SEQ ID NO: 16922 - DNA, 24 bp, Artificial Sequence
  primer
gcaattaagcattaaataaagccc

SEQ ID NO: 16923 - DNA, 37 bp, Artificial Sequence
  primer
gtaaaacgacggccagtgtgtgctgaatgcgtgaatg

SEQ ID NO: 16924 - DNA, 38 bp, Artificial Sequence
  primer
gtaaaacgacggccagtgcagggaagcagctaggtatc

SEQ ID NO: 16925 - DNA, 21 bp, Artificial Sequence
  primer
acaaggacacattaggcccag

SEQ ID NO: 16926 - DNA, 35 bp, Artificial Sequence
  primer
gtaaaacgacggccagtgtgcgagagacaggtcgg

SEQ ID NO: 16927 - DNA, 39 bp, Artificial Sequence
  primer
gtaaaacgacggccagtttacgaagttagattcgggacg

SEQ ID NO: 16928 - DNA, 39 bp, Artificial Sequence
  primer
gtaaaacgacggccagtttggtgggaaatacagttggag

SEQ ID NO: 16929 - DNA, 21 bp, Artificial Sequence
  primer
tccaagactcccattctgttg

SEQ ID NO: 16930 - DNA, 19 bp, Artificial Sequence
  primer
agttcaaggctgcagtggg

SEQ ID NO: 16931 - DNA, 38 bp, Artificial Sequence
  primer
gtaaaacgacggccagttgaactctgtcatgggtctgg

SEQ ID NO: 16932 - DNA, 21 bp, Artificial Sequence
  primer
aatctcagacatcggctttcc

SEQ ID NO: 16933 - DNA, 40 bp, Artificial Sequence
  primer
gtaaaacgacggccagttgaacctagaggagagctgtgtg

SEQ ID NO: 16934 - DNA, 21 bp, Artificial Sequence
  primer
tacaacaaccagcccattgac

SEQ ID NO: 16935 - DNA, 42 bp, Artificial Sequence
  primer
gtaaaacgacggccagttgagagactaagttctgcatgttcc

SEQ ID NO: 16936 - DNA, 21 bp, Artificial Sequence
  primer
aggctgtttctttcaagtggc

SEQ ID NO: 16937 - DNA, 38 bp, Artificial Sequence
  primer
gtaaaacgacggccagtgagccatgcctgtcctatctg

SEQ ID NO: 16938 - DNA, 38 bp, Artificial Sequence
  primer
gtaaaacgacggccagtcagcctgcactctcagaaatc

SEQ ID NO: 16939 - DNA, 20 bp, Artificial Sequence
  primer
cagtcatgcttctccttcgc

SEQ ID NO: 16940 - DNA, 38 bp, Artificial Sequence
  primer
gtaaaacgacggccagtcagcttctagcatcggctttg

SEQ ID NO: 16941 - DNA, 37 bp, Artificial Sequence
  primer
gtaaaacgacggccagtgtgcgaaatgtgtgtggatg

SEQ ID NO: 16942 - DNA, 38 bp, Artificial Sequence
  primer
gtaaaacgacggccagtctccaagccttgtctcctgtc

SEQ ID NO: 16943 - DNA, 38 bp, Artificial Sequence
  primer
gtaaaacgacggccagtttctggatctcaatggcttcc

SEQ ID NO: 16944 - DNA, 38 bp, Artificial Sequence
  primer
gtaaaacgacggccagtgactaggtcaaggaagcggtg

SEQ ID NO: 16945 - DNA, 21 bp, Artificial Sequence
  primer
tttgcaaattctctggtctgg

SEQ ID NO: 16946 - DNA, 22 bp, Artificial Sequence
  primer
gtgcaaatatttctgagcctgc

SEQ ID NO: 16947 - DNA, 21 bp, Artificial Sequence
  primer
ctccaccctgcaaggatagtc

SEQ ID NO: 16948 - DNA, 21 bp, Artificial Sequence
  primer
taatgcaaaggttgggctagg

SEQ ID NO: 16949 - DNA, 21 bp, Artificial Sequence
  primer
cttctcagctgatgttgctgg

SEQ ID NO: 16950 - DNA, 40 bp, Artificial Sequence
  primer
gtaaaacgacggccagtttgatttatttgtgatgtgcctg

SEQ ID NO: 16951 - DNA, 27 bp, Artificial Sequence
  primer
attgggtttcatagtgataggtaattc

SEQ ID NO: 16952 - DNA, 39 bp, Artificial Sequence
  primer
gtaaaacgacggccagtaatgcaaatgggtctttgtttc

SEQ ID NO: 16953 - DNA, 22 bp, Artificial Sequence
  primer
aaggcaagcattgatctcactc

SEQ ID NO: 16954 - DNA, 38 bp, Artificial Sequence
  primer
gtaaaacgacggccagtagaagatgggaggagtggagc

SEQ ID NO: 16955 - DNA, 38 bp, Artificial Sequence
  primer
gtaaaacgacggccagtcgcaaccctctacctctcttc

SEQ ID NO: 16956 - DNA, 21 bp, Artificial Sequence
  primer
gctccggcattcagagattag

SEQ ID NO: 16957 - DNA, 21 bp, Artificial Sequence
  primer
tgcaatggaatattagtcccg

SEQ ID NO: 16958 - DNA, 39 bp, Artificial Sequence
  primer
gtaaaacgacggccagtcagttggtgggtccaagtaaag

SEQ ID NO: 16959 - DNA, 38 bp, Artificial Sequence
  primer
gtaaaacgacggccagtttgatggaatgaaggcaagtg

SEQ ID NO: 16960 - DNA, 38 bp, Artificial Sequence
  primer
gtaaaacgacggccagtgctgtgtcatagacctgaggc

SEQ ID NO: 16961 - DNA, 38 bp, Artificial Sequence; identical to SEQ ID NO: 16959
  primer

SEQ ID NO: 16962 - DNA, 38 bp, Artificial Sequence
  primer
gtaaaacgacggccagtggtcctgccttgaactaccac

SEQ ID NO: 16963 - DNA, 40 bp, Artificial Sequence
  primer
gtaaaacgacggccagtagcatagctggagagacactagc

SEQ ID NO: 16964 - DNA, 38 bp, Artificial Sequence
  primer
gtaaaacgacggccagtgtaggtgctgttgacagggtg

SEQ ID NO: 16965 - DNA, 21 bp, Artificial Sequence
  primer
agatccttgttcgagctggtc

SEQ ID NO: 16966 - DNA, 36 bp, Artificial Sequence
  primer
gtaaaacgacggccagtctgtacctgggtccttcgg

SEQ ID NO: 16967 - DNA, 37 bp, Artificial Sequence
  primer
gtaaaacgacggccagtacgcagttcttgggtctgtg

SEQ ID NO: 16968 - DNA, 38 bp, Artificial Sequence
  primer
gtaaaacgacggccagtgattacgtgcatgcaaacagc

SEQ ID NO: 16969 - DNA, 38 bp, Artificial Sequence
  primer
gtaaaacgacggccagtctaaattccttgcccttgagc

SEQ ID NO: 16970 - DNA, 21 bp, Artificial Sequence
  primer
gagggtccactgcactgtctc

SEQ ID NO: 16971 - DNA, 20 bp, Artificial Sequence
  primer
gacctcccagaaggctcaac

SEQ ID NO: 16972 - DNA, 21 bp, Artificial Sequence
  primer
cttcccttccagtgcagtgtc

SEQ ID NO: 16973 - DNA, 39 bp, Artificial Sequence
  primer
gtaaaacgacggccagttttgtgccatgtgactgtgtag

SEQ ID NO: 16974 - DNA, 21 bp, Artificial Sequence
  primer
gagcatttcatgttcctcacg

SEQ ID NO: 16975 - DNA, 37 bp, Artificial Sequence
  primer
gtaaaacgacggccagtgggaagccctttctcaaatc

SEQ ID NO: 16976 - DNA, 35 bp, Artificial Sequence
  primer
gtaaaacgacggccagtccgccgtgttaaccacac

SEQ ID NO: 16977 - DNA, 21 bp, Artificial Sequence
  primer
ctactgcctcaggagacgatg

SEQ ID NO: 16978 - DNA, 38 bp, Artificial Sequence
  primer
gtaaaacgacggccagtgtccttaggtcctcaccctcc

SEQ ID NO: 16979 - DNA, 20 bp, Artificial Sequence
  primer
aaactgtgattgccctgcac

SEQ ID NO: 16980 - DNA, 21 bp, Artificial Sequence
  primer
ttcacctcccgattcctctac

SEQ ID NO: 16981 - DNA, 38 bp, Artificial Sequence
  primer
gtaaaacgacggccagtgagaatgatgggacaggaagc

SEQ ID NO: 16982 - DNA, 21 bp, Artificial Sequence
  primer
ggactgtctcatcccatcctg

SEQ ID NO: 16983 - DNA, 36 bp, Artificial Sequence
  primer
gtaaaacgacggccagtgatcaccaggacctgtcgg

SEQ ID NO: 16984 - DNA, 39 bp, Artificial Sequence
  primer
gtaaaacgacggccagtcacacacagaaactctcatgcc

SEQ ID NO: 16985 - DNA, 38 bp, Artificial Sequence
  primer
gtaaaacgacggccagtagagtaccctctgggatgcac

SEQ ID NO: 16986 - DNA, 21 bp, Artificial Sequence
  primer
ttgtactgatcactcggccac

SEQ ID NO: 16987 - DNA, 38 bp, Artificial Sequence
  primer
gtaaaacgacggccagtacaaggacatgttaccaggcg

SEQ ID NO: 16988 - DNA, 21 bp, Artificial Sequence
  primer
ttgttcctggcttgagtaggg

SEQ ID NO: 16989 - DNA, 38 bp, Artificial Sequence
  primer
gtaaaacgacggccagtttgagagttcatggtggcttc

SEQ ID NO: 16990 - DNA, 21 bp, Artificial Sequence
  primer
tggtagtgggagatgttctgc

SEQ ID NO: 16991 - DNA, 18 bp, Artificial Sequence
  primer
cctgggtgacaaagcgac

SEQ ID NO: 16992 - DNA, 20 bp, Artificial Sequence
  primer
acacacagtaggcaccctgg

SEQ ID NO: 16993 - DNA, 38 bp, Artificial Sequence
  primer
gtaaaacgacggccagtaatgccttctgtgagaatggg

SEQ ID NO: 16994 - DNA, 20 bp, Artificial Sequence
  primer
aatccgaggagcaggagatg

SEQ ID NO: 16995 - DNA, 21 bp, Artificial Sequence
  primer
gagagcccaggagttcttcag

SEQ ID NO: 16996 - DNA, 22 bp, Artificial Sequence
  primer
gaaacttcaagtcacggaggtc

SEQ ID NO: 16997 - DNA, 39 bp, Artificial Sequence
  primer
gtaaaacgacggccagtaactcttgcctttgtcattgtc

SEQ ID NO: 16998 - DNA, 24 bp, Artificial Sequence
  primer
aagacatccgaatttatggaactc

SEQ ID NO: 16999 - DNA, 29 bp, Artificial Sequence
  primer
aggtaggtatacatcaatgaaatcttagg

SEQ ID NO: 17000 - DNA, 38 bp, Artificial Sequence
  primer
gtaaaacgacggccagtcaacgtgggcaatctagtgag

SEQ ID NO: 17001 - DNA, 39 bp, Artificial Sequence
  primer
gtaaaacgacggccagtcaggagaagagattggagatgg

SEQ ID NO: 17002 - DNA, 21 bp, Artificial Sequence
  primer
gtggaaatggaataaatgggc

SEQ ID NO: 17003 - DNA, 40 bp, Artificial Sequence
  primer
gtaaaacgacggccagtactagcaccatttgtgtgatttg

SEQ ID NO: 17004 - DNA, 21 bp, Artificial Sequence
  primer
aataagcacctggagttggtg

SEQ ID NO: 17005 - DNA, 21 bp, Artificial Sequence
  primer
tggacctgagaagtcggtatc

SEQ ID NO: 17006 - DNA, 38 bp, Artificial Sequence
  primer
gtaaaacgacggccagttggtcatggacagatggagtc

SEQ ID NO: 17007 - DNA, 20 bp, Artificial Sequence
  primer
agtccagagggaagtcagcc

SEQ ID NO: 17008 - DNA, 21 bp, Artificial Sequence
  primer
ttctcaacaaccacagcaacc

SEQ ID NO: 17009 - DNA, 21 bp, Artificial Sequence
  primer
atggtaggaagaagggaaggg

SEQ ID NO: 17010 - DNA, 38 bp, Artificial Sequence
  primer
gtaaaacgacggccagtgaggatttaccctcagcctcc

SEQ ID NO: 17011 - DNA, 21 bp, Artificial Sequence
  primer
actggaaatgagagggagtcg

SEQ ID NO: 17012 - DNA, 38 bp, Artificial Sequence
  primer
gtaaaacgacggccagtgaggatgtaacacccactcgg

SEQ ID NO: 17013 - DNA, 35 bp, Artificial Sequence
  primer
gtaaaacgacggccagtaggcgagcagagggaagg

SEQ ID NO: 17014 - DNA, 38 bp, Artificial Sequence
  primer
gtaaaacgacggccagtcagatggcatttgaggatcac

SEQ ID NO: 17015 - DNA, 21 bp, Artificial Sequence
  primer
aaatttgcaagcacagaatcc

SEQ ID NO: 17016 - DNA, 38 bp, Artificial Sequence
  primer
gtaaaacgacggccagtctgtgactcttcagtggtggg

SEQ ID NO: 17017 - DNA, 18 bp, Artificial Sequence
  primer
cacacagcctgggcactc

SEQ ID NO: 17018 - DNA, 21 bp, Artificial Sequence
  primer
gactcttcctgagaccctccc

SEQ ID NO: 17019 - DNA, 38 bp, Artificial Sequence
  primer
gtaaaacgacggccagttgacttgtgggtacagatggg

SEQ ID NO: 17020 - DNA, 20 bp, Artificial Sequence
  primer
cagaggatgccaaggttcag

SEQ ID NO: 17021 - DNA, 38 bp, Artificial Sequence
  primer
gtaaaacgacggccagtcacagacaactgtggaggagg

SEQ ID NO: 17022 - DNA, 38 bp, Artificial Sequence
  primer
gtaaaacgacggccagtggaatgtgtgaagtagggtgg

SEQ ID NO: 17023 - DNA, 38 bp, Artificial Sequence
  primer
gtaaaacgacggccagtagagaatgatgggattgcctg

SEQ ID NO: 17024 - DNA, 21 bp, Artificial Sequence
  primer
tctgacctttgaatccagcag

SEQ ID NO: 17025 - DNA, 37 bp, Artificial Sequence
  primer
gtaaaacgacggccagttctgaaggaaggctctgtgg

SEQ ID NO: 17026 - DNA, 22 bp, Artificial Sequence
  primer
tcttctccttactgcatcccag

SEQ ID NO: 17027 - DNA, 21 bp, Artificial Sequence
  primer
tcaaggctaaaggatgtgcag

SEQ ID NO: 17028 - DNA, 37 bp, Artificial Sequence
  primer
gtaaaacgacggccagtgtgggagaaagtccagccag

SEQ ID NO: 17029 - DNA, 21 bp, Artificial Sequence
  primer
gcctgccatccagttcataag

SEQ ID NO: 17030 - DNA, 37 bp, Artificial Sequence
  primer
gtaaaacgacggccagttctgtgaggcctaggtttgg

SEQ ID NO: 17031 - DNA, 35 bp, Artificial Sequence
  primer
gtaaaacgacggccagtcctccatcctgccgtgag

SEQ ID NO: 17032 - DNA, 36 bp, Artificial Sequence
  primer
gtaaaacgacggccagtctcctgcccttcaaagctg

SEQ ID NO: 17033 - DNA, 21 bp, Artificial Sequence
  primer
acacatgtcacattgcaaccc

SEQ ID NO: 17034 - DNA, 40 bp, Artificial Sequence
  primer
gtaaaacgacggccagtgacaggagacatttacgttccac

SEQ ID NO: 17035 - DNA, 21 bp, Artificial Sequence
  primer
agctattcaagcaaggttggc

SEQ ID NO: 17036 - DNA, 21 bp, Artificial Sequence
  primer
tgtccattcctcaccatgaag

SEQ ID NO: 17037 - DNA, 21 bp, Artificial Sequence
  primer
agagcaaacacgatgaagctg

SEQ ID NO: 17038 - DNA, 21 bp, Artificial Sequence
  primer
gacttcaaggagattgggtgg

SEQ ID NO: 17039 - DNA, 38 bp, Artificial Sequence
  primer
gtaaaacgacggccagttgcatgaaaggaaatggtcag

SEQ ID NO: 17040 - DNA, 21 bp, Artificial Sequence
  primer
tggcatatacagatcctgggc

SEQ ID NO: 17041 - DNA, 22 bp, Artificial Sequence
  primer
tcccttcctcagaaggagattc

SEQ ID NO: 17042 - DNA, 38 bp, Artificial Sequence
  primer
gtaaaacgacggccagtgctgaggttactgcctcttcc

SEQ ID NO: 17043 - DNA, 18 bp, Artificial Sequence
  primer
ccagccaaatgggagacc

SEQ ID NO: 17044 - DNA, 38 bp, Artificial Sequence
  primer
gtaaaacgacggccagtacatcaaatcccacgatgagg

SEQ ID NO: 17045 - DNA, 38 bp, Artificial Sequence
  primer
gtaaaacgacggccagttccgagaacagatgcaagatg

SEQ ID NO: 17046 - DNA, 37 bp, Artificial Sequence
  primer
gtaaaacgacggccagtatggattcgtggtggaagtg

SEQ ID NO: 17047 - DNA, 37 bp, Artificial Sequence
  primer
gtaaaacgacggccagtggaaacgccttaagtccagc

SEQ ID NO: 17048 - DNA, 21 bp, Artificial Sequence
  primer
catctcatgcccttgtctgtc

SEQ ID NO: 17049 - DNA, 18 bp, Artificial Sequence
  primer
gcggaatgtgaggcttgg

SEQ ID NO: 17050 - DNA, 39 bp, Artificial Sequence
  primer
gtaaaacgacggccagtgagagaagcgtcttcattcgag

SEQ ID NO: 17051 - DNA, 22 bp, Artificial Sequence
  primer
gcctttgcttgcttgaaatatg

SEQ ID NO: 17052 - DNA, 22 bp, Artificial Sequence
  primer
caatttcccattacttgaagcc

SEQ ID NO: 17053 - DNA, 21 bp, Artificial Sequence
  primer
tatggcatatacccttcggtg

SEQ ID NO: 17054 - DNA, 26 bp, Artificial Sequence
  primer
agatgctttgtattgtttaatccttg

SEQ ID NO: 17055 - DNA, 43 bp, Artificial Sequence
  primer
gtaaaacgacggccagtttgctgcagtatagaaacatgacttt

SEQ ID NO: 17056 - DNA, 40 bp, Artificial Sequence
  primer
gtaaaacgacggccagtgctgttctgtgattgatctaccc

SEQ ID NO: 17057 - DNA, 23 bp, Artificial Sequence
  primer
tgtggcacatgaatatgaaattg

SEQ ID NO: 17058 - DNA, 24 bp, Artificial Sequence
  primer
aaatgtatctgttgagttggatgc

SEQ ID NO: 17059 - DNA, 38 bp, Artificial Sequence
  primer
gtaaaacgacggccagtatgagcatgttgaaatccagc

SEQ ID NO: 17060 - DNA, 26 bp, Artificial Sequence
  primer
gatgtttggactactgatttctcaaa

SEQ ID NO: 17061 - DNA, 24 bp, Artificial Sequence
  primer
ccaatgtgaaaggaaggaacatag

SEQ ID NO: 17062 - DNA, 21 bp, Artificial Sequence
  primer
catctcatgcccttgtctgtc

SEQ ID NO: 17063 - DNA, 27 bp, Artificial Sequence
  primer
agtgaaacctatcacggattatattgt

SEQ ID NO: 17064 - DNA, 38 bp, Artificial Sequence
  primer
gtaaaacgacggccagtggcactgcaaaccctatcaag

SEQ ID NO: 17065 - DNA, 21 bp, Artificial Sequence
  primer
caatactcctcacctcagccc

SEQ ID NO: 17066 - DNA, 21 bp, Artificial Sequence
  primer
gtcaaacagcgcagcttacag

SEQ ID NO: 17067 - DNA, 38 bp, Artificial Sequence
  primer
gtaaaacgacggccagtagcctacctatcgcactccag

SEQ ID NO: 17068 - DNA, 24 bp, Artificial Sequence
  primer
cactacatgggtcattccatagtg

SEQ ID NO: 17069 - DNA, 21 bp, Artificial Sequence
  primer
ctggtttggagttcaaccctc

SEQ ID NO: 17070 - DNA, 22 bp, Artificial Sequence
  primer
ggagagctaggaaacatcagcc

SEQ ID NO: 17071 - DNA, 38 bp, Artificial Sequence
  primer
gtaaaacgacggccagtagctgccaaagaggaggttac

SEQ ID NO: 17072 - DNA, 20 bp, Artificial Sequence
  primer
gtgtgggaggagagaaagcc

SEQ ID NO: 17073 - DNA, 38 bp, Artificial Sequence
  primer
gtaaaacgacggccagtgataggcgattgggcttaatg

SEQ ID NO: 17074 - DNA, 38 bp, Artificial Sequence
  primer
gtaaaacgacggccagttctgacctgctttccatcttg

SEQ ID NO: 17075 - DNA, 21 bp, Artificial Sequence
  primer
ggtaaccgaatgctgatggtc

SEQ ID NO: 17076 - DNA, 38 bp, Artificial Sequence
  primer
gtaaaacgacggccagtctgattgtggtgccatagagg

SEQ ID NO: 17077 - DNA, 38 bp, Artificial Sequence
  primer
gtaaaacgacggccagtacatctggagaacatcccagg

SEQ ID NO: 17078 - DNA, 21 bp, Artificial Sequence
  primer
caggattagccgatcgttacc

SEQ ID NO: 17079 - DNA, 39 bp, Artificial Sequence
  primer
gtaaaacgacggccagtgctactgggaaactgtacctcc

SEQ ID NO: 17080 - DNA, 20 bp, Artificial Sequence
  primer
ggagctgctgggttctagtg

SEQ ID NO: 17081 - DNA, 39 bp, Artificial Sequence
  primer
gtaaaacgacggccagttggaaacacgtttcagtttgtg

SEQ ID NO: 17082 - DNA, 38 bp, Artificial Sequence
  primer
gtaaaacgacggccagttttgtaccaggtttggttggg

SEQ ID NO: 17083 - DNA, 38 bp, Artificial Sequence
  primer
gtaaaacgacggccagtgcctgtaaggaaggcattctg

SEQ ID NO: 17084 - DNA, 44 bp, Artificial Sequence
  primer
gtaaaacgacggccagtttgactgaagttcacatggttagtaag

SEQ ID NO: 17085 - DNA, 26 bp, Artificial Sequence
  primer
aattccattagaataattgttggacc

SEQ ID NO: 17086 - DNA, 38 bp, Artificial Sequence
  primer
gtaaaacgacggccagttggtgtgcctgattatgagtg

SEQ ID NO: 17087 - DNA, 21 bp, Artificial Sequence
  primer
gagataaggactgagggccag

SEQ ID NO: 17088 - DNA, 19 bp, Artificial Sequence
  primer
gaagcgggagatgcagaag

SEQ ID NO: 17089 - DNA, 21 bp, Artificial Sequence
  primer
catgctggatctgtacaacgc

SEQ ID NO: 17090 - DNA, 21 bp, Artificial Sequence
  primer
ggaaactggtgaggtaagccc

SEQ ID NO: 17091 - DNA, 38 bp, Artificial Sequence
  primer
gtaaaacgacggccagtgtgcttgtgcctcacaggtag

SEQ ID NO: 17092 - DNA, 38 bp, Artificial Sequence
  primer
gtaaaacgacggccagtaaggagtgctttgattctgcc

SEQ ID NO: 17093 - DNA, 21 bp, Artificial Sequence
  primer
tctaggaggctatcctgagcc

SEQ ID NO: 17094 - DNA, 38 bp, Artificial Sequence
  primer
gtaaaacgacggccagttatccttgcctgtgcaatgtg

SEQ ID NO: 17095 - DNA, 38 bp, Artificial Sequence
  primer
gtaaaacgacggccagtggtgagctctcggagactttg

SEQ ID NO: 17096 - DNA, 20 bp, Artificial Sequence
  primer
gtctgcagcaagtgaccgag

SEQ ID NO: 17097 - DNA, 21 bp, Artificial Sequence
  primer
gaaggagcagttgtcactggg

SEQ ID NO: 17098 - DNA, 21 bp, Artificial Sequence
  primer
ggatcttggtctgatgttccc

SEQ ID NO: 17099 - DNA, 37 bp, Artificial Sequence
  primer
gtaaaacgacggccagtgaatgaaccgggaggcatag

SEQ ID NO: 17100 - DNA, 21 bp, Artificial Sequence
  primer
atcactgcctaagatggaggg

SEQ ID NO: 17101 - DNA, 20 bp, Artificial Sequence
  primer
tcagaaggcatggtctgagg

SEQ ID NO: 17102 - DNA, 21 bp, Artificial Sequence
  primer
tatgcccagacaggatgtttc

SEQ ID NO: 17103 - DNA, 18 bp, Artificial Sequence
  primer
ctcgccgaactcagctcc

SEQ ID NO: 17104 - DNA, 38 bp, Artificial Sequence
  primer
gtaaaacgacggccagtaccttgagtggtgggtgtctg

SEQ ID NO: 17105 - DNA, 38 bp, Artificial Sequence
  primer
gtaaaacgacggccagtgtcatggtacaagcagcgttc

SEQ ID NO: 17106 - DNA, 20 bp, Artificial Sequence
  primer
gttcctgggtggattcaagc

SEQ ID NO: 17107 - DNA, 38 bp, Artificial Sequence
  primer
gtaaaacgacggccagttctcagggctgctcttattcc

SEQ ID NO: 17108 - DNA, 37 bp, Artificial Sequence
  primer
gtaaaacgacggccagtgagttcagggtttggagcct

SEQ ID NO: 17109 - DNA, 38 bp, Artificial Sequence
  primer
gtaaaacgacggccagtccagagtcaggtgggagacac

SEQ ID NO: 17110 - DNA, 38 bp, Artificial Sequence
  primer
gtaaaacgacggccagtagaccaaatggtttcctgtca

SEQ ID NO: 17111 - DNA, 38 bp, Artificial Sequence
  primer
gtaaaacgacggccagtgacgcaaagtgaagatatggg

SEQ ID NO: 17112 - DNA, 38 bp, Artificial Sequence
  primer
gtaaaacgacggccagtctgggcactgcgtgttactac

SEQ ID NO: 17113 - DNA, 35 bp, Artificial Sequence
  primer
gtaaaacgacggccagttttcgactgtgagctgcg

SEQ ID NO: 17114 - DNA, 41 bp, Artificial Sequence
  primer
gtaaaacgacggccagtttctgaagtttgggtagaggtttc

SEQ ID NO: 17115 - DNA, 38 bp, Artificial Sequence
  primer
gtaaaacgacggccagttgtggtgtgttaggatttggg

SEQ ID NO: 17116 - DNA, 38 bp, Artificial Sequence
  primer
gtaaaacgacggccagttcctttgatcgctaatctggg

SEQ ID NO: 17117 - DNA, 38 bp, Artificial Sequence
  primer
gtaaaacgacggccagttttgtgcttgagcacttctcc

SEQ ID NO: 17118 - DNA, 39 bp, Artificial Sequence
  primer
gtaaaacgacggccagtcggatgaactgtggatagaagg

SEQ ID NO: 17119 - DNA, 21 bp, Artificial Sequence
  primer
ggaagggccttaggtttgttc

SEQ ID NO: 17120 - DNA, 21 bp, Artificial Sequence
  primer
ttgtgctccagacttacgtgg

SEQ ID NO: 17121 - DNA, 39 bp, Artificial Sequence
  primer
gtaaaacgacggccagtgagttatgaaaggaaggccagg

SEQ ID NO: 17122 - DNA, 38 bp, Artificial Sequence
  primer
gtaaaacgacggccagtcctcactcagggcaagaaatg

SEQ ID NO: 17123 - DNA, 21 bp, Artificial Sequence
  primer
gactttgcctggccttagaac

SEQ ID NO: 17124 - DNA, 41 bp, Artificial Sequence
  primer
gtaaaacgacggccagttttcccttagtgcatttctgctaa

SEQ ID NO: 17125 - DNA, 40 bp, Artificial Sequence
  primer
gtaaaacgacggccagtccttattggaggacagtcagtca

SEQ ID NO: 17126 - DNA, 21 bp, Artificial Sequence
  primer
tcccatctacgaccctttctg

SEQ ID NO: 17127 - DNA, 38 bp, Artificial Sequence
  primer
gtaaaacgacggccagttgatcctgagctatggaaacg

SEQ ID NO: 17128 - DNA, 39 bp, Artificial Sequence
  primer
gtaaaacgacggccagtcgtaagaaagcagtgggagttg

SEQ ID NO: 17129 - DNA, 41 bp, Artificial Sequence
  primer
gtaaaacgacggccagtaatacctggtgcagtaattctgtg

SEQ ID NO: 17130 - DNA, 21 bp, Artificial Sequence
  primer
ctctggcgttgccaataaatc

SEQ ID NO: 17131 - DNA, 22 bp, Artificial Sequence
  primer
ttacctaagttcgggtttggtg

SEQ ID NO: 17132 - DNA, 21 bp, Artificial Sequence
  primer
agtatttgcaacccacactgc

SEQ ID NO: 17133 - DNA, 41 bp, Artificial Sequence
  primer
gtaaaacgacggccagtatttggataggattctttctgagg

SEQ ID NO: 17134 - DNA, 37 bp, Artificial Sequence
  primer
gtaaaacgacggccagttggttgggtacaccatgctt

SEQ ID NO: 17135 - DNA, 21 bp, Artificial Sequence
  primer
gacttggtgtcaggcgaatta

SEQ ID NO: 17136 - DNA, 38 bp, Artificial Sequence
  primer
gtaaaacgacggccagtgttggattaagagtgctgccc

SEQ ID NO: 17137 - DNA, 38 bp, Artificial Sequence
  primer
gtaaaacgacggccagtacatccctggtggaggtagag

SEQ ID NO: 17138 - DNA, 21 bp, Artificial Sequence
  primer
atcggtggaacagtgatgaag

SEQ ID NO: 17139 - DNA, 38 bp, Artificial Sequence
  primer
gtaaaacgacggccagttcctcctgaaaggattatggg

SEQ ID NO: 17140 - DNA, 25 bp, Artificial Sequence
  primer
cagatcattgacattctccttgttg

SEQ ID NO: 17141 - DNA, 44 bp, Artificial Sequence
  primer
gtaaaacgacggccagtggagaacatatttaaggtgtttgagtg

SEQ ID NO: 17142 - DNA, 44 bp, Artificial Sequence
  primer
gtaaaacgacggccagttgcgtgatacttagcaagtacctttag

SEQ ID NO: 17143 - DNA, 28 bp, Artificial Sequence
  primer
aataggttagccaaacagtaatgagttt

SEQ ID NO: 17144 - DNA, 23 bp, Artificial Sequence
  primer
tgcagtaatcgtttcttctctgg

SEQ ID NO: 17145 - DNA, 24 bp, Artificial Sequence
  primer
tcaggaaattgaatgaaatgctaa

SEQ ID NO: 17146 - DNA, 39 bp, Artificial Sequence
  primer
gtaaaacgacggccagtaagccattgtttcagaatcacc

SEQ ID NO: 17147 - DNA, 40 bp, Artificial Sequence
  primer
gtaaaacgacggccagtggaaattaggaaagaaaggcttg

SEQ ID NO: 17148 - DNA, 21 bp, Artificial Sequence
  primer
gcagaaccacctgcttgtttc

SEQ ID NO: 17149 - DNA, 38 bp, Artificial Sequence
  primer
gtaaaacgacggccagtctgtattgtgatacgggcagg

SEQ ID NO: 17150 - DNA, 41 bp, Artificial Sequence
  primer
gtaaaacgacggccagttgaagtcattcggataagacaaag

SEQ ID NO: 17151 - DNA, 44 bp, Artificial Sequence
  primer
gtaaaacgacggccagtagcttacacgtactctcacatttattg

SEQ ID NO: 17152 - DNA, 25 bp, Artificial Sequence
  primer
aaagggcagtctgtcagtatttaac

SEQ ID NO: 17153 - DNA, 39 bp, Artificial Sequence
  primer
gtaaaacgacggccagtgctgctaatctttctgcagctc

SEQ ID NO: 17154 - DNA, 43 bp, Artificial Sequence
  primer
gtaaaacgacggccagtaatggaataaactgtaagcaacagag

SEQ ID NO: 17155 - DNA, 22 bp, Artificial Sequence
  primer
catggaatcctagcctatttgc

SEQ ID NO: 17156 - DNA, 19 bp, Artificial Sequence
  primer
tgaagtggcagcatgtttg

SEQ ID NO: 17157 - DNA, 25 bp, Artificial Sequence
  primer
gaaaggtttaatgacatggttaggg

SEQ ID NO: 17158 - DNA, 21 bp, Artificial Sequence
  primer
taggatttccaaatgtgcctg

SEQ ID NO: 17159 - DNA, 21 bp, Artificial Sequence
  primer
tgttccgtaatccttgaagcc

SEQ ID NO: 17160 - DNA, 38 bp, Artificial Sequence
  primer
gtaaaacgacggccagtgtcacataataggcgtgtgcc

SEQ ID NO: 17161 - DNA, 21 bp, Artificial Sequence
  primer
ggaaaccaacaagctagaccc

SEQ ID NO: 17162 - DNA, 38 bp, Artificial Sequence
  primer
gtaaaacgacggccagtcaatcaatgcagcagaacctc

SEQ ID NO: 17163 - DNA, 20 bp, Artificial Sequence
  primer
acaagctggccatgatgaag

SEQ ID NO: 17164 - DNA, 38 bp, Artificial Sequence
  primer
gtaaaacgacggccagtccctcctgagacattggtttg

SEQ ID NO: 17165 - DNA, 38 bp, Artificial Sequence
  primer
gtaaaacgacggccagttgcttctcccatctccttacc

SEQ ID NO: 17166 - DNA, 21 bp, Artificial Sequence
  primer
gggccagaagttagcaagtta

SEQ ID NO: 17167 - DNA, 23 bp, Artificial Sequence
  primer
catggttatcatggagtctgtgc

SEQ ID NO: 17168 - DNA, 37 bp, Artificial Sequence
  primer
gtaaaacgacggccagtccagttgccaacccttagtg

SEQ ID NO: 17169 - DNA, 38 bp, Artificial Sequence
  primer
gtaaaacgacggccagtctttgctggaagtctcccttc

SEQ ID NO: 17170 - DNA, 38 bp, Artificial Sequence
  primer
gtaaaacgacggccagtatggtgcctccttatttctgc

SEQ ID NO: 17171 - DNA, 38 bp, Artificial Sequence
  primer
gtaaaacgacggccagtggcacaatgcccttctttagt

SEQ ID NO: 17172 - DNA, 40 bp, Artificial Sequence
  primer
gtaaaacgacggccagttttgagaaactgagtgaagctcg

SEQ ID NO: 17173 - DNA, 21 bp, Artificial Sequence
  primer
tgcccgagtttgcttcttaac

SEQ ID NO: 17174 - DNA, 38 bp, Artificial Sequence
  primer
gtaaaacgacggccagtaacgacggaaacttgagttgg

SEQ ID NO: 17175 - DNA, 38 bp, Artificial Sequence
  primer
gtaaaacgacggccagtcaggagagaagggcatttcag

SEQ ID NO: 17176 - DNA, 38 bp, Artificial Sequence
  primer
gtaaaacgacggccagtctgctatgaacttggctctcg

SEQ ID NO: 17177 - DNA, 39 bp, Artificial Sequence
  primer
gtaaaacgacggccagtcaaagactcatggcctaactgg

SEQ ID NO: 17178 - DNA, 39 bp, Artificial Sequence
  primer
gtaaaacgacggccagtaaggcaagttgtcacctactgc

SEQ ID NO: 17179 - DNA, 36 bp, Artificial Sequence
  primer
gtaaaacgacggccagtcttggaacgcagagcacac

SEQ ID NO: 17180 - DNA, 21 bp, Artificial Sequence
  primer
ccagccagcttaaggattagc

SEQ ID NO: 17181 - DNA, 22 bp, Artificial Sequence
  primer
ctgtacctggccaaatgtgtag

SEQ ID NO: 17182 - DNA, 38 bp, Artificial Sequence
  primer
gtaaaacgacggccagtggtgggtccctttgctacata

SEQ ID NO: 17183 - DNA, 23 bp, Artificial Sequence
  primer
ggctgcgttattatagctttgtg

SEQ ID NO: 17184 - DNA, 39 bp, Artificial Sequence
  primer
gtaaaacgacggccagtgttgcaagttcacatggtctct

SEQ ID NO: 17185 - DNA, 21 bp, Artificial Sequence
  primer
atgcccatgaactgacatgat

SEQ ID NO: 17186 - DNA, 38 bp, Artificial Sequence
  primer
gtaaaacgacggccagtttcaaatactttgcagccagg

SEQ ID NO: 17187 - DNA, 38 bp, Artificial Sequence
  primer
gtaaaacgacggccagtgagaattgtgggtgtccactg

SEQ ID NO: 17188 - DNA, 21 bp, Artificial Sequence
  primer
atcacacctgtgtctccatgc

SEQ ID NO: 17189 - DNA, 21 bp, Artificial Sequence
  primer
gggtggagtagagtggtggtc

SEQ ID NO: 17190 - DNA, 20 bp, Artificial Sequence
  primer
tgggcaacagagtaagaccc

SEQ ID NO: 17191 - DNA, 38 bp, Artificial Sequence
  primer
gtaaaacgacggccagtacatgctgaaatgatgttgcc

SEQ ID NO: 17192 - DNA, 38 bp, Artificial Sequence
  primer
gtaaaacgacggccagtcatgcaagcacttagagggag

SEQ ID NO: 17193 - DNA, 38 bp, Artificial Sequence
  primer
gtaaaacgacggccagtttgagctggttgctctgagac

SEQ ID NO: 17194 - DNA, 38 bp, Artificial Sequence
  primer
gtaaaacgacggccagtgaggaatttgagagcaggcac

SEQ ID NO: 17195 - DNA, 21 bp, Artificial Sequence
  primer
ctcggtttgagtcaggaagtg

SEQ ID NO: 17196 - DNA, 38 bp, Artificial Sequence
  primer
gtaaaacgacggccagtaactattgctggaggtgggtg

SEQ ID NO: 17197 - DNA, 38 bp, Artificial Sequence
  primer
gtaaaacgacggccagtgtctttgttgggaggcagaag

SEQ ID NO: 17198 - DNA, 38 bp, Artificial Sequence
  primer
gtaaaacgacggccagtaactcagcatcagcagctttg

SEQ ID NO: 17199 - DNA, 40 bp, Artificial Sequence
  primer
gtaaaacgacggccagtcccttaataggaaatcgttgagg

SEQ ID NO: 17200 - DNA, 38 bp, Artificial Sequence
  primer
gtaaaacgacggccagttccctctcaggcataacttgg

SEQ ID NO: 17201 - DNA, 37 bp, Artificial Sequence
  primer
gtaaaacgacggccagtaatttgcaggtgcaccaaag

SEQ ID NO: 17202 - DNA, 38 bp, Artificial Sequence
  primer
gtaaaacgacggccagtttgctcttaccttggttgctg

SEQ ID NO: 17203 - DNA, 38 bp, Artificial Sequence
  primer
gtaaaacgacggccagtatggcctacataggagttggg

SEQ ID NO: 17204 - DNA, 20 bp, Artificial Sequence
  primer
cttgcctctttccttcctcc

SEQ ID NO: 17205 - DNA, 39 bp, Artificial Sequence
  primer
gtaaaacgacggccagttttcccaaacaagtgaaatgtg

SEQ ID NO: 17206 - DNA, 38 bp, Artificial Sequence
  primer
gtaaaacgacggccagttattgcatggctacgcacttg

SEQ ID NO: 17207 - DNA, 21 bp, Artificial Sequence
  primer
ttagatgtgcagactccaccc

SEQ ID NO: 17208 - DNA, 22 bp, Artificial Sequence
  primer
gattgagtgagaaacctgtgcc

SEQ ID NO: 17209 - DNA, 38 bp, Artificial Sequence
  primer
gtaaaacgacggccagtaacctccctgacttccctctc

SEQ ID NO: 17210 - DNA, 39 bp, Artificial Sequence
  primer
gtaaaacgacggccagtttcagccactttggagagagac

SEQ ID NO: 17211 - DNA, 39 bp, Artificial Sequence
  primer
gtaaaacgacggccagttgtgaaactcccattggagaag

SEQ ID NO: 17212 - DNA, 21 bp, Artificial Sequence
  primer
gttcaagtgaaagagggtggg

SEQ ID NO: 17213 - DNA, 21 bp, Artificial Sequence
  primer
ggatggatgcttggttgaaag

SEQ ID NO: 17214 - DNA, 38 bp, Artificial Sequence
  primer
gtaaaacgacggccagtgcaatcgactgagactctggg

SEQ ID NO: 17215 - DNA, 21 bp, Artificial Sequence
  primer
cactctgacccatagccttcc

SEQ ID NO: 17216 - DNA, 21 bp, Artificial Sequence
  primer
agcgtccttgccttatttctg

SEQ ID NO: 17217 - DNA, 21 bp, Artificial Sequence
  primer
gatttagggcgttatccggtc

SEQ ID NO: 17218 - DNA, 37 bp, Artificial Sequence
  primer
gtaaaacgacggccagtctgccgaatggaggaatatg

SEQ ID NO: 17219 - DNA, 25 bp, Artificial Sequence
  primer
ggaataaataaccaagaattggtcc

SEQ ID NO: 17220 - DNA, 38 bp, Artificial Sequence
  primer
gtaaaacgacggccagtgagagtagggtgagcagggac

SEQ ID NO: 17221 - DNA, 38 bp, Artificial Sequence
  primer
gtaaaacgacggccagtgcaatccatcatcataccacc

SEQ ID NO: 17222 - DNA, 38 bp, Artificial Sequence
  primer
gtaaaacgacggccagttccagttccacaccatttcag

SEQ ID NO: 17223 - DNA, 38 bp, Artificial Sequence
  primer
gtaaaacgacggccagtaaatccactacaatgccgtcc

SEQ ID NO: 17224 - DNA, 38 bp, Artificial Sequence
  primer
gtaaaacgacggccagtttcaggagaggattccaaagg

SEQ ID NO: 17225 - DNA, 21 bp, Artificial Sequence
  primer
tcagtgaagatgagcaggagg

SEQ ID NO: 17226 - DNA, 20 bp, Artificial Sequence
  primer
cagtgctttgtccaacaggg

SEQ ID NO: 17227 - DNA, 38 bp, Artificial Sequence
  primer
gtaaaacgacggccagttatccagactgtcggctttcc

SEQ ID NO: 17228 - DNA, 38 bp, Artificial Sequence
  primer
gtaaaacgacggccagtgctcaaacctaaacctccacc

SEQ ID NO: 17229 - DNA, 38 bp, Artificial Sequence
  primer
gtaaaacgacggccagtcaaaggaacaagtcgaatggg

SEQ ID NO: 17230 - DNA, 21 bp, Artificial Sequence
  primer
gtcctgatggagaaggctgac

SEQ ID NO: 17231 - DNA, 39 bp, Artificial Sequence
  primer
gtaaaacgacggccagtaagaggcagaagtggatgtgag

SEQ ID NO: 17232 - DNA, 43 bp, Artificial Sequence
  primer
gtaaaacgacggccagtccggtatcttatcgaatatgtaatcc

SEQ ID NO: 17233 - DNA, 21 bp, Artificial Sequence
  primer
aatggagccctggtaacttcc

SEQ ID NO: 17234 - DNA, 21 bp, Artificial Sequence
  primer
gagcacacagagcaccttcag

SEQ ID NO: 17235 - DNA, 38 bp, Artificial Sequence
  primer
gtaaaacgacggccagtccagcctccttgctcacttag

SEQ ID NO: 17236 - DNA, 21 bp, Artificial Sequence
  primer
gaacccagcctttcaactcag

SEQ ID NO: 17237 - DNA, 39 bp, Artificial Sequence
  primer
gtaaaacgacggccagttgaagatcaaacatcgatgcac

SEQ ID NO: 17238 - DNA, 38 bp, Artificial Sequence
  primer
gtaaaacgacggccagtaaccagtcccatcattccaac

SEQ ID NO: 17239 - DNA, 21 bp, Artificial Sequence
  primer
actcccaagaggagatgagcc

SEQ ID NO: 17240 - DNA, 38 bp, Artificial Sequence
  primer
gtaaaacgacggccagtatgagcacattcacagcgaag

SEQ ID NO: 17241 - DNA, 38 bp, Artificial Sequence
  primer
gtaaaacgacggccagtaccaccaccactaactcccag

SEQ ID NO: 17242 - DNA, 38 bp, Artificial Sequence
  primer
gtaaaacgacggccagtaaagaactcgatgacatgggc

SEQ ID NO: 17243 - DNA, 21 bp, Artificial Sequence
  primer
agaggcatggcagaggactac

SEQ ID NO: 17244 - DNA, 38 bp, Artificial Sequence
  primer
gtaaaacgacggccagttgtcagggaaagtcccaactc

SEQ ID NO: 17245 - DNA, 40 bp, Artificial Sequence
  primer
gtaaaacgacggccagttgttgcagaggtaaacagcaaag

SEQ ID NO: 17246 - DNA, 39 bp, Artificial Sequence
  primer
gtaaaacgacggccagttgtatgcccttggcagaaatag

SEQ ID NO: 17247 - DNA, 36 bp, Artificial Sequence
  primer
gtaaaacgacggccagtcttctcccgtgtgcctttg

SEQ ID NO: 17248 - DNA, 21 bp, Artificial Sequence
  primer
gtctcagcacaccctttccag

SEQ ID NO: 17249 - DNA, 38 bp, Artificial Sequence
  primer
gtaaaacgacggccagtgctttgattccagctcagagg

SEQ ID NO: 17250 - DNA, 20 bp, Artificial Sequence
  primer
gactcaagtgattgcctgcc

SEQ ID NO: 17251 - DNA, 43 bp, Artificial Sequence
  primer
gtaaaacgacggccagtttcatgaccagaccattgtactaaac

SEQ ID NO: 17252 - DNA, 38 bp, Artificial Sequence
  primer
gtaaaacgacggccagtaggtgacagacagcaagaccc

SEQ ID NO: 17253 - DNA, 39 bp, Artificial Sequence
  primer
gtaaaacgacggccagttgatctcttgccaacgatgtag

SEQ ID NO: 17254 - DNA, 41 bp, Artificial Sequence
  primer
gtaaaacgacggccagttcctcctttatggaagagagattg

SEQ ID NO: 17255 - DNA, 21 bp, Artificial Sequence
  primer
tgcgaatttaagtggtcttgg

SEQ ID NO: 17256 - DNA, 38 bp, Artificial Sequence
  primer
gtaaaacgacggccagtaagtttgaagcaaatcccagg

SEQ ID NO: 17257 - DNA, 26 bp, Artificial Sequence
  primer
gggtatcacacctaattgagaacttt

SEQ ID NO: 17258 - DNA, 40 bp, Artificial Sequence
  primer
gtaaaacgacggccagttccatcacctcagacatttatca

SEQ ID NO: 17259 - DNA, 20 bp, Artificial Sequence
  primer
ccagtgtcctcctgccttta

SEQ ID NO: 17260 - DNA, 21 bp, Artificial Sequence
  primer
tacctcttggaaatggaaggg

SEQ ID NO: 17261 - DNA, 38 bp, Artificial Sequence
  primer
gtaaaacgacggccagttgaggaagagtttggctctgg

SEQ ID NO: 17262 - DNA, 38 bp, Artificial Sequence
  primer
gtaaaacgacggccagtcctctgggctcttgaattgag

SEQ ID NO: 17263 - DNA, 21 bp, Artificial Sequence
  primer
atatgggattggtcaagtcgg

SEQ ID NO: 17264 - DNA, 39 bp, Artificial Sequence
  primer
gtaaaacgacggccagtccacagtgagctaccctgtttc

SEQ ID NO: 17265 - DNA, 37 bp, Artificial Sequence
  primer
gtaaaacgacggccagtggactcggcttgttgtgttg

SEQ ID NO: 17266 - DNA, 39 bp, Artificial Sequence
  primer
gtaaaacgacggccagttttggtttgaggagagtcagaa

SEQ ID NO: 17267 - DNA, 41 bp, Artificial Sequence
  primer
gtaaaacgacggccagtttgggagtaagaatgctcaatttc

SEQ ID NO: 17268 - DNA, 21 bp, Artificial Sequence
  primer
ttatgcagttcctgtgctgtg

SEQ ID NO: 17269 - DNA, 38 bp, Artificial Sequence
  primer
gtaaaacgacggccagtagttgatctgcgcacgcttac

SEQ ID NO: 17270 - DNA, 37 bp, Artificial Sequence
  primer
gtaaaacgacggccagtatgatttcacggtgtttggg

SEQ ID NO: 17271 - DNA, 21 bp, Artificial Sequence
  primer
ccaacacacacacccatcttg

SEQ ID NO: 17272 - DNA, 18 bp, Artificial Sequence
  primer
gagcccaggaagtggagg

SEQ ID NO: 17273 - DNA, 38 bp, Artificial Sequence
  primer
gtaaaacgacggccagtggaacttccagagaccctcag

SEQ ID NO: 17274 - DNA, 21 bp, Artificial Sequence
  primer
tacagggcagtgttagggagg

SEQ ID NO: 17275 - DNA, 37 bp, Artificial Sequence
  primer
gtaaaacgacggccagtattacagctgacggaatggg

SEQ ID NO: 17276 - DNA, 22 bp, Artificial Sequence
  primer
tccaccttgattctttctagcc

SEQ ID NO: 17277 - DNA, 21 bp, Artificial Sequence
  primer
tgtgttggcagtgaacagatg

SEQ ID NO: 17278 - DNA, 22 bp, Artificial Sequence
  primer
ttctcaggccagtcttgaactc

SEQ ID NO: 17279 - DNA, 21 bp, Artificial Sequence
  primer
tacaacagagtgttgccaggg

SEQ ID NO: 17280 - DNA, 38 bp, Artificial Sequence
  primer
gtaaaacgacggccagtgaagacttcctgggtgcagtg

SEQ ID NO: 17281 - DNA, 38 bp, Artificial Sequence
  primer
gtaaaacgacggccagtctgacaacaccaaggcacaag

SEQ ID NO: 17282 - DNA, 38 bp, Artificial Sequence
  primer
gtaaaacgacggccagtacatcagctcctagtgcctgc

SEQ ID NO: 17283 - DNA, 38 bp, Artificial Sequence
  primer
gtaaaacgacggccagtcatctccatgctctctgggac

SEQ ID NO: 17284 - DNA, 38 bp, Artificial Sequence
  primer
gtaaaacgacggccagtctaactacatccctcccagcc

SEQ ID NO: 17285 - DNA, 36 bp, Artificial Sequence
  primer
gtaaaacgacggccagtcccaggaacaacagctcag

SEQ ID NO: 17286 - DNA, 38 bp, Artificial Sequence
  primer
gtaaaacgacggccagtcaacctggcttatcgtccttc

SEQ ID NO: 17287 - DNA, 38 bp, Artificial Sequence
  primer
gtaaaacgacggccagtaccacaacagaaccagtctcg

SEQ ID NO: 17288 - DNA, 37 bp, Artificial Sequence
  primer
gtaaaacgacggccagtagtgggcatacagcgtcatc

SEQ ID NO: 17289 - DNA, 38 bp, Artificial Sequence
  primer
gtaaaacgacggccagtcctttgagaacttgctttggg

SEQ ID NO: 17290 - DNA, 39 bp, Artificial Sequence
  primer
gtaaaacgacggccagtgaaattcaaactctggactggg

SEQ ID NO: 17291 - DNA, 38 bp, Artificial Sequence
  primer
gtaaaacgacggccagtcctagaacatttcctccagcg

SEQ ID NO: 17292 - DNA, 22 bp, Artificial Sequence
  primer
caatttcatgctgagtgtggac

SEQ ID NO: 17293 - DNA, 38 bp, Artificial Sequence
  primer
gtaaaacgacggccagtgagcctcctgagatccttgtg

SEQ ID NO: 17294 - DNA, 38 bp, Artificial Sequence
  primer
gtaaaacgacggccagtgcagatgctcctgttgttgag

SEQ ID NO: 17295 - DNA, 20 bp, Artificial Sequence
  primer
ctctcaccagctctgatgcc

SEQ ID NO: 17296 - DNA, 38 bp, Artificial Sequence
  primer
gtaaaacgacggccagtaccacagatagagattggccc

SEQ ID NO: 17297 - DNA, 19 bp, Artificial Sequence
  primer
tctgaaagaaggtggcgct

SEQ ID NO: 17298 - DNA, 21 bp, Artificial Sequence
  primer
ctggaattcaagcatggtcag

SEQ ID NO: 17299 - DNA, 38 bp, Artificial Sequence
  primer
gtaaaacgacggccagtcctgcccaagaactacctgac

SEQ ID NO: 17300 - DNA, 20 bp, Artificial Sequence
  primer
cgaacagtctcctgcattcc

SEQ ID NO: 17301 - DNA, 38 bp, Artificial Sequence
  primer
gtaaaacgacggccagtgaccctatccatgaaacaggc

SEQ ID NO: 17302 - DNA, 37 bp, Artificial Sequence
  primer
gtaaaacgacggccagtgacataacccatggctgtgc

SEQ ID NO: 17303 - DNA, 42 bp, Artificial Sequence
  primer
gtaaaacgacggccagtcacatacaaagtctccttcagatgc

SEQ ID NO: 17304 - DNA, 38 bp, Artificial Sequence
  primer
gtaaaacgacggccagtagcatgtggtcagattggaag

SEQ ID NO: 17305 - DNA, 22 bp, Artificial Sequence
  primer
tggacaggtataggagggagac

SEQ ID NO: 17306 - DNA, 39 bp, Artificial Sequence
  primer
gtaaaacgacggccagttgtgtttcctagttctgttgcc

SEQ ID NO: 17307 - DNA, 18 bp, Artificial Sequence
  primer
gacgcagtccgcttctcc

SEQ ID NO: 17308 - DNA, 39 bp, Artificial Sequence; identical to SEQ ID NO: 17306
  primer

SEQ ID NO: 17309 - DNA, 38 bp, Artificial Sequence
  primer
gtaaaacgacggccagttgtctccagagcaagcatgag

SEQ ID NO: 17310 - DNA, 39 bp, Artificial Sequence
  primer
gtaaaacgacggccagttgcagcatagaaacatgcctac

SEQ ID NO: 17311 - DNA, 39 bp, Artificial Sequence
  primer
gtaaaacgacggccagtgcatactggtgttggaatctga

SEQ ID NO: 17312 - DNA, 42 bp, Artificial Sequence
  primer
gtaaaacgacggccagtaaaccagaagtttactgggtttagg

SEQ ID NO: 17313 - DNA, 21 bp, Artificial Sequence
  primer
cctaattcaaggtcacaggca

SEQ ID NO: 17314 - DNA, 22 bp, Artificial Sequence
  primer
cgttgctgagatacttctgtgc

SEQ ID NO: 17315 - DNA, 26 bp, Artificial Sequence
  primer
tgtctatttccctcatcagattacaa

SEQ ID NO: 17316 - DNA, 21 bp, Artificial Sequence
  primer
cgtaatctgtgctgacccatc

SEQ ID NO: 17317 - DNA, 20 bp, Artificial Sequence
  primer
gctctccctgcagtgttcag

SEQ ID NO: 17318 - DNA, 20 bp, Artificial Sequence
  primer
ggagctgctcagagatttcg

SEQ ID NO: 17319 - DNA, 21 bp, Artificial Sequence
  primer
tgggtgggactaggaactcag

SEQ ID NO: 17320 - DNA, 39 bp, Artificial Sequence
  primer
gtaaaacgacggccagttgctgtccttgaatattagccc

SEQ ID NO: 17321 - DNA, 21 bp, Artificial Sequence
  primer
agctcctggcgtctaaatgag

SEQ ID NO: 17322 - DNA, 38 bp, Artificial Sequence
  primer
gtaaaacgacggccagtcagtacctgcatgtttcaggc

SEQ ID NO: 17323 - DNA, 38 bp, Artificial Sequence
  primer
gtaaaacgacggccagttgagcctgagtaccgctaagg

SEQ ID NO: 17324 - DNA, 39 bp, Artificial Sequence
  primer
gtaaaacgacggccagtcatcctacagcgcgtagaacac

SEQ ID NO: 17325 - DNA, 21 bp, Artificial Sequence
  primer
agtcattgcaaggctgctttc

SEQ ID NO: 17326 - DNA, 38 bp, Artificial Sequence
  primer
gtaaaacgacggccagttccagcctcacacctgtattg

SEQ ID NO: 17327 - DNA, 38 bp, Artificial Sequence
  primer
gtaaaacgacggccagttcagaagtggctcttgctcag

SEQ ID NO: 17328 - DNA, 37 bp, Artificial Sequence
  primer
gtaaaacgacggccagtacggatagggaaactgaggg

SEQ ID NO: 17329 - DNA, 21 bp, Artificial Sequence
  primer
ctcctcgatagtggtcatggg

SEQ ID NO: 17330 - DNA, 21 bp, Artificial Sequence
  primer
aggttccttcctcctttccac

SEQ ID NO: 17331 - DNA, 38 bp, Artificial Sequence
  primer
gtaaaacgacggccagtgccactgtccatgctacgaac

SEQ ID NO: 17332 - DNA, 21 bp, Artificial Sequence
  primer
ggaatggatggagtgaaggac

SEQ ID NO: 17333 - DNA, 38 bp, Artificial Sequence
  primer
gtaaaacgacggccagtaacgtacctcctcacctggag

SEQ ID NO: 17334 - DNA, 21 bp, Artificial Sequence
  primer
tgaacaggtcactaaatcggg

SEQ ID NO: 17335 - DNA, 38 bp, Artificial Sequence
  primer
gtaaaacgacggccagtatctggcccgttattgtcaag

SEQ ID NO: 17336 - DNA, 21 bp, Artificial Sequence
  primer
aaacttgcactgcagctcttg

SEQ ID NO: 17337 - DNA, 23 bp, Artificial Sequence
  primer
cttagaaagtaatgcccaggagg

SEQ ID NO: 17338 - DNA, 21 bp, Artificial Sequence
  primer
gtgggtcagtgctctgttgtc

SEQ ID NO: 17339 - DNA, 38 bp, Artificial Sequence
  primer
gtaaaacgacggccagtgcaatgggaagacattgaagg

SEQ ID NO: 17340 - DNA, 21 bp, Artificial Sequence
  primer
ttgtgaagctgacccttcttg

SEQ ID NO: 17341 - DNA, 38 bp, Artificial Sequence
  primer
gtaaaacgacggccagtcaccagagtgggtctctcctc

SEQ ID NO: 17342 - DNA, 38 bp, Artificial Sequence
  primer
gtaaaacgacggccagtcacatatcacttgcgtccacc

SEQ ID NO: 17343 - DNA, 21 bp, Artificial Sequence
  primer
ggtgctagaagtggacttggg

SEQ ID NO: 17344 - DNA, 20 bp, Artificial Sequence
  primer
agcgaaacactgagtgaccc

SEQ ID NO: 17345 - DNA, 38 bp, Artificial Sequence
  primer
gtaaaacgacggccagtatcaccagtcagggcttgttc

SEQ ID NO: 17346 - DNA, 38 bp, Artificial Sequence
  primer
gtaaaacgacggccagttagatggcaggcagtgtgttc

SEQ ID NO: 17347 - DNA, 37 bp, Artificial Sequence
  primer
gtaaaacgacggccagtatcgtgtgggtatggctcag

SEQ ID NO: 17348 - DNA, 21 bp, Artificial Sequence
  primer
aggtagggccatctcactctg

SEQ ID NO: 17349 - DNA, 40 bp, Artificial Sequence
  primer
gtaaaacgacggccagtccaaaccttgagataaatgaccc

SEQ ID NO: 17350 - DNA, 21 bp, Artificial Sequence
  primer
cctctgttctttcttccgtgc

SEQ ID NO: 17351 - DNA, 38 bp, Artificial Sequence
  primer
gtaaaacgacggccagttattcagaggcttgctctgcc

SEQ ID NO: 17352 - DNA, 38 bp, Artificial Sequence
  primer
gtaaaacgacggccagttctaggagtccaggttctgcc

SEQ ID NO: 17353 - DNA, 37 bp, Artificial Sequence
  primer
gtaaaacgacggccagttgttggaagggttaaacggg

SEQ ID NO: 17354 - DNA, 21 bp, Artificial Sequence
  primer
gcatttgaggagtgactgacc

SEQ ID NO: 17355 - DNA, 21 bp, Artificial Sequence
  primer
ggttactgtggttacggtccc

SEQ ID NO: 17356 - DNA, 38 bp, Artificial Sequence
  primer
gtaaaacgacggccagttgtgcccaggtagtgaacttg

SEQ ID NO: 17357 - DNA, 21 bp, Artificial Sequence
  primer
ctctgccatccatctgttgtc

SEQ ID NO: 17358 - DNA, 21 bp, Artificial Sequence
  primer
gtgtgatcttcaccaagcagc

SEQ ID NO: 17359 - DNA, 21 bp, Artificial Sequence
  primer
cagactggtaaactgaggccc

SEQ ID NO: 17360 - DNA, 40 bp, Artificial Sequence
  primer
gtaaaacgacggccagttggatggatgtattgagttctgg

SEQ ID NO: 17361 - DNA, 22 bp, Artificial Sequence
  primer
ccttagcctctctgagaaccag

SEQ ID NO: 17362 - DNA, 38 bp, Artificial Sequence
  primer
gtaaaacgacggccagtgttcccaagtttgcttgactg

SEQ ID NO: 17363 - DNA, 21 bp, Artificial Sequence
  primer
acaaagtcactgcagtccagg

SEQ ID NO: 17364 - DNA, 21 bp, Artificial Sequence
  primer
catcgcctagggaaggtttac

SEQ ID NO: 17365 - DNA, 21 bp, Artificial Sequence
  primer
cctttgtttgcagggtctagg

SEQ ID NO: 17366 - DNA, 21 bp, Artificial Sequence
  primer
ggaacatatgccctgcagata

SEQ ID NO: 17367 - DNA, 22 bp, Artificial Sequence
  primer
tgacttcagagggtccatcttc

SEQ ID NO: 17368 - DNA, 39 bp, Artificial Sequence
  primer
gtaaaacgacggccagtggtgtaacagcttcacaattcg

SEQ ID NO: 17369 - DNA, 37 bp, Artificial Sequence
  primer
gtaaaacgacggccagtcacaggccatcctaaccttg

SEQ ID NO: 17370 - DNA, 41 bp, Artificial Sequence
  primer
gtaaaacgacggccagtggaatgttgggcttataatgtttc

SEQ ID NO: 17371 - DNA, 20 bp, Artificial Sequence
  primer
cctcaagttatctgcctgcc

SEQ ID NO: 17372 - DNA, 21 bp, Artificial Sequence
  primer
gtgcacacttgtagtcccagc

SEQ ID NO: 17373 - DNA, 40 bp, Artificial Sequence
  primer
gtaaaacgacggccagtaaagcaagctgtcagtcagtctc

SEQ ID NO: 17374 - DNA, 38 bp, Artificial Sequence
  primer
gtaaaacgacggccagtagaagccatctcttcctcacg

SEQ ID NO: 17375 - DNA, 37 bp, Artificial Sequence
  primer
gtaaaacgacggccagtgtttgctgaactggctggag

SEQ ID NO: 17376 - DNA, 21 bp, Artificial Sequence
  primer
catctctgggtctctgccatc

SEQ ID NO: 17377 - DNA, 38 bp, Artificial Sequence
  primer
gtaaaacgacggccagtaaagtggtgaagtgggtggag

SEQ ID NO: 17378 - DNA, 37 bp, Artificial Sequence
  primer
gtaaaacgacggccagtgtgagcaaagagaaggcagg

SEQ ID NO: 17379 - DNA, 21 bp, Artificial Sequence
  primer
gaggtcatcctggtcaatgtg

SEQ ID NO: 17380 - DNA, 20 bp, Artificial Sequence
  primer
ccagtcccagggaaagagtc

SEQ ID NO: 17381 - DNA, 21 bp, Artificial Sequence
  primer
cagaggcccagaagtgctaag

SEQ ID NO: 17382 - DNA, 38 bp, Artificial Sequence
  primer
gtaaaacgacggccagtttgcttggaggactgagacac

SEQ ID NO: 17383 - DNA, 39 bp, Artificial Sequence
  primer
gtaaaacgacggccagtcccattctcccatctatcttcc

SEQ ID NO: 17384 - DNA, 38 bp, Artificial Sequence
  primer
gtaaaacgacggccagtgcctttgcatgttgtacttcc

SEQ ID NO: 17385 - DNA, 21 bp, Artificial Sequence
  primer
gactcaggacaaggagggatg

SEQ ID NO: 17386 - DNA, 38 bp, Artificial Sequence
  primer
gtaaaacgacggccagtaggtagcaggcaagcagactc

SEQ ID NO: 17387 - DNA, 21 bp, Artificial Sequence
  primer
acagtccaaacagagccaagg

SEQ ID NO: 17388 - DNA, 38 bp, Artificial Sequence
  primer
gtaaaacgacggccagtctctttgcttgtacagctggc

SEQ ID NO: 17389 - DNA, 38 bp, Artificial Sequence
  primer
gtaaaacgacggccagtaccacactggtttccatttcc

SEQ ID NO: 17390 - DNA, 39 bp, Artificial Sequence
  primer
gtaaaacgacggccagtactcagttaatgggagcaatcc

SEQ ID NO: 17391 - DNA, 37 bp, Artificial Sequence
  primer
gtaaaacgacggccagtgtaggcactcatgcacaagg

SEQ ID NO: 17392 - DNA, 38 bp, Artificial Sequence
  primer
gtaaaacgacggccagttgtgatgctgcatttcttctg

SEQ ID NO: 17393 - DNA, 27 bp, Artificial Sequence
  primer
aatttaagccatccataatacaatttc

SEQ ID NO: 17394 - DNA, 38 bp, Artificial Sequence
  primer
gtaaaacgacggccagtcggatgaatcattgcaaattc

SEQ ID NO: 17395 - DNA, 24 bp, Artificial Sequence
  primer
tggtttagatatcctgacctcgtg

SEQ ID NO: 17396 - DNA, 25 bp, Artificial Sequence
  primer
ggagacagttcagatatcctctttg

SEQ ID NO: 17397 - DNA, 20 bp, Artificial Sequence
  primer
cctgggcaagactccatctc

SEQ ID NO: 17398 - DNA, 37 bp, Artificial Sequence
  primer
gtaaaacgacggccagtaaagggcctgtaagtggtcg

SEQ ID NO: 17399 - DNA, 21 bp, Artificial Sequence
  primer
tctccaagctgtgagtgaagg

SEQ ID NO: 17400 - DNA, 38 bp, Artificial Sequence
  primer
gtaaaacgacggccagttttctctttcttgcctggtcc

SEQ ID NO: 17401 - DNA, 38 bp, Artificial Sequence
  primer
gtaaaacgacggccagtcgtagctagttgagcactggg

SEQ ID NO: 17402 - DNA, 38 bp, Artificial Sequence
  primer
gtaaaacgacggccagtccagatcaaagagccttgtgg

SEQ ID NO: 17403 - DNA, 21 bp, Artificial Sequence
  primer
aattcctggagtacgtggctg

SEQ ID NO: 17404 - DNA, 37 bp, Artificial Sequence
  primer
gtaaaacgacggccagtcagtttctggaagctggtgc

SEQ ID NO: 17405 - DNA, 36 bp, Artificial Sequence
  primer
gtaaaacgacggccagtggtcgtgttcttcaacgcc

SEQ ID NO: 17406 - DNA, 18 bp, Artificial Sequence
  primer
ttcgagaagatgggcgtg

SEQ ID NO: 17407 - DNA, 36 bp, Artificial Sequence
  primer
gtaaaacgacggccagtagcacttgaggttcctgcg

SEQ ID NO: 17408 - DNA, 37 bp, Artificial Sequence
  primer
gtaaaacgacggccagtcccacgcaagactgagaaag

SEQ ID NO: 17409 - DNA, 37 bp, Artificial Sequence
  primer
gtaaaacgacggccagttcaagaagacgaatgcccag

SEQ ID NO: 17410 - DNA, 37 bp, Artificial Sequence
  primer
gtaaaacgacggccagtaggagaaggcactggagctg

SEQ ID NO: 17411 - DNA, 20 bp, Artificial Sequence
  primer
ctcacccacagtgaccacac

SEQ ID NO: 17412 - DNA, 21 bp, Artificial Sequence
  primer
tgtcaccctgtgaatttgagc

SEQ ID NO: 17413 - DNA, 21 bp, Artificial Sequence
  primer
aagacacagagggctttggag

SEQ ID NO: 17414 - DNA, 20 bp, Artificial Sequence
  primer
agctgctctgagtggtgcag

SEQ ID NO: 17415 - DNA, 21 bp, Artificial Sequence
  primer
agacctcaaggtggagcacac

SEQ ID NO: 17416 - DNA, 35 bp, Artificial Sequence
  primer
gtaaaacgacggccagtagctctccgcctcccttc

SEQ ID NO: 17417 - DNA, 40 bp, Artificial Sequence
  primer
gtaaaacgacggccagtgaggaacactggcagttactgtg

SEQ ID NO: 17418 - DNA, 26 bp, Artificial Sequence
  primer
tggtgttgtatctgacctagtaaccc

SEQ ID NO: 17419 - DNA, 39 bp, Artificial Sequence
  primer
gtaaaacgacggccagtcctccctcactgttactagccc

SEQ ID NO: 17420 - DNA, 44 bp, Artificial Sequence
  primer
gtaaaacgacggccagtgtgtagtccatctattatcttgaaccc

SEQ ID NO: 17421 - DNA, 24 bp, Artificial Sequence
  primer
gttgtttctgagaatggaatttga

SEQ ID NO: 17422 - DNA, 38 bp, Artificial Sequence
  primer
gtaaaacgacggccagtcagctttggcagtattggatt

SEQ ID NO: 17423 - DNA, 39 bp, Artificial Sequence
  primer
gtaaaacgacggccagtggtttacattggcaagtgcttc

SEQ ID NO: 17424 - DNA, 35 bp, Artificial Sequence
  primer
gtaaaacgacggccagttttggcccatcctttcca

SEQ ID NO: 17425 - DNA, 21 bp, Artificial Sequence
  primer
cttcctgtatccctctcaggc

SEQ ID NO: 17426 - DNA, 38 bp, Artificial Sequence
  primer
gtaaaacgacggccagtccatggaacaaacaaggttgg

SEQ ID NO: 17427 - DNA, 27 bp, Artificial Sequence
  primer
caattgccagtctcttctaaatgtatc

SEQ ID NO: 17428 - DNA, 40 bp, Artificial Sequence
  primer
gtaaaacgacggccagtcatggataaataggcttgactgg

SEQ ID NO: 17429 - DNA, 22 bp, Artificial Sequence
  primer
tcatcctaacacatttcaagcc

SEQ ID NO: 17430 - DNA, 22 bp, Artificial Sequence
  primer
gaattcatctggcaatgatggt

SEQ ID NO: 17431 - DNA, 21 bp, Artificial Sequence
  primer
ccatctatgatgtggcattgg

SEQ ID NO: 17432 - DNA, 23 bp, Artificial Sequence
  primer
gctttcttgtaaagtgtgatggg

SEQ ID NO: 17433 - DNA, 20 bp, Artificial Sequence
  primer
caactgcattgaggtggtgg

SEQ ID NO: 17434 - DNA, 37 bp, Artificial Sequence
  primer
gtaaaacgacggccagtgcttcttatcatcttggcgg

SEQ ID NO: 17435 - DNA, 38 bp, Artificial Sequence
  primer
gtaaaacgacggccagttgatgccctcataaactcagc

SEQ ID NO: 17436 - DNA, 22 bp, Artificial Sequence
  primer
accgaatgcagatttataaccg

SEQ ID NO: 17437 - DNA, 24 bp, Artificial Sequence
  primer
ccaatcagcttcagtagatgtgac

SEQ ID NO: 17438 - DNA, 21 bp, Artificial Sequence
  primer
ctgtaatgagccatgattgcg

SEQ ID NO: 17439 - DNA, 38 bp, Artificial Sequence
  primer
gtaaaacgacggccagtaggcagatcccaatttctctg

SEQ ID NO: 17440 - DNA, 35 bp, Artificial Sequence
  primer
gtaaaacgacggccagtggcacgatttcgggtcac

SEQ ID NO: 17441 - DNA, 21 bp, Artificial Sequence
  primer
agctgttgcaaacccaaattc

SEQ ID NO: 17442 - DNA, 41 bp, Artificial Sequence
  primer
gtaaaacgacggccagtgggcgtaaatatacattctgttgg

SEQ ID NO: 17443 - DNA, 21 bp, Artificial Sequence
  primer
gcctggaaactgccatatctc

SEQ ID NO: 17444 - DNA, 38 bp, Artificial Sequence
  primer
gtaaaacgacggccagtaaagggattctgaggtcatgg

SEQ ID NO: 17445 - DNA, 38 bp, Artificial Sequence
  primer
gtaaaacgacggccagtggttggcagcaatatgtgaaa

SEQ ID NO: 17446 - DNA, 23 bp, Artificial Sequence
  primer
ggtaaggatcgtattctctgctg

SEQ ID NO: 17447 - DNA, 37 bp, Artificial Sequence
  primer
gtaaaacgacggccagtggctcttaagggcagttgtg

SEQ ID NO: 17448 - DNA, 38 bp, Artificial Sequence
  primer
gtaaaacgacggccagttaaatcactgccatcacacgg

SEQ ID NO: 17449 - DNA, 41 bp, Artificial Sequence
  primer
gtaaaacgacggccagtcacaggtaaccttaatgcattgtc

SEQ ID NO: 17450 - DNA, 39 bp, Artificial Sequence
  primer
gtaaaacgacggccagttgtccatggtgtcaagtttctc

SEQ ID NO: 17451 - DNA, 38 bp, Artificial Sequence
  primer
gtaaaacgacggccagtgtgctgggattacaggtgaga

SEQ ID NO: 17452 - DNA, 22 bp, Artificial Sequence
  primer
ccagcaaccatttcatttcaac

SEQ ID NO: 17453 - DNA, 38 bp, Artificial Sequence
  primer
gtaaaacgacggccagttttccacctccaaggtgtatg

SEQ ID NO: 17454 - DNA, 21 bp, Artificial Sequence
  primer
tttcaaacttgcatgtggagc

SEQ ID NO: 17455 - DNA, 21 bp, Artificial Sequence
  primer
tgtaatgataggcggactccc

SEQ ID NO: 17456 - DNA, 20 bp, Artificial Sequence
  primer
cctatcggaagaaggcaagc

SEQ ID NO: 17457 - DNA, 21 bp, Artificial Sequence
  primer
tcaagaaagcagatttggcag

SEQ ID NO: 17458 - DNA, 21 bp, Artificial Sequence
  primer
tcaggcacagcagaaacctac

SEQ ID NO: 17459 - DNA, 22 bp, Artificial Sequence
  primer
gacatgacagcgatactttccc

SEQ ID NO: 17460 - DNA, 38 bp, Artificial Sequence
  primer
gtaaaacgacggccagtatgtgtgagtcagtgtgcagc

SEQ ID NO: 17461 - DNA, 42 bp, Artificial Sequence
  primer
gtaaaacgacggccagttctgggtccttaaagaaacaaagtc

SEQ ID NO: 17462 - DNA, 21 bp, Artificial Sequence
  primer
catctcagttcagaggcaacg

SEQ ID NO: 17463 - DNA, 41 bp, Artificial Sequence
  primer
gtaaaacgacggccagtgcagaactaggtagaaacagaggg

SEQ ID NO: 17464 - DNA, 22 bp, Artificial Sequence
  primer
catgcatctcaggtttgttctg

SEQ ID NO: 17465 - DNA, 21 bp, Artificial Sequence
  primer
tcacccatacacatttggctc

SEQ ID NO: 17466 - DNA, 21 bp, Artificial Sequence
  primer
cgttgctaccgagtgtctgtc

SEQ ID NO: 17467 - DNA, 37 bp, Artificial Sequence
  primer
gtaaaacgacggccagtaaatccaggtgtcccaaagc

SEQ ID NO: 17468 - DNA, 22 bp, Artificial Sequence
  primer
ggcattaattgcatgaatgtgg

SEQ ID NO: 17469 - DNA, 21 bp, Artificial Sequence
  primer
ccatttggtgctagcatctgt

SEQ ID NO: 17470 - DNA, 21 bp, Artificial Sequence
  primer
tttcatttatgctttggctgc

SEQ ID NO: 17471 - DNA, 43 bp, Artificial Sequence
  primer
gtaaaacgacggccagtaattcttaacagagaccagaactttg

SEQ ID NO: 17472 - DNA, 24 bp, Artificial Sequence
  primer
aaacatatgccatggtggaataac

SEQ ID NO: 17473 - DNA, 21 bp, Artificial Sequence
  primer
agcctctgattctgtcaccag

SEQ ID NO: 17474 - DNA, 38 bp, Artificial Sequence
  primer
gtaaaacgacggccagtgtggctttagagggaaggacc

SEQ ID NO: 17475 - DNA, 38 bp, Artificial Sequence
  primer
gtaaaacgacggccagtgtgtctgctccacttccattg

SEQ ID NO: 17476 - DNA, 21 bp, Artificial Sequence
  primer
agcagcagaaatcatcaggtg

SEQ ID NO: 17477 - DNA, 38 bp, Artificial Sequence
  primer
gtaaaacgacggccagtgaccattgtcctttggagcag

SEQ ID NO: 17478 - DNA, 19 bp, Artificial Sequence
  primer
gattgcttgagcccaggag

SEQ ID NO: 17479 - DNA, 20 bp, Artificial Sequence
  primer
cgccatcacactctagcctc

SEQ ID NO: 17480 - DNA, 38 bp, Artificial Sequence
  primer
gtaaaacgacggccagttttcaaacttgcatgtggagc

SEQ ID NO: 17481 - DNA, 38 bp, Artificial Sequence
  primer
gtaaaacgacggccagttgtaatgataggcggactccc

SEQ ID NO: 17482 - DNA, 20 bp, Artificial Sequence
  primer
cctatcggaagaaggcaagc

SEQ ID NO: 17483 - DNA, 21 bp, Artificial Sequence
  primer
tcaagaaagcagatttggcag

SEQ ID NO: 17484 - DNA, 21 bp, Artificial Sequence
  primer
ggaggaagtcttctaccaggc

SEQ ID NO: 17485 - DNA, 21 bp, Artificial Sequence
  primer
tcaggcacagcagaaacctac

SEQ ID NO: 17486 - DNA, 22 bp, Artificial Sequence
  primer
gacatgacagcgatactttccc

SEQ ID NO: 17487 - DNA, 38 bp, Artificial Sequence; identical to SEQ ID NO: 17460
  primer

SEQ ID NO: 17488 - DNA, 42 bp, Artificial Sequence; identical to SEQ ID NO: 17461
  primer

SEQ ID NO: 17489 - DNA, 21 bp, Artificial Sequence
  primer
catctcagttcagaggcaacg

SEQ ID NO: 17490 - DNA, 41 bp, Artificial Sequence; identical to SEQ ID NO: 17463
  primer

SEQ ID NO: 17491 - DNA, 22 bp, Artificial Sequence
  primer
catgcatctcaggtttgttctg

SEQ ID NO: 17492 - DNA, 21 bp, Artificial Sequence
  primer
agcaggagtcctagccctttc

SEQ ID NO: 17493 - DNA, 21 bp, Artificial Sequence
  primer
cgttgctaccgagtgtctgtc

SEQ ID NO: 17494 - DNA, 20 bp, Artificial Sequence
  primer
accaagctggtcttgagctg

SEQ ID NO: 17495 - DNA, 38 bp, Artificial Sequence
  primer
gtaaaacgacggccagtaatgcatccctgtgtaagtgc

SEQ ID NO: 17496 - DNA, 26 bp, Artificial Sequence
  primer
tccttatgatctttaactgttctggg

SEQ ID NO: 17497 - DNA, 20 bp, Artificial Sequence
  primer
tataagccactgtgctcggg

SEQ ID NO: 17498 - DNA, 38 bp, Artificial Sequence
  primer
gtaaaacgacggccagtaaatacacggtttccagcagc

SEQ ID NO: 17499 - DNA, 24 bp, Artificial Sequence
  primer
aaataacctaagggatttgctttg

SEQ ID NO: 17500 - DNA, 21 bp, Artificial Sequence
  primer
tctgcctcatacaggcaattc

SEQ ID NO: 17501 - DNA, 22 bp, Artificial Sequence
  primer
caccaagccatatcttaccacc

SEQ ID NO: 17502 - DNA, 38 bp, Artificial Sequence
  primer
gtaaaacgacggccagttggtgcaagatttcatcacac

SEQ ID NO: 17503 - DNA, 22 bp, Artificial Sequence
  primer
tttaggttcattggaatcaggg

SEQ ID NO: 17504 - DNA, 21 bp, Artificial Sequence
  primer
tgcaaagaccacattggaaag

SEQ ID NO: 17505 - DNA, 21 bp, Artificial Sequence
  primer
agccctttgagagtggaagtg

SEQ ID NO: 17506 - DNA, 39 bp, Artificial Sequence
  primer
gtaaaacgacggccagttctttgccacgtatttctagcc

SEQ ID NO: 17507 - DNA, 38 bp, Artificial Sequence
  primer
gtaaaacgacggccagtccactgtgcccaaacactacc

SEQ ID NO: 17508 - DNA, 24 bp, Artificial Sequence
  primer
tgattctgaagaaccaactttgtc

SEQ ID NO: 17509 - DNA, 37 bp, Artificial Sequence
  primer
gtaaaacgacggccagtcctgcaggaaggacagtgtg

SEQ ID NO: 17510 - DNA, 36 bp, Artificial Sequence
  primer
gtaaaacgacggccagtcttggctgcagcatgtcac

SEQ ID NO: 17511 - DNA, 42 bp, Artificial Sequence
  primer
gtaaaacgacggccagttcatgatttctagaggcaaagaatc

SEQ ID NO: 17512 - DNA, 36 bp, Artificial Sequence
  primer
gtaaaacgacggccagtgttgagctgttgccacctg

SEQ ID NO: 17513 - DNA, 22 bp, Artificial Sequence
  primer
ggtgataaacaagcaacccaag

SEQ ID NO: 17514 - DNA, 21 bp, Artificial Sequence
  primer
atgaacaaatgggcaggactc

SEQ ID NO: 17515 - DNA, 38 bp, Artificial Sequence
  primer
gtaaaacgacggccagtattaaacggaagtttgctggc

SEQ ID NO: 17516 - DNA, 38 bp, Artificial Sequence
  primer
gtaaaacgacggccagtctggccagtttatgaaggagg

SEQ ID NO: 17517 - DNA, 38 bp, Artificial Sequence
  primer
gtaaaacgacggccagttagtgaccttccagggacaac

SEQ ID NO: 17518 - DNA, 41 bp, Artificial Sequence
  primer
gtaaaacgacggccagtggcctgtaaagaccttgaattagc

SEQ ID NO: 17519 - DNA, 25 bp, Artificial Sequence
  primer
ggcttagagaaggaatatttgatgg

SEQ ID NO: 17520 - DNA, 42 bp, Artificial Sequence
  primer
gtaaaacgacggccagtagcatgtctaacagctattcctacc

SEQ ID NO: 17521 - DNA, 41 bp, Artificial Sequence
  primer
gtaaaacgacggccagttctggtattgagccagtattgaag

SEQ ID NO: 17522 - DNA, 21 bp, Artificial Sequence
  primer
ggccacctgcatttaggatag

SEQ ID NO: 17523 - DNA, 38 bp, Artificial Sequence
  primer
gtaaaacgacggccagtgttgttacgaggcattggatg

SEQ ID NO: 17524 - DNA, 42 bp, Artificial Sequence
  primer
gtaaaacgacggccagtcgtactccagaacatttaatatccc

SEQ ID NO: 17525 - DNA, 44 bp, Artificial Sequence
  primer
gtaaaacgacggccagttataatgtggtaaattcatctgctttc

SEQ ID NO: 17526 - DNA, 42 bp, Artificial Sequence
  primer
gtaaaacgacggccagtcaaacaacagttggtattaggaacc

SEQ ID NO: 17527 - DNA, 26 bp, Artificial Sequence
  primer
ttaggatttatcctgtttagaccctg

SEQ ID NO: 17528 - DNA, 42 bp, Artificial Sequence
  primer
gtaaaacgacggccagtggtgcatagtcattatcaatttgtg

SEQ ID NO: 17529 - DNA, 38 bp, Artificial Sequence
  primer
gtaaaacgacggccagtaatggcaaccatggtgaatac

SEQ ID NO: 17530 - DNA, 35 bp, Artificial Sequence
  primer
gtaaaacgacggccagtgtgagccactgtgcctgg

SEQ ID NO: 17531 - DNA, 21 bp, Artificial Sequence
  primer
tatggcagatttagcaggagg

SEQ ID NO: 17532 - DNA, 19 bp, Artificial Sequence
  primer
ctggcctcaagcaatcctc

SEQ ID NO: 17533 - DNA, 22 bp, Artificial Sequence
  primer
gatgggtggtatgctgttaagg

SEQ ID NO: 17534 - DNA, 43 bp, Artificial Sequence
  primer
gtaaaacgacggccagttttaaggcagttctagaagaatgaaa

SEQ ID NO: 17535 - DNA, 22 bp, Artificial Sequence
  primer
tgcctggcctgatacaattaac

SEQ ID NO: 17536 - DNA, 21 bp, Artificial Sequence
  primer
ctcccagattgggtgacagag

SEQ ID NO: 17537 - DNA, 44 bp, Artificial Sequence
  primer
gtaaaacgacggccagtttgtcctgtttaaagccatctagttac

SEQ ID NO: 17538 - DNA, 39 bp, Artificial Sequence
  primer
gtaaaacgacggccagttccactactaatgcccacaaag

SEQ ID NO: 17539 - DNA, 40 bp, Artificial Sequence
  primer
gtaaaacgacggccagtctaccggtacaaacctttcattg

SEQ ID NO: 17540 - DNA, 25 bp, Artificial Sequence
  primer
ggcatattagagtttcctttcttgc

SEQ ID NO: 17541 - DNA, 39 bp, Artificial Sequence
  primer
gtaaaacgacggccagtggcatgtttgacaattggtatc

SEQ ID NO: 17542 - DNA, 19 bp, Artificial Sequence
  primer
cacacctgtctcagcccag

SEQ ID NO: 17543 - DNA, 38 bp, Artificial Sequence
  primer
gtaaaacgacggccagtgactgcctttacctccacctg

SEQ ID NO: 17544 - DNA, 25 bp, Artificial Sequence
  primer
gcatagtccatatgagatctgcctt

SEQ ID NO: 17545 - DNA, 21 bp, Artificial Sequence
  primer
ttctcgagtctttggtcaccc

SEQ ID NO: 17546 - DNA, 21 bp, Artificial Sequence
  primer
tggaagatgacctcactgctc

SEQ ID NO: 17547 - DNA, 21 bp, Artificial Sequence
  primer
tggagtatgacatggacgagg

SEQ ID NO: 17548 - DNA, 21 bp, Artificial Sequence
  primer
gagcagcagtctctgatcgac

SEQ ID NO: 17549 - DNA, 21 bp, Artificial Sequence
  primer
cggtggaaactgacatgctac

SEQ ID NO: 17550 - DNA, 38 bp, Artificial Sequence
  primer
gtaaaacgacggccagtcaggtgtcatggcttagggag

SEQ ID NO: 17551 - DNA, 38 bp, Artificial Sequence
  primer
gtaaaacgacggccagtgggtctcacctgcatggtatc

SEQ ID NO: 17552 - DNA, 20 bp, Artificial Sequence
  primer
gtcctatgcctggacggaag

SEQ ID NO: 17553 - DNA, 37 bp, Artificial Sequence
  primer
gtaaaacgacggccagtagataggatgggcttgtggg

SEQ ID NO: 17554 - DNA, 21 bp, Artificial Sequence
  primer
gccgaaggtgatttgaaagac

SEQ ID NO: 17555 - DNA, 21 bp, Artificial Sequence
  primer
gagccagcaagcgatgtaaac

SEQ ID NO: 17556 - DNA, 38 bp, Artificial Sequence
  primer
gtaaaacgacggccagttgtaacgtcgttgagtcatgc

SEQ ID NO: 17557 - DNA, 38 bp, Artificial Sequence
  primer
gtaaaacgacggccagtacaggttcactccctccagac

SEQ ID NO: 17558 - DNA, 21 bp, Artificial Sequence
  primer
cctggagttggagccttgtag

SEQ ID NO: 17559 - DNA, 21 bp, Artificial Sequence
  primer
ggttggtcagaggaggttcac

SEQ ID NO: 17560 - DNA, 39 bp, Artificial Sequence
  primer
gtaaaacgacggccagtgatgattacatggagcctgctg

SEQ ID NO: 17561 - DNA, 38 bp, Artificial Sequence
  primer
gtaaaacgacggccagtcaacttagcgggttatgctgg

SEQ ID NO: 17562 - DNA, 21 bp, Artificial Sequence
  primer
taaccacctcactagggccag

SEQ ID NO: 17563 - DNA, 23 bp, Artificial Sequence
  primer
ggccgcagtttaagtaactgttc

SEQ ID NO: 17564 - DNA, 38 bp, Artificial Sequence
  primer
gtaaaacgacggccagtgcctctgagaaagatggtgtg

SEQ ID NO: 17565 - DNA, 21 bp, Artificial Sequence
  primer
gttggcaggtaggaagagtgg

SEQ ID NO: 17566 - DNA, 21 bp, Artificial Sequence
  primer
gatctgtggatttcctctggg

SEQ ID NO: 17567 - DNA, 38 bp, Artificial Sequence
  primer
gtaaaacgacggccagtaagagagggctcttcttgtgg

SEQ ID NO: 17568 - DNA, 39 bp, Artificial Sequence
  primer
gtaaaacgacggccagtagctatatcacttggtggctgg

SEQ ID NO: 17569 - DNA, 22 bp, Artificial Sequence
  primer
ggtaagaggttcatgccctttg

SEQ ID NO: 17570 - DNA, 38 bp, Artificial Sequence
  primer
gtaaaacgacggccagtctgggcaggaaataggatcac

SEQ ID NO: 17571 - DNA, 38 bp, Artificial Sequence
  primer
gtaaaacgacggccagttcaagaagggaacttgggaac

SEQ ID NO: 17572 - DNA, 38 bp, Artificial Sequence
  primer
gtaaaacgacggccagtcagcggacagctcaattctac

SEQ ID NO: 17573 - DNA, 21 bp, Artificial Sequence
  primer
ctgttgtgcttcctcctctgc

SEQ ID NO: 17574 - DNA, 37 bp, Artificial Sequence
  primer
gtaaaacgacggccagtcccagtcctcagtccacttg

SEQ ID NO: 17575 - DNA, 20 bp, Artificial Sequence
  primer
ctgcgctgccaaatctgtta

SEQ ID NO: 17576 - DNA, 38 bp, Artificial Sequence
  primer
gtaaaacgacggccagtagagctggtacccgtgttctg

SEQ ID NO: 17577 - DNA, 37 bp, Artificial Sequence
  primer
gtaaaacgacggccagtccttggtgtcctctcctgtg

SEQ ID NO: 17578 - DNA, 21 bp, Artificial Sequence
  primer
aaagcagacacaaccactccc

SEQ ID NO: 17579 - DNA, 21 bp, Artificial Sequence
  primer
gaggctccagagttcatctcg

SEQ ID NO: 17580 - DNA, 37 bp, Artificial Sequence
  primer
gtaaaacgacggccagtaccttcgtaacagctgtggg

SEQ ID NO: 17581 - DNA, 36 bp, Artificial Sequence
  primer
gtaaaacgacggccagtctgaggcagctccgacatc

SEQ ID NO: 17582 - DNA, 21 bp, Artificial Sequence
  primer
agaaagcttggtcccagagag

SEQ ID NO: 17583 - DNA, 38 bp, Artificial Sequence
  primer
gtaaaacgacggccagtcagctcccagactcatgaaag

SEQ ID NO: 17584 - DNA, 37 bp, Artificial Sequence
  primer
gtaaaacgacggccagtagtgtgatggtgtcacgctg

SEQ ID NO: 17585 - DNA, 38 bp, Artificial Sequence
  primer
gtaaaacgacggccagtgacttgtcattctgagcggtg

SEQ ID NO: 17586 - DNA, 38 bp, Artificial Sequence
  primer
gtaaaacgacggccagtatttacctgtggagcagccag

SEQ ID NO: 17587 - DNA, 38 bp, Artificial Sequence
  primer
gtaaaacgacggccagtgtagccattgtggctcctttg

SEQ ID NO: 17588 - DNA, 21 bp, Artificial Sequence
  primer
tgttcgtctctcaggcaaatg

SEQ ID NO: 17589 - DNA, 21 bp, Artificial Sequence
  primer
acttctgactgtgcctgttgg

SEQ ID NO: 17590 - DNA, 38 bp, Artificial Sequence
  primer
gtaaaacgacggccagtagccaagaaaccaacttgctc

SEQ ID NO: 17591 - DNA, 38 bp, Artificial Sequence
  primer
gtaaaacgacggccagtcctcggttgctttctgttgag

SEQ ID NO: 17592 - DNA, 18 bp, Artificial Sequence
  primer
gcctgggtcttgggtgac

SEQ ID NO: 17593 - DNA, 39 bp, Artificial Sequence
  primer
gtaaaacgacggccagtccaacatacatgtggaggaatg

SEQ ID NO: 17594 - DNA, 38 bp, Artificial Sequence
  primer
gtaaaacgacggccagtcactggtccttcctccagatg

SEQ ID NO: 17595 - DNA, 38 bp, Artificial Sequence
  primer
gtaaaacgacggccagtcctttctcagggtcactggtc

SEQ ID NO: 17596 - DNA, 21 bp, Artificial Sequence
  primer
agcagaagaaggtacatgggc

SEQ ID NO: 17597 - DNA, 38 bp, Artificial Sequence
  primer
gtaaaacgacggccagtggcaagtgagagaccgagttc

SEQ ID NO: 17598 - DNA, 20 bp, Artificial Sequence
  primer
ctggaggatgaagagccacc

SEQ ID NO: 17599 - DNA, 21 bp, Artificial Sequence
  primer
cttcccgacaattctctcagg

SEQ ID NO: 17600 - DNA, 38 bp, Artificial Sequence
  primer
gtaaaacgacggccagtagaaacaggtaactggcaggg

SEQ ID NO: 17601 - DNA, 38 bp, Artificial Sequence
  primer
gtaaaacgacggccagtttggacataagcttgctgtgg

SEQ ID NO: 17602 - DNA, 21 bp, Artificial Sequence
  primer
ggacaaacagaaacaggagcc

SEQ ID NO: 17603 - DNA, 35 bp, Artificial Sequence
  primer
gtaaaacgacggccagtaaggagaaggagcggctg

SEQ ID NO: 17604 - DNA, 38 bp, Artificial Sequence
  primer
gtaaaacgacggccagtcatgtggtcctctggactcag

SEQ ID NO: 17605 - DNA, 35 bp, Artificial Sequence
  primer
gtaaaacgacggccagtcttctttcccgcctctgc

SEQ ID NO: 17606 - DNA, 21 bp, Artificial Sequence
  primer
ctctgcatccttagcactccc

SEQ ID NO: 17607 - DNA, 23 bp, Artificial Sequence
  primer
tggttatttctggcatagagacc

SEQ ID NO: 17608 - DNA, 23 bp, Artificial Sequence
  primer
agcttctaagttggagctttgtg

SEQ ID NO: 17609 - DNA, 39 bp, Artificial Sequence
  primer
gtaaaacgacggccagtggtttcctctgacttctgctcc

SEQ ID NO: 17610 - DNA, 44 bp, Artificial Sequence
  primer
gtaaaacgacggccagtaaagtttcattctgggatctacagttt

SEQ ID NO: 17611 - DNA, 24 bp, Artificial Sequence
  primer
ttccctggttaatgacaggataag

SEQ ID NO: 17612 - DNA, 23 bp, Artificial Sequence
  primer
ggtgtgccttactgtttctgttc

SEQ ID NO: 17613 - DNA, 38 bp, Artificial Sequence
  primer
gtaaaacgacggccagtctgcaatccacaacactctgg

SEQ ID NO: 17614 - DNA, 37 bp, Artificial Sequence
  primer
gtaaaacgacggccagtgtagtaagcgcttcccagcc

SEQ ID NO: 17615 - DNA, 38 bp, Artificial Sequence
  primer
gtaaaacgacggccagttcctctccctctcccttgtag

SEQ ID NO: 17616 - DNA, 38 bp, Artificial Sequence
  primer
gtaaaacgacggccagttggaaacagttggctctgatg

SEQ ID NO: 17617 - DNA, 38 bp, Artificial Sequence
  primer
gtaaaacgacggccagtcccagctcacagaatcctctc

SEQ ID NO: 17618 - DNA, 39 bp, Artificial Sequence
  primer
gtaaaacgacggccagtgcctgtaaatacatgccatctg

SEQ ID NO: 17619 - DNA, 21 bp, Artificial Sequence
  primer
tgttgatgtcatttcaagcgg

SEQ ID NO: 17620 - DNA, 21 bp, Artificial Sequence
  primer
cccataagaggagagtcacgg

SEQ ID NO: 17621 - DNA, 38 bp, Artificial Sequence
  primer
gtaaaacgacggccagtgtggtgaagaagggctctcag

SEQ ID NO: 17622 - DNA, 21 bp, Artificial Sequence
  primer
caacgccggtacactatttcc

SEQ ID NO: 17623 - DNA, 24 bp, Artificial Sequence
  primer
ggtgatatttcacttggagaggtg

SEQ ID NO: 17624 - DNA, 21 bp, Artificial Sequence
  primer
aactccaagccttgcactctc

SEQ ID NO: 17625 - DNA, 21 bp, Artificial Sequence
  primer
cctcctagtaaaccactcccg

SEQ ID NO: 17626 - DNA, 40 bp, Artificial Sequence
  primer
gtaaaacgacggccagtgccaggtacttcagccatatttc

SEQ ID NO: 17627 - DNA, 21 bp, Artificial Sequence
  primer
ttgttcggaaattgactgctg

SEQ ID NO: 17628 - DNA, 22 bp, Artificial Sequence
  primer
tgaagaactgggagttaggcag

SEQ ID NO: 17629 - DNA, 24 bp, Artificial Sequence
  primer
ccaaggacctttgggataattaag

SEQ ID NO: 17630 - DNA, 37 bp, Artificial Sequence
  primer
gtaaaacgacggccagtaactgctggagctttgttgg

SEQ ID NO: 17631 - DNA, 38 bp, Artificial Sequence
  primer
gtaaaacgacggccagtatgcaggagttgctctcatcc

SEQ ID NO: 17632 - DNA, 39 bp, Artificial Sequence
  primer
gtaaaacgacggccagtcgcttatgtgatctcaaggtgg

SEQ ID NO: 17633 - DNA, 38 bp, Artificial Sequence
  primer
gtaaaacgacggccagtgcccatctccatctttgtagc

SEQ ID NO: 17634 - DNA, 21 bp, Artificial Sequence
  primer
atgatgatcctcagtccctgc

SEQ ID NO: 17635 - DNA, 22 bp, Artificial Sequence
  primer
cctgttaaggtgaccattggag

SEQ ID NO: 17636 - DNA, 21 bp, Artificial Sequence
  primer
atgtaaaggagagctgcaggg

SEQ ID NO: 17637 - DNA, 38 bp, Artificial Sequence
  primer
gtaaaacgacggccagtgtcaggaaacagcgtgaggtc

SEQ ID NO: 17638 - DNA, 38 bp, Artificial Sequence
  primer
gtaaaacgacggccagtggtgagaggattgagtctggg

SEQ ID NO: 17639 - DNA, 38 bp, Artificial Sequence
  primer
gtaaaacgacggccagttaggcttctgtggaactgctg

SEQ ID NO: 17640 - DNA, 22 bp, Artificial Sequence
  primer
ttagcatttaagtcctggcagc

SEQ ID NO: 17641 - DNA, 38 bp, Artificial Sequence
  primer
gtaaaacgacggccagtagggctgcttgattctttagc

SEQ ID NO: 17642 - DNA, 21 bp, Artificial Sequence
  primer
tcagtttctgtgctagaggcg

SEQ ID NO: 17643 - DNA, 39 bp, Artificial Sequence
  primer
gtaaaacgacggccagtttctactgaactcgggagatgg

SEQ ID NO: 17644 - DNA, 38 bp, Artificial Sequence
  primer
gtaaaacgacggccagtgcatgtggcattgttgatatg

SEQ ID NO: 17645 - DNA, 40 bp, Artificial Sequence
  primer
gtaaaacgacggccagtgggcagccttcatttactctatg

SEQ ID NO: 17646 - DNA, 40 bp, Artificial Sequence
  primer
gtaaaacgacggccagtaactaagtctgcttggccagata

SEQ ID NO: 17647 - DNA, 36 bp, Artificial Sequence
  primer
gtaaaacgacggccagtgctgacagtctgcattccc

SEQ ID NO: 17648 - DNA, 21 bp, Artificial Sequence
  primer
tgtttggcccattgtaaacag

SEQ ID NO: 17649 - DNA, 21 bp, Artificial Sequence
  primer
agggctaaactccaaagaggc

SEQ ID NO: 17650 - DNA, 38 bp, Artificial Sequence
  primer
gtaaaacgacggccagtaggtaaatccctgctgctctg

SEQ ID NO: 17651 - DNA, 38 bp, Artificial Sequence
  primer
gtaaaacgacggccagtttgttgatgtaagggctaccg

SEQ ID NO: 17652 - DNA, 21 bp, Artificial Sequence
  primer
aaggctagagctgggacattg

SEQ ID NO: 17653 - DNA, 21 bp, Artificial Sequence
  primer
tttcatgcaagaccaatgtgc

SEQ ID NO: 17654 - DNA, 37 bp, Artificial Sequence
  primer
gtaaaacgacggccagtcaggtgaggctgtgaccatc

SEQ ID NO: 17655 - DNA, 38 bp, Artificial Sequence
  primer
gtaaaacgacggccagtgtcggtagaagctgggttagg

SEQ ID NO: 17656 - DNA, 38 bp, Artificial Sequence
  primer
gtaaaacgacggccagtattaagccctgcttgttggtc

SEQ ID NO: 17657 - DNA, 38 bp, Artificial Sequence
  primer
gtaaaacgacggccagtagcaagagaggtgagactggg

SEQ ID NO: 17658 - DNA, 37 bp, Artificial Sequence
  primer
gtaaaacgacggccagtttgggtcatggaccactttg

SEQ ID NO: 17659 - DNA, 38 bp, Artificial Sequence
  primer
gtaaaacgacggccagtgtaatgtcagcgaattgtccg

SEQ ID NO: 17660 - DNA, 21 bp, Artificial Sequence
  primer
aacagggcttggtcttgtcac

SEQ ID NO: 17661 - DNA, 37 bp, Artificial Sequence
  primer
gtaaaacgacggccagtcagtgtgctcctgcccttag

SEQ ID NO: 17662 - DNA, 38 bp, Artificial Sequence
  primer
gtaaaacgacggccagttaggtcaggaagcagaccttg

SEQ ID NO: 17663 - DNA, 22 bp, Artificial Sequence
  primer
acttcctctttgaacagttgcc

SEQ ID NO: 17664 - DNA, 21 bp, Artificial Sequence
  primer
gcttgagcctaggagttggag

SEQ ID NO: 17665 - DNA, 39 bp, Artificial Sequence
  primer
gtaaaacgacggccagttccacatgtcctctgggattag

SEQ ID NO: 17666 - DNA, 26 bp, Artificial Sequence
  primer
tgctaatggagagagtaactgtgaat

SEQ ID NO: 17667 - DNA, 21 bp, Artificial Sequence
  primer
taggaccagaacagggtcgtc

SEQ ID NO: 17668 - DNA, 23 bp, Artificial Sequence
  primer
aattggaataatcaaaccggaag

SEQ ID NO: 17669 - DNA, 21 bp, Artificial Sequence
  primer
aaagacactctgcaaaccagg

SEQ ID NO: 17670 - DNA, 22 bp, Artificial Sequence
  primer
tcaatgggaaaggtggtaattc

SEQ ID NO: 17671 - DNA, 36 bp, Artificial Sequence
  primer
gtaaaacgacggccagttgttccacacacgagcagg

SEQ ID NO: 17672 - DNA, 38 bp, Artificial Sequence
  primer
gtaaaacgacggccagttcctgtggaaaccattcctaa

SEQ ID NO: 17673 - DNA, 40 bp, Artificial Sequence
  primer
gtaaaacgacggccagtcagttgctctctctagttgcagg

SEQ ID NO: 17674 - DNA, 38 bp, Artificial Sequence
  primer
gtaaaacgacggccagtactgccttccataaagtgggc

SEQ ID NO: 17675 - DNA, 44 bp, Artificial Sequence
  primer
gtaaaacgacggccagtctgtctaatcctgtgtgtgtagatttc

SEQ ID NO: 17676 - DNA, 38 bp, Artificial Sequence
  primer
gtaaaacgacggccagtttggtgccaataatctttccc

SEQ ID NO: 17677 - DNA, 38 bp, Artificial Sequence
  primer
gtaaaacgacggccagttgtcaaatctggatggtggac

SEQ ID NO: 17678 - DNA, 24 bp, Artificial Sequence
  primer
ccagcatgagtcttaatacgtttc

SEQ ID NO: 17679 - DNA, 21 bp, Artificial Sequence
  primer
cattcttgactttggagtggc

SEQ ID NO: 17680 - DNA, 39 bp, Artificial Sequence
  primer
gtaaaacgacggccagttgtgagcaaatgaggctaaagg

SEQ ID NO: 17681 - DNA, 21 bp, Artificial Sequence
  primer
tgagcaattccaatcctgatg

SEQ ID NO: 17682 - DNA, 38 bp, Artificial Sequence
  primer
gtaaaacgacggccagtctcatgtgatcctccaccttg

SEQ ID NO: 17683 - DNA, 20 bp, Artificial Sequence
  primer
ctccatctcctgacctcgtg

SEQ ID NO: 17684 - DNA, 43 bp, Artificial Sequence
  primer
gtaaaacgacggccagtcatctaactaggttagggaaacacaa

SEQ ID NO: 17685 - DNA, 26 bp, Artificial Sequence
  primer
catataatggccaagttatttaatgc

SEQ ID NO: 17686 - DNA, 40 bp, Artificial Sequence
  primer
gtaaaacgacggccagtttcatagtgtctgacctggaagg

SEQ ID NO: 17687 - DNA, 25 bp, Artificial Sequence
  primer
aaagtacatgaagccctttagaatc

SEQ ID NO: 17688 - DNA, 27 bp, Artificial Sequence
  primer
tctggtctatgtgttagaagatagtgg

SEQ ID NO: 17689 - DNA, 43 bp, Artificial Sequence
  primer
gtaaaacgacggccagtttgtatgatttgttcctaaatgttgc

SEQ ID NO: 17690 - DNA, 38 bp, Artificial Sequence
  primer
gtaaaacgacggccagttaggactaccctgtccctccc

SEQ ID NO: 17691 - DNA, 21 bp, Artificial Sequence
  primer
taaagtcagtgctggtgagcg

SEQ ID NO: 17692 - DNA, 38 bp, Artificial Sequence
  primer
gtaaaacgacggccagtttcatgcaagaggaactgctg

SEQ ID NO: 17693 - DNA, 22 bp, Artificial Sequence
  primer
gagtcttcatgtcttggcttcc

SEQ ID NO: 17694 - DNA, 22 bp, Artificial Sequence
  primer
tctggatgacaaagtgagaccc

SEQ ID NO: 17695 - DNA, 39 bp, Artificial Sequence
  primer
gtaaaacgacggccagttgggtatatggctaaggaggag

SEQ ID NO: 17696 - DNA, 42 bp, Artificial Sequence
  primer
gtaaaacgacggccagttttaagaactctttctgatcctccc

SEQ ID NO: 17697 - DNA, 38 bp, Artificial Sequence
  primer
gtaaaacgacggccagtccagtggactgtgagcttgac

SEQ ID NO: 17698 - DNA, 21 bp, Artificial Sequence
  primer
ttaacctaggcagttggtggc

SEQ ID NO: 17699 - DNA, 41 bp, Artificial Sequence
  primer
gtaaaacgacggccagtcagttgttgaatgtaggtagtggg

SEQ ID NO: 17700 - DNA, 22 bp, Artificial Sequence
  primer
cccatctcaaagtcaataaccc

SEQ ID NO: 17701 - DNA, 21 bp, Artificial Sequence
  primer
cacacctttcatccaaactgc

SEQ ID NO: 17702 - DNA, 21 bp, Artificial Sequence
  primer
aaagctcccagttgcactttg

SEQ ID NO: 17703 - DNA, 35 bp, Artificial Sequence
  primer
gtaaaacgacggccagtaatctgcggctgcgaatc

SEQ ID NO: 17704 - DNA, 21 bp, Artificial Sequence
  primer
ccgctttgttctcactttgtg

SEQ ID NO: 17705 - DNA, 38 bp, Artificial Sequence
  primer
gtaaaacgacggccagttcttaaagttgctgctgtggc

SEQ ID NO: 17706 - DNA, 38 bp, Artificial Sequence
  primer
gtaaaacgacggccagtcttcctgatcaaaggtggagc

SEQ ID NO: 17707 - DNA, 21 bp, Artificial Sequence
  primer
ggcttagaggaagaaggcagg

SEQ ID NO: 17708 - DNA, 37 bp, Artificial Sequence
  primer
gtaaaacgacggccagtgcctggaaagacaagtgcag

SEQ ID NO: 17709 - DNA, 38 bp, Artificial Sequence
  primer
gtaaaacgacggccagtcacagacacgtcttctcaggc

SEQ ID NO: 17710 - DNA, 38 bp, Artificial Sequence
  primer
gtaaaacgacggccagttcttggactcaagcaatccac

SEQ ID NO: 17711 - DNA, 21 bp, Artificial Sequence
  primer
cacacagactctgggaagtgc

SEQ ID NO: 17712 - DNA, 39 bp, Artificial Sequence
  primer
gtaaaacgacggccagtaaggtaaccaaccaatcttccc

SEQ ID NO: 17713 - DNA, 21 bp, Artificial Sequence
  primer
ttctatgggttacctggcagc

SEQ ID NO: 17714 - DNA, 39 bp, Artificial Sequence
  primer
gtaaaacgacggccagtgggttctagaaagcccttagcc

SEQ ID NO: 17715 - DNA, 37 bp, Artificial Sequence
  primer
gtaaaacgacggccagtggtggaaatacttcccgctg

SEQ ID NO: 17716 - DNA, 38 bp, Artificial Sequence
  primer
gtaaaacgacggccagtgagctgtggatgagggagaac

SEQ ID NO: 17717 - DNA, 35 bp, Artificial Sequence
  primer
gtaaaacgacggccagtcttctgagggcctgagcc

SEQ ID NO: 17718 - DNA, 21 bp, Artificial Sequence
  primer
gctctgtgttgatgtgcagtg

SEQ ID NO: 17719 - DNA, 21 bp, Artificial Sequence
  primer
gggatcttgatgctgacacag

SEQ ID NO: 17720 - DNA, 21 bp, Artificial Sequence
  primer
tggagcctgagtcttctaggg

SEQ ID NO: 17721 - DNA, 38 bp, Artificial Sequence
  primer
gtaaaacgacggccagtcctcctacttcttgctgcctc

SEQ ID NO: 17722 - DNA, 21 bp, Artificial Sequence
  primer
cagcagatgctcaatgatttg

SEQ ID NO: 17723 - DNA, 27 bp, Artificial Sequence
  primer
gcaagtttagcagatctaagtaagtcc

SEQ ID NO: 17724 - DNA, 38 bp, Artificial Sequence
  primer
gtaaaacgacggccagtgagtgggctgtctttcctcac

SEQ ID NO: 17725 - DNA, 37 bp, Artificial Sequence
  primer
gtaaaacgacggccagtgcagatcggctttcatgttc

SEQ ID NO: 17726 - DNA, 21 bp, Artificial Sequence
  primer
ggcctggttacgagttctgag

SEQ ID NO: 17727 - DNA, 35 bp, Artificial Sequence
  primer
gtaaaacgacggccagtccggtcttgtgactgggc

SEQ ID NO: 17728 - DNA, 19 bp, Artificial Sequence
  primer
agattagcgccgaatcagg

SEQ ID NO: 17729 - DNA, 38 bp, Artificial Sequence
  primer
gtaaaacgacggccagtgttattgaatgcaagggtggc

SEQ ID NO: 17730 - DNA, 18 bp, Artificial Sequence
  primer
accttgccctagccggag

SEQ ID NO: 17731 - DNA, 21 bp, Artificial Sequence
  primer
cccaggtataaactcccaagc

SEQ ID NO: 17732 - DNA, 38 bp, Artificial Sequence
  primer
gtaaaacgacggccagtgtgtcctcatggagcaaagtg

SEQ ID NO: 17733 - DNA, 21 bp, Artificial Sequence
  primer
acctgtcccagtatttcagcc

SEQ ID NO: 17734 - DNA, 39 bp, Artificial Sequence
  primer
gtaaaacgacggccagttttctgtttccagatttctccc

SEQ ID NO: 17735 - DNA, 21 bp, Artificial Sequence
  primer
tgctattgttgtgttccctgg

SEQ ID NO: 17736 - DNA, 19 bp, Artificial Sequence
  primer
tgtccaggtttgccaggta

SEQ ID NO: 17737 - DNA, 24 bp, Artificial Sequence
  primer
aaataagccttacatcctggttcc

SEQ ID NO: 17738 - DNA, 38 bp, Artificial Sequence
  primer
gtaaaacgacggccagtggcctttgagaacaactagcc

SEQ ID NO: 17739 - DNA, 38 bp, Artificial Sequence
  primer
gtaaaacgacggccagttccatgtgaggtttgataacg

SEQ ID NO: 17740 - DNA, 38 bp, Artificial Sequence
  primer
gtaaaacgacggccagtagccttgtggctttaatgatg

SEQ ID NO: 17741 - DNA, 39 bp, Artificial Sequence
  primer
gtaaaacgacggccagttgaaatatcttgcctgctgttg

SEQ ID NO: 17742 - DNA, 26 bp, Artificial Sequence
  primer
cacattcatgtcctaagaatgtcaag

SEQ ID NO: 17743 - DNA, 26 bp, Artificial Sequence
  primer
atcaaactatagcaattctgttcacc

SEQ ID NO: 17744 - DNA, 40 bp, Artificial Sequence
  primer
gtaaaacgacggccagtgaaggtaccagctctttcaaatg

SEQ ID NO: 17745 - DNA, 37 bp, Artificial Sequence
  primer
gtaaaacgacggccagtacaggtgtgagccactttgc

SEQ ID NO: 17746 - DNA, 44 bp, Artificial Sequence
  primer
gtaaaacgacggccagtaattgttaaacttgttgcttgatcttt

SEQ ID NO: 17747 - DNA, 21 bp, Artificial Sequence
  primer
acttgccgtagtcacattggc

SEQ ID NO: 17748 - DNA, 41 bp, Artificial Sequence
  primer
gtaaaacgacggccagtgaagatgcagagtttgtaaattgg

SEQ ID NO: 17749 - DNA, 43 bp, Artificial Sequence
  primer
gtaaaacgacggccagtcttgagatcacacagctgattagtta

SEQ ID NO: 17750 - DNA, 42 bp, Artificial Sequence
  primer
gtaaaacgacggccagtcattgtgttggatagcttctgtaac

SEQ ID NO: 17751 - DNA, 38 bp, Artificial Sequence
  primer
gtaaaacgacggccagtattcattcttgagctccctgc

SEQ ID NO: 17752 - DNA, 20 bp, Artificial Sequence
  primer
ccacaagcccaactttcaac

SEQ ID NO: 17753 - DNA, 21 bp, Artificial Sequence
  primer
aacacatcgtttggatcatgc

SEQ ID NO: 17754 - DNA, 38 bp, Artificial Sequence
  primer
gtaaaacgacggccagtcagccagagaagtgaaagctg

SEQ ID NO: 17755 - DNA, 38 bp, Artificial Sequence
  primer
gtaaaacgacggccagtctgggatcgagttgtgttcag

SEQ ID NO: 17756 - DNA, 21 bp, Artificial Sequence
  primer
acacacaggccctacacacag

SEQ ID NO: 17757 - DNA, 37 bp, Artificial Sequence
  primer
gtaaaacgacggccagtgaatgggtgctgggtatgtg

SEQ ID NO: 17758 - DNA, 21 bp, Artificial Sequence
  primer
gtggttctgtaccctcttccc

SEQ ID NO: 17759 - DNA, 38 bp, Artificial Sequence
  primer
gtaaaacgacggccagtctctgcagggatctacaaggg

SEQ ID NO: 17760 - DNA, 38 bp, Artificial Sequence
  primer
gtaaaacgacggccagtgaagtgcagtgacctcttccc

SEQ ID NO: 17761 - DNA, 38 bp, Artificial Sequence
  primer
gtaaaacgacggccagttaggaggtggaacctgacctc

SEQ ID NO: 17762 - DNA, 21 bp, Artificial Sequence
  primer
acaagtcctcttgctcaaggc

SEQ ID NO: 17763 - DNA, 39 bp, Artificial Sequence
  primer
gtaaaacgacggccagttggctcaagaaagttaggatgg

SEQ ID NO: 17764 - DNA, 37 bp, Artificial Sequence
  primer
gtaaaacgacggccagtcctgcgggttaggttgtgag

SEQ ID NO: 17765 - DNA, 20 bp, Artificial Sequence
  primer
gggctcaatctgtcctcctg

SEQ ID NO: 17766 - DNA, 43 bp, Artificial Sequence
  primer
gtaaaacgacggccagtgggaattgaccattaaagagtgatag

SEQ ID NO: 17767 - DNA, 40 bp, Artificial Sequence
  primer
gtaaaacgacggccagtgacagaattcctgtagggaagtg

SEQ ID NO: 17768 - DNA, 21 bp, Artificial Sequence
  primer
aaagcaaaccaaagcatcata

SEQ ID NO: 17769 - DNA, 38 bp, Artificial Sequence
  primer
gtaaaacgacggccagttatacccagctgccaatgaag

SEQ ID NO: 17770 - DNA, 38 bp, Artificial Sequence
  primer
gtaaaacgacggccagttgctcataaatcatcgttcca

SEQ ID NO: 17771 - DNA, 25 bp, Artificial Sequence
  primer
cacctctaggagaaattgttatccc

SEQ ID NO: 17772 - DNA, 43 bp, Artificial Sequence
  primer
gtaaaacgacggccagtgcatggattgatgttaattgttaatg

SEQ ID NO: 17773 - DNA, 21 bp, Artificial Sequence
  primer
ggatgatctgctgtgttgctg

SEQ ID NO: 17774 - DNA, 18 bp, Artificial Sequence
  primer
ccaccatctctggccctg

SEQ ID NO: 17775 - DNA, 23 bp, Artificial Sequence
  primer
cagttctgctctaaggattgcac

SEQ ID NO: 17776 - DNA, 21 bp, Artificial Sequence
  primer
acctgcaagatggaaacgaag

SEQ ID NO: 17777 - DNA, 40 bp, Artificial Sequence
  primer
gtaaaacgacggccagtaatggaactgttcatctctgtgg

SEQ ID NO: 17778 - DNA, 38 bp, Artificial Sequence
  primer
gtaaaacgacggccagtgtctgggcctaagcatttcag

SEQ ID NO: 17779 - DNA, 38 bp, Artificial Sequence
  primer
gtaaaacgacggccagtacatagggcaggataaccagg

SEQ ID NO: 17780 - DNA, 21 bp, Artificial Sequence
  primer
acctgccgaaaggtctacaag

SEQ ID NO: 17781 - DNA, 38 bp, Artificial Sequence
  primer
gtaaaacgacggccagtccttccaagccttaggtttcc

SEQ ID NO: 17782 - DNA, 21 bp, Artificial Sequence
  primer
taatggaccgactggagaagg

SEQ ID NO: 17783 - DNA, 38 bp, Artificial Sequence
  primer
gtaaaacgacggccagtcaacacggtcttcctagagcc

SEQ ID NO: 17784 - DNA, 38 bp, Artificial Sequence
  primer
gtaaaacgacggccagtgatggcaccactctttcttcc

SEQ ID NO: 17785 - DNA, 38 bp, Artificial Sequence
  primer
gtaaaacgacggccagtgtttcctgggctctcttctcc

SEQ ID NO: 17786 - DNA, 38 bp, Artificial Sequence
  primer
gtaaaacgacggccagtgagtacacccagctgtgaggg

SEQ ID NO: 17787 - DNA, 38 bp, Artificial Sequence
  primer
gtaaaacgacggccagtggaggttgctggatgtgtttc

SEQ ID NO: 17788 - DNA, 38 bp, Artificial Sequence
  primer
gtaaaacgacggccagtggatgagtgggtttcttgctg

SEQ ID NO: 17789 - DNA, 39 bp, Artificial Sequence
  primer
gtaaaacgacggccagtccaacgttagctggagtaatgg

SEQ ID NO: 17790 - DNA, 38 bp, Artificial Sequence
  primer
gtaaaacgacggccagtgccaactgtggtagacactgc

SEQ ID NO: 17791 - DNA, 38 bp, Artificial Sequence
  primer
gtaaaacgacggccagtgttaggtcatcagcctagccc

SEQ ID NO: 17792 - DNA, 21 bp, Artificial Sequence
  primer
acagcagtaagttcccttgcc

SEQ ID NO: 17793 - DNA, 38 bp, Artificial Sequence
  primer
gtaaaacgacggccagtgcatgataccctctctgtccc

SEQ ID NO: 17794 - DNA, 37 bp, Artificial Sequence
  primer
gtaaaacgacggccagtgcttgggtggtgtgtttgag

SEQ ID NO: 17795 - DNA, 38 bp, Artificial Sequence
  primer
gtaaaacgacggccagtaggatgaatgggtgcataagg

SEQ ID NO: 17796 - DNA, 21 bp, Artificial Sequence
  primer
cgaggtagacattgatggacg

SEQ ID NO: 17797 - DNA, 38 bp, Artificial Sequence
  primer
gtaaaacgacggccagtacatggatgaggaggaccttg

SEQ ID NO: 17798 - DNA, 20 bp, Artificial Sequence
  primer
aacagaccagtgatgggcac

SEQ ID NO: 17799 - DNA, 21 bp, Artificial Sequence
  primer
atatctgcaagcagaaagggc

SEQ ID NO: 17800 - DNA, 21 bp, Artificial Sequence
  primer
aagcctttctctgaggtgagg

SEQ ID NO: 17801 - DNA, 38 bp, Artificial Sequence
  primer
gtaaaacgacggccagtctcttggaactgtgggtcaag

SEQ ID NO: 17802 - DNA, 38 bp, Artificial Sequence
  primer
gtaaaacgacggccagttcctaggctaaaggttgggtg

SEQ ID NO: 17803 - DNA, 21 bp, Artificial Sequence
  primer
ggccaagagtattggtgaagg

SEQ ID NO: 17804 - DNA, 38 bp, Artificial Sequence
  primer
gtaaaacgacggccagtccaggcattccaagagagagt

SEQ ID NO: 17805 - DNA, 21 bp, Artificial Sequence
  primer
acttgagcccaggagtttgtg

SEQ ID NO: 17806 - DNA, 21 bp, Artificial Sequence
  primer
tgatagcaaacctccaagcag

SEQ ID NO: 17807 - DNA, 21 bp, Artificial Sequence
  primer
catcctctccactcgtcactg

SEQ ID NO: 17808 - DNA, 21 bp, Artificial Sequence
  primer
ggtgagaaactgtcctccctg

SEQ ID NO: 17809 - DNA, 38 bp, Artificial Sequence
  primer
gtaaaacgacggccagtttgtgactcattcctgggttg

SEQ ID NO: 17810 - DNA, 38 bp, Artificial Sequence
  primer
gtaaaacgacggccagttgtcctaagggacattggagg

SEQ ID NO: 17811 - DNA, 37 bp, Artificial Sequence
  primer
gtaaaacgacggccagtgtaccctctccctggctttg

SEQ ID NO: 17812 - DNA, 21 bp, Artificial Sequence
  primer
ccagtcctgcacctagtcctc

SEQ ID NO: 17813 - DNA, 21 bp, Artificial Sequence
  primer
gacagtgtgtggtgaacctcc

SEQ ID NO: 17814 - DNA, 37 bp, Artificial Sequence
  primer
gtaaaacgacggccagttgatatgggctgcgtaggtc

SEQ ID NO: 17815 - DNA, 37 bp, Artificial Sequence
  primer
gtaaaacgacggccagtacatgcctgtgaggatttgg

SEQ ID NO: 17816 - DNA, 38 bp, Artificial Sequence
  primer
gtaaaacgacggccagtgggatctttgtcattgcttcc

SEQ ID NO: 17817 - DNA, 38 bp, Artificial Sequence
  primer
gtaaaacgacggccagtacaggtgtgcatctccatgtc

SEQ ID NO: 17818 - DNA, 21 bp, Artificial Sequence
  primer
ggccaaatgcatgagaattta

SEQ ID NO: 17819 - DNA, 21 bp, Artificial Sequence
  primer
ctcatctctcgtcccactcag

SEQ ID NO: 17820 - DNA, 36 bp, Artificial Sequence
  primer
gtaaaacgacggccagtgaaggctgtccctccagtg

SEQ ID NO: 17821 - DNA, 18 bp, Artificial Sequence
  primer
aatgcagctcatttgcgg

SEQ ID NO: 17822 - DNA, 38 bp, Artificial Sequence
  primer
gtaaaacgacggccagtccttgataaggctgtcagcag

SEQ ID NO: 17823 - DNA, 21 bp, Artificial Sequence
  primer
gatggtagactcatgctgccc

SEQ ID NO: 17824 - DNA, 38 bp, Artificial Sequence
  primer
gtaaaacgacggccagttgctactccaggtttgcactg

SEQ ID NO: 17825 - DNA, 41 bp, Artificial Sequence
  primer
gtaaaacgacggccagttggagtctatttcaagggtgtttc

SEQ ID NO: 17826 - DNA, 39 bp, Artificial Sequence
  primer
gtaaaacgacggccagtgtagctccttggttgaaactgg

SEQ ID NO: 17827 - DNA, 38 bp, Artificial Sequence
  primer
gtaaaacgacggccagtagagctgaggcactggttctc

SEQ ID NO: 17828 - DNA, 22 bp, Artificial Sequence
  primer
ccttccacacacaacctgtttc

SEQ ID NO: 17829 - DNA, 37 bp, Artificial Sequence
  primer
gtaaaacgacggccagtgttgcaggaatcagagccag

SEQ ID NO: 17830 - DNA, 38 bp, Artificial Sequence
  primer
gtaaaacgacggccagtgcattggacgtgacaatcaac

SEQ ID NO: 17831 - DNA, 21 bp, Artificial Sequence
  primer
cacaaataaaggatggagcgg

SEQ ID NO: 17832 - DNA, 38 bp, Artificial Sequence
  primer
gtaaaacgacggccagtcggagggtagaactggatgac

SEQ ID NO: 17833 - DNA, 39 bp, Artificial Sequence
  primer
gtaaaacgacggccagtcaagatcagaggttaccatgcc

SEQ ID NO: 17834 - DNA, 21 bp, Artificial Sequence
  primer
ccgaaagagaattgccagaac

SEQ ID NO: 17835 - DNA, 18 bp, Artificial Sequence
  primer
ctgggccatgctgactcc

SEQ ID NO: 17836 - DNA, 38 bp, Artificial Sequence
  primer
gtaaaacgacggccagtattgttaaacagccagcccag

SEQ ID NO: 17837 - DNA, 20 bp, Artificial Sequence
  primer
actgcatcacgggtcagaag

SEQ ID NO: 17838 - DNA, 21 bp, Artificial Sequence
  primer
gaattggagttctctgccacc

SEQ ID NO: 17839 - DNA, 38 bp, Artificial Sequence
  primer
gtaaaacgacggccagttccactgtgagagccagtcag

SEQ ID NO: 17840 - DNA, 21 bp, Artificial Sequence
  primer
cacagagacctaaagcccgag

SEQ ID NO: 17841 - DNA, 19 bp, Artificial Sequence
  primer
ggctggaggctcacatcag

SEQ ID NO: 17842 - DNA, 38 bp, Artificial Sequence
  primer
gtaaaacgacggccagtgtggagatcaccgtagttccc

SEQ ID NO: 17843 - DNA, 21 bp, Artificial Sequence
  primer
caggagtaaggaggcgaacag

SEQ ID NO: 17844 - DNA, 35 bp, Artificial Sequence
  primer
gtaaaacgacggccagtgggtccgggatcattgag

SEQ ID NO: 17845 - DNA, 21 bp, Artificial Sequence
  primer
aaccatgggcagaaatacagg

SEQ ID NO: 17846 - DNA, 21 bp, Artificial Sequence
  primer
gtgcagtttctgaggcagttg

SEQ ID NO: 17847 - DNA, 21 bp, Artificial Sequence
  primer
catttcctcacctggaaggac

SEQ ID NO: 17848 - DNA, 38 bp, Artificial Sequence
  primer
gtaaaacgacggccagtctttgctatccttgctctggg

SEQ ID NO: 17849 - DNA, 21 bp, Artificial Sequence
  primer
gctctggattacctcccattg

SEQ ID NO: 17850 - DNA, 38 bp, Artificial Sequence
  primer
gtaaaacgacggccagtctaccagtccctaccgctgag

SEQ ID NO: 17851 - DNA, 38 bp, Artificial Sequence
  primer
gtaaaacgacggccagtatgggactcgtagttccttgg

SEQ ID NO: 17852 - DNA, 36 bp, Artificial Sequence
  primer
gtaaaacgacggccagtgtggagggactgggttctg

SEQ ID NO: 17853 - DNA, 37 bp, Artificial Sequence
  primer
gtaaaacgacggccagtgattggagctagagcctcgg

SEQ ID NO: 17854 - DNA, 21 bp, Artificial Sequence
  primer
cagcactgagctgttctggac

SEQ ID NO: 17855 - DNA, 36 bp, Artificial Sequence
  primer
gtaaaacgacggccagtcaaaggcagtgtctgtggg

SEQ ID NO: 17856 - DNA, 21 bp, Artificial Sequence
  primer
gagatccaccatagtcagggc

SEQ ID NO: 17857 - DNA, 38 bp, Artificial Sequence
  primer
gtaaaacgacggccagtttatgtgtgattggcgtttgg

SEQ ID NO: 17858 - DNA, 21 bp, Artificial Sequence
  primer
gagaggctgggacccacttac

SEQ ID NO: 17859 - DNA, 35 bp, Artificial Sequence
  primer
gtaaaacgacggccagtccaggtgctgctaggctg

SEQ ID NO: 17860 - DNA, 36 bp, Artificial Sequence
  primer
gtaaaacgacggccagtcttgctggtggtgagaccc

SEQ ID NO: 17861 - DNA, 37 bp, Artificial Sequence
  primer
gtaaaacgacggccagtccctcacctcctaatgtggg

SEQ ID NO: 17862 - DNA, 37 bp, Artificial Sequence
  primer
gtaaaacgacggccagtacagggagagtggcaggatg

SEQ ID NO: 17863 - DNA, 36 bp, Artificial Sequence
  primer
gtaaaacgacggccagtacagcatgcactcactggg

SEQ ID NO: 17864 - DNA, 38 bp, Artificial Sequence
  primer
gtaaaacgacggccagtcgagataggtatgggtccagg

SEQ ID NO: 17865 - DNA, 37 bp, Artificial Sequence
  primer
gtaaaacgacggccagtctcctggagggtttacctgg

SEQ ID NO: 17866 - DNA, 19 bp, Artificial Sequence
  primer
aagctgaccgacaagcctc

SEQ ID NO: 17867 - DNA, 21 bp, Artificial Sequence
  primer
actcctgatgaccctgacctc

SEQ ID NO: 17868 - DNA, 38 bp, Artificial Sequence
  primer
gtaaaacgacggccagttctatcacgaagcgatggaag

SEQ ID NO: 17869 - DNA, 19 bp, Artificial Sequence
  primer
cctcacggaagcagaggtg

SEQ ID NO: 17870 - DNA, 37 bp, Artificial Sequence
  primer
gtaaaacgacggccagtcaccttcaccctgctctcag

SEQ ID NO: 17871 - DNA, 19 bp, Artificial Sequence
  primer
tacccactcctggctccac

SEQ ID NO: 17872 - DNA, 20 bp, Artificial Sequence
  primer
agcctgggaggaaaggaaag

SEQ ID NO: 17873 - DNA, 21 bp, Artificial Sequence
  primer
agaacccgagtgtgtgtatgc

SEQ ID NO: 17874 - DNA, 37 bp, Artificial Sequence
  primer
gtaaaacgacggccagtgagaacagtgcacgggagag

SEQ ID NO: 17875 - DNA, 37 bp, Artificial Sequence
  primer
gtaaaacgacggccagtacctgagtgctgggtgtctg

SEQ ID NO: 17876 - DNA, 35 bp, Artificial Sequence
  primer
gtaaaacgacggccagtctcccgctccgactaagc

SEQ ID NO: 17877 - DNA, 38 bp, Artificial Sequence
  primer
gtaaaacgacggccagtgtctctgggcttcttggtgtc

SEQ ID NO: 17878 - DNA, 38 bp, Artificial Sequence
  primer
gtaaaacgacggccagtccagggatgttaaggaactgg

SEQ ID NO: 17879 - DNA, 21 bp, Artificial Sequence
  primer
gattggtctccaggagctgag

SEQ ID NO: 17880 - DNA, 38 bp, Artificial Sequence
  primer
gtaaaacgacggccagtgagtgaagctttatgggtggg

SEQ ID NO: 17881 - DNA, 38 bp, Artificial Sequence
  primer
gtaaaacgacggccagtcactcagggtttctgtctcgg

SEQ ID NO: 17882 - DNA, 38 bp, Artificial Sequence
  primer
gtaaaacgacggccagtctgcctgcactgaaatctctc

SEQ ID NO: 17883 - DNA, 21 bp, Artificial Sequence
  primer
aactcgctcacctctcctctg

SEQ ID NO: 17884 - DNA, 21 bp, Artificial Sequence
  primer
cagagactaggcgcaggtcag

SEQ ID NO: 17885 - DNA, 18 bp, Artificial Sequence
  primer
ccttccggcctcagtttc

SEQ ID NO: 17886 - DNA, 21 bp, Artificial Sequence
  primer
tatgcatctgtggatggaagc

SEQ ID NO: 17887 - DNA, 21 bp, Artificial Sequence
  primer
agagttcgccacacagtttcc

SEQ ID NO: 17888 - DNA, 35 bp, Artificial Sequence
  primer
gtaaaacgacggccagtgagggaggaatcccggag

SEQ ID NO: 17889 - DNA, 38 bp, Artificial Sequence
  primer
gtaaaacgacggccagtctggccatgtaggtctctgtg

SEQ ID NO: 17890 - DNA, 38 bp, Artificial Sequence
  primer
gtaaaacgacggccagtgctaacatgaatccagggacc

SEQ ID NO: 17891 - DNA, 38 bp, Artificial Sequence
  primer
gtaaaacgacggccagtcaagatacccagcctgacctc

SEQ ID NO: 17892 - DNA, 38 bp, Artificial Sequence
  primer
gtaaaacgacggccagttgtcacatccagcagataggc

SEQ ID NO: 17893 - DNA, 38 bp, Artificial Sequence
  primer
gtaaaacgacggccagtgattccagttcagcttctgcc

SEQ ID NO: 17894 - DNA, 37 bp, Artificial Sequence
  primer
gtaaaacgacggccagtatgatcacacccactcctgc

SEQ ID NO: 17895 - DNA, 20 bp, Artificial Sequence
  primer
tctttctgggtgtctgaggc

SEQ ID NO: 17896 - DNA, 37 bp, Artificial Sequence
  primer
gtaaaacgacggccagtggccacagcataggaacaag

SEQ ID NO: 17897 - DNA, 38 bp, Artificial Sequence
  primer
gtaaaacgacggccagtagggcttctcagaaagcagag

SEQ ID NO: 17898 - DNA, 21 bp, Artificial Sequence
  primer
gccactaagttcctgtcaccc

SEQ ID NO: 17899 - DNA, 38 bp, Artificial Sequence
  primer
gtaaaacgacggccagtagttcctcaggctactctcgg

SEQ ID NO: 17900 - DNA, 39 bp, Artificial Sequence
  primer
gtaaaacgacggccagtcaccagtaaaggtgacctgagc

SEQ ID NO: 17901 - DNA, 38 bp, Artificial Sequence
  primer
gtaaaacgacggccagtgaaaggacctgatgggaaagg

SEQ ID NO: 17902 - DNA, 18 bp, Artificial Sequence
  primer
tccagcctcgtggtcaag

SEQ ID NO: 17903 - DNA, 37 bp, Artificial Sequence
  primer
gtaaaacgacggccagtggcctttagcctggtagctg

SEQ ID NO: 17904 - DNA, 21 bp, Artificial Sequence
  primer
acactccctgagcttctcacc

SEQ ID NO: 17905 - DNA, 38 bp, Artificial Sequence
  primer
gtaaaacgacggccagtgtgagggttatggtggactgg

SEQ ID NO: 17906 - DNA, 38 bp, Artificial Sequence
  primer
gtaaaacgacggccagtagcagcagagagaaggtgagg

SEQ ID NO: 17907 - DNA, 21 bp, Artificial Sequence
  primer
gtttgatggaactggcctgac

SEQ ID NO: 17908 - DNA, 38 bp, Artificial Sequence
  primer
gtaaaacgacggccagtgcgaaactaggacgaggagtg

SEQ ID NO: 17909 - DNA, 21 bp, Artificial Sequence
  primer
cagcacctacccagatcgaag

SEQ ID NO: 17910 - DNA, 38 bp, Artificial Sequence
  primer
gtaaaacgacggccagtagagatctgggagtcgtggtg

SEQ ID NO: 17911 - DNA, 21 bp, Artificial Sequence
  primer
ttcaggatttccttctcgacc

SEQ ID NO: 17912 - DNA, 44 bp, Artificial Sequence
  primer
gtaaaacgacggccagttgctctataatgaatggaacaatttag

SEQ ID NO: 17913 - DNA, 22 bp, Artificial Sequence
  primer
gacatttgcttctgagacatgg

SEQ ID NO: 17914 - DNA, 22 bp, Artificial Sequence
  primer
gacttctcacagggcagaattg

SEQ ID NO: 17915 - DNA, 45 bp, Artificial Sequence
  primer
gtaaaacgacggccagtttgctactggatccctattatatgtaga

SEQ ID NO: 17916 - DNA, 42 bp, Artificial Sequence
  primer
gtaaaacgacggccagtaggaaagttaaatagtcccttgaaa

SEQ ID NO: 17917 - DNA, 38 bp, Artificial Sequence
  primer
gtaaaacgacggccagtgtagtgcgctaacattctggc

SEQ ID NO: 17918 - DNA, 26 bp, Artificial Sequence
  primer
gaagacaaccttgtgtttctttaagc

SEQ ID NO: 17919 - DNA, 23 bp, Artificial Sequence
  primer
gaggtttccctatgtctggtttg

SEQ ID NO: 17920 - DNA, 26 bp, Artificial Sequence
  primer
cagtagtatgtgagggctaatgtgtt

SEQ ID NO: 17921 - DNA, 21 bp, Artificial Sequence
  primer
aatgggtattgccctatgcag

SEQ ID NO: 17922 - DNA, 43 bp, Artificial Sequence
  primer
gtaaaacgacggccagttgaacctaactgatagcacactgaag

SEQ ID NO: 17923 - DNA, 39 bp, Artificial Sequence
  primer
gtaaaacgacggccagtttaacaaggagaagttaccgcc

SEQ ID NO: 17924 - DNA, 38 bp, Artificial Sequence
  primer
gtaaaacgacggccagtagggaatacagggcaacaaag

SEQ ID NO: 17925 - DNA, 46 bp, Artificial Sequence
  primer
gtaaaacgacggccagttggttaagtcagacacataagctagtaca

SEQ ID NO: 17926 - DNA, 46 bp, Artificial Sequence
  primer
gtaaaacgacggccagtagcaattcttacagcagtactatatttga

SEQ ID NO: 17927 - DNA, 38 bp, Artificial Sequence
  primer
gtaaaacgacggccagttggaaatgctggtaatggttg

SEQ ID NO: 17928 - DNA, 37 bp, Artificial Sequence
  primer
gtaaaacgacggccagtgtctgtgggactttgcaacc

SEQ ID NO: 17929 - DNA, 27 bp, Artificial Sequence
  primer
gagggttatatttggactcaagaaatc

SEQ ID NO: 17930 - DNA, 41 bp, Artificial Sequence
  primer
gtaaaacgacggccagtcagccatgtcatttataatgctgt

SEQ ID NO: 17931 - DNA, 38 bp, Artificial Sequence
  primer
gtaaaacgacggccagtttcacgtggtagtcaagggac

SEQ ID NO: 17932 - DNA, 41 bp, Artificial Sequence
  primer
gtaaaacgacggccagtcaaacagaagaggatgtttgtagg

SEQ ID NO: 17933 - DNA, 39 bp, Artificial Sequence
  primer
gtaaaacgacggccagttgtagtgcctggcatttagaga

SEQ ID NO: 17934 - DNA, 39 bp, Artificial Sequence
  primer
gtaaaacgacggccagtttctagggactgtgaggtttgc

SEQ ID NO: 17935 - DNA, 42 bp, Artificial Sequence
  primer
gtaaaacgacggccagtttcagaaagatttctaccacttgga

SEQ ID NO: 17936 - DNA, 38 bp, Artificial Sequence
  primer
gtaaaacgacggccagttgccctctaagtttcatagcg

SEQ ID NO: 17937 - DNA, 21 bp, Artificial Sequence
  primer
tatggagccaattccagaagg

SEQ ID NO: 17938 - DNA, 44 bp, Artificial Sequence
  primer
gtaaaacgacggccagtaaagtagtatatcaccctcccttcttg

SEQ ID NO: 17939 - DNA, 39 bp, Artificial Sequence
  primer
gtaaaacgacggccagtttggaacacctttgacacactg

SEQ ID NO: 17940 - DNA, 21 bp, Artificial Sequence
  primer
tttcaatgagccagacagtcc

SEQ ID NO: 17941 - DNA, 38 bp, Artificial Sequence
  primer
gtaaaacgacggccagttgggaaagtttggtgtgagtc

SEQ ID NO: 17942 - DNA, 26 bp, Artificial Sequence
  primer
ccatttccatgaatataatgtctagg

SEQ ID NO: 17943 - DNA, 42 bp, Artificial Sequence
  primer
gtaaaacgacggccagtaattccttcaccttaaagtacagcc

SEQ ID NO: 17944 - DNA, 39 bp, Artificial Sequence
  primer
gtaaaacgacggccagtgtgtttatttcatggtggatcg

SEQ ID NO: 17945 - DNA, 24 bp, Artificial Sequence
  primer
tgatgcttaatattggtctaggca

SEQ ID NO: 17946 - DNA, 25 bp, Artificial Sequence
  primer
gccagctaatacctgaccttgatac

SEQ ID NO: 17947 - DNA, 39 bp, Artificial Sequence
  primer
gtaaaacgacggccagttctgacattcaaccctttgttc

SEQ ID NO: 17948 - DNA, 21 bp, Artificial Sequence
  primer
gtctgacaccctccatgattg

SEQ ID NO: 17949 - DNA, 21 bp, Artificial Sequence
  primer
ccttacaaatggtgatggcag

SEQ ID NO: 17950 - DNA, 38 bp, Artificial Sequence
  primer
gtaaaacgacggccagtaaattggaagaccagaggcac

SEQ ID NO: 17951 - DNA, 21 bp, Artificial Sequence
  primer
aacgagcacgtattgcagatg

SEQ ID NO: 17952 - DNA, 38 bp, Artificial Sequence
  primer
gtaaaacgacggccagttctctttccaggaaccaccag

SEQ ID NO: 17953 - DNA, 38 bp, Artificial Sequence
  primer
gtaaaacgacggccagtgcctgttctgagagaagggag

SEQ ID NO: 17954 - DNA, 21 bp, Artificial Sequence
  primer
acagattgaaaggcccgttag

SEQ ID NO: 17955 - DNA, 38 bp, Artificial Sequence
  primer
gtaaaacgacggccagtgaagaagccgccttcatagac

SEQ ID NO: 17956 - DNA, 21 bp, Artificial Sequence
  primer
ccattagcccaggattctacc

SEQ ID NO: 17957 - DNA, 38 bp, Artificial Sequence
  primer
gtaaaacgacggccagtgtgacagagccagctgtaacc

SEQ ID NO: 17958 - DNA, 38 bp, Artificial Sequence
  primer
gtaaaacgacggccagtttgatctttgtgggtggtcag

SEQ ID NO: 17959 - DNA, 38 bp, Artificial Sequence
  primer
gtaaaacgacggccagtggcttagggtatcaccgactg

SEQ ID NO: 17960 - DNA, 21 bp, Artificial Sequence
  primer
tacagaggatggtgagagccc

SEQ ID NO: 17961 - DNA, 37 bp, Artificial Sequence
  primer
gtaaaacgacggccagtctgtccgaggaggagaaacc

SEQ ID NO: 17962 - DNA, 18 bp, Artificial Sequence
  primer
gaagaaatgcgcaggctc

SEQ ID NO: 17963 - DNA, 18 bp, Artificial Sequence
  primer
cctggctgggagtcctgt

SEQ ID NO: 17964 - DNA, 35 bp, Artificial Sequence
  primer
gtaaaacgacggccagtgctcttcccttcccggag

SEQ ID NO: 17965 - DNA, 38 bp, Artificial Sequence
  primer
gtaaaacgacggccagtcttcaagggtccttcctaccc

SEQ ID NO: 17966 - DNA, 39 bp, Artificial Sequence
  primer
gtaaaacgacggccagtggttcagacttgactgggacag

SEQ ID NO: 17967 - DNA, 21 bp, Artificial Sequence
  primer
gactgtcgggagaagttgttg

SEQ ID NO: 17968 - DNA, 18 bp, Artificial Sequence
  primer
gccctcaggactgggtga

SEQ ID NO: 17969 - DNA, 35 bp, Artificial Sequence
  primer
gtaaaacgacggccagttgtgatggcagctcctgg

SEQ ID NO: 17970 - DNA, 21 bp, Artificial Sequence
  primer
cctgtaagttccagctgtggg

SEQ ID NO: 17971 - DNA, 35 bp, Artificial Sequence
  primer
gtaaaacgacggccagtgagagtgtgagcaccgcc

SEQ ID NO: 17972 - DNA, 38 bp, Artificial Sequence
  primer
gtaaaacgacggccagttagcttggtagagacctccgc

SEQ ID NO: 17973 - DNA, 37 bp, Artificial Sequence
  primer
gtaaaacgacggccagtctgtgctaggagtggccttg

SEQ ID NO: 17974 - DNA, 21 bp, Artificial Sequence
  primer
cctcactggtaagctcttcgg

SEQ ID NO: 17975 - DNA, 22 bp, Artificial Sequence
  primer
gctttgaaagttctctcctccc

SEQ ID NO: 17976 - DNA, 21 bp, Artificial Sequence
  primer
agtggctctgtctgaactgcc

SEQ ID NO: 17977 - DNA, 38 bp, Artificial Sequence
  primer
gtaaaacgacggccagtcagaaggagatagggtgggtg

SEQ ID NO: 17978 - DNA, 21 bp, Artificial Sequence
  primer
aagccttactctcaggatgcg

SEQ ID NO: 17979 - DNA, 36 bp, Artificial Sequence
  primer
gtaaaacgacggccagtggagcaagccactctccag

SEQ ID NO: 17980 - DNA, 21 bp, Artificial Sequence
  primer
cgactatgtggaggacagcag

SEQ ID NO: 17981 - DNA, 19 bp, Artificial Sequence
  primer
cgtcgcttcaagaccattg

SEQ ID NO: 17982 - DNA, 21 bp, Artificial Sequence
  primer
ctggagatggagagcctaacg

SEQ ID NO: 17983 - DNA, 38 bp, Artificial Sequence
  primer
gtaaaacgacggccagtccacccagtaacttgtcaccc

SEQ ID NO: 17984 - DNA, 38 bp, Artificial Sequence
  primer
gtaaaacgacggccagtgagtacaacctgcccaccttc

SEQ ID NO: 17985 - DNA, 18 bp, Artificial Sequence
  primer
ctcctcacgagacctggc

SEQ ID NO: 17986 - DNA, 21 bp, Artificial Sequence
  primer
gttattcccgatgtccgtgtc

SEQ ID NO: 17987 - DNA, 38 bp, Artificial Sequence
  primer
gtaaaacgacggccagtaccactgcaaactatgggtcc

SEQ ID NO: 17988 - DNA, 21 bp, Artificial Sequence
  primer
ctacacagacgccaagtccag

SEQ ID NO: 17989 - DNA, 38 bp, Artificial Sequence
  primer
gtaaaacgacggccagttgctgagaacatctccctgtg

SEQ ID NO: 17990 - DNA, 38 bp, Artificial Sequence
  primer
gtaaaacgacggccagtagcagcctgtggtctatggag

SEQ ID NO: 17991 - DNA, 41 bp, Artificial Sequence
  primer
gtaaaacgacggccagttttgccagatataacctacccaac

SEQ ID NO: 17992 - DNA, 37 bp, Artificial Sequence
  primer
gtaaaacgacggccagtactgtgaccacactgctccc

SEQ ID NO: 17993 - DNA, 19 bp, Artificial Sequence
  primer
cctgagaagagcatggcag

SEQ ID NO: 17994 - DNA, 38 bp, Artificial Sequence
  primer
gtaaaacgacggccagtgcctggtaggctgtactcctc

SEQ ID NO: 17995 - DNA, 21 bp, Artificial Sequence
  primer
tactcagaccacaggtacggc

SEQ ID NO: 17996 - DNA, 38 bp, Artificial Sequence
  primer
gtaaaacgacggccagtctgaccttgtgcagtaccagc

SEQ ID NO: 17997 - DNA, 21 bp, Artificial Sequence
  primer
gctgatggcatgatctactcg

SEQ ID NO: 17998 - DNA, 38 bp, Artificial Sequence
  primer
gtaaaacgacggccagtcaaggccagagatgccagtag

SEQ ID NO: 17999 - DNA, 39 bp, Artificial Sequence
  primer
gtaaaacgacggccagtttcgagaaagaggaagcatcac

SEQ ID NO: 18000 - DNA, 20 bp, Artificial Sequence
  primer
aggagctgcagaccatcaag

SEQ ID NO: 18001 - DNA, 19 bp, Artificial Sequence
  primer
agaaggctccctttcctgc

SEQ ID NO: 18002 - DNA, 37 bp, Artificial Sequence
  primer
gtaaaacgacggccagtcccttacacatgcagccttc

SEQ ID NO: 18003 - DNA, 38 bp, Artificial Sequence
  primer
gtaaaacgacggccagtagccgtagtggcatcaagaag

SEQ ID NO: 18004 - DNA, 21 bp, Artificial Sequence
  primer
gacgaagacagtgctgagtgg

SEQ ID NO: 18005 - DNA, 37 bp, Artificial Sequence
  primer
gtaaaacgacggccagtactgcctcatcatccagtgc

SEQ ID NO: 18006 - DNA, 38 bp, Artificial Sequence
  primer
gtaaaacgacggccagtatcgtcaggtacatatcggcg

SEQ ID NO: 18007 - DNA, 35 bp, Artificial Sequence
  primer
gtaaaacgacggccagtagattgggtaccaggccc

SEQ ID NO: 18008 - DNA, 21 bp, Artificial Sequence
  primer
acctcctttgcttccagtgag

SEQ ID NO: 18009 - DNA, 38 bp, Artificial Sequence
  primer
gtaaaacgacggccagtcatcaagtcaccacaccttgg

SEQ ID NO: 18010 - DNA, 36 bp, Artificial Sequence
  primer
gtaaaacgacggccagtaagaagcaggcagagctgg

SEQ ID NO: 18011 - DNA, 19 bp, Artificial Sequence
  primer
gtttgtggacttccctgcc

SEQ ID NO: 18012 - DNA, 21 bp, Artificial Sequence
  primer
tttcctcctggtgccagttac

SEQ ID NO: 18013 - DNA, 21 bp, Artificial Sequence
  primer
ctagccgacttggagcagaag

SEQ ID NO: 18014 - DNA, 21 bp, Artificial Sequence
  primer
ggagaaccaggtgtccttgac

SEQ ID NO: 18015 - DNA, 21 bp, Artificial Sequence
  primer
gacagtgactacaggcatggg

SEQ ID NO: 18016 - DNA, 21 bp, Artificial Sequence
  primer
gtagagtcagacctggcgtcc

SEQ ID NO: 18017 - DNA, 21 bp, Artificial Sequence
  primer
tcatccctaagtatggcccac

SEQ ID NO: 18018 - DNA, 38 bp, Artificial Sequence
  primer
gtaaaacgacggccagttctcttggtttctttgcatgg

SEQ ID NO: 18019 - DNA, 38 bp, Artificial Sequence
  primer
gtaaaacgacggccagttggtctctgaagcgtatcacc

SEQ ID NO: 18020 - DNA, 38 bp, Artificial Sequence
  primer
gtaaaacgacggccagtagaagggtcagcctgggtatc

SEQ ID NO: 18021 - DNA, 21 bp, Artificial Sequence
  primer
catgcctctgacagcaagaag

SEQ ID NO: 18022 - DNA, 38 bp, Artificial Sequence
  primer
gtaaaacgacggccagtcatgggttgtaaccagggaag

SEQ ID NO: 18023 - DNA, 38 bp, Artificial Sequence
  primer
gtaaaacgacggccagtcgtgggtacttgccctcttag

SEQ ID NO: 18024 - DNA, 21 bp, Artificial Sequence
  primer
tgattccagactcagtcaccc

SEQ ID NO: 18025 - DNA, 38 bp, Artificial Sequence
  primer
gtaaaacgacggccagtctgtgtaagcctgtctcggtg

SEQ ID NO: 18026 - DNA, 20 bp, Artificial Sequence
  primer
agaggtttgccaattccctg

SEQ ID NO: 18027 - DNA, 21 bp, Artificial Sequence
  primer
acatacccaaagcaaacaggg

SEQ ID NO: 18028 - DNA, 21 bp, Artificial Sequence
  primer
tcctaccctaggtcttgcagc

SEQ ID NO: 18029 - DNA, 38 bp, Artificial Sequence
  primer
gtaaaacgacggccagtaacactcctttccactgagcc

SEQ ID NO: 18030 - DNA, 38 bp, Artificial Sequence
  primer
gtaaaacgacggccagtacatggagccctttctggtag

SEQ ID NO: 18031 - DNA, 38 bp, Artificial Sequence
  primer
gtaaaacgacggccagtgtgatcctctcccacatcagg

SEQ ID NO: 18032 - DNA, 21 bp, Artificial Sequence
  primer
ttctcgtgatcacccagtgag

SEQ ID NO: 18033 - DNA, 38 bp, Artificial Sequence
  primer
gtaaaacgacggccagtgatgatcgaaagaccctgacc

SEQ ID NO: 18034 - DNA, 38 bp, Artificial Sequence
  primer
gtaaaacgacggccagtgcaaacagcgagatatccgag

SEQ ID NO: 18035 - DNA, 21 bp, Artificial Sequence
  primer
cacctaagccatgacaattcg

SEQ ID NO: 18036 - DNA, 38 bp, Artificial Sequence
  primer
gtaaaacgacggccagtatgagaactggattgcccaac

SEQ ID NO: 18037 - DNA, 39 bp, Artificial Sequence
  primer
gtaaaacgacggccagtgattgagtgggaagaactgtgg

SEQ ID NO: 18038 - DNA, 44 bp, Artificial Sequence
  primer
gtaaaacgacggccagtccagacatggattactgagtctatgag

SEQ ID NO: 18039 - DNA, 24 bp, Artificial Sequence
  primer
ccattaacagctgatgaatacagg

SEQ ID NO: 18040 - DNA, 38 bp, Artificial Sequence
  primer
gtaaaacgacggccagttcttgggtcctgcaggtttac

SEQ ID NO: 18041 - DNA, 38 bp, Artificial Sequence
  primer
gtaaaacgacggccagttcctggtctcaagcagtcctc

SEQ ID NO: 18042 - DNA, 35 bp, Artificial Sequence
  primer
gtaaaacgacggccagtctgctcatggcttctcgc

SEQ ID NO: 18043 - DNA, 38 bp, Artificial Sequence
  primer
gtaaaacgacggccagtgctattggtcaggacgtttcc

SEQ ID NO: 18044 - DNA, 21 bp, Artificial Sequence
  primer
agtgtgtggttgtggctgttc

SEQ ID NO: 18045 - DNA, 20 bp, Artificial Sequence
  primer
agcttgagggtgagaaaggg

SEQ ID NO: 18046 - DNA, 21 bp, Artificial Sequence
  primer
aagacccaggatctcctttgc

SEQ ID NO: 18047 - DNA, 38 bp, Artificial Sequence
  primer
gtaaaacgacggccagtctctctggaaactagcgcctc

SEQ ID NO: 18048 - DNA, 41 bp, Artificial Sequence
  primer
gtaaaacgacggccagtgcgtaggtcttcattcatagcatc

SEQ ID NO: 18049 - DNA, 21 bp, Artificial Sequence
  primer
tttggatggctgccaaattac

SEQ ID NO: 18050 - DNA, 38 bp, Artificial Sequence
  primer
gtaaaacgacggccagtgtgtgtgtaacccatgcaacc

SEQ ID NO: 18051 - DNA, 20 bp, Artificial Sequence
  primer
tttattggcagaagggatgc

SEQ ID NO: 18052 - DNA, 25 bp, Artificial Sequence
  primer
gaagcatatgtgtatctgttgggag

SEQ ID NO: 18053 - DNA, 25 bp, Artificial Sequence
  primer
gttagtcgtttgatacatgggattt

SEQ ID NO: 18054 - DNA, 21 bp, Artificial Sequence
  primer
gcagtgacttgagattgcacc

SEQ ID NO: 18055 - DNA, 21 bp, Artificial Sequence
  primer
aagggagtgaaagcaatgtgg

SEQ ID NO: 18056 - DNA, 24 bp, Artificial Sequence
  primer
tgaattgaattaatgatcaaaggg

SEQ ID NO: 18057 - DNA, 37 bp, Artificial Sequence
  primer
gtaaaacgacggccagtcatttaagggaggctttgcc

SEQ ID NO: 18058 - DNA, 38 bp, Artificial Sequence
  primer
gtaaaacgacggccagtggaatttagctgtcatgtggc

SEQ ID NO: 18059 - DNA, 38 bp, Artificial Sequence
  primer
gtaaaacgacggccagtgataccatttggcagggtttg

SEQ ID NO: 18060 - DNA, 37 bp, Artificial Sequence
  primer
gtaaaacgacggccagttcacatggtgtcagcatcac

SEQ ID NO: 18061 - DNA, 40 bp, Artificial Sequence
  primer
gtaaaacgacggccagttccagcttcccagtgattatatg

SEQ ID NO: 18062 - DNA, 44 bp, Artificial Sequence
  primer
gtaaaacgacggccagtaaacctcagtattcctaaagataagtg

SEQ ID NO: 18063 - DNA, 29 bp, Artificial Sequence
  primer
ttaacataagtaaggagaaaccgttattt

SEQ ID NO: 18064 - DNA, 23 bp, Artificial Sequence
  primer
gtcattataccttctgtgggaaa

SEQ ID NO: 18065 - DNA, 44 bp, Artificial Sequence
  primer
gtaaaacgacggccagttggtagtctacaaatgacgatttctgt

SEQ ID NO: 18066 - DNA, 39 bp, Artificial Sequence
  primer
gtaaaacgacggccagtttgctgtctaccctttaggagc

SEQ ID NO: 18067 - DNA, 22 bp, Artificial Sequence
  primer
aatgaagccacatcatctttcg

SEQ ID NO: 18068 - DNA, 39 bp, Artificial Sequence
  primer
gtaaaacgacggccagtttgccatttcattgtctaagga

SEQ ID NO: 18069 - DNA, 42 bp, Artificial Sequence
  primer
gtaaaacgacggccagtaaatctagttaggtgttgtaggccc

SEQ ID NO: 18070 - DNA, 18 bp, Artificial Sequence
  primer
gcactgcagcctggatga

SEQ ID NO: 18071 - DNA, 45 bp, Artificial Sequence
  primer
gtaaaacgacggccagtttcctgagtatgggctattatagttaca

SEQ ID NO: 18072 - DNA, 21 bp, Artificial Sequence
  primer
gaatcataggcctggagggtc

SEQ ID NO: 18073 - DNA, 41 bp, Artificial Sequence
  primer
gtaaaacgacggccagtgcacctttaatgcttgtcaatttc

SEQ ID NO: 18074 - DNA, 20 bp, Artificial Sequence
  primer
aagtgatcctcccaccttgg

SEQ ID NO: 18075 - DNA, 42 bp, Artificial Sequence
  primer
gtaaaacgacggccagttctagcaggagatcattgtcatagg

SEQ ID NO: 18076 - DNA, 36 bp, Artificial Sequence
  primer
gtaaaacgacggccagtgggcttagtgggcagattg

SEQ ID NO: 18077 - DNA, 26 bp, Artificial Sequence
  primer
tgaggaatgacatagatttctttagg

SEQ ID NO: 18078 - DNA, 22 bp, Artificial Sequence
  primer
gggaaggagacttgaggatttc

SEQ ID NO: 18079 - DNA, 21 bp, Artificial Sequence
  primer
gctccagtcgagagcaagaag

SEQ ID NO: 18080 - DNA, 38 bp, Artificial Sequence
  primer
gtaaaacgacggccagttattggcctttgctggttatg

SEQ ID NO: 18081 - DNA, 27 bp, Artificial Sequence
  primer
gaaatagcatagggaaagatacagaga

SEQ ID NO: 18082 - DNA, 21 bp, Artificial Sequence
  primer
tcttgccacagagaggaatgt

SEQ ID NO: 18083 - DNA, 41 bp, Artificial Sequence
  primer
gtaaaacgacggccagtttactaaattcaatgcagtttgcc

SEQ ID NO: 18084 - DNA, 38 bp, Artificial Sequence
  primer
gtaaaacgacggccagttacaagccctctgactcgttg

SEQ ID NO: 18085 - DNA, 26 bp, Artificial Sequence
  primer
tcacttgaagtactcaattctgttga

SEQ ID NO: 18086 - DNA, 37 bp, Artificial Sequence
  primer
gtaaaacgacggccagtcagtcctgttacacctcccg

SEQ ID NO: 18087 - DNA, 20 bp, Artificial Sequence
  primer
agctggagatggcctcactc

SEQ ID NO: 18088 - DNA, 21 bp, Artificial Sequence
  primer
cgggaacctctctacaactgg

SEQ ID NO: 18089 - DNA, 36 bp, Artificial Sequence
  primer
gtaaaacgacggccagtagatgaatggatggctggg

SEQ ID NO: 18090 - DNA, 38 bp, Artificial Sequence
  primer
gtaaaacgacggccagtttgttcttagcagggcatttg

SEQ ID NO: 18091 - DNA, 22 bp, Artificial Sequence
  primer
tgtgtctgttggtattgcttgg

SEQ ID NO: 18092 - DNA, 42 bp, Artificial Sequence
  primer
gtaaaacgacggccagtcgtcctctagatttgaatttacgtt

SEQ ID NO: 18093 - DNA, 25 bp, Artificial Sequence
  primer
gttcctcttaagttcaaatctgctc

SEQ ID NO: 18094 - DNA, 38 bp, Artificial Sequence
  primer
gtaaaacgacggccagtacacacgcacacattgctaag

SEQ ID NO: 18095 - DNA, 23 bp, Artificial Sequence
  primer
gctgggctgtacattcagtattt

SEQ ID NO: 18096 - DNA, 21 bp, Artificial Sequence
  primer
caccaagatttccttgctcac

SEQ ID NO: 18097 - DNA, 21 bp, Artificial Sequence
  primer
tttccattgtcaggagagcag

SEQ ID NO: 18098 - DNA, 37 bp, Artificial Sequence
  primer
gtaaaacgacggccagtgtgacatggaaatgggcaac

SEQ ID NO: 18099 - DNA, 38 bp, Artificial Sequence
  primer
gtaaaacgacggccagtgtgacactgctgtggaaggtg

SEQ ID NO: 18100 - DNA, 38 bp, Artificial Sequence
  primer
gtaaaacgacggccagtggtgtgtgccatcattagctc

SEQ ID NO: 18101 - DNA, 38 bp, Artificial Sequence
  primer
gtaaaacgacggccagtaggaaaggagaatgcaggtcc

SEQ ID NO: 18102 - DNA, 21 bp, Artificial Sequence
  primer
gcagtaagccatgatcacacc

SEQ ID NO: 18103 - DNA, 38 bp, Artificial Sequence
  primer
gtaaaacgacggccagtcggtttctggaactaagtggc

SEQ ID NO: 18104 - DNA, 38 bp, Artificial Sequence
  primer
gtaaaacgacggccagtatgtttcgtgttgcagtttgg

SEQ ID NO: 18105 - DNA, 21 bp, Artificial Sequence
  primer
tttgcagctactcagcgaaag

SEQ ID NO: 18106 - DNA, 38 bp, Artificial Sequence
  primer
gtaaaacgacggccagttcagggagagatctcagagcc

SEQ ID NO: 18107 - DNA, 20 bp, Artificial Sequence
  primer
ctgtctccagctgtgccatc

SEQ ID NO: 18108 - DNA, 40 bp, Artificial Sequence
  primer
gtaaaacgacggccagtccaaactgaacgaagaagatgag

SEQ ID NO: 18109 - DNA, 21 bp, Artificial Sequence
  primer
ttagccctaggtcctgtgagc

SEQ ID NO: 18110 - DNA, 38 bp, Artificial Sequence
  primer
gtaaaacgacggccagtttcttcccagacccaaatcag

SEQ ID NO: 18111 - DNA, 21 bp, Artificial Sequence
  primer
cagggcctcagtaggaaacag

SEQ ID NO: 18112 - DNA, 38 bp, Artificial Sequence
  primer
gtaaaacgacggccagtaattccaattgacgactgctg

SEQ ID NO: 18113 - DNA, 21 bp, Artificial Sequence
  primer
acccagaggaaattgcaagag

SEQ ID NO: 18114 - DNA, 38 bp, Artificial Sequence
  primer
gtaaaacgacggccagttcacgctactgggatcagatg

SEQ ID NO: 18115 - DNA, 21 bp, Artificial Sequence
  primer
atagggaacgtggagttgtgg

SEQ ID NO: 18116 - DNA, 38 bp, Artificial Sequence
  primer
gtaaaacgacggccagtaagaggctcatggtctcaagg

SEQ ID NO: 18117 - DNA, 21 bp, Artificial Sequence
  primer
agtctgcaggtgaagaggagg

SEQ ID NO: 18118 - DNA, 37 bp, Artificial Sequence
  primer
gtaaaacgacggccagtcgtgacctggaggaactgac

SEQ ID NO: 18119 - DNA, 20 bp, Artificial Sequence
  primer
gcatgtctcagatgctgcac

SEQ ID NO: 18120 - DNA, 21 bp, Artificial Sequence
  primer
ttccagcagatcctgtccttc

SEQ ID NO: 18121 - DNA, 21 bp, Artificial Sequence
  primer
gacccgagtaaagcatgaagc

SEQ ID NO: 18122 - DNA, 21 bp, Artificial Sequence
  primer
gcagagtgggtctaacacagg

SEQ ID NO: 18123 - DNA, 21 bp, Artificial Sequence
  primer
agaagcttccagctcctcctc

SEQ ID NO: 18124 - DNA, 38 bp, Artificial Sequence
  primer
gtaaaacgacggccagttgtcctgtcccttagagggtg

SEQ ID NO: 18125 - DNA, 38 bp, Artificial Sequence
  primer
gtaaaacgacggccagtagactgttccagaggaatggg

SEQ ID NO: 18126 - DNA, 21 bp, Artificial Sequence
  primer
tgtactgtcagaacttcgccc

SEQ ID NO: 18127 - DNA, 38 bp, Artificial Sequence
  primer
gtaaaacgacggccagtgagggctctgtgtggtttagc

SEQ ID NO: 18128 - DNA, 36 bp, Artificial Sequence
  primer
gtaaaacgacggccagttgttcaacaacagccgcag

SEQ ID NO: 18129 - DNA, 21 bp, Artificial Sequence
  primer
accgagttcttcctcaaggtg

SEQ ID NO: 18130 - DNA, 19 bp, Artificial Sequence
  primer
gacagtggccagaaggagg

SEQ ID NO: 18131 - DNA, 21 bp, Artificial Sequence
  primer
gtacagcatgatgaacgtcgg

SEQ ID NO: 18132 - DNA, 37 bp, Artificial Sequence
  primer
gtaaaacgacggccagtactgcccttggtgggtagag

SEQ ID NO: 18133 - DNA, 20 bp, Artificial Sequence
  primer
agctgatgaactgccacgtc

SEQ ID NO: 18134 - DNA, 38 bp, Artificial Sequence
  primer
gtaaaacgacggccagtagggagtcgcagatgctgtag

SEQ ID NO: 18135 - DNA, 21 bp, Artificial Sequence
  primer
tttgcatccttgaagagcatc

SEQ ID NO: 18136 - DNA, 38 bp, Artificial Sequence
  primer
gtaaaacgacggccagtatgcaaatgttcagtgttgcc

SEQ ID NO: 18137 - DNA, 21 bp, Artificial Sequence
  primer
aattgatcgaaggattcagcc

SEQ ID NO: 18138 - DNA, 20 bp, Artificial Sequence
  primer
gtaaacccaggaggcagagc

SEQ ID NO: 18139 - DNA, 22 bp, Artificial Sequence
  primer
ggcattctggacattaacattg

SEQ ID NO: 18140 - DNA, 22 bp, Artificial Sequence
  primer
gacgttacctagtttgcctccc

SEQ ID NO: 18141 - DNA, 26 bp, Artificial Sequence
  primer
tgtcagatgatgcttagtgatactgg

SEQ ID NO: 18142 - DNA, 18 bp, Artificial Sequence
  primer
ctccctccttcccgcttc

SEQ ID NO: 18143 - DNA, 18 bp, Artificial Sequence
  primer
gaggccgcgtacaactgg

SEQ ID NO: 18144 - DNA, 19 bp, Artificial Sequence
  primer
tccagaagcctctgccatc

SEQ ID NO: 18145 - DNA, 21 bp, Artificial Sequence
  primer
cgagtctaacggtctgagtgg

SEQ ID NO: 18146 - DNA, 20 bp, Artificial Sequence
  primer
ggtcagggctgcatttgaac

SEQ ID NO: 18147 - DNA, 38 bp, Artificial Sequence
  primer
gtaaaacgacggccagtcacgttagtctcactgcctcc

SEQ ID NO: 18148 - DNA, 38 bp, Artificial Sequence
  primer
gtaaaacgacggccagtgtccgacgcagacatcttagg

SEQ ID NO: 18149 - DNA, 37 bp, Artificial Sequence
  primer
gtaaaacgacggccagtaggactcagggacgatggag

SEQ ID NO: 18150 - DNA, 37 bp, Artificial Sequence
  primer
gtaaaacgacggccagtactcaggcccatgtcctctc

SEQ ID NO: 18151 - DNA, 37 bp, Artificial Sequence
  primer
gtaaaacgacggccagtgcacagcacacactctccag

SEQ ID NO: 18152 - DNA, 22 bp, Artificial Sequence
  primer
tttcagttaacctcttagcccg

SEQ ID NO: 18153 - DNA, 38 bp, Artificial Sequence
  primer
gtaaaacgacggccagtctggactgttgcttagcttgc

SEQ ID NO: 18154 - DNA, 38 bp, Artificial Sequence
  primer
gtaaaacgacggccagtagctaccctgtgtaccttggc

SEQ ID NO: 18155 - DNA, 40 bp, Artificial Sequence
  primer
gtaaaacgacggccagttttcgaatgttcctttactctgc

SEQ ID NO: 18156 - DNA, 21 bp, Artificial Sequence
  primer
tgatgaaattgacttggctgc

SEQ ID NO: 18157 - DNA, 21 bp, Artificial Sequence
  primer
gcaaggttctaggaaaggcac

SEQ ID NO: 18158 - DNA, 21 bp, Artificial Sequence
  primer
acagcatccagtttgcagttg

SEQ ID NO: 18159 - DNA, 38 bp, Artificial Sequence
  primer
gtaaaacgacggccagtgaaagcaaataccagcagcag

SEQ ID NO: 18160 - DNA, 38 bp, Artificial Sequence
  primer
gtaaaacgacggccagttctgtgctgagcttgggtaac

SEQ ID NO: 18161 - DNA, 22 bp, Artificial Sequence
  primer
ccgctacttcaagacgctctac

SEQ ID NO: 18162 - DNA, 21 bp, Artificial Sequence
  primer
aacgagtcctgccaattcttc

SEQ ID NO: 18163 - DNA, 21 bp, Artificial Sequence
  primer
ttctaaatgtgtcgcctgtcc

SEQ ID NO: 18164 - DNA, 38 bp, Artificial Sequence
  primer
gtaaaacgacggccagtagtgggtgggacaatttatgc

SEQ ID NO: 18165 - DNA, 37 bp, Artificial Sequence
  primer
gtaaaacgacggccagtctctgcaggtccacagcaag

SEQ ID NO: 18166 - DNA, 21 bp, Artificial Sequence
  primer
ccgacctacatgcttgctaac

SEQ ID NO: 18167 - DNA, 38 bp, Artificial Sequence
  primer
gtaaaacgacggccagtagttgaatctctcctgccagc

SEQ ID NO: 18168 - DNA, 40 bp, Artificial Sequence
  primer
gtaaaacgacggccagttggatgaaattgtttccaatgac

SEQ ID NO: 18169 - DNA, 20 bp, Artificial Sequence
  primer
gccactttggaaggtgtgtc

SEQ ID NO: 18170 - DNA, 21 bp, Artificial Sequence
  primer
actcttggattggtttggcac

SEQ ID NO: 18171 - DNA, 22 bp, Artificial Sequence
  primer
aacctaagcatttgtggcagac

SEQ ID NO: 18172 - DNA, 41 bp, Artificial Sequence
  primer
gtaaaacgacggccagtgggaggactactgtatattgcctg

SEQ ID NO: 18173 - DNA, 19 bp, Artificial Sequence
  primer
cacactcggcaacaaccac

SEQ ID NO: 18174 - DNA, 35 bp, Artificial Sequence
  primer
gtaaaacgacggccagtgcccacaaggtgggtagc

SEQ ID NO: 18175 - DNA, 38 bp, Artificial Sequence
  primer
gtaaaacgacggccagtcacacaggagctgatggactc

SEQ ID NO: 18176 - DNA, 21 bp, Artificial Sequence
  primer
gcttctgtgagatagaccggc

SEQ ID NO: 18177 - DNA, 21 bp, Artificial Sequence
  primer
attccagtcttctgcctaccg

SEQ ID NO: 18178 - DNA, 38 bp, Artificial Sequence
  primer
gtaaaacgacggccagtgggttgaaggttcataaaggc

SEQ ID NO: 18179 - DNA, 38 bp, Artificial Sequence
  primer
gtaaaacgacggccagtgagtggttcggtaatgtctgc

SEQ ID NO: 18180 - DNA, 21 bp, Artificial Sequence
  primer
ttctcagcaaggctatggttg

SEQ ID NO: 18181 - DNA, 21 bp, Artificial Sequence
  primer
cctctctgggtgggatgttag

SEQ ID NO: 18182 - DNA, 21 bp, Artificial Sequence
  primer
tttggaatggaggactcaagg

SEQ ID NO: 18183 - DNA, 39 bp, Artificial Sequence
  primer
gtaaaacgacggccagttgtatgtataccgacgtggtgg

SEQ ID NO: 18184 - DNA, 21 bp, Artificial Sequence
  primer
gtttacccatcccaccaagtc

SEQ ID NO: 18185 - DNA, 40 bp, Artificial Sequence
  primer
gtaaaacgacggccagtcttcaaacagccaatggaaagag

SEQ ID NO: 18186 - DNA, 43 bp, Artificial Sequence
  primer
gtaaaacgacggccagtgaacatccctattaaacaaacatgaa

SEQ ID NO: 18187 - DNA, 39 bp, Artificial Sequence
  primer
gtaaaacgacggccagtgggaactttctttcaccactaa

SEQ ID NO: 18188 - DNA, 24 bp, Artificial Sequence
  primer
tgaatgtgttcccaggaaattaag

SEQ ID NO: 18189 - DNA, 38 bp, Artificial Sequence
  primer
gtaaaacgacggccagttgtcctaggctgcactctgtg

SEQ ID NO: 18190 - DNA, 20 bp, Artificial Sequence
  primer
ctgggagatgtcgcgtaaac

SEQ ID NO: 18191 - DNA, 38 bp, Artificial Sequence
  primer
gtaaaacgacggccagttttctacaggaggatgggtcc

SEQ ID NO: 18192 - DNA, 38 bp, Artificial Sequence
  primer
gtaaaacgacggccagttgctgcttgcagaccttctac

SEQ ID NO: 18193 - DNA, 21 bp, Artificial Sequence
  primer
aataaggcatcaccaagtggc

SEQ ID NO: 18194 - DNA, 21 bp, Artificial Sequence
  primer
actggagtcctggaaatggtg

SEQ ID NO: 18195 - DNA, 38 bp, Artificial Sequence
  primer
gtaaaacgacggccagttgggagactgtctacaaaccg

SEQ ID NO: 18196 - DNA, 25 bp, Artificial Sequence
  primer
tttggaatgaactgagaacaaactc

SEQ ID NO: 18197 - DNA, 38 bp, Artificial Sequence
  primer
gtaaaacgacggccagtgattacaggtgtgaaccacca

SEQ ID NO: 18198 - DNA, 23 bp, Artificial Sequence
  primer
gggatgcatgactgttattaagc

SEQ ID NO: 18199 - DNA, 21 bp, Artificial Sequence
  primer
cagggtgacagaggaagatcc

SEQ ID NO: 18200 - DNA, 39 bp, Artificial Sequence
  primer
gtaaaacgacggccagtcctgcatggatgttatttgaag

SEQ ID NO: 18201 - DNA, 25 bp, Artificial Sequence
  primer
aaagggtgtatgttatgtaaggcag

SEQ ID NO: 18202 - DNA, 22 bp, Artificial Sequence
  primer
tgtagcctcagtaccagcagaa

SEQ ID NO: 18203 - DNA, 27 bp, Artificial Sequence
  primer
tttacaggaaagagaatataaagtcca

SEQ ID NO: 18204 - DNA, 40 bp, Artificial Sequence
  primer
gtaaaacgacggccagtttgtagcaaatcctatttgaggg

SEQ ID NO: 18205 - DNA, 38 bp, Artificial Sequence
  primer
gtaaaacgacggccagtatgtggcacaaagcataaggg

SEQ ID NO: 18206 - DNA, 30 bp, Artificial Sequence
  primer
gcagatactagaataaactggaatgctaga

SEQ ID NO: 18207 - DNA, 22 bp, Artificial Sequence
  primer
gaaagcagacagacaacctgag

SEQ ID NO: 18208 - DNA, 39 bp, Artificial Sequence
  primer
gtaaaacgacggccagtcctttggtctatatcctggtgc

SEQ ID NO: 18209 - DNA, 47 bp, Artificial Sequence
  primer
gtaaaacgacggccagttcatatctgaagataatccagatgttctaa

SEQ ID NO: 18210 - DNA, 38 bp, Artificial Sequence
  primer
gtaaaacgacggccagttgggattcaccttctttgtcc

SEQ ID NO: 18211 - DNA, 21 bp, Artificial Sequence
  primer
tcagccatacgttaggtgcag

SEQ ID NO: 18212 - DNA, 21 bp, Artificial Sequence
  primer
tgctagttgccatcaggtgtc

SEQ ID NO: 18213 - DNA, 38 bp, Artificial Sequence
  primer
gtaaaacgacggccagtttagtttccaggcaccctctc

SEQ ID NO: 18214 - DNA, 38 bp, Artificial Sequence
  primer
gtaaaacgacggccagtcataaatgggtgaaatgggtg

SEQ ID NO: 18215 - DNA, 24 bp, Artificial Sequence
  primer
cagagaaactggcagcaagataag

SEQ ID NO: 18216 - DNA, 22 bp, Artificial Sequence
  primer
tgacaggtattcagcaaagcaa

SEQ ID NO: 18217 - DNA, 20 bp, Artificial Sequence
  primer
tcctgaccttgtgatccacc

SEQ ID NO: 18218 - DNA, 38 bp, Artificial Sequence
  primer
gtaaaacgacggccagttgcctatgcaaagcaggtaag

SEQ ID NO: 18219 - DNA, 38 bp, Artificial Sequence
  primer
gtaaaacgacggccagtgcgagtgagtttaattgctgg

SEQ ID NO: 18220 - DNA, 37 bp, Artificial Sequence
  primer
gtaaaacgacggccagtagaatgaatgaatgcagcgg

SEQ ID NO: 18221 - DNA, 38 bp, Artificial Sequence
  primer
gtaaaacgacggccagttctcctgacctcatgatccac

SEQ ID NO: 18222 - DNA, 21 bp, Artificial Sequence
  primer
accgctaccgtaaacacaacc

SEQ ID NO: 18223 - DNA, 21 bp, Artificial Sequence
  primer
gttctttgaccctgccatcag

SEQ ID NO: 18224 - DNA, 21 bp, Artificial Sequence
  primer
aatgctcctcccacatttcac

SEQ ID NO: 18225 - DNA, 21 bp, Artificial Sequence
  primer
ggctatctccacgtctgttcc

SEQ ID NO: 18226 - DNA, 38 bp, Artificial Sequence
  primer
gtaaaacgacggccagtaggtttcggcctgtgtaggac

SEQ ID NO: 18227 - DNA, 36 bp, Artificial Sequence
  primer
gtaaaacgacggccagtccttagcctgcctgctcac

SEQ ID NO: 18228 - DNA, 38 bp, Artificial Sequence
  primer
gtaaaacgacggccagtacatattccattccaggcaaa

SEQ ID NO: 18229 - DNA, 21 bp, Artificial Sequence
  primer
ggattgaaaggatgggtatgg

SEQ ID NO: 18230 - DNA, 21 bp, Artificial Sequence
  primer
ttcccactttgcatagacagg

SEQ ID NO: 18231 - DNA, 25 bp, Artificial Sequence
  primer
tgcataaacagtttgttaatttcgg

SEQ ID NO: 18232 - DNA, 38 bp, Artificial Sequence
  primer
gtaaaacgacggccagtctgcgttaggctgacaatcac

SEQ ID NO: 18233 - DNA, 39 bp, Artificial Sequence
  primer
gtaaaacgacggccagtgaaccataattggctgaattgc

SEQ ID NO: 18234 - DNA, 24 bp, Artificial Sequence
  primer
gctatttctgagcaactctgtgtg

SEQ ID NO: 18235 - DNA, 27 bp, Artificial Sequence
  primer
ggttagaagttaggagttccatttacc

SEQ ID NO: 18236 - DNA, 37 bp, Artificial Sequence
  primer
gtaaaacgacggccagtacgccctctcttcctctcag

SEQ ID NO: 18237 - DNA, 36 bp, Artificial Sequence
  primer
gtaaaacgacggccagtaacggatgcaatcctggac

SEQ ID NO: 18238 - DNA, 38 bp, Artificial Sequence
  primer
gtaaaacgacggccagtatcgggttaccgttgtattcg

SEQ ID NO: 18239 - DNA, 21 bp, Artificial Sequence
  primer
ccagggtaacgctgtcttgtg

SEQ ID NO: 18240 - DNA, 37 bp, Artificial Sequence
  primer
gtaaaacgacggccagtcccgccctatggtagtatcc

SEQ ID NO: 18241 - DNA, 24 bp, Artificial Sequence
  primer
tcttacagagcttcatcttcccag

SEQ ID NO: 18242 - DNA, 22 bp, Artificial Sequence
  primer
gctcctaggttctctaccaggg

SEQ ID NO: 18243 - DNA, 21 bp, Artificial Sequence
  primer
tggcatgtccagatctctttg

SEQ ID NO: 18244 - DNA, 24 bp, Artificial Sequence
  primer
cagtgttgtgggtaactttgtttg

SEQ ID NO: 18245 - DNA, 22 bp, Artificial Sequence
  primer
gctgttcttggctgttatgttg

SEQ ID NO: 18246 - DNA, 38 bp, Artificial Sequence
  primer
gtaaaacgacggccagtggatgaggtgggagctatgtg

SEQ ID NO: 18247 - DNA, 39 bp, Artificial Sequence
  primer
gtaaaacgacggccagtttgtctccaggaaagattggag

SEQ ID NO: 18248 - DNA, 21 bp, Artificial Sequence
  primer
gtgatttatgttcccgccaag

SEQ ID NO: 18249 - DNA, 21 bp, Artificial Sequence
  primer
tatgcttctctgggcacaagc

SEQ ID NO: 18250 - DNA, 21 bp, Artificial Sequence
  primer
ggattaatgtcctgggtcctc

SEQ ID NO: 18251 - DNA, 38 bp, Artificial Sequence
  primer
gtaaaacgacggccagtgccacctcactttgttgaatg

SEQ ID NO: 18252 - DNA, 38 bp, Artificial Sequence
  primer
gtaaaacgacggccagtgcaggagaaacttctgaagcc

SEQ ID NO: 18253 - DNA, 41 bp, Artificial Sequence
  primer
gtaaaacgacggccagtgactgaagattctgcctttctttg

SEQ ID NO: 18254 - DNA, 21 bp, Artificial Sequence
  primer
ggcagttgcttgaagttcacc

SEQ ID NO: 18255 - DNA, 38 bp, Artificial Sequence
  primer
gtaaaacgacggccagtcactcaatatggacggcaaag

SEQ ID NO: 18256 - DNA, 21 bp, Artificial Sequence
  primer
tgggtgtcttgagtaagccag

SEQ ID NO: 18257 - DNA, 39 bp, Artificial Sequence
  primer
gtaaaacgacggccagtcgtgggcatatgaatctgtctc

SEQ ID NO: 18258 - DNA, 38 bp, Artificial Sequence
  primer
gtaaaacgacggccagtctgggtttgggaaagggatac

SEQ ID NO: 18259 - DNA, 21 bp, Artificial Sequence
  primer
gtagctcaagcgtggaacttg

SEQ ID NO: 18260 - DNA, 21 bp, Artificial Sequence
  primer
catctcacttcacttcctggg

SEQ ID NO: 18261 - DNA, 22 bp, Artificial Sequence
  primer
ttgtgagaggagaaacctctgg

SEQ ID NO: 18262 - DNA, 38 bp, Artificial Sequence
  primer
gtaaaacgacggccagtaaccaatgaatcccgtttctg

SEQ ID NO: 18263 - DNA, 39 bp, Artificial Sequence
  primer
gtaaaacgacggccagtgagatttagggtgggaaagagg

SEQ ID NO: 18264 - DNA, 37 bp, Artificial Sequence
  primer
gtaaaacgacggccagtgatgaagcttccctggcttc

SEQ ID NO: 18265 - DNA, 39 bp, Artificial Sequence
  primer
gtaaaacgacggccagttgagaaagcctgtgtgtgtttg

SEQ ID NO: 18266 - DNA, 21 bp, Artificial Sequence
  primer
tctgccagaccctataactgc

SEQ ID NO: 18267 - DNA, 39 bp, Artificial Sequence
  primer
gtaaaacgacggccagtgctgcttactcattgcatttcc

SEQ ID NO: 18268 - DNA, 37 bp, Artificial Sequence
  primer
gtaaaacgacggccagtgacccaactctgcagcactc

SEQ ID NO: 18269 - DNA, 24 bp, Artificial Sequence
  primer
tgcttgagaactattgaagtcaca

SEQ ID NO: 18270 - DNA, 21 bp, Artificial Sequence
  primer
cattggcctgaaatctccttc

SEQ ID NO: 18271 - DNA, 38 bp, Artificial Sequence
  primer
gtaaaacgacggccagttcaacaggataagcatgggtg

SEQ ID NO: 18272 - DNA, 22 bp, Artificial Sequence
  primer
ttctcacaatggacatgactcc

SEQ ID NO: 18273 - DNA, 38 bp, Artificial Sequence
  primer
gtaaaacgacggccagtagagccggtagttgtctcctg

SEQ ID NO: 18274 - DNA, 36 bp, Artificial Sequence
  primer
gtaaaacgacggccagtggaatctggtcggtgtctg

SEQ ID NO: 18275 - DNA, 21 bp, Artificial Sequence
  primer
gtccacttgtgcctttctgtc

SEQ ID NO: 18276 - DNA, 38 bp, Artificial Sequence
  primer
gtaaaacgacggccagtcaggccatcacctcttctacc

SEQ ID NO: 18277 - DNA, 38 bp, Artificial Sequence
  primer
gtaaaacgacggccagtttcctcctttgtgtgtttccc

SEQ ID NO: 18278 - DNA, 21 bp, Artificial Sequence
  primer
ttcctcctttgtgtgtttccc

SEQ ID NO: 18279 - DNA, 38 bp, Artificial Sequence
  primer
gtaaaacgacggccagtaggaaagacagtcctgcaacc

SEQ ID NO: 18280 - DNA, 38 bp, Artificial Sequence
  primer
gtaaaacgacggccagttgttcgactggaagattcacg

SEQ ID NO: 18281 - DNA, 21 bp, Artificial Sequence
  primer
gggttctgggctgtagagttg

SEQ ID NO: 18282 - DNA, 37 bp, Artificial Sequence
  primer
gtaaaacgacggccagtttgagtgacgggagaggttg

SEQ ID NO: 18283 - DNA, 41 bp, Artificial Sequence
  primer
gtaaaacgacggccagttttgtccctagaatatctgcttcc

SEQ ID NO: 18284 - DNA, 39 bp, Artificial Sequence
  primer
gtaaaacgacggccagtcagaagagatgcaataggcaca

SEQ ID NO: 18285 - DNA, 19 bp, Artificial Sequence
  primer
aggagagcaggtggctgag

SEQ ID NO: 18286 - DNA, 37 bp, Artificial Sequence
  primer
gtaaaacgacggccagtgacagtgccctaggcatgag

SEQ ID NO: 18287 - DNA, 38 bp, Artificial Sequence
  primer
gtaaaacgacggccagtcatagaaaggacggttcctgc

SEQ ID NO: 18288 - DNA, 38 bp, Artificial Sequence
  primer
gtaaaacgacggccagtctggagagacagaagtgcagc

SEQ ID NO: 18289 - DNA, 38 bp, Artificial Sequence
  primer
gtaaaacgacggccagttcatcccgatctcttcctgtc

SEQ ID NO: 18290 - DNA, 38 bp, Artificial Sequence
  primer
gtaaaacgacggccagtcagggaaacattactgggagg

SEQ ID NO: 18291 - DNA, 38 bp, Artificial Sequence
  primer
gtaaaacgacggccagtcggagatacctgagccttgag

SEQ ID NO: 18292 - DNA, 21 bp, Artificial Sequence
  primer
ttcctttcatccctggagttt

SEQ ID NO: 18293 - DNA, 38 bp, Artificial Sequence
  primer
gtaaaacgacggccagttagcaaccatccatcaaggtg

SEQ ID NO: 18294 - DNA, 37 bp, Artificial Sequence
  primer
gtaaaacgacggccagtaacagaacaggtggctgagg

SEQ ID NO: 18295 - DNA, 38 bp, Artificial Sequence
  primer
gtaaaacgacggccagttcacctggctatatgcagcac

SEQ ID NO: 18296 - DNA, 38 bp, Artificial Sequence
  primer
gtaaaacgacggccagtagcctttcctgaactactccg

SEQ ID NO: 18297 - DNA, 21 bp, Artificial Sequence
  primer
cagcttccgtaattctcaggg

SEQ ID NO: 18298 - DNA, 21 bp, Artificial Sequence
  primer
aacgtgatggtgtggactgtg

SEQ ID NO: 18299 - DNA, 38 bp, Artificial Sequence
  primer
gtaaaacgacggccagtcaggagatacctgagccttcg

SEQ ID NO: 18300 - DNA, 38 bp, Artificial Sequence
  primer
gtaaaacgacggccagtatacctgcttcctttcctgcc

SEQ ID NO: 18301 - DNA, 24 bp, Artificial Sequence
  primer
cctatttcttgcttcctacttccc

SEQ ID NO: 18302 - DNA, 38 bp, Artificial Sequence
  primer
gtaaaacgacggccagtggctgaggagctcttgagatg

SEQ ID NO: 18303 - DNA, 39 bp, Artificial Sequence
  primer
gtaaaacgacggccagttgttcatagaaagggctgttcc

SEQ ID NO: 18304 - DNA, 39 bp, Artificial Sequence
  primer
gtaaaacgacggccagttgcatcttcagtaattctcggg

SEQ ID NO: 18305 - DNA, 38 bp, Artificial Sequence
  primer
gtaaaacgacggccagttggaccaagacactggtcatc

SEQ ID NO: 18306 - DNA, 18 bp, Artificial Sequence
  primer
caggtgggcatcttcctg

SEQ ID NO: 18307 - DNA, 21 bp, Artificial Sequence
  primer
ctggacacttcacagagcagg

SEQ ID NO: 18308 - DNA, 21 bp, Artificial Sequence
  primer
caatgttgggactcaaaggtg

SEQ ID NO: 18309 - DNA, 38 bp, Artificial Sequence
  primer
gtaaaacgacggccagtctgtctgagaagcacccttcc

SEQ ID NO: 18310 - DNA, 21 bp, Artificial Sequence
  primer
atgtgagtgtgccatgattcc

SEQ ID NO: 18311 - DNA, 38 bp, Artificial Sequence
  primer
gtaaaacgacggccagttcatgagatagattccgtgcc

SEQ ID NO: 18312 - DNA, 21 bp, Artificial Sequence
  primer
agaggtagctgaccttgggag

SEQ ID NO: 18313 - DNA, 38 bp, Artificial Sequence
  primer
gtaaaacgacggccagtcagagacccaggcatgtcttc

SEQ ID NO: 18314 - DNA, 21 bp, Artificial Sequence
  primer
cgactgatgttcctggatttg

SEQ ID NO: 18315 - DNA, 38 bp, Artificial Sequence
  primer
gtaaaacgacggccagttgtagaagagggaggctggac

SEQ ID NO: 18316 - DNA, 38 bp, Artificial Sequence
  primer
gtaaaacgacggccagtccatcctccttgtttctgagg

SEQ ID NO: 18317 - DNA, 38 bp, Artificial Sequence
  primer
gtaaaacgacggccagtggtggagagtgaatctagggc

SEQ ID NO: 18318 - DNA, 38 bp, Artificial Sequence
  primer
gtaaaacgacggccagtgaagtggacatttccatgcag

SEQ ID NO: 18319 - DNA, 38 bp, Artificial Sequence
  primer
gtaaaacgacggccagtcattgattcccattgagaccc

SEQ ID NO: 18320 - DNA, 38 bp, Artificial Sequence
  primer
gtaaaacgacggccagtagctgagcagctaaagcttgg

SEQ ID NO: 18321 - DNA, 21 bp, Artificial Sequence
  primer
ttatttcccgaaacaccaacc

SEQ ID NO: 18322 - DNA, 21 bp, Artificial Sequence
  primer
ttatttcccgaaacaccaacc

SEQ ID NO: 18323 - DNA, 21 bp, Artificial Sequence
  primer
gttcaaccgatgttcccagac

SEQ ID NO: 18324 - DNA, 40 bp, Artificial Sequence
  primer
gtaaaacgacggccagtggtcaccatacttgagttagccc

SEQ ID NO: 18325 - DNA, 38 bp, Artificial Sequence
  primer
gtaaaacgacggccagtccattgattcccattgagacc

SEQ ID NO: 18326 - DNA, 37 bp, Artificial Sequence
  primer
gtaaaacgacggccagtgctgagcagctaaagcttgg

SEQ ID NO: 18327 - DNA, 21 bp, Artificial Sequence
  primer
gaaagaaatgggatacgctgc

SEQ ID NO: 18328 - DNA, 38 bp, Artificial Sequence
  primer
gtaaaacgacggccagtgaagctccaggaggaactcag

SEQ ID NO: 18329 - DNA, 21 bp, Artificial Sequence
  primer
caaccaatgttcccagacttg

SEQ ID NO: 18330 - DNA, 20 bp, Artificial Sequence
  primer
aggaaggaagctgaagcctg

SEQ ID NO: 18331 - DNA, 38 bp, Artificial Sequence
  primer
gtaaaacgacggccagtcatgctgaggctctgaaatcc

SEQ ID NO: 18332 - DNA, 38 bp, Artificial Sequence
  primer
gtaaaacgacggccagtcagggagacattactgggagg

SEQ ID NO: 18333 - DNA, 38 bp, Artificial Sequence
  primer
gtaaaacgacggccagttgatgggaataagtatcgggc

SEQ ID NO: 18334 - DNA, 38 bp, Artificial Sequence
  primer
gtaaaacgacggccagtaaggacccttcctctcgtgac

SEQ ID NO: 18335 - DNA, 37 bp, Artificial Sequence
  primer
gtaaaacgacggccagttgcagagaaatggagccaag

SEQ ID NO: 18336 - DNA, 38 bp, Artificial Sequence
  primer
gtaaaacgacggccagtccctcttctagttgcctccat

SEQ ID NO: 18337 - DNA, 21 bp, Artificial Sequence
  primer
actgggatctcagcctctgtg

SEQ ID NO: 18338 - DNA, 22 bp, Artificial Sequence
  primer
cattgggtaatctgtgggaaag

SEQ ID NO: 18339 - DNA, 41 bp, Artificial Sequence
  primer
gtaaaacgacggccagtcaatggagctgttcttagagatga

SEQ ID NO: 18340 - DNA, 35 bp, Artificial Sequence
  primer
gtaaaacgacggccagtccagtgaaattgctgccc

SEQ ID NO: 18341 - DNA, 38 bp, Artificial Sequence
  primer
gtaaaacgacggccagtacctccaaatcatccatccac

SEQ ID NO: 18342 - DNA, 37 bp, Artificial Sequence
  primer
gtaaaacgacggccagtacacttctccacccaccaga

SEQ ID NO: 18343 - DNA, 38 bp, Artificial Sequence
  primer
gtaaaacgacggccagtcaggcttgatgaaccagactc

SEQ ID NO: 18344 - DNA, 38 bp, Artificial Sequence
  primer
gtaaaacgacggccagtatgaaatccggatggatcaag

SEQ ID NO: 18345 - DNA, 39 bp, Artificial Sequence
  primer
gtaaaacgacggccagtttgtgggaactccaggataaac

SEQ ID NO: 18346 - DNA, 21 bp, Artificial Sequence
  primer
gtcccaatccttggtctttcc

SEQ ID NO: 18347 - DNA, 21 bp, Artificial Sequence
  primer
gcatctccaagcatcagtgag

SEQ ID NO: 18348 - DNA, 21 bp, Artificial Sequence
  primer
gcagggaaacattactgggag

SEQ ID NO: 18349 - DNA, 38 bp, Artificial Sequence; identical to SEQ ID NO: 18343
  primer

SEQ ID NO: 18350 - DNA, 38 bp, Artificial Sequence; identical to SEQ ID NO: 18344
  primer

SEQ ID NO: 18351 - DNA, 38 bp, Artificial Sequence
  primer
gtaaaacgacggccagtctccttagcatgcaccttcct

SEQ ID NO: 18352 - DNA, 21 bp, Artificial Sequence
  primer
ccttgagcattaggccagttc

SEQ ID NO: 18353 - DNA, 38 bp, Artificial Sequence
  primer
gtaaaacgacggccagttctgatggagtgagttccagc

SEQ ID NO: 18354 - DNA, 26 bp, Artificial Sequence
  primer
actgtagattcctcagctataaaggg

SEQ ID NO: 18355 - DNA, 37 bp, Artificial Sequence
  primer
gtaaaacgacggccagtagtggcaggaatgttatgcg

SEQ ID NO: 18356 - DNA, 20 bp, Artificial Sequence
  primer
agacgtgttcgtacccggag

SEQ ID NO: 18357 - DNA, 21 bp, Artificial Sequence
  primer
tgcgcctgagaggtaagagag

SEQ ID NO: 18358 - DNA, 21 bp, Artificial Sequence
  primer
aacctgtgtcaaagtgcaagc

SEQ ID NO: 18359 - DNA, 39 bp, Artificial Sequence
  primer
gtaaaacgacggccagttttgtagcctctatctttgccc

SEQ ID NO: 18360 - DNA, 39 bp, Artificial Sequence
  primer
gtaaaacgacggccagtcagagtgggctcaatcatgtag

SEQ ID NO: 18361 - DNA, 21 bp, Artificial Sequence
  primer
ggaccacactagggacaatga

SEQ ID NO: 18362 - DNA, 21 bp, Artificial Sequence
  primer
cagtgagccaacatcacactg

SEQ ID NO: 18363 - DNA, 40 bp, Artificial Sequence
  primer
gtaaaacgacggccagtgagccattgattgtcattaaagc

SEQ ID NO: 18364 - DNA, 40 bp, Artificial Sequence
  primer
gtaaaacgacggccagtgggatcagacacgtaataggacc

SEQ ID NO: 18365 - DNA, 20 bp, Artificial Sequence
  primer
tccttctcccactctcccag

SEQ ID NO: 18366 - DNA, 40 bp, Artificial Sequence
  primer
gtaaaacgacggccagtgcttctctaagactccatttgcc

SEQ ID NO: 18367 - DNA, 40 bp, Artificial Sequence
  primer
gtaaaacgacggccagtgcagtacatatctgtgtgggtgg

SEQ ID NO: 18368 - DNA, 40 bp, Artificial Sequence
  primer
gtaaaacgacggccagtaagatctcctcttgatcccaaag

SEQ ID NO: 18369 - DNA, 38 bp, Artificial Sequence
  primer
gtaaaacgacggccagtacagcaaaccatagcctttcc

SEQ ID NO: 18370 - DNA, 21 bp, Artificial Sequence
  primer
actggaatattgcgttcagcc

SEQ ID NO: 18371 - DNA, 37 bp, Artificial Sequence
  primer
gtaaaacgacggccagtggacttgacctccgagcaac

SEQ ID NO: 18372 - DNA, 21 bp, Artificial Sequence
  primer
atgtctgagcgaatgcttctt

SEQ ID NO: 18373 - DNA, 37 bp, Artificial Sequence
  primer
gtaaaacgacggccagtggtgaatgggaaaggtcagc

SEQ ID NO: 18374 - DNA, 38 bp, Artificial Sequence
  primer
gtaaaacgacggccagtagctggctaactcctcaccag

SEQ ID NO: 18375 - DNA, 44 bp, Artificial Sequence
  primer
gtaaaacgacggccagttctctcttgacgtcagactttactagc

SEQ ID NO: 18376 - DNA, 38 bp, Artificial Sequence
  primer
gtaaaacgacggccagtttcctactggaaggatcaggg

SEQ ID NO: 18377 - DNA, 21 bp, Artificial Sequence
  primer
ttgaagggaaatcagctatgg

SEQ ID NO: 18378 - DNA, 43 bp, Artificial Sequence
  primer
gtaaaacgacggccagtagcttgtgataaagagtcaaatatgc

SEQ ID NO: 18379 - DNA, 18 bp, Artificial Sequence
  primer
tagccaagctgtgggcag

SEQ ID NO: 18380 - DNA, 38 bp, Artificial Sequence
  primer
gtaaaacgacggccagtcagatgccatgctttgagaag

SEQ ID NO: 18381 - DNA, 19 bp, Artificial Sequence
  primer
attacaggtgcctgccagc

SEQ ID NO: 18382 - DNA, 21 bp, Artificial Sequence
  primer
ccagaccaaccactcaatctc

SEQ ID NO: 18383 - DNA, 22 bp, Artificial Sequence
  primer
aacacatcactgggaatggttc

SEQ ID NO: 18384 - DNA, 37 bp, Artificial Sequence
  primer
gtaaaacgacggccagtgactcgtgacctgggacttg

SEQ ID NO: 18385 - DNA, 24 bp, Artificial Sequence
  primer
cttcccaccctcaagtaatgatag

SEQ ID NO: 18386 - DNA, 37 bp, Artificial Sequence
  primer
gtaaaacgacggccagttgtgggctgtattagccagg

SEQ ID NO: 18387 - DNA, 25 bp, Artificial Sequence
  primer
tgaaatcataatgcaagtcagtgtc

SEQ ID NO: 18388 - DNA, 41 bp, Artificial Sequence
  primer
gtaaaacgacggccagtgaatttcatgtgactgaatccaac

SEQ ID NO: 18389 - DNA, 26 bp, Artificial Sequence
  primer
caaataataaactgtgcagagctacc

SEQ ID NO: 18390 - DNA, 36 bp, Artificial Sequence
  primer
gtaaaacgacggccagtactgcagacagtggatgcg

SEQ ID NO: 18391 - DNA, 40 bp, Artificial Sequence
  primer
gtaaaacgacggccagttgggatagaggttgctttattgc

SEQ ID NO: 18392 - DNA, 43 bp, Artificial Sequence
  primer
gtaaaacgacggccagtccagaatggcagtgtattagtaggag

SEQ ID NO: 18393 - DNA, 38 bp, Artificial Sequence
  primer
gtaaaacgacggccagtatacttggaaacgggcaagtg

SEQ ID NO: 18394 - DNA, 38 bp, Artificial Sequence
  primer
gtaaaacgacggccagttcaagagactggaagcctgtg

SEQ ID NO: 18395 - DNA, 38 bp, Artificial Sequence
  primer
gtaaaacgacggccagtcaagcctgtggaagtcagatg

SEQ ID NO: 18396 - DNA, 38 bp, Artificial Sequence
  primer
gtaaaacgacggccagtttaaatttgaaacttggcggc

SEQ ID NO: 18397 - DNA, 39 bp, Artificial Sequence
  primer
gtaaaacgacggccagtcccaagaccatgaataatcacc

SEQ ID NO: 18398 - DNA, 37 bp, Artificial Sequence
  primer
gtaaaacgacggccagtgtgtcgggattacaggcatc

SEQ ID NO: 18399 - DNA, 36 bp, Artificial Sequence
  primer
gtaaaacgacggccagtccagaatgggtcttggagc

SEQ ID NO: 18400 - DNA, 21 bp, Artificial Sequence
  primer
taggtcctcccagtatggtcc

SEQ ID NO: 18401 - DNA, 39 bp, Artificial Sequence
  primer
gtaaaacgacggccagtgggatatttctgcattcttccc

SEQ ID NO: 18402 - DNA, 41 bp, Artificial Sequence
  primer
gtaaaacgacggccagtggaaatactgtccttgagttgagg

SEQ ID NO: 18403 - DNA, 21 bp, Artificial Sequence
  primer
gatccagtgctttgctgacac

SEQ ID NO: 18404 - DNA, 38 bp, Artificial Sequence
  primer
gtaaaacgacggccagtatgtaaggcctccagatttgc

SEQ ID NO: 18405 - DNA, 37 bp, Artificial Sequence
  primer
gtaaaacgacggccagtaggagatgagctccaaaggc

SEQ ID NO: 18406 - DNA, 41 bp, Artificial Sequence
  primer
gtaaaacgacggccagttgttagtggatgtctagggaaaga

SEQ ID NO: 18407 - DNA, 41 bp, Artificial Sequence
  primer
gtaaaacgacggccagtttgataaccaaagcttccatcttc

SEQ ID NO: 18408 - DNA, 38 bp, Artificial Sequence
  primer
gtaaaacgacggccagtgccttcctgctttcaaacaac

SEQ ID NO: 18409 - DNA, 21 bp, Artificial Sequence
  primer
ggtcccagtgtacctttctcc

SEQ ID NO: 18410 - DNA, 22 bp, Artificial Sequence
  primer
tctgtaccctgtgtcactgagc

SEQ ID NO: 18411 - DNA, 21 bp, Artificial Sequence
  primer
agccaagatcatgcagttgtg

SEQ ID NO: 18412 - DNA, 26 bp, Artificial Sequence
  primer
aacacagtttcataaacacctgagac

SEQ ID NO: 18413 - DNA, 39 bp, Artificial Sequence
  primer
gtaaaacgacggccagttgcctctatcccttaaaccagg

SEQ ID NO: 18414 - DNA, 39 bp, Artificial Sequence
  primer
gtaaaacgacggccagtgaaggaatgtgtttcaacctgc

SEQ ID NO: 18415 - DNA, 38 bp, Artificial Sequence
  primer
gtaaaacgacggccagtacagaggtgcctacgttccag

SEQ ID NO: 18416 - DNA, 21 bp, Artificial Sequence
  primer
aaccactggagggagttgttg

SEQ ID NO: 18417 - DNA, 40 bp, Artificial Sequence
  primer
gtaaaacgacggccagtaacttcctaccgaaataagctgc

SEQ ID NO: 18418 - DNA, 22 bp, Artificial Sequence
  primer
tgggctttcaaaggactatttg

SEQ ID NO: 18419 - DNA, 35 bp, Artificial Sequence
  primer
gtaaaacgacggccagtgtgccaggctgtcagtgc

SEQ ID NO: 18420 - DNA, 38 bp, Artificial Sequence
  primer
gtaaaacgacggccagttcccgagcataaactgaacac

SEQ ID NO: 18421 - DNA, 20 bp, Artificial Sequence
  primer
gggttggatgaggcaaattc

SEQ ID NO: 18422 - DNA, 42 bp, Artificial Sequence
  primer
gtaaaacgacggccagttggtcttatgatcagatggacttta

SEQ ID NO: 18423 - DNA, 22 bp, Artificial Sequence
  primer
tttagtgtgggttgaatttggg

SEQ ID NO: 18424 - DNA, 44 bp, Artificial Sequence
  primer
gtaaaacgacggccagtctttagggaaatgtaacttctatgacc

SEQ ID NO: 18425 - DNA, 38 bp, Artificial Sequence
  primer
gtaaaacgacggccagttgaagcctgttggataaaggg

SEQ ID NO: 18426 - DNA, 38 bp, Artificial Sequence
  primer
gtaaaacgacggccagtattagccatctcttcccaagg

SEQ ID NO: 18427 - DNA, 38 bp, Artificial Sequence
  primer
gtaaaacgacggccagtctgacctcatgatcaacctgc

SEQ ID NO: 18428 - DNA, 39 bp, Artificial Sequence
  primer
gtaaaacgacggccagtgcagacaagccaagtctaaagc

SEQ ID NO: 18429 - DNA, 38 bp, Artificial Sequence
  primer
gtaaaacgacggccagtcctgtccgtgccttatgtttc

SEQ ID NO: 18430 - DNA, 38 bp, Artificial Sequence
  primer
gtaaaacgacggccagtagagtgagaaaggtgggttcg

SEQ ID NO: 18431 - DNA, 38 bp, Artificial Sequence
  primer
gtaaaacgacggccagtcaaatgggctcttctagtggg

SEQ ID NO: 18432 - DNA, 38 bp, Artificial Sequence
  primer
gtaaaacgacggccagtagtgagtgacatccacttggc

SEQ ID NO: 18433 - DNA, 39 bp, Artificial Sequence
  primer
gtaaaacgacggccagttgagcagaggatgctgtgtatg

SEQ ID NO: 18434 - DNA, 38 bp, Artificial Sequence
  primer
gtaaaacgacggccagttcccatgcataaaccagacag

SEQ ID NO: 18435 - DNA, 38 bp, Artificial Sequence
  primer
gtaaaacgacggccagtattcaaacccagattggaacc

SEQ ID NO: 18436 - DNA, 38 bp, Artificial Sequence
  primer
gtaaaacgacggccagtctggcttcctatgacctccac

SEQ ID NO: 18437 - DNA, 38 bp, Artificial Sequence
  primer
gtaaaacgacggccagtacagggatttacacctggtcc

SEQ ID NO: 18438 - DNA, 39 bp, Artificial Sequence
  primer
gtaaaacgacggccagtgggagaacctgaaatacttggg

SEQ ID NO: 18439 - DNA, 21 bp, Artificial Sequence
  primer
ttggatttgaatctgggtctg

SEQ ID NO: 18440 - DNA, 24 bp, Artificial Sequence
  primer
ggtcttgcaaagtatcaccttcag

SEQ ID NO: 18441 - DNA, 22 bp, Artificial Sequence
  primer
aaccacctcacatgacctaacc

SEQ ID NO: 18442 - DNA, 38 bp, Artificial Sequence
  primer
gtaaaacgacggccagtttgtgcctcaagaagtgcttt

SEQ ID NO: 18443 - DNA, 22 bp, Artificial Sequence
  primer
cttgtgtgcattgagtctcctt

SEQ ID NO: 18444 - DNA, 24 bp, Artificial Sequence
  primer
catagcttatgtttattggccacc

SEQ ID NO: 18445 - DNA, 38 bp, Artificial Sequence
  primer
gtaaaacgacggccagtaaattgtgttcttggtgctgc

SEQ ID NO: 18446 - DNA, 38 bp, Artificial Sequence
  primer
gtaaaacgacggccagtttacctcgcacctgtaactcc

SEQ ID NO: 18447 - DNA, 38 bp, Artificial Sequence
  primer
gtaaaacgacggccagtaagggtggaaccctaagtgac

SEQ ID NO: 18448 - DNA, 40 bp, Artificial Sequence
  primer
gtaaaacgacggccagtttggagagtgactgttatgatgc

SEQ ID NO: 18449 - DNA, 21 bp, Artificial Sequence
  primer
gctcctagaatggtagcctgg

SEQ ID NO: 18450 - DNA, 38 bp, Artificial Sequence
  primer
gtaaaacgacggccagttcaagtaatcaactcgcctcg

SEQ ID NO: 18451 - DNA, 39 bp, Artificial Sequence
  primer
gtaaaacgacggccagtttgaatacacagctcttgtggg

SEQ ID NO: 18452 - DNA, 20 bp, Artificial Sequence
  primer
tggtgtgcacctgtagtccc

SEQ ID NO: 18453 - DNA, 37 bp, Artificial Sequence
  primer
gtaaaacgacggccagtgggtgggaccttcagacatt

SEQ ID NO: 18454 - DNA, 43 bp, Artificial Sequence
  primer
gtaaaacgacggccagtccaaaggatatacttggcttgaatag

SEQ ID NO: 18455 - DNA, 38 bp, Artificial Sequence
  primer
gtaaaacgacggccagtcaggcactaatggaaattgct

SEQ ID NO: 18456 - DNA, 20 bp, Artificial Sequence
  primer
caccacagagctgaaggagg

SEQ ID NO: 18457 - DNA, 37 bp, Artificial Sequence
  primer
gtaaaacgacggccagtctgggcaacagtgtgagacc

SEQ ID NO: 18458 - DNA, 20 bp, Artificial Sequence
  primer
tttgagcgattgtttccagc

SEQ ID NO: 18459 - DNA, 39 bp, Artificial Sequence
  primer
gtaaaacgacggccagttgggcagagcatctagtttacc

SEQ ID NO: 18460 - DNA, 41 bp, Artificial Sequence
  primer
gtaaaacgacggccagttttgatttcacgaaacttgatacc

SEQ ID NO: 18461 - DNA, 21 bp, Artificial Sequence
  primer
acggaccatctgctaaattcc

SEQ ID NO: 18462 - DNA, 38 bp, Artificial Sequence
  primer
gtaaaacgacggccagtactgtttgaaaggttctcggc

SEQ ID NO: 18463 - DNA, 42 bp, Artificial Sequence
  primer
gtaaaacgacggccagttgatgaattaccacattatgctttg

SEQ ID NO: 18464 - DNA, 38 bp, Artificial Sequence
  primer
gtaaaacgacggccagtgccatttaccaagtttcaccc

SEQ ID NO: 18465 - DNA, 24 bp, Artificial Sequence
  primer
ggttcataactgaaagtctttgcc

SEQ ID NO: 18466 - DNA, 18 bp, Artificial Sequence
  primer
tggcctccgaatgctagg

SEQ ID NO: 18467 - DNA, 38 bp, Artificial Sequence
  primer
gtaaaacgacggccagtacctgcgtctatcacaaccac

SEQ ID NO: 18468 - DNA, 38 bp, Artificial Sequence
  primer
gtaaaacgacggccagtctaagctgcatatcccagcag

SEQ ID NO: 18469 - DNA, 38 bp, Artificial Sequence
  primer
gtaaaacgacggccagtcacccagacaagttcctagcc

SEQ ID NO: 18470 - DNA, 37 bp, Artificial Sequence
  primer
gtaaaacgacggccagtcccactgaaagaaaggtccc

SEQ ID NO: 18471 - DNA, 38 bp, Artificial Sequence
  primer
gtaaaacgacggccagtgtgggaaattgctagctgtcc

SEQ ID NO: 18472 - DNA, 39 bp, Artificial Sequence
  primer
gtaaaacgacggccagtgggaaagcatagagggagaagt

SEQ ID NO: 18473 - DNA, 35 bp, Artificial Sequence
  primer
gtaaaacgacggccagtcatgaccctcgccagtcc

SEQ ID NO: 18474 - DNA, 21 bp, Artificial Sequence
  primer
ccgtttcatctccatgtctcc

SEQ ID NO: 18475 - DNA, 38 bp, Artificial Sequence
  primer
gtaaaacgacggccagtctgcctagagttgccaaggac

SEQ ID NO: 18476 - DNA, 39 bp, Artificial Sequence
  primer
gtaaaacgacggccagtttcatgctaactcctcctttgg

SEQ ID NO: 18477 - DNA, 38 bp, Artificial Sequence
  primer
gtaaaacgacggccagtcatgtaaccaggcatgtaccc

SEQ ID NO: 18478 - DNA, 38 bp, Artificial Sequence
  primer
gtaaaacgacggccagtcacatcagctggagacaatgg

SEQ ID NO: 18479 - DNA, 37 bp, Artificial Sequence
  primer
gtaaaacgacggccagtagtcctaggtcaagggctgg

SEQ ID NO: 18480 - DNA, 20 bp, Artificial Sequence
  primer
ctcctttcctttcctggctg

SEQ ID NO: 18481 - DNA, 36 bp, Artificial Sequence
  primer
gtaaaacgacggccagtagacctgtgctcccaccac

SEQ ID NO: 18482 - DNA, 38 bp, Artificial Sequence
  primer
gtaaaacgacggccagtctggagcaaatggtgtttgag

SEQ ID NO: 18483 - DNA, 21 bp, Artificial Sequence
  primer
ctttctacccttcctccctcg

SEQ ID NO: 18484 - DNA, 38 bp, Artificial Sequence
  primer
gtaaaacgacggccagtctgctagtcagtccagggagc

SEQ ID NO: 18485 - DNA, 38 bp, Artificial Sequence
  primer
gtaaaacgacggccagtgacctgaaacccagtgtaggg

SEQ ID NO: 18486 - DNA, 38 bp, Artificial Sequence
  primer
gtaaaacgacggccagtgaagcaccaccctatctcctg

SEQ ID NO: 18487 - DNA, 39 bp, Artificial Sequence
  primer
gtaaaacgacggccagtccctccttaaagcaataggtcc

SEQ ID NO: 18488 - DNA, 38 bp, Artificial Sequence
  primer
gtaaaacgacggccagtaataacctagttgggccaagg

SEQ ID NO: 18489 - DNA, 42 bp, Artificial Sequence
  primer
gtaaaacgacggccagtaatccagatctttactgctcttgtc

SEQ ID NO: 18490 - DNA, 37 bp, Artificial Sequence
  primer
gtaaaacgacggccagttgtagagcgtgtgtcggatg

SEQ ID NO: 18491 - DNA, 22 bp, Artificial Sequence
  primer
ggagctacacggcttccatatc

SEQ ID NO: 18492 - DNA, 21 bp, Artificial Sequence
  primer
tcagggaaatagcaaattggg

SEQ ID NO: 18493 - DNA, 21 bp, Artificial Sequence
  primer
cagttagctgccactgctgtc

SEQ ID NO: 18494 - DNA, 37 bp, Artificial Sequence
  primer
gtaaaacgacggccagtctcccaggtaccctgtctgg

SEQ ID NO: 18495 - DNA, 21 bp, Artificial Sequence
  primer
gccaaaggacccttgttactg

SEQ ID NO: 18496 - DNA, 38 bp, Artificial Sequence
  primer
gtaaaacgacggccagtggctggtgatggttcctagag

SEQ ID NO: 18497 - DNA, 21 bp, Artificial Sequence
  primer
gaggaggaggagaagtcaggg

SEQ ID NO: 18498 - DNA, 38 bp, Artificial Sequence
  primer
gtaaaacgacggccagttgtcccttgtctcctgagtcc

SEQ ID NO: 18499 - DNA, 21 bp, Artificial Sequence
  primer
gactggactagaggctagcgg

SEQ ID NO: 18500 - DNA, 20 bp, Artificial Sequence
  primer
agaggaatgctgtgctcctg

SEQ ID NO: 18501 - DNA, 37 bp, Artificial Sequence
  primer
gtaaaacgacggccagtccagaagagaggtgtccgag

SEQ ID NO: 18502 - DNA, 38 bp, Artificial Sequence
  primer
gtaaaacgacggccagtccctctgatcctgttctttgc

SEQ ID NO: 18503 - DNA, 38 bp, Artificial Sequence
  primer
gtaaaacgacggccagtagctcagtaacctagcacggc

SEQ ID NO: 18504 - DNA, 20 bp, Artificial Sequence
  primer
agcgtgccatttaccctttc

SEQ ID NO: 18505 - DNA, 19 bp, Artificial Sequence
  primer
aggagatagggtgggtggc

SEQ ID NO: 18506 - DNA, 38 bp, Artificial Sequence
  primer
gtaaaacgacggccagtatggtggctgcatttgactac

SEQ ID NO: 18507 - DNA, 20 bp, Artificial Sequence
  primer
gaagtccggaggaatggaac

SEQ ID NO: 18508 - DNA, 37 bp, Artificial Sequence
  primer
gtaaaacgacggccagtactcagggcttccatgtgtg

SEQ ID NO: 18509 - DNA, 21 bp, Artificial Sequence
  primer
cgtatgaaccatcactgtgcc

SEQ ID NO: 18510 - DNA, 36 bp, Artificial Sequence
  primer
gtaaaacgacggccagtgagttgggcagtgggacag

SEQ ID NO: 18511 - DNA, 39 bp, Artificial Sequence
  primer
gtaaaacgacggccagttcaggttaggaggcagagacag

SEQ ID NO: 18512 - DNA, 38 bp, Artificial Sequence
  primer
gtaaaacgacggccagtatgatgcctaaacccatctgc

SEQ ID NO: 18513 - DNA, 38 bp, Artificial Sequence
  primer
gtaaaacgacggccagttaatgggtgggcagacttctc

SEQ ID NO: 18514 - DNA, 38 bp, Artificial Sequence
  primer
gtaaaacgacggccagtattctttgtgcctgtatcggg

SEQ ID NO: 18515 - DNA, 24 bp, Artificial Sequence
  primer
gcagtaggaacacaagacactagc

SEQ ID NO: 18516 - DNA, 21 bp, Artificial Sequence
  primer
atgctgggtaagtgtctgtgg

SEQ ID NO: 18517 - DNA, 42 bp, Artificial Sequence
  primer
gtaaaacgacggccagtaagcagctcataaacttacatcgag

SEQ ID NO: 18518 - DNA, 38 bp, Artificial Sequence
  primer
gtaaaacgacggccagtccacgtattgaacaggtagcc

SEQ ID NO: 18519 - DNA, 39 bp, Artificial Sequence
  primer
gtaaaacgacggccagtcccaggaaagttcagggttaag

SEQ ID NO: 18520 - DNA, 21 bp, Artificial Sequence
  primer
gcaagtcttcggaaagtcagc

SEQ ID NO: 18521 - DNA, 37 bp, Artificial Sequence
  primer
gtaaaacgacggccagtctcagggcacctttcagttg

SEQ ID NO: 18522 - DNA, 39 bp, Artificial Sequence
  primer
gtaaaacgacggccagtgccctctacttgctgcctttac

SEQ ID NO: 18523 - DNA, 38 bp, Artificial Sequence
  primer
gtaaaacgacggccagttgtttgctaagcaggcatttg

SEQ ID NO: 18524 - DNA, 21 bp, Artificial Sequence
  primer
cttgggaaactgaagtgggag

SEQ ID NO: 18525 - DNA, 38 bp, Artificial Sequence
  primer
gtaaaacgacggccagttgagctgagatcacaccactg

SEQ ID NO: 18526 - DNA, 21 bp, Artificial Sequence
  primer
attctttggcgatgctctgtg

SEQ ID NO: 18527 - DNA, 21 bp, Artificial Sequence
  primer
cattgcacaattgtcacagcc

SEQ ID NO: 18528 - DNA, 28 bp, Artificial Sequence
  primer
gttcttatattacagtgtgagcctgttt

SEQ ID NO: 18529 - DNA, 21 bp, Artificial Sequence
  primer
cccacttcagtcctttgcttc

SEQ ID NO: 18530 - DNA, 38 bp, Artificial Sequence
  primer
gtaaaacgacggccagtgaccaggttggattcaaggag

SEQ ID NO: 18531 - DNA, 21 bp, Artificial Sequence
  primer
attgccacagtagggtccaag

SEQ ID NO: 18532 - DNA, 37 bp, Artificial Sequence
  primer
gtaaaacgacggccagtaccttgattgactgggcagc

SEQ ID NO: 18533 - DNA, 38 bp, Artificial Sequence
  primer
gtaaaacgacggccagttatagttccagcagtgtcggc

SEQ ID NO: 18534 - DNA, 41 bp, Artificial Sequence
  primer
gtaaaacgacggccagtaatcaacttggttcctctcttctg

SEQ ID NO: 18535 - DNA, 38 bp, Artificial Sequence
  primer
gtaaaacgacggccagttgctatctgccctcatgtgac

SEQ ID NO: 18536 - DNA, 38 bp, Artificial Sequence
  primer
gtaaaacgacggccagtcaaccaccaggcttctgtttc

SEQ ID NO: 18537 - DNA, 21 bp, Artificial Sequence
  primer
agcctggatgactacgtgagg

SEQ ID NO: 18538 - DNA, 20 bp, Artificial Sequence
  primer
acactgcccatggctgatac

SEQ ID NO: 18539 - DNA, 21 bp, Artificial Sequence
  primer
ctgtatgctggcccttacagc

SEQ ID NO: 18540 - DNA, 21 bp, Artificial Sequence
  primer
atgaagcagaacccgtctttg

SEQ ID NO: 18541 - DNA, 38 bp, Artificial Sequence
  primer
gtaaaacgacggccagtaccagtcatcatcttggtggc

SEQ ID NO: 18542 - DNA, 45 bp, Artificial Sequence
  primer
gtaaaacgacggccagtggaaagaaatggttcaatatctaatctg

SEQ ID NO: 18543 - DNA, 38 bp, Artificial Sequence
  primer
gtaaaacgacggccagtcccagccagcttctattcttt

SEQ ID NO: 18544 - DNA, 24 bp, Artificial Sequence
  primer
tttggaataaaggaggatgctaag

SEQ ID NO: 18545 - DNA, 20 bp, Artificial Sequence
  primer
ttcaaaggaggtggcacttg

SEQ ID NO: 18546 - DNA, 39 bp, Artificial Sequence
  primer
gtaaaacgacggccagtacactttgcacttgtatcctgg

SEQ ID NO: 18547 - DNA, 22 bp, Artificial Sequence
  primer
tcactacaggctgaaacacagc

SEQ ID NO: 18548 - DNA, 21 bp, Artificial Sequence
  primer
agtgtttgccgtccaaagttc

SEQ ID NO: 18549 - DNA, 38 bp, Artificial Sequence
  primer
gtaaaacgacggccagtcagcagagtcaacactggagg

SEQ ID NO: 18550 - DNA, 38 bp, Artificial Sequence
  primer
gtaaaacgacggccagtatgctcacttccctgcataag

SEQ ID NO: 18551 - DNA, 21 bp, Artificial Sequence
  primer
atggaacccagatgtcctcag

SEQ ID NO: 18552 - DNA, 39 bp, Artificial Sequence
  primer
gtaaaacgacggccagtttgttgagaacctttagccagc

SEQ ID NO: 18553 - DNA, 38 bp, Artificial Sequence
  primer
gtaaaacgacggccagttcattcactttgctgacaggc

SEQ ID NO: 18554 - DNA, 38 bp, Artificial Sequence
  primer
gtaaaacgacggccagttcacaggagcagactggactc

SEQ ID NO: 18555 - DNA, 40 bp, Artificial Sequence
  primer
gtaaaacgacggccagttggtgtggattcttgaagatcag

SEQ ID NO: 18556 - DNA, 23 bp, Artificial Sequence
  primer
aagctttggatcttacccaacac

SEQ ID NO: 18557 - DNA, 21 bp, Artificial Sequence
  primer
ggagcttcatccactttctgc

SEQ ID NO: 18558 - DNA, 18 bp, Artificial Sequence
  primer
cgacgtacaccgtgggag

SEQ ID NO: 18559 - DNA, 21 bp, Artificial Sequence
  primer
cgatgcaataatcctgaaagc

SEQ ID NO: 18560 - DNA, 38 bp, Artificial Sequence
  primer
gtaaaacgacggccagtcatggctatggtgaggaagag

SEQ ID NO: 18561 - DNA, 38 bp, Artificial Sequence
  primer
gtaaaacgacggccagttgctttggaatcttagccctc

SEQ ID NO: 18562 - DNA, 21 bp, Artificial Sequence
  primer
taatgcagggaatcttgagcc

SEQ ID NO: 18563 - DNA, 38 bp, Artificial Sequence
  primer
gtaaaacgacggccagtccaaggtaacaatgcccaaac

SEQ ID NO: 18564 - DNA, 27 bp, Artificial Sequence
  primer
aaccagcaatgtagttgttattattcc

SEQ ID NO: 18565 - DNA, 37 bp, Artificial Sequence
  primer
gtaaaacgacggccagtctactaccgcatccctgtcc

SEQ ID NO: 18566 - DNA, 35 bp, Artificial Sequence
  primer
gtaaaacgacggccagtgaggccgcttctgaatcc

SEQ ID NO: 18567 - DNA, 37 bp, Artificial Sequence
  primer
gtaaaacgacggccagtgagcctgtatgacgggaacc

SEQ ID NO: 18568 - DNA, 21 bp, Artificial Sequence
  primer
ccaccgaatactctggaggac

SEQ ID NO: 18569 - DNA, 19 bp, Artificial Sequence
  primer
agacccaggccaggctaag

SEQ ID NO: 18570 - DNA, 38 bp, Artificial Sequence
  primer
gtaaaacgacggccagttggtagtgtagggacttcggc

SEQ ID NO: 18571 - DNA, 19 bp, Artificial Sequence
  primer
ctgtggctgtgggacattg

SEQ ID NO: 18572 - DNA, 22 bp, Artificial Sequence
  primer
ggattgcttcagaaagcgtaag

SEQ ID NO: 18573 - DNA, 38 bp, Artificial Sequence
  primer
gtaaaacgacggccagtctattgaaagttggctggtgg

SEQ ID NO: 18574 - DNA, 21 bp, Artificial Sequence
  primer
cttccagaatcctcccttgtg

SEQ ID NO: 18575 - DNA, 27 bp, Artificial Sequence
  primer
ggtccaatgatagtacctgtattgttg

SEQ ID NO: 18576 - DNA, 38 bp, Artificial Sequence
  primer
gtaaaacgacggccagtgtcattgtgtgaattccgctt

SEQ ID NO: 18577 - DNA, 18 bp, Artificial Sequence
  primer
accacgcctggcctaaac

SEQ ID NO: 18578 - DNA, 21 bp, Artificial Sequence
  primer
ctgtgcccagcatatgaagtc

SEQ ID NO: 18579 - DNA, 38 bp, Artificial Sequence
  primer
gtaaaacgacggccagtgatgactgtggtggcgataga

SEQ ID NO: 18580 - DNA, 23 bp, Artificial Sequence
  primer
catgaacgagggaaataacactg

SEQ ID NO: 18581 - DNA, 39 bp, Artificial Sequence
  primer
gtaaaacgacggccagtcttcccgtccatgtttctctac

SEQ ID NO: 18582 - DNA, 21 bp, Artificial Sequence
  primer
tttcaaagattgcattgtggg

SEQ ID NO: 18583 - DNA, 39 bp, Artificial Sequence
  primer
gtaaaacgacggccagttgaattgttgaagaggccaatc

SEQ ID NO: 18584 - DNA, 21 bp, Artificial Sequence
  primer
ttgctcctggccttaaagttc

SEQ ID NO: 18585 - DNA, 21 bp, Artificial Sequence
  primer
ttgctcctggccttaaagttc

SEQ ID NO: 18586 - DNA, 37 bp, Artificial Sequence
  primer
gtaaaacgacggccagttgaagttcagtccagttgcg

SEQ ID NO: 18587 - DNA, 44 bp, Artificial Sequence
  primer
gtaaaacgacggccagtgactttatgcaaagctcttatacaacc

SEQ ID NO: 18588 - DNA, 24 bp, Artificial Sequence
  primer
ttctgtgggtatgtgcttctaatg

SEQ ID NO: 18589 - DNA, 37 bp, Artificial Sequence
  primer
gtaaaacgacggccagtaccaaacctctctgaggtgg

SEQ ID NO: 18590 - DNA, 37 bp, Artificial Sequence
  primer
gtaaaacgacggccagtgtgttggtgtcagctgttgc

SEQ ID NO: 18591 - DNA, 38 bp, Artificial Sequence
  primer
gtaaaacgacggccagtagtggccctactgcttgtagc

SEQ ID NO: 18592 - DNA, 21 bp, Artificial Sequence
  primer
caaagtgaattggtgccagtc

SEQ ID NO: 18593 - DNA, 40 bp, Artificial Sequence
  primer
gtaaaacgacggccagtgcataataatcgaattgaagccc

SEQ ID NO: 18594 - DNA, 38 bp, Artificial Sequence
  primer
gtaaaacgacggccagtaaatctggaagggtgtgcttt

SEQ ID NO: 18595 - DNA, 38 bp, Artificial Sequence
  primer
gtaaaacgacggccagttcctttgtggatgttctaggg

SEQ ID NO: 18596 - DNA, 21 bp, Artificial Sequence
  primer
acaagtcctgggaatgttgtg

SEQ ID NO: 18597 - DNA, 38 bp, Artificial Sequence
  primer
gtaaaacgacggccagttgtgccagcccttgattatag

SEQ ID NO: 18598 - DNA, 38 bp, Artificial Sequence
  primer
gtaaaacgacggccagtcaagaaccttcctacttgccg

SEQ ID NO: 18599 - DNA, 40 bp, Artificial Sequence
  primer
gtaaaacgacggccagtttagagacgagtattctcagggc

SEQ ID NO: 18600 - DNA, 25 bp, Artificial Sequence
  primer
aaattaaatcaaatgagcttgatgc

SEQ ID NO: 18601 - DNA, 42 bp, Artificial Sequence
  primer
gtaaaacgacggccagttcacgttaatggtgctttagaattt

SEQ ID NO: 18602 - DNA, 41 bp, Artificial Sequence
  primer
gtaaaacgacggccagttttcctggcatatattaggcattt

SEQ ID NO: 18603 - DNA, 41 bp, Artificial Sequence
  primer
gtaaaacgacggccagtgaagaatctccactgtcaagaacc

SEQ ID NO: 18604 - DNA, 38 bp, Artificial Sequence
  primer
gtaaaacgacggccagtatgaatgacatagccctctgc

SEQ ID NO: 18605 - DNA, 25 bp, Artificial Sequence
  primer
gagtgaatatttgaaatgatgctgg

SEQ ID NO: 18606 - DNA, 26 bp, Artificial Sequence
  primer
tgtctttactccgaatgctacaatag

SEQ ID NO: 18607 - DNA, 41 bp, Artificial Sequence
  primer
gtaaaacgacggccagtggactaaccactctttcatttcca

SEQ ID NO: 18608 - DNA, 37 bp, Artificial Sequence
  primer
gtaaaacgacggccagttgtgcgaagtgaaggctagg

SEQ ID NO: 18609 - DNA, 27 bp, Artificial Sequence
  primer
tgactaaactattgtgtgactcacctg

SEQ ID NO: 18610 - DNA, 21 bp, Artificial Sequence
  primer
tgtgtgtgtgtgtgtgtgtgt

SEQ ID NO: 18611 - DNA, 38 bp, Artificial Sequence
  primer
gtaaaacgacggccagtacatgggagtttatgaaacgg

SEQ ID NO: 18612 - DNA, 38 bp, Artificial Sequence
  primer
gtaaaacgacggccagttgagggaggaagtgtttgatg

SEQ ID NO: 18613 - DNA, 39 bp, Artificial Sequence
  primer
gtaaaacgacggccagtcagcaaggatagcagcataagg

SEQ ID NO: 18614 - DNA, 40 bp, Artificial Sequence
  primer
gtaaaacgacggccagttcaaacttgaaaggcacttatgg

SEQ ID NO: 18615 - DNA, 41 bp, Artificial Sequence
  primer
gtaaaacgacggccagtggacttgctttaaggtctgtttcc

SEQ ID NO: 18616 - DNA, 22 bp, Artificial Sequence
  primer
aatgagaggccactttctgttc

SEQ ID NO: 18617 - DNA, 21 bp, Artificial Sequence
  primer
gtcgactgaattgtgctttgc

SEQ ID NO: 18618 - DNA, 38 bp, Artificial Sequence
  primer
gtaaaacgacggccagtcacgtgaccagcagcacttac

SEQ ID NO: 18619 - DNA, 25 bp, Artificial Sequence
  primer
tctggagttcaagaaaccatatcac

SEQ ID NO: 18620 - DNA, 39 bp, Artificial Sequence
  primer
gtaaaacgacggccagtttagtaaactggacagcgcctc

SEQ ID NO: 18621 - DNA, 39 bp, Artificial Sequence
  primer
gtaaaacgacggccagtaaccctgtctcacacacagaaa

SEQ ID NO: 18622 - DNA, 39 bp, Artificial Sequence
  primer
gtaaaacgacggccagtaagaggctgacatgcaccttac

SEQ ID NO: 18623 - DNA, 21 bp, Artificial Sequence
  primer
cggtcttgtctcctaacgtgc

SEQ ID NO: 18624 - DNA, 38 bp, Artificial Sequence
  primer
gtaaaacgacggccagtagtgaacttccaccacatccc

SEQ ID NO: 18625 - DNA, 38 bp, Artificial Sequence
  primer
gtaaaacgacggccagtttggaactcagggtttatggg

SEQ ID NO: 18626 - DNA, 21 bp, Artificial Sequence
  primer
tccaaagatggttggttaggc

SEQ ID NO: 18627 - DNA, 21 bp, Artificial Sequence
  primer
gcagacccttacaattccagc

SEQ ID NO: 18628 - DNA, 21 bp, Artificial Sequence
  primer
gtcagaggaaacgacagcctc

SEQ ID NO: 18629 - DNA, 38 bp, Artificial Sequence
  primer
gtaaaacgacggccagtaaaggctgaggacaaccaaag

SEQ ID NO: 18630 - DNA, 22 bp, Artificial Sequence
  primer
tgcctaagaagtcaactttcgg

SEQ ID NO: 18631 - DNA, 38 bp, Artificial Sequence
  primer
gtaaaacgacggccagttacctgacagtttccacacgg

SEQ ID NO: 18632 - DNA, 21 bp, Artificial Sequence
  primer
tgctggacaaagaagtcaagg

SEQ ID NO: 18633 - DNA, 38 bp, Artificial Sequence
  primer
gtaaaacgacggccagttgggttgtcgagtagtggaag

SEQ ID NO: 18634 - DNA, 38 bp, Artificial Sequence
  primer
gtaaaacgacggccagtggaagctgcacaagtaaaccc

SEQ ID NO: 18635 - DNA, 38 bp, Artificial Sequence
  primer
gtaaaacgacggccagtgaaagaaggacagccaacacc

SEQ ID NO: 18636 - DNA, 38 bp, Artificial Sequence
  primer
gtaaaacgacggccagtagctcaatactcgccttccag

SEQ ID NO: 18637 - DNA, 38 bp, Artificial Sequence
  primer
gtaaaacgacggccagtgcccagcaacgtttaatcaag

SEQ ID NO: 18638 - DNA, 38 bp, Artificial Sequence
  primer
gtaaaacgacggccagtgggaagcaggtgtctgaaatc

SEQ ID NO: 18639 - DNA, 21 bp, Artificial Sequence
  primer
aaggccttcccagtctattgc

SEQ ID NO: 18640 - DNA, 36 bp, Artificial Sequence
  primer
gtaaaacgacggccagtttgtgacttaccctcgggc

SEQ ID NO: 18641 - DNA, 38 bp, Artificial Sequence
  primer
gtaaaacgacggccagtgcctcagcctggctagtgtag

SEQ ID NO: 18642 - DNA, 21 bp, Artificial Sequence
  primer
agctcctaccttgcactggtc

SEQ ID NO: 18643 - DNA, 38 bp, Artificial Sequence
  primer
gtaaaacgacggccagttgctgtctccggactacaaac

SEQ ID NO: 18644 - DNA, 21 bp, Artificial Sequence
  primer
aaggccagacgaaaggaagac

SEQ ID NO: 18645 - DNA, 35 bp, Artificial Sequence
  primer
gtaaaacgacggccagtaagcccgggaccctaaag

SEQ ID NO: 18646 - DNA, 37 bp, Artificial Sequence
  primer
gtaaaacgacggccagtgagacctcttgtgacccacg

SEQ ID NO: 18647 - DNA, 38 bp, Artificial Sequence
  primer
gtaaaacgacggccagtcagtgtgaagggtgcagacag

SEQ ID NO: 18648 - DNA, 36 bp, Artificial Sequence
  primer
gtaaaacgacggccagtagtcccgaatggtcacctg

SEQ ID NO: 18649 - DNA, 38 bp, Artificial Sequence
  primer
gtaaaacgacggccagttctactgagctgtctgggtgg

SEQ ID NO: 18650 - DNA, 21 bp, Artificial Sequence
  primer
gtcccacagagtggagagacc

SEQ ID NO: 18651 - DNA, 24 bp, Artificial Sequence
  primer
gagcaattgaatgaataaagaggg

SEQ ID NO: 18652 - DNA, 40 bp, Artificial Sequence
  primer
gtaaaacgacggccagtacctcataaataggctttgcctg

SEQ ID NO: 18653 - DNA, 38 bp, Artificial Sequence
  primer
gtaaaacgacggccagtagtctgtgaccctcttccctg

SEQ ID NO: 18654 - DNA, 39 bp, Artificial Sequence
  primer
gtaaaacgacggccagtttaggaggcacataatgtctgg

SEQ ID NO: 18655 - DNA, 38 bp, Artificial Sequence
  primer
gtaaaacgacggccagtaaagctcctcagagggtctcc

SEQ ID NO: 18656 - DNA, 19 bp, Artificial Sequence
  primer
gctgagtggttgcctcctc

SEQ ID NO: 18657 - DNA, 35 bp, Artificial Sequence
  primer
gtaaaacgacggccagttctggaagcaggtgctgg

SEQ ID NO: 18658 - DNA, 41 bp, Artificial Sequence
  primer
gtaaaacgacggccagtgaagcatgtccttagtctttggag

SEQ ID NO: 18659 - DNA, 41 bp, Artificial Sequence
  primer
gtaaaacgacggccagtcagtctcagaatgtttccagtgtc

SEQ ID NO: 18660 - DNA, 19 bp, Artificial Sequence
  primer
actggcaccggtagcattg

SEQ ID NO: 18661 - DNA, 23 bp, Artificial Sequence
  primer
ccctccataatgcagagaatatg

SEQ ID NO: 18662 - DNA, 37 bp, Artificial Sequence
  primer
gtaaaacgacggccagtgtattggctgcatgctcacc

SEQ ID NO: 18663 - DNA, 21 bp, Artificial Sequence
  primer
atttaggagttgcgcttccag

SEQ ID NO: 18664 - DNA, 18 bp, Artificial Sequence
  primer
atcagcactgcggacagc

SEQ ID NO: 18665 - DNA, 38 bp, Artificial Sequence
  primer
gtaaaacgacggccagtaagacctgcattctgggaaac

SEQ ID NO: 18666 - DNA, 38 bp, Artificial Sequence
  primer
gtaaaacgacggccagtacttccagccctacctgtgac

SEQ ID NO: 18667 - DNA, 38 bp, Artificial Sequence
  primer
gtaaaacgacggccagttctgcatggagacccactatg

SEQ ID NO: 18668 - DNA, 37 bp, Artificial Sequence
  primer
gtaaaacgacggccagtgtctaggcagcagcacaagc

SEQ ID NO: 18669 - DNA, 38 bp, Artificial Sequence
  primer
gtaaaacgacggccagtaagatcgcgagatttaatggc

SEQ ID NO: 18670 - DNA, 37 bp, Artificial Sequence
  primer
gtaaaacgacggccagttgtgaagcctggtgtgacag

SEQ ID NO: 18671 - DNA, 39 bp, Artificial Sequence
  primer
gtaaaacgacggccagtacacatcctggtttcagagttg

SEQ ID NO: 18672 - DNA, 22 bp, Artificial Sequence
  primer
cctctgtgtgtttgcatgtagc

SEQ ID NO: 18673 - DNA, 22 bp, Artificial Sequence
  primer
aaggtggtatgaattgacccag

SEQ ID NO: 18674 - DNA, 40 bp, Artificial Sequence
  primer
gtaaaacgacggccagttttataaacgggtagactgttgc

SEQ ID NO: 18675 - DNA, 21 bp, Artificial Sequence
  primer
tgtccaaggtgacagcaaatc

SEQ ID NO: 18676 - DNA, 38 bp, Artificial Sequence
  primer
gtaaaacgacggccagtcagtaggctcaccgtcctttc

SEQ ID NO: 18677 - DNA, 38 bp, Artificial Sequence
  primer
gtaaaacgacggccagtcaggacttctgcatttggttg

SEQ ID NO: 18678 - DNA, 38 bp, Artificial Sequence
  primer
gtaaaacgacggccagtgaaaggtgttgtttccttggg

SEQ ID NO: 18679 - DNA, 23 bp, Artificial Sequence
  primer
gctctttgttggaaagaaacaag

SEQ ID NO: 18680 - DNA, 20 bp, Artificial Sequence
  primer
acagcctgtgtgcagacctc

SEQ ID NO: 18681 - DNA, 40 bp, Artificial Sequence
  primer
gtaaaacgacggccagtggtgctaattatgagtggagctg

SEQ ID NO: 18682 - DNA, 24 bp, Artificial Sequence
  primer
tttgaaagtctgtttgtgagatgg

SEQ ID NO: 18683 - DNA, 21 bp, Artificial Sequence
  primer
tttaacacggccatttcactc

SEQ ID NO: 18684 - DNA, 24 bp, Artificial Sequence
  primer
gatacagtgctacaaagcgttcag

SEQ ID NO: 18685 - DNA, 42 bp, Artificial Sequence
  primer
gtaaaacgacggccagtgaatctcaggttcatttggatactg

SEQ ID NO: 18686 - DNA, 21 bp, Artificial Sequence
  primer
actcctgtcactgccatcctc

SEQ ID NO: 18687 - DNA, 42 bp, Artificial Sequence
  primer
gtaaaacgacggccagtcatctgggtagttgtgaagtgtgtt

SEQ ID NO: 18688 - DNA, 40 bp, Artificial Sequence
  primer
gtaaaacgacggccagtgcaggtgataatatttgctggag

SEQ ID NO: 18689 - DNA, 21 bp, Artificial Sequence
  primer
aggattgcaccactgcatctc

SEQ ID NO: 18690 - DNA, 38 bp, Artificial Sequence
  primer
gtaaaacgacggccagtaaagtggcctgtcttgacaaa

SEQ ID NO: 18691 - DNA, 38 bp, Artificial Sequence
  primer
gtaaaacgacggccagtgcagttccatcacttggtacg

SEQ ID NO: 18692 - DNA, 21 bp, Artificial Sequence
  primer
tgtgaagagtgactgttgggc

SEQ ID NO: 18693 - DNA, 35 bp, Artificial Sequence
  primer
gtaaaacgacggccagtcgagacaacatggcctcc

SEQ ID NO: 18694 - DNA, 19 bp, Artificial Sequence
  primer
gaggacttgaacatcgccc

SEQ ID NO: 18695 - DNA, 20 bp, Artificial Sequence
  primer
catgctcaaggtgctgtacg

SEQ ID NO: 18696 - DNA, 35 bp, Artificial Sequence
  primer
gtaaaacgacggccagtggaccagccaccactctg

SEQ ID NO: 18697 - DNA, 21 bp, Artificial Sequence
  primer
ttacaggaaaggaaccaaggc

SEQ ID NO: 18698 - DNA, 20 bp, Artificial Sequence
  primer
gctaaagaaggccggtgaac

SEQ ID NO: 18699 - DNA, 22 bp, Artificial Sequence
  primer
tggtgaatagacaaccaggagg

SEQ ID NO: 18700 - DNA, 21 bp, Artificial Sequence
  primer
ccatgtgtctttcactctggc

SEQ ID NO: 18701 - DNA, 38 bp, Artificial Sequence
  primer
gtaaaacgacggccagttattcagtgggagctttgcag

SEQ ID NO: 18702 - DNA, 21 bp, Artificial Sequence
  primer
ccctgatccctctgacctacc

SEQ ID NO: 18703 - DNA, 21 bp, Artificial Sequence
  primer
gcagaatgtagggaggagctg

SEQ ID NO: 18704 - DNA, 38 bp, Artificial Sequence
  primer
gtaaaacgacggccagttttcagagctcctcaggaagg

SEQ ID NO: 18705 - DNA, 38 bp, Artificial Sequence
  primer
gtaaaacgacggccagtgctggtggttactggaagagg

SEQ ID NO: 18706 - DNA, 38 bp, Artificial Sequence
  primer
gtaaaacgacggccagtaatccagatccttctccctcc

SEQ ID NO: 18707 - DNA, 36 bp, Artificial Sequence
  primer
gtaaaacgacggccagtagtgccctgggattgtgac

SEQ ID NO: 18708 - DNA, 38 bp, Artificial Sequence
  primer
gtaaaacgacggccagtcccttgtgggaacacgtttag

SEQ ID NO: 18709 - DNA, 21 bp, Artificial Sequence
  primer
tgcttagagaaagctgccctg

SEQ ID NO: 18710 - DNA, 38 bp, Artificial Sequence
  primer
gtaaaacgacggccagtgtggaactaactgcagacggc

SEQ ID NO: 18711 - DNA, 21 bp, Artificial Sequence
  primer
agagaggttggattccattcg

SEQ ID NO: 18712 - DNA, 21 bp, Artificial Sequence
  primer
ggaagggcagaggttacagtg

SEQ ID NO: 18713 - DNA, 38 bp, Artificial Sequence
  primer
gtaaaacgacggccagtctttaaagacaaaccggaggc

SEQ ID NO: 18714 - DNA, 21 bp, Artificial Sequence
  primer
aggctcaagttccaagcaaac

SEQ ID NO: 18715 - DNA, 21 bp, Artificial Sequence
  primer
ggaatattgaatcccagcagc

SEQ ID NO: 18716 - DNA, 38 bp, Artificial Sequence
  primer
gtaaaacgacggccagtccattcctgcaactatgggtc

SEQ ID NO: 18717 - DNA, 38 bp, Artificial Sequence
  primer
gtaaaacgacggccagttcctgatacagctgtccttgc

SEQ ID NO: 18718 - DNA, 38 bp, Artificial Sequence
  primer
gtaaaacgacggccagtcactgaagatttcagcaaccc

SEQ ID NO: 18719 - DNA, 22 bp, Artificial Sequence
  primer
gcattgacctgggtagtactgg

SEQ ID NO: 18720 - DNA, 23 bp, Artificial Sequence
  primer
tgtagagaaagggaggaggattg

SEQ ID NO: 18721 - DNA, 23 bp, Artificial Sequence
  primer
aaattcaatggcttcttctgtcc

SEQ ID NO: 18722 - DNA, 21 bp, Artificial Sequence
  primer
tcatggagccatagtttgctg

SEQ ID NO: 18723 - DNA, 38 bp, Artificial Sequence
  primer
gtaaaacgacggccagttaattactgctgatgcagccc

SEQ ID NO: 18724 - DNA, 24 bp, Artificial Sequence
  primer
tttgccttgtaatttggattaagg

SEQ ID NO: 18725 - DNA, 38 bp, Artificial Sequence
  primer
gtaaaacgacggccagtccatctttctccataccctgc

SEQ ID NO: 18726 - DNA, 37 bp, Artificial Sequence
  primer
gtaaaacgacggccagttttggccttggtatttagcg

SEQ ID NO: 18727 - DNA, 38 bp, Artificial Sequence
  primer
gtaaaacgacggccagttagatctggatttcgggatgc

SEQ ID NO: 18728 - DNA, 20 bp, Artificial Sequence
  primer
tcacttggactctcttgccc

SEQ ID NO: 18729 - DNA, 29 bp, Artificial Sequence
  primer
ggaaatagtgtgattcatttagatgtttg

SEQ ID NO: 18730 - DNA, 38 bp, Artificial Sequence
  primer
gtaaaacgacggccagtacttgtgatgtgagctttccg

SEQ ID NO: 18731 - DNA, 38 bp, Artificial Sequence
  primer
gtaaaacgacggccagtaaatcctcagccataagctgc

SEQ ID NO: 18732 - DNA, 21 bp, Artificial Sequence
  primer
tttgtgccactacactctggc

SEQ ID NO: 18733 - DNA, 37 bp, Artificial Sequence
  primer
gtaaaacgacggccagtccatttccaaagaagggttg

SEQ ID NO: 18734 - DNA, 22 bp, Artificial Sequence
  primer
tttccttaggcacagcttcatc

SEQ ID NO: 18735 - DNA, 21 bp, Artificial Sequence
  primer
gatcacatggatagaccggag

SEQ ID NO: 18736 - DNA, 39 bp, Artificial Sequence
  primer
gtaaaacgacggccagttttgttgctcatgtacccaaag

SEQ ID NO: 18737 - DNA, 21 bp, Artificial Sequence
  primer
tatcgtgcagaactgacctcc

SEQ ID NO: 18738 - DNA, 41 bp, Artificial Sequence
  primer
gtaaaacgacggccagttgtaatatgaaccaacggtagctg

SEQ ID NO: 18739 - DNA, 38 bp, Artificial Sequence
  primer
gtaaaacgacggccagtgacacagggtgtgacgatttg

SEQ ID NO: 18740 - DNA, 38 bp, Artificial Sequence
  primer
gtaaaacgacggccagtggacagctaaggtaaggctgc

SEQ ID NO: 18741 - DNA, 38 bp, Artificial Sequence
  primer
gtaaaacgacggccagtgttactatggccaccagaggg

SEQ ID NO: 18742 - DNA, 21 bp, Artificial Sequence
  primer
tacagatgatcgcactctggg

SEQ ID NO: 18743 - DNA, 38 bp, Artificial Sequence
  primer
gtaaaacgacggccagtgagcaaaggtcaacctccatc

SEQ ID NO: 18744 - DNA, 38 bp, Artificial Sequence
  primer
gtaaaacgacggccagtcagtggcctttgaaacagatg

SEQ ID NO: 18745 - DNA, 21 bp, Artificial Sequence
  primer
atgccatcttgcactcagaag

SEQ ID NO: 18746 - DNA, 38 bp, Artificial Sequence
  primer
gtaaaacgacggccagtagcagctctgcactcagacag

SEQ ID NO: 18747 - DNA, 20 bp, Artificial Sequence
  primer
attgcaggactttggaaggc

SEQ ID NO: 18748 - DNA, 37 bp, Artificial Sequence
  primer
gtaaaacgacggccagtactgcagctcctcctcttcc

SEQ ID NO: 18749 - DNA, 37 bp, Artificial Sequence
  primer
gtaaaacgacggccagttcaccaaggatcttcatggc

SEQ ID NO: 18750 - DNA, 21 bp, Artificial Sequence
  primer
agtgaggaccttagtctgcgg

SEQ ID NO: 18751 - DNA, 38 bp, Artificial Sequence
  primer
gtaaaacgacggccagtcaatcggagaaagatgatggg

SEQ ID NO: 18752 - DNA, 21 bp, Artificial Sequence
  primer
gtgattctcctattgcccagg

SEQ ID NO: 18753 - DNA, 38 bp, Artificial Sequence
  primer
gtaaaacgacggccagtcctgcattggctgtgctatac

SEQ ID NO: 18754 - DNA, 21 bp, Artificial Sequence
  primer
acagctcccattaccaaggtg

SEQ ID NO: 18755 - DNA, 21 bp, Artificial Sequence
  primer
aagggctgaagatcaagatgg

SEQ ID NO: 18756 - DNA, 38 bp, Artificial Sequence
  primer
gtaaaacgacggccagtgggtttgggatgaagaagttg

SEQ ID NO: 18757 - DNA, 21 bp, Artificial Sequence
  primer
gaaggatgaagaggatttccg

SEQ ID NO: 18758 - DNA, 38 bp, Artificial Sequence
  primer
gtaaaacgacggccagtgtagcagggtgctggctgtag

SEQ ID NO: 18759 - DNA, 38 bp, Artificial Sequence
  primer
gtaaaacgacggccagtaagtcatctcggatgccctac

SEQ ID NO: 18760 - DNA, 21 bp, Artificial Sequence
  primer
tcagcagcttcgtgtttaagg

SEQ ID NO: 18761 - DNA, 38 bp, Artificial Sequence
  primer
gtaaaacgacggccagtcattccgtctcatctccttcc

SEQ ID NO: 18762 - DNA, 38 bp, Artificial Sequence
  primer
gtaaaacgacggccagtgagccagaatctattgagcgg

SEQ ID NO: 18763 - DNA, 38 bp, Artificial Sequence
  primer
gtaaaacgacggccagtcacttggcttccattagcctg

SEQ ID NO: 18764 - DNA, 20 bp, Artificial Sequence
  primer
gtaggaagggcaggatgcag

SEQ ID NO: 18765 - DNA, 40 bp, Artificial Sequence
  primer
gtaaaacgacggccagttccacttcccatcacagtcatac

SEQ ID NO: 18766 - DNA, 40 bp, Artificial Sequence
  primer
gtaaaacgacggccagtaaagatgaccattgtaaggcaag

SEQ ID NO: 18767 - DNA, 21 bp, Artificial Sequence
  primer
aggcgtgctgaaaccttagag

SEQ ID NO: 18768 - DNA, 38 bp, Artificial Sequence
  primer
gtaaaacgacggccagttaggaggtaatggtagctgcg

SEQ ID NO: 18769 - DNA, 39 bp, Artificial Sequence
  primer
gtaaaacgacggccagtcctagatgacactttggccatc

SEQ ID NO: 18770 - DNA, 38 bp, Artificial Sequence
  primer
gtaaaacgacggccagtagcacaagacactgcgttctc

SEQ ID NO: 18771 - DNA, 38 bp, Artificial Sequence
  primer
gtaaaacgacggccagtcagagcaagcaagatgctgtc

SEQ ID NO: 18772 - DNA, 38 bp, Artificial Sequence
  primer
gtaaaacgacggccagtcaggaggaagtgcttgaaacc

SEQ ID NO: 18773 - DNA, 21 bp, Artificial Sequence
  primer
acctcccaggaatttagctcc

SEQ ID NO: 18774 - DNA, 21 bp, Artificial Sequence
  primer
tgtcgcgatcagtagatcacc

SEQ ID NO: 18775 - DNA, 38 bp, Artificial Sequence
  primer
gtaaaacgacggccagttccatgtcggagtctctctcc

SEQ ID NO: 18776 - DNA, 38 bp, Artificial Sequence
  primer
gtaaaacgacggccagtctccaaagagctggaaggaac

SEQ ID NO: 18777 - DNA, 21 bp, Artificial Sequence
  primer
tgtacctggatgacgtggaac

SEQ ID NO: 18778 - DNA, 37 bp, Artificial Sequence
  primer
gtaaaacgacggccagtgtgtctctgtgcgtgtgtgg

SEQ ID NO: 18779 - DNA, 37 bp, Artificial Sequence
  primer
gtaaaacgacggccagtccacgagtgtgtgtgctgtc

SEQ ID NO: 18780 - DNA, 38 bp, Artificial Sequence
  primer
gtaaaacgacggccagttctttggtgttctgccacatc

SEQ ID NO: 18781 - DNA, 21 bp, Artificial Sequence
  primer
acaaacccaaacataccgagg

SEQ ID NO: 18782 - DNA, 36 bp, Artificial Sequence
  primer
gtaaaacgacggccagtcttccctgccctgtccttc

SEQ ID NO: 18783 - DNA, 38 bp, Artificial Sequence
  primer
gtaaaacgacggccagttcaagggtgtcagagatgctg

SEQ ID NO: 18784 - DNA, 38 bp, Artificial Sequence
  primer
gtaaaacgacggccagtggagaagaggaaggaagaccc

SEQ ID NO: 18785 - DNA, 38 bp, Artificial Sequence
  primer
gtaaaacgacggccagtatctggagagcgagaaggttg

SEQ ID NO: 18786 - DNA, 37 bp, Artificial Sequence
  primer
gtaaaacgacggccagtgttgcatatcctcttggccc

SEQ ID NO: 18787 - DNA, 38 bp, Artificial Sequence
  primer
gtaaaacgacggccagtaaggatattgttcccaccacg

SEQ ID NO: 18788 - DNA, 38 bp, Artificial Sequence
  primer
gtaaaacgacggccagtaatagcgtcctctcctccctg

SEQ ID NO: 18789 - DNA, 38 bp, Artificial Sequence
  primer
gtaaaacgacggccagtgcctgtgaataggaatctgcc

SEQ ID NO: 18790 - DNA, 39 bp, Artificial Sequence
  primer
gtaaaacgacggccagtggatttgaatcaggaagctagg

SEQ ID NO: 18791 - DNA, 38 bp, Artificial Sequence
  primer
gtaaaacgacggccagtaaaggtggcccataaacaagt

SEQ ID NO: 18792 - DNA, 27 bp, Artificial Sequence
  primer
tgaatgtgtaagcatgtatagtgtgtg

SEQ ID NO: 18793 - DNA, 25 bp, Artificial Sequence
  primer
tccttatccatttaacttgcttctg

SEQ ID NO: 18794 - DNA, 38 bp, Artificial Sequence
  primer
gtaaaacgacggccagttcagttctccaatttccctcc

SEQ ID NO: 18795 - DNA, 20 bp, Artificial Sequence
  primer
tgtggcctggcacctataac

SEQ ID NO: 18796 - DNA, 41 bp, Artificial Sequence
  primer
gtaaaacgacggccagtaaaggctgactatggttaatttgc

SEQ ID NO: 18797 - DNA, 39 bp, Artificial Sequence
  primer
gtaaaacgacggccagttgaggtgatgaaggtcagattg

SEQ ID NO: 18798 - DNA, 28 bp, Artificial Sequence
  primer
tttacagtctcacttaacgttccttatt

SEQ ID NO: 18799 - DNA, 39 bp, Artificial Sequence
  primer
gtaaaacgacggccagttttgtgctggctattacagacc

SEQ ID NO: 18800 - DNA, 22 bp, Artificial Sequence
  primer
tgctgagattctttggtaaccc

SEQ ID NO: 18801 - DNA, 18 bp, Artificial Sequence
  primer
tgatggctgaatcatggc

SEQ ID NO: 18802 - DNA, 38 bp, Artificial Sequence
  primer
gtaaaacgacggccagtcagtcaagggctttagttggc

SEQ ID NO: 18803 - DNA, 27 bp, Artificial Sequence
  primer
accactattatttcaggatgataggag

SEQ ID NO: 18804 - DNA, 39 bp, Artificial Sequence
  primer
gtaaaacgacggccagtgccagttcccagaataaccttc

SEQ ID NO: 18805 - DNA, 40 bp, Artificial Sequence
  primer
gtaaaacgacggccagtccagtgaccctagatttccaatg

SEQ ID NO: 18806 - DNA, 38 bp, Artificial Sequence
  primer
gtaaaacgacggccagttggatgaatctgcctcatctg

SEQ ID NO: 18807 - DNA, 38 bp, Artificial Sequence
  primer
gtaaaacgacggccagtttgtgtcttgatgatgagccc

SEQ ID NO: 18808 - DNA, 21 bp, Artificial Sequence
  primer
acagcacatgtcagcacacac

SEQ ID NO: 18809 - DNA, 21 bp, Artificial Sequence
  primer
tttgttgtcctatgccgtgag

SEQ ID NO: 18810 - DNA, 21 bp, Artificial Sequence
  primer
aaagtggaggtgatgtggacc

SEQ ID NO: 18811 - DNA, 38 bp, Artificial Sequence
  primer
gtaaaacgacggccagtcatgtgaatagcaccctggag

SEQ ID NO: 18812 - DNA, 38 bp, Artificial Sequence
  primer
gtaaaacgacggccagtaggaggatggcatgtgttagc

SEQ ID NO: 18813 - DNA, 21 bp, Artificial Sequence
  primer
ttagatcaccatgttgcctgc

SEQ ID NO: 18814 - DNA, 21 bp, Artificial Sequence
  primer
gccaagtggcttctgtttctg

SEQ ID NO: 18815 - DNA, 37 bp, Artificial Sequence
  primer
gtaaaacgacggccagtgtcttcaagctagtcggccc

SEQ ID NO: 18816 - DNA, 21 bp, Artificial Sequence
  primer
gaggaaagcatggaagaggag

SEQ ID NO: 18817 - DNA, 21 bp, Artificial Sequence
  primer
ggctgcttaacatccttgacc

SEQ ID NO: 18818 - DNA, 19 bp, Artificial Sequence
  primer
tttccatccgaacaccgat

SEQ ID NO: 18819 - DNA, 41 bp, Artificial Sequence
  primer
gtaaaacgacggccagttgtttgtgtttcaaattatggtgg

SEQ ID NO: 18820 - DNA, 39 bp, Artificial Sequence
  primer
gtaaaacgacggccagtccgtgccagaaagacaagtaac

SEQ ID NO: 18821 - DNA, 21 bp, Artificial Sequence
  primer
attagtggccagcagaccttc

SEQ ID NO: 18822 - DNA, 38 bp, Artificial Sequence
  primer
gtaaaacgacggccagttttaccagaatgggattgcac

SEQ ID NO: 18823 - DNA, 38 bp, Artificial Sequence
  primer
gtaaaacgacggccagtaccattgtcattcgtgtttgg

SEQ ID NO: 18824 - DNA, 21 bp, Artificial Sequence
  primer
gaccaatcccaactttgcttc

SEQ ID NO: 18825 - DNA, 38 bp, Artificial Sequence
  primer
gtaaaacgacggccagttagtcccaggaacagggagag

SEQ ID NO: 18826 - DNA, 37 bp, Artificial Sequence
  primer
gtaaaacgacggccagtcagactcctgcgctctgttc

SEQ ID NO: 18827 - DNA, 21 bp, Artificial Sequence
  primer
agcaacatcatcgtcaccaac

SEQ ID NO: 18828 - DNA, 19 bp, Artificial Sequence
  primer
gggaagtccctctgcttcc

SEQ ID NO: 18829 - DNA, 21 bp, Artificial Sequence
  primer
caccttcctctcctagaagcc

SEQ ID NO: 18830 - DNA, 21 bp, Artificial Sequence
  primer
catccagaaactgtgtggctc

SEQ ID NO: 18831 - DNA, 38 bp, Artificial Sequence
  primer
gtaaaacgacggccagttgctgagagaggcttagctcc

SEQ ID NO: 18832 - DNA, 25 bp, Artificial Sequence
  primer
ggattaaatataagagttgggtggc

SEQ ID NO: 18833 - DNA, 42 bp, Artificial Sequence
  primer
gtaaaacgacggccagtttctggtcattagtgatgaaactcc

SEQ ID NO: 18834 - DNA, 38 bp, Artificial Sequence
  primer
gtaaaacgacggccagttaagggtgaaaggtgagcaaa

SEQ ID NO: 18835 - DNA, 37 bp, Artificial Sequence
  primer
gtaaaacgacggccagttcctgcctctctcttccctc

SEQ ID NO: 18836 - DNA, 20 bp, Artificial Sequence
  primer
aggacgcttagcctggaaag

SEQ ID NO: 18837 - DNA, 38 bp, Artificial Sequence
  primer
gtaaaacgacggccagtgggaaccagtgtatctgtggg

SEQ ID NO: 18838 - DNA, 38 bp, Artificial Sequence
  primer
gtaaaacgacggccagttctcagatgaactgtgctccc

SEQ ID NO: 18839 - DNA, 21 bp, Artificial Sequence
  primer
tggtctacacctgcctgtgac

SEQ ID NO: 18840 - DNA, 21 bp, Artificial Sequence
  primer
actaacacttgccacaccagc

SEQ ID NO: 18841 - DNA, 38 bp, Artificial Sequence
  primer
gtaaaacgacggccagtaacacccagaaagtgcctacc

SEQ ID NO: 18842 - DNA, 38 bp, Artificial Sequence
  primer
gtaaaacgacggccagttgttcagtcgacaacagcagg

SEQ ID NO: 18843 - DNA, 20 bp, Artificial Sequence
  primer
atcaagtggagctgactcgc

SEQ ID NO: 18844 - DNA, 38 bp, Artificial Sequence
  primer
gtaaaacgacggccagttactgggaagagggacacacc

SEQ ID NO: 18845 - DNA, 21 bp, Artificial Sequence
  primer
acgccgtattccctgtatgtc

SEQ ID NO: 18846 - DNA, 37 bp, Artificial Sequence
  primer
gtaaaacgacggccagtggcactagcgtgagaacctg

SEQ ID NO: 18847 - DNA, 21 bp, Artificial Sequence
  primer
aggagaaccgccttatcttcc

SEQ ID NO: 18848 - DNA, 36 bp, Artificial Sequence
  primer
gtaaaacgacggccagtaatggagtccggagctgtg

SEQ ID NO: 18849 - DNA, 21 bp, Artificial Sequence
  primer
ccttcttgcttggagatgctg

SEQ ID NO: 18850 - DNA, 19 bp, Artificial Sequence
  primer
aactttcgctgcctccttc

SEQ ID NO: 18851 - DNA, 21 bp, Artificial Sequence
  primer
gactcagtgtgaatccatgcg

SEQ ID NO: 18852 - DNA, 37 bp, Artificial Sequence
  primer
gtaaaacgacggccagtaggacatgaagactgaggcg

SEQ ID NO: 18853 - DNA, 22 bp, Artificial Sequence
  primer
tgtctctgtgtgtctctccctg

SEQ ID NO: 18854 - DNA, 20 bp, Artificial Sequence
  primer
ctctcagggacttcccaacc

SEQ ID NO: 18855 - DNA, 21 bp, Artificial Sequence
  primer
ccaagaatggagacccaaatg

SEQ ID NO: 18856 - DNA, 21 bp, Artificial Sequence
  primer
tgtcggttcaccttaaggcac

SEQ ID NO: 18857 - DNA, 22 bp, Artificial Sequence
  primer
tgaaccatccaagataagccag

SEQ ID NO: 18858 - DNA, 36 bp, Artificial Sequence
  primer
gtaaaacgacggccagtctgtcctgccagagccttg

SEQ ID NO: 18859 - DNA, 20 bp, Artificial Sequence
  primer
aaatgcctgtccaggtcctc

SEQ ID NO: 18860 - DNA, 38 bp, Artificial Sequence
  primer
gtaaaacgacggccagtccactggagaagacaaggagc

SEQ ID NO: 18861 - DNA, 37 bp, Artificial Sequence
  primer
gtaaaacgacggccagtaggagcgtttcctccttgag

SEQ ID NO: 18862 - DNA, 38 bp, Artificial Sequence
  primer
gtaaaacgacggccagtcaggccatatttggatctgtg

SEQ ID NO: 18863 - DNA, 36 bp, Artificial Sequence
  primer
gtaaaacgacggccagtggagcacggaaccaaagag

SEQ ID NO: 18864 - DNA, 42 bp, Artificial Sequence
  primer
gtaaaacgacggccagtctgttacattgttcatgactccttc

SEQ ID NO: 18865 - DNA, 39 bp, Artificial Sequence
  primer
gtaaaacgacggccagtaagtcagcaaacgacctatgga

SEQ ID NO: 18866 - DNA, 38 bp, Artificial Sequence
  primer
gtaaaacgacggccagtaggaagagagctggaggacag

SEQ ID NO: 18867 - DNA, 21 bp, Artificial Sequence
  primer
ggtggaagctgttgtaactgg

SEQ ID NO: 18868 - DNA, 41 bp, Artificial Sequence
  primer
gtaaaacgacggccagttctgaattgaaatcctgagagatg

SEQ ID NO: 18869 - DNA, 38 bp, Artificial Sequence
  primer
gtaaaacgacggccagtgttccgtgaaagcaaagaacc

SEQ ID NO: 18870 - DNA, 38 bp, Artificial Sequence
  primer
gtaaaacgacggccagtgaaccgccatgaagagagaag

SEQ ID NO: 18871 - DNA, 40 bp, Artificial Sequence
  primer
gtaaaacgacggccagtccaaatagtgaaatccagccttt

SEQ ID NO: 18872 - DNA, 41 bp, Artificial Sequence
  primer
gtaaaacgacggccagtatcattatccaagttgttggtttg

SEQ ID NO: 18873 - DNA, 38 bp, Artificial Sequence
  primer
gtaaaacgacggccagtgggacagagcagtttgaaagg

SEQ ID NO: 18874 - DNA, 21 bp, Artificial Sequence
  primer
cacttgccaaaggagatgaag

SEQ ID NO: 18875 - DNA, 38 bp, Artificial Sequence
  primer
gtaaaacgacggccagtgggtgcttgccttattcaatc

SEQ ID NO: 18876 - DNA, 20 bp, Artificial Sequence
  primer
cttgagaagcgtcctgatgg

SEQ ID NO: 18877 - DNA, 38 bp, Artificial Sequence
  primer
gtaaaacgacggccagtgctagctccacgacaaaggag

SEQ ID NO: 18878 - DNA, 24 bp, Artificial Sequence
  primer
agagagttcaggaaattccaatgc

SEQ ID NO: 18879 - DNA, 37 bp, Artificial Sequence
  primer
gtaaaacgacggccagtgaaaggtgttatcctggccc

SEQ ID NO: 18880 - DNA, 39 bp, Artificial Sequence
  primer
gtaaaacgacggccagttttgggagacataatttgaccg

SEQ ID NO: 18881 - DNA, 25 bp, Artificial Sequence
  primer
tctcatgctagtcttctaatttggg

SEQ ID NO: 18882 - DNA, 22 bp, Artificial Sequence
  primer
ggactgaagacagtttgcttgc

SEQ ID NO: 18883 - DNA, 38 bp, Artificial Sequence
  primer
gtaaaacgacggccagttcctaagctcaaggtatccgc

SEQ ID NO: 18884 - DNA, 37 bp, Artificial Sequence
  primer
gtaaaacgacggccagtttcacctgcagactgtcacc

SEQ ID NO: 18885 - DNA, 38 bp, Artificial Sequence
  primer
gtaaaacgacggccagtgcagattgacttggatttggc

SEQ ID NO: 18886 - DNA, 41 bp, Artificial Sequence
  primer
gtaaaacgacggccagtcattgagtagttcttgccttcttt

SEQ ID NO: 18887 - DNA, 23 bp, Artificial Sequence
  primer
ggttgtagatgatctgttgggtg

SEQ ID NO: 18888 - DNA, 38 bp, Artificial Sequence
  primer
gtaaaacgacggccagttcctcttggctcattcatttg

SEQ ID NO: 18889 - DNA, 20 bp, Artificial Sequence
  primer
ttggcctctgaaagtgttgg

SEQ ID NO: 18890 - DNA, 40 bp, Artificial Sequence
  primer
gtaaaacgacggccagtaaagcctagtttagatgcttcgc

SEQ ID NO: 18891 - DNA, 42 bp, Artificial Sequence
  primer
gtaaaacgacggccagtttgttctagctgcataatttctttg

SEQ ID NO: 18892 - DNA, 35 bp, Artificial Sequence
  primer
gtaaaacgacggccagtagtgtgggcctgttgcag

SEQ ID NO: 18893 - DNA, 21 bp, Artificial Sequence
  primer
atcaaagcccattgtctgatg

SEQ ID NO: 18894 - DNA, 38 bp, Artificial Sequence
  primer
gtaaaacgacggccagtcccactttcgattggttgaag

SEQ ID NO: 18895 - DNA, 38 bp, Artificial Sequence
  primer
gtaaaacgacggccagtaaagttgagctgccacaaagc

SEQ ID NO: 18896 - DNA, 38 bp, Artificial Sequence
  primer
gtaaaacgacggccagtatcatctggccgatattgctg

SEQ ID NO: 18897 - DNA, 38 bp, Artificial Sequence
  primer
gtaaaacgacggccagtagagagagagggtggtcaagg

SEQ ID NO: 18898 - DNA, 37 bp, Artificial Sequence
  primer
gtaaaacgacggccagttcacaggtcttcaagctggg

SEQ ID NO: 18899 - DNA, 21 bp, Artificial Sequence
  primer
tattgattgggagccttctgg

SEQ ID NO: 18900 - DNA, 38 bp, Artificial Sequence
  primer
gtaaaacgacggccagtaactttgcagcactaccctgc

SEQ ID NO: 18901 - DNA, 21 bp, Artificial Sequence
  primer
aagcaatcctgcaggtgaatc

SEQ ID NO: 18902 - DNA, 38 bp, Artificial Sequence
  primer
gtaaaacgacggccagtgcatcacagtctgtcaccctc

SEQ ID NO: 18903 - DNA, 38 bp, Artificial Sequence
  primer
gtaaaacgacggccagtaaactcacctacccgtgaacc

SEQ ID NO: 18904 - DNA, 22 bp, Artificial Sequence
  primer
tcacttattgcatttccttgcc

SEQ ID NO: 18905 - DNA, 26 bp, Artificial Sequence
  primer
ggaatctagttgtctctctgtggttt

SEQ ID NO: 18906 - DNA, 44 bp, Artificial Sequence
  primer
gtaaaacgacggccagtacctactaaggattataccctctggtc

SEQ ID NO: 18907 - DNA, 39 bp, Artificial Sequence
  primer
gtaaaacgacggccagtccactaagctacattgccttcc

SEQ ID NO: 18908 - DNA, 44 bp, Artificial Sequence
  primer
gtaaaacgacggccagtctcttcagggaaagtaataataacagc

SEQ ID NO: 18909 - DNA, 21 bp, Artificial Sequence
  primer
ctggtgtagggtcctggagac

SEQ ID NO: 18910 - DNA, 21 bp, Artificial Sequence
  primer
agtgggagtgaagaggtcagc

SEQ ID NO: 18911 - DNA, 21 bp, Artificial Sequence
  primer
tgtgaaggagagaacctgtgg

SEQ ID NO: 18912 - DNA, 38 bp, Artificial Sequence
  primer
gtaaaacgacggccagtgatggacagggctcaggtaag

SEQ ID NO: 18913 - DNA, 27 bp, Artificial Sequence
  primer
gcaacttcaatatacaagtggtgaaat

SEQ ID NO: 18914 - DNA, 38 bp, Artificial Sequence
  primer
gtaaaacgacggccagtatgcctgggcaataacaactc

SEQ ID NO: 18915 - DNA, 37 bp, Artificial Sequence
  primer
gtaaaacgacggccagtgatgggatttggcctctgta

SEQ ID NO: 18916 - DNA, 24 bp, Artificial Sequence
  primer
tgttccagttccacaatgtaattc

SEQ ID NO: 18917 - DNA, 38 bp, Artificial Sequence
  primer
gtaaaacgacggccagtatccacagccagaatcatcag

SEQ ID NO: 18918 - DNA, 37 bp, Artificial Sequence
  primer
gtaaaacgacggccagtacctgggaaaggaagtcgag

SEQ ID NO: 18919 - DNA, 38 bp, Artificial Sequence
  primer
gtaaaacgacggccagtggagattagtctggcagggtg

SEQ ID NO: 18920 - DNA, 38 bp, Artificial Sequence
  primer
gtaaaacgacggccagtttcacacttgaggactggagc

SEQ ID NO: 18921 - DNA, 39 bp, Artificial Sequence
  primer
gtaaaacgacggccagttcagtgctccagagaagtaggg

SEQ ID NO: 18922 - DNA, 22 bp, Artificial Sequence
  primer
tgacatgttgtttggagtaggg

SEQ ID NO: 18923 - DNA, 38 bp, Artificial Sequence
  primer
gtaaaacgacggccagtagagtggtgtttatccagggc

SEQ ID NO: 18924 - DNA, 38 bp, Artificial Sequence
  primer
gtaaaacgacggccagttcatggcacatgtcagttcag

SEQ ID NO: 18925 - DNA, 21 bp, Artificial Sequence
  primer
atgctcgaaacttcttcctgc

SEQ ID NO: 18926 - DNA, 39 bp, Artificial Sequence
  primer
gtaaaacgacggccagtaaagctggagtcagagatttgc

SEQ ID NO: 18927 - DNA, 23 bp, Artificial Sequence
  primer
ctcactttaacagtgggtatggg

SEQ ID NO: 18928 - DNA, 38 bp, Artificial Sequence
  primer
gtaaaacgacggccagtcgttgagggaagagctagtgg

SEQ ID NO: 18929 - DNA, 21 bp, Artificial Sequence
  primer
tggtgtttcagtctctgctcc

SEQ ID NO: 18930 - DNA, 21 bp, Artificial Sequence
  primer
aatgggctctttgagaagctg

SEQ ID NO: 18931 - DNA, 39 bp, Artificial Sequence
  primer
gtaaaacgacggccagtggctcgatggagtagttcaatg

SEQ ID NO: 18932 - DNA, 38 bp, Artificial Sequence
  primer
gtaaaacgacggccagtgcagtctccttgttccacaac

SEQ ID NO: 18933 - DNA, 38 bp, Artificial Sequence
  primer
gtaaaacgacggccagtttcagaaagggtgttccagtg

SEQ ID NO: 18934 - DNA, 38 bp, Artificial Sequence
  primer
gtaaaacgacggccagttacctggtgactgtgcgaaac

SEQ ID NO: 18935 - DNA, 38 bp, Artificial Sequence
  primer
gtaaaacgacggccagtgtggaatttgacatgtccgtg

SEQ ID NO: 18936 - DNA, 40 bp, Artificial Sequence
  primer
gtaaaacgacggccagtaagcatttggtgaatatgattgc

SEQ ID NO: 18937 - DNA, 38 bp, Artificial Sequence
  primer
gtaaaacgacggccagtctgctacccagaaggaacagg

SEQ ID NO: 18938 - DNA, 21 bp, Artificial Sequence
  primer
tgtgtgggaaccttctgtctg

SEQ ID NO: 18939 - DNA, 38 bp, Artificial Sequence
  primer
gtaaaacgacggccagtggtcctgtctccttgttctgc

SEQ ID NO: 18940 - DNA, 20 bp, Artificial Sequence
  primer
ctgtagtgaagcaggctggg

SEQ ID NO: 18941 - DNA, 38 bp, Artificial Sequence
  primer
gtaaaacgacggccagttctctgggactttcttgaggg

SEQ ID NO: 18942 - DNA, 39 bp, Artificial Sequence
  primer
gtaaaacgacggccagttgtagccagccaagtgacatag

SEQ ID NO: 18943 - DNA, 38 bp, Artificial Sequence
  primer
gtaaaacgacggccagttgacagatctccgagttccag

SEQ ID NO: 18944 - DNA, 38 bp, Artificial Sequence
  primer
gtaaaacgacggccagtaacgcctcacattctgacctc

SEQ ID NO: 18945 - DNA, 20 bp, Artificial Sequence
  primer
agaggcttcctcacctcacc

SEQ ID NO: 18946 - DNA, 39 bp, Artificial Sequence
  primer
gtaaaacgacggccagtccctctttgtgcacatgagttc

SEQ ID NO: 18947 - DNA, 22 bp, Artificial Sequence
  primer
cagggtgggagaaatgattatg

SEQ ID NO: 18948 - DNA, 21 bp, Artificial Sequence
  primer
cctgtgacgtgcaatttaccc

SEQ ID NO: 18949 - DNA, 21 bp, Artificial Sequence
  primer
cagtgttcccaattgcctctc

SEQ ID NO: 18950 - DNA, 39 bp, Artificial Sequence
  primer
gtaaaacgacggccagtagaaagcatcaacatacagcca

SEQ ID NO: 18951 - DNA, 36 bp, Artificial Sequence
  primer
gtaaaacgacggccagtaaatgccactgcacattcg

SEQ ID NO: 18952 - DNA, 40 bp, Artificial Sequence
  primer
gtaaaacgacggccagtgtcatgtcacatctggatttctg

SEQ ID NO: 18953 - DNA, 44 bp, Artificial Sequence
  primer
gtaaaacgacggccagtgcttccacttgttataaatttgaactc

SEQ ID NO: 18954 - DNA, 26 bp, Artificial Sequence
  primer
aatcaatgaattctgaagaccaatag

SEQ ID NO: 18955 - DNA, 37 bp, Artificial Sequence
  primer
gtaaaacgacggccagtgcttagcttccacagcagcc

SEQ ID NO: 18956 - DNA, 21 bp, Artificial Sequence
  primer
cttccatgggttgaaattctg

SEQ ID NO: 18957 - DNA, 22 bp, Artificial Sequence
  primer
ttgctaacagaccttccactcc

SEQ ID NO: 18958 - DNA, 21 bp, Artificial Sequence
  primer
tcatgatccacctgcactttg

SEQ ID NO: 18959 - DNA, 21 bp, Artificial Sequence
  primer
tatgttgctgcaatctggaca

SEQ ID NO: 18960 - DNA, 38 bp, Artificial Sequence
  primer
gtaaaacgacggccagttcacatacacacagcacggac

SEQ ID NO: 18961 - DNA, 22 bp, Artificial Sequence
  primer
tggctgattgatattccctgag

SEQ ID NO: 18962 - DNA, 26 bp, Artificial Sequence
  primer
ttcctggagttaaattaagtgtggac

SEQ ID NO: 18963 - DNA, 24 bp, Artificial Sequence
  primer
tgttacattggtgaaattcttcat

SEQ ID NO: 18964 - DNA, 19 bp, Artificial Sequence
  primer
gccatgttcacacctctgc

SEQ ID NO: 18965 - DNA, 39 bp, Artificial Sequence
  primer
gtaaaacgacggccagtaagacaaatacgtggagatggg

SEQ ID NO: 18966 - DNA, 25 bp, Artificial Sequence
  primer
tgttgcagtctatgtatcctttcag

SEQ ID NO: 18967 - DNA, 24 bp, Artificial Sequence
  primer
tttgtgtcaggtaagctgctttat

SEQ ID NO: 18968 - DNA, 21 bp, Artificial Sequence
  primer
ttgtctgagcgattctgttgc

SEQ ID NO: 18969 - DNA, 38 bp, Artificial Sequence
  primer
gtaaaacgacggccagtgctttagggaccggaagagtc

SEQ ID NO: 18970 - DNA, 21 bp, Artificial Sequence
  primer
ttgtggcaataagatgaaccg

SEQ ID NO: 18971 - DNA, 19 bp, Artificial Sequence
  primer
agcctgccagagtgctagg

SEQ ID NO: 18972 - DNA, 21 bp, Artificial Sequence
  primer
gccagacagtgatgatgaagc

SEQ ID NO: 18973 - DNA, 21 bp, Artificial Sequence
  primer
tttgcaggctttgattgtctg

SEQ ID NO: 18974 - DNA, 41 bp, Artificial Sequence
  primer
gtaaaacgacggccagtccttaaacccttgaagtgatatgc

SEQ ID NO: 18975 - DNA, 21 bp, Artificial Sequence
  primer
gcaaagcattgaatacggctc

SEQ ID NO: 18976 - DNA, 21 bp, Artificial Sequence
  primer
gccaagaatgtcatatgcctc

SEQ ID NO: 18977 - DNA, 38 bp, Artificial Sequence
  primer
gtaaaacgacggccagtacagctgggtcgtgtgtaatg

SEQ ID NO: 18978 - DNA, 38 bp, Artificial Sequence
  primer
gtaaaacgacggccagtaagcatgaagtcctcagggtc

SEQ ID NO: 18979 - DNA, 20 bp, Artificial Sequence
  primer
gtggtgcatgcctgtagtcc

SEQ ID NO: 18980 - DNA, 37 bp, Artificial Sequence
  primer
gtaaaacgacggccagtaagtgcgaggttcacctgag

SEQ ID NO: 18981 - DNA, 39 bp, Artificial Sequence
  primer
gtaaaacgacggccagtaattacatcctttgccaagacc

SEQ ID NO: 18982 - DNA, 21 bp, Artificial Sequence
  primer
acttccttatggccaggacag

SEQ ID NO: 18983 - DNA, 40 bp, Artificial Sequence
  primer
gtaaaacgacggccagtcagggaaagtcataacaaaggac

SEQ ID NO: 18984 - DNA, 38 bp, Artificial Sequence
  primer
gtaaaacgacggccagtaagcatcaccttccactctgc

SEQ ID NO: 18985 - DNA, 38 bp, Artificial Sequence
  primer
gtaaaacgacggccagtatcatcaccagagacacctgc

SEQ ID NO: 18986 - DNA, 38 bp, Artificial Sequence
  primer
gtaaaacgacggccagtattccggagtttgtgcatctc

SEQ ID NO: 18987 - DNA, 38 bp, Artificial Sequence
  primer
gtaaaacgacggccagtgtccagaggagactggaggtg

SEQ ID NO: 18988 - DNA, 21 bp, Artificial Sequence
  primer
aatccagaaatggcctgtcac

SEQ ID NO: 18989 - DNA, 21 bp, Artificial Sequence
  primer
gggacacgaccttgctaagag

SEQ ID NO: 18990 - DNA, 21 bp, Artificial Sequence
  primer
aaacaatgctcttgacctgcc

SEQ ID NO: 18991 - DNA, 38 bp, Artificial Sequence
  primer
gtaaaacgacggccagtacagctacaagtccaaagccc

SEQ ID NO: 18992 - DNA, 21 bp, Artificial Sequence
  primer
tggaaggagagttggagatgg

SEQ ID NO: 18993 - DNA, 21 bp, Artificial Sequence
  primer
agaggactttgccacagaagg

SEQ ID NO: 18994 - DNA, 36 bp, Artificial Sequence
  primer
gtaaaacgacggccagtacagatcctggagcgaacc

SEQ ID NO: 18995 - DNA, 37 bp, Artificial Sequence
  primer
gtaaaacgacggccagtatttcctggctcctcgactg

SEQ ID NO: 18996 - DNA, 21 bp, Artificial Sequence
  primer
tggtccgtacctttgggttag

SEQ ID NO: 18997 - DNA, 21 bp, Artificial Sequence
  primer
tcccatgctacctcattcctc

SEQ ID NO: 18998 - DNA, 20 bp, Artificial Sequence
  primer
cgttcagtgtgagtgcaagg

SEQ ID NO: 18999 - DNA, 37 bp, Artificial Sequence
  primer
gtaaaacgacggccagtccttagcaaagctggctcac

SEQ ID NO: 19000 - DNA, 21 bp, Artificial Sequence
  primer
aaagaccttggtggctgagac

SEQ ID NO: 19001 - DNA, 21 bp, Artificial Sequence
  primer
gctggctacagcataccactg

SEQ ID NO: 19002 - DNA, 37 bp, Artificial Sequence
  primer
gtaaaacgacggccagttaacagaagattggcgcagg

SEQ ID NO: 19003 - DNA, 38 bp, Artificial Sequence
  primer
gtaaaacgacggccagtttacccagtcacaatcggtcc

SEQ ID NO: 19004 - DNA, 38 bp, Artificial Sequence
  primer
gtaaaacgacggccagtttgtcacagaccaaacccaac

SEQ ID NO: 19005 - DNA, 21 bp, Artificial Sequence
  primer
tttgcctgcagggataatagc

SEQ ID NO: 19006 - DNA, 21 bp, Artificial Sequence
  primer
atccctgttgctcactggttc

SEQ ID NO: 19007 - DNA, 21 bp, Artificial Sequence
  primer
gtttgcaggtaggaaagctgg

SEQ ID NO: 19008 - DNA, 21 bp, Artificial Sequence
  primer
cagcccaacaggctaataagg

SEQ ID NO: 19009 - DNA, 21 bp, Artificial Sequence
  primer
tctactgctccctcttcagcg

SEQ ID NO: 19010 - DNA, 21 bp, Artificial Sequence
  primer
taagtctgatttcggtgctgg

SEQ ID NO: 19011 - DNA, 21 bp, Artificial Sequence
  primer
tggcatgttctgtgtttaggg

SEQ ID NO: 19012 - DNA, 37 bp, Artificial Sequence
  primer
gtaaaacgacggccagtagtcggctgtgaagctgatg

SEQ ID NO: 19013 - DNA, 21 bp, Artificial Sequence
  primer
cctcttcattgccaggtatgc

SEQ ID NO: 19014 - DNA, 38 bp, Artificial Sequence
  primer
gtaaaacgacggccagtcacaccatagacttggagggc

SEQ ID NO: 19015 - DNA, 21 bp, Artificial Sequence
  primer
caccggttaattctgccaatc

SEQ ID NO: 19016 - DNA, 21 bp, Artificial Sequence
  primer
ggcttacttgtggatgctttg

SEQ ID NO: 19017 - DNA, 21 bp, Artificial Sequence
  primer
ttggaaaggtgttgatcttgc

SEQ ID NO: 19018 - DNA, 22 bp, Artificial Sequence
  primer
cctcttacaatgtggtgaaacg

SEQ ID NO: 19019 - DNA, 38 bp, Artificial Sequence
  primer
gtaaaacgacggccagttcccattcatccctgtgtatg

SEQ ID NO: 19020 - DNA, 21 bp, Artificial Sequence
  primer
ggcttacttgtggatgctttg

SEQ ID NO: 19021 - DNA, 38 bp, Artificial Sequence
  primer
gtaaaacgacggccagtagaccttccaccaatctgctc

SEQ ID NO: 19022 - DNA, 22 bp, Artificial Sequence
  primer
tttgatgaccctttgctttgtt

SEQ ID NO: 19023 - DNA, 21 bp, Artificial Sequence
  primer
cggtatgctcagttctgcatt

SEQ ID NO: 19024 - DNA, 28 bp, Artificial Sequence
  primer
ttgctttcttaggatacaatacaatgat

SEQ ID NO: 19025 - DNA, 21 bp, Artificial Sequence
  primer
cccgaccctcatccagtattc

SEQ ID NO: 19026 - DNA, 41 bp, Artificial Sequence
  primer
gtaaaacgacggccagttgatgaatgctcaatgttcctatg

SEQ ID NO: 19027 - DNA, 21 bp, Artificial Sequence
  primer
ctataccctccagccttgctc

SEQ ID NO: 19028 - DNA, 38 bp, Artificial Sequence
  primer
gtaaaacgacggccagttcagactgaagcttgaccagg

SEQ ID NO: 19029 - DNA, 21 bp, Artificial Sequence
  primer
tgtttccacatagagccttgg

SEQ ID NO: 19030 - DNA, 38 bp, Artificial Sequence
  primer
gtaaaacgacggccagtgcacactggaaagggaggtag

SEQ ID NO: 19031 - DNA, 37 bp, Artificial Sequence
  primer
gtaaaacgacggccagtcaccacacaacacttgccac

SEQ ID NO: 19032 - DNA, 40 bp, Artificial Sequence
  primer
gtaaaacgacggccagttctgtggccattcaataaacttg

SEQ ID NO: 19033 - DNA, 44 bp, Artificial Sequence
  primer
gtaaaacgacggccagtttctaaagatatagtgaaggcaagtcc

SEQ ID NO: 19034 - DNA, 43 bp, Artificial Sequence
  primer
gtaaaacgacggccagtacctactagcttccgcaatattagtt

SEQ ID NO: 19035 - DNA, 38 bp, Artificial Sequence
  primer
gtaaaacgacggccagtacgcaggtgtccactttatcc

SEQ ID NO: 19036 - DNA, 22 bp, Artificial Sequence
  primer
tgccaattgcctacttccatac

SEQ ID NO: 19037 - DNA, 22 bp, Artificial Sequence
  primer
cacaaggcactgtgaagaattg

SEQ ID NO: 19038 - DNA, 38 bp, Artificial Sequence
  primer
gtaaaacgacggccagtttacatgtggtagggtgggag

SEQ ID NO: 19039 - DNA, 23 bp, Artificial Sequence
  primer
aattgacatcagtttcatgttgc

SEQ ID NO: 19040 - DNA, 25 bp, Artificial Sequence
  primer
caataaccacaataagcccataatc

SEQ ID NO: 19041 - DNA, 38 bp, Artificial Sequence
  primer
gtaaaacgacggccagtagtgcatctcagtgcaaggtg

SEQ ID NO: 19042 - DNA, 21 bp, Artificial Sequence
  primer
gcaaaggatagggagagaagg

SEQ ID NO: 19043 - DNA, 38 bp, Artificial Sequence
  primer
gtaaaacgacggccagttcgaattcagttgttggcaag

SEQ ID NO: 19044 - DNA, 19 bp, Artificial Sequence
  primer
ggtgagcagagatcatgcc

SEQ ID NO: 19045 - DNA, 37 bp, Artificial Sequence
  primer
gtaaaacgacggccagtcagcctcctcccagtatgtg

SEQ ID NO: 19046 - DNA, 38 bp, Artificial Sequence
  primer
gtaaaacgacggccagtttctaatgttgggtgggaagc

SEQ ID NO: 19047 - DNA, 22 bp, Artificial Sequence
  primer
gccaatgtgaaggactgtatcc

SEQ ID NO: 19048 - DNA, 21 bp, Artificial Sequence
  primer
tacagagcccagaacaccttg

SEQ ID NO: 19049 - DNA, 39 bp, Artificial Sequence
  primer
gtaaaacgacggccagtcttgcttgattagtgccaagtc

SEQ ID NO: 19050 - DNA, 42 bp, Artificial Sequence
  primer
gtaaaacgacggccagtaactttgtaaatcaaggtttcatgc

SEQ ID NO: 19051 - DNA, 38 bp, Artificial Sequence
  primer
gtaaaacgacggccagtcctgtgctaagggcctaattg

SEQ ID NO: 19052 - DNA, 43 bp, Artificial Sequence
  primer
gtaaaacgacggccagtttcttcgaaagatagacctgttaagg

SEQ ID NO: 19053 - DNA, 23 bp, Artificial Sequence
  primer
ctgcatcaataggaagaggtttc

SEQ ID NO: 19054 - DNA, 36 bp, Artificial Sequence
  primer
gtaaaacgacggccagttttgcccaagaagccattt

SEQ ID NO: 19055 - DNA, 22 bp, Artificial Sequence
  primer
gccaagccaaatcaatcttaac

SEQ ID NO: 19056 - DNA, 38 bp, Artificial Sequence
  primer
gtaaaacgacggccagttgccaggcactacagatatgg

SEQ ID NO: 19057 - DNA, 38 bp, Artificial Sequence
  primer
gtaaaacgacggccagttgctaccagcatttcttccac

SEQ ID NO: 19058 - DNA, 36 bp, Artificial Sequence
  primer
gtaaaacgacggccagtctagagggcgtgtccgttg

SEQ ID NO: 19059 - DNA, 38 bp, Artificial Sequence
  primer
gtaaaacgacggccagttggaggtgtttcattcagagg

SEQ ID NO: 19060 - DNA, 21 bp, Artificial Sequence
  primer
ccagtccagtcctcctctttc

SEQ ID NO: 19061 - DNA, 21 bp, Artificial Sequence
  primer
cattgacctgacatctttccc

SEQ ID NO: 19062 - DNA, 21 bp, Artificial Sequence
  primer
cacagacctgagagaggaggg

SEQ ID NO: 19063 - DNA, 21 bp, Artificial Sequence
  primer
cagggttgctgttatcttccc

SEQ ID NO: 19064 - DNA, 40 bp, Artificial Sequence
  primer
gtaaaacgacggccagttgagtttaccatcatccagttcc

SEQ ID NO: 19065 - DNA, 38 bp, Artificial Sequence
  primer
gtaaaacgacggccagtagggagacctacctcacttgg

SEQ ID NO: 19066 - DNA, 38 bp, Artificial Sequence
  primer
gtaaaacgacggccagttgttagagatgaggcagaggg

SEQ ID NO: 19067 - DNA, 39 bp, Artificial Sequence
  primer
gtaaaacgacggccagtcatctctaccagccacccttag

SEQ ID NO: 19068 - DNA, 21 bp, Artificial Sequence
  primer
cgatgggcactagagacaaag

SEQ ID NO: 19069 - DNA, 38 bp, Artificial Sequence
  primer
gtaaaacgacggccagtactgtacatctgaatccgggc

SEQ ID NO: 19070 - DNA, 21 bp, Artificial Sequence
  primer
ttgaatgaatggtgctgtcac

SEQ ID NO: 19071 - DNA, 21 bp, Artificial Sequence
  primer
gaattaggaggctggtccctg

SEQ ID NO: 19072 - DNA, 38 bp, Artificial Sequence
  primer
gtaaaacgacggccagtaggtctgcaggtttgcaacag

SEQ ID NO: 19073 - DNA, 38 bp, Artificial Sequence
  primer
gtaaaacgacggccagtggagctgtgaagtagcttggg

SEQ ID NO: 19074 - DNA, 38 bp, Artificial Sequence
  primer
gtaaaacgacggccagttttgcacctctagctccactg

SEQ ID NO: 19075 - DNA, 26 bp, Artificial Sequence
  primer
aacacaccctaggattatcaaatgtc

SEQ ID NO: 19076 - DNA, 21 bp, Artificial Sequence
  primer
ctgatactcactgaccagcgg

SEQ ID NO: 19077 - DNA, 36 bp, Artificial Sequence
  primer
gtaaaacgacggccagtgaaggtctcggctgtggag

SEQ ID NO: 19078 - DNA, 38 bp, Artificial Sequence
  primer
gtaaaacgacggccagttgatttaacaagcctcccacc

SEQ ID NO: 19079 - DNA, 38 bp, Artificial Sequence
  primer
gtaaaacgacggccagtgaaacatggatccagcacatc

SEQ ID NO: 19080 - DNA, 37 bp, Artificial Sequence
  primer
gtaaaacgacggccagtggcgaggccatttaagctac

SEQ ID NO: 19081 - DNA, 20 bp, Artificial Sequence
  primer
aaagacaggaggcaaggagc

SEQ ID NO: 19082 - DNA, 21 bp, Artificial Sequence
  primer
cagtggtgacccagactcaag

SEQ ID NO: 19083 - DNA, 38 bp, Artificial Sequence
  primer
gtaaaacgacggccagtgagaaccacgttcatccactg

SEQ ID NO: 19084 - DNA, 38 bp, Artificial Sequence
  primer
gtaaaacgacggccagttgctagctgtggctgtgattc

SEQ ID NO: 19085 - DNA, 38 bp, Artificial Sequence
  primer
gtaaaacgacggccagtctaccatccgctaccacatcc

SEQ ID NO: 19086 - DNA, 38 bp, Artificial Sequence
  primer
gtaaaacgacggccagtccaccttccacctaactagcc

SEQ ID NO: 19087 - DNA, 21 bp, Artificial Sequence
  primer
tggctttgggtaaggtggtag

SEQ ID NO: 19088 - DNA, 20 bp, Artificial Sequence
  primer
gaggaagaaatgccaaaggg

SEQ ID NO: 19089 - DNA, 19 bp, Artificial Sequence
  primer
gcctcagcttctgggtcag

SEQ ID NO: 19090 - DNA, 20 bp, Artificial Sequence
  primer
tcttctgcgaaatgaggagg

SEQ ID NO: 19091 - DNA, 38 bp, Artificial Sequence
  primer
gtaaaacgacggccagtaaattgccttgcagtcctttc

SEQ ID NO: 19092 - DNA, 38 bp, Artificial Sequence
  primer
gtaaaacgacggccagtgtagggtgatggcaggtaagg

SEQ ID NO: 19093 - DNA, 38 bp, Artificial Sequence
  primer
gtaaaacgacggccagtagaatcggcttgctccttagc

SEQ ID NO: 19094 - DNA, 38 bp, Artificial Sequence
  primer
gtaaaacgacggccagttttctcttctttggcctggac

SEQ ID NO: 19095 - DNA, 39 bp, Artificial Sequence
  primer
gtaaaacgacggccagtttagatggactgttcccaaacc

SEQ ID NO: 19096 - DNA, 24 bp, Artificial Sequence
  primer
gagcatctcaagaactgactacca

SEQ ID NO: 19097 - DNA, 37 bp, Artificial Sequence
  primer
gtaaaacgacggccagtactcaggttgttcgtcgtgc

SEQ ID NO: 19098 - DNA, 24 bp, Artificial Sequence
  primer
tttaggccattgtagaaattgttg

SEQ ID NO: 19099 - DNA, 21 bp, Artificial Sequence
  primer
attctgtgacatggtcttggc

SEQ ID NO: 19100 - DNA, 21 bp, Artificial Sequence
  primer
catggctttcttacccacaag

SEQ ID NO: 19101 - DNA, 25 bp, Artificial Sequence
  primer
ctcctgacttcatagaaattctgct

SEQ ID NO: 19102 - DNA, 38 bp, Artificial Sequence
  primer
gtaaaacgacggccagttggtgtagctttgctgtctcc

SEQ ID NO: 19103 - DNA, 38 bp, Artificial Sequence
  primer
gtaaaacgacggccagtggcttggctttactgttgcag

SEQ ID NO: 19104 - DNA, 38 bp, Artificial Sequence
  primer
gtaaaacgacggccagtccagtgggaaatcctggtaag

SEQ ID NO: 19105 - DNA, 21 bp, Artificial Sequence
  primer
cgtctggcctcttaaaggttg

SEQ ID NO: 19106 - DNA, 38 bp, Artificial Sequence
  primer
gtaaaacgacggccagtagaaggcagaaaggctgtcac

SEQ ID NO: 19107 - DNA, 21 bp, Artificial Sequence
  primer
ggtaggatcccttgagcacag

SEQ ID NO: 19108 - DNA, 21 bp, Artificial Sequence
  primer
ttggattgatttgcactcctg

SEQ ID NO: 19109 - DNA, 39 bp, Artificial Sequence
  primer
gtaaaacgacggccagtagaaacccaaagataccctgtg

SEQ ID NO: 19110 - DNA, 38 bp, Artificial Sequence
  primer
gtaaaacgacggccagtgctccataatgcatgaaatcc

SEQ ID NO: 19111 - DNA, 38 bp, Artificial Sequence
  primer
gtaaaacgacggccagtaggtaaagctctgcctgttgc

SEQ ID NO: 19112 - DNA, 21 bp, Artificial Sequence
  primer
acccacattcgaggcttattc

SEQ ID NO: 19113 - DNA, 22 bp, Artificial Sequence
  primer
ctttgccttgagttgtcttgtg

SEQ ID NO: 19114 - DNA, 38 bp, Artificial Sequence
  primer
gtaaaacgacggccagttgaggaaactcttccaaaggg

SEQ ID NO: 19115 - DNA, 38 bp, Artificial Sequence
  primer
gtaaaacgacggccagttgtgcttaatgatccaccgag

SEQ ID NO: 19116 - DNA, 35 bp, Artificial Sequence
  primer
gtaaaacgacggccagtggtgcctcccactgtgtc

SEQ ID NO: 19117 - DNA, 21 bp, Artificial Sequence
  primer
ctggtagcacagatcgtcagc

SEQ ID NO: 19118 - DNA, 38 bp, Artificial Sequence
  primer
gtaaaacgacggccagtgagaatctctgggactttccg

SEQ ID NO: 19119 - DNA, 21 bp, Artificial Sequence
  primer
acgtgtagtgtcgtctcaggc

SEQ ID NO: 19120 - DNA, 38 bp, Artificial Sequence
  primer
gtaaaacgacggccagtggtgtcacctcattcccaaac

SEQ ID NO: 19121 - DNA, 38 bp, Artificial Sequence
  primer
gtaaaacgacggccagtttccctagcccgagctaattc

SEQ ID NO: 19122 - DNA, 37 bp, Artificial Sequence
  primer
gtaaaacgacggccagtctcagctccggacttcttcc

SEQ ID NO: 19123 - DNA, 21 bp, Artificial Sequence
  primer
tcctctgagagcactggacac

SEQ ID NO: 19124 - DNA, 18 bp, Artificial Sequence
  primer
aggtgtgaaccaccacgc

SEQ ID NO: 19125 - DNA, 21 bp, Artificial Sequence
  primer
cagggtctatatgccaggctc

SEQ ID NO: 19126 - DNA, 22 bp, Artificial Sequence
  primer
gctgtcctcttcagatttgtgc

SEQ ID NO: 19127 - DNA, 19 bp, Artificial Sequence
  primer
gtaccggcggaaattcaag

SEQ ID NO: 19128 - DNA, 35 bp, Artificial Sequence
  primer
gtaaaacgacggccagtatggagccactgcattcc

SEQ ID NO: 19129 - DNA, 21 bp, Artificial Sequence
  primer
ggcagtgtgcttcagttatgg

SEQ ID NO: 19130 - DNA, 24 bp, Artificial Sequence
  primer
ttcactcttgtttaggtcatacca

SEQ ID NO: 19131 - DNA, 21 bp, Artificial Sequence
  primer
ggattggatgaaacaatgcac

SEQ ID NO: 19132 - DNA, 21 bp, Artificial Sequence
  primer
gtacacaactgcctggtggag

SEQ ID NO: 19133 - DNA, 39 bp, Artificial Sequence
  primer
gtaaaacgacggccagtagcaatatatgttggctgcttg

SEQ ID NO: 19134 - DNA, 20 bp, Artificial Sequence
  primer
agctaggccagttcctccac

SEQ ID NO: 19135 - DNA, 36 bp, Artificial Sequence
  primer
gtaaaacgacggccagtggcagtgaggccagatgac

SEQ ID NO: 19136 - DNA, 27 bp, Artificial Sequence
  primer
caatgagaatttaacttgattaggagg

SEQ ID NO: 19137 - DNA, 21 bp, Artificial Sequence
  primer
gcaagactccaggactccatc

SEQ ID NO: 19138 - DNA, 21 bp, Artificial Sequence
  primer
cactggatctgatttggttgg

SEQ ID NO: 19139 - DNA, 40 bp, Artificial Sequence
  primer
gtaaaacgacggccagtgagtatatgcccatgctctgaag

SEQ ID NO: 19140 - DNA, 43 bp, Artificial Sequence
  primer
gtaaaacgacggccagttttccagaatccttgaatgtattagc

SEQ ID NO: 19141 - DNA, 38 bp, Artificial Sequence
  primer
gtaaaacgacggccagtagtgggtatgttggttggtgg

SEQ ID NO: 19142 - DNA, 39 bp, Artificial Sequence
  primer
gtaaaacgacggccagtttagggactaggtgtggtcctg

SEQ ID NO: 19143 - DNA, 38 bp, Artificial Sequence
  primer
gtaaaacgacggccagttatgttcagactgtggccagg

SEQ ID NO: 19144 - DNA, 20 bp, Artificial Sequence
  primer
aattggaaggctgaagcagg

SEQ ID NO: 19145 - DNA, 21 bp, Artificial Sequence
  primer
cctctttcggtaatctcctcc

SEQ ID NO: 19146 - DNA, 39 bp, Artificial Sequence
  primer
gtaaaacgacggccagtccacgtttcatcagactcattg

SEQ ID NO: 19147 - DNA, 37 bp, Artificial Sequence
  primer
gtaaaacgacggccagtcttctgggcaccagatcaag

SEQ ID NO: 19148 - DNA, 38 bp, Artificial Sequence
  primer
gtaaaacgacggccagtccacactcccttcgtatctcc

SEQ ID NO: 19149 - DNA, 43 bp, Artificial Sequence; identical to SEQ ID NO: 19140
  primer

SEQ ID NO: 19150 - DNA, 38 bp, Artificial Sequence
  primer
gtaaaacgacggccagtaggtggaagcctgactcattc

SEQ ID NO: 19151 - DNA, 21 bp, Artificial Sequence
  primer
tcctggatttactgttggctg

SEQ ID NO: 19152 - DNA, 38 bp, Artificial Sequence
  primer
gtaaaacgacggccagtatgactcaggccaatgtttcc

SEQ ID NO: 19153 - DNA, 38 bp, Artificial Sequence
  primer
gtaaaacgacggccagttctatttgcaggagaccctgg

SEQ ID NO: 19154 - DNA, 21 bp, Artificial Sequence
  primer
agagcatttgcgttacttccg

SEQ ID NO: 19155 - DNA, 38 bp, Artificial Sequence
  primer
gtaaaacgacggccagttgcagacgacaaagagaccag

SEQ ID NO: 19156 - DNA, 19 bp, Artificial Sequence
  primer
ggagggagaccaggacctc

SEQ ID NO: 19157 - DNA, 21 bp, Artificial Sequence
  primer
accatgtgcggtagaagtcag

SEQ ID NO: 19158 - DNA, 38 bp, Artificial Sequence
  primer
gtaaaacgacggccagtgcccattaatagtccactggc

SEQ ID NO: 19159 - DNA, 38 bp, Artificial Sequence
  primer
gtaaaacgacggccagttctctgagtgttgtgcttgcc

SEQ ID NO: 19160 - DNA, 21 bp, Artificial Sequence
  primer
ttggccattgtcaatacaacc

SEQ ID NO: 19161 - DNA, 38 bp, Artificial Sequence
  primer
gtaaaacgacggccagtgaaatgtaagagcctgccgtc

SEQ ID NO: 19162 - DNA, 38 bp, Artificial Sequence
  primer
gtaaaacgacggccagtaaagtaacagactccgtgccg

SEQ ID NO: 19163 - DNA, 38 bp, Artificial Sequence
  primer
gtaaaacgacggccagtagccagttatttccaagaggc

SEQ ID NO: 19164 - DNA, 38 bp, Artificial Sequence
  primer
gtaaaacgacggccagtactggcctcaaggtagtctcg

SEQ ID NO: 19165 - DNA, 20 bp, Artificial Sequence
  primer
cagcctcctccctcttctct

SEQ ID NO: 19166 - DNA, 39 bp, Artificial Sequence
  primer
gtaaaacgacggccagtaactgcgtattacttggaagcg

SEQ ID NO: 19167 - DNA, 21 bp, Artificial Sequence
  primer
tatgcctcatccaagttgtgg

SEQ ID NO: 19168 - DNA, 36 bp, Artificial Sequence
  primer
gtaaaacgacggccagtcagtgttcccacccacagg

SEQ ID NO: 19169 - DNA, 21 bp, Artificial Sequence
  primer
atagtgagaggccatgctgtg

SEQ ID NO: 19170 - DNA, 37 bp, Artificial Sequence
  primer
gtaaaacgacggccagtaagagggtgccacaaagtcc

SEQ ID NO: 19171 - DNA, 37 bp, Artificial Sequence
  primer
gtaaaacgacggccagtggtcccacagagggaacaag

SEQ ID NO: 19172 - DNA, 37 bp, Artificial Sequence
  primer
gtaaaacgacggccagtaggtctcctggaaatgaggg

SEQ ID NO: 19173 - DNA, 37 bp, Artificial Sequence
  primer
gtaaaacgacggccagttctcaatccacgtcctgacc

SEQ ID NO: 19174 - DNA, 35 bp, Artificial Sequence
  primer
gtaaaacgacggccagtttcctgtgggacagcagc

SEQ ID NO: 19175 - DNA, 20 bp, Artificial Sequence
  primer
accatgctgtttgcagaagg

SEQ ID NO: 19176 - DNA, 37 bp, Artificial Sequence
  primer
gtaaaacgacggccagtgtggtgctgctgccttagag

SEQ ID NO: 19177 - DNA, 37 bp, Artificial Sequence
  primer
gtaaaacgacggccagtagtcagaagacggagccctg

SEQ ID NO: 19178 - DNA, 39 bp, Artificial Sequence
  primer
gtaaaacgacggccagtaacatgaaattaaccgaccgtg

SEQ ID NO: 19179 - DNA, 38 bp, Artificial Sequence
  primer
gtaaaacgacggccagtttgtcttcaacagaaggtggc

SEQ ID NO: 19180 - DNA, 20 bp, Artificial Sequence
  primer
ctgaccctggtctgtggttg

SEQ ID NO: 19181 - DNA, 21 bp, Artificial Sequence
  primer
tctctctggctagcctggttc

SEQ ID NO: 19182 - DNA, 21 bp, Artificial Sequence
  primer
ttaatgcacaaatgggacagg

SEQ ID NO: 19183 - DNA, 18 bp, Artificial Sequence
  primer
gggaggaggctgtgaagg

SEQ ID NO: 19184 - DNA, 38 bp, Artificial Sequence
  primer
gtaaaacgacggccagtgtcttatgggaaagtgcgtgg

SEQ ID NO: 19185 - DNA, 36 bp, Artificial Sequence
  primer
gtaaaacgacggccagtcgaatggcagtgtgttccc

SEQ ID NO: 19186 - DNA, 21 bp, Artificial Sequence
  primer
ttctccacaacgaggcttctc

SEQ ID NO: 19187 - DNA, 21 bp, Artificial Sequence
  primer
aacttggtcctgtatgggctg

SEQ ID NO: 19188 - DNA, 38 bp, Artificial Sequence
  primer
gtaaaacgacggccagtagagcaggccctgaaggtaac

SEQ ID NO: 19189 - DNA, 36 bp, Artificial Sequence
  primer
gtaaaacgacggccagtgtaccaggccaaccgtgag

SEQ ID NO: 19190 - DNA, 38 bp, Artificial Sequence
  primer
gtaaaacgacggccagtatctgctggagaggacctgag

SEQ ID NO: 19191 - DNA, 38 bp, Artificial Sequence
  primer
gtaaaacgacggccagtttctggctgaagaagctgacc

SEQ ID NO: 19192 - DNA, 19 bp, Artificial Sequence
  primer
tttgcctttatcgtcgctc

SEQ ID NO: 19193 - DNA, 39 bp, Artificial Sequence
  primer
gtaaaacgacggccagtggaatttgaggaaagaaggcag

SEQ ID NO: 19194 - DNA, 37 bp, Artificial Sequence
  primer
gtaaaacgacggccagtttcctgcttctgcttgaacg

SEQ ID NO: 19195 - DNA, 36 bp, Artificial Sequence
  primer
gtaaaacgacggccagtctctcgccctgcttgattc

SEQ ID NO: 19196 - DNA, 38 bp, Artificial Sequence
  primer
gtaaaacgacggccagtatctgtgttgcgtgaaagcag

SEQ ID NO: 19197 - DNA, 21 bp, Artificial Sequence
  primer
gcatgcgactgccatagttac

SEQ ID NO: 19198 - DNA, 38 bp, Artificial Sequence
  primer
gtaaaacgacggccagtgtaaatgtgaaggccctttgg

SEQ ID NO: 19199 - DNA, 38 bp, Artificial Sequence
  primer
gtaaaacgacggccagtacctgacatgatctggctgtg

SEQ ID NO: 19200 - DNA, 21 bp, Artificial Sequence
  primer
ggcaaatggtcatgtcactcc

SEQ ID NO: 19201 - DNA, 38 bp, Artificial Sequence
  primer
gtaaaacgacggccagtgtttggatggccagtagttgg

SEQ ID NO: 19202 - DNA, 38 bp, Artificial Sequence
  primer
gtaaaacgacggccagtggccctgaggctgtactgtag

SEQ ID NO: 19203 - DNA, 38 bp, Artificial Sequence
  primer
gtaaaacgacggccagtctcaaggaaggtgagaccagg

SEQ ID NO: 19204 - DNA, 38 bp, Artificial Sequence
  primer
gtaaaacgacggccagtctgcagccacagtgtaagatg

SEQ ID NO: 19205 - DNA, 39 bp, Artificial Sequence
  primer
gtaaaacgacggccagttcctctctccaccttctgtctc

SEQ ID NO: 19206 - DNA, 38 bp, Artificial Sequence
  primer
gtaaaacgacggccagtatggtgggagtcaaagtctgc

SEQ ID NO: 19207 - DNA, 38 bp, Artificial Sequence
  primer
gtaaaacgacggccagttcacccaggtgtagacagacg

SEQ ID NO: 19208 - DNA, 21 bp, Artificial Sequence
  primer
gagctgaatgttcgatttggg

SEQ ID NO: 19209 - DNA, 20 bp, Artificial Sequence
  primer
aataccaccgcttctacggc

SEQ ID NO: 19210 - DNA, 37 bp, Artificial Sequence
  primer
gtaaaacgacggccagtcgtccctagaccctcagacc

SEQ ID NO: 19211 - DNA, 21 bp, Artificial Sequence
  primer
ccatgctgagggaaagacaac

SEQ ID NO: 19212 - DNA, 20 bp, Artificial Sequence
  primer
cattctctgcccttgaggag

SEQ ID NO: 19213 - DNA, 24 bp, Artificial Sequence
  primer
atctacctcaataattctcccaaa

SEQ ID NO: 19214 - DNA, 42 bp, Artificial Sequence
  primer
gtaaaacgacggccagtcaacgttaattcttccaatccatag

SEQ ID NO: 19215 - DNA, 27 bp, Artificial Sequence
  primer
aaacactaatcaacgtgagatctgata

SEQ ID NO: 19216 - DNA, 41 bp, Artificial Sequence
  primer
gtaaaacgacggccagtgctacaaacttgtccctctctgtg

SEQ ID NO: 19217 - DNA, 28 bp, Artificial Sequence
  primer
tgaacacagtatttgccatactacattt

SEQ ID NO: 19218 - DNA, 38 bp, Artificial Sequence
  primer
gtaaaacgacggccagtcctcaccttccaattcgtttg

SEQ ID NO: 19219 - DNA, 38 bp, Artificial Sequence
  primer
gtaaaacgacggccagtaaaggttccttgatccacacc

SEQ ID NO: 19220 - DNA, 40 bp, Artificial Sequence
  primer
gtaaaacgacggccagtgggaacccatttgacatctttac

SEQ ID NO: 19221 - DNA, 44 bp, Artificial Sequence
  primer
gtaaaacgacggccagtttcatcattaacccattcttactattg

SEQ ID NO: 19222 - DNA, 21 bp, Artificial Sequence
  primer
tgccgtagcatagctgaactg

SEQ ID NO: 19223 - DNA, 21 bp, Artificial Sequence
  primer
ttccctgccaagtaggtgttc

SEQ ID NO: 19224 - DNA, 24 bp, Artificial Sequence
  primer
cccatttcaaatctgagttacttg

SEQ ID NO: 19225 - DNA, 23 bp, Artificial Sequence
  primer
tttggtgatacatttagcaaggc

SEQ ID NO: 19226 - DNA, 21 bp, Artificial Sequence
  primer
catttacccaccacaaacctg

SEQ ID NO: 19227 - DNA, 37 bp, Artificial Sequence
  primer
gtaaaacgacggccagtgaagtgctcgggcacaatac

SEQ ID NO: 19228 - DNA, 38 bp, Artificial Sequence
  primer
gtaaaacgacggccagttggcctggagagtttatgacc

SEQ ID NO: 19229 - DNA, 26 bp, Artificial Sequence
  primer
agaagagggtctctaatagcaatagg

SEQ ID NO: 19230 - DNA, 20 bp, Artificial Sequence
  primer
ggcagccgaatgtgttgtag

SEQ ID NO: 19231 - DNA, 38 bp, Artificial Sequence
  primer
gtaaaacgacggccagtttcaacttcagggctttctgg

SEQ ID NO: 19232 - DNA, 43 bp, Artificial Sequence
  primer
gtaaaacgacggccagtagcagatattccttctcatttctagc

SEQ ID NO: 19233 - DNA, 21 bp, Artificial Sequence
  primer
gaattgcaaggctactagggc

SEQ ID NO: 19234 - DNA, 21 bp, Artificial Sequence
  primer
tccctaggacctctcgtagcc

SEQ ID NO: 19235 - DNA, 21 bp, Artificial Sequence
  primer
tgggactgaaataatctgggc

SEQ ID NO: 19236 - DNA, 21 bp, Artificial Sequence
  primer
atcacacctgcatgaggtcac

SEQ ID NO: 19237 - DNA, 38 bp, Artificial Sequence
  primer
gtaaaacgacggccagtgcctggatcattagtacggtg

SEQ ID NO: 19238 - DNA, 44 bp, Artificial Sequence
  primer
gtaaaacgacggccagtgactaacaccatagaactcagtccatc

SEQ ID NO: 19239 - DNA, 22 bp, Artificial Sequence
  primer
tttcagtgagcagaaatcaagc

SEQ ID NO: 19240 - DNA, 38 bp, Artificial Sequence
  primer
gtaaaacgacggccagtccgaaatcgcaggactacaag

SEQ ID NO: 19241 - DNA, 38 bp, Artificial Sequence
  primer
gtaaaacgacggccagtagcaccaggctccttgataac

SEQ ID NO: 19242 - DNA, 37 bp, Artificial Sequence
  primer
gtaaaacgacggccagtgtggagcaccagagtccaag

SEQ ID NO: 19243 - DNA, 38 bp, Artificial Sequence
  primer
gtaaaacgacggccagtggcagctataaggtcctctgc

SEQ ID NO: 19244 - DNA, 37 bp, Artificial Sequence
  primer
gtaaaacgacggccagtcttccactgaatctgggctg

SEQ ID NO: 19245 - DNA, 38 bp, Artificial Sequence
  primer
gtaaaacgacggccagttctgcctttgctactgagctg

SEQ ID NO: 19246 - DNA, 21 bp, Artificial Sequence
  primer
aatgtccctttcttcagagcg

SEQ ID NO: 19247 - DNA, 21 bp, Artificial Sequence
  primer
gtttccataacgtctgggtcc

SEQ ID NO: 19248 - DNA, 21 bp, Artificial Sequence
  primer
ggatttactcctggcctctcg

SEQ ID NO: 19249 - DNA, 38 bp, Artificial Sequence
  primer
gtaaaacgacggccagttagaagctgcatgctcgtttg

SEQ ID NO: 19250 - DNA, 38 bp, Artificial Sequence
  primer
gtaaaacgacggccagtgaggagtgtccttcctccaag

SEQ ID NO: 19251 - DNA, 21 bp, Artificial Sequence
  primer
gcaatttggtagaggcagtgg

SEQ ID NO: 19252 - DNA, 38 bp, Artificial Sequence
  primer
gtaaaacgacggccagtctgcctaggtcactttccctg

SEQ ID NO: 19253 - DNA, 21 bp, Artificial Sequence
  primer
aagtggtgatcagtatccggg

SEQ ID NO: 19254 - DNA, 38 bp, Artificial Sequence
  primer
gtaaaacgacggccagtgtgacaggatcagcgtgtctg

SEQ ID NO: 19255 - DNA, 21 bp, Artificial Sequence
  primer
gcacagacaagatcccaggac

SEQ ID NO: 19256 - DNA, 21 bp, Artificial Sequence
  primer
tagcaaagccttaccagtggg

SEQ ID NO: 19257 - DNA, 21 bp, Artificial Sequence
  primer
acgtgtcttcttgttccaggg

SEQ ID NO: 19258 - DNA, 21 bp, Artificial Sequence
  primer
ccatcttactgcccacctctc

SEQ ID NO: 19259 - DNA, 37 bp, Artificial Sequence
  primer
gtaaaacgacggccagtgcagagaacagagccaggag

SEQ ID NO: 19260 - DNA, 38 bp, Artificial Sequence
  primer
gtaaaacgacggccagtagtgactccatgaggctttgc

SEQ ID NO: 19261 - DNA, 21 bp, Artificial Sequence
  primer
ccctttattccctgcaagttc

SEQ ID NO: 19262 - DNA, 38 bp, Artificial Sequence
  primer
gtaaaacgacggccagtctgagtccctgtacagcttcg

SEQ ID NO: 19263 - DNA, 21 bp, Artificial Sequence
  primer
gtccaagcactcacaggacac

SEQ ID NO: 19264 - DNA, 21 bp, Artificial Sequence
  primer
gacagcctcttcaacctggac

SEQ ID NO: 19265 - DNA, 36 bp, Artificial Sequence
  primer
gtaaaacgacggccagttgaggagaggaggaccagc

SEQ ID NO: 19266 - DNA, 38 bp, Artificial Sequence
  primer
gtaaaacgacggccagtcaataggtgagtcctctcggg

SEQ ID NO: 19267 - DNA, 38 bp, Artificial Sequence
  primer
gtaaaacgacggccagtcgatgtccagtttgtcctgag

SEQ ID NO: 19268 - DNA, 36 bp, Artificial Sequence
  primer
gtaaaacgacggccagtccctgacgtgggcagatac

SEQ ID NO: 19269 - DNA, 20 bp, Artificial Sequence
  primer
ctcaggtcggagtggttctg

SEQ ID NO: 19270 - DNA, 36 bp, Artificial Sequence
  primer
gtaaaacgacggccagtccgagggtatgtctgtgcc

SEQ ID NO: 19271 - DNA, 35 bp, Artificial Sequence
  primer
gtaaaacgacggccagtctgtgcctgagcctgagc

SEQ ID NO: 19272 - DNA, 23 bp, Artificial Sequence
  primer
tggcattaccataaaggactgtg

SEQ ID NO: 19273 - DNA, 42 bp, Artificial Sequence
  primer
gtaaaacgacggccagtgctctttcattgggtaagtttagtg

SEQ ID NO: 19274 - DNA, 24 bp, Artificial Sequence
  primer
gtgattagcagtaggtgaagttgg

SEQ ID NO: 19275 - DNA, 38 bp, Artificial Sequence
  primer
gtaaaacgacggccagtggctggtcactgttgtgtgtc

SEQ ID NO: 19276 - DNA, 38 bp, Artificial Sequence
  primer
gtaaaacgacggccagtagctaactgcagagctgagcc

SEQ ID NO: 19277 - DNA, 21 bp, Artificial Sequence
  primer
ctcagatgtacctgcgaaacg

SEQ ID NO: 19278 - DNA, 38 bp, Artificial Sequence
  primer
gtaaaacgacggccagttaggtgcctgtcactgtttgg

SEQ ID NO: 19279 - DNA, 21 bp, Artificial Sequence
  primer
gagctatcactgtgccactgc

SEQ ID NO: 19280 - DNA, 21 bp, Artificial Sequence
  primer
atctggaagaaggctgtggag

SEQ ID NO: 19281 - DNA, 21 bp, Artificial Sequence
  primer
agtcatggccagagaacttcc

SEQ ID NO: 19282 - DNA, 22 bp, Artificial Sequence
  primer
cagcctgggtgataatagcaag

SEQ ID NO: 19283 - DNA, 38 bp, Artificial Sequence
  primer
gtaaaacgacggccagtacaacaactttatggctcccg

SEQ ID NO: 19284 - DNA, 38 bp, Artificial Sequence
  primer
gtaaaacgacggccagtagatttcttgccctgaaagcc

SEQ ID NO: 19285 - DNA, 38 bp, Artificial Sequence
  primer
gtaaaacgacggccagtcgcagtcctttctctggaatc

SEQ ID NO: 19286 - DNA, 35 bp, Artificial Sequence
  primer
gtaaaacgacggccagtcatcaccaagctggcagg

SEQ ID NO: 19287 - DNA, 37 bp, Artificial Sequence
  primer
gtaaaacgacggccagtcagtaccaacacctgccctc

SEQ ID NO: 19288 - DNA, 38 bp, Artificial Sequence
  primer
gtaaaacgacggccagtttcactacctctccctcgtgc

SEQ ID NO: 19289 - DNA, 21 bp, Artificial Sequence
  primer
tcccgacgtgttagagttcac

SEQ ID NO: 19290 - DNA, 20 bp, Artificial Sequence
  primer
tgacaactcactgctggtgc

SEQ ID NO: 19291 - DNA, 38 bp, Artificial Sequence
  primer
gtaaaacgacggccagtcagcagagggtcattaacagc

SEQ ID NO: 19292 - DNA, 20 bp, Artificial Sequence
  primer
accagctgcctgtgtgtacc

SEQ ID NO: 19293 - DNA, 38 bp, Artificial Sequence
  primer
gtaaaacgacggccagtctgacttagggcatcctcagc

SEQ ID NO: 19294 - DNA, 38 bp, Artificial Sequence
  primer
gtaaaacgacggccagtagcaagaggactttctccgtg

SEQ ID NO: 19295 - DNA, 20 bp, Artificial Sequence
  primer
ctgcttggaacttgggtgtc

SEQ ID NO: 19296 - DNA, 21 bp, Artificial Sequence
  primer
tcctgccagtaacgcattaaa

SEQ ID NO: 19297 - DNA, 24 bp, Artificial Sequence
  primer
ggttgaacagaatggattgaaatg

SEQ ID NO: 19298 - DNA, 38 bp, Artificial Sequence
  primer
gtaaaacgacggccagtgtagaatttggaggagtcggg

SEQ ID NO: 19299 - DNA, 40 bp, Artificial Sequence
  primer
gtaaaacgacggccagttgttcaaagtccagagaaacctg

SEQ ID NO: 19300 - DNA, 21 bp, Artificial Sequence
  primer
tgatctctcttggccttgacc

SEQ ID NO: 19301 - DNA, 21 bp, Artificial Sequence
  primer
tgcttgtcttgtaccgtcgtc

SEQ ID NO: 19302 - DNA, 23 bp, Artificial Sequence
  primer
aggtttcattaaccctcttctgc

SEQ ID NO: 19303 - DNA, 38 bp, Artificial Sequence
  primer
gtaaaacgacggccagtcagatcatggttgactgtggg

SEQ ID NO: 19304 - DNA, 21 bp, Artificial Sequence
  primer
tgttgtgggtgtctgcagtag

SEQ ID NO: 19305 - DNA, 38 bp, Artificial Sequence
  primer
gtaaaacgacggccagttattctggcaccttccattcc

SEQ ID NO: 19306 - DNA, 38 bp, Artificial Sequence
  primer
gtaaaacgacggccagttgctcaccattgatgaaccag

SEQ ID NO: 19307 - DNA, 38 bp, Artificial Sequence
  primer
gtaaaacgacggccagtatttctggaacacaaatgggc

SEQ ID NO: 19308 - DNA, 21 bp, Artificial Sequence
  primer
tctattgcagccctcctatcc

SEQ ID NO: 19309 - DNA, 44 bp, Artificial Sequence
  primer
gtaaaacgacggccagtgcaatttacattggtaatgcttaagag

SEQ ID NO: 19310 - DNA, 38 bp, Artificial Sequence
  primer
gtaaaacgacggccagtgaggcttagtgtgaggttggg

SEQ ID NO: 19311 - DNA, 38 bp, Artificial Sequence
  primer
gtaaaacgacggccagtgtgtctttctcccacagctcc

SEQ ID NO: 19312 - DNA, 38 bp, Artificial Sequence
  primer
gtaaaacgacggccagtttaacagaacatttgcctgcc

SEQ ID NO: 19313 - DNA, 21 bp, Artificial Sequence
  primer
atgggtttgtacagtggtggg

SEQ ID NO: 19314 - DNA, 38 bp, Artificial Sequence
  primer
gtaaaacgacggccagtatgtgacctcatcctctggtg

SEQ ID NO: 19315 - DNA, 38 bp, Artificial Sequence
  primer
gtaaaacgacggccagtcccggtgatgaagcttagatg

SEQ ID NO: 19316 - DNA, 38 bp, Artificial Sequence
  primer
gtaaaacgacggccagtgctttcttgaccacagatccc

SEQ ID NO: 19317 - DNA, 21 bp, Artificial Sequence
  primer
aacagtgggaagagagatggg

SEQ ID NO: 19318 - DNA, 38 bp, Artificial Sequence
  primer
gtaaaacgacggccagtcagaggacacaagcaggacag

SEQ ID NO: 19319 - DNA, 21 bp, Artificial Sequence
  primer
tgctcagactgtagcgaccac

SEQ ID NO: 19320 - DNA, 21 bp, Artificial Sequence
  primer
agtgccagtacctcacaccag

SEQ ID NO: 19321 - DNA, 21 bp, Artificial Sequence
  primer
gttggaaagtgtggtggtgag

SEQ ID NO: 19322 - DNA, 22 bp, Artificial Sequence
  primer
tgacttctgtgaggcaatgaaa

SEQ ID NO: 19323 - DNA, 23 bp, Artificial Sequence
  primer
accttgatatcaggctgaatttg

SEQ ID NO: 19324 - DNA, 22 bp, Artificial Sequence
  primer
tcctattcactcagggcacttt

SEQ ID NO: 19325 - DNA, 21 bp, Artificial Sequence
  primer
cgtcagcaatgtcacctgtag

SEQ ID NO: 19326 - DNA, 41 bp, Artificial Sequence
  primer
gtaaaacgacggccagtggcttaagacagagagaggacaag

SEQ ID NO: 19327 - DNA, 23 bp, Artificial Sequence
  primer
ttctctgttgaattgcttcttcg

SEQ ID NO: 19328 - DNA, 22 bp, Artificial Sequence
  primer
cctcccttgaagagtttgaaga

SEQ ID NO: 19329 - DNA, 21 bp, Artificial Sequence
  primer
gccctcttgggttggtataag

SEQ ID NO: 19330 - DNA, 38 bp, Artificial Sequence
  primer
gtaaaacgacggccagttttgatgcaacacatcacaaa

SEQ ID NO: 19331 - DNA, 41 bp, Artificial Sequence
  primer
gtaaaacgacggccagtcatcttgacagctttcatgtcatc

SEQ ID NO: 19332 - DNA, 28 bp, Artificial Sequence
  primer
tttctatatcatttcaaccaagtctacg

SEQ ID NO: 19333 - DNA, 38 bp, Artificial Sequence
  primer
gtaaaacgacggccagtcctttgatgagcaatgctgtg

SEQ ID NO: 19334 - DNA, 26 bp, Artificial Sequence
  primer
gaattcagaagtgaaagacattatgc

SEQ ID NO: 19335 - DNA, 40 bp, Artificial Sequence
  primer
gtaaaacgacggccagtccagaggtctggttcattattcc

SEQ ID NO: 19336 - DNA, 38 bp, Artificial Sequence
  primer
gtaaaacgacggccagtgctaattcaagcagaggccag

SEQ ID NO: 19337 - DNA, 39 bp, Artificial Sequence
  primer
gtaaaacgacggccagtgtggtcttctgcctcctagttc

SEQ ID NO: 19338 - DNA, 21 bp, Artificial Sequence
  primer
tgcagggccatcttattcttc

SEQ ID NO: 19339 - DNA, 21 bp, Artificial Sequence
  primer
tttaccgatctgccctgactc

SEQ ID NO: 19340 - DNA, 38 bp, Artificial Sequence
  primer
gtaaaacgacggccagtataaaccttggctggctgaac

SEQ ID NO: 19341 - DNA, 38 bp, Artificial Sequence
  primer
gtaaaacgacggccagtgcagccaattataacccaagg

SEQ ID NO: 19342 - DNA, 22 bp, Artificial Sequence
  primer
gcctggcatgtagtagttgtcc

SEQ ID NO: 19343 - DNA, 38 bp, Artificial Sequence
  primer
gtaaaacgacggccagtagaggtttccgctgtaggagc

SEQ ID NO: 19344 - DNA, 21 bp, Artificial Sequence
  primer
tggagagtaacgggagagagg

SEQ ID NO: 19345 - DNA, 38 bp, Artificial Sequence
  primer
gtaaaacgacggccagtgtaaaggtgaacccgacgaag

SEQ ID NO: 19346 - DNA, 38 bp, Artificial Sequence
  primer
gtaaaacgacggccagtctcactgtccatctgtttgcc

SEQ ID NO: 19347 - DNA, 21 bp, Artificial Sequence
  primer
cgtttctcaaatggacttggc

SEQ ID NO: 19348 - DNA, 39 bp, Artificial Sequence
  primer
gtaaaacgacggccagtaggagtcatgacgaagatcctg

SEQ ID NO: 19349 - DNA, 21 bp, Artificial Sequence
  primer
ctcgcctgcgtttctactctc

SEQ ID NO: 19350 - DNA, 20 bp, Artificial Sequence
  primer
cgacagtccctccttgtctg

SEQ ID NO: 19351 - DNA, 21 bp, Artificial Sequence
  primer
ctgcagttcttcaccttgacg

SEQ ID NO: 19352 - DNA, 37 bp, Artificial Sequence
  primer
gtaaaacgacggccagtctcagactggatgccctgag

SEQ ID NO: 19353 - DNA, 20 bp, Artificial Sequence
  primer
cagcggttctcagggtgtag

SEQ ID NO: 19354 - DNA, 37 bp, Artificial Sequence
  primer
gtaaaacgacggccagtttagtagccgtggcaccttg

SEQ ID NO: 19355 - DNA, 37 bp, Artificial Sequence
  primer
gtaaaacgacggccagtaatcctgggttggagtctgg

SEQ ID NO: 19356 - DNA, 38 bp, Artificial Sequence
  primer
gtaaaacgacggccagtcagtctaggctctgggagctg

SEQ ID NO: 19357 - DNA, 37 bp, Artificial Sequence
  primer
gtaaaacgacggccagtgttgcacaggtgcacacttc

SEQ ID NO: 19358 - DNA, 21 bp, Artificial Sequence
  primer
caaaccagcaaagctagccac

SEQ ID NO: 19359 - DNA, 39 bp, Artificial Sequence
  primer
gtaaaacgacggccagtagaaatggaagaagccaagatg

SEQ ID NO: 19360 - DNA, 21 bp, Artificial Sequence
  primer
taaagcagtttgccactgacc

SEQ ID NO: 19361 - DNA, 37 bp, Artificial Sequence
  primer
gtaaaacgacggccagttggttgctctttgtcccttg

SEQ ID NO: 19362 - DNA, 37 bp, Artificial Sequence
  primer
gtaaaacgacggccagtgcagagactcagctgcaacc

SEQ ID NO: 19363 - DNA, 21 bp, Artificial Sequence
  primer
gaataacctccgtggcctttc

SEQ ID NO: 19364 - DNA, 38 bp, Artificial Sequence
  primer
gtaaaacgacggccagtattcagaggttggctgaaacg

SEQ ID NO: 19365 - DNA, 21 bp, Artificial Sequence
  primer
tcagtttgtctgggtgcattc

SEQ ID NO: 19366 - DNA, 21 bp, Artificial Sequence
  primer
tgctaatcacacagtctcggc

SEQ ID NO: 19367 - DNA, 40 bp, Artificial Sequence
  primer
gtaaaacgacggccagttgcgagagagaaatattgcagag

SEQ ID NO: 19368 - DNA, 39 bp, Artificial Sequence
  primer
gtaaaacgacggccagtccttctgtgagttatggcttcc

SEQ ID NO: 19369 - DNA, 20 bp, Artificial Sequence
  primer
tgcctgacagccctacattc

SEQ ID NO: 19370 - DNA, 20 bp, Artificial Sequence
  primer
agcataggtgctgggtcctg

SEQ ID NO: 19371 - DNA, 20 bp, Artificial Sequence
  primer
atggatacctgggtgggaag

SEQ ID NO: 19372 - DNA, 21 bp, Artificial Sequence
  primer
tccgaaatctccatagttccc

SEQ ID NO: 19373 - DNA, 21 bp, Artificial Sequence
  primer
gtggatgtgacgaaacctcag

SEQ ID NO: 19374 - DNA, 19 bp, Artificial Sequence
  primer
caggagactctgccttggg

SEQ ID NO: 19375 - DNA, 20 bp, Artificial Sequence
  primer
gcccaaacaggctagagagg

SEQ ID NO: 19376 - DNA, 38 bp, Artificial Sequence
  primer
gtaaaacgacggccagtgttccttgcctctcagcattg

SEQ ID NO: 19377 - DNA, 21 bp, Artificial Sequence
  primer
aacccagcaggtaggaggaac

SEQ ID NO: 19378 - DNA, 21 bp, Artificial Sequence
  primer
gtgggtgtgaagtagggtgtg

SEQ ID NO: 19379 - DNA, 38 bp, Artificial Sequence
  primer
gtaaaacgacggccagtactaaagctggcttgggaatg

SEQ ID NO: 19380 - DNA, 38 bp, Artificial Sequence
  primer
gtaaaacgacggccagttgagatgaacatgcatctggc

SEQ ID NO: 19381 - DNA, 38 bp, Artificial Sequence
  primer
gtaaaacgacggccagtgacagttcaagttgggcttgg

SEQ ID NO: 19382 - DNA, 38 bp, Artificial Sequence
  primer
gtaaaacgacggccagtcgaatcccgatctaaccactc

SEQ ID NO: 19383 - DNA, 21 bp, Artificial Sequence
  primer
cttcaccctctccagtcttgc

SEQ ID NO: 19384 - DNA, 38 bp, Artificial Sequence
  primer
gtaaaacgacggccagtcccaggtagggagactttgag

SEQ ID NO: 19385 - DNA, 37 bp, Artificial Sequence
  primer
gtaaaacgacggccagtctcgacagcctcaagtccac

SEQ ID NO: 19386 - DNA, 38 bp, Artificial Sequence
  primer
gtaaaacgacggccagtgtgactctgtagccctcccag

SEQ ID NO: 19387 - DNA, 20 bp, Artificial Sequence
  primer
ttgtaggcatcacctgggag

SEQ ID NO: 19388 - DNA, 19 bp, Artificial Sequence
  primer
cttgtgcccatggtacgtg

SEQ ID NO: 19389 - DNA, 37 bp, Artificial Sequence
  primer
gtaaaacgacggccagtggtctgggtaggacagggag

SEQ ID NO: 19390 - DNA, 37 bp, Artificial Sequence
  primer
gtaaaacgacggccagtggccctagagacagctggac

SEQ ID NO: 19391 - DNA, 21 bp, Artificial Sequence
  primer
agtgactgcttcaagtctggc

SEQ ID NO: 19392 - DNA, 22 bp, Artificial Sequence
  primer
ccttggacactgtctcttctgg

SEQ ID NO: 19393 - DNA, 38 bp, Artificial Sequence
  primer
gtaaaacgacggccagtctaaatgacctggcctcatgg

SEQ ID NO: 19394 - DNA, 21 bp, Artificial Sequence
  primer
aaagcagaacatgctccttcc

SEQ ID NO: 19395 - DNA, 38 bp, Artificial Sequence
  primer
gtaaaacgacggccagtttgcacagtatgtggtagggc

SEQ ID NO: 19396 - DNA, 38 bp, Artificial Sequence
  primer
gtaaaacgacggccagtttgaccagctggaagaaatcc

SEQ ID NO: 19397 - DNA, 38 bp, Artificial Sequence
  primer
gtaaaacgacggccagtccaacagggtcactccgatag

SEQ ID NO: 19398 - DNA, 38 bp, Artificial Sequence
  primer
gtaaaacgacggccagttgtggcagataggaagcattg

SEQ ID NO: 19399 - DNA, 38 bp, Artificial Sequence
  primer
gtaaaacgacggccagtatcctcacagggctgaaagag

SEQ ID NO: 19400 - DNA, 37 bp, Artificial Sequence
  primer
gtaaaacgacggccagttgctcctcctaagccctagc

SEQ ID NO: 19401 - DNA, 38 bp, Artificial Sequence
  primer
gtaaaacgacggccagttctcaaattcctgggctcaac

SEQ ID NO: 19402 - DNA, 38 bp, Artificial Sequence
  primer
gtaaaacgacggccagtggaaccactctgcagaccttc

SEQ ID NO: 19403 - DNA, 41 bp, Artificial Sequence
  primer
gtaaaacgacggccagttgagggaaagacaatcttcttgag

SEQ ID NO: 19404 - DNA, 37 bp, Artificial Sequence
  primer
gtaaaacgacggccagtagtgccagcaatagcacctg

SEQ ID NO: 19405 - DNA, 24 bp, Artificial Sequence
  primer
ttctttgtgtgttactggatttgg

SEQ ID NO: 19406 - DNA, 27 bp, Artificial Sequence
  primer
tttcagctagttgtttagtggtatgac

SEQ ID NO: 19407 - DNA, 26 bp, Artificial Sequence
  primer
ttctctttatccttcagacactcaca

SEQ ID NO: 19408 - DNA, 24 bp, Artificial Sequence
  primer
gacagggattatgtctgttcactg

SEQ ID NO: 19409 - DNA, 27 bp, Artificial Sequence
  primer
cacttgcatctttaaatagattatccc

SEQ ID NO: 19410 - DNA, 20 bp, Artificial Sequence
  primer
ctgacctcgtgatccacctg

SEQ ID NO: 19411 - DNA, 25 bp, Artificial Sequence
  primer
ggactcaatgaactcagtgaagaag

SEQ ID NO: 19412 - DNA, 29 bp, Artificial Sequence
  primer
tgagataaagttaaggctagaattcagat

SEQ ID NO: 19413 - DNA, 38 bp, Artificial Sequence
  primer
gtaaaacgacggccagtttgcacatcacaggacagaag

SEQ ID NO: 19414 - DNA, 45 bp, Artificial Sequence
  primer
gtaaaacgacggccagtgaagtgatagttatagattccttcacca

SEQ ID NO: 19415 - DNA, 40 bp, Artificial Sequence
  primer
gtaaaacgacggccagtaagaggaaggaagtccacatttc

SEQ ID NO: 19416 - DNA, 40 bp, Artificial Sequence
  primer
gtaaaacgacggccagtacagctaattcctgaatcattgc

SEQ ID NO: 19417 - DNA, 24 bp, Artificial Sequence
  primer
aaatgattgccttaatcgtgtaaa

SEQ ID NO: 19418 - DNA, 21 bp, Artificial Sequence
  primer
ggcctagctagaggaaccctg

SEQ ID NO: 19419 - DNA, 38 bp, Artificial Sequence
  primer
gtaaaacgacggccagtaatggttccttgttacagccc

SEQ ID NO: 19420 - DNA, 37 bp, Artificial Sequence
  primer
gtaaaacgacggccagtaatggaatgggatcatccag

SEQ ID NO: 19421 - DNA, 39 bp, Artificial Sequence
  primer
gtaaaacgacggccagttgatgattaaaggtgcacatgg

SEQ ID NO: 19422 - DNA, 40 bp, Artificial Sequence
  primer
gtaaaacgacggccagttttcacagtgtcttatgctgagg

SEQ ID NO: 19423 - DNA, 41 bp, Artificial Sequence
  primer
gtaaaacgacggccagtgattgtagaagcacaactctttgg

SEQ ID NO: 19424 - DNA, 38 bp, Artificial Sequence
  primer
gtaaaacgacggccagtcgtgttcctgcagctagagac

SEQ ID NO: 19425 - DNA, 38 bp, Artificial Sequence
  primer
gtaaaacgacggccagtcagccaggtatttggcaagag

SEQ ID NO: 19426 - DNA, 38 bp, Artificial Sequence
  primer
gtaaaacgacggccagtgtcgaactggaaggtacaccc

SEQ ID NO: 19427 - DNA, 21 bp, Artificial Sequence
  primer
ggtgccaaaggattaatggac

SEQ ID NO: 19428 - DNA, 21 bp, Artificial Sequence
  primer
ttgaggaggaagaattctggg

SEQ ID NO: 19429 - DNA, 39 bp, Artificial Sequence
  primer
gtaaaacgacggccagtcctgtagcagatggatcctcac

SEQ ID NO: 19430 - DNA, 22 bp, Artificial Sequence
  primer
cattggatttaatggtgccttc

SEQ ID NO: 19431 - DNA, 38 bp, Artificial Sequence
  primer
gtaaaacgacggccagtggctagctggtggtgagtagg

SEQ ID NO: 19432 - DNA, 36 bp, Artificial Sequence
  primer
gtaaaacgacggccagtgacagtgccacagcactcc

SEQ ID NO: 19433 - DNA, 38 bp, Artificial Sequence
  primer
gtaaaacgacggccagtattgcagaaggttcaagggac

SEQ ID NO: 19434 - DNA, 38 bp, Artificial Sequence
  primer
gtaaaacgacggccagtgcatgctatgctttgaattgg

SEQ ID NO: 19435 - DNA, 38 bp, Artificial Sequence
  primer
gtaaaacgacggccagtgtccggactcattacctccac

SEQ ID NO: 19436 - DNA, 38 bp, Artificial Sequence
  primer
gtaaaacgacggccagtctagaggagcctctggctgtc

SEQ ID NO: 19437 - DNA, 21 bp, Artificial Sequence
  primer
gtgaaaggagagcctggtacg

SEQ ID NO: 19438 - DNA, 35 bp, Artificial Sequence
  primer
gtaaaacgacggccagtcagtgtccgaacggcttc

SEQ ID NO: 19439 - DNA, 21 bp, Artificial Sequence
  primer
cagaggttccaatgacctgag

SEQ ID NO: 19440 - DNA, 37 bp, Artificial Sequence
  primer
gtaaaacgacggccagtccacacccggcctaaatatc

SEQ ID NO: 19441 - DNA, 21 bp, Artificial Sequence
  primer
ttcaaagggcatctgaatcac

SEQ ID NO: 19442 - DNA, 38 bp, Artificial Sequence
  primer
gtaaaacgacggccagtgcacgtacttcagcacagctc

SEQ ID NO: 19443 - DNA, 38 bp, Artificial Sequence
  primer
gtaaaacgacggccagttacaggagaatctgggtgctg

SEQ ID NO: 19444 - DNA, 24 bp, Artificial Sequence
  primer
caggcaatttgtctttactacagg

SEQ ID NO: 19445 - DNA, 38 bp, Artificial Sequence
  primer
gtaaaacgacggccagtagttctccaggctcccttctc

SEQ ID NO: 19446 - DNA, 21 bp, Artificial Sequence
  primer
ttccatggtgtttctgtcagc

SEQ ID NO: 19447 - DNA, 38 bp, Artificial Sequence
  primer
gtaaaacgacggccagtctccctccaaggtgagagttc

SEQ ID NO: 19448 - DNA, 21 bp, Artificial Sequence
  primer
cacattcctcaccctcaaacc

SEQ ID NO: 19449 - DNA, 38 bp, Artificial Sequence
  primer
gtaaaacgacggccagtgaaggatgggagacagaaagg

SEQ ID NO: 19450 - DNA, 37 bp, Artificial Sequence
  primer
gtaaaacgacggccagtaatttgaggactgtggctgg

SEQ ID NO: 19451 - DNA, 23 bp, Artificial Sequence
  primer
gccatttcttggtctaggatttg

SEQ ID NO: 19452 - DNA, 38 bp, Artificial Sequence
  primer
gtaaaacgacggccagtggatttccaagttacgttccc

SEQ ID NO: 19453 - DNA, 39 bp, Artificial Sequence
  primer
gtaaaacgacggccagtgctgtgatcccaatacttctcc

SEQ ID NO: 19454 - DNA, 21 bp, Artificial Sequence
  primer
ctgacagcatgttccatttcc

SEQ ID NO: 19455 - DNA, 20 bp, Artificial Sequence
  primer
gactgcttcagggcttctcc

SEQ ID NO: 19456 - DNA, 21 bp, Artificial Sequence
  primer
cagaagggagcaaacaattcg

SEQ ID NO: 19457 - DNA, 41 bp, Artificial Sequence
  primer
gtaaaacgacggccagttttgagaaattagcctcctgtttg

SEQ ID NO: 19458 - DNA, 26 bp, Artificial Sequence
  primer
tgaatggagaataattgtatcacacc

SEQ ID NO: 19459 - DNA, 38 bp, Artificial Sequence
  primer
gtaaaacgacggccagtctctttgcgatagacacccag

SEQ ID NO: 19460 - DNA, 38 bp, Artificial Sequence
  primer
gtaaaacgacggccagtaaggaaaccaaccagcctttc

SEQ ID NO: 19461 - DNA, 18 bp, Artificial Sequence
  primer
acctggcagacagtgggc

SEQ ID NO: 19462 - DNA, 38 bp, Artificial Sequence
  primer
gtaaaacgacggccagtaagggaatgttccaggtcctc

SEQ ID NO: 19463 - DNA, 37 bp, Artificial Sequence
  primer
gtaaaacgacggccagtcctactcagagcctcctccc

SEQ ID NO: 19464 - DNA, 20 bp, Artificial Sequence
  primer
gtgcccgactacactgcttc

SEQ ID NO: 19465 - DNA, 39 bp, Artificial Sequence
  primer
gtaaaacgacggccagttgcccatcaatcattcctctac

SEQ ID NO: 19466 - DNA, 38 bp, Artificial Sequence
  primer
gtaaaacgacggccagtgggtttataattgtccaggcg

SEQ ID NO: 19467 - DNA, 21 bp, Artificial Sequence
  primer
cagaagtctggcagcaacaac

SEQ ID NO: 19468 - DNA, 21 bp, Artificial Sequence
  primer
atctcagtaacccgacctccg

SEQ ID NO: 19469 - DNA, 21 bp, Artificial Sequence
  primer
catttccaaggcaattgtgac

SEQ ID NO: 19470 - DNA, 43 bp, Artificial Sequence
  primer
gtaaaacgacggccagtgcttagaaggctaaatgtttatttcc

SEQ ID NO: 19471 - DNA, 41 bp, Artificial Sequence
  primer
gtaaaacgacggccagtggaagtacagggataaacacttgg

SEQ ID NO: 19472 - DNA, 38 bp, Artificial Sequence
  primer
gtaaaacgacggccagtacattggaattctcagccaag

SEQ ID NO: 19473 - DNA, 40 bp, Artificial Sequence
  primer
gtaaaacgacggccagttctttctgtcattgaagtgcaaa

SEQ ID NO: 19474 - DNA, 38 bp, Artificial Sequence
  primer
gtaaaacgacggccagtggctagtctccatttccaagg

SEQ ID NO: 19475 - DNA, 23 bp, Artificial Sequence
  primer
caagatgtaaattcactggctgc

SEQ ID NO: 19476 - DNA, 39 bp, Artificial Sequence
  primer
gtaaaacgacggccagtttgtcaccatggattaaggatg

SEQ ID NO: 19477 - DNA, 39 bp, Artificial Sequence
  primer
gtaaaacgacggccagttgccatagagatttgcatcttg

SEQ ID NO: 19478 - DNA, 27 bp, Artificial Sequence
  primer
gaagacctggaattacattaacaaaga

SEQ ID NO: 19479 - DNA, 38 bp, Artificial Sequence
  primer
gtaaaacgacggccagtctggcacatagatgcccttag

SEQ ID NO: 19480 - DNA, 43 bp, Artificial Sequence
  primer
gtaaaacgacggccagttgcccattacacttacttataaagcc

SEQ ID NO: 19481 - DNA, 39 bp, Artificial Sequence
  primer
gtaaaacgacggccagttccagttgggattagcaaacag

SEQ ID NO: 19482 - DNA, 42 bp, Artificial Sequence
  primer
gtaaaacgacggccagttctgtcctttaggtgtagcctatcc

SEQ ID NO: 19483 - DNA, 24 bp, Artificial Sequence
  primer
tcacctactgcactcacatattcc

SEQ ID NO: 19484 - DNA, 38 bp, Artificial Sequence
  primer
gtaaaacgacggccagtaccttgggccagttaaattcc

SEQ ID NO: 19485 - DNA, 22 bp, Artificial Sequence
  primer
aatgctcagcagctttgttagg

SEQ ID NO: 19486 - DNA, 43 bp, Artificial Sequence
  primer
gtaaaacgacggccagtgacatctctactctttcaaacttggg

SEQ ID NO: 19487 - DNA, 42 bp, Artificial Sequence
  primer
gtaaaacgacggccagtttcctgtttacttgttgacttggag

SEQ ID NO: 19488 - DNA, 22 bp, Artificial Sequence
  primer
tggagaggtgtatttgggattg

SEQ ID NO: 19489 - DNA, 21 bp, Artificial Sequence
  primer
tgtggcagacaatgctatttg

SEQ ID NO: 19490 - DNA, 22 bp, Artificial Sequence
  primer
gtaggctagggttgagggagac

SEQ ID NO: 19491 - DNA, 38 bp, Artificial Sequence
  primer
gtaaaacgacggccagttggaagaggctcaggaatagg

SEQ ID NO: 19492 - DNA, 23 bp, Artificial Sequence
  primer
gcaacataatgtgaccctgtctc

SEQ ID NO: 19493 - DNA, 38 bp, Artificial Sequence
  primer
gtaaaacgacggccagttgaatgaacagccattgtttg

SEQ ID NO: 19494 - DNA, 22 bp, Artificial Sequence
  primer
ggaagtaagagtgctaggtggc

SEQ ID NO: 19495 - DNA, 38 bp, Artificial Sequence
  primer
gtaaaacgacggccagtcagcacaaacatcctgtcctc

SEQ ID NO: 19496 - DNA, 21 bp, Artificial Sequence
  primer
tgaagaattccgttcctctcc

SEQ ID NO: 19497 - DNA, 21 bp, Artificial Sequence
  primer
ttctcagacgtccagttgtcg

SEQ ID NO: 19498 - DNA, 21 bp, Artificial Sequence
  primer
atctctgtcctgctttcctgc

SEQ ID NO: 19499 - DNA, 37 bp, Artificial Sequence
  primer
gtaaaacgacggccagtcaccgcagtttcctccaatc

SEQ ID NO: 19500 - DNA, 22 bp, Artificial Sequence
  primer
tgtaagaaaggagaggtggctg

SEQ ID NO: 19501 - DNA, 40 bp, Artificial Sequence
  primer
gtaaaacgacggccagttttattcagaagaggatggaggg

SEQ ID NO: 19502 - DNA, 37 bp, Artificial Sequence
  primer
gtaaaacgacggccagtgctgaatgttggttcttccc

SEQ ID NO: 19503 - DNA, 35 bp, Artificial Sequence
  primer
gtaaaacgacggccagtcttggcggaagtggtgtg

SEQ ID NO: 19504 - DNA, 23 bp, Artificial Sequence
  primer
aagattggttcctgatctacacg

SEQ ID NO: 19505 - DNA, 21 bp, Artificial Sequence
  primer
attcccattaggcaagcattc

SEQ ID NO: 19506 - DNA, 21 bp, Artificial Sequence
  primer
caccgtgcctggttctagttc

SEQ ID NO: 19507 - DNA, 40 bp, Artificial Sequence
  primer
gtaaaacgacggccagtgggatgaatgttctaaatttgcc

SEQ ID NO: 19508 - DNA, 21 bp, Artificial Sequence
  primer
gctttgaactcaggaattggg

SEQ ID NO: 19509 - DNA, 37 bp, Artificial Sequence
  primer
gtaaaacgacggccagttttcccaaggatctccaagc

SEQ ID NO: 19510 - DNA, 21 bp, Artificial Sequence
  primer
ttggtggatgaattagctggg

SEQ ID NO: 19511 - DNA, 38 bp, Artificial Sequence
  primer
gtaaaacgacggccagtctttcacagggaaacctggag

SEQ ID NO: 19512 - DNA, 20 bp, Artificial Sequence
  primer
ctcagggctcttcatcctcc

SEQ ID NO: 19513 - DNA, 35 bp, Artificial Sequence
  primer
gtaaaacgacggccagtcactccagccgacagagc

SEQ ID NO: 19514 - DNA, 37 bp, Artificial Sequence
  primer
gtaaaacgacggccagtatgttgggagtgactgggtg

SEQ ID NO: 19515 - DNA, 39 bp, Artificial Sequence
  primer
gtaaaacgacggccagtccctctttgtcttgaacttccc

SEQ ID NO: 19516 - DNA, 38 bp, Artificial Sequence
  primer
gtaaaacgacggccagttagacagatgggagcctcctg

SEQ ID NO: 19517 - DNA, 37 bp, Artificial Sequence
  primer
gtaaaacgacggccagtttgtgggcttgtttccactc

SEQ ID NO: 19518 - DNA, 21 bp, Artificial Sequence
  primer
ggttgctcctcactttgaacc

SEQ ID NO: 19519 - DNA, 38 bp, Artificial Sequence
  primer
gtaaaacgacggccagtgtgacaagctgaacatggagc

SEQ ID NO: 19520 - DNA, 19 bp, Artificial Sequence
  primer
gcctccgagctccacatag

SEQ ID NO: 19521 - DNA, 18 bp, Artificial Sequence
  primer
agtgagccaagaccgtgc

SEQ ID NO: 19522 - DNA, 21 bp, Artificial Sequence
  primer
caggctggtgcaaactacttc

SEQ ID NO: 19523 - DNA, 23 bp, Artificial Sequence
  primer
ttgtgtttccatacttcccagtc

SEQ ID NO: 19524 - DNA, 38 bp, Artificial Sequence
  primer
gtaaaacgacggccagttttgtaacagggacagcagat

SEQ ID NO: 19525 - DNA, 20 bp, Artificial Sequence
  primer
gcaaaccgttgctgtttcag

SEQ ID NO: 19526 - DNA, 25 bp, Artificial Sequence
  primer
tggctacacatagcattaaggagtg

SEQ ID NO: 19527 - DNA, 38 bp, Artificial Sequence
  primer
gtaaaacgacggccagtgataagagatgtggaagcggg

SEQ ID NO: 19528 - DNA, 21 bp, Artificial Sequence
  primer
gaacttccgacttcgtgaacc

SEQ ID NO: 19529 - DNA, 45 bp, Artificial Sequence
  primer
gtaaaacgacggccagtcagttgtctgatggtaggatagaaagtt

SEQ ID NO: 19530 - DNA, 30 bp, Artificial Sequence
  primer
aatatcactatttcttagatctgggacttt

SEQ ID NO: 19531 - DNA, 21 bp, Artificial Sequence
  primer
ggtagctcttgggaaatggtt

SEQ ID NO: 19532 - DNA, 40 bp, Artificial Sequence
  primer
gtaaaacgacggccagttgagaagattatgttcggatgtg

SEQ ID NO: 19533 - DNA, 24 bp, Artificial Sequence
  primer
ggtgaatgaacattaaataagccc

SEQ ID NO: 19534 - DNA, 26 bp, Artificial Sequence
  primer
tttggactgtggttgactagagataa

SEQ ID NO: 19535 - DNA, 44 bp, Artificial Sequence
  primer
gtaaaacgacggccagttgttaaactttattcccttgtatttgg

SEQ ID NO: 19536 - DNA, 41 bp, Artificial Sequence
  primer
gtaaaacgacggccagtcagaatcttacttggaaggaccag

SEQ ID NO: 19537 - DNA, 22 bp, Artificial Sequence
  primer
tctgcatgggcaatgtagtaac

SEQ ID NO: 19538 - DNA, 42 bp, Artificial Sequence
  primer
gtaaaacgacggccagttgaagctgaagtttaacagtagtgc

SEQ ID NO: 19539 - DNA, 42 bp, Artificial Sequence
  primer
gtaaaacgacggccagtcctgtgattaatctttgaaacttgc

SEQ ID NO: 19540 - DNA, 21 bp, Artificial Sequence
  primer
agccttctcacgaatgcataa

SEQ ID NO: 19541 - DNA, 21 bp, Artificial Sequence
  primer
tatggattaaatgggactgcg

SEQ ID NO: 19542 - DNA, 38 bp, Artificial Sequence
  primer
gtaaaacgacggccagtctgccagagtgtaatgcttgg

SEQ ID NO: 19543 - DNA, 21 bp, Artificial Sequence
  primer
agattggaagacaggaccacc

SEQ ID NO: 19544 - DNA, 40 bp, Artificial Sequence
  primer
gtaaaacgacggccagtagccatcttcagttgtctttagc

SEQ ID NO: 19545 - DNA, 22 bp, Artificial Sequence
  primer
ccattgagtggttaaatgttgc

SEQ ID NO: 19546 - DNA, 39 bp, Artificial Sequence
  primer
gtaaaacgacggccagtaatgtgtgtctgacatgcaagc

SEQ ID NO: 19547 - DNA, 21 bp, Artificial Sequence
  primer
gcttcttctgggtgctgtttc

SEQ ID NO: 19548 - DNA, 21 bp, Artificial Sequence
  primer
agggacatttgacaaagcagg

SEQ ID NO: 19549 - DNA, 41 bp, Artificial Sequence
  primer
gtaaaacgacggccagtgatcttggaaagtagcagaaatcc

SEQ ID NO: 19550 - DNA, 38 bp, Artificial Sequence
  primer
gtaaaacgacggccagttcttcacccttcattcccatc

SEQ ID NO: 19551 - DNA, 38 bp, Artificial Sequence
  primer
gtaaaacgacggccagtgggcatactagggcatgattg

SEQ ID NO: 19552 - DNA, 21 bp, Artificial Sequence
  primer
gatgcagaaatgcgtgaagtc

SEQ ID NO: 19553 - DNA, 19 bp, Artificial Sequence
  primer
atggcaggcgcctataatc

SEQ ID NO: 19554 - DNA, 20 bp, Artificial Sequence
  primer
ttccacctttggctcaacac

SEQ ID NO: 19555 - DNA, 35 bp, Artificial Sequence
  primer
gtaaaacgacggccagtgtcgtggtggctctgctg

SEQ ID NO: 19556 - DNA, 21 bp, Artificial Sequence
  primer
gtgcacttgggaggatttagg

SEQ ID NO: 19557 - DNA, 37 bp, Artificial Sequence
  primer
gtaaaacgacggccagtcgtctgggttctctgtttcg

SEQ ID NO: 19558 - DNA, 38 bp, Artificial Sequence
  primer
gtaaaacgacggccagtgcctcaggactctagctttgc

SEQ ID NO: 19559 - DNA, 19 bp, Artificial Sequence
  primer
ccagcccacacccttactg

SEQ ID NO: 19560 - DNA, 21 bp, Artificial Sequence
  primer
ttcctggaatgcctttcaaac

SEQ ID NO: 19561 - DNA, 27 bp, Artificial Sequence
  primer
aagtcttgaccaccaatgtctataatg

SEQ ID NO: 19562 - DNA, 23 bp, Artificial Sequence
  primer
gtacacctgcatgctaaatgaaa

SEQ ID NO: 19563 - DNA, 22 bp, Artificial Sequence
  primer
tgcacaccaggtaggattattg

SEQ ID NO: 19564 - DNA, 21 bp, Artificial Sequence
  primer
ctcacaaagttcccttggtcc

SEQ ID NO: 19565 - DNA, 21 bp, Artificial Sequence
  primer
atgattccttgctcattgcag

SEQ ID NO: 19566 - DNA, 20 bp, Artificial Sequence
  primer
gtgacagatgctgcctctcc

SEQ ID NO: 19567 - DNA, 21 bp, Artificial Sequence
  primer
gtaagacctgccatcggaaag

SEQ ID NO: 19568 - DNA, 44 bp, Artificial Sequence
  primer
gtaaaacgacggccagtatgtgtgctataagtcatagagtgacc

SEQ ID NO: 19569 - DNA, 38 bp, Artificial Sequence
  primer
gtaaaacgacggccagtccctcttcatttcccaatttc

SEQ ID NO: 19570 - DNA, 38 bp, Artificial Sequence
  primer
gtaaaacgacggccagtttctcagaacctgaagcatgg

SEQ ID NO: 19571 - DNA, 39 bp, Artificial Sequence
  primer
gtaaaacgacggccagtggagccatgttgagtaagatgc

SEQ ID NO: 19572 - DNA, 21 bp, Artificial Sequence
  primer
atgtggagggctcttggtatg

SEQ ID NO: 19573 - DNA, 20 bp, Artificial Sequence
  primer
cgtgacagagcaagaccctg

SEQ ID NO: 19574 - DNA, 38 bp, Artificial Sequence
  primer
gtaaaacgacggccagttgaatcttgcgtaggaattgg

SEQ ID NO: 19575 - DNA, 38 bp, Artificial Sequence
  primer
gtaaaacgacggccagtgcttgctgtataggcggtttg

SEQ ID NO: 19576 - DNA, 38 bp, Artificial Sequence
  primer
gtaaaacgacggccagttgattctgacccattcattgc

SEQ ID NO: 19577 - DNA, 21 bp, Artificial Sequence
  primer
tccctaggatggagacgaatg

SEQ ID NO: 19578 - DNA, 36 bp, Artificial Sequence
  primer
gtaaaacgacggccagtggcctctctctggagtcgg

SEQ ID NO: 19579 - DNA, 38 bp, Artificial Sequence
  primer
gtaaaacgacggccagtccaagtctgtctcattcgcag

SEQ ID NO: 19580 - DNA, 21 bp, Artificial Sequence
  primer
actgctggtggaattagcagg

SEQ ID NO: 19581 - DNA, 38 bp, Artificial Sequence
  primer
gtaaaacgacggccagtgttgccagtcactaccctctg

SEQ ID NO: 19582 - DNA, 43 bp, Artificial Sequence
  primer
gtaaaacgacggccagttttctggttacctttccatttaactt

SEQ ID NO: 19583 - DNA, 21 bp, Artificial Sequence
  primer
ccagtgcatctatcctttggg

SEQ ID NO: 19584 - DNA, 20 bp, Artificial Sequence
  primer
attccttggagcggaatgag

SEQ ID NO: 19585 - DNA, 21 bp, Artificial Sequence
  primer
gctttcattcttgggaatgtg

SEQ ID NO: 19586 - DNA, 42 bp, Artificial Sequence
  primer
gtaaaacgacggccagttctcccaactctgagtgacttattg

SEQ ID NO: 19587 - DNA, 23 bp, Artificial Sequence
  primer
ttgccatattaacatgatttggg

SEQ ID NO: 19588 - DNA, 39 bp, Artificial Sequence
  primer
gtaaaacgacggccagtagccttggaagtgttatgtgtg

SEQ ID NO: 19589 - DNA, 38 bp, Artificial Sequence
  primer
gtaaaacgacggccagtatggcagacaatggtgacaag

SEQ ID NO: 19590 - DNA, 20 bp, Artificial Sequence
  primer
aaggcccatgttctgaaagg

SEQ ID NO: 19591 - DNA, 22 bp, Artificial Sequence
  primer
aaacagcctcagtaactcaccc

SEQ ID NO: 19592 - DNA, 42 bp, Artificial Sequence
  primer
gtaaaacgacggccagttcacagttaaattctgaagctttcc

SEQ ID NO: 19593 - DNA, 42 bp, Artificial Sequence
  primer
gtaaaacgacggccagtcactaatggcttcttcagtatcagc

SEQ ID NO: 19594 - DNA, 38 bp, Artificial Sequence
  primer
gtaaaacgacggccagtgaaattgagaaggacgctcag

SEQ ID NO: 19595 - DNA, 21 bp, Artificial Sequence
  primer
gaagaagccatttgtgggaag

SEQ ID NO: 19596 - DNA, 38 bp, Artificial Sequence
  primer
gtaaaacgacggccagttggagctcaactcaaccacag

SEQ ID NO: 19597 - DNA, 38 bp, Artificial Sequence
  primer
gtaaaacgacggccagtaccactgttcctggtgtttcc

SEQ ID NO: 19598 - DNA, 24 bp, Artificial Sequence
  primer
agcagattgaatgtagtgctgttc

SEQ ID NO: 19599 - DNA, 22 bp, Artificial Sequence
  primer
aactgaaatgggaatgcaagtc

SEQ ID NO: 19600 - DNA, 38 bp, Artificial Sequence
  primer
gtaaaacgacggccagttgaaagacaagttgccaggag

SEQ ID NO: 19601 - DNA, 22 bp, Artificial Sequence
  primer
tggttgtttcatttggtgtcag

SEQ ID NO: 19602 - DNA, 23 bp, Artificial Sequence
  primer
tcagtttctggtaatcctcttgc

SEQ ID NO: 19603 - DNA, 21 bp, Artificial Sequence
  primer
aaactggatctgactggctcc

SEQ ID NO: 19604 - DNA, 21 bp, Artificial Sequence
  primer
ctcctgttcctactgcatccc

SEQ ID NO: 19605 - DNA, 21 bp, Artificial Sequence
  primer
ctacaccacggtccactcttg

SEQ ID NO: 19606 - DNA, 38 bp, Artificial Sequence
  primer
gtaaaacgacggccagtccttaccaccaacatcccaag

SEQ ID NO: 19607 - DNA, 38 bp, Artificial Sequence
  primer
gtaaaacgacggccagttcccgtggctaactcaacttc

SEQ ID NO: 19608 - DNA, 21 bp, Artificial Sequence
  primer
attgggccgtgcatatacttc

SEQ ID NO: 19609 - DNA, 38 bp, Artificial Sequence
  primer
gtaaaacgacggccagttggcaacccatctcttaatcc

SEQ ID NO: 19610 - DNA, 39 bp, Artificial Sequence
  primer
gtaaaacgacggccagtgattcatatcagggaatggctg

SEQ ID NO: 19611 - DNA, 38 bp, Artificial Sequence
  primer
gtaaaacgacggccagttctgtgtggcatgggtagaag

SEQ ID NO: 19612 - DNA, 21 bp, Artificial Sequence
  primer
tgggatgcactaaattgccta

SEQ ID NO: 19613 - DNA, 37 bp, Artificial Sequence
  primer
gtaaaacgacggccagtctgtgcctggtccctctatc

SEQ ID NO: 19614 - DNA, 47 bp, Artificial Sequence
  primer
gtaaaacgacggccagtggtttctgatttcctaactttatgttgata

SEQ ID NO: 19615 - DNA, 21 bp, Artificial Sequence
  primer
gcccttgagggaagttaattg

SEQ ID NO: 19616 - DNA, 24 bp, Artificial Sequence
  primer
aagacttcaatacagaatttgggc

SEQ ID NO: 19617 - DNA, 41 bp, Artificial Sequence
  primer
gtaaaacgacggccagtagcgtcctaatacatagtcaaccc

SEQ ID NO: 19618 - DNA, 38 bp, Artificial Sequence
  primer
gtaaaacgacggccagtttgcatgctaagaattagccc

SEQ ID NO: 19619 - DNA, 43 bp, Artificial Sequence
  primer
gtaaaacgacggccagttttcaggtaacacagtttatagagca

SEQ ID NO: 19620 - DNA, 41 bp, Artificial Sequence
  primer
gtaaaacgacggccagtcagatgggtccttaagattgtcag

SEQ ID NO: 19621 - DNA, 41 bp, Artificial Sequence
  primer
gtaaaacgacggccagtgggtagaatggtgaaagttaattg

SEQ ID NO: 19622 - DNA, 39 bp, Artificial Sequence
  primer
gtaaaacgacggccagtgccctatgaatgtctttgcatc

SEQ ID NO: 19623 - DNA, 42 bp, Artificial Sequence
  primer
gtaaaacgacggccagttcctccctaatttgttataacctcc

SEQ ID NO: 19624 - DNA, 38 bp, Artificial Sequence
  primer
gtaaaacgacggccagttcttccactactggtgcctga

SEQ ID NO: 19625 - DNA, 42 bp, Artificial Sequence
  primer
gtaaaacgacggccagttttcagaataattcatgtcaaagga

SEQ ID NO: 19626 - DNA, 22 bp, Artificial Sequence
  primer
ggctggtctggaatatttatgg

SEQ ID NO: 19627 - DNA, 30 bp, Artificial Sequence
  primer
tggaaaccactagactatagaatgttgtaa

SEQ ID NO: 19628 - DNA, 41 bp, Artificial Sequence
  primer
gtaaaacgacggccagtatagttctctgagttgcctctctt

SEQ ID NO: 19629 - DNA, 44 bp, Artificial Sequence
  primer
gtaaaacgacggccagtaaacaggatatttacgttctgctacaa

SEQ ID NO: 19630 - DNA, 44 bp, Artificial Sequence; identical to SEQ ID NO: 19629
  primer

SEQ ID NO: 19631 - DNA, 41 bp, Artificial Sequence
  primer
gtaaaacgacggccagtagcctatatttggaaagaaagcac

SEQ ID NO: 19632 - DNA, 21 bp, Artificial Sequence
  primer
cgaattcgcacagctactcac

SEQ ID NO: 19633 - DNA, 35 bp, Artificial Sequence
  primer
gtaaaacgacggccagtctgtcgctcctaggccac

SEQ ID NO: 19634 - DNA, 28 bp, Artificial Sequence
  primer
tcagaagttcagactctaaaggtatcac

SEQ ID NO: 19635 - DNA, 38 bp, Artificial Sequence
  primer
gtaaaacgacggccagtctgagatgggacgatcacttg

SEQ ID NO: 19636 - DNA, 21 bp, Artificial Sequence
  primer
cacgagcaagaagccattaac

SEQ ID NO: 19637 - DNA, 38 bp, Artificial Sequence
  primer
gtaaaacgacggccagttctgtctgatcctcctgttgc

SEQ ID NO: 19638 - DNA, 26 bp, Artificial Sequence
  primer
gggacttctgtaccataaagcataac

SEQ ID NO: 19639 - DNA, 21 bp, Artificial Sequence
  primer
tcttgcatccttgctgaattt

SEQ ID NO: 19640 - DNA, 39 bp, Artificial Sequence
  primer
gtaaaacgacggccagtgaacttggtcagagaagatggg

SEQ ID NO: 19641 - DNA, 18 bp, Artificial Sequence
  primer
agtgctggaactgcaggc

SEQ ID NO: 19642 - DNA, 24 bp, Artificial Sequence
  primer
ttgccagcttaagttaatagcctg

SEQ ID NO: 19643 - DNA, 18 bp, Artificial Sequence
  primer
ggttatggccctaccggg

SEQ ID NO: 19644 - DNA, 41 bp, Artificial Sequence
  primer
gtaaaacgacggccagttcccttcttaaactcctactctgc

SEQ ID NO: 19645 - DNA, 22 bp, Artificial Sequence
  primer
gggtagatgtgaagctgggaag

SEQ ID NO: 19646 - DNA, 38 bp, Artificial Sequence
  primer
gtaaaacgacggccagtttcaaaccatgttggcttcag

SEQ ID NO: 19647 - DNA, 23 bp, Artificial Sequence
  primer
tcagtttctgaagtcattcccag

SEQ ID NO: 19648 - DNA, 38 bp, Artificial Sequence
  primer
gtaaaacgacggccagttgatacagccagctcttcgag

SEQ ID NO: 19649 - DNA, 21 bp, Artificial Sequence
  primer
gccctggaacgaagtgataag

SEQ ID NO: 19650 - DNA, 22 bp, Artificial Sequence
  primer
caggaaagtaccagcaaagcag

SEQ ID NO: 19651 - DNA, 21 bp, Artificial Sequence
  primer
ttgggactgttgttccacaag

SEQ ID NO: 19652 - DNA, 22 bp, Artificial Sequence
  primer
tcaaggcagtgaatttcttgag

SEQ ID NO: 19653 - DNA, 21 bp, Artificial Sequence
  primer
tggaagtgaatggaaacccac

SEQ ID NO: 19654 - DNA, 23 bp, Artificial Sequence
  primer
gatgtcctcagagatgcacagtc

SEQ ID NO: 19655 - DNA, 39 bp, Artificial Sequence
  primer
gtaaaacgacggccagttcaaataaagcacgcactgttc

SEQ ID NO: 19656 - DNA, 38 bp, Artificial Sequence
  primer
gtaaaacgacggccagtcgtaaaccatcagcacgtttg

SEQ ID NO: 19657 - DNA, 21 bp, Artificial Sequence
  primer
tcacatcacatccaaacatgc

SEQ ID NO: 19658 - DNA, 38 bp, Artificial Sequence
  primer
gtaaaacgacggccagtctcagaaacctggctctgttg

SEQ ID NO: 19659 - DNA, 21 bp, Artificial Sequence
  primer
tccagaatctcggaagtcagc

SEQ ID NO: 19660 - DNA, 38 bp, Artificial Sequence
  primer
gtaaaacgacggccagtttggaaatccaatccttcagc

SEQ ID NO: 19661 - DNA, 38 bp, Artificial Sequence
  primer
gtaaaacgacggccagtggtcaccagatctttggaagc

SEQ ID NO: 19662 - DNA, 21 bp, Artificial Sequence
  primer
cacttgatttccctgagtccc

SEQ ID NO: 19663 - DNA, 21 bp, Artificial Sequence
  primer
gcagtgatcaagagcaggttg

SEQ ID NO: 19664 - DNA, 22 bp, Artificial Sequence
  primer
tgttcatagcccttacaaatgc

SEQ ID NO: 19665 - DNA, 18 bp, Artificial Sequence
  primer
ctccacgcacgtctccac

SEQ ID NO: 19666 - DNA, 39 bp, Artificial Sequence
  primer
gtaaaacgacggccagttgcattgcagagtatgaatgtg

SEQ ID NO: 19667 - DNA, 38 bp, Artificial Sequence
  primer
gtaaaacgacggccagtagccaaatgccaccacattac

SEQ ID NO: 19668 - DNA, 40 bp, Artificial Sequence
  primer
gtaaaacgacggccagtttggttcatagctttggttcaag

SEQ ID NO: 19669 - DNA, 18 bp, Artificial Sequence
  primer
gcggaagttgtggtgagc

SEQ ID NO: 19670 - DNA, 21 bp, Artificial Sequence
  primer
tgaagggaagctaaatgtccg

SEQ ID NO: 19671 - DNA, 18 bp, Artificial Sequence
  primer
tcgtgatctgcctgcctc

SEQ ID NO: 19672 - DNA, 37 bp, Artificial Sequence
  primer
gtaaaacgacggccagtaggcctttgaagacctcagc

SEQ ID NO: 19673 - DNA, 41 bp, Artificial Sequence
  primer
gtaaaacgacggccagtttgagtggaattgaatttgtgatg

SEQ ID NO: 19674 - DNA, 22 bp, Artificial Sequence
  primer
ttgaatctaaactgccttgtgg

SEQ ID NO: 19675 - DNA, 24 bp, Artificial Sequence
  primer
aagtctttggttcctttgtcaatc

SEQ ID NO: 19676 - DNA, 38 bp, Artificial Sequence
  primer
gtaaaacgacggccagtgtttatgccattgttgcttgg

SEQ ID NO: 19677 - DNA, 43 bp, Artificial Sequence
  primer
gtaaaacgacggccagtctggtatacattctgcctaccattag

SEQ ID NO: 19678 - DNA, 21 bp, Artificial Sequence
  primer
ggaatgtctgtcctcctagcc

SEQ ID NO: 19679 - DNA, 38 bp, Artificial Sequence
  primer
gtaaaacgacggccagtcttcctcccttcctgcttatg

SEQ ID NO: 19680 - DNA, 38 bp, Artificial Sequence
  primer
gtaaaacgacggccagttccctatctcccatgaaccac

SEQ ID NO: 19681 - DNA, 39 bp, Artificial Sequence
  primer
gtaaaacgacggccagtcctcaggaacaagtgtcctttc

SEQ ID NO: 19682 - DNA, 21 bp, Artificial Sequence
  primer
catccaaccaccctagacctc

SEQ ID NO: 19683 - DNA, 38 bp, Artificial Sequence
  primer
gtaaaacgacggccagtacggccttcctaacctttacg

SEQ ID NO: 19684 - DNA, 23 bp, Artificial Sequence
  primer
ggctgcttcagtagagggtagtg

SEQ ID NO: 19685 - DNA, 21 bp, Artificial Sequence
  primer
aagaaataattcgaggcggtg

SEQ ID NO: 19686 - DNA, 40 bp, Artificial Sequence
  primer
gtaaaacgacggccagtagatgtggattaaagaggcagtg

SEQ ID NO: 19687 - DNA, 18 bp, Artificial Sequence
  primer
acaggcaagagccactgc

SEQ ID NO: 19688 - DNA, 20 bp, Artificial Sequence
  primer
ctgtccctgtttggtggaac

SEQ ID NO: 19689 - DNA, 39 bp, Artificial Sequence
  primer
gtaaaacgacggccagttttgttccctttgaatttggaa

SEQ ID NO: 19690 - DNA, 19 bp, Artificial Sequence
  primer
aagtgctggaattacgcgg

SEQ ID NO: 19691 - DNA, 40 bp, Artificial Sequence
  primer
gtaaaacgacggccagttttagcatgcagcttcctagatg

SEQ ID NO: 19692 - DNA, 40 bp, Artificial Sequence
  primer
gtaaaacgacggccagtgatcaagattgcaaaggtagctg

SEQ ID NO: 19693 - DNA, 38 bp, Artificial Sequence
  primer
gtaaaacgacggccagtaaatttgccacctttgattgc

SEQ ID NO: 19694 - DNA, 21 bp, Artificial Sequence
  primer
gtggcctgataggaaaggaag

SEQ ID NO: 19695 - DNA, 21 bp, Artificial Sequence
  primer
acttcagtggatgcaaacagc

SEQ ID NO: 19696 - DNA, 20 bp, Artificial Sequence
  primer
ggaggaacttcggagctgtc

SEQ ID NO: 19697 - DNA, 40 bp, Artificial Sequence
  primer
gtaaaacgacggccagtccaggataactgtctgcagtgtc

SEQ ID NO: 19698 - DNA, 25 bp, Artificial Sequence
  primer
tgggatgtcttatagaatgatttgg

SEQ ID NO: 19699 - DNA, 42 bp, Artificial Sequence
  primer
gtaaaacgacggccagttgcagggtagatataatttctgctt

SEQ ID NO: 19700 - DNA, 38 bp, Artificial Sequence
  primer
gtaaaacgacggccagtcagctttccaccaatctgaat

SEQ ID NO: 19701 - DNA, 38 bp, Artificial Sequence
  primer
gtaaaacgacggccagtgccactgcctcagaaccttag

SEQ ID NO: 19702 - DNA, 40 bp, Artificial Sequence
  primer
gtaaaacgacggccagttggagtggctagactgagtgatt

SEQ ID NO: 19703 - DNA, 35 bp, Artificial Sequence
  primer
gtaaaacgacggccagtacaagctgcgctcgtctc

SEQ ID NO: 19704 - DNA, 46 bp, Artificial Sequence
  primer
gtaaaacgacggccagttcaaagatagtttgttcaataagacctaa

SEQ ID NO: 19705 - DNA, 38 bp, Artificial Sequence
  primer
gtaaaacgacggccagtttcaattaaggcctgtgggac

SEQ ID NO: 19706 - DNA, 38 bp, Artificial Sequence
  primer
gtaaaacgacggccagtgttggagtagtgctgggtgac

SEQ ID NO: 19707 - DNA, 23 bp, Artificial Sequence
  primer
aactgcttgcatcttagaggttg

SEQ ID NO: 19708 - DNA, 40 bp, Artificial Sequence
  primer
gtaaaacgacggccagttgggagatcagctctgagtaaac

SEQ ID NO: 19709 - DNA, 21 bp, Artificial Sequence
  primer
ctcccttgacacgcagtttac

SEQ ID NO: 19710 - DNA, 21 bp, Artificial Sequence
  primer
ccagcccttgtgattgttcag

SEQ ID NO: 19711 - DNA, 21 bp, Artificial Sequence
  primer
cctgtcaaactgggaaggaag

SEQ ID NO: 19712 - DNA, 21 bp, Artificial Sequence
  primer
agggtcccaaccactaggaac

SEQ ID NO: 19713 - DNA, 38 bp, Artificial Sequence
  primer
gtaaaacgacggccagtctggcattggctgtgaattag

SEQ ID NO: 19714 - DNA, 21 bp, Artificial Sequence
  primer
tgcaggtgaggtgtaatccag

SEQ ID NO: 19715 - DNA, 38 bp, Artificial Sequence
  primer
gtaaaacgacggccagttgcttaggtgtgtttgatgcc

SEQ ID NO: 19716 - DNA, 38 bp, Artificial Sequence
  primer
gtaaaacgacggccagtatgcgcctttagtcattcagg

SEQ ID NO: 19717 - DNA, 22 bp, Artificial Sequence
  primer
cacaagcactttaggatccagg

SEQ ID NO: 19718 - DNA, 21 bp, Artificial Sequence
  primer
aggtccctgaagctcattctg

SEQ ID NO: 19719 - DNA, 21 bp, Artificial Sequence
  primer
ttgcaggtgaaaggtgttctc

SEQ ID NO: 19720 - DNA, 39 bp, Artificial Sequence
  primer
gtaaaacgacggccagtgcttctcttatatccaccagcg

SEQ ID NO: 19721 - DNA, 38 bp, Artificial Sequence
  primer
gtaaaacgacggccagtcccaacagtccctgacatagc

SEQ ID NO: 19722 - DNA, 38 bp, Artificial Sequence
  primer
gtaaaacgacggccagtagaattgtgacaaatggtgcg

SEQ ID NO: 19723 - DNA, 21 bp, Artificial Sequence
  primer
tcagtgtttaccagacccgtg

SEQ ID NO: 19724 - DNA, 38 bp, Artificial Sequence
  primer
gtaaaacgacggccagttttgcctgtggaagcagtatg

SEQ ID NO: 19725 - DNA, 38 bp, Artificial Sequence
  primer
gtaaaacgacggccagttgacagctgtgtctccaatcc

SEQ ID NO: 19726 - DNA, 21 bp, Artificial Sequence
  primer
tctacgcctgagggacagttc

SEQ ID NO: 19727 - DNA, 21 bp, Artificial Sequence
  primer
cacagcagtggcttctgagag

SEQ ID NO: 19728 - DNA, 38 bp, Artificial Sequence
  primer
gtaaaacgacggccagtgtgctgcccgagttaagaaag

SEQ ID NO: 19729 - DNA, 38 bp, Artificial Sequence
  primer
gtaaaacgacggccagtgtgcatatcttgggaagggac

SEQ ID NO: 19730 - DNA, 38 bp, Artificial Sequence
  primer
gtaaaacgacggccagtagaaacacgacttcccagctc

SEQ ID NO: 19731 - DNA, 39 bp, Artificial Sequence
  primer
gtaaaacgacggccagtcagatggagttggaggagacag

SEQ ID NO: 19732 - DNA, 21 bp, Artificial Sequence
  primer
tcaaacgaacacatccatcag

SEQ ID NO: 19733 - DNA, 44 bp, Artificial Sequence
  primer
gtaaaacgacggccagttcagtagagttaaggttcaaattgttg

SEQ ID NO: 19734 - DNA, 44 bp, Artificial Sequence
  primer
gtaaaacgacggccagtgttagaaactgcttatgatttcaacaa

SEQ ID NO: 19735 - DNA, 38 bp, Artificial Sequence
  primer
gtaaaacgacggccagtgttgtattgggtgttggttgg

SEQ ID NO: 19736 - DNA, 21 bp, Artificial Sequence
  primer
tctgattctgatggagagcaa

SEQ ID NO: 19737 - DNA, 24 bp, Artificial Sequence
  primer
aaatataacagctgctgggcatag

SEQ ID NO: 19738 - DNA, 26 bp, Artificial Sequence
  primer
gctctctttaagcctcagattcatag

SEQ ID NO: 19739 - DNA, 21 bp, Artificial Sequence
  primer
gtaatttgtggcagcgttctg

SEQ ID NO: 19740 - DNA, 40 bp, Artificial Sequence
  primer
gtaaaacgacggccagttgaaggtggaattgtaagctgag

SEQ ID NO: 19741 - DNA, 23 bp, Artificial Sequence
  primer
ggaaagagggtaaacaattcctc

SEQ ID NO: 19742 - DNA, 42 bp, Artificial Sequence
  primer
gtaaaacgacggccagttgactagcatggagaaagaattcaa

SEQ ID NO: 19743 - DNA, 42 bp, Artificial Sequence
  primer
gtaaaacgacggccagtcccacttacataaatgtgttctgtg

SEQ ID NO: 19744 - DNA, 38 bp, Artificial Sequence
  primer
gtaaaacgacggccagtgctttctgtgagaaatgcaaa

SEQ ID NO: 19745 - DNA, 28 bp, Artificial Sequence
  primer
ttggtataaattgggtcatatgtattgt

SEQ ID NO: 19746 - DNA, 22 bp, Artificial Sequence
  primer
gaagcacctgtaatatttgccc

SEQ ID NO: 19747 - DNA, 44 bp, Artificial Sequence
  primer
gtaaaacgacggccagtcagatgagtaattcttatccctttgag

SEQ ID NO: 19748 - DNA, 38 bp, Artificial Sequence
  primer
gtaaaacgacggccagtctgtaggaagtgctctgctgg

SEQ ID NO: 19749 - DNA, 23 bp, Artificial Sequence
  primer
agtcataattgcctctttccctt

SEQ ID NO: 19750 - DNA, 35 bp, Artificial Sequence
  primer
gtaaaacgacggccagtgcgcggagatagcagtgt

SEQ ID NO: 19751 - DNA, 41 bp, Artificial Sequence
  primer
gtaaaacgacggccagtttgtgagctgctttgagatacaac

SEQ ID NO: 19752 - DNA, 18 bp, Artificial Sequence
  primer
aggcatgagccactgtgc

SEQ ID NO: 19753 - DNA, 40 bp, Artificial Sequence
  primer
gtaaaacgacggccagttgttgtttctcttgacacattgc

SEQ ID NO: 19754 - DNA, 23 bp, Artificial Sequence
  primer
ggttcacaatatacctggattcg

SEQ ID NO: 19755 - DNA, 39 bp, Artificial Sequence
  primer
gtaaaacgacggccagtcatgaaggaaatgactgctttg

SEQ ID NO: 19756 - DNA, 21 bp, Artificial Sequence
  primer
tcatctccacattcaacccac

SEQ ID NO: 19757 - DNA, 40 bp, Artificial Sequence
  primer
gtaaaacgacggccagttgctgttagaatcacctttcctg

SEQ ID NO: 19758 - DNA, 21 bp, Artificial Sequence
  primer
caaaggacttgtcagggacac

SEQ ID NO: 19759 - DNA, 38 bp, Artificial Sequence
  primer
gtaaaacgacggccagttgcaaagtggctgatctgttg

SEQ ID NO: 19760 - DNA, 44 bp, Artificial Sequence
  primer
gtaaaacgacggccagtccaagcagattatttattaagctaggc

SEQ ID NO: 19761 - DNA, 38 bp, Artificial Sequence
  primer
gtaaaacgacggccagtggtttctgtggatcccttctg

SEQ ID NO: 19762 - DNA, 22 bp, Artificial Sequence
  primer
ccttcaggcacacttactcctg

SEQ ID NO: 19763 - DNA, 21 bp, Artificial Sequence
  primer
tcttcctcaccgtaatgttgg

SEQ ID NO: 19764 - DNA, 38 bp, Artificial Sequence
  primer
gtaaaacgacggccagtagagaaagactgggcaggagg

SEQ ID NO: 19765 - DNA, 22 bp, Artificial Sequence
  primer
tgcaaacttccaactctgaacc

SEQ ID NO: 19766 - DNA, 21 bp, Artificial Sequence
  primer
aggacaacagaagggacttcg

SEQ ID NO: 19767 - DNA, 24 bp, Artificial Sequence
  primer
tcgatgacactaaggaatatttgg

SEQ ID NO: 19768 - DNA, 38 bp, Artificial Sequence
  primer
gtaaaacgacggccagtgctgtaatgtttggccttcaa

SEQ ID NO: 19769 - DNA, 38 bp, Artificial Sequence
  primer
gtaaaacgacggccagtgccaagttccatgaggatagg

SEQ ID NO: 19770 - DNA, 22 bp, Artificial Sequence
  primer
tggaaagagctttatgtgaggg

SEQ ID NO: 19771 - DNA, 20 bp, Artificial Sequence
  primer
caccacacctagcgtcaaag

SEQ ID NO: 19772 - DNA, 40 bp, Artificial Sequence
  primer
gtaaaacgacggccagtcactaatgaaatttgcggaactg

SEQ ID NO: 19773 - DNA, 39 bp, Artificial Sequence
  primer
gtaaaacgacggccagtggtctgaatagacctgggcttc

SEQ ID NO: 19774 - DNA, 38 bp, Artificial Sequence
  primer
gtaaaacgacggccagtaggtataatctgtccgctggc

SEQ ID NO: 19775 - DNA, 39 bp, Artificial Sequence
  primer
gtaaaacgacggccagttcctcaccagatttgtcaagtg

SEQ ID NO: 19776 - DNA, 45 bp, Artificial Sequence
  primer
gtaaaacgacggccagttctcagtaaatctcatcaattcagtgtt

SEQ ID NO: 19777 - DNA, 20 bp, Artificial Sequence
  primer
acagggatgagccactgagc

SEQ ID NO: 19778 - DNA, 41 bp, Artificial Sequence
  primer
gtaaaacgacggccagttggagttcctctagcctctactcc

SEQ ID NO: 19779 - DNA, 38 bp, Artificial Sequence
  primer
gtaaaacgacggccagtaggcaattgttgttcaacctg

SEQ ID NO: 19780 - DNA, 38 bp, Artificial Sequence
  primer
gtaaaacgacggccagttggttcttgccctggataaac

SEQ ID NO: 19781 - DNA, 42 bp, Artificial Sequence
  primer
gtaaaacgacggccagtgaaactgatttctcaactccaacac

SEQ ID NO: 19782 - DNA, 37 bp, Artificial Sequence
  primer
gtaaaacgacggccagtgatgagcctcagggcttctg

SEQ ID NO: 19783 - DNA, 21 bp, Artificial Sequence
  primer
ttccgtaatgcagacggtatc

SEQ ID NO: 19784 - DNA, 38 bp, Artificial Sequence
  primer
gtaaaacgacggccagttgcctgttcctgaagatggtc

SEQ ID NO: 19785 - DNA, 21 bp, Artificial Sequence
  primer
cagttgcctgacttgcttctg

SEQ ID NO: 19786 - DNA, 43 bp, Artificial Sequence
  primer
gtaaaacgacggccagtacagaaagcaaagagaacaataccta

SEQ ID NO: 19787 - DNA, 23 bp, Artificial Sequence
  primer
gattcatcattgctgttaccaaa

SEQ ID NO: 19788 - DNA, 43 bp, Artificial Sequence
  primer
gtaaaacgacggccagtctgtccttgtattaagtaacagtggc

SEQ ID NO: 19789 - DNA, 22 bp, Artificial Sequence
  primer
ttgatctggattattggtgagc

SEQ ID NO: 19790 - DNA, 20 bp, Artificial Sequence
  primer
gcgcacacacacaattcaag

SEQ ID NO: 19791 - DNA, 41 bp, Artificial Sequence
  primer
gtaaaacgacggccagttgacttgaaataactgcattccac

SEQ ID NO: 19792 - DNA, 20 bp, Artificial Sequence
  primer
aatggtgggattaagacccg

SEQ ID NO: 19793 - DNA, 37 bp, Artificial Sequence
  primer
gtaaaacgacggccagtggacagtgagatgctgggag

SEQ ID NO: 19794 - DNA, 21 bp, Artificial Sequence
  primer
ttaaggagggccagttctctg

SEQ ID NO: 19795 - DNA, 39 bp, Artificial Sequence
  primer
gtaaaacgacggccagttgtgtagcttgggaaatgagac

SEQ ID NO: 19796 - DNA, 39 bp, Artificial Sequence
  primer
gtaaaacgacggccagtccctttgtcataaccacctcac

SEQ ID NO: 19797 - DNA, 39 bp, Artificial Sequence
  primer
gtaaaacgacggccagttcctgtgtcttgtctttggttg

SEQ ID NO: 19798 - DNA, 37 bp, Artificial Sequence
  primer
gtaaaacgacggccagtactctcccaccaacagaccc

SEQ ID NO: 19799 - DNA, 38 bp, Artificial Sequence
  primer
gtaaaacgacggccagtctccaagcggtgactgttatg

SEQ ID NO: 19800 - DNA, 21 bp, Artificial Sequence
  primer
cttccaggtactgtgctttgc

SEQ ID NO: 19801 - DNA, 21 bp, Artificial Sequence
  primer
ttacagcaaacagtcccaagc

SEQ ID NO: 19802 - DNA, 19 bp, Artificial Sequence
  primer
agggaatctgcagtttggg

SEQ ID NO: 19803 - DNA, 37 bp, Artificial Sequence
  primer
gtaaaacgacggccagtcccgtgaattgtctttccag

SEQ ID NO: 19804 - DNA, 38 bp, Artificial Sequence
  primer
gtaaaacgacggccagttcagtcgttgtgccattatcc

SEQ ID NO: 19805 - DNA, 38 bp, Artificial Sequence
  primer
gtaaaacgacggccagtccctcttgctgactttgtgac

SEQ ID NO: 19806 - DNA, 38 bp, Artificial Sequence
  primer
gtaaaacgacggccagtaccgagcaccaaataaccaag

SEQ ID NO: 19807 - DNA, 42 bp, Artificial Sequence
  primer
gtaaaacgacggccagtgatgtgctataatgatttcctagcc

SEQ ID NO: 19808 - DNA, 21 bp, Artificial Sequence
  primer
gccatgtgtttgtatttggct

SEQ ID NO: 19809 - DNA, 40 bp, Artificial Sequence
  primer
gtaaaacgacggccagttgctacagttgtaatcgaggacc

SEQ ID NO: 19810 - DNA, 21 bp, Artificial Sequence
  primer
ctgtgctcaggtgtgaaccac

SEQ ID NO: 19811 - DNA, 20 bp, Artificial Sequence
  primer
aatgtagccacctcacaggg

SEQ ID NO: 19812 - DNA, 26 bp, Artificial Sequence
  primer
tttctttgtgattgactttgaagttt

SEQ ID NO: 19813 - DNA, 37 bp, Artificial Sequence
  primer
gtaaaacgacggccagtagaagagagcatgggaaggc

SEQ ID NO: 19814 - DNA, 38 bp, Artificial Sequence
  primer
gtaaaacgacggccagtaaggtagtgctgcttcttggg

SEQ ID NO: 19815 - DNA, 21 bp, Artificial Sequence
  primer
gacacagatgggctgagagtg

SEQ ID NO: 19816 - DNA, 21 bp, Artificial Sequence
  primer
atgaaggaccacaactcccac

SEQ ID NO: 19817 - DNA, 38 bp, Artificial Sequence
  primer
gtaaaacgacggccagtcagcatttgaagctgtctgtg

SEQ ID NO: 19818 - DNA, 38 bp, Artificial Sequence
  primer
gtaaaacgacggccagtgacagggcacctttgctagtc

SEQ ID NO: 19819 - DNA, 38 bp, Artificial Sequence
  primer
gtaaaacgacggccagtccctgagcctgtatccagaag

SEQ ID NO: 19820 - DNA, 21 bp, Artificial Sequence
  primer
acgtgtggcacttgtatgctc

SEQ ID NO: 19821 - DNA, 38 bp, Artificial Sequence
  primer
gtaaaacgacggccagtctggcctcagctactctcacc

SEQ ID NO: 19822 - DNA, 21 bp, Artificial Sequence
  primer
attgcatctccctgaacacac

SEQ ID NO: 19823 - DNA, 21 bp, Artificial Sequence
  primer
gtctggaagagtcttgctcgg

SEQ ID NO: 19824 - DNA, 21 bp, Artificial Sequence
  primer
cagaagatgtagagggagggc

SEQ ID NO: 19825 - DNA, 21 bp, Artificial Sequence
  primer
ggtcctgtcccagttgtcttc

SEQ ID NO: 19826 - DNA, 38 bp, Artificial Sequence
  primer
gtaaaacgacggccagtgacttagcctcagccttggag

SEQ ID NO: 19827 - DNA, 38 bp, Artificial Sequence
  primer
gtaaaacgacggccagtaggcctctgagtcaagtctgg

SEQ ID NO: 19828 - DNA, 23 bp, Artificial Sequence
  primer
aacaggttggagtgaaattaggg

SEQ ID NO: 19829 - DNA, 38 bp, Artificial Sequence
  primer
gtaaaacgacggccagtagaaatcatccctcccatttg

SEQ ID NO: 19830 - DNA, 21 bp, Artificial Sequence
  primer
tgctagtgacaaagacctggg

SEQ ID NO: 19831 - DNA, 38 bp, Artificial Sequence
  primer
gtaaaacgacggccagtcttagctggcacagttatggg

SEQ ID NO: 19832 - DNA, 37 bp, Artificial Sequence
  primer
gtaaaacgacggccagttctggttaccatcagctggg

SEQ ID NO: 19833 - DNA, 38 bp, Artificial Sequence
  primer
gtaaaacgacggccagtctgaacagtgcctgtgtttgg

SEQ ID NO: 19834 - DNA, 38 bp, Artificial Sequence
  primer
gtaaaacgacggccagttgttgtcccaatgcttaatgg

SEQ ID NO: 19835 - DNA, 21 bp, Artificial Sequence
  primer
gtggccacttgggttactagg

SEQ ID NO: 19836 - DNA, 21 bp, Artificial Sequence
  primer
gcacagctgagagatcattgg

SEQ ID NO: 19837 - DNA, 38 bp, Artificial Sequence
  primer
gtaaaacgacggccagtgatggaggaagacagtgggtg

SEQ ID NO: 19838 - DNA, 21 bp, Artificial Sequence
  primer
gccactggagtcatcctcttc

SEQ ID NO: 19839 - DNA, 36 bp, Artificial Sequence
  primer
gtaaaacgacggccagtaagccgggtctagcatgtg

SEQ ID NO: 19840 - DNA, 21 bp, Artificial Sequence
  primer
ttatcccatttgaccctgacc

SEQ ID NO: 19841 - DNA, 21 bp, Artificial Sequence
  primer
gagctgaagggcttaaggagg

SEQ ID NO: 19842 - DNA, 38 bp, Artificial Sequence
  primer
gtaaaacgacggccagtttcctctctctgtaggccctg

SEQ ID NO: 19843 - DNA, 21 bp, Artificial Sequence
  primer
acgctcagtcagaatcaggtg

SEQ ID NO: 19844 - DNA, 20 bp, Artificial Sequence
  primer
tgcaggagctataacgtggg

SEQ ID NO: 19845 - DNA, 21 bp, Artificial Sequence
  primer
aagaaccaagagcactggcac

SEQ ID NO: 19846 - DNA, 38 bp, Artificial Sequence
  primer
gtaaaacgacggccagtaggttcaatgggtatgttggg

SEQ ID NO: 19847 - DNA, 38 bp, Artificial Sequence
  primer
gtaaaacgacggccagttctacccatttaggccttccc

SEQ ID NO: 19848 - DNA, 21 bp, Artificial Sequence
  primer
acttggccctaatggtagcag

SEQ ID NO: 19849 - DNA, 38 bp, Artificial Sequence
  primer
gtaaaacgacggccagtcaggcagtcaggtagaggagg

SEQ ID NO: 19850 - DNA, 21 bp, Artificial Sequence
  primer
caggtctgaacagcagctctc

SEQ ID NO: 19851 - DNA, 21 bp, Artificial Sequence
  primer
gagctccagaggtacacccac

SEQ ID NO: 19852 - DNA, 38 bp, Artificial Sequence
  primer
gtaaaacgacggccagtttaagcttcaggagctgggag

SEQ ID NO: 19853 - DNA, 21 bp, Artificial Sequence
  primer
gcagggagtagacccatgttc

SEQ ID NO: 19854 - DNA, 21 bp, Artificial Sequence
  primer
ccctgagacccaccatatctc

SEQ ID NO: 19855 - DNA, 38 bp, Artificial Sequence
  primer
gtaaaacgacggccagtacacactgagccacgtcaatc

SEQ ID NO: 19856 - DNA, 38 bp, Artificial Sequence
  primer
gtaaaacgacggccagtctagggaaggatctggtgtgg

SEQ ID NO: 19857 - DNA, 37 bp, Artificial Sequence
  primer
gtaaaacgacggccagtgtgtaggcagcctggatctg

SEQ ID NO: 19858 - DNA, 21 bp, Artificial Sequence
  primer
atcattcacccatcctcttgg

SEQ ID NO: 19859 - DNA, 20 bp, Artificial Sequence
  primer
aggactgtgtgagtgcctgg

SEQ ID NO: 19860 - DNA, 21 bp, Artificial Sequence
  primer
ctttccttgatgctctggacc

SEQ ID NO: 19861 - DNA, 37 bp, Artificial Sequence
  primer
gtaaaacgacggccagtctgctcaccaacagaggagg

SEQ ID NO: 19862 - DNA, 37 bp, Artificial Sequence
  primer
gtaaaacgacggccagtgtgcagggtgctgtcctaag

SEQ ID NO: 19863 - DNA, 21 bp, Artificial Sequence
  primer
gggcattcaagaaggctgtag

SEQ ID NO: 19864 - DNA, 39 bp, Artificial Sequence
  primer
gtaaaacgacggccagtaagtctggagaacccaagaagg

SEQ ID NO: 19865 - DNA, 38 bp, Artificial Sequence
  primer
gtaaaacgacggccagttttgtgacttaggcaggtccc

SEQ ID NO: 19866 - DNA, 21 bp, Artificial Sequence
  primer
ggagaaatgagtgtcaagggc

SEQ ID NO: 19867 - DNA, 38 bp, Artificial Sequence
  primer
gtaaaacgacggccagtcctgtctccctaatcaccctc

SEQ ID NO: 19868 - DNA, 38 bp, Artificial Sequence
  primer
gtaaaacgacggccagtttctgcctccaatctcaatcc

SEQ ID NO: 19869 - DNA, 21 bp, Artificial Sequence
  primer
tgccttcatcagtgagtctcc

SEQ ID NO: 19870 - DNA, 38 bp, Artificial Sequence
  primer
gtaaaacgacggccagttttccataaatgtccaagccc

SEQ ID NO: 19871 - DNA, 38 bp, Artificial Sequence
  primer
gtaaaacgacggccagtagcaggtttatcagacccagg

SEQ ID NO: 19872 - DNA, 21 bp, Artificial Sequence
  primer
ttggaaggactcttcagaggg

SEQ ID NO: 19873 - DNA, 38 bp, Artificial Sequence
  primer
gtaaaacgacggccagtaggtatgggtgccactctttg

SEQ ID NO: 19874 - DNA, 21 bp, Artificial Sequence
  primer
acgacgcaggtaagaacagtc

SEQ ID NO: 19875 - DNA, 22 bp, Artificial Sequence
  primer
cagagacataggagcaagtggg

SEQ ID NO: 19876 - DNA, 38 bp, Artificial Sequence
  primer
gtaaaacgacggccagtaaggtgagagctggcaagatg

SEQ ID NO: 19877 - DNA, 37 bp, Artificial Sequence
  primer
gtaaaacgacggccagtgagtcacagcctggatgagc

SEQ ID NO: 19878 - DNA, 21 bp, Artificial Sequence
  primer
ctgatagaagacggcctcctg

SEQ ID NO: 19879 - DNA, 36 bp, Artificial Sequence
  primer
gtaaaacgacggccagtggaagggtcaaagagcgtg

SEQ ID NO: 19880 - DNA, 20 bp, Artificial Sequence
  primer
tgtccgtcatgttggaggtc

SEQ ID NO: 19881 - DNA, 38 bp, Artificial Sequence
  primer
gtaaaacgacggccagtatcaagcagtcgtgcatcaag

SEQ ID NO: 19882 - DNA, 21 bp, Artificial Sequence
  primer
ttatggtgaggcttgggtttc

SEQ ID NO: 19883 - DNA, 37 bp, Artificial Sequence
  primer
gtaaaacgacggccagtctgggtctcctctgtccttg

SEQ ID NO: 19884 - DNA, 21 bp, Artificial Sequence
  primer
caagcacgtactcaggtggag

SEQ ID NO: 19885 - DNA, 40 bp, Artificial Sequence
  primer
gtaaaacgacggccagtgcacgttcattgtagagatttgg

SEQ ID NO: 19886 - DNA, 38 bp, Artificial Sequence
  primer
gtaaaacgacggccagtcaggagctacaaacagccaag

SEQ ID NO: 19887 - DNA, 38 bp, Artificial Sequence
  primer
gtaaaacgacggccagtagtgctgggatcacaacttgc

SEQ ID NO: 19888 - DNA, 21 bp, Artificial Sequence
  primer
ttgcagaaagtatgggactgg

SEQ ID NO: 19889 - DNA, 21 bp, Artificial Sequence
  primer
agcaagcagaaggaccatacc

SEQ ID NO: 19890 - DNA, 38 bp, Artificial Sequence
  primer
gtaaaacgacggccagtctccctaatccctgtgacctg

SEQ ID NO: 19891 - DNA, 20 bp, Artificial Sequence
  primer
ctaacccagctgctgaatgc

SEQ ID NO: 19892 - DNA, 21 bp, Artificial Sequence
  primer
agccgaaattcagggctttac

SEQ ID NO: 19893 - DNA, 20 bp, Artificial Sequence
  primer
ggagatcctaagggccagag

SEQ ID NO: 19894 - DNA, 37 bp, Artificial Sequence
  primer
gtaaaacgacggccagtgggaaacagaaaccaggagg

SEQ ID NO: 19895 - DNA, 38 bp, Artificial Sequence
  primer
gtaaaacgacggccagtgggacattcgagagtcagtcc

SEQ ID NO: 19896 - DNA, 40 bp, Artificial Sequence
  primer
gtaaaacgacggccagtgaaactgtacccatttagccctg

SEQ ID NO: 19897 - DNA, 38 bp, Artificial Sequence
  primer
gtaaaacgacggccagtagaggcatgagctgacaaact

SEQ ID NO: 19898 - DNA, 21 bp, Artificial Sequence
  primer
ggagcaattgtaaggcatagc

SEQ ID NO: 19899 - DNA, 23 bp, Artificial Sequence
  primer
catgtatctggtggtctagtggc

SEQ ID NO: 19900 - DNA, 37 bp, Artificial Sequence
  primer
gtaaaacgacggccagttccttgtcattggttcctgg

SEQ ID NO: 19901 - DNA, 23 bp, Artificial Sequence
  primer
gggcaacatagcaagaccttatc

SEQ ID NO: 19902 - DNA, 39 bp, Artificial Sequence
  primer
gtaaaacgacggccagtaaaccatttatctttccctgcc

SEQ ID NO: 19903 - DNA, 40 bp, Artificial Sequence
  primer
gtaaaacgacggccagtaaattaaagatcagcctcttggg

SEQ ID NO: 19904 - DNA, 21 bp, Artificial Sequence
  primer
tgtaagcctttggaacaccag

SEQ ID NO: 19905 - DNA, 40 bp, Artificial Sequence
  primer
gtaaaacgacggccagtgcgtagtctgtgaagactggttc

SEQ ID NO: 19906 - DNA, 20 bp, Artificial Sequence
  primer
agtcaagaccatgccactgc

SEQ ID NO: 19907 - DNA, 42 bp, Artificial Sequence
  primer
gtaaaacgacggccagtaacttatggctttggatttcaattt

SEQ ID NO: 19908 - DNA, 21 bp, Artificial Sequence
  primer
tcaggaaattggctttctgag

SEQ ID NO: 19909 - DNA, 38 bp, Artificial Sequence
  primer
gtaaaacgacggccagtacagactcaggtgtcaatggc

SEQ ID NO: 19910 - DNA, 20 bp, Artificial Sequence
  primer
gaatggtgttaacccgggag

SEQ ID NO: 19911 - DNA, 38 bp, Artificial Sequence
  primer
gtaaaacgacggccagtccttggtagttcctccagcag

SEQ ID NO: 19912 - DNA, 22 bp, Artificial Sequence
  primer
gggttaaggaaccgaaactttg

SEQ ID NO: 19913 - DNA, 21 bp, Artificial Sequence
  primer
ttgcatgtgaatgtgcttctg

SEQ ID NO: 19914 - DNA, 38 bp, Artificial Sequence
  primer
gtaaaacgacggccagtgaattagcgtggtttggcttc

SEQ ID NO: 19915 - DNA, 38 bp, Artificial Sequence
  primer
gtaaaacgacggccagtgtgggccatgacacagtacac

SEQ ID NO: 19916 - DNA, 21 bp, Artificial Sequence
  primer
ttcctggagagaatgctttgg

SEQ ID NO: 19917 - DNA, 38 bp, Artificial Sequence
  primer
gtaaaacgacggccagttgtgacttccacctgaaccac

SEQ ID NO: 19918 - DNA, 37 bp, Artificial Sequence
  primer
gtaaaacgacggccagtgccaccactgaaggtctttg

SEQ ID NO: 19919 - DNA, 21 bp, Artificial Sequence
  primer
gcagctcttcctactccaagc

SEQ ID NO: 19920 - DNA, 21 bp, Artificial Sequence
  primer
tgggatcagttagtggtgcag

SEQ ID NO: 19921 - DNA, 20 bp, Artificial Sequence
  primer
ccaattcctcagccttcttg

SEQ ID NO: 19922 - DNA, 35 bp, Artificial Sequence
  primer
gtaaaacgacggccagtccaagttggccaagggac

SEQ ID NO: 19923 - DNA, 41 bp, Artificial Sequence
  primer
gtaaaacgacggccagttcctatattgcgttattgagttgg

SEQ ID NO: 19924 - DNA, 19 bp, Artificial Sequence
  primer
cattgggagcccacaagtc

SEQ ID NO: 19925 - DNA, 38 bp, Artificial Sequence
  primer
gtaaaacgacggccagtccctcccacaaattatttccc

SEQ ID NO: 19926 - DNA, 21 bp, Artificial Sequence
  primer
tgaactagagagggtggtggg

SEQ ID NO: 19927 - DNA, 22 bp, Artificial Sequence
  primer
cacagctcagttccagatagcc

SEQ ID NO: 19928 - DNA, 22 bp, Artificial Sequence
  primer
tggctatgagctgagtgtgttg

SEQ ID NO: 19929 - DNA, 21 bp, Artificial Sequence
  primer
ttctcctagaggaggcactcg

SEQ ID NO: 19930 - DNA, 18 bp, Artificial Sequence
  primer
cacccgcctccaataacc

SEQ ID NO: 19931 - DNA, 22 bp, Artificial Sequence
  primer
tttaagggacgctctaaaggtg

SEQ ID NO: 19932 - DNA, 21 bp, Artificial Sequence
  primer
ctctcctagggtgggaaacac

SEQ ID NO: 19933 - DNA, 38 bp, Artificial Sequence
  primer
gtaaaacgacggccagtggattccatgataacaggcag

SEQ ID NO: 19934 - DNA, 38 bp, Artificial Sequence
  primer
gtaaaacgacggccagtgggcagagtcaatatcaggaa

SEQ ID NO: 19935 - DNA, 38 bp, Artificial Sequence
  primer
gtaaaacgacggccagttttctgtatccctcagcaccc

SEQ ID NO: 19936 - DNA, 38 bp, Artificial Sequence
  primer
gtaaaacgacggccagtgtggttgatgatggaaactgg

SEQ ID NO: 19937 - DNA, 37 bp, Artificial Sequence
  primer
gtaaaacgacggccagtagagaggattgcttgagccc

SEQ ID NO: 19938 - DNA, 24 bp, Artificial Sequence
  primer
gcatctttgaataaatgaactccc

SEQ ID NO: 19939 - DNA, 20 bp, Artificial Sequence
  primer
ccgacctattcagagttggc

SEQ ID NO: 19940 - DNA, 21 bp, Artificial Sequence
  primer
tttgaagattcacatggcaaa

SEQ ID NO: 19941 - DNA, 40 bp, Artificial Sequence
  primer
gtaaaacgacggccagttgggcatttacatgactagttgc

SEQ ID NO: 19942 - DNA, 38 bp, Artificial Sequence
  primer
gtaaaacgacggccagtgccaggaatgttctatcaggc

SEQ ID NO: 19943 - DNA, 39 bp, Artificial Sequence
  primer
gtaaaacgacggccagtcatcagttgaaagatttgccag

SEQ ID NO: 19944 - DNA, 21 bp, Artificial Sequence
  primer
ctgcatcatttcttcctccac

SEQ ID NO: 19945 - DNA, 41 bp, Artificial Sequence
  primer
gtaaaacgacggccagttgattctgaatacaggcaacttgt

SEQ ID NO: 19946 - DNA, 19 bp, Artificial Sequence
  primer
tccgggctttgttaactcg

SEQ ID NO: 19947 - DNA, 38 bp, Artificial Sequence
  primer
gtaaaacgacggccagtctaccctcgggtaagagctgg

SEQ ID NO: 19948 - DNA, 39 bp, Artificial Sequence
  primer
gtaaaacgacggccagtgccaaggtactgaaatggtttg

SEQ ID NO: 19949 - DNA, 38 bp, Artificial Sequence
  primer
gtaaaacgacggccagttgaggatctctgagcctttcc

SEQ ID NO: 19950 - DNA, 21 bp, Artificial Sequence
  primer
agggccttaaagcacagtcag

SEQ ID NO: 19951 - DNA, 38 bp, Artificial Sequence
  primer
gtaaaacgacggccagtataaggagggacctcggtttc

SEQ ID NO: 19952 - DNA, 21 bp, Artificial Sequence
  primer
agccgagagtgaacctcagac

SEQ ID NO: 19953 - DNA, 21 bp, Artificial Sequence
  primer
aagcccggagctactcctatc

SEQ ID NO: 19954 - DNA, 21 bp, Artificial Sequence
  primer
caggaagtcgtgcagtacagg

SEQ ID NO: 19955 - DNA, 39 bp, Artificial Sequence
  primer
gtaaaacgacggccagtggtgatgatgaagatgatgcag

SEQ ID NO: 19956 - DNA, 37 bp, Artificial Sequence
  primer
gtaaaacgacggccagtaggttgtccaatgggaggag

SEQ ID NO: 19957 - DNA, 38 bp, Artificial Sequence
  primer
gtaaaacgacggccagttttcatactctaccgctgggc

SEQ ID NO: 19958 - DNA, 41 bp, Artificial Sequence
  primer
gtaaaacgacggccagtccacctgaagaattaagaacttgc

SEQ ID NO: 19959 - DNA, 39 bp, Artificial Sequence
  primer
gtaaaacgacggccagtttcggtcttcaggaaacttcac

SEQ ID NO: 19960 - DNA, 22 bp, Artificial Sequence
  primer
tgcacaaatgttatggctgaag

SEQ ID NO: 19961 - DNA, 41 bp, Artificial Sequence
  primer
gtaaaacgacggccagtgcatcaatctcagccttcaagtag

SEQ ID NO: 19962 - DNA, 46 bp, Artificial Sequence
  primer
gtaaaacgacggccagtaagctatgtatgtagaaattacagtgtgc

SEQ ID NO: 19963 - DNA, 23 bp, Artificial Sequence
  primer
tggatttgagtttctctcagtgg

SEQ ID NO: 19964 - DNA, 23 bp, Artificial Sequence
  primer
tggaataggtagtgacagatgcc

SEQ ID NO: 19965 - DNA, 38 bp, Artificial Sequence
  primer
gtaaaacgacggccagttatccatgtctgccatgtttg

SEQ ID NO: 19966 - DNA, 41 bp, Artificial Sequence
  primer
gtaaaacgacggccagtcggaatctggttattattgcaagg

SEQ ID NO: 19967 - DNA, 21 bp, Artificial Sequence
  primer
ccttccacgtgtttcagatgt

SEQ ID NO: 19968 - DNA, 21 bp, Artificial Sequence
  primer
gccagctatttcatgttagcg

SEQ ID NO: 19969 - DNA, 21 bp, Artificial Sequence
  primer
tatccatgtcttcttcagccc

SEQ ID NO: 19970 - DNA, 39 bp, Artificial Sequence
  primer
gtaaaacgacggccagtgcctggtctggttcactttatg

SEQ ID NO: 19971 - DNA, 39 bp, Artificial Sequence
  primer
gtaaaacgacggccagtgcttggaaggagattaacctgg

SEQ ID NO: 19972 - DNA, 38 bp, Artificial Sequence
  primer
gtaaaacgacggccagtaaacaacaggctggcaaagtc

SEQ ID NO: 19973 - DNA, 44 bp, Artificial Sequence
  primer
gtaaaacgacggccagtccacttcagtgacattagagattcttg

SEQ ID NO: 19974 - DNA, 38 bp, Artificial Sequence
  primer
gtaaaacgacggccagtgctgactggcagagtctatgg

SEQ ID NO: 19975 - DNA, 21 bp, Artificial Sequence
  primer
ccatccatagactggagagcg

SEQ ID NO: 19976 - DNA, 38 bp, Artificial Sequence
  primer
gtaaaacgacggccagtacgagctgaaatcttgcagtg

SEQ ID NO: 19977 - DNA, 38 bp, Artificial Sequence
  primer
gtaaaacgacggccagtaactgccctacgatggaactc

SEQ ID NO: 19978 - DNA, 22 bp, Artificial Sequence
  primer
tgctagtttggaactggttgag

SEQ ID NO: 19979 - DNA, 22 bp, Artificial Sequence
  primer
accatggcttaatttctgaacc

SEQ ID NO: 19980 - DNA, 38 bp, Artificial Sequence
  primer
gtaaaacgacggccagtcatgtcctcagttgggatcag

SEQ ID NO: 19981 - DNA, 27 bp, Artificial Sequence
  primer
tggtaggttctattcctttcattaact

SEQ ID NO: 19982 - DNA, 39 bp, Artificial Sequence
  primer
gtaaaacgacggccagtgcttcttacagtggtgcatctg

SEQ ID NO: 19983 - DNA, 21 bp, Artificial Sequence
  primer
acaggtttgagccactgtgtg

SEQ ID NO: 19984 - DNA, 24 bp, Artificial Sequence
  primer
agcttcagtacgtttaaatgagcc

SEQ ID NO: 19985 - DNA, 39 bp, Artificial Sequence
  primer
gtaaaacgacggccagttggaggtctgttagtccatgtg

SEQ ID NO: 19986 - DNA, 35 bp, Artificial Sequence
  primer
gtaaaacgacggccagtgctttaggacgtgagcgg

SEQ ID NO: 19987 - DNA, 19 bp, Artificial Sequence
  primer
tgccaggcatggttgttag

SEQ ID NO: 19988 - DNA, 36 bp, Artificial Sequence
  primer
gtaaaacgacggccagtgtgacctgggcacacacac

SEQ ID NO: 19989 - DNA, 19 bp, Artificial Sequence
  primer
gagcttgcggtgagtcaag

SEQ ID NO: 19990 - DNA, 40 bp, Artificial Sequence
  primer
gtaaaacgacggccagtttatggagcaataagatgggttg

SEQ ID NO: 19991 - DNA, 39 bp, Artificial Sequence
  primer
gtaaaacgacggccagtggttggatgtaaacacagtggg

SEQ ID NO: 19992 - DNA, 36 bp, Artificial Sequence
  primer
gtaaaacgacggccagtagtcagtgggtgagggtcg

SEQ ID NO: 19993 - DNA, 19 bp, Artificial Sequence
  primer
gggaccgtactcgtctccc

SEQ ID NO: 19994 - DNA, 19 bp, Artificial Sequence
  primer
ctgttcctgcacaacgagg

SEQ ID NO: 19995 - DNA, 26 bp, Artificial Sequence
  primer
gctattattcactcgatgcttattca

SEQ ID NO: 19996 - DNA, 22 bp, Artificial Sequence
  primer
tgtctaagaatgacccatctgc

SEQ ID NO: 19997 - DNA, 22 bp, Artificial Sequence
  primer
tgcttataccaaggaaccaacc

SEQ ID NO: 19998 - DNA, 21 bp, Artificial Sequence
  primer
aggattaacccttggcctttc

SEQ ID NO: 19999 - DNA, 37 bp, Artificial Sequence
  primer
gtaaaacgacggccagtttgattgattcatgccagcc

SEQ ID NO: 20000 - DNA, 38 bp, Artificial Sequence
  primer
gtaaaacgacggccagtagactgtccaagcaggaaagg

SEQ ID NO: 20001 - DNA, 38 bp, Artificial Sequence
  primer
gtaaaacgacggccagttgcagcagagaaactgagacc

SEQ ID NO: 20002 - DNA, 37 bp, Artificial Sequence
  primer
gtaaaacgacggccagtgcaagatgtcggtgaaggag

SEQ ID NO: 20003 - DNA, 37 bp, Artificial Sequence
  primer
gtaaaacgacggccagtcagagccagtgacaggatgg

SEQ ID NO: 20004 - DNA, 38 bp, Artificial Sequence
  primer
gtaaaacgacggccagtctgccctgtgcatctactctc

SEQ ID NO: 20005 - DNA, 21 bp, Artificial Sequence
  primer
tgagccctgagtaagcatcac

SEQ ID NO: 20006 - DNA, 21 bp, Artificial Sequence
  primer
agcccacattaagagctttgg

SEQ ID NO: 20007 - DNA, 38 bp, Artificial Sequence
  primer
gtaaaacgacggccagtcttgacctttctgagccttgg

SEQ ID NO: 20008 - DNA, 38 bp, Artificial Sequence
  primer
gtaaaacgacggccagtctaccctcttcatggaaagcc

SEQ ID NO: 20009 - DNA, 38 bp, Artificial Sequence
  primer
gtaaaacgacggccagtgggaggaatgtcttgctaagg

SEQ ID NO: 20010 - DNA, 21 bp, Artificial Sequence
  primer
ggacctgagactaccctggtg

SEQ ID NO: 20011 - DNA, 18 bp, Artificial Sequence
  primer
aggcagcctggagtgacc

SEQ ID NO: 20012 - DNA, 38 bp, Artificial Sequence
  primer
gtaaaacgacggccagtaaccagaaactaggccctgtg

SEQ ID NO: 20013 - DNA, 21 bp, Artificial Sequence
  primer
aaacgagctttgagatgggtc

SEQ ID NO: 20014 - DNA, 42 bp, Artificial Sequence
  primer
gtaaaacgacggccagtcatttcagactgttcattgctagtg

SEQ ID NO: 20015 - DNA, 38 bp, Artificial Sequence
  primer
gtaaaacgacggccagtttgaactcatcctcaactggg

SEQ ID NO: 20016 - DNA, 23 bp, Artificial Sequence
  primer
gcctctgaagactaagacactgc

SEQ ID NO: 20017 - DNA, 22 bp, Artificial Sequence
  primer
ccaaatcctctttcttgtgcag

SEQ ID NO: 20018 - DNA, 21 bp, Artificial Sequence
  primer
tttgatttcaagattggcgtg

SEQ ID NO: 20019 - DNA, 21 bp, Artificial Sequence
  primer
gtgtgattggatttctgaccg

SEQ ID NO: 20020 - DNA, 35 bp, Artificial Sequence
  primer
gtaaaacgacggccagtgcccagcctgtacctgac

SEQ ID NO: 20021 - DNA, 38 bp, Artificial Sequence
  primer
gtaaaacgacggccagtgaagaagcagatttatggcgg

SEQ ID NO: 20022 - DNA, 38 bp, Artificial Sequence
  primer
gtaaaacgacggccagttgatgaaggccaaacattacc

SEQ ID NO: 20023 - DNA, 37 bp, Artificial Sequence
  primer
gtaaaacgacggccagtttccaaagcattcagatgcc

SEQ ID NO: 20024 - DNA, 21 bp, Artificial Sequence
  primer
tagcactaagcctctgccctg

SEQ ID NO: 20025 - DNA, 38 bp, Artificial Sequence
  primer
gtaaaacgacggccagtgctctccttgaggacaaccac

SEQ ID NO: 20026 - DNA, 35 bp, Artificial Sequence
  primer
gtaaaacgacggccagtccattgcgtagggacagc

SEQ ID NO: 20027 - DNA, 20 bp, Artificial Sequence
  primer
tgagtgtctggtcatgcgac

SEQ ID NO: 20028 - DNA, 21 bp, Artificial Sequence
  primer
ttgcgcttaggtgagaaagag

SEQ ID NO: 20029 - DNA, 21 bp, Artificial Sequence
  primer
ttcagggtccttctgtttgtg

SEQ ID NO: 20030 - DNA, 41 bp, Artificial Sequence
  primer
gtaaaacgacggccagtaacagaatgacacctaagaaaggg

SEQ ID NO: 20031 - DNA, 38 bp, Artificial Sequence
  primer
gtaaaacgacggccagtcgaaagagaagatgacccagc

SEQ ID NO: 20032 - DNA, 38 bp, Artificial Sequence
  primer
gtaaaacgacggccagttgccagagagtgttcaggatg

SEQ ID NO: 20033 - DNA, 21 bp, Artificial Sequence
  primer
aaccagcaacaaacagcaatg

SEQ ID NO: 20034 - DNA, 21 bp, Artificial Sequence
  primer
ccatgtccaagtacagccatc

SEQ ID NO: 20035 - DNA, 38 bp, Artificial Sequence
  primer
gtaaaacgacggccagtgtgaaattcggtctccctcag

SEQ ID NO: 20036 - DNA, 21 bp, Artificial Sequence
  primer
ctcccactgttgaagagaccc

SEQ ID NO: 20037 - DNA, 21 bp, Artificial Sequence
  primer
agaggctcctgcagatgaaac

SEQ ID NO: 20038 - DNA, 21 bp, Artificial Sequence
  primer
tgctgcaattcagcttctagc

SEQ ID NO: 20039 - DNA, 41 bp, Artificial Sequence
  primer
gtaaaacgacggccagtaagttcagtctctaccagctgagg

SEQ ID NO: 20040 - DNA, 21 bp, Artificial Sequence
  primer
cttgctgcagtacactctccc

SEQ ID NO: 20041 - DNA, 21 bp, Artificial Sequence
  primer
ctgatccggaagcagattctc

SEQ ID NO: 20042 - DNA, 38 bp, Artificial Sequence
  primer
gtaaaacgacggccagtccacaagaaatctggtgaccc

SEQ ID NO: 20043 - DNA, 37 bp, Artificial Sequence
  primer
gtaaaacgacggccagtggtgacagagcaagaccctg

SEQ ID NO: 20044 - DNA, 19 bp, Artificial Sequence
  primer
ctggcctcaagcaatcctc

SEQ ID NO: 20045 - DNA, 38 bp, Artificial Sequence
  primer
gtaaaacgacggccagttatgtgaggctgaatctgctg

SEQ ID NO: 20046 - DNA, 20 bp, Artificial Sequence
  primer
tacaagagcgaaactccgcc

SEQ ID NO: 20047 - DNA, 38 bp, Artificial Sequence
  primer
gtaaaacgacggccagtcttctctctccgcagtccttc

SEQ ID NO: 20048 - DNA, 20 bp, Artificial Sequence
  primer
tcttggtgctcagagcttgg

SEQ ID NO: 20049 - DNA, 21 bp, Artificial Sequence
  primer
aatcacgccacacagtttgag

SEQ ID NO: 20050 - DNA, 21 bp, Artificial Sequence
  primer
tcaacagtgggctagatgagg

SEQ ID NO: 20051 - DNA, 20 bp, Artificial Sequence
  primer
aggagtttgaggctgcagtg

SEQ ID NO: 20052 - DNA, 37 bp, Artificial Sequence
  primer
gtaaaacgacggccagtatggcctcggcttacctaac

SEQ ID NO: 20053 - DNA, 38 bp, Artificial Sequence
  primer
gtaaaacgacggccagtaaacacaagaaggcatgaccc

SEQ ID NO: 20054 - DNA, 21 bp, Artificial Sequence
  primer
gggaagtaccacaactcctgg

SEQ ID NO: 20055 - DNA, 39 bp, Artificial Sequence
  primer
gtaaaacgacggccagttcctgcagatagttctgcttcc

SEQ ID NO: 20056 - DNA, 20 bp, Artificial Sequence
  primer
tgagctgtgatggaggacac

SEQ ID NO: 20057 - DNA, 21 bp, Artificial Sequence
  primer
tctctactcacagcgtcggag

SEQ ID NO: 20058 - DNA, 35 bp, Artificial Sequence
  primer
gtaaaacgacggccagtgtgtgagccactgcgacc

SEQ ID NO: 20059 - DNA, 44 bp, Artificial Sequence
  primer
gtaaaacgacggccagtcatgatgtggtctctaatagcttcaac

SEQ ID NO: 20060 - DNA, 20 bp, Artificial Sequence
  primer
tggccaagatgcacatagag

SEQ ID NO: 20061 - DNA, 40 bp, Artificial Sequence
  primer
gtaaaacgacggccagttggtgagggataataaatggaaa

SEQ ID NO: 20062 - DNA, 23 bp, Artificial Sequence
  primer
tgtctatattggaggtcaggtgg

SEQ ID NO: 20063 - DNA, 21 bp, Artificial Sequence
  primer
gctgccacctaaatgctaaag

SEQ ID NO: 20064 - DNA, 41 bp, Artificial Sequence
  primer
gtaaaacgacggccagttgttaccaattgaatgtttgcatc

SEQ ID NO: 20065 - DNA, 18 bp, Artificial Sequence
  primer
cgtgagccaccactcctg

SEQ ID NO: 20066 - DNA, 40 bp, Artificial Sequence
  primer
gtaaaacgacggccagtaggtttgacaggctacaactgac

SEQ ID NO: 20067 - DNA, 41 bp, Artificial Sequence
  primer
gtaaaacgacggccagtagagtttaggcaactgttgtgttg

SEQ ID NO: 20068 - DNA, 21 bp, Artificial Sequence
  primer
gtgaggcgttgaagtgtcaag

SEQ ID NO: 20069 - DNA, 30 bp, Artificial Sequence
  primer
ttcctaactagagactggaattactaatca

SEQ ID NO: 20070 - DNA, 21 bp, Artificial Sequence
  primer
cagccattacagtgatgcaaa

SEQ ID NO: 20071 - DNA, 24 bp, Artificial Sequence
  primer
ttgctatggtggtaagatcacttc

SEQ ID NO: 20072 - DNA, 21 bp, Artificial Sequence
  primer
tgcagagtgaggtaatgcacc

SEQ ID NO: 20073 - DNA, 37 bp, Artificial Sequence
  primer
gtaaaacgacggccagtgagagggagttggaacggac

SEQ ID NO: 20074 - DNA, 38 bp, Artificial Sequence
  primer
gtaaaacgacggccagtaacattgccttcatcttgagc

SEQ ID NO: 20075 - DNA, 22 bp, Artificial Sequence
  primer
tttcgtctcaaatcctttctgg

SEQ ID NO: 20076 - DNA, 21 bp, Artificial Sequence
  primer
ctttgcctcacattcctgaac

SEQ ID NO: 20077 - DNA, 44 bp, Artificial Sequence
  primer
gtaaaacgacggccagtgagacaataggtacacttgaaataggg

SEQ ID NO: 20078 - DNA, 22 bp, Artificial Sequence
  primer
tgaacaagtgggctagtttcac

SEQ ID NO: 20079 - DNA, 21 bp, Artificial Sequence
  primer
ggccagagtggtggagtaaag

SEQ ID NO: 20080 - DNA, 38 bp, Artificial Sequence
  primer
gtaaaacgacggccagttcatgccacatggctattctc

SEQ ID NO: 20081 - DNA, 21 bp, Artificial Sequence
  primer
ggccctacttccacctcttag

SEQ ID NO: 20082 - DNA, 39 bp, Artificial Sequence
  primer
gtaaaacgacggccagttgttccaacagaacacgttgac

SEQ ID NO: 20083 - DNA, 41 bp, Artificial Sequence
  primer
gtaaaacgacggccagtttgtatcccattgttataattgcc

SEQ ID NO: 20084 - DNA, 37 bp, Artificial Sequence
  primer
gtaaaacgacggccagtttggcaactgtgttctctgg

SEQ ID NO: 20085 - DNA, 44 bp, Artificial Sequence
  primer
gtaaaacgacggccagtccttcagaatagattcagttgatgttc

SEQ ID NO: 20086 - DNA, 38 bp, Artificial Sequence
  primer
gtaaaacgacggccagttttgagatactggaggttggg

SEQ ID NO: 20087 - DNA, 39 bp, Artificial Sequence
  primer
gtaaaacgacggccagttgcattgactttatggcagttt

SEQ ID NO: 20088 - DNA, 38 bp, Artificial Sequence
  primer
gtaaaacgacggccagtaggaattccacttcttcaggg

SEQ ID NO: 20089 - DNA, 21 bp, Artificial Sequence
  primer
agcacatgtcattgaacagcc

SEQ ID NO: 20090 - DNA, 22 bp, Artificial Sequence
  primer
gaaggcaatgtgagatattggg

SEQ ID NO: 20091 - DNA, 38 bp, Artificial Sequence
  primer
gtaaaacgacggccagttgatgtgtatgtccgagagcc

SEQ ID NO: 20092 - DNA, 38 bp, Artificial Sequence
  primer
gtaaaacgacggccagtgtctttgtaactctgggcagc

SEQ ID NO: 20093 - DNA, 21 bp, Artificial Sequence
  primer
cctgttcgacattggtgtctg

SEQ ID NO: 20094 - DNA, 21 bp, Artificial Sequence
  primer
ccctgtctggttgaaagatcc

SEQ ID NO: 20095 - DNA, 19 bp, Artificial Sequence
  primer
catttcggagcgactcagc

SEQ ID NO: 20096 - DNA, 38 bp, Artificial Sequence
  primer
gtaaaacgacggccagtatctggacccaggatttgaac

SEQ ID NO: 20097 - DNA, 42 bp, Artificial Sequence
  primer
gtaaaacgacggccagtaactaaggtctctttcaactctccc

SEQ ID NO: 20098 - DNA, 43 bp, Artificial Sequence
  primer
gtaaaacgacggccagttggctcagttaaatttggtaaatagc

SEQ ID NO: 20099 - DNA, 24 bp, Artificial Sequence
  primer
gggaccgtctcatacagtaatagg

SEQ ID NO: 20100 - DNA, 38 bp, Artificial Sequence
  primer
gtaaaacgacggccagtgagcatccttattctctgggc

SEQ ID NO: 20101 - DNA, 38 bp, Artificial Sequence
  primer
gtaaaacgacggccagtccctaaccggttgaaataggg

SEQ ID NO: 20102 - DNA, 21 bp, Artificial Sequence
  primer
acttgggaggaaataaatggc

SEQ ID NO: 20103 - DNA, 38 bp, Artificial Sequence
  primer
gtaaaacgacggccagtcttcagcccatctttctctgc

SEQ ID NO: 20104 - DNA, 21 bp, Artificial Sequence
  primer
aggccttcagaattcctagcc

SEQ ID NO: 20105 - DNA, 21 bp, Artificial Sequence
  primer
ttcctattgcccttctcttcg

SEQ ID NO: 20106 - DNA, 21 bp, Artificial Sequence
  primer
tctaaagggaagtggactggg

SEQ ID NO: 20107 - DNA, 21 bp, Artificial Sequence
  primer
caaaggcacagcaaatggtag

SEQ ID NO: 20108 - DNA, 20 bp, Artificial Sequence
  primer
acatctttgccagctttggg

SEQ ID NO: 20109 - DNA, 38 bp, Artificial Sequence
  primer
gtaaaacgacggccagtgagtcacgcgtaaccttgatg

SEQ ID NO: 20110 - DNA, 38 bp, Artificial Sequence
  primer
gtaaaacgacggccagtgccttaggaaattctggcctc

SEQ ID NO: 20111 - DNA, 20 bp, Artificial Sequence
  primer
cttgggtggcagagtgagac

SEQ ID NO: 20112 - DNA, 22 bp, Artificial Sequence
  primer
gccagcaatttaagaccatgtg

SEQ ID NO: 20113 - DNA, 41 bp, Artificial Sequence
  primer
gtaaaacgacggccagtcagggtctaagttcactttggaag

SEQ ID NO: 20114 - DNA, 21 bp, Artificial Sequence
  primer
gatctcctgatgtcgtgatcc

SEQ ID NO: 20115 - DNA, 37 bp, Artificial Sequence
  primer
gtaaaacgacggccagttaactgggattacaaccgcc

SEQ ID NO: 20116 - DNA, 35 bp, Artificial Sequence
  primer
gtaaaacgacggccagtccttcccagagtgcaccg

SEQ ID NO: 20117 - DNA, 21 bp, Artificial Sequence
  primer
gcagctgcgaagtgttgtatc

SEQ ID NO: 20118 - DNA, 36 bp, Artificial Sequence
  primer
gtaaaacgacggccagtaggtggataacacgggtgg

SEQ ID NO: 20119 - DNA, 21 bp, Artificial Sequence
  primer
ctctaccgctgacctggattc

SEQ ID NO: 20120 - DNA, 21 bp, Artificial Sequence
  primer
tggaaggtaggaaactctggc

SEQ ID NO: 20121 - DNA, 21 bp, Artificial Sequence
  primer
ggagtccactctctgcacctc

SEQ ID NO: 20122 - DNA, 38 bp, Artificial Sequence
  primer
gtaaaacgacggccagtagcgagccaaagacttcattc

SEQ ID NO: 20123 - DNA, 20 bp, Artificial Sequence
  primer
tcatcctgcctcctgacttg

SEQ ID NO: 20124 - DNA, 36 bp, Artificial Sequence
  primer
gtaaaacgacggccagtgttgtttcctgggaggctg

SEQ ID NO: 20125 - DNA, 21 bp, Artificial Sequence
  primer
agagcttgcagtctgtgttgg

SEQ ID NO: 20126 - DNA, 36 bp, Artificial Sequence
  primer
gtaaaacgacggccagtattgaccctgagaccacgc

SEQ ID NO: 20127 - DNA, 21 bp, Artificial Sequence
  primer
gcactggatgagctgtttgag

SEQ ID NO: 20128 - DNA, 35 bp, Artificial Sequence
  primer
gtaaaacgacggccagtagaggcacctttcgtcgg

SEQ ID NO: 20129 - DNA, 21 bp, Artificial Sequence
  primer
ggtgactctgggatccttgtc

SEQ ID NO: 20130 - DNA, 38 bp, Artificial Sequence
  primer
gtaaaacgacggccagtgctcagagggtgctagaggtg

SEQ ID NO: 20131 - DNA, 20 bp, Artificial Sequence
  primer
cactggtgtgtccctccatc

SEQ ID NO: 20132 - DNA, 21 bp, Artificial Sequence
  primer
ctcaagttctccagcaaccag

SEQ ID NO: 20133 - DNA, 21 bp, Artificial Sequence
  primer
gtggcttagtggccagagaac

SEQ ID NO: 20134 - DNA, 21 bp, Artificial Sequence
  primer
agagacgctatcggaagttgg

SEQ ID NO: 20135 - DNA, 21 bp, Artificial Sequence
  primer
ggaaacatccagagagatggg

SEQ ID NO: 20136 - DNA, 21 bp, Artificial Sequence
  primer
agccaccaaagatgaccaaac

SEQ ID NO: 20137 - DNA, 21 bp, Artificial Sequence
  primer
ctttccagaccacaagccaag

SEQ ID NO: 20138 - DNA, 21 bp, Artificial Sequence
  primer
taccacaggagatcaacccac

SEQ ID NO: 20139 - DNA, 38 bp, Artificial Sequence
  primer
gtaaaacgacggccagttgaaaccaaaccaagggagac

SEQ ID NO: 20140 - DNA, 27 bp, Artificial Sequence
  primer
cctcagagtctcagacagaattaagtg

SEQ ID NO: 20141 - DNA, 38 bp, Artificial Sequence
  primer
gtaaaacgacggccagtaaacacgacttcttcccttcc

SEQ ID NO: 20142 - DNA, 46 bp, Artificial Sequence
  primer
gtaaaacgacggccagtgaaataaggagttaatattcaagaggctt

SEQ ID NO: 20143 - DNA, 37 bp, Artificial Sequence
  primer
gtaaaacgacggccagtcttgtcctcgtggaaagcac

SEQ ID NO: 20144 - DNA, 38 bp, Artificial Sequence
  primer
gtaaaacgacggccagtctctgtctcagcactggaggg

SEQ ID NO: 20145 - DNA, 38 bp, Artificial Sequence
  primer
gtaaaacgacggccagtccttaaacccttaccctgcac

SEQ ID NO: 20146 - DNA, 38 bp, Artificial Sequence
  primer
gtaaaacgacggccagtctctcaccaagggtcatccag

SEQ ID NO: 20147 - DNA, 38 bp, Artificial Sequence
  primer
gtaaaacgacggccagttgaggacatctgagtcaaccc

SEQ ID NO: 20148 - DNA, 38 bp, Artificial Sequence
  primer
gtaaaacgacggccagtattcctacaggcaatgcttcc

SEQ ID NO: 20149 - DNA, 38 bp, Artificial Sequence
  primer
gtaaaacgacggccagtcctcttaggtggtgcatggtg

SEQ ID NO: 20150 - DNA, 38 bp, Artificial Sequence
  primer
gtaaaacgacggccagtgtaggtctgagtgggaggtgg

SEQ ID NO: 20151 - DNA, 37 bp, Artificial Sequence
  primer
gtaaaacgacggccagtacgtctctgtggacgtggtg

SEQ ID NO: 20152 - DNA, 38 bp, Artificial Sequence
  primer
gtaaaacgacggccagtgagtctgatgacagtggaggg

SEQ ID NO: 20153 - DNA, 38 bp, Artificial Sequence
  primer
gtaaaacgacggccagtctagcagtcatgggaaatggg

SEQ ID NO: 20154 - DNA, 21 bp, Artificial Sequence
  primer
tctgaaagcttcctgaattgc

SEQ ID NO: 20155 - DNA, 21 bp, Artificial Sequence
  primer
tgaacccttaagcactctggg

SEQ ID NO: 20156 - DNA, 38 bp, Artificial Sequence
  primer
gtaaaacgacggccagttaccctagccttcagcagctc

SEQ ID NO: 20157 - DNA, 39 bp, Artificial Sequence
  primer
gtaaaacgacggccagtcagtagctgagggtaggagacg

SEQ ID NO: 20158 - DNA, 38 bp, Artificial Sequence
  primer
gtaaaacgacggccagtacaactccatggctttccttc

SEQ ID NO: 20159 - DNA, 21 bp, Artificial Sequence
  primer
ccttcttaccgccaagtgaac

SEQ ID NO: 20160 - DNA, 21 bp, Artificial Sequence
  primer
ttaggtccaactgctcattgc

SEQ ID NO: 20161 - DNA, 21 bp, Artificial Sequence
  primer
cccgcgtttctaaactttgtc

SEQ ID NO: 20162 - DNA, 38 bp, Artificial Sequence
  primer
gtaaaacgacggccagtaagaacgaggtaggcagcaac

SEQ ID NO: 20163 - DNA, 21 bp, Artificial Sequence
  primer
gactcaggccctagctttgtc

SEQ ID NO: 20164 - DNA, 21 bp, Artificial Sequence
  primer
caagcggaatccttgttcatc

SEQ ID NO: 20165 - DNA, 21 bp, Artificial Sequence
  primer
ctttgtgtccatagtgccctg

SEQ ID NO: 20166 - DNA, 38 bp, Artificial Sequence
  primer
gtaaaacgacggccagtggctgtgtgaaatgaatgagg

SEQ ID NO: 20167 - DNA, 39 bp, Artificial Sequence
  primer
gtaaaacgacggccagttttcgttgggaagatttctctg

SEQ ID NO: 20168 - DNA, 20 bp, Artificial Sequence
  primer
gtggagttgggccttctttc

SEQ ID NO: 20169 - DNA, 38 bp, Artificial Sequence
  primer
gtaaaacgacggccagtgacttcatccaggtggaggtg

SEQ ID NO: 20170 - DNA, 38 bp, Artificial Sequence
  primer
gtaaaacgacggccagtcccaccatcatccatttagag

SEQ ID NO: 20171 - DNA, 38 bp, Artificial Sequence
  primer
gtaaaacgacggccagtactttatcccagtggcagtcc

SEQ ID NO: 20172 - DNA, 38 bp, Artificial Sequence
  primer
gtaaaacgacggccagtcaaggatggaagtgggcttac

SEQ ID NO: 20173 - DNA, 40 bp, Artificial Sequence
  primer
gtaaaacgacggccagtgagaccatgtctcagaacaaacc

SEQ ID NO: 20174 - DNA, 39 bp, Artificial Sequence
  primer
gtaaaacgacggccagttgattggattgcagtctctttg

SEQ ID NO: 20175 - DNA, 26 bp, Artificial Sequence
  primer
gagcaggaacagtaactcttgtattc

SEQ ID NO: 20176 - DNA, 24 bp, Artificial Sequence
  primer
agaccaaactgatttgaacatgac

SEQ ID NO: 20177 - DNA, 41 bp, Artificial Sequence
  primer
gtaaaacgacggccagtcagcttcttaaatggtctttccag

SEQ ID NO: 20178 - DNA, 24 bp, Artificial Sequence
  primer
gcaaagcagtatcctgtacaccac

SEQ ID NO: 20179 - DNA, 27 bp, Artificial Sequence
  primer
tgaatgtgtcataaaggttatacttgg

SEQ ID NO: 20180 - DNA, 38 bp, Artificial Sequence
  primer
gtaaaacgacggccagtatagccagcatttcctggagt

SEQ ID NO: 20181 - DNA, 18 bp, Artificial Sequence
  primer
cgtaccagcctgcctgac

SEQ ID NO: 20182 - DNA, 38 bp, Artificial Sequence
  primer
gtaaaacgacggccagttaaggagactttcggcctttg

SEQ ID NO: 20183 - DNA, 21 bp, Artificial Sequence
  primer
cagataccagcagcacgagag

SEQ ID NO: 20184 - DNA, 38 bp, Artificial Sequence
  primer
gtaaaacgacggccagtgaaagagccctccttgtgatg

SEQ ID NO: 20185 - DNA, 38 bp, Artificial Sequence
  primer
gtaaaacgacggccagttggtggctttcatgtcttgtc

SEQ ID NO: 20186 - DNA, 21 bp, Artificial Sequence
  primer
agtatagggcctgtggaaccc

SEQ ID NO: 20187 - DNA, 37 bp, Artificial Sequence
  primer
gtaaaacgacggccagtccctcaccctggagaatctg

SEQ ID NO: 20188 - DNA, 24 bp, Artificial Sequence
  primer
tgttaccctggttcatagtgaaag

SEQ ID NO: 20189 - DNA, 38 bp, Artificial Sequence
  primer
gtaaaacgacggccagtgagagagggaaacttgcatgg

SEQ ID NO: 20190 - DNA, 21 bp, Artificial Sequence
  primer
gctgtagagacaggcaactgg

SEQ ID NO: 20191 - DNA, 39 bp, Artificial Sequence
  primer
gtaaaacgacggccagtccgtgaggtaagagttgctttg

SEQ ID NO: 20192 - DNA, 38 bp, Artificial Sequence
  primer
gtaaaacgacggccagtacgtagtcgaacaccgtgatg

SEQ ID NO: 20193 - DNA, 38 bp, Artificial Sequence
  primer
gtaaaacgacggccagtttaaattgcctgattgtggct

SEQ ID NO: 20194 - DNA, 43 bp, Artificial Sequence
  primer
gtaaaacgacggccagttgtttcgctttataacttcctaattg

SEQ ID NO: 20195 - DNA, 38 bp, Artificial Sequence
  primer
gtaaaacgacggccagttggagagaaggatttgggttc

SEQ ID NO: 20196 - DNA, 39 bp, Artificial Sequence
  primer
gtaaaacgacggccagtcaaaccaaccagtttacatggc

SEQ ID NO: 20197 - DNA, 20 bp, Artificial Sequence
  primer
gtggaaaggcttgagcaaag

SEQ ID NO: 20198 - DNA, 40 bp, Artificial Sequence
  primer
gtaaaacgacggccagttttcagggaaagaagttagagcc

SEQ ID NO: 20199 - DNA, 38 bp, Artificial Sequence
  primer
gtaaaacgacggccagttcctgaatttctggtcatccc

SEQ ID NO: 20200 - DNA, 38 bp, Artificial Sequence
  primer
gtaaaacgacggccagtgttcttggcctgatgagtcac

SEQ ID NO: 20201 - DNA, 38 bp, Artificial Sequence
  primer
gtaaaacgacggccagtggtccctggagtttcctattg

SEQ ID NO: 20202 - DNA, 21 bp, Artificial Sequence
  primer
tgtctgccaccaaagagtcac

SEQ ID NO: 20203 - DNA, 41 bp, Artificial Sequence
  primer
gtaaaacgacggccagtgtagcatctctctttacaaggcaa

SEQ ID NO: 20204 - DNA, 21 bp, Artificial Sequence
  primer
tttgtatgatgtgcagccatt

SEQ ID NO: 20205 - DNA, 21 bp, Artificial Sequence
  primer
tgaggtttataatccctgccc

SEQ ID NO: 20206 - DNA, 38 bp, Artificial Sequence
  primer
gtaaaacgacggccagtccaacaggaatgtatccctcc

SEQ ID NO: 20207 - DNA, 21 bp, Artificial Sequence
  primer
tatgccatatccatctccagg

SEQ ID NO: 20208 - DNA, 41 bp, Artificial Sequence
  primer
gtaaaacgacggccagtgccagagtaaatgatgtgacttgc

SEQ ID NO: 20209 - DNA, 39 bp, Artificial Sequence
  primer
gtaaaacgacggccagttgggttatccatgtctcaaagg

SEQ ID NO: 20210 - DNA, 38 bp, Artificial Sequence
  primer
gtaaaacgacggccagtccagtgtacgtgccatttctc

SEQ ID NO: 20211 - DNA, 21 bp, Artificial Sequence
  primer
ccctggtgtttccacacctac

SEQ ID NO: 20212 - DNA, 21 bp, Artificial Sequence
  primer
gaagcagacacagaccacagg

SEQ ID NO: 20213 - DNA, 21 bp, Artificial Sequence
  primer
gaacttgctccaaagtacggg

SEQ ID NO: 20214 - DNA, 21 bp, Artificial Sequence
  primer
cctgaaatagcatctgctccc

SEQ ID NO: 20215 - DNA, 36 bp, Artificial Sequence
  primer
gtaaaacgacggccagtccaagtgccaaacttgctg

SEQ ID NO: 20216 - DNA, 41 bp, Artificial Sequence
  primer
gtaaaacgacggccagtcatttccaaggattcatttgtttc

SEQ ID NO: 20217 - DNA, 21 bp, Artificial Sequence
  primer
gatgtttgtgctctccattgc

SEQ ID NO: 20218 - DNA, 22 bp, Artificial Sequence
  primer
catccagcagaaatgagaaacc

SEQ ID NO: 20219 - DNA, 38 bp, Artificial Sequence
  primer
gtaaaacgacggccagtgtgcccagtggtctggattag

SEQ ID NO: 20220 - DNA, 21 bp, Artificial Sequence
  primer
ctcgtcttccagttctggctc

SEQ ID NO: 20221 - DNA, 20 bp, Artificial Sequence
  primer
gcccacatgttcctgtgaag

SEQ ID NO: 20222 - DNA, 21 bp, Artificial Sequence
  primer
tccattctctggctctcttcc

SEQ ID NO: 20223 - DNA, 40 bp, Artificial Sequence
  primer
gtaaaacgacggccagtttctccaggaagagaaagattcg

SEQ ID NO: 20224 - DNA, 24 bp, Artificial Sequence
  primer
tgagggaagcaagaataagaagac

SEQ ID NO: 20225 - DNA, 40 bp, Artificial Sequence
  primer
gtaaaacgacggccagtcagagtgttggcatgtactgaac

SEQ ID NO: 20226 - DNA, 40 bp, Artificial Sequence
  primer
gtaaaacgacggccagtttaatcatttctgatatggcaca

SEQ ID NO: 20227 - DNA, 25 bp, Artificial Sequence
  primer
aaagttaaacgggtgtgatttattg

SEQ ID NO: 20228 - DNA, 41 bp, Artificial Sequence
  primer
gtaaaacgacggccagtgggcaagtctattaaattctttgg

SEQ ID NO: 20229 - DNA, 44 bp, Artificial Sequence
  primer
gtaaaacgacggccagtctttggtaacccattataaaggtacag

SEQ ID NO: 20230 - DNA, 23 bp, Artificial Sequence
  primer
tgatggtaatgatggaaaggatg

SEQ ID NO: 20231 - DNA, 22 bp, Artificial Sequence
  primer
ttgctttgtgtagccaagtcag

SEQ ID NO: 20232 - DNA, 38 bp, Artificial Sequence
  primer
gtaaaacgacggccagttccctgggtaaagaaacatgg

SEQ ID NO: 20233 - DNA, 21 bp, Artificial Sequence
  primer
tggaagatggaactggaaaga

SEQ ID NO: 20234 - DNA, 40 bp, Artificial Sequence
  primer
gtaaaacgacggccagtaattctcacctctatgctgttgc

SEQ ID NO: 20235 - DNA, 24 bp, Artificial Sequence
  primer
tttgcctgaatcaaatcaatagac

SEQ ID NO: 20236 - DNA, 43 bp, Artificial Sequence
  primer
gtaaaacgacggccagttgcagtatgctataattcagtaggtt

SEQ ID NO: 20237 - DNA, 38 bp, Artificial Sequence
  primer
gtaaaacgacggccagtagtcaaccgcagtaggaggtg

SEQ ID NO: 20238 - DNA, 21 bp, Artificial Sequence
  primer
caatcttgctacctgtgcgac

SEQ ID NO: 20239 - DNA, 38 bp, Artificial Sequence
  primer
gtaaaacgacggccagttcgaattcgtgatcgagacag

SEQ ID NO: 20240 - DNA, 18 bp, Artificial Sequence
  primer
tgatggttccagcaagcc

SEQ ID NO: 20241 - DNA, 37 bp, Artificial Sequence
  primer
gtaaaacgacggccagtaaaccaacaccagaggaggg

SEQ ID NO: 20242 - DNA, 21 bp, Artificial Sequence
  primer
ctaccgcagacgctgcttaac

SEQ ID NO: 20243 - DNA, 35 bp, Artificial Sequence
  primer
gtaaaacgacggccagtcaagatggtccgcgacac

SEQ ID NO: 20244 - DNA, 37 bp, Artificial Sequence
  primer
gtaaaacgacggccagtgactgcatgaaggacttcgg

SEQ ID NO: 20245 - DNA, 18 bp, Artificial Sequence
  primer
atgctgcccactgctctg

SEQ ID NO: 20246 - DNA, 35 bp, Artificial Sequence
  primer
gtaaaacgacggccagtcagcagtggatggcgaac

SEQ ID NO: 20247 - DNA, 21 bp, Artificial Sequence
  primer
tctcatgtcggtggcagatac

SEQ ID NO: 20248 - DNA, 21 bp, Artificial Sequence
  primer
ccacgaacgtttggaggatac

SEQ ID NO: 20249 - DNA, 21 bp, Artificial Sequence
  primer
agttctttctcccagtgtccg

SEQ ID NO: 20250 - DNA, 38 bp, Artificial Sequence
  primer
gtaaaacgacggccagtccatcagagtgaaggaggagc

SEQ ID NO: 20251 - DNA, 21 bp, Artificial Sequence
  primer
cattcaacatggaactgccac

SEQ ID NO: 20252 - DNA, 38 bp, Artificial Sequence
  primer
gtaaaacgacggccagtagaaggtgcagctggaggtag

SEQ ID NO: 20253 - DNA, 19 bp, Artificial Sequence
  primer
cccttctgcaggactcagc

SEQ ID NO: 20254 - DNA, 21 bp, Artificial Sequence
  primer
ccactggcaacctgttcctac

SEQ ID NO: 20255 - DNA, 40 bp, Artificial Sequence
  primer
gtaaaacgacggccagttgatcctttaatcttgtcctccc

SEQ ID NO: 20256 - DNA, 22 bp, Artificial Sequence
  primer
agactggcaagctgtggttaag

SEQ ID NO: 20257 - DNA, 38 bp, Artificial Sequence
  primer
gtaaaacgacggccagttgactcttgcacatacagggc

SEQ ID NO: 20258 - DNA, 38 bp, Artificial Sequence
  primer
gtaaaacgacggccagtccctgagggatcatcaagttc

SEQ ID NO: 20259 - DNA, 38 bp, Artificial Sequence
  primer
gtaaaacgacggccagtgagaagcagaggcaaggtgag

SEQ ID NO: 20260 - DNA, 38 bp, Artificial Sequence
  primer
gtaaaacgacggccagtggcaagagtaagtgtccaccc

SEQ ID NO: 20261 - DNA, 37 bp, Artificial Sequence
  primer
gtaaaacgacggccagtttccatttcacaagcaaggg

SEQ ID NO: 20262 - DNA, 38 bp, Artificial Sequence
  primer
gtaaaacgacggccagtgaaaggctggattctccacag

SEQ ID NO: 20263 - DNA, 21 bp, Artificial Sequence
  primer
ccgggtcagaatctgtgctac

SEQ ID NO: 20264 - DNA, 38 bp, Artificial Sequence
  primer
gtaaaacgacggccagtcatgctaggtgactgtttggc

SEQ ID NO: 20265 - DNA, 37 bp, Artificial Sequence
  primer
gtaaaacgacggccagtgacgccaaagctagaaaggg

SEQ ID NO: 20266 - DNA, 42 bp, Artificial Sequence
  primer
gtaaaacgacggccagtgaagcttattcaaagcgaaattaag

SEQ ID NO: 20267 - DNA, 38 bp, Artificial Sequence
  primer
gtaaaacgacggccagtaggattgtctgtgggaaggtc

SEQ ID NO: 20268 - DNA, 21 bp, Artificial Sequence
  primer
ctgaacaaccttccctccaac

SEQ ID NO: 20269 - DNA, 38 bp, Artificial Sequence
  primer
gtaaaacgacggccagtagagggaaagttctccaaccc

SEQ ID NO: 20270 - DNA, 19 bp, Artificial Sequence
  primer
attgcttgaaccaggcagc

SEQ ID NO: 20271 - DNA, 21 bp, Artificial Sequence
  primer
accacacctggcctaagattg

SEQ ID NO: 20272 - DNA, 38 bp, Artificial Sequence
  primer
gtaaaacgacggccagttgctttactggaaatgaaggg

SEQ ID NO: 20273 - DNA, 37 bp, Artificial Sequence
  primer
gtaaaacgacggccagtcacaataagggtggtggtgg

SEQ ID NO: 20274 - DNA, 19 bp, Artificial Sequence
  primer
ctgtccaggctgcagtgag

SEQ ID NO: 20275 - DNA, 36 bp, Artificial Sequence
  primer
gtaaaacgacggccagtctgagattgtgccactgcc

SEQ ID NO: 20276 - DNA, 21 bp, Artificial Sequence
  primer
ctctgcaccaagtgaagcaac

SEQ ID NO: 20277 - DNA, 21 bp, Artificial Sequence
  primer
cgagctttcatcacattgtcc

SEQ ID NO: 20278 - DNA, 21 bp, Artificial Sequence
  primer
ttcacattgcatgcctgtatc

SEQ ID NO: 20279 - DNA, 21 bp, Artificial Sequence
  primer
cttgtgggcatcttgaatgtg

SEQ ID NO: 20280 - DNA, 38 bp, Artificial Sequence
  primer
gtaaaacgacggccagtggaagagggtcacacactcag

SEQ ID NO: 20281 - DNA, 38 bp, Artificial Sequence
  primer
gtaaaacgacggccagtaggcaaagattgccctatgag

SEQ ID NO: 20282 - DNA, 38 bp, Artificial Sequence
  primer
gtaaaacgacggccagtattctatcacggaccagtggc

SEQ ID NO: 20283 - DNA, 38 bp, Artificial Sequence
  primer
gtaaaacgacggccagtgccatagtcctggcatctttc

SEQ ID NO: 20284 - DNA, 38 bp, Artificial Sequence
  primer
gtaaaacgacggccagttcgaactcctgactcctgacc

SEQ ID NO: 20285 - DNA, 38 bp, Artificial Sequence
  primer
gtaaaacgacggccagtagagttcccaacccaaggaag

SEQ ID NO: 20286 - DNA, 21 bp, Artificial Sequence
  primer
cccagtcatttggcatgtatc

SEQ ID NO: 20287 - DNA, 21 bp, Artificial Sequence
  primer
ctggcttccaaggatctgaag

SEQ ID NO: 20288 - DNA, 38 bp, Artificial Sequence
  primer
gtaaaacgacggccagttgctcagcagtgaaatgaagg

SEQ ID NO: 20289 - DNA, 38 bp, Artificial Sequence
  primer
gtaaaacgacggccagtatggactgtctggcacctctc

SEQ ID NO: 20290 - DNA, 38 bp, Artificial Sequence
  primer
gtaaaacgacggccagtgccacccacaagtattccttc

SEQ ID NO: 20291 - DNA, 39 bp, Artificial Sequence
  primer
gtaaaacgacggccagtaattccattcctgacaaacgtg

SEQ ID NO: 20292 - DNA, 21 bp, Artificial Sequence
  primer
tctttgcaccatgccactatc

SEQ ID NO: 20293 - DNA, 35 bp, Artificial Sequence
  primer
gtaaaacgacggccagtgggtgacagcacagaccc

SEQ ID NO: 20294 - DNA, 35 bp, Artificial Sequence
  primer
gtaaaacgacggccagtaggctacgggctttctgg

SEQ ID NO: 20295 - DNA, 18 bp, Artificial Sequence
  primer
gcagtcccaggtctgctc

SEQ ID NO: 20296 - DNA, 21 bp, Artificial Sequence
  primer
agagcagaactgtagcccagc

SEQ ID NO: 20297 - DNA, 20 bp, Artificial Sequence
  primer
cccagcaactgaaacaggag

SEQ ID NO: 20298 - DNA, 38 bp, Artificial Sequence
  primer
gtaaaacgacggccagtcagttgcagccagaacagttg

SEQ ID NO: 20299 - DNA, 38 bp, Artificial Sequence
  primer
gtaaaacgacggccagtctaaggagaggcacccaactc

SEQ ID NO: 20300 - DNA, 38 bp, Artificial Sequence
  primer
gtaaaacgacggccagtcagccatgtggttggtacttc

SEQ ID NO: 20301 - DNA, 21 bp, Artificial Sequence
  primer
tcttgtggtgctacttggtgg

SEQ ID NO: 20302 - DNA, 21 bp, Artificial Sequence
  primer
ccaaagaagcagccttgacag

SEQ ID NO: 20303 - DNA, 21 bp, Artificial Sequence
  primer
gcatgcctcaggaacattctc

SEQ ID NO: 20304 - DNA, 22 bp, Artificial Sequence
  primer
gacagtgaggaatgttcttggc

SEQ ID NO: 20305 - DNA, 38 bp, Artificial Sequence
  primer
gtaaaacgacggccagttttgatggacccatccttacc

SEQ ID NO: 20306 - DNA, 21 bp, Artificial Sequence
  primer
taaatcgaatcatctgctggc

SEQ ID NO: 20307 - DNA, 18 bp, Artificial Sequence
  primer
gctcctggcatcctcctc

SEQ ID NO: 20308 - DNA, 21 bp, Artificial Sequence
  primer
aatggataggccaatacgtcg

SEQ ID NO: 20309 - DNA, 38 bp, Artificial Sequence
  primer
gtaaaacgacggccagtctccttcctgccgttctactg

SEQ ID NO: 20310 - DNA, 37 bp, Artificial Sequence
  primer
gtaaaacgacggccagtgctggaggtcaggaaaggag

SEQ ID NO: 20311 - DNA, 22 bp, Artificial Sequence
  primer
gattgctgatggttagaggctg

SEQ ID NO: 20312 - DNA, 21 bp, Artificial Sequence
  primer
aggcagtgaacatccctcttg

SEQ ID NO: 20313 - DNA, 21 bp, Artificial Sequence
  primer
caacagggcaccattacactg

SEQ ID NO: 20314 - DNA, 28 bp, Artificial Sequence
  primer
ttctttgataggcatgataacatagttt

SEQ ID NO: 20315 - DNA, 19 bp, Artificial Sequence
  primer
gaggattgcttgagccctg

SEQ ID NO: 20316 - DNA, 39 bp, Artificial Sequence
  primer
gtaaaacgacggccagtgggccaagataatgaccctaac

SEQ ID NO: 20317 - DNA, 38 bp, Artificial Sequence
  primer
gtaaaacgacggccagtaaattgggtcatctgggtttg

SEQ ID NO: 20318 - DNA, 21 bp, Artificial Sequence
  primer
ccttgatctcccaaagggttg

SEQ ID NO: 20319 - DNA, 21 bp, Artificial Sequence
  primer
tggtagttcatggaaacaggg

SEQ ID NO: 20320 - DNA, 20 bp, Artificial Sequence
  primer
ggtgcagtgccaagcatatc

SEQ ID NO: 20321 - DNA, 38 bp, Artificial Sequence
  primer
gtaaaacgacggccagtacacttctcaggcaagcaagg

SEQ ID NO: 20322 - DNA, 38 bp, Artificial Sequence
  primer
gtaaaacgacggccagtccagatgatgttaccgtgtgc

SEQ ID NO: 20323 - DNA, 20 bp, Artificial Sequence
  primer
acaggctccatggatgtgac

SEQ ID NO: 20324 - DNA, 38 bp, Artificial Sequence
  primer
gtaaaacgacggccagttgacgatgaatgaaatggtgc

SEQ ID NO: 20325 - DNA, 38 bp, Artificial Sequence
  primer
gtaaaacgacggccagtatcagcaatggcctaggtttg

SEQ ID NO: 20326 - DNA, 22 bp, Artificial Sequence
  primer
ctctttctccttctgtgccttt

SEQ ID NO: 20327 - DNA, 38 bp, Artificial Sequence
  primer
gtaaaacgacggccagtggccactgtcccttaagactg

SEQ ID NO: 20328 - DNA, 38 bp, Artificial Sequence
  primer
gtaaaacgacggccagtaaccaggaagagagcgatgac

SEQ ID NO: 20329 - DNA, 21 bp, Artificial Sequence
  primer
tccatgtgcaactcctttcag

SEQ ID NO: 20330 - DNA, 38 bp, Artificial Sequence
  primer
gtaaaacgacggccagtatgggtgttaggaaggattgg

SEQ ID NO: 20331 - DNA, 21 bp, Artificial Sequence
  primer
tttcattcatgtggaaccagc

SEQ ID NO: 20332 - DNA, 38 bp, Artificial Sequence
  primer
gtaaaacgacggccagtgagatgaggatttctgcccac

SEQ ID NO: 20333 - DNA, 38 bp, Artificial Sequence
  primer
gtaaaacgacggccagtatggagcttgagttacctgcc

SEQ ID NO: 20334 - DNA, 21 bp, Artificial Sequence
  primer
tagaggtttcagcgagctgtg

SEQ ID NO: 20335 - DNA, 38 bp, Artificial Sequence
  primer
gtaaaacgacggccagtgggcctagtatgtcttggtgg

SEQ ID NO: 20336 - DNA, 38 bp, Artificial Sequence
  primer
gtaaaacgacggccagtatggcagctcagttcttcctc

SEQ ID NO: 20337 - DNA, 21 bp, Artificial Sequence
  primer
ctctcaaattggctgatggtg

SEQ ID NO: 20338 - DNA, 37 bp, Artificial Sequence
  primer
gtaaaacgacggccagtgctctctgggatgctgagtg

SEQ ID NO: 20339 - DNA, 38 bp, Artificial Sequence
  primer
gtaaaacgacggccagtgccgcaggtatttaaggtctg

SEQ ID NO: 20340 - DNA, 38 bp, Artificial Sequence
  primer
gtaaaacgacggccagtaggattgatgagacctggtgc

SEQ ID NO: 20341 - DNA, 38 bp, Artificial Sequence
  primer
gtaaaacgacggccagtctaacacaaggctccctgtcc

SEQ ID NO: 20342 - DNA, 39 bp, Artificial Sequence
  primer
gtaaaacgacggccagttgtgacctccatcttacagcag

SEQ ID NO: 20343 - DNA, 19 bp, Artificial Sequence
  primer
gagcaacatgaggctggtg

SEQ ID NO: 20344 - DNA, 20 bp, Artificial Sequence
  primer
caagcctgttgcaaatgagg

SEQ ID NO: 20345 - DNA, 18 bp, Artificial Sequence
  primer
tttgctaggcccttcgtg

SEQ ID NO: 20346 - DNA, 38 bp, Artificial Sequence
  primer
gtaaaacgacggccagtaaatgatgactgtaccggctg

SEQ ID NO: 20347 - DNA, 22 bp, Artificial Sequence
  primer
catcccatgatgagaaggtttc

SEQ ID NO: 20348 - DNA, 21 bp, Artificial Sequence
  primer
gagagagcaacagggaagagg

SEQ ID NO: 20349 - DNA, 38 bp, Artificial Sequence
  primer
gtaaaacgacggccagtgagtgaggcaagagttggacc

SEQ ID NO: 20350 - DNA, 38 bp, Artificial Sequence
  primer
gtaaaacgacggccagtaagtatctcgggccatctttg

SEQ ID NO: 20351 - DNA, 38 bp, Artificial Sequence
  primer
gtaaaacgacggccagttctgtcctagaggtccaagcc

SEQ ID NO: 20352 - DNA, 38 bp, Artificial Sequence
  primer
gtaaaacgacggccagtctggactcatggagactcagc

SEQ ID NO: 20353 - DNA, 36 bp, Artificial Sequence
  primer
gtaaaacgacggccagtctgggtccagctgtccatc

SEQ ID NO: 20354 - DNA, 38 bp, Artificial Sequence
  primer
gtaaaacgacggccagtggactaccactgccctctttg

SEQ ID NO: 20355 - DNA, 18 bp, Artificial Sequence
  primer
ggctcagggaatgctcag

SEQ ID NO: 20356 - DNA, 38 bp, Artificial Sequence
  primer
gtaaaacgacggccagtatcacggagggcagtttagag

SEQ ID NO: 20357 - DNA, 38 bp, Artificial Sequence
  primer
gtaaaacgacggccagtggcaagcacagtgttctcaag

SEQ ID NO: 20358 - DNA, 21 bp, Artificial Sequence
  primer
ctatcacgtgctgctagacgg

SEQ ID NO: 20359 - DNA, 21 bp, Artificial Sequence
  primer
agcttggtcagagggttgaag

SEQ ID NO: 20360 - DNA, 38 bp, Artificial Sequence
  primer
gtaaaacgacggccagtttctccttcctggttagcacc

SEQ ID NO: 20361 - DNA, 21 bp, Artificial Sequence
  primer
tgtggaacagggactgtgaag

SEQ ID NO: 20362 - DNA, 38 bp, Artificial Sequence
  primer
gtaaaacgacggccagttgggtgtcagggttatctgtg

SEQ ID NO: 20363 - DNA, 39 bp, Artificial Sequence
  primer
gtaaaacgacggccagtgggattgagctggtaattgatg

SEQ ID NO: 20364 - DNA, 38 bp, Artificial Sequence
  primer
gtaaaacgacggccagtaggaacaaggactgaagcgtg

SEQ ID NO: 20365 - DNA, 38 bp, Artificial Sequence
  primer
gtaaaacgacggccagtcagcagagagaacacacgtcc

SEQ ID NO: 20366 - DNA, 39 bp, Artificial Sequence
  primer
gtaaaacgacggccagtgagtgttgtcagaatgtcaggg

SEQ ID NO: 20367 - DNA, 43 bp, Artificial Sequence
  primer
gtaaaacgacggccagtaatgcatcctgagaatctctagtacc

SEQ ID NO: 20368 - DNA, 21 bp, Artificial Sequence
  primer
atacaatttgggtaggcaggg

SEQ ID NO: 20369 - DNA, 23 bp, Artificial Sequence
  primer
ccatacatgtggctagtttccag

SEQ ID NO: 20370 - DNA, 21 bp, Artificial Sequence
  primer
ccatggaggttgtcttgactg

SEQ ID NO: 20371 - DNA, 38 bp, Artificial Sequence
  primer
gtaaaacgacggccagtaggcactggctgcttacaaag

SEQ ID NO: 20372 - DNA, 38 bp, Artificial Sequence
  primer
gtaaaacgacggccagttcatcctatgtggcaaaccag

SEQ ID NO: 20373 - DNA, 21 bp, Artificial Sequence
  primer
tcaacaagcccagattgtcac

SEQ ID NO: 20374 - DNA, 40 bp, Artificial Sequence
  primer
gtaaaacgacggccagttgttgcttcattggtttctacag

SEQ ID NO: 20375 - DNA, 20 bp, Artificial Sequence
  primer
gaacccatgaggtccgtctc

SEQ ID NO: 20376 - DNA, 38 bp, Artificial Sequence
  primer
gtaaaacgacggccagtgctctctaccgtctgaaaccg

SEQ ID NO: 20377 - DNA, 21 bp, Artificial Sequence
  primer
ctgcgcctgtaagagtgagac

SEQ ID NO: 20378 - DNA, 21 bp, Artificial Sequence
  primer
gaagaggagtgtgacagcgtg

SEQ ID NO: 20379 - DNA, 39 bp, Artificial Sequence
  primer
gtaaaacgacggccagtcccttctttccactttctgttc

SEQ ID NO: 20380 - DNA, 21 bp, Artificial Sequence
  primer
tggcttagaaaggattcaggc

SEQ ID NO: 20381 - DNA, 38 bp, Artificial Sequence
  primer
gtaaaacgacggccagtcttaggctgtggagggatttg

SEQ ID NO: 20382 - DNA, 21 bp, Artificial Sequence
  primer
agtagtgatcgccaacctccc

SEQ ID NO: 20383 - DNA, 21 bp, Artificial Sequence
  primer
ggactgggttcacttaggcac

SEQ ID NO: 20384 - DNA, 38 bp, Artificial Sequence
  primer
gtaaaacgacggccagtgcagccagctgtttattcatc

SEQ ID NO: 20385 - DNA, 23 bp, Artificial Sequence
  primer
aatatgtaccaactgcatttccg

SEQ ID NO: 20386 - DNA, 21 bp, Artificial Sequence
  primer
ctagcaaaggagcaggctcag

SEQ ID NO: 20387 - DNA, 21 bp, Artificial Sequence
  primer
ttgacagaagtcactcgcagc

SEQ ID NO: 20388 - DNA, 39 bp, Artificial Sequence
  primer
gtaaaacgacggccagtcatgtattcattggctgagacg

SEQ ID NO: 20389 - DNA, 38 bp, Artificial Sequence
  primer
gtaaaacgacggccagtggcactggaaggttgctttac

SEQ ID NO: 20390 - DNA, 37 bp, Artificial Sequence
  primer
gtaaaacgacggccagttttatcagggcatgggacag

SEQ ID NO: 20391 - DNA, 38 bp, Artificial Sequence
  primer
gtaaaacgacggccagttactacgtccattcccaaccc

SEQ ID NO: 20392 - DNA, 18 bp, Artificial Sequence
  primer
aacccaggaagcagaggc

SEQ ID NO: 20393 - DNA, 21 bp, Artificial Sequence
  primer
gtctttctttcattggcccag

SEQ ID NO: 20394 - DNA, 21 bp, Artificial Sequence
  primer
cttcctgaactgggaggtcac

SEQ ID NO: 20395 - DNA, 38 bp, Artificial Sequence
  primer
gtaaaacgacggccagtagaaggtaacttccggtgacg

SEQ ID NO: 20396 - DNA, 21 bp, Artificial Sequence
  primer
ctttggttgggatgatgtttg

SEQ ID NO: 20397 - DNA, 40 bp, Artificial Sequence
  primer
gtaaaacgacggccagtgatgtcttcaatagggaggtgtg

SEQ ID NO: 20398 - DNA, 21 bp, Artificial Sequence
  primer
gagtcatgatggccaggagta

SEQ ID NO: 20399 - DNA, 21 bp, Artificial Sequence
  primer
ggctctgttcacttggtgttg

SEQ ID NO: 20400 - DNA, 41 bp, Artificial Sequence
  primer
gtaaaacgacggccagttgtttatttgatgcatggcatatc

SEQ ID NO: 20401 - DNA, 38 bp, Artificial Sequence
  primer
gtaaaacgacggccagtggttctctcgctcaggtctct

SEQ ID NO: 20402 - DNA, 21 bp, Artificial Sequence
  primer
gggaaacccttcttgtcacag

SEQ ID NO: 20403 - DNA, 22 bp, Artificial Sequence
  primer
tgcatgaatgtgtacctgtgtg

SEQ ID NO: 20404 - DNA, 21 bp, Artificial Sequence
  primer
gtccctgatgtttatgcctcc

SEQ ID NO: 20405 - DNA, 21 bp, Artificial Sequence
  primer
cgtggtagtttgcatcacctc

SEQ ID NO: 20406 - DNA, 38 bp, Artificial Sequence
  primer
gtaaaacgacggccagtgctacctacagatgtgcctgg

SEQ ID NO: 20407 - DNA, 39 bp, Artificial Sequence
  primer
gtaaaacgacggccagtgggctctttccaactcatcttc

SEQ ID NO: 20408 - DNA, 37 bp, Artificial Sequence
  primer
gtaaaacgacggccagtgactctggaaaccctcagcc

SEQ ID NO: 20409 - DNA, 38 bp, Artificial Sequence
  primer
gtaaaacgacggccagttgcatttgtcacccagatacc

SEQ ID NO: 20410 - DNA, 36 bp, Artificial Sequence
  primer
gtaaaacgacggccagtcatgcaagtggactgggtg

SEQ ID NO: 20411 - DNA, 21 bp, Artificial Sequence
  primer
gatcagagcccactcctatcc

SEQ ID NO: 20412 - DNA, 38 bp, Artificial Sequence
  primer
gtaaaacgacggccagttcggtgtgcagcaattctaac

SEQ ID NO: 20413 - DNA, 38 bp, Artificial Sequence
  primer
gtaaaacgacggccagtatcggctactacctgacgagc

SEQ ID NO: 20414 - DNA, 37 bp, Artificial Sequence
  primer
gtaaaacgacggccagttggtgctcaagctcaaggag

SEQ ID NO: 20415 - DNA, 21 bp, Artificial Sequence
  primer
gcacaagtcgcagacctacac

SEQ ID NO: 20416 - DNA, 19 bp, Artificial Sequence
  primer
aaccggagagctccgaaag

SEQ ID NO: 20417 - DNA, 37 bp, Artificial Sequence
  primer
gtaaaacgacggccagtgttagctgcagcctgctctc

SEQ ID NO: 20418 - DNA, 38 bp, Artificial Sequence
  primer
gtaaaacgacggccagtaggactctgcctatccctgtg

SEQ ID NO: 20419 - DNA, 38 bp, Artificial Sequence
  primer
gtaaaacgacggccagtaaagtcttccagatgcccttg

SEQ ID NO: 20420 - DNA, 38 bp, Artificial Sequence
  primer
gtaaaacgacggccagtcctggtaacggaatgtggttc

SEQ ID NO: 20421 - DNA, 38 bp, Artificial Sequence
  primer
gtaaaacgacggccagtgagccagtcagtttgtgcttg

SEQ ID NO: 20422 - DNA, 37 bp, Artificial Sequence
  primer
gtaaaacgacggccagtggctcactctgtacccaccc

SEQ ID NO: 20423 - DNA, 37 bp, Artificial Sequence
  primer
gtaaaacgacggccagtcatcaggaagacacccatgc

SEQ ID NO: 20424 - DNA, 20 bp, Artificial Sequence
  primer
agaaggatgaggatccggtg

SEQ ID NO: 20425 - DNA, 38 bp, Artificial Sequence
  primer
gtaaaacgacggccagtaaacagcatgagtgagaaggc

SEQ ID NO: 20426 - DNA, 38 bp, Artificial Sequence
  primer
gtaaaacgacggccagtagtgctgaatgaagagccacc

SEQ ID NO: 20427 - DNA, 37 bp, Artificial Sequence
  primer
gtaaaacgacggccagtaatgtcgattccattgctgc

SEQ ID NO: 20428 - DNA, 21 bp, Artificial Sequence
  primer
atgacaaacagcagcatcacc

SEQ ID NO: 20429 - DNA, 20 bp, Artificial Sequence
  primer
cagcgcctctcacttctgac

SEQ ID NO: 20430 - DNA, 38 bp, Artificial Sequence
  primer
gtaaaacgacggccagtgggacctcagttatcaccagc

SEQ ID NO: 20431 - DNA, 38 bp, Artificial Sequence
  primer
gtaaaacgacggccagttccctaagctccagagtgagc

SEQ ID NO: 20432 - DNA, 38 bp, Artificial Sequence
  primer
gtaaaacgacggccagtagcatcatcatccaaacctcc

SEQ ID NO: 20433 - DNA, 21 bp, Artificial Sequence
  primer
tctgcagcatcgttatccaag

SEQ ID NO: 20434 - DNA, 38 bp, Artificial Sequence
  primer
gtaaaacgacggccagtcaggcagataggagaccaacc

SEQ ID NO: 20435 - DNA, 38 bp, Artificial Sequence
  primer
gtaaaacgacggccagttcaccatatactgcattgggc

SEQ ID NO: 20436 - DNA, 21 bp, Artificial Sequence
  primer
cccacaagtgattatgggacc

SEQ ID NO: 20437 - DNA, 21 bp, Artificial Sequence
  primer
tcttgtgtagccttgaccctg

SEQ ID NO: 20438 - DNA, 19 bp, Artificial Sequence
  primer
atgctctcgggcatagagg

SEQ ID NO: 20439 - DNA, 19 bp, Artificial Sequence
  primer
agctgctgctctcggactg

SEQ ID NO: 20440 - DNA, 21 bp, Artificial Sequence
  primer
gaggacaaagggttaccaggc

SEQ ID NO: 20441 - DNA, 38 bp, Artificial Sequence
  primer
gtaaaacgacggccagttcaacaaggtgttaacgggtg

SEQ ID NO: 20442 - DNA, 38 bp, Artificial Sequence
  primer
gtaaaacgacggccagtgtaccagagtcaagggccatc

SEQ ID NO: 20443 - DNA, 38 bp, Artificial Sequence
  primer
gtaaaacgacggccagttgtgaagaagaagaggcgatg

SEQ ID NO: 20444 - DNA, 21 bp, Artificial Sequence
  primer
agtgcctatgtcccaccactg

SEQ ID NO: 20445 - DNA, 21 bp, Artificial Sequence
  primer
tgtgaagaagaagaggcgatg

SEQ ID NO: 20446 - DNA, 21 bp, Artificial Sequence
  primer
agtgcctatgtcccaccactg

SEQ ID NO: 20447 - DNA, 38 bp, Artificial Sequence
  primer
gtaaaacgacggccagtcagccactttgaacgccttag

SEQ ID NO: 20448 - DNA, 38 bp, Artificial Sequence; identical to SEQ ID NO: 20442
  primer

SEQ ID NO: 20449 - DNA, 21 bp, Artificial Sequence
  primer
tgtgaagaagaagaggcgatg

SEQ ID NO: 20450 - DNA, 21 bp, Artificial Sequence
  primer
agtgcctatgtcccaccactg

SEQ ID NO: 20451 - DNA, 37 bp, Artificial Sequence
  primer
gtaaaacgacggccagtaaattgcatcaccctcctcc

SEQ ID NO: 20452 - DNA, 21 bp, Artificial Sequence
  primer
aaacgagagcgagaaggactg

SEQ ID NO: 20453 - DNA, 22 bp, Artificial Sequence
  primer
ggctctgtttgttacagggttg

SEQ ID NO: 20454 - DNA, 21 bp, Artificial Sequence
  primer
caataatctgtgccgaagcag

SEQ ID NO: 20455 - DNA, 37 bp, Artificial Sequence
  primer
gtaaaacgacggccagtggtcttgatttcccgacctc

SEQ ID NO: 20456 - DNA, 37 bp, Artificial Sequence
  primer
gtaaaacgacggccagtaagagcaagggcaagaaagg

SEQ ID NO: 20457 - DNA, 40 bp, Artificial Sequence
  primer
gtaaaacgacggccagtggagaaagtccaggatgagacac

SEQ ID NO: 20458 - DNA, 40 bp, Artificial Sequence
  primer
gtaaaacgacggccagtggatgttagccatcatctaatgc

SEQ ID NO: 20459 - DNA, 38 bp, Artificial Sequence
  primer
gtaaaacgacggccagttgatgtgggaattgtgtttcc

SEQ ID NO: 20460 - DNA, 38 bp, Artificial Sequence
  primer
gtaaaacgacggccagtcgcagtgatgacaacatcaag

SEQ ID NO: 20461 - DNA, 37 bp, Artificial Sequence
  primer
gtaaaacgacggccagttttcgggagagttgatttgg

SEQ ID NO: 20462 - DNA, 22 bp, Artificial Sequence
  primer
gctgcagctagaagattccaag

SEQ ID NO: 20463 - DNA, 39 bp, Artificial Sequence
  primer
gtaaaacgacggccagtcccttgctatcatcagaactgg

SEQ ID NO: 20464 - DNA, 38 bp, Artificial Sequence
  primer
gtaaaacgacggccagtgttgcatcattgctcagaacc

SEQ ID NO: 20465 - DNA, 38 bp, Artificial Sequence
  primer
gtaaaacgacggccagtagcctacggaagatcagggag

SEQ ID NO: 20466 - DNA, 39 bp, Artificial Sequence
  primer
gtaaaacgacggccagtttcatgttcaaaggcagtgttg

SEQ ID NO: 20467 - DNA, 35 bp, Artificial Sequence
  primer
gtaaaacgacggccagttctggtgatccacctgcc

SEQ ID NO: 20468 - DNA, 38 bp, Artificial Sequence
  primer
gtaaaacgacggccagttgggtagtgtcaaaccaaggc

SEQ ID NO: 20469 - DNA, 22 bp, Artificial Sequence
  primer
aatgcaggaaggttgttattgg

SEQ ID NO: 20470 - DNA, 22 bp, Artificial Sequence
  primer
tgtaagaagtgggaaagcacag

SEQ ID NO: 20471 - DNA, 39 bp, Artificial Sequence
  primer
gtaaaacgacggccagttccatcattccaattatgctca

SEQ ID NO: 20472 - DNA, 38 bp, Artificial Sequence
  primer
gtaaaacgacggccagttgaaatcctgaatgaaatggg

SEQ ID NO: 20473 - DNA, 21 bp, Artificial Sequence
  primer
cagggagtagggtgctagctg

SEQ ID NO: 20474 - DNA, 37 bp, Artificial Sequence
  primer
gtaaaacgacggccagtctttgaatgtgcttgccgtc

SEQ ID NO: 20475 - DNA, 38 bp, Artificial Sequence
  primer
gtaaaacgacggccagtcttggctccaggaagtgtacc

SEQ ID NO: 20476 - DNA, 21 bp, Artificial Sequence
  primer
cctttgccaaatgaaatgttg

SEQ ID NO: 20477 - DNA, 37 bp, Artificial Sequence
  primer
gtaaaacgacggccagtagctgctttgcctgactgac

SEQ ID NO: 20478 - DNA, 38 bp, Artificial Sequence
  primer
gtaaaacgacggccagtctagatccacagaaatggccc

SEQ ID NO: 20479 - DNA, 18 bp, Artificial Sequence
  primer
agaggtcaggctggaggc

SEQ ID NO: 20480 - DNA, 37 bp, Artificial Sequence
  primer
gtaaaacgacggccagtacacacaccaagggcttctg

SEQ ID NO: 20481 - DNA, 21 bp, Artificial Sequence
  primer
acagcctagccacactcattg

SEQ ID NO: 20482 - DNA, 21 bp, Artificial Sequence
  primer
gccgcaatagacattcaccag

SEQ ID NO: 20483 - DNA, 19 bp, Artificial Sequence
  primer
atgccttgccttgtgcttc

SEQ ID NO: 20484 - DNA, 38 bp, Artificial Sequence
  primer
gtaaaacgacggccagtcggagtgctgattcttctttg

SEQ ID NO: 20485 - DNA, 43 bp, Artificial Sequence
  primer
gtaaaacgacggccagttggattacaatcaccaaatatagcct

SEQ ID NO: 20486 - DNA, 42 bp, Artificial Sequence
  primer
gtaaaacgacggccagttgttcagatcatttgtttactgtgg

SEQ ID NO: 20487 - DNA, 38 bp, Artificial Sequence
  primer
gtaaaacgacggccagtgccctgtgtctttgttcattg

SEQ ID NO: 20488 - DNA, 21 bp, Artificial Sequence
  primer
cgttgtggtagattgccttcc

SEQ ID NO: 20489 - DNA, 20 bp, Artificial Sequence
  primer
aaagggaagggaccaatgtg

SEQ ID NO: 20490 - DNA, 21 bp, Artificial Sequence
  primer
ttaaataggaggcatttggcg

SEQ ID NO: 20491 - DNA, 37 bp, Artificial Sequence
  primer
gtaaaacgacggccagtaaagcactgaacaaggcacg

SEQ ID NO: 20492 - DNA, 38 bp, Artificial Sequence
  primer
gtaaaacgacggccagtaagtgaggtttgtgggtgagg

SEQ ID NO: 20493 - DNA, 41 bp, Artificial Sequence
  primer
gtaaaacgacggccagttcaaagtggagggatggtataaag

SEQ ID NO: 20494 - DNA, 23 bp, Artificial Sequence
  primer
tctgacgtttgtgattgtttcaa

SEQ ID NO: 20495 - DNA, 26 bp, Artificial Sequence
  primer
tccagttattcattcagctaacagtg

SEQ ID NO: 20496 - DNA, 21 bp, Artificial Sequence
  primer
aaaggccatctttgaatttcc

SEQ ID NO: 20497 - DNA, 21 bp, Artificial Sequence
  primer
caagtgatccacccacttcag

SEQ ID NO: 20498 - DNA, 24 bp, Artificial Sequence
  primer
gctgatctataagcaatgaaagca

SEQ ID NO: 20499 - DNA, 21 bp, Artificial Sequence
  primer
tacagccaatgcataacagcc

SEQ ID NO: 20500 - DNA, 20 bp, Artificial Sequence
  primer
agggtggcattgctccttac

SEQ ID NO: 20501 - DNA, 42 bp, Artificial Sequence
  primer
gtaaaacgacggccagttttgttgtgaggatgaaatgtataa

SEQ ID NO: 20502 - DNA, 38 bp, Artificial Sequence
  primer
gtaaaacgacggccagtaaggcgaaagaggtatcatgc

SEQ ID NO: 20503 - DNA, 25 bp, Artificial Sequence
  primer
gaagatgctttgtagaatttccttt

SEQ ID NO: 20504 - DNA, 38 bp, Artificial Sequence
  primer
gtaaaacgacggccagtaaagtgaaggtcacacggtcc

SEQ ID NO: 20505 - DNA, 38 bp, Artificial Sequence
  primer
gtaaaacgacggccagttaaagtgcttgacgaatgccc

SEQ ID NO: 20506 - DNA, 28 bp, Artificial Sequence
  primer
tggtttacaaatattcaaatgagtctga

SEQ ID NO: 20507 - DNA, 21 bp, Artificial Sequence
  primer
aagggccggaagtaggtagtc

SEQ ID NO: 20508 - DNA, 21 bp, Artificial Sequence
  primer
tccacgctagaaattgatccc

SEQ ID NO: 20509 - DNA, 18 bp, Artificial Sequence
  primer
taaatcccgccgaggaac

SEQ ID NO: 20510 - DNA, 38 bp, Artificial Sequence
  primer
gtaaaacgacggccagttcagggctgggtaaataggag

SEQ ID NO: 20511 - DNA, 37 bp, Artificial Sequence
  primer
gtaaaacgacggccagtagctgaggtgggcttctagg

SEQ ID NO: 20512 - DNA, 38 bp, Artificial Sequence
  primer
gtaaaacgacggccagtgaaacactcagccctcacctg

SEQ ID NO: 20513 - DNA, 38 bp, Artificial Sequence
  primer
gtaaaacgacggccagttgaccacatctatgcctggag

SEQ ID NO: 20514 - DNA, 40 bp, Artificial Sequence
  primer
gtaaaacgacggccagtttcataaagcgaatcttggactg

SEQ ID NO: 20515 - DNA, 37 bp, Artificial Sequence
  primer
gtaaaacgacggccagtcttaaggtgtcgccctctgg

SEQ ID NO: 20516 - DNA, 21 bp, Artificial Sequence
  primer
agaagtccctggacaccactg

SEQ ID NO: 20517 - DNA, 37 bp, Artificial Sequence
  primer
gtaaaacgacggccagtatctgtgtgccaggcaaatg

SEQ ID NO: 20518 - DNA, 38 bp, Artificial Sequence
  primer
gtaaaacgacggccagtgagcccattatacaacggagg

SEQ ID NO: 20519 - DNA, 38 bp, Artificial Sequence
  primer
gtaaaacgacggccagtagtatccactgctcgcacaac

SEQ ID NO: 20520 - DNA, 22 bp, Artificial Sequence
  primer
tcatcaaatctggtagtgtggc

SEQ ID NO: 20521 - DNA, 20 bp, Artificial Sequence
  primer
tgtgattaaatccgaaccgc

SEQ ID NO: 20522 - DNA, 40 bp, Artificial Sequence
  primer
gtaaaacgacggccagttggctgctcaaagtatagacctg

SEQ ID NO: 20523 - DNA, 38 bp, Artificial Sequence
  primer
gtaaaacgacggccagtcagcactgcatgcataagaaa

SEQ ID NO: 20524 - DNA, 38 bp, Artificial Sequence
  primer
gtaaaacgacggccagttgatggtaagggctaagcctg

SEQ ID NO: 20525 - DNA, 21 bp, Artificial Sequence
  primer
ggaacacatccatccgagaag

SEQ ID NO: 20526 - DNA, 21 bp, Artificial Sequence
  primer
gataatgttggctttggtccc

SEQ ID NO: 20527 - DNA, 39 bp, Artificial Sequence
  primer
gtaaaacgacggccagtaagttacttcaaagtgcctccg

SEQ ID NO: 20528 - DNA, 37 bp, Artificial Sequence
  primer
gtaaaacgacggccagtgctctgcagcctcatcctac

SEQ ID NO: 20529 - DNA, 36 bp, Artificial Sequence
  primer
gtaaaacgacggccagtggcatagcacccaccaatc

SEQ ID NO: 20530 - DNA, 20 bp, Artificial Sequence
  primer
gacacaggcaagagggtctg

SEQ ID NO: 20531 - DNA, 21 bp, Artificial Sequence
  primer
ccctgtctctgtagctggtgg

SEQ ID NO: 20532 - DNA, 39 bp, Artificial Sequence
  primer
gtaaaacgacggccagttccagatttccagcttctcttg

SEQ ID NO: 20533 - DNA, 35 bp, Artificial Sequence
  primer
gtaaaacgacggccagtctagcagcgtcggctctc

SEQ ID NO: 20534 - DNA, 21 bp, Artificial Sequence
  primer
ctttccgaggcaaacagagac

SEQ ID NO: 20535 - DNA, 21 bp, Artificial Sequence
  primer
gcacttgtcattggtcactgc

SEQ ID NO: 20536 - DNA, 21 bp, Artificial Sequence
  primer
tcggcttgttctttgttgttg

SEQ ID NO: 20537 - DNA, 38 bp, Artificial Sequence
  primer
gtaaaacgacggccagttcagcctgctcagaaactcac

SEQ ID NO: 20538 - DNA, 38 bp, Artificial Sequence
  primer
gtaaaacgacggccagttacagaacagcccaggtaggg

SEQ ID NO: 20539 - DNA, 38 bp, Artificial Sequence
  primer
gtaaaacgacggccagtttgtgagtcggagtgcttctg

SEQ ID NO: 20540 - DNA, 21 bp, Artificial Sequence
  primer
gttcaaagcctaagtcgtcgg

SEQ ID NO: 20541 - DNA, 21 bp, Artificial Sequence
  primer
gggtgacagaatgagaccttg

SEQ ID NO: 20542 - DNA, 38 bp, Artificial Sequence
  primer
gtaaaacgacggccagtgaggaggtctccaaagcactg

SEQ ID NO: 20543 - DNA, 27 bp, Artificial Sequence
  primer
ggtttgtttcagaatagtctgtagagg

SEQ ID NO: 20544 - DNA, 39 bp, Artificial Sequence
  primer
gtaaaacgacggccagttgcaggttgctctatgacacac

SEQ ID NO: 20545 - DNA, 21 bp, Artificial Sequence
  primer
gtgcacacgtttgagtctgtg

SEQ ID NO: 20546 - DNA, 21 bp, Artificial Sequence
  primer
gtggatggatcacttgaggac

SEQ ID NO: 20547 - DNA, 20 bp, Artificial Sequence
  primer
aatcagcaccattgagcagg

SEQ ID NO: 20548 - DNA, 21 bp, Artificial Sequence
  primer
gtgcatacctggtgcataccc

SEQ ID NO: 20549 - DNA, 21 bp, Artificial Sequence
  primer
cacgttagggaggaagtctcg

SEQ ID NO: 20550 - DNA, 21 bp, Artificial Sequence
  primer
ctgccacactttgcttctctg

SEQ ID NO: 20551 - DNA, 37 bp, Artificial Sequence
  primer
gtaaaacgacggccagtgtgctgtggccatgtctagg

SEQ ID NO: 20552 - DNA, 38 bp, Artificial Sequence
  primer
gtaaaacgacggccagtgcaggcagatgtaccctaacc

SEQ ID NO: 20553 - DNA, 37 bp, Artificial Sequence
  primer
gtaaaacgacggccagtattcccagcagtggctcttc

SEQ ID NO: 20554 - DNA, 38 bp, Artificial Sequence
  primer
gtaaaacgacggccagtcctccttcttccgtgtgactg

SEQ ID NO: 20555 - DNA, 37 bp, Artificial Sequence
  primer
gtaaaacgacggccagtctgtacttcctgcagtgccc

SEQ ID NO: 20556 - DNA, 34 bp, Artificial Sequence
  primer
gtaaaacgacggccagtactgggttggaccaggg

SEQ ID NO: 20557 - DNA, 22 bp, Artificial Sequence
  primer
tgtgcagcgactacttcaactc

SEQ ID NO: 20558 - DNA, 21 bp, Artificial Sequence
  primer
cggtggtagacttctgctgtg

SEQ ID NO: 20559 - DNA, 19 bp, Artificial Sequence
  primer
cgtgcgctaccacaacaac

SEQ ID NO: 20560 - DNA, 21 bp, Artificial Sequence
  primer
tgtctggagctcagtgacgac

SEQ ID NO: 20561 - DNA, 38 bp, Artificial Sequence
  primer
gtaaaacgacggccagtgccctctttattcaggtgcag

SEQ ID NO: 20562 - DNA, 38 bp, Artificial Sequence
  primer
gtaaaacgacggccagtctctaagacggcaggctgttc

SEQ ID NO: 20563 - DNA, 38 bp, Artificial Sequence
  primer
gtaaaacgacggccagttgacagcatctactccatcgg

SEQ ID NO: 20564 - DNA, 37 bp, Artificial Sequence
  primer
gtaaaacgacggccagtccctctgtctccctacccag

SEQ ID NO: 20565 - DNA, 38 bp, Artificial Sequence
  primer
gtaaaacgacggccagtgaaccatgtcagggtctgtcc

SEQ ID NO: 20566 - DNA, 38 bp, Artificial Sequence
  primer
gtaaaacgacggccagtacaatgagcatgtatggcctc

SEQ ID NO: 20567 - DNA, 21 bp, Artificial Sequence
  primer
tgaagtctcattctgttgccc

SEQ ID NO: 20568 - DNA, 39 bp, Artificial Sequence
  primer
gtaaaacgacggccagttccacaaagcctgttgcttaac

SEQ ID NO: 20569 - DNA, 21 bp, Artificial Sequence
  primer
gaacaaggcctggaacaagac

SEQ ID NO: 20570 - DNA, 26 bp, Artificial Sequence
  primer
agatatttcacctgagtattgcattg

SEQ ID NO: 20571 - DNA, 38 bp, Artificial Sequence
  primer
gtaaaacgacggccagtgctttatttgcagtccaaggg

SEQ ID NO: 20572 - DNA, 21 bp, Artificial Sequence
  primer
ctgctttcccacctactttcg

SEQ ID NO: 20573 - DNA, 39 bp, Artificial Sequence
  primer
gtaaaacgacggccagtaacaccctatggtcaacgacac

SEQ ID NO: 20574 - DNA, 38 bp, Artificial Sequence
  primer
gtaaaacgacggccagtggaactgtgtcatttgccttg

SEQ ID NO: 20575 - DNA, 37 bp, Artificial Sequence
  primer
gtaaaacgacggccagtatgctgtgcgttgacttgtg

SEQ ID NO: 20576 - DNA, 21 bp, Artificial Sequence
  primer
agccattagtttcaacagccc

SEQ ID NO: 20577 - DNA, 18 bp, Artificial Sequence
  primer
gagaagtgggctgggagc

SEQ ID NO: 20578 - DNA, 38 bp, Artificial Sequence
  primer
gtaaaacgacggccagtctgtcctgacaactacaggcg

SEQ ID NO: 20579 - DNA, 21 bp, Artificial Sequence
  primer
ggcctgtgtgtgaactagtgg

SEQ ID NO: 20580 - DNA, 38 bp, Artificial Sequence
  primer
gtaaaacgacggccagtatggatgcaaaggtcagaagg

SEQ ID NO: 20581 - DNA, 21 bp, Artificial Sequence
  primer
gtcccgaagctaaggtgagag

SEQ ID NO: 20582 - DNA, 39 bp, Artificial Sequence
  primer
gtaaaacgacggccagtcattagtaggtctcactgcccg

SEQ ID NO: 20583 - DNA, 21 bp, Artificial Sequence
  primer
ctccagagtgagtacctgggc

SEQ ID NO: 20584 - DNA, 38 bp, Artificial Sequence
  primer
gtaaaacgacggccagtactgagaggtgaggatggtgg

SEQ ID NO: 20585 - DNA, 19 bp, Artificial Sequence
  primer
acagtggcctctggtcgag

SEQ ID NO: 20586 - DNA, 20 bp, Artificial Sequence
  primer
aggtctgaggcgtagccttg

SEQ ID NO: 20587 - DNA, 20 bp, Artificial Sequence
  primer
tgaatttcgtgctgggtttc

SEQ ID NO: 20588 - DNA, 39 bp, Artificial Sequence
  primer
gtaaaacgacggccagtgagttacattaactgtggcggc

SEQ ID NO: 20589 - DNA, 38 bp, Artificial Sequence
  primer
gtaaaacgacggccagtagtggtttctgggtccctagc

SEQ ID NO: 20590 - DNA, 21 bp, Artificial Sequence
  primer
taagtacccagcccactgacc

SEQ ID NO: 20591 - DNA, 38 bp, Artificial Sequence
  primer
gtaaaacgacggccagttaactggtaagtgagcgctgg

SEQ ID NO: 20592 - DNA, 38 bp, Artificial Sequence
  primer
gtaaaacgacggccagtcttagtccgggagtttcttgg

SEQ ID NO: 20593 - DNA, 21 bp, Artificial Sequence
  primer
ctctggagaggctgaggagtc

SEQ ID NO: 20594 - DNA, 37 bp, Artificial Sequence
  primer
gtaaaacgacggccagtgggatggaatctgcccatac

SEQ ID NO: 20595 - DNA, 38 bp, Artificial Sequence
  primer
gtaaaacgacggccagtctggaatacgctgagagccag

SEQ ID NO: 20596 - DNA, 37 bp, Artificial Sequence
  primer
gtaaaacgacggccagtggttagaggtgggagttggc

SEQ ID NO: 20597 - DNA, 19 bp, Artificial Sequence
  primer
cgcagaggatggagctagg

SEQ ID NO: 20598 - DNA, 43 bp, Artificial Sequence
  primer
gtaaaacgacggccagttgtgtaagacctgaagcagttaagag

SEQ ID NO: 20599 - DNA, 38 bp, Artificial Sequence
  primer
gtaaaacgacggccagttggcaagccttctaattcctg

SEQ ID NO: 20600 - DNA, 22 bp, Artificial Sequence
  primer
acaacgcagcaatacagagaac

SEQ ID NO: 20601 - DNA, 36 bp, Artificial Sequence
  primer
gtaaaacgacggccagtgcgatctcggattagccag

SEQ ID NO: 20602 - DNA, 21 bp, Artificial Sequence
  primer
agctccacacaaaggaagctc

SEQ ID NO: 20603 - DNA, 21 bp, Artificial Sequence
  primer
gtgctggagagaaaggcagtc

SEQ ID NO: 20604 - DNA, 19 bp, Artificial Sequence
  primer
cttgcccagggtcagtgag

SEQ ID NO: 20605 - DNA, 38 bp, Artificial Sequence
  primer
gtaaaacgacggccagtagcacagcagtgtctggagag

SEQ ID NO: 20606 - DNA, 38 bp, Artificial Sequence
  primer
gtaaaacgacggccagtatccgggaggatgagagagac

SEQ ID NO: 20607 - DNA, 20 bp, Artificial Sequence
  primer
ccatgcagaagacatccctg

SEQ ID NO: 20608 - DNA, 36 bp, Artificial Sequence
  primer
gtaaaacgacggccagtctcaccgagaggaggtccc

SEQ ID NO: 20609 - DNA, 39 bp, Artificial Sequence
  primer
gtaaaacgacggccagtgctccagagaaagatggaggag

SEQ ID NO: 20610 - DNA, 36 bp, Artificial Sequence
  primer
gtaaaacgacggccagtgcactggtgggagatgagg

SEQ ID NO: 20611 - DNA, 36 bp, Artificial Sequence
  primer
gtaaaacgacggccagtctctgaaaccgggcatagc

SEQ ID NO: 20612 - DNA, 18 bp, Artificial Sequence
  primer
ctttgtgccgtgggactg

SEQ ID NO: 20613 - DNA, 38 bp, Artificial Sequence
  primer
gtaaaacgacggccagtgcagagaagtaggtcgtgctg

SEQ ID NO: 20614 - DNA, 20 bp, Artificial Sequence
  primer
tgtggcctaggagaggtgtg

SEQ ID NO: 20615 - DNA, 36 bp, Artificial Sequence
  primer
gtaaaacgacggccagtagggtgatgcctcaacagg

SEQ ID NO: 20616 - DNA, 21 bp, Artificial Sequence
  primer
cgtggcagactctctgatgtc

SEQ ID NO: 20617 - DNA, 38 bp, Artificial Sequence
  primer
gtaaaacgacggccagtactacatcctctttccctgcg

SEQ ID NO: 20618 - DNA, 39 bp, Artificial Sequence
  primer
gtaaaacgacggccagtcctaagaggagcaccctgagac

SEQ ID NO: 20619 - DNA, 38 bp, Artificial Sequence
  primer
gtaaaacgacggccagtttgcctgtctctggtacttgc

SEQ ID NO: 20620 - DNA, 38 bp, Artificial Sequence
  primer
gtaaaacgacggccagtctgctgagaaggttctgcctc

SEQ ID NO: 20621 - DNA, 38 bp, Artificial Sequence
  primer
gtaaaacgacggccagtagacatagagctccaggcacg

SEQ ID NO: 20622 - DNA, 38 bp, Artificial Sequence
  primer
gtaaaacgacggccagttgtctctacccacattgtcgc

SEQ ID NO: 20623 - DNA, 38 bp, Artificial Sequence
  primer
gtaaaacgacggccagtaacaccactttcactgggctc

SEQ ID NO: 20624 - DNA, 38 bp, Artificial Sequence
  primer
gtaaaacgacggccagtccactgcttctatcctgggag

SEQ ID NO: 20625 - DNA, 38 bp, Artificial Sequence
  primer
gtaaaacgacggccagtaatgctcatctctctgtgccc

SEQ ID NO: 20626 - DNA, 40 bp, Artificial Sequence
  primer
gtaaaacgacggccagtacctaaaggcagtaggcaatagg

SEQ ID NO: 20627 - DNA, 38 bp, Artificial Sequence
  primer
gtaaaacgacggccagtctcacgcaatcctcctacctc

SEQ ID NO: 20628 - DNA, 25 bp, Artificial Sequence
  primer
ggcaaatctttatgtattgacatgg

SEQ ID NO: 20629 - DNA, 22 bp, Artificial Sequence
  primer
actcctctaggactgacgaggg

SEQ ID NO: 20630 - DNA, 38 bp, Artificial Sequence
  primer
gtaaaacgacggccagtggccgaccctgtaagtatttc

SEQ ID NO: 20631 - DNA, 21 bp, Artificial Sequence
  primer
cttggtttgcccttgactctg

SEQ ID NO: 20632 - DNA, 37 bp, Artificial Sequence
  primer
gtaaaacgacggccagttcagctgagctacgaggtgg

SEQ ID NO: 20633 - DNA, 19 bp, Artificial Sequence
  primer
gttgaccaggctggctttg

SEQ ID NO: 20634 - DNA, 38 bp, Artificial Sequence
  primer
gtaaaacgacggccagtttggctgaaatgttgatgttg

SEQ ID NO: 20635 - DNA, 40 bp, Artificial Sequence
  primer
gtaaaacgacggccagttccaatatagataacgtggaggg

SEQ ID NO: 20636 - DNA, 38 bp, Artificial Sequence
  primer
gtaaaacgacggccagtatggatctgtgggagttctgc

SEQ ID NO: 20637 - DNA, 21 bp, Artificial Sequence
  primer
cagagcttcggaactttgctc

SEQ ID NO: 20638 - DNA, 38 bp, Artificial Sequence
  primer
gtaaaacgacggccagttagggaagaagatctagcgcc

SEQ ID NO: 20639 - DNA, 20 bp, Artificial Sequence
  primer
ccaacatcaacggcagtgtc

SEQ ID NO: 20640 - DNA, 21 bp, Artificial Sequence
  primer
aaacttgagaggctctgcctg

SEQ ID NO: 20641 - DNA, 21 bp, Artificial Sequence
  primer
ccaatgctgacaccataaagc

SEQ ID NO: 20642 - DNA, 38 bp, Artificial Sequence
  primer
gtaaaacgacggccagtgagtcagctggtttgggctac

SEQ ID NO: 20643 - DNA, 38 bp, Artificial Sequence
  primer
gtaaaacgacggccagttttctctccaagtccagcgtc

SEQ ID NO: 20644 - DNA, 39 bp, Artificial Sequence
  primer
gtaaaacgacggccagtgcttctggatgaaataacacgg

SEQ ID NO: 20645 - DNA, 38 bp, Artificial Sequence
  primer
gtaaaacgacggccagtaagtctctcgccaagaccatc

SEQ ID NO: 20646 - DNA, 38 bp, Artificial Sequence
  primer
gtaaaacgacggccagttggtggtgttagatgaggtgg

SEQ ID NO: 20647 - DNA, 21 bp, Artificial Sequence
  primer
cattgcacaggctgtccttag

SEQ ID NO: 20648 - DNA, 21 bp, Artificial Sequence
  primer
ccaaggaccaagagtacaccc

SEQ ID NO: 20649 - DNA, 21 bp, Artificial Sequence
  primer
gcacatcatttccagaagagg

SEQ ID NO: 20650 - DNA, 21 bp, Artificial Sequence
  primer
gtggtgctgcaggtcatagag

SEQ ID NO: 20651 - DNA, 38 bp, Artificial Sequence
  primer
gtaaaacgacggccagtctaaacctggcagcagacttg

SEQ ID NO: 20652 - DNA, 38 bp, Artificial Sequence
  primer
gtaaaacgacggccagtctcgttaggaggcattccttg

SEQ ID NO: 20653 - DNA, 19 bp, Artificial Sequence
  primer
tcggagaacacccttctgc

SEQ ID NO: 20654 - DNA, 38 bp, Artificial Sequence
  primer
gtaaaacgacggccagtgtgtgcaatgtccctgcttag

SEQ ID NO: 20655 - DNA, 38 bp, Artificial Sequence
  primer
gtaaaacgacggccagtgagcacacagactcccagatg

SEQ ID NO: 20656 - DNA, 21 bp, Artificial Sequence
  primer
gtttgctgcattgagaccctc

SEQ ID NO: 20657 - DNA, 38 bp, Artificial Sequence
  primer
gtaaaacgacggccagtagcagtgacacagtgggaatc

SEQ ID NO: 20658 - DNA, 22 bp, Artificial Sequence
  primer
tgtcaagttattgctgtcgctg

SEQ ID NO: 20659 - DNA, 38 bp, Artificial Sequence
  primer
gtaaaacgacggccagtggtctgagaagagctggcatc

SEQ ID NO: 20660 - DNA, 21 bp, Artificial Sequence
  primer
tacgagctcccattcaacaag

SEQ ID NO: 20661 - DNA, 21 bp, Artificial Sequence
  primer
ccaatagttcggatttcccac

SEQ ID NO: 20662 - DNA, 38 bp, Artificial Sequence
  primer
gtaaaacgacggccagttgaaagtttaggtcgcaagcc

SEQ ID NO: 20663 - DNA, 37 bp, Artificial Sequence
  primer
gtaaaacgacggccagtgtctccctcctcgtttcacc

SEQ ID NO: 20664 - DNA, 19 bp, Artificial Sequence
  primer
caggatcacaaaggcctcg

SEQ ID NO: 20665 - DNA, 37 bp, Artificial Sequence
  primer
gtaaaacgacggccagttttggatctgtgaaggcgag

SEQ ID NO: 20666 - DNA, 21 bp, Artificial Sequence
  primer
gggcaacaagagtgaaactcc

SEQ ID NO: 20667 - DNA, 21 bp, Artificial Sequence
  primer
tgcccagagtaggttgctttc

SEQ ID NO: 20668 - DNA, 21 bp, Artificial Sequence
  primer
acacacacaggacagacgacc

SEQ ID NO: 20669 - DNA, 21 bp, Artificial Sequence
  primer
cacattggcgactgtagaagc

SEQ ID NO: 20670 - DNA, 38 bp, Artificial Sequence
  primer
gtaaaacgacggccagttctgtgaatgcctgtgggtag

SEQ ID NO: 20671 - DNA, 38 bp, Artificial Sequence
  primer
gtaaaacgacggccagtggttcctgtacccgttcagac

SEQ ID NO: 20672 - DNA, 20 bp, Artificial Sequence
  primer
ggttgcgtgtgcctgtagtc

SEQ ID NO: 20673 - DNA, 21 bp, Artificial Sequence
  primer
ccctcaaatggtggtgatttc

SEQ ID NO: 20674 - DNA, 38 bp, Artificial Sequence
  primer
gtaaaacgacggccagtagtccagcagaaggaaagcag

SEQ ID NO: 20675 - DNA, 21 bp, Artificial Sequence
  primer
gtggtcagggccagagagtag

SEQ ID NO: 20676 - DNA, 38 bp, Artificial Sequence
  primer
gtaaaacgacggccagtatttgcatgatggcatttgtg

SEQ ID NO: 20677 - DNA, 21 bp, Artificial Sequence
  primer
taagcctcactccaagtgctg

SEQ ID NO: 20678 - DNA, 38 bp, Artificial Sequence
  primer
gtaaaacgacggccagtactcccaatggcctctaccag

SEQ ID NO: 20679 - DNA, 23 bp, Artificial Sequence
  primer
aagttggtggtaacaacaggaac

SEQ ID NO: 20680 - DNA, 21 bp, Artificial Sequence
  primer
acccactggtggagttactgg

SEQ ID NO: 20681 - DNA, 37 bp, Artificial Sequence
  primer
gtaaaacgacggccagttcgcagccagtctcaaagtc

SEQ ID NO: 20682 - DNA, 38 bp, Artificial Sequence
  primer
gtaaaacgacggccagtctcagacatgcttgtgactgc

SEQ ID NO: 20683 - DNA, 21 bp, Artificial Sequence
  primer
aaagggagctgaaagcatttg

SEQ ID NO: 20684 - DNA, 38 bp, Artificial Sequence
  primer
gtaaaacgacggccagtcctgctccctgcaacatagag

SEQ ID NO: 20685 - DNA, 21 bp, Artificial Sequence
  primer
ctggattcccggttgtgttac

SEQ ID NO: 20686 - DNA, 21 bp, Artificial Sequence
  primer
aaccgatttgttcctgctctc

SEQ ID NO: 20687 - DNA, 21 bp, Artificial Sequence
  primer
acagggcagaacgaagagaag

SEQ ID NO: 20688 - DNA, 37 bp, Artificial Sequence
  primer
gtaaaacgacggccagttctctgctggacagagggac

SEQ ID NO: 20689 - DNA, 19 bp, Artificial Sequence
  primer
actgacccacccacctcag

SEQ ID NO: 20690 - DNA, 35 bp, Artificial Sequence
  primer
gtaaaacgacggccagtctggagccggagctgaag

SEQ ID NO: 20691 - DNA, 21 bp, Artificial Sequence
  primer
cttccctctcagggtctctcc

SEQ ID NO: 20692 - DNA, 18 bp, Artificial Sequence
  primer
gtggctcctctgcctgtg

SEQ ID NO: 20693 - DNA, 38 bp, Artificial Sequence
  primer
gtaaaacgacggccagtcacttcctgtcccttcattcc

SEQ ID NO: 20694 - DNA, 21 bp, Artificial Sequence
  primer
tctttaggagaactggcggtc

SEQ ID NO: 20695 - DNA, 38 bp, Artificial Sequence
  primer
gtaaaacgacggccagtgacccgaccttgaccttacag

SEQ ID NO: 20696 - DNA, 21 bp, Artificial Sequence
  primer
gttgaatgaggctgaccttcc

SEQ ID NO: 20697 - DNA, 38 bp, Artificial Sequence
  primer
gtaaaacgacggccagttgctcattgtcactttggacc

SEQ ID NO: 20698 - DNA, 21 bp, Artificial Sequence
  primer
tatgggtgatagcatctgggc

SEQ ID NO: 20699 - DNA, 20 bp, Artificial Sequence
  primer
gctctgcgacttcaacaagg

SEQ ID NO: 20700 - DNA, 37 bp, Artificial Sequence
  primer
gtaaaacgacggccagtctggctatctgccctgactc

SEQ ID NO: 20701 - DNA, 37 bp, Artificial Sequence
  primer
gtaaaacgacggccagtacctgctcattgtggtgagg

SEQ ID NO: 20702 - DNA, 37 bp, Artificial Sequence
  primer
gtaaaacgacggccagtgagcaggagcctgttgttcc

SEQ ID NO: 20703 - DNA, 21 bp, Artificial Sequence
  primer
accctcctgtcctccaaactc

SEQ ID NO: 20704 - DNA, 20 bp, Artificial Sequence
  primer
gttccagagggaagcaggag

SEQ ID NO: 20705 - DNA, 21 bp, Artificial Sequence
  primer
acctgtcactaggttgggctg

SEQ ID NO: 20706 - DNA, 38 bp, Artificial Sequence
  primer
gtaaaacgacggccagtgtggcacagctctggcttaac

SEQ ID NO: 20707 - DNA, 38 bp, Artificial Sequence
  primer
gtaaaacgacggccagtcttaggtaggcgtgtgatggg

SEQ ID NO: 20708 - DNA, 21 bp, Artificial Sequence
  primer
caagacagtcaactaaggcgg

SEQ ID NO: 20709 - DNA, 19 bp, Artificial Sequence
  primer
cgtctgtggtggtttcctg

SEQ ID NO: 20710 - DNA, 22 bp, Artificial Sequence
  primer
tctacctttccctcccaaactc

SEQ ID NO: 20711 - DNA, 21 bp, Artificial Sequence
  primer
tttctcggctaaggaacaagc

SEQ ID NO: 20712 - DNA, 21 bp, Artificial Sequence
  primer
atgttgcgaaggaggaagttg

SEQ ID NO: 20713 - DNA, 21 bp, Artificial Sequence
  primer
gcctgacggataatggatgtc

SEQ ID NO: 20714 - DNA, 38 bp, Artificial Sequence
  primer
gtaaaacgacggccagtaggtcagccagggatgatatg

SEQ ID NO: 20715 - DNA, 21 bp, Artificial Sequence
  primer
gctctaaagactcagacgccc

SEQ ID NO: 20716 - DNA, 38 bp, Artificial Sequence
  primer
gtaaaacgacggccagttctgctctgcagaatggaaac

SEQ ID NO: 20717 - DNA, 21 bp, Artificial Sequence
  primer
actgtgaaagggttgtctgcc

SEQ ID NO: 20718 - DNA, 38 bp, Artificial Sequence
  primer
gtaaaacgacggccagttgaggaccgctagtgccttac

SEQ ID NO: 20719 - DNA, 21 bp, Artificial Sequence
  primer
ccctgtagtcatgccttaccc

SEQ ID NO: 20720 - DNA, 21 bp, Artificial Sequence
  primer
cctctcagtttgggagacagg

SEQ ID NO: 20721 - DNA, 21 bp, Artificial Sequence
  primer
ctgcctccgcatctctaagtg

SEQ ID NO: 20722 - DNA, 38 bp, Artificial Sequence
  primer
gtaaaacgacggccagtctgggtctgtgagagtttggg

SEQ ID NO: 20723 - DNA, 21 bp, Artificial Sequence
  primer
taccgggaaggtttgtgaaag

SEQ ID NO: 20724 - DNA, 39 bp, Artificial Sequence
  primer
gtaaaacgacggccagtcgttcctgggaaagtgatgtag

SEQ ID NO: 20725 - DNA, 38 bp, Artificial Sequence
  primer
gtaaaacgacggccagttctcccttccctaagagcttg

SEQ ID NO: 20726 - DNA, 21 bp, Artificial Sequence
  primer
gctgcaagtacttccctgctc

SEQ ID NO: 20727 - DNA, 20 bp, Artificial Sequence
  primer
gcaagcaacatctcgtctcc

SEQ ID NO: 20728 - DNA, 38 bp, Artificial Sequence
  primer
gtaaaacgacggccagtggcaatgttgggttcagtaag

SEQ ID NO: 20729 - DNA, 37 bp, Artificial Sequence
  primer
gtaaaacgacggccagtacacaccgtagtgtcagggc

SEQ ID NO: 20730 - DNA, 38 bp, Artificial Sequence
  primer
gtaaaacgacggccagtggaaagtgaatggacagaggc

SEQ ID NO: 20731 - DNA, 20 bp, Artificial Sequence
  primer
cacagtcagatcaggccagg

SEQ ID NO: 20732 - DNA, 38 bp, Artificial Sequence
  primer
gtaaaacgacggccagttctccagggtgagaagagcag

SEQ ID NO: 20733 - DNA, 19 bp, Artificial Sequence
  primer
gcgcttagcgttacttccg

SEQ ID NO: 20734 - DNA, 39 bp, Artificial Sequence
  primer
gtaaaacgacggccagtggtagaaagaagggctacaccc

SEQ ID NO: 20735 - DNA, 39 bp, Artificial Sequence
  primer
gtaaaacgacggccagttggaaccaatgattgtgatgtg

SEQ ID NO: 20736 - DNA, 20 bp, Artificial Sequence
  primer
ccgaaatgcctgctctgtag

SEQ ID NO: 20737 - DNA, 22 bp, Artificial Sequence
  primer
gcttgttgtttgactgaaaccc

SEQ ID NO: 20738 - DNA, 21 bp, Artificial Sequence
  primer
ggagcattagagctttccagc

SEQ ID NO: 20739 - DNA, 38 bp, Artificial Sequence
  primer
gtaaaacgacggccagtccgggaactcagtttcttcag

SEQ ID NO: 20740 - DNA, 21 bp, Artificial Sequence
  primer
cccaagtgagatgtgctctcc

SEQ ID NO: 20741 - DNA, 21 bp, Artificial Sequence
  primer
cccaagaccagtttgagtacg

SEQ ID NO: 20742 - DNA, 36 bp, Artificial Sequence
  primer
gtaaaacgacggccagtaaacgtagcagtggcggag

SEQ ID NO: 20743 - DNA, 38 bp, Artificial Sequence
  primer
gtaaaacgacggccagttcgtggtggagtactggtgag

SEQ ID NO: 20744 - DNA, 38 bp, Artificial Sequence
  primer
gtaaaacgacggccagtctcaggttccctggagttgac

SEQ ID NO: 20745 - DNA, 38 bp, Artificial Sequence
  primer
gtaaaacgacggccagtaatggacagctggtgttctcc

SEQ ID NO: 20746 - DNA, 38 bp, Artificial Sequence
  primer
gtaaaacgacggccagtagacactctcggaaggaatgg

SEQ ID NO: 20747 - DNA, 38 bp, Artificial Sequence
  primer
gtaaaacgacggccagtaattcactgtccacaaagggc

SEQ ID NO: 20748 - DNA, 38 bp, Artificial Sequence
  primer
gtaaaacgacggccagtctatccagagcagacaatggc

SEQ ID NO: 20749 - DNA, 38 bp, Artificial Sequence
  primer
gtaaaacgacggccagtctgttaggcctgaccttccac

SEQ ID NO: 20750 - DNA, 37 bp, Artificial Sequence
  primer
gtaaaacgacggccagtcactgggcatctttgtctcc

SEQ ID NO: 20751 - DNA, 18 bp, Artificial Sequence
  primer
gctgcacagctctgaggg

SEQ ID NO: 20752 - DNA, 36 bp, Artificial Sequence
  primer
gtaaaacgacggccagtacttgcagggcaggcatag

SEQ ID NO: 20753 - DNA, 38 bp, Artificial Sequence
  primer
gtaaaacgacggccagtagtccctgccacctctctaag

SEQ ID NO: 20754 - DNA, 38 bp, Artificial Sequence
  primer
gtaaaacgacggccagttgaaatcagaaacggtagccc

SEQ ID NO: 20755 - DNA, 38 bp, Artificial Sequence
  primer
gtaaaacgacggccagttttgtgttcgttagctccgtg

SEQ ID NO: 20756 - DNA, 20 bp, Artificial Sequence
  primer
acatgcagaaattcatgccc

SEQ ID NO: 20757 - DNA, 21 bp, Artificial Sequence
  primer
gtgcatcccagagatgtaggg

SEQ ID NO: 20758 - DNA, 20 bp, Artificial Sequence
  primer
atgaacacacccagacgctc

SEQ ID NO: 20759 - DNA, 21 bp, Artificial Sequence
  primer
caagactgaaaggcatcctgg

SEQ ID NO: 20760 - DNA, 38 bp, Artificial Sequence
  primer
gtaaaacgacggccagtagaggcaagactgtggatgtg

SEQ ID NO: 20761 - DNA, 21 bp, Artificial Sequence
  primer
gatgggttcctggagatcttg

SEQ ID NO: 20762 - DNA, 38 bp, Artificial Sequence
  primer
gtaaaacgacggccagtgtttgtgcagggttgtcactc

SEQ ID NO: 20763 - DNA, 21 bp, Artificial Sequence
  primer
tgtgtagccgcctcctctatg

SEQ ID NO: 20764 - DNA, 35 bp, Artificial Sequence
  primer
gtaaaacgacggccagtcctgagccaatcggaagg

SEQ ID NO: 20765 - DNA, 35 bp, Artificial Sequence
  primer
gtaaaacgacggccagtgtgtatgtgtgcgcgagg

SEQ ID NO: 20766 - DNA, 38 bp, Artificial Sequence
  primer
gtaaaacgacggccagtcagagtaccctcctgcatgtc

SEQ ID NO: 20767 - DNA, 21 bp, Artificial Sequence
  primer
tgcgatctaactctggtttgg

SEQ ID NO: 20768 - DNA, 21 bp, Artificial Sequence
  primer
tgggaaggtgagtttacctgg

SEQ ID NO: 20769 - DNA, 24 bp, Artificial Sequence
  primer
catcacccagcaagtctaggttag

SEQ ID NO: 20770 - DNA, 39 bp, Artificial Sequence
  primer
gtaaaacgacggccagttgaatgtgcatttcagtccaag

SEQ ID NO: 20771 - DNA, 37 bp, Artificial Sequence
  primer
gtaaaacgacggccagtgcttggacaacaacctttcc

SEQ ID NO: 20772 - DNA, 22 bp, Artificial Sequence
  primer
agaggtggagatgctttctgac

SEQ ID NO: 20773 - DNA, 20 bp, Artificial Sequence
  primer
catgaacccagaaggtggag

SEQ ID NO: 20774 - DNA, 21 bp, Artificial Sequence
  primer
tttcattcccgttgttatgga

SEQ ID NO: 20775 - DNA, 38 bp, Artificial Sequence
  primer
gtaaaacgacggccagtcgcagtcgctgaaacctctac

SEQ ID NO: 20776 - DNA, 38 bp, Artificial Sequence
  primer
gtaaaacgacggccagttgcttgactgctctgatgaaa

SEQ ID NO: 20777 - DNA, 19 bp, Artificial Sequence
  primer
gcaacagcgagactccatc

SEQ ID NO: 20778 - DNA, 37 bp, Artificial Sequence
  primer
gtaaaacgacggccagtagccaaagagcacactggag

SEQ ID NO: 20779 - DNA, 21 bp, Artificial Sequence
  primer
ggactggaggataggaatggc

SEQ ID NO: 20780 - DNA, 38 bp, Artificial Sequence
  primer
gtaaaacgacggccagtcgtgccagcttctgttacaag

SEQ ID NO: 20781 - DNA, 21 bp, Artificial Sequence
  primer
tacccttgacaatcctgggac

SEQ ID NO: 20782 - DNA, 21 bp, Artificial Sequence
  primer
tcagagctatacccagccctc

SEQ ID NO: 20783 - DNA, 21 bp, Artificial Sequence
  primer
tcaacatgcagctcaacaatg

SEQ ID NO: 20784 - DNA, 21 bp, Artificial Sequence
  primer
cagagaccctgccagagaaac

SEQ ID NO: 20785 - DNA, 21 bp, Artificial Sequence
  primer
agggctctccagtacaccttg

SEQ ID NO: 20786 - DNA, 38 bp, Artificial Sequence
  primer
gtaaaacgacggccagtgatcctgaataccaagccagc

SEQ ID NO: 20787 - DNA, 38 bp, Artificial Sequence
  primer
gtaaaacgacggccagtggtttcagcacagagagggtc

SEQ ID NO: 20788 - DNA, 21 bp, Artificial Sequence
  primer
atcaatcccagatgccaaatc

SEQ ID NO: 20789 - DNA, 21 bp, Artificial Sequence
  primer
caggtccttacggtccaattc

SEQ ID NO: 20790 - DNA, 21 bp, Artificial Sequence
  primer
ctgcctatcctgaaaccaagc

SEQ ID NO: 20791 - DNA, 38 bp, Artificial Sequence
  primer
gtaaaacgacggccagtccaggtatccagaactctcgc

SEQ ID NO: 20792 - DNA, 21 bp, Artificial Sequence
  primer
agggagctgcaagtagtggag

SEQ ID NO: 20793 - DNA, 37 bp, Artificial Sequence
  primer
gtaaaacgacggccagtgctcagtctccctgctctcc

SEQ ID NO: 20794 - DNA, 20 bp, Artificial Sequence
  primer
acaaaggttcgacctccctc

SEQ ID NO: 20795 - DNA, 21 bp, Artificial Sequence
  primer
gaggacctctttatgcatccg

SEQ ID NO: 20796 - DNA, 21 bp, Artificial Sequence
  primer
ctctccacactccatccatcc

SEQ ID NO: 20797 - DNA, 38 bp, Artificial Sequence
  primer
gtaaaacgacggccagttctctcttcctgtccctgtgg

SEQ ID NO: 20798 - DNA, 38 bp, Artificial Sequence
  primer
gtaaaacgacggccagtgtagcagggtgtttcagggag

SEQ ID NO: 20799 - DNA, 38 bp, Artificial Sequence
  primer
gtaaaacgacggccagtaaattattcctgggcagagcc

SEQ ID NO: 20800 - DNA, 37 bp, Artificial Sequence
  primer
gtaaaacgacggccagtctaacagctcccaccgacag

SEQ ID NO: 20801 - DNA, 21 bp, Artificial Sequence
  primer
tctgcaagaaatgcaggagtc

SEQ ID NO: 20802 - DNA, 38 bp, Artificial Sequence
  primer
gtaaaacgacggccagtagatcatcaggatggttgcac

SEQ ID NO: 20803 - DNA, 38 bp, Artificial Sequence
  primer
gtaaaacgacggccagtagcagtggtgacactttgagc

SEQ ID NO: 20804 - DNA, 21 bp, Artificial Sequence
  primer
gacttaaggctgcaggacagg

SEQ ID NO: 20805 - DNA, 37 bp, Artificial Sequence
  primer
gtaaaacgacggccagtagacagagcttcagggagcc

SEQ ID NO: 20806 - DNA, 38 bp, Artificial Sequence
  primer
gtaaaacgacggccagtgtgtcctcctacagctcccag

SEQ ID NO: 20807 - DNA, 21 bp, Artificial Sequence
  primer
aagacccttgctccaattctg

SEQ ID NO: 20808 - DNA, 20 bp, Artificial Sequence
  primer
gtgcctcagagaccaaccag

SEQ ID NO: 20809 - DNA, 20 bp, Artificial Sequence
  primer
gagggagatggactcgaagg

SEQ ID NO: 20810 - DNA, 35 bp, Artificial Sequence
  primer
gtaaaacgacggccagtcacgatgtggacgtgctg

SEQ ID NO: 20811 - DNA, 38 bp, Artificial Sequence
  primer
gtaaaacgacggccagtagattgcagcttaggcgtttc

SEQ ID NO: 20812 - DNA, 35 bp, Artificial Sequence; identical to SEQ ID NO: 20810
  primer

SEQ ID NO: 20813 - DNA, 21 bp, Artificial Sequence
  primer
gtgagactggctgatggtgtc

SEQ ID NO: 20814 - DNA, 38 bp, Artificial Sequence
  primer
gtaaaacgacggccagtgaacctggtggtctgtaaccc

SEQ ID NO: 20815 - DNA, 37 bp, Artificial Sequence
  primer
gtaaaacgacggccagttctctcacgtggactctggg

SEQ ID NO: 20816 - DNA, 36 bp, Artificial Sequence
  primer
gtaaaacgacggccagtagtgtccaccctggtgagg

SEQ ID NO: 20817 - DNA, 20 bp, Artificial Sequence
  primer
caagtgtggctgtcgctttc

SEQ ID NO: 20818 - DNA, 38 bp, Artificial Sequence
  primer
gtaaaacgacggccagtgtaggtggtcgaggaggagac

SEQ ID NO: 20819 - DNA, 37 bp, Artificial Sequence
  primer
gtaaaacgacggccagtctcacgccagtcatatccag

SEQ ID NO: 20820 - DNA, 38 bp, Artificial Sequence
  primer
gtaaaacgacggccagtgaagctgggtctcgaatgaag

SEQ ID NO: 20821 - DNA, 20 bp, Artificial Sequence
  primer
gtcgtactgtgaacggcctc

SEQ ID NO: 20822 - DNA, 21 bp, Artificial Sequence
  primer
actcaaggactttgacggcac

SEQ ID NO: 20823 - DNA, 22 bp, Artificial Sequence
  primer
ccgtgtctacctcaactatccc

SEQ ID NO: 20824 - DNA, 37 bp, Artificial Sequence
  primer
gtaaaacgacggccagtgcaggcatcagcactacctc

SEQ ID NO: 20825 - DNA, 37 bp, Artificial Sequence
  primer
gtaaaacgacggccagtgtcaatcccatggagcacac

SEQ ID NO: 20826 - DNA, 21 bp, Artificial Sequence
  primer
cattctgcccactcccaatag

SEQ ID NO: 20827 - DNA, 38 bp, Artificial Sequence
  primer
gtaaaacgacggccagtaccctgagacaaatgctggag

SEQ ID NO: 20828 - DNA, 38 bp, Artificial Sequence
  primer
gtaaaacgacggccagtcatttctcaacaaatgcggtg

SEQ ID NO: 20829 - DNA, 21 bp, Artificial Sequence
  primer
tgctattcttcctctctgccc

SEQ ID NO: 20830 - DNA, 38 bp, Artificial Sequence
  primer
gtaaaacgacggccagtccctcccttggactctctctc

SEQ ID NO: 20831 - DNA, 37 bp, Artificial Sequence
  primer
gtaaaacgacggccagtaaaggacttcaggctcccag

SEQ ID NO: 20832 - DNA, 21 bp, Artificial Sequence
  primer
atgctccaggtacagagccac

SEQ ID NO: 20833 - DNA, 36 bp, Artificial Sequence
  primer
gtaaaacgacggccagtcagcgagaaggagctggag

SEQ ID NO: 20834 - DNA, 19 bp, Artificial Sequence
  primer
taggtgtgcaccaccaccc

SEQ ID NO: 20835 - DNA, 38 bp, Artificial Sequence
  primer
gtaaaacgacggccagttttatcagggttgagggttgc

SEQ ID NO: 20836 - DNA, 38 bp, Artificial Sequence
  primer
gtaaaacgacggccagttgacaagaatggtgtccaagg

SEQ ID NO: 20837 - DNA, 38 bp, Artificial Sequence
  primer
gtaaaacgacggccagttctgcctttcaggttcaagtg

SEQ ID NO: 20838 - DNA, 38 bp, Artificial Sequence
  primer
gtaaaacgacggccagttctgagttcaaatcgtgaggg

SEQ ID NO: 20839 - DNA, 21 bp, Artificial Sequence
  primer
agcaactcggaggacaagaag

SEQ ID NO: 20840 - DNA, 21 bp, Artificial Sequence
  primer
aagtgcggttaactctgcctg

SEQ ID NO: 20841 - DNA, 38 bp, Artificial Sequence
  primer
gtaaaacgacggccagttgggagtagcacacttccttg

SEQ ID NO: 20842 - DNA, 20 bp, Artificial Sequence
  primer
atggtggcagaacactggag

SEQ ID NO: 20843 - DNA, 39 bp, Artificial Sequence
  primer
gtaaaacgacggccagtaccatgtaatacagcatctggc

SEQ ID NO: 20844 - DNA, 37 bp, Artificial Sequence
  primer
gtaaaacgacggccagtatgggtagtgaggccggtag

SEQ ID NO: 20845 - DNA, 20 bp, Artificial Sequence
  primer
ctggtggaaggagtgggatg

SEQ ID NO: 20846 - DNA, 38 bp, Artificial Sequence
  primer
gtaaaacgacggccagtgaggaaggagggtactggatg

SEQ ID NO: 20847 - DNA, 38 bp, Artificial Sequence
  primer
gtaaaacgacggccagtacacttccttctccatgctcc

SEQ ID NO: 20848 - DNA, 21 bp, Artificial Sequence
  primer
tcttagtgtgcagtgtggcag

SEQ ID NO: 20849 - DNA, 21 bp, Artificial Sequence
  primer
taatgacccttcctttgtggg

SEQ ID NO: 20850 - DNA, 38 bp, Artificial Sequence
  primer
gtaaaacgacggccagtaggctggtcctcctcctagtc

SEQ ID NO: 20851 - DNA, 38 bp, Artificial Sequence
  primer
gtaaaacgacggccagtctagacccaccctgctttcag

SEQ ID NO: 20852 - DNA, 37 bp, Artificial Sequence
  primer
gtaaaacgacggccagtagggaaggaacaggctgaac

SEQ ID NO: 20853 - DNA, 39 bp, Artificial Sequence
  primer
gtaaaacgacggccagtaaatctgtgagccaaagactgc

SEQ ID NO: 20854 - DNA, 38 bp, Artificial Sequence
  primer
gtaaaacgacggccagtgcagagtggtcttgcagtttg

SEQ ID NO: 20855 - DNA, 21 bp, Artificial Sequence
  primer
aagagggatgagggactgatg

SEQ ID NO: 20856 - DNA, 38 bp, Artificial Sequence
  primer
gtaaaacgacggccagtggtgacttccaaggtgtcctg

SEQ ID NO: 20857 - DNA, 38 bp, Artificial Sequence
  primer
gtaaaacgacggccagttttaagaggctgagacaggcg

SEQ ID NO: 20858 - DNA, 21 bp, Artificial Sequence
  primer
acatggctgtgagccaaatac

SEQ ID NO: 20859 - DNA, 21 bp, Artificial Sequence
  primer
ctcaaaggtctacgagccagg

SEQ ID NO: 20860 - DNA, 37 bp, Artificial Sequence
  primer
gtaaaacgacggccagtctctttggagctgatgccac

SEQ ID NO: 20861 - DNA, 21 bp, Artificial Sequence
  primer
cccttgtcaagatcctccatc

SEQ ID NO: 20862 - DNA, 20 bp, Artificial Sequence
  primer
cttcctcactggacactggc

SEQ ID NO: 20863 - DNA, 38 bp, Artificial Sequence
  primer
gtaaaacgacggccagtctggcagattagcctaggtcc

SEQ ID NO: 20864 - DNA, 21 bp, Artificial Sequence
  primer
ctaaagaaggcggttgaccag

SEQ ID NO: 20865 - DNA, 38 bp, Artificial Sequence
  primer
gtaaaacgacggccagtcacctgcgtgctagagaacag

SEQ ID NO: 20866 - DNA, 21 bp, Artificial Sequence
  primer
gtgtcctgcacgctgttctac

SEQ ID NO: 20867 - DNA, 38 bp, Artificial Sequence
  primer
gtaaaacgacggccagttgcttagatggctctgggaag

SEQ ID NO: 20868 - DNA, 21 bp, Artificial Sequence
  primer
tcagggtataggacagcccag

SEQ ID NO: 20869 - DNA, 38 bp, Artificial Sequence
  primer
gtaaaacgacggccagtcagctagagggagagggtcac

SEQ ID NO: 20870 - DNA, 37 bp, Artificial Sequence
  primer
gtaaaacgacggccagtcaagtagggtcctgcgagtg

SEQ ID NO: 20871 - DNA, 20 bp, Artificial Sequence
  primer
attggcatgagtgcagtgtg

SEQ ID NO: 20872 - DNA, 21 bp, Artificial Sequence
  primer
acgtggcaactatggtcagtg

SEQ ID NO: 20873 - DNA, 38 bp, Artificial Sequence
  primer
gtaaaacgacggccagtctgacaatggccctagaaacc

SEQ ID NO: 20874 - DNA, 38 bp, Artificial Sequence
  primer
gtaaaacgacggccagtcagatgaaattcaggccagtg

SEQ ID NO: 20875 - DNA, 21 bp, Artificial Sequence
  primer
cagtcttcttcgctgtgttcg

SEQ ID NO: 20876 - DNA, 18 bp, Artificial Sequence
  primer
gcatgcccaagcgtgtag

SEQ ID NO: 20877 - DNA, 38 bp, Artificial Sequence
  primer
gtaaaacgacggccagtggatgctgtatgactcctggg

SEQ ID NO: 20878 - DNA, 21 bp, Artificial Sequence
  primer
gaagagactccctttccaggc

SEQ ID NO: 20879 - DNA, 38 bp, Artificial Sequence
  primer
gtaaaacgacggccagtttgactccttgccttaccctg

SEQ ID NO: 20880 - DNA, 20 bp, Artificial Sequence
  primer
ctggcgttggtaccattctg

SEQ ID NO: 20881 - DNA, 38 bp, Artificial Sequence
  primer
gtaaaacgacggccagtttgccagatcaagatgaccag

SEQ ID NO: 20882 - DNA, 23 bp, Artificial Sequence
  primer
tgaatttcataccttcatgtggc

SEQ ID NO: 20883 - DNA, 39 bp, Artificial Sequence
  primer
gtaaaacgacggccagtaagggaggtgtctatcctggtc

SEQ ID NO: 20884 - DNA, 38 bp, Artificial Sequence
  primer
gtaaaacgacggccagtcccatcaattgttgtccagtg

SEQ ID NO: 20885 - DNA, 22 bp, Artificial Sequence
  primer
tccacagcaagattgacatctg

SEQ ID NO: 20886 - DNA, 20 bp, Artificial Sequence
  primer
aagagcgaatctcccgtctc

SEQ ID NO: 20887 - DNA, 20 bp, Artificial Sequence
  primer
aagggcaaagcatactgcaa

SEQ ID NO: 20888 - DNA, 38 bp, Artificial Sequence
  primer
gtaaaacgacggccagtagtgaaagaagcactccagcc

SEQ ID NO: 20889 - DNA, 21 bp, Artificial Sequence
  primer
agagcgtctctgtctccaagc

SEQ ID NO: 20890 - DNA, 21 bp, Artificial Sequence
  primer
aatccaagctcggaagtcaac

SEQ ID NO: 20891 - DNA, 38 bp, Artificial Sequence
  primer
gtaaaacgacggccagtctcagggtcaaacttggttcc

SEQ ID NO: 20892 - DNA, 39 bp, Artificial Sequence
  primer
gtaaaacgacggccagttgagcaggaactgcaatctttc

SEQ ID NO: 20893 - DNA, 21 bp, Artificial Sequence
  primer
ggagtttgaggctggagtgag

SEQ ID NO: 20894 - DNA, 21 bp, Artificial Sequence
  primer
tttactatcagctgggcaggg

SEQ ID NO: 20895 - DNA, 21 bp, Artificial Sequence
  primer
gaaattctgcctctgcctctg

SEQ ID NO: 20896 - DNA, 37 bp, Artificial Sequence
  primer
gtaaaacgacggccagtcccaacaagaggtttggaag

SEQ ID NO: 20897 - DNA, 24 bp, Artificial Sequence
  primer
tgctagtgggttataggttccaag

SEQ ID NO: 20898 - DNA, 38 bp, Artificial Sequence
  primer
gtaaaacgacggccagtagcctcagccctaaattagcc

SEQ ID NO: 20899 - DNA, 38 bp, Artificial Sequence
  primer
gtaaaacgacggccagtggtcgagacctcttggctaac

SEQ ID NO: 20900 - DNA, 20 bp, Artificial Sequence
  primer
gagaatggtgtgaacccagg

SEQ ID NO: 20901 - DNA, 20 bp, Artificial Sequence
  primer
gaagctgaagggatgctttg

SEQ ID NO: 20902 - DNA, 38 bp, Artificial Sequence
  primer
gtaaaacgacggccagtgaacagacgtgtgtgagaggc

SEQ ID NO: 20903 - DNA, 35 bp, Artificial Sequence
  primer
gtaaaacgacggccagtgtgatccatccgcctctg

SEQ ID NO: 20904 - DNA, 21 bp, Artificial Sequence
  primer
tttatggtcatcattgcgctc

SEQ ID NO: 20905 - DNA, 21 bp, Artificial Sequence
  primer
cacgagattgatcttcctccc

SEQ ID NO: 20906 - DNA, 38 bp, Artificial Sequence
  primer
gtaaaacgacggccagtaagatggaagtgacctgagcc

SEQ ID NO: 20907 - DNA, 38 bp, Artificial Sequence
  primer
gtaaaacgacggccagtcaacgacagtcacagctcaag

SEQ ID NO: 20908 - DNA, 38 bp, Artificial Sequence; identical to SEQ ID NO: 20902
  primer

SEQ ID NO: 20909 - DNA, 19 bp, Artificial Sequence
  primer
atgccatgaaattggcctc

SEQ ID NO: 20910 - DNA, 38 bp, Artificial Sequence
  primer
gtaaaacgacggccagttcctaggttatgggaccatgc

SEQ ID NO: 20911 - DNA, 37 bp, Artificial Sequence
  primer
gtaaaacgacggccagtgccttcctatttcagggacg

SEQ ID NO: 20912 - DNA, 38 bp, Artificial Sequence
  primer
gtaaaacgacggccagtcttcttcccaccttccatcag

SEQ ID NO: 20913 - DNA, 21 bp, Artificial Sequence
  primer
ccctgacattgtctgttgctg

SEQ ID NO: 20914 - DNA, 21 bp, Artificial Sequence
  primer
gactggagggttagaagtggg

SEQ ID NO: 20915 - DNA, 21 bp, Artificial Sequence
  primer
tgttcccaactctcctgcatc

SEQ ID NO: 20916 - DNA, 20 bp, Artificial Sequence
  primer
gctgctctgagtcttctccg

SEQ ID NO: 20917 - DNA, 40 bp, Artificial Sequence
  primer
gtaaaacgacggccagttcatcttgggatgaactgtcaac

SEQ ID NO: 20918 - DNA, 39 bp, Artificial Sequence
  primer
gtaaaacgacggccagtaaagagagaggatgttgttgcc

SEQ ID NO: 20919 - DNA, 38 bp, Artificial Sequence
  primer
gtaaaacgacggccagtttgccgtgaatagatcaaagg

SEQ ID NO: 20920 - DNA, 38 bp, Artificial Sequence
  primer
gtaaaacgacggccagtcaacgaaagcattagccttcc

SEQ ID NO: 20921 - DNA, 38 bp, Artificial Sequence
  primer
gtaaaacgacggccagttgccaagaacagttcgacatc

SEQ ID NO: 20922 - DNA, 38 bp, Artificial Sequence
  primer
gtaaaacgacggccagtcatgacatcctgccctatcag

SEQ ID NO: 20923 - DNA, 38 bp, Artificial Sequence
  primer
gtaaaacgacggccagttgcttacaccctgctgttacg

SEQ ID NO: 20924 - DNA, 18 bp, Artificial Sequence
  primer
aaagccttgggatttggc

SEQ ID NO: 20925 - DNA, 21 bp, Artificial Sequence
  primer
ttcctgctatccatgtaaccg

SEQ ID NO: 20926 - DNA, 21 bp, Artificial Sequence
  primer
caaagagaaactgcccagcac

SEQ ID NO: 20927 - DNA, 21 bp, Artificial Sequence
  primer
gcatgcaggacatcttctctg

SEQ ID NO: 20928 - DNA, 39 bp, Artificial Sequence
  primer
gtaaaacgacggccagttgaattggttgtggtatcgtaa

SEQ ID NO: 20929 - DNA, 21 bp, Artificial Sequence
  primer
tcaatactggcaaagccaaat

SEQ ID NO: 20930 - DNA, 38 bp, Artificial Sequence
  primer
gtaaaacgacggccagtagcctgccagaatccacatag

SEQ ID NO: 20931 - DNA, 21 bp, Artificial Sequence
  primer
ctggttgtgggtggcattatc

SEQ ID NO: 20932 - DNA, 38 bp, Artificial Sequence
  primer
gtaaaacgacggccagttgcaaatgaagatgatggctc

SEQ ID NO: 20933 - DNA, 44 bp, Artificial Sequence
  primer
gtaaaacgacggccagtagatgttatttactatagccaccatga

SEQ ID NO: 20934 - DNA, 38 bp, Artificial Sequence
  primer
gtaaaacgacggccagtcctttctttgtgagggcaagt

SEQ ID NO: 20935 - DNA, 38 bp, Artificial Sequence
  primer
gtaaaacgacggccagtatcacccttcaggtggttgtc

SEQ ID NO: 20936 - DNA, 38 bp, Artificial Sequence
  primer
gtaaaacgacggccagtttgccgagtatcacctttctg

SEQ ID NO: 20937 - DNA, 22 bp, Artificial Sequence
  primer
aatatcagatcatggtcagggc

SEQ ID NO: 20938 - DNA, 21 bp, Artificial Sequence
  primer
tagagccataaaccaccttgc

SEQ ID NO: 20939 - DNA, 28 bp, Artificial Sequence
  primer
agtttctttgaatgaatagattatgctg

SEQ ID NO: 20940 - DNA, 38 bp, Artificial Sequence
  primer
gtaaaacgacggccagtagtgccaggtttcacaattcg

SEQ ID NO: 20941 - DNA, 23 bp, Artificial Sequence
  primer
tccagtgtagtgaagggagactg

SEQ ID NO: 20942 - DNA, 21 bp, Artificial Sequence
  primer
caaaggtgggtggatccttag

SEQ ID NO: 20943 - DNA, 21 bp, Artificial Sequence
  primer
ctgagggaagggtgtcttctg

SEQ ID NO: 20944 - DNA, 38 bp, Artificial Sequence
  primer
gtaaaacgacggccagtccttaccacctgagcaaggag

SEQ ID NO: 20945 - DNA, 39 bp, Artificial Sequence
  primer
gtaaaacgacggccagtcacagagaatgatcgccatatc

SEQ ID NO: 20946 - DNA, 21 bp, Artificial Sequence
  primer
gtccagcccattgtggaatag

SEQ ID NO: 20947 - DNA, 39 bp, Artificial Sequence
  primer
gtaaaacgacggccagtgctttgaaggagagggtcattc

SEQ ID NO: 20948 - DNA, 38 bp, Artificial Sequence
  primer
gtaaaacgacggccagtaacatggaaaggtgcctatgg

SEQ ID NO: 20949 - DNA, 38 bp, Artificial Sequence
  primer
gtaaaacgacggccagtacatcaggcagcatgtaaagg

SEQ ID NO: 20950 - DNA, 20 bp, Artificial Sequence
  primer
cactgcacaccacactccag

SEQ ID NO: 20951 - DNA, 38 bp, Artificial Sequence
  primer
gtaaaacgacggccagttggatgggaaacctttactgg

SEQ ID NO: 20952 - DNA, 21 bp, Artificial Sequence
  primer
taaccacacctggcctttatg

SEQ ID NO: 20953 - DNA, 21 bp, Artificial Sequence
  primer
atggttgcatttatctgctgc

SEQ ID NO: 20954 - DNA, 21 bp, Artificial Sequence
  primer
ccgtgtgatgtgatgtttgtg

SEQ ID NO: 20955 - DNA, 40 bp, Artificial Sequence
  primer
gtaaaacgacggccagtttagctttgtgaaacaatgaggc

SEQ ID NO: 20956 - DNA, 38 bp, Artificial Sequence
  primer
gtaaaacgacggccagttcctacctcagcctctgttcc

SEQ ID NO: 20957 - DNA, 38 bp, Artificial Sequence
  primer
gtaaaacgacggccagtgatggttagacagggtctgcc

SEQ ID NO: 20958 - DNA, 39 bp, Artificial Sequence
  primer
gtaaaacgacggccagttggaatgtaggcctgctaacac

SEQ ID NO: 20959 - DNA, 42 bp, Artificial Sequence
  primer
gtaaaacgacggccagttttcacattatccgacagtatacga

SEQ ID NO: 20960 - DNA, 21 bp, Artificial Sequence
  primer
atattggccgatttgcatgag

SEQ ID NO: 20961 - DNA, 38 bp, Artificial Sequence
  primer
gtaaaacgacggccagtctaaggctgttcaggtccagg

SEQ ID NO: 20962 - DNA, 38 bp, Artificial Sequence
  primer
gtaaaacgacggccagtttggtcagagaactttgcctc

SEQ ID NO: 20963 - DNA, 39 bp, Artificial Sequence
  primer
gtaaaacgacggccagtcactgcctgcaagtagaatttg

SEQ ID NO: 20964 - DNA, 38 bp, Artificial Sequence
  primer
gtaaaacgacggccagtctctcgagtgcgtctcaaacc

SEQ ID NO: 20965 - DNA, 43 bp, Artificial Sequence
  primer
gtaaaacgacggccagttgacatttaagaattcaatgaacctg

SEQ ID NO: 20966 - DNA, 38 bp, Artificial Sequence
  primer
gtaaaacgacggccagttacaccgaggatagccagtgc

SEQ ID NO: 20967 - DNA, 19 bp, Artificial Sequence
  primer
ccaggcgtgagtcttcctc

SEQ ID NO: 20968 - DNA, 21 bp, Artificial Sequence
  primer
cccacaacccatgttgttatc

SEQ ID NO: 20969 - DNA, 20 bp, Artificial Sequence
  primer
ctgctgttgatctggttgcc

SEQ ID NO: 20970 - DNA, 38 bp, Artificial Sequence
  primer
gtaaaacgacggccagtggtcctggtgaagagaggagg

SEQ ID NO: 20971 - DNA, 38 bp, Artificial Sequence
  primer
gtaaaacgacggccagttcactcctgcctcttggttac

SEQ ID NO: 20972 - DNA, 38 bp, Artificial Sequence
  primer
gtaaaacgacggccagtaacaatgctggtgttacgtgg

SEQ ID NO: 20973 - DNA, 21 bp, Artificial Sequence
  primer
ttattgcatacaggacggtgc

SEQ ID NO: 20974 - DNA, 21 bp, Artificial Sequence
  primer
aagcctcttcttccttcccag

SEQ ID NO: 20975 - DNA, 22 bp, Artificial Sequence
  primer
tggcctaaggctctaagacaag

SEQ ID NO: 20976 - DNA, 38 bp, Artificial Sequence
  primer
gtaaaacgacggccagtttcaggattgtccatggagtc

SEQ ID NO: 20977 - DNA, 19 bp, Artificial Sequence
  primer
catgatccacccgccttag

SEQ ID NO: 20978 - DNA, 44 bp, Artificial Sequence
  primer
gtaaaacgacggccagtttggcaataagattataacaggatgag

SEQ ID NO: 20979 - DNA, 39 bp, Artificial Sequence
  primer
gtaaaacgacggccagtttcagctgtctggtttatttgg

SEQ ID NO: 20980 - DNA, 38 bp, Artificial Sequence
  primer
gtaaaacgacggccagttgttcaagcgataccaacaga

SEQ ID NO: 20981 - DNA, 38 bp, Artificial Sequence
  primer
gtaaaacgacggccagttgctttcctgttgcatctttg

SEQ ID NO: 20982 - DNA, 38 bp, Artificial Sequence
  primer
gtaaaacgacggccagtttcctctagtggtcacctggc

SEQ ID NO: 20983 - DNA, 21 bp, Artificial Sequence
  primer
tcgccaaggttaaaggtcatc

SEQ ID NO: 20984 - DNA, 22 bp, Artificial Sequence
  primer
tcacagggtgattctgtttctg

SEQ ID NO: 20985 - DNA, 21 bp, Artificial Sequence
  primer
gagacagagatggagggaagg

SEQ ID NO: 20986 - DNA, 39 bp, Artificial Sequence
  primer
gtaaaacgacggccagtgaaggcaactgacattagaggg

SEQ ID NO: 20987 - DNA, 24 bp, Artificial Sequence
  primer
gcgtctttctgcagttaacatttc

SEQ ID NO: 20988 - DNA, 24 bp, Artificial Sequence
  primer
ggaagaggatacacattcctgaac

SEQ ID NO: 20989 - DNA, 23 bp, Artificial Sequence
  primer
tgactcaaatgatgttaacccaa

SEQ ID NO: 20990 - DNA, 41 bp, Artificial Sequence
  primer
gtaaaacgacggccagttctcgtagtcagcctaggtattgg

SEQ ID NO: 20991 - DNA, 38 bp, Artificial Sequence
  primer
gtaaaacgacggccagttgtcacccaagatgactttcc

SEQ ID NO: 20992 - DNA, 25 bp, Artificial Sequence
  primer
ccttcttatgaaagagtcaaaccaa

SEQ ID NO: 20993 - DNA, 27 bp, Artificial Sequence
  primer
gacagatttctcagcctctctattaag

SEQ ID NO: 20994 - DNA, 46 bp, Artificial Sequence
  primer
gtaaaacgacggccagttttggtttatacaaccgagagtataagta

SEQ ID NO: 20995 - DNA, 41 bp, Artificial Sequence
  primer
gtaaaacgacggccagtccgttaagtgtaaatcccattacc

SEQ ID NO: 20996 - DNA, 37 bp, Artificial Sequence
  primer
gtaaaacgacggccagtctaaggcccatgttcccatc

SEQ ID NO: 20997 - DNA, 38 bp, Artificial Sequence
  primer
gtaaaacgacggccagtctgaggcagaattgcttgaac

SEQ ID NO: 20998 - DNA, 21 bp, Artificial Sequence
  primer
tcagggctgaaattccactta

SEQ ID NO: 20999 - DNA, 20 bp, Artificial Sequence
  primer
catctgctaccttggcctcc

SEQ ID NO: 21000 - DNA, 41 bp, Artificial Sequence
  primer
gtaaaacgacggccagttgatgtgatgaattatgattccga

SEQ ID NO: 21001 - DNA, 26 bp, Artificial Sequence
  primer
gctggaagatttgagaagagtttatg

SEQ ID NO: 21002 - DNA, 24 bp, Artificial Sequence
  primer
cctaggacacatgttctgtcttca

SEQ ID NO: 21003 - DNA, 40 bp, Artificial Sequence
  primer
gtaaaacgacggccagtaatgcaaactggaaagactgaaa

SEQ ID NO: 21004 - DNA, 22 bp, Artificial Sequence
  primer
gcctgtcactgaataagaggct

SEQ ID NO: 21005 - DNA, 40 bp, Artificial Sequence
  primer
gtaaaacgacggccagtcacagccaatgtaattgtgttcc

SEQ ID NO: 21006 - DNA, 37 bp, Artificial Sequence
  primer
gtaaaacgacggccagttttccaaggcctgtcagttc

SEQ ID NO: 21007 - DNA, 24 bp, Artificial Sequence
  primer
tcaacaaaggatattggtatcagg

SEQ ID NO: 21008 - DNA, 21 bp, Artificial Sequence
  primer
agtgcagaatgggctattgac

SEQ ID NO: 21009 - DNA, 38 bp, Artificial Sequence
  primer
gtaaaacgacggccagttgggacaaggatgatagtggg

SEQ ID NO: 21010 - DNA, 21 bp, Artificial Sequence
  primer
gacggaagtaacagcggaaag

SEQ ID NO: 21011 - DNA, 37 bp, Artificial Sequence
  primer
gtaaaacgacggccagtctgttgagagcagaggtggg

SEQ ID NO: 21012 - DNA, 42 bp, Artificial Sequence
  primer
gtaaaacgacggccagtgattaggcataaatgtcagatgtcg

SEQ ID NO: 21013 - DNA, 21 bp, Artificial Sequence
  primer
tgcacttggcctgtgacatac

SEQ ID NO: 21014 - DNA, 21 bp, Artificial Sequence
  primer
gaaggttaatgagcctgtgcc

SEQ ID NO: 21015 - DNA, 21 bp, Artificial Sequence
  primer
aaccagatgggaaacacattg

SEQ ID NO: 21016 - DNA, 21 bp, Artificial Sequence
  primer
tgagcaattattccgaatggg

SEQ ID NO: 21017 - DNA, 38 bp, Artificial Sequence
  primer
gtaaaacgacggccagtgacagttatgctgtccaaccc

SEQ ID NO: 21018 - DNA, 38 bp, Artificial Sequence
  primer
gtaaaacgacggccagttccaattggccattccttaac

SEQ ID NO: 21019 - DNA, 21 bp, Artificial Sequence
  primer
ggcctatggaagctacacagc

SEQ ID NO: 21020 - DNA, 21 bp, Artificial Sequence
  primer
gcaaattagaaagcaccgacc

SEQ ID NO: 21021 - DNA, 22 bp, Artificial Sequence
  primer
catattcctggattgatgggtg

SEQ ID NO: 21022 - DNA, 21 bp, Artificial Sequence
  primer
cttaagtggactggcgaggag

SEQ ID NO: 21023 - DNA, 38 bp, Artificial Sequence
  primer
gtaaaacgacggccagtataatggtgccatgatggatg

SEQ ID NO: 21024 - DNA, 21 bp, Artificial Sequence
  primer
gatggaacccacaatcacaag

SEQ ID NO: 21025 - DNA, 21 bp, Artificial Sequence
  primer
caattatctgggattcggtgg

SEQ ID NO: 21026 - DNA, 38 bp, Artificial Sequence
  primer
gtaaaacgacggccagtctttgtcttctgaagggcacc

SEQ ID NO: 21027 - DNA, 21 bp, Artificial Sequence
  primer
ccatctgcatgaacccaatag

SEQ ID NO: 21028 - DNA, 38 bp, Artificial Sequence
  primer
gtaaaacgacggccagtcatagtaagagaccctcgggc

SEQ ID NO: 21029 - DNA, 21 bp, Artificial Sequence
  primer
tccaaatcaaatgcagtgtcc

SEQ ID NO: 21030 - DNA, 18 bp, Artificial Sequence
  primer
gtagcagcgcaggtctgg

SEQ ID NO: 21031 - DNA, 37 bp, Artificial Sequence
  primer
gtaaaacgacggccagttgaagagactagcgcgttgc

SEQ ID NO: 21032 - DNA, 37 bp, Artificial Sequence
  primer
gtaaaacgacggccagtttgtctctgtcccttgctgc

SEQ ID NO: 21033 - DNA, 22 bp, Artificial Sequence
  primer
gtgggacatgggaagaagatag

SEQ ID NO: 21034 - DNA, 21 bp, Artificial Sequence
  primer
catctcctgtgggattgacac

SEQ ID NO: 21035 - DNA, 38 bp, Artificial Sequence
  primer
gtaaaacgacggccagtcttgccttctgcagtttagcc

SEQ ID NO: 21036 - DNA, 37 bp, Artificial Sequence
  primer
gtaaaacgacggccagtcctttaagaaggcagacgcc

SEQ ID NO: 21037 - DNA, 38 bp, Artificial Sequence
  primer
gtaaaacgacggccagtcatttgtttgcccagtttgtg

SEQ ID NO: 21038 - DNA, 40 bp, Artificial Sequence
  primer
gtaaaacgacggccagttgtctctttgtgtcagtcagcag

SEQ ID NO: 21039 - DNA, 38 bp, Artificial Sequence
  primer
gtaaaacgacggccagtgtcagcctttccagctaggtc

SEQ ID NO: 21040 - DNA, 23 bp, Artificial Sequence
  primer
ccatgtagaagtctttgctggag

SEQ ID NO: 21041 - DNA, 39 bp, Artificial Sequence
  primer
gtaaaacgacggccagtaaagtgcagcaagctgttaagc

SEQ ID NO: 21042 - DNA, 38 bp, Artificial Sequence
  primer
gtaaaacgacggccagtaggaaggacagaggaaccaag

SEQ ID NO: 21043 - DNA, 39 bp, Artificial Sequence
  primer
gtaaaacgacggccagttatccttgaagccttccaaatg

SEQ ID NO: 21044 - DNA, 27 bp, Artificial Sequence
  primer
aaatgcctcttaaattcttaattctca

SEQ ID NO: 21045 - DNA, 22 bp, Artificial Sequence
  primer
tgatgtgatatctgggagcttt

SEQ ID NO: 21046 - DNA, 38 bp, Artificial Sequence
  primer
gtaaaacgacggccagtgaagcagggagataagaaggg

SEQ ID NO: 21047 - DNA, 27 bp, Artificial Sequence
  primer
tttattgacatacattgtttggagttt

SEQ ID NO: 21048 - DNA, 25 bp, Artificial Sequence
  primer
catcattgagatataagcctgttca

SEQ ID NO: 21049 - DNA, 21 bp, Artificial Sequence
  primer
gttagggcacttggcagacta

SEQ ID NO: 21050 - DNA, 36 bp, Artificial Sequence
  primer
gtaaaacgacggccagtttacgctgcggaaactgac

SEQ ID NO: 21051 - DNA, 21 bp, Artificial Sequence
  primer
aacatagattcccaagccctg

SEQ ID NO: 21052 - DNA, 22 bp, Artificial Sequence
  primer
ttggaatcagcattacaggttg

SEQ ID NO: 21053 - DNA, 20 bp, Artificial Sequence
  primer
ttataggcgtgagccaggag

SEQ ID NO: 21054 - DNA, 38 bp, Artificial Sequence
  primer
gtaaaacgacggccagtgtggcttgaattcagaggagg

SEQ ID NO: 21055 - DNA, 21 bp, Artificial Sequence
  primer
ggaagcaaggaacggtgtatg

SEQ ID NO: 21056 - DNA, 37 bp, Artificial Sequence
  primer
gtaaaacgacggccagtccacatcactttcgctccag

SEQ ID NO: 21057 - DNA, 20 bp, Artificial Sequence
  primer
ttagggagaaacggagcatc

SEQ ID NO: 21058 - DNA, 21 bp, Artificial Sequence
  primer
aattcaccacgttgactgacc

SEQ ID NO: 21059 - DNA, 19 bp, Artificial Sequence
  primer
gacgccacaggtggaattt

SEQ ID NO: 21060 - DNA, 23 bp, Artificial Sequence
  primer
gaacggatcaacctaggaatagc

SEQ ID NO: 21061 - DNA, 42 bp, Artificial Sequence
  primer
gtaaaacgacggccagttggtgtacttacaattacagggtgg

SEQ ID NO: 21062 - DNA, 39 bp, Artificial Sequence
  primer
gtaaaacgacggccagttgtcataaacagcagcatccag

SEQ ID NO: 21063 - DNA, 39 bp, Artificial Sequence
  primer
gtaaaacgacggccagtcactgttcagttagggtggagg

SEQ ID NO: 21064 - DNA, 21 bp, Artificial Sequence
  primer
atacatgtgctgcattgcttg

SEQ ID NO: 21065 - DNA, 20 bp, Artificial Sequence
  primer
cttgtccggtaccattctgc

SEQ ID NO: 21066 - DNA, 35 bp, Artificial Sequence
  primer
gtaaaacgacggccagtccgtttaagcgcagaggg

SEQ ID NO: 21067 - DNA, 38 bp, Artificial Sequence
  primer
gtaaaacgacggccagtaacagaaataatcgcttgcgg

SEQ ID NO: 21068 - DNA, 38 bp, Artificial Sequence
  primer
gtaaaacgacggccagtgaggtcctactgatggcttcc

SEQ ID NO: 21069 - DNA, 20 bp, Artificial Sequence
  primer
aagcctgctgctgttgagac

SEQ ID NO: 21070 - DNA, 40 bp, Artificial Sequence
  primer
gtaaaacgacggccagtttcttgaatgaagagttatgggc

SEQ ID NO: 21071 - DNA, 37 bp, Artificial Sequence
  primer
gtaaaacgacggccagttcttgtgcctcagccttctg

SEQ ID NO: 21072 - DNA, 37 bp, Artificial Sequence
  primer
gtaaaacgacggccagtacggtggaaaggatccaaag

SEQ ID NO: 21073 - DNA, 42 bp, Artificial Sequence
  primer
gtaaaacgacggccagttttacttaaccgtgatgccatttag

SEQ ID NO: 21074 - DNA, 21 bp, Artificial Sequence
  primer
cggaggtggtcctctatcatc

SEQ ID NO: 21075 - DNA, 21 bp, Artificial Sequence
  primer
atgggatggaatgaaagcaac

SEQ ID NO: 21076 - DNA, 38 bp, Artificial Sequence
  primer
gtaaaacgacggccagttacgtgctttcagtgagacgg

SEQ ID NO: 21077 - DNA, 38 bp, Artificial Sequence
  primer
gtaaaacgacggccagtgcagctgtgaataacactccg

SEQ ID NO: 21078 - DNA, 38 bp, Artificial Sequence
  primer
gtaaaacgacggccagtatcctcctgtggtagacacgc

SEQ ID NO: 21079 - DNA, 21 bp, Artificial Sequence
  primer
tataggcatgtgccactgagc

SEQ ID NO: 21080 - DNA, 21 bp, Artificial Sequence
  primer
cgaagaattcagtccttgtgg

SEQ ID NO: 21081 - DNA, 38 bp, Artificial Sequence
  primer
gtaaaacgacggccagtgccctagagctggtagtttgg

SEQ ID NO: 21082 - DNA, 38 bp, Artificial Sequence
  primer
gtaaaacgacggccagtttacctgcatgacgaaaccac

SEQ ID NO: 21083 - DNA, 38 bp, Artificial Sequence
  primer
gtaaaacgacggccagtcagttcctgcagtaccacgtc

SEQ ID NO: 21084 - DNA, 23 bp, Artificial Sequence
  primer
tctggacatgctgaaggtaactc

SEQ ID NO: 21085 - DNA, 39 bp, Artificial Sequence
  primer
gtaaaacgacggccagtcacctacgagatgctttctttg

SEQ ID NO: 21086 - DNA, 36 bp, Artificial Sequence
  primer
gtaaaacgacggccagtcagtcgctcctaacgctcc

SEQ ID NO: 21087 - DNA, 40 bp, Artificial Sequence
  primer
gtaaaacgacggccagtaaagcttacctttgttcccattc

SEQ ID NO: 21088 - DNA, 38 bp, Artificial Sequence
  primer
gtaaaacgacggccagtaaagggccttaccctgttgac

SEQ ID NO: 21089 - DNA, 21 bp, Artificial Sequence
  primer
cagagtgcaaatgattctggc

SEQ ID NO: 21090 - DNA, 41 bp, Artificial Sequence
  primer
gtaaaacgacggccagttttgcatgctttctgagacattag

SEQ ID NO: 21091 - DNA, 23 bp, Artificial Sequence
  primer
aaacacccaagtgcctaaattat

SEQ ID NO: 21092 - DNA, 38 bp, Artificial Sequence
  primer
gtaaaacgacggccagtgaaatagggaagtcaggaggc

SEQ ID NO: 21093 - DNA, 39 bp, Artificial Sequence
  primer
gtaaaacgacggccagtaaggtaagcactcgatcaatgg

SEQ ID NO: 21094 - DNA, 21 bp, Artificial Sequence
  primer
cactgtgcccagccaataaat

SEQ ID NO: 21095 - DNA, 27 bp, Artificial Sequence
  primer
gaagtagttatggccttaagtgttaga

SEQ ID NO: 21096 - DNA, 26 bp, Artificial Sequence
  primer
tgatcacctatagttccttttatctg

SEQ ID NO: 21097 - DNA, 19 bp, Artificial Sequence
  primer
caccacgcctagcctgaaa

SEQ ID NO: 21098 - DNA, 35 bp, Artificial Sequence
  primer
gtaaaacgacggccagtgtcacgtggacagccgac

SEQ ID NO: 21099 - DNA, 20 bp, Artificial Sequence
  primer
agtgagctgtcattgtgccc

SEQ ID NO: 21100 - DNA, 22 bp, Artificial Sequence
  primer
gaatcgggaggtacagaagagg

SEQ ID NO: 21101 - DNA, 20 bp, Artificial Sequence
  primer
gtccatgttgagaagcaggc

SEQ ID NO: 21102 - DNA, 21 bp, Artificial Sequence
  primer
tggaaagcaaactcaatcgtt

SEQ ID NO: 21103 - DNA, 38 bp, Artificial Sequence
  primer
gtaaaacgacggccagtttcacatgggagtctgctttg

SEQ ID NO: 21104 - DNA, 38 bp, Artificial Sequence
  primer
gtaaaacgacggccagtgaactttccaccgtctggatg

SEQ ID NO: 21105 - DNA, 21 bp, Artificial Sequence
  primer
actgcataaacctttgccctc

SEQ ID NO: 21106 - DNA, 38 bp, Artificial Sequence
  primer
gtaaaacgacggccagttaggtgcctggatgacaagtg

SEQ ID NO: 21107 - DNA, 22 bp, Artificial Sequence
  primer
ccatcgcttatgaataagaccc

SEQ ID NO: 21108 - DNA, 18 bp, Artificial Sequence
  primer
tgaagcggctgctgtagg

SEQ ID NO: 21109 - DNA, 23 bp, Artificial Sequence
  primer
tgcatatatttaacttcgggcaa

SEQ ID NO: 21110 - DNA, 28 bp, Artificial Sequence
  primer
tggcacattatagacagatactgaaatc

SEQ ID NO: 21111 - DNA, 21 bp, Artificial Sequence
  primer
ttgcatccaaggatagtggac

SEQ ID NO: 21112 - DNA, 23 bp, Artificial Sequence
  primer
ttcaaatttgtgctaagggtttg

SEQ ID NO: 21113 - DNA, 40 bp, Artificial Sequence
  primer
gtaaaacgacggccagttttggtttgtttgtttgcatttc

SEQ ID NO: 21114 - DNA, 23 bp, Artificial Sequence
  primer
agagcacaatagcaacatctgtg

SEQ ID NO: 21115 - DNA, 22 bp, Artificial Sequence
  primer
tgcacaattcaacaaggaagag

SEQ ID NO: 21116 - DNA, 40 bp, Artificial Sequence
  primer
gtaaaacgacggccagtggcttaatttgggagtagcactg

SEQ ID NO: 21117 - DNA, 23 bp, Artificial Sequence
  primer
agaaggagtttcgtggaaatgag

SEQ ID NO: 21118 - DNA, 38 bp, Artificial Sequence
  primer
gtaaaacgacggccagtaacaggctcactaaagccagg

SEQ ID NO: 21119 - DNA, 37 bp, Artificial Sequence
  primer
gtaaaacgacggccagtcaatcggagttggcttgatg

SEQ ID NO: 21120 - DNA, 38 bp, Artificial Sequence
  primer
gtaaaacgacggccagtagaatgggcagtgtcttaggg

SEQ ID NO: 21121 - DNA, 38 bp, Artificial Sequence
  primer
gtaaaacgacggccagtggaggctgagaagcaaacaac

SEQ ID NO: 21122 - DNA, 21 bp, Artificial Sequence
  primer
ccctgaaggtaggaagggaag

SEQ ID NO: 21123 - DNA, 38 bp, Artificial Sequence
  primer
gtaaaacgacggccagtagaaacagtaagtggctcccg

SEQ ID NO: 21124 - DNA, 22 bp, Artificial Sequence
  primer
ttccaaacttcatccctcaaac

SEQ ID NO: 21125 - DNA, 38 bp, Artificial Sequence
  primer
gtaaaacgacggccagtgagaccatgctgaccctcttc

SEQ ID NO: 21126 - DNA, 38 bp, Artificial Sequence
  primer
gtaaaacgacggccagtctggattcgatacgggaagtg

SEQ ID NO: 21127 - DNA, 38 bp, Artificial Sequence
  primer
gtaaaacgacggccagtctttgaggctaggaggtggtc

SEQ ID NO: 21128 - DNA, 38 bp, Artificial Sequence
  primer
gtaaaacgacggccagtgcgaacaacaaacaagaccag

SEQ ID NO: 21129 - DNA, 37 bp, Artificial Sequence
  primer
gtaaaacgacggccagtcagtcagaactcggtctgcg

SEQ ID NO: 21130 - DNA, 39 bp, Artificial Sequence
  primer
gtaaaacgacggccagttgaactgtttgttggactttgg

SEQ ID NO: 21131 - DNA, 38 bp, Artificial Sequence
  primer
gtaaaacgacggccagtatgacggtcaatgtgaggtcc

SEQ ID NO: 21132 - DNA, 36 bp, Artificial Sequence
  primer
gtaaaacgacggccagtcagctggtggtggtgtttg

SEQ ID NO: 21133 - DNA, 38 bp, Artificial Sequence
  primer
gtaaaacgacggccagtctactttgtgctctccctccc

SEQ ID NO: 21134 - DNA, 21 bp, Artificial Sequence
  primer
cagtttccagggcaggtaaag

SEQ ID NO: 21135 - DNA, 20 bp, Artificial Sequence
  primer
ccacgtgtaatccaccttgc

SEQ ID NO: 21136 - DNA, 38 bp, Artificial Sequence
  primer
gtaaaacgacggccagtattgggtggaggaagaaattg

SEQ ID NO: 21137 - DNA, 38 bp, Artificial Sequence
  primer
gtaaaacgacggccagtaataggtgagccaggcaagtg

SEQ ID NO: 21138 - DNA, 38 bp, Artificial Sequence
  primer
gtaaaacgacggccagttcactgtggatgcagattgtg

SEQ ID NO: 21139 - DNA, 38 bp, Artificial Sequence
  primer
gtaaaacgacggccagtcactgcccaaacattctgaag

SEQ ID NO: 21140 - DNA, 39 bp, Artificial Sequence
  primer
gtaaaacgacggccagtggcttaccaggtagcttcaacc

SEQ ID NO: 21141 - DNA, 38 bp, Artificial Sequence
  primer
gtaaaacgacggccagtatttggaagctgtgtgttcgg

SEQ ID NO: 21142 - DNA, 19 bp, Artificial Sequence
  primer
aaagttgcggtgagctgtg

SEQ ID NO: 21143 - DNA, 21 bp, Artificial Sequence
  primer
agcgactcctttcctgtcaaa

SEQ ID NO: 21144 - DNA, 25 bp, Artificial Sequence
  primer
tttactgggcatttatacaacttga

SEQ ID NO: 21145 - DNA, 19 bp, Artificial Sequence
  primer
ccacttccaggccagtgtc

SEQ ID NO: 21146 - DNA, 37 bp, Artificial Sequence
  primer
gtaaaacgacggccagtaggctaaggctcaggagctg

SEQ ID NO: 21147 - DNA, 37 bp, Artificial Sequence
  primer
gtaaaacgacggccagttctgacctggtgggagtgtc

SEQ ID NO: 21148 - DNA, 21 bp, Artificial Sequence
  primer
accatgtgtatggaggatggg

SEQ ID NO: 21149 - DNA, 18 bp, Artificial Sequence
  primer
cagctacacggtggtggg

SEQ ID NO: 21150 - DNA, 20 bp, Artificial Sequence
  primer
gacatgcacgtgtgagatgc

SEQ ID NO: 21151 - DNA, 21 bp, Artificial Sequence
  primer
atcagcctgcattagagggtt

SEQ ID NO: 21152 - DNA, 18 bp, Artificial Sequence
  primer
actttagcctgggcgacg

SEQ ID NO: 21153 - DNA, 22 bp, Artificial Sequence
  primer
tgttgaatttctgtgaagctgg

SEQ ID NO: 21154 - DNA, 21 bp, Artificial Sequence
  primer
gtagcaccaggcagcatctac

SEQ ID NO: 21155 - DNA, 44 bp, Artificial Sequence
  primer
gtaaaacgacggccagtgaaatatgaagctatcttacagccaag

SEQ ID NO: 21156 - DNA, 40 bp, Artificial Sequence
  primer
gtaaaacgacggccagttctcattaagtctgggtttgtgc

SEQ ID NO: 21157 - DNA, 38 bp, Artificial Sequence
  primer
gtaaaacgacggccagtcccatggaaactaactggaaa

SEQ ID NO: 21158 - DNA, 21 bp, Artificial Sequence
  primer
tgcacatcatttcagcatcag

SEQ ID NO: 21159 - DNA, 41 bp, Artificial Sequence
  primer
gtaaaacgacggccagtagtatgaagataccatttgaggct

SEQ ID NO: 21160 - DNA, 38 bp, Artificial Sequence
  primer
gtaaaacgacggccagtattgccaaatgagtgaatggg

SEQ ID NO: 21161 - DNA, 38 bp, Artificial Sequence
  primer
gtaaaacgacggccagtctctgcccttaatcaagatgg

SEQ ID NO: 21162 - DNA, 38 bp, Artificial Sequence
  primer
gtaaaacgacggccagttcagggatagagggtgaggag

SEQ ID NO: 21163 - DNA, 19 bp, Artificial Sequence
  primer
ctacagcgagctgctcagg

SEQ ID NO: 21164 - DNA, 18 bp, Artificial Sequence
  primer
cagctgctggaggactcg

SEQ ID NO: 21165 - DNA, 38 bp, Artificial Sequence
  primer
gtaaaacgacggccagttcagtaagcccagaggtctcc

SEQ ID NO: 21166 - DNA, 38 bp, Artificial Sequence
  primer
gtaaaacgacggccagtgatgagggttggcaggtttac

SEQ ID NO: 21167 - DNA, 38 bp, Artificial Sequence
  primer
gtaaaacgacggccagtagcgagacagcagttcctgag

SEQ ID NO: 21168 - DNA, 38 bp, Artificial Sequence
  primer
gtaaaacgacggccagtccagtgtccaagttgtggatg

SEQ ID NO: 21169 - DNA, 38 bp, Artificial Sequence
  primer
gtaaaacgacggccagtgtgcagcgggacatagtacag

SEQ ID NO: 21170 - DNA, 21 bp, Artificial Sequence
  primer
agaagtgaggaaggtgaaccg

SEQ ID NO: 21171 - DNA, 20 bp, Artificial Sequence
  primer
gcactgaggctgcagaagtc

SEQ ID NO: 21172 - DNA, 38 bp, Artificial Sequence
  primer
gtaaaacgacggccagttctgtctccttagctgctggc

SEQ ID NO: 21173 - DNA, 38 bp, Artificial Sequence
  primer
gtaaaacgacggccagtaaatggtgacagagagggctg

SEQ ID NO: 21174 - DNA, 21 bp, Artificial Sequence
  primer
agggtctgaaacagaggaggg

SEQ ID NO: 21175 - DNA, 35 bp, Artificial Sequence
  primer
gtaaaacgacggccagtttcgttccctgatggctg

SEQ ID NO: 21176 - DNA, 38 bp, Artificial Sequence
  primer
gtaaaacgacggccagttgcttcctgtgatgtgaggat

SEQ ID NO: 21177 - DNA, 21 bp, Artificial Sequence
  primer
ggaaggctagttcttgggtcc

SEQ ID NO: 21178 - DNA, 38 bp, Artificial Sequence
  primer
gtaaaacgacggccagtccctcagtggacagaggtgac

SEQ ID NO: 21179 - DNA, 38 bp, Artificial Sequence
  primer
gtaaaacgacggccagtgccacagtatcgttgaaggtg

SEQ ID NO: 21180 - DNA, 38 bp, Artificial Sequence
  primer
gtaaaacgacggccagtgtgggtcagaggtcatgtttg

SEQ ID NO: 21181 - DNA, 37 bp, Artificial Sequence
  primer
gtaaaacgacggccagtcttcggttcttctccgtgtc

SEQ ID NO: 21182 - DNA, 21 bp, Artificial Sequence
  primer
ccgaggagagtgctcctgtag

SEQ ID NO: 21183 - DNA, 36 bp, Artificial Sequence
  primer
gtaaaacgacggccagtaatgcctcctgagactggg

SEQ ID NO: 21184 - DNA, 21 bp, Artificial Sequence
  primer
agcctaactcccactggaacc

SEQ ID NO: 21185 - DNA, 38 bp, Artificial Sequence
  primer
gtaaaacgacggccagtactccttccctctcacccttg

SEQ ID NO: 21186 - DNA, 20 bp, Artificial Sequence
  primer
agggtcccaggtgaagactg

SEQ ID NO: 21187 - DNA, 21 bp, Artificial Sequence
  primer
aaactgaggcagaggttgagc

SEQ ID NO: 21188 - DNA, 21 bp, Artificial Sequence
  primer
ggctgcatccgtcatgttaag

SEQ ID NO: 21189 - DNA, 36 bp, Artificial Sequence
  primer
gtaaaacgacggccagtgtgctgaggcagaggtgtg

SEQ ID NO: 21190 - DNA, 38 bp, Artificial Sequence
  primer
gtaaaacgacggccagtgtctagctggagctgaccagg

SEQ ID NO: 21191 - DNA, 20 bp, Artificial Sequence
  primer
actgccacagtagccctgac

SEQ ID NO: 21192 - DNA, 21 bp, Artificial Sequence
  primer
actggcttctgagtcacaggg

SEQ ID NO: 21193 - DNA, 38 bp, Artificial Sequence
  primer
gtaaaacgacggccagtagctcgattccgactcatctc

SEQ ID NO: 21194 - DNA, 35 bp, Artificial Sequence
  primer
gtaaaacgacggccagtgggtggatggcagagcac

SEQ ID NO: 21195 - DNA, 35 bp, Artificial Sequence
  primer
gtaaaacgacggccagttcctcacctgcccatgtc

SEQ ID NO: 21196 - DNA, 38 bp, Artificial Sequence
  primer
gtaaaacgacggccagtgtctctcagacctacggccac

SEQ ID NO: 21197 - DNA, 36 bp, Artificial Sequence
  primer
gtaaaacgacggccagtctgacgcttacggcacatc

SEQ ID NO: 21198 - DNA, 18 bp, Artificial Sequence
  primer
gccgtaagagagcgggac

SEQ ID NO: 21199 - DNA, 36 bp, Artificial Sequence
  primer
gtaaaacgacggccagtcctccatgtcctcaccctg

SEQ ID NO: 21200 - DNA, 21 bp, Artificial Sequence
  primer
cagtggttggaatcacctgtc

SEQ ID NO: 21201 - DNA, 20 bp, Artificial Sequence
  primer
agacatcagcatcagcgacc

SEQ ID NO: 21202 - DNA, 38 bp, Artificial Sequence
  primer
gtaaaacgacggccagttaccaatggatcaaatgccag

SEQ ID NO: 21203 - DNA, 38 bp, Artificial Sequence
  primer
gtaaaacgacggccagtacctgtcccagacctacatgg

SEQ ID NO: 21204 - DNA, 37 bp, Artificial Sequence
  primer
gtaaaacgacggccagtagctcatgccttgtttgctg

SEQ ID NO: 21205 - DNA, 38 bp, Artificial Sequence
  primer
gtaaaacgacggccagttgacctacttctcaggcctcc

SEQ ID NO: 21206 - DNA, 19 bp, Artificial Sequence
  primer
aggcacaggttcagcttgg

SEQ ID NO: 21207 - DNA, 38 bp, Artificial Sequence
  primer
gtaaaacgacggccagtccctgtgtctctgtagcctcc

SEQ ID NO: 21208 - DNA, 38 bp, Artificial Sequence
  primer
gtaaaacgacggccagtcaacaagactggaagcaggtg

SEQ ID NO: 21209 - DNA, 21 bp, Artificial Sequence
  primer
agaatcggaggaaccgagaac

SEQ ID NO: 21210 - DNA, 38 bp, Artificial Sequence
  primer
gtaaaacgacggccagttcactcccaattctctgcaac

SEQ ID NO: 21211 - DNA, 36 bp, Artificial Sequence
  primer
gtaaaacgacggccagtccgagggttaggtggaagg

SEQ ID NO: 21212 - DNA, 18 bp, Artificial Sequence
  primer
tttgcaaagttcccgagc

SEQ ID NO: 21213 - DNA, 36 bp, Artificial Sequence
  primer
gtaaaacgacggccagtccctcccattggtcctagc

SEQ ID NO: 21214 - DNA, 38 bp, Artificial Sequence
  primer
gtaaaacgacggccagtcagtggacatatcctggaggc

SEQ ID NO: 21215 - DNA, 21 bp, Artificial Sequence
  primer
tgtatctgctgttcggctacg

SEQ ID NO: 21216 - DNA, 21 bp, Artificial Sequence
  primer
cagtaggacgtctgatggtgg

SEQ ID NO: 21217 - DNA, 21 bp, Artificial Sequence
  primer
cgacttgtcatgctcatagcc

SEQ ID NO: 21218 - DNA, 37 bp, Artificial Sequence
  primer
gtaaaacgacggccagtcgtctcagcattcctccaac

SEQ ID NO: 21219 - DNA, 20 bp, Artificial Sequence
  primer
tggccttaggacccaacttc

SEQ ID NO: 21220 - DNA, 38 bp, Artificial Sequence
  primer
gtaaaacgacggccagtgtccgggtccaaaggtaagtc

SEQ ID NO: 21221 - DNA, 21 bp, Artificial Sequence
  primer
acacggatgtgaaggtaaggg

SEQ ID NO: 21222 - DNA, 35 bp, Artificial Sequence
  primer
gtaaaacgacggccagtcagtgacgcagggcagac

SEQ ID NO: 21223 - DNA, 38 bp, Artificial Sequence
  primer
gtaaaacgacggccagtcaccggacacataaggcaaac

SEQ ID NO: 21224 - DNA, 21 bp, Artificial Sequence
  primer
tccagaagcgtaaccatgaac

SEQ ID NO: 21225 - DNA, 21 bp, Artificial Sequence
  primer
aaactggacaagggagtggag

SEQ ID NO: 21226 - DNA, 21 bp, Artificial Sequence
  primer
tggtctcaaaccctaggttcc

SEQ ID NO: 21227 - DNA, 19 bp, Artificial Sequence
  primer
cctctccaccaacccagag

SEQ ID NO: 21228 - DNA, 38 bp, Artificial Sequence
  primer
gtaaaacgacggccagtcaggaacatcttcttccctgg

SEQ ID NO: 21229 - DNA, 35 bp, Artificial Sequence
  primer
gtaaaacgacggccagtgcagccgaggttccagag

SEQ ID NO: 21230 - DNA, 21 bp, Artificial Sequence
  primer
ctgctcctcactgactttggc

SEQ ID NO: 21231 - DNA, 35 bp, Artificial Sequence
  primer
gtaaaacgacggccagtggaggagacacggccaag

SEQ ID NO: 21232 - DNA, 38 bp, Artificial Sequence
  primer
gtaaaacgacggccagtaacttcaagtcctggtgggtg

SEQ ID NO: 21233 - DNA, 19 bp, Artificial Sequence
  primer
ggcgacagcagtgtaccag

SEQ ID NO: 21234 - DNA, 38 bp, Artificial Sequence
  primer
gtaaaacgacggccagtcttcagaggagggaggtgttg

SEQ ID NO: 21235 - DNA, 18 bp, Artificial Sequence
  primer
ctctccgcatctcccacc

SEQ ID NO: 21236 - DNA, 20 bp, Artificial Sequence
  primer
atctggctagatgtcgtggg

SEQ ID NO: 21237 - DNA, 37 bp, Artificial Sequence
  primer
gtaaaacgacggccagtcttctccatctgccgatttg

SEQ ID NO: 21238 - DNA, 20 bp, Artificial Sequence
  primer
cttctggcctcaagtgatcg

SEQ ID NO: 21239 - DNA, 21 bp, Artificial Sequence
  primer
acaacatccctgacatcaagc

SEQ ID NO: 21240 - DNA, 38 bp, Artificial Sequence
  primer
gtaaaacgacggccagttccattccaggactctatgcc

SEQ ID NO: 21241 - DNA, 39 bp, Artificial Sequence
  primer
gtaaaacgacggccagtggacaatgacttcctcagttgc

SEQ ID NO: 21242 - DNA, 21 bp, Artificial Sequence
  primer
gaaggagacagtcagggttgg

SEQ ID NO: 21243 - DNA, 35 bp, Artificial Sequence
  primer
gtaaaacgacggccagtcatcccagcgttctctgc

SEQ ID NO: 21244 - DNA, 35 bp, Artificial Sequence
  primer
gtaaaacgacggccagtccatcacgtaggcccttg

SEQ ID NO: 21245 - DNA, 21 bp, Artificial Sequence
  primer
cttccagtcccttcccattag

SEQ ID NO: 21246 - DNA, 21 bp, Artificial Sequence
  primer
atcccaagtgtccatgtaggg

SEQ ID NO: 21247 - DNA, 38 bp, Artificial Sequence
  primer
gtaaaacgacggccagtgtttcctaagaatgggcaggg

SEQ ID NO: 21248 - DNA, 38 bp, Artificial Sequence
  primer
gtaaaacgacggccagtaacgaggagaacaagggtgag

SEQ ID NO: 21249 - DNA, 38 bp, Artificial Sequence; identical to SEQ ID NO: 21248
  primer

SEQ ID NO: 21250 - DNA, 37 bp, Artificial Sequence
  primer
gtaaaacgacggccagttcttcatcggtgagtgtccc

SEQ ID NO: 21251 - DNA, 38 bp, Artificial Sequence
  primer
gtaaaacgacggccagtagatgctggagatgaacatgg

SEQ ID NO: 21252 - DNA, 38 bp, Artificial Sequence
  primer
gtaaaacgacggccagtgtcacctcctggctcttcatc

SEQ ID NO: 21253 - DNA, 21 bp, Artificial Sequence
  primer
ttcggttggttcttcttccac

SEQ ID NO: 21254 - DNA, 27 bp, Artificial Sequence
  primer
aaagtcaaatgttatcagatggtgttc

SEQ ID NO: 21255 - DNA, 38 bp, Artificial Sequence
  primer
gtaaaacgacggccagtatgccagtgagccacacatag

SEQ ID NO: 21256 - DNA, 38 bp, Artificial Sequence
  primer
gtaaaacgacggccagtcctccgactatgaactccagg

SEQ ID NO: 21257 - DNA, 43 bp, Artificial Sequence
  primer
gtaaaacgacggccagttttccgttatagctaaatgttaccag

SEQ ID NO: 21258 - DNA, 38 bp, Artificial Sequence
  primer
gtaaaacgacggccagtatgagtttgctttcctttggc

SEQ ID NO: 21259 - DNA, 39 bp, Artificial Sequence
  primer
gtaaaacgacggccagtaaacacgtcaaagctacttggg

SEQ ID NO: 21260 - DNA, 21 bp, Artificial Sequence
  primer
agggctacatgagtggaggag

SEQ ID NO: 21261 - DNA, 21 bp, Artificial Sequence
  primer
gttcctctgctttaccttgcc

SEQ ID NO: 21262 - DNA, 39 bp, Artificial Sequence
  primer
gtaaaacgacggccagtcatggaaatagaatgcaccacc

SEQ ID NO: 21263 - DNA, 38 bp, Artificial Sequence
  primer
gtaaaacgacggccagtctttgggctgcagtaaaggag

SEQ ID NO: 21264 - DNA, 23 bp, Artificial Sequence
  primer
gaatatgtgggtatggaaggagg

SEQ ID NO: 21265 - DNA, 38 bp, Artificial Sequence
  primer
gtaaaacgacggccagtacgtgcaaggaaagacctagc

SEQ ID NO: 21266 - DNA, 21 bp, Artificial Sequence
  primer
gctgctctagccgtatgtgtg

SEQ ID NO: 21267 - DNA, 20 bp, Artificial Sequence
  primer
agacagagccagcagggttc

SEQ ID NO: 21268 - DNA, 38 bp, Artificial Sequence
  primer
gtaaaacgacggccagtggagaaggcaagaggaatcag

SEQ ID NO: 21269 - DNA, 21 bp, Artificial Sequence
  primer
acagagggactgagatccacg

SEQ ID NO: 21270 - DNA, 21 bp, Artificial Sequence
  primer
cacactcagatacaggcaggg

SEQ ID NO: 21271 - DNA, 20 bp, Artificial Sequence
  primer
tgccttatgcttgccatttc

SEQ ID NO: 21272 - DNA, 35 bp, Artificial Sequence
  primer
gtaaaacgacggccagtgggctcagtgccagaaac

SEQ ID NO: 21273 - DNA, 38 bp, Artificial Sequence
  primer
gtaaaacgacggccagtgaatggattccagctgacgag

SEQ ID NO: 21274 - DNA, 24 bp, Artificial Sequence
  primer
aatgcattcatttgtcttaaaccc

SEQ ID NO: 21275 - DNA, 42 bp, Artificial Sequence
  primer
gtaaaacgacggccagtaccaatcataaagcatgatatgttc

SEQ ID NO: 21276 - DNA, 37 bp, Artificial Sequence
  primer
gtaaaacgacggccagtattccctcgctctggttctc

SEQ ID NO: 21277 - DNA, 38 bp, Artificial Sequence
  primer
gtaaaacgacggccagttttcaggctgcatgtaccaag

SEQ ID NO: 21278 - DNA, 21 bp, Artificial Sequence
  primer
tgcaaacatttgctgttcctc

SEQ ID NO: 21279 - DNA, 21 bp, Artificial Sequence
  primer
cattctcaagctgctccagtg

SEQ ID NO: 21280 - DNA, 38 bp, Artificial Sequence
  primer
gtaaaacgacggccagtttctgccatcacaaattgacc

SEQ ID NO: 21281 - DNA, 21 bp, Artificial Sequence
  primer
ttccaatacccagcttgcttc

SEQ ID NO: 21282 - DNA, 42 bp, Artificial Sequence; identical to SEQ ID NO: 21275
  primer

SEQ ID NO: 21283 - DNA, 38 bp, Artificial Sequence
  primer
gtaaaacgacggccagtcatctgactaggcacctgtgg

SEQ ID NO: 21284 - DNA, 38 bp, Artificial Sequence
  primer
gtaaaacgacggccagtggtcccaccctaaggtactgg

SEQ ID NO: 21285 - DNA, 20 bp, Artificial Sequence
  primer
accttggccgatactgaagg

SEQ ID NO: 21286 - DNA, 22 bp, Artificial Sequence
  primer
gggaagagtggtggtaacttgc

SEQ ID NO: 21287 - DNA, 38 bp, Artificial Sequence
  primer
gtaaaacgacggccagtgggaaccagactcaacctcag

SEQ ID NO: 21288 - DNA, 21 bp, Artificial Sequence
  primer
cccagagaagatggtgactcc

SEQ ID NO: 21289 - DNA, 38 bp, Artificial Sequence
  primer
gtaaaacgacggccagtaaagaggatccatcatcccag

SEQ ID NO: 21290 - DNA, 21 bp, Artificial Sequence
  primer
accttccaatgacgagaggac

SEQ ID NO: 21291 - DNA, 38 bp, Artificial Sequence
  primer
gtaaaacgacggccagtgggttgtggaaggtagggttc

SEQ ID NO: 21292 - DNA, 38 bp, Artificial Sequence
  primer
gtaaaacgacggccagtgacatctgggaggagctgaag

SEQ ID NO: 21293 - DNA, 35 bp, Artificial Sequence
  primer
gtaaaacgacggccagtgacccaggctggagctga

SEQ ID NO: 21294 - DNA, 21 bp, Artificial Sequence
  primer
cctgctgtggacttgagtctg

SEQ ID NO: 21295 - DNA, 38 bp, Artificial Sequence
  primer
gtaaaacgacggccagttcacacagcaccagaagaagg

SEQ ID NO: 21296 - DNA, 38 bp, Artificial Sequence
  primer
gtaaaacgacggccagttgtcccgtgggagttagtagg

SEQ ID NO: 21297 - DNA, 37 bp, Artificial Sequence
  primer
gtaaaacgacggccagtgaggaaatgtggatgccagt

SEQ ID NO: 21298 - DNA, 20 bp, Artificial Sequence
  primer
gagcactcttgaccactggg

SEQ ID NO: 21299 - DNA, 21 bp, Artificial Sequence
  primer
ttactgcctggaggagaaagc

SEQ ID NO: 21300 - DNA, 21 bp, Artificial Sequence
  primer
ccttctatctgtggtgtcccg

SEQ ID NO: 21301 - DNA, 38 bp, Artificial Sequence
  primer
gtaaaacgacggccagtaatttgtcccactttggttgc

SEQ ID NO: 21302 - DNA, 39 bp, Artificial Sequence
  primer
gtaaaacgacggccagtttgggtatgttagctttcctgc

SEQ ID NO: 21303 - DNA, 24 bp, Artificial Sequence
  primer
gaattctaaactgcgatctgaacc

SEQ ID NO: 21304 - DNA, 21 bp, Artificial Sequence
  primer
aacagatgggattgatgaggc

SEQ ID NO: 21305 - DNA, 38 bp, Artificial Sequence
  primer
gtaaaacgacggccagtccttagagtacccaagtgccc

SEQ ID NO: 21306 - DNA, 38 bp, Artificial Sequence
  primer
gtaaaacgacggccagtatgtgtggatctcacctgctg

SEQ ID NO: 21307 - DNA, 22 bp, Artificial Sequence
  primer
tcatttgctatgacccacattg

SEQ ID NO: 21308 - DNA, 38 bp, Artificial Sequence
  primer
gtaaaacgacggccagttggtgagtcacttctccaagc

SEQ ID NO: 21309 - DNA, 22 bp, Artificial Sequence
  primer
gccattaatatcccagagagca

SEQ ID NO: 21310 - DNA, 47 bp, Artificial Sequence
  primer
gtaaaacgacggccagtcttatttacattcaaggtattaacctccta

SEQ ID NO: 21311 - DNA, 24 bp, Artificial Sequence
  primer
tgtagagatctttcgtctccttgg

SEQ ID NO: 21312 - DNA, 38 bp, Artificial Sequence
  primer
gtaaaacgacggccagtcaaacctggcaagattccatc

SEQ ID NO: 21313 - DNA, 27 bp, Artificial Sequence
  primer
tgtttagagcaaggaacagtatatgag

SEQ ID NO: 21314 - DNA, 40 bp, Artificial Sequence
  primer
gtaaaacgacggccagtacttcagtttggttccagttcag

SEQ ID NO: 21315 - DNA, 25 bp, Artificial Sequence
  primer
catcaccaaatgaatggtgtagtag

SEQ ID NO: 21316 - DNA, 19 bp, Artificial Sequence
  primer
cccatggccctgtaacttg

SEQ ID NO: 21317 - DNA, 29 bp, Artificial Sequence
  primer
catctctttggagcataataataatagga

SEQ ID NO: 21318 - DNA, 39 bp, Artificial Sequence
  primer
gtaaaacgacggccagtgataatgcccttgctcagtagg

SEQ ID NO: 21319 - DNA, 21 bp, Artificial Sequence
  primer
ccctttcctcagttctcaagc

SEQ ID NO: 21320 - DNA, 20 bp, Artificial Sequence
  primer
gacacaggcacgatcatttc

SEQ ID NO: 21321 - DNA, 22 bp, Artificial Sequence
  primer
ggtgaacttccactttgtctgg

SEQ ID NO: 21322 - DNA, 38 bp, Artificial Sequence
  primer
gtaaaacgacggccagtatcagttcctcaatagcggtg

SEQ ID NO: 21323 - DNA, 38 bp, Artificial Sequence
  primer
gtaaaacgacggccagttacccagctgcaggattagtg

SEQ ID NO: 21324 - DNA, 37 bp, Artificial Sequence
  primer
gtaaaacgacggccagtccaggaaacttgctaccgtg

SEQ ID NO: 21325 - DNA, 22 bp, Artificial Sequence
  primer
gaagcacgagtaatttggaagc

SEQ ID NO: 21326 - DNA, 24 bp, Artificial Sequence
  primer
gcttcccttatttctacccttcag

SEQ ID NO: 21327 - DNA, 27 bp, Artificial Sequence
  primer
caaatgttatagtgattgtgttatggc

SEQ ID NO: 21328 - DNA, 38 bp, Artificial Sequence
  primer
gtaaaacgacggccagttgagtccagctgtgtgagacc

SEQ ID NO: 21329 - DNA, 38 bp, Artificial Sequence
  primer
gtaaaacgacggccagttgtgtgtgcatgtccttgttg

SEQ ID NO: 21330 - DNA, 26 bp, Artificial Sequence
  primer
agtttggtctcaacacttctatgaac

SEQ ID NO: 21331 - DNA, 35 bp, Artificial Sequence
  primer
gtaaaacgacggccagtatggtgtgaacccgggag

SEQ ID NO: 21332 - DNA, 22 bp, Artificial Sequence
  primer
tgttcaaggaattgaaacccag

SEQ ID NO: 21333 - DNA, 21 bp, Artificial Sequence
  primer
gtaggaaggcctgatttggtg

SEQ ID NO: 21334 - DNA, 37 bp, Artificial Sequence
  primer
gtaaaacgacggccagtgggccaggatttgattacag

SEQ ID NO: 21335 - DNA, 37 bp, Artificial Sequence
  primer
gtaaaacgacggccagttcagatctccagaactgggc

SEQ ID NO: 21336 - DNA, 37 bp, Artificial Sequence
  primer
gtaaaacgacggccagtctgcttggctcttgagcatc

SEQ ID NO: 21337 - DNA, 40 bp, Artificial Sequence
  primer
gtaaaacgacggccagtgtccaagaaatgccttggtttag

SEQ ID NO: 21338 - DNA, 21 bp, Artificial Sequence
  primer
gtttgctttggacatgtctgc

SEQ ID NO: 21339 - DNA, 21 bp, Artificial Sequence
  primer
tttcttcaaggaggctgaagg

SEQ ID NO: 21340 - DNA, 24 bp, Artificial Sequence
  primer
cccatgtactgttaatcagggaag

SEQ ID NO: 21341 - DNA, 20 bp, Artificial Sequence
  primer
tttcatctgggaggtgcaag

SEQ ID NO: 21342 - DNA, 38 bp, Artificial Sequence
  primer
gtaaaacgacggccagtgcatttacttgctgccaagag

SEQ ID NO: 21343 - DNA, 38 bp, Artificial Sequence
  primer
gtaaaacgacggccagttcccttgacctagtgaggatg

SEQ ID NO: 21344 - DNA, 38 bp, Artificial Sequence
  primer
gtaaaacgacggccagtagaactgtagtcgcagagccc

SEQ ID NO: 21345 - DNA, 38 bp, Artificial Sequence
  primer
gtaaaacgacggccagtgagacgacacttgtgctaggg

SEQ ID NO: 21346 - DNA, 20 bp, Artificial Sequence
  primer
catcttacacagtggcaggc

SEQ ID NO: 21347 - DNA, 21 bp, Artificial Sequence
  primer
caattacctcccacgacatgc

SEQ ID NO: 21348 - DNA, 38 bp, Artificial Sequence
  primer
gtaaaacgacggccagtccacccaggtcagaggtacag

SEQ ID NO: 21349 - DNA, 38 bp, Artificial Sequence
  primer
gtaaaacgacggccagttttgtccctcttccaggtagc

SEQ ID NO: 21350 - DNA, 20 bp, Artificial Sequence
  primer
tgggcaacagagactccatc

SEQ ID NO: 21351 - DNA, 38 bp, Artificial Sequence
  primer
gtaaaacgacggccagtcagtgctgaagcgtttcaaag

SEQ ID NO: 21352 - DNA, 21 bp, Artificial Sequence
  primer
gtctgggagaggatgtgatgg

SEQ ID NO: 21353 - DNA, 21 bp, Artificial Sequence
  primer
tgtttgtggagtggtaggtgg

SEQ ID NO: 21354 - DNA, 36 bp, Artificial Sequence
  primer
gtaaaacgacggccagtcctcacatccctcccagag

SEQ ID NO: 21355 - DNA, 35 bp, Artificial Sequence
  primer
gtaaaacgacggccagttgctgaggagatggcgtc

SEQ ID NO: 21356 - DNA, 21 bp, Artificial Sequence
  primer
tccactagatgcggtttcagt

SEQ ID NO: 21357 - DNA, 38 bp, Artificial Sequence
  primer
gtaaaacgacggccagttatgagaaagaaatcctgcgg

SEQ ID NO: 21358 - DNA, 25 bp, Artificial Sequence
  primer
cagtcccactcattatctcattcac

SEQ ID NO: 21359 - DNA, 24 bp, Artificial Sequence
  primer
gagagactgggatgatgaagaaag

SEQ ID NO: 21360 - DNA, 38 bp, Artificial Sequence
  primer
gtaaaacgacggccagttgctctcaagttgctcattgc

SEQ ID NO: 21361 - DNA, 40 bp, Artificial Sequence
  primer
gtaaaacgacggccagttcgatgaactgatactttgagca

SEQ ID NO: 21362 - DNA, 21 bp, Artificial Sequence
  primer
acacacacacacacacacacg

SEQ ID NO: 21363 - DNA, 26 bp, Artificial Sequence
  primer
tgcacgtaactcaatgtttatagtgg

SEQ ID NO: 21364 - DNA, 21 bp, Artificial Sequence
  primer
gcaacaaagcaagactccatc

SEQ ID NO: 21365 - DNA, 36 bp, Artificial Sequence
  primer
gtaaaacgacggccagtgactccctgatcccagctc

SEQ ID NO: 21366 - DNA, 20 bp, Artificial Sequence
  primer
ggtaaggcggatttcaggtc

SEQ ID NO: 21367 - DNA, 24 bp, Artificial Sequence
  primer
gggcctatacatatctgggagttc

SEQ ID NO: 21368 - DNA, 22 bp, Artificial Sequence
  primer
tgccacctaaattctgtgtgtg

SEQ ID NO: 21369 - DNA, 21 bp, Artificial Sequence
  primer
gtgccctcaatgctatcacag

SEQ ID NO: 21370 - DNA, 23 bp, Artificial Sequence
  primer
ggtagctactacagaccaggcac

SEQ ID NO: 21371 - DNA, 21 bp, Artificial Sequence
  primer
agaggttggtgcagaagttgg

SEQ ID NO: 21372 - DNA, 19 bp, Artificial Sequence
  primer
ttaaagcgggccacacaac

SEQ ID NO: 21373 - DNA, 18 bp, Artificial Sequence
  primer
taaagcgggccacacaac

SEQ ID NO: 21374 - DNA, 21 bp, Artificial Sequence
  primer
cattgagtaaagccttgcgtg

SEQ ID NO: 21375 - DNA, 38 bp, Artificial Sequence
  primer
gtaaaacgacggccagtaagtgatgagaggtgggtgtg

SEQ ID NO: 21376 - DNA, 21 bp, Artificial Sequence
  primer
agcatatgcctgtagtcccag

SEQ ID NO: 21377 - DNA, 19 bp, Artificial Sequence
  primer
gtacctcgcaagcccagtc

SEQ ID NO: 21378 - DNA, 35 bp, Artificial Sequence
  primer
gtaaaacgacggccagtctctcacacctctcgccc

SEQ ID NO: 21379 - DNA, 38 bp, Artificial Sequence
  primer
gtaaaacgacggccagtgtgctgaaatgggaatcattg

SEQ ID NO: 21380 - DNA, 23 bp, Artificial Sequence
  primer
cgtaactcactcccaaacttgaa

SEQ ID NO: 21381 - DNA, 40 bp, Artificial Sequence
  primer
gtaaaacgacggccagtttccttatgagtttagggcttgg

SEQ ID NO: 21382 - DNA, 38 bp, Artificial Sequence
  primer
gtaaaacgacggccagtgccatctcaaatcctctgtgg

SEQ ID NO: 21383 - DNA, 40 bp, Artificial Sequence
  primer
gtaaaacgacggccagtttgctgaaagaatgaaagtcagg

SEQ ID NO: 21384 - DNA, 37 bp, Artificial Sequence
  primer
gtaaaacgacggccagtagcagagtggacgagaggtg

SEQ ID NO: 21385 - DNA, 38 bp, Artificial Sequence
  primer
gtaaaacgacggccagtgggaagacatgggtaacaagc

SEQ ID NO: 21386 - DNA, 38 bp, Artificial Sequence
  primer
gtaaaacgacggccagttgcaataatgcagaagcacac

SEQ ID NO: 21387 - DNA, 21 bp, Artificial Sequence
  primer
gcccagagctgttaaatcagg

SEQ ID NO: 21388 - DNA, 21 bp, Artificial Sequence
  primer
tccagacaactcgtcaccttg

SEQ ID NO: 21389 - DNA, 20 bp, Artificial Sequence
  primer
gcaggagaaccaaaggcatc

SEQ ID NO: 21390 - DNA, 38 bp, Artificial Sequence
  primer
gtaaaacgacggccagtgggccattgtgaaacattgat

SEQ ID NO: 21391 - DNA, 21 bp, Artificial Sequence
  primer
ctcttctccctggaagattgg

SEQ ID NO: 21392 - DNA, 41 bp, Artificial Sequence
  primer
gtaaaacgacggccagttgaggaatcagtgaaactgtaagc

SEQ ID NO: 21393 - DNA, 39 bp, Artificial Sequence
  primer
gtaaaacgacggccagtttgcaagtattacattggctcg

SEQ ID NO: 21394 - DNA, 21 bp, Artificial Sequence
  primer
taatctttcctggatggctgc

SEQ ID NO: 21395 - DNA, 38 bp, Artificial Sequence
  primer
gtaaaacgacggccagtgggataaatcactgtgcctgg

SEQ ID NO: 21396 - DNA, 21 bp, Artificial Sequence
  primer
tatgacctaatcactccgccc

SEQ ID NO: 21397 - DNA, 37 bp, Artificial Sequence
  primer
gtaaaacgacggccagtacaggtgtaagccaccatgc

SEQ ID NO: 21398 - DNA, 20 bp, Artificial Sequence
  primer
tttggagtgggagtcaatgc

SEQ ID NO: 21399 - DNA, 21 bp, Artificial Sequence
  primer
cctctgcttctcctctttccc

SEQ ID NO: 21400 - DNA, 23 bp, Artificial Sequence
  primer
ccctgatgttaaagtagggatgc

SEQ ID NO: 21401 - DNA, 38 bp, Artificial Sequence
  primer
gtaaaacgacggccagtcaggaaggagtcactggtgtg

SEQ ID NO: 21402 - DNA, 39 bp, Artificial Sequence
  primer
gtaaaacgacggccagttgcaggtttactgtctcgtgtg

SEQ ID NO: 21403 - DNA, 42 bp, Artificial Sequence
  primer
gtaaaacgacggccagttttgttcagatttcagcagtatgtg

SEQ ID NO: 21404 - DNA, 21 bp, Artificial Sequence
  primer
ccaaataaggaaggctgatgg

SEQ ID NO: 21405 - DNA, 38 bp, Artificial Sequence
  primer
gtaaaacgacggccagtcttacgctggtttgcaatgag

SEQ ID NO: 21406 - DNA, 21 bp, Artificial Sequence
  primer
caagccagtgcctccttaaac

SEQ ID NO: 21407 - DNA, 41 bp, Artificial Sequence
  primer
gtaaaacgacggccagtgtggttctaaatgcagactaccag

SEQ ID NO: 21408 - DNA, 21 bp, Artificial Sequence
  primer
cgatgtagcaaagcacagtga

SEQ ID NO: 21409 - DNA, 38 bp, Artificial Sequence
  primer
gtaaaacgacggccagttctgtcatggaaatttgtccc

SEQ ID NO: 21410 - DNA, 21 bp, Artificial Sequence
  primer
gggaatgtctgtgtcccaaag

SEQ ID NO: 21411 - DNA, 38 bp, Artificial Sequence
  primer
gtaaaacgacggccagtaatcaggtgaacttggttgcc

SEQ ID NO: 21412 - DNA, 22 bp, Artificial Sequence
  primer
cttggatccacacacaattcag

SEQ ID NO: 21413 - DNA, 44 bp, Artificial Sequence
  primer
gtaaaacgacggccagttcttaggagtagggtcttctttctagc

SEQ ID NO: 21414 - DNA, 43 bp, Artificial Sequence
  primer
gtaaaacgacggccagtgttagaagactccctctacctacctg

SEQ ID NO: 21415 - DNA, 38 bp, Artificial Sequence
  primer
gtaaaacgacggccagtaaactgctgccttgcctagag

SEQ ID NO: 21416 - DNA, 38 bp, Artificial Sequence
  primer
gtaaaacgacggccagtcctccaaacagctgtggaatc

SEQ ID NO: 21417 - DNA, 38 bp, Artificial Sequence
  primer
gtaaaacgacggccagttactcagtgggcgaatacagg

SEQ ID NO: 21418 - DNA, 38 bp, Artificial Sequence
  primer
gtaaaacgacggccagtccaagcatccatgaacaagac

SEQ ID NO: 21419 - DNA, 21 bp, Artificial Sequence
  primer
gtttccctttccttcaaagcc

SEQ ID NO: 21420 - DNA, 21 bp, Artificial Sequence
  primer
tagaaggactgcagatcggtg

SEQ ID NO: 21421 - DNA, 38 bp, Artificial Sequence
  primer
gtaaaacgacggccagtatgcctttatatttggctggg

SEQ ID NO: 21422 - DNA, 37 bp, Artificial Sequence
  primer
gtaaaacgacggccagtagaggaaagcggattgttgg

SEQ ID NO: 21423 - DNA, 38 bp, Artificial Sequence
  primer
gtaaaacgacggccagtctggctaacattgcccagaag

SEQ ID NO: 21424 - DNA, 38 bp, Artificial Sequence
  primer
gtaaaacgacggccagtttggaggcacacagtcaactc

SEQ ID NO: 21425 - DNA, 21 bp, Artificial Sequence
  primer
agggcctctgggaaagtctac

SEQ ID NO: 21426 - DNA, 21 bp, Artificial Sequence
  primer
aggagcccagactcttccttc

SEQ ID NO: 21427 - DNA, 21 bp, Artificial Sequence
  primer
gattggacgggacttagatgg

SEQ ID NO: 21428 - DNA, 21 bp, Artificial Sequence
  primer
ggtaagggatgtttcaggcac

SEQ ID NO: 21429 - DNA, 38 bp, Artificial Sequence
  primer
gtaaaacgacggccagtcaccatattggccagacacac

SEQ ID NO: 21430 - DNA, 38 bp, Artificial Sequence
  primer
gtaaaacgacggccagtaactgctttaatcctgggtgc

SEQ ID NO: 21431 - DNA, 21 bp, Artificial Sequence
  primer
tttctgattgatcttcagccc

SEQ ID NO: 21432 - DNA, 21 bp, Artificial Sequence
  primer
aagcagcaattgacactgtgg

SEQ ID NO: 21433 - DNA, 27 bp, Artificial Sequence
  primer
gaggtaatgaaggatatagtatgcacc

SEQ ID NO: 21434 - DNA, 20 bp, Artificial Sequence
  primer
cttatgcttgcctccactgc

SEQ ID NO: 21435 - DNA, 21 bp, Artificial Sequence
  primer
acaagttccatctcggaggag

SEQ ID NO: 21436 - DNA, 38 bp, Artificial Sequence
  primer
gtaaaacgacggccagtttcaaatttggaatcaggtgg

SEQ ID NO: 21437 - DNA, 21 bp, Artificial Sequence
  primer
tccaaccttcattcttcctcc

SEQ ID NO: 21438 - DNA, 22 bp, Artificial Sequence
  primer
cctggattacccatttcctttg

SEQ ID NO: 21439 - DNA, 24 bp, Artificial Sequence
  primer
ttcagttgaatttcttcccaaata

SEQ ID NO: 21440 - DNA, 21 bp, Artificial Sequence
  primer
cccatgaagtgttgatggttc

SEQ ID NO: 21441 - DNA, 41 bp, Artificial Sequence
  primer
gtaaaacgacggccagtaagtgacttcgtaggctcagaaac

SEQ ID NO: 21442 - DNA, 43 bp, Artificial Sequence
  primer
gtaaaacgacggccagtcgactttcctttaactgcatactttc

SEQ ID NO: 21443 - DNA, 21 bp, Artificial Sequence
  primer
tggaagtcattgataccaccg

SEQ ID NO: 21444 - DNA, 23 bp, Artificial Sequence
  primer
tgcagtgccctattctataagga

SEQ ID NO: 21445 - DNA, 38 bp, Artificial Sequence
  primer
gtaaaacgacggccagtaacagggaagctgtggatacc

SEQ ID NO: 21446 - DNA, 41 bp, Artificial Sequence
  primer
gtaaaacgacggccagtgtgaatgattatgcactatttggg

SEQ ID NO: 21447 - DNA, 39 bp, Artificial Sequence
  primer
gtaaaacgacggccagttgtctgtctgtcttctccaccc

SEQ ID NO: 21448 - DNA, 36 bp, Artificial Sequence
  primer
gtaaaacgacggccagtcccacttgtgcactgatgc

SEQ ID NO: 21449 - DNA, 21 bp, Artificial Sequence
  primer
tttcttgccttaccaccacac

SEQ ID NO: 21450 - DNA, 43 bp, Artificial Sequence
  primer
gtaaaacgacggccagttttattgggttattaattggttctgg

SEQ ID NO: 21451 - DNA, 40 bp, Artificial Sequence
  primer
gtaaaacgacggccagttgcatgcaatgtcaatcatttag

SEQ ID NO: 21452 - DNA, 39 bp, Artificial Sequence
  primer
gtaaaacgacggccagttgacaaactctatccaaatccc

SEQ ID NO: 21453 - DNA, 38 bp, Artificial Sequence
  primer
gtaaaacgacggccagttcttcttccagtgtggaccag

SEQ ID NO: 21454 - DNA, 28 bp, Artificial Sequence
  primer
ttactggaataagagataagtgctttca

SEQ ID NO: 21455 - DNA, 39 bp, Artificial Sequence
  primer
gtaaaacgacggccagtgaaaggctcagagaagagagga

SEQ ID NO: 21456 - DNA, 21 bp, Artificial Sequence
  primer
tgcttcatcaacctcatccag

SEQ ID NO: 21457 - DNA, 21 bp, Artificial Sequence
  primer
ccctaaggagagcttcacagc

SEQ ID NO: 21458 - DNA, 25 bp, Artificial Sequence
  primer
gttcgcttggattaaagtaatcttg

SEQ ID NO: 21459 - DNA, 38 bp, Artificial Sequence
  primer
gtaaaacgacggccagtagcaatggaggaagatgaagc

SEQ ID NO: 21460 - DNA, 21 bp, Artificial Sequence
  primer
gacaaagcagcttctgaaggg

SEQ ID NO: 21461 - DNA, 21 bp, Artificial Sequence
  primer
gagaggacggttctgaagagg

SEQ ID NO: 21462 - DNA, 21 bp, Artificial Sequence
  primer
tgcactcaaggatgaagatgc

SEQ ID NO: 21463 - DNA, 21 bp, Artificial Sequence
  primer
ctgatgctgagaacgaagcac

SEQ ID NO: 21464 - DNA, 38 bp, Artificial Sequence
  primer
gtaaaacgacggccagtcagagaagagctgtccagcag

SEQ ID NO: 21465 - DNA, 21 bp, Artificial Sequence
  primer
taaggacccaggaagctgttg

SEQ ID NO: 21466 - DNA, 21 bp, Artificial Sequence
  primer
gttgctgaggaagaaacctgg

SEQ ID NO: 21467 - DNA, 21 bp, Artificial Sequence
  primer
agaggaattagcacggagtgg

SEQ ID NO: 21468 - DNA, 21 bp, Artificial Sequence
  primer
gctttactggattcctgcacc

SEQ ID NO: 21469 - DNA, 39 bp, Artificial Sequence
  primer
gtaaaacgacggccagtatttacagggtcagtgaaagcc

SEQ ID NO: 21470 - DNA, 39 bp, Artificial Sequence
  primer
gtaaaacgacggccagtttctgagcagctgtgtttgaag

SEQ ID NO: 21471 - DNA, 37 bp, Artificial Sequence
  primer
gtaaaacgacggccagttctcattgcccagattcctg

SEQ ID NO: 21472 - DNA, 39 bp, Artificial Sequence; identical to SEQ ID NO: 21469
  primer

SEQ ID NO: 21473 - DNA, 38 bp, Artificial Sequence
  primer
gtaaaacgacggccagtgctttactggattcctgcacc

SEQ ID NO: 21474 - DNA, 39 bp, Artificial Sequence; identical to SEQ ID NO: 21469
  primer

SEQ ID NO: 21475 - DNA, 37 bp, Artificial Sequence
  primer
gtaaaacgacggccagtgaatggacagctgttgctgg

SEQ ID NO: 21476 - DNA, 21 bp, Artificial Sequence
  primer
tttctggagctttcatttccc

SEQ ID NO: 21477 - DNA, 38 bp, Artificial Sequence
  primer
gtaaaacgacggccagttcctgaccagctccttacctc

SEQ ID NO: 21478 - DNA, 38 bp, Artificial Sequence
  primer
gtaaaacgacggccagtagagaggcaaagggacctacc

SEQ ID NO: 21479 - DNA, 38 bp, Artificial Sequence
  primer
gtaaaacgacggccagtatccatttacctcagcctccc

SEQ ID NO: 21480 - DNA, 39 bp, Artificial Sequence
  primer
gtaaaacgacggccagtgacaattctcccttccattgtc

SEQ ID NO: 21481 - DNA, 22 bp, Artificial Sequence
  primer
tgggcgaatcttgttgagtaag

SEQ ID NO: 21482 - DNA, 38 bp, Artificial Sequence
  primer
gtaaaacgacggccagtggctgcagaacaaggattctc

SEQ ID NO: 21483 - DNA, 23 bp, Artificial Sequence
  primer
tggtgcattcctataatctcagc

SEQ ID NO: 21484 - DNA, 20 bp, Artificial Sequence
  primer
ttgcaccactgtacaccagc

SEQ ID NO: 21485 - DNA, 38 bp, Artificial Sequence
  primer
gtaaaacgacggccagtcacccagctttatgtcacagc

SEQ ID NO: 21486 - DNA, 21 bp, Artificial Sequence
  primer
ctttcctcccagtttctgagc

SEQ ID NO: 21487 - DNA, 39 bp, Artificial Sequence
  primer
gtaaaacgacggccagtttgatgaccacttgatgattgg

SEQ ID NO: 21488 - DNA, 24 bp, Artificial Sequence
  primer
gcaaagacaggaggtagtgttacg

SEQ ID NO: 21489 - DNA, 24 bp, Artificial Sequence
  primer
ctctttcctttccttctgtgattc

SEQ ID NO: 21490 - DNA, 22 bp, Artificial Sequence
  primer
gctgaggtggaatgtaaaggct

SEQ ID NO: 21491 - DNA, 21 bp, Artificial Sequence
  primer
gaatacatccacagacggtgc

SEQ ID NO: 21492 - DNA, 21 bp, Artificial Sequence
  primer
aaggtagtggcctgtggaaac

SEQ ID NO: 21493 - DNA, 21 bp, Artificial Sequence
  primer
tatagctggtggagagagggc

SEQ ID NO: 21494 - DNA, 38 bp, Artificial Sequence
  primer
gtaaaacgacggccagttgggtttcatactttccaccc

SEQ ID NO: 21495 - DNA, 38 bp, Artificial Sequence
  primer
gtaaaacgacggccagtgcctctgctcattggtagtcc

SEQ ID NO: 21496 - DNA, 38 bp, Artificial Sequence
  primer
gtaaaacgacggccagtcaggcctttggtcttcaaatc

SEQ ID NO: 21497 - DNA, 21 bp, Artificial Sequence
  primer
gaactggtctcccactaagcc

SEQ ID NO: 21498 - DNA, 38 bp, Artificial Sequence
  primer
gtaaaacgacggccagtggaagggtgggaagattatgc

SEQ ID NO: 21499 - DNA, 22 bp, Artificial Sequence
  primer
gggagttagaatcctgaggtgc

SEQ ID NO: 21500 - DNA, 37 bp, Artificial Sequence
  primer
gtaaaacgacggccagtgtggagaggagaaaggacgg

SEQ ID NO: 21501 - DNA, 38 bp, Artificial Sequence
  primer
gtaaaacgacggccagttggtcctctgcctccttacag

SEQ ID NO: 21502 - DNA, 38 bp, Artificial Sequence
  primer
gtaaaacgacggccagtcgaagtgtctgtgaaggaggg

SEQ ID NO: 21503 - DNA, 21 bp, Artificial Sequence
  primer
agagctggaaagaactggctg

SEQ ID NO: 21504 - DNA, 38 bp, Artificial Sequence
  primer
gtaaaacgacggccagtgcaaacatcctcctggttctc

SEQ ID NO: 21505 - DNA, 21 bp, Artificial Sequence
  primer
gccagagctagaggtacaggg

SEQ ID NO: 21506 - DNA, 21 bp, Artificial Sequence
  primer
cctgcagctcagaaacagatg

SEQ ID NO: 21507 - DNA, 21 bp, Artificial Sequence
  primer
ttgtacaaagggacaaggctg

SEQ ID NO: 21508 - DNA, 19 bp, Artificial Sequence
  primer
gcaacttggaaccctggac

SEQ ID NO: 21509 - DNA, 21 bp, Artificial Sequence
  primer
cgtggactacgttctctttcg

SEQ ID NO: 21510 - DNA, 21 bp, Artificial Sequence
  primer
actgcagtccttgttgtggtg

SEQ ID NO: 21511 - DNA, 21 bp, Artificial Sequence
  primer
ctctgcagatacaggtcaggc

SEQ ID NO: 21512 - DNA, 38 bp, Artificial Sequence
  primer
gtaaaacgacggccagtaaagatgtttgggaaagcgtg

SEQ ID NO: 21513 - DNA, 37 bp, Artificial Sequence
  primer
gtaaaacgacggccagtaactcagcagcaaggtggat

SEQ ID NO: 21514 - DNA, 21 bp, Artificial Sequence
  primer
ccacaggtgaaagggtctagc

SEQ ID NO: 21515 - DNA, 37 bp, Artificial Sequence
  primer
gtaaaacgacggccagtgcccttgtgaggtaaccagc

SEQ ID NO: 21516 - DNA, 38 bp, Artificial Sequence
  primer
gtaaaacgacggccagtaacaatttggcattcagctcc

SEQ ID NO: 21517 - DNA, 38 bp, Artificial Sequence
  primer
gtaaaacgacggccagtacaaagcctggattctgttgc

SEQ ID NO: 21518 - DNA, 37 bp, Artificial Sequence
  primer
gtaaaacgacggccagtagcgtccagcaatgtgtctc

SEQ ID NO: 21519 - DNA, 19 bp, Artificial Sequence
  primer
ttggctcagctctgtgtgg

SEQ ID NO: 21520 - DNA, 21 bp, Artificial Sequence
  primer
gctctaggaagtgagattggg

SEQ ID NO: 21521 - DNA, 42 bp, Artificial Sequence
  primer
gtaaaacgacggccagttttcagagccttataggtttcattg

SEQ ID NO: 21522 - DNA, 42 bp, Artificial Sequence
  primer
gtaaaacgacggccagttgcaaagaagtgtataaagatgctg

SEQ ID NO: 21523 - DNA, 44 bp, Artificial Sequence
  primer
gtaaaacgacggccagtttgactctgtaattgtaatggcttacc

SEQ ID NO: 21524 - DNA, 43 bp, Artificial Sequence
  primer
gtaaaacgacggccagttgcttagaatatatttccctacatgc

SEQ ID NO: 21525 - DNA, 27 bp, Artificial Sequence
  primer
cagagtctttcctaactacactgattg

SEQ ID NO: 21526 - DNA, 21 bp, Artificial Sequence
  primer
ttccagggcaaatctaaactg

SEQ ID NO: 21527 - DNA, 24 bp, Artificial Sequence
  primer
gtctgcatgtgagttagaggacat

SEQ ID NO: 21528 - DNA, 38 bp, Artificial Sequence
  primer
gtaaaacgacggccagtcccaggcttgcaggtataaag

SEQ ID NO: 21529 - DNA, 21 bp, Artificial Sequence
  primer
tggcattgctgagtttcatta

SEQ ID NO: 21530 - DNA, 21 bp, Artificial Sequence
  primer
tgtccttcagtgcctgataca

SEQ ID NO: 21531 - DNA, 44 bp, Artificial Sequence
  primer
gtaaaacgacggccagtttgactctatggctttcatatagttgg

SEQ ID NO: 21532 - DNA, 22 bp, Artificial Sequence
  primer
gaacccaggagatggagcttac

SEQ ID NO: 21533 - DNA, 28 bp, Artificial Sequence
  primer
tgaaagctataccacttgttaacctaaa

SEQ ID NO: 21534 - DNA, 22 bp, Artificial Sequence
  primer
ttggtggtgacctaaagtgaaa

SEQ ID NO: 21535 - DNA, 41 bp, Artificial Sequence
  primer
gtaaaacgacggccagttgcaaagcacactagaaatattgg

SEQ ID NO: 21536 - DNA, 40 bp, Artificial Sequence
  primer
gtaaaacgacggccagtctatgagaattaatgggtccaaa

SEQ ID NO: 21537 - DNA, 37 bp, Artificial Sequence
  primer
gtaaaacgacggccagtgctgatgctcacctttctgc

SEQ ID NO: 21538 - DNA, 22 bp, Artificial Sequence
  primer
tctcaggaggttgatttggttg

SEQ ID NO: 21539 - DNA, 37 bp, Artificial Sequence
  primer
gtaaaacgacggccagtgcctctcgaaggaagtttgc

SEQ ID NO: 21540 - DNA, 38 bp, Artificial Sequence
  primer
gtaaaacgacggccagtacagagagactggagggatgg

SEQ ID NO: 21541 - DNA, 20 bp, Artificial Sequence
  primer
gggagaggaggaagcaacag

SEQ ID NO: 21542 - DNA, 24 bp, Artificial Sequence
  primer
gggattgctatctctgaatgtctg

SEQ ID NO: 21543 - DNA, 21 bp, Artificial Sequence
  primer
tcccagtttccctatcctgtg

SEQ ID NO: 21544 - DNA, 40 bp, Artificial Sequence
  primer
gtaaaacgacggccagtaggtctctgagccattacacttg

SEQ ID NO: 21545 - DNA, 38 bp, Artificial Sequence
  primer
gtaaaacgacggccagttgttactgttccttgcggatg

SEQ ID NO: 21546 - DNA, 38 bp, Artificial Sequence
  primer
gtaaaacgacggccagtctcctccctccacttgactcc

SEQ ID NO: 21547 - DNA, 20 bp, Artificial Sequence
  primer
accattcagctctggtctgg

SEQ ID NO: 21548 - DNA, 38 bp, Artificial Sequence
  primer
gtaaaacgacggccagtgctaccctaggaacccactgc

SEQ ID NO: 21549 - DNA, 37 bp, Artificial Sequence
  primer
gtaaaacgacggccagtctgcagtcccacttagccag

SEQ ID NO: 21550 - DNA, 21 bp, Artificial Sequence
  primer
aaagagaggtgaagtgggtgg

SEQ ID NO: 21551 - DNA, 38 bp, Artificial Sequence
  primer
gtaaaacgacggccagtgagtgggaatcgtcctttctg

SEQ ID NO: 21552 - DNA, 21 bp, Artificial Sequence
  primer
gactttggtcatcagggaagg

SEQ ID NO: 21553 - DNA, 21 bp, Artificial Sequence
  primer
aggagagcttctgccattctg

SEQ ID NO: 21554 - DNA, 20 bp, Artificial Sequence
  primer
ggactctgctccagtgatgg

SEQ ID NO: 21555 - DNA, 21 bp, Artificial Sequence
  primer
actcactgcccatgaaggaag

SEQ ID NO: 21556 - DNA, 38 bp, Artificial Sequence
  primer
gtaaaacgacggccagtttcacgtcagttctctgaccc

SEQ ID NO: 21557 - DNA, 38 bp, Artificial Sequence
  primer
gtaaaacgacggccagtaccgagttgtggcagtattcc

SEQ ID NO: 21558 - DNA, 38 bp, Artificial Sequence
  primer
gtaaaacgacggccagtccagtaacgacaaatgcatcc

SEQ ID NO: 21559 - DNA, 21 bp, Artificial Sequence
  primer
ttcaaacctggatccctctgt

SEQ ID NO: 21560 - DNA, 41 bp, Artificial Sequence
  primer
gtaaaacgacggccagtagatacttcaaagtcacatggcaa

SEQ ID NO: 21561 - DNA, 38 bp, Artificial Sequence
  primer
gtaaaacgacggccagtttgtttacatctgccaaaccg

SEQ ID NO: 21562 - DNA, 43 bp, Artificial Sequence
  primer
gtaaaacgacggccagtcccaactggattcatagtttaatttc

SEQ ID NO: 21563 - DNA, 44 bp, Artificial Sequence
  primer
gtaaaacgacggccagtgaagctttgtagtaagaaggaataaga

SEQ ID NO: 21564 - DNA, 40 bp, Artificial Sequence
  primer
gtaaaacgacggccagttttcctctaacccgaatttattt

SEQ ID NO: 21565 - DNA, 44 bp, Artificial Sequence
  primer
gtaaaacgacggccagttcttgatgtcccataacttatccatag

SEQ ID NO: 21566 - DNA, 46 bp, Artificial Sequence
  primer
gtaaaacgacggccagtgatcctcagtatatagtagctgcacatta

SEQ ID NO: 21567 - DNA, 21 bp, Artificial Sequence
  primer
caggacgggactctatctcaa

SEQ ID NO: 21568 - DNA, 38 bp, Artificial Sequence
  primer
gtaaaacgacggccagttcagtttggccacagaatctc

SEQ ID NO: 21569 - DNA, 40 bp, Artificial Sequence
  primer
gtaaaacgacggccagttcaggttgaaataatgtgtcagg

SEQ ID NO: 21570 - DNA, 22 bp, Artificial Sequence
  primer
agacacccagtgaatgacaaag

SEQ ID NO: 21571 - DNA, 18 bp, Artificial Sequence
  primer
tgagcgatggagcgagac

SEQ ID NO: 21572 - DNA, 23 bp, Artificial Sequence
  primer
gcttctagttgaatctcccttcc

SEQ ID NO: 21573 - DNA, 22 bp, Artificial Sequence
  primer
ggaagatgcctacctctgtttg

SEQ ID NO: 21574 - DNA, 39 bp, Artificial Sequence
  primer
gtaaaacgacggccagtgcttaatgtcagcccaattctg

SEQ ID NO: 21575 - DNA, 21 bp, Artificial Sequence
  primer
tcggttcttcatcccaaagac

SEQ ID NO: 21576 - DNA, 21 bp, Artificial Sequence
  primer
gattgccagtgatgtgaaacc

SEQ ID NO: 21577 - DNA, 21 bp, Artificial Sequence
  primer
ggaacccttgggatctagaag

SEQ ID NO: 21578 - DNA, 38 bp, Artificial Sequence
  primer
gtaaaacgacggccagtctgcaatatacagggcaaccc

SEQ ID NO: 21579 - DNA, 24 bp, Artificial Sequence
  primer
tctttccataaaccatctcaagtg

SEQ ID NO: 21580 - DNA, 38 bp, Artificial Sequence
  primer
gtaaaacgacggccagtggccggatagatatcagcttg

SEQ ID NO: 21581 - DNA, 39 bp, Artificial Sequence
  primer
gtaaaacgacggccagtcctaaaggtagggactgtgtgc

SEQ ID NO: 21582 - DNA, 40 bp, Artificial Sequence
  primer
gtaaaacgacggccagtttgatgaacctccatttgacatc

SEQ ID NO: 21583 - DNA, 21 bp, Artificial Sequence
  primer
ataggctgagaatcacctgcc

SEQ ID NO: 21584 - DNA, 27 bp, Artificial Sequence
  primer
ttgcatctaaagcaactataatagaga

SEQ ID NO: 21585 - DNA, 27 bp, Artificial Sequence
  primer
gtagattgaaggaccttagctgataaa

SEQ ID NO: 21586 - DNA, 44 bp, Artificial Sequence
  primer
gtaaaacgacggccagtgagggataacttaggagtggcatatag

SEQ ID NO: 21587 - DNA, 40 bp, Artificial Sequence
  primer
gtaaaacgacggccagtgaacatttgtaagcacagttgcc

SEQ ID NO: 21588 - DNA, 26 bp, Artificial Sequence
  primer
tcctttacatgaatcttatcccagac

SEQ ID NO: 21589 - DNA, 23 bp, Artificial Sequence
  primer
cctccgttgaattaagtttctgg

SEQ ID NO: 21590 - DNA, 38 bp, Artificial Sequence
  primer
gtaaaacgacggccagttgtctaggcccatctcacctc

SEQ ID NO: 21591 - DNA, 24 bp, Artificial Sequence
  primer
ttagcttgattgagccattctaca

SEQ ID NO: 21592 - DNA, 38 bp, Artificial Sequence
  primer
gtaaaacgacggccagtgtatttgctgcaaggcatgag

SEQ ID NO: 21593 - DNA, 38 bp, Artificial Sequence
  primer
gtaaaacgacggccagtgggaaagattgtaaggccatc

SEQ ID NO: 21594 - DNA, 40 bp, Artificial Sequence
  primer
gtaaaacgacggccagtggacatgctaagcagacagtttc

SEQ ID NO: 21595 - DNA, 22 bp, Artificial Sequence
  primer
ccagcttgagcaacatagtgag

SEQ ID NO: 21596 - DNA, 22 bp, Artificial Sequence
  primer
tttattgcaattagcgggattc

SEQ ID NO: 21597 - DNA, 22 bp, Artificial Sequence
  primer
ttgccaaggatgtattgaagag

SEQ ID NO: 21598 - DNA, 25 bp, Artificial Sequence
  primer
tctgtgacataaatgttattctggg

SEQ ID NO: 21599 - DNA, 21 bp, Artificial Sequence
  primer
tgccagttgttgctttagagg

SEQ ID NO: 21600 - DNA, 23 bp, Artificial Sequence
  primer
gaataatttcaaatgcttggctc

SEQ ID NO: 21601 - DNA, 40 bp, Artificial Sequence
  primer
gtaaaacgacggccagttttagtgggcatgattgtactgg

SEQ ID NO: 21602 - DNA, 41 bp, Artificial Sequence
  primer
gtaaaacgacggccagtggtaaagcagaatttggtaagagc

SEQ ID NO: 21603 - DNA, 21 bp, Artificial Sequence
  primer
ctgtgtggccctctggtttag

SEQ ID NO: 21604 - DNA, 39 bp, Artificial Sequence
  primer
gtaaaacgacggccagtcagagcctaggattagtttggc

SEQ ID NO: 21605 - DNA, 20 bp, Artificial Sequence
  primer
agtttcctcccgtcgacatc

SEQ ID NO: 21606 - DNA, 21 bp, Artificial Sequence
  primer
aaaggaagaggagattgacgg

SEQ ID NO: 21607 - DNA, 26 bp, Artificial Sequence
  primer
ttcatagttacagctgacacacacac

SEQ ID NO: 21608 - DNA, 38 bp, Artificial Sequence
  primer
gtaaaacgacggccagtgtgacagcgatccttctgttc

SEQ ID NO: 21609 - DNA, 39 bp, Artificial Sequence
  primer
gtaaaacgacggccagtaggtgtgatcatgtgatggaag

SEQ ID NO: 21610 - DNA, 21 bp, Artificial Sequence
  primer
gaaggtttctcccttcccaac

SEQ ID NO: 21611 - DNA, 38 bp, Artificial Sequence
  primer
gtaaaacgacggccagtcaaagagcatgcactaatggc

SEQ ID NO: 21612 - DNA, 38 bp, Artificial Sequence
  primer
gtaaaacgacggccagtttcttccctaggtccctcctc

SEQ ID NO: 21613 - DNA, 21 bp, Artificial Sequence
  primer
atgcacatacacacatccagg

SEQ ID NO: 21614 - DNA, 21 bp, Artificial Sequence
  primer
cctttaggtcctccattccag

SEQ ID NO: 21615 - DNA, 38 bp, Artificial Sequence
  primer
gtaaaacgacggccagtagggtctcagcccttaacagg

SEQ ID NO: 21616 - DNA, 38 bp, Artificial Sequence
  primer
gtaaaacgacggccagtgtgtgagaggagcctggaatg

SEQ ID NO: 21617 - DNA, 19 bp, Artificial Sequence
  primer
agacggcaacagtcacgag

SEQ ID NO: 21618 - DNA, 20 bp, Artificial Sequence
  primer
tacgaccactcgtacctggg

SEQ ID NO: 21619 - DNA, 38 bp, Artificial Sequence
  primer
gtaaaacgacggccagtctctgcccagagaaccatctg

SEQ ID NO: 21620 - DNA, 36 bp, Artificial Sequence
  primer
gtaaaacgacggccagtcacattgggtcaggcacac

SEQ ID NO: 21621 - DNA, 19 bp, Artificial Sequence
  primer
gagtaggcattccatgggc

SEQ ID NO: 21622 - DNA, 21 bp, Artificial Sequence
  primer
gtagatccatggctcagcctc

SEQ ID NO: 21623 - DNA, 38 bp, Artificial Sequence
  primer
gtaaaacgacggccagtgggtgggaacataatgaaagg

SEQ ID NO: 21624 - DNA, 38 bp, Artificial Sequence
  primer
gtaaaacgacggccagtcccactccttcctgctatgac

SEQ ID NO: 21625 - DNA, 21 bp, Artificial Sequence
  primer
tgtcactgagctagtggcctg

SEQ ID NO: 21626 - DNA, 38 bp, Artificial Sequence
  primer
gtaaaacgacggccagtgattcctcccaacatgaccag

SEQ ID NO: 21627 - DNA, 38 bp, Artificial Sequence
  primer
gtaaaacgacggccagtactacgaggtgtgcaaggagg

SEQ ID NO: 21628 - DNA, 37 bp, Artificial Sequence
  primer
gtaaaacgacggccagtggtagtgggtagcgggtctc

SEQ ID NO: 21629 - DNA, 21 bp, Artificial Sequence
  primer
gacaagcagcgggagaactac

SEQ ID NO: 21630 - DNA, 36 bp, Artificial Sequence
  primer
gtaaaacgacggccagtctgaggacgaaggctggag

SEQ ID NO: 21631 - DNA, 20 bp, Artificial Sequence
  primer
cctctcgcagtggctacaag

SEQ ID NO: 21632 - DNA, 35 bp, Artificial Sequence
  primer
gtaaaacgacggccagtgaggagaagggcgtggac

SEQ ID NO: 21633 - DNA, 38 bp, Artificial Sequence
  primer
gtaaaacgacggccagtgtctgtgttcacggtaatccc

SEQ ID NO: 21634 - DNA, 38 bp, Artificial Sequence
  primer
gtaaaacgacggccagttgcatctgtttctaacccacg

SEQ ID NO: 21635 - DNA, 20 bp, Artificial Sequence
  primer
aaagacaaagagcacaggcg

SEQ ID NO: 21636 - DNA, 18 bp, Artificial Sequence
  primer
ccttgggttcccaggttc

SEQ ID NO: 21637 - DNA, 38 bp, Artificial Sequence
  primer
gtaaaacgacggccagtggactaattggccatgaggat

SEQ ID NO: 21638 - DNA, 38 bp, Artificial Sequence
  primer
gtaaaacgacggccagtggaacccggacctatgttctc

SEQ ID NO: 21639 - DNA, 21 bp, Artificial Sequence
  primer
cccaagagaggaaagcgactc

SEQ ID NO: 21640 - DNA, 38 bp, Artificial Sequence
  primer
gtaaaacgacggccagtaatggatgctgataccttggc

SEQ ID NO: 21641 - DNA, 21 bp, Artificial Sequence
  primer
aactgtgcaatcaatccttgg

SEQ ID NO: 21642 - DNA, 22 bp, Artificial Sequence
  primer
caagaggtcaagtagcactggg

SEQ ID NO: 21643 - DNA, 21 bp, Artificial Sequence
  primer
gtggctggctttagagctgtc

SEQ ID NO: 21644 - DNA, 37 bp, Artificial Sequence
  primer
gtaaaacgacggccagtattgccacatttgctcatcc

SEQ ID NO: 21645 - DNA, 21 bp, Artificial Sequence
  primer
gcaacagaacgaggtcctttc

SEQ ID NO: 21646 - DNA, 21 bp, Artificial Sequence
  primer
tcttcatcttcatcatcgccc

SEQ ID NO: 21647 - DNA, 38 bp, Artificial Sequence
  primer
gtaaaacgacggccagtctgaggacgactgaacctgtg

SEQ ID NO: 21648 - DNA, 38 bp, Artificial Sequence
  primer
gtaaaacgacggccagttcagggaatgtgtccctcttc

SEQ ID NO: 21649 - DNA, 21 bp, Artificial Sequence
  primer
tatgaaaccctggaggagctg

SEQ ID NO: 21650 - DNA, 21 bp, Artificial Sequence
  primer
ctaccctgatccctttctccc

SEQ ID NO: 21651 - DNA, 37 bp, Artificial Sequence
  primer
gtaaaacgacggccagtcagctccagaggctaggtgg

SEQ ID NO: 21652 - DNA, 36 bp, Artificial Sequence
  primer
gtaaaacgacggccagtctcagggtggagacaaggg

SEQ ID NO: 21653 - DNA, 22 bp, Artificial Sequence
  primer
tgggaagtggaggtcctctaag

SEQ ID NO: 21654 - DNA, 38 bp, Artificial Sequence
  primer
gtaaaacgacggccagtcagggtgcttaccttggtttc

SEQ ID NO: 21655 - DNA, 38 bp, Artificial Sequence
  primer
gtaaaacgacggccagtcttccctatgggtcctgtctg

SEQ ID NO: 21656 - DNA, 21 bp, Artificial Sequence
  primer
ctaggcaacagcctttccttc

SEQ ID NO: 21657 - DNA, 39 bp, Artificial Sequence
  primer
gtaaaacgacggccagttgacatcaattccgtttctgtg

SEQ ID NO: 21658 - DNA, 38 bp, Artificial Sequence
  primer
gtaaaacgacggccagtttccatgttgtttctgatccc

SEQ ID NO: 21659 - DNA, 21 bp, Artificial Sequence
  primer
caacatgcaaacgatgattcc

SEQ ID NO: 21660 - DNA, 41 bp, Artificial Sequence
  primer
gtaaaacgacggccagtattactcttgcatcaagctgtttc

SEQ ID NO: 21661 - DNA, 38 bp, Artificial Sequence
  primer
gtaaaacgacggccagtcagacagagttccattggtgg

SEQ ID NO: 21662 - DNA, 37 bp, Artificial Sequence
  primer
gtaaaacgacggccagtgaaggcgtcgttctcctttc

SEQ ID NO: 21663 - DNA, 21 bp, Artificial Sequence
  primer
tgcagcttggagaggttattg

SEQ ID NO: 21664 - DNA, 38 bp, Artificial Sequence
  primer
gtaaaacgacggccagtagtgcaatggtgcagtctcag

SEQ ID NO: 21665 - DNA, 21 bp, Artificial Sequence
  primer
ttgctcaaacctaggaggtgg

SEQ ID NO: 21666 - DNA, 21 bp, Artificial Sequence
  primer
cttaatgggcaagaatttccg

SEQ ID NO: 21667 - DNA, 21 bp, Artificial Sequence
  primer
atttatggcctgggataagcc

SEQ ID NO: 21668 - DNA, 38 bp, Artificial Sequence
  primer
gtaaaacgacggccagtctcctgaccctggtctctttg

SEQ ID NO: 21669 - DNA, 21 bp, Artificial Sequence
  primer
gagatgcaaattgtggactgc

SEQ ID NO: 21670 - DNA, 21 bp, Artificial Sequence
  primer
atgtaccctgtccagctcctc

SEQ ID NO: 21671 - DNA, 38 bp, Artificial Sequence
  primer
gtaaaacgacggccagtacctgccactaagaccctctg

SEQ ID NO: 21672 - DNA, 21 bp, Artificial Sequence
  primer
ccacagaggtgtcctgttgag

SEQ ID NO: 21673 - DNA, 19 bp, Artificial Sequence
  primer
cagagccttgtccacgacc

SEQ ID NO: 21674 - DNA, 36 bp, Artificial Sequence
  primer
gtaaaacgacggccagtcacgaccagagccaattcc

SEQ ID NO: 21675 - DNA, 20 bp, Artificial Sequence
  primer
cggatgcatgctggttacac

SEQ ID NO: 21676 - DNA, 39 bp, Artificial Sequence
  primer
gtaaaacgacggccagttgggtagcataatggctatgag

SEQ ID NO: 21677 - DNA, 21 bp, Artificial Sequence
  primer
tcttgtttaggcctggcttct

SEQ ID NO: 21678 - DNA, 21 bp, Artificial Sequence
  primer
accttctcacctcctcttccc

SEQ ID NO: 21679 - DNA, 38 bp, Artificial Sequence
  primer
gtaaaacgacggccagtttaagctgaggtgaatcgtcc

SEQ ID NO: 21680 - DNA, 39 bp, Artificial Sequence
  primer
gtaaaacgacggccagtctgcatccatctttgtctgttt

SEQ ID NO: 21681 - DNA, 38 bp, Artificial Sequence
  primer
gtaaaacgacggccagtactctgaaacctggcctgaac

SEQ ID NO: 21682 - DNA, 21 bp, Artificial Sequence
  primer
cccataggaagaggacagcac

SEQ ID NO: 21683 - DNA, 38 bp, Artificial Sequence
  primer
gtaaaacgacggccagtctcttctgcctctgcacttcc

SEQ ID NO: 21684 - DNA, 21 bp, Artificial Sequence
  primer
agccagtgcacctggtctatc

SEQ ID NO: 21685 - DNA, 37 bp, Artificial Sequence
  primer
gtaaaacgacggccagtgcttgcaccctagtcccttc

SEQ ID NO: 21686 - DNA, 21 bp, Artificial Sequence
  primer
gaatggtttgcagagaggcag

SEQ ID NO: 21687 - DNA, 21 bp, Artificial Sequence
  primer
gccacccgtgtactggttatc

SEQ ID NO: 21688 - DNA, 21 bp, Artificial Sequence
  primer
ggcagataaggtgcctagcag

SEQ ID NO: 21689 - DNA, 38 bp, Artificial Sequence
  primer
gtaaaacgacggccagtgaactgggtagctttcttggg

SEQ ID NO: 21690 - DNA, 38 bp, Artificial Sequence
  primer
gtaaaacgacggccagtagtcgaactgacgcccagtag

SEQ ID NO: 21691 - DNA, 20 bp, Artificial Sequence
  primer
gataaggcgctgtcatggag

SEQ ID NO: 21692 - DNA, 20 bp, Artificial Sequence
  primer
gatgagtgggaggctatggg

SEQ ID NO: 21693 - DNA, 39 bp, Artificial Sequence
  primer
gtaaaacgacggccagtgggagcaagatcctaagcactg

SEQ ID NO: 21694 - DNA, 21 bp, Artificial Sequence
  primer
actgcgttccaaaggttgttc

SEQ ID NO: 21695 - DNA, 38 bp, Artificial Sequence
  primer
gtaaaacgacggccagtgtttcaaactccctcgctttg

SEQ ID NO: 21696 - DNA, 38 bp, Artificial Sequence
  primer
gtaaaacgacggccagtgtaccacagagggagacctgc

SEQ ID NO: 21697 - DNA, 23 bp, Artificial Sequence
  primer
cccttctgttcttcctttacctg

SEQ ID NO: 21698 - DNA, 21 bp, Artificial Sequence
  primer
tggttctttgcttgggtcttc

SEQ ID NO: 21699 - DNA, 20 bp, Artificial Sequence
  primer
gttcccaaggaatgcaaagg

SEQ ID NO: 21700 - DNA, 21 bp, Artificial Sequence
  primer
tggaccagacacagctaggac

SEQ ID NO: 21701 - DNA, 42 bp, Artificial Sequence
  primer
gtaaaacgacggccagtcagactgcaggcttatttgtaagag

SEQ ID NO: 21702 - DNA, 36 bp, Artificial Sequence
  primer
gtaaaacgacggccagtaacgataagcgaacggcag

SEQ ID NO: 21703 - DNA, 42 bp, Artificial Sequence
  primer
gtaaaacgacggccagttgagagaaacattaattgatgaggg

SEQ ID NO: 21704 - DNA, 38 bp, Artificial Sequence
  primer
gtaaaacgacggccagtgtgaaggcagaaggctcagtc

SEQ ID NO: 21705 - DNA, 38 bp, Artificial Sequence
  primer
gtaaaacgacggccagttggtctttaattgcaagtgcc

SEQ ID NO: 21706 - DNA, 37 bp, Artificial Sequence
  primer
gtaaaacgacggccagtggatcatttgcctgaggttg

SEQ ID NO: 21707 - DNA, 20 bp, Artificial Sequence
  primer
aagatgctcgcgtcatcaag

SEQ ID NO: 21708 - DNA, 21 bp, Artificial Sequence
  primer
ttgtcaccgcaaagactgaag

SEQ ID NO: 21709 - DNA, 41 bp, Artificial Sequence
  primer
gtaaaacgacggccagtgctaggtcccttcttgtaacaaac

SEQ ID NO: 21710 - DNA, 21 bp, Artificial Sequence
  primer
tgaaaggtgaaaggcatgagg

SEQ ID NO: 21711 - DNA, 22 bp, Artificial Sequence
  primer
gcatggctcacctttctaagag

SEQ ID NO: 21712 - DNA, 21 bp, Artificial Sequence
  primer
ttacaaattgtgcagtggtgc

SEQ ID NO: 21713 - DNA, 36 bp, Artificial Sequence
  primer
gtaaaacgacggccagtacttcgtgatctgcctgcc

SEQ ID NO: 21714 - DNA, 38 bp, Artificial Sequence
  primer
gtaaaacgacggccagtcagtgaagaagcaccaagcac

SEQ ID NO: 21715 - DNA, 22 bp, Artificial Sequence
  primer
aaattcagttgcaaggtatggc

SEQ ID NO: 21716 - DNA, 18 bp, Artificial Sequence
  primer
ccctcatgcagccctttc

SEQ ID NO: 21717 - DNA, 21 bp, Artificial Sequence
  primer
tatcaccagcaccgatacctg

SEQ ID NO: 21718 - DNA, 37 bp, Artificial Sequence
  primer
gtaaaacgacggccagtgagctgaagtgacagcggag

SEQ ID NO: 21719 - DNA, 27 bp, Artificial Sequence
  primer
tttactaactgctttcttcctaacctg

SEQ ID NO: 21720 - DNA, 26 bp, Artificial Sequence
  primer
tggagttctgttaaagatacatttcc

SEQ ID NO: 21721 - DNA, 24 bp, Artificial Sequence
  primer
tgtttgtatcctgtcccaataagg

SEQ ID NO: 21722 - DNA, 21 bp, Artificial Sequence
  primer
ggcactggctctgatgtttag

SEQ ID NO: 21723 - DNA, 41 bp, Artificial Sequence
  primer
gtaaaacgacggccagttgatgtgctagagaaactggtaca

SEQ ID NO: 21724 - DNA, 27 bp, Artificial Sequence
  primer
gactttatgccaacctaatgtaatagc

SEQ ID NO: 21725 - DNA, 21 bp, Artificial Sequence
  primer
atccattgggagctgaatcac

SEQ ID NO: 21726 - DNA, 21 bp, Artificial Sequence
  primer
ctacgagaaggcttcgtccac

SEQ ID NO: 21727 - DNA, 21 bp, Artificial Sequence
  primer
attgatggtgagttccttggg

SEQ ID NO: 21728 - DNA, 38 bp, Artificial Sequence
  primer
gtaaaacgacggccagttgggatatagaaggcaggtcc

SEQ ID NO: 21729 - DNA, 38 bp, Artificial Sequence
  primer
gtaaaacgacggccagtgtcctactgacccatggaagc

SEQ ID NO: 21730 - DNA, 38 bp, Artificial Sequence
  primer
gtaaaacgacggccagtaagtcaggatcgcctagatgg

SEQ ID NO: 21731 - DNA, 38 bp, Artificial Sequence
  primer
gtaaaacgacggccagtgggaattgaggttctcacagg

SEQ ID NO: 21732 - DNA, 38 bp, Artificial Sequence
  primer
gtaaaacgacggccagtcattggtgggaagacactgag

SEQ ID NO: 21733 - DNA, 21 bp, Artificial Sequence
  primer
actggcctacttcccactctg

SEQ ID NO: 21734 - DNA, 38 bp, Artificial Sequence
  primer
gtaaaacgacggccagtctgctggcactgttacctcac

SEQ ID NO: 21735 - DNA, 38 bp, Artificial Sequence
  primer
gtaaaacgacggccagtgactgggttccatgaggtagg

SEQ ID NO: 21736 - DNA, 38 bp, Artificial Sequence
  primer
gtaaaacgacggccagttatatccagggtcccatgtcc

SEQ ID NO: 21737 - DNA, 38 bp, Artificial Sequence
  primer
gtaaaacgacggccagtactctctgaacggagtccacc

SEQ ID NO: 21738 - DNA, 38 bp, Artificial Sequence
  primer
gtaaaacgacggccagttgagctcttaccaactgtggc

SEQ ID NO: 21739 - DNA, 21 bp, Artificial Sequence
  primer
caaagtgatgtcccttcaccc

SEQ ID NO: 21740 - DNA, 38 bp, Artificial Sequence
  primer
gtaaaacgacggccagtcagaccaaggaagacctggag

SEQ ID NO: 21741 - DNA, 38 bp, Artificial Sequence
  primer
gtaaaacgacggccagtagccagctgtgagtggtacag

SEQ ID NO: 21742 - DNA, 37 bp, Artificial Sequence
  primer
gtaaaacgacggccagtctgggaggtgggtgtatgtg

SEQ ID NO: 21743 - DNA, 39 bp, Artificial Sequence
  primer
gtaaaacgacggccagttcataggacaatttggtgaggg

SEQ ID NO: 21744 - DNA, 38 bp, Artificial Sequence
  primer
gtaaaacgacggccagtctccttccctccatgaggttc

SEQ ID NO: 21745 - DNA, 38 bp, Artificial Sequence
  primer
gtaaaacgacggccagttggagtactgcagtctgtggg

SEQ ID NO: 21746 - DNA, 38 bp, Artificial Sequence
  primer
gtaaaacgacggccagtagggtctctgatggtgagtgg

SEQ ID NO: 21747 - DNA, 37 bp, Artificial Sequence
  primer
gtaaaacgacggccagtgctgagcagagtgtgtgtcg

SEQ ID NO: 21748 - DNA, 38 bp, Artificial Sequence; identical to SEQ ID NO: 21728
  primer

SEQ ID NO: 21749 - DNA, 20 bp, Artificial Sequence
  primer
ctatgggagcaccaagaggg

SEQ ID NO: 21750 - DNA, 20 bp, Artificial Sequence
  primer
ggtaaagggaaggaaggagc

SEQ ID NO: 21751 - DNA, 38 bp, Artificial Sequence
  primer
gtaaaacgacggccagtgcccttaggactatcggtcac

SEQ ID NO: 21752 - DNA, 38 bp, Artificial Sequence
  primer
gtaaaacgacggccagttatcgcctcaaattctagccc

SEQ ID NO: 21753 - DNA, 26 bp, Artificial Sequence
  primer
gggattcaaggaaatagacaataatc

SEQ ID NO: 21754 - DNA, 38 bp, Artificial Sequence
  primer
gtaaaacgacggccagttttccataaatgcccgttctg

SEQ ID NO: 21755 - DNA, 25 bp, Artificial Sequence
  primer
aagctgaggacaataacagatcaag

SEQ ID NO: 21756 - DNA, 21 bp, Artificial Sequence
  primer
agcagtgtcctgtttgaatgg

SEQ ID NO: 21757 - DNA, 41 bp, Artificial Sequence
  primer
gtaaaacgacggccagtcttaacaagtgaaggaacacatcc

SEQ ID NO: 21758 - DNA, 23 bp, Artificial Sequence
  primer
cagcttattgctttggagatcag

SEQ ID NO: 21759 - DNA, 37 bp, Artificial Sequence
  primer
gtaaaacgacggccagtgttgccgtgaatggtgaatc

SEQ ID NO: 21760 - DNA, 44 bp, Artificial Sequence
  primer
gtaaaacgacggccagttgcttcttatagacaactaaggctaca

SEQ ID NO: 21761 - DNA, 20 bp, Artificial Sequence
  primer
cagcgtgttcacctggaaag

SEQ ID NO: 21762 - DNA, 44 bp, Artificial Sequence
  primer
gtaaaacgacggccagtagtgttatccatcacatgacattactc

SEQ ID NO: 21763 - DNA, 40 bp, Artificial Sequence
  primer
gtaaaacgacggccagttgacttaaatgtaaggagcagcc

SEQ ID NO: 21764 - DNA, 38 bp, Artificial Sequence
  primer
gtaaaacgacggccagttcagctgactttgacaggaca

SEQ ID NO: 21765 - DNA, 26 bp, Artificial Sequence
  primer
ggactttagttgtgaggtgaatacaa

SEQ ID NO: 21766 - DNA, 39 bp, Artificial Sequence
  primer
gtaaaacgacggccagttgcagtagcaaacctatttggc

SEQ ID NO: 21767 - DNA, 21 bp, Artificial Sequence
  primer
atggtggtttgagtcatctgg

SEQ ID NO: 21768 - DNA, 38 bp, Artificial Sequence
  primer
gtaaaacgacggccagtcatcaccctggtttgagtcag

SEQ ID NO: 21769 - DNA, 38 bp, Artificial Sequence
  primer
gtaaaacgacggccagtcttgtgttagctcaaccaccc

SEQ ID NO: 21770 - DNA, 21 bp, Artificial Sequence
  primer
tgtacccgacaatgaagatgg

SEQ ID NO: 21771 - DNA, 36 bp, Artificial Sequence
  primer
gtaaaacgacggccagtcatcccaagggaaccacag

SEQ ID NO: 21772 - DNA, 21 bp, Artificial Sequence
  primer
gacacggtcccagatacttcg

SEQ ID NO: 21773 - DNA, 38 bp, Artificial Sequence
  primer
gtaaaacgacggccagttgcatttctggtctttgaagc

SEQ ID NO: 21774 - DNA, 40 bp, Artificial Sequence
  primer
gtaaaacgacggccagtcccgtgtggtatgtacagttctc

SEQ ID NO: 21775 - DNA, 22 bp, Artificial Sequence
  primer
tcatatcatcttccaccttgcc

SEQ ID NO: 21776 - DNA, 40 bp, Artificial Sequence
  primer
gtaaaacgacggccagtggaggtggcacttctctattagc

SEQ ID NO: 21777 - DNA, 21 bp, Artificial Sequence
  primer
aagcctgaagaaccattgcac

SEQ ID NO: 21778 - DNA, 38 bp, Artificial Sequence
  primer
gtaaaacgacggccagtctgttcccttcccttacctgg

SEQ ID NO: 21779 - DNA, 38 bp, Artificial Sequence
  primer
gtaaaacgacggccagtgctcaagtctcccatattccg

SEQ ID NO: 21780 - DNA, 38 bp, Artificial Sequence
  primer
gtaaaacgacggccagtctctgcggaacaataacatcg

SEQ ID NO: 21781 - DNA, 19 bp, Artificial Sequence
  primer
gttccctgctctggctgtc

SEQ ID NO: 21782 - DNA, 21 bp, Artificial Sequence
  primer
tttagcatttaggcagggagg

SEQ ID NO: 21783 - DNA, 38 bp, Artificial Sequence
  primer
gtaaaacgacggccagtatcatgggtaggtgtgcaatg

SEQ ID NO: 21784 - DNA, 21 bp, Artificial Sequence
  primer
atttctattgcacccaaaccc

SEQ ID NO: 21785 - DNA, 37 bp, Artificial Sequence
  primer
gtaaaacgacggccagtacttgggacaaagcctggac

SEQ ID NO: 21786 - DNA, 38 bp, Artificial Sequence
  primer
gtaaaacgacggccagtggatgtctggtgtgtcaggtg

SEQ ID NO: 21787 - DNA, 22 bp, Artificial Sequence
  primer
ataacctccattcctcttgctg

SEQ ID NO: 21788 - DNA, 36 bp, Artificial Sequence
  primer
gtaaaacgacggccagtagccgacagtctcctgctc

SEQ ID NO: 21789 - DNA, 21 bp, Artificial Sequence
  primer
ctgagttcttggagggtggac

SEQ ID NO: 21790 - DNA, 38 bp, Artificial Sequence
  primer
gtaaaacgacggccagtcaacacctgcagggaattatg

SEQ ID NO: 21791 - DNA, 38 bp, Artificial Sequence
  primer
gtaaaacgacggccagttaaacaatgcctcctgtgtgc

SEQ ID NO: 21792 - DNA, 39 bp, Artificial Sequence
  primer
gtaaaacgacggccagtaatccataggaaagcccttcac

SEQ ID NO: 21793 - DNA, 38 bp, Artificial Sequence
  primer
gtaaaacgacggccagtgggctggcaaatatgaaggta

SEQ ID NO: 21794 - DNA, 36 bp, Artificial Sequence
  primer
gtaaaacgacggccagtcagatgtgcaccaccatgc

SEQ ID NO: 21795 - DNA, 38 bp, Artificial Sequence
  primer
gtaaaacgacggccagtttgacaggtggaaaggagatg

SEQ ID NO: 21796 - DNA, 38 bp, Artificial Sequence
  primer
gtaaaacgacggccagtgggaagccctgtagtagggac

SEQ ID NO: 21797 - DNA, 38 bp, Artificial Sequence
  primer
gtaaaacgacggccagttttggacttcagagggtggag

SEQ ID NO: 21798 - DNA, 20 bp, Artificial Sequence
  primer
ttgtgtgcatgggactcaag

SEQ ID NO: 21799 - DNA, 38 bp, Artificial Sequence
  primer
gtaaaacgacggccagtgaggaccagtaggcattggac

SEQ ID NO: 21800 - DNA, 21 bp, Artificial Sequence
  primer
ccaggaaacatcaaggaccag

SEQ ID NO: 21801 - DNA, 20 bp, Artificial Sequence
  primer
atggatggatgcagatggag

SEQ ID NO: 21802 - DNA, 21 bp, Artificial Sequence
  primer
ttccttagcaaggagccattc

SEQ ID NO: 21803 - DNA, 21 bp, Artificial Sequence
  primer
atcgggagactacaaggccac

SEQ ID NO: 21804 - DNA, 19 bp, Artificial Sequence
  primer
accggagtctccagcagag

SEQ ID NO: 21805 - DNA, 37 bp, Artificial Sequence
  primer
gtaaaacgacggccagtttctggctgcaataacctgg

SEQ ID NO: 21806 - DNA, 38 bp, Artificial Sequence
  primer
gtaaaacgacggccagtgcacacttcagacctgctgag

SEQ ID NO: 21807 - DNA, 38 bp, Artificial Sequence
  primer
gtaaaacgacggccagttggccatcagacactctgaac

SEQ ID NO: 21808 - DNA, 38 bp, Artificial Sequence
  primer
gtaaaacgacggccagtgagtttcatgctgtcagtggc

SEQ ID NO: 21809 - DNA, 21 bp, Artificial Sequence
  primer
ggaagggtcctagttcaaggg

SEQ ID NO: 21810 - DNA, 20 bp, Artificial Sequence
  primer
agtggctcagccttaggtcc

SEQ ID NO: 21811 - DNA, 21 bp, Artificial Sequence
  primer
cctcatctgtttcaatggtgc

SEQ ID NO: 21812 - DNA, 38 bp, Artificial Sequence
  primer
gtaaaacgacggccagtcagttgctgcatgccgtatag

SEQ ID NO: 21813 - DNA, 21 bp, Artificial Sequence
  primer
ccaacaggcctttctgatctt

SEQ ID NO: 21814 - DNA, 42 bp, Artificial Sequence
  primer
gtaaaacgacggccagtctcagctatttgggtttagactttg

SEQ ID NO: 21815 - DNA, 20 bp, Artificial Sequence
  primer
tgcataaattgtgctgctcc

SEQ ID NO: 21816 - DNA, 41 bp, Artificial Sequence
  primer
gtaaaacgacggccagtctgacaagttctccagtcagtacc

SEQ ID NO: 21817 - DNA, 23 bp, Artificial Sequence
  primer
cagaccacatgctttggactaac

SEQ ID NO: 21818 - DNA, 38 bp, Artificial Sequence
  primer
gtaaaacgacggccagttccctcccaaggtcttctatg

SEQ ID NO: 21819 - DNA, 38 bp, Artificial Sequence
  primer
gtaaaacgacggccagtgtcctttaagtcctgggaggc

SEQ ID NO: 21820 - DNA, 26 bp, Artificial Sequence
  primer
aaacactcttaacaaggaagttctgc

SEQ ID NO: 21821 - DNA, 38 bp, Artificial Sequence
  primer
gtaaaacgacggccagttggcatcctgagacagtgatt

SEQ ID NO: 21822 - DNA, 38 bp, Artificial Sequence
  primer
gtaaaacgacggccagtttgagacgtagtccttccagc

SEQ ID NO: 21823 - DNA, 37 bp, Artificial Sequence
  primer
gtaaaacgacggccagttgacacatgtgcgtgttcag

SEQ ID NO: 21824 - DNA, 21 bp, Artificial Sequence
  primer
ctattcaagtcctttgcctgc

SEQ ID NO: 21825 - DNA, 25 bp, Artificial Sequence
  primer
aaaggcagcaaattgtattaatgat

SEQ ID NO: 21826 - DNA, 22 bp, Artificial Sequence
  primer
cccaccttgcatttagcagtag

SEQ ID NO: 21827 - DNA, 38 bp, Artificial Sequence
  primer
gtaaaacgacggccagtgtgtttggaaacatctgagcc

SEQ ID NO: 21828 - DNA, 39 bp, Artificial Sequence
  primer
gtaaaacgacggccagttcttggacctttctggctttag

SEQ ID NO: 21829 - DNA, 19 bp, Artificial Sequence
  primer
cttctcaggtgagcagccc

SEQ ID NO: 21830 - DNA, 21 bp, Artificial Sequence
  primer
gtggtgactctggacaaggag

SEQ ID NO: 21831 - DNA, 18 bp, Artificial Sequence
  primer
gggaatgagagggttggg

SEQ ID NO: 21832 - DNA, 37 bp, Artificial Sequence
  primer
gtaaaacgacggccagtgttccctggaagacaccctc

SEQ ID NO: 21833 - DNA, 21 bp, Artificial Sequence
  primer
gtcagtgttcacggtcactcg

SEQ ID NO: 21834 - DNA, 20 bp, Artificial Sequence
  primer
cggaaggccactatgagatg

SEQ ID NO: 21835 - DNA, 21 bp, Artificial Sequence
  primer
catcagcactgccacctacac

SEQ ID NO: 21836 - DNA, 18 bp, Artificial Sequence
  primer
acgggactgcctcacctc

SEQ ID NO: 21837 - DNA, 38 bp, Artificial Sequence
  primer
gtaaaacgacggccagtgctgaagtagttgggtagccg

SEQ ID NO: 21838 - DNA, 37 bp, Artificial Sequence
  primer
gtaaaacgacggccagtcgcactatgagatgatgggc

SEQ ID NO: 21839 - DNA, 19 bp, Artificial Sequence
  primer
tttcatccagggacccaag

SEQ ID NO: 21840 - DNA, 37 bp, Artificial Sequence
  primer
gtaaaacgacggccagtgagtgtggaccctgaagcag

SEQ ID NO: 21841 - DNA, 35 bp, Artificial Sequence
  primer
gtaaaacgacggccagtagcaggagtcggcagcag

SEQ ID NO: 21842 - DNA, 35 bp, Artificial Sequence
  primer
gtaaaacgacggccagtgcagacaagaggatcgcc

SEQ ID NO: 21843 - DNA, 37 bp, Artificial Sequence
  primer
gtaaaacgacggccagtcactacgagatgctgggcac

SEQ ID NO: 21844 - DNA, 19 bp, Artificial Sequence
  primer
caagatcgccttctacgcc

SEQ ID NO: 21845 - DNA, 21 bp, Artificial Sequence
  primer
tgaggtcaacatggactttgc

SEQ ID NO: 21846 - DNA, 38 bp, Artificial Sequence
  primer
gtaaaacgacggccagtgagtgaggaagatttgctggc

SEQ ID NO: 21847 - DNA, 20 bp, Artificial Sequence
  primer
gcactacgagatgctgggtc

SEQ ID NO: 21848 - DNA, 38 bp, Artificial Sequence
  primer
gtaaaacgacggccagtactccgtgatgtcctaccctc

SEQ ID NO: 21849 - DNA, 38 bp, Artificial Sequence
  primer
gtaaaacgacggccagttacaacagtacaggatgcgcc

SEQ ID NO: 21850 - DNA, 21 bp, Artificial Sequence
  primer
ctgtgaagagcaaggaggagg

SEQ ID NO: 21851 - DNA, 37 bp, Artificial Sequence
  primer
gtaaaacgacggccagtgctgtgtgtctctgctgctg

SEQ ID NO: 21852 - DNA, 21 bp, Artificial Sequence
  primer
ttcgtgtgcaagttcagcttc

SEQ ID NO: 21853 - DNA, 37 bp, Artificial Sequence
  primer
gtaaaacgacggccagttggctgcaacttcaacaatg

SEQ ID NO: 21854 - DNA, 20 bp, Artificial Sequence
  primer
ggatgagtgtgctctgggtc

SEQ ID NO: 21855 - DNA, 21 bp, Artificial Sequence
  primer
aacacacaagggtccttccac

SEQ ID NO: 21856 - DNA, 21 bp, Artificial Sequence
  primer
cccaccacaagtagaccttcg

SEQ ID NO: 21857 - DNA, 20 bp, Artificial Sequence
  primer
cagacacaccctggtccttg

SEQ ID NO: 21858 - DNA, 21 bp, Artificial Sequence
  primer
tttcaggctgtttctctgtgc

SEQ ID NO: 21859 - DNA, 21 bp, Artificial Sequence
  primer
gggtccaggtgagagagtgag

SEQ ID NO: 21860 - DNA, 38 bp, Artificial Sequence
  primer
gtaaaacgacggccagtctcaggacactaccggattgc

SEQ ID NO: 21861 - DNA, 21 bp, Artificial Sequence
  primer
ttcgtgaacctctacgaccac

SEQ ID NO: 21862 - DNA, 21 bp, Artificial Sequence
  primer
gggtccaggtgagagagtgag

SEQ ID NO: 21863 - DNA, 36 bp, Artificial Sequence
  primer
gtaaaacgacggccagtgtatcccagctgcctcctc

SEQ ID NO: 21864 - DNA, 39 bp, Artificial Sequence
  primer
gtaaaacgacggccagttgtctgcaaagccttcttgttc

SEQ ID NO: 21865 - DNA, 38 bp, Artificial Sequence
  primer
gtaaaacgacggccagtagctgctctgtcttccagtcc

SEQ ID NO: 21866 - DNA, 37 bp, Artificial Sequence
  primer
gtaaaacgacggccagtgccactacaatgcttccagc

SEQ ID NO: 21867 - DNA, 21 bp, Artificial Sequence
  primer
gtgcacacaaatcgttcttgc

SEQ ID NO: 21868 - DNA, 21 bp, Artificial Sequence
  primer
atcttgctgtgattcgattgg

SEQ ID NO: 21869 - DNA, 38 bp, Artificial Sequence
  primer
gtaaaacgacggccagtacaggctttggagctttaggg

SEQ ID NO: 21870 - DNA, 40 bp, Artificial Sequence
  primer
gtaaaacgacggccagtttgatgtttattcccaatcttgc

SEQ ID NO: 21871 - DNA, 21 bp, Artificial Sequence
  primer
ggccaaggagagacaccatac

SEQ ID NO: 21872 - DNA, 38 bp, Artificial Sequence
  primer
gtaaaacgacggccagtggagcacagactttggtgaag

SEQ ID NO: 21873 - DNA, 21 bp, Artificial Sequence
  primer
ctacttgtgggtcaagggcag

SEQ ID NO: 21874 - DNA, 21 bp, Artificial Sequence
  primer
acttcttctccttcacggctg

SEQ ID NO: 21875 - DNA, 38 bp, Artificial Sequence
  primer
gtaaaacgacggccagtctacctagtctacgccgacgc

SEQ ID NO: 21876 - DNA, 20 bp, Artificial Sequence
  primer
accgagttcgtcaacattgg

SEQ ID NO: 21877 - DNA, 35 bp, Artificial Sequence
  primer
gtaaaacgacggccagttcccgactccagtcctgc

SEQ ID NO: 21878 - DNA, 39 bp, Artificial Sequence
  primer
gtaaaacgacggccagtgggtacggtgaccttagagtcg

SEQ ID NO: 21879 - DNA, 18 bp, Artificial Sequence
  primer
gtctgacgcacccttgcc

SEQ ID NO: 21880 - DNA, 38 bp, Artificial Sequence
  primer
gtaaaacgacggccagtaacgagcagggacattacgac

SEQ ID NO: 21881 - DNA, 38 bp, Artificial Sequence
  primer
gtaaaacgacggccagtatccctgcctccctttatctc

SEQ ID NO: 21882 - DNA, 38 bp, Artificial Sequence
  primer
gtaaaacgacggccagtggacaataaccttccctctgg

SEQ ID NO: 21883 - DNA, 20 bp, Artificial Sequence
  primer
gagcaggctcagatgtccac

SEQ ID NO: 21884 - DNA, 21 bp, Artificial Sequence
  primer
tgcacagctggaattacaagg

SEQ ID NO: 21885 - DNA, 21 bp, Artificial Sequence
  primer
ttcaatcatgccaaaccacac

SEQ ID NO: 21886 - DNA, 37 bp, Artificial Sequence
  primer
gtaaaacgacggccagtacaaagttgggatgtgctgg

SEQ ID NO: 21887 - DNA, 21 bp, Artificial Sequence
  primer
aggaccagagggagagaaagg

SEQ ID NO: 21888 - DNA, 21 bp, Artificial Sequence
  primer
tgggcaataccggataaagac

SEQ ID NO: 21889 - DNA, 38 bp, Artificial Sequence
  primer
gtaaaacgacggccagttccactggctgtattcccaac

SEQ ID NO: 21890 - DNA, 38 bp, Artificial Sequence
  primer
gtaaaacgacggccagtcttacagtgacccttgagccc

SEQ ID NO: 21891 - DNA, 20 bp, Artificial Sequence
  primer
ctgcaggtgagaagggtgag

SEQ ID NO: 21892 - DNA, 20 bp, Artificial Sequence
  primer
gcaccacaaacagggatttc

SEQ ID NO: 21893 - DNA, 19 bp, Artificial Sequence
  primer
ccagtggtatggccgtctc

SEQ ID NO: 21894 - DNA, 38 bp, Artificial Sequence
  primer
gtaaaacgacggccagtcgagacaaggaggaccatcac

SEQ ID NO: 21895 - DNA, 38 bp, Artificial Sequence
  primer
gtaaaacgacggccagtcctccctaagatcagagccac

SEQ ID NO: 21896 - DNA, 21 bp, Artificial Sequence
  primer
tgagccagagtggtgtagcag

SEQ ID NO: 21897 - DNA, 21 bp, Artificial Sequence
  primer
aaggcaggatttcatcaccac

SEQ ID NO: 21898 - DNA, 21 bp, Artificial Sequence
  primer
gcagaaggaaagagatgtggg

SEQ ID NO: 21899 - DNA, 21 bp, Artificial Sequence
  primer
ctctttggatgtgttcctggg

SEQ ID NO: 21900 - DNA, 21 bp, Artificial Sequence
  primer
cgataccttctacgacctggg

SEQ ID NO: 21901 - DNA, 39 bp, Artificial Sequence
  primer
gtaaaacgacggccagtgggaactgtggagttgcttaac

SEQ ID NO: 21902 - DNA, 37 bp, Artificial Sequence
  primer
gtaaaacgacggccagtacagcttctagccctgcctc

SEQ ID NO: 21903 - DNA, 36 bp, Artificial Sequence
  primer
gtaaaacgacggccagtgtgaggtgccttctgagcc

SEQ ID NO: 21904 - DNA, 38 bp, Artificial Sequence
  primer
gtaaaacgacggccagtgtatagccatgggccagaatc

SEQ ID NO: 21905 - DNA, 37 bp, Artificial Sequence
  primer
gtaaaacgacggccagtcaaatgcctgacaccctctg

SEQ ID NO: 21906 - DNA, 21 bp, Artificial Sequence
  primer
ctgatcccagagcctcttcac

SEQ ID NO: 21907 - DNA, 21 bp, Artificial Sequence
  primer
agtgtgaatgtgttcttgggc

SEQ ID NO: 21908 - DNA, 21 bp, Artificial Sequence
  primer
gtctgtctgcccgataatgag

SEQ ID NO: 21909 - DNA, 38 bp, Artificial Sequence
  primer
gtaaaacgacggccagtctttgaaggtgacactgagcc

SEQ ID NO: 21910 - DNA, 21 bp, Artificial Sequence
  primer
cttctgcctctggcaaatagc

SEQ ID NO: 21911 - DNA, 21 bp, Artificial Sequence
  primer
ggtagcggaataaggatgtgg

SEQ ID NO: 21912 - DNA, 38 bp, Artificial Sequence
  primer
gtaaaacgacggccagttcccttgacggatctttaagc

SEQ ID NO: 21913 - DNA, 39 bp, Artificial Sequence
  primer
gtaaaacgacggccagttgaatgcaggactgtcagtttc

SEQ ID NO: 21914 - DNA, 37 bp, Artificial Sequence
  primer
gtaaaacgacggccagtgtgtgagccactgcactcag

SEQ ID NO: 21915 - DNA, 21 bp, Artificial Sequence
  primer
gcgggtggttagttggtaatg

SEQ ID NO: 21916 - DNA, 38 bp, Artificial Sequence
  primer
gtaaaacgacggccagtaaggccagagatcaattccag

SEQ ID NO: 21917 - DNA, 38 bp, Artificial Sequence
  primer
gtaaaacgacggccagtgaagcagtgaggatgaacctg

SEQ ID NO: 21918 - DNA, 21 bp, Artificial Sequence
  primer
gagatgttccctttgtctccc

SEQ ID NO: 21919 - DNA, 38 bp, Artificial Sequence
  primer
gtaaaacgacggccagtgaagccagcatcatttcttcc

SEQ ID NO: 21920 - DNA, 21 bp, Artificial Sequence
  primer
tctctcccatctgcctaccag

SEQ ID NO: 21921 - DNA, 38 bp, Artificial Sequence
  primer
gtaaaacgacggccagtttcacccttcagttcagtccc

SEQ ID NO: 21922 - DNA, 38 bp, Artificial Sequence
  primer
gtaaaacgacggccagtcagcttgaattcccatgtgtg

SEQ ID NO: 21923 - DNA, 21 bp, Artificial Sequence
  primer
ttgacagccagttgaccattc

SEQ ID NO: 21924 - DNA, 37 bp, Artificial Sequence
  primer
gtaaaacgacggccagtagcttctgctggcaactgag

SEQ ID NO: 21925 - DNA, 20 bp, Artificial Sequence
  primer
gctgctcctcgaatcttgtg

SEQ ID NO: 21926 - DNA, 37 bp, Artificial Sequence
  primer
gtaaaacgacggccagtaggatgcaaccttcctggag

SEQ ID NO: 21927 - DNA, 38 bp, Artificial Sequence
  primer
gtaaaacgacggccagttgtcggtctcactccagtttc

SEQ ID NO: 21928 - DNA, 18 bp, Artificial Sequence
  primer
ctagcctgggtggcagag

SEQ ID NO: 21929 - DNA, 38 bp, Artificial Sequence
  primer
gtaaaacgacggccagttgctttcctactcttccaggg

SEQ ID NO: 21930 - DNA, 21 bp, Artificial Sequence
  primer
aaggcagacaggtagcagtgg

SEQ ID NO: 21931 - DNA, 38 bp, Artificial Sequence
  primer
gtaaaacgacggccagtacatatgctgggtgagtgagc

SEQ ID NO: 21932 - DNA, 22 bp, Artificial Sequence
  primer
ccctggcatgtcactattaagg

SEQ ID NO: 21933 - DNA, 38 bp, Artificial Sequence
  primer
gtaaaacgacggccagtagatcctaccacctcacccag

SEQ ID NO: 21934 - DNA, 38 bp, Artificial Sequence
  primer
gtaaaacgacggccagtgtaaagatgtccacccatgcc

SEQ ID NO: 21935 - DNA, 38 bp, Artificial Sequence
  primer
gtaaaacgacggccagttgagtgctgggacttatggtg

SEQ ID NO: 21936 - DNA, 21 bp, Artificial Sequence
  primer
aagtgatctgcctgcctcaac

SEQ ID NO: 21937 - DNA, 38 bp, Artificial Sequence
  primer
gtaaaacgacggccagtaggtggtgacagaccagttcc

SEQ ID NO: 21938 - DNA, 21 bp, Artificial Sequence
  primer
gaggcctttgagggatctagg

SEQ ID NO: 21939 - DNA, 38 bp, Artificial Sequence
  primer
gtaaaacgacggccagttggctgaactgagaggaacag

SEQ ID NO: 21940 - DNA, 19 bp, Artificial Sequence
  primer
caaatgagccacccacctc

SEQ ID NO: 21941 - DNA, 37 bp, Artificial Sequence
  primer
gtaaaacgacggccagtgtctgagaacggtgagacgc

SEQ ID NO: 21942 - DNA, 21 bp, Artificial Sequence
  primer
agcctttcttaacaggctccc

SEQ ID NO: 21943 - DNA, 21 bp, Artificial Sequence
  primer
tgctccgagaaggaactcaag

SEQ ID NO: 21944 - DNA, 38 bp, Artificial Sequence
  primer
gtaaaacgacggccagtcaacctaccagacaccacagc

SEQ ID NO: 21945 - DNA, 20 bp, Artificial Sequence
  primer
cttctgcagctcccacagtc

SEQ ID NO: 21946 - DNA, 38 bp, Artificial Sequence
  primer
gtaaaacgacggccagttgctgttattggtgctgttgg

SEQ ID NO: 21947 - DNA, 20 bp, Artificial Sequence
  primer
attcacctgtcagggatcgg

SEQ ID NO: 21948 - DNA, 38 bp, Artificial Sequence
  primer
gtaaaacgacggccagtagtctgtgttgatcgcctttg

SEQ ID NO: 21949 - DNA, 38 bp, Artificial Sequence
  primer
gtaaaacgacggccagtccattcgtgatccttgaatcc

SEQ ID NO: 21950 - DNA, 21 bp, Artificial Sequence
  primer
tggctcatccctcttctgttc

SEQ ID NO: 21951 - DNA, 20 bp, Artificial Sequence
  primer
gtgtggacacccttggacac

SEQ ID NO: 21952 - DNA, 21 bp, Artificial Sequence
  primer
gatgcaagtccctcattcagc

SEQ ID NO: 21953 - DNA, 36 bp, Artificial Sequence
  primer
gtaaaacgacggccagtaagggaagagtcccgcagt

SEQ ID NO: 21954 - DNA, 38 bp, Artificial Sequence
  primer
gtaaaacgacggccagtgctgttcctacgttctccacc

SEQ ID NO: 21955 - DNA, 38 bp, Artificial Sequence
  primer
gtaaaacgacggccagtttgctctgacctcacctcctc

SEQ ID NO: 21956 - DNA, 20 bp, Artificial Sequence
  primer
cttgtgggagtgtttctggg

SEQ ID NO: 21957 - DNA, 36 bp, Artificial Sequence
  primer
gtaaaacgacggccagtacagaatacgcgctccctc

SEQ ID NO: 21958 - DNA, 39 bp, Artificial Sequence
  primer
gtaaaacgacggccagttggcagagaactttgtcactcc

SEQ ID NO: 21959 - DNA, 21 bp, Artificial Sequence
  primer
ccttctctccgcttccctatc

SEQ ID NO: 21960 - DNA, 37 bp, Artificial Sequence
  primer
gtaaaacgacggccagtgagctgcaagtgttctgggt

SEQ ID NO: 21961 - DNA, 21 bp, Artificial Sequence
  primer
atttgtagagccctagccctg

SEQ ID NO: 21962 - DNA, 21 bp, Artificial Sequence
  primer
catctgccaggaatccaataa

SEQ ID NO: 21963 - DNA, 38 bp, Artificial Sequence
  primer
gtaaaacgacggccagtgcccatcctctctctctgact

SEQ ID NO: 21964 - DNA, 39 bp, Artificial Sequence
  primer
gtaaaacgacggccagttgctgttgtaacacgaactgtg

SEQ ID NO: 21965 - DNA, 18 bp, Artificial Sequence
  primer
ctagcgggtgagccaagg

SEQ ID NO: 21966 - DNA, 40 bp, Artificial Sequence
  primer
gtaaaacgacggccagtgggtaactgatctctcatccagc

SEQ ID NO: 21967 - DNA, 21 bp, Artificial Sequence
  primer
actgcacctggccactaagac

SEQ ID NO: 21968 - DNA, 19 bp, Artificial Sequence
  primer
ctccggctcacagctcttc

SEQ ID NO: 21969 - DNA, 38 bp, Artificial Sequence
  primer
gtaaaacgacggccagtcgagttcctgagaaagtgtgg

SEQ ID NO: 21970 - DNA, 18 bp, Artificial Sequence
  primer
acctggtaccacctgccc

SEQ ID NO: 21971 - DNA, 38 bp, Artificial Sequence
  primer
gtaaaacgacggccagtcaaccagactgtgagcttccc

SEQ ID NO: 21972 - DNA, 26 bp, Artificial Sequence
  primer
tggcatcaagtatgtgaacagtttat

SEQ ID NO: 21973 - DNA, 23 bp, Artificial Sequence
  primer
acacttaccagtcattctttggc

SEQ ID NO: 21974 - DNA, 38 bp, Artificial Sequence
  primer
gtaaaacgacggccagtaggaaggtgcatctcttgcag

SEQ ID NO: 21975 - DNA, 21 bp, Artificial Sequence
  primer
cagactgactcacctgatggc

SEQ ID NO: 21976 - DNA, 38 bp, Artificial Sequence
  primer
gtaaaacgacggccagtctcgatgctaatcacacaggg

SEQ ID NO: 21977 - DNA, 38 bp, Artificial Sequence
  primer
gtaaaacgacggccagtctcacttcaaggtttgagggc

SEQ ID NO: 21978 - DNA, 38 bp, Artificial Sequence
  primer
gtaaaacgacggccagtaggacacagggtgggatactc

SEQ ID NO: 21979 - DNA, 20 bp, Artificial Sequence
  primer
ctcaccgcctgtaggagacc

SEQ ID NO: 21980 - DNA, 37 bp, Artificial Sequence
  primer
gtaaaacgacggccagtgaacgactctgaaggcatgg

SEQ ID NO: 21981 - DNA, 38 bp, Artificial Sequence
  primer
gtaaaacgacggccagtacagctccatagactgaggcg

SEQ ID NO: 21982 - DNA, 21 bp, Artificial Sequence
  primer
ccttgtgtccagggatggtag

SEQ ID NO: 21983 - DNA, 39 bp, Artificial Sequence
  primer
gtaaaacgacggccagtgacagtgccaaggaaggtacac

SEQ ID NO: 21984 - DNA, 38 bp, Artificial Sequence
  primer
gtaaaacgacggccagtcactgcactcaacagcctctc

SEQ ID NO: 21985 - DNA, 38 bp, Artificial Sequence
  primer
gtaaaacgacggccagttacaccctcgccttacctcag

SEQ ID NO: 21986 - DNA, 38 bp, Artificial Sequence
  primer
gtaaaacgacggccagtccacctagaagagaaggcacc

SEQ ID NO: 21987 - DNA, 37 bp, Artificial Sequence
  primer
gtaaaacgacggccagtactgaggaaggaggtgaggg

SEQ ID NO: 21988 - DNA, 21 bp, Artificial Sequence
  primer
ctcccttagactcagcctccc

SEQ ID NO: 21989 - DNA, 39 bp, Artificial Sequence
  primer
gtaaaacgacggccagtggttcaacacacgaatgaatcc

SEQ ID NO: 21990 - DNA, 21 bp, Artificial Sequence
  primer
ttacctgctcctccctacctg

SEQ ID NO: 21991 - DNA, 38 bp, Artificial Sequence
  primer
gtaaaacgacggccagtaaggaaacaggctgaatggtg

SEQ ID NO: 21992 - DNA, 38 bp, Artificial Sequence
  primer
gtaaaacgacggccagtcaatgacagacacatggcttg

SEQ ID NO: 21993 - DNA, 21 bp, Artificial Sequence
  primer
aggatctgcaagaaggacagg

SEQ ID NO: 21994 - DNA, 38 bp, Artificial Sequence
  primer
gtaaaacgacggccagtcagagaggtcaaaccctttgc

SEQ ID NO: 21995 - DNA, 38 bp, Artificial Sequence
  primer
gtaaaacgacggccagtagggcttcatgtggttcactg

SEQ ID NO: 21996 - DNA, 20 bp, Artificial Sequence
  primer
acacccacgaagaatgatgg

SEQ ID NO: 21997 - DNA, 37 bp, Artificial Sequence
  primer
gtaaaacgacggccagtcttcaggaaccctgagcctg

SEQ ID NO: 21998 - DNA, 38 bp, Artificial Sequence
  primer
gtaaaacgacggccagttctgtatttgtgggttcaggg

SEQ ID NO: 21999 - DNA, 21 bp, Artificial Sequence
  primer
aaagcctctctgtgatgtgcc

SEQ ID NO: 22000 - DNA, 37 bp, Artificial Sequence
  primer
gtaaaacgacggccagtcgctaagcagaggaggtgag

SEQ ID NO: 22001 - DNA, 21 bp, Artificial Sequence
  primer
ctagtgacatttgcaggtggg

SEQ ID NO: 22002 - DNA, 21 bp, Artificial Sequence
  primer
ctaaggcagactgagggcttg

SEQ ID NO: 22003 - DNA, 38 bp, Artificial Sequence
  primer
gtaaaacgacggccagtgggctatatgctctggtgtcc

SEQ ID NO: 22004 - DNA, 38 bp, Artificial Sequence
  primer
gtaaaacgacggccagtagtgagcaggtggtacttggg

SEQ ID NO: 22005 - DNA, 21 bp, Artificial Sequence
  primer
ttatgattgtgcgggtctctg

SEQ ID NO: 22006 - DNA, 38 bp, Artificial Sequence
  primer
gtaaaacgacggccagtagatttggctgtagtgggagg

SEQ ID NO: 22007 - DNA, 38 bp, Artificial Sequence
  primer
gtaaaacgacggccagtagccagctgtgaaggagtagg

SEQ ID NO: 22008 - DNA, 20 bp, Artificial Sequence
  primer
atagcagctcggaggtgtcg

SEQ ID NO: 22009 - DNA, 38 bp, Artificial Sequence
  primer
gtaaaacgacggccagtcctaggtgtggccagtactcc

SEQ ID NO: 22010 - DNA, 21 bp, Artificial Sequence
  primer
aatgcagacagaatgtgggac

SEQ ID NO: 22011 - DNA, 38 bp, Artificial Sequence
  primer
gtaaaacgacggccagtagaagctgcctaacaaccctg

SEQ ID NO: 22012 - DNA, 38 bp, Artificial Sequence
  primer
gtaaaacgacggccagtggtggctctgcaacttctcac

SEQ ID NO: 22013 - DNA, 20 bp, Artificial Sequence
  primer
agcagatctcctcctccctg

SEQ ID NO: 22014 - DNA, 21 bp, Artificial Sequence
  primer
ttcttccgtaatgtgtgtggc

SEQ ID NO: 22015 - DNA, 38 bp, Artificial Sequence
  primer
gtaaaacgacggccagtgaactggtttatggccgagtc

SEQ ID NO: 22016 - DNA, 38 bp, Artificial Sequence
  primer
gtaaaacgacggccagtcctcctagctgctactgtggg

SEQ ID NO: 22017 - DNA, 38 bp, Artificial Sequence
  primer
gtaaaacgacggccagtacctgcctgtctctagggttg

SEQ ID NO: 22018 - DNA, 38 bp, Artificial Sequence
  primer
gtaaaacgacggccagtctgcatgtgcatcattctgtg

SEQ ID NO: 22019 - DNA, 38 bp, Artificial Sequence
  primer
gtaaaacgacggccagtacctgttcctgtactcccagg

SEQ ID NO: 22020 - DNA, 39 bp, Artificial Sequence
  primer
gtaaaacgacggccagtaaggagaatgacagcatgaagg

SEQ ID NO: 22021 - DNA, 38 bp, Artificial Sequence
  primer
gtaaaacgacggccagtgacacctgcagtttgtcgaag

SEQ ID NO: 22022 - DNA, 38 bp, Artificial Sequence
  primer
gtaaaacgacggccagtaggtcaagaagctgcagtacg

SEQ ID NO: 22023 - DNA, 21 bp, Artificial Sequence
  primer
tgtgtctggacaacgagtgtg

SEQ ID NO: 22024 - DNA, 38 bp, Artificial Sequence
  primer
gtaaaacgacggccagttggttcaagcctcttagggag

SEQ ID NO: 22025 - DNA, 21 bp, Artificial Sequence
  primer
gtatttggacagcttgggtcc

SEQ ID NO: 22026 - DNA, 37 bp, Artificial Sequence
  primer
gtaaaacgacggccagtcaccacccagactttcctcc

SEQ ID NO: 22027 - DNA, 20 bp, Artificial Sequence
  primer
gtgctcctcgacctacatgg

SEQ ID NO: 22028 - DNA, 38 bp, Artificial Sequence
  primer
gtaaaacgacggccagtctagggaggttgtgggacttg

SEQ ID NO: 22029 - DNA, 37 bp, Artificial Sequence
  primer
gtaaaacgacggccagtagggaaggagagagaagggc

SEQ ID NO: 22030 - DNA, 21 bp, Artificial Sequence
  primer
tgatgtaggttctgtgggctg

SEQ ID NO: 22031 - DNA, 21 bp, Artificial Sequence
  primer
agattcaagcactgaggtcgg

SEQ ID NO: 22032 - DNA, 37 bp, Artificial Sequence
  primer
gtaaaacgacggccagtcaagacggtcctggtctttg

SEQ ID NO: 22033 - DNA, 21 bp, Artificial Sequence
  primer
ccagatagcgcctcttcaaac

SEQ ID NO: 22034 - DNA, 38 bp, Artificial Sequence
  primer
gtaaaacgacggccagttcacctatcagcgcttccttc

SEQ ID NO: 22035 - DNA, 21 bp, Artificial Sequence
  primer
cttgggctcaggagatggtag

SEQ ID NO: 22036 - DNA, 38 bp, Artificial Sequence
  primer
gtaaaacgacggccagtgatgcatgctagctgtccaag

SEQ ID NO: 22037 - DNA, 37 bp, Artificial Sequence
  primer
gtaaaacgacggccagtgattcctgctcttgggtgtg

SEQ ID NO: 22038 - DNA, 36 bp, Artificial Sequence
  primer
gtaaaacgacggccagtccacaacactgccatccag

SEQ ID NO: 22039 - DNA, 21 bp, Artificial Sequence
  primer
gggcgataagacaggtgaaac

SEQ ID NO: 22040 - DNA, 22 bp, Artificial Sequence
  primer
tgcagctttaattctcacatgg

SEQ ID NO: 22041 - DNA, 37 bp, Artificial Sequence
  primer
gtaaaacgacggccagtaatggtgaggtttgggcttc

SEQ ID NO: 22042 - DNA, 21 bp, Artificial Sequence
  primer
ttccatagccattgagagcag

SEQ ID NO: 22043 - DNA, 38 bp, Artificial Sequence
  primer
gtaaaacgacggccagttggtacggctgtagaccaaac

SEQ ID NO: 22044 - DNA, 38 bp, Artificial Sequence
  primer
gtaaaacgacggccagtaaccaatccagtattcagggc

SEQ ID NO: 22045 - DNA, 21 bp, Artificial Sequence
  primer
tctccatgaaggaatgtgagc

SEQ ID NO: 22046 - DNA, 38 bp, Artificial Sequence
  primer
gtaaaacgacggccagtggtagaatggctgggtcagag

SEQ ID NO: 22047 - DNA, 38 bp, Artificial Sequence
  primer
gtaaaacgacggccagtagcaaggaagatgaggcaaag

SEQ ID NO: 22048 - DNA, 24 bp, Artificial Sequence
  primer
ggaaagtccatcacaaagtttgac

SEQ ID NO: 22049 - DNA, 21 bp, Artificial Sequence
  primer
tatggttggatttggatctgc

SEQ ID NO: 22050 - DNA, 21 bp, Artificial Sequence
  primer
gaaggacatccaggtctcagg

SEQ ID NO: 22051 - DNA, 38 bp, Artificial Sequence
  primer
gtaaaacgacggccagttgccgggtttaatcaaataga

SEQ ID NO: 22052 - DNA, 21 bp, Artificial Sequence
  primer
tgtggatatttgtgctgtggg

SEQ ID NO: 22053 - DNA, 38 bp, Artificial Sequence
  primer
gtaaaacgacggccagtaaagaagcaaggttgtcaggg

SEQ ID NO: 22054 - DNA, 21 bp, Artificial Sequence
  primer
tcctccaagagaaaggcagag

SEQ ID NO: 22055 - DNA, 38 bp, Artificial Sequence
  primer
gtaaaacgacggccagttggcagggtagagtcaagctc

SEQ ID NO: 22056 - DNA, 38 bp, Artificial Sequence
  primer
gtaaaacgacggccagtagaagacctggtcaccaaagc

SEQ ID NO: 22057 - DNA, 39 bp, Artificial Sequence
  primer
gtaaaacgacggccagttgtgctgctgtttggagttaag

SEQ ID NO: 22058 - DNA, 21 bp, Artificial Sequence
  primer
acgtggactgtcattgaggag

SEQ ID NO: 22059 - DNA, 22 bp, Artificial Sequence
  primer
cctaccatggaggagatttctg

SEQ ID NO: 22060 - DNA, 38 bp, Artificial Sequence
  primer
gtaaaacgacggccagttttggtaattggtgaacacgc

SEQ ID NO: 22061 - DNA, 38 bp, Artificial Sequence
  primer
gtaaaacgacggccagttctgatttagggtggcaacag

SEQ ID NO: 22062 - DNA, 19 bp, Artificial Sequence
  primer
cctacctgcgggtcatctc

SEQ ID NO: 22063 - DNA, 38 bp, Artificial Sequence
  primer
gtaaaacgacggccagtacttgctcttgaaggctctgg

SEQ ID NO: 22064 - DNA, 20 bp, Artificial Sequence
  primer
gggttcccttagctgtctgg

SEQ ID NO: 22065 - DNA, 21 bp, Artificial Sequence
  primer
acacactaagcagggctaggg

SEQ ID NO: 22066 - DNA, 21 bp, Artificial Sequence
  primer
gaagactttgaccgggagttc

SEQ ID NO: 22067 - DNA, 38 bp, Artificial Sequence
  primer
gtaaaacgacggccagtctcctacctcgctctaccagg

SEQ ID NO: 22068 - DNA, 38 bp, Artificial Sequence
  primer
gtaaaacgacggccagtccctgccctcaaccataatag

SEQ ID NO: 22069 - DNA, 38 bp, Artificial Sequence
  primer
gtaaaacgacggccagtaagtgggagaccctgactctg

SEQ ID NO: 22070 - DNA, 21 bp, Artificial Sequence
  primer
cccttgaaaccaactcctcag

SEQ ID NO: 22071 - DNA, 41 bp, Artificial Sequence
  primer
gtaaaacgacggccagtcctttagggtaattcctctcctgc

SEQ ID NO: 22072 - DNA, 21 bp, Artificial Sequence
  primer
acgccatacagttagggcaat

SEQ ID NO: 22073 - DNA, 27 bp, Artificial Sequence
  primer
ccaattaacctgaatataaacacttgc

SEQ ID NO: 22074 - DNA, 41 bp, Artificial Sequence
  primer
gtaaaacgacggccagtggcatcatactatgtgttggaaag

SEQ ID NO: 22075 - DNA, 21 bp, Artificial Sequence
  primer
tttcaattcagcctttgcttc

SEQ ID NO: 22076 - DNA, 43 bp, Artificial Sequence
  primer
gtaaaacgacggccagttttctcaactgccttaccatattacc

SEQ ID NO: 22077 - DNA, 38 bp, Artificial Sequence
  primer
gtaaaacgacggccagttttgtttctctgggttggacc

SEQ ID NO: 22078 - DNA, 38 bp, Artificial Sequence
  primer
gtaaaacgacggccagttgctcaatgttccacttaggg

SEQ ID NO: 22079 - DNA, 25 bp, Artificial Sequence
  primer
aaaccaggctttattagagggtatg

SEQ ID NO: 22080 - DNA, 21 bp, Artificial Sequence
  primer
aagtcatttcatccctcacgg

SEQ ID NO: 22081 - DNA, 38 bp, Artificial Sequence
  primer
gtaaaacgacggccagtcataaacctgcctttgccatc

SEQ ID NO: 22082 - DNA, 38 bp, Artificial Sequence
  primer
gtaaaacgacggccagtaacaagcaaatggaaagtggg

SEQ ID NO: 22083 - DNA, 21 bp, Artificial Sequence
  primer
gcctaatgctctggtgtttcc

SEQ ID NO: 22084 - DNA, 21 bp, Artificial Sequence
  primer
ttgacaccctgaagagctgag

SEQ ID NO: 22085 - DNA, 22 bp, Artificial Sequence
  primer
tgttgccctggctttatatttg

SEQ ID NO: 22086 - DNA, 38 bp, Artificial Sequence
  primer
gtaaaacgacggccagtgaatgggatgactgtgtgctg

SEQ ID NO: 22087 - DNA, 38 bp, Artificial Sequence
  primer
gtaaaacgacggccagttaagagggtgggcaaatatcc

SEQ ID NO: 22088 - DNA, 38 bp, Artificial Sequence
  primer
gtaaaacgacggccagttagcattggtgggaaggtagc

SEQ ID NO: 22089 - DNA, 42 bp, Artificial Sequence
  primer
gtaaaacgacggccagtgcactaggtactgagtaaagatggg

SEQ ID NO: 22090 - DNA, 38 bp, Artificial Sequence
  primer
gtaaaacgacggccagtcctcattgtcaggactggctt

SEQ ID NO: 22091 - DNA, 37 bp, Artificial Sequence
  primer
gtaaaacgacggccagtcgacagcatgagattccagc

SEQ ID NO: 22092 - DNA, 37 bp, Artificial Sequence
  primer
gtaaaacgacggccagtcccagaaactgtggtaaggc

SEQ ID NO: 22093 - DNA, 38 bp, Artificial Sequence
  primer
gtaaaacgacggccagttagtcactgtacccggctgtg

SEQ ID NO: 22094 - DNA, 20 bp, Artificial Sequence
  primer
gtttggcaactcagaaaccg

SEQ ID NO: 22095 - DNA, 35 bp, Artificial Sequence
  primer
gtaaaacgacggccagtactcccaccagctcgcag

SEQ ID NO: 22096 - DNA, 39 bp, Artificial Sequence
  primer
gtaaaacgacggccagttctcagaaagtgacattgaggc

SEQ ID NO: 22097 - DNA, 39 bp, Artificial Sequence
  primer
gtaaaacgacggccagtaaaggtgagccagaggtactcc

SEQ ID NO: 22098 - DNA, 37 bp, Artificial Sequence
  primer
gtaaaacgacggccagtcagcggacaaggaatttcac

SEQ ID NO: 22099 - DNA, 38 bp, Artificial Sequence
  primer
gtaaaacgacggccagtcacccagtctctgatcgtcac

SEQ ID NO: 22100 - DNA, 38 bp, Artificial Sequence
  primer
gtaaaacgacggccagtttgctccagtaacttcttggg

SEQ ID NO: 22101 - DNA, 38 bp, Artificial Sequence
  primer
gtaaaacgacggccagttacctcatgccacaaacaacc

SEQ ID NO: 22102 - DNA, 38 bp, Artificial Sequence
  primer
gtaaaacgacggccagttttgtgccttgcttgtcattc

SEQ ID NO: 22103 - DNA, 38 bp, Artificial Sequence
  primer
gtaaaacgacggccagtcagagatccacaggctgattg

SEQ ID NO: 22104 - DNA, 21 bp, Artificial Sequence
  primer
gatgaacaaacactccctccc

SEQ ID NO: 22105 - DNA, 40 bp, Artificial Sequence
  primer
gtaaaacgacggccagtcagccttgtacatctttgtccac

SEQ ID NO: 22106 - DNA, 38 bp, Artificial Sequence
  primer
gtaaaacgacggccagttcagaaatggccacagtatcc

SEQ ID NO: 22107 - DNA, 21 bp, Artificial Sequence
  primer
ttgacaccctgaagagctgag

SEQ ID NO: 22108 - DNA, 21 bp, Artificial Sequence
  primer
tgtatgaggcctttccatttg

SEQ ID NO: 22109 - DNA, 40 bp, Artificial Sequence
  primer
gtaaaacgacggccagtaatccatctggaacattcttgtg

SEQ ID NO: 22110 - DNA, 21 bp, Artificial Sequence
  primer
ttcagtgctgcatattagccg

SEQ ID NO: 22111 - DNA, 37 bp, Artificial Sequence
  primer
gtaaaacgacggccagtgagtcccaaaccactagccc

SEQ ID NO: 22112 - DNA, 39 bp, Artificial Sequence
  primer
gtaaaacgacggccagttcatgttagtgctgaaagctgc

SEQ ID NO: 22113 - DNA, 38 bp, Artificial Sequence
  primer
gtaaaacgacggccagtaaagcacggtttctgaaggtc

SEQ ID NO: 22114 - DNA, 25 bp, Artificial Sequence
  primer
aggatagcaatagtgttcaacttgg

SEQ ID NO: 22115 - DNA, 21 bp, Artificial Sequence
  primer
gcaactcaaccctctgtttcc

SEQ ID NO: 22116 - DNA, 23 bp, Artificial Sequence
  primer
tcaggaaagtatcaaatcatggg

SEQ ID NO: 22117 - DNA, 38 bp, Artificial Sequence
  primer
gtaaaacgacggccagtcaaagctcgttgtcaatgtgg

SEQ ID NO: 22118 - DNA, 20 bp, Artificial Sequence
  primer
gcgtgacctagttgacaggc

SEQ ID NO: 22119 - DNA, 39 bp, Artificial Sequence
  primer
gtaaaacgacggccagttcactggatttgcattgtgttc

SEQ ID NO: 22120 - DNA, 39 bp, Artificial Sequence
  primer
gtaaaacgacggccagtaggagatggatatgatccttgg

SEQ ID NO: 22121 - DNA, 19 bp, Artificial Sequence
  primer
gagctgctgttcgagaccc

SEQ ID NO: 22122 - DNA, 21 bp, Artificial Sequence
  primer
aaggccatcacacatctcaag

SEQ ID NO: 22123 - DNA, 21 bp, Artificial Sequence
  primer
taagactgccctgtgcctctc

SEQ ID NO: 22124 - DNA, 21 bp, Artificial Sequence
  primer
cgcgtgttcaagatctacctg

SEQ ID NO: 22125 - DNA, 35 bp, Artificial Sequence
  primer
gtaaaacgacggccagtggctccgtgtccctgatg

SEQ ID NO: 22126 - DNA, 38 bp, Artificial Sequence
  primer
gtaaaacgacggccagtggcaacgagatcgacactatg

SEQ ID NO: 22127 - DNA, 36 bp, Artificial Sequence
  primer
gtaaaacgacggccagtaccttcgacgaccttgtgc

SEQ ID NO: 22128 - DNA, 21 bp, Artificial Sequence
  primer
gagcacttcaacctcaacgtg

SEQ ID NO: 22129 - DNA, 17 bp, Artificial Sequence
  primer
gcggaatggtatggccc

SEQ ID NO: 22130 - DNA, 38 bp, Artificial Sequence
  primer
gtaaaacgacggccagtgctcagcacaagtggacaaag

SEQ ID NO: 22131 - DNA, 20 bp, Artificial Sequence
  primer
gagctcacccttctgtctgc

SEQ ID NO: 22132 - DNA, 21 bp, Artificial Sequence
  primer
ctggtcagcttcctcaccttt

SEQ ID NO: 22133 - DNA, 38 bp, Artificial Sequence
  primer
gtaaaacgacggccagtgtgaggtcacaatgttgccag

SEQ ID NO: 22134 - DNA, 18 bp, Artificial Sequence
  primer
gagggtcccaggagaagc

SEQ ID NO: 22135 - DNA, 35 bp, Artificial Sequence
  primer
gtaaaacgacggccagtcccttcatgacggaaggc

SEQ ID NO: 22136 - DNA, 20 bp, Artificial Sequence
  primer
acgactactaccggcgtgag

SEQ ID NO: 22137 - DNA, 20 bp, Artificial Sequence
  primer
gttccacttccagcaacagc

SEQ ID NO: 22138 - DNA, 37 bp, Artificial Sequence
  primer
gtaaaacgacggccagtcccaatcctctcctggactc

SEQ ID NO: 22139 - DNA, 20 bp, Artificial Sequence
  primer
agatgctaggccgagaccac

SEQ ID NO: 22140 - DNA, 20 bp, Artificial Sequence
  primer
acgggacagacgtcacagag

SEQ ID NO: 22141 - DNA, 21 bp, Artificial Sequence
  primer
caaactcagtggaacatggga

SEQ ID NO: 22142 - DNA, 38 bp, Artificial Sequence
  primer
gtaaaacgacggccagtgaatagtttgcaaagggcagg

SEQ ID NO: 22143 - DNA, 19 bp, Artificial Sequence
  primer
catccaatcagccatgcac

SEQ ID NO: 22144 - DNA, 38 bp, Artificial Sequence
  primer
gtaaaacgacggccagtaacgagaccttgaaggaggag

SEQ ID NO: 22145 - DNA, 19 bp, Artificial Sequence
  primer
actctcaggcagtgtcggg

SEQ ID NO: 22146 - DNA, 38 bp, Artificial Sequence
  primer
gtaaaacgacggccagttggaaggccatcacagagaag

SEQ ID NO: 22147 - DNA, 18 bp, Artificial Sequence
  primer
agagtgggagcagcccag

SEQ ID NO: 22148 - DNA, 36 bp, Artificial Sequence
  primer
gtaaaacgacggccagtcaggcagcagaggctatgg

SEQ ID NO: 22149 - DNA, 18 bp, Artificial Sequence
  primer
acctctggccaggtccac

SEQ ID NO: 22150 - DNA, 37 bp, Artificial Sequence
  primer
gtaaaacgacggccagtctggacctcagtttcctcgc

SEQ ID NO: 22151 - DNA, 21 bp, Artificial Sequence
  primer
gcttctcctccctcacacttc

SEQ ID NO: 22152 - DNA, 21 bp, Artificial Sequence
  primer
gcttctcctccctcacacttc

SEQ ID NO: 22153 - DNA, 37 bp, Artificial Sequence
  primer
gtaaaacgacggccagtgaaggccagagaagcagagg

SEQ ID NO: 22154 - DNA, 18 bp, Artificial Sequence
  primer
cactgcacctgctcctgg

SEQ ID NO: 22155 - DNA, 20 bp, Artificial Sequence
  primer
ctccctaccagtcggctcag

SEQ ID NO: 22156 - DNA, 21 bp, Artificial Sequence
  primer
aggactgtgccctagacaagc

SEQ ID NO: 22157 - DNA, 36 bp, Artificial Sequence
  primer
gtaaaacgacggccagtctgtccagggctgagttgg

SEQ ID NO: 22158 - DNA, 37 bp, Artificial Sequence
  primer
gtaaaacgacggccagttggctccacccatcctagtc

SEQ ID NO: 22159 - DNA, 38 bp, Artificial Sequence
  primer
gtaaaacgacggccagtgctgaagtgctgagaccagag

SEQ ID NO: 22160 - DNA, 22 bp, Artificial Sequence
  primer
gaactggatgagacagacaccc

SEQ ID NO: 22161 - DNA, 38 bp, Artificial Sequence
  primer
gtaaaacgacggccagtcaccggtttctgtaggaacaa

SEQ ID NO: 22162 - DNA, 21 bp, Artificial Sequence
  primer
ctaggtgagagccagtgttgc

SEQ ID NO: 22163 - DNA, 38 bp, Artificial Sequence
  primer
gtaaaacgacggccagtaggagtggagtggagctcttg

SEQ ID NO: 22164 - DNA, 20 bp, Artificial Sequence
  primer
ccttgttcagcaccatccag

SEQ ID NO: 22165 - DNA, 38 bp, Artificial Sequence
  primer
gtaaaacgacggccagtgctgtaaatgctggacccaag

SEQ ID NO: 22166 - DNA, 21 bp, Artificial Sequence
  primer
gtgtacaagcaggactgtggg

SEQ ID NO: 22167 - DNA, 38 bp, Artificial Sequence
  primer
gtaaaacgacggccagtcagtccagagctcctctcagc

SEQ ID NO: 22168 - DNA, 38 bp, Artificial Sequence
  primer
gtaaaacgacggccagtcggaagatgtgtgtaaggctg

SEQ ID NO: 22169 - DNA, 21 bp, Artificial Sequence
  primer
gcatcctccacaggagaagag

SEQ ID NO: 22170 - DNA, 20 bp, Artificial Sequence
  primer
agcgtgggtgacaaagtgag

SEQ ID NO: 22171 - DNA, 21 bp, Artificial Sequence
  primer
ctagaccatccaggcaggttc

SEQ ID NO: 22172 - DNA, 20 bp, Artificial Sequence
  primer
gtgagggctgattagccagg

SEQ ID NO: 22173 - DNA, 20 bp, Artificial Sequence
  primer
agatttgggccattgcactc

SEQ ID NO: 22174 - DNA, 37 bp, Artificial Sequence
  primer
gtaaaacgacggccagtatgaagcgccacatgcttag

SEQ ID NO: 22175 - DNA, 21 bp, Artificial Sequence
  primer
tagcccagtgtctgagtggtt

SEQ ID NO: 22176 - DNA, 21 bp, Artificial Sequence
  primer
gcccagccatcttctgtattc

SEQ ID NO: 22177 - DNA, 23 bp, Artificial Sequence
  primer
aaagcgaaatgtataccagcaaa

SEQ ID NO: 22178 - DNA, 38 bp, Artificial Sequence
  primer
gtaaaacgacggccagtcagcagtttgtggtaaggctg

SEQ ID NO: 22179 - DNA, 28 bp, Artificial Sequence
  primer
gcaaactatatgataggtattgtgttcg

SEQ ID NO: 22180 - DNA, 21 bp, Artificial Sequence
  primer
gcttattgggcagggatagtg

SEQ ID NO: 22181 - DNA, 23 bp, Artificial Sequence
  primer
gcatgtattcattatgattcccg

SEQ ID NO: 22182 - DNA, 37 bp, Artificial Sequence
  primer
gtaaaacgacggccagtattctgctggaaggagcagc

SEQ ID NO: 22183 - DNA, 38 bp, Artificial Sequence
  primer
gtaaaacgacggccagtgaacctggacctcatgctttg

SEQ ID NO: 22184 - DNA, 21 bp, Artificial Sequence
  primer
ctcaccctcttaccttggtgg

SEQ ID NO: 22185 - DNA, 38 bp, Artificial Sequence
  primer
gtaaaacgacggccagtcgcctaactttatgccaggtc

SEQ ID NO: 22186 - DNA, 38 bp, Artificial Sequence
  primer
gtaaaacgacggccagtaagaccagagggtccattcac

SEQ ID NO: 22187 - DNA, 38 bp, Artificial Sequence
  primer
gtaaaacgacggccagtggccacgaatacagaaaccag

SEQ ID NO: 22188 - DNA, 38 bp, Artificial Sequence
  primer
gtaaaacgacggccagtgaacaaaggaactggatgtgg

SEQ ID NO: 22189 - DNA, 38 bp, Artificial Sequence
  primer
gtaaaacgacggccagtatgcccaaggtgaactactgg

SEQ ID NO: 22190 - DNA, 21 bp, Artificial Sequence
  primer
tcaatctatccgcactgcatc

SEQ ID NO: 22191 - DNA, 37 bp, Artificial Sequence
  primer
gtaaaacgacggccagtcaggatctcgctcccttctc

SEQ ID NO: 22192 - DNA, 17 bp, Artificial Sequence
  primer
ggtggaaccccagagcc

SEQ ID NO: 22193 - DNA, 18 bp, Artificial Sequence
  primer
atctgcagcctggactgg

SEQ ID NO: 22194 - DNA, 20 bp, Artificial Sequence
  primer
gtgcgcatcttcacacactg

SEQ ID NO: 22195 - DNA, 38 bp, Artificial Sequence
  primer
gtaaaacgacggccagtaggcaagcacagtgacagatg

SEQ ID NO: 22196 - DNA, 38 bp, Artificial Sequence
  primer
gtaaaacgacggccagtctggaccaaacatgcccttag

SEQ ID NO: 22197 - DNA, 38 bp, Artificial Sequence
  primer
gtaaaacgacggccagtctcaggtaagatgggactggg

SEQ ID NO: 22198 - DNA, 21 bp, Artificial Sequence
  primer
tttactgcagagaccattgcc

SEQ ID NO: 22199 - DNA, 21 bp, Artificial Sequence
  primer
cacctgtactggcctctatcg

SEQ ID NO: 22200 - DNA, 21 bp, Artificial Sequence
  primer
ggaggattcaaggagggtacg

SEQ ID NO: 22201 - DNA, 18 bp, Artificial Sequence
  primer
tcgcaagacctcggactg

SEQ ID NO: 22202 - DNA, 20 bp, Artificial Sequence
  primer
aggatgagtgaggccacgtc

SEQ ID NO: 22203 - DNA, 21 bp, Artificial Sequence
  primer
gaggtacagctgggagtgtgg

SEQ ID NO: 22204 - DNA, 21 bp, Artificial Sequence
  primer
ctggctacagcttgctctctg

SEQ ID NO: 22205 - DNA, 38 bp, Artificial Sequence
  primer
gtaaaacgacggccagtacctagaacacccagctcctg

SEQ ID NO: 22206 - DNA, 21 bp, Artificial Sequence
  primer
gcttctccatcacctactccg

SEQ ID NO: 22207 - DNA, 38 bp, Artificial Sequence
  primer
gtaaaacgacggccagtagctgggagacactacggaag

SEQ ID NO: 22208 - DNA, 38 bp, Artificial Sequence
  primer
gtaaaacgacggccagttgagcccttcctcatggatac

SEQ ID NO: 22209 - DNA, 38 bp, Artificial Sequence
  primer
gtaaaacgacggccagtgagccaaatgctttgctagag

SEQ ID NO: 22210 - DNA, 21 bp, Artificial Sequence
  primer
cactttgtgtccacttgtccc

SEQ ID NO: 22211 - DNA, 21 bp, Artificial Sequence
  primer
ttcagaagaggaggtgatggc

SEQ ID NO: 22212 - DNA, 24 bp, Artificial Sequence
  primer
tctttatgtttccacgatctaggg

SEQ ID NO: 22213 - DNA, 40 bp, Artificial Sequence
  primer
gtaaaacgacggccagtttggatttatcaagagggaggac

SEQ ID NO: 22214 - DNA, 21 bp, Artificial Sequence
  primer
ctgtgcctggtcaacaaagag

SEQ ID NO: 22215 - DNA, 39 bp, Artificial Sequence
  primer
gtaaaacgacggccagtggcttgaggaccaacatgtaac

SEQ ID NO: 22216 - DNA, 37 bp, Artificial Sequence
  primer
gtaaaacgacggccagtgggcaacaagagggaaactc

SEQ ID NO: 22217 - DNA, 39 bp, Artificial Sequence
  primer
gtaaaacgacggccagttctctgaattggtcaggctttc

SEQ ID NO: 22218 - DNA, 41 bp, Artificial Sequence
  primer
gtaaaacgacggccagtgcctatagctagcgtagagtggag

SEQ ID NO: 22219 - DNA, 21 bp, Artificial Sequence
  primer
agcattccaggctgaaagaac

SEQ ID NO: 22220 - DNA, 21 bp, Artificial Sequence
  primer
taatgcccttccatgtgtgtc

SEQ ID NO: 22221 - DNA, 44 bp, Artificial Sequence
  primer
gtaaaacgacggccagtgacaagagagtctatgacctctgacac

SEQ ID NO: 22222 - DNA, 21 bp, Artificial Sequence
  primer
gttccatcagtttctgctccc

SEQ ID NO: 22223 - DNA, 21 bp, Artificial Sequence
  primer
tggtgtggacttcagatgctc

SEQ ID NO: 22224 - DNA, 21 bp, Artificial Sequence
  primer
gagtacagacacctgggttcg

SEQ ID NO: 22225 - DNA, 38 bp, Artificial Sequence
  primer
gtaaaacgacggccagtactatttccaaagtgcctgcc

SEQ ID NO: 22226 - DNA, 22 bp, Artificial Sequence
  primer
cattgtccatttggcctacttc

SEQ ID NO: 22227 - DNA, 38 bp, Artificial Sequence
  primer
gtaaaacgacggccagtttaatcagtgctgtccttggc

SEQ ID NO: 22228 - DNA, 21 bp, Artificial Sequence
  primer
atgactgtgcctcattgcatc

SEQ ID NO: 22229 - DNA, 21 bp, Artificial Sequence
  primer
ctttgaatgggactggacagg

SEQ ID NO: 22230 - DNA, 37 bp, Artificial Sequence
  primer
gtaaaacgacggccagtggctgcagggatggttagag

SEQ ID NO: 22231 - DNA, 38 bp, Artificial Sequence
  primer
gtaaaacgacggccagttgtgacatgtgacttctggca

SEQ ID NO: 22232 - DNA, 38 bp, Artificial Sequence
  primer
gtaaaacgacggccagtaccactatgaggtacggccac

SEQ ID NO: 22233 - DNA, 21 bp, Artificial Sequence
  primer
cgagtcagatgacagccagac

SEQ ID NO: 22234 - DNA, 21 bp, Artificial Sequence
  primer
acctgcataacctaagagccc

SEQ ID NO: 22235 - DNA, 21 bp, Artificial Sequence
  primer
agagcacagtcagtgcaaagg

SEQ ID NO: 22236 - DNA, 38 bp, Artificial Sequence
  primer
gtaaaacgacggccagtccagcctaagaagccagagtc

SEQ ID NO: 22237 - DNA, 21 bp, Artificial Sequence
  primer
accttgtcacaggccattcag

SEQ ID NO: 22238 - DNA, 41 bp, Artificial Sequence
  primer
gtaaaacgacggccagtttatgctttaaggagtttggaagc

SEQ ID NO: 22239 - DNA, 38 bp, Artificial Sequence
  primer
gtaaaacgacggccagtctggcccatcttggaataaag

SEQ ID NO: 22240 - DNA, 38 bp, Artificial Sequence
  primer
gtaaaacgacggccagttctgattcggaaagaattccc

SEQ ID NO: 22241 - DNA, 21 bp, Artificial Sequence
  primer
ttattcagcttgagtggctgc

SEQ ID NO: 22242 - DNA, 38 bp, Artificial Sequence
  primer
gtaaaacgacggccagtccatgaagaaatccacccatc

SEQ ID NO: 22243 - DNA, 37 bp, Artificial Sequence
  primer
gtaaaacgacggccagtctattagatttgaggcgcgg

SEQ ID NO: 22244 - DNA, 21 bp, Artificial Sequence
  primer
caacaacagaggtgcttccag

SEQ ID NO: 22245 - DNA, 38 bp, Artificial Sequence
  primer
gtaaaacgacggccagtggcaataatgccaagtaaccc

SEQ ID NO: 22246 - DNA, 38 bp, Artificial Sequence
  primer
gtaaaacgacggccagtattaggtaggaggcatgaccg

SEQ ID NO: 22247 - DNA, 38 bp, Artificial Sequence
  primer
gtaaaacgacggccagttacagcctggagaggagtctg

SEQ ID NO: 22248 - DNA, 21 bp, Artificial Sequence
  primer
aggaattctgccatctgttgc

SEQ ID NO: 22249 - DNA, 38 bp, Artificial Sequence
  primer
gtaaaacgacggccagtactgacaggctcccttgaatc

SEQ ID NO: 22250 - DNA, 20 bp, Artificial Sequence
  primer
agtgtgatgcttcccgactg

SEQ ID NO: 22251 - DNA, 38 bp, Artificial Sequence
  primer
gtaaaacgacggccagtgtacatgtctgtagccggtgg

SEQ ID NO: 22252 - DNA, 21 bp, Artificial Sequence
  primer
tgaaggctctccctttcactc

SEQ ID NO: 22253 - DNA, 21 bp, Artificial Sequence
  primer
gcatttatcggtggaataggg

SEQ ID NO: 22254 - DNA, 38 bp, Artificial Sequence
  primer
gtaaaacgacggccagtctgtccttggcctcagtatcc

SEQ ID NO: 22255 - DNA, 35 bp, Artificial Sequence
  primer
gtaaaacgacggccagtctttgcctgtggctggtc

SEQ ID NO: 22256 - DNA, 37 bp, Artificial Sequence
  primer
gtaaaacgacggccagttgagagggatgggaaggaag

SEQ ID NO: 22257 - DNA, 39 bp, Artificial Sequence
  primer
gtaaaacgacggccagtgggctttctggagggtatttag

SEQ ID NO: 22258 - DNA, 38 bp, Artificial Sequence
  primer
gtaaaacgacggccagtggtcctgccagtgactacacc

SEQ ID NO: 22259 - DNA, 38 bp, Artificial Sequence
  primer
gtaaaacgacggccagttagagggtcaccaccttctcc

SEQ ID NO: 22260 - DNA, 38 bp, Artificial Sequence
  primer
gtaaaacgacggccagtaggcctcagtgactctccatc

SEQ ID NO: 22261 - DNA, 38 bp, Artificial Sequence
  primer
gtaaaacgacggccagtgagaatcagagcggcagtatg

SEQ ID NO: 22262 - DNA, 38 bp, Artificial Sequence
  primer
gtaaaacgacggccagtaaggatcgcctcctttcctac

SEQ ID NO: 22263 - DNA, 21 bp, Artificial Sequence
  primer
aaggctttcctgggagtgaag

SEQ ID NO: 22264 - DNA, 21 bp, Artificial Sequence
  primer
tcaatctcagaggaaggaggc

SEQ ID NO: 22265 - DNA, 37 bp, Artificial Sequence
  primer
gtaaaacgacggccagtgacaccaccaagagccactc

SEQ ID NO: 22266 - DNA, 37 bp, Artificial Sequence
  primer
gtaaaacgacggccagtatcctatgccattgcccttc

SEQ ID NO: 22267 - DNA, 37 bp, Artificial Sequence
  primer
gtaaaacgacggccagtgtgggcattgtacagttggg

SEQ ID NO: 22268 - DNA, 38 bp, Artificial Sequence
  primer
gtaaaacgacggccagtctcccacctgtgtgtcttctg

SEQ ID NO: 22269 - DNA, 21 bp, Artificial Sequence
  primer
agcagccaagtgaatgcttag

SEQ ID NO: 22270 - DNA, 20 bp, Artificial Sequence
  primer
gccacattgcctctcatctc

SEQ ID NO: 22271 - DNA, 21 bp, Artificial Sequence
  primer
gggaagagtggtgaacgaaac

SEQ ID NO: 22272 - DNA, 38 bp, Artificial Sequence
  primer
gtaaaacgacggccagttttcaggctgtaacctcgttg

SEQ ID NO: 22273 - DNA, 37 bp, Artificial Sequence
  primer
gtaaaacgacggccagtgtggacggaacagatggatg

SEQ ID NO: 22274 - DNA, 21 bp, Artificial Sequence
  primer
ggctggtaatcctgtttcctg

SEQ ID NO: 22275 - DNA, 37 bp, Artificial Sequence
  primer
gtaaaacgacggccagttctttcgaggtcactggtgg

SEQ ID NO: 22276 - DNA, 37 bp, Artificial Sequence
  primer
gtaaaacgacggccagtggaatagggtcagcagggtc

SEQ ID NO: 22277 - DNA, 21 bp, Artificial Sequence
  primer
aagtcagagcctgtcccacac

SEQ ID NO: 22278 - DNA, 38 bp, Artificial Sequence
  primer
gtaaaacgacggccagttggagaagtcatcccgttcag

SEQ ID NO: 22279 - DNA, 37 bp, Artificial Sequence
  primer
gtaaaacgacggccagtgttgggtggaggcttactgg

SEQ ID NO: 22280 - DNA, 38 bp, Artificial Sequence
  primer
gtaaaacgacggccagtccgaggtgttggtgatattcc

SEQ ID NO: 22281 - DNA, 21 bp, Artificial Sequence
  primer
ggtgagatccttgagtccgag

SEQ ID NO: 22282 - DNA, 21 bp, Artificial Sequence
  primer
gagagggaatggcatcttgac

SEQ ID NO: 22283 - DNA, 38 bp, Artificial Sequence
  primer
gtaaaacgacggccagtttcacgtgtgacttgagggac

SEQ ID NO: 22284 - DNA, 38 bp, Artificial Sequence
  primer
gtaaaacgacggccagtgagcctggactagtgacccac

SEQ ID NO: 22285 - DNA, 38 bp, Artificial Sequence
  primer
gtaaaacgacggccagttgccaagttgcatcatctttc

SEQ ID NO: 22286 - DNA, 38 bp, Artificial Sequence
  primer
gtaaaacgacggccagtgacttgcttgggttcacacag

SEQ ID NO: 22287 - DNA, 38 bp, Artificial Sequence
  primer
gtaaaacgacggccagtatgcatcaaagagccactcag

SEQ ID NO: 22288 - DNA, 21 bp, Artificial Sequence
  primer
atctgcgtatggtgatgatgg

SEQ ID NO: 22289 - DNA, 39 bp, Artificial Sequence
  primer
gtaaaacgacggccagttgctctgtgtttagaggttggc

SEQ ID NO: 22290 - DNA, 38 bp, Artificial Sequence
  primer
gtaaaacgacggccagttcatgctcagggttaacgaag

SEQ ID NO: 22291 - DNA, 38 bp, Artificial Sequence
  primer
gtaaaacgacggccagtcaggtggagagtgatcgtgag

SEQ ID NO: 22292 - DNA, 38 bp, Artificial Sequence
  primer
gtaaaacgacggccagtcaggtctgtgtctccaccttg

SEQ ID NO: 22293 - DNA, 22 bp, Artificial Sequence
  primer
tcttacaaatactggcggcttc

SEQ ID NO: 22294 - DNA, 38 bp, Artificial Sequence
  primer
gtaaaacgacggccagtatccgtaggcaggtgagtagc

SEQ ID NO: 22295 - DNA, 35 bp, Artificial Sequence
  primer
gtaaaacgacggccagtcatgcaggtcttcgtccc

SEQ ID NO: 22296 - DNA, 38 bp, Artificial Sequence
  primer
gtaaaacgacggccagtatcaacaccttgcaacaaagc

SEQ ID NO: 22297 - DNA, 37 bp, Artificial Sequence
  primer
gtaaaacgacggccagtttgttgtttgggtttcggtg

SEQ ID NO: 22298 - DNA, 38 bp, Artificial Sequence
  primer
gtaaaacgacggccagtggtgaatttcttggcaacatc

SEQ ID NO: 22299 - DNA, 21 bp, Artificial Sequence
  primer
gggattaactcaggaacagcc

SEQ ID NO: 22300 - DNA, 22 bp, Artificial Sequence
  primer
gaggaacaaactcattgcttgg

SEQ ID NO: 22301 - DNA, 38 bp, Artificial Sequence
  primer
gtaaaacgacggccagtgaattgtgtgtgggttgcttc

SEQ ID NO: 22302 - DNA, 41 bp, Artificial Sequence
  primer
gtaaaacgacggccagttgctcatttagcaatgaaataacc

SEQ ID NO: 22303 - DNA, 41 bp, Artificial Sequence
  primer
gtaaaacgacggccagtttgaaggctatctttgagaccaag

SEQ ID NO: 22304 - DNA, 38 bp, Artificial Sequence
  primer
gtaaaacgacggccagttaaagggaaggacaaacaccc

SEQ ID NO: 22305 - DNA, 22 bp, Artificial Sequence
  primer
tgtctttgagtcttgaaacccg

SEQ ID NO: 22306 - DNA, 37 bp, Artificial Sequence
  primer
gtaaaacgacggccagtgccttctgtggcttgaacag

SEQ ID NO: 22307 - DNA, 38 bp, Artificial Sequence
  primer
gtaaaacgacggccagtagttctggcctccagtgaatc

SEQ ID NO: 22308 - DNA, 38 bp, Artificial Sequence
  primer
gtaaaacgacggccagttctgcttaaccagtccttccg

SEQ ID NO: 22309 - DNA, 40 bp, Artificial Sequence
  primer
gtaaaacgacggccagttttcccatcctgtttagatgttt

SEQ ID NO: 22310 - DNA, 40 bp, Artificial Sequence
  primer
gtaaaacgacggccagtcacatagtacacatggctctgct

SEQ ID NO: 22311 - DNA, 21 bp, Artificial Sequence
  primer
tgtgctttaaagaggaacacg

SEQ ID NO: 22312 - DNA, 18 bp, Artificial Sequence
  primer
cctcccacacacaccacc

SEQ ID NO: 22313 - DNA, 21 bp, Artificial Sequence
  primer
ctccaacacagtgatgtgtgc

SEQ ID NO: 22314 - DNA, 21 bp, Artificial Sequence
  primer
tttgtttgagagcagtggctg

SEQ ID NO: 22315 - DNA, 21 bp, Artificial Sequence
  primer
gaggaagctttgggttcagag

SEQ ID NO: 22316 - DNA, 18 bp, Artificial Sequence
  primer
gggctgggatgtgaggag

SEQ ID NO: 22317 - DNA, 38 bp, Artificial Sequence
  primer
gtaaaacgacggccagtatgtgtggctcttgtttaggg

SEQ ID NO: 22318 - DNA, 21 bp, Artificial Sequence
  primer
tgagagcttctgcagtgtgtg

SEQ ID NO: 22319 - DNA, 38 bp, Artificial Sequence
  primer
gtaaaacgacggccagtctgctgtctggacttgagctg

SEQ ID NO: 22320 - DNA, 38 bp, Artificial Sequence
  primer
gtaaaacgacggccagtaggttctgccctctttcattg

SEQ ID NO: 22321 - DNA, 39 bp, Artificial Sequence
  primer
gtaaaacgacggccagtcaaggcagaggagagaaagttg

SEQ ID NO: 22322 - DNA, 36 bp, Artificial Sequence
  primer
gtaaaacgacggccagtcctccctgtctcctcctgg

SEQ ID NO: 22323 - DNA, 38 bp, Artificial Sequence
  primer
gtaaaacgacggccagtgagcactttccagcataaggc

SEQ ID NO: 22324 - DNA, 38 bp, Artificial Sequence
  primer
gtaaaacgacggccagtctgtggtctccttgtgctttc

SEQ ID NO: 22325 - DNA, 21 bp, Artificial Sequence
  primer
aaactgtctgcacccttgacc

SEQ ID NO: 22326 - DNA, 21 bp, Artificial Sequence
  primer
gaaatccagcagaaatcaggc

SEQ ID NO: 22327 - DNA, 21 bp, Artificial Sequence
  primer
tggcaacaagcagtgtatgtg

SEQ ID NO: 22328 - DNA, 39 bp, Artificial Sequence
  primer
gtaaaacgacggccagttgccgtcttaagtctaactggg

SEQ ID NO: 22329 - DNA, 20 bp, Artificial Sequence
  primer
gatctgagtagccagcgtcg

SEQ ID NO: 22330 - DNA, 21 bp, Artificial Sequence
  primer
agccataattgttgatggtgg

SEQ ID NO: 22331 - DNA, 37 bp, Artificial Sequence
  primer
gtaaaacgacggccagtaagccagcaggaatgaaatg

SEQ ID NO: 22332 - DNA, 39 bp, Artificial Sequence
  primer
gtaaaacgacggccagtgaacattgtcaacactgaaggg

SEQ ID NO: 22333 - DNA, 38 bp, Artificial Sequence
  primer
gtaaaacgacggccagtgagtagaaagcagccctggag

SEQ ID NO: 22334 - DNA, 38 bp, Artificial Sequence
  primer
gtaaaacgacggccagtgcaggttgctgctgttatgtg

SEQ ID NO: 22335 - DNA, 21 bp, Artificial Sequence
  primer
ctgcattacataccaccaccc

SEQ ID NO: 22336 - DNA, 26 bp, Artificial Sequence
  primer
gaagtttctgtaatcagtaggaaggc

SEQ ID NO: 22337 - DNA, 21 bp, Artificial Sequence
  primer
tatttgggttgcaaactgagg

SEQ ID NO: 22338 - DNA, 22 bp, Artificial Sequence
  primer
ttagtctctccaatgacctggg

SEQ ID NO: 22339 - DNA, 37 bp, Artificial Sequence
  primer
gtaaaacgacggccagttggcagggtgtaggacattg

SEQ ID NO: 22340 - DNA, 37 bp, Artificial Sequence
  primer
gtaaaacgacggccagttggtgatggttctttcaggg

SEQ ID NO: 22341 - DNA, 38 bp, Artificial Sequence
  primer
gtaaaacgacggccagtattgcccattctgacaatctg

SEQ ID NO: 22342 - DNA, 38 bp, Artificial Sequence
  primer
gtaaaacgacggccagtatcccattggccactatgttg

SEQ ID NO: 22343 - DNA, 39 bp, Artificial Sequence
  primer
gtaaaacgacggccagtcaggtaatgtccagatcccttg

SEQ ID NO: 22344 - DNA, 24 bp, Artificial Sequence
  primer
gcttagattcatcacttctgctgg

SEQ ID NO: 22345 - DNA, 38 bp, Artificial Sequence
  primer
gtaaaacgacggccagttctcacatgttggaagcaatg

SEQ ID NO: 22346 - DNA, 22 bp, Artificial Sequence
  primer
ttcagcctgagttcaagtaccc

SEQ ID NO: 22347 - DNA, 39 bp, Artificial Sequence
  primer
gtaaaacgacggccagtaaattaaacaggatgctgctgg

SEQ ID NO: 22348 - DNA, 21 bp, Artificial Sequence
  primer
tcagacaaggctgaactggag

SEQ ID NO: 22349 - DNA, 21 bp, Artificial Sequence
  primer
tttgaagaggagaggctgagg

SEQ ID NO: 22350 - DNA, 38 bp, Artificial Sequence
  primer
gtaaaacgacggccagtcagtgggtggaagaggagaag

SEQ ID NO: 22351 - DNA, 38 bp, Artificial Sequence
  primer
gtaaaacgacggccagtacggaagtgcctcaagatttc

SEQ ID NO: 22352 - DNA, 38 bp, Artificial Sequence
  primer
gtaaaacgacggccagtaattcactgccaacattgcac

SEQ ID NO: 22353 - DNA, 21 bp, Artificial Sequence
  primer
cccatggcactttatgtcttg

SEQ ID NO: 22354 - DNA, 38 bp, Artificial Sequence
  primer
gtaaaacgacggccagtgaaggagattgctccctgttg

SEQ ID NO: 22355 - DNA, 21 bp, Artificial Sequence
  primer
cagttctctgatggcagatgg

SEQ ID NO: 22356 - DNA, 38 bp, Artificial Sequence
  primer
gtaaaacgacggccagtcctacccgagcaggatatttg

SEQ ID NO: 22357 - DNA, 38 bp, Artificial Sequence
  primer
gtaaaacgacggccagtagatctgagagccaaagctgc

SEQ ID NO: 22358 - DNA, 38 bp, Artificial Sequence
  primer
gtaaaacgacggccagtgtgataaagcaaggcaggacc

SEQ ID NO: 22359 - DNA, 21 bp, Artificial Sequence
  primer
ccaccctgtccagctaatttc

SEQ ID NO: 22360 - DNA, 35 bp, Artificial Sequence
  primer
gtaaaacgacggccagttgcctccacctcctgagc

SEQ ID NO: 22361 - DNA, 21 bp, Artificial Sequence
  primer
ggcagtcctgggttctgttag

SEQ ID NO: 22362 - DNA, 20 bp, Artificial Sequence
  primer
gtgacctgcgaccctagacc

SEQ ID NO: 22363 - DNA, 38 bp, Artificial Sequence
  primer
gtaaaacgacggccagtcaggaagcacatactgttgcc

SEQ ID NO: 22364 - DNA, 38 bp, Artificial Sequence
  primer
gtaaaacgacggccagtagcagactgtgcaacggatag

SEQ ID NO: 22365 - DNA, 38 bp, Artificial Sequence
  primer
gtaaaacgacggccagtgacagatcattgctgtggtcc

SEQ ID NO: 22366 - DNA, 24 bp, Artificial Sequence
  primer
ccagtattctcacaccatgttcac

SEQ ID NO: 22367 - DNA, 21 bp, Artificial Sequence
  primer
caccacttgtcctgaacgatg

SEQ ID NO: 22368 - DNA, 37 bp, Artificial Sequence
  primer
gtaaaacgacggccagttctttccaccctgtgctgac

SEQ ID NO: 22369 - DNA, 21 bp, Artificial Sequence
  primer
aaggagcccatgtggatttag

SEQ ID NO: 22370 - DNA, 38 bp, Artificial Sequence
  primer
gtaaaacgacggccagtggtcctcaatgtaccatgtgc

SEQ ID NO: 22371 - DNA, 37 bp, Artificial Sequence
  primer
gtaaaacgacggccagtacacagttggtgccctgttg

SEQ ID NO: 22372 - DNA, 21 bp, Artificial Sequence
  primer
cggtgagccaagatacaccac

SEQ ID NO: 22373 - DNA, 38 bp, Artificial Sequence
  primer
gtaaaacgacggccagtaaaccatgtgaccatgctgtc

SEQ ID NO: 22374 - DNA, 37 bp, Artificial Sequence
  primer
gtaaaacgacggccagtgtctgaaccctggcagtttg

SEQ ID NO: 22375 - DNA, 38 bp, Artificial Sequence
  primer
gtaaaacgacggccagtagagataatgcagccaccagc

SEQ ID NO: 22376 - DNA, 21 bp, Artificial Sequence
  primer
ctgacatacgaagcttgcgac

SEQ ID NO: 22377 - DNA, 21 bp, Artificial Sequence
  primer
tttccctgctcttgtagttgc

SEQ ID NO: 22378 - DNA, 23 bp, Artificial Sequence
  primer
ttacaattctgtctccatttggg

SEQ ID NO: 22379 - DNA, 21 bp, Artificial Sequence
  primer
tggttaagacccactgttgcc

SEQ ID NO: 22380 - DNA, 37 bp, Artificial Sequence
  primer
gtaaaacgacggccagttaccatggagatgaggtggc

SEQ ID NO: 22381 - DNA, 22 bp, Artificial Sequence
  primer
caattcattcctctgctcgaag

SEQ ID NO: 22382 - DNA, 21 bp, Artificial Sequence
  primer
tttatggtggctgtacatggg

SEQ ID NO: 22383 - DNA, 40 bp, Artificial Sequence
  primer
gtaaaacgacggccagttctatctgaaggttcgtgcaaag

SEQ ID NO: 22384 - DNA, 37 bp, Artificial Sequence
  primer
gtaaaacgacggccagtgggacttgaaccagctcacc

SEQ ID NO: 22385 - DNA, 23 bp, Artificial Sequence
  primer
tgattgattgtatctcgggacag

SEQ ID NO: 22386 - DNA, 21 bp, Artificial Sequence
  primer
ctaggtaacaccgctggcttc

SEQ ID NO: 22387 - DNA, 40 bp, Artificial Sequence
  primer
gtaaaacgacggccagtgccctggagactagtcacacttt

SEQ ID NO: 22388 - DNA, 38 bp, Artificial Sequence
  primer
gtaaaacgacggccagtcaggcatctgtttgtcctgtg

SEQ ID NO: 22389 - DNA, 38 bp, Artificial Sequence
  primer
gtaaaacgacggccagtgacacactgtcaccttctgcc

SEQ ID NO: 22390 - DNA, 20 bp, Artificial Sequence
  primer
agcaaacgattgcaatgagg

SEQ ID NO: 22391 - DNA, 38 bp, Artificial Sequence
  primer
gtaaaacgacggccagtgaccatccttgcagagctgac

SEQ ID NO: 22392 - DNA, 38 bp, Artificial Sequence
  primer
gtaaaacgacggccagtactccctatccttcaggctcc

SEQ ID NO: 22393 - DNA, 37 bp, Artificial Sequence
  primer
gtaaaacgacggccagtgatgtcaagggcagtcttgg

SEQ ID NO: 22394 - DNA, 21 bp, Artificial Sequence
  primer
ctggagtgatggagggagttg

SEQ ID NO: 22395 - DNA, 21 bp, Artificial Sequence
  primer
ttcactcttggagccacattg

SEQ ID NO: 22396 - DNA, 38 bp, Artificial Sequence
  primer
gtaaaacgacggccagtgtccctacctccagctgatcc

SEQ ID NO: 22397 - DNA, 38 bp, Artificial Sequence
  primer
gtaaaacgacggccagtgagggtttctgtcctcctcag

SEQ ID NO: 22398 - DNA, 18 bp, Artificial Sequence
  primer
cgtgatggtgtggcttcc

SEQ ID NO: 22399 - DNA, 21 bp, Artificial Sequence
  primer
tctcccacttcctcctctctg

SEQ ID NO: 22400 - DNA, 38 bp, Artificial Sequence
  primer
gtaaaacgacggccagtcagttatgggcttctgcagtg

SEQ ID NO: 22401 - DNA, 21 bp, Artificial Sequence
  primer
gtctccctccttatccttccc

SEQ ID NO: 22402 - DNA, 38 bp, Artificial Sequence
  primer
gtaaaacgacggccagtccagggctgtacactcagaac

SEQ ID NO: 22403 - DNA, 38 bp, Artificial Sequence
  primer
gtaaaacgacggccagttgcttggctaatagagcctgg

SEQ ID NO: 22404 - DNA, 38 bp, Artificial Sequence
  primer
gtaaaacgacggccagtactggcctctggatacactcc

SEQ ID NO: 22405 - DNA, 37 bp, Artificial Sequence
  primer
gtaaaacgacggccagtacttcctgattctgtggccc

SEQ ID NO: 22406 - DNA, 38 bp, Artificial Sequence
  primer
gtaaaacgacggccagttgacagagttggtgtgtgagc

SEQ ID NO: 22407 - DNA, 37 bp, Artificial Sequence
  primer
gtaaaacgacggccagtgcggtcagaattagcctcag

SEQ ID NO: 22408 - DNA, 36 bp, Artificial Sequence
  primer
gtaaaacgacggccagtaactggatgagcgtccctg

SEQ ID NO: 22409 - DNA, 38 bp, Artificial Sequence
  primer
gtaaaacgacggccagtgagagcaggtgctcggtacac

SEQ ID NO: 22410 - DNA, 38 bp, Artificial Sequence
  primer
gtaaaacgacggccagtcccagaaattgcttctcttcc

SEQ ID NO: 22411 - DNA, 21 bp, Artificial Sequence
  primer
aagggatggatgagatgcttg

SEQ ID NO: 22412 - DNA, 40 bp, Artificial Sequence
  primer
gtaaaacgacggccagtttctgacaaatgacatggagaag

SEQ ID NO: 22413 - DNA, 38 bp, Artificial Sequence
  primer
gtaaaacgacggccagttcaccttcttcaggcccatac

SEQ ID NO: 22414 - DNA, 20 bp, Artificial Sequence
  primer
aagaccagtttggtgcttgg

SEQ ID NO: 22415 - DNA, 38 bp, Artificial Sequence
  primer
gtaaaacgacggccagtgagtcagaccgttcctggatg

SEQ ID NO: 22416 - DNA, 21 bp, Artificial Sequence
  primer
gcagtgaagtgtaaattgccc

SEQ ID NO: 22417 - DNA, 39 bp, Artificial Sequence
  primer
gtaaaacgacggccagtgcaacaagaacgaaactccatc

SEQ ID NO: 22418 - DNA, 44 bp, Artificial Sequence
  primer
gtaaaacgacggccagttcttcaatttataatcaggaggaaacc

SEQ ID NO: 22419 - DNA, 21 bp, Artificial Sequence
  primer
ggcttgtagtccggaagtgag

SEQ ID NO: 22420 - DNA, 38 bp, Artificial Sequence
  primer
gtaaaacgacggccagtcgccctgtatcttgttcttcc

SEQ ID NO: 22421 - DNA, 38 bp, Artificial Sequence
  primer
gtaaaacgacggccagtgtgactgtaagtgggacaggc

SEQ ID NO: 22422 - DNA, 38 bp, Artificial Sequence
  primer
gtaaaacgacggccagtggaattagtgagggccacatc

SEQ ID NO: 22423 - DNA, 38 bp, Artificial Sequence
  primer
gtaaaacgacggccagtctgggtggctctagctccttc

SEQ ID NO: 22424 - DNA, 21 bp, Artificial Sequence
  primer
aagagggaagtgctggctaag

SEQ ID NO: 22425 - DNA, 21 bp, Artificial Sequence
  primer
atgtttcccaagaagcactgg

SEQ ID NO: 22426 - DNA, 38 bp, Artificial Sequence
  primer
gtaaaacgacggccagtagtgtaagttctcgcttccgc

SEQ ID NO: 22427 - DNA, 38 bp, Artificial Sequence
  primer
gtaaaacgacggccagtggcagactcagggattgattc

SEQ ID NO: 22428 - DNA, 38 bp, Artificial Sequence
  primer
gtaaaacgacggccagtcctgtgttcctgctagttggg

SEQ ID NO: 22429 - DNA, 38 bp, Artificial Sequence
  primer
gtaaaacgacggccagtttcagtgatttgctcacaggc

SEQ ID NO: 22430 - DNA, 38 bp, Artificial Sequence
  primer
gtaaaacgacggccagttacctcctgtttgacccaacc

SEQ ID NO: 22431 - DNA, 38 bp, Artificial Sequence
  primer
gtaaaacgacggccagtacattgcacaatctgcctctg

SEQ ID NO: 22432 - DNA, 38 bp, Artificial Sequence
  primer
gtaaaacgacggccagtggaacaaatcaaagagcaggg

SEQ ID NO: 22433 - DNA, 21 bp, Artificial Sequence
  primer
tatgacaactgccctgactgc

SEQ ID NO: 22434 - DNA, 21 bp, Artificial Sequence
  primer
agcagtatccacccagctgtc

SEQ ID NO: 22435 - DNA, 39 bp, Artificial Sequence
  primer
gtaaaacgacggccagtggaatagggagtgttcgtgatg

SEQ ID NO: 22436 - DNA, 38 bp, Artificial Sequence
  primer
gtaaaacgacggccagtgagcagagaaaccagtttggg

SEQ ID NO: 22437 - DNA, 38 bp, Artificial Sequence
  primer
gtaaaacgacggccagtaagaagaggcggttacagcac

SEQ ID NO: 22438 - DNA, 38 bp, Artificial Sequence
  primer
gtaaaacgacggccagtgcaacgtcgagtgtttctcag

SEQ ID NO: 22439 - DNA, 21 bp, Artificial Sequence
  primer
aacattgatgcaatccacagg

SEQ ID NO: 22440 - DNA, 21 bp, Artificial Sequence
  primer
cagcccattgattgaatctcc

SEQ ID NO: 22441 - DNA, 37 bp, Artificial Sequence
  primer
gtaaaacgacggccagtcttggttccagtccctcctc

SEQ ID NO: 22442 - DNA, 38 bp, Artificial Sequence
  primer
gtaaaacgacggccagtttaggaggcttgctgagatcc

SEQ ID NO: 22443 - DNA, 38 bp, Artificial Sequence
  primer
gtaaaacgacggccagtcctaattgtccctaccctccc

SEQ ID NO: 22444 - DNA, 44 bp, Artificial Sequence
  primer
gtaaaacgacggccagtttctgctcttacctttaacataaatcg

SEQ ID NO: 22445 - DNA, 38 bp, Artificial Sequence
  primer
gtaaaacgacggccagtatgtggtgagccgtgatactg

SEQ ID NO: 22446 - DNA, 38 bp, Artificial Sequence
  primer
gtaaaacgacggccagtttcttccagctcctcacactg

SEQ ID NO: 22447 - DNA, 43 bp, Artificial Sequence
  primer
gtaaaacgacggccagtggtccgtatgtcaagatatttcattt

SEQ ID NO: 22448 - DNA, 38 bp, Artificial Sequence
  primer
gtaaaacgacggccagtttaggtgtgtaggcgttgtgg

SEQ ID NO: 22449 - DNA, 21 bp, Artificial Sequence
  primer
actccgatgcatttgactgtg

SEQ ID NO: 22450 - DNA, 38 bp, Artificial Sequence
  primer
gtaaaacgacggccagtaggtttgttgccatggagttc

SEQ ID NO: 22451 - DNA, 39 bp, Artificial Sequence
  primer
gtaaaacgacggccagtttcacccaatggtttgagtttc

SEQ ID NO: 22452 - DNA, 20 bp, Artificial Sequence
  primer
aatcgtttgaggaagcaccc

SEQ ID NO: 22453 - DNA, 38 bp, Artificial Sequence
  primer
gtaaaacgacggccagttaacctacattcccagcccac

SEQ ID NO: 22454 - DNA, 21 bp, Artificial Sequence
  primer
gagagcagagatggtctggtg

SEQ ID NO: 22455 - DNA, 20 bp, Artificial Sequence
  primer
ggaggctgtgtacttgcagc

SEQ ID NO: 22456 - DNA, 38 bp, Artificial Sequence
  primer
gtaaaacgacggccagttttctgaatcaggagccgtag

SEQ ID NO: 22457 - DNA, 39 bp, Artificial Sequence
  primer
gtaaaacgacggccagtgagtgtccttgcatgttaagcc

SEQ ID NO: 22458 - DNA, 19 bp, Artificial Sequence
  primer
gctagccaagcgcctcttc

SEQ ID NO: 22459 - DNA, 38 bp, Artificial Sequence
  primer
gtaaaacgacggccagtgtttcttccttagcctgcacc

SEQ ID NO: 22460 - DNA, 21 bp, Artificial Sequence
  primer
tcaccaacttcatcagcgaag

SEQ ID NO: 22461 - DNA, 21 bp, Artificial Sequence
  primer
tcatctgttgctgaggtccag

SEQ ID NO: 22462 - DNA, 38 bp, Artificial Sequence
  primer
gtaaaacgacggccagtagaagagccgaacaccatgag

SEQ ID NO: 22463 - DNA, 38 bp, Artificial Sequence
  primer
gtaaaacgacggccagtctgacaagtcccgtttccttc

SEQ ID NO: 22464 - DNA, 22 bp, Artificial Sequence
  primer
tcgcacacaatgaaattgactc

SEQ ID NO: 22465 - DNA, 38 bp, Artificial Sequence
  primer
gtaaaacgacggccagtaaagggatgcagtttagtccc

SEQ ID NO: 22466 - DNA, 37 bp, Artificial Sequence
  primer
gtaaaacgacggccagtattatagacgcgggccacag

SEQ ID NO: 22467 - DNA, 20 bp, Artificial Sequence
  primer
agcctcaggtcagtgctcag

SEQ ID NO: 22468 - DNA, 38 bp, Artificial Sequence
  primer
gtaaaacgacggccagtgaatggcctcagttgtttcag

SEQ ID NO: 22469 - DNA, 39 bp, Artificial Sequence
  primer
gtaaaacgacggccagtgggaaggagacctctgtttagg

SEQ ID NO: 22470 - DNA, 38 bp, Artificial Sequence
  primer
gtaaaacgacggccagtgcacatatagcaagggactgc

SEQ ID NO: 22471 - DNA, 38 bp, Artificial Sequence
  primer
gtaaaacgacggccagtatctgcttgaaatctgcagcg

SEQ ID NO: 22472 - DNA, 20 bp, Artificial Sequence
  primer
aaccaaagcaaatctgaggg

SEQ ID NO: 22473 - DNA, 38 bp, Artificial Sequence
  primer
gtaaaacgacggccagttagcctcccagcatctagaaa

SEQ ID NO: 22474 - DNA, 21 bp, Artificial Sequence
  primer
ggatctggagctaacagggtg

SEQ ID NO: 22475 - DNA, 21 bp, Artificial Sequence
  primer
tctgcaggatagccttcattc

SEQ ID NO: 22476 - DNA, 21 bp, Artificial Sequence
  primer
tggaagcgtttaatggaagtg

SEQ ID NO: 22477 - DNA, 37 bp, Artificial Sequence
  primer
gtaaaacgacggccagtgacaaccggcacttggtaac

SEQ ID NO: 22478 - DNA, 21 bp, Artificial Sequence
  primer
ggaggttgcagtgagtgaaga

SEQ ID NO: 22479 - DNA, 40 bp, Artificial Sequence
  primer
gtaaaacgacggccagtgctctggaaatagttgaaacagg

SEQ ID NO: 22480 - DNA, 40 bp, Artificial Sequence
  primer
gtaaaacgacggccagttgacttacgtggttaaggcaaag

SEQ ID NO: 22481 - DNA, 21 bp, Artificial Sequence
  primer
tcttggcctttgtatcaaccg

SEQ ID NO: 22482 - DNA, 21 bp, Artificial Sequence
  primer
aggaatttactcggagcctgg

SEQ ID NO: 22483 - DNA, 37 bp, Artificial Sequence
  primer
gtaaaacgacggccagtcatcggtcagtcagacaggg

SEQ ID NO: 22484 - DNA, 38 bp, Artificial Sequence
  primer
gtaaaacgacggccagtaaacaaagaaacccaaggcag

SEQ ID NO: 22485 - DNA, 38 bp, Artificial Sequence
  primer
gtaaaacgacggccagtctgggacagagtgactgatgg

SEQ ID NO: 22486 - DNA, 20 bp, Artificial Sequence
  primer
gggaaggatttgaaccactg

SEQ ID NO: 22487 - DNA, 40 bp, Artificial Sequence
  primer
gtaaaacgacggccagttcacaggtacactctttgccttc

SEQ ID NO: 22488 - DNA, 38 bp, Artificial Sequence
  primer
gtaaaacgacggccagtatcttgggtcttcctggtgag

SEQ ID NO: 22489 - DNA, 21 bp, Artificial Sequence
  primer
ttcactttagcctgggtgagg

SEQ ID NO: 22490 - DNA, 38 bp, Artificial Sequence
  primer
gtaaaacgacggccagtagtggtttggacccttccttc

SEQ ID NO: 22491 - DNA, 38 bp, Artificial Sequence
  primer
gtaaaacgacggccagttgtggtctcgccctattgttc

SEQ ID NO: 22492 - DNA, 21 bp, Artificial Sequence
  primer
ttggtgccctttgctaaactc

SEQ ID NO: 22493 - DNA, 21 bp, Artificial Sequence
  primer
agcttgacttgttagtggccg

SEQ ID NO: 22494 - DNA, 21 bp, Artificial Sequence
  primer
tctgcatcacctaactggtgg

SEQ ID NO: 22495 - DNA, 37 bp, Artificial Sequence
  primer
gtaaaacgacggccagtcttccttcctctcctctggg

SEQ ID NO: 22496 - DNA, 21 bp, Artificial Sequence
  primer
ttcactttagcctgggtgagg

SEQ ID NO: 22497 - DNA, 19 bp, Artificial Sequence
  primer
gggcaggtgtagcctctgt

SEQ ID NO: 22498 - DNA, 24 bp, Artificial Sequence
  primer
ttcccataatcatcagtgtttcag

SEQ ID NO: 22499 - DNA, 21 bp, Artificial Sequence
  primer
tgtgtctggcagtctcctctc

SEQ ID NO: 22500 - DNA, 20 bp, Artificial Sequence
  primer
tgcttccttacccttcctgc

SEQ ID NO: 22501 - DNA, 26 bp, Artificial Sequence
  primer
aaatgtatcgtaaagggtgtttaagg

SEQ ID NO: 22502 - DNA, 38 bp, Artificial Sequence
  primer
gtaaaacgacggccagttgagttaaacttgtcacgccc

SEQ ID NO: 22503 - DNA, 21 bp, Artificial Sequence
  primer
tgctcacggttgctgataaac

SEQ ID NO: 22504 - DNA, 21 bp, Artificial Sequence
  primer
agtgggaattgtgcctgactc

SEQ ID NO: 22505 - DNA, 38 bp, Artificial Sequence
  primer
gtaaaacgacggccagtgaggagcatgagacccatttc

SEQ ID NO: 22506 - DNA, 21 bp, Artificial Sequence
  primer
tggattatggctttgtttccg

SEQ ID NO: 22507 - DNA, 38 bp, Artificial Sequence
  primer
gtaaaacgacggccagtctcgccagctgataccttctc

SEQ ID NO: 22508 - DNA, 38 bp, Artificial Sequence
  primer
gtaaaacgacggccagttacaagcatgtcctgctcacg

SEQ ID NO: 22509 - DNA, 38 bp, Artificial Sequence
  primer
gtaaaacgacggccagttccgtgagagacgtagagctg

SEQ ID NO: 22510 - DNA, 38 bp, Artificial Sequence
  primer
gtaaaacgacggccagttttccttctcattacccaccc

SEQ ID NO: 22511 - DNA, 21 bp, Artificial Sequence
  primer
agccagcttgttcacaggaag

SEQ ID NO: 22512 - DNA, 21 bp, Artificial Sequence
  primer
atcatctttgccttcctctgg

SEQ ID NO: 22513 - DNA, 21 bp, Artificial Sequence
  primer
tgagcagtcattattgccacc

SEQ ID NO: 22514 - DNA, 20 bp, Artificial Sequence
  primer
ctttgtcctccagcgtcaac

SEQ ID NO: 22515 - DNA, 21 bp, Artificial Sequence
  primer
ctatggagacactggccatcc

SEQ ID NO: 22516 - DNA, 38 bp, Artificial Sequence
  primer
gtaaaacgacggccagtagccctgtgagagttctttgc

SEQ ID NO: 22517 - DNA, 38 bp, Artificial Sequence
  primer
gtaaaacgacggccagtggctgagcctctttgtctgag

SEQ ID NO: 22518 - DNA, 21 bp, Artificial Sequence
  primer
aaggccaagtacgtcaagagc

SEQ ID NO: 22519 - DNA, 37 bp, Artificial Sequence
  primer
gtaaaacgacggccagtctggacctggacatcctcag

SEQ ID NO: 22520 - DNA, 36 bp, Artificial Sequence
  primer
gtaaaacgacggccagttttaacttctgcggcctgg

SEQ ID NO: 22521 - DNA, 38 bp, Artificial Sequence
  primer
gtaaaacgacggccagtagtccctgctgagatcctgtc

SEQ ID NO: 22522 - DNA, 36 bp, Artificial Sequence
  primer
gtaaaacgacggccagtcctatgcgatcatgggacc

SEQ ID NO: 22523 - DNA, 37 bp, Artificial Sequence
  primer
gtaaaacgacggccagtgggaggtgagaggacaggac

SEQ ID NO: 22524 - DNA, 37 bp, Artificial Sequence
  primer
gtaaaacgacggccagtaacctgaggtccaggagagg

SEQ ID NO: 22525 - DNA, 20 bp, Artificial Sequence
  primer
tctttgtctggttgggcttg

SEQ ID NO: 22526 - DNA, 21 bp, Artificial Sequence
  primer
gtcagcaaacaggcacaagac

SEQ ID NO: 22527 - DNA, 38 bp, Artificial Sequence
  primer
gtaaaacgacggccagtgaaggaagtgagtgccctgtc

SEQ ID NO: 22528 - DNA, 37 bp, Artificial Sequence
  primer
gtaaaacgacggccagtccattcacagtccatgtccc

SEQ ID NO: 22529 - DNA, 37 bp, Artificial Sequence
  primer
gtaaaacgacggccagtgtagaggcagacaggccagg

SEQ ID NO: 22530 - DNA, 21 bp, Artificial Sequence
  primer
agcccaaacctgagcagatag

SEQ ID NO: 22531 - DNA, 37 bp, Artificial Sequence
  primer
gtaaaacgacggccagtcttctgagctgctcctctgg

SEQ ID NO: 22532 - DNA, 39 bp, Artificial Sequence
  primer
gtaaaacgacggccagttgcctgttaggtgtctggtagg

SEQ ID NO: 22533 - DNA, 21 bp, Artificial Sequence
  primer
tcagagaagtgggactctggc

SEQ ID NO: 22534 - DNA, 21 bp, Artificial Sequence
  primer
ccagcctgagtatcctcttcc

SEQ ID NO: 22535 - DNA, 38 bp, Artificial Sequence
  primer
gtaaaacgacggccagtgtggctgttctgtgtttctgc

SEQ ID NO: 22536 - DNA, 21 bp, Artificial Sequence
  primer
agagaagtttgtggtcgcagc

SEQ ID NO: 22537 - DNA, 35 bp, Artificial Sequence
  primer
gtaaaacgacggccagtagcaggcctgagcgtgtc

SEQ ID NO: 22538 - DNA, 21 bp, Artificial Sequence
  primer
cactcaccaccctctttcctc

SEQ ID NO: 22539 - DNA, 21 bp, Artificial Sequence
  primer
ccaagaccctccaagtctgag

SEQ ID NO: 22540 - DNA, 38 bp, Artificial Sequence
  primer
gtaaaacgacggccagtttgcatgtgacccagaatacg

SEQ ID NO: 22541 - DNA, 21 bp, Artificial Sequence
  primer
gagtgaccagcggtttagacg

SEQ ID NO: 22542 - DNA, 39 bp, Artificial Sequence
  primer
gtaaaacgacggccagttctgattccaatctctctggtg

SEQ ID NO: 22543 - DNA, 21 bp, Artificial Sequence
  primer
tggatctacttgcgtgatgtg

SEQ ID NO: 22544 - DNA, 21 bp, Artificial Sequence
  primer
tgtgtgacaaagatgctctgg

SEQ ID NO: 22545 - DNA, 41 bp, Artificial Sequence
  primer
gtaaaacgacggccagttttggctcatttgaagttctcttt

SEQ ID NO: 22546 - DNA, 21 bp, Artificial Sequence
  primer
ggatttggaagtgagtcaccc

SEQ ID NO: 22547 - DNA, 38 bp, Artificial Sequence
  primer
gtaaaacgacggccagtatggtttggtatgaaggccag

SEQ ID NO: 22548 - DNA, 44 bp, Artificial Sequence
  primer
gtaaaacgacggccagttgtctaacattgtctcttaaacgtgtg

SEQ ID NO: 22549 - DNA, 25 bp, Artificial Sequence
  primer
gcaccgtaattaatttagacactgg

SEQ ID NO: 22550 - DNA, 27 bp, Artificial Sequence
  primer
aagagagtgaccataagatctgaacac

SEQ ID NO: 22551 - DNA, 23 bp, Artificial Sequence
  primer
tttctttagtggcttgaccatgt

SEQ ID NO: 22552 - DNA, 38 bp, Artificial Sequence
  primer
gtaaaacgacggccagtcacgcttggccactgatttac

SEQ ID NO: 22553 - DNA, 43 bp, Artificial Sequence
  primer
gtaaaacgacggccagtttcatatacccacagtcttctttcag

SEQ ID NO: 22554 - DNA, 26 bp, Artificial Sequence
  primer
ccagagttctagtgattgagtcttcc

SEQ ID NO: 22555 - DNA, 38 bp, Artificial Sequence
  primer
gtaaaacgacggccagtggccataaagagctatggaaa

SEQ ID NO: 22556 - DNA, 21 bp, Artificial Sequence
  primer
ttcaacatgctggtctcagtg

SEQ ID NO: 22557 - DNA, 21 bp, Artificial Sequence
  primer
ccactgtgtctggcgataatg

SEQ ID NO: 22558 - DNA, 38 bp, Artificial Sequence
  primer
gtaaaacgacggccagttatatccgtgagtcaagcggc

SEQ ID NO: 22559 - DNA, 21 bp, Artificial Sequence
  primer
cagaagcctttgaaatttgcc

SEQ ID NO: 22560 - DNA, 21 bp, Artificial Sequence
  primer
gattggatttctccacatcgg

SEQ ID NO: 22561 - DNA, 38 bp, Artificial Sequence
  primer
gtaaaacgacggccagtggagctgacactctttggtcc

SEQ ID NO: 22562 - DNA, 39 bp, Artificial Sequence
  primer
gtaaaacgacggccagtcccagtgttctctgcctgtatc

SEQ ID NO: 22563 - DNA, 21 bp, Artificial Sequence
  primer
accaggtgtgcactgtattgg

SEQ ID NO: 22564 - DNA, 21 bp, Artificial Sequence
  primer
tgctaatgtcagcctgtctgg

SEQ ID NO: 22565 - DNA, 38 bp, Artificial Sequence
  primer
gtaaaacgacggccagtttcctatacgtgccaagctcc

SEQ ID NO: 22566 - DNA, 38 bp, Artificial Sequence
  primer
gtaaaacgacggccagttcgtgtcaccttccatgtttc

SEQ ID NO: 22567 - DNA, 39 bp, Artificial Sequence
  primer
gtaaaacgacggccagtggtctgtgattaaagtggcagg

SEQ ID NO: 22568 - DNA, 38 bp, Artificial Sequence
  primer
gtaaaacgacggccagtgtcagcagcagagctggtttc

SEQ ID NO: 22569 - DNA, 38 bp, Artificial Sequence
  primer
gtaaaacgacggccagtttccctctctcggtacaaagc

SEQ ID NO: 22570 - DNA, 21 bp, Artificial Sequence
  primer
gtcagggcctaggatctttcc

SEQ ID NO: 22571 - DNA, 38 bp, Artificial Sequence
  primer
gtaaaacgacggccagttctgcctttgagaggttcctg

SEQ ID NO: 22572 - DNA, 21 bp, Artificial Sequence
  primer
tcattcattcagtggagacgg

SEQ ID NO: 22573 - DNA, 37 bp, Artificial Sequence
  primer
gtaaaacgacggccagtactttgaggtgggtgcactg

SEQ ID NO: 22574 - DNA, 38 bp, Artificial Sequence
  primer
gtaaaacgacggccagtctttgagcatgagtaccgcag

SEQ ID NO: 22575 - DNA, 38 bp, Artificial Sequence
  primer
gtaaaacgacggccagtccaaactacttgcacgttccc

SEQ ID NO: 22576 - DNA, 38 bp, Artificial Sequence
  primer
gtaaaacgacggccagttttgtttcctggtggtttgag

SEQ ID NO: 22577 - DNA, 22 bp, Artificial Sequence
  primer
acagcttgtaaggtgaggctga

SEQ ID NO: 22578 - DNA, 38 bp, Artificial Sequence
  primer
gtaaaacgacggccagtagttaacacggaagccctcac

SEQ ID NO: 22579 - DNA, 20 bp, Artificial Sequence
  primer
ccttctctgtgccacctttg

SEQ ID NO: 22580 - DNA, 40 bp, Artificial Sequence
  primer
gtaaaacgacggccagtaacgatcagtggatttggatatg

SEQ ID NO: 22581 - DNA, 21 bp, Artificial Sequence
  primer
tttctgacagttggttgcatt

SEQ ID NO: 22582 - DNA, 37 bp, Artificial Sequence
  primer
gtaaaacgacggccagttgcttagcatgggagattgg

SEQ ID NO: 22583 - DNA, 38 bp, Artificial Sequence
  primer
gtaaaacgacggccagtgctggcaagtaaagcattgtg

SEQ ID NO: 22584 - DNA, 21 bp, Artificial Sequence
  primer
ggctccctcagacttcttgtc

SEQ ID NO: 22585 - DNA, 40 bp, Artificial Sequence
  primer
gtaaaacgacggccagttttcttagtgggttcgtgttcag

SEQ ID NO: 22586 - DNA, 21 bp, Artificial Sequence
  primer
tgggaagaagcatagtcaggg

SEQ ID NO: 22587 - DNA, 38 bp, Artificial Sequence
  primer
gtaaaacgacggccagtaagagtccatttccctctggg

SEQ ID NO: 22588 - DNA, 38 bp, Artificial Sequence
  primer
gtaaaacgacggccagtgtcttacccggtacctggagc

SEQ ID NO: 22589 - DNA, 21 bp, Artificial Sequence
  primer
ctaaagaaggcaaggctgacg

SEQ ID NO: 22590 - DNA, 37 bp, Artificial Sequence
  primer
gtaaaacgacggccagtgtccacacaggtggaggaac

SEQ ID NO: 22591 - DNA, 38 bp, Artificial Sequence
  primer
gtaaaacgacggccagtactccacagtatttcccgcac

SEQ ID NO: 22592 - DNA, 21 bp, Artificial Sequence
  primer
ctgggcaagacagtgagattc

SEQ ID NO: 22593 - DNA, 38 bp, Artificial Sequence
  primer
gtaaaacgacggccagtagctcagagaggtggagcaac

SEQ ID NO: 22594 - DNA, 38 bp, Artificial Sequence
  primer
gtaaaacgacggccagtacatgttgctctcccaatgtg

SEQ ID NO: 22595 - DNA, 22 bp, Artificial Sequence
  primer
tctcacatcaatcttgcaaagc

SEQ ID NO: 22596 - DNA, 39 bp, Artificial Sequence
  primer
gtaaaacgacggccagtggccctctttatagtcggacag

SEQ ID NO: 22597 - DNA, 21 bp, Artificial Sequence
  primer
gaaaggactcagagtgccagg

SEQ ID NO: 22598 - DNA, 38 bp, Artificial Sequence
  primer
gtaaaacgacggccagtcttgggcaaggtctgagctac

SEQ ID NO: 22599 - DNA, 38 bp, Artificial Sequence
  primer
gtaaaacgacggccagtagcatgggatccaccatagtc

SEQ ID NO: 22600 - DNA, 38 bp, Artificial Sequence
  primer
gtaaaacgacggccagtcaaacataaaggccttcgacc

SEQ ID NO: 22601 - DNA, 25 bp, Artificial Sequence
  primer
tcaatccagagagaagtgataaacc

SEQ ID NO: 22602 - DNA, 20 bp, Artificial Sequence
  primer
gccaatatcgcccactacac

SEQ ID NO: 22603 - DNA, 21 bp, Artificial Sequence
  primer
caatggtcattggctgacaag

SEQ ID NO: 22604 - DNA, 38 bp, Artificial Sequence
  primer
gtaaaacgacggccagtgtttgccctggagtaagaagg

SEQ ID NO: 22605 - DNA, 37 bp, Artificial Sequence
  primer
gtaaaacgacggccagtgaccctatgctttgattcgc

SEQ ID NO: 22606 - DNA, 38 bp, Artificial Sequence
  primer
gtaaaacgacggccagtagtggtgggtggtactcaagg

SEQ ID NO: 22607 - DNA, 36 bp, Artificial Sequence
  primer
gtaaaacgacggccagtgggctcggttgtctgtttg

SEQ ID NO: 22608 - DNA, 38 bp, Artificial Sequence
  primer
gtaaaacgacggccagtaggtaagaaagcttgcctggg

SEQ ID NO: 22609 - DNA, 38 bp, Artificial Sequence
  primer
gtaaaacgacggccagttctgaaggtcagccttcttcc

SEQ ID NO: 22610 - DNA, 38 bp, Artificial Sequence
  primer
gtaaaacgacggccagttttctttctcaagaccgatgc

SEQ ID NO: 22611 - DNA, 38 bp, Artificial Sequence
  primer
gtaaaacgacggccagtgcttcagtggatggagagatg

SEQ ID NO: 22612 - DNA, 22 bp, Artificial Sequence
  primer
tttgaagtattcattcctgcca

SEQ ID NO: 22613 - DNA, 39 bp, Artificial Sequence
  primer
gtaaaacgacggccagtgcggttcttcattcttagttgc

SEQ ID NO: 22614 - DNA, 38 bp, Artificial Sequence
  primer
gtaaaacgacggccagtgtaccctgtgcacattgatgg

SEQ ID NO: 22615 - DNA, 38 bp, Artificial Sequence
  primer
gtaaaacgacggccagttgaaatgggtgatgctcattg

SEQ ID NO: 22616 - DNA, 24 bp, Artificial Sequence
  primer
catgtgaatcctggtgagtttaag

SEQ ID NO: 22617 - DNA, 40 bp, Artificial Sequence
  primer
gtaaaacgacggccagttgttggtaccacttgccttattg

SEQ ID NO: 22618 - DNA, 41 bp, Artificial Sequence
  primer
gtaaaacgacggccagtggcatctggactttaatagtttcg

SEQ ID NO: 22619 - DNA, 21 bp, Artificial Sequence
  primer
gccagctgcagacactagaac

SEQ ID NO: 22620 - DNA, 35 bp, Artificial Sequence
  primer
gtaaaacgacggccagttgctgagcaacacaagcg

SEQ ID NO: 22621 - DNA, 43 bp, Artificial Sequence
  primer
gtaaaacgacggccagtgcaagtgtaggaaacttgatcattta

SEQ ID NO: 22622 - DNA, 21 bp, Artificial Sequence
  primer
gtgtggacttgacccataggc

SEQ ID NO: 22623 - DNA, 43 bp, Artificial Sequence
  primer
gtaaaacgacggccagttttctttagaaatttgggctagaaac

SEQ ID NO: 22624 - DNA, 20 bp, Artificial Sequence
  primer
caagttctgcaggttctgcc

SEQ ID NO: 22625 - DNA, 21 bp, Artificial Sequence
  primer
acctttcttccttgatcctgc

SEQ ID NO: 22626 - DNA, 40 bp, Artificial Sequence
  primer
gtaaaacgacggccagttgaaagcagctatatggtcacag

SEQ ID NO: 22627 - DNA, 38 bp, Artificial Sequence
  primer
gtaaaacgacggccagtgtaactgcatcccacatgtcc

SEQ ID NO: 22628 - DNA, 23 bp, Artificial Sequence
  primer
tgtttccaatatccctttcactg

SEQ ID NO: 22629 - DNA, 23 bp, Artificial Sequence
  primer
tgcacttggaagagaataactcg

SEQ ID NO: 22630 - DNA, 38 bp, Artificial Sequence
  primer
gtaaaacgacggccagtacttcagtagctcctggctgc

SEQ ID NO: 22631 - DNA, 40 bp, Artificial Sequence
  primer
gtaaaacgacggccagttggcctattgagggttctttatc

SEQ ID NO: 22632 - DNA, 43 bp, Artificial Sequence
  primer
gtaaaacgacggccagtcgttatgtaaattaacacagtgaggc

SEQ ID NO: 22633 - DNA, 37 bp, Artificial Sequence
  primer
gtaaaacgacggccagtaagatcaccacacagctggc

SEQ ID NO: 22634 - DNA, 38 bp, Artificial Sequence
  primer
gtaaaacgacggccagtgcatgtccactgaatactggg

SEQ ID NO: 22635 - DNA, 21 bp, Artificial Sequence
  primer
aggagtcctagctgccaagtg

SEQ ID NO: 22636 - DNA, 21 bp, Artificial Sequence
  primer
gctatttccaagtggctgagg

SEQ ID NO: 22637 - DNA, 21 bp, Artificial Sequence
  primer
cctaccttcagacacccacag

SEQ ID NO: 22638 - DNA, 38 bp, Artificial Sequence
  primer
gtaaaacgacggccagtatcaccagtgggctctctctc

SEQ ID NO: 22639 - DNA, 38 bp, Artificial Sequence
  primer
gtaaaacgacggccagttgcatgtcttaaggaggatgg

SEQ ID NO: 22640 - DNA, 22 bp, Artificial Sequence
  primer
tcagtggtagaagtcatgctgg

SEQ ID NO: 22641 - DNA, 23 bp, Artificial Sequence
  primer
tgaattcacagtcctgcttagtg

SEQ ID NO: 22642 - DNA, 23 bp, Artificial Sequence
  primer
ccaacacattaagaagacaggct

SEQ ID NO: 22643 - DNA, 39 bp, Artificial Sequence
  primer
gtaaaacgacggccagtgcttaagtgctcattgcaggtc

SEQ ID NO: 22644 - DNA, 22 bp, Artificial Sequence
  primer
tgcaagatggtaaagaacctgc

SEQ ID NO: 22645 - DNA, 37 bp, Artificial Sequence
  primer
gtaaaacgacggccagtctcagagccctggaggtagg

SEQ ID NO: 22646 - DNA, 17 bp, Artificial Sequence
  primer
agctcggccacctggag

SEQ ID NO: 22647 - DNA, 21 bp, Artificial Sequence
  primer
accctggacctcagctacaac

SEQ ID NO: 22648 - DNA, 38 bp, Artificial Sequence
  primer
gtaaaacgacggccagtaccttgccactctcgttcttc

SEQ ID NO: 22649 - DNA, 21 bp, Artificial Sequence
  primer
ggttctgacaccatgcctctc

SEQ ID NO: 22650 - DNA, 38 bp, Artificial Sequence
  primer
gtaaaacgacggccagtggagcttcctccaaaggtttc

SEQ ID NO: 22651 - DNA, 20 bp, Artificial Sequence
  primer
cttcacacccaccttgcttc

SEQ ID NO: 22652 - DNA, 21 bp, Artificial Sequence
  primer
cacgaccaactctgtagcagg

SEQ ID NO: 22653 - DNA, 37 bp, Artificial Sequence
  primer
gtaaaacgacggccagtcctgtgattaccatccctgc

SEQ ID NO: 22654 - DNA, 20 bp, Artificial Sequence
  primer
cggtagtgcatgggtaccag

SEQ ID NO: 22655 - DNA, 37 bp, Artificial Sequence
  primer
gtaaaacgacggccagtgttactgcggagacccatcc

SEQ ID NO: 22656 - DNA, 22 bp, Artificial Sequence
  primer
cccaaacctattccttaggtgg

SEQ ID NO: 22657 - DNA, 21 bp, Artificial Sequence
  primer
cccactgcacgaagaatgtag

SEQ ID NO: 22658 - DNA, 38 bp, Artificial Sequence
  primer
gtaaaacgacggccagtccattgtgcatagcatgtgac

SEQ ID NO: 22659 - DNA, 38 bp, Artificial Sequence
  primer
gtaaaacgacggccagtgcctccacctcatttaactcc

SEQ ID NO: 22660 - DNA, 21 bp, Artificial Sequence
  primer
caggtgctggcttattctcag

SEQ ID NO: 22661 - DNA, 38 bp, Artificial Sequence
  primer
gtaaaacgacggccagtaaggaagaacacgaggacgag

SEQ ID NO: 22662 - DNA, 21 bp, Artificial Sequence
  primer
gcctgtctgagcccttatctg

SEQ ID NO: 22663 - DNA, 38 bp, Artificial Sequence
  primer
gtaaaacgacggccagtagttcgaggttctgggttcag

SEQ ID NO: 22664 - DNA, 38 bp, Artificial Sequence
  primer
gtaaaacgacggccagtcacctcctccctttagcattg

SEQ ID NO: 22665 - DNA, 37 bp, Artificial Sequence
  primer
gtaaaacgacggccagtgtcctggacttggaaggagc

SEQ ID NO: 22666 - DNA, 20 bp, Artificial Sequence
  primer
gaaagccaaggtgagggaag

SEQ ID NO: 22667 - DNA, 21 bp, Artificial Sequence
  primer
ctctgggatctctccaggttg

SEQ ID NO: 22668 - DNA, 37 bp, Artificial Sequence
  primer
gtaaaacgacggccagtgcccatcaggacaagagatg

SEQ ID NO: 22669 - DNA, 37 bp, Artificial Sequence
  primer
gtaaaacgacggccagtaaactgggtagagggcaagg

SEQ ID NO: 22670 - DNA, 38 bp, Artificial Sequence
  primer
gtaaaacgacggccagtgaagctcacctggaggacaag

SEQ ID NO: 22671 - DNA, 37 bp, Artificial Sequence
  primer
gtaaaacgacggccagtggcctagaggtggacaaagg

SEQ ID NO: 22672 - DNA, 38 bp, Artificial Sequence
  primer
gtaaaacgacggccagttgttcgtggagaatggaaatg

SEQ ID NO: 22673 - DNA, 38 bp, Artificial Sequence
  primer
gtaaaacgacggccagtctaagacaagcctctgcctcc

SEQ ID NO: 22674 - DNA, 21 bp, Artificial Sequence
  primer
cagtacacatcagggaggctg

SEQ ID NO: 22675 - DNA, 20 bp, Artificial Sequence
  primer
gtgaaactgcggctttgttc

SEQ ID NO: 22676 - DNA, 19 bp, Artificial Sequence
  primer
ctcgtctgtgacccgaagg

SEQ ID NO: 22677 - DNA, 20 bp, Artificial Sequence
  primer
atgttccgagtggcaaactg

SEQ ID NO: 22678 - DNA, 21 bp, Artificial Sequence
  primer
ctttgtggcactcaaggtcag

SEQ ID NO: 22679 - DNA, 38 bp, Artificial Sequence
  primer
gtaaaacgacggccagtaatttgacattcaagcaagcc

SEQ ID NO: 22680 - DNA, 18 bp, Artificial Sequence
  primer
cttcacagccctggaccc

SEQ ID NO: 22681 - DNA, 20 bp, Artificial Sequence
  primer
ataggtgtgagccaccatgc

SEQ ID NO: 22682 - DNA, 40 bp, Artificial Sequence
  primer
gtaaaacgacggccagtgcaaccacataggaatttgtgag

SEQ ID NO: 22683 - DNA, 21 bp, Artificial Sequence
  primer
tcatggtttcgagcaaacttc

SEQ ID NO: 22684 - DNA, 36 bp, Artificial Sequence
  primer
gtaaaacgacggccagtcaggcactgggctgaactc

SEQ ID NO: 22685 - DNA, 37 bp, Artificial Sequence
  primer
gtaaaacgacggccagtaaacaccgaaaggatgggag

SEQ ID NO: 22686 - DNA, 23 bp, Artificial Sequence
  primer
ccactgagcagtttcattcagtc

SEQ ID NO: 22687 - DNA, 38 bp, Artificial Sequence
  primer
gtaaaacgacggccagtggaatctggaggaaacagtgc

SEQ ID NO: 22688 - DNA, 38 bp, Artificial Sequence
  primer
gtaaaacgacggccagtaatcagacccagccagaagac

SEQ ID NO: 22689 - DNA, 38 bp, Artificial Sequence
  primer
gtaaaacgacggccagtggttagtccctttaggcgctc

SEQ ID NO: 22690 - DNA, 38 bp, Artificial Sequence
  primer
gtaaaacgacggccagtaatcctgtttcgaattgctgc

SEQ ID NO: 22691 - DNA, 38 bp, Artificial Sequence
  primer
gtaaaacgacggccagtggagcacttaccacatgcttc

SEQ ID NO: 22692 - DNA, 21 bp, Artificial Sequence
  primer
tctcattaatggtgcactccc

SEQ ID NO: 22693 - DNA, 21 bp, Artificial Sequence
  primer
gtttccgaacggatgagagtc

SEQ ID NO: 22694 - DNA, 38 bp, Artificial Sequence
  primer
gtaaaacgacggccagtgtcaggtttctgggagtgagg

SEQ ID NO: 22695 - DNA, 21 bp, Artificial Sequence
  primer
cagttactggccaaggagacc

SEQ ID NO: 22696 - DNA, 38 bp, Artificial Sequence
  primer
gtaaaacgacggccagttaaggacagccagcaggtagg

SEQ ID NO: 22697 - DNA, 21 bp, Artificial Sequence
  primer
tgagtagccagttgctgtgtg

SEQ ID NO: 22698 - DNA, 21 bp, Artificial Sequence
  primer
atccctcacctgtttcagcac

SEQ ID NO: 22699 - DNA, 21 bp, Artificial Sequence
  primer
acagttgggctttgaggtcac

SEQ ID NO: 22700 - DNA, 37 bp, Artificial Sequence
  primer
gtaaaacgacggccagttctcgagtgggaggagaagc

SEQ ID NO: 22701 - DNA, 38 bp, Artificial Sequence
  primer
gtaaaacgacggccagtaagtctggtgaggatccaagg

SEQ ID NO: 22702 - DNA, 19 bp, Artificial Sequence
  primer
tctgggccatgataggctg

SEQ ID NO: 22703 - DNA, 40 bp, Artificial Sequence
  primer
gtaaaacgacggccagtgcgaaacagctaaatgtcaagtg

SEQ ID NO: 22704 - DNA, 38 bp, Artificial Sequence
  primer
gtaaaacgacggccagtgcgatagggatccagagtctt

SEQ ID NO: 22705 - DNA, 21 bp, Artificial Sequence
  primer
cgtttccttaatggctggaag

SEQ ID NO: 22706 - DNA, 20 bp, Artificial Sequence
  primer
cgtcgtcttggactctctgg

SEQ ID NO: 22707 - DNA, 38 bp, Artificial Sequence
  primer
gtaaaacgacggccagtaggtggtctcccaaagaacag

SEQ ID NO: 22708 - DNA, 37 bp, Artificial Sequence
  primer
gtaaaacgacggccagtgccaaccctgaaacagtgtg

SEQ ID NO: 22709 - DNA, 38 bp, Artificial Sequence
  primer
gtaaaacgacggccagtcaatctttctgcctccacctc

SEQ ID NO: 22710 - DNA, 20 bp, Artificial Sequence
  primer
gttccttgaggccgtaccac

SEQ ID NO: 22711 - DNA, 38 bp, Artificial Sequence
  primer
gtaaaacgacggccagtacctaggcagaaggtccattg

SEQ ID NO: 22712 - DNA, 21 bp, Artificial Sequence
  primer
ctctagaccttccggctgaac

SEQ ID NO: 22713 - DNA, 21 bp, Artificial Sequence
  primer
caggaccagttcagttctggg

SEQ ID NO: 22714 - DNA, 21 bp, Artificial Sequence
  primer
ccaagaggatttctgagctgg

SEQ ID NO: 22715 - DNA, 21 bp, Artificial Sequence
  primer
gaggcatgacacagactgtcc

SEQ ID NO: 22716 - DNA, 37 bp, Artificial Sequence
  primer
gtaaaacgacggccagtaggcgtgacacagactgtcc

SEQ ID NO: 22717 - DNA, 21 bp, Artificial Sequence
  primer
tagtatccgtctgtccgggtg

SEQ ID NO: 22718 - DNA, 21 bp, Artificial Sequence
  primer
atggcgaatgtctgtaatccc

SEQ ID NO: 22719 - DNA, 35 bp, Artificial Sequence
  primer
gtaaaacgacggccagtagaaagccatggccacac

SEQ ID NO: 22720 - DNA, 19 bp, Artificial Sequence
  primer
gtgtggtgtgtgtgcatgg

SEQ ID NO: 22721 - DNA, 22 bp, Artificial Sequence
  primer
aaatccatatgattgcccaaag

SEQ ID NO: 22722 - DNA, 44 bp, Artificial Sequence
  primer
gtaaaacgacggccagtggtctttctttcggttatacttcattc

SEQ ID NO: 22723 - DNA, 40 bp, Artificial Sequence
  primer
gtaaaacgacggccagtttcgatgtcaggaatggtatagg

SEQ ID NO: 22724 - DNA, 21 bp, Artificial Sequence
  primer
aggcccaaagtaagacaaagc

SEQ ID NO: 22725 - DNA, 42 bp, Artificial Sequence
  primer
gtaaaacgacggccagttccacctttgacaactaaggtacag

SEQ ID NO: 22726 - DNA, 38 bp, Artificial Sequence
  primer
gtaaaacgacggccagtatttcagtgtgcttgtgaggc

SEQ ID NO: 22727 - DNA, 21 bp, Artificial Sequence
  primer
agcatgcagagaaatggtgtg

SEQ ID NO: 22728 - DNA, 23 bp, Artificial Sequence
  primer
tgggaattctgttactgtaggga

SEQ ID NO: 22729 - DNA, 18 bp, Artificial Sequence
  primer
gcctcaagcagtcctccc

SEQ ID NO: 22730 - DNA, 21 bp, Artificial Sequence
  primer
ctcacctctgaagctgactgc

SEQ ID NO: 22731 - DNA, 37 bp, Artificial Sequence
  primer
gtaaaacgacggccagtggagcgactccattggtagg

SEQ ID NO: 22732 - DNA, 38 bp, Artificial Sequence
  primer
gtaaaacgacggccagttttcagagcactagcactggg

SEQ ID NO: 22733 - DNA, 21 bp, Artificial Sequence
  primer
ttacccaaggcgtatacctgc

SEQ ID NO: 22734 - DNA, 38 bp, Artificial Sequence
  primer
gtaaaacgacggccagttgaaagctgcacctgactcac

SEQ ID NO: 22735 - DNA, 21 bp, Artificial Sequence
  primer
gtttatgcatgtctgggttgc

SEQ ID NO: 22736 - DNA, 38 bp, Artificial Sequence
  primer
gtaaaacgacggccagtcgaggttgcaggttacatgac

SEQ ID NO: 22737 - DNA, 21 bp, Artificial Sequence
  primer
cctctctcattacctggtcgg

SEQ ID NO: 22738 - DNA, 22 bp, Artificial Sequence
  primer
ttcatgctgctgaaccatacac

SEQ ID NO: 22739 - DNA, 18 bp, Artificial Sequence
  primer
cgccaatcggctcaggat

SEQ ID NO: 22740 - DNA, 21 bp, Artificial Sequence
  primer
aggtttgtagggagtcatcgg

SEQ ID NO: 22741 - DNA, 21 bp, Artificial Sequence
  primer
tggcttcgacagttctctgtg

SEQ ID NO: 22742 - DNA, 21 bp, Artificial Sequence
  primer
ctggccttcctacagctctct

SEQ ID NO: 22743 - DNA, 21 bp, Artificial Sequence
  primer
acaagcagactgtgcctgaag

SEQ ID NO: 22744 - DNA, 21 bp, Artificial Sequence
  primer
gccaggtgggatttgtatgag

SEQ ID NO: 22745 - DNA, 20 bp, Artificial Sequence
  primer
agtgtgccggtcagtcactt

SEQ ID NO: 22746 - DNA, 38 bp, Artificial Sequence
  primer
gtaaaacgacggccagttgtaagtggtgctggatggag

SEQ ID NO: 22747 - DNA, 21 bp, Artificial Sequence
  primer
atatccaacgtcgtggctttc

SEQ ID NO: 22748 - DNA, 20 bp, Artificial Sequence
  primer
ggcgacagagtgagaccttg

SEQ ID NO: 22749 - DNA, 20 bp, Artificial Sequence
  primer
atgcacacatgcgcatacac

SEQ ID NO: 22750 - DNA, 38 bp, Artificial Sequence
  primer
gtaaaacgacggccagtcacctgaagacgtgagattgg

SEQ ID NO: 22751 - DNA, 38 bp, Artificial Sequence
  primer
gtaaaacgacggccagtccataacaggagtccagtggc

SEQ ID NO: 22752 - DNA, 39 bp, Artificial Sequence; identical to SEQ ID NO: 13002
  primer

SEQ ID NO: 22753 - DNA, 21 bp, Artificial Sequence
  primer
actctggaaggctagtcaccg

SEQ ID NO: 22754 - DNA, 37 bp, Artificial Sequence
  primer
gtaaaacgacggccagtctgaaacgtgagcacttccc

SEQ ID NO: 22755 - DNA, 38 bp, Artificial Sequence
  primer
gtaaaacgacggccagtcaagaaggcagtgttacctgg

SEQ ID NO: 22756 - DNA, 38 bp, Artificial Sequence
  primer
gtaaaacgacggccagtcagtgagggctgtcctttcac

SEQ ID NO: 22757 - DNA, 38 bp, Artificial Sequence
  primer
gtaaaacgacggccagtgttgttgcagagaccaccaac

SEQ ID NO: 22758 - DNA, 36 bp, Artificial Sequence
  primer
gtaaaacgacggccagtcacggctgcatcttctgag

SEQ ID NO: 22759 - DNA, 38 bp, Artificial Sequence
  primer
gtaaaacgacggccagtccttcgttagaggcattcgag

SEQ ID NO: 22760 - DNA, 37 bp, Artificial Sequence
  primer
gtaaaacgacggccagttgaagagataaaccagcggc

SEQ ID NO: 22761 - DNA, 38 bp, Artificial Sequence
  primer
gtaaaacgacggccagtctatgtaaagtgcctgccacg

SEQ ID NO: 22762 - DNA, 38 bp, Artificial Sequence
  primer
gtaaaacgacggccagtctctcaccacctgtgctcatc

SEQ ID NO: 22763 - DNA, 38 bp, Artificial Sequence
  primer
gtaaaacgacggccagtcagaagctgatgagtcgagga

SEQ ID NO: 22764 - DNA, 21 bp, Artificial Sequence
  primer
cttagattccatccacccgag

SEQ ID NO: 22765 - DNA, 38 bp, Artificial Sequence
  primer
gtaaaacgacggccagtcctcttcctgtgtcgtcttcc

SEQ ID NO: 22766 - DNA, 38 bp, Artificial Sequence
  primer
gtaaaacgacggccagtgacaggcctttcctgtgagag

SEQ ID NO: 22767 - DNA, 22 bp, Artificial Sequence
  primer
gagatgctgatgttcagaagcc

SEQ ID NO: 22768 - DNA, 35 bp, Artificial Sequence
  primer
gtaaaacgacggccagtgagggacttggactgggc

SEQ ID NO: 22769 - DNA, 21 bp, Artificial Sequence
  primer
agtgctgctcactcacacctc

SEQ ID NO: 22770 - DNA, 38 bp, Artificial Sequence
  primer
gtaaaacgacggccagtggaggtagcttctggccaatc

SEQ ID NO: 22771 - DNA, 38 bp, Artificial Sequence
  primer
gtaaaacgacggccagtaggctcagatgtgacccagag

SEQ ID NO: 22772 - DNA, 21 bp, Artificial Sequence
  primer
gactgagggtctggagctgtg

SEQ ID NO: 22773 - DNA, 37 bp, Artificial Sequence
  primer
gtaaaacgacggccagtgagcaacgcgtttgtagagg

SEQ ID NO: 22774 - DNA, 21 bp, Artificial Sequence
  primer
atcagccttcgctgttctctg

SEQ ID NO: 22775 - DNA, 38 bp, Artificial Sequence
  primer
gtaaaacgacggccagtacgtttggcttggtatggaac

SEQ ID NO: 22776 - DNA, 21 bp, Artificial Sequence
  primer
gctgacctggaagtaagtccc

SEQ ID NO: 22777 - DNA, 38 bp, Artificial Sequence
  primer
gtaaaacgacggccagttgaggacacctcactctcagc

SEQ ID NO: 22778 - DNA, 38 bp, Artificial Sequence
  primer
gtaaaacgacggccagtaaagttaggacacgcggtgag

SEQ ID NO: 22779 - DNA, 24 bp, Artificial Sequence
  primer
ttaatcctccttaggatgcaattc

SEQ ID NO: 22780 - DNA, 40 bp, Artificial Sequence
  primer
gtaaaacgacggccagttccttaacttgagggtgaacaac

SEQ ID NO: 22781 - DNA, 39 bp, Artificial Sequence
  primer
gtaaaacgacggccagtgagcctgaatgtaggagtctgg

SEQ ID NO: 22782 - DNA, 37 bp, Artificial Sequence
  primer
gtaaaacgacggccagtgatgcctcgacagcattcag

SEQ ID NO: 22783 - DNA, 38 bp, Artificial Sequence
  primer
gtaaaacgacggccagtgccctaggacattggcttacc

SEQ ID NO: 22784 - DNA, 21 bp, Artificial Sequence
  primer
actggcctagtttcaagaccg

SEQ ID NO: 22785 - DNA, 22 bp, Artificial Sequence
  primer
aattccaggagaggcagaaatc

SEQ ID NO: 22786 - DNA, 21 bp, Artificial Sequence
  primer
cccttgggtcctagcgtagtc

SEQ ID NO: 22787 - DNA, 19 bp, Artificial Sequence
  primer
aggcgtgagcctctgtacc

SEQ ID NO: 22788 - DNA, 41 bp, Artificial Sequence
  primer
gtaaaacgacggccagtggtccctcttgtataatctctgga

SEQ ID NO: 22789 - DNA, 44 bp, Artificial Sequence
  primer
gtaaaacgacggccagtaacagggctcctagtattatgtattcc

SEQ ID NO: 22790 - DNA, 38 bp, Artificial Sequence
  primer
gtaaaacgacggccagtaagagcagtcctttgctttgg

SEQ ID NO: 22791 - DNA, 41 bp, Artificial Sequence
  primer
gtaaaacgacggccagtcaagttgcctgttaataacttccc

SEQ ID NO: 22792 - DNA, 41 bp, Artificial Sequence
  primer
gtaaaacgacggccagtgatgcatctttatgtctgaacagc

SEQ ID NO: 22793 - DNA, 21 bp, Artificial Sequence
  primer
tggcatcatttatagcaccct

SEQ ID NO: 22794 - DNA, 38 bp, Artificial Sequence
  primer
gtaaaacgacggccagttcatcaatttcttcaggctgg

SEQ ID NO: 22795 - DNA, 37 bp, Artificial Sequence
  primer
gtaaaacgacggccagtgggcgatttgtaggtatggc

SEQ ID NO: 22796 - DNA, 20 bp, Artificial Sequence
  primer
gttgggcaagagactctccg

SEQ ID NO: 22797 - DNA, 38 bp, Artificial Sequence
  primer
gtaaaacgacggccagttttgtgtgtttgactttgggc

SEQ ID NO: 22798 - DNA, 38 bp, Artificial Sequence
  primer
gtaaaacgacggccagtaggcatcgtggctgtctttac

SEQ ID NO: 22799 - DNA, 39 bp, Artificial Sequence
  primer
gtaaaacgacggccagtagcctcagatgatccttctgtc

SEQ ID NO: 22800 - DNA, 38 bp, Artificial Sequence
  primer
gtaaaacgacggccagttgccagataggtgagatggtg

SEQ ID NO: 22801 - DNA, 19 bp, Artificial Sequence
  primer
atccacccaccttgtcctg

SEQ ID NO: 22802 - DNA, 38 bp, Artificial Sequence
  primer
gtaaaacgacggccagtgggaaatggaaatggaggttc

SEQ ID NO: 22803 - DNA, 20 bp, Artificial Sequence
  primer
gctgtcaatactgttggccc

SEQ ID NO: 22804 - DNA, 38 bp, Artificial Sequence
  primer
gtaaaacgacggccagttgcacagttgtgtttgtggac

SEQ ID NO: 22805 - DNA, 21 bp, Artificial Sequence
  primer
cagcagatccactctccattg

SEQ ID NO: 22806 - DNA, 37 bp, Artificial Sequence
  primer
gtaaaacgacggccagtttaaatggccagctgtttgc

SEQ ID NO: 22807 - DNA, 20 bp, Artificial Sequence
  primer
gttcttcatgcagcattcgc

SEQ ID NO: 22808 - DNA, 38 bp, Artificial Sequence
  primer
gtaaaacgacggccagttagaacccacaccctcctgac

SEQ ID NO: 22809 - DNA, 21 bp, Artificial Sequence
  primer
ctttgcagaccagcaaggaag

SEQ ID NO: 22810 - DNA, 21 bp, Artificial Sequence
  primer
tgatcattagccacaccactg

SEQ ID NO: 22811 - DNA, 21 bp, Artificial Sequence
  primer
gtatttgttgcatgctgggtg

SEQ ID NO: 22812 - DNA, 38 bp, Artificial Sequence
  primer
gtaaaacgacggccagtcccagctaaagttgtcaccag

SEQ ID NO: 22813 - DNA, 38 bp, Artificial Sequence
  primer
gtaaaacgacggccagtatcagggtgtgtcagcttctc

SEQ ID NO: 22814 - DNA, 21 bp, Artificial Sequence
  primer
agctcagacagtccacccatc

SEQ ID NO: 22815 - DNA, 21 bp, Artificial Sequence
  primer
ctgggctacagagcaagactc

SEQ ID NO: 22816 - DNA, 21 bp, Artificial Sequence
  primer
gtgtaccagcctcctctttgc

SEQ ID NO: 22817 - DNA, 21 bp, Artificial Sequence
  primer
tgagggttcctcgagtttctc

SEQ ID NO: 22818 - DNA, 21 bp, Artificial Sequence
  primer
tcagagtcaccatcgtcttcg

SEQ ID NO: 22819 - DNA, 39 bp, Artificial Sequence
  primer
gtaaaacgacggccagttcccagatctagggtgctgtag

SEQ ID NO: 22820 - DNA, 38 bp, Artificial Sequence
  primer
gtaaaacgacggccagtggtgagatccagtatgtcggg

SEQ ID NO: 22821 - DNA, 38 bp, Artificial Sequence
  primer
gtaaaacgacggccagttgtggttgctgtcagttctgc

SEQ ID NO: 22822 - DNA, 38 bp, Artificial Sequence
  primer
gtaaaacgacggccagtagggtacctgtgttgggtgac

SEQ ID NO: 22823 - DNA, 38 bp, Artificial Sequence
  primer
gtaaaacgacggccagtatgtaaaccggactctggtgg

SEQ ID NO: 22824 - DNA, 36 bp, Artificial Sequence
  primer
gtaaaacgacggccagtagtggagaaggagcccgag

SEQ ID NO: 22825 - DNA, 21 bp, Artificial Sequence
  primer
gcaacgaagagaactgctgtg

SEQ ID NO: 22826 - DNA, 21 bp, Artificial Sequence
  primer
tagcatggataccagctccac

SEQ ID NO: 22827 - DNA, 38 bp, Artificial Sequence
  primer
gtaaaacgacggccagtctgcagaggtgcaaagttcag

SEQ ID NO: 22828 - DNA, 19 bp, Artificial Sequence
  primer
cacctcccagggtcttctg

SEQ ID NO: 22829 - DNA, 38 bp, Artificial Sequence
  primer
gtaaaacgacggccagtgctccagtttatttgggatgg

SEQ ID NO: 22830 - DNA, 38 bp, Artificial Sequence
  primer
gtaaaacgacggccagtcagacctaatcccgctagcac

SEQ ID NO: 22831 - DNA, 21 bp, Artificial Sequence
  primer
ctctcggtatggacagcagtg

SEQ ID NO: 22832 - DNA, 21 bp, Artificial Sequence
  primer
agattgatttctccagggacg

SEQ ID NO: 22833 - DNA, 38 bp, Artificial Sequence
  primer
gtaaaacgacggccagtcagggtgggagatcactgtag

SEQ ID NO: 22834 - DNA, 21 bp, Artificial Sequence
  primer
taccctttgctttccaactgc

SEQ ID NO: 22835 - DNA, 37 bp, Artificial Sequence
  primer
gtaaaacgacggccagtaacaggctcccagtaccagc

SEQ ID NO: 22836 - DNA, 42 bp, Artificial Sequence
  primer
gtaaaacgacggccagtttaatggtacgtatatgctcacagc

SEQ ID NO: 22837 - DNA, 37 bp, Artificial Sequence
  primer
gtaaaacgacggccagtggagctgatggctcacattc

SEQ ID NO: 22838 - DNA, 38 bp, Artificial Sequence
  primer
gtaaaacgacggccagtgactggtctcaaactcccagc

SEQ ID NO: 22839 - DNA, 21 bp, Artificial Sequence
  primer
gtcatcttcgccatttcttcc

SEQ ID NO: 22840 - DNA, 18 bp, Artificial Sequence
  primer
acctggcccagaaagcag

SEQ ID NO: 22841 - DNA, 39 bp, Artificial Sequence
  primer
gtaaaacgacggccagtgctgggtgatagaatgagatcc

SEQ ID NO: 22842 - DNA, 38 bp, Artificial Sequence
  primer
gtaaaacgacggccagtcaagcctggcctgtaacactc

SEQ ID NO: 22843 - DNA, 21 bp, Artificial Sequence
  primer
gccatgattgtaccactgcac

SEQ ID NO: 22844 - DNA, 39 bp, Artificial Sequence
  primer
gtaaaacgacggccagtagtcacgattaaagcacgtcac

SEQ ID NO: 22845 - DNA, 36 bp, Artificial Sequence
  primer
gtaaaacgacggccagtctgagcagggcaggatttc

SEQ ID NO: 22846 - DNA, 20 bp, Artificial Sequence
  primer
gttgcagtgagccaagatca

SEQ ID NO: 22847 - DNA, 39 bp, Artificial Sequence
  primer
gtaaaacgacggccagtttgacctgcttctttcttcctg

SEQ ID NO: 22848 - DNA, 38 bp, Artificial Sequence
  primer
gtaaaacgacggccagtctcgtgcctgttgcagaatag

SEQ ID NO: 22849 - DNA, 21 bp, Artificial Sequence
  primer
aattagctaggcgtggctctg

SEQ ID NO: 22850 - DNA, 39 bp, Artificial Sequence
  primer
gtaaaacgacggccagtcattgctaggaagaactctggg

SEQ ID NO: 22851 - DNA, 38 bp, Artificial Sequence
  primer
gtaaaacgacggccagtttgccaagcaatatcatcctg

SEQ ID NO: 22852 - DNA, 38 bp, Artificial Sequence
  primer
gtaaaacgacggccagtgggactccaactcaacgagag

SEQ ID NO: 22853 - DNA, 41 bp, Artificial Sequence
  primer
gtaaaacgacggccagttcttacattgatcccatgactcac

SEQ ID NO: 22854 - DNA, 21 bp, Artificial Sequence
  primer
agtggaaccatgtttgtgagc

SEQ ID NO: 22855 - DNA, 37 bp, Artificial Sequence
  primer
gtaaaacgacggccagtggaaggttcacgagtgttgc

SEQ ID NO: 22856 - DNA, 38 bp, Artificial Sequence
  primer
gtaaaacgacggccagtgccctttggcactttaagaag

SEQ ID NO: 22857 - DNA, 35 bp, Artificial Sequence
  primer
gtaaaacgacggccagtcagatcttggctcctggc

SEQ ID NO: 22858 - DNA, 38 bp, Artificial Sequence
  primer
gtaaaacgacggccagtatttgccttgggattaaccag

SEQ ID NO: 22859 - DNA, 44 bp, Artificial Sequence
  primer
gtaaaacgacggccagtgaccgtattatcacttgtactgattgg

SEQ ID NO: 22860 - DNA, 38 bp, Artificial Sequence; identical to SEQ ID NO: 22858
  primer

SEQ ID NO: 22861 - DNA, 38 bp, Artificial Sequence
  primer
gtaaaacgacggccagtctgagtgcctgtaattcctgc

SEQ ID NO: 22862 - DNA, 21 bp, Artificial Sequence
  primer
tgagctcaggttctggtgaag

SEQ ID NO: 22863 - DNA, 21 bp, Artificial Sequence
  primer
cagcaactgcaacttaaacgc

SEQ ID NO: 22864 - DNA, 35 bp, Artificial Sequence
  primer
gtaaaacgacggccagtctccctgtgtctggcagc

SEQ ID NO: 22865 - DNA, 21 bp, Artificial Sequence
  primer
cctggagaggctgggttactc

SEQ ID NO: 22866 - DNA, 38 bp, Artificial Sequence
  primer
gtaaaacgacggccagtacctaagaccaggatcctccc

SEQ ID NO: 22867 - DNA, 18 bp, Artificial Sequence
  primer
cctgagcctgatgctggg

SEQ ID NO: 22868 - DNA, 21 bp, Artificial Sequence
  primer
tggatgggtggtagatactgg

SEQ ID NO: 22869 - DNA, 36 bp, Artificial Sequence
  primer
gtaaaacgacggccagtgtgcagacggactcagagc

SEQ ID NO: 22870 - DNA, 38 bp, Artificial Sequence
  primer
gtaaaacgacggccagtctcctctgggaggatgcttag

SEQ ID NO: 22871 - DNA, 38 bp, Artificial Sequence
  primer
gtaaaacgacggccagttgttgctctggcagtatctgg

SEQ ID NO: 22872 - DNA, 38 bp, Artificial Sequence
  primer
gtaaaacgacggccagtgactgtgagcggctgttagtg

SEQ ID NO: 22873 - DNA, 38 bp, Artificial Sequence
  primer
gtaaaacgacggccagtatagtgagccagatgggcaag

SEQ ID NO: 22874 - DNA, 38 bp, Artificial Sequence
  primer
gtaaaacgacggccagtttccctaaattccacactcgc

SEQ ID NO: 22875 - DNA, 38 bp, Artificial Sequence; identical to SEQ ID NO: 22871
  primer

SEQ ID NO: 22876 - DNA, 21 bp, Artificial Sequence
  primer
acttagagtgaggtgcgggag

SEQ ID NO: 22877 - DNA, 37 bp, Artificial Sequence
  primer
gtaaaacgacggccagtctttagtagccggcaaaggc

SEQ ID NO: 22878 - DNA, 38 bp, Artificial Sequence
  primer
gtaaaacgacggccagttggcagtatcctgctcctaga

SEQ ID NO: 22879 - DNA, 21 bp, Artificial Sequence
  primer
ttccctacgtccttccaagtg

SEQ ID NO: 22880 - DNA, 22 bp, Artificial Sequence
  primer
gctcaggctggtcttagcatag

SEQ ID NO: 22881 - DNA, 25 bp, Artificial Sequence
  primer
aatatgaacctggatgtatctgacg

SEQ ID NO: 22882 - DNA, 21 bp, Artificial Sequence
  primer
tcttccctttaaatacccggc

SEQ ID NO: 22883 - DNA, 38 bp, Artificial Sequence
  primer
gtaaaacgacggccagtcaacatagcaagacctgcctc

SEQ ID NO: 22884 - DNA, 21 bp, Artificial Sequence
  primer
ctgctgtctctggatgaggtg

SEQ ID NO: 22885 - DNA, 21 bp, Artificial Sequence
  primer
catccgggattgtgactacag

SEQ ID NO: 22886 - DNA, 36 bp, Artificial Sequence
  primer
gtaaaacgacggccagtatgtgacgccgtccttagc

SEQ ID NO: 22887 - DNA, 37 bp, Artificial Sequence
  primer
gtaaaacgacggccagtgaaccaacgtcctcctgtcc

SEQ ID NO: 22888 - DNA, 38 bp, Artificial Sequence
  primer
gtaaaacgacggccagtcaatcacccacgtctatgctc

SEQ ID NO: 22889 - DNA, 38 bp, Artificial Sequence
  primer
gtaaaacgacggccagtagcaatgggacttggacagag

SEQ ID NO: 22890 - DNA, 38 bp, Artificial Sequence
  primer
gtaaaacgacggccagttccatttgatttgaatccagc

SEQ ID NO: 22891 - DNA, 22 bp, Artificial Sequence
  primer
tcttgcactgatttggaaagtg

SEQ ID NO: 22892 - DNA, 37 bp, Artificial Sequence
  primer
gtaaaacgacggccagttttaattattccggcggtcc

SEQ ID NO: 22893 - DNA, 38 bp, Artificial Sequence
  primer
gtaaaacgacggccagtgcagacatctgtttctgtggg

SEQ ID NO: 22894 - DNA, 36 bp, Artificial Sequence
  primer
gtaaaacgacggccagtaagtattgagagcgcgtgg

SEQ ID NO: 22895 - DNA, 22 bp, Artificial Sequence
  primer
tttgggataatttggacagcac

SEQ ID NO: 22896 - DNA, 22 bp, Artificial Sequence
  primer
tcaagctttactggattgagcc

SEQ ID NO: 22897 - DNA, 37 bp, Artificial Sequence
  primer
gtaaaacgacggccagtgtgccagcagctgaaacatc

SEQ ID NO: 22898 - DNA, 39 bp, Artificial Sequence
  primer
gtaaaacgacggccagttgtgaaatgtcaggacagcatc

SEQ ID NO: 22899 - DNA, 22 bp, Artificial Sequence
  primer
taggacattcattcaatcctgc

SEQ ID NO: 22900 - DNA, 40 bp, Artificial Sequence
  primer
gtaaaacgacggccagtaatattgcaagagtcctgacacc

SEQ ID NO: 22901 - DNA, 38 bp, Artificial Sequence
  primer
gtaaaacgacggccagttccggaaatagtatggaaccc

SEQ ID NO: 22902 - DNA, 39 bp, Artificial Sequence
  primer
gtaaaacgacggccagtccgttgagattagcaagcagtc

SEQ ID NO: 22903 - DNA, 38 bp, Artificial Sequence
  primer
gtaaaacgacggccagtatggcaccaaatcttgactcc

SEQ ID NO: 22904 - DNA, 22 bp, Artificial Sequence
  primer
gccctttgttaatgagcgtatc

SEQ ID NO: 22905 - DNA, 21 bp, Artificial Sequence
  primer
atgatatctccagccgtccag

SEQ ID NO: 22906 - DNA, 38 bp, Artificial Sequence
  primer
gtaaaacgacggccagtatccctatccctccaaattcc

SEQ ID NO: 22907 - DNA, 38 bp, Artificial Sequence
  primer
gtaaaacgacggccagtattgcttggcagttgttgagg

SEQ ID NO: 22908 - DNA, 38 bp, Artificial Sequence
  primer
gtaaaacgacggccagttttgtccaggaatcatatggc

SEQ ID NO: 22909 - DNA, 19 bp, Artificial Sequence
  primer
ggcaagacatggtctgctg

SEQ ID NO: 22910 - DNA, 42 bp, Artificial Sequence
  primer
gtaaaacgacggccagtagagtaattgctgtagctcagaagc

SEQ ID NO: 22911 - DNA, 41 bp, Artificial Sequence
  primer
gtaaaacgacggccagttgctgtagcttgcatatctgtttc

SEQ ID NO: 22912 - DNA, 21 bp, Artificial Sequence
  primer
actcttgccctctctttgctg

SEQ ID NO: 22913 - DNA, 21 bp, Artificial Sequence
  primer
ggagcgagactctgtctcaaa

SEQ ID NO: 22914 - DNA, 38 bp, Artificial Sequence
  primer
gtaaaacgacggccagtggctctaggtcagtaggaggc

SEQ ID NO: 22915 - DNA, 21 bp, Artificial Sequence
  primer
aatgtggataacaaccctggc

SEQ ID NO: 22916 - DNA, 21 bp, Artificial Sequence
  primer
ggactaggtccagagccacac

SEQ ID NO: 22917 - DNA, 22 bp, Artificial Sequence
  primer
aacattaattgaatgccaacgg

SEQ ID NO: 22918 - DNA, 21 bp, Artificial Sequence
  primer
ccaccaatttgaatcatgcag

SEQ ID NO: 22919 - DNA, 21 bp, Artificial Sequence
  primer
ggtggaatcatggctcactac

SEQ ID NO: 22920 - DNA, 22 bp, Artificial Sequence
  primer
ggaggcaagaggtttcaatttc

SEQ ID NO: 22921 - DNA, 38 bp, Artificial Sequence
  primer
gtaaaacgacggccagtgacctaagctctccacgcatc

SEQ ID NO: 22922 - DNA, 22 bp, Artificial Sequence
  primer
gactgacaatgctgttctcacg

SEQ ID NO: 22923 - DNA, 21 bp, Artificial Sequence
  primer
ttggaggcaagtagagatggg

SEQ ID NO: 22924 - DNA, 20 bp, Artificial Sequence
  primer
gtcctccggtctgtttctcc

SEQ ID NO: 22925 - DNA, 38 bp, Artificial Sequence
  primer
gtaaaacgacggccagttcctcacctttaacgtccctc

SEQ ID NO: 22926 - DNA, 38 bp, Artificial Sequence
  primer
gtaaaacgacggccagtgaccagttgcagtgactgtgg

SEQ ID NO: 22927 - DNA, 22 bp, Artificial Sequence
  primer
aaagcgcagctctgtcattaag

SEQ ID NO: 22928 - DNA, 38 bp, Artificial Sequence
  primer
gtaaaacgacggccagttctaagaagggaggagccagc

SEQ ID NO: 22929 - DNA, 38 bp, Artificial Sequence
  primer
gtaaaacgacggccagtatttcggtgtctgacgtttcc

SEQ ID NO: 22930 - DNA, 36 bp, Artificial Sequence
  primer
gtaaaacgacggccagtctttctccatttgccagcc

SEQ ID NO: 22931 - DNA, 38 bp, Artificial Sequence
  primer
gtaaaacgacggccagtataatagatttgggatcgccg

SEQ ID NO: 22932 - DNA, 21 bp, Artificial Sequence
  primer
ttgcttgaggtcaggagtttg

SEQ ID NO: 22933 - DNA, 20 bp, Artificial Sequence
  primer
cagcatcctagagagctggc

SEQ ID NO: 22934 - DNA, 38 bp, Artificial Sequence
  primer
gtaaaacgacggccagttttgattgtcccttctgctcc

SEQ ID NO: 22935 - DNA, 38 bp, Artificial Sequence
  primer
gtaaaacgacggccagtgttcaaacgctgatctcaccc

SEQ ID NO: 22936 - DNA, 38 bp, Artificial Sequence
  primer
gtaaaacgacggccagtacgctatcactggagagggag

SEQ ID NO: 22937 - DNA, 21 bp, Artificial Sequence
  primer
gagagcggatgtttgtgaagc

SEQ ID NO: 22938 - DNA, 37 bp, Artificial Sequence
  primer
gtaaaacgacggccagtgtccttcgcttctcaaaccc

SEQ ID NO: 22939 - DNA, 38 bp, Artificial Sequence
  primer
gtaaaacgacggccagtcttctggctcagcattgctac

SEQ ID NO: 22940 - DNA, 35 bp, Artificial Sequence
  primer
gtaaaacgacggccagtggcaatgtttcctgtggc

SEQ ID NO: 22941 - DNA, 39 bp, Artificial Sequence
  primer
gtaaaacgacggccagttgtgtgctccttgtctgacttg

SEQ ID NO: 22942 - DNA, 23 bp, Artificial Sequence
  primer
ctctcctggtttgattctgtctc

SEQ ID NO: 22943 - DNA, 38 bp, Artificial Sequence
  primer
gtaaaacgacggccagtctgcagggatcctttctcttg

SEQ ID NO: 22944 - DNA, 39 bp, Artificial Sequence
  primer
gtaaaacgacggccagtgctgaacagcatccttatttcc

SEQ ID NO: 22945 - DNA, 40 bp, Artificial Sequence
  primer
gtaaaacgacggccagtgcagaaattattaggccacattg

SEQ ID NO: 22946 - DNA, 38 bp, Artificial Sequence
  primer
gtaaaacgacggccagtccatttaattgcaaaccaggg

SEQ ID NO: 22947 - DNA, 38 bp, Artificial Sequence
  primer
gtaaaacgacggccagtcttaccatgggttgtggtcag

SEQ ID NO: 22948 - DNA, 38 bp, Artificial Sequence
  primer
gtaaaacgacggccagttgcccaatgcatagatttcag

SEQ ID NO: 22949 - DNA, 38 bp, Artificial Sequence
  primer
gtaaaacgacggccagttgggtgcctatcaccttcttc

SEQ ID NO: 22950 - DNA, 38 bp, Artificial Sequence
  primer
gtaaaacgacggccagtgctgtgaccacaccttctgtc

SEQ ID NO: 22951 - DNA, 38 bp, Artificial Sequence
  primer
gtaaaacgacggccagttaaccaggtgctgacatttgc

SEQ ID NO: 22952 - DNA, 27 bp, Artificial Sequence
  primer
tggtaatagcgtatgctaagagagtaa

SEQ ID NO: 22953 - DNA, 22 bp, Artificial Sequence
  primer
agttaatgtggtgatgcagagg

SEQ ID NO: 22954 - DNA, 21 bp, Artificial Sequence
  primer
gccatgctaggacttattccg

SEQ ID NO: 22955 - DNA, 20 bp, Artificial Sequence
  primer
agcgaggctcttgtctcaaa

SEQ ID NO: 22956 - DNA, 38 bp, Artificial Sequence
  primer
gtaaaacgacggccagtgagaaggaactcgacacgcac

SEQ ID NO: 22957 - DNA, 38 bp, Artificial Sequence
  primer
gtaaaacgacggccagtgtctaggcaggaggcagtgac

SEQ ID NO: 22958 - DNA, 21 bp, Artificial Sequence
  primer
atgaaggagggagacttctgg

SEQ ID NO: 22959 - DNA, 38 bp, Artificial Sequence
  primer
gtaaaacgacggccagtctctgcctctgtaacacgctc

SEQ ID NO: 22960 - DNA, 21 bp, Artificial Sequence
  primer
acaagcagggatccatttgag

SEQ ID NO: 22961 - DNA, 21 bp, Artificial Sequence
  primer
tgggaaacagacctcactcag

SEQ ID NO: 22962 - DNA, 38 bp, Artificial Sequence
  primer
gtaaaacgacggccagtgggcatagcagaccatagacc

SEQ ID NO: 22963 - DNA, 21 bp, Artificial Sequence
  primer
ggtgtccttcatcgtctctcc

SEQ ID NO: 22964 - DNA, 19 bp, Artificial Sequence
  primer
gaagggagatgtccggagg

SEQ ID NO: 22965 - DNA, 37 bp, Artificial Sequence
  primer
gtaaaacgacggccagtacgtgggtcgtccatctctc

SEQ ID NO: 22966 - DNA, 21 bp, Artificial Sequence
  primer
gaaacatgctgtctgtagccg

SEQ ID NO: 22967 - DNA, 38 bp, Artificial Sequence
  primer
gtaaaacgacggccagtgttcctggactgttccaccac

SEQ ID NO: 22968 - DNA, 21 bp, Artificial Sequence
  primer
aaacctgcttactgtggagcg

SEQ ID NO: 22969 - DNA, 38 bp, Artificial Sequence
  primer
gtaaaacgacggccagtggtcgggtagtagagagtgcg

SEQ ID NO: 22970 - DNA, 21 bp, Artificial Sequence
  primer
ctaaacagagcccgtttctgg

SEQ ID NO: 22971 - DNA, 22 bp, Artificial Sequence
  primer
ttctccagagaaagtcaccctc

SEQ ID NO: 22972 - DNA, 38 bp, Artificial Sequence
  primer
gtaaaacgacggccagtgtcaccctcgcgactagaaag

SEQ ID NO: 22973 - DNA, 38 bp, Artificial Sequence
  primer
gtaaaacgacggccagtctgaggtgtggcatgaatgag

SEQ ID NO: 22974 - DNA, 38 bp, Artificial Sequence
  primer
gtaaaacgacggccagttctgtaagtggccagaactgc

SEQ ID NO: 22975 - DNA, 20 bp, Artificial Sequence
  primer
atgtcagccaagtgtccctg

SEQ ID NO: 22976 - DNA, 38 bp, Artificial Sequence
  primer
gtaaaacgacggccagttcagtggtgaaggactgaagg

SEQ ID NO: 22977 - DNA, 40 bp, Artificial Sequence
  primer
gtaaaacgacggccagtcaccttctcttagtttgctgacc

SEQ ID NO: 22978 - DNA, 39 bp, Artificial Sequence
  primer
gtaaaacgacggccagtgactaagcaggcatatgttggg

SEQ ID NO: 22979 - DNA, 38 bp, Artificial Sequence
  primer
gtaaaacgacggccagtgagctcaccaaagtacctggc

SEQ ID NO: 22980 - DNA, 19 bp, Artificial Sequence
  primer
actatgggcatgagccagg

SEQ ID NO: 22981 - DNA, 20 bp, Artificial Sequence
  primer
cagaggtgggagaaatgcag

SEQ ID NO: 22982 - DNA, 20 bp, Artificial Sequence
  primer
ctttatgccatgtgggttgg

SEQ ID NO: 22983 - DNA, 38 bp, Artificial Sequence
  primer
gtaaaacgacggccagtgtgtgaaagaaggtgctgctg

SEQ ID NO: 22984 - DNA, 21 bp, Artificial Sequence
  primer
ggtatgaatgatcccgtcacc

SEQ ID NO: 22985 - DNA, 38 bp, Artificial Sequence
  primer
gtaaaacgacggccagttcagtgagacgtggcattacc

SEQ ID NO: 22986 - DNA, 38 bp, Artificial Sequence
  primer
gtaaaacgacggccagtgacaaagttgaagggctttgc

SEQ ID NO: 22987 - DNA, 36 bp, Artificial Sequence
  primer
gtaaaacgacggccagtcaggagagagatggtgccc

SEQ ID NO: 22988 - DNA, 21 bp, Artificial Sequence
  primer
gtataccaggatagctggccg

SEQ ID NO: 22989 - DNA, 38 bp, Artificial Sequence
  primer
gtaaaacgacggccagtcatgtcacctttcagctcctg

SEQ ID NO: 22990 - DNA, 21 bp, Artificial Sequence
  primer
aagctggcaattccacttagg

SEQ ID NO: 22991 - DNA, 21 bp, Artificial Sequence
  primer
agcttgatctgatggcctagc

SEQ ID NO: 22992 - DNA, 21 bp, Artificial Sequence
  primer
tttcccttgtgtgaatgaacc

SEQ ID NO: 22993 - DNA, 21 bp, Artificial Sequence
  primer
gcaatattaactggcggcatc

SEQ ID NO: 22994 - DNA, 36 bp, Artificial Sequence
  primer
gtaaaacgacggccagtatgctcagtgcagaatggg

SEQ ID NO: 22995 - DNA, 20 bp, Artificial Sequence
  primer
cgcttgaacctaagaggcag

SEQ ID NO: 22996 - DNA, 37 bp, Artificial Sequence
  primer
gtaaaacgacggccagtgtgtacggaagccctgtctg

SEQ ID NO: 22997 - DNA, 22 bp, Artificial Sequence
  primer
cccggcctagaaacactatttg

SEQ ID NO: 22998 - DNA, 38 bp, Artificial Sequence
  primer
gtaaaacgacggccagttcaggctctagctcactgctg

SEQ ID NO: 22999 - DNA, 21 bp, Artificial Sequence
  primer
aggtgcttgagagggtattgg

SEQ ID NO: 23000 - DNA, 38 bp, Artificial Sequence
  primer
gtaaaacgacggccagtccctggtgtagcgtaaccttc

SEQ ID NO: 23001 - DNA, 38 bp, Artificial Sequence
  primer
gtaaaacgacggccagtctattccatgctggtccacag

SEQ ID NO: 23002 - DNA, 37 bp, Artificial Sequence
  primer
gtaaaacgacggccagtggagtgaggtgagggtgatg

SEQ ID NO: 23003 - DNA, 21 bp, Artificial Sequence
  primer
ctgtctcctctctgcggtaag

SEQ ID NO: 23004 - DNA, 21 bp, Artificial Sequence
  primer
ttctgcaaaggtttccctcag

SEQ ID NO: 23005 - DNA, 37 bp, Artificial Sequence
  primer
gtaaaacgacggccagtatcgggtcacagatgagtcg

SEQ ID NO: 23006 - DNA, 21 bp, Artificial Sequence
  primer
gtgggaggtcagatgtctgtg

SEQ ID NO: 23007 - DNA, 36 bp, Artificial Sequence
  primer
gtaaaacgacggccagtctcgggttcaaagtctgcc

SEQ ID NO: 23008 - DNA, 38 bp, Artificial Sequence
  primer
gtaaaacgacggccagtcatcctctctgtccctccatc

SEQ ID NO: 23009 - DNA, 38 bp, Artificial Sequence
  primer
gtaaaacgacggccagtactgtgtgtggtgcagtcgag

SEQ ID NO: 23010 - DNA, 21 bp, Artificial Sequence
  primer
atctcagtttcggtggcaaag

SEQ ID NO: 23011 - DNA, 37 bp, Artificial Sequence
  primer
gtaaaacgacggccagtgtgtctgtcccaggatcacg

SEQ ID NO: 23012 - DNA, 38 bp, Artificial Sequence
  primer
gtaaaacgacggccagtgatgaggaatggtggcttagg

SEQ ID NO: 23013 - DNA, 38 bp, Artificial Sequence
  primer
gtaaaacgacggccagtcgcagacagttccagactttg

SEQ ID NO: 23014 - DNA, 36 bp, Artificial Sequence
  primer
gtaaaacgacggccagtggcctgcttaggtgctcag

SEQ ID NO: 23015 - DNA, 21 bp, Artificial Sequence
  primer
gggctcacaaccaagtttctc

SEQ ID NO: 23016 - DNA, 38 bp, Artificial Sequence
  primer
gtaaaacgacggccagtaagcacacacatgtgacttgg

SEQ ID NO: 23017 - DNA, 20 bp, Artificial Sequence
  primer
ctgggaggtagaggtgaggg

SEQ ID NO: 23018 - DNA, 38 bp, Artificial Sequence
  primer
gtaaaacgacggccagtggccagtgcttcagtaaggtc

SEQ ID NO: 23019 - DNA, 38 bp, Artificial Sequence
  primer
gtaaaacgacggccagttgtcatcatttgcttgatccc

SEQ ID NO: 23020 - DNA, 36 bp, Artificial Sequence
  primer
gtaaaacgacggccagtactgtggcttccttggtgc

SEQ ID NO: 23021 - DNA, 37 bp, Artificial Sequence
  primer
gtaaaacgacggccagtgaggtgtcctccagcctctc

SEQ ID NO: 23022 - DNA, 38 bp, Artificial Sequence
  primer
gtaaaacgacggccagttccatcgtaatgcctgcatag

SEQ ID NO: 23023 - DNA, 37 bp, Artificial Sequence
  primer
gtaaaacgacggccagtctgacatcgactgggaggag

SEQ ID NO: 23024 - DNA, 38 bp, Artificial Sequence
  primer
gtaaaacgacggccagtctggtaggtctctggctttgg

SEQ ID NO: 23025 - DNA, 37 bp, Artificial Sequence
  primer
gtaaaacgacggccagtgccacaggagtgtgtgacag

SEQ ID NO: 23026 - DNA, 35 bp, Artificial Sequence
  primer
gtaaaacgacggccagtctgccagctcagacgctc

SEQ ID NO: 23027 - DNA, 21 bp, Artificial Sequence
  primer
gttgtttgagggtgggatagg

SEQ ID NO: 23028 - DNA, 38 bp, Artificial Sequence
  primer
gtaaaacgacggccagtctcagcagagtttggcctcag

SEQ ID NO: 23029 - DNA, 38 bp, Artificial Sequence
  primer
gtaaaacgacggccagtactgccgtgaccatagcactc

SEQ ID NO: 23030 - DNA, 22 bp, Artificial Sequence
  primer
gggtgagagatgttggtgagag

SEQ ID NO: 23031 - DNA, 38 bp, Artificial Sequence
  primer
gtaaaacgacggccagttatgtggtaggcgcccagtag

SEQ ID NO: 23032 - DNA, 38 bp, Artificial Sequence
  primer
gtaaaacgacggccagtgggacatcattgacttggagg

SEQ ID NO: 23033 - DNA, 39 bp, Artificial Sequence
  primer
gtaaaacgacggccagtgctgatttaaattgcttgtcgg

SEQ ID NO: 23034 - DNA, 38 bp, Artificial Sequence
  primer
gtaaaacgacggccagtgcaaatatgttggagacggtg

SEQ ID NO: 23035 - DNA, 21 bp, Artificial Sequence
  primer
tgcagagtaagactcgccttg

SEQ ID NO: 23036 - DNA, 38 bp, Artificial Sequence
  primer
gtaaaacgacggccagtcagtgagccagtctccagagg

SEQ ID NO: 23037 - DNA, 38 bp, Artificial Sequence
  primer
gtaaaacgacggccagtttctcctccacatttgtgcta

SEQ ID NO: 23038 - DNA, 21 bp, Artificial Sequence
  primer
cgacaaggtcaaagatgatgc

SEQ ID NO: 23039 - DNA, 38 bp, Artificial Sequence
  primer
gtaaaacgacggccagtatattgtggcaccatggaaag

SEQ ID NO: 23040 - DNA, 21 bp, Artificial Sequence
  primer
ccaacgagttgttgtggattc

SEQ ID NO: 23041 - DNA, 38 bp, Artificial Sequence
  primer
gtaaaacgacggccagtaaagcgtccgtgaagctagag

SEQ ID NO: 23042 - DNA, 21 bp, Artificial Sequence
  primer
aggcaatgtgcagagacaaag

SEQ ID NO: 23043 - DNA, 22 bp, Artificial Sequence
  primer
ttgcatatctgtgcaagctacc

SEQ ID NO: 23044 - DNA, 25 bp, Artificial Sequence
  primer
cacagatctacagttcttcagtggc

SEQ ID NO: 23045 - DNA, 38 bp, Artificial Sequence
  primer
gtaaaacgacggccagtaggaagacatttgcatgggac

SEQ ID NO: 23046 - DNA, 22 bp, Artificial Sequence
  primer
ccaaagaatcagaaactcgctg

SEQ ID NO: 23047 - DNA, 44 bp, Artificial Sequence
  primer
gtaaaacgacggccagtggaaatatctattggaaccaatttcag

SEQ ID NO: 23048 - DNA, 41 bp, Artificial Sequence
  primer
gtaaaacgacggccagtcaacaatgatacattctgggaaac

SEQ ID NO: 23049 - DNA, 43 bp, Artificial Sequence
  primer
gtaaaacgacggccagtttcttcagatgaaagtttaaatcgac

SEQ ID NO: 23050 - DNA, 36 bp, Artificial Sequence
  primer
gtaaaacgacggccagtaaagaggcagattccaccc

SEQ ID NO: 23051 - DNA, 38 bp, Artificial Sequence
  primer
gtaaaacgacggccagtccaccctaacaatctccttcc

SEQ ID NO: 23052 - DNA, 21 bp, Artificial Sequence
  primer
ccattatgaactggctgaggc

SEQ ID NO: 23053 - DNA, 38 bp, Artificial Sequence
  primer
gtaaaacgacggccagtagcaaatcctggctccattag

SEQ ID NO: 23054 - DNA, 21 bp, Artificial Sequence
  primer
ttcagccacaccaacagtttc

SEQ ID NO: 23055 - DNA, 21 bp, Artificial Sequence
  primer
ttctttggacccagatggttt

SEQ ID NO: 23056 - DNA, 38 bp, Artificial Sequence
  primer
gtaaaacgacggccagtgattacacgcatgtgccattg

SEQ ID NO: 23057 - DNA, 38 bp, Artificial Sequence
  primer
gtaaaacgacggccagtttgaccctgtttgtgagttgc

SEQ ID NO: 23058 - DNA, 40 bp, Artificial Sequence
  primer
gtaaaacgacggccagttggatttcctcaataagcctaaa

SEQ ID NO: 23059 - DNA, 21 bp, Artificial Sequence
  primer
agcctcaaccgtatccatttc

SEQ ID NO: 23060 - DNA, 38 bp, Artificial Sequence
  primer
gtaaaacgacggccagtaaagagagggagagggagacc

SEQ ID NO: 23061 - DNA, 37 bp, Artificial Sequence
  primer
gtaaaacgacggccagtcatcctaacacgcatcaccc

SEQ ID NO: 23062 - DNA, 44 bp, Artificial Sequence
  primer
gtaaaacgacggccagtacatatggaatgttctagccaattatg

SEQ ID NO: 23063 - DNA, 21 bp, Artificial Sequence
  primer
cagcatgtgctagaccagagg

SEQ ID NO: 23064 - DNA, 20 bp, Artificial Sequence
  primer
cggttgcgtcattagtaggc

SEQ ID NO: 23065 - DNA, 21 bp, Artificial Sequence
  primer
gactcttccatgactttgggc

SEQ ID NO: 23066 - DNA, 21 bp, Artificial Sequence
  primer
tttgagtcctggagaaatggg

SEQ ID NO: 23067 - DNA, 23 bp, Artificial Sequence
  primer
tttatggcaatacagcaggtagg

SEQ ID NO: 23068 - DNA, 25 bp, Artificial Sequence
  primer
aactcagtctacagttgcatatggg

SEQ ID NO: 23069 - DNA, 37 bp, Artificial Sequence
  primer
gtaaaacgacggccagtaggctggtctcgaatccttt

SEQ ID NO: 23070 - DNA, 24 bp, Artificial Sequence
  primer
cataaagaagatgaggcaatgagc

SEQ ID NO: 23071 - DNA, 20 bp, Artificial Sequence
  primer
gccagatgtggattgtctgg

SEQ ID NO: 23072 - DNA, 38 bp, Artificial Sequence
  primer
gtaaaacgacggccagtcataagaggcctattgggtcc

SEQ ID NO: 23073 - DNA, 40 bp, Artificial Sequence
  primer
gtaaaacgacggccagtccgtttccagaaatttgtagtgg

SEQ ID NO: 23074 - DNA, 18 bp, Artificial Sequence
  primer
ccagccgcgtagcctatc

SEQ ID NO: 23075 - DNA, 39 bp, Artificial Sequence
  primer
gtaaaacgacggccagttcaaacaaacattgccatgaag

SEQ ID NO: 23076 - DNA, 38 bp, Artificial Sequence
  primer
gtaaaacgacggccagtagttagggaaattcctgctgc

SEQ ID NO: 23077 - DNA, 38 bp, Artificial Sequence
  primer
gtaaaacgacggccagtcctcaggcagcataatgtgag

SEQ ID NO: 23078 - DNA, 38 bp, Artificial Sequence
  primer
gtaaaacgacggccagttgacttcaggatggcaagatg

SEQ ID NO: 23079 - DNA, 22 bp, Artificial Sequence
  primer
ccacagccaaagtatcaaatcc

SEQ ID NO: 23080 - DNA, 38 bp, Artificial Sequence
  primer
gtaaaacgacggccagttccaatggtaagggatcaagg

SEQ ID NO: 23081 - DNA, 38 bp, Artificial Sequence
  primer
gtaaaacgacggccagtaaagccaacaagtcaagccac

SEQ ID NO: 23082 - DNA, 36 bp, Artificial Sequence
  primer
gtaaaacgacggccagtagctcacctctgaggcacg

SEQ ID NO: 23083 - DNA, 38 bp, Artificial Sequence
  primer
gtaaaacgacggccagtagcacagggaggtatcaatgg

SEQ ID NO: 23084 - DNA, 19 bp, Artificial Sequence
  primer
ttcagagcaccacacaggg

SEQ ID NO: 23085 - DNA, 38 bp, Artificial Sequence
  primer
gtaaaacgacggccagtgttagcaccaggaccaattcc

SEQ ID NO: 23086 - DNA, 21 bp, Artificial Sequence
  primer
tcataaacaagggcttcaggc

SEQ ID NO: 23087 - DNA, 38 bp, Artificial Sequence
  primer
gtaaaacgacggccagttttgggattctgggatacagg

SEQ ID NO: 23088 - DNA, 38 bp, Artificial Sequence
  primer
gtaaaacgacggccagtgcagacaacacaatgtctggg

SEQ ID NO: 23089 - DNA, 42 bp, Artificial Sequence
  primer
gtaaaacgacggccagtggtatatcccaagaagtcattcaac

SEQ ID NO: 23090 - DNA, 38 bp, Artificial Sequence
  primer
gtaaaacgacggccagtgagtcccaacactccctcaag

SEQ ID NO: 23091 - DNA, 21 bp, Artificial Sequence
  primer
tggctttaggctgagaattgg

SEQ ID NO: 23092 - DNA, 21 bp, Artificial Sequence
  primer
tctacatcaggcgaggacaac

SEQ ID NO: 23093 - DNA, 21 bp, Artificial Sequence
  primer
cctaagaaaccttcccaaccc

SEQ ID NO: 23094 - DNA, 21 bp, Artificial Sequence
  primer
ggtattgctttccaaactgcc

SEQ ID NO: 23095 - DNA, 38 bp, Artificial Sequence
  primer
gtaaaacgacggccagtgaagacatcgcagtccctctc

SEQ ID NO: 23096 - DNA, 21 bp, Artificial Sequence
  primer
agacgtcacagtcccttggag

SEQ ID NO: 23097 - DNA, 21 bp, Artificial Sequence
  primer
acagtccctctgagatgaggc

SEQ ID NO: 23098 - DNA, 19 bp, Artificial Sequence
  primer
gcaacctctgctgtcctcc

SEQ ID NO: 23099 - DNA, 20 bp, Artificial Sequence
  primer
atcagtaggcgcctttccac

SEQ ID NO: 23100 - DNA, 21 bp, Artificial Sequence
  primer
atctgaagaaggtgctctggg

SEQ ID NO: 23101 - DNA, 21 bp, Artificial Sequence
  primer
tctaagaccaggacagcctcc

SEQ ID NO: 23102 - DNA, 38 bp, Artificial Sequence
  primer
gtaaaacgacggccagtcttaaccaaactggaccaccc

SEQ ID NO: 23103 - DNA, 38 bp, Artificial Sequence
  primer
gtaaaacgacggccagtgaccttgcctaccttcagcac

SEQ ID NO: 23104 - DNA, 37 bp, Artificial Sequence
  primer
gtaaaacgacggccagttgagatgccctggaattgag

SEQ ID NO: 23105 - DNA, 36 bp, Artificial Sequence
  primer
gtaaaacgacggccagtcaaaggaggtggaagccag

SEQ ID NO: 23106 - DNA, 21 bp, Artificial Sequence
  primer
acttactgtgctctctggccc

SEQ ID NO: 23107 - DNA, 21 bp, Artificial Sequence
  primer
gtggcagctaaggaaaccttg

SEQ ID NO: 23108 - DNA, 18 bp, Artificial Sequence
  primer
accaaagcgctccaggac

SEQ ID NO: 23109 - DNA, 21 bp, Artificial Sequence
  primer
ccttgaggtgaagactgaccc

SEQ ID NO: 23110 - DNA, 20 bp, Artificial Sequence
  primer
atggcagctctgcatttgtc

SEQ ID NO: 23111 - DNA, 39 bp, Artificial Sequence
  primer
gtaaaacgacggccagtgcatgtctatcaccaaagaccc

SEQ ID NO: 23112 - DNA, 38 bp, Artificial Sequence
  primer
gtaaaacgacggccagtagctcttagacacaggcaggc

SEQ ID NO: 23113 - DNA, 38 bp, Artificial Sequence
  primer
gtaaaacgacggccagtcccatctaataggccacaagc

SEQ ID NO: 23114 - DNA, 20 bp, Artificial Sequence
  primer
gacactggaggatgcattgg

SEQ ID NO: 23115 - DNA, 20 bp, Artificial Sequence
  primer
cactgcagatccttggcttc

SEQ ID NO: 23116 - DNA, 39 bp, Artificial Sequence
  primer
gtaaaacgacggccagtctatcctgagaggatgactccg

SEQ ID NO: 23117 - DNA, 35 bp, Artificial Sequence
  primer
gtaaaacgacggccagtgagagttgggagcagcgg

SEQ ID NO: 23118 - DNA, 39 bp, Artificial Sequence
  primer
gtaaaacgacggccagtaaaccatcgagatccacttctc

SEQ ID NO: 23119 - DNA, 24 bp, Artificial Sequence
  primer
gaatttggtccagtaatttgcatc

SEQ ID NO: 23120 - DNA, 21 bp, Artificial Sequence
  primer
cttcccagacccattgttgac

SEQ ID NO: 23121 - DNA, 41 bp, Artificial Sequence
  primer
gtaaaacgacggccagtgactaatgagagaaggtttggcag

SEQ ID NO: 23122 - DNA, 44 bp, Artificial Sequence
  primer
gtaaaacgacggccagttctcttacaatatgcgttaatgtcttc

SEQ ID NO: 23123 - DNA, 22 bp, Artificial Sequence
  primer
aaatcccttggcccataatatc

SEQ ID NO: 23124 - DNA, 38 bp, Artificial Sequence
  primer
gtaaaacgacggccagtgccagtctttcccatgctatt

SEQ ID NO: 23125 - DNA, 18 bp, Artificial Sequence
  primer
taggcgaggcgagatgag

SEQ ID NO: 23126 - DNA, 38 bp, Artificial Sequence
  primer
gtaaaacgacggccagtctgacctcagtgttctggtgc

SEQ ID NO: 23127 - DNA, 21 bp, Artificial Sequence
  primer
tgcccttctctctccagattc

SEQ ID NO: 23128 - DNA, 37 bp, Artificial Sequence
  primer
gtaaaacgacggccagtaatccggcaggttctggtag

SEQ ID NO: 23129 - DNA, 18 bp, Artificial Sequence
  primer
catgatctgcctgcctcg

SEQ ID NO: 23130 - DNA, 42 bp, Artificial Sequence
  primer
gtaaaacgacggccagtgggaaagacattattagctaagccc

SEQ ID NO: 23131 - DNA, 21 bp, Artificial Sequence
  primer
attgttcatttcggaggttgg

SEQ ID NO: 23132 - DNA, 21 bp, Artificial Sequence
  primer
gttgctcttggcattgaagac

SEQ ID NO: 23133 - DNA, 38 bp, Artificial Sequence
  primer
gtaaaacgacggccagtggagaaggctacaaatgcagg

SEQ ID NO: 23134 - DNA, 21 bp, Artificial Sequence
  primer
gtggaggacagaggaatctgg

SEQ ID NO: 23135 - DNA, 37 bp, Artificial Sequence
  primer
gtaaaacgacggccagtcagcaagaacaaggattggg

SEQ ID NO: 23136 - DNA, 37 bp, Artificial Sequence
  primer
gtaaaacgacggccagtctcttggcctttgtcgagtg

SEQ ID NO: 23137 - DNA, 37 bp, Artificial Sequence
  primer
gtaaaacgacggccagtagcttcatgcgatatgtggg

SEQ ID NO: 23138 - DNA, 35 bp, Artificial Sequence
  primer
gtaaaacgacggccagtaagaggcgcccagttcag

SEQ ID NO: 23139 - DNA, 38 bp, Artificial Sequence
  primer
gtaaaacgacggccagtttggcaagcgatttacagaac

SEQ ID NO: 23140 - DNA, 38 bp, Artificial Sequence
  primer
gtaaaacgacggccagtacagggcaataagctttcctg

SEQ ID NO: 23141 - DNA, 21 bp, Artificial Sequence
  primer
aactcctggtgtcagtccacc

SEQ ID NO: 23142 - DNA, 38 bp, Artificial Sequence
  primer
gtaaaacgacggccagtaccgaaacccagactacttgc

SEQ ID NO: 23143 - DNA, 38 bp, Artificial Sequence
  primer
gtaaaacgacggccagtcggttgtagttgctgctatgg

SEQ ID NO: 23144 - DNA, 38 bp, Artificial Sequence
  primer
gtaaaacgacggccagtggtttaacaggcttcccagtg

SEQ ID NO: 23145 - DNA, 38 bp, Artificial Sequence
  primer
gtaaaacgacggccagtgttgggaatagatgggcagag

SEQ ID NO: 23146 - DNA, 38 bp, Artificial Sequence
  primer
gtaaaacgacggccagtctgtggcatatgtgagcagtg

SEQ ID NO: 23147 - DNA, 21 bp, Artificial Sequence
  primer
ccgtctctcgctaatgtctcc

SEQ ID NO: 23148 - DNA, 37 bp, Artificial Sequence
  primer
gtaaaacgacggccagtgtggtggacgacacaccttc

SEQ ID NO: 23149 - DNA, 38 bp, Artificial Sequence
  primer
gtaaaacgacggccagtccttgcagtgtgaagatttgc

SEQ ID NO: 23150 - DNA, 38 bp, Artificial Sequence
  primer
gtaaaacgacggccagtattcacatgggaaagcagatt

SEQ ID NO: 23151 - DNA, 43 bp, Artificial Sequence
  primer
gtaaaacgacggccagtgacaggtttataacaggcaagatacc

SEQ ID NO: 23152 - DNA, 38 bp, Artificial Sequence
  primer
gtaaaacgacggccagtcttacccttcaggattgttgg

SEQ ID NO: 23153 - DNA, 24 bp, Artificial Sequence
  primer
aaccattaatcttctggaatggtg

SEQ ID NO: 23154 - DNA, 21 bp, Artificial Sequence
  primer
aaggcggtttaagtgttgcat

SEQ ID NO: 23155 - DNA, 35 bp, Artificial Sequence
  primer
gtaaaacgacggccagtctatgggaccgcgctgag

SEQ ID NO: 23156 - DNA, 37 bp, Artificial Sequence
  primer
gtaaaacgacggccagtcttcaaggagctggtgaacg

SEQ ID NO: 23157 - DNA, 35 bp, Artificial Sequence
  primer
gtaaaacgacggccagtctcgcaggaagaactcgc

SEQ ID NO: 23158 - DNA, 20 bp, Artificial Sequence
  primer
ctgaagaggagcgtgtgtcc

SEQ ID NO: 23159 - DNA, 38 bp, Artificial Sequence
  primer
gtaaaacgacggccagtgagcttctggccatgctagtc

SEQ ID NO: 23160 - DNA, 21 bp, Artificial Sequence
  primer
agtacctgagtcggagcatcg

SEQ ID NO: 23161 - DNA, 19 bp, Artificial Sequence
  primer
tgagggagtctgcagtcgg

SEQ ID NO: 23162 - DNA, 38 bp, Artificial Sequence
  primer
gtaaaacgacggccagtggcagttaattcttgatcgcc

SEQ ID NO: 23163 - DNA, 21 bp, Artificial Sequence
  primer
caaatacaaactgtgccgtgg

SEQ ID NO: 23164 - DNA, 38 bp, Artificial Sequence
  primer
gtaaaacgacggccagtaggaccctggtccaaactttc

SEQ ID NO: 23165 - DNA, 38 bp, Artificial Sequence
  primer
gtaaaacgacggccagtacaccttccgtggctttactc

SEQ ID NO: 23166 - DNA, 25 bp, Artificial Sequence
  primer
cagaggcctgacattattgttactg

SEQ ID NO: 23167 - DNA, 21 bp, Artificial Sequence
  primer
gatacaagtgtatgcgccagg

SEQ ID NO: 23168 - DNA, 19 bp, Artificial Sequence
  primer
ctccatcagcctcgctttc

SEQ ID NO: 23169 - DNA, 19 bp, Artificial Sequence
  primer
gaaggagctctcgagcctg

SEQ ID NO: 23170 - DNA, 39 bp, Artificial Sequence
  primer
gtaaaacgacggccagtaaactatgtggcttgaagtggc

SEQ ID NO: 23171 - DNA, 21 bp, Artificial Sequence
  primer
cagatagcttgcctcagttgg

SEQ ID NO: 23172 - DNA, 38 bp, Artificial Sequence
  primer
gtaaaacgacggccagtcctgtgtcattcctgcttctg

SEQ ID NO: 23173 - DNA, 21 bp, Artificial Sequence
  primer
gacatcatgggtttgaaggaa

SEQ ID NO: 23174 - DNA, 38 bp, Artificial Sequence
  primer
gtaaaacgacggccagtattccaccagatgaccaaagc

SEQ ID NO: 23175 - DNA, 26 bp, Artificial Sequence
  primer
caaattgcatctctacttgtgaacag

SEQ ID NO: 23176 - DNA, 18 bp, Artificial Sequence
  primer
ggtgagcagaaggcaggc

SEQ ID NO: 23177 - DNA, 24 bp, Artificial Sequence
  primer
ttgcttaagaaagaaagttggagg

SEQ ID NO: 23178 - DNA, 44 bp, Artificial Sequence
  primer
gtaaaacgacggccagttttgagccatttattaaagtcacattc

SEQ ID NO: 23179 - DNA, 37 bp, Artificial Sequence
  primer
gtaaaacgacggccagtacgtcaagtggtgctaagcc

SEQ ID NO: 23180 - DNA, 39 bp, Artificial Sequence
  primer
gtaaaacgacggccagtggatcatccagtccctttacat

SEQ ID NO: 23181 - DNA, 38 bp, Artificial Sequence
  primer
gtaaaacgacggccagtttgtcagtttccttggtggtc

SEQ ID NO: 23182 - DNA, 20 bp, Artificial Sequence
  primer
ggcagctaggtctgttgcac

SEQ ID NO: 23183 - DNA, 40 bp, Artificial Sequence
  primer
gtaaaacgacggccagttttgtggtagaactttgttgctg

SEQ ID NO: 23184 - DNA, 24 bp, Artificial Sequence
  primer
cagaaccaccaactcaaactaatg

SEQ ID NO: 23185 - DNA, 43 bp, Artificial Sequence
  primer
gtaaaacgacggccagttttagctcaattgattacagtccatc

SEQ ID NO: 23186 - DNA, 37 bp, Artificial Sequence
  primer
gtaaaacgacggccagtaatcctgcctagccttggtg

SEQ ID NO: 23187 - DNA, 38 bp, Artificial Sequence
  primer
gtaaaacgacggccagttggccatggaacttaaactga

SEQ ID NO: 23188 - DNA, 43 bp, Artificial Sequence
  primer
gtaaaacgacggccagttgtgagtgtggataaatttgtactgc

SEQ ID NO: 23189 - DNA, 44 bp, Artificial Sequence
  primer
gtaaaacgacggccagtagaaagtctgatcttaaactctggttc

SEQ ID NO: 23190 - DNA, 38 bp, Artificial Sequence
  primer
gtaaaacgacggccagtcagttccaacagggctaattg

SEQ ID NO: 23191 - DNA, 38 bp, Artificial Sequence
  primer
gtaaaacgacggccagtccttggacacaaagggaaatc

SEQ ID NO: 23192 - DNA, 37 bp, Artificial Sequence
  primer
gtaaaacgacggccagtgatggcagcatctctctgtg

SEQ ID NO: 23193 - DNA, 38 bp, Artificial Sequence
  primer
gtaaaacgacggccagtatacccgggcgctttatagtc

SEQ ID NO: 23194 - DNA, 45 bp, Artificial Sequence
  primer
gtaaaacgacggccagtttccagctaagactaaagttattcagtg

SEQ ID NO: 23195 - DNA, 37 bp, Artificial Sequence
  primer
gtaaaacgacggccagtaaagcaatggcgtaccgtag

SEQ ID NO: 23196 - DNA, 21 bp, Artificial Sequence
  primer
gggaagtctcagctgcttcaa

SEQ ID NO: 23197 - DNA, 40 bp, Artificial Sequence
  primer
gtaaaacgacggccagtgagaaagaaactggtcaggtgtg

SEQ ID NO: 23198 - DNA, 43 bp, Artificial Sequence
  primer
gtaaaacgacggccagtgaagattaaggttacaaaggtggttg

SEQ ID NO: 23199 - DNA, 24 bp, Artificial Sequence
  primer
gaataataagttcctctcccaccc

SEQ ID NO: 23200 - DNA, 21 bp, Artificial Sequence
  primer
gacaccactcttgtgcagtca

SEQ ID NO: 23201 - DNA, 21 bp, Artificial Sequence
  primer
atgctaagtgctgcaaagtcc

SEQ ID NO: 23202 - DNA, 43 bp, Artificial Sequence
  primer
gtaaaacgacggccagtcatgtatttccattactgtcatgtgg

SEQ ID NO: 23203 - DNA, 38 bp, Artificial Sequence
  primer
gtaaaacgacggccagtcaagaaggtcaggtcatcagc

SEQ ID NO: 23204 - DNA, 22 bp, Artificial Sequence
  primer
ccctctaaccatcttctcaccc

SEQ ID NO: 23205 - DNA, 39 bp, Artificial Sequence
  primer
gtaaaacgacggccagtccatcaaatcatgctgtatgcc

SEQ ID NO: 23206 - DNA, 44 bp, Artificial Sequence
  primer
gtaaaacgacggccagttctccacctatctcatattctgtatgg

SEQ ID NO: 23207 - DNA, 18 bp, Artificial Sequence
  primer
tccaccacctccctcacc

SEQ ID NO: 23208 - DNA, 39 bp, Artificial Sequence
  primer
gtaaaacgacggccagtgaaaccctgtaagtttcctgcc

SEQ ID NO: 23209 - DNA, 21 bp, Artificial Sequence
  primer
gagaatctggactgggtctgc

SEQ ID NO: 23210 - DNA, 21 bp, Artificial Sequence
  primer
gccctaagccatgttcaaatc

SEQ ID NO: 23211 - DNA, 42 bp, Artificial Sequence
  primer
gtaaaacgacggccagtttgtcttctaacttcactgcgtaga

SEQ ID NO: 23212 - DNA, 26 bp, Artificial Sequence
  primer
tttgaaagaaactaatgcttattggg

SEQ ID NO: 23213 - DNA, 24 bp, Artificial Sequence
  primer
ttgagtagccttgtatcgaggttc

SEQ ID NO: 23214 - DNA, 38 bp, Artificial Sequence
  primer
gtaaaacgacggccagtgagcaggagcactagcctttg

SEQ ID NO: 23215 - DNA, 42 bp, Artificial Sequence
  primer
gtaaaacgacggccagtgggttacaaagttataagtgctgcc

SEQ ID NO: 23216 - DNA, 44 bp, Artificial Sequence
  primer
gtaaaacgacggccagtttgtcgtgtaaatatagattccctttg

SEQ ID NO: 23217 - DNA, 36 bp, Artificial Sequence
  primer
gtaaaacgacggccagtcaaagcatgatgtggcgtg

SEQ ID NO: 23218 - DNA, 22 bp, Artificial Sequence
  primer
tctgaagaagggaaagggaaag

SEQ ID NO: 23219 - DNA, 36 bp, Artificial Sequence
  primer
gtaaaacgacggccagtctgccatctcctcctcctg

SEQ ID NO: 23220 - DNA, 37 bp, Artificial Sequence
  primer
gtaaaacgacggccagtcagtgagggctttatgccac

SEQ ID NO: 23221 - DNA, 26 bp, Artificial Sequence
  primer
tgaacacctctaaatttgtctttcag

SEQ ID NO: 23222 - DNA, 39 bp, Artificial Sequence
  primer
gtaaaacgacggccagtcagttcagccattaacagttgg

SEQ ID NO: 23223 - DNA, 38 bp, Artificial Sequence
  primer
gtaaaacgacggccagttactgggtggaatctcacagg

SEQ ID NO: 23224 - DNA, 22 bp, Artificial Sequence
  primer
ttctaatgccaacacatttgga

SEQ ID NO: 23225 - DNA, 38 bp, Artificial Sequence
  primer
gtaaaacgacggccagttggtaagcgcttgctttcttt

SEQ ID NO: 23226 - DNA, 25 bp, Artificial Sequence
  primer
tctttgtgtctccctaattgaagaa

SEQ ID NO: 23227 - DNA, 21 bp, Artificial Sequence
  primer
ggacaaagtcaaaccgcaaac

SEQ ID NO: 23228 - DNA, 38 bp, Artificial Sequence
  primer
gtaaaacgacggccagtaagtgtggctacatgagcagg

SEQ ID NO: 23229 - DNA, 38 bp, Artificial Sequence
  primer
gtaaaacgacggccagtagacacagggtctgggatctg

SEQ ID NO: 23230 - DNA, 21 bp, Artificial Sequence
  primer
ttgtcagcccagtcctaaagc

SEQ ID NO: 23231 - DNA, 38 bp, Artificial Sequence
  primer
gtaaaacgacggccagttactcccagggtgatggtctg

SEQ ID NO: 23232 - DNA, 21 bp, Artificial Sequence
  primer
tttggaactcccagattgatg

SEQ ID NO: 23233 - DNA, 21 bp, Artificial Sequence
  primer
atgccctcaggttactcaccc

SEQ ID NO: 23234 - DNA, 37 bp, Artificial Sequence
  primer
gtaaaacgacggccagtatcctctccaggaccagagg

SEQ ID NO: 23235 - DNA, 37 bp, Artificial Sequence
  primer
gtaaaacgacggccagtaccaagaataatgggcaggc

SEQ ID NO: 23236 - DNA, 38 bp, Artificial Sequence
  primer
gtaaaacgacggccagtcagagcgggtacctcttcatc

SEQ ID NO: 23237 - DNA, 38 bp, Artificial Sequence
  primer
gtaaaacgacggccagtagaatgtccagacacaggtcg

SEQ ID NO: 23238 - DNA, 38 bp, Artificial Sequence
  primer
gtaaaacgacggccagtgacattccggaactcgtcaag

SEQ ID NO: 23239 - DNA, 21 bp, Artificial Sequence
  primer
ccactgagtttgaggtgaagg

SEQ ID NO: 23240 - DNA, 35 bp, Artificial Sequence
  primer
gtaaaacgacggccagtgtgagaggccagcagtgg

SEQ ID NO: 23241 - DNA, 21 bp, Artificial Sequence
  primer
gagggaactgcctttgtcatc

SEQ ID NO: 23242 - DNA, 21 bp, Artificial Sequence
  primer
gtctgtgccagtctgatggag

SEQ ID NO: 23243 - DNA, 38 bp, Artificial Sequence
  primer
gtaaaacgacggccagtatccacttcaccaagacaccc

SEQ ID NO: 23244 - DNA, 37 bp, Artificial Sequence
  primer
gtaaaacgacggccagtaccaattcccaggtctcagg

SEQ ID NO: 23245 - DNA, 37 bp, Artificial Sequence
  primer
gtaaaacgacggccagtcctcctccttgtttcttccg

SEQ ID NO: 23246 - DNA, 21 bp, Artificial Sequence
  primer
ctttccactctagcccagcac

SEQ ID NO: 23247 - DNA, 21 bp, Artificial Sequence
  primer
agagaaaggaagggcagaagc

SEQ ID NO: 23248 - DNA, 38 bp, Artificial Sequence
  primer
gtaaaacgacggccagtatcaaatgggagcaggaacac

SEQ ID NO: 23249 - DNA, 20 bp, Artificial Sequence
  primer
ctttcctacccactcctgcc

SEQ ID NO: 23250 - DNA, 37 bp, Artificial Sequence
  primer
gtaaaacgacggccagtcaaagtcctgacctcaagcg

SEQ ID NO: 23251 - DNA, 38 bp, Artificial Sequence
  primer
gtaaaacgacggccagtgtccctctgcaccagttcttc

SEQ ID NO: 23252 - DNA, 38 bp, Artificial Sequence
  primer
gtaaaacgacggccagttaagagctgagacccaggagc

SEQ ID NO: 23253 - DNA, 21 bp, Artificial Sequence
  primer
aattaccggcagaaccaagag

SEQ ID NO: 23254 - DNA, 38 bp, Artificial Sequence
  primer
gtaaaacgacggccagttgctgaccatctgtgtgtctg

SEQ ID NO: 23255 - DNA, 21 bp, Artificial Sequence
  primer
acctctaacactgcgtagccg

SEQ ID NO: 23256 - DNA, 37 bp, Artificial Sequence
  primer
gtaaaacgacggccagtagtcctcgcctgtccctaac

SEQ ID NO: 23257 - DNA, 21 bp, Artificial Sequence
  primer
ccaccctctttgagtccttcc

SEQ ID NO: 23258 - DNA, 36 bp, Artificial Sequence
  primer
gtaaaacgacggccagtaggcaaaccaggcaaactg

SEQ ID NO: 23259 - DNA, 21 bp, Artificial Sequence
  primer
gtgagggctagagcctgtgtc

SEQ ID NO: 23260 - DNA, 38 bp, Artificial Sequence
  primer
gtaaaacgacggccagtggacagaaatccctgatgctc

SEQ ID NO: 23261 - DNA, 38 bp, Artificial Sequence
  primer
gtaaaacgacggccagttgagctttctctgagccatcc

SEQ ID NO: 23262 - DNA, 22 bp, Artificial Sequence
  primer
cagtgacctccagttatcaccc

SEQ ID NO: 23263 - DNA, 21 bp, Artificial Sequence
  primer
aagaggtacagtcacccagcc

SEQ ID NO: 23264 - DNA, 38 bp, Artificial Sequence
  primer
gtaaaacgacggccagtcggtaaggaacagaaacccac

SEQ ID NO: 23265 - DNA, 21 bp, Artificial Sequence
  primer
tctgtcaccttcctcctaccc

SEQ ID NO: 23266 - DNA, 38 bp, Artificial Sequence
  primer
gtaaaacgacggccagtctccttgtccaggaacagacc

SEQ ID NO: 23267 - DNA, 20 bp, Artificial Sequence
  primer
gagcctgggttctggaagag

SEQ ID NO: 23268 - DNA, 37 bp, Artificial Sequence
  primer
gtaaaacgacggccagttcagtttctccaccactgcc

SEQ ID NO: 23269 - DNA, 39 bp, Artificial Sequence
  primer
gtaaaacgacggccagtgactcaagggtctgagaatccc

SEQ ID NO: 23270 - DNA, 38 bp, Artificial Sequence
  primer
gtaaaacgacggccagttctgagcaagccacacttacc

SEQ ID NO: 23271 - DNA, 21 bp, Artificial Sequence
  primer
atgggaccctctatggttgtg

SEQ ID NO: 23272 - DNA, 38 bp, Artificial Sequence
  primer
gtaaaacgacggccagtaagtcaggtcaggctcagcac

SEQ ID NO: 23273 - DNA, 20 bp, Artificial Sequence
  primer
caagtgagtgctttccctgc

SEQ ID NO: 23274 - DNA, 38 bp, Artificial Sequence
  primer
gtaaaacgacggccagtgtgaggtgaaggaaggcaaac

SEQ ID NO: 23275 - DNA, 38 bp, Artificial Sequence
  primer
gtaaaacgacggccagtacacaatttggttcctccacc

SEQ ID NO: 23276 - DNA, 21 bp, Artificial Sequence
  primer
tctgtggatgtatctgggtgg

SEQ ID NO: 23277 - DNA, 23 bp, Artificial Sequence
  primer
caaacatttcaaagaccttctgc

SEQ ID NO: 23278 - DNA, 38 bp, Artificial Sequence
  primer
gtaaaacgacggccagtgaaaccagcccactggataac

SEQ ID NO: 23279 - DNA, 38 bp, Artificial Sequence
  primer
gtaaaacgacggccagttaggccaattcacagatgacg

SEQ ID NO: 23280 - DNA, 19 bp, Artificial Sequence
  primer
gccctcttcctaccttgcc

SEQ ID NO: 23281 - DNA, 38 bp, Artificial Sequence
  primer
gtaaaacgacggccagttgccagataaacttccaaacc

SEQ ID NO: 23282 - DNA, 21 bp, Artificial Sequence
  primer
gacaacagagcaagtcgcatc

SEQ ID NO: 23283 - DNA, 38 bp, Artificial Sequence
  primer
gtaaaacgacggccagtgagcaacgctcttcccattac

SEQ ID NO: 23284 - DNA, 21 bp, Artificial Sequence
  primer
gtcactgcctgccttccttac

SEQ ID NO: 23285 - DNA, 21 bp, Artificial Sequence
  primer
aacagccagctatgcacacac

SEQ ID NO: 23286 - DNA, 21 bp, Artificial Sequence
  primer
gagcttctcatcccattccag

SEQ ID NO: 23287 - DNA, 21 bp, Artificial Sequence
  primer
atcaggccagactattgaggg

SEQ ID NO: 23288 - DNA, 21 bp, Artificial Sequence
  primer
tatgtcacctgttggctggtc

SEQ ID NO: 23289 - DNA, 21 bp, Artificial Sequence
  primer
taatcagtcagcactgcctcc

SEQ ID NO: 23290 - DNA, 21 bp, Artificial Sequence
  primer
ggatacctggtctgcttccag

SEQ ID NO: 23291 - DNA, 21 bp, Artificial Sequence
  primer
gtgagactgggagggactcac

SEQ ID NO: 23292 - DNA, 20 bp, Artificial Sequence
  primer
cgtacagttacgctctcccg

SEQ ID NO: 23293 - DNA, 38 bp, Artificial Sequence
  primer
gtaaaacgacggccagttgttgtggtggtagcatttgg

SEQ ID NO: 23294 - DNA, 41 bp, Artificial Sequence
  primer
gtaaaacgacggccagttgtttgggtgtacctgactaatcc

SEQ ID NO: 23295 - DNA, 38 bp, Artificial Sequence
  primer
gtaaaacgacggccagttgtctggaacacattgaaggg

SEQ ID NO: 23296 - DNA, 38 bp, Artificial Sequence
  primer
gtaaaacgacggccagtgagtggatgggaagctacctg

SEQ ID NO: 23297 - DNA, 39 bp, Artificial Sequence
  primer
gtaaaacgacggccagtggtgttgctcacaccttagcag

SEQ ID NO: 23298 - DNA, 38 bp, Artificial Sequence
  primer
gtaaaacgacggccagttgctataccaaagcagggagg

SEQ ID NO: 23299 - DNA, 38 bp, Artificial Sequence
  primer
gtaaaacgacggccagtgagaattcgtgggtgctcaag

SEQ ID NO: 23300 - DNA, 39 bp, Artificial Sequence
  primer
gtaaaacgacggccagtaggaagttcagcagatccactc

SEQ ID NO: 23301 - DNA, 21 bp, Artificial Sequence
  primer
taagcatgttgcctggatttg

SEQ ID NO: 23302 - DNA, 41 bp, Artificial Sequence
  primer
gtaaaacgacggccagttctgagagaaccaatggattaagg

SEQ ID NO: 23303 - DNA, 43 bp, Artificial Sequence
  primer
gtaaaacgacggccagtaataggttagagttgaagtgaggtgc

SEQ ID NO: 23304 - DNA, 39 bp, Artificial Sequence
  primer
gtaaaacgacggccagtgagttgaggtgagagatttggg

SEQ ID NO: 23305 - DNA, 21 bp, Artificial Sequence
  primer
acctgtaattctgccaggctc

SEQ ID NO: 23306 - DNA, 22 bp, Artificial Sequence
  primer
cacttctctccactcctcttcg

SEQ ID NO: 23307 - DNA, 38 bp, Artificial Sequence
  primer
gtaaaacgacggccagttagagtaacagggccacatgc

SEQ ID NO: 23308 - DNA, 39 bp, Artificial Sequence
  primer
gtaaaacgacggccagttttacgcatacagcaataaccc

SEQ ID NO: 23309 - DNA, 38 bp, Artificial Sequence
  primer
gtaaaacgacggccagtgcagtcaaatgcaggttatgg

SEQ ID NO: 23310 - DNA, 21 bp, Artificial Sequence
  primer
tgcacattcattggctctacc

SEQ ID NO: 23311 - DNA, 23 bp, Artificial Sequence
  primer
aagaggaatggacttgacaaagc

SEQ ID NO: 23312 - DNA, 22 bp, Artificial Sequence
  primer
aagaggaaaggaactgacaggg

SEQ ID NO: 23313 - DNA, 37 bp, Artificial Sequence
  primer
gtaaaacgacggccagtctgtctgtggcagctgttcc

SEQ ID NO: 23314 - DNA, 40 bp, Artificial Sequence
  primer
gtaaaacgacggccagtctagcattggcttactcttctgc

SEQ ID NO: 23315 - DNA, 40 bp, Artificial Sequence
  primer
gtaaaacgacggccagtcaattctaatgaaactgcttggc

SEQ ID NO: 23316 - DNA, 25 bp, Artificial Sequence
  primer
tgtgacctagatctggtaatgaagg

SEQ ID NO: 23317 - DNA, 38 bp, Artificial Sequence
  primer
gtaaaacgacggccagtatgttcaataagggcagggac

SEQ ID NO: 23318 - DNA, 38 bp, Artificial Sequence
  primer
gtaaaacgacggccagtgcgtgtgactcctagtgcttg

SEQ ID NO: 23319 - DNA, 39 bp, Artificial Sequence
  primer
gtaaaacgacggccagttgaaagtgaattgactgccaag

SEQ ID NO: 23320 - DNA, 37 bp, Artificial Sequence
  primer
gtaaaacgacggccagttgaaatgggctaaatgggtg

SEQ ID NO: 23321 - DNA, 22 bp, Artificial Sequence
  primer
gcaggaaagcataaatcagcag

SEQ ID NO: 23322 - DNA, 38 bp, Artificial Sequence
  primer
gtaaaacgacggccagtgctgaaccagagagtgggaac

SEQ ID NO: 23323 - DNA, 21 bp, Artificial Sequence
  primer
aagctctgtgcttcttctgcc

SEQ ID NO: 23324 - DNA, 21 bp, Artificial Sequence
  primer
tgcgctttggatttctctacc

SEQ ID NO: 23325 - DNA, 21 bp, Artificial Sequence
  primer
aagctctgtgcttcttctgcc

SEQ ID NO: 23326 - DNA, 24 bp, Artificial Sequence
  primer
gcacgtattatcctaagagcattg

SEQ ID NO: 23327 - DNA, 40 bp, Artificial Sequence
  primer
gtaaaacgacggccagttgtactggaggaccttgatagcc

SEQ ID NO: 23328 - DNA, 22 bp, Artificial Sequence
  primer
aagaggtcgctaggattcaacc

SEQ ID NO: 23329 - DNA, 41 bp, Artificial Sequence
  primer
gtaaaacgacggccagttgtcatgcacttaagaatttgttg

SEQ ID NO: 23330 - DNA, 23 bp, Artificial Sequence
  primer
ttgtgagctagctttccttgttg

SEQ ID NO: 23331 - DNA, 21 bp, Artificial Sequence
  primer
ttcaatcagagggcatttgtg

SEQ ID NO: 23332 - DNA, 21 bp, Artificial Sequence
  primer
ccacagagaaagttgcagtcg

SEQ ID NO: 23333 - DNA, 21 bp, Artificial Sequence
  primer
cgtttactcgatgaaggcagc

SEQ ID NO: 23334 - DNA, 27 bp, Artificial Sequence
  primer
ttcctggactttatatcatctgttacc

SEQ ID NO: 23335 - DNA, 21 bp, Artificial Sequence
  primer
tgcgctttggatttctctacc

SEQ ID NO: 23336 - DNA, 38 bp, Artificial Sequence
  primer
gtaaaacgacggccagtctttatccaaggaggtggctg

SEQ ID NO: 23337 - DNA, 38 bp, Artificial Sequence
  primer
gtaaaacgacggccagtctcttgttcatcagcctcagc

SEQ ID NO: 23338 - DNA, 38 bp, Artificial Sequence
  primer
gtaaaacgacggccagttgtggctcagctagtcaggag

SEQ ID NO: 23339 - DNA, 38 bp, Artificial Sequence
  primer
gtaaaacgacggccagtgctagtgccaagcataagcag

SEQ ID NO: 23340 - DNA, 21 bp, Artificial Sequence
  primer
ctcaggatggtgtggtctgtg

SEQ ID NO: 23341 - DNA, 21 bp, Artificial Sequence
  primer
ggcaatgaatgtgactgcttc

SEQ ID NO: 23342 - DNA, 39 bp, Artificial Sequence
  primer
gtaaaacgacggccagtccttcactgttcacctactccc

SEQ ID NO: 23343 - DNA, 22 bp, Artificial Sequence
  primer
gtcagaagcctctgtagttccc

SEQ ID NO: 23344 - DNA, 39 bp, Artificial Sequence
  primer
gtaaaacgacggccagtggtaggaaatgtggcttgagtg

SEQ ID NO: 23345 - DNA, 38 bp, Artificial Sequence
  primer
gtaaaacgacggccagttaaggcttgcaagatgctctg

SEQ ID NO: 23346 - DNA, 38 bp, Artificial Sequence
  primer
gtaaaacgacggccagtagacttaatccactgcctggg

SEQ ID NO: 23347 - DNA, 22 bp, Artificial Sequence
  primer
tctttggataatttgtggtggc

SEQ ID NO: 23348 - DNA, 21 bp, Artificial Sequence
  primer
ttcagcacatccattctgtcc

SEQ ID NO: 23349 - DNA, 21 bp, Artificial Sequence
  primer
tccaaactcctcatgatctgc

SEQ ID NO: 23350 - DNA, 38 bp, Artificial Sequence
  primer
gtaaaacgacggccagttttcctgggccatttacagag

SEQ ID NO: 23351 - DNA, 20 bp, Artificial Sequence
  primer
ctctaattgctctgccggtg

SEQ ID NO: 23352 - DNA, 35 bp, Artificial Sequence
  primer
gtaaaacgacggccagtgggcccatgcaagtctaa

SEQ ID NO: 23353 - DNA, 20 bp, Artificial Sequence
  primer
ggctgtagagagcatccctg

SEQ ID NO: 23354 - DNA, 38 bp, Artificial Sequence
  primer
gtaaaacgacggccagtcttgcttcaatgggacaactg

SEQ ID NO: 23355 - DNA, 20 bp, Artificial Sequence
  primer
gttgactgcaggactccacc

SEQ ID NO: 23356 - DNA, 38 bp, Artificial Sequence
  primer
gtaaaacgacggccagttccatgaagcggaattctaac

SEQ ID NO: 23357 - DNA, 39 bp, Artificial Sequence
  primer
gtaaaacgacggccagtggcaatagcacatcctctgaac

SEQ ID NO: 23358 - DNA, 38 bp, Artificial Sequence
  primer
gtaaaacgacggccagtagaatcaatgagagcggaggg

SEQ ID NO: 23359 - DNA, 35 bp, Artificial Sequence
  primer
gtaaaacgacggccagtttgaccagcaggagccag

SEQ ID NO: 23360 - DNA, 38 bp, Artificial Sequence
  primer
gtaaaacgacggccagttagccgagaatatggcaatcc

SEQ ID NO: 23361 - DNA, 22 bp, Artificial Sequence
  primer
tgaaattccaaacttgcctgtc

SEQ ID NO: 23362 - DNA, 38 bp, Artificial Sequence
  primer
gtaaaacgacggccagtctcccagaacactgatgggac

SEQ ID NO: 23363 - DNA, 21 bp, Artificial Sequence
  primer
aggagcatgtagaaaggtcgc

SEQ ID NO: 23364 - DNA, 40 bp, Artificial Sequence
  primer
gtaaaacgacggccagtccctcctctaatacccttggaac

SEQ ID NO: 23365 - DNA, 18 bp, Artificial Sequence
  primer
gtgcgctcccactactgc

SEQ ID NO: 23366 - DNA, 20 bp, Artificial Sequence
  primer
actgtctgcctctgcctctg

SEQ ID NO: 23367 - DNA, 39 bp, Artificial Sequence
  primer
gtaaaacgacggccagtcaacagtaagagtccagtgccc

SEQ ID NO: 23368 - DNA, 21 bp, Artificial Sequence
  primer
ctgcacaccggactaactctg

SEQ ID NO: 23369 - DNA, 21 bp, Artificial Sequence
  primer
caacaggttgcttctgcagtc

SEQ ID NO: 23370 - DNA, 21 bp, Artificial Sequence
  primer
atagagcccttagcttgctgc

SEQ ID NO: 23371 - DNA, 21 bp, Artificial Sequence
  primer
caaggactctgcccgtctaag

SEQ ID NO: 23372 - DNA, 21 bp, Artificial Sequence
  primer
ttagagctgctcgtcctctcc

SEQ ID NO: 23373 - DNA, 21 bp, Artificial Sequence
  primer
gaggatgaaactggaagcagg

SEQ ID NO: 23374 - DNA, 38 bp, Artificial Sequence
  primer
gtaaaacgacggccagttgggtgacactggataactgc

SEQ ID NO: 23375 - DNA, 20 bp, Artificial Sequence
  primer
gaggcactgcatcttccttc

SEQ ID NO: 23376 - DNA, 22 bp, Artificial Sequence
  primer
ctatatgcatgtcaccactggg

SEQ ID NO: 23377 - DNA, 20 bp, Artificial Sequence
  primer
gagcatggaggcacagagtc

SEQ ID NO: 23378 - DNA, 21 bp, Artificial Sequence
  primer
cactttggtcacagttggtgg

SEQ ID NO: 23379 - DNA, 21 bp, Artificial Sequence
  primer
acactccacaggaccatctcc

SEQ ID NO: 23380 - DNA, 21 bp, Artificial Sequence
  primer
aaatgaaacgtaacttgcggg

SEQ ID NO: 23381 - DNA, 38 bp, Artificial Sequence
  primer
gtaaaacgacggccagtagacaagctcctcaccgtttc

SEQ ID NO: 23382 - DNA, 28 bp, Artificial Sequence
  primer
tttgtacttaattgtgtgctatcctgta

SEQ ID NO: 23383 - DNA, 37 bp, Artificial Sequence
  primer
gtaaaacgacggccagtctgctgtcatcagtgcaagg

SEQ ID NO: 23384 - DNA, 38 bp, Artificial Sequence
  primer
gtaaaacgacggccagtgcccacttcaaagtcagcttg

SEQ ID NO: 23385 - DNA, 21 bp, Artificial Sequence
  primer
tcccacatgttccttcaactg

SEQ ID NO: 23386 - DNA, 21 bp, Artificial Sequence
  primer
tagagccatgtagtcccagcc

SEQ ID NO: 23387 - DNA, 38 bp, Artificial Sequence
  primer
gtaaaacgacggccagtatcagttgtcctgtttggcac

SEQ ID NO: 23388 - DNA, 21 bp, Artificial Sequence
  primer
aaagtaggcactgctgaaggg

SEQ ID NO: 23389 - DNA, 38 bp, Artificial Sequence
  primer
gtaaaacgacggccagtctctccacagcactcagggac

SEQ ID NO: 23390 - DNA, 38 bp, Artificial Sequence
  primer
gtaaaacgacggccagtcaagcactgcctgtggtagtc

SEQ ID NO: 23391 - DNA, 21 bp, Artificial Sequence
  primer
agctgctggagatggaatacg

SEQ ID NO: 23392 - DNA, 38 bp, Artificial Sequence
  primer
gtaaaacgacggccagttggtggtacttcctgctcatc

SEQ ID NO: 23393 - DNA, 38 bp, Artificial Sequence
  primer
gtaaaacgacggccagtgtgtttaaccctgtccttccg

SEQ ID NO: 23394 - DNA, 21 bp, Artificial Sequence
  primer
gtgtctggtgaccctgtcctc

SEQ ID NO: 23395 - DNA, 21 bp, Artificial Sequence
  primer
cttccaaggcctctgtaccac

SEQ ID NO: 23396 - DNA, 38 bp, Artificial Sequence
  primer
gtaaaacgacggccagtaattgagctgctttccaggac

SEQ ID NO: 23397 - DNA, 21 bp, Artificial Sequence
  primer
cttcctccatacatcttcccg

SEQ ID NO: 23398 - DNA, 38 bp, Artificial Sequence
  primer
gtaaaacgacggccagtggagggaggatgaggatactg

SEQ ID NO: 23399 - DNA, 22 bp, Artificial Sequence
  primer
ggcagagtgatggtacaaggtc

SEQ ID NO: 23400 - DNA, 38 bp, Artificial Sequence
  primer
gtaaaacgacggccagtacagcgagacccagaaagaag

SEQ ID NO: 23401 - DNA, 38 bp, Artificial Sequence
  primer
gtaaaacgacggccagtaagaagaacatgaaggctggg

SEQ ID NO: 23402 - DNA, 38 bp, Artificial Sequence
  primer
gtaaaacgacggccagtagctcctctttcaccacaagg

SEQ ID NO: 23403 - DNA, 38 bp, Artificial Sequence
  primer
gtaaaacgacggccagtaagagaggaagggacaggacc

SEQ ID NO: 23404 - DNA, 21 bp, Artificial Sequence
  primer
gtgacctctgtctccaccctc

SEQ ID NO: 23405 - DNA, 20 bp, Artificial Sequence
  primer
agtggtgggacagggtcttc

SEQ ID NO: 23406 - DNA, 38 bp, Artificial Sequence
  primer
gtaaaacgacggccagtaagtgcatcaccgcactctac

SEQ ID NO: 23407 - DNA, 38 bp, Artificial Sequence
  primer
gtaaaacgacggccagttgttgtgtgtcctctcccatc

SEQ ID NO: 23408 - DNA, 37 bp, Artificial Sequence
  primer
gtaaaacgacggccagtaggtgggtaaggctgctgac

SEQ ID NO: 23409 - DNA, 20 bp, Artificial Sequence
  primer
gggatacagaaggtgccagg

SEQ ID NO: 23410 - DNA, 23 bp, Artificial Sequence
  primer
catcataatgaacgagtggacag

SEQ ID NO: 23411 - DNA, 39 bp, Artificial Sequence
  primer
gtaaaacgacggccagttctttatgtggttggcttgaaa

SEQ ID NO: 23412 - DNA, 37 bp, Artificial Sequence
  primer
gtaaaacgacggccagtgccaactgactggaatttgc

SEQ ID NO: 23413 - DNA, 39 bp, Artificial Sequence
  primer
gtaaaacgacggccagtcttcctcacctcttcggattag

SEQ ID NO: 23414 - DNA, 22 bp, Artificial Sequence
  primer
ggtggatatttcagcgtgaatc

SEQ ID NO: 23415 - DNA, 22 bp, Artificial Sequence
  primer
gccggactagaaccagatcttc

SEQ ID NO: 23416 - DNA, 22 bp, Artificial Sequence
  primer
cattccaatcaagccatttagc

SEQ ID NO: 23417 - DNA, 39 bp, Artificial Sequence
  primer
gtaaaacgacggccagtcgtggtatggtgctaattcctc

SEQ ID NO: 23418 - DNA, 21 bp, Artificial Sequence
  primer
ctctgtggaatgctggtcttg

SEQ ID NO: 23419 - DNA, 21 bp, Artificial Sequence
  primer
acacagccacagctgtaccac

SEQ ID NO: 23420 - DNA, 21 bp, Artificial Sequence
  primer
ctttagacggtggtcacggag

SEQ ID NO: 23421 - DNA, 20 bp, Artificial Sequence
  primer
ctggatgacagagccagacc

SEQ ID NO: 23422 - DNA, 37 bp, Artificial Sequence
  primer
gtaaaacgacggccagtcaagtgatcctcccatctcg

SEQ ID NO: 23423 - DNA, 21 bp, Artificial Sequence
  primer
atttccgtgctctcgagtctg

SEQ ID NO: 23424 - DNA, 20 bp, Artificial Sequence
  primer
gaacacatggcagcaatcag

SEQ ID NO: 23425 - DNA, 38 bp, Artificial Sequence
  primer
gtaaaacgacggccagttgtttcttcccttggacttgg

SEQ ID NO: 23426 - DNA, 21 bp, Artificial Sequence
  primer
attgggtaaagggtgcatttg

SEQ ID NO: 23427 - DNA, 21 bp, Artificial Sequence
  primer
cagtcagggccagagaagttg

SEQ ID NO: 23428 - DNA, 19 bp, Artificial Sequence
  primer
aaagaaattgccattgcgg

SEQ ID NO: 23429 - DNA, 35 bp, Artificial Sequence
  primer
gtaaaacgacggccagtgccctgtcacattgcctg

SEQ ID NO: 23430 - DNA, 37 bp, Artificial Sequence
  primer
gtaaaacgacggccagtacctcgttctttgcctttcc

SEQ ID NO: 23431 - DNA, 38 bp, Artificial Sequence
  primer
gtaaaacgacggccagtcttctgaggatgtgcagaggg

SEQ ID NO: 23432 - DNA, 22 bp, Artificial Sequence
  primer
tcatgggagtggattctaatgg

SEQ ID NO: 23433 - DNA, 38 bp, Artificial Sequence
  primer
gtaaaacgacggccagtagggtgccacacatcactatg

SEQ ID NO: 23434 - DNA, 39 bp, Artificial Sequence
  primer
gtaaaacgacggccagtcacagggagctctaccatcaag

SEQ ID NO: 23435 - DNA, 21 bp, Artificial Sequence
  primer
gcaatgataacagcctgcttg

SEQ ID NO: 23436 - DNA, 20 bp, Artificial Sequence
  primer
agcaagggaccacattaccc

SEQ ID NO: 23437 - DNA, 21 bp, Artificial Sequence
  primer
aaggagtgggcatttgtgaag

SEQ ID NO: 23438 - DNA, 23 bp, Artificial Sequence
  primer
ttaccaaatgacaactgatgagc

SEQ ID NO: 23439 - DNA, 22 bp, Artificial Sequence
  primer
gcagtgaggtgtgagtatgagg

SEQ ID NO: 23440 - DNA, 38 bp, Artificial Sequence
  primer
gtaaaacgacggccagtcacaatctccctctgcctttc

SEQ ID NO: 23441 - DNA, 40 bp, Artificial Sequence
  primer
gtaaaacgacggccagttgtttaagtatggcagtcaatgg

SEQ ID NO: 23442 - DNA, 22 bp, Artificial Sequence
  primer
tgatttatggtgggctcaattc

SEQ ID NO: 23443 - DNA, 22 bp, Artificial Sequence
  primer
gaaggaggaggttaggatcacc

SEQ ID NO: 23444 - DNA, 38 bp, Artificial Sequence
  primer
gtaaaacgacggccagtgtattcagagcggtgtgtgtg

SEQ ID NO: 23445 - DNA, 38 bp, Artificial Sequence
  primer
gtaaaacgacggccagtgttcctacccaggacaccttg

SEQ ID NO: 23446 - DNA, 38 bp, Artificial Sequence
  primer
gtaaaacgacggccagtgttcctgtacctgcttgggag

SEQ ID NO: 23447 - DNA, 21 bp, Artificial Sequence
  primer
aaattcccacccacctactcc

SEQ ID NO: 23448 - DNA, 38 bp, Artificial Sequence
  primer
gtaaaacgacggccagttggcccataactcagatgttg

SEQ ID NO: 23449 - DNA, 40 bp, Artificial Sequence
  primer
gtaaaacgacggccagtaacactgacgtaactgatttgcc

SEQ ID NO: 23450 - DNA, 20 bp, Artificial Sequence
  primer
gtagggaagcacagcaccag

SEQ ID NO: 23451 - DNA, 21 bp, Artificial Sequence
  primer
atcctgggctcaggtaagagg

SEQ ID NO: 23452 - DNA, 21 bp, Artificial Sequence
  primer
gggcatgggaaggactatttc

SEQ ID NO: 23453 - DNA, 37 bp, Artificial Sequence
  primer
gtaaaacgacggccagttcccagaccctacccaactc

SEQ ID NO: 23454 - DNA, 21 bp, Artificial Sequence
  primer
gagggactttctggctgtagg

SEQ ID NO: 23455 - DNA, 21 bp, Artificial Sequence
  primer
atggtcaacctctctccctcc

SEQ ID NO: 23456 - DNA, 38 bp, Artificial Sequence
  primer
gtaaaacgacggccagtatgtgactgtgtccttgcctg

SEQ ID NO: 23457 - DNA, 38 bp, Artificial Sequence
  primer
gtaaaacgacggccagtgttagacaggagcatgcaggt

SEQ ID NO: 23458 - DNA, 38 bp, Artificial Sequence
  primer
gtaaaacgacggccagtattccgcagtacccaagtagg

SEQ ID NO: 23459 - DNA, 38 bp, Artificial Sequence
  primer
gtaaaacgacggccagtgactgacttcctggctgtgtg

SEQ ID NO: 23460 - DNA, 21 bp, Artificial Sequence
  primer
cctgagaaactgcaggagaca

SEQ ID NO: 23461 - DNA, 38 bp, Artificial Sequence; identical to SEQ ID NO: 23458
  primer

SEQ ID NO: 23462 - DNA, 38 bp, Artificial Sequence
  primer
gtaaaacgacggccagtgaagactgacttcctggctgc

SEQ ID NO: 23463 - DNA, 38 bp, Artificial Sequence
  primer
gtaaaacgacggccagtctccaggctgtcatttccttg

SEQ ID NO: 23464 - DNA, 40 bp, Artificial Sequence
  primer
gtaaaacgacggccagtgaacgatccctgctctaaacatc

SEQ ID NO: 23465 - DNA, 38 bp, Artificial Sequence
  primer
gtaaaacgacggccagtgtgtttctggaagcagaggtg

SEQ ID NO: 23466 - DNA, 38 bp, Artificial Sequence
  primer
gtaaaacgacggccagttggagtgcttaatgggaaatg

SEQ ID NO: 23467 - DNA, 41 bp, Artificial Sequence
  primer
gtaaaacgacggccagttgtgtaccttccattagaatttgc

SEQ ID NO: 23468 - DNA, 38 bp, Artificial Sequence
  primer
gtaaaacgacggccagtttgacatgcacattcaacagg

SEQ ID NO: 23469 - DNA, 38 bp, Artificial Sequence
  primer
gtaaaacgacggccagtcaggcttattgactgctgtgg

SEQ ID NO: 23470 - DNA, 39 bp, Artificial Sequence
  primer
gtaaaacgacggccagttccaaagatggaaatgaggttg

SEQ ID NO: 23471 - DNA, 21 bp, Artificial Sequence
  primer
aggagagcagaagtgtctggg

SEQ ID NO: 23472 - DNA, 38 bp, Artificial Sequence
  primer
gtaaaacgacggccagtggctgccaggagacttaaatg

SEQ ID NO: 23473 - DNA, 38 bp, Artificial Sequence
  primer
gtaaaacgacggccagtcttccactgtcaggatccacc

SEQ ID NO: 23474 - DNA, 21 bp, Artificial Sequence
  primer
gagaggaggtggttaggttgg

SEQ ID NO: 23475 - DNA, 21 bp, Artificial Sequence
  primer
cttgggaagagcacaggaatc

SEQ ID NO: 23476 - DNA, 38 bp, Artificial Sequence
  primer
gtaaaacgacggccagttgaagactgaggaggtctggc

SEQ ID NO: 23477 - DNA, 21 bp, Artificial Sequence
  primer
ctgtgaggatgtcaggtgctg

SEQ ID NO: 23478 - DNA, 37 bp, Artificial Sequence
  primer
gtaaaacgacggccagtgaggtggattccatcacagc

SEQ ID NO: 23479 - DNA, 21 bp, Artificial Sequence
  primer
gagctaactgctgctcactgg

SEQ ID NO: 23480 - DNA, 38 bp, Artificial Sequence
  primer
gtaaaacgacggccagtgtgtcagtcgcgtttctcatc

SEQ ID NO: 23481 - DNA, 38 bp, Artificial Sequence
  primer
gtaaaacgacggccagtcaaggtaggtgggagaaggtg

SEQ ID NO: 23482 - DNA, 21 bp, Artificial Sequence
  primer
tgctagcagtgaggcgttaag

SEQ ID NO: 23483 - DNA, 38 bp, Artificial Sequence
  primer
gtaaaacgacggccagtagcactcatcgagtctgggac

SEQ ID NO: 23484 - DNA, 19 bp, Artificial Sequence
  primer
agagctgcactgccaggac

SEQ ID NO: 23485 - DNA, 38 bp, Artificial Sequence
  primer
gtaaaacgacggccagtcagtacctggagctggtgagc

SEQ ID NO: 23486 - DNA, 21 bp, Artificial Sequence
  primer
ctctacatggtggacctgctg

SEQ ID NO: 23487 - DNA, 38 bp, Artificial Sequence
  primer
gtaaaacgacggccagtggattccaattctggtttccc

SEQ ID NO: 23488 - DNA, 21 bp, Artificial Sequence
  primer
tgcaagagttgactcccactg

SEQ ID NO: 23489 - DNA, 41 bp, Artificial Sequence
  primer
gtaaaacgacggccagtaaatttgatgcatagcaaactctg

SEQ ID NO: 23490 - DNA, 21 bp, Artificial Sequence
  primer
gcactgcttcagtattgtgcc

SEQ ID NO: 23491 - DNA, 38 bp, Artificial Sequence
  primer
gtaaaacgacggccagtcccagaagtgattgcaagttc

SEQ ID NO: 23492 - DNA, 40 bp, Artificial Sequence
  primer
gtaaaacgacggccagtcagcgttctctgatagtccattt

SEQ ID NO: 23493 - DNA, 38 bp, Artificial Sequence
  primer
gtaaaacgacggccagttcatcaaacattgcagctacg

SEQ ID NO: 23494 - DNA, 22 bp, Artificial Sequence
  primer
agttgtggaaatgagtttgtgg

SEQ ID NO: 23495 - DNA, 37 bp, Artificial Sequence
  primer
gtaaaacgacggccagtttgactggttgtttgagggc

SEQ ID NO: 23496 - DNA, 40 bp, Artificial Sequence
  primer
gtaaaacgacggccagtgctggagaaattagaggatgagg

SEQ ID NO: 23497 - DNA, 21 bp, Artificial Sequence
  primer
gcaaagcacagcagcattaac

SEQ ID NO: 23498 - DNA, 39 bp, Artificial Sequence
  primer
gtaaaacgacggccagttggtcacctaaagtggaaagtg

SEQ ID NO: 23499 - DNA, 41 bp, Artificial Sequence
  primer
gtaaaacgacggccagtgcttgaccagtgagattatgaaac

SEQ ID NO: 23500 - DNA, 38 bp, Artificial Sequence
  primer
gtaaaacgacggccagtagctactgtacccggccaata

SEQ ID NO: 23501 - DNA, 22 bp, Artificial Sequence
  primer
ttgcgggaagttattaagtcct

SEQ ID NO: 23502 - DNA, 38 bp, Artificial Sequence
  primer
gtaaaacgacggccagtacactgcctttgttccctagc

SEQ ID NO: 23503 - DNA, 27 bp, Artificial Sequence
  primer
tgccaatagaaagaaatattgattgac

SEQ ID NO: 23504 - DNA, 43 bp, Artificial Sequence
  primer
gtaaaacgacggccagtaaatgatgtattaaagaggcatttga

SEQ ID NO: 23505 - DNA, 39 bp, Artificial Sequence
  primer
gtaaaacgacggccagttttgctttggagaagtagcaaa

SEQ ID NO: 23506 - DNA, 41 bp, Artificial Sequence
  primer
gtaaaacgacggccagtaaatttgagaatttcactggcttt

SEQ ID NO: 23507 - DNA, 24 bp, Artificial Sequence
  primer
tgcaaacatttcaattctgttatg

SEQ ID NO: 23508 - DNA, 22 bp, Artificial Sequence
  primer
tgaatattctggccacttctgg

SEQ ID NO: 23509 - DNA, 21 bp, Artificial Sequence
  primer
tggctaagctttggagattgg

SEQ ID NO: 23510 - DNA, 21 bp, Artificial Sequence
  primer
gtgccgctttgtaattgactg

SEQ ID NO: 23511 - DNA, 44 bp, Artificial Sequence
  primer
gtaaaacgacggccagtggactgggtctttaagttaattcacac

SEQ ID NO: 23512 - DNA, 21 bp, Artificial Sequence
  primer
ttgtgatttcagggtctgagc

SEQ ID NO: 23513 - DNA, 21 bp, Artificial Sequence
  primer
tttggttgggaaattgttgat

SEQ ID NO: 23514 - DNA, 20 bp, Artificial Sequence
  primer
aagaaagcatttgccgtgtg

SEQ ID NO: 23515 - DNA, 45 bp, Artificial Sequence
  primer
gtaaaacgacggccagttctctcttattaggcacaatatttctca

SEQ ID NO: 23516 - DNA, 38 bp, Artificial Sequence
  primer
gtaaaacgacggccagtatttgggaagatgggattctg

SEQ ID NO: 23517 - DNA, 43 bp, Artificial Sequence
  primer
gtaaaacgacggccagttggatattcctgtgtttctatccaac

SEQ ID NO: 23518 - DNA, 46 bp, Artificial Sequence
  primer
gtaaaacgacggccagtcactgaacttattgatgacagtgtagtct

SEQ ID NO: 23519 - DNA, 23 bp, Artificial Sequence
  primer
tcattaaagatgagcatgtggtg

SEQ ID NO: 23520 - DNA, 21 bp, Artificial Sequence
  primer
gccagcctcctacctcaaatc

SEQ ID NO: 23521 - DNA, 38 bp, Artificial Sequence
  primer
gtaaaacgacggccagtctgatctctttgcacctgctg

SEQ ID NO: 23522 - DNA, 25 bp, Artificial Sequence
  primer
ccctaagattgtaagtgacttgctc

SEQ ID NO: 23523 - DNA, 24 bp, Artificial Sequence
  primer
ccacatatctttggtgtagtggtg

SEQ ID NO: 23524 - DNA, 24 bp, Artificial Sequence
  primer
tgcaaattaataaactccctgtcc

SEQ ID NO: 23525 - DNA, 20 bp, Artificial Sequence
  primer
tgatccacccacctcagtct

SEQ ID NO: 23526 - DNA, 23 bp, Artificial Sequence
  primer
tgaggctcataatgaattgtctg

SEQ ID NO: 23527 - DNA, 37 bp, Artificial Sequence
  primer
gtaaaacgacggccagtcccagtgggatcctgacttc

SEQ ID NO: 23528 - DNA, 21 bp, Artificial Sequence
  primer
agcaaggtgaaggatgaatgg

SEQ ID NO: 23529 - DNA, 38 bp, Artificial Sequence
  primer
gtaaaacgacggccagttgcctcttgtctgtgaaatgg

SEQ ID NO: 23530 - DNA, 38 bp, Artificial Sequence
  primer
gtaaaacgacggccagttttggaggtgtggtctgaaat

SEQ ID NO: 23531 - DNA, 21 bp, Artificial Sequence
  primer
taccaggtcaaaggctatcgg

SEQ ID NO: 23532 - DNA, 21 bp, Artificial Sequence
  primer
gaggaggatcgtttcaaggag

SEQ ID NO: 23533 - DNA, 20 bp, Artificial Sequence
  primer
aagcagcatgagccactctc

SEQ ID NO: 23534 - DNA, 20 bp, Artificial Sequence
  primer
cgacctcatgtccatcacag

SEQ ID NO: 23535 - DNA, 38 bp, Artificial Sequence
  primer
gtaaaacgacggccagttcttctaacgggacctgaagc

SEQ ID NO: 23536 - DNA, 38 bp, Artificial Sequence
  primer
gtaaaacgacggccagtgcaagaacaggagtgtgatgg

SEQ ID NO: 23537 - DNA, 21 bp, Artificial Sequence
  primer
ttgtagtcgctgagcctatcg

SEQ ID NO: 23538 - DNA, 21 bp, Artificial Sequence
  primer
gcagattgggtgtgaactttg

SEQ ID NO: 23539 - DNA, 21 bp, Artificial Sequence
  primer
ggctgcttaggattcgttgtc

SEQ ID NO: 23540 - DNA, 38 bp, Artificial Sequence
  primer
gtaaaacgacggccagttggcagagtgctacaggaaac

SEQ ID NO: 23541 - DNA, 20 bp, Artificial Sequence
  primer
gtccttggcactgacattgg

SEQ ID NO: 23542 - DNA, 24 bp, Artificial Sequence
  primer
cattactagaatgtgccaggaagc

SEQ ID NO: 23543 - DNA, 37 bp, Artificial Sequence
  primer
gtaaaacgacggccagtaaactgcaggcagaaagcag

SEQ ID NO: 23544 - DNA, 38 bp, Artificial Sequence
  primer
gtaaaacgacggccagtcttgatgtggctgtgagatgg

SEQ ID NO: 23545 - DNA, 35 bp, Artificial Sequence
  primer
gtaaaacgacggccagtcaacacggtgaagccctg

SEQ ID NO: 23546 - DNA, 39 bp, Artificial Sequence
  primer
gtaaaacgacggccagtcaccagaatgtacgtgatccag

SEQ ID NO: 23547 - DNA, 21 bp, Artificial Sequence
  primer
aaatcgagctgtttctcccac

SEQ ID NO: 23548 - DNA, 38 bp, Artificial Sequence
  primer
gtaaaacgacggccagtgttctgtgacactgaggccag

SEQ ID NO: 23549 - DNA, 38 bp, Artificial Sequence
  primer
gtaaaacgacggccagtgacactgctataaggtgcggg

SEQ ID NO: 23550 - DNA, 21 bp, Artificial Sequence
  primer
gctgaaaccctcagtgtctgg

SEQ ID NO: 23551 - DNA, 37 bp, Artificial Sequence
  primer
gtaaaacgacggccagtttcagcctagtggaagtggg

SEQ ID NO: 23552 - DNA, 37 bp, Artificial Sequence
  primer
gtaaaacgacggccagttgccttgacaccacagaacc

SEQ ID NO: 23553 - DNA, 38 bp, Artificial Sequence
  primer
gtaaaacgacggccagtgagtgaagccacactcccaag

SEQ ID NO: 23554 - DNA, 38 bp, Artificial Sequence
  primer
gtaaaacgacggccagttggttctgatgtgggagagag

SEQ ID NO: 23555 - DNA, 21 bp, Artificial Sequence
  primer
gtattcctgggcatgaaaggg

SEQ ID NO: 23556 - DNA, 38 bp, Artificial Sequence
  primer
gtaaaacgacggccagttgctgaagttatggtgggtca

SEQ ID NO: 23557 - DNA, 41 bp, Artificial Sequence
  primer
gtaaaacgacggccagttttaggaaacatggaaccaaagag

SEQ ID NO: 23558 - DNA, 22 bp, Artificial Sequence
  primer
tctttaaaggaatccctgagga

SEQ ID NO: 23559 - DNA, 22 bp, Artificial Sequence
  primer
gctgaaatgaaccatatttccc

SEQ ID NO: 23560 - DNA, 43 bp, Artificial Sequence
  primer
gtaaaacgacggccagtatatctttgtgtattcttccctcttt

SEQ ID NO: 23561 - DNA, 38 bp, Artificial Sequence
  primer
gtaaaacgacggccagtacctctgattgttggagtggg

SEQ ID NO: 23562 - DNA, 22 bp, Artificial Sequence
  primer
tgtgtggtgttatttctgaggc

SEQ ID NO: 23563 - DNA, 40 bp, Artificial Sequence
  primer
gtaaaacgacggccagtgcttaatcgtggactcggttatc

SEQ ID NO: 23564 - DNA, 21 bp, Artificial Sequence
  primer
tgcataaggccttggaaactc

SEQ ID NO: 23565 - DNA, 21 bp, Artificial Sequence
  primer
caacctgggcaacgtagtaag

SEQ ID NO: 23566 - DNA, 44 bp, Artificial Sequence
  primer
gtaaaacgacggccagtacagctgtataaacactgaagtaatgg

SEQ ID NO: 23567 - DNA, 20 bp, Artificial Sequence
  primer
gctgcatcctaaagcacagg

SEQ ID NO: 23568 - DNA, 36 bp, Artificial Sequence
  primer
gtaaaacgacggccagtaaatgtggcaaccagctcc

SEQ ID NO: 23569 - DNA, 42 bp, Artificial Sequence
  primer
gtaaaacgacggccagttgtatttcactggtttgtgataacc

SEQ ID NO: 23570 - DNA, 21 bp, Artificial Sequence
  primer
agttcctaatccaaagcagcc

SEQ ID NO: 23571 - DNA, 39 bp, Artificial Sequence
  primer
gtaaaacgacggccagtcccttgagattccttctaagcc

SEQ ID NO: 23572 - DNA, 22 bp, Artificial Sequence
  primer
cactgcaccctgcctataattc

SEQ ID NO: 23573 - DNA, 24 bp, Artificial Sequence
  primer
ccttaatgatgtgatttcatctcg

SEQ ID NO: 23574 - DNA, 42 bp, Artificial Sequence
  primer
gtaaaacgacggccagtaattcaaggacatgagttgagagtt

SEQ ID NO: 23575 - DNA, 18 bp, Artificial Sequence
  primer
gagctgagatcatgccgc

SEQ ID NO: 23576 - DNA, 44 bp, Artificial Sequence
  primer
gtaaaacgacggccagtaaatcttattgctgcttatatccatgt

SEQ ID NO: 23577 - DNA, 38 bp, Artificial Sequence
  primer
gtaaaacgacggccagtatgaccaggaagcttacagcc

SEQ ID NO: 23578 - DNA, 38 bp, Artificial Sequence
  primer
gtaaaacgacggccagtccgtttctgagaagcaagtca

SEQ ID NO: 23579 - DNA, 38 bp, Artificial Sequence
  primer
gtaaaacgacggccagtaattcccaattcgagcaattc

SEQ ID NO: 23580 - DNA, 41 bp, Artificial Sequence
  primer
gtaaaacgacggccagtaatcacagaagatgtgctgttcac

SEQ ID NO: 23581 - DNA, 35 bp, Artificial Sequence
  primer
gtaaaacgacggccagtccggaggatggcttgaac

SEQ ID NO: 23582 - DNA, 38 bp, Artificial Sequence
  primer
gtaaaacgacggccagtgctccaggatagtgggatctg

SEQ ID NO: 23583 - DNA, 40 bp, Artificial Sequence
  primer
gtaaaacgacggccagtaaactggaaggccataatacacc

SEQ ID NO: 23584 - DNA, 38 bp, Artificial Sequence
  primer
gtaaaacgacggccagtctccagacaatgctgccctac

SEQ ID NO: 23585 - DNA, 26 bp, Artificial Sequence
  primer
tcagtgtctcatccagttactctcag

SEQ ID NO: 23586 - DNA, 37 bp, Artificial Sequence
  primer
gtaaaacgacggccagtaatgatccttcgagcatccc

SEQ ID NO: 23587 - DNA, 38 bp, Artificial Sequence
  primer
gtaaaacgacggccagtacaggttccaaagcagctgaa

SEQ ID NO: 23588 - DNA, 41 bp, Artificial Sequence
  primer
gtaaaacgacggccagttctgtgttccagtagagtggtctg

SEQ ID NO: 23589 - DNA, 21 bp, Artificial Sequence
  primer
acatccctgcattgtgctatc

SEQ ID NO: 23590 - DNA, 21 bp, Artificial Sequence
  primer
gaattcggtaagctccacctg

SEQ ID NO: 23591 - DNA, 39 bp, Artificial Sequence
  primer
gtaaaacgacggccagtaggctccatgtaagacacttgc

SEQ ID NO: 23592 - DNA, 39 bp, Artificial Sequence
  primer
gtaaaacgacggccagtccgtgtttactcctggaaagag

SEQ ID NO: 23593 - DNA, 38 bp, Artificial Sequence
  primer
gtaaaacgacggccagtgtttgccatgcttcatttctc

SEQ ID NO: 23594 - DNA, 21 bp, Artificial Sequence
  primer
tctcaatagccacgaggaacc

SEQ ID NO: 23595 - DNA, 35 bp, Artificial Sequence
  primer
gtaaaacgacggccagtgaacccgagaggcagagc

SEQ ID NO: 23596 - DNA, 38 bp, Artificial Sequence
  primer
gtaaaacgacggccagttcatttcctccctgcatcttc

SEQ ID NO: 23597 - DNA, 38 bp, Artificial Sequence
  primer
gtaaaacgacggccagtagttgactctcagccctcagc

SEQ ID NO: 23598 - DNA, 38 bp, Artificial Sequence
  primer
gtaaaacgacggccagtaatgccatctggttcctcaac

SEQ ID NO: 23599 - DNA, 20 bp, Artificial Sequence
  primer
ctgctgctgaccataccctc

SEQ ID NO: 23600 - DNA, 21 bp, Artificial Sequence
  primer
tcctttgcctacatcaactgc

SEQ ID NO: 23601 - DNA, 21 bp, Artificial Sequence
  primer
cctataggccacttggaaagc

SEQ ID NO: 23602 - DNA, 38 bp, Artificial Sequence
  primer
gtaaaacgacggccagttgctctaagtggtagtcggga

SEQ ID NO: 23603 - DNA, 23 bp, Artificial Sequence
  primer
gagttcaagggtataatgtgggc

SEQ ID NO: 23604 - DNA, 37 bp, Artificial Sequence
  primer
gtaaaacgacggccagtctgccaggtgttaagatggc

SEQ ID NO: 23605 - DNA, 21 bp, Artificial Sequence
  primer
aagtgatccacctgacttggg

SEQ ID NO: 23606 - DNA, 21 bp, Artificial Sequence
  primer
gtgtacctgggtgaggaggag

SEQ ID NO: 23607 - DNA, 38 bp, Artificial Sequence
  primer
gtaaaacgacggccagtgcagtgtgtcctgtttcttgg

SEQ ID NO: 23608 - DNA, 20 bp, Artificial Sequence
  primer
aggtcacacgcaacttcctc

SEQ ID NO: 23609 - DNA, 21 bp, Artificial Sequence
  primer
taggcaagtgaaatccatccc

SEQ ID NO: 23610 - DNA, 38 bp, Artificial Sequence
  primer
gtaaaacgacggccagtttattccggtttccagagcac

SEQ ID NO: 23611 - DNA, 39 bp, Artificial Sequence
  primer
gtaaaacgacggccagtgctttggtggagataaagttgg

SEQ ID NO: 23612 - DNA, 21 bp, Artificial Sequence
  primer
tatttcccaaatcagcaccac

SEQ ID NO: 23613 - DNA, 20 bp, Artificial Sequence
  primer
tcctgggctcaagtgatctg

SEQ ID NO: 23614 - DNA, 21 bp, Artificial Sequence
  primer
agacgtgcttgtttcagatcc

SEQ ID NO: 23615 - DNA, 38 bp, Artificial Sequence
  primer
gtaaaacgacggccagtcaataaatgatgggagccacc

SEQ ID NO: 23616 - DNA, 21 bp, Artificial Sequence
  primer
ccttgccaatctctttcatcc

SEQ ID NO: 23617 - DNA, 36 bp, Artificial Sequence
  primer
gtaaaacgacggccagttagcaaacagccctgggag

SEQ ID NO: 23618 - DNA, 38 bp, Artificial Sequence
  primer
gtaaaacgacggccagtttaggccagagggaagtagcc

SEQ ID NO: 23619 - DNA, 21 bp, Artificial Sequence
  primer
gggtgacacacattgagaagc

SEQ ID NO: 23620 - DNA, 21 bp, Artificial Sequence
  primer
gccaagcaaaccagacacttc

SEQ ID NO: 23621 - DNA, 37 bp, Artificial Sequence
  primer
gtaaaacgacggccagtagtcgccgctccagtctatc

SEQ ID NO: 23622 - DNA, 38 bp, Artificial Sequence
  primer
gtaaaacgacggccagtaaactcctacaacaggcccag

SEQ ID NO: 23623 - DNA, 21 bp, Artificial Sequence
  primer
cgatatccacattgcttccag

SEQ ID NO: 23624 - DNA, 38 bp, Artificial Sequence
  primer
gtaaaacgacggccagtaacactggtaatgcctttggg

SEQ ID NO: 23625 - DNA, 39 bp, Artificial Sequence
  primer
gtaaaacgacggccagtctacattaggcacaaagcttgc

SEQ ID NO: 23626 - DNA, 35 bp, Artificial Sequence
  primer
gtaaaacgacggccagtcctttaagagccgccacc

SEQ ID NO: 23627 - DNA, 21 bp, Artificial Sequence
  primer
atgctgctttgaccttaaccc

SEQ ID NO: 23628 - DNA, 21 bp, Artificial Sequence
  primer
tcagccactaacaagacccac

SEQ ID NO: 23629 - DNA, 21 bp, Artificial Sequence
  primer
gcttaccttcctgtttggagc

SEQ ID NO: 23630 - DNA, 38 bp, Artificial Sequence
  primer
gtaaaacgacggccagtctgcagcctcatacagactgg

SEQ ID NO: 23631 - DNA, 21 bp, Artificial Sequence
  primer
tggtgacctctatctccaccc

SEQ ID NO: 23632 - DNA, 38 bp, Artificial Sequence
  primer
gtaaaacgacggccagtggacttaggtacaggcagggc

SEQ ID NO: 23633 - DNA, 21 bp, Artificial Sequence
  primer
tctgaggatgacatgggagac

SEQ ID NO: 23634 - DNA, 22 bp, Artificial Sequence
  primer
tgcattgatatcagtttcctgg

SEQ ID NO: 23635 - DNA, 42 bp, Artificial Sequence
  primer
gtaaaacgacggccagtgatagcatatatctgccagtcaagc

SEQ ID NO: 23636 - DNA, 24 bp, Artificial Sequence
  primer
tgccactagagtttgtagcatttc

SEQ ID NO: 23637 - DNA, 42 bp, Artificial Sequence
  primer
gtaaaacgacggccagtggcctagtatgtagtaagcagggtc

SEQ ID NO: 23638 - DNA, 39 bp, Artificial Sequence
  primer
gtaaaacgacggccagtgccagtgcttggtattgttagc

SEQ ID NO: 23639 - DNA, 38 bp, Artificial Sequence
  primer
gtaaaacgacggccagtgaatgaaagggcaatcctctg

SEQ ID NO: 23640 - DNA, 39 bp, Artificial Sequence
  primer
gtaaaacgacggccagtaaggaataacttgtgctggctg

SEQ ID NO: 23641 - DNA, 21 bp, Artificial Sequence
  primer
aagcactaaagcaccatgctc

SEQ ID NO: 23642 - DNA, 38 bp, Artificial Sequence
  primer
gtaaaacgacggccagtaggatgctattgtgttcctgg

SEQ ID NO: 23643 - DNA, 41 bp, Artificial Sequence
  primer
gtaaaacgacggccagttggaaggcaactattagtctctgc

SEQ ID NO: 23644 - DNA, 28 bp, Artificial Sequence
  primer
cacatttagtaccagaagtgatttgttc

SEQ ID NO: 23645 - DNA, 27 bp, Artificial Sequence
  primer
tcagtccagacttctgtgcttatattt

SEQ ID NO: 23646 - DNA, 21 bp, Artificial Sequence
  primer
tcactgctcttacttgccagg

SEQ ID NO: 23647 - DNA, 38 bp, Artificial Sequence
  primer
gtaaaacgacggccagtgatgcattggtagcaactccc

SEQ ID NO: 23648 - DNA, 38 bp, Artificial Sequence
  primer
gtaaaacgacggccagtgctgagaaatgtgtgaggctg

SEQ ID NO: 23649 - DNA, 23 bp, Artificial Sequence
  primer
tcaatttgtctggtttcaggaag

SEQ ID NO: 23650 - DNA, 38 bp, Artificial Sequence
  primer
gtaaaacgacggccagttgataaggaagaggctcccac

SEQ ID NO: 23651 - DNA, 20 bp, Artificial Sequence
  primer
agctagggtgcagtgtggtg

SEQ ID NO: 23652 - DNA, 38 bp, Artificial Sequence
  primer
gtaaaacgacggccagtggatgaagcctcagtcaccac

SEQ ID NO: 23653 - DNA, 37 bp, Artificial Sequence
  primer
gtaaaacgacggccagtctcctgtaagcaggtcacgg

SEQ ID NO: 23654 - DNA, 43 bp, Artificial Sequence
  primer
gtaaaacgacggccagtaatgtatctagtcatattgccacctg

SEQ ID NO: 23655 - DNA, 27 bp, Artificial Sequence
  primer
tcccttagaacagagatagtatgtttc

SEQ ID NO: 23656 - DNA, 21 bp, Artificial Sequence
  primer
gtggagtaatgtgaacctggc

SEQ ID NO: 23657 - DNA, 38 bp, Artificial Sequence
  primer
gtaaaacgacggccagtatcgcaggttgcttgatgaac

SEQ ID NO: 23658 - DNA, 26 bp, Artificial Sequence
  primer
acttactccataagagagattggtcc

SEQ ID NO: 23659 - DNA, 39 bp, Artificial Sequence
  primer
gtaaaacgacggccagtcaaggtagtgcaaatatggcag

SEQ ID NO: 23660 - DNA, 38 bp, Artificial Sequence
  primer
gtaaaacgacggccagtacaactgatctttcccatccc

SEQ ID NO: 23661 - DNA, 20 bp, Artificial Sequence
  primer
tcacaacatcccgaggagac

SEQ ID NO: 23662 - DNA, 42 bp, Artificial Sequence
  primer
gtaaaacgacggccagttgctatacttcatatgacccaggtt

SEQ ID NO: 23663 - DNA, 38 bp, Artificial Sequence
  primer
gtaaaacgacggccagttatagggctccaaagaatggg

SEQ ID NO: 23664 - DNA, 21 bp, Artificial Sequence
  primer
tgctggatgtgtttaagctgg

SEQ ID NO: 23665 - DNA, 44 bp, Artificial Sequence
  primer
gtaaaacgacggccagttgatatgatttaaggaacacatagctg

SEQ ID NO: 23666 - DNA, 22 bp, Artificial Sequence
  primer
ttgctaatagtgccatgtcagg

SEQ ID NO: 23667 - DNA, 37 bp, Artificial Sequence
  primer
gtaaaacgacggccagtttgagcagtctttgctgtgg

SEQ ID NO: 23668 - DNA, 26 bp, Artificial Sequence
  primer
ttggctttgaaatatctaagtctgtg

SEQ ID NO: 23669 - DNA, 21 bp, Artificial Sequence
  primer
tgatcgtctgccctttctacc

SEQ ID NO: 23670 - DNA, 21 bp, Artificial Sequence
  primer
ttgtggcctacattcttcagg

SEQ ID NO: 23671 - DNA, 35 bp, Artificial Sequence
  primer
gtaaaacgacggccagtcgtgcctggcccatttag

SEQ ID NO: 23672 - DNA, 23 bp, Artificial Sequence
  primer
ccaatcatagaaggagaaactgc

SEQ ID NO: 23673 - DNA, 21 bp, Artificial Sequence
  primer
gatttcattggtttgcagtgg

SEQ ID NO: 23674 - DNA, 22 bp, Artificial Sequence
  primer
gcagagtctagcactggatgtc

SEQ ID NO: 23675 - DNA, 24 bp, Artificial Sequence
  primer
tctgactcaggatgacttgtgaag

SEQ ID NO: 23676 - DNA, 21 bp, Artificial Sequence
  primer
tgctgagcctcacaaagtatg

SEQ ID NO: 23677 - DNA, 38 bp, Artificial Sequence
  primer
gtaaaacgacggccagtcactgttgtgattgaggagcc

SEQ ID NO: 23678 - DNA, 40 bp, Artificial Sequence
  primer
gtaaaacgacggccagtgacttgccttcaactttaccttg

SEQ ID NO: 23679 - DNA, 20 bp, Artificial Sequence
  primer
agtttgggctttccagcttc

SEQ ID NO: 23680 - DNA, 39 bp, Artificial Sequence
  primer
gtaaaacgacggccagtccctcagtgcaggaaataacac

SEQ ID NO: 23681 - DNA, 39 bp, Artificial Sequence
  primer
gtaaaacgacggccagttgtaattctgtggtgggaatga

SEQ ID NO: 23682 - DNA, 38 bp, Artificial Sequence
  primer
gtaaaacgacggccagtctgttcaggatcatctctggg

SEQ ID NO: 23683 - DNA, 38 bp, Artificial Sequence
  primer
gtaaaacgacggccagtgggaggaggagtgttctcttg

SEQ ID NO: 23684 - DNA, 38 bp, Artificial Sequence
  primer
gtaaaacgacggccagtgaactgggcagtaatggcaac

SEQ ID NO: 23685 - DNA, 38 bp, Artificial Sequence
  primer
gtaaaacgacggccagtaaagtgaggaaaccaggttgg

SEQ ID NO: 23686 - DNA, 21 bp, Artificial Sequence
  primer
atgagccactgggtctactgc

SEQ ID NO: 23687 - DNA, 22 bp, Artificial Sequence
  primer
ttgagaggacttggtgactgag

SEQ ID NO: 23688 - DNA, 21 bp, Artificial Sequence
  primer
aaatcacctctttggttgcac

SEQ ID NO: 23689 - DNA, 21 bp, Artificial Sequence
  primer
tgaatcctttaccactgcctc

SEQ ID NO: 23690 - DNA, 23 bp, Artificial Sequence
  primer
gtgaacacactacattggctacg

SEQ ID NO: 23691 - DNA, 21 bp, Artificial Sequence
  primer
agtcacagttgggtctttggg

SEQ ID NO: 23692 - DNA, 20 bp, Artificial Sequence
  primer
cacagctttgctaaggcagg

SEQ ID NO: 23693 - DNA, 21 bp, Artificial Sequence
  primer
agcctcaggttactcactggg

SEQ ID NO: 23694 - DNA, 21 bp, Artificial Sequence
  primer
gctatgacccagctgaggaac

SEQ ID NO: 23695 - DNA, 20 bp, Artificial Sequence
  primer
gacagtggtacatggctggc

SEQ ID NO: 23696 - DNA, 21 bp, Artificial Sequence
  primer
tagaaccttcacaggccacac

SEQ ID NO: 23697 - DNA, 23 bp, Artificial Sequence
  primer
aatgtgaggacagtaatatgcgg

SEQ ID NO: 23698 - DNA, 38 bp, Artificial Sequence
  primer
gtaaaacgacggccagtcaggaggaccaccttggtaag

SEQ ID NO: 23699 - DNA, 21 bp, Artificial Sequence
  primer
ccaggagactagctgctgaag

SEQ ID NO: 23700 - DNA, 18 bp, Artificial Sequence
  primer
gctgggaacataggcgtg

SEQ ID NO: 23701 - DNA, 38 bp, Artificial Sequence
  primer
gtaaaacgacggccagtcccgacatgcatattcaacac

SEQ ID NO: 23702 - DNA, 22 bp, Artificial Sequence
  primer
tgcctaactggatatttgaggg

SEQ ID NO: 23703 - DNA, 21 bp, Artificial Sequence
  primer
gctgtcagtacccatcaccag

SEQ ID NO: 23704 - DNA, 40 bp, Artificial Sequence
  primer
gtaaaacgacggccagttgcatagatcttgtagtcccacc

SEQ ID NO: 23705 - DNA, 37 bp, Artificial Sequence
  primer
gtaaaacgacggccagtgaggagggaatgggattgtc

SEQ ID NO: 23706 - DNA, 38 bp, Artificial Sequence
  primer
gtaaaacgacggccagttgcttgatctgaaactccctg

SEQ ID NO: 23707 - DNA, 38 bp, Artificial Sequence
  primer
gtaaaacgacggccagtagatcatctgcagtcccacag

SEQ ID NO: 23708 - DNA, 21 bp, Artificial Sequence
  primer
tcaaccatcactgaaagcagg

SEQ ID NO: 23709 - DNA, 21 bp, Artificial Sequence
  primer
gatttccaatggcttctcagc

SEQ ID NO: 23710 - DNA, 38 bp, Artificial Sequence
  primer
gtaaaacgacggccagtccctgctctacctctcaaagc

SEQ ID NO: 23711 - DNA, 20 bp, Artificial Sequence
  primer
tcaccctaccacactccagc

SEQ ID NO: 23712 - DNA, 21 bp, Artificial Sequence
  primer
ttgaaagttcgcattctgctg

SEQ ID NO: 23713 - DNA, 39 bp, Artificial Sequence
  primer
gtaaaacgacggccagttccaccaatccctttgtaagag

SEQ ID NO: 23714 - DNA, 21 bp, Artificial Sequence
  primer
tggaatacctccttcactgcc

SEQ ID NO: 23715 - DNA, 19 bp, Artificial Sequence
  primer
gaggcaagggtgaaagcag

SEQ ID NO: 23716 - DNA, 38 bp, Artificial Sequence
  primer
gtaaaacgacggccagtcagatcccactcaatgcagag

SEQ ID NO: 23717 - DNA, 38 bp, Artificial Sequence
  primer
gtaaaacgacggccagtctctgtgtggagtgcgatatg

SEQ ID NO: 23718 - DNA, 20 bp, Artificial Sequence
  primer
aaatgtggaggcactgcaag

SEQ ID NO: 23719 - DNA, 23 bp, Artificial Sequence
  primer
ggaatggaggtcaaggtagacag

SEQ ID NO: 23720 - DNA, 21 bp, Artificial Sequence
  primer
tgggttggttgtactgaaagg

SEQ ID NO: 23721 - DNA, 21 bp, Artificial Sequence
  primer
aagcccaggtaaagaagaggg

SEQ ID NO: 23722 - DNA, 21 bp, Artificial Sequence
  primer
tgttgctaagactgtgggtcg

SEQ ID NO: 23723 - DNA, 43 bp, Artificial Sequence
  primer
gtaaaacgacggccagtttctggttcagttccatatatttgtc

SEQ ID NO: 23724 - DNA, 39 bp, Artificial Sequence
  primer
gtaaaacgacggccagttgagactacagggcaaacattg

SEQ ID NO: 23725 - DNA, 21 bp, Artificial Sequence
  primer
agaacaggattgatgtgctgc

SEQ ID NO: 23726 - DNA, 41 bp, Artificial Sequence
  primer
gtaaaacgacggccagttgaggaaactgagtgctaaatgtg

SEQ ID NO: 23727 - DNA, 39 bp, Artificial Sequence
  primer
gtaaaacgacggccagttccagtgctgtctggtatcttg

SEQ ID NO: 23728 - DNA, 40 bp, Artificial Sequence
  primer
gtaaaacgacggccagtggcttcatgggaaatgtcttatc

SEQ ID NO: 23729 - DNA, 39 bp, Artificial Sequence
  primer
gtaaaacgacggccagttgaagctctgttgtttgtcagg

SEQ ID NO: 23730 - DNA, 19 bp, Artificial Sequence
  primer
accacctgcaccctctgtc

SEQ ID NO: 23731 - DNA, 18 bp, Artificial Sequence
  primer
ctactcggctgaggcagg

SEQ ID NO: 23732 - DNA, 38 bp, Artificial Sequence
  primer
gtaaaacgacggccagtagtggctagaatggatggacc

SEQ ID NO: 23733 - DNA, 38 bp, Artificial Sequence
  primer
gtaaaacgacggccagtatcagacaggtcacacatgcc

SEQ ID NO: 23734 - DNA, 22 bp, Artificial Sequence
  primer
ggaagttgaagccttccttcag

SEQ ID NO: 23735 - DNA, 21 bp, Artificial Sequence
  primer
tcagagtctctctgctgtggg

SEQ ID NO: 23736 - DNA, 26 bp, Artificial Sequence
  primer
gaatacaaattctgtgctggatagag

SEQ ID NO: 23737 - DNA, 21 bp, Artificial Sequence
  primer
tttcttggaagctatgcctgc

SEQ ID NO: 23738 - DNA, 38 bp, Artificial Sequence
  primer
gtaaaacgacggccagtcccagaaggaactcacagagg

SEQ ID NO: 23739 - DNA, 38 bp, Artificial Sequence
  primer
gtaaaacgacggccagtctcctatagggtcccagtccc

SEQ ID NO: 23740 - DNA, 20 bp, Artificial Sequence
  primer
gatggcgggtgcctataatc

SEQ ID NO: 23741 - DNA, 39 bp, Artificial Sequence
  primer
gtaaaacgacggccagttgtgtaaaccatccaagacagg

SEQ ID NO: 23742 - DNA, 38 bp, Artificial Sequence
  primer
gtaaaacgacggccagtacactgggaattagggtgtcc

SEQ ID NO: 23743 - DNA, 38 bp, Artificial Sequence
  primer
gtaaaacgacggccagtcagccgtgtcatgtagctttc

SEQ ID NO: 23744 - DNA, 21 bp, Artificial Sequence
  primer
ggtataaatgcagctcctggg

SEQ ID NO: 23745 - DNA, 38 bp, Artificial Sequence
  primer
gtaaaacgacggccagtgttggacttaggctgtgaccc

SEQ ID NO: 23746 - DNA, 38 bp, Artificial Sequence
  primer
gtaaaacgacggccagtacagccctctccctctcaaag

SEQ ID NO: 23747 - DNA, 21 bp, Artificial Sequence
  primer
tctctggcacattgaggaatc

SEQ ID NO: 23748 - DNA, 20 bp, Artificial Sequence
  primer
gtccttgggcatctagggag

SEQ ID NO: 23749 - DNA, 38 bp, Artificial Sequence
  primer
gtaaaacgacggccagtgtccctgatgggttctcttcc

SEQ ID NO: 23750 - DNA, 38 bp, Artificial Sequence
  primer
gtaaaacgacggccagttgtgttcaactttccactgcc

SEQ ID NO: 23751 - DNA, 19 bp, Artificial Sequence
  primer
cctacctcaaaggagcggg

SEQ ID NO: 23752 - DNA, 38 bp, Artificial Sequence
  primer
gtaaaacgacggccagtaggagcctcaggttctgtgac

SEQ ID NO: 23753 - DNA, 21 bp, Artificial Sequence
  primer
gtggtttggataatgtttggg

SEQ ID NO: 23754 - DNA, 38 bp, Artificial Sequence
  primer
gtaaaacgacggccagttgggaaccatagatcttgcac

SEQ ID NO: 23755 - DNA, 21 bp, Artificial Sequence
  primer
ttggtcagaggttgttggttc

SEQ ID NO: 23756 - DNA, 35 bp, Artificial Sequence
  primer
gtaaaacgacggccagtctgtgtccggtgctcacg

SEQ ID NO: 23757 - DNA, 22 bp, Artificial Sequence
  primer
cccactgcttcacttgactagc

SEQ ID NO: 23758 - DNA, 38 bp, Artificial Sequence
  primer
gtaaaacgacggccagtagccatcactcgggtctactg

SEQ ID NO: 23759 - DNA, 39 bp, Artificial Sequence
  primer
gtaaaacgacggccagtcacggagatgaatgacacagtc

SEQ ID NO: 23760 - DNA, 21 bp, Artificial Sequence
  primer
tgtgatcatgccgctgtactc

SEQ ID NO: 23761 - DNA, 21 bp, Artificial Sequence
  primer
tgagagtgctgggagtctctg

SEQ ID NO: 23762 - DNA, 21 bp, Artificial Sequence
  primer
agggacactgacataggcacc

SEQ ID NO: 23763 - DNA, 21 bp, Artificial Sequence
  primer
tttcttcaggctggaccaaag

SEQ ID NO: 23764 - DNA, 38 bp, Artificial Sequence
  primer
gtaaaacgacggccagtttctgcatgctttaggtggtg

SEQ ID NO: 23765 - DNA, 38 bp, Artificial Sequence
  primer
gtaaaacgacggccagtgatttctgcactgtgggtgag

SEQ ID NO: 23766 - DNA, 21 bp, Artificial Sequence
  primer
gggatagccacagtgttgatg

SEQ ID NO: 23767 - DNA, 38 bp, Artificial Sequence
  primer
gtaaaacgacggccagtgggatggtagaggctttatgc

SEQ ID NO: 23768 - DNA, 40 bp, Artificial Sequence
  primer
gtaaaacgacggccagtaatgtgtacctttgctctgttcg

SEQ ID NO: 23769 - DNA, 21 bp, Artificial Sequence
  primer
tgcattctggttgaaggtgag

SEQ ID NO: 23770 - DNA, 21 bp, Artificial Sequence
  primer
gcatgattgccaccaatacac

SEQ ID NO: 23771 - DNA, 21 bp, Artificial Sequence
  primer
agagacctaaggcttcctggg

SEQ ID NO: 23772 - DNA, 38 bp, Artificial Sequence
  primer
gtaaaacgacggccagtaagtcctgtccagtctgaggc

SEQ ID NO: 23773 - DNA, 21 bp, Artificial Sequence
  primer
tgcattggagttctctttccc

SEQ ID NO: 23774 - DNA, 20 bp, Artificial Sequence
  primer
ctgagcagaacccaagcctc

SEQ ID NO: 23775 - DNA, 38 bp, Artificial Sequence
  primer
gtaaaacgacggccagtttgtctgagctgaaagggatg

SEQ ID NO: 23776 - DNA, 21 bp, Artificial Sequence
  primer
aggacacttgggttgcttctg

SEQ ID NO: 23777 - DNA, 38 bp, Artificial Sequence
  primer
gtaaaacgacggccagtgaagacctcatctttcacccg

SEQ ID NO: 23778 - DNA, 24 bp, Artificial Sequence
  primer
ttctctgtgacttcgttcagtcag

SEQ ID NO: 23779 - DNA, 21 bp, Artificial Sequence
  primer
gctgcttcaagctgaatgatg

SEQ ID NO: 23780 - DNA, 38 bp, Artificial Sequence
  primer
gtaaaacgacggccagtttgtcagcctgttggtttctc

SEQ ID NO: 23781 - DNA, 38 bp, Artificial Sequence
  primer
gtaaaacgacggccagttttcccagatggttccttacc

SEQ ID NO: 23782 - DNA, 37 bp, Artificial Sequence
  primer
gtaaaacgacggccagtctggatcctcccagttcgtc

SEQ ID NO: 23783 - DNA, 38 bp, Artificial Sequence
  primer
gtaaaacgacggccagttgtggctattccatttcctcg

SEQ ID NO: 23784 - DNA, 38 bp, Artificial Sequence
  primer
gtaaaacgacggccagtgcctccacacctagaagggac

SEQ ID NO: 23785 - DNA, 38 bp, Artificial Sequence
  primer
gtaaaacgacggccagtctttctatggacccagccctc

SEQ ID NO: 23786 - DNA, 21 bp, Artificial Sequence
  primer
gaccctggacgtctaccttcc

SEQ ID NO: 23787 - DNA, 38 bp, Artificial Sequence
  primer
gtaaaacgacggccagttaaaccctgggatgagcagag

SEQ ID NO: 23788 - DNA, 38 bp, Artificial Sequence
  primer
gtaaaacgacggccagtcgtgttctggaattggtgttg

SEQ ID NO: 23789 - DNA, 21 bp, Artificial Sequence
  primer
ttcagagggttgtccttcctg

SEQ ID NO: 23790 - DNA, 38 bp, Artificial Sequence
  primer
gtaaaacgacggccagtaatagagggtggcatgtctgg

SEQ ID NO: 23791 - DNA, 38 bp, Artificial Sequence
  primer
gtaaaacgacggccagtctgcctgaggatacaatggtg

SEQ ID NO: 23792 - DNA, 38 bp, Artificial Sequence
  primer
gtaaaacgacggccagtagcctggaatgggaggagtag

SEQ ID NO: 23793 - DNA, 21 bp, Artificial Sequence
  primer
caaagagccctaaatgggagg

SEQ ID NO: 23794 - DNA, 38 bp, Artificial Sequence
  primer
gtaaaacgacggccagtcagctgcctagagcaagaagc

SEQ ID NO: 23795 - DNA, 38 bp, Artificial Sequence
  primer
gtaaaacgacggccagtttcatacctggtacgctgctg

SEQ ID NO: 23796 - DNA, 21 bp, Artificial Sequence
  primer
agaaaggtagaggcctccctg

SEQ ID NO: 23797 - DNA, 37 bp, Artificial Sequence
  primer
gtaaaacgacggccagtgagaatggaagaacccggag

SEQ ID NO: 23798 - DNA, 38 bp, Artificial Sequence
  primer
gtaaaacgacggccagtagggagtgtctgggtgagttg

SEQ ID NO: 23799 - DNA, 38 bp, Artificial Sequence
  primer
gtaaaacgacggccagtctgggtgagtgagccctaatc

SEQ ID NO: 23800 - DNA, 21 bp, Artificial Sequence
  primer
tgaggaggtaaaggagccaag

SEQ ID NO: 23801 - DNA, 21 bp, Artificial Sequence
  primer
cttgggtgtgagggtaagcac

SEQ ID NO: 23802 - DNA, 37 bp, Artificial Sequence
  primer
gtaaaacgacggccagtgagatcaacgtcatggaggc

SEQ ID NO: 23803 - DNA, 22 bp, Artificial Sequence
  primer
gggatgaccacctctcctttag

SEQ ID NO: 23804 - DNA, 21 bp, Artificial Sequence
  primer
tcttgagttcccatctttccc

SEQ ID NO: 23805 - DNA, 21 bp, Artificial Sequence
  primer
cagacttgatgcctggacttg

SEQ ID NO: 23806 - DNA, 38 bp, Artificial Sequence
  primer
gtaaaacgacggccagtgaactctgggtggaagtttgg

SEQ ID NO: 23807 - DNA, 21 bp, Artificial Sequence
  primer
ctgctggagagggtgagattg

SEQ ID NO: 23808 - DNA, 38 bp, Artificial Sequence
  primer
gtaaaacgacggccagtagagaggctggtatggagcag

SEQ ID NO: 23809 - DNA, 38 bp, Artificial Sequence
  primer
gtaaaacgacggccagtaagcctggtgaagaggaagag

SEQ ID NO: 23810 - DNA, 38 bp, Artificial Sequence
  primer
gtaaaacgacggccagtgttgcctctggcaagctattg

SEQ ID NO: 23811 - DNA, 39 bp, Artificial Sequence
  primer
gtaaaacgacggccagttccctcataccctctctgtctg

SEQ ID NO: 23812 - DNA, 24 bp, Artificial Sequence
  primer
aaaggaatttgaccaagaagtcat

SEQ ID NO: 23813 - DNA, 38 bp, Artificial Sequence
  primer
gtaaaacgacggccagttgtcccagttcataacacacg

SEQ ID NO: 23814 - DNA, 40 bp, Artificial Sequence
  primer
gtaaaacgacggccagtgaaaggcatgatatttaatggga

SEQ ID NO: 23815 - DNA, 45 bp, Artificial Sequence
  primer
gtaaaacgacggccagtagatagcagtttcactcatatttctgtt

SEQ ID NO: 23816 - DNA, 21 bp, Artificial Sequence
  primer
atcacgccagtatgatccagc

SEQ ID NO: 23817 - DNA, 44 bp, Artificial Sequence
  primer
gtaaaacgacggccagtttataatttcaaagccagacatgatac

SEQ ID NO: 23818 - DNA, 23 bp, Artificial Sequence
  primer
tctgtgaactccttaagcgtttg

SEQ ID NO: 23819 - DNA, 38 bp, Artificial Sequence
  primer
gtaaaacgacggccagtacatggcttgcatcgtaattc

SEQ ID NO: 23820 - DNA, 23 bp, Artificial Sequence
  primer
aagcagcaaacagaaagggttac

SEQ ID NO: 23821 - DNA, 38 bp, Artificial Sequence
  primer
gtaaaacgacggccagtacaaggaaggagtaggtcggg

SEQ ID NO: 23822 - DNA, 38 bp, Artificial Sequence
  primer
gtaaaacgacggccagtagagaaagacgacgaaatcgg

SEQ ID NO: 23823 - DNA, 24 bp, Artificial Sequence
  primer
aaggaaacgagaaagtgaaagaac

SEQ ID NO: 23824 - DNA, 35 bp, Artificial Sequence
  primer
gtaaaacgacggccagtccaccttgggccagagac

SEQ ID NO: 23825 - DNA, 41 bp, Artificial Sequence
  primer
gtaaaacgacggccagttttgtggtgaaacagtaacctcag

SEQ ID NO: 23826 - DNA, 24 bp, Artificial Sequence
  primer
aacatacagtcctcctgaatgtcc

SEQ ID NO: 23827 - DNA, 18 bp, Artificial Sequence
  primer
agtgagccgtgatggtgc

SEQ ID NO: 23828 - DNA, 43 bp, Artificial Sequence
  primer
gtaaaacgacggccagtttccttaccaaagcagttctaagttt

SEQ ID NO: 23829 - DNA, 40 bp, Artificial Sequence
  primer
gtaaaacgacggccagtccagaatgtttcaacatgtttcc

SEQ ID NO: 23830 - DNA, 38 bp, Artificial Sequence
  primer
gtaaaacgacggccagttaggtatggtgcgtgaaggag

SEQ ID NO: 23831 - DNA, 42 bp, Artificial Sequence
  primer
gtaaaacgacggccagtcccgagtacataatacactgctaaa

SEQ ID NO: 23832 - DNA, 44 bp, Artificial Sequence
  primer
gtaaaacgacggccagtaggaaagtaatggctagaaacagttag

SEQ ID NO: 23833 - DNA, 41 bp, Artificial Sequence
  primer
gtaaaacgacggccagtaaacacacatatgatcacacaaca

SEQ ID NO: 23834 - DNA, 20 bp, Artificial Sequence
  primer
tttgtttatgccttggctgg

SEQ ID NO: 23835 - DNA, 19 bp, Artificial Sequence
  primer
tcacatccagggcacagag

SEQ ID NO: 23836 - DNA, 24 bp, Artificial Sequence
  primer
gcatataagatatggcatgtgctc

SEQ ID NO: 23837 - DNA, 38 bp, Artificial Sequence
  primer
gtaaaacgacggccagtcctggcctaggaggtaagacc

SEQ ID NO: 23838 - DNA, 38 bp, Artificial Sequence
  primer
gtaaaacgacggccagtactgcggatcagactgttgac

SEQ ID NO: 23839 - DNA, 21 bp, Artificial Sequence
  primer
agcctttgccttgggtttatc

SEQ ID NO: 23840 - DNA, 20 bp, Artificial Sequence
  primer
ccaaagcttgtcaccagacc

SEQ ID NO: 23841 - DNA, 21 bp, Artificial Sequence
  primer
tgtgcttcgttgaatctgtgg

SEQ ID NO: 23842 - DNA, 38 bp, Artificial Sequence
  primer
gtaaaacgacggccagtctttgacggtcctgagctttc

SEQ ID NO: 23843 - DNA, 38 bp, Artificial Sequence
  primer
gtaaaacgacggccagttgtgtaatctgaagcactgcg

SEQ ID NO: 23844 - DNA, 21 bp, Artificial Sequence
  primer
cctccggagacgatcttacag

SEQ ID NO: 23845 - DNA, 39 bp, Artificial Sequence
  primer
gtaaaacgacggccagtcactgactcctgagaaattcgg

SEQ ID NO: 23846 - DNA, 38 bp, Artificial Sequence
  primer
gtaaaacgacggccagttaccgtttaatgcattgtggg

SEQ ID NO: 23847 - DNA, 22 bp, Artificial Sequence
  primer
ttatatgttaacccagggcacc

SEQ ID NO: 23848 - DNA, 40 bp, Artificial Sequence
  primer
gtaaaacgacggccagtaagagacttgtggtgtaacccag

SEQ ID NO: 23849 - DNA, 21 bp, Artificial Sequence
  primer
ggaggaataccctcattctgg

SEQ ID NO: 23850 - DNA, 35 bp, Artificial Sequence
  primer
gtaaaacgacggccagttttaccgggaggaccagg

SEQ ID NO: 23851 - DNA, 21 bp, Artificial Sequence
  primer
ttcccatgccacactatatgc

SEQ ID NO: 23852 - DNA, 36 bp, Artificial Sequence
  primer
gtaaaacgacggccagtacagtcccagcgacagacc

SEQ ID NO: 23853 - DNA, 19 bp, Artificial Sequence
  primer
gtcgtccagggccagatag

SEQ ID NO: 23854 - DNA, 21 bp, Artificial Sequence
  primer
agcctgcacctcctaaagatg

SEQ ID NO: 23855 - DNA, 38 bp, Artificial Sequence
  primer
gtaaaacgacggccagtatcgattcgcaaaggaacaag

SEQ ID NO: 23856 - DNA, 38 bp, Artificial Sequence
  primer
gtaaaacgacggccagtcctacacggagagtagcggtg

SEQ ID NO: 23857 - DNA, 37 bp, Artificial Sequence
  primer
gtaaaacgacggccagtgcagagtggagaagccagtg

SEQ ID NO: 23858 - DNA, 21 bp, Artificial Sequence
  primer
tcttctccttgctaggcctcc

SEQ ID NO: 23859 - DNA, 21 bp, Artificial Sequence
  primer
agagtctggcacacagtgctc

SEQ ID NO: 23860 - DNA, 38 bp, Artificial Sequence
  primer
gtaaaacgacggccagttgccaccaacttgactgaatc

SEQ ID NO: 23861 - DNA, 38 bp, Artificial Sequence
  primer
gtaaaacgacggccagtacagaagcacctagggaatgg

SEQ ID NO: 23862 - DNA, 21 bp, Artificial Sequence
  primer
gtgtatgcccagatcttcagg

SEQ ID NO: 23863 - DNA, 21 bp, Artificial Sequence
  primer
tgattaagcaattctgctgcc

SEQ ID NO: 23864 - DNA, 38 bp, Artificial Sequence
  primer
gtaaaacgacggccagtcataaacatgtccgcaccaag

SEQ ID NO: 23865 - DNA, 21 bp, Artificial Sequence
  primer
agacactccagggaagacagg

SEQ ID NO: 23866 - DNA, 21 bp, Artificial Sequence
  primer
caaagtaggcctgaggcagag

SEQ ID NO: 23867 - DNA, 38 bp, Artificial Sequence
  primer
gtaaaacgacggccagtgtgtgtacccactcgttggag

SEQ ID NO: 23868 - DNA, 38 bp, Artificial Sequence
  primer
gtaaaacgacggccagtgtggttgtacagggcaatcag

SEQ ID NO: 23869 - DNA, 19 bp, Artificial Sequence
  primer
ggtgccgggagaggtagtc

SEQ ID NO: 23870 - DNA, 40 bp, Artificial Sequence
  primer
gtaaaacgacggccagtccctattcccttcttcagtgttg

SEQ ID NO: 23871 - DNA, 38 bp, Artificial Sequence
  primer
gtaaaacgacggccagtcagtgtggaaagggcaatatg

SEQ ID NO: 23872 - DNA, 20 bp, Artificial Sequence
  primer
aactcctaccatggttgccc

SEQ ID NO: 23873 - DNA, 38 bp, Artificial Sequence
  primer
gtaaaacgacggccagtaataaagactccgagaggcgg

SEQ ID NO: 23874 - DNA, 38 bp, Artificial Sequence
  primer
gtaaaacgacggccagtgccttcagtgttaaacctggg

SEQ ID NO: 23875 - DNA, 21 bp, Artificial Sequence
  primer
gtaaagggaggacctctgtgg

SEQ ID NO: 23876 - DNA, 37 bp, Artificial Sequence
  primer
gtaaaacgacggccagtctcaaagacagttcagcccg

SEQ ID NO: 23877 - DNA, 23 bp, Artificial Sequence
  primer
tgttattggatgctaggagttcg

SEQ ID NO: 23878 - DNA, 38 bp, Artificial Sequence
  primer
gtaaaacgacggccagttctattcccttcccaggcttc

SEQ ID NO: 23879 - DNA, 39 bp, Artificial Sequence
  primer
gtaaaacgacggccagtcacacaatgaaatcacccaatg

SEQ ID NO: 23880 - DNA, 21 bp, Artificial Sequence
  primer
tttgcccatcaacatcgtaag

SEQ ID NO: 23881 - DNA, 38 bp, Artificial Sequence
  primer
gtaaaacgacggccagtcaggaggaactgtggtgtcag

SEQ ID NO: 23882 - DNA, 21 bp, Artificial Sequence
  primer
agcttgggtgacagagtgaga

SEQ ID NO: 23883 - DNA, 39 bp, Artificial Sequence
  primer
gtaaaacgacggccagtgaccaggacctgagttgcatag

SEQ ID NO: 23884 - DNA, 23 bp, Artificial Sequence
  primer
gctagactccatctcaagcctgt

SEQ ID NO: 23885 - DNA, 39 bp, Artificial Sequence
  primer
gtaaaacgacggccagtccattccttagaagccagtttg

SEQ ID NO: 23886 - DNA, 38 bp, Artificial Sequence
  primer
gtaaaacgacggccagtgacagggcacaacctaagcac

SEQ ID NO: 23887 - DNA, 38 bp, Artificial Sequence
  primer
gtaaaacgacggccagtagtcctaggtagggctgggtg

SEQ ID NO: 23888 - DNA, 38 bp, Artificial Sequence
  primer
gtaaaacgacggccagtgacaaagggaaggatgtcagg

SEQ ID NO: 23889 - DNA, 38 bp, Artificial Sequence
  primer
gtaaaacgacggccagtatgcctgtctgtctgtcctcc

SEQ ID NO: 23890 - DNA, 38 bp, Artificial Sequence
  primer
gtaaaacgacggccagtcctgatgcttcttacttcgcc

SEQ ID NO: 23891 - DNA, 27 bp, Artificial Sequence
  primer
ccatacaaacggaagttaatttctagg

SEQ ID NO: 23892 - DNA, 26 bp, Artificial Sequence
  primer
ttgtcaagaattgctttagtatgtcc

SEQ ID NO: 23893 - DNA, 22 bp, Artificial Sequence
  primer
ttcatattcaacacctgggatg

SEQ ID NO: 23894 - DNA, 21 bp, Artificial Sequence
  primer
agaattctgccattgtggagc

SEQ ID NO: 23895 - DNA, 40 bp, Artificial Sequence
  primer
gtaaaacgacggccagtggctaaatgatgatttgtcaggg

SEQ ID NO: 23896 - DNA, 24 bp, Artificial Sequence
  primer
gacataccagctttccaagaagtc

SEQ ID NO: 23897 - DNA, 20 bp, Artificial Sequence
  primer
tctggcaagtgaggtggaag

SEQ ID NO: 23898 - DNA, 38 bp, Artificial Sequence
  primer
gtaaaacgacggccagtgaagaatggcgattcgttgac

SEQ ID NO: 23899 - DNA, 21 bp, Artificial Sequence
  primer
atcagcgaatgacaaagggag

SEQ ID NO: 23900 - DNA, 38 bp, Artificial Sequence
  primer
gtaaaacgacggccagtgaaggaacgaatgaatgaccc

SEQ ID NO: 23901 - DNA, 21 bp, Artificial Sequence
  primer
aagtgctctttctcctgcacc

SEQ ID NO: 23902 - DNA, 38 bp, Artificial Sequence
  primer
gtaaaacgacggccagttcacaacttggaatgtcctgc

SEQ ID NO: 23903 - DNA, 40 bp, Artificial Sequence
  primer
gtaaaacgacggccagtcacaggacaataggcaattcatc

SEQ ID NO: 23904 - DNA, 38 bp, Artificial Sequence
  primer
gtaaaacgacggccagtattgtttgggcttagaccagg

SEQ ID NO: 23905 - DNA, 21 bp, Artificial Sequence
  primer
tacttgaccttgaatgctggg

SEQ ID NO: 23906 - DNA, 38 bp, Artificial Sequence
  primer
gtaaaacgacggccagtgcatttcttcgcttctcattc

SEQ ID NO: 23907 - DNA, 28 bp, Artificial Sequence
  primer
gtcttcatgttaaagaatagctcatcaa

SEQ ID NO: 23908 - DNA, 38 bp, Artificial Sequence
  primer
gtaaaacgacggccagttgaaccagccaagactgaaag

SEQ ID NO: 23909 - DNA, 23 bp, Artificial Sequence
  primer
tgaagagctctgtgctaccattg

SEQ ID NO: 23910 - DNA, 44 bp, Artificial Sequence
  primer
gtaaaacgacggccagtcagaaagctgataaagtcagtgagaag

SEQ ID NO: 23911 - DNA, 41 bp, Artificial Sequence
  primer
gtaaaacgacggccagtaaatcatttctttggtggcataag

SEQ ID NO: 23912 - DNA, 44 bp, Artificial Sequence
  primer
gtaaaacgacggccagtaacagcattgaatgacttaacaataaa

SEQ ID NO: 23913 - DNA, 21 bp, Artificial Sequence
  primer
tagacctaattccaagcgtgc

SEQ ID NO: 23914 - DNA, 39 bp, Artificial Sequence
  primer
gtaaaacgacggccagtcacagagtactcaccctctgcc

SEQ ID NO: 23915 - DNA, 38 bp, Artificial Sequence
  primer
gtaaaacgacggccagtctgccaagagattggagtctg

SEQ ID NO: 23916 - DNA, 18 bp, Artificial Sequence
  primer
catacgcagcctccttgg

SEQ ID NO: 23917 - DNA, 38 bp, Artificial Sequence
  primer
gtaaaacgacggccagtattacagatgacgaccctggc

SEQ ID NO: 23918 - DNA, 20 bp, Artificial Sequence
  primer
agcatctggacattcatggg

SEQ ID NO: 23919 - DNA, 20 bp, Artificial Sequence
  primer
ctcttccctgactttgtgcg

SEQ ID NO: 23920 - DNA, 38 bp, Artificial Sequence
  primer
gtaaaacgacggccagttgaaagtcatgctcatggtcc

SEQ ID NO: 23921 - DNA, 21 bp, Artificial Sequence
  primer
gttggtttcgtactgtcaccc

SEQ ID NO: 23922 - DNA, 38 bp, Artificial Sequence
  primer
gtaaaacgacggccagtatgaagctttgtgcctttcgt

SEQ ID NO: 23923 - DNA, 38 bp, Artificial Sequence
  primer
gtaaaacgacggccagtgcagcaggtggtaagaaatcc

SEQ ID NO: 23924 - DNA, 44 bp, Artificial Sequence
  primer
gtaaaacgacggccagttttaccatacattccttgattagaaca

SEQ ID NO: 23925 - DNA, 23 bp, Artificial Sequence
  primer
gctagaacctaatttgtcggtgc

SEQ ID NO: 23926 - DNA, 40 bp, Artificial Sequence
  primer
gtaaaacgacggccagtgatacacatatgccattgggaac

SEQ ID NO: 23927 - DNA, 38 bp, Artificial Sequence
  primer
gtaaaacgacggccagtggtcttcactctgaaccaccc

SEQ ID NO: 23928 - DNA, 21 bp, Artificial Sequence
  primer
aggtggacctgaacttgaagc

SEQ ID NO: 23929 - DNA, 21 bp, Artificial Sequence
  primer
tccagcagttactgaacgacc

SEQ ID NO: 23930 - DNA, 23 bp, Artificial Sequence
  primer
aaatggtctccacaagatgtctg

SEQ ID NO: 23931 - DNA, 38 bp, Artificial Sequence
  primer
gtaaaacgacggccagtatcttgggaagagataccggg

SEQ ID NO: 23932 - DNA, 38 bp, Artificial Sequence
  primer
gtaaaacgacggccagttattcctaccctgaaggccac

SEQ ID NO: 23933 - DNA, 37 bp, Artificial Sequence
  primer
gtaaaacgacggccagtaccctaaggtggatcaaggg

SEQ ID NO: 23934 - DNA, 38 bp, Artificial Sequence
  primer
gtaaaacgacggccagttcacacatccctaccctcaag

SEQ ID NO: 23935 - DNA, 38 bp, Artificial Sequence
  primer
gtaaaacgacggccagtgaaccttcctggtggagtctg

SEQ ID NO: 23936 - DNA, 21 bp, Artificial Sequence
  primer
ttatttcgttcgtggtttccg

SEQ ID NO: 23937 - DNA, 21 bp, Artificial Sequence
  primer
cacgagcaaagatcaaagtgg

SEQ ID NO: 23938 - DNA, 38 bp, Artificial Sequence
  primer
gtaaaacgacggccagtaatgttccttctggcctttcc

SEQ ID NO: 23939 - DNA, 38 bp, Artificial Sequence
  primer
gtaaaacgacggccagtgttgccacagaccacattagg

SEQ ID NO: 23940 - DNA, 38 bp, Artificial Sequence
  primer
gtaaaacgacggccagtcctggtctgtcttcatctccc

SEQ ID NO: 23941 - DNA, 22 bp, Artificial Sequence
  primer
tgctttatcttccctttccctc

SEQ ID NO: 23942 - DNA, 22 bp, Artificial Sequence
  primer
tctcttacctctccagtgctgc

SEQ ID NO: 23943 - DNA, 38 bp, Artificial Sequence
  primer
gtaaaacgacggccagtctctcacccaaggcttcactc

SEQ ID NO: 23944 - DNA, 38 bp, Artificial Sequence
  primer
gtaaaacgacggccagttagtgcttggtttccaacagc

SEQ ID NO: 23945 - DNA, 19 bp, Artificial Sequence
  primer
ctaaggcgggaaagttcgg

SEQ ID NO: 23946 - DNA, 20 bp, Artificial Sequence
  primer
attctcgtacggagggatgc

SEQ ID NO: 23947 - DNA, 21 bp, Artificial Sequence
  primer
cactagtcccactcccagagg

SEQ ID NO: 23948 - DNA, 30 bp, Artificial Sequence
  primer
cacaccagagatcttcaattatagttacat

SEQ ID NO: 23949 - DNA, 19 bp, Artificial Sequence
  primer
gccaccatgccaggataac

SEQ ID NO: 23950 - DNA, 26 bp, Artificial Sequence
  primer
aacagctgaaagaaaggtttaaagac

SEQ ID NO: 23951 - DNA, 37 bp, Artificial Sequence
  primer
gtaaaacgacggccagtaaataacagtcccgcccttc

SEQ ID NO: 23952 - DNA, 37 bp, Artificial Sequence
  primer
gtaaaacgacggccagtgggcatttagggagttaggg

SEQ ID NO: 23953 - DNA, 21 bp, Artificial Sequence
  primer
gaagggttggttggtacttgc

SEQ ID NO: 23954 - DNA, 20 bp, Artificial Sequence
  primer
gggcttggatcagaaaccag

SEQ ID NO: 23955 - DNA, 23 bp, Artificial Sequence
  primer
ttggagagaatagcaaacatcca

SEQ ID NO: 23956 - DNA, 22 bp, Artificial Sequence
  primer
tgttcaactaatggctggagag

SEQ ID NO: 23957 - DNA, 41 bp, Artificial Sequence
  primer
gtaaaacgacggccagttcccacagtcaattatgtcatagc

SEQ ID NO: 23958 - DNA, 24 bp, Artificial Sequence
  primer
tgggttaagagctgtgtttatttg

SEQ ID NO: 23959 - DNA, 44 bp, Artificial Sequence
  primer
gtaaaacgacggccagtagtagcatattactgttgaaagtggtg

SEQ ID NO: 23960 - DNA, 38 bp, Artificial Sequence
  primer
gtaaaacgacggccagtctggatgccaatgtgaattgt

SEQ ID NO: 23961 - DNA, 38 bp, Artificial Sequence
  primer
gtaaaacgacggccagttacggacccacttgtgttagg

SEQ ID NO: 23962 - DNA, 36 bp, Artificial Sequence
  primer
gtaaaacgacggccagtgagtccgagtgggatttcg

SEQ ID NO: 23963 - DNA, 22 bp, Artificial Sequence
  primer
tttgacactgccatgtgttatg

SEQ ID NO: 23964 - DNA, 25 bp, Artificial Sequence
  primer
ttgctctatcctaacctcagtatgc

SEQ ID NO: 23965 - DNA, 21 bp, Artificial Sequence
  primer
acatgccagctgaattccata

SEQ ID NO: 23966 - DNA, 21 bp, Artificial Sequence
  primer
taacggaaataatcctgtgcg

SEQ ID NO: 23967 - DNA, 37 bp, Artificial Sequence
  primer
gtaaaacgacggccagtaagccagagtgggaaactgg

SEQ ID NO: 23968 - DNA, 21 bp, Artificial Sequence
  primer
gtagctacgtgccttcgtttg

SEQ ID NO: 23969 - DNA, 21 bp, Artificial Sequence
  primer
ggaacagttatttggtgccag

SEQ ID NO: 23970 - DNA, 38 bp, Artificial Sequence
  primer
gtaaaacgacggccagtatgtctccagagcgggttatc

SEQ ID NO: 23971 - DNA, 38 bp, Artificial Sequence
  primer
gtaaaacgacggccagtcactatcacagcctctgctgc

SEQ ID NO: 23972 - DNA, 39 bp, Artificial Sequence
  primer
gtaaaacgacggccagtttggaagataactgggaccttg

SEQ ID NO: 23973 - DNA, 22 bp, Artificial Sequence
  primer
caggagaatggtgtgaacttgg

SEQ ID NO: 23974 - DNA, 21 bp, Artificial Sequence
  primer
aagcctgtgacagagcaagac

SEQ ID NO: 23975 - DNA, 39 bp, Artificial Sequence
  primer
gtaaaacgacggccagttgaaagcaattaaaggtgggag

SEQ ID NO: 23976 - DNA, 38 bp, Artificial Sequence
  primer
gtaaaacgacggccagtggcttggagttactgacctgg

SEQ ID NO: 23977 - DNA, 38 bp, Artificial Sequence
  primer
gtaaaacgacggccagtctcagtcccggtagctcttct

SEQ ID NO: 23978 - DNA, 21 bp, Artificial Sequence
  primer
ggctgacagaagtgaaagtgc

SEQ ID NO: 23979 - DNA, 37 bp, Artificial Sequence
  primer
gtaaaacgacggccagtatgggcctccttaatggctc

SEQ ID NO: 23980 - DNA, 21 bp, Artificial Sequence
  primer
aattgtccatgtttccttggc

SEQ ID NO: 23981 - DNA, 37 bp, Artificial Sequence
  primer
gtaaaacgacggccagtctaaggcatggcaggttgag

SEQ ID NO: 23982 - DNA, 37 bp, Artificial Sequence
  primer
gtaaaacgacggccagtgacaagggagagtgggtgtg

SEQ ID NO: 23983 - DNA, 38 bp, Artificial Sequence
  primer
gtaaaacgacggccagtggcgagagacacacaaagaac

SEQ ID NO: 23984 - DNA, 20 bp, Artificial Sequence
  primer
aaggtttagtccggcaatgg

SEQ ID NO: 23985 - DNA, 38 bp, Artificial Sequence
  primer
gtaaaacgacggccagtgaacctctcctggtcctgttg

SEQ ID NO: 23986 - DNA, 39 bp, Artificial Sequence
  primer
gtaaaacgacggccagtgaggaagaaagagatccttggc

SEQ ID NO: 23987 - DNA, 38 bp, Artificial Sequence
  primer
gtaaaacgacggccagttggatggtaatttatcgtggc

SEQ ID NO: 23988 - DNA, 39 bp, Artificial Sequence
  primer
gtaaaacgacggccagttgcaaaccttgtggttaatgag

SEQ ID NO: 23989 - DNA, 41 bp, Artificial Sequence
  primer
gtaaaacgacggccagttgcatacaagctaaatgtattccc

SEQ ID NO: 23990 - DNA, 38 bp, Artificial Sequence
  primer
gtaaaacgacggccagtatttggagtcaacttgcccac

SEQ ID NO: 23991 - DNA, 20 bp, Artificial Sequence
  primer
ggcatgtggatatgtctgcc

SEQ ID NO: 23992 - DNA, 24 bp, Artificial Sequence
  primer
tcagttgctctaccgagagttatg

SEQ ID NO: 23993 - DNA, 39 bp, Artificial Sequence
  primer
gtaaaacgacggccagtcgtcttggacatgttctctgtg

SEQ ID NO: 23994 - DNA, 39 bp, Artificial Sequence
  primer
gtaaaacgacggccagtaaagactaattggctcctgctg

SEQ ID NO: 23995 - DNA, 38 bp, Artificial Sequence
  primer
gtaaaacgacggccagtgaacctctcaatgtgcagcag

SEQ ID NO: 23996 - DNA, 21 bp, Artificial Sequence
  primer
cgcagagggtacagagagtgg

SEQ ID NO: 23997 - DNA, 38 bp, Artificial Sequence
  primer
gtaaaacgacggccagtcctgagagagacatgcgagac

SEQ ID NO: 23998 - DNA, 21 bp, Artificial Sequence
  primer
gcaggtagattccatgaaggc

SEQ ID NO: 23999 - DNA, 21 bp, Artificial Sequence
  primer
tgggttggaattcaaagaagg

SEQ ID NO: 24000 - DNA, 22 bp, Artificial Sequence
  primer
tgccatggtaatgctagtgttg

SEQ ID NO: 24001 - DNA, 41 bp, Artificial Sequence
  primer
gtaaaacgacggccagtggtttaaatagcctcctaatgtgc

SEQ ID NO: 24002 - DNA, 38 bp, Artificial Sequence
  primer
gtaaaacgacggccagtctcaggttcctaaagttgccg

SEQ ID NO: 24003 - DNA, 21 bp, Artificial Sequence
  primer
ctcagaggcagaggcaagaag

SEQ ID NO: 24004 - DNA, 21 bp, Artificial Sequence
  primer
tgaaatcccaatcgttgtctg

SEQ ID NO: 24005 - DNA, 22 bp, Artificial Sequence
  primer
aaacctagccattgctttcaac

SEQ ID NO: 24006 - DNA, 40 bp, Artificial Sequence
  primer
gtaaaacgacggccagtttggtgaatcaatatcaggaacc

SEQ ID NO: 24007 - DNA, 21 bp, Artificial Sequence
  primer
ttgccatatccaatccagttt

SEQ ID NO: 24008 - DNA, 21 bp, Artificial Sequence
  primer
ctcagacccttaacttgctgc

SEQ ID NO: 24009 - DNA, 37 bp, Artificial Sequence
  primer
gtaaaacgacggccagtacccaggaaacacatgcctc

SEQ ID NO: 24010 - DNA, 38 bp, Artificial Sequence
  primer
gtaaaacgacggccagttcctgctgtcattgagcctac

SEQ ID NO: 24011 - DNA, 28 bp, Artificial Sequence
  primer
agggagaattaacttctttacaaatgac

SEQ ID NO: 24012 - DNA, 44 bp, Artificial Sequence
  primer
gtaaaacgacggccagtggtaatgtttagaatgagctactgctg

SEQ ID NO: 24013 - DNA, 37 bp, Artificial Sequence
  primer
gtaaaacgacggccagtccatgcccagccagaataac

SEQ ID NO: 24014 - DNA, 36 bp, Artificial Sequence
  primer
gtaaaacgacggccagtccctcaccctcttctttcg

SEQ ID NO: 24015 - DNA, 43 bp, Artificial Sequence
  primer
gtaaaacgacggccagtggtctactaaataatgttggaaagcc

SEQ ID NO: 24016 - DNA, 21 bp, Artificial Sequence
  primer
cgtcaccagctgatggaatta

SEQ ID NO: 24017 - DNA, 39 bp, Artificial Sequence
  primer
gtaaaacgacggccagtagcctttatgtcaggtcatgtg

SEQ ID NO: 24018 - DNA, 38 bp, Artificial Sequence
  primer
gtaaaacgacggccagtacgatatggagaacagcctgc

SEQ ID NO: 24019 - DNA, 21 bp, Artificial Sequence
  primer
atttggcctctgggtttgttc

SEQ ID NO: 24020 - DNA, 41 bp, Artificial Sequence
  primer
gtaaaacgacggccagtcttgaatgtgtaaagtaccaaggc

SEQ ID NO: 24021 - DNA, 37 bp, Artificial Sequence
  primer
gtaaaacgacggccagttggaaggtcaggcaaagatg

SEQ ID NO: 24022 - DNA, 37 bp, Artificial Sequence
  primer
gtaaaacgacggccagtctgccggtatggcttacaac

SEQ ID NO: 24023 - DNA, 23 bp, Artificial Sequence
  primer
gcagacaatattaggcagcagtg

SEQ ID NO: 24024 - DNA, 43 bp, Artificial Sequence
  primer
gtaaaacgacggccagtgaatcctctaatgaacaagacagagg

SEQ ID NO: 24025 - DNA, 19 bp, Artificial Sequence
  primer
agcctgggtgacagagacc

SEQ ID NO: 24026 - DNA, 21 bp, Artificial Sequence
  primer
tgaccacggcactagatgatt

SEQ ID NO: 24027 - DNA, 38 bp, Artificial Sequence
  primer
gtaaaacgacggccagtttctgattcttaacctgggca

SEQ ID NO: 24028 - DNA, 41 bp, Artificial Sequence
  primer
gtaaaacgacggccagtcacattgatgctgaatgatagagg

SEQ ID NO: 24029 - DNA, 39 bp, Artificial Sequence
  primer
gtaaaacgacggccagttgagaatgggtatgattgggtg

SEQ ID NO: 24030 - DNA, 21 bp, Artificial Sequence
  primer
ctgggatttgcagcttaccat

SEQ ID NO: 24031 - DNA, 21 bp, Artificial Sequence
  primer
ttgggaaatttcaaggtaggg

SEQ ID NO: 24032 - DNA, 38 bp, Artificial Sequence
  primer
gtaaaacgacggccagtgccttcctcttgatgtatgcc

SEQ ID NO: 24033 - DNA, 22 bp, Artificial Sequence
  primer
cagaaatgcataatgtcttggc

SEQ ID NO: 24034 - DNA, 22 bp, Artificial Sequence
  primer
cacttgttataattggccaggg

SEQ ID NO: 24035 - DNA, 22 bp, Artificial Sequence
  primer
caaggagttgcagggatgttag

SEQ ID NO: 24036 - DNA, 21 bp, Artificial Sequence
  primer
gggcaaggatgttcataagtg

SEQ ID NO: 24037 - DNA, 38 bp, Artificial Sequence
  primer
gtaaaacgacggccagtaatgtaaagggtatgggtgcg

SEQ ID NO: 24038 - DNA, 38 bp, Artificial Sequence
  primer
gtaaaacgacggccagtaatttggtcccatgtgctttc

SEQ ID NO: 24039 - DNA, 21 bp, Artificial Sequence
  primer
gtattgcccaggcttaactcc

SEQ ID NO: 24040 - DNA, 26 bp, Artificial Sequence
  primer
cctatgtttgaagatagcatggtaaa

SEQ ID NO: 24041 - DNA, 42 bp, Artificial Sequence
  primer
gtaaaacgacggccagtcatagttgattgccacgtagatacc

SEQ ID NO: 24042 - DNA, 36 bp, Artificial Sequence
  primer
gtaaaacgacggccagtggatggatgatgggcagac

SEQ ID NO: 24043 - DNA, 21 bp, Artificial Sequence
  primer
cttcctcctcctcctcctctg

SEQ ID NO: 24044 - DNA, 38 bp, Artificial Sequence
  primer
gtaaaacgacggccagtattgaggagctacaaccctgc

SEQ ID NO: 24045 - DNA, 21 bp, Artificial Sequence
  primer
tgccctgagttcattcacttg

SEQ ID NO: 24046 - DNA, 23 bp, Artificial Sequence
  primer
cgactcattctaaagtgaccctg

SEQ ID NO: 24047 - DNA, 39 bp, Artificial Sequence
  primer
gtaaaacgacggccagttgtgcatgtatttcgattctgc

SEQ ID NO: 24048 - DNA, 38 bp, Artificial Sequence
  primer
gtaaaacgacggccagtgggcaacacagaccatagaag

SEQ ID NO: 24049 - DNA, 23 bp, Artificial Sequence
  primer
gcattgtgttcttaaagggactt

SEQ ID NO: 24050 - DNA, 41 bp, Artificial Sequence
  primer
gtaaaacgacggccagtcatgaaggtacactttctactggg

SEQ ID NO: 24051 - DNA, 23 bp, Artificial Sequence
  primer
ttgctttacacaaacagcaactg

SEQ ID NO: 24052 - DNA, 38 bp, Artificial Sequence
  primer
gtaaaacgacggccagtctgacacagagtgtgcccttt

SEQ ID NO: 24053 - DNA, 21 bp, Artificial Sequence
  primer
tgtctcatttccgtaggaccg

SEQ ID NO: 24054 - DNA, 26 bp, Artificial Sequence
  primer
tttggagtcatactttctttctaggg

SEQ ID NO: 24055 - DNA, 24 bp, Artificial Sequence
  primer
aaattcacagatccagtgttgaag

SEQ ID NO: 24056 - DNA, 38 bp, Artificial Sequence
  primer
gtaaaacgacggccagtgcatggaaattggacacaatc

SEQ ID NO: 24057 - DNA, 41 bp, Artificial Sequence
  primer
gtaaaacgacggccagtgctttaagggctagaaaggtactg

SEQ ID NO: 24058 - DNA, 41 bp, Artificial Sequence
  primer
gtaaaacgacggccagttgtctagaagggaatgaagacagg

SEQ ID NO: 24059 - DNA, 21 bp, Artificial Sequence
  primer
tcctgattgcctcgtagtctg

SEQ ID NO: 24060 - DNA, 43 bp, Artificial Sequence
  primer
gtaaaacgacggccagttcttcctttggatattgagttgtatg

SEQ ID NO: 24061 - DNA, 40 bp, Artificial Sequence
  primer
gtaaaacgacggccagtcacagccaaacaaatcattaagc

SEQ ID NO: 24062 - DNA, 38 bp, Artificial Sequence
  primer
gtaaaacgacggccagttagacatctgtgcatgggtgg

SEQ ID NO: 24063 - DNA, 44 bp, Artificial Sequence
  primer
gtaaaacgacggccagtaagaaatcttatgggtagtgctatcag

SEQ ID NO: 24064 - DNA, 43 bp, Artificial Sequence
  primer
gtaaaacgacggccagtttaattgtaaacagggttaagctcag

SEQ ID NO: 24065 - DNA, 23 bp, Artificial Sequence
  primer
cagtcaaaggtcaaaggtcactg

SEQ ID NO: 24066 - DNA, 22 bp, Artificial Sequence
  primer
ttccagggaaattgtctctcag

SEQ ID NO: 24067 - DNA, 23 bp, Artificial Sequence
  primer
tggttgttacatcatgcattgtc

SEQ ID NO: 24068 - DNA, 40 bp, Artificial Sequence
  primer
gtaaaacgacggccagtccttgtaaaggcaaatttgagag

SEQ ID NO: 24069 - DNA, 21 bp, Artificial Sequence
  primer
ctgcacaggtaccctgaactt

SEQ ID NO: 24070 - DNA, 41 bp, Artificial Sequence
  primer
gtaaaacgacggccagtcaactgcagaatttatgagcaaga

SEQ ID NO: 24071 - DNA, 28 bp, Artificial Sequence
  primer
tgtaacaaacaattgatggtataagatg

SEQ ID NO: 24072 - DNA, 40 bp, Artificial Sequence
  primer
gtaaaacgacggccagtttctgtgatttaaggatgcattg

SEQ ID NO: 24073 - DNA, 36 bp, Artificial Sequence
  primer
gtaaaacgacggccagttttgggtcaatggctcttt

SEQ ID NO: 24074 - DNA, 43 bp, Artificial Sequence
  primer
gtaaaacgacggccagttgagagctaatctttcataagtgctc

SEQ ID NO: 24075 - DNA, 46 bp, Artificial Sequence
  primer
gtaaaacgacggccagtttcattgaatcttaaactgaataaagaca

SEQ ID NO: 24076 - DNA, 35 bp, Artificial Sequence
  primer
gtaaaacgacggccagtttgggagtctgaggtggg

SEQ ID NO: 24077 - DNA, 21 bp, Artificial Sequence
  primer
ctgcctgaagaagcgtcatac

SEQ ID NO: 24078 - DNA, 38 bp, Artificial Sequence
  primer
gtaaaacgacggccagttttgcagggaatctaagatgg

SEQ ID NO: 24079 - DNA, 22 bp, Artificial Sequence
  primer
gattccctaatcacctggaagg

SEQ ID NO: 24080 - DNA, 38 bp, Artificial Sequence
  primer
gtaaaacgacggccagtagcttaggaaggaaggttggc

SEQ ID NO: 24081 - DNA, 19 bp, Artificial Sequence
  primer
cactgaggctcgtctgcac

SEQ ID NO: 24082 - DNA, 38 bp, Artificial Sequence
  primer
gtaaaacgacggccagtcagcaacagcagggtaacaag

SEQ ID NO: 24083 - DNA, 22 bp, Artificial Sequence
  primer
gagggagctactggaaagaagg

SEQ ID NO: 24084 - DNA, 21 bp, Artificial Sequence
  primer
agaatttggaattggaatggg

SEQ ID NO: 24085 - DNA, 38 bp, Artificial Sequence
  primer
gtaaaacgacggccagtgctgtgtgaccttgacctctc

SEQ ID NO: 24086 - DNA, 25 bp, Artificial Sequence
  primer
ctgtgatgtgtatcctagtccaaag

SEQ ID NO: 24087 - DNA, 39 bp, Artificial Sequence
  primer
gtaaaacgacggccagtttgcttccaggatgtaacattg

SEQ ID NO: 24088 - DNA, 38 bp, Artificial Sequence
  primer
gtaaaacgacggccagttttgaacacgagctccagaag

SEQ ID NO: 24089 - DNA, 20 bp, Artificial Sequence
  primer
gagcagaacaagcgcatcac

SEQ ID NO: 24090 - DNA, 20 bp, Artificial Sequence
  primer
gagaaccgcgtgcttatgtc

SEQ ID NO: 24091 - DNA, 20 bp, Artificial Sequence
  primer
ggcagcagatgaaggacatc

SEQ ID NO: 24092 - DNA, 21 bp, Artificial Sequence
  primer
cttaagggagggtggaggttc

SEQ ID NO: 24093 - DNA, 47 bp, Artificial Sequence
  primer
gtaaaacgacggccagtaattaagttcataaagatacaactccacag

SEQ ID NO: 24094 - DNA, 21 bp, Artificial Sequence
  primer
tgcgcctcttcaaagtgttag

SEQ ID NO: 24095 - DNA, 39 bp, Artificial Sequence
  primer
gtaaaacgacggccagttcctgagactttgctgaagttg

SEQ ID NO: 24096 - DNA, 44 bp, Artificial Sequence
  primer
gtaaaacgacggccagttgcttgtaagcatctaaagtatgtgtg

SEQ ID NO: 24097 - DNA, 38 bp, Artificial Sequence
  primer
gtaaaacgacggccagtagaagtgggaagaaagccaag

SEQ ID NO: 24098 - DNA, 25 bp, Artificial Sequence
  primer
ttgaaggaactcctaggatagattg

SEQ ID NO: 24099 - DNA, 20 bp, Artificial Sequence
  primer
ttctctgtgtgcttgccaac

SEQ ID NO: 24100 - DNA, 37 bp, Artificial Sequence
  primer
gtaaaacgacggccagttcaaagtttggagcactgcc

SEQ ID NO: 24101 - DNA, 26 bp, Artificial Sequence
  primer
ttaattaaccctaaagaaagaggctg

SEQ ID NO: 24102 - DNA, 23 bp, Artificial Sequence
  primer
aacgttaaaccatcaattcaacc

SEQ ID NO: 24103 - DNA, 21 bp, Artificial Sequence
  primer
caatttccaccagtaggaggc

SEQ ID NO: 24104 - DNA, 38 bp, Artificial Sequence
  primer
gtaaaacgacggccagttattggctacagcttcatggc

SEQ ID NO: 24105 - DNA, 38 bp, Artificial Sequence
  primer
gtaaaacgacggccagttccctaaatggctttgctttc

SEQ ID NO: 24106 - DNA, 21 bp, Artificial Sequence
  primer
ctggactatgccaacaagctg

SEQ ID NO: 24107 - DNA, 38 bp, Artificial Sequence
  primer
gtaaaacgacggccagtgaggaagaaatggtgagcagg

SEQ ID NO: 24108 - DNA, 39 bp, Artificial Sequence
  primer
gtaaaacgacggccagtttgccaagcttgattaaattcc

SEQ ID NO: 24109 - DNA, 39 bp, Artificial Sequence
  primer
gtaaaacgacggccagttcccatttccaagaacagtttc

SEQ ID NO: 24110 - DNA, 40 bp, Artificial Sequence
  primer
gtaaaacgacggccagtggaagaaatcacaaggaccattc

SEQ ID NO: 24111 - DNA, 23 bp, Artificial Sequence
  primer
gcagtagcaaggaatcatcaaac

SEQ ID NO: 24112 - DNA, 38 bp, Artificial Sequence
  primer
gtaaaacgacggccagtagtatgggcttatgcgtgttg

SEQ ID NO: 24113 - DNA, 21 bp, Artificial Sequence
  primer
gaagcacctgaaggaaaccac

SEQ ID NO: 24114 - DNA, 38 bp, Artificial Sequence
  primer
gtaaaacgacggccagtggtgcatcagtcagagacgac

SEQ ID NO: 24115 - DNA, 21 bp, Artificial Sequence
  primer
tccattgaagaggacgtgttg

SEQ ID NO: 24116 - DNA, 44 bp, Artificial Sequence
  primer
gtaaaacgacggccagttgaacatataatttgtagcttgctttg

SEQ ID NO: 24117 - DNA, 21 bp, Artificial Sequence
  primer
ctttgcttccaaccgtttctc

SEQ ID NO: 24118 - DNA, 38 bp, Artificial Sequence
  primer
gtaaaacgacggccagttttggcacttagcagcttacg

SEQ ID NO: 24119 - DNA, 39 bp, Artificial Sequence
  primer
gtaaaacgacggccagtgcaatacaaggctagccaacac

SEQ ID NO: 24120 - DNA, 38 bp, Artificial Sequence
  primer
gtaaaacgacggccagtcaatgtgggtgaatcgcatag

SEQ ID NO: 24121 - DNA, 23 bp, Artificial Sequence
  primer
caaagtaagctttcctggtcttg

SEQ ID NO: 24122 - DNA, 42 bp, Artificial Sequence
  primer
gtaaaacgacggccagttggataaaccttctcttgttgagtg

SEQ ID NO: 24123 - DNA, 37 bp, Artificial Sequence
  primer
gtaaaacgacggccagtagagtcctggaaggctttgg

SEQ ID NO: 24124 - DNA, 42 bp, Artificial Sequence
  primer
gtaaaacgacggccagtgcaaatgatatcttcagagtgcaac

SEQ ID NO: 24125 - DNA, 23 bp, Artificial Sequence
  primer
tgatgccctgatctattatttcc

SEQ ID NO: 24126 - DNA, 21 bp, Artificial Sequence
  primer
ttgtgccagtgttgacagttc

SEQ ID NO: 24127 - DNA, 22 bp, Artificial Sequence
  primer
aaagggtaatttcctcctcctg

SEQ ID NO: 24128 - DNA, 39 bp, Artificial Sequence
  primer
gtaaaacgacggccagtccatcttgggagtgtgtgtatg

SEQ ID NO: 24129 - DNA, 21 bp, Artificial Sequence
  primer
tgaatgtggcctctaggtttg

SEQ ID NO: 24130 - DNA, 39 bp, Artificial Sequence
  primer
gtaaaacgacggccagttggttaggttgtcctcccatag

SEQ ID NO: 24131 - DNA, 43 bp, Artificial Sequence
  primer
gtaaaacgacggccagttgcgagtttatcatctccttactttc

SEQ ID NO: 24132 - DNA, 22 bp, Artificial Sequence
  primer
cagggatcctcacttccttagc

SEQ ID NO: 24133 - DNA, 40 bp, Artificial Sequence
  primer
gtaaaacgacggccagtaagcagagtattcttgctgttgg

SEQ ID NO: 24134 - DNA, 23 bp, Artificial Sequence
  primer
tgtgcccaggaattagctttatc

SEQ ID NO: 24135 - DNA, 38 bp, Artificial Sequence
  primer
gtaaaacgacggccagtgggcagcagctatacaaggtc

SEQ ID NO: 24136 - DNA, 25 bp, Artificial Sequence
  primer
aaagatagttggatggagatacagg

SEQ ID NO: 24137 - DNA, 22 bp, Artificial Sequence
  primer
ccgtttggtaactgacaggaag

SEQ ID NO: 24138 - DNA, 38 bp, Artificial Sequence
  primer
gtaaaacgacggccagtctcccaagattccgcaactac

SEQ ID NO: 24139 - DNA, 39 bp, Artificial Sequence
  primer
gtaaaacgacggccagtttccaactcggaagaacatagg

SEQ ID NO: 24140 - DNA, 38 bp, Artificial Sequence
  primer
gtaaaacgacggccagttttaatagggccagaagcacc

SEQ ID NO: 24141 - DNA, 21 bp, Artificial Sequence
  primer
ttcagccatgcctttgataag

SEQ ID NO: 24142 - DNA, 21 bp, Artificial Sequence
  primer
gcatgcctcagattgctacag

SEQ ID NO: 24143 - DNA, 39 bp, Artificial Sequence
  primer
gtaaaacgacggccagtttcctagtcacctcatccaacc

SEQ ID NO: 24144 - DNA, 43 bp, Artificial Sequence
  primer
gtaaaacgacggccagtacgtatctagggtctattcttcattt

SEQ ID NO: 24145 - DNA, 38 bp, Artificial Sequence
  primer
gtaaaacgacggccagttggaagacattctgctgcttc

SEQ ID NO: 24146 - DNA, 22 bp, Artificial Sequence
  primer
gaaaccgaatcaggagttatgg

SEQ ID NO: 24147 - DNA, 25 bp, Artificial Sequence
  primer
ttacacttcatgtggcaataacttt

SEQ ID NO: 24148 - DNA, 22 bp, Artificial Sequence
  primer
tcttggcatgtaatgaaacctg

SEQ ID NO: 24149 - DNA, 38 bp, Artificial Sequence
  primer
gtaaaacgacggccagtattccatctgatgaagacccg

SEQ ID NO: 24150 - DNA, 23 bp, Artificial Sequence
  primer
tgaacatatgcagatagatgccc

SEQ ID NO: 24151 - DNA, 38 bp, Artificial Sequence
  primer
gtaaaacgacggccagtaagcccaccactgtttcagag

SEQ ID NO: 24152 - DNA, 21 bp, Artificial Sequence
  primer
aaggacaagtgcaggatgttg

SEQ ID NO: 24153 - DNA, 46 bp, Artificial Sequence
  primer
gtaaaacgacggccagtccagattattctgtgaggtaagtaagatt

SEQ ID NO: 24154 - DNA, 36 bp, Artificial Sequence
  primer
gtaaaacgacggccagtgtcctggaccttcttcggc

SEQ ID NO: 24155 - DNA, 41 bp, Artificial Sequence
  primer
gtaaaacgacggccagtaaatcagtgccttgttactcttgc

SEQ ID NO: 24156 - DNA, 26 bp, Artificial Sequence
  primer
gatttcatttcctataatcagacacg

SEQ ID NO: 24157 - DNA, 37 bp, Artificial Sequence
  primer
gtaaaacgacggccagtttgcacaacctgcaaagatg

SEQ ID NO: 24158 - DNA, 18 bp, Artificial Sequence
  primer
tgatccacccacctcagc

SEQ ID NO: 24159 - DNA, 20 bp, Artificial Sequence
  primer
gatgcctggattggactctg

SEQ ID NO: 24160 - DNA, 21 bp, Artificial Sequence
  primer
ttgatgtgtgcctgtagtccc

SEQ ID NO: 24161 - DNA, 38 bp, Artificial Sequence
  primer
gtaaaacgacggccagtgtcagggcctttactcacctg

SEQ ID NO: 24162 - DNA, 40 bp, Artificial Sequence
  primer
gtaaaacgacggccagtgcttgtgctatgaaaccatgttc

SEQ ID NO: 24163 - DNA, 37 bp, Artificial Sequence
  primer
gtaaaacgacggccagttcctactgcccatgtatgcc

SEQ ID NO: 24164 - DNA, 21 bp, Artificial Sequence
  primer
acggtcatcaactctggactg

SEQ ID NO: 24165 - DNA, 21 bp, Artificial Sequence
  primer
gtgccttacctgaaagcaagc

SEQ ID NO: 24166 - DNA, 25 bp, Artificial Sequence
  primer
tgttgtattcatagtgtgatttccg

SEQ ID NO: 24167 - DNA, 40 bp, Artificial Sequence
  primer
gtaaaacgacggccagtgagttgttgaagaaagcaaggtg

SEQ ID NO: 24168 - DNA, 23 bp, Artificial Sequence
  primer
gctggaatttaaatcaaggtgtg

SEQ ID NO: 24169 - DNA, 38 bp, Artificial Sequence
  primer
gtaaaacgacggccagtttcccaggaacacaaacgtag

SEQ ID NO: 24170 - DNA, 39 bp, Artificial Sequence
  primer
gtaaaacgacggccagtgcctcaatttcttcatctcagc

SEQ ID NO: 24171 - DNA, 21 bp, Artificial Sequence
  primer
ctagcacctctgccaacactg

SEQ ID NO: 24172 - DNA, 21 bp, Artificial Sequence
  primer
tgagtccagtacgacctccag

SEQ ID NO: 24173 - DNA, 21 bp, Artificial Sequence
  primer
cactgccaccaattctgagtc

SEQ ID NO: 24174 - DNA, 21 bp, Artificial Sequence
  primer
agaaggcgtacgtggtaaagg

SEQ ID NO: 24175 - DNA, 39 bp, Artificial Sequence
  primer
gtaaaacgacggccagtaactctggaaaggatgagggag

SEQ ID NO: 24176 - DNA, 38 bp, Artificial Sequence
  primer
gtaaaacgacggccagtgcccaacccactagacagaag

SEQ ID NO: 24177 - DNA, 37 bp, Artificial Sequence
  primer
gtaaaacgacggccagtgtgatctgtgtggctctggg

SEQ ID NO: 24178 - DNA, 21 bp, Artificial Sequence
  primer
gtcccagtgcagacagaaagg

SEQ ID NO: 24179 - DNA, 38 bp, Artificial Sequence
  primer
gtaaaacgacggccagtcagtggaaccatagcacctgg

SEQ ID NO: 24180 - DNA, 38 bp, Artificial Sequence
  primer
gtaaaacgacggccagtccctgcagtctctcctctcag

SEQ ID NO: 24181 - DNA, 19 bp, Artificial Sequence
  primer
atgtttccctcccagcacc

SEQ ID NO: 24182 - DNA, 21 bp, Artificial Sequence
  primer
ggtgcagtatatctcgcgctc

SEQ ID NO: 24183 - DNA, 40 bp, Artificial Sequence
  primer
gtaaaacgacggccagtaagggatagtgggctttccttac

SEQ ID NO: 24184 - DNA, 22 bp, Artificial Sequence
  primer
tgagaagccattcctcatcttc

SEQ ID NO: 24185 - DNA, 22 bp, Artificial Sequence
  primer
gagaagagggaatcagataggg

SEQ ID NO: 24186 - DNA, 43 bp, Artificial Sequence
  primer
gtaaaacgacggccagttggagaattaactatgctttaggtgg

SEQ ID NO: 24187 - DNA, 41 bp, Artificial Sequence
  primer
gtaaaacgacggccagtaaacatacgggattacaaaggaaa

SEQ ID NO: 24188 - DNA, 40 bp, Artificial Sequence
  primer
gtaaaacgacggccagtgcagctcagctttctatgttgat

SEQ ID NO: 24189 - DNA, 42 bp, Artificial Sequence
  primer
gtaaaacgacggccagttgactgtactctttcacaactgctg

SEQ ID NO: 24190 - DNA, 38 bp, Artificial Sequence
  primer
gtaaaacgacggccagttgatctgctaaatctgctggg

SEQ ID NO: 24191 - DNA, 27 bp, Artificial Sequence
  primer
ttgtatttggtctaacaaagagtttca

SEQ ID NO: 24192 - DNA, 22 bp, Artificial Sequence
  primer
gctgaatgccattagtgtaggc

SEQ ID NO: 24193 - DNA, 39 bp, Artificial Sequence
  primer
gtaaaacgacggccagttgccggatgagaataatgaagt

SEQ ID NO: 24194 - DNA, 42 bp, Artificial Sequence
  primer
gtaaaacgacggccagttgtaaatcatttcccataacacaag

SEQ ID NO: 24195 - DNA, 40 bp, Artificial Sequence
  primer
gtaaaacgacggccagtcacaggacctaaaggattattgc

SEQ ID NO: 24196 - DNA, 39 bp, Artificial Sequence
  primer
gtaaaacgacggccagtgggctttggagagagacctaag

SEQ ID NO: 24197 - DNA, 38 bp, Artificial Sequence
  primer
gtaaaacgacggccagtttggtaactgggcctttcttg

SEQ ID NO: 24198 - DNA, 38 bp, Artificial Sequence
  primer
gtaaaacgacggccagtctagtagacatgctgctgggc

SEQ ID NO: 24199 - DNA, 38 bp, Artificial Sequence
  primer
gtaaaacgacggccagtcagggttgaagatcaaatggg

SEQ ID NO: 24200 - DNA, 21 bp, Artificial Sequence
  primer
gtgtacgacgtcttggtgctc

SEQ ID NO: 24201 - DNA, 21 bp, Artificial Sequence
  primer
ggcagggaagcttacaaagtc

SEQ ID NO: 24202 - DNA, 37 bp, Artificial Sequence
  primer
gtaaaacgacggccagtcaaagggctaggctcacacc

SEQ ID NO: 24203 - DNA, 21 bp, Artificial Sequence
  primer
ctcagttcaaacccgaaatcc

SEQ ID NO: 24204 - DNA, 38 bp, Artificial Sequence
  primer
gtaaaacgacggccagtctgtaagttcctcctctgccc

SEQ ID NO: 24205 - DNA, 38 bp, Artificial Sequence
  primer
gtaaaacgacggccagtgtgtgggcatctttgtagcag

SEQ ID NO: 24206 - DNA, 23 bp, Artificial Sequence
  primer
ccaaactgctcagtagagagacc

SEQ ID NO: 24207 - DNA, 38 bp, Artificial Sequence
  primer
gtaaaacgacggccagtaaattctgccttgccactgag

SEQ ID NO: 24208 - DNA, 39 bp, Artificial Sequence
  primer
gtaaaacgacggccagttcttgttccaatagcctgagtg

SEQ ID NO: 24209 - DNA, 43 bp, Artificial Sequence
  primer
gtaaaacgacggccagtttcactgcattaactggtactttctg

SEQ ID NO: 24210 - DNA, 20 bp, Artificial Sequence
  primer
cgtgctcagtgatctgttcg

SEQ ID NO: 24211 - DNA, 38 bp, Artificial Sequence
  primer
gtaaaacgacggccagttgagtgcctcaagatcactgg

SEQ ID NO: 24212 - DNA, 20 bp, Artificial Sequence
  primer
cattctcagctcctccttcg

SEQ ID NO: 24213 - DNA, 20 bp, Artificial Sequence
  primer
tggcttccatgacataccag

SEQ ID NO: 24214 - DNA, 21 bp, Artificial Sequence
  primer
catcccaccgaagatacagaa

SEQ ID NO: 24215 - DNA, 43 bp, Artificial Sequence
  primer
gtaaaacgacggccagtgcactgattattgagactgtatggtg

SEQ ID NO: 24216 - DNA, 37 bp, Artificial Sequence
  primer
gtaaaacgacggccagtcccatcccgctacataatgg

SEQ ID NO: 24217 - DNA, 39 bp, Artificial Sequence
  primer
gtaaaacgacggccagttgttggctattcagaagaaggg

SEQ ID NO: 24218 - DNA, 38 bp, Artificial Sequence
  primer
gtaaaacgacggccagttggaacatctttggtcattgc

SEQ ID NO: 24219 - DNA, 20 bp, Artificial Sequence
  primer
agtggatgtccaagtgtggg

SEQ ID NO: 24220 - DNA, 38 bp, Artificial Sequence
  primer
gtaaaacgacggccagttttgggacagtcaacaaggtc

SEQ ID NO: 24221 - DNA, 39 bp, Artificial Sequence
  primer
gtaaaacgacggccagtgagggaaagctcagagataggc

SEQ ID NO: 24222 - DNA, 40 bp, Artificial Sequence
  primer
gtaaaacgacggccagtgggcagaatacatgttaaattcg

SEQ ID NO: 24223 - DNA, 26 bp, Artificial Sequence
  primer
caatgtttaacgtggtaaggttcttc

SEQ ID NO: 24224 - DNA, 39 bp, Artificial Sequence
  primer
gtaaaacgacggccagtgctattgctatcctcacatccc

SEQ ID NO: 24225 - DNA, 37 bp, Artificial Sequence
  primer
gtaaaacgacggccagtagggaattcacattcctggg

SEQ ID NO: 24226 - DNA, 20 bp, Artificial Sequence
  primer
aggattcccaaagggatctg

SEQ ID NO: 24227 - DNA, 22 bp, Artificial Sequence
  primer
aagagaaagaggagacgggatg

SEQ ID NO: 24228 - DNA, 38 bp, Artificial Sequence
  primer
gtaaaacgacggccagtcttaactccgacacatacccg

SEQ ID NO: 24229 - DNA, 38 bp, Artificial Sequence
  primer
gtaaaacgacggccagtgtgcagcagagttagagcctg

SEQ ID NO: 24230 - DNA, 38 bp, Artificial Sequence
  primer
gtaaaacgacggccagtattcctgagtctgagcccttg

SEQ ID NO: 24231 - DNA, 21 bp, Artificial Sequence
  primer
aggaggaagagcccaagattc

SEQ ID NO: 24232 - DNA, 38 bp, Artificial Sequence
  primer
gtaaaacgacggccagttcgaccactccctagatttgg

SEQ ID NO: 24233 - DNA, 21 bp, Artificial Sequence
  primer
aggaggaagagcccaagattc

SEQ ID NO: 24234 - DNA, 38 bp, Artificial Sequence
  primer
gtaaaacgacggccagtagacagacacagcaggaaggg

SEQ ID NO: 24235 - DNA, 38 bp, Artificial Sequence
  primer
gtaaaacgacggccagtgtggagagaaagggccataac

SEQ ID NO: 24236 - DNA, 37 bp, Artificial Sequence
  primer
gtaaaacgacggccagtatccagatgagagggatggc

SEQ ID NO: 24237 - DNA, 21 bp, Artificial Sequence
  primer
tttacactcagagcctggtcg

SEQ ID NO: 24238 - DNA, 38 bp, Artificial Sequence
  primer
gtaaaacgacggccagtagacgaagggagcagaacttg

SEQ ID NO: 24239 - DNA, 38 bp, Artificial Sequence
  primer
gtaaaacgacggccagttttgaggtaaagcaggttccc

SEQ ID NO: 24240 - DNA, 38 bp, Artificial Sequence
  primer
gtaaaacgacggccagtagttgctgagataaggtgggc

SEQ ID NO: 24241 - DNA, 38 bp, Artificial Sequence
  primer
gtaaaacgacggccagtgtgtctggtgggagcagtagg

SEQ ID NO: 24242 - DNA, 21 bp, Artificial Sequence
  primer
tagggaacttctgggtgttcg

SEQ ID NO: 24243 - DNA, 38 bp, Artificial Sequence
  primer
gtaaaacgacggccagttcatcatttcttgctgaaccc

SEQ ID NO: 24244 - DNA, 35 bp, Artificial Sequence
  primer
gtaaaacgacggccagtctgcgggaagggagaaac

SEQ ID NO: 24245 - DNA, 38 bp, Artificial Sequence
  primer
gtaaaacgacggccagtaatacctgtcggctccagaag

SEQ ID NO: 24246 - DNA, 21 bp, Artificial Sequence
  primer
cttcatcctccgtggctctac

SEQ ID NO: 24247 - DNA, 38 bp, Artificial Sequence
  primer
gtaaaacgacggccagtagcttgagcacagggattctc

SEQ ID NO: 24248 - DNA, 38 bp, Artificial Sequence
  primer
gtaaaacgacggccagtcccaatgacgtggtttctttc

SEQ ID NO: 24249 - DNA, 21 bp, Artificial Sequence
  primer
aagatcacagtccggatccac

SEQ ID NO: 24250 - DNA, 38 bp, Artificial Sequence
  primer
gtaaaacgacggccagtaggtaaggagggaggtgttcc

SEQ ID NO: 24251 - DNA, 38 bp, Artificial Sequence
  primer
gtaaaacgacggccagtcagaactccctcctgatgctc

SEQ ID NO: 24252 - DNA, 21 bp, Artificial Sequence
  primer
tgtccttctggaggtgagacg

SEQ ID NO: 24253 - DNA, 20 bp, Artificial Sequence
  primer
cctcagaatcctcctctccg

SEQ ID NO: 24254 - DNA, 37 bp, Artificial Sequence
  primer
gtaaaacgacggccagtcgcaggtgaggaaccactac

SEQ ID NO: 24255 - DNA, 21 bp, Artificial Sequence
  primer
cttatcagagcatgccaggtc

SEQ ID NO: 24256 - DNA, 21 bp, Artificial Sequence
  primer
atctccctccaaacacctgag

SEQ ID NO: 24257 - DNA, 19 bp, Artificial Sequence
  primer
ctactgatgcccatgctgc

SEQ ID NO: 24258 - DNA, 38 bp, Artificial Sequence
  primer
gtaaaacgacggccagtgagggaccattcccataactg

SEQ ID NO: 24259 - DNA, 21 bp, Artificial Sequence
  primer
agctgggaggtgactggtatg

SEQ ID NO: 24260 - DNA, 21 bp, Artificial Sequence
  primer
tcaacatcttcagctgcatcc

SEQ ID NO: 24261 - DNA, 38 bp, Artificial Sequence
  primer
gtaaaacgacggccagtatcatcaccaggttggctctc

SEQ ID NO: 24262 - DNA, 37 bp, Artificial Sequence
  primer
gtaaaacgacggccagtctaagggcactgtggactgg

SEQ ID NO: 24263 - DNA, 37 bp, Artificial Sequence; identical to SEQ ID NO: 24262
  primer

SEQ ID NO: 24264 - DNA, 36 bp, Artificial Sequence
  primer
gtaaaacgacggccagtgacattgggtggtgtgtgg

SEQ ID NO: 24265 - DNA, 38 bp, Artificial Sequence
  primer
gtaaaacgacggccagtaccaccaacctcagtgcctac

SEQ ID NO: 24266 - DNA, 36 bp, Artificial Sequence
  primer
gtaaaacgacggccagtcgtgttagccagcatggtc

SEQ ID NO: 24267 - DNA, 21 bp, Artificial Sequence
  primer
gcctgaacagagttgaaaggg

SEQ ID NO: 24268 - DNA, 38 bp, Artificial Sequence
  primer
gtaaaacgacggccagtaggagctactgggaatgggac

SEQ ID NO: 24269 - DNA, 21 bp, Artificial Sequence
  primer
ttaatctctgccttcatccgc

SEQ ID NO: 24270 - DNA, 38 bp, Artificial Sequence
  primer
gtaaaacgacggccagtccacaagctcagaggtgagtc

SEQ ID NO: 24271 - DNA, 38 bp, Artificial Sequence
  primer
gtaaaacgacggccagttacactgcaagcaaccctttg

SEQ ID NO: 24272 - DNA, 38 bp, Artificial Sequence
  primer
gtaaaacgacggccagtctcttgccatcttgaaacgtg

SEQ ID NO: 24273 - DNA, 21 bp, Artificial Sequence
  primer
cagacctgctgctgttctttg

SEQ ID NO: 24274 - DNA, 36 bp, Artificial Sequence
  primer
gtaaaacgacggccagtctgcccatcatggtgagtg

SEQ ID NO: 24275 - DNA, 38 bp, Artificial Sequence
  primer
gtaaaacgacggccagtccacttcacaggaggaaactg

SEQ ID NO: 24276 - DNA, 21 bp, Artificial Sequence
  primer
agagaccgagtgggaaacatc

SEQ ID NO: 24277 - DNA, 38 bp, Artificial Sequence
  primer
gtaaaacgacggccagtgcagatggcctagatacagcc

SEQ ID NO: 24278 - DNA, 21 bp, Artificial Sequence
  primer
ccactaccatcagtctggcac

SEQ ID NO: 24279 - DNA, 20 bp, Artificial Sequence
  primer
tttaaagccactctgccagc

SEQ ID NO: 24280 - DNA, 38 bp, Artificial Sequence
  primer
gtaaaacgacggccagttcttagagaaaggctgaggcg

SEQ ID NO: 24281 - DNA, 39 bp, Artificial Sequence
  primer
gtaaaacgacggccagttttgagagttgaacccttcgtc

SEQ ID NO: 24282 - DNA, 37 bp, Artificial Sequence
  primer
gtaaaacgacggccagtcacaccaccatactccagcc

SEQ ID NO: 24283 - DNA, 38 bp, Artificial Sequence
  primer
gtaaaacgacggccagtgcccaactacagagcaaggtt

SEQ ID NO: 24284 - DNA, 39 bp, Artificial Sequence
  primer
gtaaaacgacggccagtgcaaatgtgggctaaatcattc

SEQ ID NO: 24285 - DNA, 21 bp, Artificial Sequence
  primer
tcagattgtgccattgtgctc

SEQ ID NO: 24286 - DNA, 38 bp, Artificial Sequence
  primer
gtaaaacgacggccagtcaaacaatgcaagagaggcac

SEQ ID NO: 24287 - DNA, 37 bp, Artificial Sequence
  primer
gtaaaacgacggccagtatgcttctcgttgttcacgc

SEQ ID NO: 24288 - DNA, 39 bp, Artificial Sequence
  primer
gtaaaacgacggccagtcacctcttccatcacttcatcc

SEQ ID NO: 24289 - DNA, 39 bp, Artificial Sequence
  primer
gtaaaacgacggccagtcagcagtggctttaggtctttc

SEQ ID NO: 24290 - DNA, 21 bp, Artificial Sequence
  primer
tgcaattagccatgatcacac

SEQ ID NO: 24291 - DNA, 39 bp, Artificial Sequence
  primer
gtaaaacgacggccagttctcttagcctgtggtctgttg

SEQ ID NO: 24292 - DNA, 37 bp, Artificial Sequence
  primer
gtaaaacgacggccagtaaataaaccatgccaagccc

SEQ ID NO: 24293 - DNA, 21 bp, Artificial Sequence
  primer
gtttaacctcagcagcttggc

SEQ ID NO: 24294 - DNA, 20 bp, Artificial Sequence
  primer
accgaagacattgccacttg

SEQ ID NO: 24295 - DNA, 21 bp, Artificial Sequence
  primer
cgtcttagctgcattcgtgtc

SEQ ID NO: 24296 - DNA, 38 bp, Artificial Sequence
  primer
gtaaaacgacggccagtttcagaaacacaacgaggtgg

SEQ ID NO: 24297 - DNA, 37 bp, Artificial Sequence
  primer
gtaaaacgacggccagttcgttaccggaggccttatc

SEQ ID NO: 24298 - DNA, 21 bp, Artificial Sequence
  primer
tcctcttcttcctggttagcg

SEQ ID NO: 24299 - DNA, 38 bp, Artificial Sequence
  primer
gtaaaacgacggccagtggacccttcttcagattgcac

SEQ ID NO: 24300 - DNA, 21 bp, Artificial Sequence
  primer
ctgcttagccatggtttcttg

SEQ ID NO: 24301 - DNA, 38 bp, Artificial Sequence
  primer
gtaaaacgacggccagttttgcacagagaggaatttgc

SEQ ID NO: 24302 - DNA, 21 bp, Artificial Sequence
  primer
gccaccatgtccagctaagag

SEQ ID NO: 24303 - DNA, 38 bp, Artificial Sequence
  primer
gtaaaacgacggccagttttgttggtgctctgtcaacc

SEQ ID NO: 24304 - DNA, 38 bp, Artificial Sequence
  primer
gtaaaacgacggccagtcccttgctggtgaatgatttc

SEQ ID NO: 24305 - DNA, 21 bp, Artificial Sequence
  primer
gaatgaaccgaagcattcctg

SEQ ID NO: 24306 - DNA, 21 bp, Artificial Sequence
  primer
tgaaacttgcaaatcaccagc

SEQ ID NO: 24307 - DNA, 37 bp, Artificial Sequence
  primer
gtaaaacgacggccagtctgagtctgtggttggagcc

SEQ ID NO: 24308 - DNA, 38 bp, Artificial Sequence
  primer
gtaaaacgacggccagtgctgggatcaagacacaaatg

SEQ ID NO: 24309 - DNA, 39 bp, Artificial Sequence
  primer
gtaaaacgacggccagtcactgggatcttcccatagttc

SEQ ID NO: 24310 - DNA, 40 bp, Artificial Sequence
  primer
gtaaaacgacggccagtgcatacaacgtaggcataagctc

SEQ ID NO: 24311 - DNA, 26 bp, Artificial Sequence
  primer
aaatgcctactaatgttgaaataggg

SEQ ID NO: 24312 - DNA, 21 bp, Artificial Sequence
  primer
ggagacagaagggagaagcag

SEQ ID NO: 24313 - DNA, 37 bp, Artificial Sequence
  primer
gtaaaacgacggccagttggacgtgcatgattatggg

SEQ ID NO: 24314 - DNA, 38 bp, Artificial Sequence
  primer
gtaaaacgacggccagtaatgtttgggaactgagcctg

SEQ ID NO: 24315 - DNA, 38 bp, Artificial Sequence; identical to SEQ ID NO: 24304
  primer

SEQ ID NO: 24316 - DNA, 21 bp, Artificial Sequence
  primer
agatgaaccgaagcattcctg

SEQ ID NO: 24317 - DNA, 38 bp, Artificial Sequence
  primer
gtaaaacgacggccagttgaaacttgcaaatcaccagc

SEQ ID NO: 24318 - DNA, 37 bp, Artificial Sequence; identical to SEQ ID NO: 24307
  primer

SEQ ID NO: 24319 - DNA, 38 bp, Artificial Sequence
  primer
gtaaaacgacggccagtgagttagtgccaggaagcagc

SEQ ID NO: 24320 - DNA, 21 bp, Artificial Sequence
  primer
ctcaagtgggaccagcctatc

SEQ ID NO: 24321 - DNA, 21 bp, Artificial Sequence
  primer
gagaaacctggtaggcgtgag

SEQ ID NO: 24322 - DNA, 21 bp, Artificial Sequence
  primer
tctgtgtggacaaacaatggg

SEQ ID NO: 24323 - DNA, 39 bp, Artificial Sequence
  primer
gtaaaacgacggccagtgggaactggatacttgggtctc

SEQ ID NO: 24324 - DNA, 38 bp, Artificial Sequence
  primer
gtaaaacgacggccagtctaagtcgtttgggtgttggg

SEQ ID NO: 24325 - DNA, 38 bp, Artificial Sequence
  primer
gtaaaacgacggccagtattggagaagaggtggcaatg

SEQ ID NO: 24326 - DNA, 38 bp, Artificial Sequence
  primer
gtaaaacgacggccagtccattatctctggcatctccc

SEQ ID NO: 24327 - DNA, 37 bp, Artificial Sequence
  primer
gtaaaacgacggccagtgatcggattgcaagagcaag

SEQ ID NO: 24328 - DNA, 38 bp, Artificial Sequence
  primer
gtaaaacgacggccagtaggcgtggttactggatgaat

SEQ ID NO: 24329 - DNA, 38 bp, Artificial Sequence
  primer
gtaaaacgacggccagtccactagctgcggtgtaggtc

SEQ ID NO: 24330 - DNA, 38 bp, Artificial Sequence
  primer
gtaaaacgacggccagtgagctgaagcccgtactcaag

SEQ ID NO: 24331 - DNA, 38 bp, Artificial Sequence
  primer
gtaaaacgacggccagttacttgggatgggaagtaccg

SEQ ID NO: 24332 - DNA, 24 bp, Artificial Sequence
  primer
cctgtacttggtaggacaagatgc

SEQ ID NO: 24333 - DNA, 38 bp, Artificial Sequence
  primer
gtaaaacgacggccagtagtggacagctgtgtctttgc

SEQ ID NO: 24334 - DNA, 38 bp, Artificial Sequence
  primer
gtaaaacgacggccagtttctatgcttggagcaggagg

SEQ ID NO: 24335 - DNA, 25 bp, Artificial Sequence
  primer
ccatattccttggtttatgttaggc

SEQ ID NO: 24336 - DNA, 38 bp, Artificial Sequence
  primer
gtaaaacgacggccagtatgctgaaaggacaaagggac

SEQ ID NO: 24337 - DNA, 20 bp, Artificial Sequence
  primer
gctcctaaagcacctgggag

SEQ ID NO: 24338 - DNA, 21 bp, Artificial Sequence
  primer
ggatccgtagttgacttgacg

SEQ ID NO: 24339 - DNA, 21 bp, Artificial Sequence
  primer
aggtgcctttgacagcttagg

SEQ ID NO: 24340 - DNA, 37 bp, Artificial Sequence
  primer
gtaaaacgacggccagtttaaatgcattgggctgagg

SEQ ID NO: 24341 - DNA, 22 bp, Artificial Sequence
  primer
ttgacgtagcgcatttacttgt

SEQ ID NO: 24342 - DNA, 20 bp, Artificial Sequence
  primer
gattccagcaatagggtggg

SEQ ID NO: 24343 - DNA, 21 bp, Artificial Sequence
  primer
tagagcttgcttctccactgc

SEQ ID NO: 24344 - DNA, 38 bp, Artificial Sequence
  primer
gtaaaacgacggccagtggaaatgcatagcccatacac

SEQ ID NO: 24345 - DNA, 39 bp, Artificial Sequence
  primer
gtaaaacgacggccagttcttaagcataagcatttgccc

SEQ ID NO: 24346 - DNA, 37 bp, Artificial Sequence
  primer
gtaaaacgacggccagtccagggatgcctctaactcc

SEQ ID NO: 24347 - DNA, 37 bp, Artificial Sequence
  primer
gtaaaacgacggccagtgaaatggctggagaggaagg

SEQ ID NO: 24348 - DNA, 37 bp, Artificial Sequence
  primer
gtaaaacgacggccagtcacttgaacccagaaggcag

SEQ ID NO: 24349 - DNA, 26 bp, Artificial Sequence
  primer
ttagcaaatatcatgacttcctcttc

SEQ ID NO: 24350 - DNA, 24 bp, Artificial Sequence
  primer
tgtggttaagcaatagttacagcc

SEQ ID NO: 24351 - DNA, 43 bp, Artificial Sequence
  primer
gtaaaacgacggccagttttataatgtttctgggtctgtgaat

SEQ ID NO: 24352 - DNA, 44 bp, Artificial Sequence
  primer
gtaaaacgacggccagtttaggcattaaggccatatacatactt

SEQ ID NO: 24353 - DNA, 21 bp, Artificial Sequence
  primer
tttctgaaggcaatgagcttg

SEQ ID NO: 24354 - DNA, 22 bp, Artificial Sequence
  primer
aatgacatgccatgcttacttt

SEQ ID NO: 24355 - DNA, 38 bp, Artificial Sequence
  primer
gtaaaacgacggccagtagctggcagcagcactattac

SEQ ID NO: 24356 - DNA, 38 bp, Artificial Sequence
  primer
gtaaaacgacggccagttggattcacaatccttctccc

SEQ ID NO: 24357 - DNA, 38 bp, Artificial Sequence
  primer
gtaaaacgacggccagtcatgtccaacgcatagtgacc

SEQ ID NO: 24358 - DNA, 38 bp, Artificial Sequence
  primer
gtaaaacgacggccagtaaacgattggcattggaagac

SEQ ID NO: 24359 - DNA, 39 bp, Artificial Sequence
  primer
gtaaaacgacggccagttcctgattgggtcatgtttatg

SEQ ID NO: 24360 - DNA, 38 bp, Artificial Sequence
  primer
gtaaaacgacggccagtgaggtgcaggaagcaacatta

SEQ ID NO: 24361 - DNA, 24 bp, Artificial Sequence
  primer
cccgtagcactcagtttattcaag

SEQ ID NO: 24362 - DNA, 25 bp, Artificial Sequence
  primer
ggtaaggctaatttgaagagcaaag

SEQ ID NO: 24363 - DNA, 24 bp, Artificial Sequence
  primer
tccaaattaatcaggaaatcatcc

SEQ ID NO: 24364 - DNA, 42 bp, Artificial Sequence
  primer
gtaaaacgacggccagtgcattatcaagtattgggctgtaag

SEQ ID NO: 24365 - DNA, 38 bp, Artificial Sequence
  primer
gtaaaacgacggccagtaatctgctttcctcagcatca

SEQ ID NO: 24366 - DNA, 43 bp, Artificial Sequence
  primer
gtaaaacgacggccagtaaatggaaacattaaggcagttattt

SEQ ID NO: 24367 - DNA, 24 bp, Artificial Sequence
  primer
tcaaattggtttcatgatgatttc

SEQ ID NO: 24368 - DNA, 22 bp, Artificial Sequence
  primer
ccttgatccgcttaaacatttg

SEQ ID NO: 24369 - DNA, 21 bp, Artificial Sequence
  primer
tttctttcccgcagataaaca

SEQ ID NO: 24370 - DNA, 25 bp, Artificial Sequence
  primer
aaagccagaagcttatagcagaaag

SEQ ID NO: 24371 - DNA, 23 bp, Artificial Sequence
  primer
aatgcaactactgctcttgaagc

SEQ ID NO: 24372 - DNA, 38 bp, Artificial Sequence
  primer
gtaaaacgacggccagtccctgtgaaacagctaggacc

SEQ ID NO: 24373 - DNA, 38 bp, Artificial Sequence
  primer
gtaaaacgacggccagtttcccatgccaaatttctatc

SEQ ID NO: 24374 - DNA, 21 bp, Artificial Sequence
  primer
gctctcatggagtggagaacc

SEQ ID NO: 24375 - DNA, 41 bp, Artificial Sequence
  primer
gtaaaacgacggccagtcgctaatcaatcatattagcagga

SEQ ID NO: 24376 - DNA, 40 bp, Artificial Sequence
  primer
gtaaaacgacggccagttttgtacatgtatggttggaggg

SEQ ID NO: 24377 - DNA, 24 bp, Artificial Sequence
  primer
ggaaccctataatttgtgacatgg

SEQ ID NO: 24378 - DNA, 38 bp, Artificial Sequence
  primer
gtaaaacgacggccagtctgttggctgctttattggac

SEQ ID NO: 24379 - DNA, 38 bp, Artificial Sequence
  primer
gtaaaacgacggccagtgggaaatggacttcatgtgac

SEQ ID NO: 24380 - DNA, 21 bp, Artificial Sequence
  primer
cagacttcacaaacggaggag

SEQ ID NO: 24381 - DNA, 38 bp, Artificial Sequence
  primer
gtaaaacgacggccagtcagccttctcagagcaatgaa

SEQ ID NO: 24382 - DNA, 40 bp, Artificial Sequence
  primer
gtaaaacgacggccagtcagaatagcatcatcttcatggg

SEQ ID NO: 24383 - DNA, 20 bp, Artificial Sequence
  primer
gtcccaacaacatgcaatgg

SEQ ID NO: 24384 - DNA, 27 bp, Artificial Sequence
  primer
tctgcatatttctatgcacatacactc

SEQ ID NO: 24385 - DNA, 21 bp, Artificial Sequence
  primer
gggactaagcctgaaaggacc

SEQ ID NO: 24386 - DNA, 39 bp, Artificial Sequence
  primer
gtaaaacgacggccagtttgtaacaagagcaagcctcag

SEQ ID NO: 24387 - DNA, 36 bp, Artificial Sequence
  primer
gtaaaacgacggccagtgtgtcccggagttgtcctg

SEQ ID NO: 24388 - DNA, 39 bp, Artificial Sequence
  primer
gtaaaacgacggccagtgcgtttgtgttaagcgtttagg

SEQ ID NO: 24389 - DNA, 28 bp, Artificial Sequence
  primer
ttgaagaggaatagtgtagatttgagaa

SEQ ID NO: 24390 - DNA, 37 bp, Artificial Sequence
  primer
gtaaaacgacggccagtgaggtgaggtgttggcagtg

SEQ ID NO: 24391 - DNA, 19 bp, Artificial Sequence
  primer
ggtgtctgagggccacaag

SEQ ID NO: 24392 - DNA, 41 bp, Artificial Sequence
  primer
gtaaaacgacggccagtcattacagctttgtttgacattcg

SEQ ID NO: 24393 - DNA, 41 bp, Artificial Sequence
  primer
gtaaaacgacggccagttgggatatatggatcctttcagag

SEQ ID NO: 24394 - DNA, 21 bp, Artificial Sequence
  primer
tgcccatgatctgtgtgtttc

SEQ ID NO: 24395 - DNA, 22 bp, Artificial Sequence
  primer
tctggtggaggataatttggtg

SEQ ID NO: 24396 - DNA, 25 bp, Artificial Sequence
  primer
gttctaaatcatgcatattcctgtg

SEQ ID NO: 24397 - DNA, 21 bp, Artificial Sequence
  primer
cttgctgtaggcaagaggttt

SEQ ID NO: 24398 - DNA, 38 bp, Artificial Sequence
  primer
gtaaaacgacggccagtttccagaatgaggtggagaag

SEQ ID NO: 24399 - DNA, 37 bp, Artificial Sequence
  primer
gtaaaacgacggccagtaggaatgcacagggatgaag

SEQ ID NO: 24400 - DNA, 21 bp, Artificial Sequence
  primer
tgtgccacttctctgaacctc

SEQ ID NO: 24401 - DNA, 39 bp, Artificial Sequence
  primer
gtaaaacgacggccagttgatccatctggattatttggg

SEQ ID NO: 24402 - DNA, 20 bp, Artificial Sequence
  primer
gacagggactggtcacttcg

SEQ ID NO: 24403 - DNA, 20 bp, Artificial Sequence
  primer
cctcgtacggtaggaagtgc

SEQ ID NO: 24404 - DNA, 23 bp, Artificial Sequence
  primer
ccagaaagcatgttaacagcaac

SEQ ID NO: 24405 - DNA, 27 bp, Artificial Sequence
  primer
tgttcaatggtaagctaattgttgatt

SEQ ID NO: 24406 - DNA, 41 bp, Artificial Sequence
  primer
gtaaaacgacggccagtaaatatggcagttgaaatctctcg

SEQ ID NO: 24407 - DNA, 41 bp, Artificial Sequence
  primer
gtaaaacgacggccagtcaaacagttgcttcatggataatg

SEQ ID NO: 24408 - DNA, 21 bp, Artificial Sequence
  primer
accttggtttcacctttccat

SEQ ID NO: 24409 - DNA, 37 bp, Artificial Sequence
  primer
gtaaaacgacggccagtcaccgtgatcggacagtttc

SEQ ID NO: 24410 - DNA, 21 bp, Artificial Sequence
  primer
ttggtcagggcaatcctactc

SEQ ID NO: 24411 - DNA, 37 bp, Artificial Sequence
  primer
gtaaaacgacggccagttgaactcctagcctcaagcg

SEQ ID NO: 24412 - DNA, 21 bp, Artificial Sequence
  primer
tgagagcagtgtcctaatgcg

SEQ ID NO: 24413 - DNA, 38 bp, Artificial Sequence
  primer
gtaaaacgacggccagtttcctgaacacctgtttgctg

SEQ ID NO: 24414 - DNA, 21 bp, Artificial Sequence
  primer
ctattcagcaacaccaggcac

SEQ ID NO: 24415 - DNA, 35 bp, Artificial Sequence
  primer
gtaaaacgacggccagtgcacagagggtgggtgtg

SEQ ID NO: 24416 - DNA, 21 bp, Artificial Sequence
  primer
agaactgacacccaccatctg

SEQ ID NO: 24417 - DNA, 38 bp, Artificial Sequence
  primer
gtaaaacgacggccagtcgtcactggactttgctcttg

SEQ ID NO: 24418 - DNA, 38 bp, Artificial Sequence
  primer
gtaaaacgacggccagtttagttaacacttgccgcgtg

SEQ ID NO: 24419 - DNA, 39 bp, Artificial Sequence
  primer
gtaaaacgacggccagtgcattgggctctaaggattagg

SEQ ID NO: 24420 - DNA, 21 bp, Artificial Sequence
  primer
gttggagcctgtccaagtgtc

SEQ ID NO: 24421 - DNA, 21 bp, Artificial Sequence
  primer
ctgcattccttctatctcccg

SEQ ID NO: 24422 - DNA, 24 bp, Artificial Sequence
  primer
tcaagatcagtggtaaggattctg

SEQ ID NO: 24423 - DNA, 21 bp, Artificial Sequence
  primer
tttgtttgatcctccagctcc

SEQ ID NO: 24424 - DNA, 25 bp, Artificial Sequence
  primer
tgtttatgaaattgaatgatcctgg

SEQ ID NO: 24425 - DNA, 39 bp, Artificial Sequence
  primer
gtaaaacgacggccagtgggaaatgataggaagagcagg

SEQ ID NO: 24426 - DNA, 38 bp, Artificial Sequence
  primer
gtaaaacgacggccagtaattgcttgaacccaggagat

SEQ ID NO: 24427 - DNA, 21 bp, Artificial Sequence
  primer
tttacaggacggcatcagaat

SEQ ID NO: 24428 - DNA, 39 bp, Artificial Sequence
  primer
gtaaaacgacggccagtaagtgactttgggctcagtttg

SEQ ID NO: 24429 - DNA, 38 bp, Artificial Sequence
  primer
gtaaaacgacggccagtctaaccaccaggcattcacag

SEQ ID NO: 24430 - DNA, 22 bp, Artificial Sequence
  primer
tgcctcagttagatcttcagcc

SEQ ID NO: 24431 - DNA, 43 bp, Artificial Sequence
  primer
gtaaaacgacggccagttgcattaattcctttcgtaaagctac

SEQ ID NO: 24432 - DNA, 39 bp, Artificial Sequence
  primer
gtaaaacgacggccagtgaagacattgggaataattggc

SEQ ID NO: 24433 - DNA, 38 bp, Artificial Sequence
  primer
gtaaaacgacggccagttgtggagaagatggtgcgtag

SEQ ID NO: 24434 - DNA, 39 bp, Artificial Sequence
  primer
gtaaaacgacggccagttgttgactccaggcttacaagg

SEQ ID NO: 24435 - DNA, 28 bp, Artificial Sequence
  primer
acaatggtcttattgtgagtgattatct

SEQ ID NO: 24436 - DNA, 21 bp, Artificial Sequence
  primer
tacgaccaatgtcattccagg

SEQ ID NO: 24437 - DNA, 39 bp, Artificial Sequence
  primer
gtaaaacgacggccagtttatagtcattgctgtggtgcc

SEQ ID NO: 24438 - DNA, 21 bp, Artificial Sequence
  primer
gccctccatcagacctatttc

SEQ ID NO: 24439 - DNA, 21 bp, Artificial Sequence
  primer
ctgccttagtctcctgctgtg

SEQ ID NO: 24440 - DNA, 35 bp, Artificial Sequence
  primer
gtaaaacgacggccagtttccagttccggagtgcc

SEQ ID NO: 24441 - DNA, 19 bp, Artificial Sequence
  primer
gcttctcttcttgcccgtg

SEQ ID NO: 24442 - DNA, 18 bp, Artificial Sequence
  primer
cgtgtcacgtgcctcacc

SEQ ID NO: 24443 - DNA, 38 bp, Artificial Sequence
  primer
gtaaaacgacggccagttgcttgaaattgggtgaattg

SEQ ID NO: 24444 - DNA, 27 bp, Artificial Sequence
  primer
tcccacaagtggttataaagtatatgg

SEQ ID NO: 24445 - DNA, 21 bp, Artificial Sequence
  primer
tagcttccggaaagggtactg

SEQ ID NO: 24446 - DNA, 21 bp, Artificial Sequence
  primer
accctgtgaaatgggtctttg

SEQ ID NO: 24447 - DNA, 38 bp, Artificial Sequence
  primer
gtaaaacgacggccagtttggtttctggcttggagttt

SEQ ID NO: 24448 - DNA, 40 bp, Artificial Sequence
  primer
gtaaaacgacggccagtttcctggtcagaaatttgatttg

SEQ ID NO: 24449 - DNA, 38 bp, Artificial Sequence
  primer
gtaaaacgacggccagtccaggattataagcacgggtc

SEQ ID NO: 24450 - DNA, 39 bp, Artificial Sequence
  primer
gtaaaacgacggccagtgctttctctttgctcctgaatg

SEQ ID NO: 24451 - DNA, 21 bp, Artificial Sequence
  primer
ttgcctaggttccaattctgg

SEQ ID NO: 24452 - DNA, 38 bp, Artificial Sequence
  primer
gtaaaacgacggccagtaactgtacatggtggtcctgc

SEQ ID NO: 24453 - DNA, 21 bp, Artificial Sequence
  primer
tatcctgggacctctctctgg

SEQ ID NO: 24454 - DNA, 38 bp, Artificial Sequence
  primer
gtaaaacgacggccagtattgtctattgggtttggccc

SEQ ID NO: 24455 - DNA, 38 bp, Artificial Sequence
  primer
gtaaaacgacggccagtgcagtcagactacatcctggc

SEQ ID NO: 24456 - DNA, 43 bp, Artificial Sequence
  primer
gtaaaacgacggccagtgtatatttgggagtttaggcaatagg

SEQ ID NO: 24457 - DNA, 21 bp, Artificial Sequence
  primer
tgtaatttcctgggctgtttg

SEQ ID NO: 24458 - DNA, 38 bp, Artificial Sequence
  primer
gtaaaacgacggccagtctgctttctcctttctccagc

SEQ ID NO: 24459 - DNA, 38 bp, Artificial Sequence
  primer
gtaaaacgacggccagttgtaggagctgactgggaacc

SEQ ID NO: 24460 - DNA, 38 bp, Artificial Sequence
  primer
gtaaaacgacggccagtgagtggaaagggaagatcgag

SEQ ID NO: 24461 - DNA, 38 bp, Artificial Sequence
  primer
gtaaaacgacggccagtgtctagggcttgcgtgtaagg

SEQ ID NO: 24462 - DNA, 21 bp, Artificial Sequence
  primer
actaccgggtccgagagaaag

SEQ ID NO: 24463 - DNA, 21 bp, Artificial Sequence
  primer
cccttaacaaccgtggaatct

SEQ ID NO: 24464 - DNA, 25 bp, Artificial Sequence
  primer
agtgcaaataggaagaagattcaag

SEQ ID NO: 24465 - DNA, 21 bp, Artificial Sequence
  primer
ggagaagacaccttcacacca

SEQ ID NO: 24466 - DNA, 25 bp, Artificial Sequence
  primer
tctatgcacaattgtttcagtaacg

SEQ ID NO: 24467 - DNA, 38 bp, Artificial Sequence
  primer
gtaaaacgacggccagtatgatgctctcactgctggtc

SEQ ID NO: 24468 - DNA, 24 bp, Artificial Sequence
  primer
tgattgagatcagtgtatatgcca

SEQ ID NO: 24469 - DNA, 37 bp, Artificial Sequence
  primer
gtaaaacgacggccagtaccgggtttcagcatctagc

SEQ ID NO: 24470 - DNA, 21 bp, Artificial Sequence
  primer
agtcgttggtgggttaagcag

SEQ ID NO: 24471 - DNA, 38 bp, Artificial Sequence
  primer
gtaaaacgacggccagtcacacctaagccacacttccc

SEQ ID NO: 24472 - DNA, 38 bp, Artificial Sequence
  primer
gtaaaacgacggccagtgcttctctctcccttctgtgg

SEQ ID NO: 24473 - DNA, 38 bp, Artificial Sequence
  primer
gtaaaacgacggccagtgtcacctgacagcacgaactc

SEQ ID NO: 24474 - DNA, 21 bp, Artificial Sequence
  primer
acgctaggctaactccacacc

SEQ ID NO: 24475 - DNA, 20 bp, Artificial Sequence
  primer
gacactgggaaggagctgtg

SEQ ID NO: 24476 - DNA, 21 bp, Artificial Sequence
  primer
cttgtacagacacagccaggg

SEQ ID NO: 24477 - DNA, 21 bp, Artificial Sequence
  primer
aaaggctacttcctgcaccac

SEQ ID NO: 24478 - DNA, 37 bp, Artificial Sequence
  primer
gtaaaacgacggccagtccagatatcgcgagaggtcc

SEQ ID NO: 24479 - DNA, 24 bp, Artificial Sequence
  primer
gatggtcaagtagctttgaagagg

SEQ ID NO: 24480 - DNA, 23 bp, Artificial Sequence
  primer
ttaaggcacattggaagtagcag

SEQ ID NO: 24481 - DNA, 20 bp, Artificial Sequence
  primer
gttacagtgagctggacggc

SEQ ID NO: 24482 - DNA, 21 bp, Artificial Sequence
  primer
gattggctgcttgcttaaagg

SEQ ID NO: 24483 - DNA, 20 bp, Artificial Sequence
  primer
ttcccacccttacttggctc

SEQ ID NO: 24484 - DNA, 41 bp, Artificial Sequence
  primer
gtaaaacgacggccagttcctctttgcttatgctaggaaac

SEQ ID NO: 24485 - DNA, 35 bp, Artificial Sequence
  primer
gtaaaacgacggccagtagacctgccttgctcgtg

SEQ ID NO: 24486 - DNA, 21 bp, Artificial Sequence
  primer
gacgcagcgagcctatgtaac

SEQ ID NO: 24487 - DNA, 38 bp, Artificial Sequence
  primer
gtaaaacgacggccagtatgttgcctgccctagaagtg

SEQ ID NO: 24488 - DNA, 38 bp, Artificial Sequence
  primer
gtaaaacgacggccagtattcccatgccttatccttgg

SEQ ID NO: 24489 - DNA, 38 bp, Artificial Sequence
  primer
gtaaaacgacggccagttctggatggacattgatttgg

SEQ ID NO: 24490 - DNA, 19 bp, Artificial Sequence
  primer
tctgtcccaggaagatggg

SEQ ID NO: 24491 - DNA, 38 bp, Artificial Sequence
  primer
gtaaaacgacggccagttgcctagacaagaacccttcc

SEQ ID NO: 24492 - DNA, 43 bp, Artificial Sequence
  primer
gtaaaacgacggccagtcctattgttgcattaaatccctactg

SEQ ID NO: 24493 - DNA, 38 bp, Artificial Sequence
  primer
gtaaaacgacggccagtaaataacggatgggtcactgg

SEQ ID NO: 24494 - DNA, 41 bp, Artificial Sequence
  primer
gtaaaacgacggccagtaaacattgatcagagactccagtg

SEQ ID NO: 24495 - DNA, 23 bp, Artificial Sequence
  primer
tgagctatttgaaggatgcagtg

SEQ ID NO: 24496 - DNA, 41 bp, Artificial Sequence
  primer
gtaaaacgacggccagttgtgagatttacaaagagctggtg

SEQ ID NO: 24497 - DNA, 38 bp, Artificial Sequence
  primer
gtaaaacgacggccagtaaggccaaatgttgctaaagg

SEQ ID NO: 24498 - DNA, 20 bp, Artificial Sequence
  primer
acatcagtgccgaagaatcg

SEQ ID NO: 24499 - DNA, 39 bp, Artificial Sequence
  primer
gtaaaacgacggccagttctcttcatcttcatcccatcc

SEQ ID NO: 24500 - DNA, 24 bp, Artificial Sequence
  primer
agaggccttagtagaaagatggtg

SEQ ID NO: 24501 - DNA, 27 bp, Artificial Sequence
  primer
gctcttattgtaggaagttcacctaag

SEQ ID NO: 24502 - DNA, 45 bp, Artificial Sequence
  primer
gtaaaacgacggccagttgcctgtaagtgtaatgaagactgttat

SEQ ID NO: 24503 - DNA, 23 bp, Artificial Sequence
  primer
tgacctccagaaagatgatatgg

SEQ ID NO: 24504 - DNA, 21 bp, Artificial Sequence
  primer
gctttggtcttccaatagggc

SEQ ID NO: 24505 - DNA, 37 bp, Artificial Sequence
  primer
gtaaaacgacggccagtttgccctgttgacctaatgc

SEQ ID NO: 24506 - DNA, 21 bp, Artificial Sequence
  primer
tcccgggtaacatagcaagac

SEQ ID NO: 24507 - DNA, 38 bp, Artificial Sequence
  primer
gtaaaacgacggccagtgaggactgaggagcaggattt

SEQ ID NO: 24508 - DNA, 38 bp, Artificial Sequence
  primer
gtaaaacgacggccagtacctccaattcataggttgcc

SEQ ID NO: 24509 - DNA, 35 bp, Artificial Sequence
  primer
gtaaaacgacggccagtggtgtttacccgttgccc

SEQ ID NO: 24510 - DNA, 38 bp, Artificial Sequence
  primer
gtaaaacgacggccagtgcctttaatctggctttgtgc

SEQ ID NO: 24511 - DNA, 22 bp, Artificial Sequence
  primer
ttaaatgatggctttgggtttc

SEQ ID NO: 24512 - DNA, 38 bp, Artificial Sequence
  primer
gtaaaacgacggccagttgctctgtgtctgggaaactg

SEQ ID NO: 24513 - DNA, 38 bp, Artificial Sequence
  primer
gtaaaacgacggccagtacctttccagtccatgtaggg

SEQ ID NO: 24514 - DNA, 37 bp, Artificial Sequence
  primer
gtaaaacgacggccagtgccatagcaaatgcaggtgt

SEQ ID NO: 24515 - DNA, 38 bp, Artificial Sequence
  primer
gtaaaacgacggccagtgctgcttaggcagagcagtag

SEQ ID NO: 24516 - DNA, 39 bp, Artificial Sequence
  primer
gtaaaacgacggccagtctgtaagcttgggagaaagagg

SEQ ID NO: 24517 - DNA, 22 bp, Artificial Sequence
  primer
tgcaattaattcttggaaaggg

SEQ ID NO: 24518 - DNA, 41 bp, Artificial Sequence
  primer
gtaaaacgacggccagttgaattccattgacttctgatttg

SEQ ID NO: 24519 - DNA, 38 bp, Artificial Sequence
  primer
gtaaaacgacggccagttttgtttgttgcatttggctc

SEQ ID NO: 24520 - DNA, 20 bp, Artificial Sequence
  primer
tctagagcagggagaggcag

SEQ ID NO: 24521 - DNA, 42 bp, Artificial Sequence
  primer
gtaaaacgacggccagtgcgtggtgaatatagttaaattggg

SEQ ID NO: 24522 - DNA, 30 bp, Artificial Sequence
  primer
ttattaagtgttagtctctaagaaagtggg

SEQ ID NO: 24523 - DNA, 40 bp, Artificial Sequence
  primer
gtaaaacgacggccagtaaagtcaatatatgcctgggagc

SEQ ID NO: 24524 - DNA, 38 bp, Artificial Sequence
  primer
gtaaaacgacggccagttgcagtgttacaggtagcagg

SEQ ID NO: 24525 - DNA, 24 bp, Artificial Sequence
  primer
gtgtattaggatgctgtgctcttc

SEQ ID NO: 24526 - DNA, 37 bp, Artificial Sequence
  primer
gtaaaacgacggccagttgctttgtgccaatgaagag

SEQ ID NO: 24527 - DNA, 38 bp, Artificial Sequence
  primer
gtaaaacgacggccagttggttgattggagatgagagc

SEQ ID NO: 24528 - DNA, 39 bp, Artificial Sequence
  primer
gtaaaacgacggccagtgatggccatagtagcagcaaac

SEQ ID NO: 24529 - DNA, 21 bp, Artificial Sequence
  primer
atccctcccttctttctgacc

SEQ ID NO: 24530 - DNA, 20 bp, Artificial Sequence
  primer
tgtaacaaacttgcccgtgg

SEQ ID NO: 24531 - DNA, 40 bp, Artificial Sequence
  primer
gtaaaacgacggccagtcttgttagcaggaagcatagcac

SEQ ID NO: 24532 - DNA, 43 bp, Artificial Sequence
  primer
gtaaaacgacggccagtccaatgtacttaaatgaatggagttc

SEQ ID NO: 24533 - DNA, 41 bp, Artificial Sequence
  primer
gtaaaacgacggccagtcaattaaatgtagcttgcctgatg

SEQ ID NO: 24534 - DNA, 21 bp, Artificial Sequence
  primer
gacatgtctttcagtccaccc

SEQ ID NO: 24535 - DNA, 20 bp, Artificial Sequence
  primer
agaccctggtccagcaattc

SEQ ID NO: 24536 - DNA, 38 bp, Artificial Sequence
  primer
gtaaaacgacggccagtctgtgggtgataacatctggg

SEQ ID NO: 24537 - DNA, 21 bp, Artificial Sequence
  primer
ttatgtcattccaggcaggag

SEQ ID NO: 24538 - DNA, 20 bp, Artificial Sequence
  primer
cagtctgagtgcccttggtc

SEQ ID NO: 24539 - DNA, 41 bp, Artificial Sequence
  primer
gtaaaacgacggccagtccttgtgatctgtctcaagcttat

SEQ ID NO: 24540 - DNA, 38 bp, Artificial Sequence
  primer
gtaaaacgacggccagtatgagcgtgtctgtgttgacg

SEQ ID NO: 24541 - DNA, 21 bp, Artificial Sequence
  primer
agaattacccgaacccaggag

SEQ ID NO: 24542 - DNA, 18 bp, Artificial Sequence
  primer
ggcatgtgaatcgcctga

SEQ ID NO: 24543 - DNA, 41 bp, Artificial Sequence
  primer
gtaaaacgacggccagtagtggaagtctgactcatgttcac

SEQ ID NO: 24544 - DNA, 21 bp, Artificial Sequence
  primer
tgctgcaggatttctggatac

SEQ ID NO: 24545 - DNA, 22 bp, Artificial Sequence
  primer
agtttggttagtaggcattggg

SEQ ID NO: 24546 - DNA, 39 bp, Artificial Sequence
  primer
gtaaaacgacggccagtgtaatgccgttcttcatttgtg

SEQ ID NO: 24547 - DNA, 21 bp, Artificial Sequence
  primer
aaatattccgtctgtgctggc

SEQ ID NO: 24548 - DNA, 38 bp, Artificial Sequence
  primer
gtaaaacgacggccagtcctgaacactagcacccacag

SEQ ID NO: 24549 - DNA, 21 bp, Artificial Sequence
  primer
agggccacatgatagaagagg

SEQ ID NO: 24550 - DNA, 21 bp, Artificial Sequence
  primer
aggtgctggcagatgtattcc

SEQ ID NO: 24551 - DNA, 21 bp, Artificial Sequence
  primer
cgactgaatagatggctgtcc

SEQ ID NO: 24552 - DNA, 21 bp, Artificial Sequence
  primer
atctggaagggtgtaactggc

SEQ ID NO: 24553 - DNA, 38 bp, Artificial Sequence
  primer
gtaaaacgacggccagtaggactagcagttctctgcgg

SEQ ID NO: 24554 - DNA, 21 bp, Artificial Sequence
  primer
agcaatgtgattcccgctaac

SEQ ID NO: 24555 - DNA, 38 bp, Artificial Sequence
  primer
gtaaaacgacggccagtgtcgcgagctagaactcttcc

SEQ ID NO: 24556 - DNA, 21 bp, Artificial Sequence
  primer
acaggattggattgggaacac

SEQ ID NO: 24557 - DNA, 40 bp, Artificial Sequence
  primer
gtaaaacgacggccagtaagtgcaattaggaaccaaacag

SEQ ID NO: 24558 - DNA, 26 bp, Artificial Sequence
  primer
ttgtatagacaaggttcctagtggag

SEQ ID NO: 24559 - DNA, 38 bp, Artificial Sequence
  primer
gtaaaacgacggccagtctaagaggtttctgggttgcc

SEQ ID NO: 24560 - DNA, 21 bp, Artificial Sequence
  primer
tggagtctagctcttccaggc

SEQ ID NO: 24561 - DNA, 38 bp, Artificial Sequence
  primer
gtaaaacgacggccagtcataccttgccctctccacac

SEQ ID NO: 24562 - DNA, 19 bp, Artificial Sequence
  primer
catcagcacctgcatcctg

SEQ ID NO: 24563 - DNA, 37 bp, Artificial Sequence
  primer
gtaaaacgacggccagttacctgttccaacacggctc

SEQ ID NO: 24564 - DNA, 18 bp, Artificial Sequence
  primer
caccatgcccagcctatg

SEQ ID NO: 24565 - DNA, 43 bp, Artificial Sequence
  primer
gtaaaacgacggccagtttggatctatgctgaaacaaatacag

SEQ ID NO: 24566 - DNA, 44 bp, Artificial Sequence
  primer
gtaaaacgacggccagtccatatgtatatcatttgtctcccaac

SEQ ID NO: 24567 - DNA, 26 bp, Artificial Sequence
  primer
tttcccaataggtacaagttacaatg

SEQ ID NO: 24568 - DNA, 44 bp, Artificial Sequence
  primer
gtaaaacgacggccagtgctttcatataggcagaaaccttattg

SEQ ID NO: 24569 - DNA, 25 bp, Artificial Sequence
  primer
ggtacagtcagcctctatcttatcg

SEQ ID NO: 24570 - DNA, 21 bp, Artificial Sequence
  primer
acacctatcctgctcacatgg

SEQ ID NO: 24571 - DNA, 44 bp, Artificial Sequence
  primer
gtaaaacgacggccagtttgagaagagttccttagtttaatccc

SEQ ID NO: 24572 - DNA, 38 bp, Artificial Sequence
  primer
gtaaaacgacggccagtattagcaggatttgccatgtg

SEQ ID NO: 24573 - DNA, 21 bp, Artificial Sequence
  primer
taccattgtgctctagcctgg

SEQ ID NO: 24574 - DNA, 38 bp, Artificial Sequence
  primer
gtaaaacgacggccagttggtcttgactgctttccctc

SEQ ID NO: 24575 - DNA, 21 bp, Artificial Sequence
  primer
acatggtgcctgaatttgttg

SEQ ID NO: 24576 - DNA, 21 bp, Artificial Sequence
  primer
ttcctcaagcacttaaagcgg

SEQ ID NO: 24577 - DNA, 29 bp, Artificial Sequence
  primer
tgtactgaatagtatcattaagaaatcgg

SEQ ID NO: 24578 - DNA, 39 bp, Artificial Sequence
  primer
gtaaaacgacggccagtagagcatctcacgtcacagaag

SEQ ID NO: 24579 - DNA, 21 bp, Artificial Sequence
  primer
gaggttgccagtagggagaag

SEQ ID NO: 24580 - DNA, 35 bp, Artificial Sequence
  primer
gtaaaacgacggccagtccaccgtagaagggcgtc

SEQ ID NO: 24581 - DNA, 21 bp, Artificial Sequence
  primer
taggcccttagtgtccagagg

SEQ ID NO: 24582 - DNA, 20 bp, Artificial Sequence
  primer
cagccttgtctttgctgtcc

SEQ ID NO: 24583 - DNA, 38 bp, Artificial Sequence
  primer
gtaaaacgacggccagtatggaaatccacttctgtggg

SEQ ID NO: 24584 - DNA, 38 bp, Artificial Sequence
  primer
gtaaaacgacggccagtggcaggtgggctagaattaac

SEQ ID NO: 24585 - DNA, 38 bp, Artificial Sequence
  primer
gtaaaacgacggccagttcacattcccaagcttcattc

SEQ ID NO: 24586 - DNA, 21 bp, Artificial Sequence
  primer
atccctgtgtgtctctgtccc

SEQ ID NO: 24587 - DNA, 38 bp, Artificial Sequence
  primer
gtaaaacgacggccagtcaccttgtgagacgtttgtgg

SEQ ID NO: 24588 - DNA, 38 bp, Artificial Sequence
  primer
gtaaaacgacggccagtagttaggacttgggattcggc

SEQ ID NO: 24589 - DNA, 18 bp, Artificial Sequence
  primer
tttctcggtgcttgcctg

SEQ ID NO: 24590 - DNA, 36 bp, Artificial Sequence
  primer
gtaaaacgacggccagtcctgggtctcaacgcacac

SEQ ID NO: 24591 - DNA, 21 bp, Artificial Sequence
  primer
agtaggtcaagaggcaggagc

SEQ ID NO: 24592 - DNA, 21 bp, Artificial Sequence
  primer
gactcatctaccaagggcagc

SEQ ID NO: 24593 - DNA, 37 bp, Artificial Sequence
  primer
gtaaaacgacggccagtcttgcagtcgtggacctgag

SEQ ID NO: 24594 - DNA, 38 bp, Artificial Sequence
  primer
gtaaaacgacggccagttaaaccatccaaatgccttgc

SEQ ID NO: 24595 - DNA, 38 bp, Artificial Sequence
  primer
gtaaaacgacggccagtagaaagcaaacttggtggcag

SEQ ID NO: 24596 - DNA, 42 bp, Artificial Sequence
  primer
gtaaaacgacggccagtcctcagaatatggagaatgtctgtc

SEQ ID NO: 24597 - DNA, 18 bp, Artificial Sequence
  primer
ccctaaccctgaggctgc

SEQ ID NO: 24598 - DNA, 40 bp, Artificial Sequence
  primer
gtaaaacgacggccagtgcatggagttcaaggtaaatcct

SEQ ID NO: 24599 - DNA, 39 bp, Artificial Sequence
  primer
gtaaaacgacggccagttcccaaatacatagggagcaag

SEQ ID NO: 24600 - DNA, 22 bp, Artificial Sequence
  primer
ggcaaataaagctgtggtatgg

SEQ ID NO: 24601 - DNA, 38 bp, Artificial Sequence
  primer
gtaaaacgacggccagtaccctccataagctgtgttgc

SEQ ID NO: 24602 - DNA, 38 bp, Artificial Sequence
  primer
gtaaaacgacggccagtaagctgtgcagcaaattgaag

SEQ ID NO: 24603 - DNA, 21 bp, Artificial Sequence
  primer
ggtcatacttgggtgaaagcc

SEQ ID NO: 24604 - DNA, 21 bp, Artificial Sequence
  primer
ttgcaggtgaccagagttgac

SEQ ID NO: 24605 - DNA, 22 bp, Artificial Sequence
  primer
ggcctttatgaaggacaaggag

SEQ ID NO: 24606 - DNA, 38 bp, Artificial Sequence
  primer
gtaaaacgacggccagtctctttgtttccacgggtagc

SEQ ID NO: 24607 - DNA, 36 bp, Artificial Sequence
  primer
gtaaaacgacggccagtgcgcccagtctatttcctg

SEQ ID NO: 24608 - DNA, 21 bp, Artificial Sequence
  primer
ctgtgtgtgcatagttgctgg

SEQ ID NO: 24609 - DNA, 38 bp, Artificial Sequence
  primer
gtaaaacgacggccagtaggcttccctctctccacttc

SEQ ID NO: 24610 - DNA, 21 bp, Artificial Sequence
  primer
tttaaatactccgattgcggc

SEQ ID NO: 24611 - DNA, 38 bp, Artificial Sequence
  primer
gtaaaacgacggccagtcatccttgcaaagaacgtcag

SEQ ID NO: 24612 - DNA, 35 bp, Artificial Sequence
  primer
gtaaaacgacggccagtgtgtcggtgcctctcctg

SEQ ID NO: 24613 - DNA, 21 bp, Artificial Sequence
  primer
tggttctcctggtctgagatg

SEQ ID NO: 24614 - DNA, 21 bp, Artificial Sequence
  primer
gtcatttgccgtatttgttgc

SEQ ID NO: 24615 - DNA, 18 bp, Artificial Sequence
  primer
tgacctcgtgatctgccc

SEQ ID NO: 24616 - DNA, 37 bp, Artificial Sequence
  primer
gtaaaacgacggccagtttgtatcttccctgaggccc

SEQ ID NO: 24617 - DNA, 36 bp, Artificial Sequence
  primer
gtaaaacgacggccagtggagccatggcagtctcag

SEQ ID NO: 24618 - DNA, 20 bp, Artificial Sequence
  primer
tggcctgcagagaatgtttc

SEQ ID NO: 24619 - DNA, 36 bp, Artificial Sequence
  primer
gtaaaacgacggccagtctgtgctgtgggtggtgac

SEQ ID NO: 24620 - DNA, 38 bp, Artificial Sequence
  primer
gtaaaacgacggccagtaccacaaccttggctgatgtc

SEQ ID NO: 24621 - DNA, 38 bp, Artificial Sequence
  primer
gtaaaacgacggccagtttctgctccttcccagagttg

SEQ ID NO: 24622 - DNA, 38 bp, Artificial Sequence
  primer
gtaaaacgacggccagtcccttctctctccacttcctg

SEQ ID NO: 24623 - DNA, 36 bp, Artificial Sequence
  primer
gtaaaacgacggccagtggtgaacggagctggagtc

SEQ ID NO: 24624 - DNA, 38 bp, Artificial Sequence
  primer
gtaaaacgacggccagttgctggctctagaaacttggg

SEQ ID NO: 24625 - DNA, 38 bp, Artificial Sequence
  primer
gtaaaacgacggccagttcatgtaccggagtcctgttg

SEQ ID NO: 24626 - DNA, 35 bp, Artificial Sequence
  primer
gtaaaacgacggccagtctatgccgtggccctacc

SEQ ID NO: 24627 - DNA, 19 bp, Artificial Sequence
  primer
cactcaccgaggcactgag

SEQ ID NO: 24628 - DNA, 37 bp, Artificial Sequence
  primer
gtaaaacgacggccagtctcactgtgttgccatgctg

SEQ ID NO: 24629 - DNA, 21 bp, Artificial Sequence
  primer
aaatgtcggattgtgtgaagc

SEQ ID NO: 24630 - DNA, 38 bp, Artificial Sequence
  primer
gtaaaacgacggccagtaaagttctctggctgttgcat

SEQ ID NO: 24631 - DNA, 21 bp, Artificial Sequence
  primer
acgcaactattgtgggacaaa

SEQ ID NO: 24632 - DNA, 21 bp, Artificial Sequence
  primer
ctgttggaaagaactgggaga

SEQ ID NO: 24633 - DNA, 20 bp, Artificial Sequence
  primer
cattgttgcgctgtttgcta

SEQ ID NO: 24634 - DNA, 38 bp, Artificial Sequence
  primer
gtaaaacgacggccagtaaagacaaatggcatggaacc

SEQ ID NO: 24635 - DNA, 20 bp, Artificial Sequence
  primer
gtttgccaaatagcacctgg

SEQ ID NO: 24636 - DNA, 38 bp, Artificial Sequence
  primer
gtaaaacgacggccagttcacacctgacaaggtcaaca

SEQ ID NO: 24637 - DNA, 23 bp, Artificial Sequence
  primer
aaattcttgcctagtcttctggg

SEQ ID NO: 24638 - DNA, 37 bp, Artificial Sequence
  primer
gtaaaacgacggccagtaaacagacaacaaggccacc

SEQ ID NO: 24639 - DNA, 38 bp, Artificial Sequence
  primer
gtaaaacgacggccagtatgctggtcttgaactcctga

SEQ ID NO: 24640 - DNA, 38 bp, Artificial Sequence
  primer
gtaaaacgacggccagttgacacaagaggtcgacattg

SEQ ID NO: 24641 - DNA, 38 bp, Artificial Sequence; identical to SEQ ID NO: 24630
  primer

SEQ ID NO: 24642 - DNA, 21 bp, Artificial Sequence
  primer
tgagccaggattgtaccactg

SEQ ID NO: 24643 - DNA, 21 bp, Artificial Sequence
  primer
gagttgacactcagtcaccca

SEQ ID NO: 24644 - DNA, 21 bp, Artificial Sequence
  primer
ccagggcttcaaattctttgg

SEQ ID NO: 24645 - DNA, 21 bp, Artificial Sequence
  primer
tctatcaggaggctgaggtgg

SEQ ID NO: 24646 - DNA, 21 bp, Artificial Sequence
  primer
cagccggcctattctgatatg

SEQ ID NO: 24647 - DNA, 38 bp, Artificial Sequence; identical to SEQ ID NO: 24636
  primer

SEQ ID NO: 24648 - DNA, 21 bp, Artificial Sequence
  primer
agtgagccaagatcacaccac

SEQ ID NO: 24649 - DNA, 38 bp, Artificial Sequence
  primer
gtaaaacgacggccagttttctaaggctctgtggaggc

SEQ ID NO: 24650 - DNA, 21 bp, Artificial Sequence
  primer
atcttcctggagcaggttcac

SEQ ID NO: 24651 - DNA, 21 bp, Artificial Sequence
  primer
acattgaccactggaagcaag

SEQ ID NO: 24652 - DNA, 38 bp, Artificial Sequence
  primer
gtaaaacgacggccagtacgcatcgacgtagaatttcc

SEQ ID NO: 24653 - DNA, 21 bp, Artificial Sequence
  primer
ggaggcctttaccctgctatc

SEQ ID NO: 24654 - DNA, 22 bp, Artificial Sequence
  primer
cacagggcaaagtatagcaatg

SEQ ID NO: 24655 - DNA, 21 bp, Artificial Sequence
  primer
ccacagtgatgctaatctggg

SEQ ID NO: 24656 - DNA, 37 bp, Artificial Sequence
  primer
gtaaaacgacggccagtggaagcctgtgacgtctgtg

SEQ ID NO: 24657 - DNA, 22 bp, Artificial Sequence
  primer
cccatgatgcctaaataaccag

SEQ ID NO: 24658 - DNA, 38 bp, Artificial Sequence
  primer
gtaaaacgacggccagtgcaacatagcaagacctcgtc

SEQ ID NO: 24659 - DNA, 37 bp, Artificial Sequence
  primer
gtaaaacgacggccagtcaccatgcccagcctatatc

SEQ ID NO: 24660 - DNA, 21 bp, Artificial Sequence
  primer
agcacagggacattgactcac

SEQ ID NO: 24661 - DNA, 40 bp, Artificial Sequence
  primer
gtaaaacgacggccagtcaccaacatccatctctaccttg

SEQ ID NO: 24662 - DNA, 39 bp, Artificial Sequence
  primer
gtaaaacgacggccagtaatttcctttgcctctttcctg

SEQ ID NO: 24663 - DNA, 39 bp, Artificial Sequence
  primer
gtaaaacgacggccagtcataggtagctgggaggtaggg

SEQ ID NO: 24664 - DNA, 38 bp, Artificial Sequence
  primer
gtaaaacgacggccagtcatttggtggcaatatccctg

SEQ ID NO: 24665 - DNA, 21 bp, Artificial Sequence
  primer
agcaaagaccacgttcctgtc

SEQ ID NO: 24666 - DNA, 22 bp, Artificial Sequence
  primer
ccagaccactggattcactatg

SEQ ID NO: 24667 - DNA, 39 bp, Artificial Sequence
  primer
gtaaaacgacggccagtgatccgtgcgacttgatcttag

SEQ ID NO: 24668 - DNA, 46 bp, Artificial Sequence
  primer
gtaaaacgacggccagttgtctataatctttaggctatttcatgtg

SEQ ID NO: 24669 - DNA, 36 bp, Artificial Sequence
  primer
gtaaaacgacggccagtatgccaggctgagacagtg

SEQ ID NO: 24670 - DNA, 37 bp, Artificial Sequence
  primer
gtaaaacgacggccagtaaagggttaagggccaggac

SEQ ID NO: 24671 - DNA, 38 bp, Artificial Sequence
  primer
gtaaaacgacggccagtctaaggatatgggcaattggg

SEQ ID NO: 24672 - DNA, 21 bp, Artificial Sequence
  primer
tgtcatgggctgtaaggaatg

SEQ ID NO: 24673 - DNA, 22 bp, Artificial Sequence
  primer
aactggatgagaaagcaccttg

SEQ ID NO: 24674 - DNA, 38 bp, Artificial Sequence
  primer
gtaaaacgacggccagtacaggcacacatcaacactgc

SEQ ID NO: 24675 - DNA, 24 bp, Artificial Sequence
  primer
catctgctttctaaattggttctg

SEQ ID NO: 24676 - DNA, 38 bp, Artificial Sequence
  primer
gtaaaacgacggccagtgcatccatgattgagaattgc

SEQ ID NO: 24677 - DNA, 21 bp, Artificial Sequence
  primer
ttgttcagtgctttgctctcc

SEQ ID NO: 24678 - DNA, 38 bp, Artificial Sequence
  primer
gtaaaacgacggccagtaacattgctgtcttcccagaa

SEQ ID NO: 24679 - DNA, 39 bp, Artificial Sequence
  primer
gtaaaacgacggccagtttcattatgttcctgctgcttg

SEQ ID NO: 24680 - DNA, 36 bp, Artificial Sequence
  primer
gtaaaacgacggccagtaaatgccacactccttcgc

SEQ ID NO: 24681 - DNA, 21 bp, Artificial Sequence
  primer
aacttgccattgagatttggg

SEQ ID NO: 24682 - DNA, 20 bp, Artificial Sequence
  primer
gtgcccatcacagattcagc

SEQ ID NO: 24683 - DNA, 39 bp, Artificial Sequence
  primer
gtaaaacgacggccagttgcaaatcaatgtgtatctggg

SEQ ID NO: 24684 - DNA, 39 bp, Artificial Sequence
  primer
gtaaaacgacggccagtcattcctcatttcttccaaacc

SEQ ID NO: 24685 - DNA, 37 bp, Artificial Sequence
  primer
gtaaaacgacggccagttatgttgagccgaaaccagg

SEQ ID NO: 24686 - DNA, 21 bp, Artificial Sequence
  primer
agagaatgggacagatgggag

SEQ ID NO: 24687 - DNA, 27 bp, Artificial Sequence
  primer
gaagatgacattatatgctaccttgct

SEQ ID NO: 24688 - DNA, 22 bp, Artificial Sequence
  primer
tcagtctaatgactggattgcc

SEQ ID NO: 24689 - DNA, 19 bp, Artificial Sequence
  primer
agccactgcacccagagac

SEQ ID NO: 24690 - DNA, 38 bp, Artificial Sequence
  primer
gtaaaacgacggccagtaattggattaaagaaccgggc

SEQ ID NO: 24691 - DNA, 38 bp, Artificial Sequence
  primer
gtaaaacgacggccagttgagtcttggtccttcccttc

SEQ ID NO: 24692 - DNA, 20 bp, Artificial Sequence
  primer
gcatgtatcaggccttccag

SEQ ID NO: 24693 - DNA, 38 bp, Artificial Sequence
  primer
gtaaaacgacggccagtcctccctgttcatcaccagac

SEQ ID NO: 24694 - DNA, 39 bp, Artificial Sequence
  primer
gtaaaacgacggccagtggtctgtgcaaagtctgtttcc

SEQ ID NO: 24695 - DNA, 26 bp, Artificial Sequence
  primer
tgaatgtacaaatagatggttggatg

SEQ ID NO: 24696 - DNA, 38 bp, Artificial Sequence
  primer
gtaaaacgacggccagtcctggctcaagacccatttac

SEQ ID NO: 24697 - DNA, 38 bp, Artificial Sequence
  primer
gtaaaacgacggccagtaaaggtctggcacttggtagg

SEQ ID NO: 24698 - DNA, 38 bp, Artificial Sequence
  primer
gtaaaacgacggccagtagctggcttggaccaggtatc

SEQ ID NO: 24699 - DNA, 20 bp, Artificial Sequence
  primer
agtggctgtctgctcactgg

SEQ ID NO: 24700 - DNA, 38 bp, Artificial Sequence
  primer
gtaaaacgacggccagttcaaagaggctgtcttccctc

SEQ ID NO: 24701 - DNA, 38 bp, Artificial Sequence
  primer
gtaaaacgacggccagtgtgacattcaacagggctagg

SEQ ID NO: 24702 - DNA, 38 bp, Artificial Sequence
  primer
gtaaaacgacggccagtgtacccaaattgttggttggg

SEQ ID NO: 24703 - DNA, 38 bp, Artificial Sequence
  primer
gtaaaacgacggccagtacactgatcccagtccattcc

SEQ ID NO: 24704 - DNA, 38 bp, Artificial Sequence
  primer
gtaaaacgacggccagtgagtaggtattcctggccctg

SEQ ID NO: 24705 - DNA, 38 bp, Artificial Sequence
  primer
gtaaaacgacggccagtgagattcagactcccaaagcc

SEQ ID NO: 24706 - DNA, 38 bp, Artificial Sequence
  primer
gtaaaacgacggccagtaagtgcagatcgaagctaggc

SEQ ID NO: 24707 - DNA, 21 bp, Artificial Sequence
  primer
agagggaagcaggtgaagttg

SEQ ID NO: 24708 - DNA, 21 bp, Artificial Sequence
  primer
accttccgaaagctgtgagtc

SEQ ID NO: 24709 - DNA, 38 bp, Artificial Sequence
  primer
gtaaaacgacggccagtgccagctctatggagacacag

SEQ ID NO: 24710 - DNA, 21 bp, Artificial Sequence
  primer
gcccagggagtagtgacagac

SEQ ID NO: 24711 - DNA, 37 bp, Artificial Sequence
  primer
gtaaaacgacggccagtggtcctgagtgggtttgagc

SEQ ID NO: 24712 - DNA, 37 bp, Artificial Sequence
  primer
gtaaaacgacggccagtcagaccagttccacgtcctg

SEQ ID NO: 24713 - DNA, 23 bp, Artificial Sequence
  primer
gcgaagctactaatttgaaagca

SEQ ID NO: 24714 - DNA, 41 bp, Artificial Sequence
  primer
gtaaaacgacggccagtgagccatcttcaaagtaggacaaa

SEQ ID NO: 24715 - DNA, 21 bp, Artificial Sequence
  primer
cattggagcatcatggtaagc

SEQ ID NO: 24716 - DNA, 21 bp, Artificial Sequence
  primer
accatttaggactgcaggagc

SEQ ID NO: 24717 - DNA, 21 bp, Artificial Sequence
  primer
agacactatgcatggcactgg

SEQ ID NO: 24718 - DNA, 19 bp, Artificial Sequence
  primer
gccagaggaaatagctcgc

SEQ ID NO: 24719 - DNA, 21 bp, Artificial Sequence
  primer
ggttctcatgttcccttctgc

SEQ ID NO: 24720 - DNA, 38 bp, Artificial Sequence
  primer
gtaaaacgacggccagtgtaggttctgggcttactgcc

SEQ ID NO: 24721 - DNA, 25 bp, Artificial Sequence
  primer
tgtaagggtaatcctgtggaaatag

SEQ ID NO: 24722 - DNA, 21 bp, Artificial Sequence
  primer
ttccaggacggatcatagacc

SEQ ID NO: 24723 - DNA, 21 bp, Artificial Sequence
  primer
cgagaaactgaggctggagac

SEQ ID NO: 24724 - DNA, 38 bp, Artificial Sequence
  primer
gtaaaacgacggccagtctgctaaccagtctgtgcctg

SEQ ID NO: 24725 - DNA, 44 bp, Artificial Sequence
  primer
gtaaaacgacggccagttttctccctcaaatgattaaactgtag

SEQ ID NO: 24726 - DNA, 25 bp, Artificial Sequence
  primer
gaaactcctttattcatcatagccc

SEQ ID NO: 24727 - DNA, 38 bp, Artificial Sequence
  primer
gtaaaacgacggccagtaggaacaaggagaaaccagcc

SEQ ID NO: 24728 - DNA, 20 bp, Artificial Sequence
  primer
cctgaactgcacagtcggag

SEQ ID NO: 24729 - DNA, 38 bp, Artificial Sequence
  primer
gtaaaacgacggccagttgtttgtaaacagcagggtgg

SEQ ID NO: 24730 - DNA, 38 bp, Artificial Sequence
  primer
gtaaaacgacggccagttgagcagcagtttctcagagc

SEQ ID NO: 24731 - DNA, 21 bp, Artificial Sequence
  primer
catggcagcagagatcgttac

SEQ ID NO: 24732 - DNA, 38 bp, Artificial Sequence
  primer
gtaaaacgacggccagtcctgctcttggtctgtgtttg

SEQ ID NO: 24733 - DNA, 38 bp, Artificial Sequence
  primer
gtaaaacgacggccagtttcacttctgcgtctcagctc

SEQ ID NO: 24734 - DNA, 21 bp, Artificial Sequence
  primer
cttcactcacaccatggcttc

SEQ ID NO: 24735 - DNA, 37 bp, Artificial Sequence
  primer
gtaaaacgacggccagttgtggtcaagaggaagccac

SEQ ID NO: 24736 - DNA, 21 bp, Artificial Sequence
  primer
ttcagagcatagggagttggg

SEQ ID NO: 24737 - DNA, 38 bp, Artificial Sequence
  primer
gtaaaacgacggccagttagatcgtggtgtatgtgggc

SEQ ID NO: 24738 - DNA, 38 bp, Artificial Sequence
  primer
gtaaaacgacggccagtcggaacagacttctgcatgtc

SEQ ID NO: 24739 - DNA, 21 bp, Artificial Sequence
  primer
caggaccacgagctaagatcc

SEQ ID NO: 24740 - DNA, 23 bp, Artificial Sequence
  primer
tggagtaagttctgtgcattgtg

SEQ ID NO: 24741 - DNA, 21 bp, Artificial Sequence
  primer
gtttcctgccttggaaatgag

SEQ ID NO: 24742 - DNA, 38 bp, Artificial Sequence
  primer
gtaaaacgacggccagtatgacgacaaaccacagcaag

SEQ ID NO: 24743 - DNA, 22 bp, Artificial Sequence
  primer
tgcaagattgattgttggaaag

SEQ ID NO: 24744 - DNA, 36 bp, Artificial Sequence
  primer
gtaaaacgacggccagtcggaacctagagtcgcagg

SEQ ID NO: 24745 - DNA, 20 bp, Artificial Sequence
  primer
gtgagcggtgtggagaagac

SEQ ID NO: 24746 - DNA, 19 bp, Artificial Sequence
  primer
gcctcagagaaactcgccc

SEQ ID NO: 24747 - DNA, 38 bp, Artificial Sequence
  primer
gtaaaacgacggccagttgctggcagagtatggagttg

SEQ ID NO: 24748 - DNA, 23 bp, Artificial Sequence
  primer
aaggtggttagaattgtatgggc

SEQ ID NO: 24749 - DNA, 21 bp, Artificial Sequence
  primer
gcagtcccagaatgatttcac

SEQ ID NO: 24750 - DNA, 36 bp, Artificial Sequence
  primer
gtaaaacgacggccagtggtctggtcttcggaaggg

SEQ ID NO: 24751 - DNA, 41 bp, Artificial Sequence
  primer
gtaaaacgacggccagtaaatttcaactccatggttattgg

SEQ ID NO: 24752 - DNA, 37 bp, Artificial Sequence
  primer
gtaaaacgacggccagtagagctggagaaacttccgc

SEQ ID NO: 24753 - DNA, 38 bp, Artificial Sequence
  primer
gtaaaacgacggccagtgggagagtgttagggtcatgg

SEQ ID NO: 24754 - DNA, 38 bp, Artificial Sequence
  primer
gtaaaacgacggccagtggcaatgtacaaagggaaagc

SEQ ID NO: 24755 - DNA, 38 bp, Artificial Sequence
  primer
gtaaaacgacggccagttgaagctcagcctttaggacc

SEQ ID NO: 24756 - DNA, 21 bp, Artificial Sequence
  primer
agagctacaacctcagggcac

SEQ ID NO: 24757 - DNA, 38 bp, Artificial Sequence
  primer
gtaaaacgacggccagtcctgaagatcaagaactgccc

SEQ ID NO: 24758 - DNA, 39 bp, Artificial Sequence
  primer
gtaaaacgacggccagtggttcctgagccagtcttaacc

SEQ ID NO: 24759 - DNA, 38 bp, Artificial Sequence
  primer
gtaaaacgacggccagtacttccagctcattcagctcc

SEQ ID NO: 24760 - DNA, 38 bp, Artificial Sequence
  primer
gtaaaacgacggccagtccaaccagacaccaaacttcc

SEQ ID NO: 24761 - DNA, 18 bp, Artificial Sequence
  primer
gccctgtctgcctttctg

SEQ ID NO: 24762 - DNA, 21 bp, Artificial Sequence
  primer
taccaaagactttctcacccg

SEQ ID NO: 24763 - DNA, 21 bp, Artificial Sequence
  primer
aataagtttaggctgggtgcg

SEQ ID NO: 24764 - DNA, 38 bp, Artificial Sequence
  primer
gtaaaacgacggccagttatgtaccaaatggagccagg

SEQ ID NO: 24765 - DNA, 39 bp, Artificial Sequence
  primer
gtaaaacgacggccagtttgtttcctcgttaacattggg

SEQ ID NO: 24766 - DNA, 39 bp, Artificial Sequence
  primer
gtaaaacgacggccagttttccaaagcaccaagagagac

SEQ ID NO: 24767 - DNA, 38 bp, Artificial Sequence
  primer
gtaaaacgacggccagttgtctaccacatgcacagcac

SEQ ID NO: 24768 - DNA, 20 bp, Artificial Sequence
  primer
cttcctcgtctcgctcttcc

SEQ ID NO: 24769 - DNA, 38 bp, Artificial Sequence
  primer
gtaaaacgacggccagttttgcctaccacacagctcag

SEQ ID NO: 24770 - DNA, 20 bp, Artificial Sequence
  primer
gctgcatagtgcctggagtc

SEQ ID NO: 24771 - DNA, 38 bp, Artificial Sequence
  primer
gtaaaacgacggccagtctctttctcaaactggcctcc

SEQ ID NO: 24772 - DNA, 20 bp, Artificial Sequence
  primer
agcctggctgcttagggtag

SEQ ID NO: 24773 - DNA, 20 bp, Artificial Sequence
  primer
agaggacagatgggaccctg

SEQ ID NO: 24774 - DNA, 37 bp, Artificial Sequence
  primer
gtaaaacgacggccagtcatcgtgtctccctttgtcc

SEQ ID NO: 24775 - DNA, 39 bp, Artificial Sequence
  primer
gtaaaacgacggccagtgattgattcctgtttggagcag

SEQ ID NO: 24776 - DNA, 21 bp, Artificial Sequence
  primer
acccaccagcagataaaccac

SEQ ID NO: 24777 - DNA, 38 bp, Artificial Sequence
  primer
gtaaaacgacggccagtggcagtagggagtggatgaac

SEQ ID NO: 24778 - DNA, 36 bp, Artificial Sequence
  primer
gtaaaacgacggccagtagctgcctttccttcatgc

SEQ ID NO: 24779 - DNA, 21 bp, Artificial Sequence
  primer
caggtaccggtcagactacgg

SEQ ID NO: 24780 - DNA, 38 bp, Artificial Sequence
  primer
gtaaaacgacggccagtaccaaccaattgaattccagg

SEQ ID NO: 24781 - DNA, 40 bp, Artificial Sequence
  primer
gtaaaacgacggccagtcccacctccaagtagtgatcaag

SEQ ID NO: 24782 - DNA, 21 bp, Artificial Sequence
  primer
catcgcttaaatgaggaagcc

SEQ ID NO: 24783 - DNA, 21 bp, Artificial Sequence
  primer
cttgttgggtgctgctgatac

SEQ ID NO: 24784 - DNA, 38 bp, Artificial Sequence
  primer
gtaaaacgacggccagtcagggctggcataaggtagag

SEQ ID NO: 24785 - DNA, 39 bp, Artificial Sequence
  primer
gtaaaacgacggccagtgctgacatttattcttgccagg

SEQ ID NO: 24786 - DNA, 21 bp, Artificial Sequence
  primer
taagtgattggctcttcctgc

SEQ ID NO: 24787 - DNA, 38 bp, Artificial Sequence
  primer
gtaaaacgacggccagttccactccaaggacaggattc

SEQ ID NO: 24788 - DNA, 22 bp, Artificial Sequence
  primer
gcaagaaatgaaggtgttgagg

SEQ ID NO: 24789 - DNA, 21 bp, Artificial Sequence
  primer
accacctagagcaacagaggg

SEQ ID NO: 24790 - DNA, 21 bp, Artificial Sequence
  primer
ctttctgcctccaaattgctc

SEQ ID NO: 24791 - DNA, 20 bp, Artificial Sequence
  primer
aggtcatcagtcacgttcgc

SEQ ID NO: 24792 - DNA, 22 bp, Artificial Sequence
  primer
tttgaaatgaatgtgtgcaact

SEQ ID NO: 24793 - DNA, 21 bp, Artificial Sequence
  primer
agcatcacaaagtcagcttcc

SEQ ID NO: 24794 - DNA, 38 bp, Artificial Sequence
  primer
gtaaaacgacggccagttttggatcctttatgccaagc

SEQ ID NO: 24795 - DNA, 21 bp, Artificial Sequence
  primer
ttgttcattgctcacaggtcc

SEQ ID NO: 24796 - DNA, 24 bp, Artificial Sequence
  primer
ctagataaatcctccttcattgcc

SEQ ID NO: 24797 - DNA, 19 bp, Artificial Sequence
  primer
tgggtctgggcatcatttc

SEQ ID NO: 24798 - DNA, 21 bp, Artificial Sequence
  primer
tcaggtctcttcagcaacagg

SEQ ID NO: 24799 - DNA, 39 bp, Artificial Sequence
  primer
gtaaaacgacggccagtaactctgcaagtgcctttgttc

SEQ ID NO: 24800 - DNA, 38 bp, Artificial Sequence
  primer
gtaaaacgacggccagtaggtgtgtctccaggaaggac

SEQ ID NO: 24801 - DNA, 21 bp, Artificial Sequence
  primer
cattcctgtctcagaggaggg

SEQ ID NO: 24802 - DNA, 21 bp, Artificial Sequence
  primer
gttgggagtctttgtgttccc

SEQ ID NO: 24803 - DNA, 37 bp, Artificial Sequence
  primer
gtaaaacgacggccagtaggtgatggcattgatgtgg

SEQ ID NO: 24804 - DNA, 20 bp, Artificial Sequence
  primer
gtggttgtgtggcactgttg

SEQ ID NO: 24805 - DNA, 20 bp, Artificial Sequence
  primer
aacacagcgtggttctcagg

SEQ ID NO: 24806 - DNA, 21 bp, Artificial Sequence
  primer
aggcagagacaagggagactg

SEQ ID NO: 24807 - DNA, 40 bp, Artificial Sequence
  primer
gtaaaacgacggccagtacgtatttgaatccgaatctgtc

SEQ ID NO: 24808 - DNA, 38 bp, Artificial Sequence
  primer
gtaaaacgacggccagtctcacaagccagttgaccatc

SEQ ID NO: 24809 - DNA, 21 bp, Artificial Sequence
  primer
aggatagggcatcctattggg

SEQ ID NO: 24810 - DNA, 38 bp, Artificial Sequence
  primer
gtaaaacgacggccagtagaaggagcttggctttgttc

SEQ ID NO: 24811 - DNA, 22 bp, Artificial Sequence
  primer
ttggagaatcttggcatttctc

SEQ ID NO: 24812 - DNA, 37 bp, Artificial Sequence
  primer
gtaaaacgacggccagtaaccaggtcctgcaaattcc

SEQ ID NO: 24813 - DNA, 38 bp, Artificial Sequence
  primer
gtaaaacgacggccagtagcaccaaggtaatcccagtg

SEQ ID NO: 24814 - DNA, 37 bp, Artificial Sequence
  primer
gtaaaacgacggccagtagtgaagctgggaatggttc

SEQ ID NO: 24815 - DNA, 19 bp, Artificial Sequence
  primer
tcaggcaagctgtgtttgg

SEQ ID NO: 24816 - DNA, 21 bp, Artificial Sequence
  primer
aagtgatctacccaccttggc

SEQ ID NO: 24817 - DNA, 22 bp, Artificial Sequence
  primer
tttgctcacccttcacctactc

SEQ ID NO: 24818 - DNA, 38 bp, Artificial Sequence
  primer
gtaaaacgacggccagtaaggcaatgctagaaccacac

SEQ ID NO: 24819 - DNA, 41 bp, Artificial Sequence
  primer
gtaaaacgacggccagtctctgtgaccacattgaaataagc

SEQ ID NO: 24820 - DNA, 22 bp, Artificial Sequence
  primer
gaggatggtgattgagaagctc

SEQ ID NO: 24821 - DNA, 21 bp, Artificial Sequence
  primer
acacatgggaccctttccttc

SEQ ID NO: 24822 - DNA, 38 bp, Artificial Sequence
  primer
gtaaaacgacggccagtgtcctcagaaagtgggagtcg

SEQ ID NO: 24823 - DNA, 38 bp, Artificial Sequence
  primer
gtaaaacgacggccagtgttggacttcagtacccaggc

SEQ ID NO: 24824 - DNA, 21 bp, Artificial Sequence
  primer
catgcaattgagggtgaaatg

SEQ ID NO: 24825 - DNA, 38 bp, Artificial Sequence
  primer
gtaaaacgacggccagtaaaccattgactcattgcagg

SEQ ID NO: 24826 - DNA, 38 bp, Artificial Sequence
  primer
gtaaaacgacggccagttctgatacctcacctccaggg

SEQ ID NO: 24827 - DNA, 38 bp, Artificial Sequence
  primer
gtaaaacgacggccagtgacggtgacatgaactgaagc

SEQ ID NO: 24828 - DNA, 23 bp, Artificial Sequence
  primer
tcctttgttctactgcctttcaa

SEQ ID NO: 24829 - DNA, 40 bp, Artificial Sequence
  primer
gtaaaacgacggccagtgagtggtatctcatggtcactgc

SEQ ID NO: 24830 - DNA, 40 bp, Artificial Sequence
  primer
gtaaaacgacggccagtggcacatttgaatttagtcatgg

SEQ ID NO: 24831 - DNA, 41 bp, Artificial Sequence
  primer
gtaaaacgacggccagttttccattgtagatttgaggtgaa

SEQ ID NO: 24832 - DNA, 23 bp, Artificial Sequence
  primer
aaagctaacatcacatctggcaa

SEQ ID NO: 24833 - DNA, 39 bp, Artificial Sequence
  primer
gtaaaacgacggccagtcgtggtgcaagaggataagaag

SEQ ID NO: 24834 - DNA, 35 bp, Artificial Sequence
  primer
gtaaaacgacggccagtcagacatggccctgggag

SEQ ID NO: 24835 - DNA, 38 bp, Artificial Sequence
  primer
gtaaaacgacggccagtcagggcttccaggactacatc

SEQ ID NO: 24836 - DNA, 21 bp, Artificial Sequence
  primer
cttctacaccgactgggtcag

SEQ ID NO: 24837 - DNA, 22 bp, Artificial Sequence
  primer
tcagcttctgtgcaaacatttc

SEQ ID NO: 24838 - DNA, 38 bp, Artificial Sequence
  primer
gtaaaacgacggccagtgaagcagctgcaaagattctg

SEQ ID NO: 24839 - DNA, 38 bp, Artificial Sequence
  primer
gtaaaacgacggccagtggctcctgcattcagattagc

SEQ ID NO: 24840 - DNA, 21 bp, Artificial Sequence
  primer
agggccctgactaccactttg

SEQ ID NO: 24841 - DNA, 18 bp, Artificial Sequence
  primer
aggaaacgtcagcctggg

SEQ ID NO: 24842 - DNA, 38 bp, Artificial Sequence
  primer
gtaaaacgacggccagtaagacttagctgaggcccttc

SEQ ID NO: 24843 - DNA, 40 bp, Artificial Sequence
  primer
gtaaaacgacggccagttgaacaggcacctaccatacttt

SEQ ID NO: 24844 - DNA, 39 bp, Artificial Sequence
  primer
gtaaaacgacggccagtcagttgatttggaatggaattg

SEQ ID NO: 24845 - DNA, 22 bp, Artificial Sequence
  primer
tgagaggcgaatctttagacca

SEQ ID NO: 24846 - DNA, 37 bp, Artificial Sequence
  primer
gtaaaacgacggccagtcttagctcacatcatccggg

SEQ ID NO: 24847 - DNA, 21 bp, Artificial Sequence
  primer
tcaaatgaggccagtgttagg

SEQ ID NO: 24848 - DNA, 40 bp, Artificial Sequence
  primer
gtaaaacgacggccagtcgttagcaagtaggagaatttgc

SEQ ID NO: 24849 - DNA, 22 bp, Artificial Sequence
  primer
cacaggacagtgaggtgacaag

SEQ ID NO: 24850 - DNA, 44 bp, Artificial Sequence
  primer
gtaaaacgacggccagtaaagtcaaacagtgtgcacatagatac

SEQ ID NO: 24851 - DNA, 38 bp, Artificial Sequence
  primer
gtaaaacgacggccagtccggcataaatgggttaattc

SEQ ID NO: 24852 - DNA, 21 bp, Artificial Sequence
  primer
gcagagagtgtcattaggcca

SEQ ID NO: 24853 - DNA, 20 bp, Artificial Sequence
  primer
gctggacagaagagaccctg

SEQ ID NO: 24854 - DNA, 20 bp, Artificial Sequence
  primer
cagacttctgcggtttctgg

SEQ ID NO: 24855 - DNA, 38 bp, Artificial Sequence
  primer
gtaaaacgacggccagtcttagcatgcccttgttctcc

SEQ ID NO: 24856 - DNA, 38 bp, Artificial Sequence
  primer
gtaaaacgacggccagtaggctgggaatgtggatacag

SEQ ID NO: 24857 - DNA, 21 bp, Artificial Sequence
  primer
cagaagcagatctttcctggc

SEQ ID NO: 24858 - DNA, 21 bp, Artificial Sequence
  primer
tggtttatctccctggtctgg

SEQ ID NO: 24859 - DNA, 38 bp, Artificial Sequence
  primer
gtaaaacgacggccagttttatccgtcagccacttcag

SEQ ID NO: 24860 - DNA, 40 bp, Artificial Sequence
  primer
gtaaaacgacggccagtaagtcatttccaaggtaacccag

SEQ ID NO: 24861 - DNA, 24 bp, Artificial Sequence
  primer
ttctgacattgatttcagttggag

SEQ ID NO: 24862 - DNA, 43 bp, Artificial Sequence
  primer
gtaaaacgacggccagttctgtggactctacatttcctcttac

SEQ ID NO: 24863 - DNA, 40 bp, Artificial Sequence
  primer
gtaaaacgacggccagtaaacaatttgaagaaatggcctc

SEQ ID NO: 24864 - DNA, 44 bp, Artificial Sequence
  primer
gtaaaacgacggccagtgaaaccttgtcatttaaagattctacc

SEQ ID NO: 24865 - DNA, 21 bp, Artificial Sequence
  primer
cgaagatactgtgacatcccg

SEQ ID NO: 24866 - DNA, 38 bp, Artificial Sequence
  primer
gtaaaacgacggccagtctgccacatacaccctttcac

SEQ ID NO: 24867 - DNA, 38 bp, Artificial Sequence
  primer
gtaaaacgacggccagtcgctggaccttaacatttgtg

SEQ ID NO: 24868 - DNA, 20 bp, Artificial Sequence
  primer
ctcgatgctaggactgcctg

SEQ ID NO: 24869 - DNA, 38 bp, Artificial Sequence
  primer
gtaaaacgacggccagtcagccttgcatgttgactctc

SEQ ID NO: 24870 - DNA, 21 bp, Artificial Sequence
  primer
gccttgagcgataaacctcac

SEQ ID NO: 24871 - DNA, 20 bp, Artificial Sequence
  primer
gccaggtagagccatcttgg

SEQ ID NO: 24872 - DNA, 38 bp, Artificial Sequence
  primer
gtaaaacgacggccagtctctgtatcctgcctgcttcc

SEQ ID NO: 24873 - DNA, 20 bp, Artificial Sequence
  primer
atgatgacactgtcgcctcc

SEQ ID NO: 24874 - DNA, 21 bp, Artificial Sequence
  primer
ccaaagctctgtcgtaactgc

SEQ ID NO: 24875 - DNA, 21 bp, Artificial Sequence
  primer
tcagcagtagcagagggtagg

SEQ ID NO: 24876 - DNA, 38 bp, Artificial Sequence
  primer
gtaaaacgacggccagtgatgcccatctgacagtgatg

SEQ ID NO: 24877 - DNA, 24 bp, Artificial Sequence
  primer
aatctctgcctctaatcctttgtg

SEQ ID NO: 24878 - DNA, 21 bp, Artificial Sequence
  primer
ttcttggaaagggtcatttgg

SEQ ID NO: 24879 - DNA, 21 bp, Artificial Sequence
  primer
ttcctttgcctctctttcaca

SEQ ID NO: 24880 - DNA, 37 bp, Artificial Sequence
  primer
gtaaaacgacggccagtgccaaccacaggtctgacac

SEQ ID NO: 24881 - DNA, 21 bp, Artificial Sequence
  primer
ttaccctgggagcaacagttc

SEQ ID NO: 24882 - DNA, 38 bp, Artificial Sequence
  primer
gtaaaacgacggccagtaatactctggatggtggaggg

SEQ ID NO: 24883 - DNA, 21 bp, Artificial Sequence
  primer
ccagcctggagatagagtgag

SEQ ID NO: 24884 - DNA, 38 bp, Artificial Sequence
  primer
gtaaaacgacggccagtgtgtccaggtgtgagcatgag

SEQ ID NO: 24885 - DNA, 38 bp, Artificial Sequence
  primer
gtaaaacgacggccagtaccatggtaatcacctcacgc

SEQ ID NO: 24886 - DNA, 38 bp, Artificial Sequence
  primer
gtaaaacgacggccagtagttactggcagggacgagag

SEQ ID NO: 24887 - DNA, 37 bp, Artificial Sequence
  primer
gtaaaacgacggccagtgagctgaagctgggactgtg

SEQ ID NO: 24888 - DNA, 21 bp, Artificial Sequence
  primer
tgtccttcagaccacatcctg

SEQ ID NO: 24889 - DNA, 38 bp, Artificial Sequence
  primer
gtaaaacgacggccagtgtgtgctctcgagactcttgg

SEQ ID NO: 24890 - DNA, 21 bp, Artificial Sequence
  primer
ttgaagacgagtcatgggatg

SEQ ID NO: 24891 - DNA, 20 bp, Artificial Sequence
  primer
agaatggagccgtgtgactg

SEQ ID NO: 24892 - DNA, 38 bp, Artificial Sequence
  primer
gtaaaacgacggccagtggttctcagtgctctgtgtgg

SEQ ID NO: 24893 - DNA, 36 bp, Artificial Sequence
  primer
gtaaaacgacggccagtactcgcttgcactcacctg

SEQ ID NO: 24894 - DNA, 21 bp, Artificial Sequence
  primer
gtggttagactgcagggtgtg

SEQ ID NO: 24895 - DNA, 38 bp, Artificial Sequence
  primer
gtaaaacgacggccagtgattcagacctgaccacaccc

SEQ ID NO: 24896 - DNA, 38 bp, Artificial Sequence
  primer
gtaaaacgacggccagtcagtgcagcctctgttctctg

SEQ ID NO: 24897 - DNA, 38 bp, Artificial Sequence
  primer
gtaaaacgacggccagttgtttccagtgaagtccatgc

SEQ ID NO: 24898 - DNA, 38 bp, Artificial Sequence
  primer
gtaaaacgacggccagtccctgccagtggtctctctac

SEQ ID NO: 24899 - DNA, 38 bp, Artificial Sequence
  primer
gtaaaacgacggccagttcctgagtctgtctggcattg

SEQ ID NO: 24900 - DNA, 39 bp, Artificial Sequence
  primer
gtaaaacgacggccagtgctgttgttgagcatcactgtc

SEQ ID NO: 24901 - DNA, 18 bp, Artificial Sequence
  primer
gggaggcatgaggtccag

SEQ ID NO: 24902 - DNA, 38 bp, Artificial Sequence
  primer
gtaaaacgacggccagtagtggactctcactgccttcc

SEQ ID NO: 24903 - DNA, 38 bp, Artificial Sequence
  primer
gtaaaacgacggccagtactcactgcgaactagcgatg

SEQ ID NO: 24904 - DNA, 36 bp, Artificial Sequence
  primer
gtaaaacgacggccagtgctttgcagaacccaggag

SEQ ID NO: 24905 - DNA, 38 bp, Artificial Sequence
  primer
gtaaaacgacggccagttgggtcagaagtggaggaaac

SEQ ID NO: 24906 - DNA, 37 bp, Artificial Sequence
  primer
gtaaaacgacggccagtctctgcctgtggaggagttg

SEQ ID NO: 24907 - DNA, 36 bp, Artificial Sequence
  primer
gtaaaacgacggccagtccaaggacactctggaccc

SEQ ID NO: 24908 - DNA, 20 bp, Artificial Sequence
  primer
tcaaggaccagcagatcgag

SEQ ID NO: 24909 - DNA, 37 bp, Artificial Sequence
  primer
gtaaaacgacggccagtggacctaccagctccaggac

SEQ ID NO: 24910 - DNA, 38 bp, Artificial Sequence
  primer
gtaaaacgacggccagtagaaggtgtaatggcggagag

SEQ ID NO: 24911 - DNA, 35 bp, Artificial Sequence
  primer
gtaaaacgacggccagtgaacctgtcctgcgccac

SEQ ID NO: 24912 - DNA, 37 bp, Artificial Sequence
  primer
gtaaaacgacggccagtcaacgagatctgcgtgagtg

SEQ ID NO: 24913 - DNA, 37 bp, Artificial Sequence
  primer
gtaaaacgacggccagtcaaggattgctcaggactgc

SEQ ID NO: 24914 - DNA, 38 bp, Artificial Sequence
  primer
gtaaaacgacggccagtctgcctctgagtgtggctatg

SEQ ID NO: 24915 - DNA, 37 bp, Artificial Sequence
  primer
gtaaaacgacggccagtcagacttggtgaggagctgg

SEQ ID NO: 24916 - DNA, 35 bp, Artificial Sequence
  primer
gtaaaacgacggccagtcggaaggagtcgcgagag

SEQ ID NO: 24917 - DNA, 21 bp, Artificial Sequence
  primer
cttccaggcagaattccactc

SEQ ID NO: 24918 - DNA, 39 bp, Artificial Sequence
  primer
gtaaaacgacggccagtcttcctgttgtgtcacacttgc

SEQ ID NO: 24919 - DNA, 21 bp, Artificial Sequence
  primer
aggtggaggtgtgactcagtg

SEQ ID NO: 24920 - DNA, 21 bp, Artificial Sequence
  primer
gtgatcttagccgccagtctc

SEQ ID NO: 24921 - DNA, 21 bp, Artificial Sequence
  primer
ggcaaatttctcttcaccagc

SEQ ID NO: 24922 - DNA, 21 bp, Artificial Sequence
  primer
aggtctctgggagacgttctg

SEQ ID NO: 24923 - DNA, 21 bp, Artificial Sequence
  primer
ggaaacacttgctgacctgtg

SEQ ID NO: 24924 - DNA, 21 bp, Artificial Sequence
  primer
ctgggttctcccatctctcac

SEQ ID NO: 24925 - DNA, 21 bp, Artificial Sequence
  primer
acagcttaatggaggtgtggc

SEQ ID NO: 24926 - DNA, 37 bp, Artificial Sequence
  primer
gtaaaacgacggccagtctatggtgcagcaaacggac

SEQ ID NO: 24927 - DNA, 21 bp, Artificial Sequence
  primer
caactttgttccctctgggtc

SEQ ID NO: 24928 - DNA, 20 bp, Artificial Sequence
  primer
aaattctcaaaccatgggcg

SEQ ID NO: 24929 - DNA, 21 bp, Artificial Sequence
  primer
gctcactgcagcctctacttg

SEQ ID NO: 24930 - DNA, 38 bp, Artificial Sequence
  primer
gtaaaacgacggccagttcctgcagtacctggagtgtc

SEQ ID NO: 24931 - DNA, 38 bp, Artificial Sequence
  primer
gtaaaacgacggccagtggagagcaagacctgtgtctg

SEQ ID NO: 24932 - DNA, 35 bp, Artificial Sequence
  primer
gtaaaacgacggccagtggagggtggcaggttgac

SEQ ID NO: 24933 - DNA, 38 bp, Artificial Sequence
  primer
gtaaaacgacggccagtgattgacaagaacctggagcc

SEQ ID NO: 24934 - DNA, 21 bp, Artificial Sequence
  primer
tccaggaacagctctacccac

SEQ ID NO: 24935 - DNA, 38 bp, Artificial Sequence
  primer
gtaaaacgacggccagttcccaacttcaggtgtgtacc

SEQ ID NO: 24936 - DNA, 20 bp, Artificial Sequence
  primer
cactgaagacaggctgggag

SEQ ID NO: 24937 - DNA, 35 bp, Artificial Sequence
  primer
gtaaaacgacggccagtagcagggaatctctcgcc

SEQ ID NO: 24938 - DNA, 38 bp, Artificial Sequence
  primer
gtaaaacgacggccagtaaccaaatacaaggctgtggc

SEQ ID NO: 24939 - DNA, 38 bp, Artificial Sequence
  primer
gtaaaacgacggccagtcatggattaggatggtctggg

SEQ ID NO: 24940 - DNA, 38 bp, Artificial Sequence
  primer
gtaaaacgacggccagttgaggttggaatttcctggac

SEQ ID NO: 24941 - DNA, 21 bp, Artificial Sequence
  primer
aactgaggcccaacaactctc

SEQ ID NO: 24942 - DNA, 22 bp, Artificial Sequence
  primer
gaacggagcttcaagaagtttg

SEQ ID NO: 24943 - DNA, 36 bp, Artificial Sequence
  primer
gtaaaacgacggccagtcggccacagcttgctagtc

SEQ ID NO: 24944 - DNA, 38 bp, Artificial Sequence
  primer
gtaaaacgacggccagtgaggctgaaggttcttggttg

SEQ ID NO: 24945 - DNA, 38 bp, Artificial Sequence
  primer
gtaaaacgacggccagttcctcagactgctaccttccc

SEQ ID NO: 24946 - DNA, 37 bp, Artificial Sequence
  primer
gtaaaacgacggccagtcatgcagttctgtggcattg

SEQ ID NO: 24947 - DNA, 21 bp, Artificial Sequence
  primer
tcatcaggtacagagatgccc

SEQ ID NO: 24948 - DNA, 38 bp, Artificial Sequence
  primer
gtaaaacgacggccagttgatgcaggaagtgttgttcc

SEQ ID NO: 24949 - DNA, 21 bp, Artificial Sequence
  primer
tgaatggaagtcaagtggctc

SEQ ID NO: 24950 - DNA, 21 bp, Artificial Sequence
  primer
tggacctagttggactctggg

SEQ ID NO: 24951 - DNA, 35 bp, Artificial Sequence
  primer
gtaaaacgacggccagtagggcccttggctttcac

SEQ ID NO: 24952 - DNA, 19 bp, Artificial Sequence
  primer
ctgtggtgatgcccgtatg

SEQ ID NO: 24953 - DNA, 38 bp, Artificial Sequence
  primer
gtaaaacgacggccagttagtggtgctgggctttgtag

SEQ ID NO: 24954 - DNA, 21 bp, Artificial Sequence
  primer
aggaagcagttcccacacttg

SEQ ID NO: 24955 - DNA, 18 bp, Artificial Sequence
  primer
gagagaacgggagggagg

SEQ ID NO: 24956 - DNA, 37 bp, Artificial Sequence
  primer
gtaaaacgacggccagtcaggtcttgagaggtccagc

SEQ ID NO: 24957 - DNA, 18 bp, Artificial Sequence
  primer
aggagtgcaccaccatgc

SEQ ID NO: 24958 - DNA, 35 bp, Artificial Sequence
  primer
gtaaaacgacggccagtagattcctccgcgcactg

SEQ ID NO: 24959 - DNA, 22 bp, Artificial Sequence
  primer
gctttcaaaccgattgtcagtg

SEQ ID NO: 24960 - DNA, 38 bp, Artificial Sequence
  primer
gtaaaacgacggccagtatgactctggcctgaagttcc

SEQ ID NO: 24961 - DNA, 20 bp, Artificial Sequence
  primer
tcatcactgtggacaggcag

SEQ ID NO: 24962 - DNA, 38 bp, Artificial Sequence
  primer
gtaaaacgacggccagtacccagactacgtcctgatgg

SEQ ID NO: 24963 - DNA, 21 bp, Artificial Sequence
  primer
agctggcctgtaatgctcttc

SEQ ID NO: 24964 - DNA, 38 bp, Artificial Sequence
  primer
gtaaaacgacggccagttgagtcccaggaatgctaggt

SEQ ID NO: 24965 - DNA, 22 bp, Artificial Sequence
  primer
ccagaaactttgctaaacccac

SEQ ID NO: 24966 - DNA, 18 bp, Artificial Sequence
  primer
gtgtaagccactgcgccc

SEQ ID NO: 24967 - DNA, 37 bp, Artificial Sequence
  primer
gtaaaacgacggccagtaaagagcatgtcctggaccc

SEQ ID NO: 24968 - DNA, 20 bp, Artificial Sequence
  primer
agctttgctgaattggatgg

SEQ ID NO: 24969 - DNA, 21 bp, Artificial Sequence
  primer
ttaggacagtcattcccaccc

SEQ ID NO: 24970 - DNA, 46 bp, Artificial Sequence
  primer
gtaaaacgacggccagtaagactatatgcttatatgtgggaatgtt

SEQ ID NO: 24971 - DNA, 39 bp, Artificial Sequence
  primer
gtaaaacgacggccagttcggtttctgtcaggaatatgg

SEQ ID NO: 24972 - DNA, 21 bp, Artificial Sequence
  primer
agcagctttcattgaggtcag

SEQ ID NO: 24973 - DNA, 21 bp, Artificial Sequence
  primer
ttcttccagtctttccatcgc

SEQ ID NO: 24974 - DNA, 42 bp, Artificial Sequence
  primer
gtaaaacgacggccagtcagccttgaataaagaattcacttg

SEQ ID NO: 24975 - DNA, 40 bp, Artificial Sequence
  primer
gtaaaacgacggccagtaagaagagcgtttcttctcttgg

SEQ ID NO: 24976 - DNA, 43 bp, Artificial Sequence
  primer
gtaaaacgacggccagtaatgtgtaattatcttcgcttgaatc

SEQ ID NO: 24977 - DNA, 39 bp, Artificial Sequence
  primer
gtaaaacgacggccagtgcaaaggagatatgagcagacc

SEQ ID NO: 24978 - DNA, 21 bp, Artificial Sequence
  primer
agctgttgctgatgtttctgc

SEQ ID NO: 24979 - DNA, 22 bp, Artificial Sequence
  primer
tcgtgaagaatctgctttgatg

SEQ ID NO: 24980 - DNA, 38 bp, Artificial Sequence
  primer
gtaaaacgacggccagtctttcctgaagtttccttccc

SEQ ID NO: 24981 - DNA, 23 bp, Artificial Sequence
  primer
tgtctagcaacaataggcctcag

SEQ ID NO: 24982 - DNA, 37 bp, Artificial Sequence
  primer
gtaaaacgacggccagtaagctctggtttcctctgcc

SEQ ID NO: 24983 - DNA, 38 bp, Artificial Sequence
  primer
gtaaaacgacggccagtgaggtgagagagcagctttgg

SEQ ID NO: 24984 - DNA, 21 bp, Artificial Sequence
  primer
gaatgataggctagggttccg

SEQ ID NO: 24985 - DNA, 35 bp, Artificial Sequence
  primer
gtaaaacgacggccagtaatcccattcccgcagac

SEQ ID NO: 24986 - DNA, 19 bp, Artificial Sequence
  primer
tccacaagctgtggcgtag

SEQ ID NO: 24987 - DNA, 21 bp, Artificial Sequence
  primer
caaattccataatgcactgcg

SEQ ID NO: 24988 - DNA, 38 bp, Artificial Sequence
  primer
gtaaaacgacggccagttcttgaagccttccacctctg

SEQ ID NO: 24989 - DNA, 21 bp, Artificial Sequence
  primer
cccatggacaaggaggtctac

SEQ ID NO: 24990 - DNA, 39 bp, Artificial Sequence
  primer
gtaaaacgacggccagtggaggaggagactgggttactc

SEQ ID NO: 24991 - DNA, 21 bp, Artificial Sequence
  primer
atgctgggcactgattcctac

SEQ ID NO: 24992 - DNA, 38 bp, Artificial Sequence
  primer
gtaaaacgacggccagttcacctccatcaagggatagg

SEQ ID NO: 24993 - DNA, 38 bp, Artificial Sequence
  primer
gtaaaacgacggccagtcaacagacgacaggacattgc

SEQ ID NO: 24994 - DNA, 23 bp, Artificial Sequence
  primer
catttggcggaagtactcttagg

SEQ ID NO: 24995 - DNA, 22 bp, Artificial Sequence
  primer
tttgtagagttgggttgagcag

SEQ ID NO: 24996 - DNA, 21 bp, Artificial Sequence
  primer
tagcagggatgtgctctgttc

SEQ ID NO: 24997 - DNA, 22 bp, Artificial Sequence
  primer
tgcatgaagcagagaagttcag

SEQ ID NO: 24998 - DNA, 38 bp, Artificial Sequence
  primer
gtaaaacgacggccagttcagattaagaagtgcggtcg

SEQ ID NO: 24999 - DNA, 38 bp, Artificial Sequence
  primer
gtaaaacgacggccagtaagtagtcgctattgtcgccg

SEQ ID NO: 25000 - DNA, 36 bp, Artificial Sequence
  primer
gtaaaacgacggccagtaccctgttcgacatcctgg

SEQ ID NO: 25001 - DNA, 36 bp, Artificial Sequence
  primer
gtaaaacgacggccagtctggcacagaggctacacg

SEQ ID NO: 25002 - DNA, 37 bp, Artificial Sequence
  primer
gtaaaacgacggccagtgtgagctcatgcatgtgtgg

SEQ ID NO: 25003 - DNA, 37 bp, Artificial Sequence
  primer
gtaaaacgacggccagtggaccctctaggctctctgc

SEQ ID NO: 25004 - DNA, 21 bp, Artificial Sequence
  primer
ggctactgcccaaggtacaag

SEQ ID NO: 25005 - DNA, 38 bp, Artificial Sequence
  primer
gtaaaacgacggccagtctcatgctgaaggagcagaac

SEQ ID NO: 25006 - DNA, 19 bp, Artificial Sequence
  primer
tgatttcgcagcagccttc

SEQ ID NO: 25007 - DNA, 38 bp, Artificial Sequence
  primer
gtaaaacgacggccagtatgaatttgaggcctttcgag

SEQ ID NO: 25008 - DNA, 21 bp, Artificial Sequence
  primer
agtcccactcctctttccacc

SEQ ID NO: 25009 - DNA, 38 bp, Artificial Sequence
  primer
gtaaaacgacggccagtagcttgaaagcaatgagaccc

SEQ ID NO: 25010 - DNA, 21 bp, Artificial Sequence
  primer
atcgatggtcaatgctgtttg

SEQ ID NO: 25011 - DNA, 21 bp, Artificial Sequence
  primer
gactgtgtgcagaaccatgag

SEQ ID NO: 25012 - DNA, 22 bp, Artificial Sequence
  primer
tgccacaattgacttgctttag

SEQ ID NO: 25013 - DNA, 38 bp, Artificial Sequence
  primer
gtaaaacgacggccagtatgcagcttaggcatttccag

SEQ ID NO: 25014 - DNA, 21 bp, Artificial Sequence
  primer
aactcaaagcttccctcaacg

SEQ ID NO: 25015 - DNA, 43 bp, Artificial Sequence
  primer
gtaaaacgacggccagtaaactatgaaaccaatgcattagaga

SEQ ID NO: 25016 - DNA, 23 bp, Artificial Sequence
  primer
ggatgtggagatgagattctgtc

SEQ ID NO: 25017 - DNA, 38 bp, Artificial Sequence
  primer
gtaaaacgacggccagtcagtgaggcgtaagcagacag

SEQ ID NO: 25018 - DNA, 38 bp, Artificial Sequence
  primer
gtaaaacgacggccagtgacatgatacatggcacaccc

SEQ ID NO: 25019 - DNA, 21 bp, Artificial Sequence
  primer
gtgtcccagtctgacagcaag

SEQ ID NO: 25020 - DNA, 21 bp, Artificial Sequence
  primer
aaaccctgtccatgtcaagtg

SEQ ID NO: 25021 - DNA, 19 bp, Artificial Sequence
  primer
atctgctgccgcgttctac

SEQ ID NO: 25022 - DNA, 37 bp, Artificial Sequence
  primer
gtaaaacgacggccagtaacagtggagggagggtgtc

SEQ ID NO: 25023 - DNA, 37 bp, Artificial Sequence
  primer
gtaaaacgacggccagtagacagcacagcctcctctg

SEQ ID NO: 25024 - DNA, 19 bp, Artificial Sequence
  primer
cgtgcgcaataccaagaac

SEQ ID NO: 25025 - DNA, 38 bp, Artificial Sequence
  primer
gtaaaacgacggccagtactgctgggatgagaaggatg

SEQ ID NO: 25026 - DNA, 21 bp, Artificial Sequence
  primer
ttgacatctgaacctcttggc

SEQ ID NO: 25027 - DNA, 38 bp, Artificial Sequence
  primer
gtaaaacgacggccagtatagtcacatgagccaccagc

SEQ ID NO: 25028 - DNA, 21 bp, Artificial Sequence
  primer
ctacacagactggccatcgac

SEQ ID NO: 25029 - DNA, 37 bp, Artificial Sequence
  primer
gtaaaacgacggccagtccctcagctgtcgctcctta

SEQ ID NO: 25030 - DNA, 38 bp, Artificial Sequence
  primer
gtaaaacgacggccagttaaggtttgagctgggtgttg

SEQ ID NO: 25031 - DNA, 38 bp, Artificial Sequence
  primer
gtaaaacgacggccagtaggaagctcagccacactagc

SEQ ID NO: 25032 - DNA, 38 bp, Artificial Sequence
  primer
gtaaaacgacggccagtagatgtctaattgccgcattg

SEQ ID NO: 25033 - DNA, 38 bp, Artificial Sequence
  primer
gtaaaacgacggccagttctgtgaagaccatgctgacc

SEQ ID NO: 25034 - DNA, 21 bp, Artificial Sequence
  primer
tgaacccaggtcttgtgactg

SEQ ID NO: 25035 - DNA, 21 bp, Artificial Sequence
  primer
ggttgtcagggtgatggaatc

SEQ ID NO: 25036 - DNA, 38 bp, Artificial Sequence
  primer
gtaaaacgacggccagtacaagagaagccagggtcaag

SEQ ID NO: 25037 - DNA, 36 bp, Artificial Sequence
  primer
gtaaaacgacggccagtctggatagccacttggcac

SEQ ID NO: 25038 - DNA, 19 bp, Artificial Sequence
  primer
gaaaccgtgacttgccagg

SEQ ID NO: 25039 - DNA, 38 bp, Artificial Sequence
  primer
gtaaaacgacggccagtgaagtacagggatccttcggg

SEQ ID NO: 25040 - DNA, 24 bp, Artificial Sequence
  primer
caaatcattgtttacacccatgtc

SEQ ID NO: 25041 - DNA, 41 bp, Artificial Sequence
  primer
gtaaaacgacggccagtaaatgtaggctaagttggctgaag

SEQ ID NO: 25042 - DNA, 39 bp, Artificial Sequence
  primer
gtaaaacgacggccagtgcacaggacaaagaatgatctg

SEQ ID NO: 25043 - DNA, 42 bp, Artificial Sequence
  primer
gtaaaacgacggccagtttccctttggactaattaaaggttg

SEQ ID NO: 25044 - DNA, 38 bp, Artificial Sequence
  primer
gtaaaacgacggccagtatgtgatcctgcctcttggac

SEQ ID NO: 25045 - DNA, 21 bp, Artificial Sequence
  primer
gacaagacagcaagcagatgg

SEQ ID NO: 25046 - DNA, 21 bp, Artificial Sequence
  primer
gggaaggaagctgagagatcc

SEQ ID NO: 25047 - DNA, 19 bp, Artificial Sequence
  primer
ggaatccctctgacatggg

SEQ ID NO: 25048 - DNA, 38 bp, Artificial Sequence
  primer
gtaaaacgacggccagttctgtgagggtcagctttgtg

SEQ ID NO: 25049 - DNA, 21 bp, Artificial Sequence
  primer
gataggtctgggtgttctggg

SEQ ID NO: 25050 - DNA, 37 bp, Artificial Sequence
  primer
gtaaaacgacggccagttttgtctccgcctcactctg

SEQ ID NO: 25051 - DNA, 21 bp, Artificial Sequence
  primer
gataggtctgggtgttctggg

SEQ ID NO: 25052 - DNA, 37 bp, Artificial Sequence; identical to SEQ ID NO: 25050
  primer

SEQ ID NO: 25053 - DNA, 38 bp, Artificial Sequence
  primer
gtaaaacgacggccagtaaggagaggaggatttccgag

SEQ ID NO: 25054 - DNA, 38 bp, Artificial Sequence
  primer
gtaaaacgacggccagtggtcagtattggaacccaagg

SEQ ID NO: 25055 - DNA, 36 bp, Artificial Sequence
  primer
gtaaaacgacggccagtgccagtctgcgaacctctc

SEQ ID NO: 25056 - DNA, 37 bp, Artificial Sequence
  primer
gtaaaacgacggccagtgtgggaaggctagcttcagg

SEQ ID NO: 25057 - DNA, 38 bp, Artificial Sequence
  primer
gtaaaacgacggccagtgagcaagtggtttcacagtgg

SEQ ID NO: 25058 - DNA, 38 bp, Artificial Sequence
  primer
gtaaaacgacggccagtcagccttaacaggatccaagg

SEQ ID NO: 25059 - DNA, 20 bp, Artificial Sequence
  primer
ctaatgggaggtgggattgc

SEQ ID NO: 25060 - DNA, 36 bp, Artificial Sequence
  primer
gtaaaacgacggccagtgggctgatatccagggcac

SEQ ID NO: 25061 - DNA, 38 bp, Artificial Sequence
  primer
gtaaaacgacggccagtagctagccacagttgtttccg

SEQ ID NO: 25062 - DNA, 40 bp, Artificial Sequence
  primer
gtaaaacgacggccagtggtctgctacactcaggatttgt

SEQ ID NO: 25063 - DNA, 38 bp, Artificial Sequence
  primer
gtaaaacgacggccagttaactgggaatcctcaaaggg

SEQ ID NO: 25064 - DNA, 21 bp, Artificial Sequence
  primer
ttcatgcaggacactagcacc

SEQ ID NO: 25065 - DNA, 22 bp, Artificial Sequence
  primer
caacctttatgccactgctatg

SEQ ID NO: 25066 - DNA, 37 bp, Artificial Sequence
  primer
gtaaaacgacggccagtcagtgcctcttgaacttggg

SEQ ID NO: 25067 - DNA, 23 bp, Artificial Sequence
  primer
tccaatacaggcaggtaaagttg

SEQ ID NO: 25068 - DNA, 21 bp, Artificial Sequence
  primer
catgagacggaatgaggtcac

SEQ ID NO: 25069 - DNA, 21 bp, Artificial Sequence
  primer
cacacgcacacatgaaagaag

SEQ ID NO: 25070 - DNA, 21 bp, Artificial Sequence
  primer
gcaagaattgattccctggtg

SEQ ID NO: 25071 - DNA, 35 bp, Artificial Sequence
  primer
gtaaaacgacggccagtatcctgaaccagcgccag

SEQ ID NO: 25072 - DNA, 38 bp, Artificial Sequence
  primer
gtaaaacgacggccagtagggtcaggactcattcaacc

SEQ ID NO: 25073 - DNA, 21 bp, Artificial Sequence
  primer
taattggaacaggcgtggaag

SEQ ID NO: 25074 - DNA, 38 bp, Artificial Sequence
  primer
gtaaaacgacggccagtaaagctgcacgagtcattgtg

SEQ ID NO: 25075 - DNA, 38 bp, Artificial Sequence
  primer
gtaaaacgacggccagtacttctgctgccaggaatagg

SEQ ID NO: 25076 - DNA, 21 bp, Artificial Sequence
  primer
gcaagaattgattccctggtg

SEQ ID NO: 25077 - DNA, 21 bp, Artificial Sequence
  primer
atgcttgattgagaaggaggc

SEQ ID NO: 25078 - DNA, 21 bp, Artificial Sequence
  primer
cgacatcttcagttgctggac

SEQ ID NO: 25079 - DNA, 38 bp, Artificial Sequence
  primer
gtaaaacgacggccagtggaaagtgggtagagaaacgc

SEQ ID NO: 25080 - DNA, 21 bp, Artificial Sequence
  primer
gatcttgatctgaggctgtgg

SEQ ID NO: 25081 - DNA, 38 bp, Artificial Sequence
  primer
gtaaaacgacggccagttatctgccagtactgatgccc

SEQ ID NO: 25082 - DNA, 38 bp, Artificial Sequence
  primer
gtaaaacgacggccagtgaatacaacaacgtgggcact

SEQ ID NO: 25083 - DNA, 38 bp, Artificial Sequence
  primer
gtaaaacgacggccagtatcaggaaagaagggagggag

SEQ ID NO: 25084 - DNA, 38 bp, Artificial Sequence
  primer
gtaaaacgacggccagtagccttctagccatgagcatc

SEQ ID NO: 25085 - DNA, 21 bp, Artificial Sequence
  primer
gagatgacctgcctctcatgg

SEQ ID NO: 25086 - DNA, 21 bp, Artificial Sequence
  primer
acagggaatcatgggagtgag

SEQ ID NO: 25087 - DNA, 23 bp, Artificial Sequence
  primer
tgaaagctcaacttaacctgcac

SEQ ID NO: 25088 - DNA, 37 bp, Artificial Sequence
  primer
gtaaaacgacggccagtctgaaatgtgccctttctgc

SEQ ID NO: 25089 - DNA, 37 bp, Artificial Sequence
  primer
gtaaaacgacggccagtctgcaagattgcctcacctc

SEQ ID NO: 25090 - DNA, 39 bp, Artificial Sequence
  primer
gtaaaacgacggccagttcccaacccaaatataaatccc

SEQ ID NO: 25091 - DNA, 21 bp, Artificial Sequence
  primer
gcactatgggttaggtagggc

SEQ ID NO: 25092 - DNA, 21 bp, Artificial Sequence
  primer
ttctcaagcaggtgagctgtc

SEQ ID NO: 25093 - DNA, 38 bp, Artificial Sequence
  primer
gtaaaacgacggccagtttctggaagatcgatgctgtg

SEQ ID NO: 25094 - DNA, 35 bp, Artificial Sequence
  primer
gtaaaacgacggccagtctgaggtgatgcggaccc

SEQ ID NO: 25095 - DNA, 35 bp, Artificial Sequence
  primer
gtaaaacgacggccagtctctgctttctcgcgctg

SEQ ID NO: 25096 - DNA, 38 bp, Artificial Sequence
  primer
gtaaaacgacggccagttatatgctgaaagcacccagg

SEQ ID NO: 25097 - DNA, 22 bp, Artificial Sequence
  primer
gaatacagaggctgcctgtcac

SEQ ID NO: 25098 - DNA, 21 bp, Artificial Sequence
  primer
accagcaagtgtgtgtggaac

SEQ ID NO: 25099 - DNA, 38 bp, Artificial Sequence
  primer
gtaaaacgacggccagtacttgtgaagcctggtgtgag

SEQ ID NO: 25100 - DNA, 21 bp, Artificial Sequence
  primer
gtcctagggctcgtgaggaag

SEQ ID NO: 25101 - DNA, 38 bp, Artificial Sequence
  primer
gtaaaacgacggccagtgaagtacatcccatccagtgc

SEQ ID NO: 25102 - DNA, 21 bp, Artificial Sequence
  primer
actgtcatgctatgagggtgg

SEQ ID NO: 25103 - DNA, 21 bp, Artificial Sequence
  primer
caaacctagccacagtcaccc

SEQ ID NO: 25104 - DNA, 43 bp, Artificial Sequence
  primer
gtaaaacgacggccagtaagcaaggaaagaagttgaagtatca

SEQ ID NO: 25105 - DNA, 39 bp, Artificial Sequence
  primer
gtaaaacgacggccagtcaggatgccaatctgtaacctt

SEQ ID NO: 25106 - DNA, 23 bp, Artificial Sequence
  primer
aaataacctgagggcaagaactg

SEQ ID NO: 25107 - DNA, 40 bp, Artificial Sequence
  primer
gtaaaacgacggccagtaaaggttcagctcctgctagttt

SEQ ID NO: 25108 - DNA, 22 bp, Artificial Sequence
  primer
cactgtggtaattccgcttgtt

SEQ ID NO: 25109 - DNA, 22 bp, Artificial Sequence
  primer
aacaacagggaaaggagtgaaa

SEQ ID NO: 25110 - DNA, 41 bp, Artificial Sequence
  primer
gtaaaacgacggccagtttcattcaataaatggtgaactcg

SEQ ID NO: 25111 - DNA, 21 bp, Artificial Sequence
  primer
tgtaggtatgagccaccatgc

SEQ ID NO: 25112 - DNA, 25 bp, Artificial Sequence
  primer
aaagggtcattgtttagttactggc

SEQ ID NO: 25113 - DNA, 25 bp, Artificial Sequence
  primer
ctctttcctttaggtcactgagttg

SEQ ID NO: 25114 - DNA, 21 bp, Artificial Sequence
  primer
cttccctgaggagacaagtgg

SEQ ID NO: 25115 - DNA, 19 bp, Artificial Sequence
  primer
cctcaagcagtcctcctgc

SEQ ID NO: 25116 - DNA, 46 bp, Artificial Sequence
  primer
gtaaaacgacggccagtcagcagttcctactagaggtaagaatgta

SEQ ID NO: 25117 - DNA, 23 bp, Artificial Sequence
  primer
tttacctttgcaagccatactac

SEQ ID NO: 25118 - DNA, 25 bp, Artificial Sequence
  primer
ttgcaattcttaaatgattgtgttc

SEQ ID NO: 25119 - DNA, 26 bp, Artificial Sequence
  primer
tttacagtgtcaatatcacgtagcat

SEQ ID NO: 25120 - DNA, 44 bp, Artificial Sequence
  primer
gtaaaacgacggccagttggaagtagactcattcactcatttag

SEQ ID NO: 25121 - DNA, 22 bp, Artificial Sequence
  primer
tgtttccatgttatgtggagga

SEQ ID NO: 25122 - DNA, 22 bp, Artificial Sequence
  primer
tgcgtgctgacaataggtaaag

SEQ ID NO: 25123 - DNA, 23 bp, Artificial Sequence
  primer
tttgagctccactgtgaaggtag

SEQ ID NO: 25124 - DNA, 19 bp, Artificial Sequence
  primer
gctgtgctgccacccatag

SEQ ID NO: 25125 - DNA, 38 bp, Artificial Sequence
  primer
gtaaaacgacggccagtagggaagctgctaggaaggag

SEQ ID NO: 25126 - DNA, 19 bp, Artificial Sequence
  primer
ctcctgctgctactgacgg

SEQ ID NO: 25127 - DNA, 21 bp, Artificial Sequence
  primer
gtgtgtgtcctacaccctccc

SEQ ID NO: 25128 - DNA, 40 bp, Artificial Sequence
  primer
gtaaaacgacggccagtcccacatgatacatggtagatgc

SEQ ID NO: 25129 - DNA, 22 bp, Artificial Sequence
  primer
gggatttcaaattgcagagatg

SEQ ID NO: 25130 - DNA, 42 bp, Artificial Sequence
  primer
gtaaaacgacggccagtaaccactgcttacgtattcaacact

SEQ ID NO: 25131 - DNA, 37 bp, Artificial Sequence
  primer
gtaaaacgacggccagtgctattcggcactcggtctc

SEQ ID NO: 25132 - DNA, 18 bp, Artificial Sequence
  primer
gaagcggctcctgctttg

SEQ ID NO: 25133 - DNA, 22 bp, Artificial Sequence
  primer
tgcacagatttcatcgagtaca

SEQ ID NO: 25134 - DNA, 20 bp, Artificial Sequence
  primer
ctagaggaaggccaagcagc

SEQ ID NO: 25135 - DNA, 23 bp, Artificial Sequence
  primer
ttggttgcttagagaaggacttg

SEQ ID NO: 25136 - DNA, 25 bp, Artificial Sequence
  primer
gaggtgagaggctagtgatttatcc

SEQ ID NO: 25137 - DNA, 44 bp, Artificial Sequence
  primer
gtaaaacgacggccagtcttgattgtgagaagtcagagtcttag

SEQ ID NO: 25138 - DNA, 21 bp, Artificial Sequence
  primer
ccattgattggttgctcatct

SEQ ID NO: 25139 - DNA, 22 bp, Artificial Sequence
  primer
gggatgatttccaaattgatta

SEQ ID NO: 25140 - DNA, 38 bp, Artificial Sequence
  primer
gtaaaacgacggccagtactcctcatgagtgtaggccc

SEQ ID NO: 25141 - DNA, 21 bp, Artificial Sequence
  primer
ttcagagctcaagactgcctg

SEQ ID NO: 25142 - DNA, 38 bp, Artificial Sequence
  primer
gtaaaacgacggccagtaatgggaatcctaggtccctg

SEQ ID NO: 25143 - DNA, 21 bp, Artificial Sequence
  primer
gcttgcaccagatcaaacaag

SEQ ID NO: 25144 - DNA, 21 bp, Artificial Sequence
  primer
gtttcagcctgagtgacaacg

SEQ ID NO: 25145 - DNA, 22 bp, Artificial Sequence
  primer
tgctctcaaactcttgccattc

SEQ ID NO: 25146 - DNA, 38 bp, Artificial Sequence
  primer
gtaaaacgacggccagtagcttctgtcctctccctcac

SEQ ID NO: 25147 - DNA, 21 bp, Artificial Sequence
  primer
tggtaagcattaagcccaagg

SEQ ID NO: 25148 - DNA, 21 bp, Artificial Sequence
  primer
taccctaatggcacagggaag

SEQ ID NO: 25149 - DNA, 39 bp, Artificial Sequence
  primer
gtaaaacgacggccagtttagcagaaggtacttgggcag

SEQ ID NO: 25150 - DNA, 21 bp, Artificial Sequence
  primer
acatgccagggtagtgttgag

SEQ ID NO: 25151 - DNA, 38 bp, Artificial Sequence
  primer
gtaaaacgacggccagtcccaaagtggaaatttcttgg

SEQ ID NO: 25152 - DNA, 21 bp, Artificial Sequence
  primer
tggatgaataaacgcatttgg

SEQ ID NO: 25153 - DNA, 21 bp, Artificial Sequence
  primer
gtcaccattgtgaaggaaggc

SEQ ID NO: 25154 - DNA, 38 bp, Artificial Sequence
  primer
gtaaaacgacggccagtgaggtctacagcctggaatgg

SEQ ID NO: 25155 - DNA, 38 bp, Artificial Sequence
  primer
gtaaaacgacggccagtacctgccatcaaggtcttgtc

SEQ ID NO: 25156 - DNA, 22 bp, Artificial Sequence
  primer
aatgggaaggagtggttctagg

SEQ ID NO: 25157 - DNA, 38 bp, Artificial Sequence
  primer
gtaaaacgacggccagttttacctccctgaaggcacag

SEQ ID NO: 25158 - DNA, 21 bp, Artificial Sequence
  primer
atttggaagtagccaggcaag

SEQ ID NO: 25159 - DNA, 38 bp, Artificial Sequence
  primer
gtaaaacgacggccagtcaagcaggttctgttcactgc

SEQ ID NO: 25160 - DNA, 22 bp, Artificial Sequence
  primer
tgaggtcaggcagctagttagg

SEQ ID NO: 25161 - DNA, 38 bp, Artificial Sequence
  primer
gtaaaacgacggccagtattgaagaatgaatccgctgg

SEQ ID NO: 25162 - DNA, 22 bp, Artificial Sequence
  primer
gaactgcagaatctggttaggg

SEQ ID NO: 25163 - DNA, 38 bp, Artificial Sequence
  primer
gtaaaacgacggccagtcggtgttagagcctgtcaagg

SEQ ID NO: 25164 - DNA, 38 bp, Artificial Sequence
  primer
gtaaaacgacggccagtaaaggaagaagcccaaacaaa

SEQ ID NO: 25165 - DNA, 35 bp, Artificial Sequence
  primer
gtaaaacgacggccagtgagaccaggcggcttgag

SEQ ID NO: 25166 - DNA, 20 bp, Artificial Sequence
  primer
gaaggacccacctttccaac

SEQ ID NO: 25167 - DNA, 39 bp, Artificial Sequence
  primer
gtaaaacgacggccagtccagcatcctgcacctagtaag

SEQ ID NO: 25168 - DNA, 21 bp, Artificial Sequence
  primer
cttgaattcctgggctcaaac

SEQ ID NO: 25169 - DNA, 21 bp, Artificial Sequence
  primer
cgaaatcggacatctggaaac

SEQ ID NO: 25170 - DNA, 21 bp, Artificial Sequence
  primer
ccagagggagtccttcacaag

SEQ ID NO: 25171 - DNA, 21 bp, Artificial Sequence
  primer
gaaggcctagtgcgtggtaag

SEQ ID NO: 25172 - DNA, 37 bp, Artificial Sequence
  primer
gtaaaacgacggccagtacagccacctctcctccaac

SEQ ID NO: 25173 - DNA, 38 bp, Artificial Sequence
  primer
gtaaaacgacggccagtccgcctctgttccactcttac

SEQ ID NO: 25174 - DNA, 21 bp, Artificial Sequence
  primer
aagagcagcactcgatcacag

SEQ ID NO: 25175 - DNA, 21 bp, Artificial Sequence
  primer
gcatgctgaatatgcttctgg

SEQ ID NO: 25176 - DNA, 21 bp, Artificial Sequence
  primer
ccctgataataagcctggtgg

SEQ ID NO: 25177 - DNA, 38 bp, Artificial Sequence
  primer
gtaaaacgacggccagtcacctccagaaagctacccag

SEQ ID NO: 25178 - DNA, 38 bp, Artificial Sequence
  primer
gtaaaacgacggccagtctgaaactttcctgccagagg

SEQ ID NO: 25179 - DNA, 38 bp, Artificial Sequence
  primer
gtaaaacgacggccagttcgggagttgtagtttcctgc

SEQ ID NO: 25180 - DNA, 20 bp, Artificial Sequence
  primer
tcgacaagcccattaagcag

SEQ ID NO: 25181 - DNA, 38 bp, Artificial Sequence
  primer
gtaaaacgacggccagtctatgtccagagcattcctgc

SEQ ID NO: 25182 - DNA, 21 bp, Artificial Sequence
  primer
tctgagagcagggatgaactt

SEQ ID NO: 25183 - DNA, 39 bp, Artificial Sequence
  primer
gtaaaacgacggccagtttcttccttggtgaagaaccac

SEQ ID NO: 25184 - DNA, 39 bp, Artificial Sequence
  primer
gtaaaacgacggccagtaatgagtggctctgtattccca

SEQ ID NO: 25185 - DNA, 21 bp, Artificial Sequence
  primer
ggagtactttgagtcccaccc

SEQ ID NO: 25186 - DNA, 38 bp, Artificial Sequence
  primer
gtaaaacgacggccagtggtttccttctcatgctttcc

SEQ ID NO: 25187 - DNA, 21 bp, Artificial Sequence
  primer
ataatttgctttgccatgctg

SEQ ID NO: 25188 - DNA, 38 bp, Artificial Sequence
  primer
gtaaaacgacggccagtttggctctcaaagcattgttc

SEQ ID NO: 25189 - DNA, 21 bp, Artificial Sequence
  primer
ttaagcctggaagtcctgctc

SEQ ID NO: 25190 - DNA, 21 bp, Artificial Sequence
  primer
gcaccattctctgatagcgtg

SEQ ID NO: 25191 - DNA, 20 bp, Artificial Sequence
  primer
acccggccttagctgatttc

SEQ ID NO: 25192 - DNA, 44 bp, Artificial Sequence
  primer
gtaaaacgacggccagtcatttgaaataatcctcagttcttagc

SEQ ID NO: 25193 - DNA, 21 bp, Artificial Sequence
  primer
tgaccatcctcttctacagcg

SEQ ID NO: 25194 - DNA, 38 bp, Artificial Sequence
  primer
gtaaaacgacggccagtatttggaatcaagtggtcacg

SEQ ID NO: 25195 - DNA, 38 bp, Artificial Sequence
  primer
gtaaaacgacggccagttggaagttgttgaggaggagc

SEQ ID NO: 25196 - DNA, 24 bp, Artificial Sequence
  primer
tgtatgcatcgaggtgatctaaag

SEQ ID NO: 25197 - DNA, 23 bp, Artificial Sequence
  primer
cgtagtcacgtggtcatgtgtag

SEQ ID NO: 25198 - DNA, 19 bp, Artificial Sequence
  primer
ctgaagccactcgctgtcc

SEQ ID NO: 25199 - DNA, 18 bp, Artificial Sequence
  primer
aagcatgttctggcgtcg

SEQ ID NO: 25200 - DNA, 38 bp, Artificial Sequence
  primer
gtaaaacgacggccagttgagtatctcagagccctcgc

SEQ ID NO: 25201 - DNA, 38 bp, Artificial Sequence
  primer
gtaaaacgacggccagtcagacctgtggtaagcgtcag

SEQ ID NO: 25202 - DNA, 21 bp, Artificial Sequence
  primer
aggatctcacagcgagtctgg

SEQ ID NO: 25203 - DNA, 37 bp, Artificial Sequence
  primer
gtaaaacgacggccagtagaaatggtcacgcaaggtg

SEQ ID NO: 25204 - DNA, 20 bp, Artificial Sequence
  primer
gatgggactcgtggacattg

SEQ ID NO: 25205 - DNA, 38 bp, Artificial Sequence
  primer
gtaaaacgacggccagtcttcagcacagaatcccactg

SEQ ID NO: 25206 - DNA, 37 bp, Artificial Sequence
  primer
gtaaaacgacggccagtaggaaatggatgctgtgctg

SEQ ID NO: 25207 - DNA, 41 bp, Artificial Sequence
  primer
gtaaaacgacggccagtcagaattccataagcgttaagttg

SEQ ID NO: 25208 - DNA, 21 bp, Artificial Sequence
  primer
atctttgggtggagacctgtg

SEQ ID NO: 25209 - DNA, 21 bp, Artificial Sequence
  primer
tcctgtctccagaatccacac

SEQ ID NO: 25210 - DNA, 38 bp, Artificial Sequence
  primer
gtaaaacgacggccagtgttctgcctgtgtgggtttac

SEQ ID NO: 25211 - DNA, 21 bp, Artificial Sequence
  primer
tgctgcatgtagagtgttgga

SEQ ID NO: 25212 - DNA, 22 bp, Artificial Sequence
  primer
tttctgccagtctttcctgaac

SEQ ID NO: 25213 - DNA, 23 bp, Artificial Sequence
  primer
cctaattggtgaggattacctcc

SEQ ID NO: 25214 - DNA, 21 bp, Artificial Sequence
  primer
taagcccagaaacactggtcc

SEQ ID NO: 25215 - DNA, 19 bp, Artificial Sequence
  primer
aaccctggaaagaccaggc

SEQ ID NO: 25216 - DNA, 21 bp, Artificial Sequence
  primer
ctcttgcggtgatagggacac

SEQ ID NO: 25217 - DNA, 38 bp, Artificial Sequence
  primer
gtaaaacgacggccagtggaatctgagacagccacctg

SEQ ID NO: 25218 - DNA, 21 bp, Artificial Sequence
  primer
acaggagaagtgaatgttgcg

SEQ ID NO: 25219 - DNA, 38 bp, Artificial Sequence
  primer
gtaaaacgacggccagtacaaagtgtcaaggccctctc

SEQ ID NO: 25220 - DNA, 40 bp, Artificial Sequence
  primer
gtaaaacgacggccagttctggaagacttgttggtcattc

SEQ ID NO: 25221 - DNA, 36 bp, Artificial Sequence
  primer
gtaaaacgacggccagtctgctgctggtggtctgtg

SEQ ID NO: 25222 - DNA, 45 bp, Artificial Sequence
  primer
gtaaaacgacggccagtaaatgatctgtaaatattgtcctgaggt

SEQ ID NO: 25223 - DNA, 18 bp, Artificial Sequence
  primer
ggtggtgggcacctgtag

SEQ ID NO: 25224 - DNA, 20 bp, Artificial Sequence
  primer
acaatggccgcctttctatg

SEQ ID NO: 25225 - DNA, 37 bp, Artificial Sequence
  primer
gtaaaacgacggccagtaggaatgggagagtggtggt

SEQ ID NO: 25226 - DNA, 38 bp, Artificial Sequence
  primer
gtaaaacgacggccagtggcaaccagttgaagacgttc

SEQ ID NO: 25227 - DNA, 21 bp, Artificial Sequence
  primer
agtctctcatctggtcggcag

SEQ ID NO: 25228 - DNA, 20 bp, Artificial Sequence
  primer
tcccagatgaggaagaaggg

SEQ ID NO: 25229 - DNA, 21 bp, Artificial Sequence
  primer
gtggctaggaacaagctcagg

SEQ ID NO: 25230 - DNA, 21 bp, Artificial Sequence
  primer
gtctgaaagaaggcctggaac

SEQ ID NO: 25231 - DNA, 38 bp, Artificial Sequence
  primer
gtaaaacgacggccagttatgtgcttagctgctgggtc

SEQ ID NO: 25232 - DNA, 20 bp, Artificial Sequence
  primer
agctttgccattgagtgtgg

SEQ ID NO: 25233 - DNA, 36 bp, Artificial Sequence
  primer
gtaaaacgacggccagttcagagacgttggcagtgg

SEQ ID NO: 25234 - DNA, 20 bp, Artificial Sequence
  primer
tcctcagagatcatccaggc

SEQ ID NO: 25235 - DNA, 37 bp, Artificial Sequence
  primer
gtaaaacgacggccagtgctgtgtggcatgtatgtgg

SEQ ID NO: 25236 - DNA, 21 bp, Artificial Sequence
  primer
aggagacacttctctgccacg

SEQ ID NO: 25237 - DNA, 20 bp, Artificial Sequence
  primer
ctcagctacacccgttgcac

SEQ ID NO: 25238 - DNA, 37 bp, Artificial Sequence
  primer
gtaaaacgacggccagtcatcttcctgcttggagtgg

SEQ ID NO: 25239 - DNA, 38 bp, Artificial Sequence
  primer
gtaaaacgacggccagtctaaagcccagccctttatgc

SEQ ID NO: 25240 - DNA, 36 bp, Artificial Sequence
  primer
gtaaaacgacggccagtctctggtggtggacaaggg

SEQ ID NO: 25241 - DNA, 26 bp, Artificial Sequence
  primer
catggagcaaatttacttacttagcc

SEQ ID NO: 25242 - DNA, 27 bp, Artificial Sequence
  primer
aacacttctgagtaaatacagctatca

SEQ ID NO: 25243 - DNA, 21 bp, Artificial Sequence
  primer
caactcaaatggctgttcagg

SEQ ID NO: 25244 - DNA, 27 bp, Artificial Sequence
  primer
tttggaatgaagtttaaggtaaacaaa

SEQ ID NO: 25245 - DNA, 39 bp, Artificial Sequence
  primer
gtaaaacgacggccagttggctaaatttgacagaggtcg

SEQ ID NO: 25246 - DNA, 21 bp, Artificial Sequence
  primer
cccagctgtcttcaggtaatg

SEQ ID NO: 25247 - DNA, 21 bp, Artificial Sequence
  primer
tggtcccaagcatttcagata

SEQ ID NO: 25248 - DNA, 23 bp, Artificial Sequence
  primer
ttgagaagccagataaccttgtg

SEQ ID NO: 25249 - DNA, 39 bp, Artificial Sequence
  primer
gtaaaacgacggccagtttgtttcctgataaaggcacag

SEQ ID NO: 25250 - DNA, 22 bp, Artificial Sequence
  primer
gaaatatttgcctaaacgctgg

SEQ ID NO: 25251 - DNA, 38 bp, Artificial Sequence
  primer
gtaaaacgacggccagtcactgataagcaggaagccac

SEQ ID NO: 25252 - DNA, 20 bp, Artificial Sequence
  primer
actgtgcccagcctgaatag

SEQ ID NO: 25253 - DNA, 26 bp, Artificial Sequence
  primer
tcttaatttgcatttctctgatgttt

SEQ ID NO: 25254 - DNA, 21 bp, Artificial Sequence
  primer
tgttctgtgttccttgtgtgc

SEQ ID NO: 25255 - DNA, 23 bp, Artificial Sequence
  primer
ttaatattggcagcatttatggc

SEQ ID NO: 25256 - DNA, 35 bp, Artificial Sequence
  primer
gtaaaacgacggccagtatgtccctgggaggcaag

SEQ ID NO: 25257 - DNA, 22 bp, Artificial Sequence
  primer
cagttgaagatgcagtctttgg

SEQ ID NO: 25258 - DNA, 38 bp, Artificial Sequence
  primer
gtaaaacgacggccagtcttgagcctgtggttgatgac

SEQ ID NO: 25259 - DNA, 21 bp, Artificial Sequence
  primer
ttgcacgtaatctggctgatg

SEQ ID NO: 25260 - DNA, 20 bp, Artificial Sequence
  primer
ttactgggcgtttcaagcag

SEQ ID NO: 25261 - DNA, 23 bp, Artificial Sequence
  primer
ggcttgaatgtcttagagtgtgg

SEQ ID NO: 25262 - DNA, 26 bp, Artificial Sequence
  primer
caaatgtcctgaaagttgaaagaatc

SEQ ID NO: 25263 - DNA, 41 bp, Artificial Sequence
  primer
gtaaaacgacggccagtcaggattctaagatacccttgtgg

SEQ ID NO: 25264 - DNA, 21 bp, Artificial Sequence
  primer
gtgtattggaaataggccgtg

SEQ ID NO: 25265 - DNA, 38 bp, Artificial Sequence
  primer
gtaaaacgacggccagtcaaggtggtgctgattcttct

SEQ ID NO: 25266 - DNA, 43 bp, Artificial Sequence
  primer
gtaaaacgacggccagtaaggatagagaggcattatctcattg

SEQ ID NO: 25267 - DNA, 23 bp, Artificial Sequence
  primer
tcacactgagaaaccttgacctc

SEQ ID NO: 25268 - DNA, 22 bp, Artificial Sequence
  primer
gcctgggtaacagagtgagatg

SEQ ID NO: 25269 - DNA, 21 bp, Artificial Sequence
  primer
gcttcctccaaatgtgacacc

SEQ ID NO: 25270 - DNA, 38 bp, Artificial Sequence
  primer
gtaaaacgacggccagttaccaatttgaaatgaacggc

SEQ ID NO: 25271 - DNA, 38 bp, Artificial Sequence
  primer
gtaaaacgacggccagtataatagccgctttgaagccc

SEQ ID NO: 25272 - DNA, 21 bp, Artificial Sequence
  primer
agcaacaggttccaaggtagg

SEQ ID NO: 25273 - DNA, 21 bp, Artificial Sequence
  primer
acctggttacccgataggagg

SEQ ID NO: 25274 - DNA, 38 bp, Artificial Sequence
  primer
gtaaaacgacggccagtgactcaggtcaagacccttgg

SEQ ID NO: 25275 - DNA, 37 bp, Artificial Sequence
  primer
gtaaaacgacggccagtagtggagctttcccagcttc

SEQ ID NO: 25276 - DNA, 20 bp, Artificial Sequence
  primer
ctgtcttgggcttctgcaag

SEQ ID NO: 25277 - DNA, 21 bp, Artificial Sequence
  primer
cctctgtcctttcaatgcctg

SEQ ID NO: 25278 - DNA, 38 bp, Artificial Sequence
  primer
gtaaaacgacggccagtgtgatgacagtgactccgagc

SEQ ID NO: 25279 - DNA, 21 bp, Artificial Sequence
  primer
gagtgagtgaactggccttcc

SEQ ID NO: 25280 - DNA, 21 bp, Artificial Sequence
  primer
tcaccaatatctaccgggacc

SEQ ID NO: 25281 - DNA, 37 bp, Artificial Sequence
  primer
gtaaaacgacggccagtgctcacttggcatcttgtcc

SEQ ID NO: 25282 - DNA, 21 bp, Artificial Sequence
  primer
agaaggaggttgctacttggg

SEQ ID NO: 25283 - DNA, 38 bp, Artificial Sequence
  primer
gtaaaacgacggccagtccctttccaacccacctgtag

SEQ ID NO: 25284 - DNA, 21 bp, Artificial Sequence
  primer
gtgatgatgatggagctgtgc

SEQ ID NO: 25285 - DNA, 37 bp, Artificial Sequence
  primer
gtaaaacgacggccagtagtgtttcagctggattggg

SEQ ID NO: 25286 - DNA, 38 bp, Artificial Sequence
  primer
gtaaaacgacggccagtcatcaggaggtggtgcttatg

SEQ ID NO: 25287 - DNA, 21 bp, Artificial Sequence
  primer
aaagtgagcagtggaagtggg

SEQ ID NO: 25288 - DNA, 21 bp, Artificial Sequence
  primer
caagaccaggctaaaccttgc

SEQ ID NO: 25289 - DNA, 38 bp, Artificial Sequence
  primer
gtaaaacgacggccagtactgccacaactctggatgag

SEQ ID NO: 25290 - DNA, 38 bp, Artificial Sequence
  primer
gtaaaacgacggccagttggatgccttcaaatagcctc

SEQ ID NO: 25291 - DNA, 21 bp, Artificial Sequence
  primer
gtcaagtcttcacgaagccac

SEQ ID NO: 25292 - DNA, 39 bp, Artificial Sequence
  primer
gtaaaacgacggccagtcctctttgtctagttggcatgg

SEQ ID NO: 25293 - DNA, 36 bp, Artificial Sequence
  primer
gtaaaacgacggccagtgtcctgccgctggtatctg

SEQ ID NO: 25294 - DNA, 37 bp, Artificial Sequence
  primer
gtaaaacgacggccagttccaagggaaccttgttgtg

SEQ ID NO: 25295 - DNA, 38 bp, Artificial Sequence
  primer
gtaaaacgacggccagtctacatggacgcagaactccc

SEQ ID NO: 25296 - DNA, 38 bp, Artificial Sequence
  primer
gtaaaacgacggccagtacccagctgcctaatgatctc

SEQ ID NO: 25297 - DNA, 43 bp, Artificial Sequence
  primer
gtaaaacgacggccagtaatccaggaggaatattaaatgtttg

SEQ ID NO: 25298 - DNA, 21 bp, Artificial Sequence
  primer
tgtgggtggaagataagggag

SEQ ID NO: 25299 - DNA, 21 bp, Artificial Sequence
  primer
aaccctgccatcatctcattc

SEQ ID NO: 25300 - DNA, 38 bp, Artificial Sequence
  primer
gtaaaacgacggccagtaattgtcttatggaggcagcg

SEQ ID NO: 25301 - DNA, 38 bp, Artificial Sequence
  primer
gtaaaacgacggccagtgtgtcatccactgcctctctc

SEQ ID NO: 25302 - DNA, 38 bp, Artificial Sequence
  primer
gtaaaacgacggccagtcccacagtttagagcaaagcc

SEQ ID NO: 25303 - DNA, 21 bp, Artificial Sequence
  primer
ttgactgcaagtgggaaagac

SEQ ID NO: 25304 - DNA, 21 bp, Artificial Sequence
  primer
gtttaggctcccaggtgtttc

SEQ ID NO: 25305 - DNA, 39 bp, Artificial Sequence
  primer
gtaaaacgacggccagtttgtcagatgctttccatgttg

SEQ ID NO: 25306 - DNA, 38 bp, Artificial Sequence
  primer
gtaaaacgacggccagttggatggacctaggaggtagg

SEQ ID NO: 25307 - DNA, 19 bp, Artificial Sequence
  primer
gcctcgtactacgcgacag

SEQ ID NO: 25308 - DNA, 39 bp, Artificial Sequence
  primer
gtaaaacgacggccagtcccggccaatctataaattctt

SEQ ID NO: 25309 - DNA, 38 bp, Artificial Sequence
  primer
gtaaaacgacggccagttgggaatattgagacaagcca

SEQ ID NO: 25310 - DNA, 38 bp, Artificial Sequence
  primer
gtaaaacgacggccagtttattagggcagagtcgggtg

SEQ ID NO: 25311 - DNA, 40 bp, Artificial Sequence
  primer
gtaaaacgacggccagttgattctctgccattgtgtatca

SEQ ID NO: 25312 - DNA, 22 bp, Artificial Sequence
  primer
gaggccagaagactcctattcc

SEQ ID NO: 25313 - DNA, 38 bp, Artificial Sequence
  primer
gtaaaacgacggccagtaagccatttgtgtgagagcag

SEQ ID NO: 25314 - DNA, 38 bp, Artificial Sequence
  primer
gtaaaacgacggccagtgattgagaggccaggaaacac

SEQ ID NO: 25315 - DNA, 21 bp, Artificial Sequence
  primer
aactgatgcagacgtgatgtg

SEQ ID NO: 25316 - DNA, 21 bp, Artificial Sequence
  primer
aataatgaagcaggcgaggac

SEQ ID NO: 25317 - DNA, 38 bp, Artificial Sequence
  primer
gtaaaacgacggccagttcaaaggaaggagccgttatg

SEQ ID NO: 25318 - DNA, 19 bp, Artificial Sequence
  primer
aagctccgcttcacaccag

SEQ ID NO: 25319 - DNA, 37 bp, Artificial Sequence
  primer
gtaaaacgacggccagtgttcggtggcttctagggtc

SEQ ID NO: 25320 - DNA, 21 bp, Artificial Sequence
  primer
ccttctaagccgaaatcaccc

SEQ ID NO: 25321 - DNA, 21 bp, Artificial Sequence
  primer
ctatatttaacagctgcggcg

SEQ ID NO: 25322 - DNA, 21 bp, Artificial Sequence
  primer
ctgagttcctgtccctgaacc

SEQ ID NO: 25323 - DNA, 21 bp, Artificial Sequence
  primer
aggcttctccgctaaaggaag

SEQ ID NO: 25324 - DNA, 21 bp, Artificial Sequence
  primer
accatggacatctacgccttc

SEQ ID NO: 25325 - DNA, 21 bp, Artificial Sequence
  primer
agcttcgagtgtgagagaccc

SEQ ID NO: 25326 - DNA, 38 bp, Artificial Sequence
  primer
gtaaaacgacggccagtggtacaggtgagggagtgagg

SEQ ID NO: 25327 - DNA, 38 bp, Artificial Sequence
  primer
gtaaaacgacggccagtgctactgcacctggcatttac

SEQ ID NO: 25328 - DNA, 37 bp, Artificial Sequence
  primer
gtaaaacgacggccagtcatctctgccatcatctgcc

SEQ ID NO: 25329 - DNA, 22 bp, Artificial Sequence
  primer
gaattacttaggcctggctctg

SEQ ID NO: 25330 - DNA, 24 bp, Artificial Sequence
  primer
tctgaggtgtgttatctttgacct

SEQ ID NO: 25331 - DNA, 38 bp, Artificial Sequence
  primer
gtaaaacgacggccagttgcagactgtgctctaggtgg

SEQ ID NO: 25332 - DNA, 38 bp, Artificial Sequence
  primer
gtaaaacgacggccagtacaacccggagaattgaagtg

SEQ ID NO: 25333 - DNA, 38 bp, Artificial Sequence
  primer
gtaaaacgacggccagtgcccgagttatcttccttgtc

SEQ ID NO: 25334 - DNA, 38 bp, Artificial Sequence
  primer
gtaaaacgacggccagttcaatccataccgtcatgtgc

SEQ ID NO: 25335 - DNA, 38 bp, Artificial Sequence
  primer
gtaaaacgacggccagtataacggcataaatgggatgc

SEQ ID NO: 25336 - DNA, 20 bp, Artificial Sequence
  primer
tatgctccctctcccacaag

SEQ ID NO: 25337 - DNA, 38 bp, Artificial Sequence
  primer
gtaaaacgacggccagtcctttccagtcatctcccaag

SEQ ID NO: 25338 - DNA, 21 bp, Artificial Sequence
  primer
cattccttatggcactggcac

SEQ ID NO: 25339 - DNA, 38 bp, Artificial Sequence
  primer
gtaaaacgacggccagtgtgtctaggaaggatgctggg

SEQ ID NO: 25340 - DNA, 19 bp, Artificial Sequence
  primer
gacaagacaggcctttgcc

SEQ ID NO: 25341 - DNA, 38 bp, Artificial Sequence
  primer
gtaaaacgacggccagtgggtcccagagcatataaagc

SEQ ID NO: 25342 - DNA, 21 bp, Artificial Sequence
  primer
atttgagctgagagaggcagc

SEQ ID NO: 25343 - DNA, 42 bp, Artificial Sequence
  primer
gtaaaacgacggccagtgataacaggattccacatctttgac

SEQ ID NO: 25344 - DNA, 21 bp, Artificial Sequence
  primer
tatgtcgactctttgcccacc

SEQ ID NO: 25345 - DNA, 21 bp, Artificial Sequence
  primer
gagtaaggcacatttgggctc

SEQ ID NO: 25346 - DNA, 23 bp, Artificial Sequence
  primer
tttgttgggttaatttcctaccc

SEQ ID NO: 25347 - DNA, 20 bp, Artificial Sequence
  primer
actccagcctgagcaatgaa

SEQ ID NO: 25348 - DNA, 37 bp, Artificial Sequence
  primer
gtaaaacgacggccagttctcggaaatgaaggcagtg

SEQ ID NO: 25349 - DNA, 22 bp, Artificial Sequence
  primer
cattgtgcttatagcttcggtg

SEQ ID NO: 25350 - DNA, 19 bp, Artificial Sequence
  primer
cccatggattccaggtgac

SEQ ID NO: 25351 - DNA, 22 bp, Artificial Sequence
  primer
ggatttgctaaatcagagacca

SEQ ID NO: 25352 - DNA, 38 bp, Artificial Sequence
  primer
gtaaaacgacggccagttcaagtgagggattgtggaag

SEQ ID NO: 25353 - DNA, 38 bp, Artificial Sequence
  primer
gtaaaacgacggccagttgtattgtctgccaagcactg

SEQ ID NO: 25354 - DNA, 24 bp, Artificial Sequence
  primer
tgcacagtttctacttgtccttca

SEQ ID NO: 25355 - DNA, 37 bp, Artificial Sequence; identical to SEQ ID NO: 25348
  primer

SEQ ID NO: 25356 - DNA, 21 bp, Artificial Sequence
  primer
tgacttcctccaacagctgac

SEQ ID NO: 25357 - DNA, 38 bp, Artificial Sequence
  primer
gtaaaacgacggccagttctctcggccttcattaccag

SEQ ID NO: 25358 - DNA, 21 bp, Artificial Sequence
  primer
aacctgtttcctcacctttgg

SEQ ID NO: 25359 - DNA, 39 bp, Artificial Sequence
  primer
gtaaaacgacggccagtaagctctcagcctctcttcctc

SEQ ID NO: 25360 - DNA, 21 bp, Artificial Sequence
  primer
tctcttccagagcagccagtc

SEQ ID NO: 25361 - DNA, 21 bp, Artificial Sequence
  primer
aacgactccttcgagatacgg

SEQ ID NO: 25362 - DNA, 22 bp, Artificial Sequence
  primer
cgaaattctttcatggtcatcc

SEQ ID NO: 25363 - DNA, 21 bp, Artificial Sequence
  primer
ccaagaatagccgggaatatg

SEQ ID NO: 25364 - DNA, 38 bp, Artificial Sequence
  primer
gtaaaacgacggccagtgaacggttgatggtgtgtctg

SEQ ID NO: 25365 - DNA, 38 bp, Artificial Sequence
  primer
gtaaaacgacggccagtgagaagccctttgcactcttc

SEQ ID NO: 25366 - DNA, 20 bp, Artificial Sequence
  primer
gtgtgcctgtctgtgcattg

SEQ ID NO: 25367 - DNA, 39 bp, Artificial Sequence
  primer
gtaaaacgacggccagtgctctgcagattaattccttgg

SEQ ID NO: 25368 - DNA, 43 bp, Artificial Sequence
  primer
gtaaaacgacggccagtttcagtcataccaaacaattctaacg

SEQ ID NO: 25369 - DNA, 39 bp, Artificial Sequence
  primer
gtaaaacgacggccagtcctgcattaggtccttctgatg

SEQ ID NO: 25370 - DNA, 38 bp, Artificial Sequence
  primer
gtaaaacgacggccagttaacagaaatgccgatcgaag

SEQ ID NO: 25371 - DNA, 39 bp, Artificial Sequence
  primer
gtaaaacgacggccagtcagcagttcagatagccattcc

SEQ ID NO: 25372 - DNA, 20 bp, Artificial Sequence
  primer
ctggaagggttgcagaaatg

SEQ ID NO: 25373 - DNA, 21 bp, Artificial Sequence
  primer
gggcaacaagagtgaaactcc

SEQ ID NO: 25374 - DNA, 37 bp, Artificial Sequence
  primer
gtaaaacgacggccagtgtctgaacgagcagactggc

SEQ ID NO: 25375 - DNA, 38 bp, Artificial Sequence
  primer
gtaaaacgacggccagttcaaatcctttggaatgatgg

SEQ ID NO: 25376 - DNA, 42 bp, Artificial Sequence
  primer
gtaaaacgacggccagtcaggagacattcttaccttctgaac

SEQ ID NO: 25377 - DNA, 42 bp, Artificial Sequence; identical to SEQ ID NO: 25376
  primer

SEQ ID NO: 25378 - DNA, 38 bp, Artificial Sequence
  primer
gtaaaacgacggccagtctccaatggaatgagaccctg

SEQ ID NO: 25379 - DNA, 19 bp, Artificial Sequence
  primer
ccaatcggaagaggctgac

SEQ ID NO: 25380 - DNA, 20 bp, Artificial Sequence
  primer
acaaggtcgtcctctggacc

SEQ ID NO: 25381 - DNA, 21 bp, Artificial Sequence
  primer
taatgttgcaatccgcatacc

SEQ ID NO: 25382 - DNA, 21 bp, Artificial Sequence
  primer
ctcttcagtgagtgagcgtgc

SEQ ID NO: 25383 - DNA, 21 bp, Artificial Sequence
  primer
ttggaggtatcactagcagcc

SEQ ID NO: 25384 - DNA, 21 bp, Artificial Sequence
  primer
ctccatggactgtcactggtc

SEQ ID NO: 25385 - DNA, 21 bp, Artificial Sequence
  primer
taactgtggttctccgacagc

SEQ ID NO: 25386 - DNA, 38 bp, Artificial Sequence
  primer
gtaaaacgacggccagtgcagcacaacagatgtaagcc

SEQ ID NO: 25387 - DNA, 37 bp, Artificial Sequence
  primer
gtaaaacgacggccagtgccctactgtgttcactggg

SEQ ID NO: 25388 - DNA, 21 bp, Artificial Sequence
  primer
gacaacccttccttgcatttc

SEQ ID NO: 25389 - DNA, 38 bp, Artificial Sequence
  primer
gtaaaacgacggccagtaacaagatggttgtgacaccg

SEQ ID NO: 25390 - DNA, 38 bp, Artificial Sequence
  primer
gtaaaacgacggccagtcgggacctgaactaccttctg

SEQ ID NO: 25391 - DNA, 19 bp, Artificial Sequence
  primer
ctgcccttaggtggagacc

SEQ ID NO: 25392 - DNA, 37 bp, Artificial Sequence
  primer
gtaaaacgacggccagtaaatgcatgcaagatccgtc

SEQ ID NO: 25393 - DNA, 21 bp, Artificial Sequence
  primer
ctgggacctctattgctggag

SEQ ID NO: 25394 - DNA, 38 bp, Artificial Sequence
  primer
gtaaaacgacggccagtgtaggtggctgcacattcatc

SEQ ID NO: 25395 - DNA, 38 bp, Artificial Sequence
  primer
gtaaaacgacggccagtcacgaccctaaatcccttctg

SEQ ID NO: 25396 - DNA, 19 bp, Artificial Sequence
  primer
ccacctttggctgagatcc

SEQ ID NO: 25397 - DNA, 21 bp, Artificial Sequence
  primer
gaagcgaccaaagtggaagag

SEQ ID NO: 25398 - DNA, 38 bp, Artificial Sequence
  primer
gtaaaacgacggccagtcttctgactttgcagggaagg

SEQ ID NO: 25399 - DNA, 21 bp, Artificial Sequence
  primer
aaggctctggacgaagacaag

SEQ ID NO: 25400 - DNA, 35 bp, Artificial Sequence
  primer
gtaaaacgacggccagtctccatccctgcacccag

SEQ ID NO: 25401 - DNA, 38 bp, Artificial Sequence
  primer
gtaaaacgacggccagtcctcagaatggtccaggagac

SEQ ID NO: 25402 - DNA, 18 bp, Artificial Sequence
  primer
agggctgaagatgccctg

SEQ ID NO: 25403 - DNA, 21 bp, Artificial Sequence
  primer
aggaggatctgaggagcacag

SEQ ID NO: 25404 - DNA, 21 bp, Artificial Sequence
  primer
agaacatgacagcttcccagg

SEQ ID NO: 25405 - DNA, 20 bp, Artificial Sequence
  primer
gcttcagctggagaagggac

SEQ ID NO: 25406 - DNA, 21 bp, Artificial Sequence
  primer
tttatggactgcatggctgac

SEQ ID NO: 25407 - DNA, 22 bp, Artificial Sequence
  primer
ttgtaaggaggctagctgttcc

SEQ ID NO: 25408 - DNA, 24 bp, Artificial Sequence
  primer
ggagggaagaagtaaccatttagg

SEQ ID NO: 25409 - DNA, 24 bp, Artificial Sequence
  primer
gcttgatttaaccatttcacaaca

SEQ ID NO: 25410 - DNA, 42 bp, Artificial Sequence
  primer
gtaaaacgacggccagtcaaataaatttggtctcaagcattc

SEQ ID NO: 25411 - DNA, 37 bp, Artificial Sequence
  primer
gtaaaacgacggccagtagtgacgcataacctgcgac

SEQ ID NO: 25412 - DNA, 41 bp, Artificial Sequence
  primer
gtaaaacgacggccagtattatgcaaagaatttgggaattt

SEQ ID NO: 25413 - DNA, 21 bp, Artificial Sequence
  primer
tttcagatttcatcccaggaa

SEQ ID NO: 25414 - DNA, 18 bp, Artificial Sequence
  primer
agtgagccgaggtcatgc

SEQ ID NO: 25415 - DNA, 38 bp, Artificial Sequence
  primer
gtaaaacgacggccagttagcctgtcttccctagtgcc

SEQ ID NO: 25416 - DNA, 21 bp, Artificial Sequence
  primer
gaggtgggatcaaagcagttt

SEQ ID NO: 25417 - DNA, 38 bp, Artificial Sequence
  primer
gtaaaacgacggccagtttccaccaaccaactaacagc

SEQ ID NO: 25418 - DNA, 18 bp, Artificial Sequence
  primer
gaccttgtgatctgcccg

SEQ ID NO: 25419 - DNA, 38 bp, Artificial Sequence
  primer
gtaaaacgacggccagtaaaggtgaatgtttggcttcc

SEQ ID NO: 25420 - DNA, 40 bp, Artificial Sequence
  primer
gtaaaacgacggccagttttcttctctgtgtctgttggaa

SEQ ID NO: 25421 - DNA, 42 bp, Artificial Sequence
  primer
gtaaaacgacggccagttgcacagtacaatgaagagctacag

SEQ ID NO: 25422 - DNA, 18 bp, Artificial Sequence
  primer
gcacccggccaataactt

SEQ ID NO: 25423 - DNA, 39 bp, Artificial Sequence
  primer
gtaaaacgacggccagttgccactgaacaaggttacaga

SEQ ID NO: 25424 - DNA, 39 bp, Artificial Sequence
  primer
gtaaaacgacggccagtggactcaagtgatcctcctacc

SEQ ID NO: 25425 - DNA, 22 bp, Artificial Sequence
  primer
gccaagatagtgccactgtacc

SEQ ID NO: 25426 - DNA, 23 bp, Artificial Sequence
  primer
aaagaaattccagtgtggttctg

SEQ ID NO: 25427 - DNA, 38 bp, Artificial Sequence
  primer
gtaaaacgacggccagtttcctgggagtagttcgttgg

SEQ ID NO: 25428 - DNA, 20 bp, Artificial Sequence
  primer
aaattgtgccactgcattcc

SEQ ID NO: 25429 - DNA, 23 bp, Artificial Sequence
  primer
cacctgaaattgaaacctaggaa

SEQ ID NO: 25430 - DNA, 18 bp, Artificial Sequence
  primer
agccaccactcccaggtg

SEQ ID NO: 25431 - DNA, 23 bp, Artificial Sequence
  primer
cacctgaaattgaaacctaggaa

SEQ ID NO: 25432 - DNA, 38 bp, Artificial Sequence
  primer
gtaaaacgacggccagtcagaaccggctctccttgtag

SEQ ID NO: 25433 - DNA, 37 bp, Artificial Sequence
  primer
gtaaaacgacggccagtaagctgtgtctgagcgaagg

SEQ ID NO: 25434 - DNA, 37 bp, Artificial Sequence
  primer
gtaaaacgacggccagtggaccatgctcctcctatgg

SEQ ID NO: 25435 - DNA, 38 bp, Artificial Sequence
  primer
gtaaaacgacggccagtctgggtaggaggcttgttcag

SEQ ID NO: 25436 - DNA, 38 bp, Artificial Sequence
  primer
gtaaaacgacggccagtaaatgagaagcagccaccatc

SEQ ID NO: 25437 - DNA, 36 bp, Artificial Sequence
  primer
gtaaaacgacggccagtcttagcagggctcagcagg

SEQ ID NO: 25438 - DNA, 38 bp, Artificial Sequence
  primer
gtaaaacgacggccagtagagctccatgagttgctgag

SEQ ID NO: 25439 - DNA, 21 bp, Artificial Sequence
  primer
cagaacacagtggctcttccc

SEQ ID NO: 25440 - DNA, 37 bp, Artificial Sequence
  primer
gtaaaacgacggccagtctcccaaactggtcccagac

SEQ ID NO: 25441 - DNA, 37 bp, Artificial Sequence
  primer
gtaaaacgacggccagtctagaaccaaggcccgtgag

SEQ ID NO: 25442 - DNA, 38 bp, Artificial Sequence
  primer
gtaaaacgacggccagtcactctttcgagtgaggagga

SEQ ID NO: 25443 - DNA, 18 bp, Artificial Sequence
  primer
cggcctggtttgagatcc

SEQ ID NO: 25444 - DNA, 38 bp, Artificial Sequence
  primer
gtaaaacgacggccagtagagaagtcctgtcacccagc

SEQ ID NO: 25445 - DNA, 38 bp, Artificial Sequence
  primer
gtaaaacgacggccagtctgtctgtgcaggtaaggagg

SEQ ID NO: 25446 - DNA, 38 bp, Artificial Sequence
  primer
gtaaaacgacggccagtgtctagcatggaagaggtggg

SEQ ID NO: 25447 - DNA, 21 bp, Artificial Sequence
  primer
aggagcctgtgcaaacaattc

SEQ ID NO: 25448 - DNA, 21 bp, Artificial Sequence
  primer
aatggaggacatgctaggcag

SEQ ID NO: 25449 - DNA, 21 bp, Artificial Sequence
  primer
ctttgggccacactgagtagg

SEQ ID NO: 25450 - DNA, 21 bp, Artificial Sequence
  primer
gatgccaagggatcagttctc

SEQ ID NO: 25451 - DNA, 21 bp, Artificial Sequence
  primer
atgacgaggaaagtgagggtc

SEQ ID NO: 25452 - DNA, 38 bp, Artificial Sequence
  primer
gtaaaacgacggccagtgggaatgcagagagaaacagg

SEQ ID NO: 25453 - DNA, 21 bp, Artificial Sequence
  primer
cctagatcctgagcaacctgg

SEQ ID NO: 25454 - DNA, 38 bp, Artificial Sequence
  primer
gtaaaacgacggccagttacagtagcctccagcacctg

SEQ ID NO: 25455 - DNA, 21 bp, Artificial Sequence
  primer
cctcctgggtttacctttgtg

SEQ ID NO: 25456 - DNA, 21 bp, Artificial Sequence
  primer
cttcccatatttcctgttgcc

SEQ ID NO: 25457 - DNA, 38 bp, Artificial Sequence
  primer
gtaaaacgacggccagtagaccactggcctcgtcctac

SEQ ID NO: 25458 - DNA, 37 bp, Artificial Sequence
  primer
gtaaaacgacggccagtctacctgcaagtcggtgagc

SEQ ID NO: 25459 - DNA, 38 bp, Artificial Sequence
  primer
gtaaaacgacggccagtaggcctggaatgagtcacatc

SEQ ID NO: 25460 - DNA, 21 bp, Artificial Sequence
  primer
gaggaagcacaacctctaccg

SEQ ID NO: 25461 - DNA, 21 bp, Artificial Sequence
  primer
aagcaggtggtctctgtggtc

SEQ ID NO: 25462 - DNA, 18 bp, Artificial Sequence
  primer
gctacacagccaaagccg

SEQ ID NO: 25463 - DNA, 38 bp, Artificial Sequence
  primer
gtaaaacgacggccagttggtcagtgtcagtacgaggc

SEQ ID NO: 25464 - DNA, 21 bp, Artificial Sequence
  primer
ggagtagcagtgatgcctgtg

SEQ ID NO: 25465 - DNA, 21 bp, Artificial Sequence
  primer
actgccaggagttctaccgag

SEQ ID NO: 25466 - DNA, 38 bp, Artificial Sequence
  primer
gtaaaacgacggccagtcccaggacctcatcactatcc

SEQ ID NO: 25467 - DNA, 38 bp, Artificial Sequence
  primer
gtaaaacgacggccagtgacatttgcaccataagccag

SEQ ID NO: 25468 - DNA, 38 bp, Artificial Sequence
  primer
gtaaaacgacggccagttgtccagttctaaagcctccc

SEQ ID NO: 25469 - DNA, 38 bp, Artificial Sequence
  primer
gtaaaacgacggccagttaaactcacctttccttcgcc

SEQ ID NO: 25470 - DNA, 38 bp, Artificial Sequence
  primer
gtaaaacgacggccagtggaagaggcagattcaggaag

SEQ ID NO: 25471 - DNA, 38 bp, Artificial Sequence
  primer
gtaaaacgacggccagtatgaacttctcagagcgggag

SEQ ID NO: 25472 - DNA, 38 bp, Artificial Sequence
  primer
gtaaaacgacggccagttttatgtccctccaggacagg

SEQ ID NO: 25473 - DNA, 21 bp, Artificial Sequence
  primer
acctatcacacgctggaggag

SEQ ID NO: 25474 - DNA, 21 bp, Artificial Sequence
  primer
aagagtccgggtaactctccc

SEQ ID NO: 25475 - DNA, 21 bp, Artificial Sequence
  primer
gcttcccagtcaaatccagtc

SEQ ID NO: 25476 - DNA, 38 bp, Artificial Sequence
  primer
gtaaaacgacggccagtagtgctccaagctcctcattc

SEQ ID NO: 25477 - DNA, 38 bp, Artificial Sequence
  primer
gtaaaacgacggccagtagctgtctgaatccaaggagg

SEQ ID NO: 25478 - DNA, 38 bp, Artificial Sequence
  primer
gtaaaacgacggccagtgtgtttctactgcccagagcc

SEQ ID NO: 25479 - DNA, 36 bp, Artificial Sequence
  primer
gtaaaacgacggccagtcaccttcctgccagacagc

SEQ ID NO: 25480 - DNA, 21 bp, Artificial Sequence
  primer
tgagacctcatcttctgctcg

SEQ ID NO: 25481 - DNA, 38 bp, Artificial Sequence
  primer
gtaaaacgacggccagtctagagagcatcactgctggg

SEQ ID NO: 25482 - DNA, 40 bp, Artificial Sequence
  primer
gtaaaacgacggccagtcctcaaatcatctaacgtgaagc

SEQ ID NO: 25483 - DNA, 24 bp, Artificial Sequence
  primer
tttcccattagacagtggtttgtt

SEQ ID NO: 25484 - DNA, 23 bp, Artificial Sequence
  primer
aaggtagtgctttctttccagtg

SEQ ID NO: 25485 - DNA, 39 bp, Artificial Sequence
  primer
gtaaaacgacggccagtaaatgatgtcaactccaatgcc

SEQ ID NO: 25486 - DNA, 41 bp, Artificial Sequence
  primer
gtaaaacgacggccagtgcctctttgtacatttaaactggg

SEQ ID NO: 25487 - DNA, 39 bp, Artificial Sequence
  primer
gtaaaacgacggccagtggacattctgaaacattgatgg

SEQ ID NO: 25488 - DNA, 37 bp, Artificial Sequence
  primer
gtaaaacgacggccagtaaatgaggctgcaagtccac

SEQ ID NO: 25489 - DNA, 41 bp, Artificial Sequence
  primer
gtaaaacgacggccagtaagaaagaagtgcttggatgaatg

SEQ ID NO: 25490 - DNA, 39 bp, Artificial Sequence
  primer
gtaaaacgacggccagtttgcttatagccttgggcatac

SEQ ID NO: 25491 - DNA, 21 bp, Artificial Sequence
  primer
tgccaggcactaactcctcag

SEQ ID NO: 25492 - DNA, 38 bp, Artificial Sequence
  primer
gtaaaacgacggccagttggccgcttgtttagaaagac

SEQ ID NO: 25493 - DNA, 39 bp, Artificial Sequence
  primer
gtaaaacgacggccagttttgagttacccatccttgaaa

SEQ ID NO: 25494 - DNA, 21 bp, Artificial Sequence
  primer
tgtaaacaaatgcttgcctgc

SEQ ID NO: 25495 - DNA, 22 bp, Artificial Sequence
  primer
ggtcttctggcttccagacttc

SEQ ID NO: 25496 - DNA, 38 bp, Artificial Sequence
  primer
gtaaaacgacggccagtgctaacgtgtggcagtttaca

SEQ ID NO: 25497 - DNA, 22 bp, Artificial Sequence
  primer
agaggaagaagtggttgtcagc

SEQ ID NO: 25498 - DNA, 38 bp, Artificial Sequence
  primer
gtaaaacgacggccagtagggaacagatgtccttgctg

SEQ ID NO: 25499 - DNA, 43 bp, Artificial Sequence
  primer
gtaaaacgacggccagtctgtttcttaaatagctgaacactgc

SEQ ID NO: 25500 - DNA, 25 bp, Artificial Sequence
  primer
tcattatgtgattagcagtgttgtg

SEQ ID NO: 25501 - DNA, 45 bp, Artificial Sequence
  primer
gtaaaacgacggccagtctacatttctgtaatagctagcactggt

SEQ ID NO: 25502 - DNA, 42 bp, Artificial Sequence
  primer
gtaaaacgacggccagttgtatcaagtgcctagaaatgtttg

SEQ ID NO: 25503 - DNA, 26 bp, Artificial Sequence
  primer
gacccaagtctacttctcagtcagtc

SEQ ID NO: 25504 - DNA, 42 bp, Artificial Sequence
  primer
gtaaaacgacggccagtaaaggagaacagtgatatcagaccc

SEQ ID NO: 25505 - DNA, 19 bp, Artificial Sequence
  primer
cagcgatcaatgcaagtcc

SEQ ID NO: 25506 - DNA, 42 bp, Artificial Sequence
  primer
gtaaaacgacggccagttttgctttcaaattatggaaattct

SEQ ID NO: 25507 - DNA, 27 bp, Artificial Sequence
  primer
attagtctacttgcctgtttatggttt

SEQ ID NO: 25508 - DNA, 21 bp, Artificial Sequence
  primer
gttggcactcagtggtagcag

SEQ ID NO: 25509 - DNA, 20 bp, Artificial Sequence
  primer
cttggtgacacagcgagacc

SEQ ID NO: 25510 - DNA, 38 bp, Artificial Sequence
  primer
gtaaaacgacggccagtggctcagtgcaatggtgttac

SEQ ID NO: 25511 - DNA, 23 bp, Artificial Sequence
  primer
ggtttgtcagcattagagtttcc

SEQ ID NO: 25512 - DNA, 21 bp, Artificial Sequence
  primer
gaaagcgcaagacactctgtg

SEQ ID NO: 25513 - DNA, 21 bp, Artificial Sequence
  primer
tcagcctctgagtgatttccc

SEQ ID NO: 25514 - DNA, 22 bp, Artificial Sequence
  primer
ggcatttacaagagatgttggg

SEQ ID NO: 25515 - DNA, 36 bp, Artificial Sequence
  primer
gtaaaacgacggccagttttggctccagaatccctc

SEQ ID NO: 25516 - DNA, 21 bp, Artificial Sequence
  primer
gttctgccattgaaaggcttc

SEQ ID NO: 25517 - DNA, 38 bp, Artificial Sequence
  primer
gtaaaacgacggccagtatggtgattatggtcgtggtg

SEQ ID NO: 25518 - DNA, 38 bp, Artificial Sequence
  primer
gtaaaacgacggccagttgggatgtgtgacagagaagc

SEQ ID NO: 25519 - DNA, 20 bp, Artificial Sequence
  primer
ggatggagtgtggagtggag

SEQ ID NO: 25520 - DNA, 21 bp, Artificial Sequence
  primer
ggagaggatacaccaccatcc

SEQ ID NO: 25521 - DNA, 37 bp, Artificial Sequence
  primer
gtaaaacgacggccagtacacacactggtcccacctg

SEQ ID NO: 25522 - DNA, 37 bp, Artificial Sequence
  primer
gtaaaacgacggccagtgcagggtgactctgtcaagc

SEQ ID NO: 25523 - DNA, 21 bp, Artificial Sequence
  primer
ctcctcctggatttcttggtc

SEQ ID NO: 25524 - DNA, 22 bp, Artificial Sequence
  primer
agggagttcagtgtccagtgtc

SEQ ID NO: 25525 - DNA, 21 bp, Artificial Sequence
  primer
gaacctgtggatctgaggagg

SEQ ID NO: 25526 - DNA, 39 bp, Artificial Sequence
  primer
gtaaaacgacggccagtgctaatcctcattgtccttccc

SEQ ID NO: 25527 - DNA, 21 bp, Artificial Sequence
  primer
ccttcatgcaaagtggagatg

SEQ ID NO: 25528 - DNA, 38 bp, Artificial Sequence
  primer
gtaaaacgacggccagtagatggacagactcctctggg

SEQ ID NO: 25529 - DNA, 21 bp, Artificial Sequence
  primer
ttgtcgttagctggaggaagg

SEQ ID NO: 25530 - DNA, 38 bp, Artificial Sequence
  primer
gtaaaacgacggccagtgtatcattgtgaacaaggccc

SEQ ID NO: 25531 - DNA, 20 bp, Artificial Sequence
  primer
cgtctcttgtcctgtcccag

SEQ ID NO: 25532 - DNA, 38 bp, Artificial Sequence
  primer
gtaaaacgacggccagttgtgacccactctcatccttc

SEQ ID NO: 25533 - DNA, 38 bp, Artificial Sequence
  primer
gtaaaacgacggccagtccagatgccttcttccacttc

SEQ ID NO: 25534 - DNA, 42 bp, Artificial Sequence
  primer
gtaaaacgacggccagtccctgtggaaagataatctaaagaa

SEQ ID NO: 25535 - DNA, 38 bp, Artificial Sequence
  primer
gtaaaacgacggccagtatcatcacagcaaagacaggc

SEQ ID NO: 25536 - DNA, 39 bp, Artificial Sequence
  primer
gtaaaacgacggccagtaactcattgacacacatgagcc

SEQ ID NO: 25537 - DNA, 20 bp, Artificial Sequence
  primer
ggaacattctgggccctaac

SEQ ID NO: 25538 - DNA, 21 bp, Artificial Sequence
  primer
ttgggtggaaagaaacaaagc

SEQ ID NO: 25539 - DNA, 38 bp, Artificial Sequence
  primer
gtaaaacgacggccagtgggatgagattagcaactggc

SEQ ID NO: 25540 - DNA, 38 bp, Artificial Sequence
  primer
gtaaaacgacggccagtcctctacgtcagcactcctcg

SEQ ID NO: 25541 - DNA, 21 bp, Artificial Sequence
  primer
gggttccacaggatctacgag

SEQ ID NO: 25542 - DNA, 37 bp, Artificial Sequence
  primer
gtaaaacgacggccagtgaccgaggatcgggtatctg

SEQ ID NO: 25543 - DNA, 21 bp, Artificial Sequence
  primer
aggttgaaggcatgtttggtg

SEQ ID NO: 25544 - DNA, 38 bp, Artificial Sequence
  primer
gtaaaacgacggccagttccatggcaagagtgtctctg

SEQ ID NO: 25545 - DNA, 38 bp, Artificial Sequence
  primer
gtaaaacgacggccagttttcccataggagagggaagg

SEQ ID NO: 25546 - DNA, 20 bp, Artificial Sequence
  primer
tgggcacaggataaggtgag

SEQ ID NO: 25547 - DNA, 21 bp, Artificial Sequence
  primer
ccaagatatgattcggaaggg

SEQ ID NO: 25548 - DNA, 21 bp, Artificial Sequence
  primer
acactctttgtgtttgggtgc

SEQ ID NO: 25549 - DNA, 21 bp, Artificial Sequence
  primer
tagctggaagtgctggtgttg

SEQ ID NO: 25550 - DNA, 38 bp, Artificial Sequence
  primer
gtaaaacgacggccagtttccatggtgctgtgaaagag

SEQ ID NO: 25551 - DNA, 21 bp, Artificial Sequence
  primer
aatgtgttctttgccaaatgc

SEQ ID NO: 25552 - DNA, 21 bp, Artificial Sequence
  primer
ttcagcagctcaatctatggc

SEQ ID NO: 25553 - DNA, 21 bp, Artificial Sequence
  primer
tgggttgtacatgaaaggcag

SEQ ID NO: 25554 - DNA, 38 bp, Artificial Sequence
  primer
gtaaaacgacggccagtagtaaatggctggtgatggtg

SEQ ID NO: 25555 - DNA, 37 bp, Artificial Sequence
  primer
gtaaaacgacggccagtatctcctgcatgcacagttg

SEQ ID NO: 25556 - DNA, 40 bp, Artificial Sequence
  primer
gtaaaacgacggccagtaaagggacatcttcaaacacaga

SEQ ID NO: 25557 - DNA, 38 bp, Artificial Sequence
  primer
gtaaaacgacggccagtctcatcaatgccacagtcagg

SEQ ID NO: 25558 - DNA, 38 bp, Artificial Sequence
  primer
gtaaaacgacggccagttacctggcacacagataaccc

SEQ ID NO: 25559 - DNA, 21 bp, Artificial Sequence
  primer
aggccctcaaagacatacagc

SEQ ID NO: 25560 - DNA, 23 bp, Artificial Sequence
  primer
ttgtttatatccacaaacacgcc

SEQ ID NO: 25561 - DNA, 41 bp, Artificial Sequence
  primer
gtaaaacgacggccagtgggctttctctcttcctattagtg

SEQ ID NO: 25562 - DNA, 21 bp, Artificial Sequence
  primer
atttgccggaacaattcaaac

SEQ ID NO: 25563 - DNA, 38 bp, Artificial Sequence
  primer
gtaaaacgacggccagtacccttcttactcggacagcc

SEQ ID NO: 25564 - DNA, 38 bp, Artificial Sequence
  primer
gtaaaacgacggccagttgggaacatttggtggttctc

SEQ ID NO: 25565 - DNA, 38 bp, Artificial Sequence
  primer
gtaaaacgacggccagtttagcccatcttcccatcaag

SEQ ID NO: 25566 - DNA, 21 bp, Artificial Sequence
  primer
cacacatccctctgaaatccc

SEQ ID NO: 25567 - DNA, 38 bp, Artificial Sequence
  primer
gtaaaacgacggccagtggctttgctctctgaatttgc

SEQ ID NO: 25568 - DNA, 21 bp, Artificial Sequence
  primer
caactgcttgttactgcagcc

SEQ ID NO: 25569 - DNA, 21 bp, Artificial Sequence
  primer
acagccctttcctcatacagc

SEQ ID NO: 25570 - DNA, 21 bp, Artificial Sequence
  primer
ggaagggagtagttggaatgc

SEQ ID NO: 25571 - DNA, 21 bp, Artificial Sequence
  primer
agaagagtgggtttgaagggc

SEQ ID NO: 25572 - DNA, 36 bp, Artificial Sequence
  primer
gtaaaacgacggccagtgcagcaggtaagacctggg

SEQ ID NO: 25573 - DNA, 37 bp, Artificial Sequence
  primer
gtaaaacgacggccagtcactcagcagataccagccc

SEQ ID NO: 25574 - DNA, 19 bp, Artificial Sequence
  primer
aatgtaggcgtgggaaacg

SEQ ID NO: 25575 - DNA, 38 bp, Artificial Sequence
  primer
gtaaaacgacggccagtctaatcctcagcctgattcgg

SEQ ID NO: 25576 - DNA, 38 bp, Artificial Sequence
  primer
gtaaaacgacggccagtcagcctctttgtcaacgtgag

SEQ ID NO: 25577 - DNA, 21 bp, Artificial Sequence
  primer
caagagtaagtccctggcgtg

SEQ ID NO: 25578 - DNA, 37 bp, Artificial Sequence
  primer
gtaaaacgacggccagtagagggtcagaccaccttgg

SEQ ID NO: 25579 - DNA, 21 bp, Artificial Sequence
  primer
ccctcctattggcttcttgtg

SEQ ID NO: 25580 - DNA, 20 bp, Artificial Sequence
  primer
agtgtttggcgttgagttgc

SEQ ID NO: 25581 - DNA, 38 bp, Artificial Sequence
  primer
gtaaaacgacggccagtagtttcaatttctgggcatcg

SEQ ID NO: 25582 - DNA, 38 bp, Artificial Sequence
  primer
gtaaaacgacggccagtattctggaggccaagactctg

SEQ ID NO: 25583 - DNA, 38 bp, Artificial Sequence
  primer
gtaaaacgacggccagttgcctacctgactgctctctg

SEQ ID NO: 25584 - DNA, 38 bp, Artificial Sequence
  primer
gtaaaacgacggccagtgggttctgtcctcacagttgg

SEQ ID NO: 25585 - DNA, 38 bp, Artificial Sequence
  primer
gtaaaacgacggccagtaagtggatccttcaggcagtg

SEQ ID NO: 25586 - DNA, 21 bp, Artificial Sequence
  primer
catgtttctaggctcagtcgc

SEQ ID NO: 25587 - DNA, 38 bp, Artificial Sequence
  primer
gtaaaacgacggccagtggagagctagcctcttcccag

SEQ ID NO: 25588 - DNA, 21 bp, Artificial Sequence
  primer
ggaaggagggattgcagtatg

SEQ ID NO: 25589 - DNA, 21 bp, Artificial Sequence
  primer
gaatctgagaacagggatggg

SEQ ID NO: 25590 - DNA, 21 bp, Artificial Sequence
  primer
ctcccaagaccaacagaattg

SEQ ID NO: 25591 - DNA, 37 bp, Artificial Sequence
  primer
gtaaaacgacggccagtactaagagagactcgcgccc

SEQ ID NO: 25592 - DNA, 43 bp, Artificial Sequence
  primer
gtaaaacgacggccagttcaatttcaagcacagtgtgttatac

SEQ ID NO: 25593 - DNA, 21 bp, Artificial Sequence
  primer
ttggaggacatggatgtatgg

SEQ ID NO: 25594 - DNA, 40 bp, Artificial Sequence
  primer
gtaaaacgacggccagtaagtgactgtgatccttcactgc

SEQ ID NO: 25595 - DNA, 21 bp, Artificial Sequence
  primer
cttctggcatgataaggctgg

SEQ ID NO: 25596 - DNA, 45 bp, Artificial Sequence
  primer
gtaaaacgacggccagttttatggaattataatggaagtacatgg

SEQ ID NO: 25597 - DNA, 21 bp, Artificial Sequence
  primer
ccaggctggtctcaaattaaa

SEQ ID NO: 25598 - DNA, 21 bp, Artificial Sequence
  primer
accctactgaacaccgaatcc

SEQ ID NO: 25599 - DNA, 21 bp, Artificial Sequence
  primer
gacctttccacagaggtgtcc

SEQ ID NO: 25600 - DNA, 38 bp, Artificial Sequence
  primer
gtaaaacgacggccagtccacacagatgtatggcttgg

SEQ ID NO: 25601 - DNA, 21 bp, Artificial Sequence
  primer
aaactggaagagggccaagtc

SEQ ID NO: 25602 - DNA, 21 bp, Artificial Sequence
  primer
taaggccaatctctgagggac

SEQ ID NO: 25603 - DNA, 21 bp, Artificial Sequence
  primer
cccttccaggtttctctccac

SEQ ID NO: 25604 - DNA, 21 bp, Artificial Sequence
  primer
agtcaggcataaaggtgagcc

SEQ ID NO: 25605 - DNA, 21 bp, Artificial Sequence
  primer
ctacaatggctcgctcacaac

SEQ ID NO: 25606 - DNA, 21 bp, Artificial Sequence
  primer
tcatccaaggtgattctgcac

SEQ ID NO: 25607 - DNA, 38 bp, Artificial Sequence
  primer
gtaaaacgacggccagtgatctgaagtcccactgaccc

SEQ ID NO: 25608 - DNA, 37 bp, Artificial Sequence
  primer
gtaaaacgacggccagtgtgtgaaacaccttgcccag

SEQ ID NO: 25609 - DNA, 18 bp, Artificial Sequence
  primer
ctaggtccacccgagccc

SEQ ID NO: 25610 - DNA, 38 bp, Artificial Sequence
  primer
gtaaaacgacggccagttccggaatgattgctcttctc

SEQ ID NO: 25611 - DNA, 22 bp, Artificial Sequence
  primer
ttaggcatgtgtttcatgtgtg

SEQ ID NO: 25612 - DNA, 42 bp, Artificial Sequence
  primer
gtaaaacgacggccagttgctgttataccaagtactgtgtgg

SEQ ID NO: 25613 - DNA, 38 bp, Artificial Sequence
  primer
gtaaaacgacggccagttgaagtggagaatttgggctc

SEQ ID NO: 25614 - DNA, 38 bp, Artificial Sequence
  primer
gtaaaacgacggccagttgtgtctgctgctctcctacc

SEQ ID NO: 25615 - DNA, 20 bp, Artificial Sequence
  primer
gcctcatgcctcagccttac

SEQ ID NO: 25616 - DNA, 38 bp, Artificial Sequence
  primer
gtaaaacgacggccagttgacctaataaggccatgcag

SEQ ID NO: 25617 - DNA, 22 bp, Artificial Sequence
  primer
gcccagtctgaaacctaagacc

SEQ ID NO: 25618 - DNA, 38 bp, Artificial Sequence
  primer
gtaaaacgacggccagttgtgaggagtccagtgtcctg

SEQ ID NO: 25619 - DNA, 37 bp, Artificial Sequence
  primer
gtaaaacgacggccagtgttgccaccaggtttcagag

SEQ ID NO: 25620 - DNA, 40 bp, Artificial Sequence
  primer
gtaaaacgacggccagtaaacactagttgcagatggatgg

SEQ ID NO: 25621 - DNA, 38 bp, Artificial Sequence
  primer
gtaaaacgacggccagtataaagtggtgagggcattgg

SEQ ID NO: 25622 - DNA, 21 bp, Artificial Sequence
  primer
ttgagttctgtgaggtggagg

SEQ ID NO: 25623 - DNA, 35 bp, Artificial Sequence
  primer
gtaaaacgacggccagtgtcgcggctccgctataa

SEQ ID NO: 25624 - DNA, 18 bp, Artificial Sequence
  primer
tgctgccaggaacactcc

SEQ ID NO: 25625 - DNA, 19 bp, Artificial Sequence
  primer
gcgagagtggagttcggag

SEQ ID NO: 25626 - DNA, 38 bp, Artificial Sequence
  primer
gtaaaacgacggccagtagagctcatgaaggttgggag

SEQ ID NO: 25627 - DNA, 20 bp, Artificial Sequence
  primer
cactttgccatggaggtgag

SEQ ID NO: 25628 - DNA, 38 bp, Artificial Sequence
  primer
gtaaaacgacggccagtcagatcgggagaatgaactgg

SEQ ID NO: 25629 - DNA, 21 bp, Artificial Sequence
  primer
ggattcctcccacaaaggaag

SEQ ID NO: 25630 - DNA, 38 bp, Artificial Sequence
  primer
gtaaaacgacggccagtcatcttcacgaccaccttgag

SEQ ID NO: 25631 - DNA, 38 bp, Artificial Sequence
  primer
gtaaaacgacggccagtcagacttgtgctcctgtttgc

SEQ ID NO: 25632 - DNA, 20 bp, Artificial Sequence
  primer
gtttcccgtgggtcagtttc

SEQ ID NO: 25633 - DNA, 38 bp, Artificial Sequence
  primer
gtaaaacgacggccagtcaatgcctcaggtaacaccac

SEQ ID NO: 25634 - DNA, 38 bp, Artificial Sequence
  primer
gtaaaacgacggccagtggacacataggtcagccattc

SEQ ID NO: 25635 - DNA, 42 bp, Artificial Sequence
  primer
gtaaaacgacggccagttgtatttacagtggagtgagcttcc

SEQ ID NO: 25636 - DNA, 38 bp, Artificial Sequence
  primer
gtaaaacgacggccagtgtgctgagacaagatggaagc

SEQ ID NO: 25637 - DNA, 38 bp, Artificial Sequence
  primer
gtaaaacgacggccagtttattgatcatttcgggccat

SEQ ID NO: 25638 - DNA, 40 bp, Artificial Sequence
  primer
gtaaaacgacggccagttcctgcttagaggtttctccatc

SEQ ID NO: 25639 - DNA, 37 bp, Artificial Sequence
  primer
gtaaaacgacggccagtccgtgtttcctaggctggtc

SEQ ID NO: 25640 - DNA, 37 bp, Artificial Sequence
  primer
gtaaaacgacggccagtagatttggcctttcacccac

SEQ ID NO: 25641 - DNA, 21 bp, Artificial Sequence
  primer
gtggctttactttgggtgagg

SEQ ID NO: 25642 - DNA, 38 bp, Artificial Sequence
  primer
gtaaaacgacggccagtctgaccttgtcagcaaacagc

SEQ ID NO: 25643 - DNA, 38 bp, Artificial Sequence
  primer
gtaaaacgacggccagtgaaacaaagccaggcatgata

SEQ ID NO: 25644 - DNA, 39 bp, Artificial Sequence
  primer
gtaaaacgacggccagtcaagtggtgaaggcgttcttac

SEQ ID NO: 25645 - DNA, 37 bp, Artificial Sequence
  primer
gtaaaacgacggccagttttagtgggtgcagcaaagg

SEQ ID NO: 25646 - DNA, 38 bp, Artificial Sequence
  primer
gtaaaacgacggccagtgcttctgctttctggaaggtg

SEQ ID NO: 25647 - DNA, 22 bp, Artificial Sequence
  primer
agagaagctacccagcctgtag

SEQ ID NO: 25648 - DNA, 38 bp, Artificial Sequence
  primer
gtaaaacgacggccagtcagacggagcacctttctttc

SEQ ID NO: 25649 - DNA, 38 bp, Artificial Sequence
  primer
gtaaaacgacggccagtatccgctagaaagctgagtgg

SEQ ID NO: 25650 - DNA, 38 bp, Artificial Sequence
  primer
gtaaaacgacggccagtctcaagagattggaacctggc

SEQ ID NO: 25651 - DNA, 37 bp, Artificial Sequence
  primer
gtaaaacgacggccagttgcacacaaccatgatcagc

SEQ ID NO: 25652 - DNA, 38 bp, Artificial Sequence
  primer
gtaaaacgacggccagtaaatacgatgcgggtatggtg

SEQ ID NO: 25653 - DNA, 21 bp, Artificial Sequence
  primer
cttcctcctgccctgaatctc

SEQ ID NO: 25654 - DNA, 38 bp, Artificial Sequence
  primer
gtaaaacgacggccagtgatgctgaagagaccattccc

SEQ ID NO: 25655 - DNA, 20 bp, Artificial Sequence
  primer
caacagagcgagaccctgac

SEQ ID NO: 25656 - DNA, 38 bp, Artificial Sequence
  primer
gtaaaacgacggccagtccagcatcctaatccttggag

SEQ ID NO: 25657 - DNA, 38 bp, Artificial Sequence
  primer
gtaaaacgacggccagtccatagctgcatctggttcac

SEQ ID NO: 25658 - DNA, 38 bp, Artificial Sequence
  primer
gtaaaacgacggccagtagagatgggtggagaagttgc

SEQ ID NO: 25659 - DNA, 38 bp, Artificial Sequence
  primer
gtaaaacgacggccagtacagaccctaagggaaggagg

SEQ ID NO: 25660 - DNA, 19 bp, Artificial Sequence
  primer
ctcacgcgtgctcacactc

SEQ ID NO: 25661 - DNA, 25 bp, Artificial Sequence
  primer
actctcttcatgatatcaagggttc

SEQ ID NO: 25662 - DNA, 21 bp, Artificial Sequence
  primer
tacaagaatttcagccaagcc

SEQ ID NO: 25663 - DNA, 40 bp, Artificial Sequence
  primer
gtaaaacgacggccagtttgtgatcctcttgtggtatgtg

SEQ ID NO: 25664 - DNA, 21 bp, Artificial Sequence
  primer
tcctaaccttgtgatccaccc

SEQ ID NO: 25665 - DNA, 22 bp, Artificial Sequence
  primer
gaaggtggaaggagatacccac

SEQ ID NO: 25666 - DNA, 22 bp, Artificial Sequence
  primer
gaagcatcatttggacagtttg

SEQ ID NO: 25667 - DNA, 23 bp, Artificial Sequence
  primer
ttgaaagggtcctctctaacgtc

SEQ ID NO: 25668 - DNA, 21 bp, Artificial Sequence
  primer
agactttggctccatctctgc

SEQ ID NO: 25669 - DNA, 21 bp, Artificial Sequence
  primer
tctgcccagtgaagaggattc

SEQ ID NO: 25670 - DNA, 38 bp, Artificial Sequence
  primer
gtaaaacgacggccagtgctggtaggattgctgtttgg

SEQ ID NO: 25671 - DNA, 37 bp, Artificial Sequence
  primer
gtaaaacgacggccagtctacagccgtccctgaacac

SEQ ID NO: 25672 - DNA, 36 bp, Artificial Sequence
  primer
gtaaaacgacggccagtaatggccacagtggtgagg

SEQ ID NO: 25673 - DNA, 21 bp, Artificial Sequence
  primer
ggctagagatggctctgggtc

SEQ ID NO: 25674 - DNA, 21 bp, Artificial Sequence
  primer
ggaatgggagaggtctatggg

SEQ ID NO: 25675 - DNA, 38 bp, Artificial Sequence
  primer
gtaaaacgacggccagttgagttaccttggcttctggg

SEQ ID NO: 25676 - DNA, 37 bp, Artificial Sequence
  primer
gtaaaacgacggccagtggaatacaggagctggaggg

SEQ ID NO: 25677 - DNA, 38 bp, Artificial Sequence
  primer
gtaaaacgacggccagttgagccaggtacagctttgtc

SEQ ID NO: 25678 - DNA, 38 bp, Artificial Sequence
  primer
gtaaaacgacggccagtgaggcaggtgttgaggaactc

SEQ ID NO: 25679 - DNA, 21 bp, Artificial Sequence
  primer
gaggcaggtgttgaggaactc

SEQ ID NO: 25680 - DNA, 40 bp, Artificial Sequence
  primer
gtaaaacgacggccagtgaaagtctgtcttccgttgatcc

SEQ ID NO: 25681 - DNA, 20 bp, Artificial Sequence
  primer
cttgcccactttgcttcttg

SEQ ID NO: 25682 - DNA, 39 bp, Artificial Sequence
  primer
gtaaaacgacggccagttggccttattcgagttcatttg

SEQ ID NO: 25683 - DNA, 21 bp, Artificial Sequence
  primer
tgtctttggcctgaaagtttg

SEQ ID NO: 25684 - DNA, 21 bp, Artificial Sequence
  primer
ggtgtggaatttaggattcgc

SEQ ID NO: 25685 - DNA, 21 bp, Artificial Sequence
  primer
acatgaaagagagtggcaggg

SEQ ID NO: 25686 - DNA, 18 bp, Artificial Sequence
  primer
gtggcagagagaaggccc

SEQ ID NO: 25687 - DNA, 18 bp, Artificial Sequence
  primer
cctgacttcagcgccatc

SEQ ID NO: 25688 - DNA, 38 bp, Artificial Sequence
  primer
gtaaaacgacggccagtacagagcccaagaccaagaag

SEQ ID NO: 25689 - DNA, 21 bp, Artificial Sequence
  primer
ttgcaagcacagcttgttagg

SEQ ID NO: 25690 - DNA, 41 bp, Artificial Sequence
  primer
gtaaaacgacggccagtaatcgtgacaaatggtatgtatgc

SEQ ID NO: 25691 - DNA, 40 bp, Artificial Sequence
  primer
gtaaaacgacggccagttcaagttccatttgtttcaccag

SEQ ID NO: 25692 - DNA, 38 bp, Artificial Sequence
  primer
gtaaaacgacggccagtaaagcaagccagcctaatacg

SEQ ID NO: 25693 - DNA, 38 bp, Artificial Sequence
  primer
gtaaaacgacggccagttatgcctgtgctttgagatgc

SEQ ID NO: 25694 - DNA, 38 bp, Artificial Sequence
  primer
gtaaaacgacggccagtgagtagtgtgggtgaggtccc

SEQ ID NO: 25695 - DNA, 37 bp, Artificial Sequence
  primer
gtaaaacgacggccagtagccaggacctcacttcctc

SEQ ID NO: 25696 - DNA, 35 bp, Artificial Sequence
  primer
gtaaaacgacggccagtcatccgtctggctgttcg

SEQ ID NO: 25697 - DNA, 38 bp, Artificial Sequence
  primer
gtaaaacgacggccagttcatctggtggtgtctatgcc

SEQ ID NO: 25698 - DNA, 20 bp, Artificial Sequence
  primer
cacctctcggaactttctgg

SEQ ID NO: 25699 - DNA, 21 bp, Artificial Sequence
  primer
ggttcatggtgaaggagatcg

SEQ ID NO: 25700 - DNA, 38 bp, Artificial Sequence
  primer
gtaaaacgacggccagttagggatccttcagaactggg

SEQ ID NO: 25701 - DNA, 21 bp, Artificial Sequence
  primer
agttggtagtgtgggtttggc

SEQ ID NO: 25702 - DNA, 38 bp, Artificial Sequence
  primer
gtaaaacgacggccagtgtcccacctaggaccacacag

SEQ ID NO: 25703 - DNA, 21 bp, Artificial Sequence
  primer
gagttccacttctcagtcccg

SEQ ID NO: 25704 - DNA, 38 bp, Artificial Sequence
  primer
gtaaaacgacggccagtaacaggagcctctgaaggttg

SEQ ID NO: 25705 - DNA, 21 bp, Artificial Sequence
  primer
cctacctcgagccaaatgttc

SEQ ID NO: 25706 - DNA, 38 bp, Artificial Sequence
  primer
gtaaaacgacggccagtaaggacattgtctgagcctcc

SEQ ID NO: 25707 - DNA, 36 bp, Artificial Sequence
  primer
gtaaaacgacggccagtgcgagggctcctgtctttc

SEQ ID NO: 25708 - DNA, 37 bp, Artificial Sequence
  primer
gtaaaacgacggccagtagcagatgatggtgaggagc

SEQ ID NO: 25709 - DNA, 38 bp, Artificial Sequence
  primer
gtaaaacgacggccagtgctgggtcttagctctggttc

SEQ ID NO: 25710 - DNA, 38 bp, Artificial Sequence
  primer
gtaaaacgacggccagttccagaaggtctgaggctagg

SEQ ID NO: 25711 - DNA, 18 bp, Artificial Sequence
  primer
aggccatatcctgcctgg

SEQ ID NO: 25712 - DNA, 38 bp, Artificial Sequence
  primer
gtaaaacgacggccagtgcccaagtaacactgggaatc

SEQ ID NO: 25713 - DNA, 21 bp, Artificial Sequence
  primer
tccacttcatgcaaacagacc

SEQ ID NO: 25714 - DNA, 38 bp, Artificial Sequence
  primer
gtaaaacgacggccagtctggtgacagcaggcagttag

SEQ ID NO: 25715 - DNA, 37 bp, Artificial Sequence
  primer
gtaaaacgacggccagtttgaatgagaactcagcgcc

SEQ ID NO: 25716 - DNA, 21 bp, Artificial Sequence
  primer
tagagctcagggaaggactgg

SEQ ID NO: 25717 - DNA, 40 bp, Artificial Sequence
  primer
gtaaaacgacggccagtgcagaattgtattcatctgtggg

SEQ ID NO: 25718 - DNA, 21 bp, Artificial Sequence
  primer
ttggttcctctgactgtagcc

SEQ ID NO: 25719 - DNA, 38 bp, Artificial Sequence
  primer
gtaaaacgacggccagtacactagactggctcaagggc

SEQ ID NO: 25720 - DNA, 20 bp, Artificial Sequence
  primer
ggaagttcaagtggctgtgc

SEQ ID NO: 25721 - DNA, 38 bp, Artificial Sequence
  primer
gtaaaacgacggccagttcctgatgttaactggcaagg

SEQ ID NO: 25722 - DNA, 21 bp, Artificial Sequence
  primer
tacccaggccagactgaagtg

SEQ ID NO: 25723 - DNA, 18 bp, Artificial Sequence
  primer
ccatggacatggcagctc

SEQ ID NO: 25724 - DNA, 22 bp, Artificial Sequence
  primer
gagggagattgatgtgtctgtg

SEQ ID NO: 25725 - DNA, 22 bp, Artificial Sequence
  primer
gatacagaccaaatgctggctc

SEQ ID NO: 25726 - DNA, 38 bp, Artificial Sequence
  primer
gtaaaacgacggccagtccacaacgtggtatcatgtcc

SEQ ID NO: 25727 - DNA, 21 bp, Artificial Sequence
  primer
tctcccaagtcttgtcccaac

SEQ ID NO: 25728 - DNA, 37 bp, Artificial Sequence
  primer
gtaaaacgacggccagtggccaagtgcaacttctgag

SEQ ID NO: 25729 - DNA, 38 bp, Artificial Sequence
  primer
gtaaaacgacggccagtgtggtgtaaagcatctggcac

SEQ ID NO: 25730 - DNA, 26 bp, Artificial Sequence
  primer
aaacactgatgtatgaaggaggaatc

SEQ ID NO: 25731 - DNA, 37 bp, Artificial Sequence
  primer
gtaaaacgacggccagttcagttgtctctgctcaggc

SEQ ID NO: 25732 - DNA, 38 bp, Artificial Sequence
  primer
gtaaaacgacggccagttggaccctatgggtctctgtc

SEQ ID NO: 25733 - DNA, 36 bp, Artificial Sequence
  primer
gtaaaacgacggccagtaggagactgagcctcgcag

SEQ ID NO: 25734 - DNA, 38 bp, Artificial Sequence
  primer
gtaaaacgacggccagttagagtggtggtttctctggg

SEQ ID NO: 25735 - DNA, 21 bp, Artificial Sequence
  primer
gtgcgtttctatggaggaatg

SEQ ID NO: 25736 - DNA, 38 bp, Artificial Sequence
  primer
gtaaaacgacggccagttgctctgtaccagactgaggg

SEQ ID NO: 25737 - DNA, 36 bp, Artificial Sequence
  primer
gtaaaacgacggccagtgagtggcagagttgggctc

SEQ ID NO: 25738 - DNA, 38 bp, Artificial Sequence
  primer
gtaaaacgacggccagtaacttgcaaataggtcggcag

SEQ ID NO: 25739 - DNA, 37 bp, Artificial Sequence
  primer
gtaaaacgacggccagtccatttccagtgtggctgac

SEQ ID NO: 25740 - DNA, 37 bp, Artificial Sequence
  primer
gtaaaacgacggccagtgaagggcattcacccttacc

SEQ ID NO: 25741 - DNA, 20 bp, Artificial Sequence
  primer
gactcaccataggaaggccc

SEQ ID NO: 25742 - DNA, 18 bp, Artificial Sequence
  primer
aaggcgcctccgttactg

SEQ ID NO: 25743 - DNA, 21 bp, Artificial Sequence
  primer
gagctgtggaatcgatgtctg

SEQ ID NO: 25744 - DNA, 38 bp, Artificial Sequence
  primer
gtaaaacgacggccagtgtctgtcatttgctgccactc

SEQ ID NO: 25745 - DNA, 21 bp, Artificial Sequence
  primer
gaggaacaaacaggcatcctc

SEQ ID NO: 25746 - DNA, 38 bp, Artificial Sequence
  primer
gtaaaacgacggccagtacagatgtcaggtgggagagg

SEQ ID NO: 25747 - DNA, 38 bp, Artificial Sequence
  primer
gtaaaacgacggccagtatgaccaccgatgtctcacac

SEQ ID NO: 25748 - DNA, 38 bp, Artificial Sequence
  primer
gtaaaacgacggccagtaaggataaagagagcccacgg

SEQ ID NO: 25749 - DNA, 21 bp, Artificial Sequence
  primer
ggctattcagcagagtctggg

SEQ ID NO: 25750 - DNA, 35 bp, Artificial Sequence
  primer
gtaaaacgacggccagtcctgtgggacagcactgg

SEQ ID NO: 25751 - DNA, 38 bp, Artificial Sequence
  primer
gtaaaacgacggccagtataggacctgacacagatgcg

SEQ ID NO: 25752 - DNA, 21 bp, Artificial Sequence
  primer
ctacacagcataaaggcccag

SEQ ID NO: 25753 - DNA, 20 bp, Artificial Sequence
  primer
tgtgggtgaggatggcatag

SEQ ID NO: 25754 - DNA, 38 bp, Artificial Sequence
  primer
gtaaaacgacggccagtcaacagtgcttgcttagcctc

SEQ ID NO: 25755 - DNA, 38 bp, Artificial Sequence
  primer
gtaaaacgacggccagtaatgttcaggattcagccagc

SEQ ID NO: 25756 - DNA, 21 bp, Artificial Sequence
  primer
ttgtctggtccttccttcctg

SEQ ID NO: 25757 - DNA, 20 bp, Artificial Sequence
  primer
gtgggagcgtgcaaatactg

SEQ ID NO: 25758 - DNA, 21 bp, Artificial Sequence
  primer
ttcatcggtgtgactgtgttg

SEQ ID NO: 25759 - DNA, 38 bp, Artificial Sequence
  primer
gtaaaacgacggccagtgaaagtggacctgaatgtggg

SEQ ID NO: 25760 - DNA, 38 bp, Artificial Sequence
  primer
gtaaaacgacggccagttgagctaagtgccctaaagcc

SEQ ID NO: 25761 - DNA, 39 bp, Artificial Sequence
  primer
gtaaaacgacggccagttcatggctttgggagttgtaag

SEQ ID NO: 25762 - DNA, 38 bp, Artificial Sequence
  primer
gtaaaacgacggccagtagatcaccctctgggaaagag

SEQ ID NO: 25763 - DNA, 38 bp, Artificial Sequence
  primer
gtaaaacgacggccagtcactcactggctggtggatag

SEQ ID NO: 25764 - DNA, 35 bp, Artificial Sequence
  primer
gtaaaacgacggccagttccgaccgcctctaggac

SEQ ID NO: 25765 - DNA, 21 bp, Artificial Sequence
  primer
tcctcaacaacatctccctgg

SEQ ID NO: 25766 - DNA, 38 bp, Artificial Sequence
  primer
gtaaaacgacggccagtaacaggaacctctcaaggcag

SEQ ID NO: 25767 - DNA, 21 bp, Artificial Sequence
  primer
ccctggagtttctggaagatg

SEQ ID NO: 25768 - DNA, 38 bp, Artificial Sequence
  primer
gtaaaacgacggccagtgtctgtagctctggaagcagc

SEQ ID NO: 25769 - DNA, 37 bp, Artificial Sequence
  primer
gtaaaacgacggccagtgctgacattgttcccgagag

SEQ ID NO: 25770 - DNA, 21 bp, Artificial Sequence
  primer
ggcttgatctgagttgttccc

SEQ ID NO: 25771 - DNA, 21 bp, Artificial Sequence
  primer
ggagagaaccatggcctagag

SEQ ID NO: 25772 - DNA, 38 bp, Artificial Sequence
  primer
gtaaaacgacggccagtgagaaatccatcgtacccagc

SEQ ID NO: 25773 - DNA, 37 bp, Artificial Sequence
  primer
gtaaaacgacggccagtccaaagctacatcgctccag

SEQ ID NO: 25774 - DNA, 19 bp, Artificial Sequence
  primer
ggtcatgacatcgagccag

SEQ ID NO: 25775 - DNA, 37 bp, Artificial Sequence
  primer
gtaaaacgacggccagtcagagactgggacggaagtc

SEQ ID NO: 25776 - DNA, 38 bp, Artificial Sequence
  primer
gtaaaacgacggccagtactcctgctgacccattcttg

SEQ ID NO: 25777 - DNA, 20 bp, Artificial Sequence
  primer
aaccagctgctgaaggtgtg

SEQ ID NO: 25778 - DNA, 38 bp, Artificial Sequence
  primer
gtaaaacgacggccagtacagcccaataactggctcac

SEQ ID NO: 25779 - DNA, 38 bp, Artificial Sequence
  primer
gtaaaacgacggccagtggagaaggagctcaactttgg

SEQ ID NO: 25780 - DNA, 38 bp, Artificial Sequence
  primer
gtaaaacgacggccagtcgcagattagaacactctcgc

SEQ ID NO: 25781 - DNA, 20 bp, Artificial Sequence
  primer
ggaccaatttgatgcctgtg

SEQ ID NO: 25782 - DNA, 38 bp, Artificial Sequence
  primer
gtaaaacgacggccagtagtactcccaggctctcatcg

SEQ ID NO: 25783 - DNA, 38 bp, Artificial Sequence
  primer
gtaaaacgacggccagtaagacaggagcagctggtgag

SEQ ID NO: 25784 - DNA, 38 bp, Artificial Sequence
  primer
gtaaaacgacggccagtttacccaggccagtgagtagg

SEQ ID NO: 25785 - DNA, 38 bp, Artificial Sequence
  primer
gtaaaacgacggccagtcagaaggagggatgattggac

SEQ ID NO: 25786 - DNA, 38 bp, Artificial Sequence
  primer
gtaaaacgacggccagtggaaatacagatgacccaggc

SEQ ID NO: 25787 - DNA, 37 bp, Artificial Sequence
  primer
gtaaaacgacggccagtagacttcgtggagctgatgg

SEQ ID NO: 25788 - DNA, 38 bp, Artificial Sequence
  primer
gtaaaacgacggccagttatcagatccagaggatgccc

SEQ ID NO: 25789 - DNA, 21 bp, Artificial Sequence
  primer
caaggacagttctctggaccc

SEQ ID NO: 25790 - DNA, 38 bp, Artificial Sequence
  primer
gtaaaacgacggccagtctctgagccctgttatccctc

SEQ ID NO: 25791 - DNA, 36 bp, Artificial Sequence
  primer
gtaaaacgacggccagtagcttgctcctcctgggtc

SEQ ID NO: 25792 - DNA, 38 bp, Artificial Sequence
  primer
gtaaaacgacggccagtgagctagacggtgagtggctc

SEQ ID NO: 25793 - DNA, 38 bp, Artificial Sequence
  primer
gtaaaacgacggccagtacgggtgtttcttcctaggtg

SEQ ID NO: 25794 - DNA, 18 bp, Artificial Sequence
  primer
ccgaaattgcgtcactgc

SEQ ID NO: 25795 - DNA, 22 bp, Artificial Sequence
  primer
ccgtagactttgacggtgagtc

SEQ ID NO: 25796 - DNA, 21 bp, Artificial Sequence
  primer
acagctctaagacaccgggac

SEQ ID NO: 25797 - DNA, 21 bp, Artificial Sequence
  primer
tgggagagagacatcgagagg

SEQ ID NO: 25798 - DNA, 24 bp, Artificial Sequence
  primer
tctagttggagcctcattgatagc

SEQ ID NO: 25799 - DNA, 38 bp, Artificial Sequence
  primer
gtaaaacgacggccagtcttatagggcagggagaaggg

SEQ ID NO: 25800 - DNA, 38 bp, Artificial Sequence
  primer
gtaaaacgacggccagttgacccacagtaagcgatagg

SEQ ID NO: 25801 - DNA, 21 bp, Artificial Sequence
  primer
ttgccacagagatctgattcc

SEQ ID NO: 25802 - DNA, 37 bp, Artificial Sequence
  primer
gtaaaacgacggccagtcagaatacggcacccttgtg

SEQ ID NO: 25803 - DNA, 38 bp, Artificial Sequence
  primer
gtaaaacgacggccagtaagactccatcccaggacctc

SEQ ID NO: 25804 - DNA, 38 bp, Artificial Sequence
  primer
gtaaaacgacggccagtgttggtcaaggactctctggg

SEQ ID NO: 25805 - DNA, 38 bp, Artificial Sequence
  primer
gtaaaacgacggccagtcttgcctgtcctaagcctctg

SEQ ID NO: 25806 - DNA, 21 bp, Artificial Sequence
  primer
cctgggtgacagagtctcaaa

SEQ ID NO: 25807 - DNA, 21 bp, Artificial Sequence
  primer
acatcaaccagtttgcagcag

SEQ ID NO: 25808 - DNA, 37 bp, Artificial Sequence
  primer
gtaaaacgacggccagttttggtggtggtgggtagag

SEQ ID NO: 25809 - DNA, 21 bp, Artificial Sequence
  primer
aaaccacccagtttccatcag

SEQ ID NO: 25810 - DNA, 21 bp, Artificial Sequence
  primer
ctgctgaagatgtcatggtgg

SEQ ID NO: 25811 - DNA, 21 bp, Artificial Sequence
  primer
acgatgtgcctgtgactgaag

SEQ ID NO: 25812 - DNA, 21 bp, Artificial Sequence
  primer
tacctgcacaactcctggatg

SEQ ID NO: 25813 - DNA, 41 bp, Artificial Sequence
  primer
gtaaaacgacggccagtgagccactacatccctattattgc

SEQ ID NO: 25814 - DNA, 38 bp, Artificial Sequence
  primer
gtaaaacgacggccagtaaacacgattatgcagccctc

SEQ ID NO: 25815 - DNA, 38 bp, Artificial Sequence
  primer
gtaaaacgacggccagtcaatggcaacaagtgaacgag

SEQ ID NO: 25816 - DNA, 21 bp, Artificial Sequence
  primer
aggctcaaatgttcaggaagc

SEQ ID NO: 25817 - DNA, 38 bp, Artificial Sequence
  primer
gtaaaacgacggccagtggagggtagaccttgcatttc

SEQ ID NO: 25818 - DNA, 38 bp, Artificial Sequence
  primer
gtaaaacgacggccagtagacttctcctgagacccgag

SEQ ID NO: 25819 - DNA, 22 bp, Artificial Sequence
  primer
ccagaaagtgtaggcacagtgg

SEQ ID NO: 25820 - DNA, 21 bp, Artificial Sequence
  primer
aaggtggaactgctttatggc

SEQ ID NO: 25821 - DNA, 42 bp, Artificial Sequence
  primer
gtaaaacgacggccagtaatgaaagaaggtaatggtgcatac

SEQ ID NO: 25822 - DNA, 23 bp, Artificial Sequence
  primer
ttgcatgaagaaataattacgcc

SEQ ID NO: 25823 - DNA, 37 bp, Artificial Sequence
  primer
gtaaaacgacggccagtgagttgaatgtactgccggg

SEQ ID NO: 25824 - DNA, 21 bp, Artificial Sequence
  primer
gtagcgtgcagacctaccctc

SEQ ID NO: 25825 - DNA, 38 bp, Artificial Sequence
  primer
gtaaaacgacggccagtcctgttgcttagaggaggtgg

SEQ ID NO: 25826 - DNA, 38 bp, Artificial Sequence
  primer
gtaaaacgacggccagtaactgccctttgtggattcag

SEQ ID NO: 25827 - DNA, 21 bp, Artificial Sequence
  primer
ttcttccacgttgttccactg

SEQ ID NO: 25828 - DNA, 20 bp, Artificial Sequence
  primer
ccacttcacctggcctgtag

SEQ ID NO: 25829 - DNA, 22 bp, Artificial Sequence
  primer
tggacagacctctagacatccc

SEQ ID NO: 25830 - DNA, 21 bp, Artificial Sequence
  primer
gacttgagcaataatgctggc

SEQ ID NO: 25831 - DNA, 21 bp, Artificial Sequence
  primer
tctgggccttcatagtttcac

SEQ ID NO: 25832 - DNA, 21 bp, Artificial Sequence
  primer
ccctacaccagcaagactcag

SEQ ID NO: 25833 - DNA, 35 bp, Artificial Sequence
  primer
gtaaaacgacggccagtcgtctccgcagtcgtagc

SEQ ID NO: 25834 - DNA, 38 bp, Artificial Sequence
  primer
gtaaaacgacggccagtgggcttgagatctttccactg

SEQ ID NO: 25835 - DNA, 21 bp, Artificial Sequence
  primer
atttctaggtgggctggttcc

SEQ ID NO: 25836 - DNA, 38 bp, Artificial Sequence
  primer
gtaaaacgacggccagtacccaaccaatacaggacagc

SEQ ID NO: 25837 - DNA, 21 bp, Artificial Sequence
  primer
ctgctttgtctgggagagacc

SEQ ID NO: 25838 - DNA, 41 bp, Artificial Sequence
  primer
gtaaaacgacggccagtgagtcactggtccctatttctcag

SEQ ID NO: 25839 - DNA, 37 bp, Artificial Sequence
  primer
gtaaaacgacggccagtcacaagagaaccgagcttcc

SEQ ID NO: 25840 - DNA, 22 bp, Artificial Sequence
  primer
gaagtcctgactcctcctgttg

SEQ ID NO: 25841 - DNA, 38 bp, Artificial Sequence
  primer
gtaaaacgacggccagtgagctgtcaccatcagtcagc

SEQ ID NO: 25842 - DNA, 21 bp, Artificial Sequence
  primer
tgagaacagttgccgtgagag

SEQ ID NO: 25843 - DNA, 37 bp, Artificial Sequence
  primer
gtaaaacgacggccagtcagaggcttgctggagagac

SEQ ID NO: 25844 - DNA, 38 bp, Artificial Sequence
  primer
gtaaaacgacggccagtaaggaaagtcagagccacctg

SEQ ID NO: 25845 - DNA, 38 bp, Artificial Sequence
  primer
gtaaaacgacggccagtgttgagttcttgcaaggttgg

SEQ ID NO: 25846 - DNA, 38 bp, Artificial Sequence
  primer
gtaaaacgacggccagtaagtgagcctcgtgtttcgag

SEQ ID NO: 25847 - DNA, 38 bp, Artificial Sequence
  primer
gtaaaacgacggccagtctgggtaccactcagggtttc

SEQ ID NO: 25848 - DNA, 38 bp, Artificial Sequence
  primer
gtaaaacgacggccagttgttaaagacctcctgggctc

SEQ ID NO: 25849 - DNA, 38 bp, Artificial Sequence
  primer
gtaaaacgacggccagtggctcaagggagggtactgag

SEQ ID NO: 25850 - DNA, 38 bp, Artificial Sequence
  primer
gtaaaacgacggccagttcagcaacagggtcagaagtg

SEQ ID NO: 25851 - DNA, 21 bp, Artificial Sequence
  primer
agcagattacacagggccttc

SEQ ID NO: 25852 - DNA, 20 bp, Artificial Sequence
  primer
gaccagtgagatgcgaaagc

SEQ ID NO: 25853 - DNA, 35 bp, Artificial Sequence
  primer
gtaaaacgacggccagtaaacaggcccgctaccac

SEQ ID NO: 25854 - DNA, 21 bp, Artificial Sequence
  primer
ccagcccaaattgtactcttg

SEQ ID NO: 25855 - DNA, 20 bp, Artificial Sequence
  primer
ccctggcagaggatattgac

SEQ ID NO: 25856 - DNA, 38 bp, Artificial Sequence
  primer
gtaaaacgacggccagtagaaatgtcagccgcttcttg

SEQ ID NO: 25857 - DNA, 38 bp, Artificial Sequence
  primer
gtaaaacgacggccagttttgttgtgtaggaggccttg

SEQ ID NO: 25858 - DNA, 38 bp, Artificial Sequence
  primer
gtaaaacgacggccagtctgggtagaaactctgctccc

SEQ ID NO: 25859 - DNA, 38 bp, Artificial Sequence
  primer
gtaaaacgacggccagtgagaggctagagagtgggtgg

SEQ ID NO: 25860 - DNA, 38 bp, Artificial Sequence
  primer
gtaaaacgacggccagtcttctaggcctgggagggtag

SEQ ID NO: 25861 - DNA, 21 bp, Artificial Sequence
  primer
aatgccaggattgagtccaac

SEQ ID NO: 25862 - DNA, 21 bp, Artificial Sequence
  primer
gtggaccactcttcctttccc

SEQ ID NO: 25863 - DNA, 37 bp, Artificial Sequence
  primer
gtaaaacgacggccagtctccaccttcctcatcaccc

SEQ ID NO: 25864 - DNA, 21 bp, Artificial Sequence
  primer
gagaaccgcgacgagttagac

SEQ ID NO: 25865 - DNA, 37 bp, Artificial Sequence
  primer
gtaaaacgacggccagtggagaacagccatgaagctg

SEQ ID NO: 25866 - DNA, 38 bp, Artificial Sequence
  primer
gtaaaacgacggccagtgatgtcgaacagcctttaccg

SEQ ID NO: 25867 - DNA, 38 bp, Artificial Sequence
  primer
gtaaaacgacggccagtgttggttggcttcatgtaggg

SEQ ID NO: 25868 - DNA, 21 bp, Artificial Sequence
  primer
cagagctgtaagggcctcatc

SEQ ID NO: 25869 - DNA, 38 bp, Artificial Sequence
  primer
gtaaaacgacggccagtgaggagcctggttcacagaag

SEQ ID NO: 25870 - DNA, 21 bp, Artificial Sequence
  primer
aattcccttctctcagctccc

SEQ ID NO: 25871 - DNA, 20 bp, Artificial Sequence
  primer
tctttgggtctgtctgtccg

SEQ ID NO: 25872 - DNA, 37 bp, Artificial Sequence
  primer
gtaaaacgacggccagtcatcatgacctcgctgtgtg

SEQ ID NO: 25873 - DNA, 38 bp, Artificial Sequence
  primer
gtaaaacgacggccagtgctttcagagttcttcctggg

SEQ ID NO: 25874 - DNA, 37 bp, Artificial Sequence
  primer
gtaaaacgacggccagtccacaaggtcattccagcag

SEQ ID NO: 25875 - DNA, 20 bp, Artificial Sequence
  primer
ccaatccaccaggacagatg

SEQ ID NO: 25876 - DNA, 20 bp, Artificial Sequence
  primer
aatgccttctgggtaccacc

SEQ ID NO: 25877 - DNA, 35 bp, Artificial Sequence
  primer
gtaaaacgacggccagtagggaggtggagtgtggg

SEQ ID NO: 25878 - DNA, 21 bp, Artificial Sequence
  primer
agccagcctaactctcaggtg

SEQ ID NO: 25879 - DNA, 37 bp, Artificial Sequence
  primer
gtaaaacgacggccagtgcttcttctccatgcaccac

SEQ ID NO: 25880 - DNA, 35 bp, Artificial Sequence
  primer
gtaaaacgacggccagtacaccgcagtcaccgaag

SEQ ID NO: 25881 - DNA, 19 bp, Artificial Sequence
  primer
tcctgtgtgtgcatctgcc

SEQ ID NO: 25882 - DNA, 20 bp, Artificial Sequence
  primer
ccaatcccgtgtctcctttg

SEQ ID NO: 25883 - DNA, 37 bp, Artificial Sequence
  primer
gtaaaacgacggccagtcctctcttcctcccaatccc

SEQ ID NO: 25884 - DNA, 18 bp, Artificial Sequence
  primer
aggatggagaggcgggtc

SEQ ID NO: 25885 - DNA, 36 bp, Artificial Sequence
  primer
gtaaaacgacggccagtcaccatggctactaccggg

SEQ ID NO: 25886 - DNA, 36 bp, Artificial Sequence
  primer
gtaaaacgacggccagtctccggacccagttgtctc

SEQ ID NO: 25887 - DNA, 37 bp, Artificial Sequence
  primer
gtaaaacgacggccagtgtcctcaccaaccgtctctg

SEQ ID NO: 25888 - DNA, 38 bp, Artificial Sequence
  primer
gtaaaacgacggccagttgggaggagtgtgtcctcttc

SEQ ID NO: 25889 - DNA, 38 bp, Artificial Sequence
  primer
gtaaaacgacggccagtcctgctaggttcctgctgttc

SEQ ID NO: 25890 - DNA, 38 bp, Artificial Sequence
  primer
gtaaaacgacggccagtagggagagtttctgttggtgg

SEQ ID NO: 25891 - DNA, 38 bp, Artificial Sequence
  primer
gtaaaacgacggccagtttctgagaaggaggcctgttg

SEQ ID NO: 25892 - DNA, 20 bp, Artificial Sequence
  primer
gtctcctgtcccaggctttc

SEQ ID NO: 25893 - DNA, 37 bp, Artificial Sequence
  primer
gtaaaacgacggccagtaaagagctgagaaggcaggg

SEQ ID NO: 25894 - DNA, 21 bp, Artificial Sequence
  primer
ctcaggagaggtcactggtcc

SEQ ID NO: 25895 - DNA, 38 bp, Artificial Sequence
  primer
gtaaaacgacggccagtctcagctgtgaagtggaggtc

SEQ ID NO: 25896 - DNA, 38 bp, Artificial Sequence
  primer
gtaaaacgacggccagtgagcataggaccataggccag

SEQ ID NO: 25897 - DNA, 21 bp, Artificial Sequence
  primer
gaagcaggatggttccttacg

SEQ ID NO: 25898 - DNA, 38 bp, Artificial Sequence
  primer
gtaaaacgacggccagtgccttaagtgtggctgcagag

SEQ ID NO: 25899 - DNA, 38 bp, Artificial Sequence
  primer
gtaaaacgacggccagttcctgttcattgtggtcttcg

SEQ ID NO: 25900 - DNA, 20 bp, Artificial Sequence
  primer
ctggatgtgcatgtgtggac

SEQ ID NO: 25901 - DNA, 37 bp, Artificial Sequence
  primer
gtaaaacgacggccagtgtaggtgccaagggaaggag

SEQ ID NO: 25902 - DNA, 21 bp, Artificial Sequence
  primer
acagctcctgtggaacaggtc

SEQ ID NO: 25903 - DNA, 38 bp, Artificial Sequence
  primer
gtaaaacgacggccagtccattactccattgctgtgtg

SEQ ID NO: 25904 - DNA, 37 bp, Artificial Sequence
  primer
gtaaaacgacggccagtctgtacagcgagatggaccc

SEQ ID NO: 25905 - DNA, 19 bp, Artificial Sequence
  primer
accgcgacaaggacaagac

SEQ ID NO: 25906 - DNA, 18 bp, Artificial Sequence
  primer
accaggatccgagcaagg

SEQ ID NO: 25907 - DNA, 20 bp, Artificial Sequence
  primer
ctgggctcaagtgatcctcc

SEQ ID NO: 25908 - DNA, 38 bp, Artificial Sequence
  primer
gtaaaacgacggccagtacggtcatgtacgtgaagcac

SEQ ID NO: 25909 - DNA, 21 bp, Artificial Sequence
  primer
attagcaaagcgaagctctgg

SEQ ID NO: 25910 - DNA, 38 bp, Artificial Sequence
  primer
gtaaaacgacggccagtgaccaaaggtctggagacagg

SEQ ID NO: 25911 - DNA, 21 bp, Artificial Sequence
  primer
aggcataagccaccatgtctg

SEQ ID NO: 25912 - DNA, 37 bp, Artificial Sequence
  primer
gtaaaacgacggccagtaagagtcatggtggcctgtg

SEQ ID NO: 25913 - DNA, 35 bp, Artificial Sequence
  primer
gtaaaacgacggccagtcccgtgaccctacccttc

SEQ ID NO: 25914 - DNA, 38 bp, Artificial Sequence
  primer
gtaaaacgacggccagttgttggagaggccattctttc

SEQ ID NO: 25915 - DNA, 37 bp, Artificial Sequence
  primer
gtaaaacgacggccagtcttcctccctctatccctgg

SEQ ID NO: 25916 - DNA, 37 bp, Artificial Sequence
  primer
gtaaaacgacggccagtctgggctgcttcaatttgtc

SEQ ID NO: 25917 - DNA, 39 bp, Artificial Sequence
  primer
gtaaaacgacggccagtctttgcttggtcatagtggtcc

SEQ ID NO: 25918 - DNA, 21 bp, Artificial Sequence
  primer
tcagggtctatcaccctcacc

SEQ ID NO: 25919 - DNA, 38 bp, Artificial Sequence
  primer
gtaaaacgacggccagtccgattgctgcttagactgtg

SEQ ID NO: 25920 - DNA, 21 bp, Artificial Sequence
  primer
gtgggatggagcttgagtagg

SEQ ID NO: 25921 - DNA, 20 bp, Artificial Sequence
  primer
gtagctacggagagggcgtc

SEQ ID NO: 25922 - DNA, 38 bp, Artificial Sequence
  primer
gtaaaacgacggccagtgtgtgagctgtctgtgggaag

SEQ ID NO: 25923 - DNA, 21 bp, Artificial Sequence
  primer
tgagagcttcacacacactgg

SEQ ID NO: 25924 - DNA, 38 bp, Artificial Sequence
  primer
gtaaaacgacggccagtggctttgaatccgacactttg

SEQ ID NO: 25925 - DNA, 21 bp, Artificial Sequence
  primer
ccatcattgcgtagtcttggg

SEQ ID NO: 25926 - DNA, 38 bp, Artificial Sequence
  primer
gtaaaacgacggccagttctccgcctacaccattcatc

SEQ ID NO: 25927 - DNA, 38 bp, Artificial Sequence
  primer
gtaaaacgacggccagtatttccaggagtctttgtggg

SEQ ID NO: 25928 - DNA, 38 bp, Artificial Sequence
  primer
gtaaaacgacggccagtcacatggtcagagcaggtcac

SEQ ID NO: 25929 - DNA, 38 bp, Artificial Sequence
  primer
gtaaaacgacggccagtgagatggatttgggtgagacc

SEQ ID NO: 25930 - DNA, 38 bp, Artificial Sequence
  primer
gtaaaacgacggccagtctgactgtgagaccaggatgg

SEQ ID NO: 25931 - DNA, 38 bp, Artificial Sequence
  primer
gtaaaacgacggccagtcacctgaattctgtcctgctg

SEQ ID NO: 25932 - DNA, 21 bp, Artificial Sequence
  primer
tctccttccctgactgtggtc

SEQ ID NO: 25933 - DNA, 38 bp, Artificial Sequence
  primer
gtaaaacgacggccagtcttgctgtcaacatctggtgc

SEQ ID NO: 25934 - DNA, 38 bp, Artificial Sequence
  primer
gtaaaacgacggccagtgaagaagaaacgctgcagacc

SEQ ID NO: 25935 - DNA, 38 bp, Artificial Sequence
  primer
gtaaaacgacggccagtgtccagagagtgtcggaagtg

SEQ ID NO: 25936 - DNA, 21 bp, Artificial Sequence
  primer
tctgtgtttactctggcacgc

SEQ ID NO: 25937 - DNA, 20 bp, Artificial Sequence
  primer
gggcagcattatcttccacc

SEQ ID NO: 25938 - DNA, 21 bp, Artificial Sequence
  primer
tgtatccagaggtcagagccc

SEQ ID NO: 25939 - DNA, 38 bp, Artificial Sequence
  primer
gtaaaacgacggccagtgttgctggaagattgcatgag

SEQ ID NO: 25940 - DNA, 21 bp, Artificial Sequence
  primer
ccatcaacctcatcctgtcac

SEQ ID NO: 25941 - DNA, 37 bp, Artificial Sequence
  primer
gtaaaacgacggccagtgctgtttggcctctgatttg

SEQ ID NO: 25942 - DNA, 22 bp, Artificial Sequence
  primer
ttctccctgcaaagcaattaag

SEQ ID NO: 25943 - DNA, 38 bp, Artificial Sequence
  primer
gtaaaacgacggccagtgcgtgttgcaaactactgctc

SEQ ID NO: 25944 - DNA, 21 bp, Artificial Sequence
  primer
aatttccctgggactgttgac

SEQ ID NO: 25945 - DNA, 21 bp, Artificial Sequence
  primer
tctagcaaggccagatcagtg

SEQ ID NO: 25946 - DNA, 38 bp, Artificial Sequence
  primer
gtaaaacgacggccagtgtatttcctttccctgcctcc

SEQ ID NO: 25947 - DNA, 37 bp, Artificial Sequence
  primer
gtaaaacgacggccagtctctgagaacctgcagtggg

SEQ ID NO: 25948 - DNA, 38 bp, Artificial Sequence
  primer
gtaaaacgacggccagtggagggaaagaagtgaaaggg

SEQ ID NO: 25949 - DNA, 38 bp, Artificial Sequence
  primer
gtaaaacgacggccagtctctgctgaggagctctaccc

SEQ ID NO: 25950 - DNA, 21 bp, Artificial Sequence
  primer
gttccctcctacactgttccc

SEQ ID NO: 25951 - DNA, 38 bp, Artificial Sequence
  primer
gtaaaacgacggccagtacttcaaggctactgcaagcc

SEQ ID NO: 25952 - DNA, 38 bp, Artificial Sequence
  primer
gtaaaacgacggccagttcatgtctgccagtaggaagg

SEQ ID NO: 25953 - DNA, 21 bp, Artificial Sequence
  primer
aagaggtcacttcaggccaac

SEQ ID NO: 25954 - DNA, 21 bp, Artificial Sequence
  primer
gcctcaggatgtctgtgtgtg

SEQ ID NO: 25955 - DNA, 38 bp, Artificial Sequence
  primer
gtaaaacgacggccagtccgtctttgtccttcctgttc

SEQ ID NO: 25956 - DNA, 22 bp, Artificial Sequence
  primer
caggagtagagagtggtcccag

SEQ ID NO: 25957 - DNA, 20 bp, Artificial Sequence
  primer
ccctgctacctcctggaaag

SEQ ID NO: 25958 - DNA, 37 bp, Artificial Sequence
  primer
gtaaaacgacggccagtttctgtgcgtgtgagtcagg

SEQ ID NO: 25959 - DNA, 20 bp, Artificial Sequence
  primer
cacccagcattcaaggtcac

SEQ ID NO: 25960 - DNA, 36 bp, Artificial Sequence
  primer
gtaaaacgacggccagtgatccctggagcagtggtg

SEQ ID NO: 25961 - DNA, 21 bp, Artificial Sequence
  primer
tcacatcccacacttctctgc

SEQ ID NO: 25962 - DNA, 38 bp, Artificial Sequence
  primer
gtaaaacgacggccagttcaaggaaggtcttgctgagg

SEQ ID NO: 25963 - DNA, 22 bp, Artificial Sequence
  primer
caggttatccaggtttgagctg

SEQ ID NO: 25964 - DNA, 38 bp, Artificial Sequence
  primer
gtaaaacgacggccagtccaagacctagaataccgggc

SEQ ID NO: 25965 - DNA, 22 bp, Artificial Sequence
  primer
gaggtctgtatttctcggaggg

SEQ ID NO: 25966 - DNA, 38 bp, Artificial Sequence
  primer
gtaaaacgacggccagtcaatagctgatggctgcagag

SEQ ID NO: 25967 - DNA, 38 bp, Artificial Sequence
  primer
gtaaaacgacggccagtgaagactgttcagcttgtggc

SEQ ID NO: 25968 - DNA, 38 bp, Artificial Sequence
  primer
gtaaaacgacggccagtgaaggaggaaagggacaggtg

SEQ ID NO: 25969 - DNA, 38 bp, Artificial Sequence
  primer
gtaaaacgacggccagtggttctcaggctggtaggatg

SEQ ID NO: 25970 - DNA, 20 bp, Artificial Sequence
  primer
gctgtgtcatgcaattctgc

SEQ ID NO: 25971 - DNA, 38 bp, Artificial Sequence
  primer
gtaaaacgacggccagtgccaaaccatatcactctgcc

SEQ ID NO: 25972 - DNA, 38 bp, Artificial Sequence
  primer
gtaaaacgacggccagtgtggcttcctaccttacgcag

SEQ ID NO: 25973 - DNA, 24 bp, Artificial Sequence
  primer
gccatgtgaatgtattacctctcc

SEQ ID NO: 25974 - DNA, 22 bp, Artificial Sequence
  primer
gagtggattgttccatcagagg

SEQ ID NO: 25975 - DNA, 21 bp, Artificial Sequence
  primer
aggcatgaagaaggtcctcag

SEQ ID NO: 25976 - DNA, 21 bp, Artificial Sequence
  primer
ccctccttcttgcctacagag

SEQ ID NO: 25977 - DNA, 21 bp, Artificial Sequence
  primer
gcaactgtatgcctgttcacg

SEQ ID NO: 25978 - DNA, 39 bp, Artificial Sequence
  primer
gtaaaacgacggccagtaagtgtgcgtcccttcactaag

SEQ ID NO: 25979 - DNA, 21 bp, Artificial Sequence
  primer
gggccatagttactgctcctg

SEQ ID NO: 25980 - DNA, 19 bp, Artificial Sequence
  primer
gacacagcagctgcaaagc

SEQ ID NO: 25981 - DNA, 36 bp, Artificial Sequence
  primer
gtaaaacgacggccagtccctcaagggaagagctgg

SEQ ID NO: 25982 - DNA, 21 bp, Artificial Sequence
  primer
ctgctgaagcgagaataaggg

SEQ ID NO: 25983 - DNA, 23 bp, Artificial Sequence
  primer
ttattgatgggagacaacctttg

SEQ ID NO: 25984 - DNA, 21 bp, Artificial Sequence
  primer
gctttgaaagtggtgtgatcg

SEQ ID NO: 25985 - DNA, 38 bp, Artificial Sequence
  primer
gtaaaacgacggccagtactttgtttggagggaaatgc

SEQ ID NO: 25986 - DNA, 38 bp, Artificial Sequence
  primer
gtaaaacgacggccagtcagcagccacacagaattagc

SEQ ID NO: 25987 - DNA, 23 bp, Artificial Sequence
  primer
ttcagtctatctcacatccaggc

SEQ ID NO: 25988 - DNA, 38 bp, Artificial Sequence
  primer
gtaaaacgacggccagtgaaccttgaaggacaagcagg

SEQ ID NO: 25989 - DNA, 38 bp, Artificial Sequence
  primer
gtaaaacgacggccagtccttcagcaaagcactgagag

SEQ ID NO: 25990 - DNA, 21 bp, Artificial Sequence
  primer
gactgttgtgcagtagggcag

SEQ ID NO: 25991 - DNA, 21 bp, Artificial Sequence
  primer
gggactgtgtttcctacaggc

SEQ ID NO: 25992 - DNA, 38 bp, Artificial Sequence
  primer
gtaaaacgacggccagtagcatttcacatgcctcttcc

SEQ ID NO: 25993 - DNA, 38 bp, Artificial Sequence
  primer
gtaaaacgacggccagttgctaagtccaggctgtatgc

SEQ ID NO: 25994 - DNA, 38 bp, Artificial Sequence
  primer
gtaaaacgacggccagttgccatttgtgctcatctttc

SEQ ID NO: 25995 - DNA, 38 bp, Artificial Sequence
  primer
gtaaaacgacggccagttattggcgtatttcctgtggg

SEQ ID NO: 25996 - DNA, 37 bp, Artificial Sequence
  primer
gtaaaacgacggccagttatgaacatgaggcggcaac

SEQ ID NO: 25997 - DNA, 21 bp, Artificial Sequence
  primer
aactggactgtgaaaggcagc

SEQ ID NO: 25998 - DNA, 22 bp, Artificial Sequence
  primer
tgggacggtcacttactaccag

SEQ ID NO: 25999 - DNA, 21 bp, Artificial Sequence
  primer
agtttgggttgtgctaggctc

SEQ ID NO: 26000 - DNA, 38 bp, Artificial Sequence
  primer
gtaaaacgacggccagttcagggttcagccttcttctc

SEQ ID NO: 26001 - DNA, 21 bp, Artificial Sequence
  primer
atgttctgaaggagcaggagg

SEQ ID NO: 26002 - DNA, 37 bp, Artificial Sequence
  primer
gtaaaacgacggccagtagaggtgacacaccacccac

SEQ ID NO: 26003 - DNA, 38 bp, Artificial Sequence
  primer
gtaaaacgacggccagtggattctcaaacgctctttgg

SEQ ID NO: 26004 - DNA, 39 bp, Artificial Sequence
  primer
gtaaaacgacggccagtcccgttggtttacatttctgac

SEQ ID NO: 26005 - DNA, 38 bp, Artificial Sequence
  primer
gtaaaacgacggccagttgaagatccagtgaaagggtg

SEQ ID NO: 26006 - DNA, 38 bp, Artificial Sequence
  primer
gtaaaacgacggccagtcacagaaactgtcggctgatg

SEQ ID NO: 26007 - DNA, 39 bp, Artificial Sequence
  primer
gtaaaacgacggccagtcagttcatgtttgcctgtatcg

SEQ ID NO: 26008 - DNA, 38 bp, Artificial Sequence
  primer
gtaaaacgacggccagtgcagtgtgtccaactttacgc

SEQ ID NO: 26009 - DNA, 21 bp, Artificial Sequence
  primer
tgagaggagttctggagaggg

SEQ ID NO: 26010 - DNA, 38 bp, Artificial Sequence
  primer
gtaaaacgacggccagtgggtgagctctttcagagcag

SEQ ID NO: 26011 - DNA, 38 bp, Artificial Sequence
  primer
gtaaaacgacggccagtgagttcaccacatgaccttgc

SEQ ID NO: 26012 - DNA, 37 bp, Artificial Sequence
  primer
gtaaaacgacggccagtctttggctttcccaccctac

SEQ ID NO: 26013 - DNA, 21 bp, Artificial Sequence
  primer
tactgtgtccatgcccatgtc

SEQ ID NO: 26014 - DNA, 38 bp, Artificial Sequence
  primer
gtaaaacgacggccagtcctctgtcacctttgcatctg

SEQ ID NO: 26015 - DNA, 20 bp, Artificial Sequence
  primer
ggctgggatttaaacggttc

SEQ ID NO: 26016 - DNA, 21 bp, Artificial Sequence
  primer
ttcccagtgtgtaacctgctg

SEQ ID NO: 26017 - DNA, 38 bp, Artificial Sequence
  primer
gtaaaacgacggccagttgatggctgtaaatccaaggg

SEQ ID NO: 26018 - DNA, 38 bp, Artificial Sequence
  primer
gtaaaacgacggccagttctcttggagacatgggttcc

SEQ ID NO: 26019 - DNA, 21 bp, Artificial Sequence
  primer
tatttgatttggcgtgtgtgg

SEQ ID NO: 26020 - DNA, 38 bp, Artificial Sequence
  primer
gtaaaacgacggccagttggctgttgaatggaattgag

SEQ ID NO: 26021 - DNA, 38 bp, Artificial Sequence
  primer
gtaaaacgacggccagtcagcatgttcatccaggtcag

SEQ ID NO: 26022 - DNA, 39 bp, Artificial Sequence
  primer
gtaaaacgacggccagtccagccagaagcaagtgtttag

SEQ ID NO: 26023 - DNA, 38 bp, Artificial Sequence
  primer
gtaaaacgacggccagtcagtgacatcagtcagtgccc

SEQ ID NO: 26024 - DNA, 38 bp, Artificial Sequence
  primer
gtaaaacgacggccagtacggagcttgcctagaatttg

SEQ ID NO: 26025 - DNA, 38 bp, Artificial Sequence
  primer
gtaaaacgacggccagtaggaggtagcctgatgtttgc

SEQ ID NO: 26026 - DNA, 20 bp, Artificial Sequence
  primer
acagtccagtgctgcctgag

SEQ ID NO: 26027 - DNA, 38 bp, Artificial Sequence
  primer
gtaaaacgacggccagttatggatgtcagtctggcagg

SEQ ID NO: 26028 - DNA, 19 bp, Artificial Sequence
  primer
cttcttcctgggctcgttg

SEQ ID NO: 26029 - DNA, 20 bp, Artificial Sequence
  primer
gtctgtgcgcagaaggtttg

SEQ ID NO: 26030 - DNA, 38 bp, Artificial Sequence
  primer
gtaaaacgacggccagtaaagcacacggtgcagttaag

SEQ ID NO: 26031 - DNA, 21 bp, Artificial Sequence
  primer
ctccgtgtgtctttctgcttg

SEQ ID NO: 26032 - DNA, 21 bp, Artificial Sequence
  primer
tcatgcaaactgcacagacac

SEQ ID NO: 26033 - DNA, 37 bp, Artificial Sequence
  primer
gtaaaacgacggccagtagcacagacatccaggaagg

SEQ ID NO: 26034 - DNA, 21 bp, Artificial Sequence
  primer
taattccacttggagccactg

SEQ ID NO: 26035 - DNA, 40 bp, Artificial Sequence
  primer
gtaaaacgacggccagtgagggaatgaaactaatcctccc

SEQ ID NO: 26036 - DNA, 21 bp, Artificial Sequence
  primer
gaattgcttgcctatggcttc

SEQ ID NO: 26037 - DNA, 39 bp, Artificial Sequence
  primer
gtaaaacgacggccagtccaaattgggaatggagtaagg

SEQ ID NO: 26038 - DNA, 21 bp, Artificial Sequence
  primer
gtcatatttgcagcctgggtc

SEQ ID NO: 26039 - DNA, 38 bp, Artificial Sequence
  primer
gtaaaacgacggccagttgagctgaagttgtccctgag

SEQ ID NO: 26040 - DNA, 21 bp, Artificial Sequence
  primer
ctcttgtgttgcaggaaggtg

SEQ ID NO: 26041 - DNA, 38 bp, Artificial Sequence
  primer
gtaaaacgacggccagtgactagagcagcccatcttgc

SEQ ID NO: 26042 - DNA, 21 bp, Artificial Sequence
  primer
cctgacgtgtgttgttgtgag

SEQ ID NO: 26043 - DNA, 38 bp, Artificial Sequence
  primer
gtaaaacgacggccagtcactgagagctgttgatggtg

SEQ ID NO: 26044 - DNA, 38 bp, Artificial Sequence
  primer
gtaaaacgacggccagttaccaggcatatgctgagctg

SEQ ID NO: 26045 - DNA, 20 bp, Artificial Sequence
  primer
ggtgctgtccctgaaatgtg

SEQ ID NO: 26046 - DNA, 38 bp, Artificial Sequence
  primer
gtaaaacgacggccagtctggcaagattgtcaagcaag

SEQ ID NO: 26047 - DNA, 38 bp, Artificial Sequence
  primer
gtaaaacgacggccagttccctctctgttctcacagcc

SEQ ID NO: 26048 - DNA, 37 bp, Artificial Sequence
  primer
gtaaaacgacggccagtcttaggagagcagccaaggg

SEQ ID NO: 26049 - DNA, 38 bp, Artificial Sequence
  primer
gtaaaacgacggccagttttgcacatagcaaggaatcg

SEQ ID NO: 26050 - DNA, 38 bp, Artificial Sequence
  primer
gtaaaacgacggccagtctacaaagcagggattggagc

SEQ ID NO: 26051 - DNA, 38 bp, Artificial Sequence
  primer
gtaaaacgacggccagtgaagcacatgcagatgtccag

SEQ ID NO: 26052 - DNA, 21 bp, Artificial Sequence
  primer
atggaaactgtgacccgactc

SEQ ID NO: 26053 - DNA, 19 bp, Artificial Sequence
  primer
tggtggccttgtaccttcc

SEQ ID NO: 26054 - DNA, 39 bp, Artificial Sequence
  primer
gtaaaacgacggccagtcccaactaaacacaaatggtgc

SEQ ID NO: 26055 - DNA, 38 bp, Artificial Sequence
  primer
gtaaaacgacggccagttgtgggagtgaggagtaaggg

SEQ ID NO: 26056 - DNA, 21 bp, Artificial Sequence
  primer
ttccaagcctttgttctgagg

SEQ ID NO: 26057 - DNA, 38 bp, Artificial Sequence
  primer
gtaaaacgacggccagtccaggtcctagcatagggttg

SEQ ID NO: 26058 - DNA, 21 bp, Artificial Sequence
  primer
tcctttcacaaaggtgtggac

SEQ ID NO: 26059 - DNA, 38 bp, Artificial Sequence
  primer
gtaaaacgacggccagtagtttctggcttcttgcctcc

SEQ ID NO: 26060 - DNA, 21 bp, Artificial Sequence
  primer
agcaggaaattctctcctggg

SEQ ID NO: 26061 - DNA, 19 bp, Artificial Sequence
  primer
cggcctgtagaatgtgctg

SEQ ID NO: 26062 - DNA, 38 bp, Artificial Sequence
  primer
gtaaaacgacggccagttaggtggcacatttcctaacg

SEQ ID NO: 26063 - DNA, 38 bp, Artificial Sequence
  primer
gtaaaacgacggccagtattcaccgtcctcctcttctg

SEQ ID NO: 26064 - DNA, 21 bp, Artificial Sequence
  primer
tcctcctgtaccacacaccag

SEQ ID NO: 26065 - DNA, 21 bp, Artificial Sequence
  primer
aatgggaaactgaagccaaag

SEQ ID NO: 26066 - DNA, 38 bp, Artificial Sequence
  primer
gtaaaacgacggccagttgtgtcccatttatcggaatg

SEQ ID NO: 26067 - DNA, 37 bp, Artificial Sequence
  primer
gtaaaacgacggccagtttagcctccaggcaagatcc

SEQ ID NO: 26068 - DNA, 38 bp, Artificial Sequence
  primer
gtaaaacgacggccagttctgagttgtctgcttcaggg

SEQ ID NO: 26069 - DNA, 21 bp, Artificial Sequence
  primer
tgcatggaaagcactagaagg

SEQ ID NO: 26070 - DNA, 38 bp, Artificial Sequence
  primer
gtaaaacgacggccagtgaagcctgttcttctgcttcc

SEQ ID NO: 26071 - DNA, 37 bp, Artificial Sequence
  primer
gtaaaacgacggccagttctgtctgcatccttctccc

SEQ ID NO: 26072 - DNA, 20 bp, Artificial Sequence
  primer
agcagggagagaaggactgg

SEQ ID NO: 26073 - DNA, 38 bp, Artificial Sequence
  primer
gtaaaacgacggccagttcagctcctaccttcacctcc

SEQ ID NO: 26074 - DNA, 21 bp, Artificial Sequence
  primer
agacctgttccagagagtggg

SEQ ID NO: 26075 - DNA, 37 bp, Artificial Sequence
  primer
gtaaaacgacggccagtgaaacccagtggatcgaagg

SEQ ID NO: 26076 - DNA, 20 bp, Artificial Sequence
  primer
aaagccagccaaggctaaag

SEQ ID NO: 26077 - DNA, 38 bp, Artificial Sequence
  primer
gtaaaacgacggccagttcagtcttgctgcttctgtcc

SEQ ID NO: 26078 - DNA, 22 bp, Artificial Sequence
  primer
caggctgtgatgtgatacttgg

SEQ ID NO: 26079 - DNA, 38 bp, Artificial Sequence
  primer
gtaaaacgacggccagtcaagtagggatcatgccaagc

SEQ ID NO: 26080 - DNA, 21 bp, Artificial Sequence
  primer
tctgtctctgacaccagcacc

SEQ ID NO: 26081 - DNA, 38 bp, Artificial Sequence
  primer
gtaaaacgacggccagtccttaatccctccaaagctgg

SEQ ID NO: 26082 - DNA, 38 bp, Artificial Sequence
  primer
gtaaaacgacggccagtcaggatcaggtaggaagcagc

SEQ ID NO: 26083 - DNA, 21 bp, Artificial Sequence
  primer
ggtcaccagggttcaagagtc

SEQ ID NO: 26084 - DNA, 20 bp, Artificial Sequence
  primer
accctcggtcctgactatgc

SEQ ID NO: 26085 - DNA, 21 bp, Artificial Sequence
  primer
tgaattctgggctcaggaaag

SEQ ID NO: 26086 - DNA, 38 bp, Artificial Sequence
  primer
gtaaaacgacggccagtcttcgatgtgaaggcattgag

SEQ ID NO: 26087 - DNA, 38 bp, Artificial Sequence
  primer
gtaaaacgacggccagtaagtcgagcttcctaagtggg

SEQ ID NO: 26088 - DNA, 21 bp, Artificial Sequence
  primer
tactgggtgaggtggactgtg

SEQ ID NO: 26089 - DNA, 21 bp, Artificial Sequence
  primer
gctagtgtggctggagtgatg

SEQ ID NO: 26090 - DNA, 21 bp, Artificial Sequence
  primer
aatgcagaatcaagaccagcc

SEQ ID NO: 26091 - DNA, 38 bp, Artificial Sequence
  primer
gtaaaacgacggccagttactcgctccacacactccac

SEQ ID NO: 26092 - DNA, 21 bp, Artificial Sequence
  primer
cctcgatctcagtccttgacc

SEQ ID NO: 26093 - DNA, 20 bp, Artificial Sequence
  primer
tgggaaagttgtgcaaatcc

SEQ ID NO: 26094 - DNA, 21 bp, Artificial Sequence
  primer
ataccagctaccgtgggtcac

SEQ ID NO: 26095 - DNA, 38 bp, Artificial Sequence
  primer
gtaaaacgacggccagtacaccaaagcctatttgagcc

SEQ ID NO: 26096 - DNA, 38 bp, Artificial Sequence
  primer
gtaaaacgacggccagtccctcctcactgtctttcagg

SEQ ID NO: 26097 - DNA, 38 bp, Artificial Sequence
  primer
gtaaaacgacggccagtgtatccttggagctttgtggg

SEQ ID NO: 26098 - DNA, 38 bp, Artificial Sequence
  primer
gtaaaacgacggccagttgctttgagaacggactgttg

SEQ ID NO: 26099 - DNA, 39 bp, Artificial Sequence
  primer
gtaaaacgacggccagtcatcctctgcctattctttccc

SEQ ID NO: 26100 - DNA, 38 bp, Artificial Sequence
  primer
gtaaaacgacggccagtacattctagcagggaaatggg

SEQ ID NO: 26101 - DNA, 38 bp, Artificial Sequence
  primer
gtaaaacgacggccagtgtcagggccagaactgtatcc

SEQ ID NO: 26102 - DNA, 37 bp, Artificial Sequence
  primer
gtaaaacgacggccagtagctgggtagaggcagaagg

SEQ ID NO: 26103 - DNA, 20 bp, Artificial Sequence
  primer
gttcttgcagcccacctctc

SEQ ID NO: 26104 - DNA, 38 bp, Artificial Sequence
  primer
gtaaaacgacggccagtgtggtcagtgtgtccctcatc

SEQ ID NO: 26105 - DNA, 38 bp, Artificial Sequence
  primer
gtaaaacgacggccagttctatgaccagagtccctgcc

SEQ ID NO: 26106 - DNA, 21 bp, Artificial Sequence
  primer
ggtgcagtgtgtatttgtggc

SEQ ID NO: 26107 - DNA, 38 bp, Artificial Sequence
  primer
gtaaaacgacggccagtttgctccaccactatgtcctg

SEQ ID NO: 26108 - DNA, 21 bp, Artificial Sequence
  primer
gaggtcccaggtggttaggtc

SEQ ID NO: 26109 - DNA, 21 bp, Artificial Sequence
  primer
agaaccaggtgacctctgacc

SEQ ID NO: 26110 - DNA, 38 bp, Artificial Sequence
  primer
gtaaaacgacggccagtcagggaatatttggttgggtg

SEQ ID NO: 26111 - DNA, 20 bp, Artificial Sequence
  primer
atcgtgtgatccaagcgaag

SEQ ID NO: 26112 - DNA, 21 bp, Artificial Sequence
  primer
tggctccaatgtctctgatcc

SEQ ID NO: 26113 - DNA, 38 bp, Artificial Sequence
  primer
gtaaaacgacggccagtgagggccaaagcatgagatag

SEQ ID NO: 26114 - DNA, 22 bp, Artificial Sequence
  primer
gatggactgcatctcccagtag

SEQ ID NO: 26115 - DNA, 38 bp, Artificial Sequence
  primer
gtaaaacgacggccagtcagtgatgccctgtttgtcag

SEQ ID NO: 26116 - DNA, 21 bp, Artificial Sequence
  primer
gcaaacatgactgtcgtcaac

SEQ ID NO: 26117 - DNA, 39 bp, Artificial Sequence
  primer
gtaaaacgacggccagtgactcatgaccatataagcccg

SEQ ID NO: 26118 - DNA, 38 bp, Artificial Sequence
  primer
gtaaaacgacggccagtctgactgccctccagttcttc

SEQ ID NO: 26119 - DNA, 20 bp, Artificial Sequence
  primer
atcctcagaggtttctgccc

SEQ ID NO: 26120 - DNA, 21 bp, Artificial Sequence
  primer
gaatgggtgacaggattctcc

SEQ ID NO: 26121 - DNA, 20 bp, Artificial Sequence
  primer
ccatgctggtgggtagagag

SEQ ID NO: 26122 - DNA, 36 bp, Artificial Sequence
  primer
gtaaaacgacggccagtcagggtggctgaaggactc

SEQ ID NO: 26123 - DNA, 38 bp, Artificial Sequence
  primer
gtaaaacgacggccagttttaccattgctgttggaggg

SEQ ID NO: 26124 - DNA, 38 bp, Artificial Sequence
  primer
gtaaaacgacggccagtagcccagtgtttctgtaaggg

SEQ ID NO: 26125 - DNA, 38 bp, Artificial Sequence
  primer
gtaaaacgacggccagtagtccctgatcggtacactgg

SEQ ID NO: 26126 - DNA, 21 bp, Artificial Sequence
  primer
agagatacatggatgggcacc

SEQ ID NO: 26127 - DNA, 38 bp, Artificial Sequence
  primer
gtaaaacgacggccagtcacagcggtgagtcctagacc

SEQ ID NO: 26128 - DNA, 38 bp, Artificial Sequence
  primer
gtaaaacgacggccagtctcatgggcacgtcatttatc

SEQ ID NO: 26129 - DNA, 37 bp, Artificial Sequence
  primer
gtaaaacgacggccagtgacaacagaggtcaggctgc

SEQ ID NO: 26130 - DNA, 38 bp, Artificial Sequence
  primer
gtaaaacgacggccagtcacagcaagatctccaagcac

SEQ ID NO: 26131 - DNA, 21 bp, Artificial Sequence
  primer
aggagacactctatcgccgtc

SEQ ID NO: 26132 - DNA, 21 bp, Artificial Sequence
  primer
gaggcactgtcagcttgtttg

SEQ ID NO: 26133 - DNA, 36 bp, Artificial Sequence
  primer
gtaaaacgacggccagtgttgcgtgaggacacctcc

SEQ ID NO: 26134 - DNA, 38 bp, Artificial Sequence
  primer
gtaaaacgacggccagtaacgaggaggaggtgttaggg

SEQ ID NO: 26135 - DNA, 21 bp, Artificial Sequence
  primer
gatcctgcaggtgagtgtgtg

SEQ ID NO: 26136 - DNA, 38 bp, Artificial Sequence
  primer
gtaaaacgacggccagtagtcagaggtcatcctgctgc

SEQ ID NO: 26137 - DNA, 38 bp, Artificial Sequence
  primer
gtaaaacgacggccagtagaggtgtctgttggtctccc

SEQ ID NO: 26138 - DNA, 37 bp, Artificial Sequence
  primer
gtaaaacgacggccagtgtgccatctctcccttcctg

SEQ ID NO: 26139 - DNA, 37 bp, Artificial Sequence
  primer
gtaaaacgacggccagttcaaggcctctggaggagac

SEQ ID NO: 26140 - DNA, 38 bp, Artificial Sequence
  primer
gtaaaacgacggccagtgacatttcctcttcctgtccc

SEQ ID NO: 26141 - DNA, 19 bp, Artificial Sequence
  primer
actaccacctgggcaatgg

SEQ ID NO: 26142 - DNA, 21 bp, Artificial Sequence
  primer
atactcacagggcagggtagc

SEQ ID NO: 26143 - DNA, 37 bp, Artificial Sequence
  primer
gtaaaacgacggccagtctggtgtcccatgtttggag

SEQ ID NO: 26144 - DNA, 37 bp, Artificial Sequence
  primer
gtaaaacgacggccagtccttgggtgctactgagtcc

SEQ ID NO: 26145 - DNA, 21 bp, Artificial Sequence
  primer
accttctgcatgctgcttatg

SEQ ID NO: 26146 - DNA, 38 bp, Artificial Sequence
  primer
gtaaaacgacggccagtgccatcgtcactgtctttcag

SEQ ID NO: 26147 - DNA, 38 bp, Artificial Sequence
  primer
gtaaaacgacggccagtttcatcctctctcgacactgc

SEQ ID NO: 26148 - DNA, 21 bp, Artificial Sequence
  primer
gtgggctcacataagctgtgg

SEQ ID NO: 26149 - DNA, 21 bp, Artificial Sequence
  primer
agtgcttggcctgtgagtacc

SEQ ID NO: 26150 - DNA, 38 bp, Artificial Sequence
  primer
gtaaaacgacggccagtagctcctgctcacatccctac

SEQ ID NO: 26151 - DNA, 21 bp, Artificial Sequence
  primer
aggagagccaggatgaagagg

SEQ ID NO: 26152 - DNA, 20 bp, Artificial Sequence
  primer
ccaggtgggagagggtagac

SEQ ID NO: 26153 - DNA, 38 bp, Artificial Sequence
  primer
gtaaaacgacggccagttgctgtcagggatttgagaag

SEQ ID NO: 26154 - DNA, 21 bp, Artificial Sequence
  primer
gtgtatgcagagcagacctgg

SEQ ID NO: 26155 - DNA, 36 bp, Artificial Sequence
  primer
gtaaaacgacggccagtgagacagcttgggctgagg

SEQ ID NO: 26156 - DNA, 39 bp, Artificial Sequence
  primer
gtaaaacgacggccagtaagaggacttgtgttctgccac

SEQ ID NO: 26157 - DNA, 21 bp, Artificial Sequence
  primer
tgtttccctgacttgactggc

SEQ ID NO: 26158 - DNA, 21 bp, Artificial Sequence
  primer
gagtgtgactccagcttgacc

SEQ ID NO: 26159 - DNA, 38 bp, Artificial Sequence
  primer
gtaaaacgacggccagtgtagctatttgggttcgcagg

SEQ ID NO: 26160 - DNA, 38 bp, Artificial Sequence
  primer
gtaaaacgacggccagtttgcttgtcttcctcaagtgc

SEQ ID NO: 26161 - DNA, 38 bp, Artificial Sequence
  primer
gtaaaacgacggccagtttcagttctggcgttagaggc

SEQ ID NO: 26162 - DNA, 38 bp, Artificial Sequence
  primer
gtaaaacgacggccagtgaacagagaagacagggctcc

SEQ ID NO: 26163 - DNA, 38 bp, Artificial Sequence
  primer
gtaaaacgacggccagtttcaagccctgtctttctgtg

SEQ ID NO: 26164 - DNA, 38 bp, Artificial Sequence
  primer
gtaaaacgacggccagtatgggtctttctcccagcttc

SEQ ID NO: 26165 - DNA, 21 bp, Artificial Sequence
  primer
gtgctgaagctgctgaagatg

SEQ ID NO: 26166 - DNA, 21 bp, Artificial Sequence
  primer
ctctttggagacctgggtgag

SEQ ID NO: 26167 - DNA, 20 bp, Artificial Sequence
  primer
caaacactccctcctcctcc

SEQ ID NO: 26168 - DNA, 37 bp, Artificial Sequence
  primer
gtaaaacgacggccagtacgacacttcccatcactgc

SEQ ID NO: 26169 - DNA, 37 bp, Artificial Sequence
  primer
gtaaaacgacggccagtgtcagcgctgcctcagttac

SEQ ID NO: 26170 - DNA, 21 bp, Artificial Sequence
  primer
gtaagggtagaggccctgatg

SEQ ID NO: 26171 - DNA, 20 bp, Artificial Sequence
  primer
gacaacagaggtcaggctgc

SEQ ID NO: 26172 - DNA, 22 bp, Artificial Sequence
  primer
ccagagaccagaagcagcttag

SEQ ID NO: 26173 - DNA, 38 bp, Artificial Sequence; identical to SEQ ID NO: 26159
  primer

SEQ ID NO: 26174 - DNA, 21 bp, Artificial Sequence
  primer
cttcctgtggtcacagctcac

SEQ ID NO: 26175 - DNA, 37 bp, Artificial Sequence
  primer
gtaaaacgacggccagtaaagacaaagacatcccggc

SEQ ID NO: 26176 - DNA, 19 bp, Artificial Sequence
  primer
acctggtggctgctttcag

SEQ ID NO: 26177 - DNA, 18 bp, Artificial Sequence
  primer
gaggcagggctcagttcc

SEQ ID NO: 26178 - DNA, 37 bp, Artificial Sequence
  primer
gtaaaacgacggccagtagtacaaggtcctccgggtg

SEQ ID NO: 26179 - DNA, 37 bp, Artificial Sequence
  primer
gtaaaacgacggccagtcgtggacacccactgtgaac

SEQ ID NO: 26180 - DNA, 38 bp, Artificial Sequence
  primer
gtaaaacgacggccagtatcacgtccctgatcacaatc

SEQ ID NO: 26181 - DNA, 20 bp, Artificial Sequence
  primer
acaacggtgccatcaacttc

SEQ ID NO: 26182 - DNA, 21 bp, Artificial Sequence
  primer
ttgtccagataggcacaaagc

SEQ ID NO: 26183 - DNA, 21 bp, Artificial Sequence
  primer
acatattccgcaaggtcaagc

SEQ ID NO: 26184 - DNA, 21 bp, Artificial Sequence
  primer
acctggtctaccaccaccatc

SEQ ID NO: 26185 - DNA, 21 bp, Artificial Sequence
  primer
actccgggatagcttcattcc

SEQ ID NO: 26186 - DNA, 21 bp, Artificial Sequence
  primer
gacctgtgagctgaagagctg

SEQ ID NO: 26187 - DNA, 36 bp, Artificial Sequence
  primer
gtaaaacgacggccagtcagatcagtgccggtgagg

SEQ ID NO: 26188 - DNA, 38 bp, Artificial Sequence
  primer
gtaaaacgacggccagtagctgttcatgcaccttgatg

SEQ ID NO: 26189 - DNA, 19 bp, Artificial Sequence
  primer
gagggtaggaggccaggag

SEQ ID NO: 26190 - DNA, 38 bp, Artificial Sequence
  primer
gtaaaacgacggccagtgtcaccgtgttccaggtagtg

SEQ ID NO: 26191 - DNA, 37 bp, Artificial Sequence
  primer
gtaaaacgacggccagtaccctggcagtgacatcatc

SEQ ID NO: 26192 - DNA, 39 bp, Artificial Sequence
  primer
gtaaaacgacggccagtagctcagagaactccagaccac

SEQ ID NO: 26193 - DNA, 37 bp, Artificial Sequence
  primer
gtaaaacgacggccagtacagtgggtgctccgtaatg

SEQ ID NO: 26194 - DNA, 19 bp, Artificial Sequence
  primer
ctgagaaggtgctgggagg

SEQ ID NO: 26195 - DNA, 38 bp, Artificial Sequence
  primer
gtaaaacgacggccagtatggtggatatttccgagtgg

SEQ ID NO: 26196 - DNA, 38 bp, Artificial Sequence
  primer
gtaaaacgacggccagtcatcttcctcaactgcgtcac

SEQ ID NO: 26197 - DNA, 20 bp, Artificial Sequence
  primer
gatgatggtgaaggtaccgc

SEQ ID NO: 26198 - DNA, 37 bp, Artificial Sequence
  primer
gtaaaacgacggccagtaccttgggacctttgctgag

SEQ ID NO: 26199 - DNA, 36 bp, Artificial Sequence
  primer
gtaaaacgacggccagtcagacagggtctgccttcc

SEQ ID NO: 26200 - DNA, 38 bp, Artificial Sequence
  primer
gtaaaacgacggccagtgtgcgacgcaagtacaacttc

SEQ ID NO: 26201 - DNA, 37 bp, Artificial Sequence
  primer
gtaaaacgacggccagtctgggtcacctcagggtctc

SEQ ID NO: 26202 - DNA, 35 bp, Artificial Sequence
  primer
gtaaaacgacggccagtcactccacgaggagccag

SEQ ID NO: 26203 - DNA, 38 bp, Artificial Sequence
  primer
gtaaaacgacggccagtggagaatggagtctgcaggag

SEQ ID NO: 26204 - DNA, 38 bp, Artificial Sequence
  primer
gtaaaacgacggccagtggaggagctactgagctgacc

SEQ ID NO: 26205 - DNA, 38 bp, Artificial Sequence
  primer
gtaaaacgacggccagtttcaaggacaggtgtgtgtgg

SEQ ID NO: 26206 - DNA, 18 bp, Artificial Sequence
  primer
cattgcccgtggtaggtg

SEQ ID NO: 26207 - DNA, 21 bp, Artificial Sequence
  primer
ggctctgtctacctggtgagg

SEQ ID NO: 26208 - DNA, 36 bp, Artificial Sequence
  primer
gtaaaacgacggccagtctatcctgcctctgggctc

SEQ ID NO: 26209 - DNA, 20 bp, Artificial Sequence
  primer
tttcaggctctcccaggaac

SEQ ID NO: 26210 - DNA, 21 bp, Artificial Sequence
  primer
gacaagcactgcctgagctac

SEQ ID NO: 26211 - DNA, 37 bp, Artificial Sequence
  primer
gtaaaacgacggccagtgggcaggtgagagagaggac

SEQ ID NO: 26212 - DNA, 38 bp, Artificial Sequence
  primer
gtaaaacgacggccagtcagtttggcctctccagtacc

SEQ ID NO: 26213 - DNA, 38 bp, Artificial Sequence
  primer
gtaaaacgacggccagtcctcactttgactctacgccc

SEQ ID NO: 26214 - DNA, 20 bp, Artificial Sequence
  primer
gaggaggtcagccacatcac

SEQ ID NO: 26215 - DNA, 20 bp, Artificial Sequence
  primer
cgcgcagaaagaagaagatg

SEQ ID NO: 26216 - DNA, 18 bp, Artificial Sequence
  primer
agctttgcctttgagccg

SEQ ID NO: 26217 - DNA, 38 bp, Artificial Sequence
  primer
gtaaaacgacggccagtacttattggtggagaggcagg

SEQ ID NO: 26218 - DNA, 40 bp, Artificial Sequence
  primer
gtaaaacgacggccagtggttgcgggtattacactctagg

SEQ ID NO: 26219 - DNA, 38 bp, Artificial Sequence
  primer
gtaaaacgacggccagtctgggatcactgaggttctcc

SEQ ID NO: 26220 - DNA, 21 bp, Artificial Sequence
  primer
cgactgctgtctttacttgcc

SEQ ID NO: 26221 - DNA, 21 bp, Artificial Sequence
  primer
cactgaacaggatgggaacag

SEQ ID NO: 26222 - DNA, 36 bp, Artificial Sequence
  primer
gtaaaacgacggccagtgcctctcccttcctgatcc

SEQ ID NO: 26223 - DNA, 21 bp, Artificial Sequence
  primer
aatgtgatgtgccttgtccag

SEQ ID NO: 26224 - DNA, 38 bp, Artificial Sequence
  primer
gtaaaacgacggccagtatgactctgcctctctcaccc

SEQ ID NO: 26225 - DNA, 36 bp, Artificial Sequence
  primer
gtaaaacgacggccagtctcagggatgtgtcccagg

SEQ ID NO: 26226 - DNA, 21 bp, Artificial Sequence
  primer
ggtgtgggcaacgactctatg

SEQ ID NO: 26227 - DNA, 38 bp, Artificial Sequence
  primer
gtaaaacgacggccagtagacggaggtatggtgaggac

SEQ ID NO: 26228 - DNA, 38 bp, Artificial Sequence
  primer
gtaaaacgacggccagttggatgaatggaagctctgtc

SEQ ID NO: 26229 - DNA, 37 bp, Artificial Sequence
  primer
gtaaaacgacggccagtgctttcagcaagcatgaacc

SEQ ID NO: 26230 - DNA, 38 bp, Artificial Sequence
  primer
gtaaaacgacggccagtcgtcactgtgttccaggtgag

SEQ ID NO: 26231 - DNA, 38 bp, Artificial Sequence
  primer
gtaaaacgacggccagttcaggcagatgtagggttgtg

SEQ ID NO: 26232 - DNA, 38 bp, Artificial Sequence
  primer
gtaaaacgacggccagttgtttgtctgtctcgtggctc

SEQ ID NO: 26233 - DNA, 38 bp, Artificial Sequence
  primer
gtaaaacgacggccagtgaagatggccctaacttgctg

SEQ ID NO: 26234 - DNA, 20 bp, Artificial Sequence
  primer
ggaacagcctcaagcacaag

SEQ ID NO: 26235 - DNA, 37 bp, Artificial Sequence
  primer
gtaaaacgacggccagtagagttcggaggtgaccctg

SEQ ID NO: 26236 - DNA, 39 bp, Artificial Sequence
  primer
gtaaaacgacggccagtcaccctgagcaggtgtagagtc

SEQ ID NO: 26237 - DNA, 36 bp, Artificial Sequence
  primer
gtaaaacgacggccagtggaaagcctccgtgaactg

SEQ ID NO: 26238 - DNA, 36 bp, Artificial Sequence
  primer
gtaaaacgacggccagtcttgcatagagcccggttg

SEQ ID NO: 26239 - DNA, 38 bp, Artificial Sequence
  primer
gtaaaacgacggccagtgtgactctgggctgagtaggg

SEQ ID NO: 26240 - DNA, 37 bp, Artificial Sequence
  primer
gtaaaacgacggccagtgatcgagaggcgagttcctc

SEQ ID NO: 26241 - DNA, 21 bp, Artificial Sequence
  primer
aggaaagtttgttggacgagg

SEQ ID NO: 26242 - DNA, 38 bp, Artificial Sequence
  primer
gtaaaacgacggccagtacctgctgcctcatttagacc

SEQ ID NO: 26243 - DNA, 38 bp, Artificial Sequence
  primer
gtaaaacgacggccagtatctaacactgatcccagggc

SEQ ID NO: 26244 - DNA, 21 bp, Artificial Sequence
  primer
tccaaaggtaccaactcgacc

SEQ ID NO: 26245 - DNA, 21 bp, Artificial Sequence
  primer
atagaagggtcaggacctggg

SEQ ID NO: 26246 - DNA, 21 bp, Artificial Sequence
  primer
ctgagagccagactctgcttg

SEQ ID NO: 26247 - DNA, 38 bp, Artificial Sequence
  primer
gtaaaacgacggccagttacagctgctctgacccacag

SEQ ID NO: 26248 - DNA, 38 bp, Artificial Sequence
  primer
gtaaaacgacggccagtcctagggtgtgatgagggttc

SEQ ID NO: 26249 - DNA, 36 bp, Artificial Sequence
  primer
gtaaaacgacggccagttgaatctcggtcttgctgc

SEQ ID NO: 26250 - DNA, 38 bp, Artificial Sequence
  primer
gtaaaacgacggccagtctgctcagctccatagaaggg

SEQ ID NO: 26251 - DNA, 38 bp, Artificial Sequence
  primer
gtaaaacgacggccagttgtctggacctttctgaccac

SEQ ID NO: 26252 - DNA, 39 bp, Artificial Sequence
  primer
gtaaaacgacggccagtgaagatggtcaggtagaggagg

SEQ ID NO: 26253 - DNA, 38 bp, Artificial Sequence
  primer
gtaaaacgacggccagtagtgagattggtgctcaatgc

SEQ ID NO: 26254 - DNA, 36 bp, Artificial Sequence
  primer
gtaaaacgacggccagtgaagggagctccttggatg

SEQ ID NO: 26255 - DNA, 19 bp, Artificial Sequence
  primer
agaccacgctcgaggacag

SEQ ID NO: 26256 - DNA, 35 bp, Artificial Sequence
  primer
gtaaaacgacggccagtctgcacccaccacgactc

SEQ ID NO: 26257 - DNA, 38 bp, Artificial Sequence
  primer
gtaaaacgacggccagttgttggttgcctcatctgttc

SEQ ID NO: 26258 - DNA, 38 bp, Artificial Sequence
  primer
gtaaaacgacggccagtaggagagtaatcctcctgccc

SEQ ID NO: 26259 - DNA, 38 bp, Artificial Sequence
  primer
gtaaaacgacggccagttcacagtccagactgaccctc

SEQ ID NO: 26260 - DNA, 20 bp, Artificial Sequence
  primer
agtgcaaacgtcctgaggtg

SEQ ID NO: 26261 - DNA, 20 bp, Artificial Sequence
  primer
aagcatggacaggacacagg

SEQ ID NO: 26262 - DNA, 38 bp, Artificial Sequence
  primer
gtaaaacgacggccagtggatttatagggagggagggc

SEQ ID NO: 26263 - DNA, 37 bp, Artificial Sequence
  primer
gtaaaacgacggccagtgtcaccgtctgctccatgtg

SEQ ID NO: 26264 - DNA, 38 bp, Artificial Sequence
  primer
gtaaaacgacggccagtgggttgggtggagtcttaatg

SEQ ID NO: 26265 - DNA, 38 bp, Artificial Sequence
  primer
gtaaaacgacggccagtcagtcacagaatgggcttgtc

SEQ ID NO: 26266 - DNA, 21 bp, Artificial Sequence
  primer
agtctctggaaagcacgaagc

SEQ ID NO: 26267 - DNA, 37 bp, Artificial Sequence
  primer
gtaaaacgacggccagtctacgcatgcctggagtttg

SEQ ID NO: 26268 - DNA, 37 bp, Artificial Sequence
  primer
gtaaaacgacggccagtatccatggtgccttggaaac

SEQ ID NO: 26269 - DNA, 37 bp, Artificial Sequence
  primer
gtaaaacgacggccagtccctccctctgtgtcacatc

SEQ ID NO: 26270 - DNA, 38 bp, Artificial Sequence
  primer
gtaaaacgacggccagtggaggagaacttcggtcaatg

SEQ ID NO: 26271 - DNA, 38 bp, Artificial Sequence
  primer
gtaaaacgacggccagtctatgtccctggatccacacc

SEQ ID NO: 26272 - DNA, 38 bp, Artificial Sequence
  primer
gtaaaacgacggccagtcagagaagggacttgcctgag

SEQ ID NO: 26273 - DNA, 38 bp, Artificial Sequence
  primer
gtaaaacgacggccagtctgaacgctaacaggctctcc

SEQ ID NO: 26274 - DNA, 18 bp, Artificial Sequence
  primer
tgcttactggctgcaggg

SEQ ID NO: 26275 - DNA, 38 bp, Artificial Sequence
  primer
gtaaaacgacggccagtggaggagcaggaggtgtattc

SEQ ID NO: 26276 - DNA, 38 bp, Artificial Sequence
  primer
gtaaaacgacggccagtctgactgcctgctttatgctg

SEQ ID NO: 26277 - DNA, 38 bp, Artificial Sequence
  primer
gtaaaacgacggccagtcatttaggccactgcaaggag

SEQ ID NO: 26278 - DNA, 37 bp, Artificial Sequence
  primer
gtaaaacgacggccagtgtgtggagggcaggatatgg

SEQ ID NO: 26279 - DNA, 37 bp, Artificial Sequence
  primer
gtaaaacgacggccagtctccagaaacctcagcccag

SEQ ID NO: 26280 - DNA, 38 bp, Artificial Sequence
  primer
gtaaaacgacggccagtttccactgttcactcccagag

SEQ ID NO: 26281 - DNA, 38 bp, Artificial Sequence
  primer
gtaaaacgacggccagtgcctttaggcttaggagggac

SEQ ID NO: 26282 - DNA, 21 bp, Artificial Sequence
  primer
ttgagaaggctctcttggctc

SEQ ID NO: 26283 - DNA, 38 bp, Artificial Sequence
  primer
gtaaaacgacggccagttgggctgtgataactcaaggg

SEQ ID NO: 26284 - DNA, 21 bp, Artificial Sequence
  primer
ggctctgggaatgcaatctac

SEQ ID NO: 26285 - DNA, 38 bp, Artificial Sequence
  primer
gtaaaacgacggccagtgagaggagtgttggagttggg

SEQ ID NO: 26286 - DNA, 21 bp, Artificial Sequence
  primer
ctgacacgtctcttcacctcc

SEQ ID NO: 26287 - DNA, 37 bp, Artificial Sequence
  primer
gtaaaacgacggccagtaaacacacagtgcacctccc

SEQ ID NO: 26288 - DNA, 21 bp, Artificial Sequence
  primer
ggacgttcatcaagtccttcc

SEQ ID NO: 26289 - DNA, 38 bp, Artificial Sequence
  primer
gtaaaacgacggccagttttggcttcaggtctgatgtg

SEQ ID NO: 26290 - DNA, 19 bp, Artificial Sequence
  primer
tcatctgtccacaccctgc

SEQ ID NO: 26291 - DNA, 38 bp, Artificial Sequence
  primer
gtaaaacgacggccagtcacaggaagcgagaagttgtg

SEQ ID NO: 26292 - DNA, 21 bp, Artificial Sequence
  primer
cctgtttcctggctttctttc

SEQ ID NO: 26293 - DNA, 38 bp, Artificial Sequence
  primer
gtaaaacgacggccagtgtctcagcaatgtcacccaac

SEQ ID NO: 26294 - DNA, 38 bp, Artificial Sequence
  primer
gtaaaacgacggccagtgttcagaaagaactgggtggc

SEQ ID NO: 26295 - DNA, 38 bp, Artificial Sequence
  primer
gtaaaacgacggccagtctacagctggctcccactctg

SEQ ID NO: 26296 - DNA, 20 bp, Artificial Sequence
  primer
agctcagattgtgccactgc

SEQ ID NO: 26297 - DNA, 20 bp, Artificial Sequence
  primer
actgtcccagagtgacagcc

SEQ ID NO: 26298 - DNA, 21 bp, Artificial Sequence
  primer
tgctacactaggttggccttg

SEQ ID NO: 26299 - DNA, 21 bp, Artificial Sequence
  primer
ctaagacaccttctgcagccc

SEQ ID NO: 26300 - DNA, 38 bp, Artificial Sequence
  primer
gtaaaacgacggccagtgatcttggttgagttgccctc

SEQ ID NO: 26301 - DNA, 37 bp, Artificial Sequence
  primer
gtaaaacgacggccagtagagagggtagggccaacag

SEQ ID NO: 26302 - DNA, 36 bp, Artificial Sequence
  primer
gtaaaacgacggccagtcgtgtgctgctcttcctcc

SEQ ID NO: 26303 - DNA, 38 bp, Artificial Sequence
  primer
gtaaaacgacggccagtacatagtcggtgctaggaggg

SEQ ID NO: 26304 - DNA, 23 bp, Artificial Sequence
  primer
tcaagataaagaacagggtggtg

SEQ ID NO: 26305 - DNA, 38 bp, Artificial Sequence
  primer
gtaaaacgacggccagtgctgatgatggcagaggtaac

SEQ ID NO: 26306 - DNA, 23 bp, Artificial Sequence
  primer
tggctaatccttatggatcattg

SEQ ID NO: 26307 - DNA, 39 bp, Artificial Sequence
  primer
gtaaaacgacggccagtggcaagtaaagaagtgcatgtg

SEQ ID NO: 26308 - DNA, 25 bp, Artificial Sequence
  primer
ggtagtagatccagtcaaactgtcc

SEQ ID NO: 26309 - DNA, 25 bp, Artificial Sequence
  primer
tttccatgttaaagcaatataaggg

SEQ ID NO: 26310 - DNA, 38 bp, Artificial Sequence
  primer
gtaaaacgacggccagtagaagtgggtctttgcttggg

SEQ ID NO: 26311 - DNA, 41 bp, Artificial Sequence
  primer
gtaaaacgacggccagtgggtcagtgcatacattatctttc

SEQ ID NO: 26312 - DNA, 22 bp, Artificial Sequence
  primer
gcaatgcaataccgtttaggag

SEQ ID NO: 26313 - DNA, 37 bp, Artificial Sequence
  primer
gtaaaacgacggccagtcctgaactgatccaggaacc

SEQ ID NO: 26314 - DNA, 38 bp, Artificial Sequence
  primer
gtaaaacgacggccagtttctgaaggctttactggcct

SEQ ID NO: 26315 - DNA, 38 bp, Artificial Sequence
  primer
gtaaaacgacggccagtgcctgtgtgtttgttgtgaag

SEQ ID NO: 26316 - DNA, 22 bp, Artificial Sequence
  primer
cgtagccataccacctatggag

SEQ ID NO: 26317 - DNA, 21 bp, Artificial Sequence
  primer
tgttgcatgcttcagtaggtg

SEQ ID NO: 26318 - DNA, 21 bp, Artificial Sequence
  primer
gacactgagagtgcttcaccc

SEQ ID NO: 26319 - DNA, 25 bp, Artificial Sequence
  primer
ttagcttggcacttaggtaattctc

SEQ ID NO: 26320 - DNA, 23 bp, Artificial Sequence
  primer
tttcctgcacttaaagctcaatc

SEQ ID NO: 26321 - DNA, 40 bp, Artificial Sequence
  primer
gtaaaacgacggccagtctgagaacaactgcagatactgg

SEQ ID NO: 26322 - DNA, 38 bp, Artificial Sequence
  primer
gtaaaacgacggccagttttgctagacacacccagaaa

SEQ ID NO: 26323 - DNA, 21 bp, Artificial Sequence
  primer
tgactctggatggcaagactg

SEQ ID NO: 26324 - DNA, 25 bp, Artificial Sequence
  primer
tgaaataaccacagtacagagaggg

SEQ ID NO: 26325 - DNA, 20 bp, Artificial Sequence
  primer
tgggaagcattgaggacatt

SEQ ID NO: 26326 - DNA, 24 bp, Artificial Sequence
  primer
ggaaatggaagtaacaagaagctc

SEQ ID NO: 26327 - DNA, 22 bp, Artificial Sequence
  primer
aactgtgaggcaagatgaacaa

SEQ ID NO: 26328 - DNA, 21 bp, Artificial Sequence
  primer
tcctgctttctgtgtcattgc

SEQ ID NO: 26329 - DNA, 38 bp, Artificial Sequence
  primer
gtaaaacgacggccagtagctcagcaagtccacatagg

SEQ ID NO: 26330 - DNA, 21 bp, Artificial Sequence
  primer
caacggaagaagagaggaagg

SEQ ID NO: 26331 - DNA, 38 bp, Artificial Sequence
  primer
gtaaaacgacggccagtggtcaggttgtggctaatgaa

SEQ ID NO: 26332 - DNA, 26 bp, Artificial Sequence
  primer
tacattctcaataccactacactgaa

SEQ ID NO: 26333 - DNA, 23 bp, Artificial Sequence
  primer
tctatgcatgcctttatttcacc

SEQ ID NO: 26334 - DNA, 21 bp, Artificial Sequence
  primer
tcactgtagtggtgattcccg

SEQ ID NO: 26335 - DNA, 39 bp, Artificial Sequence
  primer
gtaaaacgacggccagtcggtctaatcaattctcaaggg

SEQ ID NO: 26336 - DNA, 23 bp, Artificial Sequence
  primer
aacactccaagactttctttccc

SEQ ID NO: 26337 - DNA, 38 bp, Artificial Sequence
  primer
gtaaaacgacggccagttgagaagtgaagactcgaggg

SEQ ID NO: 26338 - DNA, 38 bp, Artificial Sequence
  primer
gtaaaacgacggccagttgggaatggtttctgtttcag

SEQ ID NO: 26339 - DNA, 25 bp, Artificial Sequence
  primer
tccctatgtacttgaattgtgttgg

SEQ ID NO: 26340 - DNA, 21 bp, Artificial Sequence
  primer
tgctagggaaattcctcaatg

SEQ ID NO: 26341 - DNA, 37 bp, Artificial Sequence
  primer
gtaaaacgacggccagtgagacgcactgtatcctgcc

SEQ ID NO: 26342 - DNA, 20 bp, Artificial Sequence
  primer
ggaggagaggccgagttacc

SEQ ID NO: 26343 - DNA, 21 bp, Artificial Sequence
  primer
actgggtctggacttcaaagg

SEQ ID NO: 26344 - DNA, 38 bp, Artificial Sequence
  primer
gtaaaacgacggccagtctctcagaggccaaagacagg

SEQ ID NO: 26345 - DNA, 39 bp, Artificial Sequence
  primer
gtaaaacgacggccagttctctgagggtctcgtaggatg

SEQ ID NO: 26346 - DNA, 21 bp, Artificial Sequence
  primer
gaatctaagggtgccatgcag

SEQ ID NO: 26347 - DNA, 38 bp, Artificial Sequence
  primer
gtaaaacgacggccagtccctatctcctggactctggc

SEQ ID NO: 26348 - DNA, 20 bp, Artificial Sequence
  primer
ggccctaggaaatagggagg

SEQ ID NO: 26349 - DNA, 21 bp, Artificial Sequence
  primer
acctcgcctttctccatctac

SEQ ID NO: 26350 - DNA, 37 bp, Artificial Sequence
  primer
gtaaaacgacggccagtccacacagtgcatgctcaag

SEQ ID NO: 26351 - DNA, 21 bp, Artificial Sequence
  primer
tcacccaaagacatggtcatc

SEQ ID NO: 26352 - DNA, 20 bp, Artificial Sequence
  primer
ctgctcctgtgaccatcacc

SEQ ID NO: 26353 - DNA, 38 bp, Artificial Sequence
  primer
gtaaaacgacggccagtgcagcttggacagatagctcc

SEQ ID NO: 26354 - DNA, 38 bp, Artificial Sequence
  primer
gtaaaacgacggccagtgaagtacaattggccaaaccg

SEQ ID NO: 26355 - DNA, 38 bp, Artificial Sequence
  primer
gtaaaacgacggccagtagcactagagggagaggaccc

SEQ ID NO: 26356 - DNA, 21 bp, Artificial Sequence
  primer
aacacacaggtgagacttggg

SEQ ID NO: 26357 - DNA, 38 bp, Artificial Sequence
  primer
gtaaaacgacggccagttaaggcctctggacaaggaag

SEQ ID NO: 26358 - DNA, 20 bp, Artificial Sequence
  primer
cctgtgagagcagcttgagg

SEQ ID NO: 26359 - DNA, 38 bp, Artificial Sequence
  primer
gtaaaacgacggccagtggcaaacagaatctctcggtg

SEQ ID NO: 26360 - DNA, 38 bp, Artificial Sequence
  primer
gtaaaacgacggccagtgctatgtgtttgccattgacc

SEQ ID NO: 26361 - DNA, 38 bp, Artificial Sequence
  primer
gtaaaacgacggccagtgactctggacttcctggatgc

SEQ ID NO: 26362 - DNA, 37 bp, Artificial Sequence
  primer
gtaaaacgacggccagtggatgaggtaaggaggcagg

SEQ ID NO: 26363 - DNA, 21 bp, Artificial Sequence
  primer
cctagaccatgaacctcctgc

SEQ ID NO: 26364 - DNA, 20 bp, Artificial Sequence
  primer
gtagtctccacaggccctcc

SEQ ID NO: 26365 - DNA, 21 bp, Artificial Sequence
  primer
ttctcagtgaatggccaagtg

SEQ ID NO: 26366 - DNA, 38 bp, Artificial Sequence
  primer
gtaaaacgacggccagtgcaggtgtggaaataagcagg

SEQ ID NO: 26367 - DNA, 21 bp, Artificial Sequence
  primer
tctcaacacgtaggcatcacc

SEQ ID NO: 26368 - DNA, 38 bp, Artificial Sequence
  primer
gtaaaacgacggccagtagggaacctgcatctgttctg

SEQ ID NO: 26369 - DNA, 38 bp, Artificial Sequence
  primer
gtaaaacgacggccagtactgtgccaaacactgtcctg

SEQ ID NO: 26370 - DNA, 38 bp, Artificial Sequence
  primer
gtaaaacgacggccagtgagaatgacactgtgggcatc

SEQ ID NO: 26371 - DNA, 38 bp, Artificial Sequence
  primer
gtaaaacgacggccagtctcagaaggtatttgggcagg

SEQ ID NO: 26372 - DNA, 38 bp, Artificial Sequence
  primer
gtaaaacgacggccagtactctgaaccactggactgcc

SEQ ID NO: 26373 - DNA, 38 bp, Artificial Sequence
  primer
gtaaaacgacggccagttcaaaccagaaccatcagtgg

SEQ ID NO: 26374 - DNA, 21 bp, Artificial Sequence
  primer
gggtgtctttgtggtgagtcc

SEQ ID NO: 26375 - DNA, 38 bp, Artificial Sequence
  primer
gtaaaacgacggccagtccgttgcagatttccttaacc

SEQ ID NO: 26376 - DNA, 20 bp, Artificial Sequence
  primer
gggtctacgactgagggagg

SEQ ID NO: 26377 - DNA, 37 bp, Artificial Sequence
  primer
gtaaaacgacggccagtatcatcgactgcggaaactg

SEQ ID NO: 26378 - DNA, 20 bp, Artificial Sequence
  primer
gagacgcactgtatcctgcc

SEQ ID NO: 26379 - DNA, 21 bp, Artificial Sequence
  primer
ctacaacgcgacagtgaggag

SEQ ID NO: 26380 - DNA, 18 bp, Artificial Sequence
  primer
ctgctgctgctagaggcg

SEQ ID NO: 26381 - DNA, 38 bp, Artificial Sequence
  primer
gtaaaacgacggccagtatagtcccatgtgtgcgtgtg

SEQ ID NO: 26382 - DNA, 21 bp, Artificial Sequence
  primer
attcaccagaagcagtcatgg

SEQ ID NO: 26383 - DNA, 21 bp, Artificial Sequence
  primer
tttggtcaatggagaaatggg

SEQ ID NO: 26384 - DNA, 21 bp, Artificial Sequence
  primer
ctgtgcccaggtctaagtgag

SEQ ID NO: 26385 - DNA, 21 bp, Artificial Sequence
  primer
gcaagatggagtaccttgtgc

SEQ ID NO: 26386 - DNA, 38 bp, Artificial Sequence
  primer
gtaaaacgacggccagtcagcaaagtagagcagccttg

SEQ ID NO: 26387 - DNA, 38 bp, Artificial Sequence
  primer
gtaaaacgacggccagtaatggagtcattgccttcgac

SEQ ID NO: 26388 - DNA, 21 bp, Artificial Sequence
  primer
tttgtttgtgtgcgtacctcc

SEQ ID NO: 26389 - DNA, 38 bp, Artificial Sequence
  primer
gtaaaacgacggccagtctgacaatcattggtcttgcc

SEQ ID NO: 26390 - DNA, 38 bp, Artificial Sequence
  primer
gtaaaacgacggccagtgtcccaggtctcatgtctctg

SEQ ID NO: 26391 - DNA, 37 bp, Artificial Sequence
  primer
gtaaaacgacggccagtagccatgcatgtgatctgtg

SEQ ID NO: 26392 - DNA, 37 bp, Artificial Sequence
  primer
gtaaaacgacggccagttagagggcaagaaggcatgg

SEQ ID NO: 26393 - DNA, 21 bp, Artificial Sequence
  primer
cacatgctggaaagctcgtag

SEQ ID NO: 26394 - DNA, 38 bp, Artificial Sequence
  primer
gtaaaacgacggccagtctctgcaaatccaggacacac

SEQ ID NO: 26395 - DNA, 38 bp, Artificial Sequence
  primer
gtaaaacgacggccagtttaatggttggcctgagaagc

SEQ ID NO: 26396 - DNA, 38 bp, Artificial Sequence
  primer
gtaaaacgacggccagtaaggatcagtgccttgcattc

SEQ ID NO: 26397 - DNA, 21 bp, Artificial Sequence
  primer
ggaaggtaaagattgccctgg

SEQ ID NO: 26398 - DNA, 21 bp, Artificial Sequence
  primer
ctgaggatgcaagatgtccag

SEQ ID NO: 26399 - DNA, 25 bp, Artificial Sequence
  primer
ctgttaacctgatcatagtgtgtcc

SEQ ID NO: 26400 - DNA, 23 bp, Artificial Sequence
  primer
tgaagcagctgattgaacctaag

SEQ ID NO: 26401 - DNA, 22 bp, Artificial Sequence
  primer
gatgtctacccttaacccaccc

SEQ ID NO: 26402 - DNA, 38 bp, Artificial Sequence
  primer
gtaaaacgacggccagtctgattccaaggcaaaggaag

SEQ ID NO: 26403 - DNA, 37 bp, Artificial Sequence
  primer
gtaaaacgacggccagtcgcatgagaaagtagcctgc

SEQ ID NO: 26404 - DNA, 20 bp, Artificial Sequence
  primer
gcaatctgtgctcgtgtgtg

SEQ ID NO: 26405 - DNA, 38 bp, Artificial Sequence
  primer
gtaaaacgacggccagttttacctgatgaaggctgtcg

SEQ ID NO: 26406 - DNA, 21 bp, Artificial Sequence
  primer
agcatccacacctcagaggac

SEQ ID NO: 26407 - DNA, 41 bp, Artificial Sequence
  primer
gtaaaacgacggccagttctgtgagtgcaggtaaacttgag

SEQ ID NO: 26408 - DNA, 39 bp, Artificial Sequence
  primer
gtaaaacgacggccagtccttaagtagctcagtggcagc

SEQ ID NO: 26409 - DNA, 21 bp, Artificial Sequence
  primer
cgtggccttaaagcctagaac

SEQ ID NO: 26410 - DNA, 21 bp, Artificial Sequence
  primer
tgtggaagcattcacatctgc

SEQ ID NO: 26411 - DNA, 39 bp, Artificial Sequence
  primer
gtaaaacgacggccagttcaccgttgcacttgatgatag

SEQ ID NO: 26412 - DNA, 21 bp, Artificial Sequence
  primer
tcctcccactgataacccttg

SEQ ID NO: 26413 - DNA, 38 bp, Artificial Sequence
  primer
gtaaaacgacggccagtaagcgatgccaaagaatacag

SEQ ID NO: 26414 - DNA, 21 bp, Artificial Sequence
  primer
aaatcacagagcagcagaagc

SEQ ID NO: 26415 - DNA, 38 bp, Artificial Sequence
  primer
gtaaaacgacggccagttgctaccacccaggagagaag

SEQ ID NO: 26416 - DNA, 21 bp, Artificial Sequence
  primer
tcagtggtaaggaaacctggg

SEQ ID NO: 26417 - DNA, 21 bp, Artificial Sequence
  primer
ctgcaccatcatctaggtccc

SEQ ID NO: 26418 - DNA, 21 bp, Artificial Sequence
  primer
cacagcattcccacttacacg

SEQ ID NO: 26419 - DNA, 37 bp, Artificial Sequence
  primer
gtaaaacgacggccagtccttgggaattgcggtaaac

SEQ ID NO: 26420 - DNA, 36 bp, Artificial Sequence
  primer
gtaaaacgacggccagtacccaggactgagaggctg

SEQ ID NO: 26421 - DNA, 21 bp, Artificial Sequence
  primer
acccatatgtctacgcgtgtg

SEQ ID NO: 26422 - DNA, 38 bp, Artificial Sequence
  primer
gtaaaacgacggccagtagtaaaccaggctccatgtgc

SEQ ID NO: 26423 - DNA, 38 bp, Artificial Sequence
  primer
gtaaaacgacggccagtctgttgtgcatagtgtggctg

SEQ ID NO: 26424 - DNA, 21 bp, Artificial Sequence
  primer
ttgtgtagactctgatggccg

SEQ ID NO: 26425 - DNA, 36 bp, Artificial Sequence
  primer
gtaaaacgacggccagtcttaccagacacgcccacc

SEQ ID NO: 26426 - DNA, 38 bp, Artificial Sequence
  primer
gtaaaacgacggccagttccctagctccaaagctgttc

SEQ ID NO: 26427 - DNA, 38 bp, Artificial Sequence
  primer
gtaaaacgacggccagttgtgaaacctggcatagatgg

SEQ ID NO: 26428 - DNA, 21 bp, Artificial Sequence
  primer
gacctgcatgagtgtctttgc

SEQ ID NO: 26429 - DNA, 38 bp, Artificial Sequence
  primer
gtaaaacgacggccagtaatcatgtccttctggatggc

SEQ ID NO: 26430 - DNA, 21 bp, Artificial Sequence
  primer
tgagagaagccttccagatcc

SEQ ID NO: 26431 - DNA, 20 bp, Artificial Sequence
  primer
cgaagactgagaggcactgg

SEQ ID NO: 26432 - DNA, 39 bp, Artificial Sequence
  primer
gtaaaacgacggccagtccagtttccagagagtattcgg

SEQ ID NO: 26433 - DNA, 38 bp, Artificial Sequence
  primer
gtaaaacgacggccagtcgctggataattgatgtggtg

SEQ ID NO: 26434 - DNA, 38 bp, Artificial Sequence
  primer
gtaaaacgacggccagttaagtggcttcctcttccagg

SEQ ID NO: 26435 - DNA, 38 bp, Artificial Sequence
  primer
gtaaaacgacggccagtcaatcaatgatggaagcatgg

SEQ ID NO: 26436 - DNA, 38 bp, Artificial Sequence
  primer
gtaaaacgacggccagttgtatcaggtggaatttgccc

SEQ ID NO: 26437 - DNA, 21 bp, Artificial Sequence
  primer
tggtgaatgcctggaattatg

SEQ ID NO: 26438 - DNA, 21 bp, Artificial Sequence
  primer
gagaggatctgcctatgggtg

SEQ ID NO: 26439 - DNA, 21 bp, Artificial Sequence
  primer
tgaggccagaggtaaagaagg

SEQ ID NO: 26440 - DNA, 21 bp, Artificial Sequence
  primer
gtgggacctgtgcagacttag

SEQ ID NO: 26441 - DNA, 21 bp, Artificial Sequence
  primer
catgacttgcttcacccagac

SEQ ID NO: 26442 - DNA, 38 bp, Artificial Sequence
  primer
gtaaaacgacggccagttccctgaacttaggatgggag

SEQ ID NO: 26443 - DNA, 38 bp, Artificial Sequence
  primer
gtaaaacgacggccagtcagccttcctggaaagtcttc

SEQ ID NO: 26444 - DNA, 38 bp, Artificial Sequence
  primer
gtaaaacgacggccagtgagaattgctgggaagcattg

SEQ ID NO: 26445 - DNA, 38 bp, Artificial Sequence
  primer
gtaaaacgacggccagtgcaacttctccaaacacaacc

SEQ ID NO: 26446 - DNA, 21 bp, Artificial Sequence
  primer
tctgactcagtcctcccatcc

SEQ ID NO: 26447 - DNA, 38 bp, Artificial Sequence
  primer
gtaaaacgacggccagttgtaagttctgcccgtgtgag

SEQ ID NO: 26448 - DNA, 21 bp, Artificial Sequence
  primer
aagggttcagctggattatgc

SEQ ID NO: 26449 - DNA, 37 bp, Artificial Sequence; identical to SEQ ID NO: 26419
  primer

SEQ ID NO: 26450 - DNA, 21 bp, Artificial Sequence
  primer
gatgagggcttgactcgtctc

SEQ ID NO: 26451 - DNA, 38 bp, Artificial Sequence
  primer
gtaaaacgacggccagttgtcagggatactccagctcc

SEQ ID NO: 26452 - DNA, 21 bp, Artificial Sequence
  primer
ataggtgaccctgaagcatcg

SEQ ID NO: 26453 - DNA, 37 bp, Artificial Sequence
  primer
gtaaaacgacggccagtagaactgcctgaggagggac

SEQ ID NO: 26454 - DNA, 37 bp, Artificial Sequence
  primer
gtaaaacgacggccagtcttccctgccaccctaactc

SEQ ID NO: 26455 - DNA, 37 bp, Artificial Sequence
  primer
gtaaaacgacggccagtctgcctcctgaccctaaagc

SEQ ID NO: 26456 - DNA, 39 bp, Artificial Sequence
  primer
gtaaaacgacggccagtgggcctaagagaggtagcagtg

SEQ ID NO: 26457 - DNA, 35 bp, Artificial Sequence
  primer
gtaaaacgacggccagtagtggagagagcgggagg

SEQ ID NO: 26458 - DNA, 38 bp, Artificial Sequence
  primer
gtaaaacgacggccagtcaagcttggctgtagctctgg

SEQ ID NO: 26459 - DNA, 38 bp, Artificial Sequence
  primer
gtaaaacgacggccagttgtcttagcccttgtggtgtc

SEQ ID NO: 26460 - DNA, 21 bp, Artificial Sequence
  primer
gcccatgtccatacacatttc

SEQ ID NO: 26461 - DNA, 21 bp, Artificial Sequence
  primer
agaattggcagctccactcag

SEQ ID NO: 26462 - DNA, 21 bp, Artificial Sequence
  primer
tggactaggcctcaatggttg

SEQ ID NO: 26463 - DNA, 21 bp, Artificial Sequence
  primer
tccctgcgttctgtacttgtg

SEQ ID NO: 26464 - DNA, 21 bp, Artificial Sequence
  primer
gatccctacatctgggctctg

SEQ ID NO: 26465 - DNA, 38 bp, Artificial Sequence
  primer
gtaaaacgacggccagtttacagggaccttggaaccag

SEQ ID NO: 26466 - DNA, 21 bp, Artificial Sequence
  primer
ttgatggcaggtaagatcctg

SEQ ID NO: 26467 - DNA, 38 bp, Artificial Sequence
  primer
gtaaaacgacggccagtctccagaagtgttccctccac

SEQ ID NO: 26468 - DNA, 21 bp, Artificial Sequence
  primer
ccagggctgagagttatggag

SEQ ID NO: 26469 - DNA, 20 bp, Artificial Sequence
  primer
tgactctacccactgcaccc

SEQ ID NO: 26470 - DNA, 38 bp, Artificial Sequence
  primer
gtaaaacgacggccagtctcatgcctcttacctgggag

SEQ ID NO: 26471 - DNA, 21 bp, Artificial Sequence
  primer
ccagagcatggataggaaagg

SEQ ID NO: 26472 - DNA, 38 bp, Artificial Sequence
  primer
gtaaaacgacggccagtcagtcctcccagacttctccc

SEQ ID NO: 26473 - DNA, 35 bp, Artificial Sequence
  primer
gtaaaacgacggccagtcccagagccgatcagagc

SEQ ID NO: 26474 - DNA, 22 bp, Artificial Sequence
  primer
tggatttgtagagtcccaccag

SEQ ID NO: 26475 - DNA, 40 bp, Artificial Sequence
  primer
gtaaaacgacggccagtaagctaactgctgtgtcgatgag

SEQ ID NO: 26476 - DNA, 22 bp, Artificial Sequence
  primer
tgctttcaaagagaacaatggc

SEQ ID NO: 26477 - DNA, 39 bp, Artificial Sequence
  primer
gtaaaacgacggccagtggtcattgccatatttctctcg

SEQ ID NO: 26478 - DNA, 37 bp, Artificial Sequence
  primer
gtaaaacgacggccagtctccaggaatctccactggg

SEQ ID NO: 26479 - DNA, 27 bp, Artificial Sequence
  primer
cagtttcattagatttgattaccttgc

SEQ ID NO: 26480 - DNA, 21 bp, Artificial Sequence
  primer
gaacccaccaatctttgactg

SEQ ID NO: 26481 - DNA, 21 bp, Artificial Sequence
  primer
tttccagatgcaaagctcagg

SEQ ID NO: 26482 - DNA, 22 bp, Artificial Sequence
  primer
aacaaagtaaggcaggtgcaag

SEQ ID NO: 26483 - DNA, 38 bp, Artificial Sequence
  primer
gtaaaacgacggccagttggctgacctactcacctttc

SEQ ID NO: 26484 - DNA, 43 bp, Artificial Sequence
  primer
gtaaaacgacggccagtccagagaaaggagtcaataatgtacc

SEQ ID NO: 26485 - DNA, 39 bp, Artificial Sequence
  primer
gtaaaacgacggccagtgaagcaggagcaagtacaaagg

SEQ ID NO: 26486 - DNA, 38 bp, Artificial Sequence
  primer
gtaaaacgacggccagttgccactggatgttaccaaag

SEQ ID NO: 26487 - DNA, 21 bp, Artificial Sequence
  primer
ctgcctacgtagagccaaagg

SEQ ID NO: 26488 - DNA, 22 bp, Artificial Sequence
  primer
cattcagggatgtcaaacactg

SEQ ID NO: 26489 - DNA, 19 bp, Artificial Sequence
  primer
ctccgagcagctggtcttc

SEQ ID NO: 26490 - DNA, 38 bp, Artificial Sequence
  primer
gtaaaacgacggccagtcttggagatggagaaactggg

SEQ ID NO: 26491 - DNA, 21 bp, Artificial Sequence
  primer
gctaggtggaaacctgcactc

SEQ ID NO: 26492 - DNA, 38 bp, Artificial Sequence
  primer
gtaaaacgacggccagtccttcacattgaagagccagg

SEQ ID NO: 26493 - DNA, 21 bp, Artificial Sequence
  primer
acacatacacgtatgcccagc

SEQ ID NO: 26494 - DNA, 37 bp, Artificial Sequence
  primer
gtaaaacgacggccagtaagggtttgtggagggattg

SEQ ID NO: 26495 - DNA, 21 bp, Artificial Sequence
  primer
caggtgagtcaaggaagggac

SEQ ID NO: 26496 - DNA, 20 bp, Artificial Sequence
  primer
ctccgtccagggtgtgtatg

SEQ ID NO: 26497 - DNA, 38 bp, Artificial Sequence
  primer
gtaaaacgacggccagtaaacacagatttgatggcagg

SEQ ID NO: 26498 - DNA, 38 bp, Artificial Sequence
  primer
gtaaaacgacggccagtctccaattccttcctgtccac

SEQ ID NO: 26499 - DNA, 38 bp, Artificial Sequence
  primer
gtaaaacgacggccagtatgccacaagtggaagaaatg

SEQ ID NO: 26500 - DNA, 38 bp, Artificial Sequence
  primer
gtaaaacgacggccagtgcagtgatagagatgggtggg

SEQ ID NO: 26501 - DNA, 38 bp, Artificial Sequence
  primer
gtaaaacgacggccagtaagaatctcgcacctcaccag

SEQ ID NO: 26502 - DNA, 38 bp, Artificial Sequence
  primer
gtaaaacgacggccagtggtaggcgagtttccgagaag

SEQ ID NO: 26503 - DNA, 20 bp, Artificial Sequence
  primer
tccttcctcacacctcctcc

SEQ ID NO: 26504 - DNA, 36 bp, Artificial Sequence
  primer
gtaaaacgacggccagtgagtcgcggaggagacttg

SEQ ID NO: 26505 - DNA, 38 bp, Artificial Sequence
  primer
gtaaaacgacggccagtacaggaattgataaggcaggc

SEQ ID NO: 26506 - DNA, 38 bp, Artificial Sequence
  primer
gtaaaacgacggccagtaataaggcatggagtgtgtgc

SEQ ID NO: 26507 - DNA, 21 bp, Artificial Sequence
  primer
tcatttgagatccctctttgg

SEQ ID NO: 26508 - DNA, 39 bp, Artificial Sequence
  primer
gtaaaacgacggccagtggccaaagaaagctttgtactc

SEQ ID NO: 26509 - DNA, 38 bp, Artificial Sequence
  primer
gtaaaacgacggccagtgttctccaaagtgggcgatag

SEQ ID NO: 26510 - DNA, 38 bp, Artificial Sequence
  primer
gtaaaacgacggccagtaatgctccatttcagtgaccc

SEQ ID NO: 26511 - DNA, 21 bp, Artificial Sequence
  primer
agtacccttccctccctcctc

SEQ ID NO: 26512 - DNA, 40 bp, Artificial Sequence
  primer
gtaaaacgacggccagtggccaatgtttgttatactgtgg

SEQ ID NO: 26513 - DNA, 39 bp, Artificial Sequence
  primer
gtaaaacgacggccagtagccatctcagacgtttctacc

SEQ ID NO: 26514 - DNA, 38 bp, Artificial Sequence
  primer
gtaaaacgacggccagtaatactcagggccaagcagac

SEQ ID NO: 26515 - DNA, 39 bp, Artificial Sequence
  primer
gtaaaacgacggccagtgaaactgcccatatagcacctc

SEQ ID NO: 26516 - DNA, 42 bp, Artificial Sequence
  primer
gtaaaacgacggccagtgatattctaagcagatcattggtgc

SEQ ID NO: 26517 - DNA, 36 bp, Artificial Sequence
  primer
gtaaaacgacggccagtaagctcggcttgtcacctg

SEQ ID NO: 26518 - DNA, 38 bp, Artificial Sequence
  primer
gtaaaacgacggccagtagaatgacaccacgctctctg

SEQ ID NO: 26519 - DNA, 38 bp, Artificial Sequence
  primer
gtaaaacgacggccagtgtgcatggtgtggtccctaac

SEQ ID NO: 26520 - DNA, 20 bp, Artificial Sequence
  primer
cccatctagaacctgccttg

SEQ ID NO: 26521 - DNA, 23 bp, Artificial Sequence
  primer
gctttagtacttgcaccctcaca

SEQ ID NO: 26522 - DNA, 38 bp, Artificial Sequence
  primer
gtaaaacgacggccagtgtgattcaccaggcagatgtc

SEQ ID NO: 26523 - DNA, 38 bp, Artificial Sequence
  primer
gtaaaacgacggccagtattgcaaagcaacctctcctc

SEQ ID NO: 26524 - DNA, 38 bp, Artificial Sequence
  primer
gtaaaacgacggccagttactcagcgccttgtgaaatg

SEQ ID NO: 26525 - DNA, 38 bp, Artificial Sequence
  primer
gtaaaacgacggccagttgtacatatctgccaatgccg

SEQ ID NO: 26526 - DNA, 21 bp, Artificial Sequence
  primer
tgtactaggttacccggctgc

SEQ ID NO: 26527 - DNA, 38 bp, Artificial Sequence
  primer
gtaaaacgacggccagtctaccagcccaacaaccctac

SEQ ID NO: 26528 - DNA, 20 bp, Artificial Sequence
  primer
ctcttcctgtgctgccttcc

SEQ ID NO: 26529 - DNA, 21 bp, Artificial Sequence
  primer
ctaggtggttggatttcccag

SEQ ID NO: 26530 - DNA, 21 bp, Artificial Sequence
  primer
tcgcagaaattgtaggagtgg

SEQ ID NO: 26531 - DNA, 35 bp, Artificial Sequence
  primer
gtaaaacgacggccagtgagcggagagggaggagc

SEQ ID NO: 26532 - DNA, 21 bp, Artificial Sequence
  primer
gcatatctctcccggtgtagc

SEQ ID NO: 26533 - DNA, 21 bp, Artificial Sequence
  primer
aaggttcctgggagacatacg

SEQ ID NO: 26534 - DNA, 38 bp, Artificial Sequence
  primer
gtaaaacgacggccagttgggtctaacctctgcctctc

SEQ ID NO: 26535 - DNA, 21 bp, Artificial Sequence
  primer
tctttcattgtggctgagacc

SEQ ID NO: 26536 - DNA, 21 bp, Artificial Sequence
  primer
tatgcacagcagggtgagaac

SEQ ID NO: 26537 - DNA, 21 bp, Artificial Sequence
  primer
aacaggaccaaggatgcagag

SEQ ID NO: 26538 - DNA, 38 bp, Artificial Sequence
  primer
gtaaaacgacggccagttctttacccatccattgagcc

SEQ ID NO: 26539 - DNA, 38 bp, Artificial Sequence
  primer
gtaaaacgacggccagttagggtttggatccagctcag

SEQ ID NO: 26540 - DNA, 38 bp, Artificial Sequence
  primer
gtaaaacgacggccagtgccaggaacactcaactcagg

SEQ ID NO: 26541 - DNA, 20 bp, Artificial Sequence
  primer
ctgaattgcaaagggaggtg

SEQ ID NO: 26542 - DNA, 37 bp, Artificial Sequence
  primer
gtaaaacgacggccagtcactcgagctgtgtcctgtg

SEQ ID NO: 26543 - DNA, 19 bp, Artificial Sequence
  primer
aggactcggctctccctct

SEQ ID NO: 26544 - DNA, 19 bp, Artificial Sequence
  primer
ggatggcggagatgttcag

SEQ ID NO: 26545 - DNA, 38 bp, Artificial Sequence
  primer
gtaaaacgacggccagtactgtccagccctgagcttac

SEQ ID NO: 26546 - DNA, 21 bp, Artificial Sequence
  primer
catcttcctggttctgggttc

SEQ ID NO: 26547 - DNA, 38 bp, Artificial Sequence
  primer
gtaaaacgacggccagtgtcagtgtctctggctagggc

SEQ ID NO: 26548 - DNA, 19 bp, Artificial Sequence
  primer
acccttgggttaggccttg

SEQ ID NO: 26549 - DNA, 38 bp, Artificial Sequence
  primer
gtaaaacgacggccagtagagcagaggtcaaggaatgg

SEQ ID NO: 26550 - DNA, 38 bp, Artificial Sequence
  primer
gtaaaacgacggccagtgggcttcagggaagttagtcc

SEQ ID NO: 26551 - DNA, 36 bp, Artificial Sequence
  primer
gtaaaacgacggccagtggtcctgggataggaaggg

SEQ ID NO: 26552 - DNA, 18 bp, Artificial Sequence
  primer
tctgcctgcgctgtgaac

SEQ ID NO: 26553 - DNA, 22 bp, Artificial Sequence
  primer
gggaaacagaccagagaagttg

SEQ ID NO: 26554 - DNA, 38 bp, Artificial Sequence
  primer
gtaaaacgacggccagtaatcacagaactgtcgggagg

SEQ ID NO: 26555 - DNA, 21 bp, Artificial Sequence
  primer
tgtgttcacttctggcaggac

SEQ ID NO: 26556 - DNA, 21 bp, Artificial Sequence
  primer
ccgtcaacatctacatcgagc

SEQ ID NO: 26557 - DNA, 35 bp, Artificial Sequence
  primer
gtaaaacgacggccagtgtctgcgctcggtttgag

SEQ ID NO: 26558 - DNA, 26 bp, Artificial Sequence
  primer
tcagtaagttgaaatgagtgatacgc

SEQ ID NO: 26559 - DNA, 38 bp, Artificial Sequence
  primer
gtaaaacgacggccagtactgctttgaggctccatttc

SEQ ID NO: 26560 - DNA, 38 bp, Artificial Sequence
  primer
gtaaaacgacggccagtaccctgaaataaagccagcag

SEQ ID NO: 26561 - DNA, 39 bp, Artificial Sequence
  primer
gtaaaacgacggccagtaacacccgctttgtcttgatag

SEQ ID NO: 26562 - DNA, 38 bp, Artificial Sequence
  primer
gtaaaacgacggccagttccctctacttcctgccagtg

SEQ ID NO: 26563 - DNA, 38 bp, Artificial Sequence
  primer
gtaaaacgacggccagtacgtggttccagtggagtttg

SEQ ID NO: 26564 - DNA, 19 bp, Artificial Sequence
  primer
ctctcctcccaaccttccc

SEQ ID NO: 26565 - DNA, 22 bp, Artificial Sequence
  primer
tggctgaatatagggtctgtgg

SEQ ID NO: 26566 - DNA, 38 bp, Artificial Sequence
  primer
gtaaaacgacggccagttctggaatggaagtgcttctg

SEQ ID NO: 26567 - DNA, 38 bp, Artificial Sequence
  primer
gtaaaacgacggccagtaatcaaaggaggctttgaagg

SEQ ID NO: 26568 - DNA, 21 bp, Artificial Sequence
  primer
gggtggaagatctatcccttg

SEQ ID NO: 26569 - DNA, 21 bp, Artificial Sequence
  primer
tgagaacaggagatcggtgag

SEQ ID NO: 26570 - DNA, 38 bp, Artificial Sequence
  primer
gtaaaacgacggccagtaacagcttgcctttcttcagg

SEQ ID NO: 26571 - DNA, 21 bp, Artificial Sequence
  primer
ctgttgaaaggaactccaggg

SEQ ID NO: 26572 - DNA, 37 bp, Artificial Sequence
  primer
gtaaaacgacggccagtagaagggctaaggttgcagg

SEQ ID NO: 26573 - DNA, 42 bp, Artificial Sequence
  primer
gtaaaacgacggccagtggtcactgtgggttattaaactttg

SEQ ID NO: 26574 - DNA, 19 bp, Artificial Sequence
  primer
cgtgagccactatgcccag

SEQ ID NO: 26575 - DNA, 21 bp, Artificial Sequence
  primer
tgtccctcagacccaggttag

SEQ ID NO: 26576 - DNA, 21 bp, Artificial Sequence
  primer
cagtccctggagtacaagctg

SEQ ID NO: 26577 - DNA, 20 bp, Artificial Sequence
  primer
gacattggcctggatttgtg

SEQ ID NO: 26578 - DNA, 38 bp, Artificial Sequence
  primer
gtaaaacgacggccagtttgtgaaacaccatgaatccc

SEQ ID NO: 26579 - DNA, 38 bp, Artificial Sequence
  primer
gtaaaacgacggccagtagcagctacttacgctcaggc

SEQ ID NO: 26580 - DNA, 37 bp, Artificial Sequence
  primer
gtaaaacgacggccagtaggcttctgaccttggttcc

SEQ ID NO: 26581 - DNA, 38 bp, Artificial Sequence
  primer
gtaaaacgacggccagtgggctttggcttagtttctcc

SEQ ID NO: 26582 - DNA, 37 bp, Artificial Sequence
  primer
gtaaaacgacggccagtcagtgagcaggaaggctcag

SEQ ID NO: 26583 - DNA, 20 bp, Artificial Sequence
  primer
ggtatcagccagcctcagtg

SEQ ID NO: 26584 - DNA, 21 bp, Artificial Sequence
  primer
cagcagaatcataggcaccag

SEQ ID NO: 26585 - DNA, 39 bp, Artificial Sequence
  primer
gtaaaacgacggccagtggacggagaggaagagtctagg

SEQ ID NO: 26586 - DNA, 21 bp, Artificial Sequence
  primer
tactgtgtccgtctctgctgg

SEQ ID NO: 26587 - DNA, 38 bp, Artificial Sequence
  primer
gtaaaacgacggccagtggtatcagaatccaggagggc

SEQ ID NO: 26588 - DNA, 38 bp, Artificial Sequence
  primer
gtaaaacgacggccagtaccctatgggtcctcagtctc

SEQ ID NO: 26589 - DNA, 38 bp, Artificial Sequence
  primer
gtaaaacgacggccagttacagagggagagatggtggg

SEQ ID NO: 26590 - DNA, 36 bp, Artificial Sequence
  primer
gtaaaacgacggccagtgagccaccatgtccagctc

SEQ ID NO: 26591 - DNA, 21 bp, Artificial Sequence
  primer
gtattggagacccatatgccc

SEQ ID NO: 26592 - DNA, 38 bp, Artificial Sequence
  primer
gtaaaacgacggccagtggtagcagtgaggattcaggg

SEQ ID NO: 26593 - DNA, 38 bp, Artificial Sequence
  primer
gtaaaacgacggccagtggccattgggactttgtgtag

SEQ ID NO: 26594 - DNA, 38 bp, Artificial Sequence
  primer
gtaaaacgacggccagtaggaggttgttggaagtgcag

SEQ ID NO: 26595 - DNA, 21 bp, Artificial Sequence
  primer
ccagggttagagaccatgctg

SEQ ID NO: 26596 - DNA, 21 bp, Artificial Sequence
  primer
tgtccttgctgacatctaccc

SEQ ID NO: 26597 - DNA, 21 bp, Artificial Sequence
  primer
attgcttgaacccagaaggtc

SEQ ID NO: 26598 - DNA, 38 bp, Artificial Sequence
  primer
gtaaaacgacggccagtctcttgcctaggatgcctttg

SEQ ID NO: 26599 - DNA, 37 bp, Artificial Sequence
  primer
gtaaaacgacggccagtctgacacacactcacctcgg

SEQ ID NO: 26600 - DNA, 21 bp, Artificial Sequence
  primer
aacatatcctgtccgtccagc

SEQ ID NO: 26601 - DNA, 37 bp, Artificial Sequence
  primer
gtaaaacgacggccagtgtgcagaagggtcctcacag

SEQ ID NO: 26602 - DNA, 20 bp, Artificial Sequence
  primer
ccagcctgggtactgagatg

SEQ ID NO: 26603 - DNA, 21 bp, Artificial Sequence
  primer
atcaaggaggccttcattctg

SEQ ID NO: 26604 - DNA, 38 bp, Artificial Sequence
  primer
gtaaaacgacggccagtaagcaggtgagaccctcacag

SEQ ID NO: 26605 - DNA, 38 bp, Artificial Sequence
  primer
gtaaaacgacggccagtagtggagcccagacttgtgtc

SEQ ID NO: 26606 - DNA, 21 bp, Artificial Sequence
  primer
ggtgcagcatcagagtcagag

SEQ ID NO: 26607 - DNA, 19 bp, Artificial Sequence
  primer
ggctcgcaattgattctcc

SEQ ID NO: 26608 - DNA, 19 bp, Artificial Sequence
  primer
acatgctggacccttcgtc

SEQ ID NO: 26609 - DNA, 37 bp, Artificial Sequence
  primer
gtaaaacgacggccagtaatgggtctggcatcttcag

SEQ ID NO: 26610 - DNA, 19 bp, Artificial Sequence
  primer
gatgcacgtgaggtggact

SEQ ID NO: 26611 - DNA, 21 bp, Artificial Sequence
  primer
cactcagactggatttgtcgg

SEQ ID NO: 26612 - DNA, 37 bp, Artificial Sequence
  primer
gtaaaacgacggccagtgccatgggacaaagaccttc

SEQ ID NO: 26613 - DNA, 38 bp, Artificial Sequence
  primer
gtaaaacgacggccagtcccagcatgactggtacaaac

SEQ ID NO: 26614 - DNA, 38 bp, Artificial Sequence
  primer
gtaaaacgacggccagtgtgacagctaatgctgccttg

SEQ ID NO: 26615 - DNA, 42 bp, Artificial Sequence
  primer
gtaaaacgacggccagtttgttcaagtcactccactactcag

SEQ ID NO: 26616 - DNA, 38 bp, Artificial Sequence
  primer
gtaaaacgacggccagtgtaccaagcttcacggcaaag

SEQ ID NO: 26617 - DNA, 20 bp, Artificial Sequence
  primer
cagccactcagtccagatcc

SEQ ID NO: 26618 - DNA, 38 bp, Artificial Sequence
  primer
gtaaaacgacggccagtttcaaaggctgagtccagttg

SEQ ID NO: 26619 - DNA, 21 bp, Artificial Sequence
  primer
gtgatgcaagttgacaatggg

SEQ ID NO: 26620 - DNA, 38 bp, Artificial Sequence
  primer
gtaaaacgacggccagttcccaactctagcagctctcc

SEQ ID NO: 26621 - DNA, 38 bp, Artificial Sequence
  primer
gtaaaacgacggccagtaaatggacagtttcctcctgc

SEQ ID NO: 26622 - DNA, 21 bp, Artificial Sequence
  primer
cagacatttgcagagtccctc

SEQ ID NO: 26623 - DNA, 38 bp, Artificial Sequence
  primer
gtaaaacgacggccagtcaatgctttgcaattctggtg

SEQ ID NO: 26624 - DNA, 24 bp, Artificial Sequence
  primer
aattacatggcacttaacatttgc

SEQ ID NO: 26625 - DNA, 38 bp, Artificial Sequence
  primer
gtaaaacgacggccagtggctggaattcacgtcttatg

SEQ ID NO: 26626 - DNA, 24 bp, Artificial Sequence
  primer
caatcaatcatctgtgtgtgtgtg

SEQ ID NO: 26627 - DNA, 38 bp, Artificial Sequence
  primer
gtaaaacgacggccagtagctgctgtttgccttctagc

SEQ ID NO: 26628 - DNA, 39 bp, Artificial Sequence
  primer
gtaaaacgacggccagtgggaacacatgtgaagtcattg

SEQ ID NO: 26629 - DNA, 21 bp, Artificial Sequence
  primer
agaagcatcgaaagccttgag

SEQ ID NO: 26630 - DNA, 21 bp, Artificial Sequence
  primer
tctattcctttctccgaaggc

SEQ ID NO: 26631 - DNA, 40 bp, Artificial Sequence
  primer
gtaaaacgacggccagtggatacagcattgagcagtgaac

SEQ ID NO: 26632 - DNA, 38 bp, Artificial Sequence
  primer
gtaaaacgacggccagtaagcatctcagggtgtgtgag

SEQ ID NO: 26633 - DNA, 38 bp, Artificial Sequence
  primer
gtaaaacgacggccagtacattgcctgctctctctctg

SEQ ID NO: 26634 - DNA, 21 bp, Artificial Sequence
  primer
agctgaaggtcagtgctctcc

SEQ ID NO: 26635 - DNA, 21 bp, Artificial Sequence
  primer
gtgatgcaagttgacaatggg

SEQ ID NO: 26636 - DNA, 22 bp, Artificial Sequence
  primer
catggtcacaatctctctcgtg

SEQ ID NO: 26637 - DNA, 38 bp, Artificial Sequence
  primer
gtaaaacgacggccagtcctggtggtaggaaacactcc

SEQ ID NO: 26638 - DNA, 18 bp, Artificial Sequence
  primer
ctggaagaggaaagccgc

SEQ ID NO: 26639 - DNA, 26 bp, Artificial Sequence
  primer
gatggaggtctaaccattagaacaag

SEQ ID NO: 26640 - DNA, 38 bp, Artificial Sequence
  primer
gtaaaacgacggccagtctggattgctgaaagcaagtg

SEQ ID NO: 26641 - DNA, 38 bp, Artificial Sequence
  primer
gtaaaacgacggccagtgactgcctcagtctgtgggtc

SEQ ID NO: 26642 - DNA, 29 bp, Artificial Sequence
  primer
gagagtgttgtaatttctaagacagtgaa

SEQ ID NO: 26643 - DNA, 41 bp, Artificial Sequence
  primer
gtaaaacgacggccagttccttattacagttcatgctgctg

SEQ ID NO: 26644 - DNA, 21 bp, Artificial Sequence
  primer
atggagacacatctccttggg

SEQ ID NO: 26645 - DNA, 24 bp, Artificial Sequence
  primer
tttattggatacatttgggtgttg

SEQ ID NO: 26646 - DNA, 37 bp, Artificial Sequence
  primer
gtaaaacgacggccagtgcctttagcaggctggtctc

SEQ ID NO: 26647 - DNA, 21 bp, Artificial Sequence
  primer
ctgacaaacgaaaggtgcttg

SEQ ID NO: 26648 - DNA, 43 bp, Artificial Sequence
  primer
gtaaaacgacggccagttttaactgctaatatcaaagccattc

SEQ ID NO: 26649 - DNA, 41 bp, Artificial Sequence
  primer
gtaaaacgacggccagtgctgaactcttggcatcatatttc

SEQ ID NO: 26650 - DNA, 20 bp, Artificial Sequence
  primer
gtgcgttcaggaaagcaaat

SEQ ID NO: 26651 - DNA, 21 bp, Artificial Sequence
  primer
ttccattccattcattctggg

SEQ ID NO: 26652 - DNA, 40 bp, Artificial Sequence
  primer
gtaaaacgacggccagtcatggttcttcattaatgccaag

SEQ ID NO: 26653 - DNA, 21 bp, Artificial Sequence
  primer
attgcagacccattacatccc

SEQ ID NO: 26654 - DNA, 21 bp, Artificial Sequence
  primer
cagttccctgtcattgctttg

SEQ ID NO: 26655 - DNA, 39 bp, Artificial Sequence
  primer
gtaaaacgacggccagtttcattcctcagtgccaaatct

SEQ ID NO: 26656 - DNA, 21 bp, Artificial Sequence
  primer
acataccacctgccaggagaa

SEQ ID NO: 26657 - DNA, 20 bp, Artificial Sequence
  primer
tcactgatggcaattgatgc

SEQ ID NO: 26658 - DNA, 38 bp, Artificial Sequence
  primer
gtaaaacgacggccagtcactgccacactgcttactcc

SEQ ID NO: 26659 - DNA, 38 bp, Artificial Sequence
  primer
gtaaaacgacggccagtttgttgagagtggtgattggg

SEQ ID NO: 26660 - DNA, 38 bp, Artificial Sequence
  primer
gtaaaacgacggccagtaagtgttgactgggtggatca

SEQ ID NO: 26661 - DNA, 38 bp, Artificial Sequence
  primer
gtaaaacgacggccagtttcaggaattgtttgtcctgc

SEQ ID NO: 26662 - DNA, 38 bp, Artificial Sequence
  primer
gtaaaacgacggccagttttgtgcgatggaagaaattg

SEQ ID NO: 26663 - DNA, 21 bp, Artificial Sequence
  primer
tggcctttcaagatagccatt

SEQ ID NO: 26664 - DNA, 22 bp, Artificial Sequence
  primer
gacttcaagtgctgatctgtgg

SEQ ID NO: 26665 - DNA, 38 bp, Artificial Sequence
  primer
gtaaaacgacggccagttgaacctatcagtggattccc

SEQ ID NO: 26666 - DNA, 23 bp, Artificial Sequence
  primer
cacaaacccagtgctttagaatg

SEQ ID NO: 26667 - DNA, 41 bp, Artificial Sequence; identical to SEQ ID NO: 26649
  primer

SEQ ID NO: 26668 - DNA, 21 bp, Artificial Sequence
  primer
cagttccctgtcattgctttg

SEQ ID NO: 26669 - DNA, 38 bp, Artificial Sequence
  primer
gtaaaacgacggccagttgggatggcaagaaagagaag

SEQ ID NO: 26670 - DNA, 39 bp, Artificial Sequence; identical to SEQ ID NO: 26655
  primer

SEQ ID NO: 26671 - DNA, 38 bp, Artificial Sequence
  primer
gtaaaacgacggccagttagagcacctgcctcttcaac

SEQ ID NO: 26672 - DNA, 25 bp, Artificial Sequence
  primer
tttcttaatgagaagagggataggg

SEQ ID NO: 26673 - DNA, 36 bp, Artificial Sequence
  primer
gtaaaacgacggccagtgagccaaatacatgctggg

SEQ ID NO: 26674 - DNA, 39 bp, Artificial Sequence
  primer
gtaaaacgacggccagtttaccatcccaagttcatggtc

SEQ ID NO: 26675 - DNA, 20 bp, Artificial Sequence
  primer
ataggcatgagccactacgc

SEQ ID NO: 26676 - DNA, 42 bp, Artificial Sequence
  primer
gtaaaacgacggccagtgcatttcaagatcatgctattaagg

SEQ ID NO: 26677 - DNA, 38 bp, Artificial Sequence
  primer
gtaaaacgacggccagtattcagccagttgacaccatc

SEQ ID NO: 26678 - DNA, 21 bp, Artificial Sequence
  primer
ctgctgtgctgttaggtgctg

SEQ ID NO: 26679 - DNA, 38 bp, Artificial Sequence
  primer
gtaaaacgacggccagttgtcgggagaactgtgagatg

SEQ ID NO: 26680 - DNA, 38 bp, Artificial Sequence
  primer
gtaaaacgacggccagtcattgcagaatttggaagagg

SEQ ID NO: 26681 - DNA, 21 bp, Artificial Sequence
  primer
gctttggacttgttgaaacgg

SEQ ID NO: 26682 - DNA, 36 bp, Artificial Sequence
  primer
gtaaaacgacggccagtttgagaactgtcgcccaag

SEQ ID NO: 26683 - DNA, 42 bp, Artificial Sequence
  primer
gtaaaacgacggccagttgattggcttacttattgaaaggag

SEQ ID NO: 26684 - DNA, 40 bp, Artificial Sequence
  primer
gtaaaacgacggccagttccagccactgataatctctttg

SEQ ID NO: 26685 - DNA, 22 bp, Artificial Sequence
  primer
catgattaatgggcgtgttatc

SEQ ID NO: 26686 - DNA, 23 bp, Artificial Sequence
  primer
gctaggaaagaatcccaagtttc

SEQ ID NO: 26687 - DNA, 22 bp, Artificial Sequence
  primer
aaataatggcaacttgctcacc

SEQ ID NO: 26688 - DNA, 18 bp, Artificial Sequence
  primer
gaacctgggaggcagagc

SEQ ID NO: 26689 - DNA, 21 bp, Artificial Sequence
  primer
aatactgagaactgggtgcgg

SEQ ID NO: 26690 - DNA, 38 bp, Artificial Sequence
  primer
gtaaaacgacggccagtgggtcgccagaaagataactg

SEQ ID NO: 26691 - DNA, 25 bp, Artificial Sequence
  primer
tcatgattacaactctttcatttgg

SEQ ID NO: 26692 - DNA, 21 bp, Artificial Sequence
  primer
ctaagcagcaggtaatggcag

SEQ ID NO: 26693 - DNA, 38 bp, Artificial Sequence
  primer
gtaaaacgacggccagtagcagctgaagtcctgtgagg

SEQ ID NO: 26694 - DNA, 22 bp, Artificial Sequence
  primer
ccaggaggacaacctggtttag

SEQ ID NO: 26695 - DNA, 40 bp, Artificial Sequence
  primer
gtaaaacgacggccagtgcaatggacacattacagaattg

SEQ ID NO: 26696 - DNA, 22 bp, Artificial Sequence
  primer
tgggaagctggaattaactgag

SEQ ID NO: 26697 - DNA, 21 bp, Artificial Sequence
  primer
ggagacttgtcaagggaaaca

SEQ ID NO: 26698 - DNA, 37 bp, Artificial Sequence
  primer
gtaaaacgacggccagtgccaagtatgcagttgggag

SEQ ID NO: 26699 - DNA, 37 bp, Artificial Sequence
  primer
gtaaaacgacggccagtggttctggcctaaatcaggg

SEQ ID NO: 26700 - DNA, 38 bp, Artificial Sequence
  primer
gtaaaacgacggccagtagcgtatataagggcagcgtg

SEQ ID NO: 26701 - DNA, 21 bp, Artificial Sequence
  primer
ggatctctaggtgcaaatgcc

SEQ ID NO: 26702 - DNA, 38 bp, Artificial Sequence
  primer
gtaaaacgacggccagtgcaaatgatttccaagcttcc

SEQ ID NO: 26703 - DNA, 21 bp, Artificial Sequence
  primer
tctttccctttgaaggactgc

SEQ ID NO: 26704 - DNA, 38 bp, Artificial Sequence
  primer
gtaaaacgacggccagtctccatcccattccgatattc

SEQ ID NO: 26705 - DNA, 21 bp, Artificial Sequence
  primer
ggccctgagtcatagaactgg

SEQ ID NO: 26706 - DNA, 38 bp, Artificial Sequence
  primer
gtaaaacgacggccagtagaggagcagtgaacgagtcc

SEQ ID NO: 26707 - DNA, 37 bp, Artificial Sequence
  primer
gtaaaacgacggccagtaccgtcaacacctcaccttg

SEQ ID NO: 26708 - DNA, 20 bp, Artificial Sequence
  primer
caccacacagaccacacacc

SEQ ID NO: 26709 - DNA, 38 bp, Artificial Sequence
  primer
gtaaaacgacggccagttgcacagagtaatggagaggc

SEQ ID NO: 26710 - DNA, 38 bp, Artificial Sequence
  primer
gtaaaacgacggccagtttgtgtttgtgaatgtggacg

SEQ ID NO: 26711 - DNA, 38 bp, Artificial Sequence
  primer
gtaaaacgacggccagtggataggagccaaggtctgtg

SEQ ID NO: 26712 - DNA, 37 bp, Artificial Sequence
  primer
gtaaaacgacggccagtaggaagcctggctgcttatc

SEQ ID NO: 26713 - DNA, 37 bp, Artificial Sequence
  primer
gtaaaacgacggccagtccctgcctggtctaaccttc

SEQ ID NO: 26714 - DNA, 21 bp, Artificial Sequence
  primer
ggctcaggcagctgaagtaac

SEQ ID NO: 26715 - DNA, 38 bp, Artificial Sequence
  primer
gtaaaacgacggccagtaagaagcagagaccaggaagc

SEQ ID NO: 26716 - DNA, 21 bp, Artificial Sequence
  primer
aggtggtgtgtcgaagtgttg

SEQ ID NO: 26717 - DNA, 22 bp, Artificial Sequence
  primer
tttagggtgtcttgggatgttg

SEQ ID NO: 26718 - DNA, 25 bp, Artificial Sequence
  primer
tgtgccagtagaatttgtagatgaa

SEQ ID NO: 26719 - DNA, 39 bp, Artificial Sequence
  primer
gtaaaacgacggccagttcgtcttgggatcaatcttctc

SEQ ID NO: 26720 - DNA, 38 bp, Artificial Sequence
  primer
gtaaaacgacggccagttgcctacttcacatggctttg

SEQ ID NO: 26721 - DNA, 27 bp, Artificial Sequence
  primer
ggtacttcatctcaaggaactttattc

SEQ ID NO: 26722 - DNA, 24 bp, Artificial Sequence
  primer
gaggagaccagccttactttcttc

SEQ ID NO: 26723 - DNA, 21 bp, Artificial Sequence
  primer
tacagatgcttgggaaactgc

SEQ ID NO: 26724 - DNA, 38 bp, Artificial Sequence
  primer
gtaaaacgacggccagtgacagatgcactcaatttgcc

SEQ ID NO: 26725 - DNA, 38 bp, Artificial Sequence
  primer
gtaaaacgacggccagtagggccgtgtacttcaatgac

SEQ ID NO: 26726 - DNA, 38 bp, Artificial Sequence
  primer
gtaaaacgacggccagtacatttgttgctcacactgga

SEQ ID NO: 26727 - DNA, 21 bp, Artificial Sequence
  primer
gtccttctagccaaacgatgg

SEQ ID NO: 26728 - DNA, 38 bp, Artificial Sequence
  primer
gtaaaacgacggccagtatacacagcccagccctttag

SEQ ID NO: 26729 - DNA, 38 bp, Artificial Sequence
  primer
gtaaaacgacggccagtcactaggccttggtgacagag

SEQ ID NO: 26730 - DNA, 21 bp, Artificial Sequence
  primer
tcttccagtacatcaccgcac

SEQ ID NO: 26731 - DNA, 41 bp, Artificial Sequence
  primer
gtaaaacgacggccagttttactccacatcagtgtgaaacc

SEQ ID NO: 26732 - DNA, 21 bp, Artificial Sequence
  primer
tcaggactttgatccatcagg

SEQ ID NO: 26733 - DNA, 21 bp, Artificial Sequence
  primer
gaacttctgcatgtgtgggat

SEQ ID NO: 26734 - DNA, 21 bp, Artificial Sequence
  primer
gatcagctgctatgaattggg

SEQ ID NO: 26735 - DNA, 22 bp, Artificial Sequence
  primer
gaatgttccatgtttcctgagc

SEQ ID NO: 26736 - DNA, 24 bp, Artificial Sequence
  primer
ttaagctctgaagtccactgattc

SEQ ID NO: 26737 - DNA, 38 bp, Artificial Sequence
  primer
gtaaaacgacggccagtaggatttccactgattcctgc

SEQ ID NO: 26738 - DNA, 25 bp, Artificial Sequence
  primer
ttggagatacttgaataatgcttct

SEQ ID NO: 26739 - DNA, 38 bp, Artificial Sequence
  primer
gtaaaacgacggccagtttatgcacttccaggtatggc

SEQ ID NO: 26740 - DNA, 42 bp, Artificial Sequence
  primer
gtaaaacgacggccagtttctccaagacctatttaattgtgc

SEQ ID NO: 26741 - DNA, 21 bp, Artificial Sequence
  primer
aatgacaaatgggaaagaggg

SEQ ID NO: 26742 - DNA, 37 bp, Artificial Sequence
  primer
gtaaaacgacggccagtctgttcctgccaagaggttg

SEQ ID NO: 26743 - DNA, 38 bp, Artificial Sequence
  primer
gtaaaacgacggccagtctgggtagcacaggctgtatg

SEQ ID NO: 26744 - DNA, 38 bp, Artificial Sequence
  primer
gtaaaacgacggccagtgcacaggctgtatgaatgctg

SEQ ID NO: 26745 - DNA, 40 bp, Artificial Sequence
  primer
gtaaaacgacggccagtggctaaaggaccatagctcattc

SEQ ID NO: 26746 - DNA, 18 bp, Artificial Sequence
  primer
gatgcagaagccgcagac

SEQ ID NO: 26747 - DNA, 39 bp, Artificial Sequence
  primer
gtaaaacgacggccagttctccaactgtgctctctctcc

SEQ ID NO: 26748 - DNA, 39 bp, Artificial Sequence
  primer
gtaaaacgacggccagttcggtgtgtttaacaggttcag

SEQ ID NO: 26749 - DNA, 19 bp, Artificial Sequence
  primer
atgatattggcctgggctg

SEQ ID NO: 26750 - DNA, 38 bp, Artificial Sequence
  primer
gtaaaacgacggccagtcacaacaaatggtgtcccaac

SEQ ID NO: 26751 - DNA, 38 bp, Artificial Sequence
  primer
gtaaaacgacggccagtaaatgtccacccttggagttg

SEQ ID NO: 26752 - DNA, 38 bp, Artificial Sequence
  primer
gtaaaacgacggccagtgctgatggtcctttcaattcc

SEQ ID NO: 26753 - DNA, 38 bp, Artificial Sequence
  primer
gtaaaacgacggccagtaaccatctgcctgaaacactg

SEQ ID NO: 26754 - DNA, 38 bp, Artificial Sequence; identical to SEQ ID NO: 26743
  primer

SEQ ID NO: 26755 - DNA, 38 bp, Artificial Sequence
  primer
gtaaaacgacggccagtacagatgcaagtctgtcgctc

SEQ ID NO: 26756 - DNA, 20 bp, Artificial Sequence
  primer
agagagggcaaggttggaag

SEQ ID NO: 26757 - DNA, 38 bp, Artificial Sequence
  primer
gtaaaacgacggccagttgaacgagcaagaattgaagc

SEQ ID NO: 26758 - DNA, 19 bp, Artificial Sequence
  primer
agcagaggagaggcaaagg

SEQ ID NO: 26759 - DNA, 21 bp, Artificial Sequence
  primer
cccaccttgctgtttagaacc

SEQ ID NO: 26760 - DNA, 19 bp, Artificial Sequence
  primer
cagtggtgctgggagtgtc

SEQ ID NO: 26761 - DNA, 39 bp, Artificial Sequence
  primer
gtaaaacgacggccagtgaccgtgctacaggtttcaaag

SEQ ID NO: 26762 - DNA, 21 bp, Artificial Sequence
  primer
ctgctgtatgaaggccagtcc

SEQ ID NO: 26763 - DNA, 21 bp, Artificial Sequence
  primer
taccgttccgtacagtggttc

SEQ ID NO: 26764 - DNA, 39 bp, Artificial Sequence
  primer
gtaaaacgacggccagttttatggcagcagagttagcag

SEQ ID NO: 26765 - DNA, 38 bp, Artificial Sequence
  primer
gtaaaacgacggccagttgtaagcaagccaactgcttc

SEQ ID NO: 26766 - DNA, 21 bp, Artificial Sequence
  primer
acccacttacgtcatccgttc

SEQ ID NO: 26767 - DNA, 38 bp, Artificial Sequence
  primer
gtaaaacgacggccagttccagatgtgtttgttgctgg

SEQ ID NO: 26768 - DNA, 37 bp, Artificial Sequence
  primer
gtaaaacgacggccagtgatcccaccactgagtaggc

SEQ ID NO: 26769 - DNA, 38 bp, Artificial Sequence
  primer
gtaaaacgacggccagtcaacaaaggaattgggaactg

SEQ ID NO: 26770 - DNA, 21 bp, Artificial Sequence
  primer
gaggtgtcacttgactttggg

SEQ ID NO: 26771 - DNA, 22 bp, Artificial Sequence
  primer
ttctgaggaaagagaggaatgg

SEQ ID NO: 26772 - DNA, 35 bp, Artificial Sequence
  primer
gtaaaacgacggccagtcgggcagtgagtgtggag

SEQ ID NO: 26773 - DNA, 38 bp, Artificial Sequence
  primer
gtaaaacgacggccagtgactttatcatcaggcgctgg

SEQ ID NO: 26774 - DNA, 38 bp, Artificial Sequence
  primer
gtaaaacgacggccagtatccagcatccagaggtaagg

SEQ ID NO: 26775 - DNA, 38 bp, Artificial Sequence
  primer
gtaaaacgacggccagtctctcagggtgatggatgagc

SEQ ID NO: 26776 - DNA, 20 bp, Artificial Sequence
  primer
cacggagctaccacttccag

SEQ ID NO: 26777 - DNA, 38 bp, Artificial Sequence
  primer
gtaaaacgacggccagtgagaatcgcagcttcaggaac

SEQ ID NO: 26778 - DNA, 21 bp, Artificial Sequence
  primer
tgcttcttaagctccagcgtc

SEQ ID NO: 26779 - DNA, 21 bp, Artificial Sequence
  primer
gggacatgatgagtgagatcg

SEQ ID NO: 26780 - DNA, 38 bp, Artificial Sequence
  primer
gtaaaacgacggccagtagaaacactggcatttgtccc

SEQ ID NO: 26781 - DNA, 38 bp, Artificial Sequence
  primer
gtaaaacgacggccagtcacgctcagggaagaccttag

SEQ ID NO: 26782 - DNA, 38 bp, Artificial Sequence
  primer
gtaaaacgacggccagtagaactgtctgggacagacgc

SEQ ID NO: 26783 - DNA, 21 bp, Artificial Sequence
  primer
ggaaactcatctccgaggttg

SEQ ID NO: 26784 - DNA, 38 bp, Artificial Sequence
  primer
gtaaaacgacggccagtgtacaagatggtcaagcggtg

SEQ ID NO: 26785 - DNA, 38 bp, Artificial Sequence
  primer
gtaaaacgacggccagtaaggctcttggaatctggacc

SEQ ID NO: 26786 - DNA, 38 bp, Artificial Sequence
  primer
gtaaaacgacggccagtggtacctctgacccttccctg

SEQ ID NO: 26787 - DNA, 21 bp, Artificial Sequence
  primer
gggtcaggtgtcagtgcctac

SEQ ID NO: 26788 - DNA, 21 bp, Artificial Sequence
  primer
atggtttcctggcactaatgg

SEQ ID NO: 26789 - DNA, 38 bp, Artificial Sequence
  primer
gtaaaacgacggccagtactatgagggtgagtggcctg

SEQ ID NO: 26790 - DNA, 38 bp, Artificial Sequence
  primer
gtaaaacgacggccagttgggaccctggaaatatcttg

SEQ ID NO: 26791 - DNA, 20 bp, Artificial Sequence
  primer
ctcctctcccttccatttcc

SEQ ID NO: 26792 - DNA, 39 bp, Artificial Sequence
  primer
gtaaaacgacggccagtttaagtgggaagtgatggttgg

SEQ ID NO: 26793 - DNA, 38 bp, Artificial Sequence
  primer
gtaaaacgacggccagtgacaagtttctgcagagcagc

SEQ ID NO: 26794 - DNA, 21 bp, Artificial Sequence
  primer
gtggtcccataaatgcctgtc

SEQ ID NO: 26795 - DNA, 21 bp, Artificial Sequence
  primer
agaccaatgacaaagtggcag

SEQ ID NO: 26796 - DNA, 21 bp, Artificial Sequence
  primer
ttagcccgaggatctctgaag

SEQ ID NO: 26797 - DNA, 37 bp, Artificial Sequence
  primer
gtaaaacgacggccagtaggaggacaggtggaggaag

SEQ ID NO: 26798 - DNA, 38 bp, Artificial Sequence
  primer
gtaaaacgacggccagtcttctcagccttgacagaccc

SEQ ID NO: 26799 - DNA, 21 bp, Artificial Sequence
  primer
aacgtgctgatcaacaaggac

SEQ ID NO: 26800 - DNA, 21 bp, Artificial Sequence
  primer
atcgatgatcccacagactcc

SEQ ID NO: 26801 - DNA, 38 bp, Artificial Sequence
  primer
gtaaaacgacggccagtaggactgggatgaagagatgg

SEQ ID NO: 26802 - DNA, 38 bp, Artificial Sequence
  primer
gtaaaacgacggccagttaggaacacaggtggaaaccc

SEQ ID NO: 26803 - DNA, 21 bp, Artificial Sequence
  primer
taacaaaggtgaggcctggtc

SEQ ID NO: 26804 - DNA, 37 bp, Artificial Sequence
  primer
gtaaaacgacggccagtataatcgcgagttgtgacgg

SEQ ID NO: 26805 - DNA, 36 bp, Artificial Sequence
  primer
gtaaaacgacggccagtctaaggctggccagagtcg

SEQ ID NO: 26806 - DNA, 39 bp, Artificial Sequence
  primer
gtaaaacgacggccagtgacatcgatttaacttcctgcg

SEQ ID NO: 26807 - DNA, 20 bp, Artificial Sequence
  primer
ggtgacagcaagactccgtc

SEQ ID NO: 26808 - DNA, 18 bp, Artificial Sequence
  primer
ccgagattgtgccacagc

SEQ ID NO: 26809 - DNA, 37 bp, Artificial Sequence
  primer
gtaaaacgacggccagtatgattgcacaaccgcactc

SEQ ID NO: 26810 - DNA, 38 bp, Artificial Sequence
  primer
gtaaaacgacggccagtctttgtatgatgccagggatg

SEQ ID NO: 26811 - DNA, 40 bp, Artificial Sequence
  primer
gtaaaacgacggccagttcacctgagcttcatgtatttcc

SEQ ID NO: 26812 - DNA, 21 bp, Artificial Sequence
  primer
acttcgtgatccatctgcctc

SEQ ID NO: 26813 - DNA, 44 bp, Artificial Sequence
  primer
gtaaaacgacggccagtcaaattaatagtttaactcggatgtga

SEQ ID NO: 26814 - DNA, 21 bp, Artificial Sequence
  primer
atttctgtgcattagccctgg

SEQ ID NO: 26815 - DNA, 42 bp, Artificial Sequence
  primer
gtaaaacgacggccagtacctgtgtcatcaattatttcttcc

SEQ ID NO: 26816 - DNA, 22 bp, Artificial Sequence
  primer
gcagtgtcagtgttctgtcagg

SEQ ID NO: 26817 - DNA, 37 bp, Artificial Sequence
  primer
gtaaaacgacggccagtgccagattagcatgaggcag

SEQ ID NO: 26818 - DNA, 39 bp, Artificial Sequence
  primer
gtaaaacgacggccagtgggaatgagggctgagtagttc

SEQ ID NO: 26819 - DNA, 21 bp, Artificial Sequence
  primer
gcctgcagtaaattcccagac

SEQ ID NO: 26820 - DNA, 38 bp, Artificial Sequence
  primer
gtaaaacgacggccagtgggatggatgagtgactaggg

SEQ ID NO: 26821 - DNA, 38 bp, Artificial Sequence
  primer
gtaaaacgacggccagtcagggtcttactctgttgccc

SEQ ID NO: 26822 - DNA, 38 bp, Artificial Sequence
  primer
gtaaaacgacggccagtgccacctctacctcatcatgc

SEQ ID NO: 26823 - DNA, 38 bp, Artificial Sequence
  primer
gtaaaacgacggccagtttatgacagccatgaagccac

SEQ ID NO: 26824 - DNA, 20 bp, Artificial Sequence
  primer
cctgtggaactccgggatac

SEQ ID NO: 26825 - DNA, 38 bp, Artificial Sequence
  primer
gtaaaacgacggccagtgctagaacaggagtgagcagg

SEQ ID NO: 26826 - DNA, 38 bp, Artificial Sequence
  primer
gtaaaacgacggccagttttggcctctttgtcttgatg

SEQ ID NO: 26827 - DNA, 21 bp, Artificial Sequence
  primer
aagattcacctgtgagcaggc

SEQ ID NO: 26828 - DNA, 22 bp, Artificial Sequence
  primer
aacaattgcaagaatcccactg

SEQ ID NO: 26829 - DNA, 35 bp, Artificial Sequence
  primer
gtaaaacgacggccagtagaagggcatgggtggtc

SEQ ID NO: 26830 - DNA, 24 bp, Artificial Sequence
  primer
gctttccttcttgagtagcatgag

SEQ ID NO: 26831 - DNA, 21 bp, Artificial Sequence
  primer
cgaaagaggaaactgcagagg

SEQ ID NO: 26832 - DNA, 38 bp, Artificial Sequence
  primer
gtaaaacgacggccagtacttcggtggtagggtgaatg

SEQ ID NO: 26833 - DNA, 21 bp, Artificial Sequence
  primer
atggagatcagggaaggactg

SEQ ID NO: 26834 - DNA, 21 bp, Artificial Sequence
  primer
gctctgctgtgacatggaaac

SEQ ID NO: 26835 - DNA, 38 bp, Artificial Sequence
  primer
gtaaaacgacggccagtgcagctgaatgagtcttccac

SEQ ID NO: 26836 - DNA, 21 bp, Artificial Sequence
  primer
catgattgtgccactgtaccc

SEQ ID NO: 26837 - DNA, 38 bp, Artificial Sequence
  primer
gtaaaacgacggccagtctcttccttccaggcaaagtg

SEQ ID NO: 26838 - DNA, 38 bp, Artificial Sequence
  primer
gtaaaacgacggccagtgcctttgtgtccaaggtacag

SEQ ID NO: 26839 - DNA, 39 bp, Artificial Sequence
  primer
gtaaaacgacggccagtcctgaggctaggtaagactccc

SEQ ID NO: 26840 - DNA, 24 bp, Artificial Sequence
  primer
gctttccttcttgagtagcatgag

SEQ ID NO: 26841 - DNA, 36 bp, Artificial Sequence
  primer
gtaaaacgacggccagtgacacctggcagtgggaag

SEQ ID NO: 26842 - DNA, 21 bp, Artificial Sequence
  primer
tgtttgagaaagcagctgacc

SEQ ID NO: 26843 - DNA, 40 bp, Artificial Sequence
  primer
gtaaaacgacggccagtcgtcctttctgaggtcttacatc

SEQ ID NO: 26844 - DNA, 39 bp, Artificial Sequence
  primer
gtaaaacgacggccagttgggctaggtctgcattatttg

SEQ ID NO: 26845 - DNA, 39 bp, Artificial Sequence
  primer
gtaaaacgacggccagtgcttcaaagcaaacaccttctc

SEQ ID NO: 26846 - DNA, 21 bp, Artificial Sequence
  primer
gtgcaggtaggaggaagaagg

SEQ ID NO: 26847 - DNA, 21 bp, Artificial Sequence
  primer
agtccaacaggtgagtcatcg

SEQ ID NO: 26848 - DNA, 21 bp, Artificial Sequence
  primer
tgtatacagtgggagcttggg

SEQ ID NO: 26849 - DNA, 38 bp, Artificial Sequence
  primer
gtaaaacgacggccagtttgcctctttggaagatcagc

SEQ ID NO: 26850 - DNA, 37 bp, Artificial Sequence
  primer
gtaaaacgacggccagtcacagaggagacctgcttgc

SEQ ID NO: 26851 - DNA, 22 bp, Artificial Sequence
  primer
gcaaagggaaagtttaagctcc

SEQ ID NO: 26852 - DNA, 38 bp, Artificial Sequence
  primer
gtaaaacgacggccagtgccacaggcacagagaactac

SEQ ID NO: 26853 - DNA, 38 bp, Artificial Sequence
  primer
gtaaaacgacggccagtaaaccggttctctgtttgcac

SEQ ID NO: 26854 - DNA, 38 bp, Artificial Sequence
  primer
gtaaaacgacggccagtatgaagggcttctgtctagcg

SEQ ID NO: 26855 - DNA, 39 bp, Artificial Sequence
  primer
gtaaaacgacggccagtgggaggtggagataatacgagg

SEQ ID NO: 26856 - DNA, 21 bp, Artificial Sequence
  primer
atgcctgaggtctattcggac

SEQ ID NO: 26857 - DNA, 38 bp, Artificial Sequence
  primer
gtaaaacgacggccagtcccatccttagtttcctggag

SEQ ID NO: 26858 - DNA, 21 bp, Artificial Sequence
  primer
gggagtattacagtgaggcgg

SEQ ID NO: 26859 - DNA, 38 bp, Artificial Sequence
  primer
gtaaaacgacggccagtgaggtgaggctctgaatctgc

SEQ ID NO: 26860 - DNA, 38 bp, Artificial Sequence
  primer
gtaaaacgacggccagtagctccagagcaatcctcatc

SEQ ID NO: 26861 - DNA, 22 bp, Artificial Sequence
  primer
tgtggtgagttcatcctaaggc

SEQ ID NO: 26862 - DNA, 21 bp, Artificial Sequence
  primer
cagaaagatggttggagggag

SEQ ID NO: 26863 - DNA, 38 bp, Artificial Sequence
  primer
gtaaaacgacggccagtcacacctccattaagatgccc

SEQ ID NO: 26864 - DNA, 21 bp, Artificial Sequence
  primer
ctggctaaagcctagctcacc

SEQ ID NO: 26865 - DNA, 38 bp, Artificial Sequence
  primer
gtaaaacgacggccagtatgttggacacctccctcaac

SEQ ID NO: 26866 - DNA, 38 bp, Artificial Sequence
  primer
gtaaaacgacggccagtgccgacaaaggactacagagg

SEQ ID NO: 26867 - DNA, 38 bp, Artificial Sequence
  primer
gtaaaacgacggccagttttcaggacagcatctggaag

SEQ ID NO: 26868 - DNA, 38 bp, Artificial Sequence
  primer
gtaaaacgacggccagttctgcatgaggtcttcaggtc

SEQ ID NO: 26869 - DNA, 38 bp, Artificial Sequence
  primer
gtaaaacgacggccagttcctatttcacaggctcaccc

SEQ ID NO: 26870 - DNA, 37 bp, Artificial Sequence
  primer
gtaaaacgacggccagttgctgggagtggagaaagtg

SEQ ID NO: 26871 - DNA, 21 bp, Artificial Sequence
  primer
ctctgaaaggctgcagagtgg

SEQ ID NO: 26872 - DNA, 21 bp, Artificial Sequence
  primer
ttctgactcacagccatctgc

SEQ ID NO: 26873 - DNA, 19 bp, Artificial Sequence
  primer
ctccacccatcccaaacac

SEQ ID NO: 26874 - DNA, 18 bp, Artificial Sequence
  primer
ctacccagcccgatcctc

SEQ ID NO: 26875 - DNA, 38 bp, Artificial Sequence
  primer
gtaaaacgacggccagtatggtaatacggtggaggtgg

SEQ ID NO: 26876 - DNA, 21 bp, Artificial Sequence
  primer
ccagcatctcctctcaccttg

SEQ ID NO: 26877 - DNA, 20 bp, Artificial Sequence
  primer
gcacctgtctcttgcaaacc

SEQ ID NO: 26878 - DNA, 21 bp, Artificial Sequence
  primer
cagacttcggcctagctatcg

SEQ ID NO: 26879 - DNA, 38 bp, Artificial Sequence
  primer
gtaaaacgacggccagtcctgtgatagtgtgggtgtgg

SEQ ID NO: 26880 - DNA, 38 bp, Artificial Sequence
  primer
gtaaaacgacggccagtgattcgtggctggagatgaag

SEQ ID NO: 26881 - DNA, 38 bp, Artificial Sequence
  primer
gtaaaacgacggccagtgacgagtcttgaagtcccagg

SEQ ID NO: 26882 - DNA, 21 bp, Artificial Sequence
  primer
gagctcttgcctctctggaag

SEQ ID NO: 26883 - DNA, 38 bp, Artificial Sequence
  primer
gtaaaacgacggccagtgcaaaggattctggaaccatc

SEQ ID NO: 26884 - DNA, 38 bp, Artificial Sequence
  primer
gtaaaacgacggccagtgaaccacacttgcctcaggac

SEQ ID NO: 26885 - DNA, 19 bp, Artificial Sequence
  primer
agacacgggacagggaatg

SEQ ID NO: 26886 - DNA, 38 bp, Artificial Sequence
  primer
gtaaaacgacggccagtacctcctctgtctccctgttc

SEQ ID NO: 26887 - DNA, 38 bp, Artificial Sequence
  primer
gtaaaacgacggccagtgagatcagcttcagagcctgg

SEQ ID NO: 26888 - DNA, 38 bp, Artificial Sequence
  primer
gtaaaacgacggccagttgtccttctccagttgccttc

SEQ ID NO: 26889 - DNA, 20 bp, Artificial Sequence
  primer
cctcactccacctcagcttg

SEQ ID NO: 26890 - DNA, 19 bp, Artificial Sequence
  primer
ctgcccatggtttctctcc

SEQ ID NO: 26891 - DNA, 36 bp, Artificial Sequence
  primer
gtaaaacgacggccagtaaatagcggcaggaacacg

SEQ ID NO: 26892 - DNA, 20 bp, Artificial Sequence
  primer
cgtcaacaacggtgactttg

SEQ ID NO: 26893 - DNA, 37 bp, Artificial Sequence
  primer
gtaaaacgacggccagtgaaaggattaggctggtggg

SEQ ID NO: 26894 - DNA, 38 bp, Artificial Sequence; identical to SEQ ID NO: 26884
  primer

SEQ ID NO: 26895 - DNA, 22 bp, Artificial Sequence
  primer
caggagatcattaagaccacgg

SEQ ID NO: 26896 - DNA, 21 bp, Artificial Sequence
  primer
tcggaccaggaaagtaagagc

SEQ ID NO: 26897 - DNA, 39 bp, Artificial Sequence
  primer
gtaaaacgacggccagtctgtacttcactggcaatccac

SEQ ID NO: 26898 - DNA, 21 bp, Artificial Sequence
  primer
tgcactctgtcaagcatcaag

SEQ ID NO: 26899 - DNA, 39 bp, Artificial Sequence
  primer
gtaaaacgacggccagttttcagaaccagtacccaaacc

SEQ ID NO: 26900 - DNA, 23 bp, Artificial Sequence
  primer
tttctgcgaaagatattgcctac

SEQ ID NO: 26901 - DNA, 40 bp, Artificial Sequence
  primer
gtaaaacgacggccagtttcagctttatttgattccaacg

SEQ ID NO: 26902 - DNA, 21 bp, Artificial Sequence
  primer
ttaggaatggcagtctccagg

SEQ ID NO: 26903 - DNA, 38 bp, Artificial Sequence
  primer
gtaaaacgacggccagtgagttacagggcagggcatac

SEQ ID NO: 26904 - DNA, 38 bp, Artificial Sequence
  primer
gtaaaacgacggccagtaagcattcaccctccagagac

SEQ ID NO: 26905 - DNA, 42 bp, Artificial Sequence
  primer
gtaaaacgacggccagtgattcatgtagttgactcttccctg

SEQ ID NO: 26906 - DNA, 40 bp, Artificial Sequence
  primer
gtaaaacgacggccagttcttggtcacaagtagtcttggc

SEQ ID NO: 26907 - DNA, 39 bp, Artificial Sequence
  primer
gtaaaacgacggccagtcctaactgaaagtagggccagg

SEQ ID NO: 26908 - DNA, 38 bp, Artificial Sequence
  primer
gtaaaacgacggccagtgtaagctcgcgttcatcagtg

SEQ ID NO: 26909 - DNA, 38 bp, Artificial Sequence
  primer
gtaaaacgacggccagtgcacatagcctgctgaagaat

SEQ ID NO: 26910 - DNA, 37 bp, Artificial Sequence
  primer
gtaaaacgacggccagtcaaggctgtagggagctgtg

SEQ ID NO: 26911 - DNA, 38 bp, Artificial Sequence
  primer
gtaaaacgacggccagtagagtctgctcctcaacccac

SEQ ID NO: 26912 - DNA, 40 bp, Artificial Sequence
  primer
gtaaaacgacggccagtaatgtcatttcattcattggtcc

SEQ ID NO: 26913 - DNA, 39 bp, Artificial Sequence
  primer
gtaaaacgacggccagttccctgaagtgtttatgggatg

SEQ ID NO: 26914 - DNA, 40 bp, Artificial Sequence; identical to SEQ ID NO: 26912
  primer

SEQ ID NO: 26915 - DNA, 21 bp, Artificial Sequence
  primer
gactagaggtctggtggtggg

SEQ ID NO: 26916 - DNA, 22 bp, Artificial Sequence
  primer
aacaagttgtctccaggattgc

SEQ ID NO: 26917 - DNA, 20 bp, Artificial Sequence
  primer
actgctccttctggagagcc

SEQ ID NO: 26918 - DNA, 39 bp, Artificial Sequence
  primer
gtaaaacgacggccagtaaggatcgagtgtgttctgagc

SEQ ID NO: 26919 - DNA, 20 bp, Artificial Sequence
  primer
aggttccagtggccgttaag

SEQ ID NO: 26920 - DNA, 38 bp, Artificial Sequence
  primer
gtaaaacgacggccagtgcctctgctcatgaagtgttg

SEQ ID NO: 26921 - DNA, 21 bp, Artificial Sequence
  primer
gcagcaggaataagatgggac

SEQ ID NO: 26922 - DNA, 21 bp, Artificial Sequence
  primer
tggcatccacttctgactctg

SEQ ID NO: 26923 - DNA, 38 bp, Artificial Sequence
  primer
gtaaaacgacggccagttctgccagtcacagctttagg

SEQ ID NO: 26924 - DNA, 38 bp, Artificial Sequence
  primer
gtaaaacgacggccagtaccttgagtttcgggtagtgc

SEQ ID NO: 26925 - DNA, 37 bp, Artificial Sequence
  primer
gtaaaacgacggccagtgacctgcctttgcctgagac

SEQ ID NO: 26926 - DNA, 38 bp, Artificial Sequence
  primer
gtaaaacgacggccagtcccttgtcagacacagcactc

SEQ ID NO: 26927 - DNA, 21 bp, Artificial Sequence
  primer
gcctcagtggtcatcataggg

SEQ ID NO: 26928 - DNA, 21 bp, Artificial Sequence
  primer
tttgggaagagtcagacagcc

SEQ ID NO: 26929 - DNA, 38 bp, Artificial Sequence
  primer
gtaaaacgacggccagtgcagactgcagagagggagac

SEQ ID NO: 26930 - DNA, 21 bp, Artificial Sequence
  primer
caccgctgataaggaaggaag

SEQ ID NO: 26931 - DNA, 39 bp, Artificial Sequence
  primer
gtaaaacgacggccagtggtaagacttggaagtgcaggc

SEQ ID NO: 26932 - DNA, 19 bp, Artificial Sequence
  primer
acgcagtgttccctatgcc

SEQ ID NO: 26933 - DNA, 21 bp, Artificial Sequence
  primer
cgtgtgctgtttaaccctctg

SEQ ID NO: 26934 - DNA, 38 bp, Artificial Sequence
  primer
gtaaaacgacggccagtcatctctctagccatcgctcc

SEQ ID NO: 26935 - DNA, 37 bp, Artificial Sequence
  primer
gtaaaacgacggccagtagtgtccacagcagcctgag

SEQ ID NO: 26936 - DNA, 35 bp, Artificial Sequence
  primer
gtaaaacgacggccagttctctcgctcctgcgttc

SEQ ID NO: 26937 - DNA, 38 bp, Artificial Sequence
  primer
gtaaaacgacggccagtactcttgacagctagggctgg

SEQ ID NO: 26938 - DNA, 21 bp, Artificial Sequence
  primer
cagagagaaaggatgtgcagc

SEQ ID NO: 26939 - DNA, 21 bp, Artificial Sequence
  primer
ccaaggcagacatctttcaac

SEQ ID NO: 26940 - DNA, 39 bp, Artificial Sequence
  primer
gtaaaacgacggccagtgcaatggatagttcaagccaag

SEQ ID NO: 26941 - DNA, 47 bp, Artificial Sequence
  primer
gtaaaacgacggccagtgttaagtcatactatgtgtgttcttgaatc

SEQ ID NO: 26942 - DNA, 21 bp, Artificial Sequence
  primer
agcttcctgttgggtgacttg

SEQ ID NO: 26943 - DNA, 25 bp, Artificial Sequence
  primer
ttatagcttcatactgtggtttggg

SEQ ID NO: 26944 - DNA, 41 bp, Artificial Sequence
  primer
gtaaaacgacggccagtctgaattcctacagaaattggatg

SEQ ID NO: 26945 - DNA, 38 bp, Artificial Sequence
  primer
gtaaaacgacggccagtagtggtactgctgggaaatgg

SEQ ID NO: 26946 - DNA, 21 bp, Artificial Sequence
  primer
aggctttcagttgtccagatg

SEQ ID NO: 26947 - DNA, 21 bp, Artificial Sequence
  primer
atggcaacgaggacatgaaag

SEQ ID NO: 26948 - DNA, 38 bp, Artificial Sequence
  primer
gtaaaacgacggccagtgctgcatgacttcatccttcc

SEQ ID NO: 26949 - DNA, 38 bp, Artificial Sequence
  primer
gtaaaacgacggccagtgtctccagaagagttcggacg

SEQ ID NO: 26950 - DNA, 20 bp, Artificial Sequence
  primer
gaggatgtgagtcctgctcg

SEQ ID NO: 26951 - DNA, 20 bp, Artificial Sequence
  primer
acggaggatggagctgtttc

SEQ ID NO: 26952 - DNA, 20 bp, Artificial Sequence
  primer
cagcgctgtggctaccttac

SEQ ID NO: 26953 - DNA, 37 bp, Artificial Sequence
  primer
gtaaaacgacggccagtaacgggctctgaggtaggag

SEQ ID NO: 26954 - DNA, 20 bp, Artificial Sequence
  primer
gtggtgggtagtgcagatgg

SEQ ID NO: 26955 - DNA, 38 bp, Artificial Sequence
  primer
gtaaaacgacggccagttccacatgtaccagcctgttc

SEQ ID NO: 26956 - DNA, 38 bp, Artificial Sequence
  primer
gtaaaacgacggccagttcttgcttgagactggtttgg

SEQ ID NO: 26957 - DNA, 38 bp, Artificial Sequence
  primer
gtaaaacgacggccagtacttcctgcttccttgtctgg

SEQ ID NO: 26958 - DNA, 38 bp, Artificial Sequence
  primer
gtaaaacgacggccagttctcctaccctccagaacagg

SEQ ID NO: 26959 - DNA, 37 bp, Artificial Sequence
  primer
gtaaaacgacggccagtttgtagggactcatgtgggc

SEQ ID NO: 26960 - DNA, 37 bp, Artificial Sequence
  primer
gtaaaacgacggccagtcagacgaaagtgtgcatggg

SEQ ID NO: 26961 - DNA, 38 bp, Artificial Sequence
  primer
gtaaaacgacggccagtcgagtgagtgcatgacagagg

SEQ ID NO: 26962 - DNA, 21 bp, Artificial Sequence
  primer
ccttctcatgtaatgggagcc

SEQ ID NO: 26963 - DNA, 21 bp, Artificial Sequence
  primer
cccttgttgtgaaattcctgc

SEQ ID NO: 26964 - DNA, 38 bp, Artificial Sequence
  primer
gtaaaacgacggccagtcctttctggagggatcaacac

SEQ ID NO: 26965 - DNA, 38 bp, Artificial Sequence
  primer
gtaaaacgacggccagtatgctgtgctgattgagatgg

SEQ ID NO: 26966 - DNA, 21 bp, Artificial Sequence
  primer
gatgtgggattcagattcctg

SEQ ID NO: 26967 - DNA, 38 bp, Artificial Sequence
  primer
gtaaaacgacggccagtcatgtatgaccttcaggtggg

SEQ ID NO: 26968 - DNA, 38 bp, Artificial Sequence; identical to SEQ ID NO: 26965
  primer

SEQ ID NO: 26969 - DNA, 21 bp, Artificial Sequence
  primer
ccctttctctttctgcaggtg

SEQ ID NO: 26970 - DNA, 21 bp, Artificial Sequence
  primer
attgtggtcaccgagtgtgag

SEQ ID NO: 26971 - DNA, 21 bp, Artificial Sequence
  primer
gaagggcttgtaggtgtgagc

SEQ ID NO: 26972 - DNA, 37 bp, Artificial Sequence
  primer
gtaaaacgacggccagtcgggacagatttgaccaatg

SEQ ID NO: 26973 - DNA, 38 bp, Artificial Sequence
  primer
gtaaaacgacggccagtactctgttgacctgagcctgc

SEQ ID NO: 26974 - DNA, 38 bp, Artificial Sequence
  primer
gtaaaacgacggccagtacttccagcagcagaggagac

SEQ ID NO: 26975 - DNA, 21 bp, Artificial Sequence
  primer
tcttaactgggaaacacgctg

SEQ ID NO: 26976 - DNA, 38 bp, Artificial Sequence
  primer
gtaaaacgacggccagttcagtggactgttcctctccc

SEQ ID NO: 26977 - DNA, 20 bp, Artificial Sequence
  primer
tcaaccaagggtgagtgtcc

SEQ ID NO: 26978 - DNA, 36 bp, Artificial Sequence
  primer
gtaaaacgacggccagtccatgcctgtgtctccagg

SEQ ID NO: 26979 - DNA, 38 bp, Artificial Sequence
  primer
gtaaaacgacggccagtcaactccaagggctgaaagtc

SEQ ID NO: 26980 - DNA, 37 bp, Artificial Sequence
  primer
gtaaaacgacggccagtgccgcaattgttgatttctc

SEQ ID NO: 26981 - DNA, 21 bp, Artificial Sequence
  primer
agaccagtgagtatctcccgc

SEQ ID NO: 26982 - DNA, 21 bp, Artificial Sequence
  primer
ctctccgtcttcatgtttccg

SEQ ID NO: 26983 - DNA, 21 bp, Artificial Sequence
  primer
ttctctcaaagtctgccatcg

SEQ ID NO: 26984 - DNA, 38 bp, Artificial Sequence
  primer
gtaaaacgacggccagttctatgaagctggtgtttggg

SEQ ID NO: 26985 - DNA, 38 bp, Artificial Sequence
  primer
gtaaaacgacggccagttacgtagatcacgttccaggg

SEQ ID NO: 26986 - DNA, 38 bp, Artificial Sequence; identical to SEQ ID NO: 26985
  primer

SEQ ID NO: 26987 - DNA, 21 bp, Artificial Sequence
  primer
aagcctgcctatcctctagcc

SEQ ID NO: 26988 - DNA, 38 bp, Artificial Sequence
  primer
gtaaaacgacggccagtactataaccagccatcggagg

SEQ ID NO: 26989 - DNA, 38 bp, Artificial Sequence
  primer
gtaaaacgacggccagtagatgtgagtttgaggcctgg

SEQ ID NO: 26990 - DNA, 38 bp, Artificial Sequence
  primer
gtaaaacgacggccagtaccctctgcagctaaggaaac

SEQ ID NO: 26991 - DNA, 38 bp, Artificial Sequence
  primer
gtaaaacgacggccagtaatctcaaggtgagggcagag

SEQ ID NO: 26992 - DNA, 38 bp, Artificial Sequence
  primer
gtaaaacgacggccagttcatctcaggaagctggtgtg

SEQ ID NO: 26993 - DNA, 21 bp, Artificial Sequence
  primer
agtggacagatggacaagcag

SEQ ID NO: 26994 - DNA, 38 bp, Artificial Sequence
  primer
gtaaaacgacggccagtggtgtcctgctctcatcttcc

SEQ ID NO: 26995 - DNA, 38 bp, Artificial Sequence
  primer
gtaaaacgacggccagtatgccacatagaagggctgag

SEQ ID NO: 26996 - DNA, 38 bp, Artificial Sequence
  primer
gtaaaacgacggccagtaagcctcacccttagcctttc

SEQ ID NO: 26997 - DNA, 21 bp, Artificial Sequence
  primer
agtgcttagctcacaggctcc

SEQ ID NO: 26998 - DNA, 39 bp, Artificial Sequence
  primer
gtaaaacgacggccagtaatctcttgacctcatgatccg

SEQ ID NO: 26999 - DNA, 39 bp, Artificial Sequence
  primer
gtaaaacgacggccagttgggtgattcagtcagtacagg

SEQ ID NO: 27000 - DNA, 37 bp, Artificial Sequence
  primer
gtaaaacgacggccagtggatgttgccatgaaccaag

SEQ ID NO: 27001 - DNA, 41 bp, Artificial Sequence
  primer
gtaaaacgacggccagtgctattgcctagcagattgatgag

SEQ ID NO: 27002 - DNA, 39 bp, Artificial Sequence
  primer
gtaaaacgacggccagtcaagtcctgtgaagcaatagcc

SEQ ID NO: 27003 - DNA, 38 bp, Artificial Sequence
  primer
gtaaaacgacggccagtgtcgcacatcaggtactgtgg

SEQ ID NO: 27004 - DNA, 38 bp, Artificial Sequence
  primer
gtaaaacgacggccagtttgtgacttcaagaaggacgg

SEQ ID NO: 27005 - DNA, 37 bp, Artificial Sequence
  primer
gtaaaacgacggccagtgcttcaaaggtcacagccag

SEQ ID NO: 27006 - DNA, 22 bp, Artificial Sequence
  primer
agaggttcctggagttgtcttg

SEQ ID NO: 27007 - DNA, 21 bp, Artificial Sequence
  primer
atgcgccattagtgttgaagg

SEQ ID NO: 27008 - DNA, 38 bp, Artificial Sequence
  primer
gtaaaacgacggccagttttggcagaagtttggtttca

SEQ ID NO: 27009 - DNA, 37 bp, Artificial Sequence
  primer
gtaaaacgacggccagtttgtgcatttgctgttgacc

SEQ ID NO: 27010 - DNA, 39 bp, Artificial Sequence
  primer
gtaaaacgacggccagtgcccttctggtgtactgacttg

SEQ ID NO: 27011 - DNA, 38 bp, Artificial Sequence
  primer
gtaaaacgacggccagtagggtatcaagaggtcctggg

SEQ ID NO: 27012 - DNA, 38 bp, Artificial Sequence
  primer
gtaaaacgacggccagtagttgtgaagtggatcccagc

SEQ ID NO: 27013 - DNA, 38 bp, Artificial Sequence
  primer
gtaaaacgacggccagtacacctcggaaagtaagcctg

SEQ ID NO: 27014 - DNA, 38 bp, Artificial Sequence
  primer
gtaaaacgacggccagtgattccatgctcagaattccc

SEQ ID NO: 27015 - DNA, 38 bp, Artificial Sequence
  primer
gtaaaacgacggccagtgattctgactcggatgtggtg

SEQ ID NO: 27016 - DNA, 21 bp, Artificial Sequence
  primer
cagctgtgagaccaagtccag

SEQ ID NO: 27017 - DNA, 38 bp, Artificial Sequence
  primer
gtaaaacgacggccagtcagaagaagaagatggaggcg

SEQ ID NO: 27018 - DNA, 38 bp, Artificial Sequence
  primer
gtaaaacgacggccagtaaataaggtgatctccgctgc

SEQ ID NO: 27019 - DNA, 21 bp, Artificial Sequence
  primer
cacaaagtgaaggcaccagtc

SEQ ID NO: 27020 - DNA, 21 bp, Artificial Sequence
  primer
gacccacatgggaagtgtctc

SEQ ID NO: 27021 - DNA, 21 bp, Artificial Sequence
  primer
tcctcttccaaagatgccaac

SEQ ID NO: 27022 - DNA, 37 bp, Artificial Sequence
  primer
gtaaaacgacggccagtgtagtggaagtcggctgctg

SEQ ID NO: 27023 - DNA, 18 bp, Artificial Sequence
  primer
gggagaacccgagaaacg

SEQ ID NO: 27024 - DNA, 22 bp, Artificial Sequence
  primer
tgagaccagatgctctgagatg

SEQ ID NO: 27025 - DNA, 38 bp, Artificial Sequence
  primer
gtaaaacgacggccagtatgtgcttcctgtcctggttg

SEQ ID NO: 27026 - DNA, 22 bp, Artificial Sequence
  primer
ttgcttgcttctaagacattgc

SEQ ID NO: 27027 - DNA, 18 bp, Artificial Sequence
  primer
gctgtgggagcccaactc

SEQ ID NO: 27028 - DNA, 21 bp, Artificial Sequence
  primer
ctcccggagagtagtgagacc

SEQ ID NO: 27029 - DNA, 37 bp, Artificial Sequence
  primer
gtaaaacgacggccagtcactcttgaggattgcaggc

SEQ ID NO: 27030 - DNA, 38 bp, Artificial Sequence
  primer
gtaaaacgacggccagtgcctctgatgctcttggtctc

SEQ ID NO: 27031 - DNA, 37 bp, Artificial Sequence
  primer
gtaaaacgacggccagtaaacagcagctgggaaacag

SEQ ID NO: 27032 - DNA, 37 bp, Artificial Sequence
  primer
gtaaaacgacggccagttggttaatccagggagatgc

SEQ ID NO: 27033 - DNA, 20 bp, Artificial Sequence
  primer
cttgctccttctctgttgcg

SEQ ID NO: 27034 - DNA, 20 bp, Artificial Sequence
  primer
accacagaaccatctggctg

SEQ ID NO: 27035 - DNA, 20 bp, Artificial Sequence
  primer
ccctactcatcaattcgccc

SEQ ID NO: 27036 - DNA, 38 bp, Artificial Sequence
  primer
gtaaaacgacggccagttcccaacttcccatatgcttc

SEQ ID NO: 27037 - DNA, 39 bp, Artificial Sequence
  primer
gtaaaacgacggccagtcagcgtgcatcacaagtgtaac

SEQ ID NO: 27038 - DNA, 36 bp, Artificial Sequence
  primer
gtaaaacgacggccagtgctccagccgtgagaagag

SEQ ID NO: 27039 - DNA, 37 bp, Artificial Sequence
  primer
gtaaaacgacggccagttcacaggtgtgtccggtatg

SEQ ID NO: 27040 - DNA, 21 bp, Artificial Sequence
  primer
aaccaccatgaactttgaccc

SEQ ID NO: 27041 - DNA, 21 bp, Artificial Sequence
  primer
ggagatcaagaccgaggacac

SEQ ID NO: 27042 - DNA, 38 bp, Artificial Sequence
  primer
gtaaaacgacggccagtactacacgtccagcttcagcc

SEQ ID NO: 27043 - DNA, 38 bp, Artificial Sequence
  primer
gtaaaacgacggccagtctctgagcactacctgcagcc

SEQ ID NO: 27044 - DNA, 21 bp, Artificial Sequence
  primer
aacgtggtgcagggactctac

SEQ ID NO: 27045 - DNA, 20 bp, Artificial Sequence
  primer
cctggagctgtggttctcag

SEQ ID NO: 27046 - DNA, 22 bp, Artificial Sequence
  primer
gctggacattaaccaatgaagg

SEQ ID NO: 27047 - DNA, 38 bp, Artificial Sequence
  primer
gtaaaacgacggccagttctggtttggtgaagttacgg

SEQ ID NO: 27048 - DNA, 22 bp, Artificial Sequence
  primer
aatcgtaaagcatttgtttccc

SEQ ID NO: 27049 - DNA, 38 bp, Artificial Sequence
  primer
gtaaaacgacggccagtagttgggtttcatcttggtgg

SEQ ID NO: 27050 - DNA, 37 bp, Artificial Sequence
  primer
gtaaaacgacggccagttttgtcagttggcagcaatg

SEQ ID NO: 27051 - DNA, 38 bp, Artificial Sequence
  primer
gtaaaacgacggccagttgcactttgtgtctctcaggc

SEQ ID NO: 27052 - DNA, 38 bp, Artificial Sequence
  primer
gtaaaacgacggccagtacagcagtgagagccacaaag

SEQ ID NO: 27053 - DNA, 21 bp, Artificial Sequence
  primer
tttcattgcattggattgagg

SEQ ID NO: 27054 - DNA, 38 bp, Artificial Sequence
  primer
gtaaaacgacggccagtttctggcagataccatcttgg

SEQ ID NO: 27055 - DNA, 39 bp, Artificial Sequence
  primer
gtaaaacgacggccagttgggatctcaactctgagaagg

SEQ ID NO: 27056 - DNA, 21 bp, Artificial Sequence
  primer
gtaagctcgaaggacgctgag

SEQ ID NO: 27057 - DNA, 38 bp, Artificial Sequence
  primer
gtaaaacgacggccagtttggctttgctacacgaactg

SEQ ID NO: 27058 - DNA, 25 bp, Artificial Sequence
  primer
gcttcaggaatcagtcagaagtatc

SEQ ID NO: 27059 - DNA, 37 bp, Artificial Sequence
  primer
gtaaaacgacggccagtgcgctcgatgtagagcaaag

SEQ ID NO: 27060 - DNA, 21 bp, Artificial Sequence
  primer
ttctgccatgaccttgttctc

SEQ ID NO: 27061 - DNA, 38 bp, Artificial Sequence
  primer
gtaaaacgacggccagttgtattgccttcagccctttc

SEQ ID NO: 27062 - DNA, 21 bp, Artificial Sequence
  primer
tcctccactagctgccagaac

SEQ ID NO: 27063 - DNA, 38 bp, Artificial Sequence
  primer
gtaaaacgacggccagtgcatgatgagtggctgtcttg

SEQ ID NO: 27064 - DNA, 21 bp, Artificial Sequence
  primer
cccgtatctcaaatctggtcc

SEQ ID NO: 27065 - DNA, 20 bp, Artificial Sequence
  primer
gagtgaggaaaggagcctgg

SEQ ID NO: 27066 - DNA, 38 bp, Artificial Sequence
  primer
gtaaaacgacggccagtgtcttgaagcatgtcaggtgc

SEQ ID NO: 27067 - DNA, 38 bp, Artificial Sequence
  primer
gtaaaacgacggccagtggtagagaaggttgcggaatg

SEQ ID NO: 27068 - DNA, 21 bp, Artificial Sequence
  primer
gaaatcagacctagccctccc

SEQ ID NO: 27069 - DNA, 21 bp, Artificial Sequence
  primer
accacagtcagtagcaggtgg

SEQ ID NO: 27070 - DNA, 38 bp, Artificial Sequence
  primer
gtaaaacgacggccagtcccagactctagcacaggacc

SEQ ID NO: 27071 - DNA, 37 bp, Artificial Sequence
  primer
gtaaaacgacggccagttagtgccaaggccactgaag

SEQ ID NO: 27072 - DNA, 38 bp, Artificial Sequence
  primer
gtaaaacgacggccagttcctggtgggctttatttagg

SEQ ID NO: 27073 - DNA, 21 bp, Artificial Sequence
  primer
ctgatgggatcctagagtggg

SEQ ID NO: 27074 - DNA, 21 bp, Artificial Sequence
  primer
tacagcttgcctcctagtgcc

SEQ ID NO: 27075 - DNA, 38 bp, Artificial Sequence
  primer
gtaaaacgacggccagtgggcctgaagacctgactacc

SEQ ID NO: 27076 - DNA, 21 bp, Artificial Sequence
  primer
acagaagcaagaacagacggg

SEQ ID NO: 27077 - DNA, 21 bp, Artificial Sequence
  primer
aaagacagggttagcagcacc

SEQ ID NO: 27078 - DNA, 21 bp, Artificial Sequence
  primer
tccttcgtagccatccatagg

SEQ ID NO: 27079 - DNA, 21 bp, Artificial Sequence
  primer
tccgaaagtacaaggtcaggg

SEQ ID NO: 27080 - DNA, 38 bp, Artificial Sequence
  primer
gtaaaacgacggccagttgaaggagcagcaggaggtag

SEQ ID NO: 27081 - DNA, 38 bp, Artificial Sequence
  primer
gtaaaacgacggccagtatcagcctaacttgggtgagc

SEQ ID NO: 27082 - DNA, 20 bp, Artificial Sequence
  primer
atcatgcctcactgccattc

SEQ ID NO: 27083 - DNA, 21 bp, Artificial Sequence
  primer
caccagaggctcctttctcac

SEQ ID NO: 27084 - DNA, 21 bp, Artificial Sequence
  primer
ccacctgatctccagtgtttg

SEQ ID NO: 27085 - DNA, 21 bp, Artificial Sequence
  primer
cacatgctgacacacctgttg

SEQ ID NO: 27086 - DNA, 41 bp, Artificial Sequence
  primer
gtaaaacgacggccagtgccctgagtgctaatgactatttc

SEQ ID NO: 27087 - DNA, 38 bp, Artificial Sequence
  primer
gtaaaacgacggccagtctctcaagtgcctgcctagtg

SEQ ID NO: 27088 - DNA, 22 bp, Artificial Sequence
  primer
cagaatgaaagtgccactgatg

SEQ ID NO: 27089 - DNA, 38 bp, Artificial Sequence
  primer
gtaaaacgacggccagtcgttgaatgaagccataatgc

SEQ ID NO: 27090 - DNA, 21 bp, Artificial Sequence
  primer
acacacatccaagtttgtggc

SEQ ID NO: 27091 - DNA, 21 bp, Artificial Sequence
  primer
tccaaacgattgtcaagatgg

SEQ ID NO: 27092 - DNA, 21 bp, Artificial Sequence
  primer
gcagcttccggaactaagatg

SEQ ID NO: 27093 - DNA, 38 bp, Artificial Sequence
  primer
gtaaaacgacggccagttgatcctgacgttctttgtgg

SEQ ID NO: 27094 - DNA, 36 bp, Artificial Sequence
  primer
gtaaaacgacggccagtgtctaaggacaggtgcggg

SEQ ID NO: 27095 - DNA, 38 bp, Artificial Sequence
  primer
gtaaaacgacggccagtaccgagaacacagaaccttcc

SEQ ID NO: 27096 - DNA, 21 bp, Artificial Sequence
  primer
ctcgtccttcaagttcatccc

SEQ ID NO: 27097 - DNA, 24 bp, Artificial Sequence
  primer
ggaaaccctttaatctctctaggc

SEQ ID NO: 27098 - DNA, 38 bp, Artificial Sequence
  primer
gtaaaacgacggccagtgacagttgaaagcaaaccagg

SEQ ID NO: 27099 - DNA, 20 bp, Artificial Sequence
  primer
cttccacttctttccctccc

SEQ ID NO: 27100 - DNA, 27 bp, Artificial Sequence
  primer
tttgtaagggtaaacatttgacctatg

SEQ ID NO: 27101 - DNA, 40 bp, Artificial Sequence
  primer
gtaaaacgacggccagttgatgattgctggttattccttt

SEQ ID NO: 27102 - DNA, 38 bp, Artificial Sequence
  primer
gtaaaacgacggccagtggagccaggcattgttcttac

SEQ ID NO: 27103 - DNA, 39 bp, Artificial Sequence
  primer
gtaaaacgacggccagtctgttctgatccacaaagtggt

SEQ ID NO: 27104 - DNA, 38 bp, Artificial Sequence
  primer
gtaaaacgacggccagttacaggagaagctggtctggg

SEQ ID NO: 27105 - DNA, 21 bp, Artificial Sequence
  primer
tgaagttggcatttctctcca

SEQ ID NO: 27106 - DNA, 38 bp, Artificial Sequence
  primer
gtaaaacgacggccagtcaagaggatggaggctttctc

SEQ ID NO: 27107 - DNA, 22 bp, Artificial Sequence
  primer
agaactttgcctgtaggcattc

SEQ ID NO: 27108 - DNA, 21 bp, Artificial Sequence
  primer
ttcagaacactgaggcaggag

SEQ ID NO: 27109 - DNA, 23 bp, Artificial Sequence
  primer
tctgagacaaccattcttcttgg

SEQ ID NO: 27110 - DNA, 21 bp, Artificial Sequence
  primer
gaattggcatcctcttcatcc

SEQ ID NO: 27111 - DNA, 21 bp, Artificial Sequence
  primer
ggtgatactggacctggaacc

SEQ ID NO: 27112 - DNA, 38 bp, Artificial Sequence
  primer
gtaaaacgacggccagtaagtgcctgggttgctatcag

SEQ ID NO: 27113 - DNA, 39 bp, Artificial Sequence
  primer
gtaaaacgacggccagtggactcatgcagtttatttggg

SEQ ID NO: 27114 - DNA, 38 bp, Artificial Sequence
  primer
gtaaaacgacggccagtgctgtcagcgaaagtatccag

SEQ ID NO: 27115 - DNA, 37 bp, Artificial Sequence
  primer
gtaaaacgacggccagtgggtaggagaatgtgagccc

SEQ ID NO: 27116 - DNA, 21 bp, Artificial Sequence
  primer
taaagccaagttgggtatggg

SEQ ID NO: 27117 - DNA, 39 bp, Artificial Sequence
  primer
gtaaaacgacggccagtgagaacatctcaaaggctctgg

SEQ ID NO: 27118 - DNA, 19 bp, Artificial Sequence
  primer
agggcagagttctggcttc

SEQ ID NO: 27119 - DNA, 21 bp, Artificial Sequence
  primer
gagtctttgtcgctgtcccac

SEQ ID NO: 27120 - DNA, 39 bp, Artificial Sequence
  primer
gtaaaacgacggccagtgagtcacgtgaaacaggaaacc

SEQ ID NO: 27121 - DNA, 38 bp, Artificial Sequence
  primer
gtaaaacgacggccagtaagcaagcattgggagaaatg

SEQ ID NO: 27122 - DNA, 38 bp, Artificial Sequence
  primer
gtaaaacgacggccagttcctcgctgttgttgagactg

SEQ ID NO: 27123 - DNA, 38 bp, Artificial Sequence
  primer
gtaaaacgacggccagtaaagatgcctaccaccacacc

SEQ ID NO: 27124 - DNA, 22 bp, Artificial Sequence
  primer
catgagttgatggatattcggg

SEQ ID NO: 27125 - DNA, 38 bp, Artificial Sequence
  primer
gtaaaacgacggccagtaggccaacatggatagaggtg

SEQ ID NO: 27126 - DNA, 21 bp, Artificial Sequence
  primer
actttcaagtccacgcgtctc

SEQ ID NO: 27127 - DNA, 37 bp, Artificial Sequence
  primer
gtaaaacgacggccagtagagtactgggccagcttcc

SEQ ID NO: 27128 - DNA, 38 bp, Artificial Sequence
  primer
gtaaaacgacggccagtgcagcaggtttcgactctctc

SEQ ID NO: 27129 - DNA, 21 bp, Artificial Sequence
  primer
gcatcctgacttggagaaagc

SEQ ID NO: 27130 - DNA, 38 bp, Artificial Sequence
  primer
gtaaaacgacggccagtttgcaaagccatacttcatgc

SEQ ID NO: 27131 - DNA, 21 bp, Artificial Sequence
  primer
taagcccaagctaaagccaag

SEQ ID NO: 27132 - DNA, 39 bp, Artificial Sequence
  primer
gtaaaacgacggccagtcgatcgaatttctttgcctatc

SEQ ID NO: 27133 - DNA, 39 bp, Artificial Sequence
  primer
gtaaaacgacggccagtgcaaatctttgccagctgttat

SEQ ID NO: 27134 - DNA, 38 bp, Artificial Sequence
  primer
gtaaaacgacggccagtttgagtgcatttgggagctta

SEQ ID NO: 27135 - DNA, 38 bp, Artificial Sequence
  primer
gtaaaacgacggccagtggagcattgtgccagatgtta

SEQ ID NO: 27136 - DNA, 21 bp, Artificial Sequence
  primer
tttgcattgtttcctcagaat

SEQ ID NO: 27137 - DNA, 40 bp, Artificial Sequence
  primer
gtaaaacgacggccagtccttgtggaatggctaaatcaag

SEQ ID NO: 27138 - DNA, 38 bp, Artificial Sequence
  primer
gtaaaacgacggccagtccaatttcagttccagccatc

SEQ ID NO: 27139 - DNA, 22 bp, Artificial Sequence
  primer
gatattctaaagcggcgacaac

SEQ ID NO: 27140 - DNA, 22 bp, Artificial Sequence
  primer
tcagggtgattaaatgctctgg

SEQ ID NO: 27141 - DNA, 38 bp, Artificial Sequence
  primer
gtaaaacgacggccagtctttctccctacctgcagcat

SEQ ID NO: 27142 - DNA, 41 bp, Artificial Sequence
  primer
gtaaaacgacggccagtaaacaaatggttaactgacttggg

SEQ ID NO: 27143 - DNA, 21 bp, Artificial Sequence
  primer
gaatctgatcccaggttggac

SEQ ID NO: 27144 - DNA, 24 bp, Artificial Sequence
  primer
ccactatgacacagatgaggtacg

SEQ ID NO: 27145 - DNA, 20 bp, Artificial Sequence
  primer
tgacctctcaaagtgcctgg

SEQ ID NO: 27146 - DNA, 21 bp, Artificial Sequence
  primer
tacatggatgcagcctgaaag

SEQ ID NO: 27147 - DNA, 38 bp, Artificial Sequence
  primer
gtaaaacgacggccagtacagctgcttctttgtccagc

SEQ ID NO: 27148 - DNA, 21 bp, Artificial Sequence
  primer
cctcaagaagatggaccttgg

SEQ ID NO: 27149 - DNA, 38 bp, Artificial Sequence
  primer
gtaaaacgacggccagtatgtccctaagcccatattgc

SEQ ID NO: 27150 - DNA, 38 bp, Artificial Sequence
  primer
gtaaaacgacggccagttccaggcttatggtggttaaa

SEQ ID NO: 27151 - DNA, 41 bp, Artificial Sequence
  primer
gtaaaacgacggccagtgcaagtggaattaatggaagaaac

SEQ ID NO: 27152 - DNA, 38 bp, Artificial Sequence
  primer
gtaaaacgacggccagtgtttgtgccttgcttgttcac

SEQ ID NO: 27153 - DNA, 42 bp, Artificial Sequence
  primer
gtaaaacgacggccagtggtattctgtactgagtcccagttt

SEQ ID NO: 27154 - DNA, 41 bp, Artificial Sequence
  primer
gtaaaacgacggccagtttgataaatggtaagtggctgttg

SEQ ID NO: 27155 - DNA, 27 bp, Artificial Sequence
  primer
ccatgaaatccagattgtagtaaagtg

SEQ ID NO: 27156 - DNA, 23 bp, Artificial Sequence
  primer
tccaagacactatgctccttctc

SEQ ID NO: 27157 - DNA, 27 bp, Artificial Sequence
  primer
actaggagtgatttgtgtttacttcct

SEQ ID NO: 27158 - DNA, 41 bp, Artificial Sequence
  primer
gtaaaacgacggccagtggccaaataagtttactttgaagc

SEQ ID NO: 27159 - DNA, 38 bp, Artificial Sequence
  primer
gtaaaacgacggccagttgtcccataaagaggcaaagg

SEQ ID NO: 27160 - DNA, 38 bp, Artificial Sequence
  primer
gtaaaacgacggccagtcttacattgttggtggccttg

SEQ ID NO: 27161 - DNA, 38 bp, Artificial Sequence
  primer
gtaaaacgacggccagtaggacacattctagggcttgc

SEQ ID NO: 27162 - DNA, 25 bp, Artificial Sequence
  primer
tgatttatttcctccctcactattt

SEQ ID NO: 27163 - DNA, 42 bp, Artificial Sequence
  primer
gtaaaacgacggccagttttgaattgacagtattatgatggc

SEQ ID NO: 27164 - DNA, 22 bp, Artificial Sequence
  primer
tttgcacagcttgttgataagg

SEQ ID NO: 27165 - DNA, 38 bp, Artificial Sequence
  primer
gtaaaacgacggccagtatgactctcctgtttgtggga

SEQ ID NO: 27166 - DNA, 20 bp, Artificial Sequence
  primer
aaatcagctttcccaggttg

SEQ ID NO: 27167 - DNA, 37 bp, Artificial Sequence
  primer
gtaaaacgacggccagtgggagggtgggaattatagg

SEQ ID NO: 27168 - DNA, 38 bp, Artificial Sequence
  primer
gtaaaacgacggccagtttctggagaatgatgctgagg

SEQ ID NO: 27169 - DNA, 43 bp, Artificial Sequence
  primer
gtaaaacgacggccagtgaagaggaaagaagcagttgtctaag

SEQ ID NO: 27170 - DNA, 38 bp, Artificial Sequence
  primer
gtaaaacgacggccagtgaatgtgcaaagcaatggttc

SEQ ID NO: 27171 - DNA, 23 bp, Artificial Sequence
  primer
agagtaaatgaatgggacagtcg

SEQ ID NO: 27172 - DNA, 38 bp, Artificial Sequence
  primer
gtaaaacgacggccagttatgtcagatggcaaggttgg

SEQ ID NO: 27173 - DNA, 42 bp, Artificial Sequence
  primer
gtaaaacgacggccagtttgaaagagagacagtcagatcaag

SEQ ID NO: 27174 - DNA, 38 bp, Artificial Sequence
  primer
gtaaaacgacggccagttcatctttgctgtcactcagg

SEQ ID NO: 27175 - DNA, 38 bp, Artificial Sequence
  primer
gtaaaacgacggccagtcaggctgttggaactcaagtc

SEQ ID NO: 27176 - DNA, 38 bp, Artificial Sequence
  primer
gtaaaacgacggccagttgattggaaatgttcagccag

SEQ ID NO: 27177 - DNA, 44 bp, Artificial Sequence
  primer
gtaaaacgacggccagtctagtgtgaatgatatagaagcctcag

SEQ ID NO: 27178 - DNA, 21 bp, Artificial Sequence
  primer
gggtacttgaagcccatgttc

SEQ ID NO: 27179 - DNA, 22 bp, Artificial Sequence
  primer
ttagcaatcaggagcttcttgg

SEQ ID NO: 27180 - DNA, 37 bp, Artificial Sequence
  primer
gtaaaacgacggccagttggctgtgccagtaaaggtc

SEQ ID NO: 27181 - DNA, 42 bp, Artificial Sequence
  primer
gtaaaacgacggccagtcgtgaatctgtttactgcattgtaa

SEQ ID NO: 27182 - DNA, 21 bp, Artificial Sequence
  primer
ccttgggctgtattcctatgg

SEQ ID NO: 27183 - DNA, 38 bp, Artificial Sequence
  primer
gtaaaacgacggccagtgtgtggccttggactcatttc

SEQ ID NO: 27184 - DNA, 21 bp, Artificial Sequence
  primer
cttctttacctccaagggctg

SEQ ID NO: 27185 - DNA, 21 bp, Artificial Sequence
  primer
gcacctgtggataggtaaggg

SEQ ID NO: 27186 - DNA, 38 bp, Artificial Sequence
  primer
gtaaaacgacggccagtgttctcaccctgcagaagacc

SEQ ID NO: 27187 - DNA, 38 bp, Artificial Sequence
  primer
gtaaaacgacggccagtgaggagagagggagagctgtg

SEQ ID NO: 27188 - DNA, 38 bp, Artificial Sequence
  primer
gtaaaacgacggccagttcactcacctcacctctgctg

SEQ ID NO: 27189 - DNA, 21 bp, Artificial Sequence
  primer
actctcttgtctgctcctggg

SEQ ID NO: 27190 - DNA, 38 bp, Artificial Sequence
  primer
gtaaaacgacggccagtagggactgactccacatctcc

SEQ ID NO: 27191 - DNA, 38 bp, Artificial Sequence
  primer
gtaaaacgacggccagttctgtgtccctgaaatcttgg

SEQ ID NO: 27192 - DNA, 37 bp, Artificial Sequence
  primer
gtaaaacgacggccagtcaggagagcagagcttgcag

SEQ ID NO: 27193 - DNA, 38 bp, Artificial Sequence
  primer
gtaaaacgacggccagtgtagggatgggactccatgtc

SEQ ID NO: 27194 - DNA, 20 bp, Artificial Sequence
  primer
gggagttaagtggcaccctg

SEQ ID NO: 27195 - DNA, 40 bp, Artificial Sequence
  primer
gtaaaacgacggccagtaatcctgcatctaggaaggtagg

SEQ ID NO: 27196 - DNA, 38 bp, Artificial Sequence
  primer
gtaaaacgacggccagtggcctatgccaagtgagtagc

SEQ ID NO: 27197 - DNA, 21 bp, Artificial Sequence
  primer
gtatgtgcaagtgggaacgtc

SEQ ID NO: 27198 - DNA, 20 bp, Artificial Sequence
  primer
gtggcaggtgcctgtaattc

SEQ ID NO: 27199 - DNA, 37 bp, Artificial Sequence
  primer
gtaaaacgacggccagtcagactggccctgatgagac

SEQ ID NO: 27200 - DNA, 36 bp, Artificial Sequence
  primer
gtaaaacgacggccagtccatatgaacgggaccagc

SEQ ID NO: 27201 - DNA, 36 bp, Artificial Sequence
  primer
gtaaaacgacggccagtgacgtgctgaggaggcttg

SEQ ID NO: 27202 - DNA, 21 bp, Artificial Sequence
  primer
tgcctccttatcccatcagtc

SEQ ID NO: 27203 - DNA, 37 bp, Artificial Sequence
  primer
gtaaaacgacggccagtaggacaaggagcctggagtc

SEQ ID NO: 27204 - DNA, 38 bp, Artificial Sequence
  primer
gtaaaacgacggccagtgaagagtgctgggactgtgtg

SEQ ID NO: 27205 - DNA, 38 bp, Artificial Sequence
  primer
gtaaaacgacggccagtgatatgtgacctcagccctcc

SEQ ID NO: 27206 - DNA, 21 bp, Artificial Sequence
  primer
aacttcaaggccctcttcagg

SEQ ID NO: 27207 - DNA, 38 bp, Artificial Sequence
  primer
gtaaaacgacggccagtacaaacaatcctgcccacttc

SEQ ID NO: 27208 - DNA, 38 bp, Artificial Sequence
  primer
gtaaaacgacggccagtctgtgggctgactgtacatgg

SEQ ID NO: 27209 - DNA, 38 bp, Artificial Sequence
  primer
gtaaaacgacggccagtccggaattacctggtaggttg

SEQ ID NO: 27210 - DNA, 37 bp, Artificial Sequence
  primer
gtaaaacgacggccagtacggttactagcaccctgcc

SEQ ID NO: 27211 - DNA, 21 bp, Artificial Sequence
  primer
gagggagttgacagtggcttc

SEQ ID NO: 27212 - DNA, 38 bp, Artificial Sequence
  primer
gtaaaacgacggccagtgtgtctggattctgggaaagg

SEQ ID NO: 27213 - DNA, 21 bp, Artificial Sequence
  primer
ttaccaatgggagactagcgg

SEQ ID NO: 27214 - DNA, 38 bp, Artificial Sequence
  primer
gtaaaacgacggccagtatgtgactcaagagggccaag

SEQ ID NO: 27215 - DNA, 21 bp, Artificial Sequence
  primer
gagagtctagtgggaggtggg

SEQ ID NO: 27216 - DNA, 20 bp, Artificial Sequence
  primer
gtggcctagggtctacctgc

SEQ ID NO: 27217 - DNA, 38 bp, Artificial Sequence
  primer
gtaaaacgacggccagtcctgtcatctagagccttggg

SEQ ID NO: 27218 - DNA, 38 bp, Artificial Sequence
  primer
gtaaaacgacggccagttccaggtgtgcgttagagttc

SEQ ID NO: 27219 - DNA, 38 bp, Artificial Sequence
  primer
gtaaaacgacggccagtgctacagaccatgggaatcag

SEQ ID NO: 27220 - DNA, 38 bp, Artificial Sequence
  primer
gtaaaacgacggccagtagaggcctgtgtgtccttgtc

SEQ ID NO: 27221 - DNA, 19 bp, Artificial Sequence
  primer
ggaactcagggctctctgg

SEQ ID NO: 27222 - DNA, 21 bp, Artificial Sequence
  primer
tagctgctgcttagaccctgc

SEQ ID NO: 27223 - DNA, 21 bp, Artificial Sequence
  primer
ctagctggtccctgagagagg

SEQ ID NO: 27224 - DNA, 38 bp, Artificial Sequence; identical to SEQ ID NO: 27214
  primer

SEQ ID NO: 27225 - DNA, 21 bp, Artificial Sequence
  primer
tttccaggaagaacagatggg

SEQ ID NO: 27226 - DNA, 21 bp, Artificial Sequence
  primer
ccactgtgcccagcttattac

SEQ ID NO: 27227 - DNA, 38 bp, Artificial Sequence
  primer
gtaaaacgacggccagtccaagttggtcctgtaccctc

SEQ ID NO: 27228 - DNA, 38 bp, Artificial Sequence
  primer
gtaaaacgacggccagtccctaggccttggattctgag

SEQ ID NO: 27229 - DNA, 21 bp, Artificial Sequence
  primer
atcaggtctggccactaggag

SEQ ID NO: 27230 - DNA, 38 bp, Artificial Sequence
  primer
gtaaaacgacggccagttgtctggacagctggaatcag

SEQ ID NO: 27231 - DNA, 18 bp, Artificial Sequence
  primer
tcctttgggtgcccagtc

SEQ ID NO: 27232 - DNA, 38 bp, Artificial Sequence
  primer
gtaaaacgacggccagttgacaagatgctggtgagagg

SEQ ID NO: 27233 - DNA, 38 bp, Artificial Sequence
  primer
gtaaaacgacggccagtaggcagacattcagggaagag

SEQ ID NO: 27234 - DNA, 21 bp, Artificial Sequence
  primer
ctcctctctgtgccttggatg

SEQ ID NO: 27235 - DNA, 38 bp, Artificial Sequence
  primer
gtaaaacgacggccagtgaggagacagctccagtgtgg

SEQ ID NO: 27236 - DNA, 21 bp, Artificial Sequence
  primer
atcccagtgcccttaataccc

SEQ ID NO: 27237 - DNA, 38 bp, Artificial Sequence
  primer
gtaaaacgacggccagtggccacttagatggtgtccag

SEQ ID NO: 27238 - DNA, 38 bp, Artificial Sequence
  primer
gtaaaacgacggccagtgtcccagttagtggcagaacc

SEQ ID NO: 27239 - DNA, 38 bp, Artificial Sequence
  primer
gtaaaacgacggccagtagcaactccaagaggtgaggg

SEQ ID NO: 27240 - DNA, 38 bp, Artificial Sequence
  primer
gtaaaacgacggccagttctgaggatgacatggaccag

SEQ ID NO: 27241 - DNA, 38 bp, Artificial Sequence
  primer
gtaaaacgacggccagtctcttgatcactcccagtgcc

SEQ ID NO: 27242 - DNA, 21 bp, Artificial Sequence
  primer
gccagttcttctggctgctac

SEQ ID NO: 27243 - DNA, 35 bp, Artificial Sequence
  primer
gtaaaacgacggccagtgcccggcctcagtatttc

SEQ ID NO: 27244 - DNA, 22 bp, Artificial Sequence
  primer
tggttattgagaaagcaggtgg

SEQ ID NO: 27245 - DNA, 38 bp, Artificial Sequence
  primer
gtaaaacgacggccagttggtgaggctatgtgagttgc

SEQ ID NO: 27246 - DNA, 38 bp, Artificial Sequence
  primer
gtaaaacgacggccagtatttgcttgagcctggaacag

SEQ ID NO: 27247 - DNA, 36 bp, Artificial Sequence
  primer
gtaaaacgacggccagtgggctccaatggaagagag

SEQ ID NO: 27248 - DNA, 38 bp, Artificial Sequence
  primer
gtaaaacgacggccagtcagcacaacttctggagaccc

SEQ ID NO: 27249 - DNA, 21 bp, Artificial Sequence
  primer
ctcacgtgatctttctgcctt

SEQ ID NO: 27250 - DNA, 38 bp, Artificial Sequence
  primer
gtaaaacgacggccagtaattcctgactctgggactgg

SEQ ID NO: 27251 - DNA, 38 bp, Artificial Sequence
  primer
gtaaaacgacggccagtggattccacaccctgagacac

SEQ ID NO: 27252 - DNA, 38 bp, Artificial Sequence
  primer
gtaaaacgacggccagtcctgacatggtctctgagctg

SEQ ID NO: 27253 - DNA, 37 bp, Artificial Sequence
  primer
gtaaaacgacggccagtacgggcacacacaaggtaag

SEQ ID NO: 27254 - DNA, 37 bp, Artificial Sequence
  primer
gtaaaacgacggccagtgtattccatcacgggcacac

SEQ ID NO: 27255 - DNA, 38 bp, Artificial Sequence
  primer
gtaaaacgacggccagtctggagcctgaagggtatttg

SEQ ID NO: 27256 - DNA, 35 bp, Artificial Sequence
  primer
gtaaaacgacggccagtgtgcgtggcttcaactcc

SEQ ID NO: 27257 - DNA, 38 bp, Artificial Sequence
  primer
gtaaaacgacggccagtggcaaaggttcaataagggtc

SEQ ID NO: 27258 - DNA, 36 bp, Artificial Sequence
  primer
gtaaaacgacggccagtcagaggtgagaaggggcag

SEQ ID NO: 27259 - DNA, 38 bp, Artificial Sequence
  primer
gtaaaacgacggccagtctccacggtccctacctagac

SEQ ID NO: 27260 - DNA, 38 bp, Artificial Sequence
  primer
gtaaaacgacggccagttcccatctgtaatttgcaggg

SEQ ID NO: 27261 - DNA, 38 bp, Artificial Sequence
  primer
gtaaaacgacggccagtctagggctctgaggctctgtc

SEQ ID NO: 27262 - DNA, 38 bp, Artificial Sequence
  primer
gtaaaacgacggccagtttaagggagtcacatccaccc

SEQ ID NO: 27263 - DNA, 21 bp, Artificial Sequence
  primer
caggaagtgctgtggtttgac

SEQ ID NO: 27264 - DNA, 38 bp, Artificial Sequence
  primer
gtaaaacgacggccagtcaccagaagaaagggagttgg

SEQ ID NO: 27265 - DNA, 38 bp, Artificial Sequence
  primer
gtaaaacgacggccagtccagaggattgaagggatcag

SEQ ID NO: 27266 - DNA, 21 bp, Artificial Sequence
  primer
gaacaaccagctgacccagac

SEQ ID NO: 27267 - DNA, 37 bp, Artificial Sequence
  primer
gtaaaacgacggccagtacagacaggtgagccaggtg

SEQ ID NO: 27268 - DNA, 37 bp, Artificial Sequence
  primer
gtaaaacgacggccagtgatgcaaaggacttgatggc

SEQ ID NO: 27269 - DNA, 38 bp, Artificial Sequence
  primer
gtaaaacgacggccagttttacactccgtgacacctgc

SEQ ID NO: 27270 - DNA, 39 bp, Artificial Sequence
  primer
gtaaaacgacggccagttgtagcctctggtggtaaggac

SEQ ID NO: 27271 - DNA, 20 bp, Artificial Sequence
  primer
atgacatgcctgtctcctgc

SEQ ID NO: 27272 - DNA, 38 bp, Artificial Sequence
  primer
gtaaaacgacggccagtgggaaataggcagaggatcag

SEQ ID NO: 27273 - DNA, 38 bp, Artificial Sequence
  primer
gtaaaacgacggccagtccagtcccaagtgagtcagtg

SEQ ID NO: 27274 - DNA, 37 bp, Artificial Sequence
  primer
gtaaaacgacggccagtctgcagccaaatgaggtcag

SEQ ID NO: 27275 - DNA, 21 bp, Artificial Sequence
  primer
tgtttggaagtcgtcaacagg

SEQ ID NO: 27276 - DNA, 38 bp, Artificial Sequence
  primer
gtaaaacgacggccagtcaggacagtggctatgctgtg

SEQ ID NO: 27277 - DNA, 38 bp, Artificial Sequence
  primer
gtaaaacgacggccagtccacagaactctctgcactgg

SEQ ID NO: 27278 - DNA, 38 bp, Artificial Sequence
  primer
gtaaaacgacggccagtcttcgaccctttgagctgttc

SEQ ID NO: 27279 - DNA, 21 bp, Artificial Sequence
  primer
gaaggtggtgggtctttcttg

SEQ ID NO: 27280 - DNA, 38 bp, Artificial Sequence
  primer
gtaaaacgacggccagtgtgctgtagctgctcacttcg

SEQ ID NO: 27281 - DNA, 38 bp, Artificial Sequence
  primer
gtaaaacgacggccagtctttctcagatcttggcaggg

SEQ ID NO: 27282 - DNA, 38 bp, Artificial Sequence
  primer
gtaaaacgacggccagtgagggcaagatgggtacattg

SEQ ID NO: 27283 - DNA, 22 bp, Artificial Sequence
  primer
ttctaacaggtatgagcagccc

SEQ ID NO: 27284 - DNA, 38 bp, Artificial Sequence
  primer
gtaaaacgacggccagttctaagccaggtccctttcag

SEQ ID NO: 27285 - DNA, 38 bp, Artificial Sequence
  primer
gtaaaacgacggccagttgccttcctctgaggtttagg

SEQ ID NO: 27286 - DNA, 37 bp, Artificial Sequence
  primer
gtaaaacgacggccagttcagaccctgagaggcagag

SEQ ID NO: 27287 - DNA, 38 bp, Artificial Sequence
  primer
gtaaaacgacggccagtacctcctgtgcttcttatggg

SEQ ID NO: 27288 - DNA, 38 bp, Artificial Sequence
  primer
gtaaaacgacggccagtagactggactgaggtcttccg

SEQ ID NO: 27289 - DNA, 36 bp, Artificial Sequence
  primer
gtaaaacgacggccagtctccggtgaatcatcgctc

SEQ ID NO: 27290 - DNA, 20 bp, Artificial Sequence
  primer
cacaatgaaggaggctccag

SEQ ID NO: 27291 - DNA, 36 bp, Artificial Sequence
  primer
gtaaaacgacggccagtaaaccctctgacccaaccc

SEQ ID NO: 27292 - DNA, 37 bp, Artificial Sequence
  primer
gtaaaacgacggccagtatgcgctcatggaacctatc

SEQ ID NO: 27293 - DNA, 38 bp, Artificial Sequence
  primer
gtaaaacgacggccagttggagcatcaaatctagacgg

SEQ ID NO: 27294 - DNA, 37 bp, Artificial Sequence
  primer
gtaaaacgacggccagttctccaagtgcaagaaagcg

SEQ ID NO: 27295 - DNA, 39 bp, Artificial Sequence
  primer
gtaaaacgacggccagttgatcctccctcatacatggac

SEQ ID NO: 27296 - DNA, 21 bp, Artificial Sequence
  primer
agccagatgtgggctactttc

SEQ ID NO: 27297 - DNA, 38 bp, Artificial Sequence
  primer
gtaaaacgacggccagtgtgttggtggaaagtcaaggc

SEQ ID NO: 27298 - DNA, 22 bp, Artificial Sequence
  primer
catctccctttatctccatccc

SEQ ID NO: 27299 - DNA, 38 bp, Artificial Sequence
  primer
gtaaaacgacggccagtagttaggaagggaggtgaggg

SEQ ID NO: 27300 - DNA, 38 bp, Artificial Sequence
  primer
gtaaaacgacggccagtcctcgcctccttatacaccag

SEQ ID NO: 27301 - DNA, 38 bp, Artificial Sequence
  primer
gtaaaacgacggccagtctgctggatttagcactgcac

SEQ ID NO: 27302 - DNA, 38 bp, Artificial Sequence
  primer
gtaaaacgacggccagtaaatcaccgtagaatttgggc

SEQ ID NO: 27303 - DNA, 20 bp, Artificial Sequence
  primer
aaatgcacattcataggccc

SEQ ID NO: 27304 - DNA, 38 bp, Artificial Sequence
  primer
gtaaaacgacggccagtacatcatctgcactgtcccag

SEQ ID NO: 27305 - DNA, 37 bp, Artificial Sequence
  primer
gtaaaacgacggccagtatggaggtttagccagtggg

SEQ ID NO: 27306 - DNA, 38 bp, Artificial Sequence
  primer
gtaaaacgacggccagtcataagtgattcttccacggc

SEQ ID NO: 27307 - DNA, 38 bp, Artificial Sequence
  primer
gtaaaacgacggccagtcagggtgaaggtggacagttc

SEQ ID NO: 27308 - DNA, 39 bp, Artificial Sequence
  primer
gtaaaacgacggccagttggtggtcagtgaagtcagttg

SEQ ID NO: 27309 - DNA, 24 bp, Artificial Sequence
  primer
gttagtgcactgatattgtagccc

SEQ ID NO: 27310 - DNA, 38 bp, Artificial Sequence
  primer
gtaaaacgacggccagtctttgcagttgcttcctttcc

SEQ ID NO: 27311 - DNA, 20 bp, Artificial Sequence
  primer
gcgcatgcctatagtcccag

SEQ ID NO: 27312 - DNA, 38 bp, Artificial Sequence
  primer
gtaaaacgacggccagttgggttgacacctctgtaagg

SEQ ID NO: 27313 - DNA, 38 bp, Artificial Sequence
  primer
gtaaaacgacggccagttgaggaatgtggaggaaggac

SEQ ID NO: 27314 - DNA, 21 bp, Artificial Sequence
  primer
aacatcacagcatccaagagg

SEQ ID NO: 27315 - DNA, 38 bp, Artificial Sequence
  primer
gtaaaacgacggccagtctttcagggagcagagtggtc

SEQ ID NO: 27316 - DNA, 21 bp, Artificial Sequence
  primer
gcagactcaggaggaaaggtc

SEQ ID NO: 27317 - DNA, 38 bp, Artificial Sequence
  primer
gtaaaacgacggccagtctcaccagcccatttaaggag

SEQ ID NO: 27318 - DNA, 21 bp, Artificial Sequence
  primer
gaccctgaccaagttcctgtg

SEQ ID NO: 27319 - DNA, 38 bp, Artificial Sequence
  primer
gtaaaacgacggccagtatggctccctctgtctcatcc

SEQ ID NO: 27320 - DNA, 21 bp, Artificial Sequence
  primer
acccacagagctcctggtatc

SEQ ID NO: 27321 - DNA, 21 bp, Artificial Sequence
  primer
aactgtgacatgggtgaccag

SEQ ID NO: 27322 - DNA, 38 bp, Artificial Sequence
  primer
gtaaaacgacggccagttctctagaggctggttctggc

SEQ ID NO: 27323 - DNA, 38 bp, Artificial Sequence
  primer
gtaaaacgacggccagtatctcactccagctcaccagg

SEQ ID NO: 27324 - DNA, 37 bp, Artificial Sequence
  primer
gtaaaacgacggccagtacacagccaggtggaatttg

SEQ ID NO: 27325 - DNA, 21 bp, Artificial Sequence
  primer
ctgaaccatgaccctcctctc

SEQ ID NO: 27326 - DNA, 38 bp, Artificial Sequence
  primer
gtaaaacgacggccagtagtctcctagaccctccctcc

SEQ ID NO: 27327 - DNA, 21 bp, Artificial Sequence
  primer
tggaacaagattaaggcctgg

SEQ ID NO: 27328 - DNA, 38 bp, Artificial Sequence
  primer
gtaaaacgacggccagtagggcttctcactttcccttc

SEQ ID NO: 27329 - DNA, 38 bp, Artificial Sequence
  primer
gtaaaacgacggccagttactggtgattctctgcctgc

SEQ ID NO: 27330 - DNA, 21 bp, Artificial Sequence
  primer
cagtaagccactgcttcttgg

SEQ ID NO: 27331 - DNA, 37 bp, Artificial Sequence; identical to SEQ ID NO: 27324
  primer

SEQ ID NO: 27332 - DNA, 21 bp, Artificial Sequence
  primer
gacccagggactctgtgagtg

SEQ ID NO: 27333 - DNA, 19 bp, Artificial Sequence
  primer
agtctgtggtgggaggcag

SEQ ID NO: 27334 - DNA, 21 bp, Artificial Sequence
  primer
tacattccgattcgctggaag

SEQ ID NO: 27335 - DNA, 38 bp, Artificial Sequence
  primer
gtaaaacgacggccagtctgcgtgactgtaacaggttg

SEQ ID NO: 27336 - DNA, 20 bp, Artificial Sequence
  primer
catgactgcaattcccatcc

SEQ ID NO: 27337 - DNA, 36 bp, Artificial Sequence
  primer
gtaaaacgacggccagtcttgtgggaggagacaggc

SEQ ID NO: 27338 - DNA, 38 bp, Artificial Sequence
  primer
gtaaaacgacggccagtatattaggttgttgggctggg

SEQ ID NO: 27339 - DNA, 21 bp, Artificial Sequence
  primer
aggctctggagtctgagcttc

SEQ ID NO: 27340 - DNA, 21 bp, Artificial Sequence
  primer
ataaagggattccatcgtccc

SEQ ID NO: 27341 - DNA, 21 bp, Artificial Sequence
  primer
gatagagaaggcaggaagccc

SEQ ID NO: 27342 - DNA, 38 bp, Artificial Sequence
  primer
gtaaaacgacggccagtaggctccagtctctccatctg

SEQ ID NO: 27343 - DNA, 20 bp, Artificial Sequence
  primer
accttgcccgtagttcatgg

SEQ ID NO: 27344 - DNA, 39 bp, Artificial Sequence
  primer
gtaaaacgacggccagtcggctgtttgtctaatctcagg

SEQ ID NO: 27345 - DNA, 38 bp, Artificial Sequence
  primer
gtaaaacgacggccagtcctgcctagttcagctcacag

SEQ ID NO: 27346 - DNA, 38 bp, Artificial Sequence
  primer
gtaaaacgacggccagtatgcttcctgttgccctgtag

SEQ ID NO: 27347 - DNA, 40 bp, Artificial Sequence
  primer
gtaaaacgacggccagtgccatctggtaaagtctaggcag

SEQ ID NO: 27348 - DNA, 21 bp, Artificial Sequence
  primer
tgtttcaagttgggtgtcagg

SEQ ID NO: 27349 - DNA, 21 bp, Artificial Sequence
  primer
ccgcagatgaaataaagcagg

SEQ ID NO: 27350 - DNA, 21 bp, Artificial Sequence
  primer
ttctgcactaagggaattggg

SEQ ID NO: 27351 - DNA, 38 bp, Artificial Sequence
  primer
gtaaaacgacggccagttaactcaaggctctgcttccc

SEQ ID NO: 27352 - DNA, 21 bp, Artificial Sequence
  primer
gcagagagaatgaaggcaaac

SEQ ID NO: 27353 - DNA, 38 bp, Artificial Sequence
  primer
gtaaaacgacggccagtcagcaatgatgtctgctttgg

SEQ ID NO: 27354 - DNA, 38 bp, Artificial Sequence
  primer
gtaaaacgacggccagtgctcgagtgctatgctgaaag

SEQ ID NO: 27355 - DNA, 38 bp, Artificial Sequence
  primer
gtaaaacgacggccagttagatctggatgtcactgggc

SEQ ID NO: 27356 - DNA, 39 bp, Artificial Sequence
  primer
gtaaaacgacggccagtaagtaaactttgccgctccttc

SEQ ID NO: 27357 - DNA, 43 bp, Artificial Sequence
  primer
gtaaaacgacggccagtggaaaccaatattgaatgagaatgtg

SEQ ID NO: 27358 - DNA, 21 bp, Artificial Sequence
  primer
tctagcctgggtaacagagca

SEQ ID NO: 27359 - DNA, 38 bp, Artificial Sequence
  primer
gtaaaacgacggccagtgttctgaggttcctgccactc

SEQ ID NO: 27360 - DNA, 22 bp, Artificial Sequence
  primer
ggatgcttgactggttcttcaa

SEQ ID NO: 27361 - DNA, 25 bp, Artificial Sequence
  primer
ttgaatagtcttgtcttcttgtggg

SEQ ID NO: 27362 - DNA, 21 bp, Artificial Sequence
  primer
gagccagatttgaccagaagg

SEQ ID NO: 27363 - DNA, 42 bp, Artificial Sequence
  primer
gtaaaacgacggccagtcctatgttaccttccacatgtaccc

SEQ ID NO: 27364 - DNA, 38 bp, Artificial Sequence
  primer
gtaaaacgacggccagttttatgaaattgccaagacgg

SEQ ID NO: 27365 - DNA, 42 bp, Artificial Sequence
  primer
gtaaaacgacggccagtaaacattaccttaatagccgtcagc

SEQ ID NO: 27366 - DNA, 40 bp, Artificial Sequence
  primer
gtaaaacgacggccagttgagatgtaatagctgctctggg

SEQ ID NO: 27367 - DNA, 22 bp, Artificial Sequence
  primer
tccttctttggtaggtttctgg

SEQ ID NO: 27368 - DNA, 44 bp, Artificial Sequence
  primer
gtaaaacgacggccagtaatattaatttcaagttgatttgaggg

SEQ ID NO: 27369 - DNA, 23 bp, Artificial Sequence
  primer
acgttggaaaggaagatacagtg

SEQ ID NO: 27370 - DNA, 38 bp, Artificial Sequence
  primer
gtaaaacgacggccagtgtcacgcccacagtgactatc

SEQ ID NO: 27371 - DNA, 25 bp, Artificial Sequence
  primer
ccataatcttaatagcctccgaatc

SEQ ID NO: 27372 - DNA, 41 bp, Artificial Sequence
  primer
gtaaaacgacggccagtcagttaaggagatgtccatccaag

SEQ ID NO: 27373 - DNA, 21 bp, Artificial Sequence
  primer
cccagctcattaaacctgacc

SEQ ID NO: 27374 - DNA, 21 bp, Artificial Sequence
  primer
tcagcagcaaataaagatggg

SEQ ID NO: 27375 - DNA, 30 bp, Artificial Sequence
  primer
aaacataaacttagtatgacatctgcactt

SEQ ID NO: 27376 - DNA, 38 bp, Artificial Sequence
  primer
gtaaaacgacggccagtggcaatatagcgttggatttg

SEQ ID NO: 27377 - DNA, 38 bp, Artificial Sequence
  primer
gtaaaacgacggccagtacacacagctcgcttcttcac

SEQ ID NO: 27378 - DNA, 38 bp, Artificial Sequence
  primer
gtaaaacgacggccagtagagagaccctgagcctaccc

SEQ ID NO: 27379 - DNA, 20 bp, Artificial Sequence
  primer
cagagaagagcaggcaaggg

SEQ ID NO: 27380 - DNA, 21 bp, Artificial Sequence
  primer
gtaacttggtggacaaagccc

SEQ ID NO: 27381 - DNA, 38 bp, Artificial Sequence
  primer
gtaaaacgacggccagttgggagatgcttcaggcttag

SEQ ID NO: 27382 - DNA, 37 bp, Artificial Sequence
  primer
gtaaaacgacggccagtcaggcatgtagctgggtctg

SEQ ID NO: 27383 - DNA, 38 bp, Artificial Sequence
  primer
gtaaaacgacggccagtagaaccagttctggatggagc

SEQ ID NO: 27384 - DNA, 38 bp, Artificial Sequence
  primer
gtaaaacgacggccagtctgaccagccctcttatttgg

SEQ ID NO: 27385 - DNA, 36 bp, Artificial Sequence
  primer
gtaaaacgacggccagtccttgcggacaggaacaag

SEQ ID NO: 27386 - DNA, 21 bp, Artificial Sequence
  primer
gcagataggtgtatgtgcgtg

SEQ ID NO: 27387 - DNA, 38 bp, Artificial Sequence
  primer
gtaaaacgacggccagtagagtccatgaattgtgtccg

SEQ ID NO: 27388 - DNA, 21 bp, Artificial Sequence
  primer
ttcaaagggacagaaccttcc

SEQ ID NO: 27389 - DNA, 21 bp, Artificial Sequence
  primer
cctcgtctgtaaggcagaagg

SEQ ID NO: 27390 - DNA, 39 bp, Artificial Sequence
  primer
gtaaaacgacggccagtgataggtacatctgcccacagc

SEQ ID NO: 27391 - DNA, 38 bp, Artificial Sequence
  primer
gtaaaacgacggccagtgccacattattgggctttcag

SEQ ID NO: 27392 - DNA, 37 bp, Artificial Sequence
  primer
gtaaaacgacggccagtcagtcccagagctgaggtcc

SEQ ID NO: 27393 - DNA, 38 bp, Artificial Sequence
  primer
gtaaaacgacggccagttcacccatttactgccatcag

SEQ ID NO: 27394 - DNA, 38 bp, Artificial Sequence
  primer
gtaaaacgacggccagtaggagtgaaacagtggcttcc

SEQ ID NO: 27395 - DNA, 22 bp, Artificial Sequence
  primer
catccgttcagagaagttcacc

SEQ ID NO: 27396 - DNA, 21 bp, Artificial Sequence
  primer
tggtttcctgctgagacagac

SEQ ID NO: 27397 - DNA, 21 bp, Artificial Sequence
  primer
gaaatgcgtgtttgaagggag

SEQ ID NO: 27398 - DNA, 38 bp, Artificial Sequence
  primer
gtaaaacgacggccagtgtaaggaagataacggctggg

SEQ ID NO: 27399 - DNA, 37 bp, Artificial Sequence
  primer
gtaaaacgacggccagtagcttcgccatgggtcttag

SEQ ID NO: 27400 - DNA, 38 bp, Artificial Sequence
  primer
gtaaaacgacggccagtacaatcccagtgttcccattc

SEQ ID NO: 27401 - DNA, 38 bp, Artificial Sequence
  primer
gtaaaacgacggccagtggtagattcagaggcagaggg

SEQ ID NO: 27402 - DNA, 38 bp, Artificial Sequence
  primer
gtaaaacgacggccagtcctgcttgctgtatcaccatc

SEQ ID NO: 27403 - DNA, 21 bp, Artificial Sequence
  primer
ctgggctttgaggaattcaag

SEQ ID NO: 27404 - DNA, 37 bp, Artificial Sequence
  primer
gtaaaacgacggccagtctttgaggcagcaggtatgg

SEQ ID NO: 27405 - DNA, 21 bp, Artificial Sequence
  primer
caagtgatcctcccatcttgg

SEQ ID NO: 27406 - DNA, 38 bp, Artificial Sequence
  primer
gtaaaacgacggccagtttgacaaagatggcactggac

SEQ ID NO: 27407 - DNA, 39 bp, Artificial Sequence
  primer
gtaaaacgacggccagtgctaggacctcatggaactcag

SEQ ID NO: 27408 - DNA, 38 bp, Artificial Sequence
  primer
gtaaaacgacggccagttcttggagaagctcttggagg

SEQ ID NO: 27409 - DNA, 21 bp, Artificial Sequence
  primer
ttcggcaacaatttacacagc

SEQ ID NO: 27410 - DNA, 35 bp, Artificial Sequence
  primer
gtaaaacgacggccagtcctagccggcaggaattg

SEQ ID NO: 27411 - DNA, 38 bp, Artificial Sequence
  primer
gtaaaacgacggccagtaatgggcagatgagctagtcc

SEQ ID NO: 27412 - DNA, 38 bp, Artificial Sequence
  primer
gtaaaacgacggccagtaacccagagattgcctgagac

SEQ ID NO: 27413 - DNA, 21 bp, Artificial Sequence
  primer
tttggagcaatcaactccagg

SEQ ID NO: 27414 - DNA, 21 bp, Artificial Sequence
  primer
acagagctttcctggttggag

SEQ ID NO: 27415 - DNA, 40 bp, Artificial Sequence
  primer
gtaaaacgacggccagtggaaatgtctttgcactcatttg

SEQ ID NO: 27416 - DNA, 38 bp, Artificial Sequence
  primer
gtaaaacgacggccagtgttacaaagccagtggcatcc

SEQ ID NO: 27417 - DNA, 21 bp, Artificial Sequence
  primer
caatttgctcctcctgagtgc

SEQ ID NO: 27418 - DNA, 21 bp, Artificial Sequence
  primer
actgaatgtggagggcatctc

SEQ ID NO: 27419 - DNA, 38 bp, Artificial Sequence
  primer
gtaaaacgacggccagtctttaccacgtcccaaagctc

SEQ ID NO: 27420 - DNA, 21 bp, Artificial Sequence
  primer
taagccagaggacctgcattc

SEQ ID NO: 27421 - DNA, 21 bp, Artificial Sequence
  primer
aacacagctaacacaaggccc

SEQ ID NO: 27422 - DNA, 37 bp, Artificial Sequence
  primer
gtaaaacgacggccagtatgccaccatggagaaactc

SEQ ID NO: 27423 - DNA, 38 bp, Artificial Sequence
  primer
gtaaaacgacggccagtgggactcctccctaagagctg

SEQ ID NO: 27424 - DNA, 20 bp, Artificial Sequence
  primer
actcctctgagaaggacggg

SEQ ID NO: 27425 - DNA, 43 bp, Artificial Sequence
  primer
gtaaaacgacggccagttccatctatatctaagacggaaatca

SEQ ID NO: 27426 - DNA, 36 bp, Artificial Sequence
  primer
gtaaaacgacggccagtgagctcttagctccctccg

SEQ ID NO: 27427 - DNA, 39 bp, Artificial Sequence
  primer
gtaaaacgacggccagtcataaccttcactcattgccac

SEQ ID NO: 27428 - DNA, 37 bp, Artificial Sequence
  primer
gtaaaacgacggccagtcttgcagagagctcattggg

SEQ ID NO: 27429 - DNA, 44 bp, Artificial Sequence
  primer
gtaaaacgacggccagtttacccttgttaaagtatatcgtgtca

SEQ ID NO: 27430 - DNA, 19 bp, Artificial Sequence
  primer
aagcagcaggcagagttgg

SEQ ID NO: 27431 - DNA, 24 bp, Artificial Sequence
  primer
tttcttatgaaagataactgcggc

SEQ ID NO: 27432 - DNA, 21 bp, Artificial Sequence
  primer
gaaccattcaccacagattcc

SEQ ID NO: 27433 - DNA, 37 bp, Artificial Sequence
  primer
gtaaaacgacggccagtaatagctaggtgtggtggcg

SEQ ID NO: 27434 - DNA, 41 bp, Artificial Sequence
  primer
gtaaaacgacggccagtttcatgtgtaaataaattggctgg

SEQ ID NO: 27435 - DNA, 38 bp, Artificial Sequence
  primer
gtaaaacgacggccagtaaggcaaaccctacttcctgg

SEQ ID NO: 27436 - DNA, 27 bp, Artificial Sequence
  primer
acctatattgatagtaacagctttggg

SEQ ID NO: 27437 - DNA, 42 bp, Artificial Sequence
  primer
gtaaaacgacggccagtacacaaatctgtgaacattagcatc

SEQ ID NO: 27438 - DNA, 24 bp, Artificial Sequence
  primer
ttatgttaacactggatgtctggg

SEQ ID NO: 27439 - DNA, 40 bp, Artificial Sequence
  primer
gtaaaacgacggccagtaataatacgggacttggttgaaa

SEQ ID NO: 27440 - DNA, 25 bp, Artificial Sequence
  primer
cccatgtgcactattgtgttctaag

SEQ ID NO: 27441 - DNA, 21 bp, Artificial Sequence
  primer
ttgccaaactggaaatgacag

SEQ ID NO: 27442 - DNA, 40 bp, Artificial Sequence
  primer
gtaaaacgacggccagtagcttaaagcatggatttgtgtc

SEQ ID NO: 27443 - DNA, 21 bp, Artificial Sequence
  primer
aatcaaaggagggtagtgggc

SEQ ID NO: 27444 - DNA, 39 bp, Artificial Sequence
  primer
gtaaaacgacggccagtatcctgtctatccttcacaggg

SEQ ID NO: 27445 - DNA, 20 bp, Artificial Sequence
  primer
gagagcacgctgcactcaag

SEQ ID NO: 27446 - DNA, 43 bp, Artificial Sequence
  primer
gtaaaacgacggccagtagtgatcttaaggtgattgagtgaaa

SEQ ID NO: 27447 - DNA, 38 bp, Artificial Sequence
  primer
gtaaaacgacggccagttttgatcttgcttgtgtttgg

SEQ ID NO: 27448 - DNA, 21 bp, Artificial Sequence
  primer
tttgcagtgtgcaatgtagga

SEQ ID NO: 27449 - DNA, 43 bp, Artificial Sequence
  primer
gtaaaacgacggccagttttaaggaagaagcttaaatgagtgt

SEQ ID NO: 27450 - DNA, 21 bp, Artificial Sequence
  primer
ttggaatgatggcctactttg

SEQ ID NO: 27451 - DNA, 26 bp, Artificial Sequence
  primer
tggcattaaatccattatgtaagttc

SEQ ID NO: 27452 - DNA, 38 bp, Artificial Sequence
  primer
gtaaaacgacggccagtgcattgatatgcttgttgacg

SEQ ID NO: 27453 - DNA, 21 bp, Artificial Sequence
  primer
cagctgaacattgagaccagc

SEQ ID NO: 27454 - DNA, 36 bp, Artificial Sequence
  primer
gtaaaacgacggccagtccggctcttctagctgctg

SEQ ID NO: 27455 - DNA, 38 bp, Artificial Sequence
  primer
gtaaaacgacggccagtgaggtatagctggttggctgg

SEQ ID NO: 27456 - DNA, 21 bp, Artificial Sequence
  primer
gcaggaaggacaaggaaagag

SEQ ID NO: 27457 - DNA, 21 bp, Artificial Sequence
  primer
tctcaccacaatgtaatgggc

SEQ ID NO: 27458 - DNA, 21 bp, Artificial Sequence
  primer
aggacctgaaagaaagcttgg

SEQ ID NO: 27459 - DNA, 19 bp, Artificial Sequence
  primer
atgttcactcctgggcacc

SEQ ID NO: 27460 - DNA, 21 bp, Artificial Sequence
  primer
cccacttgagacagagactgc

SEQ ID NO: 27461 - DNA, 20 bp, Artificial Sequence
  primer
ccagggccagatgttaaagg

SEQ ID NO: 27462 - DNA, 21 bp, Artificial Sequence
  primer
cgagatttcagatagccaggg

SEQ ID NO: 27463 - DNA, 38 bp, Artificial Sequence
  primer
gtaaaacgacggccagtcctgaatcccagaatctttgc

SEQ ID NO: 27464 - DNA, 40 bp, Artificial Sequence
  primer
gtaaaacgacggccagtaggaagggagatgttaggatgac

SEQ ID NO: 27465 - DNA, 38 bp, Artificial Sequence
  primer
gtaaaacgacggccagttgaagtcggtttgtgcttcag

SEQ ID NO: 27466 - DNA, 21 bp, Artificial Sequence
  primer
gtggtttagagcagctcccag

SEQ ID NO: 27467 - DNA, 38 bp, Artificial Sequence
  primer
gtaaaacgacggccagttccatgtaagccatatgccac

SEQ ID NO: 27468 - DNA, 35 bp, Artificial Sequence
  primer
gtaaaacgacggccagtgaggcgactgtagcgtgc

SEQ ID NO: 27469 - DNA, 21 bp, Artificial Sequence
  primer
tggcagaatggctctcttctc

SEQ ID NO: 27470 - DNA, 41 bp, Artificial Sequence
  primer
gtaaaacgacggccagtttccagaatttccctctagtgttt

SEQ ID NO: 27471 - DNA, 38 bp, Artificial Sequence
  primer
gtaaaacgacggccagtggagtgagggagcaggtcttc

SEQ ID NO: 27472 - DNA, 21 bp, Artificial Sequence
  primer
ttgtccagtcacacccttctc

SEQ ID NO: 27473 - DNA, 38 bp, Artificial Sequence
  primer
gtaaaacgacggccagtctcagactgttggtgagcgtc

SEQ ID NO: 27474 - DNA, 40 bp, Artificial Sequence
  primer
gtaaaacgacggccagtgatagctgccattctccttactg

SEQ ID NO: 27475 - DNA, 38 bp, Artificial Sequence
  primer
gtaaaacgacggccagtcatggcaggtgctcagtaaag

SEQ ID NO: 27476 - DNA, 38 bp, Artificial Sequence
  primer
gtaaaacgacggccagtgggccctacttctcatttgtg

SEQ ID NO: 27477 - DNA, 22 bp, Artificial Sequence
  primer
gggctgtgagacatttatctgg

SEQ ID NO: 27478 - DNA, 21 bp, Artificial Sequence
  primer
agtgggtctgatgtgctcctg

SEQ ID NO: 27479 - DNA, 38 bp, Artificial Sequence
  primer
gtaaaacgacggccagttgggaaatgaaatcactgtgg

SEQ ID NO: 27480 - DNA, 38 bp, Artificial Sequence
  primer
gtaaaacgacggccagtaactgtgaggcatgaaacacc

SEQ ID NO: 27481 - DNA, 38 bp, Artificial Sequence
  primer
gtaaaacgacggccagtctgtttctagaaggcactggc

SEQ ID NO: 27482 - DNA, 20 bp, Artificial Sequence
  primer
attccctcaccatcctctgg

SEQ ID NO: 27483 - DNA, 38 bp, Artificial Sequence
  primer
gtaaaacgacggccagtgaaggacatctttgctgaccc

SEQ ID NO: 27484 - DNA, 38 bp, Artificial Sequence
  primer
gtaaaacgacggccagtcagcagcaggacttaggaagg

SEQ ID NO: 27485 - DNA, 21 bp, Artificial Sequence
  primer
tccgtaacctgctagacctgc

SEQ ID NO: 27486 - DNA, 37 bp, Artificial Sequence
  primer
gtaaaacgacggccagtatctgggaaggcggtgatag

SEQ ID NO: 27487 - DNA, 38 bp, Artificial Sequence
  primer
gtaaaacgacggccagtctgccatctgtctctctttgg

SEQ ID NO: 27488 - DNA, 41 bp, Artificial Sequence
  primer
gtaaaacgacggccagtcagaggagttgatagagctgttcc

SEQ ID NO: 27489 - DNA, 38 bp, Artificial Sequence
  primer
gtaaaacgacggccagtgatttacgtcatctgggctcc

SEQ ID NO: 27490 - DNA, 38 bp, Artificial Sequence
  primer
gtaaaacgacggccagtagtgagtgaatgaatggcacc

SEQ ID NO: 27491 - DNA, 21 bp, Artificial Sequence
  primer
ctggagaaggtttcttggagc

SEQ ID NO: 27492 - DNA, 38 bp, Artificial Sequence
  primer
gtaaaacgacggccagttctgtccgtatctgttgctgg

SEQ ID NO: 27493 - DNA, 21 bp, Artificial Sequence
  primer
cgagcagagaacagctttcag

SEQ ID NO: 27494 - DNA, 38 bp, Artificial Sequence
  primer
gtaaaacgacggccagtgaaggtagtgactgacacgcc

SEQ ID NO: 27495 - DNA, 21 bp, Artificial Sequence
  primer
caaagtgagcttcatgttcgg

SEQ ID NO: 27496 - DNA, 21 bp, Artificial Sequence
  primer
cttggctcctgtcctgtcttc

SEQ ID NO: 27497 - DNA, 21 bp, Artificial Sequence
  primer
tctcttccacctcaaaccctc

SEQ ID NO: 27498 - DNA, 20 bp, Artificial Sequence
  primer
cagatgtgcttcaagctcgg

SEQ ID NO: 27499 - DNA, 20 bp, Artificial Sequence
  primer
gcctactccacccttccttg

SEQ ID NO: 27500 - DNA, 38 bp, Artificial Sequence
  primer
gtaaaacgacggccagtagggaacctcagagacccatc

SEQ ID NO: 27501 - DNA, 19 bp, Artificial Sequence
  primer
cttctcggagccaggacac

SEQ ID NO: 27502 - DNA, 38 bp, Artificial Sequence
  primer
gtaaaacgacggccagttttcccaatgtacagagagcg

SEQ ID NO: 27503 - DNA, 38 bp, Artificial Sequence
  primer
gtaaaacgacggccagtggtgaggaaagctgctgtagg

SEQ ID NO: 27504 - DNA, 36 bp, Artificial Sequence
  primer
gtaaaacgacggccagtgccatccctacgcagagtc

SEQ ID NO: 27505 - DNA, 38 bp, Artificial Sequence
  primer
gtaaaacgacggccagtaagaaagcgttagcatggagg

SEQ ID NO: 27506 - DNA, 37 bp, Artificial Sequence
  primer
gtaaaacgacggccagttgaacaaggtctggctttgc

SEQ ID NO: 27507 - DNA, 36 bp, Artificial Sequence
  primer
gtaaaacgacggccagttcacactgacggtggcttc

SEQ ID NO: 27508 - DNA, 21 bp, Artificial Sequence
  primer
atttaaacatggctggaaggg

SEQ ID NO: 27509 - DNA, 38 bp, Artificial Sequence
  primer
gtaaaacgacggccagtggtctcatctcctggatcagc

SEQ ID NO: 27510 - DNA, 37 bp, Artificial Sequence
  primer
gtaaaacgacggccagtatagggagaagcaaggcagg

SEQ ID NO: 27511 - DNA, 38 bp, Artificial Sequence
  primer
gtaaaacgacggccagttgggatcacctttgacctttc

SEQ ID NO: 27512 - DNA, 18 bp, Artificial Sequence
  primer
tgacctcgtgatctgccc

SEQ ID NO: 27513 - DNA, 38 bp, Artificial Sequence
  primer
gtaaaacgacggccagtgatttggttgtggaaaggagg

SEQ ID NO: 27514 - DNA, 38 bp, Artificial Sequence
  primer
gtaaaacgacggccagtacagaacctgtcctgtggagg

SEQ ID NO: 27515 - DNA, 38 bp, Artificial Sequence
  primer
gtaaaacgacggccagtggtcatcgtcaccactaccac

SEQ ID NO: 27516 - DNA, 38 bp, Artificial Sequence
  primer
gtaaaacgacggccagtacataaaggtgtggctgcaag

SEQ ID NO: 27517 - DNA, 38 bp, Artificial Sequence
  primer
gtaaaacgacggccagtacctcgcagcagtgtatcaac

SEQ ID NO: 27518 - DNA, 38 bp, Artificial Sequence
  primer
gtaaaacgacggccagtccctgagccaagaatttgaag

SEQ ID NO: 27519 - DNA, 21 bp, Artificial Sequence
  primer
ctggaagcaggaattcaggac

SEQ ID NO: 27520 - DNA, 24 bp, Artificial Sequence
  primer
cctgttatctgggaaattggtatc

SEQ ID NO: 27521 - DNA, 37 bp, Artificial Sequence
  primer
gtaaaacgacggccagtacatggcaaggtctctgcac

SEQ ID NO: 27522 - DNA, 22 bp, Artificial Sequence
  primer
tggtttgcactaccattagcag

SEQ ID NO: 27523 - DNA, 38 bp, Artificial Sequence
  primer
gtaaaacgacggccagtctgcagagccaccaaacataa

SEQ ID NO: 27524 - DNA, 21 bp, Artificial Sequence
  primer
aaagcactggttcaaacatgg

SEQ ID NO: 27525 - DNA, 37 bp, Artificial Sequence
  primer
gtaaaacgacggccagtacggtgtcaccctggctatc

SEQ ID NO: 27526 - DNA, 21 bp, Artificial Sequence
  primer
cgagtctgactgaggtcatgg

SEQ ID NO: 27527 - DNA, 38 bp, Artificial Sequence
  primer
gtaaaacgacggccagtcctgctcacctgctcacctac

SEQ ID NO: 27528 - DNA, 38 bp, Artificial Sequence
  primer
gtaaaacgacggccagtgcatcattaggaggaagggtg

SEQ ID NO: 27529 - DNA, 20 bp, Artificial Sequence
  primer
aagactgcatccgtccacac

SEQ ID NO: 27530 - DNA, 38 bp, Artificial Sequence
  primer
gtaaaacgacggccagtccctagaactgtctccctccc

SEQ ID NO: 27531 - DNA, 38 bp, Artificial Sequence
  primer
gtaaaacgacggccagtaggctagaaacagggctctcc

SEQ ID NO: 27532 - DNA, 38 bp, Artificial Sequence
  primer
gtaaaacgacggccagtgacctggtagaaactccacgg

SEQ ID NO: 27533 - DNA, 38 bp, Artificial Sequence
  primer
gtaaaacgacggccagtgtggctctctctacaccgtgg

SEQ ID NO: 27534 - DNA, 38 bp, Artificial Sequence
  primer
gtaaaacgacggccagtcaacctagacctcagggcatc

SEQ ID NO: 27535 - DNA, 21 bp, Artificial Sequence
  primer
tacaggaggttacaggacgcc

SEQ ID NO: 27536 - DNA, 38 bp, Artificial Sequence
  primer
gtaaaacgacggccagtattaccaatgggaggcaacag

SEQ ID NO: 27537 - DNA, 38 bp, Artificial Sequence
  primer
gtaaaacgacggccagtctcagcgccttctgtcttctg

SEQ ID NO: 27538 - DNA, 38 bp, Artificial Sequence
  primer
gtaaaacgacggccagtagagcagcttctgagactggg

SEQ ID NO: 27539 - DNA, 38 bp, Artificial Sequence
  primer
gtaaaacgacggccagtctaggtggaggcccttctctc

SEQ ID NO: 27540 - DNA, 38 bp, Artificial Sequence
  primer
gtaaaacgacggccagtcacacctcaggctgttctcag

SEQ ID NO: 27541 - DNA, 38 bp, Artificial Sequence
  primer
gtaaaacgacggccagtgtgagcaaagcagacccagtc

SEQ ID NO: 27542 - DNA, 21 bp, Artificial Sequence
  primer
aagaagagcttctcccagtgc

SEQ ID NO: 27543 - DNA, 22 bp, Artificial Sequence
  primer
aagtggcaagctctattccctc

SEQ ID NO: 27544 - DNA, 21 bp, Artificial Sequence
  primer
tgggtgcatgtcatcactacc

SEQ ID NO: 27545 - DNA, 38 bp, Artificial Sequence; identical to SEQ ID NO: 27528
  primer

SEQ ID NO: 27546 - DNA, 38 bp, Artificial Sequence; identical to SEQ ID NO: 27536
  primer

SEQ ID NO: 27547 - DNA, 19 bp, Artificial Sequence
  primer
gagcagatcagcgtcatcg

SEQ ID NO: 27548 - DNA, 38 bp, Artificial Sequence
  primer
gtaaaacgacggccagttagttctggaaggctggttgg

SEQ ID NO: 27549 - DNA, 21 bp, Artificial Sequence
  primer
ggattgggtaatgtctgaggc

SEQ ID NO: 27550 - DNA, 21 bp, Artificial Sequence
  primer
gtacttgggcctgtcagaagc

SEQ ID NO: 27551 - DNA, 21 bp, Artificial Sequence
  primer
actcatgtggttgttcggttg

SEQ ID NO: 27552 - DNA, 38 bp, Artificial Sequence
  primer
gtaaaacgacggccagtgtgaccaacatttctcccacc

SEQ ID NO: 27553 - DNA, 21 bp, Artificial Sequence
  primer
gagaatgtcctggaggtctgg

SEQ ID NO: 27554 - DNA, 21 bp, Artificial Sequence
  primer
ccagttactccttgaccaccc

SEQ ID NO: 27555 - DNA, 21 bp, Artificial Sequence
  primer
aagtacatccgcaccgagttc

SEQ ID NO: 27556 - DNA, 38 bp, Artificial Sequence
  primer
gtaaaacgacggccagtcctgtcttctcatggatggtg

SEQ ID NO: 27557 - DNA, 38 bp, Artificial Sequence
  primer
gtaaaacgacggccagtactttccagtgcttctttgcc

SEQ ID NO: 27558 - DNA, 21 bp, Artificial Sequence
  primer
agcctgtacgagatgcaggag

SEQ ID NO: 27559 - DNA, 22 bp, Artificial Sequence
  primer
gcacttcagggatgaatgaaag

SEQ ID NO: 27560 - DNA, 20 bp, Artificial Sequence
  primer
aagctgtgagtgatgggctg

SEQ ID NO: 27561 - DNA, 21 bp, Artificial Sequence
  primer
cctggaattgtcacactgctg

SEQ ID NO: 27562 - DNA, 38 bp, Artificial Sequence
  primer
gtaaaacgacggccagtcttgggttaagtttggccatc

SEQ ID NO: 27563 - DNA, 39 bp, Artificial Sequence
  primer
gtaaaacgacggccagtaaagagcaccgcaatcaattag

SEQ ID NO: 27564 - DNA, 21 bp, Artificial Sequence
  primer
tgtccctggaattgagaatcc

SEQ ID NO: 27565 - DNA, 38 bp, Artificial Sequence
  primer
gtaaaacgacggccagttgagcaggatgtgtctaaggg

SEQ ID NO: 27566 - DNA, 21 bp, Artificial Sequence
  primer
agccttgttcagaatgcttcc

SEQ ID NO: 27567 - DNA, 38 bp, Artificial Sequence
  primer
gtaaaacgacggccagttgaatcctgattgcccttctg

SEQ ID NO: 27568 - DNA, 38 bp, Artificial Sequence
  primer
gtaaaacgacggccagtctaagaactcagagccctgcc

SEQ ID NO: 27569 - DNA, 21 bp, Artificial Sequence
  primer
agcagagagatcaaagcctgg

SEQ ID NO: 27570 - DNA, 38 bp, Artificial Sequence
  primer
gtaaaacgacggccagtatcctcaatgagcagggtgag

SEQ ID NO: 27571 - DNA, 38 bp, Artificial Sequence
  primer
gtaaaacgacggccagttcagctgcttcaaggaaagtg

SEQ ID NO: 27572 - DNA, 37 bp, Artificial Sequence
  primer
gtaaaacgacggccagttatgccaggaggatgttccc

SEQ ID NO: 27573 - DNA, 38 bp, Artificial Sequence
  primer
gtaaaacgacggccagtccctgacagatgtcttcctcc

SEQ ID NO: 27574 - DNA, 38 bp, Artificial Sequence
  primer
gtaaaacgacggccagtctcaggttcttccaggagtgg

SEQ ID NO: 27575 - DNA, 18 bp, Artificial Sequence
  primer
cttcaaccaggtgcaggc

SEQ ID NO: 27576 - DNA, 21 bp, Artificial Sequence
  primer
gctatttggctgattgctgtg

SEQ ID NO: 27577 - DNA, 21 bp, Artificial Sequence
  primer
cagagccctaaactctggtgc

SEQ ID NO: 27578 - DNA, 38 bp, Artificial Sequence
  primer
gtaaaacgacggccagtagtgtacggttcccaagatgg

SEQ ID NO: 27579 - DNA, 21 bp, Artificial Sequence
  primer
tagtgtccaggccacagatcc

SEQ ID NO: 27580 - DNA, 20 bp, Artificial Sequence
  primer
gcttcccagctgttctgatg

SEQ ID NO: 27581 - DNA, 22 bp, Artificial Sequence
  primer
gtgatcatctgcatagctggag

SEQ ID NO: 27582 - DNA, 38 bp, Artificial Sequence
  primer
gtaaaacgacggccagtcacatggactcagttcttccc

SEQ ID NO: 27583 - DNA, 38 bp, Artificial Sequence
  primer
gtaaaacgacggccagtgtgctatgaacacaccttggg

SEQ ID NO: 27584 - DNA, 23 bp, Artificial Sequence
  primer
tgacatgttaaagcttagccaaa

SEQ ID NO: 27585 - DNA, 21 bp, Artificial Sequence
  primer
cctcggcaacaagagtgaaac

SEQ ID NO: 27586 - DNA, 21 bp, Artificial Sequence
  primer
tagggaaacagctttgtctgc

SEQ ID NO: 27587 - DNA, 38 bp, Artificial Sequence
  primer
gtaaaacgacggccagtgatggtaggattgcttgagcc

SEQ ID NO: 27588 - DNA, 38 bp, Artificial Sequence
  primer
gtaaaacgacggccagtagatgtgaccgctagggattc

SEQ ID NO: 27589 - DNA, 38 bp, Artificial Sequence
  primer
gtaaaacgacggccagtcaacgccaagtcatgtcaaac

SEQ ID NO: 27590 - DNA, 21 bp, Artificial Sequence
  primer
aaatctctgatggcctggttg

SEQ ID NO: 27591 - DNA, 38 bp, Artificial Sequence
  primer
gtaaaacgacggccagttttgttctcagttcccaagcc

SEQ ID NO: 27592 - DNA, 38 bp, Artificial Sequence
  primer
gtaaaacgacggccagtaagagcctgggactcaatgtg

SEQ ID NO: 27593 - DNA, 21 bp, Artificial Sequence
  primer
tcactcgaatggaacatttgg

SEQ ID NO: 27594 - DNA, 21 bp, Artificial Sequence
  primer
cctattccctggattcacagc

SEQ ID NO: 27595 - DNA, 21 bp, Artificial Sequence
  primer
caaacactcccagcctaaacc

SEQ ID NO: 27596 - DNA, 38 bp, Artificial Sequence
  primer
gtaaaacgacggccagttttccagggtatacagggagc

SEQ ID NO: 27597 - DNA, 39 bp, Artificial Sequence
  primer
gtaaaacgacggccagtggtcactctcagctctcattcg

SEQ ID NO: 27598 - DNA, 38 bp, Artificial Sequence
  primer
gtaaaacgacggccagtcctcacttcaaatcccacctc

SEQ ID NO: 27599 - DNA, 21 bp, Artificial Sequence
  primer
tctccctccaaggtaatgtgg

SEQ ID NO: 27600 - DNA, 40 bp, Artificial Sequence
  primer
gtaaaacgacggccagtcaattgaatcatagcctacgtgc

SEQ ID NO: 27601 - DNA, 38 bp, Artificial Sequence
  primer
gtaaaacgacggccagtattggccagttcactgtaggg

SEQ ID NO: 27602 - DNA, 38 bp, Artificial Sequence
  primer
gtaaaacgacggccagtatgtgtttcttcctccgatgc

SEQ ID NO: 27603 - DNA, 44 bp, Artificial Sequence
  primer
gtaaaacgacggccagtttgactctaagcttggtatagatcctg

SEQ ID NO: 27604 - DNA, 38 bp, Artificial Sequence
  primer
gtaaaacgacggccagttctgagaaggagtgggagctg

SEQ ID NO: 27605 - DNA, 20 bp, Artificial Sequence
  primer
tcatccaagacccagaccac

SEQ ID NO: 27606 - DNA, 35 bp, Artificial Sequence
  primer
gtaaaacgacggccagtctgagctcctgccacagc

SEQ ID NO: 27607 - DNA, 35 bp, Artificial Sequence
  primer
gtaaaacgacggccagtggaaaccaggccaccctc

SEQ ID NO: 27608 - DNA, 36 bp, Artificial Sequence
  primer
gtaaaacgacggccagtcaagcacacgctgaagctc

SEQ ID NO: 27609 - DNA, 19 bp, Artificial Sequence
  primer
acatcccaactggcctgac

SEQ ID NO: 27610 - DNA, 35 bp, Artificial Sequence
  primer
gtaaaacgacggccagtctccggagcctctgcttg

SEQ ID NO: 27611 - DNA, 36 bp, Artificial Sequence
  primer
gtaaaacgacggccagtgttgttctgggcatggagg

SEQ ID NO: 27612 - DNA, 21 bp, Artificial Sequence
  primer
ctctgagaagctctgtgcagg

SEQ ID NO: 27613 - DNA, 23 bp, Artificial Sequence
  primer
aaagcagagtctacactggaccc

SEQ ID NO: 27614 - DNA, 38 bp, Artificial Sequence
  primer
gtaaaacgacggccagttcccaaccagtctgcagttac

SEQ ID NO: 27615 - DNA, 20 bp, Artificial Sequence
  primer
agaactaccgcaggtaggcg

SEQ ID NO: 27616 - DNA, 38 bp, Artificial Sequence
  primer
gtaaaacgacggccagtttgtttggtctttaggcctgc

SEQ ID NO: 27617 - DNA, 38 bp, Artificial Sequence
  primer
gtaaaacgacggccagtcactttcttgattgcagccag

SEQ ID NO: 27618 - DNA, 39 bp, Artificial Sequence
  primer
gtaaaacgacggccagttgtgtatttgtctcatcacccg

SEQ ID NO: 27619 - DNA, 38 bp, Artificial Sequence
  primer
gtaaaacgacggccagtagagagtgggaactcagctcg

SEQ ID NO: 27620 - DNA, 38 bp, Artificial Sequence
  primer
gtaaaacgacggccagtaaagcagctcagagatcgagg

SEQ ID NO: 27621 - DNA, 21 bp, Artificial Sequence
  primer
caagagcacttcccaggtagc

SEQ ID NO: 27622 - DNA, 38 bp, Artificial Sequence
  primer
gtaaaacgacggccagtagctgttggtggctttagtcc

SEQ ID NO: 27623 - DNA, 21 bp, Artificial Sequence
  primer
gactgtcagacgtggacatgg

SEQ ID NO: 27624 - DNA, 37 bp, Artificial Sequence
  primer
gtaaaacgacggccagtgtgactgtacatggcggtcc

SEQ ID NO: 27625 - DNA, 20 bp, Artificial Sequence
  primer
gtcagatggtgcctgctttg

SEQ ID NO: 27626 - DNA, 21 bp, Artificial Sequence
  primer
agacgagaagcctccatgttg

SEQ ID NO: 27627 - DNA, 21 bp, Artificial Sequence
  primer
aagttagggagtggatgctgc

SEQ ID NO: 27628 - DNA, 38 bp, Artificial Sequence
  primer
gtaaaacgacggccagtctttatcatgggacgattcgc

SEQ ID NO: 27629 - DNA, 21 bp, Artificial Sequence
  primer
gacttaggctggctttgcttg

SEQ ID NO: 27630 - DNA, 37 bp, Artificial Sequence
  primer
gtaaaacgacggccagtgaagaagggagggaggaatg

SEQ ID NO: 27631 - DNA, 20 bp, Artificial Sequence
  primer
cctctcactgccaaactgtg

SEQ ID NO: 27632 - DNA, 21 bp, Artificial Sequence
  primer
cccttggttaagaagcctgtg

SEQ ID NO: 27633 - DNA, 21 bp, Artificial Sequence
  primer
cctggaggttgaagaatccac

SEQ ID NO: 27634 - DNA, 35 bp, Artificial Sequence
  primer
gtaaaacgacggccagtgttcgctcgctagctccc

SEQ ID NO: 27635 - DNA, 21 bp, Artificial Sequence
  primer
atcagtcgctcccttgtcttc

SEQ ID NO: 27636 - DNA, 38 bp, Artificial Sequence
  primer
gtaaaacgacggccagtagaaacgtcaggacatacggc

SEQ ID NO: 27637 - DNA, 38 bp, Artificial Sequence
  primer
gtaaaacgacggccagtcttgctctatcacagggctgg

SEQ ID NO: 27638 - DNA, 21 bp, Artificial Sequence
  primer
ttgaccaagagcccataaagg

SEQ ID NO: 27639 - DNA, 38 bp, Artificial Sequence
  primer
gtaaaacgacggccagtttgagagcaggtctagggagg

SEQ ID NO: 27640 - DNA, 38 bp, Artificial Sequence
  primer
gtaaaacgacggccagtctgtcacaggagtgcaggaac

SEQ ID NO: 27641 - DNA, 38 bp, Artificial Sequence
  primer
gtaaaacgacggccagttagatgagggctgactgggag

SEQ ID NO: 27642 - DNA, 36 bp, Artificial Sequence
  primer
gtaaaacgacggccagtctagaagccgtgggcagac

SEQ ID NO: 27643 - DNA, 21 bp, Artificial Sequence
  primer
gccaaagaaggagatttgcac

SEQ ID NO: 27644 - DNA, 38 bp, Artificial Sequence
  primer
gtaaaacgacggccagtctcaaggcatacaaggtggtg

SEQ ID NO: 27645 - DNA, 38 bp, Artificial Sequence
  primer
gtaaaacgacggccagtgggacatgtctgcttattgcc

SEQ ID NO: 27646 - DNA, 21 bp, Artificial Sequence
  primer
gctccaagtccagtaacctcc

SEQ ID NO: 27647 - DNA, 21 bp, Artificial Sequence
  primer
cagcacctacaacctcagcag

SEQ ID NO: 27648 - DNA, 20 bp, Artificial Sequence
  primer
ggccacaacaacctgattcc

SEQ ID NO: 27649 - DNA, 20 bp, Artificial Sequence
  primer
gtgagtcgccatcctctgtc

SEQ ID NO: 27650 - DNA, 38 bp, Artificial Sequence
  primer
gtaaaacgacggccagtgggttgaactacagctcccag

SEQ ID NO: 27651 - DNA, 21 bp, Artificial Sequence
  primer
atgttgaccgagattcgtgtg

SEQ ID NO: 27652 - DNA, 37 bp, Artificial Sequence
  primer
gtaaaacgacggccagtcgtacatctcactgggctcc

SEQ ID NO: 27653 - DNA, 20 bp, Artificial Sequence
  primer
tttcagggatggcagagaaa

SEQ ID NO: 27654 - DNA, 22 bp, Artificial Sequence
  primer
tggagggtggtgtttctatttg

SEQ ID NO: 27655 - DNA, 38 bp, Artificial Sequence
  primer
gtaaaacgacggccagtcacttgggttgcacacttctc

SEQ ID NO: 27656 - DNA, 21 bp, Artificial Sequence
  primer
taggagacggtggctcttcac

SEQ ID NO: 27657 - DNA, 38 bp, Artificial Sequence
  primer
gtaaaacgacggccagtgggccctgatttctaaattcc

SEQ ID NO: 27658 - DNA, 21 bp, Artificial Sequence
  primer
tgtcccactcagtccaaacag

SEQ ID NO: 27659 - DNA, 37 bp, Artificial Sequence
  primer
gtaaaacgacggccagtgtggatggccttgaagtgag

SEQ ID NO: 27660 - DNA, 38 bp, Artificial Sequence
  primer
gtaaaacgacggccagtatgtaagggccatcaacttgg

SEQ ID NO: 27661 - DNA, 38 bp, Artificial Sequence
  primer
gtaaaacgacggccagtctggcttattaacctgggctg

SEQ ID NO: 27662 - DNA, 21 bp, Artificial Sequence
  primer
acactggcttctcccacagac

SEQ ID NO: 27663 - DNA, 38 bp, Artificial Sequence
  primer
gtaaaacgacggccagtagaggcctcgtcctcctagtc

SEQ ID NO: 27664 - DNA, 22 bp, Artificial Sequence
  primer
ccaccatacctggctaatttca

SEQ ID NO: 27665 - DNA, 38 bp, Artificial Sequence
  primer
gtaaaacgacggccagttgaacgaggaacacagctcac

SEQ ID NO: 27666 - DNA, 38 bp, Artificial Sequence
  primer
gtaaaacgacggccagtgcggccactgagctattattc

SEQ ID NO: 27667 - DNA, 38 bp, Artificial Sequence
  primer
gtaaaacgacggccagtcactggaggaggcacttgttc

SEQ ID NO: 27668 - DNA, 35 bp, Artificial Sequence
  primer
gtaaaacgacggccagtctctgactgggcagcacc

SEQ ID NO: 27669 - DNA, 38 bp, Artificial Sequence
  primer
gtaaaacgacggccagtgacctctcactccgagagacc

SEQ ID NO: 27670 - DNA, 21 bp, Artificial Sequence
  primer
actctgaatctgagggcttgg

SEQ ID NO: 27671 - DNA, 21 bp, Artificial Sequence
  primer
ggctgcatcagggagatagac

SEQ ID NO: 27672 - DNA, 37 bp, Artificial Sequence
  primer
gtaaaacgacggccagtctcctccctctttcctgcac

SEQ ID NO: 27673 - DNA, 39 bp, Artificial Sequence
  primer
gtaaaacgacggccagtggctccttataactagggctgg

SEQ ID NO: 27674 - DNA, 21 bp, Artificial Sequence
  primer
ttgcgttgactgtgagacttg

SEQ ID NO: 27675 - DNA, 36 bp, Artificial Sequence
  primer
gtaaaacgacggccagttcccttccctcctctctgg

SEQ ID NO: 27676 - DNA, 42 bp, Artificial Sequence
  primer
gtaaaacgacggccagtaataggccaatttcttgatactctc

SEQ ID NO: 27677 - DNA, 40 bp, Artificial Sequence
  primer
gtaaaacgacggccagtcctggtttacctttcttgtttga

SEQ ID NO: 27678 - DNA, 21 bp, Artificial Sequence
  primer
cccaataggagcaaacaatga

SEQ ID NO: 27679 - DNA, 18 bp, Artificial Sequence
  primer
gaggagacaggcgtccag

SEQ ID NO: 27680 - DNA, 21 bp, Artificial Sequence
  primer
tgagtgggaactgtgaacctg

SEQ ID NO: 27681 - DNA, 38 bp, Artificial Sequence
  primer
gtaaaacgacggccagtagttaaacaaacctggccacc

SEQ ID NO: 27682 - DNA, 25 bp, Artificial Sequence
  primer
aaataaatcaaagcagctaaatggg

SEQ ID NO: 27683 - DNA, 41 bp, Artificial Sequence
  primer
gtaaaacgacggccagtgggcatagcaagatcagatttaag

SEQ ID NO: 27684 - DNA, 24 bp, Artificial Sequence
  primer
ggcattggatatcctaaatctgtc

SEQ ID NO: 27685 - DNA, 27 bp, Artificial Sequence
  primer
actggaattaacttaggaaacttactg

SEQ ID NO: 27686 - DNA, 41 bp, Artificial Sequence
  primer
gtaaaacgacggccagtaacagctaacttgcatgatcacaa

SEQ ID NO: 27687 - DNA, 21 bp, Artificial Sequence
  primer
ctcagagtgcattccaagtcg

SEQ ID NO: 27688 - DNA, 38 bp, Artificial Sequence
  primer
gtaaaacgacggccagtgaagcctgtagatgggtcctg

SEQ ID NO: 27689 - DNA, 39 bp, Artificial Sequence
  primer
gtaaaacgacggccagtctgtttctcaccatcaaggttc

SEQ ID NO: 27690 - DNA, 38 bp, Artificial Sequence
  primer
gtaaaacgacggccagttgattgagctgatgccaaatg

SEQ ID NO: 27691 - DNA, 37 bp, Artificial Sequence
  primer
gtaaaacgacggccagtgcctttgctgttcgtgtgta

SEQ ID NO: 27692 - DNA, 22 bp, Artificial Sequence
  primer
aattgaatccaggaggcattta

SEQ ID NO: 27693 - DNA, 29 bp, Artificial Sequence
  primer
cattgtgaatgactcttatataatccaaa

SEQ ID NO: 27694 - DNA, 23 bp, Artificial Sequence
  primer
catcggctttatttcatttcttg

SEQ ID NO: 27695 - DNA, 21 bp, Artificial Sequence
  primer
aagcacagacttgtgcacctc

SEQ ID NO: 27696 - DNA, 38 bp, Artificial Sequence
  primer
gtaaaacgacggccagttgttgagaaatccagtttggg

SEQ ID NO: 27697 - DNA, 42 bp, Artificial Sequence
  primer
gtaaaacgacggccagtgcaaccaaattgtttaaattaggga

SEQ ID NO: 27698 - DNA, 24 bp, Artificial Sequence
  primer
tcttgaagaaaggagaactgacac

SEQ ID NO: 27699 - DNA, 43 bp, Artificial Sequence
  primer
gtaaaacgacggccagttgcagttatatatttagccacgtcag

SEQ ID NO: 27700 - DNA, 46 bp, Artificial Sequence
  primer
gtaaaacgacggccagtggattagaagttacttggataaagaagaa

SEQ ID NO: 27701 - DNA, 40 bp, Artificial Sequence
  primer
gtaaaacgacggccagtttgctaaggatgtgttcctcaat

SEQ ID NO: 27702 - DNA, 21 bp, Artificial Sequence
  primer
cacctcacccaacctaagagc

SEQ ID NO: 27703 - DNA, 46 bp, Artificial Sequence
  primer
gtaaaacgacggccagtaattaaagtgaagagaaatactgcttagg

SEQ ID NO: 27704 - DNA, 40 bp, Artificial Sequence
  primer
gtaaaacgacggccagtgcatctgaagtgaggactggaac

SEQ ID NO: 27705 - DNA, 43 bp, Artificial Sequence
  primer
gtaaaacgacggccagtggttgaatagaaacttcctttaccag

SEQ ID NO: 27706 - DNA, 22 bp, Artificial Sequence
  primer
gcctttaggattgcttagagga

SEQ ID NO: 27707 - DNA, 19 bp, Artificial Sequence
  primer
atctctcagcgaagctggc

SEQ ID NO: 27708 - DNA, 38 bp, Artificial Sequence
  primer
gtaaaacgacggccagtgctgcacctggagtgatactg

SEQ ID NO: 27709 - DNA, 39 bp, Artificial Sequence
  primer
gtaaaacgacggccagtttaagtggatccgtctgtgttg

SEQ ID NO: 27710 - DNA, 25 bp, Artificial Sequence
  primer
cccagtaatggaacacatagactgt

SEQ ID NO: 27711 - DNA, 20 bp, Artificial Sequence
  primer
cttctccatgttggtctcgg

SEQ ID NO: 27712 - DNA, 37 bp, Artificial Sequence
  primer
gtaaaacgacggccagtaatagcccactgggtcaagc

SEQ ID NO: 27713 - DNA, 38 bp, Artificial Sequence
  primer
gtaaaacgacggccagttgggttatccagaatggcttc

SEQ ID NO: 27714 - DNA, 42 bp, Artificial Sequence
  primer
gtaaaacgacggccagtttgtttgattacataaagcaggaaa

SEQ ID NO: 27715 - DNA, 22 bp, Artificial Sequence
  primer
ttaatgaagcaagccatgtgtg

SEQ ID NO: 27716 - DNA, 38 bp, Artificial Sequence
  primer
gtaaaacgacggccagtggactagctatccagcctccc

SEQ ID NO: 27717 - DNA, 37 bp, Artificial Sequence
  primer
gtaaaacgacggccagttggagggaaggagaccagac

SEQ ID NO: 27718 - DNA, 21 bp, Artificial Sequence
  primer
gcaagttaccctctgagcctg

SEQ ID NO: 27719 - DNA, 37 bp, Artificial Sequence
  primer
gtaaaacgacggccagtttgtgccactgtattccagc

SEQ ID NO: 27720 - DNA, 40 bp, Artificial Sequence
  primer
gtaaaacgacggccagtggacggacaggttagtacattcc

SEQ ID NO: 27721 - DNA, 38 bp, Artificial Sequence
  primer
gtaaaacgacggccagttgggatgatgaggagactacg

SEQ ID NO: 27722 - DNA, 38 bp, Artificial Sequence
  primer
gtaaaacgacggccagtgattacaggcgcgtactatcg

SEQ ID NO: 27723 - DNA, 21 bp, Artificial Sequence
  primer
gatccaaactggaacggtgag

SEQ ID NO: 27724 - DNA, 21 bp, Artificial Sequence
  primer
agattagttaccggtcacggc

SEQ ID NO: 27725 - DNA, 38 bp, Artificial Sequence
  primer
gtaaaacgacggccagtatgctggtgttgacagaaagc

SEQ ID NO: 27726 - DNA, 40 bp, Artificial Sequence
  primer
gtaaaacgacggccagtaaatacctgccatgtaccaagtg

SEQ ID NO: 27727 - DNA, 39 bp, Artificial Sequence
  primer
gtaaaacgacggccagttggctcctgaatttctcttctg

SEQ ID NO: 27728 - DNA, 21 bp, Artificial Sequence
  primer
aggacttccattctgagcctg

SEQ ID NO: 27729 - DNA, 39 bp, Artificial Sequence
  primer
gtaaaacgacggccagtgagaaagctgggcagtactttg

SEQ ID NO: 27730 - DNA, 38 bp, Artificial Sequence
  primer
gtaaaacgacggccagtgtcagtgggctttccttctcc

SEQ ID NO: 27731 - DNA, 38 bp, Artificial Sequence
  primer
gtaaaacgacggccagtttccttcccatctttggtctt

SEQ ID NO: 27732 - DNA, 22 bp, Artificial Sequence
  primer
ccagtttgaaagcatgtaaggg

SEQ ID NO: 27733 - DNA, 21 bp, Artificial Sequence
  primer
tcagaccatgtgggatgagag

SEQ ID NO: 27734 - DNA, 21 bp, Artificial Sequence
  primer
caacaagagcgaaactccatc

SEQ ID NO: 27735 - DNA, 37 bp, Artificial Sequence
  primer
gtaaaacgacggccagttggcatagcaaagaggaagc

SEQ ID NO: 27736 - DNA, 21 bp, Artificial Sequence
  primer
agactgcagtgattgcaccag

SEQ ID NO: 27737 - DNA, 38 bp, Artificial Sequence
  primer
gtaaaacgacggccagtgttctgggattacaggcatga

SEQ ID NO: 27738 - DNA, 21 bp, Artificial Sequence
  primer
tgccttgtaattccttcagcc

SEQ ID NO: 27739 - DNA, 45 bp, Artificial Sequence
  primer
gtaaaacgacggccagttcttaagggcttagttactggtaaattc

SEQ ID NO: 27740 - DNA, 38 bp, Artificial Sequence
  primer
gtaaaacgacggccagtattgattcaagcaaaccaacg

SEQ ID NO: 27741 - DNA, 22 bp, Artificial Sequence
  primer
tttaaagcttcacaccgaggac

SEQ ID NO: 27742 - DNA, 21 bp, Artificial Sequence
  primer
attccaaggaaccgaacagtg

SEQ ID NO: 27743 - DNA, 21 bp, Artificial Sequence
  primer
ttcacccagtgtcatacagcc

SEQ ID NO: 27744 - DNA, 38 bp, Artificial Sequence
  primer
gtaaaacgacggccagtttgattcccacatccagtgag

SEQ ID NO: 27745 - DNA, 25 bp, Artificial Sequence
  primer
taatcaggatgccagaatattagcc

SEQ ID NO: 27746 - DNA, 38 bp, Artificial Sequence
  primer
gtaaaacgacggccagtaatgatgccatggaaatgacc

SEQ ID NO: 27747 - DNA, 38 bp, Artificial Sequence
  primer
gtaaaacgacggccagtattccggagaggagaacatgg

SEQ ID NO: 27748 - DNA, 44 bp, Artificial Sequence
  primer
gtaaaacgacggccagttgaatgtaaattgtaactcagttcctc

SEQ ID NO: 27749 - DNA, 21 bp, Artificial Sequence
  primer
aagtcaggttcctcttgcagc

SEQ ID NO: 27750 - DNA, 44 bp, Artificial Sequence
  primer
gtaaaacgacggccagttctactgtggtggagttcttgataaac

SEQ ID NO: 27751 - DNA, 38 bp, Artificial Sequence
  primer
gtaaaacgacggccagtatcccacacctgactattgcc

SEQ ID NO: 27752 - DNA, 38 bp, Artificial Sequence
  primer
gtaaaacgacggccagtcatgtaggcaggatgacatgg

SEQ ID NO: 27753 - DNA, 21 bp, Artificial Sequence
  primer
ttccaggaaatggtgaaagtg

SEQ ID NO: 27754 - DNA, 41 bp, Artificial Sequence
  primer
gtaaaacgacggccagtcccagagttgtatggtggaaatag

SEQ ID NO: 27755 - DNA, 38 bp, Artificial Sequence
  primer
gtaaaacgacggccagtggaagtcaccgattcccatac

SEQ ID NO: 27756 - DNA, 38 bp, Artificial Sequence
  primer
gtaaaacgacggccagtgtcatgcaactgctgtttgtg

SEQ ID NO: 27757 - DNA, 41 bp, Artificial Sequence
  primer
gtaaaacgacggccagttttaagcttccaaaggatcaaatg

SEQ ID NO: 27758 - DNA, 21 bp, Artificial Sequence
  primer
caaccgaccaacctccattac

SEQ ID NO: 27759 - DNA, 21 bp, Artificial Sequence
  primer
atgtcaatgctggagaagcac

SEQ ID NO: 27760 - DNA, 38 bp, Artificial Sequence
  primer
gtaaaacgacggccagtcacctctctaccgccaaagac

SEQ ID NO: 27761 - DNA, 23 bp, Artificial Sequence
  primer
aaaggccttgattgagacatacc

SEQ ID NO: 27762 - DNA, 26 bp, Artificial Sequence
  primer
aacatttgatagcttacaggatctga

SEQ ID NO: 27763 - DNA, 38 bp, Artificial Sequence
  primer
gtaaaacgacggccagtgatcccaatgggtagcttcag

SEQ ID NO: 27764 - DNA, 40 bp, Artificial Sequence
  primer
gtaaaacgacggccagtaaatctgctcatgtatagcctgc

SEQ ID NO: 27765 - DNA, 26 bp, Artificial Sequence
  primer
ttgtttactggcattatgaacttgag

SEQ ID NO: 27766 - DNA, 38 bp, Artificial Sequence
  primer
gtaaaacgacggccagtgagcttcaggttgggtcaaag

SEQ ID NO: 27767 - DNA, 39 bp, Artificial Sequence
  primer
gtaaaacgacggccagtgcaaagcctagccttcctagac

SEQ ID NO: 27768 - DNA, 39 bp, Artificial Sequence
  primer
gtaaaacgacggccagtgagcgattatgtgagcagtttg

SEQ ID NO: 27769 - DNA, 43 bp, Artificial Sequence
  primer
gtaaaacgacggccagtcctactaccaaagaaacaatctgtcg

SEQ ID NO: 27770 - DNA, 21 bp, Artificial Sequence
  primer
acaatcctgtggaagaatggg

SEQ ID NO: 27771 - DNA, 25 bp, Artificial Sequence
  primer
cacctaacattattacctcaatggg

SEQ ID NO: 27772 - DNA, 21 bp, Artificial Sequence
  primer
ctgctgttggtactgtttggg

SEQ ID NO: 27773 - DNA, 18 bp, Artificial Sequence
  primer
gactgcgccattgcactc

SEQ ID NO: 27774 - DNA, 18 bp, Artificial Sequence
  primer
acgccatggtactccagc

SEQ ID NO: 27775 - DNA, 21 bp, Artificial Sequence
  primer
caaggtaaagcccgattgaag

SEQ ID NO: 27776 - DNA, 19 bp, Artificial Sequence
  primer
gagccgaaattgtgcactg

SEQ ID NO: 27777 - DNA, 22 bp, Artificial Sequence
  primer
tcgagaccatcctgagtaacac

SEQ ID NO: 27778 - DNA, 19 bp, Artificial Sequence
  primer
ctgggcactgagctcttgg

SEQ ID NO: 27779 - DNA, 27 bp, Artificial Sequence
  primer
cattatttgccttgagcataagactac

SEQ ID NO: 27780 - DNA, 41 bp, Artificial Sequence
  primer
gtaaaacgacggccagttccatgttaccatagatcacatcc

SEQ ID NO: 27781 - DNA, 38 bp, Artificial Sequence
  primer
gtaaaacgacggccagttcttcctgtttctttccctgc

SEQ ID NO: 27782 - DNA, 21 bp, Artificial Sequence
  primer
ccaatcctgtctgctcaaatc

SEQ ID NO: 27783 - DNA, 38 bp, Artificial Sequence
  primer
gtaaaacgacggccagtgagaaatcagccagacgtgag

SEQ ID NO: 27784 - DNA, 37 bp, Artificial Sequence
  primer
gtaaaacgacggccagtggagaggtggaggagtggtg

SEQ ID NO: 27785 - DNA, 42 bp, Artificial Sequence
  primer
gtaaaacgacggccagtgcaagcctttagaatcaaatttctg

SEQ ID NO: 27786 - DNA, 22 bp, Artificial Sequence
  primer
ccctcatttcagattgcttacc

SEQ ID NO: 27787 - DNA, 23 bp, Artificial Sequence
  primer
ttccatcctgtgttacatgtttg

SEQ ID NO: 27788 - DNA, 40 bp, Artificial Sequence
  primer
gtaaaacgacggccagttaattcagaatcagaacccaacg

SEQ ID NO: 27789 - DNA, 42 bp, Artificial Sequence
  primer
gtaaaacgacggccagtccttcagtaaagacactagcctttg

SEQ ID NO: 27790 - DNA, 38 bp, Artificial Sequence
  primer
gtaaaacgacggccagtatcccactgaaatcatcagcc

SEQ ID NO: 27791 - DNA, 25 bp, Artificial Sequence
  primer
aatatatgttgcagccttgtcattt

SEQ ID NO: 27792 - DNA, 20 bp, Artificial Sequence
  primer
gaagcctgcagtgagctgag

SEQ ID NO: 27793 - DNA, 20 bp, Artificial Sequence
  primer
tttgtgtgcgtggcatactg

SEQ ID NO: 27794 - DNA, 21 bp, Artificial Sequence
  primer
gcctctgaaatattggccctc

SEQ ID NO: 27795 - DNA, 21 bp, Artificial Sequence
  primer
tgttaactcgagcagtccctg

SEQ ID NO: 27796 - DNA, 21 bp, Artificial Sequence
  primer
caagcaagtcagtatggcacc

SEQ ID NO: 27797 - DNA, 21 bp, Artificial Sequence
  primer
gctaaatggcctgggtttgac

SEQ ID NO: 27798 - DNA, 42 bp, Artificial Sequence
  primer
gtaaaacgacggccagtttgtattgtaactgttggtgtgtgg

SEQ ID NO: 27799 - DNA, 21 bp, Artificial Sequence
  primer
ccaaagaatagcctttgtcca

SEQ ID NO: 27800 - DNA, 38 bp, Artificial Sequence
  primer
gtaaaacgacggccagtgcatgtgttcagcatctttgg

SEQ ID NO: 27801 - DNA, 44 bp, Artificial Sequence
  primer
gtaaaacgacggccagtttgtgtaagtgagttgcttattctcac

SEQ ID NO: 27802 - DNA, 39 bp, Artificial Sequence
  primer
gtaaaacgacggccagtgggtttgagtaaatctgttggg

SEQ ID NO: 27803 - DNA, 21 bp, Artificial Sequence
  primer
tgagccaagagcttggaattt

SEQ ID NO: 27804 - DNA, 21 bp, Artificial Sequence
  primer
ctggccttgactgtttctgac

SEQ ID NO: 27805 - DNA, 36 bp, Artificial Sequence
  primer
gtaaaacgacggccagtagactgagagcccagcagc

SEQ ID NO: 27806 - DNA, 38 bp, Artificial Sequence
  primer
gtaaaacgacggccagttcctagagaggcctaggtgcc

SEQ ID NO: 27807 - DNA, 20 bp, Artificial Sequence
  primer
tgggcttggtgtcagaagtc

SEQ ID NO: 27808 - DNA, 38 bp, Artificial Sequence
  primer
gtaaaacgacggccagtcactatgatgtggtgaggccc

SEQ ID NO: 27809 - DNA, 22 bp, Artificial Sequence
  primer
tgctacagcaccagtctaaccc

SEQ ID NO: 27810 - DNA, 39 bp, Artificial Sequence
  primer
gtaaaacgacggccagtcagtgaatgtcagagacatggg

SEQ ID NO: 27811 - DNA, 21 bp, Artificial Sequence
  primer
ctctgcggaaagacagaggtg

SEQ ID NO: 27812 - DNA, 38 bp, Artificial Sequence
  primer
gtaaaacgacggccagtaacacctacagccagacagcc

SEQ ID NO: 27813 - DNA, 20 bp, Artificial Sequence
  primer
catcacagtaagcatggccc

SEQ ID NO: 27814 - DNA, 21 bp, Artificial Sequence
  primer
ctcctgctctaaacgtctggg

SEQ ID NO: 27815 - DNA, 38 bp, Artificial Sequence
  primer
gtaaaacgacggccagtcttaggaggctttgcttgacc

SEQ ID NO: 27816 - DNA, 38 bp, Artificial Sequence
  primer
gtaaaacgacggccagtctctgaaggcgtcaaggtagg

SEQ ID NO: 27817 - DNA, 38 bp, Artificial Sequence
  primer
gtaaaacgacggccagtctctgcaggtaagagcaaggg

SEQ ID NO: 27818 - DNA, 37 bp, Artificial Sequence
  primer
gtaaaacgacggccagtgactgaggatcactcacggg

SEQ ID NO: 27819 - DNA, 37 bp, Artificial Sequence
  primer
gtaaaacgacggccagtgactcccgaggtgagctttc

SEQ ID NO: 27820 - DNA, 21 bp, Artificial Sequence
  primer
atccgtttgtcctcctgtctg

SEQ ID NO: 27821 - DNA, 38 bp, Artificial Sequence
  primer
gtaaaacgacggccagttttcatcaccgacatcacctg

SEQ ID NO: 27822 - DNA, 38 bp, Artificial Sequence
  primer
gtaaaacgacggccagtcaccagaagaagctgatgctc

SEQ ID NO: 27823 - DNA, 36 bp, Artificial Sequence
  primer
gtaaaacgacggccagtcaggagctgctgggagatg

SEQ ID NO: 27824 - DNA, 21 bp, Artificial Sequence
  primer
accaggcactagccacttcac

SEQ ID NO: 27825 - DNA, 35 bp, Artificial Sequence
  primer
gtaaaacgacggccagtctgtgcccacactgtgcc

SEQ ID NO: 27826 - DNA, 37 bp, Artificial Sequence
  primer
gtaaaacgacggccagtccacagcctgaatcgctatg

SEQ ID NO: 27827 - DNA, 20 bp, Artificial Sequence
  primer
gtagtgccggcagtgtgaag

SEQ ID NO: 27828 - DNA, 37 bp, Artificial Sequence
  primer
gtaaaacgacggccagtctttgtggaggatggcactg

SEQ ID NO: 27829 - DNA, 38 bp, Artificial Sequence
  primer
gtaaaacgacggccagttaccataatggcactggcacc

SEQ ID NO: 27830 - DNA, 38 bp, Artificial Sequence
  primer
gtaaaacgacggccagtcagaccctctcatccatccag

SEQ ID NO: 27831 - DNA, 21 bp, Artificial Sequence
  primer
agaaactggaggagacaagcg

SEQ ID NO: 27832 - DNA, 35 bp, Artificial Sequence
  primer
gtaaaacgacggccagtgaggtcgtcgtgcggtag

SEQ ID NO: 27833 - DNA, 37 bp, Artificial Sequence
  primer
gtaaaacgacggccagtctgggacacctgacttgctc

SEQ ID NO: 27834 - DNA, 21 bp, Artificial Sequence
  primer
ctataaacaagcgggactggg

SEQ ID NO: 27835 - DNA, 21 bp, Artificial Sequence
  primer
taggttcgggtatggaagacc

SEQ ID NO: 27836 - DNA, 21 bp, Artificial Sequence
  primer
acctggatagagccagcattg

SEQ ID NO: 27837 - DNA, 38 bp, Artificial Sequence
  primer
gtaaaacgacggccagtacctggctgcacagtatggac

SEQ ID NO: 27838 - DNA, 37 bp, Artificial Sequence
  primer
gtaaaacgacggccagttggtcaacaaggccaagaag

SEQ ID NO: 27839 - DNA, 21 bp, Artificial Sequence
  primer
tggccacagagaagtcatcag

SEQ ID NO: 27840 - DNA, 38 bp, Artificial Sequence
  primer
gtaaaacgacggccagttacctatgtcccgggtagctg

SEQ ID NO: 27841 - DNA, 38 bp, Artificial Sequence
  primer
gtaaaacgacggccagtgcgctggacatagtgaatcag

SEQ ID NO: 27842 - DNA, 20 bp, Artificial Sequence
  primer
aaagagctggaccagggttg

SEQ ID NO: 27843 - DNA, 21 bp, Artificial Sequence
  primer
agacagcccaggtacatcctc

SEQ ID NO: 27844 - DNA, 38 bp, Artificial Sequence
  primer
gtaaaacgacggccagttgacaggaatagtgtgggcag

SEQ ID NO: 27845 - DNA, 38 bp, Artificial Sequence
  primer
gtaaaacgacggccagtggagaggtgcaagtaaggagg

SEQ ID NO: 27846 - DNA, 38 bp, Artificial Sequence
  primer
gtaaaacgacggccagtgcctctgtatggactgaagcc

SEQ ID NO: 27847 - DNA, 20 bp, Artificial Sequence
  primer
tgatgtgcctaccatcagcc

SEQ ID NO: 27848 - DNA, 20 bp, Artificial Sequence
  primer
cagctacatcccagtgagcc

SEQ ID NO: 27849 - DNA, 38 bp, Artificial Sequence
  primer
gtaaaacgacggccagtcaacaagctcggtaaggactg

SEQ ID NO: 27850 - DNA, 37 bp, Artificial Sequence
  primer
gtaaaacgacggccagtcagaagaagctcatgctggg

SEQ ID NO: 27851 - DNA, 38 bp, Artificial Sequence
  primer
gtaaaacgacggccagtgcgaactaagcccagagctac

SEQ ID NO: 27852 - DNA, 22 bp, Artificial Sequence
  primer
agctttgttcttcacttcctgg

SEQ ID NO: 27853 - DNA, 19 bp, Artificial Sequence
  primer
agacccgcctcgacctaag

SEQ ID NO: 27854 - DNA, 38 bp, Artificial Sequence
  primer
gtaaaacgacggccagtgttatgctacccttacccggc

SEQ ID NO: 27855 - DNA, 21 bp, Artificial Sequence
  primer
aaggcgaacactgagtgaacc

SEQ ID NO: 27856 - DNA, 21 bp, Artificial Sequence
  primer
caacctcacggaatcagacac

SEQ ID NO: 27857 - DNA, 37 bp, Artificial Sequence
  primer
gtaaaacgacggccagtgaggcctgtgggagagtcac

SEQ ID NO: 27858 - DNA, 38 bp, Artificial Sequence
  primer
gtaaaacgacggccagtccatttaagaggcacaggagc

SEQ ID NO: 27859 - DNA, 39 bp, Artificial Sequence
  primer
gtaaaacgacggccagttgcatgcacagtgagtatttcc

SEQ ID NO: 27860 - DNA, 39 bp, Artificial Sequence
  primer
gtaaaacgacggccagtgggattacccaactgtgaggag

SEQ ID NO: 27861 - DNA, 38 bp, Artificial Sequence
  primer
gtaaaacgacggccagtcttcatccataggtgaggctg

SEQ ID NO: 27862 - DNA, 38 bp, Artificial Sequence
  primer
gtaaaacgacggccagtgctgtcataaaccaggaaggg

SEQ ID NO: 27863 - DNA, 37 bp, Artificial Sequence
  primer
gtaaaacgacggccagtcaccctgttgtttgtcacgg

SEQ ID NO: 27864 - DNA, 39 bp, Artificial Sequence
  primer
gtaaaacgacggccagttcattgaacagaggctaggagg

SEQ ID NO: 27865 - DNA, 38 bp, Artificial Sequence
  primer
gtaaaacgacggccagttgatttcaaacatccctcagc

SEQ ID NO: 27866 - DNA, 23 bp, Artificial Sequence
  primer
gaggagggtcattcaatgcttac

SEQ ID NO: 27867 - DNA, 21 bp, Artificial Sequence
  primer
tgcctgtctaagcagacattg

SEQ ID NO: 27868 - DNA, 21 bp, Artificial Sequence
  primer
attagccaattgtggtggcag

SEQ ID NO: 27869 - DNA, 18 bp, Artificial Sequence
  primer
gagggcctgggaagtcag

SEQ ID NO: 27870 - DNA, 21 bp, Artificial Sequence
  primer
cagaaggcctgcttctaccac

SEQ ID NO: 27871 - DNA, 38 bp, Artificial Sequence
  primer
gtaaaacgacggccagttggccatgcagataacatttg

SEQ ID NO: 27872 - DNA, 21 bp, Artificial Sequence
  primer
tgtcttgagccttggtgtttg

SEQ ID NO: 27873 - DNA, 37 bp, Artificial Sequence
  primer
gtaaaacgacggccagtctgtccttccctgcatcaag

SEQ ID NO: 27874 - DNA, 38 bp, Artificial Sequence
  primer
gtaaaacgacggccagtggctgaatttgtctcaggagg

SEQ ID NO: 27875 - DNA, 38 bp, Artificial Sequence
  primer
gtaaaacgacggccagttccattggagtggttggttag

SEQ ID NO: 27876 - DNA, 38 bp, Artificial Sequence
  primer
gtaaaacgacggccagtgtcatgtgttccagtggcttg

SEQ ID NO: 27877 - DNA, 38 bp, Artificial Sequence
  primer
gtaaaacgacggccagtctctccaggtccttgtgtgtg

SEQ ID NO: 27878 - DNA, 38 bp, Artificial Sequence; identical to SEQ ID NO: 27875
  primer

SEQ ID NO: 27879 - DNA, 21 bp, Artificial Sequence
  primer
ccagaaatggaagacatcgtg

SEQ ID NO: 27880 - DNA, 20 bp, Artificial Sequence
  primer
ctcttgggctcaagcaatcc

SEQ ID NO: 27881 - DNA, 38 bp, Artificial Sequence
  primer
gtaaaacgacggccagtatgtttcggcagctgagattc

SEQ ID NO: 27882 - DNA, 20 bp, Artificial Sequence
  primer
caagctcccaggttcaagtg

SEQ ID NO: 27883 - DNA, 21 bp, Artificial Sequence
  primer
cactcccaactcctgaacctc

SEQ ID NO: 27884 - DNA, 21 bp, Artificial Sequence
  primer
aggacaagaatacccacctgc

SEQ ID NO: 27885 - DNA, 22 bp, Artificial Sequence
  primer
cctcttccactccactcttctg

SEQ ID NO: 27886 - DNA, 21 bp, Artificial Sequence
  primer
tgtgtaggacttaggaggccc

SEQ ID NO: 27887 - DNA, 22 bp, Artificial Sequence
  primer
tttatcagccataggttggagg

SEQ ID NO: 27888 - DNA, 18 bp, Artificial Sequence
  primer
ctagagctctgcgcctgc

SEQ ID NO: 27889 - DNA, 39 bp, Artificial Sequence
  primer
gtaaaacgacggccagttcttcctattcatgcctcttcc

SEQ ID NO: 27890 - DNA, 22 bp, Artificial Sequence
  primer
gaaatggaaatgcccttctacc

SEQ ID NO: 27891 - DNA, 38 bp, Artificial Sequence
  primer
gtaaaacgacggccagtgggaagggttagtttgactgg

SEQ ID NO: 27892 - DNA, 21 bp, Artificial Sequence
  primer
atgcttcatgcaggctatgtg

SEQ ID NO: 27893 - DNA, 21 bp, Artificial Sequence
  primer
tgccttctgtgagcatttgtc

SEQ ID NO: 27894 - DNA, 21 bp, Artificial Sequence
  primer
ttaatccaggagctgtttgcc

SEQ ID NO: 27895 - DNA, 21 bp, Artificial Sequence
  primer
ctttacctcctgcctgctgtc

SEQ ID NO: 27896 - DNA, 38 bp, Artificial Sequence
  primer
gtaaaacgacggccagtccttcaaggttgtagggaacg

SEQ ID NO: 27897 - DNA, 38 bp, Artificial Sequence
  primer
gtaaaacgacggccagtgtcatggccgagtctagtttg

SEQ ID NO: 27898 - DNA, 21 bp, Artificial Sequence
  primer
cgacatgctggttaaggtgag

SEQ ID NO: 27899 - DNA, 40 bp, Artificial Sequence
  primer
gtaaaacgacggccagtcccagaactgactcacatacacc

SEQ ID NO: 27900 - DNA, 39 bp, Artificial Sequence
  primer
gtaaaacgacggccagtaattgaaatgaagacagcctgg

SEQ ID NO: 27901 - DNA, 39 bp, Artificial Sequence
  primer
gtaaaacgacggccagttgtggacttctgaattgctgag

SEQ ID NO: 27902 - DNA, 39 bp, Artificial Sequence
  primer
gtaaaacgacggccagtcagtttcttcatcatgttccca

SEQ ID NO: 27903 - DNA, 18 bp, Artificial Sequence
  primer
cccggccaattaacatcc

SEQ ID NO: 27904 - DNA, 23 bp, Artificial Sequence
  primer
catttcttctgaaaccaaaggtg

SEQ ID NO: 27905 - DNA, 38 bp, Artificial Sequence
  primer
gtaaaacgacggccagtttgctgatgacaaggcacttc

SEQ ID NO: 27906 - DNA, 41 bp, Artificial Sequence
  primer
gtaaaacgacggccagtgaagacagatggtgaagtaggaca

SEQ ID NO: 27907 - DNA, 38 bp, Artificial Sequence
  primer
gtaaaacgacggccagttcccaggacgtcttctctctc

SEQ ID NO: 27908 - DNA, 38 bp, Artificial Sequence
  primer
gtaaaacgacggccagtgaggagctgcatgaagacttg

SEQ ID NO: 27909 - DNA, 40 bp, Artificial Sequence
  primer
gtaaaacgacggccagttcttgtttcgctcatggtaaatc

SEQ ID NO: 27910 - DNA, 38 bp, Artificial Sequence
  primer
gtaaaacgacggccagtaaagaacaaggtgggcaactg

SEQ ID NO: 27911 - DNA, 21 bp, Artificial Sequence
  primer
cttgcaatgcttaccaactgc

SEQ ID NO: 27912 - DNA, 38 bp, Artificial Sequence
  primer
gtaaaacgacggccagtttcattccaggtgttgtctgg

SEQ ID NO: 27913 - DNA, 21 bp, Artificial Sequence
  primer
tttaagctgtgcccagagttg

SEQ ID NO: 27914 - DNA, 23 bp, Artificial Sequence
  primer
gatgtgtgttattcgctggagac

SEQ ID NO: 27915 - DNA, 23 bp, Artificial Sequence
  primer
cacaacacatttccttaagctgg

SEQ ID NO: 27916 - DNA, 21 bp, Artificial Sequence
  primer
agaggttagggaaggtggcag

SEQ ID NO: 27917 - DNA, 40 bp, Artificial Sequence; identical to SEQ ID NO: 27909
  primer

SEQ ID NO: 27918 - DNA, 22 bp, Artificial Sequence
  primer
accacaatggtacatgcgtaac

SEQ ID NO: 27919 - DNA, 20 bp, Artificial Sequence
  primer
tttgttcaacctttgccagc

SEQ ID NO: 27920 - DNA, 21 bp, Artificial Sequence
  primer
gttggaatatccatgggcttg

SEQ ID NO: 27921 - DNA, 21 bp, Artificial Sequence
  primer
ttaactctgggaaggaccagc

SEQ ID NO: 27922 - DNA, 21 bp, Artificial Sequence
  primer
aagcagtttcccttcatttcc

SEQ ID NO: 27923 - DNA, 38 bp, Artificial Sequence
  primer
gtaaaacgacggccagtccttattagcatggcctttcc

SEQ ID NO: 27924 - DNA, 38 bp, Artificial Sequence
  primer
gtaaaacgacggccagttgattaaatcctttccgacca

SEQ ID NO: 27925 - DNA, 26 bp, Artificial Sequence
  primer
ccaatcatgtggatgtaactttattc

SEQ ID NO: 27926 - DNA, 40 bp, Artificial Sequence
  primer
gtaaaacgacggccagtcattcactgcacacattaagcac

SEQ ID NO: 27927 - DNA, 26 bp, Artificial Sequence
  primer
aagccatttatatcatggacacatct

SEQ ID NO: 27928 - DNA, 38 bp, Artificial Sequence
  primer
gtaaaacgacggccagttgtgttggctttctcacacac

SEQ ID NO: 27929 - DNA, 24 bp, Artificial Sequence
  primer
cggtaaccctgaagcttaaatatg

SEQ ID NO: 27930 - DNA, 38 bp, Artificial Sequence
  primer
gtaaaacgacggccagttaaacagagccgtctgtccac

SEQ ID NO: 27931 - DNA, 21 bp, Artificial Sequence
  primer
agctgaatgttaccaggaggc

SEQ ID NO: 27932 - DNA, 40 bp, Artificial Sequence
  primer
gtaaaacgacggccagtcaggcacagttctaggtatcagg

SEQ ID NO: 27933 - DNA, 41 bp, Artificial Sequence
  primer
gtaaaacgacggccagtgtgccatatactcattctcattgg

SEQ ID NO: 27934 - DNA, 37 bp, Artificial Sequence
  primer
gtaaaacgacggccagtctttgaaaggagcccagtcc

SEQ ID NO: 27935 - DNA, 21 bp, Artificial Sequence
  primer
ccaaatgctgcttccatattc

SEQ ID NO: 27936 - DNA, 21 bp, Artificial Sequence
  primer
atgccagccgttaaatctcag

SEQ ID NO: 27937 - DNA, 38 bp, Artificial Sequence
  primer
gtaaaacgacggccagtagcctttgatgaacaagccag

SEQ ID NO: 27938 - DNA, 21 bp, Artificial Sequence
  primer
ctctttccaagggctcaactc

SEQ ID NO: 27939 - DNA, 21 bp, Artificial Sequence
  primer
gtccttggttggagaaattgg

SEQ ID NO: 27940 - DNA, 21 bp, Artificial Sequence
  primer
gcctgctgaagataatcaacg

SEQ ID NO: 27941 - DNA, 38 bp, Artificial Sequence
  primer
gtaaaacgacggccagtcaagtgatctgcccatcttgg

SEQ ID NO: 27942 - DNA, 37 bp, Artificial Sequence
  primer
gtaaaacgacggccagtggtgcaatggaaagcaagtc

SEQ ID NO: 27943 - DNA, 38 bp, Artificial Sequence
  primer
gtaaaacgacggccagtaatgttatgcccactgtgctc

SEQ ID NO: 27944 - DNA, 21 bp, Artificial Sequence
  primer
tatggcactgatggacaggag

SEQ ID NO: 27945 - DNA, 38 bp, Artificial Sequence
  primer
gtaaaacgacggccagtgcacagcagaggagacagttc

SEQ ID NO: 27946 - DNA, 37 bp, Artificial Sequence; identical to SEQ ID NO: 27942
  primer

SEQ ID NO: 27947 - DNA, 37 bp, Artificial Sequence; identical to SEQ ID NO: 27942
  primer

SEQ ID NO: 27948 - DNA, 44 bp, Artificial Sequence
  primer
gtaaaacgacggccagtttgaagctaggtttattctctgaattg

SEQ ID NO: 27949 - DNA, 36 bp, Artificial Sequence
  primer
gtaaaacgacggccagtcttaagcgatccacctgcc

SEQ ID NO: 27950 - DNA, 20 bp, Artificial Sequence
  primer
aagatttgcaccactgccac

SEQ ID NO: 27951 - DNA, 40 bp, Artificial Sequence
  primer
gtaaaacgacggccagtgccttcttagtgaattgatttgc

SEQ ID NO: 27952 - DNA, 41 bp, Artificial Sequence
  primer
gtaaaacgacggccagtggcttataaatgtatgatgcctgc

SEQ ID NO: 27953 - DNA, 36 bp, Artificial Sequence
  primer
gtaaaacgacggccagtctaccatgcctggccaaag

SEQ ID NO: 27954 - DNA, 40 bp, Artificial Sequence
  primer
gtaaaacgacggccagttctccacatttggatgattgttc

SEQ ID NO: 27955 - DNA, 38 bp, Artificial Sequence
  primer
gtaaaacgacggccagtttatcaggttggcgagggtag

SEQ ID NO: 27956 - DNA, 39 bp, Artificial Sequence
  primer
gtaaaacgacggccagtcctggagaaaggtcacacagtc

SEQ ID NO: 27957 - DNA, 21 bp, Artificial Sequence
  primer
gcatcacttcctcattccaag

SEQ ID NO: 27958 - DNA, 21 bp, Artificial Sequence
  primer
ctaaggaagttgatgccatgc

SEQ ID NO: 27959 - DNA, 41 bp, Artificial Sequence
  primer
gtaaaacgacggccagtcaaagactgataagggagaagtcc

SEQ ID NO: 27960 - DNA, 21 bp, Artificial Sequence
  primer
tcccaagtccagtggtgtatg

SEQ ID NO: 27961 - DNA, 38 bp, Artificial Sequence
  primer
gtaaaacgacggccagtcttccttcccatctcctatgg

SEQ ID NO: 27962 - DNA, 38 bp, Artificial Sequence
  primer
gtaaaacgacggccagtcagctcctgtggtaatggatg

SEQ ID NO: 27963 - DNA, 20 bp, Artificial Sequence
  primer
ggaccacagaatggcaactg

SEQ ID NO: 27964 - DNA, 40 bp, Artificial Sequence
  primer
gtaaaacgacggccagtaaacaaacagtgaattgcctcag

SEQ ID NO: 27965 - DNA, 24 bp, Artificial Sequence
  primer
tgacaaatgtacagaagcagacac

SEQ ID NO: 27966 - DNA, 21 bp, Artificial Sequence
  primer
tagagtgtcagctgatgtgcg

SEQ ID NO: 27967 - DNA, 41 bp, Artificial Sequence
  primer
gtaaaacgacggccagttccaattattgctgtaccctcttc

SEQ ID NO: 27968 - DNA, 43 bp, Artificial Sequence
  primer
gtaaaacgacggccagtcaatttcacagaattattgagtcagc

SEQ ID NO: 27969 - DNA, 41 bp, Artificial Sequence
  primer
gtaaaacgacggccagttgaccaacttgattatttgtttgc

SEQ ID NO: 27970 - DNA, 43 bp, Artificial Sequence
  primer
gtaaaacgacggccagttcagaagaccctgttcattataagtc

SEQ ID NO: 27971 - DNA, 39 bp, Artificial Sequence
  primer
gtaaaacgacggccagtgaagtacactgtccaagcaccc

SEQ ID NO: 27972 - DNA, 21 bp, Artificial Sequence
  primer
ggtccatctctgtcttcaggg

SEQ ID NO: 27973 - DNA, 38 bp, Artificial Sequence
  primer
gtaaaacgacggccagtctccaggctttcagtaccacc

SEQ ID NO: 27974 - DNA, 21 bp, Artificial Sequence
  primer
ttgatggcagcaagtcaactc

SEQ ID NO: 27975 - DNA, 21 bp, Artificial Sequence
  primer
tgatcagttgggatgttctgg

SEQ ID NO: 27976 - DNA, 36 bp, Artificial Sequence
  primer
gtaaaacgacggccagtgagttgcctgggactttgc

SEQ ID NO: 27977 - DNA, 21 bp, Artificial Sequence
  primer
ttaaatttccctggttggtgg

SEQ ID NO: 27978 - DNA, 40 bp, Artificial Sequence
  primer
gtaaaacgacggccagttttgagaccaattggaagatgag

SEQ ID NO: 27979 - DNA, 35 bp, Artificial Sequence
  primer
gtaaaacgacggccagtgggagcgaagactgaccc

SEQ ID NO: 27980 - DNA, 40 bp, Artificial Sequence
  primer
gtaaaacgacggccagtgacttacagtagctgggaaatgg

SEQ ID NO: 27981 - DNA, 21 bp, Artificial Sequence
  primer
cctaagggtggacttgctgtc

SEQ ID NO: 27982 - DNA, 38 bp, Artificial Sequence
  primer
gtaaaacgacggccagtagaccctgctactccttgtgc

SEQ ID NO: 27983 - DNA, 37 bp, Artificial Sequence
  primer
gtaaaacgacggccagtcaaatgatccacctgccttg

SEQ ID NO: 27984 - DNA, 38 bp, Artificial Sequence
  primer
gtaaaacgacggccagttgctctgtctcaatcagcctc

SEQ ID NO: 27985 - DNA, 38 bp, Artificial Sequence
  primer
gtaaaacgacggccagttgcaccgactttcatatgttg

SEQ ID NO: 27986 - DNA, 38 bp, Artificial Sequence
  primer
gtaaaacgacggccagtgctgctcctgttggatgtatg

SEQ ID NO: 27987 - DNA, 21 bp, Artificial Sequence
  primer
tcaaagaggctgcagtttgag

SEQ ID NO: 27988 - DNA, 39 bp, Artificial Sequence
  primer
gtaaaacgacggccagtccctaactcagaatctgggacc

SEQ ID NO: 27989 - DNA, 38 bp, Artificial Sequence
  primer
gtaaaacgacggccagtatatctcccgcacctcaactg

SEQ ID NO: 27990 - DNA, 38 bp, Artificial Sequence
  primer
gtaaaacgacggccagtggaccttgaatctgtgggaag

SEQ ID NO: 27991 - DNA, 21 bp, Artificial Sequence
  primer
acaccacacactgcacacatc

SEQ ID NO: 27992 - DNA, 21 bp, Artificial Sequence
  primer
ctgacctccctgtactctggg

SEQ ID NO: 27993 - DNA, 38 bp, Artificial Sequence
  primer
gtaaaacgacggccagtgtcacagtggcagtgacaagg

SEQ ID NO: 27994 - DNA, 38 bp, Artificial Sequence
  primer
gtaaaacgacggccagtgctttaaccatgcaatgagcc

SEQ ID NO: 27995 - DNA, 38 bp, Artificial Sequence
  primer
gtaaaacgacggccagtctggtcctgaagctggatttc

SEQ ID NO: 27996 - DNA, 21 bp, Artificial Sequence
  primer
actaggaggctttcctgggag

SEQ ID NO: 27997 - DNA, 20 bp, Artificial Sequence
  primer
ggctgaccctcacactcatc

SEQ ID NO: 27998 - DNA, 38 bp, Artificial Sequence
  primer
gtaaaacgacggccagtgcagatgaaaggaagggactg

SEQ ID NO: 27999 - DNA, 21 bp, Artificial Sequence
  primer
atcagcctgtctgctctctcc

SEQ ID NO: 28000 - DNA, 38 bp, Artificial Sequence
  primer
gtaaaacgacggccagtttctcctgaatcatccttccc

SEQ ID NO: 28001 - DNA, 38 bp, Artificial Sequence
  primer
gtaaaacgacggccagtcactgtcacccagaaaccctc

SEQ ID NO: 28002 - DNA, 21 bp, Artificial Sequence
  primer
gctacaacttccctccaatgc

SEQ ID NO: 28003 - DNA, 21 bp, Artificial Sequence
  primer
tgaatgccagtcaattccaac

SEQ ID NO: 28004 - DNA, 21 bp, Artificial Sequence
  primer
gccttgggtgataagttcctg

SEQ ID NO: 28005 - DNA, 20 bp, Artificial Sequence
  primer
ataatgctgtggctgctgtg

SEQ ID NO: 28006 - DNA, 38 bp, Artificial Sequence
  primer
gtaaaacgacggccagttcctattcccattccagcttc

SEQ ID NO: 28007 - DNA, 22 bp, Artificial Sequence
  primer
ggtgagcaccaaatgtcctaag

SEQ ID NO: 28008 - DNA, 23 bp, Artificial Sequence
  primer
gacctagttactgtgatgggacg

SEQ ID NO: 28009 - DNA, 38 bp, Artificial Sequence
  primer
gtaaaacgacggccagtcagcatagctattcagcacgg

SEQ ID NO: 28010 - DNA, 38 bp, Artificial Sequence
  primer
gtaaaacgacggccagtaagggagaaacttctgggagc

SEQ ID NO: 28011 - DNA, 38 bp, Artificial Sequence
  primer
gtaaaacgacggccagtccagctttgccaggtctttac

SEQ ID NO: 28012 - DNA, 21 bp, Artificial Sequence
  primer
ccctcaaagactgaaaggtgc

SEQ ID NO: 28013 - DNA, 21 bp, Artificial Sequence
  primer
gagtatttccgctggaactgg

SEQ ID NO: 28014 - DNA, 21 bp, Artificial Sequence
  primer
atcgccatgcctcagtacttc

SEQ ID NO: 28015 - DNA, 21 bp, Artificial Sequence
  primer
gaaagtggcgacaggtttagc

SEQ ID NO: 28016 - DNA, 37 bp, Artificial Sequence
  primer
gtaaaacgacggccagttctaccgttgttgtgcaggg

SEQ ID NO: 28017 - DNA, 38 bp, Artificial Sequence
  primer
gtaaaacgacggccagttgaagagacagtagggctggc

SEQ ID NO: 28018 - DNA, 38 bp, Artificial Sequence
  primer
gtaaaacgacggccagtcccaccaccacatgtacactc

SEQ ID NO: 28019 - DNA, 39 bp, Artificial Sequence
  primer
gtaaaacgacggccagttgtgctgggtgtgtttatcaag

SEQ ID NO: 28020 - DNA, 19 bp, Artificial Sequence
  primer
ctaccgcaaccaggagctg

SEQ ID NO: 28021 - DNA, 38 bp, Artificial Sequence
  primer
gtaaaacgacggccagttcttctttgccttcaagtccc

SEQ ID NO: 28022 - DNA, 20 bp, Artificial Sequence
  primer
caagagcaacagcgaagacc

SEQ ID NO: 28023 - DNA, 20 bp, Artificial Sequence
  primer
ccagatgcaagcagaaggtc

SEQ ID NO: 28024 - DNA, 21 bp, Artificial Sequence
  primer
cacaggaattctacgcaccag

SEQ ID NO: 28025 - DNA, 39 bp, Artificial Sequence
  primer
gtaaaacgacggccagttggttaagaggagctgaaggac

SEQ ID NO: 28026 - DNA, 26 bp, Artificial Sequence
  primer
ctaaagagttgcaatttcaagcaaag

SEQ ID NO: 28027 - DNA, 38 bp, Artificial Sequence
  primer
gtaaaacgacggccagtcctaaagagtgggcctgagtg

SEQ ID NO: 28028 - DNA, 22 bp, Artificial Sequence
  primer
agaaccacagacagcacaactg

SEQ ID NO: 28029 - DNA, 38 bp, Artificial Sequence
  primer
gtaaaacgacggccagtcctagcctgattgacctacgc

SEQ ID NO: 28030 - DNA, 21 bp, Artificial Sequence
  primer
tgctttgcccatcactaaatg

SEQ ID NO: 28031 - DNA, 21 bp, Artificial Sequence
  primer
tgaaactgtgcttcttgcctg

SEQ ID NO: 28032 - DNA, 24 bp, Artificial Sequence
  primer
tgttggcttcttaatgatttatcg

SEQ ID NO: 28033 - DNA, 38 bp, Artificial Sequence
  primer
gtaaaacgacggccagtacgcgcatcatattggagtag

SEQ ID NO: 28034 - DNA, 38 bp, Artificial Sequence
  primer
gtaaaacgacggccagtatttggtagcaagggaattgg

SEQ ID NO: 28035 - DNA, 38 bp, Artificial Sequence
  primer
gtaaaacgacggccagttcatctgacttcacctgtggg

SEQ ID NO: 28036 - DNA, 23 bp, Artificial Sequence
  primer
aattgcctttctagagcacttcc

SEQ ID NO: 28037 - DNA, 22 bp, Artificial Sequence
  primer
tttacaaggctcttccagatgc

SEQ ID NO: 28038 - DNA, 39 bp, Artificial Sequence
  primer
gtaaaacgacggccagtcctggaattcccagaaacaaac

SEQ ID NO: 28039 - DNA, 22 bp, Artificial Sequence
  primer
agctttgggtgttaagtatggc

SEQ ID NO: 28040 - DNA, 38 bp, Artificial Sequence
  primer
gtaaaacgacggccagttgtagcggagtgtcttgttgg

SEQ ID NO: 28041 - DNA, 23 bp, Artificial Sequence
  primer
gaaatttgctcgaatgttaaacg

SEQ ID NO: 28042 - DNA, 21 bp, Artificial Sequence
  primer
gtctgccagatgaagttgctg

SEQ ID NO: 28043 - DNA, 22 bp, Artificial Sequence
  primer
tggtgagagaatccttcgtgac

SEQ ID NO: 28044 - DNA, 38 bp, Artificial Sequence
  primer
gtaaaacgacggccagtaaagatggaaagccactcctg

SEQ ID NO: 28045 - DNA, 23 bp, Artificial Sequence
  primer
tgtgtaaacaaaccgtggaactc

SEQ ID NO: 28046 - DNA, 38 bp, Artificial Sequence
  primer
gtaaaacgacggccagtaaggaaacaggttccctcctg

SEQ ID NO: 28047 - DNA, 24 bp, Artificial Sequence
  primer
aagtcatctgtgttgttctgttgc

SEQ ID NO: 28048 - DNA, 38 bp, Artificial Sequence
  primer
gtaaaacgacggccagttttcacttccaggaccagacc

SEQ ID NO: 28049 - DNA, 44 bp, Artificial Sequence
  primer
gtaaaacgacggccagtgaatgctaagcaacgtgtattaaagag

SEQ ID NO: 28050 - DNA, 39 bp, Artificial Sequence
  primer
gtaaaacgacggccagttggagatctcagaatggtctgg

SEQ ID NO: 28051 - DNA, 41 bp, Artificial Sequence
  primer
gtaaaacgacggccagtagaagagaaactgaaaggaccatc

SEQ ID NO: 28052 - DNA, 39 bp, Artificial Sequence
  primer
gtaaaacgacggccagttctgctgtcacttcctgttctg

SEQ ID NO: 28053 - DNA, 38 bp, Artificial Sequence; identical to SEQ ID NO: 28046
  primer

SEQ ID NO: 28054 - DNA, 40 bp, Artificial Sequence
  primer
gtaaaacgacggccagttgatcttgataatagccatgcag

SEQ ID NO: 28055 - DNA, 21 bp, Artificial Sequence
  primer
tcaacattatgggtgtggctc

SEQ ID NO: 28056 - DNA, 38 bp, Artificial Sequence
  primer
gtaaaacgacggccagtgtggaggaacaggcaagactc

SEQ ID NO: 28057 - DNA, 21 bp, Artificial Sequence
  primer
gcactatgactctgggaaggg

SEQ ID NO: 28058 - DNA, 38 bp, Artificial Sequence
  primer
gtaaaacgacggccagttcttcatagtgtggtggcagc

SEQ ID NO: 28059 - DNA, 38 bp, Artificial Sequence
  primer
gtaaaacgacggccagtcatctttctcattgcagcacc

SEQ ID NO: 28060 - DNA, 39 bp, Artificial Sequence
  primer
gtaaaacgacggccagttgtggcttgtttatgtctgtgc

SEQ ID NO: 28061 - DNA, 40 bp, Artificial Sequence
  primer
gtaaaacgacggccagtccatggttaatatgtgacagcac

SEQ ID NO: 28062 - DNA, 37 bp, Artificial Sequence
  primer
gtaaaacgacggccagtctggctgctgaaatggagag

SEQ ID NO: 28063 - DNA, 21 bp, Artificial Sequence
  primer
ctcagtaaacatgctgctgcc

SEQ ID NO: 28064 - DNA, 21 bp, Artificial Sequence
  primer
gaagggcttaccgttgtatgg

SEQ ID NO: 28065 - DNA, 21 bp, Artificial Sequence
  primer
ttcccaagtgctgttatgcac

SEQ ID NO: 28066 - DNA, 43 bp, Artificial Sequence
  primer
gtaaaacgacggccagttttctgtctactgcacactttattgc

SEQ ID NO: 28067 - DNA, 36 bp, Artificial Sequence
  primer
gtaaaacgacggccagtctggaccattggtgacagc

SEQ ID NO: 28068 - DNA, 38 bp, Artificial Sequence
  primer
gtaaaacgacggccagtcaagcccttatccagatagcc

SEQ ID NO: 28069 - DNA, 38 bp, Artificial Sequence
  primer
gtaaaacgacggccagtttggaacacaggctaacaagg

SEQ ID NO: 28070 - DNA, 21 bp, Artificial Sequence
  primer
tgtccattctgaaagccaaag

SEQ ID NO: 28071 - DNA, 43 bp, Artificial Sequence
  primer
gtaaaacgacggccagttcatggtgctttctttattaagtttc

SEQ ID NO: 28072 - DNA, 38 bp, Artificial Sequence
  primer
gtaaaacgacggccagttccagtgcatctcggtgtaac

SEQ ID NO: 28073 - DNA, 37 bp, Artificial Sequence
  primer
gtaaaacgacggccagtctgattggctgagcctgaag

SEQ ID NO: 28074 - DNA, 38 bp, Artificial Sequence
  primer
gtaaaacgacggccagtttgcaaagctatgtacccgtg

SEQ ID NO: 28075 - DNA, 20 bp, Artificial Sequence
  primer
aggtgcctgttgaggacctg

SEQ ID NO: 28076 - DNA, 38 bp, Artificial Sequence
  primer
gtaaaacgacggccagttggactgaattagctggtggg

SEQ ID NO: 28077 - DNA, 18 bp, Artificial Sequence
  primer
ccattgcaatcagcctgg

SEQ ID NO: 28078 - DNA, 40 bp, Artificial Sequence
  primer
gtaaaacgacggccagtaagggactttctggaaactaagg

SEQ ID NO: 28079 - DNA, 39 bp, Artificial Sequence
  primer
gtaaaacgacggccagtaaagttcattctttgggcagtg

SEQ ID NO: 28080 - DNA, 43 bp, Artificial Sequence
  primer
gtaaaacgacggccagtgggaaactgtcagtatttaccactta

SEQ ID NO: 28081 - DNA, 38 bp, Artificial Sequence
  primer
gtaaaacgacggccagtcttaagtagcgggaaaggcag

SEQ ID NO: 28082 - DNA, 22 bp, Artificial Sequence
  primer
actacctgtagctaaatgcggg

SEQ ID NO: 28083 - DNA, 22 bp, Artificial Sequence
  primer
aaagtgaaggacacaacccaaa

SEQ ID NO: 28084 - DNA, 38 bp, Artificial Sequence
  primer
gtaaaacgacggccagtctgctgaaacgtctttcctcc

SEQ ID NO: 28085 - DNA, 38 bp, Artificial Sequence
  primer
gtaaaacgacggccagttttagcgctgggcaatttaag

SEQ ID NO: 28086 - DNA, 38 bp, Artificial Sequence
  primer
gtaaaacgacggccagtgaagaggcatttgggaatgag

SEQ ID NO: 28087 - DNA, 21 bp, Artificial Sequence
  primer
aaggctcagaatgaggcagac

SEQ ID NO: 28088 - DNA, 20 bp, Artificial Sequence
  primer
accaatctcaccaccacagc

SEQ ID NO: 28089 - DNA, 21 bp, Artificial Sequence
  primer
atggacccaatccctacagtg

SEQ ID NO: 28090 - DNA, 38 bp, Artificial Sequence
  primer
gtaaaacgacggccagtcctaccagcgtgggatatctg

SEQ ID NO: 28091 - DNA, 20 bp, Artificial Sequence
  primer
gagtgaccatggacgctgag

SEQ ID NO: 28092 - DNA, 21 bp, Artificial Sequence
  primer
gcttgtgtgaggctaatgctg

SEQ ID NO: 28093 - DNA, 21 bp, Artificial Sequence
  primer
cttctggaacaatttgggtgg

SEQ ID NO: 28094 - DNA, 38 bp, Artificial Sequence
  primer
gtaaaacgacggccagtctcacccaagtcaccaacaag

SEQ ID NO: 28095 - DNA, 37 bp, Artificial Sequence
  primer
gtaaaacgacggccagtgcctctgtatcctggtgctg

SEQ ID NO: 28096 - DNA, 37 bp, Artificial Sequence
  primer
gtaaaacgacggccagtgtatgggaagggagcaggtc

SEQ ID NO: 28097 - DNA, 37 bp, Artificial Sequence
  primer
gtaaaacgacggccagtaccacccacacttcctcctc

SEQ ID NO: 28098 - DNA, 38 bp, Artificial Sequence
  primer
gtaaaacgacggccagtgaccagatcaggaagctggag

SEQ ID NO: 28099 - DNA, 37 bp, Artificial Sequence
  primer
gtaaaacgacggccagtgccagaaactccattagccc

SEQ ID NO: 28100 - DNA, 21 bp, Artificial Sequence
  primer
agaagagcctctgggtggttc

SEQ ID NO: 28101 - DNA, 38 bp, Artificial Sequence
  primer
gtaaaacgacggccagtgtagccagaaatggctccaag

SEQ ID NO: 28102 - DNA, 37 bp, Artificial Sequence
  primer
gtaaaacgacggccagttcccaactgctcctagttcg

SEQ ID NO: 28103 - DNA, 38 bp, Artificial Sequence
  primer
gtaaaacgacggccagttacctgaccagtatccctgcc

SEQ ID NO: 28104 - DNA, 21 bp, Artificial Sequence
  primer
gaggccacctctttctttgtg

SEQ ID NO: 28105 - DNA, 21 bp, Artificial Sequence
  primer
ccagggaacaatgaagaggat

SEQ ID NO: 28106 - DNA, 21 bp, Artificial Sequence
  primer
catggttcaaagatgactggg

SEQ ID NO: 28107 - DNA, 21 bp, Artificial Sequence
  primer
ggcaacagagtgagactgcat

SEQ ID NO: 28108 - DNA, 21 bp, Artificial Sequence
  primer
ttgcctgattcttcatccact

SEQ ID NO: 28109 - DNA, 37 bp, Artificial Sequence
  primer
gtaaaacgacggccagttggccctcattgtcttatgc

SEQ ID NO: 28110 - DNA, 38 bp, Artificial Sequence
  primer
gtaaaacgacggccagtcccacaccataggatttacca

SEQ ID NO: 28111 - DNA, 38 bp, Artificial Sequence
  primer
gtaaaacgacggccagtttgtgagggaacctagaaccc

SEQ ID NO: 28112 - DNA, 38 bp, Artificial Sequence
  primer
gtaaaacgacggccagttcctgttacctctttccaccc

SEQ ID NO: 28113 - DNA, 38 bp, Artificial Sequence
  primer
gtaaaacgacggccagtcctcataaagcaaggattccc

SEQ ID NO: 28114 - DNA, 37 bp, Artificial Sequence
  primer
gtaaaacgacggccagtagggagaaagcagagccttg

SEQ ID NO: 28115 - DNA, 37 bp, Artificial Sequence
  primer
gtaaaacgacggccagttctgcctgggtttctctctc

SEQ ID NO: 28116 - DNA, 38 bp, Artificial Sequence
  primer
gtaaaacgacggccagtcagaatggacctctgtccctg

SEQ ID NO: 28117 - DNA, 38 bp, Artificial Sequence
  primer
gtaaaacgacggccagtgcatgttggtcaatagcatcc

SEQ ID NO: 28118 - DNA, 19 bp, Artificial Sequence
  primer
aaagtgctcctgctgaggg

SEQ ID NO: 28119 - DNA, 21 bp, Artificial Sequence
  primer
gtctccatgtctctgtgcagc

SEQ ID NO: 28120 - DNA, 38 bp, Artificial Sequence
  primer
gtaaaacgacggccagtatctggctctgaagtccttgc

SEQ ID NO: 28121 - DNA, 38 bp, Artificial Sequence
  primer
gtaaaacgacggccagtctccaggttggaattcctcag

SEQ ID NO: 28122 - DNA, 38 bp, Artificial Sequence
  primer
gtaaaacgacggccagttgtctccattccatgatccac

SEQ ID NO: 28123 - DNA, 21 bp, Artificial Sequence
  primer
accaagagcagcagtgatacg

SEQ ID NO: 28124 - DNA, 38 bp, Artificial Sequence
  primer
gtaaaacgacggccagtctctgagagggacattgagcc

SEQ ID NO: 28125 - DNA, 38 bp, Artificial Sequence
  primer
gtaaaacgacggccagtagatcagctttgcctctctgg

SEQ ID NO: 28126 - DNA, 21 bp, Artificial Sequence
  primer
aatccctgtgatttcctcagc

SEQ ID NO: 28127 - DNA, 38 bp, Artificial Sequence
  primer
gtaaaacgacggccagtcagcagtgacacaggcagaag

SEQ ID NO: 28128 - DNA, 21 bp, Artificial Sequence
  primer
agactcatcctgaagccaagc

SEQ ID NO: 28129 - DNA, 21 bp, Artificial Sequence
  primer
tccaggttccttccatctcac

SEQ ID NO: 28130 - DNA, 38 bp, Artificial Sequence
  primer
gtaaaacgacggccagtatataccctgggctcccaaac

SEQ ID NO: 28131 - DNA, 20 bp, Artificial Sequence
  primer
gagcagaacaaacctttggc

SEQ ID NO: 28132 - DNA, 37 bp, Artificial Sequence
  primer
gtaaaacgacggccagtggctgacttctcatcgcttg

SEQ ID NO: 28133 - DNA, 44 bp, Artificial Sequence
  primer
gtaaaacgacggccagttgtctatggatactgaatagtgggttt

SEQ ID NO: 28134 - DNA, 38 bp, Artificial Sequence
  primer
gtaaaacgacggccagtaccctaagagaagaggcggac

SEQ ID NO: 28135 - DNA, 20 bp, Artificial Sequence
  primer
cgctgtgatccaattatccc

SEQ ID NO: 28136 - DNA, 27 bp, Artificial Sequence
  primer
ttcatttatttgtttcaaactctcaac

SEQ ID NO: 28137 - DNA, 21 bp, Artificial Sequence
  primer
actgaattggtctctctgccc

SEQ ID NO: 28138 - DNA, 36 bp, Artificial Sequence
  primer
gtaaaacgacggccagtgacacatgcacgcacacac

SEQ ID NO: 28139 - DNA, 21 bp, Artificial Sequence
  primer
agccacatacctggccttaat

SEQ ID NO: 28140 - DNA, 22 bp, Artificial Sequence
  primer
tgacaaatttcattgctgttgc

SEQ ID NO: 28141 - DNA, 20 bp, Artificial Sequence
  primer
atgagcattgcctcaactgg

SEQ ID NO: 28142 - DNA, 21 bp, Artificial Sequence
  primer
tattcattcctgtggcctttg

SEQ ID NO: 28143 - DNA, 21 bp, Artificial Sequence
  primer
tggccatgagagaaatgctta

SEQ ID NO: 28144 - DNA, 21 bp, Artificial Sequence
  primer
aagtgctgtctttactggccg

SEQ ID NO: 28145 - DNA, 21 bp, Artificial Sequence
  primer
ccagactgggtgacagagaga

SEQ ID NO: 28146 - DNA, 38 bp, Artificial Sequence
  primer
gtaaaacgacggccagtcaaacacagctgatcattccg

SEQ ID NO: 28147 - DNA, 37 bp, Artificial Sequence
  primer
gtaaaacgacggccagttgcagatgtgaatcactgcc

SEQ ID NO: 28148 - DNA, 22 bp, Artificial Sequence
  primer
actgtggccagcctaacttatc

SEQ ID NO: 28149 - DNA, 38 bp, Artificial Sequence
  primer
gtaaaacgacggccagttccactttgtgtggacaatgg

SEQ ID NO: 28150 - DNA, 38 bp, Artificial Sequence
  primer
gtaaaacgacggccagttaaagcgatcttcccatgttg

SEQ ID NO: 28151 - DNA, 39 bp, Artificial Sequence
  primer
gtaaaacgacggccagttgccaaatcaggtaacattcac

SEQ ID NO: 28152 - DNA, 27 bp, Artificial Sequence
  primer
tgcatacctttataacatgtgctttac

SEQ ID NO: 28153 - DNA, 22 bp, Artificial Sequence
  primer
gatcacaggaggtggaggttac

SEQ ID NO: 28154 - DNA, 38 bp, Artificial Sequence
  primer
gtaaaacgacggccagtctttgtgaaagccctttgagg

SEQ ID NO: 28155 - DNA, 21 bp, Artificial Sequence
  primer
attcagctcatgcctcatgtc

SEQ ID NO: 28156 - DNA, 39 bp, Artificial Sequence
  primer
gtaaaacgacggccagtccattgtgaatcattgccttag

SEQ ID NO: 28157 - DNA, 38 bp, Artificial Sequence
  primer
gtaaaacgacggccagttggcctgatttacagtgttgg

SEQ ID NO: 28158 - DNA, 25 bp, Artificial Sequence
  primer
atgtttgagtctaagtggtgaatga

SEQ ID NO: 28159 - DNA, 39 bp, Artificial Sequence
  primer
gtaaaacgacggccagttccttacttagaattgccgtgg

SEQ ID NO: 28160 - DNA, 21 bp, Artificial Sequence
  primer
tactgtgcagggaatgaatgg

SEQ ID NO: 28161 - DNA, 39 bp, Artificial Sequence; identical to SEQ ID NO: 28151
  primer

SEQ ID NO: 28162 - DNA, 36 bp, Artificial Sequence
  primer
gtaaaacgacggccagtctcaaggctgcaggaggtc

SEQ ID NO: 28163 - DNA, 36 bp, Artificial Sequence
  primer
gtaaaacgacggccagtacctgtcaggacacctggg

SEQ ID NO: 28164 - DNA, 36 bp, Artificial Sequence
  primer
gtaaaacgacggccagtctgagaagcaggaaacggc

SEQ ID NO: 28165 - DNA, 38 bp, Artificial Sequence
  primer
gtaaaacgacggccagtcattgtcaccttagtcgctgc

SEQ ID NO: 28166 - DNA, 38 bp, Artificial Sequence
  primer
gtaaaacgacggccagtctccgtttaatgaggttgcag

SEQ ID NO: 28167 - DNA, 37 bp, Artificial Sequence
  primer
gtaaaacgacggccagtcgagcaccttgacctttgag

SEQ ID NO: 28168 - DNA, 37 bp, Artificial Sequence
  primer
gtaaaacgacggccagtcttgcctgtctgcctctcac

SEQ ID NO: 28169 - DNA, 37 bp, Artificial Sequence
  primer
gtaaaacgacggccagtacggtcaccaagtcaaccag

SEQ ID NO: 28170 - DNA, 37 bp, Artificial Sequence
  primer
gtaaaacgacggccagtcatctttgcaagccatggag

SEQ ID NO: 28171 - DNA, 19 bp, Artificial Sequence
  primer
gcctgagccagaccttgtc

SEQ ID NO: 28172 - DNA, 38 bp, Artificial Sequence
  primer
gtaaaacgacggccagtatcaacatgtgcctttgtgtg

SEQ ID NO: 28173 - DNA, 36 bp, Artificial Sequence
  primer
gtaaaacgacggccagtgacgtggctgggtctgaat

SEQ ID NO: 28174 - DNA, 37 bp, Artificial Sequence
  primer
gtaaaacgacggccagtcctgcttcaccgactctttc

SEQ ID NO: 28175 - DNA, 36 bp, Artificial Sequence
  primer
gtaaaacgacggccagtcgcctgaaacaaagggaag

SEQ ID NO: 28176 - DNA, 36 bp, Artificial Sequence
  primer
gtaaaacgacggccagtctctgcttgcccttatcgg

SEQ ID NO: 28177 - DNA, 40 bp, Artificial Sequence
  primer
gtaaaacgacggccagttgcctggcttaagacataaactg

SEQ ID NO: 28178 - DNA, 38 bp, Artificial Sequence
  primer
gtaaaacgacggccagtcagcgaaactccatctcaatc

SEQ ID NO: 28179 - DNA, 20 bp, Artificial Sequence
  primer
cgccacaacatccagctaat

SEQ ID NO: 28180 - DNA, 43 bp, Artificial Sequence
  primer
gtaaaacgacggccagtcctgttacatgtgactatattggctg

SEQ ID NO: 28181 - DNA, 36 bp, Artificial Sequence
  primer
gtaaaacgacggccagtctgcttctctccctcgctc

SEQ ID NO: 28182 - DNA, 18 bp, Artificial Sequence
  primer
aaatggttgcctgtgggc

SEQ ID NO: 28183 - DNA, 39 bp, Artificial Sequence
  primer
gtaaaacgacggccagttcttgtatggtgaatttggtgc

SEQ ID NO: 28184 - DNA, 38 bp, Artificial Sequence
  primer
gtaaaacgacggccagtttcctttccttgattatggcg

SEQ ID NO: 28185 - DNA, 24 bp, Artificial Sequence
  primer
ttctgacaatgaactgagagttgg

SEQ ID NO: 28186 - DNA, 38 bp, Artificial Sequence
  primer
gtaaaacgacggccagtttgtctgtatcttgccttgcc

SEQ ID NO: 28187 - DNA, 40 bp, Artificial Sequence
  primer
gtaaaacgacggccagttttatacttacaccacgttgccc

SEQ ID NO: 28188 - DNA, 40 bp, Artificial Sequence
  primer
gtaaaacgacggccagtcccagactagatgctttctggtt

SEQ ID NO: 28189 - DNA, 21 bp, Artificial Sequence
  primer
caggtacggatctaaacagcg

SEQ ID NO: 28190 - DNA, 21 bp, Artificial Sequence
  primer
agtgttcccatggtatttgcc

SEQ ID NO: 28191 - DNA, 38 bp, Artificial Sequence
  primer
gtaaaacgacggccagtagttgaaagatgccatttccc

SEQ ID NO: 28192 - DNA, 21 bp, Artificial Sequence
  primer
gatttgctttcaccctgcttc

SEQ ID NO: 28193 - DNA, 38 bp, Artificial Sequence
  primer
gtaaaacgacggccagtggcatggcattgagagttagg

SEQ ID NO: 28194 - DNA, 23 bp, Artificial Sequence
  primer
gcccagtatatcacctctgaagc

SEQ ID NO: 28195 - DNA, 42 bp, Artificial Sequence
  primer
gtaaaacgacggccagtacacctataacttgccacaagagtc

SEQ ID NO: 28196 - DNA, 38 bp, Artificial Sequence
  primer
gtaaaacgacggccagttggcccacagtagacaatcag

SEQ ID NO: 28197 - DNA, 38 bp, Artificial Sequence
  primer
gtaaaacgacggccagtaacccagccttgtgactgaag

SEQ ID NO: 28198 - DNA, 22 bp, Artificial Sequence
  primer
ttgataaagatgaatccggaac

SEQ ID NO: 28199 - DNA, 26 bp, Artificial Sequence
  primer
aaatgaagaaataggacatggttctc

SEQ ID NO: 28200 - DNA, 21 bp, Artificial Sequence
  primer
ttcgtgatcaaccaccaagac

SEQ ID NO: 28201 - DNA, 36 bp, Artificial Sequence
  primer
gtaaaacgacggccagtttgctgcttcaaagggagg

SEQ ID NO: 28202 - DNA, 21 bp, Artificial Sequence
  primer
aagtgccgtagcgagaatagg

SEQ ID NO: 28203 - DNA, 44 bp, Artificial Sequence
  primer
gtaaaacgacggccagtgaagacagaatatgaggagtattcagg

SEQ ID NO: 28204 - DNA, 38 bp, Artificial Sequence
  primer
gtaaaacgacggccagtggttgcttagtgggttaggct

SEQ ID NO: 28205 - DNA, 40 bp, Artificial Sequence
  primer
gtaaaacgacggccagtttgtgagatattgactgtgcgtc

SEQ ID NO: 28206 - DNA, 39 bp, Artificial Sequence
  primer
gtaaaacgacggccagttgttggctccctgttctatacc

SEQ ID NO: 28207 - DNA, 38 bp, Artificial Sequence
  primer
gtaaaacgacggccagtatggtgccagaaaccttcttc

SEQ ID NO: 28208 - DNA, 38 bp, Artificial Sequence
  primer
gtaaaacgacggccagtggaagttctgtcagtgcatgg

SEQ ID NO: 28209 - DNA, 21 bp, Artificial Sequence
  primer
ataaaccactcccagcaccac

SEQ ID NO: 28210 - DNA, 40 bp, Artificial Sequence
  primer
gtaaaacgacggccagtgaatcatcagtgtggtgctactg

SEQ ID NO: 28211 - DNA, 21 bp, Artificial Sequence
  primer
tcccatcaagggtcttaacaa

SEQ ID NO: 28212 - DNA, 21 bp, Artificial Sequence
  primer
ttgtggcccttgtaattcttg

SEQ ID NO: 28213 - DNA, 38 bp, Artificial Sequence
  primer
gtaaaacgacggccagttggaacacatggtccatcttc

SEQ ID NO: 28214 - DNA, 21 bp, Artificial Sequence
  primer
ggtgaactgctggataaaccc

SEQ ID NO: 28215 - DNA, 24 bp, Artificial Sequence
  primer
tctggaaataaatgtgaagagcat

SEQ ID NO: 28216 - DNA, 42 bp, Artificial Sequence
  primer
gtaaaacgacggccagtttccataggaaatgagataatgctg

SEQ ID NO: 28217 - DNA, 36 bp, Artificial Sequence
  primer
gtaaaacgacggccagtctctaggacccgccctctc

SEQ ID NO: 28218 - DNA, 36 bp, Artificial Sequence
  primer
gtaaaacgacggccagttatccctgcaggtgttccc

SEQ ID NO: 28219 - DNA, 21 bp, Artificial Sequence
  primer
ggtgagtaagcccttgtcctc

SEQ ID NO: 28220 - DNA, 38 bp, Artificial Sequence
  primer
gtaaaacgacggccagtctggagaaagaagagcttggg

SEQ ID NO: 28221 - DNA, 38 bp, Artificial Sequence
  primer
gtaaaacgacggccagtggtgaggacctagacacctgg

SEQ ID NO: 28222 - DNA, 21 bp, Artificial Sequence
  primer
ggacagatcctcaactcaggg

SEQ ID NO: 28223 - DNA, 36 bp, Artificial Sequence
  primer
gtaaaacgacggccagtcacaaccagccgaggtttg

SEQ ID NO: 28224 - DNA, 21 bp, Artificial Sequence
  primer
ctccacattcctctgctctcc

SEQ ID NO: 28225 - DNA, 38 bp, Artificial Sequence
  primer
gtaaaacgacggccagtgaacagtgcctgaatgctgag

SEQ ID NO: 28226 - DNA, 36 bp, Artificial Sequence
  primer
gtaaaacgacggccagtcccaggtggtctgggactc

SEQ ID NO: 28227 - DNA, 21 bp, Artificial Sequence
  primer
cgaactatgcctgagtccctc

SEQ ID NO: 28228 - DNA, 24 bp, Artificial Sequence
  primer
tcagaacccagatctttaaccttg

SEQ ID NO: 28229 - DNA, 21 bp, Artificial Sequence
  primer
tgccatgtatatgtgcttcca

SEQ ID NO: 28230 - DNA, 44 bp, Artificial Sequence
  primer
gtaaaacgacggccagtgggaataaatggagattataccaagag

SEQ ID NO: 28231 - DNA, 25 bp, Artificial Sequence
  primer
ttatagggtttacacctccagaaag

SEQ ID NO: 28232 - DNA, 38 bp, Artificial Sequence
  primer
gtaaaacgacggccagtctaggccttgggaagaatgag

SEQ ID NO: 28233 - DNA, 21 bp, Artificial Sequence
  primer
cattgttcaagggtgcaagag

SEQ ID NO: 28234 - DNA, 38 bp, Artificial Sequence
  primer
gtaaaacgacggccagttcagccacatgaggatattcg

SEQ ID NO: 28235 - DNA, 37 bp, Artificial Sequence
  primer
gtaaaacgacggccagttcctccaccaccaataagcc

SEQ ID NO: 28236 - DNA, 21 bp, Artificial Sequence
  primer
gtggtccacctgtaactgcac

SEQ ID NO: 28237 - DNA, 37 bp, Artificial Sequence
  primer
gtaaaacgacggccagtaggtgtagtgtccagagcgg

SEQ ID NO: 28238 - DNA, 38 bp, Artificial Sequence
  primer
gtaaaacgacggccagtaaggagggatggatggaagac

SEQ ID NO: 28239 - DNA, 38 bp, Artificial Sequence
  primer
gtaaaacgacggccagtacaggctgttagccaagcaag

SEQ ID NO: 28240 - DNA, 20 bp, Artificial Sequence
  primer
tcttctgagaacgaccctgg

SEQ ID NO: 28241 - DNA, 19 bp, Artificial Sequence
  primer
gctgttgctgctactgccc

SEQ ID NO: 28242 - DNA, 21 bp, Artificial Sequence
  primer
ctgatgaaggaggcagtgttg

SEQ ID NO: 28243 - DNA, 38 bp, Artificial Sequence
  primer
gtaaaacgacggccagtttggcaaaggagagaacagtg

SEQ ID NO: 28244 - DNA, 37 bp, Artificial Sequence
  primer
gtaaaacgacggccagtctagcatcttcccgagcacc

SEQ ID NO: 28245 - DNA, 37 bp, Artificial Sequence
  primer
gtaaaacgacggccagtggagggaaagaaggaagagg

SEQ ID NO: 28246 - DNA, 38 bp, Artificial Sequence
  primer
gtaaaacgacggccagttggctaatttgaaaggaaggg

SEQ ID NO: 28247 - DNA, 21 bp, Artificial Sequence
  primer
ctcgagcagtctctggaacac

SEQ ID NO: 28248 - DNA, 23 bp, Artificial Sequence
  primer
cagacttactttaggcagagggc

SEQ ID NO: 28249 - DNA, 21 bp, Artificial Sequence
  primer
acctctctacgggattgttgc

SEQ ID NO: 28250 - DNA, 18 bp, Artificial Sequence
  primer
cactagctgggctcctcg

SEQ ID NO: 28251 - DNA, 38 bp, Artificial Sequence
  primer
gtaaaacgacggccagttgagaatcaccgacctcgttc

SEQ ID NO: 28252 - DNA, 39 bp, Artificial Sequence
  primer
gtaaaacgacggccagtaaacctgcaccaagactcaatc

SEQ ID NO: 28253 - DNA, 38 bp, Artificial Sequence
  primer
gtaaaacgacggccagttctgtttcagggagagtggtg

SEQ ID NO: 28254 - DNA, 19 bp, Artificial Sequence
  primer
aaagcctgagggaacctgg

SEQ ID NO: 28255 - DNA, 37 bp, Artificial Sequence
  primer
gtaaaacgacggccagtattagcacaggcctgccatc

SEQ ID NO: 28256 - DNA, 39 bp, Artificial Sequence
  primer
gtaaaacgacggccagttgtttctcaagccaagttcaaa

SEQ ID NO: 28257 - DNA, 21 bp, Artificial Sequence
  primer
caaaggacaaggtgaagtggg

SEQ ID NO: 28258 - DNA, 21 bp, Artificial Sequence
  primer
tttgcaccactgcattctagc

SEQ ID NO: 28259 - DNA, 19 bp, Artificial Sequence
  primer
ggcttctctgagggagcag

SEQ ID NO: 28260 - DNA, 21 bp, Artificial Sequence
  primer
tatgtgtgtttcaggcgtgtg

SEQ ID NO: 28261 - DNA, 38 bp, Artificial Sequence
  primer
gtaaaacgacggccagtctgataggctagtgcccaggt

SEQ ID NO: 28262 - DNA, 21 bp, Artificial Sequence
  primer
aatcccacagaaccctcttcc

SEQ ID NO: 28263 - DNA, 38 bp, Artificial Sequence
  primer
gtaaaacgacggccagtagaagatgagctccgagaagg

SEQ ID NO: 28264 - DNA, 21 bp, Artificial Sequence
  primer
atcctagaccaggtgaggcac

SEQ ID NO: 28265 - DNA, 21 bp, Artificial Sequence
  primer
ctgaggctttcacagaccaag

SEQ ID NO: 28266 - DNA, 38 bp, Artificial Sequence
  primer
gtaaaacgacggccagtagttgttaacggcggtattgg

SEQ ID NO: 28267 - DNA, 21 bp, Artificial Sequence
  primer
tgttggaactggaaagtctgc

SEQ ID NO: 28268 - DNA, 38 bp, Artificial Sequence
  primer
gtaaaacgacggccagtacgtgcacaattcatgcatac

SEQ ID NO: 28269 - DNA, 19 bp, Artificial Sequence
  primer
ctcacacacgcttgttggc

SEQ ID NO: 28270 - DNA, 18 bp, Artificial Sequence
  primer
ctgtggcctcctgctgag

SEQ ID NO: 28271 - DNA, 21 bp, Artificial Sequence
  primer
ggtccaaggactcttggtttc

SEQ ID NO: 28272 - DNA, 38 bp, Artificial Sequence
  primer
gtaaaacgacggccagtcgacttctttcccatctcaca

SEQ ID NO: 28273 - DNA, 37 bp, Artificial Sequence
  primer
gtaaaacgacggccagtcagtgagccaagactgcacc

SEQ ID NO: 28274 - DNA, 37 bp, Artificial Sequence
  primer
gtaaaacgacggccagtgtccagagcccaggtaatcc

SEQ ID NO: 28275 - DNA, 21 bp, Artificial Sequence
  primer
caggtttcgaaggatgcttta

SEQ ID NO: 28276 - DNA, 39 bp, Artificial Sequence
  primer
gtaaaacgacggccagtttcacattcccaagggtacttt

SEQ ID NO: 28277 - DNA, 38 bp, Artificial Sequence
  primer
gtaaaacgacggccagtagagatggaaatggaatgggt

SEQ ID NO: 28278 - DNA, 21 bp, Artificial Sequence
  primer
gtgctagccactcaggaaatg

SEQ ID NO: 28279 - DNA, 19 bp, Artificial Sequence
  primer
cctaaggactctccgcagc

SEQ ID NO: 28280 - DNA, 21 bp, Artificial Sequence
  primer
tgcaacaggtttcaaaggatg

SEQ ID NO: 28281 - DNA, 38 bp, Artificial Sequence
  primer
gtaaaacgacggccagttcactggtaaatatgggacgg

SEQ ID NO: 28282 - DNA, 38 bp, Artificial Sequence
  primer
gtaaaacgacggccagtggcatcggtagaagaatgatg

SEQ ID NO: 28283 - DNA, 39 bp, Artificial Sequence
  primer
gtaaaacgacggccagtcatccacattgaacaattagcg

SEQ ID NO: 28284 - DNA, 21 bp, Artificial Sequence
  primer
aatgaggaccctttcatcagg

SEQ ID NO: 28285 - DNA, 43 bp, Artificial Sequence
  primer
gtaaaacgacggccagttccattaacattgatgctctatttct

SEQ ID NO: 28286 - DNA, 25 bp, Artificial Sequence
  primer
actgtaatttaggtatcaaggctgc

SEQ ID NO: 28287 - DNA, 40 bp, Artificial Sequence
  primer
gtaaaacgacggccagtgaaataacgagagatggaaatgg

SEQ ID NO: 28288 - DNA, 38 bp, Artificial Sequence
  primer
gtaaaacgacggccagttttgggtatgcttatttcccg

SEQ ID NO: 28289 - DNA, 42 bp, Artificial Sequence
  primer
gtaaaacgacggccagtggaaagtcacttcattatccttgtg

SEQ ID NO: 28290 - DNA, 21 bp, Artificial Sequence
  primer
accctttcatcagggtttctg

SEQ ID NO: 28291 - DNA, 41 bp, Artificial Sequence
  primer
gtaaaacgacggccagtttctctattggaatttgcaaacaa

SEQ ID NO: 28292 - DNA, 39 bp, Artificial Sequence
  primer
gtaaaacgacggccagtgaagtaccaggaaatgcaaagg

SEQ ID NO: 28293 - DNA, 21 bp, Artificial Sequence
  primer
taagagtgctccctaatgccc

SEQ ID NO: 28294 - DNA, 37 bp, Artificial Sequence
  primer
gtaaaacgacggccagtatttgcctttgaaggaagcc

SEQ ID NO: 28295 - DNA, 40 bp, Artificial Sequence
  primer
gtaaaacgacggccagtaatcagagacacaggaatggttc

SEQ ID NO: 28296 - DNA, 20 bp, Artificial Sequence
  primer
tgccagtaaatgctgcttgg

SEQ ID NO: 28297 - DNA, 38 bp, Artificial Sequence
  primer
gtaaaacgacggccagtgcaatgtaggtaggagcgcag

SEQ ID NO: 28298 - DNA, 21 bp, Artificial Sequence
  primer
ggtgtctgccctgggatatag

SEQ ID NO: 28299 - DNA, 21 bp, Artificial Sequence
  primer
aaagcaagaccctgtctctgg

SEQ ID NO: 28300 - DNA, 38 bp, Artificial Sequence
  primer
gtaaaacgacggccagtctttggtgtcattgaacgcag

SEQ ID NO: 28301 - DNA, 38 bp, Artificial Sequence
  primer
gtaaaacgacggccagttcttaaatgaatggctgtcgg

SEQ ID NO: 28302 - DNA, 20 bp, Artificial Sequence
  primer
tgcatgagttcttgtgcagc

SEQ ID NO: 28303 - DNA, 35 bp, Artificial Sequence
  primer
gtaaaacgacggccagtggatccgcaaggtagggc

SEQ ID NO: 28304 - DNA, 21 bp, Artificial Sequence
  primer
gtagggccttatgtcactccc

SEQ ID NO: 28305 - DNA, 21 bp, Artificial Sequence
  primer
ctgccctgaactcttgattcc

SEQ ID NO: 28306 - DNA, 38 bp, Artificial Sequence
  primer
gtaaaacgacggccagtactagacctcccacctcctgc

SEQ ID NO: 28307 - DNA, 37 bp, Artificial Sequence
  primer
gtaaaacgacggccagtcctccaggactcctccactg

SEQ ID NO: 28308 - DNA, 38 bp, Artificial Sequence
  primer
gtaaaacgacggccagttgtacgacctgcagtaccagg

SEQ ID NO: 28309 - DNA, 35 bp, Artificial Sequence
  primer
gtaaaacgacggccagtacaagaacggacgcatcg

SEQ ID NO: 28310 - DNA, 21 bp, Artificial Sequence
  primer
agaggagaagaaggtggaggc

SEQ ID NO: 28311 - DNA, 18 bp, Artificial Sequence
  primer
tgcctctccgagacccac

SEQ ID NO: 28312 - DNA, 21 bp, Artificial Sequence
  primer
gactcagacctggatgaaccc

SEQ ID NO: 28313 - DNA, 39 bp, Artificial Sequence
  primer
gtaaaacgacggccagtcatggcaactcagtgttatccc

SEQ ID NO: 28314 - DNA, 22 bp, Artificial Sequence
  primer
cctctttgaaataaggcattgg

SEQ ID NO: 28315 - DNA, 38 bp, Artificial Sequence
  primer
gtaaaacgacggccagttttgttgagcctagaagcagg

SEQ ID NO: 28316 - DNA, 21 bp, Artificial Sequence
  primer
cttgaaaccaaggtgaggagg

SEQ ID NO: 28317 - DNA, 36 bp, Artificial Sequence
  primer
gtaaaacgacggccagtcgactttccctagcaaccg

SEQ ID NO: 28318 - DNA, 21 bp, Artificial Sequence
  primer
agtattatgggctgtgggtgc

SEQ ID NO: 28319 - DNA, 19 bp, Artificial Sequence
  primer
gatcaagtgagtgtcgcgg

SEQ ID NO: 28320 - DNA, 21 bp, Artificial Sequence
  primer
gaggagaacatcctggactcg

SEQ ID NO: 28321 - DNA, 21 bp, Artificial Sequence
  primer
agctaacagaggtggtgggtg

SEQ ID NO: 28322 - DNA, 38 bp, Artificial Sequence
  primer
gtaaaacgacggccagttgtgcatttctctgtcaagcc

SEQ ID NO: 28323 - DNA, 21 bp, Artificial Sequence
  primer
gaaccgcgttataggcaagag

SEQ ID NO: 28324 - DNA, 21 bp, Artificial Sequence
  primer
tacaccacagtcctctgaccc

SEQ ID NO: 28325 - DNA, 35 bp, Artificial Sequence
  primer
gtaaaacgacggccagtacgttgcgcaggttcaaa

SEQ ID NO: 28326 - DNA, 38 bp, Artificial Sequence
  primer
gtaaaacgacggccagtctcctttgggccttaactgtc

SEQ ID NO: 28327 - DNA, 35 bp, Artificial Sequence
  primer
gtaaaacgacggccagtacaggcatgcaccaccac

SEQ ID NO: 28328 - DNA, 21 bp, Artificial Sequence
  primer
cgtttgtcagatgggaagacc

SEQ ID NO: 28329 - DNA, 38 bp, Artificial Sequence
  primer
gtaaaacgacggccagtgggaaggagttgagtgggtag

SEQ ID NO: 28330 - DNA, 38 bp, Artificial Sequence
  primer
gtaaaacgacggccagtgacacagagaggaggagctgg

SEQ ID NO: 28331 - DNA, 19 bp, Artificial Sequence
  primer
tatggtctgtcgtgcgctg

SEQ ID NO: 28332 - DNA, 38 bp, Artificial Sequence
  primer
gtaaaacgacggccagttcgcatgcatttcttgtatcc

SEQ ID NO: 28333 - DNA, 21 bp, Artificial Sequence
  primer
agggatggtcgcagaagtaag

SEQ ID NO: 28334 - DNA, 21 bp, Artificial Sequence
  primer
tagagtggcttctttccagcc

SEQ ID NO: 28335 - DNA, 38 bp, Artificial Sequence
  primer
gtaaaacgacggccagtcccaggcatcatagggtaaag

SEQ ID NO: 28336 - DNA, 38 bp, Artificial Sequence
  primer
gtaaaacgacggccagtcttcgaaacatgggtttgtcc

SEQ ID NO: 28337 - DNA, 37 bp, Artificial Sequence
  primer
gtaaaacgacggccagtagagtggatgacaagcccag

SEQ ID NO: 28338 - DNA, 20 bp, Artificial Sequence
  primer
gtgataaagcacagggctgc

SEQ ID NO: 28339 - DNA, 38 bp, Artificial Sequence
  primer
gtaaaacgacggccagtaggagtgcaggactcaggaag

SEQ ID NO: 28340 - DNA, 38 bp, Artificial Sequence
  primer
gtaaaacgacggccagtagaccttgtttccttcctccc

SEQ ID NO: 28341 - DNA, 38 bp, Artificial Sequence
  primer
gtaaaacgacggccagtcgagaagtgggatcacctagc

SEQ ID NO: 28342 - DNA, 20 bp, Artificial Sequence
  primer
cttggaggctgatgatgacc

SEQ ID NO: 28343 - DNA, 38 bp, Artificial Sequence
  primer
gtaaaacgacggccagtgccgactgttactgcagaagg

SEQ ID NO: 28344 - DNA, 38 bp, Artificial Sequence
  primer
gtaaaacgacggccagttaaagtaagtgggcagagggc

SEQ ID NO: 28345 - DNA, 18 bp, Artificial Sequence
  primer
tgggcaacagagtgaggc

SEQ ID NO: 28346 - DNA, 38 bp, Artificial Sequence
  primer
gtaaaacgacggccagtgggagggagctagaagtcctc

SEQ ID NO: 28347 - DNA, 21 bp, Artificial Sequence
  primer
agttctccttgatgctgccac

SEQ ID NO: 28348 - DNA, 38 bp, Artificial Sequence
  primer
gtaaaacgacggccagtgtaggttctgggaccctctgg

SEQ ID NO: 28349 - DNA, 38 bp, Artificial Sequence
  primer
gtaaaacgacggccagtagccagactgtctacccatcc

SEQ ID NO: 28350 - DNA, 21 bp, Artificial Sequence
  primer
ggcccaagactctataggtgg

SEQ ID NO: 28351 - DNA, 21 bp, Artificial Sequence
  primer
accatcagaccctgatccttg

SEQ ID NO: 28352 - DNA, 38 bp, Artificial Sequence
  primer
gtaaaacgacggccagtgccacatccaccagaggtaag

SEQ ID NO: 28353 - DNA, 38 bp, Artificial Sequence
  primer
gtaaaacgacggccagtgaatgacatttctgcagagcc

SEQ ID NO: 28354 - DNA, 21 bp, Artificial Sequence
  primer
aactcaccaagctcatacggc

SEQ ID NO: 28355 - DNA, 38 bp, Artificial Sequence
  primer
gtaaaacgacggccagtaaccaccaagtaagtgccctg

SEQ ID NO: 28356 - DNA, 38 bp, Artificial Sequence
  primer
gtaaaacgacggccagtactcgaaagtgatccattgcc

SEQ ID NO: 28357 - DNA, 21 bp, Artificial Sequence
  primer
gatcttccctgacctcagcag

SEQ ID NO: 28358 - DNA, 21 bp, Artificial Sequence
  primer
tggatgtctttgttcggtttg

SEQ ID NO: 28359 - DNA, 37 bp, Artificial Sequence
  primer
gtaaaacgacggccagtatttcctgcctcctctctgg

SEQ ID NO: 28360 - DNA, 21 bp, Artificial Sequence
  primer
gttcgaagtggttcacaaggg

SEQ ID NO: 28361 - DNA, 38 bp, Artificial Sequence
  primer
gtaaaacgacggccagttcttgttctcccttgtcctgg

SEQ ID NO: 28362 - DNA, 37 bp, Artificial Sequence
  primer
gtaaaacgacggccagtagagaggtggctggtcattg

SEQ ID NO: 28363 - DNA, 21 bp, Artificial Sequence
  primer
tcctgacctcatgatccactc

SEQ ID NO: 28364 - DNA, 38 bp, Artificial Sequence
  primer
gtaaaacgacggccagtgtcccttatccttcctccacc

SEQ ID NO: 28365 - DNA, 36 bp, Artificial Sequence
  primer
gtaaaacgacggccagtgatgggcacagtccaggag

SEQ ID NO: 28366 - DNA, 38 bp, Artificial Sequence
  primer
gtaaaacgacggccagtcagctgcagttctacacggag

SEQ ID NO: 28367 - DNA, 21 bp, Artificial Sequence
  primer
cagctgcagttctacacggag

SEQ ID NO: 28368 - DNA, 38 bp, Artificial Sequence
  primer
gtaaaacgacggccagtttaccacgggtagcactgttg

SEQ ID NO: 28369 - DNA, 21 bp, Artificial Sequence
  primer
cacagactgaaggagccactg

SEQ ID NO: 28370 - DNA, 20 bp, Artificial Sequence
  primer
actctgctgtgggagggaag

SEQ ID NO: 28371 - DNA, 39 bp, Artificial Sequence
  primer
gtaaaacgacggccagtagggtcctttactctcaggtcc

SEQ ID NO: 28372 - DNA, 38 bp, Artificial Sequence
  primer
gtaaaacgacggccagtcagagctccatcttctagggc

SEQ ID NO: 28373 - DNA, 35 bp, Artificial Sequence
  primer
gtaaaacgacggccagttggcctgtcttggagcag

SEQ ID NO: 28374 - DNA, 21 bp, Artificial Sequence
  primer
taccattggtcacatcctccc

SEQ ID NO: 28375 - DNA, 38 bp, Artificial Sequence
  primer
gtaaaacgacggccagtagtgagattggcctaagtggg

SEQ ID NO: 28376 - DNA, 38 bp, Artificial Sequence
  primer
gtaaaacgacggccagtatgtatcttctcaggctgcgg

SEQ ID NO: 28377 - DNA, 38 bp, Artificial Sequence
  primer
gtaaaacgacggccagtccctcccacctacacctctac

SEQ ID NO: 28378 - DNA, 20 bp, Artificial Sequence
  primer
ccactgtgtgtcatgttggg

SEQ ID NO: 28379 - DNA, 21 bp, Artificial Sequence
  primer
agccagtgattcccacttctc

SEQ ID NO: 28380 - DNA, 38 bp, Artificial Sequence
  primer
gtaaaacgacggccagtaagagaagccacccatctcag

SEQ ID NO: 28381 - DNA, 21 bp, Artificial Sequence
  primer
aggagtcaccgagtccatctg

SEQ ID NO: 28382 - DNA, 38 bp, Artificial Sequence
  primer
gtaaaacgacggccagtgatagaatgggaggcgatgag

SEQ ID NO: 28383 - DNA, 21 bp, Artificial Sequence
  primer
tgtaggcagagaaacgtggtg

SEQ ID NO: 28384 - DNA, 36 bp, Artificial Sequence
  primer
gtaaaacgacggccagtaccacccggtaagtgcaag

SEQ ID NO: 28385 - DNA, 38 bp, Artificial Sequence
  primer
gtaaaacgacggccagtataccagctctgccttccctc

SEQ ID NO: 28386 - DNA, 36 bp, Artificial Sequence
  primer
gtaaaacgacggccagtactccaggaggctcttgcc

SEQ ID NO: 28387 - DNA, 38 bp, Artificial Sequence
  primer
gtaaaacgacggccagtccctaactcggtgaggttcag

SEQ ID NO: 28388 - DNA, 38 bp, Artificial Sequence
  primer
gtaaaacgacggccagtaaatgcaggtggagagattgg

SEQ ID NO: 28389 - DNA, 38 bp, Artificial Sequence
  primer
gtaaaacgacggccagtgatcttccacaaagggtgagg

SEQ ID NO: 28390 - DNA, 38 bp, Artificial Sequence
  primer
gtaaaacgacggccagtgccacaggacatcttagctcc

SEQ ID NO: 28391 - DNA, 24 bp, Artificial Sequence
  primer
ttgtgatatctgtagcttggttgg

SEQ ID NO: 28392 - DNA, 39 bp, Artificial Sequence
  primer
gtaaaacgacggccagtgggtgcgggtatctcttctatg

SEQ ID NO: 28393 - DNA, 21 bp, Artificial Sequence
  primer
atgccacaccagaacagaaag

SEQ ID NO: 28394 - DNA, 21 bp, Artificial Sequence
  primer
taccctgggcaacatagtgag

SEQ ID NO: 28395 - DNA, 41 bp, Artificial Sequence
  primer
gtaaaacgacggccagtctaagggatcttgatgaaataggc

SEQ ID NO: 28396 - DNA, 21 bp, Artificial Sequence
  primer
ctttccaggcttccatttctg

SEQ ID NO: 28397 - DNA, 24 bp, Artificial Sequence
  primer
gcacagagaattcaaacactacca

SEQ ID NO: 28398 - DNA, 20 bp, Artificial Sequence
  primer
agccggccagtacctattct

SEQ ID NO: 28399 - DNA, 23 bp, Artificial Sequence
  primer
tggaaacatagttaatgccactg

SEQ ID NO: 28400 - DNA, 27 bp, Artificial Sequence
  primer
tgtctctatgcaaatctatagctcatt

SEQ ID NO: 28401 - DNA, 21 bp, Artificial Sequence
  primer
actttgggaggctgaggtatc

SEQ ID NO: 28402 - DNA, 40 bp, Artificial Sequence
  primer
gtaaaacgacggccagtccttgactgacagataccagagg

SEQ ID NO: 28403 - DNA, 24 bp, Artificial Sequence
  primer
tgatgtgctacaagtgaactaggg

SEQ ID NO: 28404 - DNA, 39 bp, Artificial Sequence
  primer
gtaaaacgacggccagttgaaacatttgtgaccttgcac

SEQ ID NO: 28405 - DNA, 21 bp, Artificial Sequence
  primer
ctatttcaatatccgctgccc

SEQ ID NO: 28406 - DNA, 22 bp, Artificial Sequence
  primer
ccatgaagagtcatgggaattt

SEQ ID NO: 28407 - DNA, 42 bp, Artificial Sequence
  primer
gtaaaacgacggccagtttacataatcgttgtatgtggcaag

SEQ ID NO: 28408 - DNA, 35 bp, Artificial Sequence
  primer
gtaaaacgacggccagtagtggatcgcttgagccc

SEQ ID NO: 28409 - DNA, 37 bp, Artificial Sequence
  primer
gtaaaacgacggccagtacagtcatgtgccactgtgc

SEQ ID NO: 28410 - DNA, 38 bp, Artificial Sequence
  primer
gtaaaacgacggccagttgcacagtctccgtttctcac

SEQ ID NO: 28411 - DNA, 36 bp, Artificial Sequence
  primer
gtaaaacgacggccagtccagtttgggcgacaagag

SEQ ID NO: 28412 - DNA, 40 bp, Artificial Sequence
  primer
gtaaaacgacggccagttcattgcaggaagatatgctagg

SEQ ID NO: 28413 - DNA, 23 bp, Artificial Sequence
  primer
tgaaattgacagacattgccatt

SEQ ID NO: 28414 - DNA, 38 bp, Artificial Sequence
  primer
gtaaaacgacggccagttgaggtaaatgcttcgtcacc

SEQ ID NO: 28415 - DNA, 35 bp, Artificial Sequence
  primer
gtaaaacgacggccagtgtgcaggtggtgcaaacg

SEQ ID NO: 28416 - DNA, 21 bp, Artificial Sequence
  primer
gcttcctttctcctggagctg

SEQ ID NO: 28417 - DNA, 39 bp, Artificial Sequence
  primer
gtaaaacgacggccagttttcctgggcacaagttatttc

SEQ ID NO: 28418 - DNA, 37 bp, Artificial Sequence
  primer
gtaaaacgacggccagtccagaaagtcctttccaggc

SEQ ID NO: 28419 - DNA, 38 bp, Artificial Sequence
  primer
gtaaaacgacggccagtaaagcccaatgtcatctgttg

SEQ ID NO: 28420 - DNA, 37 bp, Artificial Sequence
  primer
gtaaaacgacggccagtcgatgctgtctctctgggtc

SEQ ID NO: 28421 - DNA, 20 bp, Artificial Sequence
  primer
aaaggctttgcagcttctcc

SEQ ID NO: 28422 - DNA, 38 bp, Artificial Sequence
  primer
gtaaaacgacggccagtgggtcctggactcttgttagc

SEQ ID NO: 28423 - DNA, 38 bp, Artificial Sequence
  primer
gtaaaacgacggccagtctgtcccacattaagcaaggc

SEQ ID NO: 28424 - DNA, 21 bp, Artificial Sequence
  primer
ttgtgcagggaagtggttatg

SEQ ID NO: 28425 - DNA, 37 bp, Artificial Sequence
  primer
gtaaaacgacggccagtagcaagcagcaggtcaagtc

SEQ ID NO: 28426 - DNA, 38 bp, Artificial Sequence
  primer
gtaaaacgacggccagtgttggagcataacaggcttgg

SEQ ID NO: 28427 - DNA, 38 bp, Artificial Sequence
  primer
gtaaaacgacggccagttttctaaacaggccgaagtcc

SEQ ID NO: 28428 - DNA, 38 bp, Artificial Sequence
  primer
gtaaaacgacggccagtctggaaggtgctagaattgcc

SEQ ID NO: 28429 - DNA, 21 bp, Artificial Sequence
  primer
gaatgtgctggtgactgttgg

SEQ ID NO: 28430 - DNA, 21 bp, Artificial Sequence
  primer
agccagttcctctaagctggg

SEQ ID NO: 28431 - DNA, 18 bp, Artificial Sequence
  primer
tgacctccagtgttccgc

SEQ ID NO: 28432 - DNA, 38 bp, Artificial Sequence
  primer
gtaaaacgacggccagttgtagaggaatccagggtgtc

SEQ ID NO: 28433 - DNA, 38 bp, Artificial Sequence
  primer
gtaaaacgacggccagttgctcttacttgctggactgc

SEQ ID NO: 28434 - DNA, 19 bp, Artificial Sequence
  primer
agcgggaacctccttcttc

SEQ ID NO: 28435 - DNA, 38 bp, Artificial Sequence
  primer
gtaaaacgacggccagttctgtttctggtgacactgcc

SEQ ID NO: 28436 - DNA, 21 bp, Artificial Sequence
  primer
tcccgtattggttgtgtcttg

SEQ ID NO: 28437 - DNA, 38 bp, Artificial Sequence
  primer
gtaaaacgacggccagtgtgcagtgagtagcggtcttg

SEQ ID NO: 28438 - DNA, 23 bp, Artificial Sequence
  primer
ttgcatattaggaataagagggc

SEQ ID NO: 28439 - DNA, 21 bp, Artificial Sequence
  primer
gggcagtttgttgcatttatc

SEQ ID NO: 28440 - DNA, 24 bp, Artificial Sequence
  primer
ttgctacaatagctcactgaaatg

SEQ ID NO: 28441 - DNA, 38 bp, Artificial Sequence
  primer
gtaaaacgacggccagttcctgtctcacttcacctccc

SEQ ID NO: 28442 - DNA, 38 bp, Artificial Sequence
  primer
gtaaaacgacggccagtgacaagtgaggaagctgggtc

SEQ ID NO: 28443 - DNA, 38 bp, Artificial Sequence
  primer
gtaaaacgacggccagtttcgagatctccattcccttc

SEQ ID NO: 28444 - DNA, 21 bp, Artificial Sequence
  primer
gactgcagcctctctcagtcc

SEQ ID NO: 28445 - DNA, 24 bp, Artificial Sequence
  primer
ccaaccagtcttattctgtggaag

SEQ ID NO: 28446 - DNA, 23 bp, Artificial Sequence
  primer
tttcttgcttcattgtgtgattg

SEQ ID NO: 28447 - DNA, 38 bp, Artificial Sequence
  primer
gtaaaacgacggccagtcccatctctgaagtcaaatgc

SEQ ID NO: 28448 - DNA, 23 bp, Artificial Sequence
  primer
ttctatatccctacccatttccc

SEQ ID NO: 28449 - DNA, 37 bp, Artificial Sequence
  primer
gtaaaacgacggccagtctctggtgcccagaaagatg

SEQ ID NO: 28450 - DNA, 38 bp, Artificial Sequence
  primer
gtaaaacgacggccagttttcttctccactcaccctga

SEQ ID NO: 28451 - DNA, 21 bp, Artificial Sequence
  primer
ttgattggctttcaggacctc

SEQ ID NO: 28452 - DNA, 38 bp, Artificial Sequence
  primer
gtaaaacgacggccagtcgtgtaccctgttggagtctg

SEQ ID NO: 28453 - DNA, 21 bp, Artificial Sequence
  primer
gtgcttctcctccttaccagg

SEQ ID NO: 28454 - DNA, 38 bp, Artificial Sequence
  primer
gtaaaacgacggccagtgtcttcacctctggctggttg

SEQ ID NO: 28455 - DNA, 21 bp, Artificial Sequence
  primer
ctctttctcccatttccctcc

SEQ ID NO: 28456 - DNA, 21 bp, Artificial Sequence
  primer
ggaatgatggtttatgctggg

SEQ ID NO: 28457 - DNA, 21 bp, Artificial Sequence
  primer
agagatgtggccaagaagctg

SEQ ID NO: 28458 - DNA, 38 bp, Artificial Sequence
  primer
gtaaaacgacggccagtagcagtaaactccaaggctgg

SEQ ID NO: 28459 - DNA, 38 bp, Artificial Sequence
  primer
gtaaaacgacggccagtatctgtccacctaggcagtgg

SEQ ID NO: 28460 - DNA, 21 bp, Artificial Sequence
  primer
ctggtgctgttagtggtggag

SEQ ID NO: 28461 - DNA, 37 bp, Artificial Sequence
  primer
gtaaaacgacggccagtgcaccagagtgctttccttg

SEQ ID NO: 28462 - DNA, 38 bp, Artificial Sequence
  primer
gtaaaacgacggccagtacttaccttccaccaccctcc

SEQ ID NO: 28463 - DNA, 38 bp, Artificial Sequence
  primer
gtaaaacgacggccagtaaatacgtagcagcatcaggg

SEQ ID NO: 28464 - DNA, 38 bp, Artificial Sequence
  primer
gtaaaacgacggccagtgccatctagagaggtggttcc

SEQ ID NO: 28465 - DNA, 21 bp, Artificial Sequence
  primer
cattgagtaggagccagggag

SEQ ID NO: 28466 - DNA, 21 bp, Artificial Sequence
  primer
atcccactgttaggttcctgc

SEQ ID NO: 28467 - DNA, 38 bp, Artificial Sequence
  primer
gtaaaacgacggccagtcatgcaagtagtgccttcacc

SEQ ID NO: 28468 - DNA, 21 bp, Artificial Sequence
  primer
aggctctggtgtctcctgttc

SEQ ID NO: 28469 - DNA, 38 bp, Artificial Sequence
  primer
gtaaaacgacggccagtcctttgctctggctgacattc

SEQ ID NO: 28470 - DNA, 21 bp, Artificial Sequence
  primer
atgtgcccatctctctaaggg

SEQ ID NO: 28471 - DNA, 37 bp, Artificial Sequence
  primer
gtaaaacgacggccagtatgtggaagagcaggcagtg

SEQ ID NO: 28472 - DNA, 20 bp, Artificial Sequence
  primer
ggaagcctgagcctgaagag

SEQ ID NO: 28473 - DNA, 42 bp, Artificial Sequence
  primer
gtaaaacgacggccagttttaccgtctccaagtgaagtaatc

SEQ ID NO: 28474 - DNA, 40 bp, Artificial Sequence
  primer
gtaaaacgacggccagttgtgatggattggactacttctg

SEQ ID NO: 28475 - DNA, 21 bp, Artificial Sequence
  primer
atgctccctctcattctggtg

SEQ ID NO: 28476 - DNA, 21 bp, Artificial Sequence
  primer
tggcaacagtcagtttgcatc

SEQ ID NO: 28477 - DNA, 21 bp, Artificial Sequence
  primer
cagctattccaacattgcagc

SEQ ID NO: 28478 - DNA, 21 bp, Artificial Sequence
  primer
accagcagcatgaaagagaaa

SEQ ID NO: 28479 - DNA, 41 bp, Artificial Sequence
  primer
gtaaaacgacggccagtttctgctgtcttagtgggtttatg

SEQ ID NO: 28480 - DNA, 23 bp, Artificial Sequence
  primer
gaaaggtatgacttctgccaatc

SEQ ID NO: 28481 - DNA, 38 bp, Artificial Sequence
  primer
gtaaaacgacggccagtgagccaggaattactgcagag

SEQ ID NO: 28482 - DNA, 38 bp, Artificial Sequence
  primer
gtaaaacgacggccagttagcatggcaaagcttctctc

SEQ ID NO: 28483 - DNA, 38 bp, Artificial Sequence
  primer
gtaaaacgacggccagtgcacctggaattatttctgcc

SEQ ID NO: 28484 - DNA, 39 bp, Artificial Sequence
  primer
gtaaaacgacggccagtcctgtggctcatgtgttaggag

SEQ ID NO: 28485 - DNA, 42 bp, Artificial Sequence
  primer
gtaaaacgacggccagtcaggattgtatccttatcctgactg

SEQ ID NO: 28486 - DNA, 21 bp, Artificial Sequence
  primer
ttctctgccagctaaagcctc

SEQ ID NO: 28487 - DNA, 39 bp, Artificial Sequence
  primer
gtaaaacgacggccagtttggaacacttagtgcatttgg

SEQ ID NO: 28488 - DNA, 23 bp, Artificial Sequence
  primer
tttatatgtgagcgctttgtttg

SEQ ID NO: 28489 - DNA, 21 bp, Artificial Sequence
  primer
agctacatggtgctgtgtgtg

SEQ ID NO: 28490 - DNA, 22 bp, Artificial Sequence
  primer
cagcaggctatccattctgaag

SEQ ID NO: 28491 - DNA, 41 bp, Artificial Sequence
  primer
gtaaaacgacggccagtttgttctgatggaagaggaagaac

SEQ ID NO: 28492 - DNA, 21 bp, Artificial Sequence
  primer
aaacccagggtgatttgacag

SEQ ID NO: 28493 - DNA, 21 bp, Artificial Sequence
  primer
agccttagtcgcgattctgag

SEQ ID NO: 28494 - DNA, 38 bp, Artificial Sequence
  primer
gtaaaacgacggccagtttgtgccctgtgtaacactcc

SEQ ID NO: 28495 - DNA, 21 bp, Artificial Sequence
  primer
tagagcgactcccagtaagcc

SEQ ID NO: 28496 - DNA, 38 bp, Artificial Sequence
  primer
gtaaaacgacggccagtgtactaatcctcccaaggccc

SEQ ID NO: 28497 - DNA, 38 bp, Artificial Sequence
  primer
gtaaaacgacggccagtcgtcaggtactgttgtctccg

SEQ ID NO: 28498 - DNA, 21 bp, Artificial Sequence
  primer
attgtgggaaatgtagtcccg

SEQ ID NO: 28499 - DNA, 22 bp, Artificial Sequence
  primer
ccaccatgaaagatttcacaac

SEQ ID NO: 28500 - DNA, 38 bp, Artificial Sequence
  primer
gtaaaacgacggccagttgcttagcagcatttcaggtt

SEQ ID NO: 28501 - DNA, 21 bp, Artificial Sequence
  primer
gtttcccaaagtgcaccactg

SEQ ID NO: 28502 - DNA, 21 bp, Artificial Sequence
  primer
aatgatttgggagccctattg

SEQ ID NO: 28503 - DNA, 41 bp, Artificial Sequence
  primer
gtaaaacgacggccagtttaacaagtgatgaatatgccttt

SEQ ID NO: 28504 - DNA, 44 bp, Artificial Sequence
  primer
gtaaaacgacggccagtgagaaatttgtttctctccaattattc

SEQ ID NO: 28505 - DNA, 38 bp, Artificial Sequence
  primer
gtaaaacgacggccagtgctactgcccaggaacttcac

SEQ ID NO: 28506 - DNA, 21 bp, Artificial Sequence
  primer
ctggcatgcagaaagtaggta

SEQ ID NO: 28507 - DNA, 28 bp, Artificial Sequence
  primer
tgatttatgtgactcaggtttatttctt

SEQ ID NO: 28508 - DNA, 42 bp, Artificial Sequence
  primer
gtaaaacgacggccagttttcatatcctgcctaaagagttga

SEQ ID NO: 28509 - DNA, 38 bp, Artificial Sequence
  primer
gtaaaacgacggccagttgaaagaggagcaggtgtttg

SEQ ID NO: 28510 - DNA, 37 bp, Artificial Sequence
  primer
gtaaaacgacggccagttcctggattcaagcgatctg

SEQ ID NO: 28511 - DNA, 40 bp, Artificial Sequence
  primer
gtaaaacgacggccagtgagagaagctgaagacaatttgg

SEQ ID NO: 28512 - DNA, 38 bp, Artificial Sequence
  primer
gtaaaacgacggccagtgactcttgacggaaagcaaag

SEQ ID NO: 28513 - DNA, 42 bp, Artificial Sequence
  primer
gtaaaacgacggccagttgaagcagtcaggtaacattaggag

SEQ ID NO: 28514 - DNA, 21 bp, Artificial Sequence
  primer
acatgaatgcaattgtcccac

SEQ ID NO: 28515 - DNA, 39 bp, Artificial Sequence
  primer
gtaaaacgacggccagttgtggccacttccctaaatagt

SEQ ID NO: 28516 - DNA, 24 bp, Artificial Sequence
  primer
tgcaaagctaaagttaaatgtggt

SEQ ID NO: 28517 - DNA, 23 bp, Artificial Sequence
  primer
aatgtgagaatttgagatggtgg

SEQ ID NO: 28518 - DNA, 38 bp, Artificial Sequence
  primer
gtaaaacgacggccagtaatcttggagtcctgggagtg

SEQ ID NO: 28519 - DNA, 44 bp, Artificial Sequence
  primer
gtaaaacgacggccagtaaacaattacaaagcctattctaagca

SEQ ID NO: 28520 - DNA, 39 bp, Artificial Sequence
  primer
gtaaaacgacggccagtttatttccaggatacgattgcc

SEQ ID NO: 28521 - DNA, 39 bp, Artificial Sequence
  primer
gtaaaacgacggccagtggatttagttggaaggtggaaa

SEQ ID NO: 28522 - DNA, 26 bp, Artificial Sequence
  primer
atagaaagcattggttagtgaacatc

SEQ ID NO: 28523 - DNA, 22 bp, Artificial Sequence
  primer
cattagactgttgtcgaatcca

SEQ ID NO: 28524 - DNA, 35 bp, Artificial Sequence
  primer
gtaaaacgacggccagtgtgatccatgcacctcgg

SEQ ID NO: 28525 - DNA, 37 bp, Artificial Sequence
  primer
gtaaaacgacggccagtggttcctaagccaccagcac

SEQ ID NO: 28526 - DNA, 38 bp, Artificial Sequence
  primer
gtaaaacgacggccagtatgggctggtgaattgttgac

SEQ ID NO: 28527 - DNA, 38 bp, Artificial Sequence
  primer
gtaaaacgacggccagtcatcacgctgctctatccttg

SEQ ID NO: 28528 - DNA, 38 bp, Artificial Sequence
  primer
gtaaaacgacggccagtgcagagaagcctgaagtgtgg

SEQ ID NO: 28529 - DNA, 38 bp, Artificial Sequence
  primer
gtaaaacgacggccagttactgggtcacctgtggtagc

SEQ ID NO: 28530 - DNA, 39 bp, Artificial Sequence
  primer
gtaaaacgacggccagtggaggccagtaaatctttgagc

SEQ ID NO: 28531 - DNA, 21 bp, Artificial Sequence
  primer
ggttgtttaggtggaggttgg

SEQ ID NO: 28532 - DNA, 21 bp, Artificial Sequence
  primer
atctctctatccctggatgcc

SEQ ID NO: 28533 - DNA, 20 bp, Artificial Sequence
  primer
agtggtcctcctgcctcaac

SEQ ID NO: 28534 - DNA, 21 bp, Artificial Sequence
  primer
tgccagagaaattcatgatgc

SEQ ID NO: 28535 - DNA, 21 bp, Artificial Sequence
  primer
tgtctactgaaggagcccacc

SEQ ID NO: 28536 - DNA, 37 bp, Artificial Sequence
  primer
gtaaaacgacggccagtgattgtgagagcagggttgg

SEQ ID NO: 28537 - DNA, 38 bp, Artificial Sequence
  primer
gtaaaacgacggccagtggatgcagaaagtgaatttgc

SEQ ID NO: 28538 - DNA, 38 bp, Artificial Sequence
  primer
gtaaaacgacggccagtagactctggaatgatgcagcc

SEQ ID NO: 28539 - DNA, 20 bp, Artificial Sequence
  primer
gagaccatcgtgtacgccag

SEQ ID NO: 28540 - DNA, 38 bp, Artificial Sequence
  primer
gtaaaacgacggccagttgcagttgtctgtgactctgg

SEQ ID NO: 28541 - DNA, 38 bp, Artificial Sequence
  primer
gtaaaacgacggccagtaatgtcaccgtcaaggacatc

SEQ ID NO: 28542 - DNA, 38 bp, Artificial Sequence
  primer
gtaaaacgacggccagtgaaccttgcatgatttcagcc

SEQ ID NO: 28543 - DNA, 37 bp, Artificial Sequence
  primer
gtaaaacgacggccagtagacttagggccatggcttg

SEQ ID NO: 28544 - DNA, 38 bp, Artificial Sequence
  primer
gtaaaacgacggccagtgaaacagagaatccagtcccg

SEQ ID NO: 28545 - DNA, 20 bp, Artificial Sequence
  primer
atggaagcacggaagaaagg

SEQ ID NO: 28546 - DNA, 37 bp, Artificial Sequence
  primer
gtaaaacgacggccagtctgctgaagcagtaccaggg

SEQ ID NO: 28547 - DNA, 20 bp, Artificial Sequence
  primer
ctggagcagatcaggacagg

SEQ ID NO: 28548 - DNA, 38 bp, Artificial Sequence
  primer
gtaaaacgacggccagtctccacctggaccctacacag

SEQ ID NO: 28549 - DNA, 37 bp, Artificial Sequence
  primer
gtaaaacgacggccagtaggcctgactggtttcttcc

SEQ ID NO: 28550 - DNA, 21 bp, Artificial Sequence
  primer
cagagctttgctttctgcctg

SEQ ID NO: 28551 - DNA, 21 bp, Artificial Sequence
  primer
tggatgggaatatagctgctg

SEQ ID NO: 28552 - DNA, 24 bp, Artificial Sequence
  primer
tgaaatggacagctgtgaactatg

SEQ ID NO: 28553 - DNA, 23 bp, Artificial Sequence
  primer
tttgcacttaaatgtgactctgc

SEQ ID NO: 28554 - DNA, 22 bp, Artificial Sequence
  primer
ggcactaaggtttctcagggtc

SEQ ID NO: 28555 - DNA, 44 bp, Artificial Sequence
  primer
gtaaaacgacggccagtaagcattctcagggtaagtacagatac

SEQ ID NO: 28556 - DNA, 38 bp, Artificial Sequence
  primer
gtaaaacgacggccagtctgctgtggttctgtggtttg

SEQ ID NO: 28557 - DNA, 22 bp, Artificial Sequence
  primer
ttcagctaagacaagaggccag

SEQ ID NO: 28558 - DNA, 21 bp, Artificial Sequence
  primer
ttgatctcagtgcctccagtg

SEQ ID NO: 28559 - DNA, 38 bp, Artificial Sequence
  primer
gtaaaacgacggccagtaaaggacaaggtggtgcagac

SEQ ID NO: 28560 - DNA, 21 bp, Artificial Sequence
  primer
aaacaaatcccaatccagacc

SEQ ID NO: 28561 - DNA, 20 bp, Artificial Sequence
  primer
aagttctacgccttgcgagc

SEQ ID NO: 28562 - DNA, 18 bp, Artificial Sequence
  primer
tccatcagcagcagcgag

SEQ ID NO: 28563 - DNA, 21 bp, Artificial Sequence
  primer
cagtcgcagaacaacaggaag

SEQ ID NO: 28564 - DNA, 21 bp, Artificial Sequence
  primer
cgtaaagcaggaaggctcaag

SEQ ID NO: 28565 - DNA, 21 bp, Artificial Sequence
  primer
ctcgtcagccagtgaatatgg

SEQ ID NO: 28566 - DNA, 21 bp, Artificial Sequence
  primer
tccagtatgggtgccagtaag

SEQ ID NO: 28567 - DNA, 39 bp, Artificial Sequence
  primer
gtaaaacgacggccagtttgaaatggagatcacttctgc

SEQ ID NO: 28568 - DNA, 24 bp, Artificial Sequence
  primer
ggagagaggctttgaaatatggag

SEQ ID NO: 28569 - DNA, 43 bp, Artificial Sequence
  primer
gtaaaacgacggccagtggatacttgttatgaagacctttcca

SEQ ID NO: 28570 - DNA, 38 bp, Artificial Sequence
  primer
gtaaaacgacggccagttgtttcagcacctgagctttg

SEQ ID NO: 28571 - DNA, 38 bp, Artificial Sequence
  primer
gtaaaacgacggccagttctttcgtttgaattctgcca

SEQ ID NO: 28572 - DNA, 46 bp, Artificial Sequence
  primer
gtaaaacgacggccagtttagactctactttactaccagagcgttt

SEQ ID NO: 28573 - DNA, 21 bp, Artificial Sequence
  primer
ccagcttatgaatgcttgctg

SEQ ID NO: 28574 - DNA, 39 bp, Artificial Sequence
  primer
gtaaaacgacggccagtcgtaaagtacaagctgccaaag

SEQ ID NO: 28575 - DNA, 38 bp, Artificial Sequence
  primer
gtaaaacgacggccagttctggtgtcaaacaggcattc

SEQ ID NO: 28576 - DNA, 39 bp, Artificial Sequence
  primer
gtaaaacgacggccagtggcctgcagttggataattaag

SEQ ID NO: 28577 - DNA, 43 bp, Artificial Sequence
  primer
gtaaaacgacggccagtgagccatgtctactaacctttgtttc

SEQ ID NO: 28578 - DNA, 36 bp, Artificial Sequence
  primer
gtaaaacgacggccagtctgggcttcctcttcaggc

SEQ ID NO: 28579 - DNA, 21 bp, Artificial Sequence
  primer
atttcacagcatggagagctg

SEQ ID NO: 28580 - DNA, 21 bp, Artificial Sequence
  primer
gaactgccaggctctaaggag

SEQ ID NO: 28581 - DNA, 38 bp, Artificial Sequence
  primer
gtaaaacgacggccagttaatgtgctccctccattcag

SEQ ID NO: 28582 - DNA, 39 bp, Artificial Sequence
  primer
gtaaaacgacggccagtcagcaggtggagagaggataag

SEQ ID NO: 28583 - DNA, 37 bp, Artificial Sequence
  primer
gtaaaacgacggccagtcttctttcacgcctccttcc

SEQ ID NO: 28584 - DNA, 23 bp, Artificial Sequence
  primer
tcttctgcaaagttcagtgtctg

SEQ ID NO: 28585 - DNA, 21 bp, Artificial Sequence
  primer
tttgggcagagcctttatagc

SEQ ID NO: 28586 - DNA, 23 bp, Artificial Sequence
  primer
gctgtaagttggtatgtatcgcc

SEQ ID NO: 28587 - DNA, 23 bp, Artificial Sequence
  primer
tggttctttctgattgcactttc

SEQ ID NO: 28588 - DNA, 38 bp, Artificial Sequence
  primer
gtaaaacgacggccagtcagcaagacatgctaagcagc

SEQ ID NO: 28589 - DNA, 21 bp, Artificial Sequence
  primer
cgacaagagggaaatgctgtc

SEQ ID NO: 28590 - DNA, 38 bp, Artificial Sequence
  primer
gtaaaacgacggccagtgtgctgaggctatatccctgg

SEQ ID NO: 28591 - DNA, 21 bp, Artificial Sequence
  primer
cagttcctcccttcctcactc

SEQ ID NO: 28592 - DNA, 40 bp, Artificial Sequence
  primer
gtaaaacgacggccagtccaaatttagctgtgaagaccag

SEQ ID NO: 28593 - DNA, 38 bp, Artificial Sequence
  primer
gtaaaacgacggccagtgggtgacagagtgagatcctg

SEQ ID NO: 28594 - DNA, 21 bp, Artificial Sequence
  primer
agtcctttgtgcataggaggc

SEQ ID NO: 28595 - DNA, 21 bp, Artificial Sequence
  primer
aggcaccattggaattgaaac

SEQ ID NO: 28596 - DNA, 20 bp, Artificial Sequence
  primer
aattccaagggatgccagag

SEQ ID NO: 28597 - DNA, 39 bp, Artificial Sequence
  primer
gtaaaacgacggccagttttgatctaccagggatgttgg

SEQ ID NO: 28598 - DNA, 38 bp, Artificial Sequence
  primer
gtaaaacgacggccagtgtttctggcccaacactaagc

SEQ ID NO: 28599 - DNA, 21 bp, Artificial Sequence
  primer
aggtgataaagctgccaaagg

SEQ ID NO: 28600 - DNA, 21 bp, Artificial Sequence
  primer
cctgggtgacagagcaataac

SEQ ID NO: 28601 - DNA, 21 bp, Artificial Sequence
  primer
gcttagtcctgaccacttgcc

SEQ ID NO: 28602 - DNA, 21 bp, Artificial Sequence
  primer
ttagctggaagatggagaggg

SEQ ID NO: 28603 - DNA, 38 bp, Artificial Sequence
  primer
gtaaaacgacggccagttgttagaagttctgcctgccc

SEQ ID NO: 28604 - DNA, 38 bp, Artificial Sequence
  primer
gtaaaacgacggccagtggtgataggcatgtggaagag

SEQ ID NO: 28605 - DNA, 21 bp, Artificial Sequence
  primer
ttggttcagcagttgttcacc

SEQ ID NO: 28606 - DNA, 38 bp, Artificial Sequence
  primer
gtaaaacgacggccagtgcctgaatgctttggaacaag

SEQ ID NO: 28607 - DNA, 21 bp, Artificial Sequence
  primer
ttctgaccgcgtgtaacaaac

SEQ ID NO: 28608 - DNA, 21 bp, Artificial Sequence
  primer
caataaggatgggatgtgacc

SEQ ID NO: 28609 - DNA, 21 bp, Artificial Sequence
  primer
taattccatcaaacgcccttc

SEQ ID NO: 28610 - DNA, 24 bp, Artificial Sequence
  primer
tgggagttgcattaaatctacagg

SEQ ID NO: 28611 - DNA, 43 bp, Artificial Sequence
  primer
gtaaaacgacggccagtaaagcaggtgctattataggtctttg

SEQ ID NO: 28612 - DNA, 41 bp, Artificial Sequence
  primer
gtaaaacgacggccagtttcaaacttgaaacttgatggaaa

SEQ ID NO: 28613 - DNA, 40 bp, Artificial Sequence
  primer
gtaaaacgacggccagttccaagggaaagaaatggtaatc

SEQ ID NO: 28614 - DNA, 38 bp, Artificial Sequence
  primer
gtaaaacgacggccagtccgtcccacttctttctcttc

SEQ ID NO: 28615 - DNA, 37 bp, Artificial Sequence
  primer
gtaaaacgacggccagtggcatgcaagggagtttatg

SEQ ID NO: 28616 - DNA, 41 bp, Artificial Sequence
  primer
gtaaaacgacggccagtctctggtatgtgagaaatccattg

SEQ ID NO: 28617 - DNA, 41 bp, Artificial Sequence
  primer
gtaaaacgacggccagttctgtgactacaaggtaaaggtgg

SEQ ID NO: 28618 - DNA, 22 bp, Artificial Sequence
  primer
cagcagacagtaaagctgtgga

SEQ ID NO: 28619 - DNA, 39 bp, Artificial Sequence
  primer
gtaaaacgacggccagtaaggctgtctgtggtggtagaa

SEQ ID NO: 28620 - DNA, 24 bp, Artificial Sequence
  primer
tttaccttgaatgtttactggtgg

SEQ ID NO: 28621 - DNA, 40 bp, Artificial Sequence
  primer
gtaaaacgacggccagtcgtgttcctcaagcttcttacag

SEQ ID NO: 28622 - DNA, 24 bp, Artificial Sequence
  primer
tggaaatgtatttggatttagctg

SEQ ID NO: 28623 - DNA, 39 bp, Artificial Sequence
  primer
gtaaaacgacggccagtaattctgattggactttcaggg

SEQ ID NO: 28624 - DNA, 40 bp, Artificial Sequence
  primer
gtaaaacgacggccagtactccaatttctacctgtagggc

SEQ ID NO: 28625 - DNA, 41 bp, Artificial Sequence
  primer
gtaaaacgacggccagtggatttgtgatcactgtttcattg

SEQ ID NO: 28626 - DNA, 45 bp, Artificial Sequence
  primer
gtaaaacgacggccagttttattgtcaaatttctaaagggaagtt

SEQ ID NO: 28627 - DNA, 40 bp, Artificial Sequence
  primer
gtaaaacgacggccagttgtcatttaaacaaatggacaaa

SEQ ID NO: 28628 - DNA, 39 bp, Artificial Sequence
  primer
gtaaaacgacggccagttgagagtatttcgagggtgagg

SEQ ID NO: 28629 - DNA, 40 bp, Artificial Sequence
  primer
gtaaaacgacggccagtggaaggatggagtgcaatctaag

SEQ ID NO: 28630 - DNA, 21 bp, Artificial Sequence
  primer
agtaacgccaacgtcacaaag

SEQ ID NO: 28631 - DNA, 39 bp, Artificial Sequence
  primer
gtaaaacgacggccagttgaggcagggctagttataccc

SEQ ID NO: 28632 - DNA, 38 bp, Artificial Sequence
  primer
gtaaaacgacggccagttctctctcccttgtgtccagg

SEQ ID NO: 28633 - DNA, 38 bp, Artificial Sequence
  primer
gtaaaacgacggccagttaacatgggccagtttgtctg

SEQ ID NO: 28634 - DNA, 20 bp, Artificial Sequence
  primer
atgatctgctccactcagcc

SEQ ID NO: 28635 - DNA, 21 bp, Artificial Sequence
  primer
aaaggtcacattggaggcaag

SEQ ID NO: 28636 - DNA, 20 bp, Artificial Sequence
  primer
gattacaggcgtgagccact

SEQ ID NO: 28637 - DNA, 21 bp, Artificial Sequence
  primer
tgcattgtttgagggattcag

SEQ ID NO: 28638 - DNA, 21 bp, Artificial Sequence
  primer
agcagtgaactggagagcttg

SEQ ID NO: 28639 - DNA, 38 bp, Artificial Sequence
  primer
gtaaaacgacggccagttggctaacaacccatttcttc

SEQ ID NO: 28640 - DNA, 38 bp, Artificial Sequence
  primer
gtaaaacgacggccagtaaccacaactcccagaaatcc

SEQ ID NO: 28641 - DNA, 40 bp, Artificial Sequence
  primer
gtaaaacgacggccagtccctaaagacaagtgaggttgtg

SEQ ID NO: 28642 - DNA, 23 bp, Artificial Sequence
  primer
ccttaggtgggtggattatatgc

SEQ ID NO: 28643 - DNA, 21 bp, Artificial Sequence
  primer
gaatgaagaagggcattccag

SEQ ID NO: 28644 - DNA, 37 bp, Artificial Sequence
  primer
gtaaaacgacggccagtacccagagtgcaacatggag

SEQ ID NO: 28645 - DNA, 18 bp, Artificial Sequence
  primer
atgacatgaacccgggag

SEQ ID NO: 28646 - DNA, 39 bp, Artificial Sequence
  primer
gtaaaacgacggccagttgttgtttccatttggagtgag

SEQ ID NO: 28647 - DNA, 38 bp, Artificial Sequence
  primer
gtaaaacgacggccagttacattgggtatccctctggg

SEQ ID NO: 28648 - DNA, 23 bp, Artificial Sequence
  primer
tttcccttcccttcacatatttc

SEQ ID NO: 28649 - DNA, 35 bp, Artificial Sequence
  primer
gtaaaacgacggccagtgctgctttggtcaccagc

SEQ ID NO: 28650 - DNA, 20 bp, Artificial Sequence
  primer
tttgtgacaccctgtgcttg

SEQ ID NO: 28651 - DNA, 39 bp, Artificial Sequence
  primer
gtaaaacgacggccagtggatgcaaagctgttgttatgg

SEQ ID NO: 28652 - DNA, 21 bp, Artificial Sequence
  primer
gtaaatgtgaccgtgtcagcc

SEQ ID NO: 28653 - DNA, 38 bp, Artificial Sequence
  primer
gtaaaacgacggccagtcacatacaaacttggcagtgg

SEQ ID NO: 28654 - DNA, 22 bp, Artificial Sequence
  primer
tctacattgccacttccattcc

SEQ ID NO: 28655 - DNA, 38 bp, Artificial Sequence
  primer
gtaaaacgacggccagtggctggtgaaagcataccaac

SEQ ID NO: 28656 - DNA, 36 bp, Artificial Sequence
  primer
gtaaaacgacggccagttgagagccgctcaagtagc

SEQ ID NO: 28657 - DNA, 21 bp, Artificial Sequence
  primer
catgtaagcccaaagcctacc

SEQ ID NO: 28658 - DNA, 37 bp, Artificial Sequence
  primer
gtaaaacgacggccagtccatgcaactgtccaggaac

SEQ ID NO: 28659 - DNA, 22 bp, Artificial Sequence
  primer
cactgttcccgatttaacgaag

SEQ ID NO: 28660 - DNA, 38 bp, Artificial Sequence
  primer
gtaaaacgacggccagtacgttaaactggagcccagac

SEQ ID NO: 28661 - DNA, 38 bp, Artificial Sequence
  primer
gtaaaacgacggccagtgaaaggaaacggtccactcag

SEQ ID NO: 28662 - DNA, 21 bp, Artificial Sequence
  primer
ccaggactcctccattctcag

SEQ ID NO: 28663 - DNA, 38 bp, Artificial Sequence
  primer
gtaaaacgacggccagtagttgagacgtgattaccggg

SEQ ID NO: 28664 - DNA, 38 bp, Artificial Sequence
  primer
gtaaaacgacggccagtgcaaagtgcctcgtgattatg

SEQ ID NO: 28665 - DNA, 21 bp, Artificial Sequence
  primer
caggagaatcacttgaaccca

SEQ ID NO: 28666 - DNA, 38 bp, Artificial Sequence
  primer
gtaaaacgacggccagtcaaagaccaggctctcagtcc

SEQ ID NO: 28667 - DNA, 44 bp, Artificial Sequence
  primer
gtaaaacgacggccagtcaatttactgccttagaattatggaaa

SEQ ID NO: 28668 - DNA, 39 bp, Artificial Sequence
  primer
gtaaaacgacggccagttgaggcatctgaaggtcttgtt

SEQ ID NO: 28669 - DNA, 21 bp, Artificial Sequence
  primer
gaagcacgctgtggtgtagag

SEQ ID NO: 28670 - DNA, 20 bp, Artificial Sequence
  primer
gacagcagggtgacaggttc

SEQ ID NO: 28671 - DNA, 21 bp, Artificial Sequence
  primer
tggttgcatgtatttggcttg

SEQ ID NO: 28672 - DNA, 22 bp, Artificial Sequence
  primer
tggtttcagtcgtcagaaattg

SEQ ID NO: 28673 - DNA, 23 bp, Artificial Sequence
  primer
tccaaactctgccattaacagac

SEQ ID NO: 28674 - DNA, 38 bp, Artificial Sequence
  primer
gtaaaacgacggccagtaatggatgtcaaggccttctg

SEQ ID NO: 28675 - DNA, 37 bp, Artificial Sequence
  primer
gtaaaacgacggccagtaagcgccctctctttctctc

SEQ ID NO: 28676 - DNA, 21 bp, Artificial Sequence
  primer
ttcttgggtgtgttggttcac

SEQ ID NO: 28677 - DNA, 21 bp, Artificial Sequence
  primer
acaaattgcatttccattccc

SEQ ID NO: 28678 - DNA, 38 bp, Artificial Sequence
  primer
gtaaaacgacggccagtggccacatgtttgcagtattc

SEQ ID NO: 28679 - DNA, 38 bp, Artificial Sequence
  primer
gtaaaacgacggccagtaagcaaccctgtgaattctgg

SEQ ID NO: 28680 - DNA, 22 bp, Artificial Sequence
  primer
aacaattccctctgtctatggc

SEQ ID NO: 28681 - DNA, 20 bp, Artificial Sequence
  primer
aaacagcagagcggtgtgac

SEQ ID NO: 28682 - DNA, 38 bp, Artificial Sequence
  primer
gtaaaacgacggccagtcgtgtgagtttatttctgggc

SEQ ID NO: 28683 - DNA, 22 bp, Artificial Sequence
  primer
ggatgaagaaagaaatccctgg

SEQ ID NO: 28684 - DNA, 20 bp, Artificial Sequence
  primer
accacctactccgccactac

SEQ ID NO: 28685 - DNA, 38 bp, Artificial Sequence
  primer
gtaaaacgacggccagtgaactggcgttagaggaggag

SEQ ID NO: 28686 - DNA, 21 bp, Artificial Sequence
  primer
ttcggcaacttgtcctatgtg

SEQ ID NO: 28687 - DNA, 37 bp, Artificial Sequence
  primer
gtaaaacgacggccagttgggaaaccagcatctcatc

SEQ ID NO: 28688 - DNA, 38 bp, Artificial Sequence
  primer
gtaaaacgacggccagtccgtgacattgggcagaatac

SEQ ID NO: 28689 - DNA, 21 bp, Artificial Sequence
  primer
agcatgatcaggttgagggtc

SEQ ID NO: 28690 - DNA, 41 bp, Artificial Sequence
  primer
gtaaaacgacggccagtttcttctagaactggtgtcttggg

SEQ ID NO: 28691 - DNA, 21 bp, Artificial Sequence
  primer
acatcattcctccactctccc

SEQ ID NO: 28692 - DNA, 38 bp, Artificial Sequence
  primer
gtaaaacgacggccagtcttggcctagccaaacaagtc

SEQ ID NO: 28693 - DNA, 36 bp, Artificial Sequence
  primer
gtaaaacgacggccagtactgaatggcaccagaggg

SEQ ID NO: 28694 - DNA, 45 bp, Artificial Sequence
  primer
gtaaaacgacggccagtcatccactaaggatttatgtaaacaatg

SEQ ID NO: 28695 - DNA, 40 bp, Artificial Sequence
  primer
gtaaaacgacggccagtaatggctacctcaaggattgttt

SEQ ID NO: 28696 - DNA, 21 bp, Artificial Sequence
  primer
aatggtttcatctgtcccagc

SEQ ID NO: 28697 - DNA, 42 bp, Artificial Sequence
  primer
gtaaaacgacggccagtttggtatctgcattaagaaggtcag

SEQ ID NO: 28698 - DNA, 42 bp, Artificial Sequence
  primer
gtaaaacgacggccagttgcctcagtggattaaatctgtatg

SEQ ID NO: 28699 - DNA, 27 bp, Artificial Sequence
  primer
gaaatcatctttggttgtcatttagaa

SEQ ID NO: 28700 - DNA, 21 bp, Artificial Sequence
  primer
ggatgtggttatggcaaacag

SEQ ID NO: 28701 - DNA, 38 bp, Artificial Sequence
  primer
gtaaaacgacggccagtctgtggaagaggtgagcactg

SEQ ID NO: 28702 - DNA, 37 bp, Artificial Sequence
  primer
gtaaaacgacggccagtgcaggaactttgccttgttg

SEQ ID NO: 28703 - DNA, 43 bp, Artificial Sequence
  primer
gtaaaacgacggccagtcagtaactgataggaatgtgggtact

SEQ ID NO: 28704 - DNA, 38 bp, Artificial Sequence
  primer
gtaaaacgacggccagtgtggttgggagtatgtggttg

SEQ ID NO: 28705 - DNA, 22 bp, Artificial Sequence
  primer
tgtggatcattaatggagaggg

SEQ ID NO: 28706 - DNA, 21 bp, Artificial Sequence
  primer
ggagattaggaactcccaagg

SEQ ID NO: 28707 - DNA, 21 bp, Artificial Sequence
  primer
tgaagcaggagagttgcagtg

SEQ ID NO: 28708 - DNA, 23 bp, Artificial Sequence
  primer
aaattgaagacccatgtaaaccc

SEQ ID NO: 28709 - DNA, 23 bp, Artificial Sequence
  primer
gggagaagggatgacttcattta

SEQ ID NO: 28710 - DNA, 22 bp, Artificial Sequence
  primer
cacagagctagactccgtctca

SEQ ID NO: 28711 - DNA, 25 bp, Artificial Sequence
  primer
tcaggaaataatgttcaagctatgc

SEQ ID NO: 28712 - DNA, 40 bp, Artificial Sequence
  primer
gtaaaacgacggccagttttactcttggtttggtacagcc

SEQ ID NO: 28713 - DNA, 41 bp, Artificial Sequence
  primer
gtaaaacgacggccagtcgagtttacatgaaagctgaattg

SEQ ID NO: 28714 - DNA, 19 bp, Artificial Sequence
  primer
ctgcagtgagccgagattg

SEQ ID NO: 28715 - DNA, 41 bp, Artificial Sequence
  primer
gtaaaacgacggccagttgaattacaaagacccaactttca

SEQ ID NO: 28716 - DNA, 22 bp, Artificial Sequence
  primer
tgagacagaacaagcaaaggac

SEQ ID NO: 28717 - DNA, 38 bp, Artificial Sequence
  primer
gtaaaacgacggccagtctatctccgcagcctgtaatg

SEQ ID NO: 28718 - DNA, 37 bp, Artificial Sequence
  primer
gtaaaacgacggccagtgtgggccctgacaaagtttc

SEQ ID NO: 28719 - DNA, 24 bp, Artificial Sequence
  primer
tgtgaatttaattagagcctggtg

SEQ ID NO: 28720 - DNA, 21 bp, Artificial Sequence
  primer
tgacatgaaattgggtatggg

SEQ ID NO: 28721 - DNA, 38 bp, Artificial Sequence
  primer
gtaaaacgacggccagtcatttgaagcatggcttcttg

SEQ ID NO: 28722 - DNA, 21 bp, Artificial Sequence
  primer
gcctgggtgacagtgagattc

SEQ ID NO: 28723 - DNA, 21 bp, Artificial Sequence
  primer
atcccaagtgatgtttcggtc

SEQ ID NO: 28724 - DNA, 44 bp, Artificial Sequence
  primer
gtaaaacgacggccagtgcaataaacagacagttagatttcagg

SEQ ID NO: 28725 - DNA, 42 bp, Artificial Sequence
  primer
gtaaaacgacggccagtcaaacttcatatgtctggacttcac

SEQ ID NO: 28726 - DNA, 21 bp, Artificial Sequence
  primer
gaagatctgcagtgttggcag

SEQ ID NO: 28727 - DNA, 36 bp, Artificial Sequence
  primer
gtaaaacgacggccagtatgtagcccatgctagccc

SEQ ID NO: 28728 - DNA, 19 bp, Artificial Sequence
  primer
aaagtgggatgcaagggag

SEQ ID NO: 28729 - DNA, 41 bp, Artificial Sequence
  primer
gtaaaacgacggccagttcagctccaattattgtgtcactc

SEQ ID NO: 28730 - DNA, 43 bp, Artificial Sequence
  primer
gtaaaacgacggccagttcctgaaacgttgtatagtgactctc

SEQ ID NO: 28731 - DNA, 38 bp, Artificial Sequence
  primer
gtaaaacgacggccagtggacaaatggctttgaccttt

SEQ ID NO: 28732 - DNA, 23 bp, Artificial Sequence
  primer
gatgtgcagttcaatgtctatgc

SEQ ID NO: 28733 - DNA, 42 bp, Artificial Sequence
  primer
gtaaaacgacggccagtgagttgagaaatcatgtaggcgtaa

SEQ ID NO: 28734 - DNA, 43 bp, Artificial Sequence
  primer
gtaaaacgacggccagttccttctataatgtctcttccaatgc

SEQ ID NO: 28735 - DNA, 25 bp, Artificial Sequence
  primer
gggaaatatgagatgaaataggttg

SEQ ID NO: 28736 - DNA, 38 bp, Artificial Sequence
  primer
gtaaaacgacggccagtattctaccctggcaggacaac

SEQ ID NO: 28737 - DNA, 37 bp, Artificial Sequence
  primer
gtaaaacgacggccagttgtctacgacagagggtggg

SEQ ID NO: 28738 - DNA, 37 bp, Artificial Sequence
  primer
gtaaaacgacggccagtgtggcaagaagaagccactg

SEQ ID NO: 28739 - DNA, 39 bp, Artificial Sequence
  primer
gtaaaacgacggccagttttactaaggtccacagcaggc

SEQ ID NO: 28740 - DNA, 40 bp, Artificial Sequence
  primer
gtaaaacgacggccagtggaggattatgggatacaggttg

SEQ ID NO: 28741 - DNA, 22 bp, Artificial Sequence
  primer
tgggacctcagttctatgatgg

SEQ ID NO: 28742 - DNA, 22 bp, Artificial Sequence
  primer
tggtttaaagttgcattccagg

SEQ ID NO: 28743 - DNA, 39 bp, Artificial Sequence
  primer
gtaaaacgacggccagtggcaacatagcaagacctcatc

SEQ ID NO: 28744 - DNA, 21 bp, Artificial Sequence
  primer
tgtccctacaaaggacatgaa

SEQ ID NO: 28745 - DNA, 38 bp, Artificial Sequence
  primer
gtaaaacgacggccagtggtgccataaatgtgtgttga

SEQ ID NO: 28746 - DNA, 26 bp, Artificial Sequence
  primer
tttcctccttacagtttactcagaga

SEQ ID NO: 28747 - DNA, 26 bp, Artificial Sequence
  primer
attcagtagagaatgtttgaatggac

SEQ ID NO: 28748 - DNA, 42 bp, Artificial Sequence
  primer
gtaaaacgacggccagtggcttaaggatgaactttgaaactg

SEQ ID NO: 28749 - DNA, 39 bp, Artificial Sequence
  primer
gtaaaacgacggccagtaaacaaatgtgggtactctggg

SEQ ID NO: 28750 - DNA, 26 bp, Artificial Sequence
  primer
aattcttcacatgtgtcttagaatcc

SEQ ID NO: 28751 - DNA, 38 bp, Artificial Sequence
  primer
gtaaaacgacggccagtagaagcaaaggtccaagcaac

SEQ ID NO: 28752 - DNA, 43 bp, Artificial Sequence
  primer
gtaaaacgacggccagtgcttattaagtagtcagcccaattca

SEQ ID NO: 28753 - DNA, 40 bp, Artificial Sequence
  primer
gtaaaacgacggccagtgctgaatggttgaactgaaacac

SEQ ID NO: 28754 - DNA, 21 bp, Artificial Sequence
  primer
attcagattgcttccagggac

SEQ ID NO: 28755 - DNA, 21 bp, Artificial Sequence
  primer
ccaccatgtttcatatgctgc

SEQ ID NO: 28756 - DNA, 38 bp, Artificial Sequence
  primer
gtaaaacgacggccagtgaaacctaactcaagccctgg

SEQ ID NO: 28757 - DNA, 21 bp, Artificial Sequence
  primer
tgaaggacagctggaggaatc

SEQ ID NO: 28758 - DNA, 43 bp, Artificial Sequence
  primer
gtaaaacgacggccagtgcataggatcagaaacaagttcagtc

SEQ ID NO: 28759 - DNA, 41 bp, Artificial Sequence
  primer
gtaaaacgacggccagtccacatactcataactgcagaggc

SEQ ID NO: 28760 - DNA, 21 bp, Artificial Sequence
  primer
gactgcctcattctttggagc

SEQ ID NO: 28761 - DNA, 21 bp, Artificial Sequence
  primer
cgtcgactatttgctcatccc

SEQ ID NO: 28762 - DNA, 21 bp, Artificial Sequence
  primer
atgatgaggaactggtcgagg

SEQ ID NO: 28763 - DNA, 21 bp, Artificial Sequence
  primer
agatcaactgggcctcctttc

SEQ ID NO: 28764 - DNA, 21 bp, Artificial Sequence
  primer
agggaagaggccatagctgac

SEQ ID NO: 28765 - DNA, 38 bp, Artificial Sequence
  primer
gtaaaacgacggccagttacatgaccagagggaaaggg

SEQ ID NO: 28766 - DNA, 21 bp, Artificial Sequence
  primer
gagggctacaattctcttggg

SEQ ID NO: 28767 - DNA, 37 bp, Artificial Sequence
  primer
gtaaaacgacggccagttgggaggatgggatccatag

SEQ ID NO: 28768 - DNA, 21 bp, Artificial Sequence
  primer
gaggtttgagggatatgagcg

SEQ ID NO: 28769 - DNA, 35 bp, Artificial Sequence
  primer
gtaaaacgacggccagtctgtcctgcaccagtggg

SEQ ID NO: 28770 - DNA, 20 bp, Artificial Sequence
  primer
agcaaatggtcagatgccag

SEQ ID NO: 28771 - DNA, 37 bp, Artificial Sequence
  primer
gtaaaacgacggccagtagatggagaagatcgccgag

SEQ ID NO: 28772 - DNA, 38 bp, Artificial Sequence
  primer
gtaaaacgacggccagttgtgtgatcctgagcaagtgg

SEQ ID NO: 28773 - DNA, 38 bp, Artificial Sequence
  primer
gtaaaacgacggccagtcctctcccatcttcttgatcc

SEQ ID NO: 28774 - DNA, 21 bp, Artificial Sequence
  primer
tcctcttgttaccctgttccc

SEQ ID NO: 28775 - DNA, 22 bp, Artificial Sequence
  primer
ccactttcgttctgtccttgac

SEQ ID NO: 28776 - DNA, 21 bp, Artificial Sequence
  primer
cctgtctactctccacccagg

SEQ ID NO: 28777 - DNA, 38 bp, Artificial Sequence
  primer
gtaaaacgacggccagtgaagaggaggagatcgaggtg

SEQ ID NO: 28778 - DNA, 38 bp, Artificial Sequence
  primer
gtaaaacgacggccagtgggtggacctggctataattc

SEQ ID NO: 28779 - DNA, 20 bp, Artificial Sequence
  primer
ttccaccttcaggtcagtgg

SEQ ID NO: 28780 - DNA, 35 bp, Artificial Sequence
  primer
gtaaaacgacggccagtccacacggaagcagaggg

SEQ ID NO: 28781 - DNA, 38 bp, Artificial Sequence
  primer
gtaaaacgacggccagtacagaaagtgggagtgaaggg

SEQ ID NO: 28782 - DNA, 38 bp, Artificial Sequence
  primer
gtaaaacgacggccagtcttcggaagcagctgaggtag

SEQ ID NO: 28783 - DNA, 21 bp, Artificial Sequence
  primer
tgtgcagacttagggatcagg

SEQ ID NO: 28784 - DNA, 38 bp, Artificial Sequence
  primer
gtaaaacgacggccagtagaaacaaagatgccacctcc

SEQ ID NO: 28785 - DNA, 21 bp, Artificial Sequence
  primer
ccctgcatggcattcttacag

SEQ ID NO: 28786 - DNA, 38 bp, Artificial Sequence
  primer
gtaaaacgacggccagtaaagtgacatcccagagccag

SEQ ID NO: 28787 - DNA, 39 bp, Artificial Sequence
  primer
gtaaaacgacggccagtgggacaggattagagggagttg

SEQ ID NO: 28788 - DNA, 38 bp, Artificial Sequence
  primer
gtaaaacgacggccagttcctcctttcaccagtccttg

SEQ ID NO: 28789 - DNA, 38 bp, Artificial Sequence
  primer
gtaaaacgacggccagtaggtgaagtttgggcactttg

SEQ ID NO: 28790 - DNA, 36 bp, Artificial Sequence
  primer
gtaaaacgacggccagtgctcgggagcaaggtacac

SEQ ID NO: 28791 - DNA, 38 bp, Artificial Sequence
  primer
gtaaaacgacggccagtgaactctacgggcaaggtgtc

SEQ ID NO: 28792 - DNA, 21 bp, Artificial Sequence
  primer
ttgttcctgtcttcatggtgc

SEQ ID NO: 28793 - DNA, 38 bp, Artificial Sequence
  primer
gtaaaacgacggccagtctgggctagaggtgtggaaag

SEQ ID NO: 28794 - DNA, 21 bp, Artificial Sequence
  primer
tcccattcctcatttcctgtg

SEQ ID NO: 28795 - DNA, 21 bp, Artificial Sequence
  primer
caggttggagagatcagaggg

SEQ ID NO: 28796 - DNA, 38 bp, Artificial Sequence
  primer
gtaaaacgacggccagttccagcaatgacatgaagacc

SEQ ID NO: 28797 - DNA, 38 bp, Artificial Sequence
  primer
gtaaaacgacggccagtggacaacttccactactgggc

SEQ ID NO: 28798 - DNA, 21 bp, Artificial Sequence
  primer
acctcatcccatacaaccctg

SEQ ID NO: 28799 - DNA, 38 bp, Artificial Sequence
  primer
gtaaaacgacggccagtatggatgacaactcctggacc

SEQ ID NO: 28800 - DNA, 21 bp, Artificial Sequence
  primer
aaggttatatctcccgggtcg

SEQ ID NO: 28801 - DNA, 38 bp, Artificial Sequence
  primer
gtaaaacgacggccagttctggagcacctgtgtttgtc

SEQ ID NO: 28802 - DNA, 37 bp, Artificial Sequence
  primer
gtaaaacgacggccagttttccattgctctccttccc

SEQ ID NO: 28803 - DNA, 38 bp, Artificial Sequence
  primer
gtaaaacgacggccagtacacctggaaatcactccctc

SEQ ID NO: 28804 - DNA, 19 bp, Artificial Sequence
  primer
gaattcacccttggcttcg

SEQ ID NO: 28805 - DNA, 25 bp, Artificial Sequence
  primer
ctgtgcagatcagatatattcaagc

SEQ ID NO: 28806 - DNA, 39 bp, Artificial Sequence
  primer
gtaaaacgacggccagtcctattcattccttcccatttg

SEQ ID NO: 28807 - DNA, 21 bp, Artificial Sequence
  primer
tttggacttcttgatggaggg

SEQ ID NO: 28808 - DNA, 21 bp, Artificial Sequence
  primer
atcgtggtcctcttcttcctg

SEQ ID NO: 28809 - DNA, 35 bp, Artificial Sequence
  primer
gtaaaacgacggccagtcagcgtgagcaggtggag

SEQ ID NO: 28810 - DNA, 37 bp, Artificial Sequence
  primer
gtaaaacgacggccagtgggataagacggaaggaggg

SEQ ID NO: 28811 - DNA, 21 bp, Artificial Sequence
  primer
tgtgaggaagtcccactgatg

SEQ ID NO: 28812 - DNA, 21 bp, Artificial Sequence
  primer
ggagaattaccacgccaactc

SEQ ID NO: 28813 - DNA, 38 bp, Artificial Sequence
  primer
gtaaaacgacggccagtgggactgaaatgaaggtgagg

SEQ ID NO: 28814 - DNA, 21 bp, Artificial Sequence
  primer
gaatgttgctggtgatcgttg

SEQ ID NO: 28815 - DNA, 38 bp, Artificial Sequence
  primer
gtaaaacgacggccagtgttccctgtccctatggcttc

SEQ ID NO: 28816 - DNA, 20 bp, Artificial Sequence
  primer
ccagaacaaggtggctgatg

SEQ ID NO: 28817 - DNA, 21 bp, Artificial Sequence
  primer
caaattgaaaccaggagaggg

SEQ ID NO: 28818 - DNA, 38 bp, Artificial Sequence
  primer
gtaaaacgacggccagtgaggagcagagaggctgagac

SEQ ID NO: 28819 - DNA, 21 bp, Artificial Sequence
  primer
ctctcgcaattccttgctttc

SEQ ID NO: 28820 - DNA, 38 bp, Artificial Sequence
  primer
gtaaaacgacggccagtatccttcctcctctccgtagc

SEQ ID NO: 28821 - DNA, 38 bp, Artificial Sequence
  primer
gtaaaacgacggccagtctccagctcagcagattcagg

SEQ ID NO: 28822 - DNA, 38 bp, Artificial Sequence
  primer
gtaaaacgacggccagtatcccatacagatgctccctg

SEQ ID NO: 28823 - DNA, 38 bp, Artificial Sequence
  primer
gtaaaacgacggccagtaggcaggtttagaacccagtg

SEQ ID NO: 28824 - DNA, 21 bp, Artificial Sequence
  primer
ttcccttccaagtctcagctc

SEQ ID NO: 28825 - DNA, 38 bp, Artificial Sequence
  primer
gtaaaacgacggccagtcccaggagtaccatggagaag

SEQ ID NO: 28826 - DNA, 38 bp, Artificial Sequence
  primer
gtaaaacgacggccagtagctgcctctgtggaagaaag

SEQ ID NO: 28827 - DNA, 21 bp, Artificial Sequence
  primer
ctattggcctcctgaggtttg

SEQ ID NO: 28828 - DNA, 37 bp, Artificial Sequence
  primer
gtaaaacgacggccagtctgggacttcctggatcctc

SEQ ID NO: 28829 - DNA, 21 bp, Artificial Sequence
  primer
taatggaataaatgggccagg

SEQ ID NO: 28830 - DNA, 38 bp, Artificial Sequence
  primer
gtaaaacgacggccagtcatgtcttcagaggcttgtgc

SEQ ID NO: 28831 - DNA, 21 bp, Artificial Sequence
  primer
aaggcttcccaaggacacttc

SEQ ID NO: 28832 - DNA, 21 bp, Artificial Sequence
  primer
actgaggcctgttgtttctcc

SEQ ID NO: 28833 - DNA, 38 bp, Artificial Sequence
  primer
gtaaaacgacggccagtacaaatggtgggagacagagg

SEQ ID NO: 28834 - DNA, 38 bp, Artificial Sequence
  primer
gtaaaacgacggccagtaaggtgagctccatgtgaacc

SEQ ID NO: 28835 - DNA, 38 bp, Artificial Sequence
  primer
gtaaaacgacggccagtaaataggtcactgccaccctc

SEQ ID NO: 28836 - DNA, 21 bp, Artificial Sequence
  primer
atgcagatcttccacgaacac

SEQ ID NO: 28837 - DNA, 20 bp, Artificial Sequence
  primer
cctcttggagccttggaatc

SEQ ID NO: 28838 - DNA, 21 bp, Artificial Sequence
  primer
aatgtcttgcatcagcacctc

SEQ ID NO: 28839 - DNA, 38 bp, Artificial Sequence
  primer
gtaaaacgacggccagtagcggtgatatctcccagttc

SEQ ID NO: 28840 - DNA, 21 bp, Artificial Sequence
  primer
gagatgcctgggacagagaag

SEQ ID NO: 28841 - DNA, 21 bp, Artificial Sequence
  primer
attcccagcctcacatcactc

SEQ ID NO: 28842 - DNA, 37 bp, Artificial Sequence
  primer
gtaaaacgacggccagtacacaggtgtcctcaatccg

SEQ ID NO: 28843 - DNA, 21 bp, Artificial Sequence
  primer
cctgttgagactcccaccttc

SEQ ID NO: 28844 - DNA, 38 bp, Artificial Sequence
  primer
gtaaaacgacggccagtgaacgcatcatccagagactg

SEQ ID NO: 28845 - DNA, 38 bp, Artificial Sequence
  primer
gtaaaacgacggccagtgctcagcagatttaacagccc

SEQ ID NO: 28846 - DNA, 39 bp, Artificial Sequence
  primer
gtaaaacgacggccagtgcagaagcactgggatttaatg

SEQ ID NO: 28847 - DNA, 38 bp, Artificial Sequence
  primer
gtaaaacgacggccagtttagcttgaagtcaggatggc

SEQ ID NO: 28848 - DNA, 38 bp, Artificial Sequence
  primer
gtaaaacgacggccagtacgccttctgtgtacattccc

SEQ ID NO: 28849 - DNA, 22 bp, Artificial Sequence
  primer
tccaagacattgaaactcctcc

SEQ ID NO: 28850 - DNA, 24 bp, Artificial Sequence
  primer
tttgcattaatcttcatcagaagc

SEQ ID NO: 28851 - DNA, 21 bp, Artificial Sequence
  primer
atgagctgagttaggttgggc

SEQ ID NO: 28852 - DNA, 37 bp, Artificial Sequence
  primer
gtaaaacgacggccagtcagcaaatccagctttcagg

SEQ ID NO: 28853 - DNA, 38 bp, Artificial Sequence
  primer
gtaaaacgacggccagtttatcctggttctggcctttg

SEQ ID NO: 28854 - DNA, 38 bp, Artificial Sequence
  primer
gtaaaacgacggccagtccatcccagctatcctgtgag

SEQ ID NO: 28855 - DNA, 21 bp, Artificial Sequence
  primer
caggcagagctatgtgcagac

SEQ ID NO: 28856 - DNA, 38 bp, Artificial Sequence
  primer
gtaaaacgacggccagtatgtcaagtgactctgggcac

SEQ ID NO: 28857 - DNA, 38 bp, Artificial Sequence
  primer
gtaaaacgacggccagtagaagctccaagggtagggtc

SEQ ID NO: 28858 - DNA, 39 bp, Artificial Sequence
  primer
gtaaaacgacggccagttgagccctgcataaagtaggtg

SEQ ID NO: 28859 - DNA, 38 bp, Artificial Sequence
  primer
gtaaaacgacggccagtcctattgcattctcagccttg

SEQ ID NO: 28860 - DNA, 38 bp, Artificial Sequence
  primer
gtaaaacgacggccagtaataaatgggccaggagtcag

SEQ ID NO: 28861 - DNA, 37 bp, Artificial Sequence
  primer
gtaaaacgacggccagtagtgccctcagacacacagc

SEQ ID NO: 28862 - DNA, 38 bp, Artificial Sequence
  primer
gtaaaacgacggccagtattgactgggaaatctgaggg

SEQ ID NO: 28863 - DNA, 38 bp, Artificial Sequence
  primer
gtaaaacgacggccagtaggacccgagctatttatccc

SEQ ID NO: 28864 - DNA, 21 bp, Artificial Sequence
  primer
tacgggtaagacctccgacag

SEQ ID NO: 28865 - DNA, 21 bp, Artificial Sequence
  primer
gaagccttactgtctctgggc

SEQ ID NO: 28866 - DNA, 21 bp, Artificial Sequence
  primer
atacaacctccttcccttgcc

SEQ ID NO: 28867 - DNA, 38 bp, Artificial Sequence
  primer
gtaaaacgacggccagtttcctaaggctgttcctcagc

SEQ ID NO: 28868 - DNA, 20 bp, Artificial Sequence
  primer
cttaccggatccaggaggtg

SEQ ID NO: 28869 - DNA, 21 bp, Artificial Sequence
  primer
agtcaacagcttcaggctcag

SEQ ID NO: 28870 - DNA, 21 bp, Artificial Sequence
  primer
aggagctgtagggactggagg

SEQ ID NO: 28871 - DNA, 21 bp, Artificial Sequence
  primer
agtcaacagcttcaggctcag

SEQ ID NO: 28872 - DNA, 36 bp, Artificial Sequence
  primer
gtaaaacgacggccagttttcagggccgtctcagtc

SEQ ID NO: 28873 - DNA, 37 bp, Artificial Sequence
  primer
gtaaaacgacggccagtcctcctgagtctccaccttg

SEQ ID NO: 28874 - DNA, 21 bp, Artificial Sequence
  primer
gagcaacaagtttgtggcaag

SEQ ID NO: 28875 - DNA, 21 bp, Artificial Sequence
  primer
cctctgactcacctagtgccc

SEQ ID NO: 28876 - DNA, 38 bp, Artificial Sequence
  primer
gtaaaacgacggccagtaaagacccaggaaatccaacc

SEQ ID NO: 28877 - DNA, 37 bp, Artificial Sequence
  primer
gtaaaacgacggccagtctggtccttgctcctaaccc

SEQ ID NO: 28878 - DNA, 38 bp, Artificial Sequence
  primer
gtaaaacgacggccagtataagtcgaggaggagcctgg

SEQ ID NO: 28879 - DNA, 21 bp, Artificial Sequence
  primer
attcacaaagccatgtttgcc

SEQ ID NO: 28880 - DNA, 22 bp, Artificial Sequence
  primer
ggaatacagtgtcccaaagtgg

SEQ ID NO: 28881 - DNA, 38 bp, Artificial Sequence
  primer
gtaaaacgacggccagttcagacttcagaaggacacgg

SEQ ID NO: 28882 - DNA, 38 bp, Artificial Sequence
  primer
gtaaaacgacggccagtttccagtcacttggtctgagc

SEQ ID NO: 28883 - DNA, 20 bp, Artificial Sequence
  primer
gacaggaagaaggaggcagc

SEQ ID NO: 28884 - DNA, 21 bp, Artificial Sequence
  primer
actcagctagcttcaggagca

SEQ ID NO: 28885 - DNA, 38 bp, Artificial Sequence
  primer
gtaaaacgacggccagttgctcatgttaggtgggaatg

SEQ ID NO: 28886 - DNA, 38 bp, Artificial Sequence
  primer
gtaaaacgacggccagtacagggagtctgcttccagtg

SEQ ID NO: 28887 - DNA, 38 bp, Artificial Sequence
  primer
gtaaaacgacggccagtacttatgataccggccaatgc

SEQ ID NO: 28888 - DNA, 39 bp, Artificial Sequence
  primer
gtaaaacgacggccagtgcctcagtttctgtcaaggaag

SEQ ID NO: 28889 - DNA, 21 bp, Artificial Sequence
  primer
gagctccaaatatgccctacc

SEQ ID NO: 28890 - DNA, 38 bp, Artificial Sequence
  primer
gtaaaacgacggccagtaggcagagacagagcttccag

SEQ ID NO: 28891 - DNA, 21 bp, Artificial Sequence
  primer
agagacattgggtttgggatg

SEQ ID NO: 28892 - DNA, 21 bp, Artificial Sequence
  primer
gttccttcatcctggaaccaa

SEQ ID NO: 28893 - DNA, 21 bp, Artificial Sequence
  primer
cttccttgattgtgaccatgc

SEQ ID NO: 28894 - DNA, 38 bp, Artificial Sequence
  primer
gtaaaacgacggccagtgacactgaacttgggatggtg

SEQ ID NO: 28895 - DNA, 20 bp, Artificial Sequence
  primer
gtccgggtccttcacctaag

SEQ ID NO: 28896 - DNA, 20 bp, Artificial Sequence
  primer
caaagtcattcctggcttgc

SEQ ID NO: 28897 - DNA, 41 bp, Artificial Sequence
  primer
gtaaaacgacggccagtgcagctagagttgagaaagactgc

SEQ ID NO: 28898 - DNA, 39 bp, Artificial Sequence
  primer
gtaaaacgacggccagtttcagttcctcttaatgctgcc

SEQ ID NO: 28899 - DNA, 38 bp, Artificial Sequence
  primer
gtaaaacgacggccagtatcacttgaatccaggccttc

SEQ ID NO: 28900 - DNA, 44 bp, Artificial Sequence
  primer
gtaaaacgacggccagttctgaaggtaatattcacaagtgtcat

SEQ ID NO: 28901 - DNA, 35 bp, Artificial Sequence
  primer
gtaaaacgacggccagttagctggatgtggtggcg

SEQ ID NO: 28902 - DNA, 42 bp, Artificial Sequence
  primer
gtaaaacgacggccagttgcaatttgtatgcattgtagtcac

SEQ ID NO: 28903 - DNA, 21 bp, Artificial Sequence
  primer
catgggatgtttctctgtcgt

SEQ ID NO: 28904 - DNA, 25 bp, Artificial Sequence
  primer
cagtcatcacattgattagtgcttt

SEQ ID NO: 28905 - DNA, 38 bp, Artificial Sequence
  primer
gtaaaacgacggccagttgttgggattataggcgtgag

SEQ ID NO: 28906 - DNA, 44 bp, Artificial Sequence
  primer
gtaaaacgacggccagtcagaagtgcagacagtttaatacaaag

SEQ ID NO: 28907 - DNA, 20 bp, Artificial Sequence
  primer
aaatgtttgccaacctctgc

SEQ ID NO: 28908 - DNA, 25 bp, Artificial Sequence
  primer
aaattacgttactgaaagccatttg

SEQ ID NO: 28909 - DNA, 19 bp, Artificial Sequence
  primer
tgcccgtgaagcaattaaa

SEQ ID NO: 28910 - DNA, 37 bp, Artificial Sequence
  primer
gtaaaacgacggccagtgcacattctgcacgtgtacc

SEQ ID NO: 28911 - DNA, 37 bp, Artificial Sequence
  primer
gtaaaacgacggccagtgcccaatgtcatgaatgtcc

SEQ ID NO: 28912 - DNA, 38 bp, Artificial Sequence
  primer
gtaaaacgacggccagtaagtgaggatgagcgacaacc

SEQ ID NO: 28913 - DNA, 37 bp, Artificial Sequence
  primer
gtaaaacgacggccagtcagtgatccctgttgcatgg

SEQ ID NO: 28914 - DNA, 21 bp, Artificial Sequence
  primer
tttgtgctctcggtggtagtg

SEQ ID NO: 28915 - DNA, 22 bp, Artificial Sequence
  primer
ccctggaataagcactgttctg

SEQ ID NO: 28916 - DNA, 38 bp, Artificial Sequence
  primer
gtaaaacgacggccagtctcagctgtttcctcaagtgc

SEQ ID NO: 28917 - DNA, 38 bp, Artificial Sequence
  primer
gtaaaacgacggccagtgtcagtgaaaggcagagggac

SEQ ID NO: 28918 - DNA, 38 bp, Artificial Sequence
  primer
gtaaaacgacggccagtcagcttgatgaaggacagcag

SEQ ID NO: 28919 - DNA, 21 bp, Artificial Sequence
  primer
acacggcatggactaggtttc

SEQ ID NO: 28920 - DNA, 20 bp, Artificial Sequence
  primer
gaagccagagacagctggtg

SEQ ID NO: 28921 - DNA, 19 bp, Artificial Sequence
  primer
atgcagtgagcatggcatc

SEQ ID NO: 28922 - DNA, 38 bp, Artificial Sequence
  primer
gtaaaacgacggccagtaaagataacgacgggaagagc

SEQ ID NO: 28923 - DNA, 38 bp, Artificial Sequence
  primer
gtaaaacgacggccagttagaggttcgctgtgtccttg

SEQ ID NO: 28924 - DNA, 21 bp, Artificial Sequence
  primer
tggtttgagtcatgcaggttc

SEQ ID NO: 28925 - DNA, 21 bp, Artificial Sequence
  primer
tgacttgcctatggttgatgg

SEQ ID NO: 28926 - DNA, 38 bp, Artificial Sequence
  primer
gtaaaacgacggccagttttccaacctttgcttgtgag

SEQ ID NO: 28927 - DNA, 38 bp, Artificial Sequence
  primer
gtaaaacgacggccagtgagaggcgtggcttatggtag

SEQ ID NO: 28928 - DNA, 37 bp, Artificial Sequence
  primer
gtaaaacgacggccagtcttgccatttccaggcttac

SEQ ID NO: 28929 - DNA, 23 bp, Artificial Sequence
  primer
tctggtctctttcgagatgaatg

SEQ ID NO: 28930 - DNA, 21 bp, Artificial Sequence
  primer
gtagtcagccagcttccttcc

SEQ ID NO: 28931 - DNA, 38 bp, Artificial Sequence
  primer
gtaaaacgacggccagtgcggctacgactattctttgg

SEQ ID NO: 28932 - DNA, 20 bp, Artificial Sequence
  primer
caaaggccaacacccataag

SEQ ID NO: 28933 - DNA, 43 bp, Artificial Sequence
  primer
gtaaaacgacggccagttgctttgttaatatgagattccttcc

SEQ ID NO: 28934 - DNA, 41 bp, Artificial Sequence
  primer
gtaaaacgacggccagtcatgtagcctctcgtaattaatgg

SEQ ID NO: 28935 - DNA, 22 bp, Artificial Sequence
  primer
gctaatgggatttcagaactgg

SEQ ID NO: 28936 - DNA, 38 bp, Artificial Sequence
  primer
gtaaaacgacggccagtcagagccgttatcaaaggcag

SEQ ID NO: 28937 - DNA, 22 bp, Artificial Sequence
  primer
ttgctggcagggaaagtagtag

SEQ ID NO: 28938 - DNA, 20 bp, Artificial Sequence
  primer
ggcatgcatgtgtgtttcag

SEQ ID NO: 28939 - DNA, 38 bp, Artificial Sequence
  primer
gtaaaacgacggccagtgtttctgctgggtgtaggtcc

SEQ ID NO: 28940 - DNA, 38 bp, Artificial Sequence
  primer
gtaaaacgacggccagtttagtcggctttctttctggg

SEQ ID NO: 28941 - DNA, 20 bp, Artificial Sequence
  primer
ttctgtaagagcccgccttc

SEQ ID NO: 28942 - DNA, 39 bp, Artificial Sequence
  primer
gtaaaacgacggccagtggaaatgaattgtatgccgatt

SEQ ID NO: 28943 - DNA, 37 bp, Artificial Sequence
  primer
gtaaaacgacggccagtggtgatggtgttgtttgtgg

SEQ ID NO: 28944 - DNA, 26 bp, Artificial Sequence
  primer
tctttctacctctccttcatcatagc

SEQ ID NO: 28945 - DNA, 38 bp, Artificial Sequence
  primer
gtaaaacgacggccagtgactttccatgggcatttgag

SEQ ID NO: 28946 - DNA, 41 bp, Artificial Sequence
  primer
gtaaaacgacggccagtgcacctaggaaaggagtctttagc

SEQ ID NO: 28947 - DNA, 21 bp, Artificial Sequence
  primer
ctgcaaatgcctggtttattt

SEQ ID NO: 28948 - DNA, 23 bp, Artificial Sequence
  primer
tgcaatttaacttacttggcctt

SEQ ID NO: 28949 - DNA, 22 bp, Artificial Sequence
  primer
cctgattgcttcttaaactggg

SEQ ID NO: 28950 - DNA, 25 bp, Artificial Sequence
  primer
gggtcatggtatatgccaatatttc

SEQ ID NO: 28951 - DNA, 38 bp, Artificial Sequence
  primer
gtaaaacgacggccagtgagagtgcatcttgtgttggc

SEQ ID NO: 28952 - DNA, 21 bp, Artificial Sequence
  primer
gctttgcaaggttagtgggag

SEQ ID NO: 28953 - DNA, 38 bp, Artificial Sequence
  primer
gtaaaacgacggccagttgtgaatacagaggccgattc

SEQ ID NO: 28954 - DNA, 38 bp, Artificial Sequence
  primer
gtaaaacgacggccagtatttaagccagttggctctgc

SEQ ID NO: 28955 - DNA, 38 bp, Artificial Sequence
  primer
gtaaaacgacggccagtatctcaggcagctggaggtag

SEQ ID NO: 28956 - DNA, 38 bp, Artificial Sequence
  primer
gtaaaacgacggccagtcaggacttggtttcctttccc

SEQ ID NO: 28957 - DNA, 37 bp, Artificial Sequence
  primer
gtaaaacgacggccagtgagttcctaggccttcacgc

SEQ ID NO: 28958 - DNA, 38 bp, Artificial Sequence
  primer
gtaaaacgacggccagtgggctttgattgaatttccag

SEQ ID NO: 28959 - DNA, 38 bp, Artificial Sequence
  primer
gtaaaacgacggccagtgccgtggacctttgataattg

SEQ ID NO: 28960 - DNA, 38 bp, Artificial Sequence
  primer
gtaaaacgacggccagttcgtgtttctggtgaatggtg

SEQ ID NO: 28961 - DNA, 38 bp, Artificial Sequence
  primer
gtaaaacgacggccagtctctgaggttctggagttccc

SEQ ID NO: 28962 - DNA, 22 bp, Artificial Sequence
  primer
caaccaacttatgtgggtcagg

SEQ ID NO: 28963 - DNA, 41 bp, Artificial Sequence
  primer
gtaaaacgacggccagttgtccctctaatctgtcttatggg

SEQ ID NO: 28964 - DNA, 38 bp, Artificial Sequence
  primer
gtaaaacgacggccagtttcacaggcataagctggaag

SEQ ID NO: 28965 - DNA, 20 bp, Artificial Sequence
  primer
aggaagagtcgttggctgtg

SEQ ID NO: 28966 - DNA, 21 bp, Artificial Sequence
  primer
aggaagccaccagtattgcag

SEQ ID NO: 28967 - DNA, 38 bp, Artificial Sequence
  primer
gtaaaacgacggccagtaagaaatcattggccttgcag

SEQ ID NO: 28968 - DNA, 21 bp, Artificial Sequence
  primer
caccactcaggaggaggtttc

SEQ ID NO: 28969 - DNA, 38 bp, Artificial Sequence
  primer
gtaaaacgacggccagtcttattaaggagccactgccc

SEQ ID NO: 28970 - DNA, 38 bp, Artificial Sequence
  primer
gtaaaacgacggccagtcttgcaggaagtgtccctctc

SEQ ID NO: 28971 - DNA, 21 bp, Artificial Sequence
  primer
gcagttggctttgaatgagac

SEQ ID NO: 28972 - DNA, 21 bp, Artificial Sequence
  primer
agcactgagaaggaggctgtc

SEQ ID NO: 28973 - DNA, 21 bp, Artificial Sequence
  primer
gctctgaatgagaaacccacc

SEQ ID NO: 28974 - DNA, 38 bp, Artificial Sequence
  primer
gtaaaacgacggccagtcccacctacaaggaagacacc

SEQ ID NO: 28975 - DNA, 37 bp, Artificial Sequence
  primer
gtaaaacgacggccagttggcccaacatatacaaggc

SEQ ID NO: 28976 - DNA, 21 bp, Artificial Sequence
  primer
agcataactgcaacttgcctg

SEQ ID NO: 28977 - DNA, 40 bp, Artificial Sequence
  primer
gtaaaacgacggccagtggtagctagatctgtctggaggc

SEQ ID NO: 28978 - DNA, 38 bp, Artificial Sequence
  primer
gtaaaacgacggccagttatgccaggaaatccttcacc

SEQ ID NO: 28979 - DNA, 38 bp, Artificial Sequence
  primer
gtaaaacgacggccagtaggctcgggatgatgtaactg

SEQ ID NO: 28980 - DNA, 38 bp, Artificial Sequence
  primer
gtaaaacgacggccagtttgggatagcagagatggagg

SEQ ID NO: 28981 - DNA, 38 bp, Artificial Sequence
  primer
gtaaaacgacggccagtaagggctgtatgtcccacttg

SEQ ID NO: 28982 - DNA, 38 bp, Artificial Sequence
  primer
gtaaaacgacggccagttggaccatatgaggattgcac

SEQ ID NO: 28983 - DNA, 43 bp, Artificial Sequence
  primer
gtaaaacgacggccagtgaaccttagcacagtgtaaatgaatc

SEQ ID NO: 28984 - DNA, 21 bp, Artificial Sequence
  primer
ttgcacagttgagtgttgtcg

SEQ ID NO: 28985 - DNA, 46 bp, Artificial Sequence
  primer
gtaaaacgacggccagttttcaggacgtatttacatttattagtga

SEQ ID NO: 28986 - DNA, 42 bp, Artificial Sequence
  primer
gtaaaacgacggccagttgcaaatcctagaattagaccactg

SEQ ID NO: 28987 - DNA, 43 bp, Artificial Sequence; identical to SEQ ID NO: 28983
  primer

SEQ ID NO: 28988 - DNA, 39 bp, Artificial Sequence
  primer
gtaaaacgacggccagtggatgctcaaccagtgtaatgc

SEQ ID NO: 28989 - DNA, 21 bp, Artificial Sequence
  primer
aatctgcgtccgtaagtgttg

SEQ ID NO: 28990 - DNA, 38 bp, Artificial Sequence
  primer
gtaaaacgacggccagtgaatgattgtgagaagctggc

SEQ ID NO: 28991 - DNA, 23 bp, Artificial Sequence
  primer
ggaagcaagcatgagttagtgaa

SEQ ID NO: 28992 - DNA, 20 bp, Artificial Sequence
  primer
gcaaagatgggaaatctggc

SEQ ID NO: 28993 - DNA, 21 bp, Artificial Sequence
  primer
tgactagcacgcagtgaggac

SEQ ID NO: 28994 - DNA, 40 bp, Artificial Sequence
  primer
gtaaaacgacggccagttttctgagggttgtgtagtgatg

SEQ ID NO: 28995 - DNA, 25 bp, Artificial Sequence
  primer
aaaccaatgtttgttagtcttctgg

SEQ ID NO: 28996 - DNA, 38 bp, Artificial Sequence
  primer
gtaaaacgacggccagtgaagttgcaaagtcctggagc

SEQ ID NO: 28997 - DNA, 18 bp, Artificial Sequence
  primer
gcatcacgggaagctcct

SEQ ID NO: 28998 - DNA, 35 bp, Artificial Sequence
  primer
gtaaaacgacggccagtcaacatccaggaccgcac

SEQ ID NO: 28999 - DNA, 21 bp, Artificial Sequence
  primer
ctcagataccgagtgcttccc

SEQ ID NO: 29000 - DNA, 21 bp, Artificial Sequence
  primer
gctcttataaaggcttccggg

SEQ ID NO: 29001 - DNA, 38 bp, Artificial Sequence
  primer
gtaaaacgacggccagttagccaaaggaaggaggtcag

SEQ ID NO: 29002 - DNA, 21 bp, Artificial Sequence
  primer
cttatcacgcattctggtccc

SEQ ID NO: 29003 - DNA, 38 bp, Artificial Sequence
  primer
gtaaaacgacggccagttctagcagccacgtcctaatg

SEQ ID NO: 29004 - DNA, 38 bp, Artificial Sequence
  primer
gtaaaacgacggccagttgatggcaaataaacacaggc

SEQ ID NO: 29005 - DNA, 42 bp, Artificial Sequence
  primer
gtaaaacgacggccagtgaaactagcacagacttatgcaagc

SEQ ID NO: 29006 - DNA, 20 bp, Artificial Sequence
  primer
attccacggttgctacatcg

SEQ ID NO: 29007 - DNA, 38 bp, Artificial Sequence
  primer
gtaaaacgacggccagtcctatcccacctcacttcagc

SEQ ID NO: 29008 - DNA, 38 bp, Artificial Sequence
  primer
gtaaaacgacggccagtccctgcctgagactttgagac

SEQ ID NO: 29009 - DNA, 21 bp, Artificial Sequence
  primer
cactttccaaggagtcggaag

SEQ ID NO: 29010 - DNA, 21 bp, Artificial Sequence
  primer
atgtgttgggagctgtccttc

SEQ ID NO: 29011 - DNA, 36 bp, Artificial Sequence
  primer
gtaaaacgacggccagtacggaaacgagcccttgac

SEQ ID NO: 29012 - DNA, 35 bp, Artificial Sequence
  primer
gtaaaacgacggccagtgaggtggctccgcttacc

SEQ ID NO: 29013 - DNA, 21 bp, Artificial Sequence
  primer
gagaagtctcggtcggtaagg

SEQ ID NO: 29014 - DNA, 21 bp, Artificial Sequence
  primer
cctgggtgacagagtgagact

SEQ ID NO: 29015 - DNA, 39 bp, Artificial Sequence
  primer
gtaaaacgacggccagttgtaggttaaagcatgtgggtg

SEQ ID NO: 29016 - DNA, 40 bp, Artificial Sequence
  primer
gtaaaacgacggccagtgatgccacagtttaggttaccag

SEQ ID NO: 29017 - DNA, 38 bp, Artificial Sequence
  primer
gtaaaacgacggccagttttattaaacccgcacccttg

SEQ ID NO: 29018 - DNA, 22 bp, Artificial Sequence
  primer
ttggacaactaagacatcgtgg

SEQ ID NO: 29019 - DNA, 23 bp, Artificial Sequence
  primer
tgggacagtttctcactgttgac

SEQ ID NO: 29020 - DNA, 20 bp, Artificial Sequence
  primer
aaagaacccgtaatcctgcc

SEQ ID NO: 29021 - DNA, 21 bp, Artificial Sequence
  primer
tctttcagcttcagttgtggg

SEQ ID NO: 29022 - DNA, 18 bp, Artificial Sequence
  primer
ccatcggccatcttcctg

SEQ ID NO: 29023 - DNA, 35 bp, Artificial Sequence
  primer
gtaaaacgacggccagtccatcggccatcttcctg

SEQ ID NO: 29024 - DNA, 21 bp, Artificial Sequence
  primer
gaagaggaaggcaaacgtgac

SEQ ID NO: 29025 - DNA, 41 bp, Artificial Sequence
  primer
gtaaaacgacggccagttgagttgcaggtgaatttgtaatg

SEQ ID NO: 29026 - DNA, 21 bp, Artificial Sequence
  primer
ggtctcttactccatgctccc

SEQ ID NO: 29027 - DNA, 22 bp, Artificial Sequence
  primer
actgggtgacagaataaggcac

SEQ ID NO: 29028 - DNA, 21 bp, Artificial Sequence
  primer
tgtgttaattccatcagtgcg

SEQ ID NO: 29029 - DNA, 21 bp, Artificial Sequence
  primer
ctgaagtgtgagtgcctctgg

SEQ ID NO: 29030 - DNA, 38 bp, Artificial Sequence
  primer
gtaaaacgacggccagtgcagaggtaagtggctccatc

SEQ ID NO: 29031 - DNA, 39 bp, Artificial Sequence
  primer
gtaaaacgacggccagtcaggtaagttggctttccagtg

SEQ ID NO: 29032 - DNA, 23 bp, Artificial Sequence
  primer
tgagaaagcaagtctccatcttg

SEQ ID NO: 29033 - DNA, 38 bp, Artificial Sequence
  primer
gtaaaacgacggccagtgagggactgagctttcacctg

SEQ ID NO: 29034 - DNA, 38 bp, Artificial Sequence; identical to SEQ ID NO: 29033
  primer

SEQ ID NO: 29035 - DNA, 20 bp, Artificial Sequence
  primer
cccagataatccaggccaag

SEQ ID NO: 29036 - DNA, 21 bp, Artificial Sequence
  primer
actgtccttcttcgacacctg

SEQ ID NO: 29037 - DNA, 20 bp, Artificial Sequence
  primer
gtggcaggcacctgtaactc

SEQ ID NO: 29038 - DNA, 41 bp, Artificial Sequence
  primer
gtaaaacgacggccagttcttagctttgctatcagtttggc

SEQ ID NO: 29039 - DNA, 21 bp, Artificial Sequence
  primer
cactccagcctgagactctgc

SEQ ID NO: 29040 - DNA, 44 bp, Artificial Sequence
  primer
gtaaaacgacggccagtaacctctaagctctgctgtataatgtg

SEQ ID NO: 29041 - DNA, 38 bp, Artificial Sequence
  primer
gtaaaacgacggccagtccgggtggtggcttatttatc

SEQ ID NO: 29042 - DNA, 42 bp, Artificial Sequence
  primer
gtaaaacgacggccagtgctaaacttcttggttatgatttgg

SEQ ID NO: 29043 - DNA, 40 bp, Artificial Sequence
  primer
gtaaaacgacggccagtagaatatgacccttcacacttgc

SEQ ID NO: 29044 - DNA, 19 bp, Artificial Sequence
  primer
ccaatgttcgaattcgcgt

SEQ ID NO: 29045 - DNA, 21 bp, Artificial Sequence
  primer
tggcacagggaatagtaacca

SEQ ID NO: 29046 - DNA, 21 bp, Artificial Sequence
  primer
agaccctacatctgcctctcg

SEQ ID NO: 29047 - DNA, 42 bp, Artificial Sequence
  primer
gtaaaacgacggccagtttcaattcagggaacaagtattctg

SEQ ID NO: 29048 - DNA, 37 bp, Artificial Sequence
  primer
gtaaaacgacggccagttccaccaagaccatggagag

SEQ ID NO: 29049 - DNA, 21 bp, Artificial Sequence
  primer
acccaaagacagacaagggag

SEQ ID NO: 29050 - DNA, 35 bp, Artificial Sequence
  primer
gtaaaacgacggccagtctgggcgacgagtgaaac

SEQ ID NO: 29051 - DNA, 38 bp, Artificial Sequence
  primer
gtaaaacgacggccagtgggaagttagcgtagtgtcgg

SEQ ID NO: 29052 - DNA, 36 bp, Artificial Sequence
  primer
gtaaaacgacggccagtctgaatgggcctttgcttc

SEQ ID NO: 29053 - DNA, 38 bp, Artificial Sequence
  primer
gtaaaacgacggccagtctagccagcttatttggtcgg

SEQ ID NO: 29054 - DNA, 37 bp, Artificial Sequence
  primer
gtaaaacgacggccagttgaggcctcctaaagccttg

SEQ ID NO: 29055 - DNA, 36 bp, Artificial Sequence
  primer
gtaaaacgacggccagtcagctgtctctgctgtgcc

SEQ ID NO: 29056 - DNA, 38 bp, Artificial Sequence
  primer
gtaaaacgacggccagtccacagagctatagagcggga

SEQ ID NO: 29057 - DNA, 21 bp, Artificial Sequence
  primer
aactgccaggtcagattccag

SEQ ID NO: 29058 - DNA, 38 bp, Artificial Sequence
  primer
gtaaaacgacggccagtgctatggagaaatcagccagg

SEQ ID NO: 29059 - DNA, 21 bp, Artificial Sequence
  primer
cttcgtagcagaacctttggg

SEQ ID NO: 29060 - DNA, 38 bp, Artificial Sequence
  primer
gtaaaacgacggccagtaccacaggagggtaacacagg

SEQ ID NO: 29061 - DNA, 38 bp, Artificial Sequence
  primer
gtaaaacgacggccagtcttgggtgtgacatgacttcc

SEQ ID NO: 29062 - DNA, 21 bp, Artificial Sequence
  primer
acctcagggtactcctccgtc

SEQ ID NO: 29063 - DNA, 21 bp, Artificial Sequence
  primer
aaatcatttcttggcccagtg

SEQ ID NO: 29064 - DNA, 24 bp, Artificial Sequence
  primer
catcacagctgagaaataaacctc

SEQ ID NO: 29065 - DNA, 42 bp, Artificial Sequence
  primer
gtaaaacgacggccagtcccatatggtgcctttagaagttag

SEQ ID NO: 29066 - DNA, 36 bp, Artificial Sequence
  primer
gtaaaacgacggccagtgaaggcatgtcattgcagg

SEQ ID NO: 29067 - DNA, 25 bp, Artificial Sequence
  primer
aagacacatgttcataggattgcat

SEQ ID NO: 29068 - DNA, 37 bp, Artificial Sequence
  primer
gtaaaacgacggccagtgtactggcctcagccctttc

SEQ ID NO: 29069 - DNA, 21 bp, Artificial Sequence
  primer
agcgataccactctttccacc

SEQ ID NO: 29070 - DNA, 43 bp, Artificial Sequence
  primer
gtaaaacgacggccagttgttctgtcttaagaataggagcatc

SEQ ID NO: 29071 - DNA, 37 bp, Artificial Sequence
  primer
gtaaaacgacggccagtgcttctgccttccaaagtgg

SEQ ID NO: 29072 - DNA, 37 bp, Artificial Sequence
  primer
gtaaaacgacggccagtcttgcaactgccgactcatc

SEQ ID NO: 29073 - DNA, 18 bp, Artificial Sequence
  primer
gaagcgggtagtgggagc

SEQ ID NO: 29074 - DNA, 18 bp, Artificial Sequence
  primer
gagccactgcacccagtc

SEQ ID NO: 29075 - DNA, 36 bp, Artificial Sequence
  primer
gtaaaacgacggccagtcgcgtaatcgtgacgacag

SEQ ID NO: 29076 - DNA, 23 bp, Artificial Sequence
  primer
ggcgtgatatatacccttcgttg

SEQ ID NO: 29077 - DNA, 21 bp, Artificial Sequence
  primer
gacaagcaaaggatgggaaag

SEQ ID NO: 29078 - DNA, 22 bp, Artificial Sequence
  primer
ttcttgcaatgtctagcagtcg

SEQ ID NO: 29079 - DNA, 42 bp, Artificial Sequence
  primer
gtaaaacgacggccagtggacagtgtcaattactgtgctagg

SEQ ID NO: 29080 - DNA, 21 bp, Artificial Sequence
  primer
aattgcctttgatgaggatgg

SEQ ID NO: 29081 - DNA, 21 bp, Artificial Sequence
  primer
aatgcagaatgatgcaaatcc

SEQ ID NO: 29082 - DNA, 43 bp, Artificial Sequence
  primer
gtaaaacgacggccagtgatacatgatattgcctatagccttg

SEQ ID NO: 29083 - DNA, 38 bp, Artificial Sequence
  primer
gtaaaacgacggccagtaggagtctggtgagaccatgc

SEQ ID NO: 29084 - DNA, 22 bp, Artificial Sequence
  primer
ttgatcagagtccaaaggttcc

SEQ ID NO: 29085 - DNA, 25 bp, Artificial Sequence
  primer
tttatttcatgtgtctcaagtctga

SEQ ID NO: 29086 - DNA, 40 bp, Artificial Sequence
  primer
gtaaaacgacggccagttcttgcaagtgtactttccttcc

SEQ ID NO: 29087 - DNA, 38 bp, Artificial Sequence
  primer
gtaaaacgacggccagttagctgccaagactgttgagg

SEQ ID NO: 29088 - DNA, 44 bp, Artificial Sequence
  primer
gtaaaacgacggccagttgaataggttgcatcaatttctatatg

SEQ ID NO: 29089 - DNA, 38 bp, Artificial Sequence
  primer
gtaaaacgacggccagttggccaccagagataacagag

SEQ ID NO: 29090 - DNA, 21 bp, Artificial Sequence
  primer
tccgtttatgtctaccgtccc

SEQ ID NO: 29091 - DNA, 21 bp, Artificial Sequence
  primer
caagtgaagatgagcagccac

SEQ ID NO: 29092 - DNA, 43 bp, Artificial Sequence
  primer
gtaaaacgacggccagtcattcattatccctccacttaacttt

SEQ ID NO: 29093 - DNA, 21 bp, Artificial Sequence
  primer
ggcaataagacagcaaatccc

SEQ ID NO: 29094 - DNA, 21 bp, Artificial Sequence
  primer
gacttgtgcacttgtgactcg

SEQ ID NO: 29095 - DNA, 38 bp, Artificial Sequence
  primer
gtaaaacgacggccagtggaagaagctgttgagttggg

SEQ ID NO: 29096 - DNA, 39 bp, Artificial Sequence
  primer
gtaaaacgacggccagttgatcccaaaccaggtacaatc

SEQ ID NO: 29097 - DNA, 38 bp, Artificial Sequence
  primer
gtaaaacgacggccagtttctgacaccctgagattccc

SEQ ID NO: 29098 - DNA, 25 bp, Artificial Sequence
  primer
tgaggaagaccagtttattacgaag

SEQ ID NO: 29099 - DNA, 21 bp, Artificial Sequence
  primer
ggagagaaaggaaggaaaggc

SEQ ID NO: 29100 - DNA, 39 bp, Artificial Sequence
  primer
gtaaaacgacggccagtgctgtgtatttgagtggtgctg

SEQ ID NO: 29101 - DNA, 26 bp, Artificial Sequence
  primer
gcaaattaatggttagttatggcatc

SEQ ID NO: 29102 - DNA, 21 bp, Artificial Sequence
  primer
catgcttaggtcctcgtaggg

SEQ ID NO: 29103 - DNA, 36 bp, Artificial Sequence
  primer
gtaaaacgacggccagtacctgcacacctgccctac

SEQ ID NO: 29104 - DNA, 35 bp, Artificial Sequence
  primer
gtaaaacgacggccagtggcggtcacgggaatatc

SEQ ID NO: 29105 - DNA, 20 bp, Artificial Sequence
  primer
gacggttccttcaggctttc

SEQ ID NO: 29106 - DNA, 39 bp, Artificial Sequence
  primer
gtaaaacgacggccagtaaaggttgtcccaattgtgttc

SEQ ID NO: 29107 - DNA, 21 bp, Artificial Sequence
  primer
tgttgccaatagttggttgga

SEQ ID NO: 29108 - DNA, 41 bp, Artificial Sequence
  primer
gtaaaacgacggccagtcgatgcacaattagaacttgagtc

SEQ ID NO: 29109 - DNA, 44 bp, Artificial Sequence
  primer
gtaaaacgacggccagttgctagaatatgaggatgtgaatataa

SEQ ID NO: 29110 - DNA, 38 bp, Artificial Sequence
  primer
gtaaaacgacggccagtttgcagctagagcacttcagg

SEQ ID NO: 29111 - DNA, 21 bp, Artificial Sequence
  primer
cgtttgtgccaacatgctaag

SEQ ID NO: 29112 - DNA, 37 bp, Artificial Sequence
  primer
gtaaaacgacggccagtagtcaaccaacatggaagcg

SEQ ID NO: 29113 - DNA, 21 bp, Artificial Sequence
  primer
gggtgagtatacttgggctgg

SEQ ID NO: 29114 - DNA, 36 bp, Artificial Sequence
  primer
gtaaaacgacggccagttgagcaaccaccggaataa

SEQ ID NO: 29115 - DNA, 37 bp, Artificial Sequence
  primer
gtaaaacgacggccagtggaagttcgtcaagtcgcag

SEQ ID NO: 29116 - DNA, 36 bp, Artificial Sequence
  primer
gtaaaacgacggccagtttgcttggccatttcatcc

SEQ ID NO: 29117 - DNA, 38 bp, Artificial Sequence
  primer
gtaaaacgacggccagtaggtgacaaagttgaggcaag

SEQ ID NO: 29118 - DNA, 38 bp, Artificial Sequence
  primer
gtaaaacgacggccagtttccctggaagggattgttag

SEQ ID NO: 29119 - DNA, 18 bp, Artificial Sequence
  primer
gaccttgtgatccgctcg

SEQ ID NO: 29120 - DNA, 21 bp, Artificial Sequence
  primer
tggcagaatgtaaacgtcagg

SEQ ID NO: 29121 - DNA, 24 bp, Artificial Sequence
  primer
cagagcattgcatatttcttaccc

SEQ ID NO: 29122 - DNA, 21 bp, Artificial Sequence
  primer
acatagctggccaaaggtgac

SEQ ID NO: 29123 - DNA, 38 bp, Artificial Sequence
  primer
gtaaaacgacggccagtcagaacttccagtgttgctgc

SEQ ID NO: 29124 - DNA, 21 bp, Artificial Sequence
  primer
gaacctactcagggtcatcgg

SEQ ID NO: 29125 - DNA, 21 bp, Artificial Sequence
  primer
aggtggagataaagctgcgtc

SEQ ID NO: 29126 - DNA, 38 bp, Artificial Sequence
  primer
gtaaaacgacggccagtgccagacaagcaacttagcac

SEQ ID NO: 29127 - DNA, 21 bp, Artificial Sequence
  primer
cccttcacttcctacaatggg

SEQ ID NO: 29128 - DNA, 38 bp, Artificial Sequence
  primer
gtaaaacgacggccagttttctgaagtgctgggctagg

SEQ ID NO: 29129 - DNA, 39 bp, Artificial Sequence
  primer
gtaaaacgacggccagtccacttcttggttcatctttgg

SEQ ID NO: 29130 - DNA, 21 bp, Artificial Sequence
  primer
aggaatggcctcaacatcaag

SEQ ID NO: 29131 - DNA, 38 bp, Artificial Sequence
  primer
gtaaaacgacggccagtagaacagcagcacaaacaagg

SEQ ID NO: 29132 - DNA, 21 bp, Artificial Sequence
  primer
gaagagcaaacattcaagccc

SEQ ID NO: 29133 - DNA, 21 bp, Artificial Sequence
  primer
agaggctgcatgtcaatgatg

SEQ ID NO: 29134 - DNA, 21 bp, Artificial Sequence
  primer
gactagggcgagtcggtagag

SEQ ID NO: 29135 - DNA, 38 bp, Artificial Sequence
  primer
gtaaaacgacggccagttttggcgtcaagcctattctc

SEQ ID NO: 29136 - DNA, 20 bp, Artificial Sequence
  primer
caacaggagcgaaactccac

SEQ ID NO: 29137 - DNA, 38 bp, Artificial Sequence
  primer
gtaaaacgacggccagtttcagtttaggcttgccacag

SEQ ID NO: 29138 - DNA, 26 bp, Artificial Sequence
  primer
aatgagaatgtcagtgatgagaaact

SEQ ID NO: 29139 - DNA, 21 bp, Artificial Sequence
  primer
gcaaatcggcttgtttctcag

SEQ ID NO: 29140 - DNA, 21 bp, Artificial Sequence
  primer
atactcgggagtgagtgaggg

SEQ ID NO: 29141 - DNA, 37 bp, Artificial Sequence
  primer
gtaaaacgacggccagtaatgccggttgagagttgtg

SEQ ID NO: 29142 - DNA, 38 bp, Artificial Sequence; identical to SEQ ID NO: 29128
  primer

SEQ ID NO: 29143 - DNA, 39 bp, Artificial Sequence; identical to SEQ ID NO: 29129
  primer

SEQ ID NO: 29144 - DNA, 38 bp, Artificial Sequence
  primer
gtaaaacgacggccagtaggaatggcctcaacatcaag

SEQ ID NO: 29145 - DNA, 21 bp, Artificial Sequence
  primer
agaacagcagcacaaacaagg

SEQ ID NO: 29146 - DNA, 38 bp, Artificial Sequence
  primer
gtaaaacgacggccagtgaagagcaaacattcaagccc

SEQ ID NO: 29147 - DNA, 38 bp, Artificial Sequence
  primer
gtaaaacgacggccagtgatgcatctcacaaccaccac

SEQ ID NO: 29148 - DNA, 23 bp, Artificial Sequence
  primer
tcacctggaagacagtaaaccac

SEQ ID NO: 29149 - DNA, 38 bp, Artificial Sequence
  primer
gtaaaacgacggccagtgttcctttggagtatggcagc

SEQ ID NO: 29150 - DNA, 38 bp, Artificial Sequence
  primer
gtaaaacgacggccagtcccagattatatgttggctgc

SEQ ID NO: 29151 - DNA, 42 bp, Artificial Sequence
  primer
gtaaaacgacggccagtgcctgctattgcataattctttact

SEQ ID NO: 29152 - DNA, 21 bp, Artificial Sequence
  primer
agaaaggcatgtaagggatgg

SEQ ID NO: 29153 - DNA, 19 bp, Artificial Sequence
  primer
gggcaatggagcaagactc

SEQ ID NO: 29154 - DNA, 24 bp, Artificial Sequence
  primer
tgttggacacttactgaagcagag

SEQ ID NO: 29155 - DNA, 21 bp, Artificial Sequence
  primer
ttaagcagcatttggaagagg

SEQ ID NO: 29156 - DNA, 22 bp, Artificial Sequence
  primer
gggaaagattgtatgttgaggc

SEQ ID NO: 29157 - DNA, 24 bp, Artificial Sequence
  primer
tttacatccacagtataaggcacc

SEQ ID NO: 29158 - DNA, 21 bp, Artificial Sequence
  primer
tcagaaaggcttgttctggtg

SEQ ID NO: 29159 - DNA, 38 bp, Artificial Sequence
  primer
gtaaaacgacggccagttgtctttactgtccagtgccc

SEQ ID NO: 29160 - DNA, 38 bp, Artificial Sequence
  primer
gtaaaacgacggccagttatttgtcattggcctggttg

SEQ ID NO: 29161 - DNA, 21 bp, Artificial Sequence
  primer
gcttccatgccaggcttatac

SEQ ID NO: 29162 - DNA, 38 bp, Artificial Sequence
  primer
gtaaaacgacggccagtagagtggaagctgtttcaggc

SEQ ID NO: 29163 - DNA, 38 bp, Artificial Sequence
  primer
gtaaaacgacggccagtaggtggaatgggaaagtgacc

SEQ ID NO: 29164 - DNA, 21 bp, Artificial Sequence
  primer
gaagctggaagcagaggtagg

SEQ ID NO: 29165 - DNA, 35 bp, Artificial Sequence
  primer
gtaaaacgacggccagtacctctgcccacctgctc

SEQ ID NO: 29166 - DNA, 21 bp, Artificial Sequence
  primer
ctcttcctggcctgtatcagc

SEQ ID NO: 29167 - DNA, 19 bp, Artificial Sequence
  primer
gtagcctgctacgcgcttc

SEQ ID NO: 29168 - DNA, 38 bp, Artificial Sequence
  primer
gtaaaacgacggccagttgctggatactgccgatctac

SEQ ID NO: 29169 - DNA, 38 bp, Artificial Sequence
  primer
gtaaaacgacggccagttcacatgtggcatctttgttg

SEQ ID NO: 29170 - DNA, 20 bp, Artificial Sequence
  primer
actatgatgacgtgggcctg

SEQ ID NO: 29171 - DNA, 21 bp, Artificial Sequence
  primer
tttggtgtcatcaccagcatc

SEQ ID NO: 29172 - DNA, 21 bp, Artificial Sequence
  primer
tatggccatctgctacacagg

SEQ ID NO: 29173 - DNA, 38 bp, Artificial Sequence
  primer
gtaaaacgacggccagtagctcctggcagagaggtaag

SEQ ID NO: 29174 - DNA, 21 bp, Artificial Sequence
  primer
cccacggatatagcagacacc

SEQ ID NO: 29175 - DNA, 21 bp, Artificial Sequence
  primer
gggctaggtctgtgcaagatg

SEQ ID NO: 29176 - DNA, 38 bp, Artificial Sequence
  primer
gtaaaacgacggccagtccagtttggctacatggtcag

SEQ ID NO: 29177 - DNA, 21 bp, Artificial Sequence
  primer
gttcactgctgccttaatccc

SEQ ID NO: 29178 - DNA, 21 bp, Artificial Sequence
  primer
cctctactttcctgctaccgc

SEQ ID NO: 29179 - DNA, 38 bp, Artificial Sequence
  primer
gtaaaacgacggccagttgggttcactgtggctacttg

SEQ ID NO: 29180 - DNA, 21 bp, Artificial Sequence
  primer
ccattgcagacatcctctttg

SEQ ID NO: 29181 - DNA, 21 bp, Artificial Sequence
  primer
aaatacaacacccaaggcagc

SEQ ID NO: 29182 - DNA, 21 bp, Artificial Sequence
  primer
cacaaagccatccgtgtaatc

SEQ ID NO: 29183 - DNA, 21 bp, Artificial Sequence
  primer
atctctgaaggcattgaaggg

SEQ ID NO: 29184 - DNA, 38 bp, Artificial Sequence
  primer
gtaaaacgacggccagtgtgttcaaaggcacaatctgg

SEQ ID NO: 29185 - DNA, 21 bp, Artificial Sequence
  primer
tgctctaggctaaatcccagc

SEQ ID NO: 29186 - DNA, 21 bp, Artificial Sequence
  primer
ccgatacctacctgctcaacc

SEQ ID NO: 29187 - DNA, 38 bp, Artificial Sequence
  primer
gtaaaacgacggccagtttctttgcatcagcattgacc

SEQ ID NO: 29188 - DNA, 38 bp, Artificial Sequence
  primer
gtaaaacgacggccagtgaggcctttatcaccatccag

SEQ ID NO: 29189 - DNA, 38 bp, Artificial Sequence
  primer
gtaaaacgacggccagtcaaatagtcacacccacaccg

SEQ ID NO: 29190 - DNA, 21 bp, Artificial Sequence
  primer
ccctgatatcttctcaagccc

SEQ ID NO: 29191 - DNA, 21 bp, Artificial Sequence
  primer
cttgtggtctgcaagaagctg

SEQ ID NO: 29192 - DNA, 21 bp, Artificial Sequence
  primer
tatgccctaaaggtgaggacg

SEQ ID NO: 29193 - DNA, 21 bp, Artificial Sequence
  primer
aaaccacaacaagaccaaggc

SEQ ID NO: 29194 - DNA, 38 bp, Artificial Sequence
  primer
gtaaaacgacggccagtaacccaagcagatgtcctcag

SEQ ID NO: 29195 - DNA, 21 bp, Artificial Sequence
  primer
tttcctcccacccttgtactg

SEQ ID NO: 29196 - DNA, 39 bp, Artificial Sequence
  primer
gtaaaacgacggccagttgctttaccatctgggtattgg

SEQ ID NO: 29197 - DNA, 20 bp, Artificial Sequence
  primer
ccgtttccaccaacattgac

SEQ ID NO: 29198 - DNA, 38 bp, Artificial Sequence
  primer
gtaaaacgacggccagtttcgtttacaagccagtccac

SEQ ID NO: 29199 - DNA, 38 bp, Artificial Sequence; identical to SEQ ID NO: 29194
  primer

SEQ ID NO: 29200 - DNA, 38 bp, Artificial Sequence
  primer
gtaaaacgacggccagttttcctcccacccttgtactg

SEQ ID NO: 29201 - DNA, 22 bp, Artificial Sequence
  primer
tgctttaccatctgggtattgg

SEQ ID NO: 29202 - DNA, 20 bp, Artificial Sequence
  primer
ccgtttccaccaacattgac

SEQ ID NO: 29203 - DNA, 36 bp, Artificial Sequence
  primer
gtaaaacgacggccagtgttgctaggcaacagcgtg

SEQ ID NO: 29204 - DNA, 38 bp, Artificial Sequence
  primer
gtaaaacgacggccagtgcgtgtctctctctcaaccac

SEQ ID NO: 29205 - DNA, 38 bp, Artificial Sequence
  primer
gtaaaacgacggccagtaggtccacgtcaccttctttg

SEQ ID NO: 29206 - DNA, 38 bp, Artificial Sequence
  primer
gtaaaacgacggccagtgagtggttagactgccaagcc

SEQ ID NO: 29207 - DNA, 21 bp, Artificial Sequence
  primer
tctagggttgagggctttgag

SEQ ID NO: 29208 - DNA, 21 bp, Artificial Sequence
  primer
ggagacacatggatgggagag

SEQ ID NO: 29209 - DNA, 38 bp, Artificial Sequence
  primer
gtaaaacgacggccagtgaaggaacatctgcttgaggc

SEQ ID NO: 29210 - DNA, 21 bp, Artificial Sequence
  primer
taaacctactttgggccgttg

SEQ ID NO: 29211 - DNA, 38 bp, Artificial Sequence
  primer
gtaaaacgacggccagttggctcccattaaagcatttc

SEQ ID NO: 29212 - DNA, 38 bp, Artificial Sequence
  primer
gtaaaacgacggccagttttgccatctagattggagcc

SEQ ID NO: 29213 - DNA, 38 bp, Artificial Sequence
  primer
gtaaaacgacggccagtgctgttaatgcagttcatggg

SEQ ID NO: 29214 - DNA, 21 bp, Artificial Sequence
  primer
gtcacagaaagcatcgcactc

SEQ ID NO: 29215 - DNA, 35 bp, Artificial Sequence
  primer
gtaaaacgacggccagtcgagaaggagcctgggag

SEQ ID NO: 29216 - DNA, 21 bp, Artificial Sequence
  primer
acaattgagctcctggtttcg

SEQ ID NO: 29217 - DNA, 38 bp, Artificial Sequence
  primer
gtaaaacgacggccagtagcagaggaagcattctgagg

SEQ ID NO: 29218 - DNA, 38 bp, Artificial Sequence
  primer
gtaaaacgacggccagtaagaaatcctggcctaccagc

SEQ ID NO: 29219 - DNA, 37 bp, Artificial Sequence
  primer
gtaaaacgacggccagtattgcacagaccctggagtg

SEQ ID NO: 29220 - DNA, 38 bp, Artificial Sequence
  primer
gtaaaacgacggccagtaaacactttgcttcctccagc

SEQ ID NO: 29221 - DNA, 39 bp, Artificial Sequence
  primer
gtaaaacgacggccagtgggttactaaggcaaccaggag

SEQ ID NO: 29222 - DNA, 38 bp, Artificial Sequence
  primer
gtaaaacgacggccagtgaagaaggtgcttgaagaggg

SEQ ID NO: 29223 - DNA, 21 bp, Artificial Sequence
  primer
atgggaagtttggtggaaatg

SEQ ID NO: 29224 - DNA, 21 bp, Artificial Sequence
  primer
attatgtgagactccctgccc

SEQ ID NO: 29225 - DNA, 38 bp, Artificial Sequence
  primer
gtaaaacgacggccagtccctgagccagaagcttattc

SEQ ID NO: 29226 - DNA, 22 bp, Artificial Sequence
  primer
cctacgagactggtacccacag

SEQ ID NO: 29227 - DNA, 38 bp, Artificial Sequence
  primer
gtaaaacgacggccagtgagcagctgaaggtaaggtgg

SEQ ID NO: 29228 - DNA, 21 bp, Artificial Sequence
  primer
cctgtaggaggctgtgctctg

SEQ ID NO: 29229 - DNA, 19 bp, Artificial Sequence
  primer
gcctctttgttctggagcg

SEQ ID NO: 29230 - DNA, 38 bp, Artificial Sequence
  primer
gtaaaacgacggccagtcccacttaaatgctttctccg

SEQ ID NO: 29231 - DNA, 20 bp, Artificial Sequence
  primer
ggtgatgggcacctgtaatc

SEQ ID NO: 29232 - DNA, 21 bp, Artificial Sequence
  primer
acatggtttggttacgtggtg

SEQ ID NO: 29233 - DNA, 38 bp, Artificial Sequence
  primer
gtaaaacgacggccagttttgttgaatgaggaaccctg

SEQ ID NO: 29234 - DNA, 21 bp, Artificial Sequence
  primer
gatgatgaagttggtgatggc

SEQ ID NO: 29235 - DNA, 44 bp, Artificial Sequence
  primer
gtaaaacgacggccagtttcttgattactgctgaggtttaattc

SEQ ID NO: 29236 - DNA, 21 bp, Artificial Sequence
  primer
caacagaataaggcaggttgg

SEQ ID NO: 29237 - DNA, 19 bp, Artificial Sequence
  primer
gaatcacttgaacccagcg

SEQ ID NO: 29238 - DNA, 41 bp, Artificial Sequence
  primer
gtaaaacgacggccagttgcaatcttgttctaatttgcatt

SEQ ID NO: 29239 - DNA, 40 bp, Artificial Sequence
  primer
gtaaaacgacggccagtaataatggagcctatccaagagg

SEQ ID NO: 29240 - DNA, 38 bp, Artificial Sequence
  primer
gtaaaacgacggccagtggaagacaggtcagctttcag

SEQ ID NO: 29241 - DNA, 38 bp, Artificial Sequence
  primer
gtaaaacgacggccagtttcttgcgcaaactgtaaagg

SEQ ID NO: 29242 - DNA, 40 bp, Artificial Sequence
  primer
gtaaaacgacggccagttcttcgtgagcagtaactgaagc

SEQ ID NO: 29243 - DNA, 45 bp, Artificial Sequence
  primer
gtaaaacgacggccagttgagtaaagtagttgggtgtcctaattt

SEQ ID NO: 29244 - DNA, 21 bp, Artificial Sequence
  primer
ctcacctaaagccagcagtcc

SEQ ID NO: 29245 - DNA, 21 bp, Artificial Sequence
  primer
gtagcgggttgaggtgtaagc

SEQ ID NO: 29246 - DNA, 25 bp, Artificial Sequence
  primer
gaaggaagttaacagccataaggac

SEQ ID NO: 29247 - DNA, 36 bp, Artificial Sequence
  primer
gtaaaacgacggccagtctgtgggttgttcatgccc

SEQ ID NO: 29248 - DNA, 38 bp, Artificial Sequence
  primer
gtaaaacgacggccagtggacccaagtccatgatgaag

SEQ ID NO: 29249 - DNA, 38 bp, Artificial Sequence
  primer
gtaaaacgacggccagtgcaagaagcccaagagttagg

SEQ ID NO: 29250 - DNA, 21 bp, Artificial Sequence
  primer
tgaatggccaaatgtcatacc

SEQ ID NO: 29251 - DNA, 39 bp, Artificial Sequence
  primer
gtaaaacgacggccagtggaatggacaaaggttacctcc

SEQ ID NO: 29252 - DNA, 39 bp, Artificial Sequence
  primer
gtaaaacgacggccagtgaaagatgaacatctgggaagg

SEQ ID NO: 29253 - DNA, 20 bp, Artificial Sequence
  primer
agatacgtgggagaggtggg

SEQ ID NO: 29254 - DNA, 38 bp, Artificial Sequence
  primer
gtaaaacgacggccagttagacgagggtgggtgatttg

SEQ ID NO: 29255 - DNA, 40 bp, Artificial Sequence
  primer
gtaaaacgacggccagtcccttatccctagctacagaccc

SEQ ID NO: 29256 - DNA, 21 bp, Artificial Sequence
  primer
ttctagttgccctccttggtg

SEQ ID NO: 29257 - DNA, 21 bp, Artificial Sequence
  primer
ttccctgtcccttccatactg

SEQ ID NO: 29258 - DNA, 21 bp, Artificial Sequence
  primer
ctagcctgggtgataagaggg

SEQ ID NO: 29259 - DNA, 38 bp, Artificial Sequence
  primer
gtaaaacgacggccagtttaccgttattacactgcggc

SEQ ID NO: 29260 - DNA, 20 bp, Artificial Sequence
  primer
agtttgaggccatcctggac

SEQ ID NO: 29261 - DNA, 38 bp, Artificial Sequence
  primer
gtaaaacgacggccagtattaccctgcaacaaagccac

SEQ ID NO: 29262 - DNA, 39 bp, Artificial Sequence
  primer
gtaaaacgacggccagttggtgcgattatttgaattagg

SEQ ID NO: 29263 - DNA, 38 bp, Artificial Sequence
  primer
gtaaaacgacggccagttgtgcttgctttgacattgag

SEQ ID NO: 29264 - DNA, 21 bp, Artificial Sequence
  primer
ttccctcttcatacccacacc

SEQ ID NO: 29265 - DNA, 38 bp, Artificial Sequence
  primer
gtaaaacgacggccagttcaaagagatccaggagtggg

SEQ ID NO: 29266 - DNA, 42 bp, Artificial Sequence
  primer
gtaaaacgacggccagtttgggatgtgtatcttaatccagac

SEQ ID NO: 29267 - DNA, 22 bp, Artificial Sequence
  primer
tgattggccatttaagaaacag

SEQ ID NO: 29268 - DNA, 44 bp, Artificial Sequence
  primer
gtaaaacgacggccagtcttagtgatcttgcattacactttctg

SEQ ID NO: 29269 - DNA, 38 bp, Artificial Sequence
  primer
gtaaaacgacggccagtcgatctcctcacctcgttagc

SEQ ID NO: 29270 - DNA, 21 bp, Artificial Sequence
  primer
ccattcatgatgccctatgtg

SEQ ID NO: 29271 - DNA, 36 bp, Artificial Sequence
  primer
gtaaaacgacggccagtggtgggcgcctgtagttag

SEQ ID NO: 29272 - DNA, 37 bp, Artificial Sequence
  primer
gtaaaacgacggccagttaccttgtgatccacctgcc

SEQ ID NO: 29273 - DNA, 20 bp, Artificial Sequence
  primer
ccgccgattccagaagatac

SEQ ID NO: 29274 - DNA, 38 bp, Artificial Sequence
  primer
gtaaaacgacggccagtttctcagctgtaaatgggctg

SEQ ID NO: 29275 - DNA, 21 bp, Artificial Sequence
  primer
taagagctgggtcaggaggtc

SEQ ID NO: 29276 - DNA, 38 bp, Artificial Sequence
  primer
gtaaaacgacggccagtgctgcttctttccatgatagc

SEQ ID NO: 29277 - DNA, 21 bp, Artificial Sequence
  primer
gcccatggatcacaggttaag

SEQ ID NO: 29278 - DNA, 38 bp, Artificial Sequence
  primer
gtaaaacgacggccagtaagtgagccattgcatctcac

SEQ ID NO: 29279 - DNA, 21 bp, Artificial Sequence
  primer
ttacacccaactgtgcctctc

SEQ ID NO: 29280 - DNA, 38 bp, Artificial Sequence
  primer
gtaaaacgacggccagtagatgtctcggtcaaagtggg

SEQ ID NO: 29281 - DNA, 22 bp, Artificial Sequence
  primer
tgcaggaaggaaagctagaaag

SEQ ID NO: 29282 - DNA, 41 bp, Artificial Sequence
  primer
gtaaaacgacggccagttgtataccctctgcctgtattctg

SEQ ID NO: 29283 - DNA, 36 bp, Artificial Sequence
  primer
gtaaaacgacggccagtcttcctgcttggcttccag

SEQ ID NO: 29284 - DNA, 38 bp, Artificial Sequence
  primer
gtaaaacgacggccagtgaagacccggatagttcctcc

SEQ ID NO: 29285 - DNA, 37 bp, Artificial Sequence
  primer
gtaaaacgacggccagttgggcactacacctgtcctc

SEQ ID NO: 29286 - DNA, 38 bp, Artificial Sequence
  primer
gtaaaacgacggccagtagatagcactcaaagaggccc

SEQ ID NO: 29287 - DNA, 22 bp, Artificial Sequence
  primer
cctcgtgttcaaaggtatgatg

SEQ ID NO: 29288 - DNA, 42 bp, Artificial Sequence
  primer
gtaaaacgacggccagtaaatgtaaatgacttcagctgttgc

SEQ ID NO: 29289 - DNA, 20 bp, Artificial Sequence
  primer
tggcaccactacactccatc

SEQ ID NO: 29290 - DNA, 24 bp, Artificial Sequence
  primer
tggagctcagtgaactgttaaatc

SEQ ID NO: 29291 - DNA, 38 bp, Artificial Sequence
  primer
gtaaaacgacggccagtaaggaaagtctgtggcgattc

SEQ ID NO: 29292 - DNA, 37 bp, Artificial Sequence
  primer
gtaaaacgacggccagttagctggttgatggcaaatg

SEQ ID NO: 29293 - DNA, 25 bp, Artificial Sequence
  primer
ggtttatgtgtagtaatgggaagcc

SEQ ID NO: 29294 - DNA, 37 bp, Artificial Sequence
  primer
gtaaaacgacggccagtagctgccagtggctagtgaa

SEQ ID NO: 29295 - DNA, 18 bp, Artificial Sequence
  primer
ttacaggcacctgccacc

SEQ ID NO: 29296 - DNA, 39 bp, Artificial Sequence
  primer
gtaaaacgacggccagtcatcagtgataagcaaagctgc

SEQ ID NO: 29297 - DNA, 39 bp, Artificial Sequence
  primer
gtaaaacgacggccagttctgtttagttgctcctttccc

SEQ ID NO: 29298 - DNA, 22 bp, Artificial Sequence
  primer
gaggcatgataacgtcacttcc

SEQ ID NO: 29299 - DNA, 38 bp, Artificial Sequence
  primer
gtaaaacgacggccagtgattctgtgagctgcaaatgg

SEQ ID NO: 29300 - DNA, 38 bp, Artificial Sequence
  primer
gtaaaacgacggccagttcaggcctcattacctgtcac

SEQ ID NO: 29301 - DNA, 43 bp, Artificial Sequence
  primer
gtaaaacgacggccagttgaacataataatcagacaggttggt

SEQ ID NO: 29302 - DNA, 38 bp, Artificial Sequence
  primer
gtaaaacgacggccagtgatagattgtttgggcccttg

SEQ ID NO: 29303 - DNA, 40 bp, Artificial Sequence
  primer
gtaaaacgacggccagttgtgtgtcctggaagtattgatg

SEQ ID NO: 29304 - DNA, 22 bp, Artificial Sequence
  primer
tgcaacgtttcactggaatatg

SEQ ID NO: 29305 - DNA, 39 bp, Artificial Sequence
  primer
gtaaaacgacggccagtgtaaagtggtgctgagaccaaa

SEQ ID NO: 29306 - DNA, 21 bp, Artificial Sequence
  primer
gctcaatttagccattccaca

SEQ ID NO: 29307 - DNA, 46 bp, Artificial Sequence
  primer
gtaaaacgacggccagttttacctaaatgtttgttaagagttcaga

SEQ ID NO: 29308 - DNA, 27 bp, Artificial Sequence
  primer
aattactaagctgtgcaatttatttgg

SEQ ID NO: 29309 - DNA, 22 bp, Artificial Sequence
  primer
gatgattgccatgttatggatg

SEQ ID NO: 29310 - DNA, 41 bp, Artificial Sequence
  primer
gtaaaacgacggccagtccattggatttaacaatatggagg

SEQ ID NO: 29311 - DNA, 21 bp, Artificial Sequence
  primer
gggcaacaagagtgaaactcc

SEQ ID NO: 29312 - DNA, 38 bp, Artificial Sequence
  primer
gtaaaacgacggccagtgcccaagcttctgggtatttc

SEQ ID NO: 29313 - DNA, 38 bp, Artificial Sequence
  primer
gtaaaacgacggccagttgttaagggagagatgggagc

SEQ ID NO: 29314 - DNA, 38 bp, Artificial Sequence
  primer
gtaaaacgacggccagtaggtatcctttcccttcagcc

SEQ ID NO: 29315 - DNA, 38 bp, Artificial Sequence
  primer
gtaaaacgacggccagtagtttaaatgggtagcgtgcc

SEQ ID NO: 29316 - DNA, 39 bp, Artificial Sequence
  primer
gtaaaacgacggccagttgcttaggatttgggagtgaac

SEQ ID NO: 29317 - DNA, 38 bp, Artificial Sequence
  primer
gtaaaacgacggccagtgtgaagttggagagggctgag

SEQ ID NO: 29318 - DNA, 21 bp, Artificial Sequence
  primer
ggctcacaggaatggataagc

SEQ ID NO: 29319 - DNA, 22 bp, Artificial Sequence
  primer
tccttatttgcttggactgagg

SEQ ID NO: 29320 - DNA, 38 bp, Artificial Sequence
  primer
gtaaaacgacggccagtaattggctttgagacgaggtg

SEQ ID NO: 29321 - DNA, 21 bp, Artificial Sequence
  primer
gttgggattgggtaacctgag

SEQ ID NO: 29322 - DNA, 38 bp, Artificial Sequence
  primer
gtaaaacgacggccagtaccactctttctgggctgaag

SEQ ID NO: 29323 - DNA, 21 bp, Artificial Sequence
  primer
tgccaccaagttcagagagtc

SEQ ID NO: 29324 - DNA, 38 bp, Artificial Sequence
  primer
gtaaaacgacggccagtgccacagaggttgctcttctc

SEQ ID NO: 29325 - DNA, 21 bp, Artificial Sequence
  primer
cagccctcttgtgccaaatac

SEQ ID NO: 29326 - DNA, 22 bp, Artificial Sequence
  primer
ggaagaaagaatatgggtctgc

SEQ ID NO: 29327 - DNA, 20 bp, Artificial Sequence
  primer
atcggcataaagggacttgg

SEQ ID NO: 29328 - DNA, 24 bp, Artificial Sequence
  primer
aaacatccatatgcattgggttac

SEQ ID NO: 29329 - DNA, 40 bp, Artificial Sequence
  primer
gtaaaacgacggccagtggcatgcggtaagtaaatatcag

SEQ ID NO: 29330 - DNA, 38 bp, Artificial Sequence
  primer
gtaaaacgacggccagtggagaatcaacagtttgaccg

SEQ ID NO: 29331 - DNA, 41 bp, Artificial Sequence
  primer
gtaaaacgacggccagttgccaaacctttatttcttcagtc

SEQ ID NO: 29332 - DNA, 21 bp, Artificial Sequence
  primer
cctggccttagtgttcattgc

SEQ ID NO: 29333 - DNA, 38 bp, Artificial Sequence
  primer
gtaaaacgacggccagttgttggtgctacagctcttcc

SEQ ID NO: 29334 - DNA, 21 bp, Artificial Sequence
  primer
cctgtccttgaagaaatggga

SEQ ID NO: 29335 - DNA, 25 bp, Artificial Sequence
  primer
catacaccagacactgtgcactaag

SEQ ID NO: 29336 - DNA, 38 bp, Artificial Sequence
  primer
gtaaaacgacggccagttaaacgtcttgtacccggagg

SEQ ID NO: 29337 - DNA, 39 bp, Artificial Sequence
  primer
gtaaaacgacggccagtggactgtgcttggttactttcc

SEQ ID NO: 29338 - DNA, 22 bp, Artificial Sequence
  primer
aagggagctagcaaactctgtg

SEQ ID NO: 29339 - DNA, 36 bp, Artificial Sequence
  primer
gtaaaacgacggccagtggagcctccaagtcctgtc

SEQ ID NO: 29340 - DNA, 38 bp, Artificial Sequence
  primer
gtaaaacgacggccagttcgcactaggaaatctgaggg

SEQ ID NO: 29341 - DNA, 37 bp, Artificial Sequence
  primer
gtaaaacgacggccagtatttcttgggtcttctgggc

SEQ ID NO: 29342 - DNA, 20 bp, Artificial Sequence
  primer
ggagagcaaactgcaggaag

SEQ ID NO: 29343 - DNA, 38 bp, Artificial Sequence
  primer
gtaaaacgacggccagttgcaaggcattattcctaacc

SEQ ID NO: 29344 - DNA, 19 bp, Artificial Sequence
  primer
tttgggtgaaacaaagggc

SEQ ID NO: 29345 - DNA, 18 bp, Artificial Sequence
  primer
tgacctcgtgatccaccc

SEQ ID NO: 29346 - DNA, 39 bp, Artificial Sequence
  primer
gtaaaacgacggccagtaatcaagagctttccagcattg

SEQ ID NO: 29347 - DNA, 40 bp, Artificial Sequence
  primer
gtaaaacgacggccagtggttagatggagagatttggtgg

SEQ ID NO: 29348 - DNA, 37 bp, Artificial Sequence
  primer
gtaaaacgacggccagtagagaggccactgaatctgg

SEQ ID NO: 29349 - DNA, 42 bp, Artificial Sequence
  primer
gtaaaacgacggccagttggtctttaataattgttcagcagg

SEQ ID NO: 29350 - DNA, 27 bp, Artificial Sequence
  primer
aaaggtaatgcttacaattcacttgag

SEQ ID NO: 29351 - DNA, 42 bp, Artificial Sequence
  primer
gtaaaacgacggccagtctggtttaattcaagaatttgtgtg

SEQ ID NO: 29352 - DNA, 21 bp, Artificial Sequence
  primer
cagtggtctgctattggcaag

SEQ ID NO: 29353 - DNA, 44 bp, Artificial Sequence
  primer
gtaaaacgacggccagttcaaagttgataaacatgaaggctaag

SEQ ID NO: 29354 - DNA, 38 bp, Artificial Sequence
  primer
gtaaaacgacggccagtgtcaggagtttgggagactgc

SEQ ID NO: 29355 - DNA, 39 bp, Artificial Sequence
  primer
gtaaaacgacggccagtcactggcacattatgtctctgg

SEQ ID NO: 29356 - DNA, 45 bp, Artificial Sequence
  primer
gtaaaacgacggccagtttatgaccttatgatgacctattctttg

SEQ ID NO: 29357 - DNA, 21 bp, Artificial Sequence
  primer
caatttgccgtcattcatttg

SEQ ID NO: 29358 - DNA, 22 bp, Artificial Sequence
  primer
ttggtcgaatctttgtctcatc

SEQ ID NO: 29359 - DNA, 21 bp, Artificial Sequence
  primer
caacaggtcagatgtttgtgc

SEQ ID NO: 29360 - DNA, 38 bp, Artificial Sequence
  primer
gtaaaacgacggccagtagtggaagtctctttgccacc

SEQ ID NO: 29361 - DNA, 37 bp, Artificial Sequence
  primer
gtaaaacgacggccagtccctctctgcccatatttcc

SEQ ID NO: 29362 - DNA, 21 bp, Artificial Sequence
  primer
ttgcttgctcggtgttatttg

SEQ ID NO: 29363 - DNA, 23 bp, Artificial Sequence
  primer
tgcatggcaaatctttaaatgtc

SEQ ID NO: 29364 - DNA, 43 bp, Artificial Sequence
  primer
gtaaaacgacggccagtgctagttaagtacaacttggaccaga

SEQ ID NO: 29365 - DNA, 21 bp, Artificial Sequence
  primer
gaatcagggagcattccactc

SEQ ID NO: 29366 - DNA, 40 bp, Artificial Sequence
  primer
gtaaaacgacggccagttgatatgtgagacagtgcaaagc

SEQ ID NO: 29367 - DNA, 38 bp, Artificial Sequence
  primer
gtaaaacgacggccagtttactgggtccatccaaagag

SEQ ID NO: 29368 - DNA, 38 bp, Artificial Sequence
  primer
gtaaaacgacggccagttttggaataacatttggtggg

SEQ ID NO: 29369 - DNA, 21 bp, Artificial Sequence
  primer
accctaaggcttgctgcttac

SEQ ID NO: 29370 - DNA, 39 bp, Artificial Sequence
  primer
gtaaaacgacggccagtggaccactcttggacatttcag

SEQ ID NO: 29371 - DNA, 38 bp, Artificial Sequence
  primer
gtaaaacgacggccagtataaactgtcagaggcagccg

SEQ ID NO: 29372 - DNA, 21 bp, Artificial Sequence
  primer
aaagcacttccagagcctgtc

SEQ ID NO: 29373 - DNA, 21 bp, Artificial Sequence
  primer
agctggacgatgaagatttcc

SEQ ID NO: 29374 - DNA, 21 bp, Artificial Sequence
  primer
cacaggacttgcactttccag

SEQ ID NO: 29375 - DNA, 21 bp, Artificial Sequence
  primer
agcctagacctcagccacaac

SEQ ID NO: 29376 - DNA, 38 bp, Artificial Sequence
  primer
gtaaaacgacggccagttcctatccgtctcccagtcag

SEQ ID NO: 29377 - DNA, 38 bp, Artificial Sequence
  primer
gtaaaacgacggccagtcctacaattgctgcttctggg

SEQ ID NO: 29378 - DNA, 38 bp, Artificial Sequence
  primer
gtaaaacgacggccagttctgctctgaggtgcactagg

SEQ ID NO: 29379 - DNA, 37 bp, Artificial Sequence
  primer
gtaaaacgacggccagtaggtgtgacctcagcccttc

SEQ ID NO: 29380 - DNA, 37 bp, Artificial Sequence
  primer
gtaaaacgacggccagtacaccatgaccaagcgctac

SEQ ID NO: 29381 - DNA, 37 bp, Artificial Sequence
  primer
gtaaaacgacggccagtgatgtgggcagtgagaccac

SEQ ID NO: 29382 - DNA, 21 bp, Artificial Sequence
  primer
ccaagttggagaccttcatcc

SEQ ID NO: 29383 - DNA, 38 bp, Artificial Sequence
  primer
gtaaaacgacggccagtcttggtttaccgcctcacttc

SEQ ID NO: 29384 - DNA, 40 bp, Artificial Sequence
  primer
gtaaaacgacggccagtagtgataaggagcagttacggtg

SEQ ID NO: 29385 - DNA, 38 bp, Artificial Sequence
  primer
gtaaaacgacggccagtgcaacgaattacagagggagg

SEQ ID NO: 29386 - DNA, 37 bp, Artificial Sequence
  primer
gtaaaacgacggccagtctatcacgcacgcatctcag

SEQ ID NO: 29387 - DNA, 38 bp, Artificial Sequence
  primer
gtaaaacgacggccagttcctttggttgtttcatgtgc

SEQ ID NO: 29388 - DNA, 41 bp, Artificial Sequence
  primer
gtaaaacgacggccagtcctctgaaaccatctatcttctcc

SEQ ID NO: 29389 - DNA, 22 bp, Artificial Sequence
  primer
ccatggataggactaggatggt

SEQ ID NO: 29390 - DNA, 21 bp, Artificial Sequence
  primer
aatcccaagtgtccagaggaa

SEQ ID NO: 29391 - DNA, 22 bp, Artificial Sequence
  primer
ccttccatcttgaatgatttcc

SEQ ID NO: 29392 - DNA, 24 bp, Artificial Sequence
  primer
tcaatgcatcagtatcagagaaga

SEQ ID NO: 29393 - DNA, 21 bp, Artificial Sequence
  primer
accaccttcttcaccctcatc

SEQ ID NO: 29394 - DNA, 39 bp, Artificial Sequence
  primer
gtaaaacgacggccagttctgctcaagtaagacccagaa

SEQ ID NO: 29395 - DNA, 21 bp, Artificial Sequence
  primer
cttgttgaccatccaccttcc

SEQ ID NO: 29396 - DNA, 38 bp, Artificial Sequence
  primer
gtaaaacgacggccagttgtggcctgcataggtaagac

SEQ ID NO: 29397 - DNA, 23 bp, Artificial Sequence
  primer
catcaaggtaaagggaaggagtc

SEQ ID NO: 29398 - DNA, 22 bp, Artificial Sequence
  primer
cagagcgagactctgtctcaaa

SEQ ID NO: 29399 - DNA, 22 bp, Artificial Sequence
  primer
gacaaggaaatcagaaggcttg

SEQ ID NO: 29400 - DNA, 22 bp, Artificial Sequence
  primer
ggtcagacgttctgaggatttg

SEQ ID NO: 29401 - DNA, 22 bp, Artificial Sequence
  primer
aaagacgaggtatgtttgcagc

SEQ ID NO: 29402 - DNA, 21 bp, Artificial Sequence
  primer
gcatctgctactgtgtcaggg

SEQ ID NO: 29403 - DNA, 36 bp, Artificial Sequence
  primer
gtaaaacgacggccagtgggagcgtagtctcggagg

SEQ ID NO: 29404 - DNA, 27 bp, Artificial Sequence
  primer
aatgattggaatttcttagtaaaccag

SEQ ID NO: 29405 - DNA, 21 bp, Artificial Sequence
  primer
ggagaatgacagggtttggtc

SEQ ID NO: 29406 - DNA, 21 bp, Artificial Sequence
  primer
ctcaaatgattgcaggtcagg

SEQ ID NO: 29407 - DNA, 24 bp, Artificial Sequence
  primer
tcctagtattcttgggtgcatagc

SEQ ID NO: 29408 - DNA, 38 bp, Artificial Sequence
  primer
gtaaaacgacggccagtccactttgtatccttgggtgg

SEQ ID NO: 29409 - DNA, 21 bp, Artificial Sequence
  primer
cacacaagatcatttcccgtg

SEQ ID NO: 29410 - DNA, 21 bp, Artificial Sequence
  primer
gaaagggttggaaggactctg

SEQ ID NO: 29411 - DNA, 21 bp, Artificial Sequence
  primer
agctgcttcctgtccctctac

SEQ ID NO: 29412 - DNA, 38 bp, Artificial Sequence
  primer
gtaaaacgacggccagtgccagggtatggtgatgactg

SEQ ID NO: 29413 - DNA, 37 bp, Artificial Sequence
  primer
gtaaaacgacggccagtctcagacttgcggttccttg

SEQ ID NO: 29414 - DNA, 38 bp, Artificial Sequence
  primer
gtaaaacgacggccagtctcgcaatttgaactcctgtc

SEQ ID NO: 29415 - DNA, 38 bp, Artificial Sequence
  primer
gtaaaacgacggccagtacagaatcttgagtgggtccg

SEQ ID NO: 29416 - DNA, 21 bp, Artificial Sequence
  primer
cctagacccagagtccattcg

SEQ ID NO: 29417 - DNA, 37 bp, Artificial Sequence
  primer
gtaaaacgacggccagtgtctgtggcccgaatagtgg

SEQ ID NO: 29418 - DNA, 21 bp, Artificial Sequence
  primer
aggaacctgacagtgaggagg

SEQ ID NO: 29419 - DNA, 38 bp, Artificial Sequence
  primer
gtaaaacgacggccagttgaagactccttctccaacgg

SEQ ID NO: 29420 - DNA, 21 bp, Artificial Sequence
  primer
gaggatgaagagctgacccag

SEQ ID NO: 29421 - DNA, 21 bp, Artificial Sequence
  primer
tgggtaatgctcctcaccttc

SEQ ID NO: 29422 - DNA, 38 bp, Artificial Sequence
  primer
gtaaaacgacggccagtgacccaatcatgaggaaggtg

SEQ ID NO: 29423 - DNA, 37 bp, Artificial Sequence
  primer
gtaaaacgacggccagtgaggtttgtctgttggctgc

SEQ ID NO: 29424 - DNA, 38 bp, Artificial Sequence
  primer
gtaaaacgacggccagtctctggcacctttctctctcc

SEQ ID NO: 29425 - DNA, 21 bp, Artificial Sequence
  primer
ccattatgtcaaaccctgcac

SEQ ID NO: 29426 - DNA, 25 bp, Artificial Sequence
  primer
gagaaatgggaacaatgtgtctatc

SEQ ID NO: 29427 - DNA, 38 bp, Artificial Sequence
  primer
gtaaaacgacggccagtagggaatgcagtgaaataggg

SEQ ID NO: 29428 - DNA, 21 bp, Artificial Sequence
  primer
ataggtcttgcgctttggttc

SEQ ID NO: 29429 - DNA, 21 bp, Artificial Sequence
  primer
aggaagagatttggcagttgg

SEQ ID NO: 29430 - DNA, 41 bp, Artificial Sequence
  primer
gtaaaacgacggccagttttcattcccattcttcctaattg

SEQ ID NO: 29431 - DNA, 23 bp, Artificial Sequence
  primer
tttctcaatgctcttgtttctga

SEQ ID NO: 29432 - DNA, 22 bp, Artificial Sequence
  primer
gctgtccaagcttgtaggtttc

SEQ ID NO: 29433 - DNA, 38 bp, Artificial Sequence
  primer
gtaaaacgacggccagtattggaagtaggtgggcaaag

SEQ ID NO: 29434 - DNA, 38 bp, Artificial Sequence
  primer
gtaaaacgacggccagttctatggacacttgggttgct

SEQ ID NO: 29435 - DNA, 21 bp, Artificial Sequence
  primer
cttcttagttgctgtcagcgg

SEQ ID NO: 29436 - DNA, 22 bp, Artificial Sequence
  primer
tgtggtaactggttcaccttcc

SEQ ID NO: 29437 - DNA, 22 bp, Artificial Sequence
  primer
tgcttcacttcctgatacagcc

SEQ ID NO: 29438 - DNA, 22 bp, Artificial Sequence
  primer
tgcatattcatgtggatgtgtg

SEQ ID NO: 29439 - DNA, 43 bp, Artificial Sequence
  primer
gtaaaacgacggccagttcatccaatgcatatgttaagtaagg

SEQ ID NO: 29440 - DNA, 21 bp, Artificial Sequence
  primer
gccttggtagtgatagtgccc

SEQ ID NO: 29441 - DNA, 37 bp, Artificial Sequence
  primer
gtaaaacgacggccagtgccggttgtgaaacctactg

SEQ ID NO: 29442 - DNA, 39 bp, Artificial Sequence
  primer
gtaaaacgacggccagttcctgaagctcatctcctcttg

SEQ ID NO: 29443 - DNA, 20 bp, Artificial Sequence
  primer
tttccctgaagtctgggtcc

SEQ ID NO: 29444 - DNA, 21 bp, Artificial Sequence
  primer
aggatgatatgaggcctggag

SEQ ID NO: 29445 - DNA, 38 bp, Artificial Sequence
  primer
gtaaaacgacggccagtcctcacacatgcctagaccag

SEQ ID NO: 29446 - DNA, 21 bp, Artificial Sequence
  primer
ggctttacctcccggtttaag

SEQ ID NO: 29447 - DNA, 38 bp, Artificial Sequence
  primer
gtaaaacgacggccagtcagcagagggagaggtttgtc

SEQ ID NO: 29448 - DNA, 22 bp, Artificial Sequence
  primer
ctgtctctcatctctgggttcc

SEQ ID NO: 29449 - DNA, 39 bp, Artificial Sequence
  primer
gtaaaacgacggccagtagtctccatatgatttcccagc

SEQ ID NO: 29450 - DNA, 21 bp, Artificial Sequence
  primer
aaggcacctgagtctctgagc

SEQ ID NO: 29451 - DNA, 38 bp, Artificial Sequence
  primer
gtaaaacgacggccagtaattctaggaaggtcccaccc

SEQ ID NO: 29452 - DNA, 36 bp, Artificial Sequence
  primer
gtaaaacgacggccagtacgtggttaagctctcggg

SEQ ID NO: 29453 - DNA, 42 bp, Artificial Sequence
  primer
gtaaaacgacggccagtttccaaaggtaagcataagagtcaa

SEQ ID NO: 29454 - DNA, 21 bp, Artificial Sequence
  primer
gtccctaactgactccatccc

SEQ ID NO: 29455 - DNA, 21 bp, Artificial Sequence
  primer
tctgtgagcctgggagttatg

SEQ ID NO: 29456 - DNA, 37 bp, Artificial Sequence
  primer
gtaaaacgacggccagtcatggcgccttgcatataaa

SEQ ID NO: 29457 - DNA, 19 bp, Artificial Sequence
  primer
acacagacagcctccgctc

SEQ ID NO: 29458 - DNA, 21 bp, Artificial Sequence
  primer
ttccctcctcatatcctgagc

SEQ ID NO: 29459 - DNA, 21 bp, Artificial Sequence
  primer
tttctctggcatcacgtagga

SEQ ID NO: 29460 - DNA, 21 bp, Artificial Sequence
  primer
tgccatgctatctttctagcc

SEQ ID NO: 29461 - DNA, 45 bp, Artificial Sequence
  primer
gtaaaacgacggccagttgcgataagtttaaagctcttattacac

SEQ ID NO: 29462 - DNA, 20 bp, Artificial Sequence
  primer
ccctcacaccatactgggtc

SEQ ID NO: 29463 - DNA, 20 bp, Artificial Sequence
  primer
gggctagaaggaagggagtg

SEQ ID NO: 29464 - DNA, 21 bp, Artificial Sequence
  primer
ggcttaaagcaggactatgcc

SEQ ID NO: 29465 - DNA, 38 bp, Artificial Sequence
  primer
gtaaaacgacggccagtttgtggagggatactggcttc

SEQ ID NO: 29466 - DNA, 46 bp, Artificial Sequence
  primer
gtaaaacgacggccagttcaccaacaaagttatgttctagtgtaac

SEQ ID NO: 29467 - DNA, 38 bp, Artificial Sequence
  primer
gtaaaacgacggccagttcaccagatttgtgacggaaa

SEQ ID NO: 29468 - DNA, 38 bp, Artificial Sequence
  primer
gtaaaacgacggccagtttccagattggcatgtttcac

SEQ ID NO: 29469 - DNA, 42 bp, Artificial Sequence
  primer
gtaaaacgacggccagtgggatattaaccacgagcagtattc

SEQ ID NO: 29470 - DNA, 25 bp, Artificial Sequence
  primer
gaaatactaaagctatgggcaactg

SEQ ID NO: 29471 - DNA, 21 bp, Artificial Sequence
  primer
tgttgtgggagaagcaatgag

SEQ ID NO: 29472 - DNA, 42 bp, Artificial Sequence
  primer
gtaaaacgacggccagttttcctctaatgatggcataacttc

SEQ ID NO: 29473 - DNA, 26 bp, Artificial Sequence
  primer
aatatttctggaataagatcagcaaa

SEQ ID NO: 29474 - DNA, 24 bp, Artificial Sequence
  primer
catcaccagatttgtgactgaaac

SEQ ID NO: 29475 - DNA, 41 bp, Artificial Sequence
  primer
gtaaaacgacggccagtcaaacatggttcctaaactctgtc

SEQ ID NO: 29476 - DNA, 37 bp, Artificial Sequence
  primer
gtaaaacgacggccagtagcaattgttgccacagagg

SEQ ID NO: 29477 - DNA, 38 bp, Artificial Sequence
  primer
gtaaaacgacggccagtctgaggatgggagtaagccag

SEQ ID NO: 29478 - DNA, 21 bp, Artificial Sequence
  primer
gcactcaggatgactgtggag

SEQ ID NO: 29479 - DNA, 21 bp, Artificial Sequence
  primer
aatgaatgattggagggttgg

SEQ ID NO: 29480 - DNA, 38 bp, Artificial Sequence
  primer
gtaaaacgacggccagtctccatttgctgctgtctctg

SEQ ID NO: 29481 - DNA, 22 bp, Artificial Sequence
  primer
ggtgaagaacacccagagacag

SEQ ID NO: 29482 - DNA, 38 bp, Artificial Sequence
  primer
gtaaaacgacggccagttgctatgccattccctaggac

SEQ ID NO: 29483 - DNA, 38 bp, Artificial Sequence
  primer
gtaaaacgacggccagtttggatgacagatccctaccc

SEQ ID NO: 29484 - DNA, 38 bp, Artificial Sequence
  primer
gtaaaacgacggccagtactccaaggaaccaagactgc

SEQ ID NO: 29485 - DNA, 21 bp, Artificial Sequence
  primer
ggatttagaccaggctctccc

SEQ ID NO: 29486 - DNA, 21 bp, Artificial Sequence
  primer
gaagaatctggctctccttgg

SEQ ID NO: 29487 - DNA, 21 bp, Artificial Sequence
  primer
gcgatctaccagaacctgacc

SEQ ID NO: 29488 - DNA, 38 bp, Artificial Sequence
  primer
gtaaaacgacggccagttcctagtctggaggagatggg

SEQ ID NO: 29489 - DNA, 38 bp, Artificial Sequence
  primer
gtaaaacgacggccagtgagagggactcagacacgagg

SEQ ID NO: 29490 - DNA, 38 bp, Artificial Sequence
  primer
gtaaaacgacggccagtaggcatcaagatgacagaagg

SEQ ID NO: 29491 - DNA, 38 bp, Artificial Sequence
  primer
gtaaaacgacggccagtagccacgtggaagaagtaagc

SEQ ID NO: 29492 - DNA, 20 bp, Artificial Sequence
  primer
tgcatcctgctgtctttgtg

SEQ ID NO: 29493 - DNA, 21 bp, Artificial Sequence
  primer
agcaccctgaaaccctctacg

SEQ ID NO: 29494 - DNA, 38 bp, Artificial Sequence
  primer
gtaaaacgacggccagtttgggacaggacatctaaagc

SEQ ID NO: 29495 - DNA, 37 bp, Artificial Sequence
  primer
gtaaaacgacggccagtaagcactttccacaccctcc

SEQ ID NO: 29496 - DNA, 37 bp, Artificial Sequence
  primer
gtaaaacgacggccagtgggaaggtcggaagaagtgt

SEQ ID NO: 29497 - DNA, 21 bp, Artificial Sequence
  primer
aggtagcgggagaagaggaag

SEQ ID NO: 29498 - DNA, 21 bp, Artificial Sequence
  primer
acagaattgagggacaggagc

SEQ ID NO: 29499 - DNA, 38 bp, Artificial Sequence
  primer
gtaaaacgacggccagttgaagtgctgtgtgagtgagg

SEQ ID NO: 29500 - DNA, 21 bp, Artificial Sequence
  primer
gttgtcaccctcttcctctgc

SEQ ID NO: 29501 - DNA, 37 bp, Artificial Sequence
  primer
gtaaaacgacggccagtccagttgctccatctcgaag

SEQ ID NO: 29502 - DNA, 21 bp, Artificial Sequence
  primer
cagactgtgaagctgagtggg

SEQ ID NO: 29503 - DNA, 21 bp, Artificial Sequence
  primer
gctcctactgtgagctttggg

SEQ ID NO: 29504 - DNA, 38 bp, Artificial Sequence
  primer
gtaaaacgacggccagtgtttcctgacacgaggacacc

SEQ ID NO: 29505 - DNA, 20 bp, Artificial Sequence
  primer
aggaaactgcattgtgctgg

SEQ ID NO: 29506 - DNA, 40 bp, Artificial Sequence
  primer
gtaaaacgacggccagttctcaatgcactaggtcttcaaa

SEQ ID NO: 29507 - DNA, 21 bp, Artificial Sequence
  primer
gaggtcattcacaacggaaga

SEQ ID NO: 29508 - DNA, 18 bp, Artificial Sequence
  primer
tttggcaaacgcatgctc

SEQ ID NO: 29509 - DNA, 21 bp, Artificial Sequence
  primer
tgggagcaatttggagaagac

SEQ ID NO: 29510 - DNA, 39 bp, Artificial Sequence
  primer
gtaaaacgacggccagtgaaacttgtcccatatcatgcc

SEQ ID NO: 29511 - DNA, 21 bp, Artificial Sequence
  primer
ggtaagcttcaccagtttggc

SEQ ID NO: 29512 - DNA, 39 bp, Artificial Sequence
  primer
gtaaaacgacggccagtcttaagggaagtcacatccagc

SEQ ID NO: 29513 - DNA, 38 bp, Artificial Sequence
  primer
gtaaaacgacggccagtccaggactgttcatactgccc

SEQ ID NO: 29514 - DNA, 38 bp, Artificial Sequence
  primer
gtaaaacgacggccagtgcaatcagccacaacacagag

SEQ ID NO: 29515 - DNA, 38 bp, Artificial Sequence
  primer
gtaaaacgacggccagtgaggtgggacctgttagaagc

SEQ ID NO: 29516 - DNA, 21 bp, Artificial Sequence
  primer
tcctgtctcttcccatcttgg

SEQ ID NO: 29517 - DNA, 38 bp, Artificial Sequence
  primer
gtaaaacgacggccagtgcgagactagcactcaggttg

SEQ ID NO: 29518 - DNA, 38 bp, Artificial Sequence
  primer
gtaaaacgacggccagttccctggagaccataaacacc

SEQ ID NO: 29519 - DNA, 38 bp, Artificial Sequence
  primer
gtaaaacgacggccagttggcaagtcatacctcacagg

SEQ ID NO: 29520 - DNA, 38 bp, Artificial Sequence
  primer
gtaaaacgacggccagtcactccttacaaggcctgagc

SEQ ID NO: 29521 - DNA, 20 bp, Artificial Sequence
  primer
agctgctacgctctcttccc

SEQ ID NO: 29522 - DNA, 18 bp, Artificial Sequence
  primer
gtgtggacagcctggtgg

SEQ ID NO: 29523 - DNA, 37 bp, Artificial Sequence
  primer
gtaaaacgacggccagtgacacggctttcaccaactg

SEQ ID NO: 29524 - DNA, 35 bp, Artificial Sequence
  primer
gtaaaacgacggccagtgctgtcgacggctacctg

SEQ ID NO: 29525 - DNA, 38 bp, Artificial Sequence
  primer
gtaaaacgacggccagttccacagagtttgagtggctg

SEQ ID NO: 29526 - DNA, 21 bp, Artificial Sequence
  primer
gaacacgaatgtgtggaggag

SEQ ID NO: 29527 - DNA, 38 bp, Artificial Sequence
  primer
gtaaaacgacggccagttggtggcttcgagtgttattg

SEQ ID NO: 29528 - DNA, 21 bp, Artificial Sequence
  primer
gatcctgtggatggagcctac

SEQ ID NO: 29529 - DNA, 38 bp, Artificial Sequence
  primer
gtaaaacgacggccagttctcaaccaaatatccggagc

SEQ ID NO: 29530 - DNA, 38 bp, Artificial Sequence
  primer
gtaaaacgacggccagtagcttcccattatcccaactg

SEQ ID NO: 29531 - DNA, 37 bp, Artificial Sequence
  primer
gtaaaacgacggccagtacctcacccatcagccctac

SEQ ID NO: 29532 - DNA, 37 bp, Artificial Sequence
  primer
gtaaaacgacggccagtgccttgatcatgtgccctaa

SEQ ID NO: 29533 - DNA, 38 bp, Artificial Sequence
  primer
gtaaaacgacggccagtgctgtggtgctcaatgctaac

SEQ ID NO: 29534 - DNA, 21 bp, Artificial Sequence
  primer
gacaatgcggtcaaccttagc

SEQ ID NO: 29535 - DNA, 38 bp, Artificial Sequence
  primer
gtaaaacgacggccagtaccagatcatggtcagtggtg

SEQ ID NO: 29536 - DNA, 21 bp, Artificial Sequence
  primer
ttacccaagtccaaggtgctc

SEQ ID NO: 29537 - DNA, 20 bp, Artificial Sequence
  primer
cgcgctgaagagactggtag

SEQ ID NO: 29538 - DNA, 27 bp, Artificial Sequence
  primer
tgtctttgtggtattaaatattgttgc

SEQ ID NO: 29539 - DNA, 21 bp, Artificial Sequence
  primer
agcagagcaaaggttggaaac

SEQ ID NO: 29540 - DNA, 39 bp, Artificial Sequence
  primer
gtaaaacgacggccagtaaccagggctgattgtgattag

SEQ ID NO: 29541 - DNA, 41 bp, Artificial Sequence
  primer
gtaaaacgacggccagtaattgtcattgtaaatgtgcgaag

SEQ ID NO: 29542 - DNA, 39 bp, Artificial Sequence
  primer
gtaaaacgacggccagtttgcataaattgcatcttgctc

SEQ ID NO: 29543 - DNA, 23 bp, Artificial Sequence
  primer
ggaaagctgggtaactgtaaatg

SEQ ID NO: 29544 - DNA, 21 bp, Artificial Sequence
  primer
tgtgcctggaacatcacaaac

SEQ ID NO: 29545 - DNA, 19 bp, Artificial Sequence
  primer
ctggccaacagagcaacac

SEQ ID NO: 29546 - DNA, 41 bp, Artificial Sequence
  primer
gtaaaacgacggccagtttgaatgaagaggagagacatttg

SEQ ID NO: 29547 - DNA, 21 bp, Artificial Sequence
  primer
aaattgagcctggtaattccg

SEQ ID NO: 29548 - DNA, 38 bp, Artificial Sequence
  primer
gtaaaacgacggccagttcatgtctgcctctgtcacac

SEQ ID NO: 29549 - DNA, 42 bp, Artificial Sequence
  primer
gtaaaacgacggccagtgtaatcggtattaggccatacaatc

SEQ ID NO: 29550 - DNA, 22 bp, Artificial Sequence
  primer
gcacaggtcaatttgtgagttc

SEQ ID NO: 29551 - DNA, 39 bp, Artificial Sequence
  primer
gtaaaacgacggccagtggatatcagcaacagtagcagc

SEQ ID NO: 29552 - DNA, 22 bp, Artificial Sequence
  primer
ccagttgtgaacatcaaattgc

SEQ ID NO: 29553 - DNA, 40 bp, Artificial Sequence
  primer
gtaaaacgacggccagtctgctctgaatttgcttgatttc

SEQ ID NO: 29554 - DNA, 40 bp, Artificial Sequence
  primer
gtaaaacgacggccagtattcaaccaaattatagcatggg

SEQ ID NO: 29555 - DNA, 38 bp, Artificial Sequence
  primer
gtaaaacgacggccagtcgctcccaaactgtacctgtc

SEQ ID NO: 29556 - DNA, 38 bp, Artificial Sequence
  primer
gtaaaacgacggccagtgttctctgaggaatgggttgg

SEQ ID NO: 29557 - DNA, 21 bp, Artificial Sequence
  primer
cccaagaatacactctgctgg

SEQ ID NO: 29558 - DNA, 38 bp, Artificial Sequence
  primer
gtaaaacgacggccagtttcggatcacaccctttaacc

SEQ ID NO: 29559 - DNA, 38 bp, Artificial Sequence
  primer
gtaaaacgacggccagttgggaaatcactccatcttcc

SEQ ID NO: 29560 - DNA, 38 bp, Artificial Sequence
  primer
gtaaaacgacggccagtctacccagagaggaggtgagc

SEQ ID NO: 29561 - DNA, 38 bp, Artificial Sequence
  primer
gtaaaacgacggccagtatgcaggtgagctgctttctc

SEQ ID NO: 29562 - DNA, 38 bp, Artificial Sequence
  primer
gtaaaacgacggccagtacgtgccgtttctagggagtc

SEQ ID NO: 29563 - DNA, 19 bp, Artificial Sequence
  primer
ggtggacaaggcctctctg

SEQ ID NO: 29564 - DNA, 38 bp, Artificial Sequence
  primer
gtaaaacgacggccagtccttagtgggcagtttgtgtg

SEQ ID NO: 29565 - DNA, 21 bp, Artificial Sequence
  primer
agtgagccatgatcaccactg

SEQ ID NO: 29566 - DNA, 37 bp, Artificial Sequence
  primer
gtaaaacgacggccagtcaggcctgaagggataggtc

SEQ ID NO: 29567 - DNA, 38 bp, Artificial Sequence
  primer
gtaaaacgacggccagtgctcagagcatagaggaaggg

SEQ ID NO: 29568 - DNA, 20 bp, Artificial Sequence
  primer
cctccctcctccatcctatg

SEQ ID NO: 29569 - DNA, 21 bp, Artificial Sequence
  primer
tctccctgagcttcctgtacc

SEQ ID NO: 29570 - DNA, 18 bp, Artificial Sequence
  primer
attgccttctccacacgc

SEQ ID NO: 29571 - DNA, 38 bp, Artificial Sequence
  primer
gtaaaacgacggccagtagcacatcattggtgaccttg

SEQ ID NO: 29572 - DNA, 38 bp, Artificial Sequence
  primer
gtaaaacgacggccagtgtcacaggattgggacacaag

SEQ ID NO: 29573 - DNA, 38 bp, Artificial Sequence
  primer
gtaaaacgacggccagtattaaactcgcacgcgagaag

SEQ ID NO: 29574 - DNA, 38 bp, Artificial Sequence
  primer
gtaaaacgacggccagtaggaaattgcctttgtgtgtg

SEQ ID NO: 29575 - DNA, 22 bp, Artificial Sequence
  primer
agccaagacatgtccctgtaac

SEQ ID NO: 29576 - DNA, 39 bp, Artificial Sequence
  primer
gtaaaacgacggccagtttccacctttaatcctacaccc

SEQ ID NO: 29577 - DNA, 41 bp, Artificial Sequence
  primer
gtaaaacgacggccagtcagagacaactaatgaggcaaaga

SEQ ID NO: 29578 - DNA, 39 bp, Artificial Sequence
  primer
gtaaaacgacggccagttgtgggaaattctcaacacaga

SEQ ID NO: 29579 - DNA, 21 bp, Artificial Sequence
  primer
tcaactgatctggtcactggg

SEQ ID NO: 29580 - DNA, 38 bp, Artificial Sequence
  primer
gtaaaacgacggccagtcgccagtgtggttcctatatc

SEQ ID NO: 29581 - DNA, 38 bp, Artificial Sequence
  primer
gtaaaacgacggccagtcagctgttcttagagggtggg

SEQ ID NO: 29582 - DNA, 21 bp, Artificial Sequence
  primer
tggttggttgaggataaaccc

SEQ ID NO: 29583 - DNA, 21 bp, Artificial Sequence
  primer
ccatgtgtatggagcttggtg

SEQ ID NO: 29584 - DNA, 21 bp, Artificial Sequence
  primer
gtactgatccaggctctggtg

SEQ ID NO: 29585 - DNA, 21 bp, Artificial Sequence
  primer
atggatccaaatttctggctg

SEQ ID NO: 29586 - DNA, 38 bp, Artificial Sequence
  primer
gtaaaacgacggccagtggttgatcttctctcaggccc

SEQ ID NO: 29587 - DNA, 21 bp, Artificial Sequence
  primer
tgtcccttctgcatttctgtg

SEQ ID NO: 29588 - DNA, 21 bp, Artificial Sequence
  primer
tgatgggtgggaagatctagg

SEQ ID NO: 29589 - DNA, 38 bp, Artificial Sequence
  primer
gtaaaacgacggccagtaaagtccctcattccaggctc

SEQ ID NO: 29590 - DNA, 38 bp, Artificial Sequence
  primer
gtaaaacgacggccagttcattgaccctctttgccttc

SEQ ID NO: 29591 - DNA, 38 bp, Artificial Sequence
  primer
gtaaaacgacggccagtgggcttgaatgatcagacctc

SEQ ID NO: 29592 - DNA, 38 bp, Artificial Sequence
  primer
gtaaaacgacggccagtatgctggcagtgtgacttcag

SEQ ID NO: 29593 - DNA, 36 bp, Artificial Sequence
  primer
gtaaaacgacggccagtggacgatccctgagtcctg

SEQ ID NO: 29594 - DNA, 18 bp, Artificial Sequence
  primer
gacgaccgccgctacttc

SEQ ID NO: 29595 - DNA, 20 bp, Artificial Sequence
  primer
attcctcccttctgaccagc

SEQ ID NO: 29596 - DNA, 21 bp, Artificial Sequence
  primer
tcacaccctgctagtctgctg

SEQ ID NO: 29597 - DNA, 38 bp, Artificial Sequence
  primer
gtaaaacgacggccagtgctggcatatagtttgggcag

SEQ ID NO: 29598 - DNA, 20 bp, Artificial Sequence
  primer
aacccagcctccctcctaac

SEQ ID NO: 29599 - DNA, 39 bp, Artificial Sequence
  primer
gtaaaacgacggccagtgaagtcaggaaattgcatcagg

SEQ ID NO: 29600 - DNA, 21 bp, Artificial Sequence
  primer
agggatgggacacgaagtaac

SEQ ID NO: 29601 - DNA, 38 bp, Artificial Sequence
  primer
gtaaaacgacggccagtccatccaagccagtgtttacc

SEQ ID NO: 29602 - DNA, 22 bp, Artificial Sequence
  primer
gagactctgggtgcagtttagg

SEQ ID NO: 29603 - DNA, 38 bp, Artificial Sequence
  primer
gtaaaacgacggccagtttctagaacagcatgggaggg

SEQ ID NO: 29604 - DNA, 37 bp, Artificial Sequence
  primer
gtaaaacgacggccagtagtcacacacagagggctgg

SEQ ID NO: 29605 - DNA, 36 bp, Artificial Sequence
  primer
gtaaaacgacggccagtctccctccgatccttcctc

SEQ ID NO: 29606 - DNA, 38 bp, Artificial Sequence
  primer
gtaaaacgacggccagtaggctgaggtctgaatcttgg

SEQ ID NO: 29607 - DNA, 40 bp, Artificial Sequence
  primer
gtaaaacgacggccagtgcatttgtttatttagaacgggc

SEQ ID NO: 29608 - DNA, 38 bp, Artificial Sequence
  primer
gtaaaacgacggccagttcaaggctgcaaacaatcttc

SEQ ID NO: 29609 - DNA, 21 bp, Artificial Sequence
  primer
gtttgctagagaccctggctg

SEQ ID NO: 29610 - DNA, 38 bp, Artificial Sequence
  primer
gtaaaacgacggccagtggcaggatctggcagtaattt

SEQ ID NO: 29611 - DNA, 24 bp, Artificial Sequence
  primer
cttctttgtcacagcatctagcac

SEQ ID NO: 29612 - DNA, 40 bp, Artificial Sequence
  primer
gtaaaacgacggccagtggcatcaggtacattgcaataag

SEQ ID NO: 29613 - DNA, 36 bp, Artificial Sequence
  primer
gtaaaacgacggccagtatgcctggccggttatttc

SEQ ID NO: 29614 - DNA, 22 bp, Artificial Sequence
  primer
ttcatgcttggctattgagttt

SEQ ID NO: 29615 - DNA, 25 bp, Artificial Sequence
  primer
gaaatcaactgacataattcttccc

SEQ ID NO: 29616 - DNA, 24 bp, Artificial Sequence
  primer
ttgggcaaataaattgtgtgtatc

SEQ ID NO: 29617 - DNA, 25 bp, Artificial Sequence
  primer
tgttagctgcccaaatatttctatg

SEQ ID NO: 29618 - DNA, 39 bp, Artificial Sequence
  primer
gtaaaacgacggccagtggtgataggcaattgaagggtt

SEQ ID NO: 29619 - DNA, 20 bp, Artificial Sequence
  primer
cttacatgaagcgggagtgg

SEQ ID NO: 29620 - DNA, 38 bp, Artificial Sequence
  primer
gtaaaacgacggccagttaggtgaagatgtcagcccag

SEQ ID NO: 29621 - DNA, 36 bp, Artificial Sequence
  primer
gtaaaacgacggccagtgctgcctaggtgggaaatg

SEQ ID NO: 29622 - DNA, 21 bp, Artificial Sequence
  primer
gccatctcaggaatcttcacc

SEQ ID NO: 29623 - DNA, 38 bp, Artificial Sequence
  primer
gtaaaacgacggccagtgtaaggatttgagactggccc

SEQ ID NO: 29624 - DNA, 38 bp, Artificial Sequence
  primer
gtaaaacgacggccagtgacctgacctcatacccatca

SEQ ID NO: 29625 - DNA, 21 bp, Artificial Sequence
  primer
ggagactagagtgccctggtg

SEQ ID NO: 29626 - DNA, 38 bp, Artificial Sequence
  primer
gtaaaacgacggccagtacttgtagcagctattcccgc

SEQ ID NO: 29627 - DNA, 36 bp, Artificial Sequence
  primer
gtaaaacgacggccagtccagccagcctctctcttg

SEQ ID NO: 29628 - DNA, 23 bp, Artificial Sequence
  primer
ccctggtagactgcatgttagac

SEQ ID NO: 29629 - DNA, 21 bp, Artificial Sequence
  primer
tcctgcacacagaaatcattg

SEQ ID NO: 29630 - DNA, 21 bp, Artificial Sequence
  primer
atgactgaacagccagggaag

SEQ ID NO: 29631 - DNA, 21 bp, Artificial Sequence
  primer
gtagacctgacattcctgggc

SEQ ID NO: 29632 - DNA, 21 bp, Artificial Sequence
  primer
gtcctagccagtgcctttctg

SEQ ID NO: 29633 - DNA, 38 bp, Artificial Sequence
  primer
gtaaaacgacggccagttgcttgacacttcagctctcc

SEQ ID NO: 29634 - DNA, 21 bp, Artificial Sequence
  primer
tggatgctaagtggtctgtgc

SEQ ID NO: 29635 - DNA, 38 bp, Artificial Sequence
  primer
gtaaaacgacggccagtctcctctttccggtacctgtg

SEQ ID NO: 29636 - DNA, 38 bp, Artificial Sequence
  primer
gtaaaacgacggccagtggaagccataaactgtcctgg

SEQ ID NO: 29637 - DNA, 38 bp, Artificial Sequence
  primer
gtaaaacgacggccagttctaagggttgccctaggagg

SEQ ID NO: 29638 - DNA, 22 bp, Artificial Sequence
  primer
gctgggagttactcttgcaatc

SEQ ID NO: 29639 - DNA, 38 bp, Artificial Sequence
  primer
gtaaaacgacggccagtgagttcattgctgggtgtgac

SEQ ID NO: 29640 - DNA, 20 bp, Artificial Sequence
  primer
ggttcagaaaccctcctccc

SEQ ID NO: 29641 - DNA, 21 bp, Artificial Sequence
  primer
tgcttccttcctctatttccc

SEQ ID NO: 29642 - DNA, 38 bp, Artificial Sequence
  primer
gtaaaacgacggccagtgttgagggaagagtcccaacc

SEQ ID NO: 29643 - DNA, 38 bp, Artificial Sequence
  primer
gtaaaacgacggccagtaggctaagcatgaacctcacc

SEQ ID NO: 29644 - DNA, 38 bp, Artificial Sequence
  primer
gtaaaacgacggccagtagatgacttcctgcatttggg

SEQ ID NO: 29645 - DNA, 20 bp, Artificial Sequence
  primer
gccaccactctttgcttgtc

SEQ ID NO: 29646 - DNA, 38 bp, Artificial Sequence
  primer
gtaaaacgacggccagtctatctgggtctcactggcac

SEQ ID NO: 29647 - DNA, 21 bp, Artificial Sequence
  primer
accagctcaagtctcctaccg

SEQ ID NO: 29648 - DNA, 38 bp, Artificial Sequence
  primer
gtaaaacgacggccagttctgggttcttgccttctctc

SEQ ID NO: 29649 - DNA, 21 bp, Artificial Sequence
  primer
caacggttagaaacaccctcc

SEQ ID NO: 29650 - DNA, 36 bp, Artificial Sequence
  primer
gtaaaacgacggccagtctggtatgcagaagcaggg

SEQ ID NO: 29651 - DNA, 21 bp, Artificial Sequence
  primer
attattgcagacaggcaggag

SEQ ID NO: 29652 - DNA, 21 bp, Artificial Sequence
  primer
cctcaagagtgagcattgtcc

SEQ ID NO: 29653 - DNA, 21 bp, Artificial Sequence
  primer
cctcaggaccatgaagtaccc

SEQ ID NO: 29654 - DNA, 37 bp, Artificial Sequence
  primer
gtaaaacgacggccagtccacagtcctccacttcctg

SEQ ID NO: 29655 - DNA, 38 bp, Artificial Sequence
  primer
gtaaaacgacggccagttggtcagtcagtcctagtgcc

SEQ ID NO: 29656 - DNA, 21 bp, Artificial Sequence
  primer
cagcattgttagttgccaagg

SEQ ID NO: 29657 - DNA, 38 bp, Artificial Sequence
  primer
gtaaaacgacggccagtcagagagggaaaccacactcc

SEQ ID NO: 29658 - DNA, 38 bp, Artificial Sequence
  primer
gtaaaacgacggccagtaggtttggagccttgattgtg

SEQ ID NO: 29659 - DNA, 38 bp, Artificial Sequence
  primer
gtaaaacgacggccagtctgaggatccttctctcccag

SEQ ID NO: 29660 - DNA, 21 bp, Artificial Sequence
  primer
ctaccaacgaagctgttgcag

SEQ ID NO: 29661 - DNA, 38 bp, Artificial Sequence
  primer
gtaaaacgacggccagtgagggagaggttgtgtatcgc

SEQ ID NO: 29662 - DNA, 37 bp, Artificial Sequence
  primer
gtaaaacgacggccagtgaggaaaggcaaaggtggag

SEQ ID NO: 29663 - DNA, 21 bp, Artificial Sequence
  primer
tgatatcagaagagccgtggg

SEQ ID NO: 29664 - DNA, 22 bp, Artificial Sequence
  primer
tggagagatgttgttggtttcc

SEQ ID NO: 29665 - DNA, 18 bp, Artificial Sequence
  primer
ctgcctccacatgccaac

SEQ ID NO: 29666 - DNA, 38 bp, Artificial Sequence
  primer
gtaaaacgacggccagttaagcagtggagctgggattc

SEQ ID NO: 29667 - DNA, 21 bp, Artificial Sequence
  primer
agccagaccacagcttctctc

SEQ ID NO: 29668 - DNA, 38 bp, Artificial Sequence
  primer
gtaaaacgacggccagtcctctgcccactcgtaagttc

SEQ ID NO: 29669 - DNA, 38 bp, Artificial Sequence
  primer
gtaaaacgacggccagttgtggtggagaggatagaggg

SEQ ID NO: 29670 - DNA, 21 bp, Artificial Sequence
  primer
caagatgcgtccctaaactcc

SEQ ID NO: 29671 - DNA, 38 bp, Artificial Sequence
  primer
gtaaaacgacggccagttgccaaatatcatgcaggttc

SEQ ID NO: 29672 - DNA, 38 bp, Artificial Sequence
  primer
gtaaaacgacggccagttaaagcctggcctgatcattg

SEQ ID NO: 29673 - DNA, 38 bp, Artificial Sequence
  primer
gtaaaacgacggccagtaggaagaaagagcaggcaatg

SEQ ID NO: 29674 - DNA, 37 bp, Artificial Sequence
  primer
gtaaaacgacggccagtgaagggcaatgggagaagtc

SEQ ID NO: 29675 - DNA, 20 bp, Artificial Sequence
  primer
tgtgtgctcagtgaacctgg

SEQ ID NO: 29676 - DNA, 38 bp, Artificial Sequence
  primer
gtaaaacgacggccagtacaagtcacagcaggttgagg

SEQ ID NO: 29677 - DNA, 21 bp, Artificial Sequence
  primer
tcatcttcgggatcctgtttg

SEQ ID NO: 29678 - DNA, 19 bp, Artificial Sequence
  primer
aaatgggtgggagcaaatg

SEQ ID NO: 29679 - DNA, 21 bp, Artificial Sequence
  primer
tcatcttcgggatcctgtttg

SEQ ID NO: 29680 - DNA, 38 bp, Artificial Sequence
  primer
gtaaaacgacggccagtgtggccactttgacagtcttc

SEQ ID NO: 29681 - DNA, 38 bp, Artificial Sequence
  primer
gtaaaacgacggccagtatgccgtggaaatgaatgtag

SEQ ID NO: 29682 - DNA, 38 bp, Artificial Sequence
  primer
gtaaaacgacggccagtctggagagagcactggaatgg

SEQ ID NO: 29683 - DNA, 38 bp, Artificial Sequence
  primer
gtaaaacgacggccagttttccttcagtgggagagatg

SEQ ID NO: 29684 - DNA, 21 bp, Artificial Sequence
  primer
gcctagattggaacatggctc

SEQ ID NO: 29685 - DNA, 21 bp, Artificial Sequence
  primer
acaccatgagcaacaacttgg

SEQ ID NO: 29686 - DNA, 38 bp, Artificial Sequence
  primer
gtaaaacgacggccagttccctccgtcttaggtcactg

SEQ ID NO: 29687 - DNA, 21 bp, Artificial Sequence
  primer
aagtgctgggattgtaggcat

SEQ ID NO: 29688 - DNA, 38 bp, Artificial Sequence
  primer
gtaaaacgacggccagtactgaatgaagtgttgcacgg

SEQ ID NO: 29689 - DNA, 40 bp, Artificial Sequence
  primer
gtaaaacgacggccagttcctagccaacttaggagtttcg

SEQ ID NO: 29690 - DNA, 21 bp, Artificial Sequence
  primer
agtgcatctgccactctctcc

SEQ ID NO: 29691 - DNA, 21 bp, Artificial Sequence
  primer
aaggagcatgaaccagatgac

SEQ ID NO: 29692 - DNA, 39 bp, Artificial Sequence
  primer
gtaaaacgacggccagttccattataccttctgtgcctg

SEQ ID NO: 29693 - DNA, 38 bp, Artificial Sequence
  primer
gtaaaacgacggccagtttaagctgaagtcaccctccg

SEQ ID NO: 29694 - DNA, 38 bp, Artificial Sequence
  primer
gtaaaacgacggccagtttgagagtggatgctcagagg

SEQ ID NO: 29695 - DNA, 38 bp, Artificial Sequence
  primer
gtaaaacgacggccagttatcagtggcctgtttccttg

SEQ ID NO: 29696 - DNA, 38 bp, Artificial Sequence
  primer
gtaaaacgacggccagtgtttatgcaacttccttgccc

SEQ ID NO: 29697 - DNA, 21 bp, Artificial Sequence
  primer
gccagttacttgttgtggtgc

SEQ ID NO: 29698 - DNA, 38 bp, Artificial Sequence
  primer
gtaaaacgacggccagtaattgtgtgcacaaaccttgg

SEQ ID NO: 29699 - DNA, 37 bp, Artificial Sequence
  primer
gtaaaacgacggccagtttctggagacaagcacatgg

SEQ ID NO: 29700 - DNA, 21 bp, Artificial Sequence
  primer
acattgtggacccattcaagg

SEQ ID NO: 29701 - DNA, 38 bp, Artificial Sequence
  primer
gtaaaacgacggccagtgccttaatcaaatgaggtggg

SEQ ID NO: 29702 - DNA, 21 bp, Artificial Sequence
  primer
ctattggctggacctattggc

SEQ ID NO: 29703 - DNA, 23 bp, Artificial Sequence
  primer
gatggtgctcagtaaggatgatg

SEQ ID NO: 29704 - DNA, 36 bp, Artificial Sequence
  primer
gtaaaacgacggccagtggtcggtcctgcctgtaac

SEQ ID NO: 29705 - DNA, 38 bp, Artificial Sequence
  primer
gtaaaacgacggccagttgaacaatggaaatgttgctg

SEQ ID NO: 29706 - DNA, 21 bp, Artificial Sequence
  primer
cctcctcccgtgaaacataag

SEQ ID NO: 29707 - DNA, 20 bp, Artificial Sequence
  primer
ccgtgacgttatccatttgc

SEQ ID NO: 29708 - DNA, 41 bp, Artificial Sequence
  primer
gtaaaacgacggccagttcacagttgtcaagcacagaattt

SEQ ID NO: 29709 - DNA, 40 bp, Artificial Sequence
  primer
gtaaaacgacggccagtccaaatgcaagtggaagttattg

SEQ ID NO: 29710 - DNA, 21 bp, Artificial Sequence
  primer
caaaggagggctttgttcttc

SEQ ID NO: 29711 - DNA, 39 bp, Artificial Sequence
  primer
gtaaaacgacggccagttttcattaacatctctggcacc

SEQ ID NO: 29712 - DNA, 22 bp, Artificial Sequence
  primer
acttggcaagctttgctttaac

SEQ ID NO: 29713 - DNA, 21 bp, Artificial Sequence
  primer
tctgtctctgacctttgcagg

SEQ ID NO: 29714 - DNA, 38 bp, Artificial Sequence
  primer
gtaaaacgacggccagtgggtatgatccacagaaaggc

SEQ ID NO: 29715 - DNA, 19 bp, Artificial Sequence
  primer
gccaacccagcaaacagag

SEQ ID NO: 29716 - DNA, 21 bp, Artificial Sequence
  primer
tacaagacctccggtttctgg

SEQ ID NO: 29717 - DNA, 38 bp, Artificial Sequence
  primer
gtaaaacgacggccagttcccttccttctcacctgttc

SEQ ID NO: 29718 - DNA, 38 bp, Artificial Sequence
  primer
gtaaaacgacggccagtcctggatccctttgttctttg

SEQ ID NO: 29719 - DNA, 38 bp, Artificial Sequence
  primer
gtaaaacgacggccagtgccaaataggatgggattcag

SEQ ID NO: 29720 - DNA, 20 bp, Artificial Sequence
  primer
tgccaggaggaagttgacag

SEQ ID NO: 29721 - DNA, 21 bp, Artificial Sequence
  primer
aaatcgatagttgcagcccac

SEQ ID NO: 29722 - DNA, 37 bp, Artificial Sequence
  primer
gtaaaacgacggccagtgtcctagggagagggcagtg

SEQ ID NO: 29723 - DNA, 38 bp, Artificial Sequence
  primer
gtaaaacgacggccagtctgaacctccattctcccatc

SEQ ID NO: 29724 - DNA, 19 bp, Artificial Sequence
  primer
ggccaaacagcaaggagtg

SEQ ID NO: 29725 - DNA, 19 bp, Artificial Sequence
  primer
gtcccacacagtgccttcc

SEQ ID NO: 29726 - DNA, 21 bp, Artificial Sequence
  primer
atagatcattgccttccgtgc

SEQ ID NO: 29727 - DNA, 21 bp, Artificial Sequence
  primer
cccgagcaagttaggaaactg

SEQ ID NO: 29728 - DNA, 39 bp, Artificial Sequence
  primer
gtaaaacgacggccagtggagattaaagttctgggcacc

SEQ ID NO: 29729 - DNA, 38 bp, Artificial Sequence
  primer
gtaaaacgacggccagtctgtgatcttccaacccactg

SEQ ID NO: 29730 - DNA, 38 bp, Artificial Sequence
  primer
gtaaaacgacggccagtccttgtaagccctccttcctc

SEQ ID NO: 29731 - DNA, 20 bp, Artificial Sequence
  primer
cacgtgcctatagtcccagc

SEQ ID NO: 29732 - DNA, 38 bp, Artificial Sequence
  primer
gtaaaacgacggccagtgaggagagccacagctcaaac

SEQ ID NO: 29733 - DNA, 41 bp, Artificial Sequence
  primer
gtaaaacgacggccagttgattctgatctcaaggaagtgag

SEQ ID NO: 29734 - DNA, 38 bp, Artificial Sequence
  primer
gtaaaacgacggccagtaaagaaggcttacaacggcct

SEQ ID NO: 29735 - DNA, 37 bp, Artificial Sequence
  primer
gtaaaacgacggccagtgaggagaccatttggaaggg

SEQ ID NO: 29736 - DNA, 21 bp, Artificial Sequence
  primer
aggagcccatagcaatcagac

SEQ ID NO: 29737 - DNA, 38 bp, Artificial Sequence
  primer
gtaaaacgacggccagtatgcctgtttcttcattcacg

SEQ ID NO: 29738 - DNA, 38 bp, Artificial Sequence
  primer
gtaaaacgacggccagtgttggaagggtggtttcagtg

SEQ ID NO: 29739 - DNA, 21 bp, Artificial Sequence
  primer
tctgcttactgcaactcgctc

SEQ ID NO: 29740 - DNA, 37 bp, Artificial Sequence
  primer
gtaaaacgacggccagttcaggtgtggcatttcaagg

SEQ ID NO: 29741 - DNA, 38 bp, Artificial Sequence
  primer
gtaaaacgacggccagtatgcgcaaagcagtaaagaaa

SEQ ID NO: 29742 - DNA, 25 bp, Artificial Sequence
  primer
ccacctcacatagttaccttctttg

SEQ ID NO: 29743 - DNA, 41 bp, Artificial Sequence
  primer
gtaaaacgacggccagtataacctggagaatttgaggaaag

SEQ ID NO: 29744 - DNA, 21 bp, Artificial Sequence
  primer
atttgcattcaaagctcccac

SEQ ID NO: 29745 - DNA, 38 bp, Artificial Sequence
  primer
gtaaaacgacggccagtaaggatagccacagagcaagc

SEQ ID NO: 29746 - DNA, 38 bp, Artificial Sequence
  primer
gtaaaacgacggccagtcttctgctacacaggccacac

SEQ ID NO: 29747 - DNA, 38 bp, Artificial Sequence
  primer
gtaaaacgacggccagttggaaatttgagttgctttcg

SEQ ID NO: 29748 - DNA, 23 bp, Artificial Sequence
  primer
ttgttgctgtagctgataaaccc

SEQ ID NO: 29749 - DNA, 35 bp, Artificial Sequence
  primer
gtaaaacgacggccagtcgtaggcggtgcttgaac

SEQ ID NO: 29750 - DNA, 21 bp, Artificial Sequence
  primer
ttgtgtcagcagtttgtcagc

SEQ ID NO: 29751 - DNA, 38 bp, Artificial Sequence
  primer
gtaaaacgacggccagtgaggttgcgagctcttcataa

SEQ ID NO: 29752 - DNA, 38 bp, Artificial Sequence
  primer
gtaaaacgacggccagttctgagaatgactgctttggg

SEQ ID NO: 29753 - DNA, 38 bp, Artificial Sequence
  primer
gtaaaacgacggccagttgaacaactctttggaccagc

SEQ ID NO: 29754 - DNA, 21 bp, Artificial Sequence
  primer
actcaaggcagttcttcctcc

SEQ ID NO: 29755 - DNA, 38 bp, Artificial Sequence
  primer
gtaaaacgacggccagtcaaccagcagtcatttgttcg

SEQ ID NO: 29756 - DNA, 38 bp, Artificial Sequence
  primer
gtaaaacgacggccagttttgggcccatattaatggag

SEQ ID NO: 29757 - DNA, 20 bp, Artificial Sequence
  primer
cacctgggatgagcatcttg

SEQ ID NO: 29758 - DNA, 21 bp, Artificial Sequence
  primer
ttcagcaagtccagctctgtc

SEQ ID NO: 29759 - DNA, 21 bp, Artificial Sequence
  primer
atcccagaagaagaaggtccc

SEQ ID NO: 29760 - DNA, 21 bp, Artificial Sequence
  primer
tttgaatggtggaagagtccc

SEQ ID NO: 29761 - DNA, 18 bp, Artificial Sequence
  primer
attgggccgcctttactg

SEQ ID NO: 29762 - DNA, 21 bp, Artificial Sequence
  primer
ggcaacagagtgagacgatgt

SEQ ID NO: 29763 - DNA, 38 bp, Artificial Sequence
  primer
gtaaaacgacggccagtgtccctgggatactgcacaag

SEQ ID NO: 29764 - DNA, 21 bp, Artificial Sequence
  primer
gtgagacactcacaggttggg

SEQ ID NO: 29765 - DNA, 38 bp, Artificial Sequence
  primer
gtaaaacgacggccagtgctcatcagggtgtctctgtg

SEQ ID NO: 29766 - DNA, 21 bp, Artificial Sequence
  primer
cggtctcagctctctggtctg

SEQ ID NO: 29767 - DNA, 21 bp, Artificial Sequence
  primer
acaacacgctcacaactctcc

SEQ ID NO: 29768 - DNA, 35 bp, Artificial Sequence
  primer
gtaaaacgacggccagtctgcactggtgggtctgg

SEQ ID NO: 29769 - DNA, 38 bp, Artificial Sequence
  primer
gtaaaacgacggccagtatgggagcacaaccctagttc

SEQ ID NO: 29770 - DNA, 40 bp, Artificial Sequence
  primer
gtaaaacgacggccagtcaggtcagctttacagagaatgg

SEQ ID NO: 29771 - DNA, 21 bp, Artificial Sequence
  primer
gaatgaggagggtggtgtgtc

SEQ ID NO: 29772 - DNA, 21 bp, Artificial Sequence
  primer
aacagagtgagaccctgtccc

SEQ ID NO: 29773 - DNA, 38 bp, Artificial Sequence
  primer
gtaaaacgacggccagtttgtcctcccaccctattcag

SEQ ID NO: 29774 - DNA, 38 bp, Artificial Sequence
  primer
gtaaaacgacggccagtcctccctcaatgagtctttcc

SEQ ID NO: 29775 - DNA, 21 bp, Artificial Sequence
  primer
atttgccaagctagggacttg

SEQ ID NO: 29776 - DNA, 21 bp, Artificial Sequence
  primer
ccagacagacgaggctattcc

SEQ ID NO: 29777 - DNA, 37 bp, Artificial Sequence
  primer
gtaaaacgacggccagtctctcctgcgggtaaagagg

SEQ ID NO: 29778 - DNA, 39 bp, Artificial Sequence
  primer
gtaaaacgacggccagtaggtgtgagaatctctcttccg

SEQ ID NO: 29779 - DNA, 38 bp, Artificial Sequence
  primer
gtaaaacgacggccagtttatgatcacggtgagttggg

SEQ ID NO: 29780 - DNA, 38 bp, Artificial Sequence
  primer
gtaaaacgacggccagtctgcagtttgccatctttctg

SEQ ID NO: 29781 - DNA, 19 bp, Artificial Sequence
  primer
gcacttgtctgggcaacag

SEQ ID NO: 29782 - DNA, 38 bp, Artificial Sequence
  primer
gtaaaacgacggccagtcagggaagagactgatggacc

SEQ ID NO: 29783 - DNA, 38 bp, Artificial Sequence
  primer
gtaaaacgacggccagttgggagtgtgtgtttggagtc

SEQ ID NO: 29784 - DNA, 21 bp, Artificial Sequence
  primer
gacactgttgactttgccctg

SEQ ID NO: 29785 - DNA, 21 bp, Artificial Sequence
  primer
aggtaaggaggaaggaggctg

SEQ ID NO: 29786 - DNA, 38 bp, Artificial Sequence
  primer
gtaaaacgacggccagtacccacggttacagagagcac

SEQ ID NO: 29787 - DNA, 38 bp, Artificial Sequence
  primer
gtaaaacgacggccagtagggtggaggagaggtaaagc

SEQ ID NO: 29788 - DNA, 38 bp, Artificial Sequence
  primer
gtaaaacgacggccagtctcagctttggattcatgcag

SEQ ID NO: 29789 - DNA, 38 bp, Artificial Sequence
  primer
gtaaaacgacggccagttaccactagacgccagggttc

SEQ ID NO: 29790 - DNA, 38 bp, Artificial Sequence
  primer
gtaaaacgacggccagtgtgagctcctcaccaatctcc

SEQ ID NO: 29791 - DNA, 39 bp, Artificial Sequence
  primer
gtaaaacgacggccagtcaacaagagctccagcaaagac

SEQ ID NO: 29792 - DNA, 40 bp, Artificial Sequence
  primer
gtaaaacgacggccagtgaattgtttcatttcaagccaac

SEQ ID NO: 29793 - DNA, 41 bp, Artificial Sequence
  primer
gtaaaacgacggccagttggtcctgagaactttctttcttc

SEQ ID NO: 29794 - DNA, 20 bp, Artificial Sequence
  primer
gctgtcatgcctcaagttgc

SEQ ID NO: 29795 - DNA, 21 bp, Artificial Sequence
  primer
gcgtgctttcctcttacttcc

SEQ ID NO: 29796 - DNA, 20 bp, Artificial Sequence
  primer
ctgtgtgctgctctctgtgg

SEQ ID NO: 29797 - DNA, 35 bp, Artificial Sequence
  primer
gtaaaacgacggccagtccgtgtctttggcgacat

SEQ ID NO: 29798 - DNA, 38 bp, Artificial Sequence
  primer
gtaaaacgacggccagtcccagcagcctcctagatagc

SEQ ID NO: 29799 - DNA, 37 bp, Artificial Sequence
  primer
gtaaaacgacggccagtctccttcttcagaggcaccc

SEQ ID NO: 29800 - DNA, 38 bp, Artificial Sequence
  primer
gtaaaacgacggccagtttcattgagcccatctgtttg

SEQ ID NO: 29801 - DNA, 38 bp, Artificial Sequence
  primer
gtaaaacgacggccagtagccggttaggacagggtaag

SEQ ID NO: 29802 - DNA, 38 bp, Artificial Sequence
  primer
gtaaaacgacggccagtcgtagggcagactggagtttc

SEQ ID NO: 29803 - DNA, 21 bp, Artificial Sequence
  primer
cagcactgattctggaacacc

SEQ ID NO: 29804 - DNA, 36 bp, Artificial Sequence
  primer
gtaaaacgacggccagttgatgctgcagtctcaggg

SEQ ID NO: 29805 - DNA, 38 bp, Artificial Sequence
  primer
gtaaaacgacggccagtggtgctgagattagctctggg

SEQ ID NO: 29806 - DNA, 21 bp, Artificial Sequence
  primer
gcacttgatggattcagggac

SEQ ID NO: 29807 - DNA, 38 bp, Artificial Sequence
  primer
gtaaaacgacggccagttaggcaggcagggtgagttag

SEQ ID NO: 29808 - DNA, 38 bp, Artificial Sequence
  primer
gtaaaacgacggccagtactaagcctgtggctaggtgg

SEQ ID NO: 29809 - DNA, 21 bp, Artificial Sequence
  primer
cttccacatctaccaagtggg

SEQ ID NO: 29810 - DNA, 36 bp, Artificial Sequence
  primer
gtaaaacgacggccagtcattcctagccagcccttg

SEQ ID NO: 29811 - DNA, 38 bp, Artificial Sequence
  primer
gtaaaacgacggccagtgaattccagcccttcctcatc

SEQ ID NO: 29812 - DNA, 21 bp, Artificial Sequence
  primer
ctcgagctctcatgtttggag

SEQ ID NO: 29813 - DNA, 38 bp, Artificial Sequence
  primer
gtaaaacgacggccagtctcagaatggaagaccaaggg

SEQ ID NO: 29814 - DNA, 38 bp, Artificial Sequence
  primer
gtaaaacgacggccagtctatttggccctgcatgtttc

SEQ ID NO: 29815 - DNA, 38 bp, Artificial Sequence
  primer
gtaaaacgacggccagttgtgtgggtctttagctctgc

SEQ ID NO: 29816 - DNA, 38 bp, Artificial Sequence; identical to SEQ ID NO: 29808
  primer

SEQ ID NO: 29817 - DNA, 21 bp, Artificial Sequence
  primer
tctgcaggtccaggatgttag

SEQ ID NO: 29818 - DNA, 21 bp, Artificial Sequence
  primer
gggagcagtttctctccactc

SEQ ID NO: 29819 - DNA, 21 bp, Artificial Sequence
  primer
aggagagtcctcaccctcttc

SEQ ID NO: 29820 - DNA, 21 bp, Artificial Sequence
  primer
gacagagggacggacattctc

SEQ ID NO: 29821 - DNA, 37 bp, Artificial Sequence
  primer
gtaaaacgacggccagtcatccaggagggtctgaaag

SEQ ID NO: 29822 - DNA, 38 bp, Artificial Sequence
  primer
gtaaaacgacggccagtatgaagtgagtgaagggtggg

SEQ ID NO: 29823 - DNA, 36 bp, Artificial Sequence
  primer
gtaaaacgacggccagtaatttgcatggcaggaagg

SEQ ID NO: 29824 - DNA, 38 bp, Artificial Sequence
  primer
gtaaaacgacggccagtgtagctccgggaacatagagg

SEQ ID NO: 29825 - DNA, 38 bp, Artificial Sequence
  primer
gtaaaacgacggccagtaaggactaagcccagggagtc

SEQ ID NO: 29826 - DNA, 21 bp, Artificial Sequence
  primer
gcagaagtgcaacaacacctc

SEQ ID NO: 29827 - DNA, 38 bp, Artificial Sequence
  primer
gtaaaacgacggccagttgttcttgcagaatgcacctc

SEQ ID NO: 29828 - DNA, 39 bp, Artificial Sequence
  primer
gtaaaacgacggccagtcacctacgaggtaaggagaggg

SEQ ID NO: 29829 - DNA, 22 bp, Artificial Sequence
  primer
tgagcaattggattgtcatcag

SEQ ID NO: 29830 - DNA, 37 bp, Artificial Sequence
  primer
gtaaaacgacggccagtccgactttggattcctgacc

SEQ ID NO: 29831 - DNA, 20 bp, Artificial Sequence
  primer
tgcacctggcctttatcaat

SEQ ID NO: 29832 - DNA, 39 bp, Artificial Sequence
  primer
gtaaaacgacggccagtccaggcaaagaatactccacag

SEQ ID NO: 29833 - DNA, 22 bp, Artificial Sequence
  primer
ccagtctgaagccttgctaaag

SEQ ID NO: 29834 - DNA, 37 bp, Artificial Sequence
  primer
gtaaaacgacggccagtaaaccagcagcagagctgac

SEQ ID NO: 29835 - DNA, 21 bp, Artificial Sequence
  primer
tcagcaaccctacatcttccc

SEQ ID NO: 29836 - DNA, 37 bp, Artificial Sequence
  primer
gtaaaacgacggccagtcacctgggtgtgtgtccttg

SEQ ID NO: 29837 - DNA, 37 bp, Artificial Sequence
  primer
gtaaaacgacggccagtcagagtccttgtcctctggg

SEQ ID NO: 29838 - DNA, 37 bp, Artificial Sequence
  primer
gtaaaacgacggccagtcatgggttccctagagccac

SEQ ID NO: 29839 - DNA, 38 bp, Artificial Sequence
  primer
gtaaaacgacggccagtccctctacgctttctgtggtg

SEQ ID NO: 29840 - DNA, 21 bp, Artificial Sequence
  primer
cacggattactgcgtgacaac

SEQ ID NO: 29841 - DNA, 19 bp, Artificial Sequence
  primer
ggcctaagcgggactagga

SEQ ID NO: 29842 - DNA, 19 bp, Artificial Sequence
  primer
cctccagcttctgctcctg

SEQ ID NO: 29843 - DNA, 41 bp, Artificial Sequence
  primer
gtaaaacgacggccagtaacataagttgaggctggatcttc

SEQ ID NO: 29844 - DNA, 38 bp, Artificial Sequence
  primer
gtaaaacgacggccagtctccaggaccaaggaacaaag

SEQ ID NO: 29845 - DNA, 38 bp, Artificial Sequence
  primer
gtaaaacgacggccagtggtacaaatcccttgtggagc

SEQ ID NO: 29846 - DNA, 21 bp, Artificial Sequence
  primer
tatattgccagcacccagaag

SEQ ID NO: 29847 - DNA, 35 bp, Artificial Sequence
  primer
gtaaaacgacggccagtctcagggagctccaaggc

SEQ ID NO: 29848 - DNA, 39 bp, Artificial Sequence
  primer
gtaaaacgacggccagtttaacaattggctcccacaaac

SEQ ID NO: 29849 - DNA, 38 bp, Artificial Sequence
  primer
gtaaaacgacggccagtagtttccctaggagctttggc

SEQ ID NO: 29850 - DNA, 20 bp, Artificial Sequence
  primer
tccatttcaaaggatggcag

SEQ ID NO: 29851 - DNA, 21 bp, Artificial Sequence
  primer
agggaaggatggtgggtagag

SEQ ID NO: 29852 - DNA, 21 bp, Artificial Sequence
  primer
aactcctctgggaacttgcag

SEQ ID NO: 29853 - DNA, 38 bp, Artificial Sequence
  primer
gtaaaacgacggccagtgtgaaagctttgcttctctgc

SEQ ID NO: 29854 - DNA, 21 bp, Artificial Sequence
  primer
gctgggaaatgtgacctatcg

SEQ ID NO: 29855 - DNA, 43 bp, Artificial Sequence
  primer
gtaaaacgacggccagtgggtattgtataaagagaaatggagg

SEQ ID NO: 29856 - DNA, 22 bp, Artificial Sequence
  primer
ccagttatttgctattccctcc

SEQ ID NO: 29857 - DNA, 38 bp, Artificial Sequence
  primer
gtaaaacgacggccagttgagcctgggactttctatgg

SEQ ID NO: 29858 - DNA, 38 bp, Artificial Sequence
  primer
gtaaaacgacggccagtcagtcccagaactttgaagcc

SEQ ID NO: 29859 - DNA, 38 bp, Artificial Sequence
  primer
gtaaaacgacggccagtaatggcaacctctattctgcc

SEQ ID NO: 29860 - DNA, 21 bp, Artificial Sequence
  primer
acatcctccaaatgcgaaatc

SEQ ID NO: 29861 - DNA, 38 bp, Artificial Sequence
  primer
gtaaaacgacggccagtgctgctccgtgagtttgagac

SEQ ID NO: 29862 - DNA, 21 bp, Artificial Sequence
  primer
ctctgctatcccttctcccag

SEQ ID NO: 29863 - DNA, 37 bp, Artificial Sequence
  primer
gtaaaacgacggccagtagatctgaggcggagagacg

SEQ ID NO: 29864 - DNA, 21 bp, Artificial Sequence
  primer
cgaaggatggataagaagccc

SEQ ID NO: 29865 - DNA, 21 bp, Artificial Sequence
  primer
aagtaaggcatttagcacggg

SEQ ID NO: 29866 - DNA, 38 bp, Artificial Sequence
  primer
gtaaaacgacggccagtgcattctcatttgccatttgt

SEQ ID NO: 29867 - DNA, 38 bp, Artificial Sequence
  primer
gtaaaacgacggccagtcccaattcaaagctaccgttc

SEQ ID NO: 29868 - DNA, 21 bp, Artificial Sequence
  primer
gacctttgcaatgctaggagg

SEQ ID NO: 29869 - DNA, 38 bp, Artificial Sequence
  primer
gtaaaacgacggccagtacactccctggacccagtaac

SEQ ID NO: 29870 - DNA, 38 bp, Artificial Sequence
  primer
gtaaaacgacggccagtaccaacaagatggtgatgctg

SEQ ID NO: 29871 - DNA, 38 bp, Artificial Sequence
  primer
gtaaaacgacggccagtcacccgccataagacaaagtt

SEQ ID NO: 29872 - DNA, 38 bp, Artificial Sequence
  primer
gtaaaacgacggccagttgtgtaaagtgtttgggccag

SEQ ID NO: 29873 - DNA, 21 bp, Artificial Sequence
  primer
caaatgtggttggatcctgtg

SEQ ID NO: 29874 - DNA, 21 bp, Artificial Sequence
  primer
ggtggtattctctgggaggtg

SEQ ID NO: 29875 - DNA, 36 bp, Artificial Sequence
  primer
gtaaaacgacggccagtatctgtatccagcgccagg

SEQ ID NO: 29876 - DNA, 38 bp, Artificial Sequence
  primer
gtaaaacgacggccagtaccaagggtggtcacaaagtc

SEQ ID NO: 29877 - DNA, 21 bp, Artificial Sequence
  primer
gggaacttcttccctgagatg

SEQ ID NO: 29878 - DNA, 38 bp, Artificial Sequence
  primer
gtaaaacgacggccagtatttgtgtcaccagatgcctg

SEQ ID NO: 29879 - DNA, 38 bp, Artificial Sequence
  primer
gtaaaacgacggccagtacgcataacatttgttcgtgg

SEQ ID NO: 29880 - DNA, 38 bp, Artificial Sequence
  primer
gtaaaacgacggccagtaccagaccagtgcaaacattc

SEQ ID NO: 29881 - DNA, 21 bp, Artificial Sequence
  primer
atccactagcatagccatccc

SEQ ID NO: 29882 - DNA, 38 bp, Artificial Sequence
  primer
gtaaaacgacggccagttgacccatgtctctccctttc

SEQ ID NO: 29883 - DNA, 38 bp, Artificial Sequence
  primer
gtaaaacgacggccagtcaggcgtgtgtggtagagttc

SEQ ID NO: 29884 - DNA, 38 bp, Artificial Sequence
  primer
gtaaaacgacggccagtctattcctaaagcagccaggg

SEQ ID NO: 29885 - DNA, 22 bp, Artificial Sequence
  primer
cctgattgctgtctatcatccc

SEQ ID NO: 29886 - DNA, 37 bp, Artificial Sequence
  primer
gtaaaacgacggccagtcctgaggacagatgaatccc

SEQ ID NO: 29887 - DNA, 38 bp, Artificial Sequence
  primer
gtaaaacgacggccagttgcttgtcgaatgcctagttc

SEQ ID NO: 29888 - DNA, 21 bp, Artificial Sequence
  primer
tactgccaggtacacagtggg

SEQ ID NO: 29889 - DNA, 22 bp, Artificial Sequence
  primer
cagaacccagaatccagacttg

SEQ ID NO: 29890 - DNA, 20 bp, Artificial Sequence
  primer
ccatgccttggcattattgt

SEQ ID NO: 29891 - DNA, 37 bp, Artificial Sequence
  primer
gtaaaacgacggccagtaggacgatcccatgtcttcc

SEQ ID NO: 29892 - DNA, 39 bp, Artificial Sequence
  primer
gtaaaacgacggccagtggaaaccgggttaatagcaaag

SEQ ID NO: 29893 - DNA, 38 bp, Artificial Sequence
  primer
gtaaaacgacggccagtagtgttcctgcatagggaagc

SEQ ID NO: 29894 - DNA, 38 bp, Artificial Sequence
  primer
gtaaaacgacggccagtaagaatcccttcaactcccac

SEQ ID NO: 29895 - DNA, 38 bp, Artificial Sequence
  primer
gtaaaacgacggccagtcccagccttgctataaattgg

SEQ ID NO: 29896 - DNA, 38 bp, Artificial Sequence
  primer
gtaaaacgacggccagttgatcacagccaatgttgaag

SEQ ID NO: 29897 - DNA, 21 bp, Artificial Sequence
  primer
ctaacaggcacagggttatgc

SEQ ID NO: 29898 - DNA, 38 bp, Artificial Sequence
  primer
gtaaaacgacggccagtttattgacctccagacttgcc

SEQ ID NO: 29899 - DNA, 38 bp, Artificial Sequence
  primer
gtaaaacgacggccagtaccataggatgcctctgtgtg

SEQ ID NO: 29900 - DNA, 20 bp, Artificial Sequence
  primer
tattgcactttcctgctggc

SEQ ID NO: 29901 - DNA, 38 bp, Artificial Sequence
  primer
gtaaaacgacggccagtatctgctcactctgaacgacc

SEQ ID NO: 29902 - DNA, 20 bp, Artificial Sequence
  primer
aaagcacagtccacagccag

SEQ ID NO: 29903 - DNA, 38 bp, Artificial Sequence
  primer
gtaaaacgacggccagtgtcttcaggaatggcttgctc

SEQ ID NO: 29904 - DNA, 38 bp, Artificial Sequence
  primer
gtaaaacgacggccagtagacacggaatcccgaataac

SEQ ID NO: 29905 - DNA, 38 bp, Artificial Sequence
  primer
gtaaaacgacggccagtactgcatccgtctccttgttc

SEQ ID NO: 29906 - DNA, 38 bp, Artificial Sequence
  primer
gtaaaacgacggccagtggtgacatccaggtccttcag

SEQ ID NO: 29907 - DNA, 38 bp, Artificial Sequence
  primer
gtaaaacgacggccagttggtggatgaactgatggaag

SEQ ID NO: 29908 - DNA, 38 bp, Artificial Sequence
  primer
gtaaaacgacggccagttcatcttgggagggaggatag

SEQ ID NO: 29909 - DNA, 38 bp, Artificial Sequence
  primer
gtaaaacgacggccagtctcttagactcagcccaagcc

SEQ ID NO: 29910 - DNA, 20 bp, Artificial Sequence
  primer
ggaggaggtcagagaggtgg

SEQ ID NO: 29911 - DNA, 20 bp, Artificial Sequence
  primer
ctcgcttctgagcgttgttg

SEQ ID NO: 29912 - DNA, 21 bp, Artificial Sequence
  primer
atagtgagtgcagcgagatgg

SEQ ID NO: 29913 - DNA, 37 bp, Artificial Sequence
  primer
gtaaaacgacggccagtcctctggagcttcttgggac

SEQ ID NO: 29914 - DNA, 38 bp, Artificial Sequence
  primer
gtaaaacgacggccagtgagaggagaggctggaaggac

SEQ ID NO: 29915 - DNA, 23 bp, Artificial Sequence
  primer
gctatgatggtgccactacactc

SEQ ID NO: 29916 - DNA, 38 bp, Artificial Sequence
  primer
gtaaaacgacggccagtagaattcacctccaccacgtc

SEQ ID NO: 29917 - DNA, 38 bp, Artificial Sequence
  primer
gtaaaacgacggccagtggtcttcagtctgaggcaatg

SEQ ID NO: 29918 - DNA, 18 bp, Artificial Sequence
  primer
cccgacctccatcttccc

SEQ ID NO: 29919 - DNA, 21 bp, Artificial Sequence
  primer
gctaccaccactcactttggg

SEQ ID NO: 29920 - DNA, 38 bp, Artificial Sequence
  primer
gtaaaacgacggccagtcaccagagctccagcaaatac

SEQ ID NO: 29921 - DNA, 21 bp, Artificial Sequence
  primer
gacatgtacaccagtgggagg

SEQ ID NO: 29922 - DNA, 38 bp, Artificial Sequence
  primer
gtaaaacgacggccagttccagtagaagcctacgggtg

SEQ ID NO: 29923 - DNA, 38 bp, Artificial Sequence
  primer
gtaaaacgacggccagtgggcgtctagtagtttggtgc

SEQ ID NO: 29924 - DNA, 21 bp, Artificial Sequence
  primer
ggataaggatgttcaggtggc

SEQ ID NO: 29925 - DNA, 38 bp, Artificial Sequence
  primer
gtaaaacgacggccagtgaaacccagttctgttcccag

SEQ ID NO: 29926 - DNA, 20 bp, Artificial Sequence
  primer
tgatgtgacttccctgagcc

SEQ ID NO: 29927 - DNA, 21 bp, Artificial Sequence
  primer
atcctgaaagctgcgtacctg

SEQ ID NO: 29928 - DNA, 21 bp, Artificial Sequence
  primer
gttccttcctgctttggaatg

SEQ ID NO: 29929 - DNA, 38 bp, Artificial Sequence
  primer
gtaaaacgacggccagtgacccaaatcaggaacagacc

SEQ ID NO: 29930 - DNA, 21 bp, Artificial Sequence
  primer
gactcagacccagtccgtctc

SEQ ID NO: 29931 - DNA, 20 bp, Artificial Sequence
  primer
gcagccctagtgggagagag

SEQ ID NO: 29932 - DNA, 21 bp, Artificial Sequence
  primer
gtgggactatgcttgagaggg

SEQ ID NO: 29933 - DNA, 40 bp, Artificial Sequence
  primer
gtaaaacgacggccagtggaaagagaaggcaatcagtcag

SEQ ID NO: 29934 - DNA, 21 bp, Artificial Sequence
  primer
tgcaagcttgatgttcatttg

SEQ ID NO: 29935 - DNA, 39 bp, Artificial Sequence
  primer
gtaaaacgacggccagtcactagatactggcgagcattg

SEQ ID NO: 29936 - DNA, 26 bp, Artificial Sequence
  primer
tcactgcactttaagagaatgaattg

SEQ ID NO: 29937 - DNA, 21 bp, Artificial Sequence
  primer
ctttaatgcagggtcatctgc

SEQ ID NO: 29938 - DNA, 39 bp, Artificial Sequence
  primer
gtaaaacgacggccagttcctcaactcacaggagtttcc

SEQ ID NO: 29939 - DNA, 39 bp, Artificial Sequence
  primer
gtaaaacgacggccagttttgaagccatgtgtcaaattc

SEQ ID NO: 29940 - DNA, 21 bp, Artificial Sequence
  primer
tttctaaggctttctgtgcca

SEQ ID NO: 29941 - DNA, 38 bp, Artificial Sequence
  primer
gtaaaacgacggccagttgtgtaccgtttaccgtctcc

SEQ ID NO: 29942 - DNA, 23 bp, Artificial Sequence
  primer
tgcaaatttgactggaaagaaac

SEQ ID NO: 29943 - DNA, 21 bp, Artificial Sequence
  primer
tgaattggtttctgcttgtga

SEQ ID NO: 29944 - DNA, 38 bp, Artificial Sequence
  primer
gtaaaacgacggccagtgatgtgctgttaatggaaggg

SEQ ID NO: 29945 - DNA, 38 bp, Artificial Sequence
  primer
gtaaaacgacggccagttaggtggcagagtgagaccat

SEQ ID NO: 29946 - DNA, 39 bp, Artificial Sequence
  primer
gtaaaacgacggccagtcagtgcctgctacgtaagtgtc

SEQ ID NO: 29947 - DNA, 39 bp, Artificial Sequence
  primer
gtaaaacgacggccagttggactgatgaatgaatggttt

SEQ ID NO: 29948 - DNA, 43 bp, Artificial Sequence
  primer
gtaaaacgacggccagttctattatctgctaattgctggagac

SEQ ID NO: 29949 - DNA, 21 bp, Artificial Sequence
  primer
tctcaagcgatttacagctcg

SEQ ID NO: 29950 - DNA, 38 bp, Artificial Sequence
  primer
gtaaaacgacggccagtctaagtggcattgagattggc

SEQ ID NO: 29951 - DNA, 22 bp, Artificial Sequence
  primer
aacttgatccaaacaaagtggg

SEQ ID NO: 29952 - DNA, 41 bp, Artificial Sequence
  primer
gtaaaacgacggccagtaaatttctggcctaaagtcaacac

SEQ ID NO: 29953 - DNA, 38 bp, Artificial Sequence
  primer
gtaaaacgacggccagttggtagtttgccaaccctcag

SEQ ID NO: 29954 - DNA, 22 bp, Artificial Sequence
  primer
ggcctgctgatccagaaataag

SEQ ID NO: 29955 - DNA, 21 bp, Artificial Sequence
  primer
ccacagtagcttccagtgtgc

SEQ ID NO: 29956 - DNA, 21 bp, Artificial Sequence
  primer
gctacagctttgagggacctg

SEQ ID NO: 29957 - DNA, 24 bp, Artificial Sequence
  primer
tcacactgcagtaggagtatctgg

SEQ ID NO: 29958 - DNA, 25 bp, Artificial Sequence
  primer
ttcagtaattcagcaagtctaaggc

SEQ ID NO: 29959 - DNA, 38 bp, Artificial Sequence
  primer
gtaaaacgacggccagtacaggtgtgacccactatgcc

SEQ ID NO: 29960 - DNA, 42 bp, Artificial Sequence
  primer
gtaaaacgacggccagtttacaacatgtaaggctgaaacaag

SEQ ID NO: 29961 - DNA, 35 bp, Artificial Sequence
  primer
gtaaaacgacggccagtgaggccttgactccgtgg

SEQ ID NO: 29962 - DNA, 37 bp, Artificial Sequence
  primer
gtaaaacgacggccagtccagggttcggaggtaacag

SEQ ID NO: 29963 - DNA, 19 bp, Artificial Sequence
  primer
ccctccacctgtgcttctg

SEQ ID NO: 29964 - DNA, 22 bp, Artificial Sequence
  primer
agaattcgtaccgttcctgttg

SEQ ID NO: 29965 - DNA, 38 bp, Artificial Sequence
  primer
gtaaaacgacggccagtcaagaggtctagctgttgcgg

SEQ ID NO: 29966 - DNA, 38 bp, Artificial Sequence
  primer
gtaaaacgacggccagttctggagtgacctgagtgtgg

SEQ ID NO: 29967 - DNA, 38 bp, Artificial Sequence
  primer
gtaaaacgacggccagttaaggcacttggaactgagcc

SEQ ID NO: 29968 - DNA, 38 bp, Artificial Sequence
  primer
gtaaaacgacggccagttcctaggtcagtgagcaagcc

SEQ ID NO: 29969 - DNA, 38 bp, Artificial Sequence
  primer
gtaaaacgacggccagtgagatcctctgtggtgtgcag

SEQ ID NO: 29970 - DNA, 21 bp, Artificial Sequence
  primer
tgtgagctaactctgggcaag

SEQ ID NO: 29971 - DNA, 39 bp, Artificial Sequence
  primer
gtaaaacgacggccagtggtgggctacggatagttcttc

SEQ ID NO: 29972 - DNA, 21 bp, Artificial Sequence
  primer
gtgtcccttgccttcagtgtc

SEQ ID NO: 29973 - DNA, 21 bp, Artificial Sequence
  primer
aaagcacttgacacagttggc

SEQ ID NO: 29974 - DNA, 38 bp, Artificial Sequence
  primer
gtaaaacgacggccagtagataggctccttccagctcc

SEQ ID NO: 29975 - DNA, 37 bp, Artificial Sequence
  primer
gtaaaacgacggccagtccaggagggaagggagtatg

SEQ ID NO: 29976 - DNA, 38 bp, Artificial Sequence
  primer
gtaaaacgacggccagtctattctggaaaccaggcagg

SEQ ID NO: 29977 - DNA, 38 bp, Artificial Sequence
  primer
gtaaaacgacggccagtagtttccactgatggcgtttg

SEQ ID NO: 29978 - DNA, 38 bp, Artificial Sequence
  primer
gtaaaacgacggccagtatctcagaggtggctgctttg

SEQ ID NO: 29979 - DNA, 37 bp, Artificial Sequence
  primer
gtaaaacgacggccagtcagagccatgggaaactcag

SEQ ID NO: 29980 - DNA, 38 bp, Artificial Sequence
  primer
gtaaaacgacggccagtcctgggtatctgagcctcttg

SEQ ID NO: 29981 - DNA, 21 bp, Artificial Sequence
  primer
gggtgtcaggcagtagtggac

SEQ ID NO: 29982 - DNA, 37 bp, Artificial Sequence
  primer
gtaaaacgacggccagtagaaggtcagccagagggtg

SEQ ID NO: 29983 - DNA, 38 bp, Artificial Sequence
  primer
gtaaaacgacggccagtgtgcctccttccaaggtacag

SEQ ID NO: 29984 - DNA, 21 bp, Artificial Sequence
  primer
gcacggagtagtctgaggctg

SEQ ID NO: 29985 - DNA, 38 bp, Artificial Sequence
  primer
gtaaaacgacggccagtatgggactgagagccagtagg

SEQ ID NO: 29986 - DNA, 38 bp, Artificial Sequence
  primer
gtaaaacgacggccagtgggcaacttggctttactcac

SEQ ID NO: 29987 - DNA, 21 bp, Artificial Sequence
  primer
ccagagcatctggaacagctc

SEQ ID NO: 29988 - DNA, 21 bp, Artificial Sequence
  primer
actacaggtgccttccaccac

SEQ ID NO: 29989 - DNA, 38 bp, Artificial Sequence
  primer
gtaaaacgacggccagtctcaagtctcttcccagcagc

SEQ ID NO: 29990 - DNA, 22 bp, Artificial Sequence
  primer
tcatgtccatttcagtgtggag

SEQ ID NO: 29991 - DNA, 38 bp, Artificial Sequence
  primer
gtaaaacgacggccagtcttgttgttcgggactgtgag

SEQ ID NO: 29992 - DNA, 39 bp, Artificial Sequence
  primer
gtaaaacgacggccagttcgtatgttaccacccaccttc

SEQ ID NO: 29993 - DNA, 21 bp, Artificial Sequence
  primer
agagggcattaggacgaaacc

SEQ ID NO: 29994 - DNA, 40 bp, Artificial Sequence
  primer
gtaaaacgacggccagttttatgggttgtagcacatcttg

SEQ ID NO: 29995 - DNA, 38 bp, Artificial Sequence
  primer
gtaaaacgacggccagtagctgtcactcaaagtggagg

SEQ ID NO: 29996 - DNA, 38 bp, Artificial Sequence
  primer
gtaaaacgacggccagtcatctccagctgactttggtg

SEQ ID NO: 29997 - DNA, 43 bp, Artificial Sequence
  primer
gtaaaacgacggccagtcttcagattagtgaggatcatttctg

SEQ ID NO: 29998 - DNA, 39 bp, Artificial Sequence
  primer
gtaaaacgacggccagtgcggattgaattcctaaatagc

SEQ ID NO: 29999 - DNA, 38 bp, Artificial Sequence
  primer
gtaaaacgacggccagtcaacacactttcctcccaagc

SEQ ID NO: 30000 - DNA, 38 bp, Artificial Sequence
  primer
gtaaaacgacggccagtttctgggcaaggtttgatttc

SEQ ID NO: 30001 - DNA, 42 bp, Artificial Sequence
  primer
gtaaaacgacggccagtgacaaatattggaggatgacatttg

SEQ ID NO: 30002 - DNA, 26 bp, Artificial Sequence
  primer
tgctgattcacagtacctttagtgac

SEQ ID NO: 30003 - DNA, 39 bp, Artificial Sequence
  primer
gtaaaacgacggccagttgataccatttgatgtgccttg

SEQ ID NO: 30004 - DNA, 38 bp, Artificial Sequence
  primer
gtaaaacgacggccagtcctggcagagttagtgctgtg

SEQ ID NO: 30005 - DNA, 23 bp, Artificial Sequence
  primer
tttagaaacgtgagctctgtgtg

SEQ ID NO: 30006 - DNA, 23 bp, Artificial Sequence
  primer
cctagctaatgctttgtgtctcc

SEQ ID NO: 30007 - DNA, 38 bp, Artificial Sequence
  primer
gtaaaacgacggccagtacaccaagggtgatgaggaag

SEQ ID NO: 30008 - DNA, 21 bp, Artificial Sequence
  primer
gctgcaacagatgatccagag

SEQ ID NO: 30009 - DNA, 42 bp, Artificial Sequence; identical to SEQ ID NO: 30001
  primer

SEQ ID NO: 30010 - DNA, 21 bp, Artificial Sequence
  primer
atgttgccctccttgtctttg

SEQ ID NO: 30011 - DNA, 22 bp, Artificial Sequence
  primer
ccttcaaagagaaacgagatgc

SEQ ID NO: 30012 - DNA, 21 bp, Artificial Sequence
  primer
tattcccacccaaatagccag

SEQ ID NO: 30013 - DNA, 21 bp, Artificial Sequence
  primer
tattggcccataacaatttgg

SEQ ID NO: 30014 - DNA, 39 bp, Artificial Sequence
  primer
gtaaaacgacggccagtatgggatttggaattgatcttc

SEQ ID NO: 30015 - DNA, 21 bp, Artificial Sequence
  primer
tgctcagttggttggaaattg

SEQ ID NO: 30016 - DNA, 21 bp, Artificial Sequence
  primer
gtggtcattattgatccaggc

SEQ ID NO: 30017 - DNA, 42 bp, Artificial Sequence
  primer
gtaaaacgacggccagtaagctgttcagtggaaagtaatctg

SEQ ID NO: 30018 - DNA, 21 bp, Artificial Sequence
  primer
gggcaaattgagattcctgtc

SEQ ID NO: 30019 - DNA, 39 bp, Artificial Sequence
  primer
gtaaaacgacggccagttgtttccgttcagttacaggtg

SEQ ID NO: 30020 - DNA, 21 bp, Artificial Sequence
  primer
tccagagtgtaaccagccttg

SEQ ID NO: 30021 - DNA, 42 bp, Artificial Sequence
  primer
gtaaaacgacggccagtggaatttcctttagtttccaacaac

SEQ ID NO: 30022 - DNA, 38 bp, Artificial Sequence
  primer
gtaaaacgacggccagtggataaattgctgctctgctg

SEQ ID NO: 30023 - DNA, 37 bp, Artificial Sequence
  primer
gtaaaacgacggccagtccaggaagctagtccttgcc

SEQ ID NO: 30024 - DNA, 18 bp, Artificial Sequence
  primer
gggtgcttagggtgcagg

SEQ ID NO: 30025 - DNA, 23 bp, Artificial Sequence
  primer
ggaatgtttgtattgcgacactg

SEQ ID NO: 30026 - DNA, 41 bp, Artificial Sequence
  primer
gtaaaacgacggccagttttgggcagataaagtagcttcac

SEQ ID NO: 30027 - DNA, 21 bp, Artificial Sequence
  primer
cgtcatgcttacctgttgtgc

SEQ ID NO: 30028 - DNA, 39 bp, Artificial Sequence
  primer
gtaaaacgacggccagttcttcgtttaccacatgctgac

SEQ ID NO: 30029 - DNA, 21 bp, Artificial Sequence
  primer
gctatgatcgcaccactgaac

SEQ ID NO: 30030 - DNA, 38 bp, Artificial Sequence
  primer
gtaaaacgacggccagtgagccactgtgtcagcttctg

SEQ ID NO: 30031 - DNA, 37 bp, Artificial Sequence
  primer
gtaaaacgacggccagttaaccacttgggccaaacac

SEQ ID NO: 30032 - DNA, 37 bp, Artificial Sequence
  primer
gtaaaacgacggccagtacatagccgatcgtcgtgag

SEQ ID NO: 30033 - DNA, 38 bp, Artificial Sequence
  primer
gtaaaacgacggccagtcccacagtgtgtccttcatct

SEQ ID NO: 30034 - DNA, 38 bp, Artificial Sequence
  primer
gtaaaacgacggccagttggagtgtctgccctcttctc

SEQ ID NO: 30035 - DNA, 21 bp, Artificial Sequence
  primer
aattgcttggtatctggaggc

SEQ ID NO: 30036 - DNA, 41 bp, Artificial Sequence
  primer
gtaaaacgacggccagtttgcagataggatttgaagttgac

SEQ ID NO: 30037 - DNA, 28 bp, Artificial Sequence
  primer
gcctaggtaacagagtgagactcttaaa

SEQ ID NO: 30038 - DNA, 21 bp, Artificial Sequence
  primer
ttgaactccagcagggatagg

SEQ ID NO: 30039 - DNA, 38 bp, Artificial Sequence
  primer
gtaaaacgacggccagtggtgttgatatggatggttgc

SEQ ID NO: 30040 - DNA, 38 bp, Artificial Sequence
  primer
gtaaaacgacggccagtatctttggttcatggccagtc

SEQ ID NO: 30041 - DNA, 29 bp, Artificial Sequence
  primer
aatctgacttaaatgataagagatggtgt

SEQ ID NO: 30042 - DNA, 36 bp, Artificial Sequence
  primer
gtaaaacgacggccagtgctgcagtaggcactgtgg

SEQ ID NO: 30043 - DNA, 20 bp, Artificial Sequence
  primer
tgcactccaacctggacaag

SEQ ID NO: 30044 - DNA, 25 bp, Artificial Sequence
  primer
atagcaactgaaattatggaaggag

SEQ ID NO: 30045 - DNA, 38 bp, Artificial Sequence
  primer
gtaaaacgacggccagtattggtggcagtcatacaacc

SEQ ID NO: 30046 - DNA, 23 bp, Artificial Sequence
  primer
ttgacatttggagtataggcacc

SEQ ID NO: 30047 - DNA, 40 bp, Artificial Sequence
  primer
gtaaaacgacggccagtgacctcaagagtgaaatgtaggg

SEQ ID NO: 30048 - DNA, 20 bp, Artificial Sequence
  primer
gtgttaaagccggtcggaac

SEQ ID NO: 30049 - DNA, 38 bp, Artificial Sequence
  primer
gtaaaacgacggccagtaactcctggtcagtgaggtgc

SEQ ID NO: 30050 - DNA, 38 bp, Artificial Sequence
  primer
gtaaaacgacggccagtgaaggtatgtgtcccagaggg

SEQ ID NO: 30051 - DNA, 38 bp, Artificial Sequence
  primer
gtaaaacgacggccagtggagggaggtgtcagttcatc

SEQ ID NO: 30052 - DNA, 21 bp, Artificial Sequence
  primer
ctcatgcatggagaaagaggg

SEQ ID NO: 30053 - DNA, 21 bp, Artificial Sequence
  primer
acgtgtccagtgctgtcattc

SEQ ID NO: 30054 - DNA, 20 bp, Artificial Sequence
  primer
ggctccctaagctggaacag

SEQ ID NO: 30055 - DNA, 38 bp, Artificial Sequence
  primer
gtaaaacgacggccagtagggatggtaggattggactg

SEQ ID NO: 30056 - DNA, 39 bp, Artificial Sequence
  primer
gtaaaacgacggccagtgggtgcctaacactagaatggg

SEQ ID NO: 30057 - DNA, 35 bp, Artificial Sequence
  primer
gtaaaacgacggccagtaaggtaggtgggtggccc

SEQ ID NO: 30058 - DNA, 38 bp, Artificial Sequence
  primer
gtaaaacgacggccagtgatgggcagccagtattatcg

SEQ ID NO: 30059 - DNA, 21 bp, Artificial Sequence
  primer
gcaaatggtgagatgttggag

SEQ ID NO: 30060 - DNA, 22 bp, Artificial Sequence
  primer
cagagtgaggctctgtctcaaa

SEQ ID NO: 30061 - DNA, 21 bp, Artificial Sequence
  primer
ggccctttaggtaggatcagg

SEQ ID NO: 30062 - DNA, 38 bp, Artificial Sequence
  primer
gtaaaacgacggccagtagggaacatagcgagaccctg

SEQ ID NO: 30063 - DNA, 22 bp, Artificial Sequence
  primer
gctcgagaacttgatggatttg

SEQ ID NO: 30064 - DNA, 21 bp, Artificial Sequence
  primer
ggctgttcctccctattatgc

SEQ ID NO: 30065 - DNA, 38 bp, Artificial Sequence
  primer
gtaaaacgacggccagtcagaatctcattgatgtgggc

SEQ ID NO: 30066 - DNA, 38 bp, Artificial Sequence
  primer
gtaaaacgacggccagttatgtcagggtgagctgcttc

SEQ ID NO: 30067 - DNA, 21 bp, Artificial Sequence
  primer
cccatttggtggaatgctatc

SEQ ID NO: 30068 - DNA, 38 bp, Artificial Sequence
  primer
gtaaaacgacggccagtgcagattgctgtggttaggag

SEQ ID NO: 30069 - DNA, 39 bp, Artificial Sequence
  primer
gtaaaacgacggccagttgaggttaaagttgctgaaggc

SEQ ID NO: 30070 - DNA, 21 bp, Artificial Sequence
  primer
aaatctgaacttctgggaggc

SEQ ID NO: 30071 - DNA, 21 bp, Artificial Sequence
  primer
ggcatgagccactttactctg

SEQ ID NO: 30072 - DNA, 21 bp, Artificial Sequence
  primer
gaacaggctgcccagtgttac

SEQ ID NO: 30073 - DNA, 39 bp, Artificial Sequence
  primer
gtaaaacgacggccagtcctccttgatctgtggaacttg

SEQ ID NO: 30074 - DNA, 21 bp, Artificial Sequence
  primer
agtcgtgtttgtgtttgaccc

SEQ ID NO: 30075 - DNA, 38 bp, Artificial Sequence
  primer
gtaaaacgacggccagtttgtggtgtggcctagaaatg

SEQ ID NO: 30076 - DNA, 24 bp, Artificial Sequence
  primer
cctatttcccttgatgttatttgc

SEQ ID NO: 30077 - DNA, 21 bp, Artificial Sequence
  primer
tgggagtctgtgactgtaccc

SEQ ID NO: 30078 - DNA, 21 bp, Artificial Sequence
  primer
attcctggccacatttactgg

SEQ ID NO: 30079 - DNA, 38 bp, Artificial Sequence
  primer
gtaaaacgacggccagtttcttgcctctttcacccaag

SEQ ID NO: 30080 - DNA, 38 bp, Artificial Sequence
  primer
gtaaaacgacggccagttactcagggctgtgtgtggtc

SEQ ID NO: 30081 - DNA, 38 bp, Artificial Sequence
  primer
gtaaaacgacggccagttccttcttaccctgaaggagc

SEQ ID NO: 30082 - DNA, 37 bp, Artificial Sequence
  primer
gtaaaacgacggccagtatcatcccaggaaaccttcg

SEQ ID NO: 30083 - DNA, 39 bp, Artificial Sequence
  primer
gtaaaacgacggccagtgagcaattcggttagacactgg

SEQ ID NO: 30084 - DNA, 20 bp, Artificial Sequence
  primer
aaagatgcctcctaccagcc

SEQ ID NO: 30085 - DNA, 22 bp, Artificial Sequence
  primer
ccacacatcgggtacttgaatc

SEQ ID NO: 30086 - DNA, 38 bp, Artificial Sequence
  primer
gtaaaacgacggccagttttgaattgcccatttccagt

SEQ ID NO: 30087 - DNA, 20 bp, Artificial Sequence
  primer
ccaggaacttgcaactcagc

SEQ ID NO: 30088 - DNA, 21 bp, Artificial Sequence
  primer
ttgtagccctaggcagagagg

SEQ ID NO: 30089 - DNA, 20 bp, Artificial Sequence
  primer
gcagctgcaactagaggctt

SEQ ID NO: 30090 - DNA, 38 bp, Artificial Sequence
  primer
gtaaaacgacggccagtgctttcccggtgtagtgtttc

SEQ ID NO: 30091 - DNA, 21 bp, Artificial Sequence
  primer
ggacgatgtgtcagctctcag

SEQ ID NO: 30092 - DNA, 20 bp, Artificial Sequence
  primer
gcccttgtctttgcccttac

SEQ ID NO: 30093 - DNA, 38 bp, Artificial Sequence
  primer
gtaaaacgacggccagtccatctaccacaagctttccc

SEQ ID NO: 30094 - DNA, 21 bp, Artificial Sequence
  primer
gagaggtggagaaggtagggc

SEQ ID NO: 30095 - DNA, 36 bp, Artificial Sequence
  primer
gtaaaacgacggccagtagctctccgggaagaggag

SEQ ID NO: 30096 - DNA, 36 bp, Artificial Sequence
  primer
gtaaaacgacggccagtagcctcggagaagaggagg

SEQ ID NO: 30097 - DNA, 38 bp, Artificial Sequence
  primer
gtaaaacgacggccagtacctctggccaatgagagaag

SEQ ID NO: 30098 - DNA, 38 bp, Artificial Sequence
  primer
gtaaaacgacggccagttcaggatgatgatgcagttcc

SEQ ID NO: 30099 - DNA, 38 bp, Artificial Sequence
  primer
gtaaaacgacggccagtttggctaagtttgtggcagag

SEQ ID NO: 30100 - DNA, 38 bp, Artificial Sequence
  primer
gtaaaacgacggccagtactgaatttgaaggccaaagc

SEQ ID NO: 30101 - DNA, 38 bp, Artificial Sequence
  primer
gtaaaacgacggccagtaggcagatttgggactgtagc

SEQ ID NO: 30102 - DNA, 37 bp, Artificial Sequence
  primer
gtaaaacgacggccagtctttgccaagagggtgaatg

SEQ ID NO: 30103 - DNA, 38 bp, Artificial Sequence
  primer
gtaaaacgacggccagttgctctaaagctttctgtggc

SEQ ID NO: 30104 - DNA, 21 bp, Artificial Sequence
  primer
cagtctctgtgtgagggttgg

SEQ ID NO: 30105 - DNA, 38 bp, Artificial Sequence; identical to SEQ ID NO: 30090
  primer

SEQ ID NO: 30106 - DNA, 38 bp, Artificial Sequence
  primer
gtaaaacgacggccagttaggtaagtgggaggagctgg

SEQ ID NO: 30107 - DNA, 21 bp, Artificial Sequence
  primer
ggacgatgtgtcagctctcag

SEQ ID NO: 30108 - DNA, 21 bp, Artificial Sequence
  primer
aggaaagctgagggaactgtg

SEQ ID NO: 30109 - DNA, 21 bp, Artificial Sequence
  primer
ggacagagcaagactccactg

SEQ ID NO: 30110 - DNA, 38 bp, Artificial Sequence
  primer
gtaaaacgacggccagtggtaccaatcgagaggctttg

SEQ ID NO: 30111 - DNA, 41 bp, Artificial Sequence
  primer
gtaaaacgacggccagtcatatcaactaggaatagggctcc

SEQ ID NO: 30112 - DNA, 37 bp, Artificial Sequence
  primer
gtaaaacgacggccagtgaggcagagggtttccattg

SEQ ID NO: 30113 - DNA, 38 bp, Artificial Sequence
  primer
gtaaaacgacggccagttggcattatccaaatccagtg

SEQ ID NO: 30114 - DNA, 37 bp, Artificial Sequence
  primer
gtaaaacgacggccagtgctcccaggagatgttgttg

SEQ ID NO: 30115 - DNA, 21 bp, Artificial Sequence
  primer
gggctcaagtgatctccctac

SEQ ID NO: 30116 - DNA, 38 bp, Artificial Sequence
  primer
gtaaaacgacggccagtgggtcacttggaaagaaggac

SEQ ID NO: 30117 - DNA, 38 bp, Artificial Sequence
  primer
gtaaaacgacggccagtggctggacatacagtggacag

SEQ ID NO: 30118 - DNA, 38 bp, Artificial Sequence
  primer
gtaaaacgacggccagtggtccacattatcccaggttg

SEQ ID NO: 30119 - DNA, 22 bp, Artificial Sequence
  primer
caaacacagggagattggaaag

SEQ ID NO: 30120 - DNA, 21 bp, Artificial Sequence
  primer
taacaactcaactcccagggc

SEQ ID NO: 30121 - DNA, 22 bp, Artificial Sequence
  primer
gggcaaagagcaagatcctatc

SEQ ID NO: 30122 - DNA, 39 bp, Artificial Sequence
  primer
gtaaaacgacggccagtgcccatgcctagtacatggtag

SEQ ID NO: 30123 - DNA, 20 bp, Artificial Sequence
  primer
acttcgggtattcccgtgtc

SEQ ID NO: 30124 - DNA, 37 bp, Artificial Sequence
  primer
gtaaaacgacggccagtagtttgctctgtgggcattg

SEQ ID NO: 30125 - DNA, 22 bp, Artificial Sequence
  primer
gcaaaccgtttctccataattc

SEQ ID NO: 30126 - DNA, 21 bp, Artificial Sequence
  primer
cctgggtaacaaagcaagacc

SEQ ID NO: 30127 - DNA, 20 bp, Artificial Sequence
  primer
tgcgctttcacttgatttgg

SEQ ID NO: 30128 - DNA, 22 bp, Artificial Sequence
  primer
aaggcctatttcctgtttccac

SEQ ID NO: 30129 - DNA, 22 bp, Artificial Sequence
  primer
tctcacagacagcctgagacag

SEQ ID NO: 30130 - DNA, 21 bp, Artificial Sequence
  primer
tgtccctaagactgatttgcc

SEQ ID NO: 30131 - DNA, 38 bp, Artificial Sequence
  primer
gtaaaacgacggccagtgtagatgggagcgttgtgttg

SEQ ID NO: 30132 - DNA, 20 bp, Artificial Sequence
  primer
ccagtccgagtccctcattt

SEQ ID NO: 30133 - DNA, 38 bp, Artificial Sequence
  primer
gtaaaacgacggccagtatactggagaaagggctgagg

SEQ ID NO: 30134 - DNA, 21 bp, Artificial Sequence
  primer
acacctcagattcaggccttt

SEQ ID NO: 30135 - DNA, 22 bp, Artificial Sequence
  primer
aagataatgaccagggctttcc

SEQ ID NO: 30136 - DNA, 25 bp, Artificial Sequence
  primer
tctttctgttctaagttgaggcttg

SEQ ID NO: 30137 - DNA, 39 bp, Artificial Sequence
  primer
gtaaaacgacggccagtgcctctcctctaagaccaccag

SEQ ID NO: 30138 - DNA, 38 bp, Artificial Sequence
  primer
gtaaaacgacggccagttgagtcacgttggttctcacc

SEQ ID NO: 30139 - DNA, 39 bp, Artificial Sequence
  primer
gtaaaacgacggccagtgtgcctgccatttcttagtacc

SEQ ID NO: 30140 - DNA, 38 bp, Artificial Sequence
  primer
gtaaaacgacggccagttcaggagactgaagcaggaga

SEQ ID NO: 30141 - DNA, 22 bp, Artificial Sequence
  primer
ggaactcattaggaagaggcag

SEQ ID NO: 30142 - DNA, 38 bp, Artificial Sequence
  primer
gtaaaacgacggccagtgtgttcagcaccatagcttgc

SEQ ID NO: 30143 - DNA, 22 bp, Artificial Sequence
  primer
ccaggatggtcttaatgtcctg

SEQ ID NO: 30144 - DNA, 23 bp, Artificial Sequence
  primer
tgtttcagcttcgttcctatctg

SEQ ID NO: 30145 - DNA, 38 bp, Artificial Sequence
  primer
gtaaaacgacggccagttacagcctcagcctcccttag

SEQ ID NO: 30146 - DNA, 41 bp, Artificial Sequence
  primer
gtaaaacgacggccagtggattgaattacgtagaaagccag

SEQ ID NO: 30147 - DNA, 20 bp, Artificial Sequence
  primer
ggagacctctggcctctgac

SEQ ID NO: 30148 - DNA, 38 bp, Artificial Sequence
  primer
gtaaaacgacggccagtccgaccaagcaaagttaatcg

SEQ ID NO: 30149 - DNA, 38 bp, Artificial Sequence
  primer
gtaaaacgacggccagtttacaggacatcagcgacagc

SEQ ID NO: 30150 - DNA, 38 bp, Artificial Sequence
  primer
gtaaaacgacggccagttgcatatccattcttgggaac

SEQ ID NO: 30151 - DNA, 36 bp, Artificial Sequence
  primer
gtaaaacgacggccagtcactcttaggcctcggtgc

SEQ ID NO: 30152 - DNA, 21 bp, Artificial Sequence
  primer
tgaaagaactgagctgctccc

SEQ ID NO: 30153 - DNA, 38 bp, Artificial Sequence
  primer
gtaaaacgacggccagtactgaacgagtccactgttgg

SEQ ID NO: 30154 - DNA, 38 bp, Artificial Sequence
  primer
gtaaaacgacggccagttccttactgtccctcagcagc

SEQ ID NO: 30155 - DNA, 38 bp, Artificial Sequence
  primer
gtaaaacgacggccagtgagaccatgaaacagcccttc

SEQ ID NO: 30156 - DNA, 21 bp, Artificial Sequence
  primer
gtgacctcaagacgtccaacc

SEQ ID NO: 30157 - DNA, 36 bp, Artificial Sequence
  primer
gtaaaacgacggccagtagtcctgggcgtctgagtg

SEQ ID NO: 30158 - DNA, 38 bp, Artificial Sequence
  primer
gtaaaacgacggccagttcaacaaggtgttcaaggtgg

SEQ ID NO: 30159 - DNA, 20 bp, Artificial Sequence
  primer
accacgttccagaactgctc

SEQ ID NO: 30160 - DNA, 21 bp, Artificial Sequence
  primer
ctcaagcatgagtatttccgc

SEQ ID NO: 30161 - DNA, 20 bp, Artificial Sequence
  primer
ggagacctctggcctctgac

SEQ ID NO: 30162 - DNA, 38 bp, Artificial Sequence; identical to SEQ ID NO: 30148
  primer

SEQ ID NO: 30163 - DNA, 38 bp, Artificial Sequence; identical to SEQ ID NO: 30149
  primer

SEQ ID NO: 30164 - DNA, 38 bp, Artificial Sequence; identical to SEQ ID NO: 30150
  primer

SEQ ID NO: 30165 - DNA, 36 bp, Artificial Sequence; identical to SEQ ID NO: 30151
  primer

SEQ ID NO: 30166 - DNA, 21 bp, Artificial Sequence
  primer
tgaaagaactgagctgctccc

SEQ ID NO: 30167 - DNA, 38 bp, Artificial Sequence; identical to SEQ ID NO: 30153
  primer

SEQ ID NO: 30168 - DNA, 38 bp, Artificial Sequence; identical to SEQ ID NO: 30154
  primer

SEQ ID NO: 30169 - DNA, 38 bp, Artificial Sequence; identical to SEQ ID NO: 30155
  primer

SEQ ID NO: 30170 - DNA, 21 bp, Artificial Sequence
  primer
gtgacctcaagacgtccaacc

SEQ ID NO: 30171 - DNA, 36 bp, Artificial Sequence; identical to SEQ ID NO: 30157
  primer

SEQ ID NO: 30172 - DNA, 38 bp, Artificial Sequence; identical to SEQ ID NO: 30158
  primer

SEQ ID NO: 30173 - DNA, 20 bp, Artificial Sequence
  primer
accacgttccagaactgctc

SEQ ID NO: 30174 - DNA, 21 bp, Artificial Sequence
  primer
ctcaagcatgagtatttccgc

SEQ ID NO: 30175 - DNA, 38 bp, Artificial Sequence; identical to SEQ ID NO: 30142
  primer

SEQ ID NO: 30176 - DNA, 22 bp, Artificial Sequence
  primer
ccaggatggtcttaatgtcctg

SEQ ID NO: 30177 - DNA, 23 bp, Artificial Sequence
  primer
tgtttcagcttcgttcctatctg

SEQ ID NO: 30178 - DNA, 38 bp, Artificial Sequence; identical to SEQ ID NO: 30145
  primer

SEQ ID NO: 30179 - DNA, 20 bp, Artificial Sequence
  primer
gggacagatgaagactccgt

SEQ ID NO: 30180 - DNA, 20 bp, Artificial Sequence
  primer
ggagacctctggcctctgac

SEQ ID NO: 30181 - DNA, 38 bp, Artificial Sequence; identical to SEQ ID NO: 30148
  primer

SEQ ID NO: 30182 - DNA, 38 bp, Artificial Sequence; identical to SEQ ID NO: 30149
  primer

SEQ ID NO: 30183 - DNA, 38 bp, Artificial Sequence; identical to SEQ ID NO: 30150
  primer

SEQ ID NO: 30184 - DNA, 36 bp, Artificial Sequence; identical to SEQ ID NO: 30151
  primer

SEQ ID NO: 30185 - DNA, 21 bp, Artificial Sequence
  primer
tgaaagaactgagctgctccc

SEQ ID NO: 30186 - DNA, 38 bp, Artificial Sequence; identical to SEQ ID NO: 30153
  primer

SEQ ID NO: 30187 - DNA, 38 bp, Artificial Sequence; identical to SEQ ID NO: 30154
  primer

SEQ ID NO: 30188 - DNA, 38 bp, Artificial Sequence; identical to SEQ ID NO: 30155
  primer

SEQ ID NO: 30189 - DNA, 21 bp, Artificial Sequence
  primer
gtgacctcaagacgtccaacc

SEQ ID NO: 30190 - DNA, 36 bp, Artificial Sequence; identical to SEQ ID NO: 30157
  primer

SEQ ID NO: 30191 - DNA, 38 bp, Artificial Sequence; identical to SEQ ID NO: 30158
  primer

SEQ ID NO: 30192 - DNA, 20 bp, Artificial Sequence
  primer
accacgttccagaactgctc

SEQ ID NO: 30193 - DNA, 21 bp, Artificial Sequence
  primer
ctcaagcatgagtatttccgc

SEQ ID NO: 30194 - DNA, 38 bp, Artificial Sequence; identical to SEQ ID NO: 30142
  primer

SEQ ID NO: 30195 - DNA, 22 bp, Artificial Sequence
  primer
ccaggatggtcttaatgtcctg

SEQ ID NO: 30196 - DNA, 23 bp, Artificial Sequence
  primer
tgtttcagcttcgttcctatctg

SEQ ID NO: 30197 - DNA, 38 bp, Artificial Sequence; identical to SEQ ID NO: 30145
  primer

SEQ ID NO: 30198 - DNA, 41 bp, Artificial Sequence; identical to SEQ ID NO: 30146
  primer

SEQ ID NO: 30199 - DNA, 20 bp, Artificial Sequence
  primer
ggagacctctggcctctgac

SEQ ID NO: 30200 - DNA, 38 bp, Artificial Sequence; identical to SEQ ID NO: 30148
  primer

SEQ ID NO: 30201 - DNA, 38 bp, Artificial Sequence; identical to SEQ ID NO: 30149
  primer

SEQ ID NO: 30202 - DNA, 38 bp, Artificial Sequence; identical to SEQ ID NO: 30150
  primer

SEQ ID NO: 30203 - DNA, 36 bp, Artificial Sequence; identical to SEQ ID NO: 30151
  primer

SEQ ID NO: 30204 - DNA, 21 bp, Artificial Sequence
  primer
tgaaagaactgagctgctccc

SEQ ID NO: 30205 - DNA, 38 bp, Artificial Sequence; identical to SEQ ID NO: 30153
  primer

SEQ ID NO: 30206 - DNA, 38 bp, Artificial Sequence; identical to SEQ ID NO: 30154
  primer

SEQ ID NO: 30207 - DNA, 38 bp, Artificial Sequence; identical to SEQ ID NO: 30155
  primer

SEQ ID NO: 30208 - DNA, 21 bp, Artificial Sequence
  primer
gtgacctcaagacgtccaacc

SEQ ID NO: 30209 - DNA, 36 bp, Artificial Sequence; identical to SEQ ID NO: 30157
  primer

SEQ ID NO: 30210 - DNA, 38 bp, Artificial Sequence; identical to SEQ ID NO: 30158
  primer

SEQ ID NO: 30211 - DNA, 20 bp, Artificial Sequence
  primer
accacgttccagaactgctc

SEQ ID NO: 30212 - DNA, 21 bp, Artificial Sequence
  primer
ctcaagcatgagtatttccgc

SEQ ID NO: 30213 - DNA, 38 bp, Artificial Sequence; identical to SEQ ID NO: 30142
  primer

SEQ ID NO: 30214 - DNA, 22 bp, Artificial Sequence
  primer
ccaggatggtcttaatgtcctg

SEQ ID NO: 30215 - DNA, 23 bp, Artificial Sequence
  primer
tgtttcagcttcgttcctatctg

SEQ ID NO: 30216 - DNA, 38 bp, Artificial Sequence; identical to SEQ ID NO: 30145
  primer

SEQ ID NO: 30217 - DNA, 41 bp, Artificial Sequence; identical to SEQ ID NO: 30146
  primer

SEQ ID NO: 30218 - DNA, 20 bp, Artificial Sequence
  primer
ggagacctctggcctctgac

SEQ ID NO: 30219 - DNA, 38 bp, Artificial Sequence; identical to SEQ ID NO: 30148
  primer

SEQ ID NO: 30220 - DNA, 38 bp, Artificial Sequence; identical to SEQ ID NO: 30149
  primer

SEQ ID NO: 30221 - DNA, 39 bp, Artificial Sequence
  primer
gtaaaacgacggccagtccatatccattcttgggaacac

SEQ ID NO: 30222 - DNA, 36 bp, Artificial Sequence; identical to SEQ ID NO: 30151
  primer

SEQ ID NO: 30223 - DNA, 21 bp, Artificial Sequence
  primer
tgaaagaactgagctgctccc

SEQ ID NO: 30224 - DNA, 38 bp, Artificial Sequence; identical to SEQ ID NO: 30153
  primer

SEQ ID NO: 30225 - DNA, 38 bp, Artificial Sequence
  primer
gtaaaacgacggccagtaggtccttactgtccctcagc

SEQ ID NO: 30226 - DNA, 38 bp, Artificial Sequence; identical to SEQ ID NO: 30155
  primer

SEQ ID NO: 30227 - DNA, 21 bp, Artificial Sequence
  primer
gtgacctcaagacgtccaacc

SEQ ID NO: 30228 - DNA, 36 bp, Artificial Sequence; identical to SEQ ID NO: 30157
  primer

SEQ ID NO: 30229 - DNA, 37 bp, Artificial Sequence
  primer
gtaaaacgacggccagtacaggtgctgggttgagatg

SEQ ID NO: 30230 - DNA, 20 bp, Artificial Sequence
  primer
accacgttccagaactgctc

SEQ ID NO: 30231 - DNA, 21 bp, Artificial Sequence
  primer
ctcaagcatgagtatttccgc

SEQ ID NO: 30232 - DNA, 38 bp, Artificial Sequence; identical to SEQ ID NO: 30142
  primer

SEQ ID NO: 30233 - DNA, 22 bp, Artificial Sequence
  primer
ccaggatggtcttaatgtcctg

SEQ ID NO: 30234 - DNA, 23 bp, Artificial Sequence
  primer
tgtttcagcttcgttcctatctg

SEQ ID NO: 30235 - DNA, 38 bp, Artificial Sequence; identical to SEQ ID NO: 30145
  primer

SEQ ID NO: 30236 - DNA, 20 bp, Artificial Sequence
  primer
gggacagatgaagactccgt

SEQ ID NO: 30237 - DNA, 20 bp, Artificial Sequence
  primer
ggagacctctggcctctgac

SEQ ID NO: 30238 - DNA, 38 bp, Artificial Sequence; identical to SEQ ID NO: 30148
  primer

SEQ ID NO: 30239 - DNA, 38 bp, Artificial Sequence; identical to SEQ ID NO: 30149
  primer

SEQ ID NO: 30240 - DNA, 39 bp, Artificial Sequence; identical to SEQ ID NO: 30221
  primer

SEQ ID NO: 30241 - DNA, 36 bp, Artificial Sequence; identical to SEQ ID NO: 30151
  primer

SEQ ID NO: 30242 - DNA, 21 bp, Artificial Sequence
  primer
tgaaagaactgagctgctccc

SEQ ID NO: 30243 - DNA, 38 bp, Artificial Sequence; identical to SEQ ID NO: 30153
  primer

SEQ ID NO: 30244 - DNA, 38 bp, Artificial Sequence; identical to SEQ ID NO: 30225
  primer

SEQ ID NO: 30245 - DNA, 38 bp, Artificial Sequence; identical to SEQ ID NO: 30155
  primer

SEQ ID NO: 30246 - DNA, 21 bp, Artificial Sequence
  primer
gtgacctcaagacgtccaacc

SEQ ID NO: 30247 - DNA, 36 bp, Artificial Sequence; identical to SEQ ID NO: 30157
  primer

SEQ ID NO: 30248 - DNA, 37 bp, Artificial Sequence; identical to SEQ ID NO: 30229
  primer

SEQ ID NO: 30249 - DNA, 20 bp, Artificial Sequence
  primer
accacgttccagaactgctc

SEQ ID NO: 30250 - DNA, 21 bp, Artificial Sequence
  primer
ctcaagcatgagtatttccgc

SEQ ID NO: 30251 - DNA, 38 bp, Artificial Sequence; identical to SEQ ID NO: 30142
  primer

SEQ ID NO: 30252 - DNA, 22 bp, Artificial Sequence
  primer
ccaggatggtcttaatgtcctg

SEQ ID NO: 30253 - DNA, 23 bp, Artificial Sequence
  primer
tgtttcagcttcgttcctatctg

SEQ ID NO: 30254 - DNA, 38 bp, Artificial Sequence; identical to SEQ ID NO: 30145
  primer

SEQ ID NO: 30255 - DNA, 41 bp, Artificial Sequence; identical to SEQ ID NO: 30146
  primer

SEQ ID NO: 30256 - DNA, 20 bp, Artificial Sequence
  primer
ggagacctctggcctctgac

SEQ ID NO: 30257 - DNA, 38 bp, Artificial Sequence; identical to SEQ ID NO: 30148
  primer

SEQ ID NO: 30258 - DNA, 38 bp, Artificial Sequence; identical to SEQ ID NO: 30149
  primer

SEQ ID NO: 30259 - DNA, 39 bp, Artificial Sequence; identical to SEQ ID NO: 30221
  primer

SEQ ID NO: 30260 - DNA, 36 bp, Artificial Sequence; identical to SEQ ID NO: 30151
  primer

SEQ ID NO: 30261 - DNA, 21 bp, Artificial Sequence
  primer
tgaaagaactgagctgctccc

SEQ ID NO: 30262 - DNA, 38 bp, Artificial Sequence; identical to SEQ ID NO: 30153
  primer

SEQ ID NO: 30263 - DNA, 38 bp, Artificial Sequence; identical to SEQ ID NO: 30225
  primer

SEQ ID NO: 30264 - DNA, 38 bp, Artificial Sequence; identical to SEQ ID NO: 30155
  primer

SEQ ID NO: 30265 - DNA, 21 bp, Artificial Sequence
  primer
gtgacctcaagacgtccaacc

SEQ ID NO: 30266 - DNA, 36 bp, Artificial Sequence; identical to SEQ ID NO: 30157
  primer

SEQ ID NO: 30267 - DNA, 37 bp, Artificial Sequence; identical to SEQ ID NO: 30229
  primer

SEQ ID NO: 30268 - DNA, 20 bp, Artificial Sequence
  primer
accacgttccagaactgctc

SEQ ID NO: 30269 - DNA, 21 bp, Artificial Sequence
  primer
ctcaagcatgagtatttccgc

SEQ ID NO: 30270 - DNA, 35 bp, Artificial Sequence
  primer
gtaaaacgacggccagtgacccggattatcgtggc

SEQ ID NO: 30271 - DNA, 21 bp, Artificial Sequence
  primer
cggagaagaagttggaggaac

SEQ ID NO: 30272 - DNA, 37 bp, Artificial Sequence
  primer
gtaaaacgacggccagtgcctcctcctcttgcttcag

SEQ ID NO: 30273 - DNA, 21 bp, Artificial Sequence
  primer
ctggtggaatacgaggatgtg

SEQ ID NO: 30274 - DNA, 35 bp, Artificial Sequence
  primer
gtaaaacgacggccagtcagcgaggcctccaagtc

SEQ ID NO: 30275 - DNA, 20 bp, Artificial Sequence
  primer
ccacatccagcagcagtagc

SEQ ID NO: 30276 - DNA, 21 bp, Artificial Sequence
  primer
tagaccagagcgagatcaggg

SEQ ID NO: 30277 - DNA, 21 bp, Artificial Sequence
  primer
tcgtagcaggcacagattgtc

SEQ ID NO: 30278 - DNA, 25 bp, Artificial Sequence
  primer
tttgattgtagataaagccaccaag

SEQ ID NO: 30279 - DNA, 41 bp, Artificial Sequence
  primer
gtaaaacgacggccagtctttagctggaaagaaacttggac

SEQ ID NO: 30280 - DNA, 44 bp, Artificial Sequence
  primer
gtaaaacgacggccagtgggtggcgagtagatattgagttatta

SEQ ID NO: 30281 - DNA, 41 bp, Artificial Sequence
  primer
gtaaaacgacggccagttggaaactgaaacatactttgtgg

SEQ ID NO: 30282 - DNA, 41 bp, Artificial Sequence
  primer
gtaaaacgacggccagtggattaattcttcctctaccagcc

SEQ ID NO: 30283 - DNA, 22 bp, Artificial Sequence
  primer
tgatattgcagtgtgagcagag

SEQ ID NO: 30284 - DNA, 21 bp, Artificial Sequence
  primer
gtgcccagcctatcagtcaac

SEQ ID NO: 30285 - DNA, 21 bp, Artificial Sequence
  primer
aacgatacacaccagccattg

SEQ ID NO: 30286 - DNA, 18 bp, Artificial Sequence
  primer
ggtggcgcatgcctataa

SEQ ID NO: 30287 - DNA, 43 bp, Artificial Sequence
  primer
gtaaaacgacggccagtaacagcaaattaccgataagtaacaa

SEQ ID NO: 30288 - DNA, 22 bp, Artificial Sequence
  primer
tgaaggaagtgggacaataagg

SEQ ID NO: 30289 - DNA, 38 bp, Artificial Sequence
  primer
gtaaaacgacggccagttgggaggagctgtgaattatg

SEQ ID NO: 30290 - DNA, 21 bp, Artificial Sequence
  primer
atccatcaacaccacaacagg

SEQ ID NO: 30291 - DNA, 37 bp, Artificial Sequence
  primer
gtaaaacgacggccagtgaggtcaaggctgcagtgag

SEQ ID NO: 30292 - DNA, 38 bp, Artificial Sequence
  primer
gtaaaacgacggccagtatgacctcatccagcatcaag

SEQ ID NO: 30293 - DNA, 38 bp, Artificial Sequence
  primer
gtaaaacgacggccagtgagtgaaggcagccctgttac

SEQ ID NO: 30294 - DNA, 21 bp, Artificial Sequence
  primer
tgcttcatctcattctggtgg

SEQ ID NO: 30295 - DNA, 38 bp, Artificial Sequence
  primer
gtaaaacgacggccagtcctggacagcacttaaaccac

SEQ ID NO: 30296 - DNA, 35 bp, Artificial Sequence
  primer
gtaaaacgacggccagtaggcggctgttggagaag

SEQ ID NO: 30297 - DNA, 42 bp, Artificial Sequence
  primer
gtaaaacgacggccagtgaaattaagtgcatttccattgttt

SEQ ID NO: 30298 - DNA, 22 bp, Artificial Sequence
  primer
tgcaccaagatattgacagagc

SEQ ID NO: 30299 - DNA, 24 bp, Artificial Sequence
  primer
gagcatttgttacagcattgattg

SEQ ID NO: 30300 - DNA, 41 bp, Artificial Sequence
  primer
gtaaaacgacggccagtgctgacttcaattatgtcaaatgc

SEQ ID NO: 30301 - DNA, 25 bp, Artificial Sequence
  primer
gcatggttctaatagcatgtcaaac

SEQ ID NO: 30302 - DNA, 29 bp, Artificial Sequence
  primer
tttataagtaggctgggattatatctagg

SEQ ID NO: 30303 - DNA, 38 bp, Artificial Sequence
  primer
gtaaaacgacggccagtttgctgaattgttgacttcgg

SEQ ID NO: 30304 - DNA, 38 bp, Artificial Sequence
  primer
gtaaaacgacggccagtataggaaagccaatcctggag

SEQ ID NO: 30305 - DNA, 22 bp, Artificial Sequence
  primer
gctgatgatttctgccaatttc

SEQ ID NO: 30306 - DNA, 24 bp, Artificial Sequence
  primer
tcaagatttgaacactagccacag

SEQ ID NO: 30307 - DNA, 19 bp, Artificial Sequence
  primer
caggttggtcagcagccac

SEQ ID NO: 30308 - DNA, 38 bp, Artificial Sequence
  primer
gtaaaacgacggccagttgtgtgtctgaaccaggaacc

SEQ ID NO: 30309 - DNA, 17 bp, Artificial Sequence
  primer
ccagagctgctggagcg

SEQ ID NO: 30310 - DNA, 19 bp, Artificial Sequence
  primer
ccctcacacacaccctcag

SEQ ID NO: 30311 - DNA, 37 bp, Artificial Sequence
  primer
gtaaaacgacggccagtgtcctccacgtcctcatcct

SEQ ID NO: 30312 - DNA, 38 bp, Artificial Sequence
  primer
gtaaaacgacggccagtgacagaagcagaggccatgag

SEQ ID NO: 30313 - DNA, 22 bp, Artificial Sequence
  primer
ttaagagaaacctgagcgttgg

SEQ ID NO: 30314 - DNA, 38 bp, Artificial Sequence
  primer
gtaaaacgacggccagtcgcggttactagggatgtgac

SEQ ID NO: 30315 - DNA, 19 bp, Artificial Sequence
  primer
gtgcagggattgggtatgg

SEQ ID NO: 30316 - DNA, 37 bp, Artificial Sequence
  primer
gtaaaacgacggccagtgatgctcatggcttcgtcac

SEQ ID NO: 30317 - DNA, 23 bp, Artificial Sequence
  primer
gaaacagatcaagcactttggtg

SEQ ID NO: 30318 - DNA, 38 bp, Artificial Sequence
  primer
gtaaaacgacggccagtaggaggtgagtggagctttcc

SEQ ID NO: 30319 - DNA, 38 bp, Artificial Sequence
  primer
gtaaaacgacggccagtgagcccttcatgtaggtcagg

SEQ ID NO: 30320 - DNA, 21 bp, Artificial Sequence
  primer
gtctacgagtccctccctgag

SEQ ID NO: 30321 - DNA, 36 bp, Artificial Sequence
  primer
gtaaaacgacggccagtgggatgtgcaagggacaac

SEQ ID NO: 30322 - DNA, 38 bp, Artificial Sequence
  primer
gtaaaacgacggccagttagagggattctgggtaacgg

SEQ ID NO: 30323 - DNA, 38 bp, Artificial Sequence
  primer
gtaaaacgacggccagtctgcagacctagaacacagga

SEQ ID NO: 30324 - DNA, 36 bp, Artificial Sequence
  primer
gtaaaacgacggccagtacacccggcctcatacatc

SEQ ID NO: 30325 - DNA, 23 bp, Artificial Sequence
  primer
aagaatggttggtatttcttccc

SEQ ID NO: 30326 - DNA, 22 bp, Artificial Sequence
  primer
caagttcagagcatggtcttcc

SEQ ID NO: 30327 - DNA, 38 bp, Artificial Sequence
  primer
gtaaaacgacggccagtacaaatgtgacagggatcgtg

SEQ ID NO: 30328 - DNA, 21 bp, Artificial Sequence
  primer
agcccaagtctgtctccaaag

SEQ ID NO: 30329 - DNA, 38 bp, Artificial Sequence
  primer
gtaaaacgacggccagttgtgttccattgcaatctgtc

SEQ ID NO: 30330 - DNA, 40 bp, Artificial Sequence
  primer
gtaaaacgacggccagttggctagtgtgactttaatgtgg

SEQ ID NO: 30331 - DNA, 39 bp, Artificial Sequence
  primer
gtaaaacgacggccagttcccagataggttaataggccc

SEQ ID NO: 30332 - DNA, 38 bp, Artificial Sequence
  primer
gtaaaacgacggccagtatgattggtcctgattggtcc

SEQ ID NO: 30333 - DNA, 27 bp, Artificial Sequence
  primer
gagtcagcgtatatggtagattcatgt

SEQ ID NO: 30334 - DNA, 38 bp, Artificial Sequence
  primer
gtaaaacgacggccagtctgggaacatactcggaccag

SEQ ID NO: 30335 - DNA, 41 bp, Artificial Sequence
  primer
gtaaaacgacggccagttgatcttgacatcattggagtgtt

SEQ ID NO: 30336 - DNA, 20 bp, Artificial Sequence
  primer
taaggcctgctcttggaatg

SEQ ID NO: 30337 - DNA, 22 bp, Artificial Sequence
  primer
atgattgaagctgtgcgtttac

SEQ ID NO: 30338 - DNA, 22 bp, Artificial Sequence
  primer
tgagaaccactgcttagtgctg

SEQ ID NO: 30339 - DNA, 38 bp, Artificial Sequence
  primer
gtaaaacgacggccagtacagtaaagagcaagcaggca

SEQ ID NO: 30340 - DNA, 38 bp, Artificial Sequence
  primer
gtaaaacgacggccagtcggctaatgcaccattcttag

SEQ ID NO: 30341 - DNA, 25 bp, Artificial Sequence
  primer
ccataagcagtacagtgtcatcttg

SEQ ID NO: 30342 - DNA, 43 bp, Artificial Sequence
  primer
gtaaaacgacggccagtaatacctcttgccagtgacatattta

SEQ ID NO: 30343 - DNA, 38 bp, Artificial Sequence
  primer
gtaaaacgacggccagtccctattcctcattcgcctta

SEQ ID NO: 30344 - DNA, 38 bp, Artificial Sequence
  primer
gtaaaacgacggccagttcttgctctgagtgcctgaac

SEQ ID NO: 30345 - DNA, 21 bp, Artificial Sequence
  primer
tcttagcaaggaaacactgcc

SEQ ID NO: 30346 - DNA, 42 bp, Artificial Sequence
  primer
gtaaaacgacggccagttgcttgaagtttgtagaattagctg

SEQ ID NO: 30347 - DNA, 23 bp, Artificial Sequence
  primer
aagctgatcagatactcttgccc

SEQ ID NO: 30348 - DNA, 38 bp, Artificial Sequence
  primer
gtaaaacgacggccagtcctgaattgctgaatccttcc

SEQ ID NO: 30349 - DNA, 21 bp, Artificial Sequence
  primer
aatccggactgctgttgtacc

SEQ ID NO: 30350 - DNA, 38 bp, Artificial Sequence
  primer
gtaaaacgacggccagtgcattgcatgacagttgtttg

SEQ ID NO: 30351 - DNA, 44 bp, Artificial Sequence
  primer
gtaaaacgacggccagtttggagtttaaacatacatttctcacc

SEQ ID NO: 30352 - DNA, 25 bp, Artificial Sequence
  primer
ggatcttagaatttgaactgcattg

SEQ ID NO: 30353 - DNA, 38 bp, Artificial Sequence
  primer
gtaaaacgacggccagtctgagggtggtttgaaacttg

SEQ ID NO: 30354 - DNA, 37 bp, Artificial Sequence
  primer
gtaaaacgacggccagtttgacccagtcctgttgacc

SEQ ID NO: 30355 - DNA, 24 bp, Artificial Sequence
  primer
tcacattggaatctgtgtaaatca

SEQ ID NO: 30356 - DNA, 24 bp, Artificial Sequence
  primer
ttgttcctctcaatgtcatcagtt

SEQ ID NO: 30357 - DNA, 38 bp, Artificial Sequence
  primer
gtaaaacgacggccagtgtactttgcaccaacatgcag

SEQ ID NO: 30358 - DNA, 29 bp, Artificial Sequence
  primer
ttctcaatatcagactttgaatcttcatt

SEQ ID NO: 30359 - DNA, 39 bp, Artificial Sequence
  primer
gtaaaacgacggccagttttgccataaatgtggagtcag

SEQ ID NO: 30360 - DNA, 20 bp, Artificial Sequence
  primer
ggattaccatgcctggtctg

SEQ ID NO: 30361 - DNA, 21 bp, Artificial Sequence
  primer
gcatacaccattcaccgtctt

SEQ ID NO: 30362 - DNA, 39 bp, Artificial Sequence
  primer
gtaaaacgacggccagtgatagctattctgatggccaaa

SEQ ID NO: 30363 - DNA, 25 bp, Artificial Sequence
  primer
tgttacaaggtaaattctcattggg

SEQ ID NO: 30364 - DNA, 19 bp, Artificial Sequence
  primer
gcaatatatggcaggcaaa

SEQ ID NO: 30365 - DNA, 38 bp, Artificial Sequence
  primer
gtaaaacgacggccagttttcaccaggcctgtcattat

SEQ ID NO: 30366 - DNA, 41 bp, Artificial Sequence
  primer
gtaaaacgacggccagtccaagtcactgtaggttgtaaggg

SEQ ID NO: 30367 - DNA, 21 bp, Artificial Sequence
  primer
ctcttcccagttgttgacagg

SEQ ID NO: 30368 - DNA, 26 bp, Artificial Sequence
  primer
tcagtttgtttagactttgagcctac

SEQ ID NO: 30369 - DNA, 38 bp, Artificial Sequence
  primer
gtaaaacgacggccagtagctgtatttgttcttcccgc

SEQ ID NO: 30370 - DNA, 26 bp, Artificial Sequence
  primer
agtagattcagacagggaaggttatc

SEQ ID NO: 30371 - DNA, 39 bp, Artificial Sequence
  primer
gtaaaacgacggccagtcattcgtagatattgcaggcag

SEQ ID NO: 30372 - DNA, 26 bp, Artificial Sequence
  primer
gcattgaagagcaattatcatttaac

SEQ ID NO: 30373 - DNA, 25 bp, Artificial Sequence
  primer
catcttgtatgcagtgagtgttacg

SEQ ID NO: 30374 - DNA, 24 bp, Artificial Sequence
  primer
ctcatctgctactttaccaaccag

SEQ ID NO: 30375 - DNA, 21 bp, Artificial Sequence
  primer
actgtgggtaagccagcaatg

SEQ ID NO: 30376 - DNA, 38 bp, Artificial Sequence
  primer
gtaaaacgacggccagtttggtgagtgctaagcaaact

SEQ ID NO: 30377 - DNA, 42 bp, Artificial Sequence
  primer
gtaaaacgacggccagttttgcaccaaatgttcttatcatct

SEQ ID NO: 30378 - DNA, 43 bp, Artificial Sequence
  primer
gtaaaacgacggccagtttcctgtgacttctgatgtcttattc

SEQ ID NO: 30379 - DNA, 21 bp, Artificial Sequence
  primer
tccaaatgatcagcttgttgc

SEQ ID NO: 30380 - DNA, 21 bp, Artificial Sequence
  primer
acatgcctgtgtgtggctatg

SEQ ID NO: 30381 - DNA, 22 bp, Artificial Sequence
  primer
cctggtgtttacagaatccgtc

SEQ ID NO: 30382 - DNA, 41 bp, Artificial Sequence
  primer
gtaaaacgacggccagtcctttccagtcagaattattgttg

SEQ ID NO: 30383 - DNA, 43 bp, Artificial Sequence
  primer
gtaaaacgacggccagttatcaatgtttgtactgtcttggagg

SEQ ID NO: 30384 - DNA, 43 bp, Artificial Sequence
  primer
gtaaaacgacggccagtaaagatcctctactattccacctaaa

SEQ ID NO: 30385 - DNA, 24 bp, Artificial Sequence
  primer
gccattccttactctgtgtcattc

SEQ ID NO: 30386 - DNA, 20 bp, Artificial Sequence
  primer
aaaggatggcctgtcagctc

SEQ ID NO: 30387 - DNA, 21 bp, Artificial Sequence
  primer
gttatttggtcagggtggctg

SEQ ID NO: 30388 - DNA, 19 bp, Artificial Sequence
  primer
ggacggagcccaagatgtc

SEQ ID NO: 30389 - DNA, 21 bp, Artificial Sequence
  primer
ctgcaacagtgttacccagtg

SEQ ID NO: 30390 - DNA, 38 bp, Artificial Sequence
  primer
gtaaaacgacggccagttacagtttagctccagcgtgc

SEQ ID NO: 30391 - DNA, 35 bp, Artificial Sequence
  primer
gtaaaacgacggccagtgagaccggcagtacgctc

SEQ ID NO: 30392 - DNA, 38 bp, Artificial Sequence
  primer
gtaaaacgacggccagtcatggaagactggcctgtaac

SEQ ID NO: 30393 - DNA, 21 bp, Artificial Sequence
  primer
aggcatttgtactggatggtg

SEQ ID NO: 30394 - DNA, 38 bp, Artificial Sequence
  primer
gtaaaacgacggccagtcaggctcgaggcactatactc

SEQ ID NO: 30395 - DNA, 22 bp, Artificial Sequence
  primer
cctgctttgaagctaccatttc

SEQ ID NO: 30396 - DNA, 37 bp, Artificial Sequence
  primer
gtaaaacgacggccagtttctccaaggccacatgttc

SEQ ID NO: 30397 - DNA, 22 bp, Artificial Sequence
  primer
tcagtgtctccttgaccatctg

SEQ ID NO: 30398 - DNA, 36 bp, Artificial Sequence
  primer
gtaaaacgacggccagtgagcaggaagctgcaaggt

SEQ ID NO: 30399 - DNA, 22 bp, Artificial Sequence
  primer
tgcctatgacactgtgtgtgtg

SEQ ID NO: 30400 - DNA, 39 bp, Artificial Sequence
  primer
gtaaaacgacggccagttcctcaatatcatggaagaccg

SEQ ID NO: 30401 - DNA, 38 bp, Artificial Sequence
  primer
gtaaaacgacggccagttccttcgaggtcttgttcttg

SEQ ID NO: 30402 - DNA, 37 bp, Artificial Sequence
  primer
gtaaaacgacggccagtgcacttgcttgggatgaaag

SEQ ID NO: 30403 - DNA, 21 bp, Artificial Sequence
  primer
aagctgatacccacgccatag

SEQ ID NO: 30404 - DNA, 22 bp, Artificial Sequence
  primer
tgaagtcactagctccagctcc

SEQ ID NO: 30405 - DNA, 38 bp, Artificial Sequence
  primer
gtaaaacgacggccagtactgtgtcactgtgtgccgag

SEQ ID NO: 30406 - DNA, 41 bp, Artificial Sequence
  primer
gtaaaacgacggccagtgagaccgtaatggcttaaggttag

SEQ ID NO: 30407 - DNA, 21 bp, Artificial Sequence
  primer
agaaatcccggctctctcatc

SEQ ID NO: 30408 - DNA, 42 bp, Artificial Sequence
  primer
gtaaaacgacggccagtaggagaattgacatcttgaagacac

SEQ ID NO: 30409 - DNA, 38 bp, Artificial Sequence
  primer
gtaaaacgacggccagtatccaggagtaagaaccgctg

SEQ ID NO: 30410 - DNA, 39 bp, Artificial Sequence
  primer
gtaaaacgacggccagtcattcttgagagaagtgcaccc

SEQ ID NO: 30411 - DNA, 38 bp, Artificial Sequence
  primer
gtaaaacgacggccagtcagaacttgcacatttccacc

SEQ ID NO: 30412 - DNA, 20 bp, Artificial Sequence
  primer
cctcctcagggcataggttc

SEQ ID NO: 30413 - DNA, 37 bp, Artificial Sequence
  primer
gtaaaacgacggccagtgcagctggaaggagattgtg

SEQ ID NO: 30414 - DNA, 38 bp, Artificial Sequence
  primer
gtaaaacgacggccagttgcccgtgtttcttacatctg

SEQ ID NO: 30415 - DNA, 18 bp, Artificial Sequence
  primer
ctgggaagcacatcagcc

SEQ ID NO: 30416 - DNA, 38 bp, Artificial Sequence
  primer
gtaaaacgacggccagtactgaagtgtcacatccctgg

SEQ ID NO: 30417 - DNA, 21 bp, Artificial Sequence
  primer
gttccaggcaagtctttagcc

SEQ ID NO: 30418 - DNA, 21 bp, Artificial Sequence
  primer
ctcaagaggaactctggcacc

SEQ ID NO: 30419 - DNA, 39 bp, Artificial Sequence
  primer
gtaaaacgacggccagttccagagtgggaacatgaagtc

SEQ ID NO: 30420 - DNA, 38 bp, Artificial Sequence
  primer
gtaaaacgacggccagtcacggtgtacagcgagtatgg

SEQ ID NO: 30421 - DNA, 38 bp, Artificial Sequence
  primer
gtaaaacgacggccagtgagtggagggaagggaagttg

SEQ ID NO: 30422 - DNA, 21 bp, Artificial Sequence
  primer
tcccagaggaagagagactgc

SEQ ID NO: 30423 - DNA, 38 bp, Artificial Sequence
  primer
gtaaaacgacggccagttttgctcatcaaggtcacgag

SEQ ID NO: 30424 - DNA, 21 bp, Artificial Sequence
  primer
ctacatctcgtggccctcatc

SEQ ID NO: 30425 - DNA, 38 bp, Artificial Sequence
  primer
gtaaaacgacggccagtgaagagcagttgcgacagttg

SEQ ID NO: 30426 - DNA, 20 bp, Artificial Sequence
  primer
gacagagcctcagacggttg

SEQ ID NO: 30427 - DNA, 37 bp, Artificial Sequence
  primer
gtaaaacgacggccagtcaaaggagcaccagttcctg

SEQ ID NO: 30428 - DNA, 38 bp, Artificial Sequence
  primer
gtaaaacgacggccagtctgcgtctgcagagagatgac

SEQ ID NO: 30429 - DNA, 39 bp, Artificial Sequence
  primer
gtaaaacgacggccagtgagctcccagactcacagaatc

SEQ ID NO: 30430 - DNA, 38 bp, Artificial Sequence
  primer
gtaaaacgacggccagtactcccacttcccaccagttc

SEQ ID NO: 30431 - DNA, 21 bp, Artificial Sequence
  primer
aggaatgtgtgtgagctggtg

SEQ ID NO: 30432 - DNA, 35 bp, Artificial Sequence
  primer
gtaaaacgacggccagtaggtgggtgagacccagg

SEQ ID NO: 30433 - DNA, 19 bp, Artificial Sequence
  primer
ggaagtaccggcaggtgag

SEQ ID NO: 30434 - DNA, 36 bp, Artificial Sequence
  primer
gtaaaacgacggccagtacctgtgcaggaggtggtc

SEQ ID NO: 30435 - DNA, 38 bp, Artificial Sequence
  primer
gtaaaacgacggccagttaatgagtgattcggtccagg

SEQ ID NO: 30436 - DNA, 38 bp, Artificial Sequence
  primer
gtaaaacgacggccagtagtgtctggagcaggagaagg

SEQ ID NO: 30437 - DNA, 21 bp, Artificial Sequence
  primer
caagctgtatgatcctgggag

SEQ ID NO: 30438 - DNA, 38 bp, Artificial Sequence
  primer
gtaaaacgacggccagtcaggagcttgaccgacttcac

SEQ ID NO: 30439 - DNA, 38 bp, Artificial Sequence
  primer
gtaaaacgacggccagtggtctggagtccatggtaagg

SEQ ID NO: 30440 - DNA, 21 bp, Artificial Sequence
  primer
caggccaaggtagtcaagtcc

SEQ ID NO: 30441 - DNA, 38 bp, Artificial Sequence
  primer
gtaaaacgacggccagtcacacagcctctgagaccaac

SEQ ID NO: 30442 - DNA, 38 bp, Artificial Sequence
  primer
gtaaaacgacggccagtgtacctacagggagacggcag

SEQ ID NO: 30443 - DNA, 37 bp, Artificial Sequence
  primer
gtaaaacgacggccagtagacggagagcaactgggag

SEQ ID NO: 30444 - DNA, 37 bp, Artificial Sequence
  primer
gtaaaacgacggccagtagctcacagtgggtcattgg

SEQ ID NO: 30445 - DNA, 19 bp, Artificial Sequence
  primer
gctgacacaggtgcaggag

SEQ ID NO: 30446 - DNA, 38 bp, Artificial Sequence
  primer
gtaaaacgacggccagtgactctgccgcttactccatc

SEQ ID NO: 30447 - DNA, 21 bp, Artificial Sequence
  primer
agaggtaaggaccaggccaag

SEQ ID NO: 30448 - DNA, 21 bp, Artificial Sequence
  primer
acagggaccttgactttgctc

SEQ ID NO: 30449 - DNA, 37 bp, Artificial Sequence
  primer
gtaaaacgacggccagtgactcggaggtcactgttgc

SEQ ID NO: 30450 - DNA, 38 bp, Artificial Sequence
  primer
gtaaaacgacggccagtatttcctcctgctcagctttg

SEQ ID NO: 30451 - DNA, 38 bp, Artificial Sequence
  primer
gtaaaacgacggccagtactgcctatgagggctttctg

SEQ ID NO: 30452 - DNA, 38 bp, Artificial Sequence
  primer
gtaaaacgacggccagtgggcaagggactagtggtaag

SEQ ID NO: 30453 - DNA, 36 bp, Artificial Sequence
  primer
gtaaaacgacggccagtctgacagtgcacgctaggc

SEQ ID NO: 30454 - DNA, 38 bp, Artificial Sequence
  primer
gtaaaacgacggccagtagagaagggtcagtgaggcag

SEQ ID NO: 30455 - DNA, 20 bp, Artificial Sequence
  primer
acctgccagtgacactctcc

SEQ ID NO: 30456 - DNA, 38 bp, Artificial Sequence
  primer
gtaaaacgacggccagtcggagctggagaacatagagg

SEQ ID NO: 30457 - DNA, 38 bp, Artificial Sequence
  primer
gtaaaacgacggccagtttcagaggaaggaccttagcg

SEQ ID NO: 30458 - DNA, 37 bp, Artificial Sequence
  primer
gtaaaacgacggccagtgctcaagaaggtgagggtcc

SEQ ID NO: 30459 - DNA, 21 bp, Artificial Sequence
  primer
tgacctacctcaggaaccagc

SEQ ID NO: 30460 - DNA, 38 bp, Artificial Sequence
  primer
gtaaaacgacggccagtcccacagagaaggacgagttc

SEQ ID NO: 30461 - DNA, 38 bp, Artificial Sequence
  primer
gtaaaacgacggccagtatttgtcctggtctgttgtgc

SEQ ID NO: 30462 - DNA, 21 bp, Artificial Sequence
  primer
tcctccttgtgcctgctagtc

SEQ ID NO: 30463 - DNA, 38 bp, Artificial Sequence
  primer
gtaaaacgacggccagttgatacagtgggtgatgggtc

SEQ ID NO: 30464 - DNA, 38 bp, Artificial Sequence
  primer
gtaaaacgacggccagtgagtgccatttacagcttccg

SEQ ID NO: 30465 - DNA, 38 bp, Artificial Sequence
  primer
gtaaaacgacggccagttggactagcagctgtgagcag

SEQ ID NO: 30466 - DNA, 21 bp, Artificial Sequence
  primer
ggaaagatgggagaaaccgag

SEQ ID NO: 30467 - DNA, 38 bp, Artificial Sequence
  primer
gtaaaacgacggccagttgactctctcttgtccttccg

SEQ ID NO: 30468 - DNA, 21 bp, Artificial Sequence
  primer
agtggctgaggtgaagtccag

SEQ ID NO: 30469 - DNA, 38 bp, Artificial Sequence
  primer
gtaaaacgacggccagtggagaggaggtgtggtctcag

SEQ ID NO: 30470 - DNA, 38 bp, Artificial Sequence
  primer
gtaaaacgacggccagtagtgacatgtttggcgacatc

SEQ ID NO: 30471 - DNA, 38 bp, Artificial Sequence
  primer
gtaaaacgacggccagtatctgtgaaagaaagtggccc

SEQ ID NO: 30472 - DNA, 21 bp, Artificial Sequence
  primer
agcacctcggactctgtgttc

SEQ ID NO: 30473 - DNA, 38 bp, Artificial Sequence
  primer
gtaaaacgacggccagtgcttgcagccttatgatctcc

SEQ ID NO: 30474 - DNA, 21 bp, Artificial Sequence
  primer
cttcctcaatagcaaggctgg

SEQ ID NO: 30475 - DNA, 19 bp, Artificial Sequence
  primer
tgaagaaggccaatgacgg

SEQ ID NO: 30476 - DNA, 21 bp, Artificial Sequence
  primer
ctcagcatcatggacaaggag

SEQ ID NO: 30477 - DNA, 20 bp, Artificial Sequence
  primer
actgaggaggaagaatcgcc

SEQ ID NO: 30478 - DNA, 19 bp, Artificial Sequence
  primer
gacacctcgttcctgagcc

SEQ ID NO: 30479 - DNA, 38 bp, Artificial Sequence
  primer
gtaaaacgacggccagtggtcctgttcatctctcaggc

SEQ ID NO: 30480 - DNA, 38 bp, Artificial Sequence
  primer
gtaaaacgacggccagtttcatgccctagtgatttccc

SEQ ID NO: 30481 - DNA, 22 bp, Artificial Sequence
  primer
ccctaggaggaatggtggttag

SEQ ID NO: 30482 - DNA, 37 bp, Artificial Sequence
  primer
gtaaaacgacggccagtttcgtcgtggttcagaaagg

SEQ ID NO: 30483 - DNA, 42 bp, Artificial Sequence
  primer
gtaaaacgacggccagtgaagtaattgtggcagtctaagagc

SEQ ID NO: 30484 - DNA, 38 bp, Artificial Sequence
  primer
gtaaaacgacggccagtagttgctagcctccctgtttg

SEQ ID NO: 30485 - DNA, 38 bp, Artificial Sequence
  primer
gtaaaacgacggccagtgtggcccaatcagaaagaaag

SEQ ID NO: 30486 - DNA, 38 bp, Artificial Sequence
  primer
gtaaaacgacggccagtttctacgaggtggtccagagc

SEQ ID NO: 30487 - DNA, 22 bp, Artificial Sequence
  primer
ttcccgtaagcatttcactagc

SEQ ID NO: 30488 - DNA, 38 bp, Artificial Sequence
  primer
gtaaaacgacggccagtccacatgtcagggactgagtg

SEQ ID NO: 30489 - DNA, 39 bp, Artificial Sequence
  primer
gtaaaacgacggccagtcgtatggtgtaactctggtgcc

SEQ ID NO: 30490 - DNA, 38 bp, Artificial Sequence
  primer
gtaaaacgacggccagtctggtgtgaccgtgttctctc

SEQ ID NO: 30491 - DNA, 21 bp, Artificial Sequence
  primer
cacttcagcctgggagacata

SEQ ID NO: 30492 - DNA, 38 bp, Artificial Sequence
  primer
gtaaaacgacggccagtccttctggctcaagtccagtc

SEQ ID NO: 30493 - DNA, 37 bp, Artificial Sequence
  primer
gtaaaacgacggccagtaaggagagaggccacctgac

SEQ ID NO: 30494 - DNA, 21 bp, Artificial Sequence
  primer
cctgggtgcttggtttctatg

SEQ ID NO: 30495 - DNA, 38 bp, Artificial Sequence
  primer
gtaaaacgacggccagtcacctgctggagttacgagag

SEQ ID NO: 30496 - DNA, 38 bp, Artificial Sequence
  primer
gtaaaacgacggccagtttggtttgggtttctttccac

SEQ ID NO: 30497 - DNA, 38 bp, Artificial Sequence
  primer
gtaaaacgacggccagtgcctgtgagggacattagcac

SEQ ID NO: 30498 - DNA, 38 bp, Artificial Sequence
  primer
gtaaaacgacggccagtccaaacctcttcctgaaccag

SEQ ID NO: 30499 - DNA, 21 bp, Artificial Sequence
  primer
ctttgcaccaacctcgtcatc

SEQ ID NO: 30500 - DNA, 37 bp, Artificial Sequence
  primer
gtaaaacgacggccagtactggccttgggcatctaac

SEQ ID NO: 30501 - DNA, 21 bp, Artificial Sequence
  primer
gcctctagtgtctgtcctggg

SEQ ID NO: 30502 - DNA, 38 bp, Artificial Sequence
  primer
gtaaaacgacggccagttgagtgcagaataccacaggc

SEQ ID NO: 30503 - DNA, 36 bp, Artificial Sequence
  primer
gtaaaacgacggccagtgaagtggcggctttgagtc

SEQ ID NO: 30504 - DNA, 21 bp, Artificial Sequence
  primer
tgtggtgtaagggtgggtagc

SEQ ID NO: 30505 - DNA, 23 bp, Artificial Sequence
  primer
acaagtcagtgtatccattgtgc

SEQ ID NO: 30506 - DNA, 38 bp, Artificial Sequence
  primer
gtaaaacgacggccagtcgtcagaacttggaaatctgg

SEQ ID NO: 30507 - DNA, 38 bp, Artificial Sequence
  primer
gtaaaacgacggccagtcatagctagcaagtggtgggc

SEQ ID NO: 30508 - DNA, 21 bp, Artificial Sequence
  primer
ggtgaatggtgtgaggtaagg

SEQ ID NO: 30509 - DNA, 21 bp, Artificial Sequence
  primer
tgaggttgtttgttcaaaggg

SEQ ID NO: 30510 - DNA, 36 bp, Artificial Sequence
  primer
gtaaaacgacggccagtaaacagtttgccctcctcg

SEQ ID NO: 30511 - DNA, 37 bp, Artificial Sequence
  primer
gtaaaacgacggccagttctgcctgcttcaagattgg

SEQ ID NO: 30512 - DNA, 25 bp, Artificial Sequence
  primer
aaataccatgctagctagaccaaac

SEQ ID NO: 30513 - DNA, 39 bp, Artificial Sequence
  primer
gtaaaacgacggccagtagtcaccctgttgtgctatcaa

SEQ ID NO: 30514 - DNA, 24 bp, Artificial Sequence
  primer
ttgcctttctacaaacttaaaccg

SEQ ID NO: 30515 - DNA, 21 bp, Artificial Sequence
  primer
accgctgtttaattcatgctg

SEQ ID NO: 30516 - DNA, 21 bp, Artificial Sequence
  primer
atttgactcaaggcatgaggg

SEQ ID NO: 30517 - DNA, 38 bp, Artificial Sequence
  primer
gtaaaacgacggccagtgacacatacatgaacgcatgg

SEQ ID NO: 30518 - DNA, 21 bp, Artificial Sequence
  primer
ccaaatcaaagaatggctgtg

SEQ ID NO: 30519 - DNA, 22 bp, Artificial Sequence
  primer
tgcatagatttggatgtgaagc

SEQ ID NO: 30520 - DNA, 38 bp, Artificial Sequence
  primer
gtaaaacgacggccagtgaggcagaggtcttgcacatc

SEQ ID NO: 30521 - DNA, 38 bp, Artificial Sequence
  primer
gtaaaacgacggccagtactccaaatgaaaccacccac

SEQ ID NO: 30522 - DNA, 21 bp, Artificial Sequence
  primer
gcttccttacgtgctgttagc

SEQ ID NO: 30523 - DNA, 41 bp, Artificial Sequence
  primer
gtaaaacgacggccagttctcagctttaggaaagtgacctg

SEQ ID NO: 30524 - DNA, 38 bp, Artificial Sequence
  primer
gtaaaacgacggccagtggtaggagacaagtggcaagc

SEQ ID NO: 30525 - DNA, 39 bp, Artificial Sequence
  primer
gtaaaacgacggccagtgagttgccaatcaagtttaggg

SEQ ID NO: 30526 - DNA, 21 bp, Artificial Sequence
  primer
gttgcagtctttgagcaatgg

SEQ ID NO: 30527 - DNA, 23 bp, Artificial Sequence
  primer
gctttgccaccatgtgactatac

SEQ ID NO: 30528 - DNA, 24 bp, Artificial Sequence
  primer
ccttcatttctgcatctctctagg

SEQ ID NO: 30529 - DNA, 24 bp, Artificial Sequence
  primer
aggtttaaggtgtgtaaagatggg

SEQ ID NO: 30530 - DNA, 38 bp, Artificial Sequence
  primer
gtaaaacgacggccagttagtgcgtggtttagcgagtg

SEQ ID NO: 30531 - DNA, 42 bp, Artificial Sequence
  primer
gtaaaacgacggccagtgtgagttatagcaacttgatgggtt

SEQ ID NO: 30532 - DNA, 43 bp, Artificial Sequence
  primer
gtaaaacgacggccagttttaatgtattatgccattgaaacag

SEQ ID NO: 30533 - DNA, 42 bp, Artificial Sequence
  primer
gtaaaacgacggccagtcccagtcacaactataattacctcg

SEQ ID NO: 30534 - DNA, 38 bp, Artificial Sequence
  primer
gtaaaacgacggccagtccatatctggagcatgagtcg

SEQ ID NO: 30535 - DNA, 26 bp, Artificial Sequence
  primer
ttcaatcctggttagctgttaaattc

SEQ ID NO: 30536 - DNA, 38 bp, Artificial Sequence
  primer
gtaaaacgacggccagttgcctgagaatgacttggatg

SEQ ID NO: 30537 - DNA, 21 bp, Artificial Sequence
  primer
acagtccaatagccattcagc

SEQ ID NO: 30538 - DNA, 25 bp, Artificial Sequence
  primer
tggctcttattatccactactgctt

SEQ ID NO: 30539 - DNA, 36 bp, Artificial Sequence
  primer
gtaaaacgacggccagtgggtctgggcatctgaaat

SEQ ID NO: 30540 - DNA, 38 bp, Artificial Sequence
  primer
gtaaaacgacggccagtcagagtcaagtgagtgcctgg

SEQ ID NO: 30541 - DNA, 21 bp, Artificial Sequence
  primer
gcaaagaagttccagcacaag

SEQ ID NO: 30542 - DNA, 20 bp, Artificial Sequence
  primer
ctttctgggagccgtagtcc

SEQ ID NO: 30543 - DNA, 39 bp, Artificial Sequence
  primer
gtaaaacgacggccagtggttagataaacgctaaggccc

SEQ ID NO: 30544 - DNA, 39 bp, Artificial Sequence
  primer
gtaaaacgacggccagtagctggcgtagaacagtattcc

SEQ ID NO: 30545 - DNA, 38 bp, Artificial Sequence
  primer
gtaaaacgacggccagtctgaatgggccttatctttgg

SEQ ID NO: 30546 - DNA, 20 bp, Artificial Sequence
  primer
gagaggtagggccagaccag

SEQ ID NO: 30547 - DNA, 38 bp, Artificial Sequence
  primer
gtaaaacgacggccagtaacttccttgctgtaatggcg

SEQ ID NO: 30548 - DNA, 38 bp, Artificial Sequence
  primer
gtaaaacgacggccagtttgtgtaccaggaggcacttg

SEQ ID NO: 30549 - DNA, 20 bp, Artificial Sequence
  primer
gcgggagggatctttaagtg

SEQ ID NO: 30550 - DNA, 38 bp, Artificial Sequence
  primer
gtaaaacgacggccagtgcagtgaccaaagtcttcagg

SEQ ID NO: 30551 - DNA, 21 bp, Artificial Sequence
  primer
ggttcaaaggatggagtcagg

SEQ ID NO: 30552 - DNA, 21 bp, Artificial Sequence
  primer
gctacatgatgctcaccttgg

SEQ ID NO: 30553 - DNA, 21 bp, Artificial Sequence
  primer
gtgattgtgatccagagccag

SEQ ID NO: 30554 - DNA, 21 bp, Artificial Sequence
  primer
caaagtcctccttcccaaatg

SEQ ID NO: 30555 - DNA, 38 bp, Artificial Sequence
  primer
gtaaaacgacggccagtaaacagctgatcccattgacc

SEQ ID NO: 30556 - DNA, 24 bp, Artificial Sequence
  primer
ttaagcacctactgtgaacctagc

SEQ ID NO: 30557 - DNA, 39 bp, Artificial Sequence
  primer
gtaaaacgacggccagtttcgtccactgaccttaagaaa

SEQ ID NO: 30558 - DNA, 24 bp, Artificial Sequence
  primer
tttaatatgggagggtaattctgg

SEQ ID NO: 30559 - DNA, 22 bp, Artificial Sequence
  primer
agaatccagcatttgtgttgag

SEQ ID NO: 30560 - DNA, 37 bp, Artificial Sequence
  primer
gtaaaacgacggccagtgattgccacatgaaagggtg

SEQ ID NO: 30561 - DNA, 41 bp, Artificial Sequence
  primer
gtaaaacgacggccagtttcaaagggctacaatgttaggac

SEQ ID NO: 30562 - DNA, 40 bp, Artificial Sequence
  primer
gtaaaacgacggccagtcctcattacagagaacatggacc

SEQ ID NO: 30563 - DNA, 44 bp, Artificial Sequence
  primer
gtaaaacgacggccagttgcttaaacacatgtcagtaatagtgc

SEQ ID NO: 30564 - DNA, 39 bp, Artificial Sequence
  primer
gtaaaacgacggccagtttgtctcttctggttcatctgc

SEQ ID NO: 30565 - DNA, 39 bp, Artificial Sequence
  primer
gtaaaacgacggccagtgacacatggtcactttggaatc

SEQ ID NO: 30566 - DNA, 21 bp, Artificial Sequence
  primer
ttgtctcatgtcgctcctttg

SEQ ID NO: 30567 - DNA, 38 bp, Artificial Sequence
  primer
gtaaaacgacggccagttgacgtgtgtttctatgccag

SEQ ID NO: 30568 - DNA, 38 bp, Artificial Sequence
  primer
gtaaaacgacggccagtgctggtatgtgatgatctgcc

SEQ ID NO: 30569 - DNA, 22 bp, Artificial Sequence
  primer
acatcacgagtattggatgtgg

SEQ ID NO: 30570 - DNA, 37 bp, Artificial Sequence
  primer
gtaaaacgacggccagttggattcaatggctgtaggc

SEQ ID NO: 30571 - DNA, 20 bp, Artificial Sequence
  primer
tcgcaccattgtactcaagc

SEQ ID NO: 30572 - DNA, 38 bp, Artificial Sequence
  primer
gtaaaacgacggccagtttgaacatcagatttccaggc

SEQ ID NO: 30573 - DNA, 38 bp, Artificial Sequence
  primer
gtaaaacgacggccagtcagacgttactgcccaatcag

SEQ ID NO: 30574 - DNA, 40 bp, Artificial Sequence
  primer
gtaaaacgacggccagtcaaacattgaatgaatttgaccc

SEQ ID NO: 30575 - DNA, 25 bp, Artificial Sequence
  primer
tttgaatttgctctaccaacaatta

SEQ ID NO: 30576 - DNA, 39 bp, Artificial Sequence
  primer
gtaaaacgacggccagttgcaaacatgattggtaaatgg

SEQ ID NO: 30577 - DNA, 18 bp, Artificial Sequence
  primer
tctgctgcttggctcctc

SEQ ID NO: 30578 - DNA, 39 bp, Artificial Sequence
  primer
gtaaaacgacggccagtagcacaacaagagtgagagcag

SEQ ID NO: 30579 - DNA, 38 bp, Artificial Sequence
  primer
gtaaaacgacggccagtcctggatgacaaagtgagacc

SEQ ID NO: 30580 - DNA, 37 bp, Artificial Sequence
  primer
gtaaaacgacggccagtgatgacagaagggcaagcac

SEQ ID NO: 30581 - DNA, 38 bp, Artificial Sequence
  primer
gtaaaacgacggccagtatcgcttggcaatgctacttc

SEQ ID NO: 30582 - DNA, 21 bp, Artificial Sequence
  primer
tgcaatgcaatcgtttaatgc

SEQ ID NO: 30583 - DNA, 38 bp, Artificial Sequence
  primer
gtaaaacgacggccagtcttccacttccttccacttcc

SEQ ID NO: 30584 - DNA, 38 bp, Artificial Sequence
  primer
gtaaaacgacggccagttccgacgtggaagagataagg

SEQ ID NO: 30585 - DNA, 21 bp, Artificial Sequence
  primer
tgcaatctcaatctgtgtggg

SEQ ID NO: 30586 - DNA, 21 bp, Artificial Sequence
  primer
ctctcttcccacttgctcacc

SEQ ID NO: 30587 - DNA, 38 bp, Artificial Sequence
  primer
gtaaaacgacggccagttaaggtccatgggtgagtgtg

SEQ ID NO: 30588 - DNA, 21 bp, Artificial Sequence
  primer
atatccaacgtagagggtggg

SEQ ID NO: 30589 - DNA, 38 bp, Artificial Sequence
  primer
gtaaaacgacggccagttaacaacgtgactgtgcctgg

SEQ ID NO: 30590 - DNA, 38 bp, Artificial Sequence
  primer
gtaaaacgacggccagtgacacatgtttgcacgaggac

SEQ ID NO: 30591 - DNA, 21 bp, Artificial Sequence
  primer
ggtccagtttctgacctttgc

SEQ ID NO: 30592 - DNA, 20 bp, Artificial Sequence
  primer
gtcacttccgcttcctttcc

SEQ ID NO: 30593 - DNA, 21 bp, Artificial Sequence
  primer
gcttgtttgggaatcttctcg

SEQ ID NO: 30594 - DNA, 38 bp, Artificial Sequence
  primer
gtaaaacgacggccagtgaaatcaggctctgaactccc

SEQ ID NO: 30595 - DNA, 39 bp, Artificial Sequence
  primer
gtaaaacgacggccagtaatgttgagctcacgttcatcc

SEQ ID NO: 30596 - DNA, 38 bp, Artificial Sequence
  primer
gtaaaacgacggccagttgtgtgtcctgtgggtctttc

SEQ ID NO: 30597 - DNA, 21 bp, Artificial Sequence
  primer
aaagtcaggcgttcctacagc

SEQ ID NO: 30598 - DNA, 37 bp, Artificial Sequence
  primer
gtaaaacgacggccagtcttggtgagtgagaggcagg

SEQ ID NO: 30599 - DNA, 21 bp, Artificial Sequence
  primer
gttaccacagcttgcaggacc

SEQ ID NO: 30600 - DNA, 21 bp, Artificial Sequence
  primer
ggaagacagagcgagatcctg

SEQ ID NO: 30601 - DNA, 21 bp, Artificial Sequence
  primer
ttgctctctgcacggtttatg

SEQ ID NO: 30602 - DNA, 41 bp, Artificial Sequence
  primer
gtaaaacgacggccagtttacccagaggtatcaatgttcag

SEQ ID NO: 30603 - DNA, 41 bp, Artificial Sequence
  primer
gtaaaacgacggccagtaaaggcctggttaagtgtataggg

SEQ ID NO: 30604 - DNA, 22 bp, Artificial Sequence
  primer
gcattatgcaaaggacaaagaa

SEQ ID NO: 30605 - DNA, 21 bp, Artificial Sequence
  primer
agtaagcgtatggcctgttcc

SEQ ID NO: 30606 - DNA, 18 bp, Artificial Sequence
  primer
agccactgcacctggttg

SEQ ID NO: 30607 - DNA, 38 bp, Artificial Sequence
  primer
gtaaaacgacggccagtagttgctgctccatttatccc

SEQ ID NO: 30608 - DNA, 38 bp, Artificial Sequence
  primer
gtaaaacgacggccagtcacttaggtggtggtaacccg

SEQ ID NO: 30609 - DNA, 37 bp, Artificial Sequence
  primer
gtaaaacgacggccagtcctcgtccctacccagtttc

SEQ ID NO: 30610 - DNA, 38 bp, Artificial Sequence
  primer
gtaaaacgacggccagtttctgaaagacttcgaccgtg

SEQ ID NO: 30611 - DNA, 38 bp, Artificial Sequence
  primer
gtaaaacgacggccagttgaaggttagaccaagggctg

SEQ ID NO: 30612 - DNA, 20 bp, Artificial Sequence
  primer
ttaggtcttgggctgtgtgg

SEQ ID NO: 30613 - DNA, 38 bp, Artificial Sequence
  primer
gtaaaacgacggccagtgcagggcaagctcaattattc

SEQ ID NO: 30614 - DNA, 20 bp, Artificial Sequence
  primer
aaacccagccagtggaagtc

SEQ ID NO: 30615 - DNA, 38 bp, Artificial Sequence
  primer
gtaaaacgacggccagttctccacgtgtcactcctctg

SEQ ID NO: 30616 - DNA, 38 bp, Artificial Sequence
  primer
gtaaaacgacggccagtaactgcaacttgaggccagag

SEQ ID NO: 30617 - DNA, 38 bp, Artificial Sequence
  primer
gtaaaacgacggccagtctgtcttgccacttctccatc

SEQ ID NO: 30618 - DNA, 21 bp, Artificial Sequence
  primer
agatcccacacacacctagcc

SEQ ID NO: 30619 - DNA, 35 bp, Artificial Sequence
  primer
gtaaaacgacggccagtcaggtgagtgagccaggg

SEQ ID NO: 30620 - DNA, 38 bp, Artificial Sequence
  primer
gtaaaacgacggccagttcctctctgaaccagattggg

SEQ ID NO: 30621 - DNA, 21 bp, Artificial Sequence
  primer
gctgtagacagcacctctccc

SEQ ID NO: 30622 - DNA, 21 bp, Artificial Sequence
  primer
tttcaactgtatgtcaggccc

SEQ ID NO: 30623 - DNA, 21 bp, Artificial Sequence
  primer
aggaccagggtctaatggctc

SEQ ID NO: 30624 - DNA, 38 bp, Artificial Sequence
  primer
gtaaaacgacggccagttccatccatggtctgatatgc

SEQ ID NO: 30625 - DNA, 20 bp, Artificial Sequence
  primer
agaccgaagggaaacacagg

SEQ ID NO: 30626 - DNA, 38 bp, Artificial Sequence
  primer
gtaaaacgacggccagtgttggacttcgtctcctccac

SEQ ID NO: 30627 - DNA, 38 bp, Artificial Sequence
  primer
gtaaaacgacggccagtgatgcctcaagttcattgcag

SEQ ID NO: 30628 - DNA, 21 bp, Artificial Sequence
  primer
caagctctagcagggccatag

SEQ ID NO: 30629 - DNA, 38 bp, Artificial Sequence
  primer
gtaaaacgacggccagtagttcttccatcttccgatgc

SEQ ID NO: 30630 - DNA, 26 bp, Artificial Sequence
  primer
cctaccacttacaagaaattgtttcc

SEQ ID NO: 30631 - DNA, 21 bp, Artificial Sequence
  primer
cttcctgtgacttcctagggc

SEQ ID NO: 30632 - DNA, 38 bp, Artificial Sequence
  primer
gtaaaacgacggccagttggttgtgaggctggagtatg

SEQ ID NO: 30633 - DNA, 21 bp, Artificial Sequence
  primer
ccagggtcctctgcttacatc

SEQ ID NO: 30634 - DNA, 38 bp, Artificial Sequence
  primer
gtaaaacgacggccagttttaggagatgagccttgtgc

SEQ ID NO: 30635 - DNA, 38 bp, Artificial Sequence
  primer
gtaaaacgacggccagtagaatggagggactgtggatg

SEQ ID NO: 30636 - DNA, 38 bp, Artificial Sequence
  primer
gtaaaacgacggccagttgctgtgactcatgaaagcct

SEQ ID NO: 30637 - DNA, 39 bp, Artificial Sequence
  primer
gtaaaacgacggccagttgggtacttaaacagcctgacc

SEQ ID NO: 30638 - DNA, 38 bp, Artificial Sequence
  primer
gtaaaacgacggccagttggaaggcctgctattgtatg

SEQ ID NO: 30639 - DNA, 21 bp, Artificial Sequence
  primer
agcaacaaagatgcactccac

SEQ ID NO: 30640 - DNA, 38 bp, Artificial Sequence
  primer
gtaaaacgacggccagtgccaggagacaggacagtgac

SEQ ID NO: 30641 - DNA, 38 bp, Artificial Sequence
  primer
gtaaaacgacggccagttattatcggtgctgcatcctg

SEQ ID NO: 30642 - DNA, 21 bp, Artificial Sequence
  primer
ctccttccctgctccagtctc

SEQ ID NO: 30643 - DNA, 21 bp, Artificial Sequence
  primer
gcaacagtggaagtaggaggc

SEQ ID NO: 30644 - DNA, 21 bp, Artificial Sequence
  primer
acactgtgacagacattgccc

SEQ ID NO: 30645 - DNA, 20 bp, Artificial Sequence
  primer
gatgggatgagaaagccctg

SEQ ID NO: 30646 - DNA, 38 bp, Artificial Sequence
  primer
gtaaaacgacggccagtgattaggcaaggtggtgttcc

SEQ ID NO: 30647 - DNA, 38 bp, Artificial Sequence
  primer
gtaaaacgacggccagtagctcctgtgagtgtgtcagc

SEQ ID NO: 30648 - DNA, 21 bp, Artificial Sequence
  primer
cagaaccaggctcgtctaacc

SEQ ID NO: 30649 - DNA, 36 bp, Artificial Sequence
  primer
gtaaaacgacggccagtctctcagtggcgtcggaac

SEQ ID NO: 30650 - DNA, 37 bp, Artificial Sequence
  primer
gtaaaacgacggccagtctgttggtttcggtgagcag

SEQ ID NO: 30651 - DNA, 38 bp, Artificial Sequence
  primer
gtaaaacgacggccagttcgctctttggagaaggaatg

SEQ ID NO: 30652 - DNA, 38 bp, Artificial Sequence
  primer
gtaaaacgacggccagtctgtacactgcccacagaagg

SEQ ID NO: 30653 - DNA, 20 bp, Artificial Sequence
  primer
tttctctgggagggatttgg

SEQ ID NO: 30654 - DNA, 21 bp, Artificial Sequence
  primer
gggtctcagagcctaggaagg

SEQ ID NO: 30655 - DNA, 38 bp, Artificial Sequence
  primer
gtaaaacgacggccagtgggcagaattggattaagcag

SEQ ID NO: 30656 - DNA, 38 bp, Artificial Sequence
  primer
gtaaaacgacggccagtattctggttccatgtgttggg

SEQ ID NO: 30657 - DNA, 21 bp, Artificial Sequence
  primer
gccatgatcgctcaaatacac

SEQ ID NO: 30658 - DNA, 21 bp, Artificial Sequence
  primer
gtcatggcagaaaccacagtt

SEQ ID NO: 30659 - DNA, 18 bp, Artificial Sequence
  primer
cgaccggcctattgttgg

SEQ ID NO: 30660 - DNA, 36 bp, Artificial Sequence
  primer
gtaaaacgacggccagtgtctggtggaaggcaatgg

SEQ ID NO: 30661 - DNA, 36 bp, Artificial Sequence
  primer
gtaaaacgacggccagtggcttgcgggtgtctttag

SEQ ID NO: 30662 - DNA, 38 bp, Artificial Sequence
  primer
gtaaaacgacggccagtggcagctagtggctgtctaac

SEQ ID NO: 30663 - DNA, 39 bp, Artificial Sequence
  primer
gtaaaacgacggccagtaaggcatcatccaaccataatc

SEQ ID NO: 30664 - DNA, 38 bp, Artificial Sequence
  primer
gtaaaacgacggccagtcacaagtctgggtgcattgtc

SEQ ID NO: 30665 - DNA, 39 bp, Artificial Sequence
  primer
gtaaaacgacggccagtttggaaaccagttgaaacacag

SEQ ID NO: 30666 - DNA, 21 bp, Artificial Sequence
  primer
ccttctgcgaattctttcagc

SEQ ID NO: 30667 - DNA, 42 bp, Artificial Sequence
  primer
gtaaaacgacggccagttcatgattaaagccagaaatcattc

SEQ ID NO: 30668 - DNA, 23 bp, Artificial Sequence
  primer
atgatatttccgcagaatcactt

SEQ ID NO: 30669 - DNA, 27 bp, Artificial Sequence
  primer
cggaagttcctagaccttaatgttatc

SEQ ID NO: 30670 - DNA, 25 bp, Artificial Sequence
  primer
aaatcatactgtaactgggtgggag

SEQ ID NO: 30671 - DNA, 38 bp, Artificial Sequence
  primer
gtaaaacgacggccagtatgtgtgggtttgcatttcac

SEQ ID NO: 30672 - DNA, 22 bp, Artificial Sequence
  primer
tgtgagcacttcatacccacaa

SEQ ID NO: 30673 - DNA, 27 bp, Artificial Sequence
  primer
gatggattaactcaaggatacattcac

SEQ ID NO: 30674 - DNA, 40 bp, Artificial Sequence
  primer
gtaaaacgacggccagttgttaaaccttggtgatcacatt

SEQ ID NO: 30675 - DNA, 38 bp, Artificial Sequence
  primer
gtaaaacgacggccagtcacccttgctaaacccttcag

SEQ ID NO: 30676 - DNA, 21 bp, Artificial Sequence
  primer
ataacgatgagggtggtggag

SEQ ID NO: 30677 - DNA, 37 bp, Artificial Sequence
  primer
gtaaaacgacggccagtccaagagaggtctgcgtgac

SEQ ID NO: 30678 - DNA, 21 bp, Artificial Sequence
  primer
ctccctttcatgacgtgtgtg

SEQ ID NO: 30679 - DNA, 38 bp, Artificial Sequence
  primer
gtaaaacgacggccagtaattgtggtgccttcttcagg

SEQ ID NO: 30680 - DNA, 37 bp, Artificial Sequence
  primer
gtaaaacgacggccagtcagcattgcttcctcagtgc

SEQ ID NO: 30681 - DNA, 39 bp, Artificial Sequence
  primer
gtaaaacgacggccagtcccacatccactcacttctttc

SEQ ID NO: 30682 - DNA, 22 bp, Artificial Sequence
  primer
tggctcaggtaattggaaattg

SEQ ID NO: 30683 - DNA, 38 bp, Artificial Sequence
  primer
gtaaaacgacggccagtggaattccaatgtggcaaagt

SEQ ID NO: 30684 - DNA, 38 bp, Artificial Sequence
  primer
gtaaaacgacggccagttggctggagcttactctttcc

SEQ ID NO: 30685 - DNA, 37 bp, Artificial Sequence
  primer
gtaaaacgacggccagttggagataccaaccactgcc

SEQ ID NO: 30686 - DNA, 21 bp, Artificial Sequence
  primer
agagagtgccctcaaatctgc

SEQ ID NO: 30687 - DNA, 38 bp, Artificial Sequence
  primer
gtaaaacgacggccagtacatccttagggattccaggc

SEQ ID NO: 30688 - DNA, 21 bp, Artificial Sequence
  primer
gaagcctttgatattgccacc

SEQ ID NO: 30689 - DNA, 39 bp, Artificial Sequence
  primer
gtaaaacgacggccagttcaaacctggattccacaattc

SEQ ID NO: 30690 - DNA, 19 bp, Artificial Sequence
  primer
atgcgttcatcgcacagtt

SEQ ID NO: 30691 - DNA, 38 bp, Artificial Sequence
  primer
gtaaaacgacggccagtgctcctggaaatggacacaac

SEQ ID NO: 30692 - DNA, 41 bp, Artificial Sequence
  primer
gtaaaacgacggccagttttaaccatatttctcattgtggc

SEQ ID NO: 30693 - DNA, 44 bp, Artificial Sequence
  primer
gtaaaacgacggccagttctaaatgtgatttactttcagtggac

SEQ ID NO: 30694 - DNA, 39 bp, Artificial Sequence
  primer
gtaaaacgacggccagttgctctgaagtaatgttcacca

SEQ ID NO: 30695 - DNA, 40 bp, Artificial Sequence
  primer
gtaaaacgacggccagtcaaggtgggtaatagctacaggg

SEQ ID NO: 30696 - DNA, 25 bp, Artificial Sequence
  primer
ggatcctttatcatcttgtagttgg

SEQ ID NO: 30697 - DNA, 41 bp, Artificial Sequence
  primer
gtaaaacgacggccagtacctgtcgttattccctgtaaatg

SEQ ID NO: 30698 - DNA, 43 bp, Artificial Sequence
  primer
gtaaaacgacggccagtagcttcttactattgagcagatacca

SEQ ID NO: 30699 - DNA, 38 bp, Artificial Sequence
  primer
gtaaaacgacggccagttcattcacgaaactcagccac

SEQ ID NO: 30700 - DNA, 22 bp, Artificial Sequence
  primer
tccattacgatgatgaaggagg

SEQ ID NO: 30701 - DNA, 38 bp, Artificial Sequence
  primer
gtaaaacgacggccagtcagcctctacccaatgctttc

SEQ ID NO: 30702 - DNA, 38 bp, Artificial Sequence
  primer
gtaaaacgacggccagtggatttggcgaaagttagcag

SEQ ID NO: 30703 - DNA, 38 bp, Artificial Sequence
  primer
gtaaaacgacggccagtctgggttgggaaactatgtgg

SEQ ID NO: 30704 - DNA, 21 bp, Artificial Sequence
  primer
atgctttcccaacaaaggaac

SEQ ID NO: 30705 - DNA, 21 bp, Artificial Sequence
  primer
tgctcatgggagtatgtttgc

SEQ ID NO: 30706 - DNA, 38 bp, Artificial Sequence
  primer
gtaaaacgacggccagttttcaatattgccaagggctc

SEQ ID NO: 30707 - DNA, 37 bp, Artificial Sequence
  primer
gtaaaacgacggccagtactgctgcactgctattgcc

SEQ ID NO: 30708 - DNA, 38 bp, Artificial Sequence
  primer
gtaaaacgacggccagtgagagacagctccagcaacac

SEQ ID NO: 30709 - DNA, 39 bp, Artificial Sequence
  primer
gtaaaacgacggccagttgtaacatacccaatgcaaagc

SEQ ID NO: 30710 - DNA, 38 bp, Artificial Sequence
  primer
gtaaaacgacggccagtaggaagttgatgcaaaccacc

SEQ ID NO: 30711 - DNA, 21 bp, Artificial Sequence
  primer
cagtggcctcttgactttgtg

SEQ ID NO: 30712 - DNA, 38 bp, Artificial Sequence
  primer
gtaaaacgacggccagtcagtctgggcgatagagtgag

SEQ ID NO: 30713 - DNA, 19 bp, Artificial Sequence
  primer
aaatgcaatgcctgtttgg

SEQ ID NO: 30714 - DNA, 38 bp, Artificial Sequence
  primer
gtaaaacgacggccagttgtttggcatctgaagtcacc

SEQ ID NO: 30715 - DNA, 21 bp, Artificial Sequence
  primer
ctccttcgtgctgtcactcag

SEQ ID NO: 30716 - DNA, 19 bp, Artificial Sequence
  primer
gcctttgcccttgtgctac

SEQ ID NO: 30717 - DNA, 21 bp, Artificial Sequence
  primer
agacttagacctgccctgctg

SEQ ID NO: 30718 - DNA, 38 bp, Artificial Sequence
  primer
gtaaaacgacggccagtctgaacgtgctgtctctttcg

SEQ ID NO: 30719 - DNA, 38 bp, Artificial Sequence
  primer
gtaaaacgacggccagtcaaacagcagcatggactgac

SEQ ID NO: 30720 - DNA, 38 bp, Artificial Sequence
  primer
gtaaaacgacggccagttaggatcagggcaggattctc

SEQ ID NO: 30721 - DNA, 37 bp, Artificial Sequence
  primer
gtaaaacgacggccagtgtgctctggacagacccaag

SEQ ID NO: 30722 - DNA, 37 bp, Artificial Sequence
  primer
gtaaaacgacggccagtcacccatacctgaccacacc

SEQ ID NO: 30723 - DNA, 35 bp, Artificial Sequence
  primer
gtaaaacgacggccagtgctctgagccgactggtg

SEQ ID NO: 30724 - DNA, 21 bp, Artificial Sequence
  primer
tactcattgtgcccagaggac

SEQ ID NO: 30725 - DNA, 37 bp, Artificial Sequence
  primer
gtaaaacgacggccagtcaagctccctcctccacaac

SEQ ID NO: 30726 - DNA, 38 bp, Artificial Sequence
  primer
gtaaaacgacggccagtccaggagcctgtacctgagac

SEQ ID NO: 30727 - DNA, 37 bp, Artificial Sequence
  primer
gtaaaacgacggccagtcttgagctgactttgccctg

SEQ ID NO: 30728 - DNA, 37 bp, Artificial Sequence
  primer
gtaaaacgacggccagtagatggagagcctcagctcc

SEQ ID NO: 30729 - DNA, 38 bp, Artificial Sequence
  primer
gtaaaacgacggccagtgaaattccgctcttctgttgg

SEQ ID NO: 30730 - DNA, 38 bp, Artificial Sequence
  primer
gtaaaacgacggccagttcctgatgcttactggctgtg

SEQ ID NO: 30731 - DNA, 37 bp, Artificial Sequence
  primer
gtaaaacgacggccagtcagctacaggtatggctggg

SEQ ID NO: 30732 - DNA, 21 bp, Artificial Sequence
  primer
gagaaataggagaggcatggg

SEQ ID NO: 30733 - DNA, 38 bp, Artificial Sequence
  primer
gtaaaacgacggccagtgtcccaatcacctgctgtatg

SEQ ID NO: 30734 - DNA, 21 bp, Artificial Sequence
  primer
acagaaggatcccacctggac

SEQ ID NO: 30735 - DNA, 37 bp, Artificial Sequence
  primer
gtaaaacgacggccagtaccggaaggaaactcagagc

SEQ ID NO: 30736 - DNA, 20 bp, Artificial Sequence
  primer
ggataaggacccagcctcag

SEQ ID NO: 30737 - DNA, 38 bp, Artificial Sequence
  primer
gtaaaacgacggccagtcagaacatcctgcttctggtg

SEQ ID NO: 30738 - DNA, 21 bp, Artificial Sequence
  primer
cacttcccaggtaagcagacg

SEQ ID NO: 30739 - DNA, 20 bp, Artificial Sequence
  primer
cagactctgcaaggtgaggg

SEQ ID NO: 30740 - DNA, 38 bp, Artificial Sequence
  primer
gtaaaacgacggccagttttaagcaagtcacacagccc

SEQ ID NO: 30741 - DNA, 37 bp, Artificial Sequence
  primer
gtaaaacgacggccagtgggagtctataaggcgaggc

SEQ ID NO: 30742 - DNA, 38 bp, Artificial Sequence
  primer
gtaaaacgacggccagtactctcaatggtgtgtggtgg

SEQ ID NO: 30743 - DNA, 21 bp, Artificial Sequence
  primer
cacacacatatcagccaggtg

SEQ ID NO: 30744 - DNA, 38 bp, Artificial Sequence
  primer
gtaaaacgacggccagttaatccaatgccaatcacagg

SEQ ID NO: 30745 - DNA, 20 bp, Artificial Sequence
  primer
aagcttctggaagactgggc

SEQ ID NO: 30746 - DNA, 38 bp, Artificial Sequence
  primer
gtaaaacgacggccagtgtatattggtgctggaagccc

SEQ ID NO: 30747 - DNA, 24 bp, Artificial Sequence
  primer
acctgaaattggtgactttctaca

SEQ ID NO: 30748 - DNA, 37 bp, Artificial Sequence
  primer
gtaaaacgacggccagtcaggccattggttctttgag

SEQ ID NO: 30749 - DNA, 23 bp, Artificial Sequence
  primer
aaagtagctatggttggtttggg

SEQ ID NO: 30750 - DNA, 38 bp, Artificial Sequence
  primer
gtaaaacgacggccagtacccgagagggtaagttcagg

SEQ ID NO: 30751 - DNA, 41 bp, Artificial Sequence
  primer
gtaaaacgacggccagtacaagaaaccacaaacatacaagg

SEQ ID NO: 30752 - DNA, 24 bp, Artificial Sequence
  primer
cctatgcccatctacagttgagag

SEQ ID NO: 30753 - DNA, 42 bp, Artificial Sequence
  primer
gtaaaacgacggccagtaagagcatttgtctgctattcaaag

SEQ ID NO: 30754 - DNA, 38 bp, Artificial Sequence
  primer
gtaaaacgacggccagttggctatggctgtcacttcac

SEQ ID NO: 30755 - DNA, 21 bp, Artificial Sequence
  primer
ttgcgttctttggtacaatgg

SEQ ID NO: 30756 - DNA, 26 bp, Artificial Sequence
  primer
tgagagtttaagaaggatagggaatg

SEQ ID NO: 30757 - DNA, 41 bp, Artificial Sequence
  primer
gtaaaacgacggccagttgcacaaacatatttagttgacgc

SEQ ID NO: 30758 - DNA, 42 bp, Artificial Sequence
  primer
gtaaaacgacggccagtgcatctcagtgtacctaactccttg

SEQ ID NO: 30759 - DNA, 21 bp, Artificial Sequence
  primer
ctagccatgttccagtcaacc

SEQ ID NO: 30760 - DNA, 22 bp, Artificial Sequence
  primer
gctagtatctgtcaccatgggc

SEQ ID NO: 30761 - DNA, 24 bp, Artificial Sequence
  primer
gccaacgactagagtcccttattc

SEQ ID NO: 30762 - DNA, 38 bp, Artificial Sequence
  primer
gtaaaacgacggccagtgatgctctggcttctctcttg

SEQ ID NO: 30763 - DNA, 38 bp, Artificial Sequence
  primer
gtaaaacgacggccagtacacacagggcactgtaaagg

SEQ ID NO: 30764 - DNA, 23 bp, Artificial Sequence
  primer
tccatagctatttcagcataccc

SEQ ID NO: 30765 - DNA, 23 bp, Artificial Sequence
  primer
tctcagacgtgtgactttatccc

SEQ ID NO: 30766 - DNA, 29 bp, Artificial Sequence
  primer
tccatttgatgcattacctaatatagtct

SEQ ID NO: 30767 - DNA, 27 bp, Artificial Sequence
  primer
agctagaatgacttatctctctctcaa

SEQ ID NO: 30768 - DNA, 25 bp, Artificial Sequence
  primer
tttattcatggaatttggtaagacc

SEQ ID NO: 30769 - DNA, 39 bp, Artificial Sequence
  primer
gtaaaacgacggccagttggaaccagtgacaagctacag

SEQ ID NO: 30770 - DNA, 23 bp, Artificial Sequence
  primer
ccacagtaccatggctgattaag

SEQ ID NO: 30771 - DNA, 21 bp, Artificial Sequence
  primer
tcgtgttcccttgtccatttc

SEQ ID NO: 30772 - DNA, 37 bp, Artificial Sequence
  primer
gtaaaacgacggccagtctgcaatgccagcctaactc

SEQ ID NO: 30773 - DNA, 21 bp, Artificial Sequence
  primer
gggagaacgtggtcacctatg

SEQ ID NO: 30774 - DNA, 45 bp, Artificial Sequence
  primer
gtaaaacgacggccagtttgtttctgacgctttaggtatatagaa

SEQ ID NO: 30775 - DNA, 38 bp, Artificial Sequence
  primer
gtaaaacgacggccagttcactcttccttctccctggt

SEQ ID NO: 30776 - DNA, 39 bp, Artificial Sequence
  primer
gtaaaacgacggccagttggtaaagaaagaccgcttcac

SEQ ID NO: 30777 - DNA, 21 bp, Artificial Sequence
  primer
tctgtcacattgcagtggttc

SEQ ID NO: 30778 - DNA, 38 bp, Artificial Sequence
  primer
gtaaaacgacggccagtagaatgagactccgtctcgaa

SEQ ID NO: 30779 - DNA, 21 bp, Artificial Sequence
  primer
cacccagatttgttatgcctg

SEQ ID NO: 30780 - DNA, 39 bp, Artificial Sequence
  primer
gtaaaacgacggccagtggctatgtagagcatgcattga

SEQ ID NO: 30781 - DNA, 22 bp, Artificial Sequence
  primer
tctgcaatgtccctattgattg

SEQ ID NO: 30782 - DNA, 21 bp, Artificial Sequence
  primer
tcgtcagaaatttcgtcttcc

SEQ ID NO: 30783 - DNA, 44 bp, Artificial Sequence
  primer
gtaaaacgacggccagtcataaagtttaagcactcatcttgagc

SEQ ID NO: 30784 - DNA, 21 bp, Artificial Sequence
  primer
tagtaccataatgcgggaacg

SEQ ID NO: 30785 - DNA, 20 bp, Artificial Sequence
  primer
catcagctcgctctccattg

SEQ ID NO: 30786 - DNA, 21 bp, Artificial Sequence
  primer
gccaagtggaatgtttctcag

SEQ ID NO: 30787 - DNA, 22 bp, Artificial Sequence
  primer
cagctcagaactaccatctggc

SEQ ID NO: 30788 - DNA, 41 bp, Artificial Sequence
  primer
gtaaaacgacggccagtaactgtgattcctatgctttcagg

SEQ ID NO: 30789 - DNA, 20 bp, Artificial Sequence
  primer
agggcatgaagtgtgatgtg

SEQ ID NO: 30790 - DNA, 42 bp, Artificial Sequence
  primer
gtaaaacgacggccagttttcagctgtgagtttattcttgct

SEQ ID NO: 30791 - DNA, 21 bp, Artificial Sequence
  primer
cattcaaagatccagaccagg

SEQ ID NO: 30792 - DNA, 38 bp, Artificial Sequence
  primer
gtaaaacgacggccagtagaatgaatgatgccatgctc

SEQ ID NO: 30793 - DNA, 38 bp, Artificial Sequence
  primer
gtaaaacgacggccagtcggtgtggtcatcaagacaag

SEQ ID NO: 30794 - DNA, 22 bp, Artificial Sequence
  primer
ttggaaatggagttgatagagg

SEQ ID NO: 30795 - DNA, 38 bp, Artificial Sequence
  primer
gtaaaacgacggccagtaaagctgtatgtccagccatc

SEQ ID NO: 30796 - DNA, 39 bp, Artificial Sequence
  primer
gtaaaacgacggccagtgaagctttgagaatttcaccat

SEQ ID NO: 30797 - DNA, 23 bp, Artificial Sequence
  primer
gaatgcagcatagttgtaatccg

SEQ ID NO: 30798 - DNA, 38 bp, Artificial Sequence
  primer
gtaaaacgacggccagtagtgaaagacgcatttcaggc

SEQ ID NO: 30799 - DNA, 39 bp, Artificial Sequence
  primer
gtaaaacgacggccagtttgtaaagcagatggagcacag

SEQ ID NO: 30800 - DNA, 21 bp, Artificial Sequence
  primer
aagtgtttgtttgatcccgtg

SEQ ID NO: 30801 - DNA, 22 bp, Artificial Sequence
  primer
ttgaaacgggatctcatttagg

SEQ ID NO: 30802 - DNA, 38 bp, Artificial Sequence
  primer
gtaaaacgacggccagttgatacaatcgtgtccaatgc

SEQ ID NO: 30803 - DNA, 38 bp, Artificial Sequence
  primer
gtaaaacgacggccagtctctcccaatgaagcaaacac

SEQ ID NO: 30804 - DNA, 38 bp, Artificial Sequence
  primer
gtaaaacgacggccagtccagggagacacctagaaacc

SEQ ID NO: 30805 - DNA, 38 bp, Artificial Sequence
  primer
gtaaaacgacggccagtttgcacagcactcctgatatg

SEQ ID NO: 30806 - DNA, 38 bp, Artificial Sequence
  primer
gtaaaacgacggccagtcagccatcaatattgggcatc

SEQ ID NO: 30807 - DNA, 38 bp, Artificial Sequence
  primer
gtaaaacgacggccagtaaaccacgaatgcagtcttcc

SEQ ID NO: 30808 - DNA, 21 bp, Artificial Sequence
  primer
tctcctgacatcgtgatcctc

SEQ ID NO: 30809 - DNA, 38 bp, Artificial Sequence
  primer
gtaaaacgacggccagttttccgggtttgggatttaac

SEQ ID NO: 30810 - DNA, 38 bp, Artificial Sequence
  primer
gtaaaacgacggccagtctttccttcctacaccctgcc

SEQ ID NO: 30811 - DNA, 38 bp, Artificial Sequence
  primer
gtaaaacgacggccagtccctatccgtggtgaatcaag

SEQ ID NO: 30812 - DNA, 21 bp, Artificial Sequence
  primer
caccggaaacaaccatacatc

SEQ ID NO: 30813 - DNA, 18 bp, Artificial Sequence
  primer
gctgaggccaccatgtga

SEQ ID NO: 30814 - DNA, 38 bp, Artificial Sequence
  primer
gtaaaacgacggccagtccaatggcatgagacagtgag

SEQ ID NO: 30815 - DNA, 37 bp, Artificial Sequence
  primer
gtaaaacgacggccagtgtctcctctcccagcttccc

SEQ ID NO: 30816 - DNA, 37 bp, Artificial Sequence
  primer
gtaaaacgacggccagtacgtggatgtccttgtgtgg

SEQ ID NO: 30817 - DNA, 37 bp, Artificial Sequence
  primer
gtaaaacgacggccagtctccatagaggctcacctgg

SEQ ID NO: 30818 - DNA, 37 bp, Artificial Sequence
  primer
gtaaaacgacggccagttgctgagacaacgtgtgacc

SEQ ID NO: 30819 - DNA, 19 bp, Artificial Sequence
  primer
cggtccctctcttggagtg

SEQ ID NO: 30820 - DNA, 21 bp, Artificial Sequence
  primer
cttatgcccaaatgttcccag

SEQ ID NO: 30821 - DNA, 38 bp, Artificial Sequence
  primer
gtaaaacgacggccagtagcagcatcctctacctcgac

SEQ ID NO: 30822 - DNA, 38 bp, Artificial Sequence
  primer
gtaaaacgacggccagtcaatcaggaggtggctaggac

SEQ ID NO: 30823 - DNA, 37 bp, Artificial Sequence
  primer
gtaaaacgacggccagtctggtgctgctgatcctcac

SEQ ID NO: 30824 - DNA, 22 bp, Artificial Sequence
  primer
ccagacttctcagtgttcaggg

SEQ ID NO: 30825 - DNA, 21 bp, Artificial Sequence
  primer
ctaaaccctccatctgggttg

SEQ ID NO: 30826 - DNA, 21 bp, Artificial Sequence
  primer
gccttgaggcaggatagtgac

SEQ ID NO: 30827 - DNA, 21 bp, Artificial Sequence
  primer
cttgtgatgatctgtggcctg

SEQ ID NO: 30828 - DNA, 20 bp, Artificial Sequence
  primer
tttagggaagcctttgggtg

SEQ ID NO: 30829 - DNA, 38 bp, Artificial Sequence
  primer
gtaaaacgacggccagtaccgtggagttctctgtcagc

SEQ ID NO: 30830 - DNA, 38 bp, Artificial Sequence
  primer
gtaaaacgacggccagtagagaatgggctttgagggac

SEQ ID NO: 30831 - DNA, 21 bp, Artificial Sequence
  primer
ttactaagcccttccctgctg

SEQ ID NO: 30832 - DNA, 37 bp, Artificial Sequence
  primer
gtaaaacgacggccagtagctgtgggtgccatgatag

SEQ ID NO: 30833 - DNA, 20 bp, Artificial Sequence
  primer
gccatgctgttctccttctg

SEQ ID NO: 30834 - DNA, 38 bp, Artificial Sequence
  primer
gtaaaacgacggccagttggtgctgagaaagtctttgg

SEQ ID NO: 30835 - DNA, 38 bp, Artificial Sequence
  primer
gtaaaacgacggccagtagagagccagaggaggtttcc

SEQ ID NO: 30836 - DNA, 38 bp, Artificial Sequence
  primer
gtaaaacgacggccagtactctaacaggtgctctgggc

SEQ ID NO: 30837 - DNA, 38 bp, Artificial Sequence
  primer
gtaaaacgacggccagtgagaggaacatgggtttcctg

SEQ ID NO: 30838 - DNA, 38 bp, Artificial Sequence
  primer
gtaaaacgacggccagtctgtttgtcactctgggcaag

SEQ ID NO: 30839 - DNA, 37 bp, Artificial Sequence
  primer
gtaaaacgacggccagtgtgaacagggccagtcttcc

SEQ ID NO: 30840 - DNA, 38 bp, Artificial Sequence
  primer
gtaaaacgacggccagtccatgccagccataacttctc

SEQ ID NO: 30841 - DNA, 38 bp, Artificial Sequence
  primer
gtaaaacgacggccagtacctagcctgactccttggtg

SEQ ID NO: 30842 - DNA, 38 bp, Artificial Sequence
  primer
gtaaaacgacggccagtctgagagctggtcactgggag

SEQ ID NO: 30843 - DNA, 21 bp, Artificial Sequence
  primer
gcaagttctcaccctctctcc

SEQ ID NO: 30844 - DNA, 21 bp, Artificial Sequence
  primer
gaattaatgcgaagattgccc

SEQ ID NO: 30845 - DNA, 37 bp, Artificial Sequence
  primer
gtaaaacgacggccagttgagctcagatactcccggc

SEQ ID NO: 30846 - DNA, 38 bp, Artificial Sequence
  primer
gtaaaacgacggccagtaccacttgccttcttcctgtc

SEQ ID NO: 30847 - DNA, 38 bp, Artificial Sequence
  primer
gtaaaacgacggccagtagggaggaggagcacttcttg

SEQ ID NO: 30848 - DNA, 38 bp, Artificial Sequence
  primer
gtaaaacgacggccagtattccctacttggtctggtgc

SEQ ID NO: 30849 - DNA, 38 bp, Artificial Sequence
  primer
gtaaaacgacggccagtcttcgtgaaggttaggaacgg

SEQ ID NO: 30850 - DNA, 22 bp, Artificial Sequence
  primer
gagtgtgcaaagtcacaggaag

SEQ ID NO: 30851 - DNA, 37 bp, Artificial Sequence
  primer
gtaaaacgacggccagtatgcgtgaagggaaggaaag

SEQ ID NO: 30852 - DNA, 20 bp, Artificial Sequence
  primer
ggactggtgaacttctgccc

SEQ ID NO: 30853 - DNA, 21 bp, Artificial Sequence
  primer
gtcctagagggagctcacagc

SEQ ID NO: 30854 - DNA, 21 bp, Artificial Sequence
  primer
ttctatctgggactgcacagc

SEQ ID NO: 30855 - DNA, 38 bp, Artificial Sequence
  primer
gtaaaacgacggccagtgaggaagtgacatggaggtgg

SEQ ID NO: 30856 - DNA, 38 bp, Artificial Sequence
  primer
gtaaaacgacggccagttctgagggtttgctgatgttc

SEQ ID NO: 30857 - DNA, 37 bp, Artificial Sequence
  primer
gtaaaacgacggccagtcagaggaggaccagggagtc

SEQ ID NO: 30858 - DNA, 38 bp, Artificial Sequence
  primer
gtaaaacgacggccagtcagtgagtctctttgccctcc

SEQ ID NO: 30859 - DNA, 37 bp, Artificial Sequence
  primer
gtaaaacgacggccagttacaggagcaggtgccagac

SEQ ID NO: 30860 - DNA, 38 bp, Artificial Sequence
  primer
gtaaaacgacggccagttcacatggagtgagttcagcc

SEQ ID NO: 30861 - DNA, 38 bp, Artificial Sequence
  primer
gtaaaacgacggccagttccaatgtcagggcctacttc

SEQ ID NO: 30862 - DNA, 37 bp, Artificial Sequence
  primer
gtaaaacgacggccagtccatatgattcctgcatggg

SEQ ID NO: 30863 - DNA, 21 bp, Artificial Sequence
  primer
acgagtgaggcttgctagagg

SEQ ID NO: 30864 - DNA, 36 bp, Artificial Sequence
  primer
gtaaaacgacggccagtatgaccaactgcaccctcc

SEQ ID NO: 30865 - DNA, 37 bp, Artificial Sequence
  primer
gtaaaacgacggccagtagagcagttggcatctgtgg

SEQ ID NO: 30866 - DNA, 38 bp, Artificial Sequence
  primer
gtaaaacgacggccagttctgatcatccacctctgtgc

SEQ ID NO: 30867 - DNA, 36 bp, Artificial Sequence
  primer
gtaaaacgacggccagtcaggcatctgcgttcagtc

SEQ ID NO: 30868 - DNA, 21 bp, Artificial Sequence
  primer
gttggttcttgccctgtcttc

SEQ ID NO: 30869 - DNA, 37 bp, Artificial Sequence
  primer
gtaaaacgacggccagtcaaggctgtcatgagaaggg

SEQ ID NO: 30870 - DNA, 21 bp, Artificial Sequence
  primer
ccattgtcaccattctgatcg

SEQ ID NO: 30871 - DNA, 38 bp, Artificial Sequence
  primer
gtaaaacgacggccagtacgtgacccaagcttatgagg

SEQ ID NO: 30872 - DNA, 37 bp, Artificial Sequence
  primer
gtaaaacgacggccagtttggctgaggctaaggaagg

SEQ ID NO: 30873 - DNA, 38 bp, Artificial Sequence
  primer
gtaaaacgacggccagtctcggagtccaggtctttctc

SEQ ID NO: 30874 - DNA, 21 bp, Artificial Sequence
  primer
cagtgagttctagggctgtgc

SEQ ID NO: 30875 - DNA, 38 bp, Artificial Sequence
  primer
gtaaaacgacggccagtagtgtcaaatctccagagccc

SEQ ID NO: 30876 - DNA, 38 bp, Artificial Sequence
  primer
gtaaaacgacggccagtagacattacctccctcccagg

SEQ ID NO: 30877 - DNA, 20 bp, Artificial Sequence
  primer
gtatgtggccttccttggac

SEQ ID NO: 30878 - DNA, 38 bp, Artificial Sequence
  primer
gtaaaacgacggccagtgggtgctgtaagctgttgagg

SEQ ID NO: 30879 - DNA, 39 bp, Artificial Sequence
  primer
gtaaaacgacggccagtggactgggagttcttcatcatc

SEQ ID NO: 30880 - DNA, 38 bp, Artificial Sequence
  primer
gtaaaacgacggccagtcccttgaggttacaacggttc

SEQ ID NO: 30881 - DNA, 38 bp, Artificial Sequence
  primer
gtaaaacgacggccagtgctagtgccctgattaccctg

SEQ ID NO: 30882 - DNA, 38 bp, Artificial Sequence
  primer
gtaaaacgacggccagttgctagaggacatcaacgacc

SEQ ID NO: 30883 - DNA, 36 bp, Artificial Sequence
  primer
gtaaaacgacggccagtacctttgctccctgctgtg

SEQ ID NO: 30884 - DNA, 38 bp, Artificial Sequence
  primer
gtaaaacgacggccagtgtgaagggtctatttgcaggg

SEQ ID NO: 30885 - DNA, 38 bp, Artificial Sequence
  primer
gtaaaacgacggccagtttgaactttggaggcttgagg

SEQ ID NO: 30886 - DNA, 37 bp, Artificial Sequence
  primer
gtaaaacgacggccagttccggaactacaacgtcctg

SEQ ID NO: 30887 - DNA, 21 bp, Artificial Sequence
  primer
acaggactgtgtgagtgtccc

SEQ ID NO: 30888 - DNA, 21 bp, Artificial Sequence
  primer
gctggtaagtgagggccatag

SEQ ID NO: 30889 - DNA, 38 bp, Artificial Sequence
  primer
gtaaaacgacggccagtgaaaggcactatatggccagg

SEQ ID NO: 30890 - DNA, 22 bp, Artificial Sequence
  primer
aagaagctgggttctttaaggg

SEQ ID NO: 30891 - DNA, 38 bp, Artificial Sequence
  primer
gtaaaacgacggccagtagtgagtccacctgtgtccag

SEQ ID NO: 30892 - DNA, 37 bp, Artificial Sequence
  primer
gtaaaacgacggccagtatagccagtgggtctctggg

SEQ ID NO: 30893 - DNA, 36 bp, Artificial Sequence
  primer
gtaaaacgacggccagtgcaaaggcatggagaggac

SEQ ID NO: 30894 - DNA, 38 bp, Artificial Sequence
  primer
gtaaaacgacggccagtgtgtctggttccttggaggtc

SEQ ID NO: 30895 - DNA, 38 bp, Artificial Sequence
  primer
gtaaaacgacggccagttcaggactcccaacgctctac

SEQ ID NO: 30896 - DNA, 21 bp, Artificial Sequence
  primer
ccttcccttcttgttgtctgc

SEQ ID NO: 30897 - DNA, 38 bp, Artificial Sequence
  primer
gtaaaacgacggccagtcagtgatccaggtgactgctc

SEQ ID NO: 30898 - DNA, 39 bp, Artificial Sequence
  primer
gtaaaacgacggccagtgccagatcctgggagaataaag

SEQ ID NO: 30899 - DNA, 38 bp, Artificial Sequence
  primer
gtaaaacgacggccagtcctcacatgaggactgagcac

SEQ ID NO: 30900 - DNA, 21 bp, Artificial Sequence
  primer
gtggccctgagtcttaacagg

SEQ ID NO: 30901 - DNA, 21 bp, Artificial Sequence
  primer
cattcccttacctgacttgcc

SEQ ID NO: 30902 - DNA, 22 bp, Artificial Sequence
  primer
gcatgctatatgcttcatgtgg

SEQ ID NO: 30903 - DNA, 21 bp, Artificial Sequence
  primer
gatgagaatgacaatgctccc

SEQ ID NO: 30904 - DNA, 21 bp, Artificial Sequence
  primer
tatgggaagctggctctatgg

SEQ ID NO: 30905 - DNA, 39 bp, Artificial Sequence
  primer
gtaaaacgacggccagtcaaggtttgctagatgtcagcc

SEQ ID NO: 30906 - DNA, 38 bp, Artificial Sequence
  primer
gtaaaacgacggccagtagaagcaagaagcactgatgg

SEQ ID NO: 30907 - DNA, 38 bp, Artificial Sequence
  primer
gtaaaacgacggccagtactggtaccctggaactgtgc

SEQ ID NO: 30908 - DNA, 21 bp, Artificial Sequence
  primer
aggagcaagatgggatgaaag

SEQ ID NO: 30909 - DNA, 37 bp, Artificial Sequence
  primer
gtaaaacgacggccagtgtgcaactccaggtggtttc

SEQ ID NO: 30910 - DNA, 38 bp, Artificial Sequence
  primer
gtaaaacgacggccagttgttctggcgatgagagaatg

SEQ ID NO: 30911 - DNA, 38 bp, Artificial Sequence
  primer
gtaaaacgacggccagttgccattgattcttagccttg

SEQ ID NO: 30912 - DNA, 38 bp, Artificial Sequence
  primer
gtaaaacgacggccagtaaatgagggcagtctgattcc

SEQ ID NO: 30913 - DNA, 42 bp, Artificial Sequence
  primer
gtaaaacgacggccagtaatgccatttagcaaataattcatc

SEQ ID NO: 30914 - DNA, 38 bp, Artificial Sequence
  primer
gtaaaacgacggccagtaccctctgtggctagatttgc

SEQ ID NO: 30915 - DNA, 21 bp, Artificial Sequence
  primer
atcccttagggcaggtttagc

SEQ ID NO: 30916 - DNA, 21 bp, Artificial Sequence
  primer
agtttgcaatgatgactcggc

SEQ ID NO: 30917 - DNA, 21 bp, Artificial Sequence
  primer
ctttaggctgtcctccctgtg

SEQ ID NO: 30918 - DNA, 21 bp, Artificial Sequence
  primer
ttgaaagggaaacagttccag

SEQ ID NO: 30919 - DNA, 39 bp, Artificial Sequence
  primer
gtaaaacgacggccagtcgttcagtaagcgtgtgttgag

SEQ ID NO: 30920 - DNA, 39 bp, Artificial Sequence
  primer
gtaaaacgacggccagtgatgactaagacgcaatttggc

SEQ ID NO: 30921 - DNA, 21 bp, Artificial Sequence
  primer
gaaccctgaaccatgagaagc

SEQ ID NO: 30922 - DNA, 37 bp, Artificial Sequence
  primer
gtaaaacgacggccagtgaagtggtgagaggtcacgc

SEQ ID NO: 30923 - DNA, 39 bp, Artificial Sequence
  primer
gtaaaacgacggccagttgaaaggcaatatgactgcaag

SEQ ID NO: 30924 - DNA, 21 bp, Artificial Sequence
  primer
gaaagtttgtttcagcccagg

SEQ ID NO: 30925 - DNA, 42 bp, Artificial Sequence
  primer
gtaaaacgacggccagtgaatcaaacctagagaaatgagctg

SEQ ID NO: 30926 - DNA, 19 bp, Artificial Sequence
  primer
accaatcagcacccacctg

SEQ ID NO: 30927 - DNA, 35 bp, Artificial Sequence
  primer
gtaaaacgacggccagtcaagggagtcccggaagg

SEQ ID NO: 30928 - DNA, 21 bp, Artificial Sequence
  primer
ttctgcagccacttagcagtc

SEQ ID NO: 30929 - DNA, 20 bp, Artificial Sequence
  primer
ataggcgtgagctaccatgc

SEQ ID NO: 30930 - DNA, 23 bp, Artificial Sequence
  primer
tcagtgagcagattctcctatgg

SEQ ID NO: 30931 - DNA, 38 bp, Artificial Sequence
  primer
gtaaaacgacggccagtgttgaataagccactggaccg

SEQ ID NO: 30932 - DNA, 19 bp, Artificial Sequence
  primer
ggcacttgtaatcccagcc

SEQ ID NO: 30933 - DNA, 20 bp, Artificial Sequence
  primer
cagtgcttcctggaggtcag

SEQ ID NO: 30934 - DNA, 38 bp, Artificial Sequence
  primer
gtaaaacgacggccagtgaggttggatggaggcttctc

SEQ ID NO: 30935 - DNA, 39 bp, Artificial Sequence
  primer
gtaaaacgacggccagttctcacatctcaactgtcctgc

SEQ ID NO: 30936 - DNA, 21 bp, Artificial Sequence
  primer
tctgccagttggtatgaggag

SEQ ID NO: 30937 - DNA, 21 bp, Artificial Sequence
  primer
gtgccatgtattggaagcaag

SEQ ID NO: 30938 - DNA, 39 bp, Artificial Sequence
  primer
gtaaaacgacggccagttgtggaagccgtattctcaaac

SEQ ID NO: 30939 - DNA, 22 bp, Artificial Sequence
  primer
gaggacatctgcagttagaggg

SEQ ID NO: 30940 - DNA, 38 bp, Artificial Sequence
  primer
gtaaaacgacggccagtgggtgagatgtaagtggcagg

SEQ ID NO: 30941 - DNA, 38 bp, Artificial Sequence
  primer
gtaaaacgacggccagtcagagaggaaatggaggcttg

SEQ ID NO: 30942 - DNA, 34 bp, Artificial Sequence
  primer
gtaaaacgacggccagtgacttggcctggctccc

SEQ ID NO: 30943 - DNA, 37 bp, Artificial Sequence
  primer
gtaaaacgacggccagtcctggatgaatgttggttgg

SEQ ID NO: 30944 - DNA, 20 bp, Artificial Sequence
  primer
tggttgctgccattgttacc

SEQ ID NO: 30945 - DNA, 19 bp, Artificial Sequence
  primer
gttacccgccttccctctc

SEQ ID NO: 30946 - DNA, 21 bp, Artificial Sequence
  primer
tggatgaaagatcagctgtgg

SEQ ID NO: 30947 - DNA, 38 bp, Artificial Sequence
  primer
gtaaaacgacggccagttctgccatcagtctcctaccc

SEQ ID NO: 30948 - DNA, 20 bp, Artificial Sequence
  primer
tcacggagagctctgtggtc

SEQ ID NO: 30949 - DNA, 38 bp, Artificial Sequence
  primer
gtaaaacgacggccagtggaactccgttcctgtaaacg

SEQ ID NO: 30950 - DNA, 38 bp, Artificial Sequence
  primer
gtaaaacgacggccagtgctacgtgcacttctctgtgc

SEQ ID NO: 30951 - DNA, 37 bp, Artificial Sequence
  primer
gtaaaacgacggccagtgaccaaccttcccatgtgtc

SEQ ID NO: 30952 - DNA, 21 bp, Artificial Sequence
  primer
aagccctagaggaggacaagg

SEQ ID NO: 30953 - DNA, 21 bp, Artificial Sequence
  primer
tatgttgcacgtggttgtttg

SEQ ID NO: 30954 - DNA, 38 bp, Artificial Sequence
  primer
gtaaaacgacggccagttatgtgtggtaaccaggcagc

SEQ ID NO: 30955 - DNA, 20 bp, Artificial Sequence
  primer
cacatggcaaacacagaggc

SEQ ID NO: 30956 - DNA, 37 bp, Artificial Sequence
  primer
gtaaaacgacggccagtatggttctgtgggatgcttg

SEQ ID NO: 30957 - DNA, 21 bp, Artificial Sequence
  primer
tccctacctcttcttctgggc

SEQ ID NO: 30958 - DNA, 38 bp, Artificial Sequence
  primer
gtaaaacgacggccagtactcctttcatcgtcactggc

SEQ ID NO: 30959 - DNA, 21 bp, Artificial Sequence
  primer
ccacatacacacatgcacagg

SEQ ID NO: 30960 - DNA, 21 bp, Artificial Sequence
  primer
atctgctctgttccaggaatg

SEQ ID NO: 30961 - DNA, 39 bp, Artificial Sequence
  primer
gtaaaacgacggccagtttaagtcaggttctctctgggc

SEQ ID NO: 30962 - DNA, 22 bp, Artificial Sequence
  primer
gaatagctgaaagaggcaatcg

SEQ ID NO: 30963 - DNA, 24 bp, Artificial Sequence
  primer
cctggtactaccttgcatagttgc

SEQ ID NO: 30964 - DNA, 21 bp, Artificial Sequence
  primer
tgtccatcatgctgaggagtg

SEQ ID NO: 30965 - DNA, 38 bp, Artificial Sequence
  primer
gtaaaacgacggccagttatccagaacaccatcctggg

SEQ ID NO: 30966 - DNA, 21 bp, Artificial Sequence
  primer
acagagtcagcaggagttccc

SEQ ID NO: 30967 - DNA, 35 bp, Artificial Sequence
  primer
gtaaaacgacggccagtgcttcctggaggagccag

SEQ ID NO: 30968 - DNA, 21 bp, Artificial Sequence
  primer
cttgtctgactctgctgctcg

SEQ ID NO: 30969 - DNA, 21 bp, Artificial Sequence
  primer
ctgcacatctacggctacgag

SEQ ID NO: 30970 - DNA, 39 bp, Artificial Sequence
  primer
gtaaaacgacggccagtaaggaggaatgaggctggatac

SEQ ID NO: 30971 - DNA, 24 bp, Artificial Sequence
  primer
aaagttaatgtagcatgcaccaaa

SEQ ID NO: 30972 - DNA, 21 bp, Artificial Sequence
  primer
tcacccagcatcctaccaaag

SEQ ID NO: 30973 - DNA, 40 bp, Artificial Sequence
  primer
gtaaaacgacggccagtgggtgacagtttatgttgtttgc

SEQ ID NO: 30974 - DNA, 40 bp, Artificial Sequence
  primer
gtaaaacgacggccagtgaaagcacacatctacctgatgg

SEQ ID NO: 30975 - DNA, 38 bp, Artificial Sequence
  primer
gtaaaacgacggccagtgtttcgtgtcttggctttctg

SEQ ID NO: 30976 - DNA, 23 bp, Artificial Sequence
  primer
tgccacagatactctgggatatg

SEQ ID NO: 30977 - DNA, 21 bp, Artificial Sequence
  primer
gagaatgaaggagttgagcgg

SEQ ID NO: 30978 - DNA, 38 bp, Artificial Sequence
  primer
gtaaaacgacggccagtaacaaagaatcattccctgcc

SEQ ID NO: 30979 - DNA, 46 bp, Artificial Sequence
  primer
gtaaaacgacggccagtcttctctatctatctccatctatatccgt

SEQ ID NO: 30980 - DNA, 38 bp, Artificial Sequence
  primer
gtaaaacgacggccagttcctgacattaattgggcagc

SEQ ID NO: 30981 - DNA, 38 bp, Artificial Sequence
  primer
gtaaaacgacggccagtcagtgacagtggtgctgtttg

SEQ ID NO: 30982 - DNA, 38 bp, Artificial Sequence
  primer
gtaaaacgacggccagtcggaggcaagagctactaagc

SEQ ID NO: 30983 - DNA, 38 bp, Artificial Sequence
  primer
gtaaaacgacggccagtttcatgtactcctgcctgaca

SEQ ID NO: 30984 - DNA, 46 bp, Artificial Sequence
  primer
gtaaaacgacggccagttcaaataagcttaatgtggaatcagtaac

SEQ ID NO: 30985 - DNA, 38 bp, Artificial Sequence
  primer
gtaaaacgacggccagtaaggcaacaactcaagaggga

SEQ ID NO: 30986 - DNA, 26 bp, Artificial Sequence
  primer
cctcttaaggctctatgaaactcatc

SEQ ID NO: 30987 - DNA, 41 bp, Artificial Sequence
  primer
gtaaaacgacggccagtgcatttacatgacagagtccttcc

SEQ ID NO: 30988 - DNA, 21 bp, Artificial Sequence
  primer
aaccaggcatgcatttatgtg

SEQ ID NO: 30989 - DNA, 42 bp, Artificial Sequence
  primer
gtaaaacgacggccagtttctagatttcattctcagcttcgt

SEQ ID NO: 30990 - DNA, 37 bp, Artificial Sequence
  primer
gtaaaacgacggccagttcggatcctttctccctagc

SEQ ID NO: 30991 - DNA, 38 bp, Artificial Sequence
  primer
gtaaaacgacggccagttctgcaactccagagatttcc

SEQ ID NO: 30992 - DNA, 38 bp, Artificial Sequence
  primer
gtaaaacgacggccagtgggcaatgggtgagtttactg

SEQ ID NO: 30993 - DNA, 21 bp, Artificial Sequence
  primer
tgtgagatacgatgacgaggg

SEQ ID NO: 30994 - DNA, 21 bp, Artificial Sequence
  primer
actgcatgatgaattggatgg

SEQ ID NO: 30995 - DNA, 18 bp, Artificial Sequence
  primer
ccgcacagctgcatacac

SEQ ID NO: 30996 - DNA, 25 bp, Artificial Sequence
  primer
tttattccctacacatggatttctg

SEQ ID NO: 30997 - DNA, 22 bp, Artificial Sequence
  primer
gcacacaccaatcaaatgtcag

SEQ ID NO: 30998 - DNA, 21 bp, Artificial Sequence
  primer
taggaatgcccagaacaaagg

SEQ ID NO: 30999 - DNA, 23 bp, Artificial Sequence
  primer
gcacataactttcatccatcagc

SEQ ID NO: 31000 - DNA, 39 bp, Artificial Sequence
  primer
gtaaaacgacggccagttcacaaatatggctctccaagg

SEQ ID NO: 31001 - DNA, 22 bp, Artificial Sequence
  primer
ggaaacagacacacatgctttc

SEQ ID NO: 31002 - DNA, 38 bp, Artificial Sequence
  primer
gtaaaacgacggccagtccacagacaccaaatggacac

SEQ ID NO: 31003 - DNA, 21 bp, Artificial Sequence
  primer
cttgaggtttgcaaagggttc

SEQ ID NO: 31004 - DNA, 21 bp, Artificial Sequence
  primer
tcctctatcatcgtggtgctg

SEQ ID NO: 31005 - DNA, 38 bp, Artificial Sequence
  primer
gtaaaacgacggccagtgctgtttgtaactctacggcg

SEQ ID NO: 31006 - DNA, 38 bp, Artificial Sequence
  primer
gtaaaacgacggccagtcgttgtgggaaagtgaaactc

SEQ ID NO: 31007 - DNA, 21 bp, Artificial Sequence
  primer
agacgaattgatagcgccaaa

SEQ ID NO: 31008 - DNA, 41 bp, Artificial Sequence
  primer
gtaaaacgacggccagttttcttcaaacatacaacatcgtc

SEQ ID NO: 31009 - DNA, 25 bp, Artificial Sequence
  primer
tcttaaagtggttatggattgaagg

SEQ ID NO: 31010 - DNA, 25 bp, Artificial Sequence
  primer
tttctgggacttacacttctcattt

SEQ ID NO: 31011 - DNA, 38 bp, Artificial Sequence
  primer
gtaaaacgacggccagtggtataatcatgatcgctggc

SEQ ID NO: 31012 - DNA, 38 bp, Artificial Sequence
  primer
gtaaaacgacggccagttaacagctgccatccagattc

SEQ ID NO: 31013 - DNA, 38 bp, Artificial Sequence
  primer
gtaaaacgacggccagtaagctacaaatgggtgagtgg

SEQ ID NO: 31014 - DNA, 40 bp, Artificial Sequence
  primer
gtaaaacgacggccagttgcattaagataccttgcaaacc

SEQ ID NO: 31015 - DNA, 23 bp, Artificial Sequence
  primer
caatccgaatttcaccattgtag

SEQ ID NO: 31016 - DNA, 38 bp, Artificial Sequence
  primer
gtaaaacgacggccagttacagtgcatccagtcattgc

SEQ ID NO: 31017 - DNA, 21 bp, Artificial Sequence
  primer
cgggacaacattgtgacctac

SEQ ID NO: 31018 - DNA, 19 bp, Artificial Sequence
  primer
ggaggttgcgggtaggaag

SEQ ID NO: 31019 - DNA, 35 bp, Artificial Sequence
  primer
gtaaaacgacggccagtctgttcgtgcccaacctc

SEQ ID NO: 31020 - DNA, 38 bp, Artificial Sequence
  primer
gtaaaacgacggccagtagtcttcgtttacaccctgcg

SEQ ID NO: 31021 - DNA, 38 bp, Artificial Sequence
  primer
gtaaaacgacggccagtcaggatactggtccttagccg

SEQ ID NO: 31022 - DNA, 21 bp, Artificial Sequence
  primer
atatgccgagattgtgccttc

SEQ ID NO: 31023 - DNA, 39 bp, Artificial Sequence
  primer
gtaaaacgacggccagttgggaatgagctcttctactgc

SEQ ID NO: 31024 - DNA, 38 bp, Artificial Sequence
  primer
gtaaaacgacggccagttgtcatcaccaatgtgtttcc

SEQ ID NO: 31025 - DNA, 38 bp, Artificial Sequence
  primer
gtaaaacgacggccagtgacactgcagcacctgctatc

SEQ ID NO: 31026 - DNA, 38 bp, Artificial Sequence
  primer
gtaaaacgacggccagtgtcttgggctagaggtgttgc

SEQ ID NO: 31027 - DNA, 37 bp, Artificial Sequence
  primer
gtaaaacgacggccagttgggactgctagtcctgctg

SEQ ID NO: 31028 - DNA, 37 bp, Artificial Sequence
  primer
gtaaaacgacggccagtgaagtctacgggcattggtg

SEQ ID NO: 31029 - DNA, 38 bp, Artificial Sequence
  primer
gtaaaacgacggccagtgcgagaggtatactgcgttcc

SEQ ID NO: 31030 - DNA, 21 bp, Artificial Sequence
  primer
accacaccctgactacccaag

SEQ ID NO: 31031 - DNA, 21 bp, Artificial Sequence
  primer
tatgcgtctgagaggtgatcc

SEQ ID NO: 31032 - DNA, 38 bp, Artificial Sequence
  primer
gtaaaacgacggccagtttggtccttatcctctctggg

SEQ ID NO: 31033 - DNA, 37 bp, Artificial Sequence
  primer
gtaaaacgacggccagtgttgaggaactgagatgcgg

SEQ ID NO: 31034 - DNA, 38 bp, Artificial Sequence
  primer
gtaaaacgacggccagtctgtctgtgggaactcctttg

SEQ ID NO: 31035 - DNA, 21 bp, Artificial Sequence
  primer
gattcagctatgggaggatgg

SEQ ID NO: 31036 - DNA, 21 bp, Artificial Sequence
  primer
cagggttctccatcctgctac

SEQ ID NO: 31037 - DNA, 37 bp, Artificial Sequence
  primer
gtaaaacgacggccagtcaacttccacctcctgggtc

SEQ ID NO: 31038 - DNA, 38 bp, Artificial Sequence
  primer
gtaaaacgacggccagtgattgttagcgtccttcaggg

SEQ ID NO: 31039 - DNA, 36 bp, Artificial Sequence
  primer
gtaaaacgacggccagtctgaactgggctgggtgaa

SEQ ID NO: 31040 - DNA, 38 bp, Artificial Sequence
  primer
gtaaaacgacggccagtaaggagcacaggtctccattg

SEQ ID NO: 31041 - DNA, 38 bp, Artificial Sequence
  primer
gtaaaacgacggccagtctgctcaaggaactgaagcac

SEQ ID NO: 31042 - DNA, 38 bp, Artificial Sequence
  primer
gtaaaacgacggccagtatcaaggtagggaaggaaggg

SEQ ID NO: 31043 - DNA, 38 bp, Artificial Sequence
  primer
gtaaaacgacggccagttgctcatcaatgagttgggtg

SEQ ID NO: 31044 - DNA, 38 bp, Artificial Sequence
  primer
gtaaaacgacggccagttggccacttatctggtattgg

SEQ ID NO: 31045 - DNA, 38 bp, Artificial Sequence
  primer
gtaaaacgacggccagttgtccagattccaggagtgtc

SEQ ID NO: 31046 - DNA, 20 bp, Artificial Sequence
  primer
atgctggtggtgttctttgc

SEQ ID NO: 31047 - DNA, 38 bp, Artificial Sequence
  primer
gtaaaacgacggccagttttgagcatcccaatgttgtc

SEQ ID NO: 31048 - DNA, 38 bp, Artificial Sequence
  primer
gtaaaacgacggccagtggtggattgggacctttgtag

SEQ ID NO: 31049 - DNA, 38 bp, Artificial Sequence
  primer
gtaaaacgacggccagttaccagatggcacttacaccc

SEQ ID NO: 31050 - DNA, 21 bp, Artificial Sequence
  primer
agagacaaggtcttgcttgcc

SEQ ID NO: 31051 - DNA, 38 bp, Artificial Sequence
  primer
gtaaaacgacggccagttcctctttctgctgaacccag

SEQ ID NO: 31052 - DNA, 22 bp, Artificial Sequence
  primer
aaagaagaaagctcatcccagg

SEQ ID NO: 31053 - DNA, 20 bp, Artificial Sequence
  primer
gtagaaacggagccctggag

SEQ ID NO: 31054 - DNA, 21 bp, Artificial Sequence
  primer
tgaatcccttcccttgcatac

SEQ ID NO: 31055 - DNA, 38 bp, Artificial Sequence
  primer
gtaaaacgacggccagtcgatgatgaggtaggactggg

SEQ ID NO: 31056 - DNA, 38 bp, Artificial Sequence
  primer
gtaaaacgacggccagtaagcacaagaacatcgtcagg

SEQ ID NO: 31057 - DNA, 36 bp, Artificial Sequence
  primer
gtaaaacgacggccagtcctgcacagcgacaagaag

SEQ ID NO: 31058 - DNA, 20 bp, Artificial Sequence
  primer
ctgaaccaggtgctgaaagg

SEQ ID NO: 31059 - DNA, 38 bp, Artificial Sequence
  primer
gtaaaacgacggccagtgaggatggagttggtgctgtc

SEQ ID NO: 31060 - DNA, 20 bp, Artificial Sequence
  primer
attcccgtccgctgttactc

SEQ ID NO: 31061 - DNA, 38 bp, Artificial Sequence
  primer
gtaaaacgacggccagttgacaaatagggtctggaggg

SEQ ID NO: 31062 - DNA, 21 bp, Artificial Sequence
  primer
gggtaaagggagggtgagaag

SEQ ID NO: 31063 - DNA, 38 bp, Artificial Sequence
  primer
gtaaaacgacggccagtcatcagggtcactcgtttcac

SEQ ID NO: 31064 - DNA, 38 bp, Artificial Sequence
  primer
gtaaaacgacggccagtacacttgcccagtgggactac

SEQ ID NO: 31065 - DNA, 20 bp, Artificial Sequence
  primer
ctcggtgagcggttttatcc

SEQ ID NO: 31066 - DNA, 21 bp, Artificial Sequence
  primer
gccgtacagaacagcaagaac

SEQ ID NO: 31067 - DNA, 20 bp, Artificial Sequence
  primer
gtccaccagtgagctgcttc

SEQ ID NO: 31068 - DNA, 21 bp, Artificial Sequence
  primer
gccaacgtggtcttcctctac

SEQ ID NO: 31069 - DNA, 38 bp, Artificial Sequence
  primer
gtaaaacgacggccagtctcaggattagagcagcggag

SEQ ID NO: 31070 - DNA, 38 bp, Artificial Sequence
  primer
gtaaaacgacggccagtaagaaaggcagcaagaaggtg

SEQ ID NO: 31071 - DNA, 20 bp, Artificial Sequence
  primer
tatcgcctcaaggagctgag

SEQ ID NO: 31072 - DNA, 21 bp, Artificial Sequence
  primer
gcctactcctacatgggcaac

SEQ ID NO: 31073 - DNA, 22 bp, Artificial Sequence
  primer
cacagcagtgtcctgtccatag

SEQ ID NO: 31074 - DNA, 21 bp, Artificial Sequence
  primer
agagcatttgggaaggagacc

SEQ ID NO: 31075 - DNA, 37 bp, Artificial Sequence
  primer
gtaaaacgacggccagtgagctgtagggcaggaattg

SEQ ID NO: 31076 - DNA, 22 bp, Artificial Sequence
  primer
tgatttaaagggttgaaggtgg

SEQ ID NO: 31077 - DNA, 37 bp, Artificial Sequence
  primer
gtaaaacgacggccagtccctggtctctaatcccagc

SEQ ID NO: 31078 - DNA, 38 bp, Artificial Sequence
  primer
gtaaaacgacggccagtattgaagctgagtcctgctcc

SEQ ID NO: 31079 - DNA, 26 bp, Artificial Sequence
  primer
agatgtctaagcttgaaattattcgg

SEQ ID NO: 31080 - DNA, 21 bp, Artificial Sequence
  primer
gatgccatcaggtgaagtgtc

SEQ ID NO: 31081 - DNA, 38 bp, Artificial Sequence
  primer
gtaaaacgacggccagtctgccatgtggatgagaagtg

SEQ ID NO: 31082 - DNA, 40 bp, Artificial Sequence
  primer
gtaaaacgacggccagttgtaatccacatatgctgaaggc

SEQ ID NO: 31083 - DNA, 21 bp, Artificial Sequence
  primer
ggtagaatgaacatggtcgcc

SEQ ID NO: 31084 - DNA, 21 bp, Artificial Sequence
  primer
ggttaaggaatgctctgtggg

SEQ ID NO: 31085 - DNA, 21 bp, Artificial Sequence
  primer
tatccattgccattccatgag

SEQ ID NO: 31086 - DNA, 36 bp, Artificial Sequence
  primer
gtaaaacgacggccagtgtggtttgaattccagcgg

SEQ ID NO: 31087 - DNA, 21 bp, Artificial Sequence
  primer
tggcacacagaacatttgatg

SEQ ID NO: 31088 - DNA, 38 bp, Artificial Sequence
  primer
gtaaaacgacggccagtctgtggaagcagttcgtgttg

SEQ ID NO: 31089 - DNA, 38 bp, Artificial Sequence
  primer
gtaaaacgacggccagtagcctcgtaatccatagcgac

SEQ ID NO: 31090 - DNA, 38 bp, Artificial Sequence
  primer
gtaaaacgacggccagtgtcagtctgtgctggaagcag

SEQ ID NO: 31091 - DNA, 38 bp, Artificial Sequence
  primer
gtaaaacgacggccagtcacaggtctgtgggagaaatg

SEQ ID NO: 31092 - DNA, 21 bp, Artificial Sequence
  primer
cattggaaatgcctgttatgc

SEQ ID NO: 31093 - DNA, 37 bp, Artificial Sequence
  primer
gtaaaacgacggccagttttccttcctcctccagctc

SEQ ID NO: 31094 - DNA, 21 bp, Artificial Sequence
  primer
cttcattcaaatcaggcaggg

SEQ ID NO: 31095 - DNA, 21 bp, Artificial Sequence
  primer
cttggagctgatggcactatg

SEQ ID NO: 31096 - DNA, 38 bp, Artificial Sequence
  primer
gtaaaacgacggccagtaacggctaaactggaaatccc

SEQ ID NO: 31097 - DNA, 37 bp, Artificial Sequence
  primer
gtaaaacgacggccagtagcccaggtttcttggtttg

SEQ ID NO: 31098 - DNA, 44 bp, Artificial Sequence
  primer
gtaaaacgacggccagtttgtagcagtaatttagcaagtcaaac

SEQ ID NO: 31099 - DNA, 23 bp, Artificial Sequence
  primer
gcatagaaatggagttgcatgac

SEQ ID NO: 31100 - DNA, 37 bp, Artificial Sequence
  primer
gtaaaacgacggccagtcctgaaggtggtgctctctg

SEQ ID NO: 31101 - DNA, 36 bp, Artificial Sequence
  primer
gtaaaacgacggccagtgctttctgggctttgcatc

SEQ ID NO: 31102 - DNA, 21 bp, Artificial Sequence
  primer
ggtcagtcttgggaggatctg

SEQ ID NO: 31103 - DNA, 38 bp, Artificial Sequence
  primer
gtaaaacgacggccagtccaaagagtcgcttgataggg

SEQ ID NO: 31104 - DNA, 21 bp, Artificial Sequence
  primer
gctttggcatttgtttcttcc

SEQ ID NO: 31105 - DNA, 38 bp, Artificial Sequence
  primer
gtaaaacgacggccagtgcatctccatcctctctccac

SEQ ID NO: 31106 - DNA, 21 bp, Artificial Sequence
  primer
tttatgtggcccactcacttg

SEQ ID NO: 31107 - DNA, 21 bp, Artificial Sequence
  primer
agccagaccttctgaaagtgg

SEQ ID NO: 31108 - DNA, 21 bp, Artificial Sequence
  primer
tatgggaacgagaagtctggg

SEQ ID NO: 31109 - DNA, 38 bp, Artificial Sequence
  primer
gtaaaacgacggccagtaaaccatttcagacaagctgc

SEQ ID NO: 31110 - DNA, 38 bp, Artificial Sequence
  primer
gtaaaacgacggccagtgggaggcttgttaggaaagac

SEQ ID NO: 31111 - DNA, 21 bp, Artificial Sequence
  primer
tcctgaagatgttctgagccc

SEQ ID NO: 31112 - DNA, 22 bp, Artificial Sequence
  primer
tgttggctgtgtgaaatcaaag

SEQ ID NO: 31113 - DNA, 20 bp, Artificial Sequence
  primer
acacctgcaccagcaatacc

SEQ ID NO: 31114 - DNA, 21 bp, Artificial Sequence
  primer
actgaagttgcaaacattggg

SEQ ID NO: 31115 - DNA, 38 bp, Artificial Sequence
  primer
gtaaaacgacggccagtcccatgcctaggaaagaattg

SEQ ID NO: 31116 - DNA, 23 bp, Artificial Sequence
  primer
ttctcccttaggtaagatgtggg

SEQ ID NO: 31117 - DNA, 21 bp, Artificial Sequence
  primer
atctgcagccttgatgttgac

SEQ ID NO: 31118 - DNA, 38 bp, Artificial Sequence
  primer
gtaaaacgacggccagtccacactcttgtgactgaggg

SEQ ID NO: 31119 - DNA, 38 bp, Artificial Sequence
  primer
gtaaaacgacggccagtattgagttccttcgatggctg

SEQ ID NO: 31120 - DNA, 23 bp, Artificial Sequence
  primer
tgaaggaatgctgtgtgtgtatg

SEQ ID NO: 31121 - DNA, 21 bp, Artificial Sequence
  primer
gccctcctagctagcttcaac

SEQ ID NO: 31122 - DNA, 38 bp, Artificial Sequence
  primer
gtaaaacgacggccagtctgcatgttaaggcttgcttg

SEQ ID NO: 31123 - DNA, 21 bp, Artificial Sequence
  primer
acttccaccagaggtcacgag

SEQ ID NO: 31124 - DNA, 21 bp, Artificial Sequence
  primer
gttgtctacatgtccgagccc

SEQ ID NO: 31125 - DNA, 39 bp, Artificial Sequence
  primer
gtaaaacgacggccagtaacagtctcgctttcacctctg

SEQ ID NO: 31126 - DNA, 38 bp, Artificial Sequence
  primer
gtaaaacgacggccagtgtggagcgtaaaccctgattg

SEQ ID NO: 31127 - DNA, 21 bp, Artificial Sequence
  primer
taacctgtgtctccggtctcc

SEQ ID NO: 31128 - DNA, 38 bp, Artificial Sequence
  primer
gtaaaacgacggccagttattcccatcttcccatgacc

SEQ ID NO: 31129 - DNA, 22 bp, Artificial Sequence
  primer
gatgctggcttcttccactatg

SEQ ID NO: 31130 - DNA, 38 bp, Artificial Sequence
  primer
gtaaaacgacggccagtcctgtttagggattgagctgg

SEQ ID NO: 31131 - DNA, 38 bp, Artificial Sequence; identical to SEQ ID NO: 31130
  primer

SEQ ID NO: 31132 - DNA, 19 bp, Artificial Sequence
  primer
gatgtgtgtgcatcctggg

SEQ ID NO: 31133 - DNA, 38 bp, Artificial Sequence
  primer
gtaaaacgacggccagtccctttgggccagtgtcttac

SEQ ID NO: 31134 - DNA, 21 bp, Artificial Sequence
  primer
catgacccttctccagttgtc

SEQ ID NO: 31135 - DNA, 38 bp, Artificial Sequence
  primer
gtaaaacgacggccagtggctcaagcaatccactatcc

SEQ ID NO: 31136 - DNA, 21 bp, Artificial Sequence
  primer
cctaagtcagggctgcaaatc

SEQ ID NO: 31137 - DNA, 38 bp, Artificial Sequence
  primer
gtaaaacgacggccagtggcttctcacacttgagggtc

SEQ ID NO: 31138 - DNA, 20 bp, Artificial Sequence
  primer
acagggtctcatcgtttccc

SEQ ID NO: 31139 - DNA, 38 bp, Artificial Sequence
  primer
gtaaaacgacggccagttaaggatgtgagggtaagcgg

SEQ ID NO: 31140 - DNA, 38 bp, Artificial Sequence
  primer
gtaaaacgacggccagtagcctaagctggacctgctac

SEQ ID NO: 31141 - DNA, 36 bp, Artificial Sequence
  primer
gtaaaacgacggccagtagctagaccgatctccggg

SEQ ID NO: 31142 - DNA, 22 bp, Artificial Sequence
  primer
cgcgttgctttctcattgttac

SEQ ID NO: 31143 - DNA, 38 bp, Artificial Sequence
  primer
gtaaaacgacggccagtcagccaatacctgtcaaatgc

SEQ ID NO: 31144 - DNA, 38 bp, Artificial Sequence
  primer
gtaaaacgacggccagtcctattgcttctagcgcagtg

SEQ ID NO: 31145 - DNA, 21 bp, Artificial Sequence
  primer
aacccatacatgaaatgcagg

SEQ ID NO: 31146 - DNA, 21 bp, Artificial Sequence
  primer
tgaaggtctcctgggactctg

SEQ ID NO: 31147 - DNA, 21 bp, Artificial Sequence
  primer
ctcattcccactgtagatgcg

SEQ ID NO: 31148 - DNA, 38 bp, Artificial Sequence
  primer
gtaaaacgacggccagtgggatactaaagcgacggagc

SEQ ID NO: 31149 - DNA, 38 bp, Artificial Sequence
  primer
gtaaaacgacggccagtagtctgctcaggaactctggg

SEQ ID NO: 31150 - DNA, 40 bp, Artificial Sequence
  primer
gtaaaacgacggccagttttctgtggcgaagtatttgaag

SEQ ID NO: 31151 - DNA, 20 bp, Artificial Sequence
  primer
agttggagaccagcctgatg

SEQ ID NO: 31152 - DNA, 43 bp, Artificial Sequence
  primer
gtaaaacgacggccagtgctttatagggaattaccaacagttt

SEQ ID NO: 31153 - DNA, 40 bp, Artificial Sequence
  primer
gtaaaacgacggccagttgctctccctacccatctaactc

SEQ ID NO: 31154 - DNA, 43 bp, Artificial Sequence
  primer
gtaaaacgacggccagtttgtttagatttcaggtgttaccttg

SEQ ID NO: 31155 - DNA, 38 bp, Artificial Sequence
  primer
gtaaaacgacggccagtcagacaaggatcgttcatccc

SEQ ID NO: 31156 - DNA, 21 bp, Artificial Sequence
  primer
caggattgcatcactcactgc

SEQ ID NO: 31157 - DNA, 44 bp, Artificial Sequence
  primer
gtaaaacgacggccagttctatataaaccatcatatcacctgaa

SEQ ID NO: 31158 - DNA, 35 bp, Artificial Sequence
  primer
gtaaaacgacggccagttttgttgggaatgagggc

SEQ ID NO: 31159 - DNA, 21 bp, Artificial Sequence
  primer
agttggaatgcagtgactggt

SEQ ID NO: 31160 - DNA, 35 bp, Artificial Sequence
  primer
gtaaaacgacggccagtctcttgccgcatcagtcg

SEQ ID NO: 31161 - DNA, 23 bp, Artificial Sequence
  primer
ggactggactaggttgtctgaaa

SEQ ID NO: 31162 - DNA, 23 bp, Artificial Sequence
  primer
gcctttgaattacaaatggtgtg

SEQ ID NO: 31163 - DNA, 24 bp, Artificial Sequence
  primer
tttcaatatctatgggaatccctg

SEQ ID NO: 31164 - DNA, 21 bp, Artificial Sequence
  primer
ttcatgaaatttgcataccgc

SEQ ID NO: 31165 - DNA, 22 bp, Artificial Sequence
  primer
agaatggagctttcaaacttgc

SEQ ID NO: 31166 - DNA, 21 bp, Artificial Sequence
  primer
catttgggtggtatggaggta

SEQ ID NO: 31167 - DNA, 38 bp, Artificial Sequence
  primer
gtaaaacgacggccagtggaggttgaacggataggaaa

SEQ ID NO: 31168 - DNA, 40 bp, Artificial Sequence
  primer
gtaaaacgacggccagtttctcatcagaaggactttagcc

SEQ ID NO: 31169 - DNA, 23 bp, Artificial Sequence
  primer
gggatccatttgtttagtcagag

SEQ ID NO: 31170 - DNA, 38 bp, Artificial Sequence
  primer
gtaaaacgacggccagtctcaagccctcaagtagcctg

SEQ ID NO: 31171 - DNA, 38 bp, Artificial Sequence
  primer
gtaaaacgacggccagtttcttgtttcgtgaatgcctc

SEQ ID NO: 31172 - DNA, 43 bp, Artificial Sequence
  primer
gtaaaacgacggccagtcctatacatcctttcttccttgaaac

SEQ ID NO: 31173 - DNA, 38 bp, Artificial Sequence
  primer
gtaaaacgacggccagtgcctctcgggaactacaagtc

SEQ ID NO: 31174 - DNA, 38 bp, Artificial Sequence
  primer
gtaaaacgacggccagtccaagtgaggagaagggactg

SEQ ID NO: 31175 - DNA, 38 bp, Artificial Sequence
  primer
gtaaaacgacggccagtagcccatgatcttgctctgtc

SEQ ID NO: 31176 - DNA, 21 bp, Artificial Sequence
  primer
ttggagcaggaagaaagaagc

SEQ ID NO: 31177 - DNA, 38 bp, Artificial Sequence
  primer
gtaaaacgacggccagtatcaagagggtgatgcagatg

SEQ ID NO: 31178 - DNA, 20 bp, Artificial Sequence
  primer
aactgccagggcttcttgag

SEQ ID NO: 31179 - DNA, 38 bp, Artificial Sequence
  primer
gtaaaacgacggccagttcctgaccggactccatattc

SEQ ID NO: 31180 - DNA, 41 bp, Artificial Sequence
  primer
gtaaaacgacggccagtgcttgattagattcaaatttggtg

SEQ ID NO: 31181 - DNA, 19 bp, Artificial Sequence
  primer
gcaacagagcaagaccctg

SEQ ID NO: 31182 - DNA, 36 bp, Artificial Sequence
  primer
gtaaaacgacggccagtctaccgcagcaatcccagt

SEQ ID NO: 31183 - DNA, 39 bp, Artificial Sequence
  primer
gtaaaacgacggccagttgttgtgttctttaatgctgcg

SEQ ID NO: 31184 - DNA, 21 bp, Artificial Sequence
  primer
aaggaaacctgcattgatgtg

SEQ ID NO: 31185 - DNA, 38 bp, Artificial Sequence
  primer
gtaaaacgacggccagttgaacacatttgttgaaagcg

SEQ ID NO: 31186 - DNA, 43 bp, Artificial Sequence
  primer
gtaaaacgacggccagttcttgtataaaccaagcaaatgtttc

SEQ ID NO: 31187 - DNA, 37 bp, Artificial Sequence
  primer
gtaaaacgacggccagtcactggcaccatgggataag

SEQ ID NO: 31188 - DNA, 21 bp, Artificial Sequence
  primer
cgcttgtggtgttgatgtgag

SEQ ID NO: 31189 - DNA, 41 bp, Artificial Sequence
  primer
gtaaaacgacggccagtggactctttgaaactatttgcacg

SEQ ID NO: 31190 - DNA, 21 bp, Artificial Sequence
  primer
agcctccacaaaggaagaatc

SEQ ID NO: 31191 - DNA, 21 bp, Artificial Sequence
  primer
acttggtccagacctacctgg

SEQ ID NO: 31192 - DNA, 38 bp, Artificial Sequence
  primer
gtaaaacgacggccagttttgggttcattaattgtggc

SEQ ID NO: 31193 - DNA, 21 bp, Artificial Sequence
  primer
gggtgttcaaacgtgtctctg

SEQ ID NO: 31194 - DNA, 37 bp, Artificial Sequence
  primer
gtaaaacgacggccagtctgagttgctgggactacgg

SEQ ID NO: 31195 - DNA, 21 bp, Artificial Sequence
  primer
atacctctctttgccctcacc

SEQ ID NO: 31196 - DNA, 38 bp, Artificial Sequence
  primer
gtaaaacgacggccagtctagacttcagcggtgtgctg

SEQ ID NO: 31197 - DNA, 19 bp, Artificial Sequence
  primer
tgttgtccaacaggccaag

SEQ ID NO: 31198 - DNA, 21 bp, Artificial Sequence
  primer
ggcacaggcttgacttctgag

SEQ ID NO: 31199 - DNA, 38 bp, Artificial Sequence
  primer
gtaaaacgacggccagtgcacagacaaacacagcattg

SEQ ID NO: 31200 - DNA, 36 bp, Artificial Sequence
  primer
gtaaaacgacggccagtgtggaggacgtgaggaagg

SEQ ID NO: 31201 - DNA, 21 bp, Artificial Sequence
  primer
gtgccatttaggaatgactgg

SEQ ID NO: 31202 - DNA, 21 bp, Artificial Sequence
  primer
ctcaagtcctggattgtgtgc

SEQ ID NO: 31203 - DNA, 37 bp, Artificial Sequence
  primer
gtaaaacgacggccagtgaaggcggaggaaattaacg

SEQ ID NO: 31204 - DNA, 21 bp, Artificial Sequence
  primer
tctgagaggagaaaggagcaa

SEQ ID NO: 31205 - DNA, 21 bp, Artificial Sequence
  primer
acaacatacaatgccctgcac

SEQ ID NO: 31206 - DNA, 38 bp, Artificial Sequence
  primer
gtaaaacgacggccagtctttgagcatcacctcagtgc

SEQ ID NO: 31207 - DNA, 39 bp, Artificial Sequence
  primer
gtaaaacgacggccagtttcacaccacctgtctcttcac

SEQ ID NO: 31208 - DNA, 20 bp, Artificial Sequence
  primer
ctagagaggtcaaggctgcg

SEQ ID NO: 31209 - DNA, 39 bp, Artificial Sequence
  primer
gtaaaacgacggccagttttccaaactgctgatctaggc

SEQ ID NO: 31210 - DNA, 44 bp, Artificial Sequence
  primer
gtaaaacgacggccagtaaaggtgatacttatgatattctgctc

SEQ ID NO: 31211 - DNA, 21 bp, Artificial Sequence
  primer
tgcttgttagttggtgctgtg

SEQ ID NO: 31212 - DNA, 40 bp, Artificial Sequence
  primer
gtaaaacgacggccagtccatgtaggcaacttgagctatg

SEQ ID NO: 31213 - DNA, 39 bp, Artificial Sequence
  primer
gtaaaacgacggccagttgagactgtgggtttattgtgg

SEQ ID NO: 31214 - DNA, 44 bp, Artificial Sequence
  primer
gtaaaacgacggccagttggaacaaagctaagaatatgactgtt

SEQ ID NO: 31215 - DNA, 41 bp, Artificial Sequence
  primer
gtaaaacgacggccagttgcattgtgtaattaatcctttgc

SEQ ID NO: 31216 - DNA, 22 bp, Artificial Sequence
  primer
tgtttctttagccttggccttc

SEQ ID NO: 31217 - DNA, 37 bp, Artificial Sequence
  primer
gtaaaacgacggccagttctgttgcctgtgggctatc

SEQ ID NO: 31218 - DNA, 42 bp, Artificial Sequence
  primer
gtaaaacgacggccagtgaagttcctgaggtctaattccatc

SEQ ID NO: 31219 - DNA, 27 bp, Artificial Sequence
  primer
catctcttgacatgcattatagttagc

SEQ ID NO: 31220 - DNA, 22 bp, Artificial Sequence
  primer
ttgggaaaggtaagaactttgg

SEQ ID NO: 31221 - DNA, 37 bp, Artificial Sequence
  primer
gtaaaacgacggccagtgcatgtggacaaattggttg

SEQ ID NO: 31222 - DNA, 40 bp, Artificial Sequence
  primer
gtaaaacgacggccagtgctatcaccagagagattcaagc

SEQ ID NO: 31223 - DNA, 21 bp, Artificial Sequence
  primer
aagaggacagtccctcaccac

SEQ ID NO: 31224 - DNA, 38 bp, Artificial Sequence
  primer
gtaaaacgacggccagtgaaggaagcccacatttgttt

SEQ ID NO: 31225 - DNA, 38 bp, Artificial Sequence
  primer
gtaaaacgacggccagtcctctgatggttattgcagcc

SEQ ID NO: 31226 - DNA, 37 bp, Artificial Sequence
  primer
gtaaaacgacggccagtctggccttcaggcattaacc

SEQ ID NO: 31227 - DNA, 21 bp, Artificial Sequence
  primer
aagctatgatcatgccactgc

SEQ ID NO: 31228 - DNA, 38 bp, Artificial Sequence
  primer
gtaaaacgacggccagtgttattcagtttgtgggcacg

SEQ ID NO: 31229 - DNA, 38 bp, Artificial Sequence
  primer
gtaaaacgacggccagtatgtgaaagttcccaccaacc

SEQ ID NO: 31230 - DNA, 39 bp, Artificial Sequence
  primer
gtaaaacgacggccagtacatttaaacgtatcgccagtg

SEQ ID NO: 31231 - DNA, 38 bp, Artificial Sequence
  primer
gtaaaacgacggccagtttccttgacaatgtttgtggg

SEQ ID NO: 31232 - DNA, 38 bp, Artificial Sequence
  primer
gtaaaacgacggccagtaagcagaaggtgaaattggga

SEQ ID NO: 31233 - DNA, 25 bp, Artificial Sequence
  primer
ctgattcagcatgagaaagttgtag

SEQ ID NO: 31234 - DNA, 21 bp, Artificial Sequence
  primer
tgtggtctgcatgtttctgag

SEQ ID NO: 31235 - DNA, 38 bp, Artificial Sequence
  primer
gtaaaacgacggccagtaaatagcccatgcgagaacag

SEQ ID NO: 31236 - DNA, 25 bp, Artificial Sequence
  primer
aaattgatggctttattagcatagg

SEQ ID NO: 31237 - DNA, 21 bp, Artificial Sequence
  primer
ccttctgcaacactcacaagc

SEQ ID NO: 31238 - DNA, 27 bp, Artificial Sequence
  primer
tgatattctgcaatgactgtgtatttc

SEQ ID NO: 31239 - DNA, 38 bp, Artificial Sequence
  primer
gtaaaacgacggccagttaatttcatcaaggccagtgc

SEQ ID NO: 31240 - DNA, 21 bp, Artificial Sequence
  primer
agcaaggacatccagaacctg

SEQ ID NO: 31241 - DNA, 20 bp, Artificial Sequence
  primer
gcccagggacaaagtacctc

SEQ ID NO: 31242 - DNA, 38 bp, Artificial Sequence
  primer
gtaaaacgacggccagtgagcaacctttctgaagccag

SEQ ID NO: 31243 - DNA, 40 bp, Artificial Sequence
  primer
gtaaaacgacggccagtaaataaaggccatgatgagttcc

SEQ ID NO: 31244 - DNA, 38 bp, Artificial Sequence
  primer
gtaaaacgacggccagttagcagcgtgtgcctgtagtc

SEQ ID NO: 31245 - DNA, 20 bp, Artificial Sequence
  primer
gaggtcaaggctgcactgag

SEQ ID NO: 31246 - DNA, 38 bp, Artificial Sequence
  primer
gtaaaacgacggccagtcccaagtgtttgattcttccc

SEQ ID NO: 31247 - DNA, 38 bp, Artificial Sequence
  primer
gtaaaacgacggccagttcttgggtgtggttgcatatc

SEQ ID NO: 31248 - DNA, 21 bp, Artificial Sequence
  primer
agtcacctcacctctaagccc

SEQ ID NO: 31249 - DNA, 38 bp, Artificial Sequence
  primer
gtaaaacgacggccagtgcatttcctagtctcccttgc

SEQ ID NO: 31250 - DNA, 38 bp, Artificial Sequence
  primer
gtaaaacgacggccagttcactgtcaccttggcttcag

SEQ ID NO: 31251 - DNA, 37 bp, Artificial Sequence
  primer
gtaaaacgacggccagtagaatgcatgtggccttctg

SEQ ID NO: 31252 - DNA, 38 bp, Artificial Sequence
  primer
gtaaaacgacggccagtagaccagctggaaggagtgag

SEQ ID NO: 31253 - DNA, 21 bp, Artificial Sequence
  primer
agcgatggaacttcgactttg

SEQ ID NO: 31254 - DNA, 21 bp, Artificial Sequence
  primer
tcttcctgttctcagcagtcg

SEQ ID NO: 31255 - DNA, 37 bp, Artificial Sequence
  primer
gtaaaacgacggccagttccatttgatcagcggagac

SEQ ID NO: 31256 - DNA, 21 bp, Artificial Sequence
  primer
gagaaagatgtcaaacgtgcg

SEQ ID NO: 31257 - DNA, 21 bp, Artificial Sequence
  primer
agcactgcagagacatggaag

SEQ ID NO: 31258 - DNA, 21 bp, Artificial Sequence
  primer
gattgtgggtggaggtagtgg

SEQ ID NO: 31259 - DNA, 20 bp, Artificial Sequence
  primer
gacgcagaagagtccaccac

SEQ ID NO: 31260 - DNA, 36 bp, Artificial Sequence
  primer
gtaaaacgacggccagtgtggaccgaagtggacagc

SEQ ID NO: 31261 - DNA, 19 bp, Artificial Sequence
  primer
agcagctgcctagtgtccc

SEQ ID NO: 31262 - DNA, 21 bp, Artificial Sequence
  primer
cgacgtaaacaaagctgaccc

SEQ ID NO: 31263 - DNA, 37 bp, Artificial Sequence
  primer
gtaaaacgacggccagtagcaccggaggaagaaagag

SEQ ID NO: 31264 - DNA, 40 bp, Artificial Sequence
  primer
gtaaaacgacggccagtgggctctacacaagcttcctttc

SEQ ID NO: 31265 - DNA, 18 bp, Artificial Sequence
  primer
tcttcttgcaaccctgcg

SEQ ID NO: 31266 - DNA, 18 bp, Artificial Sequence
  primer
atcttggaggtccgggtg

SEQ ID NO: 31267 - DNA, 39 bp, Artificial Sequence
  primer
gtaaaacgacggccagtggctctacacaagcttcctttc

SEQ ID NO: 31268 - DNA, 38 bp, Artificial Sequence
  primer
gtaaaacgacggccagttcctaggaaggagagagtgcg

SEQ ID NO: 31269 - DNA, 21 bp, Artificial Sequence
  primer
tctttaaatggctccacctgc

SEQ ID NO: 31270 - DNA, 36 bp, Artificial Sequence
  primer
gtaaaacgacggccagtgagcagcgtgggaaagaag

SEQ ID NO: 31271 - DNA, 37 bp, Artificial Sequence
  primer
gtaaaacgacggccagtagcctggttaggagcaaagg

SEQ ID NO: 31272 - DNA, 21 bp, Artificial Sequence
  primer
gcccatttaagacgttccatc

SEQ ID NO: 31273 - DNA, 22 bp, Artificial Sequence
  primer
gcaggtttcctggacactttac

SEQ ID NO: 31274 - DNA, 34 bp, Artificial Sequence
  primer
gtaaaacgacggccagtgtcctccggctgacagg

SEQ ID NO: 31275 - DNA, 38 bp, Artificial Sequence
  primer
gtaaaacgacggccagtgatgcctctttctggatgacc

SEQ ID NO: 31276 - DNA, 38 bp, Artificial Sequence
  primer
gtaaaacgacggccagttcacagaaggacgaaccagtg

SEQ ID NO: 31277 - DNA, 43 bp, Artificial Sequence
  primer
gtaaaacgacggccagtcagtgtgtgtttagacaaggattagc

SEQ ID NO: 31278 - DNA, 38 bp, Artificial Sequence
  primer
gtaaaacgacggccagtcaactttatttggtggcaagc

SEQ ID NO: 31279 - DNA, 39 bp, Artificial Sequence
  primer
gtaaaacgacggccagttggagtacaaatgaggctgagg

SEQ ID NO: 31280 - DNA, 25 bp, Artificial Sequence
  primer
tttcatattctccctcttgatggta

SEQ ID NO: 31281 - DNA, 38 bp, Artificial Sequence
  primer
gtaaaacgacggccagtagcacaccttgctctcagttg

SEQ ID NO: 31282 - DNA, 41 bp, Artificial Sequence
  primer
gtaaaacgacggccagttggaacaattacaccagtcttctg

SEQ ID NO: 31283 - DNA, 21 bp, Artificial Sequence
  primer
gatgcaaatgcttccttaccc

SEQ ID NO: 31284 - DNA, 21 bp, Artificial Sequence
  primer
tgtgcgtgtgtgtctgcttag

SEQ ID NO: 31285 - DNA, 39 bp, Artificial Sequence
  primer
gtaaaacgacggccagttgcattcaaagttgcttagagg

SEQ ID NO: 31286 - DNA, 39 bp, Artificial Sequence
  primer
gtaaaacgacggccagtgggaagactgttactgcaggtc

SEQ ID NO: 31287 - DNA, 41 bp, Artificial Sequence
  primer
gtaaaacgacggccagtttcatgatctcagatgactcacag

SEQ ID NO: 31288 - DNA, 21 bp, Artificial Sequence
  primer
tcgctccgcttcatctttatc

SEQ ID NO: 31289 - DNA, 21 bp, Artificial Sequence
  primer
ctccagctgctcagacgaaag

SEQ ID NO: 31290 - DNA, 25 bp, Artificial Sequence
  primer
tttacaagcatcaagaaccataaca

SEQ ID NO: 31291 - DNA, 20 bp, Artificial Sequence
  primer
aaagatcatgcagccctctg

SEQ ID NO: 31292 - DNA, 40 bp, Artificial Sequence
  primer
gtaaaacgacggccagtgcataatgatcagcctttgtgag

SEQ ID NO: 31293 - DNA, 38 bp, Artificial Sequence
  primer
gtaaaacgacggccagtgatgcccacaggtttgctaag

SEQ ID NO: 31294 - DNA, 22 bp, Artificial Sequence
  primer
aatgcaactttgtttcaactgg

SEQ ID NO: 31295 - DNA, 38 bp, Artificial Sequence
  primer
gtaaaacgacggccagtaggagcccacagctatgaaac

SEQ ID NO: 31296 - DNA, 38 bp, Artificial Sequence
  primer
gtaaaacgacggccagtacggcaccagtaagtgcaaag

SEQ ID NO: 31297 - DNA, 20 bp, Artificial Sequence
  primer
gcagtcacgtcacaaactgg

SEQ ID NO: 31298 - DNA, 38 bp, Artificial Sequence
  primer
gtaaaacgacggccagtacagtgagaattgcagcgttc

SEQ ID NO: 31299 - DNA, 26 bp, Artificial Sequence
  primer
ggtcttacatttagatgctgtgtctg

SEQ ID NO: 31300 - DNA, 40 bp, Artificial Sequence
  primer
gtaaaacgacggccagtggacaggaagactgctgtaaatg

SEQ ID NO: 31301 - DNA, 38 bp, Artificial Sequence
  primer
gtaaaacgacggccagtagccactcccagttgattgag

SEQ ID NO: 31302 - DNA, 24 bp, Artificial Sequence
  primer
tttctgtttaacctcgcaataagc

SEQ ID NO: 31303 - DNA, 35 bp, Artificial Sequence
  primer
gtaaaacgacggccagttgctccagcctcatcctg

SEQ ID NO: 31304 - DNA, 21 bp, Artificial Sequence
  primer
gactggcttgcattcctaacc

SEQ ID NO: 31305 - DNA, 21 bp, Artificial Sequence
  primer
tcttactgtgtgcgtgtgtgc

SEQ ID NO: 31306 - DNA, 40 bp, Artificial Sequence
  primer
gtaaaacgacggccagtttggctactggtctgtgagtacc

SEQ ID NO: 31307 - DNA, 44 bp, Artificial Sequence
  primer
gtaaaacgacggccagtagtctgtgaatacagaataccaaatga

SEQ ID NO: 31308 - DNA, 38 bp, Artificial Sequence
  primer
gtaaaacgacggccagttcaaaccacacacaaaccagg

SEQ ID NO: 31309 - DNA, 38 bp, Artificial Sequence
  primer
gtaaaacgacggccagtctggaagacgtggagatgttg

SEQ ID NO: 31310 - DNA, 21 bp, Artificial Sequence
  primer
aagacatggcttggttggaag

SEQ ID NO: 31311 - DNA, 21 bp, Artificial Sequence
  primer
tcggaagctatggatttgagg

SEQ ID NO: 31312 - DNA, 21 bp, Artificial Sequence
  primer
acttggattgttgggaagacg

SEQ ID NO: 31313 - DNA, 35 bp, Artificial Sequence
  primer
gtaaaacgacggccagtgtgagactccggctccag

SEQ ID NO: 31314 - DNA, 38 bp, Artificial Sequence
  primer
gtaaaacgacggccagtcttctgtgccactccaccttc

SEQ ID NO: 31315 - DNA, 36 bp, Artificial Sequence
  primer
gtaaaacgacggccagtatccacacgtcttggcctc

SEQ ID NO: 31316 - DNA, 38 bp, Artificial Sequence
  primer
gtaaaacgacggccagtgcacctaatctctcctcaccg

SEQ ID NO: 31317 - DNA, 38 bp, Artificial Sequence
  primer
gtaaaacgacggccagttcaccagtcttcctctcgttc

SEQ ID NO: 31318 - DNA, 21 bp, Artificial Sequence
  primer
cagaagcgggtgactatggag

SEQ ID NO: 31319 - DNA, 38 bp, Artificial Sequence
  primer
gtaaaacgacggccagtgactgtgccggaatcacatag

SEQ ID NO: 31320 - DNA, 38 bp, Artificial Sequence
  primer
gtaaaacgacggccagtctgattcctgcagatactggg

SEQ ID NO: 31321 - DNA, 37 bp, Artificial Sequence
  primer
gtaaaacgacggccagtatgggctcgatgagtctttg

SEQ ID NO: 31322 - DNA, 38 bp, Artificial Sequence
  primer
gtaaaacgacggccagtctgaagaaggctcagctttgg

SEQ ID NO: 31323 - DNA, 21 bp, Artificial Sequence
  primer
gggcaacaagagtgaaactcc

SEQ ID NO: 31324 - DNA, 21 bp, Artificial Sequence
  primer
tcccagacattccctacaagg

SEQ ID NO: 31325 - DNA, 21 bp, Artificial Sequence
  primer
accgtaaagaagcgacctcac

SEQ ID NO: 31326 - DNA, 38 bp, Artificial Sequence
  primer
gtaaaacgacggccagttcattgaggcacagacacttg

SEQ ID NO: 31327 - DNA, 20 bp, Artificial Sequence
  primer
cctcctgtacctcgctggag

SEQ ID NO: 31328 - DNA, 18 bp, Artificial Sequence
  primer
gggctcacttggcctgtc

SEQ ID NO: 31329 - DNA, 38 bp, Artificial Sequence
  primer
gtaaaacgacggccagtaaatctggttccaatgccttc

SEQ ID NO: 31330 - DNA, 21 bp, Artificial Sequence
  primer
gccggcctatgtcacctatac

SEQ ID NO: 31331 - DNA, 35 bp, Artificial Sequence
  primer
gtaaaacgacggccagtctgcagaaccctgcttgc

SEQ ID NO: 31332 - DNA, 24 bp, Artificial Sequence
  primer
atgtcactgagatttgacacactg

SEQ ID NO: 31333 - DNA, 22 bp, Artificial Sequence
  primer
tctcccagtgtgtgaatgaatg

SEQ ID NO: 31334 - DNA, 23 bp, Artificial Sequence
  primer
ctcaaactttaaactccattgcc

SEQ ID NO: 31335 - DNA, 42 bp, Artificial Sequence
  primer
gtaaaacgacggccagttcttgaattggtcttctgaactttg

SEQ ID NO: 31336 - DNA, 37 bp, Artificial Sequence
  primer
gtaaaacgacggccagttgaatttgtgccatggaatg

SEQ ID NO: 31337 - DNA, 38 bp, Artificial Sequence
  primer
gtaaaacgacggccagtaatttgggtttcaaatcgctg

SEQ ID NO: 31338 - DNA, 21 bp, Artificial Sequence
  primer
acctttccgaatatctgccac

SEQ ID NO: 31339 - DNA, 26 bp, Artificial Sequence
  primer
tttgagagacagaacaaatttagacc

SEQ ID NO: 31340 - DNA, 25 bp, Artificial Sequence
  primer
ttaagacaaagaaattctggcattc

SEQ ID NO: 31341 - DNA, 38 bp, Artificial Sequence
  primer
gtaaaacgacggccagtgtggtgcgtgctttgacttac

SEQ ID NO: 31342 - DNA, 38 bp, Artificial Sequence
  primer
gtaaaacgacggccagtagtccatgacgccaaagagac

SEQ ID NO: 31343 - DNA, 40 bp, Artificial Sequence
  primer
gtaaaacgacggccagtaacccttgacactaacattgcac

SEQ ID NO: 31344 - DNA, 21 bp, Artificial Sequence
  primer
ctgctaagggaactgtgagcc

SEQ ID NO: 31345 - DNA, 21 bp, Artificial Sequence
  primer
caggttcttaggccctgtttg

SEQ ID NO: 31346 - DNA, 21 bp, Artificial Sequence
  primer
tttgccaagtttggttgtgac

SEQ ID NO: 31347 - DNA, 38 bp, Artificial Sequence
  primer
gtaaaacgacggccagtggctcatgacctgttggtttc

SEQ ID NO: 31348 - DNA, 37 bp, Artificial Sequence
  primer
gtaaaacgacggccagtcctctgggatgtctgactgc

SEQ ID NO: 31349 - DNA, 39 bp, Artificial Sequence
  primer
gtaaaacgacggccagtttgacattgtgcactggttagc

SEQ ID NO: 31350 - DNA, 20 bp, Artificial Sequence
  primer
gctttcagagcatgggagag

SEQ ID NO: 31351 - DNA, 22 bp, Artificial Sequence
  primer
tggtgctggaatttaagaatgg

SEQ ID NO: 31352 - DNA, 21 bp, Artificial Sequence
  primer
aacagaaagggaaccaaaggg

SEQ ID NO: 31353 - DNA, 39 bp, Artificial Sequence
  primer
gtaaaacgacggccagttcgcagttagcagggtactagg

SEQ ID NO: 31354 - DNA, 21 bp, Artificial Sequence
  primer
actaggcatcacctcccagtg

SEQ ID NO: 31355 - DNA, 38 bp, Artificial Sequence
  primer
gtaaaacgacggccagttcaccttctattgccctcagc

SEQ ID NO: 31356 - DNA, 20 bp, Artificial Sequence
  primer
ctgaggcctcctgtcatctg

SEQ ID NO: 31357 - DNA, 39 bp, Artificial Sequence
  primer
gtaaaacgacggccagtaatgtccagctctggcataaag

SEQ ID NO: 31358 - DNA, 21 bp, Artificial Sequence
  primer
tattcggccacctcaatatcc

SEQ ID NO: 31359 - DNA, 38 bp, Artificial Sequence
  primer
gtaaaacgacggccagtgaccttggctaagagcattgg

SEQ ID NO: 31360 - DNA, 21 bp, Artificial Sequence
  primer
cagctttcagttcagcagcag

SEQ ID NO: 31361 - DNA, 22 bp, Artificial Sequence
  primer
caaatcctatggtggctacgag

SEQ ID NO: 31362 - DNA, 38 bp, Artificial Sequence
  primer
gtaaaacgacggccagtcccatctctgagggcaaatac

SEQ ID NO: 31363 - DNA, 21 bp, Artificial Sequence
  primer
tctccctccagttctcgagtc

SEQ ID NO: 31364 - DNA, 18 bp, Artificial Sequence
  primer
gggaaatttggcgggaac

SEQ ID NO: 31365 - DNA, 38 bp, Artificial Sequence
  primer
gtaaaacgacggccagtgtcccagttaactcagagcgg

SEQ ID NO: 31366 - DNA, 37 bp, Artificial Sequence
  primer
gtaaaacgacggccagtctccgggccagaagataaag

SEQ ID NO: 31367 - DNA, 21 bp, Artificial Sequence
  primer
ctttcccgtcaccactgctac

SEQ ID NO: 31368 - DNA, 38 bp, Artificial Sequence
  primer
gtaaaacgacggccagtctgccctacaagtaccaggtg

SEQ ID NO: 31369 - DNA, 38 bp, Artificial Sequence
  primer
gtaaaacgacggccagtccaggaggtcagattaccagc

SEQ ID NO: 31370 - DNA, 38 bp, Artificial Sequence
  primer
gtaaaacgacggccagtaggcctacctcacatgcagtc

SEQ ID NO: 31371 - DNA, 38 bp, Artificial Sequence
  primer
gtaaaacgacggccagtcttgtgccttgagagataccg

SEQ ID NO: 31372 - DNA, 37 bp, Artificial Sequence
  primer
gtaaaacgacggccagtctctcccagtgctctgaagg

SEQ ID NO: 31373 - DNA, 38 bp, Artificial Sequence
  primer
gtaaaacgacggccagtcagaaccacctctgccctaag

SEQ ID NO: 31374 - DNA, 26 bp, Artificial Sequence
  primer
gcctacgttgtatgaacttaattctg

SEQ ID NO: 31375 - DNA, 20 bp, Artificial Sequence
  primer
gggcctccatccttaatctg

SEQ ID NO: 31376 - DNA, 21 bp, Artificial Sequence
  primer
cctgggcaataaagtgagacc

SEQ ID NO: 31377 - DNA, 18 bp, Artificial Sequence
  primer
gaatctgggaggcggaag

SEQ ID NO: 31378 - DNA, 38 bp, Artificial Sequence
  primer
gtaaaacgacggccagttaccctgcataagaagccctg

SEQ ID NO: 31379 - DNA, 21 bp, Artificial Sequence
  primer
tcaaggacctggagcctagag

SEQ ID NO: 31380 - DNA, 22 bp, Artificial Sequence
  primer
tttccttaaaccgcaaattcag

SEQ ID NO: 31381 - DNA, 21 bp, Artificial Sequence
  primer
caaatatgccgtatccaggtc

SEQ ID NO: 31382 - DNA, 21 bp, Artificial Sequence
  primer
gtttggccagacgtcacttag

SEQ ID NO: 31383 - DNA, 21 bp, Artificial Sequence
  primer
attggttaagagaggccaagc

SEQ ID NO: 31384 - DNA, 21 bp, Artificial Sequence
  primer
atggagatttgccctttatcc

SEQ ID NO: 31385 - DNA, 36 bp, Artificial Sequence
  primer
gtaaaacgacggccagtctcttgagtaccagccgcc

SEQ ID NO: 31386 - DNA, 21 bp, Artificial Sequence
  primer
gctggtgtatttgtgcccttc

SEQ ID NO: 31387 - DNA, 38 bp, Artificial Sequence
  primer
gtaaaacgacggccagtgctctttgttcccttcagcag

SEQ ID NO: 31388 - DNA, 21 bp, Artificial Sequence
  primer
tcgtggaggaatgtggaatag

SEQ ID NO: 31389 - DNA, 39 bp, Artificial Sequence
  primer
gtaaaacgacggccagtcatcttgcagagaacctgacac

SEQ ID NO: 31390 - DNA, 39 bp, Artificial Sequence
  primer
gtaaaacgacggccagttgtgtgtttgatgtggcattta

SEQ ID NO: 31391 - DNA, 22 bp, Artificial Sequence
  primer
caacagcagctagtttccttcc

SEQ ID NO: 31392 - DNA, 39 bp, Artificial Sequence
  primer
gtaaaacgacggccagtcccatgatgatctgtaggaagg

SEQ ID NO: 31393 - DNA, 38 bp, Artificial Sequence
  primer
gtaaaacgacggccagtgaatgctacctccaggtttgg

SEQ ID NO: 31394 - DNA, 38 bp, Artificial Sequence
  primer
gtaaaacgacggccagtgggtagggacctattgccttc

SEQ ID NO: 31395 - DNA, 21 bp, Artificial Sequence
  primer
cactgcgttggactctaaacc

SEQ ID NO: 31396 - DNA, 22 bp, Artificial Sequence
  primer
ggaggctttgaagcataaattg

SEQ ID NO: 31397 - DNA, 38 bp, Artificial Sequence
  primer
gtaaaacgacggccagtttaaagggtgccatgtgtttg

SEQ ID NO: 31398 - DNA, 21 bp, Artificial Sequence
  primer
gcctcatgcaaccatcattta

SEQ ID NO: 31399 - DNA, 38 bp, Artificial Sequence
  primer
gtaaaacgacggccagtaatcagcgaattgcagagtcc

SEQ ID NO: 31400 - DNA, 38 bp, Artificial Sequence
  primer
gtaaaacgacggccagtgctgtcttgctgtttgtgacc

SEQ ID NO: 31401 - DNA, 37 bp, Artificial Sequence
  primer
gtaaaacgacggccagtgacagccgagttcaggtgag

SEQ ID NO: 31402 - DNA, 21 bp, Artificial Sequence
  primer
ccatgtatgtgggctatgtgc

SEQ ID NO: 31403 - DNA, 21 bp, Artificial Sequence
  primer
tacttcagggagcctggattg

SEQ ID NO: 31404 - DNA, 21 bp, Artificial Sequence
  primer
ggagataagccacaaagccac

SEQ ID NO: 31405 - DNA, 21 bp, Artificial Sequence
  primer
ctagtgggaaggaggtgggag

SEQ ID NO: 31406 - DNA, 35 bp, Artificial Sequence
  primer
gtaaaacgacggccagtgcagcgaacttggacagc

SEQ ID NO: 31407 - DNA, 38 bp, Artificial Sequence
  primer
gtaaaacgacggccagtaaatgtccctgggttagggag

SEQ ID NO: 31408 - DNA, 39 bp, Artificial Sequence
  primer
gtaaaacgacggccagtggacttggagttctgtagctgg

SEQ ID NO: 31409 - DNA, 38 bp, Artificial Sequence
  primer
gtaaaacgacggccagtagaaacgtgggatggagtagc

SEQ ID NO: 31410 - DNA, 21 bp, Artificial Sequence
  primer
tacccaagacacgatgtacgg

SEQ ID NO: 31411 - DNA, 37 bp, Artificial Sequence
  primer
gtaaaacgacggccagtaaagcaaagatgagggtggg

SEQ ID NO: 31412 - DNA, 38 bp, Artificial Sequence
  primer
gtaaaacgacggccagtgtgggcatacttcacaaggtc

SEQ ID NO: 31413 - DNA, 39 bp, Artificial Sequence
  primer
gtaaaacgacggccagtaagtcattaaatgccatgagcc

SEQ ID NO: 31414 - DNA, 21 bp, Artificial Sequence
  primer
tgtctgctttctcttcatccc

SEQ ID NO: 31415 - DNA, 37 bp, Artificial Sequence
  primer
gtaaaacgacggccagtagggaaattgtccacaaccc

SEQ ID NO: 31416 - DNA, 38 bp, Artificial Sequence
  primer
gtaaaacgacggccagtaacagcacctcgtgaactgtg

SEQ ID NO: 31417 - DNA, 21 bp, Artificial Sequence
  primer
gattgggaaagaccacgaatc

SEQ ID NO: 31418 - DNA, 38 bp, Artificial Sequence
  primer
gtaaaacgacggccagtttcaaagatgacacctgggag

SEQ ID NO: 31419 - DNA, 21 bp, Artificial Sequence
  primer
cttgattaaaccactgcacgc

SEQ ID NO: 31420 - DNA, 39 bp, Artificial Sequence
  primer
gtaaaacgacggccagttctcaagtcttcaggatttccg

SEQ ID NO: 31421 - DNA, 37 bp, Artificial Sequence
  primer
gtaaaacgacggccagtttgtgaatgtttcccttcgg

SEQ ID NO: 31422 - DNA, 38 bp, Artificial Sequence
  primer
gtaaaacgacggccagtttgctggaatttgatgattgc

SEQ ID NO: 31423 - DNA, 38 bp, Artificial Sequence; identical to SEQ ID NO: 31418
  primer

SEQ ID NO: 31424 - DNA, 19 bp, Artificial Sequence
  primer
cccaagcctgtcattctgc

SEQ ID NO: 31425 - DNA, 21 bp, Artificial Sequence
  primer
cccaaaggctttatggtgttc

SEQ ID NO: 31426 - DNA, 21 bp, Artificial Sequence
  primer
agcagtccagtacctccaagc

SEQ ID NO: 31427 - DNA, 38 bp, Artificial Sequence
  primer
gtaaaacgacggccagtattggaaatcccaacgtcctc

SEQ ID NO: 31428 - DNA, 37 bp, Artificial Sequence
  primer
gtaaaacgacggccagtcctctggctgtcttgcagtc

SEQ ID NO: 31429 - DNA, 21 bp, Artificial Sequence
  primer
acagcacctgggagagtcaag

SEQ ID NO: 31430 - DNA, 38 bp, Artificial Sequence
  primer
gtaaaacgacggccagtcttccagaactgggatggttg

SEQ ID NO: 31431 - DNA, 38 bp, Artificial Sequence
  primer
gtaaaacgacggccagttgggccaggtacctagttctg

SEQ ID NO: 31432 - DNA, 21 bp, Artificial Sequence
  primer
acagagcttcctggacaaacc

SEQ ID NO: 31433 - DNA, 21 bp, Artificial Sequence
  primer
caaggtcagaggcactaaggg

SEQ ID NO: 31434 - DNA, 21 bp, Artificial Sequence
  primer
atgccattcaatgttgcagag

SEQ ID NO: 31435 - DNA, 18 bp, Artificial Sequence
  primer
gagcgaggctccatctcc

SEQ ID NO: 31436 - DNA, 37 bp, Artificial Sequence
  primer
gtaaaacgacggccagtactgtggcccttctccagac

SEQ ID NO: 31437 - DNA, 38 bp, Artificial Sequence
  primer
gtaaaacgacggccagtctcagggaaaggagcatagcc

SEQ ID NO: 31438 - DNA, 22 bp, Artificial Sequence
  primer
tcccacaacgaaactgtattcc

SEQ ID NO: 31439 - DNA, 38 bp, Artificial Sequence
  primer
gtaaaacgacggccagtttagactgaagaacgaggccc

SEQ ID NO: 31440 - DNA, 39 bp, Artificial Sequence
  primer
gtaaaacgacggccagtggtactaacatgctgggtctgg

SEQ ID NO: 31441 - DNA, 38 bp, Artificial Sequence
  primer
gtaaaacgacggccagtaacagcttgtggtgctgaatc

SEQ ID NO: 31442 - DNA, 21 bp, Artificial Sequence
  primer
agaccaggcagagcaacatag

SEQ ID NO: 31443 - DNA, 38 bp, Artificial Sequence
  primer
gtaaaacgacggccagtatttactctgcgccagtcgtg

SEQ ID NO: 31444 - DNA, 38 bp, Artificial Sequence
  primer
gtaaaacgacggccagtagatccttggtgactcgatcc

SEQ ID NO: 31445 - DNA, 38 bp, Artificial Sequence
  primer
gtaaaacgacggccagtccgagcctgagtctcttcttc

SEQ ID NO: 31446 - DNA, 37 bp, Artificial Sequence
  primer
gtaaaacgacggccagtaaccattctttgtccctccg

SEQ ID NO: 31447 - DNA, 37 bp, Artificial Sequence
  primer
gtaaaacgacggccagtagggacctagcttggtggag

SEQ ID NO: 31448 - DNA, 35 bp, Artificial Sequence
  primer
gtaaaacgacggccagtcagcaagggttgggaagg

SEQ ID NO: 31449 - DNA, 38 bp, Artificial Sequence
  primer
gtaaaacgacggccagtaacgctaccttcctgaacctg

SEQ ID NO: 31450 - DNA, 38 bp, Artificial Sequence
  primer
gtaaaacgacggccagtagttactttcctgccaccacc

SEQ ID NO: 31451 - DNA, 21 bp, Artificial Sequence
  primer
tgcttctgaagaccttagccg

SEQ ID NO: 31452 - DNA, 39 bp, Artificial Sequence
  primer
gtaaaacgacggccagttctgggtccctctgtgactatg

SEQ ID NO: 31453 - DNA, 38 bp, Artificial Sequence
  primer
gtaaaacgacggccagtttgatctagcctttgagtggg

SEQ ID NO: 31454 - DNA, 36 bp, Artificial Sequence
  primer
gtaaaacgacggccagtcacacgcacacactcctgg

SEQ ID NO: 31455 - DNA, 38 bp, Artificial Sequence
  primer
gtaaaacgacggccagttccaaggtgaaagtgaatggg

SEQ ID NO: 31456 - DNA, 21 bp, Artificial Sequence
  primer
tgattacctcccaacgactgg

SEQ ID NO: 31457 - DNA, 38 bp, Artificial Sequence
  primer
gtaaaacgacggccagtatggtgctgagtcttgtctgg

SEQ ID NO: 31458 - DNA, 21 bp, Artificial Sequence
  primer
aatatgacagggagtcctggg

SEQ ID NO: 31459 - DNA, 37 bp, Artificial Sequence
  primer
gtaaaacgacggccagtctttgagccctctgggaatc

SEQ ID NO: 31460 - DNA, 38 bp, Artificial Sequence
  primer
gtaaaacgacggccagttcggtccctgaagagtgtaag

SEQ ID NO: 31461 - DNA, 21 bp, Artificial Sequence
  primer
tacctcataggctgattgggc

SEQ ID NO: 31462 - DNA, 21 bp, Artificial Sequence
  primer
cataaacgggaagtgctcctg

SEQ ID NO: 31463 - DNA, 21 bp, Artificial Sequence
  primer
gtaggaactgaaggcagtggg

SEQ ID NO: 31464 - DNA, 21 bp, Artificial Sequence
  primer
ctgcccgagaatctttacagc

SEQ ID NO: 31465 - DNA, 37 bp, Artificial Sequence
  primer
gtaaaacgacggccagtgctcctccctgtccttcatc

SEQ ID NO: 31466 - DNA, 38 bp, Artificial Sequence
  primer
gtaaaacgacggccagtcaacagaccacactcaggctc

SEQ ID NO: 31467 - DNA, 39 bp, Artificial Sequence
  primer
gtaaaacgacggccagtggacagatgtggctttgtaagg

SEQ ID NO: 31468 - DNA, 21 bp, Artificial Sequence
  primer
ctctgggtcatgggtcacttc

SEQ ID NO: 31469 - DNA, 38 bp, Artificial Sequence
  primer
gtaaaacgacggccagtggaaggacagcagagcctaag

SEQ ID NO: 31470 - DNA, 20 bp, Artificial Sequence
  primer
tgaccttgaccaagtgggac

SEQ ID NO: 31471 - DNA, 38 bp, Artificial Sequence
  primer
gtaaaacgacggccagtcttcttccctgactgcacacc

SEQ ID NO: 31472 - DNA, 36 bp, Artificial Sequence
  primer
gtaaaacgacggccagtgctctgggtcatgggtcac

SEQ ID NO: 31473 - DNA, 19 bp, Artificial Sequence
  primer
aaagggtcagggtgctgtg

SEQ ID NO: 31474 - DNA, 21 bp, Artificial Sequence
  primer
cacagaaggaggaaggtcagc

SEQ ID NO: 31475 - DNA, 21 bp, Artificial Sequence
  primer
ctttcccatcccactccatag

SEQ ID NO: 31476 - DNA, 38 bp, Artificial Sequence; identical to SEQ ID NO: 31466
  primer

SEQ ID NO: 31477 - DNA, 38 bp, Artificial Sequence
  primer
gtaaaacgacggccagtccacgaaactgatggagacag

SEQ ID NO: 31478 - DNA, 38 bp, Artificial Sequence
  primer
gtaaaacgacggccagtcctgattctctgggagctgag

SEQ ID NO: 31479 - DNA, 21 bp, Artificial Sequence
  primer
gcagagctggtcaatcctgag

SEQ ID NO: 31480 - DNA, 38 bp, Artificial Sequence
  primer
gtaaaacgacggccagtatgagaacaggtggtggtgag

SEQ ID NO: 31481 - DNA, 37 bp, Artificial Sequence
  primer
gtaaaacgacggccagtaagagactcagggcagaggg

SEQ ID NO: 31482 - DNA, 38 bp, Artificial Sequence
  primer
gtaaaacgacggccagtacacactcactcactccaggg

SEQ ID NO: 31483 - DNA, 22 bp, Artificial Sequence
  primer
ccaactctgattgaaagatgcc

SEQ ID NO: 31484 - DNA, 38 bp, Artificial Sequence
  primer
gtaaaacgacggccagtgtggtccttccatagaccagg

SEQ ID NO: 31485 - DNA, 21 bp, Artificial Sequence
  primer
tctgattgatagatgcccgtg

SEQ ID NO: 31486 - DNA, 38 bp, Artificial Sequence
  primer
gtaaaacgacggccagtcaggattgtgacttggctcag

SEQ ID NO: 31487 - DNA, 22 bp, Artificial Sequence
  primer
ccaactctgattgaaagatgcc

SEQ ID NO: 31488 - DNA, 21 bp, Artificial Sequence
  primer
tggcccttctacaatcaggag

SEQ ID NO: 31489 - DNA, 21 bp, Artificial Sequence
  primer
cttcatgctgagagctggaac

SEQ ID NO: 31490 - DNA, 21 bp, Artificial Sequence
  primer
tgggaaatgcttctatccctg

SEQ ID NO: 31491 - DNA, 21 bp, Artificial Sequence
  primer
tccaccctaatgcataggtcc

SEQ ID NO: 31492 - DNA, 22 bp, Artificial Sequence
  primer
ccaactctgattgaaagatgcc

SEQ ID NO: 31493 - DNA, 38 bp, Artificial Sequence
  primer
gtaaaacgacggccagtgacttcagggttgtgacatgg

SEQ ID NO: 31494 - DNA, 40 bp, Artificial Sequence
  primer
gtaaaacgacggccagtcatgttgacagctagttcttggg

SEQ ID NO: 31495 - DNA, 39 bp, Artificial Sequence
  primer
gtaaaacgacggccagttcagcacagaggtaggaaggac

SEQ ID NO: 31496 - DNA, 38 bp, Artificial Sequence
  primer
gtaaaacgacggccagtacatgctgctgtcattgatcc

SEQ ID NO: 31497 - DNA, 21 bp, Artificial Sequence
  primer
tttaaccttctggaacctgcc

SEQ ID NO: 31498 - DNA, 21 bp, Artificial Sequence
  primer
ctgattgaaagatgtccgtgg

SEQ ID NO: 31499 - DNA, 38 bp, Artificial Sequence
  primer
gtaaaacgacggccagtaatcatctcccagcaaccttc

SEQ ID NO: 31500 - DNA, 36 bp, Artificial Sequence
  primer
gtaaaacgacggccagtctgagaagtgctcctgccc

SEQ ID NO: 31501 - DNA, 21 bp, Artificial Sequence
  primer
ctgtgctgctgacattgactc

SEQ ID NO: 31502 - DNA, 38 bp, Artificial Sequence
  primer
gtaaaacgacggccagttcttgtgacacacacacccac

SEQ ID NO: 31503 - DNA, 21 bp, Artificial Sequence
  primer
gacttggctcagagggacact

SEQ ID NO: 31504 - DNA, 21 bp, Artificial Sequence
  primer
accgaagactgatcgtcaacc

SEQ ID NO: 31505 - DNA, 38 bp, Artificial Sequence
  primer
gtaaaacgacggccagtcatcccagggagtataggtgg

SEQ ID NO: 31506 - DNA, 21 bp, Artificial Sequence
  primer
atcaatcccagcattgtttcc

SEQ ID NO: 31507 - DNA, 21 bp, Artificial Sequence
  primer
tatagtcggtgagggactggg

SEQ ID NO: 31508 - DNA, 22 bp, Artificial Sequence
  primer
ttcatagggaaggatgttgctc

SEQ ID NO: 31509 - DNA, 21 bp, Artificial Sequence
  primer
agagaccatgtggctttcagg

SEQ ID NO: 31510 - DNA, 38 bp, Artificial Sequence
  primer
gtaaaacgacggccagtggctagaagaagcgtttgcac

SEQ ID NO: 31511 - DNA, 38 bp, Artificial Sequence
  primer
gtaaaacgacggccagttcctagcaccaaaggtcaaag

SEQ ID NO: 31512 - DNA, 21 bp, Artificial Sequence
  primer
ccaccttgctcttccattctc

SEQ ID NO: 31513 - DNA, 19 bp, Artificial Sequence
  primer
gaggatgaagccaagcagc

SEQ ID NO: 31514 - DNA, 20 bp, Artificial Sequence
  primer
ccaagaagtcggtggacaag

SEQ ID NO: 31515 - DNA, 38 bp, Artificial Sequence
  primer
gtaaaacgacggccagtggctcaggagaaactttagcg

SEQ ID NO: 31516 - DNA, 38 bp, Artificial Sequence
  primer
gtaaaacgacggccagtccaacttctactacgaggcgg

SEQ ID NO: 31517 - DNA, 37 bp, Artificial Sequence
  primer
gtaaaacgacggccagtacttcagcccgtacctggag

SEQ ID NO: 31518 - DNA, 20 bp, Artificial Sequence
  primer
ggcaagaactgcaagaagcc

SEQ ID NO: 31519 - DNA, 19 bp, Artificial Sequence
  primer
cgcttacctcggctaccag

SEQ ID NO: 31520 - DNA, 20 bp, Artificial Sequence
  primer
agcgacgagtacaagatccg

SEQ ID NO: 31521 - DNA, 19 bp, Artificial Sequence
  primer
gtgacagcctcgcttggac

SEQ ID NO: 31522 - DNA, 18 bp, Artificial Sequence
  primer
gagcctgcgcccttctac

SEQ ID NO: 31523 - DNA, 35 bp, Artificial Sequence
  primer
gtaaaacgacggccagtacagcaatcacaaggcgg

SEQ ID NO: 31524 - DNA, 20 bp, Artificial Sequence
  primer
cacagaccgtggtgagcttg

SEQ ID NO: 31525 - DNA, 37 bp, Artificial Sequence
  primer
gtaaaacgacggccagtggaggtagagagagggcagc

SEQ ID NO: 31526 - DNA, 21 bp, Artificial Sequence
  primer
atgtcccacgggacctactac

SEQ ID NO: 31527 - DNA, 21 bp, Artificial Sequence
  primer
tttgcctaccctccacatacc

SEQ ID NO: 31528 - DNA, 21 bp, Artificial Sequence
  primer
gtcctgtattcctttgacgca

SEQ ID NO: 31529 - DNA, 38 bp, Artificial Sequence
  primer
gtaaaacgacggccagtaaaccattgatcaccctgctc

SEQ ID NO: 31530 - DNA, 21 bp, Artificial Sequence
  primer
agaccatttccgggagaagac

SEQ ID NO: 31531 - DNA, 21 bp, Artificial Sequence
  primer
caatcgatgaccttcagcaag

SEQ ID NO: 31532 - DNA, 20 bp, Artificial Sequence
  primer
agaatggcagtaccacaccg

SEQ ID NO: 31533 - DNA, 38 bp, Artificial Sequence
  primer
gtaaaacgacggccagtatgatgccgttcacacacttc

SEQ ID NO: 31534 - DNA, 20 bp, Artificial Sequence
  primer
aaactcgagcccttaccgtg

SEQ ID NO: 31535 - DNA, 21 bp, Artificial Sequence
  primer
aaatggctctgtcccatgaag

SEQ ID NO: 31536 - DNA, 38 bp, Artificial Sequence
  primer
gtaaaacgacggccagtctcttagggcagggtctcttg

SEQ ID NO: 31537 - DNA, 42 bp, Artificial Sequence
  primer
gtaaaacgacggccagtcatcacataatggagcacagacttt

SEQ ID NO: 31538 - DNA, 39 bp, Artificial Sequence
  primer
gtaaaacgacggccagtcaagacaaattcttgagggagc

SEQ ID NO: 31539 - DNA, 38 bp, Artificial Sequence
  primer
gtaaaacgacggccagtaacttctgggctcaagcaatc

SEQ ID NO: 31540 - DNA, 22 bp, Artificial Sequence
  primer
gattaatggttagatggcctgc

SEQ ID NO: 31541 - DNA, 38 bp, Artificial Sequence
  primer
gtaaaacgacggccagtacccactgcaggatttcactc

SEQ ID NO: 31542 - DNA, 38 bp, Artificial Sequence
  primer
gtaaaacgacggccagtcttgcactccagagtcccttc

SEQ ID NO: 31543 - DNA, 21 bp, Artificial Sequence
  primer
ccactggtcataggtgctttg

SEQ ID NO: 31544 - DNA, 24 bp, Artificial Sequence
  primer
tggtgttcacttgtcataaacagc

SEQ ID NO: 31545 - DNA, 22 bp, Artificial Sequence
  primer
tctgcaaagctttctccttctg

SEQ ID NO: 31546 - DNA, 25 bp, Artificial Sequence
  primer
aaacccacatggaatagcagtatag

SEQ ID NO: 31547 - DNA, 20 bp, Artificial Sequence
  primer
ctacccaatggtgccagaag

SEQ ID NO: 31548 - DNA, 40 bp, Artificial Sequence
  primer
gtaaaacgacggccagttgtatctgctgaagaggtaaggc

SEQ ID NO: 31549 - DNA, 38 bp, Artificial Sequence
  primer
gtaaaacgacggccagtctgtgactcagcagcatgttc

SEQ ID NO: 31550 - DNA, 39 bp, Artificial Sequence
  primer
gtaaaacgacggccagtaaggaagatcagagttccaccc

SEQ ID NO: 31551 - DNA, 21 bp, Artificial Sequence
  primer
tcttgtgatccacactgtccc

SEQ ID NO: 31552 - DNA, 21 bp, Artificial Sequence
  primer
aggtgggtagcagtcctatgg

SEQ ID NO: 31553 - DNA, 20 bp, Artificial Sequence
  primer
atggctgggaaggagttgac

SEQ ID NO: 31554 - DNA, 39 bp, Artificial Sequence
  primer
gtaaaacgacggccagtttgggctacatatctctcaggg

SEQ ID NO: 31555 - DNA, 20 bp, Artificial Sequence
  primer
cagtggtggcagggtacaag

SEQ ID NO: 31556 - DNA, 38 bp, Artificial Sequence
  primer
gtaaaacgacggccagtgggctgtttatttgaggatgg

SEQ ID NO: 31557 - DNA, 39 bp, Artificial Sequence
  primer
gtaaaacgacggccagtgctcaaggtctcacctcacttg

SEQ ID NO: 31558 - DNA, 38 bp, Artificial Sequence
  primer
gtaaaacgacggccagttcatggctgtttagtccttgc

SEQ ID NO: 31559 - DNA, 21 bp, Artificial Sequence
  primer
gctcctaagttcgtcgctttc

SEQ ID NO: 31560 - DNA, 38 bp, Artificial Sequence
  primer
gtaaaacgacggccagtgacaacacggacttgctgatg

SEQ ID NO: 31561 - DNA, 38 bp, Artificial Sequence
  primer
gtaaaacgacggccagtgaggatggtgttgagcctctc

SEQ ID NO: 31562 - DNA, 21 bp, Artificial Sequence
  primer
ctaaaggacctgccacctgtc

SEQ ID NO: 31563 - DNA, 38 bp, Artificial Sequence
  primer
gtaaaacgacggccagtatcaggagtgggttgtgttcc

SEQ ID NO: 31564 - DNA, 21 bp, Artificial Sequence
  primer
gagaaagacagctgaccaccc

SEQ ID NO: 31565 - DNA, 36 bp, Artificial Sequence
  primer
gtaaaacgacggccagtctagctggcatcctgaggg

SEQ ID NO: 31566 - DNA, 38 bp, Artificial Sequence
  primer
gtaaaacgacggccagtgcttagacagtggcagtcgtg

SEQ ID NO: 31567 - DNA, 20 bp, Artificial Sequence
  primer
ctctgctccctttgctttgc

SEQ ID NO: 31568 - DNA, 17 bp, Artificial Sequence
  primer
ggtgcgagtccccactg

SEQ ID NO: 31569 - DNA, 18 bp, Artificial Sequence
  primer
ccttctcctcctcagcgg

SEQ ID NO: 31570 - DNA, 17 bp, Artificial Sequence
  primer
cctgcagcatgacagcc

SEQ ID NO: 31571 - DNA, 21 bp, Artificial Sequence
  primer
gacctgtactggtgctcctgg

SEQ ID NO: 31572 - DNA, 21 bp, Artificial Sequence
  primer
cctggcctggcttatctactc

SEQ ID NO: 31573 - DNA, 36 bp, Artificial Sequence
  primer
gtaaaacgacggccagtggctctacgagctcaacgc

SEQ ID NO: 31574 - DNA, 38 bp, Artificial Sequence
  primer
gtaaaacgacggccagtgagagctcgacctcaaaggtg

SEQ ID NO: 31575 - DNA, 21 bp, Artificial Sequence
  primer
ctatgctgctgtggtctggag

SEQ ID NO: 31576 - DNA, 21 bp, Artificial Sequence
  primer
agagccttggtccagaaacag

SEQ ID NO: 31577 - DNA, 38 bp, Artificial Sequence
  primer
gtaaaacgacggccagtgtggagagcagagagcctgag

SEQ ID NO: 31578 - DNA, 37 bp, Artificial Sequence
  primer
gtaaaacgacggccagtctgggcctaggacctttcag

SEQ ID NO: 31579 - DNA, 38 bp, Artificial Sequence
  primer
gtaaaacgacggccagtttgggccttagtctagcatcc

SEQ ID NO: 31580 - DNA, 38 bp, Artificial Sequence
  primer
gtaaaacgacggccagtgcaagatagggtttgacgagg

SEQ ID NO: 31581 - DNA, 38 bp, Artificial Sequence
  primer
gtaaaacgacggccagtcagaaaccttcttcaaacccg

SEQ ID NO: 31582 - DNA, 21 bp, Artificial Sequence
  primer
ggagatcctcaaatgccagag

SEQ ID NO: 31583 - DNA, 36 bp, Artificial Sequence
  primer
gtaaaacgacggccagttgagagcctggccctgtag

SEQ ID NO: 31584 - DNA, 36 bp, Artificial Sequence
  primer
gtaaaacgacggccagtagtgaggtgctttgggcag

SEQ ID NO: 31585 - DNA, 20 bp, Artificial Sequence
  primer
cctcacggactaggcagagg

SEQ ID NO: 31586 - DNA, 38 bp, Artificial Sequence
  primer
gtaaaacgacggccagtgccagggcttcagctaagaag

SEQ ID NO: 31587 - DNA, 20 bp, Artificial Sequence
  primer
gtgcctctatcctcggaagc

SEQ ID NO: 31588 - DNA, 38 bp, Artificial Sequence
  primer
gtaaaacgacggccagttgaacaagcatgtgaccttgg

SEQ ID NO: 31589 - DNA, 21 bp, Artificial Sequence
  primer
atcctaaagccctgagcattg

SEQ ID NO: 31590 - DNA, 38 bp, Artificial Sequence
  primer
gtaaaacgacggccagtgtggacatcttcaagggcatc

SEQ ID NO: 31591 - DNA, 38 bp, Artificial Sequence
  primer
gtaaaacgacggccagtgctgaacttccatgaaatccc

SEQ ID NO: 31592 - DNA, 38 bp, Artificial Sequence
  primer
gtaaaacgacggccagtctctgttgagggcatttccac

SEQ ID NO: 31593 - DNA, 38 bp, Artificial Sequence
  primer
gtaaaacgacggccagtagaggaagctcaaacgggaag

SEQ ID NO: 31594 - DNA, 38 bp, Artificial Sequence
  primer
gtaaaacgacggccagtatccttgccttcaaatggttc

SEQ ID NO: 31595 - DNA, 38 bp, Artificial Sequence
  primer
gtaaaacgacggccagtgaggacatagccaattccagc

SEQ ID NO: 31596 - DNA, 21 bp, Artificial Sequence
  primer
cttccctgggtgtaagaagcc

SEQ ID NO: 31597 - DNA, 19 bp, Artificial Sequence
  primer
acagtgaccgaccaggagg

SEQ ID NO: 31598 - DNA, 19 bp, Artificial Sequence
  primer
acgggtgactctgaggctg

SEQ ID NO: 31599 - DNA, 18 bp, Artificial Sequence
  primer
ctcgaagtggaagctgcg

SEQ ID NO: 31600 - DNA, 17 bp, Artificial Sequence
  primer
tgcaagtccgcttggtg

SEQ ID NO: 31601 - DNA, 19 bp, Artificial Sequence
  primer
gcagctccgaccaccttac

SEQ ID NO: 31602 - DNA, 36 bp, Artificial Sequence
  primer
gtaaaacgacggccagtgcagctccgaccaccttac

SEQ ID NO: 31603 - DNA, 21 bp, Artificial Sequence
  primer
aagtttccgatgcccaactac

SEQ ID NO: 31604 - DNA, 21 bp, Artificial Sequence
  primer
gccaccacctacatcactgtc

SEQ ID NO: 31605 - DNA, 21 bp, Artificial Sequence
  primer
ggacgagaacgacaactaccc

SEQ ID NO: 31606 - DNA, 37 bp, Artificial Sequence
  primer
gtaaaacgacggccagtgccagttctacctgcactcg

SEQ ID NO: 31607 - DNA, 38 bp, Artificial Sequence
  primer
gtaaaacgacggccagtagcctatctttgtgagcagcc

SEQ ID NO: 31608 - DNA, 38 bp, Artificial Sequence
  primer
gtaaaacgacggccagtacgagcttcgtctgaatgagg

SEQ ID NO: 31609 - DNA, 38 bp, Artificial Sequence
  primer
gtaaaacgacggccagtcacactgcgcatgtcctaatc

SEQ ID NO: 31610 - DNA, 38 bp, Artificial Sequence
  primer
gtaaaacgacggccagtagagatcctcatcctcgatgc

SEQ ID NO: 31611 - DNA, 21 bp, Artificial Sequence
  primer
tgtttgagaaggacgaactgg

SEQ ID NO: 31612 - DNA, 38 bp, Artificial Sequence
  primer
gtaaaacgacggccagtgagtatgtgctggtggtgcag

SEQ ID NO: 31613 - DNA, 20 bp, Artificial Sequence
  primer
gatgcccaggctctcttctc

SEQ ID NO: 31614 - DNA, 38 bp, Artificial Sequence
  primer
gtaaaacgacggccagtcagcatctgaatgaccctgac

SEQ ID NO: 31615 - DNA, 21 bp, Artificial Sequence
  primer
acgacgtcttcgtcttcaacg

SEQ ID NO: 31616 - DNA, 21 bp, Artificial Sequence
  primer
tgtcacagacctgtcctggag

SEQ ID NO: 31617 - DNA, 38 bp, Artificial Sequence
  primer
gtaaaacgacggccagtttctttcctgaatcgtagccc

SEQ ID NO: 31618 - DNA, 35 bp, Artificial Sequence
  primer
gtaaaacgacggccagtatgcctcacagcgcaatc

SEQ ID NO: 31619 - DNA, 38 bp, Artificial Sequence
  primer
gtaaaacgacggccagtccatgtcctcctcgctctatg

SEQ ID NO: 31620 - DNA, 20 bp, Artificial Sequence
  primer
gcctgtctgcttggtttctg

SEQ ID NO: 31621 - DNA, 38 bp, Artificial Sequence
  primer
gtaaaacgacggccagtcttagttcccatgttcctgcc

SEQ ID NO: 31622 - DNA, 39 bp, Artificial Sequence
  primer
gtaaaacgacggccagtcagacccaccttcgtgttaaag

SEQ ID NO: 31623 - DNA, 39 bp, Artificial Sequence
  primer
gtaaaacgacggccagttcagtctcctttcacagcttcc

SEQ ID NO: 31624 - DNA, 20 bp, Artificial Sequence
  primer
cagatgtcctcaggctctgc

SEQ ID NO: 31625 - DNA, 20 bp, Artificial Sequence
  primer
atcacagatgaatgcctcgc

SEQ ID NO: 31626 - DNA, 21 bp, Artificial Sequence
  primer
taagtctaacccgcctaacgc

SEQ ID NO: 31627 - DNA, 38 bp, Artificial Sequence
  primer
gtaaaacgacggccagtgggagactgaggccatgtaac

SEQ ID NO: 31628 - DNA, 37 bp, Artificial Sequence
  primer
gtaaaacgacggccagtggaaacacgctgcaaggtag

SEQ ID NO: 31629 - DNA, 38 bp, Artificial Sequence
  primer
gtaaaacgacggccagtgatgctagggttcggttcttg

SEQ ID NO: 31630 - DNA, 38 bp, Artificial Sequence
  primer
gtaaaacgacggccagttctaaccaccacgcagtgttc

SEQ ID NO: 31631 - DNA, 21 bp, Artificial Sequence
  primer
ttgctgagtaacagcagggac

SEQ ID NO: 31632 - DNA, 38 bp, Artificial Sequence
  primer
gtaaaacgacggccagttaggcaagcaaaggctttcag

SEQ ID NO: 31633 - DNA, 21 bp, Artificial Sequence
  primer
aaataaatatggccagccagc

SEQ ID NO: 31634 - DNA, 21 bp, Artificial Sequence
  primer
tctgtgggacatctgttggtt

SEQ ID NO: 31635 - DNA, 37 bp, Artificial Sequence
  primer
gtaaaacgacggccagtgtgtcctcagggcatttgtg

SEQ ID NO: 31636 - DNA, 38 bp, Artificial Sequence
  primer
gtaaaacgacggccagtcaaaggctgccctttacagac

SEQ ID NO: 31637 - DNA, 22 bp, Artificial Sequence
  primer
ccagccttgatcgtttcataag

SEQ ID NO: 31638 - DNA, 38 bp, Artificial Sequence
  primer
gtaaaacgacggccagtacagacacatagggtggtccg

SEQ ID NO: 31639 - DNA, 38 bp, Artificial Sequence
  primer
gtaaaacgacggccagtgactccttgctccttcctctg

SEQ ID NO: 31640 - DNA, 35 bp, Artificial Sequence
  primer
gtaaaacgacggccagtagggttcgggtcctcctc

SEQ ID NO: 31641 - DNA, 37 bp, Artificial Sequence
  primer
gtaaaacgacggccagtacaggtggacgtgcagagag

SEQ ID NO: 31642 - DNA, 37 bp, Artificial Sequence
  primer
gtaaaacgacggccagtctgtatgcgcatctgtgctg

SEQ ID NO: 31643 - DNA, 20 bp, Artificial Sequence
  primer
aggctctcgtttgcagtgag

SEQ ID NO: 31644 - DNA, 19 bp, Artificial Sequence
  primer
caacctttccacccaccac

SEQ ID NO: 31645 - DNA, 38 bp, Artificial Sequence
  primer
gtaaaacgacggccagtcctgaagaagcactagcagcc

SEQ ID NO: 31646 - DNA, 35 bp, Artificial Sequence
  primer
gtaaaacgacggccagtggttcagccctaccaggc

SEQ ID NO: 31647 - DNA, 37 bp, Artificial Sequence
  primer
gtaaaacgacggccagtgaaccaggaggaaggacagg

SEQ ID NO: 31648 - DNA, 38 bp, Artificial Sequence
  primer
gtaaaacgacggccagttaccctcactgacccttcacc

SEQ ID NO: 31649 - DNA, 21 bp, Artificial Sequence
  primer
actattgggagaccaagtggg

SEQ ID NO: 31650 - DNA, 20 bp, Artificial Sequence
  primer
tttggtgtccagaatccgag

SEQ ID NO: 31651 - DNA, 19 bp, Artificial Sequence
  primer
ccgtgcttaaaggctccac

SEQ ID NO: 31652 - DNA, 37 bp, Artificial Sequence
  primer
gtaaaacgacggccagtaccagaagagtccctgggtg

SEQ ID NO: 31653 - DNA, 38 bp, Artificial Sequence
  primer
gtaaaacgacggccagtctctttgatagccgctccaac

SEQ ID NO: 31654 - DNA, 21 bp, Artificial Sequence
  primer
agtctttgagatcgaccctcg

SEQ ID NO: 31655 - DNA, 21 bp, Artificial Sequence
  primer
tggtgagccctcttgactatg

SEQ ID NO: 31656 - DNA, 38 bp, Artificial Sequence
  primer
gtaaaacgacggccagtgctacctggttctccatgtcc

SEQ ID NO: 31657 - DNA, 38 bp, Artificial Sequence
  primer
gtaaaacgacggccagtgatcaccagtggcaatactcg

SEQ ID NO: 31658 - DNA, 38 bp, Artificial Sequence
  primer
gtaaaacgacggccagtacacccatcgtcctgtctttc

SEQ ID NO: 31659 - DNA, 38 bp, Artificial Sequence
  primer
gtaaaacgacggccagtagaagtccgacaccacctacc

SEQ ID NO: 31660 - DNA, 21 bp, Artificial Sequence
  primer
ctcagccactgatcgtgattc

SEQ ID NO: 31661 - DNA, 21 bp, Artificial Sequence
  primer
atgtaccagattgtggagggc

SEQ ID NO: 31662 - DNA, 38 bp, Artificial Sequence
  primer
gtaaaacgacggccagttttgggaaaggatgcaaagag

SEQ ID NO: 31663 - DNA, 38 bp, Artificial Sequence
  primer
gtaaaacgacggccagtcttcctgtcaccactgctagg

SEQ ID NO: 31664 - DNA, 38 bp, Artificial Sequence
  primer
gtaaaacgacggccagttggtggtcttcaacgtacagc

SEQ ID NO: 31665 - DNA, 21 bp, Artificial Sequence
  primer
ggagtattacgagggtcacgg

SEQ ID NO: 31666 - DNA, 36 bp, Artificial Sequence
  primer
gtaaaacgacggccagtctgccagcagatctccctc

SEQ ID NO: 31667 - DNA, 37 bp, Artificial Sequence
  primer
gtaaaacgacggccagttccttgcccatcttccaaag

SEQ ID NO: 31668 - DNA, 21 bp, Artificial Sequence
  primer
gtacgtgtgtctgggcatgtg

SEQ ID NO: 31669 - DNA, 37 bp, Artificial Sequence
  primer
gtaaaacgacggccagtctcttggacacctgcctacg

SEQ ID NO: 31670 - DNA, 20 bp, Artificial Sequence
  primer
aggcctctctaactgctgcc

SEQ ID NO: 31671 - DNA, 36 bp, Artificial Sequence
  primer
gtaaaacgacggccagtagggcaggtacgcactttg

SEQ ID NO: 31672 - DNA, 21 bp, Artificial Sequence
  primer
tgggtttgatggtccagaaag

SEQ ID NO: 31673 - DNA, 36 bp, Artificial Sequence
  primer
gtaaaacgacggccagtaggtgagtgtcctgccctg

SEQ ID NO: 31674 - DNA, 38 bp, Artificial Sequence
  primer
gtaaaacgacggccagttgaagggtttgatggaagatg

SEQ ID NO: 31675 - DNA, 21 bp, Artificial Sequence
  primer
agtggctgctgcttctctctg

SEQ ID NO: 31676 - DNA, 19 bp, Artificial Sequence
  primer
gccacagctgagaaggacc

SEQ ID NO: 31677 - DNA, 35 bp, Artificial Sequence
  primer
gtaaaacgacggccagtcaggaaagccaggaaggg

SEQ ID NO: 31678 - DNA, 21 bp, Artificial Sequence
  primer
gggcccttgtttgctagttac

SEQ ID NO: 31679 - DNA, 38 bp, Artificial Sequence
  primer
gtaaaacgacggccagtgaattccagcctgtgtgttcc

SEQ ID NO: 31680 - DNA, 38 bp, Artificial Sequence
  primer
gtaaaacgacggccagtcaacagtgagcacagagggag

SEQ ID NO: 31681 - DNA, 37 bp, Artificial Sequence
  primer
gtaaaacgacggccagtagaacatgcggcacacctac

SEQ ID NO: 31682 - DNA, 20 bp, Artificial Sequence
  primer
cttcagaggtcagtggtggc

SEQ ID NO: 31683 - DNA, 20 bp, Artificial Sequence
  primer
gtgagtgctgaggcatggag

SEQ ID NO: 31684 - DNA, 21 bp, Artificial Sequence
  primer
aaccattcaatcctgtgagcc

SEQ ID NO: 31685 - DNA, 38 bp, Artificial Sequence
  primer
gtaaaacgacggccagtctgtgctcatggacgtttctc

SEQ ID NO: 31686 - DNA, 36 bp, Artificial Sequence
  primer
gtaaaacgacggccagtcctggaagcagttcccaac

SEQ ID NO: 31687 - DNA, 38 bp, Artificial Sequence
  primer
gtaaaacgacggccagttttaacccagactctgcagcc

SEQ ID NO: 31688 - DNA, 37 bp, Artificial Sequence
  primer
gtaaaacgacggccagtgagtgctagcaggtgggttg

SEQ ID NO: 31689 - DNA, 39 bp, Artificial Sequence
  primer
gtaaaacgacggccagtcctgtgtgagtatagggttggg

SEQ ID NO: 31690 - DNA, 39 bp, Artificial Sequence
  primer
gtaaaacgacggccagtgacaccctcctcttccactacc

SEQ ID NO: 31691 - DNA, 20 bp, Artificial Sequence
  primer
gagcatgtggaaggtggaac

SEQ ID NO: 31692 - DNA, 37 bp, Artificial Sequence
  primer
gtaaaacgacggccagtgggccagcttggattagaag

SEQ ID NO: 31693 - DNA, 38 bp, Artificial Sequence
  primer
gtaaaacgacggccagtttcctggaaggtcaagaccag

SEQ ID NO: 31694 - DNA, 19 bp, Artificial Sequence
  primer
tcttgggaagcaggactgg

SEQ ID NO: 31695 - DNA, 35 bp, Artificial Sequence
  primer
gtaaaacgacggccagtctgcccagcctcacaaag

SEQ ID NO: 31696 - DNA, 21 bp, Artificial Sequence
  primer
tttcctgtttccttcgtctgg

SEQ ID NO: 31697 - DNA, 22 bp, Artificial Sequence
  primer
tccttctcctctctttgttccc

SEQ ID NO: 31698 - DNA, 38 bp, Artificial Sequence
  primer
gtaaaacgacggccagtgtcagggagcctatcttcgtg

SEQ ID NO: 31699 - DNA, 38 bp, Artificial Sequence
  primer
gtaaaacgacggccagtgtgttatactggcgcccagag

SEQ ID NO: 31700 - DNA, 19 bp, Artificial Sequence
  primer
ggaattatgggcaacaggg

SEQ ID NO: 31701 - DNA, 19 bp, Artificial Sequence
  primer
cgaggacagctcctgcatc

SEQ ID NO: 31702 - DNA, 38 bp, Artificial Sequence
  primer
gtaaaacgacggccagtgaagccaggaaagtaacctcg

SEQ ID NO: 31703 - DNA, 21 bp, Artificial Sequence
  primer
agagcatggagcgtcactacc

SEQ ID NO: 31704 - DNA, 21 bp, Artificial Sequence
  primer
aaagctatgagctggtggtgg

SEQ ID NO: 31705 - DNA, 38 bp, Artificial Sequence
  primer
gtaaaacgacggccagtagagagtatgccttgcgcatc

SEQ ID NO: 31706 - DNA, 21 bp, Artificial Sequence
  primer
ctcagtcatccacattcaggc

SEQ ID NO: 31707 - DNA, 38 bp, Artificial Sequence
  primer
gtaaaacgacggccagtgctggacgttaatgacaatcg

SEQ ID NO: 31708 - DNA, 38 bp, Artificial Sequence
  primer
gtaaaacgacggccagtctgccactggactacaagcag

SEQ ID NO: 31709 - DNA, 21 bp, Artificial Sequence
  primer
tgcagactcaggagccattac

SEQ ID NO: 31710 - DNA, 38 bp, Artificial Sequence
  primer
gtaaaacgacggccagtctgcagatctcagccactgac

SEQ ID NO: 31711 - DNA, 21 bp, Artificial Sequence
  primer
aatgtaccagatcgtggaggg

SEQ ID NO: 31712 - DNA, 21 bp, Artificial Sequence
  primer
agactcccttgtgtcctggtg

SEQ ID NO: 31713 - DNA, 21 bp, Artificial Sequence
  primer
acatccagaacgacacagacg

SEQ ID NO: 31714 - DNA, 18 bp, Artificial Sequence
  primer
aagagggcgacctttcgg

SEQ ID NO: 31715 - DNA, 36 bp, Artificial Sequence
  primer
gtaaaacgacggccagtctcgtcgcttcctctctcg

SEQ ID NO: 31716 - DNA, 38 bp, Artificial Sequence
  primer
gtaaaacgacggccagtttgtgcttatatgacgggtgg

SEQ ID NO: 31717 - DNA, 38 bp, Artificial Sequence
  primer
gtaaaacgacggccagtgagttgggatgctgacttctg

SEQ ID NO: 31718 - DNA, 21 bp, Artificial Sequence
  primer
cctcaatcaccctaccctctg

SEQ ID NO: 31719 - DNA, 21 bp, Artificial Sequence
  primer
gatcttggtctctttcagccc

SEQ ID NO: 31720 - DNA, 38 bp, Artificial Sequence
  primer
gtaaaacgacggccagtcttagtaagtgggcagcatgg

SEQ ID NO: 31721 - DNA, 38 bp, Artificial Sequence
  primer
gtaaaacgacggccagttgccaggtataaccttgaccc

SEQ ID NO: 31722 - DNA, 39 bp, Artificial Sequence
  primer
gtaaaacgacggccagtccaagactgactctgggctatg

SEQ ID NO: 31723 - DNA, 19 bp, Artificial Sequence
  primer
aggatcatcagaccgggtg

SEQ ID NO: 31724 - DNA, 21 bp, Artificial Sequence
  primer
aggtgagccttgagagggttg

SEQ ID NO: 31725 - DNA, 39 bp, Artificial Sequence
  primer
gtaaaacgacggccagtcaccactgtgagcacaggtaag

SEQ ID NO: 31726 - DNA, 37 bp, Artificial Sequence
  primer
gtaaaacgacggccagtcatgacccaggtgtcctctg

SEQ ID NO: 31727 - DNA, 20 bp, Artificial Sequence
  primer
tacacccagggaaccctacc

SEQ ID NO: 31728 - DNA, 22 bp, Artificial Sequence
  primer
tgctcatgactctgacttctgc

SEQ ID NO: 31729 - DNA, 38 bp, Artificial Sequence
  primer
gtaaaacgacggccagttaatctggcaaggctttctcc

SEQ ID NO: 31730 - DNA, 38 bp, Artificial Sequence
  primer
gtaaaacgacggccagttctccctctgtccttgtcctc

SEQ ID NO: 31731 - DNA, 37 bp, Artificial Sequence
  primer
gtaaaacgacggccagtgggatgcgagtaagagggag

SEQ ID NO: 31732 - DNA, 21 bp, Artificial Sequence
  primer
ctcccaggccttgactgttac

SEQ ID NO: 31733 - DNA, 37 bp, Artificial Sequence
  primer
gtaaaacgacggccagtagcagaagctggagggattc

SEQ ID NO: 31734 - DNA, 21 bp, Artificial Sequence
  primer
ggccaactaatagtcccagcc

SEQ ID NO: 31735 - DNA, 20 bp, Artificial Sequence
  primer
gtcctcatggatgcctctcc

SEQ ID NO: 31736 - DNA, 19 bp, Artificial Sequence
  primer
ggtgagaggtgggaagcag

SEQ ID NO: 31737 - DNA, 19 bp, Artificial Sequence
  primer
cccaacctccaaccatcac

SEQ ID NO: 31738 - DNA, 21 bp, Artificial Sequence
  primer
ttctgcctctctccgtgaatc

SEQ ID NO: 31739 - DNA, 38 bp, Artificial Sequence
  primer
gtaaaacgacggccagtctcctgtttctttgtgggacc

SEQ ID NO: 31740 - DNA, 38 bp, Artificial Sequence
  primer
gtaaaacgacggccagttcctcactgacccacactagc

SEQ ID NO: 31741 - DNA, 18 bp, Artificial Sequence
  primer
cacctgggctggtgagtc

SEQ ID NO: 31742 - DNA, 21 bp, Artificial Sequence
  primer
tgcactcaaagacactccagc

SEQ ID NO: 31743 - DNA, 21 bp, Artificial Sequence
  primer
cgtacccacctctagaccctc

SEQ ID NO: 31744 - DNA, 38 bp, Artificial Sequence
  primer
gtaaaacgacggccagttcaagggtcattagggtcagg

SEQ ID NO: 31745 - DNA, 38 bp, Artificial Sequence
  primer
gtaaaacgacggccagtccacaactggaagatgactgc

SEQ ID NO: 31746 - DNA, 21 bp, Artificial Sequence
  primer
ctcacagcatcctgaagaacc

SEQ ID NO: 31747 - DNA, 18 bp, Artificial Sequence
  primer
agccacctcgggactacc

SEQ ID NO: 31748 - DNA, 21 bp, Artificial Sequence
  primer
ccgctggactctctgtctagg

SEQ ID NO: 31749 - DNA, 37 bp, Artificial Sequence
  primer
gtaaaacgacggccagtgctaagaggcgagagcagtg

SEQ ID NO: 31750 - DNA, 36 bp, Artificial Sequence
  primer
gtaaaacgacggccagtagaagccagcctttcgctc

SEQ ID NO: 31751 - DNA, 39 bp, Artificial Sequence
  primer
gtaaaacgacggccagttctgtggagggtaggcacatag

SEQ ID NO: 31752 - DNA, 21 bp, Artificial Sequence
  primer
tcatggagagcatcattgtcc

SEQ ID NO: 31753 - DNA, 21 bp, Artificial Sequence
  primer
gtgatagcagaattccctggc

SEQ ID NO: 31754 - DNA, 17 bp, Artificial Sequence
  primer
gagccgctttgtctcgg

SEQ ID NO: 31755 - DNA, 21 bp, Artificial Sequence
  primer
aagaccaacaagctgtctccc

SEQ ID NO: 31756 - DNA, 17 bp, Artificial Sequence
  primer
gtggtgtcctgcagcgg

SEQ ID NO: 31757 - DNA, 38 bp, Artificial Sequence
  primer
gtaaaacgacggccagtctatggtacgacttcctgccc

SEQ ID NO: 31758 - DNA, 20 bp, Artificial Sequence
  primer
gagtggtccagcaggtgaag

SEQ ID NO: 31759 - DNA, 19 bp, Artificial Sequence
  primer
ccctaatgccaccatcacc

SEQ ID NO: 31760 - DNA, 21 bp, Artificial Sequence
  primer
agtgccctactctgcatttcc

SEQ ID NO: 31761 - DNA, 38 bp, Artificial Sequence
  primer
gtaaaacgacggccagtcttaaggttattgcttggccg

SEQ ID NO: 31762 - DNA, 38 bp, Artificial Sequence
  primer
gtaaaacgacggccagtgcccttaggagatgtttggtg

SEQ ID NO: 31763 - DNA, 40 bp, Artificial Sequence
  primer
gtaaaacgacggccagtggaaggaaagagttcacttgagg

SEQ ID NO: 31764 - DNA, 40 bp, Artificial Sequence
  primer
gtaaaacgacggccagttgagtcaacagatggttcttcac

SEQ ID NO: 31765 - DNA, 25 bp, Artificial Sequence
  primer
tttcagctttactgaataatgccag

SEQ ID NO: 31766 - DNA, 43 bp, Artificial Sequence
  primer
gtaaaacgacggccagttctctgtaaaggagttcaggaagact

SEQ ID NO: 31767 - DNA, 41 bp, Artificial Sequence
  primer
gtaaaacgacggccagttgaaaggagggaaagatttgtaag

SEQ ID NO: 31768 - DNA, 20 bp, Artificial Sequence
  primer
gcaactgctccacctcattc

SEQ ID NO: 31769 - DNA, 39 bp, Artificial Sequence
  primer
gtaaaacgacggccagtataccaagaaaggcagggtctc

SEQ ID NO: 31770 - DNA, 24 bp, Artificial Sequence
  primer
ttcagcagcacatataattgacag

SEQ ID NO: 31771 - DNA, 27 bp, Artificial Sequence
  primer
gcaaatataaatgctgttggtatttca

SEQ ID NO: 31772 - DNA, 38 bp, Artificial Sequence
  primer
gtaaaacgacggccagtccacctgtgtatcgtttctgg

SEQ ID NO: 31773 - DNA, 24 bp, Artificial Sequence
  primer
tgtgaaagtcacatgcaaatactg

SEQ ID NO: 31774 - DNA, 38 bp, Artificial Sequence
  primer
gtaaaacgacggccagtaggtggattggacaaacttgc

SEQ ID NO: 31775 - DNA, 40 bp, Artificial Sequence
  primer
gtaaaacgacggccagtaaatatttgccaatttggtagcc

SEQ ID NO: 31776 - DNA, 21 bp, Artificial Sequence
  primer
tcagcctctgatttagggtgg

SEQ ID NO: 31777 - DNA, 40 bp, Artificial Sequence
  primer
gtaaaacgacggccagtagagacttctttgcgtttgacag

SEQ ID NO: 31778 - DNA, 38 bp, Artificial Sequence
  primer
gtaaaacgacggccagtgacctctggcattctagctcc

SEQ ID NO: 31779 - DNA, 39 bp, Artificial Sequence
  primer
gtaaaacgacggccagtttctggagattaaagccagcac

SEQ ID NO: 31780 - DNA, 38 bp, Artificial Sequence
  primer
gtaaaacgacggccagtggatcacgtgtcatggttagc

SEQ ID NO: 31781 - DNA, 38 bp, Artificial Sequence
  primer
gtaaaacgacggccagttcctgtttagcagtggtcacg

SEQ ID NO: 31782 - DNA, 41 bp, Artificial Sequence
  primer
gtaaaacgacggccagtttgaatcctcaaagatggactttc

SEQ ID NO: 31783 - DNA, 25 bp, Artificial Sequence
  primer
tgtgcaaacactataccttattgcc

SEQ ID NO: 31784 - DNA, 20 bp, Artificial Sequence
  primer
ttagtcttgggcgtctgtgc

SEQ ID NO: 31785 - DNA, 23 bp, Artificial Sequence
  primer
tttgtcaacagtagaaccaaggg

SEQ ID NO: 31786 - DNA, 41 bp, Artificial Sequence
  primer
gtaaaacgacggccagtttggtatgtgaaataaattgtggg

SEQ ID NO: 31787 - DNA, 21 bp, Artificial Sequence
  primer
ttcaatcaagcacgtttggac

SEQ ID NO: 31788 - DNA, 21 bp, Artificial Sequence
  primer
ttcaatcaagcacgtttggac

SEQ ID NO: 31789 - DNA, 38 bp, Artificial Sequence
  primer
gtaaaacgacggccagtacagtagcatgggagacatgg

SEQ ID NO: 31790 - DNA, 22 bp, Artificial Sequence
  primer
gatgggctcatgtctaaaccag

SEQ ID NO: 31791 - DNA, 39 bp, Artificial Sequence
  primer
gtaaaacgacggccagtttgcaacatttcgatgacactc

SEQ ID NO: 31792 - DNA, 21 bp, Artificial Sequence
  primer
ttctcccgaagactatcaccc

SEQ ID NO: 31793 - DNA, 44 bp, Artificial Sequence
  primer
gtaaaacgacggccagttgagaaattattgattatggtaactgc

SEQ ID NO: 31794 - DNA, 22 bp, Artificial Sequence
  primer
tggataaatgatgaggaggaca

SEQ ID NO: 31795 - DNA, 25 bp, Artificial Sequence
  primer
ttccaaccagtgatcatcttaattc

SEQ ID NO: 31796 - DNA, 38 bp, Artificial Sequence
  primer
gtaaaacgacggccagtggcacaggcaaacatacactt

SEQ ID NO: 31797 - DNA, 23 bp, Artificial Sequence
  primer
cagtcctttctaactgttgggtg

SEQ ID NO: 31798 - DNA, 27 bp, Artificial Sequence
  primer
catgatgtcagaaataagggaattatg

SEQ ID NO: 31799 - DNA, 42 bp, Artificial Sequence
  primer
gtaaaacgacggccagttttggtaactagcatatttgtacgc

SEQ ID NO: 31800 - DNA, 21 bp, Artificial Sequence
  primer
gaaactgtagcccttgatgcc

SEQ ID NO: 31801 - DNA, 38 bp, Artificial Sequence
  primer
gtaaaacgacggccagttgggtttcaaatcataaggga

SEQ ID NO: 31802 - DNA, 37 bp, Artificial Sequence
  primer
gtaaaacgacggccagtttgcctttccacagtcaaat

SEQ ID NO: 31803 - DNA, 22 bp, Artificial Sequence
  primer
aaatgctccttagtcttctggg

SEQ ID NO: 31804 - DNA, 37 bp, Artificial Sequence
  primer
gtaaaacgacggccagtgcaaattgagagggaccaac

SEQ ID NO: 31805 - DNA, 22 bp, Artificial Sequence
  primer
ggcacataatagatgtgttggc

SEQ ID NO: 31806 - DNA, 39 bp, Artificial Sequence
  primer
gtaaaacgacggccagttttccctgatttcttcatttgc

SEQ ID NO: 31807 - DNA, 38 bp, Artificial Sequence
  primer
gtaaaacgacggccagttatgctgataggaggcaaggc

SEQ ID NO: 31808 - DNA, 24 bp, Artificial Sequence
  primer
catttgaaacagagagagaccacc

SEQ ID NO: 31809 - DNA, 19 bp, Artificial Sequence
  primer
aactgagattgcgccactg

SEQ ID NO: 31810 - DNA, 38 bp, Artificial Sequence
  primer
gtaaaacgacggccagtggcactgaatcctgccttaat

SEQ ID NO: 31811 - DNA, 22 bp, Artificial Sequence
  primer
tgaaagtgaccagctcaaagaa

SEQ ID NO: 31812 - DNA, 45 bp, Artificial Sequence
  primer
gtaaaacgacggccagtctgaattatgaagactactatttggcat

SEQ ID NO: 31813 - DNA, 46 bp, Artificial Sequence
  primer
gtaaaacgacggccagttgacatctaattattgttactcatatccc

SEQ ID NO: 31814 - DNA, 40 bp, Artificial Sequence
  primer
gtaaaacgacggccagtttacctcctgccctatacctttc

SEQ ID NO: 31815 - DNA, 21 bp, Artificial Sequence
  primer
tgtgaagagaggaggacaggg

SEQ ID NO: 31816 - DNA, 41 bp, Artificial Sequence
  primer
gtaaaacgacggccagtaattgtgcaggatatcagtgagag

SEQ ID NO: 31817 - DNA, 38 bp, Artificial Sequence
  primer
gtaaaacgacggccagtaggagaaggctatgggtgagg

SEQ ID NO: 31818 - DNA, 38 bp, Artificial Sequence
  primer
gtaaaacgacggccagtttggaagtaactgtgcccaaa

SEQ ID NO: 31819 - DNA, 39 bp, Artificial Sequence
  primer
gtaaaacgacggccagtccaatgagttaaggtcactccc

SEQ ID NO: 31820 - DNA, 43 bp, Artificial Sequence
  primer
gtaaaacgacggccagtgacacaaaggtctttatttctctcct

SEQ ID NO: 31821 - DNA, 25 bp, Artificial Sequence
  primer
atcctacctcatagtctcaaggatg

SEQ ID NO: 31822 - DNA, 23 bp, Artificial Sequence
  primer
gcaagagtccactaggtattgcc

SEQ ID NO: 31823 - DNA, 38 bp, Artificial Sequence
  primer
gtaaaacgacggccagtgggtaactgaaaccatggaaa

SEQ ID NO: 31824 - DNA, 22 bp, Artificial Sequence
  primer
ttggcctctcttctatccattg

SEQ ID NO: 31825 - DNA, 25 bp, Artificial Sequence
  primer
gctaaccattctttacaactggaga

SEQ ID NO: 31826 - DNA, 40 bp, Artificial Sequence
  primer
gtaaaacgacggccagtaggcattatgtcaatgtgatgtg

SEQ ID NO: 31827 - DNA, 40 bp, Artificial Sequence
  primer
gtaaaacgacggccagtttccagggaaataagacttgagc

SEQ ID NO: 31828 - DNA, 21 bp, Artificial Sequence
  primer
aaacaggaagcatgaggttga

SEQ ID NO: 31829 - DNA, 21 bp, Artificial Sequence
  primer
catcttcatgaccaaacacgg

SEQ ID NO: 31830 - DNA, 41 bp, Artificial Sequence
  primer
gtaaaacgacggccagtgtggtaagaccaacagtctggtta

SEQ ID NO: 31831 - DNA, 40 bp, Artificial Sequence
  primer
gtaaaacgacggccagtgcttattgcagctgtatctcagg

SEQ ID NO: 31832 - DNA, 39 bp, Artificial Sequence
  primer
gtaaaacgacggccagttctctgggaatgtaaggcattg

SEQ ID NO: 31833 - DNA, 44 bp, Artificial Sequence
  primer
gtaaaacgacggccagttcaatagtttgatctatttccctaacc

SEQ ID NO: 31834 - DNA, 26 bp, Artificial Sequence
  primer
cttcttgggattatggctttatattc

SEQ ID NO: 31835 - DNA, 44 bp, Artificial Sequence
  primer
gtaaaacgacggccagtaaatatttgtttcgtcaaagatttcag

SEQ ID NO: 31836 - DNA, 22 bp, Artificial Sequence
  primer
gggctaatgctttacatccttg

SEQ ID NO: 31837 - DNA, 38 bp, Artificial Sequence
  primer
gtaaaacgacggccagtctctgtgcagtcgcctgttag

SEQ ID NO: 31838 - DNA, 37 bp, Artificial Sequence
  primer
gtaaaacgacggccagtatatgcagccgctgagtgac

SEQ ID NO: 31839 - DNA, 40 bp, Artificial Sequence
  primer
gtaaaacgacggccagtgctagggacctttattaaggcag

SEQ ID NO: 31840 - DNA, 38 bp, Artificial Sequence
  primer
gtaaaacgacggccagttttccagggcttgagtagttg

SEQ ID NO: 31841 - DNA, 21 bp, Artificial Sequence
  primer
agagtccaaagccttgctgag

SEQ ID NO: 31842 - DNA, 40 bp, Artificial Sequence
  primer
gtaaaacgacggccagtagtggaggtagagacccagaaac

SEQ ID NO: 31843 - DNA, 21 bp, Artificial Sequence
  primer
aagacttgcatgccgaatatg

SEQ ID NO: 31844 - DNA, 38 bp, Artificial Sequence
  primer
gtaaaacgacggccagtagcagtgtgaagagttggtgc

SEQ ID NO: 31845 - DNA, 21 bp, Artificial Sequence
  primer
tgacccaagagaatgggactc

SEQ ID NO: 31846 - DNA, 20 bp, Artificial Sequence
  primer
tgtgaagaaaccggaaatgc

SEQ ID NO: 31847 - DNA, 21 bp, Artificial Sequence
  primer
caattctaagagcgaggctgg

SEQ ID NO: 31848 - DNA, 38 bp, Artificial Sequence
  primer
gtaaaacgacggccagtgttataatgcgcagttggtgc

SEQ ID NO: 31849 - DNA, 38 bp, Artificial Sequence
  primer
gtaaaacgacggccagtaacgacaatgcacaccttcag

SEQ ID NO: 31850 - DNA, 37 bp, Artificial Sequence
  primer
gtaaaacgacggccagtaccaaatgaacagcaccctg

SEQ ID NO: 31851 - DNA, 38 bp, Artificial Sequence
  primer
gtaaaacgacggccagttccctgtcatcctcttgtgtg

SEQ ID NO: 31852 - DNA, 36 bp, Artificial Sequence
  primer
gtaaaacgacggccagtgtgtttagcagaggccacg

SEQ ID NO: 31853 - DNA, 21 bp, Artificial Sequence
  primer
aaagatgctcagcaggacctc

SEQ ID NO: 31854 - DNA, 38 bp, Artificial Sequence
  primer
gtaaaacgacggccagttccataatcttcaactgcggg

SEQ ID NO: 31855 - DNA, 42 bp, Artificial Sequence
  primer
gtaaaacgacggccagtccagagagtagaaacttctgaaggc

SEQ ID NO: 31856 - DNA, 38 bp, Artificial Sequence
  primer
gtaaaacgacggccagtgagcatgaagccctctacctg

SEQ ID NO: 31857 - DNA, 38 bp, Artificial Sequence
  primer
gtaaaacgacggccagttgtctccattgcattcaggtg

SEQ ID NO: 31858 - DNA, 21 bp, Artificial Sequence
  primer
aaagctgaatgtctccaaggc

SEQ ID NO: 31859 - DNA, 21 bp, Artificial Sequence
  primer
tagaagagatggccagaagcc

SEQ ID NO: 31860 - DNA, 21 bp, Artificial Sequence
  primer
actgcagtggagatgcttcag

SEQ ID NO: 31861 - DNA, 41 bp, Artificial Sequence
  primer
gtaaaacgacggccagtagaagcagctctgtgtcttacaac

SEQ ID NO: 31862 - DNA, 38 bp, Artificial Sequence
  primer
gtaaaacgacggccagtagggatgacccaaagtctgag

SEQ ID NO: 31863 - DNA, 21 bp, Artificial Sequence
  primer
aaggctcagttgctacaaggc

SEQ ID NO: 31864 - DNA, 38 bp, Artificial Sequence
  primer
gtaaaacgacggccagtagtaaaggcgggattagccag

SEQ ID NO: 31865 - DNA, 44 bp, Artificial Sequence
  primer
gtaaaacgacggccagttgaatacattgctaaggattatagcac

SEQ ID NO: 31866 - DNA, 18 bp, Artificial Sequence
  primer
gtgtgaaacactgcgccc

SEQ ID NO: 31867 - DNA, 40 bp, Artificial Sequence
  primer
gtaaaacgacggccagttgagtagagaacgtgaatggttt

SEQ ID NO: 31868 - DNA, 38 bp, Artificial Sequence
  primer
gtaaaacgacggccagtattatctgcttcacgatgccc

SEQ ID NO: 31869 - DNA, 21 bp, Artificial Sequence
  primer
gctaggtccagttgttccagg

SEQ ID NO: 31870 - DNA, 22 bp, Artificial Sequence
  primer
gaccacagtggctaggacaaag

SEQ ID NO: 31871 - DNA, 19 bp, Artificial Sequence
  primer
gggcctgttctcaaggaag

SEQ ID NO: 31872 - DNA, 38 bp, Artificial Sequence
  primer
gtaaaacgacggccagtggatgaaagaggagcccgtag

SEQ ID NO: 31873 - DNA, 37 bp, Artificial Sequence
  primer
gtaaaacgacggccagttgagttggttcgtcatgtgg

SEQ ID NO: 31874 - DNA, 21 bp, Artificial Sequence
  primer
aatcatcattgagatgggctg

SEQ ID NO: 31875 - DNA, 22 bp, Artificial Sequence
  primer
cattagaactttctggcctccc

SEQ ID NO: 31876 - DNA, 38 bp, Artificial Sequence
  primer
gtaaaacgacggccagtacagccctatccatcttggtg

SEQ ID NO: 31877 - DNA, 40 bp, Artificial Sequence
  primer
gtaaaacgacggccagtccaagtgtacggtggatttaatg

SEQ ID NO: 31878 - DNA, 21 bp, Artificial Sequence
  primer
gattggaattcgctgtccttg

SEQ ID NO: 31879 - DNA, 23 bp, Artificial Sequence
  primer
cactaagggcattgctaagtacg

SEQ ID NO: 31880 - DNA, 21 bp, Artificial Sequence
  primer
ctgggtgacacagagcaagac

SEQ ID NO: 31881 - DNA, 38 bp, Artificial Sequence
  primer
gtaaaacgacggccagttttatgctgggttgaggtttg

SEQ ID NO: 31882 - DNA, 19 bp, Artificial Sequence
  primer
gaagcgagcagctgtggac

SEQ ID NO: 31883 - DNA, 21 bp, Artificial Sequence
  primer
tgaaacccatacagcctttcc

SEQ ID NO: 31884 - DNA, 38 bp, Artificial Sequence
  primer
gtaaaacgacggccagtgggagatgggaggaattaagg

SEQ ID NO: 31885 - DNA, 39 bp, Artificial Sequence
  primer
gtaaaacgacggccagtcactgtggagaagtctttgtgg

SEQ ID NO: 31886 - DNA, 21 bp, Artificial Sequence
  primer
cggcctcaagtgtcttaattg

SEQ ID NO: 31887 - DNA, 22 bp, Artificial Sequence
  primer
caagggtttctataccaggcac

SEQ ID NO: 31888 - DNA, 38 bp, Artificial Sequence
  primer
gtaaaacgacggccagtaggtcagcaattgtgctcttc

SEQ ID NO: 31889 - DNA, 38 bp, Artificial Sequence
  primer
gtaaaacgacggccagtaaggaccattgccaatcaaag

SEQ ID NO: 31890 - DNA, 21 bp, Artificial Sequence
  primer
ccaagagtggttctgtcaccc

SEQ ID NO: 31891 - DNA, 39 bp, Artificial Sequence
  primer
gtaaaacgacggccagtcagggtggaataagacacaagg

SEQ ID NO: 31892 - DNA, 21 bp, Artificial Sequence
  primer
tgtaaccgcagtgaggatttg

SEQ ID NO: 31893 - DNA, 38 bp, Artificial Sequence
  primer
gtaaaacgacggccagtttaaggacaccaggacccaag

SEQ ID NO: 31894 - DNA, 39 bp, Artificial Sequence
  primer
gtaaaacgacggccagtagcacagatgtttgccatattc

SEQ ID NO: 31895 - DNA, 39 bp, Artificial Sequence
  primer
gtaaaacgacggccagtagcagttactagcctgtcagca

SEQ ID NO: 31896 - DNA, 21 bp, Artificial Sequence
  primer
tctgtttcattgctgggtctc

SEQ ID NO: 31897 - DNA, 22 bp, Artificial Sequence
  primer
aaacccacagcattcttagcac

SEQ ID NO: 31898 - DNA, 39 bp, Artificial Sequence
  primer
gtaaaacgacggccagtggacagcagttcacaggatatg

SEQ ID NO: 31899 - DNA, 21 bp, Artificial Sequence
  primer
gatccaagtctgcacctcctc

SEQ ID NO: 31900 - DNA, 38 bp, Artificial Sequence
  primer
gtaaaacgacggccagttcaaagtaggcagttgggagg

SEQ ID NO: 31901 - DNA, 21 bp, Artificial Sequence
  primer
ttaatggtgacgtgaagcagg

SEQ ID NO: 31902 - DNA, 21 bp, Artificial Sequence
  primer
aggtacaaacttgctccaccc

SEQ ID NO: 31903 - DNA, 22 bp, Artificial Sequence
  primer
tctccagaagtagctgccagac

SEQ ID NO: 31904 - DNA, 36 bp, Artificial Sequence
  primer
gtaaaacgacggccagtgctcctgactcgaggctcc

SEQ ID NO: 31905 - DNA, 39 bp, Artificial Sequence
  primer
gtaaaacgacggccagtgagggtcgatcactcagaaatg

SEQ ID NO: 31906 - DNA, 38 bp, Artificial Sequence
  primer
gtaaaacgacggccagtctcttgagatgtccagggtcc

SEQ ID NO: 31907 - DNA, 38 bp, Artificial Sequence
  primer
gtaaaacgacggccagtctgtcctgtccatcgtcactc

SEQ ID NO: 31908 - DNA, 21 bp, Artificial Sequence
  primer
cttctgcttacagaccgggag

SEQ ID NO: 31909 - DNA, 35 bp, Artificial Sequence
  primer
gtaaaacgacggccagtgactgctgggagctgagg

SEQ ID NO: 31910 - DNA, 20 bp, Artificial Sequence
  primer
acttcagctcagccaaaggg

SEQ ID NO: 31911 - DNA, 20 bp, Artificial Sequence
  primer
tgaatggaggtgactgaccc

SEQ ID NO: 31912 - DNA, 37 bp, Artificial Sequence
  primer
gtaaaacgacggccagtgagtcctggcctgagtgaag

SEQ ID NO: 31913 - DNA, 37 bp, Artificial Sequence
  primer
gtaaaacgacggccagtgcaagtttctgtttgcctgc

SEQ ID NO: 31914 - DNA, 38 bp, Artificial Sequence
  primer
gtaaaacgacggccagtcaggccagtgtgttaaactcc

SEQ ID NO: 31915 - DNA, 38 bp, Artificial Sequence
  primer
gtaaaacgacggccagtttagttcgccttaggtgggag

SEQ ID NO: 31916 - DNA, 21 bp, Artificial Sequence
  primer
cagcagtatggatgaccaagc

SEQ ID NO: 31917 - DNA, 21 bp, Artificial Sequence
  primer
ttaagaggctgagatgggagg

SEQ ID NO: 31918 - DNA, 21 bp, Artificial Sequence
  primer
ttccacccttgagaacctcag

SEQ ID NO: 31919 - DNA, 20 bp, Artificial Sequence
  primer
gaaggccttggtgaaggttg

SEQ ID NO: 31920 - DNA, 21 bp, Artificial Sequence
  primer
gaggctctgacacaatcctcc

SEQ ID NO: 31921 - DNA, 20 bp, Artificial Sequence
  primer
gctgtcgactggctttgttg

SEQ ID NO: 31922 - DNA, 38 bp, Artificial Sequence
  primer
gtaaaacgacggccagtaggatgtctgactgaggaggc

SEQ ID NO: 31923 - DNA, 38 bp, Artificial Sequence
  primer
gtaaaacgacggccagttaaagcttggaggctgtcagg

SEQ ID NO: 31924 - DNA, 21 bp, Artificial Sequence
  primer
ggctccctctgtctttgtacg

SEQ ID NO: 31925 - DNA, 37 bp, Artificial Sequence
  primer
gtaaaacgacggccagtggacagaaagtgcctccacc

SEQ ID NO: 31926 - DNA, 38 bp, Artificial Sequence
  primer
gtaaaacgacggccagtaactctgcagctttctcctcc

SEQ ID NO: 31927 - DNA, 37 bp, Artificial Sequence
  primer
gtaaaacgacggccagtagcaaagacgcagcgataag

SEQ ID NO: 31928 - DNA, 38 bp, Artificial Sequence
  primer
gtaaaacgacggccagtgaggtgatgctgtggaagagg

SEQ ID NO: 31929 - DNA, 21 bp, Artificial Sequence
  primer
tgcctggtactctttctgtgc

SEQ ID NO: 31930 - DNA, 36 bp, Artificial Sequence
  primer
gtaaaacgacggccagttaccctgggaatgctctgc

SEQ ID NO: 31931 - DNA, 20 bp, Artificial Sequence
  primer
ctccagtgtgcagtgggaag

SEQ ID NO: 31932 - DNA, 39 bp, Artificial Sequence
  primer
gtaaaacgacggccagttcatggagtttgtgagttgtgg

SEQ ID NO: 31933 - DNA, 20 bp, Artificial Sequence
  primer
aggctacccatttccagcag

SEQ ID NO: 31934 - DNA, 38 bp, Artificial Sequence
  primer
gtaaaacgacggccagtgcagaaagtaagggctagggc

SEQ ID NO: 31935 - DNA, 20 bp, Artificial Sequence
  primer
gaacagtcagcccaggtgtc

SEQ ID NO: 31936 - DNA, 38 bp, Artificial Sequence
  primer
gtaaaacgacggccagttacaaggtgagtggacctggg

SEQ ID NO: 31937 - DNA, 39 bp, Artificial Sequence
  primer
gtaaaacgacggccagtggaactggttgaatactggctg

SEQ ID NO: 31938 - DNA, 20 bp, Artificial Sequence
  primer
ttctgccttcagtcaggctc

SEQ ID NO: 31939 - DNA, 21 bp, Artificial Sequence
  primer
cttgcctcccagtgtcttcag

SEQ ID NO: 31940 - DNA, 21 bp, Artificial Sequence
  primer
agccttggtgttcacttctcc

SEQ ID NO: 31941 - DNA, 38 bp, Artificial Sequence
  primer
gtaaaacgacggccagttcaaccagatctatgaggccc

SEQ ID NO: 31942 - DNA, 21 bp, Artificial Sequence
  primer
tagcattgggacactgctgag

SEQ ID NO: 31943 - DNA, 21 bp, Artificial Sequence
  primer
accctcccattctctgaactg

SEQ ID NO: 31944 - DNA, 38 bp, Artificial Sequence
  primer
gtaaaacgacggccagtgcctgtgagtttctcctccag

SEQ ID NO: 31945 - DNA, 21 bp, Artificial Sequence
  primer
tttaacaaatgcgtattgggc

SEQ ID NO: 31946 - DNA, 35 bp, Artificial Sequence
  primer
gtaaaacgacggccagttagtcgtcgccgtcttcg

SEQ ID NO: 31947 - DNA, 44 bp, Artificial Sequence
  primer
gtaaaacgacggccagtaattgtattacctgttgtattgcatga

SEQ ID NO: 31948 - DNA, 43 bp, Artificial Sequence
  primer
gtaaaacgacggccagtggtcacctcatatagttactgccaac

SEQ ID NO: 31949 - DNA, 24 bp, Artificial Sequence
  primer
aaggtagtgtgagattgtcattgg

SEQ ID NO: 31950 - DNA, 38 bp, Artificial Sequence
  primer
gtaaaacgacggccagtagaattgatggagggatgtgg

SEQ ID NO: 31951 - DNA, 35 bp, Artificial Sequence
  primer
gtaaaacgacggccagtcatgatccacccacctcg

SEQ ID NO: 31952 - DNA, 42 bp, Artificial Sequence
  primer
gtaaaacgacggccagtcagaaatgtacgagaatttcactgg

SEQ ID NO: 31953 - DNA, 20 bp, Artificial Sequence
  primer
gcaaacagagcaagaccctg

SEQ ID NO: 31954 - DNA, 21 bp, Artificial Sequence
  primer
atggcaccatgactgttcttg

SEQ ID NO: 31955 - DNA, 41 bp, Artificial Sequence
  primer
gtaaaacgacggccagttttcttaggatccatttcttgtct

SEQ ID NO: 31956 - DNA, 39 bp, Artificial Sequence
  primer
gtaaaacgacggccagtaacacaatgtgatttccagtgc

SEQ ID NO: 31957 - DNA, 23 bp, Artificial Sequence
  primer
tcaagtgttggaccagtctcttt

SEQ ID NO: 31958 - DNA, 24 bp, Artificial Sequence
  primer
tttcttcgttaacatactttgccc

SEQ ID NO: 31959 - DNA, 24 bp, Artificial Sequence
  primer
ttgattggaagctttagtttggag

SEQ ID NO: 31960 - DNA, 40 bp, Artificial Sequence
  primer
gtaaaacgacggccagtaaagctgttgaggactttggttc

SEQ ID NO: 31961 - DNA, 22 bp, Artificial Sequence
  primer
gcatctgcagaatgtgtaaggg

SEQ ID NO: 31962 - DNA, 42 bp, Artificial Sequence
  primer
gtaaaacgacggccagtttcagtatataatggcttgttgtgg

SEQ ID NO: 31963 - DNA, 38 bp, Artificial Sequence
  primer
gtaaaacgacggccagtgcctgagttcatgttgatgtg

SEQ ID NO: 31964 - DNA, 36 bp, Artificial Sequence
  primer
gtaaaacgacggccagtgtgcctggcccatcttaac

SEQ ID NO: 31965 - DNA, 26 bp, Artificial Sequence
  primer
ggaaatggaaatgctatttgagtaac

SEQ ID NO: 31966 - DNA, 21 bp, Artificial Sequence
  primer
ttctttgagggtagggaccac

SEQ ID NO: 31967 - DNA, 21 bp, Artificial Sequence
  primer
tacctcagattgctgggtttg

SEQ ID NO: 31968 - DNA, 18 bp, Artificial Sequence
  primer
ctgtggctgcatctgagg

SEQ ID NO: 31969 - DNA, 21 bp, Artificial Sequence
  primer
agctcttcctgcctctgagtg

SEQ ID NO: 31970 - DNA, 37 bp, Artificial Sequence
  primer
gtaaaacgacggccagtgccgactgacctctgacctc

SEQ ID NO: 31971 - DNA, 35 bp, Artificial Sequence
  primer
gtaaaacgacggccagtcagtgccctctgctggtg

SEQ ID NO: 31972 - DNA, 38 bp, Artificial Sequence
  primer
gtaaaacgacggccagtacaaacaacgatgtgggagac

SEQ ID NO: 31973 - DNA, 38 bp, Artificial Sequence
  primer
gtaaaacgacggccagtagtgacgattcttgctttgcc

SEQ ID NO: 31974 - DNA, 38 bp, Artificial Sequence
  primer
gtaaaacgacggccagttgcaggccaagaagaagtttg

SEQ ID NO: 31975 - DNA, 38 bp, Artificial Sequence
  primer
gtaaaacgacggccagtcttcttccagcagggctacag

SEQ ID NO: 31976 - DNA, 20 bp, Artificial Sequence
  primer
cctcagtcactggctccttg

SEQ ID NO: 31977 - DNA, 38 bp, Artificial Sequence
  primer
gtaaaacgacggccagtagcctcagacaaggacctcac

SEQ ID NO: 31978 - DNA, 21 bp, Artificial Sequence
  primer
agcaacgctttcaagacatgg

SEQ ID NO: 31979 - DNA, 37 bp, Artificial Sequence
  primer
gtaaaacgacggccagtggtctccaaggtgaagcagg

SEQ ID NO: 31980 - DNA, 37 bp, Artificial Sequence
  primer
gtaaaacgacggccagtctgtcacccaccaagtgagg

SEQ ID NO: 31981 - DNA, 36 bp, Artificial Sequence
  primer
gtaaaacgacggccagtcattggctcttctggctgg

SEQ ID NO: 31982 - DNA, 36 bp, Artificial Sequence
  primer
gtaaaacgacggccagtcgtgctgctctgcattgag

SEQ ID NO: 31983 - DNA, 38 bp, Artificial Sequence
  primer
gtaaaacgacggccagtgagcctgagctgctaaaggtg

SEQ ID NO: 31984 - DNA, 18 bp, Artificial Sequence
  primer
aggcagcaggaaacccac

SEQ ID NO: 31985 - DNA, 37 bp, Artificial Sequence
  primer
gtaaaacgacggccagtctctgtcctcaggtgggagg

SEQ ID NO: 31986 - DNA, 36 bp, Artificial Sequence
  primer
gtaaaacgacggccagtacagcgtcactgaggaggg

SEQ ID NO: 31987 - DNA, 20 bp, Artificial Sequence
  primer
agtcgcgtttgcatcttctg

SEQ ID NO: 31988 - DNA, 35 bp, Artificial Sequence
  primer
gtaaaacgacggccagtaccaaagagacagccggg

SEQ ID NO: 31989 - DNA, 21 bp, Artificial Sequence
  primer
tgacatcgtgacactgtgagc

SEQ ID NO: 31990 - DNA, 38 bp, Artificial Sequence
  primer
gtaaaacgacggccagtgtgtgtgttgtctcatcgtgc

SEQ ID NO: 31991 - DNA, 21 bp, Artificial Sequence
  primer
cagcaataaatgacagcctgc

SEQ ID NO: 31992 - DNA, 41 bp, Artificial Sequence
  primer
gtaaaacgacggccagtaaaggattaccatgttccatcttc

SEQ ID NO: 31993 - DNA, 38 bp, Artificial Sequence
  primer
gtaaaacgacggccagttgttcagacatctagcccacc

SEQ ID NO: 31994 - DNA, 21 bp, Artificial Sequence
  primer
tagaaggatcaccaccatccc

SEQ ID NO: 31995 - DNA, 23 bp, Artificial Sequence
  primer
aatacatttgtggaatttggctg

SEQ ID NO: 31996 - DNA, 22 bp, Artificial Sequence
  primer
caagtggtggataccatgtgtg

SEQ ID NO: 31997 - DNA, 27 bp, Artificial Sequence
  primer
ttcttacttgaattgatgagttaacga

SEQ ID NO: 31998 - DNA, 38 bp, Artificial Sequence
  primer
gtaaaacgacggccagtccagtctgcattcttagcacc

SEQ ID NO: 31999 - DNA, 21 bp, Artificial Sequence
  primer
taagcgaggacaaggtggaag

SEQ ID NO: 32000 - DNA, 21 bp, Artificial Sequence
  primer
ccgaaccttacaaatgtgtgc

SEQ ID NO: 32001 - DNA, 27 bp, Artificial Sequence
  primer
gaagcagttataaatactgtgccattc

SEQ ID NO: 32002 - DNA, 38 bp, Artificial Sequence
  primer
gtaaaacgacggccagtgggcatggatttcttcttgac

SEQ ID NO: 32003 - DNA, 21 bp, Artificial Sequence
  primer
agttggcccagtgctattatg

SEQ ID NO: 32004 - DNA, 22 bp, Artificial Sequence
  primer
gaactgcctagcagccatattt

SEQ ID NO: 32005 - DNA, 38 bp, Artificial Sequence
  primer
gtaaaacgacggccagttgaggaaagcaggtattggtg

SEQ ID NO: 32006 - DNA, 26 bp, Artificial Sequence
  primer
tctggaatagttgagtctttcatgtg

SEQ ID NO: 32007 - DNA, 45 bp, Artificial Sequence
  primer
gtaaaacgacggccagttttatcccatacatgaaattatcagact

SEQ ID NO: 32008 - DNA, 38 bp, Artificial Sequence
  primer
gtaaaacgacggccagtttccaccaacattaaatccga

SEQ ID NO: 32009 - DNA, 23 bp, Artificial Sequence
  primer
tgcatccagccattatttagaag

SEQ ID NO: 32010 - DNA, 21 bp, Artificial Sequence
  primer
ttgtccaatccagtgtgttcc

SEQ ID NO: 32011 - DNA, 21 bp, Artificial Sequence
  primer
aaatggtttaagatgctgcca

SEQ ID NO: 32012 - DNA, 39 bp, Artificial Sequence
  primer
gtaaaacgacggccagttcttgatggcttactcccaaac

SEQ ID NO: 32013 - DNA, 21 bp, Artificial Sequence
  primer
ttgtcttgcatgattgtgtgg

SEQ ID NO: 32014 - DNA, 41 bp, Artificial Sequence
  primer
gtaaaacgacggccagtcgtaatgatttcatcatcttctcg

SEQ ID NO: 32015 - DNA, 24 bp, Artificial Sequence
  primer
tgaacgattgtctactgaaacctg

SEQ ID NO: 32016 - DNA, 40 bp, Artificial Sequence
  primer
gtaaaacgacggccagtcagagaattccaatattgctgtg

SEQ ID NO: 32017 - DNA, 43 bp, Artificial Sequence
  primer
gtaaaacgacggccagttttaaattcctgaagattacatgagg

SEQ ID NO: 32018 - DNA, 39 bp, Artificial Sequence
  primer
gtaaaacgacggccagtgggaattgagcttgtttcattg

SEQ ID NO: 32019 - DNA, 40 bp, Artificial Sequence
  primer
gtaaaacgacggccagtgatatcattaaatggtggatggg

SEQ ID NO: 32020 - DNA, 27 bp, Artificial Sequence
  primer
tgtgtataatgttgcctacagatgttt

SEQ ID NO: 32021 - DNA, 38 bp, Artificial Sequence
  primer
gtaaaacgacggccagttcccggaagttcaccttagac

SEQ ID NO: 32022 - DNA, 40 bp, Artificial Sequence
  primer
gtaaaacgacggccagtaacccaatcattaatgctcaaag

SEQ ID NO: 32023 - DNA, 21 bp, Artificial Sequence
  primer
ggaagtctatgcattcccacc

SEQ ID NO: 32024 - DNA, 39 bp, Artificial Sequence
  primer
gtaaaacgacggccagtcgtcattaatcaggagagaccc

SEQ ID NO: 32025 - DNA, 23 bp, Artificial Sequence
  primer
ggatatgtgggaaagaaaccaag

SEQ ID NO: 32026 - DNA, 38 bp, Artificial Sequence
  primer
gtaaaacgacggccagtttgtaagccagggactgtctg

SEQ ID NO: 32027 - DNA, 21 bp, Artificial Sequence
  primer
aaggagagagcttccatggtg

SEQ ID NO: 32028 - DNA, 21 bp, Artificial Sequence
  primer
cctgtgatctgggtctctgtg

SEQ ID NO: 32029 - DNA, 37 bp, Artificial Sequence
  primer
gtaaaacgacggccagtagcgagggagaggaactgtc

SEQ ID NO: 32030 - DNA, 37 bp, Artificial Sequence
  primer
gtaaaacgacggccagtctgagtgtggcttctgaggg

SEQ ID NO: 32031 - DNA, 38 bp, Artificial Sequence
  primer
gtaaaacgacggccagtctaaccagctgcaggagacag

SEQ ID NO: 32032 - DNA, 19 bp, Artificial Sequence
  primer
gagcctagggccaggagac

SEQ ID NO: 32033 - DNA, 37 bp, Artificial Sequence
  primer
gtaaaacgacggccagtcttcctctccctgtcccaag

SEQ ID NO: 32034 - DNA, 38 bp, Artificial Sequence
  primer
gtaaaacgacggccagttttgtccacacctaccttccc

SEQ ID NO: 32035 - DNA, 20 bp, Artificial Sequence
  primer
gagcaagagtacacggctgg

SEQ ID NO: 32036 - DNA, 19 bp, Artificial Sequence
  primer
gaaaccaagtttctgcccg

SEQ ID NO: 32037 - DNA, 21 bp, Artificial Sequence
  primer
agtctgaggatggactgctcc

SEQ ID NO: 32038 - DNA, 38 bp, Artificial Sequence
  primer
gtaaaacgacggccagtacaagaccctgcaggtaggag

SEQ ID NO: 32039 - DNA, 21 bp, Artificial Sequence
  primer
aagagctcatgggtcagatgg

SEQ ID NO: 32040 - DNA, 38 bp, Artificial Sequence
  primer
gtaaaacgacggccagtggaccagaataaggacaagcg

SEQ ID NO: 32041 - DNA, 21 bp, Artificial Sequence
  primer
aagagggcatgtgcctgtaag

SEQ ID NO: 32042 - DNA, 21 bp, Artificial Sequence
  primer
cctggaaatctgaactctgcc

SEQ ID NO: 32043 - DNA, 37 bp, Artificial Sequence
  primer
gtaaaacgacggccagtgggacagtgagaaccaggtg

SEQ ID NO: 32044 - DNA, 21 bp, Artificial Sequence
  primer
tgtgtggactacatcacgcag

SEQ ID NO: 32045 - DNA, 21 bp, Artificial Sequence
  primer
gaccgagagttccttaccctg

SEQ ID NO: 32046 - DNA, 38 bp, Artificial Sequence
  primer
gtaaaacgacggccagtaccagaccagtcttggacctg

SEQ ID NO: 32047 - DNA, 38 bp, Artificial Sequence
  primer
gtaaaacgacggccagtacaacctggcaattgtgtttg

SEQ ID NO: 32048 - DNA, 21 bp, Artificial Sequence
  primer
gaggagatcactgccattgtg

SEQ ID NO: 32049 - DNA, 38 bp, Artificial Sequence
  primer
gtaaaacgacggccagtctatcccaggactccagaagg

SEQ ID NO: 32050 - DNA, 38 bp, Artificial Sequence
  primer
gtaaaacgacggccagtttgcatatggttggagtggac

SEQ ID NO: 32051 - DNA, 21 bp, Artificial Sequence
  primer
aggaacagctcagacagaggg

SEQ ID NO: 32052 - DNA, 22 bp, Artificial Sequence
  primer
catacatgccatacacacaccc

SEQ ID NO: 32053 - DNA, 37 bp, Artificial Sequence
  primer
gtaaaacgacggccagtggagttggaagagggagctg

SEQ ID NO: 32054 - DNA, 21 bp, Artificial Sequence
  primer
gagaaggctctgaactctggc

SEQ ID NO: 32055 - DNA, 21 bp, Artificial Sequence
  primer
gaagcagcagtggtgagtgag

SEQ ID NO: 32056 - DNA, 22 bp, Artificial Sequence
  primer
gatcaaagctgagggtgtcatc

SEQ ID NO: 32057 - DNA, 37 bp, Artificial Sequence
  primer
gtaaaacgacggccagttcacaccattcaaaggagcc

SEQ ID NO: 32058 - DNA, 21 bp, Artificial Sequence
  primer
tctttggaggaagattggagg

SEQ ID NO: 32059 - DNA, 38 bp, Artificial Sequence
  primer
gtaaaacgacggccagtcctggagcagtatgcagacac

SEQ ID NO: 32060 - DNA, 21 bp, Artificial Sequence
  primer
catctacttcggcctggactc

SEQ ID NO: 32061 - DNA, 38 bp, Artificial Sequence
  primer
gtaaaacgacggccagttaactgggttatcacgggttg

SEQ ID NO: 32062 - DNA, 21 bp, Artificial Sequence
  primer
tacctgccaggcattctattc

SEQ ID NO: 32063 - DNA, 21 bp, Artificial Sequence
  primer
gacctcatttcaccctatgcc

SEQ ID NO: 32064 - DNA, 21 bp, Artificial Sequence
  primer
cagctgtacccactgcttgtg

SEQ ID NO: 32065 - DNA, 19 bp, Artificial Sequence
  primer
agagggtgttcgtgttccg

SEQ ID NO: 32066 - DNA, 20 bp, Artificial Sequence
  primer
acacaaggccaaggtgtttg

SEQ ID NO: 32067 - DNA, 38 bp, Artificial Sequence
  primer
gtaaaacgacggccagtaagatgtcagaagggtctggg

SEQ ID NO: 32068 - DNA, 21 bp, Artificial Sequence
  primer
tctgactacgaggtggctgag

SEQ ID NO: 32069 - DNA, 36 bp, Artificial Sequence
  primer
gtaaaacgacggccagtcgtagaagggagcgtccag

SEQ ID NO: 32070 - DNA, 38 bp, Artificial Sequence
  primer
gtaaaacgacggccagtgttggaatgcctagacttggg

SEQ ID NO: 32071 - DNA, 37 bp, Artificial Sequence
  primer
gtaaaacgacggccagtctctacttggctgtgctggc

SEQ ID NO: 32072 - DNA, 21 bp, Artificial Sequence
  primer
gatcatatatgggcaaagggc

SEQ ID NO: 32073 - DNA, 21 bp, Artificial Sequence
  primer
ttctgtgaccactgagcttcc

SEQ ID NO: 32074 - DNA, 36 bp, Artificial Sequence
  primer
gtaaaacgacggccagtctctgctctctcgcatccc

SEQ ID NO: 32075 - DNA, 38 bp, Artificial Sequence
  primer
gtaaaacgacggccagttggcatctatgcacgttaagc

SEQ ID NO: 32076 - DNA, 38 bp, Artificial Sequence
  primer
gtaaaacgacggccagtcctcaaagtttcttcccttgc

SEQ ID NO: 32077 - DNA, 38 bp, Artificial Sequence
  primer
gtaaaacgacggccagttcagccacataccacataggg

SEQ ID NO: 32078 - DNA, 38 bp, Artificial Sequence
  primer
gtaaaacgacggccagtaatccctccctctgtaccagc

SEQ ID NO: 32079 - DNA, 38 bp, Artificial Sequence
  primer
gtaaaacgacggccagttagcccaggcatacaataggg

SEQ ID NO: 32080 - DNA, 21 bp, Artificial Sequence
  primer
tcccacaacttcacttccaac

SEQ ID NO: 32081 - DNA, 21 bp, Artificial Sequence
  primer
ggaggagacctttgttggaag

SEQ ID NO: 32082 - DNA, 38 bp, Artificial Sequence
  primer
gtaaaacgacggccagtctcccagacaactgtgtcacc

SEQ ID NO: 32083 - DNA, 21 bp, Artificial Sequence
  primer
gaggccatgtgtatcatgctc

SEQ ID NO: 32084 - DNA, 21 bp, Artificial Sequence
  primer
cttcacaggtgagcctccttc

SEQ ID NO: 32085 - DNA, 20 bp, Artificial Sequence
  primer
gcttccatgacgtcttgacc

SEQ ID NO: 32086 - DNA, 38 bp, Artificial Sequence
  primer
gtaaaacgacggccagtttggaaggtgccaaggtctac

SEQ ID NO: 32087 - DNA, 22 bp, Artificial Sequence
  primer
tccctctttgtatgctccattc

SEQ ID NO: 32088 - DNA, 38 bp, Artificial Sequence
  primer
gtaaaacgacggccagtatccttaaagcccaggtgagg

SEQ ID NO: 32089 - DNA, 38 bp, Artificial Sequence
  primer
gtaaaacgacggccagtgcacagggttgttccagaatc

SEQ ID NO: 32090 - DNA, 38 bp, Artificial Sequence
  primer
gtaaaacgacggccagtatccaccaatgaagtcatccc

SEQ ID NO: 32091 - DNA, 38 bp, Artificial Sequence
  primer
gtaaaacgacggccagtaccagtcaggaagtgaggtcg

SEQ ID NO: 32092 - DNA, 38 bp, Artificial Sequence
  primer
gtaaaacgacggccagtcaccctcaaacctgtctgttg

SEQ ID NO: 32093 - DNA, 21 bp, Artificial Sequence
  primer
ctgatcctcccaactgctctc

SEQ ID NO: 32094 - DNA, 21 bp, Artificial Sequence
  primer
tcaatgattaggcaggtgtgg

SEQ ID NO: 32095 - DNA, 38 bp, Artificial Sequence
  primer
gtaaaacgacggccagtggtcttcatctggattgggtc

SEQ ID NO: 32096 - DNA, 38 bp, Artificial Sequence
  primer
gtaaaacgacggccagttgcaaggataagggaattgtg

SEQ ID NO: 32097 - DNA, 38 bp, Artificial Sequence
  primer
gtaaaacgacggccagtaggaagttgggtcctgtgttg

SEQ ID NO: 32098 - DNA, 38 bp, Artificial Sequence
  primer
gtaaaacgacggccagttaacctcccaaggctatcagg

SEQ ID NO: 32099 - DNA, 39 bp, Artificial Sequence
  primer
gtaaaacgacggccagtggcccttcttcatctatcttcc

SEQ ID NO: 32100 - DNA, 21 bp, Artificial Sequence
  primer
aaacaggtgagtgatccaggg

SEQ ID NO: 32101 - DNA, 38 bp, Artificial Sequence
  primer
gtaaaacgacggccagtaccatgttgactgcttcccag

SEQ ID NO: 32102 - DNA, 38 bp, Artificial Sequence
  primer
gtaaaacgacggccagtgaagctgggtgataaagaggg

SEQ ID NO: 32103 - DNA, 38 bp, Artificial Sequence
  primer
gtaaaacgacggccagtagttcagggaatgagacaggc

SEQ ID NO: 32104 - DNA, 37 bp, Artificial Sequence
  primer
gtaaaacgacggccagtcaccctctgctttccctacc

SEQ ID NO: 32105 - DNA, 22 bp, Artificial Sequence
  primer
gaggagagcagaggtgtctgag

SEQ ID NO: 32106 - DNA, 36 bp, Artificial Sequence
  primer
gtaaaacgacggccagtagtgagtgccaggaggcag

SEQ ID NO: 32107 - DNA, 35 bp, Artificial Sequence
  primer
gtaaaacgacggccagtagacggtcccgtgggtag

SEQ ID NO: 32108 - DNA, 20 bp, Artificial Sequence
  primer
gaagtaggcttggccatgtg

SEQ ID NO: 32109 - DNA, 18 bp, Artificial Sequence
  primer
tttcttctcgcgcctcct

SEQ ID NO: 32110 - DNA, 38 bp, Artificial Sequence
  primer
gtaaaacgacggccagtgcttgtctgcaccatcttcag

SEQ ID NO: 32111 - DNA, 38 bp, Artificial Sequence
  primer
gtaaaacgacggccagtgccagtgcttggttatgtttg

SEQ ID NO: 32112 - DNA, 38 bp, Artificial Sequence
  primer
gtaaaacgacggccagtaatactcagttgcctccaggg

SEQ ID NO: 32113 - DNA, 38 bp, Artificial Sequence
  primer
gtaaaacgacggccagtgccatgcagacatctctgttc

SEQ ID NO: 32114 - DNA, 39 bp, Artificial Sequence
  primer
gtaaaacgacggccagtgcaaacgatgctctacaattcc

SEQ ID NO: 32115 - DNA, 21 bp, Artificial Sequence
  primer
cccacctaagaaccaggaatg

SEQ ID NO: 32116 - DNA, 38 bp, Artificial Sequence
  primer
gtaaaacgacggccagtaagccatagacgcaagtcagc

SEQ ID NO: 32117 - DNA, 21 bp, Artificial Sequence
  primer
tactgagctgtctgctcgtcg

SEQ ID NO: 32118 - DNA, 21 bp, Artificial Sequence
  primer
gcattcgccagtatcacagag

SEQ ID NO: 32119 - DNA, 21 bp, Artificial Sequence
  primer
cacagtggaagggtcataggg

SEQ ID NO: 32120 - DNA, 21 bp, Artificial Sequence
  primer
aatgggatgttatttgcaggg

SEQ ID NO: 32121 - DNA, 38 bp, Artificial Sequence
  primer
gtaaaacgacggccagtggtgcatggattcaaatctcc

SEQ ID NO: 32122 - DNA, 39 bp, Artificial Sequence
  primer
gtaaaacgacggccagttcccaatctgtttgatctttcc

SEQ ID NO: 32123 - DNA, 38 bp, Artificial Sequence
  primer
gtaaaacgacggccagttcgtcgccttgtgtttctaag

SEQ ID NO: 32124 - DNA, 38 bp, Artificial Sequence
  primer
gtaaaacgacggccagtttatttcacttccctctcggc

SEQ ID NO: 32125 - DNA, 36 bp, Artificial Sequence
  primer
gtaaaacgacggccagtcacatgcaagggctgagag

SEQ ID NO: 32126 - DNA, 36 bp, Artificial Sequence
  primer
gtaaaacgacggccagtgttgttgttgccgctggag

SEQ ID NO: 32127 - DNA, 19 bp, Artificial Sequence
  primer
cgaagccatgaacttccag

SEQ ID NO: 32128 - DNA, 21 bp, Artificial Sequence
  primer
caagaagaaccttcccactgc

SEQ ID NO: 32129 - DNA, 21 bp, Artificial Sequence
  primer
accggagcttaaagtggtgag

SEQ ID NO: 32130 - DNA, 20 bp, Artificial Sequence
  primer
cctgaaggtgagcgtcacag

SEQ ID NO: 32131 - DNA, 38 bp, Artificial Sequence
  primer
gtaaaacgacggccagttgtccagggagaagggtctac

SEQ ID NO: 32132 - DNA, 21 bp, Artificial Sequence
  primer
ctgtgtgttccactcaccagg

SEQ ID NO: 32133 - DNA, 21 bp, Artificial Sequence
  primer
gtgagagcaaggctgtgtgtc

SEQ ID NO: 32134 - DNA, 21 bp, Artificial Sequence
  primer
acagtagatcctgctggcctc

SEQ ID NO: 32135 - DNA, 37 bp, Artificial Sequence
  primer
gtaaaacgacggccagtgtctcagttccttcccgtcc

SEQ ID NO: 32136 - DNA, 21 bp, Artificial Sequence
  primer
tccttaaaggctgctttgctc

SEQ ID NO: 32137 - DNA, 38 bp, Artificial Sequence
  primer
gtaaaacgacggccagtaagattggagccttccctctc

SEQ ID NO: 32138 - DNA, 21 bp, Artificial Sequence
  primer
atgtctcaggctctgctctgc

SEQ ID NO: 32139 - DNA, 38 bp, Artificial Sequence
  primer
gtaaaacgacggccagtaggactggtcctctcctcctc

SEQ ID NO: 32140 - DNA, 21 bp, Artificial Sequence
  primer
tgagtggagttgtggcgatag

SEQ ID NO: 32141 - DNA, 20 bp, Artificial Sequence
  primer
tgggtacagagtgactgggc

SEQ ID NO: 32142 - DNA, 38 bp, Artificial Sequence
  primer
gtaaaacgacggccagtgaagccttccctagttgtccc

SEQ ID NO: 32143 - DNA, 18 bp, Artificial Sequence
  primer
ctcgcttcctttcctgcc

SEQ ID NO: 32144 - DNA, 21 bp, Artificial Sequence
  primer
ccctgacctcgctcttcttag

SEQ ID NO: 32145 - DNA, 21 bp, Artificial Sequence
  primer
tcctagcatttatggcctctg

SEQ ID NO: 32146 - DNA, 44 bp, Artificial Sequence
  primer
gtaaaacgacggccagtaacattatgattagaaatagccagctt

SEQ ID NO: 32147 - DNA, 38 bp, Artificial Sequence
  primer
gtaaaacgacggccagtatcaaacagaccctgatgcac

SEQ ID NO: 32148 - DNA, 42 bp, Artificial Sequence
  primer
gtaaaacgacggccagtaacatggagctaaagctgtttattc

SEQ ID NO: 32149 - DNA, 39 bp, Artificial Sequence
  primer
gtaaaacgacggccagtttccttgccatgttaaatttcc

SEQ ID NO: 32150 - DNA, 21 bp, Artificial Sequence
  primer
gaaatgatgccttcttgcctc

SEQ ID NO: 32151 - DNA, 44 bp, Artificial Sequence
  primer
gtaaaacgacggccagtcgatgagaacttaccatatcatcacac

SEQ ID NO: 32152 - DNA, 39 bp, Artificial Sequence
  primer
gtaaaacgacggccagtgcaattctgtgatatgtttgcc

SEQ ID NO: 32153 - DNA, 41 bp, Artificial Sequence
  primer
gtaaaacgacggccagtcagtttaatagagcagggagaagg

SEQ ID NO: 32154 - DNA, 23 bp, Artificial Sequence
  primer
tggagtgcttagataactcccac

SEQ ID NO: 32155 - DNA, 21 bp, Artificial Sequence
  primer
gggcctgacacaaatagatgc

SEQ ID NO: 32156 - DNA, 41 bp, Artificial Sequence
  primer
gtaaaacgacggccagtaaagcttagaatttcactcttggc

SEQ ID NO: 32157 - DNA, 38 bp, Artificial Sequence
  primer
gtaaaacgacggccagtgccagcatttggtttacagtg

SEQ ID NO: 32158 - DNA, 21 bp, Artificial Sequence
  primer
atttgggctgagctgattctg

SEQ ID NO: 32159 - DNA, 38 bp, Artificial Sequence
  primer
gtaaaacgacggccagtgaggactccagatggaacagg

SEQ ID NO: 32160 - DNA, 38 bp, Artificial Sequence
  primer
gtaaaacgacggccagttagattgacaccagtccctgc

SEQ ID NO: 32161 - DNA, 22 bp, Artificial Sequence
  primer
gaggcaaacattccaatgactc

SEQ ID NO: 32162 - DNA, 38 bp, Artificial Sequence
  primer
gtaaaacgacggccagttgaacagagtccctaccctcc

SEQ ID NO: 32163 - DNA, 39 bp, Artificial Sequence
  primer
gtaaaacgacggccagtggcaatgtgatgaaagcagaag

SEQ ID NO: 32164 - DNA, 21 bp, Artificial Sequence
  primer
taatgcagtttcctcactggg

SEQ ID NO: 32165 - DNA, 22 bp, Artificial Sequence
  primer
ttaccaaagggcagactgaaag

SEQ ID NO: 32166 - DNA, 39 bp, Artificial Sequence
  primer
gtaaaacgacggccagtccaagttctttctcaaccttgc

SEQ ID NO: 32167 - DNA, 38 bp, Artificial Sequence
  primer
gtaaaacgacggccagttggcttaaatgctgctgttct

SEQ ID NO: 32168 - DNA, 26 bp, Artificial Sequence
  primer
ccactttaaccacagttaatttcagc

SEQ ID NO: 32169 - DNA, 27 bp, Artificial Sequence
  primer
aaatcaaatgtagcagtctttcttacc

SEQ ID NO: 32170 - DNA, 24 bp, Artificial Sequence
  primer
aagagctgtactggtttacatggc

SEQ ID NO: 32171 - DNA, 21 bp, Artificial Sequence
  primer
ggtaggtggattccctaagcc

SEQ ID NO: 32172 - DNA, 37 bp, Artificial Sequence
  primer
gtaaaacgacggccagtggtttgtgctggaagacagc

SEQ ID NO: 32173 - DNA, 38 bp, Artificial Sequence
  primer
gtaaaacgacggccagtcattaggcatttcacccttgc

SEQ ID NO: 32174 - DNA, 21 bp, Artificial Sequence
  primer
agacgttgccttgcttacagt

SEQ ID NO: 32175 - DNA, 18 bp, Artificial Sequence
  primer
acctcagcctgccaaatg

SEQ ID NO: 32176 - DNA, 40 bp, Artificial Sequence
  primer
gtaaaacgacggccagttgaacaaagccagtgtaccctta

SEQ ID NO: 32177 - DNA, 24 bp, Artificial Sequence
  primer
tgaaaggataacactgttcctcag

SEQ ID NO: 32178 - DNA, 40 bp, Artificial Sequence
  primer
gtaaaacgacggccagtggcctttaatgagatagtgtggc

SEQ ID NO: 32179 - DNA, 38 bp, Artificial Sequence
  primer
gtaaaacgacggccagttactggattggcactgaccac

SEQ ID NO: 32180 - DNA, 21 bp, Artificial Sequence
  primer
ctcatgtccatgcaggttctc

SEQ ID NO: 32181 - DNA, 38 bp, Artificial Sequence
  primer
gtaaaacgacggccagtattatgcatctgccacaaggg

SEQ ID NO: 32182 - DNA, 39 bp, Artificial Sequence
  primer
gtaaaacgacggccagtcccatttgacagctagagaagc

SEQ ID NO: 32183 - DNA, 22 bp, Artificial Sequence
  primer
gcacatcatacagctcaattcc

SEQ ID NO: 32184 - DNA, 38 bp, Artificial Sequence
  primer
gtaaaacgacggccagttctgggttcgtaggattgacc

SEQ ID NO: 32185 - DNA, 39 bp, Artificial Sequence
  primer
gtaaaacgacggccagtagccattcctactgttagccag

SEQ ID NO: 32186 - DNA, 38 bp, Artificial Sequence
  primer
gtaaaacgacggccagtagccatcatgccatcacttag

SEQ ID NO: 32187 - DNA, 24 bp, Artificial Sequence
  primer
aacaggaatatcataagcattggc

SEQ ID NO: 32188 - DNA, 40 bp, Artificial Sequence
  primer
gtaaaacgacggccagttcatgtggtgcatgactgtattt

SEQ ID NO: 32189 - DNA, 38 bp, Artificial Sequence
  primer
gtaaaacgacggccagtaaagcatgcataagaagcagg

SEQ ID NO: 32190 - DNA, 38 bp, Artificial Sequence
  primer
gtaaaacgacggccagtataaccgaaaggctaacctgg

SEQ ID NO: 32191 - DNA, 38 bp, Artificial Sequence
  primer
gtaaaacgacggccagtgaccctttggcacagtacgtc

SEQ ID NO: 32192 - DNA, 27 bp, Artificial Sequence
  primer
tctcttgcatacattggtacataagaa

SEQ ID NO: 32193 - DNA, 23 bp, Artificial Sequence
  primer
ctttcattacactgcacatggtc

SEQ ID NO: 32194 - DNA, 21 bp, Artificial Sequence
  primer
tttgcctcttcgttgaaattg

SEQ ID NO: 32195 - DNA, 43 bp, Artificial Sequence
  primer
gtaaaacgacggccagtcacacacgtatatgtaaattgctgtt

SEQ ID NO: 32196 - DNA, 45 bp, Artificial Sequence
  primer
gtaaaacgacggccagtggtgttatgtagaacagttcatgatttc

SEQ ID NO: 32197 - DNA, 21 bp, Artificial Sequence
  primer
tactgccagtgctctcatctg

SEQ ID NO: 32198 - DNA, 22 bp, Artificial Sequence
  primer
agtgacggtagcatgtgttcag

SEQ ID NO: 32199 - DNA, 44 bp, Artificial Sequence
  primer
gtaaaacgacggccagttgtagacttacattgcttactgtggtg

SEQ ID NO: 32200 - DNA, 24 bp, Artificial Sequence
  primer
acacccattctgactcttagaacc

SEQ ID NO: 32201 - DNA, 24 bp, Artificial Sequence
  primer
tgccatagattatactggaggagc

SEQ ID NO: 32202 - DNA, 38 bp, Artificial Sequence
  primer
gtaaaacgacggccagtaacttgaatcagcccaagcac

SEQ ID NO: 32203 - DNA, 25 bp, Artificial Sequence
  primer
gggacatggagatatgtttacttgg

SEQ ID NO: 32204 - DNA, 43 bp, Artificial Sequence
  primer
gtaaaacgacggccagtcatttgcatgtaattattggtagagc

SEQ ID NO: 32205 - DNA, 44 bp, Artificial Sequence
  primer
gtaaaacgacggccagtgccctactctatcttattctccaattc

SEQ ID NO: 32206 - DNA, 44 bp, Artificial Sequence
  primer
gtaaaacgacggccagttgtatgtgtttatgacataggtgttcc

SEQ ID NO: 32207 - DNA, 24 bp, Artificial Sequence
  primer
gattgttggctgtacaaattcaag

SEQ ID NO: 32208 - DNA, 42 bp, Artificial Sequence
  primer
gtaaaacgacggccagttgataggtgaatagttccacagagc

SEQ ID NO: 32209 - DNA, 43 bp, Artificial Sequence
  primer
gtaaaacgacggccagtttgttgaaaggtcttgatcttctctt

SEQ ID NO: 32210 - DNA, 26 bp, Artificial Sequence
  primer
aagagattgttcaaagcaattaggtc

SEQ ID NO: 32211 - DNA, 42 bp, Artificial Sequence
  primer
gtaaaacgacggccagtcatctcttatgtagtttgtcctggg

SEQ ID NO: 32212 - DNA, 36 bp, Artificial Sequence
  primer
gtaaaacgacggccagtaccactcgttccaaggcag

SEQ ID NO: 32213 - DNA, 38 bp, Artificial Sequence
  primer
gtaaaacgacggccagtgcacagacggacagtaagcac

SEQ ID NO: 32214 - DNA, 21 bp, Artificial Sequence
  primer
aaattgccttcattgtgtgct

SEQ ID NO: 32215 - DNA, 24 bp, Artificial Sequence
  primer
cactgaattgatttcatgatgctc

SEQ ID NO: 32216 - DNA, 38 bp, Artificial Sequence
  primer
gtaaaacgacggccagtcgtgacatctgattgggattg

SEQ ID NO: 32217 - DNA, 36 bp, Artificial Sequence
  primer
gtaaaacgacggccagtagccatgatgagcggagac

SEQ ID NO: 32218 - DNA, 38 bp, Artificial Sequence
  primer
gtaaaacgacggccagtgctcccatgtgatgatcttgt

SEQ ID NO: 32219 - DNA, 21 bp, Artificial Sequence
  primer
cagacctatgccttctgggtc

SEQ ID NO: 32220 - DNA, 22 bp, Artificial Sequence
  primer
ttgcctcctgttgatcattaaa

SEQ ID NO: 32221 - DNA, 43 bp, Artificial Sequence
  primer
gtaaaacgacggccagtcaaaggtgataatccttgtgtatgac

SEQ ID NO: 32222 - DNA, 21 bp, Artificial Sequence
  primer
tcatggatttgatcttggacc

SEQ ID NO: 32223 - DNA, 24 bp, Artificial Sequence
  primer
atgttcttatcaaagcgtgaagag

SEQ ID NO: 32224 - DNA, 38 bp, Artificial Sequence
  primer
gtaaaacgacggccagttgaggaggaaggaaggaaacc

SEQ ID NO: 32225 - DNA, 26 bp, Artificial Sequence
  primer
tgaggtgagaataaagagtttagctg

SEQ ID NO: 32226 - DNA, 22 bp, Artificial Sequence
  primer
ttgtatgggatgctatgggaag

SEQ ID NO: 32227 - DNA, 38 bp, Artificial Sequence
  primer
gtaaaacgacggccagtttcctggaaaggaattggaag

SEQ ID NO: 32228 - DNA, 21 bp, Artificial Sequence
  primer
aaattaatgaggtgcttgcgg

SEQ ID NO: 32229 - DNA, 22 bp, Artificial Sequence
  primer
ggcgatagatagttcaggcaag

SEQ ID NO: 32230 - DNA, 23 bp, Artificial Sequence
  primer
cagtcgtgctgtagcctttagtc

SEQ ID NO: 32231 - DNA, 37 bp, Artificial Sequence
  primer
gtaaaacgacggccagtaaagcgactggaaattgcac

SEQ ID NO: 32232 - DNA, 25 bp, Artificial Sequence
  primer
aaccataacatttatgttgtttcca

SEQ ID NO: 32233 - DNA, 39 bp, Artificial Sequence
  primer
gtaaaacgacggccagtgctgtcatcattccgaaagaac

SEQ ID NO: 32234 - DNA, 21 bp, Artificial Sequence
  primer
tgtgctaccctaaatgttggc

SEQ ID NO: 32235 - DNA, 38 bp, Artificial Sequence
  primer
gtaaaacgacggccagttcaccctccactatacctggc

SEQ ID NO: 32236 - DNA, 21 bp, Artificial Sequence
  primer
gtgtggagatagcatgcttgg

SEQ ID NO: 32237 - DNA, 21 bp, Artificial Sequence
  primer
atcctttccttccctccactc

SEQ ID NO: 32238 - DNA, 38 bp, Artificial Sequence
  primer
gtaaaacgacggccagtggtttaaatttgagcgtgcag

SEQ ID NO: 32239 - DNA, 37 bp, Artificial Sequence
  primer
gtaaaacgacggccagtcatggtggcacttgatctgg

SEQ ID NO: 32240 - DNA, 38 bp, Artificial Sequence
  primer
gtaaaacgacggccagtatggagagccgtttagtgagg

SEQ ID NO: 32241 - DNA, 21 bp, Artificial Sequence
  primer
gggtgattgataaccattggg

SEQ ID NO: 32242 - DNA, 21 bp, Artificial Sequence
  primer
gtctctgagaacaagccagcc

SEQ ID NO: 32243 - DNA, 21 bp, Artificial Sequence
  primer
accgtctctgctactcttggc

SEQ ID NO: 32244 - DNA, 37 bp, Artificial Sequence
  primer
gtaaaacgacggccagtaatgtttggcacagagctgg

SEQ ID NO: 32245 - DNA, 21 bp, Artificial Sequence
  primer
atggtcccatcttctggagag

SEQ ID NO: 32246 - DNA, 36 bp, Artificial Sequence
  primer
gtaaaacgacggccagttggagcataacccaggagg

SEQ ID NO: 32247 - DNA, 38 bp, Artificial Sequence
  primer
gtaaaacgacggccagttagggaaattgttgggctgtc

SEQ ID NO: 32248 - DNA, 38 bp, Artificial Sequence
  primer
gtaaaacgacggccagtgggtgacctctttgactcctg

SEQ ID NO: 32249 - DNA, 38 bp, Artificial Sequence
  primer
gtaaaacgacggccagtattggaggctgagagccatag

SEQ ID NO: 32250 - DNA, 21 bp, Artificial Sequence
  primer
agtccagcacacaagcagatg

SEQ ID NO: 32251 - DNA, 38 bp, Artificial Sequence
  primer
gtaaaacgacggccagtacaaagatgtgctgtgcttcc

SEQ ID NO: 32252 - DNA, 19 bp, Artificial Sequence
  primer
atggatgccaggtcctcag

SEQ ID NO: 32253 - DNA, 37 bp, Artificial Sequence
  primer
gtaaaacgacggccagtgtcatggctgtgtgatgtgc

SEQ ID NO: 32254 - DNA, 39 bp, Artificial Sequence
  primer
gtaaaacgacggccagtcctgatcttactgatgcaaggc

SEQ ID NO: 32255 - DNA, 22 bp, Artificial Sequence
  primer
gcaggaagtaaacaaggtgtgg

SEQ ID NO: 32256 - DNA, 38 bp, Artificial Sequence
  primer
gtaaaacgacggccagtgatctgcaggagtccttgacc

SEQ ID NO: 32257 - DNA, 21 bp, Artificial Sequence
  primer
ctttggcttccctaccctctc

SEQ ID NO: 32258 - DNA, 21 bp, Artificial Sequence
  primer
atggttctgacccacttcacc

SEQ ID NO: 32259 - DNA, 21 bp, Artificial Sequence
  primer
ttcccagctaccagtcgtctc

SEQ ID NO: 32260 - DNA, 37 bp, Artificial Sequence
  primer
gtaaaacgacggccagtctggtctgtgctcagggttg

SEQ ID NO: 32261 - DNA, 21 bp, Artificial Sequence
  primer
agatcacccagtcagcaaatg

SEQ ID NO: 32262 - DNA, 38 bp, Artificial Sequence
  primer
gtaaaacgacggccagtaacctagctcagtgtcccagc

SEQ ID NO: 32263 - DNA, 38 bp, Artificial Sequence
  primer
gtaaaacgacggccagtatgacagctgtgtctgggaat

SEQ ID NO: 32264 - DNA, 37 bp, Artificial Sequence
  primer
gtaaaacgacggccagtctcacctgtctctggcctcc

SEQ ID NO: 32265 - DNA, 21 bp, Artificial Sequence
  primer
tcggagaagctgctctggtag

SEQ ID NO: 32266 - DNA, 20 bp, Artificial Sequence
  primer
gaggaggatcctgttcagcc

SEQ ID NO: 32267 - DNA, 38 bp, Artificial Sequence
  primer
gtaaaacgacggccagttccagtgtttggtgaatagcc

SEQ ID NO: 32268 - DNA, 36 bp, Artificial Sequence
  primer
gtaaaacgacggccagtcctctttgggcagtgatgc

SEQ ID NO: 32269 - DNA, 22 bp, Artificial Sequence
  primer
cctaaattcatcttggcagcac

SEQ ID NO: 32270 - DNA, 40 bp, Artificial Sequence
  primer
gtaaaacgacggccagtagtacaaggagaaatgagggtcc

SEQ ID NO: 32271 - DNA, 41 bp, Artificial Sequence
  primer
gtaaaacgacggccagtaagatcttccacaaataccgagtt

SEQ ID NO: 32272 - DNA, 38 bp, Artificial Sequence
  primer
gtaaaacgacggccagtacatggccattaccagactcc

SEQ ID NO: 32273 - DNA, 21 bp, Artificial Sequence
  primer
tcccatataacaggtgcaggg

SEQ ID NO: 32274 - DNA, 21 bp, Artificial Sequence
  primer
ccattgcaattgagcaagttt

SEQ ID NO: 32275 - DNA, 37 bp, Artificial Sequence
  primer
gtaaaacgacggccagttgactgcctgctttcgtttc

SEQ ID NO: 32276 - DNA, 39 bp, Artificial Sequence
  primer
gtaaaacgacggccagtgggtttgtatggcaagttaatg

SEQ ID NO: 32277 - DNA, 18 bp, Artificial Sequence
  primer
aaattgtgccgtgtgtgc

SEQ ID NO: 32278 - DNA, 21 bp, Artificial Sequence
  primer
gggcatagctctactcaaggg

SEQ ID NO: 32279 - DNA, 42 bp, Artificial Sequence
  primer
gtaaaacgacggccagttgcctctgttactacttgagaatgg

SEQ ID NO: 32280 - DNA, 21 bp, Artificial Sequence
  primer
tctcagtttatgcggtggttg

SEQ ID NO: 32281 - DNA, 41 bp, Artificial Sequence
  primer
gtaaaacgacggccagttcatctgctacaatcatctcactg

SEQ ID NO: 32282 - DNA, 38 bp, Artificial Sequence
  primer
gtaaaacgacggccagtcagggctgggtgatttacagt

SEQ ID NO: 32283 - DNA, 38 bp, Artificial Sequence
  primer
gtaaaacgacggccagtttgccatttaacagatttggc

SEQ ID NO: 32284 - DNA, 38 bp, Artificial Sequence
  primer
gtaaaacgacggccagtgagggtaggtgggtcacagac

SEQ ID NO: 32285 - DNA, 39 bp, Artificial Sequence
  primer
gtaaaacgacggccagtggaaatgaaaggttctacctgg

SEQ ID NO: 32286 - DNA, 21 bp, Artificial Sequence
  primer
tttgcctggtccttattccac

SEQ ID NO: 32287 - DNA, 21 bp, Artificial Sequence
  primer
tgctctgatttatggcagtcg

SEQ ID NO: 32288 - DNA, 39 bp, Artificial Sequence
  primer
gtaaaacgacggccagttggatccaatgcacttgatatg

SEQ ID NO: 32289 - DNA, 21 bp, Artificial Sequence
  primer
gtgtaagtgtgagggcaccag

SEQ ID NO: 32290 - DNA, 39 bp, Artificial Sequence
  primer
gtaaaacgacggccagttggtaagtgtctgagtcgttgg

SEQ ID NO: 32291 - DNA, 38 bp, Artificial Sequence
  primer
gtaaaacgacggccagtcatttgcaagattgtaggccc

SEQ ID NO: 32292 - DNA, 38 bp, Artificial Sequence
  primer
gtaaaacgacggccagtcaccagcgagttgagtaccac

SEQ ID NO: 32293 - DNA, 38 bp, Artificial Sequence
  primer
gtaaaacgacggccagtcctgccaggagcctatagatg

SEQ ID NO: 32294 - DNA, 38 bp, Artificial Sequence
  primer
gtaaaacgacggccagtctattcccagcagcacagttc

SEQ ID NO: 32295 - DNA, 38 bp, Artificial Sequence; identical to SEQ ID NO: 32283
  primer

SEQ ID NO: 32296 - DNA, 21 bp, Artificial Sequence
  primer
gcagtttgagtgattgggaaa

SEQ ID NO: 32297 - DNA, 21 bp, Artificial Sequence
  primer
ttgtggctagaaatggcagtg

SEQ ID NO: 32298 - DNA, 18 bp, Artificial Sequence
  primer
gaacgcatgccactgtgc

SEQ ID NO: 32299 - DNA, 38 bp, Artificial Sequence
  primer
gtaaaacgacggccagtgatggacaggtgggagagaac

SEQ ID NO: 32300 - DNA, 20 bp, Artificial Sequence
  primer
ctaagggcactgtgtgggac

SEQ ID NO: 32301 - DNA, 38 bp, Artificial Sequence
  primer
gtaaaacgacggccagtacttgcaggtagcctcagtcc

SEQ ID NO: 32302 - DNA, 37 bp, Artificial Sequence
  primer
gtaaaacgacggccagtgagaaacgcacgtaaggcag

SEQ ID NO: 32303 - DNA, 38 bp, Artificial Sequence
  primer
gtaaaacgacggccagtgcagcacaagctctaagggtg

SEQ ID NO: 32304 - DNA, 38 bp, Artificial Sequence
  primer
gtaaaacgacggccagtattccaggctactgaaatggc

SEQ ID NO: 32305 - DNA, 38 bp, Artificial Sequence
  primer
gtaaaacgacggccagttgtctgggtctggaacacttg

SEQ ID NO: 32306 - DNA, 25 bp, Artificial Sequence
  primer
gggaactactacccaaagtacacaa

SEQ ID NO: 32307 - DNA, 21 bp, Artificial Sequence
  primer
atgcgtatgcacttgtgtctg

SEQ ID NO: 32308 - DNA, 22 bp, Artificial Sequence
  primer
atcagtattagtgggatttgcc

SEQ ID NO: 32309 - DNA, 39 bp, Artificial Sequence
  primer
gtaaaacgacggccagttgctaatccaaatgtcacctcc

SEQ ID NO: 32310 - DNA, 18 bp, Artificial Sequence
  primer
tgatccaccacacccagc

SEQ ID NO: 32311 - DNA, 38 bp, Artificial Sequence
  primer
gtaaaacgacggccagtgaccaagcagtgacgatttcc

SEQ ID NO: 32312 - DNA, 37 bp, Artificial Sequence
  primer
gtaaaacgacggccagtctgagcagtgaggaaatggc

SEQ ID NO: 32313 - DNA, 44 bp, Artificial Sequence
  primer
gtaaaacgacggccagtgagaggagatagagtcacagatttacc

SEQ ID NO: 32314 - DNA, 22 bp, Artificial Sequence
  primer
ttaggcctgtcacagtcatctg

SEQ ID NO: 32315 - DNA, 38 bp, Artificial Sequence
  primer
gtaaaacgacggccagtagtgtgttggtgtgttctccg

SEQ ID NO: 32316 - DNA, 22 bp, Artificial Sequence
  primer
cccgctagaaatgaaattgtcc

SEQ ID NO: 32317 - DNA, 38 bp, Artificial Sequence
  primer
gtaaaacgacggccagttgagagagaggaaccaggcag

SEQ ID NO: 32318 - DNA, 39 bp, Artificial Sequence
  primer
gtaaaacgacggccagtgattcctgctgtcatcctcttc

SEQ ID NO: 32319 - DNA, 26 bp, Artificial Sequence
  primer
cacacatatttctggacaacctttac

SEQ ID NO: 32320 - DNA, 38 bp, Artificial Sequence
  primer
gtaaaacgacggccagtaccgagctctttcctcaacac

SEQ ID NO: 32321 - DNA, 38 bp, Artificial Sequence
  primer
gtaaaacgacggccagtcatggcaatggttagagaccc

SEQ ID NO: 32322 - DNA, 39 bp, Artificial Sequence
  primer
gtaaaacgacggccagtccttactgtcaccacccatttc

SEQ ID NO: 32323 - DNA, 38 bp, Artificial Sequence
  primer
gtaaaacgacggccagtgaagggagccttagggaactg

SEQ ID NO: 32324 - DNA, 38 bp, Artificial Sequence
  primer
gtaaaacgacggccagtcttactcccaggaggtccaag

SEQ ID NO: 32325 - DNA, 20 bp, Artificial Sequence
  primer
agcccttcaccataacctgg

SEQ ID NO: 32326 - DNA, 36 bp, Artificial Sequence
  primer
gtaaaacgacggccagtctcctcaggcttcactggg

SEQ ID NO: 32327 - DNA, 38 bp, Artificial Sequence
  primer
gtaaaacgacggccagttggtattcagggagtgcagac

SEQ ID NO: 32328 - DNA, 22 bp, Artificial Sequence
  primer
aatgagactttggttgtttggg

SEQ ID NO: 32329 - DNA, 38 bp, Artificial Sequence
  primer
gtaaaacgacggccagtaaacatcaggtttgtccaggc

SEQ ID NO: 32330 - DNA, 21 bp, Artificial Sequence
  primer
agttgcatctcccttctcagc

SEQ ID NO: 32331 - DNA, 38 bp, Artificial Sequence
  primer
gtaaaacgacggccagtgttgaaacagggtctcttggc

SEQ ID NO: 32332 - DNA, 21 bp, Artificial Sequence
  primer
tgtttatcttgccagtgctcc

SEQ ID NO: 32333 - DNA, 21 bp, Artificial Sequence
  primer
tgtgaggtcctgtctcactcc

SEQ ID NO: 32334 - DNA, 43 bp, Artificial Sequence
  primer
gtaaaacgacggccagtcacttggatttcagtcttagcatttg

SEQ ID NO: 32335 - DNA, 38 bp, Artificial Sequence
  primer
gtaaaacgacggccagttgaccctaacctggtggtagc

SEQ ID NO: 32336 - DNA, 21 bp, Artificial Sequence
  primer
agctaagctccctgccataag

SEQ ID NO: 32337 - DNA, 38 bp, Artificial Sequence
  primer
gtaaaacgacggccagtgagttgctcatgaggtcaggg

SEQ ID NO: 32338 - DNA, 38 bp, Artificial Sequence
  primer
gtaaaacgacggccagtgaggcaacaggcttagagagg

SEQ ID NO: 32339 - DNA, 20 bp, Artificial Sequence
  primer
cccttcccatttgctaggag

SEQ ID NO: 32340 - DNA, 21 bp, Artificial Sequence
  primer
ggaagtgagaaggtgaggtgg

SEQ ID NO: 32341 - DNA, 38 bp, Artificial Sequence
  primer
gtaaaacgacggccagtaaacctcgaaggaccctgaag

SEQ ID NO: 32342 - DNA, 21 bp, Artificial Sequence
  primer
gcatcatctgcaggaagtacc

SEQ ID NO: 32343 - DNA, 38 bp, Artificial Sequence
  primer
gtaaaacgacggccagtcagccctgatcagagtttgta

SEQ ID NO: 32344 - DNA, 20 bp, Artificial Sequence
  primer
gaaggacagggctgtgtctg

SEQ ID NO: 32345 - DNA, 21 bp, Artificial Sequence
  primer
ccaccacagaagctgagaatg

SEQ ID NO: 32346 - DNA, 38 bp, Artificial Sequence
  primer
gtaaaacgacggccagtccttccttccctttgaatctg

SEQ ID NO: 32347 - DNA, 38 bp, Artificial Sequence
  primer
gtaaaacgacggccagtgaaagagaagggtcggtgttg

SEQ ID NO: 32348 - DNA, 21 bp, Artificial Sequence
  primer
cccagaccctagctgaaagag

SEQ ID NO: 32349 - DNA, 21 bp, Artificial Sequence
  primer
cgagagcagaagctgactgtg

SEQ ID NO: 32350 - DNA, 21 bp, Artificial Sequence
  primer
gaaacccagagagtggctttg

SEQ ID NO: 32351 - DNA, 21 bp, Artificial Sequence
  primer
caggttctcgaggatcagagg

SEQ ID NO: 32352 - DNA, 37 bp, Artificial Sequence
  primer
gtaaaacgacggccagtactggatgaggcccagagag

SEQ ID NO: 32353 - DNA, 21 bp, Artificial Sequence
  primer
agcttcaggaccacaaggaac

SEQ ID NO: 32354 - DNA, 19 bp, Artificial Sequence
  primer
gcagaattgagccgcagtc

SEQ ID NO: 32355 - DNA, 21 bp, Artificial Sequence
  primer
gaccaggatctccgataccag

SEQ ID NO: 32356 - DNA, 38 bp, Artificial Sequence
  primer
gtaaaacgacggccagtccaagagaagcagaatctggg

SEQ ID NO: 32357 - DNA, 38 bp, Artificial Sequence
  primer
gtaaaacgacggccagtaacattgaaccgctgtttgtg

SEQ ID NO: 32358 - DNA, 37 bp, Artificial Sequence
  primer
gtaaaacgacggccagtacctgccagattggtctgtg

SEQ ID NO: 32359 - DNA, 38 bp, Artificial Sequence
  primer
gtaaaacgacggccagttcttcccatggttactgtccc

SEQ ID NO: 32360 - DNA, 38 bp, Artificial Sequence
  primer
gtaaaacgacggccagttgcaaggaaacttgcagaaac

SEQ ID NO: 32361 - DNA, 20 bp, Artificial Sequence
  primer
agagcaggaagagctgggac

SEQ ID NO: 32362 - DNA, 38 bp, Artificial Sequence
  primer
gtaaaacgacggccagtacagtttgtgccgactgctat

SEQ ID NO: 32363 - DNA, 41 bp, Artificial Sequence
  primer
gtaaaacgacggccagtttgtcacaatctggaagtgttctt

SEQ ID NO: 32364 - DNA, 38 bp, Artificial Sequence
  primer
gtaaaacgacggccagtcattgctggcactaaggatca

SEQ ID NO: 32365 - DNA, 26 bp, Artificial Sequence
  primer
tgaattccatttgttcattaaactgt

SEQ ID NO: 32366 - DNA, 39 bp, Artificial Sequence
  primer
gtaaaacgacggccagtttgcttgttgttgactcatttg

SEQ ID NO: 32367 - DNA, 18 bp, Artificial Sequence
  primer
ctcggtaggctgaggtgg

SEQ ID NO: 32368 - DNA, 24 bp, Artificial Sequence
  primer
ttggttctactgagccaaataatg

SEQ ID NO: 32369 - DNA, 39 bp, Artificial Sequence
  primer
gtaaaacgacggccagtaggtgaggctttaagtgtggtg

SEQ ID NO: 32370 - DNA, 23 bp, Artificial Sequence
  primer
ttctagaggacacttatggctgc

SEQ ID NO: 32371 - DNA, 26 bp, Artificial Sequence
  primer
cctataattccaggatgacttcaatg

SEQ ID NO: 32372 - DNA, 41 bp, Artificial Sequence
  primer
gtaaaacgacggccagtcagagattatgccagtagttgctc

SEQ ID NO: 32373 - DNA, 21 bp, Artificial Sequence
  primer
aaaggcatacttgtacccaca

SEQ ID NO: 32374 - DNA, 38 bp, Artificial Sequence
  primer
gtaaaacgacggccagtccatgttgggatcactgattt

SEQ ID NO: 32375 - DNA, 22 bp, Artificial Sequence
  primer
gcatattcagagtcactttgcc

SEQ ID NO: 32376 - DNA, 40 bp, Artificial Sequence
  primer
gtaaaacgacggccagtcctcattcttcagtgatactggc

SEQ ID NO: 32377 - DNA, 23 bp, Artificial Sequence
  primer
tttgaaagaggcaagtgtggtag

SEQ ID NO: 32378 - DNA, 42 bp, Artificial Sequence
  primer
gtaaaacgacggccagtttggaaacaattattctacctttgc

SEQ ID NO: 32379 - DNA, 21 bp, Artificial Sequence
  primer
tgttgggagagggagaaagtg

SEQ ID NO: 32380 - DNA, 42 bp, Artificial Sequence
  primer
gtaaaacgacggccagtcatttaactcaactattcacgttgg

SEQ ID NO: 32381 - DNA, 21 bp, Artificial Sequence
  primer
attatcatgcttggcaatgaa

SEQ ID NO: 32382 - DNA, 20 bp, Artificial Sequence
  primer
tggcagggcattcacatatc

SEQ ID NO: 32383 - DNA, 23 bp, Artificial Sequence
  primer
ctgtgttgcttacagatttggtg

SEQ ID NO: 32384 - DNA, 22 bp, Artificial Sequence
  primer
tttgataactttgttgccttgc

SEQ ID NO: 32385 - DNA, 23 bp, Artificial Sequence
  primer
ggatcaagtccaacaagatgcta

SEQ ID NO: 32386 - DNA, 44 bp, Artificial Sequence
  primer
gtaaaacgacggccagttgaaagaaattatgttaatgcatgttt

SEQ ID NO: 32387 - DNA, 24 bp, Artificial Sequence
  primer
ggacacagccaaaccatatcagta

SEQ ID NO: 32388 - DNA, 21 bp, Artificial Sequence
  primer
tccaggtctgatggaattcag

SEQ ID NO: 32389 - DNA, 24 bp, Artificial Sequence
  primer
gtgaactaaggccaagtaaagagg

SEQ ID NO: 32390 - DNA, 23 bp, Artificial Sequence
  primer
gcaaacatgataacctctgatgg

SEQ ID NO: 32391 - DNA, 21 bp, Artificial Sequence
  primer
gagtgaggctactgctcttgg

SEQ ID NO: 32392 - DNA, 41 bp, Artificial Sequence
  primer
gtaaaacgacggccagttcattatcatcaatggaggaatgt

SEQ ID NO: 32393 - DNA, 23 bp, Artificial Sequence
  primer
gaaatccttacttcacatctgcc

SEQ ID NO: 32394 - DNA, 22 bp, Artificial Sequence
  primer
tgaaatactaaatgcggcacaa

SEQ ID NO: 32395 - DNA, 39 bp, Artificial Sequence
  primer
gtaaaacgacggccagtaagcatgcaaataactgctgtc

SEQ ID NO: 32396 - DNA, 23 bp, Artificial Sequence
  primer
tcaacttgaacattgtctgaggg

SEQ ID NO: 32397 - DNA, 26 bp, Artificial Sequence
  primer
tttaagccttcattgcctattaaatc

SEQ ID NO: 32398 - DNA, 20 bp, Artificial Sequence
  primer
cacttgaatctgggaggcag

SEQ ID NO: 32399 - DNA, 24 bp, Artificial Sequence
  primer
ttcaatgtggaaagaattgagtgt

SEQ ID NO: 32400 - DNA, 21 bp, Artificial Sequence
  primer
aaatgcagaagcagctaccag

SEQ ID NO: 32401 - DNA, 36 bp, Artificial Sequence
  primer
gtaaaacgacggccagttccaagcgtttcgtaaggg

SEQ ID NO: 32402 - DNA, 43 bp, Artificial Sequence
  primer
gtaaaacgacggccagttttcctgtgatctcgttgtaaattag

SEQ ID NO: 32403 - DNA, 22 bp, Artificial Sequence
  primer
catttaaaggaggccttcagtg

SEQ ID NO: 32404 - DNA, 25 bp, Artificial Sequence
  primer
aaccatactacctttgttctgcaag

SEQ ID NO: 32405 - DNA, 22 bp, Artificial Sequence
  primer
tggtttggcaatacagttgaag

SEQ ID NO: 32406 - DNA, 41 bp, Artificial Sequence
  primer
gtaaaacgacggccagtgcctgttgtattgttggtacttcg

SEQ ID NO: 32407 - DNA, 26 bp, Artificial Sequence
  primer
tcctgacacagatatgtatgttgttg

SEQ ID NO: 32408 - DNA, 22 bp, Artificial Sequence
  primer
ttattattggccatattgctgc

SEQ ID NO: 32409 - DNA, 21 bp, Artificial Sequence
  primer
tgggccatctgttaattaggg

SEQ ID NO: 32410 - DNA, 38 bp, Artificial Sequence
  primer
gtaaaacgacggccagtaggacaatgccagttatgcag

SEQ ID NO: 32411 - DNA, 37 bp, Artificial Sequence
  primer
gtaaaacgacggccagtacttgcaaatgccatcaggt

SEQ ID NO: 32412 - DNA, 40 bp, Artificial Sequence
  primer
gtaaaacgacggccagtttcagccataacatccagtgttt

SEQ ID NO: 32413 - DNA, 22 bp, Artificial Sequence
  primer
gaccattcaggaatactttggc

SEQ ID NO: 32414 - DNA, 42 bp, Artificial Sequence
  primer
gtaaaacgacggccagtttctttgactgcttctacagtcatc

SEQ ID NO: 32415 - DNA, 22 bp, Artificial Sequence
  primer
gctcagcaatcctattctttgc

SEQ ID NO: 32416 - DNA, 18 bp, Artificial Sequence
  primer
agcctgggcgagagtgag

SEQ ID NO: 32417 - DNA, 43 bp, Artificial Sequence
  primer
gtaaaacgacggccagtagtttggaaatctaacatgttctcag

SEQ ID NO: 32418 - DNA, 38 bp, Artificial Sequence
  primer
gtaaaacgacggccagtccagaggcacagtatgtgagg

SEQ ID NO: 32419 - DNA, 21 bp, Artificial Sequence
  primer
cactcccagcctctcaattct

SEQ ID NO: 32420 - DNA, 21 bp, Artificial Sequence
  primer
gtctgacttcctggcttctcg

SEQ ID NO: 32421 - DNA, 38 bp, Artificial Sequence
  primer
gtaaaacgacggccagtggccaaatcccagttaagaag

SEQ ID NO: 32422 - DNA, 22 bp, Artificial Sequence
  primer
tgacgttgggacaacagtttac

SEQ ID NO: 32423 - DNA, 42 bp, Artificial Sequence
  primer
gtaaaacgacggccagtccttcagtacagatatgcaacttgg

SEQ ID NO: 32424 - DNA, 21 bp, Artificial Sequence
  primer
cccattcatgttcattcacct

SEQ ID NO: 32425 - DNA, 39 bp, Artificial Sequence
  primer
gtaaaacgacggccagtttccaaccagcagtatcacaga

SEQ ID NO: 32426 - DNA, 45 bp, Artificial Sequence
  primer
gtaaaacgacggccagtgctattaagcaaatttcctacatttctg

SEQ ID NO: 32427 - DNA, 38 bp, Artificial Sequence
  primer
gtaaaacgacggccagtatttgggtcagaaacggagag

SEQ ID NO: 32428 - DNA, 21 bp, Artificial Sequence
  primer
attgccctgcaagagtagtgg

SEQ ID NO: 32429 - DNA, 24 bp, Artificial Sequence
  primer
tgcaacaatttgtgcttatttaca

SEQ ID NO: 32430 - DNA, 21 bp, Artificial Sequence
  primer
tgctattgatgatgcatggct

SEQ ID NO: 32431 - DNA, 38 bp, Artificial Sequence
  primer
gtaaaacgacggccagttcacttctggttccaagcatt

SEQ ID NO: 32432 - DNA, 41 bp, Artificial Sequence
  primer
gtaaaacgacggccagttgaagttcttgaatgaaacagctc

SEQ ID NO: 32433 - DNA, 21 bp, Artificial Sequence
  primer
agaattgttgggacaaggagg

SEQ ID NO: 32434 - DNA, 25 bp, Artificial Sequence
  primer
tggtgaataagacaaagttctggtc

SEQ ID NO: 32435 - DNA, 38 bp, Artificial Sequence
  primer
gtaaaacgacggccagtaaatctggatgcctcaccaac

SEQ ID NO: 32436 - DNA, 38 bp, Artificial Sequence
  primer
gtaaaacgacggccagtaaatggccagtaaactccaaa

SEQ ID NO: 32437 - DNA, 22 bp, Artificial Sequence
  primer
ggtggctggatcattgacttag

SEQ ID NO: 32438 - DNA, 21 bp, Artificial Sequence
  primer
attgcatgagccaattcctta

SEQ ID NO: 32439 - DNA, 21 bp, Artificial Sequence
  primer
gcctgtgtttacctggagaaa

SEQ ID NO: 32440 - DNA, 23 bp, Artificial Sequence
  primer
tgaacggtcaccttctaatgttt

SEQ ID NO: 32441 - DNA, 22 bp, Artificial Sequence
  primer
aacaatgctgtgagaaacctcc

SEQ ID NO: 32442 - DNA, 21 bp, Artificial Sequence
  primer
agtctgggtgacagagcaaga

SEQ ID NO: 32443 - DNA, 25 bp, Artificial Sequence
  primer
ccagtattattgcctttatgtttgg

SEQ ID NO: 32444 - DNA, 35 bp, Artificial Sequence
  primer
gtaaaacgacggccagtcaggctctcggttctgcc

SEQ ID NO: 32445 - DNA, 38 bp, Artificial Sequence
  primer
gtaaaacgacggccagtctggactttacaaggaagggc

SEQ ID NO: 32446 - DNA, 38 bp, Artificial Sequence
  primer
gtaaaacgacggccagtttggttggtcagtgtgtgttg

SEQ ID NO: 32447 - DNA, 21 bp, Artificial Sequence
  primer
agcattccggtgctaggttag

SEQ ID NO: 32448 - DNA, 36 bp, Artificial Sequence
  primer
gtaaaacgacggccagtttccttctcctggtctgcg

SEQ ID NO: 32449 - DNA, 38 bp, Artificial Sequence
  primer
gtaaaacgacggccagtttcatttcagtgtcacccagc

SEQ ID NO: 32450 - DNA, 21 bp, Artificial Sequence
  primer
cctttgtgcaggtgtatggat

SEQ ID NO: 32451 - DNA, 37 bp, Artificial Sequence
  primer
gtaaaacgacggccagtcacctggctaagcctcactg

SEQ ID NO: 32452 - DNA, 37 bp, Artificial Sequence
  primer
gtaaaacgacggccagtccctctccctacctgtcgtc

SEQ ID NO: 32453 - DNA, 38 bp, Artificial Sequence
  primer
gtaaaacgacggccagttttcacatcgtgactcccaag

SEQ ID NO: 32454 - DNA, 21 bp, Artificial Sequence
  primer
gtagaaacagcacagggaggg

SEQ ID NO: 32455 - DNA, 38 bp, Artificial Sequence
  primer
gtaaaacgacggccagtagataggtctgtgtgcagggc

SEQ ID NO: 32456 - DNA, 21 bp, Artificial Sequence
  primer
ttaggtaagcaccagccacaa

SEQ ID NO: 32457 - DNA, 21 bp, Artificial Sequence
  primer
ccaactagctttccaacctgc

SEQ ID NO: 32458 - DNA, 42 bp, Artificial Sequence
  primer
gtaaaacgacggccagttgagagaagattatgcatttacagc

SEQ ID NO: 32459 - DNA, 21 bp, Artificial Sequence
  primer
tcagcccaacttcaatgagtc

SEQ ID NO: 32460 - DNA, 38 bp, Artificial Sequence
  primer
gtaaaacgacggccagttgtaattggagggaatggaaa

SEQ ID NO: 32461 - DNA, 38 bp, Artificial Sequence
  primer
gtaaaacgacggccagtctatcaggcaccatgaggttc

SEQ ID NO: 32462 - DNA, 21 bp, Artificial Sequence
  primer
gacgcatttcatattgttggg

SEQ ID NO: 32463 - DNA, 40 bp, Artificial Sequence
  primer
gtaaaacgacggccagttggaatggaaggtgaatctgtag

SEQ ID NO: 32464 - DNA, 37 bp, Artificial Sequence
  primer
gtaaaacgacggccagttctgcctggctactgaccac

SEQ ID NO: 32465 - DNA, 21 bp, Artificial Sequence
  primer
cctctaggaaagaccacacgg

SEQ ID NO: 32466 - DNA, 41 bp, Artificial Sequence
  primer
gtaaaacgacggccagtagtccatagcttctgcattatgtg

SEQ ID NO: 32467 - DNA, 35 bp, Artificial Sequence
  primer
gtaaaacgacggccagtctacccacgcctcctcct

SEQ ID NO: 32468 - DNA, 18 bp, Artificial Sequence
  primer
gcacaccaccacacccag

SEQ ID NO: 32469 - DNA, 39 bp, Artificial Sequence
  primer
gtaaaacgacggccagttttggtgcatattcacttgagg

SEQ ID NO: 32470 - DNA, 38 bp, Artificial Sequence
  primer
gtaaaacgacggccagttgtatagcctttgcccagttg

SEQ ID NO: 32471 - DNA, 38 bp, Artificial Sequence
  primer
gtaaaacgacggccagtttcatgttcacgttccctgag

SEQ ID NO: 32472 - DNA, 38 bp, Artificial Sequence
  primer
gtaaaacgacggccagtacttctagatgcctgccaagg

SEQ ID NO: 32473 - DNA, 20 bp, Artificial Sequence
  primer
cactcactgaattgggaggc

SEQ ID NO: 32474 - DNA, 21 bp, Artificial Sequence
  primer
ttgcaaagtgctattgaaggg

SEQ ID NO: 32475 - DNA, 20 bp, Artificial Sequence
  primer
ccactgccttcaatggtgac

SEQ ID NO: 32476 - DNA, 38 bp, Artificial Sequence
  primer
gtaaaacgacggccagtgcttctcctcatgtccaaacc

SEQ ID NO: 32477 - DNA, 38 bp, Artificial Sequence
  primer
gtaaaacgacggccagttgctaaatgcatgagcaggtg

SEQ ID NO: 32478 - DNA, 36 bp, Artificial Sequence
  primer
gtaaaacgacggccagtcacaagcagtcgcatcctc

SEQ ID NO: 32479 - DNA, 21 bp, Artificial Sequence
  primer
agtgaattattccacgcccag

SEQ ID NO: 32480 - DNA, 39 bp, Artificial Sequence
  primer
gtaaaacgacggccagtcccattggttaacttgtctgtg

SEQ ID NO: 32481 - DNA, 41 bp, Artificial Sequence
  primer
gtaaaacgacggccagtttgtgttgtcttacccattgacac

SEQ ID NO: 32482 - DNA, 18 bp, Artificial Sequence
  primer
agggtgctggactgggtc

SEQ ID NO: 32483 - DNA, 21 bp, Artificial Sequence
  primer
ccctttgctcactttctaccc

SEQ ID NO: 32484 - DNA, 25 bp, Artificial Sequence
  primer
gcctaatattcacaaagttgcctct

SEQ ID NO: 32485 - DNA, 24 bp, Artificial Sequence
  primer
tcaggccagtaacacttagtcctc

SEQ ID NO: 32486 - DNA, 40 bp, Artificial Sequence
  primer
gtaaaacgacggccagtggtacatgtgagcagttatgcac

SEQ ID NO: 32487 - DNA, 44 bp, Artificial Sequence
  primer
gtaaaacgacggccagttttgatgtgcatctatactgtgaataa

SEQ ID NO: 32488 - DNA, 44 bp, Artificial Sequence
  primer
gtaaaacgacggccagtttctcctataagccaataaatatgctc

SEQ ID NO: 32489 - DNA, 21 bp, Artificial Sequence
  primer
gctttggtggaagaactttgg

SEQ ID NO: 32490 - DNA, 29 bp, Artificial Sequence
  primer
aagccatattaaagaagggttatagtctt

SEQ ID NO: 32491 - DNA, 38 bp, Artificial Sequence
  primer
gtaaaacgacggccagtgaactgtgccaggttctgttg

SEQ ID NO: 32492 - DNA, 22 bp, Artificial Sequence
  primer
aactcatttgaaagcctgcatc

SEQ ID NO: 32493 - DNA, 38 bp, Artificial Sequence
  primer
gtaaaacgacggccagtgctcagtgaactttgattcgc

SEQ ID NO: 32494 - DNA, 38 bp, Artificial Sequence
  primer
gtaaaacgacggccagtcaatttgtatttggcattggc

SEQ ID NO: 32495 - DNA, 38 bp, Artificial Sequence
  primer
gtaaaacgacggccagtagaggattaggcaattggcag

SEQ ID NO: 32496 - DNA, 38 bp, Artificial Sequence
  primer
gtaaaacgacggccagtttagaaagcggcaaactccac

SEQ ID NO: 32497 - DNA, 38 bp, Artificial Sequence
  primer
gtaaaacgacggccagtatttccaggcttaaacctccc

SEQ ID NO: 32498 - DNA, 21 bp, Artificial Sequence
  primer
gctggtgaactttggatagca

SEQ ID NO: 32499 - DNA, 37 bp, Artificial Sequence
  primer
gtaaaacgacggccagtgctgaagcccagccttattc

SEQ ID NO: 32500 - DNA, 38 bp, Artificial Sequence
  primer
gtaaaacgacggccagtgcctggaatagcgagtgagtc

SEQ ID NO: 32501 - DNA, 38 bp, Artificial Sequence
  primer
gtaaaacgacggccagtgtatcttctgctgctccctgc

SEQ ID NO: 32502 - DNA, 38 bp, Artificial Sequence
  primer
gtaaaacgacggccagtagcaccgcaggtcacatatag

SEQ ID NO: 32503 - DNA, 21 bp, Artificial Sequence
  primer
agtgtcagcctctgcctgaag

SEQ ID NO: 32504 - DNA, 21 bp, Artificial Sequence
  primer
tttcagactgcattggtttgg

SEQ ID NO: 32505 - DNA, 38 bp, Artificial Sequence
  primer
gtaaaacgacggccagtcaccattgaggcaggactttc

SEQ ID NO: 32506 - DNA, 21 bp, Artificial Sequence
  primer
gagctgaagaccttggtagcc

SEQ ID NO: 32507 - DNA, 38 bp, Artificial Sequence
  primer
gtaaaacgacggccagtggcctagagggtttaggtgac

SEQ ID NO: 32508 - DNA, 21 bp, Artificial Sequence
  primer
tttcagactgcattggtttgg

SEQ ID NO: 32509 - DNA, 38 bp, Artificial Sequence
  primer
gtaaaacgacggccagtaagagaggattccctggatcg

SEQ ID NO: 32510 - DNA, 21 bp, Artificial Sequence
  primer
atggcaaggaagcagcaatac

SEQ ID NO: 32511 - DNA, 38 bp, Artificial Sequence
  primer
gtaaaacgacggccagtgagcaggatattgtgggaagg

SEQ ID NO: 32512 - DNA, 38 bp, Artificial Sequence
  primer
gtaaaacgacggccagttagacagaggcaaagcactgg

SEQ ID NO: 32513 - DNA, 38 bp, Artificial Sequence
  primer
gtaaaacgacggccagttggtggtcatcatccagtacc

SEQ ID NO: 32514 - DNA, 38 bp, Artificial Sequence
  primer
gtaaaacgacggccagtgagaatcatctaggcggatgg

SEQ ID NO: 32515 - DNA, 38 bp, Artificial Sequence
  primer
gtaaaacgacggccagtaaactgggaaggagtggaagg

SEQ ID NO: 32516 - DNA, 38 bp, Artificial Sequence
  primer
gtaaaacgacggccagtcaacaacaatgaattcggctg

SEQ ID NO: 32517 - DNA, 35 bp, Artificial Sequence
  primer
gtaaaacgacggccagtagagcctcgcctttgctc

SEQ ID NO: 32518 - DNA, 38 bp, Artificial Sequence
  primer
gtaaaacgacggccagttcctttcctctattcctgccc

SEQ ID NO: 32519 - DNA, 38 bp, Artificial Sequence
  primer
gtaaaacgacggccagtgagcctggtctacagggaaag

SEQ ID NO: 32520 - DNA, 37 bp, Artificial Sequence
  primer
gtaaaacgacggccagtccttgcctgaccagactcag

SEQ ID NO: 32521 - DNA, 38 bp, Artificial Sequence
  primer
gtaaaacgacggccagtgagggtaaactgtgagtgggc

SEQ ID NO: 32522 - DNA, 39 bp, Artificial Sequence
  primer
gtaaaacgacggccagttcacttagagagtgggaaaccc

SEQ ID NO: 32523 - DNA, 38 bp, Artificial Sequence
  primer
gtaaaacgacggccagtaggcactgccctagaacacac

SEQ ID NO: 32524 - DNA, 21 bp, Artificial Sequence
  primer
ggtgaactttgggtagcatcc

SEQ ID NO: 32525 - DNA, 38 bp, Artificial Sequence
  primer
gtaaaacgacggccagtccgcatctgtagtcctgaaag

SEQ ID NO: 32526 - DNA, 38 bp, Artificial Sequence
  primer
gtaaaacgacggccagtgcctggaagagcaagtgagtc

(The sequence listing continues in the following parts.)
